(19) United States
(12) Patent Application Publication
(10) Pub. No.: US 2019/0201553 A1
(43) Pub. Date: Jul. 4, 2019

(54) MATERIALS AND METHODS FOR TREATMENT OF HEMOGLOBINOPATHIES

(71) Applicant: CRISPR Therapeutics AG, Zug (CH)

(72) Inventors: Chad Albert Cowan, Cambridge, MA (US); Ante Sven Lundberg, Cambridge, MA (US); Tirtha Chakraborty, Cambridge, MA (US); Michelle I-ching Lin, Cambridge, MA (US); Bibhu Prasad Mishra, Cambridge, MA (US); Elizabeth Jae-eun Paik, Cambridge, MA (US); Andrew Kernytsky, Cambridge, MA (US); Todd Douglas Borland, Cambridge, MA (US)

(73) Assignee: CRISPR Therapeutics AG, Zug (CH)

(21) Appl. No.: 16/356,373

(22) Filed: Mar. 18, 2019

Related U.S. Application Data
(63) Continuation of application No. 16/094,408.
(60) Provisional application No. 62/429,428, filed on Dec. 2, 2016.
(60) Provisional application No. 62/382,522, filed on Sep. 1, 2016.
(60) Provisional application No. 62/324,024, filed on Apr. 18, 2016.

(51) Int. Cl. A61K 48/00; A61K 31/395; A61P 7/00

(52) U.S. Cl. CPC A61K 48/0066; A61K 48/0058; A61P 7/00; A61K 48/0075; A61K 31/395; A61K 48/0008

(57) ABSTRACT

Materials and methods for treating a patient with a hemoglobinopathy, both ex vivo and in vivo, and materials and methods for deleting, modulating, or inactivating a transcriptional control sequence of a BCL11A gene in a cell by genome editing.

### FIELD

[0001] The present application provides materials and methods for treating patients with hemoglobinopathies, both ex vivo and in vivo. In addition, the present application provides materials and methods for deleting, modulating, or inactivating a transcriptional control sequence of a B-cell lymphoma 11A (BCL11A) gene in a cell by genome editing.

### RELATED APPLICATIONS

[0002] This application claims the benefit of U.S. Provisional Application No. 62/324,024 filed Apr. 18, 2016; U.S. Provisional Application No. 62/382,522 filed Sep. 1, 2016; and U.S. Provisional Application No. 62/429,428 filed Dec. 2, 2016, all of which are incorporated herein by reference in their entirety.

### INCORPORATION BY REFERENCE OF SEQUENCE LISTING

[0003] This application contains a Sequence Listing in computer readable form (filename: 160077PCT Sequence Listing; 14,446,299 bytes—ASCII text file; created Apr. 7, 2017), which is incorporated herein by reference in its entirety and forms part of the disclosure.

### BACKGROUND

[0004] Hemoglobinopathies include anemias of genetic origin, which result in decreased production and/or increased destruction of red blood cells. These disorders also include genetic defects, which result in the production of abnormal hemoglobins with an associated inability to maintain oxygen concentration. Many of these disorders are referred to as β-hemoglobinopathies because of their failure to produce normal β-globin protein in sufficient amounts or failure to produce normal β-globin protein entirely. For example, β-thalassemias result from a partial or complete defect in the expression of the β-globin gene, leading to deficient or absent adult hemogloblin (HbA). Sickle cell anemia results from a point mutation in the β-globin structural gene, leading to the production of an abnormal hemoglobin (HbS) (Atweh, Semin. Hematol. 38(4):367-73 (2001)). Hemoglobinopathies result in a reduction in the oxygen carrying capacity of the blood, which can lead to symptoms such as weariness, dizziness, and shortness of breath, particularly when exercising.

[0005] For patients diagnosed with a hemoglobinopathy, currently only a few symptomatic treatments are available, such as a blood transfusion, to increase blood oxygen levels.

[0006] Genome engineering refers to the strategies and techniques for the targeted, specific modification of the genetic information (genome) of living organisms. Genome engineering is a very active field of research because of the wide range of possible applications, particularly in the areas of human health; the correction of a gene carrying a harmful mutation, for example, or to explore the function of a gene. Early technologies developed to insert a transgene into a living cell were often limited by the random nature of the insertion of the new sequence into the genome. Random insertions into the genome may result in disrupting normal regulation of neighboring genes leading to severe unwanted effects. Furthermore, random integration technologies offer little reproducibility, as there is no guarantee that the sequence would be inserted at the same place in two different cells. Recent genome engineering strategies, such as ZFNs, TALENs, HEs and MegaTALs, enable a specific area of the DNA to be modified, thereby increasing the precision of the correction or insertion compared to early technologies. These newer platforms offer a much larger degree of reproducibility, but still have their limitations.

[0007] Despite efforts from researchers and medical professionals worldwide who have been trying to address hemoglobinopathies, there still remains a critical need for developing safe and effective treatments for hemoglobinopathies.

### SUMMARY

[0008] The present disclosure presents an approach to address the genetic basis of hemoglobinopathies. By using genome engineering tools to create permanent changes to the genome that can delete, modulate, or inactivate a transcriptional control sequence of the BCL11A gene with a single treatment, the resulting therapy may ameliorate the effects of hemoglobinopathies.

[0009] Provided herein are cellular, ex vivo and in vivo methods for creating permanent changes to the genome by deleting, modulating, or inactivating a transcriptional control sequence of the BCL11A gene, which can be used to treat hemoglobinopathies. Also provided herein are components, kits, and compositions for performing such methods. Also provided are cells produced by such methods. Examples of hemoglobinopathies can be sickle cell anemia and thalassemia (α, β, δ, γ, and combinations thereof).

[0010] Provided herein is a method for editing a B-cell lymphoma 11A (BCL11A) gene in a human cell by genome editing, the method comprising the step of introducing into the human cell one or more deoxyribonucleic acid (DNA) endonucleases to effect one or more single-strand breaks (SSBs) or double-strand breaks (DSBs), within or near the BCL11A gene or other DNA sequence that encodes a regulatory element of the BCL11A gene, that results in a permanent deletion, modulation, or inactivation of a transcriptional control sequence of the BCL11A gene. The transcriptional control sequence can be located within a second intron of the BCL11A gene. The transcriptional control sequence can be located within a +58 DNA hypersensitive site (DHS) of the BCL11A gene.

[0011] Also provided herein is an ex vivo method for treating a patient (e.g., a human) with a hemoglobinopathy, the method comprising the steps of: creating a patient specific induced pluripotent stem cell (iPSC); editing within or near a BCL11A gene or other DNA sequence that encodes a regulatory element of the BCL11A gene of the iPSC; differentiating the genome-edited iPSC into a hematopoietic progenitor cell; and implanting the hematopoietic progenitor cell into the patient.

[0012] The step of creating a patient specific induced pluripotent stem cell (iPSC) can comprise: isolating a somatic cell from the patient; and introducing a set of pluripotency-associated genes into the somatic cell to induce the somatic cell to become a pluripotent stem cell. The somatic cell can be a fibroblast. The set of pluripotency-associated genes can be one or more of the genes selected from the group consisting of OCT4, SOX2, KLF4, Lin28, NANOG and cMYC.

[0013] The step of editing within or near a BCL11A gene or other DNA sequence that encodes a regulatory element of the BCL11A gene of the iPSC can comprise introducing into the iPSC one or more deoxyribonucleic acid (DNA) endonucleases to effect one or more single-strand breaks (SSBs) or double-strand breaks (DSBs) within or near the BCL11A gene or other DNA sequence that encodes a regulatory element of the BCL11A gene that results in a permanent deletion, modulation, or inactivation of a transcriptional control sequence of the BCL11A gene.

[0014] The step of differentiating the genome-edited iPSC into a hematopoietic progenitor cell can comprise one or more of the following: treatment with a combination of small molecules, delivery of transcription factors (e.g., master transcription factors), or delivery of mRNA encoding transcription factors (e.g., master transcription factors).

[0015] The step of implanting the hematopoietic progenitor cell into the patient can comprise implanting the hematopoietic progenitor cell into the patient by transplantation, local injection, systemic infusion, or combinations thereof.

[0016] Also provided herein is an ex vivo method for treating a patient (e.g., a human) with a hemoglobinopathy, the method comprising the steps of: isolating a mesenchymal stem cell from the patient; editing within or near a BCL11A gene or other DNA sequence that encodes a regulatory element of the BCL11A gene of the mesenchymal stem cell; differentiating the genome-edited mesenchymal stem cell into a hematopoietic progenitor cell; and implanting the hematopoietic progenitor cell into the patient.

[0017] The mesenchymal stem cell can be isolated from the patient's bone marrow or peripheral blood. The step of isolating a mesenchymal stem cell from the patient can comprise aspiration of bone marrow and isolation of mesenchymal cells using density gradient centrifugation media.

[0018] The step of editing within or near the BCL11A gene or other DNA sequence that encodes a regulatory element of the BCL11A gene of the mesenchymal stem cell can comprise introducing into the mesenchymal stem cell one or more deoxyribonucleic acid (DNA) endonucleases to effect one or more single-strand breaks (SSBs) or double-strand breaks (DSBs) within or near the BCL11A gene or other DNA sequence that encodes a regulatory element of the BCL11A gene that results in a permanent deletion, modulation, or inactivation of a transcriptional control sequence of the BCL11A gene.

[0019] The step of differentiating the genome-edited mesenchymal stem cell into a hematopoietic progenitor cell can comprise one or more of the following: treatment with a combination of small molecules, delivery of transcription factors (e.g., master trascription factors) or delivery of mRNA encoding transcription factors (e.g., master transcription factors).

[0020] The step of implanting the hematopoietic progenitor cell into the patient can comprise implanting the hematopoietic progenitor cell into the patient by transplantation, local injection, systemic infusion, or combinations thereof.

[0021] Also provided herein is an ex vivo method for treating a patient (e.g., a human) with a hemoglobinopathy, the method comprising the steps of: isolating a hematopoietic progenitor cell from the patient; editing within or near a BCL11A gene or other DNA sequence that encodes a regulatory element of the BCL11A gene of the hematopoietic progenitor cell; and implanting the genome-edited hematopoietic progenitor cell into the patient.

[0022] The method can further comprise treating the patient with granulocyte colony stimulating factor (GCSF) prior to the step of isolating a hematopoietic progenitor cell from the patient. The step of treating the patient with granulocyte colony stimulating factor (GCSF) can be performed in combination with Plerixaflor.

[0023] The step of isolating a hematopoietic progenitor cell from the patient can comprise isolating CD34+ cells.

[0024] The step of editing within or near a BCL11A gene or other DNA sequence that encodes a regulatory element of the BCL11A gene of the hematopoietic progenitor cell can comprise introducing into the hematopoietic progenitor cell one or more deoxyribonucleic acid (DNA) endonucleases to effect one or more single-strand breaks (SSBs) or double-strand breaks (DSBs) within or near the BCL11A gene or other DNA sequence that encodes a regulatory element of the BCL11A gene that results in a permanent deletion, modulation, or inactivation of a transcriptional control sequence of the BCL11A gene.

[0025] The step of implanting the genome-edited hematopoietic progenitor cell into the patient can comprise implanting the genome-edited hematopoietic progenitor cell into the patient by transplantation, local injection, systemic infusion, or combinations thereof.

[0026] Also provided herein is an in vivo method for treating a patient (e.g., a human) with a hemoglobinopathy, the method comprising the step of editing a BCL11A gene in a cell of the patient.

[0027] The step of editing a BCL11A gene in a cell of the patient can comprise introducing into the cell one or more deoxyribonucleic acid (DNA) endonucleases to effect one or more single-strand breaks (SSBs) or double-strand breaks (DSBs) within or near the BCL11A gene or other DNA sequence that encodes a regulatory element of the BCL11A gene that results in a permanent deletion, modulation, or inactivation of a transcriptional control of the BCL11A gene. The cell can be a bone marrow cell, a hematopoietic progenitor cell, a CD34+ cell, or combinations thereof.

[0028] The one or more DNA endonucleases can be a Cas1, Cas1B, Cas2, Cas3, Cas4, Cas5, Cas6, Cas7, Cas8, Cas9 (also known as Csn1 and Csx12), Cas100, Csy1, Csy2, Csy3, Cse1, Cse2, Csc1, Csc2, Csa5, Csn2, Csm2, Csm3, Csm4, Csm5, Csm6, Cmr1, Cmr3, Cmr4, Cmr5, Cmr6, Csb1, Csb2, Csb3, Csx17, Csx14, Csx10, Csx16, CsaX, Csx3, Csx1, Csx15, Csf1, Csf2, Csf3, Csf4, or Cpf1 endonuclease; a homolog thereof, a recombination of the naturally occurring molecule thereof, codon-optimized thereof, or modified versions thereof, and combinations thereof.

[0029] The method can comprise introducing into the cell one or more polynucleotides encoding the one or more DNA endonucleases. The method can comprise introducing into the cell one or more ribonucleic acids (RNAs) encoding the one or more DNA endonucleases. The one or more polynucleotides or one or more RNAs can be one or more modified polynucleotides or one or more modified RNAs. The one or more DNA endonucleases can be one or more proteins or polypeptides. The one or more proteins or polypeptides can be flanked at the N-terminus, the C-terminus, or both the N-terminus and C-terminus by one or more nuclear localization signals (NLSs). The one or more proteins or polypeptides can be flanked by two NLSs, one NLS located at the N-terminus and the second NLS located at the C-terminus. The one or more NLSs can be a SV40 NLS.

[0030] The method can further comprise introducing into the cell one or more guide ribonucleic acids (gRNAs). The one or more gRNAs can be single-molecule guide RNA (sgRNAs). The one or more gRNAs or one or more sgRNAs can be one or more modified gRNAs, one or more modified sgRNAs, or combinations thereof. The one or more modified sgRNAs can comprise three 2′-O-methyl-phosphorothioate residues at or near each of its 5′ and 3′ ends. The modified sgRNA can be the nucleic acid sequence of SEQ ID NO: 71,959. The one or more DNA endonucleases can be pre-complexed with one or more gRNAs, one or more sgRNAs, or combinations thereof to form one or more ribonucleoproteins (RNPs). The weight ratio of sgRNA to DNA endonuclease in the RNP can be 1:1. The sgRNA can comprise the nucleic acid sequence of SEQ ID NO: 71,959, the DNA endonuclease can be a S. pyogenes Cas9 comprising a N-terminus SV40 NLS and a C-terminus SV40 NLS, and the weight ratio of sgRNA to DNA endonuclease can be 1:1.

[0031] The method can further comprise introducing into the cell a polynucleotide donor template comprising a wild-type BCL11A gene or cDNA comprising a modified transcriptional control sequence.

[0032] The method can further comprise introducing into the cell one guide ribonucleic acid (gRNA) and a polynucleotide donor template comprising a wild-type BCL11A gene or cDNA comprising a modified transcriptional control sequence. The one or more DNA endonucleases can be one or more Cas9 or Cpf1 endonucleases that effect one single-strand break (SSB) or double-strand break (DSB) at a locus within or near the BCL11A gene or other DNA sequence that encodes a regulatory element of the BCL11A gene that facilitates insertion of a new sequence from the polynucleotide donor template into the chromosomal DNA at the locus that results in a permanent insertion, modulation, or inactivation of the transcriptional control sequence of the chromosomal DNA proximal to the locus. The gRNA can comprise a spacer sequence that is complementary to a segment of the locus. Proximal can mean nucleotides both upstream and downstream of the locus.

[0033] The method can further comprise introducing into the cell one or more guide ribonucleic acid (gRNAs) and a polynucleotide donor template comprising a wild-type BCL11A gene or cDNA comprising a modified transcriptional control sequence. The one or more DNA endonucleases can be one or more Cas9 or Cpf1 endonucleases that effect or create a pair of single-strand breaks (SSBs) and/or double-strand breaks (DSBs), the first break at a 5′ locus and the second break at a 3′ locus, within or near the BCL11A gene or other DNA sequence that encodes a regulatory element of the BCL11A gene, that facilitates insertion of a new sequence from the polynucleotide donor template into the chromosomal DNA between the 5′ locus and the 3′ locus that results in a permanent insertion, modulation, or inactivation of the transcriptional control sequence of the chromosomal DNA between the 5′ locus and the 3′ locus. One guide RNA can create a pair of SSBs or DSBs. The one guide RNA can comprise a spacer sequence that is complementary to either the 5′ locus or the 3′ locus. Alternatively, the method may comprise a first guide RNA and a second guide RNA. The first guide RNA can comprise a spacer sequence that is complementary to a segment of the 5′ locus and the second guide RNA can comprise a spacer sequence that is complementary to a segment of the 3′ locus. The donor template can be either single or double stranded. The modified transcriptional control sequence can be located within a second intron of the BCL11A gene. The modified transcriptional control sequence can be located within a +58 DNA hypersensitive site (DHS) of the BCL11A gene.

[0034] The one or two gRNAs can be one or two single-molecule guide RNA (sgRNAs). The one or two gRNAs or one or two sgRNAs can be one or two modified gRNAs or one or two modified sgRNAs. The one modified sgRNA can comprise three 2′-O-methyl-phosphorothioate residues at or near each of its 5′ and 3′ ends. The one modified sgRNA can be the nucleic acid sequence of SEQ ID NO: 71,959. The one or more Cas9 endonucleases can be pre-complexed with one or two gRNAs or one or two sgRNAs to form one or more ribonucleoproteins (RNPs). The one or more Cas9 endonuclease can be flanked at the N-terminus, the C-terminus, or both the N-terminus and C-terminus by one or more nuclear localization signals (NLSs). The one or more Cas9 endonucleases can be flanked by two NLSs, one NLS located at the N-terminus and the second NLS located at the C-terminus. The one or more NLSs can be a SV40 NLS. The weight ratio of sgRNA to Cas9 endonuclease in the RNP can be 1:1. The one sgRNA can comprise the nucleic acid sequence of SEQ ID NO: 71,959, the Cas9 endonuclease can be a S. pyogenes Cas9 comprising a N-terminus SV40 NLS and a C-terminus SV40 NLS, and the weight ratio of sgRNA to Cas9 endonuclease can be 1:1.

[0035] The insertion can be by homology directed repair (HDR).

[0036] The SSB, DSB, 5′ locus, and/or 3′ locus can be located within a second intron of the BCL11A gene. The SSB, DSB, 5′ locus, and/or 3′ locus can be located within a +58 DNA hypersensitive site (DHS) of the BCL11A gene.

[0037] The method can further comprise introducing into the cell one or more guide ribonucleic acids (gRNAs). The one or more DNA endonucleases can be one or more Cas9 or Cpf1 endonucleases that effect or create a pair of single-strand breaks (SSBs) or double-strand breaks (DSBs), the first SSB or DSB at a 5′ locus and a second SSB or DSB at a 3′ locus, within or near the BCL11A gene or other DNA sequence that encodes a regulatory element of the BCL11A gene that causes a deletion of the chromosomal DNA between the 5′ locus and the 3′ locus that results in a permanent deletion, modulation, or inactivation of the transcriptional control sequence of the chromosomal DNA between the 5′ locus and the 3′ locus. The first guide RNA can comprise a spacer sequence that is complementary to a segment of the 5′ locus and the second guide RNA comprises a spacer sequence that is complementary to a segment of the 3′ locus. One guide RNA can create a pair of SSBs or DSBs. The one guide RNA can comprise a spacer sequence that is complementary to either the 5′ locus or the 3′ locus. Alternatively, the method may comprise a first guide RNA and a second guide RNA. The first guide RNA can comprise a spacer sequence that is complementary to a segment of the 5′ locus and the second guide RNA can comprise a spacer sequence that is complementary to a segment of the 3′ locus.

[0038] The one or more gRNAs can be one or more single-molecule guide RNA (sgRNAs). The one or more gRNAs or one or more sgRNAs can be one or more modified gRNAs or one or more modified sgRNAs. The one modified sgRNA can comprise three 2′-O-methyl-phosphorothioate residues at or near each of its 5′ and 3′ ends. The one modified sgRNA can be the nucleic acid sequence of SEQ ID NO: 71,959. The one or more Cas9 endonucleases can be pre-complexed with one or more gRNA or one or more sgRNA to form one or more ribonucleoproteins (RNPs). The one or more Cas9 endonuclease can be flanked at the N-terminus, the C-terminus, or both the N-terminus and C-terminus by one or more nuclear localization signals (NLSs). The one or more Cas9 endonucleases can be flanked by two NLSs, one NLS located at the N-terminus and the second NLS located at the C-terminus. The one or more NLSs can be a SV40 NLS. The weight ratio of sgRNA to Cas9 endonuclease in the RNP can be 1:1. The one sgRNA can comprise the nucleic acid sequence of SEQ ID NO: 71,959, the Cas9 endonuclease can be a S. pyogenes Cas9 comprising a N-terminus SV40 NLS and a C-terminus SV40 NLS, and the weight ratio of sgRNA to Cas9 endonuclease can be 1:1.

[0039] The 5′ locus and/or 3′ locus can be located within a second intron of the BCL11A gene. The 5′ locus and/or 3′ locus can be located within a +58 DNA hypersensitive site (DHS) of the BCL11A gene.

[0040] The Cas9 or Cpf1 mRNA, gRNA, and donor template can be formulated into separate lipid nanoparticles or co-formulated into a lipid nanoparticle.

[0041] The Cas9 or Cpf1 mRNA can be formulated into a lipid nanoparticle, and the gRNA and donor template can be delivered to the cell by an adeno-associated virus (AAV) vector.

[0042] The Cas9 or Cpf1 mRNA can be formulated into a lipid nanoparticle, and the gRNA can be delivered to the cell by electroporation and donor template can be delivered to the cell by an adeno-associated virus (AAV) vector.

[0043] The one or more RNP can be delivered to the cell by electroporation.

[0044] The editing within or near a BCL11A gene or other DNA sequence that encodes a regulatory element of the BCL11A gene can reduce BCL11A gene expression.

[0045] The BCL11A gene can be located on Chromosome 2: 60,451,167-60,553,567 (Genome Reference Consortium—GRCh38).

[0046] Also provided herein are one or more guide ribonucleic acids (gRNAs) for editing a BCL11A gene in a cell from a patient with a hemoglobinopathy. The one or more gRNAs can comprise a spacer sequence selected from the group consisting of nucleic acid sequences in SEQ ID NOs: 1-71,947 of the Sequence Listing. The one or more gRNAs can be one or more single-molecule guide RNAs (sgRNAs). The one or more gRNAs or one or more sgRNAs can be one or more modified gRNAs or one or more modified sgRNAs. The one or more modified sgRNAs can comprise three 2′-O-methyl-phosphorothioate residues at or near each of its 5′ and 3′ ends. The one or more modified sgRNAs can comprise the nucleic acid sequence of SEQ ID NO: 71,959. Also provided herein is a single-molecule guide RNA (sgRNA) comprising the nucleic acid sequence of SEQ ID NO: 71,959.

[0047] It is understood that the inventions described in this specification are not limited to the examples summarized in this Summary. Various other aspects are described and exemplified herein.

### BRIEF DESCRIPTION OF THE DRAWINGS

[0048] Various aspects of materials and methods for treatment of hemoglobinopathies disclosed and described in this specification can be better understood by reference to the accompanying figures, in which:

[0049] FIGS. 1A-C show plasmids comprising a codon optimized gene for S. pyogenes Cas9 endonuclease.

[0050] FIG. 1A is a plasmid (CTx-1) comprising a codon optimized gene for S. pyogenes Cas9 endonuclease. The CTx-1 plasmid also comprises a gRNA scaffold sequence, which includes a 20 bp spacer sequence from the sequences listed in SEQ ID NOs: 1-29,482 of the Sequence Listing.

[0051] FIG. 1B is a plasmid (CTx-2) comprising a different codon optimized gene for S. pyogenes Cas9 endonuclease. The CTx-2 plasmid also comprises a gRNA scaffold sequence, which includes a 20 bp spacer sequence from the sequences listed in SEQ ID NOs: 1-29,482 of the Sequence Listing.

[0052] FIG. 1C is a plasmid (CTx-3) comprising yet another different codon optimized gene for S. pyogenes Cas9 endonuclease. The CTx-3 plasmid also comprises a gRNA scaffold sequence, which includes a 20 bp spacer sequence from the sequences listed in SEQ ID NOs: 1-29,482 of the Sequence Listing.

[0053] FIGS. 2A-B depict the type II CRISPR/Cas system.

[0054] FIG. 2A depicts the type II CRISPR/Cas system including gRNA.

[0055] FIG. 2B depicts the type II CRISPR/Cas system including sgRNA.

[0056] FIG. 3 shows the rate of DNA editing in CD34+ hematopoietic stem and progenitor cells (HSPCs) and each of the different resulting HPFH genotypes.

[0057] FIGS. 4A-C show the upregulation of γ-globin expression in erythrocytes differentiated from Bulk edited human CD34+ HSPCs from mobilized peripheral blood (mPB).

[0058] FIG. 4A depicts hematopoiesis from human CD34+ HSPCs to erythrocytes.

[0059] FIG. 4B shows the ratio of γ/18sRNA for each of the deletion/modification.

[0060] FIG. 4C shows the ratio of γ/α for each of the deletion/modification.

[0061] FIGS. 5A-B show the upregulation of γ-globin expression in erythrocytes differentiated from all gene-edited colonies from human CD34+ HSPCs.

[0062] FIG. 5A shows the γ/α globin mRNA ratio (%) for each of the gene-edited colonies.

[0063] FIG. 5B shows the average γ/α globin mRNA ratio (%) for each of the gene-modifications.

[0064] FIG. 6 shows the BCL11A Intron (SPY101) rate of DNA editing in human CD34+ HSPC derived erythroid colonies.

[0065] FIGS. 7A-B show the correlation between the SPY101 genotype and γ-globin expression in single cell colonies differentiated from gene-edited human mPB CD34+ HSPCs.

[0066] FIG. 7A shows the percentage of γ-globin to α-globin (HBG/HBA) for each of the gene-edited colonies.

[0067] FIG. 7B shows the percentage of β-like globins (HBG/(HBB+HBG)) for each of the gene-edited colonies.

[0068] FIG. 8 shows on-target editing efficacy of several gRNAs in human mPB CD34+ cells.

[0069] FIGS. 9A-B show the hybrid-capture assay used to detect off-target editing and results generated using the hybrid-capture assay from edited human mPB CD34+ HSPCs.

[0070] FIG. 9A shows a schematic of a hybrid-capture assay used to detect editing activity at potential off-target sites.

[0071] FIG. 9B shows observed off-target activity via hybrid capture sequencing.

[0072] FIGS. 10A-B show ratios of globin mRNA levels measured in cells from SCD patients, a β-thalassemia patient, and healthy donors.

[0073] FIG. 10A shows ratios of globin mRNA levels measured in cells from SCD patients compared to healthy donors.

[0074] FIG. 10B shows ratios of globin mRNA levels measured in cells from a β-thalassemia patient compared to healthy donors.

[0075] FIGS. 11A-C show the flow cytometry strategy used to detect various gene-edited cell populations and results generated using the flow cytometry strategy.

[0076] FIG. 11A shows subpopulations of human mPB CD34+ HSPCs, associated surface markers, and flow cytometry gating strategy.

[0077] FIG. 11B shows a similar distribution of cell types in the mock and edited conditions.

[0078] FIG. 11C shows similar high editing efficiencies across the subpopulations compared to bulk.

[0079] FIG. 12 shows shows analysis of human CD45RA+ cell populations in NSG mice 8 weeks post-engraftment of human mPB CD34+ HSPCs. Data points represent individual animals and depict the percentage of live cells that were human CD45RA+ live cells.

[0080] FIG. 13 shows average editing efficacy of a SPY101 gRNA and Cas9 protein in human mPB CD34+ HSPCs at laboratory and clinically relevant scales.

[0081] FIG. 14 shows an overview of GLP/Toxicology study design.

[0082] FIG. 15 shows an overview of an experimental approach for bulk and single cell colony analysis of hemoglobin mRNA and protein levels in erythroid cell populations derived from CRISPR/Cas9 gene edited human mPB CD34+ HSPCs.

[0083] FIGS. 16A-B show γ-globin mRNA and protein upregulation in bulk differentiated human mPB CD34+ HSPCs modified with different targeted edits.

[0084] FIG. 16A shows γ-globin mRNA upregulation in bulk differentiated human mPB CD34+ HSPCs modified with different targeted edits.

[0085] FIG. 16B shows γ-globin protein upregulation in bulk differentiated human mPB CD34+ HSPCs modified with different targeted edits.

[0086] FIG. 17 shows average γ-globin upregulation in individual colonies of differentiated human mPB CD34+ HSPCs modified with different target edits.

[0087] FIGS. 18A-B show a genotype to phenotype correlation in Target 5 and Target 6 edited colonies of erythroid differentiated human mPB CD34+ HSPCs.

[0088] FIG. 18A includes charts on the left-hand side that show % of colonies with each genotype, and charts on the right side that show percent of colonies with each level of γ-globin upregulation (expressed as γ/(γ+β) globin mRNA ratio).

[0089] FIG. 18B shows mRNA transcript levels, for groups of colonies with similar genotypes.

[0090] FIG. 19 shows an overview of an experimental approach for bulk analysis of editing efficiency from genomic DNA, hemoglobin expression by mRNA, and protein in erythroid differentiated cell populations derived from CRISPR/Cas9 gene edited human mPB CD34+ HSPCs.

[0091] FIGS. 20A-B show the percentage of gene editing maintained throughout ex vivo erythroid differentiation of mPB CD34+ HSPCs edited with SPY101 gRNA or SD2 gRNA.

[0092] FIG. 20A shows the percentage of gene editing maintained throughout ex vivo erythroid differentiation of mPB CD34+ HSPCs edited with SPY101 gRNA.

[0093] FIG. 20B shows the percentage of gene editing maintained throughout ex vivo erythroid differentiation of mPB CD34+ HSPCs edited with SD2 gRNA.

[0094] FIGS. 21A-D show the increase in γ-globin transcript depicted as γ/α or γ/(γ+β) in gene-edited mPB CD34+ HSPCs on days 11 or 15 post-erythroid differentiation.

[0095] FIG. 21A shows the increase in γ-globin transcript (γ/α) in gene-edited mPB CD34+ HSPCs on day 11 post-differentiation.

[0096] FIG. 21B shows the increase in γ-globin transcript (γ/α) in gene-edited mPB CD34+ HSPCs on day 15 post-differentiation.

[0097] FIG. 21C shows the increase in γ-globin transcript (γ/(γ+β)) in gene-edited mPB CD34+ HSPCs on day 11 post-differentiation.

[0098] FIG. 21D shows the increase in γ-globin transcript (γ/(γ+β)) in gene-edited mPB CD34+ HSPCs on day 15 post-differentiation.

[0099] FIGS. 22A-B is FAGS analysis and Median Flourescence Intensity (MFI) analysis showing the upregulation of γ-globin in gene-edited mPB CD34+ HSPCs on day 15 post-erythroid differentiation.

[0100] FIG. 22A is FACS analysis showing the upregulation of γ-globin in gene-edited mPB CD34+ HSPCs 15 days post erythroid differentiation.

[0101] FIG. 22B is MFI analysis showing the average upregulation of γ-globin in gene-edited mPB CD34+ cells from 4 donors post erythroid differentiation.

[0102] FIG. 23A-D is bulk liquid-chromatography mass-spectrometry (LC-MS) data showing the upregulation of γ-globin, depicted as γ/α or γ/(γ+β) in gene-edited mPB CD34+ HSPCs on day 15 post-erythroid differentiation.

[0103] FIG. 23A is bulk liquid-chromatography mass-spectrometry (LC-MS) data showing the upregulation of γ-globin (γ/α) in gene-edited mPB CD34+ HSPCs on day 15 post-differentiation.

[0104] FIG. 23B is bulk liquid-chromatography mass-spectrometry (LC-MS) data showing the upregulation of γ-globin (γ/α) in gene-edited mPB CD34+ HSPCs on day 15 post-differentiation normalized to γ-globin (γ/α) in mPB CD34+ HSPCs transfected with GFP gRNA.

[0105] FIG. 23C is bulk liquid-chromatography mass-spectrometry (LC-MS) data showing the upregulation of γ-globin (γ/(γ+β)) in gene-edited mPB CD34+ HSPCs on day 15 post-differentiation.

[0106] FIG. 23D is bulk liquid-chromatography mass-spectrometry (LC-MS) data showing the upregulation of γ-globin (γ/(γ+β)) in gene-edited mPB CD34+ HSPCs on day 15 post-differentiation normalized to γ-globin (γ/α) in mPB CD34+ HSPCs transfected with GFP gRNA.

[0107] FIG. 24 depicts the hybrid capture bait design.

[0108] FIG. 25 shows a graph depicting the hybrid capture method's power to detect indels.

[0109] FIG. 26 shows a summary of the data generated from hybrid capture experiments using SPY101 gRNA.

[0110] FIG. 27 shows a summary of the data generated from hybrid capture experiments using SD2 gRNA.

[0111] FIG. 28 shows a study plan for the engraftment experiments.

[0112] FIGS. 29A-E show 8 week interim bleed analysis data for untreated mice, and mice injected with mock edited cells, GFP gRNA edited cells, SPY101 gRNA edited cells, or SD2 gRNA edited cells.

[0113] FIG. 29A shows 8 week interim bleed analysis data for untreated (UnTx) mice.

[0114] FIG. 29B shows 8 week interim bleed analysis data for mice injected with mock-edited cells.

[0115] FIG. 29C shows 8 week interim bleed analysis data for mice injected with GFP gRNA edited cells.

[0116] FIG. 29D shows 8 week interim bleed analysis data for mice injected with SPY101 gRNA edited cells.

[0117] FIG. 29E shows 8 week interim bleed analysis data for mice injected with SD2 gRNA edited cells.

[0118] FIG. 30 shows average 8 week interim bleed analysis data.

[0119] FIG. 31 shows the Indel % for human mPB CD34+ HSPCs electroporated with various Cas9 mRNAs and SPY101 gRNA (mRNA1-8) compared to human mPB CD34+ HSPCs electroporated with Cas9 protein complexed with SPY101 gRNA (a ribonucleoprotein complex, RNP).

[0120] FIGS. 32A-B show the normalized cell count and cell viability of human mPB CD34+ HSPCs electroporated with various Cas9 mRNAs and SPY101 gRNA (mRNA 1-8) compared to human mPB CD34+ HSPCs electroporated with Cas9 protein complexed with SPY101 gRNA (RNP).

[0121] FIG. 32A shows the fold increase in cell count at 48 hours post-electroporation for human mPB CD34+ HSPCs electroporated with various Cas9 mRNAs and SPY101 gRNA (mRNA 1-8) compared to human mPB CD34+ HSPCs electroporated with Cas9 protein complexed with SPY101 gRNA (RNP).

[0122] FIG. 32B shows the cell viability at 48 hours post-electroporation for human mPB CD34+ HSPCs electroporated with various Cas9 mRNAs and SPY101 gRNA (mRNA 1-8) compared to human mPB CD34+ HSPCs electroporated with Cas9 protein complexed with SPY101 gRNA (RNP).

[0123] FIGS. 33A-C show several Cas9 RNP constructs used for Cas9 RNP optimization and the Indel % associated with each of the Cas9 RNP constructs.

[0124] FIG. 33A shows several Cas9 RNP constructs.

[0125] FIG. 33B shows the Indel % for each of the Cas9 RNP constructs using 1 g Cas9: 1 μg SPY101 gRNA.

[0126] FIG. 33C shows the Indel % for each of the Cas9 RNP constructs using 3 μg Cas9: 3 μg SPY101 gRNA.

[0127] FIGS. 34A-B show the gene editing efficiency (%) for human mPB CD34+ HSPCs treated with either Cas9 mRNA or Cas9 protein (Feldan or Aldevron) at non-clinical and clinical scale.

[0128] FIG. 34A shows the gene editing efficiency (%) for human mPB or bone marrow (BM) derived CD34+ HSPCs treated with either Cas9 mRNA or Cas9 protein (Feldan or Aldevron) at non-clinical scale.

[0129] FIG. 34B shows the gene editing efficiency (%) for human mPB CD34+ HSPCs treated with Cas9 protein (Aldevron) at clinical scale.

[0130] FIGS. 35A-B show the efficacy of SPY101 in human mPB CD34+ HSPCs by presenting the γ/α globin mRNA ratio in % and γ/(γ+β) globin mRNA ratio in % for cells treated with either Cas9 mRNA and SPY101 gRNA or Cas9 protein (Feldan or Aldevron) complexed with SPY101 gRNA.

[0131] FIG. 35A shows the γ/α globin mRNA ratio in % for human mPB CD34+ HSPCs treated with either Cas9 mRNA and SPY101 gRNA or Cas9 protein (Feldan or Aldevron) complexed with SPY101 gRNA.

[0132] FIG. 35B shows the γ/(γ+β) globin mRNA ratio in % for human mPB CD34+ HSPCs treated with either Cas9 mRNA and SPY101 gRNA or Cas9 protein (Feldan or Aldevron) complexed with SPY101 gRNA.

[0133] FIGS. 36A-B show the efficacy of SPY101 in bone marrow derived CD34+ HSPCs by presenting the γ/α globin mRNA ratio in % and γ/(γ+β) globin mRNA ratio in % for cells treated with Cas9 protein (Aldevron, technically optimized vs. non-optimized) complexed with SPY101 gRNA.

[0134] FIG. 36A shows the γ/α globin mRNA ratio in % for bone marrow derived CD34+ HSPCs treated with Cas9 protein complexed with SPY101 gRNA.

[0135] FIG. 36B shows the γ/(γ+β) globin mRNA ratio in % for bone marrow derived CD34+ HSPCs treated with Cas9 protein complexed with SPY101 gRNA.

[0136] FIGS. 37A-B show the efficacy of SPY101 in SCD and β-Thalassemic patient samples.

[0137] FIG. 37A shows the average γ/(γ+β) globin mRNA ratio in % for erythroid differentiated cells from six SCD patients and two healthy donors that were treated with SPY101 gRNA and Cas9 protein. All values were subtracted from their respective control samples treated with GFP gRNA and Cas9 protein.

[0138] FIG. 37B shows the γ/α globin mRNA ratio in % for erythroid differentiated cells from one β-Thalassemic patient and two healthy donors that were treated with SPY101 gRNA and Cas9 protein. All values were subtracted from their respective control samples treated with GFP gRNA and Cas9 protein.

[0139] FIGS. 38A-B show the Bcl11a Intron (SPY101) rate of DNA editing when using Cas9 mRNA or Cas9 RNP.

[0140] FIG. 38A shows the BCL11A Intron (SPY101) rate of DNA editing when using Cas9 mRNA.

[0141] FIG. 38B shows the BCL11A Intron (SPY101) rate of DNA editing when using Cas9 RNP.

[0142] FIGS. 39A-B show that GATA1 binding site (GBS) disruptions caused by SPY101/Cas9 RNP in single cell colonies derived from erythroid differentiated human mPB CD34+ HSPCs are linked to increased γ-globin expression.

[0143] FIG. 39A shows the γ/α globin mRNA ratio of SPY101-edited colonies with no GBS disruption, mono-allelic GBS disruptions, or bi-allelic GBS disruptions.

[0144] FIG. 39B shows the γ/(γ+β) globin mRNA ratio of SPY101-edited colonies with no GBS disruption, mono-allelic GBS disruptions, or a bi-allelic GBS disruptions.

[0145] FIGS. 40A-E show increased γ-globin expression in erythroid differentiated SPY101/Cas9 RNP edited human mPB CD34+ HSPCs by flow cytometry analysis.

[0146] FIG. 40A is flow cytometry analysis showing α-globin expression in SPY101/Cas9 RNP edited erythroid differentiated human mPB CD34+ HSPCs compared to α-globin expression in GFP gRNA/Cas9 RNP treated erythroid differentiated human mPB CD34+ HSPCs.

[0147] FIG. 40B is flow cytometry analysis showing β-globin expression in SPY101/Cas9 RNP edited erythroid differentiated human mPB CD34+ HSPCs compared to 1-globin expression in GFP gRNA/Cas9 RNP treated erythroid differentiated human mPB CD34+ HSPCs.

[0148] FIG. 40C is flow cytometry analysis showing γ-globin expression in SPY101/Cas9 RNP edited erythroid differentiated human mPB CD34+ HSPCs compared to γ-globin expression in GFP gRNA/Cas9 RNP treated erythroid differentiated human mPB CD34+ HSPCs.

[0149] FIG. 40D shows the percentage of γ-globin positive cells in SPY101/Cas9 RNP edited erythroid differentiated human mPB CD34+ HSPCs compared to GFP gRNA/Cas9 RNP treated erythroid differentiated human mPB CD34+ HSPCs.

[0150] FIG. 40E shows the median fluorescence intensity (MFI) in SPY101/Cas9 RNP edited erythroid differentiated human mPB CD34+ HSPCs compared to GFP gRNA/Cas9 RNP treated erythroid differentiated human mPB CD34+ HSPCs.

### BRIEF DESCRIPTION OF THE SEQUENCE LISTING

[0151] SEQ ID NOs: 1-29,482 are 20 bp spacer sequences for targeting within or near a BCL11A gene or other DNA sequence that encodes a regulatory element of the BCL11A gene with a S. pyogenes Cas9 endonuclease.

[0152] SEQ ID NOs: 29,483-32,387 are 20 bp spacer sequences for targeting within or near a BCL11A gene or other DNA sequence that encodes a regulatory element of the BCL11A gene with a S. aureus Cas9 endonuclease.

[0153] SEQ ID NOs: 32,388-33,420 are 20 bp spacer sequences for targeting within or near a BCL11A gene or other DNA sequence that encodes a regulatory element of the BCL11A gene with a S. thermophilus Cas9 endonuclease.

[0154] SEQ ID NOs: 33,421-33,851 are 20 bp spacer sequences for targeting within or near a BCL11A gene or other DNA sequence that encodes a regulatory element of the BCL11A gene with a T. denticola Cas9 endonuclease.

[0155] SEQ ID NOs: 33,852-36,731 are 20 bp spacer sequences for targeting within or near a BCL11A gene or other DNA sequence that encodes a regulatory element of the BCL11A gene with a N. meningitides Cas9 endonuclease.

[0156] SEQ ID NOs: 36,732-71,947 are 22 bp spacer sequences for targeting within or near a BCL11A gene or other DNA sequence that encodes a regulatory element of the BCL11A gene with an Acidominococcus, a Lachnospiraceae, and a Franciscella Novicida Cpf1l endonuclease.

[0157] SEQ ID NO: 71,948 is a sample guide RNA (gRNA) for a S. pyogenes Cas9 endonuclease.

[0158] SEQ ID NO: 71,949 shows a known family of homing endonuclease, as classified by its structure.

[0159] SEQ ID NO: 71,950 is gRNA A (CLO1).

[0160] SEQ ID NO: 71,951 is gRNA B (CLO8).

[0161] SEQ ID NO: 71,952 is gRNA C (CSO2).

[0162] SEQ ID NO: 71,953 is gRNA D (CSO6).

[0163] SEQ ID NO: 71,954 is gRNA E (HPFH-15).

[0164] SEQ ID NO: 71,955 is gRNA F (HPFH-4).

[0165] SEQ ID NO: 71,956 is gRNA G (Kenya02).

[0166] SEQ ID NO: 71,957 is gRNA H (Kenya17).

[0167] SEQ ID NO: 71,958 is gRNA I (SD2).

[0168] SEQ ID NO: 71,959 is gRNA J (SPY101).

[0169] SEQ ID NOs: 71,960-71,962 show sample sgRNA sequences.

### DETAILED DESCRIPTION

[0170] Fetal Hemoglobin

[0171] Fetal hemoglobin (HbF, α₂γ₂) is the main oxygen transport protein in a human fetus and includes alpha (α) and gamma (γ) subunits. HbF expression ceases about 6 months after birth. Adult hemoglobin (HbA, α₂β₂) is the main oxygen transport protein in a human after ˜34 weeks from birth, and includes alpha (α) and beta (β) subunits. After 34 weeks, a developmental switch results in decreased transcription of the γ-globin genes and increased transcription of β-globin genes. Since many of the forms of hemoglobinopathies are a result of the failure to produce normal β-globin protein in sufficient amounts or failure to produce normal β-globin protein entirely, increased expression of γ-globin (i.e., HbF) will ameliorate β-globin disease severity.

[0172] B-Cell Lymphoma 11A (BCL11A)

[0173] B-cell lymphoma 11A (BCL11A) is a gene located on Chromosome 2 and ranges from 60,451,167-60,553,567 bp (GRCh38). BCL11A is a zinc finger transcription factor that represses fetal hemoglobin (HbF) and downregulates HbF expression starting at about 6 weeks after birth. The BCL11A gene contains 4 exons, spanning 102.4 kb of genomic DNA. BCL11A also is under transcription regulation, including a binding domain in intron 2 for the master transcripton factor GATA-1. GATA-1 binding enhances BCL11A expression which, in turn, represses HbF expression. Intron 2 contains multiple DNase hypersensitive sites (DHS), including sites referred to as +55, +58, and +62 based on the distance in kilobases from the transcriptional start site. Various editing strategies are discussed below to delete, modulate, or inactivate the transcriptional control sequences of BCL11A. Naturally occurring SNPs within this region have been associated with decreased BCL11A expression and increased fetal Hb levels (Orkin et al. 2013 GWAS study). These SNPs are organized around 3 DNA Hypersensitivity sites, +55DHS, +58DHS and +62DHS. Of the 3 regions, the +58 DHS region, appears to be the key region associated with increased fetal Hb levels and also harbors a GATA1 transcriptional control region.

[0174] Therapeutic Approach

[0175] Non-homologous end joining (NHEJ) can be used to delete segments of the transcriptional control sequence of BCL11A, either directly or by altering splice donor or acceptor sites through cleavage by one gRNA targeting several locations, or several gRNAs.

[0176] The transcriptional control sequence of the BCL11A gene can also be modulated or inactivated by inserting a wild-type BCL11A gene or cDNA comprising a modified transcriptional control sequence. For example, the donor for modulating or inactivating by homology directed repair (HDR) contains the modified transcriptional control sequence of the BCL11A gene with small or large flanking homology arms to allow for annealing. HDR is essentially an error-free mechanism that uses a supplied homologous DNA sequence as a template during DSB repair. The rate of homology directed repair (HDR) is a function of the distance between the transcriptional control sequence and the cut site so choosing overlapping or nearby target sites is important. Templates can include extra sequences flanked by the homologous regions or can contain a sequence that differs from the genomic sequence, thus allowing sequence editing.

[0177] In addition to deleting, modulating, or inactivating the transcriptional control sequence of the BCL11A gene by NHEJ or HDR, a range of other options are possible. If there are small or large deletions, a cDNA can be knocked in that contains a modified transcriptional control sequence of the BCL11A gene. A full length cDNA can be knocked into any “safe harbor”—i.e., non-deleterious insertion point that is not the BCL11A gene itself—, with or without suitable regulatory sequences. If this construct is knocked-in near the BCL11A regulatory elements, it should have physiological control, similar to the normal gene. Two or more (e.g., a pair) nucleases can be used to delete transcriptional control sequence regions, though a donor would usually have to be provided to modulate or inactivate the function. In this case two gRNA and one donor sequence would be supplied.

[0178] Provided herein are cellular, ex vivo and in vivo methods for using genome engineering tools to create permanent changes to the genome by: 1) modulating or inactivating the transcriptional control sequence of the BCL11A gene, by deletions that arise due to the NHEJ pathway; 2) modulating or inactivating the transcriptional control sequence of the BCL11A gene, by HDR; 3) modulating or inactivating the transcriptional control sequence of the BCL11A gene, by deletions of at least a portion of the transcriptional control sequence and/or knocking-in a wild-type BCL11A gene or cDNA comprising a modified transcriptional control sequence into the gene locus or a safe harbour locus. Such methods use endonucleases, such as CRISPR-associated (Cas9, Cpf1 and the like) nucleases, to permanently delete, insert, or edit the transcriptional control sequence within or near the genomic locus of the BCL11A gene or other DNA sequence that encodes a regulatory element of the BCL11A gene. In this way, examples set forth in the present disclosure can help to delete, modulate, or inactivate the transcriptional control sequence of the BCL11A gene with a single treatment or a limited number of treatments (rather than deliver potential therapies for the lifetime of the patient).

[0179] Provided herein are methods for treating a patient with a hemoglobinopathy. An aspect of such method is an ex vivo cell-based therapy. For example, a patient specific induced pluripotent stem cell (iPSC) can be created. Then, the chromosomal DNA of these iPS cells can be edited using the materials and methods described herein. Next, the genome-edited iPSCs can be differentiated into hematopoietic progenitor cells. Finally, the hematopoietic progenitor cells can be implanted into the patient.

[0180] Yet another aspect of such method is an ex vivo cell-based therapy. For example, a mesenchymal stem cell can be isolated from the patient, which can be isolated from the patient's bone marrow or peripheral blood. Next, the chromosomal DNA of these mesenchymal stem cells can be edited using the materials and methods described herein. Next, the genome-edited mesenchymal stem cells can be differentiated into hematopoietic progenitor cells. Finally, these hematopoietic progenitor cells can be implanted into the patient.

[0181] A further aspect of such method is an ex vivo cell-based therapy. For example, a hematopoietic progenitor cell can be isolated from the patient. Next, the chromosomal DNA of these cells can be edited using the materials and methods described herein. Finally, the genome-edited hematopoietic progenitor cells can be implanted into the patient.

[0182] One advantage of an ex vivo cell therapy approach is the ability to conduct a comprehensive analysis of the therapeutic prior to administration. Nuclease-based therapeutics can have some level of off-target effects. Performing gene correction ex vivo allows one to characterize the corrected cell population prior to implantation. The present disclosure includes sequencing the entire genome of the corrected cells to ensure that the off-target effects, if any, can be in genomic locations associated with minimal risk to the patient. Furthermore, populations of specific cells, including clonal populations, can be isolated prior to implantation.

[0183] Another advantage of ex vivo cell therapy relates to genetic correction in iPSCs compared to other primary cell sources. iPSCs are prolific, making it easy to obtain the large number of cells that will be required for a cell-based therapy. Furthermore, iPSCs are an ideal cell type for performing clonal isolations. This allows screening for the correct genomic correction, without risking a decrease in viability. In contrast, other primary cells are viable for only a few passages and difficult to clonally expand. Thus, manipulation of iPSCs for the treatment of a hemoglobinopathy can be much easier, and can shorten the amount of time needed to make the desired genetic correction.

[0184] For ex vivo therapy, transplantation requires clearance of bone-marrow niches or the donor HSCs to engraft. Current methods rely on radiation and/or chemotherapy. Due to the limitations these impose, safer conditioning regiments have been and are being developed, such as immunodepletion of bone marrow cells by antibodies or antibody toxin conjugates directed against hematpoietic cell surface markers, for example CD117, c-kit and others. Success of HSC transplantation depends upon efficient homing to bone marrow, subsequent engraftment, and bone marrow repopulation. The level of gene-edited cells engrafted is important, as is the ability of the cells' multilineage engraftment.

[0185] Hematopoietic stem cells (HSCs) are an important target for ex vivo gene therapy as they provide a prolonged source of the corrected cells. Treated CD34+ cells would be returned to the patient.

[0186] Methods can also include an in vivo based therapy. Chromosomal DNA of the cells in the patient is edited using the materials and methods described herein. The cells can be bone marrow cells, hematopoietic progenitor cells, or CD34+ cells.

[0187] Although blood cells present an attractive target for ex vivo treatment and therapy, increased efficacy in delivery may permit direct in vivo delivery to the hematopoietic stem cells (HSCs) and/or other B and T cell progenitors, such as CD34+ cells. Ideally the targeting and editing would be directed to the relevant cells. Cleavage in other cells can also be prevented by the use of promoters only active in certain cells and or developmental stages. Additional promoters are inducible, and therefore can be temporally controlled if the nuclease is delivered as a plasmid. The amount of time that delivered RNA and protein remain in the cell can also be adjusted using treatments or domains added to change the half-life. In vivo treatment would eliminate a number of treatment steps, but a lower rate of delivery can require higher rates of editing. In vivo treatment can eliminate problems and losses from ex vivo treatment and engraftment.

[0188] An advantage of in vivo gene therapy can be the ease of therapeutic production and administration. The same therapeutic approach and therapy will have the potential to be used to treat more than one patient, for example a number of patients who share the same or similar genotype or allele. In contrast, ex vivo cell therapy typically requires using a patient's own cells, which are isolated, manipulated and returned to the same patient.

[0189] Also provided herein is a cellular method for editing the BCL11A gene in a cell by genome editing. For example, a cell can be isolated from a patient or animal. Then, the chromosomal DNA of the cell can be edited using the materials and methods described herein.

[0190] The methods provided herein, regardless of whether a cellular or ex vivo or in vivo method, can involve one or a combination of the following: 1) modulating or inactivating the transcriptional control sequence of the BCL11A gene, by deletions that arise due to the NHEJ pathway, 2) modulating or inactivating the transcriptional control sequence of the BCL11A gene, by HDR, or 3) modulating or inactivating the transcriptional control sequence of the BCL11A gene, by deletion of at least a portion of the transcriptional control sequence and/or knocking-in wild-type BCL11A gene or cDNA comprising a modified transcriptional control sequence into the gene locus or at a heterologous location in the genome (such as a safe harbor site, such as AAVS1). Both the HDR and knock-in strategies utilize a donor DNA template in Homology-Directed Repair (HDR). HDR in either strategy may be accomplished by making one or more single-stranded breaks (SSBs) or double-stranded breaks (DSBs) at specific sites in the genome by using one or more endonucleases.

[0191] For example, the NHEJ strategy can involve deleting at least a portion of the transcriptional control sequence of the BCL11A gene by inducing one single stranded break or double stranded break within or near the BCL11A gene or other DNA sequence that encodes a regulatory element of the BCL11A gene with one or more CRISPR endonucleases and a gRNA (e.g., crRNA+tracrRNA, or sgRNA), or two or more single stranded breaks or double stranded breaks within or near the BCL11A gene or other DNA sequence that encodes a regulatory element of the BCL11A gene with two or more CRISPR endonucleases and two or more sgRNAs. This approach can require development and optimization of sgRNAs for the transcriptional control sequence of the BCL11A gene.

[0192] For example, the HDR strategy can involve modulating or inactivating the transcriptional control sequence of the BCL11A gene by inducing one single stranded break or double stranded break within or near the BCL11A gene or other DNA sequence that encodes a regulatory element of the BCL11A gene with one or more CRISPR endonucleases and a gRNA (e.g., crRNA+tracrRNA, or sgRNA), or two or more single stranded breaks or double stranded breaks within or near the BCL11A gene or other DNA sequence that encodes a regulatory element of the BCL11A gene with one or more CRISPR endonucleases and two or more gRNAs, in the presence of a donor DNA template introduced exogenously to direct the cellular DSB response to Homology-Directed Repair (the donor DNA template can be a short single stranded oligonucleotide, a short double stranded oligonucleotide, a long single or double stranded DNA molecule). This approach can require development and optimization of gRNAs and donor DNA molecules comprising a wild-type BCL11A gene comprising a modified transcriptional control sequence.

[0193] For example, the knock-in strategy involves knocking-in a wild-type BCL11A gene or cDNA comprising a modified transcriptional control sequence into the locus of the BCL11A gene using a gRNA (e.g., crRNA+tracrRNA, or sgRNA) or a pair of gRNAs targeting upstream of or in the transcriptional control sequence of the BCL11A gene, or in a safe harbor site (such as AAVS1). The donor DNA can be single or double stranded DNA and comprises a wild-type BCL11A gene comprising a modified transcriptional control sequence.

[0194] The advantages for the above strategies (deletion/modulation/inactivation and knock-in) are similar, including in principle both short and long term beneficial clinical and laboratory effects.

[0195] In addition to the editing options listed above, Cas9 or similar proteins can be used to target effector domains to the same target sites that can be identified for editing, or additional target sites within range of the effector domain. A range of chromatin modifying enzymes, methylases or demethlyases can be used to alter expression of the target gene. These types of epigenetic regulation have some advantages, particularly as they are limited in possible off-target effects.

[0196] The regulation of transcription and translation implicates a number of different classes of sites that interact with cellular proteins or nucleotides. Often the DNA binding sites of transcription factors or other proteins can be targeted for mutation or deletion to study the role of the site, though they can also be targeted to change gene expression. Sites can be added through non-homologous end joining NHEJ or direct genome editing by homology directed repair (HDR). Increased use of genome sequencing, RNA expression and genome-wide studies of transcription factor binding have increased our ability to identify how the sites lead to developmental or temporal gene regulation. These control systems can be direct or can involve extensive cooperative regulation that can require the integration of activities from multiple enhancers. Transcription factors typically bind 6-12 bp-long degenerate DNA sequences. The low level of specificity provided by individual sites suggests that complex interactions and rules are involved in binding and the functional outcome. Binding sites with less degeneracy can provide simpler means of regulation. Artificial transcription factors can be designed to specify longer sequences that have less similar sequences in the genome and have lower potential for off-target cleavage. Any of these types of binding sites can be mutated, deleted or even created to enable changes in gene regulation or expression (Canver, M. C. et al., Nature (2015)). GATA transcription factors are a family of transcription factors characterized by their ability to bind to the GATA DNA binding sequence. A GATA binding sequence is located in the +58 DNA hypersensitive site (DHS) of the BCL11A gene.

[0197] Another class of gene regulatory regions having these features is microRNA (miRNA) binding sites. miRNAs are non-coding RNAs that play key roles in posttranscriptional gene regulation. miRNA can regulate the expression of 30% of all mammalian protein-encoding genes. Specific and potent gene silencing by double stranded RNA (RNAi) was discovered, plus additional small noncoding RNA (Canver, M. C. et al., Nature (2015)). The largest class of noncoding RNAs important for gene silencing are miRNAs. In mammals, miRNAs are first transcribed as a long RNA transcripts, which can be separate transcriptional units, part of protein introns, or other transcripts. The long transcripts are called primary miRNA (pri-miRNA) that include imperfectly base-paired hairpin structures. These pri-miRNA can be cleaved into one or more shorter precursor miRNAs (pre-miRNAs) by Microprocessor, a protein complex in the nucleus, involving Drosha.

[0198] Pre-miRNAs are short stem loops ˜70 nucleotides in length with a 2-nucleotide 3′-overhang that are exported, into the mature 19-25 nucleotide miRNA:miRNA* duplexes. The miRNA strand with lower base pairing stability (the guide strand) can be loaded onto the RNA-induced silencing complex (RISC). The passenger guide strand (marked with *), can be functional, but is usually degraded. The mature miRNA tethers RISC to partly complementary sequence motifs in target mRNAs predominantly found within the 3′ untranslated regions (UTRs) and induces posttranscriptional gene silencing (Bartel, D. P. Cell 136, 215-233 (2009); Saj, A. & Lai, E. C. Curr Opin Genet Dev 21, 504-510 (2011)).

[0199] miRNAs can be important in development, differentiation, cell cycle and growth control, and in virtually all biological pathways in mammals and other multicellular organisms. miRNAs can also be involved in cell cycle control, apoptosis and stem cell differentiation, hematopoiesis, hypoxia, muscle development, neurogenesis, insulin secretion, cholesterol metabolism, aging, viral replication and immune responses.

[0200] A single miRNA can target hundreds of different mRNA transcripts, while an individual transcript can be targeted by many different miRNAs. More than 28645 microRNAs have been annotated in the latest release of miRBase (v.21). Some miRNAs can be encoded by multiple loci, some of which can be expressed from tandemly co-transcribed clusters. The features allow for complex regulatory networks with multiple pathways and feedback controls. miRNAs can be integral parts of these feedback and regulatory circuits and can help regulate gene expression by keeping protein production within limits (Herranz, H. & Cohen, S. M. Genes Dev 24, 1339-1344 (2010); Posadas, D. M. & Carthew, R. W. Curr Opin Genet Dev 27, 1-6 (2014)).

[0201] miRNA can also be important in a large number of human diseases that are associated with abnormal miRNA expression. This association underscores the importance of the miRNA regulatory pathway. Recent miRNA deletion studies have linked miRNA with regulation of the immune responses (Stern-Ginossar, N. et al., Science 317, 376-381 (2007)).

[0202] miRNA also have a strong link to cancer and can play a role in different types of cancer. miRNAs have been found to be downregulated in a number of tumors. miRNA can be important in the regulation of key cancer-related pathways, such as cell cycle control and the DNA damage response, and can therefore be used in diagnosis and can be targeted clinically. MicroRNAs can delicately regulate the balance of angiogenesis, such that experiments depleting all microRNAs suppresses tumor angiogenesis (Chen, S. et al., Genes Dev 28, 1054-1067 (2014)).

[0203] As has been shown for protein coding genes, miRNA genes can also be subject to epigenetic changes occurring with cancer. Many miRNA loci can be associated with CpG islands increasing their opportunity for regulation by DNA methylation (Weber, B., Stresemann, C., Brueckner, B. & Lyko, F. Cell Cycle 6, 1001-1005 (2007)). The majority of studies have used treatment with chromatin remodeling drugs to reveal epigenetically silenced miRNAs.

[0204] In addition to their role in RNA silencing, miRNA can also activate translation (Posadas, D. M. & Carthew, R. W. Curr Opin Genet Dev 27, 1-6 (2014)). Knocking out these sites may lead to decreased expression of the targeted gene, while introducing these sites may increase expression.

[0205] Individual miRNA can be knocked out most effectively by mutating the seed sequence (bases 2-8 of the microRNA), which can be important for binding specificity. Cleavage in this region, followed by mis-repair by NHEJ can effectively abolish miRNA function by blocking binding to target sites. miRNA could also be inhibited by specific targeting of the special loop region adjacent to the palindromic sequence. Catalytically inactive Cas9 can also be used to inhibit shRNA expression (Zhao, Y. et al., Sci Rep 4, 3943 (2014)). In addition to targeting the miRNA, the binding sites can also be targeted and mutated to prevent the silencing by miRNA.

[0206] Human Cells

[0207] For ameliorating hemoglobinopathies, as described and illustrated herein, the principal targets for gene editing are human cells. For example, in the ex vivo methods, the human cells can be somatic cells, which after being modified using the techniques as described, can give rise to progenitor cells. For example, in the in vivo methods, the human cells can be a bone marrow cell, a hematopoietic progenitor cell, or a CD34+ cell.

[0208] By performing gene editing in autologous cells that are derived from and therefore already completely matched with the patient in need, it is possible to generate cells that can be safely re-introduced into the patient, and effectively give rise to a population of cells that can be effective in ameliorating one or more clinical conditions associated with the patient's disease.

[0209] Progenitor cells (also referred to as stem cells herein) are capable of both proliferation and giving rise to more progenitor cells, these in turn having the ability to generate a large number of mother cells that can in turn give rise to differentiated or differentiable daughter cells. The daughter cells themselves can be induced to proliferate and produce progeny that subsequently differentiate into one or more mature cell types, while also retaining one or more cells with parental developmental potential. The term “stem cell” refers then, to a cell with the capacity or potential, under particular circumstances, to differentiate to a more specialized or differentiated phenotype, and which retains the capacity, under certain circumstances, to proliferate without substantially differentiating. In one aspect, the term progenitor or stem cell refers to a generalized mother cell whose descendants (progeny) specialize, often in different directions, by differentiation, e.g., by acquiring completely individual characters, as occurs in progressive diversification of embryonic cells and tissues. Cellular differentiation is a complex process typically occurring through many cell divisions. A differentiated cell may derive from a multipotent cell that itself is derived from a multipotent cell, and so on. While each of these multipotent cells may be considered stem cells, the range of cell types that each can give rise to may vary considerably. Some differentiated cells also have the capacity to give rise to cells of greater developmental potential. Such capacity may be natural or may be induced artificially upon treatment with various factors. In many biological instances, stem cells can also be “multipotent” because they can produce progeny of more than one distinct cell type, but this is not required for “stem-ness.”

[0210] Self-renewal can be another important aspect of the stem cell. In theory, self-renewal can occur by either of two major mechanisms. Stem cells can divide asymmetrically, with one daughter retaining the stem state and the other daughter expressing some distinct other specific function and phenotype. Alternatively, some of the stem cells in a population can divide symmetrically into two stems, thus maintaining some stem cells in the population as a whole, while other cells in the population give rise to differentiated progeny only. Generally, “progenitor cells” have a cellular phenotype that is more primitive (i.e., is at an earlier step along a developmental pathway or progression than is a fully differentiated cell). Often, progenitor cells also have significant or very high proliferative potential. Progenitor cells can give rise to multiple distinct differentiated cell types or to a single differentiated cell type, depending on the developmental pathway and on the environment in which the cells develop and differentiate.

[0211] In the context of cell ontogeny, the adjective “differentiated,” or “differentiating” is a relative term. A “differentiated cell” is a cell that has progressed further down the developmental pathway than the cell to which it is being compared. Thus, stem cells can differentiate into lineage-restricted precursor cells (such as a hematopoietic progenitor cell), which in turn can differentiate into other types of precursor cells further down the pathway (such as a hematopoietic precursor), and then to an end-stage differentiated cell, such as a erythrocyte, which plays a characteristic role in a certain tissue type, and may or may not retain the capacity to proliferate further.

[0212] The term “hematopoietic progenitor cell” refers to cells of a stem cell lineage that give rise to all the blood cell types, including erythroid (erythrocytes or red blood cells (RBCs)), myeloid (monocytes and macrophages, neutrophils, basophils, eosinophils, megakaryocytes/platelets, and dendritic cells), and lymphoid (T-cells, B-cells, NK-cells).

[0213] A “cell of the erythroid lineage” indicates that the cell being contacted is a cell that undergoes erythropoiesis, such that upon final differentiation it forms an erythrocyte or red blood cell. Such cells originate from bone marrow hematopoietic progenitor cells. Upon exposure to specific growth factors and other components of the hematopoietic microenvironment, hematopoietic progenitor cells can mature through a series of intermediate differentiation cellular types, all intermediates of the erythroid lineage, into RBCs. Thus, cells of the “erythroid lineage” comprise hematopoietic progenitor cells, rubriblasts, prorubricytes, erythroblasts, metarubricytes, reticulocytes, and erythrocytes.

[0214] The hematopoietic progenitor cell can express at least one of the following cell surface markers characteristic of hematopoietic progenitor cells: CD34+, CD59+, Thyl/CD90+, CD381o/−, and C-kit/CDI 17+. In some examples provided herein, the hematopoietic progenitors can be CD34+.

[0215] The hematopoietic progenitor cell can be a peripheral blood stem cell obtained from the patient after the patient has been treated with one or more factors such as granulocyte colony stimulating factor (optionally in combination with Plerixaflor). CD34+ cells can be enriched using CliniMACS® Cell Selection System (Miltenyi Biotec). CD34+ cells can be stimulated in serum-free medium (e.g., CellGrow SCGM media, CellGenix) with cytokines (e.g., SCF, rhTPO, rhFLT3) before genome editing. Addition of SR1 and dmPGE2 and/or other factors is contemplated to improve long-term engraftment.

[0216] The hematopoietic progenitor cells of the erythroid lineage can have a cell surface marker characteristic of the erythroid lineage: such as CD71 and Terl 19.

[0217] Hematopoietic stem cells (HSCs) can be an important target for gene therapy as they provide a prolonged source of the corrected cells. HSCs give rise to both the myeloid and lymphoid lineages of blood cells. Mature blood cells have a finite life-span and must be continuously replaced throughout life. Blood cells are continually produced by the proliferation and differentiation of a population of pluripotent HSCs that can be replenished by self-renewal. Bone marrow (BM) is the major site of hematopoiesis in humans and a good source for hematopoietic stem and progenitor cells (HSPCs). HSPCs can be found in small numbers in the peripheral blood (PB). In some indications or treatments their numbers increase. The progeny of HSCs mature through stages, generating multi-potential and lineage-committed progenitor cells including the lymphoid progenitor cells giving rise to the cells expressing BCL11A. B and T cell progenitors are the two cell populations requiring the activity of BCL11A, so they could be edited at the stages prior to re-arrangement, though correcting progenitors has the advantage of continuing to be a source of corrected cells. Treated cells, such as CD34+ cells, would be returned to the patient. The level of engraftment can be important, as is the ability of the cells' multilineage engraftment of gene-edited cells following CD34+ infusion in vivo.

[0218] Induced Pluripotent Stem Cells

[0219] The genetically engineered human cells described herein can be induced pluripotent stem cells (iPSCs). An advantage of using iPSCs is that the cells can be derived from the same subject to which the progenitor cells are to be administered. That is, a somatic cell can be obtained from a subject, reprogrammed to an induced pluripotent stem cell, and then re-differentiated into a progenitor cell to be administered to the subject (e.g., autologous cells). Because the progenitors are essentially derived from an autologous source, the risk of engraftment rejection or allergic response can be reduced compared to the use of cells from another subject or group of subjects. In addition, the use of iPSCs negates the need for cells obtained from an embryonic source. Thus, in one aspect, the stem cells used in the disclosed methods are not embryonic stem cells.

[0220] Although differentiation is generally irreversible under physiological contexts, several methods have been recently developed to reprogram somatic cells to iPSCs. Exemplary methods are known to those of skill in the art and are described briefly herein below.

[0221] The term “reprogramming” refers to a process that alters or reverses the differentiation state of a differentiated cell (e.g., a somatic cell). Stated another way, reprogramming refers to a process of driving the differentiation of a cell backwards to a more undifferentiated or more primitive type of cell. It should be noted that placing many primary cells in culture can lead to some loss of fully differentiated characteristics. Thus, simply culturing such cells included in the term differentiated cells does not render these cells non-differentiated cells (e.g., undifferentiated cells) or pluripotent cells. The transition of a differentiated cell to pluripotency requires a reprogramming stimulus beyond the stimuli that lead to partial loss of differentiated character in culture. Reprogrammed cells also have the characteristic of the capacity of extended passaging without loss of growth potential, relative to primary cell parents, which generally have capacity for only a limited number of divisions in culture.

[0222] The cell to be reprogrammed can be either partially or terminally differentiated prior to reprogramming. Reprogramming can encompass complete reversion of the differentiation state of a differentiated cell (e.g., a somatic cell) to a pluripotent state or a multipotent state. Reprogramming can encompass complete or partial reversion of the differentiation state of a differentiated cell (e.g., a somatic cell) to an undifferentiated cell (e.g., an embryonic-like cell). Reprogramming can result in expression of particular genes by the cells, the expression of which further contributes to reprogramming. In certain examples described herein, reprogramming of a differentiated cell (e.g., a somatic cell) can cause the differentiated cell to assume an undifferentiated state (e.g., is an undifferentiated cell). The resulting cells are referred to as “reprogrammed cells,” or “induced pluripotent stem cells (iPSCs or iPS cells).”

[0223] Reprogramming can involve alteration, e.g., reversal, of at least some of the heritable patterns of nucleic acid modification (e.g., methylation), chromatin condensation, epigenetic changes, genomic imprinting, etc., that occur during cellular differentiation. Reprogramming is distinct from simply maintaining the existing undifferentiated state of a cell that is already pluripotent or maintaining the existing less than fully differentiated state of a cell that is already a multipotent cell (e.g., a hematopoietic stem cell). Reprogramming is also distinct from promoting the self-renewal or proliferation of cells that are already pluripotent or multipotent, although the compositions and methods described herein can also be of use for such purposes, in some examples.

[0224] Many methods are known in the art that can be used to generate pluripotent stem cells from somatic cells. Any such method that reprograms a somatic cell to the pluripotent phenotype would be appropriate for use in the methods described herein.

[0225] Reprogramming methodologies for generating pluripotent cells using defined combinations of transcription factors have been described. Mouse somatic cells can be converted to ES cell-like cells with expanded developmental potential by the direct transduction of Oct4, Sox2, Klf4, and c-Myc; see, e.g., Takahashi and Yamanaka, Cell 126(4): 663-76 (2006). iPSCs resemble ES cells, as they restore the pluripotency-associated transcriptional circuitry and much of the epigenetic landscape. In addition, mouse iPSCs satisfy all the standard assays for pluripotency: specifically, in vitro differentiation into cell types of the three germ layers, teratoma formation, contribution to chimeras, germline transmission [see, e.g., Maherali and Hochedlinger, Cell Stem Cell. 3(6):595-605 (2008)], and tetraploid complementation.

[0226] Human iPSCs can be obtained using similar transduction methods, and the transcription factor trio, OCT4, SOX2, and NANOG, has been established as the core set of transcription factors that govern pluripotency; see, e.g., Budniatzky and Gepstein, Stem Cells Transl Med. 3(4):448-57 (2014); Barrett et al., Stem Cells Trans Med 3:1-6 sctm.2014-0121 (2014); Focosi et al., Blood Cancer Journal 4: e211 (2014); and references cited therein. The production of iPSCs can be achieved by the introduction of nucleic acid sequences encoding stem cell-associated genes into an adult, somatic cell, historically using viral vectors.

[0227] iPSCs can be generated or derived from terminally differentiated somatic cells, as well as from adult stem cells, or somatic stem cells. That is, a non-pluripotent progenitor cell can be rendered pluripotent or multipotent by reprogramming. In such instances, it may not be necessary to include as many reprogramming factors as required to reprogram a terminally differentiated cell. Further, reprogramming can be induced by the non-viral introduction of reprogramming factors, e.g., by introducing the proteins themselves, or by introducing nucleic acids that encode the reprogramming factors, or by introducing messenger RNAs that upon translation produce the reprogramming factors (see e.g., Warren et al., Cell Stem Cell, 7(5):618-30 (2010). Reprogramming can be achieved by introducing a combination of nucleic acids encoding stem cell-associated genes, including, for example, Oct-4 (also known as Oct-3/4 or Pouf51), Soxl, Sox2, Sox3, Sox 15, Sox 18, NANOG, Klfl, Klf2, Klf4, Klf5, NR5A2, c-Myc, 1-Myc, n-Myc, Rem2, Tert, and LIN28. Reprogramming using the methods and compositions described herein can further comprise introducing one or more of Oct-3/4, a member of the Sox family, a member of the KIf family, and a member of the Myc family to a somatic cell. The methods and compositions described herein can further comprise introducing one or more of each of Oct-4, Sox2, Nanog, c-MYC and Klf4 for reprogramming. As noted above, the exact method used for reprogramming is not necessarily critical to the methods and compositions described herein. However, where cells differentiated from the reprogrammed cells are to be used in, e.g., human therapy, in one aspect the reprogramming is not effected by a method that alters the genome. Thus, in such examples, reprogramming can be achieved, e.g., without the use of viral or plasmid vectors.

[0228] The efficiency of reprogramming (i.e., the number of reprogrammed cells) derived from a population of starting cells can be enhanced by the addition of various agents, e.g., small molecules, as shown by Shi et al., Cell-Stem Cell 2:525-528 (2008); Huangfu et al., Nature Biotechnology 26(7):795-797 (2008) and Marson et al., Cell-Stem Cell 3: 132-135 (2008). Thus, an agent or combination of agents that enhance the efficiency or rate of induced pluripotent stem cell production can be used in the production of patient-specific or disease-specific iPSCs. Some non-limiting examples of agents that enhance reprogramming efficiency include soluble Wnt, Wnt conditioned media, BIX-01294 (a G9a histone methyltransferase), PD0325901 (a MEK inhibitor), DNA methyltransferase inhibitors, histone deacetylase (HDAC) inhibitors, valproic acid, 5′-azacytidine, dexamethasone, suberoylanilide, hydroxamic acid (SAHA), vitamin C, and trichostatin (TSA), among others.

[0229] Other non-limiting examples of reprogramming enhancing agents include: Suberoylanilide Hydroxamic Acid (SAHA (e.g., MK0683, vorinostat) and other hydroxamic acids), BML-210, Depudecin (e.g., (−)-Depudecin), HC Toxin, Nullscript (4-(1,3-Dioxo-IH,3H-benzo[de]isoquinolin-2-yl)-N-hydroxybutanamide), Phenylbutyrate (e.g., sodium phenylbutyrate) and Valproic Acid ((VP A) and other short chain fatty acids), Scriptaid, Suramin Sodium, Trichostatin A (TSA), APHA Compound 8, Apicidin, Sodium Butyrate, pivaloyloxymethyl butyrate (Pivanex, AN-9), Trapoxin B, Chlamydocin, Depsipeptide (also known as FR901228 or FK228), benzamides (e.g., Cl-994 (e.g., N-acetyl dinaline) and MS-27-275), MGCD0103, NVP-LAQ-824, CBHA (m-carboxycinnaminic acid bishydroxamic acid), JNJ16241199, Tubacin, A-161906, proxamide, oxamflatin, 3-CI-UCHA (e.g., 6-(3-chlorophenylureido)caproic hydroxamic acid), AOE (2-amino-8-oxo-9, 10-epoxydecanoic acid), CHAP31 and CHAP 50. Other reprogramming enhancing agents include, for example, dominant negative forms of the HDACs (e.g., catalytically inactive forms), siRNA inhibitors of the HDACs, and antibodies that specifically bind to the HDACs. Such inhibitors are available, e.g., from BIOMOL International, Fukasawa, Merck Biosciences, Novartis, Gloucester Pharmaceuticals, Titan Pharmaceuticals, MethylGene, and Sigma Aldrich.

[0230] To confirm the induction of pluripotent stem cells for use with the methods described herein, isolated clones can be tested for the expression of a stem cell marker. Such expression in a cell derived from a somatic cell identifies the cells as induced pluripotent stem cells. Stem cell markers can be selected from the non-limiting group including SSEA3, SSEA4, CD9, Nanog, Fbxl5, Ecatl, Esgl, Eras, Gdf3, Fgf4, Cripto, Daxl, Zpf296, Slc2a3, Rexl, Utfl, and Natl. In one case, for example, a cell that expresses Oct4 or Nanog is identified as pluripotent. Methods for detecting the expression of such markers can include, for example, RT-PCR and immunological methods that detect the presence of the encoded polypeptides, such as Western blots or flow cytometric analyses. Detection can involve not only RT-PCR, but can also include detection of protein markers. Intracellular markers may be best identified via RT-PCR, or protein detection methods such as immunocytochemistry, while cell surface markers are readily identified, e.g., by immunocytochemistry.

[0231] The pluripotent stem cell character of isolated cells can be confirmed by tests evaluating the ability of the iPSCs to differentiate into cells of each of the three germ layers. As one example, teratoma formation in nude mice can be used to evaluate the pluripotent character of the isolated clones. The cells can be introduced into nude mice and histology and/or immunohistochemistry can be performed on a tumor arising from the cells. The growth of a tumor comprising cells from all three germ layers, for example, further indicates that the cells are pluripotent stem cells.

[0232] Creating Patient Specific iPSCs

[0233] One step of the ex vivo methods of the present disclosure can involve creating a patient specific iPS cell, patient specific iPS cells, or a patient specific iPS cell line. There are many established methods in the art for creating patient specific iPS cells, as described in Takahashi and Yamanaka 2006; Takahashi, Tanabe et al. 2007. For example, the creating step can comprise: a) isolating a somatic cell, such as a skin cell or fibroblast, from the patient; and b) introducing a set of pluripotency-associated genes into the somatic cell in order to induce the cell to become a pluripotent stem cell. The set of pluripotency-associated genes can be one or more of the genes selected from the group consisting of OCT4, SOX2, KLF4, Lin28, NANOG, and cMYC.

[0234] Performing a Biopsy or Aspirate of the Patient's Bone Marrow

[0235] A biopsy or aspirate is a sample of tissue or fluid taken from the body. There are many different kinds of biopsies or aspirates. Nearly all of them involve using a sharp tool to remove a small amount of tissue. If the biopsy will be on the skin or other sensitive area, numbing medicine can be applied first. A biopsy or aspirate can be performed according to any of the known methods in the art. For example, in a bone marrow aspirate, a large needle is used to enter the pelvis bone to collect bone marrow.

[0236] Isolating a Mesenchymal Stem Cell

[0237] Mesenchymal stem cells can be isolated according to any method known in the art, such as from a patient's bone marrow or peripheral blood. For example, marrow aspirate can be collected into a syringe with heparin. Cells can be washed and centrifuged on a Percoll™ density gradient. Cells, such as blood cells, liver cells, interstitial cells, macrophages, mast cells, and thymocytes, can be separated using Percoll™. The cells can be cultured in Dulbecco's modified Eagle's medium (DMEM) (low glucose) containing 10% fetal bovine serum (FBS) (Pittinger M F, Mackay A M, Beck S C et al., Science 1999; 284:143-147).

[0238] Treating a Patient with GCSF

[0239] A patient may optionally be treated with granulocyte colony stimulating factor (GCSF) in accordance with any method known in the art. The GCSF can be administered in combination with Plerixaflor.

[0240] Isolating a Hematopoietic Progenitor Cell from a Patient

[0241] A hematopoietic progenitor cell can be isolated from a patient by any method known in the art. CD34+ cells can be enriched using CliniMACS® Cell Selection System (Miltenyi Biotec). CD34+ cells can be weakly stimulated in serum-free medium (e.g., CellGrow SCGM media, CellGenix) with cytokines (e.g., SCF, rhTPO, rhFLT3) before genome editing.

[0242] Genome Editing

[0243] Genome editing generally refers to the process of modifying the nucleotide sequence of a genome, preferably in a precise or pre-determined manner. Examples of methods of genome editing described herein include methods of using site-directed nucleases to cut deoxyribonucleic acid (DNA) at precise target locations in the genome, thereby creating single-strand or double-strand DNA breaks at particular locations within the genome. Such breaks can be and regularly are repaired by natural, endogenous cellular processes, such as homology-directed repair (HDR) and NHEJ, as recently reviewed in Cox et al., Nature Medicine 21(2), 121-31 (2015). These two main DNA repair processes consist of a family of alternative pathways. NHEJ directly joins the DNA ends resulting from a double-strand break, sometimes with the loss or addition of nucleotide sequence, which may disrupt or enhance gene expression. HDR utilizes a homologous sequence, or donor sequence, as a template for inserting a defined DNA sequence at the break point. The homologous sequence can be in the endogenous genome, such as a sister chromatid. Alternatively, the donor can be an exogenous nucleic acid, such as a plasmid, a single-strand oligonucleotide, a double-stranded oligonucleotide, a duplex oligonucleotide or a virus, that has regions of high homology with the nuclease-cleaved locus, but which can also contain additional sequence or sequence changes including deletions that can be incorporated into the cleaved target locus. A third repair mechanism can be microhomology-mediated end joining (MMEJ), also referred to as “Alternative NHEJ”, in which the genetic outcome is similar to NHEJ in that small deletions and insertions can occur at the cleavage site. MMEJ can make use of homologous sequences of a few basepairs flanking the DNA break site to drive a more favored DNA end joining repair outcome, and recent reports have further elucidated the molecular mechanism of this process; see, e.g., Cho and Greenberg, Nature 518, 174-76 (2015); Kent et al., Nature Structural and Molecular Biology, Adv. Online doi:10.1038/nsmb.2961 (2015); Mateos-Gomez et al., Nature 518, 254-57 (2015); Ceccaldi et al., Nature 528, 258-62 (2015). In some instances it may be possible to predict likely repair outcomes based on analysis of potential microhomologies at the site of the DNA break.

[0244] Each of these genome editing mechanisms can be used to create desired genomic alterations. A step in the genome editing process can be to create one or two DNA breaks, the latter as double-strand breaks or as two single-stranded breaks, in the target locus as near the site of intended mutation. This can be achieved via the use of site-directed polypeptides, as described and illustrated herein.

[0245] Site-directed polypeptides, such as a DNA endonuclease, can introduce double-strand breaks or single-strand breaks in nucleic acids, e.g., genomic DNA. The double-strand break can stimulate a cell's endogenous DNA-repair pathways (e.g., homology-dependent repair or non-homologous end joining or alternative non-homologous end joining (A-NHEJ) or microhomology-mediated end joining). NHEJ can repair cleaved target nucleic acid without the need for a homologous template. This can sometimes result in small deletions or insertions (indels) in the target nucleic acid at the site of cleavage, and can lead to disruption or alteration of gene expression. HDR can occur when a homologous repair template, or donor, is available. The homologous donor template can comprise sequences that can be homologous to sequences flanking the target nucleic acid cleavage site. The sister chromatid can be used by the cell as the repair template. However, for the purposes of genome editing, the repair template can be supplied as an exogenous nucleic acid, such as a plasmid, duplex oligonucleotide, single-strand oligonucleotide, double-stranded oligonucleotide, or viral nucleic acid. With exogenous donor templates, an additional nucleic acid sequence (such as a transgene) or modification (such as a single or multiple base change or a deletion) can be introduced between the flanking regions of homology so that the additional or altered nucleic acid sequence also becomes incorporated into the target locus. MMEJ can result in a genetic outcome that is similar to NHEJ in that small deletions and insertions can occur at the cleavage site. MMEJ can make use of homologous sequences of a few basepairs flanking the cleavage site to drive a favored end-joining DNA repair outcome. In some instances it may be possible to predict likely repair outcomes based on analysis of potential microhomologies in the nuclease target regions.

[0246] Thus, in some cases, homologous recombination can be used to insert an exogenous polynucleotide sequence into the target nucleic acid cleavage site. An exogenous polynucleotide sequence is termed a donor polynucleotide (or donor or donor sequence or polynucleotide donor template) herein. The donor polynucleotide, a portion of the donor polynucleotide, a copy of the donor polynucleotide, or a portion of a copy of the donor polynucleotide can be inserted into the target nucleic acid cleavage site. The donor polynucleotide can be an exogenous polynucleotide sequence, i.e., a sequence that does not naturally occur at the target nucleic acid cleavage site.

[0247] The modifications of the target DNA due to NHEJ and/or HDR can lead to, for example, mutations, deletions, alterations, integrations, gene correction, gene replacement, gene tagging, transgene insertion, nucleotide deletion, gene disruption, translocations and/or gene mutation. The processes of deleting genomic DNA and integrating non-native nucleic acid into genomic DNA are examples of genome editing.

[0248] CRISPR Endonuclease System

[0249] A CRISPR (Clustered Regularly Interspaced Short Palindromic Repeats) genomic locus can be found in the genomes of many prokaryotes (e.g., bacteria and archaea). In prokaryotes, the CRISPR locus encodes products that function as a type of immune system to help defend the prokaryotes against foreign invaders, such as virus and phage. There are three stages of CRISPR locus function: integration of new sequences into the CRISPR locus, expression of CRISPR RNA (crRNA), and silencing of foreign invader nucleic acid. Five types of CRISPR systems (e.g., Type I, Type II, Type III, Type U, and Type V) have been identified.

[0250] A CRISPR locus includes a number of short repeating sequences referred to as “repeats.” When expressed, the repeats can form secondary structures (e.g., hairpins) and/or comprise unstructured single-stranded sequences. The repeats usually occur in clusters and frequently diverge between species. The repeats are regularly interspaced with unique intervening sequences referred to as “spacers,” resulting in a repeat-spacer-repeat locus architecture. The spacers are identical to or have high homology with known foreign invader sequences. A spacer-repeat unit encodes a crisprRNA (crRNA), which is processed into a mature form of the spacer-repeat unit. A crRNA comprises a “seed” or spacer sequence that is involved in targeting a target nucleic acid (in the naturally occurring form in prokaryotes, the spacer sequence targets the foreign invader nucleic acid). A spacer sequence is located at the 5′ or 3′ end of the crRNA.

[0251] A CRISPR locus also comprises polynucleotide sequences encoding CRISPR Associated (Cas) genes. Cas genes encode endonucleases involved in the biogenesis and the interference stages of crRNA function in prokaryotes. Some Cas genes comprise homologous secondary and/or tertiary structures.

[0252] Type II CRISPR Systems

[0253] crRNA biogenesis in a Type II CRISPR system in nature requires a trans-activating CRISPR RNA (tracrRNA). The tracrRNA can be modified by endogenous RNaselll, and then hybridizes to a crRNA repeat in the pre-crRNA array. Endogenous RNaselll can be recruited to cleave the pre-crRNA. Cleaved crRNAs can be subjected to exoribonuclease trimming to produce the mature crRNA form (e.g., 5′ trimming). The tracrRNA can remain hybridized to the crRNA, and the tracrRNA and the crRNA associate with a site-directed polypeptide (e.g., Cas9). The crRNA of the crRNA-tracrRNA-Cas9 complex can guide the complex to a target nucleic acid to which the crRNA can hybridize. Hybridization of the crRNA to the target nucleic acid can activate Cas9 for targeted nucleic acid cleavage. The target nucleic acid in a Type II CRISPR system is referred to as a protospacer adjacent motif (PAM). In nature, the PAM is essential to facilitate binding of a site-directed polypeptide (e.g., Cas9) to the target nucleic acid. Type II systems (also referred to as Nmeni or CASS4) are further subdivided into Type II-A (CASS4) and II-B (CASS4a). Jinek et al., Science, 337(6096):816-821 (2012) showed that the CRISPR/Cas9 system is useful for RNA-programmable genome editing, and international patent application publication number WO2013/176772 provides numerous examples and applications of the CRISPR/Cas endonuclease system for site-specific gene editing.

[0254] Type V CRISPR Systems

[0255] Type V CRISPR systems have several important differences from Type II systems. For example, Cpf1 is a single RNA-guided endonuclease that, in contrast to Type II systems, lacks tracrRNA. In fact, Cpf1-associated CRISPR arrays can be processed into mature crRNAs without the requirement of an additional trans-activating tracrRNA. The Type V CRISPR array can be processed into short mature crRNAs of 42-44 nucleotides in length, with each mature crRNA beginning with 19 nucleotides of direct repeat followed by 23-25 nucleotides of spacer sequence. In contrast, mature crRNAs in Type II systems can start with 20-24 nucleotides of spacer sequence followed by about 22 nucleotides of direct repeat. Also, Cpf1 can utilize a T-rich protospacer-adjacent motif such that Cpf1-crRNA complexes efficiently cleave target DNA preceeded by a short T-rich PAM, which is in contrast to the G-rich PAM following the target DNA for Type II systems. Thus, Type V systems cleave at a point that is distant from the PAM, while Type II systems cleave at a point that is adjacent to the PAM. In addition, in contrast to Type II systems, Cpf1 cleaves DNA via a staggered DNA double-stranded break with a 4 or 5 nucleotide 5′ overhang. Type II systems cleave via a blunt double-stranded break. Similar to Type II systems, Cpf1 contains a predicted RuvC-like endonuclease domain, but lacks a second HNH endonuclease domain, which is in contrast to Type II systems.

[0256] Cas Genes/Polypeptides and Protospacer Adjacent Motifs

[0257] Exemplary CRISPR/Cas polypeptides include the Cas9 polypeptides in FIG. 1 of Fonfara et al., Nucleic Acids Research, 42:2577-2590 (2014). The CRISPR/Cas gene naming system has undergone extensive rewriting since the Cas genes were discovered. FIG. 5 of Fonfara, supra, provides PAM sequences for the Cas9 polypeptides from various species.

[0258] Site-Directed Polypeptides

[0259] A site-directed polypeptide is a nuclease used in genome editing to cleave DNA. The site-directed nuclease or polypeptide can be administered to a cell or a patient as either: one or more polypeptides, or one or more mRNAs encoding the polypeptide.

[0260] In the context of a CRISPR/Cas or CRISPR/Cpf1 system, the site-directed polypeptide can bind to a guide RNA that, in turn, specifies the site in the target DNA to which the polypeptide is directed. In the CRISPR/Cas or CRISPR/Cpf1 systems disclosed herein, the site-directed polypeptide can be an endonuclease, such as a DNA endonuclease.

[0261] A site-directed polypeptide can comprises a plurality of nucleic acid-cleaving (i.e., nuclease) domains. Two or more nucleic acid-cleaving domains can be linked together via a linker. For example, the linker can comprise a flexible linker. Linkers can comprise 1, 2, 3, 4, 5, 6, 7, 8, 9, 10, 11, 12, 13, 14, 15, 16, 17, 18, 19, 20, 21, 22, 23, 24, 25, 30, 35, 40 or more amino acids in length.

[0262] Naturally-occurring wild-type Cas9 enzymes comprise two nuclease domains, a HNH nuclease domain and a RuvC domain. Herein, the “Cas9” refers to both naturally-occurring and recombinant Cas9s. Cas9 enzymes contemplated herein can comprise a HNH or HNH-like nuclease domain, and/or a RuvC or RuvC-like nuclease domain.

[0263] HNH or HNH-like domains comprise a McrA-like fold. HNH or HNH-like domains comprises two antiparallel β-strands and an α-helix. HNH or HNH-like domains comprises a metal binding site (e.g., a divalent cation binding site). HNH or HNH-like domains can cleave one strand of a target nucleic acid (e.g., the complementary strand of the crRNA targeted strand).

[0264] RuvC or RuvC-like domains comprise an RNaseH or RnaseH-like fold. RuvC/RnaseH domains are involved in a diverse set of nucleic acid-based functions including acting on both RNA and DNA. The RnaseH domain comprises 5 β-strands surrounded by a plurality of α-helices. RuvC/RnaseH or RuvC/RnaseH-like domains comprise a metal binding site (e.g., a divalent cation binding site). RuvC/RnaseH or RuvC/RnaseH-like domains can cleave one strand of a target nucleic acid (e.g., the non-complementary strand of a double-stranded target DNA).

[0265] Site-directed polypeptides can introduce double-strand breaks or single-strand breaks in nucleic acids, e.g., genomic DNA. The double-strand break can stimulate a cell's endogenous DNA-repair pathways (e.g., homology-dependent repair (HDR) or NHEJ or alternative non-homologous end joining (A-NHEJ) or microhomology-mediated end joining (MMEJ)). NHEJ can repair cleaved target nucleic acid without the need for a homologous template. This can sometimes result in small deletions or insertions (indels) in the target nucleic acid at the site of cleavage, and can lead to disruption or alteration of gene expression. HDR can occur when a homologous repair template, or donor, is available. The homologous donor template can comprise sequences that are homologous to sequences flanking the target nucleic acid cleavage site. The sister chromatid can be used by the cell as the repair template. However, for the purposes of genome editing, the repair template can be supplied as an exogenous nucleic acid, such as a plasmid, duplex oligonucleotide, single-strand oligonucleotide or viral nucleic acid. With exogenous donor templates, an additional nucleic acid sequence (such as a transgene) or modification (such as a single or multiple base change or a deletion) can be introduced between the flanking regions of homology so that the additional or altered nucleic acid sequence also becomes incorporated into the target locus. MMEJ can result in a genetic outcome that is similar to NHEJ in that small deletions and insertions can occur at the cleavage site. MMEJ can make use of homologous sequences of a few basepairs flanking the cleavage site to drive a favored end-joining DNA repair outcome. In some instances it may be possible to predict likely repair outcomes based on analysis of potential microhomologies in the nuclease target regions.

[0266] Thus, in some cases, homologous recombination can be used to insert an exogenous polynucleotide sequence into the target nucleic acid cleavage site. An exogenous polynucleotide sequence is termed a donor polynucleotide (or donor or donor sequence) herein. The donor polynucleotide, a portion of the donor polynucleotide, a copy of the donor polynucleotide, or a portion of a copy of the donor polynucleotide can be inserted into the target nucleic acid cleavage site. The donor polynucleotide can be an exogenous polynucleotide sequence, i.e., a sequence that does not naturally occur at the target nucleic acid cleavage site.

[0267] The modifications of the target DNA due to NHEJ and/or HDR can lead to, for example, mutations, deletions, alterations, integrations, gene correction, gene replacement, gene tagging, transgene insertion, nucleotide deletion, gene disruption, translocations and/or gene mutation. The processes of deleting genomic DNA and integrating non-native nucleic acid into genomic DNA are examples of genome editing.

[0268] The site-directed polypeptide can comprise an amino acid sequence having at least 10%, at least 15%, at least 20%, at least 30%, at least 40%, at least 50%, at least 60%, at least 70%, at least 75%, at least 80%, at least 85%, at least 90%, at least 95%, at least 99%, or 100% amino acid sequence identity to a wild-type exemplary site-directed polypeptide [e.g., Cas9 from S. pyogenes, US2014/0068797 Sequence ID No. 8 or Sapranauskas et al., Nucleic Acids Res, 39(21): 9275-9282 (2011)], and various other site-directed polypeptides. The site-directed polypeptide can comprise at least 70, 75, 80, 85, 90, 95, 97, 99, or 100% identity to a wild-type site-directed polypeptide (e.g., Cas9 from S. pyogenes, supra) over 10 contiguous amino acids. The site-directed polypeptide can comprise at most: 70, 75, 80, 85, 90, 95, 97, 99, or 100% identity to a wild-type site-directed polypeptide (e.g., Cas9 from S. pyogenes, supra) over 10 contiguous amino acids. The site-directed polypeptide can comprise at least: 70, 75, 80, 85, 90, 95, 97, 99, or 100% identity to a wild-type site-directed polypeptide (e.g., Cas9 from S. pyogenes, supra) over 10 contiguous amino acids in a HNH nuclease domain of the site-directed polypeptide. The site-directed polypeptide can comprise at most: 70, 75, 80, 85, 90, 95, 97, 99, or 100% identity to a wild-type site-directed polypeptide (e.g., Cas9 from S. pyogenes, supra) over 10 contiguous amino acids in a HNH nuclease domain of the site-directed polypeptide. The site-directed polypeptide can comprise at least: 70, 75, 80, 85, 90, 95, 97, 99, or 100% identity to a wild-type site-directed polypeptide (e.g., Cas9 from S. pyogenes, supra) over 10 contiguous amino acids in a RuvC nuclease domain of the site-directed polypeptide. The site-directed polypeptide can comprise at most: 70, 75, 80, 85, 90, 95, 97, 99, or 100% identity to a wild-type site-directed polypeptide (e.g., Cas9 from S. pyogenes, supra) over 10 contiguous amino acids in a RuvC nuclease domain of the site-directed polypeptide.

[0269] The site-directed polypeptide can comprise a modified form of a wild-type exemplary site-directed polypeptide. The modified form of the wild-type exemplary site-directed polypeptide can comprise a mutation that reduces the nucleic acid-cleaving activity of the site-directed polypeptide. The modified form of the wild-type exemplary site-directed polypeptide can have less than 90%, less than 80%, less than 70%, less than 60%, less than 50%, less than 40%, less than 30%, less than 20%, less than 10%, less than 5%, or less than 1% of the nucleic acid-cleaving activity of the wild-type exemplary site-directed polypeptide (e.g., Cas9 from S. pyogenes, supra). The modified form of the site-directed polypeptide can have no substantial nucleic acid-cleaving activity. When a site-directed polypeptide is a modified form that has no substantial nucleic acid-cleaving activity, it is referred to herein as “enzymatically inactive.”

[0270] The modified form of the site-directed polypeptide can comprise a mutation such that it can induce a single-strand break (SSB) on a target nucleic acid (e.g., by cutting only one of the sugar-phosphate backbones of a double-strand target nucleic acid). The mutation can result in less than 90%, less than 80%, less than 70%, less than 60%, less than 50%, less than 40%, less than 30%, less than 20%, less than 10%, less than 5%, or less than 1% of the nucleic acid-cleaving activity in one or more of the plurality of nucleic acid-cleaving domains of the wild-type site directed polypeptide (e.g., Cas9 from S. pyogenes, supra). The mutation can result in one or more of the plurality of nucleic acid-cleaving domains retaining the ability to cleave the complementary strand of the target nucleic acid, but reducing its ability to cleave the non-complementary strand of the target nucleic acid. The mutation can result in one or more of the plurality of nucleic acid-cleaving domains retaining the ability to cleave the non-complementary strand of the target nucleic acid, but reducing its ability to cleave the complementary strand of the target nucleic acid. For example, residues in the wild-type exemplary S. pyogenes Cas9 polypeptide, such as Asp10, His840, Asn854 and Asn856, are mutated to inactivate one or more of the plurality of nucleic acid-cleaving domains (e.g., nuclease domains). The residues to be mutated can correspond to residues Asp10, His840, Asn854 and Asn856 in the wild-type exemplary S. pyogenes Cas9 polypeptide (e.g., as determined by sequence and/or structural alignment). Non-limiting examples of mutations include D10A, H840A, N854A or N856A. One skilled in the art will recognize that mutations other than alanine substitutions can be suitable.

[0271] A D10A mutation can be combined with one or more of H840A, N854A, or N856A mutations to produce a site-directed polypeptide substantially lacking DNA cleavage activity. A H840A mutation can be combined with one or more of D10A, N854A, or N856A mutations to produce a site-directed polypeptide substantially lacking DNA cleavage activity. A N854A mutation can be combined with one or more of H840A, D10A, or N856A mutations to produce a site-directed polypeptide substantially lacking DNA cleavage activity. A N856A mutation can be combined with one or more of H840A, N854A, or D10A mutations to produce a site-directed polypeptide substantially lacking DNA cleavage activity. Site-directed polypeptides that comprise one substantially inactive nuclease domain are referred to as “nickases”.

[0272] Nickase variants of RNA-guided endonucleases, for example Cas9, can be used to increase the specificity of CRISPR-mediated genome editing. Wild type Cas9 is typically guided by a single guide RNA designed to hybridize with a specified 20 nucleotide sequence in the target sequence (such as an endogenous genomic locus). However, several mismatches can be tolerated between the guide RNA and the target locus, effectively reducing the length of required homology in the target site to, for example, as little as 13 nt of homology, and thereby resulting in elevated potential for binding and double-strand nucleic acid cleavage by the CRISPR/Cas9 complex elsewhere in the target genome—also known as off-target cleavage. Because nickase variants of Cas9 each only cut one strand, in order to create a double-strand break it is necessary for a pair of nickases to bind in close proximity and on opposite strands of the target nucleic acid, thereby creating a pair of nicks, which is the equivalent of a double-strand break. This requires that two separate guide RNAs—one for each nickase—must bind in close proximity and on opposite strands of the target nucleic acid. This requirement essentially doubles the minimum length of homology needed for the double-strand break to occur, thereby reducing the likelihood that a double-strand cleavage event will occur elsewhere in the genome, where the two guide RNA sites—if they exist—are unlikely to be sufficiently close to each other to enable the double-strand break to form. As described in the art, nickases can also be used to promote HDR versus NHEJ. HDR can be used to introduce selected changes into target sites in the genome through the use of specific donor sequences that effectively mediate the desired changes.

[0273] Mutations contemplated can include substitutions, additions, and deletions, or any combination thereof. The mutation converts the mutated amino acid to alanine. The mutation converts the mutated amino acid to another amino acid (e.g., glycine, serine, threonine, cysteine, valine, leucine, isoleucine, methionine, proline, phenylalanine, tyrosine, tryptophan, aspartic acid, glutamic acid, asparagines, glutamine, histidine, lysine, or arginine). The mutation converts the mutated amino acid to a non-natural amino acid (e.g., selenomethionine). The mutation converts the mutated amino acid to amino acid mimics (e.g., phosphomimics). The mutation can be a conservative mutation. For example, the mutation converts the mutated amino acid to amino acids that resemble the size, shape, charge, polarity, conformation, and/or rotamers of the mutated amino acids (e.g., cysteine/serine mutation, lysine/asparagine mutation, histidine/phenylalanine mutation). The mutation can cause a shift in reading frame and/or the creation of a premature stop codon. Mutations can cause changes to regulatory regions of genes or loci that affect expression of one or more genes.

[0274] The site-directed polypeptide (e.g., variant, mutated, enzymatically inactive and/or conditionally enzymatically inactive site-directed polypeptide) can target nucleic acid. The site-directed polypeptide (e.g., variant, mutated, enzymatically inactive and/or conditionally enzymatically inactive endoribonuclease) can target DNA. The site-directed polypeptide (e.g., variant, mutated, enzymatically inactive and/or conditionally enzymatically inactive endoribonuclease) can target RNA.

[0275] The site-directed polypeptide can comprise one or more non-native sequences (e.g., the site-directed polypeptide is a fusion protein).

[0276] The site-directed polypeptide can comprise an amino acid sequence comprising at least 15% amino acid identity to a Cas9 from a bacterium (e.g., S. pyogenes), a nucleic acid binding domain, and two nucleic acid cleaving domains (i.e., a HNH domain and a RuvC domain).

[0277] The site-directed polypeptide can comprise an amino acid sequence comprising at least 15% amino acid identity to a Cas9 from a bacterium (e.g., S. pyogenes), and two nucleic acid cleaving domains (i.e., a HNH domain and a RuvC domain).

[0278] The site-directed polypeptide can comprise an amino acid sequence comprising at least 15% amino acid identity to a Cas9 from a bacterium (e.g., S. pyogenes), and two nucleic acid cleaving domains, wherein one or both of the nucleic acid cleaving domains comprise at least 50% amino acid identity to a nuclease domain from Cas9 from a bacterium (e.g., S. pyogenes).

[0279] The site-directed polypeptide can comprise an amino acid sequence comprising at least 15% amino acid identity to a Cas9 from a bacterium (e.g., S. pyogenes), two nucleic acid cleaving domains (i.e., a HNH domain and a RuvC domain), and non-native sequence (for example, a nuclear localization signal) or a linker linking the site-directed polypeptide to a non-native sequence.

[0280] The site-directed polypeptide can comprise an amino acid sequence comprising at least 15% amino acid identity to a Cas9 from a bacterium (e.g., S. pyogenes), two nucleic acid cleaving domains (i.e., a HNH domain and a RuvC domain), wherein the site-directed polypeptide comprises a mutation in one or both of the nucleic acid cleaving domains that reduces the cleaving activity of the nuclease domains by at least 50%.

[0281] The site-directed polypeptide can comprise an amino acid sequence comprising at least 15% amino acid identity to a Cas9 from a bacterium (e.g., S. pyogenes), and two nucleic acid cleaving domains (i.e., a HNH domain and a RuvC domain), wherein one of the nuclease domains comprises mutation of aspartic acid 10, and/or wherein one of the nuclease domains can comprise a mutation of histidine 840, and wherein the mutation reduces the cleaving activity of the nuclease domain(s) by at least 50%.

[0282] The one or more site-directed polypeptides, e.g. DNA endonucleases, can comprise two nickases that together effect one double-strand break at a specific locus in the genome, or four nickases that together effect or cause two double-strand breaks at specific loci in the genome. Alternatively, one site-directed polypeptide, e.g. DNA endonuclease, can effect or cause one double-strand break at a specific locus in the genome.

[0283] The site-directed polypeptide can be flanked at the N-terminus, the C-terminus, or both the N-terminus and C-terminus by one or more nuclear localization signals (NLSs). For example, a Cas9 endonuclease can be flanked by two NLSs, one NLS located at the N-terminus and the second NLS located at the C-terminus. The NLS can be any NLS known in the art, such as a SV40 NLS.

[0284] Genome-Targeting Nucleic Acid

[0285] The present disclosure provides a genome-targeting nucleic acid that can direct the activities of an associated polypeptide (e.g., a site-directed polypeptide) to a specific target sequence within a target nucleic acid. The genome-targeting nucleic acid can be an RNA. A genome-targeting RNA is referred to as a “guide RNA” or “gRNA” herein. A guide RNA can comprise at least a spacer sequence that hybridizes to a target nucleic acid sequence of interest, and a CRISPR repeat sequence. In Type II systems, the gRNA also comprises a second RNA called the tracrRNA sequence. In the Type II guide RNA (gRNA), the CRISPR repeat sequence and tracrRNA sequence hybridize to each other to form a duplex. In the Type V guide RNA (gRNA), the crRNA forms a duplex. In both systems, the duplex can bind a site-directed polypeptide, such that the guide RNA and site-direct polypeptide form a complex. The genome-targeting nucleic acid can provide target specificity to the complex by virtue of its association with the site-directed polypeptide. The genome-targeting nucleic acid thus can direct the activity of the site-directed polypeptide.

[0286] Exemplary guide RNAs include the spacer sequences in SEQ ID NOs: 1-71,947 and the sgRNA sequences in SEQ ID NOs: 71,950-71,959 of the Sequence Listing. As is understood by the person of ordinary skill in the art, each guide RNA can be designed to include a spacer sequence complementary to its genomic target sequence. For example, each of the spacer sequences in SEQ ID NOs: 1-71,947 of the Sequence Listing can be put into a single RNA chimera or a crRNA (along with a corresponding tracrRNA). See Jinek et al., Science, 337, 816-821 (2012) and Deltcheva et al., Nature, 471, 602-607 (2011) or Table 1.

[0287] The genome-targeting nucleic acid can be a double-molecule guide RNA. The genome-targeting nucleic acid can be a single-molecule guide RNA.

[0288] A double-molecule guide RNA can comprise two strands of RNA. The first strand comprises in the 5′ to 3′ direction, an optional spacer extension sequence, a spacer sequence and a minimum CRISPR repeat sequence. The second strand can comprise a minimum tracrRNA sequence (complementary to the minimum CRISPR repeat sequence), a 3′ tracrRNA sequence and an optional tracrRNA extension sequence.

[0289] A single-molecule guide RNA (sgRNA) in a Type II system can comprise, in the 5′ to 3′ direction, an optional spacer extension sequence, a spacer sequence, a minimum CRISPR repeat sequence, a single-molecule guide linker, a minimum tracrRNA sequence, a 3′ tracrRNA sequence and an optional tracrRNA extension sequence. The optional tracrRNA extension can comprise elements that contribute additional functionality (e.g., stability) to the guide RNA. The single-molecule guide linker can link the minimum CRISPR repeat and the minimum tracrRNA sequence to form a hairpin structure. The optional tracrRNA extension can comprise one or more hairpins.

[0290] A single-molecule guide RNA (sgRNA) in a Type V system can comprise, in the 5′ to 3′ direction, a minimum CRISPR repeat sequence and a spacer sequence.

[0291] The sgRNA can comprise a 20 nucleotide spacer sequence at the 5′ end of the sgRNA sequence. The sgRNA can comprise a less than a 20 nucleotide spacer sequence at the 5′ end of the sgRNA sequence. The sgRNA can comprise a more than 20 nucleotide spacer sequence at the 5′ end of the sgRNA sequence. The sgRNA can comprise a variable length spacer sequence with 17-30 nucleotides at the 5′ end of the sgRNA sequence (see Table 1).

[0292] The sgRNA can comprise no uracil at the 3′end of the sgRNA sequence, such as in SEQ ID NO: 71,961 of Table 1. The sgRNA can comprise one or more uracil at the 3′end of the sgRNA sequence, such as in SEQ ID NO: 71,962 in Table 1. For example, the sgRNA can comprise 1 uracil (U) at the 3′ end of the sgRNA sequence. The sgRNA can comprise 2 uracil (UU) at the 3′ end of the sgRNA sequence. The sgRNA can comprise 3 uracil (UUU) at the 3′ end of the sgRNA sequence. The sgRNA can comprise 4 uracil (UUUU) at the 3′ end of the sgRNA sequence. The sgRNA can comprise 5 uracil (UUUUU) at the 3′ end of the sgRNA sequence. The sgRNA can comprise 6 uracil (UUUUUU) at the 3′ end of the sgRNA sequence. The sgRNA can comprise 7 uracil (UUUUUUU) at the 3′ end of the sgRNA sequence. The sgRNA can comprise 8 uracil (UUUUUUUU) at the 3′ end of the sgRNA sequence.

[0293] The sgRNA can be unmodified or modified. For example, modified sgRNAs can comprise one or more 2′-O-methyl phosphorothioate nucleotides.

TABLE 1

| SEQ ID NO. | sgRNA sequence |
|---|---|
| 71,960 | nnnnnnnnnnnnnnnnnnnnguuuuagagcuagaaaua |
| | gcaaguuaaaauaaggcuaguccguuaucaacuugaaa |
| | aaguggcaccgagucggugcuuuu |
| 71,961 | nnnnnnnnnnnnnnnnnnnnguuuuagagcuagaaaua |
| | gcaaguuaaaauaaggcuaguccguuaucaacuugaaa |
| | aaguggcaccgagucggugc |
| 71,962 | n₍₁₇₋₃₀₎guuuuagagcuagaaauagcaaguuaaaauaa |
| | ggcuaguccguuaucaacuugaaaaaguggcaccgagu |
| | cggugcu₍₁₋₈₎ |

[0294] By way of illustration, guide RNAs used in the CRISPR/Cas/Cpf1 system, or other smaller RNAs can be readily synthesized by chemical means, as illustrated below and described in the art. While chemical synthetic procedures are continually expanding, purifications of such RNAs by procedures such as high performance liquid chromatography (HPLC, which avoids the use of gels such as PAGE) tends to become more challenging as polynucleotide lengths increase significantly beyond a hundred or so nucleotides. One approach used for generating RNAs of greater length is to produce two or more molecules that are ligated together. Much longer RNAs, such as those encoding a Cas9 or Cpf1 endonuclease, are more readily generated enzymatically. Various types of RNA modifications can be introduced during or after chemical synthesis and/or enzymatic generation of RNAs, e.g., modifications that enhance stability, reduce the likelihood or degree of innate immune response, and/or enhance other attributes, as described in the art.

[0295] Spacer Extension Sequence

[0296] In some examples of genome-targeting nucleic acids, a spacer extension sequence can modify activity, provide stability and/or provide a location for modifications of a genome-targeting nucleic acid. A spacer extension sequence can modify on- or off-target activity or specificity. In some examples, a spacer extension sequence can be provided. The spacer extension sequence can have a length of more than 1,5, 10, 15, 20, 25, 30, 35, 40, 45, 50, 60, 70, 80, 90, 100, 120, 140, 160, 180, 200, 220, 240, 260, 280, 300, 320, 340, 360, 380, 400, 1000, 2000, 3000, 4000, 5000, 6000, or 7000 or more nucleotides. The spacer extension sequence can have a length of less than 1, 5, 10, 15, 20, 25, 30, 35, 40, 45, 50, 60, 70, 80, 90, 100, 120, 140, 160, 180, 200, 220, 240, 260, 280, 300, 320, 340, 360, 380, 400, 1000, 2000, 3000, 4000, 5000, 6000, 7000 or more nucleotides. The spacer extension sequence can be less than 10 nucleotides in length. The spacer extension sequence can be between 10-30 nucleotides in length. The spacer extension sequence can be between 30-70 nucleotides in length.

[0297] The spacer extension sequence can comprise another moiety (e.g., a stability control sequence, an endoribonuclease binding sequence, a ribozyme). The moiety can decrease or increase the stability of a nucleic acid targeting nucleic acid. The moiety can be a transcriptional terminator segment (i.e., a transcription termination sequence). The moiety can function in a eukaryotic cell. The moiety can function in a prokaryotic cell. The moiety can function in both eukaryotic and prokaryotic cells. Non-limiting examples of suitable moieties include: a 5′ cap (e.g., a 7-methylguanylate cap (m7 G)), a riboswitch sequence (e.g., to allow for regulated stability and/or regulated accessibility by proteins and protein complexes), a sequence that forms a dsRNA duplex (i.e., a hairpin), a sequence that targets the RNA to a subcellular location (e.g., nucleus, mitochondria, chloroplasts, and the like), a modification or sequence that provides for tracking (e.g., direct conjugation to a fluorescent molecule, conjugation to a moiety that facilitates fluorescent detection, a sequence that allows for fluorescent detection, etc.), and/or a modification or sequence that provides a binding site for proteins (e.g., proteins that act on DNA, including transcriptional activators, transcriptional controls, DNA methyltransferases, DNA demethylases, histone acetyltransferases, histone deacetylases, and the like).

[0298] Spacer Sequence

[0299] The spacer sequence hybridizes to a sequence in a target nucleic acid of interest. The spacer of a genome-targeting nucleic acid can interact with a target nucleic acid in a sequence-specific manner via hybridization (i.e., base pairing). The nucleotide sequence of the spacer can vary depending on the sequence of the target nucleic acid of interest.

[0300] In a CRISPR/Cas system herein, the spacer sequence can be designed to hybridize to a target nucleic acid that is located 5′ of a PAM of the Cas9 enzyme used in the system. The spacer may perfectly match the target sequence or may have mismatches. Each Cas9 enzyme has a particular PAM sequence that it recognizes in a target DNA. For example, S. pyogenes recognizes in a target nucleic acid a PAM that comprises the sequence 5′-NRG-3′, where R comprises either A or G, where N is any nucleotide and N is immediately 3′ of the target nucleic acid sequence targeted by the spacer sequence.

[0301] The target nucleic acid sequence can comprise 20 nucleotides. The target nucleic acid can comprise less than 20 nucleotides. The target nucleic acid can comprise more than 20 nucleotides. The target nucleic acid can comprise at least: 5, 10, 15, 16, 17, 18, 19, 20, 21, 22, 23, 24, 25, 30 or more nucleotides. The target nucleic acid can comprise at most: 5, 10, 15, 16, 17, 18, 19, 20, 21, 22, 23, 24, 25, 30 or more nucleotides. The target nucleic acid sequence can comprise 20 bases immediately 5′ of the first nucleotide of the PAM. For example, in a sequence comprising 5′-NNNNNNNNNNNNNNNNNNNNNRG-3′ (SEQ ID NO: 71,948), the target nucleic acid can comprise the sequence that corresponds to the Ns, wherein N is any nucleotide, and the underlined NRG sequence is the S. pyogenes PAM.

[0302] The spacer sequence that hybridizes to the target nucleic acid can have a length of at least about 6 nucleotides (nt). The spacer sequence can be at least about 6 nt, at least about 10 nt, at least about 15 nt, at least about 18 nt, at least about 19 nt, at least about 20 nt, at least about 25 nt, at least about 30 nt, at least about 35 nt or at least about 40 nt, from about 6 nt to about 80 nt, from about 6 nt to about 50 nt, from about 6 nt to about 45 nt, from about 6 nt to about 40 nt, from about 6 nt to about 35 nt, from about 6 nt to about 30 nt, from about 6 nt to about 25 nt, from about 6 nt to about 20 nt, from about 6 nt to about 19 nt, from about 10 nt to about 50 nt, from about 10 nt to about 45 nt, from about 10 nt to about 40 nt, from about 10 nt to about 35 nt, from about 10 nt to about 30 nt, from about 10 nt to about 25 nt, from about 10 nt to about 20 nt, from about 10 nt to about 19 nt, from about 19 nt to about 25 nt, from about 19 nt to about 30 nt, from about 19 nt to about 35 nt, from about 19 nt to about 40 nt, from about 19 nt to about 45 nt, from about 19 nt to about 50 nt, from about 19 nt to about 60 nt, from about 20 nt to about 25 nt, from about 20 nt to about 30 nt, from about 20 nt to about 35 nt, from about 20 nt to about 40 nt, from about 20 nt to about 45 nt, from about 20 nt to about 50 nt, or from about 20 nt to about 60 nt. In some examples, the spacer sequence can comprise 20 nucleotides. In some examples, the spacer can comprise 19 nucleotides.

[0303] In some examples, the percent complementarity between the spacer sequence and the target nucleic acid is at least about 30%, at least about 40%, at least about 50%, at least about 60%, at least about 65%, at least about 70%, at least about 75%, at least about 80%, at least about 85%, at least about 90%, at least about 95%, at least about 97%, at least about 98%, at least about 99%, or 100%. In some examples, the percent complementarity between the spacer sequence and the target nucleic acid is at most about 30%, at most about 40%, at most about 50%, at most about 60%, at most about 65%, at most about 70%, at most about 75%, at most about 80%, at most about 85%, at most about 90%, at most about 95%, at most about 97%, at most about 98%, at most about 99%, or 100%. In some examples, the percent complementarity between the spacer sequence and the target nucleic acid is 100% over the six contiguous 5′-most nucleotides of the target sequence of the complementary strand of the target nucleic acid. The percent complementarity between the spacer sequence and the target nucleic acid can be at least 60% over about 20 contiguous nucleotides. The length of the spacer sequence and the target nucleic acid can differ by 1 to 6 nucleotides, which may be thought of as a bulge or bulges.

[0304] The spacer sequence can be designed or chosen using a computer program. The computer program can use variables, such as predicted melting temperature, secondary structure formation, predicted annealing temperature, sequence identity, genomic context, chromatin accessibility, % GC, frequency of genomic occurrence (e.g., of sequences that are identical or are similar but vary in one or more spots as a result of mismatch, insertion or deletion), methylation status, presence of SNPs, and the like.

[0305] Minimum CRISPR Repeat Sequence

[0306] A minimum CRISPR repeat sequence can be a sequence with at least about 30%, about 40%, about 50%, about 60%, about 65%, about 70%, about 75%, about 80%, about 85%, about 90%, about 95%, or 100% sequence identity to a reference CRISPR repeat sequence (e.g., crRNA from S. pyogenes).

[0307] A minimum CRISPR repeat sequence can comprise nucleotides that can hybridize to a minimum tracrRNA sequence in a cell. The minimum CRISPR repeat sequence and a minimum tracrRNA sequence can form a duplex, i.e. a base-paired double-stranded structure. Together, the minimum CRISPR repeat sequence and the minimum tracrRNA sequence can bind to the site-directed polypeptide. At least a part of the minimum CRISPR repeat sequence can hybridize to the minimum tracrRNA sequence. At least a part of the minimum CRISPR repeat sequence can comprise at least about 30%, about 40%, about 50%, about 60%, about 65%, about 70%, about 75%, about 80%, about 85%, about 90%, about 95%, or 100% complementary to the minimum tracrRNA sequence. At least a part of the minimum CRISPR repeat sequence can comprise at most about 30%, about 40%, about 50%, about 60%, about 65%, about 70%, about 75%, about 80%, about 85%, about 90%, about 95%, or 100% complementary to the minimum tracrRNA sequence.

[0308] The minimum CRISPR repeat sequence can have a length from about 7 nucleotides to about 100 nucleotides. For example, the length of the minimum CRISPR repeat sequence is from about 7 nucleotides (nt) to about 50 nt, from about 7 nt to about 40 nt, from about 7 nt to about 30 nt, from about 7 nt to about 25 nt, from about 7 nt to about 20 nt, from about 7 nt to about 15 nt, from about 8 nt to about 40 nt, from about 8 nt to about 30 nt, from about 8 nt to about 25 nt, from about 8 nt to about 20 nt, from about 8 nt to about 15 nt, from about 15 nt to about 100 nt, from about 15 nt to about 80 nt, from about 15 nt to about 50 nt, from about 15 nt to about 40 nt, from about 15 nt to about 30 nt, or from about 15 nt to about 25 nt. In some examples, the minimum CRISPR repeat sequence can be approximately 9 nucleotides in length. The minimum CRISPR repeat sequence can be approximately 12 nucleotides in length.

[0309] The minimum CRISPR repeat sequence can be at least about 60% identical to a reference minimum CRISPR repeat sequence (e.g., wild-type crRNA from S. pyogenes) over a stretch of at least 6, 7, or 8 contiguous nucleotides. For example, the minimum CRISPR repeat sequence can be at least about 65% identical, at least about 70% identical, at least about 75% identical, at least about 80% identical, at least about 85% identical, at least about 90% identical, at least about 95% identical, at least about 98% identical, at least about 99% identical or 100% identical to a reference minimum CRISPR repeat sequence over a stretch of at least 6, 7, or 8 contiguous nucleotides.

[0310] Minimum tracrRNA Sequence

[0311] A minimum tracrRNA sequence can be a sequence with at least about 30%, about 40%, about 50%, about 60%, about 65%, about 70%, about 75%, about 80%, about 85%, about 90%, about 95%, or 100% sequence identity to a reference tracrRNA sequence (e.g., wild type tracrRNA from S. pyogenes).

[0312] A minimum tracrRNA sequence can comprise nucleotides that hybridize to a minimum CRISPR repeat sequence in a cell. A minimum tracrRNA sequence and a minimum CRISPR repeat sequence form a duplex, i.e. a base-paired double-stranded structure. Together, the minimum tracrRNA sequence and the minimum CRISPR repeat can bind to a site-directed polypeptide. At least a part of the minimum tracrRNA sequence can hybridize to the minimum CRISPR repeat sequence. The minimum tracrRNA sequence can be at least about 30%, about 40%, about 50%, about 60%, about 65%, about 70%, about 75%, about 80%, about 85%, about 90%, about 95%, or 100% complementary to the minimum CRISPR repeat sequence.

[0313] The minimum tracrRNA sequence can have a length from about 7 nucleotides to about 100 nucleotides. For example, the minimum tracrRNA sequence can be from about 7 nucleotides (nt) to about 50 nt, from about 7 nt to about 40 nt, from about 7 nt to about 30 nt, from about 7 nt to about 25 nt, from about 7 nt to about 20 nt, from about 7 nt to about 15 nt, from about 8 nt to about 40 nt, from about 8 nt to about 30 nt, from about 8 nt to about 25 nt, from about 8 nt to about 20 nt, from about 8 nt to about 15 nt, from about 15 nt to about 100 nt, from about 15 nt to about 80 nt, from about 15 nt to about 50 nt, from about 15 nt to about 40 nt, from about 15 nt to about 30 nt or from about 15 nt to about 25 nt long. The minimum tracrRNA sequence can be approximately 9 nucleotides in length. The minimum tracrRNA sequence can be approximately 12 nucleotides. The minimum tracrRNA can consist of tracrRNA nt 23-48 described in Jinek et aL, supra.

[0314] The minimum tracrRNA sequence can be at least about 60% identical to a reference minimum tracrRNA (e.g., wild type, tracrRNA from S. pyogenes) sequence over a stretch of at least 6, 7, or 8 contiguous nucleotides. For example, the minimum tracrRNA sequence can be at least about 65% identical, about 70% identical, about 75% identical, about 80% identical, about 85% identical, about 90% identical, about 95% identical, about 98% identical, about 99% identical or 100% identical to a reference minimum tracrRNA sequence over a stretch of at least 6, 7, or 8 contiguous nucleotides.

[0315] The duplex between the minimum CRISPR RNA and the minimum tracrRNA can comprise a double helix. The duplex between the minimum CRISPR RNA and the minimum tracrRNA can comprise at least about 1, 2, 3, 4, 5, 6, 7, 8, 9, or 10 or more nucleotides. The duplex between the minimum CRISPR RNA and the minimum tracrRNA can comprise at most about 1, 2, 3, 4, 5, 6, 7, 8, 9, or 10 or more nucleotides.

[0316] The duplex can comprise a mismatch (i.e., the two strands of the duplex are not 100% complementary). The duplex can comprise at least about 1, 2, 3, 4, or 5 or mismatches. The duplex can comprise at most about 1, 2, 3, 4, or 5 or mismatches. The duplex can comprise no more than 2 mismatches.

[0317] Bulges

[0318] In some cases, there can be a “bulge” in the duplex between the minimum CRISPR RNA and the minimum tracrRNA. A bulge is an unpaired region of nucleotides within the duplex. A bulge can contribute to the binding of the duplex to the site-directed polypeptide. The bulge can comprise, on one side of the duplex, an unpaired 5′-XXXY-3′ where X is any purine and Y comprises a nucleotide that can form a wobble pair with a nucleotide on the opposite strand, and an unpaired nucleotide region on the other side of the duplex. The number of unpaired nucleotides on the two sides of the duplex can be different.

[0319] In one example, the bulge can comprise an unpaired purine (e.g., adenine) on the minimum CRISPR repeat strand of the bulge. In some examples, the bulge can comprise an unpaired 5′-AAGY-3′ of the minimum tracrRNA sequence strand of the bulge, where Y comprises a nucleotide that can form a wobble pairing with a nucleotide on the minimum CRISPR repeat strand.

[0320] A bulge on the minimum CRISPR repeat side of the duplex can comprise at least 1, 2, 3, 4, or 5 or more unpaired nucleotides. A bulge on the minimum CRISPR repeat side of the duplex can comprise at most 1, 2, 3, 4, or 5 or more unpaired nucleotides. A bulge on the minimum CRISPR repeat side of the duplex can comprise 1 unpaired nucleotide.

[0321] A bulge on the minimum tracrRNA sequence side of the duplex can comprise at least 1, 2, 3, 4, 5, 6, 7, 8, 9, or 10 or more unpaired nucleotides. A bulge on the minimum tracrRNA sequence side of the duplex can comprise at most 1, 2, 3, 4, 5, 6, 7, 8, 9, or 10 or more unpaired nucleotides. A bulge on a second side of the duplex (e.g., the minimum tracrRNA sequence side of the duplex) can comprise 4 unpaired nucleotides.

[0322] A bulge can comprise at least one wobble pairing. In some examples, a bulge can comprise at most one wobble pairing. A bulge can comprise at least one purine nucleotide. A bulge can comprise at least 3 purine nucleotides. A bulge sequence can comprises at least 5 purine nucleotides. A bulge sequence can comprise at least one guanine nucleotide. In some examples, a bulge sequence can comprise at least one adenine nucleotide.

[0323] Hairpins

[0324] In various examples, one or more hairpins can be located 3′ to the minimum tracrRNA in the 3′ tracrRNA sequence.

[0325] The hairpin can start at least about 1, 2, 3, 4, 5, 6, 7, 8, 9, 10, 15, or 20 or more nucleotides 3′ from the last paired nucleotide in the minimum CRISPR repeat and minimum tracrRNA sequence duplex. The hairpin can start at most about 1, 2, 3, 4, 5, 6, 7, 8, 9 or 10 or more nucleotides 3′ of the last paired nucleotide in the minimum CRISPR repeat and minimum tracrRNA sequence duplex.

[0326] The hairpin can comprise at least about 1, 2, 3, 4, 5, 6, 7, 8, 9, 10, 15, or 20 or more consecutive nucleotides. The hairpin can comprise at most about 1, 2, 3, 4, 5, 6, 7, 8, 9, 10, 15, or more consecutive nucleotides.

[0327] The hairpin can comprise a CC dinucleotide (i.e., two consecutive cytosine nucleotides).

[0328] The hairpin can comprise duplexed nucleotides (e.g., nucleotides in a hairpin, hybridized together). For example, a hairpin can comprise a CC dinucleotide that is hybridized to a GG dinucleotide in a hairpin duplex of the 3′ tracrRNA sequence.

[0329] One or more of the hairpins can interact with guide RNA-interacting regions of a site-directed polypeptide.

[0330] In some examples, there are two or more hairpins, and in other examples there are three or more hairpins.

[0331] 3′ tracrRNA Sequence

[0332] A 3′ tracrRNA sequence can comprise a sequence with at least about 30%, about 40%, about 50%, about 60%, about 65%, about 70%, about 75%, about 80%, about 85%, about 90%, about 95%, or 100% sequence identity to a reference tracrRNA sequence (e.g., a tracrRNA from S. pyogenes).

[0333] The 3′ tracrRNA sequence can have a length from about 6 nucleotides to about 100 nucleotides. For example, the 3′ tracrRNA sequence can have a length from about 6 nucleotides (nt) to about 50 nt, from about 6 nt to about 40 nt, from about 6 nt to about 30 nt, from about 6 nt to about 25 nt, from about 6 nt to about 20 nt, from about 6 nt to about 15 nt, from about 8 nt to about 40 nt, from about 8 nt to about 30 nt, from about 8 nt to about 25 nt, from about 8 nt to about 20 nt, from about 8 nt to about 15 nt, from about 15 nt to about 100 nt, from about 15 nt to about 80 nt, from about 15 nt to about 50 nt, from about 15 nt to about 40 nt, from about 15 nt to about 30 nt, or from about 15 nt to about 25 nt. The 3′ tracrRNA sequence can have a length of approximately 14 nucleotides.

[0334] The 3′ tracrRNA sequence can be at least about 60% identical to a reference 3′ tracrRNA sequence (e.g., wild type 3′ tracrRNA sequence from S. pyogenes) over a stretch of at least 6, 7, or 8 contiguous nucleotides. For example, the 3′ tracrRNA sequence can be at least about 60% identical, about 65% identical, about 70% identical, about 75% identical, about 80% identical, about 85% identical, about 90% identical, about 95% identical, about 98% identical, about 99% identical, or 100% identical, to a reference 3′ tracrRNA sequence (e.g., wild type 3′ tracrRNA sequence from S. pyogenes) over a stretch of at least 6, 7, or 8 contiguous nucleotides.

[0335] The 3′ tracrRNA sequence can comprise more than one duplexed region (e.g., hairpin, hybridized region). The 3′ tracrRNA sequence can comprise two duplexed regions.

[0336] The 3′ tracrRNA sequence can comprise a stem loop structure. The stem loop structure in the 3′ tracrRNA can comprise at least 1, 2, 3, 4, 5, 6, 7, 8, 9, 10, 15 or 20 or more nucleotides. The stem loop structure in the 3′ tracrRNA can comprise at most 1, 2, 3, 4, 5, 6, 7, 8, 9 or 10 or more nucleotides. The stem loop structure can comprise a functional moiety. For example, the stem loop structure can comprise an aptamer, a ribozyme, a protein-interacting hairpin, a CRISPR array, an intron, or an exon. The stem loop structure can comprise at least about 1, 2, 3, 4, or 5 or more functional moieties. The stem loop structure can comprise at most about 1, 2, 3, 4, or 5 or more functional moieties.

[0337] The hairpin in the 3′ tracrRNA sequence can comprise a P-domain. In some examples, the P-domain can comprise a double-stranded region in the hairpin.

[0338] tracrRNA Extension Sequence

[0339] A tracrRNA extension sequence may be provided whether the tracrRNA is in the context of single-molecule guides or double-molecule guides. The tracrRNA extension sequence can have a length from about 1 nucleotide to about 400 nucleotides. The tracrRNA extension sequence can have a length of more than 1, 5, 10, 15, 20, 25, 30, 35, 40, 45, 50, 60, 70, 80, 90, 100, 120, 140, 160, 180, 200, 220, 240, 260, 280, 300, 320, 340, 360, 380, or 400 nucleotides. The tracrRNA extension sequence can have a length from about 20 to about 5000 or more nucleotides. The tracrRNA extension sequence can have a length of more than 1000 nucleotides. The tracrRNA extension sequence can have a length of less than 1, 5, 10, 15, 20, 25, 30, 35, 40, 45, 50, 60, 70, 80, 90, 100, 120, 140, 160, 180,200,220,240,260,280,300, 320, 340, 360, 380, 400 or more nucleotides. The tracrRNA extension sequence can have a length of less than 1000 nucleotides. The tracrRNA extension sequence can comprise less than 10 nucleotides in length. The tracrRNA extension sequence can be 10-30 nucleotides in length. The tracrRNA extension sequence can be 30-70 nucleotides in length.

[0340] The tracrRNA extension sequence can comprise a functional moiety (e.g., a stability control sequence, ribozyme, endoribonuclease binding sequence). The functional moiety can comprise a transcriptional terminator segment (i.e., a transcription termination sequence). The functional moiety can have a total length from about 10 nucleotides (nt) to about 100 nucleotides, from about 10 nt to about 20 nt, from about 20 nt to about 30 nt, from about 30 nt to about 40 nt, from about 40 nt to about 50 nt, from about 50 nt to about 60 nt, from about 60 nt to about 70 nt, from about 70 nt to about 80 nt, from about 80 nt to about 90 nt, or from about 90 nt to about 100 nt, from about 15 nt to about 80 nt, from about 15 nt to about 50 nt, from about 15 nt to about 40 nt, from about 15 nt to about 30 nt, or from about 15 nt to about 25 nt. The functional moiety can function in a eukaryotic cell. The functional moiety can function in a prokaryotic cell. The functional moiety can function in both eukaryotic and prokaryotic cells.

[0341] Non-limiting examples of suitable tracrRNA extension functional moieties include a 3′ poly-adenylated tail, a riboswitch sequence (e.g., to allow for regulated stability and/or regulated accessibility by proteins and protein complexes), a sequence that forms a dsRNA duplex (i.e., a hairpin), a sequence that targets the RNA to a subcellular location (e.g., nucleus, mitochondria, chloroplasts, and the like), a modification or sequence that provides for tracking (e.g., direct conjugation to a fluorescent molecule, conjugation to a moiety that facilitates fluorescent detection, a sequence that allows for fluorescent detection, etc.), and/or a modification or sequence that provides a binding site for proteins (e.g., proteins that act on DNA, including transcriptional activators, transcriptional controls, DNA methyltransferases, DNA demethylases, histone acetyltransferases, histone deacetylases, and the like). The tracrRNA extension sequence can comprise a primer binding site or a molecular index (e.g., barcode sequence). The tracrRNA extension sequence can comprise one or more affinity tags.

[0342] Single-Molecule Guide Linker Sequence

[0343] The linker sequence of a single-molecule guide nucleic acid can have a length from about 3 nucleotides to about 100 nucleotides. In Jinek et al., supra, for example, a simple 4 nucleotide “tetraloop” (-GAAA-) was used, Science, 337(6096):816-821 (2012). An illustrative linker has a length from about 3 nucleotides (nt) to about 90 nt, from about 3 nt to about 80 nt, from about 3 nt to about 70 nt, from about 3 nt to about 60 nt, from about 3 nt to about 50 nt, from about 3 nt to about 40 nt, from about 3 nt to about 30 nt, from about 3 nt to about 20 nt, from about 3 nt to about 10 nt. For example, the linker can have a length from about 3 nt to about 5 nt, from about 5 nt to about 10 nt, from about 10 nt to about 15 nt, from about 15 nt to about 20 nt, from about 20 nt to about 25 nt, from about 25 nt to about 30 nt, from about 30 nt to about 35 nt, from about 35 nt to about 40 nt, from about 40 nt to about 50 nt, from about 50 nt to about 60 nt, from about 60 nt to about 70 nt, from about 70 nt to about 80 nt, from about 80 nt to about 90 nt, or from about 90 nt to about 100 nt. The linker of a single-molecule guide nucleic acid can be between 4 and 40 nucleotides. The linker can be at least about 100, 500, 1000, 1500, 2000, 2500, 3000, 3500, 4000, 4500, 5000, 5500, 6000, 6500, or 7000 or more nucleotides. The linker can be at most about 100, 500, 1000, 1500, 2000, 2500, 3000, 3500, 4000, 4500, 5000, 5500, 6000, 6500, or 7000 or more nucleotides.

[0344] Linkers can comprise any of a variety of sequences, although in some examples the linker will not comprise sequences that have extensive regions of homology with other portions of the guide RNA, which might cause intramolecular binding that could interfere with other functional regions of the guide. In Jinek et al., supra, a simple 4 nucleotide sequence -GAAA- was used, Science, 337(6096):816-821 (2012), but numerous other sequences, including longer sequences can likewise be used.

[0345] The linker sequence can comprise a functional moiety. For example, the linker sequence can comprise one or more features, including an aptamer, a ribozyme, a protein-interacting hairpin, a protein binding site, a CRISPR array, an intron, or an exon. The linker sequence can comprise at least about 1, 2, 3, 4, or 5 or more functional moieties. In some examples, the linker sequence can comprise at most about 1, 2, 3, 4, or 5 or more functional moieties.

[0346] A step of the ex vivo methods of the present disclosure can comprise editing the patient specific iPSC cells using genome engineering. Alternatively, a step of the ex vivo methods of the present disclosure can comprise editing mesenchymal stem cell, or hematopoietic progenitor cell. Likewise, a step of the in vivo methods of the present disclosure can comprise editing the cells in a patient having hemoglobinopathy using genome engineering. Similarly, a step in the cellular methods of the present disclosure can comprise editing within or near a BCL11A gene or other DNA sequence that encodes a regulatory element of the BCL11A gene in a human cell by genome engineering.

[0347] Different patients with hemoglobinopathy will generally require different deletion, modulation, or inactivation strategies. Any CRISPR endonuclease may be used in the methods of the present disclosure, each CRISPR endonuclease having its own associated PAM, which may or may not be disease specific. For example, gRNA spacer sequences for targeting within or near a BCL11A gene or other DNA sequence that encodes a regulatory element of the BCL11A gene with a CRISPR/Cas9 endonuclease from S. pyogenes have been identified in SEQ ID NOs: 1-29,482 of the Sequence Listing. gRNA spacer sequences for targeting within or near a BCL11A gene or other DNA sequence that encodes a regulatory element of the BCL11A gene with a CRISPR/Cas9 endonuclease from S. aureus have been identified in SEQ ID NOs: 29,483-32,387 of the Sequence Listing. gRNA spacer sequences for targeting within or near a BCL11A gene or other DNA sequence that encodes a regulatory element of the BCL11A gene with a CRISPR/Cas9 endonuclease from S. thermophilus have been identified in SEQ ID NOs. 32,388-33,420 of the Sequence Listing. gRNA spacer sequences for targeting within or near a BCL11A gene or other DNA sequence that encodes a regulatory element of the BCL11A gene with a CRISPR/Cas9 endonuclease from T. denticola have been identified in SEQ ID NOs. 33,421-33,851 of the Sequence Listing. gRNA spacer sequences for targeting within or near a BCL11A gene or other DNA sequence that encodes a regulatory element of the BCL11A gene with a CRISPR/Cas9 endonuclease from N. meningitides have been identified in SEQ ID NOs. 33,852-36,731. gRNA spacer sequences for targeting within or near a BCL11A gene or other DNA sequence that encodes a regulatory element of the BCL11A gene with a CRISPR/Cpf1 endonuclease from Acidominococcus, Lachnospiraceae, and Franciscella Novicida have been identified in SEQ ID NOs. 36,732-71,947.

[0348] For example, the transcriptional control sequence of the BCL11A gene can be modulated or inactivated by deletions that arise due to the NHEJ pathway. NHEJ can be used to delete segments of the transcriptional control sequence of the BCL11A gene, either directly or by altering splice donor or acceptor sites through cleavage by one gRNA targeting several locations, or several gRNAs.

[0349] The transcriptional control sequence of the BCL11A gene can also be modulated or inactivated by inserting a wild-type BCL11A gene or cDNA comprising a modified transcriptional control sequence. For example, the donor for modulating or activating by HDR contains the modified transcriptional control sequence of the BCL11A gene with small or large flanking homology arms to allow for annealing. HDR is essentially an error-free mechanism that uses a supplied homologous DNA sequence as a template during DSB repair. The rate of homology directed repair (HDR) is a function of the distance between the transcriptional control sequence and the cut site so choosing overlapping or nearest target sites is important. Templates can include extra sequences flanked by the homologous regions or can contain a sequence that differs from the genomic sequence, thus allowing sequence editing.

[0350] In addition to modulating or inactivating the transcriptional control sequence of the BCL11A gene by NHEJ or HDR, a range of other options are possible. If there are small or large deletions, a cDNA can be knocked in that contains a modified transcriptional control sequence. A full length cDNA can be knocked into any “safe harbor”, but must use a supplied or other promoter. If this construct is knocked into the correct location, it will have physiological control, similar to the normal gene. Pairs of nucleases can be used to delete gene regions, though a donor would usually have to be provided to modulate or inactivate the function. In this case two gRNA would be supplied and one donor sequence.

[0351] Some genome engineering strategies involve modulating or inactivating a transcriptional control sequence of the BCL11A gene by deleting at least a portion of the transcriptional control sequence of the BCL11A gene and/or knocking-in a wild-type BCL11A gene or cDNA comprising a modified transcriptional control sequence into the locus of the corresponding gene or a safe harbour locus by homology directed repair (HDR), which is also known as homologous recombination (HR). This strategy can modulate or inactivate the transcriptional control sequence of the BCL11A gene and reverse, treat, and/or mitigate the diseased state. Donor nucleotides for modulating/inactivating transcriptional control sequences often are small (<300 bp). This is advantageous, as HDR efficiencies may be inversely related to the size of the donor molecule. Also, it is expected that the donor templates can fit into size constrained adeno-associated virus (AAV) molecules, which have been shown to be an effective means of donor template delivery.

[0352] Homology direct repair is a cellular mechanism for repairing double-stranded breaks (DSBs). The most common form is homologous recombination. There are additional pathways for HDR, including single-strand annealing and alternative-HDR. Genome engineering tools allow researchers to manipulate the cellular homologous recombination pathways to create site-specific modifications to the genome. It has been found that cells can repair a double-stranded break using a synthetic donor molecule provided in trans. Therefore, by introducing a double-stranded break near a specific mutation and providing a suitable donor, targeted changes can be made in the genome. Specific cleavage increases the rate of HDR more than 1,000 fold above the rate of 1 in 10⁶ cells receiving a homologous donor alone. The rate of homology directed repair (HDR) at a particular nucleotide is a function of the distance to the cut site, so choosing overlapping or nearest target sites is important. Gene editing offers the advantage over gene addition, as correcting in situ leaves the rest of the genome unperturbed.

[0353] Supplied donors for editing by HDR vary markedly but can contain the intended sequence with small or large flanking homology arms to allow annealing to the genomic DNA. The homology regions flanking the introduced genetic changes can be 30 bp or smaller, or as large as a multi-kilobase cassette that can contain promoters, cDNAs, etc. Both single-stranded and double-stranded oligonucleotide donors have been used. These oligonucleotides range in size from less than 100 nt to over many kb, though longer ssDNA can also be generated and used. Double-stranded donors can be used, including PCR amplicons, plasmids, and mini-circles. In general, it has been found that an AAV vector can be a very effective means of delivery of a donor template, though the packaging limits for individual donors is <5 kb. Active transcription of the donor increased HDR three-fold, indicating the inclusion of promoter may increase conversion. Conversely, CpG methylation of the donor decreased gene expression and HDR.

[0354] In addition to wildtype endonucleases, such as Cas9, nickase variants exist that have one or the other nuclease domain inactivated resulting in cutting of only one DNA strand. HDR can be directed from individual Cas nickases or using pairs of nickases that flank the target area. Donors can be single-stranded, nicked, or dsDNA.

[0355] The donor DNA can be supplied with the nuclease or independently by a variety of different methods, for example by transfection, nano-particle, micro-injection, or viral transduction. A range of tethering options have been proposed to increase the availability of the donors for HDR. Examples include attaching the donor to the nuclease, attaching to DNA binding proteins that bind nearby, or attaching to proteins that are involved in DNA end binding or repair.

[0356] The repair pathway choice can be guided by a number of culture conditions, such as those that influence cell cycling, or by targeting of DNA repair and associated proteins. For example, to increase HDR, key NHEJ molecules can be suppressed, such as KU70, KU80 or DNA ligase IV.

[0357] Without a donor present, the ends from a DNA break or ends from different breaks can be joined using the several nonhomologous repair pathways in which the DNA ends are joined with little or no base-pairing at the junction. In addition to canonical NHEJ, there are similar repair mechanisms, such as alt-NHEJ. If there are two breaks, the intervening segment can be deleted or inverted. NHEJ repair pathways can lead to insertions, deletions or mutations at the joints.

[0358] NHEJ was used to insert a 15-kb inducible gene expression cassette into a defined locus in human cell lines after nuclease cleavage. Maresca, M., Lin, V. G., Guo, N. & Yang, Y., Genome Res 23, 539-546 (2013).

[0359] In addition to genome editing by NHEJ or HDR, site-specific gene insertions have been conducted that use both the NHEJ pathway and HR. A combination approach may be applicable in certain settings, possibly including intron/exon borders. NHEJ may prove effective for ligation in the intron, while the error-free HDR may be better suited in the coding region.

[0360] As a further alternative, wild-type BCL11A gene or cDNA comprising a modified transcriptional control sequence can be knocked-in to the locus of the corresponding gene or knocked-in to a safe harbor site, such as AAVS1. In some examples, the methods can provide one gRNA or a pair of gRNAs that can be used to facilitate incorporation of a new sequence from a polynucleotide donor template to knock-in a part of or the entire wild-type BCL11A gene or cDNA comprising a modified transcriptional control sequence.

[0361] The methods can provide gRNA pairs that make a deletion by cutting the gene twice, one gRNA cutting at the 5′ end of one or more mutations and the other gRNA cutting at the 3′ end of one or more mutations that facilitates insertion of a new sequence from a polynucleotide donor template to replace the transcriptional control sequence of the BCL11A gene. The cutting can be accomplished by a pair of DNA endonucleases that each makes a DSB in the genome, or by multiple nickases that together make a DSB in the genome.

[0362] Alternatively, the methods can provide one gRNA to make one double-strand cut around a transcriptional control sequence of the BCL11A gene that facilitates insertion of a new sequence from a polynucleotide donor template to replace the transcriptional control sequence of the BCL11A gene with a wild-type BCL11A gene or cDNA comprising a modified transcriptional control sequence. The double-strand cut can be made by a single DNA endonuclease or multiple nickases that together make a DSB in the genome.

[0363] Illustrative modifications within or near the BCL11A gene or other DNA sequence that encodes a regulatory element of the BCL11A gene include replacements within or near (proximal) the transcriptional control sequence of the BCL11A gene referred to above, such as within the region of less than 3 kb, less than 2 kb, less than 1 kb, less than 0.5 kb upstream or downstream of the transcriptional control sequence.

[0364] Such variants can include replacements that are larger in the 5′ and/or 3′ direction than the specific replacement in question, or smaller in either direction. Accordingly, by “near” or “proximal” with respect to specific replacements, it is intended that the SSB or DSB locus associated with a desired replacement boundary (also referred to herein as an endpoint) can be within a region that is less than about 3 kb from the reference locus noted. The SSB or DSB locus can be more proximal and within 2 kb, within 1 kb, within 0.5 kb, or within 0.1 kb. In the case of small replacement, the desired endpoint can be at or “adjacent to” the reference locus, by which it is intended that the endpoint can be within 100 bp, within 50 bp, within 25 bp, or less than about 10 bp to 5 bp from the reference locus.

[0365] Examples comprising larger or smaller replacements can be expected to provide the same benefit, as long as the transcriptional control activity is modulated or inactivated. It is thus expected that many variations of the replacements described and illustrated herein can be effective for ameliorating hemoglobinopathies.

[0366] Another genome engineering strategy involves exon or intron deletion. Targeted deletion of specific exons or introns can be an attractive strategy for treating a large subset of patients with a single therapeutic cocktail. Deletions can either be single exon or intron deletions or multi-exon or intron deletions. While multi-exon deletions can reach a larger number of patients, for larger deletions the efficiency of deletion greatly decreases with increased size. Therefore, deletions range can be from 40 to 10,000 base pairs (bp) in size. For example, deletions can range from 40-100; 100-300; 300-500; 500-1,000; 1,000-2,000; 2,000-3,000; 3,000-5,000; or 5,000-10,000 base pairs in size. It may be desirable to delete an intron if the intron contains a regulatory element, such as a transcriptional control element (e.g., a transcription factor binding site).

[0367] In order to ensure that the pre-mRNA is properly processed following deletion, the surrounding splicing signals can be deleted. Splicing donor and acceptors are generally within 100 base pairs of the neighboring intron. Therefore, in some examples, methods can provide all gRNAs that cut approximately +/−100-3100 bp with respect to each exon/intron junction of interest.

[0368] For any of the genome editing strategies, gene editing can be confirmed by sequencing or PCR analysis.

[0369] Target Sequence Selection

[0370] Shifts in the location of the 5′ boundary and/or the 3′ boundary relative to particular reference loci can be used to facilitate or enhance particular applications of gene editing, which depend in part on the endonuclease system selected for the editing, as further described and illustrated herein.

[0371] In a first nonlimiting example of such target sequence selection, many endonuclease systems have rules or criteria that can guide the initial selection of potential target sites for cleavage, such as the requirement of a PAM sequence motif in a particular position adjacent to the DNA cleavage sites in the case of CRISPR Type II or Type V endonucleases.

[0372] In another nonlimiting example of target sequence selection or optimization, the frequency of off-target activity for a particular combination of target sequence and gene editing endonuclease (i.e. the frequency of DSBs occurring at sites other than the selected target sequence) can be assessed relative to the frequency of on-target activity. In some cases, cells that have been correctly edited at the desired locus can have a selective advantage relative to other cells. Illustrative, but nonlimiting, examples of a selective advantage include the acquisition of attributes such as enhanced rates of replication, persistence, resistance to certain conditions, enhanced rates of successful engraftment or persistence in vivo following introduction into a patient, and other attributes associated with the maintenance or increased numbers or viability of such cells. In other cases, cells that have been correctly edited at the desired locus can be positively selected for by one or more screening methods used to identify, sort or otherwise select for cells that have been correctly edited. Both selective advantage and directed selection methods can take advantage of the phenotype associated with the correction. In some cases, cells can be edited two or more times in order to create a second modification that creates a new phenotype that is used to select or purify the intended population of cells. Such a second modification could be created by adding a second gRNA for a selectable or screenable marker. In some cases, cells can be correctly edited at the desired locus using a DNA fragment that contains the cDNA and also a selectable marker.

[0373] Whether any selective advantage is applicable or any directed selection is to be applied in a particular case, target sequence selection can also be guided by consideration of off-target frequencies in order to enhance the effectiveness of the application and/or reduce the potential for undesired alterations at sites other than the desired target. As described further and illustrated herein and in the art, the occurrence of off-target activity can be influenced by a number of factors including similarities and dissimilarities between the target site and various off-target sites, as well as the particular endonuclease used. Bioinformatics tools are available that assist in the prediction of off-target activity, and frequently such tools can also be used to identify the most likely sites of off-target activity, which can then be assessed in experimental settings to evaluate relative frequencies of off-target to on-target activity, thereby allowing the selection of sequences that have higher relative on-target activities. Illustrative examples of such techniques are provided herein, and others are known in the art.

[0374] Another aspect of target sequence selection relates to homologous recombination events. Sequences sharing regions of homology can serve as focal points for homologous recombination events that result in deletion of intervening sequences. Such recombination events occur during the normal course of replication of chromosomes and other DNA sequences, and also at other times when DNA sequences are being synthesized, such as in the case of repairs of double-strand breaks (DSBs), which occur on a regular basis during the normal cell replication cycle but can also be enhanced by the occurrence of various events (such as UV light and other inducers of DNA breakage) or the presence of certain agents (such as various chemical inducers). Many such inducers cause DSBs to occur indiscriminately in the genome, and DSBs can be regularly induced and repaired in normal cells. During repair, the original sequence can be reconstructed with complete fidelity, however, in some cases, small insertions or deletions (referred to as “indels”) are introduced at the DSB site.

[0375] DSBs can also be specifically induced at particular locations, as in the case of the endonucleases systems described herein, which can be used to cause directed or preferential gene modification events at selected chromosomal locations. The tendency for homologous sequences to be subject to recombination in the context of DNA repair (as well as replication) can be taken advantage of in a number of circumstances, and is the basis for one application of gene editing systems, such as CRISPR, in which homology directed repair is used to insert a sequence of interest, provided through use of a “donor” polynucleotide, into a desired chromosomal location.

[0376] Regions of homology between particular sequences, which can be small regions of “microhomology” that can comprise as few as ten basepairs or less, can also be used to bring about desired deletions. For example, a single DSB can be introduced at a site that exhibits microhomology with a nearby sequence. During the normal course of repair of such DSB, a result that occurs with high frequency is the deletion of the intervening sequence as a result of recombination being facilitated by the DSB and concomitant cellular repair process.

[0377] In some circumstances, however, selecting target sequences within regions of homology can also give rise to much larger deletions, including gene fusions (when the deletions are in coding regions), which may or may not be desired given the particular circumstances.

[0378] The examples provided herein further illustrate the selection of various target regions for the creation of DSBs designed to induce replacements that result in the modulation or inactivation of transcriptional control protein activity, as well as the selection of specific target sequences within such regions that are designed to minimize off-target events relative to on-target events.

[0379] Nucleic Acid Modifications

[0380] In some cases, polynucleotides introduced into cells can comprise one or more modifications that can be used individually or in combination, for example, to enhance activity, stability or specificity, alter delivery, reduce innate immune responses in host cells, or for other enhancements, as further described herein and known in the art.

[0381] In certain examples, modified polynucleotides can be used in the CRISPR/Cas9/Cpf1 system, in which case the guide RNAs (either single-molecule guides or double-molecule guides) and/or a DNA or an RNA encoding a Cas or Cpf1 endonuclease introduced into a cell can be modified, as described and illustrated below. Such modified polynucleotides can be used in the CRISPR/Cas9/Cpf1 system to edit any one or more genomic loci.

[0382] Using the CRISPR/Cas9/Cpf1 system for purposes of nonlimiting illustrations of such uses, modifications of guide RNAs can be used to enhance the formation or stability of the CRISPR/Cas9/Cpf1 genome editing complex comprising guide RNAs, which can be single-molecule guides or double-molecule, and a Cas or Cpf1 endonuclease. Modifications of guide RNAs can also or alternatively be used to enhance the initiation, stability or kinetics of interactions between the genome editing complex with the target sequence in the genome, which can be used, for example, to enhance on-target activity. Modifications of guide RNAs can also or alternatively be used to enhance specificity, e.g., the relative rates of genome editing at the on-target site as compared to effects at other (off-target) sites.

[0383] Modifications can also or alternatively be used to increase the stability of a guide RNA, e.g., by increasing its resistance to degradation by ribonucleases (RNases) present in a cell, thereby causing its half-life in the cell to be increased. Modifications enhancing guide RNA half-life can be particularly useful in aspects in which a Cas or Cpf1 endonuclease is introduced into the cell to be edited via an RNA that needs to be translated in order to generate endonuclease, because increasing the half-life of guide RNAs introduced at the same time as the RNA encoding the endonuclease can be used to increase the time that the guide RNAs and the encoded Cas or Cpf1 endonuclease co-exist in the cell.

[0384] Modifications can also or alternatively be used to decrease the likelihood or degree to which RNAs introduced into cells elicit innate immune responses. Such responses, which have been well characterized in the context of RNA interference (RNAi), including small-interfering RNAs (siRNAs), as described below and in the art, tend to be associated with reduced half-life of the RNA and/or the elicitation of cytokines or other factors associated with immune responses.

[0385] One or more types of modifications can also be made to RNAs encoding an endonuclease that are introduced into a cell, including, without limitation, modifications that enhance the stability of the RNA (such as by increasing its degradation by RNAses present in the cell), modifications that enhance translation of the resulting product (i.e. the endonuclease), and/or modifications that decrease the likelihood or degree to which the RNAs introduced into cells elicit innate immune responses.

[0386] Combinations of modifications, such as the foregoing and others, can likewise be used. In the case of CRISPR/Cas9/Cpf1, for example, one or more types of modifications can be made to guide RNAs (including those exemplified above), and/or one or more types of modifications can be made to RNAs encoding Cas endonuclease (including those exemplified above).

[0387] By way of illustration, guide RNAs used in the CRISPR/Cas9/Cpf1 system, or other smaller RNAs can be readily synthesized by chemical means, enabling a number of modifications to be readily incorporated, as illustrated below and described in the art. While chemical synthetic procedures are continually expanding, purifications of such RNAs by procedures such as high performance liquid chromatography (HPLC, which avoids the use of gels such as PAGE) tends to become more challenging as polynucleotide lengths increase significantly beyond a hundred or so nucleotides. One approach that can be used for generating chemically-modifed RNAs of greater length is to produce two or more molecules that are ligated together. Much longer RNAs, such as those encoding a Cas9 endonuclease, are more readily generated enzymatically. While fewer types of modifications are available for use in enzymatically produced RNAs, there are still modifications that can be used to, e.g., enhance stability, reduce the likelihood or degree of innate immune response, and/or enhance other attributes, as described further below and in the art; and new types of modifications are regularly being developed.

[0388] By way of illustration of various types of modifications, especially those used frequently with smaller chemically synthesized RNAs, modifications can comprise one or more nucleotides modified at the 2′ position of the sugar, in some aspects a 2′-O-alkyl, 2′-O-alkyl-O-alkyl, or 2′-fluoro-modified nucleotide. In some examples, RNA modifications can comprise 2′-fluoro, 2′-amino or 2′ O-methyl modifications on the ribose of pyrimidines, abasic residues, or an inverted base at the 3′ end of the RNA. Such modifications can be routinely incorporated into oligonucleotides and these oligonucleotides have been shown to have a higher Tm (i.e., higher target binding affinity) than 2′-deoxyoligonucleotides against a given target.

[0389] A number of nucleotide and nucleoside modifications have been shown to make the oligonucleotide into which they are incorporated more resistant to nuclease digestion than the native oligonucleotide; these modified oligos survive intact for a longer time than unmodified oligonucleotides. Specific examples of modified oligonucleotides include those comprising modified backbones, for example, phosphorothioates, phosphotriesters, methyl phosphonates, short chain alkyl or cycloalkyl intersugar linkages or short chain heteroatomic or heterocyclic intersugar linkages. Some oligonucleotides are oligonucleotides with phosphorothioate backbones and those with heteroatom backbones, particularly CH₂—NH—O—CH₂, CH, ˜N(CH₃)˜O˜CH₂ (known as a methylene(methylimino) or MMI backbone), CH₂—O—N(CH₃)—CH₂, CH₂—N(CH₃)—N(CH₃)—CH₂ and O—N(CH₃)—CH₂—CH₂ backbones, wherein the native phosphodiester backbone is represented as O—P—O—CH,); amide backbones [see De Mesmaeker et al., Ace. Chem. Res., 28:366-374 (1995)]; morpholino backbone structures (see Summerton and Weller, U.S. Pat. No. 5,034,506); peptide nucleic acid (PNA) backbone (wherein the phosphodiester backbone of the oligonucleotide is replaced with a polyamide backbone, the nucleotides being bound directly or indirectly to the aza nitrogen atoms of the polyamide backbone, see Nielsen et al., Science 1991, 254, 1497). Phosphorus-containing linkages include, but are not limited to, phosphorothioates, chiral phosphorothioates, phosphorodithioates, phosphotriesters, aminoalkylphosphotriesters, methyl and other alkyl phosphonates comprising 3′alkylene phosphonates and chiral phosphonates, phosphinates, phosphoramidates comprising 3′-amino phosphoramidate and aminoalkylphosphoramidates, thionophosphoramidates, thionoalkylphosphonates, thionoalkylphosphotriesters, and boranophosphates having normal 3′-5′ linkages, 2′-5′ linked analogs of these, and those having inverted polarity wherein the adjacent pairs of nucleoside units are linked 3′-5′ to 5′-3′ or 2′-5′ to 5′-2′; see U.S. Pat. Nos. 3,687,808; 4,469,863; 4,476,301; 5,023,243; 5,177,196; 5,188,897; 5,264,423; 5,276,019; 5,278,302; 5,286,717; 5,321,131; 5,399,676; 5,405,939; 5,453,496; 5,455,233; 5,466,677; 5,476,925; 5,519,126; 5,536,821; 5,541,306; 5,550,111; 5,563,253; 5,571,799; 5,587,361; and 5,625,050.

[0390] Morpholino-based oligomeric compounds are described in Braasch and David Corey, Biochemistry, 41(14): 4503-4510 (2002); Genesis, Volume 30, Issue 3, (2001); Heasman, Dev. Biol., 243: 209-214 (2002); Nasevicius et al., Nat. Genet., 26:216-220 (2000); Lacerra et al., Proc. Natl. Acad. Sci., 97: 9591-9596 (2000); and U.S. Pat. No. 5,034,506, issued Jul. 23, 1991.

[0391] Cyclohexenyl nucleic acid oligonucleotide mimetics are described in Wang et al., J. Am. Chem. Soc., 122: 8595-8602 (2000).

[0392] Modified oligonucleotide backbones that do not include a phosphorus atom therein have backbones that are formed by short chain alkyl or cycloalkyl internucleoside linkages, mixed heteroatom and alkyl or cycloalkyl internucleoside linkages, or one or more short chain heteroatomic or heterocyclic internucleoside linkages. These comprise those having morpholino linkages (formed in part from the sugar portion of a nucleoside); siloxane backbones; sulfide, sulfoxide and sulfone backbones; formacetyl and thioformacetyl backbones; methylene formacetyl and thioformacetyl backbones; alkene containing backbones; sulfamate backbones; methyleneimino and methylenehydrazino backbones; sulfonate and sulfonamide backbones; amide backbones; and others having mixed N, O, S, and CH₂ component parts; see U.S. Pat. Nos. 5,034,506; 5,166,315; 5,185,444; 5,214,134; 5,216,141; 5,235,033; 5,264,562; 5,264,564; 5,405,938; 5,434,257; 5,466,677; 5,470,967; 5,489,677; 5,541,307; 5,561,225; 5,596,086; 5,602,240; 5,610,289; 5,602,240; 5,608,046; 5,610,289; 5,618,704; 5,623,070; 5,663,312; 5,633,360; 5,677,437; and 5,677,439.

[0393] One or more substituted sugar moieties can also be included, e.g., one of the following at the 2′ position: OH, SH, SCH₃, F, OCN, OCH₃OCH₃, OCH₃O(CH₂)n CH₃, O(CH₂)nNH₂, or O(CH₂)n CH₃, where n is from 1 to about 10; C1 to C10 lower alkyl, alkoxyalkoxy, substituted lower alkyl, alkaryl or aralkyl; Cl; Br; CN; CF₃; OCF₃; O-, S-, or N-alkyl; O-, S-, or N-alkenyl; SOCH₃; SO₂CH₃; ONO₂; NO₂; N₃; NH₂; heterocycloalkyl; heterocycloalkaryl; aminoalkylamino; polyalkylamino; substituted silyl; an RNA cleaving group; a reporter group; an intercalator; a group for improving the pharmacokinetic properties of an oligonucleotide; or a group for improving the pharmacodynamic properties of an oligonucleotide and other substituents having similar properties. In some aspects, a modification includes 2′-methoxyethoxy (2′-O—CH₂CH₂OCH₃, also known as 2′-O-(2-methoxyethyl)) (Martin et al, Helv. Chim. Acta, 1995, 78, 486). Other modifications include 2′-methoxy (2′-O—CH₃), 2′-propoxy (2′-OCH₂CH₂CH₃) and 2′-fluoro (2′-F). Similar modifications can also be made at other positions on the oligonucleotide, particularly the 3′ position of the sugar on the 3′ terminal nucleotide and the 5′ position of 5′ terminal nucleotide. Oligonucleotides can also have sugar mimetics, such as cyclobutyls in place of the pentofuranosyl group.

[0394] In some examples, both a sugar and an internucleoside linkage, i.e., the backbone, of the nucleotide units can be replaced with novel groups. The base units can be maintained for hybridization with an appropriate nucleic acid target compound. One such oligomeric compound, an oligonucleotide mimetic that has been shown to have excellent hybridization properties, is referred to as a peptide nucleic acid (PNA). In PNA compounds, the sugar-backbone of an oligonucleotide can be replaced with an amide containing backbone, for example, an aminoethylglycine backbone. The nucleobases can be retained and bound directly or indirectly to aza nitrogen atoms of the amide portion of the backbone. Representative United States patents that teach the preparation of PNA compounds comprise, but are not limited to, U.S. Pat. Nos. 5,539,082; 5,714,331; and 5,719,262. Further teaching of PNA compounds can be found in Nielsen et al, Science, 254: 1497-1500 (1991).

[0395] Guide RNAs can also include, additionally or alternatively, nucleobase (often referred to in the art simply as “base”) modifications or substitutions. As used herein, “unmodified” or “natural” nucleobases include adenine (A), guanine (G), thymine (T), cytosine (C), and uracil (U). Modified nucleobases include nucleobases found only infrequently or transiently in natural nucleic acids, e.g., hypoxanthine, 6-methyladenine, 5-Me pyrimidines, particularly 5-methylcytosine (also referred to as 5-methyl-2′ deoxycytosine and often referred to in the art as 5-Me-C), 5-hydroxymethylcytosine (HMC), glycosyl HMC and gentobiosyl HMC, as well as synthetic nucleobases, e.g., 2-aminoadenine, 2-(methylamino)adenine, 2-(imidazolylalkyl)adenine, 2-(aminoalklyamino)adenine or other heterosubstituted alkyladenines, 2-thiouracil, 2-thiothymine, 5-bromouracil, 5-hydroxymethyluracil, 8-azaguanine, 7-deazaguanine, N₆ (6-aminohexyl)adenine, and 2,6-diaminopurine. Kornberg, A., DNA Replication, W. H. Freeman & Co., San Francisco, pp 75-77 (1980); Gebeyehu et al., Nucl. Acids Res. 15:4513 (1997). A “universal” base known in the art, e.g., inosine, can also be included. 5-Me-C substitutions have been shown to increase nucleic acid duplex stability by 0.6-1.2° C. (Sanghvi, Y. S., in Crooke, S. T. and Lebleu, B., eds., Antisense Research and Applications, CRC Press, Boca Raton, 1993, pp. 276-278) and are aspects of base substitutions.

[0396] Modified nucleobases can comprise other synthetic and natural nucleobases, such as 5-methylcytosine (5-me-C), 5-hydroxymethyl cytosine, xanthine, hypoxanthine, 2-aminoadenine, 6-methyl and other alkyl derivatives of adenine and guanine, 2-propyl and other alkyl derivatives of adenine and guanine, 2-thiouracil, 2-thiothymine and 2-thiocytosine, 5-halouracil and cytosine, 5-propynyl uracil and cytosine, 6-azo uracil, cytosine and thymine, 5-uracil (pseudo-uracil), 4-thiouracil, 8-halo, 8-amino, 8-thiol, 8-thioalkyl, 8-hydroxyl and other 8-substituted adenines and guanines, 5-halo particularly 5-bromo, 5-trifluoromethyl and other 5-substituted uracils and cytosines, 7-methylquanine and 7-methyladenine, 8-azaguanine and 8-azaadenine, 7-deazaguanine and 7-deazaadenine, and 3-deazaguanine and 3-deazaadenine.

[0397] Further, nucleobases can comprise those disclosed in U.S. Pat. No. 3,687,808, those disclosed in ‘The Concise Encyclopedia of Polymer Science And Engineering’, pages 858-859, Kroschwitz, J. I., ed. John Wiley & Sons, 1990, those disclosed by Englisch et al., Angewandle Chemie, International Edition’, 1991, 30, page 613, and those disclosed by Sanghvi, Y. S., Chapter 15, Antisense Research and Applications’, pages 289-302, Crooke, S. T. and Lebleu, B. ea., CRC Press, 1993. Certain of these nucleobases are particularly useful for increasing the binding affinity of the oligomeric compounds of the invention. These include 5-substituted pyrimidines, 6-azapyrimidines and N-2, N-6 and 0-6 substituted purines, comprising 2-aminopropyladenine, 5-propynyluracil and 5-propynylcytosine. 5-methylcytosine substitutions have been shown to increase nucleic acid duplex stability by 0.6-1.2° C. (Sanghvi, Y. S., Crooke, S. T. and Lebleu, B., eds, ‘Antisense Research and Applications’, CRC Press, Boca Raton, 1993, pp. 276-278) and are aspects of base substitutions, even more particularly when combined with 2′-O-methoxyethyl sugar modifications. Modified nucleobases are described in U.S. Pat. No. 3,687,808, as well as U.S. Pat. Nos. 4,845,205; 5,130,302; 5,134,066; 5,175,273; 5,367,066; 5,432,272; 5,457,187; 5,459,255; 5,484,908; 5,502,177; 5,525,711; 5,552,540; 5,587,469; 5,596,091; 5,614,617; 5,681,941; 5,750,692; 5,763,588; 5,830,653; 6,005,096; and US Patent Application Publication 2003/0158403.

[0398] Thus, the term “modified” refers to a non-natural sugar, phosphate, or base that is incorporated into a guide RNA, an endonuclease, or transcriptional control sequence of BCL11A or both a guide RNA and an endonuclease. It is not necessary for all positions in a given oligonucleotide to be uniformly modified, and in fact more than one of the aforementioned modifications can be incorporated in a single oligonucleotide, or even in a single nucleoside within an oligonucleotide.

[0399] The guide RNAs and/or mRNA (or DNA) encoding an endonuclease can be chemically linked to one or more moieties or conjugates that enhance the activity, cellular distribution, or cellular uptake of the oligonucleotide. Such moieties comprise, but are not limited to, lipid moieties such as a cholesterol moiety [Letsinger et al., Proc. Natl. Acad. Sci. USA, 86: 6553-6556 (1989)]; cholic acid [Manoharan et al., Bioorg. Med. Chem. Let., 4: 1053-1060 (1994)]; a thioether, e.g., hexyl-S-tritylthiol [Manoharan et al, Ann. N. Y. Acad. Sci., 660: 306-309 (1992) and Manoharan et al., Bioorg. Med. Chem. Let., 3: 2765-2770 (1993)]; a thiocholesterol [Oberhauser et al., Nucl. Acids Res., 20: 533-538 (1992)]; an aliphatic chain, e.g., dodecandiol or undecyl residues [Kabanov et al., FEBS Lett., 259: 327-330 (1990) and Svinarchuk et al., Biochimie, 75: 49-54 (1993)]; a phospholipid, e.g., di-hexadecyl-rac-glycerol or triethylammonium 1,2-di-O-hexadecyl-rac-glycero-3-H-phosphonate [Manoharan et al., Tetrahedron Lett., 36: 3651-3654 (1995) and Shea et al., Nucl. Acids Res., 18: 3777-3783 (1990)]; a polyamine or a polyethylene glycol chain [Mancharan et al., Nucleosides & Nucleotides, 14: 969-973 (1995)]; adamantane acetic acid [Manoharan et al., Tetrahedron Lett., 36: 3651-3654 (1995)]; a palmityl moiety [(Mishra et al., Biochim. Biophys. Acta, 1264: 229-237 (1995)]; or an octadecylamine or hexylamino-carbonyl-t oxycholesterol moiety [Crooke et al., J. Pharmacol. Exp. Ther., 277: 923-937 (1996)]. See also U.S. Pat. Nos. 4,828,979; 4,948,882; 5,218,105; 5,525,465; 5,541,313; 5,545,730; 5,552,538; 5,578,717, 5,580,731; 5,580,731; 5,591,584; 5,109,124; 5,118,802; 5,138,045; 5,414,077; 5,486,603; 5,512,439; 5,578,718; 5,608,046; 4,587,044; 4,605,735; 4,667,025; 4,762,779; 4,789,737; 4,824,941; 4,835,263; 4,876,335; 4,904,582; 4,958,013; 5,082,830; 5,112,963; 5,214,136; 5,082,830; 5,112,963; 5,214,136; 5,245,022; 5,254,469; 5,258,506; 5,262,536; 5,272,250; 5,292,873; 5,317,098; 5,371,241, 5,391,723; 5,416,203, 5,451,463; 5,510,475; 5,512,667; 5,514,785; 5,565,552; 5,567,810; 5,574,142; 5,585,481; 5,587,371; 5,595,726; 5,597,696; 5,599,923; 5,599, 928 and 5,688,941.

[0400] Sugars and other moieties can be used to target proteins and complexes comprising nucleotides, such as cationic polysomes and liposomes, to particular sites. For example, hepatic cell directed transfer can be mediated via asialoglycoprotein receptors (ASGPRs); see, e.g., Hu, et al., Protein Pept Lett. 21 (10):1025-30 (2014). Other systems known in the art and regularly developed can be used to target biomolecules of use in the present case and/or complexes thereof to particular target cells of interest.

[0401] These targeting moieties or conjugates can include conjugate groups covalently bound to functional groups, such as primary or secondary hydroxyl groups. Conjugate groups of the invention include intercalators, reporter molecules, polyamines, polyamides, polyethylene glycols, polyethers, groups that enhance the pharmacodynamic properties of oligomers, and groups that enhance the pharmacokinetic properties of oligomers. Typical conjugate groups include cholesterols, lipids, phospholipids, biotin, phenazine, folate, phenanthridine, anthraquinone, acridine, fluoresceins, rhodamines, coumarins, and dyes. Groups that enhance the pharmacodynamic properties, in the context of this disclosure, include groups that improve uptake, enhance resistance to degradation, and/or strengthen sequence-specific hybridization with the target nucleic acid. Groups that enhance the pharmacokinetic properties, in the context of this invention, include groups that improve uptake, distribution, metabolism or excretion of the compounds of the present invention. Representative conjugate groups are disclosed in International Patent Application No. PCT/US92/09196, filed Oct. 23, 1992, and U.S. Pat. No. 6,287,860. Conjugate moieties include, but are not limited to, lipid moieties such as a cholesterol moiety, cholic acid, a thioether, e.g., hexyl-5-tritylthiol, a thiocholesterol, an aliphatic chain, e.g., dodecandiol or undecyl residues, a phospholipid, e.g., di-hexadecyl-rac-glycerol or triethylammonium 1,2-di-O-hexadecyl-rac-glycero-3-H-phosphonate, a polyamine or a polyethylene glycol chain, or adamantane acetic acid, a palmityl moiety, or an octadecylamine or hexylamino-carbonyl-oxy cholesterol moiety. See, e.g., U.S. Pat. Nos. 4,828,979; 4,948,882; 5,218,105; 5,525,465; 5,541,313; 5,545,730; 5,552,538; 5,578,717, 5,580,731; 5,580,731; 5,591,584; 5,109,124; 5,118,802; 5,138,045; 5,414,077; 5,486,603; 5,512,439; 5,578,718; 5,608,046; 4,587,044; 4,605,735; 4,667,025; 4,762,779; 4,789,737; 4,824,941; 4,835,263; 4,876,335; 4,904,582; 4,958,013; 5,082,830; 5,112,963; 5,214,136; 5,082,830; 5,112,963; 5,214,136; 5,245,022; 5,254,469; 5,258,506; 5,262,536; 5,272,250; 5,292,873; 5,317,098; 5,371,241, 5,391,723; 5,416,203, 5,451,463; 5,510,475; 5,512,667; 5,514,785; 5,565,552; 5,567,810; 5,574,142; 5,585,481; 5,587,371; 5,595,726; 5,597,696; 5,599,923; 5,599,928 and 5,688,941.

[0402] Longer polynucleotides that are less amenable to chemical synthesis and are typically produced by enzymatic synthesis can also be modified by various means. Such modifications can include, for example, the introduction of certain nucleotide analogs, the incorporation of particular sequences or other moieties at the 5′ or 3′ ends of molecules, and other modifications. By way of illustration, the mRNA encoding Cas9 is approximately 4 kb in length and can be synthesized by in vitro transcription. Modifications to the mRNA can be applied to, e.g., increase its translation or stability (such as by increasing its resistance to degradation with a cell), or to reduce the tendency of the RNA to elicit an innate immune response that is often observed in cells following introduction of exogenous RNAs, particularly longer RNAs such as that encoding Cas9.

[0403] Numerous such modifications have been described in the art, such as polyA tails, 5′ cap analogs (e.g., Anti Reverse Cap Analog (ARCA) or m7G(5′)ppp(5′)G (mCAP)), modified 5′ or 3′ untranslated regions (UTRs), use of modified bases (such as Pseudo-UTP, 2-Thio-UTP, 5-Methylcytidine-5′-Triphosphate (5-Methyl-CTP) or N₆-Methyl-ATP), or treatment with phosphatase to remove 5′ terminal phosphates. These and other modifications are known in the art, and new modifications of RNAs are regularly being developed.

[0404] There are numerous commercial suppliers of modified RNAs, including for example, TriLink Biotech, AxoLabs, Bio-Synthesis Inc., Dharmacon and many others. As described by TriLink, for example, 5-Methyl-CTP can be used to impart desirable characteristics, such as increased nuclease stability, increased translation or reduced interaction of innate immune receptors with in vitro transcribed RNA. 5-Methylcytidine-5′-Triphosphate (5-Methyl-CTP), N6-Methyl-ATP, as well as Pseudo-UTP and 2-Thio-UTP, have also been shown to reduce innate immune stimulation in culture and in vivo while enhancing translation, as illustrated in publications by Kormann et al. and Warren et al. referred to below.

[0405] It has been shown that chemically modified mRNA delivered in vivo can be used to achieve improved therapeutic effects; see, e.g., Kormann et al., Nature Biotechnology 29, 154-157 (2011). Such modifications can be used, for example, to increase the stability of the RNA molecule and/or reduce its immunogenicity. Using chemical modifications such as Pseudo-U, N6-Methyl-A, 2-Thio-U and 5-Methyl-C, it was found that substituting just one quarter of the uridine and cytidine residues with 2-Thio-U and 5-Methyl-C respectively resulted in a significant decrease in toll-like receptor (TLR) mediated recognition of the mRNA in mice. By reducing the activation of the innate immune system, these modifications can be used to effectively increase the stability and longevity of the mRNA in vivo; see, e.g., Kormann et al., supra.

[0406] It has also been shown that repeated administration of synthetic messenger RNAs incorporating modifications designed to bypass innate anti-viral responses can reprogram differentiated human cells to pluripotency. See, e.g., Warren, et al., Cell Stem Cell, 7(5):618-30 (2010). Such modified mRNAs that act as primary reprogramming proteins can be an efficient means of reprogramming multiple human cell types. Such cells are referred to as induced pluripotency stem cells (iPSCs), and it was found that enzymatically synthesized RNA incorporating 5-Methyl-CTP, Pseudo-UTP and an Anti Reverse Cap Analog (ARCA) could be used to effectively evade the cell's antiviral response; see, e.g., Warren et al., supra.

[0407] Other modifications of polynucleotides described in the art include, for example, the use of polyA tails, the addition of 5′ cap analogs (such as m7G(5′)ppp(5′)G (mCAP)), modifications of 5′ or 3′ untranslated regions (UTRs), or treatment with phosphatase to remove 5′ terminal phosphates—and new approaches are regularly being developed.

[0408] A number of compositions and techniques applicable to the generation of modified RNAs for use herein have been developed in connection with the modification of RNA interference (RNAi), including small-interfering RNAs (siRNAs). siRNAs present particular challenges in vivo because their effects on gene silencing via mRNA interference are generally transient, which can require repeat administration. In addition, siRNAs are double-stranded RNAs (dsRNA) and mammalian cells have immune responses that have evolved to detect and neutralize dsRNA, which is often a by-product of viral infection. Thus, there are mammalian enzymes such as PKR (dsRNA-responsive kinase), and potentially retinoic acid-inducible gene I (RIG-I), that can mediate cellular responses to dsRNA, as well as Toll-like receptors (such as TLR3, TLR7 and TLR8) that can trigger the induction of cytokines in response to such molecules; see, e.g., the reviews by Angart et al., Pharmaceuticals (Basel) 6(4): 440-468 (2013); Kanasty et al., Molecular Therapy 20(3): 513-524 (2012); Burnett et al., Biotechnol J. 6(9):1130-46 (2011); Judge and MacLachlan, Hum Gene Ther 19(2):111-24 (2008); and references cited therein.

[0409] A large variety of modifications have been developed and applied to enhance RNA stability, reduce innate immune responses, and/or achieve other benefits that can be useful in connection with the introduction of polynucleotides into human cells, as described herein; see, e.g., the reviews by Whitehead K A et al., Annual Review of Chemical and Biomolecular Engineering, 2: 77-96 (2011); Gaglione and Messere, Mini Rev Med Chem, 10(7):578-95 (2010); Chernolovskaya et al, Curr Opin Mol Ther., 12(2):158-67 (2010); Deleavey et al., Curr Protoc Nucleic Acid Chem Chapter 16:Unit 16.3 (2009); Behlke, Oligonucleotides 18(4):305-19 (2008); Fucini et al., Nucleic Acid Ther 22(3): 205-210 (2012); Bremsen et al., Front Genet 3:154 (2012).

[0410] As noted above, there are a number of commercial suppliers of modified RNAs, many of which have specialized in modifications designed to improve the effectiveness of siRNAs. A variety of approaches are offered based on various findings reported in the literature. For example, Dharmacon notes that replacement of a non-bridging oxygen with sulfur (phosphorothioate, PS) has been extensively used to improve nuclease resistance of siRNAs, as reported by Kole, Nature Reviews Drug Discovery 11:125-140 (2012). Modifications of the 2′-position of the ribose have been reported to improve nuclease resistance of the internucleotide phosphate bond while increasing duplex stability (Tm), which has also been shown to provide protection from immune activation. A combination of moderate PS backbone modifications with small, well-tolerated 2′-substitutions (2′-O-Methyl, 2′-Fluoro, 2′-Hydro) have been associated with highly stable siRNAs for applications in vivo, as reported by Soutschek et al. Nature 432:173-178 (2004); and 2′-O-Methyl modifications have been reported to be effective in improving stability as reported by Volkov, Oligonucleotides 19:191-202 (2009). With respect to decreasing the induction of innate immune responses, modifying specific sequences with 2′-O-Methyl, 2′-Fluoro, 2′-Hydro have been reported to reduce TLR7/TLR8 interaction while generally preserving silencing activity; see, e.g., Judge et al., Mol. Ther. 13:494-505 (2006); and Cekaite et al., J. Mol. Biol. 365:90-108 (2007). Additional modifications, such as 2-thiouracil, pseudouracil, 5-methylcytosine, 5-methyluracil, and N₆-methyladenosine have also been shown to minimize the immune effects mediated by TLR3, TLR7, and TLR8; see, e.g., Kariko, K. et al., Immunity 23:165-175 (2005).

[0411] As is also known in the art, and commercially available, a number of conjugates can be applied to polynucleotides, such as RNAs, for use herein that can enhance their delivery and/or uptake by cells, including for example, cholesterol, tocopherol and folic acid, lipids, peptides, polymers, linkers and aptamers; see, e.g., the review by Winkler, Ther. Deliv. 4:791-809 (2013), and references cited therein.

[0412] Codon-Optimization

[0413] A polynucleotide encoding a site-directed polypeptide can be codon-optimized according to methods standard in the art for expression in the cell containing the target DNA of interest. For example, if the intended target nucleic acid is in a human cell, a human codon-optimized polynucleotide encoding Cas9 is contemplated for use for producing the Cas9 polypeptide.

[0414] Complexes of a Genome-Targeting Nucleic Acid and a Site-Directed Polypeptide

[0415] A genome-targeting nucleic acid interacts with a site-directed polypeptide (e.g., a nucleic acid-guided nuclease such as Cas9), thereby forming a complex. The genome-targeting nucleic acid guides the site-directed polypeptide to a target nucleic acid.

[0416] RNPs

[0417] The site-directed polypeptide and genome-targeting nucleic acid can each be administered separately to a cell or a patient. On the other hand, the site-directed polypeptide can be pre-complexed with one or more genome-targeting nucleic acids (guide RNA, sgRNA, or crRNA together with a tracrRNA). The pre-complexed material can then be administered to a cell or a patient. Such pre-complexed material is known as a ribonucleoprotein particle (RNP). The site-directed polypeptide in the RNP can be, for example, a Cas9 endonuclease or a Cpf1 endonuclease. The site-directed polypeptide can be flanked at the N-terminus, the C-terminus, or both the N-terminus and C-terminus by one or more nuclear localization signals (NLSs). For example, a Cas9 endonuclease can be flanked by two NLSs, one NLS located at the N-terminus and the second NLS located at the C-terminus. The NLS can be any NLS known in the art, such as a SV40 NLS. The weight ratio of genome-targeting nucleic acid to site-directed polypeptide in the RNP can be 1:1. For example, the weight ratio of sgRNA to Cas9 endonuclease in the RNP can be 1:1. For example, the sgRNA can comprise the nucleic acid sequence of SEQ ID NO: 71,959, the Cas9 endonuclease can be a S. pyogenes Cas9 comprising a N-terminus SV40 NLS and a C-terminus SV40 NLS, and the weight ratio of sgRNA to Cas9 endonuclease can be 1:1.

[0418] Nucleic Acids Encoding System Components

[0419] The present disclosure provides a nucleic acid comprising a nucleotide sequence encoding a genome-targeting nucleic acid of the disclosure, a site-directed polypeptide of the disclosure, and/or any nucleic acid or proteinaceous molecule necessary to carry out the aspects of the methods of the disclosure.

[0420] The nucleic acid encoding a genome-targeting nucleic acid of the disclosure, a site-directed polypeptide of the disclosure, and/or any nucleic acid or proteinaceous molecule necessary to carry out the aspects of the methods of the disclosure can comprise a vector (e.g., a recombinant expression vector).

[0421] The term “vector” refers to a nucleic acid molecule capable of transporting another nucleic acid to which it has been linked. One type of vector is a “plasmid”, which refers to a circular double-stranded DNA loop into which additional nucleic acid segments can be ligated. Another type of vector is a viral vector, wherein additional nucleic acid segments can be ligated into the viral genome. Certain vectors are capable of autonomous replication in a host cell into which they are introduced (e.g., bacterial vectors having a bacterial origin of replication and episomal mammalian vectors). Other vectors (e.g., non-episomal mammalian vectors) are integrated into the genome of a host cell upon introduction into the host cell, and thereby are replicated along with the host genome.

[0422] In some examples, vectors can be capable of directing the expression of nucleic acids to which they are operatively linked. Such vectors are referred to herein as “recombinant expression vectors”, or more simply “expression vectors”, which serve equivalent functions.

[0423] The term “operably linked” means that the nucleotide sequence of interest is linked to regulatory sequence(s) in a manner that allows for expression of the nucleotide sequence. The term “regulatory sequence” is intended to include, for example, promoters, enhancers and other expression control elements (e.g., polyadenylation signals). Such regulatory sequences are well known in the art and are described, for example, in Goeddel; Gene Expression Technology: Methods in Enzymology 185, Academic Press, San Diego, Calif. (1990). Regulatory sequences include those that direct constitutive expression of a nucleotide sequence in many types of host cells, and those that direct expression of the nucleotide sequence only in certain host cells (e.g., tissue-specific regulatory sequences). It will be appreciated by those skilled in the art that the design of the expression vector can depend on such factors as the choice of the target cell, the level of expression desired, and the like.

[0424] Expression vectors contemplated include, but are not limited to, viral vectors based on vaccinia virus, poliovirus, adenovirus, adeno-associated virus, SV40, herpes simplex virus, human immunodeficiency virus, retrovirus (e.g., Murine Leukemia Virus, spleen necrosis virus, and vectors derived from retroviruses such as Rous Sarcoma Virus, Harvey Sarcoma Virus, avian leukosis virus, a lentivirus, human immunodeficiency virus, myeloproliferative sarcoma virus, and mammary tumor virus) and other recombinant vectors. Other vectors contemplated for eukaryotic target cells include, but are not limited to, the vectors pXT1, pSG5, pSVK3, pBPV, pMSG, and pSVLSV40 (Pharmacia). Additional vectors contemplated for eukaryotic target cells include, but are not limited to, the vectors pCTx-1, pCTx-2, and pCTx-3, which are described in FIGS. 1A to 1C. Other vectors can be used so long as they are compatible with the host cell.

[0425] In some examples, a vector can comprise one or more transcription and/or translation control elements. Depending on the host/vector system utilized, any of a number of suitable transcription and translation control elements, including constitutive and inducible promoters, transcription enhancer elements, transcription terminators, etc. can be used in the expression vector. The vector can be a self-inactivating vector that either inactivates the viral sequences or the components of the CRISPR machinery or other elements.

[0426] Non-limiting examples of suitable eukaryotic promoters (i.e., promoters functional in a eukaryotic cell) include those from cytomegalovirus (CMV) immediate early, herpes simplex virus (HSV) thymidine kinase, early and late SV40, long terminal repeats (LTRs) from retrovirus, human elongation factor-1 promoter (EF1), a hybrid construct comprising the cytomegalovirus (CMV) enhancer fused to the chicken beta-actin promoter (CAG), murine stem cell virus promoter (MSCV), phosphoglycerate kinase-1 locus promoter (PGK), and mouse metallothionein-I.

[0427] For expressing small RNAs, including guide RNAs used in connection with Cas endonuclease, various promoters such as RNA polymerase III promoters, including for example U6 and H1, can be advantageous. Descriptions of and parameters for enhancing the use of such promoters are known in art, and additional information and approaches are regularly being described; see, e.g., Ma, H. et al., Molecular Therapy—Nucleic Acids 3, e161 (2014) doi:10.1038/mtna.2014.12.

[0428] The expression vector can also contain a ribosome binding site for translation initiation and a transcription terminator. The expression vector can also comprise appropriate sequences for amplifying expression. The expression vector can also include nucleotide sequences encoding non-native tags (e.g., histidine tag, hemagglutinin tag, green fluorescent protein, etc.) that are fused to the site-directed polypeptide, thus resulting in a fusion protein.

[0429] A promoter can be an inducible promoter (e.g., a heat shock promoter, tetracycline-regulated promoter, steroid-regulated promoter, metal-regulated promoter, estrogen receptor-regulated promoter, etc.). The promoter can be a constitutive promoter (e.g., CMV promoter, UBC promoter). In some cases, the promoter can be a spatially restricted and/or temporally restricted promoter (e.g., a tissue specific promoter, a cell type specific promoter, etc.).

[0430] The nucleic acid encoding a genome-targeting nucleic acid of the disclosure and/or a site-directed polypeptide can be packaged into or on the surface of delivery vehicles for delivery to cells. Delivery vehicles contemplated include, but are not limited to, nanospheres, liposomes, quantum dots, nanoparticles, polyethylene glycol particles, hydrogels, and micelles. As described in the art, a variety of targeting moieties can be used to enhance the preferential interaction of such vehicles with desired cell types or locations.

[0431] Introduction of the complexes, polypeptides, and nucleic acids of the disclosure into cells can occur by viral or bacteriophage infection, transfection, conjugation, protoplast fusion, lipofection, electroporation, nucleofection, calcium phosphate precipitation, polyethyleneimine (PEI)-mediated transfection, DEAE-dextran mediated transfection, liposome-mediated transfection, particle gun technology, calcium phosphate precipitation, direct micro-injection, nanoparticle-mediated nucleic acid delivery, and the like.

[0432] Delivery

[0433] Guide RNA polynucleotides (RNA or DNA) and/or endonuclease polynucleotide(s) (RNA or DNA) can be delivered by viral or non-viral delivery vehicles known in the art, such as electroporation, mechanical force, cell deformation (SQZ Biotech), and cell penetrating peptides. Alternatively, endonuclease polypeptide(s) can be delivered by viral or non-viral delivery vehicles known in the art, such as electroporation or lipid nanoparticles. In further alternative aspects, the DNA endonuclease can be delivered as one or more polypeptides, either alone or pre-complexed with one or more guide RNAs, or one or more crRNA together with a tracrRNA.

[0434] Electroporation is a delivery technique in which an electrical field is applied to one or more cells in order to increase the permeability of the cell membrane, which allows substances such as drugs, nucleic acids (genome-targeting nucleic acids), proteins (site-directed polypeptides), or RNPs, to be introduced into the cell. In general, electroporation works by passing thousands of volts across a distance of one to two millimeters of suspended cells in an electroporation cuvette (1.0-1.5 kV, 250-750V/cm).

[0435] Polynucleotides can be delivered by non-viral delivery vehicles including, but not limited to, nanoparticles, liposomes, ribonucleoproteins, positively charged peptides, small molecule RNA-conjugates, aptamer-RNA chimeras, and RNA-fusion protein complexes. Some exemplary non-viral delivery vehicles are described in Peer and Lieberman, Gene Therapy, 18: 1127-1133 (2011) (which focuses on non-viral delivery vehicles for siRNA that are also useful for delivery of other polynucleotides).

[0436] Polynucleotides, such as guide RNA, sgRNA, and mRNA encoding an endonuclease, can be delivered to a cell or a patient by a lipid nanoparticle (LNP).

[0437] A LNP refers to any particle having a diameter of less than 1000 nm, 500 nm, 250 nm, 200 nm, 150 nm, 100 nm, 75 nm, 50 nm, or 25 nm. Alternatively, a nanoparticle can range in size from 1-1000 nm, 1-500 nm, 1-250 nm, 25-200 nm, 25-100 nm, 35-75 nm, or 25-60 nm.

[0438] LNPs can be made from cationic, anionic, or neutral lipids. Neutral lipids, such as the fusogenic phospholipid DOPE or the membrane component cholesterol, can be included in LNPs as ‘helper lipids’ to enhance transfection activity and nanoparticle stability. Limitations of cationic lipids include low efficacy owing to poor stability and rapid clearance, as well as the generation of inflammatory or anti-inflammatory responses.

[0439] LNPs can also be comprised of hydrophobic lipids, hydrophilic lipids, or both hydrophobic and hydrophilic lipids.

[0440] Any lipid or combination of lipids that are known in the art can be used to produce a LNP. Examples of lipids used to produce LNPs are: DOTMA, DOSPA, DOTAP, DMRIE, DC-cholesterol, DOTAP-cholesterol, GAP-DMORIE-DPyPE, and GL67A-DOPE-DMPE-polyethylene glycol (PEG). Examples of cationic lipids are: 98N12-5, C12-200, DLin-KC2-DMA (KC2), DLin-MC3-DMA (MC3), XTC, MD1, and 7C1. Examples of neutral lipids are: DPSC, DPPC, POPC, DOPE, and SM. Examples of PEG-modified lipids are: PEG-DMG, PEG-CerC14, and PEG-CerC20.

[0441] The lipids can be combined in any number of molar ratios to produce a LNP. In addition, the polynucleotide(s) can be combined with lipid(s) in a wide range of molar ratios to produce a LNP.

[0442] As stated previously, the site-directed polypeptide and genome-targeting nucleic acid can each be administered separately to a cell or a patient. On the other hand, the site-directed polypeptide can be pre-complexed with one or more guide RNAs, or one or more crRNA together with a tracrRNA. The pre-complexed material can then be administered to a cell or a patient. Such pre-complexed material is known as a ribonucleoprotein particle (RNP).

[0443] RNA is capable of forming specific interactions with RNA or DNA. While this property is exploited in many biological processes, it also comes with the risk of promiscuous interactions in a nucleic acid-rich cellular environment. One solution to this problem is the formation of ribonucleoprotein particles (RNPs), in which the RNA is pre-complexed with an endonuclease. Another benefit of the RNP is protection of the RNA from degradation.

[0444] The endonuclease in the RNP can be modified or unmodified. Likewise, the gRNA, crRNA, tracrRNA, or sgRNA can be modified or unmodified. Numerous modifications are known in the art and can be used.

[0445] The endonuclease and sgRNA can be generally combined in a 1:1 molar ratio. Alternatively, the endonuclease, crRNA and tracrRNA can be generally combined in a 1:1:1 molar ratio. However, a wide range of molar ratios can be used to produce a RNP.

[0446] A recombinant adeno-associated virus (AAV) vector can be used for delivery. Techniques to produce rAAV particles, in which an AAV genome to be packaged that includes the polynucleotide to be delivered, rep and cap genes, and helper virus functions are provided to a cell are standard in the art. Production of rAAV typically requires that the following components are present within a single cell (denoted herein as a packaging cell): a rAAV genome, AAV rep and cap genes separate from (i.e., not in) the rAAV genome, and helper virus functions. The AAV rep and cap genes may be from any AAV serotype for which recombinant virus can be derived, and may be from a different AAV serotype than the rAAV genome ITRs, including, but not limited to, AAV serotypes AAV-1, AAV-2, AAV-3, AAV-4, AAV-5, AAV-6, AAV-7, AAV-8, AAV-9, AAV-10, AAV-11, AAV-12, AAV-13 and AAV rh.74. Production of pseudotyped rAAV is disclosed in, for example, international patent application publication number WO 01/83692. See Table 2.

TABLE 2

| AAV Serotype | Genbank Accession No. |
|---|---|
| AAV-1 | NC_002077.1 |
| AAV-2 | NC_001401.2 |
| AAV-3 | NC_001729.1 |
| AAV-3B | AF028705.1 |
| AAV-4 | NC_001829.1 |
| AAV-5 | NC_006152.1 |
| AAV-6 | AF028704.1 |
| AAV-7 | NC_006260.1 |
| AAV-8 | NC_006261.1 |
| AAV-9 | AX753250.1 |
| AAV-10 | AY631965.1 |
| AAV-11 | AY631966.1 |
| AAV-12 | DQ813647.1 |
| AAV-13 | EU285562.1 |

[0447] A method of generating a packaging cell involves creating a cell line that stably expresses all of the necessary components for AAV particle production. For example, a plasmid (or multiple plasmids) comprising a rAAV genome lacking AAV rep and cap genes, AAV rep and cap genes separate from the rAAV genome, and a selectable marker, such as a neomycin resistance gene, are integrated into the genome of a cell. AAV genomes have been introduced into bacterial plasmids by procedures such as GC tailing (Samulski et al., 1982, Proc. Natl. Acad. S6. USA, 79:2077-2081), addition of synthetic linkers containing restriction endonuclease cleavage sites (Laughlin et al., 1983, Gene, 23:65-73) or by direct, blunt-end ligation (Senapathy & Carter, 1984, J. Biol. Chem., 259:4661-4666). The packaging cell line can then be infected with a helper virus, such as adenovirus. The advantages of this method are that the cells are selectable and are suitable for large-scale production of rAAV. Other examples of suitable methods employ adenovirus or baculovirus, rather than plasmids, to introduce rAAV genomes and/or rep and cap genes into packaging cells.

[0448] General principles of rAAV production are reviewed in, for example, Carter, 1992, Current Opinions in Biotechnology, 1533-539; and Muzyczka, 1992, Curr. Topics in Microbial. and Immunol., 158:97-129). Various approaches are described in Ratschin et al., Mol. Cell. Biol. 4:2072 (1984); Hermonat et al., Proc. Natl. Acad. Sci. USA, 81:6466 (1984); Tratschin et al., Mol. Cell. Biol. 5:3251 (1985); McLaughlin et al., J. Virol., 62:1963 (1988); and Lebkowski et al., 1988 Mol. Cell. Biol., 7:349 (1988). Samulski et al. (1989, J. Virol., 63:3822-3828); U.S. Pat. No. 5,173,414; WO 95/13365 and corresponding U.S. Pat. No. 5,658,776; WO 95/13392; WO 96/17947; PCT/US98/18600; WO 97/09441 (PCT/US96/14423); WO 97/08298 (PCT/US96/13872); WO 97/21825 (PCT/US96/20777); WO 97/06243 (PCT/FR96/01064); WO 99/11764; Perrin et al. (1995) Vaccine 13:1244-1250; Paul et al. (1993) Human Gene Therapy 4:609-615; Clark et al. (1996) Gene Therapy 3:1124-1132; U.S. Pat. Nos. 5,786,211; 5,871,982; and 6,258,595.

[0449] AAV vector serotypes can be matched to target cell types. For example, the following exemplary cell types can be transduced by the indicated AAV serotypes among others. See Table 3.

TABLE 3

| Tissue/Cell Type | Serotype |
|---|---|
| Liver | AAV8, AA3, AA5, AAV9 |
| Skeletal muscle | AAV1, AAV7, AAV6, AAV8, AAV9 |
| Central nervous system | AAV5, AAV1, AAV4 |
| RPE | AAV5, AAV4 |
| Photoreceptor cells | AAV5 |
| Lung | AAV9 |
| Heart | AAV8 |
| Pancreas | AAV8 |
| Kidney | AAV2, AA8 |

[0450] In addition to adeno-associated viral vectors, other viral vectors can be used. Such viral vectors include, but are not limited to, lentivirus, alphavirus, enterovirus, pestivirus, baculovirus, herpesvirus, Epstein Barr virus, papovavirusr, poxvirus, vaccinia virus, and herpes simplex virus.

[0451] In some cases, Cas9 mRNA, sgRNA targeting one or two loci within or near the BCL11A gene or other DNA sequence that encodes a regulatory element of the BCL11A gene, and donor DNA can each be separately formulated into lipid nanoparticles, or are all co-formulated into one lipid nanoparticle.

[0452] In some cases, Cas9 mRNA can be formulated in a lipid nanoparticle, while sgRNA and donor DNA can be delivered in an AAV vector.

[0453] Options are available to deliver the Cas9 nuclease as a DNA plasmid, as mRNA or as a protein. The guide RNA can be expressed from the same DNA, or can also be delivered as an RNA. The RNA can be chemically modified to alter or improve its half-life, or decrease the likelihood or degree of immune response. The endonuclease protein can be complexed with the gRNA prior to delivery. Viral vectors allow efficient delivery; split versions of Cas9 and smaller orthologs of Cas9 can be packaged in AAV, as can donors for HDR. A range of non-viral delivery methods also exist that can deliver each of these components, or non-viral and viral methods can be employed in tandem. For example, nano-particles can be used to deliver the protein and guide RNA, while AAV can be used to deliver a donor DNA.

[0454] Genetically Modified Cells

[0455] The term “genetically modified cell” refers to a cell that comprises at least one genetic modification introduced by genome editing (e.g., using the CRISPR/Cas9/Cpf1 system). In some ex vivo examples herein, the genetically modified cell can be genetically modified progenitor cell. In some in vivo examples herein, the genetically modified cell can be a genetically modified hematopoietic progenitor cell. A genetically modified cell comprising an exogenous genome-targeting nucleic acid and/or an exogenous nucleic acid encoding a genome-targeting nucleic acid is contemplated herein.

[0456] The term “control treated population” describes a population of cells that has been treated with identical media, viral induction, nucleic acid sequences, temperature, confluency, flask size, pH, etc., with the exception of the addition of the genome editing components. Any method known in the art can be used to measure the modulation or inactivation of the transcriptional control sequence of the BCL11A gene or protein expression or activity, for example Western Blot analysis of the of the transcriptional control sequence of the BCL11A gene protein or quantifying of the transcriptional control sequence of the BCL11A gene mRNA.

[0457] The term “isolated cell” refers to a cell that has been removed from an organism in which it was originally found, or a descendant of such a cell. Optionally, the cell can be cultured in vitro, e.g., under defined conditions or in the presence of other cells. Optionally, the cell can be later introduced into a second organism or re-introduced into the organism from which it (or the cell from which it is descended) was isolated.

[0458] The term “isolated population” with respect to an isolated population of cells refers to a population of cells that has been removed and separated from a mixed or heterogeneous population of cells. In some cases, the isolated population can be a substantially pure population of cells, as compared to the heterogeneous population from which the cells were isolated or enriched. In some cases, the isolated population can be an isolated population of human progenitor cells, e.g., a substantially pure population of human progenitor cells, as compared to a heterogeneous population of cells comprising human progenitor cells and cells from which the human progenitor cells were derived.

[0459] The term “substantially enhanced,” with respect to a particular cell population, refers to a population of cells in which the occurrence of a particular type of cell is increased relative to pre-existing or reference levels, by at least 2-fold, at least 3-, at least 4-, at least 5-, at least 6-, at least 7-, at least 8-, at least 9, at least 10-, at least 20-, at least 50-, at least 100-, at least 400-, at least 1000-, at least 5000-, at least 20000-, at least 100000- or more fold depending, e.g., on the desired levels of such cells for ameliorating hemoglobinopathy.

[0460] The term “substantially enriched” with respect to a particular cell population, refers to a population of cells that is at least about 10%, about 20%, about 30%, about 40%, about 50%, about 60%, about 70% or more with respect to the cells making up a total cell population.

[0461] The term “substantially pure” with respect to a particular cell population, refers to a population of cells that is at least about 75%, at least about 85%, at least about 90%, or at least about 95% pure, with respect to the cells making up a total cell population. That is, the terms “substantially pure” or “essentially purified,” with regard to a population of progenitor cells, refers to a population of cells that contain fewer than about 20%, about 15%, about 10%, about 9%, about 8%, about 7%, about 6%, about 5%, about 4%, about 3%, about 2%, about 1%, or less than 1%, of cells that are not progenitor cells as defined by the terms herein.

[0462] Differentiation of Genome-Edited iPSCs into Hematopoietic Progenitor Cells

[0463] Another step of the ex vivo methods of the present disclosure can comprise differentiating the genome-edited iPSCs into hematopoietic progenitor cells. The differentiating step can be performed according to any method known in the art.

[0464] Differentiation of Genome-Edited Mesenchymal Stem Cells into Hematopoietic Progenitor Cells

[0465] Another step of the ex vivo methods of the present disclosure can comprise differentiating the genome-edited mesenchymal stem cells into hematopoietic progenitor cells. The differentiating step can be performed according to any method known in the art.

[0466] Implanting Cells into Patients

[0467] Another step of the ex vivo methods of the present disclosure can comprise implanting the cells into patients. This implanting step can be accomplished using any method of implantation known in the art. For example, the genetically modified cells can be injected directly in the patient's blood or otherwise administered to the patient. The genetically modified cells may be purified ex vivo using a selected marker.

[0468] Pharmaceutically Acceptable Carriers

[0469] The ex vivo methods of administering progenitor cells to a subject contemplated herein can involve the use of therapeutic compositions comprising progenitor cells.

[0470] Therapeutic compositions can contain a physiologically tolerable carrier together with the cell composition, and optionally at least one additional bioactive agent as described herein, dissolved or dispersed therein as an active ingredient. In some cases, the therapeutic composition is not substantially immunogenic when administered to a mammal or human patient for therapeutic purposes, unless so desired.

[0471] In general, the progenitor cells described herein can be administered as a suspension with a pharmaceutically acceptable carrier. One of skill in the art will recognize that a pharmaceutically acceptable carrier to be used in a cell composition will not include buffers, compounds, cryopreservation agents, preservatives, or other agents in amounts that substantially interfere with the viability of the cells to be delivered to the subject. A formulation comprising cells can include e.g., osmotic buffers that permit cell membrane integrity to be maintained, and optionally, nutrients to maintain cell viability or enhance engraftment upon administration. Such formulations and suspensions are known to those of skill in the art and/or can be adapted for use with the progenitor cells, as described herein, using routine experimentation.

[0472] A cell composition can also be emulsified or presented as a liposome composition, provided that the emulsification procedure does not adversely affect cell viability. The cells and any other active ingredient can be mixed with excipients that are pharmaceutically acceptable and compatible with the active ingredient, and in amounts suitable for use in the therapeutic methods described herein.

[0473] Additional agents included in a cell composition can include pharmaceutically acceptable salts of the components therein. Pharmaceutically acceptable salts include the acid addition salts (formed with the free amino groups of the polypeptide) that are formed with inorganic acids, such as, for example, hydrochloric or phosphoric acids, or such organic acids as acetic, tartaric, mandelic and the like. Salts formed with the free carboxyl groups can also be derived from inorganic bases, such as, for example, sodium, potassium, ammonium, calcium or ferric hydroxides, and such organic bases as isopropylamine, trimethylamine, 2-ethylamino ethanol, histidine, procaine and the like.

[0474] Physiologically tolerable carriers are well known in the art. Exemplary liquid carriers are sterile aqueous solutions that contain no materials in addition to the active ingredients and water, or contain a buffer such as sodium phosphate at physiological pH value, physiological saline or both, such as phosphate-buffered saline. Still further, aqueous carriers can contain more than one buffer salt, as well as salts such as sodium and potassium chlorides, dextrose, polyethylene glycol and other solutes. Liquid compositions can also contain liquid phases in addition to and to the exclusion of water. Exemplary of such additional liquid phases are glycerine, vegetable oils such as cottonseed oil, and water-oil emulsions. The amount of an active compound used in the cell compositions that is effective in the treatment of a particular disorder or condition can depend on the nature of the disorder or condition, and can be determined by standard clinical techniques.

[0475] Administration & Efficacy

[0476] The terms “administering,” “introducing” and “transplanting” are used interchangeably in the context of the placement of cells, e.g., progenitor cells, into a subject, by a method or route that results in at least partial localization of the introduced cells at a desired site, such as a site of injury or repair, such that a desired effect(s) is produced. The cells e.g., progenitor cells, or their differentiated progeny can be administered by any appropriate route that results in delivery to a desired location in the subject where at least a portion of the implanted cells or components of the cells remain viable. The period of viability of the cells after administration to a subject can be as short as a few hours, e.g., twenty-four hours, to a few days, to as long as several years, or even the life time of the patient, i.e., long-term engraftment. For example, in some aspects described herein, an effective amount of myogenic progenitor cells is administered via a systemic route of administration, such as an intraperitoneal or intravenous route.

[0477] The terms “individual”, “subject,” “host” and “patient” are used interchangeably herein and refer to any subject for whom diagnosis, treatment or therapy is desired. In some aspects, the subject is a mammal. In some aspects, the subject is a human being.

[0478] When provided prophylactically, progenitor cells described herein can be administered to a subject in advance of any symptom of a hemoglobinopathy, e.g., prior to the development of fatigue, shortness of breath, jaundice, slow growth late puberty, joint, bone and chest pain, enlarged spleen and liver. Accordingly, the prophylactic administration of a hematopoietic progenitor cell population serves to prevent a hemoglobinopathy, such as B-thalassemia or Sickle Cell Disease.

[0479] When provided therapeutically, hematopoietic progenitor cells are provided at (or after) the onset of a symptom or indication of hemoglobinopathy, e.g., upon the onset of disease.

[0480] The hematopoietic progenitor cell population being administered according to the methods described herein can comprise allogeneic hematopoietic progenitor cells obtained from one or more donors. “Allogeneic” refers to a hematopoietic progenitor cell or biological samples comprising hematopoietic progenitor cells obtained from one or more different donors of the same species, where the genes at one or more loci are not identical. For example, a hematopoietic progenitor cell population being administered to a subject can be derived from one more unrelated donor subjects, or from one or more non-identical siblings. In some cases, syngeneic hematopoietic progenitor cell populations can be used, such as those obtained from genetically identical animals, or from identical twins. The hematopoietic progenitor cells can be autologous cells; that is, the hematopoietic progenitor cells are obtained or isolated from a subject and administered to the same subject, i.e., the donor and recipient are the same.

[0481] The term “effective amount” refers to the amount of a population of progenitor cells or their progeny needed to prevent or alleviate at least one or more signs or symptoms of hemoglobinopathy, and relates to a sufficient amount of a composition to provide the desired effect, e.g., to treat a subject having hemoglobinopathy. The term “therapeutically effective amount” therefore refers to an amount of progenitor cells or a composition comprising progenitor cells that is sufficient to promote a particular effect when administered to a typical subject, such as one who has or is at risk for hemoglobinopathy. An effective amount would also include an amount sufficient to prevent or delay the development of a symptom of the disease, alter the course of a symptom of the disease (for example but not limited to, slow the progression of a symptom of the disease), or reverse a symptom of the disease. It is understood that for any given case, an appropriate “effective amount” can be determined by one of ordinary skill in the art using routine experimentation.

[0482] For use in the various aspects described herein, an effective amount of progenitor cells comprises at least 10² progenitor cells, at least 5×10² progenitor cells, at least 10³ progenitor cells, at least 5×10³ progenitor cells, at least 10⁴ progenitor cells, at least 5×10⁴ progenitor cells, at least 10⁵ progenitor cells, at least 2×10⁵ progenitor cells, at least 3×10⁵ progenitor cells, at least 4×10⁵ progenitor cells, at least 5×10⁵ progenitor cells, at least 6×10⁵ progenitor cells, at least 7×10⁵ progenitor cells, at least 8×10⁵ progenitor cells, at least 9×10⁵ progenitor cells, at least 1×10⁶ progenitor cells, at least 2×10⁶ progenitor cells, at least 3×10⁶ progenitor cells, at least 4×10⁶ progenitor cells, at least 5×10⁶ progenitor cells, at least 6×10⁶ progenitor cells, at least 7×10⁶ progenitor cells, at least 8×10⁶ progenitor cells, at least 9×10⁶ progenitor cells, or multiples thereof. The progenitor cells can be derived from one or more donors, or can be obtained from an autologous source. In some examples described herein, the progenitor cells can be expanded in culture prior to administration to a subject in need thereof.

[0483] “Administered” refers to the delivery of a progenitor cell composition into a subject by a method or route that results in at least partial localization of the cell composition at a desired site. A cell composition can be administered by any appropriate route that results in effective treatment in the subject, i.e. administration results in delivery to a desired location in the subject where at least a portion of the composition delivered, i.e. at least 1×10⁴ cells are delivered to the desired site for a period of time. Modes of administration include injection, infusion, instillation, or ingestion. “Injection” includes, without limitation, intravenous, intramuscular, intra-arterial, intrathecal, intraventricular, intracapsular, intraorbital, intracardiac, intradermal, intraperitoneal, transtracheal, subcutaneous, subcuticular, intraarticular, sub capsular, subarachnoid, intraspinal, intracerebro spinal, and intrasternal injection and infusion. In some examples, the route is intravenous. For the delivery of cells, administration by injection or infusion can be made.

[0484] The cells can be administered systemically. The phrases “systemic administration,” “administered systemically”, “peripheral administration” and “administered peripherally” refer to the administration of a population of progenitor cells other than directly into a target site, tissue, or organ, such that it enters, instead, the subject's circulatory system and, thus, is subject to metabolism and other like processes.

[0485] The efficacy of a treatment comprising a composition for the treatment of hemoglobinopathies can be determined by the skilled clinician. However, a treatment is considered “effective treatment,” if any one or all of the signs or symptoms of, as but one example, levels of functional BCL11A and functional HbF are altered in a beneficial manner (e.g., decreased by at least 10% for BCL11A and/or increased by at least 10% for HbF), or other clinically accepted symptoms or markers of disease are improved or ameliorated. Efficacy can also be measured by failure of an individual to worsen as assessed by hospitalization or need for medical interventions (e.g., progression of the disease is halted or at least slowed). Methods of measuring these indicators are known to those of skill in the art and/or described herein. Treatment includes any treatment of a disease in an individual or an animal (some non-limiting examples include a human, or a mammal) and includes: (1) inhibiting the disease, e.g., arresting, or slowing the progression of symptoms; or (2) relieving the disease, e.g., causing regression of symptoms; and (3) preventing or reducing the likelihood of the development of symptoms.

[0486] The treatment according to the present disclosure can ameliorate one or more symptoms associated with hemoglobinopathies by decreasing the amount of functional BCL11A and/or increasing the amount of functional HbF in the individual. Early signs typically associated with hemoglobinopathies include for example, fatigue, shortness of breath, jaundice, slow growth late puberty, joint, bone and chest pain, enlarged spleen and liver.

[0487] Kits

[0488] The present disclosure provides kits for carrying out the methods described herein. A kit can include one or more of a genome-targeting nucleic acid, a polynucleotide encoding a genome-targeting nucleic acid, a site-directed polypeptide, a polynucleotide encoding a site-directed polypeptide, and/or any nucleic acid or proteinaceous molecule necessary to carry out the aspects of the methods described herein, or any combination thereof.

[0489] A kit can comprise: (1) a vector comprising a nucleotide sequence encoding a genome-targeting nucleic acid, (2) the site-directed polypeptide or a vector comprising a nucleotide sequence encoding the site-directed polypeptide, and (3) a reagent for reconstitution and/or dilution of the vector(s) and or polypeptide.

[0490] A kit can comprise: (1) a vector comprising (i) a nucleotide sequence encoding a genome-targeting nucleic acid, and (ii) a nucleotide sequence encoding the site-directed polypeptide; and (2) a reagent for reconstitution and/or dilution of the vector.

[0491] In any of the above kits, the kit can comprise a single-molecule guide genome-targeting nucleic acid. In any of the above kits, the kit can comprise a double-molecule genome-targeting nucleic acid. In any of the above kits, the kit can comprise two or more double-molecule guides or single-molecule guides. The kits can comprise a vector that encodes the nucleic acid targeting nucleic acid.

[0492] In any of the above kits, the kit can further comprise a polynucleotide to be inserted to effect the desired genetic modification.

[0493] Components of a kit can be in separate containers, or combined in a single container.

[0494] Any kit described above can further comprise one or more additional reagents, where such additional reagents are selected from a buffer, a buffer for introducing a polypeptide or polynucleotide into a cell, a wash buffer, a control reagent, a control vector, a control RNA polynucleotide, a reagent for in vitro production of the polypeptide from DNA, adaptors for sequencing and the like. A buffer can be a stabilization buffer, a reconstituting buffer, a diluting buffer, or the like. A kit can also comprise one or more components that can be used to facilitate or enhance the on-target binding or the cleavage of DNA by the endonuclease, or improve the specificity of targeting.

[0495] In addition to the above-mentioned components, a kit can further comprise instructions for using the components of the kit to practice the methods. The instructions for practicing the methods can be recorded on a suitable recording medium. For example, the instructions can be printed on a substrate, such as paper or plastic, etc. The instructions can be present in the kits as a package insert, in the labeling of the container of the kit or components thereof (i.e., associated with the packaging or subpackaging), etc. The instructions can be present as an electronic storage data file present on a suitable computer readable storage medium, e.g. CD-ROM, diskette, flash drive, etc. In some instances, the actual instructions are not present in the kit, but means for obtaining the instructions from a remote source (e.g. via the Internet), can be provided. An example of this case is a kit that comprises a web address where the instructions can be viewed and/or from which the instructions can be downloaded. As with the instructions, this means for obtaining the instructions can be recorded on a suitable substrate.

[0496] Guide RNA Formulation

[0497] Guide RNAs of the present disclosure can be formulated with pharmaceutically acceptable excipients such as carriers, solvents, stabilizers, adjuvants, diluents, etc., depending upon the particular mode of administration and dosage form. Guide RNA compositions can be formulated to achieve a physiologically compatible pH, and range from a pH of about 3 to a pH of about 11, about pH 3 to about pH 7, depending on the formulation and route of administration. In some cases, the pH can be adjusted to a range from about pH 5.0 to about pH 8. In some cases, the compositions can comprise a therapeutically effective amount of at least one compound as described herein, together with one or more pharmaceutically acceptable excipients. Optionally, the compositions can comprise a combination of the compounds described herein, or can include a second active ingredient useful in the treatment or prevention of bacterial growth (for example and without limitation, anti-bacterial or anti-microbial agents), or can include a combination of reagents of the present disclosure.

[0498] Suitable excipients include, for example, carrier molecules that include large, slowly metabolized macromolecules such as proteins, polysaccharides, polylactic acids, polyglycolic acids, polymeric amino acids, amino acid copolymers, and inactive virus particles. Other exemplary excipients can include antioxidants (for example and without limitation, ascorbic acid), chelating agents (for example and without limitation, EDTA), carbohydrates (for example and without limitation, dextrin, hydroxyalkylcellulose, and hydroxyalkylmethylcellulose), stearic acid, liquids (for example and without limitation, oils, water, saline, glycerol and ethanol), wetting or emulsifying agents, pH buffering substances, and the like.

[0499] Other Possible Therapeutic Approaches

[0500] Gene editing can be conducted using nucleases engineered to target specific sequences. To date there are four major types of nucleases: meganucleases and their derivatives, zinc finger nucleases (ZFNs), transcription activator like effector nucleases (TALENs), and CRISPR-Cas9 nuclease systems. The nuclease platforms vary in difficulty of design, targeting density and mode of action, particularly as the specificity of ZFNs and TALENs is through protein-DNA interactions, while RNA-DNA interactions primarily guide Cas9. Cas9 cleavage also requires an adjacent motif, the PAM, which differs between different CRISPR systems. Cas9 from Streptococcus pyogenes cleaves using a NGG PAM, CRISPR from Neisseria meningitidis can cleave at sites with PAMs including NNNNGATT, NNNNNGTTT and NNNNGCTT. A number of other Cas9 orthologs target protospacer adjacent to alternative PAMs.

[0501] CRISPR endonucleases, such as Cas9, can be used in the methods of the present disclosure. However, the teachings described herein, such as therapeutic target sites, could be applied to other forms of endonucleases, such as ZFNs, TALENs, HEs, or MegaTALs, or using combinations of nulceases. However, in order to apply the teachings of the present disclosure to such endonucleases, one would need to, among other things, engineer proteins directed to the specific target sites.

[0502] Additional binding domains can be fused to the Cas9 protein to increase specificity. The target sites of these constructs would map to the identified gRNA specified site, but would require additional binding motifs, such as for a zinc finger domain. In the case of Mega-TAL, a meganuclease can be fused to a TALE DNA-binding domain. The meganuclease domain can increase specificity and provide the cleavage. Similarly, inactivated or dead Cas9 (dCas9) can be fused to a cleavage domain and require the sgRNA/Cas9 target site and adjacent binding site for the fused DNA-binding domain. This likely would require some protein engineering of the dCas9, in addition to the catalytic inactivation, to decrease binding without the additional binding site.

[0503] Zinc Finger Nucleases

[0504] Zinc finger nucleases (ZFNs) are modular proteins comprised of an engineered zinc finger DNA binding domain linked to the catalytic domain of the type II endonuclease FokI. Because FokI functions only as a dimer, a pair of ZFNs must be engineered to bind to cognate target “half-site” sequences on opposite DNA strands and with precise spacing between them to enable the catalytically active FokI dimer to form. Upon dimerization of the FokI domain, which itself has no sequence specificity per se, a DNA double-strand break is generated between the ZFN half-sites as the initiating step in genome editing.

[0505] The DNA binding domain of each ZFN is typically comprised of 3-6 zinc fingers of the abundant Cys2-His2 architecture, with each finger primarily recognizing a triplet of nucleotides on one strand of the target DNA sequence, although cross-strand interaction with a fourth nucleotide also can be important. Alteration of the amino acids of a finger in positions that make key contacts with the DNA alters the sequence specificity of a given finger. Thus, a four-finger zinc finger protein will selectively recognize a 12 bp target sequence, where the target sequence is a composite of the triplet preferences contributed by each finger, although triplet preference can be influenced to varying degrees by neighboring fingers. An important aspect of ZFNs is that they can be readily re-targeted to almost any genomic address simply by modifying individual fingers, although considerable expertise is required to do this well. In most applications of ZFNs, proteins of 4-6 fingers are used, recognizing 12-18 bp respectively. Hence, a pair of ZFNs will typically recognize a combined target sequence of 24-36 bp, not including the typical 5-7 bp spacer between half-sites. The binding sites can be separated further with larger spacers, including 15-17 bp. A target sequence of this length is likely to be unique in the human genome, assuming repetitive sequences or gene homologs are excluded during the design process. Nevertheless, the ZFN protein-DNA interactions are not absolute in their specificity so off-target binding and cleavage events do occur, either as a heterodimer between the two ZFNs, or as a homodimer of one or the other of the ZFNs. The latter possibility has been effectively eliminated by engineering the dimerization interface of the FokI domain to create “plus” and “minus” variants, also known as obligate heterodimer variants, which can only dimerize with each other, and not with themselves. Forcing the obligate heterodimer prevents formation of the homodimer. This has greatly enhanced specificity of ZFNs, as well as any other nuclease that adopts these FokI variants.

[0506] A variety of ZFN-based systems have been described in the art, modifications thereof are regularly reported, and numerous references describe rules and parameters that are used to guide the design of ZFNs; see, e.g., Segal et al., Proc Natl Acad Sci USA 96(6):2758-63 (1999); Dreier B et al., J Mol Biol. 303(4):489-502 (2000); Liu Q et al., J Biol Chem. 277(6):3850-6 (2002); Dreier et al., J Biol Chem 280(42):35588-97 (2005); and Dreier et al., J Biol Chem. 276(31):29466-78 (2001).

[0507] Transcription Activator-Like Effector Nucleases (TALENs)

[0508] TALENs represent another format of modular nucleases whereby, as with ZFNs, an engineered DNA binding domain is linked to the FokI nuclease domain, and a pair of TALENs operate in tandem to achieve targeted DNA cleavage. The major difference from ZFNs is the nature of the DNA binding domain and the associated target DNA sequence recognition properties. The TALEN DNA binding domain derives from TALE proteins, which were originally described in the plant bacterial pathogen Xanthomonas sp. TALEs are comprised of tandem arrays of 33-35 amino acid repeats, with each repeat recognizing a single basepair in the target DNA sequence that is typically up to 20 bp in length, giving a total target sequence length of up to 40 bp. Nucleotide specificity of each repeat is determined by the repeat variable diresidue (RVD), which includes just two amino acids at positions 12 and 13. The bases guanine, adenine, cytosine and thymine are predominantly recognized by the four RVDs: Asn-Asn, Asn-Ile, His-Asp and Asn-Gly, respectively. This constitutes a much simpler recognition code than for zinc fingers, and thus represents an advantage over the latter for nuclease design. Nevertheless, as with ZFNs, the protein-DNA interactions of TALENs are not absolute in their specificity, and TALENs have also benefitted from the use of obligate heterodimer variants of the FokI domain to reduce off-target activity.

[0509] Additional variants of the FokI domain have been created that are deactivated in their catalytic function. If one half of either a TALEN or a ZFN pair contains an inactive FokI domain, then only single-strand DNA cleavage (nicking) will occur at the target site, rather than a DSB. The outcome is comparable to the use of CRISPR/Cas9/Cpf1 “nickase” mutants in which one of the Cas9 cleavage domains has been deactivated. DNA nicks can be used to drive genome editing by HDR, but at lower efficiency than with a DSB. The main benefit is that off-target nicks are quickly and accurately repaired, unlike the DSB, which is prone to NHEJ-mediated mis-repair.

[0510] A variety of TALEN-based systems have been described in the art, and modifications thereof are regularly reported; see, e.g., Boch, Science 326(5959):1509-12 (2009); Mak et al., Science 335(6069):716-9 (2012); and Moscou et al., Science 326(5959):1501 (2009). The use of TALENs based on the “Golden Gate” platform, or cloning scheme, has been described by multiple groups; see, e.g., Cermak et al., Nucleic Acids Res. 39(12):e82 (2011); Li et al., Nucleic Acids Res. 39(14):6315-25(2011); Weber et al., PLoS One. 6(2):el6765 (2011); Wang et al., J Genet Genomics 41(6):339-47, Epub 2014 May 17 (2014); and Cermak T et al., Methods Mol Biol. 1239:133-59 (2015).

[0511] Homing Endonucleases

[0512] Homing endonucleases (HEs) are sequence-specific endonucleases that have long recognition sequences (14-44 base pairs) and cleave DNA with high specificity—often at sites unique in the genome. There are at least six known families of HEs as classified by their structure, including LAGLIDADG (SEQ ID NO. 71,949), GIY-YIG, His-Cis box, H-N-H, PD−(D/E)×K, and Vsr-like that are derived from a broad range of hosts, including eukarya, protists, bacteria, archaea, cyanobacteria and phage. As with ZFNs and TALENs, HEs can be used to create a DSB at a target locus as the initial step in genome editing. In addition, some natural and engineered HEs cut only a single strand of DNA, thereby functioning as site-specific nickases. The large target sequence of HEs and the specificity that they offer have made them attractive candidates to create site-specific DSBs.

[0513] A variety of HE-based systems have been described in the art, and modifications thereof are regularly reported; see, e.g., the reviews by Steentoft et al., Glycobiology 24(8):663-80 (2014); Belfort and Bonocora, Methods Mol Biol. 1123:1-26 (2014); Hafez and Hausner, Genome 55(8):553-69 (2012); and references cited therein.

[0514] MegaTAL/Tev-mTALEN/MegaTev

[0515] As further examples of hybrid nucleases, the MegaTAL platform and Tev-mTALEN platform use a fusion of TALE DNA binding domains and catalytically active HEs, taking advantage of both the tunable DNA binding and specificity of the TALE, as well as the cleavage sequence specificity of the HE; see, e.g., Boissel et al., NAR 42: 2591-2601 (2014); Kleinstiver et al., G3 4:1155-65 (2014); and Boissel and Scharenberg, Methods Mol. Biol. 1239:171-96 (2015).

[0516] In a further variation, the MegaTev architecture is the fusion of a meganuclease (Mega) with the nuclease domain derived from the GIY-YIG homing endonuclease I-Tevl (Tev). The two active sites are positioned −30 bp apart on a DNA substrate and generate two DSBs with non-compatible cohesive ends; see, e.g., Wolfs et al., NAR 42, 8816-29 (2014). It is anticipated that other combinations of existing nuclease-based approaches will evolve and be useful in achieving the targeted genome modifications described herein.

[0517] dCas9-FokI or dCpf1-FokI and Other Nucleases

[0518] Combining the structural and functional properties of the nuclease platforms described above offers a further approach to genome editing that can potentially overcome some of the inherent deficiencies. As an example, the CRISPR genome editing system typically uses a single Cas9 endonuclease to create a DSB. The specificity of targeting is driven by a 20 or 24 nucleotide sequence in the guide RNA that undergoes Watson-Crick base-pairing with the target DNA (plus an additional 2 bases in the adjacent NAG or NGG PAM sequence in the case of Cas9 from S. pyogenes). Such a sequence is long enough to be unique in the human genome, however, the specificity of the RNA/DNA interaction is not absolute, with significant promiscuity sometimes tolerated, particularly in the 5′ half of the target sequence, effectively reducing the number of bases that drive specificity. One solution to this has been to completely deactivate the Cas9 or Cpf1 catalytic function—retaining only the RNA-guided DNA binding function—and instead fusing a FokI domain to the deactivated Cas9; see, e.g., Tsai et al., Nature Biotech 32:569-76 (2014); and Guilinger et al., Nature Biotech. 32: 577-82 (2014). Because FokI must dimerize to become catalytically active, two guide RNAs are required to tether two FokI fusions in close proximity to form the dimer and cleave DNA. This essentially doubles the number of bases in the combined target sites, thereby increasing the stringency of targeting by CRISPR-based systems.

[0519] As further example, fusion of the TALE DNA binding domain to a catalytically active HE, such as I-Tevl, takes advantage of both the tunable DNA binding and specificity of the TALE, as well as the cleavage sequence specificity of I-Tevl, with the expectation that off-target cleavage can be further reduced.

[0520] On- and Off-Target Mutation Detection by Sequencing

[0521] To sequence on-target sites and putative off-target sites, the appropriate amplification primers were identified and reactions were set up with these primers using the genomic DNA harvested using QuickExtract DNA extraction solution (Epicentre) from treated cells three days post-transfection. The amplification primers contain the gene specific portion flanked by adapters. The forward primer's 5′ end includes a modified forward (read1) primer-binding site. The reverse primer's 5′ end contains a combined modified reverse (read2) and barcode primer-binding site, in opposite orientation. The individual PCR reactions were validated by separating on agarose gels, then purified and re-amplified. The second round forward primers contain the Illumina P5 sequence, followed by a proportion of the modified forward (read1) primer binding site. The second round reverse primers contain the Illumina P7 sequence (at the 5′ end), followed by the 6-base barcode and the combined modified reverse (read2) and barcode primer binding site. The second round amplifications were also checked on agarose gels, then purified, and quantitated using a NanoDrop spectrophotometer. The amplification products were pooled to match concentration and then submitted to the Emory Integrated Genomic core for library prepping and sequencing on an Illumina Miseq machine.

[0522] The sequencing reads were sorted by barcode and then aligned to the reference sequences supplied by bioinformatics for each product. Insertion and deletion rates in the aligned sequencing reads were detected in the region of the putative cut sites using software previously described; see, e.g., Lin et al., Nucleic Acids Res., 42: 7473-7485 (2014). The levels of insertions and deletions detected in this window were then compared to the level seen in the same location in genomic DNA isolated from in mock transfected cells to minimize the effects of sequencing artifacts.

[0523] Mutation Detection Assays

[0524] The on- and off-target cleavage activities of Cas9 and guide RNA combinations were measured using the mutation rates resulting from the imperfect repair of double-strand breaks by NHEJ.

[0525] On-target loci were amplified using AccuPrime Taq DNA Polymerase High Fidelity (Life Technologies, Carlsbad, Calif.) following manufacturer's instructions for 40 cycles (94° C., 30 s; 52-60° C., 30 s; 68° C., 60 s) in 50 μl reactions containing 1 μl of the cell lysate, and 1 μl of each 10 μM amplification primer. T7EI mutation detection assays were performed, as per manufacturers protocol [Reyon et al., Nat. Biotechnol., 30: 460-465 (2012)], with the digestions separated on 2% agarose gels and quantified using ImageJ [Guschin et al., Methods Mol. Biol., 649: 247-256 (2010)]. The assays determine the percentage of insertions/deletions (“indels”) in the bulk population of cells.

[0526] Methods and Compositions of the Invention

[0527] Accordingly, the present disclosure relates in particular to the following non-limiting inventions: In a first method, Method 1, the present disclosure provides a method for editing a BCL11A gene in a human cell by genome editing, the method comprising the step of: introducing into the human cell one or more deoxyribonucleic acid (DNA) endonucleases to effect one or more single-strand breaks (SSBs) or double-strand breaks (DSBs) within or near the BCL11A gene or other DNA sequence that encodes a regulatory element of the BCL11A gene that results in a permanent deletion, modulation, or inactivation of a transcriptional control sequence of the BCL11A gene.

[0528] In another method, Method 2, the present disclosure provides a method for editing a BCL11A gene in a human cell by genome editing, as provided in Method 1, wherein the transcriptional control sequence is located within a second intron of the BCL11A gene.

[0529] In another method, Method 3, the present disclosure provides a method for editing a BCL11A gene in a human cell by genome editing, as provided in Methods 1 or 2, wherein the transcriptional control sequence is located within a +58 DNA hypersensitive site (DHS) of the BCL11A gene.

[0530] In another method, Method 4, the present disclosure provides an ex vivo method for treating a patient with a hemoglobinopathy, the method comprising the steps of: creating a patient specific induced pluripotent stem cell (iPSC); editing within or near a BCL11A gene or other DNA sequence that encodes a regulatory element of the BCL11A gene of the iPSC; differentiating the genome-edited iPSC into a hematopoietic progenitor cell; and implanting the hematopoietic progenitor cell into the patient.

[0531] In another method, Method 5, the present disclosure provides an ex vivo method for treating a patient with a hemoglobinopathy as provided in Method 4 wherein the creating step comprises: isolating a somatic cell from the patient; and introducing a set of pluripotency-associated genes into the somatic cell to induce the somatic cell to become a pluripotent stem cell.

[0532] In another method, Method 6, the present disclosure provides an ex vivo method for treating a patient with a hemoglobinopathy as provided in Method 5, wherein the somatic cell is a fibroblast.

[0533] In another method, Method 7, the present disclosure provides an ex vivo method for treating a patient with a hemoglobinopathy as provided in Methods 5 or 6, wherein the set of pluripotency-associated genes is one or more of the genes selected from the group consisting of OCT4, SOX2, KLF4, Lin28, NANOG and cMYC.

[0534] In another method, Method 8, the present disclosure provides an ex vivo method for treating a patient with a hemoglobinopathy as provided in any one of Methods 4-7, wherein the editing step comprises introducing into the iPSC one or more deoxyribonucleic acid (DNA) endonucleases to effect one or more single-strand breaks (SSBs) or double-strand breaks (DSBs) within or near the BCL11A gene or other DNA sequence that encodes a regulatory element of the BCL11A gene that results in a permanent deletion, modulation, or inactivation of a transcriptional control sequence of the BCL11A gene.

[0535] In another method, Method 9, the present disclosure provides an ex vivo method for treating a patient with a hemoglobinopathy as provided in any one of Methods 4-8, wherein the differentiating step comprises one or more of the following to differentiate the genome-edited iPSC into a hematopoietic progenitor cell: treatment with a combination of small molecules, delivery of master transcription factors, delivery of mRNA encoding master transcription factors, or delivery of mRNA encoding transcription factors.

[0536] In another method, Method 10, the present disclosure provides an ex vivo method for treating a patient with a hemoglobinopathy as provided in any one of Methods 4-9, wherein the implanting step comprises implanting the hematopoietic progenitor cell into the patient by transplantation, local injection, systemic infusion, or combinations thereof.

[0537] In another method, Method 11, the present disclosure provides an ex vivo method for treating a patient with a hemoglobinopathy, the method comprising the steps of: isolating a mesenchymal stem cell from the patient; editing within or near a BCL11A gene or other DNA sequence that encodes a regulatory element of the BCL11A gene of the mesenchymal stem cell; differentiating the genome-edited mesenchymal stem cell into a hematopoietic progenitor cell; and implanting the hematopoietic progenitor cell into the patient.

[0538] In another method, Method 12, the present disclosure provides an ex vivo method for treating a patient with a hemoglobinopathy as provided in Method 11, wherein the mesenchymal stem cell is isolated from the patient's bone marrow or peripheral blood.

[0539] In another method, Method 13, the present disclosure provides an ex vivo method for treating a patient with a hemoglobinopathy as provided in Methods 11 or 12, wherein the isolating step comprises: aspiration of bone marrow and isolation of mesenchymal cells using density gradient centrifugation media.

[0540] In another method, Method 14, the present disclosure provides an ex vivo method for treating a patient with a hemoglobinopathy as provided in any one of Methods 11-13, wherein the editing step comprises introducing into the mesenchymal stem cell one or more deoxyribonucleic acid (DNA) endonucleases to effect one or more single-strand breaks (SSBs) or double-strand breaks (DSBs) within or near the BCL11A gene or other DNA sequence that encodes a regulatory element of the BCL11A gene that results in a permanent deletion, modulation, or inactivation of a transcriptional control sequence of the BCL11A gene.

[0541] In another method, Method 15, the present disclosure provides an ex vivo method for treating a patient with a hemoglobinopathy as provided in any one of Methods 11-14, wherein the differentiating step comprises one or more of the following to differentiate the genome-edited mesenchymal stem cell into a hematopoietic progenitor cell: treatment with a combination of small molecules, delivery of master transcription factors, delivery of mRNA encoding master transcription factors, or delivery of mRNA encoding transcription factors.

[0542] In another method, Method 16, the present disclosure provides an ex vivo method for treating a patient with a hemoglobinopathy as provided in any one of Methods 11-15, wherein the implanting step comprises implanting the hematopoietic progenitor cell into the patient by transplantation, local injection, systemic infusion, or combinations thereof.

[0543] In another method, Method 17, the present disclosure provides an ex vivo method for treating a patient with a hemoglobinopathy, the method comprising the steps of: isolating a hematopoietic progenitor cell from the patient; editing within or near a BCL11A gene or other DNA sequence that encodes a regulatory element of the BCL11A gene of the hematopoietic progenitor cell; and implanting the genome-edited hematopoietic progenitor cell into the patient.

[0544] In another method, Method 18, the present disclosure provides an ex vivo method for treating a patient with a hemoglobinopathy as provided in Method 17, wherein the method further comprises treating the patient with granulocyte colony stimulating factor (GCSF) prior to the isolating step.

[0545] In another method, Method 19, the present disclosure provides an ex vivo method for treating a patient with a hemoglobinopathy as provided in Method 18, wherein the treating step is performed in combination with Plerixaflor.

[0546] In another method, Method 20, the present disclosure provides an ex vivo method for treating a patient with a hemoglobinopathy as provided in any one of Methods 17-19, wherein the isolating step comprises isolating CD34+ cells.

[0547] In another method, Method 21, the present disclosure provides an ex vivo method for treating a patient with a hemoglobinopathy as provided in any one of Methods 17-20, wherein the editing step comprises introducing into the hematopoietic progenitor cell one or more deoxyribonucleic acid (DNA) endonucleases to effect one or more single-strand breaks (SSBs) or double-strand breaks (DSBs) within or near the BCL11A gene or other DNA sequence that encodes a regulatory element of the BCL11A gene that results in a permanent deletion, modulation, or inactivation of a transcriptional control sequence of the BCL11A gene.

[0548] In another method, Method 22, the present disclosure provides an ex vivo method for treating a patient with a hemoglobinopathy as provided in any one of Methods 17-21, wherein the implanting step comprises implanting the genome-edited hematopoietic progenitor cell into the patient by transplantation, local injection, systemic infusion, or combinations thereof.

[0549] In another method, Method 23, the present disclosure provides an in vivo method for treating a patient with a hemoglobinopathy, the method comprising the step of editing a BCL11A gene in a cell of the patient.

[0550] In another method, Method 24, the present disclosure provides an in vivo method for treating a patient with a hemoglobinopathy as provided in Method 23, wherein the editing step comprises introducing into the cell one or more deoxyribonucleic acid (DNA) endonucleases to effect one or more single-strand breaks (SSBs) or double-strand breaks (DSBs) within or near the BCL11A gene or other DNA sequence that encodes a regulatory element of the BCL11A gene that results in a permanent deletion, modulation, or inactivation of a transcriptional control of the BCL11A gene.

[0551] In another method, Method 25, the present disclosure provides an in vivo method for treating a patient with a hemoglobinopathy as provided in Methods 23 or 24, wherein the cell is a bone marrow cell, a hematopoietic progenitor cell, or a CD34+ cell.

[0552] In another method, Method 26, the present disclosure provides a method according to any one of Methods 1, 8, 14, 21 and 24, wherein the one or more DNA endonucleases is a Cas1, Cas1B, Cas2, Cas3, Cas4, Cas5, Cas6, Cas7, Cas8, Cas9 (also known as Csn1 and Csx12), Cas100, Csy1, Csy2, Csy3, Cse1, Cse2, Csc1, Csc2, Csa5, Csn2, Csm2, Csm3, Csm4, Csm5, Csm6, Cmr1, Cmr3, Cmr4, Cmr5, Cmr6, Csb1, Csb2, Csb3, Csx17, Csx14, Csx10, Csx16, CsaX, Csx3, Csx1, Csx15, Csf1, Csf2, Csf3, Csf4, or Cpf1 endonuclease; a homolog thereof, a recombination of the naturally occurring molecule thereof, codon-optimized thereof, or modified versions thereof, and combinations thereof.

[0553] In another method, Method 27, the present disclosure provides a method as provided in Method 26, wherein the method comprises introducing into the cell one or more polynucleotides encoding the one or more DNA endonucleases.

[0554] In another method, Method 28, the present disclosure provides a method as provided in Methods 26 or 27, wherein the method comprises introducing into the cell one or more ribonucleic acids (RNAs) encoding the one or more DNA endonucleases.

[0555] In another method, Method 29, the present disclosure provides a method as provided in Methods 27 or 28, wherein the one or more polynucleotides or one or more RNAs is one or more modified polynucleotides or one or more modified RNAs.

[0556] In another method, Method 30, the present disclosure provides a method as provided in Method 26, wherein the one or more DNA endonucleases is one or more proteins or polypeptides.

[0557] In another method, Method 31, the present disclosure provides a method as provided in Method 30, wherein the one or more proteins or polypeptides is flanked at the N-terminus, the C-terminus, or both the N-terminus and C-terminus by one or more nuclear localization signals (NLSs).

[0558] In another method, Method 32, the present disclosure provides a method as provided in Method 31, wherein the one or more proteins or polypeptides is flanked by two NLSs, one NLS located at the N-terminus and the second NLS located at the C-terminus.

[0559] In another method, Method 33, the present disclosure provides a method as provided in any one of Methods 31-32, wherein the one or more NLSs is a SV40 NLS.

[0560] In another method, Method 34, the present disclosure provides a method as provided in any one of Methods 1-33, wherein the method further comprises introducing into the cell one or more guide ribonucleic acids (gRNAs).

[0561] In another method, Method 35, the present disclosure provides a method as provided in Method 34, wherein the one or more gRNAs are single-molecule guide RNA (sgRNAs).

[0562] In another method, Method 36, the present disclosure provides a method as provided in Methods 34 or 35, wherein the one or more gRNAs or one or more sgRNAs is one or more modified gRNAs or one or more modified sgRNAs.

[0563] In another method, Method 37, the present disclosure provides a method as provided in Method 36, wherein the one or more modified sgRNAs comprises three 2′-O-methyl-phosphorothioate residues at or near each of its 5′ and 3′ ends.

[0564] In another method, Method 38, the present disclosure provides a method as provided in Method 37, wherein the modified sgRNA is the nucleic acid sequence of SEQ ID NO: 71,959.

[0565] In another method, Method 39, the present disclosure provides a method as provided in Methods 34-38, wherein the one or more DNA endonucleases is pre-complexed with one or more gRNAs or one or more sgRNAs to form one or more ribonucleoproteins (RNPs).

[0566] In another method, Method 40, the present disclosure provides a method as provided in Method 39, wherein the weight ratio of sgRNA to DNA endonuclease in the RNP is 1:1.

[0567] In another method, Method 41, the present disclosure provides a method as provided in Method 40, wherein the sgRNA comprises the nucleic acid sequence of SEQ ID NO: 71,959, the DNA endonuclease is a S. pyogenes Cas9 comprising a N-terminus SV40 NLS and a C-terminus SV40 NLS, wherein the weight ratio of sgRNA to DNA endonuclease is 1:1.

[0568] In another method, Method 42, the present disclosure provides a method as provided in any one of Methods 1-41, wherein the method further comprises introducing into the cell a polynucleotide donor template comprising a wild-type BCL11A gene or cDNA comprising a modified transcriptional control sequence.

[0569] In another method, Method 43, the present disclosure provides a method as provided in any one of Methods 1, 8, 14, 21, or 24, wherein the method further comprises introducing into the cell one guide ribonucleic acid (gRNA) and a polynucleotide donor template comprising a wild-type BCL11A gene or cDNA comprising a modified transcriptional control sequence, and wherein the one or more DNA endonucleases is one or more Cas9 or Cpf1 endonucleases that effect one single-strand break (SSB) or double-strand break (DSB) at a locus within or near the BCL11A gene or other DNA sequence that encodes a regulatory element of the BCL11A gene that facilitates insertion of a new sequence from the polynucleotide donor template into the chromosomal DNA at the locus that results in a permanent insertion, modulation, or inactivation of the transcriptional control sequence of the chromosomal DNA proximal to the locus, and wherein the gRNA comprises a spacer sequence that is complementary to a segment of the locus.

[0570] In another method, Method 44, the present disclosure provides a method as provided in Method 43, wherein proximal means nucleotides both upstream and downstream of the locus.

[0571] In another method, Method 45, the present disclosure provides a method as provided in any one of Methods 1, 8, 14, 21, or 24, wherein the method further comprises introducing into the cell one or more guide ribonucleic acid (gRNAs) and a polynucleotide donor template comprising a wild-type BCL11A gene or cDNA comprising a modified transcriptional control sequence, and wherein the one or more DNA endonucleases is one or more Cas9 or Cpf1 endonucleases that effect or create a pair of single-strand breaks (SSBs) or double-strand breaks (DSBs), the first break at a 5′ locus and the second break at a 3′ locus, within or near the BCL11A gene or other DNA sequence that encodes a regulatory element of the BCL11A gene that facilitates insertion of a new sequence from the polynucleotide donor template into the chromosomal DNA between the 5′ locus and the 3′ locus that results in a permanent insertion, modulation, or inactivation of the transcriptional control sequence of the chromosomal DNA between the 5′ locus and the 3′ locus.

[0572] In another method, Method 46, the present disclosure provides a method as provided in Method 45, wherein one gRNA creates a pair of SSBs or DSBs.

[0573] In another method, Method 47, the present disclosure provides a method as provided in Method 45, wherein one gRNA comprises a spacer sequence that is complementary to either the 5′ locus or the 3′ locus.

[0574] In another method, Method 48, the present disclosure provides a method as provided in Method 45, wherein the method comprises a first guide RNA and a second guide RNA, wherein the first guide RNA comprises a spacer sequence that is complementary to a segment of the 5′ locus and the second guide RNA comprises a spacer sequence that is complementary to a segment of the 3′ locus.

[0575] In another method, Method 49, the present disclosure provides a method as provided in any one of Methods 43-48, wherein the one or two gRNAs are one or two single-molecule guide RNA (sgRNAs).

[0576] In another method, Method 50, the present disclosure provides a method as provided in any one of Methods 43-49, wherein the one or two gRNAs or one or two sgRNAs is one or two modified gRNAs or one or two modified sgRNAs.

[0577] In another method, Method 51, the present disclosure provides a method as provided in Method 50, wherein the one modified sgRNA comprises three 2′-O-methyl-phosphorothioate residues at or near each of its 5′ and 3′ ends.

[0578] In another method, Method 52, the present disclosure provides a method as provided in Method 51, wherein the one modified sgRNA is the nucleic acid sequence of SEQ ID NO: 71,959.

[0579] In another method, Method 53, the present disclosure provides a method as provided in any one of Methods 43-52, wherein the one or more Cas9 endonucleases is pre-complexed with one or two gRNAs or one or two sgRNAs to form one or more ribonucleoproteins (RNPs).

[0580] In another method, Method 54, the present disclosure provides a method as provided in Method 53, wherein the one or more Cas9 endonuclease is flanked at the N-terminus, the C-terminus, or both the N-terminus and C-terminus by one or more nuclear localization signals (NLSs).

[0581] In another method, Method 55, the present disclosure provides a method as provided in Method 54, wherein the one or more Cas9 endonucleases is flanked by two NLSs, one NLS located at the N-terminus and the second NLS located at the C-terminus.

[0582] In another method, Method 56, the present disclosure provides a method as provided in any one of Methods 54-55, wherein the one or more NLSs is a SV40 NLS.

[0583] In another method, Method 57, the present disclosure provides a method as provided in Method 53, wherein the weight ratio of sgRNA to Cas9 endonuclease in the RNP is 1:1.

[0584] In another method, Method 58, the present disclosure provides a method as provided in Method 53, wherein the one sgRNA comprises the nucleic acid sequence of SEQ ID NO: 71,959, the Cas9 endonuclease is a S. pyogenes Cas9 comprising a N-terminus SV40 NLS and a C-terminus SV40 NLS, wherein the weight ratio of sgRNA to Cas9 endonuclease is 1:1.

[0585] In another method, Method 59, the present disclosure provides a method as provided in any one of Methods 43-58, wherein the donor template is either single or double stranded.

[0586] In another method, Method 60, the present disclosure provides a method as provided in any one of Methods 42-59, wherein the modified transcriptional control sequence is located within a second intron of the BCL11A gene.

[0587] In another method, Method 61, as provided in any one of Methods 42-59, wherein the modified transcriptional control sequence is located within a +58 DNA hypersensitive site (DHS) of the BCL11A gene.

[0588] In another method, Method 62, the present disclosure provides a method as provided in any one of Methods 42-61, wherein the insertion is by homology directed repair (HDR).

[0589] In another method, Method 63, the present disclosure provides a method as provided in any one of Methods 8, 14, 21, 24, 43, and 45, wherein the SSB, DSB, or 5′ locus and 3′ locus are located within a second intron of the BCL11A gene.

[0590] In another method, Method 64, the present disclosure provides a method as provided in any one of Methods 8, 14, 21, 24, 43, and 45, wherein the SSB, DSB, or 5′ DSB and 3′ DSB are located within a +58 DNA hypersensitive site (DHS) of the BCL11A gene.

[0591] In another method, Method 65, the present disclosure provides a method as provided in any one of Methods 1, 8, 14, 21, or 24, wherein the method further comprises introducing into the cell one or more guide ribonucleic acid (gRNAs), and wherein the one or more DNA endonucleases is one or more Cas9 or Cpf1 endonucleases that effect or create a pair of single-strand breaks (SSBs) or double-strand breaks (DSBs), a first SSB or DSB at a 5′ locus and a second SSB or DSB at a 3′ locus, within or near the BCL11A gene or other DNA sequence that encodes a regulatory element of the BCL11A gene that causes a deletion of the chromosomal DNA between the 5′ locus and the 3′ locus that results in a permanent deletion, modulation, or inactivation of the transcriptional control sequence of the chromosomal DNA between the 5′ locus and the 3′ locus.

[0592] In another method, Method 66, the present disclosure provides a method as provided in Method 65, wherein one gRNA creates a pair of SSBs or DSBs.

[0593] In another method, Method 67, the present disclosure provides a method as provided in Method 65, wherein one gRNA comprises a spacer sequence that is complementary to either the 5′ locus or the 3′ locus.

[0594] In another method, Method 68, the present disclosure provides a method as provided in Method 65, wherein the method comprises a first guide RNA and a second guide RNA, wherein the first guide RNA comprises a spacer sequence that is complementary to a segment of the 5′ locus and the second guide RNA comprises a spacer sequence that is complementary to a segment of the 3′ locus.

[0595] In another method, Method 69, the present disclosure provides a method as provided in Methods 65-68, wherein the one or more gRNAs are one or more single-molecule guide RNA (sgRNAs).

[0596] In another method, Method 70, the present disclosure provides a method as provided in Methods 65-69 wherein the one or more gRNAs or one or more sgRNAs are one or more modified gRNAs or one or more modified sgRNAs.

[0597] In another method, Method 71, the present disclosure provides a method as provided in Method 70, wherein the one modified sgRNA comprises three 2′-O-methyl-phosphorothioate residues at or near each of its 5′ and 3′ ends.

[0598] In another method, Method 72, the present disclosure provides a method as provided in Method 71, wherein the one modified sgRNA is the nucleic acid sequence of SEQ ID NO: 71,959.

[0599] In another method, Method 73, the present disclosure provides a method as provided in any one of Methods 65-72, wherein the one or more Cas9 endonucleases is pre-complexed with one or more gRNAs or one or more sgRNAs to form one or more ribonucleoproteins (RNPs).

[0600] In another method, Method 74, the present disclosure provides a method as provided in Method 73, wherein the one or more Cas9 endonuclease is flanked at the N-terminus, the C-terminus, or both the N-terminus and C-terminus by one or more nuclear localization signals (NLSs).

[0601] In another method, Method 75, the present disclosure provides a method as provided in Method 74, wherein the one or more Cas9 endonucleases is flanked by two NLSs, one NLS located at the N-terminus and the second NLS located at the C-terminus.

[0602] In another method, Method 76, the present disclosure provides a method as provided in any one of Methods 74-75, wherein the one or more NLSs is a SV40 NLS.

[0603] In another method, Method 77, the present disclosure provides a method as provided in Method 73, wherein the weight ratio of sgRNA to Cas9 endonuclease in the RNP is 1:1.

[0604] In another method, Method 78, the present disclosure provides a method as provided in Method 73, wherein the one sgRNA comprises the nucleic acid sequence of SEQ ID NO: 71,959, the Cas9 endonuclease is a S. pyogenes Cas9 comprising a N-terminus SV40 NLS and a C-terminus SV40 NLS, wherein the weight ratio of sgRNA to Cas9 endonuclease is 1:1.

[0605] In another method, Method 79, the present disclosure provides a method as provided in any one of Methods 65-78, wherein both the 5′ locus and 3′ locus are located within a second intron of the BCL11A gene.

[0606] In another method, Method 80, the present disclosure provides a method as provided in any one of Methods 65-78, wherein both the 5′ locus and 3′ locus are located within a +58 DNA hypersensitive site (DHS) of the BCL11A gene.

[0607] In another method, Method 81, the present disclosure provides a method as provided in any one of Methods 1, 8, 14, 21, or 24-80 wherein the Cas9 or Cpf1 mRNA, gRNA, and donor template are either each formulated into separate lipid nanoparticles or all co-formulated into a lipid nanoparticle.

[0608] In another method, Method 82, the present disclosure provides a method as provided in any one of Methods 1, 8, 14, 21, or 24-80, wherein the Cas9 or Cpf1 mRNA is formulated into a lipid nanoparticle, and both the gRNA and donor template are delivered to the cell by an adeno-associated virus (AAV) vector.

[0609] In another method, Method 83, the present disclosure provides a method as provided in any one of Methods 1, 8, 14, 21, or 24-80, wherein the Cas9 or Cpf1 mRNA is formulated into a lipid nanoparticle, and the gRNA is delivered to the cell by electroporation and donor template is delivered to the cell by an adeno-associated virus (AAV) vector.

[0610] In another method, Method 84, the present disclosure provides a method as provided in any one of Methods 1, 8, 14, 21, or 24-80, wherein the one or more RNP is delivered to the cell by electroporation.

[0611] In another method, Method 85, the present disclosure provides a method as provided in any one of Methods 1-84, wherein the BCL11A gene is located on Chromosome 2: 60,451,167-60,553,567 (Genome Reference Consortium—GRCh38).

[0612] In another method, Method 86, the present disclosure provides a method as provided in any one of Methods 1-85, wherein the hemoglobinopathy is selected from a group consisting of sickle cell anemia and thalassemia (α, β, δ, γ, and combinations thereof).

[0613] In another method, Method 87, the present disclosure provides a method as provided in any one of Methods 1-86, wherein the editing within or near a BCL11A gene or other DNA sequence that encodes a regulatory element of the BCL11A gene can reduce BCL11A gene expression.

[0614] In a first composition, Composition 1, the present disclosure provides one or more guide ribonucleic acids (gRNAs) for editing a BCL11A gene in a cell from a patient with a hemoglobinopathy, the one or more gRNAs comprising a spacer sequence selected from the group consisting of nucleic acid sequences in SEQ ID NOs: 1-71,947 of the Sequence Listing.

[0615] In another composition, Composition 2, the present disclosure provides the one or more gRNAs of Composition 1, wherein the one or more gRNAs are one or more single-molecule guide RNAs (sgRNAs).

[0616] In another composition, Composition 3, the present disclosure provides the one or more gRNAs or sgRNAs of Compositions 1 or 2, wherein the one or more gRNAs or one or more sgRNAs is one or more modified gRNAs or one or more modified sgRNAs.

[0617] In another composition, Composition 4, the present disclosure provides the one or more sgRNAs of Composition 3, wherein the one or more modified sgRNAs comprises three 2′-O-methyl-phosphorothioate residues at or near each of its 5′ and 3′ ends.

[0618] In another composition, Composition 5, the present disclosure provides the one or more sgRNAs of Composition 3, wherein the one or more modified sgRNAs comprises the nucleic acid sequence of SEQ ID NO: 71,959.

[0619] In another composition, Composition 6, the present disclosure provides a single-molecule guide RNA (sgRNA) comprising the nucleic acid sequence of SEQ ID NO: 71,959.

### Definitions

[0620] The term “comprising” or “comprises” is used in reference to compositions, methods, and respective component(s) thereof, that are essential to the invention, yet open to the inclusion of unspecified elements, whether essential or not.

[0621] The term “consisting essentially of” refers to those elements required for a given aspect. The term permits the presence of additional elements that do not materially affect the basic and novel or functional characteristic(s) of that aspect of the invention.

[0622] The term “consisting of” refers to compositions, methods, and respective components thereof as described herein, which are exclusive of any element not recited in that description of the aspect.

[0623] The singular forms “a,” “an,” and “the” include plural references, unless the context clearly dictates otherwise.

[0624] Any numerical range recited in this specification describes all sub-ranges of the same numerical precision (i.e., having the same number of specified digits) subsumed within the recited range. For example, a recited range of “1.0 to 10.0” describes all sub-ranges between (and including) the recited minimum value of 1.0 and the recited maximum value of 10.0, such as, for example, “2.4 to 7.6,” even if the range of “2.4 to 7.6” is not expressly recited in the text of the specification. Accordingly, the Applicant reserves the right to amend this specification, including the claims, to expressly recite any sub-range of the same numerical precision subsumed within the ranges expressly recited in this specification. All such ranges are inherently described in this specification such that amending to expressly recite any such sub-ranges will comply with written description, sufficiency of description, and added matter requirements, including the requirements under 35 U.S.C. § 112(a) and Article 123(2) EPC. Also, unless expressly specified or otherwise required by context, all numerical parameters described in this specification (such as those expressing values, ranges, amounts, percentages, and the like) may be read as if prefaced by the word “about,” even if the word “about” does not expressly appear before a number. Additionally, numerical parameters described in this specification should be construed in light of the number of reported significant digits, numerical precision, and by applying ordinary rounding techniques. It is also understood that numerical parameters described in this specification will necessarily possess the inherent variability characteristic of the underlying measurement techniques used to determine the numerical value of the parameter.

### EXAMPLES

[0625] The invention will be more fully understood by reference to the following examples, which provide illustrative non-limiting aspects of the invention.

[0626] The examples describe the use of the CRISPR system as an illustrative genome editing technique to create defined genomic deletions, insertions, or replacements, termed “genomic modifications” herein, within or near the BCL11A gene or other DNA sequence that encodes a regulatory element of the BCL11A gene that lead to a permanent deletion, modulation, or inactivation of a transcriptional control sequence of the BCL11A gene. Introduction of the defined therapeutic modifications represents a novel therapeutic strategy for the potential amelioration of a hemoglobinopathy, as described and illustrated herein.

### Example 1—CRISPR/SpCas9 Target Sites for the Transcriptional Control Sequence of the BCL11A Gene

[0627] Regions of the 12.4 kb transcriptional control sequence of the BCL11A gene were scanned for target sites. Each area was scanned for a protospacer adjacent motif (PAM) having the sequence NRG. gRNA 20 bp spacer sequences corresponding to the PAM were identified, as shown in SEQ ID NOs: 1-29,482 of the Sequence Listing.

### Example 2—CRISPR/SaCas9 Target Sites for the Transcriptional Control Sequence of the BCL11A Gene

[0628] Regions of the 12.4 kb transcriptional control sequence of the BCL11A gene were scanned for target sites. Each area was scanned for a protospacer adjacent motif (PAM) having the sequence NNGRRT. gRNA 20 bp spacer sequences corresponding to the PAM were identified, as shown in SEQ ID NOs: 29,483-32,387 of the Sequence Listing.

### Example 3—CRISPR/StCas9 Target Sites for the Transcriptional Control Sequence of the BCL11A Gene

[0629] Regions of the 12.4 kb transcriptional control sequence of the BCL11A gene were scanned for target sites. Each area was scanned for a protospacer adjacent motif (PAM) having the sequence NNAGAAW. gRNA 20 bp spacer sequences corresponding to the PAM were identified, as shown in SEQ ID NOs: 32,388-33,420 of the Sequence Listing.

### Example 4—CRISPR/TdCas9 Target Sites for the Transcriptional Control Sequence of the BCL11A Gene

[0630] Regions of the 12.4 kb transcriptional control sequence of the BCL11A gene were scanned for target sites. Each area was scanned for a protospacer adjacent motif (PAM) having the sequence NAAAAC. gRNA 20 bp spacer sequences corresponding to the PAM were identified, as shown in SEQ ID NOs: 33,421-33,851 of the Sequence Listing.

### Example 5—CRISPR/NmCas9 Target Sites for the Transcriptional Control Sequence of the BCL11A Gene

[0631] Regions of the 12.4 kb transcriptional control sequence of the BCL11A gene were scanned for target sites. Each area was scanned for a protospacer adjacent motif (PAM) having the sequence NNNNGHTT. gRNA 20 bp spacer sequences corresponding to the PAM were identified, as shown in SEQ ID NOs: 33,852-36,731 of the Sequence Listing.

### Example 6—CRISPR/Cpf1 Target Sites for the Transcriptional Control Sequence of the BCL11A Gene

[0632] Regions of the 12.4 kb transcriptional control sequence of the BCL11A gene were scanned for target sites. Each area was scanned for a protospacer adjacent motif (PAM) having the sequence YTN. gRNA 22 bp spacer sequences corresponding to the PAM were identified, as shown in SEQ ID NOs: 36,732-71,947 of the Sequence Listing.

### Example 7—Bioinformatics Analysis of the Guide Strands

[0633] Candidate guides will be screened and selected in a multi-step process that involves both theoretical binding and experimentally assessed activity. By way of illustration, candidate guides having sequences that match a particular on-target site, such as a site within the transcriptional control sequence of the BCL11A gene, with adjacent PAM can be assessed for their potential to cleave at off-target sites having similar sequences, using one or more of a variety of bioinformatics tools available for assessing off-target binding, as described and illustrated in more detail below, in order to assess the likelihood of effects at chromosomal positions other than those intended. Candidates predicted to have relatively lower potential for off-target activity can then be assessed experimentally to measure their on-target activity, and then off-target activities at various sites. Preferred guides have sufficiently high on-target activity to achieve desired levels of gene editing at the selected locus, and relatively lower off-target activity to reduce the likelihood of alterations at other chromosomal loci. The ratio of on-target to off-target activity is often referred to as the “specificity” of a guide.

[0634] For initial screening of predicted off-target activities, there are a number of bioinformatics tools known and publicly available that can be used to predict the most likely off-target sites; and since binding to target sites in the CRISPR/Cas9/Cpf1 nuclease system is driven by Watson-Crick base pairing between complementary sequences, the degree of dissimilarity (and therefore reduced potential for off-target binding) is essentially related to primary sequence differences: mismatches and bulges, i.e. bases that are changed to a non-complementary base, and insertions or deletions of bases in the potential off-target site relative to the target site. An exemplary bioinformatics tool called COSMID (CRISPR Off-target Sites with Mismatches, Insertions and Deletions) (available on the web at crispr.bme.gatech.edu) compiles such similarities. Other bioinformatics tools include, but are not limited to, GUIDO, autoCOSMID, and CCtop.

[0635] Bioinformatics were used to minimize off-target cleavage in order to reduce the detrimental effects of mutations and chromosomal rearrangements. Studies on CRISPR/Cas9 systems suggested the possibility of high off-target activity due to nonspecific hybridization of the guide strand to DNA sequences with base pair mismatches and/or bulges, particularly at positions distal from the PAM region. Therefore, it is important to have a bioinformatics tool that can identify potential off-target sites that have insertions and/or deletions between the RNA guide strand and genomic sequences, in addition to base-pair mismatches. The bioinformatics-based tool, COSMID (CRISPR Off-target Sites with Mismatches, Insertions and Deletions) was therefore used to search genomes for potential CRISPR off-target sites (available on the web at crispr.bme.gatech.edu). COSMID output ranked lists of the potential off-target sites based on the number and location of mismatches, allowing more informed choice of target sites, and avoiding the use of sites with more likely off-target cleavage.

[0636] Additional bioinformatics pipelines were employed that weigh the estimated on- and/or off-target activity of gRNA targeting sites in a region. Other features that may be used to predict activity include information about the cell type in question, DNA accessibility, chromatin state, transcription factor binding sites, transcription factor binding data, and other CHIP-seq data. Additional factors are weighed that predict editing efficiency, such as relative positions and directions of pairs of gRNAs, local sequence features and micro-homologies.

### Example 8—Testing of Preferred Guides in Cells for On-Target Activity

[0637] The gRNAs predicted to have the lowest off-target activity will then be tested for on-target activity in K562 cells, and evaluated for indel frequency using TIDE.

[0638] TIDE is a web tool to rapidly assess genome editing by CRISPR-Cas9 of a target locus determined by a guide RNA (gRNA or sgRNA). Based on quantitative sequence trace data from two standard capillary sequencing reactions, the TIDE software quantifies the editing efficacy and identifies the predominant types of insertions and deletions (indels) in the DNA of a targeted cell pool. See Brinkman et al, Nucl. Acids Res. (2014) for a detailed explanation and examples. An alternative method is Next-generation sequencing (NGS), also known as high-throughput sequencing, which is the catch-all term used to describe a number of different modern sequencing technologies including: Illumina (Solexa) sequencing, Roche 454 sequencing, Ion torrent: Proton/PGM sequencing, and SOLiD sequencing. These recent technologies allow one to sequence DNA and RNA much more quickly and cheaply than the previously used Sanger sequencing, and as such have revolutionized the study of genomics and molecular biology.

[0639] Transfection of tissue culture cells, allows screening of different constructs and a robust means of testing activity and specificity. Tissue culture cell lines, such as K562 or HEK293T are easily transfected and result in high activity. These or other cell lines will be evaluated to determine the cell lines that match with CD34+ and provide the best surrogate. These cells will then be used for many early stage tests. For example, individual gRNAs for S. pyogenes Cas9 can be transfected into the cells using plasmids, such as, for example, CTx-1, CTx-2, or CTx-3 described in FIG. 1A-1C, which are suitable for expression in human cells. Alternatively, commercially available vectors may also be used. For the Indel Freq assessment of the BCL11A gRNAs described herein, a commercially available Cas9 expression plasmid (GeneArt, Thermo Fisher) was employed. Several days later (48 hrs for this experiment), the genomic DNA was harvested and the target site amplified by PCR. The cutting activity was measured by the rate of insertions, deletions and mutations introduced by NHEJ repair of the free DNA ends. Although this method cannot differentiate correctly repaired sequences from uncleaved DNA, the level of cutting can be gauged by the amount of mis-repair. Off-target activity can be observed by amplifying identified putative off-target sites and using similar methods to detect cleavage. Translocation can also be assayed using primers flanking cut sites, to determine if specific cutting and translocations happen. Un-guided assays have been developed allowing complementary testing of off-target cleavage including guide-seq. The gRNA or pairs of gRNA with significant activity can then be followed up in cultured cells to measure the modulation or inactivation of the +58 DNA hypersensitive site (DHS) within the transcriptional control sequence of the BCL11A gene. Off-target events can be followed again. Similarly CD34+ cells can be transfected and the level of modulation or inactivation of the +58 DNA hypersensitive site (DHS) within the transcriptional control sequence of the BCL11A gene and possible off-target events measured. These experiments allow optimization of nuclease and donor design and delivery.

### Example 9—Testing of Preferred Guides in Cells for Off-Target Activity

[0640] The gRNAs having the best on-target activity from the TIDE and next generation sequencing studies in the above example will then be tested for off-target activity using whole genome sequencing. Candidate gRNAs will be more completely evaluated in CD34+ cells or iPSCs.

### Example 10—Testing of Preferred gRNA Combinations in Cells

[0641] The gRNAs having the best on-target activity from the TIDE and next generation sequencing studies and lowest off-target activity will be tested in combinations to evaluate the size of the deletion resulting from the use of each gRNA combination. Potential gRNA combinations will be evaluated in primary human CD34+ cells.

[0642] For example, gRNA combinations will be tested for efficiency of deleting all or a portion of the transcriptional control sequence of the BCL11A gene. The gRNA combinations will also be tested for efficiency of deleting all or a portion of the +58 DNA hypersensitive site (DHS) of the BCL11A gene.

### Example 11—Testing Different Approaches for HDR Gene Editing

[0643] After testing the gRNAs for both on-target activity and off-target activity, modulation/inactivation and knock-in strategies will be tested for HDR gene editing.

[0644] For the modulation/inactivation approach, donor DNA template will be provided as a short single-stranded oligonucleotide, a short double-stranded oligonucleotide (PAM sequence intact/PAM sequence mutated), a long single-stranded DNA molecule (PAM sequence intact/PAM sequence mutated) or a long double-stranded DNA molecule (PAM sequence intact/PAM sequence mutated). The donor DNA template will comprise either a wild-type BCL11A gene or cDNA comprising a modified transcriptional control sequence or a wild-type BCL11A gene or cDNA comprising a modified (e.g. mutated)+58 DNA hypersensitive site (DHS). In addition, the donor DNA template will be delivered by AAV.

[0645] For the cDNA knock-in approach, a single-stranded or double-stranded DNA may include more than 40 nt of the modified transcriptional control sequence of the BCL11A gene. The single-stranded or double-stranded DNA may include more than 80 nt of the modified transcriptional control sequence of the BCL11A gene. The single-stranded or double-stranded DNA may include more than 100 nt of the modified transcriptional control sequence of the BCL11A gene. The single-stranded or double-stranded DNA may include more than 150 nt of the modified transcriptional control sequence of the BCL11A gene. The single-stranded or double-stranded DNA may include more than 300 nt of the modified transcriptional control sequence of the BCL11A gene. The single-stranded or double-stranded DNA may include more than 400 nt of the modified transcriptional control sequence of the BCL11A gene. Alternatively, the DNA template will be delivered by AAV.

[0646] For the cDNA knock-in approach, a single-stranded or double-stranded DNA may include more than 40 nt of the modified +58 DNA hypersensitive site (DHS) of the BCL11A gene. The single-stranded or double-stranded DNA may include more than 80 nt of the modified +58 DNA hypersensitive site (DHS) of the BCL11A gene. The single-stranded or double-stranded DNA may include more than 100 nt of the modified +58 DNA hypersensitive site (DHS) of the BCL11A gene. The single-stranded or double-stranded DNA may include more than 150 nt of the modified +58 DNA hypersensitive site (DHS) of the BCL11A gene. The single-stranded or double-stranded DNA may include more than 300 nt of the modified +58 DNA hypersensitive site (DHS) of the BCL11A gene. The single-stranded or double-stranded DNA may include more than 400 nt of the modified +58 DNA hypersensitive site (DHS) of the BCL11A gene. Alternatively, the DNA template will be delivered by AAV.

### Example 12—Re-Assessment of Lead CRISPR-Cas9/DNA Donor Combinations

[0647] After testing the different strategies for HDR gene editing, the lead CRISPR-Cas9/DNA donor combinations will be re-assessed in primary human cells for efficiency of deletion, recombination, and off-target specificity. Cas9 mRNA or RNP will be formulated into lipid nanoparticles for delivery, sgRNAs will be formulated into nanoparticles or delivered as AAV, and donor DNA will be formulated into nanoparticles or delivered as AAV.

### Example 13—In Vivo Testing in Relevant Animal Model

[0648] After the CRISPR-Cas9/DNA donor combinations have been re-assessed, the lead formulations will be tested in vivo in an animal model.

[0649] Culture in human cells allows direct testing on the human target and the background human genome, as described above.

[0650] Preclinical efficacy and safety evaluations can be observed through engraftment of modified mouse or human CD34+ cells in NSG or similar mice. The modified cells can be observed in the months after engraftment.

### Example 14—Editing Cells with Various gRNAs

[0651] Mobilized human peripheral blood CD34+ cells from human donors 1-3 were cultured in serum free StemSpan Medium with CD34+ expansion supplement for two days. 100,000 cells were washed and electroporated using Cas9 mRNA with Corfu Large (CLO) gRNAs, Corfu Small (CSO) gRNAs, HPFH5 gRNAs, Kenya gRNAs, SD2 sgRNA, or SPY101 sgRNA. Cells were allowed to recover for two days before being switched to an erythroid differentiation medium (IMDM+Glutamax supplemented with 5% human serum, 10 ug/ml insulin, 20 ng/ml SCF, 5 ng/ml IL-3, 3U/ml EPO, 1 uM dexamethasone, 1 uM β-estradiol, 330 ug/ml holo-transferrin and 2U/ml heraprin). The percentage of insertions/deletions (“indels”) was determined for each of the cells electroporated with Corfu Large (CLO) gRNAs, cells electroporated with Corfu Small (CSO) gRNAs, cells electroporated with HPFH5 gRNAs, cells electroporated with Kenya gRNAs, cells electroporated with SD2 sgRNA, and the cells electroporated with SPY101 sgRNA (FIG. 3), as described in the “On- and off-target mutation detection by sequence” and “Mutation detection assays” sections described herein. After differentiating these cells for 12 days in erythroid differentiation medium, RNA was collected to assess hemoglobin levels by quantitative real-time-PCR (FIGS. 4A-4C).

[0652] Single erythroid progenitors were generated using flow cytometry one day later and cultured in the erythroid differentiation medium to expand and grow as colonies. Each colony was split and collected 12 days post-sorting for DNA and RNA analysis. The sister colonies were collected 15 days post-sorting for the analysis of hemoglobin proteins. Globin expression (ratio of γ/18sRNA or ratio of γ/α) was determined by quantitative real-time PCR and compared for each of the edited erythroid colonies (FIGS. 5A-5B).

### Example 15—Testing of SPY101 sgRNA

[0653] Three possible gene editing outcomes may occur within intron 2 of the BCL11A gene when using SPY101 sgRNA. The first gene editing outcome that may occur when using SPY101 sgRNA results in only indels in both alleles (Indel/Indel, FIG. 6). The second gene editing outcome that may occur when using SPY101 sgRNA results in a clone with both indels and wild-type sequences in the two alleles (Indel/WT, FIG. 6). The third gene editing outcome that may occur when using SPY101 sgRNA results in a colony with wild-type sequences in both alleles (WT/WT, FIG. 6).

[0654] When using SPY101 sgRNA, 92% of the erythroid colonies were edited. For example, 92% of the erythroid colonies had alleles with indels (FIG. 6).

[0655] γ-globin expression (γ/α globin mRNA ratio or γ/(γ+β) globin mRNA ratio) was measured in single erythroid colonies edited with SPY101 (FIGS. 7A-B). The single erythroid colonies included colonies with biallelic or homozygous indel (indel/indel), colonies with a monoallelic or heterozygous indel (indel/WT), and colonies with wild-type sequences in both allelles (WT/WT). The erythroid colonies having indels were able to express higher levels of gamma globin compared to the clones with wild-type sequences in both alleles (FIGS. 7A-B).

### Example 16—Therapeutic Strategy for Sickle Cell Disease (SCD) and β-Thalassemia

[0656] The following Table (Table 4) provides information related to the gRNAs used in Examples 16-17.

TABLE 4

| | | | SEQ |
|---|---|---|---|
| | | | ID |
| gRNA | Name | Sequence | NO. |
| gRNA A | CL01 | 5′usgsusGUGCUGGCCCGCAACUUGUU | 71950 |
| | | UUAGAGCUAGAAAUAGCAAGUUAAAA | |
| | | UAAGGCUAGUCCGUUAUCAACUUGAA | |
| | | AAAGUGGCACCGAGUCGGUGCususus | |
| | | U3′ | |
| gRNA B | CL08 | 5′cscscsACUCAAGAGAUAUGGUGGUUU | 71951 |
| | | UAGAGCUAGAAAUAGCAAGUUAAAAU | |
| | | AAGGCUAGUCCGUUAUCAACUUGAAA | |
| | | AAGUGGCACCGAGUCGGUGCusususU | |
| | | 3′ | |
| gRNA C | CS02 | 5′gsusasGACCACCAGUAAUCUGAGUUU | 71952 |
| | | UAGAGCUAGAAAUAGCAAGUUAAAAU | |
| | | AAGGCUAGUCCGUUAUCAACUUGAAA | |
| | | AAGUGGCACCGAGUCGGUGCusususU | |
| | | 3′ | |
| gRNA D | CS06 | 5′asgsusAUACCUCCCAUACCAUGGUUU | 71953 |
| | | UAGAGCUAGAAAUAGCAAGUUAAAAU | |
| | | AAGGCUAGUCCGUUAUCAACUUGAAA | |
| | | AAGUGGCACCGAGUCGGUGCusususU | |
| | | 3′ | |
| gRNA E | HPFH5-15 | 5′csusgsUCUUAUUACCCUGUCAUGUUU | 71954 |
| | | UAGAGCUAGAAAUAGCAAGUUAAAAU | |
| | | AAGGCUAGUCCGUUAUCAACUUGAAA | |
| | | AAGUGGCACCGAGUCGGUGCusususU | |
| | | 3′ | |
| gRNA F | HPFH5-4 | 5′ascsusGAGUUCUAAAAUCAUCGGUUU | 71955 |
| | | UAGAGCUAGAAAUAGCAAGUUAAAAU | |
| | | AAGGCUAGUCCGUUAUCAACUUGAAA | |
| | | AAGUGGCACCGAGUCGGUGCusususU | |
| | | 3′ | |
| gRNA G | Kenya 02 | 5′gsuscsUUCAGCCUACAACAUACGUUU | 71956 |
| | | UAGAGCUAGAAAUAGCAAGUUAAAAU | |
| | | AAGGCUAGUCCGUUAUCAACUUGAAA | |
| | | AAGUGGCACCGAGUCGGUGCusususU | |
| | | 3′ | |
| gRNA H | Kenya 17 | 5′gsususAAGUUCAUGUCAUAGGAGUU | 71957 |
| | | UUAGAGCUAGAAAUAGCAAGUUAAAA | |
| | | UAAGGCUAGUCCGUUAUCAACUUGAA | |
| | | AAAGUGGCACCGAGUCGGUGCususus | |
| | | U3′ | |
| gRNA I | SD2 | 5′csususGUCAAGGCUAUUGGUCAGUU | 71958 |
| | | UUAGAGCUAGAAAUAGCAAGUUAAAA | |
| | | UAAGGCUAGUCCGUUAUCAACUUGAA | |
| | | AAAGUGGCACCGAGUCGGUGCususus | |
| | | U3′ | |
| gRNA J | SPY | 5′csusasACAGUUGCUUUUAUCACGUUU | 71959 |
| | | UAGAGCUAGAAAUAGCAAGUUAAAAU | |
| | | AAGGCUAGUCCGUUAUCAACUUGAAA | |
| | | AAGUGGCACCGAGUCGGUGCusususU | |
| | | 3′ | |

a, g, u: 2′-O-methyl residues
s: phosphorothioate
A, C, G, U: RNA residues

[0657] The following Table (Table 5) provides information related to the targets referred to in Examples 16-17.

TABLE 5

| | |
|---|---|
| Target 1 | Corfu Large |
| Target 2 | Corfu Small |
| Target 3 | HPFH5 |
| Target 4 | KENYA |
| Target 5 | SD2 |
| Target 6 | SPY101 |

[0658] A therapeutic strategy for SCD and β-thalassemia used CRISPR/Cas9 to re-create the same genetic mutations that occur naturally in HPFH patients. Patients' hematopoietic stem cells were isolated, these cells were treated ex vivo with CRISPR/Cas9 to create HPFH genetic edits, and then the edited cells were reintroduced into the patients. The genetically modified stem cells gave rise to erythrocytes that contain sufficient levels of HBF to significantly reduce the severity of disease symptoms. A number of genetic edits have been prioritized based on the degree of HBF upregulation seen in nature, the ability to re-create theses edits at high efficiency using CRISPR/Cas9, and the absence of off target editing.

[0659] Candidate guide RNA (gRNA) sequences were computationally selected and then screened for on-target editing efficacy in CD34+ cells. Shown in FIG. 8 are the results of one such screen. gRNAs were identified with consistent, high (>70%) on target editing across multiple donor samples. Each CD34+ cell donor is represented by a unique symbol (▴, ★, ●) and on-target editing efficiency for each donor is measured twice.

[0660] Candidate gRNAs were screened in CD34+ cells for off-target activity by examining hundreds of sites computationally identified to be most similar in sequence to the intended on-target site, and thus have the highest potential for off-target activity. FIGS. 9A-B shows the experimental approach (FIG. 9A) and results (FIG. 9B) for each of the gRNAs tested in FIG. 8. Most gRNAs displayed no detectable off-target activity, even at predicted sites. Only gRNA C and gRNA G show off-target activity. Multiple probes were used for each predicted site to increase assay sensitivity.

[0661] Candidate gRNAs were used to re-create specific HPFH or other modifications in erythroid cells obtained from SCD and β-thalassemia patients, as well as from healthy donors. After erythroid differentiation, globin transcript levels were measured to assess the increase in γ-globin relative to α- or β-globin. Shown in FIGS. 10A-B, greater than 30% γ-globin mRNA levels were observed in patient cells edited with gRNAs to re-create HPFH Target 5 and 6. SCD and β-thalassemia patient samples exhibited a larger absolute increase in γ-globin than those from healthy donors, consistent with the observation of higher HbF in patients than in heterozygote carriers with HPFH. The background level for mock treated cells from each donor was subtracted from the values shown. Data represent a single experiment, except for SCD patient data which represent the mean of 3 different donor samples. Editing efficiency was similar for all experiments.

[0662] To ensure that editing efficiencies in the bulk CD34+ population were representative of those in long-term repopulating HSCs (LT-HSC), bulk CD34+ cells were sorted into specific sub-populations and assayed for on-target editing efficiency as shown in FIGS. 11A-C. High editing efficiency in the LT-HSC population was observed. Experiments were done using SPY101 and Cas9 protein across 4 donors. Bars depict Mean±SEM. LT-HSC, Long Term Hematopoietic Stem Cell; MPP, Multipotent Progenitor; MLP, Multilymphoid Progenitor; CMP, Common Myeloid Progenitor; MEP, Megakaryocyte Erythrocyte Progenitor; GMP, Granulocyte Macrophage Progenitor.

[0663] In vivo engraftment studies were performed in immunocompromised mice to confirm that the gene-edited HSPCs retain the potential for long-term repopulation of the hematopoietic system. Human CD34+ cells from healthy donors were untreated, unedited, or gene-edited using SPY101 gRNA and introduced into NSG mice. As shown in FIG. 12, the presence of similar levels of hCD45RA+ cells (at 8-weeks post-engraftment) in mice injected with untreated/unedited HSPCs and mice injected with SPY101 gene-edited HSPCs confirmed that the SPY101 edited cells retained engraftment potential. Data points represent individual animals and depict the percentage of live cells that were human CD45RA+. Mean±SD. “Untreated” represents HSPCs that were not electroporated and injected into immunocompromised mice. “Unedited” represents HSPCs that were electroporated, but not gene-edited and injected into immunocompromised mice. “SPY101” represents HSPCs that were electroporated with Cas9 and SPY101 gRNA and injected into immunocompromised mice.

[0664] Process development was initiated at a GMP-capable facility in preparation for clinical studies. As shown in FIG. 13, no significant loss of gene editing efficacy was observed at clinical scale in a GMP-compatible process. Data was average across 4 or more experiments, +SD.

[0665] GLP/toxicology studies have been initiated for our lead candidates, as shown in FIG. 14. Two separate studies in NSG mice will allow for a comprehensive characterization of biodistribution and toxicology of edited CD34+ cells.

### Example 17—Therapeutic Strategy for Sickle Cell Disease (SCD) and β-Thalassemia

[0666] Results from recreation of six different HPFH variants, or editing “targets”, in human mPB CD34+ cells are shown in FIGS. 16A-B and FIG. 17. The CD34+ cells were treated with CRISPR/Cas9, differentiated into erythrocytes, and then assayed for HBF mRNA and protein expression in bulk (FIGS. 16A-B) and colonies (FIG. 17), using an experimental process demonstrated in FIG. 15.

[0667] The results presented in FIGS. 16A-B were from 3 different donors for targets 1-3, and 7 different donors for targets 4-6. The background level for mock treated cells had been subtracted. Data is mean±SEM. Bulk analysis confirmed HBF upregulation and allowed for the prioritization of targets that demonstrated the highest levels of HBF.

[0668] Clonal analysis presented in FIG. 17 allowed confirmation that genetic edits caused by CRISPR/Cas9 were indeed the cause of the increase in HBF at the individual cell level. Results were from a single donor, and 50-80 colonies per target. mRNA transcript levels were measured by qRT-PCR. Data is mean±SEM.

[0669] Targets 5 and 6 displayed the highest HBF levels and were further analyzed in FIGS. 18A-B. Data is mean±SEM. WT denotes colonies that do not show evidence of gene editing, Heterozygous or Het denotes colonies with one allele edited, and Homozygous or Homo denotes colonies with both alleles edited. The evidence in FIGS. 16A-B, 17, and 18A-B support the causal relationship between the genetic edits produced, and the desired upregulation of HBF, providing further validation for the proposed therapeutic strategy.

### Example 18—Testing of Preferred Guide RNAs in Cells for On-Targeting Activity

[0670] Mobilized human peripheral blood (mPB) CD34+ cells from four independent donors were cultured in serum free CellGro® media including 100 ng/ml recombinant human stem cell factor (SCF), 100 ng/ml recombinant human Fit 3-Ligand (FLT3L), and 100 ng/ml Thrombopoietin (TPO). 200,000 cells per donor were washed and electroporated using Lonza electroporator without any CRISPR/Cas9 editing components (mock electroporation sample), with GFP gRNA and Cas9 protein as a negative control (GFP), with SPY101 gRNA and Cas9 protein (SPY), with SD2 gRNA and Cas9 protein (SD2), or dual BCL11A Exon 2 gRNAs and Cas9 protein (Ex2). The recombinant Cas9 protein encodes for S. pyogenes Cas9 flanked by two SV40 nuclear localization sequences (NLSs). These experiments were performed using a ribonucleoprotein (RNP) 1:1 weight ratio of gRNA to Cas9. The SPY101 gRNA creates an InDel disruption of DHS+58 Gatal binding site in intron 2 of the BCL11a locus. The SD2 gRNA creates InDels and a 4.9 Kb deletion in the human beta globin locus. The 4.9 Kb deletion is located upstream of HBG1 and includes the entire HBG2 sequence. The 4.9 Kb deletion starts 168 bp 5′ to the HBG2 coding sequence and ends 168 bp 5′ to the HBG1 coding sequence. The Exon 2 gRNAs create a 196 bp deletion on Exon 2 of the BCL11A locus and served as a positive control. Human mPB CD34+ cells that were not electroporated served as a negative control (no EP).

[0671] After electroporation, the gene-edited mPB CD34+ cells were allowed to recover for two days before being switched to an erythroid differentiation medium (IMDM+L-glutamine supplemented with 5% human serum, 10 ug/mL insulin, 20 ng/mL SCF, 5 ng/mL IL-3, 3 U/mL EPO, 1 uM dexamethasone, 330 ug/ml holo-transferrin and 2 U/mL heparin). The gene-edited mPB CD34+ cells were differentiated into erythrocytes and further tested via TIDE analysis, ddPCR analysis, quantitative real-time PCR analysis, FACS, and LC-MS (FIGS. 20A-B, 21A-D, 22A-B, and 23A-D). The overall experimental process is demonstrated in FIG. 19.

[0672] TIDE Analysis/ddPCR Analysis

[0673] Genomic DNA was isolated and tested for each of the gene-edited human mPB CD34+ cell samples grown in differentiation medium. Genomic DNA was isolated from the cells on days 1, 11, 13 and 15 post-differentiation. The genomic DNA was analyzed via TIDE analysis, which is a web tool to rapidly assess genome editing by CRISPR-Cas9 of a target locus determined by a guide RNA (gRNA or sgRNA). The results presented in FIGS. 20A-B were from 4 different donors and demonstrated that the percentage of gene editing was maintained throughout ex-vivo erythroid differentiation of mPB CD34+ cells edited with SD2 gRNA (FIG. 20B) and mPB CD34+ cells edited with SPY101 gRNA (FIG. 20A). Data is mean+SD.

[0674] The genomic DNA was also analyzed via ddPCR analysis to detect 4.9 kb deletion frequency with SD2 treatment. The results presented in FIG. 20B were from 4 different donors and demonstrated that the percentage of gene editing was maintained throughout ex-vivo erythroid differentiation of mPB CD34+ cells edited with SD2 gRNA (FIG. 20B). Data is mean±SD.

[0675] Quantitative Real-Time PCR Analysis

[0676] mRNA was isolated and tested for each of the gene-edited human mPB CD34+ cell samples grown in differentiation medium. mRNA isolation was performed on days 11 and 15 post-differentiation. Globin expression (ratio of γ/α and ratio of γ/(γ+β)) was determined by quantitative real-time PCR and compared for each of the human mPB CD34+ cells edited with SD2 gRNA and human mPB CD34+ cells edited with SPY101 gRNA (FIGS. 21A-D). The results presented in FIGS. 21A-D were from 4 different donors and demonstrated an increase in γ-globin transcript in human mPB CD34+ cells edited with SD2 gRNA and human mPB CD34+ cells edited with SPY101 gRNA compared to negative control. Data is mean±SD.

[0677] FACS/LC-MS

[0678] Human mPB CD34+ cells edited with SD2 gRNA and human mPB CD34+ cells edited with SPY101 gRNA were grown in differentiation medium for 15 days. Human mPB CD34+ cells were also edited with dual BCL11A Exon 2 gRNAs (Ex2) or GFP gRNA and grown in differentiation medium for 15 days. Some human mPB CD34+ cells were not edited with any CRISPR/Cas9 editing components (mock electroporation sample) and some human mPB CD34+ cells were not electroporated (no EP). The live cells were stained with Glycophorin A, a erythroid maturation marker. The cells were then fixed and permeabilized. The fixed cells were stained with fluorophore-conjugated antibody for each globin subunit. The stained cells were then analyzed via FACS, an example of γ-globin represented in FIG. 22A. The average median fluorescent intensity for γ-globin from 4 different donors are depicted in FIG. 22B (mean±SEM) and demonstrated an upregulation in γ-globin in human mPB CD34+ cells edited with SD2 gRNA and human mPB CD34+ cells edited with SPY101 gRNA.

[0679] Human mPB CD34+ cells edited with SD2 gRNA and mPB CD34+ cells edited with SPY101 gRNA were grown in differentiation medium for 15 days. Human mPB CD34+ cells were also edited with dual BCL11A Exon 2 gRNAs (Ex2) or GFP gRNA and grown in differentiation medium for 15 days. Some human mPB CD34+ cells were not edited with any CRISPR/Cas9 editing components (mock electroporation sample) and some human mPB CD34+ cells were not electroporated (no EP). Liquid chromatography—mass spectrometry (LC-MS) was used to detect denatured globin monomers (FIGS. 23A-D). The results presented in FIGS. 23A-D were from 4 different donors and also demonstrated an upregulation in γ-globin in mPB CD34+ cells edited with SD2 gRNA and mPB CD34+ cells edited with SPY101 gRNA. Data is mean±SD.

### Example 19—Testing of Preferred Guide RNAs in Cells for Off-Targeting Activity

[0680] While on-target editing of the genome is fundamental to a successful therapy, the detection of any off-target editing events is an important component of ensuring product safety. One method for detecting modifications at off-target sites involves enriching for regions of the genome that are most similar to the on-target site via hybrid capture sequencing and quantifying any indels that are detected.

[0681] Hybrid capture sequencing is a method that quantifies off-target edits in CRISPR-Cas9 edited cells and DNA. Details related to the hybrid capture sequencing method are as follows:

[0682] Materials and Methods

[0683] Materials and Sources

[0684] 1.1.1. Genomic DNA

[0685] As the purpose of this method is to determine if editing by CRISPR-Cas9 has occurred at off-target sites in the genome at least two input samples are typically used—treated and control (untreated, mock electroporated, etc.) samples. Each sample has genomic DNA (gDNA) extracted by an appropriated method and that gDNA is hybridized with the hybrid capture libraries (1.1.2) followed by the remainder of the protocol as described below.

[0686] 1.1.2. Hybrid Capture Libraries

[0687] Hybrid capture libraries as described in (1.2.2) are generated by providing a list of up to 57,000 120-mer oligonucleotide bait sequences which are then synthesized as a custom SureSelect XT hybrid capture kit.

[0688] 1.2 Methods

[0689] 1.2.1. Off-Target Site Detection Algorithms

[0690] To determine the sites that are most likely to have off-target editing we use several algorithms with different features to ensure a wide-range of off-target sites were covered.

[0691] 1.1.1.1. CCTop

[0692] For a given guide sequence CCTop uses the Bowtie 1 sequence mapping algorithm to search the genome for off-target sites with up to 5 mismatch between the site and the guide. We refer to these site as “homologous off-target sites” (rather than “predicted off-target sites”) since only sequence homology is used to determine the potential off-target sites in the genome. These 5 mismatches are limited to no more than 2 mismatches in the 5 base alignment seed region closest to the PAM end of the sequences. The CRISPOR algorithm (1.2.1.2) does not have the limitation in the seed region and thus complements CCTop.

[0693] 1.2.1.1. COSMID

[0694] Since some off-target Cas9 cleavage sites may have a short indels (also referred to as bulges) between themselves and the guide, we also search with the COSMID algorithm that can detect off-target sites with indels (typically limited to up to 2 indels) and thus complements the search done with CCTop.

[0695] 1.2.1.2. CRISPOR

[0696] CRISPOR is a tool that implements many different published CRISPR on- and off-target scoring functions for the purpose of comparing various methods. It uses the BWA algorithm for searching guide sequences against the genome to find their off-target sites. This differs from Bowtie 1 algorithm used in CCTop and allows for a search that is slightly more permissive in that mismatches near the PAM region are not limited to 2 out of 5 bases as in CCTop.

[0697] 1.2.1.3. PAMs

[0698] By default, screens are done with a search for guides with an NGG or NAG PAMs as they have some of the greatest activity. Later stage screens may include more PAMs to ensure that no off-target sites, even those with very low activity, are missed.

[0699] 1.2.1.4. Combination of Algorithms

[0700] The guides output by each algorithm are joined together to eliminate identical off-target sites and fed into the hybrid capture bait design component.

[0701] 1.2.2. Hybrid Capture Baits

[0702] 1.2.2.1 Design

[0703] The list of sites produced by the off-target site detection algorithms (1.2.1.) are then used to generate hybrid capture probes that will enrich for each of the off-target sites in the input gDNA samples. Although one bait may be sufficient to successfully enrich for a target DNA sequence, several baits are generally designed and tiled across the target site (FIG. 24) in order to make it more likely that a bait specifically pulls down a target region even if it is flanked on a side by repetitive sequence that may be difficult to bind specifically. Hybrid capture baits (120-mers, dark colored portions) tiled across a bait (20-mer, light portion denoted by the *) (FIG. 24).

[0704] 1.2.3. Sequencing

[0705] After hybrid capture enrichment, sequencing is done on an Illumina HiSeq sequencer with paired-end 125 bp reads and a 175 bp insert size. Sequencing is typically done to target a depth of coverage that targets having 5 reads detected from a minimal frequency event. To detect for example 0.5% indel events, sequencing to 1000× coverage is performed so that an 0.5% event might have 5 reads.

[0706] 1.2.4. Bait Effectiveness

[0707] In a typical experiment we find that baits cover the large majority of the target sites with high levels of sequencing coverage. There are some limitations to the sequencing coverage that may be achieved by next-generation sequencing (NGS) methods due to: high or low % GC, low-complexity sequences, low bait affinity, bait non-specificity, and other reasons. The actual power to detect indels in an experiment is estimated by calculating the sampling power of different sequencing coverage for sites with different true indel frequencies. Generally, increased sequence coverage provides increased power to detect sites with low-frequency indels. For example, if a site has 2500× sequencing coverage, hybrid capture will have 99% power to see sites with 0.4% indel frequency, and 94% power to see sites with 0.3% indel frequency (FIG. 25).

[0708] 1.2.5. Quantification

[0709] Sequencing data is aligned with the BWA algorithm using default parameters to the human genome build hg38. For each potential off-target site, all indels within 3 bp of the potential Cas9 cleavage site are counted and divided by the coverage at the cut site and thus provides a quantity of indels at a particular cut site.

[0710] 1.2.6. Statistical Assessment of Significant Cut Sites

[0711] Various events can lead to indels that are not a result of CRISPR-Cas9 being detected at sites throughout the genome: germline indel variants or polymorphisms, regions susceptible to genomic breaks, regions with homopolymer runs, and regions that are otherwise difficult to sequence

[0712] 1.2.6.1. Sites Excluded from Analysis

[0713] We exclude from analysis: any sites with a “germline” indel on a donor-by-donor basis (donor has >30% indel frequency in every sample), any chromosome Y sites in female samples, and any sites with 0 coverage.

[0714] 1.2.6.2. Statistical Test

[0715] To assess whether an indel seen at a potential off-target site is truly a CRISPR-Cas9 induced event, we test whether the samples treated with Cas9 and guide have a significantly higher frequency of indels than the untreated samples using both Mann-Whitney Wilcoxon test and Student's t-test. If either of these tests is significant (p <0.05) we consider the site flagged for follow-up with PCR to determine if there is significant editing. To ensure that we flag sites for follow-up as aggressively as possible, we do not perform multiple hypothesis testing correction, which would decrease the number of sites that we find significant.

[0716] We also establish a negative control analysis, where we repeat the analysis, except we look for sites with higher frequency of indels in the untreated sample than the treated sample. Biologically, there is no reason we would expect to find “true hits” in this analysis, which provides us empirical information about the number of false positives we can expect to find in this dataset that can be attributable to background noise. Furthermore, we can expand this into an empirical null distribution by leveraging an additional two negative control samples, including cells electroporated with no Cas9 or guide, and cells electroporated with Cas9 and a GFP guide. By testing for hits in samples that are “less treated” compared to samples that are “more treated”, we determine a conservative empirical null distribution of false positive hits, which can be used to inform the believability of the hits in our original analysis for treated vs untreated samples.

[0717] Human mPB CD34+ cells edited with SD2 gRNA and human mPB CD34+ cells edited with SPY101 gRNA were analyzed via a hybrid capture sequencing method described herein. The results presented in FIGS. 26-27 were from 3-4 different donors and demonstrated 0 off-target sites with evidence of cutting in gene-edited mPB CD34+ cells, which were edited with SD2 gRNA (FIG. 27) and gene-edited mPB CD34+ cells edited with SPY101 gRNA (FIG. 26). The indel frequency for round 1 is greater than (>) 0.5%. The indel frequency for round 2 is greater than (>) 0.2%.

### Example 20—Engraftment Experiments

[0718] Mobilized human peripheral blood (mPB) CD34+ cells were isolated from healthy donors using CliniMACS CD34 microbeads with the CliniMACS Prodigy (Miltenyi Biotec) and cultured in serum free CellGro® media including 100 ng/ml recombinant human stem cell factor (SCF), 100 ng/ml recombinant human Fit 3-Ligand (FLT3L), and 100 ng/ml Thrombopoietin (TPO). The cells were then electroporated using a Maxcyte® device following the manufacture's instructions with one of the following: an empty vector that does not contain any CRISPR/Cas9 editing components (mock electroporation sample), with GFP gRNA and Cas9 protein as a negative control (GFP), with SPY101 gRNA and Cas9 protein (SPY101), or with SD2 gRNA and Cas9 protein (SD2). The recombinant Cas9 protein encodes for S. pyogenes Cas9 flanked by two SV40 nuclear localization sequences (NLSs). These experiments were performed using a ribonucleoprotein (RNP) 1:1 weight ratio of gRNA to Cas9.

[0719] Each of the gene-edited mPB CD34+ human cells were injected via tail vein into 16 immunodeficient mice (“NSG” or NOD scid gamma—NOD) to demonstrate homing and engraftment capabilities. NSG is a strain of inbred laboratory mice and among the most immunodeficient described to date; see, e.g., Shultz et al., Nat. Rev. Immunol. 7(2): 118-130 (2007). Details related to the engraftment experiment are presented in FIG. 28. At 8-weeks post injection, the NSG mice were bled and the peripheral blood was analyzed via FACS for human CD45RA+ and mouse CD45+ live cells. At 16-weeks post injection, the NSG mice were sacrificed, and the bone marrow, spleen, and perifpheral blood were analyzed via FACS for human CD45RA+ and mouse CD45+ live cells. Engraftment of mPB CD34+ human cells in irradiated NSG mice in all threatment groups was observed from all three healthy donors. Human CD45RA+ cells were detected using FACS in all 3 hematopoietic organs from all donors. Untransfected CD34+ control cells exhibited slighlty better engraftment percentages. All transfected cell groups had similar engraftment percentages, including the mock transfected group across all 3 healthy donors. In general, the addition of Cas9-gRNA RNP did not affect engraftment as compared to the mock transfection control (FIGS. 29A-E and FIG. 30). Data points in FIGS. 29A-E represent individual mice and depict the percentage of live cells that were human CD45RA+ cells. Data is mean±SEM.

### Example 21—Assessing SPY101 Editing Efficiency and Efficacy Using Cas9 RNP

[0720] In order to achieve the highest efficacy using CRISPR-Cas9 for treating SCD and β-thalassemia using SPY101, we assessed two different Cas9 formats, Cas9 mRNA or Cas9 protein, for their editing efficiency, efficacy and toxicity in human CD34+ cells from mobilized peripheral blood (mPB). We compared various sources for Cas9 mRNA to Cas9 protein by electroporating Cas9 mRNA and SPY101 gRNA or Cas9 protein complexed with SPY101 gRNA (as ribonucleoprotein (RNP) complex) into human mPB CD34+ cells and assessed for their editing efficiency and cellular viability at 48 hours post-electroporation. We compared various sources for Cas9 mRNA to Cas9 protein and found that while we can achieve similar levels of editing efficiency between some Cas9 mRNA to Cas9 protein (FIG. 31), most had significantly lower cell viability compared to control samples (No electroporation (No EP) or No substrate electroporation (Mock EP) controls) shown in FIGS. 32A-B, This indicates that Cas9 RNP is the best format to use for efficient delivery of Cas9 and gRNA into human mPB CD34+ cells.

[0721] We next compared different sources of Cas9 protein as well as Cas9 protein with varying number of nuclear localization signal (NLS) at either N or C-terminus as this can affect efficient localization of Cas9 into the nucleus to afford editing. Shown in FIGS. 33A-C, we found that Aldevron Cas9 protein with one NLS at both N and C terminus gave the best editing efficiency with no change in cell viability.

[0722] Next, we compiled SPY101 editing efficiency examined across various human mPB CD34+ donors using either Cas9 mRNA or Cas9 protein (Feldan or Aldevron chosen from previous example) and observed that Aldevron Cas9 protein resulted in the highest editing efficacy (FIG. 34A). Furthermore, we were able to achieve similar rates of editing efficiency in GMP-compatible manufacturing at clinical scale using Cas9 protein (FIG. 34B).

[0723] We next examined SPY101 efficacy across several CD34+ donors derived from mPB (FIGS. 35A-B) or bone marrow (BM, FIGS. 36A-B). We see that throughout our optimization process, we achieved better efficacy, measured as γ-globin expression to α-globin or to β-globin like globins (β-globin+γ-globin) by quantitative real-time PCR in erythroid differentiated CD34+ cells.

[0724] We then investigated whether SPY101 would be efficacious in cells obtained from SCD or β-thalassemia patients. Peripheral blood mononuclear cells from healthy donors or patients were electroporated with SPY101 Cas9 RNP and erythroid differentiated similar to examples above prior to extracting RNA to measure γ-globin expression. We see that SPY101 was indeed efficacious in γ-globin increase in patient samples (FIGS. 37A-B).

[0725] In order to better understand a genotype to phenotype relationship in SPY101 edited erythroid cells, we performed single colony analysis similar to Example 15 with Cas9 RNP and found that this increase a greater fraction of bi-allelic edited colonies using Cas9 RNP compared to Cas9 mRNA (FIGS. 38A-B). Furthermore, detailed breakdown of unedited colonies, mono-allelic disruption of GATA1 binding site targeted by SPY101 and bi-allelic disruption of GATA1 binding site revealed in dose-dependent efficacy of SPY101, measured as γ-globin increase compared to control GFP gRNA treated cells (FIGS. 39A-B).

[0726] To examine the percentage of cells expressing γ-globin, we performed FACGS analysis in SPY101 Cas9 RNP edited CD34+ cells from human mPB. Compared to control GFP gRNA treated cells, we see a higher percentage of erythroid differentiated cells expressing γ-globin (FIGS. 40A-D), as well as an increase of γ-globin expression per cell (FIG. 40E) in SPY101 treated cells.

[0727] Note Regarding Illustrative Examples

[0728] While the present disclosure provides descriptions of various specific aspects for the purpose of illustrating various aspects of the present invention and/or its potential applications, it is understood that variations and modifications will occur to those skilled in the art. Accordingly, the invention or inventions described herein should be understood to be at least as broad as they are claimed, and not as more narrowly defined by particular illustrative aspects provided herein.

[0729] Any patent, publication, or other disclosure material identified herein is incorporated by reference into this specification in its entirety unless otherwise indicated, but only to the extent that the incorporated material does not conflict with existing descriptions, definitions, statements, or other disclosure material expressly set forth in this specification. As such, and to the extent necessary, the express disclosure as set forth in this specification supersedes any conflicting material incorporated by reference. Any material, or portion thereof, that is said to be incorporated by reference into this specification, but which conflicts with existing definitions, statements, or other disclosure material set forth herein, is only incorporated to the extent that no conflict arises between that incorporated material and the existing disclosure material. Applicants reserve the right to amend this specification to expressly recite any subject matter, or portion thereof, incorporated by reference herein.

1.-93. (canceled)

94. A genetically engineered cell, which is produced by a method comprising:
introducing into a human cell one or more S. pyogenes Cas9 endonucleases and one or more guide RNAs (gRNAs) to effect one or more double-strand breaks (DSBs) within or near a B-cell lymphoma 11A (BCL11A) gene, that results in a permanent deletion or inactivation of the BCL11A gene,
wherein the one or more gRNAs comprise a single molecule gRNA (sgRNA) comprising the nucleic acid sequence of SEQ ID NO: 71,959.

95. A genetically engineered cell, which comprises a genetic mutation, which is one of a permanent deletion or inactivation of a transcriptional control sequence of a B-cell lymphoma 11A (BCL11A) gene, wherein the genetic mutation occurs at the site targeted by a single molecule gRNA (sgRNA) comprising the nucleic acid sequence of SEQ ID NO: 71,959.

96. The genetically engineered cell of claim 95, wherein the cell is a CD34⁺ human cell.

97. A population of genetically engineered cells, comprising the genetically engineered cell of claim 95.

98. A single molecule guide ribonucleic acid (sgRNA) comprising the nucleic acid sequence of SEQ ID NO: 71,959.

99. A method for editing a B-cell lymphoma 11A (BCL11A) gene in a human cell by genome editing, the method comprising:
introducing into the human cell one or more Cas9 endonucleases and one or more gRNAs to effect one or more double-strand breaks (DSBs) within or near the BCL11A gene, that results in a permanent deletion or inactivation of the BCL11A gene,
wherein the one or more gRNAs comprise the sgRNA of claim 98.

100. The method of claim 99, wherein the method comprises introducing into the human cell one or more polynucleotides encoding the one or more Cas9 endonucleases.

101. The method of claim 100, wherein the method comprises introducing into the human cell one or more ribonucleic acids (RNAs) encoding the one or more Cas9 endonucleases.

102. The method of claim 99, wherein the one or more Cas9 endonucleases each comprise, at the N-terminus, the C-terminus, or both the N-terminus and C-terminus, one or more nuclear localization signals (NLSs).

103. The method of claim 99, wherein the one or more Cas9 endonucleases each comprise two NLSs, one NLS located at the N-terminus and the second NLS located at the C-terminus.

104. The method of claim 103, wherein the one or more NLSs is a SV40 NLS.

105. The method of claim 99, wherein the one or more Cas9 endonucleases is pre-complexed with one or more gRNAs to form one or more ribonucleoproteins (RNPs).

106. The method of claim 105, wherein the weight ratio of gRNA to Cas9 endonuclease in the RNP is 1:1.

107. The method of claim 105, wherein the one or more RNPs is delivered to the human cell by electroporation.

108. The method of claim 99, wherein the one or more Cas9 endonucleases is a S. pyogenes Cas9 comprising a N-terminus SV40 NLS and a C-terminus SV40 NLS, and wherein the weight ratio of gRNA to Cas9 endonuclease is 1:1.

109. An ex vivo method for treating a patient with a hemoglobinopathy, the method comprising:
(a) isolating a CD34⁺ hematopoietic stem or progenitor cell (HSPC) from the patient;
(b) editing within or near a B-cell lymphoma 11A (BCL11A) gene of the CD34⁺ HSPC; and
(c) implanting the genome-edited CD34⁺ HSPC into the patient, wherein step (b) is performed by the method of claim 99.

110. The method of claim 109, wherein in step (b), the one or more Cas9 endonucleases is a S. pyogenes Cas9 comprising a N-terminus SV40 NLS and a C-terminus SV40 NLS, and wherein the weight ratio of gRNA to Cas9 endonuclease is 1:1.

111. The method of claim 109, wherein the method further comprises treating the patient with granulocyte colony stimulating factor (GCSF) prior to the isolating step.

112. The method of claim 111, wherein the treating step is performed in combination with Plerixaflor.

113. The method of claim 109, wherein the implanting step comprises implanting the genome-edited CD34⁺ HSPC into the patient by transplantation, local injection, systemic infusion, or combinations thereof.

114. The method of claim 109, wherein the hemoglobinopathy is selected from a group consisting of sickle cell disease and thalassemia.

115. The method of claim 114, wherein the hemoglobinopathy is a thalassemia and the thalassemia is selected from the group consisting of α, β, δ, γ, and combinations thereof.

116. The method of claim 115, wherein the thalassemia is β-thalassemia.

The application's sequence listing, which the Patent Office published only in electronic form, follows.

SEQUENCE LISTING (71962 sequences)

SEQ ID NO: 1 - DNA, 20 bp, Artificial Sequence
  chemically synthesized
tttttttcacactgtgatct

SEQ ID NO: 2 - DNA, 20 bp, Artificial Sequence
  chemically synthesized
ttttttcacactgtgatctt

SEQ ID NO: 3 - DNA, 20 bp, Artificial Sequence
  chemically synthesized
taggtacttcacttaatctt

SEQ ID NO: 4 - DNA, 20 bp, Artificial Sequence
  chemically synthesized
aggtacttcacttaatcttt

SEQ ID NO: 5 - DNA, 20 bp, Artificial Sequence
  chemically synthesized
attattctgatctctaaaat

SEQ ID NO: 6 - DNA, 20 bp, Artificial Sequence
  chemically synthesized
tctctaaaatgagtgattac

SEQ ID NO: 7 - DNA, 20 bp, Artificial Sequence
  chemically synthesized
ctctaaaatgagtgattact

SEQ ID NO: 8 - DNA, 20 bp, Artificial Sequence
  chemically synthesized
actaggattcctttcaactt

SEQ ID NO: 9 - DNA, 20 bp, Artificial Sequence
  chemically synthesized
ttcttttcttatctaattta

SEQ ID NO: 10 - DNA, 20 bp, Artificial Sequence
  chemically synthesized
tatctaatttatagaatcac

SEQ ID NO: 11 - DNA, 20 bp, Artificial Sequence
  chemically synthesized
atctaatttatagaatcaca

SEQ ID NO: 12 - DNA, 20 bp, Artificial Sequence
  chemically synthesized
tgattctatcatgtatataa

SEQ ID NO: 13 - DNA, 20 bp, Artificial Sequence
  chemically synthesized
gtatataaaagtattctata

SEQ ID NO: 14 - DNA, 20 bp, Artificial Sequence
  chemically synthesized
aaaagtattctataaagctt

SEQ ID NO: 15 - DNA, 20 bp, Artificial Sequence
  chemically synthesized
tataaagcttaagtacttcc

SEQ ID NO: 16 - DNA, 20 bp, Artificial Sequence
  chemically synthesized
ataaagcttaagtacttcct

SEQ ID NO: 17 - DNA, 20 bp, Artificial Sequence
  chemically synthesized
aaagcttaagtacttcctgg

SEQ ID NO: 18 - DNA, 20 bp, Artificial Sequence
  chemically synthesized
ggagcattttttaaaataca

SEQ ID NO: 19 - DNA, 20 bp, Artificial Sequence
  chemically synthesized
tttttaaaatacaaagcaaa

SEQ ID NO: 20 - DNA, 20 bp, Artificial Sequence
  chemically synthesized
taaaatacaaagcaaaaaga

SEQ ID NO: 21 - DNA, 20 bp, Artificial Sequence
  chemically synthesized
aaaatacaaagcaaaaagaa

SEQ ID NO: 22 - DNA, 20 bp, Artificial Sequence
  chemically synthesized
aagcaaaaagaaaggccatg

SEQ ID NO: 23 - DNA, 20 bp, Artificial Sequence
  chemically synthesized
aaggccatgtggttcgtaat

SEQ ID NO: 24 - DNA, 20 bp, Artificial Sequence
  chemically synthesized
aagatatcctaatttaaact

SEQ ID NO: 25 - DNA, 20 bp, Artificial Sequence
  chemically synthesized
tatcctaatttaaactaaga

SEQ ID NO: 26 - DNA, 20 bp, Artificial Sequence
  chemically synthesized
tttaaactaagatagaaaaa

SEQ ID NO: 27 - DNA, 20 bp, Artificial Sequence
  chemically synthesized
aaacagacaatgactgcttc

SEQ ID NO: 28 - DNA, 20 bp, Artificial Sequence
  chemically synthesized
tgactgcttctggattttac

SEQ ID NO: 29 - DNA, 20 bp, Artificial Sequence
  chemically synthesized
ctgcttctggattttactgg

SEQ ID NO: 30 - DNA, 20 bp, Artificial Sequence
  chemically synthesized
ttctggattttactggaagt

SEQ ID NO: 31 - DNA, 20 bp, Artificial Sequence
  chemically synthesized
tggattttactggaagtgag

SEQ ID NO: 32 - DNA, 20 bp, Artificial Sequence
  chemically synthesized
tccatgacttaatgtaactc

SEQ ID NO: 33 - DNA, 20 bp, Artificial Sequence
  chemically synthesized
ccatgacttaatgtaactcc

SEQ ID NO: 34 - DNA, 20 bp, Artificial Sequence
  chemically synthesized
catgacttaatgtaactcca

SEQ ID NO: 35 - DNA, 20 bp, Artificial Sequence
  chemically synthesized
atgacttaatgtaactccag

SEQ ID NO: 36 - DNA, 20 bp, Artificial Sequence
  chemically synthesized
ctccaggggaatgcaaactg

SEQ ID NO: 37 - DNA, 20 bp, Artificial Sequence
  chemically synthesized
ccaggggaatgcaaactgaa

SEQ ID NO: 38 - DNA, 20 bp, Artificial Sequence
  chemically synthesized
ctgaagagtactgtctctcc

SEQ ID NO: 39 - DNA, 20 bp, Artificial Sequence
  chemically synthesized
tgaagagtactgtctctcct

SEQ ID NO: 40 - DNA, 20 bp, Artificial Sequence
  chemically synthesized
agagtactgtctctcctagg

SEQ ID NO: 41 - DNA, 20 bp, Artificial Sequence
  chemically synthesized
tactgtctctcctaggcagt

SEQ ID NO: 42 - DNA, 20 bp, Artificial Sequence
  chemically synthesized
ctgtctctcctaggcagtca

SEQ ID NO: 43 - DNA, 20 bp, Artificial Sequence
  chemically synthesized
tgtctctcctaggcagtcag

SEQ ID NO: 44 - DNA, 20 bp, Artificial Sequence
  chemically synthesized
tctcctaggcagtcagagga

SEQ ID NO: 45 - DNA, 20 bp, Artificial Sequence
  chemically synthesized
atataatattgtttctctgc

SEQ ID NO: 46 - DNA, 20 bp, Artificial Sequence
  chemically synthesized
aatattgtttctctgctggt

SEQ ID NO: 47 - DNA, 20 bp, Artificial Sequence
  chemically synthesized
atattgtttctctgctggtt

SEQ ID NO: 48 - DNA, 20 bp, Artificial Sequence
  chemically synthesized
tctctgctggttaggaactc

SEQ ID NO: 49 - DNA, 20 bp, Artificial Sequence
  chemically synthesized
gaactcaagatgaactcttg

SEQ ID NO: 50 - DNA, 20 bp, Artificial Sequence
  chemically synthesized
ctcaagatgaactcttgaag

SEQ ID NO: 51 - DNA, 20 bp, Artificial Sequence
  chemically synthesized
tcaagatgaactcttgaaga

SEQ ID NO: 52 - DNA, 20 bp, Artificial Sequence
  chemically synthesized
agatgaactcttgaagaagg

SEQ ID NO: 53 - DNA, 20 bp, Artificial Sequence
  chemically synthesized
gatgaactcttgaagaagga

SEQ ID NO: 54 - DNA, 20 bp, Artificial Sequence
  chemically synthesized
ggaaggtgtgcttgcatcac

SEQ ID NO: 55 - DNA, 20 bp, Artificial Sequence
  chemically synthesized
gcttgcatcaccagttattt

SEQ ID NO: 56 - DNA, 20 bp, Artificial Sequence
  chemically synthesized
agttattttggaacttccac

SEQ ID NO: 57 - DNA, 20 bp, Artificial Sequence
  chemically synthesized
tccttcacactatactccaa

SEQ ID NO: 58 - DNA, 20 bp, Artificial Sequence
  chemically synthesized
ccttcacactatactccaaa

SEQ ID NO: 59 - DNA, 20 bp, Artificial Sequence
  chemically synthesized
ttcacactatactccaaaag

SEQ ID NO: 60 - DNA, 20 bp, Artificial Sequence
  chemically synthesized
ctatactccaaaaggagtca

SEQ ID NO: 61 - DNA, 20 bp, Artificial Sequence
  chemically synthesized
caaaaggagtcaaagctatg

SEQ ID NO: 62 - DNA, 20 bp, Artificial Sequence
  chemically synthesized
aaagctatgtggcatactgt

SEQ ID NO: 63 - DNA, 20 bp, Artificial Sequence
  chemically synthesized
tatgtggcatactgtaagaa

SEQ ID NO: 64 - DNA, 20 bp, Artificial Sequence
  chemically synthesized
tactgtaagaacagaaccaa

SEQ ID NO: 65 - DNA, 20 bp, Artificial Sequence
  chemically synthesized
tctaatcctactattacttc

SEQ ID NO: 66 - DNA, 20 bp, Artificial Sequence
  chemically synthesized
ctaatcctactattacttcc

SEQ ID NO: 67 - DNA, 20 bp, Artificial Sequence
  chemically synthesized
taatcctactattacttccg

SEQ ID NO: 68 - DNA, 20 bp, Artificial Sequence
  chemically synthesized
gggacactgatttataaaat

SEQ ID NO: 69 - DNA, 20 bp, Artificial Sequence
  chemically synthesized
taaaataagaattataaaat

SEQ ID NO: 70 - DNA, 20 bp, Artificial Sequence
  chemically synthesized
aaaataagaatttttaaaaa

SEQ ID NO: 71 - DNA, 20 bp, Artificial Sequence
  chemically synthesized
aaataagaatttttaaaaat

SEQ ID NO: 72 - DNA, 20 bp, Artificial Sequence
  chemically synthesized
tttaaaaataggaataaata

SEQ ID NO: 73 - DNA, 20 bp, Artificial Sequence
  chemically synthesized
tcaacgcatacaaaacctga

SEQ ID NO: 74 - DNA, 20 bp, Artificial Sequence
  chemically synthesized
aagatattcctgaccacttg

SEQ ID NO: 75 - DNA, 20 bp, Artificial Sequence
  chemically synthesized
agatattcctgaccacttga

SEQ ID NO: 76 - DNA, 20 bp, Artificial Sequence
  chemically synthesized
gatattcctgaccacttgaa

SEQ ID NO: 77 - DNA, 20 bp, Artificial Sequence
  chemically synthesized
tcctgaccacttgaagggct

SEQ ID NO: 78 - DNA, 20 bp, Artificial Sequence
  chemically synthesized
ggttttaatctgaatgctct

SEQ ID NO: 79 - DNA, 20 bp, Artificial Sequence
  chemically synthesized
tgaatgctcttggaaactcc

SEQ ID NO: 80 - DNA, 20 bp, Artificial Sequence
  chemically synthesized
ctcttggaaactccaagcaa

SEQ ID NO: 81 - DNA, 20 bp, Artificial Sequence
  chemically synthesized
aaactccaagcaaaagtgcc

SEQ ID NO: 82 - DNA, 20 bp, Artificial Sequence
  chemically synthesized
tgcccagaaaatatgctgcc

SEQ ID NO: 83 - DNA, 20 bp, Artificial Sequence
  chemically synthesized
gcccagaaaatatgctgcca

SEQ ID NO: 84 - DNA, 20 bp, Artificial Sequence
  chemically synthesized
gaaaatatgctgccaaggtt

SEQ ID NO: 85 - DNA, 20 bp, Artificial Sequence
  chemically synthesized
aaaatatgctgccaaggttt

SEQ ID NO: 86 - DNA, 20 bp, Artificial Sequence
  chemically synthesized
aaatatgctgccaaggtttg

SEQ ID NO: 87 - DNA, 20 bp, Artificial Sequence
  chemically synthesized
ctgccaaggtttggggcact

SEQ ID NO: 88 - DNA, 20 bp, Artificial Sequence
  chemically synthesized
caaggtttggggcactcagt

SEQ ID NO: 89 - DNA, 20 bp, Artificial Sequence
  chemically synthesized
tggggcactcagttagacct

SEQ ID NO: 90 - DNA, 20 bp, Artificial Sequence
  chemically synthesized
ggcactcagttagacctcag

SEQ ID NO: 91 - DNA, 20 bp, Artificial Sequence
  chemically synthesized
gttagacctcagcagattcc

SEQ ID NO: 92 - DNA, 20 bp, Artificial Sequence
  chemically synthesized
caagattgcactccttgcct

SEQ ID NO: 93 - DNA, 20 bp, Artificial Sequence
  chemically synthesized
agattgcactccttgcctaa

SEQ ID NO: 94 - DNA, 20 bp, Artificial Sequence
  chemically synthesized
agttttctttaaatgatcac

SEQ ID NO: 95 - DNA, 20 bp, Artificial Sequence
  chemically synthesized
tgaaacaattatttctcaaa

SEQ ID NO: 96 - DNA, 20 bp, Artificial Sequence
  chemically synthesized
gaaacaattatttctcaaac

SEQ ID NO: 97 - DNA, 20 bp, Artificial Sequence
  chemically synthesized
caggctgatattcaacatgc

SEQ ID NO: 98 - DNA, 20 bp, Artificial Sequence
  chemically synthesized
atattcaacatgctggatgc

SEQ ID NO: 99 - DNA, 20 bp, Artificial Sequence
  chemically synthesized
tattcaacatgctggatgct

SEQ ID NO: 100 - DNA, 20 bp, Artificial Sequence
  chemically synthesized
atgctggatgctgggtgctg

SEQ ID NO: 101 - DNA, 20 bp, Artificial Sequence
  chemically synthesized
tgctggatgctgggtgctgc

SEQ ID NO: 102 - DNA, 20 bp, Artificial Sequence
  chemically synthesized
gctggatgctgggtgctgca

SEQ ID NO: 103 - DNA, 20 bp, Artificial Sequence
  chemically synthesized
ctggatgctgggtgctgcag

SEQ ID NO: 104 - DNA, 20 bp, Artificial Sequence
  chemically synthesized
ctgggtgctgcaggggcttt

SEQ ID NO: 105 - DNA, 20 bp, Artificial Sequence
  chemically synthesized
agtgtctttctctcccatca

SEQ ID NO: 106 - DNA, 20 bp, Artificial Sequence
  chemically synthesized
atcatggaccccaattctaa

SEQ ID NO: 107 - DNA, 20 bp, Artificial Sequence
  chemically synthesized
tctaacagaccttttttata

SEQ ID NO: 108 - DNA, 20 bp, Artificial Sequence
  chemically synthesized
atacagtgtaataatctgtc

SEQ ID NO: 109 - DNA, 20 bp, Artificial Sequence
  chemically synthesized
tacagtgtaataatctgtcc

SEQ ID NO: 110 - DNA, 20 bp, Artificial Sequence
  chemically synthesized
tgtaataatctgtccgggcg

SEQ ID NO: 111 - DNA, 20 bp, Artificial Sequence
  chemically synthesized
aataatctgtccgggcgcgg

SEQ ID NO: 112 - DNA, 20 bp, Artificial Sequence
  chemically synthesized
gtggcttacacctgtaatcc

SEQ ID NO: 113 - DNA, 20 bp, Artificial Sequence
  chemically synthesized
cacctgtaatcccagcactt

SEQ ID NO: 114 - DNA, 20 bp, Artificial Sequence
  chemically synthesized
acctgtaatcccagcacttt

SEQ ID NO: 115 - DNA, 20 bp, Artificial Sequence
  chemically synthesized
ctgtaatcccagcactttgg

SEQ ID NO: 116 - DNA, 20 bp, Artificial Sequence
  chemically synthesized
tgtaatcccagcactttggg

SEQ ID NO: 117 - DNA, 20 bp, Artificial Sequence
  chemically synthesized
tcccagcactttgggaggcc

SEQ ID NO: 118 - DNA, 20 bp, Artificial Sequence
  chemically synthesized
cccagcactttgggaggccg

SEQ ID NO: 119 - DNA, 20 bp, Artificial Sequence
  chemically synthesized
agcactttgggaggccgagg

SEQ ID NO: 120 - DNA, 20 bp, Artificial Sequence
  chemically synthesized
gcactttgggaggccgaggc

SEQ ID NO: 121 - DNA, 20 bp, Artificial Sequence
  chemically synthesized
ctttgggaggccgaggcagg

SEQ ID NO: 122 - DNA, 20 bp, Artificial Sequence
  chemically synthesized
ggccgaggcaggtggctcat

SEQ ID NO: 123 - DNA, 20 bp, Artificial Sequence
  chemically synthesized
gccgaggcaggtggctcatg

SEQ ID NO: 124 - DNA, 20 bp, Artificial Sequence
  chemically synthesized
aggcaggtggctcatgaggt

SEQ ID NO: 125 - DNA, 20 bp, Artificial Sequence
  chemically synthesized
ggcaggtggctcatgaggtc

SEQ ID NO: 126 - DNA, 20 bp, Artificial Sequence
  chemically synthesized
caggtggctcatgaggtcag

SEQ ID NO: 127 - DNA, 20 bp, Artificial Sequence
  chemically synthesized
gctcatgaggtcaggagttc

SEQ ID NO: 128 - DNA, 20 bp, Artificial Sequence
  chemically synthesized
tgaggtcaggagttcgagac

SEQ ID NO: 129 - DNA, 20 bp, Artificial Sequence
  chemically synthesized
cgagaccagcctgaccaaca

SEQ ID NO: 130 - DNA, 20 bp, Artificial Sequence
  chemically synthesized
tctactaaaaatacaaaaat

SEQ ID NO: 131 - DNA, 20 bp, Artificial Sequence
  chemically synthesized
ctaaaaatacaaaaattagc

SEQ ID NO: 132 - DNA, 20 bp, Artificial Sequence
  chemically synthesized
taaaaatacaaaaattagcc

SEQ ID NO: 133 - DNA, 20 bp, Artificial Sequence
  chemically synthesized
aaatacaaaaattagccagg

SEQ ID NO: 134 - DNA, 20 bp, Artificial Sequence
  chemically synthesized
gtggtacgcacctgtaatcc

SEQ ID NO: 135 - DNA, 20 bp, Artificial Sequence
  chemically synthesized
cacctgtaatcccagccact

SEQ ID NO: 136 - DNA, 20 bp, Artificial Sequence
  chemically synthesized
acctgtaatcccagccactc

SEQ ID NO: 137 - DNA, 20 bp, Artificial Sequence
  chemically synthesized
ctgtaatcccagccactcag

SEQ ID NO: 138 - DNA, 20 bp, Artificial Sequence
  chemically synthesized
tgtaatcccagccactcagg

SEQ ID NO: 139 - DNA, 20 bp, Artificial Sequence
  chemically synthesized
tcccagccactcaggaggct

SEQ ID NO: 140 - DNA, 20 bp, Artificial Sequence
  chemically synthesized
cccagccactcaggaggctg

SEQ ID NO: 141 - DNA, 20 bp, Artificial Sequence
  chemically synthesized
agccactcaggaggctgagg

SEQ ID NO: 142 - DNA, 20 bp, Artificial Sequence
  chemically synthesized
gccactcaggaggctgaggc

SEQ ID NO: 143 - DNA, 20 bp, Artificial Sequence
  chemically synthesized
cactcaggaggctgaggcag

SEQ ID NO: 144 - DNA, 20 bp, Artificial Sequence
  chemically synthesized
gcaggagaaccacttgaacc

SEQ ID NO: 145 - DNA, 20 bp, Artificial Sequence
  chemically synthesized
caggagaaccacttgaaccc

SEQ ID NO: 146 - DNA, 20 bp, Artificial Sequence
  chemically synthesized
ggagaaccacttgaacccgg

SEQ ID NO: 147 - DNA, 20 bp, Artificial Sequence
  chemically synthesized
gagaaccacttgaacccggg

SEQ ID NO: 148 - DNA, 20 bp, Artificial Sequence
  chemically synthesized
aaccacttgaacccgggagg

SEQ ID NO: 149 - DNA, 20 bp, Artificial Sequence
  chemically synthesized
ccacttgaacccgggaggta

SEQ ID NO: 150 - DNA, 20 bp, Artificial Sequence
  chemically synthesized
cacttgaacccgggaggtag

SEQ ID NO: 151 - DNA, 20 bp, Artificial Sequence
  chemically synthesized
aacccgggaggtagaggttg

SEQ ID NO: 152 - DNA, 20 bp, Artificial Sequence
  chemically synthesized
cgggaggtagaggttgcagt

SEQ ID NO: 153 - DNA, 20 bp, Artificial Sequence
  chemically synthesized
ggtagaggttgcagtgagcc

SEQ ID NO: 154 - DNA, 20 bp, Artificial Sequence
  chemically synthesized
aagatcgtgccattgcactc

SEQ ID NO: 155 - DNA, 20 bp, Artificial Sequence
  chemically synthesized
cgtgccattgcactccagcc

SEQ ID NO: 156 - DNA, 20 bp, Artificial Sequence
  chemically synthesized
gtgccattgcactccagcct

SEQ ID NO: 157 - DNA, 20 bp, Artificial Sequence
  chemically synthesized
ttgcactccagcctgggcaa

SEQ ID NO: 158 - DNA, 20 bp, Artificial Sequence
  chemically synthesized
gcactccagcctgggcaata

SEQ ID NO: 159 - DNA, 20 bp, Artificial Sequence
  chemically synthesized
tccagcctgggcaatagagt

SEQ ID NO: 160 - DNA, 20 bp, Artificial Sequence
  chemically synthesized
aataataataataatctgaa

SEQ ID NO: 161 - DNA, 20 bp, Artificial Sequence
  chemically synthesized
ataatctgaacagcccacaa

SEQ ID NO: 162 - DNA, 20 bp, Artificial Sequence
  chemically synthesized
taatctgaacagcccacaaa

SEQ ID NO: 163 - DNA, 20 bp, Artificial Sequence
  chemically synthesized
tgaacagcccacaaaaggct

SEQ ID NO: 164 - DNA, 20 bp, Artificial Sequence
  chemically synthesized
gaacagcccacaaaaggctt

SEQ ID NO: 165 - DNA, 20 bp, Artificial Sequence
  chemically synthesized
agcccacaaaaggcttggga

SEQ ID NO: 166 - DNA, 20 bp, Artificial Sequence
  chemically synthesized
taaaaacaatgccctgtatt

SEQ ID NO: 167 - DNA, 20 bp, Artificial Sequence
  chemically synthesized
gtatttggtctcctccatcc

SEQ ID NO: 168 - DNA, 20 bp, Artificial Sequence
  chemically synthesized
tttggtctcctccatccaag

SEQ ID NO: 169 - DNA, 20 bp, Artificial Sequence
  chemically synthesized
gtctcctccatccaagtggc

SEQ ID NO: 170 - DNA, 20 bp, Artificial Sequence
  chemically synthesized
tctcctccatccaagtggct

SEQ ID NO: 171 - DNA, 20 bp, Artificial Sequence
  chemically synthesized
gtggctgggactctgtcctc

SEQ ID NO: 172 - DNA, 20 bp, Artificial Sequence
  chemically synthesized
cctctagtctgtgctcatgt

SEQ ID NO: 173 - DNA, 20 bp, Artificial Sequence
  chemically synthesized
ctctagtctgtgctcatgtc

SEQ ID NO: 174 - DNA, 20 bp, Artificial Sequence
  chemically synthesized
atttatctctctgcaatctg

SEQ ID NO: 175 - DNA, 20 bp, Artificial Sequence
  chemically synthesized
caatctgaagttccactctg

SEQ ID NO: 176 - DNA, 20 bp, Artificial Sequence
  chemically synthesized
atctgaagttccactctgca

SEQ ID NO: 177 - DNA, 20 bp, Artificial Sequence
  chemically synthesized
ctgaagttccactctgcaga

SEQ ID NO: 178 - DNA, 20 bp, Artificial Sequence
  chemically synthesized
tgaagttccactctgcagag

SEQ ID NO: 179 - DNA, 20 bp, Artificial Sequence
  chemically synthesized
tccactctgcagagaggaca

SEQ ID NO: 180 - DNA, 20 bp, Artificial Sequence
  chemically synthesized
ctctgcagagaggacacagt

SEQ ID NO: 181 - DNA, 20 bp, Artificial Sequence
  chemically synthesized
gaggacacagtgagaacccc

SEQ ID NO: 182 - DNA, 20 bp, Artificial Sequence
  chemically synthesized
gacacagtgagaacccctgg

SEQ ID NO: 183 - DNA, 20 bp, Artificial Sequence
  chemically synthesized
agaacccctggcagatttgt

SEQ ID NO: 184 - DNA, 20 bp, Artificial Sequence
  chemically synthesized
ttccctgcttctgccattca

SEQ ID NO: 185 - DNA, 20 bp, Artificial Sequence
  chemically synthesized
catgatcttgactcatcaca

SEQ ID NO: 186 - DNA, 20 bp, Artificial Sequence
  chemically synthesized
tgatcttgactcatcacaca

SEQ ID NO: 187 - DNA, 20 bp, Artificial Sequence
  chemically synthesized
atcttgactcatcacacaga

SEQ ID NO: 188 - DNA, 20 bp, Artificial Sequence
  chemically synthesized
cccaaattgtcaatcttgta

SEQ ID NO: 189 - DNA, 20 bp, Artificial Sequence
  chemically synthesized
ccaaattgtcaatcttgtat

SEQ ID NO: 190 - DNA, 20 bp, Artificial Sequence
  chemically synthesized
caaattgtcaatcttgtatg

SEQ ID NO: 191 - DNA, 20 bp, Artificial Sequence
  chemically synthesized
aatcttgtatggggtttcaa

SEQ ID NO: 192 - DNA, 20 bp, Artificial Sequence
  chemically synthesized
tgtatggggtttcaaaagtc

SEQ ID NO: 193 - DNA, 20 bp, Artificial Sequence
  chemically synthesized
gggtttcaaaagtctagccc

SEQ ID NO: 194 - DNA, 20 bp, Artificial Sequence
  chemically synthesized
ggtttcaaaagtctagccct

SEQ ID NO: 195 - DNA, 20 bp, Artificial Sequence
  chemically synthesized
tcaaaagtctagccctaggc

SEQ ID NO: 196 - DNA, 20 bp, Artificial Sequence
  chemically synthesized
caaaagtctagccctaggcc

SEQ ID NO: 197 - DNA, 20 bp, Artificial Sequence
  chemically synthesized
agtctagccctaggccaggt

SEQ ID NO: 198 - DNA, 20 bp, Artificial Sequence
  chemically synthesized
gtctagccctaggccaggtg

SEQ ID NO: 199 - DNA, 20 bp, Artificial Sequence
  chemically synthesized
tagccctaggccaggtgagg

SEQ ID NO: 200 - DNA, 20 bp, Artificial Sequence
  chemically synthesized
tagtgcaatgcctctaatcc

SEQ ID NO: 201 - DNA, 20 bp, Artificial Sequence
  chemically synthesized
tgcctctaatcccagcacta

SEQ ID NO: 202 - DNA, 20 bp, Artificial Sequence
  chemically synthesized
gcctctaatcccagcactat

SEQ ID NO: 203 - DNA, 20 bp, Artificial Sequence
  chemically synthesized
ctctaatcccagcactatgg

SEQ ID NO: 204 - DNA, 20 bp, Artificial Sequence
  chemically synthesized
tctaatcccagcactatggg

SEQ ID NO: 205 - DNA, 20 bp, Artificial Sequence
  chemically synthesized
tcccagcactatgggaggcc

SEQ ID NO: 206 - DNA, 20 bp, Artificial Sequence
  chemically synthesized
cccagcactatgggaggcct

SEQ ID NO: 207 - DNA, 20 bp, Artificial Sequence
  chemically synthesized
cagcactatgggaggcctag

SEQ ID NO: 208 - DNA, 20 bp, Artificial Sequence
  chemically synthesized
agcactatgggaggcctagg

SEQ ID NO: 209 - DNA, 20 bp, Artificial Sequence
  chemically synthesized
gcactatgggaggcctagga

SEQ ID NO: 210 - DNA, 20 bp, Artificial Sequence
  chemically synthesized
ctatgggaggcctaggaggg

SEQ ID NO: 211 - DNA, 20 bp, Artificial Sequence
  chemically synthesized
ggcctaggagggtggatcac

SEQ ID NO: 212 - DNA, 20 bp, Artificial Sequence
  chemically synthesized
aggagggtggatcacgagat

SEQ ID NO: 213 - DNA, 20 bp, Artificial Sequence
  chemically synthesized
ggagggtggatcacgagatc

SEQ ID NO: 214 - DNA, 20 bp, Artificial Sequence
  chemically synthesized
agggtggatcacgagatcag

SEQ ID NO: 215 - DNA, 20 bp, Artificial Sequence
  chemically synthesized
tggatcacgagatcaggaga

SEQ ID NO: 216 - DNA, 20 bp, Artificial Sequence
  chemically synthesized
gatcacgagatcaggagatg

SEQ ID NO: 217 - DNA, 20 bp, Artificial Sequence
  chemically synthesized
tcaggagatggagaccatcc

SEQ ID NO: 218 - DNA, 20 bp, Artificial Sequence
  chemically synthesized
ggagaccatcctggctaaca

SEQ ID NO: 219 - DNA, 20 bp, Artificial Sequence
  chemically synthesized
actaaaaatacaaaaaatat

SEQ ID NO: 220 - DNA, 20 bp, Artificial Sequence
  chemically synthesized
aaaatacaaaaaatattagc

SEQ ID NO: 221 - DNA, 20 bp, Artificial Sequence
  chemically synthesized
aaatacaaaaaatattagct

SEQ ID NO: 222 - DNA, 20 bp, Artificial Sequence
  chemically synthesized
caaaaaatattagctgggcg

SEQ ID NO: 223 - DNA, 20 bp, Artificial Sequence
  chemically synthesized
aaaatattagctgggcgtgg

SEQ ID NO: 224 - DNA, 20 bp, Artificial Sequence
  chemically synthesized
ggcgtggtggcgcgtgcctg

SEQ ID NO: 225 - DNA, 20 bp, Artificial Sequence
  chemically synthesized
gtggcgcgtgcctgtagtcc

SEQ ID NO: 226 - DNA, 20 bp, Artificial Sequence
  chemically synthesized
tgcctgtagtcccagctact

SEQ ID NO: 227 - DNA, 20 bp, Artificial Sequence
  chemically synthesized
gcctgtagtcccagctactt

SEQ ID NO: 228 - DNA, 20 bp, Artificial Sequence
  chemically synthesized
tgtagtcccagctacttggg

SEQ ID NO: 229 - DNA, 20 bp, Artificial Sequence
  chemically synthesized
tcccagctacttgggaagct

SEQ ID NO: 230 - DNA, 20 bp, Artificial Sequence
  chemically synthesized
cccagctacttgggaagctg

SEQ ID NO: 231 - DNA, 20 bp, Artificial Sequence
  chemically synthesized
agctacttgggaagctgagg

SEQ ID NO: 232 - DNA, 20 bp, Artificial Sequence
  chemically synthesized
gctacttgggaagctgaggc

SEQ ID NO: 233 - DNA, 20 bp, Artificial Sequence
  chemically synthesized
tacttgggaagctgaggcag

SEQ ID NO: 234 - DNA, 20 bp, Artificial Sequence
  chemically synthesized
acttgggaagctgaggcagg

SEQ ID NO: 235 - DNA, 20 bp, Artificial Sequence
  chemically synthesized
gcaggaggatcccttgaacc

SEQ ID NO: 236 - DNA, 20 bp, Artificial Sequence
  chemically synthesized
ggaggatcccttgaacccag

SEQ ID NO: 237 - DNA, 20 bp, Artificial Sequence
  chemically synthesized
gaggatcccttgaacccagt

SEQ ID NO: 238 - DNA, 20 bp, Artificial Sequence
  chemically synthesized
gatcccttgaacccagtagg

SEQ ID NO: 239 - DNA, 20 bp, Artificial Sequence
  chemically synthesized
tcccttgaacccagtaggcg

SEQ ID NO: 240 - DNA, 20 bp, Artificial Sequence
  chemically synthesized
cccttgaacccagtaggcgg

SEQ ID NO: 241 - DNA, 20 bp, Artificial Sequence
  chemically synthesized
aacccagtaggcggaggttg

SEQ ID NO: 242 - DNA, 20 bp, Artificial Sequence
  chemically synthesized
cagtaggcggaggttgtggt

SEQ ID NO: 243 - DNA, 20 bp, Artificial Sequence
  chemically synthesized
ggcggaggttgtggtgagct

SEQ ID NO: 244 - DNA, 20 bp, Artificial Sequence
  chemically synthesized
gagtccttgccactgcactc

SEQ ID NO: 245 - DNA, 20 bp, Artificial Sequence
  chemically synthesized
cttgccactgcactccagcc

SEQ ID NO: 246 - DNA, 20 bp, Artificial Sequence
  chemically synthesized
ttgccactgcactccagcct

SEQ ID NO: 247 - DNA, 20 bp, Artificial Sequence
  chemically synthesized
ctgcactccagcctgggtga

SEQ ID NO: 248 - DNA, 20 bp, Artificial Sequence
  chemically synthesized
gcactccagcctgggtgaca

SEQ ID NO: 249 - DNA, 20 bp, Artificial Sequence
  chemically synthesized
tccagcctgggtgacagagc

SEQ ID NO: 250 - DNA, 20 bp, Artificial Sequence
  chemically synthesized
aaaaaaaaaaaaaaaaaaaa

SEQ ID NO: 251 - DNA, 20 bp, Artificial Sequence
  chemically synthesized
aaaaaaaaaaaaaaaatggc

SEQ ID NO: 252 - DNA, 20 bp, Artificial Sequence
  chemically synthesized
ttgttgtctttcaactttaa

SEQ ID NO: 253 - DNA, 20 bp, Artificial Sequence
  chemically synthesized
tctttcaactttaaaagcca

SEQ ID NO: 254 - DNA, 20 bp, Artificial Sequence
  chemically synthesized
ctttcaactttaaaagccat

SEQ ID NO: 255 - DNA, 20 bp, Artificial Sequence
  chemically synthesized
aactttaaaagccatgggaa

SEQ ID NO: 256 - DNA, 20 bp, Artificial Sequence
  chemically synthesized
ttaaaagccatgggaaaaga

SEQ ID NO: 257 - DNA, 20 bp, Artificial Sequence
  chemically synthesized
ctttttgttctgtttgtttt

SEQ ID NO: 258 - DNA, 20 bp, Artificial Sequence
  chemically synthesized
tttttgttctgtttgttttg

SEQ ID NO: 259 - DNA, 20 bp, Artificial Sequence
  chemically synthesized
ttttgttctgtttgttttga

SEQ ID NO: 260 - DNA, 20 bp, Artificial Sequence
  chemically synthesized
tttgttctgtttgttttgag

SEQ ID NO: 261 - DNA, 20 bp, Artificial Sequence
  chemically synthesized
ttgttctgtttgttttgagg

SEQ ID NO: 262 - DNA, 20 bp, Artificial Sequence
  chemically synthesized
tttgagggggttcttctcca

SEQ ID NO: 263 - DNA, 20 bp, Artificial Sequence
  chemically synthesized
gggggttcttctccacagtg

SEQ ID NO: 264 - DNA, 20 bp, Artificial Sequence
  chemically synthesized
gggttcttctccacagtgaa

SEQ ID NO: 265 - DNA, 20 bp, Artificial Sequence
  chemically synthesized
ggttcttctccacagtgaag

SEQ ID NO: 266 - DNA, 20 bp, Artificial Sequence
  chemically synthesized
ccccttaaaaatcccacttt

SEQ ID NO: 267 - DNA, 20 bp, Artificial Sequence
  chemically synthesized
ccttaaaaatcccactttta

SEQ ID NO: 268 - DNA, 20 bp, Artificial Sequence
  chemically synthesized
cttatttacaaactgactct

SEQ ID NO: 269 - DNA, 20 bp, Artificial Sequence
  chemically synthesized
atttacaaactgactctgag

SEQ ID NO: 270 - DNA, 20 bp, Artificial Sequence
  chemically synthesized
tctgagaagaaatatataaa

SEQ ID NO: 271 - DNA, 20 bp, Artificial Sequence
  chemically synthesized
gagaagaaatatataaaaag

SEQ ID NO: 272 - DNA, 20 bp, Artificial Sequence
  chemically synthesized
agaagaaatatataaaaagt

SEQ ID NO: 273 - DNA, 20 bp, Artificial Sequence
  chemically synthesized
gaagaaatatataaaaagtg

SEQ ID NO: 274 - DNA, 20 bp, Artificial Sequence
  chemically synthesized
aagaaatatataaaaagtgg

SEQ ID NO: 275 - DNA, 20 bp, Artificial Sequence
  chemically synthesized
aaatatataaaaagtggggg

SEQ ID NO: 276 - DNA, 20 bp, Artificial Sequence
  chemically synthesized
aaaaagtgggggtagaaaca

SEQ ID NO: 277 - DNA, 20 bp, Artificial Sequence
  chemically synthesized
gtgggggtagaaacacagac

SEQ ID NO: 278 - DNA, 20 bp, Artificial Sequence
  chemically synthesized
gaaacacagaccagaaatga

SEQ ID NO: 279 - DNA, 20 bp, Artificial Sequence
  chemically synthesized
acagaccagaaatgaaagtg

SEQ ID NO: 280 - DNA, 20 bp, Artificial Sequence
  chemically synthesized
atgaaagtgtagtgaccacc

SEQ ID NO: 281 - DNA, 20 bp, Artificial Sequence
  chemically synthesized
agtgtagtgaccaccaagtg

SEQ ID NO: 282 - DNA, 20 bp, Artificial Sequence
  chemically synthesized
gaccaccaagtgcagttaca

SEQ ID NO: 283 - DNA, 20 bp, Artificial Sequence
  chemically synthesized
accaccaagtgcagttacaa

SEQ ID NO: 284 - DNA, 20 bp, Artificial Sequence
  chemically synthesized
acaaaggctgaacttgtctc

SEQ ID NO: 285 - DNA, 20 bp, Artificial Sequence
  chemically synthesized
gctgaacttgtctcaagacc

SEQ ID NO: 286 - DNA, 20 bp, Artificial Sequence
  chemically synthesized
ctgaacttgtctcaagaccc

SEQ ID NO: 287 - DNA, 20 bp, Artificial Sequence
  chemically synthesized
aagacccaggattgttgttt

SEQ ID NO: 288 - DNA, 20 bp, Artificial Sequence
  chemically synthesized
caggattgttgtttcagttc

SEQ ID NO: 289 - DNA, 20 bp, Artificial Sequence
  chemically synthesized
tttcagttctggcctccctt

SEQ ID NO: 290 - DNA, 20 bp, Artificial Sequence
  chemically synthesized
cagttctggcctccctttgg

SEQ ID NO: 291 - DNA, 20 bp, Artificial Sequence
  chemically synthesized
ttctggcctccctttggaag

SEQ ID NO: 292 - DNA, 20 bp, Artificial Sequence
  chemically synthesized
ggaagtggtgtcactctttc

SEQ ID NO: 293 - DNA, 20 bp, Artificial Sequence
  chemically synthesized
gaagtggtgtcactctttct

SEQ ID NO: 294 - DNA, 20 bp, Artificial Sequence
  chemically synthesized
gtgtcactctttctaggcat

SEQ ID NO: 295 - DNA, 20 bp, Artificial Sequence
  chemically synthesized
cactctttctaggcatcagc

SEQ ID NO: 296 - DNA, 20 bp, Artificial Sequence
  chemically synthesized
actctttctaggcatcagca

SEQ ID NO: 297 - DNA, 20 bp, Artificial Sequence
  chemically synthesized
tctttctaggcatcagcaag

SEQ ID NO: 298 - DNA, 20 bp, Artificial Sequence
  chemically synthesized
ctaggcatcagcaaggagtt

SEQ ID NO: 299 - DNA, 20 bp, Artificial Sequence
  chemically synthesized
agcaaggagttcagcacatt

SEQ ID NO: 300 - DNA, 20 bp, Artificial Sequence
  chemically synthesized
gcaaggagttcagcacattt

SEQ ID NO: 301 - DNA, 20 bp, Artificial Sequence
  chemically synthesized
caaggagttcagcacattta

SEQ ID NO: 302 - DNA, 20 bp, Artificial Sequence
  chemically synthesized
aggagttcagcacatttagg

SEQ ID NO: 303 - DNA, 20 bp, Artificial Sequence
  chemically synthesized
ggagttcagcacatttaggg

SEQ ID NO: 304 - DNA, 20 bp, Artificial Sequence
  chemically synthesized
gttcagcacatttagggagg

SEQ ID NO: 305 - DNA, 20 bp, Artificial Sequence
  chemically synthesized
atttagggaggaagccatca

SEQ ID NO: 306 - DNA, 20 bp, Artificial Sequence
  chemically synthesized
agccatcacagaaaccctaa

SEQ ID NO: 307 - DNA, 20 bp, Artificial Sequence
  chemically synthesized
accctaatggtcttatgttt

SEQ ID NO: 308 - DNA, 20 bp, Artificial Sequence
  chemically synthesized
tcttatgtttcagcaacaca

SEQ ID NO: 309 - DNA, 20 bp, Artificial Sequence
  chemically synthesized
cttatgtttcagcaacacat

SEQ ID NO: 310 - DNA, 20 bp, Artificial Sequence
  chemically synthesized
atgtttcagcaacacatagg

SEQ ID NO: 311 - DNA, 20 bp, Artificial Sequence
  chemically synthesized
gtttcagcaacacataggca

SEQ ID NO: 312 - DNA, 20 bp, Artificial Sequence
  chemically synthesized
agcaacacataggcagagca

SEQ ID NO: 313 - DNA, 20 bp, Artificial Sequence
  chemically synthesized
gcaacacataggcagagcat

SEQ ID NO: 314 - DNA, 20 bp, Artificial Sequence
  chemically synthesized
caacacataggcagagcatg

SEQ ID NO: 315 - DNA, 20 bp, Artificial Sequence
  chemically synthesized
cacataggcagagcatgggg

SEQ ID NO: 316 - DNA, 20 bp, Artificial Sequence
  chemically synthesized
acataggcagagcatggggc

SEQ ID NO: 317 - DNA, 20 bp, Artificial Sequence
  chemically synthesized
cataggcagagcatggggca

SEQ ID NO: 318 - DNA, 20 bp, Artificial Sequence
  chemically synthesized
taggcagagcatggggcagg

SEQ ID NO: 319 - DNA, 20 bp, Artificial Sequence
  chemically synthesized
ggcagagcatggggcaggga

SEQ ID NO: 320 - DNA, 20 bp, Artificial Sequence
  chemically synthesized
gcagagcatggggcagggag

SEQ ID NO: 321 - DNA, 20 bp, Artificial Sequence
  chemically synthesized
cagagcatggggcagggaga

SEQ ID NO: 322 - DNA, 20 bp, Artificial Sequence
  chemically synthesized
ttatgaaataacttcttgtc

SEQ ID NO: 323 - DNA, 20 bp, Artificial Sequence
  chemically synthesized
tgaaataacttcttgtctgg

SEQ ID NO: 324 - DNA, 20 bp, Artificial Sequence
  chemically synthesized
tggaagtcccaactaattga

SEQ ID NO: 325 - DNA, 20 bp, Artificial Sequence
  chemically synthesized
ggaagtcccaactaattgat

SEQ ID NO: 326 - DNA, 20 bp, Artificial Sequence
  chemically synthesized
agtcccaactaattgatagg

SEQ ID NO: 327 - DNA, 20 bp, Artificial Sequence
  chemically synthesized
aattgataggaagtcacaaa

SEQ ID NO: 328 - DNA, 20 bp, Artificial Sequence
  chemically synthesized
attgataggaagtcacaaac

SEQ ID NO: 329 - DNA, 20 bp, Artificial Sequence
  chemically synthesized
aaacaggccactcgtgcaat

SEQ ID NO: 330 - DNA, 20 bp, Artificial Sequence
  chemically synthesized
aacaggccactcgtgcaatc

SEQ ID NO: 331 - DNA, 20 bp, Artificial Sequence
  chemically synthesized
acaggccactcgtgcaatca

SEQ ID NO: 332 - DNA, 20 bp, Artificial Sequence
  chemically synthesized
gcaatcagggttatttgtca

SEQ ID NO: 333 - DNA, 20 bp, Artificial Sequence
  chemically synthesized
cagggttatttgtcatggaa

SEQ ID NO: 334 - DNA, 20 bp, Artificial Sequence
  chemically synthesized
tatttgtcatggaaaagcca

SEQ ID NO: 335 - DNA, 20 bp, Artificial Sequence
  chemically synthesized
atttgtcatggaaaagccac

SEQ ID NO: 336 - DNA, 20 bp, Artificial Sequence
  chemically synthesized
tttgtcatggaaaagccaca

SEQ ID NO: 337 - DNA, 20 bp, Artificial Sequence
  chemically synthesized
ttgtcatggaaaagccacag

SEQ ID NO: 338 - DNA, 20 bp, Artificial Sequence
  chemically synthesized
catggaaaagccacagggga

SEQ ID NO: 339 - DNA, 20 bp, Artificial Sequence
  chemically synthesized
atggaaaagccacaggggaa

SEQ ID NO: 340 - DNA, 20 bp, Artificial Sequence
  chemically synthesized
aagccacaggggaaaggtga

SEQ ID NO: 341 - DNA, 20 bp, Artificial Sequence
  chemically synthesized
cacaggggaaaggtgatggc

SEQ ID NO: 342 - DNA, 20 bp, Artificial Sequence
  chemically synthesized
acaggggaaaggtgatggca

SEQ ID NO: 343 - DNA, 20 bp, Artificial Sequence
  chemically synthesized
aggggaaaggtgatggcaag

SEQ ID NO: 344 - DNA, 20 bp, Artificial Sequence
  chemically synthesized
ggggaaaggtgatggcaagg

SEQ ID NO: 345 - DNA, 20 bp, Artificial Sequence
  chemically synthesized
aggctgcaacctccctttct

SEQ ID NO: 346 - DNA, 20 bp, Artificial Sequence
  chemically synthesized
ttctcagtgcacacatctgt

SEQ ID NO: 347 - DNA, 20 bp, Artificial Sequence
  chemically synthesized
tcagtgcacacatctgttgg

SEQ ID NO: 348 - DNA, 20 bp, Artificial Sequence
  chemically synthesized
cagtgcacacatctgttggt

SEQ ID NO: 349 - DNA, 20 bp, Artificial Sequence
  chemically synthesized
tgcacacatctgttggtagg

SEQ ID NO: 350 - DNA, 20 bp, Artificial Sequence
  chemically synthesized
cacacatctgttggtaggaa

SEQ ID NO: 351 - DNA, 20 bp, Artificial Sequence
  chemically synthesized
acacatctgttggtaggaag

SEQ ID NO: 352 - DNA, 20 bp, Artificial Sequence
  chemically synthesized
aactctgcatgcctttacca

SEQ ID NO: 353 - DNA, 20 bp, Artificial Sequence
  chemically synthesized
actctgcatgcctttaccaa

SEQ ID NO: 354 - DNA, 20 bp, Artificial Sequence
  chemically synthesized
gcctttaccaaaggccatcc

SEQ ID NO: 355 - DNA, 20 bp, Artificial Sequence
  chemically synthesized
cctttaccaaaggccatcct

SEQ ID NO: 356 - DNA, 20 bp, Artificial Sequence
  chemically synthesized
catcctgggtctgtatgtgt

SEQ ID NO: 357 - DNA, 20 bp, Artificial Sequence
  chemically synthesized
ttatgacttatgtgctaaca

SEQ ID NO: 358 - DNA, 20 bp, Artificial Sequence
  chemically synthesized
tatgacttatgtgctaacac

SEQ ID NO: 359 - DNA, 20 bp, Artificial Sequence
  chemically synthesized
cttatgtgctaacacaggaa

SEQ ID NO: 360 - DNA, 20 bp, Artificial Sequence
  chemically synthesized
gaaaagatactccctttgat

SEQ ID NO: 361 - DNA, 20 bp, Artificial Sequence
  chemically synthesized
actccctttgatcagttaaa

SEQ ID NO: 362 - DNA, 20 bp, Artificial Sequence
  chemically synthesized
tccctttgatcagttaaaca

SEQ ID NO: 363 - DNA, 20 bp, Artificial Sequence
  chemically synthesized
ttgatcagttaaacagagtt

SEQ ID NO: 364 - DNA, 20 bp, Artificial Sequence
  chemically synthesized
taaacagagtttggtgaaat

SEQ ID NO: 365 - DNA, 20 bp, Artificial Sequence
  chemically synthesized
gagtttggtgaaattagctc

SEQ ID NO: 366 - DNA, 20 bp, Artificial Sequence
  chemically synthesized
tggtgaaattagctctggac

SEQ ID NO: 367 - DNA, 20 bp, Artificial Sequence
  chemically synthesized
attagctctggacaagaaac

SEQ ID NO: 368 - DNA, 20 bp, Artificial Sequence
  chemically synthesized
ggacaagaaaccagaaaacc

SEQ ID NO: 369 - DNA, 20 bp, Artificial Sequence
  chemically synthesized
tgctttctctcttactgatg

SEQ ID NO: 370 - DNA, 20 bp, Artificial Sequence
  chemically synthesized
tctcttactgatgtggcctc

SEQ ID NO: 371 - DNA, 20 bp, Artificial Sequence
  chemically synthesized
ttactgatgtggcctctggc

SEQ ID NO: 372 - DNA, 20 bp, Artificial Sequence
  chemically synthesized
ctctggcaagcccttaacct

SEQ ID NO: 373 - DNA, 20 bp, Artificial Sequence
  chemically synthesized
ggcaagcccttaaccttggt

SEQ ID NO: 374 - DNA, 20 bp, Artificial Sequence
  chemically synthesized
cctcaatctccacctccata

SEQ ID NO: 375 - DNA, 20 bp, Artificial Sequence
  chemically synthesized
caatctccacctccataaag

SEQ ID NO: 376 - DNA, 20 bp, Artificial Sequence
  chemically synthesized
tctccacctccataaagtag

SEQ ID NO: 377 - DNA, 20 bp, Artificial Sequence
  chemically synthesized
ctccataaagtagaagtcgt

SEQ ID NO: 378 - DNA, 20 bp, Artificial Sequence
  chemically synthesized
agaagtcgtgagatctgtcc

SEQ ID NO: 379 - DNA, 20 bp, Artificial Sequence
  chemically synthesized
aagtcgtgagatctgtccca

SEQ ID NO: 380 - DNA, 20 bp, Artificial Sequence
  chemically synthesized
gtcgtgagatctgtcccaga

SEQ ID NO: 381 - DNA, 20 bp, Artificial Sequence
  chemically synthesized
gtgagatctgtcccagagag

SEQ ID NO: 382 - DNA, 20 bp, Artificial Sequence
  chemically synthesized
tgagatctgtcccagagagc

SEQ ID NO: 383 - DNA, 20 bp, Artificial Sequence
  chemically synthesized
gagcaggtgaaataatgcac

SEQ ID NO: 384 - DNA, 20 bp, Artificial Sequence
  chemically synthesized
aggtgaaataatgcacgaga

SEQ ID NO: 385 - DNA, 20 bp, Artificial Sequence
  chemically synthesized
gcacgagacagcactgtata

SEQ ID NO: 386 - DNA, 20 bp, Artificial Sequence
  chemically synthesized
gacagcactgtatacagtat

SEQ ID NO: 387 - DNA, 20 bp, Artificial Sequence
  chemically synthesized
acagcactgtatacagtata

SEQ ID NO: 388 - DNA, 20 bp, Artificial Sequence
  chemically synthesized
gcactgtatacagtataagg

SEQ ID NO: 389 - DNA, 20 bp, Artificial Sequence
  chemically synthesized
tataaggtagttcactactg

SEQ ID NO: 390 - DNA, 20 bp, Artificial Sequence
  chemically synthesized
aggtagttcactactgtaga

SEQ ID NO: 391 - DNA, 20 bp, Artificial Sequence
  chemically synthesized
agtcattatttattatgaat

SEQ ID NO: 392 - DNA, 20 bp, Artificial Sequence
  chemically synthesized
cattatttattatgaataag

SEQ ID NO: 393 - DNA, 20 bp, Artificial Sequence
  chemically synthesized
attatttattatgaataagc

SEQ ID NO: 394 - DNA, 20 bp, Artificial Sequence
  chemically synthesized
taattcacatgccaattatt

SEQ ID NO: 395 - DNA, 20 bp, Artificial Sequence
  chemically synthesized
tatttggctatcttttcact

SEQ ID NO: 396 - DNA, 20 bp, Artificial Sequence
  chemically synthesized
tggctatcttttcactaagc

SEQ ID NO: 397 - DNA, 20 bp, Artificial Sequence
  chemically synthesized
ggctatcttttcactaagct

SEQ ID NO: 398 - DNA, 20 bp, Artificial Sequence
  chemically synthesized
tttcactaagctaggtaatc

SEQ ID NO: 399 - DNA, 20 bp, Artificial Sequence
  chemically synthesized
actaagctaggtaatctagc

SEQ ID NO: 400 - DNA, 20 bp, Artificial Sequence
  chemically synthesized
aagctaggtaatctagccag

SEQ ID NO: 401 - DNA, 20 bp, Artificial Sequence
  chemically synthesized
agctaggtaatctagccaga

SEQ ID NO: 402 - DNA, 20 bp, Artificial Sequence
  chemically synthesized
taggtaatctagccagaagg

SEQ ID NO: 403 - DNA, 20 bp, Artificial Sequence
  chemically synthesized
taatctagccagaaggtgga

SEQ ID NO: 404 - DNA, 20 bp, Artificial Sequence
  chemically synthesized
aatctagccagaaggtggat

SEQ ID NO: 405 - DNA, 20 bp, Artificial Sequence
  chemically synthesized
ctagccagaaggtggatagg

SEQ ID NO: 406 - DNA, 20 bp, Artificial Sequence
  chemically synthesized
tagccagaaggtggataggt

SEQ ID NO: 407 - DNA, 20 bp, Artificial Sequence
  chemically synthesized
taggtaggattttccccact

SEQ ID NO: 408 - DNA, 20 bp, Artificial Sequence
  chemically synthesized
aggtaggattttccccactt

SEQ ID NO: 409 - DNA, 20 bp, Artificial Sequence
  chemically synthesized
attttccccacttaggttca

SEQ ID NO: 410 - DNA, 20 bp, Artificial Sequence
  chemically synthesized
acggcctgtatgtgaatcta

SEQ ID NO: 411 - DNA, 20 bp, Artificial Sequence
  chemically synthesized
gtatgtgaatctacagcaca

SEQ ID NO: 412 - DNA, 20 bp, Artificial Sequence
  chemically synthesized
tatgtgaatctacagcacac

SEQ ID NO: 413 - DNA, 20 bp, Artificial Sequence
  chemically synthesized
tctacagcacacaggtgtct

SEQ ID NO: 414 - DNA, 20 bp, Artificial Sequence
  chemically synthesized
tgttgtttctaattctcttc

SEQ ID NO: 415 - DNA, 20 bp, Artificial Sequence
  chemically synthesized
taattctcttctggatctcc

SEQ ID NO: 416 - DNA, 20 bp, Artificial Sequence
  chemically synthesized
ttctcttctggatctccaag

SEQ ID NO: 417 - DNA, 20 bp, Artificial Sequence
  chemically synthesized
gcagtaaaaaataccaaact

SEQ ID NO: 418 - DNA, 20 bp, Artificial Sequence
  chemically synthesized
aaaaaataccaaactgagaa

SEQ ID NO: 419 - DNA, 20 bp, Artificial Sequence
  chemically synthesized
aaagttctgtgcaaattaac

SEQ ID NO: 420 - DNA, 20 bp, Artificial Sequence
  chemically synthesized
aagttctgtgcaaattaact

SEQ ID NO: 421 - DNA, 20 bp, Artificial Sequence
  chemically synthesized
tctgtgcaaattaactgggc

SEQ ID NO: 422 - DNA, 20 bp, Artificial Sequence
  chemically synthesized
tgcaaattaactgggccaga

SEQ ID NO: 423 - DNA, 20 bp, Artificial Sequence
  chemically synthesized
gaatttttaccacctgtttg

SEQ ID NO: 424 - DNA, 20 bp, Artificial Sequence
  chemically synthesized
ttgtagatgtaacttatttg

SEQ ID NO: 425 - DNA, 20 bp, Artificial Sequence
  chemically synthesized
tatttgtggcactaatttct

SEQ ID NO: 426 - DNA, 20 bp, Artificial Sequence
  chemically synthesized
atttgtggcactaatttcta

SEQ ID NO: 427 - DNA, 20 bp, Artificial Sequence
  chemically synthesized
tggcactaatttctaaggaa

SEQ ID NO: 428 - DNA, 20 bp, Artificial Sequence
  chemically synthesized
gcactaatttctaaggaata

SEQ ID NO: 429 - DNA, 20 bp, Artificial Sequence
  chemically synthesized
tgccccaaatttcctgatgt

SEQ ID NO: 430 - DNA, 20 bp, Artificial Sequence
  chemically synthesized
atttcctgatgtaagtacta

SEQ ID NO: 431 - DNA, 20 bp, Artificial Sequence
  chemically synthesized
tcctgatgtaagtactaaag

SEQ ID NO: 432 - DNA, 20 bp, Artificial Sequence
  chemically synthesized
tatgtttgtttgtctgcatt

SEQ ID NO: 433 - DNA, 20 bp, Artificial Sequence
  chemically synthesized
gcattaagatatatttcctg

SEQ ID NO: 434 - DNA, 20 bp, Artificial Sequence
  chemically synthesized
cattaagatatatttcctga

SEQ ID NO: 435 - DNA, 20 bp, Artificial Sequence
  chemically synthesized
agatatatttcctgaaggtt

SEQ ID NO: 436 - DNA, 20 bp, Artificial Sequence
  chemically synthesized
gatatatttcctgaaggttt

SEQ ID NO: 437 - DNA, 20 bp, Artificial Sequence
  chemically synthesized
aaggtttgggaacctaaaat

SEQ ID NO: 438 - DNA, 20 bp, Artificial Sequence
  chemically synthesized
ctaaaattagaatatttaat

SEQ ID NO: 439 - DNA, 20 bp, Artificial Sequence
  chemically synthesized
ctgacatttatcaccttctt

SEQ ID NO: 440 - DNA, 20 bp, Artificial Sequence
  chemically synthesized
tgacatttatcaccttcttt

SEQ ID NO: 441 - DNA, 20 bp, Artificial Sequence
  chemically synthesized
tttaggatttaccgctcgcc

SEQ ID NO: 442 - DNA, 20 bp, Artificial Sequence
  chemically synthesized
gcccagtgatgttctttcct

SEQ ID NO: 443 - DNA, 20 bp, Artificial Sequence
  chemically synthesized
tctttcctaagctaaattaa

SEQ ID NO: 444 - DNA, 20 bp, Artificial Sequence
  chemically synthesized
agacaaattcaaatcctgca

SEQ ID NO: 445 - DNA, 20 bp, Artificial Sequence
  chemically synthesized
caaattcaaatcctgcatgg

SEQ ID NO: 446 - DNA, 20 bp, Artificial Sequence
  chemically synthesized
tcctgcatggtagccaccaa

SEQ ID NO: 447 - DNA, 20 bp, Artificial Sequence
  chemically synthesized
aaaagcatatatttgaaaaa

SEQ ID NO: 448 - DNA, 20 bp, Artificial Sequence
  chemically synthesized
aaagcatatatttgaaaaac

SEQ ID NO: 449 - DNA, 20 bp, Artificial Sequence
  chemically synthesized
tatatttgaaaaacaggatt

SEQ ID NO: 450 - DNA, 20 bp, Artificial Sequence
  chemically synthesized
ccatattatgcattatttaa

SEQ ID NO: 451 - DNA, 20 bp, Artificial Sequence
  chemically synthesized
tttaatggtatgcaaattat

SEQ ID NO: 452 - DNA, 20 bp, Artificial Sequence
  chemically synthesized
atggtatgcaaattataagt

SEQ ID NO: 453 - DNA, 20 bp, Artificial Sequence
  chemically synthesized
tatgcaaattataagtcaga

SEQ ID NO: 454 - DNA, 20 bp, Artificial Sequence
  chemically synthesized
caaattataagtcagacagt

SEQ ID NO: 455 - DNA, 20 bp, Artificial Sequence
  chemically synthesized
aaattataagtcagacagtt

SEQ ID NO: 456 - DNA, 20 bp, Artificial Sequence
  chemically synthesized
cagttaggaaaaccacactt

SEQ ID NO: 457 - DNA, 20 bp, Artificial Sequence
  chemically synthesized
cacacttcagcattaataaa

SEQ ID NO: 458 - DNA, 20 bp, Artificial Sequence
  chemically synthesized
tattgctatgatttattccc

SEQ ID NO: 459 - DNA, 20 bp, Artificial Sequence
  chemically synthesized
gaaaatttatgccatctgat

SEQ ID NO: 460 - DNA, 20 bp, Artificial Sequence
  chemically synthesized
aatttatgccatctgataag

SEQ ID NO: 461 - DNA, 20 bp, Artificial Sequence
  chemically synthesized
ccatctgataagcggtaacc

SEQ ID NO: 462 - DNA, 20 bp, Artificial Sequence
  chemically synthesized
tgttcctcctacccacccga

SEQ ID NO: 463 - DNA, 20 bp, Artificial Sequence
  chemically synthesized
gttcctcctacccacccgat

SEQ ID NO: 464 - DNA, 20 bp, Artificial Sequence
  chemically synthesized
acccacccgatgggtgtctg

SEQ ID NO: 465 - DNA, 20 bp, Artificial Sequence
  chemically synthesized
cccacccgatgggtgtctgt

SEQ ID NO: 466 - DNA, 20 bp, Artificial Sequence
  chemically synthesized
cgatgggtgtctgtaggaaa

SEQ ID NO: 467 - DNA, 20 bp, Artificial Sequence
  chemically synthesized
gatgggtgtctgtaggaaac

SEQ ID NO: 468 - DNA, 20 bp, Artificial Sequence
  chemically synthesized
gtgtctgtaggaaacaggta

SEQ ID NO: 469 - DNA, 20 bp, Artificial Sequence
  chemically synthesized
tctgtaggaaacaggtacag

SEQ ID NO: 470 - DNA, 20 bp, Artificial Sequence
  chemically synthesized
gtacagaagtacaaaatcat

SEQ ID NO: 471 - DNA, 20 bp, Artificial Sequence
  chemically synthesized
cagaagtacaaaatcataag

SEQ ID NO: 472 - DNA, 20 bp, Artificial Sequence
  chemically synthesized
aagcagcctcattgtcttat

SEQ ID NO: 473 - DNA, 20 bp, Artificial Sequence
  chemically synthesized
cttataagcattaaaaatta

SEQ ID NO: 474 - DNA, 20 bp, Artificial Sequence
  chemically synthesized
agcattaaaaattaaagaac

SEQ ID NO: 475 - DNA, 20 bp, Artificial Sequence
  chemically synthesized
gaacaagcaaacaccaccta

SEQ ID NO: 476 - DNA, 20 bp, Artificial Sequence
  chemically synthesized
acatttattgtgtcaatgtt

SEQ ID NO: 477 - DNA, 20 bp, Artificial Sequence
  chemically synthesized
atgttaagcacactttttaa

SEQ ID NO: 478 - DNA, 20 bp, Artificial Sequence
  chemically synthesized
acactttttaaaagacaaca

SEQ ID NO: 479 - DNA, 20 bp, Artificial Sequence
  chemically synthesized
aaaagacaacatagaatgta

SEQ ID NO: 480 - DNA, 20 bp, Artificial Sequence
  chemically synthesized
aacatagaatgtatagaaac

SEQ ID NO: 481 - DNA, 20 bp, Artificial Sequence
  chemically synthesized
acatagaatgtatagaaaca

SEQ ID NO: 482 - DNA, 20 bp, Artificial Sequence
  chemically synthesized
catagaatgtatagaaacaa

SEQ ID NO: 483 - DNA, 20 bp, Artificial Sequence
  chemically synthesized
atagaatgtatagaaacaag

SEQ ID NO: 484 - DNA, 20 bp, Artificial Sequence
  chemically synthesized
aatgtatagaaacaaggggt

SEQ ID NO: 485 - DNA, 20 bp, Artificial Sequence
  chemically synthesized
atgtatagaaacaaggggtt

SEQ ID NO: 486 - DNA, 20 bp, Artificial Sequence
  chemically synthesized
tgtatagaaacaaggggttg

SEQ ID NO: 487 - DNA, 20 bp, Artificial Sequence
  chemically synthesized
tcatgcgcatttccacaata

SEQ ID NO: 488 - DNA, 20 bp, Artificial Sequence
  chemically synthesized
catgcgcatttccacaatac

SEQ ID NO: 489 - DNA, 20 bp, Artificial Sequence
  chemically synthesized
atttccacaatacaggtaat

SEQ ID NO: 490 - DNA, 20 bp, Artificial Sequence
  chemically synthesized
tttccacaatacaggtaatt

SEQ ID NO: 491 - DNA, 20 bp, Artificial Sequence
  chemically synthesized
cacaatacaggtaattaggt

SEQ ID NO: 492 - DNA, 20 bp, Artificial Sequence
  chemically synthesized
atacaggtaattaggttggc

SEQ ID NO: 493 - DNA, 20 bp, Artificial Sequence
  chemically synthesized
gtaattaggttggctggttt

SEQ ID NO: 494 - DNA, 20 bp, Artificial Sequence
  chemically synthesized
attaggttggctggtttcag

SEQ ID NO: 495 - DNA, 20 bp, Artificial Sequence
  chemically synthesized
ttaggttggctggtttcaga

SEQ ID NO: 496 - DNA, 20 bp, Artificial Sequence
  chemically synthesized
taggttggctggtttcagaa

SEQ ID NO: 497 - DNA, 20 bp, Artificial Sequence
  chemically synthesized
ttggctggtttcagaagggc

SEQ ID NO: 498 - DNA, 20 bp, Artificial Sequence
  chemically synthesized
tggctggtttcagaagggcc

SEQ ID NO: 499 - DNA, 20 bp, Artificial Sequence
  chemically synthesized
ggctggtttcagaagggcca

SEQ ID NO: 500 - DNA, 20 bp, Artificial Sequence
  chemically synthesized
ggccagggcatcactcatga

SEQ ID NO: 501 - DNA, 20 bp, Artificial Sequence
  chemically synthesized
ggcatcactcatgacagcga

SEQ ID NO: 502 - DNA, 20 bp, Artificial Sequence
  chemically synthesized
ctcatgacagcgatggtcca

SEQ ID NO: 503 - DNA, 20 bp, Artificial Sequence
  chemically synthesized
tcatgacagcgatggtccac

SEQ ID NO: 504 - DNA, 20 bp, Artificial Sequence
  chemically synthesized
tggtccacgggccctctcta

SEQ ID NO: 505 - DNA, 20 bp, Artificial Sequence
  chemically synthesized
ggtccacgggccctctctat

SEQ ID NO: 506 - DNA, 20 bp, Artificial Sequence
  chemically synthesized
actgattcactgttccaatg

SEQ ID NO: 507 - DNA, 20 bp, Artificial Sequence
  chemically synthesized
ctgattcactgttccaatgt

SEQ ID NO: 508 - DNA, 20 bp, Artificial Sequence
  chemically synthesized
attaaaaaatataaataaaa

SEQ ID NO: 509 - DNA, 20 bp, Artificial Sequence
  chemically synthesized
atataaataaaatggcgctg

SEQ ID NO: 510 - DNA, 20 bp, Artificial Sequence
  chemically synthesized
tataaataaaatggcgctgc

SEQ ID NO: 511 - DNA, 20 bp, Artificial Sequence
  chemically synthesized
ataaaatggcgctgcaggcc

SEQ ID NO: 512 - DNA, 20 bp, Artificial Sequence
  chemically synthesized
taaaatggcgctgcaggcct

SEQ ID NO: 513 - DNA, 20 bp, Artificial Sequence
  chemically synthesized
atggcgctgcaggcctaggc

SEQ ID NO: 514 - DNA, 20 bp, Artificial Sequence
  chemically synthesized
gcgctgcaggcctaggctgg

SEQ ID NO: 515 - DNA, 20 bp, Artificial Sequence
  chemically synthesized
cgctgcaggcctaggctgga

SEQ ID NO: 516 - DNA, 20 bp, Artificial Sequence
  chemically synthesized
cctaggctggaaggactctg

SEQ ID NO: 517 - DNA, 20 bp, Artificial Sequence
  chemically synthesized
ctaggctggaaggactctgc

SEQ ID NO: 518 - DNA, 20 bp, Artificial Sequence
  chemically synthesized
aggactctgtcttcgcacaa

SEQ ID NO: 519 - DNA, 20 bp, Artificial Sequence
  chemically synthesized
gtcttcgcacaacggcttct

SEQ ID NO: 520 - DNA, 20 bp, Artificial Sequence
  chemically synthesized
cttcgcacaacggcttcttg

SEQ ID NO: 521 - DNA, 20 bp, Artificial Sequence
  chemically synthesized
ttcgcacaacggcttcttgg

SEQ ID NO: 522 - DNA, 20 bp, Artificial Sequence
  chemically synthesized
ggcttcttggaggctactgt

SEQ ID NO: 523 - DNA, 20 bp, Artificial Sequence
  chemically synthesized
tgtcagaaaacatcacaaac

SEQ ID NO: 524 - DNA, 20 bp, Artificial Sequence
  chemically synthesized
cagaaaacatcacaaactag

SEQ ID NO: 525 - DNA, 20 bp, Artificial Sequence
  chemically synthesized
agaaaacatcacaaactagc

SEQ ID NO: 526 - DNA, 20 bp, Artificial Sequence
  chemically synthesized
atcacaaactagcaggatga

SEQ ID NO: 527 - DNA, 20 bp, Artificial Sequence
  chemically synthesized
cagaccacgctgacgtcgac

SEQ ID NO: 528 - DNA, 20 bp, Artificial Sequence
  chemically synthesized
agaccacgctgacgtcgact

SEQ ID NO: 529 - DNA, 20 bp, Artificial Sequence
  chemically synthesized
ccacgctgacgtcgactggg

SEQ ID NO: 530 - DNA, 20 bp, Artificial Sequence
  chemically synthesized
gcacgcgtccaccccacccc

SEQ ID NO: 531 - DNA, 20 bp, Artificial Sequence
  chemically synthesized
cacgcgtccaccccacccct

SEQ ID NO: 532 - DNA, 20 bp, Artificial Sequence
  chemically synthesized
acgcgtccaccccacccctg

SEQ ID NO: 533 - DNA, 20 bp, Artificial Sequence
  chemically synthesized
cgcgtccaccccacccctgg

SEQ ID NO: 534 - DNA, 20 bp, Artificial Sequence
  chemically synthesized
ctgggggcttcaaattttct

SEQ ID NO: 535 - DNA, 20 bp, Artificial Sequence
  chemically synthesized
ttcaaattttctcagaactt

SEQ ID NO: 536 - DNA, 20 bp, Artificial Sequence
  chemically synthesized
tcaaattttctcagaactta

SEQ ID NO: 537 - DNA, 20 bp, Artificial Sequence
  chemically synthesized
caaattttctcagaacttaa

SEQ ID NO: 538 - DNA, 20 bp, Artificial Sequence
  chemically synthesized
ctcagaacttaagggctctc

SEQ ID NO: 539 - DNA, 20 bp, Artificial Sequence
  chemically synthesized
cgaaaactgccacacatctt

SEQ ID NO: 540 - DNA, 20 bp, Artificial Sequence
  chemically synthesized
gccacacatcttgagctctc

SEQ ID NO: 541 - DNA, 20 bp, Artificial Sequence
  chemically synthesized
ccacacatcttgagctctct

SEQ ID NO: 542 - DNA, 20 bp, Artificial Sequence
  chemically synthesized
tctctgggtactacgccgaa

SEQ ID NO: 543 - DNA, 20 bp, Artificial Sequence
  chemically synthesized
ctctgggtactacgccgaat

SEQ ID NO: 544 - DNA, 20 bp, Artificial Sequence
  chemically synthesized
tctgggtactacgccgaatg

SEQ ID NO: 545 - DNA, 20 bp, Artificial Sequence
  chemically synthesized
ctgggtactacgccgaatgg

SEQ ID NO: 546 - DNA, 20 bp, Artificial Sequence
  chemically synthesized
acgccgaatgggggtgtgtg

SEQ ID NO: 547 - DNA, 20 bp, Artificial Sequence
  chemically synthesized
atgggggtgtgtgaagaacc

SEQ ID NO: 548 - DNA, 20 bp, Artificial Sequence
  chemically synthesized
gggtgtgtgaagaacctaga

SEQ ID NO: 549 - DNA, 20 bp, Artificial Sequence
  chemically synthesized
gtgtgtgaagaacctagaaa

SEQ ID NO: 550 - DNA, 20 bp, Artificial Sequence
  chemically synthesized
tgtgtgaagaacctagaaag

SEQ ID NO: 551 - DNA, 20 bp, Artificial Sequence
  chemically synthesized
tgaagaacctagaaagaggt

SEQ ID NO: 552 - DNA, 20 bp, Artificial Sequence
  chemically synthesized
aagaacctagaaagaggttg

SEQ ID NO: 553 - DNA, 20 bp, Artificial Sequence
  chemically synthesized
acctagaaagaggttggaga

SEQ ID NO: 554 - DNA, 20 bp, Artificial Sequence
  chemically synthesized
ctagaaagaggttggagaca

SEQ ID NO: 555 - DNA, 20 bp, Artificial Sequence
  chemically synthesized
tagaaagaggttggagacag

SEQ ID NO: 556 - DNA, 20 bp, Artificial Sequence
  chemically synthesized
gaaagaggttggagacagag

SEQ ID NO: 557 - DNA, 20 bp, Artificial Sequence
  chemically synthesized
aaagaggttggagacagagg

SEQ ID NO: 558 - DNA, 20 bp, Artificial Sequence
  chemically synthesized
aagaggttggagacagagga

SEQ ID NO: 559 - DNA, 20 bp, Artificial Sequence
  chemically synthesized
agaggttggagacagaggag

SEQ ID NO: 560 - DNA, 20 bp, Artificial Sequence
  chemically synthesized
gaggttggagacagaggagg

SEQ ID NO: 561 - DNA, 20 bp, Artificial Sequence
  chemically synthesized
acagaggagggggaaaaaaa

SEQ ID NO: 562 - DNA, 20 bp, Artificial Sequence
  chemically synthesized
ggagggggaaaaaaaaagta

SEQ ID NO: 563 - DNA, 20 bp, Artificial Sequence
  chemically synthesized
gagggggaaaaaaaaagtac

SEQ ID NO: 564 - DNA, 20 bp, Artificial Sequence
  chemically synthesized
aaaaaagtacaggtgtgact

SEQ ID NO: 565 - DNA, 20 bp, Artificial Sequence
  chemically synthesized
atgattttctgttctctaac

SEQ ID NO: 566 - DNA, 20 bp, Artificial Sequence
  chemically synthesized
ctaactagctttttaaaaat

SEQ ID NO: 567 - DNA, 20 bp, Artificial Sequence
  chemically synthesized
attagaacttaaaccaacca

SEQ ID NO: 568 - DNA, 20 bp, Artificial Sequence
  chemically synthesized
ttagaacttaaaccaaccac

SEQ ID NO: 569 - DNA, 20 bp, Artificial Sequence
  chemically synthesized
acttaaaccaaccacaggtc

SEQ ID NO: 570 - DNA, 20 bp, Artificial Sequence
  chemically synthesized
ccaaccacaggtcgagccac

SEQ ID NO: 571 - DNA, 20 bp, Artificial Sequence
  chemically synthesized
ggtcgagccactggcatctt

SEQ ID NO: 572 - DNA, 20 bp, Artificial Sequence
  chemically synthesized
cttaagcatgatttcaaact

SEQ ID NO: 573 - DNA, 20 bp, Artificial Sequence
  chemically synthesized
aaactcagcctcccctcccc

SEQ ID NO: 574 - DNA, 20 bp, Artificial Sequence
  chemically synthesized
cccaagtatctctgacctct

SEQ ID NO: 575 - DNA, 20 bp, Artificial Sequence
  chemically synthesized
tccctcccttccgtcccccc

SEQ ID NO: 576 - DNA, 20 bp, Artificial Sequence
  chemically synthesized
ccctcccttccgtcccccca

SEQ ID NO: 577 - DNA, 20 bp, Artificial Sequence
  chemically synthesized
ctcccttccgtccccccaag

SEQ ID NO: 578 - DNA, 20 bp, Artificial Sequence
  chemically synthesized
tcccttccgtccccccaagg

SEQ ID NO: 579 - DNA, 20 bp, Artificial Sequence
  chemically synthesized
ccgtccccccaaggaggacc

SEQ ID NO: 580 - DNA, 20 bp, Artificial Sequence
  chemically synthesized
cgtccccccaaggaggaccc

SEQ ID NO: 581 - DNA, 20 bp, Artificial Sequence
  chemically synthesized
acccctgcccaattgtatga

SEQ ID NO: 582 - DNA, 20 bp, Artificial Sequence
  chemically synthesized
tatgatagtcctaataaact

SEQ ID NO: 583 - DNA, 20 bp, Artificial Sequence
  chemically synthesized
atgatagtcctaataaactc

SEQ ID NO: 584 - DNA, 20 bp, Artificial Sequence
  chemically synthesized
taataaactcgggacacacc

SEQ ID NO: 585 - DNA, 20 bp, Artificial Sequence
  chemically synthesized
taaactcgggacacacctgg

SEQ ID NO: 586 - DNA, 20 bp, Artificial Sequence
  chemically synthesized
aaactcgggacacacctgga

SEQ ID NO: 587 - DNA, 20 bp, Artificial Sequence
  chemically synthesized
aaacacttgcccttatgact

SEQ ID NO: 588 - DNA, 20 bp, Artificial Sequence
  chemically synthesized
cccttatgactgagaaaact

SEQ ID NO: 589 - DNA, 20 bp, Artificial Sequence
  chemically synthesized
tatgactgagaaaacttagt

SEQ ID NO: 590 - DNA, 20 bp, Artificial Sequence
  chemically synthesized
tgagaaaacttagtaagaaa

SEQ ID NO: 591 - DNA, 20 bp, Artificial Sequence
  chemically synthesized
cttagtaagaaacagtcctt

SEQ ID NO: 592 - DNA, 20 bp, Artificial Sequence
  chemically synthesized
taagaaacagtcctttggtt

SEQ ID NO: 593 - DNA, 20 bp, Artificial Sequence
  chemically synthesized
aagaaacagtcctttggttg

SEQ ID NO: 594 - DNA, 20 bp, Artificial Sequence
  chemically synthesized
gaaacagtcctttggttgag

SEQ ID NO: 595 - DNA, 20 bp, Artificial Sequence
  chemically synthesized
aacagtcctttggttgagga

SEQ ID NO: 596 - DNA, 20 bp, Artificial Sequence
  chemically synthesized
agtcctttggttgaggagag

SEQ ID NO: 597 - DNA, 20 bp, Artificial Sequence
  chemically synthesized
gtcctttggttgaggagagc

SEQ ID NO: 598 - DNA, 20 bp, Artificial Sequence
  chemically synthesized
cctttggttgaggagagcgg

SEQ ID NO: 599 - DNA, 20 bp, Artificial Sequence
  chemically synthesized
tttggttgaggagagcggga

SEQ ID NO: 600 - DNA, 20 bp, Artificial Sequence
  chemically synthesized
ttggttgaggagagcgggag

SEQ ID NO: 601 - DNA, 20 bp, Artificial Sequence
  chemically synthesized
tggttgaggagagcgggaga

SEQ ID NO: 602 - DNA, 20 bp, Artificial Sequence
  chemically synthesized
gttgaggagagcgggagagg

SEQ ID NO: 603 - DNA, 20 bp, Artificial Sequence
  chemically synthesized
ttgaggagagcgggagaggg

SEQ ID NO: 604 - DNA, 20 bp, Artificial Sequence
  chemically synthesized
gaggagagcgggagagggag

SEQ ID NO: 605 - DNA, 20 bp, Artificial Sequence
  chemically synthesized
aggagagcgggagagggagg

SEQ ID NO: 606 - DNA, 20 bp, Artificial Sequence
  chemically synthesized
ggagagcgggagagggagga

SEQ ID NO: 607 - DNA, 20 bp, Artificial Sequence
  chemically synthesized
agcgggagagggaggaggga

SEQ ID NO: 608 - DNA, 20 bp, Artificial Sequence
  chemically synthesized
gcgggagagggaggagggaa

SEQ ID NO: 609 - DNA, 20 bp, Artificial Sequence
  chemically synthesized
cgggagagggaggagggaaa

SEQ ID NO: 610 - DNA, 20 bp, Artificial Sequence
  chemically synthesized
gggagagggaggagggaaag

SEQ ID NO: 611 - DNA, 20 bp, Artificial Sequence
  chemically synthesized
aaaataataataaaattata

SEQ ID NO: 612 - DNA, 20 bp, Artificial Sequence
  chemically synthesized
aaaaatcaaaactgatgtaa

SEQ ID NO: 613 - DNA, 20 bp, Artificial Sequence
  chemically synthesized
aatcaaaactgatgtaaaag

SEQ ID NO: 614 - DNA, 20 bp, Artificial Sequence
  chemically synthesized
cgaaaacatgaaatgtcatc

SEQ ID NO: 615 - DNA, 20 bp, Artificial Sequence
  chemically synthesized
tgtcatcaagttcaacgtca

SEQ ID NO: 616 - DNA, 20 bp, Artificial Sequence
  chemically synthesized
catcaagttcaacgtcaaag

SEQ ID NO: 617 - DNA, 20 bp, Artificial Sequence
  chemically synthesized
caaagcagccaatgatttac

SEQ ID NO: 618 - DNA, 20 bp, Artificial Sequence
  chemically synthesized
aagcagccaatgatttacaa

SEQ ID NO: 619 - DNA, 20 bp, Artificial Sequence
  chemically synthesized
agcagccaatgatttacaag

SEQ ID NO: 620 - DNA, 20 bp, Artificial Sequence
  chemically synthesized
aagaggcgaacaaatctctg

SEQ ID NO: 621 - DNA, 20 bp, Artificial Sequence
  chemically synthesized
gaggcgaacaaatctctgaa

SEQ ID NO: 622 - DNA, 20 bp, Artificial Sequence
  chemically synthesized
caaatctctgaagagaaaac

SEQ ID NO: 623 - DNA, 20 bp, Artificial Sequence
  chemically synthesized
aagagaaaaccagaacccaa

SEQ ID NO: 624 - DNA, 20 bp, Artificial Sequence
  chemically synthesized
gagaaaaccagaacccaaaa

SEQ ID NO: 625 - DNA, 20 bp, Artificial Sequence
  chemically synthesized
attgcaccaaaaactgcctg

SEQ ID NO: 626 - DNA, 20 bp, Artificial Sequence
  chemically synthesized
tgtagtttctttcaaacatg

SEQ ID NO: 627 - DNA, 20 bp, Artificial Sequence
  chemically synthesized
tgcagttttcttttcttttt

SEQ ID NO: 628 - DNA, 20 bp, Artificial Sequence
  chemically synthesized
agttttcttttcttttttgg

SEQ ID NO: 629 - DNA, 20 bp, Artificial Sequence
  chemically synthesized
gttttcttttcttttttgga

SEQ ID NO: 630 - DNA, 20 bp, Artificial Sequence
  chemically synthesized
ttttcttttcttttttggaa

SEQ ID NO: 631 - DNA, 20 bp, Artificial Sequence
  chemically synthesized
tttcttttcttttttggaag

SEQ ID NO: 632 - DNA, 20 bp, Artificial Sequence
  chemically synthesized
ttcttttcttttttggaagg

SEQ ID NO: 633 - DNA, 20 bp, Artificial Sequence
  chemically synthesized
ttttcttttttggaaggggg

SEQ ID NO: 634 - DNA, 20 bp, Artificial Sequence
  chemically synthesized
tttcttttttggaaggggga

SEQ ID NO: 635 - DNA, 20 bp, Artificial Sequence
  chemically synthesized
ttttggaagggggaaggcaa

SEQ ID NO: 636 - DNA, 20 bp, Artificial Sequence
  chemically synthesized
gaagggggaaggcaatggtg

SEQ ID NO: 637 - DNA, 20 bp, Artificial Sequence
  chemically synthesized
aagggggaaggcaatggtga

SEQ ID NO: 638 - DNA, 20 bp, Artificial Sequence
  chemically synthesized
agggggaaggcaatggtgaa

SEQ ID NO: 639 - DNA, 20 bp, Artificial Sequence
  chemically synthesized
gggaaggcaatggtgaaggg

SEQ ID NO: 640 - DNA, 20 bp, Artificial Sequence
  chemically synthesized
aaggcaatggtgaagggaag

SEQ ID NO: 641 - DNA, 20 bp, Artificial Sequence
  chemically synthesized
aggcaatggtgaagggaaga

SEQ ID NO: 642 - DNA, 20 bp, Artificial Sequence
  chemically synthesized
ggcaatggtgaagggaagaa

SEQ ID NO: 643 - DNA, 20 bp, Artificial Sequence
  chemically synthesized
caatggtgaagggaagaagg

SEQ ID NO: 644 - DNA, 20 bp, Artificial Sequence
  chemically synthesized
tggtgaagggaagaagggag

SEQ ID NO: 645 - DNA, 20 bp, Artificial Sequence
  chemically synthesized
agggagtggttattttcctc

SEQ ID NO: 646 - DNA, 20 bp, Artificial Sequence
  chemically synthesized
gggagtggttattttcctcc

SEQ ID NO: 647 - DNA, 20 bp, Artificial Sequence
  chemically synthesized
ggagtggttattttcctccg

SEQ ID NO: 648 - DNA, 20 bp, Artificial Sequence
  chemically synthesized
ccggggttcctcccttgctg

SEQ ID NO: 649 - DNA, 20 bp, Artificial Sequence
  chemically synthesized
ttgctgtggacattgacttg

SEQ ID NO: 650 - DNA, 20 bp, Artificial Sequence
  chemically synthesized
ctgtggacattgacttgaag

SEQ ID NO: 651 - DNA, 20 bp, Artificial Sequence
  chemically synthesized
tggacattgacttgaagcag

SEQ ID NO: 652 - DNA, 20 bp, Artificial Sequence
  chemically synthesized
ttgacttgaagcagcagaac

SEQ ID NO: 653 - DNA, 20 bp, Artificial Sequence
  chemically synthesized
tgacttgaagcagcagaact

SEQ ID NO: 654 - DNA, 20 bp, Artificial Sequence
  chemically synthesized
acttgaagcagcagaactgg

SEQ ID NO: 655 - DNA, 20 bp, Artificial Sequence
  chemically synthesized
aagcagcagaactgggagtc

SEQ ID NO: 656 - DNA, 20 bp, Artificial Sequence
  chemically synthesized
actgggagtccggatgtgcc

SEQ ID NO: 657 - DNA, 20 bp, Artificial Sequence
  chemically synthesized
ctgggagtccggatgtgccg

SEQ ID NO: 658 - DNA, 20 bp, Artificial Sequence
  chemically synthesized
ggagtccggatgtgccgagg

SEQ ID NO: 659 - DNA, 20 bp, Artificial Sequence
  chemically synthesized
agtccggatgtgccgaggaa

SEQ ID NO: 660 - DNA, 20 bp, Artificial Sequence
  chemically synthesized
gtccggatgtgccgaggaag

SEQ ID NO: 661 - DNA, 20 bp, Artificial Sequence
  chemically synthesized
tccggatgtgccgaggaaga

SEQ ID NO: 662 - DNA, 20 bp, Artificial Sequence
  chemically synthesized
gaggaagagggctaccactg

SEQ ID NO: 663 - DNA, 20 bp, Artificial Sequence
  chemically synthesized
gggctaccactgtggcattc

SEQ ID NO: 664 - DNA, 20 bp, Artificial Sequence
  chemically synthesized
ggctaccactgtggcattcc

SEQ ID NO: 665 - DNA, 20 bp, Artificial Sequence
  chemically synthesized
cattccaggcctcgttgcca

SEQ ID NO: 666 - DNA, 20 bp, Artificial Sequence
  chemically synthesized
ctcgttgccatggcgacccg

SEQ ID NO: 667 - DNA, 20 bp, Artificial Sequence
  chemically synthesized
gttgccatggcgacccgaag

SEQ ID NO: 668 - DNA, 20 bp, Artificial Sequence
  chemically synthesized
ttgccatggcgacccgaagc

SEQ ID NO: 669 - DNA, 20 bp, Artificial Sequence
  chemically synthesized
tgccatggcgacccgaagca

SEQ ID NO: 670 - DNA, 20 bp, Artificial Sequence
  chemically synthesized
gccatggcgacccgaagcag

SEQ ID NO: 671 - DNA, 20 bp, Artificial Sequence
  chemically synthesized
ggcgacccgaagcaggggcc

SEQ ID NO: 672 - DNA, 20 bp, Artificial Sequence
  chemically synthesized
gcgacccgaagcaggggcct

SEQ ID NO: 673 - DNA, 20 bp, Artificial Sequence
  chemically synthesized
cgacccgaagcaggggcctg

SEQ ID NO: 674 - DNA, 20 bp, Artificial Sequence
  chemically synthesized
gggcctcctctcccctgact

SEQ ID NO: 675 - DNA, 20 bp, Artificial Sequence
  chemically synthesized
tctcccctgacttggcgccg

SEQ ID NO: 676 - DNA, 20 bp, Artificial Sequence
  chemically synthesized
ctcccctgacttggcgccgc

SEQ ID NO: 677 - DNA, 20 bp, Artificial Sequence
  chemically synthesized
cccctgacttggcgccgcag

SEQ ID NO: 678 - DNA, 20 bp, Artificial Sequence
  chemically synthesized
ccctgacttggcgccgcagg

SEQ ID NO: 679 - DNA, 20 bp, Artificial Sequence
  chemically synthesized
acttggcgccgcaggaggcc

SEQ ID NO: 680 - DNA, 20 bp, Artificial Sequence
  chemically synthesized
cttggcgccgcaggaggccc

SEQ ID NO: 681 - DNA, 20 bp, Artificial Sequence
  chemically synthesized
ttggcgccgcaggaggcccg

SEQ ID NO: 682 - DNA, 20 bp, Artificial Sequence
  chemically synthesized
gccgcaggaggcccggggtc

SEQ ID NO: 683 - DNA, 20 bp, Artificial Sequence
  chemically synthesized
gaggcccggggtctggatct

SEQ ID NO: 684 - DNA, 20 bp, Artificial Sequence
  chemically synthesized
ctctcacgcatcccacccct

SEQ ID NO: 685 - DNA, 20 bp, Artificial Sequence
  chemically synthesized
tcacgcatcccacccctgag

SEQ ID NO: 686 - DNA, 20 bp, Artificial Sequence
  chemically synthesized
acgcatcccacccctgagca

SEQ ID NO: 687 - DNA, 20 bp, Artificial Sequence
  chemically synthesized
catcccacccctgagcagag

SEQ ID NO: 688 - DNA, 20 bp, Artificial Sequence
  chemically synthesized
cccacccctgagcagagcag

SEQ ID NO: 689 - DNA, 20 bp, Artificial Sequence
  chemically synthesized
cacccctgagcagagcagcg

SEQ ID NO: 690 - DNA, 20 bp, Artificial Sequence
  chemically synthesized
tgagcagagcagcggagacc

SEQ ID NO: 691 - DNA, 20 bp, Artificial Sequence
  chemically synthesized
gagcagagcagcggagacct

SEQ ID NO: 692 - DNA, 20 bp, Artificial Sequence
  chemically synthesized
gagcagcggagacctgggct

SEQ ID NO: 693 - DNA, 20 bp, Artificial Sequence
  chemically synthesized
agcagcggagacctgggctg

SEQ ID NO: 694 - DNA, 20 bp, Artificial Sequence
  chemically synthesized
gcagcggagacctgggctga

SEQ ID NO: 695 - DNA, 20 bp, Artificial Sequence
  chemically synthesized
cagcggagacctgggctgag

SEQ ID NO: 696 - DNA, 20 bp, Artificial Sequence
  chemically synthesized
gctgaggggcatgctgcgtc

SEQ ID NO: 697 - DNA, 20 bp, Artificial Sequence
  chemically synthesized
ctgaggggcatgctgcgtcc

SEQ ID NO: 698 - DNA, 20 bp, Artificial Sequence
  chemically synthesized
aggggcatgctgcgtccagg

SEQ ID NO: 699 - DNA, 20 bp, Artificial Sequence
  chemically synthesized
ggggcatgctgcgtccaggt

SEQ ID NO: 700 - DNA, 20 bp, Artificial Sequence
  chemically synthesized
tgctgcgtccaggtgggttc

SEQ ID NO: 701 - DNA, 20 bp, Artificial Sequence
  chemically synthesized
gctgcgtccaggtgggttct

SEQ ID NO: 702 - DNA, 20 bp, Artificial Sequence
  chemically synthesized
ctgcgtccaggtgggttctg

SEQ ID NO: 703 - DNA, 20 bp, Artificial Sequence
  chemically synthesized
gttctggggaatcccattcc

SEQ ID NO: 704 - DNA, 20 bp, Artificial Sequence
  chemically synthesized
ggggaatcccattcccagtc

SEQ ID NO: 705 - DNA, 20 bp, Artificial Sequence
  chemically synthesized
cccattcccagtccagcgct

SEQ ID NO: 706 - DNA, 20 bp, Artificial Sequence
  chemically synthesized
agcgctaagtcactgtcgtc

SEQ ID NO: 707 - DNA, 20 bp, Artificial Sequence
  chemically synthesized
gcgctaagtcactgtcgtcg

SEQ ID NO: 708 - DNA, 20 bp, Artificial Sequence
  chemically synthesized
cactgtcgtcgaggcccctt

SEQ ID NO: 709 - DNA, 20 bp, Artificial Sequence
  chemically synthesized
taccaatattcaaattctaa

SEQ ID NO: 710 - DNA, 20 bp, Artificial Sequence
  chemically synthesized
tattcaaattctaatagaca

SEQ ID NO: 711 - DNA, 20 bp, Artificial Sequence
  chemically synthesized
ctaatagacaaagtatatca

SEQ ID NO: 712 - DNA, 20 bp, Artificial Sequence
  chemically synthesized
taatagacaaagtatatcat

SEQ ID NO: 713 - DNA, 20 bp, Artificial Sequence
  chemically synthesized
atgggcatgtaccacgttca

SEQ ID NO: 714 - DNA, 20 bp, Artificial Sequence
  chemically synthesized
ccacgttcacagctatttaa

SEQ ID NO: 715 - DNA, 20 bp, Artificial Sequence
  chemically synthesized
ttcacagctatttaaaagca

SEQ ID NO: 716 - DNA, 20 bp, Artificial Sequence
  chemically synthesized
ttaaaagcacagccccccta

SEQ ID NO: 717 - DNA, 20 bp, Artificial Sequence
  chemically synthesized
taaaagcacagcccccctat

SEQ ID NO: 718 - DNA, 20 bp, Artificial Sequence
  chemically synthesized
gcacagcccccctatgggtt

SEQ ID NO: 719 - DNA, 20 bp, Artificial Sequence
  chemically synthesized
cacagcccccctatgggttt

SEQ ID NO: 720 - DNA, 20 bp, Artificial Sequence
  chemically synthesized
acagcccccctatgggttta

SEQ ID NO: 721 - DNA, 20 bp, Artificial Sequence
  chemically synthesized
cagcccccctatgggtttag

SEQ ID NO: 722 - DNA, 20 bp, Artificial Sequence
  chemically synthesized
gggtttaggggctcccgctt

SEQ ID NO: 723 - DNA, 20 bp, Artificial Sequence
  chemically synthesized
gtttaggggctcccgcttta

SEQ ID NO: 724 - DNA, 20 bp, Artificial Sequence
  chemically synthesized
tttaggggctcccgctttag

SEQ ID NO: 725 - DNA, 20 bp, Artificial Sequence
  chemically synthesized
ctcccgctttagaggatact

SEQ ID NO: 726 - DNA, 20 bp, Artificial Sequence
  chemically synthesized
tcccgctttagaggatactt

SEQ ID NO: 727 - DNA, 20 bp, Artificial Sequence
  chemically synthesized
cccgctttagaggatacttg

SEQ ID NO: 728 - DNA, 20 bp, Artificial Sequence
  chemically synthesized
ttagaggatacttggggaaa

SEQ ID NO: 729 - DNA, 20 bp, Artificial Sequence
  chemically synthesized
cttttctaccatccctatga

SEQ ID NO: 730 - DNA, 20 bp, Artificial Sequence
  chemically synthesized
atacacgtgctcccttgaaa

SEQ ID NO: 731 - DNA, 20 bp, Artificial Sequence
  chemically synthesized
aaatagtttttgccacttta

SEQ ID NO: 732 - DNA, 20 bp, Artificial Sequence
  chemically synthesized
agtttttgccactttacaga

SEQ ID NO: 733 - DNA, 20 bp, Artificial Sequence
  chemically synthesized
gtttttgccactttacagaa

SEQ ID NO: 734 - DNA, 20 bp, Artificial Sequence
  chemically synthesized
acagaaaggaaaaacgtatt

SEQ ID NO: 735 - DNA, 20 bp, Artificial Sequence
  chemically synthesized
acgtatttggatcaaccatc

SEQ ID NO: 736 - DNA, 20 bp, Artificial Sequence
  chemically synthesized
atcaaccatcgagctgtgtt

SEQ ID NO: 737 - DNA, 20 bp, Artificial Sequence
  chemically synthesized
ccatcgagctgtgttcagcc

SEQ ID NO: 738 - DNA, 20 bp, Artificial Sequence
  chemically synthesized
gagctgtgttcagccaagtt

SEQ ID NO: 739 - DNA, 20 bp, Artificial Sequence
  chemically synthesized
agctgtgttcagccaagttt

SEQ ID NO: 740 - DNA, 20 bp, Artificial Sequence
  chemically synthesized
tcagccaagtttaggttctc

SEQ ID NO: 741 - DNA, 20 bp, Artificial Sequence
  chemically synthesized
gtacaatgacccgtgtgaac

SEQ ID NO: 742 - DNA, 20 bp, Artificial Sequence
  chemically synthesized
atgacccgtgtgaactggat

SEQ ID NO: 743 - DNA, 20 bp, Artificial Sequence
  chemically synthesized
ggattggtctctttcccatt

SEQ ID NO: 744 - DNA, 20 bp, Artificial Sequence
  chemically synthesized
ttggtctctttcccatttgg

SEQ ID NO: 745 - DNA, 20 bp, Artificial Sequence
  chemically synthesized
tggtctctttcccatttgga

SEQ ID NO: 746 - DNA, 20 bp, Artificial Sequence
  chemically synthesized
ggtctctttcccatttggaa

SEQ ID NO: 747 - DNA, 20 bp, Artificial Sequence
  chemically synthesized
tctctttcccatttggaagg

SEQ ID NO: 748 - DNA, 20 bp, Artificial Sequence
  chemically synthesized
ctctttcccatttggaaggg

SEQ ID NO: 749 - DNA, 20 bp, Artificial Sequence
  chemically synthesized
atttggaagggaggaattaa

SEQ ID NO: 750 - DNA, 20 bp, Artificial Sequence
  chemically synthesized
ttaatggtatcccatgaccg

SEQ ID NO: 751 - DNA, 20 bp, Artificial Sequence
  chemically synthesized
cccatgaccgtagatgacgc

SEQ ID NO: 752 - DNA, 20 bp, Artificial Sequence
  chemically synthesized
ccatgaccgtagatgacgct

SEQ ID NO: 753 - DNA, 20 bp, Artificial Sequence
  chemically synthesized
ccgtagatgacgctgggaaa

SEQ ID NO: 754 - DNA, 20 bp, Artificial Sequence
  chemically synthesized
gtagatgacgctgggaaata

SEQ ID NO: 755 - DNA, 20 bp, Artificial Sequence
  chemically synthesized
agatgacgctgggaaataga

SEQ ID NO: 756 - DNA, 20 bp, Artificial Sequence
  chemically synthesized
atgacgctgggaaatagaga

SEQ ID NO: 757 - DNA, 20 bp, Artificial Sequence
  chemically synthesized
gacgctgggaaatagagaga

SEQ ID NO: 758 - DNA, 20 bp, Artificial Sequence
  chemically synthesized
ctgggaaatagagagagaga

SEQ ID NO: 759 - DNA, 20 bp, Artificial Sequence
  chemically synthesized
gggaaatagagagagagaaa

SEQ ID NO: 760 - DNA, 20 bp, Artificial Sequence
  chemically synthesized
gaaatagagagagagaaaga

SEQ ID NO: 761 - DNA, 20 bp, Artificial Sequence
  chemically synthesized
aatagagagagagaaagaga

SEQ ID NO: 762 - DNA, 20 bp, Artificial Sequence
  chemically synthesized
tagagagagagaaagagaga

SEQ ID NO: 763 - DNA, 20 bp, Artificial Sequence
  chemically synthesized
gagagagagaaagagagaga

SEQ ID NO: 764 - DNA, 20 bp, Artificial Sequence
  chemically synthesized
gagagagaaagagagagaga

SEQ ID NO: 765 - DNA, 20 bp, Artificial Sequence
  chemically synthesized
gagagaaagagagagagaga

SEQ ID NO: 766 - DNA, 20 bp, Artificial Sequence
  chemically synthesized
gagaaagagagagagagaga

SEQ ID NO: 767 - DNA, 20 bp, Artificial Sequence
  chemically synthesized
gagagagagagagagagaaa

SEQ ID NO: 768 - DNA, 20 bp, Artificial Sequence
  chemically synthesized
gaaacagccccattccccta

SEQ ID NO: 769 - DNA, 20 bp, Artificial Sequence
  chemically synthesized
aaacagccccattcccctaa

SEQ ID NO: 770 - DNA, 20 bp, Artificial Sequence
  chemically synthesized
gccccattcccctaaaggct

SEQ ID NO: 771 - DNA, 20 bp, Artificial Sequence
  chemically synthesized
tcccctaaaggctgagtcac

SEQ ID NO: 772 - DNA, 20 bp, Artificial Sequence
  chemically synthesized
cactggcctcgtgctgtatg

SEQ ID NO: 773 - DNA, 20 bp, Artificial Sequence
  chemically synthesized
gctgtatgtagtaaattaaa

SEQ ID NO: 774 - DNA, 20 bp, Artificial Sequence
  chemically synthesized
gtatgtagtaaattaaacag

SEQ ID NO: 775 - DNA, 20 bp, Artificial Sequence
  chemically synthesized
tatgtagtaaattaaacagc

SEQ ID NO: 776 - DNA, 20 bp, Artificial Sequence
  chemically synthesized
taaattaaacagcgggctaa

SEQ ID NO: 777 - DNA, 20 bp, Artificial Sequence
  chemically synthesized
aaattaaacagcgggctaat

SEQ ID NO: 778 - DNA, 20 bp, Artificial Sequence
  chemically synthesized
cagcgggctaatgggataac

SEQ ID NO: 779 - DNA, 20 bp, Artificial Sequence
  chemically synthesized
ctaatgggataacgagatgc

SEQ ID NO: 780 - DNA, 20 bp, Artificial Sequence
  chemically synthesized
tgggataacgagatgccagc

SEQ ID NO: 781 - DNA, 20 bp, Artificial Sequence
  chemically synthesized
gataacgagatgccagcaag

SEQ ID NO: 782 - DNA, 20 bp, Artificial Sequence
  chemically synthesized
aacgagatgccagcaagcag

SEQ ID NO: 783 - DNA, 20 bp, Artificial Sequence
  chemically synthesized
gatgccagcaagcagaagtg

SEQ ID NO: 784 - DNA, 20 bp, Artificial Sequence
  chemically synthesized
cagcaagcagaagtgcagac

SEQ ID NO: 785 - DNA, 20 bp, Artificial Sequence
  chemically synthesized
gaccggacaacccatgtcca

SEQ ID NO: 786 - DNA, 20 bp, Artificial Sequence
  chemically synthesized
caacccatgtccacagttca

SEQ ID NO: 787 - DNA, 20 bp, Artificial Sequence
  chemically synthesized
atgtccacagttcatagcta

SEQ ID NO: 788 - DNA, 20 bp, Artificial Sequence
  chemically synthesized
tccacagttcatagctatag

SEQ ID NO: 789 - DNA, 20 bp, Artificial Sequence
  chemically synthesized
gttcatagctatagcagccc

SEQ ID NO: 790 - DNA, 20 bp, Artificial Sequence
  chemically synthesized
tcatagctatagcagcccta

SEQ ID NO: 791 - DNA, 20 bp, Artificial Sequence
  chemically synthesized
gatgtccatttctctaacaa

SEQ ID NO: 792 - DNA, 20 bp, Artificial Sequence
  chemically synthesized
atgtccatttctctaacaat

SEQ ID NO: 793 - DNA, 20 bp, Artificial Sequence
  chemically synthesized
tgggttcgtttattttctat

SEQ ID NO: 794 - DNA, 20 bp, Artificial Sequence
  chemically synthesized
gggttcgtttattttctatt

SEQ ID NO: 795 - DNA, 20 bp, Artificial Sequence
  chemically synthesized
attttctattgggaaatatg

SEQ ID NO: 796 - DNA, 20 bp, Artificial Sequence
  chemically synthesized
ttttctattgggaaatatgc

SEQ ID NO: 797 - DNA, 20 bp, Artificial Sequence
  chemically synthesized
tttctattgggaaatatgca

SEQ ID NO: 798 - DNA, 20 bp, Artificial Sequence
  chemically synthesized
ttgggaaatatgcagggctt

SEQ ID NO: 799 - DNA, 20 bp, Artificial Sequence
  chemically synthesized
tgggaaatatgcagggcttt

SEQ ID NO: 800 - DNA, 20 bp, Artificial Sequence
  chemically synthesized
ggaaatatgcagggctttag

SEQ ID NO: 801 - DNA, 20 bp, Artificial Sequence
  chemically synthesized
gcagggctttaggagacaac

SEQ ID NO: 802 - DNA, 20 bp, Artificial Sequence
  chemically synthesized
cagggctttaggagacaact

SEQ ID NO: 803 - DNA, 20 bp, Artificial Sequence
  chemically synthesized
agacaactaggaaaatctgc

SEQ ID NO: 804 - DNA, 20 bp, Artificial Sequence
  chemically synthesized
aactaggaaaatctgctaga

SEQ ID NO: 805 - DNA, 20 bp, Artificial Sequence
  chemically synthesized
agatggctcatgccttttaa

SEQ ID NO: 806 - DNA, 20 bp, Artificial Sequence
  chemically synthesized
ggctcatgccttttaaaagt

SEQ ID NO: 807 - DNA, 20 bp, Artificial Sequence
  chemically synthesized
tcatgccttttaaaagttag

SEQ ID NO: 808 - DNA, 20 bp, Artificial Sequence
  chemically synthesized
ttaaaagttagcagtctttt

SEQ ID NO: 809 - DNA, 20 bp, Artificial Sequence
  chemically synthesized
cttttaagaaacatttttcc

SEQ ID NO: 810 - DNA, 20 bp, Artificial Sequence
  chemically synthesized
ttaagaaacatttttccaag

SEQ ID NO: 811 - DNA, 20 bp, Artificial Sequence
  chemically synthesized
taagaaacatttttccaagc

SEQ ID NO: 812 - DNA, 20 bp, Artificial Sequence
  chemically synthesized
aacatttttccaagcaggtt

SEQ ID NO: 813 - DNA, 20 bp, Artificial Sequence
  chemically synthesized
catttttccaagcaggttga

SEQ ID NO: 814 - DNA, 20 bp, Artificial Sequence
  chemically synthesized
tgccaatcccatcctcatat

SEQ ID NO: 815 - DNA, 20 bp, Artificial Sequence
  chemically synthesized
atcccatcctcatatcggca

SEQ ID NO: 816 - DNA, 20 bp, Artificial Sequence
  chemically synthesized
ttcccacaatttttttttta

SEQ ID NO: 817 - DNA, 20 bp, Artificial Sequence
  chemically synthesized
tcccacaattttttttttat

SEQ ID NO: 818 - DNA, 20 bp, Artificial Sequence
  chemically synthesized
cacaattttttttttatggg

SEQ ID NO: 819 - DNA, 20 bp, Artificial Sequence
  chemically synthesized
atgggaagttgtctgaaaaa

SEQ ID NO: 820 - DNA, 20 bp, Artificial Sequence
  chemically synthesized
gggaagttgtctgaaaaaaa

SEQ ID NO: 821 - DNA, 20 bp, Artificial Sequence
  chemically synthesized
gttgtctgaaaaaaagagaa

SEQ ID NO: 822 - DNA, 20 bp, Artificial Sequence
  chemically synthesized
ttgtctgaaaaaaagagaat

SEQ ID NO: 823 - DNA, 20 bp, Artificial Sequence
  chemically synthesized
ctgaaaaaaagagaatggga

SEQ ID NO: 824 - DNA, 20 bp, Artificial Sequence
  chemically synthesized
tgaaaaaaagagaatgggat

SEQ ID NO: 825 - DNA, 20 bp, Artificial Sequence
  chemically synthesized
gggtacattcctgaacacac

SEQ ID NO: 826 - DNA, 20 bp, Artificial Sequence
  chemically synthesized
ggtacattcctgaacacacc

SEQ ID NO: 827 - DNA, 20 bp, Artificial Sequence
  chemically synthesized
attcctgaacacaccaggcc

SEQ ID NO: 828 - DNA, 20 bp, Artificial Sequence
  chemically synthesized
ttcctgaacacaccaggccc

SEQ ID NO: 829 - DNA, 20 bp, Artificial Sequence
  chemically synthesized
tcctgaacacaccaggccca

SEQ ID NO: 830 - DNA, 20 bp, Artificial Sequence
  chemically synthesized
cacaccaggcccagggacaa

SEQ ID NO: 831 - DNA, 20 bp, Artificial Sequence
  chemically synthesized
caccaggcccagggacaatg

SEQ ID NO: 832 - DNA, 20 bp, Artificial Sequence
  chemically synthesized
gcccagggacaatggagtaa

SEQ ID NO: 833 - DNA, 20 bp, Artificial Sequence
  chemically synthesized
tggagtaacagaatcgtaat

SEQ ID NO: 834 - DNA, 20 bp, Artificial Sequence
  chemically synthesized
ggagtaacagaatcgtaatg

SEQ ID NO: 835 - DNA, 20 bp, Artificial Sequence
  chemically synthesized
gaatcgtaatgaggaacaca

SEQ ID NO: 836 - DNA, 20 bp, Artificial Sequence
  chemically synthesized
aggaacacacagttacaaca

SEQ ID NO: 837 - DNA, 20 bp, Artificial Sequence
  chemically synthesized
cacagttacaacacagtcat

SEQ ID NO: 838 - DNA, 20 bp, Artificial Sequence
  chemically synthesized
agttacaacacagtcataag

SEQ ID NO: 839 - DNA, 20 bp, Artificial Sequence
  chemically synthesized
aagtcatgttcatgtgtgta

SEQ ID NO: 840 - DNA, 20 bp, Artificial Sequence
  chemically synthesized
gtcatgttcatgtgtgtacg

SEQ ID NO: 841 - DNA, 20 bp, Artificial Sequence
  chemically synthesized
tcatgttcatgtgtgtacgg

SEQ ID NO: 842 - DNA, 20 bp, Artificial Sequence
  chemically synthesized
catgttcatgtgtgtacgga

SEQ ID NO: 843 - DNA, 20 bp, Artificial Sequence
  chemically synthesized
atgttcatgtgtgtacggag

SEQ ID NO: 844 - DNA, 20 bp, Artificial Sequence
  chemically synthesized
tgttcatgtgtgtacggagg

SEQ ID NO: 845 - DNA, 20 bp, Artificial Sequence
  chemically synthesized
atgtgtgtacggagggggaa

SEQ ID NO: 846 - DNA, 20 bp, Artificial Sequence
  chemically synthesized
gtgtgtacggagggggaaaa

SEQ ID NO: 847 - DNA, 20 bp, Artificial Sequence
  chemically synthesized
tgtgtacggagggggaaaag

SEQ ID NO: 848 - DNA, 20 bp, Artificial Sequence
  chemically synthesized
ggggaaaagaggcttaaaac

SEQ ID NO: 849 - DNA, 20 bp, Artificial Sequence
  chemically synthesized
aaacactgtatttcctccct

SEQ ID NO: 850 - DNA, 20 bp, Artificial Sequence
  chemically synthesized
tttcctccctcagtctctgt

SEQ ID NO: 851 - DNA, 20 bp, Artificial Sequence
  chemically synthesized
tccctcagtctctgtgagca

SEQ ID NO: 852 - DNA, 20 bp, Artificial Sequence
  chemically synthesized
ctctgtgagcaaagtactac

SEQ ID NO: 853 - DNA, 20 bp, Artificial Sequence
  chemically synthesized
tgtgagcaaagtactacaag

SEQ ID NO: 854 - DNA, 20 bp, Artificial Sequence
  chemically synthesized
gtgagcaaagtactacaagc

SEQ ID NO: 855 - DNA, 20 bp, Artificial Sequence
  chemically synthesized
gagcaaagtactacaagcag

SEQ ID NO: 856 - DNA, 20 bp, Artificial Sequence
  chemically synthesized
gcaaagtactacaagcagga

SEQ ID NO: 857 - DNA, 20 bp, Artificial Sequence
  chemically synthesized
caaagtactacaagcaggag

SEQ ID NO: 858 - DNA, 20 bp, Artificial Sequence
  chemically synthesized
gtactacaagcaggagagga

SEQ ID NO: 859 - DNA, 20 bp, Artificial Sequence
  chemically synthesized
tactacaagcaggagaggat

SEQ ID NO: 860 - DNA, 20 bp, Artificial Sequence
  chemically synthesized
actacaagcaggagaggatg

SEQ ID NO: 861 - DNA, 20 bp, Artificial Sequence
  chemically synthesized
agcaggagaggatggggcct

SEQ ID NO: 862 - DNA, 20 bp, Artificial Sequence
  chemically synthesized
gcaggagaggatggggcctg

SEQ ID NO: 863 - DNA, 20 bp, Artificial Sequence
  chemically synthesized
gaggcttctcaactcctttt

SEQ ID NO: 864 - DNA, 20 bp, Artificial Sequence
  chemically synthesized
aggcttctcaactccttttc

SEQ ID NO: 865 - DNA, 20 bp, Artificial Sequence
  chemically synthesized
cttctcaactccttttcagg

SEQ ID NO: 866 - DNA, 20 bp, Artificial Sequence
  chemically synthesized
ttctcaactccttttcagga

SEQ ID NO: 867 - DNA, 20 bp, Artificial Sequence
  chemically synthesized
aggaaggcccgaaataatcc

SEQ ID NO: 868 - DNA, 20 bp, Artificial Sequence
  chemically synthesized
gaaataatcccagtaccttt

SEQ ID NO: 869 - DNA, 20 bp, Artificial Sequence
  chemically synthesized
catttccttatttctccaat

SEQ ID NO: 870 - DNA, 20 bp, Artificial Sequence
  chemically synthesized
ctccaattggaattatacct

SEQ ID NO: 871 - DNA, 20 bp, Artificial Sequence
  chemically synthesized
atctcccgccacttcctttc

SEQ ID NO: 872 - DNA, 20 bp, Artificial Sequence
  chemically synthesized
tcctttcaagttctcacttc

SEQ ID NO: 873 - DNA, 20 bp, Artificial Sequence
  chemically synthesized
acttattgcatatacaaaaa

SEQ ID NO: 874 - DNA, 20 bp, Artificial Sequence
  chemically synthesized
aaaaatggtatttaaataaa

SEQ ID NO: 875 - DNA, 20 bp, Artificial Sequence
  chemically synthesized
aataaacagttctatatcta

SEQ ID NO: 876 - DNA, 20 bp, Artificial Sequence
  chemically synthesized
tctatatctacagaatgccc

SEQ ID NO: 877 - DNA, 20 bp, Artificial Sequence
  chemically synthesized
ctatatctacagaatgccct

SEQ ID NO: 878 - DNA, 20 bp, Artificial Sequence
  chemically synthesized
ctacttcacactttctgcca

SEQ ID NO: 879 - DNA, 20 bp, Artificial Sequence
  chemically synthesized
ttcacactttctgccatggc

SEQ ID NO: 880 - DNA, 20 bp, Artificial Sequence
  chemically synthesized
tgccatggccagtgcaaatg

SEQ ID NO: 881 - DNA, 20 bp, Artificial Sequence
  chemically synthesized
actgtgttcacctcacttct

SEQ ID NO: 882 - DNA, 20 bp, Artificial Sequence
  chemically synthesized
tagcaacctttgtaatgtgt

SEQ ID NO: 883 - DNA, 20 bp, Artificial Sequence
  chemically synthesized
cctttgtaatgtgttggttc

SEQ ID NO: 884 - DNA, 20 bp, Artificial Sequence
  chemically synthesized
tgttggttccagcctttttg

SEQ ID NO: 885 - DNA, 20 bp, Artificial Sequence
  chemically synthesized
gttggttccagcctttttgt

SEQ ID NO: 886 - DNA, 20 bp, Artificial Sequence
  chemically synthesized
ctttttgtaggtcctaaaca

SEQ ID NO: 887 - DNA, 20 bp, Artificial Sequence
  chemically synthesized
ttttgtaggtcctaaacaaa

SEQ ID NO: 888 - DNA, 20 bp, Artificial Sequence
  chemically synthesized
ttgtaggtcctaaacaaaga

SEQ ID NO: 889 - DNA, 20 bp, Artificial Sequence
  chemically synthesized
tgtaggtcctaaacaaagag

SEQ ID NO: 890 - DNA, 20 bp, Artificial Sequence
  chemically synthesized
ggtcctaaacaaagagagga

SEQ ID NO: 891 - DNA, 20 bp, Artificial Sequence
  chemically synthesized
aacaaagagaggatagcaaa

SEQ ID NO: 892 - DNA, 20 bp, Artificial Sequence
  chemically synthesized
acaaagagaggatagcaaat

SEQ ID NO: 893 - DNA, 20 bp, Artificial Sequence
  chemically synthesized
gagaggatagcaaatgggtt

SEQ ID NO: 894 - DNA, 20 bp, Artificial Sequence
  chemically synthesized
agaggatagcaaatgggttc

SEQ ID NO: 895 - DNA, 20 bp, Artificial Sequence
  chemically synthesized
ggatagcaaatgggttcagg

SEQ ID NO: 896 - DNA, 20 bp, Artificial Sequence
  chemically synthesized
gatagcaaatgggttcagga

SEQ ID NO: 897 - DNA, 20 bp, Artificial Sequence
  chemically synthesized
tagcaaatgggttcaggaag

SEQ ID NO: 898 - DNA, 20 bp, Artificial Sequence
  chemically synthesized
agcaaatgggttcaggaagg

SEQ ID NO: 899 - DNA, 20 bp, Artificial Sequence
  chemically synthesized
ggttcaggaaggaggtaata

SEQ ID NO: 900 - DNA, 20 bp, Artificial Sequence
  chemically synthesized
gttcaggaaggaggtaatat

SEQ ID NO: 901 - DNA, 20 bp, Artificial Sequence
  chemically synthesized
gaaggaggtaatataggcac

SEQ ID NO: 902 - DNA, 20 bp, Artificial Sequence
  chemically synthesized
ggaggtaatataggcactgg

SEQ ID NO: 903 - DNA, 20 bp, Artificial Sequence
  chemically synthesized
aggtaatataggcactggaa

SEQ ID NO: 904 - DNA, 20 bp, Artificial Sequence
  chemically synthesized
ataggcactggaagagtttc

SEQ ID NO: 905 - DNA, 20 bp, Artificial Sequence
  chemically synthesized
gtttctggtttaaaatctgt

SEQ ID NO: 906 - DNA, 20 bp, Artificial Sequence
  chemically synthesized
ggtttaaaatctgtgagaaa

SEQ ID NO: 907 - DNA, 20 bp, Artificial Sequence
  chemically synthesized
tctgtgagaaatagaatttg

SEQ ID NO: 908 - DNA, 20 bp, Artificial Sequence
  chemically synthesized
ttgcggtattcctgtttatt

SEQ ID NO: 909 - DNA, 20 bp, Artificial Sequence
  chemically synthesized
tattaagttgttctcaaatg

SEQ ID NO: 910 - DNA, 20 bp, Artificial Sequence
  chemically synthesized
gttctcaaatgaagattaaa

SEQ ID NO: 911 - DNA, 20 bp, Artificial Sequence
  chemically synthesized
aagattaaaaagaacatttt

SEQ ID NO: 912 - DNA, 20 bp, Artificial Sequence
  chemically synthesized
aaaaagaacattttaagcat

SEQ ID NO: 913 - DNA, 20 bp, Artificial Sequence
  chemically synthesized
gaacattttaagcatcagtt

SEQ ID NO: 914 - DNA, 20 bp, Artificial Sequence
  chemically synthesized
aacattttaagcatcagttc

SEQ ID NO: 915 - DNA, 20 bp, Artificial Sequence
  chemically synthesized
taagcatcagttcaggtatg

SEQ ID NO: 916 - DNA, 20 bp, Artificial Sequence
  chemically synthesized
agcatcagttcaggtatgta

SEQ ID NO: 917 - DNA, 20 bp, Artificial Sequence
  chemically synthesized
gtatgtagagaacattccat

SEQ ID NO: 918 - DNA, 20 bp, Artificial Sequence
  chemically synthesized
gaacattccatcagcacgtc

SEQ ID NO: 919 - DNA, 20 bp, Artificial Sequence
  chemically synthesized
cctgttacaaaaacttactt

SEQ ID NO: 920 - DNA, 20 bp, Artificial Sequence
  chemically synthesized
ctgttacaaaaacttacttg

SEQ ID NO: 921 - DNA, 20 bp, Artificial Sequence
  chemically synthesized
aaaacttacttgaggatttt

SEQ ID NO: 922 - DNA, 20 bp, Artificial Sequence
  chemically synthesized
aacttacttgaggattttaa

SEQ ID NO: 923 - DNA, 20 bp, Artificial Sequence
  chemically synthesized
ttaagagacattaatgttct

SEQ ID NO: 924 - DNA, 20 bp, Artificial Sequence
  chemically synthesized
agagacattaatgttcttag

SEQ ID NO: 925 - DNA, 20 bp, Artificial Sequence
  chemically synthesized
agttcctcatttaaaaaaaa

SEQ ID NO: 926 - DNA, 20 bp, Artificial Sequence
  chemically synthesized
tcatgaattcatcttactat

SEQ ID NO: 927 - DNA, 20 bp, Artificial Sequence
  chemically synthesized
tgtgcatgttattttatatt

SEQ ID NO: 928 - DNA, 20 bp, Artificial Sequence
  chemically synthesized
tatattaagattttaaattt

SEQ ID NO: 929 - DNA, 20 bp, Artificial Sequence
  chemically synthesized
tattaagattttaaatttta

SEQ ID NO: 930 - DNA, 20 bp, Artificial Sequence
  chemically synthesized
gattttaaattttagagttc

SEQ ID NO: 931 - DNA, 20 bp, Artificial Sequence
  chemically synthesized
ggatacaaaatatcatttat

SEQ ID NO: 932 - DNA, 20 bp, Artificial Sequence
  chemically synthesized
atttataagtgatatcatgt

SEQ ID NO: 933 - DNA, 20 bp, Artificial Sequence
  chemically synthesized
ataagtgatatcatgttggc

SEQ ID NO: 934 - DNA, 20 bp, Artificial Sequence
  chemically synthesized
taagtgatatcatgttggct

SEQ ID NO: 935 - DNA, 20 bp, Artificial Sequence
  chemically synthesized
ctcatgtttctattgttcat

SEQ ID NO: 936 - DNA, 20 bp, Artificial Sequence
  chemically synthesized
tttctattgttcatcagctt

SEQ ID NO: 937 - DNA, 20 bp, Artificial Sequence
  chemically synthesized
cttcagaaataatattttat

SEQ ID NO: 938 - DNA, 20 bp, Artificial Sequence
  chemically synthesized
cagaaataatattttatcag

SEQ ID NO: 939 - DNA, 20 bp, Artificial Sequence
  chemically synthesized
agaaataatattttatcaga

SEQ ID NO: 940 - DNA, 20 bp, Artificial Sequence
  chemically synthesized
ttttatcagaaggcgtcaat

SEQ ID NO: 941 - DNA, 20 bp, Artificial Sequence
  chemically synthesized
atcagaaggcgtcaataagt

SEQ ID NO: 942 - DNA, 20 bp, Artificial Sequence
  chemically synthesized
tcagaaggcgtcaataagtc

SEQ ID NO: 943 - DNA, 20 bp, Artificial Sequence
  chemically synthesized
agaaggcgtcaataagtcag

SEQ ID NO: 944 - DNA, 20 bp, Artificial Sequence
  chemically synthesized
cgtcaataagtcaggagact

SEQ ID NO: 945 - DNA, 20 bp, Artificial Sequence
  chemically synthesized
tcaggagactaagtaacctg

SEQ ID NO: 946 - DNA, 20 bp, Artificial Sequence
  chemically synthesized
aacctgaagaacccatctcc

SEQ ID NO: 947 - DNA, 20 bp, Artificial Sequence
  chemically synthesized
ccagtaaatttatttaactt

SEQ ID NO: 948 - DNA, 20 bp, Artificial Sequence
  chemically synthesized
cagtaaatttatttaacttt

SEQ ID NO: 949 - DNA, 20 bp, Artificial Sequence
  chemically synthesized
cataatctgtgatttatcac

SEQ ID NO: 950 - DNA, 20 bp, Artificial Sequence
  chemically synthesized
ccccattccccatttgattt

SEQ ID NO: 951 - DNA, 20 bp, Artificial Sequence
  chemically synthesized
tttgatttaagaaatttgaa

SEQ ID NO: 952 - DNA, 20 bp, Artificial Sequence
  chemically synthesized
tttaagaaatttgaacagac

SEQ ID NO: 953 - DNA, 20 bp, Artificial Sequence
  chemically synthesized
aatttgaacagacaagtgta

SEQ ID NO: 954 - DNA, 20 bp, Artificial Sequence
  chemically synthesized
ccaccattaattctgtctgt

SEQ ID NO: 955 - DNA, 20 bp, Artificial Sequence
  chemically synthesized
caccattaattctgtctgtc

SEQ ID NO: 956 - DNA, 20 bp, Artificial Sequence
  chemically synthesized
atgcaaaacctaattacgct

SEQ ID NO: 957 - DNA, 20 bp, Artificial Sequence
  chemically synthesized
gcaaaacctaattacgctaa

SEQ ID NO: 958 - DNA, 20 bp, Artificial Sequence
  chemically synthesized
aaacctaattacgctaagag

SEQ ID NO: 959 - DNA, 20 bp, Artificial Sequence
  chemically synthesized
cgctaagagcagcatatact

SEQ ID NO: 960 - DNA, 20 bp, Artificial Sequence
  chemically synthesized
tactgtatataaaacctaca

SEQ ID NO: 961 - DNA, 20 bp, Artificial Sequence
  chemically synthesized
aacctacacagttgcactca

SEQ ID NO: 962 - DNA, 20 bp, Artificial Sequence
  chemically synthesized
gcactcatagctcctaataa

SEQ ID NO: 963 - DNA, 20 bp, Artificial Sequence
  chemically synthesized
actcatagctcctaataaaa

SEQ ID NO: 964 - DNA, 20 bp, Artificial Sequence
  chemically synthesized
agctcctaataaaagagtaa

SEQ ID NO: 965 - DNA, 20 bp, Artificial Sequence
  chemically synthesized
gctcctaataaaagagtaat

SEQ ID NO: 966 - DNA, 20 bp, Artificial Sequence
  chemically synthesized
ctcctaataaaagagtaata

SEQ ID NO: 967 - DNA, 20 bp, Artificial Sequence
  chemically synthesized
aaaagagtaatagggacaca

SEQ ID NO: 968 - DNA, 20 bp, Artificial Sequence
  chemically synthesized
aagagtaatagggacacaca

SEQ ID NO: 969 - DNA, 20 bp, Artificial Sequence
  chemically synthesized
agagtaatagggacacacag

SEQ ID NO: 970 - DNA, 20 bp, Artificial Sequence
  chemically synthesized
agggacacacagaggtttta

SEQ ID NO: 971 - DNA, 20 bp, Artificial Sequence
  chemically synthesized
gaggttttatggacatttaa

SEQ ID NO: 972 - DNA, 20 bp, Artificial Sequence
  chemically synthesized
aggttttatggacatttaat

SEQ ID NO: 973 - DNA, 20 bp, Artificial Sequence
  chemically synthesized
ggttttatggacatttaata

SEQ ID NO: 974 - DNA, 20 bp, Artificial Sequence
  chemically synthesized
tttatggacatttaataggg

SEQ ID NO: 975 - DNA, 20 bp, Artificial Sequence
  chemically synthesized
tatggacatttaatagggtg

SEQ ID NO: 976 - DNA, 20 bp, Artificial Sequence
  chemically synthesized
catttaatagggtggagtcg

SEQ ID NO: 977 - DNA, 20 bp, Artificial Sequence
  chemically synthesized
agtcgaagtcaccacatcta

SEQ ID NO: 978 - DNA, 20 bp, Artificial Sequence
  chemically synthesized
gaagtcaccacatctaaagc

SEQ ID NO: 979 - DNA, 20 bp, Artificial Sequence
  chemically synthesized
caccacatctaaagctggca

SEQ ID NO: 980 - DNA, 20 bp, Artificial Sequence
  chemically synthesized
atctaaagctggcatggcac

SEQ ID NO: 981 - DNA, 20 bp, Artificial Sequence
  chemically synthesized
tctaaagctggcatggcact

SEQ ID NO: 982 - DNA, 20 bp, Artificial Sequence
  chemically synthesized
ctaaagctggcatggcactg

SEQ ID NO: 983 - DNA, 20 bp, Artificial Sequence
  chemically synthesized
gaattatttctatctgtctt

SEQ ID NO: 984 - DNA, 20 bp, Artificial Sequence
  chemically synthesized
ttatttctatctgtcttgag

SEQ ID NO: 985 - DNA, 20 bp, Artificial Sequence
  chemically synthesized
atctgtcttgagcagcattt

SEQ ID NO: 986 - DNA, 20 bp, Artificial Sequence
  chemically synthesized
cttgagcagcattttggatt

SEQ ID NO: 987 - DNA, 20 bp, Artificial Sequence
  chemically synthesized
cagcattttggattcagttt

SEQ ID NO: 988 - DNA, 20 bp, Artificial Sequence
  chemically synthesized
gcattttggattcagttttg

SEQ ID NO: 989 - DNA, 20 bp, Artificial Sequence
  chemically synthesized
aacctaatccaaaacacata

SEQ ID NO: 990 - DNA, 20 bp, Artificial Sequence
  chemically synthesized
acatacagtatatcttttct

SEQ ID NO: 991 - DNA, 20 bp, Artificial Sequence
  chemically synthesized
cagtatatcttttctaagtt

SEQ ID NO: 992 - DNA, 20 bp, Artificial Sequence
  chemically synthesized
taagttcagtgacaaacatc

SEQ ID NO: 993 - DNA, 20 bp, Artificial Sequence
  chemically synthesized
gtgacaaacatcaagttctc

SEQ ID NO: 994 - DNA, 20 bp, Artificial Sequence
  chemically synthesized
tgacaaacatcaagttctca

SEQ ID NO: 995 - DNA, 20 bp, Artificial Sequence
  chemically synthesized
tattctccaacatcctttct

SEQ ID NO: 996 - DNA, 20 bp, Artificial Sequence
  chemically synthesized
tctccaacatcctttctcag

SEQ ID NO: 997 - DNA, 20 bp, Artificial Sequence
  chemically synthesized
cctttctcagtggattcctc

SEQ ID NO: 998 - DNA, 20 bp, Artificial Sequence
  chemically synthesized
tctctccttcccacccaaac

SEQ ID NO: 999 - DNA, 20 bp, Artificial Sequence
  chemically synthesized
tcccacccaaactggctttt

SEQ ID NO: 1000 - DNA, 20 bp, Artificial Sequence
  chemically synthesized
cattgactttctttatactt

SEQ ID NO: 1001 - DNA, 20 bp, Artificial Sequence
  chemically synthesized
gactttctttatactttaga

SEQ ID NO: 1002 - DNA, 20 bp, Artificial Sequence
  chemically synthesized
agataaaactattcttgcct

SEQ ID NO: 1003 - DNA, 20 bp, Artificial Sequence
  chemically synthesized
actattcttgcctcagataa

SEQ ID NO: 1004 - DNA, 20 bp, Artificial Sequence
  chemically synthesized
ctattcttgcctcagataaa

SEQ ID NO: 1005 - DNA, 20 bp, Artificial Sequence
  chemically synthesized
gataaaaggcatgacatgaa

SEQ ID NO: 1006 - DNA, 20 bp, Artificial Sequence
  chemically synthesized
ataaaaggcatgacatgaaa

SEQ ID NO: 1007 - DNA, 20 bp, Artificial Sequence
  chemically synthesized
gacatgaaaaggccacctca

SEQ ID NO: 1008 - DNA, 20 bp, Artificial Sequence
  chemically synthesized
acatgaaaaggccacctcac

SEQ ID NO: 1009 - DNA, 20 bp, Artificial Sequence
  chemically synthesized
aaaggccacctcacaggcac

SEQ ID NO: 1010 - DNA, 20 bp, Artificial Sequence
  chemically synthesized
aaggccacctcacaggcact

SEQ ID NO: 1011 - DNA, 20 bp, Artificial Sequence
  chemically synthesized
aggccacctcacaggcacta

SEQ ID NO: 1012 - DNA, 20 bp, Artificial Sequence
  chemically synthesized
cctcacaggcactagggcat

SEQ ID NO: 1013 - DNA, 20 bp, Artificial Sequence
  chemically synthesized
ggcactagggcataagaact

SEQ ID NO: 1014 - DNA, 20 bp, Artificial Sequence
  chemically synthesized
gcgacaaaaaatgctaccac

SEQ ID NO: 1015 - DNA, 20 bp, Artificial Sequence
  chemically synthesized
acaaaaaatgctaccacaag

SEQ ID NO: 1016 - DNA, 20 bp, Artificial Sequence
  chemically synthesized
atgctaccacaagaagacaa

SEQ ID NO: 1017 - DNA, 20 bp, Artificial Sequence
  chemically synthesized
accacaagaagacaacagaa

SEQ ID NO: 1018 - DNA, 20 bp, Artificial Sequence
  chemically synthesized
caacagaacggcttttgttt

SEQ ID NO: 1019 - DNA, 20 bp, Artificial Sequence
  chemically synthesized
ttttggttttttacaaaaat

SEQ ID NO: 1020 - DNA, 20 bp, Artificial Sequence
  chemically synthesized
tcgtattcattcatctacac

SEQ ID NO: 1021 - DNA, 20 bp, Artificial Sequence
  chemically synthesized
cgtattcattcatctacact

SEQ ID NO: 1022 - DNA, 20 bp, Artificial Sequence
  chemically synthesized
tcattcatctacactgggaa

SEQ ID NO: 1023 - DNA, 20 bp, Artificial Sequence
  chemically synthesized
cattcatctacactgggaac

SEQ ID NO: 1024 - DNA, 20 bp, Artificial Sequence
  chemically synthesized
attcatctacactgggaaca

SEQ ID NO: 1025 - DNA, 20 bp, Artificial Sequence
  chemically synthesized
ggaacagggacacgatatca

SEQ ID NO: 1026 - DNA, 20 bp, Artificial Sequence
  chemically synthesized
aacagggacacgatatcaca

SEQ ID NO: 1027 - DNA, 20 bp, Artificial Sequence
  chemically synthesized
acagggacacgatatcacag

SEQ ID NO: 1028 - DNA, 20 bp, Artificial Sequence
  chemically synthesized
atatcacagaggtatgtgtt

SEQ ID NO: 1029 - DNA, 20 bp, Artificial Sequence
  chemically synthesized
acagaggtatgtgtttagta

SEQ ID NO: 1030 - DNA, 20 bp, Artificial Sequence
  chemically synthesized
tatgtgtttagtaaagcaaa

SEQ ID NO: 1031 - DNA, 20 bp, Artificial Sequence
  chemically synthesized
caaatagatgctgcaacatg

SEQ ID NO: 1032 - DNA, 20 bp, Artificial Sequence
  chemically synthesized
gcaacatgcagtatttgtaa

SEQ ID NO: 1033 - DNA, 20 bp, Artificial Sequence
  chemically synthesized
tatttgtaaaagtgacaaca

SEQ ID NO: 1034 - DNA, 20 bp, Artificial Sequence
  chemically synthesized
aagtgacaacacagatttct

SEQ ID NO: 1035 - DNA, 20 bp, Artificial Sequence
  chemically synthesized
agtgacaacacagatttcta

SEQ ID NO: 1036 - DNA, 20 bp, Artificial Sequence
  chemically synthesized
atttctaaggatttttaaaa

SEQ ID NO: 1037 - DNA, 20 bp, Artificial Sequence
  chemically synthesized
atttttaaaatagacctaac

SEQ ID NO: 1038 - DNA, 20 bp, Artificial Sequence
  chemically synthesized
ttaaaatagacctaactggc

SEQ ID NO: 1039 - DNA, 20 bp, Artificial Sequence
  chemically synthesized
aatagacctaactggctggt

SEQ ID NO: 1040 - DNA, 20 bp, Artificial Sequence
  chemically synthesized
agacctaactggctggtcag

SEQ ID NO: 1041 - DNA, 20 bp, Artificial Sequence
  chemically synthesized
ggctggtcagaagataattg

SEQ ID NO: 1042 - DNA, 20 bp, Artificial Sequence
  chemically synthesized
gctggtcagaagataattga

SEQ ID NO: 1043 - DNA, 20 bp, Artificial Sequence
  chemically synthesized
ctggtcagaagataattgaa

SEQ ID NO: 1044 - DNA, 20 bp, Artificial Sequence
  chemically synthesized
cgcccttatttgctgtcatc

SEQ ID NO: 1045 - DNA, 20 bp, Artificial Sequence
  chemically synthesized
gcccttatttgctgtcatcc

SEQ ID NO: 1046 - DNA, 20 bp, Artificial Sequence
  chemically synthesized
cttatttgctgtcatccagg

SEQ ID NO: 1047 - DNA, 20 bp, Artificial Sequence
  chemically synthesized
agaccctatcaaaacaccta

SEQ ID NO: 1048 - DNA, 20 bp, Artificial Sequence
  chemically synthesized
aaaacacctaaagtaatctg

SEQ ID NO: 1049 - DNA, 20 bp, Artificial Sequence
  chemically synthesized
ctaaagtaatctgtagcatc

SEQ ID NO: 1050 - DNA, 20 bp, Artificial Sequence
  chemically synthesized
taaagtaatctgtagcatct

SEQ ID NO: 1051 - DNA, 20 bp, Artificial Sequence
  chemically synthesized
aaagtaatctgtagcatcta

SEQ ID NO: 1052 - DNA, 20 bp, Artificial Sequence
  chemically synthesized
tctgtagcatctagggttcc

SEQ ID NO: 1053 - DNA, 20 bp, Artificial Sequence
  chemically synthesized
ctgtagcatctagggttcct

SEQ ID NO: 1054 - DNA, 20 bp, Artificial Sequence
  chemically synthesized
atctagggttcctgggatct

SEQ ID NO: 1055 - DNA, 20 bp, Artificial Sequence
  chemically synthesized
tcctgggatctcagaaccac

SEQ ID NO: 1056 - DNA, 20 bp, Artificial Sequence
  chemically synthesized
cctgggatctcagaaccaca

SEQ ID NO: 1057 - DNA, 20 bp, Artificial Sequence
  chemically synthesized
aggcaaaccactatgcatct

SEQ ID NO: 1058 - DNA, 20 bp, Artificial Sequence
  chemically synthesized
ggcaaaccactatgcatctc

SEQ ID NO: 1059 - DNA, 20 bp, Artificial Sequence
  chemically synthesized
cactatgcatctcaggaaat

SEQ ID NO: 1060 - DNA, 20 bp, Artificial Sequence
  chemically synthesized
tatgcatctcaggaaatcag

SEQ ID NO: 1061 - DNA, 20 bp, Artificial Sequence
  chemically synthesized
gaaatcagtggctgattcca

SEQ ID NO: 1062 - DNA, 20 bp, Artificial Sequence
  chemically synthesized
tccaaagatttcactatgtc

SEQ ID NO: 1063 - DNA, 20 bp, Artificial Sequence
  chemically synthesized
actatgtctggctacacccc

SEQ ID NO: 1064 - DNA, 20 bp, Artificial Sequence
  chemically synthesized
atgtctggctacacccctag

SEQ ID NO: 1065 - DNA, 20 bp, Artificial Sequence
  chemically synthesized
aaacctgatgcctttgtttc

SEQ ID NO: 1066 - DNA, 20 bp, Artificial Sequence
  chemically synthesized
tgcctttgtttccagatttt

SEQ ID NO: 1067 - DNA, 20 bp, Artificial Sequence
  chemically synthesized
tccagatttttagatttcaa

SEQ ID NO: 1068 - DNA, 20 bp, Artificial Sequence
  chemically synthesized
agatttttagatttcaaaag

SEQ ID NO: 1069 - DNA, 20 bp, Artificial Sequence
  chemically synthesized
gatttttagatttcaaaagt

SEQ ID NO: 1070 - DNA, 20 bp, Artificial Sequence
  chemically synthesized
atttttagatttcaaaagtg

SEQ ID NO: 1071 - DNA, 20 bp, Artificial Sequence
  chemically synthesized
aagtggggttattttgttat

SEQ ID NO: 1072 - DNA, 20 bp, Artificial Sequence
  chemically synthesized
gggttattttgttatgagaa

SEQ ID NO: 1073 - DNA, 20 bp, Artificial Sequence
  chemically synthesized
tatgagaaaagactcttaca

SEQ ID NO: 1074 - DNA, 20 bp, Artificial Sequence
  chemically synthesized
agactcttacatggaaacca

SEQ ID NO: 1075 - DNA, 20 bp, Artificial Sequence
  chemically synthesized
actcttacatggaaaccaaa

SEQ ID NO: 1076 - DNA, 20 bp, Artificial Sequence
  chemically synthesized
tcttttttacattatgttct

SEQ ID NO: 1077 - DNA, 20 bp, Artificial Sequence
  chemically synthesized
ttacattatgttctaagata

SEQ ID NO: 1078 - DNA, 20 bp, Artificial Sequence
  chemically synthesized
attatgttctaagataaagc

SEQ ID NO: 1079 - DNA, 20 bp, Artificial Sequence
  chemically synthesized
ttatgttctaagataaagca

SEQ ID NO: 1080 - DNA, 20 bp, Artificial Sequence
  chemically synthesized
gttctaagataaagcaagga

SEQ ID NO: 1081 - DNA, 20 bp, Artificial Sequence
  chemically synthesized
ttctaagataaagcaaggat

SEQ ID NO: 1082 - DNA, 20 bp, Artificial Sequence
  chemically synthesized
ctaagataaagcaaggatgg

SEQ ID NO: 1083 - DNA, 20 bp, Artificial Sequence
  chemically synthesized
ataaagcaaggatgggagaa

SEQ ID NO: 1084 - DNA, 20 bp, Artificial Sequence
  chemically synthesized
gcaaggatgggagaatagaa

SEQ ID NO: 1085 - DNA, 20 bp, Artificial Sequence
  chemically synthesized
ggagaatagaaaagaacttt

SEQ ID NO: 1086 - DNA, 20 bp, Artificial Sequence
  chemically synthesized
gaaaagaacttttagacaac

SEQ ID NO: 1087 - DNA, 20 bp, Artificial Sequence
  chemically synthesized
gaacttttagacaacaagaa

SEQ ID NO: 1088 - DNA, 20 bp, Artificial Sequence
  chemically synthesized
caagaacagcaaaaaattta

SEQ ID NO: 1089 - DNA, 20 bp, Artificial Sequence
  chemically synthesized
aagaacagcaaaaaatttaa

SEQ ID NO: 1090 - DNA, 20 bp, Artificial Sequence
  chemically synthesized
aaaaaatttaaaggaaataa

SEQ ID NO: 1091 - DNA, 20 bp, Artificial Sequence
  chemically synthesized
tttaaaggaaataaaagttt

SEQ ID NO: 1092 - DNA, 20 bp, Artificial Sequence
  chemically synthesized
aaagtttaagatgctattac

SEQ ID NO: 1093 - DNA, 20 bp, Artificial Sequence
  chemically synthesized
tttaagatgctattaccagc

SEQ ID NO: 1094 - DNA, 20 bp, Artificial Sequence
  chemically synthesized
ttttttcacttatgtttgaa

SEQ ID NO: 1095 - DNA, 20 bp, Artificial Sequence
  chemically synthesized
tgtttgaatggatttctgct

SEQ ID NO: 1096 - DNA, 20 bp, Artificial Sequence
  chemically synthesized
tttgaatggatttctgctaa

SEQ ID NO: 1097 - DNA, 20 bp, Artificial Sequence
  chemically synthesized
aatggatttctgctaagaga

SEQ ID NO: 1098 - DNA, 20 bp, Artificial Sequence
  chemically synthesized
tggatttctgctaagagatg

SEQ ID NO: 1099 - DNA, 20 bp, Artificial Sequence
  chemically synthesized
tttctgctaagagatggagt

SEQ ID NO: 1100 - DNA, 20 bp, Artificial Sequence
  chemically synthesized
atggagtaagtttttaacat

SEQ ID NO: 1101 - DNA, 20 bp, Artificial Sequence
  chemically synthesized
tcttgaaaactattctaaac

SEQ ID NO: 1102 - DNA, 20 bp, Artificial Sequence
  chemically synthesized
gaaaactattctaaactgga

SEQ ID NO: 1103 - DNA, 20 bp, Artificial Sequence
  chemically synthesized
gaaagccttaaaactatgtc

SEQ ID NO: 1104 - DNA, 20 bp, Artificial Sequence
  chemically synthesized
aaagccttaaaactatgtcc

SEQ ID NO: 1105 - DNA, 20 bp, Artificial Sequence
  chemically synthesized
aagccttaaaactatgtcca

SEQ ID NO: 1106 - DNA, 20 bp, Artificial Sequence
  chemically synthesized
taaaactatgtccagggttt

SEQ ID NO: 1107 - DNA, 20 bp, Artificial Sequence
  chemically synthesized
gagatatgtctattttaata

SEQ ID NO: 1108 - DNA, 20 bp, Artificial Sequence
  chemically synthesized
tatgtctattttaatatagt

SEQ ID NO: 1109 - DNA, 20 bp, Artificial Sequence
  chemically synthesized
gtaagtactttatgttcctt

SEQ ID NO: 1110 - DNA, 20 bp, Artificial Sequence
  chemically synthesized
taagtactttatgttccttt

SEQ ID NO: 1111 - DNA, 20 bp, Artificial Sequence
  chemically synthesized
aagtactttatgttccttta

SEQ ID NO: 1112 - DNA, 20 bp, Artificial Sequence
  chemically synthesized
ttagggtataatacacgcat

SEQ ID NO: 1113 - DNA, 20 bp, Artificial Sequence
  chemically synthesized
tacacgcatcagaatgccca

SEQ ID NO: 1114 - DNA, 20 bp, Artificial Sequence
  chemically synthesized
ccatagaaataatcctgaaa

SEQ ID NO: 1115 - DNA, 20 bp, Artificial Sequence
  chemically synthesized
taatcctgaaaaagactgac

SEQ ID NO: 1116 - DNA, 20 bp, Artificial Sequence
  chemically synthesized
aaaacctgttattttcttgc

SEQ ID NO: 1117 - DNA, 20 bp, Artificial Sequence
  chemically synthesized
attttcttgcaagtaattta

SEQ ID NO: 1118 - DNA, 20 bp, Artificial Sequence
  chemically synthesized
tttcttgcaagtaatttaca

SEQ ID NO: 1119 - DNA, 20 bp, Artificial Sequence
  chemically synthesized
atttacagagtgtgtcaaat

SEQ ID NO: 1120 - DNA, 20 bp, Artificial Sequence
  chemically synthesized
tttacagagtgtgtcaaatg

SEQ ID NO: 1121 - DNA, 20 bp, Artificial Sequence
  chemically synthesized
agtgtgtcaaatgaggacac

SEQ ID NO: 1122 - DNA, 20 bp, Artificial Sequence
  chemically synthesized
gtgtcaaatgaggacacaag

SEQ ID NO: 1123 - DNA, 20 bp, Artificial Sequence
  chemically synthesized
ttttttttattttttcaata

SEQ ID NO: 1124 - DNA, 20 bp, Artificial Sequence
  chemically synthesized
tttttttattttttcaataa

SEQ ID NO: 1125 - DNA, 20 bp, Artificial Sequence
  chemically synthesized
ttttttattttttcaataaa

SEQ ID NO: 1126 - DNA, 20 bp, Artificial Sequence
  chemically synthesized
ttttcaataaagggacaaaa

SEQ ID NO: 1127 - DNA, 20 bp, Artificial Sequence
  chemically synthesized
tttcaataaagggacaaaat

SEQ ID NO: 1128 - DNA, 20 bp, Artificial Sequence
  chemically synthesized
ggacaaaatgggtgtatgaa

SEQ ID NO: 1129 - DNA, 20 bp, Artificial Sequence
  chemically synthesized
gacaaaatgggtgtatgaac

SEQ ID NO: 1130 - DNA, 20 bp, Artificial Sequence
  chemically synthesized
ggtgtatgaacaggttaatg

SEQ ID NO: 1131 - DNA, 20 bp, Artificial Sequence
  chemically synthesized
agacaactgccaaaaaaaca

SEQ ID NO: 1132 - DNA, 20 bp, Artificial Sequence
  chemically synthesized
aactgccaaaaaaacacaga

SEQ ID NO: 1133 - DNA, 20 bp, Artificial Sequence
  chemically synthesized
tgccaaaaaaacacagacag

SEQ ID NO: 1134 - DNA, 20 bp, Artificial Sequence
  chemically synthesized
acagacagtggtttttccaa

SEQ ID NO: 1135 - DNA, 20 bp, Artificial Sequence
  chemically synthesized
ttttccaatagaacttaaca

SEQ ID NO: 1136 - DNA, 20 bp, Artificial Sequence
  chemically synthesized
caatagaacttaacaaagac

SEQ ID NO: 1137 - DNA, 20 bp, Artificial Sequence
  chemically synthesized
ccagaaacaaatacaataaa

SEQ ID NO: 1138 - DNA, 20 bp, Artificial Sequence
  chemically synthesized
aaacaaatacaataaaaagc

SEQ ID NO: 1139 - DNA, 20 bp, Artificial Sequence
  chemically synthesized
aacaaatacaataaaaagcc

SEQ ID NO: 1140 - DNA, 20 bp, Artificial Sequence
  chemically synthesized
agccaggttgtaatgacctt

SEQ ID NO: 1141 - DNA, 20 bp, Artificial Sequence
  chemically synthesized
taaaaaaaaaaataaaaaca

SEQ ID NO: 1142 - DNA, 20 bp, Artificial Sequence
  chemically synthesized
ataaaaacaaagaaaaataa

SEQ ID NO: 1143 - DNA, 20 bp, Artificial Sequence
  chemically synthesized
gaaaaataaaagatcaaatt

SEQ ID NO: 1144 - DNA, 20 bp, Artificial Sequence
  chemically synthesized
ttaagtgcctctgttttgaa

SEQ ID NO: 1145 - DNA, 20 bp, Artificial Sequence
  chemically synthesized
taagtgcctctgttttgaac

SEQ ID NO: 1146 - DNA, 20 bp, Artificial Sequence
  chemically synthesized
aagtgcctctgttttgaaca

SEQ ID NO: 1147 - DNA, 20 bp, Artificial Sequence
  chemically synthesized
ctgttttgaacagggcacat

SEQ ID NO: 1148 - DNA, 20 bp, Artificial Sequence
  chemically synthesized
ggcacataagcaataataaa

SEQ ID NO: 1149 - DNA, 20 bp, Artificial Sequence
  chemically synthesized
ataataaatagtgactccca

SEQ ID NO: 1150 - DNA, 20 bp, Artificial Sequence
  chemically synthesized
aatagtgactcccatagtaa

SEQ ID NO: 1151 - DNA, 20 bp, Artificial Sequence
  chemically synthesized
atagtaaaagataaaatttc

SEQ ID NO: 1152 - DNA, 20 bp, Artificial Sequence
  chemically synthesized
aaatttcaagttacgacaaa

SEQ ID NO: 1153 - DNA, 20 bp, Artificial Sequence
  chemically synthesized
acgacaaacagctttcatta

SEQ ID NO: 1154 - DNA, 20 bp, Artificial Sequence
  chemically synthesized
cgacaaacagctttcattac

SEQ ID NO: 1155 - DNA, 20 bp, Artificial Sequence
  chemically synthesized
aacagctttcattacaggaa

SEQ ID NO: 1156 - DNA, 20 bp, Artificial Sequence
  chemically synthesized
ctttcattacaggaatagaa

SEQ ID NO: 1157 - DNA, 20 bp, Artificial Sequence
  chemically synthesized
tttcattacaggaatagaaa

SEQ ID NO: 1158 - DNA, 20 bp, Artificial Sequence
  chemically synthesized
ctgcattgccatttacaaaa

SEQ ID NO: 1159 - DNA, 20 bp, Artificial Sequence
  chemically synthesized
ttacaaaaaagtattgacta

SEQ ID NO: 1160 - DNA, 20 bp, Artificial Sequence
  chemically synthesized
caaaaaagtattgactaaag

SEQ ID NO: 1161 - DNA, 20 bp, Artificial Sequence
  chemically synthesized
aaaaaagtattgactaaagc

SEQ ID NO: 1162 - DNA, 20 bp, Artificial Sequence
  chemically synthesized
ttctttccaatctaaatata

SEQ ID NO: 1163 - DNA, 20 bp, Artificial Sequence
  chemically synthesized
tctaaatataaagcaccatt

SEQ ID NO: 1164 - DNA, 20 bp, Artificial Sequence
  chemically synthesized
ataaagcaccatttagtttt

SEQ ID NO: 1165 - DNA, 20 bp, Artificial Sequence
  chemically synthesized
tgaaaaaaactgcaaaacat

SEQ ID NO: 1166 - DNA, 20 bp, Artificial Sequence
  chemically synthesized
tctttcttttactgcatatg

SEQ ID NO: 1167 - DNA, 20 bp, Artificial Sequence
  chemically synthesized
ctttcttttactgcatatga

SEQ ID NO: 1168 - DNA, 20 bp, Artificial Sequence
  chemically synthesized
cttttactgcatatgaaggt

SEQ ID NO: 1169 - DNA, 20 bp, Artificial Sequence
  chemically synthesized
tgcatatgaaggtaagatgc

SEQ ID NO: 1170 - DNA, 20 bp, Artificial Sequence
  chemically synthesized
gaaggtaagatgctggaatg

SEQ ID NO: 1171 - DNA, 20 bp, Artificial Sequence
  chemically synthesized
aaggtaagatgctggaatgt

SEQ ID NO: 1172 - DNA, 20 bp, Artificial Sequence
  chemically synthesized
aggtaagatgctggaatgta

SEQ ID NO: 1173 - DNA, 20 bp, Artificial Sequence
  chemically synthesized
gatgctggaatgtagggtga

SEQ ID NO: 1174 - DNA, 20 bp, Artificial Sequence
  chemically synthesized
gctggaatgtagggtgatag

SEQ ID NO: 1175 - DNA, 20 bp, Artificial Sequence
  chemically synthesized
ctggaatgtagggtgataga

SEQ ID NO: 1176 - DNA, 20 bp, Artificial Sequence
  chemically synthesized
aatgtagggtgatagaagga

SEQ ID NO: 1177 - DNA, 20 bp, Artificial Sequence
  chemically synthesized
atgtagggtgatagaaggaa

SEQ ID NO: 1178 - DNA, 20 bp, Artificial Sequence
  chemically synthesized
tgtagggtgatagaaggaaa

SEQ ID NO: 1179 - DNA, 20 bp, Artificial Sequence
  chemically synthesized
gatagaaggaaagggacaaa

SEQ ID NO: 1180 - DNA, 20 bp, Artificial Sequence
  chemically synthesized
acataacaaaccaacgttat

SEQ ID NO: 1181 - DNA, 20 bp, Artificial Sequence
  chemically synthesized
aaaccaacgttattagcttg

SEQ ID NO: 1182 - DNA, 20 bp, Artificial Sequence
  chemically synthesized
ttagcttgcagtactgcata

SEQ ID NO: 1183 - DNA, 20 bp, Artificial Sequence
  chemically synthesized
ttgcagtactgcatacagta

SEQ ID NO: 1184 - DNA, 20 bp, Artificial Sequence
  chemically synthesized
cagtactgcatacagtatgg

SEQ ID NO: 1185 - DNA, 20 bp, Artificial Sequence
  chemically synthesized
tactgcatacagtatggcag

SEQ ID NO: 1186 - DNA, 20 bp, Artificial Sequence
  chemically synthesized
actgcatacagtatggcagc

SEQ ID NO: 1187 - DNA, 20 bp, Artificial Sequence
  chemically synthesized
tacagtatggcagcaggaaa

SEQ ID NO: 1188 - DNA, 20 bp, Artificial Sequence
  chemically synthesized
acagtatggcagcaggaaaa

SEQ ID NO: 1189 - DNA, 20 bp, Artificial Sequence
  chemically synthesized
agcaggaaaaaggaacaaaa

SEQ ID NO: 1190 - DNA, 20 bp, Artificial Sequence
  chemically synthesized
gcaggaaaaaggaacaaaaa

SEQ ID NO: 1191 - DNA, 20 bp, Artificial Sequence
  chemically synthesized
gatatgtacaacccctatga

SEQ ID NO: 1192 - DNA, 20 bp, Artificial Sequence
  chemically synthesized
cagccatccatgtgacattc

SEQ ID NO: 1193 - DNA, 20 bp, Artificial Sequence
  chemically synthesized
ccatccatgtgacattctag

SEQ ID NO: 1194 - DNA, 20 bp, Artificial Sequence
  chemically synthesized
catccatgtgacattctagc

SEQ ID NO: 1195 - DNA, 20 bp, Artificial Sequence
  chemically synthesized
tcccccaaaccgccattata

SEQ ID NO: 1196 - DNA, 20 bp, Artificial Sequence
  chemically synthesized
ctctcttttttttttttttg

SEQ ID NO: 1197 - DNA, 20 bp, Artificial Sequence
  chemically synthesized
caaattaaaaaaatatactg

SEQ ID NO: 1198 - DNA, 20 bp, Artificial Sequence
  chemically synthesized
attaaaaaaatatactgtgg

SEQ ID NO: 1199 - DNA, 20 bp, Artificial Sequence
  chemically synthesized
ttttttttccactaccaaaa

SEQ ID NO: 1200 - DNA, 20 bp, Artificial Sequence
  chemically synthesized
tttttttccactaccaaaaa

SEQ ID NO: 1201 - DNA, 20 bp, Artificial Sequence
  chemically synthesized
aaggtacattgatacctttt

SEQ ID NO: 1202 - DNA, 20 bp, Artificial Sequence
  chemically synthesized
ggtacattgataccttttaa

SEQ ID NO: 1203 - DNA, 20 bp, Artificial Sequence
  chemically synthesized
ttgataccttttaagagaac

SEQ ID NO: 1204 - DNA, 20 bp, Artificial Sequence
  chemically synthesized
ccttttaagagaacaagcaa

SEQ ID NO: 1205 - DNA, 20 bp, Artificial Sequence
  chemically synthesized
caagcaacagttaaaaatac

SEQ ID NO: 1206 - DNA, 20 bp, Artificial Sequence
  chemically synthesized
aagcttcaatataaatacta

SEQ ID NO: 1207 - DNA, 20 bp, Artificial Sequence
  chemically synthesized
aatactatagtgcctaacac

SEQ ID NO: 1208 - DNA, 20 bp, Artificial Sequence
  chemically synthesized
atttaattcaaataccattc

SEQ ID NO: 1209 - DNA, 20 bp, Artificial Sequence
  chemically synthesized
caaataccattctagaaata

SEQ ID NO: 1210 - DNA, 20 bp, Artificial Sequence
  chemically synthesized
cattctagaaatacagaaaa

SEQ ID NO: 1211 - DNA, 20 bp, Artificial Sequence
  chemically synthesized
aaaagaccataaatgtattt

SEQ ID NO: 1212 - DNA, 20 bp, Artificial Sequence
  chemically synthesized
accataaatgtattttagca

SEQ ID NO: 1213 - DNA, 20 bp, Artificial Sequence
  chemically synthesized
ccataaatgtattttagcat

SEQ ID NO: 1214 - DNA, 20 bp, Artificial Sequence
  chemically synthesized
tttagcataggaatcaacat

SEQ ID NO: 1215 - DNA, 20 bp, Artificial Sequence
  chemically synthesized
gtgtgcattttcctatattt

SEQ ID NO: 1216 - DNA, 20 bp, Artificial Sequence
  chemically synthesized
ttttttttttttacaacctg

SEQ ID NO: 1217 - DNA, 20 bp, Artificial Sequence
  chemically synthesized
ttttttttttacaacctgaa

SEQ ID NO: 1218 - DNA, 20 bp, Artificial Sequence
  chemically synthesized
tttttttacaacctgaagag

SEQ ID NO: 1219 - DNA, 20 bp, Artificial Sequence
  chemically synthesized
ctgaagagcggtgtgtatcc

SEQ ID NO: 1220 - DNA, 20 bp, Artificial Sequence
  chemically synthesized
tgaagagcggtgtgtatcca

SEQ ID NO: 1221 - DNA, 20 bp, Artificial Sequence
  chemically synthesized
agcggtgtgtatccaaggca

SEQ ID NO: 1222 - DNA, 20 bp, Artificial Sequence
  chemically synthesized
tttccactaccatttttaaa

SEQ ID NO: 1223 - DNA, 20 bp, Artificial Sequence
  chemically synthesized
accatttttaaatggataac

SEQ ID NO: 1224 - DNA, 20 bp, Artificial Sequence
  chemically synthesized
acaagtcttgtaacaccacc

SEQ ID NO: 1225 - DNA, 20 bp, Artificial Sequence
  chemically synthesized
ttgtaacaccaccaagacaa

SEQ ID NO: 1226 - DNA, 20 bp, Artificial Sequence
  chemically synthesized
gacaatggaaccctaaaatg

SEQ ID NO: 1227 - DNA, 20 bp, Artificial Sequence
  chemically synthesized
gttcccccctaaacataatg

SEQ ID NO: 1228 - DNA, 20 bp, Artificial Sequence
  chemically synthesized
cttaacatttatatttaaaa

SEQ ID NO: 1229 - DNA, 20 bp, Artificial Sequence
  chemically synthesized
acaaaaaaatccttgcactg

SEQ ID NO: 1230 - DNA, 20 bp, Artificial Sequence
  chemically synthesized
aaaaaatccttgcactgtag

SEQ ID NO: 1231 - DNA, 20 bp, Artificial Sequence
  chemically synthesized
tccttgcactgtagaagcga

SEQ ID NO: 1232 - DNA, 20 bp, Artificial Sequence
  chemically synthesized
caatcattcatttctatgtt

SEQ ID NO: 1233 - DNA, 20 bp, Artificial Sequence
  chemically synthesized
gtgtattctgtttccattca

SEQ ID NO: 1234 - DNA, 20 bp, Artificial Sequence
  chemically synthesized
gcgcttgcaatgttgcgtcc

SEQ ID NO: 1235 - DNA, 20 bp, Artificial Sequence
  chemically synthesized
ttgcaatgttgcgtccaagt

SEQ ID NO: 1236 - DNA, 20 bp, Artificial Sequence
  chemically synthesized
aatgttgcgtccaagtaagt

SEQ ID NO: 1237 - DNA, 20 bp, Artificial Sequence
  chemically synthesized
gtccaagtaagtaagctcaa

SEQ ID NO: 1238 - DNA, 20 bp, Artificial Sequence
  chemically synthesized
agtaagtaagctcaatagtc

SEQ ID NO: 1239 - DNA, 20 bp, Artificial Sequence
  chemically synthesized
aagctcaatagtcaagtaaa

SEQ ID NO: 1240 - DNA, 20 bp, Artificial Sequence
  chemically synthesized
tcaatagtcaagtaaatggc

SEQ ID NO: 1241 - DNA, 20 bp, Artificial Sequence
  chemically synthesized
agtcaagtaaatggctggca

SEQ ID NO: 1242 - DNA, 20 bp, Artificial Sequence
  chemically synthesized
tggcaaagtttttttttttt

SEQ ID NO: 1243 - DNA, 20 bp, Artificial Sequence
  chemically synthesized
tttaaaaaatgctcctcaat

SEQ ID NO: 1244 - DNA, 20 bp, Artificial Sequence
  chemically synthesized
gattgtgttcaatttttttt

SEQ ID NO: 1245 - DNA, 20 bp, Artificial Sequence
  chemically synthesized
attcttgcaacttttccctt

SEQ ID NO: 1246 - DNA, 20 bp, Artificial Sequence
  chemically synthesized
tgcaacttttcccttaagta

SEQ ID NO: 1247 - DNA, 20 bp, Artificial Sequence
  chemically synthesized
ttaagtatagacctgtaaac

SEQ ID NO: 1248 - DNA, 20 bp, Artificial Sequence
  chemically synthesized
taagtatagacctgtaaact

SEQ ID NO: 1249 - DNA, 20 bp, Artificial Sequence
  chemically synthesized
tgtaaactgggaaaattgta

SEQ ID NO: 1250 - DNA, 20 bp, Artificial Sequence
  chemically synthesized
tgcacttaattgtcctatct

SEQ ID NO: 1251 - DNA, 20 bp, Artificial Sequence
  chemically synthesized
acttaattgtcctatctgag

SEQ ID NO: 1252 - DNA, 20 bp, Artificial Sequence
  chemically synthesized
cttaattgtcctatctgagc

SEQ ID NO: 1253 - DNA, 20 bp, Artificial Sequence
  chemically synthesized
tcaacctctgtatctctgat

SEQ ID NO: 1254 - DNA, 20 bp, Artificial Sequence
  chemically synthesized
aacctctgtatctctgatta

SEQ ID NO: 1255 - DNA, 20 bp, Artificial Sequence
  chemically synthesized
ctgtatctctgattagagaa

SEQ ID NO: 1256 - DNA, 20 bp, Artificial Sequence
  chemically synthesized
ctctgattagagaaaagata

SEQ ID NO: 1257 - DNA, 20 bp, Artificial Sequence
  chemically synthesized
gagaaaagatacagatatca

SEQ ID NO: 1258 - DNA, 20 bp, Artificial Sequence
  chemically synthesized
agaaaagatacagatatcac

SEQ ID NO: 1259 - DNA, 20 bp, Artificial Sequence
  chemically synthesized
aaagatacagatatcacagg

SEQ ID NO: 1260 - DNA, 20 bp, Artificial Sequence
  chemically synthesized
agatacagatatcacaggca

SEQ ID NO: 1261 - DNA, 20 bp, Artificial Sequence
  chemically synthesized
cagatatcacaggcagagtc

SEQ ID NO: 1262 - DNA, 20 bp, Artificial Sequence
  chemically synthesized
agtgctatttgaacaccaac

SEQ ID NO: 1263 - DNA, 20 bp, Artificial Sequence
  chemically synthesized
gtgctatttgaacaccaact

SEQ ID NO: 1264 - DNA, 20 bp, Artificial Sequence
  chemically synthesized
tgctatttgaacaccaactg

SEQ ID NO: 1265 - DNA, 20 bp, Artificial Sequence
  chemically synthesized
tatttgaacaccaactgggg

SEQ ID NO: 1266 - DNA, 20 bp, Artificial Sequence
  chemically synthesized
acaccaactggggcagatgc

SEQ ID NO: 1267 - DNA, 20 bp, Artificial Sequence
  chemically synthesized
cagatgctagcttaataaaa

SEQ ID NO: 1268 - DNA, 20 bp, Artificial Sequence
  chemically synthesized
ctcttccatgttaacacaaa

SEQ ID NO: 1269 - DNA, 20 bp, Artificial Sequence
  chemically synthesized
atgttaacacaaatagcaca

SEQ ID NO: 1270 - DNA, 20 bp, Artificial Sequence
  chemically synthesized
cacaaatagcacacagtgta

SEQ ID NO: 1271 - DNA, 20 bp, Artificial Sequence
  chemically synthesized
atagcacacagtgtatggaa

SEQ ID NO: 1272 - DNA, 20 bp, Artificial Sequence
  chemically synthesized
cagtgtatggaaaagaaatg

SEQ ID NO: 1273 - DNA, 20 bp, Artificial Sequence
  chemically synthesized
aagaaatgaagtacaacttt

SEQ ID NO: 1274 - DNA, 20 bp, Artificial Sequence
  chemically synthesized
agaaatgaagtacaactttt

SEQ ID NO: 1275 - DNA, 20 bp, Artificial Sequence
  chemically synthesized
gaaatgaagtacaactttta

SEQ ID NO: 1276 - DNA, 20 bp, Artificial Sequence
  chemically synthesized
aatgaagtacaacttttagg

SEQ ID NO: 1277 - DNA, 20 bp, Artificial Sequence
  chemically synthesized
agtacaacttttagggagca

SEQ ID NO: 1278 - DNA, 20 bp, Artificial Sequence
  chemically synthesized
attctttctcttcttttttt

SEQ ID NO: 1279 - DNA, 20 bp, Artificial Sequence
  chemically synthesized
agaatgtcacatttaaatgc

SEQ ID NO: 1280 - DNA, 20 bp, Artificial Sequence
  chemically synthesized
cacatttaaatgcaagtctt

SEQ ID NO: 1281 - DNA, 20 bp, Artificial Sequence
  chemically synthesized
atgcaagtcttaagaattca

SEQ ID NO: 1282 - DNA, 20 bp, Artificial Sequence
  chemically synthesized
aatcatcattgtatcaatat

SEQ ID NO: 1283 - DNA, 20 bp, Artificial Sequence
  chemically synthesized
attagcttatatacctgttc

SEQ ID NO: 1284 - DNA, 20 bp, Artificial Sequence
  chemically synthesized
atacctgttctagttttaaa

SEQ ID NO: 1285 - DNA, 20 bp, Artificial Sequence
  chemically synthesized
ttctagttttaaatggcaaa

SEQ ID NO: 1286 - DNA, 20 bp, Artificial Sequence
  chemically synthesized
cctctgtcaaaccttattgt

SEQ ID NO: 1287 - DNA, 20 bp, Artificial Sequence
  chemically synthesized
tcagcctcttcctttcaata

SEQ ID NO: 1288 - DNA, 20 bp, Artificial Sequence
  chemically synthesized
ttcctttcaatatggtatac

SEQ ID NO: 1289 - DNA, 20 bp, Artificial Sequence
  chemically synthesized
tcctttcaatatggtataca

SEQ ID NO: 1290 - DNA, 20 bp, Artificial Sequence
  chemically synthesized
atatggtatacaaggtctta

SEQ ID NO: 1291 - DNA, 20 bp, Artificial Sequence
  chemically synthesized
tgattgtccacttgacaacc

SEQ ID NO: 1292 - DNA, 20 bp, Artificial Sequence
  chemically synthesized
ttgtccacttgacaaccaag

SEQ ID NO: 1293 - DNA, 20 bp, Artificial Sequence
  chemically synthesized
acttgacaaccaagtagatc

SEQ ID NO: 1294 - DNA, 20 bp, Artificial Sequence
  chemically synthesized
agatctggatctatttcttt

SEQ ID NO: 1295 - DNA, 20 bp, Artificial Sequence
  chemically synthesized
ggatctatttcttttggtgc

SEQ ID NO: 1296 - DNA, 20 bp, Artificial Sequence
  chemically synthesized
ttggtgccagtatttttaaa

SEQ ID NO: 1297 - DNA, 20 bp, Artificial Sequence
  chemically synthesized
tttttaaaaagacattatta

SEQ ID NO: 1298 - DNA, 20 bp, Artificial Sequence
  chemically synthesized
tcataaaatgaactccttac

SEQ ID NO: 1299 - DNA, 20 bp, Artificial Sequence
  chemically synthesized
tagtgtatttaattgcgttc

SEQ ID NO: 1300 - DNA, 20 bp, Artificial Sequence
  chemically synthesized
agtgtatttaattgcgttcc

SEQ ID NO: 1301 - DNA, 20 bp, Artificial Sequence
  chemically synthesized
gtgtatttaattgcgttcca

SEQ ID NO: 1302 - DNA, 20 bp, Artificial Sequence
  chemically synthesized
gtttaaaaaaaataaaactt

SEQ ID NO: 1303 - DNA, 20 bp, Artificial Sequence
  chemically synthesized
tttaaaaaaaataaaacttt

SEQ ID NO: 1304 - DNA, 20 bp, Artificial Sequence
  chemically synthesized
aaataaaactttgggcaaaa

SEQ ID NO: 1305 - DNA, 20 bp, Artificial Sequence
  chemically synthesized
caaaacagcccatttctttt

SEQ ID NO: 1306 - DNA, 20 bp, Artificial Sequence
  chemically synthesized
catttcttttaagctctcac

SEQ ID NO: 1307 - DNA, 20 bp, Artificial Sequence
  chemically synthesized
atttcttttaagctctcacc

SEQ ID NO: 1308 - DNA, 20 bp, Artificial Sequence
  chemically synthesized
ttcttttaagctctcaccag

SEQ ID NO: 1309 - DNA, 20 bp, Artificial Sequence
  chemically synthesized
ttaagctctcaccaggagca

SEQ ID NO: 1310 - DNA, 20 bp, Artificial Sequence
  chemically synthesized
agctctcaccaggagcaaag

SEQ ID NO: 1311 - DNA, 20 bp, Artificial Sequence
  chemically synthesized
gagcaaagtagcttttatac

SEQ ID NO: 1312 - DNA, 20 bp, Artificial Sequence
  chemically synthesized
agcttttatactggtataat

SEQ ID NO: 1313 - DNA, 20 bp, Artificial Sequence
  chemically synthesized
ttgtttataaaattaaacta

SEQ ID NO: 1314 - DNA, 20 bp, Artificial Sequence
  chemically synthesized
tgtttataaaattaaactaa

SEQ ID NO: 1315 - DNA, 20 bp, Artificial Sequence
  chemically synthesized
aaggaaaaatgatgattaac

SEQ ID NO: 1316 - DNA, 20 bp, Artificial Sequence
  chemically synthesized
aggaaaaatgatgattaact

SEQ ID NO: 1317 - DNA, 20 bp, Artificial Sequence
  chemically synthesized
gatgattaactaggacataa

SEQ ID NO: 1318 - DNA, 20 bp, Artificial Sequence
  chemically synthesized
atgattaactaggacataat

SEQ ID NO: 1319 - DNA, 20 bp, Artificial Sequence
  chemically synthesized
gacataatgggtcatctttt

SEQ ID NO: 1320 - DNA, 20 bp, Artificial Sequence
  chemically synthesized
acataatgggtcatcttttt

SEQ ID NO: 1321 - DNA, 20 bp, Artificial Sequence
  chemically synthesized
taatgggtcatctttttagg

SEQ ID NO: 1322 - DNA, 20 bp, Artificial Sequence
  chemically synthesized
ttttaggtagccattgttgt

SEQ ID NO: 1323 - DNA, 20 bp, Artificial Sequence
  chemically synthesized
ttgttgtgagaaatacaata

SEQ ID NO: 1324 - DNA, 20 bp, Artificial Sequence
  chemically synthesized
tacaatatagaattatatgc

SEQ ID NO: 1325 - DNA, 20 bp, Artificial Sequence
  chemically synthesized
agaattatatgctagttcct

SEQ ID NO: 1326 - DNA, 20 bp, Artificial Sequence
  chemically synthesized
gaattatatgctagttccta

SEQ ID NO: 1327 - DNA, 20 bp, Artificial Sequence
  chemically synthesized
acctcacccaatgctgaatt

SEQ ID NO: 1328 - DNA, 20 bp, Artificial Sequence
  chemically synthesized
ccaatgctgaattaagctac

SEQ ID NO: 1329 - DNA, 20 bp, Artificial Sequence
  chemically synthesized
ttaagctacaagtttataac

SEQ ID NO: 1330 - DNA, 20 bp, Artificial Sequence
  chemically synthesized
agctacaagtttataacaag

SEQ ID NO: 1331 - DNA, 20 bp, Artificial Sequence
  chemically synthesized
acaagtttataacaagtaga

SEQ ID NO: 1332 - DNA, 20 bp, Artificial Sequence
  chemically synthesized
agtagaaagaaccatcgatg

SEQ ID NO: 1333 - DNA, 20 bp, Artificial Sequence
  chemically synthesized
aaccatcgatgtggttttaa

SEQ ID NO: 1334 - DNA, 20 bp, Artificial Sequence
  chemically synthesized
gatgtggttttaatagatcc

SEQ ID NO: 1335 - DNA, 20 bp, Artificial Sequence
  chemically synthesized
atgtggttttaatagatcca

SEQ ID NO: 1336 - DNA, 20 bp, Artificial Sequence
  chemically synthesized
catattttaaaaccaaatga

SEQ ID NO: 1337 - DNA, 20 bp, Artificial Sequence
  chemically synthesized
ttctgttaatttgtcaattc

SEQ ID NO: 1338 - DNA, 20 bp, Artificial Sequence
  chemically synthesized
tctgttaatttgtcaattca

SEQ ID NO: 1339 - DNA, 20 bp, Artificial Sequence
  chemically synthesized
aattgatacatttaaccctt

SEQ ID NO: 1340 - DNA, 20 bp, Artificial Sequence
  chemically synthesized
ttgatacatttaacccttta

SEQ ID NO: 1341 - DNA, 20 bp, Artificial Sequence
  chemically synthesized
tacatttaaccctttagaga

SEQ ID NO: 1342 - DNA, 20 bp, Artificial Sequence
  chemically synthesized
accctttagagacagacatt

SEQ ID NO: 1343 - DNA, 20 bp, Artificial Sequence
  chemically synthesized
agagacagacatttagctca

SEQ ID NO: 1344 - DNA, 20 bp, Artificial Sequence
  chemically synthesized
agacagacatttagctcata

SEQ ID NO: 1345 - DNA, 20 bp, Artificial Sequence
  chemically synthesized
agctcatagagatttttttt

SEQ ID NO: 1346 - DNA, 20 bp, Artificial Sequence
  chemically synthesized
agtgctatctattctgtcta

SEQ ID NO: 1347 - DNA, 20 bp, Artificial Sequence
  chemically synthesized
tgctatctattctgtctata

SEQ ID NO: 1348 - DNA, 20 bp, Artificial Sequence
  chemically synthesized
gctatctattctgtctatag

SEQ ID NO: 1349 - DNA, 20 bp, Artificial Sequence
  chemically synthesized
ctatctattctgtctataga

SEQ ID NO: 1350 - DNA, 20 bp, Artificial Sequence
  chemically synthesized
gtctatagagggttaatcca

SEQ ID NO: 1351 - DNA, 20 bp, Artificial Sequence
  chemically synthesized
actgtacatgatatgtatta

SEQ ID NO: 1352 - DNA, 20 bp, Artificial Sequence
  chemically synthesized
tatgtattacagaatgtatg

SEQ ID NO: 1353 - DNA, 20 bp, Artificial Sequence
  chemically synthesized
attacagaatgtatgcagca

SEQ ID NO: 1354 - DNA, 20 bp, Artificial Sequence
  chemically synthesized
ctctctctctctttttctct

SEQ ID NO: 1355 - DNA, 20 bp, Artificial Sequence
  chemically synthesized
tctctctttttctctcagaa

SEQ ID NO: 1356 - DNA, 20 bp, Artificial Sequence
  chemically synthesized
tttttctctcagaacggaac

SEQ ID NO: 1357 - DNA, 20 bp, Artificial Sequence
  chemically synthesized
tctcagaacggaactggaaa

SEQ ID NO: 1358 - DNA, 20 bp, Artificial Sequence
  chemically synthesized
gaaacagcaacatgtttgct

SEQ ID NO: 1359 - DNA, 20 bp, Artificial Sequence
  chemically synthesized
atgtttgctcagcaacgaat

SEQ ID NO: 1360 - DNA, 20 bp, Artificial Sequence
  chemically synthesized
tgtttgctcagcaacgaatt

SEQ ID NO: 1361 - DNA, 20 bp, Artificial Sequence
  chemically synthesized
gtttgctcagcaacgaatta

SEQ ID NO: 1362 - DNA, 20 bp, Artificial Sequence
  chemically synthesized
gaattagggacaatttaaaa

SEQ ID NO: 1363 - DNA, 20 bp, Artificial Sequence
  chemically synthesized
acataccatacatgctgtct

SEQ ID NO: 1364 - DNA, 20 bp, Artificial Sequence
  chemically synthesized
caacatgtaaattattgcac

SEQ ID NO: 1365 - DNA, 20 bp, Artificial Sequence
  chemically synthesized
acatgtaaattattgcacaa

SEQ ID NO: 1366 - DNA, 20 bp, Artificial Sequence
  chemically synthesized
gtaaattattgcacaagaga

SEQ ID NO: 1367 - DNA, 20 bp, Artificial Sequence
  chemically synthesized
taaattattgcacaagagaa

SEQ ID NO: 1368 - DNA, 20 bp, Artificial Sequence
  chemically synthesized
ttgcacaagagaaaggctca

SEQ ID NO: 1369 - DNA, 20 bp, Artificial Sequence
  chemically synthesized
aaagtttgcgtaaaatgcaa

SEQ ID NO: 1370 - DNA, 20 bp, Artificial Sequence
  chemically synthesized
tgcaatagtattgccccata

SEQ ID NO: 1371 - DNA, 20 bp, Artificial Sequence
  chemically synthesized
atacagatcatgcattcaaa

SEQ ID NO: 1372 - DNA, 20 bp, Artificial Sequence
  chemically synthesized
agatcatgcattcaaacggt

SEQ ID NO: 1373 - DNA, 20 bp, Artificial Sequence
  chemically synthesized
attcaaacggtgagaacata

SEQ ID NO: 1374 - DNA, 20 bp, Artificial Sequence
  chemically synthesized
ttcaaacggtgagaacataa

SEQ ID NO: 1375 - DNA, 20 bp, Artificial Sequence
  chemically synthesized
cataaaggaaaaaaaaaaaa

SEQ ID NO: 1376 - DNA, 20 bp, Artificial Sequence
  chemically synthesized
ataaaggaaaaaaaaaaaaa

SEQ ID NO: 1377 - DNA, 20 bp, Artificial Sequence
  chemically synthesized
gaaaaaaaaaaaaaaggaaa

SEQ ID NO: 1378 - DNA, 20 bp, Artificial Sequence
  chemically synthesized
aaaaaaaaggaaaaagaaaa

SEQ ID NO: 1379 - DNA, 20 bp, Artificial Sequence
  chemically synthesized
aaggaaaaagaaaaaagaaa

SEQ ID NO: 1380 - DNA, 20 bp, Artificial Sequence
  chemically synthesized
aaagaaaaaagaaaaagaaa

SEQ ID NO: 1381 - DNA, 20 bp, Artificial Sequence
  chemically synthesized
aaaaagaaaaagaaaaaaaa

SEQ ID NO: 1382 - DNA, 20 bp, Artificial Sequence
  chemically synthesized
aaaagaaaaagaaaaaaaac

SEQ ID NO: 1383 - DNA, 20 bp, Artificial Sequence
  chemically synthesized
aagaaaaaaaacaggtgtgc

SEQ ID NO: 1384 - DNA, 20 bp, Artificial Sequence
  chemically synthesized
aaaacaggtgtgctggtgac

SEQ ID NO: 1385 - DNA, 20 bp, Artificial Sequence
  chemically synthesized
gacaagcactctcatattct

SEQ ID NO: 1386 - DNA, 20 bp, Artificial Sequence
  chemically synthesized
gtttgtttgtttaaatcaca

SEQ ID NO: 1387 - DNA, 20 bp, Artificial Sequence
  chemically synthesized
tttgtttgtttaaatcacat

SEQ ID NO: 1388 - DNA, 20 bp, Artificial Sequence
  chemically synthesized
ttgtttaaatcacatgggac

SEQ ID NO: 1389 - DNA, 20 bp, Artificial Sequence
  chemically synthesized
gggactagaaaaaaatccta

SEQ ID NO: 1390 - DNA, 20 bp, Artificial Sequence
  chemically synthesized
ggactagaaaaaaatcctac

SEQ ID NO: 1391 - DNA, 20 bp, Artificial Sequence
  chemically synthesized
gactagaaaaaaatcctaca

SEQ ID NO: 1392 - DNA, 20 bp, Artificial Sequence
  chemically synthesized
ctagaaaaaaatcctacagg

SEQ ID NO: 1393 - DNA, 20 bp, Artificial Sequence
  chemically synthesized
gaaaaaaatcctacagggag

SEQ ID NO: 1394 - DNA, 20 bp, Artificial Sequence
  chemically synthesized
aaaaaaatcctacagggagt

SEQ ID NO: 1395 - DNA, 20 bp, Artificial Sequence
  chemically synthesized
aaaaaatcctacagggagtg

SEQ ID NO: 1396 - DNA, 20 bp, Artificial Sequence
  chemically synthesized
aatcctacagggagtggggc

SEQ ID NO: 1397 - DNA, 20 bp, Artificial Sequence
  chemically synthesized
tcctacagggagtggggctg

SEQ ID NO: 1398 - DNA, 20 bp, Artificial Sequence
  chemically synthesized
cctacagggagtggggctgg

SEQ ID NO: 1399 - DNA, 20 bp, Artificial Sequence
  chemically synthesized
ctacagggagtggggctgga

SEQ ID NO: 1400 - DNA, 20 bp, Artificial Sequence
  chemically synthesized
ggagtggggctggagggcga

SEQ ID NO: 1401 - DNA, 20 bp, Artificial Sequence
  chemically synthesized
gagtggggctggagggcgat

SEQ ID NO: 1402 - DNA, 20 bp, Artificial Sequence
  chemically synthesized
agtggggctggagggcgatg

SEQ ID NO: 1403 - DNA, 20 bp, Artificial Sequence
  chemically synthesized
ggggctggagggcgatgggg

SEQ ID NO: 1404 - DNA, 20 bp, Artificial Sequence
  chemically synthesized
gggctggagggcgatgggga

SEQ ID NO: 1405 - DNA, 20 bp, Artificial Sequence
  chemically synthesized
ggctggagggcgatggggaa

SEQ ID NO: 1406 - DNA, 20 bp, Artificial Sequence
  chemically synthesized
gctggagggcgatggggaag

SEQ ID NO: 1407 - DNA, 20 bp, Artificial Sequence
  chemically synthesized
tggagggcgatggggaaggg

SEQ ID NO: 1408 - DNA, 20 bp, Artificial Sequence
  chemically synthesized
agggcgatggggaaggggag

SEQ ID NO: 1409 - DNA, 20 bp, Artificial Sequence
  chemically synthesized
ggggaaggggagtggtgaaa

SEQ ID NO: 1410 - DNA, 20 bp, Artificial Sequence
  chemically synthesized
gggaaggggagtggtgaaaa

SEQ ID NO: 1411 - DNA, 20 bp, Artificial Sequence
  chemically synthesized
ggaaggggagtggtgaaaaa

SEQ ID NO: 1412 - DNA, 20 bp, Artificial Sequence
  chemically synthesized
gaaggggagtggtgaaaaag

SEQ ID NO: 1413 - DNA, 20 bp, Artificial Sequence
  chemically synthesized
aaggggagtggtgaaaaagg

SEQ ID NO: 1414 - DNA, 20 bp, Artificial Sequence
  chemically synthesized
agtggtgaaaaagggggtgt

SEQ ID NO: 1415 - DNA, 20 bp, Artificial Sequence
  chemically synthesized
gtggtgaaaaagggggtgtc

SEQ ID NO: 1416 - DNA, 20 bp, Artificial Sequence
  chemically synthesized
gtgaaaaagggggtgtcagg

SEQ ID NO: 1417 - DNA, 20 bp, Artificial Sequence
  chemically synthesized
tgaaaaagggggtgtcaggt

SEQ ID NO: 1418 - DNA, 20 bp, Artificial Sequence
  chemically synthesized
aaaaagggggtgtcaggtgg

SEQ ID NO: 1419 - DNA, 20 bp, Artificial Sequence
  chemically synthesized
agggggtgtcaggtgggagt

SEQ ID NO: 1420 - DNA, 20 bp, Artificial Sequence
  chemically synthesized
gggggtgtcaggtgggagtg

SEQ ID NO: 1421 - DNA, 20 bp, Artificial Sequence
  chemically synthesized
ggggtgtcaggtgggagtga

SEQ ID NO: 1422 - DNA, 20 bp, Artificial Sequence
  chemically synthesized
ggtgtcaggtgggagtgagg

SEQ ID NO: 1423 - DNA, 20 bp, Artificial Sequence
  chemically synthesized
gtgtcaggtgggagtgaggg

SEQ ID NO: 1424 - DNA, 20 bp, Artificial Sequence
  chemically synthesized
tgtcaggtgggagtgaggga

SEQ ID NO: 1425 - DNA, 20 bp, Artificial Sequence
  chemically synthesized
gtcaggtgggagtgagggag

SEQ ID NO: 1426 - DNA, 20 bp, Artificial Sequence
  chemically synthesized
ggtattaatatacctctatt

SEQ ID NO: 1427 - DNA, 20 bp, Artificial Sequence
  chemically synthesized
cattttttcatgtgtttctc

SEQ ID NO: 1428 - DNA, 20 bp, Artificial Sequence
  chemically synthesized
attttttcatgtgtttctcc

SEQ ID NO: 1429 - DNA, 20 bp, Artificial Sequence
  chemically synthesized
ttttttcatgtgtttctcca

SEQ ID NO: 1430 - DNA, 20 bp, Artificial Sequence
  chemically synthesized
cagggtactgtacacgctaa

SEQ ID NO: 1431 - DNA, 20 bp, Artificial Sequence
  chemically synthesized
agggtactgtacacgctaaa

SEQ ID NO: 1432 - DNA, 20 bp, Artificial Sequence
  chemically synthesized
tgtaaacgtccttccccacc

SEQ ID NO: 1433 - DNA, 20 bp, Artificial Sequence
  chemically synthesized
gccatgcgttttcatgtgcc

SEQ ID NO: 1434 - DNA, 20 bp, Artificial Sequence
  chemically synthesized
tgcgttttcatgtgcctggt

SEQ ID NO: 1435 - DNA, 20 bp, Artificial Sequence
  chemically synthesized
gcctggtgagcttgctactc

SEQ ID NO: 1436 - DNA, 20 bp, Artificial Sequence
  chemically synthesized
cctggtgagcttgctactct

SEQ ID NO: 1437 - DNA, 20 bp, Artificial Sequence
  chemically synthesized
tgagcttgctactctgggca

SEQ ID NO: 1438 - DNA, 20 bp, Artificial Sequence
  chemically synthesized
gagcttgctactctgggcac

SEQ ID NO: 1439 - DNA, 20 bp, Artificial Sequence
  chemically synthesized
tgctactctgggcacaggca

SEQ ID NO: 1440 - DNA, 20 bp, Artificial Sequence
  chemically synthesized
tgggcacaggcatagttgca

SEQ ID NO: 1441 - DNA, 20 bp, Artificial Sequence
  chemically synthesized
gttgcacagctcgcatttat

SEQ ID NO: 1442 - DNA, 20 bp, Artificial Sequence
  chemically synthesized
ttgcacagctcgcatttata

SEQ ID NO: 1443 - DNA, 20 bp, Artificial Sequence
  chemically synthesized
tataaggcctttcgcccgtg

SEQ ID NO: 1444 - DNA, 20 bp, Artificial Sequence
  chemically synthesized
cgcccgtgtggcttctcctg

SEQ ID NO: 1445 - DNA, 20 bp, Artificial Sequence
  chemically synthesized
cgtgtggcttctcctgtgga

SEQ ID NO: 1446 - DNA, 20 bp, Artificial Sequence
  chemically synthesized
tggcttctcctgtggacagt

SEQ ID NO: 1447 - DNA, 20 bp, Artificial Sequence
  chemically synthesized
tgtggacagtgagattgcta

SEQ ID NO: 1448 - DNA, 20 bp, Artificial Sequence
  chemically synthesized
tgagattgctacagttcttg

SEQ ID NO: 1449 - DNA, 20 bp, Artificial Sequence
  chemically synthesized
agttcttgaagactttccca

SEQ ID NO: 1450 - DNA, 20 bp, Artificial Sequence
  chemically synthesized
gactttcccacagtactcac

SEQ ID NO: 1451 - DNA, 20 bp, Artificial Sequence
  chemically synthesized
cgctgcgtctgccctctttt

SEQ ID NO: 1452 - DNA, 20 bp, Artificial Sequence
  chemically synthesized
gcgtctgccctcttttgagc

SEQ ID NO: 1453 - DNA, 20 bp, Artificial Sequence
  chemically synthesized
cgtctgccctcttttgagct

SEQ ID NO: 1454 - DNA, 20 bp, Artificial Sequence
  chemically synthesized
tcttttgagctgggcctgcc

SEQ ID NO: 1455 - DNA, 20 bp, Artificial Sequence
  chemically synthesized
cttttgagctgggcctgccc

SEQ ID NO: 1456 - DNA, 20 bp, Artificial Sequence
  chemically synthesized
gagctgggcctgcccgggcc

SEQ ID NO: 1457 - DNA, 20 bp, Artificial Sequence
  chemically synthesized
ccgggcccggaccactaata

SEQ ID NO: 1458 - DNA, 20 bp, Artificial Sequence
  chemically synthesized
cgggcccggaccactaatat

SEQ ID NO: 1459 - DNA, 20 bp, Artificial Sequence
  chemically synthesized
gggcccggaccactaatatg

SEQ ID NO: 1460 - DNA, 20 bp, Artificial Sequence
  chemically synthesized
ttcccgtgccgctgcgcccc

SEQ ID NO: 1461 - DNA, 20 bp, Artificial Sequence
  chemically synthesized
cgccccgagatccctccgtc

SEQ ID NO: 1462 - DNA, 20 bp, Artificial Sequence
  chemically synthesized
gatccctccgtccagctccc

SEQ ID NO: 1463 - DNA, 20 bp, Artificial Sequence
  chemically synthesized
atccctccgtccagctcccc

SEQ ID NO: 1464 - DNA, 20 bp, Artificial Sequence
  chemically synthesized
cctccgtccagctccccggg

SEQ ID NO: 1465 - DNA, 20 bp, Artificial Sequence
  chemically synthesized
gtccagctccccgggcggtg

SEQ ID NO: 1466 - DNA, 20 bp, Artificial Sequence
  chemically synthesized
ccagctccccgggcggtgtg

SEQ ID NO: 1467 - DNA, 20 bp, Artificial Sequence
  chemically synthesized
gctccccgggcggtgtggag

SEQ ID NO: 1468 - DNA, 20 bp, Artificial Sequence
  chemically synthesized
agcgcaaactcccgttctcc

SEQ ID NO: 1469 - DNA, 20 bp, Artificial Sequence
  chemically synthesized
gcgcaaactcccgttctccg

SEQ ID NO: 1470 - DNA, 20 bp, Artificial Sequence
  chemically synthesized
gcaaactcccgttctccgag

SEQ ID NO: 1471 - DNA, 20 bp, Artificial Sequence
  chemically synthesized
tctccgaggagtgctccgac

SEQ ID NO: 1472 - DNA, 20 bp, Artificial Sequence
  chemically synthesized
ctccgaggagtgctccgacg

SEQ ID NO: 1473 - DNA, 20 bp, Artificial Sequence
  chemically synthesized
ccgaggagtgctccgacgag

SEQ ID NO: 1474 - DNA, 20 bp, Artificial Sequence
  chemically synthesized
cgaggagtgctccgacgagg

SEQ ID NO: 1475 - DNA, 20 bp, Artificial Sequence
  chemically synthesized
gtgctccgacgaggaggcaa

SEQ ID NO: 1476 - DNA, 20 bp, Artificial Sequence
  chemically synthesized
tgctccgacgaggaggcaaa

SEQ ID NO: 1477 - DNA, 20 bp, Artificial Sequence
  chemically synthesized
ggaggcaaaaggcgattgtc

SEQ ID NO: 1478 - DNA, 20 bp, Artificial Sequence
  chemically synthesized
aggcaaaaggcgattgtctg

SEQ ID NO: 1479 - DNA, 20 bp, Artificial Sequence
  chemically synthesized
gcgattgtctggagtctccg

SEQ ID NO: 1480 - DNA, 20 bp, Artificial Sequence
  chemically synthesized
tgtctggagtctccgaagct

SEQ ID NO: 1481 - DNA, 20 bp, Artificial Sequence
  chemically synthesized
gtctggagtctccgaagcta

SEQ ID NO: 1482 - DNA, 20 bp, Artificial Sequence
  chemically synthesized
tggagtctccgaagctaagg

SEQ ID NO: 1483 - DNA, 20 bp, Artificial Sequence
  chemically synthesized
ggagtctccgaagctaagga

SEQ ID NO: 1484 - DNA, 20 bp, Artificial Sequence
  chemically synthesized
gagtctccgaagctaaggaa

SEQ ID NO: 1485 - DNA, 20 bp, Artificial Sequence
  chemically synthesized
aagctaaggaagggatcttt

SEQ ID NO: 1486 - DNA, 20 bp, Artificial Sequence
  chemically synthesized
gaagggatctttgagctgcc

SEQ ID NO: 1487 - DNA, 20 bp, Artificial Sequence
  chemically synthesized
agggatctttgagctgcctg

SEQ ID NO: 1488 - DNA, 20 bp, Artificial Sequence
  chemically synthesized
gggatctttgagctgcctgg

SEQ ID NO: 1489 - DNA, 20 bp, Artificial Sequence
  chemically synthesized
tgagctgcctggaggccgcg

SEQ ID NO: 1490 - DNA, 20 bp, Artificial Sequence
  chemically synthesized
ctgcctggaggccgcgtagc

SEQ ID NO: 1491 - DNA, 20 bp, Artificial Sequence
  chemically synthesized
ctggaggccgcgtagccggc

SEQ ID NO: 1492 - DNA, 20 bp, Artificial Sequence
  chemically synthesized
cgtagccggcgagccactgc

SEQ ID NO: 1493 - DNA, 20 bp, Artificial Sequence
  chemically synthesized
cgagtacacgttctccgtgt

SEQ ID NO: 1494 - DNA, 20 bp, Artificial Sequence
  chemically synthesized
gagtacacgttctccgtgtt

SEQ ID NO: 1495 - DNA, 20 bp, Artificial Sequence
  chemically synthesized
gttctccgtgttgggcatcg

SEQ ID NO: 1496 - DNA, 20 bp, Artificial Sequence
  chemically synthesized
tccgtgttgggcatcgcggc

SEQ ID NO: 1497 - DNA, 20 bp, Artificial Sequence
  chemically synthesized
ccgtgttgggcatcgcggcc

SEQ ID NO: 1498 - DNA, 20 bp, Artificial Sequence
  chemically synthesized
cgtgttgggcatcgcggccg

SEQ ID NO: 1499 - DNA, 20 bp, Artificial Sequence
  chemically synthesized
gtgttgggcatcgcggccgg

SEQ ID NO: 1500 - DNA, 20 bp, Artificial Sequence
  chemically synthesized
ttgggcatcgcggccggggg

SEQ ID NO: 1501 - DNA, 20 bp, Artificial Sequence
  chemically synthesized
tgggcatcgcggccgggggc

SEQ ID NO: 1502 - DNA, 20 bp, Artificial Sequence
  chemically synthesized
ggcaggtcgaactccttctc

SEQ ID NO: 1503 - DNA, 20 bp, Artificial Sequence
  chemically synthesized
cttctcgagcttgatgcgct

SEQ ID NO: 1504 - DNA, 20 bp, Artificial Sequence
  chemically synthesized
tctcgagcttgatgcgctta

SEQ ID NO: 1505 - DNA, 20 bp, Artificial Sequence
  chemically synthesized
cgagcttgatgcgcttagag

SEQ ID NO: 1506 - DNA, 20 bp, Artificial Sequence
  chemically synthesized
gagcttgatgcgcttagaga

SEQ ID NO: 1507 - DNA, 20 bp, Artificial Sequence
  chemically synthesized
agcttgatgcgcttagagaa

SEQ ID NO: 1508 - DNA, 20 bp, Artificial Sequence
  chemically synthesized
gcttgatgcgcttagagaag

SEQ ID NO: 1509 - DNA, 20 bp, Artificial Sequence
  chemically synthesized
atgcgcttagagaaggggct

SEQ ID NO: 1510 - DNA, 20 bp, Artificial Sequence
  chemically synthesized
gcttagagaaggggctcagc

SEQ ID NO: 1511 - DNA, 20 bp, Artificial Sequence
  chemically synthesized
agagaaggggctcagcgagc

SEQ ID NO: 1512 - DNA, 20 bp, Artificial Sequence
  chemically synthesized
gagaaggggctcagcgagct

SEQ ID NO: 1513 - DNA, 20 bp, Artificial Sequence
  chemically synthesized
agaaggggctcagcgagctg

SEQ ID NO: 1514 - DNA, 20 bp, Artificial Sequence
  chemically synthesized
ctcagcgagctggggctgcc

SEQ ID NO: 1515 - DNA, 20 bp, Artificial Sequence
  chemically synthesized
agcgagctggggctgcccag

SEQ ID NO: 1516 - DNA, 20 bp, Artificial Sequence
  chemically synthesized
gagctggggctgcccagcag

SEQ ID NO: 1517 - DNA, 20 bp, Artificial Sequence
  chemically synthesized
gctgcccagcagcagctttt

SEQ ID NO: 1518 - DNA, 20 bp, Artificial Sequence
  chemically synthesized
cccagcagcagctttttgga

SEQ ID NO: 1519 - DNA, 20 bp, Artificial Sequence
  chemically synthesized
ccagcagcagctttttggac

SEQ ID NO: 1520 - DNA, 20 bp, Artificial Sequence
  chemically synthesized
gctttttggacaggcccccc

SEQ ID NO: 1521 - DNA, 20 bp, Artificial Sequence
  chemically synthesized
ctttttggacaggccccccg

SEQ ID NO: 1522 - DNA, 20 bp, Artificial Sequence
  chemically synthesized
ccccccgaggccgactcgcc

SEQ ID NO: 1523 - DNA, 20 bp, Artificial Sequence
  chemically synthesized
cccccgaggccgactcgccc

SEQ ID NO: 1524 - DNA, 20 bp, Artificial Sequence
  chemically synthesized
ccccgaggccgactcgcccg

SEQ ID NO: 1525 - DNA, 20 bp, Artificial Sequence
  chemically synthesized
ccgaggccgactcgcccggg

SEQ ID NO: 1526 - DNA, 20 bp, Artificial Sequence
  chemically synthesized
aggccgactcgcccggggag

SEQ ID NO: 1527 - DNA, 20 bp, Artificial Sequence
  chemically synthesized
actcgcccggggagcagccg

SEQ ID NO: 1528 - DNA, 20 bp, Artificial Sequence
  chemically synthesized
ggagcagccgcggccattaa

SEQ ID NO: 1529 - DNA, 20 bp, Artificial Sequence
  chemically synthesized
taacagtgccatcgtctatg

SEQ ID NO: 1530 - DNA, 20 bp, Artificial Sequence
  chemically synthesized
gtctatgcggtccgactcgc

SEQ ID NO: 1531 - DNA, 20 bp, Artificial Sequence
  chemically synthesized
ggtccgactcgccggccacc

SEQ ID NO: 1532 - DNA, 20 bp, Artificial Sequence
  chemically synthesized
ggccaccgagtcttcgtcgc

SEQ ID NO: 1533 - DNA, 20 bp, Artificial Sequence
  chemically synthesized
cttcgtcgcaagtgtccctg

SEQ ID NO: 1534 - DNA, 20 bp, Artificial Sequence
  chemically synthesized
gcaagtgtccctgtggccct

SEQ ID NO: 1535 - DNA, 20 bp, Artificial Sequence
  chemically synthesized
gtccctgtggccctcggcct

SEQ ID NO: 1536 - DNA, 20 bp, Artificial Sequence
  chemically synthesized
ctgtggccctcggcctcggc

SEQ ID NO: 1537 - DNA, 20 bp, Artificial Sequence
  chemically synthesized
tgtggccctcggcctcggcc

SEQ ID NO: 1538 - DNA, 20 bp, Artificial Sequence
  chemically synthesized
ggccctcggcctcggccagg

SEQ ID NO: 1539 - DNA, 20 bp, Artificial Sequence
  chemically synthesized
ccgcgcttatgcttctcgcc

SEQ ID NO: 1540 - DNA, 20 bp, Artificial Sequence
  chemically synthesized
cgcgcttatgcttctcgccc

SEQ ID NO: 1541 - DNA, 20 bp, Artificial Sequence
  chemically synthesized
tatgcttctcgcccaggacc

SEQ ID NO: 1542 - DNA, 20 bp, Artificial Sequence
  chemically synthesized
gcttctcgcccaggacctgg

SEQ ID NO: 1543 - DNA, 20 bp, Artificial Sequence
  chemically synthesized
tctcgcccaggacctggtgg

SEQ ID NO: 1544 - DNA, 20 bp, Artificial Sequence
  chemically synthesized
ctcgcccaggacctggtgga

SEQ ID NO: 1545 - DNA, 20 bp, Artificial Sequence
  chemically synthesized
cctggtggaaggcctcgctg

SEQ ID NO: 1546 - DNA, 20 bp, Artificial Sequence
  chemically synthesized
ggcctcgctgaagtgctgca

SEQ ID NO: 1547 - DNA, 20 bp, Artificial Sequence
  chemically synthesized
cctcgctgaagtgctgcatg

SEQ ID NO: 1548 - DNA, 20 bp, Artificial Sequence
  chemically synthesized
ctgaagtgctgcatggagct

SEQ ID NO: 1549 - DNA, 20 bp, Artificial Sequence
  chemically synthesized
caccatgccctgcatgacgt

SEQ ID NO: 1550 - DNA, 20 bp, Artificial Sequence
  chemically synthesized
accatgccctgcatgacgtc

SEQ ID NO: 1551 - DNA, 20 bp, Artificial Sequence
  chemically synthesized
atgccctgcatgacgtcggg

SEQ ID NO: 1552 - DNA, 20 bp, Artificial Sequence
  chemically synthesized
tgccctgcatgacgtcgggc

SEQ ID NO: 1553 - DNA, 20 bp, Artificial Sequence
  chemically synthesized
gccctgcatgacgtcgggca

SEQ ID NO: 1554 - DNA, 20 bp, Artificial Sequence
  chemically synthesized
gcatgacgtcgggcagggcg

SEQ ID NO: 1555 - DNA, 20 bp, Artificial Sequence
  chemically synthesized
cgcccacgaccgcgccccgc

SEQ ID NO: 1556 - DNA, 20 bp, Artificial Sequence
  chemically synthesized
cgccccgcgagctgttctcg

SEQ ID NO: 1557 - DNA, 20 bp, Artificial Sequence
  chemically synthesized
cccgcgagctgttctcgtgg

SEQ ID NO: 1558 - DNA, 20 bp, Artificial Sequence
  chemically synthesized
tcgtggtggcgcgccgcctc

SEQ ID NO: 1559 - DNA, 20 bp, Artificial Sequence
  chemically synthesized
cgtggtggcgcgccgcctcc

SEQ ID NO: 1560 - DNA, 20 bp, Artificial Sequence
  chemically synthesized
tggcgcgccgcctccaggct

SEQ ID NO: 1561 - DNA, 20 bp, Artificial Sequence
  chemically synthesized
ccgcctccaggctcagcccg

SEQ ID NO: 1562 - DNA, 20 bp, Artificial Sequence
  chemically synthesized
ccaggctcagcccgaagccg

SEQ ID NO: 1563 - DNA, 20 bp, Artificial Sequence
  chemically synthesized
tccaccctctcgctctccgt

SEQ ID NO: 1564 - DNA, 20 bp, Artificial Sequence
  chemically synthesized
tcctcctcgtccccgttctc

SEQ ID NO: 1565 - DNA, 20 bp, Artificial Sequence
  chemically synthesized
cctcctcgtccccgttctcc

SEQ ID NO: 1566 - DNA, 20 bp, Artificial Sequence
  chemically synthesized
tcgtccccgttctccgggat

SEQ ID NO: 1567 - DNA, 20 bp, Artificial Sequence
  chemically synthesized
cgtccccgttctccgggatc

SEQ ID NO: 1568 - DNA, 20 bp, Artificial Sequence
  chemically synthesized
cccgttctccgggatcaggt

SEQ ID NO: 1569 - DNA, 20 bp, Artificial Sequence
  chemically synthesized
ccgttctccgggatcaggtt

SEQ ID NO: 1570 - DNA, 20 bp, Artificial Sequence
  chemically synthesized
cgttctccgggatcaggttg

SEQ ID NO: 1571 - DNA, 20 bp, Artificial Sequence
  chemically synthesized
gtcgttctcgctcttgaact

SEQ ID NO: 1572 - DNA, 20 bp, Artificial Sequence
  chemically synthesized
gctcttgaacttggccacca

SEQ ID NO: 1573 - DNA, 20 bp, Artificial Sequence
  chemically synthesized
aacttggccaccacggactt

SEQ ID NO: 1574 - DNA, 20 bp, Artificial Sequence
  chemically synthesized
cacggacttgagcgcgctgc

SEQ ID NO: 1575 - DNA, 20 bp, Artificial Sequence
  chemically synthesized
cgctgctggcgctgcccacc

SEQ ID NO: 1576 - DNA, 20 bp, Artificial Sequence
  chemically synthesized
ggcgctgcccaccaagtcgc

SEQ ID NO: 1577 - DNA, 20 bp, Artificial Sequence
  chemically synthesized
gcccaccaagtcgctggtgc

SEQ ID NO: 1578 - DNA, 20 bp, Artificial Sequence
  chemically synthesized
cccaccaagtcgctggtgcc

SEQ ID NO: 1579 - DNA, 20 bp, Artificial Sequence
  chemically synthesized
aagtcgctggtgccgggttc

SEQ ID NO: 1580 - DNA, 20 bp, Artificial Sequence
  chemically synthesized
agtcgctggtgccgggttcc

SEQ ID NO: 1581 - DNA, 20 bp, Artificial Sequence
  chemically synthesized
gtcgctggtgccgggttccg

SEQ ID NO: 1582 - DNA, 20 bp, Artificial Sequence
  chemically synthesized
cgctggtgccgggttccggg

SEQ ID NO: 1583 - DNA, 20 bp, Artificial Sequence
  chemically synthesized
ggtgccgggttccggggagc

SEQ ID NO: 1584 - DNA, 20 bp, Artificial Sequence
  chemically synthesized
gccgggttccggggagctgg

SEQ ID NO: 1585 - DNA, 20 bp, Artificial Sequence
  chemically synthesized
gggttccggggagctggcgg

SEQ ID NO: 1586 - DNA, 20 bp, Artificial Sequence
  chemically synthesized
gttccggggagctggcggtg

SEQ ID NO: 1587 - DNA, 20 bp, Artificial Sequence
  chemically synthesized
tccggggagctggcggtgga

SEQ ID NO: 1588 - DNA, 20 bp, Artificial Sequence
  chemically synthesized
ggcggtggagagaccgtcgt

SEQ ID NO: 1589 - DNA, 20 bp, Artificial Sequence
  chemically synthesized
gtcgtcggacttgaccgtca

SEQ ID NO: 1590 - DNA, 20 bp, Artificial Sequence
  chemically synthesized
tcgtcggacttgaccgtcat

SEQ ID NO: 1591 - DNA, 20 bp, Artificial Sequence
  chemically synthesized
cgtcggacttgaccgtcatg

SEQ ID NO: 1592 - DNA, 20 bp, Artificial Sequence
  chemically synthesized
gtcggacttgaccgtcatgg

SEQ ID NO: 1593 - DNA, 20 bp, Artificial Sequence
  chemically synthesized
tgtgcatgtgcgtcttcatg

SEQ ID NO: 1594 - DNA, 20 bp, Artificial Sequence
  chemically synthesized
tgcgtcttcatgtggcgctt

SEQ ID NO: 1595 - DNA, 20 bp, Artificial Sequence
  chemically synthesized
catgtggcgcttcagcttgc

SEQ ID NO: 1596 - DNA, 20 bp, Artificial Sequence
  chemically synthesized
ggcgcttcagcttgctggcc

SEQ ID NO: 1597 - DNA, 20 bp, Artificial Sequence
  chemically synthesized
gcgcttcagcttgctggcct

SEQ ID NO: 1598 - DNA, 20 bp, Artificial Sequence
  chemically synthesized
tgctggcctgggtgcacgcg

SEQ ID NO: 1599 - DNA, 20 bp, Artificial Sequence
  chemically synthesized
tgggtgcacgcgtggtcgca

SEQ ID NO: 1600 - DNA, 20 bp, Artificial Sequence
  chemically synthesized
gggtgcacgcgtggtcgcac

SEQ ID NO: 1601 - DNA, 20 bp, Artificial Sequence
  chemically synthesized
ggtcgcacaggttgcacttg

SEQ ID NO: 1602 - DNA, 20 bp, Artificial Sequence
  chemically synthesized
gtcgcacaggttgcacttgt

SEQ ID NO: 1603 - DNA, 20 bp, Artificial Sequence
  chemically synthesized
tcgcacaggttgcacttgta

SEQ ID NO: 1604 - DNA, 20 bp, Artificial Sequence
  chemically synthesized
tgtagggcttctcgcccgtg

SEQ ID NO: 1605 - DNA, 20 bp, Artificial Sequence
  chemically synthesized
tctcgcccgtgtggctgcgc

SEQ ID NO: 1606 - DNA, 20 bp, Artificial Sequence
  chemically synthesized
tggctgcgccggtgcaccac

SEQ ID NO: 1607 - DNA, 20 bp, Artificial Sequence
  chemically synthesized
ggctgcgccggtgcaccacc

SEQ ID NO: 1608 - DNA, 20 bp, Artificial Sequence
  chemically synthesized
gaaatttgaacgtcttgccg

SEQ ID NO: 1609 - DNA, 20 bp, Artificial Sequence
  chemically synthesized
gccgcagaactcgcatgact

SEQ ID NO: 1610 - DNA, 20 bp, Artificial Sequence
  chemically synthesized
tcgcatgacttggacttgac

SEQ ID NO: 1611 - DNA, 20 bp, Artificial Sequence
  chemically synthesized
cgcatgacttggacttgacc

SEQ ID NO: 1612 - DNA, 20 bp, Artificial Sequence
  chemically synthesized
gcatgacttggacttgaccg

SEQ ID NO: 1613 - DNA, 20 bp, Artificial Sequence
  chemically synthesized
catgacttggacttgaccgg

SEQ ID NO: 1614 - DNA, 20 bp, Artificial Sequence
  chemically synthesized
acttggacttgaccgggggc

SEQ ID NO: 1615 - DNA, 20 bp, Artificial Sequence
  chemically synthesized
cttggacttgaccgggggct

SEQ ID NO: 1616 - DNA, 20 bp, Artificial Sequence
  chemically synthesized
tggacttgaccgggggctgg

SEQ ID NO: 1617 - DNA, 20 bp, Artificial Sequence
  chemically synthesized
ggacttgaccgggggctggg

SEQ ID NO: 1618 - DNA, 20 bp, Artificial Sequence
  chemically synthesized
gacttgaccgggggctggga

SEQ ID NO: 1619 - DNA, 20 bp, Artificial Sequence
  chemically synthesized
cttgaccgggggctgggagg

SEQ ID NO: 1620 - DNA, 20 bp, Artificial Sequence
  chemically synthesized
ttgaccgggggctgggaggg

SEQ ID NO: 1621 - DNA, 20 bp, Artificial Sequence
  chemically synthesized
gaccgggggctgggagggag

SEQ ID NO: 1622 - DNA, 20 bp, Artificial Sequence
  chemically synthesized
accgggggctgggagggagg

SEQ ID NO: 1623 - DNA, 20 bp, Artificial Sequence
  chemically synthesized
ccgggggctgggagggagga

SEQ ID NO: 1624 - DNA, 20 bp, Artificial Sequence
  chemically synthesized
cgggggctgggagggaggag

SEQ ID NO: 1625 - DNA, 20 bp, Artificial Sequence
  chemically synthesized
gggctgggagggaggagggg

SEQ ID NO: 1626 - DNA, 20 bp, Artificial Sequence
  chemically synthesized
gagggaggaggggcggattg

SEQ ID NO: 1627 - DNA, 20 bp, Artificial Sequence
  chemically synthesized
gggaggaggggcggattgca

SEQ ID NO: 1628 - DNA, 20 bp, Artificial Sequence
  chemically synthesized
ggaggaggggcggattgcag

SEQ ID NO: 1629 - DNA, 20 bp, Artificial Sequence
  chemically synthesized
aggaggggcggattgcagag

SEQ ID NO: 1630 - DNA, 20 bp, Artificial Sequence
  chemically synthesized
ggaggggcggattgcagagg

SEQ ID NO: 1631 - DNA, 20 bp, Artificial Sequence
  chemically synthesized
gaggggcggattgcagagga

SEQ ID NO: 1632 - DNA, 20 bp, Artificial Sequence
  chemically synthesized
ggggcggattgcagaggagg

SEQ ID NO: 1633 - DNA, 20 bp, Artificial Sequence
  chemically synthesized
gggcggattgcagaggaggg

SEQ ID NO: 1634 - DNA, 20 bp, Artificial Sequence
  chemically synthesized
ggcggattgcagaggaggga

SEQ ID NO: 1635 - DNA, 20 bp, Artificial Sequence
  chemically synthesized
gcggattgcagaggagggag

SEQ ID NO: 1636 - DNA, 20 bp, Artificial Sequence
  chemically synthesized
cggattgcagaggagggagg

SEQ ID NO: 1637 - DNA, 20 bp, Artificial Sequence
  chemically synthesized
ggattgcagaggagggaggg

SEQ ID NO: 1638 - DNA, 20 bp, Artificial Sequence
  chemically synthesized
gattgcagaggagggagggg

SEQ ID NO: 1639 - DNA, 20 bp, Artificial Sequence
  chemically synthesized
ggagggagggggggcgtcgc

SEQ ID NO: 1640 - DNA, 20 bp, Artificial Sequence
  chemically synthesized
gagggagggggggcgtcgcc

SEQ ID NO: 1641 - DNA, 20 bp, Artificial Sequence
  chemically synthesized
ggagggggggcgtcgccagg

SEQ ID NO: 1642 - DNA, 20 bp, Artificial Sequence
  chemically synthesized
gagggggggcgtcgccagga

SEQ ID NO: 1643 - DNA, 20 bp, Artificial Sequence
  chemically synthesized
agggggggcgtcgccaggaa

SEQ ID NO: 1644 - DNA, 20 bp, Artificial Sequence
  chemically synthesized
gggggcgtcgccaggaaggg

SEQ ID NO: 1645 - DNA, 20 bp, Artificial Sequence
  chemically synthesized
aggaagggcggcttgctacc

SEQ ID NO: 1646 - DNA, 20 bp, Artificial Sequence
  chemically synthesized
agggcggcttgctacctggc

SEQ ID NO: 1647 - DNA, 20 bp, Artificial Sequence
  chemically synthesized
ggcttgctacctggctggaa

SEQ ID NO: 1648 - DNA, 20 bp, Artificial Sequence
  chemically synthesized
ctacctggctggaatggttg

SEQ ID NO: 1649 - DNA, 20 bp, Artificial Sequence
  chemically synthesized
tggttgcagtaacctttgca

SEQ ID NO: 1650 - DNA, 20 bp, Artificial Sequence
  chemically synthesized
ggttgcagtaacctttgcat

SEQ ID NO: 1651 - DNA, 20 bp, Artificial Sequence
  chemically synthesized
gttgcagtaacctttgcata

SEQ ID NO: 1652 - DNA, 20 bp, Artificial Sequence
  chemically synthesized
cagtaacctttgcatagggc

SEQ ID NO: 1653 - DNA, 20 bp, Artificial Sequence
  chemically synthesized
agtaacctttgcatagggct

SEQ ID NO: 1654 - DNA, 20 bp, Artificial Sequence
  chemically synthesized
acctttgcatagggctgggc

SEQ ID NO: 1655 - DNA, 20 bp, Artificial Sequence
  chemically synthesized
tgcatagggctgggccggcc

SEQ ID NO: 1656 - DNA, 20 bp, Artificial Sequence
  chemically synthesized
gcatagggctgggccggcct

SEQ ID NO: 1657 - DNA, 20 bp, Artificial Sequence
  chemically synthesized
catagggctgggccggcctg

SEQ ID NO: 1658 - DNA, 20 bp, Artificial Sequence
  chemically synthesized
gggctgggccggcctgggga

SEQ ID NO: 1659 - DNA, 20 bp, Artificial Sequence
  chemically synthesized
ctgggccggcctggggacag

SEQ ID NO: 1660 - DNA, 20 bp, Artificial Sequence
  chemically synthesized
ggccggcctggggacagcgg

SEQ ID NO: 1661 - DNA, 20 bp, Artificial Sequence
  chemically synthesized
gccggcctggggacagcggt

SEQ ID NO: 1662 - DNA, 20 bp, Artificial Sequence
  chemically synthesized
gcctggggacagcggtgggc

SEQ ID NO: 1663 - DNA, 20 bp, Artificial Sequence
  chemically synthesized
gggctagacgtgttccctgc

SEQ ID NO: 1664 - DNA, 20 bp, Artificial Sequence
  chemically synthesized
gtgttccctgccagctctct

SEQ ID NO: 1665 - DNA, 20 bp, Artificial Sequence
  chemically synthesized
tgccagctctctaagtctcc

SEQ ID NO: 1666 - DNA, 20 bp, Artificial Sequence
  chemically synthesized
ccagctctctaagtctccta

SEQ ID NO: 1667 - DNA, 20 bp, Artificial Sequence
  chemically synthesized
aagtctcctagagaaatcca

SEQ ID NO: 1668 - DNA, 20 bp, Artificial Sequence
  chemically synthesized
tctcctagagaaatccatgg

SEQ ID NO: 1669 - DNA, 20 bp, Artificial Sequence
  chemically synthesized
ctcctagagaaatccatggc

SEQ ID NO: 1670 - DNA, 20 bp, Artificial Sequence
  chemically synthesized
cctagagaaatccatggcgg

SEQ ID NO: 1671 - DNA, 20 bp, Artificial Sequence
  chemically synthesized
ctagagaaatccatggcggg

SEQ ID NO: 1672 - DNA, 20 bp, Artificial Sequence
  chemically synthesized
atccatggcgggaggctcca

SEQ ID NO: 1673 - DNA, 20 bp, Artificial Sequence
  chemically synthesized
gcgggaggctccatagccat

SEQ ID NO: 1674 - DNA, 20 bp, Artificial Sequence
  chemically synthesized
atagccattggattcaaccg

SEQ ID NO: 1675 - DNA, 20 bp, Artificial Sequence
  chemically synthesized
tcaaccgcagcaccctgtca

SEQ ID NO: 1676 - DNA, 20 bp, Artificial Sequence
  chemically synthesized
caaccgcagcaccctgtcaa

SEQ ID NO: 1677 - DNA, 20 bp, Artificial Sequence
  chemically synthesized
agcaccctgtcaaaggcact

SEQ ID NO: 1678 - DNA, 20 bp, Artificial Sequence
  chemically synthesized
gcaccctgtcaaaggcactc

SEQ ID NO: 1679 - DNA, 20 bp, Artificial Sequence
  chemically synthesized
tgtcaaaggcactcgggtga

SEQ ID NO: 1680 - DNA, 20 bp, Artificial Sequence
  chemically synthesized
gtcaaaggcactcgggtgat

SEQ ID NO: 1681 - DNA, 20 bp, Artificial Sequence
  chemically synthesized
aaaggcactcgggtgatggg

SEQ ID NO: 1682 - DNA, 20 bp, Artificial Sequence
  chemically synthesized
gcactcgggtgatgggtggc

SEQ ID NO: 1683 - DNA, 20 bp, Artificial Sequence
  chemically synthesized
cactcgggtgatgggtggcc

SEQ ID NO: 1684 - DNA, 20 bp, Artificial Sequence
  chemically synthesized
actcgggtgatgggtggcca

SEQ ID NO: 1685 - DNA, 20 bp, Artificial Sequence
  chemically synthesized
agggccatctcttccgcccc

SEQ ID NO: 1686 - DNA, 20 bp, Artificial Sequence
  chemically synthesized
gggccatctcttccgccccc

SEQ ID NO: 1687 - DNA, 20 bp, Artificial Sequence
  chemically synthesized
ccgcccccaggcgctctatg

SEQ ID NO: 1688 - DNA, 20 bp, Artificial Sequence
  chemically synthesized
cccccaggcgctctatgcgg

SEQ ID NO: 1689 - DNA, 20 bp, Artificial Sequence
  chemically synthesized
ccccaggcgctctatgcggt

SEQ ID NO: 1690 - DNA, 20 bp, Artificial Sequence
  chemically synthesized
cccaggcgctctatgcggtg

SEQ ID NO: 1691 - DNA, 20 bp, Artificial Sequence
  chemically synthesized
ccaggcgctctatgcggtgg

SEQ ID NO: 1692 - DNA, 20 bp, Artificial Sequence
  chemically synthesized
gctctatgcggtgggggtcc

SEQ ID NO: 1693 - DNA, 20 bp, Artificial Sequence
  chemically synthesized
tgggggtccaagtgatgtct

SEQ ID NO: 1694 - DNA, 20 bp, Artificial Sequence
  chemically synthesized
gggtccaagtgatgtctcgg

SEQ ID NO: 1695 - DNA, 20 bp, Artificial Sequence
  chemically synthesized
tccaagtgatgtctcggtgg

SEQ ID NO: 1696 - DNA, 20 bp, Artificial Sequence
  chemically synthesized
tgtctcggtggtggactaaa

SEQ ID NO: 1697 - DNA, 20 bp, Artificial Sequence
  chemically synthesized
gtctcggtggtggactaaac

SEQ ID NO: 1698 - DNA, 20 bp, Artificial Sequence
  chemically synthesized
tctcggtggtggactaaaca

SEQ ID NO: 1699 - DNA, 20 bp, Artificial Sequence
  chemically synthesized
ctcggtggtggactaaacag

SEQ ID NO: 1700 - DNA, 20 bp, Artificial Sequence
  chemically synthesized
tcggtggtggactaaacagg

SEQ ID NO: 1701 - DNA, 20 bp, Artificial Sequence
  chemically synthesized
cggtggtggactaaacaggg

SEQ ID NO: 1702 - DNA, 20 bp, Artificial Sequence
  chemically synthesized
ggtggtggactaaacagggg

SEQ ID NO: 1703 - DNA, 20 bp, Artificial Sequence
  chemically synthesized
tggtggactaaacagggggg

SEQ ID NO: 1704 - DNA, 20 bp, Artificial Sequence
  chemically synthesized
tggactaaacagggggggag

SEQ ID NO: 1705 - DNA, 20 bp, Artificial Sequence
  chemically synthesized
ggactaaacagggggggagt

SEQ ID NO: 1706 - DNA, 20 bp, Artificial Sequence
  chemically synthesized
ctaaacagggggggagtggg

SEQ ID NO: 1707 - DNA, 20 bp, Artificial Sequence
  chemically synthesized
acagggggggagtgggtgga

SEQ ID NO: 1708 - DNA, 20 bp, Artificial Sequence
  chemically synthesized
ggtggaaagcgcccttctgc

SEQ ID NO: 1709 - DNA, 20 bp, Artificial Sequence
  chemically synthesized
gtggaaagcgcccttctgcc

SEQ ID NO: 1710 - DNA, 20 bp, Artificial Sequence
  chemically synthesized
aaagcgcccttctgccaggc

SEQ ID NO: 1711 - DNA, 20 bp, Artificial Sequence
  chemically synthesized
gcgcccttctgccaggccgg

SEQ ID NO: 1712 - DNA, 20 bp, Artificial Sequence
  chemically synthesized
gcctctctcgatactgatcc

SEQ ID NO: 1713 - DNA, 20 bp, Artificial Sequence
  chemically synthesized
gatactgatcctggtattct

SEQ ID NO: 1714 - DNA, 20 bp, Artificial Sequence
  chemically synthesized
actgatcctggtattcttag

SEQ ID NO: 1715 - DNA, 20 bp, Artificial Sequence
  chemically synthesized
ctgatcctggtattcttagc

SEQ ID NO: 1716 - DNA, 20 bp, Artificial Sequence
  chemically synthesized
ctggtattcttagcaggtta

SEQ ID NO: 1717 - DNA, 20 bp, Artificial Sequence
  chemically synthesized
tggtattcttagcaggttaa

SEQ ID NO: 1718 - DNA, 20 bp, Artificial Sequence
  chemically synthesized
ggtattcttagcaggttaaa

SEQ ID NO: 1719 - DNA, 20 bp, Artificial Sequence
  chemically synthesized
gtattcttagcaggttaaag

SEQ ID NO: 1720 - DNA, 20 bp, Artificial Sequence
  chemically synthesized
tgtctgcaatatgaatccca

SEQ ID NO: 1721 - DNA, 20 bp, Artificial Sequence
  chemically synthesized
tctgcaatatgaatcccatg

SEQ ID NO: 1722 - DNA, 20 bp, Artificial Sequence
  chemically synthesized
tgcaatatgaatcccatgga

SEQ ID NO: 1723 - DNA, 20 bp, Artificial Sequence
  chemically synthesized
gcaatatgaatcccatggag

SEQ ID NO: 1724 - DNA, 20 bp, Artificial Sequence
  chemically synthesized
atatgaatcccatggagagg

SEQ ID NO: 1725 - DNA, 20 bp, Artificial Sequence
  chemically synthesized
gaatcccatggagaggtggc

SEQ ID NO: 1726 - DNA, 20 bp, Artificial Sequence
  chemically synthesized
aatcccatggagaggtggct

SEQ ID NO: 1727 - DNA, 20 bp, Artificial Sequence
  chemically synthesized
cccatggagaggtggctggg

SEQ ID NO: 1728 - DNA, 20 bp, Artificial Sequence
  chemically synthesized
ccatggagaggtggctggga

SEQ ID NO: 1729 - DNA, 20 bp, Artificial Sequence
  chemically synthesized
tgggaaggacattctgcacc

SEQ ID NO: 1730 - DNA, 20 bp, Artificial Sequence
  chemically synthesized
acattctgcacctagtcctg

SEQ ID NO: 1731 - DNA, 20 bp, Artificial Sequence
  chemically synthesized
cattctgcacctagtcctga

SEQ ID NO: 1732 - DNA, 20 bp, Artificial Sequence
  chemically synthesized
attctgcacctagtcctgaa

SEQ ID NO: 1733 - DNA, 20 bp, Artificial Sequence
  chemically synthesized
cctgaagggataccaacccg

SEQ ID NO: 1734 - DNA, 20 bp, Artificial Sequence
  chemically synthesized
ctgaagggataccaacccgc

SEQ ID NO: 1735 - DNA, 20 bp, Artificial Sequence
  chemically synthesized
tgaagggataccaacccgcg

SEQ ID NO: 1736 - DNA, 20 bp, Artificial Sequence
  chemically synthesized
gggataccaacccgcggggt

SEQ ID NO: 1737 - DNA, 20 bp, Artificial Sequence
  chemically synthesized
ggataccaacccgcggggtc

SEQ ID NO: 1738 - DNA, 20 bp, Artificial Sequence
  chemically synthesized
gataccaacccgcggggtca

SEQ ID NO: 1739 - DNA, 20 bp, Artificial Sequence
  chemically synthesized
ataccaacccgcggggtcag

SEQ ID NO: 1740 - DNA, 20 bp, Artificial Sequence
  chemically synthesized
gacttccgtgttcgctttct

SEQ ID NO: 1741 - DNA, 20 bp, Artificial Sequence
  chemically synthesized
ttccgtgttcgctttctaag

SEQ ID NO: 1742 - DNA, 20 bp, Artificial Sequence
  chemically synthesized
taagtagattcttaatccat

SEQ ID NO: 1743 - DNA, 20 bp, Artificial Sequence
  chemically synthesized
gagtgttctgtgcgtgttgc

SEQ ID NO: 1744 - DNA, 20 bp, Artificial Sequence
  chemically synthesized
gtgttctgtgcgtgttgcaa

SEQ ID NO: 1745 - DNA, 20 bp, Artificial Sequence
  chemically synthesized
ttgcaagagaaaccatgcac

SEQ ID NO: 1746 - DNA, 20 bp, Artificial Sequence
  chemically synthesized
agaaaccatgcactggtgaa

SEQ ID NO: 1747 - DNA, 20 bp, Artificial Sequence
  chemically synthesized
actggtgaatggctgtttgc

SEQ ID NO: 1748 - DNA, 20 bp, Artificial Sequence
  chemically synthesized
gtttgcaagttgtacatgtg

SEQ ID NO: 1749 - DNA, 20 bp, Artificial Sequence
  chemically synthesized
agttgtacatgtgtagctgc

SEQ ID NO: 1750 - DNA, 20 bp, Artificial Sequence
  chemically synthesized
gttgtacatgtgtagctgct

SEQ ID NO: 1751 - DNA, 20 bp, Artificial Sequence
  chemically synthesized
aacatcaatgtttaatcact

SEQ ID NO: 1752 - DNA, 20 bp, Artificial Sequence
  chemically synthesized
acatcaatgtttaatcactg

SEQ ID NO: 1753 - DNA, 20 bp, Artificial Sequence
  chemically synthesized
tcaatgtttaatcactgagg

SEQ ID NO: 1754 - DNA, 20 bp, Artificial Sequence
  chemically synthesized
caatgtttaatcactgaggc

SEQ ID NO: 1755 - DNA, 20 bp, Artificial Sequence
  chemically synthesized
ttaatcactgaggcgggcat

SEQ ID NO: 1756 - DNA, 20 bp, Artificial Sequence
  chemically synthesized
gcttatttatgttccacctc

SEQ ID NO: 1757 - DNA, 20 bp, Artificial Sequence
  chemically synthesized
tgcccccacccctcaacccc

SEQ ID NO: 1758 - DNA, 20 bp, Artificial Sequence
  chemically synthesized
gcccccacccctcaacccca

SEQ ID NO: 1759 - DNA, 20 bp, Artificial Sequence
  chemically synthesized
acccctcaaccccaaggcct

SEQ ID NO: 1760 - DNA, 20 bp, Artificial Sequence
  chemically synthesized
actgacctaccccctgtgcc

SEQ ID NO: 1761 - DNA, 20 bp, Artificial Sequence
  chemically synthesized
cccctgtgcctggcacgtct

SEQ ID NO: 1762 - DNA, 20 bp, Artificial Sequence
  chemically synthesized
gtgcctggcacgtctgagca

SEQ ID NO: 1763 - DNA, 20 bp, Artificial Sequence
  chemically synthesized
tgcctggcacgtctgagcat

SEQ ID NO: 1764 - DNA, 20 bp, Artificial Sequence
  chemically synthesized
cacgtctgagcatgggtacc

SEQ ID NO: 1765 - DNA, 20 bp, Artificial Sequence
  chemically synthesized
catgggtacccagtaaatat

SEQ ID NO: 1766 - DNA, 20 bp, Artificial Sequence
  chemically synthesized
gatcttcctgccattaaact

SEQ ID NO: 1767 - DNA, 20 bp, Artificial Sequence
  chemically synthesized
cctgccattaaactcagttc

SEQ ID NO: 1768 - DNA, 20 bp, Artificial Sequence
  chemically synthesized
aattttatatccaatcccca

SEQ ID NO: 1769 - DNA, 20 bp, Artificial Sequence
  chemically synthesized
tttatatccaatccccaaag

SEQ ID NO: 1770 - DNA, 20 bp, Artificial Sequence
  chemically synthesized
caaagcagaaaaatcctgac

SEQ ID NO: 1771 - DNA, 20 bp, Artificial Sequence
  chemically synthesized
agaaaaatcctgaccagttc

SEQ ID NO: 1772 - DNA, 20 bp, Artificial Sequence
  chemically synthesized
atcctgaccagttctggctt

SEQ ID NO: 1773 - DNA, 20 bp, Artificial Sequence
  chemically synthesized
tcctgaccagttctggcttg

SEQ ID NO: 1774 - DNA, 20 bp, Artificial Sequence
  chemically synthesized
ccagttctggcttgaggatg

SEQ ID NO: 1775 - DNA, 20 bp, Artificial Sequence
  chemically synthesized
cagttctggcttgaggatga

SEQ ID NO: 1776 - DNA, 20 bp, Artificial Sequence
  chemically synthesized
ggatgaaggtccctacattc

SEQ ID NO: 1777 - DNA, 20 bp, Artificial Sequence
  chemically synthesized
gatgaaggtccctacattct

SEQ ID NO: 1778 - DNA, 20 bp, Artificial Sequence
  chemically synthesized
caaatgtcttctaaactttc

SEQ ID NO: 1779 - DNA, 20 bp, Artificial Sequence
  chemically synthesized
tctaaactttccagttccat

SEQ ID NO: 1780 - DNA, 20 bp, Artificial Sequence
  chemically synthesized
ctttccagttccatcagctg

SEQ ID NO: 1781 - DNA, 20 bp, Artificial Sequence
  chemically synthesized
cagttccatcagctgtagtt

SEQ ID NO: 1782 - DNA, 20 bp, Artificial Sequence
  chemically synthesized
agttccatcagctgtagttt

SEQ ID NO: 1783 - DNA, 20 bp, Artificial Sequence
  chemically synthesized
gttccatcagctgtagtttg

SEQ ID NO: 1784 - DNA, 20 bp, Artificial Sequence
  chemically synthesized
catcagctgtagtttggggc

SEQ ID NO: 1785 - DNA, 20 bp, Artificial Sequence
  chemically synthesized
gcctctgtttcctccttgtt

SEQ ID NO: 1786 - DNA, 20 bp, Artificial Sequence
  chemically synthesized
ctgtttcctccttgttaagt

SEQ ID NO: 1787 - DNA, 20 bp, Artificial Sequence
  chemically synthesized
tccttgttaagtgagaaact

SEQ ID NO: 1788 - DNA, 20 bp, Artificial Sequence
  chemically synthesized
gttaagtgagaaacttggac

SEQ ID NO: 1789 - DNA, 20 bp, Artificial Sequence
  chemically synthesized
ttaagtgagaaacttggaca

SEQ ID NO: 1790 - DNA, 20 bp, Artificial Sequence
  chemically synthesized
aaacttggacaaggtgaccc

SEQ ID NO: 1791 - DNA, 20 bp, Artificial Sequence
  chemically synthesized
aacttggacaaggtgaccca

SEQ ID NO: 1792 - DNA, 20 bp, Artificial Sequence
  chemically synthesized
ggtgacccaaggaaactttt

SEQ ID NO: 1793 - DNA, 20 bp, Artificial Sequence
  chemically synthesized
ctttttggcttcctaaatcc

SEQ ID NO: 1794 - DNA, 20 bp, Artificial Sequence
  chemically synthesized
cccagctttctattcccccc

SEQ ID NO: 1795 - DNA, 20 bp, Artificial Sequence
  chemically synthesized
ccagctttctattcccccct

SEQ ID NO: 1796 - DNA, 20 bp, Artificial Sequence
  chemically synthesized
ttctattcccccctgggtga

SEQ ID NO: 1797 - DNA, 20 bp, Artificial Sequence
  chemically synthesized
tctattcccccctgggtgac

SEQ ID NO: 1798 - DNA, 20 bp, Artificial Sequence
  chemically synthesized
tgacaggtgaactttctaaa

SEQ ID NO: 1799 - DNA, 20 bp, Artificial Sequence
  chemically synthesized
gacaggtgaactttctaaat

SEQ ID NO: 1800 - DNA, 20 bp, Artificial Sequence
  chemically synthesized
ctaaataggcaaacatttca

SEQ ID NO: 1801 - DNA, 20 bp, Artificial Sequence
  chemically synthesized
aaataggcaaacatttcata

SEQ ID NO: 1802 - DNA, 20 bp, Artificial Sequence
  chemically synthesized
aataggcaaacatttcatag

SEQ ID NO: 1803 - DNA, 20 bp, Artificial Sequence
  chemically synthesized
atttcatagaggtatcaaaa

SEQ ID NO: 1804 - DNA, 20 bp, Artificial Sequence
  chemically synthesized
tttcatagaggtatcaaaaa

SEQ ID NO: 1805 - DNA, 20 bp, Artificial Sequence
  chemically synthesized
ttcatagaggtatcaaaaaa

SEQ ID NO: 1806 - DNA, 20 bp, Artificial Sequence
  chemically synthesized
tcatagaggtatcaaaaaag

SEQ ID NO: 1807 - DNA, 20 bp, Artificial Sequence
  chemically synthesized
tagaggtatcaaaaaagggg

SEQ ID NO: 1808 - DNA, 20 bp, Artificial Sequence
  chemically synthesized
aggtatcaaaaaaggggaag

SEQ ID NO: 1809 - DNA, 20 bp, Artificial Sequence
  chemically synthesized
ggtatcaaaaaaggggaaga

SEQ ID NO: 1810 - DNA, 20 bp, Artificial Sequence
  chemically synthesized
caactcactacaatgttcta

SEQ ID NO: 1811 - DNA, 20 bp, Artificial Sequence
  chemically synthesized
tacaatgttctatggcccta

SEQ ID NO: 1812 - DNA, 20 bp, Artificial Sequence
  chemically synthesized
tatggccctaaagatgcttt

SEQ ID NO: 1813 - DNA, 20 bp, Artificial Sequence
  chemically synthesized
cctaaagatgctttcagcat

SEQ ID NO: 1814 - DNA, 20 bp, Artificial Sequence
  chemically synthesized
attgttgatattgttaaaat

SEQ ID NO: 1815 - DNA, 20 bp, Artificial Sequence
  chemically synthesized
tgttgatattgttaaaatga

SEQ ID NO: 1816 - DNA, 20 bp, Artificial Sequence
  chemically synthesized
gttgatattgttaaaatgag

SEQ ID NO: 1817 - DNA, 20 bp, Artificial Sequence
  chemically synthesized
ttgatattgttaaaatgaga

SEQ ID NO: 1818 - DNA, 20 bp, Artificial Sequence
  chemically synthesized
gtactcataaaatacttccg

SEQ ID NO: 1819 - DNA, 20 bp, Artificial Sequence
  chemically synthesized
taaaatacttccgtggaaaa

SEQ ID NO: 1820 - DNA, 20 bp, Artificial Sequence
  chemically synthesized
tacttccgtggaaaaaagac

SEQ ID NO: 1821 - DNA, 20 bp, Artificial Sequence
  chemically synthesized
ctagcaacattctcacaccc

SEQ ID NO: 1822 - DNA, 20 bp, Artificial Sequence
  chemically synthesized
cattctcacaccccagactg

SEQ ID NO: 1823 - DNA, 20 bp, Artificial Sequence
  chemically synthesized
attctcacaccccagactgt

SEQ ID NO: 1824 - DNA, 20 bp, Artificial Sequence
  chemically synthesized
tctcacaccccagactgtgg

SEQ ID NO: 1825 - DNA, 20 bp, Artificial Sequence
  chemically synthesized
ctcacaccccagactgtggg

SEQ ID NO: 1826 - DNA, 20 bp, Artificial Sequence
  chemically synthesized
accccagactgtgggaggat

SEQ ID NO: 1827 - DNA, 20 bp, Artificial Sequence
  chemically synthesized
cagactgtgggaggatcagt

SEQ ID NO: 1828 - DNA, 20 bp, Artificial Sequence
  chemically synthesized
ggatcagtgagtcccaattt

SEQ ID NO: 1829 - DNA, 20 bp, Artificial Sequence
  chemically synthesized
tttggttccacaacacccca

SEQ ID NO: 1830 - DNA, 20 bp, Artificial Sequence
  chemically synthesized
ttggttccacaacaccccat

SEQ ID NO: 1831 - DNA, 20 bp, Artificial Sequence
  chemically synthesized
tggttccacaacaccccatg

SEQ ID NO: 1832 - DNA, 20 bp, Artificial Sequence
  chemically synthesized
ggacgtccatttttatctca

SEQ ID NO: 1833 - DNA, 20 bp, Artificial Sequence
  chemically synthesized
agaatgtttaaaaaatctga

SEQ ID NO: 1834 - DNA, 20 bp, Artificial Sequence
  chemically synthesized
tctgaaagaaaaacttcatt

SEQ ID NO: 1835 - DNA, 20 bp, Artificial Sequence
  chemically synthesized
aaaacttcattcagatttaa

SEQ ID NO: 1836 - DNA, 20 bp, Artificial Sequence
  chemically synthesized
cttcattcagatttaacgga

SEQ ID NO: 1837 - DNA, 20 bp, Artificial Sequence
  chemically synthesized
ttcattcagatttaacggat

SEQ ID NO: 1838 - DNA, 20 bp, Artificial Sequence
  chemically synthesized
gataggctgtatccaatctt

SEQ ID NO: 1839 - DNA, 20 bp, Artificial Sequence
  chemically synthesized
ataggctgtatccaatcttt

SEQ ID NO: 1840 - DNA, 20 bp, Artificial Sequence
  chemically synthesized
aggctgtatccaatctttag

SEQ ID NO: 1841 - DNA, 20 bp, Artificial Sequence
  chemically synthesized
aatctttaggagttgtcccc

SEQ ID NO: 1842 - DNA, 20 bp, Artificial Sequence
  chemically synthesized
tttaggagttgtcccccggt

SEQ ID NO: 1843 - DNA, 20 bp, Artificial Sequence
  chemically synthesized
tcccccggtcagacaaatgc

SEQ ID NO: 1844 - DNA, 20 bp, Artificial Sequence
  chemically synthesized
cggtcagacaaatgcaagtc

SEQ ID NO: 1845 - DNA, 20 bp, Artificial Sequence
  chemically synthesized
agacaaatgcaagtctggaa

SEQ ID NO: 1846 - DNA, 20 bp, Artificial Sequence
  chemically synthesized
aaatgcaagtctggaaaagt

SEQ ID NO: 1847 - DNA, 20 bp, Artificial Sequence
  chemically synthesized
aatgcaagtctggaaaagtt

SEQ ID NO: 1848 - DNA, 20 bp, Artificial Sequence
  chemically synthesized
tgcaagtctggaaaagttag

SEQ ID NO: 1849 - DNA, 20 bp, Artificial Sequence
  chemically synthesized
gcaagtctggaaaagttagg

SEQ ID NO: 1850 - DNA, 20 bp, Artificial Sequence
  chemically synthesized
aagtctggaaaagttaggag

SEQ ID NO: 1851 - DNA, 20 bp, Artificial Sequence
  chemically synthesized
tctggaaaagttaggaggag

SEQ ID NO: 1852 - DNA, 20 bp, Artificial Sequence
  chemically synthesized
gaaaagttaggaggagtggc

SEQ ID NO: 1853 - DNA, 20 bp, Artificial Sequence
  chemically synthesized
ggagtggctggtgccgactt

SEQ ID NO: 1854 - DNA, 20 bp, Artificial Sequence
  chemically synthesized
gtggctggtgccgacttaag

SEQ ID NO: 1855 - DNA, 20 bp, Artificial Sequence
  chemically synthesized
ggtgccgacttaagcagaca

SEQ ID NO: 1856 - DNA, 20 bp, Artificial Sequence
  chemically synthesized
cttaagcagacacagcatcc

SEQ ID NO: 1857 - DNA, 20 bp, Artificial Sequence
  chemically synthesized
cagacacagcatcctagttt

SEQ ID NO: 1858 - DNA, 20 bp, Artificial Sequence
  chemically synthesized
agacacagcatcctagttta

SEQ ID NO: 1859 - DNA, 20 bp, Artificial Sequence
  chemically synthesized
cagcatcctagtttaaggaa

SEQ ID NO: 1860 - DNA, 20 bp, Artificial Sequence
  chemically synthesized
agtttaaggaacagttaaaa

SEQ ID NO: 1861 - DNA, 20 bp, Artificial Sequence
  chemically synthesized
taaggaacagttaaaacagc

SEQ ID NO: 1862 - DNA, 20 bp, Artificial Sequence
  chemically synthesized
taaaacagccagcgccatga

SEQ ID NO: 1863 - DNA, 20 bp, Artificial Sequence
  chemically synthesized
aaaacagccagcgccatgac

SEQ ID NO: 1864 - DNA, 20 bp, Artificial Sequence
  chemically synthesized
acagccagcgccatgacagg

SEQ ID NO: 1865 - DNA, 20 bp, Artificial Sequence
  chemically synthesized
gccagcgccatgacaggcag

SEQ ID NO: 1866 - DNA, 20 bp, Artificial Sequence
  chemically synthesized
ccagcgccatgacaggcagc

SEQ ID NO: 1867 - DNA, 20 bp, Artificial Sequence
  chemically synthesized
gccatgacaggcagcaggct

SEQ ID NO: 1868 - DNA, 20 bp, Artificial Sequence
  chemically synthesized
atcctcctcctcattgtttt

SEQ ID NO: 1869 - DNA, 20 bp, Artificial Sequence
  chemically synthesized
cctcctcctcattgttttga

SEQ ID NO: 1870 - DNA, 20 bp, Artificial Sequence
  chemically synthesized
ctcctcctcattgttttgag

SEQ ID NO: 1871 - DNA, 20 bp, Artificial Sequence
  chemically synthesized
tatacaacatcctgcgccct

SEQ ID NO: 1872 - DNA, 20 bp, Artificial Sequence
  chemically synthesized
caacatcctgcgccctcggc

SEQ ID NO: 1873 - DNA, 20 bp, Artificial Sequence
  chemically synthesized
aacatcctgcgccctcggct

SEQ ID NO: 1874 - DNA, 20 bp, Artificial Sequence
  chemically synthesized
ctgcgccctcggctgggact

SEQ ID NO: 1875 - DNA, 20 bp, Artificial Sequence
  chemically synthesized
cctcggctgggactcagctc

SEQ ID NO: 1876 - DNA, 20 bp, Artificial Sequence
  chemically synthesized
gctgggactcagctccagtt

SEQ ID NO: 1877 - DNA, 20 bp, Artificial Sequence
  chemically synthesized
ggactcagctccagttgaga

SEQ ID NO: 1878 - DNA, 20 bp, Artificial Sequence
  chemically synthesized
agctccagttgagaaagaaa

SEQ ID NO: 1879 - DNA, 20 bp, Artificial Sequence
  chemically synthesized
ccagttgagaaagaaacaga

SEQ ID NO: 1880 - DNA, 20 bp, Artificial Sequence
  chemically synthesized
gagaaagaaacagaaagata

SEQ ID NO: 1881 - DNA, 20 bp, Artificial Sequence
  chemically synthesized
agaaacagaaagatacagtt

SEQ ID NO: 1882 - DNA, 20 bp, Artificial Sequence
  chemically synthesized
acagaaagatacagttcagc

SEQ ID NO: 1883 - DNA, 20 bp, Artificial Sequence
  chemically synthesized
acagttcagctagtcaactc

SEQ ID NO: 1884 - DNA, 20 bp, Artificial Sequence
  chemically synthesized
ttcagctagtcaactctggc

SEQ ID NO: 1885 - DNA, 20 bp, Artificial Sequence
  chemically synthesized
agctagtcaactctggccag

SEQ ID NO: 1886 - DNA, 20 bp, Artificial Sequence
  chemically synthesized
gtcaactctggccagtagcc

SEQ ID NO: 1887 - DNA, 20 bp, Artificial Sequence
  chemically synthesized
tggccagtagccaagccgtc

SEQ ID NO: 1888 - DNA, 20 bp, Artificial Sequence
  chemically synthesized
gccagtagccaagccgtctg

SEQ ID NO: 1889 - DNA, 20 bp, Artificial Sequence
  chemically synthesized
cagtagccaagccgtctgga

SEQ ID NO: 1890 - DNA, 20 bp, Artificial Sequence
  chemically synthesized
agtagccaagccgtctggag

SEQ ID NO: 1891 - DNA, 20 bp, Artificial Sequence
  chemically synthesized
gtagccaagccgtctggaga

SEQ ID NO: 1892 - DNA, 20 bp, Artificial Sequence
  chemically synthesized
tagccaagccgtctggagag

SEQ ID NO: 1893 - DNA, 20 bp, Artificial Sequence
  chemically synthesized
tctggagaggggccctgctt

SEQ ID NO: 1894 - DNA, 20 bp, Artificial Sequence
  chemically synthesized
acattatttcccttgctgaa

SEQ ID NO: 1895 - DNA, 20 bp, Artificial Sequence
  chemically synthesized
tcccttgctgaaaagaaccc

SEQ ID NO: 1896 - DNA, 20 bp, Artificial Sequence
  chemically synthesized
ccttgctgaaaagaacccaa

SEQ ID NO: 1897 - DNA, 20 bp, Artificial Sequence
  chemically synthesized
tgctgaaaagaacccaagag

SEQ ID NO: 1898 - DNA, 20 bp, Artificial Sequence
  chemically synthesized
aagagtggtaaatgccactt

SEQ ID NO: 1899 - DNA, 20 bp, Artificial Sequence
  chemically synthesized
tggtaaatgccactttggca

SEQ ID NO: 1900 - DNA, 20 bp, Artificial Sequence
  chemically synthesized
taaatgccactttggcaaag

SEQ ID NO: 1901 - DNA, 20 bp, Artificial Sequence
  chemically synthesized
aaatgccactttggcaaaga

SEQ ID NO: 1902 - DNA, 20 bp, Artificial Sequence
  chemically synthesized
aatgccactttggcaaagaa

SEQ ID NO: 1903 - DNA, 20 bp, Artificial Sequence
  chemically synthesized
ccactttggcaaagaagggc

SEQ ID NO: 1904 - DNA, 20 bp, Artificial Sequence
  chemically synthesized
acttcacaaaatatttcatt

SEQ ID NO: 1905 - DNA, 20 bp, Artificial Sequence
  chemically synthesized
cttcacaaaatatttcattt

SEQ ID NO: 1906 - DNA, 20 bp, Artificial Sequence
  chemically synthesized
ttcacaaaatatttcatttg

SEQ ID NO: 1907 - DNA, 20 bp, Artificial Sequence
  chemically synthesized
cacaaaatatttcatttggg

SEQ ID NO: 1908 - DNA, 20 bp, Artificial Sequence
  chemically synthesized
aaatatttcatttggggaga

SEQ ID NO: 1909 - DNA, 20 bp, Artificial Sequence
  chemically synthesized
atggctaaattaaatatata

SEQ ID NO: 1910 - DNA, 20 bp, Artificial Sequence
  chemically synthesized
tggctaaattaaatatatat

SEQ ID NO: 1911 - DNA, 20 bp, Artificial Sequence
  chemically synthesized
ggctaaattaaatatatatg

SEQ ID NO: 1912 - DNA, 20 bp, Artificial Sequence
  chemically synthesized
ctaaattaaatatatatggg

SEQ ID NO: 1913 - DNA, 20 bp, Artificial Sequence
  chemically synthesized
attaaatatatatggggaga

SEQ ID NO: 1914 - DNA, 20 bp, Artificial Sequence
  chemically synthesized
acattaaatatatatatata

SEQ ID NO: 1915 - DNA, 20 bp, Artificial Sequence
  chemically synthesized
tatatggaataactgaccaa

SEQ ID NO: 1916 - DNA, 20 bp, Artificial Sequence
  chemically synthesized
ataactgaccaacagtttac

SEQ ID NO: 1917 - DNA, 20 bp, Artificial Sequence
  chemically synthesized
tagtcaactgcaacattaaa

SEQ ID NO: 1918 - DNA, 20 bp, Artificial Sequence
  chemically synthesized
agtcaactgcaacattaaaa

SEQ ID NO: 1919 - DNA, 20 bp, Artificial Sequence
  chemically synthesized
gtcaactgcaacattaaaaa

SEQ ID NO: 1920 - DNA, 20 bp, Artificial Sequence
  chemically synthesized
aactgcaacattaaaaaggg

SEQ ID NO: 1921 - DNA, 20 bp, Artificial Sequence
  chemically synthesized
tgcaacattaaaaagggcag

SEQ ID NO: 1922 - DNA, 20 bp, Artificial Sequence
  chemically synthesized
attaaaaagggcagaagtaa

SEQ ID NO: 1923 - DNA, 20 bp, Artificial Sequence
  chemically synthesized
aaaaagggcagaagtaatgg

SEQ ID NO: 1924 - DNA, 20 bp, Artificial Sequence
  chemically synthesized
ggcagaagtaatggtagcca

SEQ ID NO: 1925 - DNA, 20 bp, Artificial Sequence
  chemically synthesized
gcagaagtaatggtagccaa

SEQ ID NO: 1926 - DNA, 20 bp, Artificial Sequence
  chemically synthesized
agtaatggtagccaaaggac

SEQ ID NO: 1927 - DNA, 20 bp, Artificial Sequence
  chemically synthesized
gtaatggtagccaaaggacg

SEQ ID NO: 1928 - DNA, 20 bp, Artificial Sequence
  chemically synthesized
ggtagccaaaggacgaggat

SEQ ID NO: 1929 - DNA, 20 bp, Artificial Sequence
  chemically synthesized
atgagaaaaacaaaacttcc

SEQ ID NO: 1930 - DNA, 20 bp, Artificial Sequence
  chemically synthesized
gagaaaaacaaaacttccca

SEQ ID NO: 1931 - DNA, 20 bp, Artificial Sequence
  chemically synthesized
cccagagattctgaaaaaaa

SEQ ID NO: 1932 - DNA, 20 bp, Artificial Sequence
  chemically synthesized
aaaagccttaaaatataact

SEQ ID NO: 1933 - DNA, 20 bp, Artificial Sequence
  chemically synthesized
aacttttctccttcttttaa

SEQ ID NO: 1934 - DNA, 20 bp, Artificial Sequence
  chemically synthesized
ttttctccttcttttaaaag

SEQ ID NO: 1935 - DNA, 20 bp, Artificial Sequence
  chemically synthesized
tttctccttcttttaaaaga

SEQ ID NO: 1936 - DNA, 20 bp, Artificial Sequence
  chemically synthesized
ttctccttcttttaaaagaa

SEQ ID NO: 1937 - DNA, 20 bp, Artificial Sequence
  chemically synthesized
tcttttaaaagaagggctgc

SEQ ID NO: 1938 - DNA, 20 bp, Artificial Sequence
  chemically synthesized
ttttaaaagaagggctgcaa

SEQ ID NO: 1939 - DNA, 20 bp, Artificial Sequence
  chemically synthesized
aagggctgcaagagttcttt

SEQ ID NO: 1940 - DNA, 20 bp, Artificial Sequence
  chemically synthesized
agggctgcaagagttcttta

SEQ ID NO: 1941 - DNA, 20 bp, Artificial Sequence
  chemically synthesized
gcaagagttctttaaggcca

SEQ ID NO: 1942 - DNA, 20 bp, Artificial Sequence
  chemically synthesized
gagttctttaaggccacagc

SEQ ID NO: 1943 - DNA, 20 bp, Artificial Sequence
  chemically synthesized
aggccacagctagtatttgt

SEQ ID NO: 1944 - DNA, 20 bp, Artificial Sequence
  chemically synthesized
gtatttgtcagtaactttct

SEQ ID NO: 1945 - DNA, 20 bp, Artificial Sequence
  chemically synthesized
tttgtcagtaactttctaag

SEQ ID NO: 1946 - DNA, 20 bp, Artificial Sequence
  chemically synthesized
ttgtcagtaactttctaaga

SEQ ID NO: 1947 - DNA, 20 bp, Artificial Sequence
  chemically synthesized
gaaaaaaaaaaaaaatctac

SEQ ID NO: 1948 - DNA, 20 bp, Artificial Sequence
  chemically synthesized
aaaaaaaaaaaaaatctacc

SEQ ID NO: 1949 - DNA, 20 bp, Artificial Sequence
  chemically synthesized
aaaaaaaaaaaaatctacca

SEQ ID NO: 1950 - DNA, 20 bp, Artificial Sequence
  chemically synthesized
aaaaaaaaaaatctaccagg

SEQ ID NO: 1951 - DNA, 20 bp, Artificial Sequence
  chemically synthesized
aaaaaaaaaatctaccaggg

SEQ ID NO: 1952 - DNA, 20 bp, Artificial Sequence
  chemically synthesized
aaaaatctaccagggaggtt

SEQ ID NO: 1953 - DNA, 20 bp, Artificial Sequence
  chemically synthesized
aaatctaccagggaggttaa

SEQ ID NO: 1954 - DNA, 20 bp, Artificial Sequence
  chemically synthesized
ctaccagggaggttaagagt

SEQ ID NO: 1955 - DNA, 20 bp, Artificial Sequence
  chemically synthesized
gggaggttaagagtgagaat

SEQ ID NO: 1956 - DNA, 20 bp, Artificial Sequence
  chemically synthesized
ggaggttaagagtgagaatg

SEQ ID NO: 1957 - DNA, 20 bp, Artificial Sequence
  chemically synthesized
aattatatgatgcctccatt

SEQ ID NO: 1958 - DNA, 20 bp, Artificial Sequence
  chemically synthesized
atatgatgcctccatttagc

SEQ ID NO: 1959 - DNA, 20 bp, Artificial Sequence
  chemically synthesized
gatgcctccatttagcaagt

SEQ ID NO: 1960 - DNA, 20 bp, Artificial Sequence
  chemically synthesized
cctccatttagcaagtcaga

SEQ ID NO: 1961 - DNA, 20 bp, Artificial Sequence
  chemically synthesized
atttagcaagtcagaaagaa

SEQ ID NO: 1962 - DNA, 20 bp, Artificial Sequence
  chemically synthesized
agcaagtcagaaagaaaagc

SEQ ID NO: 1963 - DNA, 20 bp, Artificial Sequence
  chemically synthesized
aagtcagaaagaaaagccgg

SEQ ID NO: 1964 - DNA, 20 bp, Artificial Sequence
  chemically synthesized
agtcagaaagaaaagccggc

SEQ ID NO: 1965 - DNA, 20 bp, Artificial Sequence
  chemically synthesized
gtcagaaagaaaagccggca

SEQ ID NO: 1966 - DNA, 20 bp, Artificial Sequence
  chemically synthesized
aaaagccggcagggtcttct

SEQ ID NO: 1967 - DNA, 20 bp, Artificial Sequence
  chemically synthesized
aaagccggcagggtcttctc

SEQ ID NO: 1968 - DNA, 20 bp, Artificial Sequence
  chemically synthesized
agccggcagggtcttctcag

SEQ ID NO: 1969 - DNA, 20 bp, Artificial Sequence
  chemically synthesized
tctcaggagcccccaaacac

SEQ ID NO: 1970 - DNA, 20 bp, Artificial Sequence
  chemically synthesized
aaacactggtattccaaaat

SEQ ID NO: 1971 - DNA, 20 bp, Artificial Sequence
  chemically synthesized
actggtattccaaaataagc

SEQ ID NO: 1972 - DNA, 20 bp, Artificial Sequence
  chemically synthesized
aaaataagccagcctcgctc

SEQ ID NO: 1973 - DNA, 20 bp, Artificial Sequence
  chemically synthesized
tcaagcacttgtctaaataa

SEQ ID NO: 1974 - DNA, 20 bp, Artificial Sequence
  chemically synthesized
cactcaatatatctcactcc

SEQ ID NO: 1975 - DNA, 20 bp, Artificial Sequence
  chemically synthesized
actcaatatatctcactcct

SEQ ID NO: 1976 - DNA, 20 bp, Artificial Sequence
  chemically synthesized
cctgggtaaatctcttaaac

SEQ ID NO: 1977 - DNA, 20 bp, Artificial Sequence
  chemically synthesized
gtaaatctcttaaacaagat

SEQ ID NO: 1978 - DNA, 20 bp, Artificial Sequence
  chemically synthesized
atctcttaaacaagattaga

SEQ ID NO: 1979 - DNA, 20 bp, Artificial Sequence
  chemically synthesized
cttaaacaagattagatggt

SEQ ID NO: 1980 - DNA, 20 bp, Artificial Sequence
  chemically synthesized
agatggtaagataccaaaat

SEQ ID NO: 1981 - DNA, 20 bp, Artificial Sequence
  chemically synthesized
gatggtaagataccaaaatt

SEQ ID NO: 1982 - DNA, 20 bp, Artificial Sequence
  chemically synthesized
tttcaaacatttgtctaatg

SEQ ID NO: 1983 - DNA, 20 bp, Artificial Sequence
  chemically synthesized
caaacatttgtctaatgtgg

SEQ ID NO: 1984 - DNA, 20 bp, Artificial Sequence
  chemically synthesized
aaacatttgtctaatgtgga

SEQ ID NO: 1985 - DNA, 20 bp, Artificial Sequence
  chemically synthesized
aacatttgtctaatgtggaa

SEQ ID NO: 1986 - DNA, 20 bp, Artificial Sequence
  chemically synthesized
acatttgtctaatgtggaag

SEQ ID NO: 1987 - DNA, 20 bp, Artificial Sequence
  chemically synthesized
catttgtctaatgtggaagg

SEQ ID NO: 1988 - DNA, 20 bp, Artificial Sequence
  chemically synthesized
ctaatgtggaagggggaaaa

SEQ ID NO: 1989 - DNA, 20 bp, Artificial Sequence
  chemically synthesized
taatgtggaagggggaaaaa

SEQ ID NO: 1990 - DNA, 20 bp, Artificial Sequence
  chemically synthesized
tgtggaagggggaaaaaagg

SEQ ID NO: 1991 - DNA, 20 bp, Artificial Sequence
  chemically synthesized
gaagggggaaaaaaggcaga

SEQ ID NO: 1992 - DNA, 20 bp, Artificial Sequence
  chemically synthesized
aaaaggcagaaagattttga

SEQ ID NO: 1993 - DNA, 20 bp, Artificial Sequence
  chemically synthesized
ttgaaagaaaacgctgacat

SEQ ID NO: 1994 - DNA, 20 bp, Artificial Sequence
  chemically synthesized
ttgtttgcctcctctcttca

SEQ ID NO: 1995 - DNA, 20 bp, Artificial Sequence
  chemically synthesized
tgtttgcctcctctcttcaa

SEQ ID NO: 1996 - DNA, 20 bp, Artificial Sequence
  chemically synthesized
gtttgcctcctctcttcaaa

SEQ ID NO: 1997 - DNA, 20 bp, Artificial Sequence
  chemically synthesized
tctcttcaaagggaaataaa

SEQ ID NO: 1998 - DNA, 20 bp, Artificial Sequence
  chemically synthesized
gggaaataaaaagcttcatt

SEQ ID NO: 1999 - DNA, 20 bp, Artificial Sequence
  chemically synthesized
gttgttgttgaacaataact

SEQ ID NO: 2000 - DNA, 20 bp, Artificial Sequence
  chemically synthesized
ttgttgttgaacaataactt

SEQ ID NO: 2001 - DNA, 20 bp, Artificial Sequence
  chemically synthesized
acaataacttgggtcccaaa

SEQ ID NO: 2002 - DNA, 20 bp, Artificial Sequence
  chemically synthesized
caataacttgggtcccaaat

SEQ ID NO: 2003 - DNA, 20 bp, Artificial Sequence
  chemically synthesized
aacttgggtcccaaataggc

SEQ ID NO: 2004 - DNA, 20 bp, Artificial Sequence
  chemically synthesized
aggctggaaaaaaaactatc

SEQ ID NO: 2005 - DNA, 20 bp, Artificial Sequence
  chemically synthesized
tccaactacatgatcctctg

SEQ ID NO: 2006 - DNA, 20 bp, Artificial Sequence
  chemically synthesized
ggcttcctccttgtcctccc

SEQ ID NO: 2007 - DNA, 20 bp, Artificial Sequence
  chemically synthesized
ccttgtcctccctagatctc

SEQ ID NO: 2008 - DNA, 20 bp, Artificial Sequence
  chemically synthesized
cttgtcctccctagatctct

SEQ ID NO: 2009 - DNA, 20 bp, Artificial Sequence
  chemically synthesized
gggtgactatcattcctatt

SEQ ID NO: 2010 - DNA, 20 bp, Artificial Sequence
  chemically synthesized
cctatttagcctgacgatct

SEQ ID NO: 2011 - DNA, 20 bp, Artificial Sequence
  chemically synthesized
tttagcctgacgatctgagt

SEQ ID NO: 2012 - DNA, 20 bp, Artificial Sequence
  chemically synthesized
ttagcctgacgatctgagtt

SEQ ID NO: 2013 - DNA, 20 bp, Artificial Sequence
  chemically synthesized
cctgacgatctgagttgggc

SEQ ID NO: 2014 - DNA, 20 bp, Artificial Sequence
  chemically synthesized
atctgagttgggcaagtaaa

SEQ ID NO: 2015 - DNA, 20 bp, Artificial Sequence
  chemically synthesized
aaagatttgtctgataatcc

SEQ ID NO: 2016 - DNA, 20 bp, Artificial Sequence
  chemically synthesized
ataaaacatcgattgaaatc

SEQ ID NO: 2017 - DNA, 20 bp, Artificial Sequence
  chemically synthesized
taaaacatcgattgaaatcc

SEQ ID NO: 2018 - DNA, 20 bp, Artificial Sequence
  chemically synthesized
catcgattgaaatccaggac

SEQ ID NO: 2019 - DNA, 20 bp, Artificial Sequence
  chemically synthesized
tccaggactagactcataat

SEQ ID NO: 2020 - DNA, 20 bp, Artificial Sequence
  chemically synthesized
aggactagactcataattag

SEQ ID NO: 2021 - DNA, 20 bp, Artificial Sequence
  chemically synthesized
agactcataattagtggtgc

SEQ ID NO: 2022 - DNA, 20 bp, Artificial Sequence
  chemically synthesized
ttcacatgtgccatgaattg

SEQ ID NO: 2023 - DNA, 20 bp, Artificial Sequence
  chemically synthesized
ttgataaatgccaaaatctg

SEQ ID NO: 2024 - DNA, 20 bp, Artificial Sequence
  chemically synthesized
atgccaaaatctgtggcata

SEQ ID NO: 2025 - DNA, 20 bp, Artificial Sequence
  chemically synthesized
gtggcatacagcactacatc

SEQ ID NO: 2026 - DNA, 20 bp, Artificial Sequence
  chemically synthesized
tggcatacagcactacatca

SEQ ID NO: 2027 - DNA, 20 bp, Artificial Sequence
  chemically synthesized
ctcatttgtatcctttcaaa

SEQ ID NO: 2028 - DNA, 20 bp, Artificial Sequence
  chemically synthesized
tcatttgtatcctttcaaaa

SEQ ID NO: 2029 - DNA, 20 bp, Artificial Sequence
  chemically synthesized
cctttcaaaaaggcttaaat

SEQ ID NO: 2030 - DNA, 20 bp, Artificial Sequence
  chemically synthesized
caaaaaggcttaaatgagaa

SEQ ID NO: 2031 - DNA, 20 bp, Artificial Sequence
  chemically synthesized
ccattttattttgctgccct

SEQ ID NO: 2032 - DNA, 20 bp, Artificial Sequence
  chemically synthesized
gagcatcctaaacttttttt

SEQ ID NO: 2033 - DNA, 20 bp, Artificial Sequence
  chemically synthesized
gcatcctaaactttttttca

SEQ ID NO: 2034 - DNA, 20 bp, Artificial Sequence
  chemically synthesized
cctaaactttttttcagagc

SEQ ID NO: 2035 - DNA, 20 bp, Artificial Sequence
  chemically synthesized
ccagttatgtgatcatgcta

SEQ ID NO: 2036 - DNA, 20 bp, Artificial Sequence
  chemically synthesized
ctcccctctctctcatacat

SEQ ID NO: 2037 - DNA, 20 bp, Artificial Sequence
  chemically synthesized
tcccctctctctcatacatc

SEQ ID NO: 2038 - DNA, 20 bp, Artificial Sequence
  chemically synthesized
ctctctctcatacatcaggt

SEQ ID NO: 2039 - DNA, 20 bp, Artificial Sequence
  chemically synthesized
ctctctcatacatcaggtca

SEQ ID NO: 2040 - DNA, 20 bp, Artificial Sequence
  chemically synthesized
atacatcaggtcagagaaaa

SEQ ID NO: 2041 - DNA, 20 bp, Artificial Sequence
  chemically synthesized
atggcattttatcttataat

SEQ ID NO: 2042 - DNA, 20 bp, Artificial Sequence
  chemically synthesized
tataatgagcatacaacata

SEQ ID NO: 2043 - DNA, 20 bp, Artificial Sequence
  chemically synthesized
cagttttcactatcgcattt

SEQ ID NO: 2044 - DNA, 20 bp, Artificial Sequence
  chemically synthesized
attttagtattcccatcaac

SEQ ID NO: 2045 - DNA, 20 bp, Artificial Sequence
  chemically synthesized
ttcccatcaactagatattc

SEQ ID NO: 2046 - DNA, 20 bp, Artificial Sequence
  chemically synthesized
aactagatattctagatcat

SEQ ID NO: 2047 - DNA, 20 bp, Artificial Sequence
  chemically synthesized
actagatattctagatcatg

SEQ ID NO: 2048 - DNA, 20 bp, Artificial Sequence
  chemically synthesized
ctagatattctagatcatga

SEQ ID NO: 2049 - DNA, 20 bp, Artificial Sequence
  chemically synthesized
gatattctagatcatgaggg

SEQ ID NO: 2050 - DNA, 20 bp, Artificial Sequence
  chemically synthesized
ttctagatcatgagggcagc

SEQ ID NO: 2051 - DNA, 20 bp, Artificial Sequence
  chemically synthesized
agtgtaatcataatgtcaat

SEQ ID NO: 2052 - DNA, 20 bp, Artificial Sequence
  chemically synthesized
gtaatcataatgtcaatgag

SEQ ID NO: 2053 - DNA, 20 bp, Artificial Sequence
  chemically synthesized
taatcataatgtcaatgaga

SEQ ID NO: 2054 - DNA, 20 bp, Artificial Sequence
  chemically synthesized
aatcataatgtcaatgagaa

SEQ ID NO: 2055 - DNA, 20 bp, Artificial Sequence
  chemically synthesized
tgagaagggctgttacgatt

SEQ ID NO: 2056 - DNA, 20 bp, Artificial Sequence
  chemically synthesized
ggctgttacgattgagacta

SEQ ID NO: 2057 - DNA, 20 bp, Artificial Sequence
  chemically synthesized
gattgagactaaagattaca

SEQ ID NO: 2058 - DNA, 20 bp, Artificial Sequence
  chemically synthesized
ttgagactaaagattacatg

SEQ ID NO: 2059 - DNA, 20 bp, Artificial Sequence
  chemically synthesized
gagactaaagattacatgga

SEQ ID NO: 2060 - DNA, 20 bp, Artificial Sequence
  chemically synthesized
gactaaagattacatggaga

SEQ ID NO: 2061 - DNA, 20 bp, Artificial Sequence
  chemically synthesized
ggagagagctgctttgaaac

SEQ ID NO: 2062 - DNA, 20 bp, Artificial Sequence
  chemically synthesized
ttgaaactggtaattattac

SEQ ID NO: 2063 - DNA, 20 bp, Artificial Sequence
  chemically synthesized
aattattaccagtccactaa

SEQ ID NO: 2064 - DNA, 20 bp, Artificial Sequence
  chemically synthesized
catataatctgtatttcact

SEQ ID NO: 2065 - DNA, 20 bp, Artificial Sequence
  chemically synthesized
gtatttcactcagctcatgc

SEQ ID NO: 2066 - DNA, 20 bp, Artificial Sequence
  chemically synthesized
cggtgtaccatattatatta

SEQ ID NO: 2067 - DNA, 20 bp, Artificial Sequence
  chemically synthesized
atattatattacagtgctca

SEQ ID NO: 2068 - DNA, 20 bp, Artificial Sequence
  chemically synthesized
gattctaaattcctaaactg

SEQ ID NO: 2069 - DNA, 20 bp, Artificial Sequence
  chemically synthesized
tcataacatctttgatgatt

SEQ ID NO: 2070 - DNA, 20 bp, Artificial Sequence
  chemically synthesized
aacatctttgatgatttaga

SEQ ID NO: 2071 - DNA, 20 bp, Artificial Sequence
  chemically synthesized
ctttgatgatttagaaagac

SEQ ID NO: 2072 - DNA, 20 bp, Artificial Sequence
  chemically synthesized
actggaattgatttcctgtg

SEQ ID NO: 2073 - DNA, 20 bp, Artificial Sequence
  chemically synthesized
gatttcctgtgtggcaaaat

SEQ ID NO: 2074 - DNA, 20 bp, Artificial Sequence
  chemically synthesized
atttcctgtgtggcaaaatt

SEQ ID NO: 2075 - DNA, 20 bp, Artificial Sequence
  chemically synthesized
tttcctgtgtggcaaaatta

SEQ ID NO: 2076 - DNA, 20 bp, Artificial Sequence
  chemically synthesized
gaaaatcaacttctcaattt

SEQ ID NO: 2077 - DNA, 20 bp, Artificial Sequence
  chemically synthesized
aaatcaacttctcaatttga

SEQ ID NO: 2078 - DNA, 20 bp, Artificial Sequence
  chemically synthesized
tctcaatttgagagcctcat

SEQ ID NO: 2079 - DNA, 20 bp, Artificial Sequence
  chemically synthesized
ctcaatttgagagcctcatt

SEQ ID NO: 2080 - DNA, 20 bp, Artificial Sequence
  chemically synthesized
agagcctcattgggcattta

SEQ ID NO: 2081 - DNA, 20 bp, Artificial Sequence
  chemically synthesized
gagcctcattgggcatttac

SEQ ID NO: 2082 - DNA, 20 bp, Artificial Sequence
  chemically synthesized
agcctcattgggcatttacg

SEQ ID NO: 2083 - DNA, 20 bp, Artificial Sequence
  chemically synthesized
ttacggggattgttttgatt

SEQ ID NO: 2084 - DNA, 20 bp, Artificial Sequence
  chemically synthesized
acggggattgttttgattta

SEQ ID NO: 2085 - DNA, 20 bp, Artificial Sequence
  chemically synthesized
tagagcaataaactgacacc

SEQ ID NO: 2086 - DNA, 20 bp, Artificial Sequence
  chemically synthesized
taaactgacacctggcccct

SEQ ID NO: 2087 - DNA, 20 bp, Artificial Sequence
  chemically synthesized
tgacacctggcccctaagca

SEQ ID NO: 2088 - DNA, 20 bp, Artificial Sequence
  chemically synthesized
gacacctggcccctaagcat

SEQ ID NO: 2089 - DNA, 20 bp, Artificial Sequence
  chemically synthesized
gcccctaagcataggaactt

SEQ ID NO: 2090 - DNA, 20 bp, Artificial Sequence
  chemically synthesized
ataggaacttgagacatcaa

SEQ ID NO: 2091 - DNA, 20 bp, Artificial Sequence
  chemically synthesized
taggaacttgagacatcaaa

SEQ ID NO: 2092 - DNA, 20 bp, Artificial Sequence
  chemically synthesized
aggaacttgagacatcaaaa

SEQ ID NO: 2093 - DNA, 20 bp, Artificial Sequence
  chemically synthesized
gacatcaaaagggttaaaat

SEQ ID NO: 2094 - DNA, 20 bp, Artificial Sequence
  chemically synthesized
aaagggttaaaatcagctat

SEQ ID NO: 2095 - DNA, 20 bp, Artificial Sequence
  chemically synthesized
tcagctattagcccacctac

SEQ ID NO: 2096 - DNA, 20 bp, Artificial Sequence
  chemically synthesized
ttttatttcattttacttta

SEQ ID NO: 2097 - DNA, 20 bp, Artificial Sequence
  chemically synthesized
tttatttcattttactttat

SEQ ID NO: 2098 - DNA, 20 bp, Artificial Sequence
  chemically synthesized
atttcattttactttatggg

SEQ ID NO: 2099 - DNA, 20 bp, Artificial Sequence
  chemically synthesized
tttcattttactttatggga

SEQ ID NO: 2100 - DNA, 20 bp, Artificial Sequence
  chemically synthesized
gaaggaatgacccccatttc

SEQ ID NO: 2101 - DNA, 20 bp, Artificial Sequence
  chemically synthesized
agtatgtcaccaatgtgaaa

SEQ ID NO: 2102 - DNA, 20 bp, Artificial Sequence
  chemically synthesized
gtgaaaaagtcatgtgatct

SEQ ID NO: 2103 - DNA, 20 bp, Artificial Sequence
  chemically synthesized
agtcatgtgatctaagcctc

SEQ ID NO: 2104 - DNA, 20 bp, Artificial Sequence
  chemically synthesized
gtgatctaagcctcaagatt

SEQ ID NO: 2105 - DNA, 20 bp, Artificial Sequence
  chemically synthesized
atctaagcctcaagattcag

SEQ ID NO: 2106 - DNA, 20 bp, Artificial Sequence
  chemically synthesized
gcctcaagattcagaagaac

SEQ ID NO: 2107 - DNA, 20 bp, Artificial Sequence
  chemically synthesized
cctcaagattcagaagaaca

SEQ ID NO: 2108 - DNA, 20 bp, Artificial Sequence
  chemically synthesized
tcaagattcagaagaacaag

SEQ ID NO: 2109 - DNA, 20 bp, Artificial Sequence
  chemically synthesized
caagattcagaagaacaagg

SEQ ID NO: 2110 - DNA, 20 bp, Artificial Sequence
  chemically synthesized
tcagaagaacaaggaggtct

SEQ ID NO: 2111 - DNA, 20 bp, Artificial Sequence
  chemically synthesized
agaacaaggaggtctgagac

SEQ ID NO: 2112 - DNA, 20 bp, Artificial Sequence
  chemically synthesized
aacaaggaggtctgagactg

SEQ ID NO: 2113 - DNA, 20 bp, Artificial Sequence
  chemically synthesized
acaaggaggtctgagactgg

SEQ ID NO: 2114 - DNA, 20 bp, Artificial Sequence
  chemically synthesized
gaggtctgagactggaggcc

SEQ ID NO: 2115 - DNA, 20 bp, Artificial Sequence
  chemically synthesized
ggcctagctctattatccac

SEQ ID NO: 2116 - DNA, 20 bp, Artificial Sequence
  chemically synthesized
tatccactagattgtaactc

SEQ ID NO: 2117 - DNA, 20 bp, Artificial Sequence
  chemically synthesized
atccactagattgtaactct

SEQ ID NO: 2118 - DNA, 20 bp, Artificial Sequence
  chemically synthesized
actagattgtaactctggga

SEQ ID NO: 2119 - DNA, 20 bp, Artificial Sequence
  chemically synthesized
gatagtcatttgatttctct

SEQ ID NO: 2120 - DNA, 20 bp, Artificial Sequence
  chemically synthesized
catttgatttctctgagtct

SEQ ID NO: 2121 - DNA, 20 bp, Artificial Sequence
  chemically synthesized
ggaattcctatctgtaaaat

SEQ ID NO: 2122 - DNA, 20 bp, Artificial Sequence
  chemically synthesized
ctgtaaaatgagcataaaaa

SEQ ID NO: 2123 - DNA, 20 bp, Artificial Sequence
  chemically synthesized
agcataaaaacagtacctgt

SEQ ID NO: 2124 - DNA, 20 bp, Artificial Sequence
  chemically synthesized
acagtacctgtaagaattgt

SEQ ID NO: 2125 - DNA, 20 bp, Artificial Sequence
  chemically synthesized
cagtacctgtaagaattgtt

SEQ ID NO: 2126 - DNA, 20 bp, Artificial Sequence
  chemically synthesized
tacctgtaagaattgttggg

SEQ ID NO: 2127 - DNA, 20 bp, Artificial Sequence
  chemically synthesized
ttgttgggaagttcaaatga

SEQ ID NO: 2128 - DNA, 20 bp, Artificial Sequence
  chemically synthesized
ttgggaagttcaaatgacag

SEQ ID NO: 2129 - DNA, 20 bp, Artificial Sequence
  chemically synthesized
caaatgacagaagtatataa

SEQ ID NO: 2130 - DNA, 20 bp, Artificial Sequence
  chemically synthesized
aaaagccctctgtaaactat

SEQ ID NO: 2131 - DNA, 20 bp, Artificial Sequence
  chemically synthesized
aaagccctctgtaaactatc

SEQ ID NO: 2132 - DNA, 20 bp, Artificial Sequence
  chemically synthesized
atcaggtcgaatgtgaatgt

SEQ ID NO: 2133 - DNA, 20 bp, Artificial Sequence
  chemically synthesized
atgtgagttttcattactac

SEQ ID NO: 2134 - DNA, 20 bp, Artificial Sequence
  chemically synthesized
tgtgagttttcattactacc

SEQ ID NO: 2135 - DNA, 20 bp, Artificial Sequence
  chemically synthesized
gtgagttttcattactacca

SEQ ID NO: 2136 - DNA, 20 bp, Artificial Sequence
  chemically synthesized
tgagttttcattactaccag

SEQ ID NO: 2137 - DNA, 20 bp, Artificial Sequence
  chemically synthesized
accaggggtgattaattact

SEQ ID NO: 2138 - DNA, 20 bp, Artificial Sequence
  chemically synthesized
ccaggggtgattaattactg

SEQ ID NO: 2139 - DNA, 20 bp, Artificial Sequence
  chemically synthesized
caggggtgattaattactga

SEQ ID NO: 2140 - DNA, 20 bp, Artificial Sequence
  chemically synthesized
accacattacacaccccgaa

SEQ ID NO: 2141 - DNA, 20 bp, Artificial Sequence
  chemically synthesized
tacacaccccgaacggcttc

SEQ ID NO: 2142 - DNA, 20 bp, Artificial Sequence
  chemically synthesized
cacaccccgaacggcttcca

SEQ ID NO: 2143 - DNA, 20 bp, Artificial Sequence
  chemically synthesized
acaccccgaacggcttccag

SEQ ID NO: 2144 - DNA, 20 bp, Artificial Sequence
  chemically synthesized
ccccgaacggcttccagagg

SEQ ID NO: 2145 - DNA, 20 bp, Artificial Sequence
  chemically synthesized
cccgaacggcttccagagga

SEQ ID NO: 2146 - DNA, 20 bp, Artificial Sequence
  chemically synthesized
cggcttccagaggaaggtcc

SEQ ID NO: 2147 - DNA, 20 bp, Artificial Sequence
  chemically synthesized
tccagaggaaggtcccagtc

SEQ ID NO: 2148 - DNA, 20 bp, Artificial Sequence
  chemically synthesized
ccagaggaaggtcccagtcc

SEQ ID NO: 2149 - DNA, 20 bp, Artificial Sequence
  chemically synthesized
tcccagtccaggccttaacc

SEQ ID NO: 2150 - DNA, 20 bp, Artificial Sequence
  chemically synthesized
cccagtccaggccttaaccc

SEQ ID NO: 2151 - DNA, 20 bp, Artificial Sequence
  chemically synthesized
caggccttaacccaggccaa

SEQ ID NO: 2152 - DNA, 20 bp, Artificial Sequence
  chemically synthesized
aggccttaacccaggccaaa

SEQ ID NO: 2153 - DNA, 20 bp, Artificial Sequence
  chemically synthesized
gccttaacccaggccaaaag

SEQ ID NO: 2154 - DNA, 20 bp, Artificial Sequence
  chemically synthesized
ccttaacccaggccaaaagg

SEQ ID NO: 2155 - DNA, 20 bp, Artificial Sequence
  chemically synthesized
cccaggccaaaaggaggctc

SEQ ID NO: 2156 - DNA, 20 bp, Artificial Sequence
  chemically synthesized
ccaaaaggaggctctagtta

SEQ ID NO: 2157 - DNA, 20 bp, Artificial Sequence
  chemically synthesized
aaaaggaggctctagttaaa

SEQ ID NO: 2158 - DNA, 20 bp, Artificial Sequence
  chemically synthesized
aggaggctctagttaaagag

SEQ ID NO: 2159 - DNA, 20 bp, Artificial Sequence
  chemically synthesized
ggaggctctagttaaagagc

SEQ ID NO: 2160 - DNA, 20 bp, Artificial Sequence
  chemically synthesized
gaggctctagttaaagagca

SEQ ID NO: 2161 - DNA, 20 bp, Artificial Sequence
  chemically synthesized
aggctctagttaaagagcag

SEQ ID NO: 2162 - DNA, 20 bp, Artificial Sequence
  chemically synthesized
agttaaagagcaggggtgac

SEQ ID NO: 2163 - DNA, 20 bp, Artificial Sequence
  chemically synthesized
gagcaggggtgactggcaca

SEQ ID NO: 2164 - DNA, 20 bp, Artificial Sequence
  chemically synthesized
caggggtgactggcacacag

SEQ ID NO: 2165 - DNA, 20 bp, Artificial Sequence
  chemically synthesized
ggggtgactggcacacagca

SEQ ID NO: 2166 - DNA, 20 bp, Artificial Sequence
  chemically synthesized
gtgactggcacacagcagag

SEQ ID NO: 2167 - DNA, 20 bp, Artificial Sequence
  chemically synthesized
ggcacacagcagagtggcca

SEQ ID NO: 2168 - DNA, 20 bp, Artificial Sequence
  chemically synthesized
gcacacagcagagtggccac

SEQ ID NO: 2169 - DNA, 20 bp, Artificial Sequence
  chemically synthesized
cacacagcagagtggccaca

SEQ ID NO: 2170 - DNA, 20 bp, Artificial Sequence
  chemically synthesized
acagcagagtggccacaggg

SEQ ID NO: 2171 - DNA, 20 bp, Artificial Sequence
  chemically synthesized
tggccacagggaagtgctat

SEQ ID NO: 2172 - DNA, 20 bp, Artificial Sequence
  chemically synthesized
cagggaagtgctatgagctc

SEQ ID NO: 2173 - DNA, 20 bp, Artificial Sequence
  chemically synthesized
ggaagtgctatgagctctgg

SEQ ID NO: 2174 - DNA, 20 bp, Artificial Sequence
  chemically synthesized
gtgctatgagctctggaagc

SEQ ID NO: 2175 - DNA, 20 bp, Artificial Sequence
  chemically synthesized
tgctatgagctctggaagcc

SEQ ID NO: 2176 - DNA, 20 bp, Artificial Sequence
  chemically synthesized
gctatgagctctggaagcca

SEQ ID NO: 2177 - DNA, 20 bp, Artificial Sequence
  chemically synthesized
ctatgagctctggaagccag

SEQ ID NO: 2178 - DNA, 20 bp, Artificial Sequence
  chemically synthesized
tgagctctggaagccagggg

SEQ ID NO: 2179 - DNA, 20 bp, Artificial Sequence
  chemically synthesized
gctctggaagccaggggcag

SEQ ID NO: 2180 - DNA, 20 bp, Artificial Sequence
  chemically synthesized
ctctggaagccaggggcagc

SEQ ID NO: 2181 - DNA, 20 bp, Artificial Sequence
  chemically synthesized
ggcagcaggttaatgccgcc

SEQ ID NO: 2182 - DNA, 20 bp, Artificial Sequence
  chemically synthesized
agcaggttaatgccgccaag

SEQ ID NO: 2183 - DNA, 20 bp, Artificial Sequence
  chemically synthesized
gttaatgccgccaagtggaa

SEQ ID NO: 2184 - DNA, 20 bp, Artificial Sequence
  chemically synthesized
ttaatgccgccaagtggaat

SEQ ID NO: 2185 - DNA, 20 bp, Artificial Sequence
  chemically synthesized
ccgccaagtggaatgggcat

SEQ ID NO: 2186 - DNA, 20 bp, Artificial Sequence
  chemically synthesized
cgccaagtggaatgggcatc

SEQ ID NO: 2187 - DNA, 20 bp, Artificial Sequence
  chemically synthesized
aatgggcatcaggtttgttc

SEQ ID NO: 2188 - DNA, 20 bp, Artificial Sequence
  chemically synthesized
tgggcatcaggtttgttcta

SEQ ID NO: 2189 - DNA, 20 bp, Artificial Sequence
  chemically synthesized
aggtttgttctagagctttc

SEQ ID NO: 2190 - DNA, 20 bp, Artificial Sequence
  chemically synthesized
cacttccacataccttgttc

SEQ ID NO: 2191 - DNA, 20 bp, Artificial Sequence
  chemically synthesized
tgttctggtcactcctaaat

SEQ ID NO: 2192 - DNA, 20 bp, Artificial Sequence
  chemically synthesized
cactcctaaattggtcctgc

SEQ ID NO: 2193 - DNA, 20 bp, Artificial Sequence
  chemically synthesized
tcctaaattggtcctgccag

SEQ ID NO: 2194 - DNA, 20 bp, Artificial Sequence
  chemically synthesized
cctaaattggtcctgccagc

SEQ ID NO: 2195 - DNA, 20 bp, Artificial Sequence
  chemically synthesized
ctaaattggtcctgccagca

SEQ ID NO: 2196 - DNA, 20 bp, Artificial Sequence
  chemically synthesized
taaattggtcctgccagcag

SEQ ID NO: 2197 - DNA, 20 bp, Artificial Sequence
  chemically synthesized
ggtcctgccagcaggggcac

SEQ ID NO: 2198 - DNA, 20 bp, Artificial Sequence
  chemically synthesized
aactatgtaccctccctttg

SEQ ID NO: 2199 - DNA, 20 bp, Artificial Sequence
  chemically synthesized
actatgtaccctccctttgt

SEQ ID NO: 2200 - DNA, 20 bp, Artificial Sequence
  chemically synthesized
atgtaccctccctttgtggg

SEQ ID NO: 2201 - DNA, 20 bp, Artificial Sequence
  chemically synthesized
tgtaccctccctttgtggga

SEQ ID NO: 2202 - DNA, 20 bp, Artificial Sequence
  chemically synthesized
accctccctttgtgggaagg

SEQ ID NO: 2203 - DNA, 20 bp, Artificial Sequence
  chemically synthesized
ccctccctttgtgggaaggt

SEQ ID NO: 2204 - DNA, 20 bp, Artificial Sequence
  chemically synthesized
ctccctttgtgggaaggtgg

SEQ ID NO: 2205 - DNA, 20 bp, Artificial Sequence
  chemically synthesized
ccctttgtgggaaggtggga

SEQ ID NO: 2206 - DNA, 20 bp, Artificial Sequence
  chemically synthesized
cctttgtgggaaggtgggag

SEQ ID NO: 2207 - DNA, 20 bp, Artificial Sequence
  chemically synthesized
tgtgggaaggtgggagagga

SEQ ID NO: 2208 - DNA, 20 bp, Artificial Sequence
  chemically synthesized
gtgggaaggtgggagaggac

SEQ ID NO: 2209 - DNA, 20 bp, Artificial Sequence
  chemically synthesized
tgggaaggtgggagaggaca

SEQ ID NO: 2210 - DNA, 20 bp, Artificial Sequence
  chemically synthesized
gggaaggtgggagaggacag

SEQ ID NO: 2211 - DNA, 20 bp, Artificial Sequence
  chemically synthesized
gaggacaggggttccctatc

SEQ ID NO: 2212 - DNA, 20 bp, Artificial Sequence
  chemically synthesized
caggggttccctatcaagct

SEQ ID NO: 2213 - DNA, 20 bp, Artificial Sequence
  chemically synthesized
tcaagctcagactttcctac

SEQ ID NO: 2214 - DNA, 20 bp, Artificial Sequence
  chemically synthesized
taccagtcaaatcaaactcc

SEQ ID NO: 2215 - DNA, 20 bp, Artificial Sequence
  chemically synthesized
caaatcaaactcccagccct

SEQ ID NO: 2216 - DNA, 20 bp, Artificial Sequence
  chemically synthesized
aaatcaaactcccagccctc

SEQ ID NO: 2217 - DNA, 20 bp, Artificial Sequence
  chemically synthesized
tcaaactcccagccctcagg

SEQ ID NO: 2218 - DNA, 20 bp, Artificial Sequence
  chemically synthesized
ctcccagccctcaggaagac

SEQ ID NO: 2219 - DNA, 20 bp, Artificial Sequence
  chemically synthesized
tcccagccctcaggaagacc

SEQ ID NO: 2220 - DNA, 20 bp, Artificial Sequence
  chemically synthesized
ccctcaggaagaccaggctg

SEQ ID NO: 2221 - DNA, 20 bp, Artificial Sequence
  chemically synthesized
ggaagaccaggctgaagacc

SEQ ID NO: 2222 - DNA, 20 bp, Artificial Sequence
  chemically synthesized
gaccgagaactatgtttccc

SEQ ID NO: 2223 - DNA, 20 bp, Artificial Sequence
  chemically synthesized
gaactatgtttccctggcaa

SEQ ID NO: 2224 - DNA, 20 bp, Artificial Sequence
  chemically synthesized
gtttccctggcaacagccct

SEQ ID NO: 2225 - DNA, 20 bp, Artificial Sequence
  chemically synthesized
cttctatcccttccctccaa

SEQ ID NO: 2226 - DNA, 20 bp, Artificial Sequence
  chemically synthesized
ctatcccttccctccaaaag

SEQ ID NO: 2227 - DNA, 20 bp, Artificial Sequence
  chemically synthesized
caaaagtggctccgtttcca

SEQ ID NO: 2228 - DNA, 20 bp, Artificial Sequence
  chemically synthesized
tccgtttccacagccccatg

SEQ ID NO: 2229 - DNA, 20 bp, Artificial Sequence
  chemically synthesized
ccgtttccacagccccatgc

SEQ ID NO: 2230 - DNA, 20 bp, Artificial Sequence
  chemically synthesized
ccacagccccatgcaggccc

SEQ ID NO: 2231 - DNA, 20 bp, Artificial Sequence
  chemically synthesized
atgcaggccccagatgcccc

SEQ ID NO: 2232 - DNA, 20 bp, Artificial Sequence
  chemically synthesized
gccccagatgcccccagcaa

SEQ ID NO: 2233 - DNA, 20 bp, Artificial Sequence
  chemically synthesized
ccccagatgcccccagcaac

SEQ ID NO: 2234 - DNA, 20 bp, Artificial Sequence
  chemically synthesized
ccagatgcccccagcaacag

SEQ ID NO: 2235 - DNA, 20 bp, Artificial Sequence
  chemically synthesized
agatgcccccagcaacagga

SEQ ID NO: 2236 - DNA, 20 bp, Artificial Sequence
  chemically synthesized
acaggagagctctccccacc

SEQ ID NO: 2237 - DNA, 20 bp, Artificial Sequence
  chemically synthesized
gagagctctccccacccagc

SEQ ID NO: 2238 - DNA, 20 bp, Artificial Sequence
  chemically synthesized
ctccccacccagccagcatg

SEQ ID NO: 2239 - DNA, 20 bp, Artificial Sequence
  chemically synthesized
tccccacccagccagcatgc

SEQ ID NO: 2240 - DNA, 20 bp, Artificial Sequence
  chemically synthesized
ccccacccagccagcatgca

SEQ ID NO: 2241 - DNA, 20 bp, Artificial Sequence
  chemically synthesized
cccagccagcatgcagggac

SEQ ID NO: 2242 - DNA, 20 bp, Artificial Sequence
  chemically synthesized
atgcagggactagaaaccgt

SEQ ID NO: 2243 - DNA, 20 bp, Artificial Sequence
  chemically synthesized
ctgcaatctgtgacctaacc

SEQ ID NO: 2244 - DNA, 20 bp, Artificial Sequence
  chemically synthesized
tgcaatctgtgacctaaccc

SEQ ID NO: 2245 - DNA, 20 bp, Artificial Sequence
  chemically synthesized
tctgtgacctaacccaggct

SEQ ID NO: 2246 - DNA, 20 bp, Artificial Sequence
  chemically synthesized
ctgtgacctaacccaggctt

SEQ ID NO: 2247 - DNA, 20 bp, Artificial Sequence
  chemically synthesized
acctaacccaggcttaggcc

SEQ ID NO: 2248 - DNA, 20 bp, Artificial Sequence
  chemically synthesized
acccaggcttaggcccagct

SEQ ID NO: 2249 - DNA, 20 bp, Artificial Sequence
  chemically synthesized
cccaggcttaggcccagctt

SEQ ID NO: 2250 - DNA, 20 bp, Artificial Sequence
  chemically synthesized
ccaggcttaggcccagcttg

SEQ ID NO: 2251 - DNA, 20 bp, Artificial Sequence
  chemically synthesized
caggcttaggcccagcttgg

SEQ ID NO: 2252 - DNA, 20 bp, Artificial Sequence
  chemically synthesized
gcttaggcccagcttggggg

SEQ ID NO: 2253 - DNA, 20 bp, Artificial Sequence
  chemically synthesized
cttaggcccagcttggggga

SEQ ID NO: 2254 - DNA, 20 bp, Artificial Sequence
  chemically synthesized
ttaggcccagcttgggggaa

SEQ ID NO: 2255 - DNA, 20 bp, Artificial Sequence
  chemically synthesized
aggcccagcttgggggaagg

SEQ ID NO: 2256 - DNA, 20 bp, Artificial Sequence
  chemically synthesized
cccagcttgggggaagggag

SEQ ID NO: 2257 - DNA, 20 bp, Artificial Sequence
  chemically synthesized
cttgggggaagggagcagat

SEQ ID NO: 2258 - DNA, 20 bp, Artificial Sequence
  chemically synthesized
ttgggggaagggagcagatg

SEQ ID NO: 2259 - DNA, 20 bp, Artificial Sequence
  chemically synthesized
cttttaacccctgaaccacc

SEQ ID NO: 2260 - DNA, 20 bp, Artificial Sequence
  chemically synthesized
cccctgaaccacccagccct

SEQ ID NO: 2261 - DNA, 20 bp, Artificial Sequence
  chemically synthesized
ccctgaaccacccagccctc

SEQ ID NO: 2262 - DNA, 20 bp, Artificial Sequence
  chemically synthesized
ccacccagccctcaggacct

SEQ ID NO: 2263 - DNA, 20 bp, Artificial Sequence
  chemically synthesized
cacccagccctcaggacctg

SEQ ID NO: 2264 - DNA, 20 bp, Artificial Sequence
  chemically synthesized
acccagccctcaggacctga

SEQ ID NO: 2265 - DNA, 20 bp, Artificial Sequence
  chemically synthesized
cacaataactctttgttacc

SEQ ID NO: 2266 - DNA, 20 bp, Artificial Sequence
  chemically synthesized
acaataactctttgttacct

SEQ ID NO: 2267 - DNA, 20 bp, Artificial Sequence
  chemically synthesized
ctttgttacctaggattacc

SEQ ID NO: 2268 - DNA, 20 bp, Artificial Sequence
  chemically synthesized
tttgttacctaggattacct

SEQ ID NO: 2269 - DNA, 20 bp, Artificial Sequence
  chemically synthesized
tgttacctaggattacctag

SEQ ID NO: 2270 - DNA, 20 bp, Artificial Sequence
  chemically synthesized
agttaacaaaaataaacaac

SEQ ID NO: 2271 - DNA, 20 bp, Artificial Sequence
  chemically synthesized
taaacaactggctttgaatc

SEQ ID NO: 2272 - DNA, 20 bp, Artificial Sequence
  chemically synthesized
actggctttgaatctggtct

SEQ ID NO: 2273 - DNA, 20 bp, Artificial Sequence
  chemically synthesized
ctggctttgaatctggtctc

SEQ ID NO: 2274 - DNA, 20 bp, Artificial Sequence
  chemically synthesized
tggctttgaatctggtctca

SEQ ID NO: 2275 - DNA, 20 bp, Artificial Sequence
  chemically synthesized
agggtgcatgccctgctctt

SEQ ID NO: 2276 - DNA, 20 bp, Artificial Sequence
  chemically synthesized
gctcttcagataccatttac

SEQ ID NO: 2277 - DNA, 20 bp, Artificial Sequence
  chemically synthesized
ttcagataccatttacaaga

SEQ ID NO: 2278 - DNA, 20 bp, Artificial Sequence
  chemically synthesized
tcagataccatttacaagat

SEQ ID NO: 2279 - DNA, 20 bp, Artificial Sequence
  chemically synthesized
ataccatttacaagatgggt

SEQ ID NO: 2280 - DNA, 20 bp, Artificial Sequence
  chemically synthesized
atctccctcccatctaaaaa

SEQ ID NO: 2281 - DNA, 20 bp, Artificial Sequence
  chemically synthesized
catctaaaaacagtccccct

SEQ ID NO: 2282 - DNA, 20 bp, Artificial Sequence
  chemically synthesized
tctaaaaacagtccccctta

SEQ ID NO: 2283 - DNA, 20 bp, Artificial Sequence
  chemically synthesized
cccccttagagccttaactc

SEQ ID NO: 2284 - DNA, 20 bp, Artificial Sequence
  chemically synthesized
tttctttttttttctttcca

SEQ ID NO: 2285 - DNA, 20 bp, Artificial Sequence
  chemically synthesized
ctttttttttctttccacag

SEQ ID NO: 2286 - DNA, 20 bp, Artificial Sequence
  chemically synthesized
tttttttttctttccacagc

SEQ ID NO: 2287 - DNA, 20 bp, Artificial Sequence
  chemically synthesized
atttactttcaaataaaaat

SEQ ID NO: 2288 - DNA, 20 bp, Artificial Sequence
  chemically synthesized
tgaacctgcttttttgtgtt

SEQ ID NO: 2289 - DNA, 20 bp, Artificial Sequence
  chemically synthesized
gaacctgcttttttgtgttt

SEQ ID NO: 2290 - DNA, 20 bp, Artificial Sequence
  chemically synthesized
aacctgcttttttgtgttta

SEQ ID NO: 2291 - DNA, 20 bp, Artificial Sequence
  chemically synthesized
ctgcttttttgtgtttaggg

SEQ ID NO: 2292 - DNA, 20 bp, Artificial Sequence
  chemically synthesized
ctgcccaccccctaaccttt

SEQ ID NO: 2293 - DNA, 20 bp, Artificial Sequence
  chemically synthesized
tcataccatgtgttcctaca

SEQ ID NO: 2294 - DNA, 20 bp, Artificial Sequence
  chemically synthesized
ataccatgtgttcctacaca

SEQ ID NO: 2295 - DNA, 20 bp, Artificial Sequence
  chemically synthesized
ccatgtgttcctacacagag

SEQ ID NO: 2296 - DNA, 20 bp, Artificial Sequence
  chemically synthesized
aactgtattattttctaaaa

SEQ ID NO: 2297 - DNA, 20 bp, Artificial Sequence
  chemically synthesized
ttttctaaaacagtatcttt

SEQ ID NO: 2298 - DNA, 20 bp, Artificial Sequence
  chemically synthesized
tcagaaaacatttgtataaa

SEQ ID NO: 2299 - DNA, 20 bp, Artificial Sequence
  chemically synthesized
ttgtataaatggacaaattt

SEQ ID NO: 2300 - DNA, 20 bp, Artificial Sequence
  chemically synthesized
caaatttaagtttcataaaa

SEQ ID NO: 2301 - DNA, 20 bp, Artificial Sequence
  chemically synthesized
taaaatggtccctactataa

SEQ ID NO: 2302 - DNA, 20 bp, Artificial Sequence
  chemically synthesized
ctataaaagctcacttgaac

SEQ ID NO: 2303 - DNA, 20 bp, Artificial Sequence
  chemically synthesized
agctcacttgaacaagtaaa

SEQ ID NO: 2304 - DNA, 20 bp, Artificial Sequence
  chemically synthesized
tcacttgaacaagtaaatgg

SEQ ID NO: 2305 - DNA, 20 bp, Artificial Sequence
  chemically synthesized
cttgaacaagtaaatggtgg

SEQ ID NO: 2306 - DNA, 20 bp, Artificial Sequence
  chemically synthesized
gaacaagtaaatggtggtgg

SEQ ID NO: 2307 - DNA, 20 bp, Artificial Sequence
  chemically synthesized
caagtaaatggtggtggcag

SEQ ID NO: 2308 - DNA, 20 bp, Artificial Sequence
  chemically synthesized
gtaaatggtggtggcagtgg

SEQ ID NO: 2309 - DNA, 20 bp, Artificial Sequence
  chemically synthesized
aatggtggtggcagtggtgg

SEQ ID NO: 2310 - DNA, 20 bp, Artificial Sequence
  chemically synthesized
ggtggtggcagtggtggtgg

SEQ ID NO: 2311 - DNA, 20 bp, Artificial Sequence
  chemically synthesized
ggtggcagtggtggtggtgg

SEQ ID NO: 2312 - DNA, 20 bp, Artificial Sequence
  chemically synthesized
ggcagtggtggtggtggtgg

SEQ ID NO: 2313 - DNA, 20 bp, Artificial Sequence
  chemically synthesized
agtggtggtggtggtggtgg

SEQ ID NO: 2314 - DNA, 20 bp, Artificial Sequence
  chemically synthesized
ggtggtggtggtggtgatga

SEQ ID NO: 2315 - DNA, 20 bp, Artificial Sequence
  chemically synthesized
ggtggtggtggtgatgatgg

SEQ ID NO: 2316 - DNA, 20 bp, Artificial Sequence
  chemically synthesized
ggtggtggtgatgatggtgg

SEQ ID NO: 2317 - DNA, 20 bp, Artificial Sequence
  chemically synthesized
ggtggtgatgatggtggtgg

SEQ ID NO: 2318 - DNA, 20 bp, Artificial Sequence
  chemically synthesized
ggtgatgatggtggtggtag

SEQ ID NO: 2319 - DNA, 20 bp, Artificial Sequence
  chemically synthesized
gatgatggtggtggtagtgg

SEQ ID NO: 2320 - DNA, 20 bp, Artificial Sequence
  chemically synthesized
gatggtggtggtagtggtgg

SEQ ID NO: 2321 - DNA, 20 bp, Artificial Sequence
  chemically synthesized
ggtggtggtagtggtggtgg

SEQ ID NO: 2322 - DNA, 20 bp, Artificial Sequence
  chemically synthesized
ggtggtagtggtggtggtgg

SEQ ID NO: 2323 - DNA, 20 bp, Artificial Sequence
  chemically synthesized
agtggtggtggtggtggtga

SEQ ID NO: 2324 - DNA, 20 bp, Artificial Sequence
  chemically synthesized
ggtggtggtggtggtgatgg

SEQ ID NO: 2325 - DNA, 20 bp, Artificial Sequence
  chemically synthesized
ggtggtggtgatggtggtgt

SEQ ID NO: 2326 - DNA, 20 bp, Artificial Sequence
  chemically synthesized
ggtggtgatggtggtgttgg

SEQ ID NO: 2327 - DNA, 20 bp, Artificial Sequence
  chemically synthesized
gatggtggtgttggtggtga

SEQ ID NO: 2328 - DNA, 20 bp, Artificial Sequence
  chemically synthesized
ggtggtgttggtggtgatgg

SEQ ID NO: 2329 - DNA, 20 bp, Artificial Sequence
  chemically synthesized
ggtgttggtggtgatggtgg

SEQ ID NO: 2330 - DNA, 20 bp, Artificial Sequence
  chemically synthesized
gttggtggtgatggtggtgg

SEQ ID NO: 2331 - DNA, 20 bp, Artificial Sequence
  chemically synthesized
ggtggtgatggtggtggtgg

SEQ ID NO: 2332 - DNA, 20 bp, Artificial Sequence
  chemically synthesized
ggtgatggtggtggtggtgg

SEQ ID NO: 2333 - DNA, 20 bp, Artificial Sequence
  chemically synthesized
ggtggtggtggtggtggtga

SEQ ID NO: 2334 - DNA, 20 bp, Artificial Sequence
  chemically synthesized
ggtggtggtggtggtgatgg

SEQ ID NO: 2335 - DNA, 20 bp, Artificial Sequence
  chemically synthesized
ggtggtggtggtgatggtgg

SEQ ID NO: 2336 - DNA, 20 bp, Artificial Sequence
  chemically synthesized
ggtggtggtgatggtggtgg

SEQ ID NO: 2337 - DNA, 20 bp, Artificial Sequence
  chemically synthesized
ggtggtgatggtggtggtgg

SEQ ID NO: 2338 - DNA, 20 bp, Artificial Sequence
  chemically synthesized
ggtgatggtggtggtggtgg

SEQ ID NO: 2339 - DNA, 20 bp, Artificial Sequence
  chemically synthesized
ggtggtggtggtggtggtga

SEQ ID NO: 2340 - DNA, 20 bp, Artificial Sequence
  chemically synthesized
ggtggtggtggtggtgatgg

SEQ ID NO: 2341 - DNA, 20 bp, Artificial Sequence
  chemically synthesized
ggtggtggtggtgatggtgg

SEQ ID NO: 2342 - DNA, 20 bp, Artificial Sequence
  chemically synthesized
ggtggtgatggtggtggtga

SEQ ID NO: 2343 - DNA, 20 bp, Artificial Sequence
  chemically synthesized
ggtgatggtggtggtgatgg

SEQ ID NO: 2344 - DNA, 20 bp, Artificial Sequence
  chemically synthesized
ggtggtggtgatggcggtga

SEQ ID NO: 2345 - DNA, 20 bp, Artificial Sequence
  chemically synthesized
ggtgatggcggtgatggtac

SEQ ID NO: 2346 - DNA, 20 bp, Artificial Sequence
  chemically synthesized
ggcggtgatggtactggtga

SEQ ID NO: 2347 - DNA, 20 bp, Artificial Sequence
  chemically synthesized
ggtgatggtactggtgatgg

SEQ ID NO: 2348 - DNA, 20 bp, Artificial Sequence
  chemically synthesized
gatggtactggtgatggtgg

SEQ ID NO: 2349 - DNA, 20 bp, Artificial Sequence
  chemically synthesized
ggtactggtgatggtggtgg

SEQ ID NO: 2350 - DNA, 20 bp, Artificial Sequence
  chemically synthesized
actggtgatggtggtggtgg

SEQ ID NO: 2351 - DNA, 20 bp, Artificial Sequence
  chemically synthesized
gatggtggtggtggtagtga

SEQ ID NO: 2352 - DNA, 20 bp, Artificial Sequence
  chemically synthesized
ggtggtggtggtagtgatgg

SEQ ID NO: 2353 - DNA, 20 bp, Artificial Sequence
  chemically synthesized
ggtggtggtagtgatggtgg

SEQ ID NO: 2354 - DNA, 20 bp, Artificial Sequence
  chemically synthesized
ggtagtgatggtggtggtaa

SEQ ID NO: 2355 - DNA, 20 bp, Artificial Sequence
  chemically synthesized
agtgatggtggtggtaatgg

SEQ ID NO: 2356 - DNA, 20 bp, Artificial Sequence
  chemically synthesized
gatggtggtggtaatggtgg

SEQ ID NO: 2357 - DNA, 20 bp, Artificial Sequence
  chemically synthesized
ggtggtggtaatggtggtgg

SEQ ID NO: 2358 - DNA, 20 bp, Artificial Sequence
  chemically synthesized
ggtaatggtggtggtggtga

SEQ ID NO: 2359 - DNA, 20 bp, Artificial Sequence
  chemically synthesized
aatggtggtggtggtgatgg

SEQ ID NO: 2360 - DNA, 20 bp, Artificial Sequence
  chemically synthesized
ggtggtggtggtgatggtgg

SEQ ID NO: 2361 - DNA, 20 bp, Artificial Sequence
  chemically synthesized
ggtggtggtgatggtggtgg

SEQ ID NO: 2362 - DNA, 20 bp, Artificial Sequence
  chemically synthesized
ggtggtgatggtggtggtgg

SEQ ID NO: 2363 - DNA, 20 bp, Artificial Sequence
  chemically synthesized
ggtgatggtggtggtggtgg

SEQ ID NO: 2364 - DNA, 20 bp, Artificial Sequence
  chemically synthesized
ggtggtggtggtggtagtga

SEQ ID NO: 2365 - DNA, 20 bp, Artificial Sequence
  chemically synthesized
ggtggtggtggtagtgatgg

SEQ ID NO: 2366 - DNA, 20 bp, Artificial Sequence
  chemically synthesized
ggtggtggtagtgatggtgg

SEQ ID NO: 2367 - DNA, 20 bp, Artificial Sequence
  chemically synthesized
ggtagtgatggtggtggtaa

SEQ ID NO: 2368 - DNA, 20 bp, Artificial Sequence
  chemically synthesized
agtgatggtggtggtaatgg

SEQ ID NO: 2369 - DNA, 20 bp, Artificial Sequence
  chemically synthesized
gatggtggtggtaatggtgg

SEQ ID NO: 2370 - DNA, 20 bp, Artificial Sequence
  chemically synthesized
ggtggtggtaatggtggtgg

SEQ ID NO: 2371 - DNA, 20 bp, Artificial Sequence
  chemically synthesized
ggtaatggtggtggtggtga

SEQ ID NO: 2372 - DNA, 20 bp, Artificial Sequence
  chemically synthesized
aatggtggtggtggtgatgg

SEQ ID NO: 2373 - DNA, 20 bp, Artificial Sequence
  chemically synthesized
ggtggtggtggtgatggtgg

SEQ ID NO: 2374 - DNA, 20 bp, Artificial Sequence
  chemically synthesized
ggtggtggtgatggtggtgg

SEQ ID NO: 2375 - DNA, 20 bp, Artificial Sequence
  chemically synthesized
ggtggtgatggtggtggtgg

SEQ ID NO: 2376 - DNA, 20 bp, Artificial Sequence
  chemically synthesized
ggtgatggtggtggtggtgg

SEQ ID NO: 2377 - DNA, 20 bp, Artificial Sequence
  chemically synthesized
ggtggtggtggtggtagtga

SEQ ID NO: 2378 - DNA, 20 bp, Artificial Sequence
  chemically synthesized
ggtggtggtggtagtgatgg

SEQ ID NO: 2379 - DNA, 20 bp, Artificial Sequence
  chemically synthesized
ggtggtggtagtgatggtgg

SEQ ID NO: 2380 - DNA, 20 bp, Artificial Sequence
  chemically synthesized
ggtagtgatggtggtggtaa

SEQ ID NO: 2381 - DNA, 20 bp, Artificial Sequence
  chemically synthesized
agtgatggtggtggtaatgg

SEQ ID NO: 2382 - DNA, 20 bp, Artificial Sequence
  chemically synthesized
gatggtggtggtaatggtgg

SEQ ID NO: 2383 - DNA, 20 bp, Artificial Sequence
  chemically synthesized
ggtggtggtaatggtggtgg

SEQ ID NO: 2384 - DNA, 20 bp, Artificial Sequence
  chemically synthesized
ggtaatggtggtggtggtga

SEQ ID NO: 2385 - DNA, 20 bp, Artificial Sequence
  chemically synthesized
aatggtggtggtggtgatgg

SEQ ID NO: 2386 - DNA, 20 bp, Artificial Sequence
  chemically synthesized
ggtggtgatggtggtgatga

SEQ ID NO: 2387 - DNA, 20 bp, Artificial Sequence
  chemically synthesized
gatggtggtgatgatggtga

SEQ ID NO: 2388 - DNA, 20 bp, Artificial Sequence
  chemically synthesized
ggtgatgatggtgatggtac

SEQ ID NO: 2389 - DNA, 20 bp, Artificial Sequence
  chemically synthesized
gatgatggtgatggtactgg

SEQ ID NO: 2390 - DNA, 20 bp, Artificial Sequence
  chemically synthesized
ggtgatggtactggtggtga

SEQ ID NO: 2391 - DNA, 20 bp, Artificial Sequence
  chemically synthesized
ggtactggtggtgatggtga

SEQ ID NO: 2392 - DNA, 20 bp, Artificial Sequence
  chemically synthesized
ggtggtgatggtgatggtga

SEQ ID NO: 2393 - DNA, 20 bp, Artificial Sequence
  chemically synthesized
gatggtgatggtgatggtac

SEQ ID NO: 2394 - DNA, 20 bp, Artificial Sequence
  chemically synthesized
gatggtgatggtactggtga

SEQ ID NO: 2395 - DNA, 20 bp, Artificial Sequence
  chemically synthesized
ggtgatggtactggtgatgg

SEQ ID NO: 2396 - DNA, 20 bp, Artificial Sequence
  chemically synthesized
gatggtactggtgatggtgg

SEQ ID NO: 2397 - DNA, 20 bp, Artificial Sequence
  chemically synthesized
ggtactggtgatggtggtgg

SEQ ID NO: 2398 - DNA, 20 bp, Artificial Sequence
  chemically synthesized
actggtgatggtggtggtgg

SEQ ID NO: 2399 - DNA, 20 bp, Artificial Sequence
  chemically synthesized
gatggtggtggtggtagtga

SEQ ID NO: 2400 - DNA, 20 bp, Artificial Sequence
  chemically synthesized
ggtggtggtggtagtgatgg

SEQ ID NO: 2401 - DNA, 20 bp, Artificial Sequence
  chemically synthesized
ggtggtggtagtgatggtgg

SEQ ID NO: 2402 - DNA, 20 bp, Artificial Sequence
  chemically synthesized
ggtagtgatggtggtggtaa

SEQ ID NO: 2403 - DNA, 20 bp, Artificial Sequence
  chemically synthesized
agtgatggtggtggtaatgg

SEQ ID NO: 2404 - DNA, 20 bp, Artificial Sequence
  chemically synthesized
gatggtggtggtaatggtgg

SEQ ID NO: 2405 - DNA, 20 bp, Artificial Sequence
  chemically synthesized
ggtggtggtaatggtggtgg

SEQ ID NO: 2406 - DNA, 20 bp, Artificial Sequence
  chemically synthesized
ggtaatggtggtggtggtga

SEQ ID NO: 2407 - DNA, 20 bp, Artificial Sequence
  chemically synthesized
aatggtggtggtggtgatgg

SEQ ID NO: 2408 - DNA, 20 bp, Artificial Sequence
  chemically synthesized
ggtggtggtggtgatggtgg

SEQ ID NO: 2409 - DNA, 20 bp, Artificial Sequence
  chemically synthesized
ggtggtgatggtggtggtaa

SEQ ID NO: 2410 - DNA, 20 bp, Artificial Sequence
  chemically synthesized
ggtgatggtggtggtaatgg

SEQ ID NO: 2411 - DNA, 20 bp, Artificial Sequence
  chemically synthesized
gatggtggtggtaatggtgg

SEQ ID NO: 2412 - DNA, 20 bp, Artificial Sequence
  chemically synthesized
ggtggtggtaatggtggtgg

SEQ ID NO: 2413 - DNA, 20 bp, Artificial Sequence
  chemically synthesized
ggtaatggtggtggtggtga

SEQ ID NO: 2414 - DNA, 20 bp, Artificial Sequence
  chemically synthesized
aatggtggtggtggtgatgg

SEQ ID NO: 2415 - DNA, 20 bp, Artificial Sequence
  chemically synthesized
ggtggtgatggtggtgatga

SEQ ID NO: 2416 - DNA, 20 bp, Artificial Sequence
  chemically synthesized
gatggtggtgatgatggtga

SEQ ID NO: 2417 - DNA, 20 bp, Artificial Sequence
  chemically synthesized
ggtgatgatggtgatggtac

SEQ ID NO: 2418 - DNA, 20 bp, Artificial Sequence
  chemically synthesized
gatgatggtgatggtactgg

SEQ ID NO: 2419 - DNA, 20 bp, Artificial Sequence
  chemically synthesized
ggtgatggtactggtggtga

SEQ ID NO: 2420 - DNA, 20 bp, Artificial Sequence
  chemically synthesized
ggtactggtggtgatggtga

SEQ ID NO: 2421 - DNA, 20 bp, Artificial Sequence
  chemically synthesized
ggtggtgatggtgatggtga

SEQ ID NO: 2422 - DNA, 20 bp, Artificial Sequence
  chemically synthesized
gatggtgatggtgatggtac

SEQ ID NO: 2423 - DNA, 20 bp, Artificial Sequence
  chemically synthesized
gatggtgatggtactggtga

SEQ ID NO: 2424 - DNA, 20 bp, Artificial Sequence
  chemically synthesized
ggtgatggtactggtgatgg

SEQ ID NO: 2425 - DNA, 20 bp, Artificial Sequence
  chemically synthesized
gatggtactggtgatggtgg

SEQ ID NO: 2426 - DNA, 20 bp, Artificial Sequence
  chemically synthesized
ggtactggtgatggtggtgg

SEQ ID NO: 2427 - DNA, 20 bp, Artificial Sequence
  chemically synthesized
actggtgatggtggtggtgg

SEQ ID NO: 2428 - DNA, 20 bp, Artificial Sequence
  chemically synthesized
gatggtggtggtggtagtga

SEQ ID NO: 2429 - DNA, 20 bp, Artificial Sequence
  chemically synthesized
ggtggtggtggtagtgatgg

SEQ ID NO: 2430 - DNA, 20 bp, Artificial Sequence
  chemically synthesized
ggtggtggtagtgatggtgg

SEQ ID NO: 2431 - DNA, 20 bp, Artificial Sequence
  chemically synthesized
ggtagtgatggtggtggtaa

SEQ ID NO: 2432 - DNA, 20 bp, Artificial Sequence
  chemically synthesized
agtgatggtggtggtaatgg

SEQ ID NO: 2433 - DNA, 20 bp, Artificial Sequence
  chemically synthesized
gatggtggtggtaatggtgg

SEQ ID NO: 2434 - DNA, 20 bp, Artificial Sequence
  chemically synthesized
ggtggtggtaatggtggtgg

SEQ ID NO: 2435 - DNA, 20 bp, Artificial Sequence
  chemically synthesized
ggtaatggtggtggtggtga

SEQ ID NO: 2436 - DNA, 20 bp, Artificial Sequence
  chemically synthesized
aatggtggtggtggtgatgg

SEQ ID NO: 2437 - DNA, 20 bp, Artificial Sequence
  chemically synthesized
ggtggtggtggtgatggtgg

SEQ ID NO: 2438 - DNA, 20 bp, Artificial Sequence
  chemically synthesized
ggtggtggtgatggtggtgg

SEQ ID NO: 2439 - DNA, 20 bp, Artificial Sequence
  chemically synthesized
ggtggtgatggtggtggtgg

SEQ ID NO: 2440 - DNA, 20 bp, Artificial Sequence
  chemically synthesized
ggtgatggtggtggtggtgg

SEQ ID NO: 2441 - DNA, 20 bp, Artificial Sequence
  chemically synthesized
ggtggtggtggtggtagtga

SEQ ID NO: 2442 - DNA, 20 bp, Artificial Sequence
  chemically synthesized
ggtggtggtggtagtgatgg

SEQ ID NO: 2443 - DNA, 20 bp, Artificial Sequence
  chemically synthesized
ggtggtggtagtgatggtgg

SEQ ID NO: 2444 - DNA, 20 bp, Artificial Sequence
  chemically synthesized
ggtagtgatggtggtggtaa

SEQ ID NO: 2445 - DNA, 20 bp, Artificial Sequence
  chemically synthesized
agtgatggtggtggtaatgg

SEQ ID NO: 2446 - DNA, 20 bp, Artificial Sequence
  chemically synthesized
gatggtggtggtaatggtgg

SEQ ID NO: 2447 - DNA, 20 bp, Artificial Sequence
  chemically synthesized
ggtggtggtaatggtggtgg

SEQ ID NO: 2448 - DNA, 20 bp, Artificial Sequence
  chemically synthesized
ggtaatggtggtggtggtga

SEQ ID NO: 2449 - DNA, 20 bp, Artificial Sequence
  chemically synthesized
aatggtggtggtggtgatgg

SEQ ID NO: 2450 - DNA, 20 bp, Artificial Sequence
  chemically synthesized
ggtggtgatggtggtgatga

SEQ ID NO: 2451 - DNA, 20 bp, Artificial Sequence
  chemically synthesized
gatggtggtgatgatggtga

SEQ ID NO: 2452 - DNA, 20 bp, Artificial Sequence
  chemically synthesized
ggtgatgatggtgatggtac

SEQ ID NO: 2453 - DNA, 20 bp, Artificial Sequence
  chemically synthesized
gatgatggtgatggtactgg

SEQ ID NO: 2454 - DNA, 20 bp, Artificial Sequence
  chemically synthesized
ggtgatggtactggtggtga

SEQ ID NO: 2455 - DNA, 20 bp, Artificial Sequence
  chemically synthesized
ggtactggtggtgatggtga

SEQ ID NO: 2456 - DNA, 20 bp, Artificial Sequence
  chemically synthesized
actggtggtgatggtgatgg

SEQ ID NO: 2457 - DNA, 20 bp, Artificial Sequence
  chemically synthesized
ggtggtgatggtgatggtgg

SEQ ID NO: 2458 - DNA, 20 bp, Artificial Sequence
  chemically synthesized
ggtgatggtgatggtggtgg

SEQ ID NO: 2459 - DNA, 20 bp, Artificial Sequence
  chemically synthesized
gatggtgatggtggtggtgg

SEQ ID NO: 2460 - DNA, 20 bp, Artificial Sequence
  chemically synthesized
gatggtggtggtggtggtga

SEQ ID NO: 2461 - DNA, 20 bp, Artificial Sequence
  chemically synthesized
ggtggtggtggtgatggtac

SEQ ID NO: 2462 - DNA, 20 bp, Artificial Sequence
  chemically synthesized
ggtggtggtgatggtactgg

SEQ ID NO: 2463 - DNA, 20 bp, Artificial Sequence
  chemically synthesized
ggtgatggtactggtggtga

SEQ ID NO: 2464 - DNA, 20 bp, Artificial Sequence
  chemically synthesized
ggtactggtggtgatggtac

SEQ ID NO: 2465 - DNA, 20 bp, Artificial Sequence
  chemically synthesized
actggtggtgatggtactgg

SEQ ID NO: 2466 - DNA, 20 bp, Artificial Sequence
  chemically synthesized
ggtgatggtactggtggtga

SEQ ID NO: 2467 - DNA, 20 bp, Artificial Sequence
  chemically synthesized
gatggtactggtggtgatgg

SEQ ID NO: 2468 - DNA, 20 bp, Artificial Sequence
  chemically synthesized
ggtactggtggtgatggtgg

SEQ ID NO: 2469 - DNA, 20 bp, Artificial Sequence
  chemically synthesized
actggtggtgatggtggtgg

SEQ ID NO: 2470 - DNA, 20 bp, Artificial Sequence
  chemically synthesized
ggtggtgatggtggtggtgg

SEQ ID NO: 2471 - DNA, 20 bp, Artificial Sequence
  chemically synthesized
gatggtggtggtggtagtga

SEQ ID NO: 2472 - DNA, 20 bp, Artificial Sequence
  chemically synthesized
ggtggtggtggtagtgatgg

SEQ ID NO: 2473 - DNA, 20 bp, Artificial Sequence
  chemically synthesized
ggtggtggtagtgatggtgg

SEQ ID NO: 2474 - DNA, 20 bp, Artificial Sequence
  chemically synthesized
ggtagtgatggtggtggtaa

SEQ ID NO: 2475 - DNA, 20 bp, Artificial Sequence
  chemically synthesized
agtgatggtggtggtaatgg

SEQ ID NO: 2476 - DNA, 20 bp, Artificial Sequence
  chemically synthesized
gatggtggtggtaatggtgg

SEQ ID NO: 2477 - DNA, 20 bp, Artificial Sequence
  chemically synthesized
ggtggtggtaatggtggtgg

SEQ ID NO: 2478 - DNA, 20 bp, Artificial Sequence
  chemically synthesized
tggtggtaatggtggtggtg

SEQ ID NO: 2479 - DNA, 20 bp, Artificial Sequence
  chemically synthesized
ggtaatggtggtggtggaga

SEQ ID NO: 2480 - DNA, 20 bp, Artificial Sequence
  chemically synthesized
aatggtggtggtggagatgg

SEQ ID NO: 2481 - DNA, 20 bp, Artificial Sequence
  chemically synthesized
ggtggagatggtggtgttga

SEQ ID NO: 2482 - DNA, 20 bp, Artificial Sequence
  chemically synthesized
gatggtggtgttgatggtga

SEQ ID NO: 2483 - DNA, 20 bp, Artificial Sequence
  chemically synthesized
ggtgttgatggtgatggtac

SEQ ID NO: 2484 - DNA, 20 bp, Artificial Sequence
  chemically synthesized
gttgatggtgatggtactgg

SEQ ID NO: 2485 - DNA, 20 bp, Artificial Sequence
  chemically synthesized
ggtgatggtactggtggtga

SEQ ID NO: 2486 - DNA, 20 bp, Artificial Sequence
  chemically synthesized
ggtactggtggtgatggtac

SEQ ID NO: 2487 - DNA, 20 bp, Artificial Sequence
  chemically synthesized
actggtggtgatggtactgg

SEQ ID NO: 2488 - DNA, 20 bp, Artificial Sequence
  chemically synthesized
ggtgatggtactggtggtga

SEQ ID NO: 2489 - DNA, 20 bp, Artificial Sequence
  chemically synthesized
ggtactggtggtgatggtga

SEQ ID NO: 2490 - DNA, 20 bp, Artificial Sequence
  chemically synthesized
actggtggtgatggtgatgg

SEQ ID NO: 2491 - DNA, 20 bp, Artificial Sequence
  chemically synthesized
ggtggtgatggtgatggtgg

SEQ ID NO: 2492 - DNA, 20 bp, Artificial Sequence
  chemically synthesized
ggtgatggtgatggtggtgg

SEQ ID NO: 2493 - DNA, 20 bp, Artificial Sequence
  chemically synthesized
gatggtgatggtggtggtgg

SEQ ID NO: 2494 - DNA, 20 bp, Artificial Sequence
  chemically synthesized
ggtggtggtggtgatgctac

SEQ ID NO: 2495 - DNA, 20 bp, Artificial Sequence
  chemically synthesized
ggtggtggtgatgctactgg

SEQ ID NO: 2496 - DNA, 20 bp, Artificial Sequence
  chemically synthesized
ggtgatgctactggtggtga

SEQ ID NO: 2497 - DNA, 20 bp, Artificial Sequence
  chemically synthesized
gctactggtggtgatggtac

SEQ ID NO: 2498 - DNA, 20 bp, Artificial Sequence
  chemically synthesized
actggtggtgatggtactgg

SEQ ID NO: 2499 - DNA, 20 bp, Artificial Sequence
  chemically synthesized
ggtgatggtactggtggtga

SEQ ID NO: 2500 - DNA, 20 bp, Artificial Sequence
  chemically synthesized
gatggtactggtggtgatgg

SEQ ID NO: 2501 - DNA, 20 bp, Artificial Sequence
  chemically synthesized
ggtactggtggtgatggtgg

SEQ ID NO: 2502 - DNA, 20 bp, Artificial Sequence
  chemically synthesized
actggtggtgatggtggtgg

SEQ ID NO: 2503 - DNA, 20 bp, Artificial Sequence
  chemically synthesized
ggtggtgatggtggtggtgg

SEQ ID NO: 2504 - DNA, 20 bp, Artificial Sequence
  chemically synthesized
gatggtggtggtggtagtga

SEQ ID NO: 2505 - DNA, 20 bp, Artificial Sequence
  chemically synthesized
ggtggtggtggtagtgatgg

SEQ ID NO: 2506 - DNA, 20 bp, Artificial Sequence
  chemically synthesized
ggtggtggtagtgatggtgg

SEQ ID NO: 2507 - DNA, 20 bp, Artificial Sequence
  chemically synthesized
ggtagtgatggtggtggtaa

SEQ ID NO: 2508 - DNA, 20 bp, Artificial Sequence
  chemically synthesized
agtgatggtggtggtaatgg

SEQ ID NO: 2509 - DNA, 20 bp, Artificial Sequence
  chemically synthesized
gatggtggtggtaatggtgg

SEQ ID NO: 2510 - DNA, 20 bp, Artificial Sequence
  chemically synthesized
ggtggtggtaatggtggtgg

SEQ ID NO: 2511 - DNA, 20 bp, Artificial Sequence
  chemically synthesized
ggtggtaatggtggtggtgg

SEQ ID NO: 2512 - DNA, 20 bp, Artificial Sequence
  chemically synthesized
ggtaatggtggtggtggtgg

SEQ ID NO: 2513 - DNA, 20 bp, Artificial Sequence
  chemically synthesized
aatggtggtggtggtggtgg

SEQ ID NO: 2514 - DNA, 20 bp, Artificial Sequence
  chemically synthesized
ggtggtggtggtggtggtgg

SEQ ID NO: 2515 - DNA, 20 bp, Artificial Sequence
  chemically synthesized
ggtggtggtggtggtagtga

SEQ ID NO: 2516 - DNA, 20 bp, Artificial Sequence
  chemically synthesized
ggtggtggtggtagtgatgg

SEQ ID NO: 2517 - DNA, 20 bp, Artificial Sequence
  chemically synthesized
ggtggtggtagtgatggtgg

SEQ ID NO: 2518 - DNA, 20 bp, Artificial Sequence
  chemically synthesized
ggtggtagtgatggtggtgg

SEQ ID NO: 2519 - DNA, 20 bp, Artificial Sequence
  chemically synthesized
agtgatggtggtggtggtga

SEQ ID NO: 2520 - DNA, 20 bp, Artificial Sequence
  chemically synthesized
ggtggtggtggtgatggtac

SEQ ID NO: 2521 - DNA, 20 bp, Artificial Sequence
  chemically synthesized
ggtggtggtgatggtactgg

SEQ ID NO: 2522 - DNA, 20 bp, Artificial Sequence
  chemically synthesized
ggtgatggtactggtggtga

SEQ ID NO: 2523 - DNA, 20 bp, Artificial Sequence
  chemically synthesized
gatggtactggtggtgatgg

SEQ ID NO: 2524 - DNA, 20 bp, Artificial Sequence
  chemically synthesized
ggtactggtggtgatggtgg

SEQ ID NO: 2525 - DNA, 20 bp, Artificial Sequence
  chemically synthesized
actggtggtgatggtggtgg

SEQ ID NO: 2526 - DNA, 20 bp, Artificial Sequence
  chemically synthesized
ggtggtgatggtggtggtgg

SEQ ID NO: 2527 - DNA, 20 bp, Artificial Sequence
  chemically synthesized
gatggtggtggtggtagtga

SEQ ID NO: 2528 - DNA, 20 bp, Artificial Sequence
  chemically synthesized
ggtggtggtggtagtgatgg

SEQ ID NO: 2529 - DNA, 20 bp, Artificial Sequence
  chemically synthesized
ggtggtggtagtgatggtgg

SEQ ID NO: 2530 - DNA, 20 bp, Artificial Sequence
  chemically synthesized
ggtagtgatggtggtggtaa

SEQ ID NO: 2531 - DNA, 20 bp, Artificial Sequence
  chemically synthesized
agtgatggtggtggtaatgg

SEQ ID NO: 2532 - DNA, 20 bp, Artificial Sequence
  chemically synthesized
gatggtggtggtaatggtgg

SEQ ID NO: 2533 - DNA, 20 bp, Artificial Sequence
  chemically synthesized
ggtggtggtaatggtggtgg

SEQ ID NO: 2534 - DNA, 20 bp, Artificial Sequence
  chemically synthesized
ggtaatggtggtggtggtga

SEQ ID NO: 2535 - DNA, 20 bp, Artificial Sequence
  chemically synthesized
aatggtggtggtggtgatgg

SEQ ID NO: 2536 - DNA, 20 bp, Artificial Sequence
  chemically synthesized
ggtggtggtggtgatggtgg

SEQ ID NO: 2537 - DNA, 20 bp, Artificial Sequence
  chemically synthesized
ggtggtggtgatggtggtgg

SEQ ID NO: 2538 - DNA, 20 bp, Artificial Sequence
  chemically synthesized
ggtggtgatggtggtggtgg

SEQ ID NO: 2539 - DNA, 20 bp, Artificial Sequence
  chemically synthesized
ggtgatggtggtggtggtgg

SEQ ID NO: 2540 - DNA, 20 bp, Artificial Sequence
  chemically synthesized
gatggtggtggtggtggtag

SEQ ID NO: 2541 - DNA, 20 bp, Artificial Sequence
  chemically synthesized
ggtggtggtggtggtagtgg

SEQ ID NO: 2542 - DNA, 20 bp, Artificial Sequence
  chemically synthesized
ggtggtggtagtggtggtga

SEQ ID NO: 2543 - DNA, 20 bp, Artificial Sequence
  chemically synthesized
ggtggtagtggtggtgatgg

SEQ ID NO: 2544 - DNA, 20 bp, Artificial Sequence
  chemically synthesized
agtggtggtgatggtggtga

SEQ ID NO: 2545 - DNA, 20 bp, Artificial Sequence
  chemically synthesized
ggtgatggtggtgatggtac

SEQ ID NO: 2546 - DNA, 20 bp, Artificial Sequence
  chemically synthesized
gatggtggtgatggtactgg

SEQ ID NO: 2547 - DNA, 20 bp, Artificial Sequence
  chemically synthesized
ggtgatggtactggtggtga

SEQ ID NO: 2548 - DNA, 20 bp, Artificial Sequence
  chemically synthesized
gatggtactggtggtgatgg

SEQ ID NO: 2549 - DNA, 20 bp, Artificial Sequence
  chemically synthesized
ggtactggtggtgatggtgg

SEQ ID NO: 2550 - DNA, 20 bp, Artificial Sequence
  chemically synthesized
actggtggtgatggtggtgg

SEQ ID NO: 2551 - DNA, 20 bp, Artificial Sequence
  chemically synthesized
ggtggtgatggtggtggtgg

SEQ ID NO: 2552 - DNA, 20 bp, Artificial Sequence
  chemically synthesized
gatggtggtggtggtagtga

SEQ ID NO: 2553 - DNA, 20 bp, Artificial Sequence
  chemically synthesized
ggtggtggtggtagtgatgg

SEQ ID NO: 2554 - DNA, 20 bp, Artificial Sequence
  chemically synthesized
ggtggtggtagtgatggtgg

SEQ ID NO: 2555 - DNA, 20 bp, Artificial Sequence
  chemically synthesized
ggtagtgatggtggtggttg

SEQ ID NO: 2556 - DNA, 20 bp, Artificial Sequence
  chemically synthesized
agtgatggtggtggttgtgg

SEQ ID NO: 2557 - DNA, 20 bp, Artificial Sequence
  chemically synthesized
gatggtggtggttgtggtgg

SEQ ID NO: 2558 - DNA, 20 bp, Artificial Sequence
  chemically synthesized
ggtggtggttgtggtggtgg

SEQ ID NO: 2559 - DNA, 20 bp, Artificial Sequence
  chemically synthesized
ggttgtggtggtggtggtga

SEQ ID NO: 2560 - DNA, 20 bp, Artificial Sequence
  chemically synthesized
tgtggtggtggtggtgatgg

SEQ ID NO: 2561 - DNA, 20 bp, Artificial Sequence
  chemically synthesized
ggtggtggtggtgatggtgg

SEQ ID NO: 2562 - DNA, 20 bp, Artificial Sequence
  chemically synthesized
ggtggtggtgatggtggcag

SEQ ID NO: 2563 - DNA, 20 bp, Artificial Sequence
  chemically synthesized
ggtggtgatggtggcagtgg

SEQ ID NO: 2564 - DNA, 20 bp, Artificial Sequence
  chemically synthesized
gatggtggcagtggtggttg

SEQ ID NO: 2565 - DNA, 20 bp, Artificial Sequence
  chemically synthesized
ggtggcagtggtggttgtgg

SEQ ID NO: 2566 - DNA, 20 bp, Artificial Sequence
  chemically synthesized
ggcagtggtggttgtggtgg

SEQ ID NO: 2567 - DNA, 20 bp, Artificial Sequence
  chemically synthesized
agtggtggttgtggtggtgg

SEQ ID NO: 2568 - DNA, 20 bp, Artificial Sequence
  chemically synthesized
ggttgtggtggtggtggtga

SEQ ID NO: 2569 - DNA, 20 bp, Artificial Sequence
  chemically synthesized
tgtggtggtggtggtgatgg

SEQ ID NO: 2570 - DNA, 20 bp, Artificial Sequence
  chemically synthesized
ggtggtggtggtgatggtgg

SEQ ID NO: 2571 - DNA, 20 bp, Artificial Sequence
  chemically synthesized
ggtggtggtgatggtggtgg

SEQ ID NO: 2572 - DNA, 20 bp, Artificial Sequence
  chemically synthesized
ggtggtgatggtggtggtgg

SEQ ID NO: 2573 - DNA, 20 bp, Artificial Sequence
  chemically synthesized
ggtgatggtggtggtggtgg

SEQ ID NO: 2574 - DNA, 20 bp, Artificial Sequence
  chemically synthesized
ggtggtggtggtggtggtga

SEQ ID NO: 2575 - DNA, 20 bp, Artificial Sequence
  chemically synthesized
ggtggtggtggtggtgatag

SEQ ID NO: 2576 - DNA, 20 bp, Artificial Sequence
  chemically synthesized
tggtggtggtggtgatagta

SEQ ID NO: 2577 - DNA, 20 bp, Artificial Sequence
  chemically synthesized
tgtgcatttttctctaaaac

SEQ ID NO: 2578 - DNA, 20 bp, Artificial Sequence
  chemically synthesized
gtgcatttttctctaaaacc

SEQ ID NO: 2579 - DNA, 20 bp, Artificial Sequence
  chemically synthesized
gcatttttctctaaaaccag

SEQ ID NO: 2580 - DNA, 20 bp, Artificial Sequence
  chemically synthesized
tctaaaaccaggagaaaaat

SEQ ID NO: 2581 - DNA, 20 bp, Artificial Sequence
  chemically synthesized
aaattagtcaaaattatgtg

SEQ ID NO: 2582 - DNA, 20 bp, Artificial Sequence
  chemically synthesized
aattagtcaaaattatgtgt

SEQ ID NO: 2583 - DNA, 20 bp, Artificial Sequence
  chemically synthesized
aaatacacatgtaaatacat

SEQ ID NO: 2584 - DNA, 20 bp, Artificial Sequence
  chemically synthesized
aatacacatgtaaatacata

SEQ ID NO: 2585 - DNA, 20 bp, Artificial Sequence
  chemically synthesized
aatacataaggaatatgcat

SEQ ID NO: 2586 - DNA, 20 bp, Artificial Sequence
  chemically synthesized
aatatgcattggaataactc

SEQ ID NO: 2587 - DNA, 20 bp, Artificial Sequence
  chemically synthesized
aaactgactccttttgattc

SEQ ID NO: 2588 - DNA, 20 bp, Artificial Sequence
  chemically synthesized
actccttttgattctggcct

SEQ ID NO: 2589 - DNA, 20 bp, Artificial Sequence
  chemically synthesized
tttgattctggccttggcta

SEQ ID NO: 2590 - DNA, 20 bp, Artificial Sequence
  chemically synthesized
ttggctaaagatgtgtgcca

SEQ ID NO: 2591 - DNA, 20 bp, Artificial Sequence
  chemically synthesized
tgtgccatggactataccca

SEQ ID NO: 2592 - DNA, 20 bp, Artificial Sequence
  chemically synthesized
ctatacccaaagtcctaaat

SEQ ID NO: 2593 - DNA, 20 bp, Artificial Sequence
  chemically synthesized
tatacccaaagtcctaaatg

SEQ ID NO: 2594 - DNA, 20 bp, Artificial Sequence
  chemically synthesized
caaagtcctaaatgaggcca

SEQ ID NO: 2595 - DNA, 20 bp, Artificial Sequence
  chemically synthesized
aaagtcctaaatgaggccac

SEQ ID NO: 2596 - DNA, 20 bp, Artificial Sequence
  chemically synthesized
agtcctaaatgaggccacag

SEQ ID NO: 2597 - DNA, 20 bp, Artificial Sequence
  chemically synthesized
aggccacaggagtgaatgtc

SEQ ID NO: 2598 - DNA, 20 bp, Artificial Sequence
  chemically synthesized
gtgaatgtccagtaataaaa

SEQ ID NO: 2599 - DNA, 20 bp, Artificial Sequence
  chemically synthesized
tgaatgtccagtaataaaat

SEQ ID NO: 2600 - DNA, 20 bp, Artificial Sequence
  chemically synthesized
tccagtaataaaatgggctc

SEQ ID NO: 2601 - DNA, 20 bp, Artificial Sequence
  chemically synthesized
cagtaataaaatgggctcca

SEQ ID NO: 2602 - DNA, 20 bp, Artificial Sequence
  chemically synthesized
agtaataaaatgggctccag

SEQ ID NO: 2603 - DNA, 20 bp, Artificial Sequence
  chemically synthesized
taaaatgggctccagaggca

SEQ ID NO: 2604 - DNA, 20 bp, Artificial Sequence
  chemically synthesized
aaaatgggctccagaggcac

SEQ ID NO: 2605 - DNA, 20 bp, Artificial Sequence
  chemically synthesized
gcacaggcatcttcaatcac

SEQ ID NO: 2606 - DNA, 20 bp, Artificial Sequence
  chemically synthesized
gcatcttcaatcactagcca

SEQ ID NO: 2607 - DNA, 20 bp, Artificial Sequence
  chemically synthesized
atcttcaatcactagccacg

SEQ ID NO: 2608 - DNA, 20 bp, Artificial Sequence
  chemically synthesized
tcaatcactagccacggagc

SEQ ID NO: 2609 - DNA, 20 bp, Artificial Sequence
  chemically synthesized
cactagccacggagcaagac

SEQ ID NO: 2610 - DNA, 20 bp, Artificial Sequence
  chemically synthesized
cacggagcaagacaagaccc

SEQ ID NO: 2611 - DNA, 20 bp, Artificial Sequence
  chemically synthesized
acggagcaagacaagaccct

SEQ ID NO: 2612 - DNA, 20 bp, Artificial Sequence
  chemically synthesized
cggagcaagacaagaccctg

SEQ ID NO: 2613 - DNA, 20 bp, Artificial Sequence
  chemically synthesized
gagcaagacaagaccctggg

SEQ ID NO: 2614 - DNA, 20 bp, Artificial Sequence
  chemically synthesized
caagacaagaccctggggag

SEQ ID NO: 2615 - DNA, 20 bp, Artificial Sequence
  chemically synthesized
gaccctggggagaagaccca

SEQ ID NO: 2616 - DNA, 20 bp, Artificial Sequence
  chemically synthesized
accctggggagaagacccac

SEQ ID NO: 2617 - DNA, 20 bp, Artificial Sequence
  chemically synthesized
ccctggggagaagacccaca

SEQ ID NO: 2618 - DNA, 20 bp, Artificial Sequence
  chemically synthesized
gggagaagacccacagggat

SEQ ID NO: 2619 - DNA, 20 bp, Artificial Sequence
  chemically synthesized
ccacagggatgagctactat

SEQ ID NO: 2620 - DNA, 20 bp, Artificial Sequence
  chemically synthesized
gatgagctactatcagctcc

SEQ ID NO: 2621 - DNA, 20 bp, Artificial Sequence
  chemically synthesized
tactatcagctcccagcctc

SEQ ID NO: 2622 - DNA, 20 bp, Artificial Sequence
  chemically synthesized
atcagctcccagcctccagt

SEQ ID NO: 2623 - DNA, 20 bp, Artificial Sequence
  chemically synthesized
tcagctcccagcctccagtg

SEQ ID NO: 2624 - DNA, 20 bp, Artificial Sequence
  chemically synthesized
ctcccagcctccagtgagga

SEQ ID NO: 2625 - DNA, 20 bp, Artificial Sequence
  chemically synthesized
gcctccagtgaggaaagaaa

SEQ ID NO: 2626 - DNA, 20 bp, Artificial Sequence
  chemically synthesized
cctccagtgaggaaagaaaa

SEQ ID NO: 2627 - DNA, 20 bp, Artificial Sequence
  chemically synthesized
ctccagtgaggaaagaaaaa

SEQ ID NO: 2628 - DNA, 20 bp, Artificial Sequence
  chemically synthesized
tccagtgaggaaagaaaaag

SEQ ID NO: 2629 - DNA, 20 bp, Artificial Sequence
  chemically synthesized
cagtgaggaaagaaaaaggg

SEQ ID NO: 2630 - DNA, 20 bp, Artificial Sequence
  chemically synthesized
agtgaggaaagaaaaagggg

SEQ ID NO: 2631 - DNA, 20 bp, Artificial Sequence
  chemically synthesized
gtgaggaaagaaaaagggga

SEQ ID NO: 2632 - DNA, 20 bp, Artificial Sequence
  chemically synthesized
aggaaagaaaaaggggaggg

SEQ ID NO: 2633 - DNA, 20 bp, Artificial Sequence
  chemically synthesized
aaagaaaaaggggagggaag

SEQ ID NO: 2634 - DNA, 20 bp, Artificial Sequence
  chemically synthesized
ggggagggaagaagtccctc

SEQ ID NO: 2635 - DNA, 20 bp, Artificial Sequence
  chemically synthesized
gggagggaagaagtccctct

SEQ ID NO: 2636 - DNA, 20 bp, Artificial Sequence
  chemically synthesized
ggagggaagaagtccctctg

SEQ ID NO: 2637 - DNA, 20 bp, Artificial Sequence
  chemically synthesized
gaagaagtccctctggggct

SEQ ID NO: 2638 - DNA, 20 bp, Artificial Sequence
  chemically synthesized
gaagtccctctggggctgag

SEQ ID NO: 2639 - DNA, 20 bp, Artificial Sequence
  chemically synthesized
agtccctctggggctgagtg

SEQ ID NO: 2640 - DNA, 20 bp, Artificial Sequence
  chemically synthesized
ccctctggggctgagtggag

SEQ ID NO: 2641 - DNA, 20 bp, Artificial Sequence
  chemically synthesized
cctctggggctgagtggagt

SEQ ID NO: 2642 - DNA, 20 bp, Artificial Sequence
  chemically synthesized
ctctggggctgagtggagtg

SEQ ID NO: 2643 - DNA, 20 bp, Artificial Sequence
  chemically synthesized
ctggggctgagtggagtggg

SEQ ID NO: 2644 - DNA, 20 bp, Artificial Sequence
  chemically synthesized
gggctgagtggagtggggag

SEQ ID NO: 2645 - DNA, 20 bp, Artificial Sequence
  chemically synthesized
tggagtggggagcggctgcc

SEQ ID NO: 2646 - DNA, 20 bp, Artificial Sequence
  chemically synthesized
gtggggagcggctgccaagt

SEQ ID NO: 2647 - DNA, 20 bp, Artificial Sequence
  chemically synthesized
agcggctgccaagtgagtaa

SEQ ID NO: 2648 - DNA, 20 bp, Artificial Sequence
  chemically synthesized
atacatatgacaatctattt

SEQ ID NO: 2649 - DNA, 20 bp, Artificial Sequence
  chemically synthesized
catatgacaatctattttgg

SEQ ID NO: 2650 - DNA, 20 bp, Artificial Sequence
  chemically synthesized
tattttggaagtaactcctt

SEQ ID NO: 2651 - DNA, 20 bp, Artificial Sequence
  chemically synthesized
taactccttcagtacttaaa

SEQ ID NO: 2652 - DNA, 20 bp, Artificial Sequence
  chemically synthesized
tccttcagtacttaaaaagt

SEQ ID NO: 2653 - DNA, 20 bp, Artificial Sequence
  chemically synthesized
ccttcagtacttaaaaagta

SEQ ID NO: 2654 - DNA, 20 bp, Artificial Sequence
  chemically synthesized
cttcagtacttaaaaagtaa

SEQ ID NO: 2655 - DNA, 20 bp, Artificial Sequence
  chemically synthesized
taaaaagtaagggcaatttc

SEQ ID NO: 2656 - DNA, 20 bp, Artificial Sequence
  chemically synthesized
aattctcatctctatacaca

SEQ ID NO: 2657 - DNA, 20 bp, Artificial Sequence
  chemically synthesized
tctatacacatggacatttg

SEQ ID NO: 2658 - DNA, 20 bp, Artificial Sequence
  chemically synthesized
atacacatggacatttgtag

SEQ ID NO: 2659 - DNA, 20 bp, Artificial Sequence
  chemically synthesized
tggacatttgtagaagaaat

SEQ ID NO: 2660 - DNA, 20 bp, Artificial Sequence
  chemically synthesized
ggacatttgtagaagaaata

SEQ ID NO: 2661 - DNA, 20 bp, Artificial Sequence
  chemically synthesized
ctcaacttacaaataccctg

SEQ ID NO: 2662 - DNA, 20 bp, Artificial Sequence
  chemically synthesized
tcaacttacaaataccctgc

SEQ ID NO: 2663 - DNA, 20 bp, Artificial Sequence
  chemically synthesized
caacttacaaataccctgcg

SEQ ID NO: 2664 - DNA, 20 bp, Artificial Sequence
  chemically synthesized
ggcatattctgcactcatcc

SEQ ID NO: 2665 - DNA, 20 bp, Artificial Sequence
  chemically synthesized
gcatattctgcactcatccc

SEQ ID NO: 2666 - DNA, 20 bp, Artificial Sequence
  chemically synthesized
ttctgcactcatcccaggcg

SEQ ID NO: 2667 - DNA, 20 bp, Artificial Sequence
  chemically synthesized
tctgcactcatcccaggcgt

SEQ ID NO: 2668 - DNA, 20 bp, Artificial Sequence
  chemically synthesized
ctgcactcatcccaggcgtg

SEQ ID NO: 2669 - DNA, 20 bp, Artificial Sequence
  chemically synthesized
ctcatcccaggcgtggggat

SEQ ID NO: 2670 - DNA, 20 bp, Artificial Sequence
  chemically synthesized
catcccaggcgtggggatta

SEQ ID NO: 2671 - DNA, 20 bp, Artificial Sequence
  chemically synthesized
ggggattagagctccatgtg

SEQ ID NO: 2672 - DNA, 20 bp, Artificial Sequence
  chemically synthesized
tagagctccatgtgcagaac

SEQ ID NO: 2673 - DNA, 20 bp, Artificial Sequence
  chemically synthesized
agagctccatgtgcagaacg

SEQ ID NO: 2674 - DNA, 20 bp, Artificial Sequence
  chemically synthesized
gagctccatgtgcagaacga

SEQ ID NO: 2675 - DNA, 20 bp, Artificial Sequence
  chemically synthesized
agctccatgtgcagaacgag

SEQ ID NO: 2676 - DNA, 20 bp, Artificial Sequence
  chemically synthesized
ctccatgtgcagaacgaggg

SEQ ID NO: 2677 - DNA, 20 bp, Artificial Sequence
  chemically synthesized
tccatgtgcagaacgagggg

SEQ ID NO: 2678 - DNA, 20 bp, Artificial Sequence
  chemically synthesized
catgtgcagaacgaggggag

SEQ ID NO: 2679 - DNA, 20 bp, Artificial Sequence
  chemically synthesized
tgtgcagaacgaggggagga

SEQ ID NO: 2680 - DNA, 20 bp, Artificial Sequence
  chemically synthesized
gtgcagaacgaggggaggag

SEQ ID NO: 2681 - DNA, 20 bp, Artificial Sequence
  chemically synthesized
gaggggaggagaggcccctc

SEQ ID NO: 2682 - DNA, 20 bp, Artificial Sequence
  chemically synthesized
gaggagaggcccctccagtg

SEQ ID NO: 2683 - DNA, 20 bp, Artificial Sequence
  chemically synthesized
gagaggcccctccagtgcag

SEQ ID NO: 2684 - DNA, 20 bp, Artificial Sequence
  chemically synthesized
gtgcagaagtttatctgtga

SEQ ID NO: 2685 - DNA, 20 bp, Artificial Sequence
  chemically synthesized
tgtgaaagaaacccaaaatc

SEQ ID NO: 2686 - DNA, 20 bp, Artificial Sequence
  chemically synthesized
aaacccaaaatcaagcacta

SEQ ID NO: 2687 - DNA, 20 bp, Artificial Sequence
  chemically synthesized
acaacgtgcatcataaacca

SEQ ID NO: 2688 - DNA, 20 bp, Artificial Sequence
  chemically synthesized
caacgtgcatcataaaccac

SEQ ID NO: 2689 - DNA, 20 bp, Artificial Sequence
  chemically synthesized
acatttcaattccattaaaa

SEQ ID NO: 2690 - DNA, 20 bp, Artificial Sequence
  chemically synthesized
agattacaacatcattacaa

SEQ ID NO: 2691 - DNA, 20 bp, Artificial Sequence
  chemically synthesized
acatcattacaacagccttg

SEQ ID NO: 2692 - DNA, 20 bp, Artificial Sequence
  chemically synthesized
cattacaacagccttgcaga

SEQ ID NO: 2693 - DNA, 20 bp, Artificial Sequence
  chemically synthesized
acagccttgcagatagttaa

SEQ ID NO: 2694 - DNA, 20 bp, Artificial Sequence
  chemically synthesized
cagccttgcagatagttaac

SEQ ID NO: 2695 - DNA, 20 bp, Artificial Sequence
  chemically synthesized
tgcagatagttaacaggccc

SEQ ID NO: 2696 - DNA, 20 bp, Artificial Sequence
  chemically synthesized
gcagatagttaacaggccca

SEQ ID NO: 2697 - DNA, 20 bp, Artificial Sequence
  chemically synthesized
aggcccaaggcctgaaacaa

SEQ ID NO: 2698 - DNA, 20 bp, Artificial Sequence
  chemically synthesized
cccaaggcctgaaacaaaag

SEQ ID NO: 2699 - DNA, 20 bp, Artificial Sequence
  chemically synthesized
caaggcctgaaacaaaagaa

SEQ ID NO: 2700 - DNA, 20 bp, Artificial Sequence
  chemically synthesized
ggcctgaaacaaaagaagag

SEQ ID NO: 2701 - DNA, 20 bp, Artificial Sequence
  chemically synthesized
tgaaacaaaagaagagtggt

SEQ ID NO: 2702 - DNA, 20 bp, Artificial Sequence
  chemically synthesized
aagagtggtgagttatttcc

SEQ ID NO: 2703 - DNA, 20 bp, Artificial Sequence
  chemically synthesized
gagtggtgagttatttccca

SEQ ID NO: 2704 - DNA, 20 bp, Artificial Sequence
  chemically synthesized
ttctgttttgttttcaattt

SEQ ID NO: 2705 - DNA, 20 bp, Artificial Sequence
  chemically synthesized
aatttcggtctttttgacaa

SEQ ID NO: 2706 - DNA, 20 bp, Artificial Sequence
  chemically synthesized
ggtctttttgacaaaagtga

SEQ ID NO: 2707 - DNA, 20 bp, Artificial Sequence
  chemically synthesized
gtctttttgacaaaagtgaa

SEQ ID NO: 2708 - DNA, 20 bp, Artificial Sequence
  chemically synthesized
tctttttgacaaaagtgaaa

SEQ ID NO: 2709 - DNA, 20 bp, Artificial Sequence
  chemically synthesized
aaaagtgaaagggtttgttt

SEQ ID NO: 2710 - DNA, 20 bp, Artificial Sequence
  chemically synthesized
aaagtgaaagggtttgtttt

SEQ ID NO: 2711 - DNA, 20 bp, Artificial Sequence
  chemically synthesized
tgaaagggtttgttttagga

SEQ ID NO: 2712 - DNA, 20 bp, Artificial Sequence
  chemically synthesized
gaaagggtttgttttaggaa

SEQ ID NO: 2713 - DNA, 20 bp, Artificial Sequence
  chemically synthesized
aaagggtttgttttaggaaa

SEQ ID NO: 2714 - DNA, 20 bp, Artificial Sequence
  chemically synthesized
aagggtttgttttaggaaag

SEQ ID NO: 2715 - DNA, 20 bp, Artificial Sequence
  chemically synthesized
gggtttgttttaggaaaggg

SEQ ID NO: 2716 - DNA, 20 bp, Artificial Sequence
  chemically synthesized
gtttgttttaggaaagggga

SEQ ID NO: 2717 - DNA, 20 bp, Artificial Sequence
  chemically synthesized
tttgttttaggaaaggggag

SEQ ID NO: 2718 - DNA, 20 bp, Artificial Sequence
  chemically synthesized
gttttaggaaaggggagagg

SEQ ID NO: 2719 - DNA, 20 bp, Artificial Sequence
  chemically synthesized
gaaaggggagaggtggtctt

SEQ ID NO: 2720 - DNA, 20 bp, Artificial Sequence
  chemically synthesized
gttgtttgattattgtcttg

SEQ ID NO: 2721 - DNA, 20 bp, Artificial Sequence
  chemically synthesized
tttgattattgtcttgtgga

SEQ ID NO: 2722 - DNA, 20 bp, Artificial Sequence
  chemically synthesized
gattattgtcttgtggaaag

SEQ ID NO: 2723 - DNA, 20 bp, Artificial Sequence
  chemically synthesized
cttgtggaaagaagatgtgt

SEQ ID NO: 2724 - DNA, 20 bp, Artificial Sequence
  chemically synthesized
gtggaaagaagatgtgtaag

SEQ ID NO: 2725 - DNA, 20 bp, Artificial Sequence
  chemically synthesized
aaagaagatgtgtaagcagc

SEQ ID NO: 2726 - DNA, 20 bp, Artificial Sequence
  chemically synthesized
aagaagatgtgtaagcagca

SEQ ID NO: 2727 - DNA, 20 bp, Artificial Sequence
  chemically synthesized
agaagatgtgtaagcagcaa

SEQ ID NO: 2728 - DNA, 20 bp, Artificial Sequence
  chemically synthesized
gaagatgtgtaagcagcaag

SEQ ID NO: 2729 - DNA, 20 bp, Artificial Sequence
  chemically synthesized
gtaagcagcaaggggaaaac

SEQ ID NO: 2730 - DNA, 20 bp, Artificial Sequence
  chemically synthesized
ggggaaaactggtaatattg

SEQ ID NO: 2731 - DNA, 20 bp, Artificial Sequence
  chemically synthesized
gggaaaactggtaatattgt

SEQ ID NO: 2732 - DNA, 20 bp, Artificial Sequence
  chemically synthesized
aaaactggtaatattgtggg

SEQ ID NO: 2733 - DNA, 20 bp, Artificial Sequence
  chemically synthesized
tggtaatattgtgggtagcc

SEQ ID NO: 2734 - DNA, 20 bp, Artificial Sequence
  chemically synthesized
ttgtgggtagcctggaaaca

SEQ ID NO: 2735 - DNA, 20 bp, Artificial Sequence
  chemically synthesized
tgtgggtagcctggaaacat

SEQ ID NO: 2736 - DNA, 20 bp, Artificial Sequence
  chemically synthesized
gtgggtagcctggaaacatg

SEQ ID NO: 2737 - DNA, 20 bp, Artificial Sequence
  chemically synthesized
tgggtagcctggaaacatgg

SEQ ID NO: 2738 - DNA, 20 bp, Artificial Sequence
  chemically synthesized
gggtagcctggaaacatggg

SEQ ID NO: 2739 - DNA, 20 bp, Artificial Sequence
  chemically synthesized
catggggggattttatctgc

SEQ ID NO: 2740 - DNA, 20 bp, Artificial Sequence
  chemically synthesized
atggggggattttatctgca

SEQ ID NO: 2741 - DNA, 20 bp, Artificial Sequence
  chemically synthesized
ggggattttatctgcaaggc

SEQ ID NO: 2742 - DNA, 20 bp, Artificial Sequence
  chemically synthesized
catacattaactttacttta

SEQ ID NO: 2743 - DNA, 20 bp, Artificial Sequence
  chemically synthesized
tttactttatagacaaaccc

SEQ ID NO: 2744 - DNA, 20 bp, Artificial Sequence
  chemically synthesized
tatagacaaacccaagcaaa

SEQ ID NO: 2745 - DNA, 20 bp, Artificial Sequence
  chemically synthesized
agcaaaaagcaaaatgctga

SEQ ID NO: 2746 - DNA, 20 bp, Artificial Sequence
  chemically synthesized
gcaaaaagcaaaatgctgat

SEQ ID NO: 2747 - DNA, 20 bp, Artificial Sequence
  chemically synthesized
gcaaaatgctgataggaaat

SEQ ID NO: 2748 - DNA, 20 bp, Artificial Sequence
  chemically synthesized
aaatgctgataggaaatgag

SEQ ID NO: 2749 - DNA, 20 bp, Artificial Sequence
  chemically synthesized
gatttgtgaatcgtttttta

SEQ ID NO: 2750 - DNA, 20 bp, Artificial Sequence
  chemically synthesized
atttgtgaatcgttttttat

SEQ ID NO: 2751 - DNA, 20 bp, Artificial Sequence
  chemically synthesized
gtgaatcgttttttatggga

SEQ ID NO: 2752 - DNA, 20 bp, Artificial Sequence
  chemically synthesized
gaatcgttttttatgggaca

SEQ ID NO: 2753 - DNA, 20 bp, Artificial Sequence
  chemically synthesized
ttcccatgctatatttatga

SEQ ID NO: 2754 - DNA, 20 bp, Artificial Sequence
  chemically synthesized
tatatttatgatagcgcctt

SEQ ID NO: 2755 - DNA, 20 bp, Artificial Sequence
  chemically synthesized
tatgatagcgccttcagtga

SEQ ID NO: 2756 - DNA, 20 bp, Artificial Sequence
  chemically synthesized
atgatagcgccttcagtgat

SEQ ID NO: 2757 - DNA, 20 bp, Artificial Sequence
  chemically synthesized
tgatagcgccttcagtgata

SEQ ID NO: 2758 - DNA, 20 bp, Artificial Sequence
  chemically synthesized
gatagcgccttcagtgatag

SEQ ID NO: 2759 - DNA, 20 bp, Artificial Sequence
  chemically synthesized
cttcagtgataggggaaacc

SEQ ID NO: 2760 - DNA, 20 bp, Artificial Sequence
  chemically synthesized
ttcagtgataggggaaacct

SEQ ID NO: 2761 - DNA, 20 bp, Artificial Sequence
  chemically synthesized
aggggaaacctgggcatttc

SEQ ID NO: 2762 - DNA, 20 bp, Artificial Sequence
  chemically synthesized
aacctgggcatttctggact

SEQ ID NO: 2763 - DNA, 20 bp, Artificial Sequence
  chemically synthesized
tgggcatttctggactgagc

SEQ ID NO: 2764 - DNA, 20 bp, Artificial Sequence
  chemically synthesized
gggcatttctggactgagct

SEQ ID NO: 2765 - DNA, 20 bp, Artificial Sequence
  chemically synthesized
gactgagctgggccatactc

SEQ ID NO: 2766 - DNA, 20 bp, Artificial Sequence
  chemically synthesized
tactctagaatcctgtcaac

SEQ ID NO: 2767 - DNA, 20 bp, Artificial Sequence
  chemically synthesized
tgtcaactggaaaccttaca

SEQ ID NO: 2768 - DNA, 20 bp, Artificial Sequence
  chemically synthesized
ctggaaaccttacacagatg

SEQ ID NO: 2769 - DNA, 20 bp, Artificial Sequence
  chemically synthesized
atgtggcttctcacaataca

SEQ ID NO: 2770 - DNA, 20 bp, Artificial Sequence
  chemically synthesized
cttctcacaatacaaagcaa

SEQ ID NO: 2771 - DNA, 20 bp, Artificial Sequence
  chemically synthesized
ctcacaatacaaagcaatgg

SEQ ID NO: 2772 - DNA, 20 bp, Artificial Sequence
  chemically synthesized
atacaaagcaatggaagata

SEQ ID NO: 2773 - DNA, 20 bp, Artificial Sequence
  chemically synthesized
aagcaatggaagataaagat

SEQ ID NO: 2774 - DNA, 20 bp, Artificial Sequence
  chemically synthesized
gaagataaagattagacttc

SEQ ID NO: 2775 - DNA, 20 bp, Artificial Sequence
  chemically synthesized
aagataaagattagacttct

SEQ ID NO: 2776 - DNA, 20 bp, Artificial Sequence
  chemically synthesized
agataaagattagacttctg

SEQ ID NO: 2777 - DNA, 20 bp, Artificial Sequence
  chemically synthesized
aactttgaccattaaatgac

SEQ ID NO: 2778 - DNA, 20 bp, Artificial Sequence
  chemically synthesized
actttgaccattaaatgaca

SEQ ID NO: 2779 - DNA, 20 bp, Artificial Sequence
  chemically synthesized
tgaccattaaatgacaagga

SEQ ID NO: 2780 - DNA, 20 bp, Artificial Sequence
  chemically synthesized
ttaaatgacaaggaaagaac

SEQ ID NO: 2781 - DNA, 20 bp, Artificial Sequence
  chemically synthesized
aaccagcattccaataatgc

SEQ ID NO: 2782 - DNA, 20 bp, Artificial Sequence
  chemically synthesized
attccaataatgccagcacc

SEQ ID NO: 2783 - DNA, 20 bp, Artificial Sequence
  chemically synthesized
tactgcactttgttgtactc

SEQ ID NO: 2784 - DNA, 20 bp, Artificial Sequence
  chemically synthesized
cactttgttgtactctggtg

SEQ ID NO: 2785 - DNA, 20 bp, Artificial Sequence
  chemically synthesized
tgttgtactctggtgaagac

SEQ ID NO: 2786 - DNA, 20 bp, Artificial Sequence
  chemically synthesized
cactaataaaatgaatctaa

SEQ ID NO: 2787 - DNA, 20 bp, Artificial Sequence
  chemically synthesized
aatagtcaatgaaacatttg

SEQ ID NO: 2788 - DNA, 20 bp, Artificial Sequence
  chemically synthesized
aatgaaacatttgtagcact

SEQ ID NO: 2789 - DNA, 20 bp, Artificial Sequence
  chemically synthesized
tgtagcactgagattttttt

SEQ ID NO: 2790 - DNA, 20 bp, Artificial Sequence
  chemically synthesized
agcactgagatttttttgag

SEQ ID NO: 2791 - DNA, 20 bp, Artificial Sequence
  chemically synthesized
cactgagatttttttgagaa

SEQ ID NO: 2792 - DNA, 20 bp, Artificial Sequence
  chemically synthesized
actgagatttttttgagaag

SEQ ID NO: 2793 - DNA, 20 bp, Artificial Sequence
  chemically synthesized
tttttgagaagaggaaaatt

SEQ ID NO: 2794 - DNA, 20 bp, Artificial Sequence
  chemically synthesized
aaaatttggtttgtgcaatc

SEQ ID NO: 2795 - DNA, 20 bp, Artificial Sequence
  chemically synthesized
aaatttggtttgtgcaatct

SEQ ID NO: 2796 - DNA, 20 bp, Artificial Sequence
  chemically synthesized
aatttggtttgtgcaatctg

SEQ ID NO: 2797 - DNA, 20 bp, Artificial Sequence
  chemically synthesized
tgtgcaatctggggatttta

SEQ ID NO: 2798 - DNA, 20 bp, Artificial Sequence
  chemically synthesized
tggggattttacggtttatg

SEQ ID NO: 2799 - DNA, 20 bp, Artificial Sequence
  chemically synthesized
gattttacggtttatgtggt

SEQ ID NO: 2800 - DNA, 20 bp, Artificial Sequence
  chemically synthesized
cggtttatgtggtaagtgcc

SEQ ID NO: 2801 - DNA, 20 bp, Artificial Sequence
  chemically synthesized
ggtaagtgcctagcttttcc

SEQ ID NO: 2802 - DNA, 20 bp, Artificial Sequence
  chemically synthesized
agcttttccaagtcctcctc

SEQ ID NO: 2803 - DNA, 20 bp, Artificial Sequence
  chemically synthesized
cctctagctaactaaccatg

SEQ ID NO: 2804 - DNA, 20 bp, Artificial Sequence
  chemically synthesized
accatgtagctgtccatctt

SEQ ID NO: 2805 - DNA, 20 bp, Artificial Sequence
  chemically synthesized
tgtagctgtccatcttgaga

SEQ ID NO: 2806 - DNA, 20 bp, Artificial Sequence
  chemically synthesized
ctgtccatcttgagacagac

SEQ ID NO: 2807 - DNA, 20 bp, Artificial Sequence
  chemically synthesized
gtccatcttgagacagactg

SEQ ID NO: 2808 - DNA, 20 bp, Artificial Sequence
  chemically synthesized
tccatcttgagacagactgg

SEQ ID NO: 2809 - DNA, 20 bp, Artificial Sequence
  chemically synthesized
tcttgagacagactggagga

SEQ ID NO: 2810 - DNA, 20 bp, Artificial Sequence
  chemically synthesized
gagacagactggaggataga

SEQ ID NO: 2811 - DNA, 20 bp, Artificial Sequence
  chemically synthesized
agactggaggatagatggtg

SEQ ID NO: 2812 - DNA, 20 bp, Artificial Sequence
  chemically synthesized
gactggaggatagatggtgc

SEQ ID NO: 2813 - DNA, 20 bp, Artificial Sequence
  chemically synthesized
ctggaggatagatggtgcag

SEQ ID NO: 2814 - DNA, 20 bp, Artificial Sequence
  chemically synthesized
aggagacgctctgtgtgttc

SEQ ID NO: 2815 - DNA, 20 bp, Artificial Sequence
  chemically synthesized
gagacgctctgtgtgttcta

SEQ ID NO: 2816 - DNA, 20 bp, Artificial Sequence
  chemically synthesized
agacgctctgtgtgttctag

SEQ ID NO: 2817 - DNA, 20 bp, Artificial Sequence
  chemically synthesized
ctctgtgtgttctagaggtt

SEQ ID NO: 2818 - DNA, 20 bp, Artificial Sequence
  chemically synthesized
ctgtgtgttctagaggtttg

SEQ ID NO: 2819 - DNA, 20 bp, Artificial Sequence
  chemically synthesized
ggtttggagttcatgatgat

SEQ ID NO: 2820 - DNA, 20 bp, Artificial Sequence
  chemically synthesized
gtttggagttcatgatgatt

SEQ ID NO: 2821 - DNA, 20 bp, Artificial Sequence
  chemically synthesized
tttggagttcatgatgattg

SEQ ID NO: 2822 - DNA, 20 bp, Artificial Sequence
  chemically synthesized
tggagttcatgatgattggg

SEQ ID NO: 2823 - DNA, 20 bp, Artificial Sequence
  chemically synthesized
ggagttcatgatgattgggg

SEQ ID NO: 2824 - DNA, 20 bp, Artificial Sequence
  chemically synthesized
gagttcatgatgattgggga

SEQ ID NO: 2825 - DNA, 20 bp, Artificial Sequence
  chemically synthesized
ttcatgatgattggggaggg

SEQ ID NO: 2826 - DNA, 20 bp, Artificial Sequence
  chemically synthesized
tcatgatgattggggagggc

SEQ ID NO: 2827 - DNA, 20 bp, Artificial Sequence
  chemically synthesized
atgatgattggggagggcgg

SEQ ID NO: 2828 - DNA, 20 bp, Artificial Sequence
  chemically synthesized
gattggggagggcgggagac

SEQ ID NO: 2829 - DNA, 20 bp, Artificial Sequence
  chemically synthesized
agggcgggagacaagaaaaa

SEQ ID NO: 2830 - DNA, 20 bp, Artificial Sequence
  chemically synthesized
acaagaaaaacagactttga

SEQ ID NO: 2831 - DNA, 20 bp, Artificial Sequence
  chemically synthesized
agactttgatggtgaacaaa

SEQ ID NO: 2832 - DNA, 20 bp, Artificial Sequence
  chemically synthesized
acaaacagtatgttttccat

SEQ ID NO: 2833 - DNA, 20 bp, Artificial Sequence
  chemically synthesized
ttttccattagcttaatatt

SEQ ID NO: 2834 - DNA, 20 bp, Artificial Sequence
  chemically synthesized
ttccattagcttaatattaa

SEQ ID NO: 2835 - DNA, 20 bp, Artificial Sequence
  chemically synthesized
agcttaatattaagagcact

SEQ ID NO: 2836 - DNA, 20 bp, Artificial Sequence
  chemically synthesized
ttaatattaagagcacttag

SEQ ID NO: 2837 - DNA, 20 bp, Artificial Sequence
  chemically synthesized
gaagtgttgttgttgtactc

SEQ ID NO: 2838 - DNA, 20 bp, Artificial Sequence
  chemically synthesized
aagtgttgttgttgtactct

SEQ ID NO: 2839 - DNA, 20 bp, Artificial Sequence
  chemically synthesized
gttgttgttgtactctagga

SEQ ID NO: 2840 - DNA, 20 bp, Artificial Sequence
  chemically synthesized
gttgttgtactctaggatag

SEQ ID NO: 2841 - DNA, 20 bp, Artificial Sequence
  chemically synthesized
ttgttgtactctaggatagc

SEQ ID NO: 2842 - DNA, 20 bp, Artificial Sequence
  chemically synthesized
actctaggatagcaggtctc

SEQ ID NO: 2843 - DNA, 20 bp, Artificial Sequence
  chemically synthesized
tacatcctgttctccttata

SEQ ID NO: 2844 - DNA, 20 bp, Artificial Sequence
  chemically synthesized
catcctgttctccttatata

SEQ ID NO: 2845 - DNA, 20 bp, Artificial Sequence
  chemically synthesized
cttatatagagcacactgcc

SEQ ID NO: 2846 - DNA, 20 bp, Artificial Sequence
  chemically synthesized
atagagcacactgccaagca

SEQ ID NO: 2847 - DNA, 20 bp, Artificial Sequence
  chemically synthesized
gcacactgccaagcacagcc

SEQ ID NO: 2848 - DNA, 20 bp, Artificial Sequence
  chemically synthesized
cacactgccaagcacagcca

SEQ ID NO: 2849 - DNA, 20 bp, Artificial Sequence
  chemically synthesized
actgccaagcacagccaagg

SEQ ID NO: 2850 - DNA, 20 bp, Artificial Sequence
  chemically synthesized
ccaagcacagccaaggcagt

SEQ ID NO: 2851 - DNA, 20 bp, Artificial Sequence
  chemically synthesized
caagcacagccaaggcagtt

SEQ ID NO: 2852 - DNA, 20 bp, Artificial Sequence
  chemically synthesized
acagccaaggcagttgggac

SEQ ID NO: 2853 - DNA, 20 bp, Artificial Sequence
  chemically synthesized
gggacaagatttcctttcgc

SEQ ID NO: 2854 - DNA, 20 bp, Artificial Sequence
  chemically synthesized
ggacaagatttcctttcgca

SEQ ID NO: 2855 - DNA, 20 bp, Artificial Sequence
  chemically synthesized
acaagatttcctttcgcaag

SEQ ID NO: 2856 - DNA, 20 bp, Artificial Sequence
  chemically synthesized
atttcctttcgcaaggagcc

SEQ ID NO: 2857 - DNA, 20 bp, Artificial Sequence
  chemically synthesized
tcctttcgcaaggagcctgg

SEQ ID NO: 2858 - DNA, 20 bp, Artificial Sequence
  chemically synthesized
cctttcgcaaggagcctggt

SEQ ID NO: 2859 - DNA, 20 bp, Artificial Sequence
  chemically synthesized
aggagcctggtgggtaacga

SEQ ID NO: 2860 - DNA, 20 bp, Artificial Sequence
  chemically synthesized
ggtaacgatggtgtgctgct

SEQ ID NO: 2861 - DNA, 20 bp, Artificial Sequence
  chemically synthesized
aacgatggtgtgctgctgag

SEQ ID NO: 2862 - DNA, 20 bp, Artificial Sequence
  chemically synthesized
acgatggtgtgctgctgaga

SEQ ID NO: 2863 - DNA, 20 bp, Artificial Sequence
  chemically synthesized
ctgctgagaaggctcttaca

SEQ ID NO: 2864 - DNA, 20 bp, Artificial Sequence
  chemically synthesized
tgagaaggctcttacacaga

SEQ ID NO: 2865 - DNA, 20 bp, Artificial Sequence
  chemically synthesized
aggctcttacacagacagca

SEQ ID NO: 2866 - DNA, 20 bp, Artificial Sequence
  chemically synthesized
ggctcttacacagacagcat

SEQ ID NO: 2867 - DNA, 20 bp, Artificial Sequence
  chemically synthesized
cagcataggtctgctgttac

SEQ ID NO: 2868 - DNA, 20 bp, Artificial Sequence
  chemically synthesized
agcataggtctgctgttacc

SEQ ID NO: 2869 - DNA, 20 bp, Artificial Sequence
  chemically synthesized
gtctgctgttaccaggcctg

SEQ ID NO: 2870 - DNA, 20 bp, Artificial Sequence
  chemically synthesized
ctgctgttaccaggcctgca

SEQ ID NO: 2871 - DNA, 20 bp, Artificial Sequence
  chemically synthesized
tgctgttaccaggcctgcag

SEQ ID NO: 2872 - DNA, 20 bp, Artificial Sequence
  chemically synthesized
gctgttaccaggcctgcaga

SEQ ID NO: 2873 - DNA, 20 bp, Artificial Sequence
  chemically synthesized
gttaccaggcctgcagaggg

SEQ ID NO: 2874 - DNA, 20 bp, Artificial Sequence
  chemically synthesized
aggcctgcagagggaagccc

SEQ ID NO: 2875 - DNA, 20 bp, Artificial Sequence
  chemically synthesized
cctgcagagggaagccctgg

SEQ ID NO: 2876 - DNA, 20 bp, Artificial Sequence
  chemically synthesized
gcagagggaagccctggtgg

SEQ ID NO: 2877 - DNA, 20 bp, Artificial Sequence
  chemically synthesized
gccctggtggaagcaccacc

SEQ ID NO: 2878 - DNA, 20 bp, Artificial Sequence
  chemically synthesized
gtggaagcaccacctagcct

SEQ ID NO: 2879 - DNA, 20 bp, Artificial Sequence
  chemically synthesized
acctagcctgagaacatcta

SEQ ID NO: 2880 - DNA, 20 bp, Artificial Sequence
  chemically synthesized
ctagcctgagaacatctaca

SEQ ID NO: 2881 - DNA, 20 bp, Artificial Sequence
  chemically synthesized
aaaacaaaataaacaccaca

SEQ ID NO: 2882 - DNA, 20 bp, Artificial Sequence
  chemically synthesized
accacaaagtgaaccaacac

SEQ ID NO: 2883 - DNA, 20 bp, Artificial Sequence
  chemically synthesized
acaaagtgaaccaacacaag

SEQ ID NO: 2884 - DNA, 20 bp, Artificial Sequence
  chemically synthesized
caaagtgaaccaacacaagc

SEQ ID NO: 2885 - DNA, 20 bp, Artificial Sequence
  chemically synthesized
agtgaaccaacacaagcagg

SEQ ID NO: 2886 - DNA, 20 bp, Artificial Sequence
  chemically synthesized
accaacacaagcaggaagac

SEQ ID NO: 2887 - DNA, 20 bp, Artificial Sequence
  chemically synthesized
gaagaccggacttaacaaac

SEQ ID NO: 2888 - DNA, 20 bp, Artificial Sequence
  chemically synthesized
tacatttgactgtttacgtc

SEQ ID NO: 2889 - DNA, 20 bp, Artificial Sequence
  chemically synthesized
ctgtttacgtcaagtgaatt

SEQ ID NO: 2890 - DNA, 20 bp, Artificial Sequence
  chemically synthesized
gtttacgtcaagtgaattga

SEQ ID NO: 2891 - DNA, 20 bp, Artificial Sequence
  chemically synthesized
cgtcaagtgaattgagagtg

SEQ ID NO: 2892 - DNA, 20 bp, Artificial Sequence
  chemically synthesized
agtgtggcgtaaaattacta

SEQ ID NO: 2893 - DNA, 20 bp, Artificial Sequence
  chemically synthesized
aattactacagattttgtca

SEQ ID NO: 2894 - DNA, 20 bp, Artificial Sequence
  chemically synthesized
ttgtcatggtatttttcaat

SEQ ID NO: 2895 - DNA, 20 bp, Artificial Sequence
  chemically synthesized
tatttttcaatgagaaatct

SEQ ID NO: 2896 - DNA, 20 bp, Artificial Sequence
  chemically synthesized
ctttgcacttgtttttgcct

SEQ ID NO: 2897 - DNA, 20 bp, Artificial Sequence
  chemically synthesized
ttttgcctcagccgttcact

SEQ ID NO: 2898 - DNA, 20 bp, Artificial Sequence
  chemically synthesized
cactaagtttgctgccaaaa

SEQ ID NO: 2899 - DNA, 20 bp, Artificial Sequence
  chemically synthesized
caaaacagacatccttttct

SEQ ID NO: 2900 - DNA, 20 bp, Artificial Sequence
  chemically synthesized
aaaacagacatccttttctt

SEQ ID NO: 2901 - DNA, 20 bp, Artificial Sequence
  chemically synthesized
catccttttcttaggaaaca

SEQ ID NO: 2902 - DNA, 20 bp, Artificial Sequence
  chemically synthesized
atccttttcttaggaaacac

SEQ ID NO: 2903 - DNA, 20 bp, Artificial Sequence
  chemically synthesized
cttaggaaacacaggcaacc

SEQ ID NO: 2904 - DNA, 20 bp, Artificial Sequence
  chemically synthesized
ttaggaaacacaggcaaccc

SEQ ID NO: 2905 - DNA, 20 bp, Artificial Sequence
  chemically synthesized
cccaggtatctctgtgatcc

SEQ ID NO: 2906 - DNA, 20 bp, Artificial Sequence
  chemically synthesized
tgatcccagcataaacgcaa

SEQ ID NO: 2907 - DNA, 20 bp, Artificial Sequence
  chemically synthesized
gatcccagcataaacgcaac

SEQ ID NO: 2908 - DNA, 20 bp, Artificial Sequence
  chemically synthesized
gcataaacgcaacaggtact

SEQ ID NO: 2909 - DNA, 20 bp, Artificial Sequence
  chemically synthesized
caggtacttggatccttgta

SEQ ID NO: 2910 - DNA, 20 bp, Artificial Sequence
  chemically synthesized
aggtacttggatccttgtat

SEQ ID NO: 2911 - DNA, 20 bp, Artificial Sequence
  chemically synthesized
ggtacttggatccttgtatg

SEQ ID NO: 2912 - DNA, 20 bp, Artificial Sequence
  chemically synthesized
tacttggatccttgtatggg

SEQ ID NO: 2913 - DNA, 20 bp, Artificial Sequence
  chemically synthesized
aaattctctgccacttactc

SEQ ID NO: 2914 - DNA, 20 bp, Artificial Sequence
  chemically synthesized
aattctctgccacttactct

SEQ ID NO: 2915 - DNA, 20 bp, Artificial Sequence
  chemically synthesized
tctctgccacttactctggg

SEQ ID NO: 2916 - DNA, 20 bp, Artificial Sequence
  chemically synthesized
tctgccacttactctgggaa

SEQ ID NO: 2917 - DNA, 20 bp, Artificial Sequence
  chemically synthesized
tactctgggaagagaccctg

SEQ ID NO: 2918 - DNA, 20 bp, Artificial Sequence
  chemically synthesized
gaagagaccctgaagtgctt

SEQ ID NO: 2919 - DNA, 20 bp, Artificial Sequence
  chemically synthesized
gagaccctgaagtgcttcag

SEQ ID NO: 2920 - DNA, 20 bp, Artificial Sequence
  chemically synthesized
agaccctgaagtgcttcagc

SEQ ID NO: 2921 - DNA, 20 bp, Artificial Sequence
  chemically synthesized
gaagtgcttcagcaggcctc

SEQ ID NO: 2922 - DNA, 20 bp, Artificial Sequence
  chemically synthesized
tgcttcagcaggcctccagc

SEQ ID NO: 2923 - DNA, 20 bp, Artificial Sequence
  chemically synthesized
agcaggcctccagcaagaaa

SEQ ID NO: 2924 - DNA, 20 bp, Artificial Sequence
  chemically synthesized
gcaggcctccagcaagaaat

SEQ ID NO: 2925 - DNA, 20 bp, Artificial Sequence
  chemically synthesized
aggcctccagcaagaaatgg

SEQ ID NO: 2926 - DNA, 20 bp, Artificial Sequence
  chemically synthesized
ctgctaacctaatccatgcc

SEQ ID NO: 2927 - DNA, 20 bp, Artificial Sequence
  chemically synthesized
ccctcgcatgaatctcttgt

SEQ ID NO: 2928 - DNA, 20 bp, Artificial Sequence
  chemically synthesized
aaacttgtctacaaacccat

SEQ ID NO: 2929 - DNA, 20 bp, Artificial Sequence
  chemically synthesized
caaacccattagccctaaac

SEQ ID NO: 2930 - DNA, 20 bp, Artificial Sequence
  chemically synthesized
attagccctaaacaagctga

SEQ ID NO: 2931 - DNA, 20 bp, Artificial Sequence
  chemically synthesized
agccctaaacaagctgacgg

SEQ ID NO: 2932 - DNA, 20 bp, Artificial Sequence
  chemically synthesized
gccctaaacaagctgacggc

SEQ ID NO: 2933 - DNA, 20 bp, Artificial Sequence
  chemically synthesized
aaacaagctgacggcaggac

SEQ ID NO: 2934 - DNA, 20 bp, Artificial Sequence
  chemically synthesized
acggcaggaccagatctcta

SEQ ID NO: 2935 - DNA, 20 bp, Artificial Sequence
  chemically synthesized
gaccagatctctacagtgtc

SEQ ID NO: 2936 - DNA, 20 bp, Artificial Sequence
  chemically synthesized
ctctacagtgtctggccgtg

SEQ ID NO: 2937 - DNA, 20 bp, Artificial Sequence
  chemically synthesized
cagtgtctggccgtgtggca

SEQ ID NO: 2938 - DNA, 20 bp, Artificial Sequence
  chemically synthesized
gtctggccgtgtggcaaagt

SEQ ID NO: 2939 - DNA, 20 bp, Artificial Sequence
  chemically synthesized
tctggccgtgtggcaaagtg

SEQ ID NO: 2940 - DNA, 20 bp, Artificial Sequence
  chemically synthesized
tgaggtctcatctgactatc

SEQ ID NO: 2941 - DNA, 20 bp, Artificial Sequence
  chemically synthesized
ggtctcatctgactatctgg

SEQ ID NO: 2942 - DNA, 20 bp, Artificial Sequence
  chemically synthesized
catctgactatctggcagca

SEQ ID NO: 2943 - DNA, 20 bp, Artificial Sequence
  chemically synthesized
tgtttttgtttttgttttct

SEQ ID NO: 2944 - DNA, 20 bp, Artificial Sequence
  chemically synthesized
ttctaagttgtaaaaaaccc

SEQ ID NO: 2945 - DNA, 20 bp, Artificial Sequence
  chemically synthesized
aaaaaaccctagctatcatc

SEQ ID NO: 2946 - DNA, 20 bp, Artificial Sequence
  chemically synthesized
aagtctgtcccttcatttta

SEQ ID NO: 2947 - DNA, 20 bp, Artificial Sequence
  chemically synthesized
ctgtcccttcattttacaga

SEQ ID NO: 2948 - DNA, 20 bp, Artificial Sequence
  chemically synthesized
tgtcccttcattttacagat

SEQ ID NO: 2949 - DNA, 20 bp, Artificial Sequence
  chemically synthesized
gtcccttcattttacagatg

SEQ ID NO: 2950 - DNA, 20 bp, Artificial Sequence
  chemically synthesized
attttacagatggggaaact

SEQ ID NO: 2951 - DNA, 20 bp, Artificial Sequence
  chemically synthesized
ttttacagatggggaaactg

SEQ ID NO: 2952 - DNA, 20 bp, Artificial Sequence
  chemically synthesized
gatggggaaactgaggccat

SEQ ID NO: 2953 - DNA, 20 bp, Artificial Sequence
  chemically synthesized
aactgaggccatgagaaatt

SEQ ID NO: 2954 - DNA, 20 bp, Artificial Sequence
  chemically synthesized
gaaattaagtgacttgccca

SEQ ID NO: 2955 - DNA, 20 bp, Artificial Sequence
  chemically synthesized
tgatgattaaccacaatgtg

SEQ ID NO: 2956 - DNA, 20 bp, Artificial Sequence
  chemically synthesized
attaaccacaatgtgaagat

SEQ ID NO: 2957 - DNA, 20 bp, Artificial Sequence
  chemically synthesized
taatctcctgactcctgatc

SEQ ID NO: 2958 - DNA, 20 bp, Artificial Sequence
  chemically synthesized
tctcctgactcctgatccag

SEQ ID NO: 2959 - DNA, 20 bp, Artificial Sequence
  chemically synthesized
cctgatccagtggtctttcc

SEQ ID NO: 2960 - DNA, 20 bp, Artificial Sequence
  chemically synthesized
ctgatccagtggtctttcct

SEQ ID NO: 2961 - DNA, 20 bp, Artificial Sequence
  chemically synthesized
cccccctgctgctcctgccg

SEQ ID NO: 2962 - DNA, 20 bp, Artificial Sequence
  chemically synthesized
cgtggtcttcactgcccaac

SEQ ID NO: 2963 - DNA, 20 bp, Artificial Sequence
  chemically synthesized
ggtcttcactgcccaacaag

SEQ ID NO: 2964 - DNA, 20 bp, Artificial Sequence
  chemically synthesized
gtcttcactgcccaacaaga

SEQ ID NO: 2965 - DNA, 20 bp, Artificial Sequence
  chemically synthesized
cctgtttctactgatccatt

SEQ ID NO: 2966 - DNA, 20 bp, Artificial Sequence
  chemically synthesized
gtttctactgatccattaag

SEQ ID NO: 2967 - DNA, 20 bp, Artificial Sequence
  chemically synthesized
taagcagtacttaaccgtct

SEQ ID NO: 2968 - DNA, 20 bp, Artificial Sequence
  chemically synthesized
aagcagtacttaaccgtctt

SEQ ID NO: 2969 - DNA, 20 bp, Artificial Sequence
  chemically synthesized
agcagtacttaaccgtcttg

SEQ ID NO: 2970 - DNA, 20 bp, Artificial Sequence
  chemically synthesized
gcagtacttaaccgtcttgg

SEQ ID NO: 2971 - DNA, 20 bp, Artificial Sequence
  chemically synthesized
agtacttaaccgtcttgggg

SEQ ID NO: 2972 - DNA, 20 bp, Artificial Sequence
  chemically synthesized
gtacttaaccgtcttggggg

SEQ ID NO: 2973 - DNA, 20 bp, Artificial Sequence
  chemically synthesized
tacttaaccgtcttggggga

SEQ ID NO: 2974 - DNA, 20 bp, Artificial Sequence
  chemically synthesized
aaccgtcttgggggagggtc

SEQ ID NO: 2975 - DNA, 20 bp, Artificial Sequence
  chemically synthesized
tcttgggggagggtccagcc

SEQ ID NO: 2976 - DNA, 20 bp, Artificial Sequence
  chemically synthesized
tgggggagggtccagcccag

SEQ ID NO: 2977 - DNA, 20 bp, Artificial Sequence
  chemically synthesized
tccagcccagcagcgctaca

SEQ ID NO: 2978 - DNA, 20 bp, Artificial Sequence
  chemically synthesized
ccagcccagcagcgctacat

SEQ ID NO: 2979 - DNA, 20 bp, Artificial Sequence
  chemically synthesized
cagcccagcagcgctacatg

SEQ ID NO: 2980 - DNA, 20 bp, Artificial Sequence
  chemically synthesized
gcgctacatggggctttcga

SEQ ID NO: 2981 - DNA, 20 bp, Artificial Sequence
  chemically synthesized
cgctacatggggctttcgaa

SEQ ID NO: 2982 - DNA, 20 bp, Artificial Sequence
  chemically synthesized
aaggtgccaatgaactgact

SEQ ID NO: 2983 - DNA, 20 bp, Artificial Sequence
  chemically synthesized
aactgacttggtctcacaat

SEQ ID NO: 2984 - DNA, 20 bp, Artificial Sequence
  chemically synthesized
tggtctcacaattggaaaac

SEQ ID NO: 2985 - DNA, 20 bp, Artificial Sequence
  chemically synthesized
ggtctcacaattggaaaaca

SEQ ID NO: 2986 - DNA, 20 bp, Artificial Sequence
  chemically synthesized
acaaggcctgctctgctgcc

SEQ ID NO: 2987 - DNA, 20 bp, Artificial Sequence
  chemically synthesized
caaggcctgctctgctgcct

SEQ ID NO: 2988 - DNA, 20 bp, Artificial Sequence
  chemically synthesized
gctctgctgcctgggcctcc

SEQ ID NO: 2989 - DNA, 20 bp, Artificial Sequence
  chemically synthesized
ctctacctctgcttcccctg

SEQ ID NO: 2990 - DNA, 20 bp, Artificial Sequence
  chemically synthesized
ctctgcttcccctgcagaat

SEQ ID NO: 2991 - DNA, 20 bp, Artificial Sequence
  chemically synthesized
gcttcccctgcagaattaga

SEQ ID NO: 2992 - DNA, 20 bp, Artificial Sequence
  chemically synthesized
acagctaaaaacatttctat

SEQ ID NO: 2993 - DNA, 20 bp, Artificial Sequence
  chemically synthesized
aaaaacatttctatcagcct

SEQ ID NO: 2994 - DNA, 20 bp, Artificial Sequence
  chemically synthesized
aacatttctatcagcctaag

SEQ ID NO: 2995 - DNA, 20 bp, Artificial Sequence
  chemically synthesized
gcctaagaagctatttactt

SEQ ID NO: 2996 - DNA, 20 bp, Artificial Sequence
  chemically synthesized
agctatttactttagaaaaa

SEQ ID NO: 2997 - DNA, 20 bp, Artificial Sequence
  chemically synthesized
aaaaagcacactgtctttgt

SEQ ID NO: 2998 - DNA, 20 bp, Artificial Sequence
  chemically synthesized
cccttgcatttatcttcctt

SEQ ID NO: 2999 - DNA, 20 bp, Artificial Sequence
  chemically synthesized
ccttgcatttatcttccttc

SEQ ID NO: 3000 - DNA, 20 bp, Artificial Sequence
  chemically synthesized
tgcatttatcttccttcagg

SEQ ID NO: 3001 - DNA, 20 bp, Artificial Sequence
  chemically synthesized
catttatcttccttcaggaa

SEQ ID NO: 3002 - DNA, 20 bp, Artificial Sequence
  chemically synthesized
atttatcttccttcaggaag

SEQ ID NO: 3003 - DNA, 20 bp, Artificial Sequence
  chemically synthesized
tttatcttccttcaggaaga

SEQ ID NO: 3004 - DNA, 20 bp, Artificial Sequence
  chemically synthesized
ttccttcaggaagagggtca

SEQ ID NO: 3005 - DNA, 20 bp, Artificial Sequence
  chemically synthesized
tcaggaagagggtcaaagca

SEQ ID NO: 3006 - DNA, 20 bp, Artificial Sequence
  chemically synthesized
agggtcaaagcaaagccaac

SEQ ID NO: 3007 - DNA, 20 bp, Artificial Sequence
  chemically synthesized
gggtcaaagcaaagccaact

SEQ ID NO: 3008 - DNA, 20 bp, Artificial Sequence
  chemically synthesized
ggtcaaagcaaagccaactg

SEQ ID NO: 3009 - DNA, 20 bp, Artificial Sequence
  chemically synthesized
gcaaagccaactggggaccc

SEQ ID NO: 3010 - DNA, 20 bp, Artificial Sequence
  chemically synthesized
cacatccataatattctctt

SEQ ID NO: 3011 - DNA, 20 bp, Artificial Sequence
  chemically synthesized
tccataatattctctttggt

SEQ ID NO: 3012 - DNA, 20 bp, Artificial Sequence
  chemically synthesized
atcgacattcccacatgaac

SEQ ID NO: 3013 - DNA, 20 bp, Artificial Sequence
  chemically synthesized
tggaaatgctaaattgttaa

SEQ ID NO: 3014 - DNA, 20 bp, Artificial Sequence
  chemically synthesized
taaattgttaatagcctccc

SEQ ID NO: 3015 - DNA, 20 bp, Artificial Sequence
  chemically synthesized
aaattgttaatagcctccct

SEQ ID NO: 3016 - DNA, 20 bp, Artificial Sequence
  chemically synthesized
aattgttaatagcctcccta

SEQ ID NO: 3017 - DNA, 20 bp, Artificial Sequence
  chemically synthesized
tgccttcaattatttcatca

SEQ ID NO: 3018 - DNA, 20 bp, Artificial Sequence
  chemically synthesized
tcaattatttcatcacggct

SEQ ID NO: 3019 - DNA, 20 bp, Artificial Sequence
  chemically synthesized
caattatttcatcacggctt

SEQ ID NO: 3020 - DNA, 20 bp, Artificial Sequence
  chemically synthesized
atttcatcacggcttaggca

SEQ ID NO: 3021 - DNA, 20 bp, Artificial Sequence
  chemically synthesized
atcacggcttaggcaaagta

SEQ ID NO: 3022 - DNA, 20 bp, Artificial Sequence
  chemically synthesized
gtatcacaattaatgcttct

SEQ ID NO: 3023 - DNA, 20 bp, Artificial Sequence
  chemically synthesized
tgcttctgagcgtcaaactc

SEQ ID NO: 3024 - DNA, 20 bp, Artificial Sequence
  chemically synthesized
gcttctgagcgtcaaactcg

SEQ ID NO: 3025 - DNA, 20 bp, Artificial Sequence
  chemically synthesized
ttctgagcgtcaaactcgag

SEQ ID NO: 3026 - DNA, 20 bp, Artificial Sequence
  chemically synthesized
tgagcgtcaaactcgaggag

SEQ ID NO: 3027 - DNA, 20 bp, Artificial Sequence
  chemically synthesized
gaggagcagctctgccttcc

SEQ ID NO: 3028 - DNA, 20 bp, Artificial Sequence
  chemically synthesized
aggagcagctctgccttccc

SEQ ID NO: 3029 - DNA, 20 bp, Artificial Sequence
  chemically synthesized
cagctctgccttcccaggcc

SEQ ID NO: 3030 - DNA, 20 bp, Artificial Sequence
  chemically synthesized
agctctgccttcccaggcca

SEQ ID NO: 3031 - DNA, 20 bp, Artificial Sequence
  chemically synthesized
tctgccttcccaggccaagg

SEQ ID NO: 3032 - DNA, 20 bp, Artificial Sequence
  chemically synthesized
ctgccttcccaggccaaggt

SEQ ID NO: 3033 - DNA, 20 bp, Artificial Sequence
  chemically synthesized
tgccttcccaggccaaggtg

SEQ ID NO: 3034 - DNA, 20 bp, Artificial Sequence
  chemically synthesized
tcccaggccaaggtggggaa

SEQ ID NO: 3035 - DNA, 20 bp, Artificial Sequence
  chemically synthesized
cccaggccaaggtggggaaa

SEQ ID NO: 3036 - DNA, 20 bp, Artificial Sequence
  chemically synthesized
caggccaaggtggggaaaag

SEQ ID NO: 3037 - DNA, 20 bp, Artificial Sequence
  chemically synthesized
tggggaaaaggagctgcccc

SEQ ID NO: 3038 - DNA, 20 bp, Artificial Sequence
  chemically synthesized
aaaaggagctgcccctggtt

SEQ ID NO: 3039 - DNA, 20 bp, Artificial Sequence
  chemically synthesized
aaaggagctgcccctggttg

SEQ ID NO: 3040 - DNA, 20 bp, Artificial Sequence
  chemically synthesized
aaggagctgcccctggttga

SEQ ID NO: 3041 - DNA, 20 bp, Artificial Sequence
  chemically synthesized
accttcgctttcattctccc

SEQ ID NO: 3042 - DNA, 20 bp, Artificial Sequence
  chemically synthesized
tcgctttcattctccccagc

SEQ ID NO: 3043 - DNA, 20 bp, Artificial Sequence
  chemically synthesized
gctttcattctccccagcca

SEQ ID NO: 3044 - DNA, 20 bp, Artificial Sequence
  chemically synthesized
tcattctccccagccagaga

SEQ ID NO: 3045 - DNA, 20 bp, Artificial Sequence
  chemically synthesized
cattctccccagccagagat

SEQ ID NO: 3046 - DNA, 20 bp, Artificial Sequence
  chemically synthesized
ccccagccagagatgggctc

SEQ ID NO: 3047 - DNA, 20 bp, Artificial Sequence
  chemically synthesized
cagagatgggctctggttgc

SEQ ID NO: 3048 - DNA, 20 bp, Artificial Sequence
  chemically synthesized
gatgggctctggttgctggc

SEQ ID NO: 3049 - DNA, 20 bp, Artificial Sequence
  chemically synthesized
atgggctctggttgctggct

SEQ ID NO: 3050 - DNA, 20 bp, Artificial Sequence
  chemically synthesized
ggctctggttgctggctagg

SEQ ID NO: 3051 - DNA, 20 bp, Artificial Sequence
  chemically synthesized
tctggttgctggctaggaag

SEQ ID NO: 3052 - DNA, 20 bp, Artificial Sequence
  chemically synthesized
ctggttgctggctaggaagt

SEQ ID NO: 3053 - DNA, 20 bp, Artificial Sequence
  chemically synthesized
tggctaggaagtgggtgatc

SEQ ID NO: 3054 - DNA, 20 bp, Artificial Sequence
  chemically synthesized
tgtcctctttttttctttgt

SEQ ID NO: 3055 - DNA, 20 bp, Artificial Sequence
  chemically synthesized
tttttctttgttagtgctct

SEQ ID NO: 3056 - DNA, 20 bp, Artificial Sequence
  chemically synthesized
ttttctttgttagtgctctt

SEQ ID NO: 3057 - DNA, 20 bp, Artificial Sequence
  chemically synthesized
ctttgttagtgctcttaggc

SEQ ID NO: 3058 - DNA, 20 bp, Artificial Sequence
  chemically synthesized
tcttaggcaagtgattctca

SEQ ID NO: 3059 - DNA, 20 bp, Artificial Sequence
  chemically synthesized
ggcaagtgattctcacagcg

SEQ ID NO: 3060 - DNA, 20 bp, Artificial Sequence
  chemically synthesized
tgattctcacagcgcagacc

SEQ ID NO: 3061 - DNA, 20 bp, Artificial Sequence
  chemically synthesized
gattctcacagcgcagaccc

SEQ ID NO: 3062 - DNA, 20 bp, Artificial Sequence
  chemically synthesized
gacccaggcccacccccgat

SEQ ID NO: 3063 - DNA, 20 bp, Artificial Sequence
  chemically synthesized
cacccccgatcagcatcacc

SEQ ID NO: 3064 - DNA, 20 bp, Artificial Sequence
  chemically synthesized
acccccgatcagcatcacct

SEQ ID NO: 3065 - DNA, 20 bp, Artificial Sequence
  chemically synthesized
ccccgatcagcatcacctgg

SEQ ID NO: 3066 - DNA, 20 bp, Artificial Sequence
  chemically synthesized
ttgttcaaaatgcaaattct

SEQ ID NO: 3067 - DNA, 20 bp, Artificial Sequence
  chemically synthesized
tgttcaaaatgcaaattctt

SEQ ID NO: 3068 - DNA, 20 bp, Artificial Sequence
  chemically synthesized
caaattcttgggcaccacct

SEQ ID NO: 3069 - DNA, 20 bp, Artificial Sequence
  chemically synthesized
ccacctcagacttactgaat

SEQ ID NO: 3070 - DNA, 20 bp, Artificial Sequence
  chemically synthesized
gacttactgaatcagaaatt

SEQ ID NO: 3071 - DNA, 20 bp, Artificial Sequence
  chemically synthesized
acttactgaatcagaaattg

SEQ ID NO: 3072 - DNA, 20 bp, Artificial Sequence
  chemically synthesized
cttactgaatcagaaattga

SEQ ID NO: 3073 - DNA, 20 bp, Artificial Sequence
  chemically synthesized
actgaatcagaaattgaggg

SEQ ID NO: 3074 - DNA, 20 bp, Artificial Sequence
  chemically synthesized
ctgaatcagaaattgagggt

SEQ ID NO: 3075 - DNA, 20 bp, Artificial Sequence
  chemically synthesized
tgaatcagaaattgagggtg

SEQ ID NO: 3076 - DNA, 20 bp, Artificial Sequence
  chemically synthesized
atcagaaattgagggtgggg

SEQ ID NO: 3077 - DNA, 20 bp, Artificial Sequence
  chemically synthesized
agaaattgagggtggggaag

SEQ ID NO: 3078 - DNA, 20 bp, Artificial Sequence
  chemically synthesized
tctatgttgaataaattctc

SEQ ID NO: 3079 - DNA, 20 bp, Artificial Sequence
  chemically synthesized
ctatgttgaataaattctcc

SEQ ID NO: 3080 - DNA, 20 bp, Artificial Sequence
  chemically synthesized
ggtgattctcatgcacactc

SEQ ID NO: 3081 - DNA, 20 bp, Artificial Sequence
  chemically synthesized
catgcacactcaagctgaat

SEQ ID NO: 3082 - DNA, 20 bp, Artificial Sequence
  chemically synthesized
ctgaatcagcactgctgtct

SEQ ID NO: 3083 - DNA, 20 bp, Artificial Sequence
  chemically synthesized
tgaatcagcactgctgtctt

SEQ ID NO: 3084 - DNA, 20 bp, Artificial Sequence
  chemically synthesized
gaatcagcactgctgtctta

SEQ ID NO: 3085 - DNA, 20 bp, Artificial Sequence
  chemically synthesized
cagcactgctgtcttagggt

SEQ ID NO: 3086 - DNA, 20 bp, Artificial Sequence
  chemically synthesized
agcactgctgtcttagggta

SEQ ID NO: 3087 - DNA, 20 bp, Artificial Sequence
  chemically synthesized
gcactgctgtcttagggtaa

SEQ ID NO: 3088 - DNA, 20 bp, Artificial Sequence
  chemically synthesized
ctgctgtcttagggtaaggg

SEQ ID NO: 3089 - DNA, 20 bp, Artificial Sequence
  chemically synthesized
ggtaagggaagtatgaacgc

SEQ ID NO: 3090 - DNA, 20 bp, Artificial Sequence
  chemically synthesized
aagggaagtatgaacgctgg

SEQ ID NO: 3091 - DNA, 20 bp, Artificial Sequence
  chemically synthesized
ctggaagctttgaaattccc

SEQ ID NO: 3092 - DNA, 20 bp, Artificial Sequence
  chemically synthesized
tggaagctttgaaattccct

SEQ ID NO: 3093 - DNA, 20 bp, Artificial Sequence
  chemically synthesized
aagctttgaaattccctggg

SEQ ID NO: 3094 - DNA, 20 bp, Artificial Sequence
  chemically synthesized
gctttgaaattccctgggca

SEQ ID NO: 3095 - DNA, 20 bp, Artificial Sequence
  chemically synthesized
attccctgggcagagaccca

SEQ ID NO: 3096 - DNA, 20 bp, Artificial Sequence
  chemically synthesized
ttccctgggcagagacccat

SEQ ID NO: 3097 - DNA, 20 bp, Artificial Sequence
  chemically synthesized
ggcagagacccatgggccat

SEQ ID NO: 3098 - DNA, 20 bp, Artificial Sequence
  chemically synthesized
gcagagacccatgggccatg

SEQ ID NO: 3099 - DNA, 20 bp, Artificial Sequence
  chemically synthesized
aggctgttttccctcctgtc

SEQ ID NO: 3100 - DNA, 20 bp, Artificial Sequence
  chemically synthesized
ggctgttttccctcctgtcc

SEQ ID NO: 3101 - DNA, 20 bp, Artificial Sequence
  chemically synthesized
tgtccaggacccacctcctt

SEQ ID NO: 3102 - DNA, 20 bp, Artificial Sequence
  chemically synthesized
gtccaggacccacctccttt

SEQ ID NO: 3103 - DNA, 20 bp, Artificial Sequence
  chemically synthesized
ggacccacctcctttaggac

SEQ ID NO: 3104 - DNA, 20 bp, Artificial Sequence
  chemically synthesized
cacctcctttaggactggaa

SEQ ID NO: 3105 - DNA, 20 bp, Artificial Sequence
  chemically synthesized
ggaacagtcaaaaacaaatt

SEQ ID NO: 3106 - DNA, 20 bp, Artificial Sequence
  chemically synthesized
agtcaaaaacaaattaagct

SEQ ID NO: 3107 - DNA, 20 bp, Artificial Sequence
  chemically synthesized
gtcaaaaacaaattaagctt

SEQ ID NO: 3108 - DNA, 20 bp, Artificial Sequence
  chemically synthesized
tcaaaaacaaattaagctta

SEQ ID NO: 3109 - DNA, 20 bp, Artificial Sequence
  chemically synthesized
attaagcttagggaatccct

SEQ ID NO: 3110 - DNA, 20 bp, Artificial Sequence
  chemically synthesized
ttaagcttagggaatcccta

SEQ ID NO: 3111 - DNA, 20 bp, Artificial Sequence
  chemically synthesized
atccctaaggatccctccat

SEQ ID NO: 3112 - DNA, 20 bp, Artificial Sequence
  chemically synthesized
tccctaaggatccctccatt

SEQ ID NO: 3113 - DNA, 20 bp, Artificial Sequence
  chemically synthesized
gatccctccattaggaaatt

SEQ ID NO: 3114 - DNA, 20 bp, Artificial Sequence
  chemically synthesized
atccctccattaggaaattc

SEQ ID NO: 3115 - DNA, 20 bp, Artificial Sequence
  chemically synthesized
accctccgtctgtcattgat

SEQ ID NO: 3116 - DNA, 20 bp, Artificial Sequence
  chemically synthesized
ccctccgtctgtcattgata

SEQ ID NO: 3117 - DNA, 20 bp, Artificial Sequence
  chemically synthesized
ccgtctgtcattgataagga

SEQ ID NO: 3118 - DNA, 20 bp, Artificial Sequence
  chemically synthesized
cgtctgtcattgataaggac

SEQ ID NO: 3119 - DNA, 20 bp, Artificial Sequence
  chemically synthesized
gtctgtcattgataaggaca

SEQ ID NO: 3120 - DNA, 20 bp, Artificial Sequence
  chemically synthesized
tcattgataaggacagggaa

SEQ ID NO: 3121 - DNA, 20 bp, Artificial Sequence
  chemically synthesized
cattgataaggacagggaac

SEQ ID NO: 3122 - DNA, 20 bp, Artificial Sequence
  chemically synthesized
ataaggacagggaacaggtc

SEQ ID NO: 3123 - DNA, 20 bp, Artificial Sequence
  chemically synthesized
taaggacagggaacaggtcc

SEQ ID NO: 3124 - DNA, 20 bp, Artificial Sequence
  chemically synthesized
aacaggtccaggctctccat

SEQ ID NO: 3125 - DNA, 20 bp, Artificial Sequence
  chemically synthesized
acaggtccaggctctccatc

SEQ ID NO: 3126 - DNA, 20 bp, Artificial Sequence
  chemically synthesized
tccaggctctccatcaggtc

SEQ ID NO: 3127 - DNA, 20 bp, Artificial Sequence
  chemically synthesized
ccaggctctccatcaggtcc

SEQ ID NO: 3128 - DNA, 20 bp, Artificial Sequence
  chemically synthesized
caggctctccatcaggtcca

SEQ ID NO: 3129 - DNA, 20 bp, Artificial Sequence
  chemically synthesized
catcaggtccagggccttct

SEQ ID NO: 3130 - DNA, 20 bp, Artificial Sequence
  chemically synthesized
gtccagggccttcttagcat

SEQ ID NO: 3131 - DNA, 20 bp, Artificial Sequence
  chemically synthesized
gcatgagacaacacccaaac

SEQ ID NO: 3132 - DNA, 20 bp, Artificial Sequence
  chemically synthesized
acacccaaaccagcttgtgc

SEQ ID NO: 3133 - DNA, 20 bp, Artificial Sequence
  chemically synthesized
ccaaaccagcttgtgccaga

SEQ ID NO: 3134 - DNA, 20 bp, Artificial Sequence
  chemically synthesized
tgtcctcactgcttccatta

SEQ ID NO: 3135 - DNA, 20 bp, Artificial Sequence
  chemically synthesized
ttccattaaagccgacatgt

SEQ ID NO: 3136 - DNA, 20 bp, Artificial Sequence
  chemically synthesized
agccgacatgtcagcgaacg

SEQ ID NO: 3137 - DNA, 20 bp, Artificial Sequence
  chemically synthesized
catgtcagcgaacgcagctg

SEQ ID NO: 3138 - DNA, 20 bp, Artificial Sequence
  chemically synthesized
acgcagctgtggcaactgca

SEQ ID NO: 3139 - DNA, 20 bp, Artificial Sequence
  chemically synthesized
ctgtggcaactgcacggaca

SEQ ID NO: 3140 - DNA, 20 bp, Artificial Sequence
  chemically synthesized
tggcaactgcacggacacag

SEQ ID NO: 3141 - DNA, 20 bp, Artificial Sequence
  chemically synthesized
ggcaactgcacggacacagc

SEQ ID NO: 3142 - DNA, 20 bp, Artificial Sequence
  chemically synthesized
tgcacggacacagcaggaac

SEQ ID NO: 3143 - DNA, 20 bp, Artificial Sequence
  chemically synthesized
tggactcttgtttccctttc

SEQ ID NO: 3144 - DNA, 20 bp, Artificial Sequence
  chemically synthesized
tccctttctggtctctcaaa

SEQ ID NO: 3145 - DNA, 20 bp, Artificial Sequence
  chemically synthesized
ccctttctggtctctcaaat

SEQ ID NO: 3146 - DNA, 20 bp, Artificial Sequence
  chemically synthesized
tcaaatgtcttacacttttc

SEQ ID NO: 3147 - DNA, 20 bp, Artificial Sequence
  chemically synthesized
aatgtcttacacttttctgg

SEQ ID NO: 3148 - DNA, 20 bp, Artificial Sequence
  chemically synthesized
gtcttacacttttctggtgg

SEQ ID NO: 3149 - DNA, 20 bp, Artificial Sequence
  chemically synthesized
tcttacacttttctggtgga

SEQ ID NO: 3150 - DNA, 20 bp, Artificial Sequence
  chemically synthesized
tcaacctgttctatttcata

SEQ ID NO: 3151 - DNA, 20 bp, Artificial Sequence
  chemically synthesized
caacctgttctatttcataa

SEQ ID NO: 3152 - DNA, 20 bp, Artificial Sequence
  chemically synthesized
ctatttcataaaggtctctc

SEQ ID NO: 3153 - DNA, 20 bp, Artificial Sequence
  chemically synthesized
cataaaggtctctctagacc

SEQ ID NO: 3154 - DNA, 20 bp, Artificial Sequence
  chemically synthesized
ctagacccagtatttccact

SEQ ID NO: 3155 - DNA, 20 bp, Artificial Sequence
  chemically synthesized
tagacccagtatttccactt

SEQ ID NO: 3156 - DNA, 20 bp, Artificial Sequence
  chemically synthesized
agacccagtatttccacttg

SEQ ID NO: 3157 - DNA, 20 bp, Artificial Sequence
  chemically synthesized
agtatttccacttggggcct

SEQ ID NO: 3158 - DNA, 20 bp, Artificial Sequence
  chemically synthesized
agaaatgccttacacattat

SEQ ID NO: 3159 - DNA, 20 bp, Artificial Sequence
  chemically synthesized
gaaatgccttacacattatt

SEQ ID NO: 3160 - DNA, 20 bp, Artificial Sequence
  chemically synthesized
ttacacattattaggttgca

SEQ ID NO: 3161 - DNA, 20 bp, Artificial Sequence
  chemically synthesized
taggttgcaaagtttcctta

SEQ ID NO: 3162 - DNA, 20 bp, Artificial Sequence
  chemically synthesized
cttatggctgaatttaaaaa

SEQ ID NO: 3163 - DNA, 20 bp, Artificial Sequence
  chemically synthesized
aaatagtgactcttattttt

SEQ ID NO: 3164 - DNA, 20 bp, Artificial Sequence
  chemically synthesized
aatagtgactcttatttttc

SEQ ID NO: 3165 - DNA, 20 bp, Artificial Sequence
  chemically synthesized
aggtttcattaaaaaatatg

SEQ ID NO: 3166 - DNA, 20 bp, Artificial Sequence
  chemically synthesized
ttaaaaaatatgcagcaaac

SEQ ID NO: 3167 - DNA, 20 bp, Artificial Sequence
  chemically synthesized
taaaaaatatgcagcaaact

SEQ ID NO: 3168 - DNA, 20 bp, Artificial Sequence
  chemically synthesized
aatatgcagcaaactgggaa

SEQ ID NO: 3169 - DNA, 20 bp, Artificial Sequence
  chemically synthesized
ttgatttaatgttatacatt

SEQ ID NO: 3170 - DNA, 20 bp, Artificial Sequence
  chemically synthesized
ctttacatttctacatatat

SEQ ID NO: 3171 - DNA, 20 bp, Artificial Sequence
  chemically synthesized
tttacatttctacatatatt

SEQ ID NO: 3172 - DNA, 20 bp, Artificial Sequence
  chemically synthesized
ttgggtaccaacttttgaca

SEQ ID NO: 3173 - DNA, 20 bp, Artificial Sequence
  chemically synthesized
gggtaccaacttttgacaaa

SEQ ID NO: 3174 - DNA, 20 bp, Artificial Sequence
  chemically synthesized
aacttttgacaaagagctct

SEQ ID NO: 3175 - DNA, 20 bp, Artificial Sequence
  chemically synthesized
ttgacaaagagctctaagcc

SEQ ID NO: 3176 - DNA, 20 bp, Artificial Sequence
  chemically synthesized
acaaagagctctaagcccag

SEQ ID NO: 3177 - DNA, 20 bp, Artificial Sequence
  chemically synthesized
caaagagctctaagcccagt

SEQ ID NO: 3178 - DNA, 20 bp, Artificial Sequence
  chemically synthesized
taagcccagtgggatgttcc

SEQ ID NO: 3179 - DNA, 20 bp, Artificial Sequence
  chemically synthesized
gtgggatgttcctggaattt

SEQ ID NO: 3180 - DNA, 20 bp, Artificial Sequence
  chemically synthesized
ggaatttaagtcattaaatc

SEQ ID NO: 3181 - DNA, 20 bp, Artificial Sequence
  chemically synthesized
agtcattaaatcaagttttt

SEQ ID NO: 3182 - DNA, 20 bp, Artificial Sequence
  chemically synthesized
tcaagttttttggtttcctc

SEQ ID NO: 3183 - DNA, 20 bp, Artificial Sequence
  chemically synthesized
gtttcctcaagaacatctca

SEQ ID NO: 3184 - DNA, 20 bp, Artificial Sequence
  chemically synthesized
ttgtttctgaaactaatcac

SEQ ID NO: 3185 - DNA, 20 bp, Artificial Sequence
  chemically synthesized
tgtttctgaaactaatcact

SEQ ID NO: 3186 - DNA, 20 bp, Artificial Sequence
  chemically synthesized
taatcactgggtgtgtaata

SEQ ID NO: 3187 - DNA, 20 bp, Artificial Sequence
  chemically synthesized
cattactgtctactaatcaa

SEQ ID NO: 3188 - DNA, 20 bp, Artificial Sequence
  chemically synthesized
attactgtctactaatcaac

SEQ ID NO: 3189 - DNA, 20 bp, Artificial Sequence
  chemically synthesized
ctaatcaacaggtaatactg

SEQ ID NO: 3190 - DNA, 20 bp, Artificial Sequence
  chemically synthesized
gatttccaaatgtgccaaaa

SEQ ID NO: 3191 - DNA, 20 bp, Artificial Sequence
  chemically synthesized
ccaaatgtgccaaaacagct

SEQ ID NO: 3192 - DNA, 20 bp, Artificial Sequence
  chemically synthesized
tgccaaaacagctaagcaaa

SEQ ID NO: 3193 - DNA, 20 bp, Artificial Sequence
  chemically synthesized
aacacgtttaatgactgctt

SEQ ID NO: 3194 - DNA, 20 bp, Artificial Sequence
  chemically synthesized
acacgtttaatgactgcttt

SEQ ID NO: 3195 - DNA, 20 bp, Artificial Sequence
  chemically synthesized
acgtttaatgactgctttgg

SEQ ID NO: 3196 - DNA, 20 bp, Artificial Sequence
  chemically synthesized
ctttgggagcccaactttaa

SEQ ID NO: 3197 - DNA, 20 bp, Artificial Sequence
  chemically synthesized
tttgggagcccaactttaac

SEQ ID NO: 3198 - DNA, 20 bp, Artificial Sequence
  chemically synthesized
tttaacaggtattaaaacca

SEQ ID NO: 3199 - DNA, 20 bp, Artificial Sequence
  chemically synthesized
ttaacaggtattaaaaccac

SEQ ID NO: 3200 - DNA, 20 bp, Artificial Sequence
  chemically synthesized
taaaaccacaggactctcca

SEQ ID NO: 3201 - DNA, 20 bp, Artificial Sequence
  chemically synthesized
aaaaccacaggactctccac

SEQ ID NO: 3202 - DNA, 20 bp, Artificial Sequence
  chemically synthesized
aaccacaggactctccacag

SEQ ID NO: 3203 - DNA, 20 bp, Artificial Sequence
  chemically synthesized
ggactctccacaggagtaca

SEQ ID NO: 3204 - DNA, 20 bp, Artificial Sequence
  chemically synthesized
gtacgtgtgtgtgtgtttgc

SEQ ID NO: 3205 - DNA, 20 bp, Artificial Sequence
  chemically synthesized
ttatgtgtacatatgtgtgt

SEQ ID NO: 3206 - DNA, 20 bp, Artificial Sequence
  chemically synthesized
gtgcatgcatatgtgtttgt

SEQ ID NO: 3207 - DNA, 20 bp, Artificial Sequence
  chemically synthesized
gtgtatgcttgtgcatgtgt

SEQ ID NO: 3208 - DNA, 20 bp, Artificial Sequence
  chemically synthesized
atgtgcatgcacatgtgtgt

SEQ ID NO: 3209 - DNA, 20 bp, Artificial Sequence
  chemically synthesized
gttcatgtgtgtgtatatgt

SEQ ID NO: 3210 - DNA, 20 bp, Artificial Sequence
  chemically synthesized
atttcctaaacatatgtttt

SEQ ID NO: 3211 - DNA, 20 bp, Artificial Sequence
  chemically synthesized
ccctgttttttttttttttt

SEQ ID NO: 3212 - DNA, 20 bp, Artificial Sequence
  chemically synthesized
gtttttttttttttttcagt

SEQ ID NO: 3213 - DNA, 20 bp, Artificial Sequence
  chemically synthesized
ttttttttttttcagtgaga

SEQ ID NO: 3214 - DNA, 20 bp, Artificial Sequence
  chemically synthesized
tttttttttttcagtgagac

SEQ ID NO: 3215 - DNA, 20 bp, Artificial Sequence
  chemically synthesized
tttcagtgagacaggcacaa

SEQ ID NO: 3216 - DNA, 20 bp, Artificial Sequence
  chemically synthesized
cagtgagacaggcacaaaag

SEQ ID NO: 3217 - DNA, 20 bp, Artificial Sequence
  chemically synthesized
tgagacaggcacaaaagcag

SEQ ID NO: 3218 - DNA, 20 bp, Artificial Sequence
  chemically synthesized
agacaggcacaaaagcagta

SEQ ID NO: 3219 - DNA, 20 bp, Artificial Sequence
  chemically synthesized
agcagtagagctgtcccacg

SEQ ID NO: 3220 - DNA, 20 bp, Artificial Sequence
  chemically synthesized
tagagctgtcccacgtggaa

SEQ ID NO: 3221 - DNA, 20 bp, Artificial Sequence
  chemically synthesized
agagctgtcccacgtggaat

SEQ ID NO: 3222 - DNA, 20 bp, Artificial Sequence
  chemically synthesized
tgaccccctttctttcaccc

SEQ ID NO: 3223 - DNA, 20 bp, Artificial Sequence
  chemically synthesized
gaccccctttctttcaccct

SEQ ID NO: 3224 - DNA, 20 bp, Artificial Sequence
  chemically synthesized
tttcaccctgggtcttcaaa

SEQ ID NO: 3225 - DNA, 20 bp, Artificial Sequence
  chemically synthesized
tcaccctgggtcttcaaaaa

SEQ ID NO: 3226 - DNA, 20 bp, Artificial Sequence
  chemically synthesized
ctgggtcttcaaaaagagaa

SEQ ID NO: 3227 - DNA, 20 bp, Artificial Sequence
  chemically synthesized
agaatggatgacactatgat

SEQ ID NO: 3228 - DNA, 20 bp, Artificial Sequence
  chemically synthesized
gaatggatgacactatgatg

SEQ ID NO: 3229 - DNA, 20 bp, Artificial Sequence
  chemically synthesized
atggatgacactatgatgag

SEQ ID NO: 3230 - DNA, 20 bp, Artificial Sequence
  chemically synthesized
tggatgacactatgatgagg

SEQ ID NO: 3231 - DNA, 20 bp, Artificial Sequence
  chemically synthesized
ggatgacactatgatgagga

SEQ ID NO: 3232 - DNA, 20 bp, Artificial Sequence
  chemically synthesized
gatgacactatgatgaggag

SEQ ID NO: 3233 - DNA, 20 bp, Artificial Sequence
  chemically synthesized
atgaggaggggtctctatat

SEQ ID NO: 3234 - DNA, 20 bp, Artificial Sequence
  chemically synthesized
aggggtctctatattggtga

SEQ ID NO: 3235 - DNA, 20 bp, Artificial Sequence
  chemically synthesized
ggggtctctatattggtgac

SEQ ID NO: 3236 - DNA, 20 bp, Artificial Sequence
  chemically synthesized
attggtgacaggccaaaata

SEQ ID NO: 3237 - DNA, 20 bp, Artificial Sequence
  chemically synthesized
ttggtgacaggccaaaatac

SEQ ID NO: 3238 - DNA, 20 bp, Artificial Sequence
  chemically synthesized
ccaaaatacaggactaccta

SEQ ID NO: 3239 - DNA, 20 bp, Artificial Sequence
  chemically synthesized
gactacctacagtcctttcg

SEQ ID NO: 3240 - DNA, 20 bp, Artificial Sequence
  chemically synthesized
tttcgcagtccataatcctc

SEQ ID NO: 3241 - DNA, 20 bp, Artificial Sequence
  chemically synthesized
tccataatcctcaagtccct

SEQ ID NO: 3242 - DNA, 20 bp, Artificial Sequence
  chemically synthesized
ctcttccatgtaccaccttc

SEQ ID NO: 3243 - DNA, 20 bp, Artificial Sequence
  chemically synthesized
atgcatcctgaacgtttgta

SEQ ID NO: 3244 - DNA, 20 bp, Artificial Sequence
  chemically synthesized
aacgtttgtaaagtaccctg

SEQ ID NO: 3245 - DNA, 20 bp, Artificial Sequence
  chemically synthesized
acgtttgtaaagtaccctga

SEQ ID NO: 3246 - DNA, 20 bp, Artificial Sequence
  chemically synthesized
taccctgaaggaacccattc

SEQ ID NO: 3247 - DNA, 20 bp, Artificial Sequence
  chemically synthesized
ccagttctgaatccgattac

SEQ ID NO: 3248 - DNA, 20 bp, Artificial Sequence
  chemically synthesized
cagttctgaatccgattact

SEQ ID NO: 3249 - DNA, 20 bp, Artificial Sequence
  chemically synthesized
tgaatccgattactaggttc

SEQ ID NO: 3250 - DNA, 20 bp, Artificial Sequence
  chemically synthesized
tcaagccacacaaataacaa

SEQ ID NO: 3251 - DNA, 20 bp, Artificial Sequence
  chemically synthesized
ccacacaaataacaacagtg

SEQ ID NO: 3252 - DNA, 20 bp, Artificial Sequence
  chemically synthesized
acaaataacaacagtgcagc

SEQ ID NO: 3253 - DNA, 20 bp, Artificial Sequence
  chemically synthesized
aacaacagtgcagctagtct

SEQ ID NO: 3254 - DNA, 20 bp, Artificial Sequence
  chemically synthesized
acagtgcagctagtctgagc

SEQ ID NO: 3255 - DNA, 20 bp, Artificial Sequence
  chemically synthesized
agtgcagctagtctgagcta

SEQ ID NO: 3256 - DNA, 20 bp, Artificial Sequence
  chemically synthesized
gtgcagctagtctgagctag

SEQ ID NO: 3257 - DNA, 20 bp, Artificial Sequence
  chemically synthesized
ggcttctttacctaactgca

SEQ ID NO: 3258 - DNA, 20 bp, Artificial Sequence
  chemically synthesized
aagtaaatgtcctttctatt

SEQ ID NO: 3259 - DNA, 20 bp, Artificial Sequence
  chemically synthesized
cctttctattcagccgcatc

SEQ ID NO: 3260 - DNA, 20 bp, Artificial Sequence
  chemically synthesized
tcttgaccctatgtttacca

SEQ ID NO: 3261 - DNA, 20 bp, Artificial Sequence
  chemically synthesized
cctatgtttaccatagatac

SEQ ID NO: 3262 - DNA, 20 bp, Artificial Sequence
  chemically synthesized
agataccagttcttctcact

SEQ ID NO: 3263 - DNA, 20 bp, Artificial Sequence
  chemically synthesized
acttagattctctgacttat

SEQ ID NO: 3264 - DNA, 20 bp, Artificial Sequence
  chemically synthesized
ttagattctctgacttatca

SEQ ID NO: 3265 - DNA, 20 bp, Artificial Sequence
  chemically synthesized
tctgacttatcagagtatta

SEQ ID NO: 3266 - DNA, 20 bp, Artificial Sequence
  chemically synthesized
tgacttatcagagtattata

SEQ ID NO: 3267 - DNA, 20 bp, Artificial Sequence
  chemically synthesized
gagtattatagagcaaacat

SEQ ID NO: 3268 - DNA, 20 bp, Artificial Sequence
  chemically synthesized
attagctatgcctgtgactt

SEQ ID NO: 3269 - DNA, 20 bp, Artificial Sequence
  chemically synthesized
aatctgtaatgaaaatgtgc

SEQ ID NO: 3270 - DNA, 20 bp, Artificial Sequence
  chemically synthesized
gccagctttatcatcactca

SEQ ID NO: 3271 - DNA, 20 bp, Artificial Sequence
  chemically synthesized
aatcgcactctcttttgttc

SEQ ID NO: 3272 - DNA, 20 bp, Artificial Sequence
  chemically synthesized
ctctcttttgttctagaaat

SEQ ID NO: 3273 - DNA, 20 bp, Artificial Sequence
  chemically synthesized
ttccttcattgcttttttac

SEQ ID NO: 3274 - DNA, 20 bp, Artificial Sequence
  chemically synthesized
aaatcctgatgttctttaaa

SEQ ID NO: 3275 - DNA, 20 bp, Artificial Sequence
  chemically synthesized
agtgtattctgcaaaaacaa

SEQ ID NO: 3276 - DNA, 20 bp, Artificial Sequence
  chemically synthesized
tattctgcaaaaacaaaaga

SEQ ID NO: 3277 - DNA, 20 bp, Artificial Sequence
  chemically synthesized
acaaaagaaagcaataatta

SEQ ID NO: 3278 - DNA, 20 bp, Artificial Sequence
  chemically synthesized
taattatagacactacaata

SEQ ID NO: 3279 - DNA, 20 bp, Artificial Sequence
  chemically synthesized
tcttccctgaaactctctca

SEQ ID NO: 3280 - DNA, 20 bp, Artificial Sequence
  chemically synthesized
tgaaactctctcatggtcct

SEQ ID NO: 3281 - DNA, 20 bp, Artificial Sequence
  chemically synthesized
tagattccttgatacttcac

SEQ ID NO: 3282 - DNA, 20 bp, Artificial Sequence
  chemically synthesized
tttgatcaatgctatcctct

SEQ ID NO: 3283 - DNA, 20 bp, Artificial Sequence
  chemically synthesized
tgatcaatgctatcctctta

SEQ ID NO: 3284 - DNA, 20 bp, Artificial Sequence
  chemically synthesized
agccttgattactcaaacaa

SEQ ID NO: 3285 - DNA, 20 bp, Artificial Sequence
  chemically synthesized
gccttgattactcaaacaac

SEQ ID NO: 3286 - DNA, 20 bp, Artificial Sequence
  chemically synthesized
ggttactaacttcacctttt

SEQ ID NO: 3287 - DNA, 20 bp, Artificial Sequence
  chemically synthesized
ttactaacttcaccttttaa

SEQ ID NO: 3288 - DNA, 20 bp, Artificial Sequence
  chemically synthesized
ccttttaagagttctcctcc

SEQ ID NO: 3289 - DNA, 20 bp, Artificial Sequence
  chemically synthesized
cttttaagagttctcctcct

SEQ ID NO: 3290 - DNA, 20 bp, Artificial Sequence
  chemically synthesized
tcctaggctttttctcaata

SEQ ID NO: 3291 - DNA, 20 bp, Artificial Sequence
  chemically synthesized
cctaggctttttctcaataa

SEQ ID NO: 3292 - DNA, 20 bp, Artificial Sequence
  chemically synthesized
ctaggctttttctcaataaa

SEQ ID NO: 3293 - DNA, 20 bp, Artificial Sequence
  chemically synthesized
aggctttttctcaataaagg

SEQ ID NO: 3294 - DNA, 20 bp, Artificial Sequence
  chemically synthesized
ggctttttctcaataaaggg

SEQ ID NO: 3295 - DNA, 20 bp, Artificial Sequence
  chemically synthesized
tttttctcaataaagggagg

SEQ ID NO: 3296 - DNA, 20 bp, Artificial Sequence
  chemically synthesized
ttctcaataaagggaggaag

SEQ ID NO: 3297 - DNA, 20 bp, Artificial Sequence
  chemically synthesized
ctcaataaagggaggaagta

SEQ ID NO: 3298 - DNA, 20 bp, Artificial Sequence
  chemically synthesized
ccctttatctataaaaatgc

SEQ ID NO: 3299 - DNA, 20 bp, Artificial Sequence
  chemically synthesized
aatgccagccaccaatctgt

SEQ ID NO: 3300 - DNA, 20 bp, Artificial Sequence
  chemically synthesized
atgccagccaccaatctgtc

SEQ ID NO: 3301 - DNA, 20 bp, Artificial Sequence
  chemically synthesized
cctaaacaaaatttttctgc

SEQ ID NO: 3302 - DNA, 20 bp, Artificial Sequence
  chemically synthesized
gcaagctgtgtctttaacat

SEQ ID NO: 3303 - DNA, 20 bp, Artificial Sequence
  chemically synthesized
ctgtgtctttaacataagca

SEQ ID NO: 3304 - DNA, 20 bp, Artificial Sequence
  chemically synthesized
aaaaatcttgcttttctgaa

SEQ ID NO: 3305 - DNA, 20 bp, Artificial Sequence
  chemically synthesized
tgcttttctgaaaagcaact

SEQ ID NO: 3306 - DNA, 20 bp, Artificial Sequence
  chemically synthesized
tctgaaaagcaactaagcca

SEQ ID NO: 3307 - DNA, 20 bp, Artificial Sequence
  chemically synthesized
tccatctttgtgttgaaatg

SEQ ID NO: 3308 - DNA, 20 bp, Artificial Sequence
  chemically synthesized
aaatgcagatttcccactaa

SEQ ID NO: 3309 - DNA, 20 bp, Artificial Sequence
  chemically synthesized
aatgcagatttcccactaaa

SEQ ID NO: 3310 - DNA, 20 bp, Artificial Sequence
  chemically synthesized
aggcaaatccttcatttcaa

SEQ ID NO: 3311 - DNA, 20 bp, Artificial Sequence
  chemically synthesized
ggcaaatccttcatttcaaa

SEQ ID NO: 3312 - DNA, 20 bp, Artificial Sequence
  chemically synthesized
cttcatttcaaaaggttgaa

SEQ ID NO: 3313 - DNA, 20 bp, Artificial Sequence
  chemically synthesized
ttcatttcaaaaggttgaat

SEQ ID NO: 3314 - DNA, 20 bp, Artificial Sequence
  chemically synthesized
tttcaaaaggttgaatagga

SEQ ID NO: 3315 - DNA, 20 bp, Artificial Sequence
  chemically synthesized
aataggatggtacttaaaaa

SEQ ID NO: 3316 - DNA, 20 bp, Artificial Sequence
  chemically synthesized
ggtacttaaaaaaagaattc

SEQ ID NO: 3317 - DNA, 20 bp, Artificial Sequence
  chemically synthesized
cttaaaaaaagaattccagc

SEQ ID NO: 3318 - DNA, 20 bp, Artificial Sequence
  chemically synthesized
gaattccagctggttaaatt

SEQ ID NO: 3319 - DNA, 20 bp, Artificial Sequence
  chemically synthesized
aattccagctggttaaattt

SEQ ID NO: 3320 - DNA, 20 bp, Artificial Sequence
  chemically synthesized
attccagctggttaaattta

SEQ ID NO: 3321 - DNA, 20 bp, Artificial Sequence
  chemically synthesized
taaatttagggtgttaaaaa

SEQ ID NO: 3322 - DNA, 20 bp, Artificial Sequence
  chemically synthesized
ttcactccaataatattctt

SEQ ID NO: 3323 - DNA, 20 bp, Artificial Sequence
  chemically synthesized
ccaataatattctttggctc

SEQ ID NO: 3324 - DNA, 20 bp, Artificial Sequence
  chemically synthesized
caataatattctttggctct

SEQ ID NO: 3325 - DNA, 20 bp, Artificial Sequence
  chemically synthesized
attctttggctctgggccca

SEQ ID NO: 3326 - DNA, 20 bp, Artificial Sequence
  chemically synthesized
attttcacttgatcgtgaat

SEQ ID NO: 3327 - DNA, 20 bp, Artificial Sequence
  chemically synthesized
ataaatttttattacacttt

SEQ ID NO: 3328 - DNA, 20 bp, Artificial Sequence
  chemically synthesized
tacactttaagcttttgcct

SEQ ID NO: 3329 - DNA, 20 bp, Artificial Sequence
  chemically synthesized
tttaagcttttgccttagaa

SEQ ID NO: 3330 - DNA, 20 bp, Artificial Sequence
  chemically synthesized
aagcttttgccttagaatgg

SEQ ID NO: 3331 - DNA, 20 bp, Artificial Sequence
  chemically synthesized
ttagaatggcggaacttatc

SEQ ID NO: 3332 - DNA, 20 bp, Artificial Sequence
  chemically synthesized
tagaatggcggaacttatct

SEQ ID NO: 3333 - DNA, 20 bp, Artificial Sequence
  chemically synthesized
gaatggcggaacttatctag

SEQ ID NO: 3334 - DNA, 20 bp, Artificial Sequence
  chemically synthesized
cggaacttatctaggagact

SEQ ID NO: 3335 - DNA, 20 bp, Artificial Sequence
  chemically synthesized
gaacttatctaggagactga

SEQ ID NO: 3336 - DNA, 20 bp, Artificial Sequence
  chemically synthesized
aacttatctaggagactgag

SEQ ID NO: 3337 - DNA, 20 bp, Artificial Sequence
  chemically synthesized
acttatctaggagactgaga

SEQ ID NO: 3338 - DNA, 20 bp, Artificial Sequence
  chemically synthesized
tatctaggagactgagaggg

SEQ ID NO: 3339 - DNA, 20 bp, Artificial Sequence
  chemically synthesized
tgagagggcagctgcataaa

SEQ ID NO: 3340 - DNA, 20 bp, Artificial Sequence
  chemically synthesized
cataaaaagacaaattgtct

SEQ ID NO: 3341 - DNA, 20 bp, Artificial Sequence
  chemically synthesized
ataaaaagacaaattgtctt

SEQ ID NO: 3342 - DNA, 20 bp, Artificial Sequence
  chemically synthesized
ctatgcaaaatgtgtgttcc

SEQ ID NO: 3343 - DNA, 20 bp, Artificial Sequence
  chemically synthesized
tatgcaaaatgtgtgttccc

SEQ ID NO: 3344 - DNA, 20 bp, Artificial Sequence
  chemically synthesized
tcattcaacaaatatttacc

SEQ ID NO: 3345 - DNA, 20 bp, Artificial Sequence
  chemically synthesized
ccgagtgcctacaatgccca

SEQ ID NO: 3346 - DNA, 20 bp, Artificial Sequence
  chemically synthesized
gcctacaatgcccaaagcaa

SEQ ID NO: 3347 - DNA, 20 bp, Artificial Sequence
  chemically synthesized
cctacaatgcccaaagcaat

SEQ ID NO: 3348 - DNA, 20 bp, Artificial Sequence
  chemically synthesized
caatgcccaaagcaatgggc

SEQ ID NO: 3349 - DNA, 20 bp, Artificial Sequence
  chemically synthesized
aagcaatgggctagccgctg

SEQ ID NO: 3350 - DNA, 20 bp, Artificial Sequence
  chemically synthesized
agcaatgggctagccgctgt

SEQ ID NO: 3351 - DNA, 20 bp, Artificial Sequence
  chemically synthesized
aatgggctagccgctgtggg

SEQ ID NO: 3352 - DNA, 20 bp, Artificial Sequence
  chemically synthesized
tagccgctgtgggcagtaca

SEQ ID NO: 3353 - DNA, 20 bp, Artificial Sequence
  chemically synthesized
tgggcagtacaaagaaaaca

SEQ ID NO: 3354 - DNA, 20 bp, Artificial Sequence
  chemically synthesized
gtacaaagaaaacacggaca

SEQ ID NO: 3355 - DNA, 20 bp, Artificial Sequence
  chemically synthesized
acggacacagatttctccca

SEQ ID NO: 3356 - DNA, 20 bp, Artificial Sequence
  chemically synthesized
gacacagatttctcccacag

SEQ ID NO: 3357 - DNA, 20 bp, Artificial Sequence
  chemically synthesized
acacagatttctcccacagc

SEQ ID NO: 3358 - DNA, 20 bp, Artificial Sequence
  chemically synthesized
ctcccacagcaggcttcatt

SEQ ID NO: 3359 - DNA, 20 bp, Artificial Sequence
  chemically synthesized
ccacagcaggcttcatttag

SEQ ID NO: 3360 - DNA, 20 bp, Artificial Sequence
  chemically synthesized
gcaggcttcatttagtagaa

SEQ ID NO: 3361 - DNA, 20 bp, Artificial Sequence
  chemically synthesized
caggcttcatttagtagaaa

SEQ ID NO: 3362 - DNA, 20 bp, Artificial Sequence
  chemically synthesized
cttcatttagtagaaaaggt

SEQ ID NO: 3363 - DNA, 20 bp, Artificial Sequence
  chemically synthesized
ttcatttagtagaaaaggta

SEQ ID NO: 3364 - DNA, 20 bp, Artificial Sequence
  chemically synthesized
tagaaaaggtaaggcctgca

SEQ ID NO: 3365 - DNA, 20 bp, Artificial Sequence
  chemically synthesized
gaaattgctctacccccatg

SEQ ID NO: 3366 - DNA, 20 bp, Artificial Sequence
  chemically synthesized
ttgctctacccccatgtaga

SEQ ID NO: 3367 - DNA, 20 bp, Artificial Sequence
  chemically synthesized
ccatgtagaaagtgtgtcat

SEQ ID NO: 3368 - DNA, 20 bp, Artificial Sequence
  chemically synthesized
atgtagaaagtgtgtcatga

SEQ ID NO: 3369 - DNA, 20 bp, Artificial Sequence
  chemically synthesized
gtagaaagtgtgtcatgaga

SEQ ID NO: 3370 - DNA, 20 bp, Artificial Sequence
  chemically synthesized
tagaaagtgtgtcatgagag

SEQ ID NO: 3371 - DNA, 20 bp, Artificial Sequence
  chemically synthesized
agtgtgtcatgagagaggta

SEQ ID NO: 3372 - DNA, 20 bp, Artificial Sequence
  chemically synthesized
gtcatgagagaggtacagat

SEQ ID NO: 3373 - DNA, 20 bp, Artificial Sequence
  chemically synthesized
gaggtacagatgagctgcta

SEQ ID NO: 3374 - DNA, 20 bp, Artificial Sequence
  chemically synthesized
tgagctgctatggaaattca

SEQ ID NO: 3375 - DNA, 20 bp, Artificial Sequence
  chemically synthesized
gagctgctatggaaattcaa

SEQ ID NO: 3376 - DNA, 20 bp, Artificial Sequence
  chemically synthesized
ctgctatggaaattcaaagg

SEQ ID NO: 3377 - DNA, 20 bp, Artificial Sequence
  chemically synthesized
gctatggaaattcaaaggaa

SEQ ID NO: 3378 - DNA, 20 bp, Artificial Sequence
  chemically synthesized
gaagagaaattatttccatt

SEQ ID NO: 3379 - DNA, 20 bp, Artificial Sequence
  chemically synthesized
gagaaattatttccatttgg

SEQ ID NO: 3380 - DNA, 20 bp, Artificial Sequence
  chemically synthesized
agaaattatttccatttgga

SEQ ID NO: 3381 - DNA, 20 bp, Artificial Sequence
  chemically synthesized
gaaattatttccatttggaa

SEQ ID NO: 3382 - DNA, 20 bp, Artificial Sequence
  chemically synthesized
aattatttccatttggaagg

SEQ ID NO: 3383 - DNA, 20 bp, Artificial Sequence
  chemically synthesized
attatttccatttggaaggg

SEQ ID NO: 3384 - DNA, 20 bp, Artificial Sequence
  chemically synthesized
ttatttccatttggaaggga

SEQ ID NO: 3385 - DNA, 20 bp, Artificial Sequence
  chemically synthesized
atttccatttggaagggagg

SEQ ID NO: 3386 - DNA, 20 bp, Artificial Sequence
  chemically synthesized
ttccatttggaagggaggga

SEQ ID NO: 3387 - DNA, 20 bp, Artificial Sequence
  chemically synthesized
ccatttggaagggagggaga

SEQ ID NO: 3388 - DNA, 20 bp, Artificial Sequence
  chemically synthesized
catttggaagggagggagag

SEQ ID NO: 3389 - DNA, 20 bp, Artificial Sequence
  chemically synthesized
gaagggagggagagaggctt

SEQ ID NO: 3390 - DNA, 20 bp, Artificial Sequence
  chemically synthesized
aagggagggagagaggcttt

SEQ ID NO: 3391 - DNA, 20 bp, Artificial Sequence
  chemically synthesized
gagggagagaggctttggga

SEQ ID NO: 3392 - DNA, 20 bp, Artificial Sequence
  chemically synthesized
gggagagaggctttgggaaa

SEQ ID NO: 3393 - DNA, 20 bp, Artificial Sequence
  chemically synthesized
ggagagaggctttgggaaag

SEQ ID NO: 3394 - DNA, 20 bp, Artificial Sequence
  chemically synthesized
tgggaaagaggaaaacttat

SEQ ID NO: 3395 - DNA, 20 bp, Artificial Sequence
  chemically synthesized
gaaaacttatgagttaaacc

SEQ ID NO: 3396 - DNA, 20 bp, Artificial Sequence
  chemically synthesized
aaacttatgagttaaacctg

SEQ ID NO: 3397 - DNA, 20 bp, Artificial Sequence
  chemically synthesized
acttatgagttaaacctgga

SEQ ID NO: 3398 - DNA, 20 bp, Artificial Sequence
  chemically synthesized
tgagttaaacctggagagcc

SEQ ID NO: 3399 - DNA, 20 bp, Artificial Sequence
  chemically synthesized
agttaaacctggagagccaa

SEQ ID NO: 3400 - DNA, 20 bp, Artificial Sequence
  chemically synthesized
aaacctggagagccaagaga

SEQ ID NO: 3401 - DNA, 20 bp, Artificial Sequence
  chemically synthesized
aacctggagagccaagagaa

SEQ ID NO: 3402 - DNA, 20 bp, Artificial Sequence
  chemically synthesized
agccaagagaaaggatatcc

SEQ ID NO: 3403 - DNA, 20 bp, Artificial Sequence
  chemically synthesized
gaaaggatatcctagataaa

SEQ ID NO: 3404 - DNA, 20 bp, Artificial Sequence
  chemically synthesized
atatcctagataaaaagaaa

SEQ ID NO: 3405 - DNA, 20 bp, Artificial Sequence
  chemically synthesized
tcctagataaaaagaaaaag

SEQ ID NO: 3406 - DNA, 20 bp, Artificial Sequence
  chemically synthesized
cctagataaaaagaaaaagc

SEQ ID NO: 3407 - DNA, 20 bp, Artificial Sequence
  chemically synthesized
ataaaaagaaaaagcaggta

SEQ ID NO: 3408 - DNA, 20 bp, Artificial Sequence
  chemically synthesized
aaaaagcaggtaaagatgct

SEQ ID NO: 3409 - DNA, 20 bp, Artificial Sequence
  chemically synthesized
aaagcaggtaaagatgctta

SEQ ID NO: 3410 - DNA, 20 bp, Artificial Sequence
  chemically synthesized
agcaggtaaagatgcttaga

SEQ ID NO: 3411 - DNA, 20 bp, Artificial Sequence
  chemically synthesized
aggtaaagatgcttagagag

SEQ ID NO: 3412 - DNA, 20 bp, Artificial Sequence
  chemically synthesized
aagatgcttagagagaagca

SEQ ID NO: 3413 - DNA, 20 bp, Artificial Sequence
  chemically synthesized
cttagagagaagcaaagccc

SEQ ID NO: 3414 - DNA, 20 bp, Artificial Sequence
  chemically synthesized
ttagagagaagcaaagccca

SEQ ID NO: 3415 - DNA, 20 bp, Artificial Sequence
  chemically synthesized
gagagaagcaaagcccaagg

SEQ ID NO: 3416 - DNA, 20 bp, Artificial Sequence
  chemically synthesized
agagaagcaaagcccaaggt

SEQ ID NO: 3417 - DNA, 20 bp, Artificial Sequence
  chemically synthesized
agcaaagcccaaggtgggca

SEQ ID NO: 3418 - DNA, 20 bp, Artificial Sequence
  chemically synthesized
caaagcccaaggtgggcaca

SEQ ID NO: 3419 - DNA, 20 bp, Artificial Sequence
  chemically synthesized
caaggtgggcacagagtaaa

SEQ ID NO: 3420 - DNA, 20 bp, Artificial Sequence
  chemically synthesized
aaggtgggcacagagtaaat

SEQ ID NO: 3421 - DNA, 20 bp, Artificial Sequence
  chemically synthesized
aggtgggcacagagtaaatg

SEQ ID NO: 3422 - DNA, 20 bp, Artificial Sequence
  chemically synthesized
acagagtaaatggggcccaa

SEQ ID NO: 3423 - DNA, 20 bp, Artificial Sequence
  chemically synthesized
cagagtaaatggggcccaat

SEQ ID NO: 3424 - DNA, 20 bp, Artificial Sequence
  chemically synthesized
agtaaatggggcccaatagg

SEQ ID NO: 3425 - DNA, 20 bp, Artificial Sequence
  chemically synthesized
atattgcacactgattcatc

SEQ ID NO: 3426 - DNA, 20 bp, Artificial Sequence
  chemically synthesized
acactgattcatccagttga

SEQ ID NO: 3427 - DNA, 20 bp, Artificial Sequence
  chemically synthesized
ctgattcatccagttgacag

SEQ ID NO: 3428 - DNA, 20 bp, Artificial Sequence
  chemically synthesized
gattcatccagttgacagcg

SEQ ID NO: 3429 - DNA, 20 bp, Artificial Sequence
  chemically synthesized
attcatccagttgacagcgg

SEQ ID NO: 3430 - DNA, 20 bp, Artificial Sequence
  chemically synthesized
ccatctaaataaatcctctg

SEQ ID NO: 3431 - DNA, 20 bp, Artificial Sequence
  chemically synthesized
gaagatttctgtgacatctt

SEQ ID NO: 3432 - DNA, 20 bp, Artificial Sequence
  chemically synthesized
gtgacatcttcagctttcac

SEQ ID NO: 3433 - DNA, 20 bp, Artificial Sequence
  chemically synthesized
atttcacattttctgaaaat

SEQ ID NO: 3434 - DNA, 20 bp, Artificial Sequence
  chemically synthesized
tttcacattttctgaaaata

SEQ ID NO: 3435 - DNA, 20 bp, Artificial Sequence
  chemically synthesized
ttcacattttctgaaaataa

SEQ ID NO: 3436 - DNA, 20 bp, Artificial Sequence
  chemically synthesized
aaataagggacacaaccatg

SEQ ID NO: 3437 - DNA, 20 bp, Artificial Sequence
  chemically synthesized
gactcttgtgaaactccatg

SEQ ID NO: 3438 - DNA, 20 bp, Artificial Sequence
  chemically synthesized
actcttgtgaaactccatga

SEQ ID NO: 3439 - DNA, 20 bp, Artificial Sequence
  chemically synthesized
gtttcttcccccaatgaatg

SEQ ID NO: 3440 - DNA, 20 bp, Artificial Sequence
  chemically synthesized
tttcttcccccaatgaatgt

SEQ ID NO: 3441 - DNA, 20 bp, Artificial Sequence
  chemically synthesized
cttcccccaatgaatgtggg

SEQ ID NO: 3442 - DNA, 20 bp, Artificial Sequence
  chemically synthesized
atgaatgtgggtggcccgct

SEQ ID NO: 3443 - DNA, 20 bp, Artificial Sequence
  chemically synthesized
tgaatgtgggtggcccgcta

SEQ ID NO: 3444 - DNA, 20 bp, Artificial Sequence
  chemically synthesized
ttactatgttttattcctct

SEQ ID NO: 3445 - DNA, 20 bp, Artificial Sequence
  chemically synthesized
tatgttttattcctctgagt

SEQ ID NO: 3446 - DNA, 20 bp, Artificial Sequence
  chemically synthesized
ttcctctgagtcagacaaac

SEQ ID NO: 3447 - DNA, 20 bp, Artificial Sequence
  chemically synthesized
gtcagacaaacaagtgttga

SEQ ID NO: 3448 - DNA, 20 bp, Artificial Sequence
  chemically synthesized
tccttgcaatactgcctccc

SEQ ID NO: 3449 - DNA, 20 bp, Artificial Sequence
  chemically synthesized
ctggcttaaataatctattt

SEQ ID NO: 3450 - DNA, 20 bp, Artificial Sequence
  chemically synthesized
tatttcagatgtctcattgc

SEQ ID NO: 3451 - DNA, 20 bp, Artificial Sequence
  chemically synthesized
agatgtctcattgccagttt

SEQ ID NO: 3452 - DNA, 20 bp, Artificial Sequence
  chemically synthesized
gtctcattgccagtttaaga

SEQ ID NO: 3453 - DNA, 20 bp, Artificial Sequence
  chemically synthesized
tctcattgccagtttaagat

SEQ ID NO: 3454 - DNA, 20 bp, Artificial Sequence
  chemically synthesized
ttttcaacaaatgactgtgc

SEQ ID NO: 3455 - DNA, 20 bp, Artificial Sequence
  chemically synthesized
atgactgtgcaagaaacatt

SEQ ID NO: 3456 - DNA, 20 bp, Artificial Sequence
  chemically synthesized
tcccctctttcttcttttca

SEQ ID NO: 3457 - DNA, 20 bp, Artificial Sequence
  chemically synthesized
ctttcttcttttcaaagcca

SEQ ID NO: 3458 - DNA, 20 bp, Artificial Sequence
  chemically synthesized
tttcttcttttcaaagccat

SEQ ID NO: 3459 - DNA, 20 bp, Artificial Sequence
  chemically synthesized
ttcttcttttcaaagccatg

SEQ ID NO: 3460 - DNA, 20 bp, Artificial Sequence
  chemically synthesized
cttcttttcaaagccatggg

SEQ ID NO: 3461 - DNA, 20 bp, Artificial Sequence
  chemically synthesized
ttcttttcaaagccatgggg

SEQ ID NO: 3462 - DNA, 20 bp, Artificial Sequence
  chemically synthesized
tttcaaagccatggggagga

SEQ ID NO: 3463 - DNA, 20 bp, Artificial Sequence
  chemically synthesized
ttcaaagccatggggaggat

SEQ ID NO: 3464 - DNA, 20 bp, Artificial Sequence
  chemically synthesized
tcaaagccatggggaggata

SEQ ID NO: 3465 - DNA, 20 bp, Artificial Sequence
  chemically synthesized
caaagccatggggaggatag

SEQ ID NO: 3466 - DNA, 20 bp, Artificial Sequence
  chemically synthesized
ggtgcccttactcctgctct

SEQ ID NO: 3467 - DNA, 20 bp, Artificial Sequence
  chemically synthesized
ttactcctgctctgagtcct

SEQ ID NO: 3468 - DNA, 20 bp, Artificial Sequence
  chemically synthesized
cctgctctgagtcctcagct

SEQ ID NO: 3469 - DNA, 20 bp, Artificial Sequence
  chemically synthesized
ctgctctgagtcctcagctg

SEQ ID NO: 3470 - DNA, 20 bp, Artificial Sequence
  chemically synthesized
ctgaggatcttgtttgtgtg

SEQ ID NO: 3471 - DNA, 20 bp, Artificial Sequence
  chemically synthesized
aggatcttgtttgtgtgtag

SEQ ID NO: 3472 - DNA, 20 bp, Artificial Sequence
  chemically synthesized
ggatcttgtttgtgtgtagt

SEQ ID NO: 3473 - DNA, 20 bp, Artificial Sequence
  chemically synthesized
gatcttgtttgtgtgtagtg

SEQ ID NO: 3474 - DNA, 20 bp, Artificial Sequence
  chemically synthesized
atcttgtttgtgtgtagtgg

SEQ ID NO: 3475 - DNA, 20 bp, Artificial Sequence
  chemically synthesized
ttgtttgtgtgtagtggggg

SEQ ID NO: 3476 - DNA, 20 bp, Artificial Sequence
  chemically synthesized
tgtttgtgtgtagtgggggc

SEQ ID NO: 3477 - DNA, 20 bp, Artificial Sequence
  chemically synthesized
gtttgtgtgtagtgggggca

SEQ ID NO: 3478 - DNA, 20 bp, Artificial Sequence
  chemically synthesized
tttgtgtgtagtgggggcag

SEQ ID NO: 3479 - DNA, 20 bp, Artificial Sequence
  chemically synthesized
ttgtgtgtagtgggggcagg

SEQ ID NO: 3480 - DNA, 20 bp, Artificial Sequence
  chemically synthesized
gtgtgtagtgggggcagggg

SEQ ID NO: 3481 - DNA, 20 bp, Artificial Sequence
  chemically synthesized
tgtgtagtgggggcaggggg

SEQ ID NO: 3482 - DNA, 20 bp, Artificial Sequence
  chemically synthesized
gtgtagtgggggcaggggga

SEQ ID NO: 3483 - DNA, 20 bp, Artificial Sequence
  chemically synthesized
tgtagtgggggcagggggag

SEQ ID NO: 3484 - DNA, 20 bp, Artificial Sequence
  chemically synthesized
tgggggcagggggaggggtg

SEQ ID NO: 3485 - DNA, 20 bp, Artificial Sequence
  chemically synthesized
gtgtagccttgcctctatcc

SEQ ID NO: 3486 - DNA, 20 bp, Artificial Sequence
  chemically synthesized
tgtagccttgcctctatccg

SEQ ID NO: 3487 - DNA, 20 bp, Artificial Sequence
  chemically synthesized
cctctatccgaggtatttat

SEQ ID NO: 3488 - DNA, 20 bp, Artificial Sequence
  chemically synthesized
ctctatccgaggtatttatc

SEQ ID NO: 3489 - DNA, 20 bp, Artificial Sequence
  chemically synthesized
gaggtatttatcaggttatt

SEQ ID NO: 3490 - DNA, 20 bp, Artificial Sequence
  chemically synthesized
aggtatttatcaggttattt

SEQ ID NO: 3491 - DNA, 20 bp, Artificial Sequence
  chemically synthesized
gtatttatcaggttatttgg

SEQ ID NO: 3492 - DNA, 20 bp, Artificial Sequence
  chemically synthesized
ggttatttgggagctacttt

SEQ ID NO: 3493 - DNA, 20 bp, Artificial Sequence
  chemically synthesized
ttatttgggagctactttca

SEQ ID NO: 3494 - DNA, 20 bp, Artificial Sequence
  chemically synthesized
ttcccactgccaccactccc

SEQ ID NO: 3495 - DNA, 20 bp, Artificial Sequence
  chemically synthesized
cccggattcttttcttcctt

SEQ ID NO: 3496 - DNA, 20 bp, Artificial Sequence
  chemically synthesized
ccggattcttttcttccttt

SEQ ID NO: 3497 - DNA, 20 bp, Artificial Sequence
  chemically synthesized
gattcttttcttcctttagg

SEQ ID NO: 3498 - DNA, 20 bp, Artificial Sequence
  chemically synthesized
tcttttcttcctttaggaag

SEQ ID NO: 3499 - DNA, 20 bp, Artificial Sequence
  chemically synthesized
cttttcttcctttaggaagc

SEQ ID NO: 3500 - DNA, 20 bp, Artificial Sequence
  chemically synthesized
ttttcttcctttaggaagca

SEQ ID NO: 3501 - DNA, 20 bp, Artificial Sequence
  chemically synthesized
gaagcagggacttgttcctc

SEQ ID NO: 3502 - DNA, 20 bp, Artificial Sequence
  chemically synthesized
agcagggacttgttcctctg

SEQ ID NO: 3503 - DNA, 20 bp, Artificial Sequence
  chemically synthesized
cagggacttgttcctctgga

SEQ ID NO: 3504 - DNA, 20 bp, Artificial Sequence
  chemically synthesized
tgttcctctggagagactgc

SEQ ID NO: 3505 - DNA, 20 bp, Artificial Sequence
  chemically synthesized
ttcctctggagagactgcta

SEQ ID NO: 3506 - DNA, 20 bp, Artificial Sequence
  chemically synthesized
tcctctggagagactgctag

SEQ ID NO: 3507 - DNA, 20 bp, Artificial Sequence
  chemically synthesized
ctggagagactgctagagga

SEQ ID NO: 3508 - DNA, 20 bp, Artificial Sequence
  chemically synthesized
agagactgctagaggaaagt

SEQ ID NO: 3509 - DNA, 20 bp, Artificial Sequence
  chemically synthesized
gagactgctagaggaaagtc

SEQ ID NO: 3510 - DNA, 20 bp, Artificial Sequence
  chemically synthesized
tagaggaaagtcaggaacct

SEQ ID NO: 3511 - DNA, 20 bp, Artificial Sequence
  chemically synthesized
accccaactctgccactcac

SEQ ID NO: 3512 - DNA, 20 bp, Artificial Sequence
  chemically synthesized
ttgaataaatcctttctttc

SEQ ID NO: 3513 - DNA, 20 bp, Artificial Sequence
  chemically synthesized
aatcctttctttctggccct

SEQ ID NO: 3514 - DNA, 20 bp, Artificial Sequence
  chemically synthesized
ctaagtgtttccatctttaa

SEQ ID NO: 3515 - DNA, 20 bp, Artificial Sequence
  chemically synthesized
taagtgtttccatctttaaa

SEQ ID NO: 3516 - DNA, 20 bp, Artificial Sequence
  chemically synthesized
agtgtttccatctttaaaag

SEQ ID NO: 3517 - DNA, 20 bp, Artificial Sequence
  chemically synthesized
gtttccatctttaaaaggag

SEQ ID NO: 3518 - DNA, 20 bp, Artificial Sequence
  chemically synthesized
catctttaaaaggagaagac

SEQ ID NO: 3519 - DNA, 20 bp, Artificial Sequence
  chemically synthesized
ttaaaaggagaagactggat

SEQ ID NO: 3520 - DNA, 20 bp, Artificial Sequence
  chemically synthesized
aaggagaagactggattaga

SEQ ID NO: 3521 - DNA, 20 bp, Artificial Sequence
  chemically synthesized
aggagaagactggattagat

SEQ ID NO: 3522 - DNA, 20 bp, Artificial Sequence
  chemically synthesized
ggagaagactggattagatg

SEQ ID NO: 3523 - DNA, 20 bp, Artificial Sequence
  chemically synthesized
gaagactggattagatgggg

SEQ ID NO: 3524 - DNA, 20 bp, Artificial Sequence
  chemically synthesized
ctctctcctgcctcccatgc

SEQ ID NO: 3525 - DNA, 20 bp, Artificial Sequence
  chemically synthesized
tcctgcctcccatgcaagtc

SEQ ID NO: 3526 - DNA, 20 bp, Artificial Sequence
  chemically synthesized
cctgcctcccatgcaagtcc

SEQ ID NO: 3527 - DNA, 20 bp, Artificial Sequence
  chemically synthesized
atgcaagtccaggcctcctt

SEQ ID NO: 3528 - DNA, 20 bp, Artificial Sequence
  chemically synthesized
aggcctcctttggaccaacc

SEQ ID NO: 3529 - DNA, 20 bp, Artificial Sequence
  chemically synthesized
gcctcctttggaccaaccaa

SEQ ID NO: 3530 - DNA, 20 bp, Artificial Sequence
  chemically synthesized
accaaccaagagacctacta

SEQ ID NO: 3531 - DNA, 20 bp, Artificial Sequence
  chemically synthesized
ccaaccaagagacctactat

SEQ ID NO: 3532 - DNA, 20 bp, Artificial Sequence
  chemically synthesized
agacctactataggccgtgc

SEQ ID NO: 3533 - DNA, 20 bp, Artificial Sequence
  chemically synthesized
cctactataggccgtgctag

SEQ ID NO: 3534 - DNA, 20 bp, Artificial Sequence
  chemically synthesized
ctataggccgtgctagaagc

SEQ ID NO: 3535 - DNA, 20 bp, Artificial Sequence
  chemically synthesized
aggccgtgctagaagctggc

SEQ ID NO: 3536 - DNA, 20 bp, Artificial Sequence
  chemically synthesized
ggccgtgctagaagctggcc

SEQ ID NO: 3537 - DNA, 20 bp, Artificial Sequence
  chemically synthesized
ttcccctcatgaccttgacc

SEQ ID NO: 3538 - DNA, 20 bp, Artificial Sequence
  chemically synthesized
ctcatgaccttgacctggat

SEQ ID NO: 3539 - DNA, 20 bp, Artificial Sequence
  chemically synthesized
tcatgaccttgacctggatg

SEQ ID NO: 3540 - DNA, 20 bp, Artificial Sequence
  chemically synthesized
atgaccttgacctggatgag

SEQ ID NO: 3541 - DNA, 20 bp, Artificial Sequence
  chemically synthesized
tgaccttgacctggatgagg

SEQ ID NO: 3542 - DNA, 20 bp, Artificial Sequence
  chemically synthesized
gaccttgacctggatgagga

SEQ ID NO: 3543 - DNA, 20 bp, Artificial Sequence
  chemically synthesized
cctggatgaggagggcctta

SEQ ID NO: 3544 - DNA, 20 bp, Artificial Sequence
  chemically synthesized
ctggatgaggagggccttat

SEQ ID NO: 3545 - DNA, 20 bp, Artificial Sequence
  chemically synthesized
ggatgaggagggccttatag

SEQ ID NO: 3546 - DNA, 20 bp, Artificial Sequence
  chemically synthesized
atgaggagggccttatagga

SEQ ID NO: 3547 - DNA, 20 bp, Artificial Sequence
  chemically synthesized
gagggccttataggagagtt

SEQ ID NO: 3548 - DNA, 20 bp, Artificial Sequence
  chemically synthesized
agggccttataggagagttc

SEQ ID NO: 3549 - DNA, 20 bp, Artificial Sequence
  chemically synthesized
gggccttataggagagttca

SEQ ID NO: 3550 - DNA, 20 bp, Artificial Sequence
  chemically synthesized
cttataggagagttcagggc

SEQ ID NO: 3551 - DNA, 20 bp, Artificial Sequence
  chemically synthesized
ttataggagagttcagggct

SEQ ID NO: 3552 - DNA, 20 bp, Artificial Sequence
  chemically synthesized
ggagagttcagggctgggct

SEQ ID NO: 3553 - DNA, 20 bp, Artificial Sequence
  chemically synthesized
tcagggctgggcttggtccc

SEQ ID NO: 3554 - DNA, 20 bp, Artificial Sequence
  chemically synthesized
cagggctgggcttggtcccc

SEQ ID NO: 3555 - DNA, 20 bp, Artificial Sequence
  chemically synthesized
ttggtccccaggctaatcct

SEQ ID NO: 3556 - DNA, 20 bp, Artificial Sequence
  chemically synthesized
tggtccccaggctaatcctt

SEQ ID NO: 3557 - DNA, 20 bp, Artificial Sequence
  chemically synthesized
cccaggctaatccttaggct

SEQ ID NO: 3558 - DNA, 20 bp, Artificial Sequence
  chemically synthesized
caggctaatccttaggctta

SEQ ID NO: 3559 - DNA, 20 bp, Artificial Sequence
  chemically synthesized
ggctaatccttaggcttaga

SEQ ID NO: 3560 - DNA, 20 bp, Artificial Sequence
  chemically synthesized
aatccttaggcttagagagt

SEQ ID NO: 3561 - DNA, 20 bp, Artificial Sequence
  chemically synthesized
ttagagagtgagcctgatga

SEQ ID NO: 3562 - DNA, 20 bp, Artificial Sequence
  chemically synthesized
gatgatggatttcaacctcc

SEQ ID NO: 3563 - DNA, 20 bp, Artificial Sequence
  chemically synthesized
atgatggatttcaacctcct

SEQ ID NO: 3564 - DNA, 20 bp, Artificial Sequence
  chemically synthesized
gatttcaacctcctgggaca

SEQ ID NO: 3565 - DNA, 20 bp, Artificial Sequence
  chemically synthesized
tcctgggacacagtcttgca

SEQ ID NO: 3566 - DNA, 20 bp, Artificial Sequence
  chemically synthesized
cttgcaaagtttacatgtct

SEQ ID NO: 3567 - DNA, 20 bp, Artificial Sequence
  chemically synthesized
agtttacatgtctgagcttc

SEQ ID NO: 3568 - DNA, 20 bp, Artificial Sequence
  chemically synthesized
gtttacatgtctgagcttca

SEQ ID NO: 3569 - DNA, 20 bp, Artificial Sequence
  chemically synthesized
ttacatgtctgagcttcaag

SEQ ID NO: 3570 - DNA, 20 bp, Artificial Sequence
  chemically synthesized
tacatgtctgagcttcaagg

SEQ ID NO: 3571 - DNA, 20 bp, Artificial Sequence
  chemically synthesized
tgagcttcaaggaggaaacc

SEQ ID NO: 3572 - DNA, 20 bp, Artificial Sequence
  chemically synthesized
gagcttcaaggaggaaacct

SEQ ID NO: 3573 - DNA, 20 bp, Artificial Sequence
  chemically synthesized
aggaaacctaggtgtgtcct

SEQ ID NO: 3574 - DNA, 20 bp, Artificial Sequence
  chemically synthesized
taggtgtgtcctgagccaat

SEQ ID NO: 3575 - DNA, 20 bp, Artificial Sequence
  chemically synthesized
gtcctgagccaatgagactg

SEQ ID NO: 3576 - DNA, 20 bp, Artificial Sequence
  chemically synthesized
tcctgagccaatgagactga

SEQ ID NO: 3577 - DNA, 20 bp, Artificial Sequence
  chemically synthesized
gagccaatgagactgaaggt

SEQ ID NO: 3578 - DNA, 20 bp, Artificial Sequence
  chemically synthesized
gccaatgagactgaaggtca

SEQ ID NO: 3579 - DNA, 20 bp, Artificial Sequence
  chemically synthesized
gagactgaaggtcagagaac

SEQ ID NO: 3580 - DNA, 20 bp, Artificial Sequence
  chemically synthesized
agactgaaggtcagagaacc

SEQ ID NO: 3581 - DNA, 20 bp, Artificial Sequence
  chemically synthesized
ctgaaggtcagagaaccagg

SEQ ID NO: 3582 - DNA, 20 bp, Artificial Sequence
  chemically synthesized
ggaagaaacttccccaaacc

SEQ ID NO: 3583 - DNA, 20 bp, Artificial Sequence
  chemically synthesized
gaagaaacttccccaaaccc

SEQ ID NO: 3584 - DNA, 20 bp, Artificial Sequence
  chemically synthesized
ccaaacccaggctaaatgtc

SEQ ID NO: 3585 - DNA, 20 bp, Artificial Sequence
  chemically synthesized
caaacccaggctaaatgtca

SEQ ID NO: 3586 - DNA, 20 bp, Artificial Sequence
  chemically synthesized
aaacccaggctaaatgtcaa

SEQ ID NO: 3587 - DNA, 20 bp, Artificial Sequence
  chemically synthesized
caggctaaatgtcaagggaa

SEQ ID NO: 3588 - DNA, 20 bp, Artificial Sequence
  chemically synthesized
aggctaaatgtcaagggaaa

SEQ ID NO: 3589 - DNA, 20 bp, Artificial Sequence
  chemically synthesized
aatgtcaagggaaaaggtct

SEQ ID NO: 3590 - DNA, 20 bp, Artificial Sequence
  chemically synthesized
gtcaagggaaaaggtctcag

SEQ ID NO: 3591 - DNA, 20 bp, Artificial Sequence
  chemically synthesized
aaggtctcagtggctcatgc

SEQ ID NO: 3592 - DNA, 20 bp, Artificial Sequence
  chemically synthesized
gtctcagtggctcatgccag

SEQ ID NO: 3593 - DNA, 20 bp, Artificial Sequence
  chemically synthesized
agtggctcatgccagaagtc

SEQ ID NO: 3594 - DNA, 20 bp, Artificial Sequence
  chemically synthesized
ggctcatgccagaagtccag

SEQ ID NO: 3595 - DNA, 20 bp, Artificial Sequence
  chemically synthesized
atgccagaagtccagtagca

SEQ ID NO: 3596 - DNA, 20 bp, Artificial Sequence
  chemically synthesized
agaagtccagtagcaaagct

SEQ ID NO: 3597 - DNA, 20 bp, Artificial Sequence
  chemically synthesized
agcaaagctcggcctcatgc

SEQ ID NO: 3598 - DNA, 20 bp, Artificial Sequence
  chemically synthesized
caaagctcggcctcatgcca

SEQ ID NO: 3599 - DNA, 20 bp, Artificial Sequence
  chemically synthesized
ctcggcctcatgccagagcc

SEQ ID NO: 3600 - DNA, 20 bp, Artificial Sequence
  chemically synthesized
cctggcacccattgctcaca

SEQ ID NO: 3601 - DNA, 20 bp, Artificial Sequence
  chemically synthesized
ctggcacccattgctcacaa

SEQ ID NO: 3602 - DNA, 20 bp, Artificial Sequence
  chemically synthesized
attgctcacaaaggcacaca

SEQ ID NO: 3603 - DNA, 20 bp, Artificial Sequence
  chemically synthesized
ttgctcacaaaggcacacac

SEQ ID NO: 3604 - DNA, 20 bp, Artificial Sequence
  chemically synthesized
aaaggcacacacaggactct

SEQ ID NO: 3605 - DNA, 20 bp, Artificial Sequence
  chemically synthesized
cacacacaggactctaagaa

SEQ ID NO: 3606 - DNA, 20 bp, Artificial Sequence
  chemically synthesized
acacacaggactctaagaaa

SEQ ID NO: 3607 - DNA, 20 bp, Artificial Sequence
  chemically synthesized
cacacaggactctaagaaaa

SEQ ID NO: 3608 - DNA, 20 bp, Artificial Sequence
  chemically synthesized
cacaggactctaagaaaagg

SEQ ID NO: 3609 - DNA, 20 bp, Artificial Sequence
  chemically synthesized
agaaaagggagtcctctccc

SEQ ID NO: 3610 - DNA, 20 bp, Artificial Sequence
  chemically synthesized
tctccccagccaccacaaac

SEQ ID NO: 3611 - DNA, 20 bp, Artificial Sequence
  chemically synthesized
ctccccagccaccacaaacc

SEQ ID NO: 3612 - DNA, 20 bp, Artificial Sequence
  chemically synthesized
ccagccaccacaaaccagga

SEQ ID NO: 3613 - DNA, 20 bp, Artificial Sequence
  chemically synthesized
caccacaaaccaggacagca

SEQ ID NO: 3614 - DNA, 20 bp, Artificial Sequence
  chemically synthesized
caaaccaggacagcaaagcc

SEQ ID NO: 3615 - DNA, 20 bp, Artificial Sequence
  chemically synthesized
cagcaaagcccagcaccctg

SEQ ID NO: 3616 - DNA, 20 bp, Artificial Sequence
  chemically synthesized
gacctcccaccacaccccat

SEQ ID NO: 3617 - DNA, 20 bp, Artificial Sequence
  chemically synthesized
cccaccacaccccatcagca

SEQ ID NO: 3618 - DNA, 20 bp, Artificial Sequence
  chemically synthesized
caccacaccccatcagcatg

SEQ ID NO: 3619 - DNA, 20 bp, Artificial Sequence
  chemically synthesized
accacaccccatcagcatgg

SEQ ID NO: 3620 - DNA, 20 bp, Artificial Sequence
  chemically synthesized
ccacaccccatcagcatgga

SEQ ID NO: 3621 - DNA, 20 bp, Artificial Sequence
  chemically synthesized
ccatcagcatggagggttct

SEQ ID NO: 3622 - DNA, 20 bp, Artificial Sequence
  chemically synthesized
cagcatggagggttcttgga

SEQ ID NO: 3623 - DNA, 20 bp, Artificial Sequence
  chemically synthesized
tttgctaaccaacataattt

SEQ ID NO: 3624 - DNA, 20 bp, Artificial Sequence
  chemically synthesized
tgctaaccaacataatttca

SEQ ID NO: 3625 - DNA, 20 bp, Artificial Sequence
  chemically synthesized
gagatgtttcgtcacccttc

SEQ ID NO: 3626 - DNA, 20 bp, Artificial Sequence
  chemically synthesized
agatgtttcgtcacccttcc

SEQ ID NO: 3627 - DNA, 20 bp, Artificial Sequence
  chemically synthesized
cttccaggctcattgaaaat

SEQ ID NO: 3628 - DNA, 20 bp, Artificial Sequence
  chemically synthesized
ccaggctcattgaaaattgg

SEQ ID NO: 3629 - DNA, 20 bp, Artificial Sequence
  chemically synthesized
caggctcattgaaaattggc

SEQ ID NO: 3630 - DNA, 20 bp, Artificial Sequence
  chemically synthesized
aggctcattgaaaattggca

SEQ ID NO: 3631 - DNA, 20 bp, Artificial Sequence
  chemically synthesized
cttctaacattttacctttt

SEQ ID NO: 3632 - DNA, 20 bp, Artificial Sequence
  chemically synthesized
cccccaatatcctctctgtc

SEQ ID NO: 3633 - DNA, 20 bp, Artificial Sequence
  chemically synthesized
ccaatatcctctctgtcaag

SEQ ID NO: 3634 - DNA, 20 bp, Artificial Sequence
  chemically synthesized
gtaaacaaacactttaaatt

SEQ ID NO: 3635 - DNA, 20 bp, Artificial Sequence
  chemically synthesized
aacaaacactttaaattcag

SEQ ID NO: 3636 - DNA, 20 bp, Artificial Sequence
  chemically synthesized
acaaacactttaaattcagt

SEQ ID NO: 3637 - DNA, 20 bp, Artificial Sequence
  chemically synthesized
caaacactttaaattcagtg

SEQ ID NO: 3638 - DNA, 20 bp, Artificial Sequence
  chemically synthesized
aaacactttaaattcagtgg

SEQ ID NO: 3639 - DNA, 20 bp, Artificial Sequence
  chemically synthesized
acactttaaattcagtgggg

SEQ ID NO: 3640 - DNA, 20 bp, Artificial Sequence
  chemically synthesized
gtgggggagctcactattta

SEQ ID NO: 3641 - DNA, 20 bp, Artificial Sequence
  chemically synthesized
cactatttaaagaaaccctg

SEQ ID NO: 3642 - DNA, 20 bp, Artificial Sequence
  chemically synthesized
ctgtggtgaaaccttttgaa

SEQ ID NO: 3643 - DNA, 20 bp, Artificial Sequence
  chemically synthesized
aaaatcactctctaatttat

SEQ ID NO: 3644 - DNA, 20 bp, Artificial Sequence
  chemically synthesized
atttatcagtttccattaat

SEQ ID NO: 3645 - DNA, 20 bp, Artificial Sequence
  chemically synthesized
aatgagatttttgtgtgtat

SEQ ID NO: 3646 - DNA, 20 bp, Artificial Sequence
  chemically synthesized
atgagatttttgtgtgtatt

SEQ ID NO: 3647 - DNA, 20 bp, Artificial Sequence
  chemically synthesized
gtgtgtattgggccttctga

SEQ ID NO: 3648 - DNA, 20 bp, Artificial Sequence
  chemically synthesized
tgtattgggccttctgaaag

SEQ ID NO: 3649 - DNA, 20 bp, Artificial Sequence
  chemically synthesized
gtattgggccttctgaaagt

SEQ ID NO: 3650 - DNA, 20 bp, Artificial Sequence
  chemically synthesized
tattgggccttctgaaagtg

SEQ ID NO: 3651 - DNA, 20 bp, Artificial Sequence
  chemically synthesized
aactgcaatccatgcctttg

SEQ ID NO: 3652 - DNA, 20 bp, Artificial Sequence
  chemically synthesized
gcaatccatgcctttgtagt

SEQ ID NO: 3653 - DNA, 20 bp, Artificial Sequence
  chemically synthesized
atccatgcctttgtagttag

SEQ ID NO: 3654 - DNA, 20 bp, Artificial Sequence
  chemically synthesized
tccatgcctttgtagttaga

SEQ ID NO: 3655 - DNA, 20 bp, Artificial Sequence
  chemically synthesized
ccatgcctttgtagttagaa

SEQ ID NO: 3656 - DNA, 20 bp, Artificial Sequence
  chemically synthesized
gtagttagaagggacgataa

SEQ ID NO: 3657 - DNA, 20 bp, Artificial Sequence
  chemically synthesized
tttctgtcacccgaattgtc

SEQ ID NO: 3658 - DNA, 20 bp, Artificial Sequence
  chemically synthesized
gatgcctccctgccccactc

SEQ ID NO: 3659 - DNA, 20 bp, Artificial Sequence
  chemically synthesized
cctgccccactcgagaaatg

SEQ ID NO: 3660 - DNA, 20 bp, Artificial Sequence
  chemically synthesized
cccactcgagaaatgaagaa

SEQ ID NO: 3661 - DNA, 20 bp, Artificial Sequence
  chemically synthesized
ccactcgagaaatgaagaaa

SEQ ID NO: 3662 - DNA, 20 bp, Artificial Sequence
  chemically synthesized
tcgagaaatgaagaaaagga

SEQ ID NO: 3663 - DNA, 20 bp, Artificial Sequence
  chemically synthesized
cgagaaatgaagaaaaggat

SEQ ID NO: 3664 - DNA, 20 bp, Artificial Sequence
  chemically synthesized
aaggatgggaaatcatcatt

SEQ ID NO: 3665 - DNA, 20 bp, Artificial Sequence
  chemically synthesized
gaaatcatcatttggacacc

SEQ ID NO: 3666 - DNA, 20 bp, Artificial Sequence
  chemically synthesized
tcatcatttggacacctgga

SEQ ID NO: 3667 - DNA, 20 bp, Artificial Sequence
  chemically synthesized
aaccacacttgcgtttctcc

SEQ ID NO: 3668 - DNA, 20 bp, Artificial Sequence
  chemically synthesized
accacacttgcgtttctccc

SEQ ID NO: 3669 - DNA, 20 bp, Artificial Sequence
  chemically synthesized
acttgcgtttctcccaggtt

SEQ ID NO: 3670 - DNA, 20 bp, Artificial Sequence
  chemically synthesized
gtttctcccaggttaagtat

SEQ ID NO: 3671 - DNA, 20 bp, Artificial Sequence
  chemically synthesized
aggttaagtattagatacct

SEQ ID NO: 3672 - DNA, 20 bp, Artificial Sequence
  chemically synthesized
ggttaagtattagatacctg

SEQ ID NO: 3673 - DNA, 20 bp, Artificial Sequence
  chemically synthesized
taagtattagatacctgagg

SEQ ID NO: 3674 - DNA, 20 bp, Artificial Sequence
  chemically synthesized
aagtattagatacctgagga

SEQ ID NO: 3675 - DNA, 20 bp, Artificial Sequence
  chemically synthesized
tgaaatacgcattttcaact

SEQ ID NO: 3676 - DNA, 20 bp, Artificial Sequence
  chemically synthesized
cgcattttcaactgagcatt

SEQ ID NO: 3677 - DNA, 20 bp, Artificial Sequence
  chemically synthesized
gcattttcaactgagcattc

SEQ ID NO: 3678 - DNA, 20 bp, Artificial Sequence
  chemically synthesized
ttttcaactgagcattcagg

SEQ ID NO: 3679 - DNA, 20 bp, Artificial Sequence
  chemically synthesized
ttcaactgagcattcaggaa

SEQ ID NO: 3680 - DNA, 20 bp, Artificial Sequence
  chemically synthesized
tcaactgagcattcaggaag

SEQ ID NO: 3681 - DNA, 20 bp, Artificial Sequence
  chemically synthesized
tgagcattcaggaagaggca

SEQ ID NO: 3682 - DNA, 20 bp, Artificial Sequence
  chemically synthesized
gagcattcaggaagaggcat

SEQ ID NO: 3683 - DNA, 20 bp, Artificial Sequence
  chemically synthesized
agcattcaggaagaggcatg

SEQ ID NO: 3684 - DNA, 20 bp, Artificial Sequence
  chemically synthesized
ggaagaggcatggggctgtg

SEQ ID NO: 3685 - DNA, 20 bp, Artificial Sequence
  chemically synthesized
gaggcatggggctgtgaaga

SEQ ID NO: 3686 - DNA, 20 bp, Artificial Sequence
  chemically synthesized
gctgtgaagatggatgcgat

SEQ ID NO: 3687 - DNA, 20 bp, Artificial Sequence
  chemically synthesized
ttgattctgataacacctgc

SEQ ID NO: 3688 - DNA, 20 bp, Artificial Sequence
  chemically synthesized
gattctgataacacctgcca

SEQ ID NO: 3689 - DNA, 20 bp, Artificial Sequence
  chemically synthesized
tctgataacacctgccagag

SEQ ID NO: 3690 - DNA, 20 bp, Artificial Sequence
  chemically synthesized
tgataacacctgccagagca

SEQ ID NO: 3691 - DNA, 20 bp, Artificial Sequence
  chemically synthesized
taacacctgccagagcagag

SEQ ID NO: 3692 - DNA, 20 bp, Artificial Sequence
  chemically synthesized
aacacctgccagagcagaga

SEQ ID NO: 3693 - DNA, 20 bp, Artificial Sequence
  chemically synthesized
acacctgccagagcagagaa

SEQ ID NO: 3694 - DNA, 20 bp, Artificial Sequence
  chemically synthesized
agagaagggcttgtctatca

SEQ ID NO: 3695 - DNA, 20 bp, Artificial Sequence
  chemically synthesized
aagggcttgtctatcaaagc

SEQ ID NO: 3696 - DNA, 20 bp, Artificial Sequence
  chemically synthesized
ggcttgtctatcaaagccag

SEQ ID NO: 3697 - DNA, 20 bp, Artificial Sequence
  chemically synthesized
acaactcccaaattactctg

SEQ ID NO: 3698 - DNA, 20 bp, Artificial Sequence
  chemically synthesized
attactctgaagaccacccc

SEQ ID NO: 3699 - DNA, 20 bp, Artificial Sequence
  chemically synthesized
ctctatattatcatttcgat

SEQ ID NO: 3700 - DNA, 20 bp, Artificial Sequence
  chemically synthesized
ttatcatttcgatcggtctt

SEQ ID NO: 3701 - DNA, 20 bp, Artificial Sequence
  chemically synthesized
gatcggtcttgagaaaatac

SEQ ID NO: 3702 - DNA, 20 bp, Artificial Sequence
  chemically synthesized
tcttgagaaaatactagaat

SEQ ID NO: 3703 - DNA, 20 bp, Artificial Sequence
  chemically synthesized
gaaaatactagaataagcta

SEQ ID NO: 3704 - DNA, 20 bp, Artificial Sequence
  chemically synthesized
aagctaaagaaaaccaaaca

SEQ ID NO: 3705 - DNA, 20 bp, Artificial Sequence
  chemically synthesized
agctaaagaaaaccaaacat

SEQ ID NO: 3706 - DNA, 20 bp, Artificial Sequence
  chemically synthesized
taaagaaaaccaaacatggg

SEQ ID NO: 3707 - DNA, 20 bp, Artificial Sequence
  chemically synthesized
aagaaaaccaaacatgggtg

SEQ ID NO: 3708 - DNA, 20 bp, Artificial Sequence
  chemically synthesized
agaaaaccaaacatgggtgg

SEQ ID NO: 3709 - DNA, 20 bp, Artificial Sequence
  chemically synthesized
gaaaaccaaacatgggtgga

SEQ ID NO: 3710 - DNA, 20 bp, Artificial Sequence
  chemically synthesized
aaaaccaaacatgggtggag

SEQ ID NO: 3711 - DNA, 20 bp, Artificial Sequence
  chemically synthesized
ccaaacatgggtggaggggc

SEQ ID NO: 3712 - DNA, 20 bp, Artificial Sequence
  chemically synthesized
caaacatgggtggaggggca

SEQ ID NO: 3713 - DNA, 20 bp, Artificial Sequence
  chemically synthesized
aaacatgggtggaggggcaa

SEQ ID NO: 3714 - DNA, 20 bp, Artificial Sequence
  chemically synthesized
aacatgggtggaggggcaag

SEQ ID NO: 3715 - DNA, 20 bp, Artificial Sequence
  chemically synthesized
catgggtggaggggcaaggg

SEQ ID NO: 3716 - DNA, 20 bp, Artificial Sequence
  chemically synthesized
atgggtggaggggcaagggg

SEQ ID NO: 3717 - DNA, 20 bp, Artificial Sequence
  chemically synthesized
tgggtggaggggcaagggga

SEQ ID NO: 3718 - DNA, 20 bp, Artificial Sequence
  chemically synthesized
tggaggggcaaggggaggga

SEQ ID NO: 3719 - DNA, 20 bp, Artificial Sequence
  chemically synthesized
ggcaaggggagggatagcat

SEQ ID NO: 3720 - DNA, 20 bp, Artificial Sequence
  chemically synthesized
gcaaggggagggatagcatt

SEQ ID NO: 3721 - DNA, 20 bp, Artificial Sequence
  chemically synthesized
aaggggagggatagcattag

SEQ ID NO: 3722 - DNA, 20 bp, Artificial Sequence
  chemically synthesized
attaggagaaatgcctaatg

SEQ ID NO: 3723 - DNA, 20 bp, Artificial Sequence
  chemically synthesized
gaaatgcctaatgtagatga

SEQ ID NO: 3724 - DNA, 20 bp, Artificial Sequence
  chemically synthesized
aaatgcctaatgtagatgat

SEQ ID NO: 3725 - DNA, 20 bp, Artificial Sequence
  chemically synthesized
taatgtagatgatgggttga

SEQ ID NO: 3726 - DNA, 20 bp, Artificial Sequence
  chemically synthesized
aatgtagatgatgggttgat

SEQ ID NO: 3727 - DNA, 20 bp, Artificial Sequence
  chemically synthesized
agatgatgggttgataggtg

SEQ ID NO: 3728 - DNA, 20 bp, Artificial Sequence
  chemically synthesized
ataggtgcagcaaaccacca

SEQ ID NO: 3729 - DNA, 20 bp, Artificial Sequence
  chemically synthesized
cacattctgcacatgtatcc

SEQ ID NO: 3730 - DNA, 20 bp, Artificial Sequence
  chemically synthesized
tgcacatgtatcccagaact

SEQ ID NO: 3731 - DNA, 20 bp, Artificial Sequence
  chemically synthesized
cacatgtatcccagaactta

SEQ ID NO: 3732 - DNA, 20 bp, Artificial Sequence
  chemically synthesized
aacttagagtaaaataaata

SEQ ID NO: 3733 - DNA, 20 bp, Artificial Sequence
  chemically synthesized
tagagtaaaataaataaaga

SEQ ID NO: 3734 - DNA, 20 bp, Artificial Sequence
  chemically synthesized
gtaaaataaataaagaaaga

SEQ ID NO: 3735 - DNA, 20 bp, Artificial Sequence
  chemically synthesized
aataaataaagaaagaaaga

SEQ ID NO: 3736 - DNA, 20 bp, Artificial Sequence
  chemically synthesized
aataaagaaagaaagaaaga

SEQ ID NO: 3737 - DNA, 20 bp, Artificial Sequence
  chemically synthesized
aagaaagaaataatcaaaca

SEQ ID NO: 3738 - DNA, 20 bp, Artificial Sequence
  chemically synthesized
taatcaaacatggtgtttcc

SEQ ID NO: 3739 - DNA, 20 bp, Artificial Sequence
  chemically synthesized
atcaaacatggtgtttccaa

SEQ ID NO: 3740 - DNA, 20 bp, Artificial Sequence
  chemically synthesized
gactcctgatgttttgttcg

SEQ ID NO: 3741 - DNA, 20 bp, Artificial Sequence
  chemically synthesized
actcctgatgttttgttcgt

SEQ ID NO: 3742 - DNA, 20 bp, Artificial Sequence
  chemically synthesized
tgttttgttcgtgggcactg

SEQ ID NO: 3743 - DNA, 20 bp, Artificial Sequence
  chemically synthesized
gttcgtgggcactgtggaaa

SEQ ID NO: 3744 - DNA, 20 bp, Artificial Sequence
  chemically synthesized
ttcgtgggcactgtggaaac

SEQ ID NO: 3745 - DNA, 20 bp, Artificial Sequence
  chemically synthesized
tcgtgggcactgtggaaaca

SEQ ID NO: 3746 - DNA, 20 bp, Artificial Sequence
  chemically synthesized
cgtgggcactgtggaaacag

SEQ ID NO: 3747 - DNA, 20 bp, Artificial Sequence
  chemically synthesized
gggcactgtggaaacagggg

SEQ ID NO: 3748 - DNA, 20 bp, Artificial Sequence
  chemically synthesized
cactgtggaaacaggggcag

SEQ ID NO: 3749 - DNA, 20 bp, Artificial Sequence
  chemically synthesized
aacaggggcagtggtgctgt

SEQ ID NO: 3750 - DNA, 20 bp, Artificial Sequence
  chemically synthesized
caggggcagtggtgctgtga

SEQ ID NO: 3751 - DNA, 20 bp, Artificial Sequence
  chemically synthesized
gcagtggtgctgtgagagac

SEQ ID NO: 3752 - DNA, 20 bp, Artificial Sequence
  chemically synthesized
cagtggtgctgtgagagaca

SEQ ID NO: 3753 - DNA, 20 bp, Artificial Sequence
  chemically synthesized
agtggtgctgtgagagacaa

SEQ ID NO: 3754 - DNA, 20 bp, Artificial Sequence
  chemically synthesized
tggtgctgtgagagacaagg

SEQ ID NO: 3755 - DNA, 20 bp, Artificial Sequence
  chemically synthesized
tgctgtgagagacaagggag

SEQ ID NO: 3756 - DNA, 20 bp, Artificial Sequence
  chemically synthesized
gctgtgagagacaagggagt

SEQ ID NO: 3757 - DNA, 20 bp, Artificial Sequence
  chemically synthesized
ctgtgagagacaagggagtg

SEQ ID NO: 3758 - DNA, 20 bp, Artificial Sequence
  chemically synthesized
gtgagagacaagggagtggg

SEQ ID NO: 3759 - DNA, 20 bp, Artificial Sequence
  chemically synthesized
gacaagggagtggggagcca

SEQ ID NO: 3760 - DNA, 20 bp, Artificial Sequence
  chemically synthesized
agggagtggggagccatggt

SEQ ID NO: 3761 - DNA, 20 bp, Artificial Sequence
  chemically synthesized
agtggggagccatggtcagc

SEQ ID NO: 3762 - DNA, 20 bp, Artificial Sequence
  chemically synthesized
ggagccatggtcagcaagtg

SEQ ID NO: 3763 - DNA, 20 bp, Artificial Sequence
  chemically synthesized
gagccatggtcagcaagtgt

SEQ ID NO: 3764 - DNA, 20 bp, Artificial Sequence
  chemically synthesized
ccatggtcagcaagtgtggg

SEQ ID NO: 3765 - DNA, 20 bp, Artificial Sequence
  chemically synthesized
tcagcaagtgtgggcagccc

SEQ ID NO: 3766 - DNA, 20 bp, Artificial Sequence
  chemically synthesized
gggcagccccagcgacactg

SEQ ID NO: 3767 - DNA, 20 bp, Artificial Sequence
  chemically synthesized
gccccagcgacactgcagcc

SEQ ID NO: 3768 - DNA, 20 bp, Artificial Sequence
  chemically synthesized
cagcgacactgcagcccggc

SEQ ID NO: 3769 - DNA, 20 bp, Artificial Sequence
  chemically synthesized
agcgacactgcagcccggcc

SEQ ID NO: 3770 - DNA, 20 bp, Artificial Sequence
  chemically synthesized
gacactgcagcccggccagg

SEQ ID NO: 3771 - DNA, 20 bp, Artificial Sequence
  chemically synthesized
cactgcagcccggccaggtg

SEQ ID NO: 3772 - DNA, 20 bp, Artificial Sequence
  chemically synthesized
actgcagcccggccaggtgg

SEQ ID NO: 3773 - DNA, 20 bp, Artificial Sequence
  chemically synthesized
ctgcagcccggccaggtgga

SEQ ID NO: 3774 - DNA, 20 bp, Artificial Sequence
  chemically synthesized
gctttcctgacttatcatcc

SEQ ID NO: 3775 - DNA, 20 bp, Artificial Sequence
  chemically synthesized
cctgacttatcatccaagac

SEQ ID NO: 3776 - DNA, 20 bp, Artificial Sequence
  chemically synthesized
atccaagactggtctgtgca

SEQ ID NO: 3777 - DNA, 20 bp, Artificial Sequence
  chemically synthesized
ccaagactggtctgtgcacg

SEQ ID NO: 3778 - DNA, 20 bp, Artificial Sequence
  chemically synthesized
agactggtctgtgcacggag

SEQ ID NO: 3779 - DNA, 20 bp, Artificial Sequence
  chemically synthesized
gactggtctgtgcacggaga

SEQ ID NO: 3780 - DNA, 20 bp, Artificial Sequence
  chemically synthesized
actggtctgtgcacggagaa

SEQ ID NO: 3781 - DNA, 20 bp, Artificial Sequence
  chemically synthesized
ctggtctgtgcacggagaag

SEQ ID NO: 3782 - DNA, 20 bp, Artificial Sequence
  chemically synthesized
tctgtgcacggagaaggggc

SEQ ID NO: 3783 - DNA, 20 bp, Artificial Sequence
  chemically synthesized
gtgcacggagaaggggccag

SEQ ID NO: 3784 - DNA, 20 bp, Artificial Sequence
  chemically synthesized
cggagaaggggccagaagaa

SEQ ID NO: 3785 - DNA, 20 bp, Artificial Sequence
  chemically synthesized
ggagaaggggccagaagaac

SEQ ID NO: 3786 - DNA, 20 bp, Artificial Sequence
  chemically synthesized
gaaggggccagaagaacagg

SEQ ID NO: 3787 - DNA, 20 bp, Artificial Sequence
  chemically synthesized
gccagaagaacaggcagccc

SEQ ID NO: 3788 - DNA, 20 bp, Artificial Sequence
  chemically synthesized
ccagaagaacaggcagcccc

SEQ ID NO: 3789 - DNA, 20 bp, Artificial Sequence
  chemically synthesized
gaagaacaggcagccccagg

SEQ ID NO: 3790 - DNA, 20 bp, Artificial Sequence
  chemically synthesized
aagaacaggcagccccagga

SEQ ID NO: 3791 - DNA, 20 bp, Artificial Sequence
  chemically synthesized
cagccccaggaaggctctgt

SEQ ID NO: 3792 - DNA, 20 bp, Artificial Sequence
  chemically synthesized
agccccaggaaggctctgtc

SEQ ID NO: 3793 - DNA, 20 bp, Artificial Sequence
  chemically synthesized
ggctctgtcaggcctccccc

SEQ ID NO: 3794 - DNA, 20 bp, Artificial Sequence
  chemically synthesized
gctctgtcaggcctccccca

SEQ ID NO: 3795 - DNA, 20 bp, Artificial Sequence
  chemically synthesized
aggcctcccccaaggccaac

SEQ ID NO: 3796 - DNA, 20 bp, Artificial Sequence
  chemically synthesized
tcccccaaggccaacaagcc

SEQ ID NO: 3797 - DNA, 20 bp, Artificial Sequence
  chemically synthesized
ccccaaggccaacaagccca

SEQ ID NO: 3798 - DNA, 20 bp, Artificial Sequence
  chemically synthesized
cccaaggccaacaagcccag

SEQ ID NO: 3799 - DNA, 20 bp, Artificial Sequence
  chemically synthesized
caaggccaacaagcccagag

SEQ ID NO: 3800 - DNA, 20 bp, Artificial Sequence
  chemically synthesized
aaggccaacaagcccagagg

SEQ ID NO: 3801 - DNA, 20 bp, Artificial Sequence
  chemically synthesized
aggccaacaagcccagagga

SEQ ID NO: 3802 - DNA, 20 bp, Artificial Sequence
  chemically synthesized
caacaagcccagaggagggc

SEQ ID NO: 3803 - DNA, 20 bp, Artificial Sequence
  chemically synthesized
aacaagcccagaggagggca

SEQ ID NO: 3804 - DNA, 20 bp, Artificial Sequence
  chemically synthesized
gagggcaaggcctccaactc

SEQ ID NO: 3805 - DNA, 20 bp, Artificial Sequence
  chemically synthesized
ctccaactctagcccttctt

SEQ ID NO: 3806 - DNA, 20 bp, Artificial Sequence
  chemically synthesized
tccaactctagcccttctta

SEQ ID NO: 3807 - DNA, 20 bp, Artificial Sequence
  chemically synthesized
aactctagcccttcttaagg

SEQ ID NO: 3808 - DNA, 20 bp, Artificial Sequence
  chemically synthesized
ttaaggaagcacatctgtcc

SEQ ID NO: 3809 - DNA, 20 bp, Artificial Sequence
  chemically synthesized
cacatctgtcctggccttta

SEQ ID NO: 3810 - DNA, 20 bp, Artificial Sequence
  chemically synthesized
tctgtcctggcctttatgga

SEQ ID NO: 3811 - DNA, 20 bp, Artificial Sequence
  chemically synthesized
ttttttttttttttttaatt

SEQ ID NO: 3812 - DNA, 20 bp, Artificial Sequence
  chemically synthesized
ttttttttttaattgagaca

SEQ ID NO: 3813 - DNA, 20 bp, Artificial Sequence
  chemically synthesized
catggtctcactctgttgcc

SEQ ID NO: 3814 - DNA, 20 bp, Artificial Sequence
  chemically synthesized
atggtctcactctgttgccc

SEQ ID NO: 3815 - DNA, 20 bp, Artificial Sequence
  chemically synthesized
tctcactctgttgcccaggc

SEQ ID NO: 3816 - DNA, 20 bp, Artificial Sequence
  chemically synthesized
tcactctgttgcccaggctg

SEQ ID NO: 3817 - DNA, 20 bp, Artificial Sequence
  chemically synthesized
ctgttgcccaggctggagtg

SEQ ID NO: 3818 - DNA, 20 bp, Artificial Sequence
  chemically synthesized
ttgcccaggctggagtgcag

SEQ ID NO: 3819 - DNA, 20 bp, Artificial Sequence
  chemically synthesized
ggagtgcagtggtgcaatct

SEQ ID NO: 3820 - DNA, 20 bp, Artificial Sequence
  chemically synthesized
cactgcaacctccgcctccc

SEQ ID NO: 3821 - DNA, 20 bp, Artificial Sequence
  chemically synthesized
aacctccgcctcccgagttc

SEQ ID NO: 3822 - DNA, 20 bp, Artificial Sequence
  chemically synthesized
ctccgcctcccgagttcaag

SEQ ID NO: 3823 - DNA, 20 bp, Artificial Sequence
  chemically synthesized
ttcaagcagtcctcctgcct

SEQ ID NO: 3824 - DNA, 20 bp, Artificial Sequence
  chemically synthesized
gtcctcctgcctcagctctc

SEQ ID NO: 3825 - DNA, 20 bp, Artificial Sequence
  chemically synthesized
ctcctgcctcagctctcaag

SEQ ID NO: 3826 - DNA, 20 bp, Artificial Sequence
  chemically synthesized
tgcctcagctctcaagtagc

SEQ ID NO: 3827 - DNA, 20 bp, Artificial Sequence
  chemically synthesized
gcctcagctctcaagtagct

SEQ ID NO: 3828 - DNA, 20 bp, Artificial Sequence
  chemically synthesized
ctctcaagtagctaggacta

SEQ ID NO: 3829 - DNA, 20 bp, Artificial Sequence
  chemically synthesized
tctcaagtagctaggactac

SEQ ID NO: 3830 - DNA, 20 bp, Artificial Sequence
  chemically synthesized
gcatgcgccaccaccacacc

SEQ ID NO: 3831 - DNA, 20 bp, Artificial Sequence
  chemically synthesized
gctaatttttgtattttttg

SEQ ID NO: 3832 - DNA, 20 bp, Artificial Sequence
  chemically synthesized
taatttttgtattttttgta

SEQ ID NO: 3833 - DNA, 20 bp, Artificial Sequence
  chemically synthesized
ttttgtattttttgtagaga

SEQ ID NO: 3834 - DNA, 20 bp, Artificial Sequence
  chemically synthesized
tttgtattttttgtagagat

SEQ ID NO: 3835 - DNA, 20 bp, Artificial Sequence
  chemically synthesized
tgggatctcaccatgttgcc

SEQ ID NO: 3836 - DNA, 20 bp, Artificial Sequence
  chemically synthesized
gggatctcaccatgttgccc

SEQ ID NO: 3837 - DNA, 20 bp, Artificial Sequence
  chemically synthesized
tctcaccatgttgcccaggc

SEQ ID NO: 3838 - DNA, 20 bp, Artificial Sequence
  chemically synthesized
ctcaccatgttgcccaggct

SEQ ID NO: 3839 - DNA, 20 bp, Artificial Sequence
  chemically synthesized
accatgttgcccaggctggg

SEQ ID NO: 3840 - DNA, 20 bp, Artificial Sequence
  chemically synthesized
tgttgcccaggctgggtgga

SEQ ID NO: 3841 - DNA, 20 bp, Artificial Sequence
  chemically synthesized
aaagtgttatgttcttccca

SEQ ID NO: 3842 - DNA, 20 bp, Artificial Sequence
  chemically synthesized
ctcctcacatcctgccccaa

SEQ ID NO: 3843 - DNA, 20 bp, Artificial Sequence
  chemically synthesized
ctgccccaacagtcgccctg

SEQ ID NO: 3844 - DNA, 20 bp, Artificial Sequence
  chemically synthesized
caacagtcgccctgtggaat

SEQ ID NO: 3845 - DNA, 20 bp, Artificial Sequence
  chemically synthesized
aacagtcgccctgtggaatg

SEQ ID NO: 3846 - DNA, 20 bp, Artificial Sequence
  chemically synthesized
acagtcgccctgtggaatga

SEQ ID NO: 3847 - DNA, 20 bp, Artificial Sequence
  chemically synthesized
gtcgccctgtggaatgaggg

SEQ ID NO: 3848 - DNA, 20 bp, Artificial Sequence
  chemically synthesized
tcgccctgtggaatgaggga

SEQ ID NO: 3849 - DNA, 20 bp, Artificial Sequence
  chemically synthesized
tgtggaatgagggaaggtat

SEQ ID NO: 3850 - DNA, 20 bp, Artificial Sequence
  chemically synthesized
aaggtattagcctcacctcc

SEQ ID NO: 3851 - DNA, 20 bp, Artificial Sequence
  chemically synthesized
tattagcctcacctcccagt

SEQ ID NO: 3852 - DNA, 20 bp, Artificial Sequence
  chemically synthesized
attagcctcacctcccagtg

SEQ ID NO: 3853 - DNA, 20 bp, Artificial Sequence
  chemically synthesized
acctcccagtgaggaactcg

SEQ ID NO: 3854 - DNA, 20 bp, Artificial Sequence
  chemically synthesized
agtgaggaactcgaagatct

SEQ ID NO: 3855 - DNA, 20 bp, Artificial Sequence
  chemically synthesized
gaggaactcgaagatctcag

SEQ ID NO: 3856 - DNA, 20 bp, Artificial Sequence
  chemically synthesized
atctcagaagtgtcctgctg

SEQ ID NO: 3857 - DNA, 20 bp, Artificial Sequence
  chemically synthesized
cagaagtgtcctgctgtgga

SEQ ID NO: 3858 - DNA, 20 bp, Artificial Sequence
  chemically synthesized
agaagtgtcctgctgtggac

SEQ ID NO: 3859 - DNA, 20 bp, Artificial Sequence
  chemically synthesized
gaagtgtcctgctgtggaca

SEQ ID NO: 3860 - DNA, 20 bp, Artificial Sequence
  chemically synthesized
agtgtcctgctgtggacagg

SEQ ID NO: 3861 - DNA, 20 bp, Artificial Sequence
  chemically synthesized
gtgtcctgctgtggacaggg

SEQ ID NO: 3862 - DNA, 20 bp, Artificial Sequence
  chemically synthesized
cctgctgtggacagggagga

SEQ ID NO: 3863 - DNA, 20 bp, Artificial Sequence
  chemically synthesized
ctgctgtggacagggaggac

SEQ ID NO: 3864 - DNA, 20 bp, Artificial Sequence
  chemically synthesized
tgctgtggacagggaggaca

SEQ ID NO: 3865 - DNA, 20 bp, Artificial Sequence
  chemically synthesized
gtggacagggaggacagggc

SEQ ID NO: 3866 - DNA, 20 bp, Artificial Sequence
  chemically synthesized
tggacagggaggacagggct

SEQ ID NO: 3867 - DNA, 20 bp, Artificial Sequence
  chemically synthesized
gggaggacagggctgggctt

SEQ ID NO: 3868 - DNA, 20 bp, Artificial Sequence
  chemically synthesized
ggaggacagggctgggcttc

SEQ ID NO: 3869 - DNA, 20 bp, Artificial Sequence
  chemically synthesized
aacccctcccactgccacct

SEQ ID NO: 3870 - DNA, 20 bp, Artificial Sequence
  chemically synthesized
acccctcccactgccacctc

SEQ ID NO: 3871 - DNA, 20 bp, Artificial Sequence
  chemically synthesized
cccctcccactgccacctca

SEQ ID NO: 3872 - DNA, 20 bp, Artificial Sequence
  chemically synthesized
ccactgccacctcagggccg

SEQ ID NO: 3873 - DNA, 20 bp, Artificial Sequence
  chemically synthesized
ctgccacctcagggccgcgg

SEQ ID NO: 3874 - DNA, 20 bp, Artificial Sequence
  chemically synthesized
cgcggcagaaacctgtcgtc

SEQ ID NO: 3875 - DNA, 20 bp, Artificial Sequence
  chemically synthesized
gaaacctgtcgtctggacac

SEQ ID NO: 3876 - DNA, 20 bp, Artificial Sequence
  chemically synthesized
tcgtctggacactggtcata

SEQ ID NO: 3877 - DNA, 20 bp, Artificial Sequence
  chemically synthesized
actggtcatacagccccttt

SEQ ID NO: 3878 - DNA, 20 bp, Artificial Sequence
  chemically synthesized
ctggtcatacagcccctttc

SEQ ID NO: 3879 - DNA, 20 bp, Artificial Sequence
  chemically synthesized
aatctcctcacttgcctttc

SEQ ID NO: 3880 - DNA, 20 bp, Artificial Sequence
  chemically synthesized
cttgcctttctggcactatt

SEQ ID NO: 3881 - DNA, 20 bp, Artificial Sequence
  chemically synthesized
ttctggcactattgagtgac

SEQ ID NO: 3882 - DNA, 20 bp, Artificial Sequence
  chemically synthesized
actattgagtgactggtgtg

SEQ ID NO: 3883 - DNA, 20 bp, Artificial Sequence
  chemically synthesized
agtgactggtgtgtggactt

SEQ ID NO: 3884 - DNA, 20 bp, Artificial Sequence
  chemically synthesized
gtgactggtgtgtggacttc

SEQ ID NO: 3885 - DNA, 20 bp, Artificial Sequence
  chemically synthesized
tgactggtgtgtggacttca

SEQ ID NO: 3886 - DNA, 20 bp, Artificial Sequence
  chemically synthesized
gactggtgtgtggacttcag

SEQ ID NO: 3887 - DNA, 20 bp, Artificial Sequence
  chemically synthesized
tggtgtgtggacttcagggg

SEQ ID NO: 3888 - DNA, 20 bp, Artificial Sequence
  chemically synthesized
tgtggacttcaggggaagcg

SEQ ID NO: 3889 - DNA, 20 bp, Artificial Sequence
  chemically synthesized
ggacttcaggggaagcgtgg

SEQ ID NO: 3890 - DNA, 20 bp, Artificial Sequence
  chemically synthesized
gacttcaggggaagcgtgga

SEQ ID NO: 3891 - DNA, 20 bp, Artificial Sequence
  chemically synthesized
gaagcgtggaaggcacttca

SEQ ID NO: 3892 - DNA, 20 bp, Artificial Sequence
  chemically synthesized
aagcgtggaaggcacttcac

SEQ ID NO: 3893 - DNA, 20 bp, Artificial Sequence
  chemically synthesized
acaggcctaatactctgtga

SEQ ID NO: 3894 - DNA, 20 bp, Artificial Sequence
  chemically synthesized
ctaatactctgtgacagtct

SEQ ID NO: 3895 - DNA, 20 bp, Artificial Sequence
  chemically synthesized
actctgtgacagtcttggcc

SEQ ID NO: 3896 - DNA, 20 bp, Artificial Sequence
  chemically synthesized
tctgtgacagtcttggccaa

SEQ ID NO: 3897 - DNA, 20 bp, Artificial Sequence
  chemically synthesized
agtcttggccaagagattct

SEQ ID NO: 3898 - DNA, 20 bp, Artificial Sequence
  chemically synthesized
ggccaagagattctgagaac

SEQ ID NO: 3899 - DNA, 20 bp, Artificial Sequence
  chemically synthesized
gagattctgagaaccagaac

SEQ ID NO: 3900 - DNA, 20 bp, Artificial Sequence
  chemically synthesized
aaccagaactggccattctc

SEQ ID NO: 3901 - DNA, 20 bp, Artificial Sequence
  chemically synthesized
ttaaaacctattatgtccta

SEQ ID NO: 3902 - DNA, 20 bp, Artificial Sequence
  chemically synthesized
attatgtcctatggttaaca

SEQ ID NO: 3903 - DNA, 20 bp, Artificial Sequence
  chemically synthesized
tatgtcctatggttaacaca

SEQ ID NO: 3904 - DNA, 20 bp, Artificial Sequence
  chemically synthesized
atggttaacacagagctgct

SEQ ID NO: 3905 - DNA, 20 bp, Artificial Sequence
  chemically synthesized
cagagctgctcagaaattat

SEQ ID NO: 3906 - DNA, 20 bp, Artificial Sequence
  chemically synthesized
gaaattatgagaactaattt

SEQ ID NO: 3907 - DNA, 20 bp, Artificial Sequence
  chemically synthesized
aaattatgagaactaattta

SEQ ID NO: 3908 - DNA, 20 bp, Artificial Sequence
  chemically synthesized
agaactaatttaaggcttca

SEQ ID NO: 3909 - DNA, 20 bp, Artificial Sequence
  chemically synthesized
caaagctctaccaaaaaaaa

SEQ ID NO: 3910 - DNA, 20 bp, Artificial Sequence
  chemically synthesized
ctctaccaaaaaaaatggtc

SEQ ID NO: 3911 - DNA, 20 bp, Artificial Sequence
  chemically synthesized
taccaaaaaaaatggtctag

SEQ ID NO: 3912 - DNA, 20 bp, Artificial Sequence
  chemically synthesized
accaaaaaaaatggtctagc

SEQ ID NO: 3913 - DNA, 20 bp, Artificial Sequence
  chemically synthesized
aaaaaaatggtctagcaggt

SEQ ID NO: 3914 - DNA, 20 bp, Artificial Sequence
  chemically synthesized
aaaaaatggtctagcaggtc

SEQ ID NO: 3915 - DNA, 20 bp, Artificial Sequence
  chemically synthesized
gtcaggctctaacatttctt

SEQ ID NO: 3916 - DNA, 20 bp, Artificial Sequence
  chemically synthesized
tcaggctctaacatttcttc

SEQ ID NO: 3917 - DNA, 20 bp, Artificial Sequence
  chemically synthesized
catttcttcaggaataaaac

SEQ ID NO: 3918 - DNA, 20 bp, Artificial Sequence
  chemically synthesized
atttcttcaggaataaaact

SEQ ID NO: 3919 - DNA, 20 bp, Artificial Sequence
  chemically synthesized
actaggctgccctctcgcct

SEQ ID NO: 3920 - DNA, 20 bp, Artificial Sequence
  chemically synthesized
ctaggctgccctctcgcctg

SEQ ID NO: 3921 - DNA, 20 bp, Artificial Sequence
  chemically synthesized
gctgccctctcgcctgaggt

SEQ ID NO: 3922 - DNA, 20 bp, Artificial Sequence
  chemically synthesized
ctgccctctcgcctgaggtg

SEQ ID NO: 3923 - DNA, 20 bp, Artificial Sequence
  chemically synthesized
gcctgaggtgaggctgaatg

SEQ ID NO: 3924 - DNA, 20 bp, Artificial Sequence
  chemically synthesized
cctgaggtgaggctgaatga

SEQ ID NO: 3925 - DNA, 20 bp, Artificial Sequence
  chemically synthesized
tgaggtgaggctgaatgaag

SEQ ID NO: 3926 - DNA, 20 bp, Artificial Sequence
  chemically synthesized
ggctgaatgaaggagcgctc

SEQ ID NO: 3927 - DNA, 20 bp, Artificial Sequence
  chemically synthesized
aaggagcgctctggtgctgc

SEQ ID NO: 3928 - DNA, 20 bp, Artificial Sequence
  chemically synthesized
aggagcgctctggtgctgcg

SEQ ID NO: 3929 - DNA, 20 bp, Artificial Sequence
  chemically synthesized
gcgctctggtgctgcgaggc

SEQ ID NO: 3930 - DNA, 20 bp, Artificial Sequence
  chemically synthesized
cgctctggtgctgcgaggcc

SEQ ID NO: 3931 - DNA, 20 bp, Artificial Sequence
  chemically synthesized
ggccaggcctcctcccatga

SEQ ID NO: 3932 - DNA, 20 bp, Artificial Sequence
  chemically synthesized
aggcctcctcccatgacggc

SEQ ID NO: 3933 - DNA, 20 bp, Artificial Sequence
  chemically synthesized
atgacggcaagtccttcttt

SEQ ID NO: 3934 - DNA, 20 bp, Artificial Sequence
  chemically synthesized
caagtccttctttcagaaaa

SEQ ID NO: 3935 - DNA, 20 bp, Artificial Sequence
  chemically synthesized
aagtccttctttcagaaaac

SEQ ID NO: 3936 - DNA, 20 bp, Artificial Sequence
  chemically synthesized
tcagaaaacaggcctctgcc

SEQ ID NO: 3937 - DNA, 20 bp, Artificial Sequence
  chemically synthesized
cagaaaacaggcctctgccc

SEQ ID NO: 3938 - DNA, 20 bp, Artificial Sequence
  chemically synthesized
agaaaacaggcctctgcccg

SEQ ID NO: 3939 - DNA, 20 bp, Artificial Sequence
  chemically synthesized
cctctgcccggggcatgctg

SEQ ID NO: 3940 - DNA, 20 bp, Artificial Sequence
  chemically synthesized
atgctgcagctgcttctctg

SEQ ID NO: 3941 - DNA, 20 bp, Artificial Sequence
  chemically synthesized
gctgcttctctgcagtgcct

SEQ ID NO: 3942 - DNA, 20 bp, Artificial Sequence
  chemically synthesized
ctcagcaccttcccgcctcc

SEQ ID NO: 3943 - DNA, 20 bp, Artificial Sequence
  chemically synthesized
tcagcaccttcccgcctccc

SEQ ID NO: 3944 - DNA, 20 bp, Artificial Sequence
  chemically synthesized
cttcccgcctcccaggcaca

SEQ ID NO: 3945 - DNA, 20 bp, Artificial Sequence
  chemically synthesized
cccgcctcccaggcacacag

SEQ ID NO: 3946 - DNA, 20 bp, Artificial Sequence
  chemically synthesized
ctcccaggcacacagcagcc

SEQ ID NO: 3947 - DNA, 20 bp, Artificial Sequence
  chemically synthesized
ggcacacagcagcccagcct

SEQ ID NO: 3948 - DNA, 20 bp, Artificial Sequence
  chemically synthesized
agcctcagtcctcatctctc

SEQ ID NO: 3949 - DNA, 20 bp, Artificial Sequence
  chemically synthesized
cagtcctcatctctctggca

SEQ ID NO: 3950 - DNA, 20 bp, Artificial Sequence
  chemically synthesized
atctctctggcaaagtccca

SEQ ID NO: 3951 - DNA, 20 bp, Artificial Sequence
  chemically synthesized
aagtcccacagaacaaaaca

SEQ ID NO: 3952 - DNA, 20 bp, Artificial Sequence
  chemically synthesized
agtcccacagaacaaaacac

SEQ ID NO: 3953 - DNA, 20 bp, Artificial Sequence
  chemically synthesized
acagaacaaaacacaggcct

SEQ ID NO: 3954 - DNA, 20 bp, Artificial Sequence
  chemically synthesized
ttttttttttccctcctccc

SEQ ID NO: 3955 - DNA, 20 bp, Artificial Sequence
  chemically synthesized
atttataccactgaccaatc

SEQ ID NO: 3956 - DNA, 20 bp, Artificial Sequence
  chemically synthesized
ataccactgaccaatctgga

SEQ ID NO: 3957 - DNA, 20 bp, Artificial Sequence
  chemically synthesized
accactgaccaatctggaaa

SEQ ID NO: 3958 - DNA, 20 bp, Artificial Sequence
  chemically synthesized
caatctggaaagagttccct

SEQ ID NO: 3959 - DNA, 20 bp, Artificial Sequence
  chemically synthesized
aaagagttccctgagcaaat

SEQ ID NO: 3960 - DNA, 20 bp, Artificial Sequence
  chemically synthesized
agagttccctgagcaaattg

SEQ ID NO: 3961 - DNA, 20 bp, Artificial Sequence
  chemically synthesized
gagcaaattggagatgcccg

SEQ ID NO: 3962 - DNA, 20 bp, Artificial Sequence
  chemically synthesized
cagatacaacctgccatcat

SEQ ID NO: 3963 - DNA, 20 bp, Artificial Sequence
  chemically synthesized
gatacaacctgccatcattg

SEQ ID NO: 3964 - DNA, 20 bp, Artificial Sequence
  chemically synthesized
acaacctgccatcattggag

SEQ ID NO: 3965 - DNA, 20 bp, Artificial Sequence
  chemically synthesized
tgccatcattggagcagcct

SEQ ID NO: 3966 - DNA, 20 bp, Artificial Sequence
  chemically synthesized
tcattggagcagcctcagtc

SEQ ID NO: 3967 - DNA, 20 bp, Artificial Sequence
  chemically synthesized
gagcagcctcagtccagcca

SEQ ID NO: 3968 - DNA, 20 bp, Artificial Sequence
  chemically synthesized
agcagcctcagtccagccat

SEQ ID NO: 3969 - DNA, 20 bp, Artificial Sequence
  chemically synthesized
gcagcctcagtccagccatg

SEQ ID NO: 3970 - DNA, 20 bp, Artificial Sequence
  chemically synthesized
ctcagtccagccatggggtg

SEQ ID NO: 3971 - DNA, 20 bp, Artificial Sequence
  chemically synthesized
gtggcactgccgtctgttct

SEQ ID NO: 3972 - DNA, 20 bp, Artificial Sequence
  chemically synthesized
taattctgctgattccatat

SEQ ID NO: 3973 - DNA, 20 bp, Artificial Sequence
  chemically synthesized
tgagtaacatccaatgttcc

SEQ ID NO: 3974 - DNA, 20 bp, Artificial Sequence
  chemically synthesized
caatgttcccagacacctcc

SEQ ID NO: 3975 - DNA, 20 bp, Artificial Sequence
  chemically synthesized
ctccaagctcctccaaccaa

SEQ ID NO: 3976 - DNA, 20 bp, Artificial Sequence
  chemically synthesized
tcaactcctttctacccacc

SEQ ID NO: 3977 - DNA, 20 bp, Artificial Sequence
  chemically synthesized
actcctttctacccacctag

SEQ ID NO: 3978 - DNA, 20 bp, Artificial Sequence
  chemically synthesized
ctcctttctacccacctagc

SEQ ID NO: 3979 - DNA, 20 bp, Artificial Sequence
  chemically synthesized
acccacctagcaggtccacg

SEQ ID NO: 3980 - DNA, 20 bp, Artificial Sequence
  chemically synthesized
cccacctagcaggtccacgt

SEQ ID NO: 3981 - DNA, 20 bp, Artificial Sequence
  chemically synthesized
ccacctagcaggtccacgtg

SEQ ID NO: 3982 - DNA, 20 bp, Artificial Sequence
  chemically synthesized
agcaggtccacgtggggact

SEQ ID NO: 3983 - DNA, 20 bp, Artificial Sequence
  chemically synthesized
ccacgtggggactcagccta

SEQ ID NO: 3984 - DNA, 20 bp, Artificial Sequence
  chemically synthesized
ggactcagcctatggacacc

SEQ ID NO: 3985 - DNA, 20 bp, Artificial Sequence
  chemically synthesized
ctatggacacctggcctctg

SEQ ID NO: 3986 - DNA, 20 bp, Artificial Sequence
  chemically synthesized
tatggacacctggcctctgc

SEQ ID NO: 3987 - DNA, 20 bp, Artificial Sequence
  chemically synthesized
acacctggcctctgcgggca

SEQ ID NO: 3988 - DNA, 20 bp, Artificial Sequence
  chemically synthesized
cctggcctctgcgggcacag

SEQ ID NO: 3989 - DNA, 20 bp, Artificial Sequence
  chemically synthesized
ggcacagcggccacacacca

SEQ ID NO: 3990 - DNA, 20 bp, Artificial Sequence
  chemically synthesized
acagcggccacacaccacgg

SEQ ID NO: 3991 - DNA, 20 bp, Artificial Sequence
  chemically synthesized
cagcggccacacaccacggt

SEQ ID NO: 3992 - DNA, 20 bp, Artificial Sequence
  chemically synthesized
ccacacaccacggtgggacc

SEQ ID NO: 3993 - DNA, 20 bp, Artificial Sequence
  chemically synthesized
acacaccacggtgggacccg

SEQ ID NO: 3994 - DNA, 20 bp, Artificial Sequence
  chemically synthesized
cggagaccattttttgtttt

SEQ ID NO: 3995 - DNA, 20 bp, Artificial Sequence
  chemically synthesized
tttttgttttgagtctctct

SEQ ID NO: 3996 - DNA, 20 bp, Artificial Sequence
  chemically synthesized
tgagtctctctaagactgct

SEQ ID NO: 3997 - DNA, 20 bp, Artificial Sequence
  chemically synthesized
gagtctctctaagactgctt

SEQ ID NO: 3998 - DNA, 20 bp, Artificial Sequence
  chemically synthesized
tctaagactgcttgggaaat

SEQ ID NO: 3999 - DNA, 20 bp, Artificial Sequence
  chemically synthesized
ctaagactgcttgggaaatg

SEQ ID NO: 4000 - DNA, 20 bp, Artificial Sequence
  chemically synthesized
gcttgggaaatgaggtctct

SEQ ID NO: 4001 - DNA, 20 bp, Artificial Sequence
  chemically synthesized
cttgggaaatgaggtctctc

SEQ ID NO: 4002 - DNA, 20 bp, Artificial Sequence
  chemically synthesized
gaaatgaggtctctcaggtc

SEQ ID NO: 4003 - DNA, 20 bp, Artificial Sequence
  chemically synthesized
tcaggtctagcatttccacg

SEQ ID NO: 4004 - DNA, 20 bp, Artificial Sequence
  chemically synthesized
ttccacgcagtcccaaccat

SEQ ID NO: 4005 - DNA, 20 bp, Artificial Sequence
  chemically synthesized
tccacgcagtcccaaccatg

SEQ ID NO: 4006 - DNA, 20 bp, Artificial Sequence
  chemically synthesized
gtcccaaccatgaggctgac

SEQ ID NO: 4007 - DNA, 20 bp, Artificial Sequence
  chemically synthesized
cccaaccatgaggctgacca

SEQ ID NO: 4008 - DNA, 20 bp, Artificial Sequence
  chemically synthesized
ccaaccatgaggctgaccag

SEQ ID NO: 4009 - DNA, 20 bp, Artificial Sequence
  chemically synthesized
gaccagaggccaccaacgtc

SEQ ID NO: 4010 - DNA, 20 bp, Artificial Sequence
  chemically synthesized
ccaccaacgtcaagctctct

SEQ ID NO: 4011 - DNA, 20 bp, Artificial Sequence
  chemically synthesized
caccaacgtcaagctctctc

SEQ ID NO: 4012 - DNA, 20 bp, Artificial Sequence
  chemically synthesized
tcaagctctctcaggtctac

SEQ ID NO: 4013 - DNA, 20 bp, Artificial Sequence
  chemically synthesized
caagctctctcaggtctact

SEQ ID NO: 4014 - DNA, 20 bp, Artificial Sequence
  chemically synthesized
tctctcaggtctactaggaa

SEQ ID NO: 4015 - DNA, 20 bp, Artificial Sequence
  chemically synthesized
ctctcaggtctactaggaac

SEQ ID NO: 4016 - DNA, 20 bp, Artificial Sequence
  chemically synthesized
caggtctactaggaacagga

SEQ ID NO: 4017 - DNA, 20 bp, Artificial Sequence
  chemically synthesized
aagaataactctcccttaac

SEQ ID NO: 4018 - DNA, 20 bp, Artificial Sequence
  chemically synthesized
ctctcccttaacaagcccct

SEQ ID NO: 4019 - DNA, 20 bp, Artificial Sequence
  chemically synthesized
tctcccttaacaagcccctc

SEQ ID NO: 4020 - DNA, 20 bp, Artificial Sequence
  chemically synthesized
ggctgaaatccttttgcttc

SEQ ID NO: 4021 - DNA, 20 bp, Artificial Sequence
  chemically synthesized
gctgaaatccttttgcttcc

SEQ ID NO: 4022 - DNA, 20 bp, Artificial Sequence
  chemically synthesized
ctgaaatccttttgcttcca

SEQ ID NO: 4023 - DNA, 20 bp, Artificial Sequence
  chemically synthesized
gggcctcaaccttctactgc

SEQ ID NO: 4024 - DNA, 20 bp, Artificial Sequence
  chemically synthesized
ggcctcaaccttctactgct

SEQ ID NO: 4025 - DNA, 20 bp, Artificial Sequence
  chemically synthesized
ctcaaccttctactgctggg

SEQ ID NO: 4026 - DNA, 20 bp, Artificial Sequence
  chemically synthesized
accttctactgctgggtaga

SEQ ID NO: 4027 - DNA, 20 bp, Artificial Sequence
  chemically synthesized
tagaaagccccctctgtcac

SEQ ID NO: 4028 - DNA, 20 bp, Artificial Sequence
  chemically synthesized
ccccctctgtcaccggccca

SEQ ID NO: 4029 - DNA, 20 bp, Artificial Sequence
  chemically synthesized
tgtcaccggcccacagatct

SEQ ID NO: 4030 - DNA, 20 bp, Artificial Sequence
  chemically synthesized
ccatcgcactcaaaccctgt

SEQ ID NO: 4031 - DNA, 20 bp, Artificial Sequence
  chemically synthesized
catcgcactcaaaccctgtc

SEQ ID NO: 4032 - DNA, 20 bp, Artificial Sequence
  chemically synthesized
cgcactcaaaccctgtcagg

SEQ ID NO: 4033 - DNA, 20 bp, Artificial Sequence
  chemically synthesized
actcaaaccctgtcaggcgg

SEQ ID NO: 4034 - DNA, 20 bp, Artificial Sequence
  chemically synthesized
tcaaaccctgtcaggcggtg

SEQ ID NO: 4035 - DNA, 20 bp, Artificial Sequence
  chemically synthesized
aaaccctgtcaggcggtgga

SEQ ID NO: 4036 - DNA, 20 bp, Artificial Sequence
  chemically synthesized
ctgtcaggcggtggagagtg

SEQ ID NO: 4037 - DNA, 20 bp, Artificial Sequence
  chemically synthesized
caggcggtggagagtgtgga

SEQ ID NO: 4038 - DNA, 20 bp, Artificial Sequence
  chemically synthesized
gcggtggagagtgtggacgg

SEQ ID NO: 4039 - DNA, 20 bp, Artificial Sequence
  chemically synthesized
cggtggagagtgtggacggc

SEQ ID NO: 4040 - DNA, 20 bp, Artificial Sequence
  chemically synthesized
gtgtggacggcaggctgacg

SEQ ID NO: 4041 - DNA, 20 bp, Artificial Sequence
  chemically synthesized
ggcaggctgacgcggtttca

SEQ ID NO: 4042 - DNA, 20 bp, Artificial Sequence
  chemically synthesized
caggctgacgcggtttcaaa

SEQ ID NO: 4043 - DNA, 20 bp, Artificial Sequence
  chemically synthesized
aggctgacgcggtttcaaag

SEQ ID NO: 4044 - DNA, 20 bp, Artificial Sequence
  chemically synthesized
gcggtttcaaagaggccgac

SEQ ID NO: 4045 - DNA, 20 bp, Artificial Sequence
  chemically synthesized
cggtttcaaagaggccgacc

SEQ ID NO: 4046 - DNA, 20 bp, Artificial Sequence
  chemically synthesized
ttcaaagaggccgaccaggc

SEQ ID NO: 4047 - DNA, 20 bp, Artificial Sequence
  chemically synthesized
accgtcctgtactcctgccc

SEQ ID NO: 4048 - DNA, 20 bp, Artificial Sequence
  chemically synthesized
gtcttttatcaatgtaattc

SEQ ID NO: 4049 - DNA, 20 bp, Artificial Sequence
  chemically synthesized
tcttttatcaatgtaattca

SEQ ID NO: 4050 - DNA, 20 bp, Artificial Sequence
  chemically synthesized
tatcaatgtaattcaaggca

SEQ ID NO: 4051 - DNA, 20 bp, Artificial Sequence
  chemically synthesized
tcaatgtaattcaaggcaaa

SEQ ID NO: 4052 - DNA, 20 bp, Artificial Sequence
  chemically synthesized
gtaattcaaggcaaagagtc

SEQ ID NO: 4053 - DNA, 20 bp, Artificial Sequence
  chemically synthesized
taattcaaggcaaagagtca

SEQ ID NO: 4054 - DNA, 20 bp, Artificial Sequence
  chemically synthesized
aattcaaggcaaagagtcaa

SEQ ID NO: 4055 - DNA, 20 bp, Artificial Sequence
  chemically synthesized
aagggtctgtcaccatttta

SEQ ID NO: 4056 - DNA, 20 bp, Artificial Sequence
  chemically synthesized
gggtctgtcaccattttaaa

SEQ ID NO: 4057 - DNA, 20 bp, Artificial Sequence
  chemically synthesized
ggtctgtcaccattttaaag

SEQ ID NO: 4058 - DNA, 20 bp, Artificial Sequence
  chemically synthesized
ttttaaagaggcttattaca

SEQ ID NO: 4059 - DNA, 20 bp, Artificial Sequence
  chemically synthesized
atggccacaaaaatttgcct

SEQ ID NO: 4060 - DNA, 20 bp, Artificial Sequence
  chemically synthesized
tggccacaaaaatttgcctc

SEQ ID NO: 4061 - DNA, 20 bp, Artificial Sequence
  chemically synthesized
atttgcctcaggctcaaacc

SEQ ID NO: 4062 - DNA, 20 bp, Artificial Sequence
  chemically synthesized
caggctcaaacctggcatgt

SEQ ID NO: 4063 - DNA, 20 bp, Artificial Sequence
  chemically synthesized
aggctcaaacctggcatgta

SEQ ID NO: 4064 - DNA, 20 bp, Artificial Sequence
  chemically synthesized
aaacctggcatgtaaggtat

SEQ ID NO: 4065 - DNA, 20 bp, Artificial Sequence
  chemically synthesized
tggcatgtaaggtatcagcg

SEQ ID NO: 4066 - DNA, 20 bp, Artificial Sequence
  chemically synthesized
ggcatgtaaggtatcagcgt

SEQ ID NO: 4067 - DNA, 20 bp, Artificial Sequence
  chemically synthesized
tgtaaggtatcagcgtggga

SEQ ID NO: 4068 - DNA, 20 bp, Artificial Sequence
  chemically synthesized
gtaaggtatcagcgtgggac

SEQ ID NO: 4069 - DNA, 20 bp, Artificial Sequence
  chemically synthesized
accaaccgttttttgattta

SEQ ID NO: 4070 - DNA, 20 bp, Artificial Sequence
  chemically synthesized
ccaaccgttttttgatttat

SEQ ID NO: 4071 - DNA, 20 bp, Artificial Sequence
  chemically synthesized
caaccgttttttgatttatg

SEQ ID NO: 4072 - DNA, 20 bp, Artificial Sequence
  chemically synthesized
accgttttttgatttatggg

SEQ ID NO: 4073 - DNA, 20 bp, Artificial Sequence
  chemically synthesized
ccgttttttgatttatgggg

SEQ ID NO: 4074 - DNA, 20 bp, Artificial Sequence
  chemically synthesized
gttttttgatttatggggag

SEQ ID NO: 4075 - DNA, 20 bp, Artificial Sequence
  chemically synthesized
ttttttgatttatggggagg

SEQ ID NO: 4076 - DNA, 20 bp, Artificial Sequence
  chemically synthesized
ttgatttatggggaggagga

SEQ ID NO: 4077 - DNA, 20 bp, Artificial Sequence
  chemically synthesized
gggaggaggaaagaaatctg

SEQ ID NO: 4078 - DNA, 20 bp, Artificial Sequence
  chemically synthesized
ggaaagaaatctgaagttga

SEQ ID NO: 4079 - DNA, 20 bp, Artificial Sequence
  chemically synthesized
gaaagaaatctgaagttgac

SEQ ID NO: 4080 - DNA, 20 bp, Artificial Sequence
  chemically synthesized
gaaatctgaagttgacaggt

SEQ ID NO: 4081 - DNA, 20 bp, Artificial Sequence
  chemically synthesized
aaatctgaagttgacaggtt

SEQ ID NO: 4082 - DNA, 20 bp, Artificial Sequence
  chemically synthesized
caggttgggacaactccact

SEQ ID NO: 4083 - DNA, 20 bp, Artificial Sequence
  chemically synthesized
cactcagctttctcactcaa

SEQ ID NO: 4084 - DNA, 20 bp, Artificial Sequence
  chemically synthesized
taaatcatactttgcattta

SEQ ID NO: 4085 - DNA, 20 bp, Artificial Sequence
  chemically synthesized
tactttgcatttatggcctg

SEQ ID NO: 4086 - DNA, 20 bp, Artificial Sequence
  chemically synthesized
catttatggcctgcggctct

SEQ ID NO: 4087 - DNA, 20 bp, Artificial Sequence
  chemically synthesized
ctgcggctcttggctgactt

SEQ ID NO: 4088 - DNA, 20 bp, Artificial Sequence
  chemically synthesized
cggctcttggctgactttgg

SEQ ID NO: 4089 - DNA, 20 bp, Artificial Sequence
  chemically synthesized
gctgactttggcggctcctc

SEQ ID NO: 4090 - DNA, 20 bp, Artificial Sequence
  chemically synthesized
ctttggcggctcctccggtg

SEQ ID NO: 4091 - DNA, 20 bp, Artificial Sequence
  chemically synthesized
ttggcggctcctccggtgtg

SEQ ID NO: 4092 - DNA, 20 bp, Artificial Sequence
  chemically synthesized
cggctcctccggtgtggagc

SEQ ID NO: 4093 - DNA, 20 bp, Artificial Sequence
  chemically synthesized
ctccggtgtggagcaagctg

SEQ ID NO: 4094 - DNA, 20 bp, Artificial Sequence
  chemically synthesized
gagcaagctgtggacttccc

SEQ ID NO: 4095 - DNA, 20 bp, Artificial Sequence
  chemically synthesized
agcaagctgtggacttcccc

SEQ ID NO: 4096 - DNA, 20 bp, Artificial Sequence
  chemically synthesized
caagctgtggacttccccgg

SEQ ID NO: 4097 - DNA, 20 bp, Artificial Sequence
  chemically synthesized
aagctgtggacttccccggg

SEQ ID NO: 4098 - DNA, 20 bp, Artificial Sequence
  chemically synthesized
gctgtggacttccccgggag

SEQ ID NO: 4099 - DNA, 20 bp, Artificial Sequence
  chemically synthesized
ctgtggacttccccgggagg

SEQ ID NO: 4100 - DNA, 20 bp, Artificial Sequence
  chemically synthesized
ccccgggaggaggccccact

SEQ ID NO: 4101 - DNA, 20 bp, Artificial Sequence
  chemically synthesized
tgactgccccactctgcacc

SEQ ID NO: 4102 - DNA, 20 bp, Artificial Sequence
  chemically synthesized
gactgccccactctgcacca

SEQ ID NO: 4103 - DNA, 20 bp, Artificial Sequence
  chemically synthesized
gccccactctgcaccaagga

SEQ ID NO: 4104 - DNA, 20 bp, Artificial Sequence
  chemically synthesized
cactctgcaccaaggacagc

SEQ ID NO: 4105 - DNA, 20 bp, Artificial Sequence
  chemically synthesized
actctgcaccaaggacagcg

SEQ ID NO: 4106 - DNA, 20 bp, Artificial Sequence
  chemically synthesized
tctgcaccaaggacagcgag

SEQ ID NO: 4107 - DNA, 20 bp, Artificial Sequence
  chemically synthesized
ctgcaccaaggacagcgagg

SEQ ID NO: 4108 - DNA, 20 bp, Artificial Sequence
  chemically synthesized
tgcaccaaggacagcgagga

SEQ ID NO: 4109 - DNA, 20 bp, Artificial Sequence
  chemically synthesized
gcaccaaggacagcgaggag

SEQ ID NO: 4110 - DNA, 20 bp, Artificial Sequence
  chemically synthesized
caccaaggacagcgaggagg

SEQ ID NO: 4111 - DNA, 20 bp, Artificial Sequence
  chemically synthesized
accaaggacagcgaggaggg

SEQ ID NO: 4112 - DNA, 20 bp, Artificial Sequence
  chemically synthesized
aaggacagcgaggagggggg

SEQ ID NO: 4113 - DNA, 20 bp, Artificial Sequence
  chemically synthesized
aggacagcgaggagggggga

SEQ ID NO: 4114 - DNA, 20 bp, Artificial Sequence
  chemically synthesized
acagcgaggaggggggaagg

SEQ ID NO: 4115 - DNA, 20 bp, Artificial Sequence
  chemically synthesized
cagcgaggaggggggaaggt

SEQ ID NO: 4116 - DNA, 20 bp, Artificial Sequence
  chemically synthesized
agcgaggaggggggaaggtg

SEQ ID NO: 4117 - DNA, 20 bp, Artificial Sequence
  chemically synthesized
gcgaggaggggggaaggtgg

SEQ ID NO: 4118 - DNA, 20 bp, Artificial Sequence
  chemically synthesized
aggaggggggaaggtggggg

SEQ ID NO: 4119 - DNA, 20 bp, Artificial Sequence
  chemically synthesized
gaggggggaaggtgggggtg

SEQ ID NO: 4120 - DNA, 20 bp, Artificial Sequence
  chemically synthesized
aggggggaaggtgggggtgg

SEQ ID NO: 4121 - DNA, 20 bp, Artificial Sequence
  chemically synthesized
gggggaaggtgggggtggag

SEQ ID NO: 4122 - DNA, 20 bp, Artificial Sequence
  chemically synthesized
gaaggtgggggtggaggagc

SEQ ID NO: 4123 - DNA, 20 bp, Artificial Sequence
  chemically synthesized
aggtgggggtggaggagctg

SEQ ID NO: 4124 - DNA, 20 bp, Artificial Sequence
  chemically synthesized
ggtgggggtggaggagctgg

SEQ ID NO: 4125 - DNA, 20 bp, Artificial Sequence
  chemically synthesized
ggggtggaggagctggaggc

SEQ ID NO: 4126 - DNA, 20 bp, Artificial Sequence
  chemically synthesized
gggtggaggagctggaggcc

SEQ ID NO: 4127 - DNA, 20 bp, Artificial Sequence
  chemically synthesized
ggtggaggagctggaggcca

SEQ ID NO: 4128 - DNA, 20 bp, Artificial Sequence
  chemically synthesized
gtggaggagctggaggccag

SEQ ID NO: 4129 - DNA, 20 bp, Artificial Sequence
  chemically synthesized
tggaggagctggaggccagg

SEQ ID NO: 4130 - DNA, 20 bp, Artificial Sequence
  chemically synthesized
ggagctggaggccagggggc

SEQ ID NO: 4131 - DNA, 20 bp, Artificial Sequence
  chemically synthesized
gagctggaggccagggggct

SEQ ID NO: 4132 - DNA, 20 bp, Artificial Sequence
  chemically synthesized
agctggaggccagggggctg

SEQ ID NO: 4133 - DNA, 20 bp, Artificial Sequence
  chemically synthesized
gccagggggctggggacatg

SEQ ID NO: 4134 - DNA, 20 bp, Artificial Sequence
  chemically synthesized
ccagggggctggggacatga

SEQ ID NO: 4135 - DNA, 20 bp, Artificial Sequence
  chemically synthesized
ggctggggacatgaaggcac

SEQ ID NO: 4136 - DNA, 20 bp, Artificial Sequence
  chemically synthesized
ggggacatgaaggcactggc

SEQ ID NO: 4137 - DNA, 20 bp, Artificial Sequence
  chemically synthesized
gggacatgaaggcactggct

SEQ ID NO: 4138 - DNA, 20 bp, Artificial Sequence
  chemically synthesized
ggcactggctaggtaacaca

SEQ ID NO: 4139 - DNA, 20 bp, Artificial Sequence
  chemically synthesized
gcactggctaggtaacacaa

SEQ ID NO: 4140 - DNA, 20 bp, Artificial Sequence
  chemically synthesized
aggtaacacaaaggcctgta

SEQ ID NO: 4141 - DNA, 20 bp, Artificial Sequence
  chemically synthesized
ggtaacacaaaggcctgtaa

SEQ ID NO: 4142 - DNA, 20 bp, Artificial Sequence
  chemically synthesized
atatgtctctcttctgaacc

SEQ ID NO: 4143 - DNA, 20 bp, Artificial Sequence
  chemically synthesized
gctctccactccatttctcc

SEQ ID NO: 4144 - DNA, 20 bp, Artificial Sequence
  chemically synthesized
actccatttctcctggatcc

SEQ ID NO: 4145 - DNA, 20 bp, Artificial Sequence
  chemically synthesized
gatccaagtctccctgtaat

SEQ ID NO: 4146 - DNA, 20 bp, Artificial Sequence
  chemically synthesized
aatcagcatgtatctaccac

SEQ ID NO: 4147 - DNA, 20 bp, Artificial Sequence
  chemically synthesized
accactggttctccaactaa

SEQ ID NO: 4148 - DNA, 20 bp, Artificial Sequence
  chemically synthesized
ggttctccaactaaaagttc

SEQ ID NO: 4149 - DNA, 20 bp, Artificial Sequence
  chemically synthesized
gttctccaactaaaagttca

SEQ ID NO: 4150 - DNA, 20 bp, Artificial Sequence
  chemically synthesized
actaaaagttcaaggcttct

SEQ ID NO: 4151 - DNA, 20 bp, Artificial Sequence
  chemically synthesized
gttcaaggcttctaagaacc

SEQ ID NO: 4152 - DNA, 20 bp, Artificial Sequence
  chemically synthesized
ggcttctaagaaccaagact

SEQ ID NO: 4153 - DNA, 20 bp, Artificial Sequence
  chemically synthesized
ttctaagaaccaagactcag

SEQ ID NO: 4154 - DNA, 20 bp, Artificial Sequence
  chemically synthesized
gtggtctacctctgactgtc

SEQ ID NO: 4155 - DNA, 20 bp, Artificial Sequence
  chemically synthesized
ctgactgtccagcaccatgc

SEQ ID NO: 4156 - DNA, 20 bp, Artificial Sequence
  chemically synthesized
tgactgtccagcaccatgct

SEQ ID NO: 4157 - DNA, 20 bp, Artificial Sequence
  chemically synthesized
gtccagcaccatgctgggca

SEQ ID NO: 4158 - DNA, 20 bp, Artificial Sequence
  chemically synthesized
cagcaccatgctgggcaaag

SEQ ID NO: 4159 - DNA, 20 bp, Artificial Sequence
  chemically synthesized
gcaccatgctgggcaaagaa

SEQ ID NO: 4160 - DNA, 20 bp, Artificial Sequence
  chemically synthesized
agagcccctcaataaataat

SEQ ID NO: 4161 - DNA, 20 bp, Artificial Sequence
  chemically synthesized
gagcccctcaataaataatt

SEQ ID NO: 4162 - DNA, 20 bp, Artificial Sequence
  chemically synthesized
tcaataaataattaggattc

SEQ ID NO: 4163 - DNA, 20 bp, Artificial Sequence
  chemically synthesized
attaggattcaagcgctgtg

SEQ ID NO: 4164 - DNA, 20 bp, Artificial Sequence
  chemically synthesized
cagtgaacttttcttcctgt

SEQ ID NO: 4165 - DNA, 20 bp, Artificial Sequence
  chemically synthesized
gtgaacttttcttcctgttg

SEQ ID NO: 4166 - DNA, 20 bp, Artificial Sequence
  chemically synthesized
gaacttttcttcctgttgga

SEQ ID NO: 4167 - DNA, 20 bp, Artificial Sequence
  chemically synthesized
gagagccattctaaatgacc

SEQ ID NO: 4168 - DNA, 20 bp, Artificial Sequence
  chemically synthesized
gccattctaaatgacctggc

SEQ ID NO: 4169 - DNA, 20 bp, Artificial Sequence
  chemically synthesized
attctaaatgacctggctgg

SEQ ID NO: 4170 - DNA, 20 bp, Artificial Sequence
  chemically synthesized
ttctaaatgacctggctgga

SEQ ID NO: 4171 - DNA, 20 bp, Artificial Sequence
  chemically synthesized
aatgacctggctggaaggac

SEQ ID NO: 4172 - DNA, 20 bp, Artificial Sequence
  chemically synthesized
atgacctggctggaaggacc

SEQ ID NO: 4173 - DNA, 20 bp, Artificial Sequence
  chemically synthesized
tggctggaaggaccaggcca

SEQ ID NO: 4174 - DNA, 20 bp, Artificial Sequence
  chemically synthesized
gctggaaggaccaggccatg

SEQ ID NO: 4175 - DNA, 20 bp, Artificial Sequence
  chemically synthesized
gaaggaccaggccatggagc

SEQ ID NO: 4176 - DNA, 20 bp, Artificial Sequence
  chemically synthesized
ggaccaggccatggagccag

SEQ ID NO: 4177 - DNA, 20 bp, Artificial Sequence
  chemically synthesized
gccatggagccagcagtgac

SEQ ID NO: 4178 - DNA, 20 bp, Artificial Sequence
  chemically synthesized
ccatggagccagcagtgacc

SEQ ID NO: 4179 - DNA, 20 bp, Artificial Sequence
  chemically synthesized
catggagccagcagtgacca

SEQ ID NO: 4180 - DNA, 20 bp, Artificial Sequence
  chemically synthesized
atggagccagcagtgaccag

SEQ ID NO: 4181 - DNA, 20 bp, Artificial Sequence
  chemically synthesized
tgaccaggggaaaccttccc

SEQ ID NO: 4182 - DNA, 20 bp, Artificial Sequence
  chemically synthesized
tagtaaatgattcactaacc

SEQ ID NO: 4183 - DNA, 20 bp, Artificial Sequence
  chemically synthesized
agtaaatgattcactaacca

SEQ ID NO: 4184 - DNA, 20 bp, Artificial Sequence
  chemically synthesized
taaatgattcactaaccaag

SEQ ID NO: 4185 - DNA, 20 bp, Artificial Sequence
  chemically synthesized
ttcactaaccaaggagcctc

SEQ ID NO: 4186 - DNA, 20 bp, Artificial Sequence
  chemically synthesized
tcactaaccaaggagcctct

SEQ ID NO: 4187 - DNA, 20 bp, Artificial Sequence
  chemically synthesized
taaccaaggagcctctgggt

SEQ ID NO: 4188 - DNA, 20 bp, Artificial Sequence
  chemically synthesized
cctctgggtcagccttgacc

SEQ ID NO: 4189 - DNA, 20 bp, Artificial Sequence
  chemically synthesized
ctctgggtcagccttgaccc

SEQ ID NO: 4190 - DNA, 20 bp, Artificial Sequence
  chemically synthesized
ctgggtcagccttgacccag

SEQ ID NO: 4191 - DNA, 20 bp, Artificial Sequence
  chemically synthesized
gggtcagccttgacccagga

SEQ ID NO: 4192 - DNA, 20 bp, Artificial Sequence
  chemically synthesized
ggtcagccttgacccaggag

SEQ ID NO: 4193 - DNA, 20 bp, Artificial Sequence
  chemically synthesized
cttgacccaggagaggatta

SEQ ID NO: 4194 - DNA, 20 bp, Artificial Sequence
  chemically synthesized
agaggattacagccccttga

SEQ ID NO: 4195 - DNA, 20 bp, Artificial Sequence
  chemically synthesized
ggattacagccccttgaaag

SEQ ID NO: 4196 - DNA, 20 bp, Artificial Sequence
  chemically synthesized
agccccttgaaagtggctgc

SEQ ID NO: 4197 - DNA, 20 bp, Artificial Sequence
  chemically synthesized
atcgcttcactgtactattt

SEQ ID NO: 4198 - DNA, 20 bp, Artificial Sequence
  chemically synthesized
actattttggcaatctgtaa

SEQ ID NO: 4199 - DNA, 20 bp, Artificial Sequence
  chemically synthesized
gtaatagtgtatttactcaa

SEQ ID NO: 4200 - DNA, 20 bp, Artificial Sequence
  chemically synthesized
tatttactcaatggttgtta

SEQ ID NO: 4201 - DNA, 20 bp, Artificial Sequence
  chemically synthesized
caatggttgttatggacaat

SEQ ID NO: 4202 - DNA, 20 bp, Artificial Sequence
  chemically synthesized
aatggttgttatggacaatc

SEQ ID NO: 4203 - DNA, 20 bp, Artificial Sequence
  chemically synthesized
ccaaatgctgtgtaattaca

SEQ ID NO: 4204 - DNA, 20 bp, Artificial Sequence
  chemically synthesized
ctgtgtaattacacagttaa

SEQ ID NO: 4205 - DNA, 20 bp, Artificial Sequence
  chemically synthesized
gtgtaattacacagttaaaa

SEQ ID NO: 4206 - DNA, 20 bp, Artificial Sequence
  chemically synthesized
ttacacagttaaaagagcta

SEQ ID NO: 4207 - DNA, 20 bp, Artificial Sequence
  chemically synthesized
cacagttaaaagagctacag

SEQ ID NO: 4208 - DNA, 20 bp, Artificial Sequence
  chemically synthesized
agcggatgtcaaatttcctt

SEQ ID NO: 4209 - DNA, 20 bp, Artificial Sequence
  chemically synthesized
tcaaatttccttaagtcttc

SEQ ID NO: 4210 - DNA, 20 bp, Artificial Sequence
  chemically synthesized
ccttaagtcttctggtgaat

SEQ ID NO: 4211 - DNA, 20 bp, Artificial Sequence
  chemically synthesized
ggtgaattggtctcaattac

SEQ ID NO: 4212 - DNA, 20 bp, Artificial Sequence
  chemically synthesized
attggtctcaattactagtc

SEQ ID NO: 4213 - DNA, 20 bp, Artificial Sequence
  chemically synthesized
ttggtctcaattactagtct

SEQ ID NO: 4214 - DNA, 20 bp, Artificial Sequence
  chemically synthesized
cttcctctctcaatttgttt

SEQ ID NO: 4215 - DNA, 20 bp, Artificial Sequence
  chemically synthesized
tgcacccccatctctgtccc

SEQ ID NO: 4216 - DNA, 20 bp, Artificial Sequence
  chemically synthesized
cacccccatctctgtcccaa

SEQ ID NO: 4217 - DNA, 20 bp, Artificial Sequence
  chemically synthesized
cccatctctgtcccaagaga

SEQ ID NO: 4218 - DNA, 20 bp, Artificial Sequence
  chemically synthesized
ctctgtcccaagagaaagaa

SEQ ID NO: 4219 - DNA, 20 bp, Artificial Sequence
  chemically synthesized
ccaagagaaagaacagtgtg

SEQ ID NO: 4220 - DNA, 20 bp, Artificial Sequence
  chemically synthesized
taatcctatttttgaactca

SEQ ID NO: 4221 - DNA, 20 bp, Artificial Sequence
  chemically synthesized
tttgaactcatagttctaaa

SEQ ID NO: 4222 - DNA, 20 bp, Artificial Sequence
  chemically synthesized
aatagtttttgctccactaa

SEQ ID NO: 4223 - DNA, 20 bp, Artificial Sequence
  chemically synthesized
atagtttttgctccactaaa

SEQ ID NO: 4224 - DNA, 20 bp, Artificial Sequence
  chemically synthesized
tagtttttgctccactaaaa

SEQ ID NO: 4225 - DNA, 20 bp, Artificial Sequence
  chemically synthesized
cactaaaagggcttaaaaat

SEQ ID NO: 4226 - DNA, 20 bp, Artificial Sequence
  chemically synthesized
actaaaagggcttaaaaata

SEQ ID NO: 4227 - DNA, 20 bp, Artificial Sequence
  chemically synthesized
aaagggcttaaaaataaggc

SEQ ID NO: 4228 - DNA, 20 bp, Artificial Sequence
  chemically synthesized
aagggcttaaaaataaggct

SEQ ID NO: 4229 - DNA, 20 bp, Artificial Sequence
  chemically synthesized
ggcttaaaaataaggctagg

SEQ ID NO: 4230 - DNA, 20 bp, Artificial Sequence
  chemically synthesized
taaaaataaggctaggaagc

SEQ ID NO: 4231 - DNA, 20 bp, Artificial Sequence
  chemically synthesized
taaggctaggaagctagacc

SEQ ID NO: 4232 - DNA, 20 bp, Artificial Sequence
  chemically synthesized
aaggctaggaagctagacct

SEQ ID NO: 4233 - DNA, 20 bp, Artificial Sequence
  chemically synthesized
ggctaggaagctagacctgg

SEQ ID NO: 4234 - DNA, 20 bp, Artificial Sequence
  chemically synthesized
gctaggaagctagacctggg

SEQ ID NO: 4235 - DNA, 20 bp, Artificial Sequence
  chemically synthesized
ctaggaagctagacctggga

SEQ ID NO: 4236 - DNA, 20 bp, Artificial Sequence
  chemically synthesized
taggaagctagacctgggag

SEQ ID NO: 4237 - DNA, 20 bp, Artificial Sequence
  chemically synthesized
tagacctgggaggggcatta

SEQ ID NO: 4238 - DNA, 20 bp, Artificial Sequence
  chemically synthesized
agacctgggaggggcattac

SEQ ID NO: 4239 - DNA, 20 bp, Artificial Sequence
  chemically synthesized
ctgggaggggcattacaggc

SEQ ID NO: 4240 - DNA, 20 bp, Artificial Sequence
  chemically synthesized
gaggggcattacaggctggc

SEQ ID NO: 4241 - DNA, 20 bp, Artificial Sequence
  chemically synthesized
gggcattacaggctggctgg

SEQ ID NO: 4242 - DNA, 20 bp, Artificial Sequence
  chemically synthesized
acaggctggctggaagcccc

SEQ ID NO: 4243 - DNA, 20 bp, Artificial Sequence
  chemically synthesized
ccccagctgcctccctgcct

SEQ ID NO: 4244 - DNA, 20 bp, Artificial Sequence
  chemically synthesized
ctgcctccctgcctcagatg

SEQ ID NO: 4245 - DNA, 20 bp, Artificial Sequence
  chemically synthesized
tgcctccctgcctcagatgc

SEQ ID NO: 4246 - DNA, 20 bp, Artificial Sequence
  chemically synthesized
gcctccctgcctcagatgca

SEQ ID NO: 4247 - DNA, 20 bp, Artificial Sequence
  chemically synthesized
ctccctgcctcagatgcagg

SEQ ID NO: 4248 - DNA, 20 bp, Artificial Sequence
  chemically synthesized
agatgcagggagaacacctg

SEQ ID NO: 4249 - DNA, 20 bp, Artificial Sequence
  chemically synthesized
ccacccacaccttgtcaccc

SEQ ID NO: 4250 - DNA, 20 bp, Artificial Sequence
  chemically synthesized
ccttgtcacccaagttgcac

SEQ ID NO: 4251 - DNA, 20 bp, Artificial Sequence
  chemically synthesized
acccaagttgcactagatcc

SEQ ID NO: 4252 - DNA, 20 bp, Artificial Sequence
  chemically synthesized
agttgcactagatcctggta

SEQ ID NO: 4253 - DNA, 20 bp, Artificial Sequence
  chemically synthesized
cactagatcctggtacagcc

SEQ ID NO: 4254 - DNA, 20 bp, Artificial Sequence
  chemically synthesized
tagatcctggtacagcccag

SEQ ID NO: 4255 - DNA, 20 bp, Artificial Sequence
  chemically synthesized
atcctggtacagcccagtgg

SEQ ID NO: 4256 - DNA, 20 bp, Artificial Sequence
  chemically synthesized
gtacagcccagtggtggccg

SEQ ID NO: 4257 - DNA, 20 bp, Artificial Sequence
  chemically synthesized
gcccagtggtggccgcagct

SEQ ID NO: 4258 - DNA, 20 bp, Artificial Sequence
  chemically synthesized
cccagtggtggccgcagctc

SEQ ID NO: 4259 - DNA, 20 bp, Artificial Sequence
  chemically synthesized
ccagtggtggccgcagctca

SEQ ID NO: 4260 - DNA, 20 bp, Artificial Sequence
  chemically synthesized
gtggtggccgcagctcaggg

SEQ ID NO: 4261 - DNA, 20 bp, Artificial Sequence
  chemically synthesized
tggccgcagctcagggaaga

SEQ ID NO: 4262 - DNA, 20 bp, Artificial Sequence
  chemically synthesized
ccgcagctcagggaagaaag

SEQ ID NO: 4263 - DNA, 20 bp, Artificial Sequence
  chemically synthesized
cgcagctcagggaagaaaga

SEQ ID NO: 4264 - DNA, 20 bp, Artificial Sequence
  chemically synthesized
ctcagggaagaaagaaggca

SEQ ID NO: 4265 - DNA, 20 bp, Artificial Sequence
  chemically synthesized
ggcaaagccctgctgtgctc

SEQ ID NO: 4266 - DNA, 20 bp, Artificial Sequence
  chemically synthesized
gcaaagccctgctgtgctca

SEQ ID NO: 4267 - DNA, 20 bp, Artificial Sequence
  chemically synthesized
aaagccctgctgtgctcaag

SEQ ID NO: 4268 - DNA, 20 bp, Artificial Sequence
  chemically synthesized
ctgctgtgctcaaggagatt

SEQ ID NO: 4269 - DNA, 20 bp, Artificial Sequence
  chemically synthesized
tgctgtgctcaaggagattg

SEQ ID NO: 4270 - DNA, 20 bp, Artificial Sequence
  chemically synthesized
tcaaggagattgaggcttcc

SEQ ID NO: 4271 - DNA, 20 bp, Artificial Sequence
  chemically synthesized
aggcttcccagccccaaaac

SEQ ID NO: 4272 - DNA, 20 bp, Artificial Sequence
  chemically synthesized
ggcttcccagccccaaaact

SEQ ID NO: 4273 - DNA, 20 bp, Artificial Sequence
  chemically synthesized
ttcccagccccaaaactggg

SEQ ID NO: 4274 - DNA, 20 bp, Artificial Sequence
  chemically synthesized
tcccagccccaaaactggga

SEQ ID NO: 4275 - DNA, 20 bp, Artificial Sequence
  chemically synthesized
cccagccccaaaactgggaa

SEQ ID NO: 4276 - DNA, 20 bp, Artificial Sequence
  chemically synthesized
cccaaaactgggaagggccc

SEQ ID NO: 4277 - DNA, 20 bp, Artificial Sequence
  chemically synthesized
aactgggaagggccctggaa

SEQ ID NO: 4278 - DNA, 20 bp, Artificial Sequence
  chemically synthesized
actgggaagggccctggaat

SEQ ID NO: 4279 - DNA, 20 bp, Artificial Sequence
  chemically synthesized
tgggatatcccctcccctcc

SEQ ID NO: 4280 - DNA, 20 bp, Artificial Sequence
  chemically synthesized
cagcaccccattcccaaacc

SEQ ID NO: 4281 - DNA, 20 bp, Artificial Sequence
  chemically synthesized
cctagccacccatctctgct

SEQ ID NO: 4282 - DNA, 20 bp, Artificial Sequence
  chemically synthesized
ctagccacccatctctgctt

SEQ ID NO: 4283 - DNA, 20 bp, Artificial Sequence
  chemically synthesized
catctctgcttgggacatgc

SEQ ID NO: 4284 - DNA, 20 bp, Artificial Sequence
  chemically synthesized
ctctgcttgggacatgctgg

SEQ ID NO: 4285 - DNA, 20 bp, Artificial Sequence
  chemically synthesized
tctgcttgggacatgctgga

SEQ ID NO: 4286 - DNA, 20 bp, Artificial Sequence
  chemically synthesized
cttgggacatgctggaaggc

SEQ ID NO: 4287 - DNA, 20 bp, Artificial Sequence
  chemically synthesized
gggacatgctggaaggcaag

SEQ ID NO: 4288 - DNA, 20 bp, Artificial Sequence
  chemically synthesized
gacatgctggaaggcaagaa

SEQ ID NO: 4289 - DNA, 20 bp, Artificial Sequence
  chemically synthesized
catgctggaaggcaagaaga

SEQ ID NO: 4290 - DNA, 20 bp, Artificial Sequence
  chemically synthesized
gaaggcaagaagagagaaac

SEQ ID NO: 4291 - DNA, 20 bp, Artificial Sequence
  chemically synthesized
actccttgaaaacaaaaatg

SEQ ID NO: 4292 - DNA, 20 bp, Artificial Sequence
  chemically synthesized
ccttgaaaacaaaaatgaag

SEQ ID NO: 4293 - DNA, 20 bp, Artificial Sequence
  chemically synthesized
cttgaaaacaaaaatgaagc

SEQ ID NO: 4294 - DNA, 20 bp, Artificial Sequence
  chemically synthesized
ttgaaaacaaaaatgaagca

SEQ ID NO: 4295 - DNA, 20 bp, Artificial Sequence
  chemically synthesized
caaaaatgaagcagggatcc

SEQ ID NO: 4296 - DNA, 20 bp, Artificial Sequence
  chemically synthesized
aaaaatgaagcagggatcct

SEQ ID NO: 4297 - DNA, 20 bp, Artificial Sequence
  chemically synthesized
tgaagcagggatcctaggaa

SEQ ID NO: 4298 - DNA, 20 bp, Artificial Sequence
  chemically synthesized
ctaggaaaagtaaaaacatt

SEQ ID NO: 4299 - DNA, 20 bp, Artificial Sequence
  chemically synthesized
aagtaaaaacattcagaacc

SEQ ID NO: 4300 - DNA, 20 bp, Artificial Sequence
  chemically synthesized
agtaaaaacattcagaaccc

SEQ ID NO: 4301 - DNA, 20 bp, Artificial Sequence
  chemically synthesized
gtaaaaacattcagaaccca

SEQ ID NO: 4302 - DNA, 20 bp, Artificial Sequence
  chemically synthesized
ctgtctcccacgacctacac

SEQ ID NO: 4303 - DNA, 20 bp, Artificial Sequence
  chemically synthesized
tgtctcccacgacctacacc

SEQ ID NO: 4304 - DNA, 20 bp, Artificial Sequence
  chemically synthesized
cccttcgcacctctgctttg

SEQ ID NO: 4305 - DNA, 20 bp, Artificial Sequence
  chemically synthesized
cactacaccccacccaccac

SEQ ID NO: 4306 - DNA, 20 bp, Artificial Sequence
  chemically synthesized
caagcacatacacatgctct

SEQ ID NO: 4307 - DNA, 20 bp, Artificial Sequence
  chemically synthesized
aagcacatacacatgctctc

SEQ ID NO: 4308 - DNA, 20 bp, Artificial Sequence
  chemically synthesized
gcacatacacatgctctcag

SEQ ID NO: 4309 - DNA, 20 bp, Artificial Sequence
  chemically synthesized
atacacatgctctcaggagt

SEQ ID NO: 4310 - DNA, 20 bp, Artificial Sequence
  chemically synthesized
acacatgctctcaggagtca

SEQ ID NO: 4311 - DNA, 20 bp, Artificial Sequence
  chemically synthesized
cacatgctctcaggagtcag

SEQ ID NO: 4312 - DNA, 20 bp, Artificial Sequence
  chemically synthesized
acatgctctcaggagtcaga

SEQ ID NO: 4313 - DNA, 20 bp, Artificial Sequence
  chemically synthesized
tcaggagtcagagggtcacc

SEQ ID NO: 4314 - DNA, 20 bp, Artificial Sequence
  chemically synthesized
caggagtcagagggtcaccc

SEQ ID NO: 4315 - DNA, 20 bp, Artificial Sequence
  chemically synthesized
aggagtcagagggtcaccca

SEQ ID NO: 4316 - DNA, 20 bp, Artificial Sequence
  chemically synthesized
gtcagagggtcacccagggc

SEQ ID NO: 4317 - DNA, 20 bp, Artificial Sequence
  chemically synthesized
gtcacccagggctagaactt

SEQ ID NO: 4318 - DNA, 20 bp, Artificial Sequence
  chemically synthesized
gggctagaacttaagccacc

SEQ ID NO: 4319 - DNA, 20 bp, Artificial Sequence
  chemically synthesized
acttaagccacccagcccac

SEQ ID NO: 4320 - DNA, 20 bp, Artificial Sequence
  chemically synthesized
aagccacccagcccacaagc

SEQ ID NO: 4321 - DNA, 20 bp, Artificial Sequence
  chemically synthesized
ccacccagcccacaagctgg

SEQ ID NO: 4322 - DNA, 20 bp, Artificial Sequence
  chemically synthesized
cacccagcccacaagctggc

SEQ ID NO: 4323 - DNA, 20 bp, Artificial Sequence
  chemically synthesized
agcccacaagctggcaggtg

SEQ ID NO: 4324 - DNA, 20 bp, Artificial Sequence
  chemically synthesized
gcccacaagctggcaggtga

SEQ ID NO: 4325 - DNA, 20 bp, Artificial Sequence
  chemically synthesized
ccacaagctggcaggtgaag

SEQ ID NO: 4326 - DNA, 20 bp, Artificial Sequence
  chemically synthesized
cacaagctggcaggtgaagg

SEQ ID NO: 4327 - DNA, 20 bp, Artificial Sequence
  chemically synthesized
agctggcaggtgaaggagga

SEQ ID NO: 4328 - DNA, 20 bp, Artificial Sequence
  chemically synthesized
gctggcaggtgaaggaggac

SEQ ID NO: 4329 - DNA, 20 bp, Artificial Sequence
  chemically synthesized
ctggcaggtgaaggaggaca

SEQ ID NO: 4330 - DNA, 20 bp, Artificial Sequence
  chemically synthesized
ggtgaaggaggacagggatc

SEQ ID NO: 4331 - DNA, 20 bp, Artificial Sequence
  chemically synthesized
gtgaaggaggacagggatca

SEQ ID NO: 4332 - DNA, 20 bp, Artificial Sequence
  chemically synthesized
gaggacagggatcaaggtga

SEQ ID NO: 4333 - DNA, 20 bp, Artificial Sequence
  chemically synthesized
ggtgacagtgctgtccacgc

SEQ ID NO: 4334 - DNA, 20 bp, Artificial Sequence
  chemically synthesized
gtgctgtccacgctggcccc

SEQ ID NO: 4335 - DNA, 20 bp, Artificial Sequence
  chemically synthesized
gtccacgctggcccctggct

SEQ ID NO: 4336 - DNA, 20 bp, Artificial Sequence
  chemically synthesized
ccacgctggcccctggctaa

SEQ ID NO: 4337 - DNA, 20 bp, Artificial Sequence
  chemically synthesized
cccctggctaagagcaactg

SEQ ID NO: 4338 - DNA, 20 bp, Artificial Sequence
  chemically synthesized
ctggctaagagcaactgcag

SEQ ID NO: 4339 - DNA, 20 bp, Artificial Sequence
  chemically synthesized
aagagcaactgcagcagaaa

SEQ ID NO: 4340 - DNA, 20 bp, Artificial Sequence
  chemically synthesized
gtgtttcttctccatttcca

SEQ ID NO: 4341 - DNA, 20 bp, Artificial Sequence
  chemically synthesized
tttcttttccccacatgctc

SEQ ID NO: 4342 - DNA, 20 bp, Artificial Sequence
  chemically synthesized
atgctccagcacatacaact

SEQ ID NO: 4343 - DNA, 20 bp, Artificial Sequence
  chemically synthesized
tgctccagcacatacaactc

SEQ ID NO: 4344 - DNA, 20 bp, Artificial Sequence
  chemically synthesized
gctccagcacatacaactca

SEQ ID NO: 4345 - DNA, 20 bp, Artificial Sequence
  chemically synthesized
gcacatacaactcagggctc

SEQ ID NO: 4346 - DNA, 20 bp, Artificial Sequence
  chemically synthesized
actcagggctccagtgtttt

SEQ ID NO: 4347 - DNA, 20 bp, Artificial Sequence
  chemically synthesized
ctcagggctccagtgtttta

SEQ ID NO: 4348 - DNA, 20 bp, Artificial Sequence
  chemically synthesized
tcagggctccagtgttttaa

SEQ ID NO: 4349 - DNA, 20 bp, Artificial Sequence
  chemically synthesized
taagggcattttttttccac

SEQ ID NO: 4350 - DNA, 20 bp, Artificial Sequence
  chemically synthesized
ggcattttttttccacaagt

SEQ ID NO: 4351 - DNA, 20 bp, Artificial Sequence
  chemically synthesized
aagtgagattaattttctaa

SEQ ID NO: 4352 - DNA, 20 bp, Artificial Sequence
  chemically synthesized
ttaattttctaacagaaccc

SEQ ID NO: 4353 - DNA, 20 bp, Artificial Sequence
  chemically synthesized
ccctagtacattctgtgtga

SEQ ID NO: 4354 - DNA, 20 bp, Artificial Sequence
  chemically synthesized
tagtacattctgtgtgatgg

SEQ ID NO: 4355 - DNA, 20 bp, Artificial Sequence
  chemically synthesized
agtacattctgtgtgatggt

SEQ ID NO: 4356 - DNA, 20 bp, Artificial Sequence
  chemically synthesized
tacattctgtgtgatggtgg

SEQ ID NO: 4357 - DNA, 20 bp, Artificial Sequence
  chemically synthesized
cattctgtgtgatggtggga

SEQ ID NO: 4358 - DNA, 20 bp, Artificial Sequence
  chemically synthesized
ggagagccttttgaccatca

SEQ ID NO: 4359 - DNA, 20 bp, Artificial Sequence
  chemically synthesized
ttttgaccatcacagtgtcc

SEQ ID NO: 4360 - DNA, 20 bp, Artificial Sequence
  chemically synthesized
ccatcacagtgtcctggaat

SEQ ID NO: 4361 - DNA, 20 bp, Artificial Sequence
  chemically synthesized
acagtgtcctggaatgagct

SEQ ID NO: 4362 - DNA, 20 bp, Artificial Sequence
  chemically synthesized
aatgagctcagcatgctctc

SEQ ID NO: 4363 - DNA, 20 bp, Artificial Sequence
  chemically synthesized
atgagctcagcatgctctct

SEQ ID NO: 4364 - DNA, 20 bp, Artificial Sequence
  chemically synthesized
agctcagcatgctctctggg

SEQ ID NO: 4365 - DNA, 20 bp, Artificial Sequence
  chemically synthesized
atgctctctgggaagtgaat

SEQ ID NO: 4366 - DNA, 20 bp, Artificial Sequence
  chemically synthesized
tgctctctgggaagtgaatt

SEQ ID NO: 4367 - DNA, 20 bp, Artificial Sequence
  chemically synthesized
ctctgggaagtgaattggga

SEQ ID NO: 4368 - DNA, 20 bp, Artificial Sequence
  chemically synthesized
aagtgaattgggaaagtgaa

SEQ ID NO: 4369 - DNA, 20 bp, Artificial Sequence
  chemically synthesized
agtgaattgggaaagtgaat

SEQ ID NO: 4370 - DNA, 20 bp, Artificial Sequence
  chemically synthesized
gtgaattgggaaagtgaatg

SEQ ID NO: 4371 - DNA, 20 bp, Artificial Sequence
  chemically synthesized
ttgggaaagtgaatggggaa

SEQ ID NO: 4372 - DNA, 20 bp, Artificial Sequence
  chemically synthesized
tggggaaaagcctcaacaca

SEQ ID NO: 4373 - DNA, 20 bp, Artificial Sequence
  chemically synthesized
gaaaagcctcaacacacaga

SEQ ID NO: 4374 - DNA, 20 bp, Artificial Sequence
  chemically synthesized
tcaacacacagacagcccca

SEQ ID NO: 4375 - DNA, 20 bp, Artificial Sequence
  chemically synthesized
cagccccatggaaaattctc

SEQ ID NO: 4376 - DNA, 20 bp, Artificial Sequence
  chemically synthesized
ccatggaaaattctccagct

SEQ ID NO: 4377 - DNA, 20 bp, Artificial Sequence
  chemically synthesized
catggaaaattctccagctc

SEQ ID NO: 4378 - DNA, 20 bp, Artificial Sequence
  chemically synthesized
tccagctcaggaaacccacc

SEQ ID NO: 4379 - DNA, 20 bp, Artificial Sequence
  chemically synthesized
ccagctcaggaaacccacct

SEQ ID NO: 4380 - DNA, 20 bp, Artificial Sequence
  chemically synthesized
tcaggaaacccacctaggta

SEQ ID NO: 4381 - DNA, 20 bp, Artificial Sequence
  chemically synthesized
aggaaacccacctaggtata

SEQ ID NO: 4382 - DNA, 20 bp, Artificial Sequence
  chemically synthesized
ctaggtatagagaccttctc

SEQ ID NO: 4383 - DNA, 20 bp, Artificial Sequence
  chemically synthesized
gagaccttctccggaacctc

SEQ ID NO: 4384 - DNA, 20 bp, Artificial Sequence
  chemically synthesized
ccggaacctctggtctgttc

SEQ ID NO: 4385 - DNA, 20 bp, Artificial Sequence
  chemically synthesized
tgttctagtcctgctgtcaa

SEQ ID NO: 4386 - DNA, 20 bp, Artificial Sequence
  chemically synthesized
ctagtcctgctgtcaaaaga

SEQ ID NO: 4387 - DNA, 20 bp, Artificial Sequence
  chemically synthesized
tagtcctgctgtcaaaagaa

SEQ ID NO: 4388 - DNA, 20 bp, Artificial Sequence
  chemically synthesized
agtcctgctgtcaaaagaaa

SEQ ID NO: 4389 - DNA, 20 bp, Artificial Sequence
  chemically synthesized
gtcctgctgtcaaaagaaag

SEQ ID NO: 4390 - DNA, 20 bp, Artificial Sequence
  chemically synthesized
tgctgtcaaaagaaaggggt

SEQ ID NO: 4391 - DNA, 20 bp, Artificial Sequence
  chemically synthesized
ggggttggactgatgtttcc

SEQ ID NO: 4392 - DNA, 20 bp, Artificial Sequence
  chemically synthesized
gttggactgatgtttcccag

SEQ ID NO: 4393 - DNA, 20 bp, Artificial Sequence
  chemically synthesized
tggactgatgtttcccagtg

SEQ ID NO: 4394 - DNA, 20 bp, Artificial Sequence
  chemically synthesized
ggactgatgtttcccagtgg

SEQ ID NO: 4395 - DNA, 20 bp, Artificial Sequence
  chemically synthesized
gactgatgtttcccagtgga

SEQ ID NO: 4396 - DNA, 20 bp, Artificial Sequence
  chemically synthesized
gagggcttgtttgtcatttt

SEQ ID NO: 4397 - DNA, 20 bp, Artificial Sequence
  chemically synthesized
tcatttttggacctaacatc

SEQ ID NO: 4398 - DNA, 20 bp, Artificial Sequence
  chemically synthesized
gacctaacatccagttcatc

SEQ ID NO: 4399 - DNA, 20 bp, Artificial Sequence
  chemically synthesized
acctaacatccagttcatca

SEQ ID NO: 4400 - DNA, 20 bp, Artificial Sequence
  chemically synthesized
tcaaggtcacttctgactcc

SEQ ID NO: 4401 - DNA, 20 bp, Artificial Sequence
  chemically synthesized
caaggtcacttctgactccc

SEQ ID NO: 4402 - DNA, 20 bp, Artificial Sequence
  chemically synthesized
ggtcacttctgactcccagg

SEQ ID NO: 4403 - DNA, 20 bp, Artificial Sequence
  chemically synthesized
tcacttctgactcccaggaa

SEQ ID NO: 4404 - DNA, 20 bp, Artificial Sequence
  chemically synthesized
acttctgactcccaggaaga

SEQ ID NO: 4405 - DNA, 20 bp, Artificial Sequence
  chemically synthesized
cttctgactcccaggaagag

SEQ ID NO: 4406 - DNA, 20 bp, Artificial Sequence
  chemically synthesized
ctgactcccaggaagagagg

SEQ ID NO: 4407 - DNA, 20 bp, Artificial Sequence
  chemically synthesized
ggaagagaggcagacctgtt

SEQ ID NO: 4408 - DNA, 20 bp, Artificial Sequence
  chemically synthesized
gaagagaggcagacctgtta

SEQ ID NO: 4409 - DNA, 20 bp, Artificial Sequence
  chemically synthesized
aagagaggcagacctgttaa

SEQ ID NO: 4410 - DNA, 20 bp, Artificial Sequence
  chemically synthesized
agagaggcagacctgttaag

SEQ ID NO: 4411 - DNA, 20 bp, Artificial Sequence
  chemically synthesized
gaggcagacctgttaagggg

SEQ ID NO: 4412 - DNA, 20 bp, Artificial Sequence
  chemically synthesized
aggcagacctgttaaggggc

SEQ ID NO: 4413 - DNA, 20 bp, Artificial Sequence
  chemically synthesized
cagacctgttaaggggcggg

SEQ ID NO: 4414 - DNA, 20 bp, Artificial Sequence
  chemically synthesized
tgttaaggggcgggtggttt

SEQ ID NO: 4415 - DNA, 20 bp, Artificial Sequence
  chemically synthesized
ggcgggtggtttgagccact

SEQ ID NO: 4416 - DNA, 20 bp, Artificial Sequence
  chemically synthesized
gcgggtggtttgagccactt

SEQ ID NO: 4417 - DNA, 20 bp, Artificial Sequence
  chemically synthesized
ttgagccacttaggacattt

SEQ ID NO: 4418 - DNA, 20 bp, Artificial Sequence
  chemically synthesized
atctctcatgattctatctt

SEQ ID NO: 4419 - DNA, 20 bp, Artificial Sequence
  chemically synthesized
ctctcatgattctatcttga

SEQ ID NO: 4420 - DNA, 20 bp, Artificial Sequence
  chemically synthesized
atgattctatcttgagagtt

SEQ ID NO: 4421 - DNA, 20 bp, Artificial Sequence
  chemically synthesized
tctatcttgagagtttagtt

SEQ ID NO: 4422 - DNA, 20 bp, Artificial Sequence
  chemically synthesized
tcttgagagtttagtttggt

SEQ ID NO: 4423 - DNA, 20 bp, Artificial Sequence
  chemically synthesized
ttgagagtttagtttggttg

SEQ ID NO: 4424 - DNA, 20 bp, Artificial Sequence
  chemically synthesized
agtttagtttggttggagtt

SEQ ID NO: 4425 - DNA, 20 bp, Artificial Sequence
  chemically synthesized
ttggttggagtttagttttt

SEQ ID NO: 4426 - DNA, 20 bp, Artificial Sequence
  chemically synthesized
tagtttttgagttttttgtt

SEQ ID NO: 4427 - DNA, 20 bp, Artificial Sequence
  chemically synthesized
agtttttgagttttttgttc

SEQ ID NO: 4428 - DNA, 20 bp, Artificial Sequence
  chemically synthesized
tgagttttttgttcgggttg

SEQ ID NO: 4429 - DNA, 20 bp, Artificial Sequence
  chemically synthesized
cctccattaaaaaaaaaaat

SEQ ID NO: 4430 - DNA, 20 bp, Artificial Sequence
  chemically synthesized
tccattaaaaaaaaaaattg

SEQ ID NO: 4431 - DNA, 20 bp, Artificial Sequence
  chemically synthesized
gtatttctgtttcctgttca

SEQ ID NO: 4432 - DNA, 20 bp, Artificial Sequence
  chemically synthesized
atttctgtttcctgttcacg

SEQ ID NO: 4433 - DNA, 20 bp, Artificial Sequence
  chemically synthesized
tctgtttcctgttcacggag

SEQ ID NO: 4434 - DNA, 20 bp, Artificial Sequence
  chemically synthesized
tttcctgttcacggagcgga

SEQ ID NO: 4435 - DNA, 20 bp, Artificial Sequence
  chemically synthesized
cctgttcacggagcggacag

SEQ ID NO: 4436 - DNA, 20 bp, Artificial Sequence
  chemically synthesized
ctgttcacggagcggacaga

SEQ ID NO: 4437 - DNA, 20 bp, Artificial Sequence
  chemically synthesized
gttcacggagcggacagaag

SEQ ID NO: 4438 - DNA, 20 bp, Artificial Sequence
  chemically synthesized
ttcacggagcggacagaagg

SEQ ID NO: 4439 - DNA, 20 bp, Artificial Sequence
  chemically synthesized
tcacggagcggacagaagga

SEQ ID NO: 4440 - DNA, 20 bp, Artificial Sequence
  chemically synthesized
gcggacagaaggagggtgtg

SEQ ID NO: 4441 - DNA, 20 bp, Artificial Sequence
  chemically synthesized
gacagaaggagggtgtgcag

SEQ ID NO: 4442 - DNA, 20 bp, Artificial Sequence
  chemically synthesized
cagaaggagggtgtgcagtg

SEQ ID NO: 4443 - DNA, 20 bp, Artificial Sequence
  chemically synthesized
agaaggagggtgtgcagtgg

SEQ ID NO: 4444 - DNA, 20 bp, Artificial Sequence
  chemically synthesized
aaggagggtgtgcagtggag

SEQ ID NO: 4445 - DNA, 20 bp, Artificial Sequence
  chemically synthesized
aggagggtgtgcagtggagg

SEQ ID NO: 4446 - DNA, 20 bp, Artificial Sequence
  chemically synthesized
tgtgcagtggaggaggtgtg

SEQ ID NO: 4447 - DNA, 20 bp, Artificial Sequence
  chemically synthesized
gtgcagtggaggaggtgtgt

SEQ ID NO: 4448 - DNA, 20 bp, Artificial Sequence
  chemically synthesized
tgcagtggaggaggtgtgtg

SEQ ID NO: 4449 - DNA, 20 bp, Artificial Sequence
  chemically synthesized
cagtggaggaggtgtgtggg

SEQ ID NO: 4450 - DNA, 20 bp, Artificial Sequence
  chemically synthesized
agtggaggaggtgtgtgggg

SEQ ID NO: 4451 - DNA, 20 bp, Artificial Sequence
  chemically synthesized
tggaggaggtgtgtggggag

SEQ ID NO: 4452 - DNA, 20 bp, Artificial Sequence
  chemically synthesized
ggaggaggtgtgtggggagg

SEQ ID NO: 4453 - DNA, 20 bp, Artificial Sequence
  chemically synthesized
gtggggaggaggctgataca

SEQ ID NO: 4454 - DNA, 20 bp, Artificial Sequence
  chemically synthesized
ggggaggaggctgatacatg

SEQ ID NO: 4455 - DNA, 20 bp, Artificial Sequence
  chemically synthesized
gaggaggctgatacatggag

SEQ ID NO: 4456 - DNA, 20 bp, Artificial Sequence
  chemically synthesized
ggaggctgatacatggagca

SEQ ID NO: 4457 - DNA, 20 bp, Artificial Sequence
  chemically synthesized
ctgatacatggagcagagcc

SEQ ID NO: 4458 - DNA, 20 bp, Artificial Sequence
  chemically synthesized
ggagcagagccgagaatatc

SEQ ID NO: 4459 - DNA, 20 bp, Artificial Sequence
  chemically synthesized
gagccgagaatatccggaac

SEQ ID NO: 4460 - DNA, 20 bp, Artificial Sequence
  chemically synthesized
gccgagaatatccggaactg

SEQ ID NO: 4461 - DNA, 20 bp, Artificial Sequence
  chemically synthesized
gaatatccggaactggagaa

SEQ ID NO: 4462 - DNA, 20 bp, Artificial Sequence
  chemically synthesized
atccggaactggagaaaagt

SEQ ID NO: 4463 - DNA, 20 bp, Artificial Sequence
  chemically synthesized
aactggagaaaagtgagaaa

SEQ ID NO: 4464 - DNA, 20 bp, Artificial Sequence
  chemically synthesized
ctggagaaaagtgagaaatg

SEQ ID NO: 4465 - DNA, 20 bp, Artificial Sequence
  chemically synthesized
gagaaatggagcttttttct

SEQ ID NO: 4466 - DNA, 20 bp, Artificial Sequence
  chemically synthesized
cttttttcttggcttccaaa

SEQ ID NO: 4467 - DNA, 20 bp, Artificial Sequence
  chemically synthesized
taatttccactgccactgct

SEQ ID NO: 4468 - DNA, 20 bp, Artificial Sequence
  chemically synthesized
cactgccactgcttagttcc

SEQ ID NO: 4469 - DNA, 20 bp, Artificial Sequence
  chemically synthesized
actgccactgcttagttcct

SEQ ID NO: 4470 - DNA, 20 bp, Artificial Sequence
  chemically synthesized
actgcttagttcctgggcac

SEQ ID NO: 4471 - DNA, 20 bp, Artificial Sequence
  chemically synthesized
ctgcttagttcctgggcacc

SEQ ID NO: 4472 - DNA, 20 bp, Artificial Sequence
  chemically synthesized
gttcctgggcaccaggcata

SEQ ID NO: 4473 - DNA, 20 bp, Artificial Sequence
  chemically synthesized
tcctgggcaccaggcataca

SEQ ID NO: 4474 - DNA, 20 bp, Artificial Sequence
  chemically synthesized
tgggcaccaggcatacagag

SEQ ID NO: 4475 - DNA, 20 bp, Artificial Sequence
  chemically synthesized
gggcaccaggcatacagagt

SEQ ID NO: 4476 - DNA, 20 bp, Artificial Sequence
  chemically synthesized
accaggcatacagagtggga

SEQ ID NO: 4477 - DNA, 20 bp, Artificial Sequence
  chemically synthesized
ccaggcatacagagtgggaa

SEQ ID NO: 4478 - DNA, 20 bp, Artificial Sequence
  chemically synthesized
caggcatacagagtgggaaa

SEQ ID NO: 4479 - DNA, 20 bp, Artificial Sequence
  chemically synthesized
aggcatacagagtgggaaag

SEQ ID NO: 4480 - DNA, 20 bp, Artificial Sequence
  chemically synthesized
gtgacaactttgccacaaat

SEQ ID NO: 4481 - DNA, 20 bp, Artificial Sequence
  chemically synthesized
tgacaactttgccacaaatc

SEQ ID NO: 4482 - DNA, 20 bp, Artificial Sequence
  chemically synthesized
ctttgccacaaatcaggatt

SEQ ID NO: 4483 - DNA, 20 bp, Artificial Sequence
  chemically synthesized
ggatttggcatttaaatcca

SEQ ID NO: 4484 - DNA, 20 bp, Artificial Sequence
  chemically synthesized
gatttggcatttaaatccac

SEQ ID NO: 4485 - DNA, 20 bp, Artificial Sequence
  chemically synthesized
ttggcatttaaatccacagg

SEQ ID NO: 4486 - DNA, 20 bp, Artificial Sequence
  chemically synthesized
catttaaatccacaggaagc

SEQ ID NO: 4487 - DNA, 20 bp, Artificial Sequence
  chemically synthesized
ttaaatccacaggaagcaag

SEQ ID NO: 4488 - DNA, 20 bp, Artificial Sequence
  chemically synthesized
tccacaggaagcaagaagaa

SEQ ID NO: 4489 - DNA, 20 bp, Artificial Sequence
  chemically synthesized
cacaggaagcaagaagaata

SEQ ID NO: 4490 - DNA, 20 bp, Artificial Sequence
  chemically synthesized
acaggaagcaagaagaatag

SEQ ID NO: 4491 - DNA, 20 bp, Artificial Sequence
  chemically synthesized
caggaagcaagaagaataga

SEQ ID NO: 4492 - DNA, 20 bp, Artificial Sequence
  chemically synthesized
atagagggactgcttattta

SEQ ID NO: 4493 - DNA, 20 bp, Artificial Sequence
  chemically synthesized
actgcttatttatagatttg

SEQ ID NO: 4494 - DNA, 20 bp, Artificial Sequence
  chemically synthesized
ttatagatttgcagatgaat

SEQ ID NO: 4495 - DNA, 20 bp, Artificial Sequence
  chemically synthesized
atgcacttctcgcgtatgtg

SEQ ID NO: 4496 - DNA, 20 bp, Artificial Sequence
  chemically synthesized
tgcacttctcgcgtatgtga

SEQ ID NO: 4497 - DNA, 20 bp, Artificial Sequence
  chemically synthesized
cacttctcgcgtatgtgaag

SEQ ID NO: 4498 - DNA, 20 bp, Artificial Sequence
  chemically synthesized
tgaaggagcaattccatttt

SEQ ID NO: 4499 - DNA, 20 bp, Artificial Sequence
  chemically synthesized
agcaattccattttcagact

SEQ ID NO: 4500 - DNA, 20 bp, Artificial Sequence
  chemically synthesized
attccattttcagacttgga

SEQ ID NO: 4501 - DNA, 20 bp, Artificial Sequence
  chemically synthesized
ttggaaagttctccataatt

SEQ ID NO: 4502 - DNA, 20 bp, Artificial Sequence
  chemically synthesized
taagtatcacccaaccctga

SEQ ID NO: 4503 - DNA, 20 bp, Artificial Sequence
  chemically synthesized
ctgaaagcacactgcatccc

SEQ ID NO: 4504 - DNA, 20 bp, Artificial Sequence
  chemically synthesized
tgaaagcacactgcatccca

SEQ ID NO: 4505 - DNA, 20 bp, Artificial Sequence
  chemically synthesized
gcacactgcatcccaaggtt

SEQ ID NO: 4506 - DNA, 20 bp, Artificial Sequence
  chemically synthesized
ctgcatcccaaggttaagat

SEQ ID NO: 4507 - DNA, 20 bp, Artificial Sequence
  chemically synthesized
taagatcagcttcctgaaaa

SEQ ID NO: 4508 - DNA, 20 bp, Artificial Sequence
  chemically synthesized
aagatcagcttcctgaaaac

SEQ ID NO: 4509 - DNA, 20 bp, Artificial Sequence
  chemically synthesized
agatcagcttcctgaaaaca

SEQ ID NO: 4510 - DNA, 20 bp, Artificial Sequence
  chemically synthesized
tcagcttcctgaaaacaggg

SEQ ID NO: 4511 - DNA, 20 bp, Artificial Sequence
  chemically synthesized
gcttcctgaaaacagggcag

SEQ ID NO: 4512 - DNA, 20 bp, Artificial Sequence
  chemically synthesized
agggcagaagactgctgctt

SEQ ID NO: 4513 - DNA, 20 bp, Artificial Sequence
  chemically synthesized
gcagaagactgctgcttcag

SEQ ID NO: 4514 - DNA, 20 bp, Artificial Sequence
  chemically synthesized
gaagactgctgcttcagtgg

SEQ ID NO: 4515 - DNA, 20 bp, Artificial Sequence
  chemically synthesized
agctcaaaaattctattttg

SEQ ID NO: 4516 - DNA, 20 bp, Artificial Sequence
  chemically synthesized
gctcaaaaattctattttga

SEQ ID NO: 4517 - DNA, 20 bp, Artificial Sequence
  chemically synthesized
aaaaattctattttgaagga

SEQ ID NO: 4518 - DNA, 20 bp, Artificial Sequence
  chemically synthesized
aaaattctattttgaaggac

SEQ ID NO: 4519 - DNA, 20 bp, Artificial Sequence
  chemically synthesized
ttctattttgaaggacaggt

SEQ ID NO: 4520 - DNA, 20 bp, Artificial Sequence
  chemically synthesized
agtaccacactacatttaac

SEQ ID NO: 4521 - DNA, 20 bp, Artificial Sequence
  chemically synthesized
acactacatttaactggatt

SEQ ID NO: 4522 - DNA, 20 bp, Artificial Sequence
  chemically synthesized
attcagttcatgtgattata

SEQ ID NO: 4523 - DNA, 20 bp, Artificial Sequence
  chemically synthesized
ttatacagtgccttgctttc

SEQ ID NO: 4524 - DNA, 20 bp, Artificial Sequence
  chemically synthesized
tgacattttaaatatccaac

SEQ ID NO: 4525 - DNA, 20 bp, Artificial Sequence
  chemically synthesized
tccaactagacaaataattg

SEQ ID NO: 4526 - DNA, 20 bp, Artificial Sequence
  chemically synthesized
ataattgcagcaataattga

SEQ ID NO: 4527 - DNA, 20 bp, Artificial Sequence
  chemically synthesized
attgcagcaataattgatag

SEQ ID NO: 4528 - DNA, 20 bp, Artificial Sequence
  chemically synthesized
tgcagcaataattgatagca

SEQ ID NO: 4529 - DNA, 20 bp, Artificial Sequence
  chemically synthesized
caataattgatagcagagtc

SEQ ID NO: 4530 - DNA, 20 bp, Artificial Sequence
  chemically synthesized
aattgatagcagagtcaagc

SEQ ID NO: 4531 - DNA, 20 bp, Artificial Sequence
  chemically synthesized
tgatagcagagtcaagctgg

SEQ ID NO: 4532 - DNA, 20 bp, Artificial Sequence
  chemically synthesized
caagctggaagatcattgat

SEQ ID NO: 4533 - DNA, 20 bp, Artificial Sequence
  chemically synthesized
gctggaagatcattgattgg

SEQ ID NO: 4534 - DNA, 20 bp, Artificial Sequence
  chemically synthesized
tggaagatcattgattggca

SEQ ID NO: 4535 - DNA, 20 bp, Artificial Sequence
  chemically synthesized
aatctttctttcaaacatta

SEQ ID NO: 4536 - DNA, 20 bp, Artificial Sequence
  chemically synthesized
ttacagaaatgatgatgttt

SEQ ID NO: 4537 - DNA, 20 bp, Artificial Sequence
  chemically synthesized
caaaatctgatttactgata

SEQ ID NO: 4538 - DNA, 20 bp, Artificial Sequence
  chemically synthesized
aaaatctgatttactgataa

SEQ ID NO: 4539 - DNA, 20 bp, Artificial Sequence
  chemically synthesized
tttactgataaaggcactgc

SEQ ID NO: 4540 - DNA, 20 bp, Artificial Sequence
  chemically synthesized
ctgcaagaaaacctgcactt

SEQ ID NO: 4541 - DNA, 20 bp, Artificial Sequence
  chemically synthesized
tcagcccatgattactttgc

SEQ ID NO: 4542 - DNA, 20 bp, Artificial Sequence
  chemically synthesized
gattactttgcgagatgttt

SEQ ID NO: 4543 - DNA, 20 bp, Artificial Sequence
  chemically synthesized
tactttgcgagatgtttgag

SEQ ID NO: 4544 - DNA, 20 bp, Artificial Sequence
  chemically synthesized
gcgagatgtttgagaagaat

SEQ ID NO: 4545 - DNA, 20 bp, Artificial Sequence
  chemically synthesized
cgagatgtttgagaagaatc

SEQ ID NO: 4546 - DNA, 20 bp, Artificial Sequence
  chemically synthesized
gatgtttgagaagaatcagg

SEQ ID NO: 4547 - DNA, 20 bp, Artificial Sequence
  chemically synthesized
tatttcccatgaataactgc

SEQ ID NO: 4548 - DNA, 20 bp, Artificial Sequence
  chemically synthesized
atttcccatgaataactgca

SEQ ID NO: 4549 - DNA, 20 bp, Artificial Sequence
  chemically synthesized
cccatgaataactgcaagga

SEQ ID NO: 4550 - DNA, 20 bp, Artificial Sequence
  chemically synthesized
gaataactgcaaggatagtg

SEQ ID NO: 4551 - DNA, 20 bp, Artificial Sequence
  chemically synthesized
aataactgcaaggatagtgt

SEQ ID NO: 4552 - DNA, 20 bp, Artificial Sequence
  chemically synthesized
aactgcaaggatagtgtggg

SEQ ID NO: 4553 - DNA, 20 bp, Artificial Sequence
  chemically synthesized
gcaaggatagtgtgggtagt

SEQ ID NO: 4554 - DNA, 20 bp, Artificial Sequence
  chemically synthesized
aaggatagtgtgggtagttg

SEQ ID NO: 4555 - DNA, 20 bp, Artificial Sequence
  chemically synthesized
aggatagtgtgggtagttgg

SEQ ID NO: 4556 - DNA, 20 bp, Artificial Sequence
  chemically synthesized
gatagtgtgggtagttggag

SEQ ID NO: 4557 - DNA, 20 bp, Artificial Sequence
  chemically synthesized
tagttggaggagaatcaaca

SEQ ID NO: 4558 - DNA, 20 bp, Artificial Sequence
  chemically synthesized
agttggaggagaatcaacac

SEQ ID NO: 4559 - DNA, 20 bp, Artificial Sequence
  chemically synthesized
ggaggagaatcaacacaggc

SEQ ID NO: 4560 - DNA, 20 bp, Artificial Sequence
  chemically synthesized
aggagaatcaacacaggcga

SEQ ID NO: 4561 - DNA, 20 bp, Artificial Sequence
  chemically synthesized
agaatcaacacaggcgagag

SEQ ID NO: 4562 - DNA, 20 bp, Artificial Sequence
  chemically synthesized
ctacacttcctgaacaatgc

SEQ ID NO: 4563 - DNA, 20 bp, Artificial Sequence
  chemically synthesized
gaacaatgctagccaacaat

SEQ ID NO: 4564 - DNA, 20 bp, Artificial Sequence
  chemically synthesized
aacaatgctagccaacaatc

SEQ ID NO: 4565 - DNA, 20 bp, Artificial Sequence
  chemically synthesized
acaatgctagccaacaatca

SEQ ID NO: 4566 - DNA, 20 bp, Artificial Sequence
  chemically synthesized
tagccaacaatcagggttta

SEQ ID NO: 4567 - DNA, 20 bp, Artificial Sequence
  chemically synthesized
cccctctaatatatatcccg

SEQ ID NO: 4568 - DNA, 20 bp, Artificial Sequence
  chemically synthesized
ctctaatatatatcccgtgg

SEQ ID NO: 4569 - DNA, 20 bp, Artificial Sequence
  chemically synthesized
ctaatatatatcccgtggta

SEQ ID NO: 4570 - DNA, 20 bp, Artificial Sequence
  chemically synthesized
tatatcccgtggtagagaaa

SEQ ID NO: 4571 - DNA, 20 bp, Artificial Sequence
  chemically synthesized
ggtagagaaatggtcttgac

SEQ ID NO: 4572 - DNA, 20 bp, Artificial Sequence
  chemically synthesized
gtagagaaatggtcttgaca

SEQ ID NO: 4573 - DNA, 20 bp, Artificial Sequence
  chemically synthesized
tagagaaatggtcttgacaa

SEQ ID NO: 4574 - DNA, 20 bp, Artificial Sequence
  chemically synthesized
agagaaatggtcttgacaag

SEQ ID NO: 4575 - DNA, 20 bp, Artificial Sequence
  chemically synthesized
gaaatggtcttgacaagggg

SEQ ID NO: 4576 - DNA, 20 bp, Artificial Sequence
  chemically synthesized
ggtcttgacaaggggaagac

SEQ ID NO: 4577 - DNA, 20 bp, Artificial Sequence
  chemically synthesized
gtcttgacaaggggaagacc

SEQ ID NO: 4578 - DNA, 20 bp, Artificial Sequence
  chemically synthesized
gacaaggggaagaccaggaa

SEQ ID NO: 4579 - DNA, 20 bp, Artificial Sequence
  chemically synthesized
aaggggaagaccaggaaaag

SEQ ID NO: 4580 - DNA, 20 bp, Artificial Sequence
  chemically synthesized
aaagaagacacacaaataat

SEQ ID NO: 4581 - DNA, 20 bp, Artificial Sequence
  chemically synthesized
cacaaataatcagctccatt

SEQ ID NO: 4582 - DNA, 20 bp, Artificial Sequence
  chemically synthesized
acaaataatcagctccattc

SEQ ID NO: 4583 - DNA, 20 bp, Artificial Sequence
  chemically synthesized
gctccattcaggcctttgaa

SEQ ID NO: 4584 - DNA, 20 bp, Artificial Sequence
  chemically synthesized
ccattcaggcctttgaaaag

SEQ ID NO: 4585 - DNA, 20 bp, Artificial Sequence
  chemically synthesized
tttaaatcgatgcctcaaat

SEQ ID NO: 4586 - DNA, 20 bp, Artificial Sequence
  chemically synthesized
ttaaatcgatgcctcaaatt

SEQ ID NO: 4587 - DNA, 20 bp, Artificial Sequence
  chemically synthesized
gggactcaaattcccctgcc

SEQ ID NO: 4588 - DNA, 20 bp, Artificial Sequence
  chemically synthesized
aaattcccctgcccagtgca

SEQ ID NO: 4589 - DNA, 20 bp, Artificial Sequence
  chemically synthesized
ctgcccagtgcaaagatccc

SEQ ID NO: 4590 - DNA, 20 bp, Artificial Sequence
  chemically synthesized
cagtgcaaagatccctggcc

SEQ ID NO: 4591 - DNA, 20 bp, Artificial Sequence
  chemically synthesized
agtgcaaagatccctggcca

SEQ ID NO: 4592 - DNA, 20 bp, Artificial Sequence
  chemically synthesized
caaagatccctggccaaggt

SEQ ID NO: 4593 - DNA, 20 bp, Artificial Sequence
  chemically synthesized
agatccctggccaaggtcag

SEQ ID NO: 4594 - DNA, 20 bp, Artificial Sequence
  chemically synthesized
tggccaaggtcagaagactt

SEQ ID NO: 4595 - DNA, 20 bp, Artificial Sequence
  chemically synthesized
aaggtcagaagacttgagac

SEQ ID NO: 4596 - DNA, 20 bp, Artificial Sequence
  chemically synthesized
aggtcagaagacttgagacc

SEQ ID NO: 4597 - DNA, 20 bp, Artificial Sequence
  chemically synthesized
cagaagacttgagaccaggc

SEQ ID NO: 4598 - DNA, 20 bp, Artificial Sequence
  chemically synthesized
acttgagaccaggcaagtcc

SEQ ID NO: 4599 - DNA, 20 bp, Artificial Sequence
  chemically synthesized
aggcaagtcccagatgatct

SEQ ID NO: 4600 - DNA, 20 bp, Artificial Sequence
  chemically synthesized
ggcaagtcccagatgatctc

SEQ ID NO: 4601 - DNA, 20 bp, Artificial Sequence
  chemically synthesized
agtcccagatgatctcaggc

SEQ ID NO: 4602 - DNA, 20 bp, Artificial Sequence
  chemically synthesized
gatgatctcaggcaagtccc

SEQ ID NO: 4603 - DNA, 20 bp, Artificial Sequence
  chemically synthesized
atgatctcaggcaagtcccc

SEQ ID NO: 4604 - DNA, 20 bp, Artificial Sequence
  chemically synthesized
ctcaggcaagtccccaggta

SEQ ID NO: 4605 - DNA, 20 bp, Artificial Sequence
  chemically synthesized
caagtccccaggtatagctg

SEQ ID NO: 4606 - DNA, 20 bp, Artificial Sequence
  chemically synthesized
aggtatagctgcagtccctt

SEQ ID NO: 4607 - DNA, 20 bp, Artificial Sequence
  chemically synthesized
agctgcagtccctttagccc

SEQ ID NO: 4608 - DNA, 20 bp, Artificial Sequence
  chemically synthesized
cccagtctgtttctctgtcc

SEQ ID NO: 4609 - DNA, 20 bp, Artificial Sequence
  chemically synthesized
ccagtctgtttctctgtcca

SEQ ID NO: 4610 - DNA, 20 bp, Artificial Sequence
  chemically synthesized
gtctgtttctctgtccaagg

SEQ ID NO: 4611 - DNA, 20 bp, Artificial Sequence
  chemically synthesized
gtgttttgattgtaatattt

SEQ ID NO: 4612 - DNA, 20 bp, Artificial Sequence
  chemically synthesized
tttgattgtaatatttaagt

SEQ ID NO: 4613 - DNA, 20 bp, Artificial Sequence
  chemically synthesized
ttgattgtaatatttaagtt

SEQ ID NO: 4614 - DNA, 20 bp, Artificial Sequence
  chemically synthesized
tgattgtaatatttaagtta

SEQ ID NO: 4615 - DNA, 20 bp, Artificial Sequence
  chemically synthesized
gggcactgtgttcaacaact

SEQ ID NO: 4616 - DNA, 20 bp, Artificial Sequence
  chemically synthesized
gttcaacaactcagaccctg

SEQ ID NO: 4617 - DNA, 20 bp, Artificial Sequence
  chemically synthesized
tcagaccctgtggaatgctg

SEQ ID NO: 4618 - DNA, 20 bp, Artificial Sequence
  chemically synthesized
ctgtggaatgctgcagttgt

SEQ ID NO: 4619 - DNA, 20 bp, Artificial Sequence
  chemically synthesized
gcagttgtcagaaataactc

SEQ ID NO: 4620 - DNA, 20 bp, Artificial Sequence
  chemically synthesized
agttgtcagaaataactcaa

SEQ ID NO: 4621 - DNA, 20 bp, Artificial Sequence
  chemically synthesized
ttgtcagaaataactcaaga

SEQ ID NO: 4622 - DNA, 20 bp, Artificial Sequence
  chemically synthesized
tgtcagaaataactcaagag

SEQ ID NO: 4623 - DNA, 20 bp, Artificial Sequence
  chemically synthesized
caagagaggatgctcgtccc

SEQ ID NO: 4624 - DNA, 20 bp, Artificial Sequence
  chemically synthesized
aagagaggatgctcgtcccc

SEQ ID NO: 4625 - DNA, 20 bp, Artificial Sequence
  chemically synthesized
ccaggaaacatcaaatgaat

SEQ ID NO: 4626 - DNA, 20 bp, Artificial Sequence
  chemically synthesized
gaaacatcaaatgaatgagc

SEQ ID NO: 4627 - DNA, 20 bp, Artificial Sequence
  chemically synthesized
aaatgaatgagctggcatat

SEQ ID NO: 4628 - DNA, 20 bp, Artificial Sequence
  chemically synthesized
tgaatgagctggcatattag

SEQ ID NO: 4629 - DNA, 20 bp, Artificial Sequence
  chemically synthesized
agctggcatattagcagacg

SEQ ID NO: 4630 - DNA, 20 bp, Artificial Sequence
  chemically synthesized
atattagcagacgtggatta

SEQ ID NO: 4631 - DNA, 20 bp, Artificial Sequence
  chemically synthesized
tagcagacgtggattacagt

SEQ ID NO: 4632 - DNA, 20 bp, Artificial Sequence
  chemically synthesized
agcagacgtggattacagta

SEQ ID NO: 4633 - DNA, 20 bp, Artificial Sequence
  chemically synthesized
acagtaaggaaaatctaaaa

SEQ ID NO: 4634 - DNA, 20 bp, Artificial Sequence
  chemically synthesized
gtaaggaaaatctaaaacag

SEQ ID NO: 4635 - DNA, 20 bp, Artificial Sequence
  chemically synthesized
tctaaaacagaagatgtatc

SEQ ID NO: 4636 - DNA, 20 bp, Artificial Sequence
  chemically synthesized
gaagatgtatctggatgctt

SEQ ID NO: 4637 - DNA, 20 bp, Artificial Sequence
  chemically synthesized
gatgtatctggatgcttcag

SEQ ID NO: 4638 - DNA, 20 bp, Artificial Sequence
  chemically synthesized
ggatgcttcagcagacaaca

SEQ ID NO: 4639 - DNA, 20 bp, Artificial Sequence
  chemically synthesized
gatgcttcagcagacaacaa

SEQ ID NO: 4640 - DNA, 20 bp, Artificial Sequence
  chemically synthesized
gcttcagcagacaacaaagg

SEQ ID NO: 4641 - DNA, 20 bp, Artificial Sequence
  chemically synthesized
cagacaacaaaggaagaatt

SEQ ID NO: 4642 - DNA, 20 bp, Artificial Sequence
  chemically synthesized
agacaacaaaggaagaattt

SEQ ID NO: 4643 - DNA, 20 bp, Artificial Sequence
  chemically synthesized
gacaacaaaggaagaatttg

SEQ ID NO: 4644 - DNA, 20 bp, Artificial Sequence
  chemically synthesized
caaaggaagaatttggggac

SEQ ID NO: 4645 - DNA, 20 bp, Artificial Sequence
  chemically synthesized
aaaggaagaatttggggact

SEQ ID NO: 4646 - DNA, 20 bp, Artificial Sequence
  chemically synthesized
agaatttggggactgggtct

SEQ ID NO: 4647 - DNA, 20 bp, Artificial Sequence
  chemically synthesized
tgggtctaagcactcgccca

SEQ ID NO: 4648 - DNA, 20 bp, Artificial Sequence
  chemically synthesized
taagcactcgcccaaagcac

SEQ ID NO: 4649 - DNA, 20 bp, Artificial Sequence
  chemically synthesized
gcactcgcccaaagcactag

SEQ ID NO: 4650 - DNA, 20 bp, Artificial Sequence
  chemically synthesized
cactcgcccaaagcactaga

SEQ ID NO: 4651 - DNA, 20 bp, Artificial Sequence
  chemically synthesized
ctcgcccaaagcactagaag

SEQ ID NO: 4652 - DNA, 20 bp, Artificial Sequence
  chemically synthesized
tcgcccaaagcactagaagg

SEQ ID NO: 4653 - DNA, 20 bp, Artificial Sequence
  chemically synthesized
ctttcctatttttgttcttc

SEQ ID NO: 4654 - DNA, 20 bp, Artificial Sequence
  chemically synthesized
ctttccttctttttctttct

SEQ ID NO: 4655 - DNA, 20 bp, Artificial Sequence
  chemically synthesized
gaaactgaaccattataaat

SEQ ID NO: 4656 - DNA, 20 bp, Artificial Sequence
  chemically synthesized
ctgaaccattataaatgagt

SEQ ID NO: 4657 - DNA, 20 bp, Artificial Sequence
  chemically synthesized
ttataaatgagttggtctca

SEQ ID NO: 4658 - DNA, 20 bp, Artificial Sequence
  chemically synthesized
tcatagcttctgttaaaaat

SEQ ID NO: 4659 - DNA, 20 bp, Artificial Sequence
  chemically synthesized
tagcttctgttaaaaatcag

SEQ ID NO: 4660 - DNA, 20 bp, Artificial Sequence
  chemically synthesized
gttaaaaatcagaagcttgt

SEQ ID NO: 4661 - DNA, 20 bp, Artificial Sequence
  chemically synthesized
ttgtgacacttaccgcgtat

SEQ ID NO: 4662 - DNA, 20 bp, Artificial Sequence
  chemically synthesized
tgtgacacttaccgcgtatg

SEQ ID NO: 4663 - DNA, 20 bp, Artificial Sequence
  chemically synthesized
gtgacacttaccgcgtatga

SEQ ID NO: 4664 - DNA, 20 bp, Artificial Sequence
  chemically synthesized
tgacacttaccgcgtatgag

SEQ ID NO: 4665 - DNA, 20 bp, Artificial Sequence
  chemically synthesized
gtatgaggggtcttgtcgaa

SEQ ID NO: 4666 - DNA, 20 bp, Artificial Sequence
  chemically synthesized
cgaacagctttactctaatt

SEQ ID NO: 4667 - DNA, 20 bp, Artificial Sequence
  chemically synthesized
aacagctttactctaattta

SEQ ID NO: 4668 - DNA, 20 bp, Artificial Sequence
  chemically synthesized
tttagagctcctctgttaat

SEQ ID NO: 4669 - DNA, 20 bp, Artificial Sequence
  chemically synthesized
gagctcctctgttaattaga

SEQ ID NO: 4670 - DNA, 20 bp, Artificial Sequence
  chemically synthesized
tctgttaattagaaagccct

SEQ ID NO: 4671 - DNA, 20 bp, Artificial Sequence
  chemically synthesized
cctcagattttctgcaaatg

SEQ ID NO: 4672 - DNA, 20 bp, Artificial Sequence
  chemically synthesized
ctcagattttctgcaaatgc

SEQ ID NO: 4673 - DNA, 20 bp, Artificial Sequence
  chemically synthesized
caaatgcaggtcactatcga

SEQ ID NO: 4674 - DNA, 20 bp, Artificial Sequence
  chemically synthesized
ttttgatgcttcgtctgtga

SEQ ID NO: 4675 - DNA, 20 bp, Artificial Sequence
  chemically synthesized
gcttcgtctgtgacagttgt

SEQ ID NO: 4676 - DNA, 20 bp, Artificial Sequence
  chemically synthesized
cttcgtctgtgacagttgtt

SEQ ID NO: 4677 - DNA, 20 bp, Artificial Sequence
  chemically synthesized
cagttgttgggttgcccttc

SEQ ID NO: 4678 - DNA, 20 bp, Artificial Sequence
  chemically synthesized
agttgttgggttgcccttct

SEQ ID NO: 4679 - DNA, 20 bp, Artificial Sequence
  chemically synthesized
ttgttgggttgcccttctag

SEQ ID NO: 4680 - DNA, 20 bp, Artificial Sequence
  chemically synthesized
tgggttgcccttctaggagc

SEQ ID NO: 4681 - DNA, 20 bp, Artificial Sequence
  chemically synthesized
gttgcccttctaggagctgg

SEQ ID NO: 4682 - DNA, 20 bp, Artificial Sequence
  chemically synthesized
ttgcccttctaggagctggc

SEQ ID NO: 4683 - DNA, 20 bp, Artificial Sequence
  chemically synthesized
tgcccttctaggagctggca

SEQ ID NO: 4684 - DNA, 20 bp, Artificial Sequence
  chemically synthesized
taggagctggcagggttgtc

SEQ ID NO: 4685 - DNA, 20 bp, Artificial Sequence
  chemically synthesized
cagggttgtccagactctga

SEQ ID NO: 4686 - DNA, 20 bp, Artificial Sequence
  chemically synthesized
tgtccagactctgacagtgt

SEQ ID NO: 4687 - DNA, 20 bp, Artificial Sequence
  chemically synthesized
tctgacagtgtcagaaaatg

SEQ ID NO: 4688 - DNA, 20 bp, Artificial Sequence
  chemically synthesized
gtcagaaaatgcagtcacca

SEQ ID NO: 4689 - DNA, 20 bp, Artificial Sequence
  chemically synthesized
cagtcaccacggctgcttca

SEQ ID NO: 4690 - DNA, 20 bp, Artificial Sequence
  chemically synthesized
agtcaccacggctgcttcac

SEQ ID NO: 4691 - DNA, 20 bp, Artificial Sequence
  chemically synthesized
caccacggctgcttcacagg

SEQ ID NO: 4692 - DNA, 20 bp, Artificial Sequence
  chemically synthesized
cttcacaggaagttacacgc

SEQ ID NO: 4693 - DNA, 20 bp, Artificial Sequence
  chemically synthesized
ttcacaggaagttacacgca

SEQ ID NO: 4694 - DNA, 20 bp, Artificial Sequence
  chemically synthesized
ttacacgcaaggtccgcaca

SEQ ID NO: 4695 - DNA, 20 bp, Artificial Sequence
  chemically synthesized
acgcaaggtccgcacacagt

SEQ ID NO: 4696 - DNA, 20 bp, Artificial Sequence
  chemically synthesized
gcacacagtcagtttccctg

SEQ ID NO: 4697 - DNA, 20 bp, Artificial Sequence
  chemically synthesized
cagtcagtttccctgtagcc

SEQ ID NO: 4698 - DNA, 20 bp, Artificial Sequence
  chemically synthesized
tcagtttccctgtagcccag

SEQ ID NO: 4699 - DNA, 20 bp, Artificial Sequence
  chemically synthesized
atgaaatctgcactcacatt

SEQ ID NO: 4700 - DNA, 20 bp, Artificial Sequence
  chemically synthesized
cactcacattcagctgaaaa

SEQ ID NO: 4701 - DNA, 20 bp, Artificial Sequence
  chemically synthesized
ctttctccaacctctgtttc

SEQ ID NO: 4702 - DNA, 20 bp, Artificial Sequence
  chemically synthesized
tttctcatcttctctctctt

SEQ ID NO: 4703 - DNA, 20 bp, Artificial Sequence
  chemically synthesized
tctctttagtcctcaacaac

SEQ ID NO: 4704 - DNA, 20 bp, Artificial Sequence
  chemically synthesized
ctctttagtcctcaacaact

SEQ ID NO: 4705 - DNA, 20 bp, Artificial Sequence
  chemically synthesized
tctttagtcctcaacaactg

SEQ ID NO: 4706 - DNA, 20 bp, Artificial Sequence
  chemically synthesized
gggtcctctgctgtcaaaaa

SEQ ID NO: 4707 - DNA, 20 bp, Artificial Sequence
  chemically synthesized
tcaaaaacagccacattcac

SEQ ID NO: 4708 - DNA, 20 bp, Artificial Sequence
  chemically synthesized
aaacagccacattcaccaga

SEQ ID NO: 4709 - DNA, 20 bp, Artificial Sequence
  chemically synthesized
aacagccacattcaccagaa

SEQ ID NO: 4710 - DNA, 20 bp, Artificial Sequence
  chemically synthesized
acagccacattcaccagaaa

SEQ ID NO: 4711 - DNA, 20 bp, Artificial Sequence
  chemically synthesized
gccacattcaccagaaaggg

SEQ ID NO: 4712 - DNA, 20 bp, Artificial Sequence
  chemically synthesized
acattcaccagaaagggaag

SEQ ID NO: 4713 - DNA, 20 bp, Artificial Sequence
  chemically synthesized
cattcaccagaaagggaagt

SEQ ID NO: 4714 - DNA, 20 bp, Artificial Sequence
  chemically synthesized
agaaagggaagtaggtttta

SEQ ID NO: 4715 - DNA, 20 bp, Artificial Sequence
  chemically synthesized
agtaggttttacagataaac

SEQ ID NO: 4716 - DNA, 20 bp, Artificial Sequence
  chemically synthesized
gtaggttttacagataaacc

SEQ ID NO: 4717 - DNA, 20 bp, Artificial Sequence
  chemically synthesized
cgggttgcttttcactgaaa

SEQ ID NO: 4718 - DNA, 20 bp, Artificial Sequence
  chemically synthesized
gttgcttttcactgaaacag

SEQ ID NO: 4719 - DNA, 20 bp, Artificial Sequence
  chemically synthesized
cactgaaacagcagtgattg

SEQ ID NO: 4720 - DNA, 20 bp, Artificial Sequence
  chemically synthesized
aaacagcagtgattgtggaa

SEQ ID NO: 4721 - DNA, 20 bp, Artificial Sequence
  chemically synthesized
tatttcctatttttttgcac

SEQ ID NO: 4722 - DNA, 20 bp, Artificial Sequence
  chemically synthesized
tcctatttttttgcaccggt

SEQ ID NO: 4723 - DNA, 20 bp, Artificial Sequence
  chemically synthesized
tatttttttgcaccggtcag

SEQ ID NO: 4724 - DNA, 20 bp, Artificial Sequence
  chemically synthesized
caccggtcagcagccgcacc

SEQ ID NO: 4725 - DNA, 20 bp, Artificial Sequence
  chemically synthesized
ggtcagcagccgcacctggt

SEQ ID NO: 4726 - DNA, 20 bp, Artificial Sequence
  chemically synthesized
gtcagcagccgcacctggtg

SEQ ID NO: 4727 - DNA, 20 bp, Artificial Sequence
  chemically synthesized
cagccgcacctggtgaggct

SEQ ID NO: 4728 - DNA, 20 bp, Artificial Sequence
  chemically synthesized
agccgcacctggtgaggctg

SEQ ID NO: 4729 - DNA, 20 bp, Artificial Sequence
  chemically synthesized
cacctggtgaggctgaggtc

SEQ ID NO: 4730 - DNA, 20 bp, Artificial Sequence
  chemically synthesized
acctggtgaggctgaggtca

SEQ ID NO: 4731 - DNA, 20 bp, Artificial Sequence
  chemically synthesized
tcaaggctgtacttccaaca

SEQ ID NO: 4732 - DNA, 20 bp, Artificial Sequence
  chemically synthesized
tggctcacgtgttttttctt

SEQ ID NO: 4733 - DNA, 20 bp, Artificial Sequence
  chemically synthesized
gctcacgtgttttttcttaa

SEQ ID NO: 4734 - DNA, 20 bp, Artificial Sequence
  chemically synthesized
cacgtgttttttcttaagag

SEQ ID NO: 4735 - DNA, 20 bp, Artificial Sequence
  chemically synthesized
acgtgttttttcttaagaga

SEQ ID NO: 4736 - DNA, 20 bp, Artificial Sequence
  chemically synthesized
cgtgttttttcttaagagaa

SEQ ID NO: 4737 - DNA, 20 bp, Artificial Sequence
  chemically synthesized
gtgttttttcttaagagaag

SEQ ID NO: 4738 - DNA, 20 bp, Artificial Sequence
  chemically synthesized
tgttttttcttaagagaagg

SEQ ID NO: 4739 - DNA, 20 bp, Artificial Sequence
  chemically synthesized
tcttaagagaagggggaatt

SEQ ID NO: 4740 - DNA, 20 bp, Artificial Sequence
  chemically synthesized
ttaagagaagggggaatttg

SEQ ID NO: 4741 - DNA, 20 bp, Artificial Sequence
  chemically synthesized
taagagaagggggaatttgg

SEQ ID NO: 4742 - DNA, 20 bp, Artificial Sequence
  chemically synthesized
aagagaagggggaatttgga

SEQ ID NO: 4743 - DNA, 20 bp, Artificial Sequence
  chemically synthesized
agagaagggggaatttggag

SEQ ID NO: 4744 - DNA, 20 bp, Artificial Sequence
  chemically synthesized
gagaagggggaatttggagg

SEQ ID NO: 4745 - DNA, 20 bp, Artificial Sequence
  chemically synthesized
agaagggggaatttggaggg

SEQ ID NO: 4746 - DNA, 20 bp, Artificial Sequence
  chemically synthesized
aatttggaggggggcaaaaa

SEQ ID NO: 4747 - DNA, 20 bp, Artificial Sequence
  chemically synthesized
ttggaggggggcaaaaaaag

SEQ ID NO: 4748 - DNA, 20 bp, Artificial Sequence
  chemically synthesized
tggaggggggcaaaaaaaga

SEQ ID NO: 4749 - DNA, 20 bp, Artificial Sequence
  chemically synthesized
gaggggggcaaaaaaagaag

SEQ ID NO: 4750 - DNA, 20 bp, Artificial Sequence
  chemically synthesized
ggggcaaaaaaagaaggaga

SEQ ID NO: 4751 - DNA, 20 bp, Artificial Sequence
  chemically synthesized
ggcaaaaaaagaaggagaaa

SEQ ID NO: 4752 - DNA, 20 bp, Artificial Sequence
  chemically synthesized
caaaaaaagaaggagaaaga

SEQ ID NO: 4753 - DNA, 20 bp, Artificial Sequence
  chemically synthesized
aaaaaaagaaggagaaagag

SEQ ID NO: 4754 - DNA, 20 bp, Artificial Sequence
  chemically synthesized
aaagaaggagaaagagagga

SEQ ID NO: 4755 - DNA, 20 bp, Artificial Sequence
  chemically synthesized
aagaaggagaaagagaggaa

SEQ ID NO: 4756 - DNA, 20 bp, Artificial Sequence
  chemically synthesized
agaggaaaggttaaccactc

SEQ ID NO: 4757 - DNA, 20 bp, Artificial Sequence
  chemically synthesized
cactcgagaaaaaatgcaca

SEQ ID NO: 4758 - DNA, 20 bp, Artificial Sequence
  chemically synthesized
actcgagaaaaaatgcacat

SEQ ID NO: 4759 - DNA, 20 bp, Artificial Sequence
  chemically synthesized
agaaaaaatgcacatgggct

SEQ ID NO: 4760 - DNA, 20 bp, Artificial Sequence
  chemically synthesized
gaaaaaatgcacatgggctg

SEQ ID NO: 4761 - DNA, 20 bp, Artificial Sequence
  chemically synthesized
tcctgcccttatcaccattc

SEQ ID NO: 4762 - DNA, 20 bp, Artificial Sequence
  chemically synthesized
cagtataaaacctcaaatta

SEQ ID NO: 4763 - DNA, 20 bp, Artificial Sequence
  chemically synthesized
agtataaaacctcaaattat

SEQ ID NO: 4764 - DNA, 20 bp, Artificial Sequence
  chemically synthesized
aaattatgggaattctcact

SEQ ID NO: 4765 - DNA, 20 bp, Artificial Sequence
  chemically synthesized
aattatgggaattctcactt

SEQ ID NO: 4766 - DNA, 20 bp, Artificial Sequence
  chemically synthesized
cacttaggaacacctcatta

SEQ ID NO: 4767 - DNA, 20 bp, Artificial Sequence
  chemically synthesized
tcattatggaacatatgtgc

SEQ ID NO: 4768 - DNA, 20 bp, Artificial Sequence
  chemically synthesized
cattatggaacatatgtgct

SEQ ID NO: 4769 - DNA, 20 bp, Artificial Sequence
  chemically synthesized
attatggaacatatgtgctg

SEQ ID NO: 4770 - DNA, 20 bp, Artificial Sequence
  chemically synthesized
ttatggaacatatgtgctgg

SEQ ID NO: 4771 - DNA, 20 bp, Artificial Sequence
  chemically synthesized
gaacatatgtgctgggggtc

SEQ ID NO: 4772 - DNA, 20 bp, Artificial Sequence
  chemically synthesized
aacatatgtgctgggggtct

SEQ ID NO: 4773 - DNA, 20 bp, Artificial Sequence
  chemically synthesized
acatatgtgctgggggtctg

SEQ ID NO: 4774 - DNA, 20 bp, Artificial Sequence
  chemically synthesized
atatgtgctgggggtctggg

SEQ ID NO: 4775 - DNA, 20 bp, Artificial Sequence
  chemically synthesized
gtgctgggggtctggggaga

SEQ ID NO: 4776 - DNA, 20 bp, Artificial Sequence
  chemically synthesized
tgctgggggtctggggagat

SEQ ID NO: 4777 - DNA, 20 bp, Artificial Sequence
  chemically synthesized
ctgggggtctggggagatgg

SEQ ID NO: 4778 - DNA, 20 bp, Artificial Sequence
  chemically synthesized
ggggtctggggagatgggag

SEQ ID NO: 4779 - DNA, 20 bp, Artificial Sequence
  chemically synthesized
gggtctggggagatgggaga

SEQ ID NO: 4780 - DNA, 20 bp, Artificial Sequence
  chemically synthesized
ggtctggggagatgggagaa

SEQ ID NO: 4781 - DNA, 20 bp, Artificial Sequence
  chemically synthesized
gtctggggagatgggagaag

SEQ ID NO: 4782 - DNA, 20 bp, Artificial Sequence
  chemically synthesized
tgtgtgctccaaattttatc

SEQ ID NO: 4783 - DNA, 20 bp, Artificial Sequence
  chemically synthesized
ctccaaattttatcaagttc

SEQ ID NO: 4784 - DNA, 20 bp, Artificial Sequence
  chemically synthesized
tttatcaagttcaagccaaa

SEQ ID NO: 4785 - DNA, 20 bp, Artificial Sequence
  chemically synthesized
agccaaaaagaaatcctctg

SEQ ID NO: 4786 - DNA, 20 bp, Artificial Sequence
  chemically synthesized
aatcctctgtggcacttgtt

SEQ ID NO: 4787 - DNA, 20 bp, Artificial Sequence
  chemically synthesized
atcctctgtggcacttgttt

SEQ ID NO: 4788 - DNA, 20 bp, Artificial Sequence
  chemically synthesized
ccaaccaaccaaacaaaaaa

SEQ ID NO: 4789 - DNA, 20 bp, Artificial Sequence
  chemically synthesized
aaacagtatttaaatcaaaa

SEQ ID NO: 4790 - DNA, 20 bp, Artificial Sequence
  chemically synthesized
aacagtatttaaatcaaaat

SEQ ID NO: 4791 - DNA, 20 bp, Artificial Sequence
  chemically synthesized
acaccctcaccaccaccacc

SEQ ID NO: 4792 - DNA, 20 bp, Artificial Sequence
  chemically synthesized
caccctcaccaccaccacca

SEQ ID NO: 4793 - DNA, 20 bp, Artificial Sequence
  chemically synthesized
tcaccaccaccaccaaggca

SEQ ID NO: 4794 - DNA, 20 bp, Artificial Sequence
  chemically synthesized
ccaccaccaaggcatagcct

SEQ ID NO: 4795 - DNA, 20 bp, Artificial Sequence
  chemically synthesized
ccaccaaggcatagccttgg

SEQ ID NO: 4796 - DNA, 20 bp, Artificial Sequence
  chemically synthesized
aggcatagccttggaagaaa

SEQ ID NO: 4797 - DNA, 20 bp, Artificial Sequence
  chemically synthesized
ggcatagccttggaagaaaa

SEQ ID NO: 4798 - DNA, 20 bp, Artificial Sequence
  chemically synthesized
gaagaaaaaggcatcccttg

SEQ ID NO: 4799 - DNA, 20 bp, Artificial Sequence
  chemically synthesized
ccttgcagccacaatttcgc

SEQ ID NO: 4800 - DNA, 20 bp, Artificial Sequence
  chemically synthesized
tcgcaagttgaccttttcac

SEQ ID NO: 4801 - DNA, 20 bp, Artificial Sequence
  chemically synthesized
cgcaagttgaccttttcacc

SEQ ID NO: 4802 - DNA, 20 bp, Artificial Sequence
  chemically synthesized
agttgaccttttcaccaggc

SEQ ID NO: 4803 - DNA, 20 bp, Artificial Sequence
  chemically synthesized
ccagtgcctaatttcctaaa

SEQ ID NO: 4804 - DNA, 20 bp, Artificial Sequence
  chemically synthesized
cagtgcctaatttcctaaac

SEQ ID NO: 4805 - DNA, 20 bp, Artificial Sequence
  chemically synthesized
aacaggccccttcttccttg

SEQ ID NO: 4806 - DNA, 20 bp, Artificial Sequence
  chemically synthesized
gaagtcactgcaaataaatg

SEQ ID NO: 4807 - DNA, 20 bp, Artificial Sequence
  chemically synthesized
tgcaaataaatgcagtcatc

SEQ ID NO: 4808 - DNA, 20 bp, Artificial Sequence
  chemically synthesized
caaataaatgcagtcatcca

SEQ ID NO: 4809 - DNA, 20 bp, Artificial Sequence
  chemically synthesized
tgcagtcatccagagtgtaa

SEQ ID NO: 4810 - DNA, 20 bp, Artificial Sequence
  chemically synthesized
agtcatccagagtgtaatgg

SEQ ID NO: 4811 - DNA, 20 bp, Artificial Sequence
  chemically synthesized
tccagagtgtaatggaagtc

SEQ ID NO: 4812 - DNA, 20 bp, Artificial Sequence
  chemically synthesized
gtgtaatggaagtctggcct

SEQ ID NO: 4813 - DNA, 20 bp, Artificial Sequence
  chemically synthesized
gtaatggaagtctggccttg

SEQ ID NO: 4814 - DNA, 20 bp, Artificial Sequence
  chemically synthesized
aagtctggccttggagttac

SEQ ID NO: 4815 - DNA, 20 bp, Artificial Sequence
  chemically synthesized
tactggcttatgaaatgcaa

SEQ ID NO: 4816 - DNA, 20 bp, Artificial Sequence
  chemically synthesized
actggcttatgaaatgcaat

SEQ ID NO: 4817 - DNA, 20 bp, Artificial Sequence
  chemically synthesized
cttatgaaatgcaatgggat

SEQ ID NO: 4818 - DNA, 20 bp, Artificial Sequence
  chemically synthesized
ttatgaaatgcaatgggatg

SEQ ID NO: 4819 - DNA, 20 bp, Artificial Sequence
  chemically synthesized
tgaaatgcaatgggatgagg

SEQ ID NO: 4820 - DNA, 20 bp, Artificial Sequence
  chemically synthesized
gaaatgcaatgggatgaggt

SEQ ID NO: 4821 - DNA, 20 bp, Artificial Sequence
  chemically synthesized
aaatgcaatgggatgaggtg

SEQ ID NO: 4822 - DNA, 20 bp, Artificial Sequence
  chemically synthesized
gcaatgggatgaggtggggt

SEQ ID NO: 4823 - DNA, 20 bp, Artificial Sequence
  chemically synthesized
aatgggatgaggtggggtga

SEQ ID NO: 4824 - DNA, 20 bp, Artificial Sequence
  chemically synthesized
atgggatgaggtggggtgag

SEQ ID NO: 4825 - DNA, 20 bp, Artificial Sequence
  chemically synthesized
tgaggtggggtgagaggcca

SEQ ID NO: 4826 - DNA, 20 bp, Artificial Sequence
  chemically synthesized
tggggtgagaggccatagcc

SEQ ID NO: 4827 - DNA, 20 bp, Artificial Sequence
  chemically synthesized
aggccatagcccagactgaa

SEQ ID NO: 4828 - DNA, 20 bp, Artificial Sequence
  chemically synthesized
atagcccagactgaacggca

SEQ ID NO: 4829 - DNA, 20 bp, Artificial Sequence
  chemically synthesized
agactgaacggcacagtgac

SEQ ID NO: 4830 - DNA, 20 bp, Artificial Sequence
  chemically synthesized
gactgaacggcacagtgacc

SEQ ID NO: 4831 - DNA, 20 bp, Artificial Sequence
  chemically synthesized
tgaacggcacagtgaccagg

SEQ ID NO: 4832 - DNA, 20 bp, Artificial Sequence
  chemically synthesized
gaacggcacagtgaccaggt

SEQ ID NO: 4833 - DNA, 20 bp, Artificial Sequence
  chemically synthesized
aacggcacagtgaccaggta

SEQ ID NO: 4834 - DNA, 20 bp, Artificial Sequence
  chemically synthesized
ggcacagtgaccaggtaggg

SEQ ID NO: 4835 - DNA, 20 bp, Artificial Sequence
  chemically synthesized
cacagtgaccaggtagggtg

SEQ ID NO: 4836 - DNA, 20 bp, Artificial Sequence
  chemically synthesized
gtgaccaggtagggtggagc

SEQ ID NO: 4837 - DNA, 20 bp, Artificial Sequence
  chemically synthesized
tgaccaggtagggtggagca

SEQ ID NO: 4838 - DNA, 20 bp, Artificial Sequence
  chemically synthesized
agggtggagcaaggccactc

SEQ ID NO: 4839 - DNA, 20 bp, Artificial Sequence
  chemically synthesized
tggagcaaggccactccagc

SEQ ID NO: 4840 - DNA, 20 bp, Artificial Sequence
  chemically synthesized
gccactccagcaagaatgcc

SEQ ID NO: 4841 - DNA, 20 bp, Artificial Sequence
  chemically synthesized
ccactccagcaagaatgcca

SEQ ID NO: 4842 - DNA, 20 bp, Artificial Sequence
  chemically synthesized
tccagcaagaatgccaagga

SEQ ID NO: 4843 - DNA, 20 bp, Artificial Sequence
  chemically synthesized
agaatgccaaggatagcctg

SEQ ID NO: 4844 - DNA, 20 bp, Artificial Sequence
  chemically synthesized
atgccaaggatagcctgcag

SEQ ID NO: 4845 - DNA, 20 bp, Artificial Sequence
  chemically synthesized
tgccaaggatagcctgcagt

SEQ ID NO: 4846 - DNA, 20 bp, Artificial Sequence
  chemically synthesized
gatagcctgcagtgggttat

SEQ ID NO: 4847 - DNA, 20 bp, Artificial Sequence
  chemically synthesized
ctgcagtgggttattagccc

SEQ ID NO: 4848 - DNA, 20 bp, Artificial Sequence
  chemically synthesized
cagtgggttattagccccag

SEQ ID NO: 4849 - DNA, 20 bp, Artificial Sequence
  chemically synthesized
agtgggttattagccccagc

SEQ ID NO: 4850 - DNA, 20 bp, Artificial Sequence
  chemically synthesized
gtgggttattagccccagca

SEQ ID NO: 4851 - DNA, 20 bp, Artificial Sequence
  chemically synthesized
cagcagggcccatgcctcta

SEQ ID NO: 4852 - DNA, 20 bp, Artificial Sequence
  chemically synthesized
gttgctgtcatcttcgttct

SEQ ID NO: 4853 - DNA, 20 bp, Artificial Sequence
  chemically synthesized
ctgtcatcttcgttcttggc

SEQ ID NO: 4854 - DNA, 20 bp, Artificial Sequence
  chemically synthesized
tcatcttcgttcttggctag

SEQ ID NO: 4855 - DNA, 20 bp, Artificial Sequence
  chemically synthesized
cgttcttggctagcagatgc

SEQ ID NO: 4856 - DNA, 20 bp, Artificial Sequence
  chemically synthesized
tggctagcagatgctagtcc

SEQ ID NO: 4857 - DNA, 20 bp, Artificial Sequence
  chemically synthesized
ggctagcagatgctagtccc

SEQ ID NO: 4858 - DNA, 20 bp, Artificial Sequence
  chemically synthesized
ggaatgtcctccatgccttt

SEQ ID NO: 4859 - DNA, 20 bp, Artificial Sequence
  chemically synthesized
ctttaagctaactgcaaaaa

SEQ ID NO: 4860 - DNA, 20 bp, Artificial Sequence
  chemically synthesized
agctaactgcaaaaacagaa

SEQ ID NO: 4861 - DNA, 20 bp, Artificial Sequence
  chemically synthesized
ctgcaaaaacagaacggtgt

SEQ ID NO: 4862 - DNA, 20 bp, Artificial Sequence
  chemically synthesized
aaaaacagaacggtgtgagc

SEQ ID NO: 4863 - DNA, 20 bp, Artificial Sequence
  chemically synthesized
aaaacagaacggtgtgagcc

SEQ ID NO: 4864 - DNA, 20 bp, Artificial Sequence
  chemically synthesized
aaacagaacggtgtgagcca

SEQ ID NO: 4865 - DNA, 20 bp, Artificial Sequence
  chemically synthesized
cagaacggtgtgagccaggg

SEQ ID NO: 4866 - DNA, 20 bp, Artificial Sequence
  chemically synthesized
ctcttttatattctacctat

SEQ ID NO: 4867 - DNA, 20 bp, Artificial Sequence
  chemically synthesized
tcttttatattctacctata

SEQ ID NO: 4868 - DNA, 20 bp, Artificial Sequence
  chemically synthesized
cttttatattctacctataa

SEQ ID NO: 4869 - DNA, 20 bp, Artificial Sequence
  chemically synthesized
ctataagggaaaaataaacc

SEQ ID NO: 4870 - DNA, 20 bp, Artificial Sequence
  chemically synthesized
gggaaaaataaacctagacc

SEQ ID NO: 4871 - DNA, 20 bp, Artificial Sequence
  chemically synthesized
gacctggaaaacaatgtgta

SEQ ID NO: 4872 - DNA, 20 bp, Artificial Sequence
  chemically synthesized
ctggaaaacaatgtgtaaag

SEQ ID NO: 4873 - DNA, 20 bp, Artificial Sequence
  chemically synthesized
aacaatgtgtaaagtggcaa

SEQ ID NO: 4874 - DNA, 20 bp, Artificial Sequence
  chemically synthesized
agccaatcaactcatttaaa

SEQ ID NO: 4875 - DNA, 20 bp, Artificial Sequence
  chemically synthesized
accctccatccaacgtcacg

SEQ ID NO: 4876 - DNA, 20 bp, Artificial Sequence
  chemically synthesized
gtcacgaagctgctgaatat

SEQ ID NO: 4877 - DNA, 20 bp, Artificial Sequence
  chemically synthesized
tcacgaagctgctgaatatt

SEQ ID NO: 4878 - DNA, 20 bp, Artificial Sequence
  chemically synthesized
gctgctgaatattaggttcc

SEQ ID NO: 4879 - DNA, 20 bp, Artificial Sequence
  chemically synthesized
ctgctgaatattaggttcct

SEQ ID NO: 4880 - DNA, 20 bp, Artificial Sequence
  chemically synthesized
ctgaatattaggttcctggg

SEQ ID NO: 4881 - DNA, 20 bp, Artificial Sequence
  chemically synthesized
aggttcctgggaagctgtcc

SEQ ID NO: 4882 - DNA, 20 bp, Artificial Sequence
  chemically synthesized
gggaagctgtcccagcaacc

SEQ ID NO: 4883 - DNA, 20 bp, Artificial Sequence
  chemically synthesized
tgtcccagcaacctagatat

SEQ ID NO: 4884 - DNA, 20 bp, Artificial Sequence
  chemically synthesized
agaaacaacgcttgctattc

SEQ ID NO: 4885 - DNA, 20 bp, Artificial Sequence
  chemically synthesized
gaaacaacgcttgctattct

SEQ ID NO: 4886 - DNA, 20 bp, Artificial Sequence
  chemically synthesized
aaacaacgcttgctattctg

SEQ ID NO: 4887 - DNA, 20 bp, Artificial Sequence
  chemically synthesized
aacgcttgctattctggggt

SEQ ID NO: 4888 - DNA, 20 bp, Artificial Sequence
  chemically synthesized
gcttgctattctggggtgag

SEQ ID NO: 4889 - DNA, 20 bp, Artificial Sequence
  chemically synthesized
ctattctggggtgagaagtg

SEQ ID NO: 4890 - DNA, 20 bp, Artificial Sequence
  chemically synthesized
aagtgaagttgcctttcact

SEQ ID NO: 4891 - DNA, 20 bp, Artificial Sequence
  chemically synthesized
agtgaagttgcctttcactc

SEQ ID NO: 4892 - DNA, 20 bp, Artificial Sequence
  chemically synthesized
tcactcgggactgtcaaaca

SEQ ID NO: 4893 - DNA, 20 bp, Artificial Sequence
  chemically synthesized
caaacacagtctataaatac

SEQ ID NO: 4894 - DNA, 20 bp, Artificial Sequence
  chemically synthesized
gcaatgccccttgtgaacta

SEQ ID NO: 4895 - DNA, 20 bp, Artificial Sequence
  chemically synthesized
caatgccccttgtgaactac

SEQ ID NO: 4896 - DNA, 20 bp, Artificial Sequence
  chemically synthesized
ccccttgtgaactacgggct

SEQ ID NO: 4897 - DNA, 20 bp, Artificial Sequence
  chemically synthesized
actacgggctgagctcaacc

SEQ ID NO: 4898 - DNA, 20 bp, Artificial Sequence
  chemically synthesized
tacgggctgagctcaaccca

SEQ ID NO: 4899 - DNA, 20 bp, Artificial Sequence
  chemically synthesized
gggctgagctcaacccagag

SEQ ID NO: 4900 - DNA, 20 bp, Artificial Sequence
  chemically synthesized
ggctgagctcaacccagaga

SEQ ID NO: 4901 - DNA, 20 bp, Artificial Sequence
  chemically synthesized
gagctcaacccagagaaggc

SEQ ID NO: 4902 - DNA, 20 bp, Artificial Sequence
  chemically synthesized
gagaaggcaagtgtttccca

SEQ ID NO: 4903 - DNA, 20 bp, Artificial Sequence
  chemically synthesized
agaaggcaagtgtttcccaa

SEQ ID NO: 4904 - DNA, 20 bp, Artificial Sequence
  chemically synthesized
agtgtttcccaaaggtcaca

SEQ ID NO: 4905 - DNA, 20 bp, Artificial Sequence
  chemically synthesized
caaaggtcacacagcaattc

SEQ ID NO: 4906 - DNA, 20 bp, Artificial Sequence
  chemically synthesized
aaaggtcacacagcaattcc

SEQ ID NO: 4907 - DNA, 20 bp, Artificial Sequence
  chemically synthesized
cacagcaattccaggtcccc

SEQ ID NO: 4908 - DNA, 20 bp, Artificial Sequence
  chemically synthesized
agcaattccaggtcccccag

SEQ ID NO: 4909 - DNA, 20 bp, Artificial Sequence
  chemically synthesized
aattccaggtcccccagaag

SEQ ID NO: 4910 - DNA, 20 bp, Artificial Sequence
  chemically synthesized
ccccagaagtagcccttcac

SEQ ID NO: 4911 - DNA, 20 bp, Artificial Sequence
  chemically synthesized
agaagtagcccttcaccaga

SEQ ID NO: 4912 - DNA, 20 bp, Artificial Sequence
  chemically synthesized
caccagatggatcccatcac

SEQ ID NO: 4913 - DNA, 20 bp, Artificial Sequence
  chemically synthesized
agatggatcccatcaccaga

SEQ ID NO: 4914 - DNA, 20 bp, Artificial Sequence
  chemically synthesized
tcccatcaccagatagctct

SEQ ID NO: 4915 - DNA, 20 bp, Artificial Sequence
  chemically synthesized
atctgattctcattttcaac

SEQ ID NO: 4916 - DNA, 20 bp, Artificial Sequence
  chemically synthesized
tgattctcattttcaacaag

SEQ ID NO: 4917 - DNA, 20 bp, Artificial Sequence
  chemically synthesized
gattctcattttcaacaaga

SEQ ID NO: 4918 - DNA, 20 bp, Artificial Sequence
  chemically synthesized
tcattttcaacaagaaggct

SEQ ID NO: 4919 - DNA, 20 bp, Artificial Sequence
  chemically synthesized
cattttcaacaagaaggctg

SEQ ID NO: 4920 - DNA, 20 bp, Artificial Sequence
  chemically synthesized
caacaagaaggctgaggaat

SEQ ID NO: 4921 - DNA, 20 bp, Artificial Sequence
  chemically synthesized
aggaatgagattgcacattt

SEQ ID NO: 4922 - DNA, 20 bp, Artificial Sequence
  chemically synthesized
ctttctccaaccttctgctc

SEQ ID NO: 4923 - DNA, 20 bp, Artificial Sequence
  chemically synthesized
acgtacaaaaaaaatctttt

SEQ ID NO: 4924 - DNA, 20 bp, Artificial Sequence
  chemically synthesized
aaaaatctttttagtatgtt

SEQ ID NO: 4925 - DNA, 20 bp, Artificial Sequence
  chemically synthesized
aaaatctttttagtatgttt

SEQ ID NO: 4926 - DNA, 20 bp, Artificial Sequence
  chemically synthesized
aaatctttttagtatgttta

SEQ ID NO: 4927 - DNA, 20 bp, Artificial Sequence
  chemically synthesized
catatctacccaaaatctcc

SEQ ID NO: 4928 - DNA, 20 bp, Artificial Sequence
  chemically synthesized
ctccaagccccttgttctat

SEQ ID NO: 4929 - DNA, 20 bp, Artificial Sequence
  chemically synthesized
caagccccttgttctatcag

SEQ ID NO: 4930 - DNA, 20 bp, Artificial Sequence
  chemically synthesized
aagccccttgttctatcagc

SEQ ID NO: 4931 - DNA, 20 bp, Artificial Sequence
  chemically synthesized
ccttgttctatcagcaggtc

SEQ ID NO: 4932 - DNA, 20 bp, Artificial Sequence
  chemically synthesized
ttgttctatcagcaggtcaa

SEQ ID NO: 4933 - DNA, 20 bp, Artificial Sequence
  chemically synthesized
ttctatcagcaggtcaagag

SEQ ID NO: 4934 - DNA, 20 bp, Artificial Sequence
  chemically synthesized
ctatcagcaggtcaagagta

SEQ ID NO: 4935 - DNA, 20 bp, Artificial Sequence
  chemically synthesized
caagagtagagaactgtgac

SEQ ID NO: 4936 - DNA, 20 bp, Artificial Sequence
  chemically synthesized
agctgttctccattctgaaa

SEQ ID NO: 4937 - DNA, 20 bp, Artificial Sequence
  chemically synthesized
ctgaaatggatttgactgaa

SEQ ID NO: 4938 - DNA, 20 bp, Artificial Sequence
  chemically synthesized
tttgactgaacagctgctga

SEQ ID NO: 4939 - DNA, 20 bp, Artificial Sequence
  chemically synthesized
ttgactgaacagctgctgaa

SEQ ID NO: 4940 - DNA, 20 bp, Artificial Sequence
  chemically synthesized
ctgaacagctgctgaaaggc

SEQ ID NO: 4941 - DNA, 20 bp, Artificial Sequence
  chemically synthesized
tgctgaaaggcaagacatcc

SEQ ID NO: 4942 - DNA, 20 bp, Artificial Sequence
  chemically synthesized
gctgaaaggcaagacatcct

SEQ ID NO: 4943 - DNA, 20 bp, Artificial Sequence
  chemically synthesized
ctgaaaggcaagacatccta

SEQ ID NO: 4944 - DNA, 20 bp, Artificial Sequence
  chemically synthesized
gaaaggcaagacatcctagg

SEQ ID NO: 4945 - DNA, 20 bp, Artificial Sequence
  chemically synthesized
gcaagacatcctagggagac

SEQ ID NO: 4946 - DNA, 20 bp, Artificial Sequence
  chemically synthesized
catcctagggagactggtac

SEQ ID NO: 4947 - DNA, 20 bp, Artificial Sequence
  chemically synthesized
atcctagggagactggtact

SEQ ID NO: 4948 - DNA, 20 bp, Artificial Sequence
  chemically synthesized
tcctagggagactggtactg

SEQ ID NO: 4949 - DNA, 20 bp, Artificial Sequence
  chemically synthesized
gagactggtactggggattt

SEQ ID NO: 4950 - DNA, 20 bp, Artificial Sequence
  chemically synthesized
agactggtactggggatttc

SEQ ID NO: 4951 - DNA, 20 bp, Artificial Sequence
  chemically synthesized
gactggtactggggatttca

SEQ ID NO: 4952 - DNA, 20 bp, Artificial Sequence
  chemically synthesized
atttcagggtccttgttctg

SEQ ID NO: 4953 - DNA, 20 bp, Artificial Sequence
  chemically synthesized
tttcagggtccttgttctgt

SEQ ID NO: 4954 - DNA, 20 bp, Artificial Sequence
  chemically synthesized
cagggtccttgttctgtggg

SEQ ID NO: 4955 - DNA, 20 bp, Artificial Sequence
  chemically synthesized
cttgttctgtgggtggacca

SEQ ID NO: 4956 - DNA, 20 bp, Artificial Sequence
  chemically synthesized
ggtggaccatggctcctttc

SEQ ID NO: 4957 - DNA, 20 bp, Artificial Sequence
  chemically synthesized
tggaccatggctcctttcca

SEQ ID NO: 4958 - DNA, 20 bp, Artificial Sequence
  chemically synthesized
gttctctctcctacacatca

SEQ ID NO: 4959 - DNA, 20 bp, Artificial Sequence
  chemically synthesized
tctctcctacacatcaaagt

SEQ ID NO: 4960 - DNA, 20 bp, Artificial Sequence
  chemically synthesized
tcaaagtgagacaccaatca

SEQ ID NO: 4961 - DNA, 20 bp, Artificial Sequence
  chemically synthesized
gacaccaatcacagctctac

SEQ ID NO: 4962 - DNA, 20 bp, Artificial Sequence
  chemically synthesized
accttgccccacctccaatt

SEQ ID NO: 4963 - DNA, 20 bp, Artificial Sequence
  chemically synthesized
ttgcctccttctcacacaat

SEQ ID NO: 4964 - DNA, 20 bp, Artificial Sequence
  chemically synthesized
ctccttctcacacaatgaga

SEQ ID NO: 4965 - DNA, 20 bp, Artificial Sequence
  chemically synthesized
tctcacacaatgagaaagaa

SEQ ID NO: 4966 - DNA, 20 bp, Artificial Sequence
  chemically synthesized
acacaatgagaaagaacgga

SEQ ID NO: 4967 - DNA, 20 bp, Artificial Sequence
  chemically synthesized
agaacggatagccaaattct

SEQ ID NO: 4968 - DNA, 20 bp, Artificial Sequence
  chemically synthesized
aacggatagccaaattctaa

SEQ ID NO: 4969 - DNA, 20 bp, Artificial Sequence
  chemically synthesized
tcactttctgcacatatgtg

SEQ ID NO: 4970 - DNA, 20 bp, Artificial Sequence
  chemically synthesized
ttctgcacatatgtgtagtt

SEQ ID NO: 4971 - DNA, 20 bp, Artificial Sequence
  chemically synthesized
atatgtgtagttaagtactg

SEQ ID NO: 4972 - DNA, 20 bp, Artificial Sequence
  chemically synthesized
gtgtagttaagtactgaagt

SEQ ID NO: 4973 - DNA, 20 bp, Artificial Sequence
  chemically synthesized
agtactgaagtgagaaattc

SEQ ID NO: 4974 - DNA, 20 bp, Artificial Sequence
  chemically synthesized
aaattcaagaaaactatact

SEQ ID NO: 4975 - DNA, 20 bp, Artificial Sequence
  chemically synthesized
aattcaagaaaactatactt

SEQ ID NO: 4976 - DNA, 20 bp, Artificial Sequence
  chemically synthesized
ggcacacacacacacatttt

SEQ ID NO: 4977 - DNA, 20 bp, Artificial Sequence
  chemically synthesized
cacacacacacacattttga

SEQ ID NO: 4978 - DNA, 20 bp, Artificial Sequence
  chemically synthesized
attttgagagataatttcta

SEQ ID NO: 4979 - DNA, 20 bp, Artificial Sequence
  chemically synthesized
ttctaaagacctaccaatct

SEQ ID NO: 4980 - DNA, 20 bp, Artificial Sequence
  chemically synthesized
ctaccaatctaagatactga

SEQ ID NO: 4981 - DNA, 20 bp, Artificial Sequence
  chemically synthesized
tctaagatactgaaagaaaa

SEQ ID NO: 4982 - DNA, 20 bp, Artificial Sequence
  chemically synthesized
ctgaaagaaaatggctacat

SEQ ID NO: 4983 - DNA, 20 bp, Artificial Sequence
  chemically synthesized
tgaaagaaaatggctacatc

SEQ ID NO: 4984 - DNA, 20 bp, Artificial Sequence
  chemically synthesized
gaaaatggctacatcaggcc

SEQ ID NO: 4985 - DNA, 20 bp, Artificial Sequence
  chemically synthesized
tggctacatcaggcccagaa

SEQ ID NO: 4986 - DNA, 20 bp, Artificial Sequence
  chemically synthesized
cttgaaattttccctatcca

SEQ ID NO: 4987 - DNA, 20 bp, Artificial Sequence
  chemically synthesized
ttttccctatccacagacca

SEQ ID NO: 4988 - DNA, 20 bp, Artificial Sequence
  chemically synthesized
cacagaccacagccctgtga

SEQ ID NO: 4989 - DNA, 20 bp, Artificial Sequence
  chemically synthesized
cacagccctgtgatggacat

SEQ ID NO: 4990 - DNA, 20 bp, Artificial Sequence
  chemically synthesized
gtgatggacatgagatcctc

SEQ ID NO: 4991 - DNA, 20 bp, Artificial Sequence
  chemically synthesized
acatgagatcctctggcttt

SEQ ID NO: 4992 - DNA, 20 bp, Artificial Sequence
  chemically synthesized
gctttgagatgaataatgca

SEQ ID NO: 4993 - DNA, 20 bp, Artificial Sequence
  chemically synthesized
gatgaataatgcacagaaat

SEQ ID NO: 4994 - DNA, 20 bp, Artificial Sequence
  chemically synthesized
gaataatgcacagaaatgag

SEQ ID NO: 4995 - DNA, 20 bp, Artificial Sequence
  chemically synthesized
cacagaaatgagcagcatga

SEQ ID NO: 4996 - DNA, 20 bp, Artificial Sequence
  chemically synthesized
aaatgagcagcatgatggat

SEQ ID NO: 4997 - DNA, 20 bp, Artificial Sequence
  chemically synthesized
gagcagcatgatggattagc

SEQ ID NO: 4998 - DNA, 20 bp, Artificial Sequence
  chemically synthesized
cagcatgatggattagctgg

SEQ ID NO: 4999 - DNA, 20 bp, Artificial Sequence
  chemically synthesized
attagctggcagattattac

SEQ ID NO: 5000 - DNA, 20 bp, Artificial Sequence
  chemically synthesized
tgaacatgccaactcaacat

SEQ ID NO: 5001 - DNA, 20 bp, Artificial Sequence
  chemically synthesized
gaacatgccaactcaacatc

SEQ ID NO: 5002 - DNA, 20 bp, Artificial Sequence
  chemically synthesized
tgccaactcaacatcaggat

SEQ ID NO: 5003 - DNA, 20 bp, Artificial Sequence
  chemically synthesized
gccaactcaacatcaggatt

SEQ ID NO: 5004 - DNA, 20 bp, Artificial Sequence
  chemically synthesized
attgggcctgaaacttctct

SEQ ID NO: 5005 - DNA, 20 bp, Artificial Sequence
  chemically synthesized
ttgggcctgaaacttctctc

SEQ ID NO: 5006 - DNA, 20 bp, Artificial Sequence
  chemically synthesized
ggcctgaaacttctctcagg

SEQ ID NO: 5007 - DNA, 20 bp, Artificial Sequence
  chemically synthesized
gcctgaaacttctctcagga

SEQ ID NO: 5008 - DNA, 20 bp, Artificial Sequence
  chemically synthesized
ttctctcaggaaggccttga

SEQ ID NO: 5009 - DNA, 20 bp, Artificial Sequence
  chemically synthesized
caggaaggccttgatagcat

SEQ ID NO: 5010 - DNA, 20 bp, Artificial Sequence
  chemically synthesized
aaggccttgatagcattaga

SEQ ID NO: 5011 - DNA, 20 bp, Artificial Sequence
  chemically synthesized
tgatagcattagatggttga

SEQ ID NO: 5012 - DNA, 20 bp, Artificial Sequence
  chemically synthesized
atagcattagatggttgaca

SEQ ID NO: 5013 - DNA, 20 bp, Artificial Sequence
  chemically synthesized
tagcattagatggttgacag

SEQ ID NO: 5014 - DNA, 20 bp, Artificial Sequence
  chemically synthesized
gatggttgacagaggtatta

SEQ ID NO: 5015 - DNA, 20 bp, Artificial Sequence
  chemically synthesized
acagaggtattacagtgtga

SEQ ID NO: 5016 - DNA, 20 bp, Artificial Sequence
  chemically synthesized
agaggtattacagtgtgaca

SEQ ID NO: 5017 - DNA, 20 bp, Artificial Sequence
  chemically synthesized
attacagtgtgacagagtct

SEQ ID NO: 5018 - DNA, 20 bp, Artificial Sequence
  chemically synthesized
tgtgacagagtctgagccca

SEQ ID NO: 5019 - DNA, 20 bp, Artificial Sequence
  chemically synthesized
agagtctgagcccacagtct

SEQ ID NO: 5020 - DNA, 20 bp, Artificial Sequence
  chemically synthesized
agaatgaccacatcccttcc

SEQ ID NO: 5021 - DNA, 20 bp, Artificial Sequence
  chemically synthesized
gaatgaccacatcccttccc

SEQ ID NO: 5022 - DNA, 20 bp, Artificial Sequence
  chemically synthesized
aatgaccacatcccttccca

SEQ ID NO: 5023 - DNA, 20 bp, Artificial Sequence
  chemically synthesized
tgaccacatcccttcccagg

SEQ ID NO: 5024 - DNA, 20 bp, Artificial Sequence
  chemically synthesized
gacgttcccactcaacaccc

SEQ ID NO: 5025 - DNA, 20 bp, Artificial Sequence
  chemically synthesized
acgttcccactcaacaccct

SEQ ID NO: 5026 - DNA, 20 bp, Artificial Sequence
  chemically synthesized
ttcccactcaacaccctggg

SEQ ID NO: 5027 - DNA, 20 bp, Artificial Sequence
  chemically synthesized
atcactctgtctctcaaacc

SEQ ID NO: 5028 - DNA, 20 bp, Artificial Sequence
  chemically synthesized
ctgtctctcaaacctggcca

SEQ ID NO: 5029 - DNA, 20 bp, Artificial Sequence
  chemically synthesized
tctcaaacctggccatggct

SEQ ID NO: 5030 - DNA, 20 bp, Artificial Sequence
  chemically synthesized
tttgcccttttccctgctaa

SEQ ID NO: 5031 - DNA, 20 bp, Artificial Sequence
  chemically synthesized
cttttccctgctaacagaaa

SEQ ID NO: 5032 - DNA, 20 bp, Artificial Sequence
  chemically synthesized
cctgctaacagaaatggaat

SEQ ID NO: 5033 - DNA, 20 bp, Artificial Sequence
  chemically synthesized
acaaattaatatttaatttt

SEQ ID NO: 5034 - DNA, 20 bp, Artificial Sequence
  chemically synthesized
ttttaagattactattctat

SEQ ID NO: 5035 - DNA, 20 bp, Artificial Sequence
  chemically synthesized
actattctatcagaataaaa

SEQ ID NO: 5036 - DNA, 20 bp, Artificial Sequence
  chemically synthesized
ctatcagaataaaaaagact

SEQ ID NO: 5037 - DNA, 20 bp, Artificial Sequence
  chemically synthesized
tatcagaataaaaaagactc

SEQ ID NO: 5038 - DNA, 20 bp, Artificial Sequence
  chemically synthesized
tcagaataaaaaagactcgg

SEQ ID NO: 5039 - DNA, 20 bp, Artificial Sequence
  chemically synthesized
aaaaagactcgggagattca

SEQ ID NO: 5040 - DNA, 20 bp, Artificial Sequence
  chemically synthesized
gactcgggagattcaaagcg

SEQ ID NO: 5041 - DNA, 20 bp, Artificial Sequence
  chemically synthesized
actcgggagattcaaagcga

SEQ ID NO: 5042 - DNA, 20 bp, Artificial Sequence
  chemically synthesized
aaggcaaatgcccctccttt

SEQ ID NO: 5043 - DNA, 20 bp, Artificial Sequence
  chemically synthesized
ttaagtctaacgttgctatt

SEQ ID NO: 5044 - DNA, 20 bp, Artificial Sequence
  chemically synthesized
taagtctaacgttgctattc

SEQ ID NO: 5045 - DNA, 20 bp, Artificial Sequence
  chemically synthesized
aacgttgctattcaggcatt

SEQ ID NO: 5046 - DNA, 20 bp, Artificial Sequence
  chemically synthesized
acgttgctattcaggcattt

SEQ ID NO: 5047 - DNA, 20 bp, Artificial Sequence
  chemically synthesized
gttgctattcaggcatttag

SEQ ID NO: 5048 - DNA, 20 bp, Artificial Sequence
  chemically synthesized
attcaggcatttaggagcgc

SEQ ID NO: 5049 - DNA, 20 bp, Artificial Sequence
  chemically synthesized
gcatttaggagcgctagaca

SEQ ID NO: 5050 - DNA, 20 bp, Artificial Sequence
  chemically synthesized
ttaggagcgctagacacagt

SEQ ID NO: 5051 - DNA, 20 bp, Artificial Sequence
  chemically synthesized
tccaacctgtgatttgccac

SEQ ID NO: 5052 - DNA, 20 bp, Artificial Sequence
  chemically synthesized
ccaacctgtgatttgccaca

SEQ ID NO: 5053 - DNA, 20 bp, Artificial Sequence
  chemically synthesized
acctgtgatttgccacaagg

SEQ ID NO: 5054 - DNA, 20 bp, Artificial Sequence
  chemically synthesized
cctgtgatttgccacaaggc

SEQ ID NO: 5055 - DNA, 20 bp, Artificial Sequence
  chemically synthesized
gtgatttgccacaaggcagg

SEQ ID NO: 5056 - DNA, 20 bp, Artificial Sequence
  chemically synthesized
tgatttgccacaaggcagga

SEQ ID NO: 5057 - DNA, 20 bp, Artificial Sequence
  chemically synthesized
gatttgccacaaggcaggaa

SEQ ID NO: 5058 - DNA, 20 bp, Artificial Sequence
  chemically synthesized
atttgccacaaggcaggaag

SEQ ID NO: 5059 - DNA, 20 bp, Artificial Sequence
  chemically synthesized
tgccacaaggcaggaagggg

SEQ ID NO: 5060 - DNA, 20 bp, Artificial Sequence
  chemically synthesized
gccacaaggcaggaagggga

SEQ ID NO: 5061 - DNA, 20 bp, Artificial Sequence
  chemically synthesized
caaggcaggaaggggaagga

SEQ ID NO: 5062 - DNA, 20 bp, Artificial Sequence
  chemically synthesized
aaggatagtgcaacacccct

SEQ ID NO: 5063 - DNA, 20 bp, Artificial Sequence
  chemically synthesized
gcaacacccctaagtgtgtg

SEQ ID NO: 5064 - DNA, 20 bp, Artificial Sequence
  chemically synthesized
cttttacccatgtaatgatc

SEQ ID NO: 5065 - DNA, 20 bp, Artificial Sequence
  chemically synthesized
attttgcctttaatcaatga

SEQ ID NO: 5066 - DNA, 20 bp, Artificial Sequence
  chemically synthesized
tttgcctttaatcaatgaaa

SEQ ID NO: 5067 - DNA, 20 bp, Artificial Sequence
  chemically synthesized
cctttaatcaatgaaagagt

SEQ ID NO: 5068 - DNA, 20 bp, Artificial Sequence
  chemically synthesized
ctccctaacctatattttgc

SEQ ID NO: 5069 - DNA, 20 bp, Artificial Sequence
  chemically synthesized
cctatattttgcaagtcgat

SEQ ID NO: 5070 - DNA, 20 bp, Artificial Sequence
  chemically synthesized
attttgcaagtcgattagct

SEQ ID NO: 5071 - DNA, 20 bp, Artificial Sequence
  chemically synthesized
taagctcttcatgctaatgt

SEQ ID NO: 5072 - DNA, 20 bp, Artificial Sequence
  chemically synthesized
gctcttcatgctaatgtcag

SEQ ID NO: 5073 - DNA, 20 bp, Artificial Sequence
  chemically synthesized
tcttcatgctaatgtcagca

SEQ ID NO: 5074 - DNA, 20 bp, Artificial Sequence
  chemically synthesized
cagagcccatgttacatctc

SEQ ID NO: 5075 - DNA, 20 bp, Artificial Sequence
  chemically synthesized
gcccatgttacatctccagt

SEQ ID NO: 5076 - DNA, 20 bp, Artificial Sequence
  chemically synthesized
cccatgttacatctccagtc

SEQ ID NO: 5077 - DNA, 20 bp, Artificial Sequence
  chemically synthesized
tacatctccagtcaggcttt

SEQ ID NO: 5078 - DNA, 20 bp, Artificial Sequence
  chemically synthesized
acatctccagtcaggctttc

SEQ ID NO: 5079 - DNA, 20 bp, Artificial Sequence
  chemically synthesized
accccacaatgccacacacc

SEQ ID NO: 5080 - DNA, 20 bp, Artificial Sequence
  chemically synthesized
cccacaatgccacacaccga

SEQ ID NO: 5081 - DNA, 20 bp, Artificial Sequence
  chemically synthesized
acaatgccacacaccgagag

SEQ ID NO: 5082 - DNA, 20 bp, Artificial Sequence
  chemically synthesized
ccacacaccgagagtggaaa

SEQ ID NO: 5083 - DNA, 20 bp, Artificial Sequence
  chemically synthesized
gagagtggaaaaagaaaatt

SEQ ID NO: 5084 - DNA, 20 bp, Artificial Sequence
  chemically synthesized
agtggaaaaagaaaattcag

SEQ ID NO: 5085 - DNA, 20 bp, Artificial Sequence
  chemically synthesized
gtggaaaaagaaaattcagc

SEQ ID NO: 5086 - DNA, 20 bp, Artificial Sequence
  chemically synthesized
tggaaaaagaaaattcagca

SEQ ID NO: 5087 - DNA, 20 bp, Artificial Sequence
  chemically synthesized
ggaaaaagaaaattcagcag

SEQ ID NO: 5088 - DNA, 20 bp, Artificial Sequence
  chemically synthesized
gaaaaagaaaattcagcagg

SEQ ID NO: 5089 - DNA, 20 bp, Artificial Sequence
  chemically synthesized
aaaagaaaattcagcagggg

SEQ ID NO: 5090 - DNA, 20 bp, Artificial Sequence
  chemically synthesized
agaaaattcagcagggggag

SEQ ID NO: 5091 - DNA, 20 bp, Artificial Sequence
  chemically synthesized
attcagcagggggagcagtg

SEQ ID NO: 5092 - DNA, 20 bp, Artificial Sequence
  chemically synthesized
cagcagggggagcagtgtag

SEQ ID NO: 5093 - DNA, 20 bp, Artificial Sequence
  chemically synthesized
agcagggggagcagtgtagt

SEQ ID NO: 5094 - DNA, 20 bp, Artificial Sequence
  chemically synthesized
agggggagcagtgtagtggg

SEQ ID NO: 5095 - DNA, 20 bp, Artificial Sequence
  chemically synthesized
ttacgttttcgtcatctgta

SEQ ID NO: 5096 - DNA, 20 bp, Artificial Sequence
  chemically synthesized
ttcgtcatctgtatggaaat

SEQ ID NO: 5097 - DNA, 20 bp, Artificial Sequence
  chemically synthesized
tcgtcatctgtatggaaatt

SEQ ID NO: 5098 - DNA, 20 bp, Artificial Sequence
  chemically synthesized
ggaaatcgtcttctcaaatg

SEQ ID NO: 5099 - DNA, 20 bp, Artificial Sequence
  chemically synthesized
aaatgtagattatcttccct

SEQ ID NO: 5100 - DNA, 20 bp, Artificial Sequence
  chemically synthesized
aatgtagattatcttccctt

SEQ ID NO: 5101 - DNA, 20 bp, Artificial Sequence
  chemically synthesized
atcttcccttgggatccttc

SEQ ID NO: 5102 - DNA, 20 bp, Artificial Sequence
  chemically synthesized
cttcccttgggatccttctg

SEQ ID NO: 5103 - DNA, 20 bp, Artificial Sequence
  chemically synthesized
ttcccttgggatccttctgg

SEQ ID NO: 5104 - DNA, 20 bp, Artificial Sequence
  chemically synthesized
tcccttgggatccttctgga

SEQ ID NO: 5105 - DNA, 20 bp, Artificial Sequence
  chemically synthesized
ttctggagggctataaataa

SEQ ID NO: 5106 - DNA, 20 bp, Artificial Sequence
  chemically synthesized
tagaacatactaatcaacat

SEQ ID NO: 5107 - DNA, 20 bp, Artificial Sequence
  chemically synthesized
tagatatttaaaaatgaata

SEQ ID NO: 5108 - DNA, 20 bp, Artificial Sequence
  chemically synthesized
tttaaaaatgaatacagatt

SEQ ID NO: 5109 - DNA, 20 bp, Artificial Sequence
  chemically synthesized
aatgaatacagattcagatt

SEQ ID NO: 5110 - DNA, 20 bp, Artificial Sequence
  chemically synthesized
atgaatacagattcagatta

SEQ ID NO: 5111 - DNA, 20 bp, Artificial Sequence
  chemically synthesized
tgaatacagattcagattaa

SEQ ID NO: 5112 - DNA, 20 bp, Artificial Sequence
  chemically synthesized
aatgatgcctttataaaatc

SEQ ID NO: 5113 - DNA, 20 bp, Artificial Sequence
  chemically synthesized
agaacaaaacaaaacaaaaa

SEQ ID NO: 5114 - DNA, 20 bp, Artificial Sequence
  chemically synthesized
gaacaaaacaaaacaaaaaa

SEQ ID NO: 5115 - DNA, 20 bp, Artificial Sequence
  chemically synthesized
aaacaaaaaaaggcatgaaa

SEQ ID NO: 5116 - DNA, 20 bp, Artificial Sequence
  chemically synthesized
caaaaaaaggcatgaaaaag

SEQ ID NO: 5117 - DNA, 20 bp, Artificial Sequence
  chemically synthesized
aaaaaaaggcatgaaaaaga

SEQ ID NO: 5118 - DNA, 20 bp, Artificial Sequence
  chemically synthesized
aaggcatgaaaaagaaggct

SEQ ID NO: 5119 - DNA, 20 bp, Artificial Sequence
  chemically synthesized
gcatgaaaaagaaggcttag

SEQ ID NO: 5120 - DNA, 20 bp, Artificial Sequence
  chemically synthesized
aggcttagcggatccccctt

SEQ ID NO: 5121 - DNA, 20 bp, Artificial Sequence
  chemically synthesized
ttagcggatcccccttaagt

SEQ ID NO: 5122 - DNA, 20 bp, Artificial Sequence
  chemically synthesized
cttaagttagccctattctc

SEQ ID NO: 5123 - DNA, 20 bp, Artificial Sequence
  chemically synthesized
ctattctctggcaaccacac

SEQ ID NO: 5124 - DNA, 20 bp, Artificial Sequence
  chemically synthesized
caaccacaccagcctttaac

SEQ ID NO: 5125 - DNA, 20 bp, Artificial Sequence
  chemically synthesized
aaccacaccagcctttaacg

SEQ ID NO: 5126 - DNA, 20 bp, Artificial Sequence
  chemically synthesized
accacaccagcctttaacga

SEQ ID NO: 5127 - DNA, 20 bp, Artificial Sequence
  chemically synthesized
gcctttaacgagggtgttca

SEQ ID NO: 5128 - DNA, 20 bp, Artificial Sequence
  chemically synthesized
tttcccactcccttatttat

SEQ ID NO: 5129 - DNA, 20 bp, Artificial Sequence
  chemically synthesized
cccactcccttatttatgag

SEQ ID NO: 5130 - DNA, 20 bp, Artificial Sequence
  chemically synthesized
actcccttatttatgagcag

SEQ ID NO: 5131 - DNA, 20 bp, Artificial Sequence
  chemically synthesized
tatgagcagcagaatgtaaa

SEQ ID NO: 5132 - DNA, 20 bp, Artificial Sequence
  chemically synthesized
agcagcagaatgtaaaaagc

SEQ ID NO: 5133 - DNA, 20 bp, Artificial Sequence
  chemically synthesized
cagcagaatgtaaaaagcaa

SEQ ID NO: 5134 - DNA, 20 bp, Artificial Sequence
  chemically synthesized
agcagaatgtaaaaagcaag

SEQ ID NO: 5135 - DNA, 20 bp, Artificial Sequence
  chemically synthesized
caagaggcttaattttaatg

SEQ ID NO: 5136 - DNA, 20 bp, Artificial Sequence
  chemically synthesized
tctcatcaaccattctatct

SEQ ID NO: 5137 - DNA, 20 bp, Artificial Sequence
  chemically synthesized
ctcatcaaccattctatcta

SEQ ID NO: 5138 - DNA, 20 bp, Artificial Sequence
  chemically synthesized
atcaaccattctatctaagg

SEQ ID NO: 5139 - DNA, 20 bp, Artificial Sequence
  chemically synthesized
cattctatctaaggaagctg

SEQ ID NO: 5140 - DNA, 20 bp, Artificial Sequence
  chemically synthesized
ctatctaaggaagctgcaga

SEQ ID NO: 5141 - DNA, 20 bp, Artificial Sequence
  chemically synthesized
tatctaaggaagctgcagaa

SEQ ID NO: 5142 - DNA, 20 bp, Artificial Sequence
  chemically synthesized
agctgcagaaaggtgaaaac

SEQ ID NO: 5143 - DNA, 20 bp, Artificial Sequence
  chemically synthesized
ggaaatttatgaacctttaa

SEQ ID NO: 5144 - DNA, 20 bp, Artificial Sequence
  chemically synthesized
gaaatttatgaacctttaat

SEQ ID NO: 5145 - DNA, 20 bp, Artificial Sequence
  chemically synthesized
tgaacctttaatgggaaatc

SEQ ID NO: 5146 - DNA, 20 bp, Artificial Sequence
  chemically synthesized
ctttaatgggaaatctggat

SEQ ID NO: 5147 - DNA, 20 bp, Artificial Sequence
  chemically synthesized
gggaaatctggataagaatt

SEQ ID NO: 5148 - DNA, 20 bp, Artificial Sequence
  chemically synthesized
gaatttggtctaaatatatg

SEQ ID NO: 5149 - DNA, 20 bp, Artificial Sequence
  chemically synthesized
atttggtctaaatatatgaa

SEQ ID NO: 5150 - DNA, 20 bp, Artificial Sequence
  chemically synthesized
tttggtctaaatatatgaag

SEQ ID NO: 5151 - DNA, 20 bp, Artificial Sequence
  chemically synthesized
taaatatatgaagaggaaca

SEQ ID NO: 5152 - DNA, 20 bp, Artificial Sequence
  chemically synthesized
tatatgaagaggaacatgga

SEQ ID NO: 5153 - DNA, 20 bp, Artificial Sequence
  chemically synthesized
tgaagaggaacatggacagc

SEQ ID NO: 5154 - DNA, 20 bp, Artificial Sequence
  chemically synthesized
ctggcacaaacacaaaatgc

SEQ ID NO: 5155 - DNA, 20 bp, Artificial Sequence
  chemically synthesized
aaatgcaagtactccaactc

SEQ ID NO: 5156 - DNA, 20 bp, Artificial Sequence
  chemically synthesized
cctgataacatctgccacta

SEQ ID NO: 5157 - DNA, 20 bp, Artificial Sequence
  chemically synthesized
ctgataacatctgccactaa

SEQ ID NO: 5158 - DNA, 20 bp, Artificial Sequence
  chemically synthesized
ccactaaaggtttactgact

SEQ ID NO: 5159 - DNA, 20 bp, Artificial Sequence
  chemically synthesized
tgacttggttttcccaactc

SEQ ID NO: 5160 - DNA, 20 bp, Artificial Sequence
  chemically synthesized
tggttttcccaactctagaa

SEQ ID NO: 5161 - DNA, 20 bp, Artificial Sequence
  chemically synthesized
gttttcccaactctagaatg

SEQ ID NO: 5162 - DNA, 20 bp, Artificial Sequence
  chemically synthesized
atggagccctcatctaaacc

SEQ ID NO: 5163 - DNA, 20 bp, Artificial Sequence
  chemically synthesized
tggagccctcatctaaacct

SEQ ID NO: 5164 - DNA, 20 bp, Artificial Sequence
  chemically synthesized
ggagccctcatctaaacctg

SEQ ID NO: 5165 - DNA, 20 bp, Artificial Sequence
  chemically synthesized
gccctcatctaaacctgggg

SEQ ID NO: 5166 - DNA, 20 bp, Artificial Sequence
  chemically synthesized
ggaagcaatatatgaacaat

SEQ ID NO: 5167 - DNA, 20 bp, Artificial Sequence
  chemically synthesized
aattagatattaaatgctta

SEQ ID NO: 5168 - DNA, 20 bp, Artificial Sequence
  chemically synthesized
ctgtgctattacttttgacc

SEQ ID NO: 5169 - DNA, 20 bp, Artificial Sequence
  chemically synthesized
tgtgctattacttttgacct

SEQ ID NO: 5170 - DNA, 20 bp, Artificial Sequence
  chemically synthesized
tgacctgggttttaaaaaca

SEQ ID NO: 5171 - DNA, 20 bp, Artificial Sequence
  chemically synthesized
tacaatttattctcattatg

SEQ ID NO: 5172 - DNA, 20 bp, Artificial Sequence
  chemically synthesized
tagaaacatttaaattatcc

SEQ ID NO: 5173 - DNA, 20 bp, Artificial Sequence
  chemically synthesized
aaacatttaaattatcctgg

SEQ ID NO: 5174 - DNA, 20 bp, Artificial Sequence
  chemically synthesized
acatttaaattatcctggaa

SEQ ID NO: 5175 - DNA, 20 bp, Artificial Sequence
  chemically synthesized
tcctggaagagtttgtctca

SEQ ID NO: 5176 - DNA, 20 bp, Artificial Sequence
  chemically synthesized
cctggaagagtttgtctcac

SEQ ID NO: 5177 - DNA, 20 bp, Artificial Sequence
  chemically synthesized
tttgtctcacgggctgttca

SEQ ID NO: 5178 - DNA, 20 bp, Artificial Sequence
  chemically synthesized
tgtctcacgggctgttcaaa

SEQ ID NO: 5179 - DNA, 20 bp, Artificial Sequence
  chemically synthesized
agtgtttcttcctttccttc

SEQ ID NO: 5180 - DNA, 20 bp, Artificial Sequence
  chemically synthesized
gtgtttcttcctttccttct

SEQ ID NO: 5181 - DNA, 20 bp, Artificial Sequence
  chemically synthesized
tcctttccttctaggaacat

SEQ ID NO: 5182 - DNA, 20 bp, Artificial Sequence
  chemically synthesized
cctttccttctaggaacatg

SEQ ID NO: 5183 - DNA, 20 bp, Artificial Sequence
  chemically synthesized
tttccttctaggaacatgag

SEQ ID NO: 5184 - DNA, 20 bp, Artificial Sequence
  chemically synthesized
tgaatctgactatttcatca

SEQ ID NO: 5185 - DNA, 20 bp, Artificial Sequence
  chemically synthesized
tatttcatcaaagcctgtaa

SEQ ID NO: 5186 - DNA, 20 bp, Artificial Sequence
  chemically synthesized
aaagcctgtaaaagatacct

SEQ ID NO: 5187 - DNA, 20 bp, Artificial Sequence
  chemically synthesized
tttaactgaacaatgtctcc

SEQ ID NO: 5188 - DNA, 20 bp, Artificial Sequence
  chemically synthesized
gaacaatgtctccaagaatt

SEQ ID NO: 5189 - DNA, 20 bp, Artificial Sequence
  chemically synthesized
tctccaagaattcagactgt

SEQ ID NO: 5190 - DNA, 20 bp, Artificial Sequence
  chemically synthesized
tccaagaattcagactgtga

SEQ ID NO: 5191 - DNA, 20 bp, Artificial Sequence
  chemically synthesized
ccaagaattcagactgtgag

SEQ ID NO: 5192 - DNA, 20 bp, Artificial Sequence
  chemically synthesized
caagaattcagactgtgaga

SEQ ID NO: 5193 - DNA, 20 bp, Artificial Sequence
  chemically synthesized
aagaattcagactgtgagag

SEQ ID NO: 5194 - DNA, 20 bp, Artificial Sequence
  chemically synthesized
agaattcagactgtgagagg

SEQ ID NO: 5195 - DNA, 20 bp, Artificial Sequence
  chemically synthesized
attcagactgtgagaggggg

SEQ ID NO: 5196 - DNA, 20 bp, Artificial Sequence
  chemically synthesized
cagactgtgagagggggaag

SEQ ID NO: 5197 - DNA, 20 bp, Artificial Sequence
  chemically synthesized
ggggaagaagaccgtctctt

SEQ ID NO: 5198 - DNA, 20 bp, Artificial Sequence
  chemically synthesized
agaagaccgtctctttggtg

SEQ ID NO: 5199 - DNA, 20 bp, Artificial Sequence
  chemically synthesized
agaccgtctctttggtgcag

SEQ ID NO: 5200 - DNA, 20 bp, Artificial Sequence
  chemically synthesized
gaccgtctctttggtgcagt

SEQ ID NO: 5201 - DNA, 20 bp, Artificial Sequence
  chemically synthesized
aattgccattgtgtcctccc

SEQ ID NO: 5202 - DNA, 20 bp, Artificial Sequence
  chemically synthesized
tggttcctctcctctgtcct

SEQ ID NO: 5203 - DNA, 20 bp, Artificial Sequence
  chemically synthesized
ctcctctgtccttggcaatc

SEQ ID NO: 5204 - DNA, 20 bp, Artificial Sequence
  chemically synthesized
gcaatccagttacaatttga

SEQ ID NO: 5205 - DNA, 20 bp, Artificial Sequence
  chemically synthesized
ttacaatttgacagcattta

SEQ ID NO: 5206 - DNA, 20 bp, Artificial Sequence
  chemically synthesized
ttgacagcatttaaagatga

SEQ ID NO: 5207 - DNA, 20 bp, Artificial Sequence
  chemically synthesized
atttaaagatgacagtactt

SEQ ID NO: 5208 - DNA, 20 bp, Artificial Sequence
  chemically synthesized
gatgacagtacttgagataa

SEQ ID NO: 5209 - DNA, 20 bp, Artificial Sequence
  chemically synthesized
atgacagtacttgagataat

SEQ ID NO: 5210 - DNA, 20 bp, Artificial Sequence
  chemically synthesized
ataataggacaatgccataa

SEQ ID NO: 5211 - DNA, 20 bp, Artificial Sequence
  chemically synthesized
taataggacaatgccataac

SEQ ID NO: 5212 - DNA, 20 bp, Artificial Sequence
  chemically synthesized
acaatgccataacaggatta

SEQ ID NO: 5213 - DNA, 20 bp, Artificial Sequence
  chemically synthesized
caggattacagcaaatgtga

SEQ ID NO: 5214 - DNA, 20 bp, Artificial Sequence
  chemically synthesized
attacagcaaatgtgaaaga

SEQ ID NO: 5215 - DNA, 20 bp, Artificial Sequence
  chemically synthesized
ttacagcaaatgtgaaagaa

SEQ ID NO: 5216 - DNA, 20 bp, Artificial Sequence
  chemically synthesized
tgtgaaagaaaggacacacg

SEQ ID NO: 5217 - DNA, 20 bp, Artificial Sequence
  chemically synthesized
gtgaaagaaaggacacacgt

SEQ ID NO: 5218 - DNA, 20 bp, Artificial Sequence
  chemically synthesized
cacacgtaggtactgtcatt

SEQ ID NO: 5219 - DNA, 20 bp, Artificial Sequence
  chemically synthesized
acacgtaggtactgtcattt

SEQ ID NO: 5220 - DNA, 20 bp, Artificial Sequence
  chemically synthesized
taggtaatgtcatctatgat

SEQ ID NO: 5221 - DNA, 20 bp, Artificial Sequence
  chemically synthesized
tgtttcattttttgctgaca

SEQ ID NO: 5222 - DNA, 20 bp, Artificial Sequence
  chemically synthesized
ttttttgctgacacagaact

SEQ ID NO: 5223 - DNA, 20 bp, Artificial Sequence
  chemically synthesized
gtgctacttatacaattcac

SEQ ID NO: 5224 - DNA, 20 bp, Artificial Sequence
  chemically synthesized
attcactggaaaccctgtta

SEQ ID NO: 5225 - DNA, 20 bp, Artificial Sequence
  chemically synthesized
aaccctgttatggctgtaaa

SEQ ID NO: 5226 - DNA, 20 bp, Artificial Sequence
  chemically synthesized
tagtttgcttcccccaatga

SEQ ID NO: 5227 - DNA, 20 bp, Artificial Sequence
  chemically synthesized
agaaaatacttactgtactg

SEQ ID NO: 5228 - DNA, 20 bp, Artificial Sequence
  chemically synthesized
gaaaatacttactgtactgc

SEQ ID NO: 5229 - DNA, 20 bp, Artificial Sequence
  chemically synthesized
aaaatacttactgtactgca

SEQ ID NO: 5230 - DNA, 20 bp, Artificial Sequence
  chemically synthesized
aaatacttactgtactgcag

SEQ ID NO: 5231 - DNA, 20 bp, Artificial Sequence
  chemically synthesized
tactgtactgcaggggaatt

SEQ ID NO: 5232 - DNA, 20 bp, Artificial Sequence
  chemically synthesized
gggaattcggtaaaactttc

SEQ ID NO: 5233 - DNA, 20 bp, Artificial Sequence
  chemically synthesized
aataacaaaaaatttcaaat

SEQ ID NO: 5234 - DNA, 20 bp, Artificial Sequence
  chemically synthesized
aaatttcaaatcagtatcaa

SEQ ID NO: 5235 - DNA, 20 bp, Artificial Sequence
  chemically synthesized
caaatcagtatcaatagcca

SEQ ID NO: 5236 - DNA, 20 bp, Artificial Sequence
  chemically synthesized
aatagccaaagatccaaaaa

SEQ ID NO: 5237 - DNA, 20 bp, Artificial Sequence
  chemically synthesized
aaagatccaaaaacagccta

SEQ ID NO: 5238 - DNA, 20 bp, Artificial Sequence
  chemically synthesized
tttgtttgttttttgtttct

SEQ ID NO: 5239 - DNA, 20 bp, Artificial Sequence
  chemically synthesized
ttgtttgttttttgtttctg

SEQ ID NO: 5240 - DNA, 20 bp, Artificial Sequence
  chemically synthesized
tttgttttttgtttctgagg

SEQ ID NO: 5241 - DNA, 20 bp, Artificial Sequence
  chemically synthesized
tgttttttgtttctgaggtg

SEQ ID NO: 5242 - DNA, 20 bp, Artificial Sequence
  chemically synthesized
ggagtttcgctcttgttgcc

SEQ ID NO: 5243 - DNA, 20 bp, Artificial Sequence
  chemically synthesized
gagtttcgctcttgttgccc

SEQ ID NO: 5244 - DNA, 20 bp, Artificial Sequence
  chemically synthesized
ttcgctcttgttgcccgggc

SEQ ID NO: 5245 - DNA, 20 bp, Artificial Sequence
  chemically synthesized
cgctcttgttgcccgggctg

SEQ ID NO: 5246 - DNA, 20 bp, Artificial Sequence
  chemically synthesized
ttgcccgggctggagtgcaa

SEQ ID NO: 5247 - DNA, 20 bp, Artificial Sequence
  chemically synthesized
ggagtgcaatggcgcaatct

SEQ ID NO: 5248 - DNA, 20 bp, Artificial Sequence
  chemically synthesized
tcaccgcaatctccgcctcc

SEQ ID NO: 5249 - DNA, 20 bp, Artificial Sequence
  chemically synthesized
caccgcaatctccgcctccc

SEQ ID NO: 5250 - DNA, 20 bp, Artificial Sequence
  chemically synthesized
aatctccgcctcccgggttc

SEQ ID NO: 5251 - DNA, 20 bp, Artificial Sequence
  chemically synthesized
ttcaagcgattctcctgcct

SEQ ID NO: 5252 - DNA, 20 bp, Artificial Sequence
  chemically synthesized
ttctcctgcctcagcctccc

SEQ ID NO: 5253 - DNA, 20 bp, Artificial Sequence
  chemically synthesized
tcctgcctcagcctcccaag

SEQ ID NO: 5254 - DNA, 20 bp, Artificial Sequence
  chemically synthesized
gcctcagcctcccaagtagc

SEQ ID NO: 5255 - DNA, 20 bp, Artificial Sequence
  chemically synthesized
cctcagcctcccaagtagct

SEQ ID NO: 5256 - DNA, 20 bp, Artificial Sequence
  chemically synthesized
ctcccaagtagctgggatta

SEQ ID NO: 5257 - DNA, 20 bp, Artificial Sequence
  chemically synthesized
tcccaagtagctgggattat

SEQ ID NO: 5258 - DNA, 20 bp, Artificial Sequence
  chemically synthesized
taggcatgcgccaccacacg

SEQ ID NO: 5259 - DNA, 20 bp, Artificial Sequence
  chemically synthesized
gcggctaatttctgtatttt

SEQ ID NO: 5260 - DNA, 20 bp, Artificial Sequence
  chemically synthesized
gctaatttctgtatttttgg

SEQ ID NO: 5261 - DNA, 20 bp, Artificial Sequence
  chemically synthesized
taatttctgtatttttggta

SEQ ID NO: 5262 - DNA, 20 bp, Artificial Sequence
  chemically synthesized
ttctgtatttttggtagaga

SEQ ID NO: 5263 - DNA, 20 bp, Artificial Sequence
  chemically synthesized
tctgtatttttggtagagac

SEQ ID NO: 5264 - DNA, 20 bp, Artificial Sequence
  chemically synthesized
ctgtatttttggtagagacg

SEQ ID NO: 5265 - DNA, 20 bp, Artificial Sequence
  chemically synthesized
gagacggggtttctccatgt

SEQ ID NO: 5266 - DNA, 20 bp, Artificial Sequence
  chemically synthesized
cggggtttctccatgttggt

SEQ ID NO: 5267 - DNA, 20 bp, Artificial Sequence
  chemically synthesized
ggggtttctccatgttggtc

SEQ ID NO: 5268 - DNA, 20 bp, Artificial Sequence
  chemically synthesized
tttctccatgttggtcaggc

SEQ ID NO: 5269 - DNA, 20 bp, Artificial Sequence
  chemically synthesized
tggtctcaaactcccgacct

SEQ ID NO: 5270 - DNA, 20 bp, Artificial Sequence
  chemically synthesized
ggtctcaaactcccgacctt

SEQ ID NO: 5271 - DNA, 20 bp, Artificial Sequence
  chemically synthesized
cttaggtgatccacccacct

SEQ ID NO: 5272 - DNA, 20 bp, Artificial Sequence
  chemically synthesized
ccacccacctcagcctccca

SEQ ID NO: 5273 - DNA, 20 bp, Artificial Sequence
  chemically synthesized
acctcagcctcccaaagtgc

SEQ ID NO: 5274 - DNA, 20 bp, Artificial Sequence
  chemically synthesized
cctcagcctcccaaagtgct

SEQ ID NO: 5275 - DNA, 20 bp, Artificial Sequence
  chemically synthesized
ctcccaaagtgctgggatta

SEQ ID NO: 5276 - DNA, 20 bp, Artificial Sequence
  chemically synthesized
tcccaaagtgctgggattat

SEQ ID NO: 5277 - DNA, 20 bp, Artificial Sequence
  chemically synthesized
agtgctgggattataggcat

SEQ ID NO: 5278 - DNA, 20 bp, Artificial Sequence
  chemically synthesized
taggcataagctaccacacc

SEQ ID NO: 5279 - DNA, 20 bp, Artificial Sequence
  chemically synthesized
ccaaaacaaatttatcttca

SEQ ID NO: 5280 - DNA, 20 bp, Artificial Sequence
  chemically synthesized
atgctgtgtgtcctaaataa

SEQ ID NO: 5281 - DNA, 20 bp, Artificial Sequence
  chemically synthesized
tgctgtgtgtcctaaataat

SEQ ID NO: 5282 - DNA, 20 bp, Artificial Sequence
  chemically synthesized
tgtgtgtcctaaataatagg

SEQ ID NO: 5283 - DNA, 20 bp, Artificial Sequence
  chemically synthesized
aggtggtcaaaatgtttcta

SEQ ID NO: 5284 - DNA, 20 bp, Artificial Sequence
  chemically synthesized
ggtggtcaaaatgtttctaa

SEQ ID NO: 5285 - DNA, 20 bp, Artificial Sequence
  chemically synthesized
gtggtcaaaatgtttctaaa

SEQ ID NO: 5286 - DNA, 20 bp, Artificial Sequence
  chemically synthesized
aatgtttctaaagggtacct

SEQ ID NO: 5287 - DNA, 20 bp, Artificial Sequence
  chemically synthesized
ccccaattaaactgttgctt

SEQ ID NO: 5288 - DNA, 20 bp, Artificial Sequence
  chemically synthesized
ccaattaaactgttgcttta

SEQ ID NO: 5289 - DNA, 20 bp, Artificial Sequence
  chemically synthesized
taaactgttgctttagagtt

SEQ ID NO: 5290 - DNA, 20 bp, Artificial Sequence
  chemically synthesized
aaactgttgctttagagttt

SEQ ID NO: 5291 - DNA, 20 bp, Artificial Sequence
  chemically synthesized
aactgttgctttagagtttg

SEQ ID NO: 5292 - DNA, 20 bp, Artificial Sequence
  chemically synthesized
tttagagtttggggaaaata

SEQ ID NO: 5293 - DNA, 20 bp, Artificial Sequence
  chemically synthesized
agagtttggggaaaataaag

SEQ ID NO: 5294 - DNA, 20 bp, Artificial Sequence
  chemically synthesized
cctaactaaattcacactgt

SEQ ID NO: 5295 - DNA, 20 bp, Artificial Sequence
  chemically synthesized
taactaaattcacactgtga

SEQ ID NO: 5296 - DNA, 20 bp, Artificial Sequence
  chemically synthesized
taaattcacactgtgagagc

SEQ ID NO: 5297 - DNA, 20 bp, Artificial Sequence
  chemically synthesized
ctgtgagagccagtcaacac

SEQ ID NO: 5298 - DNA, 20 bp, Artificial Sequence
  chemically synthesized
aacactagcccacatgccaa

SEQ ID NO: 5299 - DNA, 20 bp, Artificial Sequence
  chemically synthesized
acactagcccacatgccaat

SEQ ID NO: 5300 - DNA, 20 bp, Artificial Sequence
  chemically synthesized
cactagcccacatgccaatg

SEQ ID NO: 5301 - DNA, 20 bp, Artificial Sequence
  chemically synthesized
catgccaatggggtccttgt

SEQ ID NO: 5302 - DNA, 20 bp, Artificial Sequence
  chemically synthesized
acatatccaaattcatacaa

SEQ ID NO: 5303 - DNA, 20 bp, Artificial Sequence
  chemically synthesized
atatccaaattcatacaata

SEQ ID NO: 5304 - DNA, 20 bp, Artificial Sequence
  chemically synthesized
tatccaaattcatacaatag

SEQ ID NO: 5305 - DNA, 20 bp, Artificial Sequence
  chemically synthesized
attcatacaatagaggcatt

SEQ ID NO: 5306 - DNA, 20 bp, Artificial Sequence
  chemically synthesized
caatagaggcatttggaacc

SEQ ID NO: 5307 - DNA, 20 bp, Artificial Sequence
  chemically synthesized
tcctaactaatttctgccgc

SEQ ID NO: 5308 - DNA, 20 bp, Artificial Sequence
  chemically synthesized
taactaatttctgccgctgg

SEQ ID NO: 5309 - DNA, 20 bp, Artificial Sequence
  chemically synthesized
ccgctggaagtttgttccta

SEQ ID NO: 5310 - DNA, 20 bp, Artificial Sequence
  chemically synthesized
agtttgttcctaaagccacc

SEQ ID NO: 5311 - DNA, 20 bp, Artificial Sequence
  chemically synthesized
cctaaagccaccaagtctcc

SEQ ID NO: 5312 - DNA, 20 bp, Artificial Sequence
  chemically synthesized
aaagccaccaagtctcctag

SEQ ID NO: 5313 - DNA, 20 bp, Artificial Sequence
  chemically synthesized
tcctagaagcccttatttct

SEQ ID NO: 5314 - DNA, 20 bp, Artificial Sequence
  chemically synthesized
tagaagcccttatttcttgg

SEQ ID NO: 5315 - DNA, 20 bp, Artificial Sequence
  chemically synthesized
atttcttggcagtaaacaca

SEQ ID NO: 5316 - DNA, 20 bp, Artificial Sequence
  chemically synthesized
tcttggcagtaaacacacgg

SEQ ID NO: 5317 - DNA, 20 bp, Artificial Sequence
  chemically synthesized
ggccctgcgtgccattaaaa

SEQ ID NO: 5318 - DNA, 20 bp, Artificial Sequence
  chemically synthesized
aaaatagctgcctcatcatc

SEQ ID NO: 5319 - DNA, 20 bp, Artificial Sequence
  chemically synthesized
aaatagctgcctcatcatcc

SEQ ID NO: 5320 - DNA, 20 bp, Artificial Sequence
  chemically synthesized
tcatcatccaggatgacaaa

SEQ ID NO: 5321 - DNA, 20 bp, Artificial Sequence
  chemically synthesized
aaacagccacactgtgtgcc

SEQ ID NO: 5322 - DNA, 20 bp, Artificial Sequence
  chemically synthesized
cacactgtgtgccaagtgac

SEQ ID NO: 5323 - DNA, 20 bp, Artificial Sequence
  chemically synthesized
aagtgaccagccacaaacaa

SEQ ID NO: 5324 - DNA, 20 bp, Artificial Sequence
  chemically synthesized
caaacaaaagcttgtttgac

SEQ ID NO: 5325 - DNA, 20 bp, Artificial Sequence
  chemically synthesized
ttgaccagcacctatctcaa

SEQ ID NO: 5326 - DNA, 20 bp, Artificial Sequence
  chemically synthesized
ctatctcaaaagaaaattct

SEQ ID NO: 5327 - DNA, 20 bp, Artificial Sequence
  chemically synthesized
tctcaaaagaaaattctgag

SEQ ID NO: 5328 - DNA, 20 bp, Artificial Sequence
  chemically synthesized
caaaagaaaattctgagtag

SEQ ID NO: 5329 - DNA, 20 bp, Artificial Sequence
  chemically synthesized
aaagaaaattctgagtagaa

SEQ ID NO: 5330 - DNA, 20 bp, Artificial Sequence
  chemically synthesized
aagaaaattctgagtagaag

SEQ ID NO: 5331 - DNA, 20 bp, Artificial Sequence
  chemically synthesized
aaaattctgagtagaagagg

SEQ ID NO: 5332 - DNA, 20 bp, Artificial Sequence
  chemically synthesized
agtagaagaggaagcacctg

SEQ ID NO: 5333 - DNA, 20 bp, Artificial Sequence
  chemically synthesized
gtagaagaggaagcacctga

SEQ ID NO: 5334 - DNA, 20 bp, Artificial Sequence
  chemically synthesized
gaagaggaagcacctgaagg

SEQ ID NO: 5335 - DNA, 20 bp, Artificial Sequence
  chemically synthesized
agcacctgaaggaagctgaa

SEQ ID NO: 5336 - DNA, 20 bp, Artificial Sequence
  chemically synthesized
cctgaaggaagctgaaaaga

SEQ ID NO: 5337 - DNA, 20 bp, Artificial Sequence
  chemically synthesized
tctgacatttgaaattctaa

SEQ ID NO: 5338 - DNA, 20 bp, Artificial Sequence
  chemically synthesized
tgacatttgaaattctaaca

SEQ ID NO: 5339 - DNA, 20 bp, Artificial Sequence
  chemically synthesized
gacatttgaaattctaacag

SEQ ID NO: 5340 - DNA, 20 bp, Artificial Sequence
  chemically synthesized
aacagaggttctttcccctc

SEQ ID NO: 5341 - DNA, 20 bp, Artificial Sequence
  chemically synthesized
acagaggttctttcccctct

SEQ ID NO: 5342 - DNA, 20 bp, Artificial Sequence
  chemically synthesized
ctttcccctctaggacactc

SEQ ID NO: 5343 - DNA, 20 bp, Artificial Sequence
  chemically synthesized
tttcccctctaggacactct

SEQ ID NO: 5344 - DNA, 20 bp, Artificial Sequence
  chemically synthesized
tctaggacactctgggtcac

SEQ ID NO: 5345 - DNA, 20 bp, Artificial Sequence
  chemically synthesized
tctctgctttccttgttccc

SEQ ID NO: 5346 - DNA, 20 bp, Artificial Sequence
  chemically synthesized
tgttccctggctcatctcct

SEQ ID NO: 5347 - DNA, 20 bp, Artificial Sequence
  chemically synthesized
tggctcatctcctgagcccc

SEQ ID NO: 5348 - DNA, 20 bp, Artificial Sequence
  chemically synthesized
ggctcatctcctgagccccc

SEQ ID NO: 5349 - DNA, 20 bp, Artificial Sequence
  chemically synthesized
tatttactaaccacttttat

SEQ ID NO: 5350 - DNA, 20 bp, Artificial Sequence
  chemically synthesized
ccatccaaaaatgtttactc

SEQ ID NO: 5351 - DNA, 20 bp, Artificial Sequence
  chemically synthesized
caaaaatgtttactcaagtt

SEQ ID NO: 5352 - DNA, 20 bp, Artificial Sequence
  chemically synthesized
aaaaatgtttactcaagttc

SEQ ID NO: 5353 - DNA, 20 bp, Artificial Sequence
  chemically synthesized
atgtttactcaagttcaggc

SEQ ID NO: 5354 - DNA, 20 bp, Artificial Sequence
  chemically synthesized
ggctagcttaataaccccca

SEQ ID NO: 5355 - DNA, 20 bp, Artificial Sequence
  chemically synthesized
tagcttaataacccccaaag

SEQ ID NO: 5356 - DNA, 20 bp, Artificial Sequence
  chemically synthesized
agcttaataacccccaaagc

SEQ ID NO: 5357 - DNA, 20 bp, Artificial Sequence
  chemically synthesized
cttaataacccccaaagcag

SEQ ID NO: 5358 - DNA, 20 bp, Artificial Sequence
  chemically synthesized
ttaataacccccaaagcagg

SEQ ID NO: 5359 - DNA, 20 bp, Artificial Sequence
  chemically synthesized
aaagcaggaggacactatta

SEQ ID NO: 5360 - DNA, 20 bp, Artificial Sequence
  chemically synthesized
agcaggaggacactattaaa

SEQ ID NO: 5361 - DNA, 20 bp, Artificial Sequence
  chemically synthesized
caggaggacactattaaaga

SEQ ID NO: 5362 - DNA, 20 bp, Artificial Sequence
  chemically synthesized
acactattaaagagagatca

SEQ ID NO: 5363 - DNA, 20 bp, Artificial Sequence
  chemically synthesized
cactattaaagagagatcac

SEQ ID NO: 5364 - DNA, 20 bp, Artificial Sequence
  chemically synthesized
actattaaagagagatcaca

SEQ ID NO: 5365 - DNA, 20 bp, Artificial Sequence
  chemically synthesized
tgaaacaccatccatgccct

SEQ ID NO: 5366 - DNA, 20 bp, Artificial Sequence
  chemically synthesized
atgccctgagtatcccaaca

SEQ ID NO: 5367 - DNA, 20 bp, Artificial Sequence
  chemically synthesized
cctgagtatcccaacatgga

SEQ ID NO: 5368 - DNA, 20 bp, Artificial Sequence
  chemically synthesized
gtatcccaacatggatggac

SEQ ID NO: 5369 - DNA, 20 bp, Artificial Sequence
  chemically synthesized
atcccaacatggatggactg

SEQ ID NO: 5370 - DNA, 20 bp, Artificial Sequence
  chemically synthesized
tcccaacatggatggactgg

SEQ ID NO: 5371 - DNA, 20 bp, Artificial Sequence
  chemically synthesized
ccaacatggatggactggag

SEQ ID NO: 5372 - DNA, 20 bp, Artificial Sequence
  chemically synthesized
aacatggatggactggagga

SEQ ID NO: 5373 - DNA, 20 bp, Artificial Sequence
  chemically synthesized
acatggatggactggaggag

SEQ ID NO: 5374 - DNA, 20 bp, Artificial Sequence
  chemically synthesized
catggatggactggaggaga

SEQ ID NO: 5375 - DNA, 20 bp, Artificial Sequence
  chemically synthesized
atggactggaggagagggac

SEQ ID NO: 5376 - DNA, 20 bp, Artificial Sequence
  chemically synthesized
tggactggaggagagggaca

SEQ ID NO: 5377 - DNA, 20 bp, Artificial Sequence
  chemically synthesized
ggactggaggagagggacaa

SEQ ID NO: 5378 - DNA, 20 bp, Artificial Sequence
  chemically synthesized
agagggacaagggaccaata

SEQ ID NO: 5379 - DNA, 20 bp, Artificial Sequence
  chemically synthesized
gggaccaatacagaccctga

SEQ ID NO: 5380 - DNA, 20 bp, Artificial Sequence
  chemically synthesized
ggaccaatacagaccctgat

SEQ ID NO: 5381 - DNA, 20 bp, Artificial Sequence
  chemically synthesized
tgcccactccccatctgcaa

SEQ ID NO: 5382 - DNA, 20 bp, Artificial Sequence
  chemically synthesized
gcccactccccatctgcaat

SEQ ID NO: 5383 - DNA, 20 bp, Artificial Sequence
  chemically synthesized
cccactccccatctgcaatg

SEQ ID NO: 5384 - DNA, 20 bp, Artificial Sequence
  chemically synthesized
ccactccccatctgcaatgg

SEQ ID NO: 5385 - DNA, 20 bp, Artificial Sequence
  chemically synthesized
ccccatctgcaatgggggca

SEQ ID NO: 5386 - DNA, 20 bp, Artificial Sequence
  chemically synthesized
cccatctgcaatgggggcaa

SEQ ID NO: 5387 - DNA, 20 bp, Artificial Sequence
  chemically synthesized
tgcaatgggggcaaaggcaa

SEQ ID NO: 5388 - DNA, 20 bp, Artificial Sequence
  chemically synthesized
gcaatgggggcaaaggcaaa

SEQ ID NO: 5389 - DNA, 20 bp, Artificial Sequence
  chemically synthesized
tgggggcaaaggcaaaagga

SEQ ID NO: 5390 - DNA, 20 bp, Artificial Sequence
  chemically synthesized
aggcaaaaggaaagctttcc

SEQ ID NO: 5391 - DNA, 20 bp, Artificial Sequence
  chemically synthesized
aaagctttccaagatttaaa

SEQ ID NO: 5392 - DNA, 20 bp, Artificial Sequence
  chemically synthesized
atttaaacagtcctctatat

SEQ ID NO: 5393 - DNA, 20 bp, Artificial Sequence
  chemically synthesized
acagtcctctatattagtaa

SEQ ID NO: 5394 - DNA, 20 bp, Artificial Sequence
  chemically synthesized
ttagtaacagacccatgtgc

SEQ ID NO: 5395 - DNA, 20 bp, Artificial Sequence
  chemically synthesized
tagtaacagacccatgtgct

SEQ ID NO: 5396 - DNA, 20 bp, Artificial Sequence
  chemically synthesized
tgctaggctcctacaatatc

SEQ ID NO: 5397 - DNA, 20 bp, Artificial Sequence
  chemically synthesized
aatatctggttccattctgc

SEQ ID NO: 5398 - DNA, 20 bp, Artificial Sequence
  chemically synthesized
tggttccattctgctagtga

SEQ ID NO: 5399 - DNA, 20 bp, Artificial Sequence
  chemically synthesized
ggttccattctgctagtgaa

SEQ ID NO: 5400 - DNA, 20 bp, Artificial Sequence
  chemically synthesized
gctagtgaaaggaaacccta

SEQ ID NO: 5401 - DNA, 20 bp, Artificial Sequence
  chemically synthesized
ggtcaaccaactccatcctc

SEQ ID NO: 5402 - DNA, 20 bp, Artificial Sequence
  chemically synthesized
ctccatcctctagaacatat

SEQ ID NO: 5403 - DNA, 20 bp, Artificial Sequence
  chemically synthesized
ctctagaacatataagtcaa

SEQ ID NO: 5404 - DNA, 20 bp, Artificial Sequence
  chemically synthesized
tctagaacatataagtcaac

SEQ ID NO: 5405 - DNA, 20 bp, Artificial Sequence
  chemically synthesized
ctagaacatataagtcaaca

SEQ ID NO: 5406 - DNA, 20 bp, Artificial Sequence
  chemically synthesized
tagaacatataagtcaacag

SEQ ID NO: 5407 - DNA, 20 bp, Artificial Sequence
  chemically synthesized
gaacatataagtcaacaggg

SEQ ID NO: 5408 - DNA, 20 bp, Artificial Sequence
  chemically synthesized
taagtcaacaggggagaact

SEQ ID NO: 5409 - DNA, 20 bp, Artificial Sequence
  chemically synthesized
acaggggagaactcggcatg

SEQ ID NO: 5410 - DNA, 20 bp, Artificial Sequence
  chemically synthesized
caggggagaactcggcatga

SEQ ID NO: 5411 - DNA, 20 bp, Artificial Sequence
  chemically synthesized
aggggagaactcggcatgaa

SEQ ID NO: 5412 - DNA, 20 bp, Artificial Sequence
  chemically synthesized
actcggcatgaagggtataa

SEQ ID NO: 5413 - DNA, 20 bp, Artificial Sequence
  chemically synthesized
tcggcatgaagggtataaca

SEQ ID NO: 5414 - DNA, 20 bp, Artificial Sequence
  chemically synthesized
caactcatccaccccctttg

SEQ ID NO: 5415 - DNA, 20 bp, Artificial Sequence
  chemically synthesized
actcatccaccccctttgca

SEQ ID NO: 5416 - DNA, 20 bp, Artificial Sequence
  chemically synthesized
agtcctcacttaacatcccc

SEQ ID NO: 5417 - DNA, 20 bp, Artificial Sequence
  chemically synthesized
tgctgcctttgtcttctgat

SEQ ID NO: 5418 - DNA, 20 bp, Artificial Sequence
  chemically synthesized
ctgcctttgtcttctgatca

SEQ ID NO: 5419 - DNA, 20 bp, Artificial Sequence
  chemically synthesized
gtcttctgatcagagtattt

SEQ ID NO: 5420 - DNA, 20 bp, Artificial Sequence
  chemically synthesized
ttctgatcagagtatttcag

SEQ ID NO: 5421 - DNA, 20 bp, Artificial Sequence
  chemically synthesized
cagcagccctctgtgatcta

SEQ ID NO: 5422 - DNA, 20 bp, Artificial Sequence
  chemically synthesized
agcagccctctgtgatctat

SEQ ID NO: 5423 - DNA, 20 bp, Artificial Sequence
  chemically synthesized
cctctgtgatctataggata

SEQ ID NO: 5424 - DNA, 20 bp, Artificial Sequence
  chemically synthesized
aggatatggtccaactcctt

SEQ ID NO: 5425 - DNA, 20 bp, Artificial Sequence
  chemically synthesized
aactccttaagccatcattc

SEQ ID NO: 5426 - DNA, 20 bp, Artificial Sequence
  chemically synthesized
ctccttaagccatcattcca

SEQ ID NO: 5427 - DNA, 20 bp, Artificial Sequence
  chemically synthesized
ccaactccaattttctattc

SEQ ID NO: 5428 - DNA, 20 bp, Artificial Sequence
  chemically synthesized
ccaattttctattccagtct

SEQ ID NO: 5429 - DNA, 20 bp, Artificial Sequence
  chemically synthesized
cttagttccccgtacccatc

SEQ ID NO: 5430 - DNA, 20 bp, Artificial Sequence
  chemically synthesized
ttagttccccgtacccatca

SEQ ID NO: 5431 - DNA, 20 bp, Artificial Sequence
  chemically synthesized
tcaaggaaaatattctgccc

SEQ ID NO: 5432 - DNA, 20 bp, Artificial Sequence
  chemically synthesized
ttccgttctcatttccttcc

SEQ ID NO: 5433 - DNA, 20 bp, Artificial Sequence
  chemically synthesized
cttcttcttctcttacctcc

SEQ ID NO: 5434 - DNA, 20 bp, Artificial Sequence
  chemically synthesized
tggaatcctgctcatacttc

SEQ ID NO: 5435 - DNA, 20 bp, Artificial Sequence
  chemically synthesized
ggaatcctgctcatacttca

SEQ ID NO: 5436 - DNA, 20 bp, Artificial Sequence
  chemically synthesized
catacttcaaggcctcaatg

SEQ ID NO: 5437 - DNA, 20 bp, Artificial Sequence
  chemically synthesized
atacttcaaggcctcaatga

SEQ ID NO: 5438 - DNA, 20 bp, Artificial Sequence
  chemically synthesized
ggcctcaatgaaggtctacc

SEQ ID NO: 5439 - DNA, 20 bp, Artificial Sequence
  chemically synthesized
gaaggtctacctagtcacct

SEQ ID NO: 5440 - DNA, 20 bp, Artificial Sequence
  chemically synthesized
gtctacctagtcaccttagc

SEQ ID NO: 5441 - DNA, 20 bp, Artificial Sequence
  chemically synthesized
tacctagtcaccttagcaag

SEQ ID NO: 5442 - DNA, 20 bp, Artificial Sequence
  chemically synthesized
ctcatccttctccaacctca

SEQ ID NO: 5443 - DNA, 20 bp, Artificial Sequence
  chemically synthesized
accactccctgactcatatc

SEQ ID NO: 5444 - DNA, 20 bp, Artificial Sequence
  chemically synthesized
ccactccctgactcatatct

SEQ ID NO: 5445 - DNA, 20 bp, Artificial Sequence
  chemically synthesized
atatctaggccttacattgc

SEQ ID NO: 5446 - DNA, 20 bp, Artificial Sequence
  chemically synthesized
taatttcatgtgttcccaat

SEQ ID NO: 5447 - DNA, 20 bp, Artificial Sequence
  chemically synthesized
cccaatgagtttcttcaata

SEQ ID NO: 5448 - DNA, 20 bp, Artificial Sequence
  chemically synthesized
ccaatgagtttcttcaatac

SEQ ID NO: 5449 - DNA, 20 bp, Artificial Sequence
  chemically synthesized
caatgagtttcttcaataca

SEQ ID NO: 5450 - DNA, 20 bp, Artificial Sequence
  chemically synthesized
cttgcttctattatatttga

SEQ ID NO: 5451 - DNA, 20 bp, Artificial Sequence
  chemically synthesized
tctattatatttgaaagtac

SEQ ID NO: 5452 - DNA, 20 bp, Artificial Sequence
  chemically synthesized
tatatttgaaagtaccagca

SEQ ID NO: 5453 - DNA, 20 bp, Artificial Sequence
  chemically synthesized
gacatgatattcatatattc

SEQ ID NO: 5454 - DNA, 20 bp, Artificial Sequence
  chemically synthesized
acatgatattcatatattct

SEQ ID NO: 5455 - DNA, 20 bp, Artificial Sequence
  chemically synthesized
tattctaggaattcaacaaa

SEQ ID NO: 5456 - DNA, 20 bp, Artificial Sequence
  chemically synthesized
tgactgatttaccttcctaa

SEQ ID NO: 5457 - DNA, 20 bp, Artificial Sequence
  chemically synthesized
gactgatttaccttcctaaa

SEQ ID NO: 5458 - DNA, 20 bp, Artificial Sequence
  chemically synthesized
actgatttaccttcctaaaa

SEQ ID NO: 5459 - DNA, 20 bp, Artificial Sequence
  chemically synthesized
gatttaccttcctaaaaggg

SEQ ID NO: 5460 - DNA, 20 bp, Artificial Sequence
  chemically synthesized
aatatcatttctgttcaaaa

SEQ ID NO: 5461 - DNA, 20 bp, Artificial Sequence
  chemically synthesized
aatggtaattttaaccttct

SEQ ID NO: 5462 - DNA, 20 bp, Artificial Sequence
  chemically synthesized
ctgatatctacttgaacttt

SEQ ID NO: 5463 - DNA, 20 bp, Artificial Sequence
  chemically synthesized
actttcagataaaaaaaaaa

SEQ ID NO: 5464 - DNA, 20 bp, Artificial Sequence
  chemically synthesized
tcagataaaaaaaaaaaagc

SEQ ID NO: 5465 - DNA, 20 bp, Artificial Sequence
  chemically synthesized
aaaaaaaaaaaagcaagttg

SEQ ID NO: 5466 - DNA, 20 bp, Artificial Sequence
  chemically synthesized
gtaacatgttatgctacaca

SEQ ID NO: 5467 - DNA, 20 bp, Artificial Sequence
  chemically synthesized
atgttatgctacacaaagat

SEQ ID NO: 5468 - DNA, 20 bp, Artificial Sequence
  chemically synthesized
gaatatccaccctctttaaa

SEQ ID NO: 5469 - DNA, 20 bp, Artificial Sequence
  chemically synthesized
taaacagccaccccacaccc

SEQ ID NO: 5470 - DNA, 20 bp, Artificial Sequence
  chemically synthesized
aacagccaccccacaccctg

SEQ ID NO: 5471 - DNA, 20 bp, Artificial Sequence
  chemically synthesized
agccaccccacaccctggag

SEQ ID NO: 5472 - DNA, 20 bp, Artificial Sequence
  chemically synthesized
ccaccccacaccctggagaa

SEQ ID NO: 5473 - DNA, 20 bp, Artificial Sequence
  chemically synthesized
cctggagaagagcaaatgtg

SEQ ID NO: 5474 - DNA, 20 bp, Artificial Sequence
  chemically synthesized
tgtgaagtttatgtgccaac

SEQ ID NO: 5475 - DNA, 20 bp, Artificial Sequence
  chemically synthesized
gtgccaaccagactgtgcgc

SEQ ID NO: 5476 - DNA, 20 bp, Artificial Sequence
  chemically synthesized
tgccaaccagactgtgcgcc

SEQ ID NO: 5477 - DNA, 20 bp, Artificial Sequence
  chemically synthesized
aaccagactgtgcgccaggt

SEQ ID NO: 5478 - DNA, 20 bp, Artificial Sequence
  chemically synthesized
gactgtgcgccaggttggta

SEQ ID NO: 5479 - DNA, 20 bp, Artificial Sequence
  chemically synthesized
gccaggttggtaaagtctga

SEQ ID NO: 5480 - DNA, 20 bp, Artificial Sequence
  chemically synthesized
caggttggtaaagtctgaca

SEQ ID NO: 5481 - DNA, 20 bp, Artificial Sequence
  chemically synthesized
gacaacatcttctatatgtg

SEQ ID NO: 5482 - DNA, 20 bp, Artificial Sequence
  chemically synthesized
atatgtgaagcccaactacg

SEQ ID NO: 5483 - DNA, 20 bp, Artificial Sequence
  chemically synthesized
tacgtggttgtgcaactcta

SEQ ID NO: 5484 - DNA, 20 bp, Artificial Sequence
  chemically synthesized
ctatagctgactttcaacca

SEQ ID NO: 5485 - DNA, 20 bp, Artificial Sequence
  chemically synthesized
ttcaaccatggtcatctgca

SEQ ID NO: 5486 - DNA, 20 bp, Artificial Sequence
  chemically synthesized
aaccatggtcatctgcaaag

SEQ ID NO: 5487 - DNA, 20 bp, Artificial Sequence
  chemically synthesized
atggtcatctgcaaagaagt

SEQ ID NO: 5488 - DNA, 20 bp, Artificial Sequence
  chemically synthesized
atctgcaaagaagttagtct

SEQ ID NO: 5489 - DNA, 20 bp, Artificial Sequence
  chemically synthesized
ctgcgcatcctcaatgcaaa

SEQ ID NO: 5490 - DNA, 20 bp, Artificial Sequence
  chemically synthesized
catcctcaatgcaaaaagct

SEQ ID NO: 5491 - DNA, 20 bp, Artificial Sequence
  chemically synthesized
tcttaatgctgttttaaatg

SEQ ID NO: 5492 - DNA, 20 bp, Artificial Sequence
  chemically synthesized
ttaaatgcagcactactaaa

SEQ ID NO: 5493 - DNA, 20 bp, Artificial Sequence
  chemically synthesized
taaatgcagcactactaaaa

SEQ ID NO: 5494 - DNA, 20 bp, Artificial Sequence
  chemically synthesized
aaaggacctcattttgatgc

SEQ ID NO: 5495 - DNA, 20 bp, Artificial Sequence
  chemically synthesized
aggacctcattttgatgcca

SEQ ID NO: 5496 - DNA, 20 bp, Artificial Sequence
  chemically synthesized
ggacctcattttgatgccag

SEQ ID NO: 5497 - DNA, 20 bp, Artificial Sequence
  chemically synthesized
gacctcattttgatgccaga

SEQ ID NO: 5498 - DNA, 20 bp, Artificial Sequence
  chemically synthesized
ctcattttgatgccagaggg

SEQ ID NO: 5499 - DNA, 20 bp, Artificial Sequence
  chemically synthesized
atgccagagggcagcaaaca

SEQ ID NO: 5500 - DNA, 20 bp, Artificial Sequence
  chemically synthesized
gcagcaaacatggacacttt

SEQ ID NO: 5501 - DNA, 20 bp, Artificial Sequence
  chemically synthesized
tggacacttttggccccctt

SEQ ID NO: 5502 - DNA, 20 bp, Artificial Sequence
  chemically synthesized
tttggcccccttcagctatt

SEQ ID NO: 5503 - DNA, 20 bp, Artificial Sequence
  chemically synthesized
cccccttcagctattaagta

SEQ ID NO: 5504 - DNA, 20 bp, Artificial Sequence
  chemically synthesized
tcagctattaagtacagtaa

SEQ ID NO: 5505 - DNA, 20 bp, Artificial Sequence
  chemically synthesized
cagctattaagtacagtaaa

SEQ ID NO: 5506 - DNA, 20 bp, Artificial Sequence
  chemically synthesized
ctattaagtacagtaaaagg

SEQ ID NO: 5507 - DNA, 20 bp, Artificial Sequence
  chemically synthesized
actatcatttgaaatgctcc

SEQ ID NO: 5508 - DNA, 20 bp, Artificial Sequence
  chemically synthesized
tcatttgaaatgctcccggc

SEQ ID NO: 5509 - DNA, 20 bp, Artificial Sequence
  chemically synthesized
catttgaaatgctcccggcc

SEQ ID NO: 5510 - DNA, 20 bp, Artificial Sequence
  chemically synthesized
atgctcccggccaggcgctg

SEQ ID NO: 5511 - DNA, 20 bp, Artificial Sequence
  chemically synthesized
gtggctcacacctgtaatcc

SEQ ID NO: 5512 - DNA, 20 bp, Artificial Sequence
  chemically synthesized
cacctgtaatcccagcactt

SEQ ID NO: 5513 - DNA, 20 bp, Artificial Sequence
  chemically synthesized
acctgtaatcccagcacttt

SEQ ID NO: 5514 - DNA, 20 bp, Artificial Sequence
  chemically synthesized
ctgtaatcccagcactttgg

SEQ ID NO: 5515 - DNA, 20 bp, Artificial Sequence
  chemically synthesized
tgtaatcccagcactttggg

SEQ ID NO: 5516 - DNA, 20 bp, Artificial Sequence
  chemically synthesized
atcccagcactttgggaggc

SEQ ID NO: 5517 - DNA, 20 bp, Artificial Sequence
  chemically synthesized
tcccagcactttgggaggcc

SEQ ID NO: 5518 - DNA, 20 bp, Artificial Sequence
  chemically synthesized
cccagcactttgggaggccg

SEQ ID NO: 5519 - DNA, 20 bp, Artificial Sequence
  chemically synthesized
agcactttgggaggccgggg

SEQ ID NO: 5520 - DNA, 20 bp, Artificial Sequence
  chemically synthesized
gcactttgggaggccggggc

SEQ ID NO: 5521 - DNA, 20 bp, Artificial Sequence
  chemically synthesized
actttgggaggccggggcag

SEQ ID NO: 5522 - DNA, 20 bp, Artificial Sequence
  chemically synthesized
ctttgggaggccggggcagg

SEQ ID NO: 5523 - DNA, 20 bp, Artificial Sequence
  chemically synthesized
ccggggcaggaggatcacct

SEQ ID NO: 5524 - DNA, 20 bp, Artificial Sequence
  chemically synthesized
cggggcaggaggatcacctg

SEQ ID NO: 5525 - DNA, 20 bp, Artificial Sequence
  chemically synthesized
gcaggaggatcacctgaggt

SEQ ID NO: 5526 - DNA, 20 bp, Artificial Sequence
  chemically synthesized
caggaggatcacctgaggtc

SEQ ID NO: 5527 - DNA, 20 bp, Artificial Sequence
  chemically synthesized
ggaggatcacctgaggtcag

SEQ ID NO: 5528 - DNA, 20 bp, Artificial Sequence
  chemically synthesized
tcacctgaggtcaggagttc

SEQ ID NO: 5529 - DNA, 20 bp, Artificial Sequence
  chemically synthesized
tgaggtcaggagttcaagat

SEQ ID NO: 5530 - DNA, 20 bp, Artificial Sequence
  chemically synthesized
tcaggagttcaagatcagtt

SEQ ID NO: 5531 - DNA, 20 bp, Artificial Sequence
  chemically synthesized
caagatcagtttggacaaca

SEQ ID NO: 5532 - DNA, 20 bp, Artificial Sequence
  chemically synthesized
ctctactaaaaatacaaaat

SEQ ID NO: 5533 - DNA, 20 bp, Artificial Sequence
  chemically synthesized
actaaaaatacaaaattagc

SEQ ID NO: 5534 - DNA, 20 bp, Artificial Sequence
  chemically synthesized
ctaaaaatacaaaattagcc

SEQ ID NO: 5535 - DNA, 20 bp, Artificial Sequence
  chemically synthesized
aatacaaaattagccgggca

SEQ ID NO: 5536 - DNA, 20 bp, Artificial Sequence
  chemically synthesized
gtaatacatgcctgtaatct

SEQ ID NO: 5537 - DNA, 20 bp, Artificial Sequence
  chemically synthesized
tgcctgtaatctcagctact

SEQ ID NO: 5538 - DNA, 20 bp, Artificial Sequence
  chemically synthesized
gcctgtaatctcagctactc

SEQ ID NO: 5539 - DNA, 20 bp, Artificial Sequence
  chemically synthesized
ctgtaatctcagctactcgg

SEQ ID NO: 5540 - DNA, 20 bp, Artificial Sequence
  chemically synthesized
tgtaatctcagctactcggg

SEQ ID NO: 5541 - DNA, 20 bp, Artificial Sequence
  chemically synthesized
tctcagctactcgggaggct

SEQ ID NO: 5542 - DNA, 20 bp, Artificial Sequence
  chemically synthesized
ctcagctactcgggaggctg

SEQ ID NO: 5543 - DNA, 20 bp, Artificial Sequence
  chemically synthesized
agctactcgggaggctgagg

SEQ ID NO: 5544 - DNA, 20 bp, Artificial Sequence
  chemically synthesized
gctactcgggaggctgaggc

SEQ ID NO: 5545 - DNA, 20 bp, Artificial Sequence
  chemically synthesized
tactcgggaggctgaggcag

SEQ ID NO: 5546 - DNA, 20 bp, Artificial Sequence
  chemically synthesized
ggcaggagatcgcttgaacc

SEQ ID NO: 5547 - DNA, 20 bp, Artificial Sequence
  chemically synthesized
gcaggagatcgcttgaacct

SEQ ID NO: 5548 - DNA, 20 bp, Artificial Sequence
  chemically synthesized
aggagatcgcttgaacctgg

SEQ ID NO: 5549 - DNA, 20 bp, Artificial Sequence
  chemically synthesized
ggagatcgcttgaacctggg

SEQ ID NO: 5550 - DNA, 20 bp, Artificial Sequence
  chemically synthesized
gatcgcttgaacctgggagg

SEQ ID NO: 5551 - DNA, 20 bp, Artificial Sequence
  chemically synthesized
cgcttgaacctgggaggcag

SEQ ID NO: 5552 - DNA, 20 bp, Artificial Sequence
  chemically synthesized
aacctgggaggcagaagatg

SEQ ID NO: 5553 - DNA, 20 bp, Artificial Sequence
  chemically synthesized
tgggaggcagaagatgcagt

SEQ ID NO: 5554 - DNA, 20 bp, Artificial Sequence
  chemically synthesized
ggcagaagatgcagtgagcc

SEQ ID NO: 5555 - DNA, 20 bp, Artificial Sequence
  chemically synthesized
gagatcgcgccattgcattc

SEQ ID NO: 5556 - DNA, 20 bp, Artificial Sequence
  chemically synthesized
cgcgccattgcattccagcc

SEQ ID NO: 5557 - DNA, 20 bp, Artificial Sequence
  chemically synthesized
gcgccattgcattccagccc

SEQ ID NO: 5558 - DNA, 20 bp, Artificial Sequence
  chemically synthesized
tgcattccagcccgggcaac

SEQ ID NO: 5559 - DNA, 20 bp, Artificial Sequence
  chemically synthesized
cattccagcccgggcaacaa

SEQ ID NO: 5560 - DNA, 20 bp, Artificial Sequence
  chemically synthesized
aatctccgtctcaccaaaaa

SEQ ID NO: 5561 - DNA, 20 bp, Artificial Sequence
  chemically synthesized
gtctcaccaaaaaaagaaaa

SEQ ID NO: 5562 - DNA, 20 bp, Artificial Sequence
  chemically synthesized
gaaaaaagaaaaaaaaaaaa

SEQ ID NO: 5563 - DNA, 20 bp, Artificial Sequence
  chemically synthesized
aaagaaaaaaaaaaaaaaga

SEQ ID NO: 5564 - DNA, 20 bp, Artificial Sequence
  chemically synthesized
aaagaaagaaatgctcccct

SEQ ID NO: 5565 - DNA, 20 bp, Artificial Sequence
  chemically synthesized
aaatgctcccctcagttctc

SEQ ID NO: 5566 - DNA, 20 bp, Artificial Sequence
  chemically synthesized
aatgctcccctcagttctcc

SEQ ID NO: 5567 - DNA, 20 bp, Artificial Sequence
  chemically synthesized
ctcccctcagttctccaggc

SEQ ID NO: 5568 - DNA, 20 bp, Artificial Sequence
  chemically synthesized
tcccctcagttctccaggct

SEQ ID NO: 5569 - DNA, 20 bp, Artificial Sequence
  chemically synthesized
ctgcccacgtcaaaacaccc

SEQ ID NO: 5570 - DNA, 20 bp, Artificial Sequence
  chemically synthesized
tgcccacgtcaaaacaccct

SEQ ID NO: 5571 - DNA, 20 bp, Artificial Sequence
  chemically synthesized
aggcatcatcactccgtgtt

SEQ ID NO: 5572 - DNA, 20 bp, Artificial Sequence
  chemically synthesized
gcatcatcactccgtgttga

SEQ ID NO: 5573 - DNA, 20 bp, Artificial Sequence
  chemically synthesized
atcactccgtgttgagagcc

SEQ ID NO: 5574 - DNA, 20 bp, Artificial Sequence
  chemically synthesized
actccgtgttgagagccaag

SEQ ID NO: 5575 - DNA, 20 bp, Artificial Sequence
  chemically synthesized
cgtgttgagagccaagtggc

SEQ ID NO: 5576 - DNA, 20 bp, Artificial Sequence
  chemically synthesized
gtgttgagagccaagtggcc

SEQ ID NO: 5577 - DNA, 20 bp, Artificial Sequence
  chemically synthesized
ttgagagccaagtggccagg

SEQ ID NO: 5578 - DNA, 20 bp, Artificial Sequence
  chemically synthesized
tgagagccaagtggccaggt

SEQ ID NO: 5579 - DNA, 20 bp, Artificial Sequence
  chemically synthesized
aggtaggacccaacactacg

SEQ ID NO: 5580 - DNA, 20 bp, Artificial Sequence
  chemically synthesized
ggtaggacccaacactacgc

SEQ ID NO: 5581 - DNA, 20 bp, Artificial Sequence
  chemically synthesized
gacccaacactacgcaggca

SEQ ID NO: 5582 - DNA, 20 bp, Artificial Sequence
  chemically synthesized
gcacagacgttttccatgtt

SEQ ID NO: 5583 - DNA, 20 bp, Artificial Sequence
  chemically synthesized
gttaagaacccaaatccata

SEQ ID NO: 5584 - DNA, 20 bp, Artificial Sequence
  chemically synthesized
acccaaatccatacagtcct

SEQ ID NO: 5585 - DNA, 20 bp, Artificial Sequence
  chemically synthesized
tacagtccttagcacccaaa

SEQ ID NO: 5586 - DNA, 20 bp, Artificial Sequence
  chemically synthesized
acagtccttagcacccaaat

SEQ ID NO: 5587 - DNA, 20 bp, Artificial Sequence
  chemically synthesized
ccttagcacccaaataggtt

SEQ ID NO: 5588 - DNA, 20 bp, Artificial Sequence
  chemically synthesized
gcacccaaataggttcagaa

SEQ ID NO: 5589 - DNA, 20 bp, Artificial Sequence
  chemically synthesized
cacccaaataggttcagaaa

SEQ ID NO: 5590 - DNA, 20 bp, Artificial Sequence
  chemically synthesized
ccaaataggttcagaaaagg

SEQ ID NO: 5591 - DNA, 20 bp, Artificial Sequence
  chemically synthesized
acaaatctgccaaataaatg

SEQ ID NO: 5592 - DNA, 20 bp, Artificial Sequence
  chemically synthesized
tctgccaaataaatgaagtt

SEQ ID NO: 5593 - DNA, 20 bp, Artificial Sequence
  chemically synthesized
tgcatttacgctaaatacct

SEQ ID NO: 5594 - DNA, 20 bp, Artificial Sequence
  chemically synthesized
cgctaaataccttggaaatt

SEQ ID NO: 5595 - DNA, 20 bp, Artificial Sequence
  chemically synthesized
ctaaataccttggaaattga

SEQ ID NO: 5596 - DNA, 20 bp, Artificial Sequence
  chemically synthesized
taaataccttggaaattgag

SEQ ID NO: 5597 - DNA, 20 bp, Artificial Sequence
  chemically synthesized
aaataccttggaaattgaga

SEQ ID NO: 5598 - DNA, 20 bp, Artificial Sequence
  chemically synthesized
ttggaaattgagagggaatc

SEQ ID NO: 5599 - DNA, 20 bp, Artificial Sequence
  chemically synthesized
ggaaattgagagggaatctg

SEQ ID NO: 5600 - DNA, 20 bp, Artificial Sequence
  chemically synthesized
aaattgagagggaatctgga

SEQ ID NO: 5601 - DNA, 20 bp, Artificial Sequence
  chemically synthesized
aattgagagggaatctggag

SEQ ID NO: 5602 - DNA, 20 bp, Artificial Sequence
  chemically synthesized
tgagagggaatctggagagg

SEQ ID NO: 5603 - DNA, 20 bp, Artificial Sequence
  chemically synthesized
agggaatctggagaggaaga

SEQ ID NO: 5604 - DNA, 20 bp, Artificial Sequence
  chemically synthesized
tctggagaggaagatggatg

SEQ ID NO: 5605 - DNA, 20 bp, Artificial Sequence
  chemically synthesized
ctggagaggaagatggatgt

SEQ ID NO: 5606 - DNA, 20 bp, Artificial Sequence
  chemically synthesized
aaacaaaaaccctcacttta

SEQ ID NO: 5607 - DNA, 20 bp, Artificial Sequence
  chemically synthesized
aacaaaaaccctcactttac

SEQ ID NO: 5608 - DNA, 20 bp, Artificial Sequence
  chemically synthesized
accctcactttacaggaatt

SEQ ID NO: 5609 - DNA, 20 bp, Artificial Sequence
  chemically synthesized
cactttacaggaattcagca

SEQ ID NO: 5610 - DNA, 20 bp, Artificial Sequence
  chemically synthesized
actttacaggaattcagcac

SEQ ID NO: 5611 - DNA, 20 bp, Artificial Sequence
  chemically synthesized
tttacaggaattcagcacag

SEQ ID NO: 5612 - DNA, 20 bp, Artificial Sequence
  chemically synthesized
cacaggagatgctacattgt

SEQ ID NO: 5613 - DNA, 20 bp, Artificial Sequence
  chemically synthesized
cattgttagcatctccgctt

SEQ ID NO: 5614 - DNA, 20 bp, Artificial Sequence
  chemically synthesized
attgttagcatctccgctta

SEQ ID NO: 5615 - DNA, 20 bp, Artificial Sequence
  chemically synthesized
tgttagcatctccgcttaag

SEQ ID NO: 5616 - DNA, 20 bp, Artificial Sequence
  chemically synthesized
tagcatctccgcttaaggag

SEQ ID NO: 5617 - DNA, 20 bp, Artificial Sequence
  chemically synthesized
gagaagacatactgatgaat

SEQ ID NO: 5618 - DNA, 20 bp, Artificial Sequence
  chemically synthesized
acatactgatgaataagact

SEQ ID NO: 5619 - DNA, 20 bp, Artificial Sequence
  chemically synthesized
actgatgaataagactgagt

SEQ ID NO: 5620 - DNA, 20 bp, Artificial Sequence
  chemically synthesized
gaataagactgagttggtga

SEQ ID NO: 5621 - DNA, 20 bp, Artificial Sequence
  chemically synthesized
aataagactgagttggtgac

SEQ ID NO: 5622 - DNA, 20 bp, Artificial Sequence
  chemically synthesized
gactgagttggtgacaggca

SEQ ID NO: 5623 - DNA, 20 bp, Artificial Sequence
  chemically synthesized
tgagttggtgacaggcacag

SEQ ID NO: 5624 - DNA, 20 bp, Artificial Sequence
  chemically synthesized
gtggctctcgcctgtaatcc

SEQ ID NO: 5625 - DNA, 20 bp, Artificial Sequence
  chemically synthesized
cgcctgtaatcccagcactt

SEQ ID NO: 5626 - DNA, 20 bp, Artificial Sequence
  chemically synthesized
gcctgtaatcccagcacttt

SEQ ID NO: 5627 - DNA, 20 bp, Artificial Sequence
  chemically synthesized
ctgtaatcccagcactttgg

SEQ ID NO: 5628 - DNA, 20 bp, Artificial Sequence
  chemically synthesized
tgtaatcccagcactttggg

SEQ ID NO: 5629 - DNA, 20 bp, Artificial Sequence
  chemically synthesized
tcccagcactttgggaggtc

SEQ ID NO: 5630 - DNA, 20 bp, Artificial Sequence
  chemically synthesized
cccagcactttgggaggtca

SEQ ID NO: 5631 - DNA, 20 bp, Artificial Sequence
  chemically synthesized
agcactttgggaggtcaagg

SEQ ID NO: 5632 - DNA, 20 bp, Artificial Sequence
  chemically synthesized
gcactttgggaggtcaaggc

SEQ ID NO: 5633 - DNA, 20 bp, Artificial Sequence
  chemically synthesized
actttgggaggtcaaggcag

SEQ ID NO: 5634 - DNA, 20 bp, Artificial Sequence
  chemically synthesized
ctttgggaggtcaaggcagg

SEQ ID NO: 5635 - DNA, 20 bp, Artificial Sequence
  chemically synthesized
ggtcaaggcaggaggatcac

SEQ ID NO: 5636 - DNA, 20 bp, Artificial Sequence
  chemically synthesized
tcaaggcaggaggatcactg

SEQ ID NO: 5637 - DNA, 20 bp, Artificial Sequence
  chemically synthesized
gcaggaggatcactggagcc

SEQ ID NO: 5638 - DNA, 20 bp, Artificial Sequence
  chemically synthesized
caggaggatcactggagccc

SEQ ID NO: 5639 - DNA, 20 bp, Artificial Sequence
  chemically synthesized
ggaggatcactggagcccag

SEQ ID NO: 5640 - DNA, 20 bp, Artificial Sequence
  chemically synthesized
tcactggagcccaggagttc

SEQ ID NO: 5641 - DNA, 20 bp, Artificial Sequence
  chemically synthesized
ggagcccaggagttcaagac

SEQ ID NO: 5642 - DNA, 20 bp, Artificial Sequence
  chemically synthesized
ccaggagttcaagaccagcc

SEQ ID NO: 5643 - DNA, 20 bp, Artificial Sequence
  chemically synthesized
caggagttcaagaccagcct

SEQ ID NO: 5644 - DNA, 20 bp, Artificial Sequence
  chemically synthesized
ttcaagaccagcctgggcaa

SEQ ID NO: 5645 - DNA, 20 bp, Artificial Sequence
  chemically synthesized
tcaagaccagcctgggcaac

SEQ ID NO: 5646 - DNA, 20 bp, Artificial Sequence
  chemically synthesized
caagaccagcctgggcaaca

SEQ ID NO: 5647 - DNA, 20 bp, Artificial Sequence
  chemically synthesized
agaccagcctgggcaacagg

SEQ ID NO: 5648 - DNA, 20 bp, Artificial Sequence
  chemically synthesized
aaactccatctctacaaaat

SEQ ID NO: 5649 - DNA, 20 bp, Artificial Sequence
  chemically synthesized
tccatctctacaaaattagc

SEQ ID NO: 5650 - DNA, 20 bp, Artificial Sequence
  chemically synthesized
ccatctctacaaaattagcc

SEQ ID NO: 5651 - DNA, 20 bp, Artificial Sequence
  chemically synthesized
tctacaaaattagccaggca

SEQ ID NO: 5652 - DNA, 20 bp, Artificial Sequence
  chemically synthesized
acaaaattagccaggcatgg

SEQ ID NO: 5653 - DNA, 20 bp, Artificial Sequence
  chemically synthesized
gtggcatgcacctgtcgtcc

SEQ ID NO: 5654 - DNA, 20 bp, Artificial Sequence
  chemically synthesized
cacctgtcgtcccagctact

SEQ ID NO: 5655 - DNA, 20 bp, Artificial Sequence
  chemically synthesized
acctgtcgtcccagctactc

SEQ ID NO: 5656 - DNA, 20 bp, Artificial Sequence
  chemically synthesized
ctgtcgtcccagctactcag

SEQ ID NO: 5657 - DNA, 20 bp, Artificial Sequence
  chemically synthesized
tgtcgtcccagctactcagg

SEQ ID NO: 5658 - DNA, 20 bp, Artificial Sequence
  chemically synthesized
tcccagctactcaggaggct

SEQ ID NO: 5659 - DNA, 20 bp, Artificial Sequence
  chemically synthesized
cccagctactcaggaggctg

SEQ ID NO: 5660 - DNA, 20 bp, Artificial Sequence
  chemically synthesized
tactcaggaggctgaggtga

SEQ ID NO: 5661 - DNA, 20 bp, Artificial Sequence
  chemically synthesized
actcaggaggctgaggtgac

SEQ ID NO: 5662 - DNA, 20 bp, Artificial Sequence
  chemically synthesized
aggaggctgaggtgacagga

SEQ ID NO: 5663 - DNA, 20 bp, Artificial Sequence
  chemically synthesized
ctgaggtgacaggatggctt

SEQ ID NO: 5664 - DNA, 20 bp, Artificial Sequence
  chemically synthesized
gtgacaggatggcttgagcc

SEQ ID NO: 5665 - DNA, 20 bp, Artificial Sequence
  chemically synthesized
tgacaggatggcttgagcct

SEQ ID NO: 5666 - DNA, 20 bp, Artificial Sequence
  chemically synthesized
acaggatggcttgagcctag

SEQ ID NO: 5667 - DNA, 20 bp, Artificial Sequence
  chemically synthesized
tggcttgagcctaggagatc

SEQ ID NO: 5668 - DNA, 20 bp, Artificial Sequence
  chemically synthesized
ggcttgagcctaggagatca

SEQ ID NO: 5669 - DNA, 20 bp, Artificial Sequence
  chemically synthesized
agcctaggagatcaaggctg

SEQ ID NO: 5670 - DNA, 20 bp, Artificial Sequence
  chemically synthesized
taggagatcaaggctgcagt

SEQ ID NO: 5671 - DNA, 20 bp, Artificial Sequence
  chemically synthesized
atgaacatgccactacactc

SEQ ID NO: 5672 - DNA, 20 bp, Artificial Sequence
  chemically synthesized
catgccactacactctagcc

SEQ ID NO: 5673 - DNA, 20 bp, Artificial Sequence
  chemically synthesized
atgccactacactctagcct

SEQ ID NO: 5674 - DNA, 20 bp, Artificial Sequence
  chemically synthesized
acactctagcctaggcaaca

SEQ ID NO: 5675 - DNA, 20 bp, Artificial Sequence
  chemically synthesized
tctagcctaggcaacacagc

SEQ ID NO: 5676 - DNA, 20 bp, Artificial Sequence
  chemically synthesized
acaaacaaacaaacaaacaa

SEQ ID NO: 5677 - DNA, 20 bp, Artificial Sequence
  chemically synthesized
acaaacaaaagacaactaat

SEQ ID NO: 5678 - DNA, 20 bp, Artificial Sequence
  chemically synthesized
caaacaaaagacaactaatt

SEQ ID NO: 5679 - DNA, 20 bp, Artificial Sequence
  chemically synthesized
caactaattgggctaatgtt

SEQ ID NO: 5680 - DNA, 20 bp, Artificial Sequence
  chemically synthesized
gtttagaataaatgtatttc

SEQ ID NO: 5681 - DNA, 20 bp, Artificial Sequence
  chemically synthesized
tttagaataaatgtatttct

SEQ ID NO: 5682 - DNA, 20 bp, Artificial Sequence
  chemically synthesized
ttagaataaatgtatttcta

SEQ ID NO: 5683 - DNA, 20 bp, Artificial Sequence
  chemically synthesized
gaataaatgtatttctaggg

SEQ ID NO: 5684 - DNA, 20 bp, Artificial Sequence
  chemically synthesized
ttctagggaagaaaaaaact

SEQ ID NO: 5685 - DNA, 20 bp, Artificial Sequence
  chemically synthesized
agggaagaaaaaaacttagt

SEQ ID NO: 5686 - DNA, 20 bp, Artificial Sequence
  chemically synthesized
gggaagaaaaaaacttagtt

SEQ ID NO: 5687 - DNA, 20 bp, Artificial Sequence
  chemically synthesized
cctcccctttttactttttg

SEQ ID NO: 5688 - DNA, 20 bp, Artificial Sequence
  chemically synthesized
ttttactttttgaagcctgc

SEQ ID NO: 5689 - DNA, 20 bp, Artificial Sequence
  chemically synthesized
tttgaagcctgctggaattc

SEQ ID NO: 5690 - DNA, 20 bp, Artificial Sequence
  chemically synthesized
ttgaagcctgctggaattct

SEQ ID NO: 5691 - DNA, 20 bp, Artificial Sequence
  chemically synthesized
ctgctggaattctaggaaaa

SEQ ID NO: 5692 - DNA, 20 bp, Artificial Sequence
  chemically synthesized
ctccttcctcacatactcac

SEQ ID NO: 5693 - DNA, 20 bp, Artificial Sequence
  chemically synthesized
accagtactcatgcgcttct

SEQ ID NO: 5694 - DNA, 20 bp, Artificial Sequence
  chemically synthesized
agacccaaatgctctgctta

SEQ ID NO: 5695 - DNA, 20 bp, Artificial Sequence
  chemically synthesized
cccaaatgctctgcttatgg

SEQ ID NO: 5696 - DNA, 20 bp, Artificial Sequence
  chemically synthesized
tatggtggataaccccatct

SEQ ID NO: 5697 - DNA, 20 bp, Artificial Sequence
  chemically synthesized
ggtggataaccccatctcag

SEQ ID NO: 5698 - DNA, 20 bp, Artificial Sequence
  chemically synthesized
gtggataaccccatctcagt

SEQ ID NO: 5699 - DNA, 20 bp, Artificial Sequence
  chemically synthesized
taccaacttctataaaatct

SEQ ID NO: 5700 - DNA, 20 bp, Artificial Sequence
  chemically synthesized
ctataaaatctcagaataca

SEQ ID NO: 5701 - DNA, 20 bp, Artificial Sequence
  chemically synthesized
tataaaatctcagaatacaa

SEQ ID NO: 5702 - DNA, 20 bp, Artificial Sequence
  chemically synthesized
ataaaatctcagaatacaaa

SEQ ID NO: 5703 - DNA, 20 bp, Artificial Sequence
  chemically synthesized
catttccctgaaatgtactt

SEQ ID NO: 5704 - DNA, 20 bp, Artificial Sequence
  chemically synthesized
gtactttggtgctaccctga

SEQ ID NO: 5705 - DNA, 20 bp, Artificial Sequence
  chemically synthesized
tttggtgctaccctgaaaga

SEQ ID NO: 5706 - DNA, 20 bp, Artificial Sequence
  chemically synthesized
gtgctaccctgaaagacggc

SEQ ID NO: 5707 - DNA, 20 bp, Artificial Sequence
  chemically synthesized
gctaccctgaaagacggcta

SEQ ID NO: 5708 - DNA, 20 bp, Artificial Sequence
  chemically synthesized
tgaaagacggctagagtctt

SEQ ID NO: 5709 - DNA, 20 bp, Artificial Sequence
  chemically synthesized
gaaagacggctagagtcttg

SEQ ID NO: 5710 - DNA, 20 bp, Artificial Sequence
  chemically synthesized
aagacggctagagtcttgag

SEQ ID NO: 5711 - DNA, 20 bp, Artificial Sequence
  chemically synthesized
gagtcttgaggagacccaaa

SEQ ID NO: 5712 - DNA, 20 bp, Artificial Sequence
  chemically synthesized
tgaggagacccaaacagtta

SEQ ID NO: 5713 - DNA, 20 bp, Artificial Sequence
  chemically synthesized
gaggagacccaaacagttaa

SEQ ID NO: 5714 - DNA, 20 bp, Artificial Sequence
  chemically synthesized
acccaaacagttaaaggtta

SEQ ID NO: 5715 - DNA, 20 bp, Artificial Sequence
  chemically synthesized
aaacagttaaaggttacaga

SEQ ID NO: 5716 - DNA, 20 bp, Artificial Sequence
  chemically synthesized
ttaaaggttacagacagact

SEQ ID NO: 5717 - DNA, 20 bp, Artificial Sequence
  chemically synthesized
agacagacttggttccactc

SEQ ID NO: 5718 - DNA, 20 bp, Artificial Sequence
  chemically synthesized
cagacttggttccactccag

SEQ ID NO: 5719 - DNA, 20 bp, Artificial Sequence
  chemically synthesized
acttggttccactccagtgg

SEQ ID NO: 5720 - DNA, 20 bp, Artificial Sequence
  chemically synthesized
cttggttccactccagtggt

SEQ ID NO: 5721 - DNA, 20 bp, Artificial Sequence
  chemically synthesized
tgttttgttttgtttcgctt

SEQ ID NO: 5722 - DNA, 20 bp, Artificial Sequence
  chemically synthesized
tgtttcgctttagctttatt

SEQ ID NO: 5723 - DNA, 20 bp, Artificial Sequence
  chemically synthesized
gtttcgctttagctttatta

SEQ ID NO: 5724 - DNA, 20 bp, Artificial Sequence
  chemically synthesized
gtatactttacatacaacaa

SEQ ID NO: 5725 - DNA, 20 bp, Artificial Sequence
  chemically synthesized
caacaaaagtcattcatttt

SEQ ID NO: 5726 - DNA, 20 bp, Artificial Sequence
  chemically synthesized
agtcattcattttaagtgta

SEQ ID NO: 5727 - DNA, 20 bp, Artificial Sequence
  chemically synthesized
attcattttaagtgtacagt

SEQ ID NO: 5728 - DNA, 20 bp, Artificial Sequence
  chemically synthesized
tacagttggattcaatttgc

SEQ ID NO: 5729 - DNA, 20 bp, Artificial Sequence
  chemically synthesized
ttcaatttgccagttgtata

SEQ ID NO: 5730 - DNA, 20 bp, Artificial Sequence
  chemically synthesized
gccagttgtatacagctgtg

SEQ ID NO: 5731 - DNA, 20 bp, Artificial Sequence
  chemically synthesized
gtgtggcctccaccaaaatc

SEQ ID NO: 5732 - DNA, 20 bp, Artificial Sequence
  chemically synthesized
cctccaccaaaatcaagata

SEQ ID NO: 5733 - DNA, 20 bp, Artificial Sequence
  chemically synthesized
aagatacagaacacgtccac

SEQ ID NO: 5734 - DNA, 20 bp, Artificial Sequence
  chemically synthesized
acagaacacgtccaccagtc

SEQ ID NO: 5735 - DNA, 20 bp, Artificial Sequence
  chemically synthesized
aacacgtccaccagtctaga

SEQ ID NO: 5736 - DNA, 20 bp, Artificial Sequence
  chemically synthesized
tgaacccccacctaccacca

SEQ ID NO: 5737 - DNA, 20 bp, Artificial Sequence
  chemically synthesized
ccacctaccaccacagtgtt

SEQ ID NO: 5738 - DNA, 20 bp, Artificial Sequence
  chemically synthesized
caccacagtgttgagaattc

SEQ ID NO: 5739 - DNA, 20 bp, Artificial Sequence
  chemically synthesized
attctagaatttgttacaaa

SEQ ID NO: 5740 - DNA, 20 bp, Artificial Sequence
  chemically synthesized
ttgttacaaatggactcata

SEQ ID NO: 5741 - DNA, 20 bp, Artificial Sequence
  chemically synthesized
tgttacaaatggactcatac

SEQ ID NO: 5742 - DNA, 20 bp, Artificial Sequence
  chemically synthesized
tttgtgtttaatttcttcca

SEQ ID NO: 5743 - DNA, 20 bp, Artificial Sequence
  chemically synthesized
tgtgtttaatttcttccaca

SEQ ID NO: 5744 - DNA, 20 bp, Artificial Sequence
  chemically synthesized
gtttaatttcttccacagag

SEQ ID NO: 5745 - DNA, 20 bp, Artificial Sequence
  chemically synthesized
tccacagagcagaatgattc

SEQ ID NO: 5746 - DNA, 20 bp, Artificial Sequence
  chemically synthesized
ccacagagcagaatgattct

SEQ ID NO: 5747 - DNA, 20 bp, Artificial Sequence
  chemically synthesized
atgattctgggattcatcca

SEQ ID NO: 5748 - DNA, 20 bp, Artificial Sequence
  chemically synthesized
tctgggattcatccatggtg

SEQ ID NO: 5749 - DNA, 20 bp, Artificial Sequence
  chemically synthesized
tgggattcatccatggtgtg

SEQ ID NO: 5750 - DNA, 20 bp, Artificial Sequence
  chemically synthesized
tctttcattcttctactgtt

SEQ ID NO: 5751 - DNA, 20 bp, Artificial Sequence
  chemically synthesized
tgttgagttgtattccacca

SEQ ID NO: 5752 - DNA, 20 bp, Artificial Sequence
  chemically synthesized
gttgagttgtattccaccat

SEQ ID NO: 5753 - DNA, 20 bp, Artificial Sequence
  chemically synthesized
ttgagttgtattccaccata

SEQ ID NO: 5754 - DNA, 20 bp, Artificial Sequence
  chemically synthesized
cgtttatccattcaacctat

SEQ ID NO: 5755 - DNA, 20 bp, Artificial Sequence
  chemically synthesized
tcaacctattggttgccatg

SEQ ID NO: 5756 - DNA, 20 bp, Artificial Sequence
  chemically synthesized
caacctattggttgccatgt

SEQ ID NO: 5757 - DNA, 20 bp, Artificial Sequence
  chemically synthesized
cactttttgaccactatgaa

SEQ ID NO: 5758 - DNA, 20 bp, Artificial Sequence
  chemically synthesized
cactatgaacagtgctacaa

SEQ ID NO: 5759 - DNA, 20 bp, Artificial Sequence
  chemically synthesized
gtgctacaatggacactgtg

SEQ ID NO: 5760 - DNA, 20 bp, Artificial Sequence
  chemically synthesized
acactgtgtagatgtgttta

SEQ ID NO: 5761 - DNA, 20 bp, Artificial Sequence
  chemically synthesized
cactgtgtagatgtgtttat

SEQ ID NO: 5762 - DNA, 20 bp, Artificial Sequence
  chemically synthesized
atgtatgtctacatttctct

SEQ ID NO: 5763 - DNA, 20 bp, Artificial Sequence
  chemically synthesized
tgtatgtctacatttctctt

SEQ ID NO: 5764 - DNA, 20 bp, Artificial Sequence
  chemically synthesized
tttctcttaggtaaacatct

SEQ ID NO: 5765 - DNA, 20 bp, Artificial Sequence
  chemically synthesized
ttctcttaggtaaacatcta

SEQ ID NO: 5766 - DNA, 20 bp, Artificial Sequence
  chemically synthesized
gtaaacatctaaggcatttc

SEQ ID NO: 5767 - DNA, 20 bp, Artificial Sequence
  chemically synthesized
tctaaggcatttcgagaaca

SEQ ID NO: 5768 - DNA, 20 bp, Artificial Sequence
  chemically synthesized
ggcatttcgagaacacagaa

SEQ ID NO: 5769 - DNA, 20 bp, Artificial Sequence
  chemically synthesized
gcatttcgagaacacagaaa

SEQ ID NO: 5770 - DNA, 20 bp, Artificial Sequence
  chemically synthesized
gagaacacagaaaaggtttt

SEQ ID NO: 5771 - DNA, 20 bp, Artificial Sequence
  chemically synthesized
acagaaaaggttttgagttt

SEQ ID NO: 5772 - DNA, 20 bp, Artificial Sequence
  chemically synthesized
aaaggttttgagtttgagtc

SEQ ID NO: 5773 - DNA, 20 bp, Artificial Sequence
  chemically synthesized
aaggttttgagtttgagtcc

SEQ ID NO: 5774 - DNA, 20 bp, Artificial Sequence
  chemically synthesized
aggttttgagtttgagtcca

SEQ ID NO: 5775 - DNA, 20 bp, Artificial Sequence
  chemically synthesized
gttttgagtttgagtccagg

SEQ ID NO: 5776 - DNA, 20 bp, Artificial Sequence
  chemically synthesized
gccctcattttgtcatcctc

SEQ ID NO: 5777 - DNA, 20 bp, Artificial Sequence
  chemically synthesized
ccctcattttgtcatcctcc

SEQ ID NO: 5778 - DNA, 20 bp, Artificial Sequence
  chemically synthesized
ccccctcccaccccattccc

SEQ ID NO: 5779 - DNA, 20 bp, Artificial Sequence
  chemically synthesized
ccctcccaccccattccctg

SEQ ID NO: 5780 - DNA, 20 bp, Artificial Sequence
  chemically synthesized
ctcccaccccattccctgga

SEQ ID NO: 5781 - DNA, 20 bp, Artificial Sequence
  chemically synthesized
caactccaaaccctatatcc

SEQ ID NO: 5782 - DNA, 20 bp, Artificial Sequence
  chemically synthesized
ctatatcccagctatctgtt

SEQ ID NO: 5783 - DNA, 20 bp, Artificial Sequence
  chemically synthesized
tcccagctatctgtttggct

SEQ ID NO: 5784 - DNA, 20 bp, Artificial Sequence
  chemically synthesized
aaatgtcatcctattccgaa

SEQ ID NO: 5785 - DNA, 20 bp, Artificial Sequence
  chemically synthesized
agaaacctctccactacact

SEQ ID NO: 5786 - DNA, 20 bp, Artificial Sequence
  chemically synthesized
gaaacctctccactacacta

SEQ ID NO: 5787 - DNA, 20 bp, Artificial Sequence
  chemically synthesized
ccactacactaaggaaatga

SEQ ID NO: 5788 - DNA, 20 bp, Artificial Sequence
  chemically synthesized
cactacactaaggaaatgat

SEQ ID NO: 5789 - DNA, 20 bp, Artificial Sequence
  chemically synthesized
tacactaaggaaatgatggg

SEQ ID NO: 5790 - DNA, 20 bp, Artificial Sequence
  chemically synthesized
cactaaggaaatgatgggaa

SEQ ID NO: 5791 - DNA, 20 bp, Artificial Sequence
  chemically synthesized
accccaaaacattcttaaaa

SEQ ID NO: 5792 - DNA, 20 bp, Artificial Sequence
  chemically synthesized
ccccaaaacattcttaaaat

SEQ ID NO: 5793 - DNA, 20 bp, Artificial Sequence
  chemically synthesized
aaatgggcattcatttgaat

SEQ ID NO: 5794 - DNA, 20 bp, Artificial Sequence
  chemically synthesized
aatgggcattcatttgaatc

SEQ ID NO: 5795 - DNA, 20 bp, Artificial Sequence
  chemically synthesized
ttgaatcaggccaaataaat

SEQ ID NO: 5796 - DNA, 20 bp, Artificial Sequence
  chemically synthesized
aggccaaataaattggactc

SEQ ID NO: 5797 - DNA, 20 bp, Artificial Sequence
  chemically synthesized
ggccaaataaattggactct

SEQ ID NO: 5798 - DNA, 20 bp, Artificial Sequence
  chemically synthesized
aaataaattggactctgggt

SEQ ID NO: 5799 - DNA, 20 bp, Artificial Sequence
  chemically synthesized
ataaattggactctgggtca

SEQ ID NO: 5800 - DNA, 20 bp, Artificial Sequence
  chemically synthesized
ctctgggtcagagataactt

SEQ ID NO: 5801 - DNA, 20 bp, Artificial Sequence
  chemically synthesized
ggtcagagataacttaagtg

SEQ ID NO: 5802 - DNA, 20 bp, Artificial Sequence
  chemically synthesized
gataacttaagtgtggtgtt

SEQ ID NO: 5803 - DNA, 20 bp, Artificial Sequence
  chemically synthesized
taacttaagtgtggtgttcg

SEQ ID NO: 5804 - DNA, 20 bp, Artificial Sequence
  chemically synthesized
agtgtggtgttcggagtcct

SEQ ID NO: 5805 - DNA, 20 bp, Artificial Sequence
  chemically synthesized
tgtggtgttcggagtcctaa

SEQ ID NO: 5806 - DNA, 20 bp, Artificial Sequence
  chemically synthesized
ggagtcctaagagcccccac

SEQ ID NO: 5807 - DNA, 20 bp, Artificial Sequence
  chemically synthesized
cctaagagcccccactagct

SEQ ID NO: 5808 - DNA, 20 bp, Artificial Sequence
  chemically synthesized
agcccccactagctcagaaa

SEQ ID NO: 5809 - DNA, 20 bp, Artificial Sequence
  chemically synthesized
cactagctcagaaatggact

SEQ ID NO: 5810 - DNA, 20 bp, Artificial Sequence
  chemically synthesized
acttagttgacctcccccat

SEQ ID NO: 5811 - DNA, 20 bp, Artificial Sequence
  chemically synthesized
tagttgacctcccccattag

SEQ ID NO: 5812 - DNA, 20 bp, Artificial Sequence
  chemically synthesized
gacctcccccattagcagca

SEQ ID NO: 5813 - DNA, 20 bp, Artificial Sequence
  chemically synthesized
cctcccccattagcagcatg

SEQ ID NO: 5814 - DNA, 20 bp, Artificial Sequence
  chemically synthesized
tcccccattagcagcatgga

SEQ ID NO: 5815 - DNA, 20 bp, Artificial Sequence
  chemically synthesized
cattagcagcatggagagtc

SEQ ID NO: 5816 - DNA, 20 bp, Artificial Sequence
  chemically synthesized
attagcagcatggagagtca

SEQ ID NO: 5817 - DNA, 20 bp, Artificial Sequence
  chemically synthesized
tagcagcatggagagtcaag

SEQ ID NO: 5818 - DNA, 20 bp, Artificial Sequence
  chemically synthesized
agatgacttctaccttgcca

SEQ ID NO: 5819 - DNA, 20 bp, Artificial Sequence
  chemically synthesized
gatgacttctaccttgccaa

SEQ ID NO: 5820 - DNA, 20 bp, Artificial Sequence
  chemically synthesized
ttctaccttgccaaaggcct

SEQ ID NO: 5821 - DNA, 20 bp, Artificial Sequence
  chemically synthesized
tctaccttgccaaaggcctt

SEQ ID NO: 5822 - DNA, 20 bp, Artificial Sequence
  chemically synthesized
accttgccaaaggccttggg

SEQ ID NO: 5823 - DNA, 20 bp, Artificial Sequence
  chemically synthesized
tgccaaaggccttgggaaga

SEQ ID NO: 5824 - DNA, 20 bp, Artificial Sequence
  chemically synthesized
aaaggccttgggaagaaaga

SEQ ID NO: 5825 - DNA, 20 bp, Artificial Sequence
  chemically synthesized
ttgggaagaaagacagcatc

SEQ ID NO: 5826 - DNA, 20 bp, Artificial Sequence
  chemically synthesized
tgggaagaaagacagcatca

SEQ ID NO: 5827 - DNA, 20 bp, Artificial Sequence
  chemically synthesized
caaggtctcacacaacactc

SEQ ID NO: 5828 - DNA, 20 bp, Artificial Sequence
  chemically synthesized
aaggtctcacacaacactcc

SEQ ID NO: 5829 - DNA, 20 bp, Artificial Sequence
  chemically synthesized
aggtctcacacaacactcca

SEQ ID NO: 5830 - DNA, 20 bp, Artificial Sequence
  chemically synthesized
gtctcacacaacactccagg

SEQ ID NO: 5831 - DNA, 20 bp, Artificial Sequence
  chemically synthesized
tctcacacaacactccaggg

SEQ ID NO: 5832 - DNA, 20 bp, Artificial Sequence
  chemically synthesized
cacacaacactccagggagg

SEQ ID NO: 5833 - DNA, 20 bp, Artificial Sequence
  chemically synthesized
ccagggaggcagctgctgcc

SEQ ID NO: 5834 - DNA, 20 bp, Artificial Sequence
  chemically synthesized
gcagctgctgcccagtgctg

SEQ ID NO: 5835 - DNA, 20 bp, Artificial Sequence
  chemically synthesized
ctgctgcccagtgctgtgga

SEQ ID NO: 5836 - DNA, 20 bp, Artificial Sequence
  chemically synthesized
gcccagtgctgtggacagca

SEQ ID NO: 5837 - DNA, 20 bp, Artificial Sequence
  chemically synthesized
tgctgtggacagcaaagctt

SEQ ID NO: 5838 - DNA, 20 bp, Artificial Sequence
  chemically synthesized
tggacagcaaagcttcagtg

SEQ ID NO: 5839 - DNA, 20 bp, Artificial Sequence
  chemically synthesized
ggacagcaaagcttcagtgc

SEQ ID NO: 5840 - DNA, 20 bp, Artificial Sequence
  chemically synthesized
aagcttcagtgcaggaaatt

SEQ ID NO: 5841 - DNA, 20 bp, Artificial Sequence
  chemically synthesized
tccccctcccccatcctcat

SEQ ID NO: 5842 - DNA, 20 bp, Artificial Sequence
  chemically synthesized
ctcccccatcctcatcagct

SEQ ID NO: 5843 - DNA, 20 bp, Artificial Sequence
  chemically synthesized
catcctcatcagcttggcca

SEQ ID NO: 5844 - DNA, 20 bp, Artificial Sequence
  chemically synthesized
cctcatcagcttggccatgg

SEQ ID NO: 5845 - DNA, 20 bp, Artificial Sequence
  chemically synthesized
ctcatcagcttggccatggc

SEQ ID NO: 5846 - DNA, 20 bp, Artificial Sequence
  chemically synthesized
tcatcagcttggccatggca

SEQ ID NO: 5847 - DNA, 20 bp, Artificial Sequence
  chemically synthesized
cagcttggccatggcagggc

SEQ ID NO: 5848 - DNA, 20 bp, Artificial Sequence
  chemically synthesized
agcttggccatggcagggct

SEQ ID NO: 5849 - DNA, 20 bp, Artificial Sequence
  chemically synthesized
gcttggccatggcagggctg

SEQ ID NO: 5850 - DNA, 20 bp, Artificial Sequence
  chemically synthesized
cttggccatggcagggctgg

SEQ ID NO: 5851 - DNA, 20 bp, Artificial Sequence
  chemically synthesized
ccatggcagggctgggggat

SEQ ID NO: 5852 - DNA, 20 bp, Artificial Sequence
  chemically synthesized
atggcagggctgggggatca

SEQ ID NO: 5853 - DNA, 20 bp, Artificial Sequence
  chemically synthesized
tggcagggctgggggatcag

SEQ ID NO: 5854 - DNA, 20 bp, Artificial Sequence
  chemically synthesized
gctgggggatcagaggtgaa

SEQ ID NO: 5855 - DNA, 20 bp, Artificial Sequence
  chemically synthesized
ctgggggatcagaggtgaac

SEQ ID NO: 5856 - DNA, 20 bp, Artificial Sequence
  chemically synthesized
ggggatcagaggtgaacagg

SEQ ID NO: 5857 - DNA, 20 bp, Artificial Sequence
  chemically synthesized
gatcagaggtgaacaggaag

SEQ ID NO: 5858 - DNA, 20 bp, Artificial Sequence
  chemically synthesized
cagaggtgaacaggaagcag

SEQ ID NO: 5859 - DNA, 20 bp, Artificial Sequence
  chemically synthesized
agaggtgaacaggaagcaga

SEQ ID NO: 5860 - DNA, 20 bp, Artificial Sequence
  chemically synthesized
acaggaagcagaaggacccc

SEQ ID NO: 5861 - DNA, 20 bp, Artificial Sequence
  chemically synthesized
caggaagcagaaggacccct

SEQ ID NO: 5862 - DNA, 20 bp, Artificial Sequence
  chemically synthesized
aggaagcagaaggacccctg

SEQ ID NO: 5863 - DNA, 20 bp, Artificial Sequence
  chemically synthesized
ggaagcagaaggacccctgg

SEQ ID NO: 5864 - DNA, 20 bp, Artificial Sequence
  chemically synthesized
aagcagaaggacccctgggg

SEQ ID NO: 5865 - DNA, 20 bp, Artificial Sequence
  chemically synthesized
agaaggacccctgggggaga

SEQ ID NO: 5866 - DNA, 20 bp, Artificial Sequence
  chemically synthesized
gaaggacccctgggggagac

SEQ ID NO: 5867 - DNA, 20 bp, Artificial Sequence
  chemically synthesized
aaggacccctgggggagaca

SEQ ID NO: 5868 - DNA, 20 bp, Artificial Sequence
  chemically synthesized
cctgggggagacagggcctc

SEQ ID NO: 5869 - DNA, 20 bp, Artificial Sequence
  chemically synthesized
gggggagacagggcctccag

SEQ ID NO: 5870 - DNA, 20 bp, Artificial Sequence
  chemically synthesized
ggggagacagggcctccagt

SEQ ID NO: 5871 - DNA, 20 bp, Artificial Sequence
  chemically synthesized
gacagggcctccagtgggac

SEQ ID NO: 5872 - DNA, 20 bp, Artificial Sequence
  chemically synthesized
cagggcctccagtgggacca

SEQ ID NO: 5873 - DNA, 20 bp, Artificial Sequence
  chemically synthesized
cctccagtgggaccagagct

SEQ ID NO: 5874 - DNA, 20 bp, Artificial Sequence
  chemically synthesized
ccagtgggaccagagctgag

SEQ ID NO: 5875 - DNA, 20 bp, Artificial Sequence
  chemically synthesized
ggaccagagctgagtggcct

SEQ ID NO: 5876 - DNA, 20 bp, Artificial Sequence
  chemically synthesized
gaccagagctgagtggcctc

SEQ ID NO: 5877 - DNA, 20 bp, Artificial Sequence
  chemically synthesized
cagagctgagtggcctcagg

SEQ ID NO: 5878 - DNA, 20 bp, Artificial Sequence
  chemically synthesized
agctgagtggcctcaggcag

SEQ ID NO: 5879 - DNA, 20 bp, Artificial Sequence
  chemically synthesized
tgagtggcctcaggcagtgg

SEQ ID NO: 5880 - DNA, 20 bp, Artificial Sequence
  chemically synthesized
gtggcctcaggcagtggcgg

SEQ ID NO: 5881 - DNA, 20 bp, Artificial Sequence
  chemically synthesized
gcagtggcggaagctgatta

SEQ ID NO: 5882 - DNA, 20 bp, Artificial Sequence
  chemically synthesized
cagtggcggaagctgattaa

SEQ ID NO: 5883 - DNA, 20 bp, Artificial Sequence
  chemically synthesized
tggcggaagctgattaaagg

SEQ ID NO: 5884 - DNA, 20 bp, Artificial Sequence
  chemically synthesized
ggcggaagctgattaaagga

SEQ ID NO: 5885 - DNA, 20 bp, Artificial Sequence
  chemically synthesized
aagctgattaaaggaaggta

SEQ ID NO: 5886 - DNA, 20 bp, Artificial Sequence
  chemically synthesized
agctgattaaaggaaggtac

SEQ ID NO: 5887 - DNA, 20 bp, Artificial Sequence
  chemically synthesized
gctgattaaaggaaggtacg

SEQ ID NO: 5888 - DNA, 20 bp, Artificial Sequence
  chemically synthesized
tgattaaaggaaggtacggg

SEQ ID NO: 5889 - DNA, 20 bp, Artificial Sequence
  chemically synthesized
ttaaaggaaggtacggggag

SEQ ID NO: 5890 - DNA, 20 bp, Artificial Sequence
  chemically synthesized
aaaggaaggtacggggagtg

SEQ ID NO: 5891 - DNA, 20 bp, Artificial Sequence
  chemically synthesized
aaggaaggtacggggagtgg

SEQ ID NO: 5892 - DNA, 20 bp, Artificial Sequence
  chemically synthesized
aggaaggtacggggagtgga

SEQ ID NO: 5893 - DNA, 20 bp, Artificial Sequence
  chemically synthesized
ggaaggtacggggagtggag

SEQ ID NO: 5894 - DNA, 20 bp, Artificial Sequence
  chemically synthesized
aggtacggggagtggagggg

SEQ ID NO: 5895 - DNA, 20 bp, Artificial Sequence
  chemically synthesized
tacggggagtggaggggaag

SEQ ID NO: 5896 - DNA, 20 bp, Artificial Sequence
  chemically synthesized
agtggaggggaagtggacaa

SEQ ID NO: 5897 - DNA, 20 bp, Artificial Sequence
  chemically synthesized
gaggggaagtggacaaaaga

SEQ ID NO: 5898 - DNA, 20 bp, Artificial Sequence
  chemically synthesized
aggggaagtggacaaaagac

SEQ ID NO: 5899 - DNA, 20 bp, Artificial Sequence
  chemically synthesized
gaagtggacaaaagacagga

SEQ ID NO: 5900 - DNA, 20 bp, Artificial Sequence
  chemically synthesized
aaaagacaggacagccatct

SEQ ID NO: 5901 - DNA, 20 bp, Artificial Sequence
  chemically synthesized
gccatcttagacaacaatgc

SEQ ID NO: 5902 - DNA, 20 bp, Artificial Sequence
  chemically synthesized
ccatcttagacaacaatgca

SEQ ID NO: 5903 - DNA, 20 bp, Artificial Sequence
  chemically synthesized
catcttagacaacaatgcaa

SEQ ID NO: 5904 - DNA, 20 bp, Artificial Sequence
  chemically synthesized
atcttagacaacaatgcaag

SEQ ID NO: 5905 - DNA, 20 bp, Artificial Sequence
  chemically synthesized
tcttagacaacaatgcaagg

SEQ ID NO: 5906 - DNA, 20 bp, Artificial Sequence
  chemically synthesized
ttagacaacaatgcaagggg

SEQ ID NO: 5907 - DNA, 20 bp, Artificial Sequence
  chemically synthesized
aatgcaagggggagaaactg

SEQ ID NO: 5908 - DNA, 20 bp, Artificial Sequence
  chemically synthesized
gggggagaaactgaagaaaa

SEQ ID NO: 5909 - DNA, 20 bp, Artificial Sequence
  chemically synthesized
agaaactgaagaaaacagaa

SEQ ID NO: 5910 - DNA, 20 bp, Artificial Sequence
  chemically synthesized
aaactgaagaaaacagaaca

SEQ ID NO: 5911 - DNA, 20 bp, Artificial Sequence
  chemically synthesized
aacagaacagagaccactac

SEQ ID NO: 5912 - DNA, 20 bp, Artificial Sequence
  chemically synthesized
agaccactactggcaataaa

SEQ ID NO: 5913 - DNA, 20 bp, Artificial Sequence
  chemically synthesized
accactactggcaataaaca

SEQ ID NO: 5914 - DNA, 20 bp, Artificial Sequence
  chemically synthesized
cactactggcaataaacaga

SEQ ID NO: 5915 - DNA, 20 bp, Artificial Sequence
  chemically synthesized
actggcaataaacagagaga

SEQ ID NO: 5916 - DNA, 20 bp, Artificial Sequence
  chemically synthesized
caataaacagagagaaagtg

SEQ ID NO: 5917 - DNA, 20 bp, Artificial Sequence
  chemically synthesized
agagagaaagtgaagcccca

SEQ ID NO: 5918 - DNA, 20 bp, Artificial Sequence
  chemically synthesized
gagagaaagtgaagccccat

SEQ ID NO: 5919 - DNA, 20 bp, Artificial Sequence
  chemically synthesized
gaaagtgaagccccatgggt

SEQ ID NO: 5920 - DNA, 20 bp, Artificial Sequence
  chemically synthesized
aaagtgaagccccatgggtg

SEQ ID NO: 5921 - DNA, 20 bp, Artificial Sequence
  chemically synthesized
gaggcacacctacattactt

SEQ ID NO: 5922 - DNA, 20 bp, Artificial Sequence
  chemically synthesized
ctacattacttaagaaacct

SEQ ID NO: 5923 - DNA, 20 bp, Artificial Sequence
  chemically synthesized
cctgagcacattcttacgcc

SEQ ID NO: 5924 - DNA, 20 bp, Artificial Sequence
  chemically synthesized
ctgagcacattcttacgcct

SEQ ID NO: 5925 - DNA, 20 bp, Artificial Sequence
  chemically synthesized
tgagcacattcttacgccta

SEQ ID NO: 5926 - DNA, 20 bp, Artificial Sequence
  chemically synthesized
agggcaataaatacatcctt

SEQ ID NO: 5927 - DNA, 20 bp, Artificial Sequence
  chemically synthesized
aaatacatccttgagctaca

SEQ ID NO: 5928 - DNA, 20 bp, Artificial Sequence
  chemically synthesized
aatacatccttgagctacac

SEQ ID NO: 5929 - DNA, 20 bp, Artificial Sequence
  chemically synthesized
atccttgagctacacaggct

SEQ ID NO: 5930 - DNA, 20 bp, Artificial Sequence
  chemically synthesized
ttgagctacacaggctaagc

SEQ ID NO: 5931 - DNA, 20 bp, Artificial Sequence
  chemically synthesized
gagctacacaggctaagcaa

SEQ ID NO: 5932 - DNA, 20 bp, Artificial Sequence
  chemically synthesized
tacacaggctaagcaagagt

SEQ ID NO: 5933 - DNA, 20 bp, Artificial Sequence
  chemically synthesized
cacaggctaagcaagagtga

SEQ ID NO: 5934 - DNA, 20 bp, Artificial Sequence
  chemically synthesized
caggctaagcaagagtgaga

SEQ ID NO: 5935 - DNA, 20 bp, Artificial Sequence
  chemically synthesized
aggctaagcaagagtgagag

SEQ ID NO: 5936 - DNA, 20 bp, Artificial Sequence
  chemically synthesized
ggctaagcaagagtgagaga

SEQ ID NO: 5937 - DNA, 20 bp, Artificial Sequence
  chemically synthesized
gtgagagagggtgatgctga

SEQ ID NO: 5938 - DNA, 20 bp, Artificial Sequence
  chemically synthesized
tgagagagggtgatgctgac

SEQ ID NO: 5939 - DNA, 20 bp, Artificial Sequence
  chemically synthesized
ggtgatgctgacaggccaca

SEQ ID NO: 5940 - DNA, 20 bp, Artificial Sequence
  chemically synthesized
gtgatgctgacaggccacat

SEQ ID NO: 5941 - DNA, 20 bp, Artificial Sequence
  chemically synthesized
gatgctgacaggccacatgg

SEQ ID NO: 5942 - DNA, 20 bp, Artificial Sequence
  chemically synthesized
tgctgacaggccacatggga

SEQ ID NO: 5943 - DNA, 20 bp, Artificial Sequence
  chemically synthesized
tgacaggccacatgggagag

SEQ ID NO: 5944 - DNA, 20 bp, Artificial Sequence
  chemically synthesized
gacaggccacatgggagagt

SEQ ID NO: 5945 - DNA, 20 bp, Artificial Sequence
  chemically synthesized
aggccacatgggagagtggg

SEQ ID NO: 5946 - DNA, 20 bp, Artificial Sequence
  chemically synthesized
catgggagagtgggaagacg

SEQ ID NO: 5947 - DNA, 20 bp, Artificial Sequence
  chemically synthesized
atgggagagtgggaagacgt

SEQ ID NO: 5948 - DNA, 20 bp, Artificial Sequence
  chemically synthesized
gagagtgggaagacgtgggc

SEQ ID NO: 5949 - DNA, 20 bp, Artificial Sequence
  chemically synthesized
agagtgggaagacgtgggct

SEQ ID NO: 5950 - DNA, 20 bp, Artificial Sequence
  chemically synthesized
agtgggaagacgtgggctgg

SEQ ID NO: 5951 - DNA, 20 bp, Artificial Sequence
  chemically synthesized
ggaagacgtgggctgggagc

SEQ ID NO: 5952 - DNA, 20 bp, Artificial Sequence
  chemically synthesized
gaagacgtgggctgggagct

SEQ ID NO: 5953 - DNA, 20 bp, Artificial Sequence
  chemically synthesized
agacgtgggctgggagctgg

SEQ ID NO: 5954 - DNA, 20 bp, Artificial Sequence
  chemically synthesized
tgggctgggagctgggagtt

SEQ ID NO: 5955 - DNA, 20 bp, Artificial Sequence
  chemically synthesized
tttggcttctcatctgtgca

SEQ ID NO: 5956 - DNA, 20 bp, Artificial Sequence
  chemically synthesized
tctgtgcatggcctctaaac

SEQ ID NO: 5957 - DNA, 20 bp, Artificial Sequence
  chemically synthesized
ctgtgcatggcctctaaact

SEQ ID NO: 5958 - DNA, 20 bp, Artificial Sequence
  chemically synthesized
tgcatggcctctaaactggg

SEQ ID NO: 5959 - DNA, 20 bp, Artificial Sequence
  chemically synthesized
tctaaactgggcagtgacca

SEQ ID NO: 5960 - DNA, 20 bp, Artificial Sequence
  chemically synthesized
actgggcagtgaccatggcc

SEQ ID NO: 5961 - DNA, 20 bp, Artificial Sequence
  chemically synthesized
gcctggtcacctccccactc

SEQ ID NO: 5962 - DNA, 20 bp, Artificial Sequence
  chemically synthesized
tcacctccccactctggacc

SEQ ID NO: 5963 - DNA, 20 bp, Artificial Sequence
  chemically synthesized
cacctccccactctggacct

SEQ ID NO: 5964 - DNA, 20 bp, Artificial Sequence
  chemically synthesized
tgggttgcccctctgtaaac

SEQ ID NO: 5965 - DNA, 20 bp, Artificial Sequence
  chemically synthesized
gggttgcccctctgtaaaca

SEQ ID NO: 5966 - DNA, 20 bp, Artificial Sequence
  chemically synthesized
gttgcccctctgtaaacaag

SEQ ID NO: 5967 - DNA, 20 bp, Artificial Sequence
  chemically synthesized
ttgcccctctgtaaacaagg

SEQ ID NO: 5968 - DNA, 20 bp, Artificial Sequence
  chemically synthesized
aatcttatgcaatttttgcc

SEQ ID NO: 5969 - DNA, 20 bp, Artificial Sequence
  chemically synthesized
ttatgcaatttttgccaaga

SEQ ID NO: 5970 - DNA, 20 bp, Artificial Sequence
  chemically synthesized
tatgcaatttttgccaagat

SEQ ID NO: 5971 - DNA, 20 bp, Artificial Sequence
  chemically synthesized
tgcaatttttgccaagatgg

SEQ ID NO: 5972 - DNA, 20 bp, Artificial Sequence
  chemically synthesized
tttttgccaagatgggagta

SEQ ID NO: 5973 - DNA, 20 bp, Artificial Sequence
  chemically synthesized
ttttgccaagatgggagtat

SEQ ID NO: 5974 - DNA, 20 bp, Artificial Sequence
  chemically synthesized
tttgccaagatgggagtatg

SEQ ID NO: 5975 - DNA, 20 bp, Artificial Sequence
  chemically synthesized
tgccaagatgggagtatggg

SEQ ID NO: 5976 - DNA, 20 bp, Artificial Sequence
  chemically synthesized
ccaagatgggagtatgggga

SEQ ID NO: 5977 - DNA, 20 bp, Artificial Sequence
  chemically synthesized
agatgggagtatggggagag

SEQ ID NO: 5978 - DNA, 20 bp, Artificial Sequence
  chemically synthesized
atgggagtatggggagagaa

SEQ ID NO: 5979 - DNA, 20 bp, Artificial Sequence
  chemically synthesized
ggagtatggggagagaagag

SEQ ID NO: 5980 - DNA, 20 bp, Artificial Sequence
  chemically synthesized
tggggagagaagagtggaaa

SEQ ID NO: 5981 - DNA, 20 bp, Artificial Sequence
  chemically synthesized
agagaagagtggaaacggcc

SEQ ID NO: 5982 - DNA, 20 bp, Artificial Sequence
  chemically synthesized
agaagagtggaaacggccca

SEQ ID NO: 5983 - DNA, 20 bp, Artificial Sequence
  chemically synthesized
agtggaaacggcccagagct

SEQ ID NO: 5984 - DNA, 20 bp, Artificial Sequence
  chemically synthesized
gaaacggcccagagctcagt

SEQ ID NO: 5985 - DNA, 20 bp, Artificial Sequence
  chemically synthesized
ggcccagagctcagtgagat

SEQ ID NO: 5986 - DNA, 20 bp, Artificial Sequence
  chemically synthesized
ctcagtgagatgagatatca

SEQ ID NO: 5987 - DNA, 20 bp, Artificial Sequence
  chemically synthesized
tcagtgagatgagatatcaa

SEQ ID NO: 5988 - DNA, 20 bp, Artificial Sequence
  chemically synthesized
cagtgagatgagatatcaaa

SEQ ID NO: 5989 - DNA, 20 bp, Artificial Sequence
  chemically synthesized
agtgagatgagatatcaaag

SEQ ID NO: 5990 - DNA, 20 bp, Artificial Sequence
  chemically synthesized
gagatatcaaaggggacgaa

SEQ ID NO: 5991 - DNA, 20 bp, Artificial Sequence
  chemically synthesized
ccatctccctaatctccaat

SEQ ID NO: 5992 - DNA, 20 bp, Artificial Sequence
  chemically synthesized
tccctaatctccaattggca

SEQ ID NO: 5993 - DNA, 20 bp, Artificial Sequence
  chemically synthesized
taatctccaattggcaaagc

SEQ ID NO: 5994 - DNA, 20 bp, Artificial Sequence
  chemically synthesized
ccaattggcaaagccagact

SEQ ID NO: 5995 - DNA, 20 bp, Artificial Sequence
  chemically synthesized
caattggcaaagccagactt

SEQ ID NO: 5996 - DNA, 20 bp, Artificial Sequence
  chemically synthesized
aattggcaaagccagacttg

SEQ ID NO: 5997 - DNA, 20 bp, Artificial Sequence
  chemically synthesized
aagccagacttggggcaata

SEQ ID NO: 5998 - DNA, 20 bp, Artificial Sequence
  chemically synthesized
agacttggggcaatacagac

SEQ ID NO: 5999 - DNA, 20 bp, Artificial Sequence
  chemically synthesized
ctgtgatgacaaataactcc

SEQ ID NO: 6000 - DNA, 20 bp, Artificial Sequence
  chemically synthesized
atcaccaaatgttctttctt

SEQ ID NO: 6001 - DNA, 20 bp, Artificial Sequence
  chemically synthesized
ccaaatgttctttcttcagc

SEQ ID NO: 6002 - DNA, 20 bp, Artificial Sequence
  chemically synthesized
ttcagctggaatttaaaata

SEQ ID NO: 6003 - DNA, 20 bp, Artificial Sequence
  chemically synthesized
atatggactcatccgtaaaa

SEQ ID NO: 6004 - DNA, 20 bp, Artificial Sequence
  chemically synthesized
tatggactcatccgtaaaat

SEQ ID NO: 6005 - DNA, 20 bp, Artificial Sequence
  chemically synthesized
ccgtaaaataggaataataa

SEQ ID NO: 6006 - DNA, 20 bp, Artificial Sequence
  chemically synthesized
taataatagtatatgcttca

SEQ ID NO: 6007 - DNA, 20 bp, Artificial Sequence
  chemically synthesized
aataatagtatatgcttcat

SEQ ID NO: 6008 - DNA, 20 bp, Artificial Sequence
  chemically synthesized
ataatagtatatgcttcata

SEQ ID NO: 6009 - DNA, 20 bp, Artificial Sequence
  chemically synthesized
ggtttgtatgaaaataaaat

SEQ ID NO: 6010 - DNA, 20 bp, Artificial Sequence
  chemically synthesized
aaaatgagtgcgtatttgta

SEQ ID NO: 6011 - DNA, 20 bp, Artificial Sequence
  chemically synthesized
gtgcgtatttgtaaagttcc

SEQ ID NO: 6012 - DNA, 20 bp, Artificial Sequence
  chemically synthesized
gcgtatttgtaaagttccta

SEQ ID NO: 6013 - DNA, 20 bp, Artificial Sequence
  chemically synthesized
tatttgtaaagttcctagag

SEQ ID NO: 6014 - DNA, 20 bp, Artificial Sequence
  chemically synthesized
tttgtaaagttcctagagca

SEQ ID NO: 6015 - DNA, 20 bp, Artificial Sequence
  chemically synthesized
taaagttcctagagcagagt

SEQ ID NO: 6016 - DNA, 20 bp, Artificial Sequence
  chemically synthesized
tagagcagagtaagtgctcc

SEQ ID NO: 6017 - DNA, 20 bp, Artificial Sequence
  chemically synthesized
tgaactaaaatgctgcctcc

SEQ ID NO: 6018 - DNA, 20 bp, Artificial Sequence
  chemically synthesized
tgctgcctcctggtatttat

SEQ ID NO: 6019 - DNA, 20 bp, Artificial Sequence
  chemically synthesized
ggtatttattagttacacct

SEQ ID NO: 6020 - DNA, 20 bp, Artificial Sequence
  chemically synthesized
atttattagttacacctcag

SEQ ID NO: 6021 - DNA, 20 bp, Artificial Sequence
  chemically synthesized
gttacacctcagcagaaaca

SEQ ID NO: 6022 - DNA, 20 bp, Artificial Sequence
  chemically synthesized
ctcagcagaaacaaagttat

SEQ ID NO: 6023 - DNA, 20 bp, Artificial Sequence
  chemically synthesized
tcagcagaaacaaagttatc

SEQ ID NO: 6024 - DNA, 20 bp, Artificial Sequence
  chemically synthesized
caggccctttccccaattcc

SEQ ID NO: 6025 - DNA, 20 bp, Artificial Sequence
  chemically synthesized
cctttccccaattcctagtt

SEQ ID NO: 6026 - DNA, 20 bp, Artificial Sequence
  chemically synthesized
ctttccccaattcctagttt

SEQ ID NO: 6027 - DNA, 20 bp, Artificial Sequence
  chemically synthesized
ccccaattcctagtttgggt

SEQ ID NO: 6028 - DNA, 20 bp, Artificial Sequence
  chemically synthesized
caattcctagtttgggtcag

SEQ ID NO: 6029 - DNA, 20 bp, Artificial Sequence
  chemically synthesized
cctagtttgggtcagaagaa

SEQ ID NO: 6030 - DNA, 20 bp, Artificial Sequence
  chemically synthesized
ctagtttgggtcagaagaaa

SEQ ID NO: 6031 - DNA, 20 bp, Artificial Sequence
  chemically synthesized
tagtttgggtcagaagaaaa

SEQ ID NO: 6032 - DNA, 20 bp, Artificial Sequence
  chemically synthesized
tgggtcagaagaaaagggaa

SEQ ID NO: 6033 - DNA, 20 bp, Artificial Sequence
  chemically synthesized
gggtcagaagaaaagggaaa

SEQ ID NO: 6034 - DNA, 20 bp, Artificial Sequence
  chemically synthesized
ggtcagaagaaaagggaaaa

SEQ ID NO: 6035 - DNA, 20 bp, Artificial Sequence
  chemically synthesized
tcagaagaaaagggaaaagg

SEQ ID NO: 6036 - DNA, 20 bp, Artificial Sequence
  chemically synthesized
agaagaaaagggaaaaggga

SEQ ID NO: 6037 - DNA, 20 bp, Artificial Sequence
  chemically synthesized
gaagaaaagggaaaagggag

SEQ ID NO: 6038 - DNA, 20 bp, Artificial Sequence
  chemically synthesized
aagggaaaagggagaggaaa

SEQ ID NO: 6039 - DNA, 20 bp, Artificial Sequence
  chemically synthesized
agggaaaagggagaggaaaa

SEQ ID NO: 6040 - DNA, 20 bp, Artificial Sequence
  chemically synthesized
aaagggagaggaaaaaggaa

SEQ ID NO: 6041 - DNA, 20 bp, Artificial Sequence
  chemically synthesized
aaaggaaaagaatatgacgt

SEQ ID NO: 6042 - DNA, 20 bp, Artificial Sequence
  chemically synthesized
aaggaaaagaatatgacgtc

SEQ ID NO: 6043 - DNA, 20 bp, Artificial Sequence
  chemically synthesized
aggaaaagaatatgacgtca

SEQ ID NO: 6044 - DNA, 20 bp, Artificial Sequence
  chemically synthesized
ggaaaagaatatgacgtcag

SEQ ID NO: 6045 - DNA, 20 bp, Artificial Sequence
  chemically synthesized
gaaaagaatatgacgtcagg

SEQ ID NO: 6046 - DNA, 20 bp, Artificial Sequence
  chemically synthesized
aaagaatatgacgtcagggg

SEQ ID NO: 6047 - DNA, 20 bp, Artificial Sequence
  chemically synthesized
aagaatatgacgtcaggggg

SEQ ID NO: 6048 - DNA, 20 bp, Artificial Sequence
  chemically synthesized
atatgacgtcagggggaggc

SEQ ID NO: 6049 - DNA, 20 bp, Artificial Sequence
  chemically synthesized
gacgtcagggggaggcaagt

SEQ ID NO: 6050 - DNA, 20 bp, Artificial Sequence
  chemically synthesized
tcagggggaggcaagtcagt

SEQ ID NO: 6051 - DNA, 20 bp, Artificial Sequence
  chemically synthesized
cagggggaggcaagtcagtt

SEQ ID NO: 6052 - DNA, 20 bp, Artificial Sequence
  chemically synthesized
aggcaagtcagttgggaaca

SEQ ID NO: 6053 - DNA, 20 bp, Artificial Sequence
  chemically synthesized
tgggaacacagatcctaaca

SEQ ID NO: 6054 - DNA, 20 bp, Artificial Sequence
  chemically synthesized
gaacacagatcctaacacag

SEQ ID NO: 6055 - DNA, 20 bp, Artificial Sequence
  chemically synthesized
acagatcctaacacagtagc

SEQ ID NO: 6056 - DNA, 20 bp, Artificial Sequence
  chemically synthesized
acacagtagctggtacctga

SEQ ID NO: 6057 - DNA, 20 bp, Artificial Sequence
  chemically synthesized
cacagtagctggtacctgat

SEQ ID NO: 6058 - DNA, 20 bp, Artificial Sequence
  chemically synthesized
tgataggtgcctatatgtga

SEQ ID NO: 6059 - DNA, 20 bp, Artificial Sequence
  chemically synthesized
aggtgcctatatgtgatgga

SEQ ID NO: 6060 - DNA, 20 bp, Artificial Sequence
  chemically synthesized
ggtgcctatatgtgatggat

SEQ ID NO: 6061 - DNA, 20 bp, Artificial Sequence
  chemically synthesized
gcctatatgtgatggatggg

SEQ ID NO: 6062 - DNA, 20 bp, Artificial Sequence
  chemically synthesized
atatgtgatggatgggtgga

SEQ ID NO: 6063 - DNA, 20 bp, Artificial Sequence
  chemically synthesized
tggatgggtggacagcccga

SEQ ID NO: 6064 - DNA, 20 bp, Artificial Sequence
  chemically synthesized
acagcccgacagatgaaaaa

SEQ ID NO: 6065 - DNA, 20 bp, Artificial Sequence
  chemically synthesized
gatgaaaaatggacaattat

SEQ ID NO: 6066 - DNA, 20 bp, Artificial Sequence
  chemically synthesized
atgaaaaatggacaattatg

SEQ ID NO: 6067 - DNA, 20 bp, Artificial Sequence
  chemically synthesized
gaaaaatggacaattatgag

SEQ ID NO: 6068 - DNA, 20 bp, Artificial Sequence
  chemically synthesized
aaaaatggacaattatgagg

SEQ ID NO: 6069 - DNA, 20 bp, Artificial Sequence
  chemically synthesized
aaaatggacaattatgagga

SEQ ID NO: 6070 - DNA, 20 bp, Artificial Sequence
  chemically synthesized
aaatggacaattatgaggag

SEQ ID NO: 6071 - DNA, 20 bp, Artificial Sequence
  chemically synthesized
atggacaattatgaggaggg

SEQ ID NO: 6072 - DNA, 20 bp, Artificial Sequence
  chemically synthesized
ggacaattatgaggagggga

SEQ ID NO: 6073 - DNA, 20 bp, Artificial Sequence
  chemically synthesized
attatgaggaggggagagtg

SEQ ID NO: 6074 - DNA, 20 bp, Artificial Sequence
  chemically synthesized
tgaggaggggagagtgcaga

SEQ ID NO: 6075 - DNA, 20 bp, Artificial Sequence
  chemically synthesized
gaggaggggagagtgcagac

SEQ ID NO: 6076 - DNA, 20 bp, Artificial Sequence
  chemically synthesized
aggaggggagagtgcagaca

SEQ ID NO: 6077 - DNA, 20 bp, Artificial Sequence
  chemically synthesized
ggaggggagagtgcagacag

SEQ ID NO: 6078 - DNA, 20 bp, Artificial Sequence
  chemically synthesized
ggggagagtgcagacagggg

SEQ ID NO: 6079 - DNA, 20 bp, Artificial Sequence
  chemically synthesized
cttcacctcctttacaattt

SEQ ID NO: 6080 - DNA, 20 bp, Artificial Sequence
  chemically synthesized
ttcacctcctttacaatttt

SEQ ID NO: 6081 - DNA, 20 bp, Artificial Sequence
  chemically synthesized
cacctcctttacaattttgg

SEQ ID NO: 6082 - DNA, 20 bp, Artificial Sequence
  chemically synthesized
tacaattttgggagtccaca

SEQ ID NO: 6083 - DNA, 20 bp, Artificial Sequence
  chemically synthesized
ttttgggagtccacacggca

SEQ ID NO: 6084 - DNA, 20 bp, Artificial Sequence
  chemically synthesized
caaattatttcattcccatt

SEQ ID NO: 6085 - DNA, 20 bp, Artificial Sequence
  chemically synthesized
aaatccaattctccatcacc

SEQ ID NO: 6086 - DNA, 20 bp, Artificial Sequence
  chemically synthesized
atccaattctccatcaccaa

SEQ ID NO: 6087 - DNA, 20 bp, Artificial Sequence
  chemically synthesized
ccaattctccatcaccaaga

SEQ ID NO: 6088 - DNA, 20 bp, Artificial Sequence
  chemically synthesized
tcaccaagagagccttccga

SEQ ID NO: 6089 - DNA, 20 bp, Artificial Sequence
  chemically synthesized
accaagagagccttccgaaa

SEQ ID NO: 6090 - DNA, 20 bp, Artificial Sequence
  chemically synthesized
ccaagagagccttccgaaag

SEQ ID NO: 6091 - DNA, 20 bp, Artificial Sequence
  chemically synthesized
ccttccgaaagaggcccccc

SEQ ID NO: 6092 - DNA, 20 bp, Artificial Sequence
  chemically synthesized
cttccgaaagaggcccccct

SEQ ID NO: 6093 - DNA, 20 bp, Artificial Sequence
  chemically synthesized
aagaggcccccctgggcaaa

SEQ ID NO: 6094 - DNA, 20 bp, Artificial Sequence
  chemically synthesized
cctgggcaaacggccaccga

SEQ ID NO: 6095 - DNA, 20 bp, Artificial Sequence
  chemically synthesized
tgggcaaacggccaccgatg

SEQ ID NO: 6096 - DNA, 20 bp, Artificial Sequence
  chemically synthesized
ggcaaacggccaccgatgga

SEQ ID NO: 6097 - DNA, 20 bp, Artificial Sequence
  chemically synthesized
gcaaacggccaccgatggag

SEQ ID NO: 6098 - DNA, 20 bp, Artificial Sequence
  chemically synthesized
ccaccgatggagaggtctgc

SEQ ID NO: 6099 - DNA, 20 bp, Artificial Sequence
  chemically synthesized
acccacgcccccaccctaat

SEQ ID NO: 6100 - DNA, 20 bp, Artificial Sequence
  chemically synthesized
ccacgcccccaccctaatca

SEQ ID NO: 6101 - DNA, 20 bp, Artificial Sequence
  chemically synthesized
cacgcccccaccctaatcag

SEQ ID NO: 6102 - DNA, 20 bp, Artificial Sequence
  chemically synthesized
atcagaggccaaacccttcc

SEQ ID NO: 6103 - DNA, 20 bp, Artificial Sequence
  chemically synthesized
cagaggccaaacccttcctg

SEQ ID NO: 6104 - DNA, 20 bp, Artificial Sequence
  chemically synthesized
cttcctggagcctgtgataa

SEQ ID NO: 6105 - DNA, 20 bp, Artificial Sequence
  chemically synthesized
cctgtgataaaagcaactgt

SEQ ID NO: 6106 - DNA, 20 bp, Artificial Sequence
  chemically synthesized
aagcaactgttagcttgcac

SEQ ID NO: 6107 - DNA, 20 bp, Artificial Sequence
  chemically synthesized
actgttagcttgcactagac

SEQ ID NO: 6108 - DNA, 20 bp, Artificial Sequence
  chemically synthesized
cttgcactagactagcttca

SEQ ID NO: 6109 - DNA, 20 bp, Artificial Sequence
  chemically synthesized
cttcaaagttgtattgaccc

SEQ ID NO: 6110 - DNA, 20 bp, Artificial Sequence
  chemically synthesized
gaccctggtgtgttatgtct

SEQ ID NO: 6111 - DNA, 20 bp, Artificial Sequence
  chemically synthesized
ccctggtgtgttatgtctaa

SEQ ID NO: 6112 - DNA, 20 bp, Artificial Sequence
  chemically synthesized
tggtgtgttatgtctaagag

SEQ ID NO: 6113 - DNA, 20 bp, Artificial Sequence
  chemically synthesized
tagatgccatatctcttttc

SEQ ID NO: 6114 - DNA, 20 bp, Artificial Sequence
  chemically synthesized
ggcctatgttattacctgta

SEQ ID NO: 6115 - DNA, 20 bp, Artificial Sequence
  chemically synthesized
tacctgtatggactttgcac

SEQ ID NO: 6116 - DNA, 20 bp, Artificial Sequence
  chemically synthesized
tatggactttgcactggaat

SEQ ID NO: 6117 - DNA, 20 bp, Artificial Sequence
  chemically synthesized
tgctcttacttatgcacacc

SEQ ID NO: 6118 - DNA, 20 bp, Artificial Sequence
  chemically synthesized
gctcttacttatgcacacct

SEQ ID NO: 6119 - DNA, 20 bp, Artificial Sequence
  chemically synthesized
ctcttacttatgcacacctg

SEQ ID NO: 6120 - DNA, 20 bp, Artificial Sequence
  chemically synthesized
acttatgcacacctggggca

SEQ ID NO: 6121 - DNA, 20 bp, Artificial Sequence
  chemically synthesized
ttatgcacacctggggcata

SEQ ID NO: 6122 - DNA, 20 bp, Artificial Sequence
  chemically synthesized
gcacacctggggcatagagc

SEQ ID NO: 6123 - DNA, 20 bp, Artificial Sequence
  chemically synthesized
gccagccctgtatcgctttt

SEQ ID NO: 6124 - DNA, 20 bp, Artificial Sequence
  chemically synthesized
gcttttcagccatctcacta

SEQ ID NO: 6125 - DNA, 20 bp, Artificial Sequence
  chemically synthesized
tctcactacagataactccc

SEQ ID NO: 6126 - DNA, 20 bp, Artificial Sequence
  chemically synthesized
gataactcccaagtcctgtc

SEQ ID NO: 6127 - DNA, 20 bp, Artificial Sequence
  chemically synthesized
tctagctgccttccttatca

SEQ ID NO: 6128 - DNA, 20 bp, Artificial Sequence
  chemically synthesized
ctagctgccttccttatcac

SEQ ID NO: 6129 - DNA, 20 bp, Artificial Sequence
  chemically synthesized
tgccttccttatcacaggaa

SEQ ID NO: 6130 - DNA, 20 bp, Artificial Sequence
  chemically synthesized
ttatcacaggaatagcaccc

SEQ ID NO: 6131 - DNA, 20 bp, Artificial Sequence
  chemically synthesized
tatcacaggaatagcaccca

SEQ ID NO: 6132 - DNA, 20 bp, Artificial Sequence
  chemically synthesized
gaatagcacccaaggtccat

SEQ ID NO: 6133 - DNA, 20 bp, Artificial Sequence
  chemically synthesized
cccaaggtccatcagtacct

SEQ ID NO: 6134 - DNA, 20 bp, Artificial Sequence
  chemically synthesized
caaggtccatcagtacctca

SEQ ID NO: 6135 - DNA, 20 bp, Artificial Sequence
  chemically synthesized
ggtccatcagtacctcagag

SEQ ID NO: 6136 - DNA, 20 bp, Artificial Sequence
  chemically synthesized
gagtagaaccccctataaac

SEQ ID NO: 6137 - DNA, 20 bp, Artificial Sequence
  chemically synthesized
gaaccccctataaactagtc

SEQ ID NO: 6138 - DNA, 20 bp, Artificial Sequence
  chemically synthesized
aaactagtctggtttgccca

SEQ ID NO: 6139 - DNA, 20 bp, Artificial Sequence
  chemically synthesized
aactagtctggtttgcccat

SEQ ID NO: 6140 - DNA, 20 bp, Artificial Sequence
  chemically synthesized
actagtctggtttgcccatg

SEQ ID NO: 6141 - DNA, 20 bp, Artificial Sequence
  chemically synthesized
tctggtttgcccatggggca

SEQ ID NO: 6142 - DNA, 20 bp, Artificial Sequence
  chemically synthesized
gtttgcccatggggcacagt

SEQ ID NO: 6143 - DNA, 20 bp, Artificial Sequence
  chemically synthesized
tttgcccatggggcacagtc

SEQ ID NO: 6144 - DNA, 20 bp, Artificial Sequence
  chemically synthesized
ggcacagtcaggctgttttc

SEQ ID NO: 6145 - DNA, 20 bp, Artificial Sequence
  chemically synthesized
gcacagtcaggctgttttcc

SEQ ID NO: 6146 - DNA, 20 bp, Artificial Sequence
  chemically synthesized
cacagtcaggctgttttcca

SEQ ID NO: 6147 - DNA, 20 bp, Artificial Sequence
  chemically synthesized
agtcaggctgttttccaggg

SEQ ID NO: 6148 - DNA, 20 bp, Artificial Sequence
  chemically synthesized
gtcaggctgttttccagggt

SEQ ID NO: 6149 - DNA, 20 bp, Artificial Sequence
  chemically synthesized
tcaggctgttttccagggtg

SEQ ID NO: 6150 - DNA, 20 bp, Artificial Sequence
  chemically synthesized
ctgttttccagggtggggtg

SEQ ID NO: 6151 - DNA, 20 bp, Artificial Sequence
  chemically synthesized
gcttacatataacgtcataa

SEQ ID NO: 6152 - DNA, 20 bp, Artificial Sequence
  chemically synthesized
cgtatgtgttgtgatccctg

SEQ ID NO: 6153 - DNA, 20 bp, Artificial Sequence
  chemically synthesized
tgttgtgatccctgtggttt

SEQ ID NO: 6154 - DNA, 20 bp, Artificial Sequence
  chemically synthesized
ttgtgatccctgtggtttga

SEQ ID NO: 6155 - DNA, 20 bp, Artificial Sequence
  chemically synthesized
atccctgtggtttgagagtt

SEQ ID NO: 6156 - DNA, 20 bp, Artificial Sequence
  chemically synthesized
ccctgtggtttgagagtttg

SEQ ID NO: 6157 - DNA, 20 bp, Artificial Sequence
  chemically synthesized
agagtttggagcttccctaa

SEQ ID NO: 6158 - DNA, 20 bp, Artificial Sequence
  chemically synthesized
aaaagtcaaaatattctcaa

SEQ ID NO: 6159 - DNA, 20 bp, Artificial Sequence
  chemically synthesized
aaagtcaaaatattctcaat

SEQ ID NO: 6160 - DNA, 20 bp, Artificial Sequence
  chemically synthesized
attctcaatgggccctcaat

SEQ ID NO: 6161 - DNA, 20 bp, Artificial Sequence
  chemically synthesized
caatcagcacatacacacaa

SEQ ID NO: 6162 - DNA, 20 bp, Artificial Sequence
  chemically synthesized
aatcagcacatacacacaaa

SEQ ID NO: 6163 - DNA, 20 bp, Artificial Sequence
  chemically synthesized
acatacacacaaaaggtacc

SEQ ID NO: 6164 - DNA, 20 bp, Artificial Sequence
  chemically synthesized
tgtaattcttttcctgctca

SEQ ID NO: 6165 - DNA, 20 bp, Artificial Sequence
  chemically synthesized
attcttttcctgctcaaaga

SEQ ID NO: 6166 - DNA, 20 bp, Artificial Sequence
  chemically synthesized
ttcttttcctgctcaaagac

SEQ ID NO: 6167 - DNA, 20 bp, Artificial Sequence
  chemically synthesized
accaaaaacccttgccacca

SEQ ID NO: 6168 - DNA, 20 bp, Artificial Sequence
  chemically synthesized
ccaaaaacccttgccaccat

SEQ ID NO: 6169 - DNA, 20 bp, Artificial Sequence
  chemically synthesized
aaaaacccttgccaccatgg

SEQ ID NO: 6170 - DNA, 20 bp, Artificial Sequence
  chemically synthesized
cccttgccaccatgggagcc

SEQ ID NO: 6171 - DNA, 20 bp, Artificial Sequence
  chemically synthesized
ccttgccaccatgggagcct

SEQ ID NO: 6172 - DNA, 20 bp, Artificial Sequence
  chemically synthesized
cttgccaccatgggagcctg

SEQ ID NO: 6173 - DNA, 20 bp, Artificial Sequence
  chemically synthesized
gccaccatgggagcctgggg

SEQ ID NO: 6174 - DNA, 20 bp, Artificial Sequence
  chemically synthesized
caccatgggagcctggggca

SEQ ID NO: 6175 - DNA, 20 bp, Artificial Sequence
  chemically synthesized
catgggagcctggggcagag

SEQ ID NO: 6176 - DNA, 20 bp, Artificial Sequence
  chemically synthesized
atgggagcctggggcagaga

SEQ ID NO: 6177 - DNA, 20 bp, Artificial Sequence
  chemically synthesized
agcctggggcagagaaggca

SEQ ID NO: 6178 - DNA, 20 bp, Artificial Sequence
  chemically synthesized
ggggcagagaaggcacagtg

SEQ ID NO: 6179 - DNA, 20 bp, Artificial Sequence
  chemically synthesized
gtgaagtcaaactgtaattc

SEQ ID NO: 6180 - DNA, 20 bp, Artificial Sequence
  chemically synthesized
tgaagtcaaactgtaattcc

SEQ ID NO: 6181 - DNA, 20 bp, Artificial Sequence
  chemically synthesized
ctgtaattccaggctctaaa

SEQ ID NO: 6182 - DNA, 20 bp, Artificial Sequence
  chemically synthesized
aatggtgctgtcatttttct

SEQ ID NO: 6183 - DNA, 20 bp, Artificial Sequence
  chemically synthesized
tggtgctgtcatttttctga

SEQ ID NO: 6184 - DNA, 20 bp, Artificial Sequence
  chemically synthesized
tctgagagtctctaaattac

SEQ ID NO: 6185 - DNA, 20 bp, Artificial Sequence
  chemically synthesized
ctgagagtctctaaattaca

SEQ ID NO: 6186 - DNA, 20 bp, Artificial Sequence
  chemically synthesized
tgagagtctctaaattacaa

SEQ ID NO: 6187 - DNA, 20 bp, Artificial Sequence
  chemically synthesized
aagggtgttttcactattct

SEQ ID NO: 6188 - DNA, 20 bp, Artificial Sequence
  chemically synthesized
agctattttttaaaacacct

SEQ ID NO: 6189 - DNA, 20 bp, Artificial Sequence
  chemically synthesized
aacacctaagaaacatactg

SEQ ID NO: 6190 - DNA, 20 bp, Artificial Sequence
  chemically synthesized
taagaaacatactgcagctc

SEQ ID NO: 6191 - DNA, 20 bp, Artificial Sequence
  chemically synthesized
aacatactgcagctctggaa

SEQ ID NO: 6192 - DNA, 20 bp, Artificial Sequence
  chemically synthesized
catactgcagctctggaaaa

SEQ ID NO: 6193 - DNA, 20 bp, Artificial Sequence
  chemically synthesized
aaaagagaacaaacaaacca

SEQ ID NO: 6194 - DNA, 20 bp, Artificial Sequence
  chemically synthesized
aagagaacaaacaaaccaaa

SEQ ID NO: 6195 - DNA, 20 bp, Artificial Sequence
  chemically synthesized
agaacaaacaaaccaaagag

SEQ ID NO: 6196 - DNA, 20 bp, Artificial Sequence
  chemically synthesized
gaacaaacaaaccaaagaga

SEQ ID NO: 6197 - DNA, 20 bp, Artificial Sequence
  chemically synthesized
aacaaacaaaccaaagagaa

SEQ ID NO: 6198 - DNA, 20 bp, Artificial Sequence
  chemically synthesized
caaaccaaagagaagggatc

SEQ ID NO: 6199 - DNA, 20 bp, Artificial Sequence
  chemically synthesized
aaccaaagagaagggatcca

SEQ ID NO: 6200 - DNA, 20 bp, Artificial Sequence
  chemically synthesized
accaaagagaagggatccag

SEQ ID NO: 6201 - DNA, 20 bp, Artificial Sequence
  chemically synthesized
aggtcaccctcatatgtgaa

SEQ ID NO: 6202 - DNA, 20 bp, Artificial Sequence
  chemically synthesized
tgaaaagtcaattgataatg

SEQ ID NO: 6203 - DNA, 20 bp, Artificial Sequence
  chemically synthesized
gaaaagtcaattgataatga

SEQ ID NO: 6204 - DNA, 20 bp, Artificial Sequence
  chemically synthesized
tcaattgataatgaaggctt

SEQ ID NO: 6205 - DNA, 20 bp, Artificial Sequence
  chemically synthesized
caattgataatgaaggcttt

SEQ ID NO: 6206 - DNA, 20 bp, Artificial Sequence
  chemically synthesized
aatgaaggctttaggataac

SEQ ID NO: 6207 - DNA, 20 bp, Artificial Sequence
  chemically synthesized
tgaaggctttaggataaccg

SEQ ID NO: 6208 - DNA, 20 bp, Artificial Sequence
  chemically synthesized
gaaggctttaggataaccgg

SEQ ID NO: 6209 - DNA, 20 bp, Artificial Sequence
  chemically synthesized
aaggctttaggataaccgga

SEQ ID NO: 6210 - DNA, 20 bp, Artificial Sequence
  chemically synthesized
aggctttaggataaccggag

SEQ ID NO: 6211 - DNA, 20 bp, Artificial Sequence
  chemically synthesized
gctttaggataaccggaggg

SEQ ID NO: 6212 - DNA, 20 bp, Artificial Sequence
  chemically synthesized
accggaggggagatgattga

SEQ ID NO: 6213 - DNA, 20 bp, Artificial Sequence
  chemically synthesized
ttgaaagcaatgcacctgtg

SEQ ID NO: 6214 - DNA, 20 bp, Artificial Sequence
  chemically synthesized
tgaaagcaatgcacctgtgc

SEQ ID NO: 6215 - DNA, 20 bp, Artificial Sequence
  chemically synthesized
caatgcacctgtgcaggaaa

SEQ ID NO: 6216 - DNA, 20 bp, Artificial Sequence
  chemically synthesized
cctgtgcaggaaatggatta

SEQ ID NO: 6217 - DNA, 20 bp, Artificial Sequence
  chemically synthesized
caggaaatggattacggaaa

SEQ ID NO: 6218 - DNA, 20 bp, Artificial Sequence
  chemically synthesized
aggaaatggattacggaaac

SEQ ID NO: 6219 - DNA, 20 bp, Artificial Sequence
  chemically synthesized
ggaaatggattacggaaaca

SEQ ID NO: 6220 - DNA, 20 bp, Artificial Sequence
  chemically synthesized
gggaattgttcatgaaatcc

SEQ ID NO: 6221 - DNA, 20 bp, Artificial Sequence
  chemically synthesized
ttcatgaaatcccagaaaac

SEQ ID NO: 6222 - DNA, 20 bp, Artificial Sequence
  chemically synthesized
aaatcccagaaaaccagaac

SEQ ID NO: 6223 - DNA, 20 bp, Artificial Sequence
  chemically synthesized
aatcccagaaaaccagaacc

SEQ ID NO: 6224 - DNA, 20 bp, Artificial Sequence
  chemically synthesized
ccagaaaaccagaaccggga

SEQ ID NO: 6225 - DNA, 20 bp, Artificial Sequence
  chemically synthesized
aaccagaaccgggaaagttc

SEQ ID NO: 6226 - DNA, 20 bp, Artificial Sequence
  chemically synthesized
cagaaccgggaaagttctgg

SEQ ID NO: 6227 - DNA, 20 bp, Artificial Sequence
  chemically synthesized
accgggaaagttctggaagt

SEQ ID NO: 6228 - DNA, 20 bp, Artificial Sequence
  chemically synthesized
ggaaaaacaaatcatgactt

SEQ ID NO: 6229 - DNA, 20 bp, Artificial Sequence
  chemically synthesized
acaaatcatgacttaagcaa

SEQ ID NO: 6230 - DNA, 20 bp, Artificial Sequence
  chemically synthesized
aatcatgacttaagcaatgg

SEQ ID NO: 6231 - DNA, 20 bp, Artificial Sequence
  chemically synthesized
ggaagtccaatacacgttta

SEQ ID NO: 6232 - DNA, 20 bp, Artificial Sequence
  chemically synthesized
tacagaatgccttgtcccac

SEQ ID NO: 6233 - DNA, 20 bp, Artificial Sequence
  chemically synthesized
acagaatgccttgtcccacg

SEQ ID NO: 6234 - DNA, 20 bp, Artificial Sequence
  chemically synthesized
ccttgtcccacgaggcaaca

SEQ ID NO: 6235 - DNA, 20 bp, Artificial Sequence
  chemically synthesized
cttgtcccacgaggcaacac

SEQ ID NO: 6236 - DNA, 20 bp, Artificial Sequence
  chemically synthesized
cgaggcaacacaggctacca

SEQ ID NO: 6237 - DNA, 20 bp, Artificial Sequence
  chemically synthesized
gcaacacaggctaccacaga

SEQ ID NO: 6238 - DNA, 20 bp, Artificial Sequence
  chemically synthesized
caacacaggctaccacagat

SEQ ID NO: 6239 - DNA, 20 bp, Artificial Sequence
  chemically synthesized
aacacaggctaccacagatg

SEQ ID NO: 6240 - DNA, 20 bp, Artificial Sequence
  chemically synthesized
acacaggctaccacagatgg

SEQ ID NO: 6241 - DNA, 20 bp, Artificial Sequence
  chemically synthesized
aggctaccacagatggggga

SEQ ID NO: 6242 - DNA, 20 bp, Artificial Sequence
  chemically synthesized
ggctaccacagatgggggac

SEQ ID NO: 6243 - DNA, 20 bp, Artificial Sequence
  chemically synthesized
gctaccacagatgggggaca

SEQ ID NO: 6244 - DNA, 20 bp, Artificial Sequence
  chemically synthesized
accacagatgggggacaggg

SEQ ID NO: 6245 - DNA, 20 bp, Artificial Sequence
  chemically synthesized
ccacagatgggggacagggt

SEQ ID NO: 6246 - DNA, 20 bp, Artificial Sequence
  chemically synthesized
acagatgggggacagggtgg

SEQ ID NO: 6247 - DNA, 20 bp, Artificial Sequence
  chemically synthesized
gatgggggacagggtgggag

SEQ ID NO: 6248 - DNA, 20 bp, Artificial Sequence
  chemically synthesized
agggtgggagtggaccatcc

SEQ ID NO: 6249 - DNA, 20 bp, Artificial Sequence
  chemically synthesized
gtgggagtggaccatcccag

SEQ ID NO: 6250 - DNA, 20 bp, Artificial Sequence
  chemically synthesized
accatcccagtggtgttact

SEQ ID NO: 6251 - DNA, 20 bp, Artificial Sequence
  chemically synthesized
ccatcccagtggtgttactg

SEQ ID NO: 6252 - DNA, 20 bp, Artificial Sequence
  chemically synthesized
catcccagtggtgttactga

SEQ ID NO: 6253 - DNA, 20 bp, Artificial Sequence
  chemically synthesized
atcccagtggtgttactgag

SEQ ID NO: 6254 - DNA, 20 bp, Artificial Sequence
  chemically synthesized
agtggtgttactgaggggca

SEQ ID NO: 6255 - DNA, 20 bp, Artificial Sequence
  chemically synthesized
gtggtgttactgaggggcaa

SEQ ID NO: 6256 - DNA, 20 bp, Artificial Sequence
  chemically synthesized
tggtgttactgaggggcaaa

SEQ ID NO: 6257 - DNA, 20 bp, Artificial Sequence
  chemically synthesized
gttactgaggggcaaaggga

SEQ ID NO: 6258 - DNA, 20 bp, Artificial Sequence
  chemically synthesized
gggcaaagggatagccctat

SEQ ID NO: 6259 - DNA, 20 bp, Artificial Sequence
  chemically synthesized
ggcaaagggatagccctatg

SEQ ID NO: 6260 - DNA, 20 bp, Artificial Sequence
  chemically synthesized
aagggatagccctatgaggc

SEQ ID NO: 6261 - DNA, 20 bp, Artificial Sequence
  chemically synthesized
agccctatgaggcaagtgtc

SEQ ID NO: 6262 - DNA, 20 bp, Artificial Sequence
  chemically synthesized
gccctatgaggcaagtgtcc

SEQ ID NO: 6263 - DNA, 20 bp, Artificial Sequence
  chemically synthesized
ccctatgaggcaagtgtcca

SEQ ID NO: 6264 - DNA, 20 bp, Artificial Sequence
  chemically synthesized
tatgaggcaagtgtccaggg

SEQ ID NO: 6265 - DNA, 20 bp, Artificial Sequence
  chemically synthesized
gcaagtgtccagggcagaac

SEQ ID NO: 6266 - DNA, 20 bp, Artificial Sequence
  chemically synthesized
aagtgtccagggcagaactg

SEQ ID NO: 6267 - DNA, 20 bp, Artificial Sequence
  chemically synthesized
agctttgtgaaaccatttcc

SEQ ID NO: 6268 - DNA, 20 bp, Artificial Sequence
  chemically synthesized
gctttgtgaaaccatttccc

SEQ ID NO: 6269 - DNA, 20 bp, Artificial Sequence
  chemically synthesized
ttgtgaaaccatttcccagg

SEQ ID NO: 6270 - DNA, 20 bp, Artificial Sequence
  chemically synthesized
gtgaaaccatttcccaggca

SEQ ID NO: 6271 - DNA, 20 bp, Artificial Sequence
  chemically synthesized
aaccatttcccaggcagaga

SEQ ID NO: 6272 - DNA, 20 bp, Artificial Sequence
  chemically synthesized
ccatttcccaggcagagaca

SEQ ID NO: 6273 - DNA, 20 bp, Artificial Sequence
  chemically synthesized
cccaggcagagacagagcac

SEQ ID NO: 6274 - DNA, 20 bp, Artificial Sequence
  chemically synthesized
ccaggcagagacagagcact

SEQ ID NO: 6275 - DNA, 20 bp, Artificial Sequence
  chemically synthesized
gcagagacagagcactaggc

SEQ ID NO: 6276 - DNA, 20 bp, Artificial Sequence
  chemically synthesized
gagcactaggctggtgctgc

SEQ ID NO: 6277 - DNA, 20 bp, Artificial Sequence
  chemically synthesized
ggtgctgccagtctgacaat

SEQ ID NO: 6278 - DNA, 20 bp, Artificial Sequence
  chemically synthesized
ataagtctgccattgtcctc

SEQ ID NO: 6279 - DNA, 20 bp, Artificial Sequence
  chemically synthesized
gtctgccattgtcctctggt

SEQ ID NO: 6280 - DNA, 20 bp, Artificial Sequence
  chemically synthesized
cattgtcctctggtcagctc

SEQ ID NO: 6281 - DNA, 20 bp, Artificial Sequence
  chemically synthesized
tctggtcagctctggacaca

SEQ ID NO: 6282 - DNA, 20 bp, Artificial Sequence
  chemically synthesized
cagctctggacacacagcaa

SEQ ID NO: 6283 - DNA, 20 bp, Artificial Sequence
  chemically synthesized
tctggacacacagcaaaagt

SEQ ID NO: 6284 - DNA, 20 bp, Artificial Sequence
  chemically synthesized
acacacagcaaaagtgagtt

SEQ ID NO: 6285 - DNA, 20 bp, Artificial Sequence
  chemically synthesized
acacagcaaaagtgagttca

SEQ ID NO: 6286 - DNA, 20 bp, Artificial Sequence
  chemically synthesized
cagcaaaagtgagttcagag

SEQ ID NO: 6287 - DNA, 20 bp, Artificial Sequence
  chemically synthesized
agtgagttcagagtagcctg

SEQ ID NO: 6288 - DNA, 20 bp, Artificial Sequence
  chemically synthesized
gagttcagagtagcctgaag

SEQ ID NO: 6289 - DNA, 20 bp, Artificial Sequence
  chemically synthesized
agttcagagtagcctgaagc

SEQ ID NO: 6290 - DNA, 20 bp, Artificial Sequence
  chemically synthesized
cagagtagcctgaagcagga

SEQ ID NO: 6291 - DNA, 20 bp, Artificial Sequence
  chemically synthesized
gagtagcctgaagcaggaaa

SEQ ID NO: 6292 - DNA, 20 bp, Artificial Sequence
  chemically synthesized
agtagcctgaagcaggaaag

SEQ ID NO: 6293 - DNA, 20 bp, Artificial Sequence
  chemically synthesized
gtagcctgaagcaggaaaga

SEQ ID NO: 6294 - DNA, 20 bp, Artificial Sequence
  chemically synthesized
gcctgaagcaggaaagaggg

SEQ ID NO: 6295 - DNA, 20 bp, Artificial Sequence
  chemically synthesized
ctgaagcaggaaagagggaa

SEQ ID NO: 6296 - DNA, 20 bp, Artificial Sequence
  chemically synthesized
gaagcaggaaagagggaaga

SEQ ID NO: 6297 - DNA, 20 bp, Artificial Sequence
  chemically synthesized
aagcaggaaagagggaagag

SEQ ID NO: 6298 - DNA, 20 bp, Artificial Sequence
  chemically synthesized
gcaggaaagagggaagagag

SEQ ID NO: 6299 - DNA, 20 bp, Artificial Sequence
  chemically synthesized
caggaaagagggaagagagg

SEQ ID NO: 6300 - DNA, 20 bp, Artificial Sequence
  chemically synthesized
acctatcttccactttgctg

SEQ ID NO: 6301 - DNA, 20 bp, Artificial Sequence
  chemically synthesized
cctatcttccactttgctgc

SEQ ID NO: 6302 - DNA, 20 bp, Artificial Sequence
  chemically synthesized
ttccactttgctgcaggttc

SEQ ID NO: 6303 - DNA, 20 bp, Artificial Sequence
  chemically synthesized
tccactttgctgcaggttca

SEQ ID NO: 6304 - DNA, 20 bp, Artificial Sequence
  chemically synthesized
ctttgctgcaggttcaaggc

SEQ ID NO: 6305 - DNA, 20 bp, Artificial Sequence
  chemically synthesized
tttgctgcaggttcaaggca

SEQ ID NO: 6306 - DNA, 20 bp, Artificial Sequence
  chemically synthesized
caggttcaaggcaaggattt

SEQ ID NO: 6307 - DNA, 20 bp, Artificial Sequence
  chemically synthesized
ttcaaggcaaggatttgaga

SEQ ID NO: 6308 - DNA, 20 bp, Artificial Sequence
  chemically synthesized
tttgagacagttaccccttc

SEQ ID NO: 6309 - DNA, 20 bp, Artificial Sequence
  chemically synthesized
gagacagttaccccttctgg

SEQ ID NO: 6310 - DNA, 20 bp, Artificial Sequence
  chemically synthesized
gacagttaccccttctggaa

SEQ ID NO: 6311 - DNA, 20 bp, Artificial Sequence
  chemically synthesized
ttaccccttctggaagagcc

SEQ ID NO: 6312 - DNA, 20 bp, Artificial Sequence
  chemically synthesized
cccttctggaagagcctggt

SEQ ID NO: 6313 - DNA, 20 bp, Artificial Sequence
  chemically synthesized
tcctcaccgactttctctcc

SEQ ID NO: 6314 - DNA, 20 bp, Artificial Sequence
  chemically synthesized
tcaccgactttctctcccag

SEQ ID NO: 6315 - DNA, 20 bp, Artificial Sequence
  chemically synthesized
cgactttctctcccagcagc

SEQ ID NO: 6316 - DNA, 20 bp, Artificial Sequence
  chemically synthesized
ctttctctcccagcagccag

SEQ ID NO: 6317 - DNA, 20 bp, Artificial Sequence
  chemically synthesized
tttctctcccagcagccagc

SEQ ID NO: 6318 - DNA, 20 bp, Artificial Sequence
  chemically synthesized
ttctctcccagcagccagca

SEQ ID NO: 6319 - DNA, 20 bp, Artificial Sequence
  chemically synthesized
tctctcccagcagccagcag

SEQ ID NO: 6320 - DNA, 20 bp, Artificial Sequence
  chemically synthesized
cccagcagccagcaggggcc

SEQ ID NO: 6321 - DNA, 20 bp, Artificial Sequence
  chemically synthesized
ccagcagccagcaggggcct

SEQ ID NO: 6322 - DNA, 20 bp, Artificial Sequence
  chemically synthesized
gcaggggcctgggccattta

SEQ ID NO: 6323 - DNA, 20 bp, Artificial Sequence
  chemically synthesized
ctgggccatttatggaatgc

SEQ ID NO: 6324 - DNA, 20 bp, Artificial Sequence
  chemically synthesized
gaatgcaagccctgaccaca

SEQ ID NO: 6325 - DNA, 20 bp, Artificial Sequence
  chemically synthesized
acacagacttacttacatgc

SEQ ID NO: 6326 - DNA, 20 bp, Artificial Sequence
  chemically synthesized
cacagacttacttacatgcc

SEQ ID NO: 6327 - DNA, 20 bp, Artificial Sequence
  chemically synthesized
gacttacttacatgccagga

SEQ ID NO: 6328 - DNA, 20 bp, Artificial Sequence
  chemically synthesized
ttacatgccaggacagccac

SEQ ID NO: 6329 - DNA, 20 bp, Artificial Sequence
  chemically synthesized
tacatgccaggacagccacc

SEQ ID NO: 6330 - DNA, 20 bp, Artificial Sequence
  chemically synthesized
atgccaggacagccaccagg

SEQ ID NO: 6331 - DNA, 20 bp, Artificial Sequence
  chemically synthesized
ccaggtagcctttcccactc

SEQ ID NO: 6332 - DNA, 20 bp, Artificial Sequence
  chemically synthesized
caggtagcctttcccactct

SEQ ID NO: 6333 - DNA, 20 bp, Artificial Sequence
  chemically synthesized
cccactctaggttccactgt

SEQ ID NO: 6334 - DNA, 20 bp, Artificial Sequence
  chemically synthesized
ctctctctcactatgctccc

SEQ ID NO: 6335 - DNA, 20 bp, Artificial Sequence
  chemically synthesized
ctctctcactatgctcccaa

SEQ ID NO: 6336 - DNA, 20 bp, Artificial Sequence
  chemically synthesized
tctctcactatgctcccaag

SEQ ID NO: 6337 - DNA, 20 bp, Artificial Sequence
  chemically synthesized
tctcactatgctcccaagag

SEQ ID NO: 6338 - DNA, 20 bp, Artificial Sequence
  chemically synthesized
cttcctcaaatctccctcac

SEQ ID NO: 6339 - DNA, 20 bp, Artificial Sequence
  chemically synthesized
atctccctcactggatgtca

SEQ ID NO: 6340 - DNA, 20 bp, Artificial Sequence
  chemically synthesized
ctcactggatgtcacagtca

SEQ ID NO: 6341 - DNA, 20 bp, Artificial Sequence
  chemically synthesized
tcactggatgtcacagtcat

SEQ ID NO: 6342 - DNA, 20 bp, Artificial Sequence
  chemically synthesized
gtcacagtcataggcctgaa

SEQ ID NO: 6343 - DNA, 20 bp, Artificial Sequence
  chemically synthesized
acagtcataggcctgaaaag

SEQ ID NO: 6344 - DNA, 20 bp, Artificial Sequence
  chemically synthesized
atgcaaactgaatttttgta

SEQ ID NO: 6345 - DNA, 20 bp, Artificial Sequence
  chemically synthesized
caaactgaatttttgtaaag

SEQ ID NO: 6346 - DNA, 20 bp, Artificial Sequence
  chemically synthesized
aaactgaatttttgtaaagc

SEQ ID NO: 6347 - DNA, 20 bp, Artificial Sequence
  chemically synthesized
aagcaggacccatttcccca

SEQ ID NO: 6348 - DNA, 20 bp, Artificial Sequence
  chemically synthesized
aggacccatttccccatgga

SEQ ID NO: 6349 - DNA, 20 bp, Artificial Sequence
  chemically synthesized
atttccccatggacagtcat

SEQ ID NO: 6350 - DNA, 20 bp, Artificial Sequence
  chemically synthesized
ttccccatggacagtcataa

SEQ ID NO: 6351 - DNA, 20 bp, Artificial Sequence
  chemically synthesized
catggacagtcataagagat

SEQ ID NO: 6352 - DNA, 20 bp, Artificial Sequence
  chemically synthesized
agagatgagtgaacacaatg

SEQ ID NO: 6353 - DNA, 20 bp, Artificial Sequence
  chemically synthesized
cgattacttcacgataaatc

SEQ ID NO: 6354 - DNA, 20 bp, Artificial Sequence
  chemically synthesized
cacgataaatctggattcca

SEQ ID NO: 6355 - DNA, 20 bp, Artificial Sequence
  chemically synthesized
acgataaatctggattccaa

SEQ ID NO: 6356 - DNA, 20 bp, Artificial Sequence
  chemically synthesized
cgataaatctggattccaaa

SEQ ID NO: 6357 - DNA, 20 bp, Artificial Sequence
  chemically synthesized
ctggattccaaagggactat

SEQ ID NO: 6358 - DNA, 20 bp, Artificial Sequence
  chemically synthesized
agggactataagctctcaca

SEQ ID NO: 6359 - DNA, 20 bp, Artificial Sequence
  chemically synthesized
gactataagctctcacatgg

SEQ ID NO: 6360 - DNA, 20 bp, Artificial Sequence
  chemically synthesized
actataagctctcacatgga

SEQ ID NO: 6361 - DNA, 20 bp, Artificial Sequence
  chemically synthesized
ataagctctcacatggaagg

SEQ ID NO: 6362 - DNA, 20 bp, Artificial Sequence
  chemically synthesized
gctctcacatggaaggaagc

SEQ ID NO: 6363 - DNA, 20 bp, Artificial Sequence
  chemically synthesized
caagatctctactcctcccc

SEQ ID NO: 6364 - DNA, 20 bp, Artificial Sequence
  chemically synthesized
tctactcctcccccagtgtt

SEQ ID NO: 6365 - DNA, 20 bp, Artificial Sequence
  chemically synthesized
actcctcccccagtgttgag

SEQ ID NO: 6366 - DNA, 20 bp, Artificial Sequence
  chemically synthesized
ctcccccagtgttgagtgga

SEQ ID NO: 6367 - DNA, 20 bp, Artificial Sequence
  chemically synthesized
tcccccagtgttgagtggac

SEQ ID NO: 6368 - DNA, 20 bp, Artificial Sequence
  chemically synthesized
cccccagtgttgagtggaca

SEQ ID NO: 6369 - DNA, 20 bp, Artificial Sequence
  chemically synthesized
cccagtgttgagtggacagg

SEQ ID NO: 6370 - DNA, 20 bp, Artificial Sequence
  chemically synthesized
agtggacagggagtacaccg

SEQ ID NO: 6371 - DNA, 20 bp, Artificial Sequence
  chemically synthesized
agtacaccgcagacacctgt

SEQ ID NO: 6372 - DNA, 20 bp, Artificial Sequence
  chemically synthesized
caaccaattctaattccctt

SEQ ID NO: 6373 - DNA, 20 bp, Artificial Sequence
  chemically synthesized
caattctaattccctttagc

SEQ ID NO: 6374 - DNA, 20 bp, Artificial Sequence
  chemically synthesized
ccctttagctagcatcccct

SEQ ID NO: 6375 - DNA, 20 bp, Artificial Sequence
  chemically synthesized
ttagctagcatcccctaagc

SEQ ID NO: 6376 - DNA, 20 bp, Artificial Sequence
  chemically synthesized
agctagcatcccctaagcta

SEQ ID NO: 6377 - DNA, 20 bp, Artificial Sequence
  chemically synthesized
agcatcccctaagctagagc

SEQ ID NO: 6378 - DNA, 20 bp, Artificial Sequence
  chemically synthesized
catcccctaagctagagcta

SEQ ID NO: 6379 - DNA, 20 bp, Artificial Sequence
  chemically synthesized
ccctaagctagagctagagc

SEQ ID NO: 6380 - DNA, 20 bp, Artificial Sequence
  chemically synthesized
ctaagctagagctagagcta

SEQ ID NO: 6381 - DNA, 20 bp, Artificial Sequence
  chemically synthesized
gagctagagctatttccttg

SEQ ID NO: 6382 - DNA, 20 bp, Artificial Sequence
  chemically synthesized
cttgcagccttccttttctc

SEQ ID NO: 6383 - DNA, 20 bp, Artificial Sequence
  chemically synthesized
agccttccttttctctagca

SEQ ID NO: 6384 - DNA, 20 bp, Artificial Sequence
  chemically synthesized
tctagcaaagtccttccatg

SEQ ID NO: 6385 - DNA, 20 bp, Artificial Sequence
  chemically synthesized
agcaaagtccttccatgcag

SEQ ID NO: 6386 - DNA, 20 bp, Artificial Sequence
  chemically synthesized
atgacctgtaaacacttaat

SEQ ID NO: 6387 - DNA, 20 bp, Artificial Sequence
  chemically synthesized
cctgtaaacacttaatgagc

SEQ ID NO: 6388 - DNA, 20 bp, Artificial Sequence
  chemically synthesized
tgtaaacacttaatgagcta

SEQ ID NO: 6389 - DNA, 20 bp, Artificial Sequence
  chemically synthesized
ctagagaaacattccattga

SEQ ID NO: 6390 - DNA, 20 bp, Artificial Sequence
  chemically synthesized
tagagaaacattccattgaa

SEQ ID NO: 6391 - DNA, 20 bp, Artificial Sequence
  chemically synthesized
ccactgtgcatccttttgta

SEQ ID NO: 6392 - DNA, 20 bp, Artificial Sequence
  chemically synthesized
actgtgcatccttttgtaaa

SEQ ID NO: 6393 - DNA, 20 bp, Artificial Sequence
  chemically synthesized
ctgtgcatccttttgtaaag

SEQ ID NO: 6394 - DNA, 20 bp, Artificial Sequence
  chemically synthesized
tgtgcatccttttgtaaaga

SEQ ID NO: 6395 - DNA, 20 bp, Artificial Sequence
  chemically synthesized
gtgcatccttttgtaaagag

SEQ ID NO: 6396 - DNA, 20 bp, Artificial Sequence
  chemically synthesized
tgcatccttttgtaaagagg

SEQ ID NO: 6397 - DNA, 20 bp, Artificial Sequence
  chemically synthesized
gcatccttttgtaaagaggg

SEQ ID NO: 6398 - DNA, 20 bp, Artificial Sequence
  chemically synthesized
ggaaaatcttttgtaaaacg

SEQ ID NO: 6399 - DNA, 20 bp, Artificial Sequence
  chemically synthesized
tttaactgctctgtttgatc

SEQ ID NO: 6400 - DNA, 20 bp, Artificial Sequence
  chemically synthesized
actgctctgtttgatcaagt

SEQ ID NO: 6401 - DNA, 20 bp, Artificial Sequence
  chemically synthesized
tttgatcaagtcagattttt

SEQ ID NO: 6402 - DNA, 20 bp, Artificial Sequence
  chemically synthesized
cagatttttcagaatatgaa

SEQ ID NO: 6403 - DNA, 20 bp, Artificial Sequence
  chemically synthesized
tttttcagaatatgaatagc

SEQ ID NO: 6404 - DNA, 20 bp, Artificial Sequence
  chemically synthesized
aatatgaatagctagtattc

SEQ ID NO: 6405 - DNA, 20 bp, Artificial Sequence
  chemically synthesized
agcatatatgaactgtcttt

SEQ ID NO: 6406 - DNA, 20 bp, Artificial Sequence
  chemically synthesized
tctttaagttaatcaatccc

SEQ ID NO: 6407 - DNA, 20 bp, Artificial Sequence
  chemically synthesized
gttaatcaatccctagaaac

SEQ ID NO: 6408 - DNA, 20 bp, Artificial Sequence
  chemically synthesized
aatccctagaaactagccct

SEQ ID NO: 6409 - DNA, 20 bp, Artificial Sequence
  chemically synthesized
atccctagaaactagccctc

SEQ ID NO: 6410 - DNA, 20 bp, Artificial Sequence
  chemically synthesized
ctagaaactagccctcaggt

SEQ ID NO: 6411 - DNA, 20 bp, Artificial Sequence
  chemically synthesized
gaaactagccctcaggttag

SEQ ID NO: 6412 - DNA, 20 bp, Artificial Sequence
  chemically synthesized
aaactagccctcaggttagc

SEQ ID NO: 6413 - DNA, 20 bp, Artificial Sequence
  chemically synthesized
agccctcaggttagcaggcc

SEQ ID NO: 6414 - DNA, 20 bp, Artificial Sequence
  chemically synthesized
gccctcaggttagcaggcca

SEQ ID NO: 6415 - DNA, 20 bp, Artificial Sequence
  chemically synthesized
ttagcaggccaaggatatat

SEQ ID NO: 6416 - DNA, 20 bp, Artificial Sequence
  chemically synthesized
agcaggccaaggatatatga

SEQ ID NO: 6417 - DNA, 20 bp, Artificial Sequence
  chemically synthesized
ggatatatgagagtgctttg

SEQ ID NO: 6418 - DNA, 20 bp, Artificial Sequence
  chemically synthesized
tatgagagtgctttgaagtc

SEQ ID NO: 6419 - DNA, 20 bp, Artificial Sequence
  chemically synthesized
ctgccgctcctgaattgaat

SEQ ID NO: 6420 - DNA, 20 bp, Artificial Sequence
  chemically synthesized
tgaattgaattagaacattc

SEQ ID NO: 6421 - DNA, 20 bp, Artificial Sequence
  chemically synthesized
gaattgaattagaacattcc

SEQ ID NO: 6422 - DNA, 20 bp, Artificial Sequence
  chemically synthesized
ttgaattagaacattccagg

SEQ ID NO: 6423 - DNA, 20 bp, Artificial Sequence
  chemically synthesized
attagaacattccaggtaga

SEQ ID NO: 6424 - DNA, 20 bp, Artificial Sequence
  chemically synthesized
attccaggtagacagattca

SEQ ID NO: 6425 - DNA, 20 bp, Artificial Sequence
  chemically synthesized
agattcatggcccctaacat

SEQ ID NO: 6426 - DNA, 20 bp, Artificial Sequence
  chemically synthesized
gattcatggcccctaacatc

SEQ ID NO: 6427 - DNA, 20 bp, Artificial Sequence
  chemically synthesized
tggcccctaacatcaggaat

SEQ ID NO: 6428 - DNA, 20 bp, Artificial Sequence
  chemically synthesized
ccctaacatcaggaatcagc

SEQ ID NO: 6429 - DNA, 20 bp, Artificial Sequence
  chemically synthesized
gaatcagctagaaactcaat

SEQ ID NO: 6430 - DNA, 20 bp, Artificial Sequence
  chemically synthesized
gaaactcaatcggctcttac

SEQ ID NO: 6431 - DNA, 20 bp, Artificial Sequence
  chemically synthesized
ttaccagtcactacctacgt

SEQ ID NO: 6432 - DNA, 20 bp, Artificial Sequence
  chemically synthesized
gtcagtgccatatcctataa

SEQ ID NO: 6433 - DNA, 20 bp, Artificial Sequence
  chemically synthesized
gatgatgataataataataa

SEQ ID NO: 6434 - DNA, 20 bp, Artificial Sequence
  chemically synthesized
ataataataatagcttccac

SEQ ID NO: 6435 - DNA, 20 bp, Artificial Sequence
  chemically synthesized
taataatagcttccactgga

SEQ ID NO: 6436 - DNA, 20 bp, Artificial Sequence
  chemically synthesized
ggatggcactttgcaccttc

SEQ ID NO: 6437 - DNA, 20 bp, Artificial Sequence
  chemically synthesized
atggcactttgcaccttcca

SEQ ID NO: 6438 - DNA, 20 bp, Artificial Sequence
  chemically synthesized
ttaacatcctttactttttt

SEQ ID NO: 6439 - DNA, 20 bp, Artificial Sequence
  chemically synthesized
acatcctttactttttttgg

SEQ ID NO: 6440 - DNA, 20 bp, Artificial Sequence
  chemically synthesized
catcctttactttttttgga

SEQ ID NO: 6441 - DNA, 20 bp, Artificial Sequence
  chemically synthesized
tactttttttggaaggcctt

SEQ ID NO: 6442 - DNA, 20 bp, Artificial Sequence
  chemically synthesized
actttttttggaaggccttc

SEQ ID NO: 6443 - DNA, 20 bp, Artificial Sequence
  chemically synthesized
ttttggaaggccttcaggtc

SEQ ID NO: 6444 - DNA, 20 bp, Artificial Sequence
  chemically synthesized
tctgaactatcaccttacta

SEQ ID NO: 6445 - DNA, 20 bp, Artificial Sequence
  chemically synthesized
ctgaactatcaccttactat

SEQ ID NO: 6446 - DNA, 20 bp, Artificial Sequence
  chemically synthesized
ataggcacatatttccccca

SEQ ID NO: 6447 - DNA, 20 bp, Artificial Sequence
  chemically synthesized
taggcacatatttcccccaa

SEQ ID NO: 6448 - DNA, 20 bp, Artificial Sequence
  chemically synthesized
catatttcccccaaaggact

SEQ ID NO: 6449 - DNA, 20 bp, Artificial Sequence
  chemically synthesized
atttcccccaaaggactcag

SEQ ID NO: 6450 - DNA, 20 bp, Artificial Sequence
  chemically synthesized
ttctccctttgctgatgatc

SEQ ID NO: 6451 - DNA, 20 bp, Artificial Sequence
  chemically synthesized
tccctttgctgatgatccag

SEQ ID NO: 6452 - DNA, 20 bp, Artificial Sequence
  chemically synthesized
cctttgctgatgatccagta

SEQ ID NO: 6453 - DNA, 20 bp, Artificial Sequence
  chemically synthesized
tccagtagagaaatgatcaa

SEQ ID NO: 6454 - DNA, 20 bp, Artificial Sequence
  chemically synthesized
ccagtagagaaatgatcaaa

SEQ ID NO: 6455 - DNA, 20 bp, Artificial Sequence
  chemically synthesized
acattgtcctaaatgaaacc

SEQ ID NO: 6456 - DNA, 20 bp, Artificial Sequence
  chemically synthesized
atgaaaccaagcttcctctg

SEQ ID NO: 6457 - DNA, 20 bp, Artificial Sequence
  chemically synthesized
tgaaaccaagcttcctctgc

SEQ ID NO: 6458 - DNA, 20 bp, Artificial Sequence
  chemically synthesized
accaagcttcctctgcagga

SEQ ID NO: 6459 - DNA, 20 bp, Artificial Sequence
  chemically synthesized
aagcttcctctgcaggatgg

SEQ ID NO: 6460 - DNA, 20 bp, Artificial Sequence
  chemically synthesized
ttcctctgcaggatggaagt

SEQ ID NO: 6461 - DNA, 20 bp, Artificial Sequence
  chemically synthesized
tctgcaggatggaagtgagc

SEQ ID NO: 6462 - DNA, 20 bp, Artificial Sequence
  chemically synthesized
ctgcaggatggaagtgagcc

SEQ ID NO: 6463 - DNA, 20 bp, Artificial Sequence
  chemically synthesized
gatggaagtgagccaggtga

SEQ ID NO: 6464 - DNA, 20 bp, Artificial Sequence
  chemically synthesized
ggaagtgagccaggtgatag

SEQ ID NO: 6465 - DNA, 20 bp, Artificial Sequence
  chemically synthesized
gaagtgagccaggtgataga

SEQ ID NO: 6466 - DNA, 20 bp, Artificial Sequence
  chemically synthesized
aagtgagccaggtgatagaa

SEQ ID NO: 6467 - DNA, 20 bp, Artificial Sequence
  chemically synthesized
agtgagccaggtgatagaag

SEQ ID NO: 6468 - DNA, 20 bp, Artificial Sequence
  chemically synthesized
gtgagccaggtgatagaagg

SEQ ID NO: 6469 - DNA, 20 bp, Artificial Sequence
  chemically synthesized
gagccaggtgatagaagggg

SEQ ID NO: 6470 - DNA, 20 bp, Artificial Sequence
  chemically synthesized
aggtgatagaagggggagcc

SEQ ID NO: 6471 - DNA, 20 bp, Artificial Sequence
  chemically synthesized
gcctggacccaccgcttcat

SEQ ID NO: 6472 - DNA, 20 bp, Artificial Sequence
  chemically synthesized
gacccaccgcttcattggcc

SEQ ID NO: 6473 - DNA, 20 bp, Artificial Sequence
  chemically synthesized
acccaccgcttcattggccg

SEQ ID NO: 6474 - DNA, 20 bp, Artificial Sequence
  chemically synthesized
tggccgaggatgaccccata

SEQ ID NO: 6475 - DNA, 20 bp, Artificial Sequence
  chemically synthesized
ggccgaggatgaccccataa

SEQ ID NO: 6476 - DNA, 20 bp, Artificial Sequence
  chemically synthesized
gaggatgaccccataaaggt

SEQ ID NO: 6477 - DNA, 20 bp, Artificial Sequence
  chemically synthesized
aggatgaccccataaaggtc

SEQ ID NO: 6478 - DNA, 20 bp, Artificial Sequence
  chemically synthesized
ggatgaccccataaaggtca

SEQ ID NO: 6479 - DNA, 20 bp, Artificial Sequence
  chemically synthesized
ccataaaggtcagggtgttg

SEQ ID NO: 6480 - DNA, 20 bp, Artificial Sequence
  chemically synthesized
ataaaggtcagggtgttgca

SEQ ID NO: 6481 - DNA, 20 bp, Artificial Sequence
  chemically synthesized
gattgctatgcacaaaatcc

SEQ ID NO: 6482 - DNA, 20 bp, Artificial Sequence
  chemically synthesized
ttgctatgcacaaaatccaa

SEQ ID NO: 6483 - DNA, 20 bp, Artificial Sequence
  chemically synthesized
tgctatgcacaaaatccaag

SEQ ID NO: 6484 - DNA, 20 bp, Artificial Sequence
  chemically synthesized
cacaaaatccaagaggccca

SEQ ID NO: 6485 - DNA, 20 bp, Artificial Sequence
  chemically synthesized
caaaatccaagaggcccatg

SEQ ID NO: 6486 - DNA, 20 bp, Artificial Sequence
  chemically synthesized
aaaatccaagaggcccatgg

SEQ ID NO: 6487 - DNA, 20 bp, Artificial Sequence
  chemically synthesized
atccaagaggcccatggagg

SEQ ID NO: 6488 - DNA, 20 bp, Artificial Sequence
  chemically synthesized
tccaagaggcccatggaggt

SEQ ID NO: 6489 - DNA, 20 bp, Artificial Sequence
  chemically synthesized
ccaagaggcccatggaggtg

SEQ ID NO: 6490 - DNA, 20 bp, Artificial Sequence
  chemically synthesized
aagaggcccatggaggtggg

SEQ ID NO: 6491 - DNA, 20 bp, Artificial Sequence
  chemically synthesized
gcccatggaggtggggagat

SEQ ID NO: 6492 - DNA, 20 bp, Artificial Sequence
  chemically synthesized
cccatggaggtggggagatg

SEQ ID NO: 6493 - DNA, 20 bp, Artificial Sequence
  chemically synthesized
ccatggaggtggggagatga

SEQ ID NO: 6494 - DNA, 20 bp, Artificial Sequence
  chemically synthesized
ggggagatgagggacccacc

SEQ ID NO: 6495 - DNA, 20 bp, Artificial Sequence
  chemically synthesized
gagatgagggacccacctgg

SEQ ID NO: 6496 - DNA, 20 bp, Artificial Sequence
  chemically synthesized
gacccacctggcagaccctc

SEQ ID NO: 6497 - DNA, 20 bp, Artificial Sequence
  chemically synthesized
cccacctggcagaccctcaa

SEQ ID NO: 6498 - DNA, 20 bp, Artificial Sequence
  chemically synthesized
acctggcagaccctcaagag

SEQ ID NO: 6499 - DNA, 20 bp, Artificial Sequence
  chemically synthesized
cctggcagaccctcaagagc

SEQ ID NO: 6500 - DNA, 20 bp, Artificial Sequence
  chemically synthesized
ctggcagaccctcaagagca

SEQ ID NO: 6501 - DNA, 20 bp, Artificial Sequence
  chemically synthesized
tggcagaccctcaagagcag

SEQ ID NO: 6502 - DNA, 20 bp, Artificial Sequence
  chemically synthesized
aagagcaggggtcttctctt

SEQ ID NO: 6503 - DNA, 20 bp, Artificial Sequence
  chemically synthesized
agagcaggggtcttctcttt

SEQ ID NO: 6504 - DNA, 20 bp, Artificial Sequence
  chemically synthesized
gagcaggggtcttctctttg

SEQ ID NO: 6505 - DNA, 20 bp, Artificial Sequence
  chemically synthesized
agcaggggtcttctctttgg

SEQ ID NO: 6506 - DNA, 20 bp, Artificial Sequence
  chemically synthesized
caggggtcttctctttgggg

SEQ ID NO: 6507 - DNA, 20 bp, Artificial Sequence
  chemically synthesized
aggggtcttctctttggggg

SEQ ID NO: 6508 - DNA, 20 bp, Artificial Sequence
  chemically synthesized
ttgggggaggacatcactct

SEQ ID NO: 6509 - DNA, 20 bp, Artificial Sequence
  chemically synthesized
ggggaggacatcactcttag

SEQ ID NO: 6510 - DNA, 20 bp, Artificial Sequence
  chemically synthesized
gggaggacatcactcttagc

SEQ ID NO: 6511 - DNA, 20 bp, Artificial Sequence
  chemically synthesized
ggaggacatcactcttagca

SEQ ID NO: 6512 - DNA, 20 bp, Artificial Sequence
  chemically synthesized
gacatcactcttagcagggc

SEQ ID NO: 6513 - DNA, 20 bp, Artificial Sequence
  chemically synthesized
acatcactcttagcagggct

SEQ ID NO: 6514 - DNA, 20 bp, Artificial Sequence
  chemically synthesized
catcactcttagcagggctg

SEQ ID NO: 6515 - DNA, 20 bp, Artificial Sequence
  chemically synthesized
actcttagcagggctggggt

SEQ ID NO: 6516 - DNA, 20 bp, Artificial Sequence
  chemically synthesized
gcagggctggggtgagtcaa

SEQ ID NO: 6517 - DNA, 20 bp, Artificial Sequence
  chemically synthesized
gctggggtgagtcaaaagtc

SEQ ID NO: 6518 - DNA, 20 bp, Artificial Sequence
  chemically synthesized
ctggggtgagtcaaaagtct

SEQ ID NO: 6519 - DNA, 20 bp, Artificial Sequence
  chemically synthesized
ggggtgagtcaaaagtctgg

SEQ ID NO: 6520 - DNA, 20 bp, Artificial Sequence
  chemically synthesized
gagtcaaaagtctgggagaa

SEQ ID NO: 6521 - DNA, 20 bp, Artificial Sequence
  chemically synthesized
gtcaaaagtctgggagaatg

SEQ ID NO: 6522 - DNA, 20 bp, Artificial Sequence
  chemically synthesized
tcaaaagtctgggagaatgg

SEQ ID NO: 6523 - DNA, 20 bp, Artificial Sequence
  chemically synthesized
agtctgggagaatggaggtg

SEQ ID NO: 6524 - DNA, 20 bp, Artificial Sequence
  chemically synthesized
tctgggagaatggaggtgtg

SEQ ID NO: 6525 - DNA, 20 bp, Artificial Sequence
  chemically synthesized
ctgggagaatggaggtgtgg

SEQ ID NO: 6526 - DNA, 20 bp, Artificial Sequence
  chemically synthesized
tgggagaatggaggtgtgga

SEQ ID NO: 6527 - DNA, 20 bp, Artificial Sequence
  chemically synthesized
gggagaatggaggtgtggag

SEQ ID NO: 6528 - DNA, 20 bp, Artificial Sequence
  chemically synthesized
ggaggtgtggaggggataac

SEQ ID NO: 6529 - DNA, 20 bp, Artificial Sequence
  chemically synthesized
gaggtgtggaggggataact

SEQ ID NO: 6530 - DNA, 20 bp, Artificial Sequence
  chemically synthesized
tgtggaggggataactgggt

SEQ ID NO: 6531 - DNA, 20 bp, Artificial Sequence
  chemically synthesized
ggataactgggtcagacccc

SEQ ID NO: 6532 - DNA, 20 bp, Artificial Sequence
  chemically synthesized
taactgggtcagaccccaag

SEQ ID NO: 6533 - DNA, 20 bp, Artificial Sequence
  chemically synthesized
aactgggtcagaccccaagc

SEQ ID NO: 6534 - DNA, 20 bp, Artificial Sequence
  chemically synthesized
tgggtcagaccccaagcagg

SEQ ID NO: 6535 - DNA, 20 bp, Artificial Sequence
  chemically synthesized
gggtcagaccccaagcagga

SEQ ID NO: 6536 - DNA, 20 bp, Artificial Sequence
  chemically synthesized
ggtcagaccccaagcaggaa

SEQ ID NO: 6537 - DNA, 20 bp, Artificial Sequence
  chemically synthesized
aagcaggaagggcctctatg

SEQ ID NO: 6538 - DNA, 20 bp, Artificial Sequence
  chemically synthesized
aggaagggcctctatgtaga

SEQ ID NO: 6539 - DNA, 20 bp, Artificial Sequence
  chemically synthesized
ggaagggcctctatgtagac

SEQ ID NO: 6540 - DNA, 20 bp, Artificial Sequence
  chemically synthesized
cctctatgtagacgggtgtg

SEQ ID NO: 6541 - DNA, 20 bp, Artificial Sequence
  chemically synthesized
agacgggtgtgtggctcctt

SEQ ID NO: 6542 - DNA, 20 bp, Artificial Sequence
  chemically synthesized
gacgggtgtgtggctcctta

SEQ ID NO: 6543 - DNA, 20 bp, Artificial Sequence
  chemically synthesized
tgtggctccttaaggtgacc

SEQ ID NO: 6544 - DNA, 20 bp, Artificial Sequence
  chemically synthesized
ggctccttaaggtgacccag

SEQ ID NO: 6545 - DNA, 20 bp, Artificial Sequence
  chemically synthesized
ttaaggtgacccagcagccc

SEQ ID NO: 6546 - DNA, 20 bp, Artificial Sequence
  chemically synthesized
taaggtgacccagcagccct

SEQ ID NO: 6547 - DNA, 20 bp, Artificial Sequence
  chemically synthesized
tgacccagcagccctgggca

SEQ ID NO: 6548 - DNA, 20 bp, Artificial Sequence
  chemically synthesized
cccagcagccctgggcacag

SEQ ID NO: 6549 - DNA, 20 bp, Artificial Sequence
  chemically synthesized
agcagccctgggcacagaag

SEQ ID NO: 6550 - DNA, 20 bp, Artificial Sequence
  chemically synthesized
ctgggcacagaagtggtgcg

SEQ ID NO: 6551 - DNA, 20 bp, Artificial Sequence
  chemically synthesized
gggcacagaagtggtgcgtg

SEQ ID NO: 6552 - DNA, 20 bp, Artificial Sequence
  chemically synthesized
gtgcgtggagataatgccaa

SEQ ID NO: 6553 - DNA, 20 bp, Artificial Sequence
  chemically synthesized
ataatgccaacagtgataac

SEQ ID NO: 6554 - DNA, 20 bp, Artificial Sequence
  chemically synthesized
atgccaacagtgataaccag

SEQ ID NO: 6555 - DNA, 20 bp, Artificial Sequence
  chemically synthesized
tgccaacagtgataaccagc

SEQ ID NO: 6556 - DNA, 20 bp, Artificial Sequence
  chemically synthesized
gccaacagtgataaccagca

SEQ ID NO: 6557 - DNA, 20 bp, Artificial Sequence
  chemically synthesized
tgataaccagcagggcctgt

SEQ ID NO: 6558 - DNA, 20 bp, Artificial Sequence
  chemically synthesized
taaccagcagggcctgtcag

SEQ ID NO: 6559 - DNA, 20 bp, Artificial Sequence
  chemically synthesized
accagcagggcctgtcagaa

SEQ ID NO: 6560 - DNA, 20 bp, Artificial Sequence
  chemically synthesized
ccagcagggcctgtcagaag

SEQ ID NO: 6561 - DNA, 20 bp, Artificial Sequence
  chemically synthesized
gggcctgtcagaagaggccc

SEQ ID NO: 6562 - DNA, 20 bp, Artificial Sequence
  chemically synthesized
agaagaggccctggacactg

SEQ ID NO: 6563 - DNA, 20 bp, Artificial Sequence
  chemically synthesized
gaagaggccctggacactga

SEQ ID NO: 6564 - DNA, 20 bp, Artificial Sequence
  chemically synthesized
aggccctggacactgaaggc

SEQ ID NO: 6565 - DNA, 20 bp, Artificial Sequence
  chemically synthesized
ggccctggacactgaaggct

SEQ ID NO: 6566 - DNA, 20 bp, Artificial Sequence
  chemically synthesized
tggacactgaaggctgggca

SEQ ID NO: 6567 - DNA, 20 bp, Artificial Sequence
  chemically synthesized
ctgaaggctgggcacagcct

SEQ ID NO: 6568 - DNA, 20 bp, Artificial Sequence
  chemically synthesized
tgaaggctgggcacagcctt

SEQ ID NO: 6569 - DNA, 20 bp, Artificial Sequence
  chemically synthesized
gaaggctgggcacagccttg

SEQ ID NO: 6570 - DNA, 20 bp, Artificial Sequence
  chemically synthesized
acagccttggggaccgctca

SEQ ID NO: 6571 - DNA, 20 bp, Artificial Sequence
  chemically synthesized
cagccttggggaccgctcac

SEQ ID NO: 6572 - DNA, 20 bp, Artificial Sequence
  chemically synthesized
gggaccgctcacaggacatg

SEQ ID NO: 6573 - DNA, 20 bp, Artificial Sequence
  chemically synthesized
accgctcacaggacatgcag

SEQ ID NO: 6574 - DNA, 20 bp, Artificial Sequence
  chemically synthesized
ctccctaccgcgacccctat

SEQ ID NO: 6575 - DNA, 20 bp, Artificial Sequence
  chemically synthesized
gacccctatcagtgccgacc

SEQ ID NO: 6576 - DNA, 20 bp, Artificial Sequence
  chemically synthesized
tcagtgccgaccaagcacac

SEQ ID NO: 6577 - DNA, 20 bp, Artificial Sequence
  chemically synthesized
aagcacacaagatgcacacc

SEQ ID NO: 6578 - DNA, 20 bp, Artificial Sequence
  chemically synthesized
agcacacaagatgcacaccc

SEQ ID NO: 6579 - DNA, 20 bp, Artificial Sequence
  chemically synthesized
cacaagatgcacacccaggc

SEQ ID NO: 6580 - DNA, 20 bp, Artificial Sequence
  chemically synthesized
acaagatgcacacccaggct

SEQ ID NO: 6581 - DNA, 20 bp, Artificial Sequence
  chemically synthesized
gatgcacacccaggctgggc

SEQ ID NO: 6582 - DNA, 20 bp, Artificial Sequence
  chemically synthesized
cacacccaggctgggctgga

SEQ ID NO: 6583 - DNA, 20 bp, Artificial Sequence
  chemically synthesized
cacccaggctgggctggaca

SEQ ID NO: 6584 - DNA, 20 bp, Artificial Sequence
  chemically synthesized
acccaggctgggctggacag

SEQ ID NO: 6585 - DNA, 20 bp, Artificial Sequence
  chemically synthesized
cccaggctgggctggacaga

SEQ ID NO: 6586 - DNA, 20 bp, Artificial Sequence
  chemically synthesized
ccaggctgggctggacagag

SEQ ID NO: 6587 - DNA, 20 bp, Artificial Sequence
  chemically synthesized
gctggacagaggggtcccac

SEQ ID NO: 6588 - DNA, 20 bp, Artificial Sequence
  chemically synthesized
agaggggtcccacaagatca

SEQ ID NO: 6589 - DNA, 20 bp, Artificial Sequence
  chemically synthesized
gaggggtcccacaagatcac

SEQ ID NO: 6590 - DNA, 20 bp, Artificial Sequence
  chemically synthesized
aggggtcccacaagatcaca

SEQ ID NO: 6591 - DNA, 20 bp, Artificial Sequence
  chemically synthesized
aagatcacagggtgtgccct

SEQ ID NO: 6592 - DNA, 20 bp, Artificial Sequence
  chemically synthesized
atcacagggtgtgccctgag

SEQ ID NO: 6593 - DNA, 20 bp, Artificial Sequence
  chemically synthesized
tcacagggtgtgccctgaga

SEQ ID NO: 6594 - DNA, 20 bp, Artificial Sequence
  chemically synthesized
cagggtgtgccctgagaagg

SEQ ID NO: 6595 - DNA, 20 bp, Artificial Sequence
  chemically synthesized
agggtgtgccctgagaaggt

SEQ ID NO: 6596 - DNA, 20 bp, Artificial Sequence
  chemically synthesized
gggtgtgccctgagaaggtg

SEQ ID NO: 6597 - DNA, 20 bp, Artificial Sequence
  chemically synthesized
gtgtgccctgagaaggtggg

SEQ ID NO: 6598 - DNA, 20 bp, Artificial Sequence
  chemically synthesized
ctgagaaggtggggagctca

SEQ ID NO: 6599 - DNA, 20 bp, Artificial Sequence
  chemically synthesized
gtggggagctcacagcctcc

SEQ ID NO: 6600 - DNA, 20 bp, Artificial Sequence
  chemically synthesized
ctccaagcattgcatcatcc

SEQ ID NO: 6601 - DNA, 20 bp, Artificial Sequence
  chemically synthesized
gcattgcatcatcctggtac

SEQ ID NO: 6602 - DNA, 20 bp, Artificial Sequence
  chemically synthesized
cattgcatcatcctggtacc

SEQ ID NO: 6603 - DNA, 20 bp, Artificial Sequence
  chemically synthesized
tgcatcatcctggtaccagg

SEQ ID NO: 6604 - DNA, 20 bp, Artificial Sequence
  chemically synthesized
gcatcatcctggtaccagga

SEQ ID NO: 6605 - DNA, 20 bp, Artificial Sequence
  chemically synthesized
tcctggtaccaggaaggcaa

SEQ ID NO: 6606 - DNA, 20 bp, Artificial Sequence
  chemically synthesized
cctggtaccaggaaggcaat

SEQ ID NO: 6607 - DNA, 20 bp, Artificial Sequence
  chemically synthesized
cccatacccacttcccttcc

SEQ ID NO: 6608 - DNA, 20 bp, Artificial Sequence
  chemically synthesized
cccacttcccttcctagaat

SEQ ID NO: 6609 - DNA, 20 bp, Artificial Sequence
  chemically synthesized
ttcccttcctagaattggcc

SEQ ID NO: 6610 - DNA, 20 bp, Artificial Sequence
  chemically synthesized
tcccttcctagaattggcct

SEQ ID NO: 6611 - DNA, 20 bp, Artificial Sequence
  chemically synthesized
ggcctgggacattcattatt

SEQ ID NO: 6612 - DNA, 20 bp, Artificial Sequence
  chemically synthesized
attcattatttagccacctc

SEQ ID NO: 6613 - DNA, 20 bp, Artificial Sequence
  chemically synthesized
atttgtttttcaaattttaa

SEQ ID NO: 6614 - DNA, 20 bp, Artificial Sequence
  chemically synthesized
tttcaaattttaatagcaaa

SEQ ID NO: 6615 - DNA, 20 bp, Artificial Sequence
  chemically synthesized
ttcaaattttaatagcaaat

SEQ ID NO: 6616 - DNA, 20 bp, Artificial Sequence
  chemically synthesized
attttaatagcaaataggct

SEQ ID NO: 6617 - DNA, 20 bp, Artificial Sequence
  chemically synthesized
agcaaataggcttagtgtgc

SEQ ID NO: 6618 - DNA, 20 bp, Artificial Sequence
  chemically synthesized
gcaaataggcttagtgtgct

SEQ ID NO: 6619 - DNA, 20 bp, Artificial Sequence
  chemically synthesized
aataggcttagtgtgctggg

SEQ ID NO: 6620 - DNA, 20 bp, Artificial Sequence
  chemically synthesized
taggcttagtgtgctgggca

SEQ ID NO: 6621 - DNA, 20 bp, Artificial Sequence
  chemically synthesized
ttagtgtgctgggcagagct

SEQ ID NO: 6622 - DNA, 20 bp, Artificial Sequence
  chemically synthesized
gtgtgctgggcagagctgag

SEQ ID NO: 6623 - DNA, 20 bp, Artificial Sequence
  chemically synthesized
gtgctgggcagagctgagca

SEQ ID NO: 6624 - DNA, 20 bp, Artificial Sequence
  chemically synthesized
tgctgggcagagctgagcag

SEQ ID NO: 6625 - DNA, 20 bp, Artificial Sequence
  chemically synthesized
acccctctacctactcacat

SEQ ID NO: 6626 - DNA, 20 bp, Artificial Sequence
  chemically synthesized
tctacctactcacataagat

SEQ ID NO: 6627 - DNA, 20 bp, Artificial Sequence
  chemically synthesized
ctactcacataagatcagta

SEQ ID NO: 6628 - DNA, 20 bp, Artificial Sequence
  chemically synthesized
actcacataagatcagtaaa

SEQ ID NO: 6629 - DNA, 20 bp, Artificial Sequence
  chemically synthesized
cacataagatcagtaaagag

SEQ ID NO: 6630 - DNA, 20 bp, Artificial Sequence
  chemically synthesized
acataagatcagtaaagaga

SEQ ID NO: 6631 - DNA, 20 bp, Artificial Sequence
  chemically synthesized
taagatcagtaaagagaagg

SEQ ID NO: 6632 - DNA, 20 bp, Artificial Sequence
  chemically synthesized
gatcagtaaagagaaggaag

SEQ ID NO: 6633 - DNA, 20 bp, Artificial Sequence
  chemically synthesized
atcagtaaagagaaggaagc

SEQ ID NO: 6634 - DNA, 20 bp, Artificial Sequence
  chemically synthesized
agtaaagagaaggaagcagg

SEQ ID NO: 6635 - DNA, 20 bp, Artificial Sequence
  chemically synthesized
agagaaggaagcaggcagat

SEQ ID NO: 6636 - DNA, 20 bp, Artificial Sequence
  chemically synthesized
gagaaggaagcaggcagatg

SEQ ID NO: 6637 - DNA, 20 bp, Artificial Sequence
  chemically synthesized
aagcaggcagatgaggtgac

SEQ ID NO: 6638 - DNA, 20 bp, Artificial Sequence
  chemically synthesized
agcaggcagatgaggtgaca

SEQ ID NO: 6639 - DNA, 20 bp, Artificial Sequence
  chemically synthesized
gcaggcagatgaggtgacaa

SEQ ID NO: 6640 - DNA, 20 bp, Artificial Sequence
  chemically synthesized
caggcagatgaggtgacaag

SEQ ID NO: 6641 - DNA, 20 bp, Artificial Sequence
  chemically synthesized
ggcagatgaggtgacaaggg

SEQ ID NO: 6642 - DNA, 20 bp, Artificial Sequence
  chemically synthesized
gaggtgacaaggggagaaac

SEQ ID NO: 6643 - DNA, 20 bp, Artificial Sequence
  chemically synthesized
tgacaaggggagaaaccagt

SEQ ID NO: 6644 - DNA, 20 bp, Artificial Sequence
  chemically synthesized
gacaaggggagaaaccagtg

SEQ ID NO: 6645 - DNA, 20 bp, Artificial Sequence
  chemically synthesized
gaaaccagtgaggtcatcta

SEQ ID NO: 6646 - DNA, 20 bp, Artificial Sequence
  chemically synthesized
aaaccagtgaggtcatctat

SEQ ID NO: 6647 - DNA, 20 bp, Artificial Sequence
  chemically synthesized
gtgaggtcatctataggtcc

SEQ ID NO: 6648 - DNA, 20 bp, Artificial Sequence
  chemically synthesized
tctataggtccaagttcgta

SEQ ID NO: 6649 - DNA, 20 bp, Artificial Sequence
  chemically synthesized
ggtccaagttcgtacagacc

SEQ ID NO: 6650 - DNA, 20 bp, Artificial Sequence
  chemically synthesized
caagttcgtacagacccagc

SEQ ID NO: 6651 - DNA, 20 bp, Artificial Sequence
  chemically synthesized
tacagacccagccagactgc

SEQ ID NO: 6652 - DNA, 20 bp, Artificial Sequence
  chemically synthesized
agccagactgccagttctct

SEQ ID NO: 6653 - DNA, 20 bp, Artificial Sequence
  chemically synthesized
gccagactgccagttctctg

SEQ ID NO: 6654 - DNA, 20 bp, Artificial Sequence
  chemically synthesized
cagactgccagttctctgag

SEQ ID NO: 6655 - DNA, 20 bp, Artificial Sequence
  chemically synthesized
ctgccagttctctgaggagc

SEQ ID NO: 6656 - DNA, 20 bp, Artificial Sequence
  chemically synthesized
gccagttctctgaggagcta

SEQ ID NO: 6657 - DNA, 20 bp, Artificial Sequence
  chemically synthesized
tctgaggagctagagacttg

SEQ ID NO: 6658 - DNA, 20 bp, Artificial Sequence
  chemically synthesized
gagctagagacttgtggctt

SEQ ID NO: 6659 - DNA, 20 bp, Artificial Sequence
  chemically synthesized
agctagagacttgtggctta

SEQ ID NO: 6660 - DNA, 20 bp, Artificial Sequence
  chemically synthesized
tagagacttgtggcttaagg

SEQ ID NO: 6661 - DNA, 20 bp, Artificial Sequence
  chemically synthesized
gcttaaggaagcctctctga

SEQ ID NO: 6662 - DNA, 20 bp, Artificial Sequence
  chemically synthesized
ctgtaaatcttgatcaaact

SEQ ID NO: 6663 - DNA, 20 bp, Artificial Sequence
  chemically synthesized
agatgactgtccaactcatc

SEQ ID NO: 6664 - DNA, 20 bp, Artificial Sequence
  chemically synthesized
cagaaactacgtttgtctaa

SEQ ID NO: 6665 - DNA, 20 bp, Artificial Sequence
  chemically synthesized
actacgtttgtctaatagaa

SEQ ID NO: 6666 - DNA, 20 bp, Artificial Sequence
  chemically synthesized
ctacgtttgtctaatagaac

SEQ ID NO: 6667 - DNA, 20 bp, Artificial Sequence
  chemically synthesized
cgtttgtctaatagaacagg

SEQ ID NO: 6668 - DNA, 20 bp, Artificial Sequence
  chemically synthesized
ttgtctaatagaacaggaag

SEQ ID NO: 6669 - DNA, 20 bp, Artificial Sequence
  chemically synthesized
tgtctaatagaacaggaagc

SEQ ID NO: 6670 - DNA, 20 bp, Artificial Sequence
  chemically synthesized
ctaatagaacaggaagcagg

SEQ ID NO: 6671 - DNA, 20 bp, Artificial Sequence
  chemically synthesized
atagaacaggaagcaggtgg

SEQ ID NO: 6672 - DNA, 20 bp, Artificial Sequence
  chemically synthesized
gaacaggaagcaggtggtgg

SEQ ID NO: 6673 - DNA, 20 bp, Artificial Sequence
  chemically synthesized
caggaagcaggtggtggtgg

SEQ ID NO: 6674 - DNA, 20 bp, Artificial Sequence
  chemically synthesized
aggaagcaggtggtggtggt

SEQ ID NO: 6675 - DNA, 20 bp, Artificial Sequence
  chemically synthesized
aagcaggtggtggtggtggg

SEQ ID NO: 6676 - DNA, 20 bp, Artificial Sequence
  chemically synthesized
caggtggtggtggtgggtgg

SEQ ID NO: 6677 - DNA, 20 bp, Artificial Sequence
  chemically synthesized
aggtggtggtggtgggtggt

SEQ ID NO: 6678 - DNA, 20 bp, Artificial Sequence
  chemically synthesized
ggtggtggtggtgggtggtg

SEQ ID NO: 6679 - DNA, 20 bp, Artificial Sequence
  chemically synthesized
gtggtggtggtgggtggtgg

SEQ ID NO: 6680 - DNA, 20 bp, Artificial Sequence
  chemically synthesized
tggtggtggtgggtggtggg

SEQ ID NO: 6681 - DNA, 20 bp, Artificial Sequence
  chemically synthesized
ggtggtggtgggtggtgggg

SEQ ID NO: 6682 - DNA, 20 bp, Artificial Sequence
  chemically synthesized
ggtggtgggggggcattgat

SEQ ID NO: 6683 - DNA, 20 bp, Artificial Sequence
  chemically synthesized
tggtgggggggcattgatga

SEQ ID NO: 6684 - DNA, 20 bp, Artificial Sequence
  chemically synthesized
ggtgggggggcattgatgag

SEQ ID NO: 6685 - DNA, 20 bp, Artificial Sequence
  chemically synthesized
gggggggcattgatgagagg

SEQ ID NO: 6686 - DNA, 20 bp, Artificial Sequence
  chemically synthesized
ggggggcattgatgagaggc

SEQ ID NO: 6687 - DNA, 20 bp, Artificial Sequence
  chemically synthesized
gggggcattgatgagaggca

SEQ ID NO: 6688 - DNA, 20 bp, Artificial Sequence
  chemically synthesized
gcattgatgagaggcagggc

SEQ ID NO: 6689 - DNA, 20 bp, Artificial Sequence
  chemically synthesized
ccactgattctgtccccaca

SEQ ID NO: 6690 - DNA, 20 bp, Artificial Sequence
  chemically synthesized
cactgattctgtccccacac

SEQ ID NO: 6691 - DNA, 20 bp, Artificial Sequence
  chemically synthesized
tgtccccacacaggcatcca

SEQ ID NO: 6692 - DNA, 20 bp, Artificial Sequence
  chemically synthesized
gtccccacacaggcatccaa

SEQ ID NO: 6693 - DNA, 20 bp, Artificial Sequence
  chemically synthesized
tccccacacaggcatccaaa

SEQ ID NO: 6694 - DNA, 20 bp, Artificial Sequence
  chemically synthesized
ccacacaggcatccaaaggg

SEQ ID NO: 6695 - DNA, 20 bp, Artificial Sequence
  chemically synthesized
atccaaagggaagaatgcta

SEQ ID NO: 6696 - DNA, 20 bp, Artificial Sequence
  chemically synthesized
agggaagaatgctacagcta

SEQ ID NO: 6697 - DNA, 20 bp, Artificial Sequence
  chemically synthesized
agctacagtccatttctcgc

SEQ ID NO: 6698 - DNA, 20 bp, Artificial Sequence
  chemically synthesized
ccatttctcgctggcttttc

SEQ ID NO: 6699 - DNA, 20 bp, Artificial Sequence
  chemically synthesized
catttctcgctggcttttct

SEQ ID NO: 6700 - DNA, 20 bp, Artificial Sequence
  chemically synthesized
tttctcgctggcttttctgg

SEQ ID NO: 6701 - DNA, 20 bp, Artificial Sequence
  chemically synthesized
tcaccctacaatgtgttccc

SEQ ID NO: 6702 - DNA, 20 bp, Artificial Sequence
  chemically synthesized
acaatgtgttccccagtatt

SEQ ID NO: 6703 - DNA, 20 bp, Artificial Sequence
  chemically synthesized
caatgtgttccccagtattc

SEQ ID NO: 6704 - DNA, 20 bp, Artificial Sequence
  chemically synthesized
ttccccagtattcaggtttc

SEQ ID NO: 6705 - DNA, 20 bp, Artificial Sequence
  chemically synthesized
tccccagtattcaggtttct

SEQ ID NO: 6706 - DNA, 20 bp, Artificial Sequence
  chemically synthesized
tgggctgccattatcttctc

SEQ ID NO: 6707 - DNA, 20 bp, Artificial Sequence
  chemically synthesized
gccattatcttctctggtct

SEQ ID NO: 6708 - DNA, 20 bp, Artificial Sequence
  chemically synthesized
ccattatcttctctggtctc

SEQ ID NO: 6709 - DNA, 20 bp, Artificial Sequence
  chemically synthesized
cattatcttctctggtctcg

SEQ ID NO: 6710 - DNA, 20 bp, Artificial Sequence
  chemically synthesized
cttctctggtctcggggccc

SEQ ID NO: 6711 - DNA, 20 bp, Artificial Sequence
  chemically synthesized
tggtctcggggcccaagcca

SEQ ID NO: 6712 - DNA, 20 bp, Artificial Sequence
  chemically synthesized
gtctcggggcccaagccaaa

SEQ ID NO: 6713 - DNA, 20 bp, Artificial Sequence
  chemically synthesized
cggggcccaagccaaagagc

SEQ ID NO: 6714 - DNA, 20 bp, Artificial Sequence
  chemically synthesized
gggcccaagccaaagagctg

SEQ ID NO: 6715 - DNA, 20 bp, Artificial Sequence
  chemically synthesized
caagccaaagagctggagaa

SEQ ID NO: 6716 - DNA, 20 bp, Artificial Sequence
  chemically synthesized
aagagctggagaacagtatc

SEQ ID NO: 6717 - DNA, 20 bp, Artificial Sequence
  chemically synthesized
tggagaacagtatctggcca

SEQ ID NO: 6718 - DNA, 20 bp, Artificial Sequence
  chemically synthesized
agtatctggccacagaacct

SEQ ID NO: 6719 - DNA, 20 bp, Artificial Sequence
  chemically synthesized
gtatctggccacagaaccta

SEQ ID NO: 6720 - DNA, 20 bp, Artificial Sequence
  chemically synthesized
tggccacagaacctaaggcc

SEQ ID NO: 6721 - DNA, 20 bp, Artificial Sequence
  chemically synthesized
ccacagaacctaaggcctgg

SEQ ID NO: 6722 - DNA, 20 bp, Artificial Sequence
  chemically synthesized
acagaacctaaggcctggta

SEQ ID NO: 6723 - DNA, 20 bp, Artificial Sequence
  chemically synthesized
aacctaaggcctggtagagc

SEQ ID NO: 6724 - DNA, 20 bp, Artificial Sequence
  chemically synthesized
taaggcctggtagagcaaga

SEQ ID NO: 6725 - DNA, 20 bp, Artificial Sequence
  chemically synthesized
agagcaagacagccatgtgc

SEQ ID NO: 6726 - DNA, 20 bp, Artificial Sequence
  chemically synthesized
gagcaagacagccatgtgca

SEQ ID NO: 6727 - DNA, 20 bp, Artificial Sequence
  chemically synthesized
aagacagccatgtgcaaggc

SEQ ID NO: 6728 - DNA, 20 bp, Artificial Sequence
  chemically synthesized
acagccatgtgcaaggcgag

SEQ ID NO: 6729 - DNA, 20 bp, Artificial Sequence
  chemically synthesized
ccatgtgcaaggcgagtgga

SEQ ID NO: 6730 - DNA, 20 bp, Artificial Sequence
  chemically synthesized
gcgcccttccgtcactccca

SEQ ID NO: 6731 - DNA, 20 bp, Artificial Sequence
  chemically synthesized
gcccttccgtcactcccaca

SEQ ID NO: 6732 - DNA, 20 bp, Artificial Sequence
  chemically synthesized
ccgtcactcccacagagctg

SEQ ID NO: 6733 - DNA, 20 bp, Artificial Sequence
  chemically synthesized
cgtcactcccacagagctgc

SEQ ID NO: 6734 - DNA, 20 bp, Artificial Sequence
  chemically synthesized
gtcactcccacagagctgca

SEQ ID NO: 6735 - DNA, 20 bp, Artificial Sequence
  chemically synthesized
tcactcccacagagctgcag

SEQ ID NO: 6736 - DNA, 20 bp, Artificial Sequence
  chemically synthesized
aggggtgtgacgcccctgcc

SEQ ID NO: 6737 - DNA, 20 bp, Artificial Sequence
  chemically synthesized
cctgcccagccatacccttc

SEQ ID NO: 6738 - DNA, 20 bp, Artificial Sequence
  chemically synthesized
ctgcccagccatacccttct

SEQ ID NO: 6739 - DNA, 20 bp, Artificial Sequence
  chemically synthesized
agccatacccttctgggcca

SEQ ID NO: 6740 - DNA, 20 bp, Artificial Sequence
  chemically synthesized
acccttctgggccacagtgc

SEQ ID NO: 6741 - DNA, 20 bp, Artificial Sequence
  chemically synthesized
ccttctgggccacagtgctg

SEQ ID NO: 6742 - DNA, 20 bp, Artificial Sequence
  chemically synthesized
cttctgggccacagtgctgg

SEQ ID NO: 6743 - DNA, 20 bp, Artificial Sequence
  chemically synthesized
ggccacagtgctggaggctg

SEQ ID NO: 6744 - DNA, 20 bp, Artificial Sequence
  chemically synthesized
agtgctggaggctgaagtca

SEQ ID NO: 6745 - DNA, 20 bp, Artificial Sequence
  chemically synthesized
cccatcgtgccttattcctt

SEQ ID NO: 6746 - DNA, 20 bp, Artificial Sequence
  chemically synthesized
ccatcgtgccttattccttc

SEQ ID NO: 6747 - DNA, 20 bp, Artificial Sequence
  chemically synthesized
atcgtgccttattccttcag

SEQ ID NO: 6748 - DNA, 20 bp, Artificial Sequence
  chemically synthesized
tccttcaggagcaatactcc

SEQ ID NO: 6749 - DNA, 20 bp, Artificial Sequence
  chemically synthesized
ccttcaggagcaatactcct

SEQ ID NO: 6750 - DNA, 20 bp, Artificial Sequence
  chemically synthesized
caggagcaatactcctggga

SEQ ID NO: 6751 - DNA, 20 bp, Artificial Sequence
  chemically synthesized
aggagcaatactcctgggaa

SEQ ID NO: 6752 - DNA, 20 bp, Artificial Sequence
  chemically synthesized
gcacattctgtaactcctct

SEQ ID NO: 6753 - DNA, 20 bp, Artificial Sequence
  chemically synthesized
ctctaagtgatatttcttcc

SEQ ID NO: 6754 - DNA, 20 bp, Artificial Sequence
  chemically synthesized
tctaagtgatatttcttccc

SEQ ID NO: 6755 - DNA, 20 bp, Artificial Sequence
  chemically synthesized
ctaagtgatatttcttccca

SEQ ID NO: 6756 - DNA, 20 bp, Artificial Sequence
  chemically synthesized
taagtgatatttcttcccag

SEQ ID NO: 6757 - DNA, 20 bp, Artificial Sequence
  chemically synthesized
atttcttcccaggggcaaaa

SEQ ID NO: 6758 - DNA, 20 bp, Artificial Sequence
  chemically synthesized
tttcttcccaggggcaaaaa

SEQ ID NO: 6759 - DNA, 20 bp, Artificial Sequence
  chemically synthesized
ccaggggcaaaaaaggaaat

SEQ ID NO: 6760 - DNA, 20 bp, Artificial Sequence
  chemically synthesized
aggaaattagccccatttta

SEQ ID NO: 6761 - DNA, 20 bp, Artificial Sequence
  chemically synthesized
ttagccccattttatagata

SEQ ID NO: 6762 - DNA, 20 bp, Artificial Sequence
  chemically synthesized
agccccattttatagataaa

SEQ ID NO: 6763 - DNA, 20 bp, Artificial Sequence
  chemically synthesized
attttatagataaagagcct

SEQ ID NO: 6764 - DNA, 20 bp, Artificial Sequence
  chemically synthesized
ttttatagataaagagcctg

SEQ ID NO: 6765 - DNA, 20 bp, Artificial Sequence
  chemically synthesized
ataaagagcctgaggcccaa

SEQ ID NO: 6766 - DNA, 20 bp, Artificial Sequence
  chemically synthesized
taaagagcctgaggcccaat

SEQ ID NO: 6767 - DNA, 20 bp, Artificial Sequence
  chemically synthesized
aataggctgattgacttgtc

SEQ ID NO: 6768 - DNA, 20 bp, Artificial Sequence
  chemically synthesized
ataggctgattgacttgtcc

SEQ ID NO: 6769 - DNA, 20 bp, Artificial Sequence
  chemically synthesized
taggctgattgacttgtccg

SEQ ID NO: 6770 - DNA, 20 bp, Artificial Sequence
  chemically synthesized
ttgacttgtccggggccacc

SEQ ID NO: 6771 - DNA, 20 bp, Artificial Sequence
  chemically synthesized
cttgtccggggccacctagc

SEQ ID NO: 6772 - DNA, 20 bp, Artificial Sequence
  chemically synthesized
gtccggggccacctagccag

SEQ ID NO: 6773 - DNA, 20 bp, Artificial Sequence
  chemically synthesized
tccggggccacctagccagc

SEQ ID NO: 6774 - DNA, 20 bp, Artificial Sequence
  chemically synthesized
ccacctagccagcaggtgaa

SEQ ID NO: 6775 - DNA, 20 bp, Artificial Sequence
  chemically synthesized
caggtgaaaagactcatgtg

SEQ ID NO: 6776 - DNA, 20 bp, Artificial Sequence
  chemically synthesized
gactcatgtgtagctgactt

SEQ ID NO: 6777 - DNA, 20 bp, Artificial Sequence
  chemically synthesized
ctcatgtgtagctgacttta

SEQ ID NO: 6778 - DNA, 20 bp, Artificial Sequence
  chemically synthesized
tgtagctgactttagagtcc

SEQ ID NO: 6779 - DNA, 20 bp, Artificial Sequence
  chemically synthesized
cttcaacgtcccactttctc

SEQ ID NO: 6780 - DNA, 20 bp, Artificial Sequence
  chemically synthesized
aacgtcccactttctcaaga

SEQ ID NO: 6781 - DNA, 20 bp, Artificial Sequence
  chemically synthesized
tctcaagacagtgtttgcca

SEQ ID NO: 6782 - DNA, 20 bp, Artificial Sequence
  chemically synthesized
ctcaagacagtgtttgccac

SEQ ID NO: 6783 - DNA, 20 bp, Artificial Sequence
  chemically synthesized
agacagtgtttgccacgggc

SEQ ID NO: 6784 - DNA, 20 bp, Artificial Sequence
  chemically synthesized
gacagtgtttgccacgggcc

SEQ ID NO: 6785 - DNA, 20 bp, Artificial Sequence
  chemically synthesized
acagtgtttgccacgggcca

SEQ ID NO: 6786 - DNA, 20 bp, Artificial Sequence
  chemically synthesized
tgtttgccacgggccagggc

SEQ ID NO: 6787 - DNA, 20 bp, Artificial Sequence
  chemically synthesized
cacgggccagggctagcaaa

SEQ ID NO: 6788 - DNA, 20 bp, Artificial Sequence
  chemically synthesized
acctccccaccaaccccatg

SEQ ID NO: 6789 - DNA, 20 bp, Artificial Sequence
  chemically synthesized
cctccccaccaaccccatgc

SEQ ID NO: 6790 - DNA, 20 bp, Artificial Sequence
  chemically synthesized
caccaaccccatgcaggtgt

SEQ ID NO: 6791 - DNA, 20 bp, Artificial Sequence
  chemically synthesized
aaccccatgcaggtgtcagt

SEQ ID NO: 6792 - DNA, 20 bp, Artificial Sequence
  chemically synthesized
accccatgcaggtgtcagtg

SEQ ID NO: 6793 - DNA, 20 bp, Artificial Sequence
  chemically synthesized
atgcaggtgtcagtgaggcc

SEQ ID NO: 6794 - DNA, 20 bp, Artificial Sequence
  chemically synthesized
tgcaggtgtcagtgaggccc

SEQ ID NO: 6795 - DNA, 20 bp, Artificial Sequence
  chemically synthesized
cagtgaggcccaggaacatg

SEQ ID NO: 6796 - DNA, 20 bp, Artificial Sequence
  chemically synthesized
cccaggaacatgaagctccc

SEQ ID NO: 6797 - DNA, 20 bp, Artificial Sequence
  chemically synthesized
acatgaagctccccggacca

SEQ ID NO: 6798 - DNA, 20 bp, Artificial Sequence
  chemically synthesized
catgaagctccccggaccaa

SEQ ID NO: 6799 - DNA, 20 bp, Artificial Sequence
  chemically synthesized
atgaagctccccggaccaaa

SEQ ID NO: 6800 - DNA, 20 bp, Artificial Sequence
  chemically synthesized
tgaagctccccggaccaaag

SEQ ID NO: 6801 - DNA, 20 bp, Artificial Sequence
  chemically synthesized
agctccccggaccaaagggg

SEQ ID NO: 6802 - DNA, 20 bp, Artificial Sequence
  chemically synthesized
ccccggaccaaaggggtgga

SEQ ID NO: 6803 - DNA, 20 bp, Artificial Sequence
  chemically synthesized
caaaggggtggacagcactg

SEQ ID NO: 6804 - DNA, 20 bp, Artificial Sequence
  chemically synthesized
aaaggggtggacagcactga

SEQ ID NO: 6805 - DNA, 20 bp, Artificial Sequence
  chemically synthesized
gaaggaaaccgctcaacctt

SEQ ID NO: 6806 - DNA, 20 bp, Artificial Sequence
  chemically synthesized
ggaaaccgctcaaccttgag

SEQ ID NO: 6807 - DNA, 20 bp, Artificial Sequence
  chemically synthesized
aaaccgctcaaccttgagtg

SEQ ID NO: 6808 - DNA, 20 bp, Artificial Sequence
  chemically synthesized
accgctcaaccttgagtgga

SEQ ID NO: 6809 - DNA, 20 bp, Artificial Sequence
  chemically synthesized
ccgctcaaccttgagtggag

SEQ ID NO: 6810 - DNA, 20 bp, Artificial Sequence
  chemically synthesized
gtggagaggctgctgtgaaa

SEQ ID NO: 6811 - DNA, 20 bp, Artificial Sequence
  chemically synthesized
aggctgctgtgaaacagctc

SEQ ID NO: 6812 - DNA, 20 bp, Artificial Sequence
  chemically synthesized
ggctgctgtgaaacagctct

SEQ ID NO: 6813 - DNA, 20 bp, Artificial Sequence
  chemically synthesized
tgctgtgaaacagctctggg

SEQ ID NO: 6814 - DNA, 20 bp, Artificial Sequence
  chemically synthesized
aaacagctctgggcagcacc

SEQ ID NO: 6815 - DNA, 20 bp, Artificial Sequence
  chemically synthesized
aacagctctgggcagcacct

SEQ ID NO: 6816 - DNA, 20 bp, Artificial Sequence
  chemically synthesized
tctgggcagcacctgggcca

SEQ ID NO: 6817 - DNA, 20 bp, Artificial Sequence
  chemically synthesized
agcacctgggccacagcatg

SEQ ID NO: 6818 - DNA, 20 bp, Artificial Sequence
  chemically synthesized
acctgggccacagcatgtgg

SEQ ID NO: 6819 - DNA, 20 bp, Artificial Sequence
  chemically synthesized
cctgggccacagcatgtgga

SEQ ID NO: 6820 - DNA, 20 bp, Artificial Sequence
  chemically synthesized
tgggccacagcatgtggaag

SEQ ID NO: 6821 - DNA, 20 bp, Artificial Sequence
  chemically synthesized
gtggaaggagacatgttcct

SEQ ID NO: 6822 - DNA, 20 bp, Artificial Sequence
  chemically synthesized
agacatgttcctaagctgcc

SEQ ID NO: 6823 - DNA, 20 bp, Artificial Sequence
  chemically synthesized
ttctcttcctcctaatccat

SEQ ID NO: 6824 - DNA, 20 bp, Artificial Sequence
  chemically synthesized
tcctcctaatccataagcac

SEQ ID NO: 6825 - DNA, 20 bp, Artificial Sequence
  chemically synthesized
atccataagcaccagacctc

SEQ ID NO: 6826 - DNA, 20 bp, Artificial Sequence
  chemically synthesized
cagacctcaagccccatgtg

SEQ ID NO: 6827 - DNA, 20 bp, Artificial Sequence
  chemically synthesized
tcaagccccatgtgcagctc

SEQ ID NO: 6828 - DNA, 20 bp, Artificial Sequence
  chemically synthesized
agccccatgtgcagctccgg

SEQ ID NO: 6829 - DNA, 20 bp, Artificial Sequence
  chemically synthesized
tgtgcagctccggaagctgc

SEQ ID NO: 6830 - DNA, 20 bp, Artificial Sequence
  chemically synthesized
tccggaagctgctagacctc

SEQ ID NO: 6831 - DNA, 20 bp, Artificial Sequence
  chemically synthesized
ggaagctgctagacctcaag

SEQ ID NO: 6832 - DNA, 20 bp, Artificial Sequence
  chemically synthesized
gaagctgctagacctcaagc

SEQ ID NO: 6833 - DNA, 20 bp, Artificial Sequence
  chemically synthesized
gctagacctcaagcaggact

SEQ ID NO: 6834 - DNA, 20 bp, Artificial Sequence
  chemically synthesized
cctcaagcaggactaagatt

SEQ ID NO: 6835 - DNA, 20 bp, Artificial Sequence
  chemically synthesized
tcaagcaggactaagattcg

SEQ ID NO: 6836 - DNA, 20 bp, Artificial Sequence
  chemically synthesized
aagcaggactaagattcgga

SEQ ID NO: 6837 - DNA, 20 bp, Artificial Sequence
  chemically synthesized
gcaggactaagattcggaga

SEQ ID NO: 6838 - DNA, 20 bp, Artificial Sequence
  chemically synthesized
ggactaagattcggagagag

SEQ ID NO: 6839 - DNA, 20 bp, Artificial Sequence
  chemically synthesized
ggagagagcagccaccgacc

SEQ ID NO: 6840 - DNA, 20 bp, Artificial Sequence
  chemically synthesized
gccaccgacctggctcctcc

SEQ ID NO: 6841 - DNA, 20 bp, Artificial Sequence
  chemically synthesized
ccaccgacctggctcctccc

SEQ ID NO: 6842 - DNA, 20 bp, Artificial Sequence
  chemically synthesized
ccgacctggctcctcccagg

SEQ ID NO: 6843 - DNA, 20 bp, Artificial Sequence
  chemically synthesized
cgacctggctcctcccaggc

SEQ ID NO: 6844 - DNA, 20 bp, Artificial Sequence
  chemically synthesized
ctggctcctcccaggcaggc

SEQ ID NO: 6845 - DNA, 20 bp, Artificial Sequence
  chemically synthesized
tcctcccaggcaggccagcc

SEQ ID NO: 6846 - DNA, 20 bp, Artificial Sequence
  chemically synthesized
cctcccaggcaggccagccc

SEQ ID NO: 6847 - DNA, 20 bp, Artificial Sequence
  chemically synthesized
ccaggcaggccagcccaggt

SEQ ID NO: 6848 - DNA, 20 bp, Artificial Sequence
  chemically synthesized
ccagcccaggtgagcccctc

SEQ ID NO: 6849 - DNA, 20 bp, Artificial Sequence
  chemically synthesized
cccaggtgagcccctccagc

SEQ ID NO: 6850 - DNA, 20 bp, Artificial Sequence
  chemically synthesized
ccaggtgagcccctccagcc

SEQ ID NO: 6851 - DNA, 20 bp, Artificial Sequence
  chemically synthesized
ccaggcactcaccccactgc

SEQ ID NO: 6852 - DNA, 20 bp, Artificial Sequence
  chemically synthesized
caggcactcaccccactgcc

SEQ ID NO: 6853 - DNA, 20 bp, Artificial Sequence
  chemically synthesized
actgccaggctgtttactct

SEQ ID NO: 6854 - DNA, 20 bp, Artificial Sequence
  chemically synthesized
ccaggctgtttactcttagc

SEQ ID NO: 6855 - DNA, 20 bp, Artificial Sequence
  chemically synthesized
gtctcctgtctgctctactg

SEQ ID NO: 6856 - DNA, 20 bp, Artificial Sequence
  chemically synthesized
cctccctcctctcctccttt

SEQ ID NO: 6857 - DNA, 20 bp, Artificial Sequence
  chemically synthesized
cctcctttcggtcctctgcc

SEQ ID NO: 6858 - DNA, 20 bp, Artificial Sequence
  chemically synthesized
ctcctttcggtcctctgccc

SEQ ID NO: 6859 - DNA, 20 bp, Artificial Sequence
  chemically synthesized
tcctctgcccaggcctgcct

SEQ ID NO: 6860 - DNA, 20 bp, Artificial Sequence
  chemically synthesized
cctctgcccaggcctgcctg

SEQ ID NO: 6861 - DNA, 20 bp, Artificial Sequence
  chemically synthesized
gcctgcctgaggctgcctgc

SEQ ID NO: 6862 - DNA, 20 bp, Artificial Sequence
  chemically synthesized
gcctgaggctgcctgccagt

SEQ ID NO: 6863 - DNA, 20 bp, Artificial Sequence
  chemically synthesized
ctgccagtgagattgcatgt

SEQ ID NO: 6864 - DNA, 20 bp, Artificial Sequence
  chemically synthesized
tgccagtgagattgcatgtc

SEQ ID NO: 6865 - DNA, 20 bp, Artificial Sequence
  chemically synthesized
gccagtgagattgcatgtca

SEQ ID NO: 6866 - DNA, 20 bp, Artificial Sequence
  chemically synthesized
tgcatgtcagggctttgccc

SEQ ID NO: 6867 - DNA, 20 bp, Artificial Sequence
  chemically synthesized
gcatgtcagggctttgccct

SEQ ID NO: 6868 - DNA, 20 bp, Artificial Sequence
  chemically synthesized
agggctttgccctgggcact

SEQ ID NO: 6869 - DNA, 20 bp, Artificial Sequence
  chemically synthesized
gggctttgccctgggcactg

SEQ ID NO: 6870 - DNA, 20 bp, Artificial Sequence
  chemically synthesized
ggctttgccctgggcactga

SEQ ID NO: 6871 - DNA, 20 bp, Artificial Sequence
  chemically synthesized
ttgccctgggcactgagggc

SEQ ID NO: 6872 - DNA, 20 bp, Artificial Sequence
  chemically synthesized
tgccctgggcactgagggct

SEQ ID NO: 6873 - DNA, 20 bp, Artificial Sequence
  chemically synthesized
gccctgggcactgagggcta

SEQ ID NO: 6874 - DNA, 20 bp, Artificial Sequence
  chemically synthesized
gcactgagggctagggtgcc

SEQ ID NO: 6875 - DNA, 20 bp, Artificial Sequence
  chemically synthesized
actgagggctagggtgccca

SEQ ID NO: 6876 - DNA, 20 bp, Artificial Sequence
  chemically synthesized
ctgagggctagggtgcccag

SEQ ID NO: 6877 - DNA, 20 bp, Artificial Sequence
  chemically synthesized
ctagggtgcccagaggcctg

SEQ ID NO: 6878 - DNA, 20 bp, Artificial Sequence
  chemically synthesized
agaggcctgcggctgtgccc

SEQ ID NO: 6879 - DNA, 20 bp, Artificial Sequence
  chemically synthesized
gcctgcggctgtgccctgga

SEQ ID NO: 6880 - DNA, 20 bp, Artificial Sequence
  chemically synthesized
ctgtgccctggatggaaaac

SEQ ID NO: 6881 - DNA, 20 bp, Artificial Sequence
  chemically synthesized
tgccctggatggaaaaccag

SEQ ID NO: 6882 - DNA, 20 bp, Artificial Sequence
  chemically synthesized
tggaaaaccagcagcctgca

SEQ ID NO: 6883 - DNA, 20 bp, Artificial Sequence
  chemically synthesized
accagcagcctgcaaagctg

SEQ ID NO: 6884 - DNA, 20 bp, Artificial Sequence
  chemically synthesized
ccagcagcctgcaaagctgt

SEQ ID NO: 6885 - DNA, 20 bp, Artificial Sequence
  chemically synthesized
cagcagcctgcaaagctgtg

SEQ ID NO: 6886 - DNA, 20 bp, Artificial Sequence
  chemically synthesized
agcagcctgcaaagctgtgg

SEQ ID NO: 6887 - DNA, 20 bp, Artificial Sequence
  chemically synthesized
agcctgcaaagctgtggggg

SEQ ID NO: 6888 - DNA, 20 bp, Artificial Sequence
  chemically synthesized
gcaaagctgtgggggcagca

SEQ ID NO: 6889 - DNA, 20 bp, Artificial Sequence
  chemically synthesized
caaagctgtgggggcagcac

SEQ ID NO: 6890 - DNA, 20 bp, Artificial Sequence
  chemically synthesized
gcagcacaggacctgtgtgt

SEQ ID NO: 6891 - DNA, 20 bp, Artificial Sequence
  chemically synthesized
agcacaggacctgtgtgtga

SEQ ID NO: 6892 - DNA, 20 bp, Artificial Sequence
  chemically synthesized
acaggacctgtgtgtgagag

SEQ ID NO: 6893 - DNA, 20 bp, Artificial Sequence
  chemically synthesized
ggacctgtgtgtgagagcgg

SEQ ID NO: 6894 - DNA, 20 bp, Artificial Sequence
  chemically synthesized
tgtgtgagagcggtggtctt

SEQ ID NO: 6895 - DNA, 20 bp, Artificial Sequence
  chemically synthesized
tgtgagagcggtggtcttga

SEQ ID NO: 6896 - DNA, 20 bp, Artificial Sequence
  chemically synthesized
agcggtggtcttgagagtga

SEQ ID NO: 6897 - DNA, 20 bp, Artificial Sequence
  chemically synthesized
ggtggtcttgagagtgaaag

SEQ ID NO: 6898 - DNA, 20 bp, Artificial Sequence
  chemically synthesized
tcttgagagtgaaagtggac

SEQ ID NO: 6899 - DNA, 20 bp, Artificial Sequence
  chemically synthesized
agagtgaaagtggacaagtc

SEQ ID NO: 6900 - DNA, 20 bp, Artificial Sequence
  chemically synthesized
gaaagtggacaagtcaagcc

SEQ ID NO: 6901 - DNA, 20 bp, Artificial Sequence
  chemically synthesized
aaagtggacaagtcaagccc

SEQ ID NO: 6902 - DNA, 20 bp, Artificial Sequence
  chemically synthesized
gtggacaagtcaagcccagg

SEQ ID NO: 6903 - DNA, 20 bp, Artificial Sequence
  chemically synthesized
tggacaagtcaagcccaggc

SEQ ID NO: 6904 - DNA, 20 bp, Artificial Sequence
  chemically synthesized
ggacaagtcaagcccaggcg

SEQ ID NO: 6905 - DNA, 20 bp, Artificial Sequence
  chemically synthesized
acaagtcaagcccaggcggg

SEQ ID NO: 6906 - DNA, 20 bp, Artificial Sequence
  chemically synthesized
caagtcaagcccaggcgggg

SEQ ID NO: 6907 - DNA, 20 bp, Artificial Sequence
  chemically synthesized
aagtcaagcccaggcgggga

SEQ ID NO: 6908 - DNA, 20 bp, Artificial Sequence
  chemically synthesized
agtcaagcccaggcggggag

SEQ ID NO: 6909 - DNA, 20 bp, Artificial Sequence
  chemically synthesized
aagcccaggcggggagggga

SEQ ID NO: 6910 - DNA, 20 bp, Artificial Sequence
  chemically synthesized
agcccaggcggggaggggac

SEQ ID NO: 6911 - DNA, 20 bp, Artificial Sequence
  chemically synthesized
gcccaggcggggaggggaca

SEQ ID NO: 6912 - DNA, 20 bp, Artificial Sequence
  chemically synthesized
cccaggcggggaggggacag

SEQ ID NO: 6913 - DNA, 20 bp, Artificial Sequence
  chemically synthesized
ccaggcggggaggggacagg

SEQ ID NO: 6914 - DNA, 20 bp, Artificial Sequence
  chemically synthesized
ggcggggaggggacaggggg

SEQ ID NO: 6915 - DNA, 20 bp, Artificial Sequence
  chemically synthesized
gcggggaggggacagggggc

SEQ ID NO: 6916 - DNA, 20 bp, Artificial Sequence
  chemically synthesized
gggaggggacagggggcagg

SEQ ID NO: 6917 - DNA, 20 bp, Artificial Sequence
  chemically synthesized
ggaggggacagggggcaggt

SEQ ID NO: 6918 - DNA, 20 bp, Artificial Sequence
  chemically synthesized
gaggggacagggggcaggta

SEQ ID NO: 6919 - DNA, 20 bp, Artificial Sequence
  chemically synthesized
ggacagggggcaggtaggga

SEQ ID NO: 6920 - DNA, 20 bp, Artificial Sequence
  chemically synthesized
gacagggggcaggtagggat

SEQ ID NO: 6921 - DNA, 20 bp, Artificial Sequence
  chemically synthesized
acagggggcaggtagggata

SEQ ID NO: 6922 - DNA, 20 bp, Artificial Sequence
  chemically synthesized
gggggcaggtagggataggg

SEQ ID NO: 6923 - DNA, 20 bp, Artificial Sequence
  chemically synthesized
ggggcaggtagggatagggc

SEQ ID NO: 6924 - DNA, 20 bp, Artificial Sequence
  chemically synthesized
caggtagggatagggcaggt

SEQ ID NO: 6925 - DNA, 20 bp, Artificial Sequence
  chemically synthesized
aggtagggatagggcaggtg

SEQ ID NO: 6926 - DNA, 20 bp, Artificial Sequence
  chemically synthesized
gatagggcaggtgaggttcc

SEQ ID NO: 6927 - DNA, 20 bp, Artificial Sequence
  chemically synthesized
atagggcaggtgaggttccc

SEQ ID NO: 6928 - DNA, 20 bp, Artificial Sequence
  chemically synthesized
tagggcaggtgaggttcccg

SEQ ID NO: 6929 - DNA, 20 bp, Artificial Sequence
  chemically synthesized
gcaggtgaggttcccggggc

SEQ ID NO: 6930 - DNA, 20 bp, Artificial Sequence
  chemically synthesized
caccattaaccgtgcctctg

SEQ ID NO: 6931 - DNA, 20 bp, Artificial Sequence
  chemically synthesized
accattaaccgtgcctctgt

SEQ ID NO: 6932 - DNA, 20 bp, Artificial Sequence
  chemically synthesized
accgtgcctctgtgggctga

SEQ ID NO: 6933 - DNA, 20 bp, Artificial Sequence
  chemically synthesized
tgggctgacagatgtgcctt

SEQ ID NO: 6934 - DNA, 20 bp, Artificial Sequence
  chemically synthesized
ggctgacagatgtgccttca

SEQ ID NO: 6935 - DNA, 20 bp, Artificial Sequence
  chemically synthesized
tgacagatgtgccttcagag

SEQ ID NO: 6936 - DNA, 20 bp, Artificial Sequence
  chemically synthesized
gacagatgtgccttcagaga

SEQ ID NO: 6937 - DNA, 20 bp, Artificial Sequence
  chemically synthesized
acagatgtgccttcagagaa

SEQ ID NO: 6938 - DNA, 20 bp, Artificial Sequence
  chemically synthesized
gatgtgccttcagagaaggg

SEQ ID NO: 6939 - DNA, 20 bp, Artificial Sequence
  chemically synthesized
atgtgccttcagagaagggc

SEQ ID NO: 6940 - DNA, 20 bp, Artificial Sequence
  chemically synthesized
tgtgccttcagagaagggca

SEQ ID NO: 6941 - DNA, 20 bp, Artificial Sequence
  chemically synthesized
tgccttcagagaagggcagg

SEQ ID NO: 6942 - DNA, 20 bp, Artificial Sequence
  chemically synthesized
cttcagagaagggcagggag

SEQ ID NO: 6943 - DNA, 20 bp, Artificial Sequence
  chemically synthesized
agagaagggcagggagcagc

SEQ ID NO: 6944 - DNA, 20 bp, Artificial Sequence
  chemically synthesized
gagaagggcagggagcagct

SEQ ID NO: 6945 - DNA, 20 bp, Artificial Sequence
  chemically synthesized
agaagggcagggagcagctg

SEQ ID NO: 6946 - DNA, 20 bp, Artificial Sequence
  chemically synthesized
gaagggcagggagcagctgg

SEQ ID NO: 6947 - DNA, 20 bp, Artificial Sequence
  chemically synthesized
gcagggagcagctgggggcc

SEQ ID NO: 6948 - DNA, 20 bp, Artificial Sequence
  chemically synthesized
ggagcagctgggggcctggc

SEQ ID NO: 6949 - DNA, 20 bp, Artificial Sequence
  chemically synthesized
agcagctgggggcctggcca

SEQ ID NO: 6950 - DNA, 20 bp, Artificial Sequence
  chemically synthesized
cctggccagagcaatcatcc

SEQ ID NO: 6951 - DNA, 20 bp, Artificial Sequence
  chemically synthesized
ggccagagcaatcatcccag

SEQ ID NO: 6952 - DNA, 20 bp, Artificial Sequence
  chemically synthesized
gccagagcaatcatcccagc

SEQ ID NO: 6953 - DNA, 20 bp, Artificial Sequence
  chemically synthesized
atcccagcaggaacttacat

SEQ ID NO: 6954 - DNA, 20 bp, Artificial Sequence
  chemically synthesized
cccagcaggaacttacatca

SEQ ID NO: 6955 - DNA, 20 bp, Artificial Sequence
  chemically synthesized
agcaggaacttacatcagag

SEQ ID NO: 6956 - DNA, 20 bp, Artificial Sequence
  chemically synthesized
gcaggaacttacatcagagc

SEQ ID NO: 6957 - DNA, 20 bp, Artificial Sequence
  chemically synthesized
ggaacttacatcagagcagg

SEQ ID NO: 6958 - DNA, 20 bp, Artificial Sequence
  chemically synthesized
tcagagcaggcagcctaccc

SEQ ID NO: 6959 - DNA, 20 bp, Artificial Sequence
  chemically synthesized
agagcaggcagcctacccaa

SEQ ID NO: 6960 - DNA, 20 bp, Artificial Sequence
  chemically synthesized
caggcagcctacccaagagc

SEQ ID NO: 6961 - DNA, 20 bp, Artificial Sequence
  chemically synthesized
aggcagcctacccaagagcc

SEQ ID NO: 6962 - DNA, 20 bp, Artificial Sequence
  chemically synthesized
ggcagcctacccaagagcca

SEQ ID NO: 6963 - DNA, 20 bp, Artificial Sequence
  chemically synthesized
agcctacccaagagccaggg

SEQ ID NO: 6964 - DNA, 20 bp, Artificial Sequence
  chemically synthesized
gcctacccaagagccaggga

SEQ ID NO: 6965 - DNA, 20 bp, Artificial Sequence
  chemically synthesized
tacccaagagccagggaagg

SEQ ID NO: 6966 - DNA, 20 bp, Artificial Sequence
  chemically synthesized
acccaagagccagggaagga

SEQ ID NO: 6967 - DNA, 20 bp, Artificial Sequence
  chemically synthesized
ccaagagccagggaaggaag

SEQ ID NO: 6968 - DNA, 20 bp, Artificial Sequence
  chemically synthesized
aagagccagggaaggaagga

SEQ ID NO: 6969 - DNA, 20 bp, Artificial Sequence
  chemically synthesized
gggaaggaaggagagcccct

SEQ ID NO: 6970 - DNA, 20 bp, Artificial Sequence
  chemically synthesized
ggagagcccctgagaaaaaa

SEQ ID NO: 6971 - DNA, 20 bp, Artificial Sequence
  chemically synthesized
gagcccctgagaaaaaatgg

SEQ ID NO: 6972 - DNA, 20 bp, Artificial Sequence
  chemically synthesized
cccctgagaaaaaatggcag

SEQ ID NO: 6973 - DNA, 20 bp, Artificial Sequence
  chemically synthesized
gagaaaaaatggcagaagaa

SEQ ID NO: 6974 - DNA, 20 bp, Artificial Sequence
  chemically synthesized
aaaaaatggcagaagaatgg

SEQ ID NO: 6975 - DNA, 20 bp, Artificial Sequence
  chemically synthesized
aaaaatggcagaagaatgga

SEQ ID NO: 6976 - DNA, 20 bp, Artificial Sequence
  chemically synthesized
aaaatggcagaagaatggaa

SEQ ID NO: 6977 - DNA, 20 bp, Artificial Sequence
  chemically synthesized
gaagggactacgtgtattga

SEQ ID NO: 6978 - DNA, 20 bp, Artificial Sequence
  chemically synthesized
cgtgtattgatggaataaac

SEQ ID NO: 6979 - DNA, 20 bp, Artificial Sequence
  chemically synthesized
ccccacacttcccaactcct

SEQ ID NO: 6980 - DNA, 20 bp, Artificial Sequence
  chemically synthesized
cccacacttcccaactcctc

SEQ ID NO: 6981 - DNA, 20 bp, Artificial Sequence
  chemically synthesized
cacttcccaactcctcagga

SEQ ID NO: 6982 - DNA, 20 bp, Artificial Sequence
  chemically synthesized
acttcccaactcctcaggac

SEQ ID NO: 6983 - DNA, 20 bp, Artificial Sequence
  chemically synthesized
cttcccaactcctcaggaca

SEQ ID NO: 6984 - DNA, 20 bp, Artificial Sequence
  chemically synthesized
caactcctcaggacagggtt

SEQ ID NO: 6985 - DNA, 20 bp, Artificial Sequence
  chemically synthesized
actcctcaggacagggttca

SEQ ID NO: 6986 - DNA, 20 bp, Artificial Sequence
  chemically synthesized
ctcaggacagggttcagagc

SEQ ID NO: 6987 - DNA, 20 bp, Artificial Sequence
  chemically synthesized
tcaggacagggttcagagct

SEQ ID NO: 6988 - DNA, 20 bp, Artificial Sequence
  chemically synthesized
gacagggttcagagctaggc

SEQ ID NO: 6989 - DNA, 20 bp, Artificial Sequence
  chemically synthesized
agggttcagagctaggctgg

SEQ ID NO: 6990 - DNA, 20 bp, Artificial Sequence
  chemically synthesized
ctaggctggtggctgctaca

SEQ ID NO: 6991 - DNA, 20 bp, Artificial Sequence
  chemically synthesized
aggctggtggctgctacaca

SEQ ID NO: 6992 - DNA, 20 bp, Artificial Sequence
  chemically synthesized
tggtggctgctacacagaga

SEQ ID NO: 6993 - DNA, 20 bp, Artificial Sequence
  chemically synthesized
acagagacagcaccctccac

SEQ ID NO: 6994 - DNA, 20 bp, Artificial Sequence
  chemically synthesized
gacagcaccctccaccagtt

SEQ ID NO: 6995 - DNA, 20 bp, Artificial Sequence
  chemically synthesized
acagcaccctccaccagtta

SEQ ID NO: 6996 - DNA, 20 bp, Artificial Sequence
  chemically synthesized
ccctccaccagttaaggtat

SEQ ID NO: 6997 - DNA, 20 bp, Artificial Sequence
  chemically synthesized
caccagttaaggtataagac

SEQ ID NO: 6998 - DNA, 20 bp, Artificial Sequence
  chemically synthesized
accagttaaggtataagaca

SEQ ID NO: 6999 - DNA, 20 bp, Artificial Sequence
  chemically synthesized
taaggtataagacaaggtat

SEQ ID NO: 7000 - DNA, 20 bp, Artificial Sequence
  chemically synthesized
aaggtataagacaaggtata

SEQ ID NO: 7001 - DNA, 20 bp, Artificial Sequence
  chemically synthesized
aagacaaggtataaggctga

SEQ ID NO: 7002 - DNA, 20 bp, Artificial Sequence
  chemically synthesized
agacaaggtataaggctgat

SEQ ID NO: 7003 - DNA, 20 bp, Artificial Sequence
  chemically synthesized
ggtataaggctgatgggctg

SEQ ID NO: 7004 - DNA, 20 bp, Artificial Sequence
  chemically synthesized
gtataaggctgatgggctgt

SEQ ID NO: 7005 - DNA, 20 bp, Artificial Sequence
  chemically synthesized
tgggctgtaggcatcaaacc

SEQ ID NO: 7006 - DNA, 20 bp, Artificial Sequence
  chemically synthesized
ggcatcaaacctggaactca

SEQ ID NO: 7007 - DNA, 20 bp, Artificial Sequence
  chemically synthesized
tcaaacctggaactcacagt

SEQ ID NO: 7008 - DNA, 20 bp, Artificial Sequence
  chemically synthesized
caaacctggaactcacagtc

SEQ ID NO: 7009 - DNA, 20 bp, Artificial Sequence
  chemically synthesized
aaacctggaactcacagtcg

SEQ ID NO: 7010 - DNA, 20 bp, Artificial Sequence
  chemically synthesized
cagtcggggcacctcacttc

SEQ ID NO: 7011 - DNA, 20 bp, Artificial Sequence
  chemically synthesized
gggcacctcacttcaagcct

SEQ ID NO: 7012 - DNA, 20 bp, Artificial Sequence
  chemically synthesized
cacctcacttcaagccttgg

SEQ ID NO: 7013 - DNA, 20 bp, Artificial Sequence
  chemically synthesized
tcacttcaagccttggtgga

SEQ ID NO: 7014 - DNA, 20 bp, Artificial Sequence
  chemically synthesized
cacttcaagccttggtggat

SEQ ID NO: 7015 - DNA, 20 bp, Artificial Sequence
  chemically synthesized
tcaagccttggtggataggt

SEQ ID NO: 7016 - DNA, 20 bp, Artificial Sequence
  chemically synthesized
ggataggtaagatgaacact

SEQ ID NO: 7017 - DNA, 20 bp, Artificial Sequence
  chemically synthesized
gataggtaagatgaacactc

SEQ ID NO: 7018 - DNA, 20 bp, Artificial Sequence
  chemically synthesized
agatgaacactcaggctccc

SEQ ID NO: 7019 - DNA, 20 bp, Artificial Sequence
  chemically synthesized
gaacactcaggctcccaagt

SEQ ID NO: 7020 - DNA, 20 bp, Artificial Sequence
  chemically synthesized
actcaggctcccaagttaga

SEQ ID NO: 7021 - DNA, 20 bp, Artificial Sequence
  chemically synthesized
ggctcccaagttagacagat

SEQ ID NO: 7022 - DNA, 20 bp, Artificial Sequence
  chemically synthesized
cccaagttagacagatgagc

SEQ ID NO: 7023 - DNA, 20 bp, Artificial Sequence
  chemically synthesized
ttcatctaccaccaatttcc

SEQ ID NO: 7024 - DNA, 20 bp, Artificial Sequence
  chemically synthesized
caatttcctggctgtgtgtc

SEQ ID NO: 7025 - DNA, 20 bp, Artificial Sequence
  chemically synthesized
aatttcctggctgtgtgtct

SEQ ID NO: 7026 - DNA, 20 bp, Artificial Sequence
  chemically synthesized
tttcctggctgtgtgtctgg

SEQ ID NO: 7027 - DNA, 20 bp, Artificial Sequence
  chemically synthesized
cctggctgtgtgtctgggag

SEQ ID NO: 7028 - DNA, 20 bp, Artificial Sequence
  chemically synthesized
agcagctctttaacctctcc

SEQ ID NO: 7029 - DNA, 20 bp, Artificial Sequence
  chemically synthesized
tctttaacctctccaagcct

SEQ ID NO: 7030 - DNA, 20 bp, Artificial Sequence
  chemically synthesized
ccaagcctcagtttcttcac

SEQ ID NO: 7031 - DNA, 20 bp, Artificial Sequence
  chemically synthesized
atgtgtatgatgacattgta

SEQ ID NO: 7032 - DNA, 20 bp, Artificial Sequence
  chemically synthesized
atgacattgtatggccaacc

SEQ ID NO: 7033 - DNA, 20 bp, Artificial Sequence
  chemically synthesized
tgacattgtatggccaacct

SEQ ID NO: 7034 - DNA, 20 bp, Artificial Sequence
  chemically synthesized
gacattgtatggccaacctg

SEQ ID NO: 7035 - DNA, 20 bp, Artificial Sequence
  chemically synthesized
ggccaacctggggttgctga

SEQ ID NO: 7036 - DNA, 20 bp, Artificial Sequence
  chemically synthesized
cctggggttgctgatggaac

SEQ ID NO: 7037 - DNA, 20 bp, Artificial Sequence
  chemically synthesized
ttgctgatggaactagttaa

SEQ ID NO: 7038 - DNA, 20 bp, Artificial Sequence
  chemically synthesized
gctgatggaactagttaaaa

SEQ ID NO: 7039 - DNA, 20 bp, Artificial Sequence
  chemically synthesized
tagttaaaagagtgtctgtg

SEQ ID NO: 7040 - DNA, 20 bp, Artificial Sequence
  chemically synthesized
taaaagagtgtctgtgaagc

SEQ ID NO: 7041 - DNA, 20 bp, Artificial Sequence
  chemically synthesized
gagtgtctgtgaagcaagcc

SEQ ID NO: 7042 - DNA, 20 bp, Artificial Sequence
  chemically synthesized
gtctgtgaagcaagcctagc

SEQ ID NO: 7043 - DNA, 20 bp, Artificial Sequence
  chemically synthesized
tctgtgaagcaagcctagct

SEQ ID NO: 7044 - DNA, 20 bp, Artificial Sequence
  chemically synthesized
gtgaagcaagcctagctggg

SEQ ID NO: 7045 - DNA, 20 bp, Artificial Sequence
  chemically synthesized
tgaagcaagcctagctgggt

SEQ ID NO: 7046 - DNA, 20 bp, Artificial Sequence
  chemically synthesized
gcctagctgggtgggcttgc

SEQ ID NO: 7047 - DNA, 20 bp, Artificial Sequence
  chemically synthesized
ggtgggcttgcaagcatttc

SEQ ID NO: 7048 - DNA, 20 bp, Artificial Sequence
  chemically synthesized
gtgggcttgcaagcatttct

SEQ ID NO: 7049 - DNA, 20 bp, Artificial Sequence
  chemically synthesized
ctgcatcctcctctgtaaaa

SEQ ID NO: 7050 - DNA, 20 bp, Artificial Sequence
  chemically synthesized
tgcatcctcctctgtaaaat

SEQ ID NO: 7051 - DNA, 20 bp, Artificial Sequence
  chemically synthesized
catcctcctctgtaaaatgg

SEQ ID NO: 7052 - DNA, 20 bp, Artificial Sequence
  chemically synthesized
tgggagaaccctgaactgct

SEQ ID NO: 7053 - DNA, 20 bp, Artificial Sequence
  chemically synthesized
gaactgctcagccgacctca

SEQ ID NO: 7054 - DNA, 20 bp, Artificial Sequence
  chemically synthesized
gacctcatggttgactcact

SEQ ID NO: 7055 - DNA, 20 bp, Artificial Sequence
  chemically synthesized
atggttgactcactcagcaa

SEQ ID NO: 7056 - DNA, 20 bp, Artificial Sequence
  chemically synthesized
ggttgactcactcagcaaca

SEQ ID NO: 7057 - DNA, 20 bp, Artificial Sequence
  chemically synthesized
gttgactcactcagcaacag

SEQ ID NO: 7058 - DNA, 20 bp, Artificial Sequence
  chemically synthesized
ctcagcaacagaggtctcca

SEQ ID NO: 7059 - DNA, 20 bp, Artificial Sequence
  chemically synthesized
tcagcaacagaggtctccac

SEQ ID NO: 7060 - DNA, 20 bp, Artificial Sequence
  chemically synthesized
agcaacagaggtctccacag

SEQ ID NO: 7061 - DNA, 20 bp, Artificial Sequence
  chemically synthesized
cacaggagccctgcccacat

SEQ ID NO: 7062 - DNA, 20 bp, Artificial Sequence
  chemically synthesized
ctgcccacatgagacatctt

SEQ ID NO: 7063 - DNA, 20 bp, Artificial Sequence
  chemically synthesized
tttggcacatcttctgaaac

SEQ ID NO: 7064 - DNA, 20 bp, Artificial Sequence
  chemically synthesized
tctgaaacaagacctgtttc

SEQ ID NO: 7065 - DNA, 20 bp, Artificial Sequence
  chemically synthesized
aaacaagacctgtttctgga

SEQ ID NO: 7066 - DNA, 20 bp, Artificial Sequence
  chemically synthesized
acctgtttctggaaagttgt

SEQ ID NO: 7067 - DNA, 20 bp, Artificial Sequence
  chemically synthesized
acttatttatattattgttt

SEQ ID NO: 7068 - DNA, 20 bp, Artificial Sequence
  chemically synthesized
ttcattctgctttgattcaa

SEQ ID NO: 7069 - DNA, 20 bp, Artificial Sequence
  chemically synthesized
attctgctttgattcaatgg

SEQ ID NO: 7070 - DNA, 20 bp, Artificial Sequence
  chemically synthesized
ggcagccaatttaattcatt

SEQ ID NO: 7071 - DNA, 20 bp, Artificial Sequence
  chemically synthesized
attcatttggtccaaacctg

SEQ ID NO: 7072 - DNA, 20 bp, Artificial Sequence
  chemically synthesized
aaacctgtagtgctacttgc

SEQ ID NO: 7073 - DNA, 20 bp, Artificial Sequence
  chemically synthesized
tgctacttgccagaacaaaa

SEQ ID NO: 7074 - DNA, 20 bp, Artificial Sequence
  chemically synthesized
ttgccagaacaaaatggaat

SEQ ID NO: 7075 - DNA, 20 bp, Artificial Sequence
  chemically synthesized
gagcctcattccctgccctc

SEQ ID NO: 7076 - DNA, 20 bp, Artificial Sequence
  chemically synthesized
agcctcattccctgccctca

SEQ ID NO: 7077 - DNA, 20 bp, Artificial Sequence
  chemically synthesized
cctcattccctgccctcaag

SEQ ID NO: 7078 - DNA, 20 bp, Artificial Sequence
  chemically synthesized
ccctgccctcaaggagctca

SEQ ID NO: 7079 - DNA, 20 bp, Artificial Sequence
  chemically synthesized
ccctcaaggagctcacagtc

SEQ ID NO: 7080 - DNA, 20 bp, Artificial Sequence
  chemically synthesized
tcaaggagctcacagtccag

SEQ ID NO: 7081 - DNA, 20 bp, Artificial Sequence
  chemically synthesized
gctctgtctttaatatctat

SEQ ID NO: 7082 - DNA, 20 bp, Artificial Sequence
  chemically synthesized
tctgtctttaatatctataa

SEQ ID NO: 7083 - DNA, 20 bp, Artificial Sequence
  chemically synthesized
ctttaatatctataagagca

SEQ ID NO: 7084 - DNA, 20 bp, Artificial Sequence
  chemically synthesized
tttaatatctataagagcac

SEQ ID NO: 7085 - DNA, 20 bp, Artificial Sequence
  chemically synthesized
atatctataagagcacaggt

SEQ ID NO: 7086 - DNA, 20 bp, Artificial Sequence
  chemically synthesized
aagagcacaggtaagtgtca

SEQ ID NO: 7087 - DNA, 20 bp, Artificial Sequence
  chemically synthesized
agagcacaggtaagtgtcac

SEQ ID NO: 7088 - DNA, 20 bp, Artificial Sequence
  chemically synthesized
gcacaggtaagtgtcacagg

SEQ ID NO: 7089 - DNA, 20 bp, Artificial Sequence
  chemically synthesized
gtaagtgtcacaggaagcca

SEQ ID NO: 7090 - DNA, 20 bp, Artificial Sequence
  chemically synthesized
cacaggaagccatggtcctt

SEQ ID NO: 7091 - DNA, 20 bp, Artificial Sequence
  chemically synthesized
acaggaagccatggtccttt

SEQ ID NO: 7092 - DNA, 20 bp, Artificial Sequence
  chemically synthesized
caggaagccatggtcctttg

SEQ ID NO: 7093 - DNA, 20 bp, Artificial Sequence
  chemically synthesized
aggaagccatggtcctttgg

SEQ ID NO: 7094 - DNA, 20 bp, Artificial Sequence
  chemically synthesized
atggtcctttgggggaaatg

SEQ ID NO: 7095 - DNA, 20 bp, Artificial Sequence
  chemically synthesized
tcacttccaaatactttacc

SEQ ID NO: 7096 - DNA, 20 bp, Artificial Sequence
  chemically synthesized
aaatactttacctggtttgt

SEQ ID NO: 7097 - DNA, 20 bp, Artificial Sequence
  chemically synthesized
ctggtttgtaagttctcttt

SEQ ID NO: 7098 - DNA, 20 bp, Artificial Sequence
  chemically synthesized
tggtttgtaagttctctttc

SEQ ID NO: 7099 - DNA, 20 bp, Artificial Sequence
  chemically synthesized
tctctttcgggtgcttccct

SEQ ID NO: 7100 - DNA, 20 bp, Artificial Sequence
  chemically synthesized
ctttcgggtgcttccctgag

SEQ ID NO: 7101 - DNA, 20 bp, Artificial Sequence
  chemically synthesized
cgggtgcttccctgagtggc

SEQ ID NO: 7102 - DNA, 20 bp, Artificial Sequence
  chemically synthesized
ggtgcttccctgagtggcaa

SEQ ID NO: 7103 - DNA, 20 bp, Artificial Sequence
  chemically synthesized
gtgcttccctgagtggcaag

SEQ ID NO: 7104 - DNA, 20 bp, Artificial Sequence
  chemically synthesized
tgcttccctgagtggcaaga

SEQ ID NO: 7105 - DNA, 20 bp, Artificial Sequence
  chemically synthesized
tccctgagtggcaagaggga

SEQ ID NO: 7106 - DNA, 20 bp, Artificial Sequence
  chemically synthesized
ccctgagtggcaagagggaa

SEQ ID NO: 7107 - DNA, 20 bp, Artificial Sequence
  chemically synthesized
aagagggaaaggccttttgc

SEQ ID NO: 7108 - DNA, 20 bp, Artificial Sequence
  chemically synthesized
tttttttttttttttttttt

SEQ ID NO: 7109 - DNA, 20 bp, Artificial Sequence
  chemically synthesized
ttttttttttttttttgaga

SEQ ID NO: 7110 - DNA, 20 bp, Artificial Sequence
  chemically synthesized
ttttttttttttttgagaca

SEQ ID NO: 7111 - DNA, 20 bp, Artificial Sequence
  chemically synthesized
agagtttcgctcttgttgcc

SEQ ID NO: 7112 - DNA, 20 bp, Artificial Sequence
  chemically synthesized
gagtttcgctcttgttgccc

SEQ ID NO: 7113 - DNA, 20 bp, Artificial Sequence
  chemically synthesized
ttcgctcttgttgcccaggc

SEQ ID NO: 7114 - DNA, 20 bp, Artificial Sequence
  chemically synthesized
tcgctcttgttgcccaggct

SEQ ID NO: 7115 - DNA, 20 bp, Artificial Sequence
  chemically synthesized
cgctcttgttgcccaggctg

SEQ ID NO: 7116 - DNA, 20 bp, Artificial Sequence
  chemically synthesized
ttgcccaggctggggtgcaa

SEQ ID NO: 7117 - DNA, 20 bp, Artificial Sequence
  chemically synthesized
ggggtgcaatggtgtgatct

SEQ ID NO: 7118 - DNA, 20 bp, Artificial Sequence
  chemically synthesized
ggctcaccacctctgcctcc

SEQ ID NO: 7119 - DNA, 20 bp, Artificial Sequence
  chemically synthesized
gctcaccacctctgcctcct

SEQ ID NO: 7120 - DNA, 20 bp, Artificial Sequence
  chemically synthesized
cacctctgcctcctgggttc

SEQ ID NO: 7121 - DNA, 20 bp, Artificial Sequence
  chemically synthesized
ttcaagcaattctcctccct

SEQ ID NO: 7122 - DNA, 20 bp, Artificial Sequence
  chemically synthesized
ttctcctccctcagcctcct

SEQ ID NO: 7123 - DNA, 20 bp, Artificial Sequence
  chemically synthesized
tcctccctcagcctcctgag

SEQ ID NO: 7124 - DNA, 20 bp, Artificial Sequence
  chemically synthesized
ccctcagcctcctgagtagc

SEQ ID NO: 7125 - DNA, 20 bp, Artificial Sequence
  chemically synthesized
cctcagcctcctgagtagct

SEQ ID NO: 7126 - DNA, 20 bp, Artificial Sequence
  chemically synthesized
ctcctgagtagctgggatta

SEQ ID NO: 7127 - DNA, 20 bp, Artificial Sequence
  chemically synthesized
tcctgagtagctgggattac

SEQ ID NO: 7128 - DNA, 20 bp, Artificial Sequence
  chemically synthesized
caggcatgtgcgaccatgcc

SEQ ID NO: 7129 - DNA, 20 bp, Artificial Sequence
  chemically synthesized
atgtgcgaccatgcctggct

SEQ ID NO: 7130 - DNA, 20 bp, Artificial Sequence
  chemically synthesized
ggctaagtttatatttttaa

SEQ ID NO: 7131 - DNA, 20 bp, Artificial Sequence
  chemically synthesized
ctaagtttatatttttaata

SEQ ID NO: 7132 - DNA, 20 bp, Artificial Sequence
  chemically synthesized
tttatatttttaatagagat

SEQ ID NO: 7133 - DNA, 20 bp, Artificial Sequence
  chemically synthesized
ttatatttttaatagagatg

SEQ ID NO: 7134 - DNA, 20 bp, Artificial Sequence
  chemically synthesized
gagatgaggtttctccatgt

SEQ ID NO: 7135 - DNA, 20 bp, Artificial Sequence
  chemically synthesized
tgaggtttctccatgttggt

SEQ ID NO: 7136 - DNA, 20 bp, Artificial Sequence
  chemically synthesized
gaggtttctccatgttggtc

SEQ ID NO: 7137 - DNA, 20 bp, Artificial Sequence
  chemically synthesized
tttctccatgttggtcaggc

SEQ ID NO: 7138 - DNA, 20 bp, Artificial Sequence
  chemically synthesized
tggtctcaaactcttgacct

SEQ ID NO: 7139 - DNA, 20 bp, Artificial Sequence
  chemically synthesized
ggtctcaaactcttgacctc

SEQ ID NO: 7140 - DNA, 20 bp, Artificial Sequence
  chemically synthesized
ctcaggtgatctacccacct

SEQ ID NO: 7141 - DNA, 20 bp, Artificial Sequence
  chemically synthesized
ctacccacctcggcctccca

SEQ ID NO: 7142 - DNA, 20 bp, Artificial Sequence
  chemically synthesized
acctcggcctcccaaagtgc

SEQ ID NO: 7143 - DNA, 20 bp, Artificial Sequence
  chemically synthesized
ctcccaaagtgctggaatta

SEQ ID NO: 7144 - DNA, 20 bp, Artificial Sequence
  chemically synthesized
agtgctggaattacagacgt

SEQ ID NO: 7145 - DNA, 20 bp, Artificial Sequence
  chemically synthesized
cagacgtgagccactgcgcc

SEQ ID NO: 7146 - DNA, 20 bp, Artificial Sequence
  chemically synthesized
ttacactgctttcttaatta

SEQ ID NO: 7147 - DNA, 20 bp, Artificial Sequence
  chemically synthesized
cactgctttcttaattacag

SEQ ID NO: 7148 - DNA, 20 bp, Artificial Sequence
  chemically synthesized
ctcatctcacataaaaattt

SEQ ID NO: 7149 - DNA, 20 bp, Artificial Sequence
  chemically synthesized
tctcacataaaaatttaaga

SEQ ID NO: 7150 - DNA, 20 bp, Artificial Sequence
  chemically synthesized
ctcacataaaaatttaagac

SEQ ID NO: 7151 - DNA, 20 bp, Artificial Sequence
  chemically synthesized
aaaaatttaagacgggaaaa

SEQ ID NO: 7152 - DNA, 20 bp, Artificial Sequence
  chemically synthesized
aaaatttaagacgggaaaac

SEQ ID NO: 7153 - DNA, 20 bp, Artificial Sequence
  chemically synthesized
atttaagacgggaaaacagg

SEQ ID NO: 7154 - DNA, 20 bp, Artificial Sequence
  chemically synthesized
aaaacaggaagatgcattct

SEQ ID NO: 7155 - DNA, 20 bp, Artificial Sequence
  chemically synthesized
acaggaagatgcattctgag

SEQ ID NO: 7156 - DNA, 20 bp, Artificial Sequence
  chemically synthesized
tgcattctgagaagttatat

SEQ ID NO: 7157 - DNA, 20 bp, Artificial Sequence
  chemically synthesized
tgcctctctacattccaaaa

SEQ ID NO: 7158 - DNA, 20 bp, Artificial Sequence
  chemically synthesized
ttttattctaattattttac

SEQ ID NO: 7159 - DNA, 20 bp, Artificial Sequence
  chemically synthesized
attattttactagtgaatta

SEQ ID NO: 7160 - DNA, 20 bp, Artificial Sequence
  chemically synthesized
tactagtgaattatggaata

SEQ ID NO: 7161 - DNA, 20 bp, Artificial Sequence
  chemically synthesized
tagtgaattatggaataaag

SEQ ID NO: 7162 - DNA, 20 bp, Artificial Sequence
  chemically synthesized
ctacacaacttgtgttgcac

SEQ ID NO: 7163 - DNA, 20 bp, Artificial Sequence
  chemically synthesized
tacacaacttgtgttgcact

SEQ ID NO: 7164 - DNA, 20 bp, Artificial Sequence
  chemically synthesized
tgttgcactaggtgaaatct

SEQ ID NO: 7165 - DNA, 20 bp, Artificial Sequence
  chemically synthesized
gttgcactaggtgaaatctc

SEQ ID NO: 7166 - DNA, 20 bp, Artificial Sequence
  chemically synthesized
taggtgaaatctcaggctaa

SEQ ID NO: 7167 - DNA, 20 bp, Artificial Sequence
  chemically synthesized
ggtgaaatctcaggctaaca

SEQ ID NO: 7168 - DNA, 20 bp, Artificial Sequence
  chemically synthesized
atctcaggctaacagagctt

SEQ ID NO: 7169 - DNA, 20 bp, Artificial Sequence
  chemically synthesized
tctcaggctaacagagcttc

SEQ ID NO: 7170 - DNA, 20 bp, Artificial Sequence
  chemically synthesized
ctcaggctaacagagcttca

SEQ ID NO: 7171 - DNA, 20 bp, Artificial Sequence
  chemically synthesized
caggctaacagagcttcagg

SEQ ID NO: 7172 - DNA, 20 bp, Artificial Sequence
  chemically synthesized
aggctaacagagcttcaggg

SEQ ID NO: 7173 - DNA, 20 bp, Artificial Sequence
  chemically synthesized
taacagagcttcagggagga

SEQ ID NO: 7174 - DNA, 20 bp, Artificial Sequence
  chemically synthesized
aacagagcttcagggaggaa

SEQ ID NO: 7175 - DNA, 20 bp, Artificial Sequence
  chemically synthesized
gagcttcagggaggaaaggc

SEQ ID NO: 7176 - DNA, 20 bp, Artificial Sequence
  chemically synthesized
caaaaatatgcctcactcca

SEQ ID NO: 7177 - DNA, 20 bp, Artificial Sequence
  chemically synthesized
aaaatatgcctcactccaca

SEQ ID NO: 7178 - DNA, 20 bp, Artificial Sequence
  chemically synthesized
atatgcctcactccacagag

SEQ ID NO: 7179 - DNA, 20 bp, Artificial Sequence
  chemically synthesized
ccacagagaagctgtaccac

SEQ ID NO: 7180 - DNA, 20 bp, Artificial Sequence
  chemically synthesized
cagagaagctgtaccaccag

SEQ ID NO: 7181 - DNA, 20 bp, Artificial Sequence
  chemically synthesized
agctgtaccaccagaagtcc

SEQ ID NO: 7182 - DNA, 20 bp, Artificial Sequence
  chemically synthesized
accagaagtcctggaaaact

SEQ ID NO: 7183 - DNA, 20 bp, Artificial Sequence
  chemically synthesized
cagaagtcctggaaaactga

SEQ ID NO: 7184 - DNA, 20 bp, Artificial Sequence
  chemically synthesized
agaagtcctggaaaactgag

SEQ ID NO: 7185 - DNA, 20 bp, Artificial Sequence
  chemically synthesized
atgttgtaacaatgcaactc

SEQ ID NO: 7186 - DNA, 20 bp, Artificial Sequence
  chemically synthesized
acaatgcaactcaagactat

SEQ ID NO: 7187 - DNA, 20 bp, Artificial Sequence
  chemically synthesized
gaatgatatgaatatttgta

SEQ ID NO: 7188 - DNA, 20 bp, Artificial Sequence
  chemically synthesized
atttgtatagatacttatca

SEQ ID NO: 7189 - DNA, 20 bp, Artificial Sequence
  chemically synthesized
atacttatcaaagcaacaat

SEQ ID NO: 7190 - DNA, 20 bp, Artificial Sequence
  chemically synthesized
acttatcaaagcaacaatca

SEQ ID NO: 7191 - DNA, 20 bp, Artificial Sequence
  chemically synthesized
tcaaagcaacaatcagagat

SEQ ID NO: 7192 - DNA, 20 bp, Artificial Sequence
  chemically synthesized
caaagcaacaatcagagatc

SEQ ID NO: 7193 - DNA, 20 bp, Artificial Sequence
  chemically synthesized
gagatcaggtccctccaaat

SEQ ID NO: 7194 - DNA, 20 bp, Artificial Sequence
  chemically synthesized
ggtccctccaaatgagctta

SEQ ID NO: 7195 - DNA, 20 bp, Artificial Sequence
  chemically synthesized
tttatgatcctgctttgtaa

SEQ ID NO: 7196 - DNA, 20 bp, Artificial Sequence
  chemically synthesized
tgatcctgctttgtaaaagc

SEQ ID NO: 7197 - DNA, 20 bp, Artificial Sequence
  chemically synthesized
aagctggtgaaacaaaatga

SEQ ID NO: 7198 - DNA, 20 bp, Artificial Sequence
  chemically synthesized
tggtgaaacaaaatgatgga

SEQ ID NO: 7199 - DNA, 20 bp, Artificial Sequence
  chemically synthesized
tgaaacaaaatgatggatag

SEQ ID NO: 7200 - DNA, 20 bp, Artificial Sequence
  chemically synthesized
tgatggatagcagatttgct

SEQ ID NO: 7201 - DNA, 20 bp, Artificial Sequence
  chemically synthesized
agcagatttgctgagctcca

SEQ ID NO: 7202 - DNA, 20 bp, Artificial Sequence
  chemically synthesized
gatttgctgagctccaaagt

SEQ ID NO: 7203 - DNA, 20 bp, Artificial Sequence
  chemically synthesized
atttgctgagctccaaagtc

SEQ ID NO: 7204 - DNA, 20 bp, Artificial Sequence
  chemically synthesized
tttgctgagctccaaagtca

SEQ ID NO: 7205 - DNA, 20 bp, Artificial Sequence
  chemically synthesized
tgctgagctccaaagtcagg

SEQ ID NO: 7206 - DNA, 20 bp, Artificial Sequence
  chemically synthesized
tgagctccaaagtcagggag

SEQ ID NO: 7207 - DNA, 20 bp, Artificial Sequence
  chemically synthesized
gagctccaaagtcagggagt

SEQ ID NO: 7208 - DNA, 20 bp, Artificial Sequence
  chemically synthesized
aaagtcagggagtaggtaaa

SEQ ID NO: 7209 - DNA, 20 bp, Artificial Sequence
  chemically synthesized
ggtaaacagtgtgaacgtgt

SEQ ID NO: 7210 - DNA, 20 bp, Artificial Sequence
  chemically synthesized
tgaacgtgtcagctccctcc

SEQ ID NO: 7211 - DNA, 20 bp, Artificial Sequence
  chemically synthesized
ggctctcctctacattctgt

SEQ ID NO: 7212 - DNA, 20 bp, Artificial Sequence
  chemically synthesized
ctctacattctgtgagcaaa

SEQ ID NO: 7213 - DNA, 20 bp, Artificial Sequence
  chemically synthesized
caaacggaaaaataaaccat

SEQ ID NO: 7214 - DNA, 20 bp, Artificial Sequence
  chemically synthesized
gaaaaataaaccatcggaaa

SEQ ID NO: 7215 - DNA, 20 bp, Artificial Sequence
  chemically synthesized
taaaccatcggaaaaagtct

SEQ ID NO: 7216 - DNA, 20 bp, Artificial Sequence
  chemically synthesized
ctcagcctaataaaactgca

SEQ ID NO: 7217 - DNA, 20 bp, Artificial Sequence
  chemically synthesized
gcctaataaaactgcacaga

SEQ ID NO: 7218 - DNA, 20 bp, Artificial Sequence
  chemically synthesized
agacagaataacttcttcat

SEQ ID NO: 7219 - DNA, 20 bp, Artificial Sequence
  chemically synthesized
aataacttcttcatcagatt

SEQ ID NO: 7220 - DNA, 20 bp, Artificial Sequence
  chemically synthesized
aacttcttcatcagattcag

SEQ ID NO: 7221 - DNA, 20 bp, Artificial Sequence
  chemically synthesized
cttcttcatcagattcagaa

SEQ ID NO: 7222 - DNA, 20 bp, Artificial Sequence
  chemically synthesized
cttcatcagattcagaagag

SEQ ID NO: 7223 - DNA, 20 bp, Artificial Sequence
  chemically synthesized
catcagattcagaagagtag

SEQ ID NO: 7224 - DNA, 20 bp, Artificial Sequence
  chemically synthesized
atcagattcagaagagtagc

SEQ ID NO: 7225 - DNA, 20 bp, Artificial Sequence
  chemically synthesized
tcagattcagaagagtagca

SEQ ID NO: 7226 - DNA, 20 bp, Artificial Sequence
  chemically synthesized
cagattcagaagagtagcag

SEQ ID NO: 7227 - DNA, 20 bp, Artificial Sequence
  chemically synthesized
agattcagaagagtagcagg

SEQ ID NO: 7228 - DNA, 20 bp, Artificial Sequence
  chemically synthesized
agtagcagggggtttctcgc

SEQ ID NO: 7229 - DNA, 20 bp, Artificial Sequence
  chemically synthesized
cagggggtttctcgctagca

SEQ ID NO: 7230 - DNA, 20 bp, Artificial Sequence
  chemically synthesized
tttctcgctagcacagattt

SEQ ID NO: 7231 - DNA, 20 bp, Artificial Sequence
  chemically synthesized
acactttgtacatacaattc

SEQ ID NO: 7232 - DNA, 20 bp, Artificial Sequence
  chemically synthesized
cactttgtacatacaattct

SEQ ID NO: 7233 - DNA, 20 bp, Artificial Sequence
  chemically synthesized
tacatacaattctgggatct

SEQ ID NO: 7234 - DNA, 20 bp, Artificial Sequence
  chemically synthesized
acatacaattctgggatctc

SEQ ID NO: 7235 - DNA, 20 bp, Artificial Sequence
  chemically synthesized
gatctcaggtattgctccta

SEQ ID NO: 7236 - DNA, 20 bp, Artificial Sequence
  chemically synthesized
tcaggtattgctcctaaaga

SEQ ID NO: 7237 - DNA, 20 bp, Artificial Sequence
  chemically synthesized
aggtattgctcctaaagaaa

SEQ ID NO: 7238 - DNA, 20 bp, Artificial Sequence
  chemically synthesized
attgctcctaaagaaagagc

SEQ ID NO: 7239 - DNA, 20 bp, Artificial Sequence
  chemically synthesized
tatcttcctccaacatccaa

SEQ ID NO: 7240 - DNA, 20 bp, Artificial Sequence
  chemically synthesized
cttcctccaacatccaaaag

SEQ ID NO: 7241 - DNA, 20 bp, Artificial Sequence
  chemically synthesized
taatattaaaatatgaattt

SEQ ID NO: 7242 - DNA, 20 bp, Artificial Sequence
  chemically synthesized
aatatgaatttaagaaatac

SEQ ID NO: 7243 - DNA, 20 bp, Artificial Sequence
  chemically synthesized
atttaagaaataccagtgaa

SEQ ID NO: 7244 - DNA, 20 bp, Artificial Sequence
  chemically synthesized
ttaagaaataccagtgaaaa

SEQ ID NO: 7245 - DNA, 20 bp, Artificial Sequence
  chemically synthesized
tgaaaagagattttttaaac

SEQ ID NO: 7246 - DNA, 20 bp, Artificial Sequence
  chemically synthesized
aaactgttttcaatcatcat

SEQ ID NO: 7247 - DNA, 20 bp, Artificial Sequence
  chemically synthesized
actgttttcaatcatcatca

SEQ ID NO: 7248 - DNA, 20 bp, Artificial Sequence
  chemically synthesized
aacaaatttacctctgatca

SEQ ID NO: 7249 - DNA, 20 bp, Artificial Sequence
  chemically synthesized
aaatttacctctgatcatgg

SEQ ID NO: 7250 - DNA, 20 bp, Artificial Sequence
  chemically synthesized
tacctctgatcatggtagca

SEQ ID NO: 7251 - DNA, 20 bp, Artificial Sequence
  chemically synthesized
ctctgatcatggtagcacag

SEQ ID NO: 7252 - DNA, 20 bp, Artificial Sequence
  chemically synthesized
ctgatcatggtagcacagta

SEQ ID NO: 7253 - DNA, 20 bp, Artificial Sequence
  chemically synthesized
atcatggtagcacagtagag

SEQ ID NO: 7254 - DNA, 20 bp, Artificial Sequence
  chemically synthesized
tggtagcacagtagagcaga

SEQ ID NO: 7255 - DNA, 20 bp, Artificial Sequence
  chemically synthesized
gtagcacagtagagcagaaa

SEQ ID NO: 7256 - DNA, 20 bp, Artificial Sequence
  chemically synthesized
gagcagaaagagcactcaat

SEQ ID NO: 7257 - DNA, 20 bp, Artificial Sequence
  chemically synthesized
agcactcaattggtgatcaa

SEQ ID NO: 7258 - DNA, 20 bp, Artificial Sequence
  chemically synthesized
tgatcaaaagaaataaattc

SEQ ID NO: 7259 - DNA, 20 bp, Artificial Sequence
  chemically synthesized
taaattctagtcctgtcacc

SEQ ID NO: 7260 - DNA, 20 bp, Artificial Sequence
  chemically synthesized
tcacccagaaactatgtgac

SEQ ID NO: 7261 - DNA, 20 bp, Artificial Sequence
  chemically synthesized
cacccagaaactatgtgacc

SEQ ID NO: 7262 - DNA, 20 bp, Artificial Sequence
  chemically synthesized
acccagaaactatgtgacca

SEQ ID NO: 7263 - DNA, 20 bp, Artificial Sequence
  chemically synthesized
cccagaaactatgtgaccag

SEQ ID NO: 7264 - DNA, 20 bp, Artificial Sequence
  chemically synthesized
cagaaactatgtgaccaggg

SEQ ID NO: 7265 - DNA, 20 bp, Artificial Sequence
  chemically synthesized
agaaactatgtgaccagggg

SEQ ID NO: 7266 - DNA, 20 bp, Artificial Sequence
  chemically synthesized
aggggaggtacttaatctct

SEQ ID NO: 7267 - DNA, 20 bp, Artificial Sequence
  chemically synthesized
gggaggtacttaatctctaa

SEQ ID NO: 7268 - DNA, 20 bp, Artificial Sequence
  chemically synthesized
acttaatctctaagagaatc

SEQ ID NO: 7269 - DNA, 20 bp, Artificial Sequence
  chemically synthesized
ctctaagagaatcaagtctc

SEQ ID NO: 7270 - DNA, 20 bp, Artificial Sequence
  chemically synthesized
taagagaatcaagtctcgag

SEQ ID NO: 7271 - DNA, 20 bp, Artificial Sequence
  chemically synthesized
aagagaatcaagtctcgagt

SEQ ID NO: 7272 - DNA, 20 bp, Artificial Sequence
  chemically synthesized
aagtctcgagtgggtaaaat

SEQ ID NO: 7273 - DNA, 20 bp, Artificial Sequence
  chemically synthesized
ctcgagtgggtaaaatgagc

SEQ ID NO: 7274 - DNA, 20 bp, Artificial Sequence
  chemically synthesized
tcgagtgggtaaaatgagct

SEQ ID NO: 7275 - DNA, 20 bp, Artificial Sequence
  chemically synthesized
cgagtgggtaaaatgagctg

SEQ ID NO: 7276 - DNA, 20 bp, Artificial Sequence
  chemically synthesized
gtgggtaaaatgagctgggg

SEQ ID NO: 7277 - DNA, 20 bp, Artificial Sequence
  chemically synthesized
tgggtaaaatgagctgggga

SEQ ID NO: 7278 - DNA, 20 bp, Artificial Sequence
  chemically synthesized
ggtaaaatgagctggggaag

SEQ ID NO: 7279 - DNA, 20 bp, Artificial Sequence
  chemically synthesized
gagctggggaaggagtgaac

SEQ ID NO: 7280 - DNA, 20 bp, Artificial Sequence
  chemically synthesized
tggggaaggagtgaaccagt

SEQ ID NO: 7281 - DNA, 20 bp, Artificial Sequence
  chemically synthesized
gaaggagtgaaccagtgaga

SEQ ID NO: 7282 - DNA, 20 bp, Artificial Sequence
  chemically synthesized
gaaccagtgagaaagaacac

SEQ ID NO: 7283 - DNA, 20 bp, Artificial Sequence
  chemically synthesized
agaaagaacactggtctgtc

SEQ ID NO: 7284 - DNA, 20 bp, Artificial Sequence
  chemically synthesized
gaaagaacactggtctgtct

SEQ ID NO: 7285 - DNA, 20 bp, Artificial Sequence
  chemically synthesized
aaagaacactggtctgtctg

SEQ ID NO: 7286 - DNA, 20 bp, Artificial Sequence
  chemically synthesized
actggtctgtctggggctcc

SEQ ID NO: 7287 - DNA, 20 bp, Artificial Sequence
  chemically synthesized
ggtctgtctggggctcccag

SEQ ID NO: 7288 - DNA, 20 bp, Artificial Sequence
  chemically synthesized
tctggggctcccagaagaca

SEQ ID NO: 7289 - DNA, 20 bp, Artificial Sequence
  chemically synthesized
gggctcccagaagacacagc

SEQ ID NO: 7290 - DNA, 20 bp, Artificial Sequence
  chemically synthesized
caaacacctccttgtctttt

SEQ ID NO: 7291 - DNA, 20 bp, Artificial Sequence
  chemically synthesized
aaacacctccttgtctttta

SEQ ID NO: 7292 - DNA, 20 bp, Artificial Sequence
  chemically synthesized
cctccttgtcttttaaggcc

SEQ ID NO: 7293 - DNA, 20 bp, Artificial Sequence
  chemically synthesized
ctccttgtcttttaaggcct

SEQ ID NO: 7294 - DNA, 20 bp, Artificial Sequence
  chemically synthesized
cttttaaggcctgggctgtc

SEQ ID NO: 7295 - DNA, 20 bp, Artificial Sequence
  chemically synthesized
ttttaaggcctgggctgtct

SEQ ID NO: 7296 - DNA, 20 bp, Artificial Sequence
  chemically synthesized
tttaaggcctgggctgtcta

SEQ ID NO: 7297 - DNA, 20 bp, Artificial Sequence
  chemically synthesized
ttaaggcctgggctgtctag

SEQ ID NO: 7298 - DNA, 20 bp, Artificial Sequence
  chemically synthesized
taaggcctgggctgtctagg

SEQ ID NO: 7299 - DNA, 20 bp, Artificial Sequence
  chemically synthesized
gcctgggctgtctaggggga

SEQ ID NO: 7300 - DNA, 20 bp, Artificial Sequence
  chemically synthesized
ctgtctagggggatggctac

SEQ ID NO: 7301 - DNA, 20 bp, Artificial Sequence
  chemically synthesized
tagggggatggctactggct

SEQ ID NO: 7302 - DNA, 20 bp, Artificial Sequence
  chemically synthesized
gggggatggctactggcttg

SEQ ID NO: 7303 - DNA, 20 bp, Artificial Sequence
  chemically synthesized
gtctgtcatcttaatacaca

SEQ ID NO: 7304 - DNA, 20 bp, Artificial Sequence
  chemically synthesized
acacggaatgtgttgaaatg

SEQ ID NO: 7305 - DNA, 20 bp, Artificial Sequence
  chemically synthesized
cacggaatgtgttgaaatga

SEQ ID NO: 7306 - DNA, 20 bp, Artificial Sequence
  chemically synthesized
ttgaaatgaaggtgtctgtg

SEQ ID NO: 7307 - DNA, 20 bp, Artificial Sequence
  chemically synthesized
aaatgaaggtgtctgtgtgg

SEQ ID NO: 7308 - DNA, 20 bp, Artificial Sequence
  chemically synthesized
aatgaaggtgtctgtgtgga

SEQ ID NO: 7309 - DNA, 20 bp, Artificial Sequence
  chemically synthesized
atgaaggtgtctgtgtggaa

SEQ ID NO: 7310 - DNA, 20 bp, Artificial Sequence
  chemically synthesized
aggtgtctgtgtggaaggga

SEQ ID NO: 7311 - DNA, 20 bp, Artificial Sequence
  chemically synthesized
ctgtgtggaagggacagacc

SEQ ID NO: 7312 - DNA, 20 bp, Artificial Sequence
  chemically synthesized
gatccactctgcatttgtcc

SEQ ID NO: 7313 - DNA, 20 bp, Artificial Sequence
  chemically synthesized
ctctgcatttgtcctggcaa

SEQ ID NO: 7314 - DNA, 20 bp, Artificial Sequence
  chemically synthesized
tctgcatttgtcctggcaat

SEQ ID NO: 7315 - DNA, 20 bp, Artificial Sequence
  chemically synthesized
tgcatttgtcctggcaatgg

SEQ ID NO: 7316 - DNA, 20 bp, Artificial Sequence
  chemically synthesized
atttgtcctggcaatgggag

SEQ ID NO: 7317 - DNA, 20 bp, Artificial Sequence
  chemically synthesized
tttgtcctggcaatgggagc

SEQ ID NO: 7318 - DNA, 20 bp, Artificial Sequence
  chemically synthesized
ctggcaatgggagcaggaat

SEQ ID NO: 7319 - DNA, 20 bp, Artificial Sequence
  chemically synthesized
gagtccaccttctctaaacc

SEQ ID NO: 7320 - DNA, 20 bp, Artificial Sequence
  chemically synthesized
tctctaaacctggtcactcc

SEQ ID NO: 7321 - DNA, 20 bp, Artificial Sequence
  chemically synthesized
acctggtcactcctagtccc

SEQ ID NO: 7322 - DNA, 20 bp, Artificial Sequence
  chemically synthesized
ggtcactcctagtcccaaga

SEQ ID NO: 7323 - DNA, 20 bp, Artificial Sequence
  chemically synthesized
tcactcctagtcccaagatg

SEQ ID NO: 7324 - DNA, 20 bp, Artificial Sequence
  chemically synthesized
ctcctagtcccaagatggag

SEQ ID NO: 7325 - DNA, 20 bp, Artificial Sequence
  chemically synthesized
cacatcacccttgatcatgt

SEQ ID NO: 7326 - DNA, 20 bp, Artificial Sequence
  chemically synthesized
atcatgttagccccattctg

SEQ ID NO: 7327 - DNA, 20 bp, Artificial Sequence
  chemically synthesized
ttagccccattctgcagcct

SEQ ID NO: 7328 - DNA, 20 bp, Artificial Sequence
  chemically synthesized
tagccccattctgcagcctc

SEQ ID NO: 7329 - DNA, 20 bp, Artificial Sequence
  chemically synthesized
gccccattctgcagcctcag

SEQ ID NO: 7330 - DNA, 20 bp, Artificial Sequence
  chemically synthesized
ccccattctgcagcctcagg

SEQ ID NO: 7331 - DNA, 20 bp, Artificial Sequence
  chemically synthesized
cagcctcaggaggctctgac

SEQ ID NO: 7332 - DNA, 20 bp, Artificial Sequence
  chemically synthesized
agcctcaggaggctctgacc

SEQ ID NO: 7333 - DNA, 20 bp, Artificial Sequence
  chemically synthesized
ctcaggaggctctgaccagg

SEQ ID NO: 7334 - DNA, 20 bp, Artificial Sequence
  chemically synthesized
ggaggctctgaccaggtgga

SEQ ID NO: 7335 - DNA, 20 bp, Artificial Sequence
  chemically synthesized
gctctgaccaggtggaaagc

SEQ ID NO: 7336 - DNA, 20 bp, Artificial Sequence
  chemically synthesized
gaccaggtggaaagccagaa

SEQ ID NO: 7337 - DNA, 20 bp, Artificial Sequence
  chemically synthesized
accaggtggaaagccagaat

SEQ ID NO: 7338 - DNA, 20 bp, Artificial Sequence
  chemically synthesized
ccaggtggaaagccagaatg

SEQ ID NO: 7339 - DNA, 20 bp, Artificial Sequence
  chemically synthesized
aagccagaatggggtccaac

SEQ ID NO: 7340 - DNA, 20 bp, Artificial Sequence
  chemically synthesized
agccagaatggggtccaacc

SEQ ID NO: 7341 - DNA, 20 bp, Artificial Sequence
  chemically synthesized
ccagaatggggtccaaccag

SEQ ID NO: 7342 - DNA, 20 bp, Artificial Sequence
  chemically synthesized
ggggtccaaccaggagaccc

SEQ ID NO: 7343 - DNA, 20 bp, Artificial Sequence
  chemically synthesized
tccaaccaggagacccaaga

SEQ ID NO: 7344 - DNA, 20 bp, Artificial Sequence
  chemically synthesized
ccaggagacccaagacagaa

SEQ ID NO: 7345 - DNA, 20 bp, Artificial Sequence
  chemically synthesized
caggagacccaagacagaaa

SEQ ID NO: 7346 - DNA, 20 bp, Artificial Sequence
  chemically synthesized
gagacccaagacagaaaagg

SEQ ID NO: 7347 - DNA, 20 bp, Artificial Sequence
  chemically synthesized
agacccaagacagaaaaggc

SEQ ID NO: 7348 - DNA, 20 bp, Artificial Sequence
  chemically synthesized
cccaagacagaaaaggcagg

SEQ ID NO: 7349 - DNA, 20 bp, Artificial Sequence
  chemically synthesized
cagaaaaggcaggtggctgc

SEQ ID NO: 7350 - DNA, 20 bp, Artificial Sequence
  chemically synthesized
agaaaaggcaggtggctgca

SEQ ID NO: 7351 - DNA, 20 bp, Artificial Sequence
  chemically synthesized
aaaaggcaggtggctgcaag

SEQ ID NO: 7352 - DNA, 20 bp, Artificial Sequence
  chemically synthesized
tgcaaggagcctcacttctc

SEQ ID NO: 7353 - DNA, 20 bp, Artificial Sequence
  chemically synthesized
gcaaggagcctcacttctcc

SEQ ID NO: 7354 - DNA, 20 bp, Artificial Sequence
  chemically synthesized
cttacccatgccacccaccg

SEQ ID NO: 7355 - DNA, 20 bp, Artificial Sequence
  chemically synthesized
ccatgccacccaccgcagcc

SEQ ID NO: 7356 - DNA, 20 bp, Artificial Sequence
  chemically synthesized
gccacccaccgcagcctgga

SEQ ID NO: 7357 - DNA, 20 bp, Artificial Sequence
  chemically synthesized
ccacccaccgcagcctggac

SEQ ID NO: 7358 - DNA, 20 bp, Artificial Sequence
  chemically synthesized
cgcagcctggacaggcattc

SEQ ID NO: 7359 - DNA, 20 bp, Artificial Sequence
  chemically synthesized
gcagcctggacaggcattcc

SEQ ID NO: 7360 - DNA, 20 bp, Artificial Sequence
  chemically synthesized
agcctggacaggcattccag

SEQ ID NO: 7361 - DNA, 20 bp, Artificial Sequence
  chemically synthesized
tggacaggcattccaggagc

SEQ ID NO: 7362 - DNA, 20 bp, Artificial Sequence
  chemically synthesized
ccaggagccagacatgtccc

SEQ ID NO: 7363 - DNA, 20 bp, Artificial Sequence
  chemically synthesized
ggagccagacatgtccctgg

SEQ ID NO: 7364 - DNA, 20 bp, Artificial Sequence
  chemically synthesized
ccagacatgtccctggaaga

SEQ ID NO: 7365 - DNA, 20 bp, Artificial Sequence
  chemically synthesized
gacatgtccctggaagacag

SEQ ID NO: 7366 - DNA, 20 bp, Artificial Sequence
  chemically synthesized
acatgtccctggaagacagt

SEQ ID NO: 7367 - DNA, 20 bp, Artificial Sequence
  chemically synthesized
agtaggctattgcttcctct

SEQ ID NO: 7368 - DNA, 20 bp, Artificial Sequence
  chemically synthesized
agcactgcaacaattttctc

SEQ ID NO: 7369 - DNA, 20 bp, Artificial Sequence
  chemically synthesized
ccctctcctccacctattca

SEQ ID NO: 7370 - DNA, 20 bp, Artificial Sequence
  chemically synthesized
ctcctccacctattcacaga

SEQ ID NO: 7371 - DNA, 20 bp, Artificial Sequence
  chemically synthesized
tcctccacctattcacagat

SEQ ID NO: 7372 - DNA, 20 bp, Artificial Sequence
  chemically synthesized
cctccacctattcacagatg

SEQ ID NO: 7373 - DNA, 20 bp, Artificial Sequence
  chemically synthesized
taaccctccctcctatccat

SEQ ID NO: 7374 - DNA, 20 bp, Artificial Sequence
  chemically synthesized
tccattagattgcccaaatc

SEQ ID NO: 7375 - DNA, 20 bp, Artificial Sequence
  chemically synthesized
ccattagattgcccaaatct

SEQ ID NO: 7376 - DNA, 20 bp, Artificial Sequence
  chemically synthesized
aaatctgggaaaataatgtg

SEQ ID NO: 7377 - DNA, 20 bp, Artificial Sequence
  chemically synthesized
ggaaaataatgtgtggcgct

SEQ ID NO: 7378 - DNA, 20 bp, Artificial Sequence
  chemically synthesized
gaaaataatgtgtggcgctc

SEQ ID NO: 7379 - DNA, 20 bp, Artificial Sequence
  chemically synthesized
aatgtgtggcgctcaggtct

SEQ ID NO: 7380 - DNA, 20 bp, Artificial Sequence
  chemically synthesized
gtggcgctcaggtctgagtg

SEQ ID NO: 7381 - DNA, 20 bp, Artificial Sequence
  chemically synthesized
ctcaggtctgagtgcagacc

SEQ ID NO: 7382 - DNA, 20 bp, Artificial Sequence
  chemically synthesized
gcagaccaagctcccaatac

SEQ ID NO: 7383 - DNA, 20 bp, Artificial Sequence
  chemically synthesized
gaccaagctcccaataccag

SEQ ID NO: 7384 - DNA, 20 bp, Artificial Sequence
  chemically synthesized
cccaataccagtggctcttt

SEQ ID NO: 7385 - DNA, 20 bp, Artificial Sequence
  chemically synthesized
ccaataccagtggctctttc

SEQ ID NO: 7386 - DNA, 20 bp, Artificial Sequence
  chemically synthesized
gtggctctttcaggcttaca

SEQ ID NO: 7387 - DNA, 20 bp, Artificial Sequence
  chemically synthesized
ctttcaggcttacaaagcct

SEQ ID NO: 7388 - DNA, 20 bp, Artificial Sequence
  chemically synthesized
tcaggcttacaaagccttgg

SEQ ID NO: 7389 - DNA, 20 bp, Artificial Sequence
  chemically synthesized
gccttggtggtttccacacc

SEQ ID NO: 7390 - DNA, 20 bp, Artificial Sequence
  chemically synthesized
ttggtggtttccacacccag

SEQ ID NO: 7391 - DNA, 20 bp, Artificial Sequence
  chemically synthesized
cacacccagcagttcctacc

SEQ ID NO: 7392 - DNA, 20 bp, Artificial Sequence
  chemically synthesized
acacccagcagttcctaccc

SEQ ID NO: 7393 - DNA, 20 bp, Artificial Sequence
  chemically synthesized
agcagttcctacccaggact

SEQ ID NO: 7394 - DNA, 20 bp, Artificial Sequence
  chemically synthesized
agttcctacccaggactgag

SEQ ID NO: 7395 - DNA, 20 bp, Artificial Sequence
  chemically synthesized
acccaggactgagaagccct

SEQ ID NO: 7396 - DNA, 20 bp, Artificial Sequence
  chemically synthesized
agaagccctcagcaaacacc

SEQ ID NO: 7397 - DNA, 20 bp, Artificial Sequence
  chemically synthesized
gccctcagcaaacacccaga

SEQ ID NO: 7398 - DNA, 20 bp, Artificial Sequence
  chemically synthesized
atggcccttgttcaccctcc

SEQ ID NO: 7399 - DNA, 20 bp, Artificial Sequence
  chemically synthesized
ttcaccctcctggaaaccta

SEQ ID NO: 7400 - DNA, 20 bp, Artificial Sequence
  chemically synthesized
tcctggaaacctatagctgc

SEQ ID NO: 7401 - DNA, 20 bp, Artificial Sequence
  chemically synthesized
cctggaaacctatagctgcc

SEQ ID NO: 7402 - DNA, 20 bp, Artificial Sequence
  chemically synthesized
ctggaaacctatagctgcca

SEQ ID NO: 7403 - DNA, 20 bp, Artificial Sequence
  chemically synthesized
agggaaatgtgacattttgt

SEQ ID NO: 7404 - DNA, 20 bp, Artificial Sequence
  chemically synthesized
gggaaatgtgacattttgtg

SEQ ID NO: 7405 - DNA, 20 bp, Artificial Sequence
  chemically synthesized
gaggactaatttaacccgcc

SEQ ID NO: 7406 - DNA, 20 bp, Artificial Sequence
  chemically synthesized
gactaatttaacccgcctag

SEQ ID NO: 7407 - DNA, 20 bp, Artificial Sequence
  chemically synthesized
tttaacccgcctagaagatt

SEQ ID NO: 7408 - DNA, 20 bp, Artificial Sequence
  chemically synthesized
ttaacccgcctagaagattt

SEQ ID NO: 7409 - DNA, 20 bp, Artificial Sequence
  chemically synthesized
aacccgcctagaagatttag

SEQ ID NO: 7410 - DNA, 20 bp, Artificial Sequence
  chemically synthesized
gcctagaagatttaggagcc

SEQ ID NO: 7411 - DNA, 20 bp, Artificial Sequence
  chemically synthesized
ggagccaagatgcaacccta

SEQ ID NO: 7412 - DNA, 20 bp, Artificial Sequence
  chemically synthesized
gcaaccctaaagcccactgc

SEQ ID NO: 7413 - DNA, 20 bp, Artificial Sequence
  chemically synthesized
caaccctaaagcccactgca

SEQ ID NO: 7414 - DNA, 20 bp, Artificial Sequence
  chemically synthesized
aaccctaaagcccactgcaa

SEQ ID NO: 7415 - DNA, 20 bp, Artificial Sequence
  chemically synthesized
cactgcaagggacaatattc

SEQ ID NO: 7416 - DNA, 20 bp, Artificial Sequence
  chemically synthesized
caatattctggatcttttgt

SEQ ID NO: 7417 - DNA, 20 bp, Artificial Sequence
  chemically synthesized
atattctggatcttttgtca

SEQ ID NO: 7418 - DNA, 20 bp, Artificial Sequence
  chemically synthesized
aataaaatttttatattaaa

SEQ ID NO: 7419 - DNA, 20 bp, Artificial Sequence
  chemically synthesized
catctaaacctcctgaaaat

SEQ ID NO: 7420 - DNA, 20 bp, Artificial Sequence
  chemically synthesized
acctcctgaaaattggttat

SEQ ID NO: 7421 - DNA, 20 bp, Artificial Sequence
  chemically synthesized
attggctgcttcgttgattc

SEQ ID NO: 7422 - DNA, 20 bp, Artificial Sequence
  chemically synthesized
ttcgttgattctagaaaaaa

SEQ ID NO: 7423 - DNA, 20 bp, Artificial Sequence
  chemically synthesized
ttgattctagaaaaaaaaga

SEQ ID NO: 7424 - DNA, 20 bp, Artificial Sequence
  chemically synthesized
ttctagaaaaaaaagaaagc

SEQ ID NO: 7425 - DNA, 20 bp, Artificial Sequence
  chemically synthesized
aaaaaagaaagcaagaaatg

SEQ ID NO: 7426 - DNA, 20 bp, Artificial Sequence
  chemically synthesized
aaaaagaaagcaagaaatgc

SEQ ID NO: 7427 - DNA, 20 bp, Artificial Sequence
  chemically synthesized
agaaagcaagaaatgcagga

SEQ ID NO: 7428 - DNA, 20 bp, Artificial Sequence
  chemically synthesized
gaaagcaagaaatgcaggaa

SEQ ID NO: 7429 - DNA, 20 bp, Artificial Sequence
  chemically synthesized
aagaaatgcaggaaaggaac

SEQ ID NO: 7430 - DNA, 20 bp, Artificial Sequence
  chemically synthesized
agaaatgcaggaaaggaacg

SEQ ID NO: 7431 - DNA, 20 bp, Artificial Sequence
  chemically synthesized
gaaatgcaggaaaggaacga

SEQ ID NO: 7432 - DNA, 20 bp, Artificial Sequence
  chemically synthesized
aaatgcaggaaaggaacgag

SEQ ID NO: 7433 - DNA, 20 bp, Artificial Sequence
  chemically synthesized
aatgcaggaaaggaacgagg

SEQ ID NO: 7434 - DNA, 20 bp, Artificial Sequence
  chemically synthesized
gcaggaaaggaacgaggggg

SEQ ID NO: 7435 - DNA, 20 bp, Artificial Sequence
  chemically synthesized
aggaaaggaacgagggggca

SEQ ID NO: 7436 - DNA, 20 bp, Artificial Sequence
  chemically synthesized
gaaaggaacgagggggcaga

SEQ ID NO: 7437 - DNA, 20 bp, Artificial Sequence
  chemically synthesized
aaaggaacgagggggcagag

SEQ ID NO: 7438 - DNA, 20 bp, Artificial Sequence
  chemically synthesized
aaggaacgagggggcagaga

SEQ ID NO: 7439 - DNA, 20 bp, Artificial Sequence
  chemically synthesized
agggggcagagagggaatga

SEQ ID NO: 7440 - DNA, 20 bp, Artificial Sequence
  chemically synthesized
gagagggaatgaaagacact

SEQ ID NO: 7441 - DNA, 20 bp, Artificial Sequence
  chemically synthesized
aatgaaagacactgagtatt

SEQ ID NO: 7442 - DNA, 20 bp, Artificial Sequence
  chemically synthesized
atgaaagacactgagtatta

SEQ ID NO: 7443 - DNA, 20 bp, Artificial Sequence
  chemically synthesized
ctgagtattaaggcccaacc

SEQ ID NO: 7444 - DNA, 20 bp, Artificial Sequence
  chemically synthesized
ccagccaaaaccccatctgc

SEQ ID NO: 7445 - DNA, 20 bp, Artificial Sequence
  chemically synthesized
gccaaaaccccatctgctag

SEQ ID NO: 7446 - DNA, 20 bp, Artificial Sequence
  chemically synthesized
cccatctgctagaagcctgc

SEQ ID NO: 7447 - DNA, 20 bp, Artificial Sequence
  chemically synthesized
atctgctagaagcctgctgg

SEQ ID NO: 7448 - DNA, 20 bp, Artificial Sequence
  chemically synthesized
aagcctgctggaagcctaca

SEQ ID NO: 7449 - DNA, 20 bp, Artificial Sequence
  chemically synthesized
ctggaagcctacatggcttc

SEQ ID NO: 7450 - DNA, 20 bp, Artificial Sequence
  chemically synthesized
gaagcctacatggcttcgag

SEQ ID NO: 7451 - DNA, 20 bp, Artificial Sequence
  chemically synthesized
ggcttcgagcggcacattct

SEQ ID NO: 7452 - DNA, 20 bp, Artificial Sequence
  chemically synthesized
ggcacattctgagaactctg

SEQ ID NO: 7453 - DNA, 20 bp, Artificial Sequence
  chemically synthesized
cacattctgagaactctgaa

SEQ ID NO: 7454 - DNA, 20 bp, Artificial Sequence
  chemically synthesized
gaactctgaagagtaccact

SEQ ID NO: 7455 - DNA, 20 bp, Artificial Sequence
  chemically synthesized
ccgacactgcccccatgaca

SEQ ID NO: 7456 - DNA, 20 bp, Artificial Sequence
  chemically synthesized
cgacactgcccccatgacat

SEQ ID NO: 7457 - DNA, 20 bp, Artificial Sequence
  chemically synthesized
gacactgcccccatgacata

SEQ ID NO: 7458 - DNA, 20 bp, Artificial Sequence
  chemically synthesized
gcccccatgacatagggccc

SEQ ID NO: 7459 - DNA, 20 bp, Artificial Sequence
  chemically synthesized
ctctttgactcacacttgcc

SEQ ID NO: 7460 - DNA, 20 bp, Artificial Sequence
  chemically synthesized
tttgactcacacttgcctgg

SEQ ID NO: 7461 - DNA, 20 bp, Artificial Sequence
  chemically synthesized
ttgactcacacttgcctggc

SEQ ID NO: 7462 - DNA, 20 bp, Artificial Sequence
  chemically synthesized
gcctggcaggactccccaaa

SEQ ID NO: 7463 - DNA, 20 bp, Artificial Sequence
  chemically synthesized
gcaggactccccaaacagaa

SEQ ID NO: 7464 - DNA, 20 bp, Artificial Sequence
  chemically synthesized
aggactccccaaacagaaca

SEQ ID NO: 7465 - DNA, 20 bp, Artificial Sequence
  chemically synthesized
ccaaacagaacagagatgct

SEQ ID NO: 7466 - DNA, 20 bp, Artificial Sequence
  chemically synthesized
acagaacagagatgctcagc

SEQ ID NO: 7467 - DNA, 20 bp, Artificial Sequence
  chemically synthesized
cagaacagagatgctcagcc

SEQ ID NO: 7468 - DNA, 20 bp, Artificial Sequence
  chemically synthesized
agagatgctcagccgggcac

SEQ ID NO: 7469 - DNA, 20 bp, Artificial Sequence
  chemically synthesized
agatgctcagccgggcacaa

SEQ ID NO: 7470 - DNA, 20 bp, Artificial Sequence
  chemically synthesized
atgctcagccgggcacaaga

SEQ ID NO: 7471 - DNA, 20 bp, Artificial Sequence
  chemically synthesized
ctcagccgggcacaagagag

SEQ ID NO: 7472 - DNA, 20 bp, Artificial Sequence
  chemically synthesized
tcagccgggcacaagagagc

SEQ ID NO: 7473 - DNA, 20 bp, Artificial Sequence
  chemically synthesized
gggcacaagagagcaggccc

SEQ ID NO: 7474 - DNA, 20 bp, Artificial Sequence
  chemically synthesized
ggcacaagagagcaggcccc

SEQ ID NO: 7475 - DNA, 20 bp, Artificial Sequence
  chemically synthesized
gcacaagagagcaggcccca

SEQ ID NO: 7476 - DNA, 20 bp, Artificial Sequence
  chemically synthesized
ccagggctcatgctgcactg

SEQ ID NO: 7477 - DNA, 20 bp, Artificial Sequence
  chemically synthesized
atgctgcactgtggtttccc

SEQ ID NO: 7478 - DNA, 20 bp, Artificial Sequence
  chemically synthesized
tgtggtttccccagcaattc

SEQ ID NO: 7479 - DNA, 20 bp, Artificial Sequence
  chemically synthesized
attccagaactgctgcctac

SEQ ID NO: 7480 - DNA, 20 bp, Artificial Sequence
  chemically synthesized
gctgcctaccggcacgcatg

SEQ ID NO: 7481 - DNA, 20 bp, Artificial Sequence
  chemically synthesized
ctgcctaccggcacgcatgc

SEQ ID NO: 7482 - DNA, 20 bp, Artificial Sequence
  chemically synthesized
cgcatgcaggatcaatgatg

SEQ ID NO: 7483 - DNA, 20 bp, Artificial Sequence
  chemically synthesized
caggatcaatgatgaagatg

SEQ ID NO: 7484 - DNA, 20 bp, Artificial Sequence
  chemically synthesized
gatgaagatgcagtaccttc

SEQ ID NO: 7485 - DNA, 20 bp, Artificial Sequence
  chemically synthesized
atgaagatgcagtaccttct

SEQ ID NO: 7486 - DNA, 20 bp, Artificial Sequence
  chemically synthesized
cagtaccttctgggtctgcc

SEQ ID NO: 7487 - DNA, 20 bp, Artificial Sequence
  chemically synthesized
agtaccttctgggtctgcct

SEQ ID NO: 7488 - DNA, 20 bp, Artificial Sequence
  chemically synthesized
tgggtccacccttcctttct

SEQ ID NO: 7489 - DNA, 20 bp, Artificial Sequence
  chemically synthesized
cttcctttcttagtcactgc

SEQ ID NO: 7490 - DNA, 20 bp, Artificial Sequence
  chemically synthesized
agtcactgcaagatttcacc

SEQ ID NO: 7491 - DNA, 20 bp, Artificial Sequence
  chemically synthesized
ctgcaagatttcacccagcc

SEQ ID NO: 7492 - DNA, 20 bp, Artificial Sequence
  chemically synthesized
cagcccagccacccactgaa

SEQ ID NO: 7493 - DNA, 20 bp, Artificial Sequence
  chemically synthesized
agcccagccacccactgaaa

SEQ ID NO: 7494 - DNA, 20 bp, Artificial Sequence
  chemically synthesized
ccagccacccactgaaaagg

SEQ ID NO: 7495 - DNA, 20 bp, Artificial Sequence
  chemically synthesized
agccacccactgaaaaggca

SEQ ID NO: 7496 - DNA, 20 bp, Artificial Sequence
  chemically synthesized
gccacccactgaaaaggcag

SEQ ID NO: 7497 - DNA, 20 bp, Artificial Sequence
  chemically synthesized
cacccactgaaaaggcagag

SEQ ID NO: 7498 - DNA, 20 bp, Artificial Sequence
  chemically synthesized
acccactgaaaaggcagagg

SEQ ID NO: 7499 - DNA, 20 bp, Artificial Sequence
  chemically synthesized
gaggccacctatctgaatgc

SEQ ID NO: 7500 - DNA, 20 bp, Artificial Sequence
  chemically synthesized
aggccacctatctgaatgct

SEQ ID NO: 7501 - DNA, 20 bp, Artificial Sequence
  chemically synthesized
acacacttgaaccttcctcc

SEQ ID NO: 7502 - DNA, 20 bp, Artificial Sequence
  chemically synthesized
acttgaaccttcctcctggc

SEQ ID NO: 7503 - DNA, 20 bp, Artificial Sequence
  chemically synthesized
ctggccagcctgctctccca

SEQ ID NO: 7504 - DNA, 20 bp, Artificial Sequence
  chemically synthesized
gccagcctgctctcccaaag

SEQ ID NO: 7505 - DNA, 20 bp, Artificial Sequence
  chemically synthesized
ccagcctgctctcccaaaga

SEQ ID NO: 7506 - DNA, 20 bp, Artificial Sequence
  chemically synthesized
ctctcccaaagaaggaataa

SEQ ID NO: 7507 - DNA, 20 bp, Artificial Sequence
  chemically synthesized
gaaggaataacagaacaaaa

SEQ ID NO: 7508 - DNA, 20 bp, Artificial Sequence
  chemically synthesized
agtcaacctctgactacttc

SEQ ID NO: 7509 - DNA, 20 bp, Artificial Sequence
  chemically synthesized
ttataccaatgttcttcttg

SEQ ID NO: 7510 - DNA, 20 bp, Artificial Sequence
  chemically synthesized
taccaatgttcttcttgaag

SEQ ID NO: 7511 - DNA, 20 bp, Artificial Sequence
  chemically synthesized
accaatgttcttcttgaagt

SEQ ID NO: 7512 - DNA, 20 bp, Artificial Sequence
  chemically synthesized
caatgttcttcttgaagtgg

SEQ ID NO: 7513 - DNA, 20 bp, Artificial Sequence
  chemically synthesized
ttcttcttgaagtgggagct

SEQ ID NO: 7514 - DNA, 20 bp, Artificial Sequence
  chemically synthesized
ttgaagtgggagctcagcat

SEQ ID NO: 7515 - DNA, 20 bp, Artificial Sequence
  chemically synthesized
tgaagtgggagctcagcatc

SEQ ID NO: 7516 - DNA, 20 bp, Artificial Sequence
  chemically synthesized
gagctcagcatcgggacacc

SEQ ID NO: 7517 - DNA, 20 bp, Artificial Sequence
  chemically synthesized
acccagaaaaaataatctcc

SEQ ID NO: 7518 - DNA, 20 bp, Artificial Sequence
  chemically synthesized
cccagaaaaaataatctcca

SEQ ID NO: 7519 - DNA, 20 bp, Artificial Sequence
  chemically synthesized
aaaataatctccaaggcaaa

SEQ ID NO: 7520 - DNA, 20 bp, Artificial Sequence
  chemically synthesized
tctccaaggcaaaaagcaaa

SEQ ID NO: 7521 - DNA, 20 bp, Artificial Sequence
  chemically synthesized
ccaaggcaaaaagcaaatag

SEQ ID NO: 7522 - DNA, 20 bp, Artificial Sequence
  chemically synthesized
caaaaagcaaatagcagaat

SEQ ID NO: 7523 - DNA, 20 bp, Artificial Sequence
  chemically synthesized
gcagaatgagtctgctgaaa

SEQ ID NO: 7524 - DNA, 20 bp, Artificial Sequence
  chemically synthesized
actctgtctctgtctccccc

SEQ ID NO: 7525 - DNA, 20 bp, Artificial Sequence
  chemically synthesized
ctgtctcccccaagccctcc

SEQ ID NO: 7526 - DNA, 20 bp, Artificial Sequence
  chemically synthesized
ctcccccaagccctcctagt

SEQ ID NO: 7527 - DNA, 20 bp, Artificial Sequence
  chemically synthesized
tcctagtcagaacgttctct

SEQ ID NO: 7528 - DNA, 20 bp, Artificial Sequence
  chemically synthesized
agaacgttctctcagcattt

SEQ ID NO: 7529 - DNA, 20 bp, Artificial Sequence
  chemically synthesized
acgttctctcagcatttcag

SEQ ID NO: 7530 - DNA, 20 bp, Artificial Sequence
  chemically synthesized
cgttctctcagcatttcagc

SEQ ID NO: 7531 - DNA, 20 bp, Artificial Sequence
  chemically synthesized
ttcagcaggtactgctcacc

SEQ ID NO: 7532 - DNA, 20 bp, Artificial Sequence
  chemically synthesized
gtactgctcacctggaaata

SEQ ID NO: 7533 - DNA, 20 bp, Artificial Sequence
  chemically synthesized
atacagctgatgtatttact

SEQ ID NO: 7534 - DNA, 20 bp, Artificial Sequence
  chemically synthesized
cagctgatgtatttactgag

SEQ ID NO: 7535 - DNA, 20 bp, Artificial Sequence
  chemically synthesized
atttactgagaagcttcttc

SEQ ID NO: 7536 - DNA, 20 bp, Artificial Sequence
  chemically synthesized
agcttcttcaagctttctac

SEQ ID NO: 7537 - DNA, 20 bp, Artificial Sequence
  chemically synthesized
tcaagctttctactggtgct

SEQ ID NO: 7538 - DNA, 20 bp, Artificial Sequence
  chemically synthesized
caagctttctactggtgctt

SEQ ID NO: 7539 - DNA, 20 bp, Artificial Sequence
  chemically synthesized
aagctttctactggtgctta

SEQ ID NO: 7540 - DNA, 20 bp, Artificial Sequence
  chemically synthesized
gcttagggacaatgccaatc

SEQ ID NO: 7541 - DNA, 20 bp, Artificial Sequence
  chemically synthesized
aatcaagtcttgaaattata

SEQ ID NO: 7542 - DNA, 20 bp, Artificial Sequence
  chemically synthesized
tcaagtcttgaaattatata

SEQ ID NO: 7543 - DNA, 20 bp, Artificial Sequence
  chemically synthesized
aagtcttgaaattatataga

SEQ ID NO: 7544 - DNA, 20 bp, Artificial Sequence
  chemically synthesized
agtcttgaaattatatagag

SEQ ID NO: 7545 - DNA, 20 bp, Artificial Sequence
  chemically synthesized
cttgaaattatatagagagg

SEQ ID NO: 7546 - DNA, 20 bp, Artificial Sequence
  chemically synthesized
tatatagagaggtggaatat

SEQ ID NO: 7547 - DNA, 20 bp, Artificial Sequence
  chemically synthesized
atatagagaggtggaatatc

SEQ ID NO: 7548 - DNA, 20 bp, Artificial Sequence
  chemically synthesized
ctgtccctgaaaatgcttaa

SEQ ID NO: 7549 - DNA, 20 bp, Artificial Sequence
  chemically synthesized
ctatcacatgcctcccctac

SEQ ID NO: 7550 - DNA, 20 bp, Artificial Sequence
  chemically synthesized
cacatgcctcccctaccagt

SEQ ID NO: 7551 - DNA, 20 bp, Artificial Sequence
  chemically synthesized
taccagtgagcgcccaccac

SEQ ID NO: 7552 - DNA, 20 bp, Artificial Sequence
  chemically synthesized
cttgctccaaactattaaaa

SEQ ID NO: 7553 - DNA, 20 bp, Artificial Sequence
  chemically synthesized
tgctccaaactattaaaaca

SEQ ID NO: 7554 - DNA, 20 bp, Artificial Sequence
  chemically synthesized
agagcgtccccccaaaaaaa

SEQ ID NO: 7555 - DNA, 20 bp, Artificial Sequence
  chemically synthesized
ccaaaaaaacagccttctgc

SEQ ID NO: 7556 - DNA, 20 bp, Artificial Sequence
  chemically synthesized
caacttccctaccctgtgtg

SEQ ID NO: 7557 - DNA, 20 bp, Artificial Sequence
  chemically synthesized
aacttccctaccctgtgtgc

SEQ ID NO: 7558 - DNA, 20 bp, Artificial Sequence
  chemically synthesized
cctaccctgtgtgcaggctg

SEQ ID NO: 7559 - DNA, 20 bp, Artificial Sequence
  chemically synthesized
accctgtgtgcaggctgtgg

SEQ ID NO: 7560 - DNA, 20 bp, Artificial Sequence
  chemically synthesized
gtgtgcaggctgtggaagcg

SEQ ID NO: 7561 - DNA, 20 bp, Artificial Sequence
  chemically synthesized
tgtgcaggctgtggaagcgt

SEQ ID NO: 7562 - DNA, 20 bp, Artificial Sequence
  chemically synthesized
gtgcaggctgtggaagcgtg

SEQ ID NO: 7563 - DNA, 20 bp, Artificial Sequence
  chemically synthesized
caggctgtggaagcgtgggg

SEQ ID NO: 7564 - DNA, 20 bp, Artificial Sequence
  chemically synthesized
gtggaagcgtggggtggacc

SEQ ID NO: 7565 - DNA, 20 bp, Artificial Sequence
  chemically synthesized
gaagcgtggggtggacccag

SEQ ID NO: 7566 - DNA, 20 bp, Artificial Sequence
  chemically synthesized
tggggtggacccagaagtat

SEQ ID NO: 7567 - DNA, 20 bp, Artificial Sequence
  chemically synthesized
ggggtggacccagaagtata

SEQ ID NO: 7568 - DNA, 20 bp, Artificial Sequence
  chemically synthesized
ggtggacccagaagtataag

SEQ ID NO: 7569 - DNA, 20 bp, Artificial Sequence
  chemically synthesized
cccagaagtataaggagttc

SEQ ID NO: 7570 - DNA, 20 bp, Artificial Sequence
  chemically synthesized
aagtataaggagttctggat

SEQ ID NO: 7571 - DNA, 20 bp, Artificial Sequence
  chemically synthesized
gagttctggatcagaatccc

SEQ ID NO: 7572 - DNA, 20 bp, Artificial Sequence
  chemically synthesized
gaatccctagtctacccctg

SEQ ID NO: 7573 - DNA, 20 bp, Artificial Sequence
  chemically synthesized
gtctacccctgcggctgcat

SEQ ID NO: 7574 - DNA, 20 bp, Artificial Sequence
  chemically synthesized
cccctgcggctgcatgagac

SEQ ID NO: 7575 - DNA, 20 bp, Artificial Sequence
  chemically synthesized
acctgccatttaacctctct

SEQ ID NO: 7576 - DNA, 20 bp, Artificial Sequence
  chemically synthesized
ccctttctcctgcctcttca

SEQ ID NO: 7577 - DNA, 20 bp, Artificial Sequence
  chemically synthesized
cctttctcctgcctcttcac

SEQ ID NO: 7578 - DNA, 20 bp, Artificial Sequence
  chemically synthesized
ctttctcctgcctcttcaca

SEQ ID NO: 7579 - DNA, 20 bp, Artificial Sequence
  chemically synthesized
ctcttcacagggttactcat

SEQ ID NO: 7580 - DNA, 20 bp, Artificial Sequence
  chemically synthesized
tcttcacagggttactcatg

SEQ ID NO: 7581 - DNA, 20 bp, Artificial Sequence
  chemically synthesized
cacagggttactcatgaggt

SEQ ID NO: 7582 - DNA, 20 bp, Artificial Sequence
  chemically synthesized
caatttgacaatactcctca

SEQ ID NO: 7583 - DNA, 20 bp, Artificial Sequence
  chemically synthesized
aatttgacaatactcctcaa

SEQ ID NO: 7584 - DNA, 20 bp, Artificial Sequence
  chemically synthesized
atttgacaatactcctcaaa

SEQ ID NO: 7585 - DNA, 20 bp, Artificial Sequence
  chemically synthesized
atccgtatcctcattactaa

SEQ ID NO: 7586 - DNA, 20 bp, Artificial Sequence
  chemically synthesized
cctcattactaacagcacaa

SEQ ID NO: 7587 - DNA, 20 bp, Artificial Sequence
  chemically synthesized
acagcacaatggacattcga

SEQ ID NO: 7588 - DNA, 20 bp, Artificial Sequence
  chemically synthesized
cagcacaatggacattcgaa

SEQ ID NO: 7589 - DNA, 20 bp, Artificial Sequence
  chemically synthesized
agcacaatggacattcgaaa

SEQ ID NO: 7590 - DNA, 20 bp, Artificial Sequence
  chemically synthesized
caatggacattcgaaaggga

SEQ ID NO: 7591 - DNA, 20 bp, Artificial Sequence
  chemically synthesized
aatggacattcgaaagggat

SEQ ID NO: 7592 - DNA, 20 bp, Artificial Sequence
  chemically synthesized
ggatgggcccaatttttcat

SEQ ID NO: 7593 - DNA, 20 bp, Artificial Sequence
  chemically synthesized
caatttttcataagccaaaa

SEQ ID NO: 7594 - DNA, 20 bp, Artificial Sequence
  chemically synthesized
ttttcataagccaaaaaagc

SEQ ID NO: 7595 - DNA, 20 bp, Artificial Sequence
  chemically synthesized
ttcataagccaaaaaagcta

SEQ ID NO: 7596 - DNA, 20 bp, Artificial Sequence
  chemically synthesized
tcataagccaaaaaagctag

SEQ ID NO: 7597 - DNA, 20 bp, Artificial Sequence
  chemically synthesized
agccaaaaaagctagaggat

SEQ ID NO: 7598 - DNA, 20 bp, Artificial Sequence
  chemically synthesized
ccaaaaaagctagaggatcg

SEQ ID NO: 7599 - DNA, 20 bp, Artificial Sequence
  chemically synthesized
aaaaaagctagaggatcgga

SEQ ID NO: 7600 - DNA, 20 bp, Artificial Sequence
  chemically synthesized
agctagaggatcggagagaa

SEQ ID NO: 7601 - DNA, 20 bp, Artificial Sequence
  chemically synthesized
tagaggatcggagagaaaag

SEQ ID NO: 7602 - DNA, 20 bp, Artificial Sequence
  chemically synthesized
agaggatcggagagaaaaga

SEQ ID NO: 7603 - DNA, 20 bp, Artificial Sequence
  chemically synthesized
gaggatcggagagaaaagaa

SEQ ID NO: 7604 - DNA, 20 bp, Artificial Sequence
  chemically synthesized
atcggagagaaaagaaggga

SEQ ID NO: 7605 - DNA, 20 bp, Artificial Sequence
  chemically synthesized
gaaaagaagggacggatact

SEQ ID NO: 7606 - DNA, 20 bp, Artificial Sequence
  chemically synthesized
aagggacggatactcagaaa

SEQ ID NO: 7607 - DNA, 20 bp, Artificial Sequence
  chemically synthesized
ggatactcagaaacggcttc

SEQ ID NO: 7608 - DNA, 20 bp, Artificial Sequence
  chemically synthesized
gatactcagaaacggcttca

SEQ ID NO: 7609 - DNA, 20 bp, Artificial Sequence
  chemically synthesized
atactcagaaacggcttcaa

SEQ ID NO: 7610 - DNA, 20 bp, Artificial Sequence
  chemically synthesized
acggcttcaagggtgtcctt

SEQ ID NO: 7611 - DNA, 20 bp, Artificial Sequence
  chemically synthesized
cctttggcaccccattcttc

SEQ ID NO: 7612 - DNA, 20 bp, Artificial Sequence
  chemically synthesized
attgttccaaatgcctgctg

SEQ ID NO: 7613 - DNA, 20 bp, Artificial Sequence
  chemically synthesized
aatgcctgctgcagtaataa

SEQ ID NO: 7614 - DNA, 20 bp, Artificial Sequence
  chemically synthesized
tgcagtaataacagccccaa

SEQ ID NO: 7615 - DNA, 20 bp, Artificial Sequence
  chemically synthesized
aaaagaacacaccactttgt

SEQ ID NO: 7616 - DNA, 20 bp, Artificial Sequence
  chemically synthesized
aaagaacacaccactttgtc

SEQ ID NO: 7617 - DNA, 20 bp, Artificial Sequence
  chemically synthesized
caccactttgtcaggacttg

SEQ ID NO: 7618 - DNA, 20 bp, Artificial Sequence
  chemically synthesized
accactttgtcaggacttgt

SEQ ID NO: 7619 - DNA, 20 bp, Artificial Sequence
  chemically synthesized
gacttgtaggtgaaatgtgt

SEQ ID NO: 7620 - DNA, 20 bp, Artificial Sequence
  chemically synthesized
cttgtaggtgaaatgtgttg

SEQ ID NO: 7621 - DNA, 20 bp, Artificial Sequence
  chemically synthesized
gtaggtgaaatgtgttggag

SEQ ID NO: 7622 - DNA, 20 bp, Artificial Sequence
  chemically synthesized
aaatgtgttggagcagctgt

SEQ ID NO: 7623 - DNA, 20 bp, Artificial Sequence
  chemically synthesized
tgttggagcagctgtcagct

SEQ ID NO: 7624 - DNA, 20 bp, Artificial Sequence
  chemically synthesized
gttggagcagctgtcagctt

SEQ ID NO: 7625 - DNA, 20 bp, Artificial Sequence
  chemically synthesized
ttggagcagctgtcagcttg

SEQ ID NO: 7626 - DNA, 20 bp, Artificial Sequence
  chemically synthesized
gcttggggaaaatcactcat

SEQ ID NO: 7627 - DNA, 20 bp, Artificial Sequence
  chemically synthesized
cttggggaaaatcactcatc

SEQ ID NO: 7628 - DNA, 20 bp, Artificial Sequence
  chemically synthesized
ggggaaaatcactcatcagg

SEQ ID NO: 7629 - DNA, 20 bp, Artificial Sequence
  chemically synthesized
aaaatcactcatcaggtagt

SEQ ID NO: 7630 - DNA, 20 bp, Artificial Sequence
  chemically synthesized
cactcatcaggtagtcagcc

SEQ ID NO: 7631 - DNA, 20 bp, Artificial Sequence
  chemically synthesized
catcaggtagtcagccgagt

SEQ ID NO: 7632 - DNA, 20 bp, Artificial Sequence
  chemically synthesized
atcaggtagtcagccgagtg

SEQ ID NO: 7633 - DNA, 20 bp, Artificial Sequence
  chemically synthesized
cagccgagtgaggctgcctt

SEQ ID NO: 7634 - DNA, 20 bp, Artificial Sequence
  chemically synthesized
cgagtgaggctgccttcagc

SEQ ID NO: 7635 - DNA, 20 bp, Artificial Sequence
  chemically synthesized
ggacaaacactgcatccaca

SEQ ID NO: 7636 - DNA, 20 bp, Artificial Sequence
  chemically synthesized
gacaaacactgcatccacac

SEQ ID NO: 7637 - DNA, 20 bp, Artificial Sequence
  chemically synthesized
acaaacactgcatccacaca

SEQ ID NO: 7638 - DNA, 20 bp, Artificial Sequence
  chemically synthesized
actgcatccacacagggaac

SEQ ID NO: 7639 - DNA, 20 bp, Artificial Sequence
  chemically synthesized
gcatccacacagggaacaag

SEQ ID NO: 7640 - DNA, 20 bp, Artificial Sequence
  chemically synthesized
catccacacagggaacaagc

SEQ ID NO: 7641 - DNA, 20 bp, Artificial Sequence
  chemically synthesized
gtgctttcctgtccttccct

SEQ ID NO: 7642 - DNA, 20 bp, Artificial Sequence
  chemically synthesized
tgctttcctgtccttccctt

SEQ ID NO: 7643 - DNA, 20 bp, Artificial Sequence
  chemically synthesized
gctttcctgtccttccctta

SEQ ID NO: 7644 - DNA, 20 bp, Artificial Sequence
  chemically synthesized
ctttcctgtccttcccttag

SEQ ID NO: 7645 - DNA, 20 bp, Artificial Sequence
  chemically synthesized
ccttcccttaggggccaaac

SEQ ID NO: 7646 - DNA, 20 bp, Artificial Sequence
  chemically synthesized
ttttaccttcttgtccaacc

SEQ ID NO: 7647 - DNA, 20 bp, Artificial Sequence
  chemically synthesized
taccttcttgtccaacccag

SEQ ID NO: 7648 - DNA, 20 bp, Artificial Sequence
  chemically synthesized
accttcttgtccaacccagt

SEQ ID NO: 7649 - DNA, 20 bp, Artificial Sequence
  chemically synthesized
atacctccttctctttcctc

SEQ ID NO: 7650 - DNA, 20 bp, Artificial Sequence
  chemically synthesized
tctctttcctccagctccct

SEQ ID NO: 7651 - DNA, 20 bp, Artificial Sequence
  chemically synthesized
cagctccctaagctgttgtt

SEQ ID NO: 7652 - DNA, 20 bp, Artificial Sequence
  chemically synthesized
agctccctaagctgttgttc

SEQ ID NO: 7653 - DNA, 20 bp, Artificial Sequence
  chemically synthesized
gctccctaagctgttgttca

SEQ ID NO: 7654 - DNA, 20 bp, Artificial Sequence
  chemically synthesized
ctaagctgttgttcagggca

SEQ ID NO: 7655 - DNA, 20 bp, Artificial Sequence
  chemically synthesized
gctgttgttcagggcacaga

SEQ ID NO: 7656 - DNA, 20 bp, Artificial Sequence
  chemically synthesized
tcagggcacagacagctctt

SEQ ID NO: 7657 - DNA, 20 bp, Artificial Sequence
  chemically synthesized
cagggcacagacagctcttc

SEQ ID NO: 7658 - DNA, 20 bp, Artificial Sequence
  chemically synthesized
cagacagctcttcaggctgc

SEQ ID NO: 7659 - DNA, 20 bp, Artificial Sequence
  chemically synthesized
gacagctcttcaggctgcca

SEQ ID NO: 7660 - DNA, 20 bp, Artificial Sequence
  chemically synthesized
gctcttcaggctgccagagc

SEQ ID NO: 7661 - DNA, 20 bp, Artificial Sequence
  chemically synthesized
tcttcaggctgccagagcaa

SEQ ID NO: 7662 - DNA, 20 bp, Artificial Sequence
  chemically synthesized
ttcaggctgccagagcaaga

SEQ ID NO: 7663 - DNA, 20 bp, Artificial Sequence
  chemically synthesized
ggctgccagagcaagagagt

SEQ ID NO: 7664 - DNA, 20 bp, Artificial Sequence
  chemically synthesized
gctgccagagcaagagagtt

SEQ ID NO: 7665 - DNA, 20 bp, Artificial Sequence
  chemically synthesized
ccacatgcattcccacctcc

SEQ ID NO: 7666 - DNA, 20 bp, Artificial Sequence
  chemically synthesized
catgcattcccacctcccgg

SEQ ID NO: 7667 - DNA, 20 bp, Artificial Sequence
  chemically synthesized
gcattcccacctcccggaag

SEQ ID NO: 7668 - DNA, 20 bp, Artificial Sequence
  chemically synthesized
cattcccacctcccggaagc

SEQ ID NO: 7669 - DNA, 20 bp, Artificial Sequence
  chemically synthesized
attcccacctcccggaagca

SEQ ID NO: 7670 - DNA, 20 bp, Artificial Sequence
  chemically synthesized
ttcccacctcccggaagcag

SEQ ID NO: 7671 - DNA, 20 bp, Artificial Sequence
  chemically synthesized
cctcccggaagcaggggaca

SEQ ID NO: 7672 - DNA, 20 bp, Artificial Sequence
  chemically synthesized
ccggaagcaggggacacagc

SEQ ID NO: 7673 - DNA, 20 bp, Artificial Sequence
  chemically synthesized
cacagctggccactctgtga

SEQ ID NO: 7674 - DNA, 20 bp, Artificial Sequence
  chemically synthesized
cagctggccactctgtgacg

SEQ ID NO: 7675 - DNA, 20 bp, Artificial Sequence
  chemically synthesized
agctggccactctgtgacgg

SEQ ID NO: 7676 - DNA, 20 bp, Artificial Sequence
  chemically synthesized
gctggccactctgtgacgga

SEQ ID NO: 7677 - DNA, 20 bp, Artificial Sequence
  chemically synthesized
ggccactctgtgacggaggg

SEQ ID NO: 7678 - DNA, 20 bp, Artificial Sequence
  chemically synthesized
gccactctgtgacggagggt

SEQ ID NO: 7679 - DNA, 20 bp, Artificial Sequence
  chemically synthesized
gggtgggtaacctctctacc

SEQ ID NO: 7680 - DNA, 20 bp, Artificial Sequence
  chemically synthesized
ggtgggtaacctctctacct

SEQ ID NO: 7681 - DNA, 20 bp, Artificial Sequence
  chemically synthesized
tctacctgggtctatcattt

SEQ ID NO: 7682 - DNA, 20 bp, Artificial Sequence
  chemically synthesized
attttagaataaatcattcg

SEQ ID NO: 7683 - DNA, 20 bp, Artificial Sequence
  chemically synthesized
attcgtggctgactcttaaa

SEQ ID NO: 7684 - DNA, 20 bp, Artificial Sequence
  chemically synthesized
ttcgtggctgactcttaaat

SEQ ID NO: 7685 - DNA, 20 bp, Artificial Sequence
  chemically synthesized
gtggctgactcttaaatggg

SEQ ID NO: 7686 - DNA, 20 bp, Artificial Sequence
  chemically synthesized
tggctgactcttaaatggga

SEQ ID NO: 7687 - DNA, 20 bp, Artificial Sequence
  chemically synthesized
ggctgactcttaaatgggaa

SEQ ID NO: 7688 - DNA, 20 bp, Artificial Sequence
  chemically synthesized
taaatgggaagggccaatta

SEQ ID NO: 7689 - DNA, 20 bp, Artificial Sequence
  chemically synthesized
ggccaattacagatatctct

SEQ ID NO: 7690 - DNA, 20 bp, Artificial Sequence
  chemically synthesized
ctctgagaacaactctacct

SEQ ID NO: 7691 - DNA, 20 bp, Artificial Sequence
  chemically synthesized
tctgagaacaactctacctg

SEQ ID NO: 7692 - DNA, 20 bp, Artificial Sequence
  chemically synthesized
ctgagaacaactctacctga

SEQ ID NO: 7693 - DNA, 20 bp, Artificial Sequence
  chemically synthesized
gagaacaactctacctgagg

SEQ ID NO: 7694 - DNA, 20 bp, Artificial Sequence
  chemically synthesized
agaacaactctacctgaggg

SEQ ID NO: 7695 - DNA, 20 bp, Artificial Sequence
  chemically synthesized
gaacaactctacctgaggga

SEQ ID NO: 7696 - DNA, 20 bp, Artificial Sequence
  chemically synthesized
aacaactctacctgagggag

SEQ ID NO: 7697 - DNA, 20 bp, Artificial Sequence
  chemically synthesized
acaactctacctgagggagg

SEQ ID NO: 7698 - DNA, 20 bp, Artificial Sequence
  chemically synthesized
ggaaatccctcccaaaacaa

SEQ ID NO: 7699 - DNA, 20 bp, Artificial Sequence
  chemically synthesized
aatccctcccaaaacaacgg

SEQ ID NO: 7700 - DNA, 20 bp, Artificial Sequence
  chemically synthesized
atccctcccaaaacaacggt

SEQ ID NO: 7701 - DNA, 20 bp, Artificial Sequence
  chemically synthesized
cctcccaaaacaacggtggg

SEQ ID NO: 7702 - DNA, 20 bp, Artificial Sequence
  chemically synthesized
atctgcatcccgtaaatacc

SEQ ID NO: 7703 - DNA, 20 bp, Artificial Sequence
  chemically synthesized
tgcatcccgtaaatacccag

SEQ ID NO: 7704 - DNA, 20 bp, Artificial Sequence
  chemically synthesized
ccgtaaatacccagaagcaa

SEQ ID NO: 7705 - DNA, 20 bp, Artificial Sequence
  chemically synthesized
taaatacccagaagcaatag

SEQ ID NO: 7706 - DNA, 20 bp, Artificial Sequence
  chemically synthesized
gaagcaatagcagccccacc

SEQ ID NO: 7707 - DNA, 20 bp, Artificial Sequence
  chemically synthesized
gccccacctggttcgtctgc

SEQ ID NO: 7708 - DNA, 20 bp, Artificial Sequence
  chemically synthesized
ggttcgtctgccagatgctg

SEQ ID NO: 7709 - DNA, 20 bp, Artificial Sequence
  chemically synthesized
ttcgtctgccagatgctgtg

SEQ ID NO: 7710 - DNA, 20 bp, Artificial Sequence
  chemically synthesized
tctgccagatgctgtggaga

SEQ ID NO: 7711 - DNA, 20 bp, Artificial Sequence
  chemically synthesized
cagatgctgtggagatggca

SEQ ID NO: 7712 - DNA, 20 bp, Artificial Sequence
  chemically synthesized
atgctgtggagatggcatgg

SEQ ID NO: 7713 - DNA, 20 bp, Artificial Sequence
  chemically synthesized
ggagatggcatggtggcatt

SEQ ID NO: 7714 - DNA, 20 bp, Artificial Sequence
  chemically synthesized
catttggtaaataacccaaa

SEQ ID NO: 7715 - DNA, 20 bp, Artificial Sequence
  chemically synthesized
atttggtaaataacccaaat

SEQ ID NO: 7716 - DNA, 20 bp, Artificial Sequence
  chemically synthesized
tttggtaaataacccaaata

SEQ ID NO: 7717 - DNA, 20 bp, Artificial Sequence
  chemically synthesized
ataacccaaatagggctttg

SEQ ID NO: 7718 - DNA, 20 bp, Artificial Sequence
  chemically synthesized
taacccaaatagggctttgc

SEQ ID NO: 7719 - DNA, 20 bp, Artificial Sequence
  chemically synthesized
aacccaaatagggctttgca

SEQ ID NO: 7720 - DNA, 20 bp, Artificial Sequence
  chemically synthesized
aaatagggctttgcagggta

SEQ ID NO: 7721 - DNA, 20 bp, Artificial Sequence
  chemically synthesized
aatagggctttgcagggtat

SEQ ID NO: 7722 - DNA, 20 bp, Artificial Sequence
  chemically synthesized
cagggtatgggacaccacac

SEQ ID NO: 7723 - DNA, 20 bp, Artificial Sequence
  chemically synthesized
agggtatgggacaccacact

SEQ ID NO: 7724 - DNA, 20 bp, Artificial Sequence
  chemically synthesized
ggacaccacactaggctttg

SEQ ID NO: 7725 - DNA, 20 bp, Artificial Sequence
  chemically synthesized
ccacactaggctttgcagcc

SEQ ID NO: 7726 - DNA, 20 bp, Artificial Sequence
  chemically synthesized
cacactaggctttgcagccc

SEQ ID NO: 7727 - DNA, 20 bp, Artificial Sequence
  chemically synthesized
ctttgcagcccgggtgaaac

SEQ ID NO: 7728 - DNA, 20 bp, Artificial Sequence
  chemically synthesized
gcagcccgggtgaaaccaga

SEQ ID NO: 7729 - DNA, 20 bp, Artificial Sequence
  chemically synthesized
cgggtgaaaccagatggtgc

SEQ ID NO: 7730 - DNA, 20 bp, Artificial Sequence
  chemically synthesized
gtgaaaccagatggtgcgag

SEQ ID NO: 7731 - DNA, 20 bp, Artificial Sequence
  chemically synthesized
aaccagatggtgcgagaaga

SEQ ID NO: 7732 - DNA, 20 bp, Artificial Sequence
  chemically synthesized
agaagatagtgaatcactca

SEQ ID NO: 7733 - DNA, 20 bp, Artificial Sequence
  chemically synthesized
gaagatagtgaatcactcat

SEQ ID NO: 7734 - DNA, 20 bp, Artificial Sequence
  chemically synthesized
atagtgaatcactcataggc

SEQ ID NO: 7735 - DNA, 20 bp, Artificial Sequence
  chemically synthesized
tagtgaatcactcataggca

SEQ ID NO: 7736 - DNA, 20 bp, Artificial Sequence
  chemically synthesized
agtgaatcactcataggcaa

SEQ ID NO: 7737 - DNA, 20 bp, Artificial Sequence
  chemically synthesized
cactcataggcaagggatgt

SEQ ID NO: 7738 - DNA, 20 bp, Artificial Sequence
  chemically synthesized
cacctaaaaatcccctttcc

SEQ ID NO: 7739 - DNA, 20 bp, Artificial Sequence
  chemically synthesized
ccatcctttgacacccacca

SEQ ID NO: 7740 - DNA, 20 bp, Artificial Sequence
  chemically synthesized
gacacccaccatagaaatca

SEQ ID NO: 7741 - DNA, 20 bp, Artificial Sequence
  chemically synthesized
cacccaccatagaaatcaca

SEQ ID NO: 7742 - DNA, 20 bp, Artificial Sequence
  chemically synthesized
cccaccatagaaatcacaga

SEQ ID NO: 7743 - DNA, 20 bp, Artificial Sequence
  chemically synthesized
ccaccatagaaatcacagag

SEQ ID NO: 7744 - DNA, 20 bp, Artificial Sequence
  chemically synthesized
catagaaatcacagagaggt

SEQ ID NO: 7745 - DNA, 20 bp, Artificial Sequence
  chemically synthesized
gaaatcacagagaggtcaga

SEQ ID NO: 7746 - DNA, 20 bp, Artificial Sequence
  chemically synthesized
gagaggtcagaaagaacacc

SEQ ID NO: 7747 - DNA, 20 bp, Artificial Sequence
  chemically synthesized
agaggtcagaaagaacacct

SEQ ID NO: 7748 - DNA, 20 bp, Artificial Sequence
  chemically synthesized
aagaacacctgggcccaaaa

SEQ ID NO: 7749 - DNA, 20 bp, Artificial Sequence
  chemically synthesized
cccaaaatagcctgtcctgt

SEQ ID NO: 7750 - DNA, 20 bp, Artificial Sequence
  chemically synthesized
ctgtcctgttagccaaatgc

SEQ ID NO: 7751 - DNA, 20 bp, Artificial Sequence
  chemically synthesized
ccagcactcccactttctct

SEQ ID NO: 7752 - DNA, 20 bp, Artificial Sequence
  chemically synthesized
cagcactcccactttctctg

SEQ ID NO: 7753 - DNA, 20 bp, Artificial Sequence
  chemically synthesized
agcactcccactttctctga

SEQ ID NO: 7754 - DNA, 20 bp, Artificial Sequence
  chemically synthesized
tcccactttctctgagggca

SEQ ID NO: 7755 - DNA, 20 bp, Artificial Sequence
  chemically synthesized
ccactttctctgagggcatg

SEQ ID NO: 7756 - DNA, 20 bp, Artificial Sequence
  chemically synthesized
cactttctctgagggcatgg

SEQ ID NO: 7757 - DNA, 20 bp, Artificial Sequence
  chemically synthesized
actttctctgagggcatgga

SEQ ID NO: 7758 - DNA, 20 bp, Artificial Sequence
  chemically synthesized
ctttctctgagggcatggag

SEQ ID NO: 7759 - DNA, 20 bp, Artificial Sequence
  chemically synthesized
ttctctgagggcatggaggg

SEQ ID NO: 7760 - DNA, 20 bp, Artificial Sequence
  chemically synthesized
tctctgagggcatggagggg

SEQ ID NO: 7761 - DNA, 20 bp, Artificial Sequence
  chemically synthesized
ctgagggcatggaggggagg

SEQ ID NO: 7762 - DNA, 20 bp, Artificial Sequence
  chemically synthesized
agggcatggaggggaggcag

SEQ ID NO: 7763 - DNA, 20 bp, Artificial Sequence
  chemically synthesized
catggaggggaggcagcagc

SEQ ID NO: 7764 - DNA, 20 bp, Artificial Sequence
  chemically synthesized
atggaggggaggcagcagct

SEQ ID NO: 7765 - DNA, 20 bp, Artificial Sequence
  chemically synthesized
tggaggggaggcagcagcta

SEQ ID NO: 7766 - DNA, 20 bp, Artificial Sequence
  chemically synthesized
ggaggcagcagctagggctc

SEQ ID NO: 7767 - DNA, 20 bp, Artificial Sequence
  chemically synthesized
tcatttaattctctctgcat

SEQ ID NO: 7768 - DNA, 20 bp, Artificial Sequence
  chemically synthesized
atttaattctctctgcatca

SEQ ID NO: 7769 - DNA, 20 bp, Artificial Sequence
  chemically synthesized
tttaattctctctgcatcag

SEQ ID NO: 7770 - DNA, 20 bp, Artificial Sequence
  chemically synthesized
aattctctctgcatcagagg

SEQ ID NO: 7771 - DNA, 20 bp, Artificial Sequence
  chemically synthesized
ttctctctgcatcagaggaa

SEQ ID NO: 7772 - DNA, 20 bp, Artificial Sequence
  chemically synthesized
cagaggaagagtcaccttca

SEQ ID NO: 7773 - DNA, 20 bp, Artificial Sequence
  chemically synthesized
agaggaagagtcaccttcac

SEQ ID NO: 7774 - DNA, 20 bp, Artificial Sequence
  chemically synthesized
gaagagtcaccttcacaggc

SEQ ID NO: 7775 - DNA, 20 bp, Artificial Sequence
  chemically synthesized
tcaccttcacaggccagctg

SEQ ID NO: 7776 - DNA, 20 bp, Artificial Sequence
  chemically synthesized
cttgccacatctaatgccac

SEQ ID NO: 7777 - DNA, 20 bp, Artificial Sequence
  chemically synthesized
ttgccacatctaatgccacc

SEQ ID NO: 7778 - DNA, 20 bp, Artificial Sequence
  chemically synthesized
ctaatgccaccaggccctgc

SEQ ID NO: 7779 - DNA, 20 bp, Artificial Sequence
  chemically synthesized
atgccaccaggccctgccag

SEQ ID NO: 7780 - DNA, 20 bp, Artificial Sequence
  chemically synthesized
cctgccagcggcccccattc

SEQ ID NO: 7781 - DNA, 20 bp, Artificial Sequence
  chemically synthesized
attctggtctgtcaaacccc

SEQ ID NO: 7782 - DNA, 20 bp, Artificial Sequence
  chemically synthesized
gtcaaacccctggaaaactt

SEQ ID NO: 7783 - DNA, 20 bp, Artificial Sequence
  chemically synthesized
aacccctggaaaacttcaga

SEQ ID NO: 7784 - DNA, 20 bp, Artificial Sequence
  chemically synthesized
aaacttcagacagtgttcct

SEQ ID NO: 7785 - DNA, 20 bp, Artificial Sequence
  chemically synthesized
cagacagtgttcctcagatc

SEQ ID NO: 7786 - DNA, 20 bp, Artificial Sequence
  chemically synthesized
agacagtgttcctcagatcc

SEQ ID NO: 7787 - DNA, 20 bp, Artificial Sequence
  chemically synthesized
agtgttcctcagatccagga

SEQ ID NO: 7788 - DNA, 20 bp, Artificial Sequence
  chemically synthesized
tgttcctcagatccaggaca

SEQ ID NO: 7789 - DNA, 20 bp, Artificial Sequence
  chemically synthesized
cctcagatccaggacagagc

SEQ ID NO: 7790 - DNA, 20 bp, Artificial Sequence
  chemically synthesized
gatccaggacagagctggct

SEQ ID NO: 7791 - DNA, 20 bp, Artificial Sequence
  chemically synthesized
atccaggacagagctggctc

SEQ ID NO: 7792 - DNA, 20 bp, Artificial Sequence
  chemically synthesized
agctggctcaggacgccaca

SEQ ID NO: 7793 - DNA, 20 bp, Artificial Sequence
  chemically synthesized
gctggctcaggacgccacat

SEQ ID NO: 7794 - DNA, 20 bp, Artificial Sequence
  chemically synthesized
gacgccacatgggtcaaccc

SEQ ID NO: 7795 - DNA, 20 bp, Artificial Sequence
  chemically synthesized
atgggtcaacccgagcgcac

SEQ ID NO: 7796 - DNA, 20 bp, Artificial Sequence
  chemically synthesized
aacccgagcgcaccagtcct

SEQ ID NO: 7797 - DNA, 20 bp, Artificial Sequence
  chemically synthesized
caccagtcctcagaccctcc

SEQ ID NO: 7798 - DNA, 20 bp, Artificial Sequence
  chemically synthesized
accagtcctcagaccctcca

SEQ ID NO: 7799 - DNA, 20 bp, Artificial Sequence
  chemically synthesized
tcagaccctccaaggtgaca

SEQ ID NO: 7800 - DNA, 20 bp, Artificial Sequence
  chemically synthesized
caaggtgacaaagacctcac

SEQ ID NO: 7801 - DNA, 20 bp, Artificial Sequence
  chemically synthesized
tagactgtatctcatttttc

SEQ ID NO: 7802 - DNA, 20 bp, Artificial Sequence
  chemically synthesized
gtatctcatttttccagcct

SEQ ID NO: 7803 - DNA, 20 bp, Artificial Sequence
  chemically synthesized
ctcatttttccagcctcagt

SEQ ID NO: 7804 - DNA, 20 bp, Artificial Sequence
  chemically synthesized
tttttccagcctcagtgagc

SEQ ID NO: 7805 - DNA, 20 bp, Artificial Sequence
  chemically synthesized
cagcctcagtgagccggccc

SEQ ID NO: 7806 - DNA, 20 bp, Artificial Sequence
  chemically synthesized
ctcagtgagccggccccagc

SEQ ID NO: 7807 - DNA, 20 bp, Artificial Sequence
  chemically synthesized
ccggccccagctggcatgct

SEQ ID NO: 7808 - DNA, 20 bp, Artificial Sequence
  chemically synthesized
cccagctggcatgctgagtc

SEQ ID NO: 7809 - DNA, 20 bp, Artificial Sequence
  chemically synthesized
ccagctggcatgctgagtcc

SEQ ID NO: 7810 - DNA, 20 bp, Artificial Sequence
  chemically synthesized
ctggcatgctgagtccagga

SEQ ID NO: 7811 - DNA, 20 bp, Artificial Sequence
  chemically synthesized
tgctgagtccaggaaagccc

SEQ ID NO: 7812 - DNA, 20 bp, Artificial Sequence
  chemically synthesized
agccctggctatacaaaaca

SEQ ID NO: 7813 - DNA, 20 bp, Artificial Sequence
  chemically synthesized
cacccacgtgcctttgtgca

SEQ ID NO: 7814 - DNA, 20 bp, Artificial Sequence
  chemically synthesized
tgcctttgtgcatggctgct

SEQ ID NO: 7815 - DNA, 20 bp, Artificial Sequence
  chemically synthesized
cctttgtgcatggctgctta

SEQ ID NO: 7816 - DNA, 20 bp, Artificial Sequence
  chemically synthesized
ctttgtgcatggctgcttag

SEQ ID NO: 7817 - DNA, 20 bp, Artificial Sequence
  chemically synthesized
tttgtgcatggctgcttaga

SEQ ID NO: 7818 - DNA, 20 bp, Artificial Sequence
  chemically synthesized
tgcttagagggctaatgata

SEQ ID NO: 7819 - DNA, 20 bp, Artificial Sequence
  chemically synthesized
gcttagagggctaatgataa

SEQ ID NO: 7820 - DNA, 20 bp, Artificial Sequence
  chemically synthesized
tagagggctaatgataaagg

SEQ ID NO: 7821 - DNA, 20 bp, Artificial Sequence
  chemically synthesized
aatgataaaggcagctcact

SEQ ID NO: 7822 - DNA, 20 bp, Artificial Sequence
  chemically synthesized
actaagaaaacgaccgtgcc

SEQ ID NO: 7823 - DNA, 20 bp, Artificial Sequence
  chemically synthesized
aagaaaacgaccgtgcccag

SEQ ID NO: 7824 - DNA, 20 bp, Artificial Sequence
  chemically synthesized
gtgcccagcagtctcctaaa

SEQ ID NO: 7825 - DNA, 20 bp, Artificial Sequence
  chemically synthesized
cagcagtctcctaaatggcg

SEQ ID NO: 7826 - DNA, 20 bp, Artificial Sequence
  chemically synthesized
agcagtctcctaaatggcga

SEQ ID NO: 7827 - DNA, 20 bp, Artificial Sequence
  chemically synthesized
agtctcctaaatggcgaagg

SEQ ID NO: 7828 - DNA, 20 bp, Artificial Sequence
  chemically synthesized
gcagcatttaccactgatga

SEQ ID NO: 7829 - DNA, 20 bp, Artificial Sequence
  chemically synthesized
atatatatccatttttctgt

SEQ ID NO: 7830 - DNA, 20 bp, Artificial Sequence
  chemically synthesized
caaataatgtctataatgct

SEQ ID NO: 7831 - DNA, 20 bp, Artificial Sequence
  chemically synthesized
ataatgctgagatttataca

SEQ ID NO: 7832 - DNA, 20 bp, Artificial Sequence
  chemically synthesized
taatgctgagatttatacat

SEQ ID NO: 7833 - DNA, 20 bp, Artificial Sequence
  chemically synthesized
ttataaatgtgatttcatta

SEQ ID NO: 7834 - DNA, 20 bp, Artificial Sequence
  chemically synthesized
gtaattaaattgctacctga

SEQ ID NO: 7835 - DNA, 20 bp, Artificial Sequence
  chemically synthesized
tggcattatctaatttaact

SEQ ID NO: 7836 - DNA, 20 bp, Artificial Sequence
  chemically synthesized
ggcattatctaatttaactt

SEQ ID NO: 7837 - DNA, 20 bp, Artificial Sequence
  chemically synthesized
ttgggatccaaactattgaa

SEQ ID NO: 7838 - DNA, 20 bp, Artificial Sequence
  chemically synthesized
gtgccttttaacaccctgac

SEQ ID NO: 7839 - DNA, 20 bp, Artificial Sequence
  chemically synthesized
cttttaacaccctgactggt

SEQ ID NO: 7840 - DNA, 20 bp, Artificial Sequence
  chemically synthesized
ttttaacaccctgactggta

SEQ ID NO: 7841 - DNA, 20 bp, Artificial Sequence
  chemically synthesized
ctggtaaggcatgtgatgaa

SEQ ID NO: 7842 - DNA, 20 bp, Artificial Sequence
  chemically synthesized
ggtaaggcatgtgatgaaca

SEQ ID NO: 7843 - DNA, 20 bp, Artificial Sequence
  chemically synthesized
gaacagagctataaacatgt

SEQ ID NO: 7844 - DNA, 20 bp, Artificial Sequence
  chemically synthesized
ataaacatgttggcgtaact

SEQ ID NO: 7845 - DNA, 20 bp, Artificial Sequence
  chemically synthesized
tgagctgtttaaaaataaat

SEQ ID NO: 7846 - DNA, 20 bp, Artificial Sequence
  chemically synthesized
tagcaaactataaaaataaa

SEQ ID NO: 7847 - DNA, 20 bp, Artificial Sequence
  chemically synthesized
tgaaatactgtctttgacct

SEQ ID NO: 7848 - DNA, 20 bp, Artificial Sequence
  chemically synthesized
ctttgaccttagtcataaac

SEQ ID NO: 7849 - DNA, 20 bp, Artificial Sequence
  chemically synthesized
aaaaaaacataatatcccaa

SEQ ID NO: 7850 - DNA, 20 bp, Artificial Sequence
  chemically synthesized
aaacataatatcccaacaga

SEQ ID NO: 7851 - DNA, 20 bp, Artificial Sequence
  chemically synthesized
acataatatcccaacagaca

SEQ ID NO: 7852 - DNA, 20 bp, Artificial Sequence
  chemically synthesized
cataatatcccaacagacag

SEQ ID NO: 7853 - DNA, 20 bp, Artificial Sequence
  chemically synthesized
ataatatcccaacagacaga

SEQ ID NO: 7854 - DNA, 20 bp, Artificial Sequence
  chemically synthesized
atcccaacagacagagggcc

SEQ ID NO: 7855 - DNA, 20 bp, Artificial Sequence
  chemically synthesized
tcccaacagacagagggcca

SEQ ID NO: 7856 - DNA, 20 bp, Artificial Sequence
  chemically synthesized
ccaaggattaaatgctcttc

SEQ ID NO: 7857 - DNA, 20 bp, Artificial Sequence
  chemically synthesized
taaatgctcttctagctctg

SEQ ID NO: 7858 - DNA, 20 bp, Artificial Sequence
  chemically synthesized
ttctagctctgcagaatgca

SEQ ID NO: 7859 - DNA, 20 bp, Artificial Sequence
  chemically synthesized
agctctgcagaatgcaaagc

SEQ ID NO: 7860 - DNA, 20 bp, Artificial Sequence
  chemically synthesized
tgcagaatgcaaagcaagac

SEQ ID NO: 7861 - DNA, 20 bp, Artificial Sequence
  chemically synthesized
gcagaatgcaaagcaagaca

SEQ ID NO: 7862 - DNA, 20 bp, Artificial Sequence
  chemically synthesized
gaatgcaaagcaagacaagg

SEQ ID NO: 7863 - DNA, 20 bp, Artificial Sequence
  chemically synthesized
gcaaagcaagacaaggaaga

SEQ ID NO: 7864 - DNA, 20 bp, Artificial Sequence
  chemically synthesized
caaagcaagacaaggaagaa

SEQ ID NO: 7865 - DNA, 20 bp, Artificial Sequence
  chemically synthesized
agcaagacaaggaagaaagg

SEQ ID NO: 7866 - DNA, 20 bp, Artificial Sequence
  chemically synthesized
gcaagacaaggaagaaagga

SEQ ID NO: 7867 - DNA, 20 bp, Artificial Sequence
  chemically synthesized
agacaaggaagaaaggaagg

SEQ ID NO: 7868 - DNA, 20 bp, Artificial Sequence
  chemically synthesized
gacaaggaagaaaggaagga

SEQ ID NO: 7869 - DNA, 20 bp, Artificial Sequence
  chemically synthesized
aaggaagaaaggaaggaagg

SEQ ID NO: 7870 - DNA, 20 bp, Artificial Sequence
  chemically synthesized
aggaagaaaggaaggaagga

SEQ ID NO: 7871 - DNA, 20 bp, Artificial Sequence
  chemically synthesized
aagaaaggaaggaaggaagg

SEQ ID NO: 7872 - DNA, 20 bp, Artificial Sequence
  chemically synthesized
agaaaggaaggaaggaagga

SEQ ID NO: 7873 - DNA, 20 bp, Artificial Sequence
  chemically synthesized
aaggaaggaaggaaggaagg

SEQ ID NO: 7874 - DNA, 20 bp, Artificial Sequence
  chemically synthesized
aggaaggaaggaaggaagga

SEQ ID NO: 7875 - DNA, 20 bp, Artificial Sequence
  chemically synthesized
aaggaaggaaggaaggaagg

SEQ ID NO: 7876 - DNA, 20 bp, Artificial Sequence
  chemically synthesized
aggaaggaaggaaggaagga

SEQ ID NO: 7877 - DNA, 20 bp, Artificial Sequence
  chemically synthesized
ggaaggaaggaaggaaggaa

SEQ ID NO: 7878 - DNA, 20 bp, Artificial Sequence
  chemically synthesized
aaggaaggaaggaaggaagg

SEQ ID NO: 7879 - DNA, 20 bp, Artificial Sequence
  chemically synthesized
aggaaggaaggaaggaaggg

SEQ ID NO: 7880 - DNA, 20 bp, Artificial Sequence
  chemically synthesized
ggaaggaaggaaggaaggga

SEQ ID NO: 7881 - DNA, 20 bp, Artificial Sequence
  chemically synthesized
aaggaaggaaggaagggagg

SEQ ID NO: 7882 - DNA, 20 bp, Artificial Sequence
  chemically synthesized
aggaaggaaggaagggaggg

SEQ ID NO: 7883 - DNA, 20 bp, Artificial Sequence
  chemically synthesized
ggaaggaaggaagggaggga

SEQ ID NO: 7884 - DNA, 20 bp, Artificial Sequence
  chemically synthesized
aaggaaggaagggagggagg

SEQ ID NO: 7885 - DNA, 20 bp, Artificial Sequence
  chemically synthesized
aggaaggaagggagggaggg

SEQ ID NO: 7886 - DNA, 20 bp, Artificial Sequence
  chemically synthesized
ggaaggaagggagggaggga

SEQ ID NO: 7887 - DNA, 20 bp, Artificial Sequence
  chemically synthesized
gaaggaagggagggagggag

SEQ ID NO: 7888 - DNA, 20 bp, Artificial Sequence
  chemically synthesized
aggaagggagggagggaggg

SEQ ID NO: 7889 - DNA, 20 bp, Artificial Sequence
  chemically synthesized
ggaagggagggagggagggg

SEQ ID NO: 7890 - DNA, 20 bp, Artificial Sequence
  chemically synthesized
gaagggagggagggagggga

SEQ ID NO: 7891 - DNA, 20 bp, Artificial Sequence
  chemically synthesized
aagggagggagggaggggag

SEQ ID NO: 7892 - DNA, 20 bp, Artificial Sequence
  chemically synthesized
gggagggagggaggggaggg

SEQ ID NO: 7893 - DNA, 20 bp, Artificial Sequence
  chemically synthesized
ggagggagggaggggagggg

SEQ ID NO: 7894 - DNA, 20 bp, Artificial Sequence
  chemically synthesized
gagggagggaggggagggga

SEQ ID NO: 7895 - DNA, 20 bp, Artificial Sequence
  chemically synthesized
agggagggaggggaggggag

SEQ ID NO: 7896 - DNA, 20 bp, Artificial Sequence
  chemically synthesized
ggagggaggggaggggaggg

SEQ ID NO: 7897 - DNA, 20 bp, Artificial Sequence
  chemically synthesized
gagggaggggaggggagggg

SEQ ID NO: 7898 - DNA, 20 bp, Artificial Sequence
  chemically synthesized
agggaggggaggggagggga

SEQ ID NO: 7899 - DNA, 20 bp, Artificial Sequence
  chemically synthesized
gggaggggaggggaggggag

SEQ ID NO: 7900 - DNA, 20 bp, Artificial Sequence
  chemically synthesized
gaggggaggggaggggaggg

SEQ ID NO: 7901 - DNA, 20 bp, Artificial Sequence
  chemically synthesized
aggggaggggaggggagggg

SEQ ID NO: 7902 - DNA, 20 bp, Artificial Sequence
  chemically synthesized
ggggaggggaggggagggga

SEQ ID NO: 7903 - DNA, 20 bp, Artificial Sequence
  chemically synthesized
gggaggggaggggaggggag

SEQ ID NO: 7904 - DNA, 20 bp, Artificial Sequence
  chemically synthesized
gaggggaggggaggggaggg

SEQ ID NO: 7905 - DNA, 20 bp, Artificial Sequence
  chemically synthesized
aggggaggggaggggagggg

SEQ ID NO: 7906 - DNA, 20 bp, Artificial Sequence
  chemically synthesized
ggggaggggaggggagggga

SEQ ID NO: 7907 - DNA, 20 bp, Artificial Sequence
  chemically synthesized
gggaggggaggggaggggag

SEQ ID NO: 7908 - DNA, 20 bp, Artificial Sequence
  chemically synthesized
gaggggaggggaggggaggg

SEQ ID NO: 7909 - DNA, 20 bp, Artificial Sequence
  chemically synthesized
aggggaggggaggggagggg

SEQ ID NO: 7910 - DNA, 20 bp, Artificial Sequence
  chemically synthesized
ggggaggggaggggagggga

SEQ ID NO: 7911 - DNA, 20 bp, Artificial Sequence
  chemically synthesized
gggaggggaggggaggggag

SEQ ID NO: 7912 - DNA, 20 bp, Artificial Sequence
  chemically synthesized
gaggggaggggaggggaggg

SEQ ID NO: 7913 - DNA, 20 bp, Artificial Sequence
  chemically synthesized
aggggaggggaggggagggg

SEQ ID NO: 7914 - DNA, 20 bp, Artificial Sequence
  chemically synthesized
ggggaggggaggggagggga

SEQ ID NO: 7915 - DNA, 20 bp, Artificial Sequence
  chemically synthesized
gggaggggaggggaggggag

SEQ ID NO: 7916 - DNA, 20 bp, Artificial Sequence
  chemically synthesized
gaggggaggggaggggaggg

SEQ ID NO: 7917 - DNA, 20 bp, Artificial Sequence
  chemically synthesized
aggggaggggaggggagggg

SEQ ID NO: 7918 - DNA, 20 bp, Artificial Sequence
  chemically synthesized
ggggaggggaggggagggga

SEQ ID NO: 7919 - DNA, 20 bp, Artificial Sequence
  chemically synthesized
gggaggggaggggaggggag

SEQ ID NO: 7920 - DNA, 20 bp, Artificial Sequence
  chemically synthesized
gaggggaggggaggggaggg

SEQ ID NO: 7921 - DNA, 20 bp, Artificial Sequence
  chemically synthesized
aggggaggggaggggagggg

SEQ ID NO: 7922 - DNA, 20 bp, Artificial Sequence
  chemically synthesized
ggggaggggaggggagggga

SEQ ID NO: 7923 - DNA, 20 bp, Artificial Sequence
  chemically synthesized
gggaggggaggggaggggag

SEQ ID NO: 7924 - DNA, 20 bp, Artificial Sequence
  chemically synthesized
gaggggaggggaggggaggg

SEQ ID NO: 7925 - DNA, 20 bp, Artificial Sequence
  chemically synthesized
aggggaggggaggggagggg

SEQ ID NO: 7926 - DNA, 20 bp, Artificial Sequence
  chemically synthesized
ggggaggggaggggagggga

SEQ ID NO: 7927 - DNA, 20 bp, Artificial Sequence
  chemically synthesized
gggaggggaggggaggggag

SEQ ID NO: 7928 - DNA, 20 bp, Artificial Sequence
  chemically synthesized
gaggggaggggaggggaggg

SEQ ID NO: 7929 - DNA, 20 bp, Artificial Sequence
  chemically synthesized
aggggaggggaggggagggg

SEQ ID NO: 7930 - DNA, 20 bp, Artificial Sequence
  chemically synthesized
ggggaggggaggggagggga

SEQ ID NO: 7931 - DNA, 20 bp, Artificial Sequence
  chemically synthesized
gggaggggaggggaggggag

SEQ ID NO: 7932 - DNA, 20 bp, Artificial Sequence
  chemically synthesized
gaggggaggggaggggaggg

SEQ ID NO: 7933 - DNA, 20 bp, Artificial Sequence
  chemically synthesized
aggggaggggaggggagggg

SEQ ID NO: 7934 - DNA, 20 bp, Artificial Sequence
  chemically synthesized
ggggaggggaggggagggga

SEQ ID NO: 7935 - DNA, 20 bp, Artificial Sequence
  chemically synthesized
gggaggggaggggaggggag

SEQ ID NO: 7936 - DNA, 20 bp, Artificial Sequence
  chemically synthesized
gaggggaggggaggggaggg

SEQ ID NO: 7937 - DNA, 20 bp, Artificial Sequence
  chemically synthesized
aggggaggggaggggagggg

SEQ ID NO: 7938 - DNA, 20 bp, Artificial Sequence
  chemically synthesized
ggggaggggaggggagggga

SEQ ID NO: 7939 - DNA, 20 bp, Artificial Sequence
  chemically synthesized
gggaggggaggggaggggag

SEQ ID NO: 7940 - DNA, 20 bp, Artificial Sequence
  chemically synthesized
gaggggaggggaggggaggg

SEQ ID NO: 7941 - DNA, 20 bp, Artificial Sequence
  chemically synthesized
aggggaggggaggggagggg

SEQ ID NO: 7942 - DNA, 20 bp, Artificial Sequence
  chemically synthesized
ggggaggggaggggagggga

SEQ ID NO: 7943 - DNA, 20 bp, Artificial Sequence
  chemically synthesized
gggaggggaggggaggggag

SEQ ID NO: 7944 - DNA, 20 bp, Artificial Sequence
  chemically synthesized
aggggaggggaggggagggg

SEQ ID NO: 7945 - DNA, 20 bp, Artificial Sequence
  chemically synthesized
ggggaggggaggggagggga

SEQ ID NO: 7946 - DNA, 20 bp, Artificial Sequence
  chemically synthesized
gggaggggaggggaggggaa

SEQ ID NO: 7947 - DNA, 20 bp, Artificial Sequence
  chemically synthesized
aggggaggggaggggaaggg

SEQ ID NO: 7948 - DNA, 20 bp, Artificial Sequence
  chemically synthesized
ggggaggggaggggaaggga

SEQ ID NO: 7949 - DNA, 20 bp, Artificial Sequence
  chemically synthesized
gggaggggaggggaagggaa

SEQ ID NO: 7950 - DNA, 20 bp, Artificial Sequence
  chemically synthesized
aggggaggggaagggaaggg

SEQ ID NO: 7951 - DNA, 20 bp, Artificial Sequence
  chemically synthesized
ggggaggggaagggaaggga

SEQ ID NO: 7952 - DNA, 20 bp, Artificial Sequence
  chemically synthesized
gggaggggaagggaagggaa

SEQ ID NO: 7953 - DNA, 20 bp, Artificial Sequence
  chemically synthesized
aggggaagggaagggaaggg

SEQ ID NO: 7954 - DNA, 20 bp, Artificial Sequence
  chemically synthesized
ggggaagggaagggaaggga

SEQ ID NO: 7955 - DNA, 20 bp, Artificial Sequence
  chemically synthesized
gggaagggaagggaagggaa

SEQ ID NO: 7956 - DNA, 20 bp, Artificial Sequence
  chemically synthesized
aagggaagggaagggaaggg

SEQ ID NO: 7957 - DNA, 20 bp, Artificial Sequence
  chemically synthesized
agggaagggaagggaaggga

SEQ ID NO: 7958 - DNA, 20 bp, Artificial Sequence
  chemically synthesized
gggaagggaagggaagggaa

SEQ ID NO: 7959 - DNA, 20 bp, Artificial Sequence
  chemically synthesized
aagggaagggaagggaaggg

SEQ ID NO: 7960 - DNA, 20 bp, Artificial Sequence
  chemically synthesized
agggaagggaagggaaggga

SEQ ID NO: 7961 - DNA, 20 bp, Artificial Sequence
  chemically synthesized
gggaagggaagggaagggaa

SEQ ID NO: 7962 - DNA, 20 bp, Artificial Sequence
  chemically synthesized
aagggaagggaagggaaggg

SEQ ID NO: 7963 - DNA, 20 bp, Artificial Sequence
  chemically synthesized
agggaagggaagggaaggga

SEQ ID NO: 7964 - DNA, 20 bp, Artificial Sequence
  chemically synthesized
gggaagggaagggaagggaa

SEQ ID NO: 7965 - DNA, 20 bp, Artificial Sequence
  chemically synthesized
aagggaagggaagggaaggg

SEQ ID NO: 7966 - DNA, 20 bp, Artificial Sequence
  chemically synthesized
agggaagggaagggaaggga

SEQ ID NO: 7967 - DNA, 20 bp, Artificial Sequence
  chemically synthesized
gggaagggaagggaagggaa

SEQ ID NO: 7968 - DNA, 20 bp, Artificial Sequence
  chemically synthesized
aagggaagggaagggaaggg

SEQ ID NO: 7969 - DNA, 20 bp, Artificial Sequence
  chemically synthesized
agggaagggaagggaaggga

SEQ ID NO: 7970 - DNA, 20 bp, Artificial Sequence
  chemically synthesized
gggaagggaagggaagggaa

SEQ ID NO: 7971 - DNA, 20 bp, Artificial Sequence
  chemically synthesized
aagggaagggaagggaaggg

SEQ ID NO: 7972 - DNA, 20 bp, Artificial Sequence
  chemically synthesized
agggaagggaagggaaggga

SEQ ID NO: 7973 - DNA, 20 bp, Artificial Sequence
  chemically synthesized
gggaagggaagggaagggaa

SEQ ID NO: 7974 - DNA, 20 bp, Artificial Sequence
  chemically synthesized
aagggaagggaagggaaggg

SEQ ID NO: 7975 - DNA, 20 bp, Artificial Sequence
  chemically synthesized
agggaagggaagggaaggga

SEQ ID NO: 7976 - DNA, 20 bp, Artificial Sequence
  chemically synthesized
gggaagggaagggaagggaa

SEQ ID NO: 7977 - DNA, 20 bp, Artificial Sequence
  chemically synthesized
aagggaagggaagggaaggg

SEQ ID NO: 7978 - DNA, 20 bp, Artificial Sequence
  chemically synthesized
agggaagggaagggaaggga

SEQ ID NO: 7979 - DNA, 20 bp, Artificial Sequence
  chemically synthesized
gggaagggaagggaagggaa

SEQ ID NO: 7980 - DNA, 20 bp, Artificial Sequence
  chemically synthesized
gaagggaagggaagggaagg

SEQ ID NO: 7981 - DNA, 20 bp, Artificial Sequence
  chemically synthesized
aagggaagggaagggaaggg

SEQ ID NO: 7982 - DNA, 20 bp, Artificial Sequence
  chemically synthesized
agggaagggaagggaaggga

SEQ ID NO: 7983 - DNA, 20 bp, Artificial Sequence
  chemically synthesized
ggaagggaagggaagggagg

SEQ ID NO: 7984 - DNA, 20 bp, Artificial Sequence
  chemically synthesized
gaagggaagggaagggaggg

SEQ ID NO: 7985 - DNA, 20 bp, Artificial Sequence
  chemically synthesized
aagggaagggaagggaggga

SEQ ID NO: 7986 - DNA, 20 bp, Artificial Sequence
  chemically synthesized
ggaagggaagggagggaggg

SEQ ID NO: 7987 - DNA, 20 bp, Artificial Sequence
  chemically synthesized
gaagggaagggagggaggga

SEQ ID NO: 7988 - DNA, 20 bp, Artificial Sequence
  chemically synthesized
agggaagggagggagggaag

SEQ ID NO: 7989 - DNA, 20 bp, Artificial Sequence
  chemically synthesized
gggaagggagggagggaagg

SEQ ID NO: 7990 - DNA, 20 bp, Artificial Sequence
  chemically synthesized
ggaagggagggagggaagga

SEQ ID NO: 7991 - DNA, 20 bp, Artificial Sequence
  chemically synthesized
gggcccttgcctttcttgaa

SEQ ID NO: 7992 - DNA, 20 bp, Artificial Sequence
  chemically synthesized
ccttgcctttcttgaaaagc

SEQ ID NO: 7993 - DNA, 20 bp, Artificial Sequence
  chemically synthesized
aactgtgtccaaaacctaca

SEQ ID NO: 7994 - DNA, 20 bp, Artificial Sequence
  chemically synthesized
attgtgctcttgttgacttg

SEQ ID NO: 7995 - DNA, 20 bp, Artificial Sequence
  chemically synthesized
acttgaagctgcttccgttc

SEQ ID NO: 7996 - DNA, 20 bp, Artificial Sequence
  chemically synthesized
gaagctgcttccgttcaagc

SEQ ID NO: 7997 - DNA, 20 bp, Artificial Sequence
  chemically synthesized
tgcttccgttcaagccagaa

SEQ ID NO: 7998 - DNA, 20 bp, Artificial Sequence
  chemically synthesized
agaaaagttaaaaccttgtg

SEQ ID NO: 7999 - DNA, 20 bp, Artificial Sequence
  chemically synthesized
gtgaagtgcttttacatttt

SEQ ID NO: 8000 - DNA, 20 bp, Artificial Sequence
  chemically synthesized
ttttacattttcagatgttt

SEQ ID NO: 8001 - DNA, 20 bp, Artificial Sequence
  chemically synthesized
ttacattttcagatgttttg

SEQ ID NO: 8002 - DNA, 20 bp, Artificial Sequence
  chemically synthesized
cagatgttttggagtctctc

SEQ ID NO: 8003 - DNA, 20 bp, Artificial Sequence
  chemically synthesized
tttggagtctctcaagaaat

SEQ ID NO: 8004 - DNA, 20 bp, Artificial Sequence
  chemically synthesized
ttggagtctctcaagaaatg

SEQ ID NO: 8005 - DNA, 20 bp, Artificial Sequence
  chemically synthesized
agtctctcaagaaatgagga

SEQ ID NO: 8006 - DNA, 20 bp, Artificial Sequence
  chemically synthesized
gtctctcaagaaatgaggac

SEQ ID NO: 8007 - DNA, 20 bp, Artificial Sequence
  chemically synthesized
ctcaagaaatgaggacaggc

SEQ ID NO: 8008 - DNA, 20 bp, Artificial Sequence
  chemically synthesized
tcaagaaatgaggacaggca

SEQ ID NO: 8009 - DNA, 20 bp, Artificial Sequence
  chemically synthesized
caagaaatgaggacaggcaa

SEQ ID NO: 8010 - DNA, 20 bp, Artificial Sequence
  chemically synthesized
aagaaatgaggacaggcaag

SEQ ID NO: 8011 - DNA, 20 bp, Artificial Sequence
  chemically synthesized
aaatgaggacaggcaagggg

SEQ ID NO: 8012 - DNA, 20 bp, Artificial Sequence
  chemically synthesized
ggaagaactgtttccacatg

SEQ ID NO: 8013 - DNA, 20 bp, Artificial Sequence
  chemically synthesized
tccacatgcagctgtttcaa

SEQ ID NO: 8014 - DNA, 20 bp, Artificial Sequence
  chemically synthesized
ttcaacagctcactgcataa

SEQ ID NO: 8015 - DNA, 20 bp, Artificial Sequence
  chemically synthesized
caacagctcactgcataaca

SEQ ID NO: 8016 - DNA, 20 bp, Artificial Sequence
  chemically synthesized
gcataacagagtctcttaca

SEQ ID NO: 8017 - DNA, 20 bp, Artificial Sequence
  chemically synthesized
cataacagagtctcttacac

SEQ ID NO: 8018 - DNA, 20 bp, Artificial Sequence
  chemically synthesized
ataacagagtctcttacaca

SEQ ID NO: 8019 - DNA, 20 bp, Artificial Sequence
  chemically synthesized
acagggctgcctccgcacct

SEQ ID NO: 8020 - DNA, 20 bp, Artificial Sequence
  chemically synthesized
gctgcctccgcacctgagct

SEQ ID NO: 8021 - DNA, 20 bp, Artificial Sequence
  chemically synthesized
tgagctgagcttgctgtcct

SEQ ID NO: 8022 - DNA, 20 bp, Artificial Sequence
  chemically synthesized
ctgagcttgctgtcctaagt

SEQ ID NO: 8023 - DNA, 20 bp, Artificial Sequence
  chemically synthesized
ctaagtcggctactgcttct

SEQ ID NO: 8024 - DNA, 20 bp, Artificial Sequence
  chemically synthesized
ggctactgcttctaagtccc

SEQ ID NO: 8025 - DNA, 20 bp, Artificial Sequence
  chemically synthesized
tctaagtccccagcttttct

SEQ ID NO: 8026 - DNA, 20 bp, Artificial Sequence
  chemically synthesized
cccagcttttctaagacata

SEQ ID NO: 8027 - DNA, 20 bp, Artificial Sequence
  chemically synthesized
agcttttctaagacatatgg

SEQ ID NO: 8028 - DNA, 20 bp, Artificial Sequence
  chemically synthesized
taagacatatggcagaaatg

SEQ ID NO: 8029 - DNA, 20 bp, Artificial Sequence
  chemically synthesized
tgtggaaattgtcttccaaa

SEQ ID NO: 8030 - DNA, 20 bp, Artificial Sequence
  chemically synthesized
aattgtcttccaaacagcac

SEQ ID NO: 8031 - DNA, 20 bp, Artificial Sequence
  chemically synthesized
gtcttccaaacagcacaaga

SEQ ID NO: 8032 - DNA, 20 bp, Artificial Sequence
  chemically synthesized
tccaaacagcacaagacaga

SEQ ID NO: 8033 - DNA, 20 bp, Artificial Sequence
  chemically synthesized
aaacagcacaagacagaaag

SEQ ID NO: 8034 - DNA, 20 bp, Artificial Sequence
  chemically synthesized
aacagcacaagacagaaagc

SEQ ID NO: 8035 - DNA, 20 bp, Artificial Sequence
  chemically synthesized
agcacaagacagaaagcggg

SEQ ID NO: 8036 - DNA, 20 bp, Artificial Sequence
  chemically synthesized
gcacaagacagaaagcgggt

SEQ ID NO: 8037 - DNA, 20 bp, Artificial Sequence
  chemically synthesized
cacaagacagaaagcgggtg

SEQ ID NO: 8038 - DNA, 20 bp, Artificial Sequence
  chemically synthesized
aagacagaaagcgggtgggg

SEQ ID NO: 8039 - DNA, 20 bp, Artificial Sequence
  chemically synthesized
agacagaaagcgggtggggt

SEQ ID NO: 8040 - DNA, 20 bp, Artificial Sequence
  chemically synthesized
gacagaaagcgggtggggtg

SEQ ID NO: 8041 - DNA, 20 bp, Artificial Sequence
  chemically synthesized
acagaaagcgggtggggtgg

SEQ ID NO: 8042 - DNA, 20 bp, Artificial Sequence
  chemically synthesized
cagaaagcgggtggggtggg

SEQ ID NO: 8043 - DNA, 20 bp, Artificial Sequence
  chemically synthesized
gcgggtggggtggggggcga

SEQ ID NO: 8044 - DNA, 20 bp, Artificial Sequence
  chemically synthesized
cgggtggggtggggggcgac

SEQ ID NO: 8045 - DNA, 20 bp, Artificial Sequence
  chemically synthesized
ggggtggggggcgacgggtg

SEQ ID NO: 8046 - DNA, 20 bp, Artificial Sequence
  chemically synthesized
gggtggggggcgacgggtgc

SEQ ID NO: 8047 - DNA, 20 bp, Artificial Sequence
  chemically synthesized
ggtggggggcgacgggtgcg

SEQ ID NO: 8048 - DNA, 20 bp, Artificial Sequence
  chemically synthesized
tggggggcgacgggtgcggg

SEQ ID NO: 8049 - DNA, 20 bp, Artificial Sequence
  chemically synthesized
ggggcgacgggtgcggggag

SEQ ID NO: 8050 - DNA, 20 bp, Artificial Sequence
  chemically synthesized
gggcgacgggtgcggggaga

SEQ ID NO: 8051 - DNA, 20 bp, Artificial Sequence
  chemically synthesized
ggcgacgggtgcggggagaa

SEQ ID NO: 8052 - DNA, 20 bp, Artificial Sequence
  chemically synthesized
gacgggtgcggggagaaggg

SEQ ID NO: 8053 - DNA, 20 bp, Artificial Sequence
  chemically synthesized
gggtgcggggagaagggaag

SEQ ID NO: 8054 - DNA, 20 bp, Artificial Sequence
  chemically synthesized
agaagggaagaagtaaaaac

SEQ ID NO: 8055 - DNA, 20 bp, Artificial Sequence
  chemically synthesized
caagctgttgaaactgtata

SEQ ID NO: 8056 - DNA, 20 bp, Artificial Sequence
  chemically synthesized
aagctgttgaaactgtatac

SEQ ID NO: 8057 - DNA, 20 bp, Artificial Sequence
  chemically synthesized
gtatacaggacacgtcttca

SEQ ID NO: 8058 - DNA, 20 bp, Artificial Sequence
  chemically synthesized
aatccaatgctcctgtaaca

SEQ ID NO: 8059 - DNA, 20 bp, Artificial Sequence
  chemically synthesized
atccaatgctcctgtaacaa

SEQ ID NO: 8060 - DNA, 20 bp, Artificial Sequence
  chemically synthesized
aatgctcctgtaacaaagga

SEQ ID NO: 8061 - DNA, 20 bp, Artificial Sequence
  chemically synthesized
taacaaaggacagcatacta

SEQ ID NO: 8062 - DNA, 20 bp, Artificial Sequence
  chemically synthesized
aacaaaggacagcatactat

SEQ ID NO: 8063 - DNA, 20 bp, Artificial Sequence
  chemically synthesized
atactatgggataattacta

SEQ ID NO: 8064 - DNA, 20 bp, Artificial Sequence
  chemically synthesized
attactatggattattatta

SEQ ID NO: 8065 - DNA, 20 bp, Artificial Sequence
  chemically synthesized
gattattattacagtttcta

SEQ ID NO: 8066 - DNA, 20 bp, Artificial Sequence
  chemically synthesized
tattacagtttctaaagcaa

SEQ ID NO: 8067 - DNA, 20 bp, Artificial Sequence
  chemically synthesized
gaacaaaaaaaaattcacaa

SEQ ID NO: 8068 - DNA, 20 bp, Artificial Sequence
  chemically synthesized
caaaagacatattacacacg

SEQ ID NO: 8069 - DNA, 20 bp, Artificial Sequence
  chemically synthesized
attacacacgcagatttcta

SEQ ID NO: 8070 - DNA, 20 bp, Artificial Sequence
  chemically synthesized
tctaaagctttaaaatcata

SEQ ID NO: 8071 - DNA, 20 bp, Artificial Sequence
  chemically synthesized
ctttaaaatcatatggtctt

SEQ ID NO: 8072 - DNA, 20 bp, Artificial Sequence
  chemically synthesized
aatcatatggtcttcggtgt

SEQ ID NO: 8073 - DNA, 20 bp, Artificial Sequence
  chemically synthesized
gtcttcggtgttggttccta

SEQ ID NO: 8074 - DNA, 20 bp, Artificial Sequence
  chemically synthesized
tcttcggtgttggttcctat

SEQ ID NO: 8075 - DNA, 20 bp, Artificial Sequence
  chemically synthesized
cttcggtgttggttcctatg

SEQ ID NO: 8076 - DNA, 20 bp, Artificial Sequence
  chemically synthesized
tgttggttcctatggggtta

SEQ ID NO: 8077 - DNA, 20 bp, Artificial Sequence
  chemically synthesized
ttacggataatgccctaact

SEQ ID NO: 8078 - DNA, 20 bp, Artificial Sequence
  chemically synthesized
aatgccctaactgagcacga

SEQ ID NO: 8079 - DNA, 20 bp, Artificial Sequence
  chemically synthesized
cgacagatgcaaacacaaaa

SEQ ID NO: 8080 - DNA, 20 bp, Artificial Sequence
  chemically synthesized
cctgaaattctctcatgtca

SEQ ID NO: 8081 - DNA, 20 bp, Artificial Sequence
  chemically synthesized
gccctttctttcacaaacaa

SEQ ID NO: 8082 - DNA, 20 bp, Artificial Sequence
  chemically synthesized
ctttctttcacaaacaaaag

SEQ ID NO: 8083 - DNA, 20 bp, Artificial Sequence
  chemically synthesized
tttcacaaacaaaagtagtt

SEQ ID NO: 8084 - DNA, 20 bp, Artificial Sequence
  chemically synthesized
aaacaaaagtagttgagcaa

SEQ ID NO: 8085 - DNA, 20 bp, Artificial Sequence
  chemically synthesized
aaagtagttgagcaacagct

SEQ ID NO: 8086 - DNA, 20 bp, Artificial Sequence
  chemically synthesized
gtagttgagcaacagctaag

SEQ ID NO: 8087 - DNA, 20 bp, Artificial Sequence
  chemically synthesized
ctaagtagttattcatctca

SEQ ID NO: 8088 - DNA, 20 bp, Artificial Sequence
  chemically synthesized
gaaccaacctaaaattctga

SEQ ID NO: 8089 - DNA, 20 bp, Artificial Sequence
  chemically synthesized
aaccaacctaaaattctgac

SEQ ID NO: 8090 - DNA, 20 bp, Artificial Sequence
  chemically synthesized
acctaaaattctgacaggcc

SEQ ID NO: 8091 - DNA, 20 bp, Artificial Sequence
  chemically synthesized
caaattacacaaataaaaac

SEQ ID NO: 8092 - DNA, 20 bp, Artificial Sequence
  chemically synthesized
aaattacacaaataaaaact

SEQ ID NO: 8093 - DNA, 20 bp, Artificial Sequence
  chemically synthesized
attacacaaataaaaactag

SEQ ID NO: 8094 - DNA, 20 bp, Artificial Sequence
  chemically synthesized
ttacacaaataaaaactagg

SEQ ID NO: 8095 - DNA, 20 bp, Artificial Sequence
  chemically synthesized
cacaaataaaaactaggagg

SEQ ID NO: 8096 - DNA, 20 bp, Artificial Sequence
  chemically synthesized
agctcaaactcatccacact

SEQ ID NO: 8097 - DNA, 20 bp, Artificial Sequence
  chemically synthesized
aaactcatccacacttggtt

SEQ ID NO: 8098 - DNA, 20 bp, Artificial Sequence
  chemically synthesized
aactcatccacacttggttc

SEQ ID NO: 8099 - DNA, 20 bp, Artificial Sequence
  chemically synthesized
tccacacttggttcaggaca

SEQ ID NO: 8100 - DNA, 20 bp, Artificial Sequence
  chemically synthesized
ccacacttggttcaggacac

SEQ ID NO: 8101 - DNA, 20 bp, Artificial Sequence
  chemically synthesized
cacacttggttcaggacaca

SEQ ID NO: 8102 - DNA, 20 bp, Artificial Sequence
  chemically synthesized
acttggttcaggacacaggg

SEQ ID NO: 8103 - DNA, 20 bp, Artificial Sequence
  chemically synthesized
cttggttcaggacacaggga

SEQ ID NO: 8104 - DNA, 20 bp, Artificial Sequence
  chemically synthesized
acagggaaggcctgatgtga

SEQ ID NO: 8105 - DNA, 20 bp, Artificial Sequence
  chemically synthesized
agggaaggcctgatgtgaaa

SEQ ID NO: 8106 - DNA, 20 bp, Artificial Sequence
  chemically synthesized
gggaaggcctgatgtgaaag

SEQ ID NO: 8107 - DNA, 20 bp, Artificial Sequence
  chemically synthesized
gaaggcctgatgtgaaagag

SEQ ID NO: 8108 - DNA, 20 bp, Artificial Sequence
  chemically synthesized
gcctgatgtgaaagaggaga

SEQ ID NO: 8109 - DNA, 20 bp, Artificial Sequence
  chemically synthesized
ctgatgtgaaagaggagaca

SEQ ID NO: 8110 - DNA, 20 bp, Artificial Sequence
  chemically synthesized
atgtgaaagaggagacagag

SEQ ID NO: 8111 - DNA, 20 bp, Artificial Sequence
  chemically synthesized
gaggagacagagaagcttcc

SEQ ID NO: 8112 - DNA, 20 bp, Artificial Sequence
  chemically synthesized
aggagacagagaagcttcct

SEQ ID NO: 8113 - DNA, 20 bp, Artificial Sequence
  chemically synthesized
agagaagcttcctgggtgtg

SEQ ID NO: 8114 - DNA, 20 bp, Artificial Sequence
  chemically synthesized
gggtgtgcagaattacaccc

SEQ ID NO: 8115 - DNA, 20 bp, Artificial Sequence
  chemically synthesized
ggtgtgcagaattacacccc

SEQ ID NO: 8116 - DNA, 20 bp, Artificial Sequence
  chemically synthesized
accccaggccacactccctg

SEQ ID NO: 8117 - DNA, 20 bp, Artificial Sequence
  chemically synthesized
ccccaggccacactccctgc

SEQ ID NO: 8118 - DNA, 20 bp, Artificial Sequence
  chemically synthesized
cccaggccacactccctgca

SEQ ID NO: 8119 - DNA, 20 bp, Artificial Sequence
  chemically synthesized
ccaggccacactccctgcag

SEQ ID NO: 8120 - DNA, 20 bp, Artificial Sequence
  chemically synthesized
cacactccctgcaggggcca

SEQ ID NO: 8121 - DNA, 20 bp, Artificial Sequence
  chemically synthesized
acactccctgcaggggccac

SEQ ID NO: 8122 - DNA, 20 bp, Artificial Sequence
  chemically synthesized
actccctgcaggggccacag

SEQ ID NO: 8123 - DNA, 20 bp, Artificial Sequence
  chemically synthesized
cctgcaggggccacaggagc

SEQ ID NO: 8124 - DNA, 20 bp, Artificial Sequence
  chemically synthesized
ggccacaggagcaagcactg

SEQ ID NO: 8125 - DNA, 20 bp, Artificial Sequence
  chemically synthesized
acaggagcaagcactgcagc

SEQ ID NO: 8126 - DNA, 20 bp, Artificial Sequence
  chemically synthesized
caggagcaagcactgcagcc

SEQ ID NO: 8127 - DNA, 20 bp, Artificial Sequence
  chemically synthesized
agcactgcagccgggtccct

SEQ ID NO: 8128 - DNA, 20 bp, Artificial Sequence
  chemically synthesized
gagtctgacttttacccaaa

SEQ ID NO: 8129 - DNA, 20 bp, Artificial Sequence
  chemically synthesized
agtctgacttttacccaaac

SEQ ID NO: 8130 - DNA, 20 bp, Artificial Sequence
  chemically synthesized
gtctgacttttacccaaaca

SEQ ID NO: 8131 - DNA, 20 bp, Artificial Sequence
  chemically synthesized
tctgacttttacccaaacag

SEQ ID NO: 8132 - DNA, 20 bp, Artificial Sequence
  chemically synthesized
ctgacttttacccaaacagg

SEQ ID NO: 8133 - DNA, 20 bp, Artificial Sequence
  chemically synthesized
ttacccaaacagggggttgc

SEQ ID NO: 8134 - DNA, 20 bp, Artificial Sequence
  chemically synthesized
agggggttgccagttgctgc

SEQ ID NO: 8135 - DNA, 20 bp, Artificial Sequence
  chemically synthesized
tgctgcgagacaaatatccc

SEQ ID NO: 8136 - DNA, 20 bp, Artificial Sequence
  chemically synthesized
aatatccctagcacattacc

SEQ ID NO: 8137 - DNA, 20 bp, Artificial Sequence
  chemically synthesized
tccctagcacattacctagt

SEQ ID NO: 8138 - DNA, 20 bp, Artificial Sequence
  chemically synthesized
agcacattacctagttggca

SEQ ID NO: 8139 - DNA, 20 bp, Artificial Sequence
  chemically synthesized
gcacattacctagttggcaa

SEQ ID NO: 8140 - DNA, 20 bp, Artificial Sequence
  chemically synthesized
agttggcaaaggaatgcaac

SEQ ID NO: 8141 - DNA, 20 bp, Artificial Sequence
  chemically synthesized
gttggcaaaggaatgcaact

SEQ ID NO: 8142 - DNA, 20 bp, Artificial Sequence
  chemically synthesized
tggcaaaggaatgcaactgg

SEQ ID NO: 8143 - DNA, 20 bp, Artificial Sequence
  chemically synthesized
ggcaaaggaatgcaactggg

SEQ ID NO: 8144 - DNA, 20 bp, Artificial Sequence
  chemically synthesized
ggaatgcaactgggaggttc

SEQ ID NO: 8145 - DNA, 20 bp, Artificial Sequence
  chemically synthesized
gcaactgggaggttctggaa

SEQ ID NO: 8146 - DNA, 20 bp, Artificial Sequence
  chemically synthesized
tgggaggttctggaatagca

SEQ ID NO: 8147 - DNA, 20 bp, Artificial Sequence
  chemically synthesized
ggttctggaatagcacagtg

SEQ ID NO: 8148 - DNA, 20 bp, Artificial Sequence
  chemically synthesized
agcacagtgtggaactgcac

SEQ ID NO: 8149 - DNA, 20 bp, Artificial Sequence
  chemically synthesized
actggacttttcctgttctg

SEQ ID NO: 8150 - DNA, 20 bp, Artificial Sequence
  chemically synthesized
tggacttttcctgttctgaa

SEQ ID NO: 8151 - DNA, 20 bp, Artificial Sequence
  chemically synthesized
ggacttttcctgttctgaag

SEQ ID NO: 8152 - DNA, 20 bp, Artificial Sequence
  chemically synthesized
aagaggactttgctttcctc

SEQ ID NO: 8153 - DNA, 20 bp, Artificial Sequence
  chemically synthesized
agaggactttgctttcctcc

SEQ ID NO: 8154 - DNA, 20 bp, Artificial Sequence
  chemically synthesized
ttgctttcctccgggatgta

SEQ ID NO: 8155 - DNA, 20 bp, Artificial Sequence
  chemically synthesized
cctccgggatgtaaagcatt

SEQ ID NO: 8156 - DNA, 20 bp, Artificial Sequence
  chemically synthesized
ccgggatgtaaagcatttgg

SEQ ID NO: 8157 - DNA, 20 bp, Artificial Sequence
  chemically synthesized
cgggatgtaaagcatttggc

SEQ ID NO: 8158 - DNA, 20 bp, Artificial Sequence
  chemically synthesized
tgtaaagcatttggcaggca

SEQ ID NO: 8159 - DNA, 20 bp, Artificial Sequence
  chemically synthesized
gtaaagcatttggcaggcaa

SEQ ID NO: 8160 - DNA, 20 bp, Artificial Sequence
  chemically synthesized
gcaaaggacaaaacttacct

SEQ ID NO: 8161 - DNA, 20 bp, Artificial Sequence
  chemically synthesized
caaaggacaaaacttacctc

SEQ ID NO: 8162 - DNA, 20 bp, Artificial Sequence
  chemically synthesized
aaaacttacctcaggtacta

SEQ ID NO: 8163 - DNA, 20 bp, Artificial Sequence
  chemically synthesized
cctcaggtactatggcaaac

SEQ ID NO: 8164 - DNA, 20 bp, Artificial Sequence
  chemically synthesized
gtactatggcaaactggcca

SEQ ID NO: 8165 - DNA, 20 bp, Artificial Sequence
  chemically synthesized
actatggcaaactggccaaa

SEQ ID NO: 8166 - DNA, 20 bp, Artificial Sequence
  chemically synthesized
atggcaaactggccaaagag

SEQ ID NO: 8167 - DNA, 20 bp, Artificial Sequence
  chemically synthesized
tggccaaagagaagcgttgc

SEQ ID NO: 8168 - DNA, 20 bp, Artificial Sequence
  chemically synthesized
ggccaaagagaagcgttgct

SEQ ID NO: 8169 - DNA, 20 bp, Artificial Sequence
  chemically synthesized
ccaaagagaagcgttgctag

SEQ ID NO: 8170 - DNA, 20 bp, Artificial Sequence
  chemically synthesized
gagaagcgttgctaggagaa

SEQ ID NO: 8171 - DNA, 20 bp, Artificial Sequence
  chemically synthesized
cgttgctaggagaatggaca

SEQ ID NO: 8172 - DNA, 20 bp, Artificial Sequence
  chemically synthesized
tgctaggagaatggacacgg

SEQ ID NO: 8173 - DNA, 20 bp, Artificial Sequence
  chemically synthesized
gctaggagaatggacacggc

SEQ ID NO: 8174 - DNA, 20 bp, Artificial Sequence
  chemically synthesized
agaatggacacggcaggaaa

SEQ ID NO: 8175 - DNA, 20 bp, Artificial Sequence
  chemically synthesized
gacacggcaggaaacagcct

SEQ ID NO: 8176 - DNA, 20 bp, Artificial Sequence
  chemically synthesized
ggcaggaaacagcctcagct

SEQ ID NO: 8177 - DNA, 20 bp, Artificial Sequence
  chemically synthesized
gaaacagcctcagcttggcc

SEQ ID NO: 8178 - DNA, 20 bp, Artificial Sequence
  chemically synthesized
aaacagcctcagcttggccc

SEQ ID NO: 8179 - DNA, 20 bp, Artificial Sequence
  chemically synthesized
cagcctcagcttggcccagg

SEQ ID NO: 8180 - DNA, 20 bp, Artificial Sequence
  chemically synthesized
cctcagcttggcccaggaag

SEQ ID NO: 8181 - DNA, 20 bp, Artificial Sequence
  chemically synthesized
agcttggcccaggaagaagc

SEQ ID NO: 8182 - DNA, 20 bp, Artificial Sequence
  chemically synthesized
cccaggaagaagctggcgct

SEQ ID NO: 8183 - DNA, 20 bp, Artificial Sequence
  chemically synthesized
aagaagctggcgctcagcta

SEQ ID NO: 8184 - DNA, 20 bp, Artificial Sequence
  chemically synthesized
agaagctggcgctcagctac

SEQ ID NO: 8185 - DNA, 20 bp, Artificial Sequence
  chemically synthesized
gaagctggcgctcagctaca

SEQ ID NO: 8186 - DNA, 20 bp, Artificial Sequence
  chemically synthesized
aagctggcgctcagctacag

SEQ ID NO: 8187 - DNA, 20 bp, Artificial Sequence
  chemically synthesized
gcgctcagctacaggggccg

SEQ ID NO: 8188 - DNA, 20 bp, Artificial Sequence
  chemically synthesized
cgctcagctacaggggccgt

SEQ ID NO: 8189 - DNA, 20 bp, Artificial Sequence
  chemically synthesized
agctacaggggccgtgggaa

SEQ ID NO: 8190 - DNA, 20 bp, Artificial Sequence
  chemically synthesized
acaggggccgtgggaatagc

SEQ ID NO: 8191 - DNA, 20 bp, Artificial Sequence
  chemically synthesized
aggggccgtgggaatagctg

SEQ ID NO: 8192 - DNA, 20 bp, Artificial Sequence
  chemically synthesized
ggggccgtgggaatagctgg

SEQ ID NO: 8193 - DNA, 20 bp, Artificial Sequence
  chemically synthesized
ggaggcctgtgcatttccct

SEQ ID NO: 8194 - DNA, 20 bp, Artificial Sequence
  chemically synthesized
gaggcctgtgcatttccctg

SEQ ID NO: 8195 - DNA, 20 bp, Artificial Sequence
  chemically synthesized
aggcctgtgcatttccctga

SEQ ID NO: 8196 - DNA, 20 bp, Artificial Sequence
  chemically synthesized
catttccctgagggtctcct

SEQ ID NO: 8197 - DNA, 20 bp, Artificial Sequence
  chemically synthesized
cctgagggtctccttggcga

SEQ ID NO: 8198 - DNA, 20 bp, Artificial Sequence
  chemically synthesized
ctgagggtctccttggcgac

SEQ ID NO: 8199 - DNA, 20 bp, Artificial Sequence
  chemically synthesized
tgagggtctccttggcgaca

SEQ ID NO: 8200 - DNA, 20 bp, Artificial Sequence
  chemically synthesized
ggtctccttggcgacagggc

SEQ ID NO: 8201 - DNA, 20 bp, Artificial Sequence
  chemically synthesized
acagggctggacctttgcac

SEQ ID NO: 8202 - DNA, 20 bp, Artificial Sequence
  chemically synthesized
gggctggacctttgcactgg

SEQ ID NO: 8203 - DNA, 20 bp, Artificial Sequence
  chemically synthesized
ggacctttgcactggcagcc

SEQ ID NO: 8204 - DNA, 20 bp, Artificial Sequence
  chemically synthesized
ggcagcctggactcttctct

SEQ ID NO: 8205 - DNA, 20 bp, Artificial Sequence
  chemically synthesized
ctcttctctgagctccccct

SEQ ID NO: 8206 - DNA, 20 bp, Artificial Sequence
  chemically synthesized
tcttctctgagctccccctt

SEQ ID NO: 8207 - DNA, 20 bp, Artificial Sequence
  chemically synthesized
ccttgggttacctatgattc

SEQ ID NO: 8208 - DNA, 20 bp, Artificial Sequence
  chemically synthesized
tgggttacctatgattccag

SEQ ID NO: 8209 - DNA, 20 bp, Artificial Sequence
  chemically synthesized
ggttacctatgattccagaa

SEQ ID NO: 8210 - DNA, 20 bp, Artificial Sequence
  chemically synthesized
agaagagtttgttctacatg

SEQ ID NO: 8211 - DNA, 20 bp, Artificial Sequence
  chemically synthesized
agtttgttctacatgtggca

SEQ ID NO: 8212 - DNA, 20 bp, Artificial Sequence
  chemically synthesized
tgttctacatgtggcaaagc

SEQ ID NO: 8213 - DNA, 20 bp, Artificial Sequence
  chemically synthesized
atgtggcaaagccagcacca

SEQ ID NO: 8214 - DNA, 20 bp, Artificial Sequence
  chemically synthesized
gtggcaaagccagcaccata

SEQ ID NO: 8215 - DNA, 20 bp, Artificial Sequence
  chemically synthesized
tggcaaagccagcaccatag

SEQ ID NO: 8216 - DNA, 20 bp, Artificial Sequence
  chemically synthesized
ggcaaagccagcaccataga

SEQ ID NO: 8217 - DNA, 20 bp, Artificial Sequence
  chemically synthesized
gcaaagccagcaccatagag

SEQ ID NO: 8218 - DNA, 20 bp, Artificial Sequence
  chemically synthesized
agccagcaccatagagggga

SEQ ID NO: 8219 - DNA, 20 bp, Artificial Sequence
  chemically synthesized
ccagcaccatagaggggaca

SEQ ID NO: 8220 - DNA, 20 bp, Artificial Sequence
  chemically synthesized
cagcaccatagaggggacag

SEQ ID NO: 8221 - DNA, 20 bp, Artificial Sequence
  chemically synthesized
agcaccatagaggggacaga

SEQ ID NO: 8222 - DNA, 20 bp, Artificial Sequence
  chemically synthesized
gaggggacagagggaaacct

SEQ ID NO: 8223 - DNA, 20 bp, Artificial Sequence
  chemically synthesized
aggggacagagggaaaccta

SEQ ID NO: 8224 - DNA, 20 bp, Artificial Sequence
  chemically synthesized
ggaaacctaaggcctacctt

SEQ ID NO: 8225 - DNA, 20 bp, Artificial Sequence
  chemically synthesized
gaaacctaaggcctaccttg

SEQ ID NO: 8226 - DNA, 20 bp, Artificial Sequence
  chemically synthesized
aaacctaaggcctaccttga

SEQ ID NO: 8227 - DNA, 20 bp, Artificial Sequence
  chemically synthesized
cgccctacccactgctactt

SEQ ID NO: 8228 - DNA, 20 bp, Artificial Sequence
  chemically synthesized
gccctacccactgctactta

SEQ ID NO: 8229 - DNA, 20 bp, Artificial Sequence
  chemically synthesized
taaggtgtcttttgaatcct

SEQ ID NO: 8230 - DNA, 20 bp, Artificial Sequence
  chemically synthesized
aaggtgtcttttgaatcctg

SEQ ID NO: 8231 - DNA, 20 bp, Artificial Sequence
  chemically synthesized
tcttttgaatcctgaggacc

SEQ ID NO: 8232 - DNA, 20 bp, Artificial Sequence
  chemically synthesized
cttttgaatcctgaggacca

SEQ ID NO: 8233 - DNA, 20 bp, Artificial Sequence
  chemically synthesized
tttgaatcctgaggaccaag

SEQ ID NO: 8234 - DNA, 20 bp, Artificial Sequence
  chemically synthesized
ccaaggagctctcctatgac

SEQ ID NO: 8235 - DNA, 20 bp, Artificial Sequence
  chemically synthesized
caaggagctctcctatgaca

SEQ ID NO: 8236 - DNA, 20 bp, Artificial Sequence
  chemically synthesized
tatgacaaggaacctgtcac

SEQ ID NO: 8237 - DNA, 20 bp, Artificial Sequence
  chemically synthesized
tggttcttctgtgattgcta

SEQ ID NO: 8238 - DNA, 20 bp, Artificial Sequence
  chemically synthesized
cttctgtgattgctaaagcc

SEQ ID NO: 8239 - DNA, 20 bp, Artificial Sequence
  chemically synthesized
tctgtgattgctaaagccta

SEQ ID NO: 8240 - DNA, 20 bp, Artificial Sequence
  chemically synthesized
ctgtgattgctaaagcctag

SEQ ID NO: 8241 - DNA, 20 bp, Artificial Sequence
  chemically synthesized
agcctagaggacctcctcca

SEQ ID NO: 8242 - DNA, 20 bp, Artificial Sequence
  chemically synthesized
agaggacctcctccaaagaa

SEQ ID NO: 8243 - DNA, 20 bp, Artificial Sequence
  chemically synthesized
ggacctcctccaaagaaaag

SEQ ID NO: 8244 - DNA, 20 bp, Artificial Sequence
  chemically synthesized
tcctccaaagaaaagtggct

SEQ ID NO: 8245 - DNA, 20 bp, Artificial Sequence
  chemically synthesized
ccaaagaaaagtggctcaga

SEQ ID NO: 8246 - DNA, 20 bp, Artificial Sequence
  chemically synthesized
cactgactcttatttctcat

SEQ ID NO: 8247 - DNA, 20 bp, Artificial Sequence
  chemically synthesized
ctcatcagactccgaaatca

SEQ ID NO: 8248 - DNA, 20 bp, Artificial Sequence
  chemically synthesized
tcatcagactccgaaatcac

SEQ ID NO: 8249 - DNA, 20 bp, Artificial Sequence
  chemically synthesized
actccgaaatcacaggcttc

SEQ ID NO: 8250 - DNA, 20 bp, Artificial Sequence
  chemically synthesized
aatcacaggcttctggtcta

SEQ ID NO: 8251 - DNA, 20 bp, Artificial Sequence
  chemically synthesized
ggcttctggtctaaagattc

SEQ ID NO: 8252 - DNA, 20 bp, Artificial Sequence
  chemically synthesized
ctggtctaaagattcaagct

SEQ ID NO: 8253 - DNA, 20 bp, Artificial Sequence
  chemically synthesized
aaagattcaagctgagaaac

SEQ ID NO: 8254 - DNA, 20 bp, Artificial Sequence
  chemically synthesized
attcaagctgagaaacaaga

SEQ ID NO: 8255 - DNA, 20 bp, Artificial Sequence
  chemically synthesized
agaaagcaatttgtttgatt

SEQ ID NO: 8256 - DNA, 20 bp, Artificial Sequence
  chemically synthesized
gaaagcaatttgtttgattc

SEQ ID NO: 8257 - DNA, 20 bp, Artificial Sequence
  chemically synthesized
ttaccccccaataatttact

SEQ ID NO: 8258 - DNA, 20 bp, Artificial Sequence
  chemically synthesized
cccaataatttacttggtct

SEQ ID NO: 8259 - DNA, 20 bp, Artificial Sequence
  chemically synthesized
aatttacttggtctcagctt

SEQ ID NO: 8260 - DNA, 20 bp, Artificial Sequence
  chemically synthesized
tacttggtctcagctttggc

SEQ ID NO: 8261 - DNA, 20 bp, Artificial Sequence
  chemically synthesized
ggtctcagctttggctggct

SEQ ID NO: 8262 - DNA, 20 bp, Artificial Sequence
  chemically synthesized
ttggctggcttggatgttat

SEQ ID NO: 8263 - DNA, 20 bp, Artificial Sequence
  chemically synthesized
tggctggcttggatgttatg

SEQ ID NO: 8264 - DNA, 20 bp, Artificial Sequence
  chemically synthesized
ttggatgttatgaggattcc

SEQ ID NO: 8265 - DNA, 20 bp, Artificial Sequence
  chemically synthesized
gaatttttttacttttccat

SEQ ID NO: 8266 - DNA, 20 bp, Artificial Sequence
  chemically synthesized
atttttttacttttccatta

SEQ ID NO: 8267 - DNA, 20 bp, Artificial Sequence
  chemically synthesized
tttttttacttttccattag

SEQ ID NO: 8268 - DNA, 20 bp, Artificial Sequence
  chemically synthesized
ttttttacttttccattaga

SEQ ID NO: 8269 - DNA, 20 bp, Artificial Sequence
  chemically synthesized
gggctctgcactctcctttc

SEQ ID NO: 8270 - DNA, 20 bp, Artificial Sequence
  chemically synthesized
ggctctgcactctcctttca

SEQ ID NO: 8271 - DNA, 20 bp, Artificial Sequence
  chemically synthesized
gcactctcctttcaaggaaa

SEQ ID NO: 8272 - DNA, 20 bp, Artificial Sequence
  chemically synthesized
cactctcctttcaaggaaaa

SEQ ID NO: 8273 - DNA, 20 bp, Artificial Sequence
  chemically synthesized
aggaaaaaggctctatgtgc

SEQ ID NO: 8274 - DNA, 20 bp, Artificial Sequence
  chemically synthesized
tgtgccagcccacttctttc

SEQ ID NO: 8275 - DNA, 20 bp, Artificial Sequence
  chemically synthesized
agcccacttctttccagaaa

SEQ ID NO: 8276 - DNA, 20 bp, Artificial Sequence
  chemically synthesized
gcccacttctttccagaaat

SEQ ID NO: 8277 - DNA, 20 bp, Artificial Sequence
  chemically synthesized
cccacttctttccagaaatg

SEQ ID NO: 8278 - DNA, 20 bp, Artificial Sequence
  chemically synthesized
cttctttccagaaatgggga

SEQ ID NO: 8279 - DNA, 20 bp, Artificial Sequence
  chemically synthesized
ttctttccagaaatggggaa

SEQ ID NO: 8280 - DNA, 20 bp, Artificial Sequence
  chemically synthesized
tctttccagaaatggggaaa

SEQ ID NO: 8281 - DNA, 20 bp, Artificial Sequence
  chemically synthesized
tttccagaaatggggaaagg

SEQ ID NO: 8282 - DNA, 20 bp, Artificial Sequence
  chemically synthesized
ttccagaaatggggaaaggg

SEQ ID NO: 8283 - DNA, 20 bp, Artificial Sequence
  chemically synthesized
ccagaaatggggaaagggag

SEQ ID NO: 8284 - DNA, 20 bp, Artificial Sequence
  chemically synthesized
cagaaatggggaaagggagg

SEQ ID NO: 8285 - DNA, 20 bp, Artificial Sequence
  chemically synthesized
gaaatggggaaagggaggag

SEQ ID NO: 8286 - DNA, 20 bp, Artificial Sequence
  chemically synthesized
aaagggaggaggagaacctg

SEQ ID NO: 8287 - DNA, 20 bp, Artificial Sequence
  chemically synthesized
gaggaggagaacctgtggaa

SEQ ID NO: 8288 - DNA, 20 bp, Artificial Sequence
  chemically synthesized
ggaggagaacctgtggaaaa

SEQ ID NO: 8289 - DNA, 20 bp, Artificial Sequence
  chemically synthesized
gaggagaacctgtggaaaag

SEQ ID NO: 8290 - DNA, 20 bp, Artificial Sequence
  chemically synthesized
acctgtggaaaagaggacaa

SEQ ID NO: 8291 - DNA, 20 bp, Artificial Sequence
  chemically synthesized
aaaagaggacaacggatttc

SEQ ID NO: 8292 - DNA, 20 bp, Artificial Sequence
  chemically synthesized
agaggacaacggatttccgg

SEQ ID NO: 8293 - DNA, 20 bp, Artificial Sequence
  chemically synthesized
ggatttccggaagaaattcc

SEQ ID NO: 8294 - DNA, 20 bp, Artificial Sequence
  chemically synthesized
ttccggaagaaattccaagc

SEQ ID NO: 8295 - DNA, 20 bp, Artificial Sequence
  chemically synthesized
tccggaagaaattccaagcc

SEQ ID NO: 8296 - DNA, 20 bp, Artificial Sequence
  chemically synthesized
ccggaagaaattccaagcca

SEQ ID NO: 8297 - DNA, 20 bp, Artificial Sequence
  chemically synthesized
cggaagaaattccaagccag

SEQ ID NO: 8298 - DNA, 20 bp, Artificial Sequence
  chemically synthesized
tccaagccaggggctaaccg

SEQ ID NO: 8299 - DNA, 20 bp, Artificial Sequence
  chemically synthesized
caggggctaaccgtggacct

SEQ ID NO: 8300 - DNA, 20 bp, Artificial Sequence
  chemically synthesized
gctaaccgtggacctgagca

SEQ ID NO: 8301 - DNA, 20 bp, Artificial Sequence
  chemically synthesized
aaccgtggacctgagcacag

SEQ ID NO: 8302 - DNA, 20 bp, Artificial Sequence
  chemically synthesized
ccgtggacctgagcacagca

SEQ ID NO: 8303 - DNA, 20 bp, Artificial Sequence
  chemically synthesized
ctgagcacagcagagccaca

SEQ ID NO: 8304 - DNA, 20 bp, Artificial Sequence
  chemically synthesized
gcagagccacacggacgtct

SEQ ID NO: 8305 - DNA, 20 bp, Artificial Sequence
  chemically synthesized
cacacggacgtctcagaaaa

SEQ ID NO: 8306 - DNA, 20 bp, Artificial Sequence
  chemically synthesized
cgtctcagaaaacggttctg

SEQ ID NO: 8307 - DNA, 20 bp, Artificial Sequence
  chemically synthesized
ctcagaaaacggttctgtgg

SEQ ID NO: 8308 - DNA, 20 bp, Artificial Sequence
  chemically synthesized
aaacggttctgtggaagcac

SEQ ID NO: 8309 - DNA, 20 bp, Artificial Sequence
  chemically synthesized
ctgtggaagcacaagacacg

SEQ ID NO: 8310 - DNA, 20 bp, Artificial Sequence
  chemically synthesized
tggaagcacaagacacgtgg

SEQ ID NO: 8311 - DNA, 20 bp, Artificial Sequence
  chemically synthesized
agcacaagacacgtggcagt

SEQ ID NO: 8312 - DNA, 20 bp, Artificial Sequence
  chemically synthesized
cacaagacacgtggcagtga

SEQ ID NO: 8313 - DNA, 20 bp, Artificial Sequence
  chemically synthesized
cacgtggcagtgagagtcct

SEQ ID NO: 8314 - DNA, 20 bp, Artificial Sequence
  chemically synthesized
gtggcagtgagagtcctgag

SEQ ID NO: 8315 - DNA, 20 bp, Artificial Sequence
  chemically synthesized
agtgagagtcctgagaagtc

SEQ ID NO: 8316 - DNA, 20 bp, Artificial Sequence
  chemically synthesized
gtgagagtcctgagaagtcc

SEQ ID NO: 8317 - DNA, 20 bp, Artificial Sequence
  chemically synthesized
agtcctgagaagtccaggaa

SEQ ID NO: 8318 - DNA, 20 bp, Artificial Sequence
  chemically synthesized
gagaagtccaggaaaagatg

SEQ ID NO: 8319 - DNA, 20 bp, Artificial Sequence
  chemically synthesized
tcctaaatatcaccaattaa

SEQ ID NO: 8320 - DNA, 20 bp, Artificial Sequence
  chemically synthesized
taaatatcaccaattaacag

SEQ ID NO: 8321 - DNA, 20 bp, Artificial Sequence
  chemically synthesized
accaattaacagcagctcga

SEQ ID NO: 8322 - DNA, 20 bp, Artificial Sequence
  chemically synthesized
agcagctcgatggtctacct

SEQ ID NO: 8323 - DNA, 20 bp, Artificial Sequence
  chemically synthesized
cgatggtctacctgagacct

SEQ ID NO: 8324 - DNA, 20 bp, Artificial Sequence
  chemically synthesized
gagacctgagaaaacaaacg

SEQ ID NO: 8325 - DNA, 20 bp, Artificial Sequence
  chemically synthesized
agacctgagaaaacaaacga

SEQ ID NO: 8326 - DNA, 20 bp, Artificial Sequence
  chemically synthesized
gacctgagaaaacaaacgaa

SEQ ID NO: 8327 - DNA, 20 bp, Artificial Sequence
  chemically synthesized
tgagaaaacaaacgaaggga

SEQ ID NO: 8328 - DNA, 20 bp, Artificial Sequence
  chemically synthesized
aaacgaagggaaagaaatgc

SEQ ID NO: 8329 - DNA, 20 bp, Artificial Sequence
  chemically synthesized
ggaaagaaatgcaagaaaca

SEQ ID NO: 8330 - DNA, 20 bp, Artificial Sequence
  chemically synthesized
agaaacaaagcgcatctttc

SEQ ID NO: 8331 - DNA, 20 bp, Artificial Sequence
  chemically synthesized
agcgcatctttctggatcaa

SEQ ID NO: 8332 - DNA, 20 bp, Artificial Sequence
  chemically synthesized
tctttctggatcaaaagatc

SEQ ID NO: 8333 - DNA, 20 bp, Artificial Sequence
  chemically synthesized
tcaaaagatcaagttgtctt

SEQ ID NO: 8334 - DNA, 20 bp, Artificial Sequence
  chemically synthesized
aaagatcaagttgtctttgg

SEQ ID NO: 8335 - DNA, 20 bp, Artificial Sequence
  chemically synthesized
caagttgtctttggtagcta

SEQ ID NO: 8336 - DNA, 20 bp, Artificial Sequence
  chemically synthesized
ctttggtagctaaagaacaa

SEQ ID NO: 8337 - DNA, 20 bp, Artificial Sequence
  chemically synthesized
ttggtagctaaagaacaaca

SEQ ID NO: 8338 - DNA, 20 bp, Artificial Sequence
  chemically synthesized
gtagctaaagaacaacagag

SEQ ID NO: 8339 - DNA, 20 bp, Artificial Sequence
  chemically synthesized
tagctaaagaacaacagaga

SEQ ID NO: 8340 - DNA, 20 bp, Artificial Sequence
  chemically synthesized
aagaacaacagagaaggaaa

SEQ ID NO: 8341 - DNA, 20 bp, Artificial Sequence
  chemically synthesized
agagaaggaaaaagaacaaa

SEQ ID NO: 8342 - DNA, 20 bp, Artificial Sequence
  chemically synthesized
aggaaaaagaacaaaaagat

SEQ ID NO: 8343 - DNA, 20 bp, Artificial Sequence
  chemically synthesized
ggaaaaagaacaaaaagatt

SEQ ID NO: 8344 - DNA, 20 bp, Artificial Sequence
  chemically synthesized
aaaaagaacaaaaagattag

SEQ ID NO: 8345 - DNA, 20 bp, Artificial Sequence
  chemically synthesized
aaaagaacaaaaagattagg

SEQ ID NO: 8346 - DNA, 20 bp, Artificial Sequence
  chemically synthesized
aagaacaaaaagattaggag

SEQ ID NO: 8347 - DNA, 20 bp, Artificial Sequence
  chemically synthesized
agaacaaaaagattaggagg

SEQ ID NO: 8348 - DNA, 20 bp, Artificial Sequence
  chemically synthesized
aacaaaaagattaggaggag

SEQ ID NO: 8349 - DNA, 20 bp, Artificial Sequence
  chemically synthesized
aggaggaggagaaaaacacc

SEQ ID NO: 8350 - DNA, 20 bp, Artificial Sequence
  chemically synthesized
aaaacacctggccctcccca

SEQ ID NO: 8351 - DNA, 20 bp, Artificial Sequence
  chemically synthesized
gaactcgacttaaatcatct

SEQ ID NO: 8352 - DNA, 20 bp, Artificial Sequence
  chemically synthesized
gacttaaatcatctcagcta

SEQ ID NO: 8353 - DNA, 20 bp, Artificial Sequence
  chemically synthesized
acttaaatcatctcagctat

SEQ ID NO: 8354 - DNA, 20 bp, Artificial Sequence
  chemically synthesized
taaatcatctcagctatagg

SEQ ID NO: 8355 - DNA, 20 bp, Artificial Sequence
  chemically synthesized
ctcagctataggcagtcaac

SEQ ID NO: 8356 - DNA, 20 bp, Artificial Sequence
  chemically synthesized
tcagctataggcagtcaact

SEQ ID NO: 8357 - DNA, 20 bp, Artificial Sequence
  chemically synthesized
cagctataggcagtcaactg

SEQ ID NO: 8358 - DNA, 20 bp, Artificial Sequence
  chemically synthesized
gtcaactggggctctccgaa

SEQ ID NO: 8359 - DNA, 20 bp, Artificial Sequence
  chemically synthesized
gctctccgaacagccacaat

SEQ ID NO: 8360 - DNA, 20 bp, Artificial Sequence
  chemically synthesized
ctctccgaacagccacaatc

SEQ ID NO: 8361 - DNA, 20 bp, Artificial Sequence
  chemically synthesized
tctccgaacagccacaatcg

SEQ ID NO: 8362 - DNA, 20 bp, Artificial Sequence
  chemically synthesized
ctccgaacagccacaatcgg

SEQ ID NO: 8363 - DNA, 20 bp, Artificial Sequence
  chemically synthesized
tccgaacagccacaatcggg

SEQ ID NO: 8364 - DNA, 20 bp, Artificial Sequence
  chemically synthesized
cccctcacgatcttcctgaa

SEQ ID NO: 8365 - DNA, 20 bp, Artificial Sequence
  chemically synthesized
ccctcacgatcttcctgaac

SEQ ID NO: 8366 - DNA, 20 bp, Artificial Sequence
  chemically synthesized
cctcacgatcttcctgaaca

SEQ ID NO: 8367 - DNA, 20 bp, Artificial Sequence
  chemically synthesized
cacgatcttcctgaacaggg

SEQ ID NO: 8368 - DNA, 20 bp, Artificial Sequence
  chemically synthesized
gatcttcctgaacagggcag

SEQ ID NO: 8369 - DNA, 20 bp, Artificial Sequence
  chemically synthesized
tcctgaacagggcagtagtc

SEQ ID NO: 8370 - DNA, 20 bp, Artificial Sequence
  chemically synthesized
cagtagtctagcatccactg

SEQ ID NO: 8371 - DNA, 20 bp, Artificial Sequence
  chemically synthesized
tagcatccactgaagtcctg

SEQ ID NO: 8372 - DNA, 20 bp, Artificial Sequence
  chemically synthesized
catccactgaagtcctgaag

SEQ ID NO: 8373 - DNA, 20 bp, Artificial Sequence
  chemically synthesized
actgaagtcctgaagtggtg

SEQ ID NO: 8374 - DNA, 20 bp, Artificial Sequence
  chemically synthesized
ctgaagtcctgaagtggtga

SEQ ID NO: 8375 - DNA, 20 bp, Artificial Sequence
  chemically synthesized
gaagtcctgaagtggtgaag

SEQ ID NO: 8376 - DNA, 20 bp, Artificial Sequence
  chemically synthesized
ctgaagtggtgaaggagccc

SEQ ID NO: 8377 - DNA, 20 bp, Artificial Sequence
  chemically synthesized
cccagacacacccatcctct

SEQ ID NO: 8378 - DNA, 20 bp, Artificial Sequence
  chemically synthesized
ccatcctctgagcacctcca

SEQ ID NO: 8379 - DNA, 20 bp, Artificial Sequence
  chemically synthesized
gagcacctccacagcctttc

SEQ ID NO: 8380 - DNA, 20 bp, Artificial Sequence
  chemically synthesized
ttctggcccatcccaataaa

SEQ ID NO: 8381 - DNA, 20 bp, Artificial Sequence
  chemically synthesized
aaacagcaattctattctcc

SEQ ID NO: 8382 - DNA, 20 bp, Artificial Sequence
  chemically synthesized
attctattctcccagtcacc

SEQ ID NO: 8383 - DNA, 20 bp, Artificial Sequence
  chemically synthesized
agtcaccgagccacacattt

SEQ ID NO: 8384 - DNA, 20 bp, Artificial Sequence
  chemically synthesized
gtcaccgagccacacatttt

SEQ ID NO: 8385 - DNA, 20 bp, Artificial Sequence
  chemically synthesized
tcaccgagccacacattttg

SEQ ID NO: 8386 - DNA, 20 bp, Artificial Sequence
  chemically synthesized
tttcatacaacccatcccac

SEQ ID NO: 8387 - DNA, 20 bp, Artificial Sequence
  chemically synthesized
atacaacccatcccaccagt

SEQ ID NO: 8388 - DNA, 20 bp, Artificial Sequence
  chemically synthesized
caccagtcagcaaatcctgc

SEQ ID NO: 8389 - DNA, 20 bp, Artificial Sequence
  chemically synthesized
tcctgccggttttcccttcg

SEQ ID NO: 8390 - DNA, 20 bp, Artificial Sequence
  chemically synthesized
ttttcccttcgaagtatgtc

SEQ ID NO: 8391 - DNA, 20 bp, Artificial Sequence
  chemically synthesized
ttcgaagtatgtccagaatc

SEQ ID NO: 8392 - DNA, 20 bp, Artificial Sequence
  chemically synthesized
ttctcacgtccccaccaccc

SEQ ID NO: 8393 - DNA, 20 bp, Artificial Sequence
  chemically synthesized
tgcctcactttcccatgctt

SEQ ID NO: 8394 - DNA, 20 bp, Artificial Sequence
  chemically synthesized
catgcttgagtctcaaaatg

SEQ ID NO: 8395 - DNA, 20 bp, Artificial Sequence
  chemically synthesized
tgagtctcaaaatgcggccc

SEQ ID NO: 8396 - DNA, 20 bp, Artificial Sequence
  chemically synthesized
agtctcaaaatgcggcccaa

SEQ ID NO: 8397 - DNA, 20 bp, Artificial Sequence
  chemically synthesized
atgcggcccaagagactctc

SEQ ID NO: 8398 - DNA, 20 bp, Artificial Sequence
  chemically synthesized
cggcccaagagactctctgg

SEQ ID NO: 8399 - DNA, 20 bp, Artificial Sequence
  chemically synthesized
aagagactctctggaagcgc

SEQ ID NO: 8400 - DNA, 20 bp, Artificial Sequence
  chemically synthesized
gtcatatgacatcactcctc

SEQ ID NO: 8401 - DNA, 20 bp, Artificial Sequence
  chemically synthesized
atatgacatcactcctccag

SEQ ID NO: 8402 - DNA, 20 bp, Artificial Sequence
  chemically synthesized
ccagtggcttccatctccct

SEQ ID NO: 8403 - DNA, 20 bp, Artificial Sequence
  chemically synthesized
agtggcttccatctcccttg

SEQ ID NO: 8404 - DNA, 20 bp, Artificial Sequence
  chemically synthesized
gcttccatctcccttggagt

SEQ ID NO: 8405 - DNA, 20 bp, Artificial Sequence
  chemically synthesized
ttccatctcccttggagtca

SEQ ID NO: 8406 - DNA, 20 bp, Artificial Sequence
  chemically synthesized
atccctgctctacgtccttc

SEQ ID NO: 8407 - DNA, 20 bp, Artificial Sequence
  chemically synthesized
tccctgctctacgtccttca

SEQ ID NO: 8408 - DNA, 20 bp, Artificial Sequence
  chemically synthesized
cctgctctacgtccttcaag

SEQ ID NO: 8409 - DNA, 20 bp, Artificial Sequence
  chemically synthesized
ctctacgtccttcaaggagc

SEQ ID NO: 8410 - DNA, 20 bp, Artificial Sequence
  chemically synthesized
acgtccttcaaggagccagc

SEQ ID NO: 8411 - DNA, 20 bp, Artificial Sequence
  chemically synthesized
cactctttccactctgacct

SEQ ID NO: 8412 - DNA, 20 bp, Artificial Sequence
  chemically synthesized
actctttccactctgacctc

SEQ ID NO: 8413 - DNA, 20 bp, Artificial Sequence
  chemically synthesized
ctctttccactctgacctca

SEQ ID NO: 8414 - DNA, 20 bp, Artificial Sequence
  chemically synthesized
agggccccttgctcctcctc

SEQ ID NO: 8415 - DNA, 20 bp, Artificial Sequence
  chemically synthesized
gccccttgctcctcctccag

SEQ ID NO: 8416 - DNA, 20 bp, Artificial Sequence
  chemically synthesized
cttgctcctcctccagtagc

SEQ ID NO: 8417 - DNA, 20 bp, Artificial Sequence
  chemically synthesized
ttgctcctcctccagtagcc

SEQ ID NO: 8418 - DNA, 20 bp, Artificial Sequence
  chemically synthesized
tagccaggcgtattacacac

SEQ ID NO: 8419 - DNA, 20 bp, Artificial Sequence
  chemically synthesized
agccaggcgtattacacaca

SEQ ID NO: 8420 - DNA, 20 bp, Artificial Sequence
  chemically synthesized
tgctctctacacactcttcc

SEQ ID NO: 8421 - DNA, 20 bp, Artificial Sequence
  chemically synthesized
ccatcttctcaaaattctca

SEQ ID NO: 8422 - DNA, 20 bp, Artificial Sequence
  chemically synthesized
ggccaacttcctcacctctt

SEQ ID NO: 8423 - DNA, 20 bp, Artificial Sequence
  chemically synthesized
ccaacttcctcacctctttg

SEQ ID NO: 8424 - DNA, 20 bp, Artificial Sequence
  chemically synthesized
ttggagcctttgcttctcat

SEQ ID NO: 8425 - DNA, 20 bp, Artificial Sequence
  chemically synthesized
tggagcctttgcttctcatt

SEQ ID NO: 8426 - DNA, 20 bp, Artificial Sequence
  chemically synthesized
tccctaattatcctatttaa

SEQ ID NO: 8427 - DNA, 20 bp, Artificial Sequence
  chemically synthesized
aattatcctatttaaaagcc

SEQ ID NO: 8428 - DNA, 20 bp, Artificial Sequence
  chemically synthesized
ttccccaccttattttcgtg

SEQ ID NO: 8429 - DNA, 20 bp, Artificial Sequence
  chemically synthesized
tccccaccttattttcgtgc

SEQ ID NO: 8430 - DNA, 20 bp, Artificial Sequence
  chemically synthesized
ccaccttattttcgtgcagg

SEQ ID NO: 8431 - DNA, 20 bp, Artificial Sequence
  chemically synthesized
tatataattcacatatttat

SEQ ID NO: 8432 - DNA, 20 bp, Artificial Sequence
  chemically synthesized
gtgcatcttctgtctctccc

SEQ ID NO: 8433 - DNA, 20 bp, Artificial Sequence
  chemically synthesized
atcttctgtctctccccagc

SEQ ID NO: 8434 - DNA, 20 bp, Artificial Sequence
  chemically synthesized
tctgtctctccccagctaga

SEQ ID NO: 8435 - DNA, 20 bp, Artificial Sequence
  chemically synthesized
ctgtctctccccagctagaa

SEQ ID NO: 8436 - DNA, 20 bp, Artificial Sequence
  chemically synthesized
tgtctctccccagctagaaa

SEQ ID NO: 8437 - DNA, 20 bp, Artificial Sequence
  chemically synthesized
gtctctccccagctagaaag

SEQ ID NO: 8438 - DNA, 20 bp, Artificial Sequence
  chemically synthesized
tctctccccagctagaaagg

SEQ ID NO: 8439 - DNA, 20 bp, Artificial Sequence
  chemically synthesized
agctagaaagggggtgccac

SEQ ID NO: 8440 - DNA, 20 bp, Artificial Sequence
  chemically synthesized
ctagaaagggggtgccacaa

SEQ ID NO: 8441 - DNA, 20 bp, Artificial Sequence
  chemically synthesized
gaaagggggtgccacaagag

SEQ ID NO: 8442 - DNA, 20 bp, Artificial Sequence
  chemically synthesized
aaagggggtgccacaagagc

SEQ ID NO: 8443 - DNA, 20 bp, Artificial Sequence
  chemically synthesized
aagggggtgccacaagagca

SEQ ID NO: 8444 - DNA, 20 bp, Artificial Sequence
  chemically synthesized
gggggtgccacaagagcagg

SEQ ID NO: 8445 - DNA, 20 bp, Artificial Sequence
  chemically synthesized
cacaagagcagggagttttt

SEQ ID NO: 8446 - DNA, 20 bp, Artificial Sequence
  chemically synthesized
acaagagcagggagttttta

SEQ ID NO: 8447 - DNA, 20 bp, Artificial Sequence
  chemically synthesized
ggctttctatgcccaacacc

SEQ ID NO: 8448 - DNA, 20 bp, Artificial Sequence
  chemically synthesized
ccaacaccaagaaccgttcc

SEQ ID NO: 8449 - DNA, 20 bp, Artificial Sequence
  chemically synthesized
caagaaccgttcccagcatg

SEQ ID NO: 8450 - DNA, 20 bp, Artificial Sequence
  chemically synthesized
gaaccgttcccagcatgtgg

SEQ ID NO: 8451 - DNA, 20 bp, Artificial Sequence
  chemically synthesized
aaccgttcccagcatgtggc

SEQ ID NO: 8452 - DNA, 20 bp, Artificial Sequence
  chemically synthesized
atatttgttgaaaaatgaat

SEQ ID NO: 8453 - DNA, 20 bp, Artificial Sequence
  chemically synthesized
ccttcacaattccaaactgc

SEQ ID NO: 8454 - DNA, 20 bp, Artificial Sequence
  chemically synthesized
cttcacaattccaaactgcc

SEQ ID NO: 8455 - DNA, 20 bp, Artificial Sequence
  chemically synthesized
tcacaattccaaactgccag

SEQ ID NO: 8456 - DNA, 20 bp, Artificial Sequence
  chemically synthesized
cacaattccaaactgccagg

SEQ ID NO: 8457 - DNA, 20 bp, Artificial Sequence
  chemically synthesized
tgccatatctataaaactgt

SEQ ID NO: 8458 - DNA, 20 bp, Artificial Sequence
  chemically synthesized
gccatatctataaaactgtc

SEQ ID NO: 8459 - DNA, 20 bp, Artificial Sequence
  chemically synthesized
atatctataaaactgtcagg

SEQ ID NO: 8460 - DNA, 20 bp, Artificial Sequence
  chemically synthesized
aactgtcaggcagcccaacc

SEQ ID NO: 8461 - DNA, 20 bp, Artificial Sequence
  chemically synthesized
actgtcaggcagcccaacct

SEQ ID NO: 8462 - DNA, 20 bp, Artificial Sequence
  chemically synthesized
ctgtcaggcagcccaacctg

SEQ ID NO: 8463 - DNA, 20 bp, Artificial Sequence
  chemically synthesized
tgtcaggcagcccaacctgg

SEQ ID NO: 8464 - DNA, 20 bp, Artificial Sequence
  chemically synthesized
agcccaacctgggggcactt

SEQ ID NO: 8465 - DNA, 20 bp, Artificial Sequence
  chemically synthesized
acctgggggcactttagctt

SEQ ID NO: 8466 - DNA, 20 bp, Artificial Sequence
  chemically synthesized
ggcactttagctttggatct

SEQ ID NO: 8467 - DNA, 20 bp, Artificial Sequence
  chemically synthesized
gcactttagctttggatctt

SEQ ID NO: 8468 - DNA, 20 bp, Artificial Sequence
  chemically synthesized
tagctttggatcttgggttt

SEQ ID NO: 8469 - DNA, 20 bp, Artificial Sequence
  chemically synthesized
tttggatcttgggtttgagc

SEQ ID NO: 8470 - DNA, 20 bp, Artificial Sequence
  chemically synthesized
gccagattccattttcccca

SEQ ID NO: 8471 - DNA, 20 bp, Artificial Sequence
  chemically synthesized
ccagattccattttccccac

SEQ ID NO: 8472 - DNA, 20 bp, Artificial Sequence
  chemically synthesized
ccattttccccacaggccct

SEQ ID NO: 8473 - DNA, 20 bp, Artificial Sequence
  chemically synthesized
cccacaggccctgagaccca

SEQ ID NO: 8474 - DNA, 20 bp, Artificial Sequence
  chemically synthesized
ccacaggccctgagacccac

SEQ ID NO: 8475 - DNA, 20 bp, Artificial Sequence
  chemically synthesized
cacaggccctgagacccaca

SEQ ID NO: 8476 - DNA, 20 bp, Artificial Sequence
  chemically synthesized
aggccctgagacccacaggg

SEQ ID NO: 8477 - DNA, 20 bp, Artificial Sequence
  chemically synthesized
gccctgagacccacagggaa

SEQ ID NO: 8478 - DNA, 20 bp, Artificial Sequence
  chemically synthesized
cttttgcattataatgtaaa

SEQ ID NO: 8479 - DNA, 20 bp, Artificial Sequence
  chemically synthesized
tttgcattataatgtaaatg

SEQ ID NO: 8480 - DNA, 20 bp, Artificial Sequence
  chemically synthesized
ttgcattataatgtaaatgg

SEQ ID NO: 8481 - DNA, 20 bp, Artificial Sequence
  chemically synthesized
tgcattataatgtaaatgga

SEQ ID NO: 8482 - DNA, 20 bp, Artificial Sequence
  chemically synthesized
gcattataatgtaaatggag

SEQ ID NO: 8483 - DNA, 20 bp, Artificial Sequence
  chemically synthesized
ataatgtaaatggaggggtt

SEQ ID NO: 8484 - DNA, 20 bp, Artificial Sequence
  chemically synthesized
tgtaaatggaggggttgagc

SEQ ID NO: 8485 - DNA, 20 bp, Artificial Sequence
  chemically synthesized
atggaggggttgagctggtt

SEQ ID NO: 8486 - DNA, 20 bp, Artificial Sequence
  chemically synthesized
tggaggggttgagctggttt

SEQ ID NO: 8487 - DNA, 20 bp, Artificial Sequence
  chemically synthesized
ggaggggttgagctggtttg

SEQ ID NO: 8488 - DNA, 20 bp, Artificial Sequence
  chemically synthesized
gaggggttgagctggtttgg

SEQ ID NO: 8489 - DNA, 20 bp, Artificial Sequence
  chemically synthesized
tggtttgggggaacccttga

SEQ ID NO: 8490 - DNA, 20 bp, Artificial Sequence
  chemically synthesized
ggtttgggggaacccttgac

SEQ ID NO: 8491 - DNA, 20 bp, Artificial Sequence
  chemically synthesized
tttgggggaacccttgacag

SEQ ID NO: 8492 - DNA, 20 bp, Artificial Sequence
  chemically synthesized
ggggaacccttgacaggagc

SEQ ID NO: 8493 - DNA, 20 bp, Artificial Sequence
  chemically synthesized
agccagttaaaaccaaacga

SEQ ID NO: 8494 - DNA, 20 bp, Artificial Sequence
  chemically synthesized
accaaacgaaagtctttcct

SEQ ID NO: 8495 - DNA, 20 bp, Artificial Sequence
  chemically synthesized
ccaaacgaaagtctttccta

SEQ ID NO: 8496 - DNA, 20 bp, Artificial Sequence
  chemically synthesized
cgaaagtctttcctaaggct

SEQ ID NO: 8497 - DNA, 20 bp, Artificial Sequence
  chemically synthesized
gaaagtctttcctaaggctt

SEQ ID NO: 8498 - DNA, 20 bp, Artificial Sequence
  chemically synthesized
agtctttcctaaggcttagg

SEQ ID NO: 8499 - DNA, 20 bp, Artificial Sequence
  chemically synthesized
tctttcctaaggcttaggtg

SEQ ID NO: 8500 - DNA, 20 bp, Artificial Sequence
  chemically synthesized
taaggcttaggtggagcctc

SEQ ID NO: 8501 - DNA, 20 bp, Artificial Sequence
  chemically synthesized
gcttaggtggagcctctaga

SEQ ID NO: 8502 - DNA, 20 bp, Artificial Sequence
  chemically synthesized
ttaggtggagcctctagaaa

SEQ ID NO: 8503 - DNA, 20 bp, Artificial Sequence
  chemically synthesized
taggtggagcctctagaaag

SEQ ID NO: 8504 - DNA, 20 bp, Artificial Sequence
  chemically synthesized
aggtggagcctctagaaaga

SEQ ID NO: 8505 - DNA, 20 bp, Artificial Sequence
  chemically synthesized
ggtggagcctctagaaagag

SEQ ID NO: 8506 - DNA, 20 bp, Artificial Sequence
  chemically synthesized
agcctctagaaagaggggct

SEQ ID NO: 8507 - DNA, 20 bp, Artificial Sequence
  chemically synthesized
cctctagaaagaggggctga

SEQ ID NO: 8508 - DNA, 20 bp, Artificial Sequence
  chemically synthesized
agaaagaggggctgagagcc

SEQ ID NO: 8509 - DNA, 20 bp, Artificial Sequence
  chemically synthesized
gaaagaggggctgagagcct

SEQ ID NO: 8510 - DNA, 20 bp, Artificial Sequence
  chemically synthesized
aaagaggggctgagagcctg

SEQ ID NO: 8511 - DNA, 20 bp, Artificial Sequence
  chemically synthesized
gaggggctgagagcctgggg

SEQ ID NO: 8512 - DNA, 20 bp, Artificial Sequence
  chemically synthesized
ggggctgagagcctggggaa

SEQ ID NO: 8513 - DNA, 20 bp, Artificial Sequence
  chemically synthesized
cctggggaagagccaaccac

SEQ ID NO: 8514 - DNA, 20 bp, Artificial Sequence
  chemically synthesized
ggggaagagccaaccaccag

SEQ ID NO: 8515 - DNA, 20 bp, Artificial Sequence
  chemically synthesized
gccaaccaccagcagttcct

SEQ ID NO: 8516 - DNA, 20 bp, Artificial Sequence
  chemically synthesized
caaccaccagcagttcctca

SEQ ID NO: 8517 - DNA, 20 bp, Artificial Sequence
  chemically synthesized
ttcctcagagttcttcccac

SEQ ID NO: 8518 - DNA, 20 bp, Artificial Sequence
  chemically synthesized
tcctcagagttcttcccact

SEQ ID NO: 8519 - DNA, 20 bp, Artificial Sequence
  chemically synthesized
cctcagagttcttcccactg

SEQ ID NO: 8520 - DNA, 20 bp, Artificial Sequence
  chemically synthesized
ttcttcccactggggctgtg

SEQ ID NO: 8521 - DNA, 20 bp, Artificial Sequence
  chemically synthesized
tgtgcagccaactgcgtttc

SEQ ID NO: 8522 - DNA, 20 bp, Artificial Sequence
  chemically synthesized
gtgcagccaactgcgtttcc

SEQ ID NO: 8523 - DNA, 20 bp, Artificial Sequence
  chemically synthesized
actgcgtttccaggcacact

SEQ ID NO: 8524 - DNA, 20 bp, Artificial Sequence
  chemically synthesized
tactcatatccaatactgtg

SEQ ID NO: 8525 - DNA, 20 bp, Artificial Sequence
  chemically synthesized
actcatatccaatactgtgc

SEQ ID NO: 8526 - DNA, 20 bp, Artificial Sequence
  chemically synthesized
ctcatatccaatactgtgca

SEQ ID NO: 8527 - DNA, 20 bp, Artificial Sequence
  chemically synthesized
tcatatccaatactgtgcag

SEQ ID NO: 8528 - DNA, 20 bp, Artificial Sequence
  chemically synthesized
ccaatactgtgcaggggcac

SEQ ID NO: 8529 - DNA, 20 bp, Artificial Sequence
  chemically synthesized
tactgtgcaggggcactggc

SEQ ID NO: 8530 - DNA, 20 bp, Artificial Sequence
  chemically synthesized
actgtgcaggggcactggcc

SEQ ID NO: 8531 - DNA, 20 bp, Artificial Sequence
  chemically synthesized
cactggccaggcacaaatcc

SEQ ID NO: 8532 - DNA, 20 bp, Artificial Sequence
  chemically synthesized
acaaatcccagctgcctcca

SEQ ID NO: 8533 - DNA, 20 bp, Artificial Sequence
  chemically synthesized
tctccctccattcttgcttt

SEQ ID NO: 8534 - DNA, 20 bp, Artificial Sequence
  chemically synthesized
tttcagattctccctcctcc

SEQ ID NO: 8535 - DNA, 20 bp, Artificial Sequence
  chemically synthesized
cagattctccctcctcctgg

SEQ ID NO: 8536 - DNA, 20 bp, Artificial Sequence
  chemically synthesized
agattctccctcctcctggc

SEQ ID NO: 8537 - DNA, 20 bp, Artificial Sequence
  chemically synthesized
gattctccctcctcctggca

SEQ ID NO: 8538 - DNA, 20 bp, Artificial Sequence
  chemically synthesized
attctccctcctcctggcag

SEQ ID NO: 8539 - DNA, 20 bp, Artificial Sequence
  chemically synthesized
cctcctcctggcaggggcac

SEQ ID NO: 8540 - DNA, 20 bp, Artificial Sequence
  chemically synthesized
ctcctcctggcaggggcact

SEQ ID NO: 8541 - DNA, 20 bp, Artificial Sequence
  chemically synthesized
tcctcctggcaggggcactg

SEQ ID NO: 8542 - DNA, 20 bp, Artificial Sequence
  chemically synthesized
ctcctggcaggggcactggg

SEQ ID NO: 8543 - DNA, 20 bp, Artificial Sequence
  chemically synthesized
tcctggcaggggcactgggg

SEQ ID NO: 8544 - DNA, 20 bp, Artificial Sequence
  chemically synthesized
cctggcaggggcactgggga

SEQ ID NO: 8545 - DNA, 20 bp, Artificial Sequence
  chemically synthesized
ggcaggggcactggggaggg

SEQ ID NO: 8546 - DNA, 20 bp, Artificial Sequence
  chemically synthesized
gcaggggcactggggagggc

SEQ ID NO: 8547 - DNA, 20 bp, Artificial Sequence
  chemically synthesized
aggggcactggggagggcag

SEQ ID NO: 8548 - DNA, 20 bp, Artificial Sequence
  chemically synthesized
gggcactggggagggcagga

SEQ ID NO: 8549 - DNA, 20 bp, Artificial Sequence
  chemically synthesized
cactggggagggcaggagag

SEQ ID NO: 8550 - DNA, 20 bp, Artificial Sequence
  chemically synthesized
actggggagggcaggagaga

SEQ ID NO: 8551 - DNA, 20 bp, Artificial Sequence
  chemically synthesized
tggggagggcaggagagaag

SEQ ID NO: 8552 - DNA, 20 bp, Artificial Sequence
  chemically synthesized
ggggagggcaggagagaagg

SEQ ID NO: 8553 - DNA, 20 bp, Artificial Sequence
  chemically synthesized
ggcaggagagaaggaggcca

SEQ ID NO: 8554 - DNA, 20 bp, Artificial Sequence
  chemically synthesized
gagagaaggaggccatggca

SEQ ID NO: 8555 - DNA, 20 bp, Artificial Sequence
  chemically synthesized
agagaaggaggccatggcaa

SEQ ID NO: 8556 - DNA, 20 bp, Artificial Sequence
  chemically synthesized
gagaaggaggccatggcaaa

SEQ ID NO: 8557 - DNA, 20 bp, Artificial Sequence
  chemically synthesized
gggacaaatcccttctacct

SEQ ID NO: 8558 - DNA, 20 bp, Artificial Sequence
  chemically synthesized
gacaaatcccttctacctga

SEQ ID NO: 8559 - DNA, 20 bp, Artificial Sequence
  chemically synthesized
atcccttctacctgagagcc

SEQ ID NO: 8560 - DNA, 20 bp, Artificial Sequence
  chemically synthesized
tcccttctacctgagagccc

SEQ ID NO: 8561 - DNA, 20 bp, Artificial Sequence
  chemically synthesized
ctacctgagagcccgggatg

SEQ ID NO: 8562 - DNA, 20 bp, Artificial Sequence
  chemically synthesized
ctgagagcccgggatgcagc

SEQ ID NO: 8563 - DNA, 20 bp, Artificial Sequence
  chemically synthesized
agcccgggatgcagccagaa

SEQ ID NO: 8564 - DNA, 20 bp, Artificial Sequence
  chemically synthesized
taaaataccctttcccaccc

SEQ ID NO: 8565 - DNA, 20 bp, Artificial Sequence
  chemically synthesized
caccctagcatacaatttga

SEQ ID NO: 8566 - DNA, 20 bp, Artificial Sequence
  chemically synthesized
accctagcatacaatttgac

SEQ ID NO: 8567 - DNA, 20 bp, Artificial Sequence
  chemically synthesized
atacaatttgacaggtgaat

SEQ ID NO: 8568 - DNA, 20 bp, Artificial Sequence
  chemically synthesized
acaggtgaataagtgctccc

SEQ ID NO: 8569 - DNA, 20 bp, Artificial Sequence
  chemically synthesized
ggtgaataagtgctccccag

SEQ ID NO: 8570 - DNA, 20 bp, Artificial Sequence
  chemically synthesized
gtgaataagtgctccccagt

SEQ ID NO: 8571 - DNA, 20 bp, Artificial Sequence
  chemically synthesized
gctccccagtaggcaataac

SEQ ID NO: 8572 - DNA, 20 bp, Artificial Sequence
  chemically synthesized
ctccccagtaggcaataaca

SEQ ID NO: 8573 - DNA, 20 bp, Artificial Sequence
  chemically synthesized
ccccagtaggcaataacaag

SEQ ID NO: 8574 - DNA, 20 bp, Artificial Sequence
  chemically synthesized
cagtaggcaataacaaggag

SEQ ID NO: 8575 - DNA, 20 bp, Artificial Sequence
  chemically synthesized
caaggagaagtctgaattaa

SEQ ID NO: 8576 - DNA, 20 bp, Artificial Sequence
  chemically synthesized
attaaaagaactcgccaatt

SEQ ID NO: 8577 - DNA, 20 bp, Artificial Sequence
  chemically synthesized
ttaaaagaactcgccaattt

SEQ ID NO: 8578 - DNA, 20 bp, Artificial Sequence
  chemically synthesized
aaagaactcgccaatttggg

SEQ ID NO: 8579 - DNA, 20 bp, Artificial Sequence
  chemically synthesized
cgttaccaataaaacactta

SEQ ID NO: 8580 - DNA, 20 bp, Artificial Sequence
  chemically synthesized
acttaaagatgctattcatg

SEQ ID NO: 8581 - DNA, 20 bp, Artificial Sequence
  chemically synthesized
atgctattcatgcagacata

SEQ ID NO: 8582 - DNA, 20 bp, Artificial Sequence
  chemically synthesized
atgcagacataaagtgctaa

SEQ ID NO: 8583 - DNA, 20 bp, Artificial Sequence
  chemically synthesized
tatttccctctgatttctga

SEQ ID NO: 8584 - DNA, 20 bp, Artificial Sequence
  chemically synthesized
tttttttccttcttcttttt

SEQ ID NO: 8585 - DNA, 20 bp, Artificial Sequence
  chemically synthesized
ttttttccttcttctttttt

SEQ ID NO: 8586 - DNA, 20 bp, Artificial Sequence
  chemically synthesized
tttttccttcttcttttttg

SEQ ID NO: 8587 - DNA, 20 bp, Artificial Sequence
  chemically synthesized
ttcttttttggggctatttt

SEQ ID NO: 8588 - DNA, 20 bp, Artificial Sequence
  chemically synthesized
ttggggctattttaagttaa

SEQ ID NO: 8589 - DNA, 20 bp, Artificial Sequence
  chemically synthesized
ggggctattttaagttaaca

SEQ ID NO: 8590 - DNA, 20 bp, Artificial Sequence
  chemically synthesized
gctaatctgattcaaaactg

SEQ ID NO: 8591 - DNA, 20 bp, Artificial Sequence
  chemically synthesized
gattcaaaactgaagactca

SEQ ID NO: 8592 - DNA, 20 bp, Artificial Sequence
  chemically synthesized
ttcaaaactgaagactcaaa

SEQ ID NO: 8593 - DNA, 20 bp, Artificial Sequence
  chemically synthesized
tcatgaaaacaatcatcact

SEQ ID NO: 8594 - DNA, 20 bp, Artificial Sequence
  chemically synthesized
actcagtcaacgtattttcc

SEQ ID NO: 8595 - DNA, 20 bp, Artificial Sequence
  chemically synthesized
tcaacgtattttccaagcca

SEQ ID NO: 8596 - DNA, 20 bp, Artificial Sequence
  chemically synthesized
ttttccaagccacagaaaat

SEQ ID NO: 8597 - DNA, 20 bp, Artificial Sequence
  chemically synthesized
cacagaaaataagttgaaat

SEQ ID NO: 8598 - DNA, 20 bp, Artificial Sequence
  chemically synthesized
gttgaaataagttgaaaatg

SEQ ID NO: 8599 - DNA, 20 bp, Artificial Sequence
  chemically synthesized
gaaataagttgaaaatgcag

SEQ ID NO: 8600 - DNA, 20 bp, Artificial Sequence
  chemically synthesized
aaataagttgaaaatgcagt

SEQ ID NO: 8601 - DNA, 20 bp, Artificial Sequence
  chemically synthesized
agttgaaaatgcagtaggca

SEQ ID NO: 8602 - DNA, 20 bp, Artificial Sequence
  chemically synthesized
tgaaaatgcagtaggcaaag

SEQ ID NO: 8603 - DNA, 20 bp, Artificial Sequence
  chemically synthesized
aaatgcagtaggcaaagaag

SEQ ID NO: 8604 - DNA, 20 bp, Artificial Sequence
  chemically synthesized
gcagtaggcaaagaagcagc

SEQ ID NO: 8605 - DNA, 20 bp, Artificial Sequence
  chemically synthesized
aaagaagcagctagtcatgt

SEQ ID NO: 8606 - DNA, 20 bp, Artificial Sequence
  chemically synthesized
agctagtcatgtaagacact

SEQ ID NO: 8607 - DNA, 20 bp, Artificial Sequence
  chemically synthesized
gctagtcatgtaagacacta

SEQ ID NO: 8608 - DNA, 20 bp, Artificial Sequence
  chemically synthesized
ctagtcatgtaagacactaa

SEQ ID NO: 8609 - DNA, 20 bp, Artificial Sequence
  chemically synthesized
tagtcatgtaagacactaag

SEQ ID NO: 8610 - DNA, 20 bp, Artificial Sequence
  chemically synthesized
tcatgtaagacactaagggg

SEQ ID NO: 8611 - DNA, 20 bp, Artificial Sequence
  chemically synthesized
catgtaagacactaaggggc

SEQ ID NO: 8612 - DNA, 20 bp, Artificial Sequence
  chemically synthesized
atgtaagacactaaggggca

SEQ ID NO: 8613 - DNA, 20 bp, Artificial Sequence
  chemically synthesized
tgtaagacactaaggggcag

SEQ ID NO: 8614 - DNA, 20 bp, Artificial Sequence
  chemically synthesized
taagacactaaggggcaggg

SEQ ID NO: 8615 - DNA, 20 bp, Artificial Sequence
  chemically synthesized
ggagtcattaattcttctcc

SEQ ID NO: 8616 - DNA, 20 bp, Artificial Sequence
  chemically synthesized
ttcaacactctgtttctatg

SEQ ID NO: 8617 - DNA, 20 bp, Artificial Sequence
  chemically synthesized
tcaacactctgtttctatga

SEQ ID NO: 8618 - DNA, 20 bp, Artificial Sequence
  chemically synthesized
cactctgtttctatgaaggc

SEQ ID NO: 8619 - DNA, 20 bp, Artificial Sequence
  chemically synthesized
actctgtttctatgaaggca

SEQ ID NO: 8620 - DNA, 20 bp, Artificial Sequence
  chemically synthesized
ctctgtttctatgaaggcaa

SEQ ID NO: 8621 - DNA, 20 bp, Artificial Sequence
  chemically synthesized
gtttctatgaaggcaagggt

SEQ ID NO: 8622 - DNA, 20 bp, Artificial Sequence
  chemically synthesized
ttctatgaaggcaagggttg

SEQ ID NO: 8623 - DNA, 20 bp, Artificial Sequence
  chemically synthesized
tctatgaaggcaagggttgg

SEQ ID NO: 8624 - DNA, 20 bp, Artificial Sequence
  chemically synthesized
ctatgaaggcaagggttgga

SEQ ID NO: 8625 - DNA, 20 bp, Artificial Sequence
  chemically synthesized
atgaaggcaagggttggagg

SEQ ID NO: 8626 - DNA, 20 bp, Artificial Sequence
  chemically synthesized
cttttttctttcaaataaat

SEQ ID NO: 8627 - DNA, 20 bp, Artificial Sequence
  chemically synthesized
aaataaatcagtaaaatgat

SEQ ID NO: 8628 - DNA, 20 bp, Artificial Sequence
  chemically synthesized
aataaatcagtaaaatgatg

SEQ ID NO: 8629 - DNA, 20 bp, Artificial Sequence
  chemically synthesized
ggtgcttcctctgctacgcc

SEQ ID NO: 8630 - DNA, 20 bp, Artificial Sequence
  chemically synthesized
gcttcctctgctacgcccag

SEQ ID NO: 8631 - DNA, 20 bp, Artificial Sequence
  chemically synthesized
ctctgctacgcccagtggcc

SEQ ID NO: 8632 - DNA, 20 bp, Artificial Sequence
  chemically synthesized
tctgctacgcccagtggccc

SEQ ID NO: 8633 - DNA, 20 bp, Artificial Sequence
  chemically synthesized
gtggcccaggcactctcact

SEQ ID NO: 8634 - DNA, 20 bp, Artificial Sequence
  chemically synthesized
tggcccaggcactctcacta

SEQ ID NO: 8635 - DNA, 20 bp, Artificial Sequence
  chemically synthesized
ctctcactaaggtatcctcc

SEQ ID NO: 8636 - DNA, 20 bp, Artificial Sequence
  chemically synthesized
aaggtatcctcccagcaatg

SEQ ID NO: 8637 - DNA, 20 bp, Artificial Sequence
  chemically synthesized
aggtatcctcccagcaatgt

SEQ ID NO: 8638 - DNA, 20 bp, Artificial Sequence
  chemically synthesized
cccagcaatgtaggtgttca

SEQ ID NO: 8639 - DNA, 20 bp, Artificial Sequence
  chemically synthesized
ccagcaatgtaggtgttcaa

SEQ ID NO: 8640 - DNA, 20 bp, Artificial Sequence
  chemically synthesized
atgtaggtgttcaaaggcaa

SEQ ID NO: 8641 - DNA, 20 bp, Artificial Sequence
  chemically synthesized
aggtgttcaaaggcaaaaga

SEQ ID NO: 8642 - DNA, 20 bp, Artificial Sequence
  chemically synthesized
ggtgttcaaaggcaaaagaa

SEQ ID NO: 8643 - DNA, 20 bp, Artificial Sequence
  chemically synthesized
gtgttcaaaggcaaaagaaa

SEQ ID NO: 8644 - DNA, 20 bp, Artificial Sequence
  chemically synthesized
aaaggcaaaagaaagggaac

SEQ ID NO: 8645 - DNA, 20 bp, Artificial Sequence
  chemically synthesized
aaagaaagggaaccagctca

SEQ ID NO: 8646 - DNA, 20 bp, Artificial Sequence
  chemically synthesized
ctcatggcgtaatacttgct

SEQ ID NO: 8647 - DNA, 20 bp, Artificial Sequence
  chemically synthesized
gcgtaatacttgctcggcca

SEQ ID NO: 8648 - DNA, 20 bp, Artificial Sequence
  chemically synthesized
tacttgctcggccaaagaca

SEQ ID NO: 8649 - DNA, 20 bp, Artificial Sequence
  chemically synthesized
aaagacatagtaacgcttcc

SEQ ID NO: 8650 - DNA, 20 bp, Artificial Sequence
  chemically synthesized
aagacatagtaacgcttccc

SEQ ID NO: 8651 - DNA, 20 bp, Artificial Sequence
  chemically synthesized
taacgcttcccaggaaatac

SEQ ID NO: 8652 - DNA, 20 bp, Artificial Sequence
  chemically synthesized
cccaggaaatacaagtgtca

SEQ ID NO: 8653 - DNA, 20 bp, Artificial Sequence
  chemically synthesized
ctccaaaatgaatatgtgtg

SEQ ID NO: 8654 - DNA, 20 bp, Artificial Sequence
  chemically synthesized
tgaatatgtgtgcagccacc

SEQ ID NO: 8655 - DNA, 20 bp, Artificial Sequence
  chemically synthesized
gaatatgtgtgcagccacct

SEQ ID NO: 8656 - DNA, 20 bp, Artificial Sequence
  chemically synthesized
gcaacttaattcaaacaact

SEQ ID NO: 8657 - DNA, 20 bp, Artificial Sequence
  chemically synthesized
acttaattcaaacaacttgg

SEQ ID NO: 8658 - DNA, 20 bp, Artificial Sequence
  chemically synthesized
cttaattcaaacaacttgga

SEQ ID NO: 8659 - DNA, 20 bp, Artificial Sequence
  chemically synthesized
ttcaaacaacttggaaggct

SEQ ID NO: 8660 - DNA, 20 bp, Artificial Sequence
  chemically synthesized
tcaaacaacttggaaggcta

SEQ ID NO: 8661 - DNA, 20 bp, Artificial Sequence
  chemically synthesized
aaacaacttggaaggctaag

SEQ ID NO: 8662 - DNA, 20 bp, Artificial Sequence
  chemically synthesized
cttggaaggctaaggagcac

SEQ ID NO: 8663 - DNA, 20 bp, Artificial Sequence
  chemically synthesized
tggaaggctaaggagcactg

SEQ ID NO: 8664 - DNA, 20 bp, Artificial Sequence
  chemically synthesized
aggctaaggagcactggagc

SEQ ID NO: 8665 - DNA, 20 bp, Artificial Sequence
  chemically synthesized
ggctaaggagcactggagct

SEQ ID NO: 8666 - DNA, 20 bp, Artificial Sequence
  chemically synthesized
gctaaggagcactggagctg

SEQ ID NO: 8667 - DNA, 20 bp, Artificial Sequence
  chemically synthesized
taaggagcactggagctggg

SEQ ID NO: 8668 - DNA, 20 bp, Artificial Sequence
  chemically synthesized
gcactggagctggggagctg

SEQ ID NO: 8669 - DNA, 20 bp, Artificial Sequence
  chemically synthesized
acccctgtgctcaccacccc

SEQ ID NO: 8670 - DNA, 20 bp, Artificial Sequence
  chemically synthesized
ccctgtgctcaccacccctg

SEQ ID NO: 8671 - DNA, 20 bp, Artificial Sequence
  chemically synthesized
ctgtgctcaccacccctgga

SEQ ID NO: 8672 - DNA, 20 bp, Artificial Sequence
  chemically synthesized
tgctcaccacccctggagag

SEQ ID NO: 8673 - DNA, 20 bp, Artificial Sequence
  chemically synthesized
caccacccctggagagcagt

SEQ ID NO: 8674 - DNA, 20 bp, Artificial Sequence
  chemically synthesized
ccacccctggagagcagtca

SEQ ID NO: 8675 - DNA, 20 bp, Artificial Sequence
  chemically synthesized
acccctggagagcagtcaga

SEQ ID NO: 8676 - DNA, 20 bp, Artificial Sequence
  chemically synthesized
cccctggagagcagtcagag

SEQ ID NO: 8677 - DNA, 20 bp, Artificial Sequence
  chemically synthesized
ctggagagcagtcagagagg

SEQ ID NO: 8678 - DNA, 20 bp, Artificial Sequence
  chemically synthesized
gagaggaagcctgctttcct

SEQ ID NO: 8679 - DNA, 20 bp, Artificial Sequence
  chemically synthesized
tgctttcctcagatgtttta

SEQ ID NO: 8680 - DNA, 20 bp, Artificial Sequence
  chemically synthesized
gctttcctcagatgttttaa

SEQ ID NO: 8681 - DNA, 20 bp, Artificial Sequence
  chemically synthesized
ttcctcagatgttttaaagg

SEQ ID NO: 8682 - DNA, 20 bp, Artificial Sequence
  chemically synthesized
atgttttaaaggaagccacc

SEQ ID NO: 8683 - DNA, 20 bp, Artificial Sequence
  chemically synthesized
gttttaaaggaagccaccta

SEQ ID NO: 8684 - DNA, 20 bp, Artificial Sequence
  chemically synthesized
tagagccccacctgtcactg

SEQ ID NO: 8685 - DNA, 20 bp, Artificial Sequence
  chemically synthesized
tgtcactgtggaactgctca

SEQ ID NO: 8686 - DNA, 20 bp, Artificial Sequence
  chemically synthesized
cactgtggaactgctcatgg

SEQ ID NO: 8687 - DNA, 20 bp, Artificial Sequence
  chemically synthesized
ggctgcccgatgcgctgatg

SEQ ID NO: 8688 - DNA, 20 bp, Artificial Sequence
  chemically synthesized
cgatgcgctgatgtggaact

SEQ ID NO: 8689 - DNA, 20 bp, Artificial Sequence
  chemically synthesized
ggaactcagaatcattcatt

SEQ ID NO: 8690 - DNA, 20 bp, Artificial Sequence
  chemically synthesized
gaactcagaatcattcattt

SEQ ID NO: 8691 - DNA, 20 bp, Artificial Sequence
  chemically synthesized
gaatcattcatttgggcttg

SEQ ID NO: 8692 - DNA, 20 bp, Artificial Sequence
  chemically synthesized
attcatttgggcttgtggct

SEQ ID NO: 8693 - DNA, 20 bp, Artificial Sequence
  chemically synthesized
ggcttgtggctgagctgtgc

SEQ ID NO: 8694 - DNA, 20 bp, Artificial Sequence
  chemically synthesized
gcttgtggctgagctgtgct

SEQ ID NO: 8695 - DNA, 20 bp, Artificial Sequence
  chemically synthesized
gctgagctgtgctaggtaac

SEQ ID NO: 8696 - DNA, 20 bp, Artificial Sequence
  chemically synthesized
ctgagctgtgctaggtaact

SEQ ID NO: 8697 - DNA, 20 bp, Artificial Sequence
  chemically synthesized
agctgtgctaggtaactggg

SEQ ID NO: 8698 - DNA, 20 bp, Artificial Sequence
  chemically synthesized
tgctaggtaactgggtggcc

SEQ ID NO: 8699 - DNA, 20 bp, Artificial Sequence
  chemically synthesized
gctaggtaactgggtggcct

SEQ ID NO: 8700 - DNA, 20 bp, Artificial Sequence
  chemically synthesized
ggtaactgggtggcctgggc

SEQ ID NO: 8701 - DNA, 20 bp, Artificial Sequence
  chemically synthesized
gcaagtcacttcacctccct

SEQ ID NO: 8702 - DNA, 20 bp, Artificial Sequence
  chemically synthesized
ctcccttggcctgtgtcctt

SEQ ID NO: 8703 - DNA, 20 bp, Artificial Sequence
  chemically synthesized
cctgtgtccttgagctttcc

SEQ ID NO: 8704 - DNA, 20 bp, Artificial Sequence
  chemically synthesized
ctggctgcacatcttgctct

SEQ ID NO: 8705 - DNA, 20 bp, Artificial Sequence
  chemically synthesized
tggctgcacatcttgctctc

SEQ ID NO: 8706 - DNA, 20 bp, Artificial Sequence
  chemically synthesized
acatcttgctctcaggtata

SEQ ID NO: 8707 - DNA, 20 bp, Artificial Sequence
  chemically synthesized
catcttgctctcaggtataa

SEQ ID NO: 8708 - DNA, 20 bp, Artificial Sequence
  chemically synthesized
cacacactcgcctctcaaat

SEQ ID NO: 8709 - DNA, 20 bp, Artificial Sequence
  chemically synthesized
cactcgcctctcaaatgaga

SEQ ID NO: 8710 - DNA, 20 bp, Artificial Sequence
  chemically synthesized
actcgcctctcaaatgagaa

SEQ ID NO: 8711 - DNA, 20 bp, Artificial Sequence
  chemically synthesized
cgcctctcaaatgagaaagg

SEQ ID NO: 8712 - DNA, 20 bp, Artificial Sequence
  chemically synthesized
caaatgagaaaggcagcttt

SEQ ID NO: 8713 - DNA, 20 bp, Artificial Sequence
  chemically synthesized
aatgagaaaggcagctttga

SEQ ID NO: 8714 - DNA, 20 bp, Artificial Sequence
  chemically synthesized
tgagaaaggcagctttgaga

SEQ ID NO: 8715 - DNA, 20 bp, Artificial Sequence
  chemically synthesized
gagaaaggcagctttgagag

SEQ ID NO: 8716 - DNA, 20 bp, Artificial Sequence
  chemically synthesized
agagaggatgcttgccttcc

SEQ ID NO: 8717 - DNA, 20 bp, Artificial Sequence
  chemically synthesized
tcccggctcccctcccaacc

SEQ ID NO: 8718 - DNA, 20 bp, Artificial Sequence
  chemically synthesized
gaacctatcacaatgctctg

SEQ ID NO: 8719 - DNA, 20 bp, Artificial Sequence
  chemically synthesized
acctatcacaatgctctgca

SEQ ID NO: 8720 - DNA, 20 bp, Artificial Sequence
  chemically synthesized
ctatcacaatgctctgcaga

SEQ ID NO: 8721 - DNA, 20 bp, Artificial Sequence
  chemically synthesized
atccaatgctaaattgtaaa

SEQ ID NO: 8722 - DNA, 20 bp, Artificial Sequence
  chemically synthesized
aatgctaaattgtaaaaagt

SEQ ID NO: 8723 - DNA, 20 bp, Artificial Sequence
  chemically synthesized
taaattgtaaaaagtgagac

SEQ ID NO: 8724 - DNA, 20 bp, Artificial Sequence
  chemically synthesized
ttgtaaaaagtgagactaga

SEQ ID NO: 8725 - DNA, 20 bp, Artificial Sequence
  chemically synthesized
atggtatctgcctctcctct

SEQ ID NO: 8726 - DNA, 20 bp, Artificial Sequence
  chemically synthesized
cctctcagctctaaattatt

SEQ ID NO: 8727 - DNA, 20 bp, Artificial Sequence
  chemically synthesized
gctctaaattatttggtcta

SEQ ID NO: 8728 - DNA, 20 bp, Artificial Sequence
  chemically synthesized
atttggtctaaagaaaactg

SEQ ID NO: 8729 - DNA, 20 bp, Artificial Sequence
  chemically synthesized
ctaaagaaaactgaagcccc

SEQ ID NO: 8730 - DNA, 20 bp, Artificial Sequence
  chemically synthesized
ctccattttgcatatctaat

SEQ ID NO: 8731 - DNA, 20 bp, Artificial Sequence
  chemically synthesized
ccattttgcatatctaattg

SEQ ID NO: 8732 - DNA, 20 bp, Artificial Sequence
  chemically synthesized
tttgcatatctaattggaga

SEQ ID NO: 8733 - DNA, 20 bp, Artificial Sequence
  chemically synthesized
gtttcaataatataattatc

SEQ ID NO: 8734 - DNA, 20 bp, Artificial Sequence
  chemically synthesized
tttcaataatataattatca

SEQ ID NO: 8735 - DNA, 20 bp, Artificial Sequence
  chemically synthesized
aggcatccctacgttacttg

SEQ ID NO: 8736 - DNA, 20 bp, Artificial Sequence
  chemically synthesized
atccctacgttacttgaagt

SEQ ID NO: 8737 - DNA, 20 bp, Artificial Sequence
  chemically synthesized
cttgaagttggttcataatc

SEQ ID NO: 8738 - DNA, 20 bp, Artificial Sequence
  chemically synthesized
tcataatctggcgacgttca

SEQ ID NO: 8739 - DNA, 20 bp, Artificial Sequence
  chemically synthesized
gcgacgttcacagccttatg

SEQ ID NO: 8740 - DNA, 20 bp, Artificial Sequence
  chemically synthesized
cgttcacagccttatgaaga

SEQ ID NO: 8741 - DNA, 20 bp, Artificial Sequence
  chemically synthesized
gaagacagtttattctcttt

SEQ ID NO: 8742 - DNA, 20 bp, Artificial Sequence
  chemically synthesized
ttattctcttttagtgtctc

SEQ ID NO: 8743 - DNA, 20 bp, Artificial Sequence
  chemically synthesized
tcttttagtgtctcaagtat

SEQ ID NO: 8744 - DNA, 20 bp, Artificial Sequence
  chemically synthesized
gtatgagtcacctctgatga

SEQ ID NO: 8745 - DNA, 20 bp, Artificial Sequence
  chemically synthesized
gagtcacctctgatgacgga

SEQ ID NO: 8746 - DNA, 20 bp, Artificial Sequence
  chemically synthesized
agtcacctctgatgacggat

SEQ ID NO: 8747 - DNA, 20 bp, Artificial Sequence
  chemically synthesized
tcacctctgatgacggatag

SEQ ID NO: 8748 - DNA, 20 bp, Artificial Sequence
  chemically synthesized
ctgatgacggataggagaac

SEQ ID NO: 8749 - DNA, 20 bp, Artificial Sequence
  chemically synthesized
atgacggataggagaacaag

SEQ ID NO: 8750 - DNA, 20 bp, Artificial Sequence
  chemically synthesized
tgacggataggagaacaagc

SEQ ID NO: 8751 - DNA, 20 bp, Artificial Sequence
  chemically synthesized
tttactacaatacacaccta

SEQ ID NO: 8752 - DNA, 20 bp, Artificial Sequence
  chemically synthesized
aaccactttgcccacccaca

SEQ ID NO: 8753 - DNA, 20 bp, Artificial Sequence
  chemically synthesized
ccacccacatggcatccatt

SEQ ID NO: 8754 - DNA, 20 bp, Artificial Sequence
  chemically synthesized
acccacatggcatccatttg

SEQ ID NO: 8755 - DNA, 20 bp, Artificial Sequence
  chemically synthesized
cccacatggcatccatttgg

SEQ ID NO: 8756 - DNA, 20 bp, Artificial Sequence
  chemically synthesized
cacatggcatccatttggag

SEQ ID NO: 8757 - DNA, 20 bp, Artificial Sequence
  chemically synthesized
gcatccatttggaggagaca

SEQ ID NO: 8758 - DNA, 20 bp, Artificial Sequence
  chemically synthesized
atccatttggaggagacaca

SEQ ID NO: 8759 - DNA, 20 bp, Artificial Sequence
  chemically synthesized
atttggaggagacacagaga

SEQ ID NO: 8760 - DNA, 20 bp, Artificial Sequence
  chemically synthesized
tttggaggagacacagagaa

SEQ ID NO: 8761 - DNA, 20 bp, Artificial Sequence
  chemically synthesized
tggaggagacacagagaaag

SEQ ID NO: 8762 - DNA, 20 bp, Artificial Sequence
  chemically synthesized
gagaaaggagtttcacctct

SEQ ID NO: 8763 - DNA, 20 bp, Artificial Sequence
  chemically synthesized
gtttcacctcttagacgtct

SEQ ID NO: 8764 - DNA, 20 bp, Artificial Sequence
  chemically synthesized
ttcacctcttagacgtctca

SEQ ID NO: 8765 - DNA, 20 bp, Artificial Sequence
  chemically synthesized
ttttctcaaaaatgaacaca

SEQ ID NO: 8766 - DNA, 20 bp, Artificial Sequence
  chemically synthesized
ttctcaaaaatgaacacaca

SEQ ID NO: 8767 - DNA, 20 bp, Artificial Sequence
  chemically synthesized
aaaatgaacacacagagcaa

SEQ ID NO: 8768 - DNA, 20 bp, Artificial Sequence
  chemically synthesized
cacacagagcaacagctgac

SEQ ID NO: 8769 - DNA, 20 bp, Artificial Sequence
  chemically synthesized
gagcaacagctgacgagtca

SEQ ID NO: 8770 - DNA, 20 bp, Artificial Sequence
  chemically synthesized
caacagctgacgagtcacag

SEQ ID NO: 8771 - DNA, 20 bp, Artificial Sequence
  chemically synthesized
gtggaccacaccaccacctc

SEQ ID NO: 8772 - DNA, 20 bp, Artificial Sequence
  chemically synthesized
accacctctggttaccccct

SEQ ID NO: 8773 - DNA, 20 bp, Artificial Sequence
  chemically synthesized
cctctggttaccccctgaga

SEQ ID NO: 8774 - DNA, 20 bp, Artificial Sequence
  chemically synthesized
ctctggttaccccctgagaa

SEQ ID NO: 8775 - DNA, 20 bp, Artificial Sequence
  chemically synthesized
tggttaccccctgagaaagg

SEQ ID NO: 8776 - DNA, 20 bp, Artificial Sequence
  chemically synthesized
gttaccccctgagaaaggca

SEQ ID NO: 8777 - DNA, 20 bp, Artificial Sequence
  chemically synthesized
ccccctgagaaaggcagaga

SEQ ID NO: 8778 - DNA, 20 bp, Artificial Sequence
  chemically synthesized
cccctgagaaaggcagagaa

SEQ ID NO: 8779 - DNA, 20 bp, Artificial Sequence
  chemically synthesized
aaaggcagagaaaggacccc

SEQ ID NO: 8780 - DNA, 20 bp, Artificial Sequence
  chemically synthesized
cagagaaaggacccccagaa

SEQ ID NO: 8781 - DNA, 20 bp, Artificial Sequence
  chemically synthesized
ccccagaacagtcaccattt

SEQ ID NO: 8782 - DNA, 20 bp, Artificial Sequence
  chemically synthesized
cccagaacagtcaccatttg

SEQ ID NO: 8783 - DNA, 20 bp, Artificial Sequence
  chemically synthesized
cagaacagtcaccatttgag

SEQ ID NO: 8784 - DNA, 20 bp, Artificial Sequence
  chemically synthesized
gaacagtcaccatttgagga

SEQ ID NO: 8785 - DNA, 20 bp, Artificial Sequence
  chemically synthesized
aacagtcaccatttgaggag

SEQ ID NO: 8786 - DNA, 20 bp, Artificial Sequence
  chemically synthesized
tcaccatttgaggagaggtt

SEQ ID NO: 8787 - DNA, 20 bp, Artificial Sequence
  chemically synthesized
caccatttgaggagaggttc

SEQ ID NO: 8788 - DNA, 20 bp, Artificial Sequence
  chemically synthesized
accatttgaggagaggttca

SEQ ID NO: 8789 - DNA, 20 bp, Artificial Sequence
  chemically synthesized
aggagaggttcagggatcat

SEQ ID NO: 8790 - DNA, 20 bp, Artificial Sequence
  chemically synthesized
ggagaggttcagggatcatg

SEQ ID NO: 8791 - DNA, 20 bp, Artificial Sequence
  chemically synthesized
caccaccccactgaaatcca

SEQ ID NO: 8792 - DNA, 20 bp, Artificial Sequence
  chemically synthesized
accccactgaaatccatgga

SEQ ID NO: 8793 - DNA, 20 bp, Artificial Sequence
  chemically synthesized
actgaaatccatggatagtc

SEQ ID NO: 8794 - DNA, 20 bp, Artificial Sequence
  chemically synthesized
ccatggatagtctagcctgt

SEQ ID NO: 8795 - DNA, 20 bp, Artificial Sequence
  chemically synthesized
catggatagtctagcctgtg

SEQ ID NO: 8796 - DNA, 20 bp, Artificial Sequence
  chemically synthesized
atggatagtctagcctgtga

SEQ ID NO: 8797 - DNA, 20 bp, Artificial Sequence
  chemically synthesized
tggatagtctagcctgtgag

SEQ ID NO: 8798 - DNA, 20 bp, Artificial Sequence
  chemically synthesized
tagtctagcctgtgaggggt

SEQ ID NO: 8799 - DNA, 20 bp, Artificial Sequence
  chemically synthesized
agtctagcctgtgaggggtt

SEQ ID NO: 8800 - DNA, 20 bp, Artificial Sequence
  chemically synthesized
gtctagcctgtgaggggttg

SEQ ID NO: 8801 - DNA, 20 bp, Artificial Sequence
  chemically synthesized
tctagcctgtgaggggttgg

SEQ ID NO: 8802 - DNA, 20 bp, Artificial Sequence
  chemically synthesized
agcctgtgaggggttggggg

SEQ ID NO: 8803 - DNA, 20 bp, Artificial Sequence
  chemically synthesized
actttatctttctcatcttt

SEQ ID NO: 8804 - DNA, 20 bp, Artificial Sequence
  chemically synthesized
ttatctttctcatctttgag

SEQ ID NO: 8805 - DNA, 20 bp, Artificial Sequence
  chemically synthesized
atctttgagcggctcttccc

SEQ ID NO: 8806 - DNA, 20 bp, Artificial Sequence
  chemically synthesized
ctttgagcggctcttcccca

SEQ ID NO: 8807 - DNA, 20 bp, Artificial Sequence
  chemically synthesized
gagcggctcttccccagagt

SEQ ID NO: 8808 - DNA, 20 bp, Artificial Sequence
  chemically synthesized
agcggctcttccccagagtc

SEQ ID NO: 8809 - DNA, 20 bp, Artificial Sequence
  chemically synthesized
agagtcaggatgactctcac

SEQ ID NO: 8810 - DNA, 20 bp, Artificial Sequence
  chemically synthesized
gagtcaggatgactctcact

SEQ ID NO: 8811 - DNA, 20 bp, Artificial Sequence
  chemically synthesized
ggatgactctcactaggttt

SEQ ID NO: 8812 - DNA, 20 bp, Artificial Sequence
  chemically synthesized
gatgactctcactaggtttc

SEQ ID NO: 8813 - DNA, 20 bp, Artificial Sequence
  chemically synthesized
ggtacatccccatcatgccc

SEQ ID NO: 8814 - DNA, 20 bp, Artificial Sequence
  chemically synthesized
ccccatcatgccccggactc

SEQ ID NO: 8815 - DNA, 20 bp, Artificial Sequence
  chemically synthesized
gccccggactccagtctctg

SEQ ID NO: 8816 - DNA, 20 bp, Artificial Sequence
  chemically synthesized
tccagtctctgcagctgaca

SEQ ID NO: 8817 - DNA, 20 bp, Artificial Sequence
  chemically synthesized
tctgcagctgacacggctcc

SEQ ID NO: 8818 - DNA, 20 bp, Artificial Sequence
  chemically synthesized
ggctccaagatgctaaatat

SEQ ID NO: 8819 - DNA, 20 bp, Artificial Sequence
  chemically synthesized
caagatgctaaatatgagac

SEQ ID NO: 8820 - DNA, 20 bp, Artificial Sequence
  chemically synthesized
aagatgctaaatatgagaca

SEQ ID NO: 8821 - DNA, 20 bp, Artificial Sequence
  chemically synthesized
gatgctaaatatgagacaag

SEQ ID NO: 8822 - DNA, 20 bp, Artificial Sequence
  chemically synthesized
atgctaaatatgagacaagg

SEQ ID NO: 8823 - DNA, 20 bp, Artificial Sequence
  chemically synthesized
tgctaaatatgagacaagga

SEQ ID NO: 8824 - DNA, 20 bp, Artificial Sequence
  chemically synthesized
gctaaatatgagacaaggag

SEQ ID NO: 8825 - DNA, 20 bp, Artificial Sequence
  chemically synthesized
atatgagacaaggaggggac

SEQ ID NO: 8826 - DNA, 20 bp, Artificial Sequence
  chemically synthesized
tatgagacaaggaggggaca

SEQ ID NO: 8827 - DNA, 20 bp, Artificial Sequence
  chemically synthesized
caaggaggggacaaggaatt

SEQ ID NO: 8828 - DNA, 20 bp, Artificial Sequence
  chemically synthesized
ggggacaaggaatttagtcc

SEQ ID NO: 8829 - DNA, 20 bp, Artificial Sequence
  chemically synthesized
gggacaaggaatttagtccc

SEQ ID NO: 8830 - DNA, 20 bp, Artificial Sequence
  chemically synthesized
gacaaggaatttagtcccag

SEQ ID NO: 8831 - DNA, 20 bp, Artificial Sequence
  chemically synthesized
aaggaatttagtcccaggag

SEQ ID NO: 8832 - DNA, 20 bp, Artificial Sequence
  chemically synthesized
tttagtcccaggagtggcac

SEQ ID NO: 8833 - DNA, 20 bp, Artificial Sequence
  chemically synthesized
agtcccaggagtggcactag

SEQ ID NO: 8834 - DNA, 20 bp, Artificial Sequence
  chemically synthesized
gtcccaggagtggcactaga

SEQ ID NO: 8835 - DNA, 20 bp, Artificial Sequence
  chemically synthesized
cccaggagtggcactagaag

SEQ ID NO: 8836 - DNA, 20 bp, Artificial Sequence
  chemically synthesized
agaaggagtccctgctccct

SEQ ID NO: 8837 - DNA, 20 bp, Artificial Sequence
  chemically synthesized
gaaggagtccctgctccctc

SEQ ID NO: 8838 - DNA, 20 bp, Artificial Sequence
  chemically synthesized
aggagtccctgctccctcag

SEQ ID NO: 8839 - DNA, 20 bp, Artificial Sequence
  chemically synthesized
ctccctcaggagccatctgc

SEQ ID NO: 8840 - DNA, 20 bp, Artificial Sequence
  chemically synthesized
tccctcaggagccatctgcc

SEQ ID NO: 8841 - DNA, 20 bp, Artificial Sequence
  chemically synthesized
agccatctgccgggtgcttc

SEQ ID NO: 8842 - DNA, 20 bp, Artificial Sequence
  chemically synthesized
ccatctgccgggtgcttctg

SEQ ID NO: 8843 - DNA, 20 bp, Artificial Sequence
  chemically synthesized
gctgcctccacgccccactt

SEQ ID NO: 8844 - DNA, 20 bp, Artificial Sequence
  chemically synthesized
ctgcctccacgccccacttg

SEQ ID NO: 8845 - DNA, 20 bp, Artificial Sequence
  chemically synthesized
gccccacttgaggctgtcca

SEQ ID NO: 8846 - DNA, 20 bp, Artificial Sequence
  chemically synthesized
ccacttgaggctgtccacag

SEQ ID NO: 8847 - DNA, 20 bp, Artificial Sequence
  chemically synthesized
aggctgtccacagcagaaac

SEQ ID NO: 8848 - DNA, 20 bp, Artificial Sequence
  chemically synthesized
ccacagcagaaaccagcgcc

SEQ ID NO: 8849 - DNA, 20 bp, Artificial Sequence
  chemically synthesized
accagcgcccagatcccctc

SEQ ID NO: 8850 - DNA, 20 bp, Artificial Sequence
  chemically synthesized
gcgcccagatcccctcaagc

SEQ ID NO: 8851 - DNA, 20 bp, Artificial Sequence
  chemically synthesized
ccctcaagccagccacccca

SEQ ID NO: 8852 - DNA, 20 bp, Artificial Sequence
  chemically synthesized
cctcaagccagccaccccat

SEQ ID NO: 8853 - DNA, 20 bp, Artificial Sequence
  chemically synthesized
ccaccccatgggaacccctt

SEQ ID NO: 8854 - DNA, 20 bp, Artificial Sequence
  chemically synthesized
ccccatgggaacccctttgg

SEQ ID NO: 8855 - DNA, 20 bp, Artificial Sequence
  chemically synthesized
cccatgggaacccctttggc

SEQ ID NO: 8856 - DNA, 20 bp, Artificial Sequence
  chemically synthesized
gggaacccctttggcaggtg

SEQ ID NO: 8857 - DNA, 20 bp, Artificial Sequence
  chemically synthesized
ggaacccctttggcaggtgt

SEQ ID NO: 8858 - DNA, 20 bp, Artificial Sequence
  chemically synthesized
cctttggcaggtgtgggtgt

SEQ ID NO: 8859 - DNA, 20 bp, Artificial Sequence
  chemically synthesized
ctttggcaggtgtgggtgtt

SEQ ID NO: 8860 - DNA, 20 bp, Artificial Sequence
  chemically synthesized
ggcaggtgtgggtgttgggt

SEQ ID NO: 8861 - DNA, 20 bp, Artificial Sequence
  chemically synthesized
gtgggtgttgggttagcctc

SEQ ID NO: 8862 - DNA, 20 bp, Artificial Sequence
  chemically synthesized
gtgttgggttagcctctagc

SEQ ID NO: 8863 - DNA, 20 bp, Artificial Sequence
  chemically synthesized
tcctgctgcttctctctttg

SEQ ID NO: 8864 - DNA, 20 bp, Artificial Sequence
  chemically synthesized
ctgctgcttctctctttgtg

SEQ ID NO: 8865 - DNA, 20 bp, Artificial Sequence
  chemically synthesized
gcaaatcttcatgtcctgtc

SEQ ID NO: 8866 - DNA, 20 bp, Artificial Sequence
  chemically synthesized
atgtcctgtctggatcttcc

SEQ ID NO: 8867 - DNA, 20 bp, Artificial Sequence
  chemically synthesized
ctgaatcttcccacccttcc

SEQ ID NO: 8868 - DNA, 20 bp, Artificial Sequence
  chemically synthesized
tgaatcttcccacccttcca

SEQ ID NO: 8869 - DNA, 20 bp, Artificial Sequence
  chemically synthesized
gaatcttcccacccttccaa

SEQ ID NO: 8870 - DNA, 20 bp, Artificial Sequence
  chemically synthesized
atctccccactcacacgcta

SEQ ID NO: 8871 - DNA, 20 bp, Artificial Sequence
  chemically synthesized
aagtaaatgaataaacccaa

SEQ ID NO: 8872 - DNA, 20 bp, Artificial Sequence
  chemically synthesized
aatgaataaacccaacagca

SEQ ID NO: 8873 - DNA, 20 bp, Artificial Sequence
  chemically synthesized
agcacggactcatccctgat

SEQ ID NO: 8874 - DNA, 20 bp, Artificial Sequence
  chemically synthesized
gcacggactcatccctgatc

SEQ ID NO: 8875 - DNA, 20 bp, Artificial Sequence
  chemically synthesized
tccctgatcaggactgaaaa

SEQ ID NO: 8876 - DNA, 20 bp, Artificial Sequence
  chemically synthesized
atcaggactgaaaaaagaaa

SEQ ID NO: 8877 - DNA, 20 bp, Artificial Sequence
  chemically synthesized
actgaaaaaagaaaaagaaa

SEQ ID NO: 8878 - DNA, 20 bp, Artificial Sequence
  chemically synthesized
cctcccatcacaccactctc

SEQ ID NO: 8879 - DNA, 20 bp, Artificial Sequence
  chemically synthesized
ctcccatcacaccactctct

SEQ ID NO: 8880 - DNA, 20 bp, Artificial Sequence
  chemically synthesized
cacaccactctctgggaaaa

SEQ ID NO: 8881 - DNA, 20 bp, Artificial Sequence
  chemically synthesized
ctctctgggaaaatagaact

SEQ ID NO: 8882 - DNA, 20 bp, Artificial Sequence
  chemically synthesized
gggaaaatagaactgagtcc

SEQ ID NO: 8883 - DNA, 20 bp, Artificial Sequence
  chemically synthesized
atagaactgagtcctagctc

SEQ ID NO: 8884 - DNA, 20 bp, Artificial Sequence
  chemically synthesized
ctgagtcctagctctagcac

SEQ ID NO: 8885 - DNA, 20 bp, Artificial Sequence
  chemically synthesized
tgagtcctagctctagcact

SEQ ID NO: 8886 - DNA, 20 bp, Artificial Sequence
  chemically synthesized
cctagctctagcactgggca

SEQ ID NO: 8887 - DNA, 20 bp, Artificial Sequence
  chemically synthesized
gctctagcactgggcacagc

SEQ ID NO: 8888 - DNA, 20 bp, Artificial Sequence
  chemically synthesized
ctctagcactgggcacagct

SEQ ID NO: 8889 - DNA, 20 bp, Artificial Sequence
  chemically synthesized
agcactgggcacagctgggt

SEQ ID NO: 8890 - DNA, 20 bp, Artificial Sequence
  chemically synthesized
cagctgggtcagcacctacg

SEQ ID NO: 8891 - DNA, 20 bp, Artificial Sequence
  chemically synthesized
agctgggtcagcacctacga

SEQ ID NO: 8892 - DNA, 20 bp, Artificial Sequence
  chemically synthesized
gctgggtcagcacctacgaa

SEQ ID NO: 8893 - DNA, 20 bp, Artificial Sequence
  chemically synthesized
cacctacgaagggtcctatg

SEQ ID NO: 8894 - DNA, 20 bp, Artificial Sequence
  chemically synthesized
cctatgcagtgaacaccttg

SEQ ID NO: 8895 - DNA, 20 bp, Artificial Sequence
  chemically synthesized
agtgaacaccttgcagtctg

SEQ ID NO: 8896 - DNA, 20 bp, Artificial Sequence
  chemically synthesized
gtgaacaccttgcagtctga

SEQ ID NO: 8897 - DNA, 20 bp, Artificial Sequence
  chemically synthesized
tgaacaccttgcagtctgaa

SEQ ID NO: 8898 - DNA, 20 bp, Artificial Sequence
  chemically synthesized
acaccttgcagtctgaaggg

SEQ ID NO: 8899 - DNA, 20 bp, Artificial Sequence
  chemically synthesized
gcagactctctcttctcaac

SEQ ID NO: 8900 - DNA, 20 bp, Artificial Sequence
  chemically synthesized
actctctcttctcaacaagc

SEQ ID NO: 8901 - DNA, 20 bp, Artificial Sequence
  chemically synthesized
tctctcttctcaacaagcca

SEQ ID NO: 8902 - DNA, 20 bp, Artificial Sequence
  chemically synthesized
gccagagattctctgccttc

SEQ ID NO: 8903 - DNA, 20 bp, Artificial Sequence
  chemically synthesized
gagattctctgccttccaga

SEQ ID NO: 8904 - DNA, 20 bp, Artificial Sequence
  chemically synthesized
agattctctgccttccagac

SEQ ID NO: 8905 - DNA, 20 bp, Artificial Sequence
  chemically synthesized
tccagacaggcacctccatg

SEQ ID NO: 8906 - DNA, 20 bp, Artificial Sequence
  chemically synthesized
cagacaggcacctccatgaa

SEQ ID NO: 8907 - DNA, 20 bp, Artificial Sequence
  chemically synthesized
acaggcacctccatgaagag

SEQ ID NO: 8908 - DNA, 20 bp, Artificial Sequence
  chemically synthesized
ccatgaagagaagctgttcc

SEQ ID NO: 8909 - DNA, 20 bp, Artificial Sequence
  chemically synthesized
gagaagctgttcctggcttg

SEQ ID NO: 8910 - DNA, 20 bp, Artificial Sequence
  chemically synthesized
agctgttcctggcttgtggt

SEQ ID NO: 8911 - DNA, 20 bp, Artificial Sequence
  chemically synthesized
ttgtggtgagcaaaactccc

SEQ ID NO: 8912 - DNA, 20 bp, Artificial Sequence
  chemically synthesized
tgagcaaaactccctggatt

SEQ ID NO: 8913 - DNA, 20 bp, Artificial Sequence
  chemically synthesized
aaaactccctggattgagtc

SEQ ID NO: 8914 - DNA, 20 bp, Artificial Sequence
  chemically synthesized
ccctggattgagtcgagacc

SEQ ID NO: 8915 - DNA, 20 bp, Artificial Sequence
  chemically synthesized
ttgagtcgagacctggattc

SEQ ID NO: 8916 - DNA, 20 bp, Artificial Sequence
  chemically synthesized
ttccactactttgaattctc

SEQ ID NO: 8917 - DNA, 20 bp, Artificial Sequence
  chemically synthesized
tccactactttgaattctct

SEQ ID NO: 8918 - DNA, 20 bp, Artificial Sequence
  chemically synthesized
ctttgaattctctaggttca

SEQ ID NO: 8919 - DNA, 20 bp, Artificial Sequence
  chemically synthesized
ggttcacagtcctaaatcct

SEQ ID NO: 8920 - DNA, 20 bp, Artificial Sequence
  chemically synthesized
ttcacagtcctaaatcctca

SEQ ID NO: 8921 - DNA, 20 bp, Artificial Sequence
  chemically synthesized
acagtcctaaatcctcagag

SEQ ID NO: 8922 - DNA, 20 bp, Artificial Sequence
  chemically synthesized
cagtcctaaatcctcagaga

SEQ ID NO: 8923 - DNA, 20 bp, Artificial Sequence
  chemically synthesized
cctaaatcctcagagaagga

SEQ ID NO: 8924 - DNA, 20 bp, Artificial Sequence
  chemically synthesized
cctcagagaaggacagactt

SEQ ID NO: 8925 - DNA, 20 bp, Artificial Sequence
  chemically synthesized
ctcagagaaggacagacttg

SEQ ID NO: 8926 - DNA, 20 bp, Artificial Sequence
  chemically synthesized
tcagagaaggacagacttga

SEQ ID NO: 8927 - DNA, 20 bp, Artificial Sequence
  chemically synthesized
gagaaggacagacttgaggg

SEQ ID NO: 8928 - DNA, 20 bp, Artificial Sequence
  chemically synthesized
aggacagacttgagggcaga

SEQ ID NO: 8929 - DNA, 20 bp, Artificial Sequence
  chemically synthesized
gacttgagggcagacagcca

SEQ ID NO: 8930 - DNA, 20 bp, Artificial Sequence
  chemically synthesized
acttgagggcagacagccac

SEQ ID NO: 8931 - DNA, 20 bp, Artificial Sequence
  chemically synthesized
tgagggcagacagccacagg

SEQ ID NO: 8932 - DNA, 20 bp, Artificial Sequence
  chemically synthesized
gcagacagccacaggtggcc

SEQ ID NO: 8933 - DNA, 20 bp, Artificial Sequence
  chemically synthesized
cagccacaggtggcctggca

SEQ ID NO: 8934 - DNA, 20 bp, Artificial Sequence
  chemically synthesized
agccacaggtggcctggcat

SEQ ID NO: 8935 - DNA, 20 bp, Artificial Sequence
  chemically synthesized
caggtggcctggcatgggct

SEQ ID NO: 8936 - DNA, 20 bp, Artificial Sequence
  chemically synthesized
aggtggcctggcatgggctg

SEQ ID NO: 8937 - DNA, 20 bp, Artificial Sequence
  chemically synthesized
tggcctggcatgggctgagg

SEQ ID NO: 8938 - DNA, 20 bp, Artificial Sequence
  chemically synthesized
catgggctgaggcagcacac

SEQ ID NO: 8939 - DNA, 20 bp, Artificial Sequence
  chemically synthesized
atgggctgaggcagcacaca

SEQ ID NO: 8940 - DNA, 20 bp, Artificial Sequence
  chemically synthesized
aggcagcacacaaggactct

SEQ ID NO: 8941 - DNA, 20 bp, Artificial Sequence
  chemically synthesized
acaaggactctgagccacac

SEQ ID NO: 8942 - DNA, 20 bp, Artificial Sequence
  chemically synthesized
ccacaccagccatctccttg

SEQ ID NO: 8943 - DNA, 20 bp, Artificial Sequence
  chemically synthesized
atctccttgtggactttcct

SEQ ID NO: 8944 - DNA, 20 bp, Artificial Sequence
  chemically synthesized
ctccttgtggactttcctga

SEQ ID NO: 8945 - DNA, 20 bp, Artificial Sequence
  chemically synthesized
gactttcctgagagcacgtg

SEQ ID NO: 8946 - DNA, 20 bp, Artificial Sequence
  chemically synthesized
ttcctgagagcacgtgcagc

SEQ ID NO: 8947 - DNA, 20 bp, Artificial Sequence
  chemically synthesized
ctgagagcacgtgcagctag

SEQ ID NO: 8948 - DNA, 20 bp, Artificial Sequence
  chemically synthesized
cgtgcagctagcagtgctcc

SEQ ID NO: 8949 - DNA, 20 bp, Artificial Sequence
  chemically synthesized
cagtgctccaagcactctct

SEQ ID NO: 8950 - DNA, 20 bp, Artificial Sequence
  chemically synthesized
gtgctccaagcactctctga

SEQ ID NO: 8951 - DNA, 20 bp, Artificial Sequence
  chemically synthesized
tgctccaagcactctctgag

SEQ ID NO: 8952 - DNA, 20 bp, Artificial Sequence
  chemically synthesized
agcactctctgagaggcttc

SEQ ID NO: 8953 - DNA, 20 bp, Artificial Sequence
  chemically synthesized
gcactctctgagaggcttcc

SEQ ID NO: 8954 - DNA, 20 bp, Artificial Sequence
  chemically synthesized
tctctgagaggcttccaggc

SEQ ID NO: 8955 - DNA, 20 bp, Artificial Sequence
  chemically synthesized
tctgagaggcttccaggctg

SEQ ID NO: 8956 - DNA, 20 bp, Artificial Sequence
  chemically synthesized
ggcttccaggctggagctct

SEQ ID NO: 8957 - DNA, 20 bp, Artificial Sequence
  chemically synthesized
cttccaggctggagctctga

SEQ ID NO: 8958 - DNA, 20 bp, Artificial Sequence
  chemically synthesized
ttccaggctggagctctgag

SEQ ID NO: 8959 - DNA, 20 bp, Artificial Sequence
  chemically synthesized
ctggagctctgagaggcttc

SEQ ID NO: 8960 - DNA, 20 bp, Artificial Sequence
  chemically synthesized
tggagctctgagaggcttcc

SEQ ID NO: 8961 - DNA, 20 bp, Artificial Sequence
  chemically synthesized
gctctgagaggcttccaggc

SEQ ID NO: 8962 - DNA, 20 bp, Artificial Sequence
  chemically synthesized
ctctgagaggcttccaggct

SEQ ID NO: 8963 - DNA, 20 bp, Artificial Sequence
  chemically synthesized
cttccaggctgggctacctc

SEQ ID NO: 8964 - DNA, 20 bp, Artificial Sequence
  chemically synthesized
ctgggctacctccagccatg

SEQ ID NO: 8965 - DNA, 20 bp, Artificial Sequence
  chemically synthesized
ggctacctccagccatgtgg

SEQ ID NO: 8966 - DNA, 20 bp, Artificial Sequence
  chemically synthesized
tccagccatgtggtggaaac

SEQ ID NO: 8967 - DNA, 20 bp, Artificial Sequence
  chemically synthesized
agccatgtggtggaaactgg

SEQ ID NO: 8968 - DNA, 20 bp, Artificial Sequence
  chemically synthesized
tgtggtggaaactggtagca

SEQ ID NO: 8969 - DNA, 20 bp, Artificial Sequence
  chemically synthesized
gtggtggaaactggtagcaa

SEQ ID NO: 8970 - DNA, 20 bp, Artificial Sequence
  chemically synthesized
gtggaaactggtagcaaagg

SEQ ID NO: 8971 - DNA, 20 bp, Artificial Sequence
  chemically synthesized
aactggtagcaaaggaagcc

SEQ ID NO: 8972 - DNA, 20 bp, Artificial Sequence
  chemically synthesized
tggtagcaaaggaagcccag

SEQ ID NO: 8973 - DNA, 20 bp, Artificial Sequence
  chemically synthesized
ggtagcaaaggaagcccaga

SEQ ID NO: 8974 - DNA, 20 bp, Artificial Sequence
  chemically synthesized
gtagcaaaggaagcccagaa

SEQ ID NO: 8975 - DNA, 20 bp, Artificial Sequence
  chemically synthesized
cagaagggccacaactgaac

SEQ ID NO: 8976 - DNA, 20 bp, Artificial Sequence
  chemically synthesized
aagggccacaactgaactag

SEQ ID NO: 8977 - DNA, 20 bp, Artificial Sequence
  chemically synthesized
agggccacaactgaactaga

SEQ ID NO: 8978 - DNA, 20 bp, Artificial Sequence
  chemically synthesized
cacaactgaactagaaggct

SEQ ID NO: 8979 - DNA, 20 bp, Artificial Sequence
  chemically synthesized
acaactgaactagaaggcta

SEQ ID NO: 8980 - DNA, 20 bp, Artificial Sequence
  chemically synthesized
tagaaggctaaggaacaccc

SEQ ID NO: 8981 - DNA, 20 bp, Artificial Sequence
  chemically synthesized
ctaaggaacaccccggccac

SEQ ID NO: 8982 - DNA, 20 bp, Artificial Sequence
  chemically synthesized
aggaacaccccggccactgg

SEQ ID NO: 8983 - DNA, 20 bp, Artificial Sequence
  chemically synthesized
ggaacaccccggccactggt

SEQ ID NO: 8984 - DNA, 20 bp, Artificial Sequence
  chemically synthesized
cccggccactggtgggatcg

SEQ ID NO: 8985 - DNA, 20 bp, Artificial Sequence
  chemically synthesized
actggtgggatcgcagtgct

SEQ ID NO: 8986 - DNA, 20 bp, Artificial Sequence
  chemically synthesized
ggatcgcagtgctgagccat

SEQ ID NO: 8987 - DNA, 20 bp, Artificial Sequence
  chemically synthesized
tgctgagccatgagccctac

SEQ ID NO: 8988 - DNA, 20 bp, Artificial Sequence
  chemically synthesized
gctgagccatgagccctacc

SEQ ID NO: 8989 - DNA, 20 bp, Artificial Sequence
  chemically synthesized
cctaccaggcaacccatttc

SEQ ID NO: 8990 - DNA, 20 bp, Artificial Sequence
  chemically synthesized
ctaccaggcaacccatttct

SEQ ID NO: 8991 - DNA, 20 bp, Artificial Sequence
  chemically synthesized
ccaggcaacccatttctggg

SEQ ID NO: 8992 - DNA, 20 bp, Artificial Sequence
  chemically synthesized
acccatttctgggcagtccc

SEQ ID NO: 8993 - DNA, 20 bp, Artificial Sequence
  chemically synthesized
ttctgggcagtcccaagact

SEQ ID NO: 8994 - DNA, 20 bp, Artificial Sequence
  chemically synthesized
ctgggcagtcccaagacttg

SEQ ID NO: 8995 - DNA, 20 bp, Artificial Sequence
  chemically synthesized
agtcccaagacttggagaac

SEQ ID NO: 8996 - DNA, 20 bp, Artificial Sequence
  chemically synthesized
gagaacaagccatctgaaaa

SEQ ID NO: 8997 - DNA, 20 bp, Artificial Sequence
  chemically synthesized
catctgaaaatagaattaaa

SEQ ID NO: 8998 - DNA, 20 bp, Artificial Sequence
  chemically synthesized
tgaaaatagaattaaatagc

SEQ ID NO: 8999 - DNA, 20 bp, Artificial Sequence
  chemically synthesized
gaaaatagaattaaatagcc

SEQ ID NO: 9000 - DNA, 20 bp, Artificial Sequence
  chemically synthesized
tagaattaaatagccaggtg

SEQ ID NO: 9001 - DNA, 20 bp, Artificial Sequence
  chemically synthesized
aattaaatagccaggtgcgg

SEQ ID NO: 9002 - DNA, 20 bp, Artificial Sequence
  chemically synthesized
gtggctcacacctgtaatct

SEQ ID NO: 9003 - DNA, 20 bp, Artificial Sequence
  chemically synthesized
cacctgtaatctcagcattt

SEQ ID NO: 9004 - DNA, 20 bp, Artificial Sequence
  chemically synthesized
acctgtaatctcagcatttt

SEQ ID NO: 9005 - DNA, 20 bp, Artificial Sequence
  chemically synthesized
ctgtaatctcagcattttgg

SEQ ID NO: 9006 - DNA, 20 bp, Artificial Sequence
  chemically synthesized
tgtaatctcagcattttggg

SEQ ID NO: 9007 - DNA, 20 bp, Artificial Sequence
  chemically synthesized
tctcagcattttgggaggcc

SEQ ID NO: 9008 - DNA, 20 bp, Artificial Sequence
  chemically synthesized
ctcagcattttgggaggccg

SEQ ID NO: 9009 - DNA, 20 bp, Artificial Sequence
  chemically synthesized
ttttgggaggccgaggcgtg

SEQ ID NO: 9010 - DNA, 20 bp, Artificial Sequence
  chemically synthesized
tttgggaggccgaggcgtgt

SEQ ID NO: 9011 - DNA, 20 bp, Artificial Sequence
  chemically synthesized
ccgaggcgtgtgggtcacct

SEQ ID NO: 9012 - DNA, 20 bp, Artificial Sequence
  chemically synthesized
cgaggcgtgtgggtcacctg

SEQ ID NO: 9013 - DNA, 20 bp, Artificial Sequence
  chemically synthesized
gcgtgtgggtcacctgaggt

SEQ ID NO: 9014 - DNA, 20 bp, Artificial Sequence
  chemically synthesized
cgtgtgggtcacctgaggtc

SEQ ID NO: 9015 - DNA, 20 bp, Artificial Sequence
  chemically synthesized
tgtgggtcacctgaggtcag

SEQ ID NO: 9016 - DNA, 20 bp, Artificial Sequence
  chemically synthesized
tcacctgaggtcaggagttc

SEQ ID NO: 9017 - DNA, 20 bp, Artificial Sequence
  chemically synthesized
tgaggtcaggagttcaagac

SEQ ID NO: 9018 - DNA, 20 bp, Artificial Sequence
  chemically synthesized
tcaggagttcaagaccagcc

SEQ ID NO: 9019 - DNA, 20 bp, Artificial Sequence
  chemically synthesized
caagaccagcctagccaaca

SEQ ID NO: 9020 - DNA, 20 bp, Artificial Sequence
  chemically synthesized
aaaaaaaaaaaaaaaaaaat

SEQ ID NO: 9021 - DNA, 20 bp, Artificial Sequence
  chemically synthesized
aaaaaaaaaaaaaaatcagc

SEQ ID NO: 9022 - DNA, 20 bp, Artificial Sequence
  chemically synthesized
aaaaaaaaaaaaaatcagcc

SEQ ID NO: 9023 - DNA, 20 bp, Artificial Sequence
  chemically synthesized
aaaaaatcagccaggtgtga

SEQ ID NO: 9024 - DNA, 20 bp, Artificial Sequence
  chemically synthesized
atggcatgcacctataatcc

SEQ ID NO: 9025 - DNA, 20 bp, Artificial Sequence
  chemically synthesized
cacctataatcccagctact

SEQ ID NO: 9026 - DNA, 20 bp, Artificial Sequence
  chemically synthesized
acctataatcccagctactt

SEQ ID NO: 9027 - DNA, 20 bp, Artificial Sequence
  chemically synthesized
ctataatcccagctacttgg

SEQ ID NO: 9028 - DNA, 20 bp, Artificial Sequence
  chemically synthesized
tataatcccagctacttggg

SEQ ID NO: 9029 - DNA, 20 bp, Artificial Sequence
  chemically synthesized
tcccagctacttgggaggct

SEQ ID NO: 9030 - DNA, 20 bp, Artificial Sequence
  chemically synthesized
cccagctacttgggaggctg

SEQ ID NO: 9031 - DNA, 20 bp, Artificial Sequence
  chemically synthesized
agctacttgggaggctgagg

SEQ ID NO: 9032 - DNA, 20 bp, Artificial Sequence
  chemically synthesized
gctacttgggaggctgaggc

SEQ ID NO: 9033 - DNA, 20 bp, Artificial Sequence
  chemically synthesized
tacttgggaggctgaggcag

SEQ ID NO: 9034 - DNA, 20 bp, Artificial Sequence
  chemically synthesized
gcaggagaatcacttgaacc

SEQ ID NO: 9035 - DNA, 20 bp, Artificial Sequence
  chemically synthesized
caggagaatcacttgaacct

SEQ ID NO: 9036 - DNA, 20 bp, Artificial Sequence
  chemically synthesized
ggagaatcacttgaacctgg

SEQ ID NO: 9037 - DNA, 20 bp, Artificial Sequence
  chemically synthesized
gagaatcacttgaacctggg

SEQ ID NO: 9038 - DNA, 20 bp, Artificial Sequence
  chemically synthesized
aatcacttgaacctgggagg

SEQ ID NO: 9039 - DNA, 20 bp, Artificial Sequence
  chemically synthesized
tcacttgaacctgggaggcg

SEQ ID NO: 9040 - DNA, 20 bp, Artificial Sequence
  chemically synthesized
cacttgaacctgggaggcgg

SEQ ID NO: 9041 - DNA, 20 bp, Artificial Sequence
  chemically synthesized
tgggaggcggaggctgcaat

SEQ ID NO: 9042 - DNA, 20 bp, Artificial Sequence
  chemically synthesized
ggcggaggctgcaatgagcc

SEQ ID NO: 9043 - DNA, 20 bp, Artificial Sequence
  chemically synthesized
gctgcaatgagccgagatcg

SEQ ID NO: 9044 - DNA, 20 bp, Artificial Sequence
  chemically synthesized
gagatcgtagcactgcactc

SEQ ID NO: 9045 - DNA, 20 bp, Artificial Sequence
  chemically synthesized
cgtagcactgcactccagcc

SEQ ID NO: 9046 - DNA, 20 bp, Artificial Sequence
  chemically synthesized
gtagcactgcactccagcct

SEQ ID NO: 9047 - DNA, 20 bp, Artificial Sequence
  chemically synthesized
ctgcactccagcctgggcga

SEQ ID NO: 9048 - DNA, 20 bp, Artificial Sequence
  chemically synthesized
gcactccagcctgggcgaca

SEQ ID NO: 9049 - DNA, 20 bp, Artificial Sequence
  chemically synthesized
tccagcctgggcgacagagc

SEQ ID NO: 9050 - DNA, 20 bp, Artificial Sequence
  chemically synthesized
aaaaaaaaaaaaaattaaat

SEQ ID NO: 9051 - DNA, 20 bp, Artificial Sequence
  chemically synthesized
aaaaaaaaaaaaattaaatt

SEQ ID NO: 9052 - DNA, 20 bp, Artificial Sequence
  chemically synthesized
aaaaaaaaaattaaattggg

SEQ ID NO: 9053 - DNA, 20 bp, Artificial Sequence
  chemically synthesized
aaaaaaaaattaaattgggt

SEQ ID NO: 9054 - DNA, 20 bp, Artificial Sequence
  chemically synthesized
aaaaaaaattaaattgggtg

SEQ ID NO: 9055 - DNA, 20 bp, Artificial Sequence
  chemically synthesized
aaaaaaattaaattgggtgg

SEQ ID NO: 9056 - DNA, 20 bp, Artificial Sequence
  chemically synthesized
aaaaattaaattgggtgggg

SEQ ID NO: 9057 - DNA, 20 bp, Artificial Sequence
  chemically synthesized
aattgggtgggggagtttct

SEQ ID NO: 9058 - DNA, 20 bp, Artificial Sequence
  chemically synthesized
attgggtgggggagtttctt

SEQ ID NO: 9059 - DNA, 20 bp, Artificial Sequence
  chemically synthesized
gagtttcttaggaaaaaaat

SEQ ID NO: 9060 - DNA, 20 bp, Artificial Sequence
  chemically synthesized
gtttcttaggaaaaaaatca

SEQ ID NO: 9061 - DNA, 20 bp, Artificial Sequence
  chemically synthesized
cagagttgtgcaaataaatc

SEQ ID NO: 9062 - DNA, 20 bp, Artificial Sequence
  chemically synthesized
gttgtgcaaataaatctagt

SEQ ID NO: 9063 - DNA, 20 bp, Artificial Sequence
  chemically synthesized
ctgtctttacaacacaatga

SEQ ID NO: 9064 - DNA, 20 bp, Artificial Sequence
  chemically synthesized
tgtctttacaacacaatgaa

SEQ ID NO: 9065 - DNA, 20 bp, Artificial Sequence
  chemically synthesized
gtctttacaacacaatgaaa

SEQ ID NO: 9066 - DNA, 20 bp, Artificial Sequence
  chemically synthesized
ttacaacacaatgaaagggt

SEQ ID NO: 9067 - DNA, 20 bp, Artificial Sequence
  chemically synthesized
tacaacacaatgaaagggta

SEQ ID NO: 9068 - DNA, 20 bp, Artificial Sequence
  chemically synthesized
atgaaagggtaaggcaccat

SEQ ID NO: 9069 - DNA, 20 bp, Artificial Sequence
  chemically synthesized
gaaagggtaaggcaccataa

SEQ ID NO: 9070 - DNA, 20 bp, Artificial Sequence
  chemically synthesized
aaagggtaaggcaccataag

SEQ ID NO: 9071 - DNA, 20 bp, Artificial Sequence
  chemically synthesized
aggctgtgaattccattgat

SEQ ID NO: 9072 - DNA, 20 bp, Artificial Sequence
  chemically synthesized
gctgtgaattccattgataa

SEQ ID NO: 9073 - DNA, 20 bp, Artificial Sequence
  chemically synthesized
tgtgaattccattgataaga

SEQ ID NO: 9074 - DNA, 20 bp, Artificial Sequence
  chemically synthesized
gtgaattccattgataagag

SEQ ID NO: 9075 - DNA, 20 bp, Artificial Sequence
  chemically synthesized
atttccctactcaaatatca

SEQ ID NO: 9076 - DNA, 20 bp, Artificial Sequence
  chemically synthesized
tttccctactcaaatatcaa

SEQ ID NO: 9077 - DNA, 20 bp, Artificial Sequence
  chemically synthesized
tgcatacacatacactaaaa

SEQ ID NO: 9078 - DNA, 20 bp, Artificial Sequence
  chemically synthesized
acatacactaaaacagaaaa

SEQ ID NO: 9079 - DNA, 20 bp, Artificial Sequence
  chemically synthesized
agaaaaaagaaaaaaaaaaa

SEQ ID NO: 9080 - DNA, 20 bp, Artificial Sequence
  chemically synthesized
aaagaaaaaaaaaaaaagaa

SEQ ID NO: 9081 - DNA, 20 bp, Artificial Sequence
  chemically synthesized
agaaaaaaaaaaaaagaaaa

SEQ ID NO: 9082 - DNA, 20 bp, Artificial Sequence
  chemically synthesized
aaaaaaaaaaaaagaaaaga

SEQ ID NO: 9083 - DNA, 20 bp, Artificial Sequence
  chemically synthesized
aaaaaaaaagaaaagagaga

SEQ ID NO: 9084 - DNA, 20 bp, Artificial Sequence
  chemically synthesized
aaaaaaagaaaagagagaca

SEQ ID NO: 9085 - DNA, 20 bp, Artificial Sequence
  chemically synthesized
aaaaagaaaagagagacaga

SEQ ID NO: 9086 - DNA, 20 bp, Artificial Sequence
  chemically synthesized
aaagaaaagagagacagaga

SEQ ID NO: 9087 - DNA, 20 bp, Artificial Sequence
  chemically synthesized
agaaaagagagacagagaga

SEQ ID NO: 9088 - DNA, 20 bp, Artificial Sequence
  chemically synthesized
aaaagagagacagagagaga

SEQ ID NO: 9089 - DNA, 20 bp, Artificial Sequence
  chemically synthesized
aagagagacagagagagaga

SEQ ID NO: 9090 - DNA, 20 bp, Artificial Sequence
  chemically synthesized
atcaccttttaaactcatcc

SEQ ID NO: 9091 - DNA, 20 bp, Artificial Sequence
  chemically synthesized
caccttttaaactcatccaa

SEQ ID NO: 9092 - DNA, 20 bp, Artificial Sequence
  chemically synthesized
ttttaaactcatccaagagc

SEQ ID NO: 9093 - DNA, 20 bp, Artificial Sequence
  chemically synthesized
actcatccaagagccagtca

SEQ ID NO: 9094 - DNA, 20 bp, Artificial Sequence
  chemically synthesized
gagccagtcaaagccaccca

SEQ ID NO: 9095 - DNA, 20 bp, Artificial Sequence
  chemically synthesized
agccagtcaaagccacccaa

SEQ ID NO: 9096 - DNA, 20 bp, Artificial Sequence
  chemically synthesized
agtcaaagccacccaaagga

SEQ ID NO: 9097 - DNA, 20 bp, Artificial Sequence
  chemically synthesized
caaagccacccaaaggaaag

SEQ ID NO: 9098 - DNA, 20 bp, Artificial Sequence
  chemically synthesized
aaagccacccaaaggaaagc

SEQ ID NO: 9099 - DNA, 20 bp, Artificial Sequence
  chemically synthesized
acccaaaggaaagcaggccc

SEQ ID NO: 9100 - DNA, 20 bp, Artificial Sequence
  chemically synthesized
gccccagtcccttccgaact

SEQ ID NO: 9101 - DNA, 20 bp, Artificial Sequence
  chemically synthesized
gaactcagccgttctccctc

SEQ ID NO: 9102 - DNA, 20 bp, Artificial Sequence
  chemically synthesized
tcagccgttctccctctggt

SEQ ID NO: 9103 - DNA, 20 bp, Artificial Sequence
  chemically synthesized
ccgttctccctctggtgaga

SEQ ID NO: 9104 - DNA, 20 bp, Artificial Sequence
  chemically synthesized
cgttctccctctggtgagac

SEQ ID NO: 9105 - DNA, 20 bp, Artificial Sequence
  chemically synthesized
ccctctggtgagacaggctc

SEQ ID NO: 9106 - DNA, 20 bp, Artificial Sequence
  chemically synthesized
gacaggctctagcttgtttc

SEQ ID NO: 9107 - DNA, 20 bp, Artificial Sequence
  chemically synthesized
tgtttccagaatgccactac

SEQ ID NO: 9108 - DNA, 20 bp, Artificial Sequence
  chemically synthesized
ctaccagcttcccacacctc

SEQ ID NO: 9109 - DNA, 20 bp, Artificial Sequence
  chemically synthesized
taccagcttcccacacctcc

SEQ ID NO: 9110 - DNA, 20 bp, Artificial Sequence
  chemically synthesized
accagcttcccacacctcca

SEQ ID NO: 9111 - DNA, 20 bp, Artificial Sequence
  chemically synthesized
ccagcttcccacacctccag

SEQ ID NO: 9112 - DNA, 20 bp, Artificial Sequence
  chemically synthesized
caggggaccccctaactcca

SEQ ID NO: 9113 - DNA, 20 bp, Artificial Sequence
  chemically synthesized
cctaactccaaagtgttgcc

SEQ ID NO: 9114 - DNA, 20 bp, Artificial Sequence
  chemically synthesized
ccaaagtgttgcccagacct

SEQ ID NO: 9115 - DNA, 20 bp, Artificial Sequence
  chemically synthesized
caaagtgttgcccagaccta

SEQ ID NO: 9116 - DNA, 20 bp, Artificial Sequence
  chemically synthesized
acgtgctccttccccaacac

SEQ ID NO: 9117 - DNA, 20 bp, Artificial Sequence
  chemically synthesized
ccttccccaacactggcttc

SEQ ID NO: 9118 - DNA, 20 bp, Artificial Sequence
  chemically synthesized
cttccccaacactggcttcc

SEQ ID NO: 9119 - DNA, 20 bp, Artificial Sequence
  chemically synthesized
cccaacactggcttccaggt

SEQ ID NO: 9120 - DNA, 20 bp, Artificial Sequence
  chemically synthesized
acactggcttccaggtgagc

SEQ ID NO: 9121 - DNA, 20 bp, Artificial Sequence
  chemically synthesized
tggcttccaggtgagcgaga

SEQ ID NO: 9122 - DNA, 20 bp, Artificial Sequence
  chemically synthesized
gtgagcgagacagaatctgc

SEQ ID NO: 9123 - DNA, 20 bp, Artificial Sequence
  chemically synthesized
agcgagacagaatctgcaag

SEQ ID NO: 9124 - DNA, 20 bp, Artificial Sequence
  chemically synthesized
cgagacagaatctgcaagca

SEQ ID NO: 9125 - DNA, 20 bp, Artificial Sequence
  chemically synthesized
cagagttcactgcttgacca

SEQ ID NO: 9126 - DNA, 20 bp, Artificial Sequence
  chemically synthesized
agagttcactgcttgaccat

SEQ ID NO: 9127 - DNA, 20 bp, Artificial Sequence
  chemically synthesized
gagttcactgcttgaccatg

SEQ ID NO: 9128 - DNA, 20 bp, Artificial Sequence
  chemically synthesized
actgcttgaccatggggtga

SEQ ID NO: 9129 - DNA, 20 bp, Artificial Sequence
  chemically synthesized
accatggggtgaaagccaca

SEQ ID NO: 9130 - DNA, 20 bp, Artificial Sequence
  chemically synthesized
gaaagccacaaagacaccac

SEQ ID NO: 9131 - DNA, 20 bp, Artificial Sequence
  chemically synthesized
accaccagctatcccaaccc

SEQ ID NO: 9132 - DNA, 20 bp, Artificial Sequence
  chemically synthesized
tcactttttcactttctccc

SEQ ID NO: 9133 - DNA, 20 bp, Artificial Sequence
  chemically synthesized
cactttttcactttctcccc

SEQ ID NO: 9134 - DNA, 20 bp, Artificial Sequence
  chemically synthesized
actttttcactttctcccca

SEQ ID NO: 9135 - DNA, 20 bp, Artificial Sequence
  chemically synthesized
tttttcactttctccccagg

SEQ ID NO: 9136 - DNA, 20 bp, Artificial Sequence
  chemically synthesized
ttttcactttctccccaggg

SEQ ID NO: 9137 - DNA, 20 bp, Artificial Sequence
  chemically synthesized
tcactttctccccagggagg

SEQ ID NO: 9138 - DNA, 20 bp, Artificial Sequence
  chemically synthesized
cactttctccccagggagga

SEQ ID NO: 9139 - DNA, 20 bp, Artificial Sequence
  chemically synthesized
actttctccccagggaggaa

SEQ ID NO: 9140 - DNA, 20 bp, Artificial Sequence
  chemically synthesized
ctttctccccagggaggaag

SEQ ID NO: 9141 - DNA, 20 bp, Artificial Sequence
  chemically synthesized
tttctccccagggaggaagg

SEQ ID NO: 9142 - DNA, 20 bp, Artificial Sequence
  chemically synthesized
aagggggaaataaacttgcc

SEQ ID NO: 9143 - DNA, 20 bp, Artificial Sequence
  chemically synthesized
gcccagcctcacaccttccc

SEQ ID NO: 9144 - DNA, 20 bp, Artificial Sequence
  chemically synthesized
agcctcacaccttccctgga

SEQ ID NO: 9145 - DNA, 20 bp, Artificial Sequence
  chemically synthesized
gcctcacaccttccctggac

SEQ ID NO: 9146 - DNA, 20 bp, Artificial Sequence
  chemically synthesized
cctcacaccttccctggaca

SEQ ID NO: 9147 - DNA, 20 bp, Artificial Sequence
  chemically synthesized
tcacaccttccctggacagg

SEQ ID NO: 9148 - DNA, 20 bp, Artificial Sequence
  chemically synthesized
accttccctggacagggagc

SEQ ID NO: 9149 - DNA, 20 bp, Artificial Sequence
  chemically synthesized
ccttccctggacagggagct

SEQ ID NO: 9150 - DNA, 20 bp, Artificial Sequence
  chemically synthesized
cttccctggacagggagctg

SEQ ID NO: 9151 - DNA, 20 bp, Artificial Sequence
  chemically synthesized
gggagctggggatccattca

SEQ ID NO: 9152 - DNA, 20 bp, Artificial Sequence
  chemically synthesized
ctggggatccattcaaagcc

SEQ ID NO: 9153 - DNA, 20 bp, Artificial Sequence
  chemically synthesized
cggtctttctctgttcaatc

SEQ ID NO: 9154 - DNA, 20 bp, Artificial Sequence
  chemically synthesized
tctttctctgttcaatcaag

SEQ ID NO: 9155 - DNA, 20 bp, Artificial Sequence
  chemically synthesized
tctgttcaatcaagcagcgt

SEQ ID NO: 9156 - DNA, 20 bp, Artificial Sequence
  chemically synthesized
tcaatcaagcagcgtgagca

SEQ ID NO: 9157 - DNA, 20 bp, Artificial Sequence
  chemically synthesized
caagcagcgtgagcaaagta

SEQ ID NO: 9158 - DNA, 20 bp, Artificial Sequence
  chemically synthesized
attaaatactacatatgaac

SEQ ID NO: 9159 - DNA, 20 bp, Artificial Sequence
  chemically synthesized
catatgaaccagcattatgt

SEQ ID NO: 9160 - DNA, 20 bp, Artificial Sequence
  chemically synthesized
atatgaaccagcattatgtt

SEQ ID NO: 9161 - DNA, 20 bp, Artificial Sequence
  chemically synthesized
ccagcattatgttaggcacc

SEQ ID NO: 9162 - DNA, 20 bp, Artificial Sequence
  chemically synthesized
gcattatgttaggcaccaag

SEQ ID NO: 9163 - DNA, 20 bp, Artificial Sequence
  chemically synthesized
cattatgttaggcaccaaga

SEQ ID NO: 9164 - DNA, 20 bp, Artificial Sequence
  chemically synthesized
acatgactcctgccctccaa

SEQ ID NO: 9165 - DNA, 20 bp, Artificial Sequence
  chemically synthesized
catgactcctgccctccaaa

SEQ ID NO: 9166 - DNA, 20 bp, Artificial Sequence
  chemically synthesized
cctccaaaaggttataattt

SEQ ID NO: 9167 - DNA, 20 bp, Artificial Sequence
  chemically synthesized
ctccaaaaggttataatttg

SEQ ID NO: 9168 - DNA, 20 bp, Artificial Sequence
  chemically synthesized
ccaaaaggttataatttgag

SEQ ID NO: 9169 - DNA, 20 bp, Artificial Sequence
  chemically synthesized
caaaaggttataatttgagg

SEQ ID NO: 9170 - DNA, 20 bp, Artificial Sequence
  chemically synthesized
aaaggttataatttgaggag

SEQ ID NO: 9171 - DNA, 20 bp, Artificial Sequence
  chemically synthesized
ggaggagaaaatacacccac

SEQ ID NO: 9172 - DNA, 20 bp, Artificial Sequence
  chemically synthesized
gatccccttttaactaatcc

SEQ ID NO: 9173 - DNA, 20 bp, Artificial Sequence
  chemically synthesized
tccccttttaactaatccca

SEQ ID NO: 9174 - DNA, 20 bp, Artificial Sequence
  chemically synthesized
ccagagtgacacctcctcca

SEQ ID NO: 9175 - DNA, 20 bp, Artificial Sequence
  chemically synthesized
agtgacacctcctccaaaga

SEQ ID NO: 9176 - DNA, 20 bp, Artificial Sequence
  chemically synthesized
cacctcctccaaagaaagcc

SEQ ID NO: 9177 - DNA, 20 bp, Artificial Sequence
  chemically synthesized
aaagaaagccaagttgctga

SEQ ID NO: 9178 - DNA, 20 bp, Artificial Sequence
  chemically synthesized
agaaagccaagttgctgaca

SEQ ID NO: 9179 - DNA, 20 bp, Artificial Sequence
  chemically synthesized
agccaagttgctgacagagt

SEQ ID NO: 9180 - DNA, 20 bp, Artificial Sequence
  chemically synthesized
gccaagttgctgacagagtc

SEQ ID NO: 9181 - DNA, 20 bp, Artificial Sequence
  chemically synthesized
ctgacagagtcaggccttcc

SEQ ID NO: 9182 - DNA, 20 bp, Artificial Sequence
  chemically synthesized
gtcaggccttcctagttacc

SEQ ID NO: 9183 - DNA, 20 bp, Artificial Sequence
  chemically synthesized
ttcctagttacctagaaaaa

SEQ ID NO: 9184 - DNA, 20 bp, Artificial Sequence
  chemically synthesized
agttacctagaaaaatggcc

SEQ ID NO: 9185 - DNA, 20 bp, Artificial Sequence
  chemically synthesized
gttacctagaaaaatggcct

SEQ ID NO: 9186 - DNA, 20 bp, Artificial Sequence
  chemically synthesized
ttacctagaaaaatggcctg

SEQ ID NO: 9187 - DNA, 20 bp, Artificial Sequence
  chemically synthesized
acctagaaaaatggcctggg

SEQ ID NO: 9188 - DNA, 20 bp, Artificial Sequence
  chemically synthesized
cctagaaaaatggcctgggg

SEQ ID NO: 9189 - DNA, 20 bp, Artificial Sequence
  chemically synthesized
aaaaatggcctggggaggtc

SEQ ID NO: 9190 - DNA, 20 bp, Artificial Sequence
  chemically synthesized
cctggggaggtccagcccac

SEQ ID NO: 9191 - DNA, 20 bp, Artificial Sequence
  chemically synthesized
ggggaggtccagcccactag

SEQ ID NO: 9192 - DNA, 20 bp, Artificial Sequence
  chemically synthesized
gggaggtccagcccactaga

SEQ ID NO: 9193 - DNA, 20 bp, Artificial Sequence
  chemically synthesized
gaggtccagcccactagaag

SEQ ID NO: 9194 - DNA, 20 bp, Artificial Sequence
  chemically synthesized
cagcccactagaaggagata

SEQ ID NO: 9195 - DNA, 20 bp, Artificial Sequence
  chemically synthesized
ctagaaggagatacagaaac

SEQ ID NO: 9196 - DNA, 20 bp, Artificial Sequence
  chemically synthesized
aagccctccataaatatctg

SEQ ID NO: 9197 - DNA, 20 bp, Artificial Sequence
  chemically synthesized
agccctccataaatatctgt

SEQ ID NO: 9198 - DNA, 20 bp, Artificial Sequence
  chemically synthesized
ccataaatatctgtgggacc

SEQ ID NO: 9199 - DNA, 20 bp, Artificial Sequence
  chemically synthesized
ccagctacctctctgaaaca

SEQ ID NO: 9200 - DNA, 20 bp, Artificial Sequence
  chemically synthesized
tacctctctgaaacacagcc

SEQ ID NO: 9201 - DNA, 20 bp, Artificial Sequence
  chemically synthesized
gaaacacagcccagtgcttt

SEQ ID NO: 9202 - DNA, 20 bp, Artificial Sequence
  chemically synthesized
aaacacagcccagtgctttc

SEQ ID NO: 9203 - DNA, 20 bp, Artificial Sequence
  chemically synthesized
cacagcccagtgctttcagg

SEQ ID NO: 9204 - DNA, 20 bp, Artificial Sequence
  chemically synthesized
acagcccagtgctttcaggc

SEQ ID NO: 9205 - DNA, 20 bp, Artificial Sequence
  chemically synthesized
cagcccagtgctttcaggca

SEQ ID NO: 9206 - DNA, 20 bp, Artificial Sequence
  chemically synthesized
gcccagtgctttcaggcagg

SEQ ID NO: 9207 - DNA, 20 bp, Artificial Sequence
  chemically synthesized
agtgctttcaggcagggaga

SEQ ID NO: 9208 - DNA, 20 bp, Artificial Sequence
  chemically synthesized
gctttcaggcagggagaaag

SEQ ID NO: 9209 - DNA, 20 bp, Artificial Sequence
  chemically synthesized
ttcaggcagggagaaagtgg

SEQ ID NO: 9210 - DNA, 20 bp, Artificial Sequence
  chemically synthesized
aggcagggagaaagtggtgg

SEQ ID NO: 9211 - DNA, 20 bp, Artificial Sequence
  chemically synthesized
ggcagggagaaagtggtggt

SEQ ID NO: 9212 - DNA, 20 bp, Artificial Sequence
  chemically synthesized
agggagaaagtggtggtggg

SEQ ID NO: 9213 - DNA, 20 bp, Artificial Sequence
  chemically synthesized
gagaaagtggtggtgggtgg

SEQ ID NO: 9214 - DNA, 20 bp, Artificial Sequence
  chemically synthesized
aagtggtggtgggtggcgga

SEQ ID NO: 9215 - DNA, 20 bp, Artificial Sequence
  chemically synthesized
gtggtggtgggtggcggaca

SEQ ID NO: 9216 - DNA, 20 bp, Artificial Sequence
  chemically synthesized
tgggtggcggacagagatgt

SEQ ID NO: 9217 - DNA, 20 bp, Artificial Sequence
  chemically synthesized
gtggcggacagagatgtgag

SEQ ID NO: 9218 - DNA, 20 bp, Artificial Sequence
  chemically synthesized
gagatgtgagtggactgaca

SEQ ID NO: 9219 - DNA, 20 bp, Artificial Sequence
  chemically synthesized
tgagtggactgacacagaca

SEQ ID NO: 9220 - DNA, 20 bp, Artificial Sequence
  chemically synthesized
gagtggactgacacagacat

SEQ ID NO: 9221 - DNA, 20 bp, Artificial Sequence
  chemically synthesized
agtggactgacacagacatg

SEQ ID NO: 9222 - DNA, 20 bp, Artificial Sequence
  chemically synthesized
gtggactgacacagacatgg

SEQ ID NO: 9223 - DNA, 20 bp, Artificial Sequence
  chemically synthesized
ctcttgatcacccaactttc

SEQ ID NO: 9224 - DNA, 20 bp, Artificial Sequence
  chemically synthesized
cccatttctgcccctgactt

SEQ ID NO: 9225 - DNA, 20 bp, Artificial Sequence
  chemically synthesized
ctgcccctgacttgagctcc

SEQ ID NO: 9226 - DNA, 20 bp, Artificial Sequence
  chemically synthesized
tgcccctgacttgagctccc

SEQ ID NO: 9227 - DNA, 20 bp, Artificial Sequence
  chemically synthesized
caggccactcaacccactgt

SEQ ID NO: 9228 - DNA, 20 bp, Artificial Sequence
  chemically synthesized
aggccactcaacccactgtg

SEQ ID NO: 9229 - DNA, 20 bp, Artificial Sequence
  chemically synthesized
cccactgtgaggtcttactg

SEQ ID NO: 9230 - DNA, 20 bp, Artificial Sequence
  chemically synthesized
ccactgtgaggtcttactgt

SEQ ID NO: 9231 - DNA, 20 bp, Artificial Sequence
  chemically synthesized
cactgtgaggtcttactgtg

SEQ ID NO: 9232 - DNA, 20 bp, Artificial Sequence
  chemically synthesized
gtcttactgtggggattacc

SEQ ID NO: 9233 - DNA, 20 bp, Artificial Sequence
  chemically synthesized
ggggattaccgagtcaccac

SEQ ID NO: 9234 - DNA, 20 bp, Artificial Sequence
  chemically synthesized
gggattaccgagtcaccacc

SEQ ID NO: 9235 - DNA, 20 bp, Artificial Sequence
  chemically synthesized
caccaccaggctgcgctgaa

SEQ ID NO: 9236 - DNA, 20 bp, Artificial Sequence
  chemically synthesized
accaccaggctgcgctgaac

SEQ ID NO: 9237 - DNA, 20 bp, Artificial Sequence
  chemically synthesized
accaggctgcgctgaacagg

SEQ ID NO: 9238 - DNA, 20 bp, Artificial Sequence
  chemically synthesized
gcgctgaacaggaagtgaac

SEQ ID NO: 9239 - DNA, 20 bp, Artificial Sequence
  chemically synthesized
ggaagtgaacaagtcaattc

SEQ ID NO: 9240 - DNA, 20 bp, Artificial Sequence
  chemically synthesized
gtgaacaagtcaattcgaga

SEQ ID NO: 9241 - DNA, 20 bp, Artificial Sequence
  chemically synthesized
caattcgagaaagatccaat

SEQ ID NO: 9242 - DNA, 20 bp, Artificial Sequence
  chemically synthesized
aattcgagaaagatccaata

SEQ ID NO: 9243 - DNA, 20 bp, Artificial Sequence
  chemically synthesized
attcgagaaagatccaataa

SEQ ID NO: 9244 - DNA, 20 bp, Artificial Sequence
  chemically synthesized
tccaataagggaatattctc

SEQ ID NO: 9245 - DNA, 20 bp, Artificial Sequence
  chemically synthesized
ccaataagggaatattctct

SEQ ID NO: 9246 - DNA, 20 bp, Artificial Sequence
  chemically synthesized
gaatattctctgggcaccgc

SEQ ID NO: 9247 - DNA, 20 bp, Artificial Sequence
  chemically synthesized
aatattctctgggcaccgct

SEQ ID NO: 9248 - DNA, 20 bp, Artificial Sequence
  chemically synthesized
caccgctgggccaacaccca

SEQ ID NO: 9249 - DNA, 20 bp, Artificial Sequence
  chemically synthesized
ccgctgggccaacacccacg

SEQ ID NO: 9250 - DNA, 20 bp, Artificial Sequence
  chemically synthesized
cgctgggccaacacccacgg

SEQ ID NO: 9251 - DNA, 20 bp, Artificial Sequence
  chemically synthesized
gctgggccaacacccacgga

SEQ ID NO: 9252 - DNA, 20 bp, Artificial Sequence
  chemically synthesized
ctgggccaacacccacggag

SEQ ID NO: 9253 - DNA, 20 bp, Artificial Sequence
  chemically synthesized
caacacccacggaggggtcc

SEQ ID NO: 9254 - DNA, 20 bp, Artificial Sequence
  chemically synthesized
gtcctggaatacaaataccc

SEQ ID NO: 9255 - DNA, 20 bp, Artificial Sequence
  chemically synthesized
cctggaatacaaataccctg

SEQ ID NO: 9256 - DNA, 20 bp, Artificial Sequence
  chemically synthesized
tacaaataccctggagtctg

SEQ ID NO: 9257 - DNA, 20 bp, Artificial Sequence
  chemically synthesized
acaaataccctggagtctga

SEQ ID NO: 9258 - DNA, 20 bp, Artificial Sequence
  chemically synthesized
caaataccctggagtctgaa

SEQ ID NO: 9259 - DNA, 20 bp, Artificial Sequence
  chemically synthesized
ataccctggagtctgaaggg

SEQ ID NO: 9260 - DNA, 20 bp, Artificial Sequence
  chemically synthesized
ccctggagtctgaagggcgg

SEQ ID NO: 9261 - DNA, 20 bp, Artificial Sequence
  chemically synthesized
caattatgtcttcattgaac

SEQ ID NO: 9262 - DNA, 20 bp, Artificial Sequence
  chemically synthesized
aattatgtcttcattgaact

SEQ ID NO: 9263 - DNA, 20 bp, Artificial Sequence
  chemically synthesized
cattgaactgggttatgaaa

SEQ ID NO: 9264 - DNA, 20 bp, Artificial Sequence
  chemically synthesized
attgaactgggttatgaaaa

SEQ ID NO: 9265 - DNA, 20 bp, Artificial Sequence
  chemically synthesized
ttgaactgggttatgaaaaa

SEQ ID NO: 9266 - DNA, 20 bp, Artificial Sequence
  chemically synthesized
aactgggttatgaaaaaggg

SEQ ID NO: 9267 - DNA, 20 bp, Artificial Sequence
  chemically synthesized
tgggttatgaaaaagggaag

SEQ ID NO: 9268 - DNA, 20 bp, Artificial Sequence
  chemically synthesized
gggttatgaaaaagggaagc

SEQ ID NO: 9269 - DNA, 20 bp, Artificial Sequence
  chemically synthesized
ggttatgaaaaagggaagca

SEQ ID NO: 9270 - DNA, 20 bp, Artificial Sequence
  chemically synthesized
ggaagcagggattgaaaatc

SEQ ID NO: 9271 - DNA, 20 bp, Artificial Sequence
  chemically synthesized
ggattgaaaatctagccttg

SEQ ID NO: 9272 - DNA, 20 bp, Artificial Sequence
  chemically synthesized
aaatctagccttgtggccat

SEQ ID NO: 9273 - DNA, 20 bp, Artificial Sequence
  chemically synthesized
aagcctgtgatgactcatgc

SEQ ID NO: 9274 - DNA, 20 bp, Artificial Sequence
  chemically synthesized
gtgatgactcatgccagctt

SEQ ID NO: 9275 - DNA, 20 bp, Artificial Sequence
  chemically synthesized
tgatgactcatgccagcttt

SEQ ID NO: 9276 - DNA, 20 bp, Artificial Sequence
  chemically synthesized
atgccagctttgggtgctct

SEQ ID NO: 9277 - DNA, 20 bp, Artificial Sequence
  chemically synthesized
actgtcacctctcctcaccc

SEQ ID NO: 9278 - DNA, 20 bp, Artificial Sequence
  chemically synthesized
cctctcctcaccccagcaca

SEQ ID NO: 9279 - DNA, 20 bp, Artificial Sequence
  chemically synthesized
cctcaccccagcacacagaa

SEQ ID NO: 9280 - DNA, 20 bp, Artificial Sequence
  chemically synthesized
atgtgcttattatgtgcact

SEQ ID NO: 9281 - DNA, 20 bp, Artificial Sequence
  chemically synthesized
tgtgcttattatgtgcactt

SEQ ID NO: 9282 - DNA, 20 bp, Artificial Sequence
  chemically synthesized
ccactcctattattaaaaca

SEQ ID NO: 9283 - DNA, 20 bp, Artificial Sequence
  chemically synthesized
cactcctattattaaaacac

SEQ ID NO: 9284 - DNA, 20 bp, Artificial Sequence
  chemically synthesized
tattaaaacacaggttttgc

SEQ ID NO: 9285 - DNA, 20 bp, Artificial Sequence
  chemically synthesized
gttttgctggaaactcaaaa

SEQ ID NO: 9286 - DNA, 20 bp, Artificial Sequence
  chemically synthesized
ctggaaactcaaaaaagact

SEQ ID NO: 9287 - DNA, 20 bp, Artificial Sequence
  chemically synthesized
caaaaaagacttggctctgc

SEQ ID NO: 9288 - DNA, 20 bp, Artificial Sequence
  chemically synthesized
gacttggctctgctggctca

SEQ ID NO: 9289 - DNA, 20 bp, Artificial Sequence
  chemically synthesized
acttggctctgctggctcac

SEQ ID NO: 9290 - DNA, 20 bp, Artificial Sequence
  chemically synthesized
cttggctctgctggctcaca

SEQ ID NO: 9291 - DNA, 20 bp, Artificial Sequence
  chemically synthesized
ctgctggctcacagggaatc

SEQ ID NO: 9292 - DNA, 20 bp, Artificial Sequence
  chemically synthesized
tgctggctcacagggaatct

SEQ ID NO: 9293 - DNA, 20 bp, Artificial Sequence
  chemically synthesized
cttccaaaacctttgttctc

SEQ ID NO: 9294 - DNA, 20 bp, Artificial Sequence
  chemically synthesized
aacctttgttctccagatgt

SEQ ID NO: 9295 - DNA, 20 bp, Artificial Sequence
  chemically synthesized
gttctccagatgtcagtgca

SEQ ID NO: 9296 - DNA, 20 bp, Artificial Sequence
  chemically synthesized
tgtcagtgcaaagttatgaa

SEQ ID NO: 9297 - DNA, 20 bp, Artificial Sequence
  chemically synthesized
ttatgaacagctctccccct

SEQ ID NO: 9298 - DNA, 20 bp, Artificial Sequence
  chemically synthesized
tccccctgagctaacttacc

SEQ ID NO: 9299 - DNA, 20 bp, Artificial Sequence
  chemically synthesized
ccctgagctaacttaccgag

SEQ ID NO: 9300 - DNA, 20 bp, Artificial Sequence
  chemically synthesized
gagctaacttaccgagcagt

SEQ ID NO: 9301 - DNA, 20 bp, Artificial Sequence
  chemically synthesized
taacttaccgagcagtaagt

SEQ ID NO: 9302 - DNA, 20 bp, Artificial Sequence
  chemically synthesized
aacttaccgagcagtaagtg

SEQ ID NO: 9303 - DNA, 20 bp, Artificial Sequence
  chemically synthesized
taccgagcagtaagtgaggc

SEQ ID NO: 9304 - DNA, 20 bp, Artificial Sequence
  chemically synthesized
gagcagtaagtgaggcaaga

SEQ ID NO: 9305 - DNA, 20 bp, Artificial Sequence
  chemically synthesized
agcagtaagtgaggcaagaa

SEQ ID NO: 9306 - DNA, 20 bp, Artificial Sequence
  chemically synthesized
aggccactcactatatttct

SEQ ID NO: 9307 - DNA, 20 bp, Artificial Sequence
  chemically synthesized
tatatttctcagcctccatg

SEQ ID NO: 9308 - DNA, 20 bp, Artificial Sequence
  chemically synthesized
agcctccatgaagtcgtcac

SEQ ID NO: 9309 - DNA, 20 bp, Artificial Sequence
  chemically synthesized
gcctccatgaagtcgtcact

SEQ ID NO: 9310 - DNA, 20 bp, Artificial Sequence
  chemically synthesized
ctccatgaagtcgtcactgg

SEQ ID NO: 9311 - DNA, 20 bp, Artificial Sequence
  chemically synthesized
ccatgaagtcgtcactggga

SEQ ID NO: 9312 - DNA, 20 bp, Artificial Sequence
  chemically synthesized
catgaagtcgtcactgggag

SEQ ID NO: 9313 - DNA, 20 bp, Artificial Sequence
  chemically synthesized
tgaagtcgtcactgggagag

SEQ ID NO: 9314 - DNA, 20 bp, Artificial Sequence
  chemically synthesized
tcgtcactgggagaggagcc

SEQ ID NO: 9315 - DNA, 20 bp, Artificial Sequence
  chemically synthesized
gtcactgggagaggagccaa

SEQ ID NO: 9316 - DNA, 20 bp, Artificial Sequence
  chemically synthesized
tcactgggagaggagccaag

SEQ ID NO: 9317 - DNA, 20 bp, Artificial Sequence
  chemically synthesized
cactgggagaggagccaaga

SEQ ID NO: 9318 - DNA, 20 bp, Artificial Sequence
  chemically synthesized
ctgggagaggagccaagagg

SEQ ID NO: 9319 - DNA, 20 bp, Artificial Sequence
  chemically synthesized
tgggagaggagccaagaggg

SEQ ID NO: 9320 - DNA, 20 bp, Artificial Sequence
  chemically synthesized
gggagaggagccaagaggga

SEQ ID NO: 9321 - DNA, 20 bp, Artificial Sequence
  chemically synthesized
ggagaggagccaagagggag

SEQ ID NO: 9322 - DNA, 20 bp, Artificial Sequence
  chemically synthesized
gagaggagccaagagggagg

SEQ ID NO: 9323 - DNA, 20 bp, Artificial Sequence
  chemically synthesized
ccaagagggagggggcacct

SEQ ID NO: 9324 - DNA, 20 bp, Artificial Sequence
  chemically synthesized
caagagggagggggcacctt

SEQ ID NO: 9325 - DNA, 20 bp, Artificial Sequence
  chemically synthesized
agagggagggggcaccttag

SEQ ID NO: 9326 - DNA, 20 bp, Artificial Sequence
  chemically synthesized
gagggggcaccttaggagac

SEQ ID NO: 9327 - DNA, 20 bp, Artificial Sequence
  chemically synthesized
gatcgtaactcaccgtcatc

SEQ ID NO: 9328 - DNA, 20 bp, Artificial Sequence
  chemically synthesized
atcgtaactcaccgtcatcc

SEQ ID NO: 9329 - DNA, 20 bp, Artificial Sequence
  chemically synthesized
tcgtaactcaccgtcatccg

SEQ ID NO: 9330 - DNA, 20 bp, Artificial Sequence
  chemically synthesized
taactcaccgtcatccgggg

SEQ ID NO: 9331 - DNA, 20 bp, Artificial Sequence
  chemically synthesized
ctcaccgtcatccggggaag

SEQ ID NO: 9332 - DNA, 20 bp, Artificial Sequence
  chemically synthesized
caccgtcatccggggaagtg

SEQ ID NO: 9333 - DNA, 20 bp, Artificial Sequence
  chemically synthesized
ccgtcatccggggaagtgga

SEQ ID NO: 9334 - DNA, 20 bp, Artificial Sequence
  chemically synthesized
cgtcatccggggaagtggag

SEQ ID NO: 9335 - DNA, 20 bp, Artificial Sequence
  chemically synthesized
catccggggaagtggagagg

SEQ ID NO: 9336 - DNA, 20 bp, Artificial Sequence
  chemically synthesized
cggggaagtggagaggaagt

SEQ ID NO: 9337 - DNA, 20 bp, Artificial Sequence
  chemically synthesized
ggggaagtggagaggaagtc

SEQ ID NO: 9338 - DNA, 20 bp, Artificial Sequence
  chemically synthesized
gggaagtggagaggaagtca

SEQ ID NO: 9339 - DNA, 20 bp, Artificial Sequence
  chemically synthesized
ggaagtcagggaactcgtgt

SEQ ID NO: 9340 - DNA, 20 bp, Artificial Sequence
  chemically synthesized
gaagtcagggaactcgtgtc

SEQ ID NO: 9341 - DNA, 20 bp, Artificial Sequence
  chemically synthesized
agtcagggaactcgtgtcag

SEQ ID NO: 9342 - DNA, 20 bp, Artificial Sequence
  chemically synthesized
cagggaactcgtgtcaggag

SEQ ID NO: 9343 - DNA, 20 bp, Artificial Sequence
  chemically synthesized
gggaactcgtgtcaggagtg

SEQ ID NO: 9344 - DNA, 20 bp, Artificial Sequence
  chemically synthesized
gaactcgtgtcaggagtgga

SEQ ID NO: 9345 - DNA, 20 bp, Artificial Sequence
  chemically synthesized
cgtgtcaggagtggagagct

SEQ ID NO: 9346 - DNA, 20 bp, Artificial Sequence
  chemically synthesized
gtggagagctaagctcaata

SEQ ID NO: 9347 - DNA, 20 bp, Artificial Sequence
  chemically synthesized
gagctaagctcaatatggac

SEQ ID NO: 9348 - DNA, 20 bp, Artificial Sequence
  chemically synthesized
agctaagctcaatatggaca

SEQ ID NO: 9349 - DNA, 20 bp, Artificial Sequence
  chemically synthesized
aagctcaatatggacaagga

SEQ ID NO: 9350 - DNA, 20 bp, Artificial Sequence
  chemically synthesized
gctcaatatggacaaggaca

SEQ ID NO: 9351 - DNA, 20 bp, Artificial Sequence
  chemically synthesized
tcaatatggacaaggacaga

SEQ ID NO: 9352 - DNA, 20 bp, Artificial Sequence
  chemically synthesized
caatatggacaaggacagag

SEQ ID NO: 9353 - DNA, 20 bp, Artificial Sequence
  chemically synthesized
aatatggacaaggacagaga

SEQ ID NO: 9354 - DNA, 20 bp, Artificial Sequence
  chemically synthesized
atatggacaaggacagagag

SEQ ID NO: 9355 - DNA, 20 bp, Artificial Sequence
  chemically synthesized
caaggacagagaggggcacc

SEQ ID NO: 9356 - DNA, 20 bp, Artificial Sequence
  chemically synthesized
aaggacagagaggggcacct

SEQ ID NO: 9357 - DNA, 20 bp, Artificial Sequence
  chemically synthesized
acagagaggggcacctggga

SEQ ID NO: 9358 - DNA, 20 bp, Artificial Sequence
  chemically synthesized
cagagaggggcacctgggat

SEQ ID NO: 9359 - DNA, 20 bp, Artificial Sequence
  chemically synthesized
gagaggggcacctgggatgg

SEQ ID NO: 9360 - DNA, 20 bp, Artificial Sequence
  chemically synthesized
cacctgggatgggagaaatg

SEQ ID NO: 9361 - DNA, 20 bp, Artificial Sequence
  chemically synthesized
ggatgggagaaatgtggcat

SEQ ID NO: 9362 - DNA, 20 bp, Artificial Sequence
  chemically synthesized
gatgggagaaatgtggcatc

SEQ ID NO: 9363 - DNA, 20 bp, Artificial Sequence
  chemically synthesized
aaatgtggcatcaggacaac

SEQ ID NO: 9364 - DNA, 20 bp, Artificial Sequence
  chemically synthesized
aatgtggcatcaggacaact

SEQ ID NO: 9365 - DNA, 20 bp, Artificial Sequence
  chemically synthesized
tgtggcatcaggacaactgg

SEQ ID NO: 9366 - DNA, 20 bp, Artificial Sequence
  chemically synthesized
atcaggacaactgggagtga

SEQ ID NO: 9367 - DNA, 20 bp, Artificial Sequence
  chemically synthesized
tgaaagtttaactgccctca

SEQ ID NO: 9368 - DNA, 20 bp, Artificial Sequence
  chemically synthesized
agtttaactgccctcaaaga

SEQ ID NO: 9369 - DNA, 20 bp, Artificial Sequence
  chemically synthesized
gccctcaaagatggctgaca

SEQ ID NO: 9370 - DNA, 20 bp, Artificial Sequence
  chemically synthesized
aaagatggctgacaaagatc

SEQ ID NO: 9371 - DNA, 20 bp, Artificial Sequence
  chemically synthesized
tgacaaagatctagcattcc

SEQ ID NO: 9372 - DNA, 20 bp, Artificial Sequence
  chemically synthesized
caaagatctagcattcctag

SEQ ID NO: 9373 - DNA, 20 bp, Artificial Sequence
  chemically synthesized
tagcattcctagtggacacc

SEQ ID NO: 9374 - DNA, 20 bp, Artificial Sequence
  chemically synthesized
ttcctagtggacaccaagct

SEQ ID NO: 9375 - DNA, 20 bp, Artificial Sequence
  chemically synthesized
gtggacaccaagctgagcat

SEQ ID NO: 9376 - DNA, 20 bp, Artificial Sequence
  chemically synthesized
ctgagcatgagtcatcaatg

SEQ ID NO: 9377 - DNA, 20 bp, Artificial Sequence
  chemically synthesized
atgagtcatcaatgaagcac

SEQ ID NO: 9378 - DNA, 20 bp, Artificial Sequence
  chemically synthesized
tgaagcactggtttttaaaa

SEQ ID NO: 9379 - DNA, 20 bp, Artificial Sequence
  chemically synthesized
gcactggtttttaaaaaagc

SEQ ID NO: 9380 - DNA, 20 bp, Artificial Sequence
  chemically synthesized
ctggtttttaaaaaagcaag

SEQ ID NO: 9381 - DNA, 20 bp, Artificial Sequence
  chemically synthesized
tggtttttaaaaaagcaagc

SEQ ID NO: 9382 - DNA, 20 bp, Artificial Sequence
  chemically synthesized
taaaaaagcaagcaggacat

SEQ ID NO: 9383 - DNA, 20 bp, Artificial Sequence
  chemically synthesized
aaaaagcaagcaggacataa

SEQ ID NO: 9384 - DNA, 20 bp, Artificial Sequence
  chemically synthesized
gcaagcaggacataagagtg

SEQ ID NO: 9385 - DNA, 20 bp, Artificial Sequence
  chemically synthesized
ggacataagagtgcagacat

SEQ ID NO: 9386 - DNA, 20 bp, Artificial Sequence
  chemically synthesized
agagtgcagacataagacta

SEQ ID NO: 9387 - DNA, 20 bp, Artificial Sequence
  chemically synthesized
agacataagactaaagaatg

SEQ ID NO: 9388 - DNA, 20 bp, Artificial Sequence
  chemically synthesized
taaagaatgtggaaaacact

SEQ ID NO: 9389 - DNA, 20 bp, Artificial Sequence
  chemically synthesized
acactaagatatcttgccat

SEQ ID NO: 9390 - DNA, 20 bp, Artificial Sequence
  chemically synthesized
tatcttgccattggactctg

SEQ ID NO: 9391 - DNA, 20 bp, Artificial Sequence
  chemically synthesized
ccattggactctgtagttat

SEQ ID NO: 9392 - DNA, 20 bp, Artificial Sequence
  chemically synthesized
tagttatcagactaatgttt

SEQ ID NO: 9393 - DNA, 20 bp, Artificial Sequence
  chemically synthesized
tcagactaatgtttgagtaa

SEQ ID NO: 9394 - DNA, 20 bp, Artificial Sequence
  chemically synthesized
agactaatgtttgagtaaaa

SEQ ID NO: 9395 - DNA, 20 bp, Artificial Sequence
  chemically synthesized
taatgtttgagtaaaagagc

SEQ ID NO: 9396 - DNA, 20 bp, Artificial Sequence
  chemically synthesized
gagtaaaagagctggaaaac

SEQ ID NO: 9397 - DNA, 20 bp, Artificial Sequence
  chemically synthesized
taaaagagctggaaaaccag

SEQ ID NO: 9398 - DNA, 20 bp, Artificial Sequence
  chemically synthesized
tggaaaaccagcagattcta

SEQ ID NO: 9399 - DNA, 20 bp, Artificial Sequence
  chemically synthesized
gaaaaccagcagattctaaa

SEQ ID NO: 9400 - DNA, 20 bp, Artificial Sequence
  chemically synthesized
aaaccagcagattctaaaga

SEQ ID NO: 9401 - DNA, 20 bp, Artificial Sequence
  chemically synthesized
aaccagcagattctaaagag

SEQ ID NO: 9402 - DNA, 20 bp, Artificial Sequence
  chemically synthesized
gcagattctaaagagaggca

SEQ ID NO: 9403 - DNA, 20 bp, Artificial Sequence
  chemically synthesized
agaggcatagaaacaataaa

SEQ ID NO: 9404 - DNA, 20 bp, Artificial Sequence
  chemically synthesized
gaggcatagaaacaataaat

SEQ ID NO: 9405 - DNA, 20 bp, Artificial Sequence
  chemically synthesized
agaaacaataaatgggttac

SEQ ID NO: 9406 - DNA, 20 bp, Artificial Sequence
  chemically synthesized
ataaatgggttacaagataa

SEQ ID NO: 9407 - DNA, 20 bp, Artificial Sequence
  chemically synthesized
ttacaagataatagatccat

SEQ ID NO: 9408 - DNA, 20 bp, Artificial Sequence
  chemically synthesized
agataatagatccatgagtt

SEQ ID NO: 9409 - DNA, 20 bp, Artificial Sequence
  chemically synthesized
gataatagatccatgagttc

SEQ ID NO: 9410 - DNA, 20 bp, Artificial Sequence
  chemically synthesized
tagatccatgagttcaggtt

SEQ ID NO: 9411 - DNA, 20 bp, Artificial Sequence
  chemically synthesized
agatccatgagttcaggttc

SEQ ID NO: 9412 - DNA, 20 bp, Artificial Sequence
  chemically synthesized
ccatgagttcaggttcagga

SEQ ID NO: 9413 - DNA, 20 bp, Artificial Sequence
  chemically synthesized
atgagttcaggttcaggaaa

SEQ ID NO: 9414 - DNA, 20 bp, Artificial Sequence
  chemically synthesized
ggttcaggaaagagattatt

SEQ ID NO: 9415 - DNA, 20 bp, Artificial Sequence
  chemically synthesized
gttcaggaaagagattattt

SEQ ID NO: 9416 - DNA, 20 bp, Artificial Sequence
  chemically synthesized
caggaaagagattatttagg

SEQ ID NO: 9417 - DNA, 20 bp, Artificial Sequence
  chemically synthesized
gaaagagattatttaggaag

SEQ ID NO: 9418 - DNA, 20 bp, Artificial Sequence
  chemically synthesized
agagattatttaggaagaag

SEQ ID NO: 9419 - DNA, 20 bp, Artificial Sequence
  chemically synthesized
gattatttaggaagaagaag

SEQ ID NO: 9420 - DNA, 20 bp, Artificial Sequence
  chemically synthesized
tatttaggaagaagaagtgg

SEQ ID NO: 9421 - DNA, 20 bp, Artificial Sequence
  chemically synthesized
tttaggaagaagaagtggcg

SEQ ID NO: 9422 - DNA, 20 bp, Artificial Sequence
  chemically synthesized
gaagaagaagtggcggagaa

SEQ ID NO: 9423 - DNA, 20 bp, Artificial Sequence
  chemically synthesized
aagtggcggagaatggaatg

SEQ ID NO: 9424 - DNA, 20 bp, Artificial Sequence
  chemically synthesized
aatgaagaatgtaaaatatg

SEQ ID NO: 9425 - DNA, 20 bp, Artificial Sequence
  chemically synthesized
atgtaaaatatgaagcattt

SEQ ID NO: 9426 - DNA, 20 bp, Artificial Sequence
  chemically synthesized
atatgaagcatttcagccca

SEQ ID NO: 9427 - DNA, 20 bp, Artificial Sequence
  chemically synthesized
gaagcatttcagcccaaagc

SEQ ID NO: 9428 - DNA, 20 bp, Artificial Sequence
  chemically synthesized
ttcagcccaaagctggtgat

SEQ ID NO: 9429 - DNA, 20 bp, Artificial Sequence
  chemically synthesized
atgagatactttgtcgtctc

SEQ ID NO: 9430 - DNA, 20 bp, Artificial Sequence
  chemically synthesized
actttgtcgtctctggaatg

SEQ ID NO: 9431 - DNA, 20 bp, Artificial Sequence
  chemically synthesized
tttgtcgtctctggaatgaa

SEQ ID NO: 9432 - DNA, 20 bp, Artificial Sequence
  chemically synthesized
ttgtcgtctctggaatgaag

SEQ ID NO: 9433 - DNA, 20 bp, Artificial Sequence
  chemically synthesized
tctctggaatgaagaggaaa

SEQ ID NO: 9434 - DNA, 20 bp, Artificial Sequence
  chemically synthesized
ctctggaatgaagaggaaat

SEQ ID NO: 9435 - DNA, 20 bp, Artificial Sequence
  chemically synthesized
gaggaaatgggtttaaaatg

SEQ ID NO: 9436 - DNA, 20 bp, Artificial Sequence
  chemically synthesized
atgggtttaaaatgaagcat

SEQ ID NO: 9437 - DNA, 20 bp, Artificial Sequence
  chemically synthesized
tgggtttaaaatgaagcata

SEQ ID NO: 9438 - DNA, 20 bp, Artificial Sequence
  chemically synthesized
gggtttaaaatgaagcataa

SEQ ID NO: 9439 - DNA, 20 bp, Artificial Sequence
  chemically synthesized
aaatgaagcataagggatcg

SEQ ID NO: 9440 - DNA, 20 bp, Artificial Sequence
  chemically synthesized
aatgaagcataagggatcga

SEQ ID NO: 9441 - DNA, 20 bp, Artificial Sequence
  chemically synthesized
gaagcataagggatcgaagg

SEQ ID NO: 9442 - DNA, 20 bp, Artificial Sequence
  chemically synthesized
aagggatcgaaggtagacaa

SEQ ID NO: 9443 - DNA, 20 bp, Artificial Sequence
  chemically synthesized
agggatcgaaggtagacaaa

SEQ ID NO: 9444 - DNA, 20 bp, Artificial Sequence
  chemically synthesized
gatcgaaggtagacaaaagg

SEQ ID NO: 9445 - DNA, 20 bp, Artificial Sequence
  chemically synthesized
atcgaaggtagacaaaagga

SEQ ID NO: 9446 - DNA, 20 bp, Artificial Sequence
  chemically synthesized
aggaaggatttcctgcgatt

SEQ ID NO: 9447 - DNA, 20 bp, Artificial Sequence
  chemically synthesized
gaaggatttcctgcgattga

SEQ ID NO: 9448 - DNA, 20 bp, Artificial Sequence
  chemically synthesized
aaggatttcctgcgattgag

SEQ ID NO: 9449 - DNA, 20 bp, Artificial Sequence
  chemically synthesized
ttgagaggtgtctttaaaaa

SEQ ID NO: 9450 - DNA, 20 bp, Artificial Sequence
  chemically synthesized
ggtgtctttaaaaatagaac

SEQ ID NO: 9451 - DNA, 20 bp, Artificial Sequence
  chemically synthesized
gtgtctttaaaaatagaact

SEQ ID NO: 9452 - DNA, 20 bp, Artificial Sequence
  chemically synthesized
tgtctttaaaaatagaacta

SEQ ID NO: 9453 - DNA, 20 bp, Artificial Sequence
  chemically synthesized
ctttaaaaatagaactaggg

SEQ ID NO: 9454 - DNA, 20 bp, Artificial Sequence
  chemically synthesized
aaaaatagaactagggtggt

SEQ ID NO: 9455 - DNA, 20 bp, Artificial Sequence
  chemically synthesized
aaaatagaactagggtggtg

SEQ ID NO: 9456 - DNA, 20 bp, Artificial Sequence
  chemically synthesized
atagaactagggtggtgagg

SEQ ID NO: 9457 - DNA, 20 bp, Artificial Sequence
  chemically synthesized
agaactagggtggtgaggaa

SEQ ID NO: 9458 - DNA, 20 bp, Artificial Sequence
  chemically synthesized
gaactagggtggtgaggaag

SEQ ID NO: 9459 - DNA, 20 bp, Artificial Sequence
  chemically synthesized
tagggtggtgaggaagaggt

SEQ ID NO: 9460 - DNA, 20 bp, Artificial Sequence
  chemically synthesized
agggtggtgaggaagaggtt

SEQ ID NO: 9461 - DNA, 20 bp, Artificial Sequence
  chemically synthesized
tggtgaggaagaggttgggc

SEQ ID NO: 9462 - DNA, 20 bp, Artificial Sequence
  chemically synthesized
gaggttgggctggccaattc

SEQ ID NO: 9463 - DNA, 20 bp, Artificial Sequence
  chemically synthesized
ggttgggctggccaattctg

SEQ ID NO: 9464 - DNA, 20 bp, Artificial Sequence
  chemically synthesized
gttgggctggccaattctgg

SEQ ID NO: 9465 - DNA, 20 bp, Artificial Sequence
  chemically synthesized
ttgggctggccaattctgga

SEQ ID NO: 9466 - DNA, 20 bp, Artificial Sequence
  chemically synthesized
ctggagggccatctgcccct

SEQ ID NO: 9467 - DNA, 20 bp, Artificial Sequence
  chemically synthesized
ggagggccatctgcccctga

SEQ ID NO: 9468 - DNA, 20 bp, Artificial Sequence
  chemically synthesized
gagggccatctgcccctgag

SEQ ID NO: 9469 - DNA, 20 bp, Artificial Sequence
  chemically synthesized
agggccatctgcccctgaga

SEQ ID NO: 9470 - DNA, 20 bp, Artificial Sequence
  chemically synthesized
tccatctactccattatctc

SEQ ID NO: 9471 - DNA, 20 bp, Artificial Sequence
  chemically synthesized
ctccagttatctgaataaaa

SEQ ID NO: 9472 - DNA, 20 bp, Artificial Sequence
  chemically synthesized
gttatctgaataaaaaagcc

SEQ ID NO: 9473 - DNA, 20 bp, Artificial Sequence
  chemically synthesized
aaaaaagccaagctattccc

SEQ ID NO: 9474 - DNA, 20 bp, Artificial Sequence
  chemically synthesized
aaaaagccaagctattccct

SEQ ID NO: 9475 - DNA, 20 bp, Artificial Sequence
  chemically synthesized
tgggcacaccatgtaaaccc

SEQ ID NO: 9476 - DNA, 20 bp, Artificial Sequence
  chemically synthesized
gcacaccatgtaaaccccag

SEQ ID NO: 9477 - DNA, 20 bp, Artificial Sequence
  chemically synthesized
cacaccatgtaaaccccaga

SEQ ID NO: 9478 - DNA, 20 bp, Artificial Sequence
  chemically synthesized
acaccatgtaaaccccagaa

SEQ ID NO: 9479 - DNA, 20 bp, Artificial Sequence
  chemically synthesized
accccagaagggccacactt

SEQ ID NO: 9480 - DNA, 20 bp, Artificial Sequence
  chemically synthesized
ccccagaagggccacacttt

SEQ ID NO: 9481 - DNA, 20 bp, Artificial Sequence
  chemically synthesized
ccagaagggccacactttgg

SEQ ID NO: 9482 - DNA, 20 bp, Artificial Sequence
  chemically synthesized
gggccacactttgggagccc

SEQ ID NO: 9483 - DNA, 20 bp, Artificial Sequence
  chemically synthesized
ccacactttgggagccctag

SEQ ID NO: 9484 - DNA, 20 bp, Artificial Sequence
  chemically synthesized
cacactttgggagccctagc

SEQ ID NO: 9485 - DNA, 20 bp, Artificial Sequence
  chemically synthesized
ctttgggagccctagcagga

SEQ ID NO: 9486 - DNA, 20 bp, Artificial Sequence
  chemically synthesized
tttgggagccctagcaggaa

SEQ ID NO: 9487 - DNA, 20 bp, Artificial Sequence
  chemically synthesized
gggagccctagcaggaaagg

SEQ ID NO: 9488 - DNA, 20 bp, Artificial Sequence
  chemically synthesized
agccctagcaggaaaggtgg

SEQ ID NO: 9489 - DNA, 20 bp, Artificial Sequence
  chemically synthesized
gccctagcaggaaaggtggt

SEQ ID NO: 9490 - DNA, 20 bp, Artificial Sequence
  chemically synthesized
ctagcaggaaaggtggtagg

SEQ ID NO: 9491 - DNA, 20 bp, Artificial Sequence
  chemically synthesized
aggaaaggtggtaggaagac

SEQ ID NO: 9492 - DNA, 20 bp, Artificial Sequence
  chemically synthesized
taggaagaccagccccgaaa

SEQ ID NO: 9493 - DNA, 20 bp, Artificial Sequence
  chemically synthesized
aggaagaccagccccgaaaa

SEQ ID NO: 9494 - DNA, 20 bp, Artificial Sequence
  chemically synthesized
ggaagaccagccccgaaaaa

SEQ ID NO: 9495 - DNA, 20 bp, Artificial Sequence
  chemically synthesized
agaccagccccgaaaaaggg

SEQ ID NO: 9496 - DNA, 20 bp, Artificial Sequence
  chemically synthesized
accagccccgaaaaagggca

SEQ ID NO: 9497 - DNA, 20 bp, Artificial Sequence
  chemically synthesized
ccgaaaaagggcagagaaaa

SEQ ID NO: 9498 - DNA, 20 bp, Artificial Sequence
  chemically synthesized
cgaaaaagggcagagaaaac

SEQ ID NO: 9499 - DNA, 20 bp, Artificial Sequence
  chemically synthesized
gaaaaagggcagagaaaaca

SEQ ID NO: 9500 - DNA, 20 bp, Artificial Sequence
  chemically synthesized
aagggcagagaaaacaggga

SEQ ID NO: 9501 - DNA, 20 bp, Artificial Sequence
  chemically synthesized
agggcagagaaaacagggaa

SEQ ID NO: 9502 - DNA, 20 bp, Artificial Sequence
  chemically synthesized
gagaaaacagggaaaggaac

SEQ ID NO: 9503 - DNA, 20 bp, Artificial Sequence
  chemically synthesized
agaaaacagggaaaggaaca

SEQ ID NO: 9504 - DNA, 20 bp, Artificial Sequence
  chemically synthesized
aacagggaaaggaacaaggc

SEQ ID NO: 9505 - DNA, 20 bp, Artificial Sequence
  chemically synthesized
agggaaaggaacaaggcaag

SEQ ID NO: 9506 - DNA, 20 bp, Artificial Sequence
  chemically synthesized
aaaggaacaaggcaagaaga

SEQ ID NO: 9507 - DNA, 20 bp, Artificial Sequence
  chemically synthesized
aaggaacaaggcaagaagaa

SEQ ID NO: 9508 - DNA, 20 bp, Artificial Sequence
  chemically synthesized
aggaacaaggcaagaagaaa

SEQ ID NO: 9509 - DNA, 20 bp, Artificial Sequence
  chemically synthesized
caaggcaagaagaaagggca

SEQ ID NO: 9510 - DNA, 20 bp, Artificial Sequence
  chemically synthesized
aaggcaagaagaaagggcaa

SEQ ID NO: 9511 - DNA, 20 bp, Artificial Sequence
  chemically synthesized
caaaggaccattctctgcaa

SEQ ID NO: 9512 - DNA, 20 bp, Artificial Sequence
  chemically synthesized
gaccattctctgcaacagca

SEQ ID NO: 9513 - DNA, 20 bp, Artificial Sequence
  chemically synthesized
accattctctgcaacagcac

SEQ ID NO: 9514 - DNA, 20 bp, Artificial Sequence
  chemically synthesized
tctgcaacagcacaggtgat

SEQ ID NO: 9515 - DNA, 20 bp, Artificial Sequence
  chemically synthesized
ctgcaacagcacaggtgatt

SEQ ID NO: 9516 - DNA, 20 bp, Artificial Sequence
  chemically synthesized
caacagcacaggtgattggg

SEQ ID NO: 9517 - DNA, 20 bp, Artificial Sequence
  chemically synthesized
cagcacaggtgattgggtgg

SEQ ID NO: 9518 - DNA, 20 bp, Artificial Sequence
  chemically synthesized
tgggtggtggttttgttgct

SEQ ID NO: 9519 - DNA, 20 bp, Artificial Sequence
  chemically synthesized
gggtggtggttttgttgctt

SEQ ID NO: 9520 - DNA, 20 bp, Artificial Sequence
  chemically synthesized
ttgttgcttgggttttacca

SEQ ID NO: 9521 - DNA, 20 bp, Artificial Sequence
  chemically synthesized
tgttgcttgggttttaccat

SEQ ID NO: 9522 - DNA, 20 bp, Artificial Sequence
  chemically synthesized
gggttttaccatgggctccc

SEQ ID NO: 9523 - DNA, 20 bp, Artificial Sequence
  chemically synthesized
ggttttaccatgggctcccc

SEQ ID NO: 9524 - DNA, 20 bp, Artificial Sequence
  chemically synthesized
ttaccatgggctccccaggt

SEQ ID NO: 9525 - DNA, 20 bp, Artificial Sequence
  chemically synthesized
ccaggttagcactgccacaa

SEQ ID NO: 9526 - DNA, 20 bp, Artificial Sequence
  chemically synthesized
tagcactgccacaaaagcac

SEQ ID NO: 9527 - DNA, 20 bp, Artificial Sequence
  chemically synthesized
agcactgccacaaaagcacc

SEQ ID NO: 9528 - DNA, 20 bp, Artificial Sequence
  chemically synthesized
aagcaccaggctcttcaaca

SEQ ID NO: 9529 - DNA, 20 bp, Artificial Sequence
  chemically synthesized
caggctcttcaacaaagctc

SEQ ID NO: 9530 - DNA, 20 bp, Artificial Sequence
  chemically synthesized
tcttcaacaaagctccagtt

SEQ ID NO: 9531 - DNA, 20 bp, Artificial Sequence
  chemically synthesized
aacaaagctccagttaagaa

SEQ ID NO: 9532 - DNA, 20 bp, Artificial Sequence
  chemically synthesized
tccagttaagaaaagcattc

SEQ ID NO: 9533 - DNA, 20 bp, Artificial Sequence
  chemically synthesized
attccagccatcaccgataa

SEQ ID NO: 9534 - DNA, 20 bp, Artificial Sequence
  chemically synthesized
agccatcaccgataaaagcg

SEQ ID NO: 9535 - DNA, 20 bp, Artificial Sequence
  chemically synthesized
gccatcaccgataaaagcgt

SEQ ID NO: 9536 - DNA, 20 bp, Artificial Sequence
  chemically synthesized
accgataaaagcgtgggtgc

SEQ ID NO: 9537 - DNA, 20 bp, Artificial Sequence
  chemically synthesized
tgggtgcaagttcctctgca

SEQ ID NO: 9538 - DNA, 20 bp, Artificial Sequence
  chemically synthesized
gttcctctgcaaagcacatg

SEQ ID NO: 9539 - DNA, 20 bp, Artificial Sequence
  chemically synthesized
ttcctctgcaaagcacatgc

SEQ ID NO: 9540 - DNA, 20 bp, Artificial Sequence
  chemically synthesized
aagcacatgcgggccacctc

SEQ ID NO: 9541 - DNA, 20 bp, Artificial Sequence
  chemically synthesized
gggccacctctggctcctgc

SEQ ID NO: 9542 - DNA, 20 bp, Artificial Sequence
  chemically synthesized
cctctggctcctgctggcca

SEQ ID NO: 9543 - DNA, 20 bp, Artificial Sequence
  chemically synthesized
tctggctcctgctggccatg

SEQ ID NO: 9544 - DNA, 20 bp, Artificial Sequence
  chemically synthesized
tggctcctgctggccatgga

SEQ ID NO: 9545 - DNA, 20 bp, Artificial Sequence
  chemically synthesized
ggctcctgctggccatggag

SEQ ID NO: 9546 - DNA, 20 bp, Artificial Sequence
  chemically synthesized
atggagaggccatgtgcgat

SEQ ID NO: 9547 - DNA, 20 bp, Artificial Sequence
  chemically synthesized
gaggccatgtgcgattggta

SEQ ID NO: 9548 - DNA, 20 bp, Artificial Sequence
  chemically synthesized
ccatgtgcgattggtacagt

SEQ ID NO: 9549 - DNA, 20 bp, Artificial Sequence
  chemically synthesized
gtgcgattggtacagtcagc

SEQ ID NO: 9550 - DNA, 20 bp, Artificial Sequence
  chemically synthesized
tgcgattggtacagtcagcc

SEQ ID NO: 9551 - DNA, 20 bp, Artificial Sequence
  chemically synthesized
gtacagtcagccaggaatga

SEQ ID NO: 9552 - DNA, 20 bp, Artificial Sequence
  chemically synthesized
cagtcagccaggaatgaaag

SEQ ID NO: 9553 - DNA, 20 bp, Artificial Sequence
  chemically synthesized
agtcagccaggaatgaaagt

SEQ ID NO: 9554 - DNA, 20 bp, Artificial Sequence
  chemically synthesized
cagccaggaatgaaagtggg

SEQ ID NO: 9555 - DNA, 20 bp, Artificial Sequence
  chemically synthesized
ggaatgaaagtgggaagccc

SEQ ID NO: 9556 - DNA, 20 bp, Artificial Sequence
  chemically synthesized
gaatgaaagtgggaagcccc

SEQ ID NO: 9557 - DNA, 20 bp, Artificial Sequence
  chemically synthesized
aagtgggaagccccaggctc

SEQ ID NO: 9558 - DNA, 20 bp, Artificial Sequence
  chemically synthesized
agtgggaagccccaggctct

SEQ ID NO: 9559 - DNA, 20 bp, Artificial Sequence
  chemically synthesized
gaagccccaggctctgggcc

SEQ ID NO: 9560 - DNA, 20 bp, Artificial Sequence
  chemically synthesized
gggccaagtctaccactgcc

SEQ ID NO: 9561 - DNA, 20 bp, Artificial Sequence
  chemically synthesized
caagtctaccactgcctagc

SEQ ID NO: 9562 - DNA, 20 bp, Artificial Sequence
  chemically synthesized
gtctaccactgcctagcaag

SEQ ID NO: 9563 - DNA, 20 bp, Artificial Sequence
  chemically synthesized
actgcctagcaagtagactc

SEQ ID NO: 9564 - DNA, 20 bp, Artificial Sequence
  chemically synthesized
tctggcactcactcccctct

SEQ ID NO: 9565 - DNA, 20 bp, Artificial Sequence
  chemically synthesized
ctttctcatctgtaaaatga

SEQ ID NO: 9566 - DNA, 20 bp, Artificial Sequence
  chemically synthesized
tttctcatctgtaaaatgac

SEQ ID NO: 9567 - DNA, 20 bp, Artificial Sequence
  chemically synthesized
ttctcatctgtaaaatgaca

SEQ ID NO: 9568 - DNA, 20 bp, Artificial Sequence
  chemically synthesized
ggttaatgatatgacttcac

SEQ ID NO: 9569 - DNA, 20 bp, Artificial Sequence
  chemically synthesized
ttcacaagtctatgtctaca

SEQ ID NO: 9570 - DNA, 20 bp, Artificial Sequence
  chemically synthesized
acaagtctatgtctacatag

SEQ ID NO: 9571 - DNA, 20 bp, Artificial Sequence
  chemically synthesized
ctacatagaagatgctcaat

SEQ ID NO: 9572 - DNA, 20 bp, Artificial Sequence
  chemically synthesized
tgctcaataagtattcactt

SEQ ID NO: 9573 - DNA, 20 bp, Artificial Sequence
  chemically synthesized
attcactttggctttccacg

SEQ ID NO: 9574 - DNA, 20 bp, Artificial Sequence
  chemically synthesized
ttcactttggctttccacga

SEQ ID NO: 9575 - DNA, 20 bp, Artificial Sequence
  chemically synthesized
aaggaaactatctatgctca

SEQ ID NO: 9576 - DNA, 20 bp, Artificial Sequence
  chemically synthesized
ggaaactatctatgctcaaa

SEQ ID NO: 9577 - DNA, 20 bp, Artificial Sequence
  chemically synthesized
tgctttcttctatgattcct

SEQ ID NO: 9578 - DNA, 20 bp, Artificial Sequence
  chemically synthesized
cctcagaaactcttgtcgac

SEQ ID NO: 9579 - DNA, 20 bp, Artificial Sequence
  chemically synthesized
tcagaaactcttgtcgacta

SEQ ID NO: 9580 - DNA, 20 bp, Artificial Sequence
  chemically synthesized
cagaaactcttgtcgactag

SEQ ID NO: 9581 - DNA, 20 bp, Artificial Sequence
  chemically synthesized
ctcttgtcgactagaggaac

SEQ ID NO: 9582 - DNA, 20 bp, Artificial Sequence
  chemically synthesized
cttactctaaaacccaattt

SEQ ID NO: 9583 - DNA, 20 bp, Artificial Sequence
  chemically synthesized
ttactctaaaacccaatttt

SEQ ID NO: 9584 - DNA, 20 bp, Artificial Sequence
  chemically synthesized
tactctaaaacccaatttta

SEQ ID NO: 9585 - DNA, 20 bp, Artificial Sequence
  chemically synthesized
actctaaaacccaattttag

SEQ ID NO: 9586 - DNA, 20 bp, Artificial Sequence
  chemically synthesized
tctaaaacccaattttaggg

SEQ ID NO: 9587 - DNA, 20 bp, Artificial Sequence
  chemically synthesized
ctaaaacccaattttagggg

SEQ ID NO: 9588 - DNA, 20 bp, Artificial Sequence
  chemically synthesized
aaaacccaattttaggggag

SEQ ID NO: 9589 - DNA, 20 bp, Artificial Sequence
  chemically synthesized
aacccaattttaggggagga

SEQ ID NO: 9590 - DNA, 20 bp, Artificial Sequence
  chemically synthesized
ggaggagagaaaatttttaa

SEQ ID NO: 9591 - DNA, 20 bp, Artificial Sequence
  chemically synthesized
gactttaaattaattacttg

SEQ ID NO: 9592 - DNA, 20 bp, Artificial Sequence
  chemically synthesized
actttaaattaattacttga

SEQ ID NO: 9593 - DNA, 20 bp, Artificial Sequence
  chemically synthesized
taaattaattacttgaaggc

SEQ ID NO: 9594 - DNA, 20 bp, Artificial Sequence
  chemically synthesized
aattaattacttgaaggcca

SEQ ID NO: 9595 - DNA, 20 bp, Artificial Sequence
  chemically synthesized
attaattacttgaaggccag

SEQ ID NO: 9596 - DNA, 20 bp, Artificial Sequence
  chemically synthesized
tttgcttatgcctataatct

SEQ ID NO: 9597 - DNA, 20 bp, Artificial Sequence
  chemically synthesized
tgcctataatctcagaaatt

SEQ ID NO: 9598 - DNA, 20 bp, Artificial Sequence
  chemically synthesized
ctataatctcagaaatttgg

SEQ ID NO: 9599 - DNA, 20 bp, Artificial Sequence
  chemically synthesized
tataatctcagaaatttgga

SEQ ID NO: 9600 - DNA, 20 bp, Artificial Sequence
  chemically synthesized
ctcagaaatttggaaggcca

SEQ ID NO: 9601 - DNA, 20 bp, Artificial Sequence
  chemically synthesized
cagaaatttggaaggccaca

SEQ ID NO: 9602 - DNA, 20 bp, Artificial Sequence
  chemically synthesized
agaaatttggaaggccacag

SEQ ID NO: 9603 - DNA, 20 bp, Artificial Sequence
  chemically synthesized
gaaatttggaaggccacaga

SEQ ID NO: 9604 - DNA, 20 bp, Artificial Sequence
  chemically synthesized
atttggaaggccacagaggg

SEQ ID NO: 9605 - DNA, 20 bp, Artificial Sequence
  chemically synthesized
cacagagggaagattgcttg

SEQ ID NO: 9606 - DNA, 20 bp, Artificial Sequence
  chemically synthesized
gagggaagattgcttgaagc

SEQ ID NO: 9607 - DNA, 20 bp, Artificial Sequence
  chemically synthesized
agggaagattgcttgaagct

SEQ ID NO: 9608 - DNA, 20 bp, Artificial Sequence
  chemically synthesized
ggaagattgcttgaagctag

SEQ ID NO: 9609 - DNA, 20 bp, Artificial Sequence
  chemically synthesized
ttgcttgaagctaggagttc

SEQ ID NO: 9610 - DNA, 20 bp, Artificial Sequence
  chemically synthesized
tgaagctaggagttcaagac

SEQ ID NO: 9611 - DNA, 20 bp, Artificial Sequence
  chemically synthesized
ctaggagttcaagaccagcc

SEQ ID NO: 9612 - DNA, 20 bp, Artificial Sequence
  chemically synthesized
taggagttcaagaccagcct

SEQ ID NO: 9613 - DNA, 20 bp, Artificial Sequence
  chemically synthesized
caagaccagcctgggcaaca

SEQ ID NO: 9614 - DNA, 20 bp, Artificial Sequence
  chemically synthesized
caaaaccctgtctctacaaa

SEQ ID NO: 9615 - DNA, 20 bp, Artificial Sequence
  chemically synthesized
aataaaataaaataattgct

SEQ ID NO: 9616 - DNA, 20 bp, Artificial Sequence
  chemically synthesized
ataaaataattgctgagatt

SEQ ID NO: 9617 - DNA, 20 bp, Artificial Sequence
  chemically synthesized
gagatttagctatcttttca

SEQ ID NO: 9618 - DNA, 20 bp, Artificial Sequence
  chemically synthesized
ttcaaagaaaatataaaatt

SEQ ID NO: 9619 - DNA, 20 bp, Artificial Sequence
  chemically synthesized
agaaaatataaaatttggcc

SEQ ID NO: 9620 - DNA, 20 bp, Artificial Sequence
  chemically synthesized
agttttttatctatcaaacc

SEQ ID NO: 9621 - DNA, 20 bp, Artificial Sequence
  chemically synthesized
tccctctgtcaacatctgct

SEQ ID NO: 9622 - DNA, 20 bp, Artificial Sequence
  chemically synthesized
tcataatacataaaacatca

SEQ ID NO: 9623 - DNA, 20 bp, Artificial Sequence
  chemically synthesized
tacataaaacatcatagata

SEQ ID NO: 9624 - DNA, 20 bp, Artificial Sequence
  chemically synthesized
acataaaacatcatagataa

SEQ ID NO: 9625 - DNA, 20 bp, Artificial Sequence
  chemically synthesized
ataaaacatcatagataaag

SEQ ID NO: 9626 - DNA, 20 bp, Artificial Sequence
  chemically synthesized
catcatagataaaggagtca

SEQ ID NO: 9627 - DNA, 20 bp, Artificial Sequence
  chemically synthesized
atcatagataaaggagtcac

SEQ ID NO: 9628 - DNA, 20 bp, Artificial Sequence
  chemically synthesized
agataaaggagtcacaggat

SEQ ID NO: 9629 - DNA, 20 bp, Artificial Sequence
  chemically synthesized
ttagacctaccgttccatac

SEQ ID NO: 9630 - DNA, 20 bp, Artificial Sequence
  chemically synthesized
cgttccataccagtgtgtta

SEQ ID NO: 9631 - DNA, 20 bp, Artificial Sequence
  chemically synthesized
gtgtgttacagcctgtcatg

SEQ ID NO: 9632 - DNA, 20 bp, Artificial Sequence
  chemically synthesized
tgttacagcctgtcatgaag

SEQ ID NO: 9633 - DNA, 20 bp, Artificial Sequence
  chemically synthesized
agcctgtcatgaagcagact

SEQ ID NO: 9634 - DNA, 20 bp, Artificial Sequence
  chemically synthesized
cctgtcatgaagcagactca

SEQ ID NO: 9635 - DNA, 20 bp, Artificial Sequence
  chemically synthesized
tgaagcagactcagagaatt

SEQ ID NO: 9636 - DNA, 20 bp, Artificial Sequence
  chemically synthesized
cagagaatttggctactact

SEQ ID NO: 9637 - DNA, 20 bp, Artificial Sequence
  chemically synthesized
cttagtactaacatttaatt

SEQ ID NO: 9638 - DNA, 20 bp, Artificial Sequence
  chemically synthesized
tagttttaaaatgtctgcga

SEQ ID NO: 9639 - DNA, 20 bp, Artificial Sequence
  chemically synthesized
gttttaaaatgtctgcgata

SEQ ID NO: 9640 - DNA, 20 bp, Artificial Sequence
  chemically synthesized
ttaaaatgtctgcgatagag

SEQ ID NO: 9641 - DNA, 20 bp, Artificial Sequence
  chemically synthesized
tgtctgcgatagagcagatt

SEQ ID NO: 9642 - DNA, 20 bp, Artificial Sequence
  chemically synthesized
gtctgcgatagagcagattc

SEQ ID NO: 9643 - DNA, 20 bp, Artificial Sequence
  chemically synthesized
agattcaggattatgcctgt

SEQ ID NO: 9644 - DNA, 20 bp, Artificial Sequence
  chemically synthesized
cctgcatttaaatatgaata

SEQ ID NO: 9645 - DNA, 20 bp, Artificial Sequence
  chemically synthesized
tgcatttaaatatgaataaa

SEQ ID NO: 9646 - DNA, 20 bp, Artificial Sequence
  chemically synthesized
tttaaatatgaataaagagt

SEQ ID NO: 9647 - DNA, 20 bp, Artificial Sequence
  chemically synthesized
aaatatgaataaagagtgag

SEQ ID NO: 9648 - DNA, 20 bp, Artificial Sequence
  chemically synthesized
tatgaataaagagtgagcag

SEQ ID NO: 9649 - DNA, 20 bp, Artificial Sequence
  chemically synthesized
atgaataaagagtgagcaga

SEQ ID NO: 9650 - DNA, 20 bp, Artificial Sequence
  chemically synthesized
tgaataaagagtgagcagaa

SEQ ID NO: 9651 - DNA, 20 bp, Artificial Sequence
  chemically synthesized
aaagagtgagcagaagggac

SEQ ID NO: 9652 - DNA, 20 bp, Artificial Sequence
  chemically synthesized
aagagtgagcagaagggacc

SEQ ID NO: 9653 - DNA, 20 bp, Artificial Sequence
  chemically synthesized
cagaagggaccaggtaaaaa

SEQ ID NO: 9654 - DNA, 20 bp, Artificial Sequence
  chemically synthesized
gaccaggtaaaaatggcaca

SEQ ID NO: 9655 - DNA, 20 bp, Artificial Sequence
  chemically synthesized
accaggtaaaaatggcacat

SEQ ID NO: 9656 - DNA, 20 bp, Artificial Sequence
  chemically synthesized
caggtaaaaatggcacatgg

SEQ ID NO: 9657 - DNA, 20 bp, Artificial Sequence
  chemically synthesized
aggtaaaaatggcacatggg

SEQ ID NO: 9658 - DNA, 20 bp, Artificial Sequence
  chemically synthesized
ggtaaaaatggcacatggga

SEQ ID NO: 9659 - DNA, 20 bp, Artificial Sequence
  chemically synthesized
ggcatcgcacatgtgaattt

SEQ ID NO: 9660 - DNA, 20 bp, Artificial Sequence
  chemically synthesized
attttagcttcccacacgca

SEQ ID NO: 9661 - DNA, 20 bp, Artificial Sequence
  chemically synthesized
ttttagcttcccacacgcaa

SEQ ID NO: 9662 - DNA, 20 bp, Artificial Sequence
  chemically synthesized
gcttcccacacgcaaaggca

SEQ ID NO: 9663 - DNA, 20 bp, Artificial Sequence
  chemically synthesized
cttcccacacgcaaaggcat

SEQ ID NO: 9664 - DNA, 20 bp, Artificial Sequence
  chemically synthesized
ttcccacacgcaaaggcatg

SEQ ID NO: 9665 - DNA, 20 bp, Artificial Sequence
  chemically synthesized
tcccacacgcaaaggcatgg

SEQ ID NO: 9666 - DNA, 20 bp, Artificial Sequence
  chemically synthesized
cccacacgcaaaggcatggg

SEQ ID NO: 9667 - DNA, 20 bp, Artificial Sequence
  chemically synthesized
acgcaaaggcatggggggac

SEQ ID NO: 9668 - DNA, 20 bp, Artificial Sequence
  chemically synthesized
cgcaaaggcatggggggaca

SEQ ID NO: 9669 - DNA, 20 bp, Artificial Sequence
  chemically synthesized
aaaggcatggggggacaagg

SEQ ID NO: 9670 - DNA, 20 bp, Artificial Sequence
  chemically synthesized
aaggcatggggggacaaggc

SEQ ID NO: 9671 - DNA, 20 bp, Artificial Sequence
  chemically synthesized
gcatggggggacaaggcagg

SEQ ID NO: 9672 - DNA, 20 bp, Artificial Sequence
  chemically synthesized
caaggcaggaagcattgctc

SEQ ID NO: 9673 - DNA, 20 bp, Artificial Sequence
  chemically synthesized
ggaagcattgctctagatct

SEQ ID NO: 9674 - DNA, 20 bp, Artificial Sequence
  chemically synthesized
atctgagaatcaccacacac

SEQ ID NO: 9675 - DNA, 20 bp, Artificial Sequence
  chemically synthesized
ctgagaatcaccacacacca

SEQ ID NO: 9676 - DNA, 20 bp, Artificial Sequence
  chemically synthesized
gagaatcaccacacaccaga

SEQ ID NO: 9677 - DNA, 20 bp, Artificial Sequence
  chemically synthesized
agaatcaccacacaccagag

SEQ ID NO: 9678 - DNA, 20 bp, Artificial Sequence
  chemically synthesized
gaatcaccacacaccagaga

SEQ ID NO: 9679 - DNA, 20 bp, Artificial Sequence
  chemically synthesized
accacacaccagagagggca

SEQ ID NO: 9680 - DNA, 20 bp, Artificial Sequence
  chemically synthesized
ccacacaccagagagggcat

SEQ ID NO: 9681 - DNA, 20 bp, Artificial Sequence
  chemically synthesized
acacaccagagagggcatgg

SEQ ID NO: 9682 - DNA, 20 bp, Artificial Sequence
  chemically synthesized
cacaccagagagggcatggg

SEQ ID NO: 9683 - DNA, 20 bp, Artificial Sequence
  chemically synthesized
tgggaggtgacacacaaacc

SEQ ID NO: 9684 - DNA, 20 bp, Artificial Sequence
  chemically synthesized
gaggtgacacacaaacccag

SEQ ID NO: 9685 - DNA, 20 bp, Artificial Sequence
  chemically synthesized
ggtgacacacaaacccagca

SEQ ID NO: 9686 - DNA, 20 bp, Artificial Sequence
  chemically synthesized
caaacccagcagagaacgtt

SEQ ID NO: 9687 - DNA, 20 bp, Artificial Sequence
  chemically synthesized
cccagcagagaacgttgaga

SEQ ID NO: 9688 - DNA, 20 bp, Artificial Sequence
  chemically synthesized
cagcagagaacgttgagaaa

SEQ ID NO: 9689 - DNA, 20 bp, Artificial Sequence
  chemically synthesized
gaacgttgagaaagagtttt

SEQ ID NO: 9690 - DNA, 20 bp, Artificial Sequence
  chemically synthesized
acgttgagaaagagttttaa

SEQ ID NO: 9691 - DNA, 20 bp, Artificial Sequence
  chemically synthesized
tttaagagcctactcatcat

SEQ ID NO: 9692 - DNA, 20 bp, Artificial Sequence
  chemically synthesized
taagagcctactcatcatca

SEQ ID NO: 9693 - DNA, 20 bp, Artificial Sequence
  chemically synthesized
catcatcagagttcacttaa

SEQ ID NO: 9694 - DNA, 20 bp, Artificial Sequence
  chemically synthesized
agttcacttaaaagtccatc

SEQ ID NO: 9695 - DNA, 20 bp, Artificial Sequence
  chemically synthesized
cttaaaagtccatccagaat

SEQ ID NO: 9696 - DNA, 20 bp, Artificial Sequence
  chemically synthesized
gtccatccagaatcagaacg

SEQ ID NO: 9697 - DNA, 20 bp, Artificial Sequence
  chemically synthesized
tccatccagaatcagaacgt

SEQ ID NO: 9698 - DNA, 20 bp, Artificial Sequence
  chemically synthesized
tccagaatcagaacgtggga

SEQ ID NO: 9699 - DNA, 20 bp, Artificial Sequence
  chemically synthesized
ccagaatcagaacgtgggat

SEQ ID NO: 9700 - DNA, 20 bp, Artificial Sequence
  chemically synthesized
cagaatcagaacgtgggatg

SEQ ID NO: 9701 - DNA, 20 bp, Artificial Sequence
  chemically synthesized
aacgtgggatggggtgcccc

SEQ ID NO: 9702 - DNA, 20 bp, Artificial Sequence
  chemically synthesized
acgtgggatggggtgcccca

SEQ ID NO: 9703 - DNA, 20 bp, Artificial Sequence
  chemically synthesized
ggggtgccccaaggcattcc

SEQ ID NO: 9704 - DNA, 20 bp, Artificial Sequence
  chemically synthesized
gggtgccccaaggcattcct

SEQ ID NO: 9705 - DNA, 20 bp, Artificial Sequence
  chemically synthesized
ggtgccccaaggcattcctg

SEQ ID NO: 9706 - DNA, 20 bp, Artificial Sequence
  chemically synthesized
gtgccccaaggcattcctgg

SEQ ID NO: 9707 - DNA, 20 bp, Artificial Sequence
  chemically synthesized
cccaaggcattcctgggggc

SEQ ID NO: 9708 - DNA, 20 bp, Artificial Sequence
  chemically synthesized
ccaaggcattcctgggggcc

SEQ ID NO: 9709 - DNA, 20 bp, Artificial Sequence
  chemically synthesized
gcattcctgggggccgggcg

SEQ ID NO: 9710 - DNA, 20 bp, Artificial Sequence
  chemically synthesized
gggggccgggcgtggatttt

SEQ ID NO: 9711 - DNA, 20 bp, Artificial Sequence
  chemically synthesized
ggggccgggcgtggatttta

SEQ ID NO: 9712 - DNA, 20 bp, Artificial Sequence
  chemically synthesized
ggactcatcaattactgttc

SEQ ID NO: 9713 - DNA, 20 bp, Artificial Sequence
  chemically synthesized
catcaattactgttcaagtt

SEQ ID NO: 9714 - DNA, 20 bp, Artificial Sequence
  chemically synthesized
atcaattactgttcaagttc

SEQ ID NO: 9715 - DNA, 20 bp, Artificial Sequence
  chemically synthesized
ttactgttcaagttcaggtc

SEQ ID NO: 9716 - DNA, 20 bp, Artificial Sequence
  chemically synthesized
tgttcaagttcaggtcaagc

SEQ ID NO: 9717 - DNA, 20 bp, Artificial Sequence
  chemically synthesized
caagttcaggtcaagctgga

SEQ ID NO: 9718 - DNA, 20 bp, Artificial Sequence
  chemically synthesized
ctggatggacaccatccaca

SEQ ID NO: 9719 - DNA, 20 bp, Artificial Sequence
  chemically synthesized
atccacatggtgttgctcga

SEQ ID NO: 9720 - DNA, 20 bp, Artificial Sequence
  chemically synthesized
tccacatggtgttgctcgat

SEQ ID NO: 9721 - DNA, 20 bp, Artificial Sequence
  chemically synthesized
atggtgttgctcgatgggca

SEQ ID NO: 9722 - DNA, 20 bp, Artificial Sequence
  chemically synthesized
ttgctcgatgggcaaagatc

SEQ ID NO: 9723 - DNA, 20 bp, Artificial Sequence
  chemically synthesized
gctcgatgggcaaagatcaa

SEQ ID NO: 9724 - DNA, 20 bp, Artificial Sequence
  chemically synthesized
ctcgatgggcaaagatcaag

SEQ ID NO: 9725 - DNA, 20 bp, Artificial Sequence
  chemically synthesized
gatgggcaaagatcaagagg

SEQ ID NO: 9726 - DNA, 20 bp, Artificial Sequence
  chemically synthesized
aagaggcagtcgttcaccac

SEQ ID NO: 9727 - DNA, 20 bp, Artificial Sequence
  chemically synthesized
tcaccaccagccgtatttcc

SEQ ID NO: 9728 - DNA, 20 bp, Artificial Sequence
  chemically synthesized
caccaccagccgtatttcct

SEQ ID NO: 9729 - DNA, 20 bp, Artificial Sequence
  chemically synthesized
accaccagccgtatttcctg

SEQ ID NO: 9730 - DNA, 20 bp, Artificial Sequence
  chemically synthesized
ttactgacattctgtcattc

SEQ ID NO: 9731 - DNA, 20 bp, Artificial Sequence
  chemically synthesized
tactgacattctgtcattca

SEQ ID NO: 9732 - DNA, 20 bp, Artificial Sequence
  chemically synthesized
tgacattctgtcattcaagg

SEQ ID NO: 9733 - DNA, 20 bp, Artificial Sequence
  chemically synthesized
gacattctgtcattcaaggt

SEQ ID NO: 9734 - DNA, 20 bp, Artificial Sequence
  chemically synthesized
gtcattcaaggtgggtcctg

SEQ ID NO: 9735 - DNA, 20 bp, Artificial Sequence
  chemically synthesized
caaggtgggtcctgaagcca

SEQ ID NO: 9736 - DNA, 20 bp, Artificial Sequence
  chemically synthesized
gtgggtcctgaagccacagt

SEQ ID NO: 9737 - DNA, 20 bp, Artificial Sequence
  chemically synthesized
aatctgctccctacaatcca

SEQ ID NO: 9738 - DNA, 20 bp, Artificial Sequence
  chemically synthesized
ctccctacaatccacagcaa

SEQ ID NO: 9739 - DNA, 20 bp, Artificial Sequence
  chemically synthesized
tccctacaatccacagcaaa

SEQ ID NO: 9740 - DNA, 20 bp, Artificial Sequence
  chemically synthesized
cctacaatccacagcaaaag

SEQ ID NO: 9741 - DNA, 20 bp, Artificial Sequence
  chemically synthesized
tacaatccacagcaaaagga

SEQ ID NO: 9742 - DNA, 20 bp, Artificial Sequence
  chemically synthesized
aaggagagttccttctttta

SEQ ID NO: 9743 - DNA, 20 bp, Artificial Sequence
  chemically synthesized
ggagagttccttcttttaaa

SEQ ID NO: 9744 - DNA, 20 bp, Artificial Sequence
  chemically synthesized
ttccttcttttaaagagcga

SEQ ID NO: 9745 - DNA, 20 bp, Artificial Sequence
  chemically synthesized
gcacacatctctcaactctt

SEQ ID NO: 9746 - DNA, 20 bp, Artificial Sequence
  chemically synthesized
acacatctctcaactcttga

SEQ ID NO: 9747 - DNA, 20 bp, Artificial Sequence
  chemically synthesized
tctcaactcttgagagaaaa

SEQ ID NO: 9748 - DNA, 20 bp, Artificial Sequence
  chemically synthesized
aactcttgagagaaaatgga

SEQ ID NO: 9749 - DNA, 20 bp, Artificial Sequence
  chemically synthesized
tcttgagagaaaatggacag

SEQ ID NO: 9750 - DNA, 20 bp, Artificial Sequence
  chemically synthesized
tgagagaaaatggacagaag

SEQ ID NO: 9751 - DNA, 20 bp, Artificial Sequence
  chemically synthesized
gagagaaaatggacagaagt

SEQ ID NO: 9752 - DNA, 20 bp, Artificial Sequence
  chemically synthesized
ggatttttcaatcctgatac

SEQ ID NO: 9753 - DNA, 20 bp, Artificial Sequence
  chemically synthesized
tttttcaatcctgataccag

SEQ ID NO: 9754 - DNA, 20 bp, Artificial Sequence
  chemically synthesized
ttttcaatcctgataccagc

SEQ ID NO: 9755 - DNA, 20 bp, Artificial Sequence
  chemically synthesized
atcctgataccagcaggaaa

SEQ ID NO: 9756 - DNA, 20 bp, Artificial Sequence
  chemically synthesized
tcctgataccagcaggaaac

SEQ ID NO: 9757 - DNA, 20 bp, Artificial Sequence
  chemically synthesized
cctgataccagcaggaaaca

SEQ ID NO: 9758 - DNA, 20 bp, Artificial Sequence
  chemically synthesized
tgataccagcaggaaacagg

SEQ ID NO: 9759 - DNA, 20 bp, Artificial Sequence
  chemically synthesized
agcaggaaacagggagtctc

SEQ ID NO: 9760 - DNA, 20 bp, Artificial Sequence
  chemically synthesized
aggaaacagggagtctctgg

SEQ ID NO: 9761 - DNA, 20 bp, Artificial Sequence
  chemically synthesized
ggaaacagggagtctctggt

SEQ ID NO: 9762 - DNA, 20 bp, Artificial Sequence
  chemically synthesized
ctggtaggtactaccaaacc

SEQ ID NO: 9763 - DNA, 20 bp, Artificial Sequence
  chemically synthesized
gtaggtactaccaaaccaag

SEQ ID NO: 9764 - DNA, 20 bp, Artificial Sequence
  chemically synthesized
caagaagcttcttttctccc

SEQ ID NO: 9765 - DNA, 20 bp, Artificial Sequence
  chemically synthesized
ttcttttctcccaagtacac

SEQ ID NO: 9766 - DNA, 20 bp, Artificial Sequence
  chemically synthesized
tcttttctcccaagtacacc

SEQ ID NO: 9767 - DNA, 20 bp, Artificial Sequence
  chemically synthesized
ccaggaacccctttcaaata

SEQ ID NO: 9768 - DNA, 20 bp, Artificial Sequence
  chemically synthesized
caggaacccctttcaaatac

SEQ ID NO: 9769 - DNA, 20 bp, Artificial Sequence
  chemically synthesized
aaatacaggcgctacaaaaa

SEQ ID NO: 9770 - DNA, 20 bp, Artificial Sequence
  chemically synthesized
aggcgctacaaaaaaagaaa

SEQ ID NO: 9771 - DNA, 20 bp, Artificial Sequence
  chemically synthesized
ggcgctacaaaaaaagaaat

SEQ ID NO: 9772 - DNA, 20 bp, Artificial Sequence
  chemically synthesized
aaaaaaagaaataggtgtga

SEQ ID NO: 9773 - DNA, 20 bp, Artificial Sequence
  chemically synthesized
aaaagaaataggtgtgaaag

SEQ ID NO: 9774 - DNA, 20 bp, Artificial Sequence
  chemically synthesized
aaagaaataggtgtgaaagc

SEQ ID NO: 9775 - DNA, 20 bp, Artificial Sequence
  chemically synthesized
aagaaataggtgtgaaagcg

SEQ ID NO: 9776 - DNA, 20 bp, Artificial Sequence
  chemically synthesized
aataggtgtgaaagcggggc

SEQ ID NO: 9777 - DNA, 20 bp, Artificial Sequence
  chemically synthesized
ggtgtgaaagcggggcaaga

SEQ ID NO: 9778 - DNA, 20 bp, Artificial Sequence
  chemically synthesized
gtgtgaaagcggggcaagaa

SEQ ID NO: 9779 - DNA, 20 bp, Artificial Sequence
  chemically synthesized
tgtgaaagcggggcaagaaa

SEQ ID NO: 9780 - DNA, 20 bp, Artificial Sequence
  chemically synthesized
cggggcaagaaagggaacct

SEQ ID NO: 9781 - DNA, 20 bp, Artificial Sequence
  chemically synthesized
ggggcaagaaagggaacctg

SEQ ID NO: 9782 - DNA, 20 bp, Artificial Sequence
  chemically synthesized
gactatgcatgctctgtcta

SEQ ID NO: 9783 - DNA, 20 bp, Artificial Sequence
  chemically synthesized
actatgcatgctctgtctat

SEQ ID NO: 9784 - DNA, 20 bp, Artificial Sequence
  chemically synthesized
ctatgggtatcaacaccttt

SEQ ID NO: 9785 - DNA, 20 bp, Artificial Sequence
  chemically synthesized
tatgggtatcaacaccttta

SEQ ID NO: 9786 - DNA, 20 bp, Artificial Sequence
  chemically synthesized
aacacctttaaggcattttg

SEQ ID NO: 9787 - DNA, 20 bp, Artificial Sequence
  chemically synthesized
gattctataacctccatatt

SEQ ID NO: 9788 - DNA, 20 bp, Artificial Sequence
  chemically synthesized
ttctataacctccatattga

SEQ ID NO: 9789 - DNA, 20 bp, Artificial Sequence
  chemically synthesized
atattgagagacataaaaca

SEQ ID NO: 9790 - DNA, 20 bp, Artificial Sequence
  chemically synthesized
acacagaacattacacctgt

SEQ ID NO: 9791 - DNA, 20 bp, Artificial Sequence
  chemically synthesized
cacagaacattacacctgtc

SEQ ID NO: 9792 - DNA, 20 bp, Artificial Sequence
  chemically synthesized
acattacacctgtcaggtgc

SEQ ID NO: 9793 - DNA, 20 bp, Artificial Sequence
  chemically synthesized
cattacacctgtcaggtgct

SEQ ID NO: 9794 - DNA, 20 bp, Artificial Sequence
  chemically synthesized
gctgggccctgaactatctc

SEQ ID NO: 9795 - DNA, 20 bp, Artificial Sequence
  chemically synthesized
ctgggccctgaactatctcc

SEQ ID NO: 9796 - DNA, 20 bp, Artificial Sequence
  chemically synthesized
ggccctgaactatctccagg

SEQ ID NO: 9797 - DNA, 20 bp, Artificial Sequence
  chemically synthesized
aactatctccaggcagctga

SEQ ID NO: 9798 - DNA, 20 bp, Artificial Sequence
  chemically synthesized
atctccaggcagctgaaagt

SEQ ID NO: 9799 - DNA, 20 bp, Artificial Sequence
  chemically synthesized
gcagctgaaagtcagtacat

SEQ ID NO: 9800 - DNA, 20 bp, Artificial Sequence
  chemically synthesized
tcagctttttaatgatgtga

SEQ ID NO: 9801 - DNA, 20 bp, Artificial Sequence
  chemically synthesized
ttttaatgatgtgaaagtta

SEQ ID NO: 9802 - DNA, 20 bp, Artificial Sequence
  chemically synthesized
gttaaagattaaaaacatgt

SEQ ID NO: 9803 - DNA, 20 bp, Artificial Sequence
  chemically synthesized
gttggaacgcttactttatg

SEQ ID NO: 9804 - DNA, 20 bp, Artificial Sequence
  chemically synthesized
aaaatgtgtctataacctgt

SEQ ID NO: 9805 - DNA, 20 bp, Artificial Sequence
  chemically synthesized
aaatgtgtctataacctgta

SEQ ID NO: 9806 - DNA, 20 bp, Artificial Sequence
  chemically synthesized
atgtgtctataacctgtaag

SEQ ID NO: 9807 - DNA, 20 bp, Artificial Sequence
  chemically synthesized
gtgtctataacctgtaagga

SEQ ID NO: 9808 - DNA, 20 bp, Artificial Sequence
  chemically synthesized
ctataacctgtaaggagaga

SEQ ID NO: 9809 - DNA, 20 bp, Artificial Sequence
  chemically synthesized
tataacctgtaaggagagat

SEQ ID NO: 9810 - DNA, 20 bp, Artificial Sequence
  chemically synthesized
cctgtaaggagagatgggtg

SEQ ID NO: 9811 - DNA, 20 bp, Artificial Sequence
  chemically synthesized
gagatgggtgtggaacatcg

SEQ ID NO: 9812 - DNA, 20 bp, Artificial Sequence
  chemically synthesized
agatgggtgtggaacatcgt

SEQ ID NO: 9813 - DNA, 20 bp, Artificial Sequence
  chemically synthesized
gtgtggaacatcgtaggaaa

SEQ ID NO: 9814 - DNA, 20 bp, Artificial Sequence
  chemically synthesized
tgtggaacatcgtaggaaaa

SEQ ID NO: 9815 - DNA, 20 bp, Artificial Sequence
  chemically synthesized
aggtgactgcactcatgctg

SEQ ID NO: 9816 - DNA, 20 bp, Artificial Sequence
  chemically synthesized
gtgactgcactcatgctgca

SEQ ID NO: 9817 - DNA, 20 bp, Artificial Sequence
  chemically synthesized
tcatgctgcagagaaaaaat

SEQ ID NO: 9818 - DNA, 20 bp, Artificial Sequence
  chemically synthesized
catgctgcagagaaaaaata

SEQ ID NO: 9819 - DNA, 20 bp, Artificial Sequence
  chemically synthesized
tgcctgccttctttccttac

SEQ ID NO: 9820 - DNA, 20 bp, Artificial Sequence
  chemically synthesized
cctgccttctttccttacaa

SEQ ID NO: 9821 - DNA, 20 bp, Artificial Sequence
  chemically synthesized
aaatctgacgtgctttgcaa

SEQ ID NO: 9822 - DNA, 20 bp, Artificial Sequence
  chemically synthesized
tctgacgtgctttgcaacag

SEQ ID NO: 9823 - DNA, 20 bp, Artificial Sequence
  chemically synthesized
acgtgctttgcaacagcagt

SEQ ID NO: 9824 - DNA, 20 bp, Artificial Sequence
  chemically synthesized
aacagcagtaagttgaccac

SEQ ID NO: 9825 - DNA, 20 bp, Artificial Sequence
  chemically synthesized
cagcagtaagttgaccactg

SEQ ID NO: 9826 - DNA, 20 bp, Artificial Sequence
  chemically synthesized
agtaagttgaccactggaga

SEQ ID NO: 9827 - DNA, 20 bp, Artificial Sequence
  chemically synthesized
agttgaccactggagaaagt

SEQ ID NO: 9828 - DNA, 20 bp, Artificial Sequence
  chemically synthesized
gttgaccactggagaaagtg

SEQ ID NO: 9829 - DNA, 20 bp, Artificial Sequence
  chemically synthesized
accactggagaaagtgaggc

SEQ ID NO: 9830 - DNA, 20 bp, Artificial Sequence
  chemically synthesized
gaaagtgaggctggaaccac

SEQ ID NO: 9831 - DNA, 20 bp, Artificial Sequence
  chemically synthesized
ctggaaccactggaatcttg

SEQ ID NO: 9832 - DNA, 20 bp, Artificial Sequence
  chemically synthesized
ctggaatcttgtagatttct

SEQ ID NO: 9833 - DNA, 20 bp, Artificial Sequence
  chemically synthesized
tggaatcttgtagatttctg

SEQ ID NO: 9834 - DNA, 20 bp, Artificial Sequence
  chemically synthesized
atcttgtagatttctgaggc

SEQ ID NO: 9835 - DNA, 20 bp, Artificial Sequence
  chemically synthesized
cagttctgttctgacacatg

SEQ ID NO: 9836 - DNA, 20 bp, Artificial Sequence
  chemically synthesized
tctgttctgacacatgcagc

SEQ ID NO: 9837 - DNA, 20 bp, Artificial Sequence
  chemically synthesized
ctgttctgacacatgcagct

SEQ ID NO: 9838 - DNA, 20 bp, Artificial Sequence
  chemically synthesized
gttctgacacatgcagctgg

SEQ ID NO: 9839 - DNA, 20 bp, Artificial Sequence
  chemically synthesized
cacatgcagctgggagccac

SEQ ID NO: 9840 - DNA, 20 bp, Artificial Sequence
  chemically synthesized
gcagctgggagccactggtt

SEQ ID NO: 9841 - DNA, 20 bp, Artificial Sequence
  chemically synthesized
cagctgggagccactggttt

SEQ ID NO: 9842 - DNA, 20 bp, Artificial Sequence
  chemically synthesized
cactggtttaggaattcacg

SEQ ID NO: 9843 - DNA, 20 bp, Artificial Sequence
  chemically synthesized
actggtttaggaattcacgt

SEQ ID NO: 9844 - DNA, 20 bp, Artificial Sequence
  chemically synthesized
tttaggaattcacgtgggca

SEQ ID NO: 9845 - DNA, 20 bp, Artificial Sequence
  chemically synthesized
ttaggaattcacgtgggcat

SEQ ID NO: 9846 - DNA, 20 bp, Artificial Sequence
  chemically synthesized
ggcatgggactgtgcttatt

SEQ ID NO: 9847 - DNA, 20 bp, Artificial Sequence
  chemically synthesized
tgggactgtgcttattcaga

SEQ ID NO: 9848 - DNA, 20 bp, Artificial Sequence
  chemically synthesized
gggactgtgcttattcagaa

SEQ ID NO: 9849 - DNA, 20 bp, Artificial Sequence
  chemically synthesized
ggactgtgcttattcagaaa

SEQ ID NO: 9850 - DNA, 20 bp, Artificial Sequence
  chemically synthesized
gcttattcagaaagggctcc

SEQ ID NO: 9851 - DNA, 20 bp, Artificial Sequence
  chemically synthesized
cctaaattactccaatgaca

SEQ ID NO: 9852 - DNA, 20 bp, Artificial Sequence
  chemically synthesized
ctccaatgacaaagaaaact

SEQ ID NO: 9853 - DNA, 20 bp, Artificial Sequence
  chemically synthesized
atgacaaagaaaactcagtg

SEQ ID NO: 9854 - DNA, 20 bp, Artificial Sequence
  chemically synthesized
aagaaaactcagtgaagaca

SEQ ID NO: 9855 - DNA, 20 bp, Artificial Sequence
  chemically synthesized
gaaaactcagtgaagacaaa

SEQ ID NO: 9856 - DNA, 20 bp, Artificial Sequence
  chemically synthesized
agacaaagagatcgttttca

SEQ ID NO: 9857 - DNA, 20 bp, Artificial Sequence
  chemically synthesized
gacaaagagatcgttttcat

SEQ ID NO: 9858 - DNA, 20 bp, Artificial Sequence
  chemically synthesized
tcatttgccaatccataact

SEQ ID NO: 9859 - DNA, 20 bp, Artificial Sequence
  chemically synthesized
catttgccaatccataactc

SEQ ID NO: 9860 - DNA, 20 bp, Artificial Sequence
  chemically synthesized
atccataactcaggaattca

SEQ ID NO: 9861 - DNA, 20 bp, Artificial Sequence
  chemically synthesized
caggaattcatggctatgct

SEQ ID NO: 9862 - DNA, 20 bp, Artificial Sequence
  chemically synthesized
tatgcttggataattctctc

SEQ ID NO: 9863 - DNA, 20 bp, Artificial Sequence
  chemically synthesized
tggataattctctctagact

SEQ ID NO: 9864 - DNA, 20 bp, Artificial Sequence
  chemically synthesized
gataattctctctagacttg

SEQ ID NO: 9865 - DNA, 20 bp, Artificial Sequence
  chemically synthesized
ctctagacttggagtgttaa

SEQ ID NO: 9866 - DNA, 20 bp, Artificial Sequence
  chemically synthesized
gagtgttaaaagtttgcacc

SEQ ID NO: 9867 - DNA, 20 bp, Artificial Sequence
  chemically synthesized
tagttattctcccctctctc

SEQ ID NO: 9868 - DNA, 20 bp, Artificial Sequence
  chemically synthesized
ttattctcccctctctctgg

SEQ ID NO: 9869 - DNA, 20 bp, Artificial Sequence
  chemically synthesized
tattctcccctctctctggc

SEQ ID NO: 9870 - DNA, 20 bp, Artificial Sequence
  chemically synthesized
ttctcccctctctctggcag

SEQ ID NO: 9871 - DNA, 20 bp, Artificial Sequence
  chemically synthesized
tggcaggagaatcatgtcac

SEQ ID NO: 9872 - DNA, 20 bp, Artificial Sequence
  chemically synthesized
aggagaatcatgtcactggc

SEQ ID NO: 9873 - DNA, 20 bp, Artificial Sequence
  chemically synthesized
tgtatcctcttcaaataatt

SEQ ID NO: 9874 - DNA, 20 bp, Artificial Sequence
  chemically synthesized
gcacaaatgtgtgtatgata

SEQ ID NO: 9875 - DNA, 20 bp, Artificial Sequence
  chemically synthesized
gtgtgtatgatatagtatta

SEQ ID NO: 9876 - DNA, 20 bp, Artificial Sequence
  chemically synthesized
tttctgaaaattgaaaaatt

SEQ ID NO: 9877 - DNA, 20 bp, Artificial Sequence
  chemically synthesized
tgaaaattgaaaaattcaga

SEQ ID NO: 9878 - DNA, 20 bp, Artificial Sequence
  chemically synthesized
ttgaaaaattcagaaagcca

SEQ ID NO: 9879 - DNA, 20 bp, Artificial Sequence
  chemically synthesized
attcagaaagccaaagataa

SEQ ID NO: 9880 - DNA, 20 bp, Artificial Sequence
  chemically synthesized
ataatagaatataccttgcg

SEQ ID NO: 9881 - DNA, 20 bp, Artificial Sequence
  chemically synthesized
tagaatataccttgcgtggc

SEQ ID NO: 9882 - DNA, 20 bp, Artificial Sequence
  chemically synthesized
agaatataccttgcgtggca

SEQ ID NO: 9883 - DNA, 20 bp, Artificial Sequence
  chemically synthesized
gcgtggcaaggtatattgat

SEQ ID NO: 9884 - DNA, 20 bp, Artificial Sequence
  chemically synthesized
cgtggcaaggtatattgatt

SEQ ID NO: 9885 - DNA, 20 bp, Artificial Sequence
  chemically synthesized
ggcaaggtatattgattagg

SEQ ID NO: 9886 - DNA, 20 bp, Artificial Sequence
  chemically synthesized
gcaaggtatattgattaggt

SEQ ID NO: 9887 - DNA, 20 bp, Artificial Sequence
  chemically synthesized
taattgcaaaattatttatg

SEQ ID NO: 9888 - DNA, 20 bp, Artificial Sequence
  chemically synthesized
aattgcaaaattatttatgc

SEQ ID NO: 9889 - DNA, 20 bp, Artificial Sequence
  chemically synthesized
ttgcaaaattatttatgcag

SEQ ID NO: 9890 - DNA, 20 bp, Artificial Sequence
  chemically synthesized
agtattaaaattttcctcaa

SEQ ID NO: 9891 - DNA, 20 bp, Artificial Sequence
  chemically synthesized
aaattttcctcaaaagttcc

SEQ ID NO: 9892 - DNA, 20 bp, Artificial Sequence
  chemically synthesized
aattttcctcaaaagttccc

SEQ ID NO: 9893 - DNA, 20 bp, Artificial Sequence
  chemically synthesized
ctcaaaagttcccaggcaaa

SEQ ID NO: 9894 - DNA, 20 bp, Artificial Sequence
  chemically synthesized
tcaaaagttcccaggcaaat

SEQ ID NO: 9895 - DNA, 20 bp, Artificial Sequence
  chemically synthesized
ccttacaataaactcttctg

SEQ ID NO: 9896 - DNA, 20 bp, Artificial Sequence
  chemically synthesized
cttacaataaactcttctgc

SEQ ID NO: 9897 - DNA, 20 bp, Artificial Sequence
  chemically synthesized
ctgcaggttttgtttatttt

SEQ ID NO: 9898 - DNA, 20 bp, Artificial Sequence
  chemically synthesized
tgcaggttttgtttattttg

SEQ ID NO: 9899 - DNA, 20 bp, Artificial Sequence
  chemically synthesized
aacatttcactttttttttc

SEQ ID NO: 9900 - DNA, 20 bp, Artificial Sequence
  chemically synthesized
cactttttttttcaagacat

SEQ ID NO: 9901 - DNA, 20 bp, Artificial Sequence
  chemically synthesized
actttttttttcaagacatg

SEQ ID NO: 9902 - DNA, 20 bp, Artificial Sequence
  chemically synthesized
gaggtgtgaatgatgcaaaa

SEQ ID NO: 9903 - DNA, 20 bp, Artificial Sequence
  chemically synthesized
gaatgatgcaaaacagtatt

SEQ ID NO: 9904 - DNA, 20 bp, Artificial Sequence
  chemically synthesized
ttgcataatgcattactaat

SEQ ID NO: 9905 - DNA, 20 bp, Artificial Sequence
  chemically synthesized
ataatgcattactaatcagt

SEQ ID NO: 9906 - DNA, 20 bp, Artificial Sequence
  chemically synthesized
taatcagtgagtataaattc

SEQ ID NO: 9907 - DNA, 20 bp, Artificial Sequence
  chemically synthesized
atcagtgagtataaattctg

SEQ ID NO: 9908 - DNA, 20 bp, Artificial Sequence
  chemically synthesized
gagtataaattctggagtct

SEQ ID NO: 9909 - DNA, 20 bp, Artificial Sequence
  chemically synthesized
agtataaattctggagtctg

SEQ ID NO: 9910 - DNA, 20 bp, Artificial Sequence
  chemically synthesized
gagtctgaggacctgaaatc

SEQ ID NO: 9911 - DNA, 20 bp, Artificial Sequence
  chemically synthesized
ccaccaaattttttaaaatc

SEQ ID NO: 9912 - DNA, 20 bp, Artificial Sequence
  chemically synthesized
ttttaaaatctagattataa

SEQ ID NO: 9913 - DNA, 20 bp, Artificial Sequence
  chemically synthesized
aaatctagattataaaagta

SEQ ID NO: 9914 - DNA, 20 bp, Artificial Sequence
  chemically synthesized
atctagattataaaagtaaa

SEQ ID NO: 9915 - DNA, 20 bp, Artificial Sequence
  chemically synthesized
aagtaaagagcatcaccctt

SEQ ID NO: 9916 - DNA, 20 bp, Artificial Sequence
  chemically synthesized
taaagagcatcacccttcgg

SEQ ID NO: 9917 - DNA, 20 bp, Artificial Sequence
  chemically synthesized
aaagagcatcacccttcggt

SEQ ID NO: 9918 - DNA, 20 bp, Artificial Sequence
  chemically synthesized
cacattcgcattccgtttat

SEQ ID NO: 9919 - DNA, 20 bp, Artificial Sequence
  chemically synthesized
attcgcattccgtttataag

SEQ ID NO: 9920 - DNA, 20 bp, Artificial Sequence
  chemically synthesized
ttcgcattccgtttataaga

SEQ ID NO: 9921 - DNA, 20 bp, Artificial Sequence
  chemically synthesized
cgcattccgtttataagaag

SEQ ID NO: 9922 - DNA, 20 bp, Artificial Sequence
  chemically synthesized
agaaggagaaattatcctca

SEQ ID NO: 9923 - DNA, 20 bp, Artificial Sequence
  chemically synthesized
aaggagaaattatcctcaca

SEQ ID NO: 9924 - DNA, 20 bp, Artificial Sequence
  chemically synthesized
ttatcctcacagagttttct

SEQ ID NO: 9925 - DNA, 20 bp, Artificial Sequence
  chemically synthesized
tatcctcacagagttttctg

SEQ ID NO: 9926 - DNA, 20 bp, Artificial Sequence
  chemically synthesized
ttttctgaggaaaattaaat

SEQ ID NO: 9927 - DNA, 20 bp, Artificial Sequence
  chemically synthesized
tctgaggaaaattaaataag

SEQ ID NO: 9928 - DNA, 20 bp, Artificial Sequence
  chemically synthesized
ttgctctgactcaacactat

SEQ ID NO: 9929 - DNA, 20 bp, Artificial Sequence
  chemically synthesized
tgctctgactcaacactatg

SEQ ID NO: 9930 - DNA, 20 bp, Artificial Sequence
  chemically synthesized
gactcaacactatgaggcat

SEQ ID NO: 9931 - DNA, 20 bp, Artificial Sequence
  chemically synthesized
actcaacactatgaggcata

SEQ ID NO: 9932 - DNA, 20 bp, Artificial Sequence
  chemically synthesized
ggcataaggtcctaaattca

SEQ ID NO: 9933 - DNA, 20 bp, Artificial Sequence
  chemically synthesized
gcataaggtcctaaattcat

SEQ ID NO: 9934 - DNA, 20 bp, Artificial Sequence
  chemically synthesized
taaattcataggcacaacca

SEQ ID NO: 9935 - DNA, 20 bp, Artificial Sequence
  chemically synthesized
attcataggcacaaccacag

SEQ ID NO: 9936 - DNA, 20 bp, Artificial Sequence
  chemically synthesized
ggcacaaccacagaagcacc

SEQ ID NO: 9937 - DNA, 20 bp, Artificial Sequence
  chemically synthesized
gcacaaccacagaagcacca

SEQ ID NO: 9938 - DNA, 20 bp, Artificial Sequence
  chemically synthesized
acaaccacagaagcaccaag

SEQ ID NO: 9939 - DNA, 20 bp, Artificial Sequence
  chemically synthesized
aaccacagaagcaccaagga

SEQ ID NO: 9940 - DNA, 20 bp, Artificial Sequence
  chemically synthesized
cagaagcaccaaggagagtg

SEQ ID NO: 9941 - DNA, 20 bp, Artificial Sequence
  chemically synthesized
gtgaagatatttgcatcaaa

SEQ ID NO: 9942 - DNA, 20 bp, Artificial Sequence
  chemically synthesized
gaagatatttgcatcaaaaa

SEQ ID NO: 9943 - DNA, 20 bp, Artificial Sequence
  chemically synthesized
gatatttgcatcaaaaagag

SEQ ID NO: 9944 - DNA, 20 bp, Artificial Sequence
  chemically synthesized
tttgcatcaaaaagagcaga

SEQ ID NO: 9945 - DNA, 20 bp, Artificial Sequence
  chemically synthesized
cccccacccccaccccatgt

SEQ ID NO: 9946 - DNA, 20 bp, Artificial Sequence
  chemically synthesized
caccccatgttggtcgccta

SEQ ID NO: 9947 - DNA, 20 bp, Artificial Sequence
  chemically synthesized
ttggtcgcctacggaatcta

SEQ ID NO: 9948 - DNA, 20 bp, Artificial Sequence
  chemically synthesized
tggtcgcctacggaatctac

SEQ ID NO: 9949 - DNA, 20 bp, Artificial Sequence
  chemically synthesized
acggaatctacaggaatctg

SEQ ID NO: 9950 - DNA, 20 bp, Artificial Sequence
  chemically synthesized
cggaatctacaggaatctga

SEQ ID NO: 9951 - DNA, 20 bp, Artificial Sequence
  chemically synthesized
ggaatctacaggaatctgaa

SEQ ID NO: 9952 - DNA, 20 bp, Artificial Sequence
  chemically synthesized
gaatctacaggaatctgaag

SEQ ID NO: 9953 - DNA, 20 bp, Artificial Sequence
  chemically synthesized
tctacaggaatctgaagggg

SEQ ID NO: 9954 - DNA, 20 bp, Artificial Sequence
  chemically synthesized
caggaatctgaaggggcagc

SEQ ID NO: 9955 - DNA, 20 bp, Artificial Sequence
  chemically synthesized
attctgcctataccacccat

SEQ ID NO: 9956 - DNA, 20 bp, Artificial Sequence
  chemically synthesized
gcctataccacccatcagat

SEQ ID NO: 9957 - DNA, 20 bp, Artificial Sequence
  chemically synthesized
aaaccacccatgcccttctc

SEQ ID NO: 9958 - DNA, 20 bp, Artificial Sequence
  chemically synthesized
ccacccatgcccttctccag

SEQ ID NO: 9959 - DNA, 20 bp, Artificial Sequence
  chemically synthesized
cacccatgcccttctccagt

SEQ ID NO: 9960 - DNA, 20 bp, Artificial Sequence
  chemically synthesized
cttctccagtgggttcccac

SEQ ID NO: 9961 - DNA, 20 bp, Artificial Sequence
  chemically synthesized
tcccaccggtgttttcgtgc

SEQ ID NO: 9962 - DNA, 20 bp, Artificial Sequence
  chemically synthesized
ccggtgttttcgtgcaagct

SEQ ID NO: 9963 - DNA, 20 bp, Artificial Sequence
  chemically synthesized
caagcttagccccttctttg

SEQ ID NO: 9964 - DNA, 20 bp, Artificial Sequence
  chemically synthesized
gccccttctttgcagaaaaa

SEQ ID NO: 9965 - DNA, 20 bp, Artificial Sequence
  chemically synthesized
aaaagatattgatgtgccaa

SEQ ID NO: 9966 - DNA, 20 bp, Artificial Sequence
  chemically synthesized
agatattgatgtgccaacag

SEQ ID NO: 9967 - DNA, 20 bp, Artificial Sequence
  chemically synthesized
attgatgtgccaacagtaga

SEQ ID NO: 9968 - DNA, 20 bp, Artificial Sequence
  chemically synthesized
gatgtgccaacagtagaaag

SEQ ID NO: 9969 - DNA, 20 bp, Artificial Sequence
  chemically synthesized
gaaagaagaaaaaattattc

SEQ ID NO: 9970 - DNA, 20 bp, Artificial Sequence
  chemically synthesized
gtacacaacctttgtcaacc

SEQ ID NO: 9971 - DNA, 20 bp, Artificial Sequence
  chemically synthesized
caacccagcatgataaaacc

SEQ ID NO: 9972 - DNA, 20 bp, Artificial Sequence
  chemically synthesized
cagcatgataaaaccaagtc

SEQ ID NO: 9973 - DNA, 20 bp, Artificial Sequence
  chemically synthesized
agcatgataaaaccaagtct

SEQ ID NO: 9974 - DNA, 20 bp, Artificial Sequence
  chemically synthesized
ctatttgtctaaacactttt

SEQ ID NO: 9975 - DNA, 20 bp, Artificial Sequence
  chemically synthesized
ttgtctaaacactttttgga

SEQ ID NO: 9976 - DNA, 20 bp, Artificial Sequence
  chemically synthesized
tgtctaaacactttttggaa

SEQ ID NO: 9977 - DNA, 20 bp, Artificial Sequence
  chemically synthesized
gtctaaacactttttggaaa

SEQ ID NO: 9978 - DNA, 20 bp, Artificial Sequence
  chemically synthesized
ctttttggaaagggatgaaa

SEQ ID NO: 9979 - DNA, 20 bp, Artificial Sequence
  chemically synthesized
ttttggaaagggatgaaatg

SEQ ID NO: 9980 - DNA, 20 bp, Artificial Sequence
  chemically synthesized
ttggaaagggatgaaatgga

SEQ ID NO: 9981 - DNA, 20 bp, Artificial Sequence
  chemically synthesized
tggaaagggatgaaatggag

SEQ ID NO: 9982 - DNA, 20 bp, Artificial Sequence
  chemically synthesized
aagggatgaaatggagagga

SEQ ID NO: 9983 - DNA, 20 bp, Artificial Sequence
  chemically synthesized
agggatgaaatggagaggaa

SEQ ID NO: 9984 - DNA, 20 bp, Artificial Sequence
  chemically synthesized
tgaaatggagaggaaaggaa

SEQ ID NO: 9985 - DNA, 20 bp, Artificial Sequence
  chemically synthesized
gaaatggagaggaaaggaaa

SEQ ID NO: 9986 - DNA, 20 bp, Artificial Sequence
  chemically synthesized
atggagaggaaaggaaaagg

SEQ ID NO: 9987 - DNA, 20 bp, Artificial Sequence
  chemically synthesized
gaggaaaggaaaaggaagtg

SEQ ID NO: 9988 - DNA, 20 bp, Artificial Sequence
  chemically synthesized
aaggaaaaggaagtgtagcc

SEQ ID NO: 9989 - DNA, 20 bp, Artificial Sequence
  chemically synthesized
gaaaaggaagtgtagcctag

SEQ ID NO: 9990 - DNA, 20 bp, Artificial Sequence
  chemically synthesized
aggaagtgtagcctagtggt

SEQ ID NO: 9991 - DNA, 20 bp, Artificial Sequence
  chemically synthesized
acacactcacacaaatcctt

SEQ ID NO: 9992 - DNA, 20 bp, Artificial Sequence
  chemically synthesized
cacactcacacaaatccttg

SEQ ID NO: 9993 - DNA, 20 bp, Artificial Sequence
  chemically synthesized
acactcacacaaatccttga

SEQ ID NO: 9994 - DNA, 20 bp, Artificial Sequence
  chemically synthesized
acacaaatccttgagggtgc

SEQ ID NO: 9995 - DNA, 20 bp, Artificial Sequence
  chemically synthesized
cacaaatccttgagggtgcc

SEQ ID NO: 9996 - DNA, 20 bp, Artificial Sequence
  chemically synthesized
gccaggttacatttctacaa

SEQ ID NO: 9997 - DNA, 20 bp, Artificial Sequence
  chemically synthesized
tgccttccattgtctactgc

SEQ ID NO: 9998 - DNA, 20 bp, Artificial Sequence
  chemically synthesized
tccattgtctactgccagtg

SEQ ID NO: 9999 - DNA, 20 bp, Artificial Sequence
  chemically synthesized
tactgccagtgaagccaaac

SEQ ID NO: 10000 - DNA, 20 bp, Artificial Sequence
  chemically synthesized
atttaatctgctgtaaaccc

SEQ ID NO: 10001 - DNA, 20 bp, Artificial Sequence
  chemically synthesized
tctgctgtaaacccaagtat

SEQ ID NO: 10002 - DNA, 20 bp, Artificial Sequence
  chemically synthesized
ctgctgtaaacccaagtatc

SEQ ID NO: 10003 - DNA, 20 bp, Artificial Sequence
  chemically synthesized
aaacccaagtatcaggcact

SEQ ID NO: 10004 - DNA, 20 bp, Artificial Sequence
  chemically synthesized
ccaagtatcaggcacttaga

SEQ ID NO: 10005 - DNA, 20 bp, Artificial Sequence
  chemically synthesized
agtatcaggcacttagatgg

SEQ ID NO: 10006 - DNA, 20 bp, Artificial Sequence
  chemically synthesized
ggcacttagatggcagctaa

SEQ ID NO: 10007 - DNA, 20 bp, Artificial Sequence
  chemically synthesized
gcagctaaaagcgccactct

SEQ ID NO: 10008 - DNA, 20 bp, Artificial Sequence
  chemically synthesized
agcgccactctcagataact

SEQ ID NO: 10009 - DNA, 20 bp, Artificial Sequence
  chemically synthesized
tgagtgacacttgctaataa

SEQ ID NO: 10010 - DNA, 20 bp, Artificial Sequence
  chemically synthesized
ctaataatagcctctgtgtg

SEQ ID NO: 10011 - DNA, 20 bp, Artificial Sequence
  chemically synthesized
taatagcctctgtgtgaagc

SEQ ID NO: 10012 - DNA, 20 bp, Artificial Sequence
  chemically synthesized
atagcctctgtgtgaagcga

SEQ ID NO: 10013 - DNA, 20 bp, Artificial Sequence
  chemically synthesized
agcctctgtgtgaagcgaga

SEQ ID NO: 10014 - DNA, 20 bp, Artificial Sequence
  chemically synthesized
cctctgtgtgaagcgagaga

SEQ ID NO: 10015 - DNA, 20 bp, Artificial Sequence
  chemically synthesized
ctgtgtgaagcgagagagag

SEQ ID NO: 10016 - DNA, 20 bp, Artificial Sequence
  chemically synthesized
gagcggacattttgtaaaac

SEQ ID NO: 10017 - DNA, 20 bp, Artificial Sequence
  chemically synthesized
gcggacattttgtaaaacca

SEQ ID NO: 10018 - DNA, 20 bp, Artificial Sequence
  chemically synthesized
cggacattttgtaaaaccag

SEQ ID NO: 10019 - DNA, 20 bp, Artificial Sequence
  chemically synthesized
ggacattttgtaaaaccaga

SEQ ID NO: 10020 - DNA, 20 bp, Artificial Sequence
  chemically synthesized
tttgtaaaaccagagggacc

SEQ ID NO: 10021 - DNA, 20 bp, Artificial Sequence
  chemically synthesized
ttgtaaaaccagagggaccc

SEQ ID NO: 10022 - DNA, 20 bp, Artificial Sequence
  chemically synthesized
aaaccagagggacccgggcc

SEQ ID NO: 10023 - DNA, 20 bp, Artificial Sequence
  chemically synthesized
aaccagagggacccgggcct

SEQ ID NO: 10024 - DNA, 20 bp, Artificial Sequence
  chemically synthesized
gagggacccgggcctgggcc

SEQ ID NO: 10025 - DNA, 20 bp, Artificial Sequence
  chemically synthesized
agggacccgggcctgggcct

SEQ ID NO: 10026 - DNA, 20 bp, Artificial Sequence
  chemically synthesized
cccgggcctgggcctgggcc

SEQ ID NO: 10027 - DNA, 20 bp, Artificial Sequence
  chemically synthesized
ccgggcctgggcctgggcct

SEQ ID NO: 10028 - DNA, 20 bp, Artificial Sequence
  chemically synthesized
cctgggcctgggcctgggtc

SEQ ID NO: 10029 - DNA, 20 bp, Artificial Sequence
  chemically synthesized
ctgggcctgggcctgggtct

SEQ ID NO: 10030 - DNA, 20 bp, Artificial Sequence
  chemically synthesized
cctgggcctgggtctgggaa

SEQ ID NO: 10031 - DNA, 20 bp, Artificial Sequence
  chemically synthesized
ggtctgggaatggtgtgatg

SEQ ID NO: 10032 - DNA, 20 bp, Artificial Sequence
  chemically synthesized
tgggaatggtgtgatgtggt

SEQ ID NO: 10033 - DNA, 20 bp, Artificial Sequence
  chemically synthesized
gggaatggtgtgatgtggtt

SEQ ID NO: 10034 - DNA, 20 bp, Artificial Sequence
  chemically synthesized
atggtgtgatgtggttaggc

SEQ ID NO: 10035 - DNA, 20 bp, Artificial Sequence
  chemically synthesized
tgatgtggttaggccagtct

SEQ ID NO: 10036 - DNA, 20 bp, Artificial Sequence
  chemically synthesized
gttaggccagtctcagcttc

SEQ ID NO: 10037 - DNA, 20 bp, Artificial Sequence
  chemically synthesized
ttaggccagtctcagcttcc

SEQ ID NO: 10038 - DNA, 20 bp, Artificial Sequence
  chemically synthesized
ggccagtctcagcttccagg

SEQ ID NO: 10039 - DNA, 20 bp, Artificial Sequence
  chemically synthesized
cagtctcagcttccaggcag

SEQ ID NO: 10040 - DNA, 20 bp, Artificial Sequence
  chemically synthesized
cagcttccaggcagcagata

SEQ ID NO: 10041 - DNA, 20 bp, Artificial Sequence
  chemically synthesized
cttccaggcagcagatacgg

SEQ ID NO: 10042 - DNA, 20 bp, Artificial Sequence
  chemically synthesized
tccaggcagcagatacggca

SEQ ID NO: 10043 - DNA, 20 bp, Artificial Sequence
  chemically synthesized
gcagcagatacggcagagac

SEQ ID NO: 10044 - DNA, 20 bp, Artificial Sequence
  chemically synthesized
cagcagatacggcagagacg

SEQ ID NO: 10045 - DNA, 20 bp, Artificial Sequence
  chemically synthesized
ggcagagacgaggcccacca

SEQ ID NO: 10046 - DNA, 20 bp, Artificial Sequence
  chemically synthesized
ccaccatggctcccctgtga

SEQ ID NO: 10047 - DNA, 20 bp, Artificial Sequence
  chemically synthesized
caccatggctcccctgtgac

SEQ ID NO: 10048 - DNA, 20 bp, Artificial Sequence
  chemically synthesized
cccctgtgacgggctgcacg

SEQ ID NO: 10049 - DNA, 20 bp, Artificial Sequence
  chemically synthesized
acgggctgcacgaagcccac

SEQ ID NO: 10050 - DNA, 20 bp, Artificial Sequence
  chemically synthesized
cacgaagcccaccagtgacc

SEQ ID NO: 10051 - DNA, 20 bp, Artificial Sequence
  chemically synthesized
ccaccagtgacctagctttc

SEQ ID NO: 10052 - DNA, 20 bp, Artificial Sequence
  chemically synthesized
gacctagctttcaagtcaca

SEQ ID NO: 10053 - DNA, 20 bp, Artificial Sequence
  chemically synthesized
gctttcaagtcacacagcga

SEQ ID NO: 10054 - DNA, 20 bp, Artificial Sequence
  chemically synthesized
aagtcacacagcgacagtcc

SEQ ID NO: 10055 - DNA, 20 bp, Artificial Sequence
  chemically synthesized
cagtcctggcttttgctatc

SEQ ID NO: 10056 - DNA, 20 bp, Artificial Sequence
  chemically synthesized
tcctggcttttgctatctag

SEQ ID NO: 10057 - DNA, 20 bp, Artificial Sequence
  chemically synthesized
aagaacaaaattcccctttc

SEQ ID NO: 10058 - DNA, 20 bp, Artificial Sequence
  chemically synthesized
tcatcttccatcttgtgccc

SEQ ID NO: 10059 - DNA, 20 bp, Artificial Sequence
  chemically synthesized
tgtgccccagtcctccctta

SEQ ID NO: 10060 - DNA, 20 bp, Artificial Sequence
  chemically synthesized
gtgccccagtcctcccttaa

SEQ ID NO: 10061 - DNA, 20 bp, Artificial Sequence
  chemically synthesized
tgccccagtcctcccttaaa

SEQ ID NO: 10062 - DNA, 20 bp, Artificial Sequence
  chemically synthesized
cccagtcctcccttaaaggg

SEQ ID NO: 10063 - DNA, 20 bp, Artificial Sequence
  chemically synthesized
ccagtcctcccttaaaggga

SEQ ID NO: 10064 - DNA, 20 bp, Artificial Sequence
  chemically synthesized
ttctttgtccccttctttct

SEQ ID NO: 10065 - DNA, 20 bp, Artificial Sequence
  chemically synthesized
ctttgtccccttctttctga

SEQ ID NO: 10066 - DNA, 20 bp, Artificial Sequence
  chemically synthesized
tccccttctttctgagagtg

SEQ ID NO: 10067 - DNA, 20 bp, Artificial Sequence
  chemically synthesized
gagtgtggtcaatctcctct

SEQ ID NO: 10068 - DNA, 20 bp, Artificial Sequence
  chemically synthesized
agtgtggtcaatctcctctc

SEQ ID NO: 10069 - DNA, 20 bp, Artificial Sequence
  chemically synthesized
ggcaaatcatctttctctaa

SEQ ID NO: 10070 - DNA, 20 bp, Artificial Sequence
  chemically synthesized
aatcatctttctctaatagc

SEQ ID NO: 10071 - DNA, 20 bp, Artificial Sequence
  chemically synthesized
atcatctttctctaatagcc

SEQ ID NO: 10072 - DNA, 20 bp, Artificial Sequence
  chemically synthesized
tcatctttctctaatagcca

SEQ ID NO: 10073 - DNA, 20 bp, Artificial Sequence
  chemically synthesized
tctaatagccagggctcaaa

SEQ ID NO: 10074 - DNA, 20 bp, Artificial Sequence
  chemically synthesized
agccagggctcaaatggcca

SEQ ID NO: 10075 - DNA, 20 bp, Artificial Sequence
  chemically synthesized
agggctcaaatggccaaaga

SEQ ID NO: 10076 - DNA, 20 bp, Artificial Sequence
  chemically synthesized
gggctcaaatggccaaagaa

SEQ ID NO: 10077 - DNA, 20 bp, Artificial Sequence
  chemically synthesized
atggccaaagaaaggtccca

SEQ ID NO: 10078 - DNA, 20 bp, Artificial Sequence
  chemically synthesized
ccttgtcttcataacactac

SEQ ID NO: 10079 - DNA, 20 bp, Artificial Sequence
  chemically synthesized
cataacactaccagccacgt

SEQ ID NO: 10080 - DNA, 20 bp, Artificial Sequence
  chemically synthesized
ccagccacgtgagcacgtcc

SEQ ID NO: 10081 - DNA, 20 bp, Artificial Sequence
  chemically synthesized
ttcttcctgaccctcaccac

SEQ ID NO: 10082 - DNA, 20 bp, Artificial Sequence
  chemically synthesized
tcttcctgaccctcaccacg

SEQ ID NO: 10083 - DNA, 20 bp, Artificial Sequence
  chemically synthesized
ctgaccctcaccacgaggca

SEQ ID NO: 10084 - DNA, 20 bp, Artificial Sequence
  chemically synthesized
gaccctcaccacgaggcaca

SEQ ID NO: 10085 - DNA, 20 bp, Artificial Sequence
  chemically synthesized
accctcaccacgaggcacag

SEQ ID NO: 10086 - DNA, 20 bp, Artificial Sequence
  chemically synthesized
aggcacctgtgctgaaactc

SEQ ID NO: 10087 - DNA, 20 bp, Artificial Sequence
  chemically synthesized
ctctgcctcatgcactgaaa

SEQ ID NO: 10088 - DNA, 20 bp, Artificial Sequence
  chemically synthesized
cctcatgcactgaaaaagac

SEQ ID NO: 10089 - DNA, 20 bp, Artificial Sequence
  chemically synthesized
ctcatgcactgaaaaagaca

SEQ ID NO: 10090 - DNA, 20 bp, Artificial Sequence
  chemically synthesized
tcatgcactgaaaaagacaa

SEQ ID NO: 10091 - DNA, 20 bp, Artificial Sequence
  chemically synthesized
acaagggatctctgttcttc

SEQ ID NO: 10092 - DNA, 20 bp, Artificial Sequence
  chemically synthesized
caagggatctctgttcttcc

SEQ ID NO: 10093 - DNA, 20 bp, Artificial Sequence
  chemically synthesized
agggatctctgttcttccag

SEQ ID NO: 10094 - DNA, 20 bp, Artificial Sequence
  chemically synthesized
tctctgttcttccaggagaa

SEQ ID NO: 10095 - DNA, 20 bp, Artificial Sequence
  chemically synthesized
ctctgttcttccaggagaat

SEQ ID NO: 10096 - DNA, 20 bp, Artificial Sequence
  chemically synthesized
tctgttcttccaggagaatg

SEQ ID NO: 10097 - DNA, 20 bp, Artificial Sequence
  chemically synthesized
ctgttcttccaggagaatgg

SEQ ID NO: 10098 - DNA, 20 bp, Artificial Sequence
  chemically synthesized
tcttccaggagaatggggga

SEQ ID NO: 10099 - DNA, 20 bp, Artificial Sequence
  chemically synthesized
ggagaatgggggacagtgca

SEQ ID NO: 10100 - DNA, 20 bp, Artificial Sequence
  chemically synthesized
atgggggacagtgcacagta

SEQ ID NO: 10101 - DNA, 20 bp, Artificial Sequence
  chemically synthesized
ccccttcacaatgaacttcc

SEQ ID NO: 10102 - DNA, 20 bp, Artificial Sequence
  chemically synthesized
acaatgaacttcccagatac

SEQ ID NO: 10103 - DNA, 20 bp, Artificial Sequence
  chemically synthesized
acttcccagatacaagactt

SEQ ID NO: 10104 - DNA, 20 bp, Artificial Sequence
  chemically synthesized
agatacaagacttgagctca

SEQ ID NO: 10105 - DNA, 20 bp, Artificial Sequence
  chemically synthesized
gatacaagacttgagctcac

SEQ ID NO: 10106 - DNA, 20 bp, Artificial Sequence
  chemically synthesized
cacaggtactttcttgccca

SEQ ID NO: 10107 - DNA, 20 bp, Artificial Sequence
  chemically synthesized
acaggtactttcttgcccat

SEQ ID NO: 10108 - DNA, 20 bp, Artificial Sequence
  chemically synthesized
cttgtccccttgctacctct

SEQ ID NO: 10109 - DNA, 20 bp, Artificial Sequence
  chemically synthesized
ctacctctgagccaaaccct

SEQ ID NO: 10110 - DNA, 20 bp, Artificial Sequence
  chemically synthesized
tctgagccaaacccttggtg

SEQ ID NO: 10111 - DNA, 20 bp, Artificial Sequence
  chemically synthesized
agaaacaacaccgactaaac

SEQ ID NO: 10112 - DNA, 20 bp, Artificial Sequence
  chemically synthesized
gaaacaacaccgactaaaca

SEQ ID NO: 10113 - DNA, 20 bp, Artificial Sequence
  chemically synthesized
aaggccatactgctctccac

SEQ ID NO: 10114 - DNA, 20 bp, Artificial Sequence
  chemically synthesized
ccatactgctctccaccagt

SEQ ID NO: 10115 - DNA, 20 bp, Artificial Sequence
  chemically synthesized
catactgctctccaccagtc

SEQ ID NO: 10116 - DNA, 20 bp, Artificial Sequence
  chemically synthesized
caggcaatacctttattttc

SEQ ID NO: 10117 - DNA, 20 bp, Artificial Sequence
  chemically synthesized
aaaaatctcaaatactacaa

SEQ ID NO: 10118 - DNA, 20 bp, Artificial Sequence
  chemically synthesized
aatctcaaatactacaaaag

SEQ ID NO: 10119 - DNA, 20 bp, Artificial Sequence
  chemically synthesized
tctcaaatactacaaaagta

SEQ ID NO: 10120 - DNA, 20 bp, Artificial Sequence
  chemically synthesized
tcaaatactacaaaagtaga

SEQ ID NO: 10121 - DNA, 20 bp, Artificial Sequence
  chemically synthesized
gtagagagaatgttataaat

SEQ ID NO: 10122 - DNA, 20 bp, Artificial Sequence
  chemically synthesized
aatgttataaatcagtcccc

SEQ ID NO: 10123 - DNA, 20 bp, Artificial Sequence
  chemically synthesized
gtccccaagtccacatcttc

SEQ ID NO: 10124 - DNA, 20 bp, Artificial Sequence
  chemically synthesized
tcttccagctccaaccacca

SEQ ID NO: 10125 - DNA, 20 bp, Artificial Sequence
  chemically synthesized
gctccaaccaccacagctca

SEQ ID NO: 10126 - DNA, 20 bp, Artificial Sequence
  chemically synthesized
ctgtaaccctatcgcctccc

SEQ ID NO: 10127 - DNA, 20 bp, Artificial Sequence
  chemically synthesized
cctagcccattttattattt

SEQ ID NO: 10128 - DNA, 20 bp, Artificial Sequence
  chemically synthesized
tttattatttaagttgatcc

SEQ ID NO: 10129 - DNA, 20 bp, Artificial Sequence
  chemically synthesized
cagacgtcatatcatttcat

SEQ ID NO: 10130 - DNA, 20 bp, Artificial Sequence
  chemically synthesized
ctgtatgtattttttaaaca

SEQ ID NO: 10131 - DNA, 20 bp, Artificial Sequence
  chemically synthesized
tgtatgtattttttaaacat

SEQ ID NO: 10132 - DNA, 20 bp, Artificial Sequence
  chemically synthesized
tatcacacctaaaaataata

SEQ ID NO: 10133 - DNA, 20 bp, Artificial Sequence
  chemically synthesized
aaataataaagtcacaaata

SEQ ID NO: 10134 - DNA, 20 bp, Artificial Sequence
  chemically synthesized
taaagtcccgtattaccaaa

SEQ ID NO: 10135 - DNA, 20 bp, Artificial Sequence
  chemically synthesized
aaagtcccgtattaccaaat

SEQ ID NO: 10136 - DNA, 20 bp, Artificial Sequence
  chemically synthesized
aagtcccgtattaccaaata

SEQ ID NO: 10137 - DNA, 20 bp, Artificial Sequence
  chemically synthesized
agtcccgtattaccaaatag

SEQ ID NO: 10138 - DNA, 20 bp, Artificial Sequence
  chemically synthesized
tcccgtattaccaaataggg

SEQ ID NO: 10139 - DNA, 20 bp, Artificial Sequence
  chemically synthesized
taggggagttattttaaact

SEQ ID NO: 10140 - DNA, 20 bp, Artificial Sequence
  chemically synthesized
cagaaatacttctttccatc

SEQ ID NO: 10141 - DNA, 20 bp, Artificial Sequence
  chemically synthesized
agaaatacttctttccatct

SEQ ID NO: 10142 - DNA, 20 bp, Artificial Sequence
  chemically synthesized
tttccatctgggtcatgttt

SEQ ID NO: 10143 - DNA, 20 bp, Artificial Sequence
  chemically synthesized
tccatctgggtcatgttttg

SEQ ID NO: 10144 - DNA, 20 bp, Artificial Sequence
  chemically synthesized
ccatctgggtcatgttttgg

SEQ ID NO: 10145 - DNA, 20 bp, Artificial Sequence
  chemically synthesized
atgttttggaggatcccttc

SEQ ID NO: 10146 - DNA, 20 bp, Artificial Sequence
  chemically synthesized
tttggaggatcccttccagt

SEQ ID NO: 10147 - DNA, 20 bp, Artificial Sequence
  chemically synthesized
ttggaggatcccttccagtg

SEQ ID NO: 10148 - DNA, 20 bp, Artificial Sequence
  chemically synthesized
gatcccttccagtgaggttc

SEQ ID NO: 10149 - DNA, 20 bp, Artificial Sequence
  chemically synthesized
tccagtgaggttcaagactg

SEQ ID NO: 10150 - DNA, 20 bp, Artificial Sequence
  chemically synthesized
ggttcaagactgaagctgcc

SEQ ID NO: 10151 - DNA, 20 bp, Artificial Sequence
  chemically synthesized
aagactgaagctgccaagaa

SEQ ID NO: 10152 - DNA, 20 bp, Artificial Sequence
  chemically synthesized
gaagctgccaagaaaagctt

SEQ ID NO: 10153 - DNA, 20 bp, Artificial Sequence
  chemically synthesized
agctgccaagaaaagcttca

SEQ ID NO: 10154 - DNA, 20 bp, Artificial Sequence
  chemically synthesized
agagaatcacactctctaaa

SEQ ID NO: 10155 - DNA, 20 bp, Artificial Sequence
  chemically synthesized
gagaatcacactctctaaaa

SEQ ID NO: 10156 - DNA, 20 bp, Artificial Sequence
  chemically synthesized
agaatcacactctctaaaaa

SEQ ID NO: 10157 - DNA, 20 bp, Artificial Sequence
  chemically synthesized
tctaaaaagggccttgtgta

SEQ ID NO: 10158 - DNA, 20 bp, Artificial Sequence
  chemically synthesized
tgtaaagccaccttgcatgt

SEQ ID NO: 10159 - DNA, 20 bp, Artificial Sequence
  chemically synthesized
gccaccttgcatgtcagccc

SEQ ID NO: 10160 - DNA, 20 bp, Artificial Sequence
  chemically synthesized
gcccaagctcctgccccttg

SEQ ID NO: 10161 - DNA, 20 bp, Artificial Sequence
  chemically synthesized
ttgcagtcctttgccctgtt

SEQ ID NO: 10162 - DNA, 20 bp, Artificial Sequence
  chemically synthesized
tgcagtcctttgccctgttc

SEQ ID NO: 10163 - DNA, 20 bp, Artificial Sequence
  chemically synthesized
gcagtcctttgccctgttca

SEQ ID NO: 10164 - DNA, 20 bp, Artificial Sequence
  chemically synthesized
cagggctgaatgcaccctct

SEQ ID NO: 10165 - DNA, 20 bp, Artificial Sequence
  chemically synthesized
gggctgaatgcaccctctga

SEQ ID NO: 10166 - DNA, 20 bp, Artificial Sequence
  chemically synthesized
ccctctgagagtctctgtga

SEQ ID NO: 10167 - DNA, 20 bp, Artificial Sequence
  chemically synthesized
ctcccacatcgactgcccca

SEQ ID NO: 10168 - DNA, 20 bp, Artificial Sequence
  chemically synthesized
tcccacatcgactgccccac

SEQ ID NO: 10169 - DNA, 20 bp, Artificial Sequence
  chemically synthesized
tcgactgccccacaggccct

SEQ ID NO: 10170 - DNA, 20 bp, Artificial Sequence
  chemically synthesized
ctccctcactccccaccatg

SEQ ID NO: 10171 - DNA, 20 bp, Artificial Sequence
  chemically synthesized
ggcccatcaccacatccgac

SEQ ID NO: 10172 - DNA, 20 bp, Artificial Sequence
  chemically synthesized
ccatcaccacatccgacaag

SEQ ID NO: 10173 - DNA, 20 bp, Artificial Sequence
  chemically synthesized
catcaccacatccgacaagc

SEQ ID NO: 10174 - DNA, 20 bp, Artificial Sequence
  chemically synthesized
ccgacaagcaggtgcactcc

SEQ ID NO: 10175 - DNA, 20 bp, Artificial Sequence
  chemically synthesized
gcaggtgcactcccagtgtt

SEQ ID NO: 10176 - DNA, 20 bp, Artificial Sequence
  chemically synthesized
gcactcccagtgttcagaac

SEQ ID NO: 10177 - DNA, 20 bp, Artificial Sequence
  chemically synthesized
gaactggaattcatttgtct

SEQ ID NO: 10178 - DNA, 20 bp, Artificial Sequence
  chemically synthesized
ctggaattcatttgtcttgg

SEQ ID NO: 10179 - DNA, 20 bp, Artificial Sequence
  chemically synthesized
aattcatttgtcttggaaga

SEQ ID NO: 10180 - DNA, 20 bp, Artificial Sequence
  chemically synthesized
cttggaagaaagtgttctcc

SEQ ID NO: 10181 - DNA, 20 bp, Artificial Sequence
  chemically synthesized
gaagaaagtgttctcctgga

SEQ ID NO: 10182 - DNA, 20 bp, Artificial Sequence
  chemically synthesized
ttctcctggacggttctgca

SEQ ID NO: 10183 - DNA, 20 bp, Artificial Sequence
  chemically synthesized
ttctgcacagaattcattca

SEQ ID NO: 10184 - DNA, 20 bp, Artificial Sequence
  chemically synthesized
ctgcacagaattcattcaca

SEQ ID NO: 10185 - DNA, 20 bp, Artificial Sequence
  chemically synthesized
ttcattcacagagcatgtct

SEQ ID NO: 10186 - DNA, 20 bp, Artificial Sequence
  chemically synthesized
cagagcatgtcttggatata

SEQ ID NO: 10187 - DNA, 20 bp, Artificial Sequence
  chemically synthesized
gtcttggatatacagctgac

SEQ ID NO: 10188 - DNA, 20 bp, Artificial Sequence
  chemically synthesized
atacagctgactagatatgt

SEQ ID NO: 10189 - DNA, 20 bp, Artificial Sequence
  chemically synthesized
tatgtcagttatgttccaaa

SEQ ID NO: 10190 - DNA, 20 bp, Artificial Sequence
  chemically synthesized
atgtcagttatgttccaaat

SEQ ID NO: 10191 - DNA, 20 bp, Artificial Sequence
  chemically synthesized
atgttccaaatgggttttca

SEQ ID NO: 10192 - DNA, 20 bp, Artificial Sequence
  chemically synthesized
tgttccaaatgggttttcac

SEQ ID NO: 10193 - DNA, 20 bp, Artificial Sequence
  chemically synthesized
caaatgggttttcacaggtc

SEQ ID NO: 10194 - DNA, 20 bp, Artificial Sequence
  chemically synthesized
aaatgggttttcacaggtca

SEQ ID NO: 10195 - DNA, 20 bp, Artificial Sequence
  chemically synthesized
tttcacaggtcaaggttctg

SEQ ID NO: 10196 - DNA, 20 bp, Artificial Sequence
  chemically synthesized
ttcacaggtcaaggttctgc

SEQ ID NO: 10197 - DNA, 20 bp, Artificial Sequence
  chemically synthesized
caggtcaaggttctgcaggc

SEQ ID NO: 10198 - DNA, 20 bp, Artificial Sequence
  chemically synthesized
ggtcaaggttctgcaggcaa

SEQ ID NO: 10199 - DNA, 20 bp, Artificial Sequence
  chemically synthesized
gcaagagcaaatactatttt

SEQ ID NO: 10200 - DNA, 20 bp, Artificial Sequence
  chemically synthesized
gagcaaatactatttttaga

SEQ ID NO: 10201 - DNA, 20 bp, Artificial Sequence
  chemically synthesized
agcaaatactatttttagac

SEQ ID NO: 10202 - DNA, 20 bp, Artificial Sequence
  chemically synthesized
atactatttttagacaggat

SEQ ID NO: 10203 - DNA, 20 bp, Artificial Sequence
  chemically synthesized
tactatttttagacaggata

SEQ ID NO: 10204 - DNA, 20 bp, Artificial Sequence
  chemically synthesized
ggataaggtcaaaatgcttt

SEQ ID NO: 10205 - DNA, 20 bp, Artificial Sequence
  chemically synthesized
ataaggtcaaaatgctttta

SEQ ID NO: 10206 - DNA, 20 bp, Artificial Sequence
  chemically synthesized
ggtcaaaatgcttttagaga

SEQ ID NO: 10207 - DNA, 20 bp, Artificial Sequence
  chemically synthesized
aaaatgcttttagagacagt

SEQ ID NO: 10208 - DNA, 20 bp, Artificial Sequence
  chemically synthesized
aaatgcttttagagacagtg

SEQ ID NO: 10209 - DNA, 20 bp, Artificial Sequence
  chemically synthesized
ctacaataaaacctattgat

SEQ ID NO: 10210 - DNA, 20 bp, Artificial Sequence
  chemically synthesized
aaaacctattgatcagcctc

SEQ ID NO: 10211 - DNA, 20 bp, Artificial Sequence
  chemically synthesized
tattgatcagcctctggaac

SEQ ID NO: 10212 - DNA, 20 bp, Artificial Sequence
  chemically synthesized
agcctctggaactagtgctc

SEQ ID NO: 10213 - DNA, 20 bp, Artificial Sequence
  chemically synthesized
cctctggaactagtgctcca

SEQ ID NO: 10214 - DNA, 20 bp, Artificial Sequence
  chemically synthesized
tctggaactagtgctccaga

SEQ ID NO: 10215 - DNA, 20 bp, Artificial Sequence
  chemically synthesized
actagtgctccagagagaca

SEQ ID NO: 10216 - DNA, 20 bp, Artificial Sequence
  chemically synthesized
tagtgctccagagagacaca

SEQ ID NO: 10217 - DNA, 20 bp, Artificial Sequence
  chemically synthesized
agattgaaacaaaaattgcc

SEQ ID NO: 10218 - DNA, 20 bp, Artificial Sequence
  chemically synthesized
ttgcctggccgttttctctg

SEQ ID NO: 10219 - DNA, 20 bp, Artificial Sequence
  chemically synthesized
cgttttctctgtagactctg

SEQ ID NO: 10220 - DNA, 20 bp, Artificial Sequence
  chemically synthesized
gttttctctgtagactctgt

SEQ ID NO: 10221 - DNA, 20 bp, Artificial Sequence
  chemically synthesized
tctgtagactctgtgggtaa

SEQ ID NO: 10222 - DNA, 20 bp, Artificial Sequence
  chemically synthesized
ctctgtgggtaaaagcttgt

SEQ ID NO: 10223 - DNA, 20 bp, Artificial Sequence
  chemically synthesized
ttgttggacttaatatcttt

SEQ ID NO: 10224 - DNA, 20 bp, Artificial Sequence
  chemically synthesized
tgttggacttaatatctttc

SEQ ID NO: 10225 - DNA, 20 bp, Artificial Sequence
  chemically synthesized
tatctttcaggatataaaat

SEQ ID NO: 10226 - DNA, 20 bp, Artificial Sequence
  chemically synthesized
tttcaggatataaaataagt

SEQ ID NO: 10227 - DNA, 20 bp, Artificial Sequence
  chemically synthesized
caggatataaaataagtaag

SEQ ID NO: 10228 - DNA, 20 bp, Artificial Sequence
  chemically synthesized
aagtaagaagtaactgtgta

SEQ ID NO: 10229 - DNA, 20 bp, Artificial Sequence
  chemically synthesized
taactgtgtacagattactg

SEQ ID NO: 10230 - DNA, 20 bp, Artificial Sequence
  chemically synthesized
attactgaagtccatttaac

SEQ ID NO: 10231 - DNA, 20 bp, Artificial Sequence
  chemically synthesized
gaagtccatttaaccagatg

SEQ ID NO: 10232 - DNA, 20 bp, Artificial Sequence
  chemically synthesized
agtccatttaaccagatgca

SEQ ID NO: 10233 - DNA, 20 bp, Artificial Sequence
  chemically synthesized
gtccatttaaccagatgcag

SEQ ID NO: 10234 - DNA, 20 bp, Artificial Sequence
  chemically synthesized
catttaaccagatgcagagg

SEQ ID NO: 10235 - DNA, 20 bp, Artificial Sequence
  chemically synthesized
atttaaccagatgcagaggc

SEQ ID NO: 10236 - DNA, 20 bp, Artificial Sequence
  chemically synthesized
ccagatgcagaggcaggtca

SEQ ID NO: 10237 - DNA, 20 bp, Artificial Sequence
  chemically synthesized
ggtcacagaaaatacactca

SEQ ID NO: 10238 - DNA, 20 bp, Artificial Sequence
  chemically synthesized
cacagaaaatacactcatgg

SEQ ID NO: 10239 - DNA, 20 bp, Artificial Sequence
  chemically synthesized
acactcatggcagaaccgta

SEQ ID NO: 10240 - DNA, 20 bp, Artificial Sequence
  chemically synthesized
ctcatggcagaaccgtaaag

SEQ ID NO: 10241 - DNA, 20 bp, Artificial Sequence
  chemically synthesized
tcatggcagaaccgtaaaga

SEQ ID NO: 10242 - DNA, 20 bp, Artificial Sequence
  chemically synthesized
catggcagaaccgtaaagaa

SEQ ID NO: 10243 - DNA, 20 bp, Artificial Sequence
  chemically synthesized
tggcagaaccgtaaagaagg

SEQ ID NO: 10244 - DNA, 20 bp, Artificial Sequence
  chemically synthesized
ccgtaaagaagggagatttc

SEQ ID NO: 10245 - DNA, 20 bp, Artificial Sequence
  chemically synthesized
cgtaaagaagggagatttca

SEQ ID NO: 10246 - DNA, 20 bp, Artificial Sequence
  chemically synthesized
aggcaacacgtgttgcaacc

SEQ ID NO: 10247 - DNA, 20 bp, Artificial Sequence
  chemically synthesized
gcaacacgtgttgcaaccta

SEQ ID NO: 10248 - DNA, 20 bp, Artificial Sequence
  chemically synthesized
cacgtgttgcaacctagaga

SEQ ID NO: 10249 - DNA, 20 bp, Artificial Sequence
  chemically synthesized
cctagagaaagaataaacac

SEQ ID NO: 10250 - DNA, 20 bp, Artificial Sequence
  chemically synthesized
aaacaccagtcttctcaact

SEQ ID NO: 10251 - DNA, 20 bp, Artificial Sequence
  chemically synthesized
aacaccagtcttctcaactc

SEQ ID NO: 10252 - DNA, 20 bp, Artificial Sequence
  chemically synthesized
acaccagtcttctcaactca

SEQ ID NO: 10253 - DNA, 20 bp, Artificial Sequence
  chemically synthesized
caccagtcttctcaactcag

SEQ ID NO: 10254 - DNA, 20 bp, Artificial Sequence
  chemically synthesized
ccagtcttctcaactcaggg

SEQ ID NO: 10255 - DNA, 20 bp, Artificial Sequence
  chemically synthesized
cagtcttctcaactcagggg

SEQ ID NO: 10256 - DNA, 20 bp, Artificial Sequence
  chemically synthesized
ctcaactcaggggaggcaca

SEQ ID NO: 10257 - DNA, 20 bp, Artificial Sequence
  chemically synthesized
tcaactcaggggaggcacaa

SEQ ID NO: 10258 - DNA, 20 bp, Artificial Sequence
  chemically synthesized
ctcaggggaggcacaaagga

SEQ ID NO: 10259 - DNA, 20 bp, Artificial Sequence
  chemically synthesized
acaaaggacagcctgccatc

SEQ ID NO: 10260 - DNA, 20 bp, Artificial Sequence
  chemically synthesized
caaaggacagcctgccatcc

SEQ ID NO: 10261 - DNA, 20 bp, Artificial Sequence
  chemically synthesized
tgccatccaggattcctgct

SEQ ID NO: 10262 - DNA, 20 bp, Artificial Sequence
  chemically synthesized
gccatccaggattcctgctt

SEQ ID NO: 10263 - DNA, 20 bp, Artificial Sequence
  chemically synthesized
tgccactatgatcctcaatc

SEQ ID NO: 10264 - DNA, 20 bp, Artificial Sequence
  chemically synthesized
atccagcgctatgtgaacaa

SEQ ID NO: 10265 - DNA, 20 bp, Artificial Sequence
  chemically synthesized
ctatgtgaacaacagacttt

SEQ ID NO: 10266 - DNA, 20 bp, Artificial Sequence
  chemically synthesized
acaacagactttcagataaa

SEQ ID NO: 10267 - DNA, 20 bp, Artificial Sequence
  chemically synthesized
agactttcagataaatagta

SEQ ID NO: 10268 - DNA, 20 bp, Artificial Sequence
  chemically synthesized
actttcagataaatagtatg

SEQ ID NO: 10269 - DNA, 20 bp, Artificial Sequence
  chemically synthesized
agtatggagataatttgctt

SEQ ID NO: 10270 - DNA, 20 bp, Artificial Sequence
  chemically synthesized
tggagataatttgcttaagt

SEQ ID NO: 10271 - DNA, 20 bp, Artificial Sequence
  chemically synthesized
ttaagtcagattttgatgaa

SEQ ID NO: 10272 - DNA, 20 bp, Artificial Sequence
  chemically synthesized
agtcagattttgatgaaaag

SEQ ID NO: 10273 - DNA, 20 bp, Artificial Sequence
  chemically synthesized
gatgaaaagtggtttctaca

SEQ ID NO: 10274 - DNA, 20 bp, Artificial Sequence
  chemically synthesized
aaaagtggtttctacatgga

SEQ ID NO: 10275 - DNA, 20 bp, Artificial Sequence
  chemically synthesized
aaacttctatattgatttga

SEQ ID NO: 10276 - DNA, 20 bp, Artificial Sequence
  chemically synthesized
atattgatttgatggaatca

SEQ ID NO: 10277 - DNA, 20 bp, Artificial Sequence
  chemically synthesized
tggaatcatggtgaattcta

SEQ ID NO: 10278 - DNA, 20 bp, Artificial Sequence
  chemically synthesized
tctccctttctacacacaca

SEQ ID NO: 10279 - DNA, 20 bp, Artificial Sequence
  chemically synthesized
ctccctttctacacacacac

SEQ ID NO: 10280 - DNA, 20 bp, Artificial Sequence
  chemically synthesized
catatacgtatgtatatatg

SEQ ID NO: 10281 - DNA, 20 bp, Artificial Sequence
  chemically synthesized
tacatatgtatgtgtgtata

SEQ ID NO: 10282 - DNA, 20 bp, Artificial Sequence
  chemically synthesized
tatgctttatcttatgatga

SEQ ID NO: 10283 - DNA, 20 bp, Artificial Sequence
  chemically synthesized
gatgacagtgttgatgtgtt

SEQ ID NO: 10284 - DNA, 20 bp, Artificial Sequence
  chemically synthesized
atgacagtgttgatgtgttt

SEQ ID NO: 10285 - DNA, 20 bp, Artificial Sequence
  chemically synthesized
tgacagtgttgatgtgtttg

SEQ ID NO: 10286 - DNA, 20 bp, Artificial Sequence
  chemically synthesized
ggatttttttttttttcaaa

SEQ ID NO: 10287 - DNA, 20 bp, Artificial Sequence
  chemically synthesized
atttttttttttttcaaaaa

SEQ ID NO: 10288 - DNA, 20 bp, Artificial Sequence
  chemically synthesized
ttttttcaaaaagagttaat

SEQ ID NO: 10289 - DNA, 20 bp, Artificial Sequence
  chemically synthesized
aagagttaataagcctttta

SEQ ID NO: 10290 - DNA, 20 bp, Artificial Sequence
  chemically synthesized
agagttaataagccttttat

SEQ ID NO: 10291 - DNA, 20 bp, Artificial Sequence
  chemically synthesized
cttttataggtgtaccacac

SEQ ID NO: 10292 - DNA, 20 bp, Artificial Sequence
  chemically synthesized
aggtgtaccacacaagactc

SEQ ID NO: 10293 - DNA, 20 bp, Artificial Sequence
  chemically synthesized
gtaccacacaagactccagt

SEQ ID NO: 10294 - DNA, 20 bp, Artificial Sequence
  chemically synthesized
taagcaaaatcattcattgc

SEQ ID NO: 10295 - DNA, 20 bp, Artificial Sequence
  chemically synthesized
aagcaaaatcattcattgcc

SEQ ID NO: 10296 - DNA, 20 bp, Artificial Sequence
  chemically synthesized
ttcattgccaggcaaaactt

SEQ ID NO: 10297 - DNA, 20 bp, Artificial Sequence
  chemically synthesized
caaaacttgagaaatacatt

SEQ ID NO: 10298 - DNA, 20 bp, Artificial Sequence
  chemically synthesized
aatacatttagaaatcatac

SEQ ID NO: 10299 - DNA, 20 bp, Artificial Sequence
  chemically synthesized
ttagaaatcatacgagcaca

SEQ ID NO: 10300 - DNA, 20 bp, Artificial Sequence
  chemically synthesized
tagaaatcatacgagcacac

SEQ ID NO: 10301 - DNA, 20 bp, Artificial Sequence
  chemically synthesized
gaaatcatacgagcacacag

SEQ ID NO: 10302 - DNA, 20 bp, Artificial Sequence
  chemically synthesized
gagcacacaggagctcaatc

SEQ ID NO: 10303 - DNA, 20 bp, Artificial Sequence
  chemically synthesized
aatcaagtaaatgaatcacc

SEQ ID NO: 10304 - DNA, 20 bp, Artificial Sequence
  chemically synthesized
atcaagtaaatgaatcacca

SEQ ID NO: 10305 - DNA, 20 bp, Artificial Sequence
  chemically synthesized
gtaaatgaatcaccaaggca

SEQ ID NO: 10306 - DNA, 20 bp, Artificial Sequence
  chemically synthesized
atgaatcaccaaggcacaga

SEQ ID NO: 10307 - DNA, 20 bp, Artificial Sequence
  chemically synthesized
accaaggcacagaaagtcac

SEQ ID NO: 10308 - DNA, 20 bp, Artificial Sequence
  chemically synthesized
tcactggaaaattacttaac

SEQ ID NO: 10309 - DNA, 20 bp, Artificial Sequence
  chemically synthesized
cttaactagcccaaacgttc

SEQ ID NO: 10310 - DNA, 20 bp, Artificial Sequence
  chemically synthesized
caaacgttcaagaattgacc

SEQ ID NO: 10311 - DNA, 20 bp, Artificial Sequence
  chemically synthesized
aaacgttcaagaattgacca

SEQ ID NO: 10312 - DNA, 20 bp, Artificial Sequence
  chemically synthesized
tcaagaattgaccaaggttt

SEQ ID NO: 10313 - DNA, 20 bp, Artificial Sequence
  chemically synthesized
agaattgaccaaggtttaag

SEQ ID NO: 10314 - DNA, 20 bp, Artificial Sequence
  chemically synthesized
aaaccctaaataatttattt

SEQ ID NO: 10315 - DNA, 20 bp, Artificial Sequence
  chemically synthesized
aataatttatttaagccaaa

SEQ ID NO: 10316 - DNA, 20 bp, Artificial Sequence
  chemically synthesized
ataatttatttaagccaaat

SEQ ID NO: 10317 - DNA, 20 bp, Artificial Sequence
  chemically synthesized
aatttatttaagccaaatag

SEQ ID NO: 10318 - DNA, 20 bp, Artificial Sequence
  chemically synthesized
ttaagccaaataggagcttt

SEQ ID NO: 10319 - DNA, 20 bp, Artificial Sequence
  chemically synthesized
ccaaataggagctttaagca

SEQ ID NO: 10320 - DNA, 20 bp, Artificial Sequence
  chemically synthesized
aagcacagacattaatgtaa

SEQ ID NO: 10321 - DNA, 20 bp, Artificial Sequence
  chemically synthesized
gactatcccatcttaaactt

SEQ ID NO: 10322 - DNA, 20 bp, Artificial Sequence
  chemically synthesized
atcccatcttaaacttcagc

SEQ ID NO: 10323 - DNA, 20 bp, Artificial Sequence
  chemically synthesized
cccatcttaaacttcagcca

SEQ ID NO: 10324 - DNA, 20 bp, Artificial Sequence
  chemically synthesized
gccagagatctaaaactttg

SEQ ID NO: 10325 - DNA, 20 bp, Artificial Sequence
  chemically synthesized
cataaatacctctccattat

SEQ ID NO: 10326 - DNA, 20 bp, Artificial Sequence
  chemically synthesized
ataaatacctctccattatc

SEQ ID NO: 10327 - DNA, 20 bp, Artificial Sequence
  chemically synthesized
taaatacctctccattatca

SEQ ID NO: 10328 - DNA, 20 bp, Artificial Sequence
  chemically synthesized
aaatacctctccattatcag

SEQ ID NO: 10329 - DNA, 20 bp, Artificial Sequence
  chemically synthesized
tcaggggtgctttattgttt

SEQ ID NO: 10330 - DNA, 20 bp, Artificial Sequence
  chemically synthesized
aggggtgctttattgtttga

SEQ ID NO: 10331 - DNA, 20 bp, Artificial Sequence
  chemically synthesized
ctttattgtttgagagactc

SEQ ID NO: 10332 - DNA, 20 bp, Artificial Sequence
  chemically synthesized
gtttgagagactccggacca

SEQ ID NO: 10333 - DNA, 20 bp, Artificial Sequence
  chemically synthesized
tttgagagactccggaccac

SEQ ID NO: 10334 - DNA, 20 bp, Artificial Sequence
  chemically synthesized
agactccggaccacaggaac

SEQ ID NO: 10335 - DNA, 20 bp, Artificial Sequence
  chemically synthesized
acaggaactagtgtgaaaac

SEQ ID NO: 10336 - DNA, 20 bp, Artificial Sequence
  chemically synthesized
aggaactagtgtgaaaactg

SEQ ID NO: 10337 - DNA, 20 bp, Artificial Sequence
  chemically synthesized
ggaactagtgtgaaaactgg

SEQ ID NO: 10338 - DNA, 20 bp, Artificial Sequence
  chemically synthesized
gaactagtgtgaaaactgga

SEQ ID NO: 10339 - DNA, 20 bp, Artificial Sequence
  chemically synthesized
ttcgcaaacaaaatatgcca

SEQ ID NO: 10340 - DNA, 20 bp, Artificial Sequence
  chemically synthesized
ctatatatcacattgtgaca

SEQ ID NO: 10341 - DNA, 20 bp, Artificial Sequence
  chemically synthesized
tgtgacacagctgaccgcat

SEQ ID NO: 10342 - DNA, 20 bp, Artificial Sequence
  chemically synthesized
acacagctgaccgcattagt

SEQ ID NO: 10343 - DNA, 20 bp, Artificial Sequence
  chemically synthesized
gctgaccgcattagtgagcc

SEQ ID NO: 10344 - DNA, 20 bp, Artificial Sequence
  chemically synthesized
ttagtgagccaagactgtcc

SEQ ID NO: 10345 - DNA, 20 bp, Artificial Sequence
  chemically synthesized
gtgagccaagactgtcctag

SEQ ID NO: 10346 - DNA, 20 bp, Artificial Sequence
  chemically synthesized
agccaagactgtcctagcgg

SEQ ID NO: 10347 - DNA, 20 bp, Artificial Sequence
  chemically synthesized
atcatgcattaacaatacaa

SEQ ID NO: 10348 - DNA, 20 bp, Artificial Sequence
  chemically synthesized
atacatttgcacaacacaat

SEQ ID NO: 10349 - DNA, 20 bp, Artificial Sequence
  chemically synthesized
acatttgcacaacacaataa

SEQ ID NO: 10350 - DNA, 20 bp, Artificial Sequence
  chemically synthesized
catttgcacaacacaataag

SEQ ID NO: 10351 - DNA, 20 bp, Artificial Sequence
  chemically synthesized
ttgcacaacacaataagagg

SEQ ID NO: 10352 - DNA, 20 bp, Artificial Sequence
  chemically synthesized
tgcacaacacaataagaggt

SEQ ID NO: 10353 - DNA, 20 bp, Artificial Sequence
  chemically synthesized
gcacaacacaataagaggtg

SEQ ID NO: 10354 - DNA, 20 bp, Artificial Sequence
  chemically synthesized
cacaacacaataagaggtgg

SEQ ID NO: 10355 - DNA, 20 bp, Artificial Sequence
  chemically synthesized
caacacaataagaggtgggg

SEQ ID NO: 10356 - DNA, 20 bp, Artificial Sequence
  chemically synthesized
cacaataagaggtgggggag

SEQ ID NO: 10357 - DNA, 20 bp, Artificial Sequence
  chemically synthesized
caataagaggtgggggagaa

SEQ ID NO: 10358 - DNA, 20 bp, Artificial Sequence
  chemically synthesized
ataagaggtgggggagaaga

SEQ ID NO: 10359 - DNA, 20 bp, Artificial Sequence
  chemically synthesized
tgggggagaagagagaacat

SEQ ID NO: 10360 - DNA, 20 bp, Artificial Sequence
  chemically synthesized
gggggagaagagagaacatt

SEQ ID NO: 10361 - DNA, 20 bp, Artificial Sequence
  chemically synthesized
ataattttgtcacctatctc

SEQ ID NO: 10362 - DNA, 20 bp, Artificial Sequence
  chemically synthesized
atgttatcatgcttttattt

SEQ ID NO: 10363 - DNA, 20 bp, Artificial Sequence
  chemically synthesized
tgttatcatgcttttatttc

SEQ ID NO: 10364 - DNA, 20 bp, Artificial Sequence
  chemically synthesized
gcttttatttcaggtaataa

SEQ ID NO: 10365 - DNA, 20 bp, Artificial Sequence
  chemically synthesized
tttatttcaggtaataatgg

SEQ ID NO: 10366 - DNA, 20 bp, Artificial Sequence
  chemically synthesized
ttatttcaggtaataatgga

SEQ ID NO: 10367 - DNA, 20 bp, Artificial Sequence
  chemically synthesized
tatttcaggtaataatggaa

SEQ ID NO: 10368 - DNA, 20 bp, Artificial Sequence
  chemically synthesized
atttcaggtaataatggaag

SEQ ID NO: 10369 - DNA, 20 bp, Artificial Sequence
  chemically synthesized
caggtaataatggaagggga

SEQ ID NO: 10370 - DNA, 20 bp, Artificial Sequence
  chemically synthesized
gtaataatggaaggggaaag

SEQ ID NO: 10371 - DNA, 20 bp, Artificial Sequence
  chemically synthesized
aataatggaaggggaaagta

SEQ ID NO: 10372 - DNA, 20 bp, Artificial Sequence
  chemically synthesized
gaaggggaaagtagagcctc

SEQ ID NO: 10373 - DNA, 20 bp, Artificial Sequence
  chemically synthesized
aaggggaaagtagagcctct

SEQ ID NO: 10374 - DNA, 20 bp, Artificial Sequence
  chemically synthesized
aggggaaagtagagcctctg

SEQ ID NO: 10375 - DNA, 20 bp, Artificial Sequence
  chemically synthesized
ggggaaagtagagcctctgg

SEQ ID NO: 10376 - DNA, 20 bp, Artificial Sequence
  chemically synthesized
gggaaagtagagcctctggg

SEQ ID NO: 10377 - DNA, 20 bp, Artificial Sequence
  chemically synthesized
ctggggggctgccattcatt

SEQ ID NO: 10378 - DNA, 20 bp, Artificial Sequence
  chemically synthesized
ttcggcctgttatttgcttt

SEQ ID NO: 10379 - DNA, 20 bp, Artificial Sequence
  chemically synthesized
tcggcctgttatttgctttt

SEQ ID NO: 10380 - DNA, 20 bp, Artificial Sequence
  chemically synthesized
cctgttatttgcttttgggt

SEQ ID NO: 10381 - DNA, 20 bp, Artificial Sequence
  chemically synthesized
ctgttatttgcttttgggtt

SEQ ID NO: 10382 - DNA, 20 bp, Artificial Sequence
  chemically synthesized
tatttgcttttgggttgggt

SEQ ID NO: 10383 - DNA, 20 bp, Artificial Sequence
  chemically synthesized
atttgcttttgggttgggtt

SEQ ID NO: 10384 - DNA, 20 bp, Artificial Sequence
  chemically synthesized
tttgcttttgggttgggtta

SEQ ID NO: 10385 - DNA, 20 bp, Artificial Sequence
  chemically synthesized
tttcttttttcttgtttttt

SEQ ID NO: 10386 - DNA, 20 bp, Artificial Sequence
  chemically synthesized
ttaagattttattttgttac

SEQ ID NO: 10387 - DNA, 20 bp, Artificial Sequence
  chemically synthesized
aagattttattttgttacca

SEQ ID NO: 10388 - DNA, 20 bp, Artificial Sequence
  chemically synthesized
ttttattttgttaccagaga

SEQ ID NO: 10389 - DNA, 20 bp, Artificial Sequence
  chemically synthesized
tattttgttaccagagatag

SEQ ID NO: 10390 - DNA, 20 bp, Artificial Sequence
  chemically synthesized
ttttgttaccagagatagaa

SEQ ID NO: 10391 - DNA, 20 bp, Artificial Sequence
  chemically synthesized
gatagaagagcatgcaaaat

SEQ ID NO: 10392 - DNA, 20 bp, Artificial Sequence
  chemically synthesized
agagcatgcaaaatcagaaa

SEQ ID NO: 10393 - DNA, 20 bp, Artificial Sequence
  chemically synthesized
aatcagaaacagctgattac

SEQ ID NO: 10394 - DNA, 20 bp, Artificial Sequence
  chemically synthesized
gctgattaccagtgccctta

SEQ ID NO: 10395 - DNA, 20 bp, Artificial Sequence
  chemically synthesized
tgattaccagtgcccttaca

SEQ ID NO: 10396 - DNA, 20 bp, Artificial Sequence
  chemically synthesized
ccccaaaacattataaatta

SEQ ID NO: 10397 - DNA, 20 bp, Artificial Sequence
  chemically synthesized
ccaaaacattataaattaaa

SEQ ID NO: 10398 - DNA, 20 bp, Artificial Sequence
  chemically synthesized
caaaacattataaattaaag

SEQ ID NO: 10399 - DNA, 20 bp, Artificial Sequence
  chemically synthesized
aacattataaattaaagagg

SEQ ID NO: 10400 - DNA, 20 bp, Artificial Sequence
  chemically synthesized
aataaattacctttttattg

SEQ ID NO: 10401 - DNA, 20 bp, Artificial Sequence
  chemically synthesized
ttacctttttattgaagcta

SEQ ID NO: 10402 - DNA, 20 bp, Artificial Sequence
  chemically synthesized
ttattgaagctatagatctc

SEQ ID NO: 10403 - DNA, 20 bp, Artificial Sequence
  chemically synthesized
attgaagctatagatctcaa

SEQ ID NO: 10404 - DNA, 20 bp, Artificial Sequence
  chemically synthesized
caagagtgcctgtgtcctac

SEQ ID NO: 10405 - DNA, 20 bp, Artificial Sequence
  chemically synthesized
aagagtgcctgtgtcctaca

SEQ ID NO: 10406 - DNA, 20 bp, Artificial Sequence
  chemically synthesized
attcatttgccccttactct

SEQ ID NO: 10407 - DNA, 20 bp, Artificial Sequence
  chemically synthesized
tgccccttactctgagcaca

SEQ ID NO: 10408 - DNA, 20 bp, Artificial Sequence
  chemically synthesized
gccccttactctgagcacat

SEQ ID NO: 10409 - DNA, 20 bp, Artificial Sequence
  chemically synthesized
ctgagcacatgggataataa

SEQ ID NO: 10410 - DNA, 20 bp, Artificial Sequence
  chemically synthesized
gcacatgggataataaaaga

SEQ ID NO: 10411 - DNA, 20 bp, Artificial Sequence
  chemically synthesized
gggataataaaagaaagttt

SEQ ID NO: 10412 - DNA, 20 bp, Artificial Sequence
  chemically synthesized
ttttagatcatcattatcca

SEQ ID NO: 10413 - DNA, 20 bp, Artificial Sequence
  chemically synthesized
tttagatcatcattatccaa

SEQ ID NO: 10414 - DNA, 20 bp, Artificial Sequence
  chemically synthesized
taactttgaatgcccttttt

SEQ ID NO: 10415 - DNA, 20 bp, Artificial Sequence
  chemically synthesized
cattcaatgccacatataaa

SEQ ID NO: 10416 - DNA, 20 bp, Artificial Sequence
  chemically synthesized
cacatataaatggtatttgc

SEQ ID NO: 10417 - DNA, 20 bp, Artificial Sequence
  chemically synthesized
tataaatggtatttgctgga

SEQ ID NO: 10418 - DNA, 20 bp, Artificial Sequence
  chemically synthesized
atggtatttgctggacagtg

SEQ ID NO: 10419 - DNA, 20 bp, Artificial Sequence
  chemically synthesized
ttgctggacagtgtggaaaa

SEQ ID NO: 10420 - DNA, 20 bp, Artificial Sequence
  chemically synthesized
aacagaaacatccgtgctaa

SEQ ID NO: 10421 - DNA, 20 bp, Artificial Sequence
  chemically synthesized
acatccgtgctaaaagccaa

SEQ ID NO: 10422 - DNA, 20 bp, Artificial Sequence
  chemically synthesized
aaaagccaatggtaaacacc

SEQ ID NO: 10423 - DNA, 20 bp, Artificial Sequence
  chemically synthesized
taaacaccaagtttaaaaaa

SEQ ID NO: 10424 - DNA, 20 bp, Artificial Sequence
  chemically synthesized
agtttaaaaaatggattgca

SEQ ID NO: 10425 - DNA, 20 bp, Artificial Sequence
  chemically synthesized
attgcaaagatcgcatgtcc

SEQ ID NO: 10426 - DNA, 20 bp, Artificial Sequence
  chemically synthesized
aaagatcgcatgtcccagaa

SEQ ID NO: 10427 - DNA, 20 bp, Artificial Sequence
  chemically synthesized
aagatcgcatgtcccagaac

SEQ ID NO: 10428 - DNA, 20 bp, Artificial Sequence
  chemically synthesized
acctacatgatgaataaaaa

SEQ ID NO: 10429 - DNA, 20 bp, Artificial Sequence
  chemically synthesized
tatgctgtcttcaacactaa

SEQ ID NO: 10430 - DNA, 20 bp, Artificial Sequence
  chemically synthesized
tgctgtcttcaacactaaca

SEQ ID NO: 10431 - DNA, 20 bp, Artificial Sequence
  chemically synthesized
gctgtcttcaacactaacag

SEQ ID NO: 10432 - DNA, 20 bp, Artificial Sequence
  chemically synthesized
ctgtcttcaacactaacaga

SEQ ID NO: 10433 - DNA, 20 bp, Artificial Sequence
  chemically synthesized
gtcttcaacactaacagagg

SEQ ID NO: 10434 - DNA, 20 bp, Artificial Sequence
  chemically synthesized
cttcaacactaacagaggga

SEQ ID NO: 10435 - DNA, 20 bp, Artificial Sequence
  chemically synthesized
ttcttctaaacatgttgcat

SEQ ID NO: 10436 - DNA, 20 bp, Artificial Sequence
  chemically synthesized
ttgcatcggatgcctttaac

SEQ ID NO: 10437 - DNA, 20 bp, Artificial Sequence
  chemically synthesized
caagcaaaaattcctaactc

SEQ ID NO: 10438 - DNA, 20 bp, Artificial Sequence
  chemically synthesized
aagcaaaaattcctaactcc

SEQ ID NO: 10439 - DNA, 20 bp, Artificial Sequence
  chemically synthesized
agcaaaaattcctaactcca

SEQ ID NO: 10440 - DNA, 20 bp, Artificial Sequence
  chemically synthesized
aattcctaactccagggact

SEQ ID NO: 10441 - DNA, 20 bp, Artificial Sequence
  chemically synthesized
ctccagggactcagcatatg

SEQ ID NO: 10442 - DNA, 20 bp, Artificial Sequence
  chemically synthesized
tccagggactcagcatatgt

SEQ ID NO: 10443 - DNA, 20 bp, Artificial Sequence
  chemically synthesized
atatgtaggctatgtccata

SEQ ID NO: 10444 - DNA, 20 bp, Artificial Sequence
  chemically synthesized
atgtaggctatgtccataca

SEQ ID NO: 10445 - DNA, 20 bp, Artificial Sequence
  chemically synthesized
ctatgtccatacagagaaac

SEQ ID NO: 10446 - DNA, 20 bp, Artificial Sequence
  chemically synthesized
catacagagaaaccagcttt

SEQ ID NO: 10447 - DNA, 20 bp, Artificial Sequence
  chemically synthesized
atacagagaaaccagctttt

SEQ ID NO: 10448 - DNA, 20 bp, Artificial Sequence
  chemically synthesized
acagagaaaccagcttttgg

SEQ ID NO: 10449 - DNA, 20 bp, Artificial Sequence
  chemically synthesized
cagagaaaccagcttttggg

SEQ ID NO: 10450 - DNA, 20 bp, Artificial Sequence
  chemically synthesized
gagaaaccagcttttgggag

SEQ ID NO: 10451 - DNA, 20 bp, Artificial Sequence
  chemically synthesized
agaaaccagcttttgggagg

SEQ ID NO: 10452 - DNA, 20 bp, Artificial Sequence
  chemically synthesized
aaccagcttttgggaggagg

SEQ ID NO: 10453 - DNA, 20 bp, Artificial Sequence
  chemically synthesized
accagcttttgggaggagga

SEQ ID NO: 10454 - DNA, 20 bp, Artificial Sequence
  chemically synthesized
cagcttttgggaggaggaag

SEQ ID NO: 10455 - DNA, 20 bp, Artificial Sequence
  chemically synthesized
agcttttgggaggaggaagg

SEQ ID NO: 10456 - DNA, 20 bp, Artificial Sequence
  chemically synthesized
gaggaaaatatcactgaatt

SEQ ID NO: 10457 - DNA, 20 bp, Artificial Sequence
  chemically synthesized
aaaatatcactgaattcagt

SEQ ID NO: 10458 - DNA, 20 bp, Artificial Sequence
  chemically synthesized
ttaattgaatttaaaatacc

SEQ ID NO: 10459 - DNA, 20 bp, Artificial Sequence
  chemically synthesized
aacgtacttctattttgatg

SEQ ID NO: 10460 - DNA, 20 bp, Artificial Sequence
  chemically synthesized
gtagttacatttgcccaaaa

SEQ ID NO: 10461 - DNA, 20 bp, Artificial Sequence
  chemically synthesized
tttgcccaaaaaagcaaact

SEQ ID NO: 10462 - DNA, 20 bp, Artificial Sequence
  chemically synthesized
tgcccaaaaaagcaaacttg

SEQ ID NO: 10463 - DNA, 20 bp, Artificial Sequence
  chemically synthesized
aaaatacacattacattctt

SEQ ID NO: 10464 - DNA, 20 bp, Artificial Sequence
  chemically synthesized
aatacacattacattctttg

SEQ ID NO: 10465 - DNA, 20 bp, Artificial Sequence
  chemically synthesized
ttggagtttttcaaaaaaaa

SEQ ID NO: 10466 - DNA, 20 bp, Artificial Sequence
  chemically synthesized
aaacagcttgcaacaattaa

SEQ ID NO: 10467 - DNA, 20 bp, Artificial Sequence
  chemically synthesized
agcttgcaacaattaaaaga

SEQ ID NO: 10468 - DNA, 20 bp, Artificial Sequence
  chemically synthesized
cttgcaacaattaaaagatg

SEQ ID NO: 10469 - DNA, 20 bp, Artificial Sequence
  chemically synthesized
aaaagatggagaaatcttat

SEQ ID NO: 10470 - DNA, 20 bp, Artificial Sequence
  chemically synthesized
aaagatggagaaatcttata

SEQ ID NO: 10471 - DNA, 20 bp, Artificial Sequence
  chemically synthesized
atggagaaatcttataaggc

SEQ ID NO: 10472 - DNA, 20 bp, Artificial Sequence
  chemically synthesized
ctgcacttcaattttgcttc

SEQ ID NO: 10473 - DNA, 20 bp, Artificial Sequence
  chemically synthesized
ttttgcttccagcaatttga

SEQ ID NO: 10474 - DNA, 20 bp, Artificial Sequence
  chemically synthesized
gcaatttgaaagatgccttt

SEQ ID NO: 10475 - DNA, 20 bp, Artificial Sequence
  chemically synthesized
gatgcctttaagctttctgt

SEQ ID NO: 10476 - DNA, 20 bp, Artificial Sequence
  chemically synthesized
atgcctttaagctttctgtt

SEQ ID NO: 10477 - DNA, 20 bp, Artificial Sequence
  chemically synthesized
tgcctttaagctttctgttg

SEQ ID NO: 10478 - DNA, 20 bp, Artificial Sequence
  chemically synthesized
tgttggggaatcacgaatcc

SEQ ID NO: 10479 - DNA, 20 bp, Artificial Sequence
  chemically synthesized
ccaagccttaatctccacca

SEQ ID NO: 10480 - DNA, 20 bp, Artificial Sequence
  chemically synthesized
ccaccatagcttccatcttt

SEQ ID NO: 10481 - DNA, 20 bp, Artificial Sequence
  chemically synthesized
caccatagcttccatctttg

SEQ ID NO: 10482 - DNA, 20 bp, Artificial Sequence
  chemically synthesized
ttccatctttgaggcaaatc

SEQ ID NO: 10483 - DNA, 20 bp, Artificial Sequence
  chemically synthesized
ataatattctgctgtctttg

SEQ ID NO: 10484 - DNA, 20 bp, Artificial Sequence
  chemically synthesized
taatattctgctgtctttgc

SEQ ID NO: 10485 - DNA, 20 bp, Artificial Sequence
  chemically synthesized
attctgctgtctttgcaggt

SEQ ID NO: 10486 - DNA, 20 bp, Artificial Sequence
  chemically synthesized
ctttgcaggtgagccccatt

SEQ ID NO: 10487 - DNA, 20 bp, Artificial Sequence
  chemically synthesized
ggtgagccccattcagcaac

SEQ ID NO: 10488 - DNA, 20 bp, Artificial Sequence
  chemically synthesized
agcaactagattccaaaaaa

SEQ ID NO: 10489 - DNA, 20 bp, Artificial Sequence
  chemically synthesized
aactagattccaaaaaatag

SEQ ID NO: 10490 - DNA, 20 bp, Artificial Sequence
  chemically synthesized
actagattccaaaaaatagc

SEQ ID NO: 10491 - DNA, 20 bp, Artificial Sequence
  chemically synthesized
ctagattccaaaaaatagca

SEQ ID NO: 10492 - DNA, 20 bp, Artificial Sequence
  chemically synthesized
agattccaaaaaatagcagg

SEQ ID NO: 10493 - DNA, 20 bp, Artificial Sequence
  chemically synthesized
aaaaatagcagggagaaaac

SEQ ID NO: 10494 - DNA, 20 bp, Artificial Sequence
  chemically synthesized
atagcagggagaaaactggt

SEQ ID NO: 10495 - DNA, 20 bp, Artificial Sequence
  chemically synthesized
gcagggagaaaactggtcag

SEQ ID NO: 10496 - DNA, 20 bp, Artificial Sequence
  chemically synthesized
cagtggtgttcatactatgc

SEQ ID NO: 10497 - DNA, 20 bp, Artificial Sequence
  chemically synthesized
catactatgctagaacatca

SEQ ID NO: 10498 - DNA, 20 bp, Artificial Sequence
  chemically synthesized
atactatgctagaacatcat

SEQ ID NO: 10499 - DNA, 20 bp, Artificial Sequence
  chemically synthesized
tactatgctagaacatcatg

SEQ ID NO: 10500 - DNA, 20 bp, Artificial Sequence
  chemically synthesized
gctagaacatcatggggact

SEQ ID NO: 10501 - DNA, 20 bp, Artificial Sequence
  chemically synthesized
tagaacatcatggggactta

SEQ ID NO: 10502 - DNA, 20 bp, Artificial Sequence
  chemically synthesized
tggggacttagagacccacc

SEQ ID NO: 10503 - DNA, 20 bp, Artificial Sequence
  chemically synthesized
atctattttacctactttac

SEQ ID NO: 10504 - DNA, 20 bp, Artificial Sequence
  chemically synthesized
ttttacctactttacaagac

SEQ ID NO: 10505 - DNA, 20 bp, Artificial Sequence
  chemically synthesized
tttacctactttacaagaca

SEQ ID NO: 10506 - DNA, 20 bp, Artificial Sequence
  chemically synthesized
gacaaggaaacaaatgctaa

SEQ ID NO: 10507 - DNA, 20 bp, Artificial Sequence
  chemically synthesized
acaaggaaacaaatgctaac

SEQ ID NO: 10508 - DNA, 20 bp, Artificial Sequence
  chemically synthesized
gaaacaaatgctaacaggtg

SEQ ID NO: 10509 - DNA, 20 bp, Artificial Sequence
  chemically synthesized
aaacaaatgctaacaggtga

SEQ ID NO: 10510 - DNA, 20 bp, Artificial Sequence
  chemically synthesized
aacaaatgctaacaggtgaa

SEQ ID NO: 10511 - DNA, 20 bp, Artificial Sequence
  chemically synthesized
caaatgctaacaggtgaagg

SEQ ID NO: 10512 - DNA, 20 bp, Artificial Sequence
  chemically synthesized
gaagggagcccaaaatctca

SEQ ID NO: 10513 - DNA, 20 bp, Artificial Sequence
  chemically synthesized
atctcacagcatgatacaat

SEQ ID NO: 10514 - DNA, 20 bp, Artificial Sequence
  chemically synthesized
tctcacagcatgatacaata

SEQ ID NO: 10515 - DNA, 20 bp, Artificial Sequence
  chemically synthesized
ctcacagcatgatacaataa

SEQ ID NO: 10516 - DNA, 20 bp, Artificial Sequence
  chemically synthesized
cagcatgatacaataagggt

SEQ ID NO: 10517 - DNA, 20 bp, Artificial Sequence
  chemically synthesized
atacaataagggtcagaacc

SEQ ID NO: 10518 - DNA, 20 bp, Artificial Sequence
  chemically synthesized
tacaataagggtcagaaccc

SEQ ID NO: 10519 - DNA, 20 bp, Artificial Sequence
  chemically synthesized
gggtcagaacccaggtgtcc

SEQ ID NO: 10520 - DNA, 20 bp, Artificial Sequence
  chemically synthesized
aacccaggtgtcctggtttt

SEQ ID NO: 10521 - DNA, 20 bp, Artificial Sequence
  chemically synthesized
aggtgtcctggttttcagat

SEQ ID NO: 10522 - DNA, 20 bp, Artificial Sequence
  chemically synthesized
tgtctctctgttaacactaa

SEQ ID NO: 10523 - DNA, 20 bp, Artificial Sequence
  chemically synthesized
tctgttaacactaaaagtca

SEQ ID NO: 10524 - DNA, 20 bp, Artificial Sequence
  chemically synthesized
taacactaaaagtcaaagtt

SEQ ID NO: 10525 - DNA, 20 bp, Artificial Sequence
  chemically synthesized
taaaagtcaaagtttggttc

SEQ ID NO: 10526 - DNA, 20 bp, Artificial Sequence
  chemically synthesized
ggaaaatctgtaatgcccaa

SEQ ID NO: 10527 - DNA, 20 bp, Artificial Sequence
  chemically synthesized
taaatgccctccccccaaac

SEQ ID NO: 10528 - DNA, 20 bp, Artificial Sequence
  chemically synthesized
ccctccccccaaaccagtct

SEQ ID NO: 10529 - DNA, 20 bp, Artificial Sequence
  chemically synthesized
cagtcttggtaatttctcca

SEQ ID NO: 10530 - DNA, 20 bp, Artificial Sequence
  chemically synthesized
taatttctccatggctttca

SEQ ID NO: 10531 - DNA, 20 bp, Artificial Sequence
  chemically synthesized
tttctccatggctttcacag

SEQ ID NO: 10532 - DNA, 20 bp, Artificial Sequence
  chemically synthesized
ttctccatggctttcacaga

SEQ ID NO: 10533 - DNA, 20 bp, Artificial Sequence
  chemically synthesized
tctccatggctttcacagaa

SEQ ID NO: 10534 - DNA, 20 bp, Artificial Sequence
  chemically synthesized
cagaagggtaaatgtctact

SEQ ID NO: 10535 - DNA, 20 bp, Artificial Sequence
  chemically synthesized
aagggtaaatgtctacttgg

SEQ ID NO: 10536 - DNA, 20 bp, Artificial Sequence
  chemically synthesized
agggtaaatgtctacttgga

SEQ ID NO: 10537 - DNA, 20 bp, Artificial Sequence
  chemically synthesized
cttcttccttcattcgtgtt

SEQ ID NO: 10538 - DNA, 20 bp, Artificial Sequence
  chemically synthesized
tcgtgtttggtaatcaaaaa

SEQ ID NO: 10539 - DNA, 20 bp, Artificial Sequence
  chemically synthesized
tttatcataatgctctcaat

SEQ ID NO: 10540 - DNA, 20 bp, Artificial Sequence
  chemically synthesized
atcataatgctctcaattgg

SEQ ID NO: 10541 - DNA, 20 bp, Artificial Sequence
  chemically synthesized
tcataatgctctcaattgga

SEQ ID NO: 10542 - DNA, 20 bp, Artificial Sequence
  chemically synthesized
attggaaggtcttcatacta

SEQ ID NO: 10543 - DNA, 20 bp, Artificial Sequence
  chemically synthesized
ttggaaggtcttcatactac

SEQ ID NO: 10544 - DNA, 20 bp, Artificial Sequence
  chemically synthesized
gaaggtcttcatactacagg

SEQ ID NO: 10545 - DNA, 20 bp, Artificial Sequence
  chemically synthesized
aggcagatactgttattttc

SEQ ID NO: 10546 - DNA, 20 bp, Artificial Sequence
  chemically synthesized
cagatactgttattttctgg

SEQ ID NO: 10547 - DNA, 20 bp, Artificial Sequence
  chemically synthesized
gatactgttattttctggta

SEQ ID NO: 10548 - DNA, 20 bp, Artificial Sequence
  chemically synthesized
atactgttattttctggtag

SEQ ID NO: 10549 - DNA, 20 bp, Artificial Sequence
  chemically synthesized
tgttattttctggtagagga

SEQ ID NO: 10550 - DNA, 20 bp, Artificial Sequence
  chemically synthesized
tattttctggtagaggatgg

SEQ ID NO: 10551 - DNA, 20 bp, Artificial Sequence
  chemically synthesized
tttctggtagaggatggcag

SEQ ID NO: 10552 - DNA, 20 bp, Artificial Sequence
  chemically synthesized
ttctggtagaggatggcagc

SEQ ID NO: 10553 - DNA, 20 bp, Artificial Sequence
  chemically synthesized
tctggtagaggatggcagca

SEQ ID NO: 10554 - DNA, 20 bp, Artificial Sequence
  chemically synthesized
gtagaggatggcagcagggc

SEQ ID NO: 10555 - DNA, 20 bp, Artificial Sequence
  chemically synthesized
tagaggatggcagcagggct

SEQ ID NO: 10556 - DNA, 20 bp, Artificial Sequence
  chemically synthesized
tggcagcagggctgggaaaa

SEQ ID NO: 10557 - DNA, 20 bp, Artificial Sequence
  chemically synthesized
agggctgggaaaaaagaatg

SEQ ID NO: 10558 - DNA, 20 bp, Artificial Sequence
  chemically synthesized
atgtggtttttttctaacca

SEQ ID NO: 10559 - DNA, 20 bp, Artificial Sequence
  chemically synthesized
tggtttttttctaaccacag

SEQ ID NO: 10560 - DNA, 20 bp, Artificial Sequence
  chemically synthesized
ggtttttttctaaccacagt

SEQ ID NO: 10561 - DNA, 20 bp, Artificial Sequence
  chemically synthesized
ataacaatgatttcactttc

SEQ ID NO: 10562 - DNA, 20 bp, Artificial Sequence
  chemically synthesized
ttcactttctagatataaaa

SEQ ID NO: 10563 - DNA, 20 bp, Artificial Sequence
  chemically synthesized
tcactttctagatataaaac

SEQ ID NO: 10564 - DNA, 20 bp, Artificial Sequence
  chemically synthesized
ttctagatataaaacaggca

SEQ ID NO: 10565 - DNA, 20 bp, Artificial Sequence
  chemically synthesized
ccctgaacttctgcaaaatc

SEQ ID NO: 10566 - DNA, 20 bp, Artificial Sequence
  chemically synthesized
aatctagatttgatcaaatt

SEQ ID NO: 10567 - DNA, 20 bp, Artificial Sequence
  chemically synthesized
atttgatcaaattcagaaac

SEQ ID NO: 10568 - DNA, 20 bp, Artificial Sequence
  chemically synthesized
actggtgatttgatcaaatt

SEQ ID NO: 10569 - DNA, 20 bp, Artificial Sequence
  chemically synthesized
aaattcagaatcccatattt

SEQ ID NO: 10570 - DNA, 20 bp, Artificial Sequence
  chemically synthesized
aattcagaatcccatatttt

SEQ ID NO: 10571 - DNA, 20 bp, Artificial Sequence
  chemically synthesized
tattttgggatgatgtgttc

SEQ ID NO: 10572 - DNA, 20 bp, Artificial Sequence
  chemically synthesized
tttgggatgatgtgttctag

SEQ ID NO: 10573 - DNA, 20 bp, Artificial Sequence
  chemically synthesized
ggatgatgtgttctagcaga

SEQ ID NO: 10574 - DNA, 20 bp, Artificial Sequence
  chemically synthesized
gtgttctagcagaaagctat

SEQ ID NO: 10575 - DNA, 20 bp, Artificial Sequence
  chemically synthesized
tctagcagaaagctattggt

SEQ ID NO: 10576 - DNA, 20 bp, Artificial Sequence
  chemically synthesized
ttttgctctttcttccccaa

SEQ ID NO: 10577 - DNA, 20 bp, Artificial Sequence
  chemically synthesized
ttccccaaaagatttttaaa

SEQ ID NO: 10578 - DNA, 20 bp, Artificial Sequence
  chemically synthesized
taaatagttttcatctttaa

SEQ ID NO: 10579 - DNA, 20 bp, Artificial Sequence
  chemically synthesized
aaatagttttcatctttaaa

SEQ ID NO: 10580 - DNA, 20 bp, Artificial Sequence
  chemically synthesized
ctttaaaaggatttcaactt

SEQ ID NO: 10581 - DNA, 20 bp, Artificial Sequence
  chemically synthesized
ttcagattgtgcccacgcca

SEQ ID NO: 10582 - DNA, 20 bp, Artificial Sequence
  chemically synthesized
catctaatcaataaataaat

SEQ ID NO: 10583 - DNA, 20 bp, Artificial Sequence
  chemically synthesized
ataaataaataagacaaaca

SEQ ID NO: 10584 - DNA, 20 bp, Artificial Sequence
  chemically synthesized
aataaataagacaaacaaag

SEQ ID NO: 10585 - DNA, 20 bp, Artificial Sequence
  chemically synthesized
tatgtttatcctttaccatt

SEQ ID NO: 10586 - DNA, 20 bp, Artificial Sequence
  chemically synthesized
atgtttatcctttaccattt

SEQ ID NO: 10587 - DNA, 20 bp, Artificial Sequence
  chemically synthesized
tttatcctttaccatttggg

SEQ ID NO: 10588 - DNA, 20 bp, Artificial Sequence
  chemically synthesized
gaagtgtacattaattactg

SEQ ID NO: 10589 - DNA, 20 bp, Artificial Sequence
  chemically synthesized
cccccaccccctctgcatcg

SEQ ID NO: 10590 - DNA, 20 bp, Artificial Sequence
  chemically synthesized
caccccctctgcatcgcaga

SEQ ID NO: 10591 - DNA, 20 bp, Artificial Sequence
  chemically synthesized
cccctctgcatcgcagacag

SEQ ID NO: 10592 - DNA, 20 bp, Artificial Sequence
  chemically synthesized
tcgcagacagcagtgctcaa

SEQ ID NO: 10593 - DNA, 20 bp, Artificial Sequence
  chemically synthesized
cgcagacagcagtgctcaaa

SEQ ID NO: 10594 - DNA, 20 bp, Artificial Sequence
  chemically synthesized
gcagacagcagtgctcaaaa

SEQ ID NO: 10595 - DNA, 20 bp, Artificial Sequence
  chemically synthesized
tccgcaaaataaaaatgtgt

SEQ ID NO: 10596 - DNA, 20 bp, Artificial Sequence
  chemically synthesized
ccgcaaaataaaaatgtgtc

SEQ ID NO: 10597 - DNA, 20 bp, Artificial Sequence
  chemically synthesized
aaatgtgtcgggtaattaaa

SEQ ID NO: 10598 - DNA, 20 bp, Artificial Sequence
  chemically synthesized
aatgtgtcgggtaattaaat

SEQ ID NO: 10599 - DNA, 20 bp, Artificial Sequence
  chemically synthesized
attaaatgggtatttataat

SEQ ID NO: 10600 - DNA, 20 bp, Artificial Sequence
  chemically synthesized
tagaacttaataatttgcat

SEQ ID NO: 10601 - DNA, 20 bp, Artificial Sequence
  chemically synthesized
agaacttaataatttgcatc

SEQ ID NO: 10602 - DNA, 20 bp, Artificial Sequence
  chemically synthesized
gaacttaataatttgcatca

SEQ ID NO: 10603 - DNA, 20 bp, Artificial Sequence
  chemically synthesized
aatttgcatcagggacaaat

SEQ ID NO: 10604 - DNA, 20 bp, Artificial Sequence
  chemically synthesized
tgagctctgattttaatctg

SEQ ID NO: 10605 - DNA, 20 bp, Artificial Sequence
  chemically synthesized
attttaatctgcagcgcatt

SEQ ID NO: 10606 - DNA, 20 bp, Artificial Sequence
  chemically synthesized
aatctgcagcgcatttagat

SEQ ID NO: 10607 - DNA, 20 bp, Artificial Sequence
  chemically synthesized
agcgcatttagattagccca

SEQ ID NO: 10608 - DNA, 20 bp, Artificial Sequence
  chemically synthesized
catttagattagcccaaaga

SEQ ID NO: 10609 - DNA, 20 bp, Artificial Sequence
  chemically synthesized
ccaaagatagtgtaatttga

SEQ ID NO: 10610 - DNA, 20 bp, Artificial Sequence
  chemically synthesized
tagtgtaatttgatggttta

SEQ ID NO: 10611 - DNA, 20 bp, Artificial Sequence
  chemically synthesized
agtgtaatttgatggtttat

SEQ ID NO: 10612 - DNA, 20 bp, Artificial Sequence
  chemically synthesized
atggtttataggcctcctct

SEQ ID NO: 10613 - DNA, 20 bp, Artificial Sequence
  chemically synthesized
tcggattatgaaacaatacc

SEQ ID NO: 10614 - DNA, 20 bp, Artificial Sequence
  chemically synthesized
tgaaacaataccaagccttc

SEQ ID NO: 10615 - DNA, 20 bp, Artificial Sequence
  chemically synthesized
caataccaagccttcaagtg

SEQ ID NO: 10616 - DNA, 20 bp, Artificial Sequence
  chemically synthesized
caagtgcagtgtgtctatgt

SEQ ID NO: 10617 - DNA, 20 bp, Artificial Sequence
  chemically synthesized
aagtgcagtgtgtctatgtc

SEQ ID NO: 10618 - DNA, 20 bp, Artificial Sequence
  chemically synthesized
gtgcagtgtgtctatgtcag

SEQ ID NO: 10619 - DNA, 20 bp, Artificial Sequence
  chemically synthesized
tgcagtgtgtctatgtcagg

SEQ ID NO: 10620 - DNA, 20 bp, Artificial Sequence
  chemically synthesized
gcagtgtgtctatgtcagga

SEQ ID NO: 10621 - DNA, 20 bp, Artificial Sequence
  chemically synthesized
tctatgtcaggagggtgtta

SEQ ID NO: 10622 - DNA, 20 bp, Artificial Sequence
  chemically synthesized
atgtcaggagggtgttaaag

SEQ ID NO: 10623 - DNA, 20 bp, Artificial Sequence
  chemically synthesized
tcaggagggtgttaaagaag

SEQ ID NO: 10624 - DNA, 20 bp, Artificial Sequence
  chemically synthesized
gaaaatgtttgacaacgtga

SEQ ID NO: 10625 - DNA, 20 bp, Artificial Sequence
  chemically synthesized
aatgtttgacaacgtgaaag

SEQ ID NO: 10626 - DNA, 20 bp, Artificial Sequence
  chemically synthesized
attacatgacaactgtgtaa

SEQ ID NO: 10627 - DNA, 20 bp, Artificial Sequence
  chemically synthesized
aagtcatgatgaaacaaata

SEQ ID NO: 10628 - DNA, 20 bp, Artificial Sequence
  chemically synthesized
agtcatgatgaaacaaataa

SEQ ID NO: 10629 - DNA, 20 bp, Artificial Sequence
  chemically synthesized
gtcatgatgaaacaaataaa

SEQ ID NO: 10630 - DNA, 20 bp, Artificial Sequence
  chemically synthesized
tccctgcgctaatctctgcc

SEQ ID NO: 10631 - DNA, 20 bp, Artificial Sequence
  chemically synthesized
tgcccagccaacgcattctt

SEQ ID NO: 10632 - DNA, 20 bp, Artificial Sequence
  chemically synthesized
ccagccaacgcattcttaag

SEQ ID NO: 10633 - DNA, 20 bp, Artificial Sequence
  chemically synthesized
cagccaacgcattcttaagc

SEQ ID NO: 10634 - DNA, 20 bp, Artificial Sequence
  chemically synthesized
agccaacgcattcttaagcg

SEQ ID NO: 10635 - DNA, 20 bp, Artificial Sequence
  chemically synthesized
ttcttaagcggggaactact

SEQ ID NO: 10636 - DNA, 20 bp, Artificial Sequence
  chemically synthesized
agcggggaactacttagcac

SEQ ID NO: 10637 - DNA, 20 bp, Artificial Sequence
  chemically synthesized
gcggggaactacttagcacc

SEQ ID NO: 10638 - DNA, 20 bp, Artificial Sequence
  chemically synthesized
ggaacgttgtaaattatcac

SEQ ID NO: 10639 - DNA, 20 bp, Artificial Sequence
  chemically synthesized
tgtaaattatcactagtcaa

SEQ ID NO: 10640 - DNA, 20 bp, Artificial Sequence
  chemically synthesized
tagtcaacagcattgatttt

SEQ ID NO: 10641 - DNA, 20 bp, Artificial Sequence
  chemically synthesized
tttttagtcgacatttcaat

SEQ ID NO: 10642 - DNA, 20 bp, Artificial Sequence
  chemically synthesized
ttttagtcgacatttcaatc

SEQ ID NO: 10643 - DNA, 20 bp, Artificial Sequence
  chemically synthesized
tcgacatttcaatcaggttg

SEQ ID NO: 10644 - DNA, 20 bp, Artificial Sequence
  chemically synthesized
acatttcaatcaggttgaag

SEQ ID NO: 10645 - DNA, 20 bp, Artificial Sequence
  chemically synthesized
gttgaagtagaaatactacc

SEQ ID NO: 10646 - DNA, 20 bp, Artificial Sequence
  chemically synthesized
atactacccggctcatccaa

SEQ ID NO: 10647 - DNA, 20 bp, Artificial Sequence
  chemically synthesized
tcatccaacagcctcttaac

SEQ ID NO: 10648 - DNA, 20 bp, Artificial Sequence
  chemically synthesized
aaccagtccactgcccctct

SEQ ID NO: 10649 - DNA, 20 bp, Artificial Sequence
  chemically synthesized
accagtccactgcccctctg

SEQ ID NO: 10650 - DNA, 20 bp, Artificial Sequence
  chemically synthesized
ctgcccctctgaggtctccc

SEQ ID NO: 10651 - DNA, 20 bp, Artificial Sequence
  chemically synthesized
ctctgaggtctccccggtta

SEQ ID NO: 10652 - DNA, 20 bp, Artificial Sequence
  chemically synthesized
tcaccattcgatatttattg

SEQ ID NO: 10653 - DNA, 20 bp, Artificial Sequence
  chemically synthesized
tattgtagctttgccacatc

SEQ ID NO: 10654 - DNA, 20 bp, Artificial Sequence
  chemically synthesized
attgtagctttgccacatcc

SEQ ID NO: 10655 - DNA, 20 bp, Artificial Sequence
  chemically synthesized
ctttgccacatccaggcact

SEQ ID NO: 10656 - DNA, 20 bp, Artificial Sequence
  chemically synthesized
acatccaggcacttggcctg

SEQ ID NO: 10657 - DNA, 20 bp, Artificial Sequence
  chemically synthesized
catccaggcacttggcctga

SEQ ID NO: 10658 - DNA, 20 bp, Artificial Sequence
  chemically synthesized
atccaggcacttggcctgaa

SEQ ID NO: 10659 - DNA, 20 bp, Artificial Sequence
  chemically synthesized
cacttggcctgaagggtcac

SEQ ID NO: 10660 - DNA, 20 bp, Artificial Sequence
  chemically synthesized
agggtcaccggcctgcctct

SEQ ID NO: 10661 - DNA, 20 bp, Artificial Sequence
  chemically synthesized
gggtcaccggcctgcctctt

SEQ ID NO: 10662 - DNA, 20 bp, Artificial Sequence
  chemically synthesized
aaatttgtgcttacctaacg

SEQ ID NO: 10663 - DNA, 20 bp, Artificial Sequence
  chemically synthesized
aatttgtgcttacctaacga

SEQ ID NO: 10664 - DNA, 20 bp, Artificial Sequence
  chemically synthesized
ttgtgcttacctaacgaagg

SEQ ID NO: 10665 - DNA, 20 bp, Artificial Sequence
  chemically synthesized
ttacctaacgaaggcagaaa

SEQ ID NO: 10666 - DNA, 20 bp, Artificial Sequence
  chemically synthesized
aacgaaggcagaaacagaaa

SEQ ID NO: 10667 - DNA, 20 bp, Artificial Sequence
  chemically synthesized
ggcagaaacagaaaaagaaa

SEQ ID NO: 10668 - DNA, 20 bp, Artificial Sequence
  chemically synthesized
agaaaaagaaaaagaaacaa

SEQ ID NO: 10669 - DNA, 20 bp, Artificial Sequence
  chemically synthesized
gaaaaagaaaaagaaacaaa

SEQ ID NO: 10670 - DNA, 20 bp, Artificial Sequence
  chemically synthesized
aagaaacaaaaggccatcat

SEQ ID NO: 10671 - DNA, 20 bp, Artificial Sequence
  chemically synthesized
gaaacaaaaggccatcatca

SEQ ID NO: 10672 - DNA, 20 bp, Artificial Sequence
  chemically synthesized
aaaggccatcatcagagatg

SEQ ID NO: 10673 - DNA, 20 bp, Artificial Sequence
  chemically synthesized
cctgattttcactgattttc

SEQ ID NO: 10674 - DNA, 20 bp, Artificial Sequence
  chemically synthesized
ctgattttcactgattttca

SEQ ID NO: 10675 - DNA, 20 bp, Artificial Sequence
  chemically synthesized
tgattttcactgattttcaa

SEQ ID NO: 10676 - DNA, 20 bp, Artificial Sequence
  chemically synthesized
ttttcactgattttcaaggg

SEQ ID NO: 10677 - DNA, 20 bp, Artificial Sequence
  chemically synthesized
ttcactgattttcaagggaa

SEQ ID NO: 10678 - DNA, 20 bp, Artificial Sequence
  chemically synthesized
actgattttcaagggaagag

SEQ ID NO: 10679 - DNA, 20 bp, Artificial Sequence
  chemically synthesized
ctgattttcaagggaagaga

SEQ ID NO: 10680 - DNA, 20 bp, Artificial Sequence
  chemically synthesized
caagggaagagaaggaaaac

SEQ ID NO: 10681 - DNA, 20 bp, Artificial Sequence
  chemically synthesized
aagggaagagaaggaaaact

SEQ ID NO: 10682 - DNA, 20 bp, Artificial Sequence
  chemically synthesized
agggaagagaaggaaaacta

SEQ ID NO: 10683 - DNA, 20 bp, Artificial Sequence
  chemically synthesized
gggaagagaaggaaaactag

SEQ ID NO: 10684 - DNA, 20 bp, Artificial Sequence
  chemically synthesized
ggaagagaaggaaaactagg

SEQ ID NO: 10685 - DNA, 20 bp, Artificial Sequence
  chemically synthesized
gaaggaaaactagggggtgc

SEQ ID NO: 10686 - DNA, 20 bp, Artificial Sequence
  chemically synthesized
gaaaactagggggtgcgagc

SEQ ID NO: 10687 - DNA, 20 bp, Artificial Sequence
  chemically synthesized
aaaactagggggtgcgagcg

SEQ ID NO: 10688 - DNA, 20 bp, Artificial Sequence
  chemically synthesized
aaactagggggtgcgagcga

SEQ ID NO: 10689 - DNA, 20 bp, Artificial Sequence
  chemically synthesized
ggggtgcgagcgagggaaat

SEQ ID NO: 10690 - DNA, 20 bp, Artificial Sequence
  chemically synthesized
gtgcgagcgagggaaataag

SEQ ID NO: 10691 - DNA, 20 bp, Artificial Sequence
  chemically synthesized
tgcgagcgagggaaataaga

SEQ ID NO: 10692 - DNA, 20 bp, Artificial Sequence
  chemically synthesized
gcgagcgagggaaataagaa

SEQ ID NO: 10693 - DNA, 20 bp, Artificial Sequence
  chemically synthesized
gggaaataagaagggttcta

SEQ ID NO: 10694 - DNA, 20 bp, Artificial Sequence
  chemically synthesized
tgatacgccttttatcattt

SEQ ID NO: 10695 - DNA, 20 bp, Artificial Sequence
  chemically synthesized
tcatttcagctttatcattt

SEQ ID NO: 10696 - DNA, 20 bp, Artificial Sequence
  chemically synthesized
tcagctttatcatttcagtc

SEQ ID NO: 10697 - DNA, 20 bp, Artificial Sequence
  chemically synthesized
cagctttatcatttcagtct

SEQ ID NO: 10698 - DNA, 20 bp, Artificial Sequence
  chemically synthesized
gctttatcatttcagtctag

SEQ ID NO: 10699 - DNA, 20 bp, Artificial Sequence
  chemically synthesized
tcatttcagtctaggagacc

SEQ ID NO: 10700 - DNA, 20 bp, Artificial Sequence
  chemically synthesized
gagacccagcaaataaaact

SEQ ID NO: 10701 - DNA, 20 bp, Artificial Sequence
  chemically synthesized
gacccagcaaataaaactaa

SEQ ID NO: 10702 - DNA, 20 bp, Artificial Sequence
  chemically synthesized
aaaactaagagcttctcttc

SEQ ID NO: 10703 - DNA, 20 bp, Artificial Sequence
  chemically synthesized
aaactaagagcttctcttcc

SEQ ID NO: 10704 - DNA, 20 bp, Artificial Sequence
  chemically synthesized
aactaagagcttctcttcca

SEQ ID NO: 10705 - DNA, 20 bp, Artificial Sequence
  chemically synthesized
agcttctcttccagggtgac

SEQ ID NO: 10706 - DNA, 20 bp, Artificial Sequence
  chemically synthesized
gcttctcttccagggtgaca

SEQ ID NO: 10707 - DNA, 20 bp, Artificial Sequence
  chemically synthesized
cttctcttccagggtgacaa

SEQ ID NO: 10708 - DNA, 20 bp, Artificial Sequence
  chemically synthesized
tctcttccagggtgacaagg

SEQ ID NO: 10709 - DNA, 20 bp, Artificial Sequence
  chemically synthesized
aaccactacactcttgaccc

SEQ ID NO: 10710 - DNA, 20 bp, Artificial Sequence
  chemically synthesized
accactacactcttgaccca

SEQ ID NO: 10711 - DNA, 20 bp, Artificial Sequence
  chemically synthesized
ccactacactcttgacccaa

SEQ ID NO: 10712 - DNA, 20 bp, Artificial Sequence
  chemically synthesized
actcttgacccaagggtatg

SEQ ID NO: 10713 - DNA, 20 bp, Artificial Sequence
  chemically synthesized
tcttgacccaagggtatgta

SEQ ID NO: 10714 - DNA, 20 bp, Artificial Sequence
  chemically synthesized
aagggtatgtagagacaatg

SEQ ID NO: 10715 - DNA, 20 bp, Artificial Sequence
  chemically synthesized
gggtatgtagagacaatgaa

SEQ ID NO: 10716 - DNA, 20 bp, Artificial Sequence
  chemically synthesized
ggtatgtagagacaatgaag

SEQ ID NO: 10717 - DNA, 20 bp, Artificial Sequence
  chemically synthesized
gtatgtagagacaatgaaga

SEQ ID NO: 10718 - DNA, 20 bp, Artificial Sequence
  chemically synthesized
tagagacaatgaagagggcc

SEQ ID NO: 10719 - DNA, 20 bp, Artificial Sequence
  chemically synthesized
gagacaatgaagagggccaa

SEQ ID NO: 10720 - DNA, 20 bp, Artificial Sequence
  chemically synthesized
acaatgaagagggccaagag

SEQ ID NO: 10721 - DNA, 20 bp, Artificial Sequence
  chemically synthesized
caatgaagagggccaagaga

SEQ ID NO: 10722 - DNA, 20 bp, Artificial Sequence
  chemically synthesized
aatgaagagggccaagagaa

SEQ ID NO: 10723 - DNA, 20 bp, Artificial Sequence
  chemically synthesized
atgaagagggccaagagaag

SEQ ID NO: 10724 - DNA, 20 bp, Artificial Sequence
  chemically synthesized
agagggccaagagaaggggt

SEQ ID NO: 10725 - DNA, 20 bp, Artificial Sequence
  chemically synthesized
gagggccaagagaaggggtg

SEQ ID NO: 10726 - DNA, 20 bp, Artificial Sequence
  chemically synthesized
agggccaagagaaggggtga

SEQ ID NO: 10727 - DNA, 20 bp, Artificial Sequence
  chemically synthesized
gggccaagagaaggggtgag

SEQ ID NO: 10728 - DNA, 20 bp, Artificial Sequence
  chemically synthesized
ggccaagagaaggggtgagg

SEQ ID NO: 10729 - DNA, 20 bp, Artificial Sequence
  chemically synthesized
caagagaaggggtgaggggg

SEQ ID NO: 10730 - DNA, 20 bp, Artificial Sequence
  chemically synthesized
aagagaaggggtgaggggga

SEQ ID NO: 10731 - DNA, 20 bp, Artificial Sequence
  chemically synthesized
agagaaggggtgagggggaa

SEQ ID NO: 10732 - DNA, 20 bp, Artificial Sequence
  chemically synthesized
gggcttgcatgacctccatt

SEQ ID NO: 10733 - DNA, 20 bp, Artificial Sequence
  chemically synthesized
ggcttgcatgacctccattg

SEQ ID NO: 10734 - DNA, 20 bp, Artificial Sequence
  chemically synthesized
cattgaggacgtccatgccc

SEQ ID NO: 10735 - DNA, 20 bp, Artificial Sequence
  chemically synthesized
attgaggacgtccatgcccc

SEQ ID NO: 10736 - DNA, 20 bp, Artificial Sequence
  chemically synthesized
aggacgtccatgccccggga

SEQ ID NO: 10737 - DNA, 20 bp, Artificial Sequence
  chemically synthesized
gacgtccatgccccgggaca

SEQ ID NO: 10738 - DNA, 20 bp, Artificial Sequence
  chemically synthesized
atgccccgggacagagtgcg

SEQ ID NO: 10739 - DNA, 20 bp, Artificial Sequence
  chemically synthesized
cgggacagagtgcgaagtaa

SEQ ID NO: 10740 - DNA, 20 bp, Artificial Sequence
  chemically synthesized
cagagtgcgaagtaaaagtg

SEQ ID NO: 10741 - DNA, 20 bp, Artificial Sequence
  chemically synthesized
gcgaagtaaaagtgaagctt

SEQ ID NO: 10742 - DNA, 20 bp, Artificial Sequence
  chemically synthesized
gaagtaaaagtgaagctttg

SEQ ID NO: 10743 - DNA, 20 bp, Artificial Sequence
  chemically synthesized
tttggagctcttgacccaca

SEQ ID NO: 10744 - DNA, 20 bp, Artificial Sequence
  chemically synthesized
tcttgacccacatggattct

SEQ ID NO: 10745 - DNA, 20 bp, Artificial Sequence
  chemically synthesized
tgacccacatggattctcag

SEQ ID NO: 10746 - DNA, 20 bp, Artificial Sequence
  chemically synthesized
cctccatcccacctcaaact

SEQ ID NO: 10747 - DNA, 20 bp, Artificial Sequence
  chemically synthesized
ccatcccacctcaaactcag

SEQ ID NO: 10748 - DNA, 20 bp, Artificial Sequence
  chemically synthesized
ctcaaactcagaagacaacc

SEQ ID NO: 10749 - DNA, 20 bp, Artificial Sequence
  chemically synthesized
gaccgacaacttctttgtga

SEQ ID NO: 10750 - DNA, 20 bp, Artificial Sequence
  chemically synthesized
ttctttgtgatggatctgaa

SEQ ID NO: 10751 - DNA, 20 bp, Artificial Sequence
  chemically synthesized
tggatctgaacagcctccct

SEQ ID NO: 10752 - DNA, 20 bp, Artificial Sequence
  chemically synthesized
tgaacagcctcccttggttc

SEQ ID NO: 10753 - DNA, 20 bp, Artificial Sequence
  chemically synthesized
acagcctcccttggttctag

SEQ ID NO: 10754 - DNA, 20 bp, Artificial Sequence
  chemically synthesized
gcctcccttggttctagcag

SEQ ID NO: 10755 - DNA, 20 bp, Artificial Sequence
  chemically synthesized
cctcccttggttctagcaga

SEQ ID NO: 10756 - DNA, 20 bp, Artificial Sequence
  chemically synthesized
ttctagcagaaggacttacc

SEQ ID NO: 10757 - DNA, 20 bp, Artificial Sequence
  chemically synthesized
agcagaaggacttaccaagt

SEQ ID NO: 10758 - DNA, 20 bp, Artificial Sequence
  chemically synthesized
agaaggacttaccaagtgag

SEQ ID NO: 10759 - DNA, 20 bp, Artificial Sequence
  chemically synthesized
aaggacttaccaagtgagca

SEQ ID NO: 10760 - DNA, 20 bp, Artificial Sequence
  chemically synthesized
agctcccatccgatactcgc

SEQ ID NO: 10761 - DNA, 20 bp, Artificial Sequence
  chemically synthesized
atccgatactcgccagtgct

SEQ ID NO: 10762 - DNA, 20 bp, Artificial Sequence
  chemically synthesized
tccgatactcgccagtgctg

SEQ ID NO: 10763 - DNA, 20 bp, Artificial Sequence
  chemically synthesized
caactcttccactcctccca

SEQ ID NO: 10764 - DNA, 20 bp, Artificial Sequence
  chemically synthesized
aactcttccactcctcccac

SEQ ID NO: 10765 - DNA, 20 bp, Artificial Sequence
  chemically synthesized
actcttccactcctcccacg

SEQ ID NO: 10766 - DNA, 20 bp, Artificial Sequence
  chemically synthesized
tcccacggggcctccgcatg

SEQ ID NO: 10767 - DNA, 20 bp, Artificial Sequence
  chemically synthesized
cacggggcctccgcatgaag

SEQ ID NO: 10768 - DNA, 20 bp, Artificial Sequence
  chemically synthesized
acggggcctccgcatgaagt

SEQ ID NO: 10769 - DNA, 20 bp, Artificial Sequence
  chemically synthesized
aaatgattctgaaattctct

SEQ ID NO: 10770 - DNA, 20 bp, Artificial Sequence
  chemically synthesized
tgattctgaaattctctcag

SEQ ID NO: 10771 - DNA, 20 bp, Artificial Sequence
  chemically synthesized
attctgaaattctctcagtg

SEQ ID NO: 10772 - DNA, 20 bp, Artificial Sequence
  chemically synthesized
ttctgaaattctctcagtgg

SEQ ID NO: 10773 - DNA, 20 bp, Artificial Sequence
  chemically synthesized
ctctcagtggaggtctatgt

SEQ ID NO: 10774 - DNA, 20 bp, Artificial Sequence
  chemically synthesized
agtggaggtctatgttagcc

SEQ ID NO: 10775 - DNA, 20 bp, Artificial Sequence
  chemically synthesized
tgttagcctggccaatttga

SEQ ID NO: 10776 - DNA, 20 bp, Artificial Sequence
  chemically synthesized
gttagcctggccaatttgaa

SEQ ID NO: 10777 - DNA, 20 bp, Artificial Sequence
  chemically synthesized
gcctggccaatttgaaagga

SEQ ID NO: 10778 - DNA, 20 bp, Artificial Sequence
  chemically synthesized
ctggccaatttgaaaggatg

SEQ ID NO: 10779 - DNA, 20 bp, Artificial Sequence
  chemically synthesized
atttgaaaggatggagaata

SEQ ID NO: 10780 - DNA, 20 bp, Artificial Sequence
  chemically synthesized
tttgaaaggatggagaatac

SEQ ID NO: 10781 - DNA, 20 bp, Artificial Sequence
  chemically synthesized
ggatggagaatacaggaaaa

SEQ ID NO: 10782 - DNA, 20 bp, Artificial Sequence
  chemically synthesized
tacaggaaaacagtaacatt

SEQ ID NO: 10783 - DNA, 20 bp, Artificial Sequence
  chemically synthesized
aaaacagtaacatttggttt

SEQ ID NO: 10784 - DNA, 20 bp, Artificial Sequence
  chemically synthesized
aatccatctgcaacgaacct

SEQ ID NO: 10785 - DNA, 20 bp, Artificial Sequence
  chemically synthesized
atccatctgcaacgaacctc

SEQ ID NO: 10786 - DNA, 20 bp, Artificial Sequence
  chemically synthesized
acgaacctcaggtcttgctt

SEQ ID NO: 10787 - DNA, 20 bp, Artificial Sequence
  chemically synthesized
cttgcttcagcaaatattaa

SEQ ID NO: 10788 - DNA, 20 bp, Artificial Sequence
  chemically synthesized
tcagcaaatattaatagcgt

SEQ ID NO: 10789 - DNA, 20 bp, Artificial Sequence
  chemically synthesized
cagcaaatattaatagcgtc

SEQ ID NO: 10790 - DNA, 20 bp, Artificial Sequence
  chemically synthesized
agcaaatattaatagcgtca

SEQ ID NO: 10791 - DNA, 20 bp, Artificial Sequence
  chemically synthesized
aaatattaatagcgtcaggg

SEQ ID NO: 10792 - DNA, 20 bp, Artificial Sequence
  chemically synthesized
aatagcgtcagggcagcctg

SEQ ID NO: 10793 - DNA, 20 bp, Artificial Sequence
  chemically synthesized
tagcgtcagggcagcctgtg

SEQ ID NO: 10794 - DNA, 20 bp, Artificial Sequence
  chemically synthesized
agggcagcctgtggagtgac

SEQ ID NO: 10795 - DNA, 20 bp, Artificial Sequence
  chemically synthesized
gggcagcctgtggagtgact

SEQ ID NO: 10796 - DNA, 20 bp, Artificial Sequence
  chemically synthesized
gcagcctgtggagtgactgg

SEQ ID NO: 10797 - DNA, 20 bp, Artificial Sequence
  chemically synthesized
agcctgtggagtgactggga

SEQ ID NO: 10798 - DNA, 20 bp, Artificial Sequence
  chemically synthesized
gcctgtggagtgactgggag

SEQ ID NO: 10799 - DNA, 20 bp, Artificial Sequence
  chemically synthesized
gactgggagaggccaccacg

SEQ ID NO: 10800 - DNA, 20 bp, Artificial Sequence
  chemically synthesized
cgcagctgaaaacttgcctc

SEQ ID NO: 10801 - DNA, 20 bp, Artificial Sequence
  chemically synthesized
gcagctgaaaacttgcctct

SEQ ID NO: 10802 - DNA, 20 bp, Artificial Sequence
  chemically synthesized
cagctgaaaacttgcctctg

SEQ ID NO: 10803 - DNA, 20 bp, Artificial Sequence
  chemically synthesized
ctgaaaacttgcctctgggg

SEQ ID NO: 10804 - DNA, 20 bp, Artificial Sequence
  chemically synthesized
gcctctggggaagccacatg

SEQ ID NO: 10805 - DNA, 20 bp, Artificial Sequence
  chemically synthesized
gaagccacatgcggatcata

SEQ ID NO: 10806 - DNA, 20 bp, Artificial Sequence
  chemically synthesized
agccacatgcggatcatatg

SEQ ID NO: 10807 - DNA, 20 bp, Artificial Sequence
  chemically synthesized
tcatatggagctgttgactg

SEQ ID NO: 10808 - DNA, 20 bp, Artificial Sequence
  chemically synthesized
ttccattcaaaacttccctc

SEQ ID NO: 10809 - DNA, 20 bp, Artificial Sequence
  chemically synthesized
caaaacttccctcaagtttc

SEQ ID NO: 10810 - DNA, 20 bp, Artificial Sequence
  chemically synthesized
caagtttccagcatgccttc

SEQ ID NO: 10811 - DNA, 20 bp, Artificial Sequence
  chemically synthesized
cttccggacttgccttacca

SEQ ID NO: 10812 - DNA, 20 bp, Artificial Sequence
  chemically synthesized
tgccttaccacagccttgtt

SEQ ID NO: 10813 - DNA, 20 bp, Artificial Sequence
  chemically synthesized
ttaccacagccttgttcagc

SEQ ID NO: 10814 - DNA, 20 bp, Artificial Sequence
  chemically synthesized
cagaaatgaaaacctcctcg

SEQ ID NO: 10815 - DNA, 20 bp, Artificial Sequence
  chemically synthesized
aaatgaaaacctcctcgaag

SEQ ID NO: 10816 - DNA, 20 bp, Artificial Sequence
  chemically synthesized
cgaagcagattatgaccccc

SEQ ID NO: 10817 - DNA, 20 bp, Artificial Sequence
  chemically synthesized
cccccagaacccatcgtcct

SEQ ID NO: 10818 - DNA, 20 bp, Artificial Sequence
  chemically synthesized
cacgcacactcactcacact

SEQ ID NO: 10819 - DNA, 20 bp, Artificial Sequence
  chemically synthesized
tgtataattctgattctccc

SEQ ID NO: 10820 - DNA, 20 bp, Artificial Sequence
  chemically synthesized
ctgattctccccagcctttg

SEQ ID NO: 10821 - DNA, 20 bp, Artificial Sequence
  chemically synthesized
tgattctccccagcctttga

SEQ ID NO: 10822 - DNA, 20 bp, Artificial Sequence
  chemically synthesized
agcctttgaaggtacgatcc

SEQ ID NO: 10823 - DNA, 20 bp, Artificial Sequence
  chemically synthesized
ctttgaaggtacgatccgag

SEQ ID NO: 10824 - DNA, 20 bp, Artificial Sequence
  chemically synthesized
gatccgagaagtaaatgcca

SEQ ID NO: 10825 - DNA, 20 bp, Artificial Sequence
  chemically synthesized
tccgagaagtaaatgccaca

SEQ ID NO: 10826 - DNA, 20 bp, Artificial Sequence
  chemically synthesized
aatgccacagagacaacaca

SEQ ID NO: 10827 - DNA, 20 bp, Artificial Sequence
  chemically synthesized
gacaacacacagaactgctg

SEQ ID NO: 10828 - DNA, 20 bp, Artificial Sequence
  chemically synthesized
acaacacacagaactgctgc

SEQ ID NO: 10829 - DNA, 20 bp, Artificial Sequence
  chemically synthesized
acacagaactgctgcaggcc

SEQ ID NO: 10830 - DNA, 20 bp, Artificial Sequence
  chemically synthesized
caagcctcaccacttcttaa

SEQ ID NO: 10831 - DNA, 20 bp, Artificial Sequence
  chemically synthesized
tcaccacttcttaaaagtcc

SEQ ID NO: 10832 - DNA, 20 bp, Artificial Sequence
  chemically synthesized
acttcttaaaagtccgagct

SEQ ID NO: 10833 - DNA, 20 bp, Artificial Sequence
  chemically synthesized
tccgagcttagtttctcatt

SEQ ID NO: 10834 - DNA, 20 bp, Artificial Sequence
  chemically synthesized
gtttctcattcagcccactg

SEQ ID NO: 10835 - DNA, 20 bp, Artificial Sequence
  chemically synthesized
cccactgcagtctcctgacc

SEQ ID NO: 10836 - DNA, 20 bp, Artificial Sequence
  chemically synthesized
ctgaccaagccacacacaaa

SEQ ID NO: 10837 - DNA, 20 bp, Artificial Sequence
  chemically synthesized
aacctcctccctctgtttct

SEQ ID NO: 10838 - DNA, 20 bp, Artificial Sequence
  chemically synthesized
acctcctccctctgtttctc

SEQ ID NO: 10839 - DNA, 20 bp, Artificial Sequence
  chemically synthesized
tcaggaccctcacttgattt

SEQ ID NO: 10840 - DNA, 20 bp, Artificial Sequence
  chemically synthesized
caggaccctcacttgatttc

SEQ ID NO: 10841 - DNA, 20 bp, Artificial Sequence
  chemically synthesized
acttgatttcaggctcattc

SEQ ID NO: 10842 - DNA, 20 bp, Artificial Sequence
  chemically synthesized
gatttcaggctcattctgga

SEQ ID NO: 10843 - DNA, 20 bp, Artificial Sequence
  chemically synthesized
tcaggctcattctggacaga

SEQ ID NO: 10844 - DNA, 20 bp, Artificial Sequence
  chemically synthesized
caggctcattctggacagat

SEQ ID NO: 10845 - DNA, 20 bp, Artificial Sequence
  chemically synthesized
aggctcattctggacagatg

SEQ ID NO: 10846 - DNA, 20 bp, Artificial Sequence
  chemically synthesized
tggggaaatgactacttgca

SEQ ID NO: 10847 - DNA, 20 bp, Artificial Sequence
  chemically synthesized
ggaaatgactacttgcaaag

SEQ ID NO: 10848 - DNA, 20 bp, Artificial Sequence
  chemically synthesized
gaaatgactacttgcaaagc

SEQ ID NO: 10849 - DNA, 20 bp, Artificial Sequence
  chemically synthesized
tacattgcaacttttcccaa

SEQ ID NO: 10850 - DNA, 20 bp, Artificial Sequence
  chemically synthesized
ccgtgctccttcaatatgcc

SEQ ID NO: 10851 - DNA, 20 bp, Artificial Sequence
  chemically synthesized
tccttcaatatgcccagaac

SEQ ID NO: 10852 - DNA, 20 bp, Artificial Sequence
  chemically synthesized
cttcaatatgcccagaactg

SEQ ID NO: 10853 - DNA, 20 bp, Artificial Sequence
  chemically synthesized
ttcaatatgcccagaactgg

SEQ ID NO: 10854 - DNA, 20 bp, Artificial Sequence
  chemically synthesized
tcaatatgcccagaactgga

SEQ ID NO: 10855 - DNA, 20 bp, Artificial Sequence
  chemically synthesized
caatatgcccagaactggag

SEQ ID NO: 10856 - DNA, 20 bp, Artificial Sequence
  chemically synthesized
gggaacattcttctctttcc

SEQ ID NO: 10857 - DNA, 20 bp, Artificial Sequence
  chemically synthesized
aacattcttctctttcccag

SEQ ID NO: 10858 - DNA, 20 bp, Artificial Sequence
  chemically synthesized
aagattgaaaaacttgacca

SEQ ID NO: 10859 - DNA, 20 bp, Artificial Sequence
  chemically synthesized
aaacttgaccacagaaccca

SEQ ID NO: 10860 - DNA, 20 bp, Artificial Sequence
  chemically synthesized
aacttgaccacagaacccat

SEQ ID NO: 10861 - DNA, 20 bp, Artificial Sequence
  chemically synthesized
cttgaccacagaacccatgg

SEQ ID NO: 10862 - DNA, 20 bp, Artificial Sequence
  chemically synthesized
ttgaccacagaacccatggg

SEQ ID NO: 10863 - DNA, 20 bp, Artificial Sequence
  chemically synthesized
tgaccacagaacccatggga

SEQ ID NO: 10864 - DNA, 20 bp, Artificial Sequence
  chemically synthesized
ccatgggagggacaactgtc

SEQ ID NO: 10865 - DNA, 20 bp, Artificial Sequence
  chemically synthesized
gagggacaactgtccagcac

SEQ ID NO: 10866 - DNA, 20 bp, Artificial Sequence
  chemically synthesized
gggacaactgtccagcacca

SEQ ID NO: 10867 - DNA, 20 bp, Artificial Sequence
  chemically synthesized
cagcaccagagcttcctgcc

SEQ ID NO: 10868 - DNA, 20 bp, Artificial Sequence
  chemically synthesized
cttcctgcccagttgttgcc

SEQ ID NO: 10869 - DNA, 20 bp, Artificial Sequence
  chemically synthesized
gttgttgcctggcaccgctg

SEQ ID NO: 10870 - DNA, 20 bp, Artificial Sequence
  chemically synthesized
ttgcctggcaccgctgaaga

SEQ ID NO: 10871 - DNA, 20 bp, Artificial Sequence
  chemically synthesized
agaaagctgcaaacgtactg

SEQ ID NO: 10872 - DNA, 20 bp, Artificial Sequence
  chemically synthesized
aaagctgcaaacgtactgaa

SEQ ID NO: 10873 - DNA, 20 bp, Artificial Sequence
  chemically synthesized
aagctgcaaacgtactgaag

SEQ ID NO: 10874 - DNA, 20 bp, Artificial Sequence
  chemically synthesized
ctgcaaacgtactgaagagg

SEQ ID NO: 10875 - DNA, 20 bp, Artificial Sequence
  chemically synthesized
caaacgtactgaagaggtag

SEQ ID NO: 10876 - DNA, 20 bp, Artificial Sequence
  chemically synthesized
aacgtactgaagaggtagca

SEQ ID NO: 10877 - DNA, 20 bp, Artificial Sequence
  chemically synthesized
acgtactgaagaggtagcag

SEQ ID NO: 10878 - DNA, 20 bp, Artificial Sequence
  chemically synthesized
cgtactgaagaggtagcaga

SEQ ID NO: 10879 - DNA, 20 bp, Artificial Sequence
  chemically synthesized
actgaagaggtagcagaggg

SEQ ID NO: 10880 - DNA, 20 bp, Artificial Sequence
  chemically synthesized
gaagaggtagcagagggtgg

SEQ ID NO: 10881 - DNA, 20 bp, Artificial Sequence
  chemically synthesized
gtagcagagggtggcggccg

SEQ ID NO: 10882 - DNA, 20 bp, Artificial Sequence
  chemically synthesized
tagcagagggtggcggccgc

SEQ ID NO: 10883 - DNA, 20 bp, Artificial Sequence
  chemically synthesized
agggtggcggccgcaggcca

SEQ ID NO: 10884 - DNA, 20 bp, Artificial Sequence
  chemically synthesized
gggtggcggccgcaggccaa

SEQ ID NO: 10885 - DNA, 20 bp, Artificial Sequence
  chemically synthesized
gccaaaggattgaacaactg

SEQ ID NO: 10886 - DNA, 20 bp, Artificial Sequence
  chemically synthesized
attgaacaactgtggaccct

SEQ ID NO: 10887 - DNA, 20 bp, Artificial Sequence
  chemically synthesized
ttgaacaactgtggaccctc

SEQ ID NO: 10888 - DNA, 20 bp, Artificial Sequence
  chemically synthesized
tgaacaactgtggaccctca

SEQ ID NO: 10889 - DNA, 20 bp, Artificial Sequence
  chemically synthesized
acaactgtggaccctcaggg

SEQ ID NO: 10890 - DNA, 20 bp, Artificial Sequence
  chemically synthesized
aatttcctcctctaccaaat

SEQ ID NO: 10891 - DNA, 20 bp, Artificial Sequence
  chemically synthesized
atttcctcctctaccaaatg

SEQ ID NO: 10892 - DNA, 20 bp, Artificial Sequence
  chemically synthesized
cctctaccaaatgaggctaa

SEQ ID NO: 10893 - DNA, 20 bp, Artificial Sequence
  chemically synthesized
ctctaccaaatgaggctaat

SEQ ID NO: 10894 - DNA, 20 bp, Artificial Sequence
  chemically synthesized
ctaccaaatgaggctaatgg

SEQ ID NO: 10895 - DNA, 20 bp, Artificial Sequence
  chemically synthesized
aatgggagtgtttcctttcc

SEQ ID NO: 10896 - DNA, 20 bp, Artificial Sequence
  chemically synthesized
atgggagtgtttcctttccg

SEQ ID NO: 10897 - DNA, 20 bp, Artificial Sequence
  chemically synthesized
tttcctttccgaggttgttg

SEQ ID NO: 10898 - DNA, 20 bp, Artificial Sequence
  chemically synthesized
ttcctttccgaggttgttgt

SEQ ID NO: 10899 - DNA, 20 bp, Artificial Sequence
  chemically synthesized
tttccgaggttgttgtggga

SEQ ID NO: 10900 - DNA, 20 bp, Artificial Sequence
  chemically synthesized
gggatggaatatcaatgtgt

SEQ ID NO: 10901 - DNA, 20 bp, Artificial Sequence
  chemically synthesized
atatcaatgtgtcagacaca

SEQ ID NO: 10902 - DNA, 20 bp, Artificial Sequence
  chemically synthesized
acacatggtaataatgacaa

SEQ ID NO: 10903 - DNA, 20 bp, Artificial Sequence
  chemically synthesized
aataatgacaacagcaattc

SEQ ID NO: 10904 - DNA, 20 bp, Artificial Sequence
  chemically synthesized
taatgacaacagcaattctg

SEQ ID NO: 10905 - DNA, 20 bp, Artificial Sequence
  chemically synthesized
aatgacaacagcaattctgg

SEQ ID NO: 10906 - DNA, 20 bp, Artificial Sequence
  chemically synthesized
caacagcaattctggaggtg

SEQ ID NO: 10907 - DNA, 20 bp, Artificial Sequence
  chemically synthesized
aattctggaggtgcagcccc

SEQ ID NO: 10908 - DNA, 20 bp, Artificial Sequence
  chemically synthesized
ttctggaggtgcagcccccg

SEQ ID NO: 10909 - DNA, 20 bp, Artificial Sequence
  chemically synthesized
ggaggtgcagcccccggagc

SEQ ID NO: 10910 - DNA, 20 bp, Artificial Sequence
  chemically synthesized
tccctcatttacttctcaca

SEQ ID NO: 10911 - DNA, 20 bp, Artificial Sequence
  chemically synthesized
acttctcacatggactctat

SEQ ID NO: 10912 - DNA, 20 bp, Artificial Sequence
  chemically synthesized
cttctcacatggactctatg

SEQ ID NO: 10913 - DNA, 20 bp, Artificial Sequence
  chemically synthesized
tcacatggactctatgaggt

SEQ ID NO: 10914 - DNA, 20 bp, Artificial Sequence
  chemically synthesized
cacatggactctatgaggta

SEQ ID NO: 10915 - DNA, 20 bp, Artificial Sequence
  chemically synthesized
acatggactctatgaggtaa

SEQ ID NO: 10916 - DNA, 20 bp, Artificial Sequence
  chemically synthesized
tctatgaggtaagggacctt

SEQ ID NO: 10917 - DNA, 20 bp, Artificial Sequence
  chemically synthesized
cttgagttatctccatttca

SEQ ID NO: 10918 - DNA, 20 bp, Artificial Sequence
  chemically synthesized
tgagttatctccatttcaca

SEQ ID NO: 10919 - DNA, 20 bp, Artificial Sequence
  chemically synthesized
agttatctccatttcacaga

SEQ ID NO: 10920 - DNA, 20 bp, Artificial Sequence
  chemically synthesized
gttatctccatttcacagag

SEQ ID NO: 10921 - DNA, 20 bp, Artificial Sequence
  chemically synthesized
gagaggtgaaatgattccct

SEQ ID NO: 10922 - DNA, 20 bp, Artificial Sequence
  chemically synthesized
ttccctcagactctcccaac

SEQ ID NO: 10923 - DNA, 20 bp, Artificial Sequence
  chemically synthesized
ctcagactctcccaaccagc

SEQ ID NO: 10924 - DNA, 20 bp, Artificial Sequence
  chemically synthesized
agactctcccaaccagctag

SEQ ID NO: 10925 - DNA, 20 bp, Artificial Sequence
  chemically synthesized
ccaaccagctagcagtaaca

SEQ ID NO: 10926 - DNA, 20 bp, Artificial Sequence
  chemically synthesized
gtaacatagaaatctgaacc

SEQ ID NO: 10927 - DNA, 20 bp, Artificial Sequence
  chemically synthesized
aacatagaaatctgaaccca

SEQ ID NO: 10928 - DNA, 20 bp, Artificial Sequence
  chemically synthesized
gagtaactgtgtcacacacc

SEQ ID NO: 10929 - DNA, 20 bp, Artificial Sequence
  chemically synthesized
agtaactgtgtcacacaccc

SEQ ID NO: 10930 - DNA, 20 bp, Artificial Sequence
  chemically synthesized
aactgtgtcacacacccagg

SEQ ID NO: 10931 - DNA, 20 bp, Artificial Sequence
  chemically synthesized
actgtgtcacacacccaggc

SEQ ID NO: 10932 - DNA, 20 bp, Artificial Sequence
  chemically synthesized
tcacacacccaggcaggcac

SEQ ID NO: 10933 - DNA, 20 bp, Artificial Sequence
  chemically synthesized
ggcaggcacaagcctctcgt

SEQ ID NO: 10934 - DNA, 20 bp, Artificial Sequence
  chemically synthesized
gcaggcacaagcctctcgta

SEQ ID NO: 10935 - DNA, 20 bp, Artificial Sequence
  chemically synthesized
cgtaaggcaacacacgtcta

SEQ ID NO: 10936 - DNA, 20 bp, Artificial Sequence
  chemically synthesized
gtaaggcaacacacgtctat

SEQ ID NO: 10937 - DNA, 20 bp, Artificial Sequence
  chemically synthesized
taaggcaacacacgtctatg

SEQ ID NO: 10938 - DNA, 20 bp, Artificial Sequence
  chemically synthesized
aggcaacacacgtctatggg

SEQ ID NO: 10939 - DNA, 20 bp, Artificial Sequence
  chemically synthesized
gcaacacacgtctatgggga

SEQ ID NO: 10940 - DNA, 20 bp, Artificial Sequence
  chemically synthesized
caacacacgtctatggggag

SEQ ID NO: 10941 - DNA, 20 bp, Artificial Sequence
  chemically synthesized
aacacacgtctatggggaga

SEQ ID NO: 10942 - DNA, 20 bp, Artificial Sequence
  chemically synthesized
acacacgtctatggggagag

SEQ ID NO: 10943 - DNA, 20 bp, Artificial Sequence
  chemically synthesized
gagaggggactcccacccac

SEQ ID NO: 10944 - DNA, 20 bp, Artificial Sequence
  chemically synthesized
agaggggactcccacccacg

SEQ ID NO: 10945 - DNA, 20 bp, Artificial Sequence
  chemically synthesized
gaggggactcccacccacga

SEQ ID NO: 10946 - DNA, 20 bp, Artificial Sequence
  chemically synthesized
ggggactcccacccacgagg

SEQ ID NO: 10947 - DNA, 20 bp, Artificial Sequence
  chemically synthesized
acccacgagggagctgccac

SEQ ID NO: 10948 - DNA, 20 bp, Artificial Sequence
  chemically synthesized
gctgccaccagaaacataat

SEQ ID NO: 10949 - DNA, 20 bp, Artificial Sequence
  chemically synthesized
cagaaacataatgagaccct

SEQ ID NO: 10950 - DNA, 20 bp, Artificial Sequence
  chemically synthesized
taatgagaccctgagctctt

SEQ ID NO: 10951 - DNA, 20 bp, Artificial Sequence
  chemically synthesized
ccaacctgctcaccccataa

SEQ ID NO: 10952 - DNA, 20 bp, Artificial Sequence
  chemically synthesized
caacctgctcaccccataat

SEQ ID NO: 10953 - DNA, 20 bp, Artificial Sequence
  chemically synthesized
aacctgctcaccccataatg

SEQ ID NO: 10954 - DNA, 20 bp, Artificial Sequence
  chemically synthesized
acctgctcaccccataatgg

SEQ ID NO: 10955 - DNA, 20 bp, Artificial Sequence
  chemically synthesized
cataatgggggaactacttt

SEQ ID NO: 10956 - DNA, 20 bp, Artificial Sequence
  chemically synthesized
ggggaactactttgagaccc

SEQ ID NO: 10957 - DNA, 20 bp, Artificial Sequence
  chemically synthesized
gggaactactttgagacccc

SEQ ID NO: 10958 - DNA, 20 bp, Artificial Sequence
  chemically synthesized
gaactactttgagaccccag

SEQ ID NO: 10959 - DNA, 20 bp, Artificial Sequence
  chemically synthesized
tttgagaccccaggagcaca

SEQ ID NO: 10960 - DNA, 20 bp, Artificial Sequence
  chemically synthesized
ccccaggagcacacagttcc

SEQ ID NO: 10961 - DNA, 20 bp, Artificial Sequence
  chemically synthesized
agcacacagttccaagccat

SEQ ID NO: 10962 - DNA, 20 bp, Artificial Sequence
  chemically synthesized
gccatgagtcataaccgtaa

SEQ ID NO: 10963 - DNA, 20 bp, Artificial Sequence
  chemically synthesized
gtcataaccgtaatagtaat

SEQ ID NO: 10964 - DNA, 20 bp, Artificial Sequence
  chemically synthesized
gacatgttttaccatgtgcc

SEQ ID NO: 10965 - DNA, 20 bp, Artificial Sequence
  chemically synthesized
tttaccatgtgcccagcact

SEQ ID NO: 10966 - DNA, 20 bp, Artificial Sequence
  chemically synthesized
catgtgcccagcactgagcc

SEQ ID NO: 10967 - DNA, 20 bp, Artificial Sequence
  chemically synthesized
agcgcccccacatgctctca

SEQ ID NO: 10968 - DNA, 20 bp, Artificial Sequence
  chemically synthesized
gcgcccccacatgctctcat

SEQ ID NO: 10969 - DNA, 20 bp, Artificial Sequence
  chemically synthesized
atgctctcataggatgctca

SEQ ID NO: 10970 - DNA, 20 bp, Artificial Sequence
  chemically synthesized
tgctctcataggatgctcaa

SEQ ID NO: 10971 - DNA, 20 bp, Artificial Sequence
  chemically synthesized
aggatgctcaaaggccctat

SEQ ID NO: 10972 - DNA, 20 bp, Artificial Sequence
  chemically synthesized
ggatgctcaaaggccctatg

SEQ ID NO: 10973 - DNA, 20 bp, Artificial Sequence
  chemically synthesized
gctcaaaggccctatgaggc

SEQ ID NO: 10974 - DNA, 20 bp, Artificial Sequence
  chemically synthesized
ccgtgattctccccacttta

SEQ ID NO: 10975 - DNA, 20 bp, Artificial Sequence
  chemically synthesized
ttctccccactttacagatt

SEQ ID NO: 10976 - DNA, 20 bp, Artificial Sequence
  chemically synthesized
tctccccactttacagattg

SEQ ID NO: 10977 - DNA, 20 bp, Artificial Sequence
  chemically synthesized
ccccactttacagattgagg

SEQ ID NO: 10978 - DNA, 20 bp, Artificial Sequence
  chemically synthesized
cactttacagattgaggaag

SEQ ID NO: 10979 - DNA, 20 bp, Artificial Sequence
  chemically synthesized
ctttacagattgaggaagcg

SEQ ID NO: 10980 - DNA, 20 bp, Artificial Sequence
  chemically synthesized
tttacagattgaggaagcgg

SEQ ID NO: 10981 - DNA, 20 bp, Artificial Sequence
  chemically synthesized
agattgaggaagcggaggct

SEQ ID NO: 10982 - DNA, 20 bp, Artificial Sequence
  chemically synthesized
gattgaggaagcggaggctt

SEQ ID NO: 10983 - DNA, 20 bp, Artificial Sequence
  chemically synthesized
attgaggaagcggaggctta

SEQ ID NO: 10984 - DNA, 20 bp, Artificial Sequence
  chemically synthesized
ttagggaatgaaatctgccc

SEQ ID NO: 10985 - DNA, 20 bp, Artificial Sequence
  chemically synthesized
tagggaatgaaatctgccca

SEQ ID NO: 10986 - DNA, 20 bp, Artificial Sequence
  chemically synthesized
tctgcccaaggttgcacaac

SEQ ID NO: 10987 - DNA, 20 bp, Artificial Sequence
  chemically synthesized
caaggttgcacaactagaaa

SEQ ID NO: 10988 - DNA, 20 bp, Artificial Sequence
  chemically synthesized
tggtattacttctttaccct

SEQ ID NO: 10989 - DNA, 20 bp, Artificial Sequence
  chemically synthesized
cattttatttcgtgtaatca

SEQ ID NO: 10990 - DNA, 20 bp, Artificial Sequence
  chemically synthesized
ttttatttcgtgtaatcaaa

SEQ ID NO: 10991 - DNA, 20 bp, Artificial Sequence
  chemically synthesized
tatttcgtgtaatcaaagag

SEQ ID NO: 10992 - DNA, 20 bp, Artificial Sequence
  chemically synthesized
ttcgtgtaatcaaagagaag

SEQ ID NO: 10993 - DNA, 20 bp, Artificial Sequence
  chemically synthesized
gtaatcaaagagaagaagaa

SEQ ID NO: 10994 - DNA, 20 bp, Artificial Sequence
  chemically synthesized
tcaaagagaagaagaaaaga

SEQ ID NO: 10995 - DNA, 20 bp, Artificial Sequence
  chemically synthesized
aagagaagaagaaaagaaag

SEQ ID NO: 10996 - DNA, 20 bp, Artificial Sequence
  chemically synthesized
aagaagatacatcatatgtc

SEQ ID NO: 10997 - DNA, 20 bp, Artificial Sequence
  chemically synthesized
agaagatacatcatatgtca

SEQ ID NO: 10998 - DNA, 20 bp, Artificial Sequence
  chemically synthesized
gaagatacatcatatgtcaa

SEQ ID NO: 10999 - DNA, 20 bp, Artificial Sequence
  chemically synthesized
gtccctcctccctttcttac

SEQ ID NO: 11000 - DNA, 20 bp, Artificial Sequence
  chemically synthesized
tcctccctttcttaccagct

SEQ ID NO: 11001 - DNA, 20 bp, Artificial Sequence
  chemically synthesized
cctccctttcttaccagctc

SEQ ID NO: 11002 - DNA, 20 bp, Artificial Sequence
  chemically synthesized
tcttaccagctcaggttaca

SEQ ID NO: 11003 - DNA, 20 bp, Artificial Sequence
  chemically synthesized
gctcaggttacaaagacatc

SEQ ID NO: 11004 - DNA, 20 bp, Artificial Sequence
  chemically synthesized
ctcaggttacaaagacatct

SEQ ID NO: 11005 - DNA, 20 bp, Artificial Sequence
  chemically synthesized
aggttacaaagacatctagg

SEQ ID NO: 11006 - DNA, 20 bp, Artificial Sequence
  chemically synthesized
ggttacaaagacatctaggt

SEQ ID NO: 11007 - DNA, 20 bp, Artificial Sequence
  chemically synthesized
ttacaaagacatctaggtgg

SEQ ID NO: 11008 - DNA, 20 bp, Artificial Sequence
  chemically synthesized
acaaagacatctaggtggga

SEQ ID NO: 11009 - DNA, 20 bp, Artificial Sequence
  chemically synthesized
aagacatctaggtgggagag

SEQ ID NO: 11010 - DNA, 20 bp, Artificial Sequence
  chemically synthesized
tgggagagaagactgcctct

SEQ ID NO: 11011 - DNA, 20 bp, Artificial Sequence
  chemically synthesized
gggagagaagactgcctcta

SEQ ID NO: 11012 - DNA, 20 bp, Artificial Sequence
  chemically synthesized
ggagagaagactgcctctaa

SEQ ID NO: 11013 - DNA, 20 bp, Artificial Sequence
  chemically synthesized
gaagactgcctctaagggct

SEQ ID NO: 11014 - DNA, 20 bp, Artificial Sequence
  chemically synthesized
ctgcctctaagggcttggct

SEQ ID NO: 11015 - DNA, 20 bp, Artificial Sequence
  chemically synthesized
ctctaagggcttggctgagt

SEQ ID NO: 11016 - DNA, 20 bp, Artificial Sequence
  chemically synthesized
taagggcttggctgagttgg

SEQ ID NO: 11017 - DNA, 20 bp, Artificial Sequence
  chemically synthesized
aagggcttggctgagttggc

SEQ ID NO: 11018 - DNA, 20 bp, Artificial Sequence
  chemically synthesized
ggcttggctgagttggcggg

SEQ ID NO: 11019 - DNA, 20 bp, Artificial Sequence
  chemically synthesized
gcttggctgagttggcgggc

SEQ ID NO: 11020 - DNA, 20 bp, Artificial Sequence
  chemically synthesized
ttggctgagttggcgggcgg

SEQ ID NO: 11021 - DNA, 20 bp, Artificial Sequence
  chemically synthesized
gctgagttggcgggcgggag

SEQ ID NO: 11022 - DNA, 20 bp, Artificial Sequence
  chemically synthesized
ctgagttggcgggcgggagc

SEQ ID NO: 11023 - DNA, 20 bp, Artificial Sequence
  chemically synthesized
tgagttggcgggcgggagcg

SEQ ID NO: 11024 - DNA, 20 bp, Artificial Sequence
  chemically synthesized
gagttggcgggcgggagcgg

SEQ ID NO: 11025 - DNA, 20 bp, Artificial Sequence
  chemically synthesized
ttggcgggcgggagcggggg

SEQ ID NO: 11026 - DNA, 20 bp, Artificial Sequence
  chemically synthesized
tggcgggcgggagcgggggc

SEQ ID NO: 11027 - DNA, 20 bp, Artificial Sequence
  chemically synthesized
ggagcgggggcaggtatcca

SEQ ID NO: 11028 - DNA, 20 bp, Artificial Sequence
  chemically synthesized
gagcgggggcaggtatccat

SEQ ID NO: 11029 - DNA, 20 bp, Artificial Sequence
  chemically synthesized
aggtatccatgggataaacc

SEQ ID NO: 11030 - DNA, 20 bp, Artificial Sequence
  chemically synthesized
gtatccatgggataaaccca

SEQ ID NO: 11031 - DNA, 20 bp, Artificial Sequence
  chemically synthesized
tatccatgggataaacccag

SEQ ID NO: 11032 - DNA, 20 bp, Artificial Sequence
  chemically synthesized
cagaggcccccaaattttcc

SEQ ID NO: 11033 - DNA, 20 bp, Artificial Sequence
  chemically synthesized
tcccagtttttatttgctac

SEQ ID NO: 11034 - DNA, 20 bp, Artificial Sequence
  chemically synthesized
gtttttatttgctactagaa

SEQ ID NO: 11035 - DNA, 20 bp, Artificial Sequence
  chemically synthesized
tttttatttgctactagaaa

SEQ ID NO: 11036 - DNA, 20 bp, Artificial Sequence
  chemically synthesized
tttatttgctactagaaaag

SEQ ID NO: 11037 - DNA, 20 bp, Artificial Sequence
  chemically synthesized
atttgctactagaaaaggag

SEQ ID NO: 11038 - DNA, 20 bp, Artificial Sequence
  chemically synthesized
tttgctactagaaaaggaga

SEQ ID NO: 11039 - DNA, 20 bp, Artificial Sequence
  chemically synthesized
ggaaatcctgcctcccttat

SEQ ID NO: 11040 - DNA, 20 bp, Artificial Sequence
  chemically synthesized
gaaatcctgcctcccttatg

SEQ ID NO: 11041 - DNA, 20 bp, Artificial Sequence
  chemically synthesized
cctgcctcccttatgaggcc

SEQ ID NO: 11042 - DNA, 20 bp, Artificial Sequence
  chemically synthesized
cctcccttatgaggcctagc

SEQ ID NO: 11043 - DNA, 20 bp, Artificial Sequence
  chemically synthesized
ctcccttatgaggcctagcc

SEQ ID NO: 11044 - DNA, 20 bp, Artificial Sequence
  chemically synthesized
tcccttatgaggcctagcca

SEQ ID NO: 11045 - DNA, 20 bp, Artificial Sequence
  chemically synthesized
cccttatgaggcctagccag

SEQ ID NO: 11046 - DNA, 20 bp, Artificial Sequence
  chemically synthesized
ttatgaggcctagccagggg

SEQ ID NO: 11047 - DNA, 20 bp, Artificial Sequence
  chemically synthesized
tgattttatcacattttata

SEQ ID NO: 11048 - DNA, 20 bp, Artificial Sequence
  chemically synthesized
ttttatatagatgtgcacaa

SEQ ID NO: 11049 - DNA, 20 bp, Artificial Sequence
  chemically synthesized
gtgcacaatggtgccttttc

SEQ ID NO: 11050 - DNA, 20 bp, Artificial Sequence
  chemically synthesized
gtgccttttcaagtctatga

SEQ ID NO: 11051 - DNA, 20 bp, Artificial Sequence
  chemically synthesized
tgccttttcaagtctatgat

SEQ ID NO: 11052 - DNA, 20 bp, Artificial Sequence
  chemically synthesized
ttattgtgtgaatatcattt

SEQ ID NO: 11053 - DNA, 20 bp, Artificial Sequence
  chemically synthesized
tgtgtgaatatcatttcaga

SEQ ID NO: 11054 - DNA, 20 bp, Artificial Sequence
  chemically synthesized
gtgtgaatatcatttcagac

SEQ ID NO: 11055 - DNA, 20 bp, Artificial Sequence
  chemically synthesized
caggtccccaaaccacttga

SEQ ID NO: 11056 - DNA, 20 bp, Artificial Sequence
  chemically synthesized
cccaaaccacttgaaagccc

SEQ ID NO: 11057 - DNA, 20 bp, Artificial Sequence
  chemically synthesized
ttgaaagccctggtgtcccc

SEQ ID NO: 11058 - DNA, 20 bp, Artificial Sequence
  chemically synthesized
tgaaagccctggtgtcccct

SEQ ID NO: 11059 - DNA, 20 bp, Artificial Sequence
  chemically synthesized
aagccctggtgtcccctagg

SEQ ID NO: 11060 - DNA, 20 bp, Artificial Sequence
  chemically synthesized
agccctggtgtcccctaggt

SEQ ID NO: 11061 - DNA, 20 bp, Artificial Sequence
  chemically synthesized
taggtgggattctatgaacc

SEQ ID NO: 11062 - DNA, 20 bp, Artificial Sequence
  chemically synthesized
ggattctatgaacccagctt

SEQ ID NO: 11063 - DNA, 20 bp, Artificial Sequence
  chemically synthesized
tatgaacccagctttagccc

SEQ ID NO: 11064 - DNA, 20 bp, Artificial Sequence
  chemically synthesized
gaacccagctttagccccag

SEQ ID NO: 11065 - DNA, 20 bp, Artificial Sequence
  chemically synthesized
tttagccccagcagctcctc

SEQ ID NO: 11066 - DNA, 20 bp, Artificial Sequence
  chemically synthesized
agccccagcagctcctctgg

SEQ ID NO: 11067 - DNA, 20 bp, Artificial Sequence
  chemically synthesized
gccccagcagctcctctggt

SEQ ID NO: 11068 - DNA, 20 bp, Artificial Sequence
  chemically synthesized
gcagctcctctggtgggaac

SEQ ID NO: 11069 - DNA, 20 bp, Artificial Sequence
  chemically synthesized
aactagaacatgcctcctgc

SEQ ID NO: 11070 - DNA, 20 bp, Artificial Sequence
  chemically synthesized
agaacatgcctcctgccagt

SEQ ID NO: 11071 - DNA, 20 bp, Artificial Sequence
  chemically synthesized
tgcctcctgccagttagtaa

SEQ ID NO: 11072 - DNA, 20 bp, Artificial Sequence
  chemically synthesized
gcctcctgccagttagtaac

SEQ ID NO: 11073 - DNA, 20 bp, Artificial Sequence
  chemically synthesized
cctcctgccagttagtaaca

SEQ ID NO: 11074 - DNA, 20 bp, Artificial Sequence
  chemically synthesized
ttcaattacttcgccacttg

SEQ ID NO: 11075 - DNA, 20 bp, Artificial Sequence
  chemically synthesized
aattacttcgccacttgtgg

SEQ ID NO: 11076 - DNA, 20 bp, Artificial Sequence
  chemically synthesized
attacttcgccacttgtggc

SEQ ID NO: 11077 - DNA, 20 bp, Artificial Sequence
  chemically synthesized
tacttcgccacttgtggcag

SEQ ID NO: 11078 - DNA, 20 bp, Artificial Sequence
  chemically synthesized
acttcgccacttgtggcagg

SEQ ID NO: 11079 - DNA, 20 bp, Artificial Sequence
  chemically synthesized
cttcgccacttgtggcagga

SEQ ID NO: 11080 - DNA, 20 bp, Artificial Sequence
  chemically synthesized
ccacttgtggcaggagggca

SEQ ID NO: 11081 - DNA, 20 bp, Artificial Sequence
  chemically synthesized
gggcaaagactgcacattaa

SEQ ID NO: 11082 - DNA, 20 bp, Artificial Sequence
  chemically synthesized
gcaaagactgcacattaaaa

SEQ ID NO: 11083 - DNA, 20 bp, Artificial Sequence
  chemically synthesized
attaaaagagctaaaaatgt

SEQ ID NO: 11084 - DNA, 20 bp, Artificial Sequence
  chemically synthesized
ttaaaagagctaaaaatgtc

SEQ ID NO: 11085 - DNA, 20 bp, Artificial Sequence
  chemically synthesized
aaagagctaaaaatgtcagg

SEQ ID NO: 11086 - DNA, 20 bp, Artificial Sequence
  chemically synthesized
taaaaatgtcaggaagttat

SEQ ID NO: 11087 - DNA, 20 bp, Artificial Sequence
  chemically synthesized
aaaaatgtcaggaagttatt

SEQ ID NO: 11088 - DNA, 20 bp, Artificial Sequence
  chemically synthesized
tcacaataaactaaaaaaca

SEQ ID NO: 11089 - DNA, 20 bp, Artificial Sequence
  chemically synthesized
cacaataaactaaaaaacac

SEQ ID NO: 11090 - DNA, 20 bp, Artificial Sequence
  chemically synthesized
aataaactaaaaaacacagg

SEQ ID NO: 11091 - DNA, 20 bp, Artificial Sequence
  chemically synthesized
taaactaaaaaacacaggaa

SEQ ID NO: 11092 - DNA, 20 bp, Artificial Sequence
  chemically synthesized
aaactaaaaaacacaggaag

SEQ ID NO: 11093 - DNA, 20 bp, Artificial Sequence
  chemically synthesized
aaaaaacacaggaagaggcc

SEQ ID NO: 11094 - DNA, 20 bp, Artificial Sequence
  chemically synthesized
aaacacaggaagaggccaag

SEQ ID NO: 11095 - DNA, 20 bp, Artificial Sequence
  chemically synthesized
caggaagaggccaagaagat

SEQ ID NO: 11096 - DNA, 20 bp, Artificial Sequence
  chemically synthesized
gccaagaagataagaaaatc

SEQ ID NO: 11097 - DNA, 20 bp, Artificial Sequence
  chemically synthesized
aagaaaatcgagaacaaaac

SEQ ID NO: 11098 - DNA, 20 bp, Artificial Sequence
  chemically synthesized
acaaaacaagcccaaacaca

SEQ ID NO: 11099 - DNA, 20 bp, Artificial Sequence
  chemically synthesized
caaaacaagcccaaacacat

SEQ ID NO: 11100 - DNA, 20 bp, Artificial Sequence
  chemically synthesized
caaacacatgggtttgccat

SEQ ID NO: 11101 - DNA, 20 bp, Artificial Sequence
  chemically synthesized
catgggtttgccatcggtcc

SEQ ID NO: 11102 - DNA, 20 bp, Artificial Sequence
  chemically synthesized
atgggtttgccatcggtcct

SEQ ID NO: 11103 - DNA, 20 bp, Artificial Sequence
  chemically synthesized
catcggtcctgggtcctgcc

SEQ ID NO: 11104 - DNA, 20 bp, Artificial Sequence
  chemically synthesized
atcggtcctgggtcctgccc

SEQ ID NO: 11105 - DNA, 20 bp, Artificial Sequence
  chemically synthesized
gtcctgggtcctgcccagga

SEQ ID NO: 11106 - DNA, 20 bp, Artificial Sequence
  chemically synthesized
tcctgggtcctgcccaggaa

SEQ ID NO: 11107 - DNA, 20 bp, Artificial Sequence
  chemically synthesized
ggaaaggctgcgcctctaac

SEQ ID NO: 11108 - DNA, 20 bp, Artificial Sequence
  chemically synthesized
aaaggctgcgcctctaacaa

SEQ ID NO: 11109 - DNA, 20 bp, Artificial Sequence
  chemically synthesized
gagcaccttttccccacccc

SEQ ID NO: 11110 - DNA, 20 bp, Artificial Sequence
  chemically synthesized
ccccacccctggcctttctt

SEQ ID NO: 11111 - DNA, 20 bp, Artificial Sequence
  chemically synthesized
gcctttcttgagccttcctt

SEQ ID NO: 11112 - DNA, 20 bp, Artificial Sequence
  chemically synthesized
tccttgcatattatcgttct

SEQ ID NO: 11113 - DNA, 20 bp, Artificial Sequence
  chemically synthesized
ttatcgttctcagccaccga

SEQ ID NO: 11114 - DNA, 20 bp, Artificial Sequence
  chemically synthesized
gccaccgacagcttaattca

SEQ ID NO: 11115 - DNA, 20 bp, Artificial Sequence
  chemically synthesized
ccaccgacagcttaattcac

SEQ ID NO: 11116 - DNA, 20 bp, Artificial Sequence
  chemically synthesized
aattcacaggcccttccaac

SEQ ID NO: 11117 - DNA, 20 bp, Artificial Sequence
  chemically synthesized
ccttccaacaagttaaactt

SEQ ID NO: 11118 - DNA, 20 bp, Artificial Sequence
  chemically synthesized
atttaaaaaaaaaaaaaaaa

SEQ ID NO: 11119 - DNA, 20 bp, Artificial Sequence
  chemically synthesized
ttaaaaaaaaaaaaaaaaaa

SEQ ID NO: 11120 - DNA, 20 bp, Artificial Sequence
  chemically synthesized
tgatttcttacctgcacacg

SEQ ID NO: 11121 - DNA, 20 bp, Artificial Sequence
  chemically synthesized
gatttcttacctgcacacgc

SEQ ID NO: 11122 - DNA, 20 bp, Artificial Sequence
  chemically synthesized
acctgcacacgcaggcacgc

SEQ ID NO: 11123 - DNA, 20 bp, Artificial Sequence
  chemically synthesized
gccccaccccactgcaccac

SEQ ID NO: 11124 - DNA, 20 bp, Artificial Sequence
  chemically synthesized
gcaccacgagctctcacacc

SEQ ID NO: 11125 - DNA, 20 bp, Artificial Sequence
  chemically synthesized
acaaccaaacccttcccatc

SEQ ID NO: 11126 - DNA, 20 bp, Artificial Sequence
  chemically synthesized
aacccttcccatctggccct

SEQ ID NO: 11127 - DNA, 20 bp, Artificial Sequence
  chemically synthesized
acccttcccatctggccctc

SEQ ID NO: 11128 - DNA, 20 bp, Artificial Sequence
  chemically synthesized
ccatctggccctcgggttac

SEQ ID NO: 11129 - DNA, 20 bp, Artificial Sequence
  chemically synthesized
atcacaactttttttcccaa

SEQ ID NO: 11130 - DNA, 20 bp, Artificial Sequence
  chemically synthesized
caactttttttcccaacggc

SEQ ID NO: 11131 - DNA, 20 bp, Artificial Sequence
  chemically synthesized
tttttttcccaacggcaagc

SEQ ID NO: 11132 - DNA, 20 bp, Artificial Sequence
  chemically synthesized
ttttttcccaacggcaagcc

SEQ ID NO: 11133 - DNA, 20 bp, Artificial Sequence
  chemically synthesized
ttcccaacggcaagccagga

SEQ ID NO: 11134 - DNA, 20 bp, Artificial Sequence
  chemically synthesized
cggcaagccaggaaagatga

SEQ ID NO: 11135 - DNA, 20 bp, Artificial Sequence
  chemically synthesized
gatgatagaacccgcatatg

SEQ ID NO: 11136 - DNA, 20 bp, Artificial Sequence
  chemically synthesized
gaacccgcatatgtagccaa

SEQ ID NO: 11137 - DNA, 20 bp, Artificial Sequence
  chemically synthesized
cgcatatgtagccaaaagac

SEQ ID NO: 11138 - DNA, 20 bp, Artificial Sequence
  chemically synthesized
gccaaaagactggcctcaac

SEQ ID NO: 11139 - DNA, 20 bp, Artificial Sequence
  chemically synthesized
aagactggcctcaactggtt

SEQ ID NO: 11140 - DNA, 20 bp, Artificial Sequence
  chemically synthesized
gactggcctcaactggttca

SEQ ID NO: 11141 - DNA, 20 bp, Artificial Sequence
  chemically synthesized
actggcctcaactggttcag

SEQ ID NO: 11142 - DNA, 20 bp, Artificial Sequence
  chemically synthesized
tggcctcaactggttcagag

SEQ ID NO: 11143 - DNA, 20 bp, Artificial Sequence
  chemically synthesized
ggcctcaactggttcagagg

SEQ ID NO: 11144 - DNA, 20 bp, Artificial Sequence
  chemically synthesized
gcctcaactggttcagagga

SEQ ID NO: 11145 - DNA, 20 bp, Artificial Sequence
  chemically synthesized
ttcagaggagggaaaaaatt

SEQ ID NO: 11146 - DNA, 20 bp, Artificial Sequence
  chemically synthesized
attttttatttttttgcctt

SEQ ID NO: 11147 - DNA, 20 bp, Artificial Sequence
  chemically synthesized
atttttttgcctttagccaa

SEQ ID NO: 11148 - DNA, 20 bp, Artificial Sequence
  chemically synthesized
tttgcctttagccaaaagac

SEQ ID NO: 11149 - DNA, 20 bp, Artificial Sequence
  chemically synthesized
ttgcctttagccaaaagacc

SEQ ID NO: 11150 - DNA, 20 bp, Artificial Sequence
  chemically synthesized
tgcctttagccaaaagacca

SEQ ID NO: 11151 - DNA, 20 bp, Artificial Sequence
  chemically synthesized
cctttagccaaaagaccagg

SEQ ID NO: 11152 - DNA, 20 bp, Artificial Sequence
  chemically synthesized
accagggagcatttgatgta

SEQ ID NO: 11153 - DNA, 20 bp, Artificial Sequence
  chemically synthesized
gggagcatttgatgtacagt

SEQ ID NO: 11154 - DNA, 20 bp, Artificial Sequence
  chemically synthesized
agcatttgatgtacagtcag

SEQ ID NO: 11155 - DNA, 20 bp, Artificial Sequence
  chemically synthesized
gcatttgatgtacagtcagc

SEQ ID NO: 11156 - DNA, 20 bp, Artificial Sequence
  chemically synthesized
cagtcagcaggtatttaaaa

SEQ ID NO: 11157 - DNA, 20 bp, Artificial Sequence
  chemically synthesized
cagcaggtatttaaaaaaga

SEQ ID NO: 11158 - DNA, 20 bp, Artificial Sequence
  chemically synthesized
aggtatttaaaaaagaaaga

SEQ ID NO: 11159 - DNA, 20 bp, Artificial Sequence
  chemically synthesized
ttaaaaaagaaagaaagaaa

SEQ ID NO: 11160 - DNA, 20 bp, Artificial Sequence
  chemically synthesized
taaaaaagaaagaaagaaaa

SEQ ID NO: 11161 - DNA, 20 bp, Artificial Sequence
  chemically synthesized
aggaaaaaaaaaacactgaa

SEQ ID NO: 11162 - DNA, 20 bp, Artificial Sequence
  chemically synthesized
ggaaaaaaaaaacactgaaa

SEQ ID NO: 11163 - DNA, 20 bp, Artificial Sequence
  chemically synthesized
aaaaaaacactgaaaaggct

SEQ ID NO: 11164 - DNA, 20 bp, Artificial Sequence
  chemically synthesized
ctgaaaaggcttggctgcac

SEQ ID NO: 11165 - DNA, 20 bp, Artificial Sequence
  chemically synthesized
tgaaaaggcttggctgcact

SEQ ID NO: 11166 - DNA, 20 bp, Artificial Sequence
  chemically synthesized
gaaaaggcttggctgcactg

SEQ ID NO: 11167 - DNA, 20 bp, Artificial Sequence
  chemically synthesized
ccctgacacgctctcatcta

SEQ ID NO: 11168 - DNA, 20 bp, Artificial Sequence
  chemically synthesized
acacgctctcatctaaagcc

SEQ ID NO: 11169 - DNA, 20 bp, Artificial Sequence
  chemically synthesized
ctcatctaaagcctggccct

SEQ ID NO: 11170 - DNA, 20 bp, Artificial Sequence
  chemically synthesized
ctaaagcctggccctcggcc

SEQ ID NO: 11171 - DNA, 20 bp, Artificial Sequence
  chemically synthesized
cggccaagttcatctgttaa

SEQ ID NO: 11172 - DNA, 20 bp, Artificial Sequence
  chemically synthesized
tgttaatggacaaccacaac

SEQ ID NO: 11173 - DNA, 20 bp, Artificial Sequence
  chemically synthesized
gttaatggacaaccacaacc

SEQ ID NO: 11174 - DNA, 20 bp, Artificial Sequence
  chemically synthesized
ttaatggacaaccacaacca

SEQ ID NO: 11175 - DNA, 20 bp, Artificial Sequence
  chemically synthesized
cacctcccactacccctcct

SEQ ID NO: 11176 - DNA, 20 bp, Artificial Sequence
  chemically synthesized
tctgttctcctacctctttc

SEQ ID NO: 11177 - DNA, 20 bp, Artificial Sequence
  chemically synthesized
tctttcgagctcctaaaaac

SEQ ID NO: 11178 - DNA, 20 bp, Artificial Sequence
  chemically synthesized
gcgcttttccctttctattc

SEQ ID NO: 11179 - DNA, 20 bp, Artificial Sequence
  chemically synthesized
ctttctattcaagataaaca

SEQ ID NO: 11180 - DNA, 20 bp, Artificial Sequence
  chemically synthesized
caagataaacaaagtgcttc

SEQ ID NO: 11181 - DNA, 20 bp, Artificial Sequence
  chemically synthesized
taaacaaagtgcttcaagtt

SEQ ID NO: 11182 - DNA, 20 bp, Artificial Sequence
  chemically synthesized
aaacaaagtgcttcaagttc

SEQ ID NO: 11183 - DNA, 20 bp, Artificial Sequence
  chemically synthesized
aacaaagtgcttcaagttca

SEQ ID NO: 11184 - DNA, 20 bp, Artificial Sequence
  chemically synthesized
ttcaagttcagggcgcaccc

SEQ ID NO: 11185 - DNA, 20 bp, Artificial Sequence
  chemically synthesized
tcaagttcagggcgcaccct

SEQ ID NO: 11186 - DNA, 20 bp, Artificial Sequence
  chemically synthesized
tatcattctgtctgctaaac

SEQ ID NO: 11187 - DNA, 20 bp, Artificial Sequence
  chemically synthesized
ttctgtctgctaaaccagtc

SEQ ID NO: 11188 - DNA, 20 bp, Artificial Sequence
  chemically synthesized
aaaccagtctggctacacca

SEQ ID NO: 11189 - DNA, 20 bp, Artificial Sequence
  chemically synthesized
cagtctggctacaccatggc

SEQ ID NO: 11190 - DNA, 20 bp, Artificial Sequence
  chemically synthesized
agtctggctacaccatggcc

SEQ ID NO: 11191 - DNA, 20 bp, Artificial Sequence
  chemically synthesized
gtctggctacaccatggcca

SEQ ID NO: 11192 - DNA, 20 bp, Artificial Sequence
  chemically synthesized
ctggctacaccatggccagg

SEQ ID NO: 11193 - DNA, 20 bp, Artificial Sequence
  chemically synthesized
ggctacaccatggccaggga

SEQ ID NO: 11194 - DNA, 20 bp, Artificial Sequence
  chemically synthesized
cttttctttaccaccttctc

SEQ ID NO: 11195 - DNA, 20 bp, Artificial Sequence
  chemically synthesized
tttctttaccaccttctccg

SEQ ID NO: 11196 - DNA, 20 bp, Artificial Sequence
  chemically synthesized
ctttaccaccttctccggag

SEQ ID NO: 11197 - DNA, 20 bp, Artificial Sequence
  chemically synthesized
accaccttctccggagcaga

SEQ ID NO: 11198 - DNA, 20 bp, Artificial Sequence
  chemically synthesized
tggacttgaccactttgctt

SEQ ID NO: 11199 - DNA, 20 bp, Artificial Sequence
  chemically synthesized
cactttgcttaagcccctcc

SEQ ID NO: 11200 - DNA, 20 bp, Artificial Sequence
  chemically synthesized
taagcccctcctggcaacct

SEQ ID NO: 11201 - DNA, 20 bp, Artificial Sequence
  chemically synthesized
ctcctggcaacctcagaaat

SEQ ID NO: 11202 - DNA, 20 bp, Artificial Sequence
  chemically synthesized
cctggcaacctcagaaatta

SEQ ID NO: 11203 - DNA, 20 bp, Artificial Sequence
  chemically synthesized
aaattagagaaaaaaaaaaa

SEQ ID NO: 11204 - DNA, 20 bp, Artificial Sequence
  chemically synthesized
attagagaaaaaaaaaaaaa

SEQ ID NO: 11205 - DNA, 20 bp, Artificial Sequence
  chemically synthesized
aaaaaaaaaaaaagagctcc

SEQ ID NO: 11206 - DNA, 20 bp, Artificial Sequence
  chemically synthesized
agctcctggctaccctactc

SEQ ID NO: 11207 - DNA, 20 bp, Artificial Sequence
  chemically synthesized
ctggctaccctactccggtc

SEQ ID NO: 11208 - DNA, 20 bp, Artificial Sequence
  chemically synthesized
tggctaccctactccggtcc

SEQ ID NO: 11209 - DNA, 20 bp, Artificial Sequence
  chemically synthesized
cctccctctgtgttgcccga

SEQ ID NO: 11210 - DNA, 20 bp, Artificial Sequence
  chemically synthesized
gcccgacggtcctgcacaca

SEQ ID NO: 11211 - DNA, 20 bp, Artificial Sequence
  chemically synthesized
cacacagacacaaatcccgt

SEQ ID NO: 11212 - DNA, 20 bp, Artificial Sequence
  chemically synthesized
cacaaatcccgttggaccca

SEQ ID NO: 11213 - DNA, 20 bp, Artificial Sequence
  chemically synthesized
ctctcacactaacactaaac

SEQ ID NO: 11214 - DNA, 20 bp, Artificial Sequence
  chemically synthesized
ccagaaaataaattaaatac

SEQ ID NO: 11215 - DNA, 20 bp, Artificial Sequence
  chemically synthesized
cagaaaataaattaaatact

SEQ ID NO: 11216 - DNA, 20 bp, Artificial Sequence
  chemically synthesized
ccccctcctttgcgttctgc

SEQ ID NO: 11217 - DNA, 20 bp, Artificial Sequence
  chemically synthesized
gcgttctgcaagaatatttt

SEQ ID NO: 11218 - DNA, 20 bp, Artificial Sequence
  chemically synthesized
tctgcaagaatattttaagt

SEQ ID NO: 11219 - DNA, 20 bp, Artificial Sequence
  chemically synthesized
cctgacttgcaattaaatgc

SEQ ID NO: 11220 - DNA, 20 bp, Artificial Sequence
  chemically synthesized
gcaagcacactttttacaac

SEQ ID NO: 11221 - DNA, 20 bp, Artificial Sequence
  chemically synthesized
cacactttttacaaccagta

SEQ ID NO: 11222 - DNA, 20 bp, Artificial Sequence
  chemically synthesized
gcattaattataactacaaa

SEQ ID NO: 11223 - DNA, 20 bp, Artificial Sequence
  chemically synthesized
ataactacaaatggtcaaat

SEQ ID NO: 11224 - DNA, 20 bp, Artificial Sequence
  chemically synthesized
aactacaaatggtcaaatga

SEQ ID NO: 11225 - DNA, 20 bp, Artificial Sequence
  chemically synthesized
acaaatggtcaaatgagagc

SEQ ID NO: 11226 - DNA, 20 bp, Artificial Sequence
  chemically synthesized
caaatggtcaaatgagagca

SEQ ID NO: 11227 - DNA, 20 bp, Artificial Sequence
  chemically synthesized
taatattaatgaaacaaaaa

SEQ ID NO: 11228 - DNA, 20 bp, Artificial Sequence
  chemically synthesized
tgaaacaaaaatagattcat

SEQ ID NO: 11229 - DNA, 20 bp, Artificial Sequence
  chemically synthesized
aaaaatagattcataagcct

SEQ ID NO: 11230 - DNA, 20 bp, Artificial Sequence
  chemically synthesized
atagattcataagccttggc

SEQ ID NO: 11231 - DNA, 20 bp, Artificial Sequence
  chemically synthesized
tagattcataagccttggcc

SEQ ID NO: 11232 - DNA, 20 bp, Artificial Sequence
  chemically synthesized
agattcataagccttggcca

SEQ ID NO: 11233 - DNA, 20 bp, Artificial Sequence
  chemically synthesized
gggcttttattatttcatgc

SEQ ID NO: 11234 - DNA, 20 bp, Artificial Sequence
  chemically synthesized
ggcttttattatttcatgca

SEQ ID NO: 11235 - DNA, 20 bp, Artificial Sequence
  chemically synthesized
gcttttattatttcatgcaa

SEQ ID NO: 11236 - DNA, 20 bp, Artificial Sequence
  chemically synthesized
cttttattatttcatgcaag

SEQ ID NO: 11237 - DNA, 20 bp, Artificial Sequence
  chemically synthesized
tattatttcatgcaagggga

SEQ ID NO: 11238 - DNA, 20 bp, Artificial Sequence
  chemically synthesized
tttcatgcaaggggaaagtc

SEQ ID NO: 11239 - DNA, 20 bp, Artificial Sequence
  chemically synthesized
gaaacttgctccatacactt

SEQ ID NO: 11240 - DNA, 20 bp, Artificial Sequence
  chemically synthesized
acttgctccatacactttgg

SEQ ID NO: 11241 - DNA, 20 bp, Artificial Sequence
  chemically synthesized
cttgctccatacactttggc

SEQ ID NO: 11242 - DNA, 20 bp, Artificial Sequence
  chemically synthesized
ccatacactttggcaggact

SEQ ID NO: 11243 - DNA, 20 bp, Artificial Sequence
  chemically synthesized
caaccactaccattaaactc

SEQ ID NO: 11244 - DNA, 20 bp, Artificial Sequence
  chemically synthesized
accactaccattaaactcaa

SEQ ID NO: 11245 - DNA, 20 bp, Artificial Sequence
  chemically synthesized
ttaaactcaagagcgtgttt

SEQ ID NO: 11246 - DNA, 20 bp, Artificial Sequence
  chemically synthesized
aactcaagagcgtgttttgg

SEQ ID NO: 11247 - DNA, 20 bp, Artificial Sequence
  chemically synthesized
agcgtgttttggcagtgccc

SEQ ID NO: 11248 - DNA, 20 bp, Artificial Sequence
  chemically synthesized
ttttggcagtgccctggcat

SEQ ID NO: 11249 - DNA, 20 bp, Artificial Sequence
  chemically synthesized
tttggcagtgccctggcatt

SEQ ID NO: 11250 - DNA, 20 bp, Artificial Sequence
  chemically synthesized
ttggcagtgccctggcattg

SEQ ID NO: 11251 - DNA, 20 bp, Artificial Sequence
  chemically synthesized
tggcagtgccctggcattgg

SEQ ID NO: 11252 - DNA, 20 bp, Artificial Sequence
  chemically synthesized
ggcagtgccctggcattggg

SEQ ID NO: 11253 - DNA, 20 bp, Artificial Sequence
  chemically synthesized
tggcattggggggccctgtg

SEQ ID NO: 11254 - DNA, 20 bp, Artificial Sequence
  chemically synthesized
gggccctgtgcagacaccac

SEQ ID NO: 11255 - DNA, 20 bp, Artificial Sequence
  chemically synthesized
ggccctgtgcagacaccacc

SEQ ID NO: 11256 - DNA, 20 bp, Artificial Sequence
  chemically synthesized
ccctgtgcagacaccaccag

SEQ ID NO: 11257 - DNA, 20 bp, Artificial Sequence
  chemically synthesized
ccaccaggagacgctgaccc

SEQ ID NO: 11258 - DNA, 20 bp, Artificial Sequence
  chemically synthesized
agacgctgaccccagtaccc

SEQ ID NO: 11259 - DNA, 20 bp, Artificial Sequence
  chemically synthesized
gacgctgaccccagtaccca

SEQ ID NO: 11260 - DNA, 20 bp, Artificial Sequence
  chemically synthesized
gctgaccccagtacccaagg

SEQ ID NO: 11261 - DNA, 20 bp, Artificial Sequence
  chemically synthesized
ctgaccccagtacccaaggc

SEQ ID NO: 11262 - DNA, 20 bp, Artificial Sequence
  chemically synthesized
tgaccccagtacccaaggca

SEQ ID NO: 11263 - DNA, 20 bp, Artificial Sequence
  chemically synthesized
agggtccataacgtcttatt

SEQ ID NO: 11264 - DNA, 20 bp, Artificial Sequence
  chemically synthesized
tcttattcagcctttccatg

SEQ ID NO: 11265 - DNA, 20 bp, Artificial Sequence
  chemically synthesized
attcagcctttccatgtggt

SEQ ID NO: 11266 - DNA, 20 bp, Artificial Sequence
  chemically synthesized
ttcagcctttccatgtggtc

SEQ ID NO: 11267 - DNA, 20 bp, Artificial Sequence
  chemically synthesized
agcctttccatgtggtcggg

SEQ ID NO: 11268 - DNA, 20 bp, Artificial Sequence
  chemically synthesized
tgtggtcgggaagttaccca

SEQ ID NO: 11269 - DNA, 20 bp, Artificial Sequence
  chemically synthesized
gtggtcgggaagttacccac

SEQ ID NO: 11270 - DNA, 20 bp, Artificial Sequence
  chemically synthesized
ttcctaaccaccctctctgc

SEQ ID NO: 11271 - DNA, 20 bp, Artificial Sequence
  chemically synthesized
accaccctctctgccggccg

SEQ ID NO: 11272 - DNA, 20 bp, Artificial Sequence
  chemically synthesized
gccggccgcagctgttctgt

SEQ ID NO: 11273 - DNA, 20 bp, Artificial Sequence
  chemically synthesized
agtgtccaccctgcccctca

SEQ ID NO: 11274 - DNA, 20 bp, Artificial Sequence
  chemically synthesized
gtgtccaccctgcccctcaa

SEQ ID NO: 11275 - DNA, 20 bp, Artificial Sequence
  chemically synthesized
aaaggacaaatgaaatcccc

SEQ ID NO: 11276 - DNA, 20 bp, Artificial Sequence
  chemically synthesized
caaatgaaatcccccagacc

SEQ ID NO: 11277 - DNA, 20 bp, Artificial Sequence
  chemically synthesized
atgaaatcccccagacccag

SEQ ID NO: 11278 - DNA, 20 bp, Artificial Sequence
  chemically synthesized
tgaaatcccccagacccagt

SEQ ID NO: 11279 - DNA, 20 bp, Artificial Sequence
  chemically synthesized
ccccagacccagtgggaaat

SEQ ID NO: 11280 - DNA, 20 bp, Artificial Sequence
  chemically synthesized
gaaataagcccacctaaatg

SEQ ID NO: 11281 - DNA, 20 bp, Artificial Sequence
  chemically synthesized
cccacctaaatgaagaactc

SEQ ID NO: 11282 - DNA, 20 bp, Artificial Sequence
  chemically synthesized
ctaaatgaagaactcaagac

SEQ ID NO: 11283 - DNA, 20 bp, Artificial Sequence
  chemically synthesized
taaatgaagaactcaagact

SEQ ID NO: 11284 - DNA, 20 bp, Artificial Sequence
  chemically synthesized
aaatgaagaactcaagacta

SEQ ID NO: 11285 - DNA, 20 bp, Artificial Sequence
  chemically synthesized
actcaagactagggcaccat

SEQ ID NO: 11286 - DNA, 20 bp, Artificial Sequence
  chemically synthesized
actagggcaccatgagcatc

SEQ ID NO: 11287 - DNA, 20 bp, Artificial Sequence
  chemically synthesized
ctagggcaccatgagcatct

SEQ ID NO: 11288 - DNA, 20 bp, Artificial Sequence
  chemically synthesized
gcaccatgagcatctgggtt

SEQ ID NO: 11289 - DNA, 20 bp, Artificial Sequence
  chemically synthesized
caccatgagcatctgggtta

SEQ ID NO: 11290 - DNA, 20 bp, Artificial Sequence
  chemically synthesized
tgagcatctgggttaaggct

SEQ ID NO: 11291 - DNA, 20 bp, Artificial Sequence
  chemically synthesized
taaggctcggaatcctgcac

SEQ ID NO: 11292 - DNA, 20 bp, Artificial Sequence
  chemically synthesized
tcggaatcctgcaccagcgt

SEQ ID NO: 11293 - DNA, 20 bp, Artificial Sequence
  chemically synthesized
gaatcctgcaccagcgttgg

SEQ ID NO: 11294 - DNA, 20 bp, Artificial Sequence
  chemically synthesized
ctttgttcctgccacaccgc

SEQ ID NO: 11295 - DNA, 20 bp, Artificial Sequence
  chemically synthesized
tttgttcctgccacaccgcc

SEQ ID NO: 11296 - DNA, 20 bp, Artificial Sequence
  chemically synthesized
taacctgtctccacaacact

SEQ ID NO: 11297 - DNA, 20 bp, Artificial Sequence
  chemically synthesized
ctcagcctcacgcctcaccc

SEQ ID NO: 11298 - DNA, 20 bp, Artificial Sequence
  chemically synthesized
ccgcacaatcgaatctaatt

SEQ ID NO: 11299 - DNA, 20 bp, Artificial Sequence
  chemically synthesized
caatcgaatctaattaagat

SEQ ID NO: 11300 - DNA, 20 bp, Artificial Sequence
  chemically synthesized
aatcgaatctaattaagatc

SEQ ID NO: 11301 - DNA, 20 bp, Artificial Sequence
  chemically synthesized
cgaatctaattaagatcagg

SEQ ID NO: 11302 - DNA, 20 bp, Artificial Sequence
  chemically synthesized
ttttcttttcactgtacccc

SEQ ID NO: 11303 - DNA, 20 bp, Artificial Sequence
  chemically synthesized
cactgtacccccagtaatca

SEQ ID NO: 11304 - DNA, 20 bp, Artificial Sequence
  chemically synthesized
tgtacccccagtaatcacag

SEQ ID NO: 11305 - DNA, 20 bp, Artificial Sequence
  chemically synthesized
acagaagttcttcaaatttt

SEQ ID NO: 11306 - DNA, 20 bp, Artificial Sequence
  chemically synthesized
tttccctcattttgcatttc

SEQ ID NO: 11307 - DNA, 20 bp, Artificial Sequence
  chemically synthesized
ttccctcattttgcatttca

SEQ ID NO: 11308 - DNA, 20 bp, Artificial Sequence
  chemically synthesized
attttgcatttcaaggcaca

SEQ ID NO: 11309 - DNA, 20 bp, Artificial Sequence
  chemically synthesized
tgcatttcaaggcacaaaga

SEQ ID NO: 11310 - DNA, 20 bp, Artificial Sequence
  chemically synthesized
acaaagacagtctatctcac

SEQ ID NO: 11311 - DNA, 20 bp, Artificial Sequence
  chemically synthesized
aagacagtctatctcactgg

SEQ ID NO: 11312 - DNA, 20 bp, Artificial Sequence
  chemically synthesized
tctcactggtggtctattaa

SEQ ID NO: 11313 - DNA, 20 bp, Artificial Sequence
  chemically synthesized
ggtggtctattaatagtttg

SEQ ID NO: 11314 - DNA, 20 bp, Artificial Sequence
  chemically synthesized
tattaatagtttgaagtttt

SEQ ID NO: 11315 - DNA, 20 bp, Artificial Sequence
  chemically synthesized
tagtttgaagttttgagcgt

SEQ ID NO: 11316 - DNA, 20 bp, Artificial Sequence
  chemically synthesized
tttgaagttttgagcgtcag

SEQ ID NO: 11317 - DNA, 20 bp, Artificial Sequence
  chemically synthesized
ttgaagttttgagcgtcaga

SEQ ID NO: 11318 - DNA, 20 bp, Artificial Sequence
  chemically synthesized
aagttttgagcgtcagaagg

SEQ ID NO: 11319 - DNA, 20 bp, Artificial Sequence
  chemically synthesized
agaaggtggttgttgctttt

SEQ ID NO: 11320 - DNA, 20 bp, Artificial Sequence
  chemically synthesized
ggttgttgctttttggtttt

SEQ ID NO: 11321 - DNA, 20 bp, Artificial Sequence
  chemically synthesized
gttgttgctttttggttttt

SEQ ID NO: 11322 - DNA, 20 bp, Artificial Sequence
  chemically synthesized
taaaactattctgtcatttc

SEQ ID NO: 11323 - DNA, 20 bp, Artificial Sequence
  chemically synthesized
gtcatttccagttttttaaa

SEQ ID NO: 11324 - DNA, 20 bp, Artificial Sequence
  chemically synthesized
tcatttccagttttttaaaa

SEQ ID NO: 11325 - DNA, 20 bp, Artificial Sequence
  chemically synthesized
tttttttgtttttctttttt

SEQ ID NO: 11326 - DNA, 20 bp, Artificial Sequence
  chemically synthesized
ttttgtttttctttttttgg

SEQ ID NO: 11327 - DNA, 20 bp, Artificial Sequence
  chemically synthesized
tgtttttctttttttggtgg

SEQ ID NO: 11328 - DNA, 20 bp, Artificial Sequence
  chemically synthesized
ttttctttttttggtggtgg

SEQ ID NO: 11329 - DNA, 20 bp, Artificial Sequence
  chemically synthesized
tggtggcgttaatgtttctt

SEQ ID NO: 11330 - DNA, 20 bp, Artificial Sequence
  chemically synthesized
ggcgttaatgtttcttcaga

SEQ ID NO: 11331 - DNA, 20 bp, Artificial Sequence
  chemically synthesized
ttaatgtttcttcagaaaga

SEQ ID NO: 11332 - DNA, 20 bp, Artificial Sequence
  chemically synthesized
ttcttcagaaagacagcttc

SEQ ID NO: 11333 - DNA, 20 bp, Artificial Sequence
  chemically synthesized
tcttcagaaagacagcttct

SEQ ID NO: 11334 - DNA, 20 bp, Artificial Sequence
  chemically synthesized
agacagcttctgggccactc

SEQ ID NO: 11335 - DNA, 20 bp, Artificial Sequence
  chemically synthesized
gacagcttctgggccactct

SEQ ID NO: 11336 - DNA, 20 bp, Artificial Sequence
  chemically synthesized
ccactctgggtattatgatt

SEQ ID NO: 11337 - DNA, 20 bp, Artificial Sequence
  chemically synthesized
atttggtttcccccttacaa

SEQ ID NO: 11338 - DNA, 20 bp, Artificial Sequence
  chemically synthesized
tacaatagttactctctgcc

SEQ ID NO: 11339 - DNA, 20 bp, Artificial Sequence
  chemically synthesized
ctgcctggtttactgattta

SEQ ID NO: 11340 - DNA, 20 bp, Artificial Sequence
  chemically synthesized
tttactgatttacagaacct

SEQ ID NO: 11341 - DNA, 20 bp, Artificial Sequence
  chemically synthesized
acagaaccttggtatgtgaa

SEQ ID NO: 11342 - DNA, 20 bp, Artificial Sequence
  chemically synthesized
ttggtatgtgaatggcgaaa

SEQ ID NO: 11343 - DNA, 20 bp, Artificial Sequence
  chemically synthesized
gaatggcgaaaaagaaaaaa

SEQ ID NO: 11344 - DNA, 20 bp, Artificial Sequence
  chemically synthesized
aatggcgaaaaagaaaaaaa

SEQ ID NO: 11345 - DNA, 20 bp, Artificial Sequence
  chemically synthesized
gcgaaaaagaaaaaaaagga

SEQ ID NO: 11346 - DNA, 20 bp, Artificial Sequence
  chemically synthesized
gaaaaaaaaggaaagaaaaa

SEQ ID NO: 11347 - DNA, 20 bp, Artificial Sequence
  chemically synthesized
aagaaaaaaagaaaattcct

SEQ ID NO: 11348 - DNA, 20 bp, Artificial Sequence
  chemically synthesized
aaaagaaaattccttggcat

SEQ ID NO: 11349 - DNA, 20 bp, Artificial Sequence
  chemically synthesized
aaagaaaattccttggcata

SEQ ID NO: 11350 - DNA, 20 bp, Artificial Sequence
  chemically synthesized
tatgtttgctgatcaaattt

SEQ ID NO: 11351 - DNA, 20 bp, Artificial Sequence
  chemically synthesized
ttatgactttacttgaaaaa

SEQ ID NO: 11352 - DNA, 20 bp, Artificial Sequence
  chemically synthesized
acttgaaaaacagtttgcca

SEQ ID NO: 11353 - DNA, 20 bp, Artificial Sequence
  chemically synthesized
gaaaaacagtttgccacagt

SEQ ID NO: 11354 - DNA, 20 bp, Artificial Sequence
  chemically synthesized
aacagtttgccacagtgaga

SEQ ID NO: 11355 - DNA, 20 bp, Artificial Sequence
  chemically synthesized
tctacccctccactcccttt

SEQ ID NO: 11356 - DNA, 20 bp, Artificial Sequence
  chemically synthesized
cctttaagtacttcgaaaaa

SEQ ID NO: 11357 - DNA, 20 bp, Artificial Sequence
  chemically synthesized
aaaacagtacaattttttta

SEQ ID NO: 11358 - DNA, 20 bp, Artificial Sequence
  chemically synthesized
aaacagtacaatttttttaa

SEQ ID NO: 11359 - DNA, 20 bp, Artificial Sequence
  chemically synthesized
cagtacaatttttttaaagg

SEQ ID NO: 11360 - DNA, 20 bp, Artificial Sequence
  chemically synthesized
tttttttaaaggtagattta

SEQ ID NO: 11361 - DNA, 20 bp, Artificial Sequence
  chemically synthesized
ggtagatttaaagcattaac

SEQ ID NO: 11362 - DNA, 20 bp, Artificial Sequence
  chemically synthesized
atttaaagcattaactggtt

SEQ ID NO: 11363 - DNA, 20 bp, Artificial Sequence
  chemically synthesized
ccctgaaaatacattttcaa

SEQ ID NO: 11364 - DNA, 20 bp, Artificial Sequence
  chemically synthesized
attttcaaaagacttatgca

SEQ ID NO: 11365 - DNA, 20 bp, Artificial Sequence
  chemically synthesized
tgcaaagccacatgattttg

SEQ ID NO: 11366 - DNA, 20 bp, Artificial Sequence
  chemically synthesized
gcaaagccacatgattttga

SEQ ID NO: 11367 - DNA, 20 bp, Artificial Sequence
  chemically synthesized
aaagccacatgattttgaag

SEQ ID NO: 11368 - DNA, 20 bp, Artificial Sequence
  chemically synthesized
atgattttgaaggagctaat

SEQ ID NO: 11369 - DNA, 20 bp, Artificial Sequence
  chemically synthesized
gtcccaccaccaaaatttaa

SEQ ID NO: 11370 - DNA, 20 bp, Artificial Sequence
  chemically synthesized
ccaaaatttaatggtgactt

SEQ ID NO: 11371 - DNA, 20 bp, Artificial Sequence
  chemically synthesized
tactttttatttacttcctg

SEQ ID NO: 11372 - DNA, 20 bp, Artificial Sequence
  chemically synthesized
ttgtgtacttgacatttata

SEQ ID NO: 11373 - DNA, 20 bp, Artificial Sequence
  chemically synthesized
cattatataacaatctaccc

SEQ ID NO: 11374 - DNA, 20 bp, Artificial Sequence
  chemically synthesized
attatataacaatctaccct

SEQ ID NO: 11375 - DNA, 20 bp, Artificial Sequence
  chemically synthesized
acaatctaccctgggtacac

SEQ ID NO: 11376 - DNA, 20 bp, Artificial Sequence
  chemically synthesized
actagattatgccaatctat

SEQ ID NO: 11377 - DNA, 20 bp, Artificial Sequence
  chemically synthesized
atgaaatttgtactccatat

SEQ ID NO: 11378 - DNA, 20 bp, Artificial Sequence
  chemically synthesized
aaatttgtactccatataag

SEQ ID NO: 11379 - DNA, 20 bp, Artificial Sequence
  chemically synthesized
tttgtactccatataagcag

SEQ ID NO: 11380 - DNA, 20 bp, Artificial Sequence
  chemically synthesized
tccatataagcagaagtttc

SEQ ID NO: 11381 - DNA, 20 bp, Artificial Sequence
  chemically synthesized
taccattatgtttcaatgta

SEQ ID NO: 11382 - DNA, 20 bp, Artificial Sequence
  chemically synthesized
ttcaatgtaaagtgttatta

SEQ ID NO: 11383 - DNA, 20 bp, Artificial Sequence
  chemically synthesized
aatgtaaagtgttattatag

SEQ ID NO: 11384 - DNA, 20 bp, Artificial Sequence
  chemically synthesized
tgtaaagtgttattatagca

SEQ ID NO: 11385 - DNA, 20 bp, Artificial Sequence
  chemically synthesized
tgttattatagcagagtata

SEQ ID NO: 11386 - DNA, 20 bp, Artificial Sequence
  chemically synthesized
ttatagcagagtataaagca

SEQ ID NO: 11387 - DNA, 20 bp, Artificial Sequence
  chemically synthesized
gtaatctttcttgctgcttc

SEQ ID NO: 11388 - DNA, 20 bp, Artificial Sequence
  chemically synthesized
taatctttcttgctgcttct

SEQ ID NO: 11389 - DNA, 20 bp, Artificial Sequence
  chemically synthesized
aatctttcttgctgcttcta

SEQ ID NO: 11390 - DNA, 20 bp, Artificial Sequence
  chemically synthesized
tgctgcttctagggctgtgt

SEQ ID NO: 11391 - DNA, 20 bp, Artificial Sequence
  chemically synthesized
tgtgtcagtgtttacattcc

SEQ ID NO: 11392 - DNA, 20 bp, Artificial Sequence
  chemically synthesized
gtcagtgtttacattcctgg

SEQ ID NO: 11393 - DNA, 20 bp, Artificial Sequence
  chemically synthesized
ggaagttaaataaaccgaca

SEQ ID NO: 11394 - DNA, 20 bp, Artificial Sequence
  chemically synthesized
aaccgacatggcaaaactcc

SEQ ID NO: 11395 - DNA, 20 bp, Artificial Sequence
  chemically synthesized
gacatggcaaaactcctgga

SEQ ID NO: 11396 - DNA, 20 bp, Artificial Sequence
  chemically synthesized
tcctggatagactgaataat

SEQ ID NO: 11397 - DNA, 20 bp, Artificial Sequence
  chemically synthesized
cctggatagactgaataata

SEQ ID NO: 11398 - DNA, 20 bp, Artificial Sequence
  chemically synthesized
ttgtttactttttaccttgt

SEQ ID NO: 11399 - DNA, 20 bp, Artificial Sequence
  chemically synthesized
tgtttactttttaccttgtt

SEQ ID NO: 11400 - DNA, 20 bp, Artificial Sequence
  chemically synthesized
gttaggatccctttcttgta

SEQ ID NO: 11401 - DNA, 20 bp, Artificial Sequence
  chemically synthesized
gatccctttcttgtaaagtt

SEQ ID NO: 11402 - DNA, 20 bp, Artificial Sequence
  chemically synthesized
atccctttcttgtaaagttt

SEQ ID NO: 11403 - DNA, 20 bp, Artificial Sequence
  chemically synthesized
tccctttcttgtaaagtttg

SEQ ID NO: 11404 - DNA, 20 bp, Artificial Sequence
  chemically synthesized
ccctttcttgtaaagtttgg

SEQ ID NO: 11405 - DNA, 20 bp, Artificial Sequence
  chemically synthesized
ctttcttgtaaagtttgggg

SEQ ID NO: 11406 - DNA, 20 bp, Artificial Sequence
  chemically synthesized
ttcttgtaaagtttggggga

SEQ ID NO: 11407 - DNA, 20 bp, Artificial Sequence
  chemically synthesized
cttgtaaagtttgggggaga

SEQ ID NO: 11408 - DNA, 20 bp, Artificial Sequence
  chemically synthesized
tgtaaagtttgggggagaga

SEQ ID NO: 11409 - DNA, 20 bp, Artificial Sequence
  chemically synthesized
taaagtttgggggagagaga

SEQ ID NO: 11410 - DNA, 20 bp, Artificial Sequence
  chemically synthesized
aaagtttgggggagagagag

SEQ ID NO: 11411 - DNA, 20 bp, Artificial Sequence
  chemically synthesized
agtttgggggagagagagag

SEQ ID NO: 11412 - DNA, 20 bp, Artificial Sequence
  chemically synthesized
tttgggggagagagagagga

SEQ ID NO: 11413 - DNA, 20 bp, Artificial Sequence
  chemically synthesized
ggggagagagagaggagaga

SEQ ID NO: 11414 - DNA, 20 bp, Artificial Sequence
  chemically synthesized
ggagagagagaggagagaaa

SEQ ID NO: 11415 - DNA, 20 bp, Artificial Sequence
  chemically synthesized
agagagagaggagagaaaga

SEQ ID NO: 11416 - DNA, 20 bp, Artificial Sequence
  chemically synthesized
gagagaggagagaaagagag

SEQ ID NO: 11417 - DNA, 20 bp, Artificial Sequence
  chemically synthesized
agagaggagagaaagagaga

SEQ ID NO: 11418 - DNA, 20 bp, Artificial Sequence
  chemically synthesized
agagaaagagagaaggaatg

SEQ ID NO: 11419 - DNA, 20 bp, Artificial Sequence
  chemically synthesized
gagaaagagagaaggaatga

SEQ ID NO: 11420 - DNA, 20 bp, Artificial Sequence
  chemically synthesized
agaaagagagaaggaatgaa

SEQ ID NO: 11421 - DNA, 20 bp, Artificial Sequence
  chemically synthesized
gaaagagagaaggaatgaag

SEQ ID NO: 11422 - DNA, 20 bp, Artificial Sequence
  chemically synthesized
aaagagagaaggaatgaagg

SEQ ID NO: 11423 - DNA, 20 bp, Artificial Sequence
  chemically synthesized
aggaatgaagggggtgatgc

SEQ ID NO: 11424 - DNA, 20 bp, Artificial Sequence
  chemically synthesized
atgaagggggtgatgcaaga

SEQ ID NO: 11425 - DNA, 20 bp, Artificial Sequence
  chemically synthesized
aagggggtgatgcaagatag

SEQ ID NO: 11426 - DNA, 20 bp, Artificial Sequence
  chemically synthesized
agggggtgatgcaagataga

SEQ ID NO: 11427 - DNA, 20 bp, Artificial Sequence
  chemically synthesized
ggggtgatgcaagatagaag

SEQ ID NO: 11428 - DNA, 20 bp, Artificial Sequence
  chemically synthesized
ggtgatgcaagatagaagga

SEQ ID NO: 11429 - DNA, 20 bp, Artificial Sequence
  chemically synthesized
tgatgcaagatagaaggaga

SEQ ID NO: 11430 - DNA, 20 bp, Artificial Sequence
  chemically synthesized
aaggagagagatttatacac

SEQ ID NO: 11431 - DNA, 20 bp, Artificial Sequence
  chemically synthesized
actggcttccatatgtcaca

SEQ ID NO: 11432 - DNA, 20 bp, Artificial Sequence
  chemically synthesized
cacaaagaccttcctatcca

SEQ ID NO: 11433 - DNA, 20 bp, Artificial Sequence
  chemically synthesized
atccacagccaacgcgactg

SEQ ID NO: 11434 - DNA, 20 bp, Artificial Sequence
  chemically synthesized
cacagccaacgcgactgaag

SEQ ID NO: 11435 - DNA, 20 bp, Artificial Sequence
  chemically synthesized
gcgactgaagcagcatgcat

SEQ ID NO: 11436 - DNA, 20 bp, Artificial Sequence
  chemically synthesized
ctgaagcagcatgcataagt

SEQ ID NO: 11437 - DNA, 20 bp, Artificial Sequence
  chemically synthesized
tgttttgttttcttaaatac

SEQ ID NO: 11438 - DNA, 20 bp, Artificial Sequence
  chemically synthesized
gttttgttttcttaaatacc

SEQ ID NO: 11439 - DNA, 20 bp, Artificial Sequence
  chemically synthesized
tgttttcttaaataccgggt

SEQ ID NO: 11440 - DNA, 20 bp, Artificial Sequence
  chemically synthesized
ccctttctccactgcccact

SEQ ID NO: 11441 - DNA, 20 bp, Artificial Sequence
  chemically synthesized
tgcccactcagccccacata

SEQ ID NO: 11442 - DNA, 20 bp, Artificial Sequence
  chemically synthesized
tcagccccacataaagtatg

SEQ ID NO: 11443 - DNA, 20 bp, Artificial Sequence
  chemically synthesized
tttttttgaccattttcaaa

SEQ ID NO: 11444 - DNA, 20 bp, Artificial Sequence
  chemically synthesized
tcaaatagcaaattatccat

SEQ ID NO: 11445 - DNA, 20 bp, Artificial Sequence
  chemically synthesized
cattagatttcatcatatct

SEQ ID NO: 11446 - DNA, 20 bp, Artificial Sequence
  chemically synthesized
gatttcatcatatcttagta

SEQ ID NO: 11447 - DNA, 20 bp, Artificial Sequence
  chemically synthesized
cttagtaaagcaattacatc

SEQ ID NO: 11448 - DNA, 20 bp, Artificial Sequence
  chemically synthesized
caattacatcaagaaaatga

SEQ ID NO: 11449 - DNA, 20 bp, Artificial Sequence
  chemically synthesized
caagaaaatgatagtgcgtg

SEQ ID NO: 11450 - DNA, 20 bp, Artificial Sequence
  chemically synthesized
tgtggaatcaattatgcatg

SEQ ID NO: 11451 - DNA, 20 bp, Artificial Sequence
  chemically synthesized
gaatcaattatgcatgcagt

SEQ ID NO: 11452 - DNA, 20 bp, Artificial Sequence
  chemically synthesized
caattatgcatgcagttggc

SEQ ID NO: 11453 - DNA, 20 bp, Artificial Sequence
  chemically synthesized
attatgcatgcagttggccg

SEQ ID NO: 11454 - DNA, 20 bp, Artificial Sequence
  chemically synthesized
atgcagttggccggagacca

SEQ ID NO: 11455 - DNA, 20 bp, Artificial Sequence
  chemically synthesized
tgcagttggccggagaccaa

SEQ ID NO: 11456 - DNA, 20 bp, Artificial Sequence
  chemically synthesized
gccggagaccaaaggctgtg

SEQ ID NO: 11457 - DNA, 20 bp, Artificial Sequence
  chemically synthesized
gagaccaaaggctgtgaagt

SEQ ID NO: 11458 - DNA, 20 bp, Artificial Sequence
  chemically synthesized
gaccaaaggctgtgaagtcg

SEQ ID NO: 11459 - DNA, 20 bp, Artificial Sequence
  chemically synthesized
ccaaaggctgtgaagtcgga

SEQ ID NO: 11460 - DNA, 20 bp, Artificial Sequence
  chemically synthesized
caaaggctgtgaagtcggag

SEQ ID NO: 11461 - DNA, 20 bp, Artificial Sequence
  chemically synthesized
aaaggctgtgaagtcggaga

SEQ ID NO: 11462 - DNA, 20 bp, Artificial Sequence
  chemically synthesized
ggctgtgaagtcggagaggg

SEQ ID NO: 11463 - DNA, 20 bp, Artificial Sequence
  chemically synthesized
gctcgacacacacaaataaa

SEQ ID NO: 11464 - DNA, 20 bp, Artificial Sequence
  chemically synthesized
acacacaaataaaaagcccc

SEQ ID NO: 11465 - DNA, 20 bp, Artificial Sequence
  chemically synthesized
taaaaagcccctggatctca

SEQ ID NO: 11466 - DNA, 20 bp, Artificial Sequence
  chemically synthesized
aagcccctggatctcacaga

SEQ ID NO: 11467 - DNA, 20 bp, Artificial Sequence
  chemically synthesized
atctcacagatggaccccat

SEQ ID NO: 11468 - DNA, 20 bp, Artificial Sequence
  chemically synthesized
agttcatcttactgcctaaa

SEQ ID NO: 11469 - DNA, 20 bp, Artificial Sequence
  chemically synthesized
ttaataatttatttgtgttc

SEQ ID NO: 11470 - DNA, 20 bp, Artificial Sequence
  chemically synthesized
gtgttctggatactgtttcc

SEQ ID NO: 11471 - DNA, 20 bp, Artificial Sequence
  chemically synthesized
atattaacaactttaaactg

SEQ ID NO: 11472 - DNA, 20 bp, Artificial Sequence
  chemically synthesized
tttaaactgaagcatgcttt

SEQ ID NO: 11473 - DNA, 20 bp, Artificial Sequence
  chemically synthesized
actgaagcatgcttttagca

SEQ ID NO: 11474 - DNA, 20 bp, Artificial Sequence
  chemically synthesized
agcatgcttttagcatggta

SEQ ID NO: 11475 - DNA, 20 bp, Artificial Sequence
  chemically synthesized
tgcttttagcatggtatgga

SEQ ID NO: 11476 - DNA, 20 bp, Artificial Sequence
  chemically synthesized
ttttagcatggtatggatgg

SEQ ID NO: 11477 - DNA, 20 bp, Artificial Sequence
  chemically synthesized
catggtatggatggaagtca

SEQ ID NO: 11478 - DNA, 20 bp, Artificial Sequence
  chemically synthesized
ggtatggatggaagtcacgg

SEQ ID NO: 11479 - DNA, 20 bp, Artificial Sequence
  chemically synthesized
gtatggatggaagtcacggt

SEQ ID NO: 11480 - DNA, 20 bp, Artificial Sequence
  chemically synthesized
tatggatggaagtcacggta

SEQ ID NO: 11481 - DNA, 20 bp, Artificial Sequence
  chemically synthesized
ggatggaagtcacggtaggg

SEQ ID NO: 11482 - DNA, 20 bp, Artificial Sequence
  chemically synthesized
aagtcacggtagggcagtgc

SEQ ID NO: 11483 - DNA, 20 bp, Artificial Sequence
  chemically synthesized
agtcacggtagggcagtgct

SEQ ID NO: 11484 - DNA, 20 bp, Artificial Sequence
  chemically synthesized
tagggcagtgctaggtccct

SEQ ID NO: 11485 - DNA, 20 bp, Artificial Sequence
  chemically synthesized
gggcagtgctaggtccctcg

SEQ ID NO: 11486 - DNA, 20 bp, Artificial Sequence
  chemically synthesized
ggcagtgctaggtccctcgg

SEQ ID NO: 11487 - DNA, 20 bp, Artificial Sequence
  chemically synthesized
tccctcggaggttaaaatta

SEQ ID NO: 11488 - DNA, 20 bp, Artificial Sequence
  chemically synthesized
cattaaacattcgttttaat

SEQ ID NO: 11489 - DNA, 20 bp, Artificial Sequence
  chemically synthesized
attcgttttaatcagaatat

SEQ ID NO: 11490 - DNA, 20 bp, Artificial Sequence
  chemically synthesized
ttctgattctgcttgttaac

SEQ ID NO: 11491 - DNA, 20 bp, Artificial Sequence
  chemically synthesized
agtgataaactcataaacca

SEQ ID NO: 11492 - DNA, 20 bp, Artificial Sequence
  chemically synthesized
aaagatgaacatcaataata

SEQ ID NO: 11493 - DNA, 20 bp, Artificial Sequence
  chemically synthesized
tgaacatcaataatacagca

SEQ ID NO: 11494 - DNA, 20 bp, Artificial Sequence
  chemically synthesized
gaacatcaataatacagcac

SEQ ID NO: 11495 - DNA, 20 bp, Artificial Sequence
  chemically synthesized
atacagcacaggttattcaa

SEQ ID NO: 11496 - DNA, 20 bp, Artificial Sequence
  chemically synthesized
gcacaggttattcaacagca

SEQ ID NO: 11497 - DNA, 20 bp, Artificial Sequence
  chemically synthesized
cacaggttattcaacagcaa

SEQ ID NO: 11498 - DNA, 20 bp, Artificial Sequence
  chemically synthesized
aaaggcaaacaccaaaatca

SEQ ID NO: 11499 - DNA, 20 bp, Artificial Sequence
  chemically synthesized
aaggcaaacaccaaaatcac

SEQ ID NO: 11500 - DNA, 20 bp, Artificial Sequence
  chemically synthesized
aatcacaggctctcaaaaat

SEQ ID NO: 11501 - DNA, 20 bp, Artificial Sequence
  chemically synthesized
tctcaaaaatcggaaaccgt

SEQ ID NO: 11502 - DNA, 20 bp, Artificial Sequence
  chemically synthesized
aaaaatcggaaaccgttagt

SEQ ID NO: 11503 - DNA, 20 bp, Artificial Sequence
  chemically synthesized
tagcaccttgttttcaccac

SEQ ID NO: 11504 - DNA, 20 bp, Artificial Sequence
  chemically synthesized
agcaccttgttttcaccacc

SEQ ID NO: 11505 - DNA, 20 bp, Artificial Sequence
  chemically synthesized
gcaccttgttttcaccacca

SEQ ID NO: 11506 - DNA, 20 bp, Artificial Sequence
  chemically synthesized
ccagggcactcgtgtacctt

SEQ ID NO: 11507 - DNA, 20 bp, Artificial Sequence
  chemically synthesized
cagggcactcgtgtaccttg

SEQ ID NO: 11508 - DNA, 20 bp, Artificial Sequence
  chemically synthesized
agggcactcgtgtaccttga

SEQ ID NO: 11509 - DNA, 20 bp, Artificial Sequence
  chemically synthesized
ggcactcgtgtaccttgagg

SEQ ID NO: 11510 - DNA, 20 bp, Artificial Sequence
  chemically synthesized
gtgtaccttgagggagacac

SEQ ID NO: 11511 - DNA, 20 bp, Artificial Sequence
  chemically synthesized
tgtaccttgagggagacact

SEQ ID NO: 11512 - DNA, 20 bp, Artificial Sequence
  chemically synthesized
taccttgagggagacactgg

SEQ ID NO: 11513 - DNA, 20 bp, Artificial Sequence
  chemically synthesized
tgagggagacactgggagcc

SEQ ID NO: 11514 - DNA, 20 bp, Artificial Sequence
  chemically synthesized
gagggagacactgggagccc

SEQ ID NO: 11515 - DNA, 20 bp, Artificial Sequence
  chemically synthesized
agggagacactgggagccca

SEQ ID NO: 11516 - DNA, 20 bp, Artificial Sequence
  chemically synthesized
ggagacactgggagcccagg

SEQ ID NO: 11517 - DNA, 20 bp, Artificial Sequence
  chemically synthesized
cactgggagcccagggagcc

SEQ ID NO: 11518 - DNA, 20 bp, Artificial Sequence
  chemically synthesized
ctgggagcccagggagcctg

SEQ ID NO: 11519 - DNA, 20 bp, Artificial Sequence
  chemically synthesized
agcccagggagcctggagac

SEQ ID NO: 11520 - DNA, 20 bp, Artificial Sequence
  chemically synthesized
gcccagggagcctggagacc

SEQ ID NO: 11521 - DNA, 20 bp, Artificial Sequence
  chemically synthesized
ctggagaccaggatatactt

SEQ ID NO: 11522 - DNA, 20 bp, Artificial Sequence
  chemically synthesized
ccaggatatactttggtgat

SEQ ID NO: 11523 - DNA, 20 bp, Artificial Sequence
  chemically synthesized
caggatatactttggtgatg

SEQ ID NO: 11524 - DNA, 20 bp, Artificial Sequence
  chemically synthesized
aggatatactttggtgatga

SEQ ID NO: 11525 - DNA, 20 bp, Artificial Sequence
  chemically synthesized
ggatatactttggtgatgag

SEQ ID NO: 11526 - DNA, 20 bp, Artificial Sequence
  chemically synthesized
atatactttggtgatgaggg

SEQ ID NO: 11527 - DNA, 20 bp, Artificial Sequence
  chemically synthesized
tatactttggtgatgagggg

SEQ ID NO: 11528 - DNA, 20 bp, Artificial Sequence
  chemically synthesized
gatgaggggaggacacattg

SEQ ID NO: 11529 - DNA, 20 bp, Artificial Sequence
  chemically synthesized
ggggaggacacattgtagct

SEQ ID NO: 11530 - DNA, 20 bp, Artificial Sequence
  chemically synthesized
ggaggacacattgtagctca

SEQ ID NO: 11531 - DNA, 20 bp, Artificial Sequence
  chemically synthesized
ggacacattgtagctcagag

SEQ ID NO: 11532 - DNA, 20 bp, Artificial Sequence
  chemically synthesized
cacattgtagctcagagcag

SEQ ID NO: 11533 - DNA, 20 bp, Artificial Sequence
  chemically synthesized
gctcagagcagcagctgaat

SEQ ID NO: 11534 - DNA, 20 bp, Artificial Sequence
  chemically synthesized
agaaaacttacttgatctaa

SEQ ID NO: 11535 - DNA, 20 bp, Artificial Sequence
  chemically synthesized
ttacttgatctaaaagataa

SEQ ID NO: 11536 - DNA, 20 bp, Artificial Sequence
  chemically synthesized
acttgatctaaaagataaaa

SEQ ID NO: 11537 - DNA, 20 bp, Artificial Sequence
  chemically synthesized
gatctaaaagataaaagagt

SEQ ID NO: 11538 - DNA, 20 bp, Artificial Sequence
  chemically synthesized
ataaaagagtcagccaaacc

SEQ ID NO: 11539 - DNA, 20 bp, Artificial Sequence
  chemically synthesized
taaaagagtcagccaaaccc

SEQ ID NO: 11540 - DNA, 20 bp, Artificial Sequence
  chemically synthesized
agtcagccaaacccaggccc

SEQ ID NO: 11541 - DNA, 20 bp, Artificial Sequence
  chemically synthesized
aaacccaggcccaagtcctt

SEQ ID NO: 11542 - DNA, 20 bp, Artificial Sequence
  chemically synthesized
aacccaggcccaagtccttt

SEQ ID NO: 11543 - DNA, 20 bp, Artificial Sequence
  chemically synthesized
ggcccaagtcctttaggtgc

SEQ ID NO: 11544 - DNA, 20 bp, Artificial Sequence
  chemically synthesized
aggtgccagccatctatcta

SEQ ID NO: 11545 - DNA, 20 bp, Artificial Sequence
  chemically synthesized
tgccagccatctatctaaag

SEQ ID NO: 11546 - DNA, 20 bp, Artificial Sequence
  chemically synthesized
ctatctaaagaagaaaccta

SEQ ID NO: 11547 - DNA, 20 bp, Artificial Sequence
  chemically synthesized
gaagaaacctaaagcattgt

SEQ ID NO: 11548 - DNA, 20 bp, Artificial Sequence
  chemically synthesized
aaacctaaagcattgttaga

SEQ ID NO: 11549 - DNA, 20 bp, Artificial Sequence
  chemically synthesized
aacctaaagcattgttagaa

SEQ ID NO: 11550 - DNA, 20 bp, Artificial Sequence
  chemically synthesized
agcattgttagaaaggtttg

SEQ ID NO: 11551 - DNA, 20 bp, Artificial Sequence
  chemically synthesized
tagaaaggtttgtagttctg

SEQ ID NO: 11552 - DNA, 20 bp, Artificial Sequence
  chemically synthesized
ctgtagccttccctcctcca

SEQ ID NO: 11553 - DNA, 20 bp, Artificial Sequence
  chemically synthesized
tgtagccttccctcctccaa

SEQ ID NO: 11554 - DNA, 20 bp, Artificial Sequence
  chemically synthesized
tagccttccctcctccaaag

SEQ ID NO: 11555 - DNA, 20 bp, Artificial Sequence
  chemically synthesized
agccttccctcctccaaagg

SEQ ID NO: 11556 - DNA, 20 bp, Artificial Sequence
  chemically synthesized
gatgtcttaatacactataa

SEQ ID NO: 11557 - DNA, 20 bp, Artificial Sequence
  chemically synthesized
cttaatacactataatagcc

SEQ ID NO: 11558 - DNA, 20 bp, Artificial Sequence
  chemically synthesized
ttaatacactataatagcca

SEQ ID NO: 11559 - DNA, 20 bp, Artificial Sequence
  chemically synthesized
aaactgccctgcaatgttcg

SEQ ID NO: 11560 - DNA, 20 bp, Artificial Sequence
  chemically synthesized
aactgccctgcaatgttcgt

SEQ ID NO: 11561 - DNA, 20 bp, Artificial Sequence
  chemically synthesized
actgccctgcaatgttcgtg

SEQ ID NO: 11562 - DNA, 20 bp, Artificial Sequence
  chemically synthesized
cctgcaatgttcgtggggaa

SEQ ID NO: 11563 - DNA, 20 bp, Artificial Sequence
  chemically synthesized
atgttcgtggggaacagaaa

SEQ ID NO: 11564 - DNA, 20 bp, Artificial Sequence
  chemically synthesized
tgttcgtggggaacagaaac

SEQ ID NO: 11565 - DNA, 20 bp, Artificial Sequence
  chemically synthesized
tacatatttctctatgtatc

SEQ ID NO: 11566 - DNA, 20 bp, Artificial Sequence
  chemically synthesized
atatttctctatgtatctgg

SEQ ID NO: 11567 - DNA, 20 bp, Artificial Sequence
  chemically synthesized
aatcatatacttaaatttta

SEQ ID NO: 11568 - DNA, 20 bp, Artificial Sequence
  chemically synthesized
ttacagtcttctccccaaat

SEQ ID NO: 11569 - DNA, 20 bp, Artificial Sequence
  chemically synthesized
ccccaaatgagaacgatttc

SEQ ID NO: 11570 - DNA, 20 bp, Artificial Sequence
  chemically synthesized
caaactgtacttaacgttaa

SEQ ID NO: 11571 - DNA, 20 bp, Artificial Sequence
  chemically synthesized
tacttaacgttaaaagaaaa

SEQ ID NO: 11572 - DNA, 20 bp, Artificial Sequence
  chemically synthesized
taaaacatatgtaattactc

SEQ ID NO: 11573 - DNA, 20 bp, Artificial Sequence
  chemically synthesized
aaaacatatgtaattactca

SEQ ID NO: 11574 - DNA, 20 bp, Artificial Sequence
  chemically synthesized
catatgtaattactcaaggt

SEQ ID NO: 11575 - DNA, 20 bp, Artificial Sequence
  chemically synthesized
tctaattcctcaattcacta

SEQ ID NO: 11576 - DNA, 20 bp, Artificial Sequence
  chemically synthesized
ctaattcctcaattcactaa

SEQ ID NO: 11577 - DNA, 20 bp, Artificial Sequence
  chemically synthesized
tcaattcactaaaggaaact

SEQ ID NO: 11578 - DNA, 20 bp, Artificial Sequence
  chemically synthesized
ttcactaaaggaaacttggc

SEQ ID NO: 11579 - DNA, 20 bp, Artificial Sequence
  chemically synthesized
actaaaggaaacttggcaag

SEQ ID NO: 11580 - DNA, 20 bp, Artificial Sequence
  chemically synthesized
atcattttgctcctttctac

SEQ ID NO: 11581 - DNA, 20 bp, Artificial Sequence
  chemically synthesized
tcattttgctcctttctact

SEQ ID NO: 11582 - DNA, 20 bp, Artificial Sequence
  chemically synthesized
cattttgctcctttctactg

SEQ ID NO: 11583 - DNA, 20 bp, Artificial Sequence
  chemically synthesized
tcctttctactggggcatct

SEQ ID NO: 11584 - DNA, 20 bp, Artificial Sequence
  chemically synthesized
cctttctactggggcatctg

SEQ ID NO: 11585 - DNA, 20 bp, Artificial Sequence
  chemically synthesized
tttctactggggcatctgag

SEQ ID NO: 11586 - DNA, 20 bp, Artificial Sequence
  chemically synthesized
ttctactggggcatctgagg

SEQ ID NO: 11587 - DNA, 20 bp, Artificial Sequence
  chemically synthesized
ctactggggcatctgaggag

SEQ ID NO: 11588 - DNA, 20 bp, Artificial Sequence
  chemically synthesized
actggggcatctgaggagga

SEQ ID NO: 11589 - DNA, 20 bp, Artificial Sequence
  chemically synthesized
atctgaggaggagagccact

SEQ ID NO: 11590 - DNA, 20 bp, Artificial Sequence
  chemically synthesized
tctgaggaggagagccactg

SEQ ID NO: 11591 - DNA, 20 bp, Artificial Sequence
  chemically synthesized
gaggaggagagccactgagg

SEQ ID NO: 11592 - DNA, 20 bp, Artificial Sequence
  chemically synthesized
aatacacaaaacatgatcaa

SEQ ID NO: 11593 - DNA, 20 bp, Artificial Sequence
  chemically synthesized
tgatcaaaagtgattaacaa

SEQ ID NO: 11594 - DNA, 20 bp, Artificial Sequence
  chemically synthesized
atatgcaaattacattaatg

SEQ ID NO: 11595 - DNA, 20 bp, Artificial Sequence
  chemically synthesized
tatgcaaattacattaatga

SEQ ID NO: 11596 - DNA, 20 bp, Artificial Sequence
  chemically synthesized
tgcaaattacattaatgaag

SEQ ID NO: 11597 - DNA, 20 bp, Artificial Sequence
  chemically synthesized
tacattaatgaaggagtgca

SEQ ID NO: 11598 - DNA, 20 bp, Artificial Sequence
  chemically synthesized
attaaatatgtcaaatctct

SEQ ID NO: 11599 - DNA, 20 bp, Artificial Sequence
  chemically synthesized
cttggtgaacttttaatctt

SEQ ID NO: 11600 - DNA, 20 bp, Artificial Sequence
  chemically synthesized
ggtgaacttttaatcttgag

SEQ ID NO: 11601 - DNA, 20 bp, Artificial Sequence
  chemically synthesized
ttttacatcatcaattttgc

SEQ ID NO: 11602 - DNA, 20 bp, Artificial Sequence
  chemically synthesized
ttttgcaagattgaaaatct

SEQ ID NO: 11603 - DNA, 20 bp, Artificial Sequence
  chemically synthesized
gattgaaaatctaagaatct

SEQ ID NO: 11604 - DNA, 20 bp, Artificial Sequence
  chemically synthesized
ttcaccttttttttctcctt

SEQ ID NO: 11605 - DNA, 20 bp, Artificial Sequence
  chemically synthesized
accttttttttctccttcag

SEQ ID NO: 11606 - DNA, 20 bp, Artificial Sequence
  chemically synthesized
ccttttttttctccttcagc

SEQ ID NO: 11607 - DNA, 20 bp, Artificial Sequence
  chemically synthesized
tttctccttcagcaggctga

SEQ ID NO: 11608 - DNA, 20 bp, Artificial Sequence
  chemically synthesized
ttctccttcagcaggctgac

SEQ ID NO: 11609 - DNA, 20 bp, Artificial Sequence
  chemically synthesized
ccttcagcaggctgacaggc

SEQ ID NO: 11610 - DNA, 20 bp, Artificial Sequence
  chemically synthesized
gcaccgaatgtacatgttaa

SEQ ID NO: 11611 - DNA, 20 bp, Artificial Sequence
  chemically synthesized
caccgaatgtacatgttaat

SEQ ID NO: 11612 - DNA, 20 bp, Artificial Sequence
  chemically synthesized
gcaaaacaattcgcaattac

SEQ ID NO: 11613 - DNA, 20 bp, Artificial Sequence
  chemically synthesized
aaacaattcgcaattactgg

SEQ ID NO: 11614 - DNA, 20 bp, Artificial Sequence
  chemically synthesized
aacaattcgcaattactgga

SEQ ID NO: 11615 - DNA, 20 bp, Artificial Sequence
  chemically synthesized
caattactggaaggacctaa

SEQ ID NO: 11616 - DNA, 20 bp, Artificial Sequence
  chemically synthesized
tggaaggacctaatggtcat

SEQ ID NO: 11617 - DNA, 20 bp, Artificial Sequence
  chemically synthesized
tggtcattagaatttacaac

SEQ ID NO: 11618 - DNA, 20 bp, Artificial Sequence
  chemically synthesized
ggtcattagaatttacaact

SEQ ID NO: 11619 - DNA, 20 bp, Artificial Sequence
  chemically synthesized
tacaactaggtaatgaactg

SEQ ID NO: 11620 - DNA, 20 bp, Artificial Sequence
  chemically synthesized
ccacaccatgcatattcata

SEQ ID NO: 11621 - DNA, 20 bp, Artificial Sequence
  chemically synthesized
tgcatattcataaagcaatt

SEQ ID NO: 11622 - DNA, 20 bp, Artificial Sequence
  chemically synthesized
ataaagcaatttagcctttg

SEQ ID NO: 11623 - DNA, 20 bp, Artificial Sequence
  chemically synthesized
aatttagcctttgaagatta

SEQ ID NO: 11624 - DNA, 20 bp, Artificial Sequence
  chemically synthesized
ttagcctttgaagattaaag

SEQ ID NO: 11625 - DNA, 20 bp, Artificial Sequence
  chemically synthesized
gaagtgcttaaaattcaaat

SEQ ID NO: 11626 - DNA, 20 bp, Artificial Sequence
  chemically synthesized
cttaaaattcaaatgagctt

SEQ ID NO: 11627 - DNA, 20 bp, Artificial Sequence
  chemically synthesized
aatgagctttagcaaattat

SEQ ID NO: 11628 - DNA, 20 bp, Artificial Sequence
  chemically synthesized
agctttagcaaattatcagt

SEQ ID NO: 11629 - DNA, 20 bp, Artificial Sequence
  chemically synthesized
atcagtaagattcatccaaa

SEQ ID NO: 11630 - DNA, 20 bp, Artificial Sequence
  chemically synthesized
taagattcatccaaaaagca

SEQ ID NO: 11631 - DNA, 20 bp, Artificial Sequence
  chemically synthesized
aagattcatccaaaaagcaa

SEQ ID NO: 11632 - DNA, 20 bp, Artificial Sequence
  chemically synthesized
agattcatccaaaaagcaaa

SEQ ID NO: 11633 - DNA, 20 bp, Artificial Sequence
  chemically synthesized
tgcaaaattgtaatatcttc

SEQ ID NO: 11634 - DNA, 20 bp, Artificial Sequence
  chemically synthesized
attgtaatatcttccagact

SEQ ID NO: 11635 - DNA, 20 bp, Artificial Sequence
  chemically synthesized
gactgagcttaaactaaaca

SEQ ID NO: 11636 - DNA, 20 bp, Artificial Sequence
  chemically synthesized
ctgagcttaaactaaacata

SEQ ID NO: 11637 - DNA, 20 bp, Artificial Sequence
  chemically synthesized
taaactaaacatagagcttc

SEQ ID NO: 11638 - DNA, 20 bp, Artificial Sequence
  chemically synthesized
taaacatagagcttctagtc

SEQ ID NO: 11639 - DNA, 20 bp, Artificial Sequence
  chemically synthesized
tagagcttctagtcaagcca

SEQ ID NO: 11640 - DNA, 20 bp, Artificial Sequence
  chemically synthesized
agagcttctagtcaagccaa

SEQ ID NO: 11641 - DNA, 20 bp, Artificial Sequence
  chemically synthesized
gagcttctagtcaagccaaa

SEQ ID NO: 11642 - DNA, 20 bp, Artificial Sequence
  chemically synthesized
agcttctagtcaagccaaag

SEQ ID NO: 11643 - DNA, 20 bp, Artificial Sequence
  chemically synthesized
ctagtcaagccaaaggggct

SEQ ID NO: 11644 - DNA, 20 bp, Artificial Sequence
  chemically synthesized
caaaggggctaagatacaaa

SEQ ID NO: 11645 - DNA, 20 bp, Artificial Sequence
  chemically synthesized
aaggggctaagatacaaaca

SEQ ID NO: 11646 - DNA, 20 bp, Artificial Sequence
  chemically synthesized
aggggctaagatacaaacag

SEQ ID NO: 11647 - DNA, 20 bp, Artificial Sequence
  chemically synthesized
agaggctgcaaacatcgtca

SEQ ID NO: 11648 - DNA, 20 bp, Artificial Sequence
  chemically synthesized
cggactttgttcataaaact

SEQ ID NO: 11649 - DNA, 20 bp, Artificial Sequence
  chemically synthesized
gttcataaaactaagccctt

SEQ ID NO: 11650 - DNA, 20 bp, Artificial Sequence
  chemically synthesized
tcataaaactaagcccttaa

SEQ ID NO: 11651 - DNA, 20 bp, Artificial Sequence
  chemically synthesized
gccaaacctatctctaaaca

SEQ ID NO: 11652 - DNA, 20 bp, Artificial Sequence
  chemically synthesized
acatggtaatttatcaaaaa

SEQ ID NO: 11653 - DNA, 20 bp, Artificial Sequence
  chemically synthesized
gtaatttatcaaaaacagcc

SEQ ID NO: 11654 - DNA, 20 bp, Artificial Sequence
  chemically synthesized
aatttatcaaaaacagccca

SEQ ID NO: 11655 - DNA, 20 bp, Artificial Sequence
  chemically synthesized
aaacagcccagagtcgctca

SEQ ID NO: 11656 - DNA, 20 bp, Artificial Sequence
  chemically synthesized
aacagcccagagtcgctcat

SEQ ID NO: 11657 - DNA, 20 bp, Artificial Sequence
  chemically synthesized
cgctcataggcaatactgca

SEQ ID NO: 11658 - DNA, 20 bp, Artificial Sequence
  chemically synthesized
aatactgcatagtcctccaa

SEQ ID NO: 11659 - DNA, 20 bp, Artificial Sequence
  chemically synthesized
tgcatagtcctccaacagaa

SEQ ID NO: 11660 - DNA, 20 bp, Artificial Sequence
  chemically synthesized
ccaacagaacagattaacac

SEQ ID NO: 11661 - DNA, 20 bp, Artificial Sequence
  chemically synthesized
agtccctccacccttccaaa

SEQ ID NO: 11662 - DNA, 20 bp, Artificial Sequence
  chemically synthesized
caaaaagccttttccccctc

SEQ ID NO: 11663 - DNA, 20 bp, Artificial Sequence
  chemically synthesized
tcctgtgtaaacatccactg

SEQ ID NO: 11664 - DNA, 20 bp, Artificial Sequence
  chemically synthesized
catccactgtggtataaaaa

SEQ ID NO: 11665 - DNA, 20 bp, Artificial Sequence
  chemically synthesized
tataaaaacagctttttcat

SEQ ID NO: 11666 - DNA, 20 bp, Artificial Sequence
  chemically synthesized
aaacagctttttcattggct

SEQ ID NO: 11667 - DNA, 20 bp, Artificial Sequence
  chemically synthesized
acagctttttcattggcttg

SEQ ID NO: 11668 - DNA, 20 bp, Artificial Sequence
  chemically synthesized
gctttttcattggcttggag

SEQ ID NO: 11669 - DNA, 20 bp, Artificial Sequence
  chemically synthesized
gcttggagtggcattaattt

SEQ ID NO: 11670 - DNA, 20 bp, Artificial Sequence
  chemically synthesized
tggagtggcattaattttag

SEQ ID NO: 11671 - DNA, 20 bp, Artificial Sequence
  chemically synthesized
tttagaagtttctgcttcca

SEQ ID NO: 11672 - DNA, 20 bp, Artificial Sequence
  chemically synthesized
ttagaagtttctgcttccaa

SEQ ID NO: 11673 - DNA, 20 bp, Artificial Sequence
  chemically synthesized
tagaagtttctgcttccaaa

SEQ ID NO: 11674 - DNA, 20 bp, Artificial Sequence
  chemically synthesized
ttctgcttccaaagggaaac

SEQ ID NO: 11675 - DNA, 20 bp, Artificial Sequence
  chemically synthesized
gcttccaaagggaaaccagc

SEQ ID NO: 11676 - DNA, 20 bp, Artificial Sequence
  chemically synthesized
ccaaagggaaaccagcaaga

SEQ ID NO: 11677 - DNA, 20 bp, Artificial Sequence
  chemically synthesized
caaagggaaaccagcaagaa

SEQ ID NO: 11678 - DNA, 20 bp, Artificial Sequence
  chemically synthesized
aagggaaaccagcaagaaag

SEQ ID NO: 11679 - DNA, 20 bp, Artificial Sequence
  chemically synthesized
ggaaaccagcaagaaaggag

SEQ ID NO: 11680 - DNA, 20 bp, Artificial Sequence
  chemically synthesized
ccagcaagaaaggagaagca

SEQ ID NO: 11681 - DNA, 20 bp, Artificial Sequence
  chemically synthesized
cagcaagaaaggagaagcac

SEQ ID NO: 11682 - DNA, 20 bp, Artificial Sequence
  chemically synthesized
gcaagaaaggagaagcacag

SEQ ID NO: 11683 - DNA, 20 bp, Artificial Sequence
  chemically synthesized
caagaaaggagaagcacagg

SEQ ID NO: 11684 - DNA, 20 bp, Artificial Sequence
  chemically synthesized
aagaaaggagaagcacagga

SEQ ID NO: 11685 - DNA, 20 bp, Artificial Sequence
  chemically synthesized
gaaaggagaagcacaggagg

SEQ ID NO: 11686 - DNA, 20 bp, Artificial Sequence
  chemically synthesized
aaggagaagcacaggaggga

SEQ ID NO: 11687 - DNA, 20 bp, Artificial Sequence
  chemically synthesized
aggagaagcacaggagggag

SEQ ID NO: 11688 - DNA, 20 bp, Artificial Sequence
  chemically synthesized
gagaagcacaggagggagag

SEQ ID NO: 11689 - DNA, 20 bp, Artificial Sequence
  chemically synthesized
agcacaggagggagaggagc

SEQ ID NO: 11690 - DNA, 20 bp, Artificial Sequence
  chemically synthesized
gcacaggagggagaggagca

SEQ ID NO: 11691 - DNA, 20 bp, Artificial Sequence
  chemically synthesized
ggagggagaggagcaaggtc

SEQ ID NO: 11692 - DNA, 20 bp, Artificial Sequence
  chemically synthesized
gcaaggtctggtttacttct

SEQ ID NO: 11693 - DNA, 20 bp, Artificial Sequence
  chemically synthesized
caaggtctggtttacttctg

SEQ ID NO: 11694 - DNA, 20 bp, Artificial Sequence
  chemically synthesized
aggtctggtttacttctgag

SEQ ID NO: 11695 - DNA, 20 bp, Artificial Sequence
  chemically synthesized
gagtgcaaatcctgttgctt

SEQ ID NO: 11696 - DNA, 20 bp, Artificial Sequence
  chemically synthesized
cctttctgatttcctccatt

SEQ ID NO: 11697 - DNA, 20 bp, Artificial Sequence
  chemically synthesized
tgatttcctccattcggcac

SEQ ID NO: 11698 - DNA, 20 bp, Artificial Sequence
  chemically synthesized
caccagccgcatttaatcca

SEQ ID NO: 11699 - DNA, 20 bp, Artificial Sequence
  chemically synthesized
cgcatttaatccatggtgaa

SEQ ID NO: 11700 - DNA, 20 bp, Artificial Sequence
  chemically synthesized
gcatttaatccatggtgaac

SEQ ID NO: 11701 - DNA, 20 bp, Artificial Sequence
  chemically synthesized
tccatggtgaacgggtcatg

SEQ ID NO: 11702 - DNA, 20 bp, Artificial Sequence
  chemically synthesized
tgaacgggtcatgcagacat

SEQ ID NO: 11703 - DNA, 20 bp, Artificial Sequence
  chemically synthesized
tgcagacatcagctgacatt

SEQ ID NO: 11704 - DNA, 20 bp, Artificial Sequence
  chemically synthesized
gacatcagctgacattcaga

SEQ ID NO: 11705 - DNA, 20 bp, Artificial Sequence
  chemically synthesized
agctgacattcagaaagttg

SEQ ID NO: 11706 - DNA, 20 bp, Artificial Sequence
  chemically synthesized
ccaccaccaccatcccaccc

SEQ ID NO: 11707 - DNA, 20 bp, Artificial Sequence
  chemically synthesized
caccatcccaccccagttat

SEQ ID NO: 11708 - DNA, 20 bp, Artificial Sequence
  chemically synthesized
ccatcccaccccagttatta

SEQ ID NO: 11709 - DNA, 20 bp, Artificial Sequence
  chemically synthesized
atcccaccccagttattaga

SEQ ID NO: 11710 - DNA, 20 bp, Artificial Sequence
  chemically synthesized
ccagttattagagagtatcg

SEQ ID NO: 11711 - DNA, 20 bp, Artificial Sequence
  chemically synthesized
cagttattagagagtatcgt

SEQ ID NO: 11712 - DNA, 20 bp, Artificial Sequence
  chemically synthesized
tagagagtatcgtgggaacc

SEQ ID NO: 11713 - DNA, 20 bp, Artificial Sequence
  chemically synthesized
atcgtgggaacctggatttg

SEQ ID NO: 11714 - DNA, 20 bp, Artificial Sequence
  chemically synthesized
tcgtgggaacctggatttgc

SEQ ID NO: 11715 - DNA, 20 bp, Artificial Sequence
  chemically synthesized
tttgcaggctttccaattac

SEQ ID NO: 11716 - DNA, 20 bp, Artificial Sequence
  chemically synthesized
aggctttccaattactagtc

SEQ ID NO: 11717 - DNA, 20 bp, Artificial Sequence
  chemically synthesized
gctttccaattactagtctg

SEQ ID NO: 11718 - DNA, 20 bp, Artificial Sequence
  chemically synthesized
ttccaattactagtctggag

SEQ ID NO: 11719 - DNA, 20 bp, Artificial Sequence
  chemically synthesized
tcctgacatttaaaaaattc

SEQ ID NO: 11720 - DNA, 20 bp, Artificial Sequence
  chemically synthesized
catttaaaaaattctagtga

SEQ ID NO: 11721 - DNA, 20 bp, Artificial Sequence
  chemically synthesized
caaccccaacctctccaacc

SEQ ID NO: 11722 - DNA, 20 bp, Artificial Sequence
  chemically synthesized
aaccccaacctctccaaccc

SEQ ID NO: 11723 - DNA, 20 bp, Artificial Sequence
  chemically synthesized
aacctctccaacccaggtga

SEQ ID NO: 11724 - DNA, 20 bp, Artificial Sequence
  chemically synthesized
tctccaacccaggtgaaagc

SEQ ID NO: 11725 - DNA, 20 bp, Artificial Sequence
  chemically synthesized
caacccaggtgaaagcaaga

SEQ ID NO: 11726 - DNA, 20 bp, Artificial Sequence
  chemically synthesized
aaagcaagaaagtatatgtt

SEQ ID NO: 11727 - DNA, 20 bp, Artificial Sequence
  chemically synthesized
gtatatgttaagtcctatct

SEQ ID NO: 11728 - DNA, 20 bp, Artificial Sequence
  chemically synthesized
atgttaagtcctatctcagc

SEQ ID NO: 11729 - DNA, 20 bp, Artificial Sequence
  chemically synthesized
tcctatctcagctggtgtgc

SEQ ID NO: 11730 - DNA, 20 bp, Artificial Sequence
  chemically synthesized
atctcagctggtgtgcaagt

SEQ ID NO: 11731 - DNA, 20 bp, Artificial Sequence
  chemically synthesized
gctggtgtgcaagtcagact

SEQ ID NO: 11732 - DNA, 20 bp, Artificial Sequence
  chemically synthesized
gcaagtcagactgagaataa

SEQ ID NO: 11733 - DNA, 20 bp, Artificial Sequence
  chemically synthesized
actgagaataacagcttcga

SEQ ID NO: 11734 - DNA, 20 bp, Artificial Sequence
  chemically synthesized
ctgagaataacagcttcgaa

SEQ ID NO: 11735 - DNA, 20 bp, Artificial Sequence
  chemically synthesized
cttcgaaaggccacgtgtcc

SEQ ID NO: 11736 - DNA, 20 bp, Artificial Sequence
  chemically synthesized
ccagcttaccgctccactgc

SEQ ID NO: 11737 - DNA, 20 bp, Artificial Sequence
  chemically synthesized
cgctccactgctagacccaa

SEQ ID NO: 11738 - DNA, 20 bp, Artificial Sequence
  chemically synthesized
gacccaaaagctctctgctg

SEQ ID NO: 11739 - DNA, 20 bp, Artificial Sequence
  chemically synthesized
acccaaaagctctctgctgt

SEQ ID NO: 11740 - DNA, 20 bp, Artificial Sequence
  chemically synthesized
cccaaaagctctctgctgtg

SEQ ID NO: 11741 - DNA, 20 bp, Artificial Sequence
  chemically synthesized
tttcatttgaactgctatcg

SEQ ID NO: 11742 - DNA, 20 bp, Artificial Sequence
  chemically synthesized
ctgctatcgaagaatattcc

SEQ ID NO: 11743 - DNA, 20 bp, Artificial Sequence
  chemically synthesized
ccttctccccctctctcccc

SEQ ID NO: 11744 - DNA, 20 bp, Artificial Sequence
  chemically synthesized
ccccctctctcccccagcct

SEQ ID NO: 11745 - DNA, 20 bp, Artificial Sequence
  chemically synthesized
cccagcctcagactttctcc

SEQ ID NO: 11746 - DNA, 20 bp, Artificial Sequence
  chemically synthesized
cagcctcagactttctccta

SEQ ID NO: 11747 - DNA, 20 bp, Artificial Sequence
  chemically synthesized
tctcctagagttgatcttac

SEQ ID NO: 11748 - DNA, 20 bp, Artificial Sequence
  chemically synthesized
agttgatcttaccggaaatg

SEQ ID NO: 11749 - DNA, 20 bp, Artificial Sequence
  chemically synthesized
ccggaaatgtggatgttatc

SEQ ID NO: 11750 - DNA, 20 bp, Artificial Sequence
  chemically synthesized
cggaaatgtggatgttatca

SEQ ID NO: 11751 - DNA, 20 bp, Artificial Sequence
  chemically synthesized
gtggatgttatcaaggaaat

SEQ ID NO: 11752 - DNA, 20 bp, Artificial Sequence
  chemically synthesized
atgttatcaaggaaatcgga

SEQ ID NO: 11753 - DNA, 20 bp, Artificial Sequence
  chemically synthesized
gttatcaaggaaatcggaaa

SEQ ID NO: 11754 - DNA, 20 bp, Artificial Sequence
  chemically synthesized
atcaaggaaatcggaaagag

SEQ ID NO: 11755 - DNA, 20 bp, Artificial Sequence
  chemically synthesized
tcaaggaaatcggaaagaga

SEQ ID NO: 11756 - DNA, 20 bp, Artificial Sequence
  chemically synthesized
caaggaaatcggaaagagaa

SEQ ID NO: 11757 - DNA, 20 bp, Artificial Sequence
  chemically synthesized
aggaaatcggaaagagaagg

SEQ ID NO: 11758 - DNA, 20 bp, Artificial Sequence
  chemically synthesized
aagagaagggagaaaaatct

SEQ ID NO: 11759 - DNA, 20 bp, Artificial Sequence
  chemically synthesized
agagaagggagaaaaatctc

SEQ ID NO: 11760 - DNA, 20 bp, Artificial Sequence
  chemically synthesized
tttcttaactctcttatcct

SEQ ID NO: 11761 - DNA, 20 bp, Artificial Sequence
  chemically synthesized
ttcttaactctcttatcctt

SEQ ID NO: 11762 - DNA, 20 bp, Artificial Sequence
  chemically synthesized
tcttatccttgggccctgct

SEQ ID NO: 11763 - DNA, 20 bp, Artificial Sequence
  chemically synthesized
tgccacattttaacatttat

SEQ ID NO: 11764 - DNA, 20 bp, Artificial Sequence
  chemically synthesized
acattttaacatttattaga

SEQ ID NO: 11765 - DNA, 20 bp, Artificial Sequence
  chemically synthesized
cattttaacatttattagaa

SEQ ID NO: 11766 - DNA, 20 bp, Artificial Sequence
  chemically synthesized
ttaacatttattagaaagga

SEQ ID NO: 11767 - DNA, 20 bp, Artificial Sequence
  chemically synthesized
taacatttattagaaaggat

SEQ ID NO: 11768 - DNA, 20 bp, Artificial Sequence
  chemically synthesized
ttattagaaaggataggatg

SEQ ID NO: 11769 - DNA, 20 bp, Artificial Sequence
  chemically synthesized
attagaaaggataggatgca

SEQ ID NO: 11770 - DNA, 20 bp, Artificial Sequence
  chemically synthesized
ggataggatgcagagctgca

SEQ ID NO: 11771 - DNA, 20 bp, Artificial Sequence
  chemically synthesized
acatccacaaccatctgtat

SEQ ID NO: 11772 - DNA, 20 bp, Artificial Sequence
  chemically synthesized
acaaccatctgtatgagcca

SEQ ID NO: 11773 - DNA, 20 bp, Artificial Sequence
  chemically synthesized
caaccatctgtatgagccac

SEQ ID NO: 11774 - DNA, 20 bp, Artificial Sequence
  chemically synthesized
ctgtatgagccacaggtcca

SEQ ID NO: 11775 - DNA, 20 bp, Artificial Sequence
  chemically synthesized
acactaatgttactctacat

SEQ ID NO: 11776 - DNA, 20 bp, Artificial Sequence
  chemically synthesized
ctaatgttactctacatgag

SEQ ID NO: 11777 - DNA, 20 bp, Artificial Sequence
  chemically synthesized
aatgttactctacatgagta

SEQ ID NO: 11778 - DNA, 20 bp, Artificial Sequence
  chemically synthesized
ctacatgagtagagttcaat

SEQ ID NO: 11779 - DNA, 20 bp, Artificial Sequence
  chemically synthesized
tacatgagtagagttcaatg

SEQ ID NO: 11780 - DNA, 20 bp, Artificial Sequence
  chemically synthesized
acatgagtagagttcaatga

SEQ ID NO: 11781 - DNA, 20 bp, Artificial Sequence
  chemically synthesized
gagttcaatgagggttgata

SEQ ID NO: 11782 - DNA, 20 bp, Artificial Sequence
  chemically synthesized
agttcaatgagggttgatat

SEQ ID NO: 11783 - DNA, 20 bp, Artificial Sequence
  chemically synthesized
agggttgatatgggatgtga

SEQ ID NO: 11784 - DNA, 20 bp, Artificial Sequence
  chemically synthesized
gggttgatatgggatgtgac

SEQ ID NO: 11785 - DNA, 20 bp, Artificial Sequence
  chemically synthesized
ggttgatatgggatgtgaca

SEQ ID NO: 11786 - DNA, 20 bp, Artificial Sequence
  chemically synthesized
tgggatgtgacagggcaaat

SEQ ID NO: 11787 - DNA, 20 bp, Artificial Sequence
  chemically synthesized
gtgacagggcaaatcagaat

SEQ ID NO: 11788 - DNA, 20 bp, Artificial Sequence
  chemically synthesized
cagaattagattaaaaacaa

SEQ ID NO: 11789 - DNA, 20 bp, Artificial Sequence
  chemically synthesized
ttagattaaaaacaaaagtt

SEQ ID NO: 11790 - DNA, 20 bp, Artificial Sequence
  chemically synthesized
tagaaaccaatgctacacta

SEQ ID NO: 11791 - DNA, 20 bp, Artificial Sequence
  chemically synthesized
gaaaccaatgctacactaca

SEQ ID NO: 11792 - DNA, 20 bp, Artificial Sequence
  chemically synthesized
atgctacactacagagcaaa

SEQ ID NO: 11793 - DNA, 20 bp, Artificial Sequence
  chemically synthesized
tgctacactacagagcaaat

SEQ ID NO: 11794 - DNA, 20 bp, Artificial Sequence
  chemically synthesized
tacagagcaaatgggacttg

SEQ ID NO: 11795 - DNA, 20 bp, Artificial Sequence
  chemically synthesized
acagagcaaatgggacttga

SEQ ID NO: 11796 - DNA, 20 bp, Artificial Sequence
  chemically synthesized
aatttcccctaactgccttc

SEQ ID NO: 11797 - DNA, 20 bp, Artificial Sequence
  chemically synthesized
cttcaagtgattttccctat

SEQ ID NO: 11798 - DNA, 20 bp, Artificial Sequence
  chemically synthesized
tcaagtgattttccctatta

SEQ ID NO: 11799 - DNA, 20 bp, Artificial Sequence
  chemically synthesized
tttgcctgccacccccctgc

SEQ ID NO: 11800 - DNA, 20 bp, Artificial Sequence
  chemically synthesized
tggcaacaccgcaatcacat

SEQ ID NO: 11801 - DNA, 20 bp, Artificial Sequence
  chemically synthesized
aacaccgcaatcacatcaga

SEQ ID NO: 11802 - DNA, 20 bp, Artificial Sequence
  chemically synthesized
cgcaatcacatcagaaagta

SEQ ID NO: 11803 - DNA, 20 bp, Artificial Sequence
  chemically synthesized
aatcacatcagaaagtaaag

SEQ ID NO: 11804 - DNA, 20 bp, Artificial Sequence
  chemically synthesized
aaagtaaagtggaatgcata

SEQ ID NO: 11805 - DNA, 20 bp, Artificial Sequence
  chemically synthesized
aagtaaagtggaatgcatat

SEQ ID NO: 11806 - DNA, 20 bp, Artificial Sequence
  chemically synthesized
taaagtggaatgcatatagg

SEQ ID NO: 11807 - DNA, 20 bp, Artificial Sequence
  chemically synthesized
gaatgcatataggaagcctt

SEQ ID NO: 11808 - DNA, 20 bp, Artificial Sequence
  chemically synthesized
atacctatatacttaatata

SEQ ID NO: 11809 - DNA, 20 bp, Artificial Sequence
  chemically synthesized
aatatatagcaattaacttc

SEQ ID NO: 11810 - DNA, 20 bp, Artificial Sequence
  chemically synthesized
tatagcaattaacttctggt

SEQ ID NO: 11811 - DNA, 20 bp, Artificial Sequence
  chemically synthesized
agcaattaacttctggtcag

SEQ ID NO: 11812 - DNA, 20 bp, Artificial Sequence
  chemically synthesized
aacttctggtcagcagtgtg

SEQ ID NO: 11813 - DNA, 20 bp, Artificial Sequence
  chemically synthesized
acttctggtcagcagtgtgc

SEQ ID NO: 11814 - DNA, 20 bp, Artificial Sequence
  chemically synthesized
tctggtcagcagtgtgcagg

SEQ ID NO: 11815 - DNA, 20 bp, Artificial Sequence
  chemically synthesized
ggtcagcagtgtgcaggcag

SEQ ID NO: 11816 - DNA, 20 bp, Artificial Sequence
  chemically synthesized
gtcagcagtgtgcaggcagc

SEQ ID NO: 11817 - DNA, 20 bp, Artificial Sequence
  chemically synthesized
tgcaggcagcaggctgcccc

SEQ ID NO: 11818 - DNA, 20 bp, Artificial Sequence
  chemically synthesized
aggcagcaggctgccccaag

SEQ ID NO: 11819 - DNA, 20 bp, Artificial Sequence
  chemically synthesized
agcaggctgccccaagcaga

SEQ ID NO: 11820 - DNA, 20 bp, Artificial Sequence
  chemically synthesized
gcaggctgccccaagcagat

SEQ ID NO: 11821 - DNA, 20 bp, Artificial Sequence
  chemically synthesized
aggctgccccaagcagatag

SEQ ID NO: 11822 - DNA, 20 bp, Artificial Sequence
  chemically synthesized
ggctgccccaagcagatagg

SEQ ID NO: 11823 - DNA, 20 bp, Artificial Sequence
  chemically synthesized
gctgccccaagcagatagga

SEQ ID NO: 11824 - DNA, 20 bp, Artificial Sequence
  chemically synthesized
ctgccccaagcagataggag

SEQ ID NO: 11825 - DNA, 20 bp, Artificial Sequence
  chemically synthesized
gccccaagcagataggaggg

SEQ ID NO: 11826 - DNA, 20 bp, Artificial Sequence
  chemically synthesized
ccccaagcagataggagggg

SEQ ID NO: 11827 - DNA, 20 bp, Artificial Sequence
  chemically synthesized
cccaagcagataggagggga

SEQ ID NO: 11828 - DNA, 20 bp, Artificial Sequence
  chemically synthesized
ccaagcagataggaggggag

SEQ ID NO: 11829 - DNA, 20 bp, Artificial Sequence
  chemically synthesized
caagcagataggaggggagg

SEQ ID NO: 11830 - DNA, 20 bp, Artificial Sequence
  chemically synthesized
gataggaggggagggggacc

SEQ ID NO: 11831 - DNA, 20 bp, Artificial Sequence
  chemically synthesized
taggaggggagggggaccca

SEQ ID NO: 11832 - DNA, 20 bp, Artificial Sequence
  chemically synthesized
aggggagggggacccagagc

SEQ ID NO: 11833 - DNA, 20 bp, Artificial Sequence
  chemically synthesized
ggggagggggacccagagct

SEQ ID NO: 11834 - DNA, 20 bp, Artificial Sequence
  chemically synthesized
gggggacccagagctgggac

SEQ ID NO: 11835 - DNA, 20 bp, Artificial Sequence
  chemically synthesized
cagagctgggacaagcacaa

SEQ ID NO: 11836 - DNA, 20 bp, Artificial Sequence
  chemically synthesized
gctgggacaagcacaaaaga

SEQ ID NO: 11837 - DNA, 20 bp, Artificial Sequence
  chemically synthesized
ctgggacaagcacaaaagac

SEQ ID NO: 11838 - DNA, 20 bp, Artificial Sequence
  chemically synthesized
ccaacaacaatgcctgctgt

SEQ ID NO: 11839 - DNA, 20 bp, Artificial Sequence
  chemically synthesized
acaacaatgcctgctgtcag

SEQ ID NO: 11840 - DNA, 20 bp, Artificial Sequence
  chemically synthesized
gcagctgaattatttttata

SEQ ID NO: 11841 - DNA, 20 bp, Artificial Sequence
  chemically synthesized
cagctgaattatttttatac

SEQ ID NO: 11842 - DNA, 20 bp, Artificial Sequence
  chemically synthesized
tttatctctattgtacaaac

SEQ ID NO: 11843 - DNA, 20 bp, Artificial Sequence
  chemically synthesized
cgtgtctgtgctgacttgtt

SEQ ID NO: 11844 - DNA, 20 bp, Artificial Sequence
  chemically synthesized
ttaagcaatccacttgtatg

SEQ ID NO: 11845 - DNA, 20 bp, Artificial Sequence
  chemically synthesized
aatccacttgtatgtagaat

SEQ ID NO: 11846 - DNA, 20 bp, Artificial Sequence
  chemically synthesized
ttttttttctttcttgctac

SEQ ID NO: 11847 - DNA, 20 bp, Artificial Sequence
  chemically synthesized
ctttcttgctaccagtcaca

SEQ ID NO: 11848 - DNA, 20 bp, Artificial Sequence
  chemically synthesized
gctaccagtcacacagctcc

SEQ ID NO: 11849 - DNA, 20 bp, Artificial Sequence
  chemically synthesized
cagtcacacagctccaagat

SEQ ID NO: 11850 - DNA, 20 bp, Artificial Sequence
  chemically synthesized
tcacacagctccaagatcag

SEQ ID NO: 11851 - DNA, 20 bp, Artificial Sequence
  chemically synthesized
ccaagatcagaagaaataca

SEQ ID NO: 11852 - DNA, 20 bp, Artificial Sequence
  chemically synthesized
gaagaaatacatagtctttg

SEQ ID NO: 11853 - DNA, 20 bp, Artificial Sequence
  chemically synthesized
ttgaagctgctcaaatgttt

SEQ ID NO: 11854 - DNA, 20 bp, Artificial Sequence
  chemically synthesized
tgctcaaatgttttagttaa

SEQ ID NO: 11855 - DNA, 20 bp, Artificial Sequence
  chemically synthesized
gctcaaatgttttagttaaa

SEQ ID NO: 11856 - DNA, 20 bp, Artificial Sequence
  chemically synthesized
aaatgttttagttaaaagga

SEQ ID NO: 11857 - DNA, 20 bp, Artificial Sequence
  chemically synthesized
tgttttagttaaaaggacag

SEQ ID NO: 11858 - DNA, 20 bp, Artificial Sequence
  chemically synthesized
aaggacagcagttgttttca

SEQ ID NO: 11859 - DNA, 20 bp, Artificial Sequence
  chemically synthesized
gcagttgttttcaaagatcc

SEQ ID NO: 11860 - DNA, 20 bp, Artificial Sequence
  chemically synthesized
agttgttttcaaagatccaa

SEQ ID NO: 11861 - DNA, 20 bp, Artificial Sequence
  chemically synthesized
agatccaagagtatctttat

SEQ ID NO: 11862 - DNA, 20 bp, Artificial Sequence
  chemically synthesized
acataacaaaaacataacat

SEQ ID NO: 11863 - DNA, 20 bp, Artificial Sequence
  chemically synthesized
taacaaaaacataacatgag

SEQ ID NO: 11864 - DNA, 20 bp, Artificial Sequence
  chemically synthesized
aacaaaaacataacatgaga

SEQ ID NO: 11865 - DNA, 20 bp, Artificial Sequence
  chemically synthesized
tttattattaaaattttttt

SEQ ID NO: 11866 - DNA, 20 bp, Artificial Sequence
  chemically synthesized
tcagcctttaaatcattctt

SEQ ID NO: 11867 - DNA, 20 bp, Artificial Sequence
  chemically synthesized
gcctttaaatcattcttcag

SEQ ID NO: 11868 - DNA, 20 bp, Artificial Sequence
  chemically synthesized
attcttcagtagccaatgtt

SEQ ID NO: 11869 - DNA, 20 bp, Artificial Sequence
  chemically synthesized
aatgttcagttttaaatgta

SEQ ID NO: 11870 - DNA, 20 bp, Artificial Sequence
  chemically synthesized
atgttcagttttaaatgtaa

SEQ ID NO: 11871 - DNA, 20 bp, Artificial Sequence
  chemically synthesized
gaataatttttttaaaatat

SEQ ID NO: 11872 - DNA, 20 bp, Artificial Sequence
  chemically synthesized
aataatttttttaaaatatt

SEQ ID NO: 11873 - DNA, 20 bp, Artificial Sequence
  chemically synthesized
ataatttttttaaaatatta

SEQ ID NO: 11874 - DNA, 20 bp, Artificial Sequence
  chemically synthesized
tttaaaatattagggtgtga

SEQ ID NO: 11875 - DNA, 20 bp, Artificial Sequence
  chemically synthesized
taaaatattagggtgtgatg

SEQ ID NO: 11876 - DNA, 20 bp, Artificial Sequence
  chemically synthesized
aaatattagggtgtgatgga

SEQ ID NO: 11877 - DNA, 20 bp, Artificial Sequence
  chemically synthesized
tgtgatggagagaaactcac

SEQ ID NO: 11878 - DNA, 20 bp, Artificial Sequence
  chemically synthesized
gagagaaactcacgagattt

SEQ ID NO: 11879 - DNA, 20 bp, Artificial Sequence
  chemically synthesized
cgagatttaagatttaacat

SEQ ID NO: 11880 - DNA, 20 bp, Artificial Sequence
  chemically synthesized
ggttaatgcattgttttaac

SEQ ID NO: 11881 - DNA, 20 bp, Artificial Sequence
  chemically synthesized
ttgttttaactggaaactga

SEQ ID NO: 11882 - DNA, 20 bp, Artificial Sequence
  chemically synthesized
tgttttaactggaaactgaa

SEQ ID NO: 11883 - DNA, 20 bp, Artificial Sequence
  chemically synthesized
taactggaaactgaaaggat

SEQ ID NO: 11884 - DNA, 20 bp, Artificial Sequence
  chemically synthesized
aactggaaactgaaaggatc

SEQ ID NO: 11885 - DNA, 20 bp, Artificial Sequence
  chemically synthesized
actggaaactgaaaggatcg

SEQ ID NO: 11886 - DNA, 20 bp, Artificial Sequence
  chemically synthesized
ggaaactgaaaggatcgggg

SEQ ID NO: 11887 - DNA, 20 bp, Artificial Sequence
  chemically synthesized
gaaactgaaaggatcggggc

SEQ ID NO: 11888 - DNA, 20 bp, Artificial Sequence
  chemically synthesized
aaactgaaaggatcggggca

SEQ ID NO: 11889 - DNA, 20 bp, Artificial Sequence
  chemically synthesized
aactgaaaggatcggggcag

SEQ ID NO: 11890 - DNA, 20 bp, Artificial Sequence
  chemically synthesized
ctgaaaggatcggggcaggg

SEQ ID NO: 11891 - DNA, 20 bp, Artificial Sequence
  chemically synthesized
tcggggcaggggagttaaaa

SEQ ID NO: 11892 - DNA, 20 bp, Artificial Sequence
  chemically synthesized
cggggcaggggagttaaaat

SEQ ID NO: 11893 - DNA, 20 bp, Artificial Sequence
  chemically synthesized
ggggcaggggagttaaaatg

SEQ ID NO: 11894 - DNA, 20 bp, Artificial Sequence
  chemically synthesized
ggcaggggagttaaaatggg

SEQ ID NO: 11895 - DNA, 20 bp, Artificial Sequence
  chemically synthesized
gagttaaaatggggagtaaa

SEQ ID NO: 11896 - DNA, 20 bp, Artificial Sequence
  chemically synthesized
tggggagtaaatggttcact

SEQ ID NO: 11897 - DNA, 20 bp, Artificial Sequence
  chemically synthesized
ggggagtaaatggttcactg

SEQ ID NO: 11898 - DNA, 20 bp, Artificial Sequence
  chemically synthesized
gggagtaaatggttcactga

SEQ ID NO: 11899 - DNA, 20 bp, Artificial Sequence
  chemically synthesized
ggagtaaatggttcactgag

SEQ ID NO: 11900 - DNA, 20 bp, Artificial Sequence
  chemically synthesized
gtaaataaatcataaaatca

SEQ ID NO: 11901 - DNA, 20 bp, Artificial Sequence
  chemically synthesized
ataaaatcatggtatacctt

SEQ ID NO: 11902 - DNA, 20 bp, Artificial Sequence
  chemically synthesized
aatcatggtataccttgagt

SEQ ID NO: 11903 - DNA, 20 bp, Artificial Sequence
  chemically synthesized
tggtataccttgagttggtg

SEQ ID NO: 11904 - DNA, 20 bp, Artificial Sequence
  chemically synthesized
ggtataccttgagttggtga

SEQ ID NO: 11905 - DNA, 20 bp, Artificial Sequence
  chemically synthesized
tataccttgagttggtgaag

SEQ ID NO: 11906 - DNA, 20 bp, Artificial Sequence
  chemically synthesized
gttggtgaaggagaatactt

SEQ ID NO: 11907 - DNA, 20 bp, Artificial Sequence
  chemically synthesized
ttggtgaaggagaatacttc

SEQ ID NO: 11908 - DNA, 20 bp, Artificial Sequence
  chemically synthesized
gaaggagaatacttcaggtt

SEQ ID NO: 11909 - DNA, 20 bp, Artificial Sequence
  chemically synthesized
tacttcaggtttggttctct

SEQ ID NO: 11910 - DNA, 20 bp, Artificial Sequence
  chemically synthesized
tttggttctcttagtttttt

SEQ ID NO: 11911 - DNA, 20 bp, Artificial Sequence
  chemically synthesized
ttggttctcttagttttttg

SEQ ID NO: 11912 - DNA, 20 bp, Artificial Sequence
  chemically synthesized
tttgaggtttgtttttgttt

SEQ ID NO: 11913 - DNA, 20 bp, Artificial Sequence
  chemically synthesized
ttgaggtttgtttttgtttg

SEQ ID NO: 11914 - DNA, 20 bp, Artificial Sequence
  chemically synthesized
gaggtttgtttttgtttgag

SEQ ID NO: 11915 - DNA, 20 bp, Artificial Sequence
  chemically synthesized
aggtttgtttttgtttgagg

SEQ ID NO: 11916 - DNA, 20 bp, Artificial Sequence
  chemically synthesized
tgtttttgtttgaggaggtg

SEQ ID NO: 11917 - DNA, 20 bp, Artificial Sequence
  chemically synthesized
gtttttgtttgaggaggtgc

SEQ ID NO: 11918 - DNA, 20 bp, Artificial Sequence
  chemically synthesized
tttttgtttgaggaggtgca

SEQ ID NO: 11919 - DNA, 20 bp, Artificial Sequence
  chemically synthesized
gtttgaggaggtgcagggat

SEQ ID NO: 11920 - DNA, 20 bp, Artificial Sequence
  chemically synthesized
aactctatatttaaaatgta

SEQ ID NO: 11921 - DNA, 20 bp, Artificial Sequence
  chemically synthesized
actctatatttaaaatgtac

SEQ ID NO: 11922 - DNA, 20 bp, Artificial Sequence
  chemically synthesized
atatttaaaatgtacaggaa

SEQ ID NO: 11923 - DNA, 20 bp, Artificial Sequence
  chemically synthesized
aaaatgtacaggaacagact

SEQ ID NO: 11924 - DNA, 20 bp, Artificial Sequence
  chemically synthesized
acaggaacagacttggcaca

SEQ ID NO: 11925 - DNA, 20 bp, Artificial Sequence
  chemically synthesized
agtgctttgtgctccaacat

SEQ ID NO: 11926 - DNA, 20 bp, Artificial Sequence
  chemically synthesized
gtgctccaacataagaatcc

SEQ ID NO: 11927 - DNA, 20 bp, Artificial Sequence
  chemically synthesized
tttatttccctaaaaattaa

SEQ ID NO: 11928 - DNA, 20 bp, Artificial Sequence
  chemically synthesized
taacagatgtgatttccttg

SEQ ID NO: 11929 - DNA, 20 bp, Artificial Sequence
  chemically synthesized
tttatgcatcattacatatt

SEQ ID NO: 11930 - DNA, 20 bp, Artificial Sequence
  chemically synthesized
aatttaaatgccctgatgct

SEQ ID NO: 11931 - DNA, 20 bp, Artificial Sequence
  chemically synthesized
atgccctgatgcttagcaaa

SEQ ID NO: 11932 - DNA, 20 bp, Artificial Sequence
  chemically synthesized
aaaagcttccttgtgttttt

SEQ ID NO: 11933 - DNA, 20 bp, Artificial Sequence
  chemically synthesized
gcttccttgtgttttttaga

SEQ ID NO: 11934 - DNA, 20 bp, Artificial Sequence
  chemically synthesized
tgttttttagaaagttcaaa

SEQ ID NO: 11935 - DNA, 20 bp, Artificial Sequence
  chemically synthesized
tagaaagttcaaaaagcaaa

SEQ ID NO: 11936 - DNA, 20 bp, Artificial Sequence
  chemically synthesized
aagttcaaaaagcaaataga

SEQ ID NO: 11937 - DNA, 20 bp, Artificial Sequence
  chemically synthesized
agttcaaaaagcaaatagaa

SEQ ID NO: 11938 - DNA, 20 bp, Artificial Sequence
  chemically synthesized
caaaaagcaaatagaaaggc

SEQ ID NO: 11939 - DNA, 20 bp, Artificial Sequence
  chemically synthesized
aaaaagcaaatagaaaggcg

SEQ ID NO: 11940 - DNA, 20 bp, Artificial Sequence
  chemically synthesized
aagcaaatagaaaggcgagg

SEQ ID NO: 11941 - DNA, 20 bp, Artificial Sequence
  chemically synthesized
agcaaatagaaaggcgaggt

SEQ ID NO: 11942 - DNA, 20 bp, Artificial Sequence
  chemically synthesized
aaggcgaggtaggtatacaa

SEQ ID NO: 11943 - DNA, 20 bp, Artificial Sequence
  chemically synthesized
aggtaggtatacaacagcac

SEQ ID NO: 11944 - DNA, 20 bp, Artificial Sequence
  chemically synthesized
cagcactggttttctttttg

SEQ ID NO: 11945 - DNA, 20 bp, Artificial Sequence
  chemically synthesized
agcactggttttctttttga

SEQ ID NO: 11946 - DNA, 20 bp, Artificial Sequence
  chemically synthesized
tctttttgaaggcacccttg

SEQ ID NO: 11947 - DNA, 20 bp, Artificial Sequence
  chemically synthesized
ctttttgaaggcacccttgc

SEQ ID NO: 11948 - DNA, 20 bp, Artificial Sequence
  chemically synthesized
aattccattctttattttaa

SEQ ID NO: 11949 - DNA, 20 bp, Artificial Sequence
  chemically synthesized
attccattctttattttaat

SEQ ID NO: 11950 - DNA, 20 bp, Artificial Sequence
  chemically synthesized
tccattctttattttaatgg

SEQ ID NO: 11951 - DNA, 20 bp, Artificial Sequence
  chemically synthesized
ttttaatgggagtttttaat

SEQ ID NO: 11952 - DNA, 20 bp, Artificial Sequence
  chemically synthesized
taatgggagtttttaatcag

SEQ ID NO: 11953 - DNA, 20 bp, Artificial Sequence
  chemically synthesized
ctaaaactaaaatcaaattg

SEQ ID NO: 11954 - DNA, 20 bp, Artificial Sequence
  chemically synthesized
taaaactaaaatcaaattgt

SEQ ID NO: 11955 - DNA, 20 bp, Artificial Sequence
  chemically synthesized
ttgtaggtgcaattgttcat

SEQ ID NO: 11956 - DNA, 20 bp, Artificial Sequence
  chemically synthesized
ttcattggcaatgctaacaa

SEQ ID NO: 11957 - DNA, 20 bp, Artificial Sequence
  chemically synthesized
ttggcaatgctaacaacagt

SEQ ID NO: 11958 - DNA, 20 bp, Artificial Sequence
  chemically synthesized
tacaaacaaaaactcattgt

SEQ ID NO: 11959 - DNA, 20 bp, Artificial Sequence
  chemically synthesized
aaactcattgtgagtgacca

SEQ ID NO: 11960 - DNA, 20 bp, Artificial Sequence
  chemically synthesized
aactcattgtgagtgaccaa

SEQ ID NO: 11961 - DNA, 20 bp, Artificial Sequence
  chemically synthesized
tgtgagtgaccaaaggtccc

SEQ ID NO: 11962 - DNA, 20 bp, Artificial Sequence
  chemically synthesized
gtgagtgaccaaaggtcccc

SEQ ID NO: 11963 - DNA, 20 bp, Artificial Sequence
  chemically synthesized
cttcatcaacatacctgctc

SEQ ID NO: 11964 - DNA, 20 bp, Artificial Sequence
  chemically synthesized
ttcatcaacatacctgctcc

SEQ ID NO: 11965 - DNA, 20 bp, Artificial Sequence
  chemically synthesized
tacctgctccaggttcccac

SEQ ID NO: 11966 - DNA, 20 bp, Artificial Sequence
  chemically synthesized
acctgctccaggttcccact

SEQ ID NO: 11967 - DNA, 20 bp, Artificial Sequence
  chemically synthesized
ggttcccactgggaattctc

SEQ ID NO: 11968 - DNA, 20 bp, Artificial Sequence
  chemically synthesized
tcccactgggaattctctgg

SEQ ID NO: 11969 - DNA, 20 bp, Artificial Sequence
  chemically synthesized
ccactgggaattctctggca

SEQ ID NO: 11970 - DNA, 20 bp, Artificial Sequence
  chemically synthesized
ttctctggcagagactgatt

SEQ ID NO: 11971 - DNA, 20 bp, Artificial Sequence
  chemically synthesized
agttctgaataacatgctgc

SEQ ID NO: 11972 - DNA, 20 bp, Artificial Sequence
  chemically synthesized
aacatgctgccagccctatc

SEQ ID NO: 11973 - DNA, 20 bp, Artificial Sequence
  chemically synthesized
gctgccagccctatctggaa

SEQ ID NO: 11974 - DNA, 20 bp, Artificial Sequence
  chemically synthesized
ctgccagccctatctggaaa

SEQ ID NO: 11975 - DNA, 20 bp, Artificial Sequence
  chemically synthesized
tgccagccctatctggaaaa

SEQ ID NO: 11976 - DNA, 20 bp, Artificial Sequence
  chemically synthesized
ctatctggaaaagggtgtgc

SEQ ID NO: 11977 - DNA, 20 bp, Artificial Sequence
  chemically synthesized
tatctggaaaagggtgtgca

SEQ ID NO: 11978 - DNA, 20 bp, Artificial Sequence
  chemically synthesized
gcgccttctcgcctctttta

SEQ ID NO: 11979 - DNA, 20 bp, Artificial Sequence
  chemically synthesized
cgccttctcgcctcttttac

SEQ ID NO: 11980 - DNA, 20 bp, Artificial Sequence
  chemically synthesized
cttctcgcctcttttacagg

SEQ ID NO: 11981 - DNA, 20 bp, Artificial Sequence
  chemically synthesized
aaacctgatcatctcacctt

SEQ ID NO: 11982 - DNA, 20 bp, Artificial Sequence
  chemically synthesized
aacctgatcatctcaccttt

SEQ ID NO: 11983 - DNA, 20 bp, Artificial Sequence
  chemically synthesized
ggtatatataatttgttgtt

SEQ ID NO: 11984 - DNA, 20 bp, Artificial Sequence
  chemically synthesized
aatttgttgtttagcactct

SEQ ID NO: 11985 - DNA, 20 bp, Artificial Sequence
  chemically synthesized
tgtttagcactctgagaact

SEQ ID NO: 11986 - DNA, 20 bp, Artificial Sequence
  chemically synthesized
cttggtattttatctatcta

SEQ ID NO: 11987 - DNA, 20 bp, Artificial Sequence
  chemically synthesized
tggtattttatctatctaaa

SEQ ID NO: 11988 - DNA, 20 bp, Artificial Sequence
  chemically synthesized
atctatctaaagagatcaaa

SEQ ID NO: 11989 - DNA, 20 bp, Artificial Sequence
  chemically synthesized
tctatctaaagagatcaaaa

SEQ ID NO: 11990 - DNA, 20 bp, Artificial Sequence
  chemically synthesized
ctatctaaagagatcaaaaa

SEQ ID NO: 11991 - DNA, 20 bp, Artificial Sequence
  chemically synthesized
aaagagatcaaaaagggcaa

SEQ ID NO: 11992 - DNA, 20 bp, Artificial Sequence
  chemically synthesized
agatcaaaaagggcaaaaga

SEQ ID NO: 11993 - DNA, 20 bp, Artificial Sequence
  chemically synthesized
atcaaaaagggcaaaagatg

SEQ ID NO: 11994 - DNA, 20 bp, Artificial Sequence
  chemically synthesized
aaaagggcaaaagatggagc

SEQ ID NO: 11995 - DNA, 20 bp, Artificial Sequence
  chemically synthesized
ggcaaaagatggagcgagct

SEQ ID NO: 11996 - DNA, 20 bp, Artificial Sequence
  chemically synthesized
gcaaaagatggagcgagctg

SEQ ID NO: 11997 - DNA, 20 bp, Artificial Sequence
  chemically synthesized
agatggagcgagctgaggcc

SEQ ID NO: 11998 - DNA, 20 bp, Artificial Sequence
  chemically synthesized
gagcgagctgaggcccagcc

SEQ ID NO: 11999 - DNA, 20 bp, Artificial Sequence
  chemically synthesized
gctgaggcccagcctagctc

SEQ ID NO: 12000 - DNA, 20 bp, Artificial Sequence
  chemically synthesized
tcgtgcactgcgcgttgcct

SEQ ID NO: 12001 - DNA, 20 bp, Artificial Sequence
  chemically synthesized
gtgcactgcgcgttgcctta

SEQ ID NO: 12002 - DNA, 20 bp, Artificial Sequence
  chemically synthesized
tgcactgcgcgttgccttag

SEQ ID NO: 12003 - DNA, 20 bp, Artificial Sequence
  chemically synthesized
cactgcgcgttgccttagag

SEQ ID NO: 12004 - DNA, 20 bp, Artificial Sequence
  chemically synthesized
ccttagaggagcaacctgtg

SEQ ID NO: 12005 - DNA, 20 bp, Artificial Sequence
  chemically synthesized
cttagaggagcaacctgtgc

SEQ ID NO: 12006 - DNA, 20 bp, Artificial Sequence
  chemically synthesized
acctgtgcaggtaaatcttc

SEQ ID NO: 12007 - DNA, 20 bp, Artificial Sequence
  chemically synthesized
tgtgcaggtaaatcttccag

SEQ ID NO: 12008 - DNA, 20 bp, Artificial Sequence
  chemically synthesized
atcttccagcagcattgcat

SEQ ID NO: 12009 - DNA, 20 bp, Artificial Sequence
  chemically synthesized
tgcatcagatccactcacat

SEQ ID NO: 12010 - DNA, 20 bp, Artificial Sequence
  chemically synthesized
gatccactcacatcagtctc

SEQ ID NO: 12011 - DNA, 20 bp, Artificial Sequence
  chemically synthesized
atccactcacatcagtctcc

SEQ ID NO: 12012 - DNA, 20 bp, Artificial Sequence
  chemically synthesized
tccactcacatcagtctcca

SEQ ID NO: 12013 - DNA, 20 bp, Artificial Sequence
  chemically synthesized
atcagtctccagggtgaacc

SEQ ID NO: 12014 - DNA, 20 bp, Artificial Sequence
  chemically synthesized
cagtctccagggtgaaccaa

SEQ ID NO: 12015 - DNA, 20 bp, Artificial Sequence
  chemically synthesized
tgaaccaagagatgacactt

SEQ ID NO: 12016 - DNA, 20 bp, Artificial Sequence
  chemically synthesized
tctgcaaacttctaattcgc

SEQ ID NO: 12017 - DNA, 20 bp, Artificial Sequence
  chemically synthesized
acttctaattcgccagttct

SEQ ID NO: 12018 - DNA, 20 bp, Artificial Sequence
  chemically synthesized
tctaattcgccagttcttag

SEQ ID NO: 12019 - DNA, 20 bp, Artificial Sequence
  chemically synthesized
tcttagcagcttatttttcc

SEQ ID NO: 12020 - DNA, 20 bp, Artificial Sequence
  chemically synthesized
tttttccaagtgttttgttt

SEQ ID NO: 12021 - DNA, 20 bp, Artificial Sequence
  chemically synthesized
ttttccaagtgttttgtttc

SEQ ID NO: 12022 - DNA, 20 bp, Artificial Sequence
  chemically synthesized
atttttctttatacgttttg

SEQ ID NO: 12023 - DNA, 20 bp, Artificial Sequence
  chemically synthesized
tctaccacaactgcttctga

SEQ ID NO: 12024 - DNA, 20 bp, Artificial Sequence
  chemically synthesized
gacagctgttgattctgtta

SEQ ID NO: 12025 - DNA, 20 bp, Artificial Sequence
  chemically synthesized
acagctgttgattctgttaa

SEQ ID NO: 12026 - DNA, 20 bp, Artificial Sequence
  chemically synthesized
aaaatcttctttaaaacctc

SEQ ID NO: 12027 - DNA, 20 bp, Artificial Sequence
  chemically synthesized
ctttaaaacctcaagcaatg

SEQ ID NO: 12028 - DNA, 20 bp, Artificial Sequence
  chemically synthesized
atgtggactcaaaaatataa

SEQ ID NO: 12029 - DNA, 20 bp, Artificial Sequence
  chemically synthesized
ataatggtgaaatattttaa

SEQ ID NO: 12030 - DNA, 20 bp, Artificial Sequence
  chemically synthesized
gaaatattttaatggaattc

SEQ ID NO: 12031 - DNA, 20 bp, Artificial Sequence
  chemically synthesized
tttaatggaattccagttga

SEQ ID NO: 12032 - DNA, 20 bp, Artificial Sequence
  chemically synthesized
tgaaagttgttttttaaaaa

SEQ ID NO: 12033 - DNA, 20 bp, Artificial Sequence
  chemically synthesized
ttttaaaaaaagtacaaatg

SEQ ID NO: 12034 - DNA, 20 bp, Artificial Sequence
  chemically synthesized
tttaaaaaaagtacaaatga

SEQ ID NO: 12035 - DNA, 20 bp, Artificial Sequence
  chemically synthesized
aaaaagtacaaatgaaggta

SEQ ID NO: 12036 - DNA, 20 bp, Artificial Sequence
  chemically synthesized
aagtacaaatgaaggtacag

SEQ ID NO: 12037 - DNA, 20 bp, Artificial Sequence
  chemically synthesized
atgaaggtacagaagtcctt

SEQ ID NO: 12038 - DNA, 20 bp, Artificial Sequence
  chemically synthesized
ggtacagaagtcctttagat

SEQ ID NO: 12039 - DNA, 20 bp, Artificial Sequence
  chemically synthesized
gaagtcctttagatcagtac

SEQ ID NO: 12040 - DNA, 20 bp, Artificial Sequence
  chemically synthesized
gtgtgtgtgtgtgtgtgtaa

SEQ ID NO: 12041 - DNA, 20 bp, Artificial Sequence
  chemically synthesized
tgtgtgtgtgtgtgtgtaat

SEQ ID NO: 12042 - DNA, 20 bp, Artificial Sequence
  chemically synthesized
gtgtgtgtgtgtgtgtaatg

SEQ ID NO: 12043 - DNA, 20 bp, Artificial Sequence
  chemically synthesized
gtgtgtgtgtgtaatgggga

SEQ ID NO: 12044 - DNA, 20 bp, Artificial Sequence
  chemically synthesized
gtgtgtgtgtaatggggaaa

SEQ ID NO: 12045 - DNA, 20 bp, Artificial Sequence
  chemically synthesized
tgtgtgtgtaatggggaaag

SEQ ID NO: 12046 - DNA, 20 bp, Artificial Sequence
  chemically synthesized
gtgtgtgtaatggggaaaga

SEQ ID NO: 12047 - DNA, 20 bp, Artificial Sequence
  chemically synthesized
tgtgtgtaatggggaaagag

SEQ ID NO: 12048 - DNA, 20 bp, Artificial Sequence
  chemically synthesized
ttcaaatcacatacttttaa

SEQ ID NO: 12049 - DNA, 20 bp, Artificial Sequence
  chemically synthesized
tcaaatcacatacttttaac

SEQ ID NO: 12050 - DNA, 20 bp, Artificial Sequence
  chemically synthesized
tcacatacttttaacgggaa

SEQ ID NO: 12051 - DNA, 20 bp, Artificial Sequence
  chemically synthesized
atacttttaacgggaaaagc

SEQ ID NO: 12052 - DNA, 20 bp, Artificial Sequence
  chemically synthesized
aacgggaaaagctggaactg

SEQ ID NO: 12053 - DNA, 20 bp, Artificial Sequence
  chemically synthesized
tatgttgcatttctccatac

SEQ ID NO: 12054 - DNA, 20 bp, Artificial Sequence
  chemically synthesized
cagcacatgcaaaaaaattc

SEQ ID NO: 12055 - DNA, 20 bp, Artificial Sequence
  chemically synthesized
cacatgcaaaaaaattctgg

SEQ ID NO: 12056 - DNA, 20 bp, Artificial Sequence
  chemically synthesized
aaaaaattctggtggtgaat

SEQ ID NO: 12057 - DNA, 20 bp, Artificial Sequence
  chemically synthesized
aaaaattctggtggtgaatt

SEQ ID NO: 12058 - DNA, 20 bp, Artificial Sequence
  chemically synthesized
aaattctggtggtgaattgg

SEQ ID NO: 12059 - DNA, 20 bp, Artificial Sequence
  chemically synthesized
aattctggtggtgaattggg

SEQ ID NO: 12060 - DNA, 20 bp, Artificial Sequence
  chemically synthesized
tctggtggtgaattgggagg

SEQ ID NO: 12061 - DNA, 20 bp, Artificial Sequence
  chemically synthesized
ggtggtgaattgggaggtgg

SEQ ID NO: 12062 - DNA, 20 bp, Artificial Sequence
  chemically synthesized
tggtgaattgggaggtggca

SEQ ID NO: 12063 - DNA, 20 bp, Artificial Sequence
  chemically synthesized
gaattgggaggtggcagagt

SEQ ID NO: 12064 - DNA, 20 bp, Artificial Sequence
  chemically synthesized
aattgggaggtggcagagtt

SEQ ID NO: 12065 - DNA, 20 bp, Artificial Sequence
  chemically synthesized
attgggaggtggcagagttg

SEQ ID NO: 12066 - DNA, 20 bp, Artificial Sequence
  chemically synthesized
tgggaggtggcagagttggg

SEQ ID NO: 12067 - DNA, 20 bp, Artificial Sequence
  chemically synthesized
agagttggggagacaactcc

SEQ ID NO: 12068 - DNA, 20 bp, Artificial Sequence
  chemically synthesized
agttggggagacaactccaa

SEQ ID NO: 12069 - DNA, 20 bp, Artificial Sequence
  chemically synthesized
tggggagacaactccaagag

SEQ ID NO: 12070 - DNA, 20 bp, Artificial Sequence
  chemically synthesized
agacaactccaagagaagaa

SEQ ID NO: 12071 - DNA, 20 bp, Artificial Sequence
  chemically synthesized
gacaactccaagagaagaaa

SEQ ID NO: 12072 - DNA, 20 bp, Artificial Sequence
  chemically synthesized
atgatgttttcatttcgcta

SEQ ID NO: 12073 - DNA, 20 bp, Artificial Sequence
  chemically synthesized
tttcatttcgctatagatca

SEQ ID NO: 12074 - DNA, 20 bp, Artificial Sequence
  chemically synthesized
ttcatttcgctatagatcaa

SEQ ID NO: 12075 - DNA, 20 bp, Artificial Sequence
  chemically synthesized
catttcgctatagatcaaag

SEQ ID NO: 12076 - DNA, 20 bp, Artificial Sequence
  chemically synthesized
gctatagatcaaaggagaac

SEQ ID NO: 12077 - DNA, 20 bp, Artificial Sequence
  chemically synthesized
agatcaaaggagaacaagaa

SEQ ID NO: 12078 - DNA, 20 bp, Artificial Sequence
  chemically synthesized
gagaacaagaatggaaactg

SEQ ID NO: 12079 - DNA, 20 bp, Artificial Sequence
  chemically synthesized
aatggaaactgtggcatatc

SEQ ID NO: 12080 - DNA, 20 bp, Artificial Sequence
  chemically synthesized
tccattgctgtctttcacac

SEQ ID NO: 12081 - DNA, 20 bp, Artificial Sequence
  chemically synthesized
ccattgctgtctttcacact

SEQ ID NO: 12082 - DNA, 20 bp, Artificial Sequence
  chemically synthesized
tctttcacactgggctatct

SEQ ID NO: 12083 - DNA, 20 bp, Artificial Sequence
  chemically synthesized
tctaagtttatacaattccc

SEQ ID NO: 12084 - DNA, 20 bp, Artificial Sequence
  chemically synthesized
gtttatacaattccccagac

SEQ ID NO: 12085 - DNA, 20 bp, Artificial Sequence
  chemically synthesized
ccccagactagctgcatatt

SEQ ID NO: 12086 - DNA, 20 bp, Artificial Sequence
  chemically synthesized
catattaagcttgctgtgta

SEQ ID NO: 12087 - DNA, 20 bp, Artificial Sequence
  chemically synthesized
tgctgtgtacagctttatta

SEQ ID NO: 12088 - DNA, 20 bp, Artificial Sequence
  chemically synthesized
tgtacagctttattatggtg

SEQ ID NO: 12089 - DNA, 20 bp, Artificial Sequence
  chemically synthesized
acagctttattatggtgtgg

SEQ ID NO: 12090 - DNA, 20 bp, Artificial Sequence
  chemically synthesized
gctttattatggtgtggtgg

SEQ ID NO: 12091 - DNA, 20 bp, Artificial Sequence
  chemically synthesized
ttattatggtgtggtggtgg

SEQ ID NO: 12092 - DNA, 20 bp, Artificial Sequence
  chemically synthesized
ttatggtgtggtggtggaag

SEQ ID NO: 12093 - DNA, 20 bp, Artificial Sequence
  chemically synthesized
tggaagaagcattaatattc

SEQ ID NO: 12094 - DNA, 20 bp, Artificial Sequence
  chemically synthesized
tattccagctccgcatctga

SEQ ID NO: 12095 - DNA, 20 bp, Artificial Sequence
  chemically synthesized
attccagctccgcatctgac

SEQ ID NO: 12096 - DNA, 20 bp, Artificial Sequence
  chemically synthesized
ttccagctccgcatctgaca

SEQ ID NO: 12097 - DNA, 20 bp, Artificial Sequence
  chemically synthesized
gcatttacatgcgcccatct

SEQ ID NO: 12098 - DNA, 20 bp, Artificial Sequence
  chemically synthesized
tttacatgcgcccatctgag

SEQ ID NO: 12099 - DNA, 20 bp, Artificial Sequence
  chemically synthesized
cgcccatctgagcggcacct

SEQ ID NO: 12100 - DNA, 20 bp, Artificial Sequence
  chemically synthesized
cccatctgagcggcacctga

SEQ ID NO: 12101 - DNA, 20 bp, Artificial Sequence
  chemically synthesized
cggcacctgagagctcctcc

SEQ ID NO: 12102 - DNA, 20 bp, Artificial Sequence
  chemically synthesized
ggcacctgagagctcctcca

SEQ ID NO: 12103 - DNA, 20 bp, Artificial Sequence
  chemically synthesized
ctgagagctcctccaaggtg

SEQ ID NO: 12104 - DNA, 20 bp, Artificial Sequence
  chemically synthesized
gtaactgtgcgcctattgta

SEQ ID NO: 12105 - DNA, 20 bp, Artificial Sequence
  chemically synthesized
taactgtgcgcctattgtaa

SEQ ID NO: 12106 - DNA, 20 bp, Artificial Sequence
  chemically synthesized
gcctattgtaaaggcaaatg

SEQ ID NO: 12107 - DNA, 20 bp, Artificial Sequence
  chemically synthesized
gaagctcacctattccctgc

SEQ ID NO: 12108 - DNA, 20 bp, Artificial Sequence
  chemically synthesized
aagctcacctattccctgct

SEQ ID NO: 12109 - DNA, 20 bp, Artificial Sequence
  chemically synthesized
cacctattccctgctgggat

SEQ ID NO: 12110 - DNA, 20 bp, Artificial Sequence
  chemically synthesized
ctattccctgctgggatcag

SEQ ID NO: 12111 - DNA, 20 bp, Artificial Sequence
  chemically synthesized
aacctaactcaatgccattg

SEQ ID NO: 12112 - DNA, 20 bp, Artificial Sequence
  chemically synthesized
gccattgcagaatgacgaat

SEQ ID NO: 12113 - DNA, 20 bp, Artificial Sequence
  chemically synthesized
tgcagaatgacgaatgagct

SEQ ID NO: 12114 - DNA, 20 bp, Artificial Sequence
  chemically synthesized
atgacgaatgagctcagaaa

SEQ ID NO: 12115 - DNA, 20 bp, Artificial Sequence
  chemically synthesized
tgagctcagaaatagacccc

SEQ ID NO: 12116 - DNA, 20 bp, Artificial Sequence
  chemically synthesized
cccaagttactaaccctgct

SEQ ID NO: 12117 - DNA, 20 bp, Artificial Sequence
  chemically synthesized
gttactaaccctgctaagaa

SEQ ID NO: 12118 - DNA, 20 bp, Artificial Sequence
  chemically synthesized
aaccctgctaagaacagcaa

SEQ ID NO: 12119 - DNA, 20 bp, Artificial Sequence
  chemically synthesized
tgaaatgttttaaaaatgca

SEQ ID NO: 12120 - DNA, 20 bp, Artificial Sequence
  chemically synthesized
gaaatgttttaaaaatgcat

SEQ ID NO: 12121 - DNA, 20 bp, Artificial Sequence
  chemically synthesized
aaatgttttaaaaatgcata

SEQ ID NO: 12122 - DNA, 20 bp, Artificial Sequence
  chemically synthesized
atgttttaaaaatgcatagg

SEQ ID NO: 12123 - DNA, 20 bp, Artificial Sequence
  chemically synthesized
ttaaaaatgcatagggagtg

SEQ ID NO: 12124 - DNA, 20 bp, Artificial Sequence
  chemically synthesized
aaatgcatagggagtgcagc

SEQ ID NO: 12125 - DNA, 20 bp, Artificial Sequence
  chemically synthesized
gcatagggagtgcagctggc

SEQ ID NO: 12126 - DNA, 20 bp, Artificial Sequence
  chemically synthesized
gagtgcagctggccagtaaa

SEQ ID NO: 12127 - DNA, 20 bp, Artificial Sequence
  chemically synthesized
tgcagctggccagtaaaaag

SEQ ID NO: 12128 - DNA, 20 bp, Artificial Sequence
  chemically synthesized
gcagctggccagtaaaaagc

SEQ ID NO: 12129 - DNA, 20 bp, Artificial Sequence
  chemically synthesized
cagctggccagtaaaaagca

SEQ ID NO: 12130 - DNA, 20 bp, Artificial Sequence
  chemically synthesized
gctggccagtaaaaagcagg

SEQ ID NO: 12131 - DNA, 20 bp, Artificial Sequence
  chemically synthesized
aaattccaatgaacccaata

SEQ ID NO: 12132 - DNA, 20 bp, Artificial Sequence
  chemically synthesized
caatgaacccaatatggaat

SEQ ID NO: 12133 - DNA, 20 bp, Artificial Sequence
  chemically synthesized
agttacattttaaaactgat

SEQ ID NO: 12134 - DNA, 20 bp, Artificial Sequence
  chemically synthesized
tttaaaactgattagaaata

SEQ ID NO: 12135 - DNA, 20 bp, Artificial Sequence
  chemically synthesized
aaatacagtctgatgtttac

SEQ ID NO: 12136 - DNA, 20 bp, Artificial Sequence
  chemically synthesized
atgtttactggcttcaaatt

SEQ ID NO: 12137 - DNA, 20 bp, Artificial Sequence
  chemically synthesized
tactggcttcaaattgagtt

SEQ ID NO: 12138 - DNA, 20 bp, Artificial Sequence
  chemically synthesized
ttcaaattgagtttggcatc

SEQ ID NO: 12139 - DNA, 20 bp, Artificial Sequence
  chemically synthesized
gagtttggcatcaagtatac

SEQ ID NO: 12140 - DNA, 20 bp, Artificial Sequence
  chemically synthesized
tatactggctttaataatgc

SEQ ID NO: 12141 - DNA, 20 bp, Artificial Sequence
  chemically synthesized
tattattttaaatctgcctt

SEQ ID NO: 12142 - DNA, 20 bp, Artificial Sequence
  chemically synthesized
ttaaatctgcctttggtctc

SEQ ID NO: 12143 - DNA, 20 bp, Artificial Sequence
  chemically synthesized
taaatctgcctttggtctct

SEQ ID NO: 12144 - DNA, 20 bp, Artificial Sequence
  chemically synthesized
aatctgcctttggtctctag

SEQ ID NO: 12145 - DNA, 20 bp, Artificial Sequence
  chemically synthesized
ttggtctctaggagcacatg

SEQ ID NO: 12146 - DNA, 20 bp, Artificial Sequence
  chemically synthesized
ggtctctaggagcacatgta

SEQ ID NO: 12147 - DNA, 20 bp, Artificial Sequence
  chemically synthesized
tctctaggagcacatgtaga

SEQ ID NO: 12148 - DNA, 20 bp, Artificial Sequence
  chemically synthesized
ggagcacatgtagagagcta

SEQ ID NO: 12149 - DNA, 20 bp, Artificial Sequence
  chemically synthesized
gctaaagaattcttatttgt

SEQ ID NO: 12150 - DNA, 20 bp, Artificial Sequence
  chemically synthesized
ctaaagaattcttatttgtc

SEQ ID NO: 12151 - DNA, 20 bp, Artificial Sequence
  chemically synthesized
atttgtcaggttacatttcc

SEQ ID NO: 12152 - DNA, 20 bp, Artificial Sequence
  chemically synthesized
ggttacatttcctggaaatt

SEQ ID NO: 12153 - DNA, 20 bp, Artificial Sequence
  chemically synthesized
cctggaaattaagtttgtga

SEQ ID NO: 12154 - DNA, 20 bp, Artificial Sequence
  chemically synthesized
tttgtgacagaaaatgactc

SEQ ID NO: 12155 - DNA, 20 bp, Artificial Sequence
  chemically synthesized
gtgacagaaaatgactccag

SEQ ID NO: 12156 - DNA, 20 bp, Artificial Sequence
  chemically synthesized
tgactccagtagcaataata

SEQ ID NO: 12157 - DNA, 20 bp, Artificial Sequence
  chemically synthesized
tggttcgtgctcaaattaat

SEQ ID NO: 12158 - DNA, 20 bp, Artificial Sequence
  chemically synthesized
ggttcgtgctcaaattaatt

SEQ ID NO: 12159 - DNA, 20 bp, Artificial Sequence
  chemically synthesized
gtcatgttgtaaaaactacg

SEQ ID NO: 12160 - DNA, 20 bp, Artificial Sequence
  chemically synthesized
aaactacgtggcaaattaca

SEQ ID NO: 12161 - DNA, 20 bp, Artificial Sequence
  chemically synthesized
aactacgtggcaaattacaa

SEQ ID NO: 12162 - DNA, 20 bp, Artificial Sequence
  chemically synthesized
aaaggtaaatttactgatat

SEQ ID NO: 12163 - DNA, 20 bp, Artificial Sequence
  chemically synthesized
gtaaatttactgatattggc

SEQ ID NO: 12164 - DNA, 20 bp, Artificial Sequence
  chemically synthesized
ttggccagtgctctataccc

SEQ ID NO: 12165 - DNA, 20 bp, Artificial Sequence
  chemically synthesized
tgctctataccctggtcgta

SEQ ID NO: 12166 - DNA, 20 bp, Artificial Sequence
  chemically synthesized
gctctataccctggtcgtaa

SEQ ID NO: 12167 - DNA, 20 bp, Artificial Sequence
  chemically synthesized
ctctataccctggtcgtaaa

SEQ ID NO: 12168 - DNA, 20 bp, Artificial Sequence
  chemically synthesized
tctataccctggtcgtaaag

SEQ ID NO: 12169 - DNA, 20 bp, Artificial Sequence
  chemically synthesized
tataccctggtcgtaaaggg

SEQ ID NO: 12170 - DNA, 20 bp, Artificial Sequence
  chemically synthesized
accctggtcgtaaaggggag

SEQ ID NO: 12171 - DNA, 20 bp, Artificial Sequence
  chemically synthesized
gtaaaggggagaagctgttt

SEQ ID NO: 12172 - DNA, 20 bp, Artificial Sequence
  chemically synthesized
taaaggggagaagctgttta

SEQ ID NO: 12173 - DNA, 20 bp, Artificial Sequence
  chemically synthesized
tttaaggatgcccatttacc

SEQ ID NO: 12174 - DNA, 20 bp, Artificial Sequence
  chemically synthesized
ttaaggatgcccatttacct

SEQ ID NO: 12175 - DNA, 20 bp, Artificial Sequence
  chemically synthesized
aggatgcccatttacctagg

SEQ ID NO: 12176 - DNA, 20 bp, Artificial Sequence
  chemically synthesized
ggatgcccatttacctaggt

SEQ ID NO: 12177 - DNA, 20 bp, Artificial Sequence
  chemically synthesized
atgcccatttacctaggtag

SEQ ID NO: 12178 - DNA, 20 bp, Artificial Sequence
  chemically synthesized
catttacctaggtaggagaa

SEQ ID NO: 12179 - DNA, 20 bp, Artificial Sequence
  chemically synthesized
ctaggtaggagaaaagaacc

SEQ ID NO: 12180 - DNA, 20 bp, Artificial Sequence
  chemically synthesized
taggtaggagaaaagaacca

SEQ ID NO: 12181 - DNA, 20 bp, Artificial Sequence
  chemically synthesized
ggtaggagaaaagaaccaag

SEQ ID NO: 12182 - DNA, 20 bp, Artificial Sequence
  chemically synthesized
gtaggagaaaagaaccaagg

SEQ ID NO: 12183 - DNA, 20 bp, Artificial Sequence
  chemically synthesized
taggagaaaagaaccaagga

SEQ ID NO: 12184 - DNA, 20 bp, Artificial Sequence
  chemically synthesized
ggagaaaagaaccaaggagg

SEQ ID NO: 12185 - DNA, 20 bp, Artificial Sequence
  chemically synthesized
gagaaaagaaccaaggaggg

SEQ ID NO: 12186 - DNA, 20 bp, Artificial Sequence
  chemically synthesized
agaaaagaaccaaggaggga

SEQ ID NO: 12187 - DNA, 20 bp, Artificial Sequence
  chemically synthesized
aaaagaaccaaggagggagg

SEQ ID NO: 12188 - DNA, 20 bp, Artificial Sequence
  chemically synthesized
ccaaggagggagggagacaa

SEQ ID NO: 12189 - DNA, 20 bp, Artificial Sequence
  chemically synthesized
atttgtattacaaataaaaa

SEQ ID NO: 12190 - DNA, 20 bp, Artificial Sequence
  chemically synthesized
tgtattacaaataaaaatag

SEQ ID NO: 12191 - DNA, 20 bp, Artificial Sequence
  chemically synthesized
tcattatccattaaattata

SEQ ID NO: 12192 - DNA, 20 bp, Artificial Sequence
  chemically synthesized
ttgatttgaaataatgttaa

SEQ ID NO: 12193 - DNA, 20 bp, Artificial Sequence
  chemically synthesized
atttgaaataatgttaaaag

SEQ ID NO: 12194 - DNA, 20 bp, Artificial Sequence
  chemically synthesized
tttgaaataatgttaaaagt

SEQ ID NO: 12195 - DNA, 20 bp, Artificial Sequence
  chemically synthesized
taatgttaaaagtgggctct

SEQ ID NO: 12196 - DNA, 20 bp, Artificial Sequence
  chemically synthesized
gttaaaagtgggctctaagt

SEQ ID NO: 12197 - DNA, 20 bp, Artificial Sequence
  chemically synthesized
aaataacaacactgctgaca

SEQ ID NO: 12198 - DNA, 20 bp, Artificial Sequence
  chemically synthesized
gacccaaatgaaatctgaac

SEQ ID NO: 12199 - DNA, 20 bp, Artificial Sequence
  chemically synthesized
ccaaatgaaatctgaacaag

SEQ ID NO: 12200 - DNA, 20 bp, Artificial Sequence
  chemically synthesized
atgaaatctgaacaagcaga

SEQ ID NO: 12201 - DNA, 20 bp, Artificial Sequence
  chemically synthesized
tgaaatctgaacaagcagaa

SEQ ID NO: 12202 - DNA, 20 bp, Artificial Sequence
  chemically synthesized
gaacaagcagaaaggtacta

SEQ ID NO: 12203 - DNA, 20 bp, Artificial Sequence
  chemically synthesized
agaaaggtactaaagatgct

SEQ ID NO: 12204 - DNA, 20 bp, Artificial Sequence
  chemically synthesized
gattaaatctcatgctaaaa

SEQ ID NO: 12205 - DNA, 20 bp, Artificial Sequence
  chemically synthesized
taaatctcatgctaaaaaag

SEQ ID NO: 12206 - DNA, 20 bp, Artificial Sequence
  chemically synthesized
tctcatgctaaaaaagtggc

SEQ ID NO: 12207 - DNA, 20 bp, Artificial Sequence
  chemically synthesized
ctcatgctaaaaaagtggca

SEQ ID NO: 12208 - DNA, 20 bp, Artificial Sequence
  chemically synthesized
ctaaaaaagtggcaaggtgc

SEQ ID NO: 12209 - DNA, 20 bp, Artificial Sequence
  chemically synthesized
taaaaaagtggcaaggtgcc

SEQ ID NO: 12210 - DNA, 20 bp, Artificial Sequence
  chemically synthesized
aaagtggcaaggtgccaggc

SEQ ID NO: 12211 - DNA, 20 bp, Artificial Sequence
  chemically synthesized
aagtggcaaggtgccaggct

SEQ ID NO: 12212 - DNA, 20 bp, Artificial Sequence
  chemically synthesized
gcaaggtgccaggctgggtc

SEQ ID NO: 12213 - DNA, 20 bp, Artificial Sequence
  chemically synthesized
gctgggtccagcttgatgct

SEQ ID NO: 12214 - DNA, 20 bp, Artificial Sequence
  chemically synthesized
taagtgctttttattgcaca

SEQ ID NO: 12215 - DNA, 20 bp, Artificial Sequence
  chemically synthesized
tgctttttattgcacaaagc

SEQ ID NO: 12216 - DNA, 20 bp, Artificial Sequence
  chemically synthesized
ggtactactgtatgtaaaaa

SEQ ID NO: 12217 - DNA, 20 bp, Artificial Sequence
  chemically synthesized
actgtatgtaaaaacagact

SEQ ID NO: 12218 - DNA, 20 bp, Artificial Sequence
  chemically synthesized
ctgtatgtaaaaacagactt

SEQ ID NO: 12219 - DNA, 20 bp, Artificial Sequence
  chemically synthesized
tgtaaaaacagacttgggct

SEQ ID NO: 12220 - DNA, 20 bp, Artificial Sequence
  chemically synthesized
gtaaaaacagacttgggctt

SEQ ID NO: 12221 - DNA, 20 bp, Artificial Sequence
  chemically synthesized
taaaaacagacttgggcttg

SEQ ID NO: 12222 - DNA, 20 bp, Artificial Sequence
  chemically synthesized
aatgacttctttgtgcaata

SEQ ID NO: 12223 - DNA, 20 bp, Artificial Sequence
  chemically synthesized
atgacttctttgtgcaataa

SEQ ID NO: 12224 - DNA, 20 bp, Artificial Sequence
  chemically synthesized
tgacttctttgtgcaataaa

SEQ ID NO: 12225 - DNA, 20 bp, Artificial Sequence
  chemically synthesized
tgtgcaataaagggtgtgaa

SEQ ID NO: 12226 - DNA, 20 bp, Artificial Sequence
  chemically synthesized
gggtgtgaacagaccaacca

SEQ ID NO: 12227 - DNA, 20 bp, Artificial Sequence
  chemically synthesized
tgtgaacagaccaaccaaag

SEQ ID NO: 12228 - DNA, 20 bp, Artificial Sequence
  chemically synthesized
aagtagattaaattaacatc

SEQ ID NO: 12229 - DNA, 20 bp, Artificial Sequence
  chemically synthesized
aacatccagtgacgcaatct

SEQ ID NO: 12230 - DNA, 20 bp, Artificial Sequence
  chemically synthesized
gcaatcttggtgcatctccc

SEQ ID NO: 12231 - DNA, 20 bp, Artificial Sequence
  chemically synthesized
cctagctgtgctttctactt

SEQ ID NO: 12232 - DNA, 20 bp, Artificial Sequence
  chemically synthesized
aaatttaatatttcccccca

SEQ ID NO: 12233 - DNA, 20 bp, Artificial Sequence
  chemically synthesized
aatttaatatttccccccaa

SEQ ID NO: 12234 - DNA, 20 bp, Artificial Sequence
  chemically synthesized
taatatttccccccaaagga

SEQ ID NO: 12235 - DNA, 20 bp, Artificial Sequence
  chemically synthesized
ttgtttcctttcttactgac

SEQ ID NO: 12236 - DNA, 20 bp, Artificial Sequence
  chemically synthesized
ttcttactgaccagcacgca

SEQ ID NO: 12237 - DNA, 20 bp, Artificial Sequence
  chemically synthesized
ctttattaaacattttcatt

SEQ ID NO: 12238 - DNA, 20 bp, Artificial Sequence
  chemically synthesized
aaatctaaaaaatgtttccc

SEQ ID NO: 12239 - DNA, 20 bp, Artificial Sequence
  chemically synthesized
aatctaaaaaatgtttccct

SEQ ID NO: 12240 - DNA, 20 bp, Artificial Sequence
  chemically synthesized
gttttttatgtaccccaatt

SEQ ID NO: 12241 - DNA, 20 bp, Artificial Sequence
  chemically synthesized
ccaatttagtactcccacat

SEQ ID NO: 12242 - DNA, 20 bp, Artificial Sequence
  chemically synthesized
cccacattagccaaactaca

SEQ ID NO: 12243 - DNA, 20 bp, Artificial Sequence
  chemically synthesized
acattagccaaactacatgg

SEQ ID NO: 12244 - DNA, 20 bp, Artificial Sequence
  chemically synthesized
gccaaactacatggaagctg

SEQ ID NO: 12245 - DNA, 20 bp, Artificial Sequence
  chemically synthesized
gtgtgaaattaatgattttc

SEQ ID NO: 12246 - DNA, 20 bp, Artificial Sequence
  chemically synthesized
tgtgaaattaatgattttcc

SEQ ID NO: 12247 - DNA, 20 bp, Artificial Sequence
  chemically synthesized
atgattttccaggactctaa

SEQ ID NO: 12248 - DNA, 20 bp, Artificial Sequence
  chemically synthesized
ctctaaaagatgccattaat

SEQ ID NO: 12249 - DNA, 20 bp, Artificial Sequence
  chemically synthesized
atccaactcgcctcctccct

SEQ ID NO: 12250 - DNA, 20 bp, Artificial Sequence
  chemically synthesized
ctcgcctcctccctgagctg

SEQ ID NO: 12251 - DNA, 20 bp, Artificial Sequence
  chemically synthesized
tcgcctcctccctgagctga

SEQ ID NO: 12252 - DNA, 20 bp, Artificial Sequence
  chemically synthesized
tgcctgcacgtttctacacc

SEQ ID NO: 12253 - DNA, 20 bp, Artificial Sequence
  chemically synthesized
ctacacccagttgcattttc

SEQ ID NO: 12254 - DNA, 20 bp, Artificial Sequence
  chemically synthesized
tgcattttccagcccatgtg

SEQ ID NO: 12255 - DNA, 20 bp, Artificial Sequence
  chemically synthesized
aattatatgccacattcact

SEQ ID NO: 12256 - DNA, 20 bp, Artificial Sequence
  chemically synthesized
ttatatgccacattcactaa

SEQ ID NO: 12257 - DNA, 20 bp, Artificial Sequence
  chemically synthesized
atgccacattcactaagaga

SEQ ID NO: 12258 - DNA, 20 bp, Artificial Sequence
  chemically synthesized
tgccacattcactaagagaa

SEQ ID NO: 12259 - DNA, 20 bp, Artificial Sequence
  chemically synthesized
aaggtgtgcaaaacatattt

SEQ ID NO: 12260 - DNA, 20 bp, Artificial Sequence
  chemically synthesized
aacatatttcagatccttta

SEQ ID NO: 12261 - DNA, 20 bp, Artificial Sequence
  chemically synthesized
atttcagatcctttatagta

SEQ ID NO: 12262 - DNA, 20 bp, Artificial Sequence
  chemically synthesized
tttcagatcctttatagtaa

SEQ ID NO: 12263 - DNA, 20 bp, Artificial Sequence
  chemically synthesized
ggcacaacttgcaacacaac

SEQ ID NO: 12264 - DNA, 20 bp, Artificial Sequence
  chemically synthesized
gcacaacttgcaacacaaca

SEQ ID NO: 12265 - DNA, 20 bp, Artificial Sequence
  chemically synthesized
acttgcaacacaacaaggaa

SEQ ID NO: 12266 - DNA, 20 bp, Artificial Sequence
  chemically synthesized
cttgcaacacaacaaggaat

SEQ ID NO: 12267 - DNA, 20 bp, Artificial Sequence
  chemically synthesized
ttgcaacacaacaaggaatg

SEQ ID NO: 12268 - DNA, 20 bp, Artificial Sequence
  chemically synthesized
aacaaggaatggggtgattt

SEQ ID NO: 12269 - DNA, 20 bp, Artificial Sequence
  chemically synthesized
tggggtgatttaagaaatta

SEQ ID NO: 12270 - DNA, 20 bp, Artificial Sequence
  chemically synthesized
gatttaagaaattacagcac

SEQ ID NO: 12271 - DNA, 20 bp, Artificial Sequence
  chemically synthesized
tgtgtgtgtgtgtgtgtgtg

SEQ ID NO: 12272 - DNA, 20 bp, Artificial Sequence
  chemically synthesized
ttttgtttttttgttttttt

SEQ ID NO: 12273 - DNA, 20 bp, Artificial Sequence
  chemically synthesized
tttgtttttttaagctttca

SEQ ID NO: 12274 - DNA, 20 bp, Artificial Sequence
  chemically synthesized
aagctttcacagaataaaca

SEQ ID NO: 12275 - DNA, 20 bp, Artificial Sequence
  chemically synthesized
gctttcacagaataaacaca

SEQ ID NO: 12276 - DNA, 20 bp, Artificial Sequence
  chemically synthesized
cacagaataaacacagagaa

SEQ ID NO: 12277 - DNA, 20 bp, Artificial Sequence
  chemically synthesized
acagaataaacacagagaac

SEQ ID NO: 12278 - DNA, 20 bp, Artificial Sequence
  chemically synthesized
agaataaacacagagaacgg

SEQ ID NO: 12279 - DNA, 20 bp, Artificial Sequence
  chemically synthesized
gaataaacacagagaacggg

SEQ ID NO: 12280 - DNA, 20 bp, Artificial Sequence
  chemically synthesized
aataaacacagagaacggga

SEQ ID NO: 12281 - DNA, 20 bp, Artificial Sequence
  chemically synthesized
cccctctgctcctgttcttg

SEQ ID NO: 12282 - DNA, 20 bp, Artificial Sequence
  chemically synthesized
catatttgtgtttccaataa

SEQ ID NO: 12283 - DNA, 20 bp, Artificial Sequence
  chemically synthesized
atatttgtgtttccaataaa

SEQ ID NO: 12284 - DNA, 20 bp, Artificial Sequence
  chemically synthesized
tttacattaactgtctgtaa

SEQ ID NO: 12285 - DNA, 20 bp, Artificial Sequence
  chemically synthesized
acattaactgtctgtaacag

SEQ ID NO: 12286 - DNA, 20 bp, Artificial Sequence
  chemically synthesized
cattaactgtctgtaacagc

SEQ ID NO: 12287 - DNA, 20 bp, Artificial Sequence
  chemically synthesized
ttaactgtctgtaacagcag

SEQ ID NO: 12288 - DNA, 20 bp, Artificial Sequence
  chemically synthesized
ctgtctgtaacagcaggaga

SEQ ID NO: 12289 - DNA, 20 bp, Artificial Sequence
  chemically synthesized
cacaatctccacatcacaca

SEQ ID NO: 12290 - DNA, 20 bp, Artificial Sequence
  chemically synthesized
acaatctccacatcacacac

SEQ ID NO: 12291 - DNA, 20 bp, Artificial Sequence
  chemically synthesized
aggatgatcttcatatcacg

SEQ ID NO: 12292 - DNA, 20 bp, Artificial Sequence
  chemically synthesized
tctcaaaacattatttataa

SEQ ID NO: 12293 - DNA, 20 bp, Artificial Sequence
  chemically synthesized
cattatttataaaagatgac

SEQ ID NO: 12294 - DNA, 20 bp, Artificial Sequence
  chemically synthesized
attatttataaaagatgact

SEQ ID NO: 12295 - DNA, 20 bp, Artificial Sequence
  chemically synthesized
catcttttctgtgtcaccac

SEQ ID NO: 12296 - DNA, 20 bp, Artificial Sequence
  chemically synthesized
atcttttctgtgtcaccaca

SEQ ID NO: 12297 - DNA, 20 bp, Artificial Sequence
  chemically synthesized
tcttttctgtgtcaccacaa

SEQ ID NO: 12298 - DNA, 20 bp, Artificial Sequence
  chemically synthesized
caccacaagggtaatgtctg

SEQ ID NO: 12299 - DNA, 20 bp, Artificial Sequence
  chemically synthesized
cacaagggtaatgtctgaag

SEQ ID NO: 12300 - DNA, 20 bp, Artificial Sequence
  chemically synthesized
gggtaatgtctgaagaagtt

SEQ ID NO: 12301 - DNA, 20 bp, Artificial Sequence
  chemically synthesized
ggtaatgtctgaagaagttt

SEQ ID NO: 12302 - DNA, 20 bp, Artificial Sequence
  chemically synthesized
ctgaagaagtttgggatctt

SEQ ID NO: 12303 - DNA, 20 bp, Artificial Sequence
  chemically synthesized
tgaagaagtttgggatcttt

SEQ ID NO: 12304 - DNA, 20 bp, Artificial Sequence
  chemically synthesized
ctttaggatcttctacattt

SEQ ID NO: 12305 - DNA, 20 bp, Artificial Sequence
  chemically synthesized
atatattttttttttccttt

SEQ ID NO: 12306 - DNA, 20 bp, Artificial Sequence
  chemically synthesized
tttttccttttggctttcct

SEQ ID NO: 12307 - DNA, 20 bp, Artificial Sequence
  chemically synthesized
tccttttggctttccttagt

SEQ ID NO: 12308 - DNA, 20 bp, Artificial Sequence
  chemically synthesized
ttggctttccttagtaagtt

SEQ ID NO: 12309 - DNA, 20 bp, Artificial Sequence
  chemically synthesized
gctttccttagtaagtttag

SEQ ID NO: 12310 - DNA, 20 bp, Artificial Sequence
  chemically synthesized
tagtaagtttagcagccatg

SEQ ID NO: 12311 - DNA, 20 bp, Artificial Sequence
  chemically synthesized
agtaagtttagcagccatgc

SEQ ID NO: 12312 - DNA, 20 bp, Artificial Sequence
  chemically synthesized
gcgggccactgtgtttaatt

SEQ ID NO: 12313 - DNA, 20 bp, Artificial Sequence
  chemically synthesized
gtgtttaattaagctttcaa

SEQ ID NO: 12314 - DNA, 20 bp, Artificial Sequence
  chemically synthesized
cctgacaatgccaacaattg

SEQ ID NO: 12315 - DNA, 20 bp, Artificial Sequence
  chemically synthesized
ctgacaatgccaacaattgt

SEQ ID NO: 12316 - DNA, 20 bp, Artificial Sequence
  chemically synthesized
acaattgtaggacacttctg

SEQ ID NO: 12317 - DNA, 20 bp, Artificial Sequence
  chemically synthesized
caatcatgcaatcactgtga

SEQ ID NO: 12318 - DNA, 20 bp, Artificial Sequence
  chemically synthesized
gttctatttacaatttgtct

SEQ ID NO: 12319 - DNA, 20 bp, Artificial Sequence
  chemically synthesized
tatttacaatttgtcttaga

SEQ ID NO: 12320 - DNA, 20 bp, Artificial Sequence
  chemically synthesized
tttacaatttgtcttagaaa

SEQ ID NO: 12321 - DNA, 20 bp, Artificial Sequence
  chemically synthesized
tgtactttgacaaaacatcc

SEQ ID NO: 12322 - DNA, 20 bp, Artificial Sequence
  chemically synthesized
tgacaaaacatccaagctgc

SEQ ID NO: 12323 - DNA, 20 bp, Artificial Sequence
  chemically synthesized
ctctgtcttatttacaaata

SEQ ID NO: 12324 - DNA, 20 bp, Artificial Sequence
  chemically synthesized
ttacaaatacagcttgtata

SEQ ID NO: 12325 - DNA, 20 bp, Artificial Sequence
  chemically synthesized
tacaaatacagcttgtatat

SEQ ID NO: 12326 - DNA, 20 bp, Artificial Sequence
  chemically synthesized
cagcttgtatataggactcc

SEQ ID NO: 12327 - DNA, 20 bp, Artificial Sequence
  chemically synthesized
actcccagtttcatgaacat

SEQ ID NO: 12328 - DNA, 20 bp, Artificial Sequence
  chemically synthesized
gtttcatgaacattagtctt

SEQ ID NO: 12329 - DNA, 20 bp, Artificial Sequence
  chemically synthesized
catgaacattagtctttgga

SEQ ID NO: 12330 - DNA, 20 bp, Artificial Sequence
  chemically synthesized
gaacattagtctttggatag

SEQ ID NO: 12331 - DNA, 20 bp, Artificial Sequence
  chemically synthesized
ggatagtggcctcacaaaca

SEQ ID NO: 12332 - DNA, 20 bp, Artificial Sequence
  chemically synthesized
gatagtggcctcacaaacat

SEQ ID NO: 12333 - DNA, 20 bp, Artificial Sequence
  chemically synthesized
taggctccctatgaaaatcc

SEQ ID NO: 12334 - DNA, 20 bp, Artificial Sequence
  chemically synthesized
aggctccctatgaaaatcct

SEQ ID NO: 12335 - DNA, 20 bp, Artificial Sequence
  chemically synthesized
tgaaaatcctaggtacttat

SEQ ID NO: 12336 - DNA, 20 bp, Artificial Sequence
  chemically synthesized
aaacaatattctctactctc

SEQ ID NO: 12337 - DNA, 20 bp, Artificial Sequence
  chemically synthesized
tctctactctctggattttg

SEQ ID NO: 12338 - DNA, 20 bp, Artificial Sequence
  chemically synthesized
ctctactctctggattttga

SEQ ID NO: 12339 - DNA, 20 bp, Artificial Sequence
  chemically synthesized
actctctggattttgaaggt

SEQ ID NO: 12340 - DNA, 20 bp, Artificial Sequence
  chemically synthesized
aaggtaagtaaaatgttcac

SEQ ID NO: 12341 - DNA, 20 bp, Artificial Sequence
  chemically synthesized
caccagtatattgttttttg

SEQ ID NO: 12342 - DNA, 20 bp, Artificial Sequence
  chemically synthesized
cagtatattgttttttgtgg

SEQ ID NO: 12343 - DNA, 20 bp, Artificial Sequence
  chemically synthesized
tatattgttttttgtggtag

SEQ ID NO: 12344 - DNA, 20 bp, Artificial Sequence
  chemically synthesized
gccatgctgaaaattcactt

SEQ ID NO: 12345 - DNA, 20 bp, Artificial Sequence
  chemically synthesized
atgctgaaaattcacttcag

SEQ ID NO: 12346 - DNA, 20 bp, Artificial Sequence
  chemically synthesized
tgaaaattcacttcagaagt

SEQ ID NO: 12347 - DNA, 20 bp, Artificial Sequence
  chemically synthesized
agaagtcagtcgtttttatt

SEQ ID NO: 12348 - DNA, 20 bp, Artificial Sequence
  chemically synthesized
tattcagaatcacataaata

SEQ ID NO: 12349 - DNA, 20 bp, Artificial Sequence
  chemically synthesized
ttcagaatcacataaataaa

SEQ ID NO: 12350 - DNA, 20 bp, Artificial Sequence
  chemically synthesized
aatcacataaataaagagaa

SEQ ID NO: 12351 - DNA, 20 bp, Artificial Sequence
  chemically synthesized
aataaagagaaaagaaaaat

SEQ ID NO: 12352 - DNA, 20 bp, Artificial Sequence
  chemically synthesized
aaagagaaaagaaaaataag

SEQ ID NO: 12353 - DNA, 20 bp, Artificial Sequence
  chemically synthesized
agaaaaataagtagtcataa

SEQ ID NO: 12354 - DNA, 20 bp, Artificial Sequence
  chemically synthesized
taatagcatactataattta

SEQ ID NO: 12355 - DNA, 20 bp, Artificial Sequence
  chemically synthesized
ctcatttacaattacaccat

SEQ ID NO: 12356 - DNA, 20 bp, Artificial Sequence
  chemically synthesized
tcatttacaattacaccata

SEQ ID NO: 12357 - DNA, 20 bp, Artificial Sequence
  chemically synthesized
aggtacacaaatacatcctc

SEQ ID NO: 12358 - DNA, 20 bp, Artificial Sequence
  chemically synthesized
cacaaatacatcctccagtt

SEQ ID NO: 12359 - DNA, 20 bp, Artificial Sequence
  chemically synthesized
tacatcctccagttcagtct

SEQ ID NO: 12360 - DNA, 20 bp, Artificial Sequence
  chemically synthesized
tcctccagttcagtctgagc

SEQ ID NO: 12361 - DNA, 20 bp, Artificial Sequence
  chemically synthesized
cctccagttcagtctgagct

SEQ ID NO: 12362 - DNA, 20 bp, Artificial Sequence
  chemically synthesized
tccagttcagtctgagctag

SEQ ID NO: 12363 - DNA, 20 bp, Artificial Sequence
  chemically synthesized
cagttcagtctgagctagga

SEQ ID NO: 12364 - DNA, 20 bp, Artificial Sequence
  chemically synthesized
agtctgagctaggagagaat

SEQ ID NO: 12365 - DNA, 20 bp, Artificial Sequence
  chemically synthesized
gagctaggagagaatcagaa

SEQ ID NO: 12366 - DNA, 20 bp, Artificial Sequence
  chemically synthesized
agaatcagaatggatacaaa

SEQ ID NO: 12367 - DNA, 20 bp, Artificial Sequence
  chemically synthesized
cagaatggatacaaaaagaa

SEQ ID NO: 12368 - DNA, 20 bp, Artificial Sequence
  chemically synthesized
agaatggatacaaaaagaaa

SEQ ID NO: 12369 - DNA, 20 bp, Artificial Sequence
  chemically synthesized
tggatacaaaaagaaaaggt

SEQ ID NO: 12370 - DNA, 20 bp, Artificial Sequence
  chemically synthesized
ttcattttctaaattctgaa

SEQ ID NO: 12371 - DNA, 20 bp, Artificial Sequence
  chemically synthesized
attgtatttgatttactttt

SEQ ID NO: 12372 - DNA, 20 bp, Artificial Sequence
  chemically synthesized
tgtatttgatttacttttaa

SEQ ID NO: 12373 - DNA, 20 bp, Artificial Sequence
  chemically synthesized
attactatatctcccttctt

SEQ ID NO: 12374 - DNA, 20 bp, Artificial Sequence
  chemically synthesized
tactatatctcccttcttta

SEQ ID NO: 12375 - DNA, 20 bp, Artificial Sequence
  chemically synthesized
atatatcattatctaaatac

SEQ ID NO: 12376 - DNA, 20 bp, Artificial Sequence
  chemically synthesized
taaataccagctatactgtc

SEQ ID NO: 12377 - DNA, 20 bp, Artificial Sequence
  chemically synthesized
aaataccagctatactgtct

SEQ ID NO: 12378 - DNA, 20 bp, Artificial Sequence
  chemically synthesized
tgtctatgttcatgatttta

SEQ ID NO: 12379 - DNA, 20 bp, Artificial Sequence
  chemically synthesized
tctatgttcatgattttaaa

SEQ ID NO: 12380 - DNA, 20 bp, Artificial Sequence
  chemically synthesized
gaaaaaatgttatatatcaa

SEQ ID NO: 12381 - DNA, 20 bp, Artificial Sequence
  chemically synthesized
aaaaaatgttatatatcaac

SEQ ID NO: 12382 - DNA, 20 bp, Artificial Sequence
  chemically synthesized
aaaatgttatatatcaacag

SEQ ID NO: 12383 - DNA, 20 bp, Artificial Sequence
  chemically synthesized
atgttatatatcaacaggag

SEQ ID NO: 12384 - DNA, 20 bp, Artificial Sequence
  chemically synthesized
gcagactttactacatttta

SEQ ID NO: 12385 - DNA, 20 bp, Artificial Sequence
  chemically synthesized
cagactttactacattttat

SEQ ID NO: 12386 - DNA, 20 bp, Artificial Sequence
  chemically synthesized
gacttgtcatattttttctc

SEQ ID NO: 12387 - DNA, 20 bp, Artificial Sequence
  chemically synthesized
tttttctctagtctctcaaa

SEQ ID NO: 12388 - DNA, 20 bp, Artificial Sequence
  chemically synthesized
tcaaaaagctaactttatga

SEQ ID NO: 12389 - DNA, 20 bp, Artificial Sequence
  chemically synthesized
gacagcccaaacctaattta

SEQ ID NO: 12390 - DNA, 20 bp, Artificial Sequence
  chemically synthesized
taaagattcctatgtgcaat

SEQ ID NO: 12391 - DNA, 20 bp, Artificial Sequence
  chemically synthesized
aaacctcaaatctgacatga

SEQ ID NO: 12392 - DNA, 20 bp, Artificial Sequence
  chemically synthesized
aacctcaaatctgacatgat

SEQ ID NO: 12393 - DNA, 20 bp, Artificial Sequence
  chemically synthesized
tgacatgatgggataatgtt

SEQ ID NO: 12394 - DNA, 20 bp, Artificial Sequence
  chemically synthesized
gacatgatgggataatgttt

SEQ ID NO: 12395 - DNA, 20 bp, Artificial Sequence
  chemically synthesized
aatgtttgggtcttttctat

SEQ ID NO: 12396 - DNA, 20 bp, Artificial Sequence
  chemically synthesized
atgtttgggtcttttctata

SEQ ID NO: 12397 - DNA, 20 bp, Artificial Sequence
  chemically synthesized
tgtttgggtcttttctataa

SEQ ID NO: 12398 - DNA, 20 bp, Artificial Sequence
  chemically synthesized
gggtcttttctataagggaa

SEQ ID NO: 12399 - DNA, 20 bp, Artificial Sequence
  chemically synthesized
tcttttctataagggaacag

SEQ ID NO: 12400 - DNA, 20 bp, Artificial Sequence
  chemically synthesized
gggaacagcagtttcacatt

SEQ ID NO: 12401 - DNA, 20 bp, Artificial Sequence
  chemically synthesized
ttccccccatcataaaatat

SEQ ID NO: 12402 - DNA, 20 bp, Artificial Sequence
  chemically synthesized
aaaatatgagactaaaaaaa

SEQ ID NO: 12403 - DNA, 20 bp, Artificial Sequence
  chemically synthesized
caaaacaaaacccctattga

SEQ ID NO: 12404 - DNA, 20 bp, Artificial Sequence
  chemically synthesized
ctattgaaagctctgactgc

SEQ ID NO: 12405 - DNA, 20 bp, Artificial Sequence
  chemically synthesized
aaagctctgactgcaagtca

SEQ ID NO: 12406 - DNA, 20 bp, Artificial Sequence
  chemically synthesized
aagctctgactgcaagtcaa

SEQ ID NO: 12407 - DNA, 20 bp, Artificial Sequence
  chemically synthesized
gtcaaaggctgctgatatct

SEQ ID NO: 12408 - DNA, 20 bp, Artificial Sequence
  chemically synthesized
tcaaaggctgctgatatctg

SEQ ID NO: 12409 - DNA, 20 bp, Artificial Sequence
  chemically synthesized
caaaggctgctgatatctga

SEQ ID NO: 12410 - DNA, 20 bp, Artificial Sequence
  chemically synthesized
aggctgctgatatctgaggg

SEQ ID NO: 12411 - DNA, 20 bp, Artificial Sequence
  chemically synthesized
tgacacacatattgatgaac

SEQ ID NO: 12412 - DNA, 20 bp, Artificial Sequence
  chemically synthesized
gacacacatattgatgaact

SEQ ID NO: 12413 - DNA, 20 bp, Artificial Sequence
  chemically synthesized
gaactgggcccacacaacat

SEQ ID NO: 12414 - DNA, 20 bp, Artificial Sequence
  chemically synthesized
caacataagctgctaattcc

SEQ ID NO: 12415 - DNA, 20 bp, Artificial Sequence
  chemically synthesized
tactacttcaatgatctcaa

SEQ ID NO: 12416 - DNA, 20 bp, Artificial Sequence
  chemically synthesized
atatttaaataaaatgaaaa

SEQ ID NO: 12417 - DNA, 20 bp, Artificial Sequence
  chemically synthesized
ctgattaacatctatgtgta

SEQ ID NO: 12418 - DNA, 20 bp, Artificial Sequence
  chemically synthesized
gtacagctcatatgtgtacg

SEQ ID NO: 12419 - DNA, 20 bp, Artificial Sequence
  chemically synthesized
ctcatatgtgtacgtggatg

SEQ ID NO: 12420 - DNA, 20 bp, Artificial Sequence
  chemically synthesized
atatgtgtacgtggatgaag

SEQ ID NO: 12421 - DNA, 20 bp, Artificial Sequence
  chemically synthesized
tatgtgtacgtggatgaagt

SEQ ID NO: 12422 - DNA, 20 bp, Artificial Sequence
  chemically synthesized
atgtgtacgtggatgaagtg

SEQ ID NO: 12423 - DNA, 20 bp, Artificial Sequence
  chemically synthesized
tgtgtacgtggatgaagtgg

SEQ ID NO: 12424 - DNA, 20 bp, Artificial Sequence
  chemically synthesized
tgtacgtggatgaagtgggg

SEQ ID NO: 12425 - DNA, 20 bp, Artificial Sequence
  chemically synthesized
gcacatacccatctattcac

SEQ ID NO: 12426 - DNA, 20 bp, Artificial Sequence
  chemically synthesized
cacatacccatctattcacc

SEQ ID NO: 12427 - DNA, 20 bp, Artificial Sequence
  chemically synthesized
ccatctattcaccaggtaaa

SEQ ID NO: 12428 - DNA, 20 bp, Artificial Sequence
  chemically synthesized
agaatcctctaaaaaatact

SEQ ID NO: 12429 - DNA, 20 bp, Artificial Sequence
  chemically synthesized
cctctaaaaaatactcagtt

SEQ ID NO: 12430 - DNA, 20 bp, Artificial Sequence
  chemically synthesized
ctctaaaaaatactcagttt

SEQ ID NO: 12431 - DNA, 20 bp, Artificial Sequence
  chemically synthesized
aaaaaatactcagtttgggc

SEQ ID NO: 12432 - DNA, 20 bp, Artificial Sequence
  chemically synthesized
aaaaatactcagtttgggcc

SEQ ID NO: 12433 - DNA, 20 bp, Artificial Sequence
  chemically synthesized
tactcagtttgggccaggtg

SEQ ID NO: 12434 - DNA, 20 bp, Artificial Sequence
  chemically synthesized
tgggccaggtgcggtcgctc

SEQ ID NO: 12435 - DNA, 20 bp, Artificial Sequence
  chemically synthesized
gtcgctcaagcctgtaatcc

SEQ ID NO: 12436 - DNA, 20 bp, Artificial Sequence
  chemically synthesized
agcctgtaatcccagcactt

SEQ ID NO: 12437 - DNA, 20 bp, Artificial Sequence
  chemically synthesized
gcctgtaatcccagcacttt

SEQ ID NO: 12438 - DNA, 20 bp, Artificial Sequence
  chemically synthesized
ctgtaatcccagcactttgg

SEQ ID NO: 12439 - DNA, 20 bp, Artificial Sequence
  chemically synthesized
tgtaatcccagcactttggg

SEQ ID NO: 12440 - DNA, 20 bp, Artificial Sequence
  chemically synthesized
tcccagcactttgggaggcc

SEQ ID NO: 12441 - DNA, 20 bp, Artificial Sequence
  chemically synthesized
agcactttgggaggccaagc

SEQ ID NO: 12442 - DNA, 20 bp, Artificial Sequence
  chemically synthesized
gcactttgggaggccaagcc

SEQ ID NO: 12443 - DNA, 20 bp, Artificial Sequence
  chemically synthesized
ctttgggaggccaagccagg

SEQ ID NO: 12444 - DNA, 20 bp, Artificial Sequence
  chemically synthesized
ccaagccaggtggatcacct

SEQ ID NO: 12445 - DNA, 20 bp, Artificial Sequence
  chemically synthesized
caagccaggtggatcacctg

SEQ ID NO: 12446 - DNA, 20 bp, Artificial Sequence
  chemically synthesized
ccaggtggatcacctgaggt

SEQ ID NO: 12447 - DNA, 20 bp, Artificial Sequence
  chemically synthesized
caggtggatcacctgaggtc

SEQ ID NO: 12448 - DNA, 20 bp, Artificial Sequence
  chemically synthesized
ggtggatcacctgaggtcag

SEQ ID NO: 12449 - DNA, 20 bp, Artificial Sequence
  chemically synthesized
tcacctgaggtcaggagttc

SEQ ID NO: 12450 - DNA, 20 bp, Artificial Sequence
  chemically synthesized
tgaggtcaggagttcaagac

SEQ ID NO: 12451 - DNA, 20 bp, Artificial Sequence
  chemically synthesized
tcaggagttcaagaccagcc

SEQ ID NO: 12452 - DNA, 20 bp, Artificial Sequence
  chemically synthesized
caagaccagcctggccaaca

SEQ ID NO: 12453 - DNA, 20 bp, Artificial Sequence
  chemically synthesized
ctactgaaaatacaaaaaac

SEQ ID NO: 12454 - DNA, 20 bp, Artificial Sequence
  chemically synthesized
tgaaaatacaaaaaactagc

SEQ ID NO: 12455 - DNA, 20 bp, Artificial Sequence
  chemically synthesized
gaaaatacaaaaaactagct

SEQ ID NO: 12456 - DNA, 20 bp, Artificial Sequence
  chemically synthesized
tacaaaaaactagctgggcg

SEQ ID NO: 12457 - DNA, 20 bp, Artificial Sequence
  chemically synthesized
aaaaaactagctgggcgtag

SEQ ID NO: 12458 - DNA, 20 bp, Artificial Sequence
  chemically synthesized
gtggcacacgcctgtaatcc

SEQ ID NO: 12459 - DNA, 20 bp, Artificial Sequence
  chemically synthesized
cgcctgtaatcccagctact

SEQ ID NO: 12460 - DNA, 20 bp, Artificial Sequence
  chemically synthesized
gcctgtaatcccagctactt

SEQ ID NO: 12461 - DNA, 20 bp, Artificial Sequence
  chemically synthesized
ctgtaatcccagctacttgg

SEQ ID NO: 12462 - DNA, 20 bp, Artificial Sequence
  chemically synthesized
tgtaatcccagctacttggg

SEQ ID NO: 12463 - DNA, 20 bp, Artificial Sequence
  chemically synthesized
tcccagctacttgggaggct

SEQ ID NO: 12464 - DNA, 20 bp, Artificial Sequence
  chemically synthesized
cccagctacttgggaggctg

SEQ ID NO: 12465 - DNA, 20 bp, Artificial Sequence
  chemically synthesized
agctacttgggaggctgagg

SEQ ID NO: 12466 - DNA, 20 bp, Artificial Sequence
  chemically synthesized
gctacttgggaggctgaggc

SEQ ID NO: 12467 - DNA, 20 bp, Artificial Sequence
  chemically synthesized
tacttgggaggctgaggcag

SEQ ID NO: 12468 - DNA, 20 bp, Artificial Sequence
  chemically synthesized
gcaggagaatcgcttgaacc

SEQ ID NO: 12469 - DNA, 20 bp, Artificial Sequence
  chemically synthesized
caggagaatcgcttgaacct

SEQ ID NO: 12470 - DNA, 20 bp, Artificial Sequence
  chemically synthesized
ggagaatcgcttgaacctag

SEQ ID NO: 12471 - DNA, 20 bp, Artificial Sequence
  chemically synthesized
gagaatcgcttgaacctagg

SEQ ID NO: 12472 - DNA, 20 bp, Artificial Sequence
  chemically synthesized
aatcgcttgaacctaggagg

SEQ ID NO: 12473 - DNA, 20 bp, Artificial Sequence
  chemically synthesized
tcgcttgaacctaggaggca

SEQ ID NO: 12474 - DNA, 20 bp, Artificial Sequence
  chemically synthesized
cgcttgaacctaggaggcag

SEQ ID NO: 12475 - DNA, 20 bp, Artificial Sequence
  chemically synthesized
aacctaggaggcagaggttg

SEQ ID NO: 12476 - DNA, 20 bp, Artificial Sequence
  chemically synthesized
taggaggcagaggttgcagt

SEQ ID NO: 12477 - DNA, 20 bp, Artificial Sequence
  chemically synthesized
aaaatcatgccactgcactc

SEQ ID NO: 12478 - DNA, 20 bp, Artificial Sequence
  chemically synthesized
catgccactgcactccagcc

SEQ ID NO: 12479 - DNA, 20 bp, Artificial Sequence
  chemically synthesized
atgccactgcactccagcct

SEQ ID NO: 12480 - DNA, 20 bp, Artificial Sequence
  chemically synthesized
tgcactccagcctgggcaac

SEQ ID NO: 12481 - DNA, 20 bp, Artificial Sequence
  chemically synthesized
cactccagcctgggcaacaa

SEQ ID NO: 12482 - DNA, 20 bp, Artificial Sequence
  chemically synthesized
aaaaaaaaaaaaaaaaaact

SEQ ID NO: 12483 - DNA, 20 bp, Artificial Sequence
  chemically synthesized
aaaaaaaaaaaaactcagct

SEQ ID NO: 12484 - DNA, 20 bp, Artificial Sequence
  chemically synthesized
aaaaaaaaaaactcagcttg

SEQ ID NO: 12485 - DNA, 20 bp, Artificial Sequence
  chemically synthesized
aaaaaaaaactcagcttgga

SEQ ID NO: 12486 - DNA, 20 bp, Artificial Sequence
  chemically synthesized
aaaaaaaactcagcttggag

SEQ ID NO: 12487 - DNA, 20 bp, Artificial Sequence
  chemically synthesized
aactcagcttggagaggcct

SEQ ID NO: 12488 - DNA, 20 bp, Artificial Sequence
  chemically synthesized
agcttggagaggcctgagta

SEQ ID NO: 12489 - DNA, 20 bp, Artificial Sequence
  chemically synthesized
aaatgcataccattttactc

SEQ ID NO: 12490 - DNA, 20 bp, Artificial Sequence
  chemically synthesized
accattttactcaagattta

SEQ ID NO: 12491 - DNA, 20 bp, Artificial Sequence
  chemically synthesized
tgccttattctcctatctga

SEQ ID NO: 12492 - DNA, 20 bp, Artificial Sequence
  chemically synthesized
atctgaaagtcccgaattct

SEQ ID NO: 12493 - DNA, 20 bp, Artificial Sequence
  chemically synthesized
attctaagctttatttatct

SEQ ID NO: 12494 - DNA, 20 bp, Artificial Sequence
  chemically synthesized
ttctaagctttatttatctt

SEQ ID NO: 12495 - DNA, 20 bp, Artificial Sequence
  chemically synthesized
taagctttatttatcttagg

SEQ ID NO: 12496 - DNA, 20 bp, Artificial Sequence
  chemically synthesized
gctttatttatcttaggaag

SEQ ID NO: 12497 - DNA, 20 bp, Artificial Sequence
  chemically synthesized
cttgcttcctgcctataaaa

SEQ ID NO: 12498 - DNA, 20 bp, Artificial Sequence
  chemically synthesized
ttcctgcctataaaatagta

SEQ ID NO: 12499 - DNA, 20 bp, Artificial Sequence
  chemically synthesized
tcctgcctataaaatagtac

SEQ ID NO: 12500 - DNA, 20 bp, Artificial Sequence
  chemically synthesized
tataaaatagtacaggctca

SEQ ID NO: 12501 - DNA, 20 bp, Artificial Sequence
  chemically synthesized
caacttacatcactttaata

SEQ ID NO: 12502 - DNA, 20 bp, Artificial Sequence
  chemically synthesized
ttaataaagcctttcctacc

SEQ ID NO: 12503 - DNA, 20 bp, Artificial Sequence
  chemically synthesized
ttaaatgactaccttttatg

SEQ ID NO: 12504 - DNA, 20 bp, Artificial Sequence
  chemically synthesized
ggttgccaaacacattcttc

SEQ ID NO: 12505 - DNA, 20 bp, Artificial Sequence
  chemically synthesized
ttgccaaacacattcttcta

SEQ ID NO: 12506 - DNA, 20 bp, Artificial Sequence
  chemically synthesized
tatatctctttccttaatac

SEQ ID NO: 12507 - DNA, 20 bp, Artificial Sequence
  chemically synthesized
atatctctttccttaataca

SEQ ID NO: 12508 - DNA, 20 bp, Artificial Sequence
  chemically synthesized
gtttccttcctcatcataaa

SEQ ID NO: 12509 - DNA, 20 bp, Artificial Sequence
  chemically synthesized
cttcctcatcataaaaagaa

SEQ ID NO: 12510 - DNA, 20 bp, Artificial Sequence
  chemically synthesized
cctcatcataaaaagaaaag

SEQ ID NO: 12511 - DNA, 20 bp, Artificial Sequence
  chemically synthesized
cataaaaagaaaagcagact

SEQ ID NO: 12512 - DNA, 20 bp, Artificial Sequence
  chemically synthesized
aaagcagacttggaattgtg

SEQ ID NO: 12513 - DNA, 20 bp, Artificial Sequence
  chemically synthesized
ggaattgtgcagacgtgctt

SEQ ID NO: 12514 - DNA, 20 bp, Artificial Sequence
  chemically synthesized
aattgtgcagacgtgcttta

SEQ ID NO: 12515 - DNA, 20 bp, Artificial Sequence
  chemically synthesized
gcagacgtgctttagagaaa

SEQ ID NO: 12516 - DNA, 20 bp, Artificial Sequence
  chemically synthesized
cagacgtgctttagagaaat

SEQ ID NO: 12517 - DNA, 20 bp, Artificial Sequence
  chemically synthesized
cgtgctttagagaaatgggc

SEQ ID NO: 12518 - DNA, 20 bp, Artificial Sequence
  chemically synthesized
gtgctttagagaaatgggct

SEQ ID NO: 12519 - DNA, 20 bp, Artificial Sequence
  chemically synthesized
tgctttagagaaatgggctg

SEQ ID NO: 12520 - DNA, 20 bp, Artificial Sequence
  chemically synthesized
gctttagagaaatgggctgg

SEQ ID NO: 12521 - DNA, 20 bp, Artificial Sequence
  chemically synthesized
atgggctgggggtacacaca

SEQ ID NO: 12522 - DNA, 20 bp, Artificial Sequence
  chemically synthesized
gtacacacacagccgtcttc

SEQ ID NO: 12523 - DNA, 20 bp, Artificial Sequence
  chemically synthesized
cgtcttccagaacttcgctt

SEQ ID NO: 12524 - DNA, 20 bp, Artificial Sequence
  chemically synthesized
gtcttccagaacttcgcttc

SEQ ID NO: 12525 - DNA, 20 bp, Artificial Sequence
  chemically synthesized
tcttccagaacttcgcttca

SEQ ID NO: 12526 - DNA, 20 bp, Artificial Sequence
  chemically synthesized
cttccagaacttcgcttcag

SEQ ID NO: 12527 - DNA, 20 bp, Artificial Sequence
  chemically synthesized
acttcgcttcaggggcacct

SEQ ID NO: 12528 - DNA, 20 bp, Artificial Sequence
  chemically synthesized
cttcgcttcaggggcacctg

SEQ ID NO: 12529 - DNA, 20 bp, Artificial Sequence
  chemically synthesized
ttcgcttcaggggcacctga

SEQ ID NO: 12530 - DNA, 20 bp, Artificial Sequence
  chemically synthesized
cttcaggggcacctgagggc

SEQ ID NO: 12531 - DNA, 20 bp, Artificial Sequence
  chemically synthesized
tcaggggcacctgagggcca

SEQ ID NO: 12532 - DNA, 20 bp, Artificial Sequence
  chemically synthesized
gcacctgagggccagagcgt

SEQ ID NO: 12533 - DNA, 20 bp, Artificial Sequence
  chemically synthesized
gcgtcggaatttatgtgcaa

SEQ ID NO: 12534 - DNA, 20 bp, Artificial Sequence
  chemically synthesized
tcggaatttatgtgcaatgg

SEQ ID NO: 12535 - DNA, 20 bp, Artificial Sequence
  chemically synthesized
gtagaatgttaacttcacca

SEQ ID NO: 12536 - DNA, 20 bp, Artificial Sequence
  chemically synthesized
tagaatgttaacttcaccat

SEQ ID NO: 12537 - DNA, 20 bp, Artificial Sequence
  chemically synthesized
aattcattactgtgaattat

SEQ ID NO: 12538 - DNA, 20 bp, Artificial Sequence
  chemically synthesized
tcattactgtgaattatgag

SEQ ID NO: 12539 - DNA, 20 bp, Artificial Sequence
  chemically synthesized
attatgagaagtcgtgattc

SEQ ID NO: 12540 - DNA, 20 bp, Artificial Sequence
  chemically synthesized
agttactgacatctcacttt

SEQ ID NO: 12541 - DNA, 20 bp, Artificial Sequence
  chemically synthesized
gtgaccacactatttatgtt

SEQ ID NO: 12542 - DNA, 20 bp, Artificial Sequence
  chemically synthesized
ccacactatttatgttcagc

SEQ ID NO: 12543 - DNA, 20 bp, Artificial Sequence
  chemically synthesized
tatttatgttcagccagttc

SEQ ID NO: 12544 - DNA, 20 bp, Artificial Sequence
  chemically synthesized
atttatgttcagccagttcc

SEQ ID NO: 12545 - DNA, 20 bp, Artificial Sequence
  chemically synthesized
tttatgttcagccagttcca

SEQ ID NO: 12546 - DNA, 20 bp, Artificial Sequence
  chemically synthesized
atgttcagccagttccaggg

SEQ ID NO: 12547 - DNA, 20 bp, Artificial Sequence
  chemically synthesized
tgttcagccagttccagggt

SEQ ID NO: 12548 - DNA, 20 bp, Artificial Sequence
  chemically synthesized
agccagttccagggtgggaa

SEQ ID NO: 12549 - DNA, 20 bp, Artificial Sequence
  chemically synthesized
gccagttccagggtgggaac

SEQ ID NO: 12550 - DNA, 20 bp, Artificial Sequence
  chemically synthesized
caggtgattaaacacaatga

SEQ ID NO: 12551 - DNA, 20 bp, Artificial Sequence
  chemically synthesized
taaacacaatgaaagaaatc

SEQ ID NO: 12552 - DNA, 20 bp, Artificial Sequence
  chemically synthesized
ttgtaattattcatgcacga

SEQ ID NO: 12553 - DNA, 20 bp, Artificial Sequence
  chemically synthesized
tgtaattattcatgcacgaa

SEQ ID NO: 12554 - DNA, 20 bp, Artificial Sequence
  chemically synthesized
cacgaaaggtttacctcacc

SEQ ID NO: 12555 - DNA, 20 bp, Artificial Sequence
  chemically synthesized
acgaaaggtttacctcacct

SEQ ID NO: 12556 - DNA, 20 bp, Artificial Sequence
  chemically synthesized
ggtttacctcacctgggtca

SEQ ID NO: 12557 - DNA, 20 bp, Artificial Sequence
  chemically synthesized
tgtgcgcccattgaatatct

SEQ ID NO: 12558 - DNA, 20 bp, Artificial Sequence
  chemically synthesized
attgaatatcttagacatct

SEQ ID NO: 12559 - DNA, 20 bp, Artificial Sequence
  chemically synthesized
tgaatatcttagacatctta

SEQ ID NO: 12560 - DNA, 20 bp, Artificial Sequence
  chemically synthesized
aatatcttagacatcttaga

SEQ ID NO: 12561 - DNA, 20 bp, Artificial Sequence
  chemically synthesized
tcttagagagcttttcgtct

SEQ ID NO: 12562 - DNA, 20 bp, Artificial Sequence
  chemically synthesized
tcagttaaatgattgattat

SEQ ID NO: 12563 - DNA, 20 bp, Artificial Sequence
  chemically synthesized
atatattttaaatttgcttt

SEQ ID NO: 12564 - DNA, 20 bp, Artificial Sequence
  chemically synthesized
tttaaatttgcttttggttt

SEQ ID NO: 12565 - DNA, 20 bp, Artificial Sequence
  chemically synthesized
gcttttggttttggcttctc

SEQ ID NO: 12566 - DNA, 20 bp, Artificial Sequence
  chemically synthesized
cttttggttttggcttctct

SEQ ID NO: 12567 - DNA, 20 bp, Artificial Sequence
  chemically synthesized
gttctttaaaaaaataataa

SEQ ID NO: 12568 - DNA, 20 bp, Artificial Sequence
  chemically synthesized
aaaaataataacagaacctt

SEQ ID NO: 12569 - DNA, 20 bp, Artificial Sequence
  chemically synthesized
taacagaacctttagacaac

SEQ ID NO: 12570 - DNA, 20 bp, Artificial Sequence
  chemically synthesized
aacagaacctttagacaacc

SEQ ID NO: 12571 - DNA, 20 bp, Artificial Sequence
  chemically synthesized
acagaacctttagacaacca

SEQ ID NO: 12572 - DNA, 20 bp, Artificial Sequence
  chemically synthesized
agaacctttagacaaccagg

SEQ ID NO: 12573 - DNA, 20 bp, Artificial Sequence
  chemically synthesized
tttagacaaccagggagttc

SEQ ID NO: 12574 - DNA, 20 bp, Artificial Sequence
  chemically synthesized
atatctcttatttccctaca

SEQ ID NO: 12575 - DNA, 20 bp, Artificial Sequence
  chemically synthesized
cctacatagattcacaacta

SEQ ID NO: 12576 - DNA, 20 bp, Artificial Sequence
  chemically synthesized
acatagattcacaactatag

SEQ ID NO: 12577 - DNA, 20 bp, Artificial Sequence
  chemically synthesized
attcacaactatagcagtaa

SEQ ID NO: 12578 - DNA, 20 bp, Artificial Sequence
  chemically synthesized
taaaagtcttaactatatgt

SEQ ID NO: 12579 - DNA, 20 bp, Artificial Sequence
  chemically synthesized
aaaagtcttaactatatgta

SEQ ID NO: 12580 - DNA, 20 bp, Artificial Sequence
  chemically synthesized
tatatgtaaggccttccccc

SEQ ID NO: 12581 - DNA, 20 bp, Artificial Sequence
  chemically synthesized
aaggccttccccccagcatt

SEQ ID NO: 12582 - DNA, 20 bp, Artificial Sequence
  chemically synthesized
ttagattcctcctctaaata

SEQ ID NO: 12583 - DNA, 20 bp, Artificial Sequence
  chemically synthesized
agattcctcctctaaataca

SEQ ID NO: 12584 - DNA, 20 bp, Artificial Sequence
  chemically synthesized
gattcctcctctaaatacag

SEQ ID NO: 12585 - DNA, 20 bp, Artificial Sequence
  chemically synthesized
ctcctctaaatacagaggca

SEQ ID NO: 12586 - DNA, 20 bp, Artificial Sequence
  chemically synthesized
tacagaggcacagaattttt

SEQ ID NO: 12587 - DNA, 20 bp, Artificial Sequence
  chemically synthesized
gaggcacagaatttttgagc

SEQ ID NO: 12588 - DNA, 20 bp, Artificial Sequence
  chemically synthesized
atttttgagctggttaatct

SEQ ID NO: 12589 - DNA, 20 bp, Artificial Sequence
  chemically synthesized
ctaagactgaataacctatt

SEQ ID NO: 12590 - DNA, 20 bp, Artificial Sequence
  chemically synthesized
taagactgaataacctattt

SEQ ID NO: 12591 - DNA, 20 bp, Artificial Sequence
  chemically synthesized
gaataacctatttgggacct

SEQ ID NO: 12592 - DNA, 20 bp, Artificial Sequence
  chemically synthesized
aacctatttgggacctcagt

SEQ ID NO: 12593 - DNA, 20 bp, Artificial Sequence
  chemically synthesized
ctatttgggacctcagtaag

SEQ ID NO: 12594 - DNA, 20 bp, Artificial Sequence
  chemically synthesized
tgggacctcagtaagaagtg

SEQ ID NO: 12595 - DNA, 20 bp, Artificial Sequence
  chemically synthesized
tggttttaattcttgcttga

SEQ ID NO: 12596 - DNA, 20 bp, Artificial Sequence
  chemically synthesized
ctgtgttttgtcttttaaac

SEQ ID NO: 12597 - DNA, 20 bp, Artificial Sequence
  chemically synthesized
tgttttgtcttttaaacgag

SEQ ID NO: 12598 - DNA, 20 bp, Artificial Sequence
  chemically synthesized
aatacgatgttacatcacgc

SEQ ID NO: 12599 - DNA, 20 bp, Artificial Sequence
  chemically synthesized
cgcaagtgttactccatatt

SEQ ID NO: 12600 - DNA, 20 bp, Artificial Sequence
  chemically synthesized
ttactccatatttggtgatt

SEQ ID NO: 12601 - DNA, 20 bp, Artificial Sequence
  chemically synthesized
tccatatttggtgatttagc

SEQ ID NO: 12602 - DNA, 20 bp, Artificial Sequence
  chemically synthesized
ccatatttggtgatttagca

SEQ ID NO: 12603 - DNA, 20 bp, Artificial Sequence
  chemically synthesized
ttggtgatttagcaaggctt

SEQ ID NO: 12604 - DNA, 20 bp, Artificial Sequence
  chemically synthesized
agcaaggctttggatctccg

SEQ ID NO: 12605 - DNA, 20 bp, Artificial Sequence
  chemically synthesized
acttctgttcattttccttc

SEQ ID NO: 12606 - DNA, 20 bp, Artificial Sequence
  chemically synthesized
ttcattttccttccagtcac

SEQ ID NO: 12607 - DNA, 20 bp, Artificial Sequence
  chemically synthesized
tccagtcacaagacaacaca

SEQ ID NO: 12608 - DNA, 20 bp, Artificial Sequence
  chemically synthesized
cacaagacaacacatggaaa

SEQ ID NO: 12609 - DNA, 20 bp, Artificial Sequence
  chemically synthesized
tggtcattcccacatcctgc

SEQ ID NO: 12610 - DNA, 20 bp, Artificial Sequence
  chemically synthesized
ggtcattcccacatcctgct

SEQ ID NO: 12611 - DNA, 20 bp, Artificial Sequence
  chemically synthesized
gtcattcccacatcctgctg

SEQ ID NO: 12612 - DNA, 20 bp, Artificial Sequence
  chemically synthesized
tcattcccacatcctgctgg

SEQ ID NO: 12613 - DNA, 20 bp, Artificial Sequence
  chemically synthesized
cattcccacatcctgctggg

SEQ ID NO: 12614 - DNA, 20 bp, Artificial Sequence
  chemically synthesized
tcccacatcctgctgggggg

SEQ ID NO: 12615 - DNA, 20 bp, Artificial Sequence
  chemically synthesized
cccacatcctgctggggggt

SEQ ID NO: 12616 - DNA, 20 bp, Artificial Sequence
  chemically synthesized
ccacatcctgctggggggta

SEQ ID NO: 12617 - DNA, 20 bp, Artificial Sequence
  chemically synthesized
cacatcctgctggggggtag

SEQ ID NO: 12618 - DNA, 20 bp, Artificial Sequence
  chemically synthesized
catcctgctggggggtaggg

SEQ ID NO: 12619 - DNA, 20 bp, Artificial Sequence
  chemically synthesized
tcttcacctacatgtcacat

SEQ ID NO: 12620 - DNA, 20 bp, Artificial Sequence
  chemically synthesized
cttcacctacatgtcacata

SEQ ID NO: 12621 - DNA, 20 bp, Artificial Sequence
  chemically synthesized
catgtcacataaggtaaatg

SEQ ID NO: 12622 - DNA, 20 bp, Artificial Sequence
  chemically synthesized
gtcacataaggtaaatgtgg

SEQ ID NO: 12623 - DNA, 20 bp, Artificial Sequence
  chemically synthesized
aaggtaaatgtggtggattc

SEQ ID NO: 12624 - DNA, 20 bp, Artificial Sequence
  chemically synthesized
agaaatacactccacaaatg

SEQ ID NO: 12625 - DNA, 20 bp, Artificial Sequence
  chemically synthesized
ctccacaaatgcagcttccc

SEQ ID NO: 12626 - DNA, 20 bp, Artificial Sequence
  chemically synthesized
cacaaatgcagcttccctag

SEQ ID NO: 12627 - DNA, 20 bp, Artificial Sequence
  chemically synthesized
aaatgcagcttccctagcag

SEQ ID NO: 12628 - DNA, 20 bp, Artificial Sequence
  chemically synthesized
gcagatttcccatttcacta

SEQ ID NO: 12629 - DNA, 20 bp, Artificial Sequence
  chemically synthesized
cagatttcccatttcactaa

SEQ ID NO: 12630 - DNA, 20 bp, Artificial Sequence
  chemically synthesized
agatttcccatttcactaaa

SEQ ID NO: 12631 - DNA, 20 bp, Artificial Sequence
  chemically synthesized
ttcccatttcactaaaggga

SEQ ID NO: 12632 - DNA, 20 bp, Artificial Sequence
  chemically synthesized
tcactaaagggaaagtatct

SEQ ID NO: 12633 - DNA, 20 bp, Artificial Sequence
  chemically synthesized
aaagtatctgagtgctatca

SEQ ID NO: 12634 - DNA, 20 bp, Artificial Sequence
  chemically synthesized
tatctgagtgctatcacaga

SEQ ID NO: 12635 - DNA, 20 bp, Artificial Sequence
  chemically synthesized
atcacagaaagcactaaaaa

SEQ ID NO: 12636 - DNA, 20 bp, Artificial Sequence
  chemically synthesized
cagaaagcactaaaaaaaga

SEQ ID NO: 12637 - DNA, 20 bp, Artificial Sequence
  chemically synthesized
aagaaagaaaatgccatgtt

SEQ ID NO: 12638 - DNA, 20 bp, Artificial Sequence
  chemically synthesized
tggttttaatgatcaaattc

SEQ ID NO: 12639 - DNA, 20 bp, Artificial Sequence
  chemically synthesized
gttttaatgatcaaattcta

SEQ ID NO: 12640 - DNA, 20 bp, Artificial Sequence
  chemically synthesized
ttttaatgatcaaattctag

SEQ ID NO: 12641 - DNA, 20 bp, Artificial Sequence
  chemically synthesized
tttaatgatcaaattctaga

SEQ ID NO: 12642 - DNA, 20 bp, Artificial Sequence
  chemically synthesized
ttaatgatcaaattctagag

SEQ ID NO: 12643 - DNA, 20 bp, Artificial Sequence
  chemically synthesized
taatgatcaaattctagagg

SEQ ID NO: 12644 - DNA, 20 bp, Artificial Sequence
  chemically synthesized
atgatcaaattctagagggg

SEQ ID NO: 12645 - DNA, 20 bp, Artificial Sequence
  chemically synthesized
gatcaaattctagaggggga

SEQ ID NO: 12646 - DNA, 20 bp, Artificial Sequence
  chemically synthesized
atcaaattctagagggggag

SEQ ID NO: 12647 - DNA, 20 bp, Artificial Sequence
  chemically synthesized
caaattctagagggggagag

SEQ ID NO: 12648 - DNA, 20 bp, Artificial Sequence
  chemically synthesized
atatgacatttaatcccctc

SEQ ID NO: 12649 - DNA, 20 bp, Artificial Sequence
  chemically synthesized
tctagaccactgacctatta

SEQ ID NO: 12650 - DNA, 20 bp, Artificial Sequence
  chemically synthesized
cctattatggttcaactttg

SEQ ID NO: 12651 - DNA, 20 bp, Artificial Sequence
  chemically synthesized
gttcaactttgtggtcaaac

SEQ ID NO: 12652 - DNA, 20 bp, Artificial Sequence
  chemically synthesized
ttcaactttgtggtcaaact

SEQ ID NO: 12653 - DNA, 20 bp, Artificial Sequence
  chemically synthesized
actttgtggtcaaactaggt

SEQ ID NO: 12654 - DNA, 20 bp, Artificial Sequence
  chemically synthesized
tttgtggtcaaactaggtcg

SEQ ID NO: 12655 - DNA, 20 bp, Artificial Sequence
  chemically synthesized
tgtggtcaaactaggtcgga

SEQ ID NO: 12656 - DNA, 20 bp, Artificial Sequence
  chemically synthesized
tcaaactaggtcggagagac

SEQ ID NO: 12657 - DNA, 20 bp, Artificial Sequence
  chemically synthesized
taggtcggagagacaagttc

SEQ ID NO: 12658 - DNA, 20 bp, Artificial Sequence
  chemically synthesized
tgaacaaacctcttgccttt

SEQ ID NO: 12659 - DNA, 20 bp, Artificial Sequence
  chemically synthesized
gaacaaacctcttgcctttc

SEQ ID NO: 12660 - DNA, 20 bp, Artificial Sequence
  chemically synthesized
acaaacctcttgcctttcgg

SEQ ID NO: 12661 - DNA, 20 bp, Artificial Sequence
  chemically synthesized
acctcttgcctttcgggagc

SEQ ID NO: 12662 - DNA, 20 bp, Artificial Sequence
  chemically synthesized
cctcttgcctttcgggagct

SEQ ID NO: 12663 - DNA, 20 bp, Artificial Sequence
  chemically synthesized
cttgcctttcgggagctggg

SEQ ID NO: 12664 - DNA, 20 bp, Artificial Sequence
  chemically synthesized
gcctttcgggagctgggtgg

SEQ ID NO: 12665 - DNA, 20 bp, Artificial Sequence
  chemically synthesized
cctttcgggagctgggtggt

SEQ ID NO: 12666 - DNA, 20 bp, Artificial Sequence
  chemically synthesized
ttcgggagctgggtggtagg

SEQ ID NO: 12667 - DNA, 20 bp, Artificial Sequence
  chemically synthesized
ggagctgggtggtaggtaga

SEQ ID NO: 12668 - DNA, 20 bp, Artificial Sequence
  chemically synthesized
gctgggtggtaggtagatgg

SEQ ID NO: 12669 - DNA, 20 bp, Artificial Sequence
  chemically synthesized
ggtggtaggtagatggaaga

SEQ ID NO: 12670 - DNA, 20 bp, Artificial Sequence
  chemically synthesized
ggaagaaagcgatccaccaa

SEQ ID NO: 12671 - DNA, 20 bp, Artificial Sequence
  chemically synthesized
gaagaaagcgatccaccaac

SEQ ID NO: 12672 - DNA, 20 bp, Artificial Sequence
  chemically synthesized
aagcgatccaccaacaggca

SEQ ID NO: 12673 - DNA, 20 bp, Artificial Sequence
  chemically synthesized
gcatggcatgtctgtcatca

SEQ ID NO: 12674 - DNA, 20 bp, Artificial Sequence
  chemically synthesized
gacttttgtctaacatgctc

SEQ ID NO: 12675 - DNA, 20 bp, Artificial Sequence
  chemically synthesized
gctcaagcaaaaaatgtttt

SEQ ID NO: 12676 - DNA, 20 bp, Artificial Sequence
  chemically synthesized
ctcaagcaaaaaatgttttg

SEQ ID NO: 12677 - DNA, 20 bp, Artificial Sequence
  chemically synthesized
tcaagcaaaaaatgttttga

SEQ ID NO: 12678 - DNA, 20 bp, Artificial Sequence
  chemically synthesized
atgttttgagggtcactata

SEQ ID NO: 12679 - DNA, 20 bp, Artificial Sequence
  chemically synthesized
tagtgttactgtttatcact

SEQ ID NO: 12680 - DNA, 20 bp, Artificial Sequence
  chemically synthesized
gtgttactgtttatcactta

SEQ ID NO: 12681 - DNA, 20 bp, Artificial Sequence
  chemically synthesized
ttactgtttatcacttagag

SEQ ID NO: 12682 - DNA, 20 bp, Artificial Sequence
  chemically synthesized
tactgtttatcacttagaga

SEQ ID NO: 12683 - DNA, 20 bp, Artificial Sequence
  chemically synthesized
actgtttatcacttagagaa

SEQ ID NO: 12684 - DNA, 20 bp, Artificial Sequence
  chemically synthesized
tcacttagagaagggaattt

SEQ ID NO: 12685 - DNA, 20 bp, Artificial Sequence
  chemically synthesized
gggaatttaagtcccactgc

SEQ ID NO: 12686 - DNA, 20 bp, Artificial Sequence
  chemically synthesized
cctttaattccttttccctt

SEQ ID NO: 12687 - DNA, 20 bp, Artificial Sequence
  chemically synthesized
tccttttcccttgagctgcc

SEQ ID NO: 12688 - DNA, 20 bp, Artificial Sequence
  chemically synthesized
tgccgagaaacccacacacc

SEQ ID NO: 12689 - DNA, 20 bp, Artificial Sequence
  chemically synthesized
ctccctgctaaaattaacca

SEQ ID NO: 12690 - DNA, 20 bp, Artificial Sequence
  chemically synthesized
tccctgctaaaattaaccaa

SEQ ID NO: 12691 - DNA, 20 bp, Artificial Sequence
  chemically synthesized
cctgctaaaattaaccaaag

SEQ ID NO: 12692 - DNA, 20 bp, Artificial Sequence
  chemically synthesized
ctgctaaaattaaccaaagg

SEQ ID NO: 12693 - DNA, 20 bp, Artificial Sequence
  chemically synthesized
tgctaaaattaaccaaagga

SEQ ID NO: 12694 - DNA, 20 bp, Artificial Sequence
  chemically synthesized
ctaaaattaaccaaaggagg

SEQ ID NO: 12695 - DNA, 20 bp, Artificial Sequence
  chemically synthesized
taaaattaaccaaaggaggg

SEQ ID NO: 12696 - DNA, 20 bp, Artificial Sequence
  chemically synthesized
aaaattaaccaaaggaggga

SEQ ID NO: 12697 - DNA, 20 bp, Artificial Sequence
  chemically synthesized
atacgtgtgtgtatttttcc

SEQ ID NO: 12698 - DNA, 20 bp, Artificial Sequence
  chemically synthesized
aaaatttttacattgtgtta

SEQ ID NO: 12699 - DNA, 20 bp, Artificial Sequence
  chemically synthesized
atttttacattgtgttatag

SEQ ID NO: 12700 - DNA, 20 bp, Artificial Sequence
  chemically synthesized
acattgtgttatagcagaaa

SEQ ID NO: 12701 - DNA, 20 bp, Artificial Sequence
  chemically synthesized
ttgtgttatagcagaaacag

SEQ ID NO: 12702 - DNA, 20 bp, Artificial Sequence
  chemically synthesized
gtgttatagcagaaacagtg

SEQ ID NO: 12703 - DNA, 20 bp, Artificial Sequence
  chemically synthesized
atagcagaaacagtggagtc

SEQ ID NO: 12704 - DNA, 20 bp, Artificial Sequence
  chemically synthesized
agaaacagtggagtctggac

SEQ ID NO: 12705 - DNA, 20 bp, Artificial Sequence
  chemically synthesized
agtctggactggacatttgt

SEQ ID NO: 12706 - DNA, 20 bp, Artificial Sequence
  chemically synthesized
gtctggactggacatttgta

SEQ ID NO: 12707 - DNA, 20 bp, Artificial Sequence
  chemically synthesized
tctggactggacatttgtaa

SEQ ID NO: 12708 - DNA, 20 bp, Artificial Sequence
  chemically synthesized
acatttgtaagggtgacatg

SEQ ID NO: 12709 - DNA, 20 bp, Artificial Sequence
  chemically synthesized
tgtaaaccacaaacaaaatc

SEQ ID NO: 12710 - DNA, 20 bp, Artificial Sequence
  chemically synthesized
tacatctgtcaaaaccacat

SEQ ID NO: 12711 - DNA, 20 bp, Artificial Sequence
  chemically synthesized
catctgtcaaaaccacatca

SEQ ID NO: 12712 - DNA, 20 bp, Artificial Sequence
  chemically synthesized
gtcaaaaccacatcagagac

SEQ ID NO: 12713 - DNA, 20 bp, Artificial Sequence
  chemically synthesized
caaaaccacatcagagacaa

SEQ ID NO: 12714 - DNA, 20 bp, Artificial Sequence
  chemically synthesized
aaaccacatcagagacaaga

SEQ ID NO: 12715 - DNA, 20 bp, Artificial Sequence
  chemically synthesized
accacatcagagacaagaga

SEQ ID NO: 12716 - DNA, 20 bp, Artificial Sequence
  chemically synthesized
atcagagacaagagagagca

SEQ ID NO: 12717 - DNA, 20 bp, Artificial Sequence
  chemically synthesized
cagagacaagagagagcaca

SEQ ID NO: 12718 - DNA, 20 bp, Artificial Sequence
  chemically synthesized
agacaagagagagcacagag

SEQ ID NO: 12719 - DNA, 20 bp, Artificial Sequence
  chemically synthesized
acagagaagcatttatcatt

SEQ ID NO: 12720 - DNA, 20 bp, Artificial Sequence
  chemically synthesized
gaagcatttatcatttagct

SEQ ID NO: 12721 - DNA, 20 bp, Artificial Sequence
  chemically synthesized
aagcatttatcatttagctg

SEQ ID NO: 12722 - DNA, 20 bp, Artificial Sequence
  chemically synthesized
gcatttatcatttagctgag

SEQ ID NO: 12723 - DNA, 20 bp, Artificial Sequence
  chemically synthesized
catttatcatttagctgagg

SEQ ID NO: 12724 - DNA, 20 bp, Artificial Sequence
  chemically synthesized
ttatcatttagctgaggagg

SEQ ID NO: 12725 - DNA, 20 bp, Artificial Sequence
  chemically synthesized
tatcatttagctgaggaggc

SEQ ID NO: 12726 - DNA, 20 bp, Artificial Sequence
  chemically synthesized
ttagctgaggaggcaggctg

SEQ ID NO: 12727 - DNA, 20 bp, Artificial Sequence
  chemically synthesized
tagctgaggaggcaggctgc

SEQ ID NO: 12728 - DNA, 20 bp, Artificial Sequence
  chemically synthesized
agctgaggaggcaggctgca

SEQ ID NO: 12729 - DNA, 20 bp, Artificial Sequence
  chemically synthesized
ctgaggaggcaggctgcagg

SEQ ID NO: 12730 - DNA, 20 bp, Artificial Sequence
  chemically synthesized
aggaggcaggctgcagggag

SEQ ID NO: 12731 - DNA, 20 bp, Artificial Sequence
  chemically synthesized
aacatgcccttaaacttttc

SEQ ID NO: 12732 - DNA, 20 bp, Artificial Sequence
  chemically synthesized
tgcccttaaacttttcgagt

SEQ ID NO: 12733 - DNA, 20 bp, Artificial Sequence
  chemically synthesized
gtaagcatgtctgtgcgctt

SEQ ID NO: 12734 - DNA, 20 bp, Artificial Sequence
  chemically synthesized
agcaactgccctctctactc

SEQ ID NO: 12735 - DNA, 20 bp, Artificial Sequence
  chemically synthesized
ctgccctctctactctggcc

SEQ ID NO: 12736 - DNA, 20 bp, Artificial Sequence
  chemically synthesized
cctctctactctggcctggc

SEQ ID NO: 12737 - DNA, 20 bp, Artificial Sequence
  chemically synthesized
ctggcctggccagtcgaaaa

SEQ ID NO: 12738 - DNA, 20 bp, Artificial Sequence
  chemically synthesized
cagtcgaaaatggcatctta

SEQ ID NO: 12739 - DNA, 20 bp, Artificial Sequence
  chemically synthesized
gaaaatggcatcttaaagtc

SEQ ID NO: 12740 - DNA, 20 bp, Artificial Sequence
  chemically synthesized
aaaatggcatcttaaagtca

SEQ ID NO: 12741 - DNA, 20 bp, Artificial Sequence
  chemically synthesized
gcatcttaaagtcaaggtca

SEQ ID NO: 12742 - DNA, 20 bp, Artificial Sequence
  chemically synthesized
gtcatggtgtcatcccacca

SEQ ID NO: 12743 - DNA, 20 bp, Artificial Sequence
  chemically synthesized
tcatggtgtcatcccaccac

SEQ ID NO: 12744 - DNA, 20 bp, Artificial Sequence
  chemically synthesized
catggtgtcatcccaccacg

SEQ ID NO: 12745 - DNA, 20 bp, Artificial Sequence
  chemically synthesized
cacggggctgtgtttaatta

SEQ ID NO: 12746 - DNA, 20 bp, Artificial Sequence
  chemically synthesized
tgtttaattacagccccatc

SEQ ID NO: 12747 - DNA, 20 bp, Artificial Sequence
  chemically synthesized
gtttaattacagccccatcc

SEQ ID NO: 12748 - DNA, 20 bp, Artificial Sequence
  chemically synthesized
tacagccccatccgggctga

SEQ ID NO: 12749 - DNA, 20 bp, Artificial Sequence
  chemically synthesized
atccgggctgacagccaata

SEQ ID NO: 12750 - DNA, 20 bp, Artificial Sequence
  chemically synthesized
ctgacagccaatatggatcc

SEQ ID NO: 12751 - DNA, 20 bp, Artificial Sequence
  chemically synthesized
tgacagccaatatggatcca

SEQ ID NO: 12752 - DNA, 20 bp, Artificial Sequence
  chemically synthesized
agccaatatggatccaaggc

SEQ ID NO: 12753 - DNA, 20 bp, Artificial Sequence
  chemically synthesized
tggatccaaggctagccctg

SEQ ID NO: 12754 - DNA, 20 bp, Artificial Sequence
  chemically synthesized
ccaaggctagccctgaagct

SEQ ID NO: 12755 - DNA, 20 bp, Artificial Sequence
  chemically synthesized
accacctccaactaccctgc

SEQ ID NO: 12756 - DNA, 20 bp, Artificial Sequence
  chemically synthesized
cctgccagcccactctactt

SEQ ID NO: 12757 - DNA, 20 bp, Artificial Sequence
  chemically synthesized
ctgccagcccactctacttc

SEQ ID NO: 12758 - DNA, 20 bp, Artificial Sequence
  chemically synthesized
tgccagcccactctacttca

SEQ ID NO: 12759 - DNA, 20 bp, Artificial Sequence
  chemically synthesized
cagcccactctacttcaggg

SEQ ID NO: 12760 - DNA, 20 bp, Artificial Sequence
  chemically synthesized
ctctacttcagggaagcctt

SEQ ID NO: 12761 - DNA, 20 bp, Artificial Sequence
  chemically synthesized
ttcagggaagccttgagaac

SEQ ID NO: 12762 - DNA, 20 bp, Artificial Sequence
  chemically synthesized
tgagaacgagctgaacccct

SEQ ID NO: 12763 - DNA, 20 bp, Artificial Sequence
  chemically synthesized
gagaacgagctgaaccccta

SEQ ID NO: 12764 - DNA, 20 bp, Artificial Sequence
  chemically synthesized
gaacgagctgaacccctaag

SEQ ID NO: 12765 - DNA, 20 bp, Artificial Sequence
  chemically synthesized
aacgagctgaacccctaagg

SEQ ID NO: 12766 - DNA, 20 bp, Artificial Sequence
  chemically synthesized
gctgaacccctaaggaggcc

SEQ ID NO: 12767 - DNA, 20 bp, Artificial Sequence
  chemically synthesized
aacccctaaggaggcctggc

SEQ ID NO: 12768 - DNA, 20 bp, Artificial Sequence
  chemically synthesized
gaggcctggccagatgttct

SEQ ID NO: 12769 - DNA, 20 bp, Artificial Sequence
  chemically synthesized
ccagatgttctgagtcaaac

SEQ ID NO: 12770 - DNA, 20 bp, Artificial Sequence
  chemically synthesized
ttctgagtcaaacaagtcat

SEQ ID NO: 12771 - DNA, 20 bp, Artificial Sequence
  chemically synthesized
ctgaactgcaaatgcctata

SEQ ID NO: 12772 - DNA, 20 bp, Artificial Sequence
  chemically synthesized
tttgcctctgacacgtcacc

SEQ ID NO: 12773 - DNA, 20 bp, Artificial Sequence
  chemically synthesized
ttgcctctgacacgtcacca

SEQ ID NO: 12774 - DNA, 20 bp, Artificial Sequence
  chemically synthesized
ctctgacacgtcaccaaggc

SEQ ID NO: 12775 - DNA, 20 bp, Artificial Sequence
  chemically synthesized
cacgtcaccaaggctggaaa

SEQ ID NO: 12776 - DNA, 20 bp, Artificial Sequence
  chemically synthesized
ccaaggctggaaatggacaa

SEQ ID NO: 12777 - DNA, 20 bp, Artificial Sequence
  chemically synthesized
aggctggaaatggacaatgg

SEQ ID NO: 12778 - DNA, 20 bp, Artificial Sequence
  chemically synthesized
tggaaatggacaatggaagc

SEQ ID NO: 12779 - DNA, 20 bp, Artificial Sequence
  chemically synthesized
atggacaatggaagctggac

SEQ ID NO: 12780 - DNA, 20 bp, Artificial Sequence
  chemically synthesized
tggacaatggaagctggact

SEQ ID NO: 12781 - DNA, 20 bp, Artificial Sequence
  chemically synthesized
aatggaagctggactaggtg

SEQ ID NO: 12782 - DNA, 20 bp, Artificial Sequence
  chemically synthesized
aagctggactaggtgtagta

SEQ ID NO: 12783 - DNA, 20 bp, Artificial Sequence
  chemically synthesized
aaagctcaatacttcaaaat

SEQ ID NO: 12784 - DNA, 20 bp, Artificial Sequence
  chemically synthesized
gctcaatacttcaaaatgag

SEQ ID NO: 12785 - DNA, 20 bp, Artificial Sequence
  chemically synthesized
ctcaatacttcaaaatgaga

SEQ ID NO: 12786 - DNA, 20 bp, Artificial Sequence
  chemically synthesized
aatacttcaaaatgagaagg

SEQ ID NO: 12787 - DNA, 20 bp, Artificial Sequence
  chemically synthesized
atacttcaaaatgagaaggt

SEQ ID NO: 12788 - DNA, 20 bp, Artificial Sequence
  chemically synthesized
tacttcaaaatgagaaggtg

SEQ ID NO: 12789 - DNA, 20 bp, Artificial Sequence
  chemically synthesized
tcaaaatgagaaggtgggga

SEQ ID NO: 12790 - DNA, 20 bp, Artificial Sequence
  chemically synthesized
caaaatgagaaggtggggat

SEQ ID NO: 12791 - DNA, 20 bp, Artificial Sequence
  chemically synthesized
aaaatgagaaggtggggatg

SEQ ID NO: 12792 - DNA, 20 bp, Artificial Sequence
  chemically synthesized
atgagaaggtggggatgggg

SEQ ID NO: 12793 - DNA, 20 bp, Artificial Sequence
  chemically synthesized
aaggtggggatggggaagaa

SEQ ID NO: 12794 - DNA, 20 bp, Artificial Sequence
  chemically synthesized
gaaaagaaatccaaaatcga

SEQ ID NO: 12795 - DNA, 20 bp, Artificial Sequence
  chemically synthesized
aaatccaaaatcgacagatc

SEQ ID NO: 12796 - DNA, 20 bp, Artificial Sequence
  chemically synthesized
atccaaaatcgacagatcca

SEQ ID NO: 12797 - DNA, 20 bp, Artificial Sequence
  chemically synthesized
ccaaaatcgacagatccaga

SEQ ID NO: 12798 - DNA, 20 bp, Artificial Sequence
  chemically synthesized
aaatcgacagatccagagag

SEQ ID NO: 12799 - DNA, 20 bp, Artificial Sequence
  chemically synthesized
aatcgacagatccagagaga

SEQ ID NO: 12800 - DNA, 20 bp, Artificial Sequence
  chemically synthesized
tatcctgcctacatctgatt

SEQ ID NO: 12801 - DNA, 20 bp, Artificial Sequence
  chemically synthesized
ctgcctacatctgattcagt

SEQ ID NO: 12802 - DNA, 20 bp, Artificial Sequence
  chemically synthesized
tgcctacatctgattcagtg

SEQ ID NO: 12803 - DNA, 20 bp, Artificial Sequence
  chemically synthesized
ctacatctgattcagtgagg

SEQ ID NO: 12804 - DNA, 20 bp, Artificial Sequence
  chemically synthesized
atatttatttttctgtgttc

SEQ ID NO: 12805 - DNA, 20 bp, Artificial Sequence
  chemically synthesized
tttttctgtgttctggacgt

SEQ ID NO: 12806 - DNA, 20 bp, Artificial Sequence
  chemically synthesized
tgtgttctggacgtaagcaa

SEQ ID NO: 12807 - DNA, 20 bp, Artificial Sequence
  chemically synthesized
aaatgattattttaacatta

SEQ ID NO: 12808 - DNA, 20 bp, Artificial Sequence
  chemically synthesized
aatgattattttaacattac

SEQ ID NO: 12809 - DNA, 20 bp, Artificial Sequence
  chemically synthesized
atgattattttaacattaca

SEQ ID NO: 12810 - DNA, 20 bp, Artificial Sequence
  chemically synthesized
ttaacattacagggctgtca

SEQ ID NO: 12811 - DNA, 20 bp, Artificial Sequence
  chemically synthesized
cattacagggctgtcatgga

SEQ ID NO: 12812 - DNA, 20 bp, Artificial Sequence
  chemically synthesized
ggctgtcatggacagtcaca

SEQ ID NO: 12813 - DNA, 20 bp, Artificial Sequence
  chemically synthesized
ctgtcatggacagtcacata

SEQ ID NO: 12814 - DNA, 20 bp, Artificial Sequence
  chemically synthesized
tggacagtcacatagagtaa

SEQ ID NO: 12815 - DNA, 20 bp, Artificial Sequence
  chemically synthesized
gacagtcacatagagtaata

SEQ ID NO: 12816 - DNA, 20 bp, Artificial Sequence
  chemically synthesized
gtcacatagagtaatagaga

SEQ ID NO: 12817 - DNA, 20 bp, Artificial Sequence
  chemically synthesized
cttcacaactccttactgct

SEQ ID NO: 12818 - DNA, 20 bp, Artificial Sequence
  chemically synthesized
aactccttactgcttggcta

SEQ ID NO: 12819 - DNA, 20 bp, Artificial Sequence
  chemically synthesized
acagcacctctgaaaatgaa

SEQ ID NO: 12820 - DNA, 20 bp, Artificial Sequence
  chemically synthesized
atgaaaagaaaacatgcaaa

SEQ ID NO: 12821 - DNA, 20 bp, Artificial Sequence
  chemically synthesized
acctgctatgtgttcctgtt

SEQ ID NO: 12822 - DNA, 20 bp, Artificial Sequence
  chemically synthesized
cctgctatgtgttcctgttt

SEQ ID NO: 12823 - DNA, 20 bp, Artificial Sequence
  chemically synthesized
ctgctatgtgttcctgtttg

SEQ ID NO: 12824 - DNA, 20 bp, Artificial Sequence
  chemically synthesized
ctgtttggggcaaattcctc

SEQ ID NO: 12825 - DNA, 20 bp, Artificial Sequence
  chemically synthesized
gataaacaatcgtcatcctc

SEQ ID NO: 12826 - DNA, 20 bp, Artificial Sequence
  chemically synthesized
cgtcatcctctggcgtgacc

SEQ ID NO: 12827 - DNA, 20 bp, Artificial Sequence
  chemically synthesized
gacctggatgccaacctcca

SEQ ID NO: 12828 - DNA, 20 bp, Artificial Sequence
  chemically synthesized
acctggatgccaacctccac

SEQ ID NO: 12829 - DNA, 20 bp, Artificial Sequence
  chemically synthesized
gatgccaacctccacgggat

SEQ ID NO: 12830 - DNA, 20 bp, Artificial Sequence
  chemically synthesized
gatgcttttttcatctcgat

SEQ ID NO: 12831 - DNA, 20 bp, Artificial Sequence
  chemically synthesized
ttttttcatctcgattggtg

SEQ ID NO: 12832 - DNA, 20 bp, Artificial Sequence
  chemically synthesized
tttttcatctcgattggtga

SEQ ID NO: 12833 - DNA, 20 bp, Artificial Sequence
  chemically synthesized
ttttcatctcgattggtgaa

SEQ ID NO: 12834 - DNA, 20 bp, Artificial Sequence
  chemically synthesized
tttcatctcgattggtgaag

SEQ ID NO: 12835 - DNA, 20 bp, Artificial Sequence
  chemically synthesized
catctcgattggtgaagggg

SEQ ID NO: 12836 - DNA, 20 bp, Artificial Sequence
  chemically synthesized
atctcgattggtgaagggga

SEQ ID NO: 12837 - DNA, 20 bp, Artificial Sequence
  chemically synthesized
tcgattggtgaaggggaagg

SEQ ID NO: 12838 - DNA, 20 bp, Artificial Sequence
  chemically synthesized
aggggaaggtggcttatcca

SEQ ID NO: 12839 - DNA, 20 bp, Artificial Sequence
  chemically synthesized
gcttatccacagctttttct

SEQ ID NO: 12840 - DNA, 20 bp, Artificial Sequence
  chemically synthesized
tatccacagctttttctaag

SEQ ID NO: 12841 - DNA, 20 bp, Artificial Sequence
  chemically synthesized
tccacagctttttctaagca

SEQ ID NO: 12842 - DNA, 20 bp, Artificial Sequence
  chemically synthesized
ccacagctttttctaagcag

SEQ ID NO: 12843 - DNA, 20 bp, Artificial Sequence
  chemically synthesized
cgtttgtgctcgataaaaat

SEQ ID NO: 12844 - DNA, 20 bp, Artificial Sequence
  chemically synthesized
aaaataagaatgtcccccaa

SEQ ID NO: 12845 - DNA, 20 bp, Artificial Sequence
  chemically synthesized
aaataagaatgtcccccaat

SEQ ID NO: 12846 - DNA, 20 bp, Artificial Sequence
  chemically synthesized
taagaatgtcccccaatggg

SEQ ID NO: 12847 - DNA, 20 bp, Artificial Sequence
  chemically synthesized
cccccaatgggaagttcatc

SEQ ID NO: 12848 - DNA, 20 bp, Artificial Sequence
  chemically synthesized
agttcatctggcactgccca

SEQ ID NO: 12849 - DNA, 20 bp, Artificial Sequence
  chemically synthesized
gttcatctggcactgcccac

SEQ ID NO: 12850 - DNA, 20 bp, Artificial Sequence
  chemically synthesized
atctggcactgcccacaggt

SEQ ID NO: 12851 - DNA, 20 bp, Artificial Sequence
  chemically synthesized
tctggcactgcccacaggtg

SEQ ID NO: 12852 - DNA, 20 bp, Artificial Sequence
  chemically synthesized
tggcactgcccacaggtgag

SEQ ID NO: 12853 - DNA, 20 bp, Artificial Sequence
  chemically synthesized
ggcactgcccacaggtgagg

SEQ ID NO: 12854 - DNA, 20 bp, Artificial Sequence
  chemically synthesized
aggaggtcatgatccccttc

SEQ ID NO: 12855 - DNA, 20 bp, Artificial Sequence
  chemically synthesized
gaggtcatgatccccttctg

SEQ ID NO: 12856 - DNA, 20 bp, Artificial Sequence
  chemically synthesized
tccccttctggagctcccaa

SEQ ID NO: 12857 - DNA, 20 bp, Artificial Sequence
  chemically synthesized
ccccttctggagctcccaac

SEQ ID NO: 12858 - DNA, 20 bp, Artificial Sequence
  chemically synthesized
ctggagctcccaacgggccg

SEQ ID NO: 12859 - DNA, 20 bp, Artificial Sequence
  chemically synthesized
gctcccaacgggccgtggtc

SEQ ID NO: 12860 - DNA, 20 bp, Artificial Sequence
  chemically synthesized
tggtctggttcatcatctgt

SEQ ID NO: 12861 - DNA, 20 bp, Artificial Sequence
  chemically synthesized
tggttcatcatctgtaagaa

SEQ ID NO: 12862 - DNA, 20 bp, Artificial Sequence
  chemically synthesized
tcatctgtaagaatggcttc

SEQ ID NO: 12863 - DNA, 20 bp, Artificial Sequence
  chemically synthesized
atctgtaagaatggcttcaa

SEQ ID NO: 12864 - DNA, 20 bp, Artificial Sequence
  chemically synthesized
tctgtaagaatggcttcaag

SEQ ID NO: 12865 - DNA, 20 bp, Artificial Sequence
  chemically synthesized
aagaatggcttcaagaggct

SEQ ID NO: 12866 - DNA, 20 bp, Artificial Sequence
  chemically synthesized
ggcttcaagaggctcggctg

SEQ ID NO: 12867 - DNA, 20 bp, Artificial Sequence
  chemically synthesized
tcaagaggctcggctgtggt

SEQ ID NO: 12868 - DNA, 20 bp, Artificial Sequence
  chemically synthesized
aagaggctcggctgtggttg

SEQ ID NO: 12869 - DNA, 20 bp, Artificial Sequence
  chemically synthesized
ggctgtggttggagaaacaa

SEQ ID NO: 12870 - DNA, 20 bp, Artificial Sequence
  chemically synthesized
agaaacaaaagcacaattat

SEQ ID NO: 12871 - DNA, 20 bp, Artificial Sequence
  chemically synthesized
aaacaaaagcacaattatta

SEQ ID NO: 12872 - DNA, 20 bp, Artificial Sequence
  chemically synthesized
aagcacaattattagagtgc

SEQ ID NO: 12873 - DNA, 20 bp, Artificial Sequence
  chemically synthesized
gcacaattattagagtgcca

SEQ ID NO: 12874 - DNA, 20 bp, Artificial Sequence
  chemically synthesized
acaattattagagtgccaga

SEQ ID NO: 12875 - DNA, 20 bp, Artificial Sequence
  chemically synthesized
caattattagagtgccagag

SEQ ID NO: 12876 - DNA, 20 bp, Artificial Sequence
  chemically synthesized
tattagagtgccagagagga

SEQ ID NO: 12877 - DNA, 20 bp, Artificial Sequence
  chemically synthesized
agagtgccagagaggacaga

SEQ ID NO: 12878 - DNA, 20 bp, Artificial Sequence
  chemically synthesized
gagtgccagagaggacagaa

SEQ ID NO: 12879 - DNA, 20 bp, Artificial Sequence
  chemically synthesized
agtgccagagaggacagaaa

SEQ ID NO: 12880 - DNA, 20 bp, Artificial Sequence
  chemically synthesized
gtgccagagaggacagaaag

SEQ ID NO: 12881 - DNA, 20 bp, Artificial Sequence
  chemically synthesized
gccagagaggacagaaaggg

SEQ ID NO: 12882 - DNA, 20 bp, Artificial Sequence
  chemically synthesized
agagaggacagaaaggggag

SEQ ID NO: 12883 - DNA, 20 bp, Artificial Sequence
  chemically synthesized
ccatcccaccacatcatgta

SEQ ID NO: 12884 - DNA, 20 bp, Artificial Sequence
  chemically synthesized
cacatcatgtaaagtgtttc

SEQ ID NO: 12885 - DNA, 20 bp, Artificial Sequence
  chemically synthesized
acatcatgtaaagtgtttct

SEQ ID NO: 12886 - DNA, 20 bp, Artificial Sequence
  chemically synthesized
aggcttctctatataatacc

SEQ ID NO: 12887 - DNA, 20 bp, Artificial Sequence
  chemically synthesized
atataatacccagaaaatgt

SEQ ID NO: 12888 - DNA, 20 bp, Artificial Sequence
  chemically synthesized
agaaaatgtgagcatacaaa

SEQ ID NO: 12889 - DNA, 20 bp, Artificial Sequence
  chemically synthesized
tgtgagcatacaaaaagtac

SEQ ID NO: 12890 - DNA, 20 bp, Artificial Sequence
  chemically synthesized
gtgagcatacaaaaagtaca

SEQ ID NO: 12891 - DNA, 20 bp, Artificial Sequence
  chemically synthesized
acaaaaagtacaaggatgtg

SEQ ID NO: 12892 - DNA, 20 bp, Artificial Sequence
  chemically synthesized
caaaaagtacaaggatgtga

SEQ ID NO: 12893 - DNA, 20 bp, Artificial Sequence
  chemically synthesized
aggatgtgaaggttatcaac

SEQ ID NO: 12894 - DNA, 20 bp, Artificial Sequence
  chemically synthesized
gatgtgaaggttatcaacca

SEQ ID NO: 12895 - DNA, 20 bp, Artificial Sequence
  chemically synthesized
tgtgaaggttatcaaccaga

SEQ ID NO: 12896 - DNA, 20 bp, Artificial Sequence
  chemically synthesized
cagagagcaaatttgtcaat

SEQ ID NO: 12897 - DNA, 20 bp, Artificial Sequence
  chemically synthesized
agagagcaaatttgtcaatg

SEQ ID NO: 12898 - DNA, 20 bp, Artificial Sequence
  chemically synthesized
ggcaaatcatcacatatgta

SEQ ID NO: 12899 - DNA, 20 bp, Artificial Sequence
  chemically synthesized
catcacatatgtaaagaaaa

SEQ ID NO: 12900 - DNA, 20 bp, Artificial Sequence
  chemically synthesized
cagtcttccttgcataactc

SEQ ID NO: 12901 - DNA, 20 bp, Artificial Sequence
  chemically synthesized
gtcttccttgcataactcca

SEQ ID NO: 12902 - DNA, 20 bp, Artificial Sequence
  chemically synthesized
tatacccatgcacacaccca

SEQ ID NO: 12903 - DNA, 20 bp, Artificial Sequence
  chemically synthesized
cccacagcaacaaatgtgtc

SEQ ID NO: 12904 - DNA, 20 bp, Artificial Sequence
  chemically synthesized
aacaaatgtgtctggtttgt

SEQ ID NO: 12905 - DNA, 20 bp, Artificial Sequence
  chemically synthesized
atgtgtctggtttgtaagtt

SEQ ID NO: 12906 - DNA, 20 bp, Artificial Sequence
  chemically synthesized
gtctggtttgtaagtttaga

SEQ ID NO: 12907 - DNA, 20 bp, Artificial Sequence
  chemically synthesized
tagaaagaatgctacttaaa

SEQ ID NO: 12908 - DNA, 20 bp, Artificial Sequence
  chemically synthesized
tgctacttaaatagttaaca

SEQ ID NO: 12909 - DNA, 20 bp, Artificial Sequence
  chemically synthesized
gctacttaaatagttaacac

SEQ ID NO: 12910 - DNA, 20 bp, Artificial Sequence
  chemically synthesized
ctacttaaatagttaacaca

SEQ ID NO: 12911 - DNA, 20 bp, Artificial Sequence
  chemically synthesized
tagttaacacagggaacata

SEQ ID NO: 12912 - DNA, 20 bp, Artificial Sequence
  chemically synthesized
taacacagggaacataaaga

SEQ ID NO: 12913 - DNA, 20 bp, Artificial Sequence
  chemically synthesized
aaagcttaaataataactac

SEQ ID NO: 12914 - DNA, 20 bp, Artificial Sequence
  chemically synthesized
ataataactacaagaaaaac

SEQ ID NO: 12915 - DNA, 20 bp, Artificial Sequence
  chemically synthesized
gaaaaactggttaaaaaaaa

SEQ ID NO: 12916 - DNA, 20 bp, Artificial Sequence
  chemically synthesized
aaactggttaaaaaaaaaag

SEQ ID NO: 12917 - DNA, 20 bp, Artificial Sequence
  chemically synthesized
tggttaaaaaaaaaagtgga

SEQ ID NO: 12918 - DNA, 20 bp, Artificial Sequence
  chemically synthesized
tttcttttttcctatacacc

SEQ ID NO: 12919 - DNA, 20 bp, Artificial Sequence
  chemically synthesized
ccaagttgtccattgtgcca

SEQ ID NO: 12920 - DNA, 20 bp, Artificial Sequence
  chemically synthesized
tccattgtgccaaagaatga

SEQ ID NO: 12921 - DNA, 20 bp, Artificial Sequence
  chemically synthesized
ccattgtgccaaagaatgaa

SEQ ID NO: 12922 - DNA, 20 bp, Artificial Sequence
  chemically synthesized
attgtgccaaagaatgaaag

SEQ ID NO: 12923 - DNA, 20 bp, Artificial Sequence
  chemically synthesized
tgtgccaaagaatgaaagga

SEQ ID NO: 12924 - DNA, 20 bp, Artificial Sequence
  chemically synthesized
gtgccaaagaatgaaaggag

SEQ ID NO: 12925 - DNA, 20 bp, Artificial Sequence
  chemically synthesized
gtgtgaatgtatatactcct

SEQ ID NO: 12926 - DNA, 20 bp, Artificial Sequence
  chemically synthesized
tgtatatactcctaagtaaa

SEQ ID NO: 12927 - DNA, 20 bp, Artificial Sequence
  chemically synthesized
tactcctaagtaaacagaca

SEQ ID NO: 12928 - DNA, 20 bp, Artificial Sequence
  chemically synthesized
acagacatggcttcataaat

SEQ ID NO: 12929 - DNA, 20 bp, Artificial Sequence
  chemically synthesized
acatggcttcataaattaga

SEQ ID NO: 12930 - DNA, 20 bp, Artificial Sequence
  chemically synthesized
cacatttacactgctgtaat

SEQ ID NO: 12931 - DNA, 20 bp, Artificial Sequence
  chemically synthesized
gactgcatgcacctatgaaa

SEQ ID NO: 12932 - DNA, 20 bp, Artificial Sequence
  chemically synthesized
tctaaataataatcatgtcg

SEQ ID NO: 12933 - DNA, 20 bp, Artificial Sequence
  chemically synthesized
aacctttctgctctcactct

SEQ ID NO: 12934 - DNA, 20 bp, Artificial Sequence
  chemically synthesized
ctttctgctctcactctcag

SEQ ID NO: 12935 - DNA, 20 bp, Artificial Sequence
  chemically synthesized
tcagcagtgccacaaaatca

SEQ ID NO: 12936 - DNA, 20 bp, Artificial Sequence
  chemically synthesized
tcaaagaaataccaaatgca

SEQ ID NO: 12937 - DNA, 20 bp, Artificial Sequence
  chemically synthesized
caaagaaataccaaatgcac

SEQ ID NO: 12938 - DNA, 20 bp, Artificial Sequence
  chemically synthesized
agaaataccaaatgcacggg

SEQ ID NO: 12939 - DNA, 20 bp, Artificial Sequence
  chemically synthesized
aatgcacgggcagtatttct

SEQ ID NO: 12940 - DNA, 20 bp, Artificial Sequence
  chemically synthesized
gcagtatttctcagacacat

SEQ ID NO: 12941 - DNA, 20 bp, Artificial Sequence
  chemically synthesized
tctcagacacattagctaaa

SEQ ID NO: 12942 - DNA, 20 bp, Artificial Sequence
  chemically synthesized
ctcagacacattagctaaat

SEQ ID NO: 12943 - DNA, 20 bp, Artificial Sequence
  chemically synthesized
tagctaaatgggatactttt

SEQ ID NO: 12944 - DNA, 20 bp, Artificial Sequence
  chemically synthesized
tgggatacttttgagtactt

SEQ ID NO: 12945 - DNA, 20 bp, Artificial Sequence
  chemically synthesized
ttttgagtacttaagaaaat

SEQ ID NO: 12946 - DNA, 20 bp, Artificial Sequence
  chemically synthesized
acttaagaaaataagccaat

SEQ ID NO: 12947 - DNA, 20 bp, Artificial Sequence
  chemically synthesized
agtcattttttttttattct

SEQ ID NO: 12948 - DNA, 20 bp, Artificial Sequence
  chemically synthesized
tttttttttattctgagaaa

SEQ ID NO: 12949 - DNA, 20 bp, Artificial Sequence
  chemically synthesized
attctaaacatgtttgcact

SEQ ID NO: 12950 - DNA, 20 bp, Artificial Sequence
  chemically synthesized
ctaaacatgtttgcacttgg

SEQ ID NO: 12951 - DNA, 20 bp, Artificial Sequence
  chemically synthesized
ggcatctatgatataaaaat

SEQ ID NO: 12952 - DNA, 20 bp, Artificial Sequence
  chemically synthesized
ctatgatataaaaatcagaa

SEQ ID NO: 12953 - DNA, 20 bp, Artificial Sequence
  chemically synthesized
atataaaaatcagaatggtc

SEQ ID NO: 12954 - DNA, 20 bp, Artificial Sequence
  chemically synthesized
gtcaagcaaacaccacattt

SEQ ID NO: 12955 - DNA, 20 bp, Artificial Sequence
  chemically synthesized
caagcaaacaccacatttca

SEQ ID NO: 12956 - DNA, 20 bp, Artificial Sequence
  chemically synthesized
caaacaccacatttcagagc

SEQ ID NO: 12957 - DNA, 20 bp, Artificial Sequence
  chemically synthesized
aaacaccacatttcagagca

SEQ ID NO: 12958 - DNA, 20 bp, Artificial Sequence
  chemically synthesized
ccacatttcagagcaaggct

SEQ ID NO: 12959 - DNA, 20 bp, Artificial Sequence
  chemically synthesized
catttcagagcaaggctgag

SEQ ID NO: 12960 - DNA, 20 bp, Artificial Sequence
  chemically synthesized
aggctgagaagtcctttctt

SEQ ID NO: 12961 - DNA, 20 bp, Artificial Sequence
  chemically synthesized
tacttcgcctaatgttgtca

SEQ ID NO: 12962 - DNA, 20 bp, Artificial Sequence
  chemically synthesized
ttcgcctaatgttgtcaaag

SEQ ID NO: 12963 - DNA, 20 bp, Artificial Sequence
  chemically synthesized
agtggactaattttctgaat

SEQ ID NO: 12964 - DNA, 20 bp, Artificial Sequence
  chemically synthesized
gctccaaaatgcttcattat

SEQ ID NO: 12965 - DNA, 20 bp, Artificial Sequence
  chemically synthesized
atttctgcacacataatcac

SEQ ID NO: 12966 - DNA, 20 bp, Artificial Sequence
  chemically synthesized
tctgcacacataatcaccag

SEQ ID NO: 12967 - DNA, 20 bp, Artificial Sequence
  chemically synthesized
cacacataatcaccagcgga

SEQ ID NO: 12968 - DNA, 20 bp, Artificial Sequence
  chemically synthesized
tcaccagcggatggtataac

SEQ ID NO: 12969 - DNA, 20 bp, Artificial Sequence
  chemically synthesized
caccagcggatggtataaca

SEQ ID NO: 12970 - DNA, 20 bp, Artificial Sequence
  chemically synthesized
cagcggatggtataacaagg

SEQ ID NO: 12971 - DNA, 20 bp, Artificial Sequence
  chemically synthesized
aactttgtactaaaatactc

SEQ ID NO: 12972 - DNA, 20 bp, Artificial Sequence
  chemically synthesized
tactccagcatctactttac

SEQ ID NO: 12973 - DNA, 20 bp, Artificial Sequence
  chemically synthesized
accagcttctatcatttttt

SEQ ID NO: 12974 - DNA, 20 bp, Artificial Sequence
  chemically synthesized
tatcattttttaagcttcca

SEQ ID NO: 12975 - DNA, 20 bp, Artificial Sequence
  chemically synthesized
atcattttttaagcttccaa

SEQ ID NO: 12976 - DNA, 20 bp, Artificial Sequence
  chemically synthesized
tcattttttaagcttccaaa

SEQ ID NO: 12977 - DNA, 20 bp, Artificial Sequence
  chemically synthesized
cattttttaagcttccaaag

SEQ ID NO: 12978 - DNA, 20 bp, Artificial Sequence
  chemically synthesized
tttaagcttccaaaggggaa

SEQ ID NO: 12979 - DNA, 20 bp, Artificial Sequence
  chemically synthesized
taagcttccaaaggggaaaa

SEQ ID NO: 12980 - DNA, 20 bp, Artificial Sequence
  chemically synthesized
agcttccaaaggggaaaaga

SEQ ID NO: 12981 - DNA, 20 bp, Artificial Sequence
  chemically synthesized
tccaaaggggaaaagagagt

SEQ ID NO: 12982 - DNA, 20 bp, Artificial Sequence
  chemically synthesized
aaggggaaaagagagttggt

SEQ ID NO: 12983 - DNA, 20 bp, Artificial Sequence
  chemically synthesized
atcacaaaatacaaaacatc

SEQ ID NO: 12984 - DNA, 20 bp, Artificial Sequence
  chemically synthesized
tcacaaaatacaaaacatcc

SEQ ID NO: 12985 - DNA, 20 bp, Artificial Sequence
  chemically synthesized
caaaacatccaggatgctgc

SEQ ID NO: 12986 - DNA, 20 bp, Artificial Sequence
  chemically synthesized
gctgccagttaataaaactg

SEQ ID NO: 12987 - DNA, 20 bp, Artificial Sequence
  chemically synthesized
gccagttaataaaactgaag

SEQ ID NO: 12988 - DNA, 20 bp, Artificial Sequence
  chemically synthesized
aactgaagcagaaaatgtac

SEQ ID NO: 12989 - DNA, 20 bp, Artificial Sequence
  chemically synthesized
gaaaatgtacaagtcttaaa

SEQ ID NO: 12990 - DNA, 20 bp, Artificial Sequence
  chemically synthesized
acaagtcttaaacagttaat

SEQ ID NO: 12991 - DNA, 20 bp, Artificial Sequence
  chemically synthesized
ttaatcagtctgaccttctt

SEQ ID NO: 12992 - DNA, 20 bp, Artificial Sequence
  chemically synthesized
tcagtctgaccttctttagc

SEQ ID NO: 12993 - DNA, 20 bp, Artificial Sequence
  chemically synthesized
ttttacatttaatgaactta

SEQ ID NO: 12994 - DNA, 20 bp, Artificial Sequence
  chemically synthesized
atttaatgaacttaaagcca

SEQ ID NO: 12995 - DNA, 20 bp, Artificial Sequence
  chemically synthesized
ttaatgaacttaaagccaca

SEQ ID NO: 12996 - DNA, 20 bp, Artificial Sequence
  chemically synthesized
agccacagagaatcaaaaaa

SEQ ID NO: 12997 - DNA, 20 bp, Artificial Sequence
  chemically synthesized
caaaaaatagattttaattt

SEQ ID NO: 12998 - DNA, 20 bp, Artificial Sequence
  chemically synthesized
aatagattttaatttgagtg

SEQ ID NO: 12999 - DNA, 20 bp, Artificial Sequence
  chemically synthesized
ttaatttgagtgtagaatat

SEQ ID NO: 13000 - DNA, 20 bp, Artificial Sequence
  chemically synthesized
ttgagtgtagaatattggaa

SEQ ID NO: 13001 - DNA, 20 bp, Artificial Sequence
  chemically synthesized
tattggaacagattttgata

SEQ ID NO: 13002 - DNA, 20 bp, Artificial Sequence
  chemically synthesized
tttgataaagtgcaaaaatc

SEQ ID NO: 13003 - DNA, 20 bp, Artificial Sequence
  chemically synthesized
gtgcaaaaatccagtgaact

SEQ ID NO: 13004 - DNA, 20 bp, Artificial Sequence
  chemically synthesized
tgcaaaaatccagtgaactc

SEQ ID NO: 13005 - DNA, 20 bp, Artificial Sequence
  chemically synthesized
aaatttatttcaaccctacc

SEQ ID NO: 13006 - DNA, 20 bp, Artificial Sequence
  chemically synthesized
aatttatttcaaccctaccc

SEQ ID NO: 13007 - DNA, 20 bp, Artificial Sequence
  chemically synthesized
ccctacccaggctgaatatt

SEQ ID NO: 13008 - DNA, 20 bp, Artificial Sequence
  chemically synthesized
cctacccaggctgaatattg

SEQ ID NO: 13009 - DNA, 20 bp, Artificial Sequence
  chemically synthesized
ctacccaggctgaatattga

SEQ ID NO: 13010 - DNA, 20 bp, Artificial Sequence
  chemically synthesized
tacccaggctgaatattgag

SEQ ID NO: 13011 - DNA, 20 bp, Artificial Sequence
  chemically synthesized
acccaggctgaatattgagg

SEQ ID NO: 13012 - DNA, 20 bp, Artificial Sequence
  chemically synthesized
caggctgaatattgaggggg

SEQ ID NO: 13013 - DNA, 20 bp, Artificial Sequence
  chemically synthesized
gaatattgagggggaagatc

SEQ ID NO: 13014 - DNA, 20 bp, Artificial Sequence
  chemically synthesized
atattgagggggaagatctg

SEQ ID NO: 13015 - DNA, 20 bp, Artificial Sequence
  chemically synthesized
ggaagatctggagtaactcc

SEQ ID NO: 13016 - DNA, 20 bp, Artificial Sequence
  chemically synthesized
ggagtaactcccagatgtgc

SEQ ID NO: 13017 - DNA, 20 bp, Artificial Sequence
  chemically synthesized
gagtaactcccagatgtgct

SEQ ID NO: 13018 - DNA, 20 bp, Artificial Sequence
  chemically synthesized
gtgctaggtgaaataatatt

SEQ ID NO: 13019 - DNA, 20 bp, Artificial Sequence
  chemically synthesized
gctaggtgaaataatattga

SEQ ID NO: 13020 - DNA, 20 bp, Artificial Sequence
  chemically synthesized
taggtgaaataatattgaga

SEQ ID NO: 13021 - DNA, 20 bp, Artificial Sequence
  chemically synthesized
aatattgagagagccctgcc

SEQ ID NO: 13022 - DNA, 20 bp, Artificial Sequence
  chemically synthesized
gcctagctgcacctgtgctc

SEQ ID NO: 13023 - DNA, 20 bp, Artificial Sequence
  chemically synthesized
tagctgcacctgtgctcaag

SEQ ID NO: 13024 - DNA, 20 bp, Artificial Sequence
  chemically synthesized
agctgcacctgtgctcaagt

SEQ ID NO: 13025 - DNA, 20 bp, Artificial Sequence
  chemically synthesized
gtaggacatctcataatttc

SEQ ID NO: 13026 - DNA, 20 bp, Artificial Sequence
  chemically synthesized
atctcataatttctagcctc

SEQ ID NO: 13027 - DNA, 20 bp, Artificial Sequence
  chemically synthesized
tactcctcctaatttaacat

SEQ ID NO: 13028 - DNA, 20 bp, Artificial Sequence
  chemically synthesized
actcctcctaatttaacata

SEQ ID NO: 13029 - DNA, 20 bp, Artificial Sequence
  chemically synthesized
aatttaacataaggtcacca

SEQ ID NO: 13030 - DNA, 20 bp, Artificial Sequence
  chemically synthesized
atttaacataaggtcaccac

SEQ ID NO: 13031 - DNA, 20 bp, Artificial Sequence
  chemically synthesized
aaggtcaccacaggaatatg

SEQ ID NO: 13032 - DNA, 20 bp, Artificial Sequence
  chemically synthesized
aggtcaccacaggaatatga

SEQ ID NO: 13033 - DNA, 20 bp, Artificial Sequence
  chemically synthesized
aggttatattcctactaata

SEQ ID NO: 13034 - DNA, 20 bp, Artificial Sequence
  chemically synthesized
tatattcctactaataaaga

SEQ ID NO: 13035 - DNA, 20 bp, Artificial Sequence
  chemically synthesized
tcctactaataaagacagta

SEQ ID NO: 13036 - DNA, 20 bp, Artificial Sequence
  chemically synthesized
actaataaagacagtaaagt

SEQ ID NO: 13037 - DNA, 20 bp, Artificial Sequence
  chemically synthesized
tgtttctttgcccaacatac

SEQ ID NO: 13038 - DNA, 20 bp, Artificial Sequence
  chemically synthesized
ttgcccaacatactggccaa

SEQ ID NO: 13039 - DNA, 20 bp, Artificial Sequence
  chemically synthesized
tactggccaaaagataaata

SEQ ID NO: 13040 - DNA, 20 bp, Artificial Sequence
  chemically synthesized
tatgcatacttttcaaataa

SEQ ID NO: 13041 - DNA, 20 bp, Artificial Sequence
  chemically synthesized
gcatacttttcaaataaaag

SEQ ID NO: 13042 - DNA, 20 bp, Artificial Sequence
  chemically synthesized
ttcaaataaaagaagacaaa

SEQ ID NO: 13043 - DNA, 20 bp, Artificial Sequence
  chemically synthesized
aaataaaagaagacaaacag

SEQ ID NO: 13044 - DNA, 20 bp, Artificial Sequence
  chemically synthesized
catttgcttccattttgacc

SEQ ID NO: 13045 - DNA, 20 bp, Artificial Sequence
  chemically synthesized
tgcttccattttgaccaagt

SEQ ID NO: 13046 - DNA, 20 bp, Artificial Sequence
  chemically synthesized
gcttccattttgaccaagtg

SEQ ID NO: 13047 - DNA, 20 bp, Artificial Sequence
  chemically synthesized
cattttgaccaagtgaggaa

SEQ ID NO: 13048 - DNA, 20 bp, Artificial Sequence
  chemically synthesized
attttgaccaagtgaggaat

SEQ ID NO: 13049 - DNA, 20 bp, Artificial Sequence
  chemically synthesized
ttttgaccaagtgaggaata

SEQ ID NO: 13050 - DNA, 20 bp, Artificial Sequence
  chemically synthesized
atattcctgttgtctgaatt

SEQ ID NO: 13051 - DNA, 20 bp, Artificial Sequence
  chemically synthesized
tattcctgttgtctgaatta

SEQ ID NO: 13052 - DNA, 20 bp, Artificial Sequence
  chemically synthesized
ttgtctgaattaaggatttt

SEQ ID NO: 13053 - DNA, 20 bp, Artificial Sequence
  chemically synthesized
taagtacacattgataaatg

SEQ ID NO: 13054 - DNA, 20 bp, Artificial Sequence
  chemically synthesized
ataaatgtggcttttttgtt

SEQ ID NO: 13055 - DNA, 20 bp, Artificial Sequence
  chemically synthesized
gtggcttttttgtttagcat

SEQ ID NO: 13056 - DNA, 20 bp, Artificial Sequence
  chemically synthesized
ttttgtttagcattagctac

SEQ ID NO: 13057 - DNA, 20 bp, Artificial Sequence
  chemically synthesized
tagcattagctacaagttct

SEQ ID NO: 13058 - DNA, 20 bp, Artificial Sequence
  chemically synthesized
agcattagctacaagttctg

SEQ ID NO: 13059 - DNA, 20 bp, Artificial Sequence
  chemically synthesized
gctacaagttctgaggttta

SEQ ID NO: 13060 - DNA, 20 bp, Artificial Sequence
  chemically synthesized
gttctgaggtttacagactg

SEQ ID NO: 13061 - DNA, 20 bp, Artificial Sequence
  chemically synthesized
ttctgaggtttacagactga

SEQ ID NO: 13062 - DNA, 20 bp, Artificial Sequence
  chemically synthesized
tgaggtttacagactgaagg

SEQ ID NO: 13063 - DNA, 20 bp, Artificial Sequence
  chemically synthesized
ttacagactgaaggaagact

SEQ ID NO: 13064 - DNA, 20 bp, Artificial Sequence
  chemically synthesized
tacagactgaaggaagactt

SEQ ID NO: 13065 - DNA, 20 bp, Artificial Sequence
  chemically synthesized
aaatattttatcaaacttac

SEQ ID NO: 13066 - DNA, 20 bp, Artificial Sequence
  chemically synthesized
ttatcaaacttactagtaca

SEQ ID NO: 13067 - DNA, 20 bp, Artificial Sequence
  chemically synthesized
aattttttatttccaccgtt

SEQ ID NO: 13068 - DNA, 20 bp, Artificial Sequence
  chemically synthesized
ttttttttttttttgttccc

SEQ ID NO: 13069 - DNA, 20 bp, Artificial Sequence
  chemically synthesized
tttttttttttttgttccca

SEQ ID NO: 13070 - DNA, 20 bp, Artificial Sequence
  chemically synthesized
aaggtctgacacatttctaa

SEQ ID NO: 13071 - DNA, 20 bp, Artificial Sequence
  chemically synthesized
gtctgacacatttctaaaag

SEQ ID NO: 13072 - DNA, 20 bp, Artificial Sequence
  chemically synthesized
tctgacacatttctaaaagt

SEQ ID NO: 13073 - DNA, 20 bp, Artificial Sequence
  chemically synthesized
ctaaaagtgggaatattatt

SEQ ID NO: 13074 - DNA, 20 bp, Artificial Sequence
  chemically synthesized
taaaagtgggaatattattt

SEQ ID NO: 13075 - DNA, 20 bp, Artificial Sequence
  chemically synthesized
ggaatattatttaggtgcaa

SEQ ID NO: 13076 - DNA, 20 bp, Artificial Sequence
  chemically synthesized
gaatattatttaggtgcaaa

SEQ ID NO: 13077 - DNA, 20 bp, Artificial Sequence
  chemically synthesized
tgcaaaaggaaatattctcc

SEQ ID NO: 13078 - DNA, 20 bp, Artificial Sequence
  chemically synthesized
gcaaaaggaaatattctcct

SEQ ID NO: 13079 - DNA, 20 bp, Artificial Sequence
  chemically synthesized
atattctcctaggtatcaaa

SEQ ID NO: 13080 - DNA, 20 bp, Artificial Sequence
  chemically synthesized
tcctaggtatcaaatagtta

SEQ ID NO: 13081 - DNA, 20 bp, Artificial Sequence
  chemically synthesized
cctaggtatcaaatagttaa

SEQ ID NO: 13082 - DNA, 20 bp, Artificial Sequence
  chemically synthesized
tcaaatagttaaaggtaatg

SEQ ID NO: 13083 - DNA, 20 bp, Artificial Sequence
  chemically synthesized
aaaggtaatgtggttcaaaa

SEQ ID NO: 13084 - DNA, 20 bp, Artificial Sequence
  chemically synthesized
aatgtggttcaaaacagact

SEQ ID NO: 13085 - DNA, 20 bp, Artificial Sequence
  chemically synthesized
gttcaaaacagacttggtta

SEQ ID NO: 13086 - DNA, 20 bp, Artificial Sequence
  chemically synthesized
tggttaaagtcttctaaatg

SEQ ID NO: 13087 - DNA, 20 bp, Artificial Sequence
  chemically synthesized
aactgatttacaatcaaaac

SEQ ID NO: 13088 - DNA, 20 bp, Artificial Sequence
  chemically synthesized
actgatttacaatcaaaacc

SEQ ID NO: 13089 - DNA, 20 bp, Artificial Sequence
  chemically synthesized
acaatcaaaaccgggaaatg

SEQ ID NO: 13090 - DNA, 20 bp, Artificial Sequence
  chemically synthesized
atcaaaaccgggaaatgaag

SEQ ID NO: 13091 - DNA, 20 bp, Artificial Sequence
  chemically synthesized
cgggaaatgaagtggtaatt

SEQ ID NO: 13092 - DNA, 20 bp, Artificial Sequence
  chemically synthesized
ggaaatgaagtggtaattca

SEQ ID NO: 13093 - DNA, 20 bp, Artificial Sequence
  chemically synthesized
gaaatgaagtggtaattcag

SEQ ID NO: 13094 - DNA, 20 bp, Artificial Sequence
  chemically synthesized
atttcacctaattaatttta

SEQ ID NO: 13095 - DNA, 20 bp, Artificial Sequence
  chemically synthesized
tttcacctaattaattttat

SEQ ID NO: 13096 - DNA, 20 bp, Artificial Sequence
  chemically synthesized
tcacctaattaattttatag

SEQ ID NO: 13097 - DNA, 20 bp, Artificial Sequence
  chemically synthesized
cacctaattaattttatagg

SEQ ID NO: 13098 - DNA, 20 bp, Artificial Sequence
  chemically synthesized
aattaattttataggaggca

SEQ ID NO: 13099 - DNA, 20 bp, Artificial Sequence
  chemically synthesized
gcaaagttcttgaaaataac

SEQ ID NO: 13100 - DNA, 20 bp, Artificial Sequence
  chemically synthesized
taacaagatgatcaaatgta

SEQ ID NO: 13101 - DNA, 20 bp, Artificial Sequence
  chemically synthesized
gtaaattattgctaattaac

SEQ ID NO: 13102 - DNA, 20 bp, Artificial Sequence
  chemically synthesized
gtatgaaatacgtttaacat

SEQ ID NO: 13103 - DNA, 20 bp, Artificial Sequence
  chemically synthesized
cggtctccttgcaaaacatt

SEQ ID NO: 13104 - DNA, 20 bp, Artificial Sequence
  chemically synthesized
ctccttgcaaaacatttggc

SEQ ID NO: 13105 - DNA, 20 bp, Artificial Sequence
  chemically synthesized
cttgcaaaacatttggctag

SEQ ID NO: 13106 - DNA, 20 bp, Artificial Sequence
  chemically synthesized
aacatttggctagtggtgtt

SEQ ID NO: 13107 - DNA, 20 bp, Artificial Sequence
  chemically synthesized
catttggctagtggtgttca

SEQ ID NO: 13108 - DNA, 20 bp, Artificial Sequence
  chemically synthesized
aaacgtgtttttatcattgc

SEQ ID NO: 13109 - DNA, 20 bp, Artificial Sequence
  chemically synthesized
gctggtatattattaaaaat

SEQ ID NO: 13110 - DNA, 20 bp, Artificial Sequence
  chemically synthesized
atattattaaaaatcagaca

SEQ ID NO: 13111 - DNA, 20 bp, Artificial Sequence
  chemically synthesized
ttattaaaaatcagacaaag

SEQ ID NO: 13112 - DNA, 20 bp, Artificial Sequence
  chemically synthesized
tattaaaaatcagacaaagt

SEQ ID NO: 13113 - DNA, 20 bp, Artificial Sequence
  chemically synthesized
atcagacaaagtgggacaca

SEQ ID NO: 13114 - DNA, 20 bp, Artificial Sequence
  chemically synthesized
atatgaaaatacaattctca

SEQ ID NO: 13115 - DNA, 20 bp, Artificial Sequence
  chemically synthesized
aaaatacaattctcatggtg

SEQ ID NO: 13116 - DNA, 20 bp, Artificial Sequence
  chemically synthesized
tttgcattgacatcttttct

SEQ ID NO: 13117 - DNA, 20 bp, Artificial Sequence
  chemically synthesized
gcattgacatcttttctcag

SEQ ID NO: 13118 - DNA, 20 bp, Artificial Sequence
  chemically synthesized
ggcaatcaacatttcctttc

SEQ ID NO: 13119 - DNA, 20 bp, Artificial Sequence
  chemically synthesized
gcaatcaacatttcctttct

SEQ ID NO: 13120 - DNA, 20 bp, Artificial Sequence
  chemically synthesized
ctaaaaaccttcctaaccct

SEQ ID NO: 13121 - DNA, 20 bp, Artificial Sequence
  chemically synthesized
ccaacaataccaacatttct

SEQ ID NO: 13122 - DNA, 20 bp, Artificial Sequence
  chemically synthesized
ataccaacatttctaagctc

SEQ ID NO: 13123 - DNA, 20 bp, Artificial Sequence
  chemically synthesized
ctaagctccggcctaaactc

SEQ ID NO: 13124 - DNA, 20 bp, Artificial Sequence
  chemically synthesized
cggcctaaactccggctaca

SEQ ID NO: 13125 - DNA, 20 bp, Artificial Sequence
  chemically synthesized
cctaaactccggctacaaag

SEQ ID NO: 13126 - DNA, 20 bp, Artificial Sequence
  chemically synthesized
ctaaactccggctacaaagc

SEQ ID NO: 13127 - DNA, 20 bp, Artificial Sequence
  chemically synthesized
taaactccggctacaaagca

SEQ ID NO: 13128 - DNA, 20 bp, Artificial Sequence
  chemically synthesized
aactccggctacaaagcagg

SEQ ID NO: 13129 - DNA, 20 bp, Artificial Sequence
  chemically synthesized
aagcagggagtcctcgattg

SEQ ID NO: 13130 - DNA, 20 bp, Artificial Sequence
  chemically synthesized
cagggagtcctcgattgaag

SEQ ID NO: 13131 - DNA, 20 bp, Artificial Sequence
  chemically synthesized
ggagtcctcgattgaagtgg

SEQ ID NO: 13132 - DNA, 20 bp, Artificial Sequence
  chemically synthesized
gagtcctcgattgaagtgga

SEQ ID NO: 13133 - DNA, 20 bp, Artificial Sequence
  chemically synthesized
agtcctcgattgaagtggaa

SEQ ID NO: 13134 - DNA, 20 bp, Artificial Sequence
  chemically synthesized
tcctcgattgaagtggaagg

SEQ ID NO: 13135 - DNA, 20 bp, Artificial Sequence
  chemically synthesized
tcgattgaagtggaagggag

SEQ ID NO: 13136 - DNA, 20 bp, Artificial Sequence
  chemically synthesized
cgattgaagtggaagggagt

SEQ ID NO: 13137 - DNA, 20 bp, Artificial Sequence
  chemically synthesized
gggcaaataatcataataat

SEQ ID NO: 13138 - DNA, 20 bp, Artificial Sequence
  chemically synthesized
tagccgcgaattctctctac

SEQ ID NO: 13139 - DNA, 20 bp, Artificial Sequence
  chemically synthesized
agccgcgaattctctctacg

SEQ ID NO: 13140 - DNA, 20 bp, Artificial Sequence
  chemically synthesized
gccgcgaattctctctacga

SEQ ID NO: 13141 - DNA, 20 bp, Artificial Sequence
  chemically synthesized
ccgcgaattctctctacgag

SEQ ID NO: 13142 - DNA, 20 bp, Artificial Sequence
  chemically synthesized
gcgaattctctctacgaggg

SEQ ID NO: 13143 - DNA, 20 bp, Artificial Sequence
  chemically synthesized
cgaattctctctacgagggg

SEQ ID NO: 13144 - DNA, 20 bp, Artificial Sequence
  chemically synthesized
attctctctacgaggggagg

SEQ ID NO: 13145 - DNA, 20 bp, Artificial Sequence
  chemically synthesized
tctacgaggggaggaagaaa

SEQ ID NO: 13146 - DNA, 20 bp, Artificial Sequence
  chemically synthesized
aaaatgcttctacgttcaaa

SEQ ID NO: 13147 - DNA, 20 bp, Artificial Sequence
  chemically synthesized
tgcttctacgttcaaacagc

SEQ ID NO: 13148 - DNA, 20 bp, Artificial Sequence
  chemically synthesized
tctacgttcaaacagcaaga

SEQ ID NO: 13149 - DNA, 20 bp, Artificial Sequence
  chemically synthesized
gttcaaacagcaagacagcc

SEQ ID NO: 13150 - DNA, 20 bp, Artificial Sequence
  chemically synthesized
cctggaacgtctcaatgtct

SEQ ID NO: 13151 - DNA, 20 bp, Artificial Sequence
  chemically synthesized
acgtctcaatgtctcagtga

SEQ ID NO: 13152 - DNA, 20 bp, Artificial Sequence
  chemically synthesized
caatgtctcagtgacagact

SEQ ID NO: 13153 - DNA, 20 bp, Artificial Sequence
  chemically synthesized
agatctctttcctctctgtg

SEQ ID NO: 13154 - DNA, 20 bp, Artificial Sequence
  chemically synthesized
tcctctctgtgtagttgcaa

SEQ ID NO: 13155 - DNA, 20 bp, Artificial Sequence
  chemically synthesized
agttgcaaaagaataaattt

SEQ ID NO: 13156 - DNA, 20 bp, Artificial Sequence
  chemically synthesized
gttgcaaaagaataaattta

SEQ ID NO: 13157 - DNA, 20 bp, Artificial Sequence
  chemically synthesized
ttgcaaaagaataaatttaa

SEQ ID NO: 13158 - DNA, 20 bp, Artificial Sequence
  chemically synthesized
agggaaaaaaataatcctta

SEQ ID NO: 13159 - DNA, 20 bp, Artificial Sequence
  chemically synthesized
gggaaaaaaataatccttat

SEQ ID NO: 13160 - DNA, 20 bp, Artificial Sequence
  chemically synthesized
ataatccttataggaaatgt

SEQ ID NO: 13161 - DNA, 20 bp, Artificial Sequence
  chemically synthesized
tccttataggaaatgttggt

SEQ ID NO: 13162 - DNA, 20 bp, Artificial Sequence
  chemically synthesized
ccttataggaaatgttggta

SEQ ID NO: 13163 - DNA, 20 bp, Artificial Sequence
  chemically synthesized
ttataggaaatgttggtaag

SEQ ID NO: 13164 - DNA, 20 bp, Artificial Sequence
  chemically synthesized
aggaaatgttggtaaggagc

SEQ ID NO: 13165 - DNA, 20 bp, Artificial Sequence
  chemically synthesized
tggtaaggagcgagcaaaac

SEQ ID NO: 13166 - DNA, 20 bp, Artificial Sequence
  chemically synthesized
gtaaggagcgagcaaaacga

SEQ ID NO: 13167 - DNA, 20 bp, Artificial Sequence
  chemically synthesized
gcgagcaaaacgagagctgc

SEQ ID NO: 13168 - DNA, 20 bp, Artificial Sequence
  chemically synthesized
cgagcaaaacgagagctgcc

SEQ ID NO: 13169 - DNA, 20 bp, Artificial Sequence
  chemically synthesized
gagcaaaacgagagctgccg

SEQ ID NO: 13170 - DNA, 20 bp, Artificial Sequence
  chemically synthesized
gcaaaacgagagctgccggg

SEQ ID NO: 13171 - DNA, 20 bp, Artificial Sequence
  chemically synthesized
aaacgagagctgccggggag

SEQ ID NO: 13172 - DNA, 20 bp, Artificial Sequence
  chemically synthesized
acgagagctgccggggagcg

SEQ ID NO: 13173 - DNA, 20 bp, Artificial Sequence
  chemically synthesized
cgagagctgccggggagcgg

SEQ ID NO: 13174 - DNA, 20 bp, Artificial Sequence
  chemically synthesized
gagagctgccggggagcgga

SEQ ID NO: 13175 - DNA, 20 bp, Artificial Sequence
  chemically synthesized
agagctgccggggagcggag

SEQ ID NO: 13176 - DNA, 20 bp, Artificial Sequence
  chemically synthesized
gagctgccggggagcggagg

SEQ ID NO: 13177 - DNA, 20 bp, Artificial Sequence
  chemically synthesized
gctgccggggagcggagggg

SEQ ID NO: 13178 - DNA, 20 bp, Artificial Sequence
  chemically synthesized
ctgccggggagcggaggggg

SEQ ID NO: 13179 - DNA, 20 bp, Artificial Sequence
  chemically synthesized
tgccggggagcggaggggga

SEQ ID NO: 13180 - DNA, 20 bp, Artificial Sequence
  chemically synthesized
gccggggagcggagggggag

SEQ ID NO: 13181 - DNA, 20 bp, Artificial Sequence
  chemically synthesized
ccggggagcggagggggagg

SEQ ID NO: 13182 - DNA, 20 bp, Artificial Sequence
  chemically synthesized
ggagcggagggggaggggga

SEQ ID NO: 13183 - DNA, 20 bp, Artificial Sequence
  chemically synthesized
gagcggagggggagggggaa

SEQ ID NO: 13184 - DNA, 20 bp, Artificial Sequence
  chemically synthesized
agcggagggggagggggaaa

SEQ ID NO: 13185 - DNA, 20 bp, Artificial Sequence
  chemically synthesized
cggagggggagggggaaagg

SEQ ID NO: 13186 - DNA, 20 bp, Artificial Sequence
  chemically synthesized
ggaaagggagatgtgtcttc

SEQ ID NO: 13187 - DNA, 20 bp, Artificial Sequence
  chemically synthesized
tgtcttcaagtttgctttcc

SEQ ID NO: 13188 - DNA, 20 bp, Artificial Sequence
  chemically synthesized
cttctccttgattgtcttaa

SEQ ID NO: 13189 - DNA, 20 bp, Artificial Sequence
  chemically synthesized
ttctccttgattgtcttaac

SEQ ID NO: 13190 - DNA, 20 bp, Artificial Sequence
  chemically synthesized
tctccttgattgtcttaaca

SEQ ID NO: 13191 - DNA, 20 bp, Artificial Sequence
  chemically synthesized
ttgattgtcttaacagggta

SEQ ID NO: 13192 - DNA, 20 bp, Artificial Sequence
  chemically synthesized
attgtcttaacagggtaaag

SEQ ID NO: 13193 - DNA, 20 bp, Artificial Sequence
  chemically synthesized
taacagggtaaagaagcaaa

SEQ ID NO: 13194 - DNA, 20 bp, Artificial Sequence
  chemically synthesized
acagggtaaagaagcaaacg

SEQ ID NO: 13195 - DNA, 20 bp, Artificial Sequence
  chemically synthesized
cagggtaaagaagcaaacgg

SEQ ID NO: 13196 - DNA, 20 bp, Artificial Sequence
  chemically synthesized
agcaaacggaggctgaaatt

SEQ ID NO: 13197 - DNA, 20 bp, Artificial Sequence
  chemically synthesized
caaacggaggctgaaattca

SEQ ID NO: 13198 - DNA, 20 bp, Artificial Sequence
  chemically synthesized
aacggaggctgaaattcaga

SEQ ID NO: 13199 - DNA, 20 bp, Artificial Sequence
  chemically synthesized
acggaggctgaaattcagag

SEQ ID NO: 13200 - DNA, 20 bp, Artificial Sequence
  chemically synthesized
ggctgaaattcagagaggaa

SEQ ID NO: 13201 - DNA, 20 bp, Artificial Sequence
  chemically synthesized
aaattcagagaggaaaagca

SEQ ID NO: 13202 - DNA, 20 bp, Artificial Sequence
  chemically synthesized
gaggaaaagcaaagaaacaa

SEQ ID NO: 13203 - DNA, 20 bp, Artificial Sequence
  chemically synthesized
aaagcaaagaaacaaaagca

SEQ ID NO: 13204 - DNA, 20 bp, Artificial Sequence
  chemically synthesized
caaagaaacaaaagcaaagc

SEQ ID NO: 13205 - DNA, 20 bp, Artificial Sequence
  chemically synthesized
aaagaaacaaaagcaaagcc

SEQ ID NO: 13206 - DNA, 20 bp, Artificial Sequence
  chemically synthesized
aagaaacaaaagcaaagccg

SEQ ID NO: 13207 - DNA, 20 bp, Artificial Sequence
  chemically synthesized
agaaacaaaagcaaagccgg

SEQ ID NO: 13208 - DNA, 20 bp, Artificial Sequence
  chemically synthesized
aaaagcaaagccgggggcta

SEQ ID NO: 13209 - DNA, 20 bp, Artificial Sequence
  chemically synthesized
aaagcaaagccgggggctac

SEQ ID NO: 13210 - DNA, 20 bp, Artificial Sequence
  chemically synthesized
aaagccgggggctacaggcc

SEQ ID NO: 13211 - DNA, 20 bp, Artificial Sequence
  chemically synthesized
aagccgggggctacaggccc

SEQ ID NO: 13212 - DNA, 20 bp, Artificial Sequence
  chemically synthesized
agccgggggctacaggcccg

SEQ ID NO: 13213 - DNA, 20 bp, Artificial Sequence
  chemically synthesized
cgggggctacaggcccgggg

SEQ ID NO: 13214 - DNA, 20 bp, Artificial Sequence
  chemically synthesized
gggggctacaggcccggggc

SEQ ID NO: 13215 - DNA, 20 bp, Artificial Sequence
  chemically synthesized
ggggctacaggcccggggca

SEQ ID NO: 13216 - DNA, 20 bp, Artificial Sequence
  chemically synthesized
gggctacaggcccggggcag

SEQ ID NO: 13217 - DNA, 20 bp, Artificial Sequence
  chemically synthesized
caggcccggggcaggggccc

SEQ ID NO: 13218 - DNA, 20 bp, Artificial Sequence
  chemically synthesized
cccggggcaggggccccggc

SEQ ID NO: 13219 - DNA, 20 bp, Artificial Sequence
  chemically synthesized
ccggggcaggggccccggca

SEQ ID NO: 13220 - DNA, 20 bp, Artificial Sequence
  chemically synthesized
cggggcaggggccccggcaa

SEQ ID NO: 13221 - DNA, 20 bp, Artificial Sequence
  chemically synthesized
ggcaggggccccggcaaggg

SEQ ID NO: 13222 - DNA, 20 bp, Artificial Sequence
  chemically synthesized
cccggcaagggtggaccgtg

SEQ ID NO: 13223 - DNA, 20 bp, Artificial Sequence
  chemically synthesized
gcaagggtggaccgtgcaga

SEQ ID NO: 13224 - DNA, 20 bp, Artificial Sequence
  chemically synthesized
ggtggaccgtgcagaaagtg

SEQ ID NO: 13225 - DNA, 20 bp, Artificial Sequence
  chemically synthesized
gaccgtgcagaaagtgaagt

SEQ ID NO: 13226 - DNA, 20 bp, Artificial Sequence
  chemically synthesized
accgtgcagaaagtgaagtt

SEQ ID NO: 13227 - DNA, 20 bp, Artificial Sequence
  chemically synthesized
gcagaaagtgaagttgggcg

SEQ ID NO: 13228 - DNA, 20 bp, Artificial Sequence
  chemically synthesized
cagaaagtgaagttgggcgc

SEQ ID NO: 13229 - DNA, 20 bp, Artificial Sequence
  chemically synthesized
agaaagtgaagttgggcgcg

SEQ ID NO: 13230 - DNA, 20 bp, Artificial Sequence
  chemically synthesized
aagttgggcgcggggactct

SEQ ID NO: 13231 - DNA, 20 bp, Artificial Sequence
  chemically synthesized
agttgggcgcggggactctg

SEQ ID NO: 13232 - DNA, 20 bp, Artificial Sequence
  chemically synthesized
cgcggggactctgaggcaca

SEQ ID NO: 13233 - DNA, 20 bp, Artificial Sequence
  chemically synthesized
gggactctgaggcacaaagc

SEQ ID NO: 13234 - DNA, 20 bp, Artificial Sequence
  chemically synthesized
actctgaggcacaaagcgag

SEQ ID NO: 13235 - DNA, 20 bp, Artificial Sequence
  chemically synthesized
gcacaaagcgagcagcgtgc

SEQ ID NO: 13236 - DNA, 20 bp, Artificial Sequence
  chemically synthesized
agcgagcagcgtgctggctg

SEQ ID NO: 13237 - DNA, 20 bp, Artificial Sequence
  chemically synthesized
gcgagcagcgtgctggctgc

SEQ ID NO: 13238 - DNA, 20 bp, Artificial Sequence
  chemically synthesized
gcgcttgctgcgaacacgtg

SEQ ID NO: 13239 - DNA, 20 bp, Artificial Sequence
  chemically synthesized
cttgctgcgaacacgtgcag

SEQ ID NO: 13240 - DNA, 20 bp, Artificial Sequence
  chemically synthesized
gctgcgaacacgtgcagcag

SEQ ID NO: 13241 - DNA, 20 bp, Artificial Sequence
  chemically synthesized
aacacgtgcagcagcggccg

SEQ ID NO: 13242 - DNA, 20 bp, Artificial Sequence
  chemically synthesized
acacgtgcagcagcggccgc

SEQ ID NO: 13243 - DNA, 20 bp, Artificial Sequence
  chemically synthesized
cacgtgcagcagcggccgcg

SEQ ID NO: 13244 - DNA, 20 bp, Artificial Sequence
  chemically synthesized
cagcagcggccgcggggcct

SEQ ID NO: 13245 - DNA, 20 bp, Artificial Sequence
  chemically synthesized
agcagcggccgcggggcctt

SEQ ID NO: 13246 - DNA, 20 bp, Artificial Sequence
  chemically synthesized
gcagcggccgcggggccttg

SEQ ID NO: 13247 - DNA, 20 bp, Artificial Sequence
  chemically synthesized
ggccgcggggccttggggcc

SEQ ID NO: 13248 - DNA, 20 bp, Artificial Sequence
  chemically synthesized
gccgcggggccttggggccc

SEQ ID NO: 13249 - DNA, 20 bp, Artificial Sequence
  chemically synthesized
ccgcggggccttggggcccg

SEQ ID NO: 13250 - DNA, 20 bp, Artificial Sequence
  chemically synthesized
cgcggggccttggggcccgg

SEQ ID NO: 13251 - DNA, 20 bp, Artificial Sequence
  chemically synthesized
ggccttggggcccgggggcc

SEQ ID NO: 13252 - DNA, 20 bp, Artificial Sequence
  chemically synthesized
ccttggggcccgggggcccg

SEQ ID NO: 13253 - DNA, 20 bp, Artificial Sequence
  chemically synthesized
ggggcccgggggcccggaga

SEQ ID NO: 13254 - DNA, 20 bp, Artificial Sequence
  chemically synthesized
ggcccgggggcccggagacg

SEQ ID NO: 13255 - DNA, 20 bp, Artificial Sequence
  chemically synthesized
gcccgggggcccggagacgg

SEQ ID NO: 13256 - DNA, 20 bp, Artificial Sequence
  chemically synthesized
cccgggggcccggagacgga

SEQ ID NO: 13257 - DNA, 20 bp, Artificial Sequence
  chemically synthesized
gggggcccggagacggaggg

SEQ ID NO: 13258 - DNA, 20 bp, Artificial Sequence
  chemically synthesized
gcccggagacggagggcagc

SEQ ID NO: 13259 - DNA, 20 bp, Artificial Sequence
  chemically synthesized
cccggagacggagggcagcc

SEQ ID NO: 13260 - DNA, 20 bp, Artificial Sequence
  chemically synthesized
ccggagacggagggcagcca

SEQ ID NO: 13261 - DNA, 20 bp, Artificial Sequence
  chemically synthesized
cggagacggagggcagccag

SEQ ID NO: 13262 - DNA, 20 bp, Artificial Sequence
  chemically synthesized
ctgctgcctccatgcccgtc

SEQ ID NO: 13263 - DNA, 20 bp, Artificial Sequence
  chemically synthesized
gcctccatgcccgtccagct

SEQ ID NO: 13264 - DNA, 20 bp, Artificial Sequence
  chemically synthesized
ccatgcccgtccagctcggc

SEQ ID NO: 13265 - DNA, 20 bp, Artificial Sequence
  chemically synthesized
cccgtccagctcggccagct

SEQ ID NO: 13266 - DNA, 20 bp, Artificial Sequence
  chemically synthesized
cagctcggccagctcggccg

SEQ ID NO: 13267 - DNA, 20 bp, Artificial Sequence
  chemically synthesized
agctcggccagctcggccgc

SEQ ID NO: 13268 - DNA, 20 bp, Artificial Sequence
  chemically synthesized
gctcggccagctcggccgcg

SEQ ID NO: 13269 - DNA, 20 bp, Artificial Sequence
  chemically synthesized
ccagctcggccgcggggtga

SEQ ID NO: 13270 - DNA, 20 bp, Artificial Sequence
  chemically synthesized
gccgcggggtgacggttccc

SEQ ID NO: 13271 - DNA, 20 bp, Artificial Sequence
  chemically synthesized
ccgcggggtgacggttccct

SEQ ID NO: 13272 - DNA, 20 bp, Artificial Sequence
  chemically synthesized
tgacggttccctgggcctgc

SEQ ID NO: 13273 - DNA, 20 bp, Artificial Sequence
  chemically synthesized
ggttccctgggcctgccagt

SEQ ID NO: 13274 - DNA, 20 bp, Artificial Sequence
  chemically synthesized
gggcctgccagttggtgaaa

SEQ ID NO: 13275 - DNA, 20 bp, Artificial Sequence
  chemically synthesized
ggcctgccagttggtgaaaa

SEQ ID NO: 13276 - DNA, 20 bp, Artificial Sequence
  chemically synthesized
ctgccagttggtgaaaaagg

SEQ ID NO: 13277 - DNA, 20 bp, Artificial Sequence
  chemically synthesized
cagttggtgaaaaaggaagt

SEQ ID NO: 13278 - DNA, 20 bp, Artificial Sequence
  chemically synthesized
agttggtgaaaaaggaagtg

SEQ ID NO: 13279 - DNA, 20 bp, Artificial Sequence
  chemically synthesized
gtgaaaaaggaagtgaggtt

SEQ ID NO: 13280 - DNA, 20 bp, Artificial Sequence
  chemically synthesized
gaagtgaggtttggaaaacc

SEQ ID NO: 13281 - DNA, 20 bp, Artificial Sequence
  chemically synthesized
tgaggtttggaaaacccggc

SEQ ID NO: 13282 - DNA, 20 bp, Artificial Sequence
  chemically synthesized
gaaaacccggctggttaacc

SEQ ID NO: 13283 - DNA, 20 bp, Artificial Sequence
  chemically synthesized
cccggctggttaacctggtg

SEQ ID NO: 13284 - DNA, 20 bp, Artificial Sequence
  chemically synthesized
tggttaacctggtgcagtct

SEQ ID NO: 13285 - DNA, 20 bp, Artificial Sequence
  chemically synthesized
agtatctccgcacacacctc

SEQ ID NO: 13286 - DNA, 20 bp, Artificial Sequence
  chemically synthesized
ctccgcacacacctcaagcg

SEQ ID NO: 13287 - DNA, 20 bp, Artificial Sequence
  chemically synthesized
tccgcacacacctcaagcgc

SEQ ID NO: 13288 - DNA, 20 bp, Artificial Sequence
  chemically synthesized
acacctcaagcgcgggtcct

SEQ ID NO: 13289 - DNA, 20 bp, Artificial Sequence
  chemically synthesized
gagattcattctgtgtccac

SEQ ID NO: 13290 - DNA, 20 bp, Artificial Sequence
  chemically synthesized
caagcttacactttttactt

SEQ ID NO: 13291 - DNA, 20 bp, Artificial Sequence
  chemically synthesized
aagcttacactttttacttt

SEQ ID NO: 13292 - DNA, 20 bp, Artificial Sequence
  chemically synthesized
agcttacactttttactttg

SEQ ID NO: 13293 - DNA, 20 bp, Artificial Sequence
  chemically synthesized
gcttacactttttactttgg

SEQ ID NO: 13294 - DNA, 20 bp, Artificial Sequence
  chemically synthesized
atgcatttcccccgcaattc

SEQ ID NO: 13295 - DNA, 20 bp, Artificial Sequence
  chemically synthesized
tgcatttcccccgcaattct

SEQ ID NO: 13296 - DNA, 20 bp, Artificial Sequence
  chemically synthesized
tcccccgcaattctgggcac

SEQ ID NO: 13297 - DNA, 20 bp, Artificial Sequence
  chemically synthesized
cccccgcaattctgggcact

SEQ ID NO: 13298 - DNA, 20 bp, Artificial Sequence
  chemically synthesized
ttctgggcactgggtgtgcg

SEQ ID NO: 13299 - DNA, 20 bp, Artificial Sequence
  chemically synthesized
tgggcactgggtgtgcgcgg

SEQ ID NO: 13300 - DNA, 20 bp, Artificial Sequence
  chemically synthesized
gcactgggtgtgcgcggcgg

SEQ ID NO: 13301 - DNA, 20 bp, Artificial Sequence
  chemically synthesized
ggtgtgcgcggcggcggctg

SEQ ID NO: 13302 - DNA, 20 bp, Artificial Sequence
  chemically synthesized
attactattgttgtgattcc

SEQ ID NO: 13303 - DNA, 20 bp, Artificial Sequence
  chemically synthesized
ttgttgtgattccgagctcc

SEQ ID NO: 13304 - DNA, 20 bp, Artificial Sequence
  chemically synthesized
tgttgtgattccgagctccg

SEQ ID NO: 13305 - DNA, 20 bp, Artificial Sequence
  chemically synthesized
gtgattccgagctccgaggc

SEQ ID NO: 13306 - DNA, 20 bp, Artificial Sequence
  chemically synthesized
gattccgagctccgaggcga

SEQ ID NO: 13307 - DNA, 20 bp, Artificial Sequence
  chemically synthesized
attccgagctccgaggcgag

SEQ ID NO: 13308 - DNA, 20 bp, Artificial Sequence
  chemically synthesized
ttccgagctccgaggcgaga

SEQ ID NO: 13309 - DNA, 20 bp, Artificial Sequence
  chemically synthesized
tccgagctccgaggcgagag

SEQ ID NO: 13310 - DNA, 20 bp, Artificial Sequence
  chemically synthesized
ccgagctccgaggcgagagg

SEQ ID NO: 13311 - DNA, 20 bp, Artificial Sequence
  chemically synthesized
cgagctccgaggcgagaggg

SEQ ID NO: 13312 - DNA, 20 bp, Artificial Sequence
  chemically synthesized
gagctccgaggcgagagggg

SEQ ID NO: 13313 - DNA, 20 bp, Artificial Sequence
  chemically synthesized
cgaggcgagagggggggtgt

SEQ ID NO: 13314 - DNA, 20 bp, Artificial Sequence
  chemically synthesized
gaggcgagagggggggtgtc

SEQ ID NO: 13315 - DNA, 20 bp, Artificial Sequence
  chemically synthesized
agagggggggtgtcgggctg

SEQ ID NO: 13316 - DNA, 20 bp, Artificial Sequence
  chemically synthesized
agggggggtgtcgggctgca

SEQ ID NO: 13317 - DNA, 20 bp, Artificial Sequence
  chemically synthesized
tgtcgggctgcagagccgcc

SEQ ID NO: 13318 - DNA, 20 bp, Artificial Sequence
  chemically synthesized
gggctgcagagccgcccagc

SEQ ID NO: 13319 - DNA, 20 bp, Artificial Sequence
  chemically synthesized
tgcagagccgcccagcaagc

SEQ ID NO: 13320 - DNA, 20 bp, Artificial Sequence
  chemically synthesized
agccgcccagcaagccagcc

SEQ ID NO: 13321 - DNA, 20 bp, Artificial Sequence
  chemically synthesized
gccgcccagcaagccagccg

SEQ ID NO: 13322 - DNA, 20 bp, Artificial Sequence
  chemically synthesized
gcaagccagccgaggccacc

SEQ ID NO: 13323 - DNA, 20 bp, Artificial Sequence
  chemically synthesized
caagccagccgaggccaccg

SEQ ID NO: 13324 - DNA, 20 bp, Artificial Sequence
  chemically synthesized
accgaggtctgtgctttgca

SEQ ID NO: 13325 - DNA, 20 bp, Artificial Sequence
  chemically synthesized
ccgaggtctgtgctttgcat

SEQ ID NO: 13326 - DNA, 20 bp, Artificial Sequence
  chemically synthesized
cgaggtctgtgctttgcatg

SEQ ID NO: 13327 - DNA, 20 bp, Artificial Sequence
  chemically synthesized
gaggtctgtgctttgcatgg

SEQ ID NO: 13328 - DNA, 20 bp, Artificial Sequence
  chemically synthesized
tctgtgctttgcatgggggt

SEQ ID NO: 13329 - DNA, 20 bp, Artificial Sequence
  chemically synthesized
ctgtgctttgcatgggggtg

SEQ ID NO: 13330 - DNA, 20 bp, Artificial Sequence
  chemically synthesized
tgtgctttgcatgggggtga

SEQ ID NO: 13331 - DNA, 20 bp, Artificial Sequence
  chemically synthesized
gtgctttgcatgggggtgag

SEQ ID NO: 13332 - DNA, 20 bp, Artificial Sequence
  chemically synthesized
tgctttgcatgggggtgagg

SEQ ID NO: 13333 - DNA, 20 bp, Artificial Sequence
  chemically synthesized
tttgcatgggggtgaggggg

SEQ ID NO: 13334 - DNA, 20 bp, Artificial Sequence
  chemically synthesized
gcatgggggtgagggggtgg

SEQ ID NO: 13335 - DNA, 20 bp, Artificial Sequence
  chemically synthesized
tgggggtgagggggtggaag

SEQ ID NO: 13336 - DNA, 20 bp, Artificial Sequence
  chemically synthesized
ggtgagggggtggaagaagt

SEQ ID NO: 13337 - DNA, 20 bp, Artificial Sequence
  chemically synthesized
gtgagggggtggaagaagtg

SEQ ID NO: 13338 - DNA, 20 bp, Artificial Sequence
  chemically synthesized
gggggtggaagaagtgaggc

SEQ ID NO: 13339 - DNA, 20 bp, Artificial Sequence
  chemically synthesized
gggtggaagaagtgaggctg

SEQ ID NO: 13340 - DNA, 20 bp, Artificial Sequence
  chemically synthesized
aagaagtgaggctggagacc

SEQ ID NO: 13341 - DNA, 20 bp, Artificial Sequence
  chemically synthesized
acttgccatatccccctctt

SEQ ID NO: 13342 - DNA, 20 bp, Artificial Sequence
  chemically synthesized
ccctcttcggccatgccccg

SEQ ID NO: 13343 - DNA, 20 bp, Artificial Sequence
  chemically synthesized
tcggccatgccccgaagccc

SEQ ID NO: 13344 - DNA, 20 bp, Artificial Sequence
  chemically synthesized
ggccatgccccgaagcccta

SEQ ID NO: 13345 - DNA, 20 bp, Artificial Sequence
  chemically synthesized
agccctagagcgcgcactcc

SEQ ID NO: 13346 - DNA, 20 bp, Artificial Sequence
  chemically synthesized
ttcctccctaccaaaaatgc

SEQ ID NO: 13347 - DNA, 20 bp, Artificial Sequence
  chemically synthesized
accaaaaatgccggccccga

SEQ ID NO: 13348 - DNA, 20 bp, Artificial Sequence
  chemically synthesized
aaaatgccggccccgaaaga

SEQ ID NO: 13349 - DNA, 20 bp, Artificial Sequence
  chemically synthesized
cgaaaactgcaccgtgctcc

SEQ ID NO: 13350 - DNA, 20 bp, Artificial Sequence
  chemically synthesized
actgcaccgtgctccgagcc

SEQ ID NO: 13351 - DNA, 20 bp, Artificial Sequence
  chemically synthesized
gctccgagcccggcgcgcgc

SEQ ID NO: 13352 - DNA, 20 bp, Artificial Sequence
  chemically synthesized
agcccggcgcgcgctggtct

SEQ ID NO: 13353 - DNA, 20 bp, Artificial Sequence
  chemically synthesized
cgctggtctcagctcgcgca

SEQ ID NO: 13354 - DNA, 20 bp, Artificial Sequence
  chemically synthesized
gctggtctcagctcgcgcac

SEQ ID NO: 13355 - DNA, 20 bp, Artificial Sequence
  chemically synthesized
ctggtctcagctcgcgcacg

SEQ ID NO: 13356 - DNA, 20 bp, Artificial Sequence
  chemically synthesized
tggtctcagctcgcgcacgg

SEQ ID NO: 13357 - DNA, 20 bp, Artificial Sequence
  chemically synthesized
cagctcgcgcacgggggtgt

SEQ ID NO: 13358 - DNA, 20 bp, Artificial Sequence
  chemically synthesized
gggggtgtcggccgcgcgcc

SEQ ID NO: 13359 - DNA, 20 bp, Artificial Sequence
  chemically synthesized
cgcgcccggtcgcttctccg

SEQ ID NO: 13360 - DNA, 20 bp, Artificial Sequence
  chemically synthesized
cggtcgcttctccgcggccc

SEQ ID NO: 13361 - DNA, 20 bp, Artificial Sequence
  chemically synthesized
cgcttctccgcggccccggc

SEQ ID NO: 13362 - DNA, 20 bp, Artificial Sequence
  chemically synthesized
ttctccgcggccccggccag

SEQ ID NO: 13363 - DNA, 20 bp, Artificial Sequence
  chemically synthesized
cccggccagaagcattttta

SEQ ID NO: 13364 - DNA, 20 bp, Artificial Sequence
  chemically synthesized
gcatttttaaagtcaaaatg

SEQ ID NO: 13365 - DNA, 20 bp, Artificial Sequence
  chemically synthesized
taaagtcaaaatgaagaaca

SEQ ID NO: 13366 - DNA, 20 bp, Artificial Sequence
  chemically synthesized
aaatgaagaacaaagacata

SEQ ID NO: 13367 - DNA, 20 bp, Artificial Sequence
  chemically synthesized
aatgaagaacaaagacatac

SEQ ID NO: 13368 - DNA, 20 bp, Artificial Sequence
  chemically synthesized
atgaagaacaaagacatacg

SEQ ID NO: 13369 - DNA, 20 bp, Artificial Sequence
  chemically synthesized
aacaaagacatacggggtga

SEQ ID NO: 13370 - DNA, 20 bp, Artificial Sequence
  chemically synthesized
acaaagacatacggggtgat

SEQ ID NO: 13371 - DNA, 20 bp, Artificial Sequence
  chemically synthesized
caaagacatacggggtgatg

SEQ ID NO: 13372 - DNA, 20 bp, Artificial Sequence
  chemically synthesized
aaagacatacggggtgatgg

SEQ ID NO: 13373 - DNA, 20 bp, Artificial Sequence
  chemically synthesized
agacatacggggtgatgggg

SEQ ID NO: 13374 - DNA, 20 bp, Artificial Sequence
  chemically synthesized
acatacggggtgatggggga

SEQ ID NO: 13375 - DNA, 20 bp, Artificial Sequence
  chemically synthesized
acggggtgatgggggagaga

SEQ ID NO: 13376 - DNA, 20 bp, Artificial Sequence
  chemically synthesized
cggggtgatgggggagagaa

SEQ ID NO: 13377 - DNA, 20 bp, Artificial Sequence
  chemically synthesized
ggggtgatgggggagagaaa

SEQ ID NO: 13378 - DNA, 20 bp, Artificial Sequence
  chemically synthesized
cccccacccccaccctcgca

SEQ ID NO: 13379 - DNA, 20 bp, Artificial Sequence
  chemically synthesized
tcgcaaagctcgttcctccc

SEQ ID NO: 13380 - DNA, 20 bp, Artificial Sequence
  chemically synthesized
aagctcgttcctccccggac

SEQ ID NO: 13381 - DNA, 20 bp, Artificial Sequence
  chemically synthesized
cctccccggacgagaatcgc

SEQ ID NO: 13382 - DNA, 20 bp, Artificial Sequence
  chemically synthesized
ctccccggacgagaatcgcc

SEQ ID NO: 13383 - DNA, 20 bp, Artificial Sequence
  chemically synthesized
cccggacgagaatcgccggg

SEQ ID NO: 13384 - DNA, 20 bp, Artificial Sequence
  chemically synthesized
ccggacgagaatcgccgggc

SEQ ID NO: 13385 - DNA, 20 bp, Artificial Sequence
  chemically synthesized
ggacgagaatcgccgggcag

SEQ ID NO: 13386 - DNA, 20 bp, Artificial Sequence
  chemically synthesized
gacgagaatcgccgggcagg

SEQ ID NO: 13387 - DNA, 20 bp, Artificial Sequence
  chemically synthesized
gagaatcgccgggcaggagg

SEQ ID NO: 13388 - DNA, 20 bp, Artificial Sequence
  chemically synthesized
agaatcgccgggcaggaggt

SEQ ID NO: 13389 - DNA, 20 bp, Artificial Sequence
  chemically synthesized
gaatcgccgggcaggaggtg

SEQ ID NO: 13390 - DNA, 20 bp, Artificial Sequence
  chemically synthesized
aatcgccgggcaggaggtgg

SEQ ID NO: 13391 - DNA, 20 bp, Artificial Sequence
  chemically synthesized
tcgccgggcaggaggtgggg

SEQ ID NO: 13392 - DNA, 20 bp, Artificial Sequence
  chemically synthesized
cgccgggcaggaggtggggg

SEQ ID NO: 13393 - DNA, 20 bp, Artificial Sequence
  chemically synthesized
gcaggaggtgggggaggctc

SEQ ID NO: 13394 - DNA, 20 bp, Artificial Sequence
  chemically synthesized
aggtgggggaggctctggta

SEQ ID NO: 13395 - DNA, 20 bp, Artificial Sequence
  chemically synthesized
ggtgggggaggctctggtac

SEQ ID NO: 13396 - DNA, 20 bp, Artificial Sequence
  chemically synthesized
ggaggctctggtacaggttc

SEQ ID NO: 13397 - DNA, 20 bp, Artificial Sequence
  chemically synthesized
ggtacaggttcaagttcgct

SEQ ID NO: 13398 - DNA, 20 bp, Artificial Sequence
  chemically synthesized
cttgatcttgttctgcctcc

SEQ ID NO: 13399 - DNA, 20 bp, Artificial Sequence
  chemically synthesized
tctgcctcctagcgaccgaa

SEQ ID NO: 13400 - DNA, 20 bp, Artificial Sequence
  chemically synthesized
tagcgaccgaatggctcatt

SEQ ID NO: 13401 - DNA, 20 bp, Artificial Sequence
  chemically synthesized
aatggctcattcagcccaca

SEQ ID NO: 13402 - DNA, 20 bp, Artificial Sequence
  chemically synthesized
ggctcattcagcccacatag

SEQ ID NO: 13403 - DNA, 20 bp, Artificial Sequence
  chemically synthesized
ctcattcagcccacatagca

SEQ ID NO: 13404 - DNA, 20 bp, Artificial Sequence
  chemically synthesized
tcattcagcccacatagcag

SEQ ID NO: 13405 - DNA, 20 bp, Artificial Sequence
  chemically synthesized
ttcagcccacatagcagagg

SEQ ID NO: 13406 - DNA, 20 bp, Artificial Sequence
  chemically synthesized
tcagcccacatagcagaggc

SEQ ID NO: 13407 - DNA, 20 bp, Artificial Sequence
  chemically synthesized
cagcccacatagcagaggcg

SEQ ID NO: 13408 - DNA, 20 bp, Artificial Sequence
  chemically synthesized
agcccacatagcagaggcgg

SEQ ID NO: 13409 - DNA, 20 bp, Artificial Sequence
  chemically synthesized
gcccacatagcagaggcggg

SEQ ID NO: 13410 - DNA, 20 bp, Artificial Sequence
  chemically synthesized
cacatagcagaggcgggggg

SEQ ID NO: 13411 - DNA, 20 bp, Artificial Sequence
  chemically synthesized
acatagcagaggcggggggc

SEQ ID NO: 13412 - DNA, 20 bp, Artificial Sequence
  chemically synthesized
catagcagaggcggggggcg

SEQ ID NO: 13413 - DNA, 20 bp, Artificial Sequence
  chemically synthesized
atagcagaggcggggggcgg

SEQ ID NO: 13414 - DNA, 20 bp, Artificial Sequence
  chemically synthesized
tagcagaggcggggggcggg

SEQ ID NO: 13415 - DNA, 20 bp, Artificial Sequence
  chemically synthesized
agcagaggcggggggcgggg

SEQ ID NO: 13416 - DNA, 20 bp, Artificial Sequence
  chemically synthesized
agaggcggggggcggggggg

SEQ ID NO: 13417 - DNA, 20 bp, Artificial Sequence
  chemically synthesized
gggggcgggggggtggtact

SEQ ID NO: 13418 - DNA, 20 bp, Artificial Sequence
  chemically synthesized
ggggcgggggggtggtactg

SEQ ID NO: 13419 - DNA, 20 bp, Artificial Sequence
  chemically synthesized
gggggggtggtactgaggac

SEQ ID NO: 13420 - DNA, 20 bp, Artificial Sequence
  chemically synthesized
ggggggtggtactgaggacc

SEQ ID NO: 13421 - DNA, 20 bp, Artificial Sequence
  chemically synthesized
ggtggtactgaggaccggga

SEQ ID NO: 13422 - DNA, 20 bp, Artificial Sequence
  chemically synthesized
ggatggctcctgccccctct

SEQ ID NO: 13423 - DNA, 20 bp, Artificial Sequence
  chemically synthesized
tcctgccccctctgagcacc

SEQ ID NO: 13424 - DNA, 20 bp, Artificial Sequence
  chemically synthesized
cctctgagcacccagaaaat

SEQ ID NO: 13425 - DNA, 20 bp, Artificial Sequence
  chemically synthesized
ctctgagcacccagaaaatg

SEQ ID NO: 13426 - DNA, 20 bp, Artificial Sequence
  chemically synthesized
gagcacccagaaaatgagga

SEQ ID NO: 13427 - DNA, 20 bp, Artificial Sequence
  chemically synthesized
acccagaaaatgaggacaga

SEQ ID NO: 13428 - DNA, 20 bp, Artificial Sequence
  chemically synthesized
cagaaaatgaggacagaaag

SEQ ID NO: 13429 - DNA, 20 bp, Artificial Sequence
  chemically synthesized
aaaatgaggacagaaagaag

SEQ ID NO: 13430 - DNA, 20 bp, Artificial Sequence
  chemically synthesized
cccctcaccccctcccaaac

SEQ ID NO: 13431 - DNA, 20 bp, Artificial Sequence
  chemically synthesized
ccaaactggccctttaaccc

SEQ ID NO: 13432 - DNA, 20 bp, Artificial Sequence
  chemically synthesized
caaactggccctttaacccc

SEQ ID NO: 13433 - DNA, 20 bp, Artificial Sequence
  chemically synthesized
ctggccctttaaccccggga

SEQ ID NO: 13434 - DNA, 20 bp, Artificial Sequence
  chemically synthesized
tggccctttaaccccgggac

SEQ ID NO: 13435 - DNA, 20 bp, Artificial Sequence
  chemically synthesized
gccctttaaccccgggacag

SEQ ID NO: 13436 - DNA, 20 bp, Artificial Sequence
  chemically synthesized
ccctttaaccccgggacagg

SEQ ID NO: 13437 - DNA, 20 bp, Artificial Sequence
  chemically synthesized
ctttaaccccgggacaggag

SEQ ID NO: 13438 - DNA, 20 bp, Artificial Sequence
  chemically synthesized
tttaaccccgggacaggagg

SEQ ID NO: 13439 - DNA, 20 bp, Artificial Sequence
  chemically synthesized
ttaaccccgggacaggagga

SEQ ID NO: 13440 - DNA, 20 bp, Artificial Sequence
  chemically synthesized
taaccccgggacaggaggag

SEQ ID NO: 13441 - DNA, 20 bp, Artificial Sequence
  chemically synthesized
aaccccgggacaggaggagg

SEQ ID NO: 13442 - DNA, 20 bp, Artificial Sequence
  chemically synthesized
ggagggggtactaaccctcc

SEQ ID NO: 13443 - DNA, 20 bp, Artificial Sequence
  chemically synthesized
gggtactaaccctcccagcc

SEQ ID NO: 13444 - DNA, 20 bp, Artificial Sequence
  chemically synthesized
gtactaaccctcccagccta

SEQ ID NO: 13445 - DNA, 20 bp, Artificial Sequence
  chemically synthesized
ctcccagcctagagtgtccc

SEQ ID NO: 13446 - DNA, 20 bp, Artificial Sequence
  chemically synthesized
cagcctagagtgtcccaaga

SEQ ID NO: 13447 - DNA, 20 bp, Artificial Sequence
  chemically synthesized
agagtgtcccaagatggacc

SEQ ID NO: 13448 - DNA, 20 bp, Artificial Sequence
  chemically synthesized
gagtgtcccaagatggaccc

SEQ ID NO: 13449 - DNA, 20 bp, Artificial Sequence
  chemically synthesized
gtgtcccaagatggacccag

SEQ ID NO: 13450 - DNA, 20 bp, Artificial Sequence
  chemically synthesized
tgtcccaagatggacccagg

SEQ ID NO: 13451 - DNA, 20 bp, Artificial Sequence
  chemically synthesized
gtcccaagatggacccagga

SEQ ID NO: 13452 - DNA, 20 bp, Artificial Sequence
  chemically synthesized
cccaagatggacccaggagg

SEQ ID NO: 13453 - DNA, 20 bp, Artificial Sequence
  chemically synthesized
caagatggacccaggaggga

SEQ ID NO: 13454 - DNA, 20 bp, Artificial Sequence
  chemically synthesized
aagatggacccaggagggag

SEQ ID NO: 13455 - DNA, 20 bp, Artificial Sequence
  chemically synthesized
agatggacccaggagggaga

SEQ ID NO: 13456 - DNA, 20 bp, Artificial Sequence
  chemically synthesized
gatggacccaggagggagag

SEQ ID NO: 13457 - DNA, 20 bp, Artificial Sequence
  chemically synthesized
cccaggagggagaggggtac

SEQ ID NO: 13458 - DNA, 20 bp, Artificial Sequence
  chemically synthesized
ccaggagggagaggggtacg

SEQ ID NO: 13459 - DNA, 20 bp, Artificial Sequence
  chemically synthesized
caggagggagaggggtacga

SEQ ID NO: 13460 - DNA, 20 bp, Artificial Sequence
  chemically synthesized
ggagggagaggggtacgagg

SEQ ID NO: 13461 - DNA, 20 bp, Artificial Sequence
  chemically synthesized
gggagaggggtacgagggag

SEQ ID NO: 13462 - DNA, 20 bp, Artificial Sequence
  chemically synthesized
aggggtacgagggagcagcc

SEQ ID NO: 13463 - DNA, 20 bp, Artificial Sequence
  chemically synthesized
gcagcctggactgcgcgccc

SEQ ID NO: 13464 - DNA, 20 bp, Artificial Sequence
  chemically synthesized
cgcgccccggtctgtccttt

SEQ ID NO: 13465 - DNA, 20 bp, Artificial Sequence
  chemically synthesized
gcccccactgcatccttccg

SEQ ID NO: 13466 - DNA, 20 bp, Artificial Sequence
  chemically synthesized
cccactgcatccttccgaag

SEQ ID NO: 13467 - DNA, 20 bp, Artificial Sequence
  chemically synthesized
ccactgcatccttccgaaga

SEQ ID NO: 13468 - DNA, 20 bp, Artificial Sequence
  chemically synthesized
cactgcatccttccgaagaa

SEQ ID NO: 13469 - DNA, 20 bp, Artificial Sequence
  chemically synthesized
aagaagggcctgactttccc

SEQ ID NO: 13470 - DNA, 20 bp, Artificial Sequence
  chemically synthesized
acactgcccttccttcccgc

SEQ ID NO: 13471 - DNA, 20 bp, Artificial Sequence
  chemically synthesized
ccttccttcccgccggtacc

SEQ ID NO: 13472 - DNA, 20 bp, Artificial Sequence
  chemically synthesized
ccttcccgccggtacctggc

SEQ ID NO: 13473 - DNA, 20 bp, Artificial Sequence
  chemically synthesized
cttcccgccggtacctggcc

SEQ ID NO: 13474 - DNA, 20 bp, Artificial Sequence
  chemically synthesized
cgccgcgtctgatccgcatc

SEQ ID NO: 13475 - DNA, 20 bp, Artificial Sequence
  chemically synthesized
cgtctgatccgcatccggcg

SEQ ID NO: 13476 - DNA, 20 bp, Artificial Sequence
  chemically synthesized
tgatccgcatccggcgcggc

SEQ ID NO: 13477 - DNA, 20 bp, Artificial Sequence
  chemically synthesized
gatccgcatccggcgcggcc

SEQ ID NO: 13478 - DNA, 20 bp, Artificial Sequence
  chemically synthesized
atccgcatccggcgcggccg

SEQ ID NO: 13479 - DNA, 20 bp, Artificial Sequence
  chemically synthesized
tccgcatccggcgcggccgg

SEQ ID NO: 13480 - DNA, 20 bp, Artificial Sequence
  chemically synthesized
cgcatccggcgcggccgggg

SEQ ID NO: 13481 - DNA, 20 bp, Artificial Sequence
  chemically synthesized
tccggcgcggccgggggagt

SEQ ID NO: 13482 - DNA, 20 bp, Artificial Sequence
  chemically synthesized
ccggcgcggccgggggagtt

SEQ ID NO: 13483 - DNA, 20 bp, Artificial Sequence
  chemically synthesized
cggcgcggccgggggagttg

SEQ ID NO: 13484 - DNA, 20 bp, Artificial Sequence
  chemically synthesized
ggcgcggccgggggagttgg

SEQ ID NO: 13485 - DNA, 20 bp, Artificial Sequence
  chemically synthesized
gcggccgggggagttggggg

SEQ ID NO: 13486 - DNA, 20 bp, Artificial Sequence
  chemically synthesized
cggccgggggagttgggggc

SEQ ID NO: 13487 - DNA, 20 bp, Artificial Sequence
  chemically synthesized
ggccgggggagttgggggcg

SEQ ID NO: 13488 - DNA, 20 bp, Artificial Sequence
  chemically synthesized
gccgggggagttgggggcgg

SEQ ID NO: 13489 - DNA, 20 bp, Artificial Sequence
  chemically synthesized
cgggggagttgggggcgggg

SEQ ID NO: 13490 - DNA, 20 bp, Artificial Sequence
  chemically synthesized
ggggagttgggggcggggga

SEQ ID NO: 13491 - DNA, 20 bp, Artificial Sequence
  chemically synthesized
gagttgggggcgggggagag

SEQ ID NO: 13492 - DNA, 20 bp, Artificial Sequence
  chemically synthesized
tgggggcgggggagagcggc

SEQ ID NO: 13493 - DNA, 20 bp, Artificial Sequence
  chemically synthesized
gggggcgggggagagcggcg

SEQ ID NO: 13494 - DNA, 20 bp, Artificial Sequence
  chemically synthesized
ggggcgggggagagcggcga

SEQ ID NO: 13495 - DNA, 20 bp, Artificial Sequence
  chemically synthesized
ggcgggggagagcggcgagg

SEQ ID NO: 13496 - DNA, 20 bp, Artificial Sequence
  chemically synthesized
gcgggggagagcggcgaggg

SEQ ID NO: 13497 - DNA, 20 bp, Artificial Sequence
  chemically synthesized
cgggggagagcggcgaggga

SEQ ID NO: 13498 - DNA, 20 bp, Artificial Sequence
  chemically synthesized
gagcggcgagggagggatgc

SEQ ID NO: 13499 - DNA, 20 bp, Artificial Sequence
  chemically synthesized
agcggcgagggagggatgcg

SEQ ID NO: 13500 - DNA, 20 bp, Artificial Sequence
  chemically synthesized
gcggcgagggagggatgcga

SEQ ID NO: 13501 - DNA, 20 bp, Artificial Sequence
  chemically synthesized
cggcgagggagggatgcgag

SEQ ID NO: 13502 - DNA, 20 bp, Artificial Sequence
  chemically synthesized
ggcgagggagggatgcgagg

SEQ ID NO: 13503 - DNA, 20 bp, Artificial Sequence
  chemically synthesized
gagggagggatgcgaggggg

SEQ ID NO: 13504 - DNA, 20 bp, Artificial Sequence
  chemically synthesized
agggagggatgcgagggggt

SEQ ID NO: 13505 - DNA, 20 bp, Artificial Sequence
  chemically synthesized
gggagggatgcgagggggtg

SEQ ID NO: 13506 - DNA, 20 bp, Artificial Sequence
  chemically synthesized
gagggatgcgagggggtggg

SEQ ID NO: 13507 - DNA, 20 bp, Artificial Sequence
  chemically synthesized
gggatgcgagggggtgggga

SEQ ID NO: 13508 - DNA, 20 bp, Artificial Sequence
  chemically synthesized
ggatgcgagggggtggggag

SEQ ID NO: 13509 - DNA, 20 bp, Artificial Sequence
  chemically synthesized
gatgcgagggggtggggaga

SEQ ID NO: 13510 - DNA, 20 bp, Artificial Sequence
  chemically synthesized
tgcgagggggtggggagagg

SEQ ID NO: 13511 - DNA, 20 bp, Artificial Sequence
  chemically synthesized
gcgagggggtggggagaggg

SEQ ID NO: 13512 - DNA, 20 bp, Artificial Sequence
  chemically synthesized
cgagggggtggggagaggga

SEQ ID NO: 13513 - DNA, 20 bp, Artificial Sequence
  chemically synthesized
gggagggccgcgcaacgtgc

SEQ ID NO: 13514 - DNA, 20 bp, Artificial Sequence
  chemically synthesized
ggagggccgcgcaacgtgcc

SEQ ID NO: 13515 - DNA, 20 bp, Artificial Sequence
  chemically synthesized
gagggccgcgcaacgtgccg

SEQ ID NO: 13516 - DNA, 20 bp, Artificial Sequence
  chemically synthesized
ggccgcgcaacgtgccgggg

SEQ ID NO: 13517 - DNA, 20 bp, Artificial Sequence
  chemically synthesized
gccgcgcaacgtgccggggt

SEQ ID NO: 13518 - DNA, 20 bp, Artificial Sequence
  chemically synthesized
ccgcgcaacgtgccggggtg

SEQ ID NO: 13519 - DNA, 20 bp, Artificial Sequence
  chemically synthesized
cgcgcaacgtgccggggtgg

SEQ ID NO: 13520 - DNA, 20 bp, Artificial Sequence
  chemically synthesized
cgcaacgtgccggggtgggg

SEQ ID NO: 13521 - DNA, 20 bp, Artificial Sequence
  chemically synthesized
ccggggtgggggagcttccg

SEQ ID NO: 13522 - DNA, 20 bp, Artificial Sequence
  chemically synthesized
gagcttccgaagtgtgtgac

SEQ ID NO: 13523 - DNA, 20 bp, Artificial Sequence
  chemically synthesized
ccgaagtgtgtgacaagttc

SEQ ID NO: 13524 - DNA, 20 bp, Artificial Sequence
  chemically synthesized
cgaagtgtgtgacaagttcc

SEQ ID NO: 13525 - DNA, 20 bp, Artificial Sequence
  chemically synthesized
gaagtgtgtgacaagttcca

SEQ ID NO: 13526 - DNA, 20 bp, Artificial Sequence
  chemically synthesized
gtgtgacaagttccagggcc

SEQ ID NO: 13527 - DNA, 20 bp, Artificial Sequence
  chemically synthesized
accacccctttaaaaaaaca

SEQ ID NO: 13528 - DNA, 20 bp, Artificial Sequence
  chemically synthesized
ctttaaaaaaacacagaacc

SEQ ID NO: 13529 - DNA, 20 bp, Artificial Sequence
  chemically synthesized
aaaaaacacagaaccaagta

SEQ ID NO: 13530 - DNA, 20 bp, Artificial Sequence
  chemically synthesized
aaaaacacagaaccaagtat

SEQ ID NO: 13531 - DNA, 20 bp, Artificial Sequence
  chemically synthesized
aacacagaaccaagtatagg

SEQ ID NO: 13532 - DNA, 20 bp, Artificial Sequence
  chemically synthesized
aaaactgcatcaaaaattta

SEQ ID NO: 13533 - DNA, 20 bp, Artificial Sequence
  chemically synthesized
ctgcatcaaaaatttaaagt

SEQ ID NO: 13534 - DNA, 20 bp, Artificial Sequence
  chemically synthesized
taaagtaagaatcataaatt

SEQ ID NO: 13535 - DNA, 20 bp, Artificial Sequence
  chemically synthesized
agtaagaatcataaattgag

SEQ ID NO: 13536 - DNA, 20 bp, Artificial Sequence
  chemically synthesized
gtaagaatcataaattgagt

SEQ ID NO: 13537 - DNA, 20 bp, Artificial Sequence
  chemically synthesized
taagaatcataaattgagta

SEQ ID NO: 13538 - DNA, 20 bp, Artificial Sequence
  chemically synthesized
aagaatcataaattgagtag

SEQ ID NO: 13539 - DNA, 20 bp, Artificial Sequence
  chemically synthesized
agaatcataaattgagtagg

SEQ ID NO: 13540 - DNA, 20 bp, Artificial Sequence
  chemically synthesized
gaatcataaattgagtaggg

SEQ ID NO: 13541 - DNA, 20 bp, Artificial Sequence
  chemically synthesized
aatcataaattgagtagggg

SEQ ID NO: 13542 - DNA, 20 bp, Artificial Sequence
  chemically synthesized
aattgagtagggggggaatg

SEQ ID NO: 13543 - DNA, 20 bp, Artificial Sequence
  chemically synthesized
attgagtagggggggaatgt

SEQ ID NO: 13544 - DNA, 20 bp, Artificial Sequence
  chemically synthesized
ccttgctgccaaactttcct

SEQ ID NO: 13545 - DNA, 20 bp, Artificial Sequence
  chemically synthesized
gtgcccaccgcccgcctttc

SEQ ID NO: 13546 - DNA, 20 bp, Artificial Sequence
  chemically synthesized
tgcccaccgcccgcctttcc

SEQ ID NO: 13547 - DNA, 20 bp, Artificial Sequence
  chemically synthesized
accgcccgcctttccaggcg

SEQ ID NO: 13548 - DNA, 20 bp, Artificial Sequence
  chemically synthesized
cccgcctttccaggcgcagt

SEQ ID NO: 13549 - DNA, 20 bp, Artificial Sequence
  chemically synthesized
gcctttccaggcgcagtcag

SEQ ID NO: 13550 - DNA, 20 bp, Artificial Sequence
  chemically synthesized
cctttccaggcgcagtcagc

SEQ ID NO: 13551 - DNA, 20 bp, Artificial Sequence
  chemically synthesized
tttccaggcgcagtcagcgg

SEQ ID NO: 13552 - DNA, 20 bp, Artificial Sequence
  chemically synthesized
caggcgcagtcagcgggaga

SEQ ID NO: 13553 - DNA, 20 bp, Artificial Sequence
  chemically synthesized
cgggagacagccaccaccac

SEQ ID NO: 13554 - DNA, 20 bp, Artificial Sequence
  chemically synthesized
caccaccaccagctcttata

SEQ ID NO: 13555 - DNA, 20 bp, Artificial Sequence
  chemically synthesized
cagctcttatacagactcac

SEQ ID NO: 13556 - DNA, 20 bp, Artificial Sequence
  chemically synthesized
atacagactcacaagaacct

SEQ ID NO: 13557 - DNA, 20 bp, Artificial Sequence
  chemically synthesized
actcacaagaacctcagacc

SEQ ID NO: 13558 - DNA, 20 bp, Artificial Sequence
  chemically synthesized
acaagaacctcagaccaagc

SEQ ID NO: 13559 - DNA, 20 bp, Artificial Sequence
  chemically synthesized
caagaacctcagaccaagcc

SEQ ID NO: 13560 - DNA, 20 bp, Artificial Sequence
  chemically synthesized
acctcagaccaagccaggcc

SEQ ID NO: 13561 - DNA, 20 bp, Artificial Sequence
  chemically synthesized
cctcagaccaagccaggcct

SEQ ID NO: 13562 - DNA, 20 bp, Artificial Sequence
  chemically synthesized
ctcagaccaagccaggcctg

SEQ ID NO: 13563 - DNA, 20 bp, Artificial Sequence
  chemically synthesized
agaccaagccaggcctgggg

SEQ ID NO: 13564 - DNA, 20 bp, Artificial Sequence
  chemically synthesized
accaagccaggcctggggaa

SEQ ID NO: 13565 - DNA, 20 bp, Artificial Sequence
  chemically synthesized
ccaagccaggcctggggaag

SEQ ID NO: 13566 - DNA, 20 bp, Artificial Sequence
  chemically synthesized
caagccaggcctggggaaga

SEQ ID NO: 13567 - DNA, 20 bp, Artificial Sequence
  chemically synthesized
ccaggcctggggaagagggc

SEQ ID NO: 13568 - DNA, 20 bp, Artificial Sequence
  chemically synthesized
ggggaagagggcaagaccca

SEQ ID NO: 13569 - DNA, 20 bp, Artificial Sequence
  chemically synthesized
gggaagagggcaagacccaa

SEQ ID NO: 13570 - DNA, 20 bp, Artificial Sequence
  chemically synthesized
ggaagagggcaagacccaaa

SEQ ID NO: 13571 - DNA, 20 bp, Artificial Sequence
  chemically synthesized
agggcaagacccaaagggtg

SEQ ID NO: 13572 - DNA, 20 bp, Artificial Sequence
  chemically synthesized
gacccaaagggtgaagtgct

SEQ ID NO: 13573 - DNA, 20 bp, Artificial Sequence
  chemically synthesized
acccaaagggtgaagtgctc

SEQ ID NO: 13574 - DNA, 20 bp, Artificial Sequence
  chemically synthesized
cccaaagggtgaagtgctcg

SEQ ID NO: 13575 - DNA, 20 bp, Artificial Sequence
  chemically synthesized
gggtgaagtgctcggggtcc

SEQ ID NO: 13576 - DNA, 20 bp, Artificial Sequence
  chemically synthesized
ggtgaagtgctcggggtccc

SEQ ID NO: 13577 - DNA, 20 bp, Artificial Sequence
  chemically synthesized
gtgctcggggtcccaggatc

SEQ ID NO: 13578 - DNA, 20 bp, Artificial Sequence
  chemically synthesized
acttctcccctgcccttccc

SEQ ID NO: 13579 - DNA, 20 bp, Artificial Sequence
  chemically synthesized
tccccggcaaccccgccacc

SEQ ID NO: 13580 - DNA, 20 bp, Artificial Sequence
  chemically synthesized
ggcaaccccgccacctggcc

SEQ ID NO: 13581 - DNA, 20 bp, Artificial Sequence
  chemically synthesized
ccacctggcctagtcgtgct

SEQ ID NO: 13582 - DNA, 20 bp, Artificial Sequence
  chemically synthesized
cacctggcctagtcgtgctc

SEQ ID NO: 13583 - DNA, 20 bp, Artificial Sequence
  chemically synthesized
acctggcctagtcgtgctcg

SEQ ID NO: 13584 - DNA, 20 bp, Artificial Sequence
  chemically synthesized
gcctagtcgtgctcggggcg

SEQ ID NO: 13585 - DNA, 20 bp, Artificial Sequence
  chemically synthesized
cctagtcgtgctcggggcgc

SEQ ID NO: 13586 - DNA, 20 bp, Artificial Sequence
  chemically synthesized
ctagtcgtgctcggggcgca

SEQ ID NO: 13587 - DNA, 20 bp, Artificial Sequence
  chemically synthesized
tagtcgtgctcggggcgcag

SEQ ID NO: 13588 - DNA, 20 bp, Artificial Sequence
  chemically synthesized
agtcgtgctcggggcgcagg

SEQ ID NO: 13589 - DNA, 20 bp, Artificial Sequence
  chemically synthesized
tgctcggggcgcagggggac

SEQ ID NO: 13590 - DNA, 20 bp, Artificial Sequence
  chemically synthesized
ggcgcagggggactggtgac

SEQ ID NO: 13591 - DNA, 20 bp, Artificial Sequence
  chemically synthesized
agggggactggtgaccagac

SEQ ID NO: 13592 - DNA, 20 bp, Artificial Sequence
  chemically synthesized
gggggactggtgaccagacc

SEQ ID NO: 13593 - DNA, 20 bp, Artificial Sequence
  chemically synthesized
ggactggtgaccagaccggg

SEQ ID NO: 13594 - DNA, 20 bp, Artificial Sequence
  chemically synthesized
gactggtgaccagaccgggc

SEQ ID NO: 13595 - DNA, 20 bp, Artificial Sequence
  chemically synthesized
actggtgaccagaccgggcg

SEQ ID NO: 13596 - DNA, 20 bp, Artificial Sequence
  chemically synthesized
ggtgaccagaccgggcgggg

SEQ ID NO: 13597 - DNA, 20 bp, Artificial Sequence
  chemically synthesized
gtgaccagaccgggcggggt

SEQ ID NO: 13598 - DNA, 20 bp, Artificial Sequence
  chemically synthesized
tgaccagaccgggcggggtg

SEQ ID NO: 13599 - DNA, 20 bp, Artificial Sequence
  chemically synthesized
gaccagaccgggcggggtgg

SEQ ID NO: 13600 - DNA, 20 bp, Artificial Sequence
  chemically synthesized
accagaccgggcggggtggg

SEQ ID NO: 13601 - DNA, 20 bp, Artificial Sequence
  chemically synthesized
agaccgggcggggtgggggg

SEQ ID NO: 13602 - DNA, 20 bp, Artificial Sequence
  chemically synthesized
gaccgggcggggtggggggt

SEQ ID NO: 13603 - DNA, 20 bp, Artificial Sequence
  chemically synthesized
cgggcggggtggggggtggg

SEQ ID NO: 13604 - DNA, 20 bp, Artificial Sequence
  chemically synthesized
gggcggggtggggggtgggc

SEQ ID NO: 13605 - DNA, 20 bp, Artificial Sequence
  chemically synthesized
ggcggggtggggggtgggca

SEQ ID NO: 13606 - DNA, 20 bp, Artificial Sequence
  chemically synthesized
gggtggggggtgggcaggga

SEQ ID NO: 13607 - DNA, 20 bp, Artificial Sequence
  chemically synthesized
gggtgggcagggaaagcacg

SEQ ID NO: 13608 - DNA, 20 bp, Artificial Sequence
  chemically synthesized
agcacgtggtgacctcctcg

SEQ ID NO: 13609 - DNA, 20 bp, Artificial Sequence
  chemically synthesized
ggtgacctcctcgcggtccc

SEQ ID NO: 13610 - DNA, 20 bp, Artificial Sequence
  chemically synthesized
ctcctcgcggtcccgagctg

SEQ ID NO: 13611 - DNA, 20 bp, Artificial Sequence
  chemically synthesized
cgcggtcccgagctgtggac

SEQ ID NO: 13612 - DNA, 20 bp, Artificial Sequence
  chemically synthesized
cggtcccgagctgtggacaa

SEQ ID NO: 13613 - DNA, 20 bp, Artificial Sequence
  chemically synthesized
gctgtggacaagagacgtct

SEQ ID NO: 13614 - DNA, 20 bp, Artificial Sequence
  chemically synthesized
tggacaagagacgtctgaga

SEQ ID NO: 13615 - DNA, 20 bp, Artificial Sequence
  chemically synthesized
gagacgtctgagaaagtacc

SEQ ID NO: 13616 - DNA, 20 bp, Artificial Sequence
  chemically synthesized
agacgtctgagaaagtaccc

SEQ ID NO: 13617 - DNA, 20 bp, Artificial Sequence
  chemically synthesized
gacgtctgagaaagtaccca

SEQ ID NO: 13618 - DNA, 20 bp, Artificial Sequence
  chemically synthesized
gtctgagaaagtacccaggg

SEQ ID NO: 13619 - DNA, 20 bp, Artificial Sequence
  chemically synthesized
ctgagaaagtacccagggcg

SEQ ID NO: 13620 - DNA, 20 bp, Artificial Sequence
  chemically synthesized
tgagaaagtacccagggcgg

SEQ ID NO: 13621 - DNA, 20 bp, Artificial Sequence
  chemically synthesized
gagaaagtacccagggcgga

SEQ ID NO: 13622 - DNA, 20 bp, Artificial Sequence
  chemically synthesized
agaaagtacccagggcggag

SEQ ID NO: 13623 - DNA, 20 bp, Artificial Sequence
  chemically synthesized
aaagtacccagggcggaggg

SEQ ID NO: 13624 - DNA, 20 bp, Artificial Sequence
  chemically synthesized
aagtacccagggcggagggg

SEQ ID NO: 13625 - DNA, 20 bp, Artificial Sequence
  chemically synthesized
agtacccagggcggagggga

SEQ ID NO: 13626 - DNA, 20 bp, Artificial Sequence
  chemically synthesized
gtacccagggcggaggggag

SEQ ID NO: 13627 - DNA, 20 bp, Artificial Sequence
  chemically synthesized
acccagggcggaggggaggg

SEQ ID NO: 13628 - DNA, 20 bp, Artificial Sequence
  chemically synthesized
cccagggcggaggggagggg

SEQ ID NO: 13629 - DNA, 20 bp, Artificial Sequence
  chemically synthesized
ggcggaggggaggggaggcg

SEQ ID NO: 13630 - DNA, 20 bp, Artificial Sequence
  chemically synthesized
aggcgcagaacgcgctttta

SEQ ID NO: 13631 - DNA, 20 bp, Artificial Sequence
  chemically synthesized
caaaataaaaatgctttgca

SEQ ID NO: 13632 - DNA, 20 bp, Artificial Sequence
  chemically synthesized
taaaaatgctttgcaaagcc

SEQ ID NO: 13633 - DNA, 20 bp, Artificial Sequence
  chemically synthesized
ttgcaaagccgagtttcacc

SEQ ID NO: 13634 - DNA, 20 bp, Artificial Sequence
  chemically synthesized
gtttcacccagccgatttcg

SEQ ID NO: 13635 - DNA, 20 bp, Artificial Sequence
  chemically synthesized
acccagccgatttcgcagtc

SEQ ID NO: 13636 - DNA, 20 bp, Artificial Sequence
  chemically synthesized
cccagccgatttcgcagtct

SEQ ID NO: 13637 - DNA, 20 bp, Artificial Sequence
  chemically synthesized
cagccgatttcgcagtctgg

SEQ ID NO: 13638 - DNA, 20 bp, Artificial Sequence
  chemically synthesized
agccgatttcgcagtctggg

SEQ ID NO: 13639 - DNA, 20 bp, Artificial Sequence
  chemically synthesized
atttcgcagtctgggaggtc

SEQ ID NO: 13640 - DNA, 20 bp, Artificial Sequence
  chemically synthesized
tcgcagtctgggaggtcgag

SEQ ID NO: 13641 - DNA, 20 bp, Artificial Sequence
  chemically synthesized
gcagtctgggaggtcgagaa

SEQ ID NO: 13642 - DNA, 20 bp, Artificial Sequence
  chemically synthesized
cagtctgggaggtcgagaag

SEQ ID NO: 13643 - DNA, 20 bp, Artificial Sequence
  chemically synthesized
gggaggtcgagaagaggtct

SEQ ID NO: 13644 - DNA, 20 bp, Artificial Sequence
  chemically synthesized
aagaggtctcggcattgtgc

SEQ ID NO: 13645 - DNA, 20 bp, Artificial Sequence
  chemically synthesized
agaggtctcggcattgtgct

SEQ ID NO: 13646 - DNA, 20 bp, Artificial Sequence
  chemically synthesized
gaggtctcggcattgtgctg

SEQ ID NO: 13647 - DNA, 20 bp, Artificial Sequence
  chemically synthesized
aggtctcggcattgtgctgg

SEQ ID NO: 13648 - DNA, 20 bp, Artificial Sequence
  chemically synthesized
tctcggcattgtgctggggg

SEQ ID NO: 13649 - DNA, 20 bp, Artificial Sequence
  chemically synthesized
gcattgtgctgggggcggac

SEQ ID NO: 13650 - DNA, 20 bp, Artificial Sequence
  chemically synthesized
cattgtgctgggggcggacc

SEQ ID NO: 13651 - DNA, 20 bp, Artificial Sequence
  chemically synthesized
ctgggggcggaccaggacca

SEQ ID NO: 13652 - DNA, 20 bp, Artificial Sequence
  chemically synthesized
tgggggcggaccaggaccac

SEQ ID NO: 13653 - DNA, 20 bp, Artificial Sequence
  chemically synthesized
ggcggaccaggaccacgggc

SEQ ID NO: 13654 - DNA, 20 bp, Artificial Sequence
  chemically synthesized
gcggaccaggaccacgggcc

SEQ ID NO: 13655 - DNA, 20 bp, Artificial Sequence
  chemically synthesized
accaggaccacgggccaggc

SEQ ID NO: 13656 - DNA, 20 bp, Artificial Sequence
  chemically synthesized
gaccacgggccaggctggcg

SEQ ID NO: 13657 - DNA, 20 bp, Artificial Sequence
  chemically synthesized
ccacgggccaggctggcgcg

SEQ ID NO: 13658 - DNA, 20 bp, Artificial Sequence
  chemically synthesized
gctggcgcggagacactgcg

SEQ ID NO: 13659 - DNA, 20 bp, Artificial Sequence
  chemically synthesized
gcgtggcctgccgccgtgcc

SEQ ID NO: 13660 - DNA, 20 bp, Artificial Sequence
  chemically synthesized
tggcctgccgccgtgcctgg

SEQ ID NO: 13661 - DNA, 20 bp, Artificial Sequence
  chemically synthesized
ggcctgccgccgtgcctggc

SEQ ID NO: 13662 - DNA, 20 bp, Artificial Sequence
  chemically synthesized
ctgccgccgtgcctggcggg

SEQ ID NO: 13663 - DNA, 20 bp, Artificial Sequence
  chemically synthesized
tgccgccgtgcctggcgggt

SEQ ID NO: 13664 - DNA, 20 bp, Artificial Sequence
  chemically synthesized
cgtgcctggcgggtgggcgc

SEQ ID NO: 13665 - DNA, 20 bp, Artificial Sequence
  chemically synthesized
gtgcctggcgggtgggcgcc

SEQ ID NO: 13666 - DNA, 20 bp, Artificial Sequence
  chemically synthesized
ggcgggtgggcgccgggcgc

SEQ ID NO: 13667 - DNA, 20 bp, Artificial Sequence
  chemically synthesized
gcgggtgggcgccgggcgcc

SEQ ID NO: 13668 - DNA, 20 bp, Artificial Sequence
  chemically synthesized
ggtgggcgccgggcgccggg

SEQ ID NO: 13669 - DNA, 20 bp, Artificial Sequence
  chemically synthesized
gtgggcgccgggcgccgggt

SEQ ID NO: 13670 - DNA, 20 bp, Artificial Sequence
  chemically synthesized
cgggcgccgggtgggcgatc

SEQ ID NO: 13671 - DNA, 20 bp, Artificial Sequence
  chemically synthesized
gggcgccgggtgggcgatcc

SEQ ID NO: 13672 - DNA, 20 bp, Artificial Sequence
  chemically synthesized
ggcgccgggtgggcgatccg

SEQ ID NO: 13673 - DNA, 20 bp, Artificial Sequence
  chemically synthesized
ccgggtgggcgatccggggc

SEQ ID NO: 13674 - DNA, 20 bp, Artificial Sequence
  chemically synthesized
cgggtgggcgatccggggct

SEQ ID NO: 13675 - DNA, 20 bp, Artificial Sequence
  chemically synthesized
tgggcgatccggggctgggc

SEQ ID NO: 13676 - DNA, 20 bp, Artificial Sequence
  chemically synthesized
gggcgatccggggctgggct

SEQ ID NO: 13677 - DNA, 20 bp, Artificial Sequence
  chemically synthesized
ggcgatccggggctgggctg

SEQ ID NO: 13678 - DNA, 20 bp, Artificial Sequence
  chemically synthesized
tccggggctgggctggggcg

SEQ ID NO: 13679 - DNA, 20 bp, Artificial Sequence
  chemically synthesized
gggctgggctggggcgcggc

SEQ ID NO: 13680 - DNA, 20 bp, Artificial Sequence
  chemically synthesized
ggctgggctggggcgcggcg

SEQ ID NO: 13681 - DNA, 20 bp, Artificial Sequence
  chemically synthesized
gggctggggcgcggcgaggt

SEQ ID NO: 13682 - DNA, 20 bp, Artificial Sequence
  chemically synthesized
ggctggggcgcggcgaggtc

SEQ ID NO: 13683 - DNA, 20 bp, Artificial Sequence
  chemically synthesized
ggggcgcggcgaggtcgggc

SEQ ID NO: 13684 - DNA, 20 bp, Artificial Sequence
  chemically synthesized
gggcgcggcgaggtcgggca

SEQ ID NO: 13685 - DNA, 20 bp, Artificial Sequence
  chemically synthesized
cggcgaggtcgggcaaggcc

SEQ ID NO: 13686 - DNA, 20 bp, Artificial Sequence
  chemically synthesized
ggcgaggtcgggcaaggccc

SEQ ID NO: 13687 - DNA, 20 bp, Artificial Sequence
  chemically synthesized
aggtcgggcaaggcccgggc

SEQ ID NO: 13688 - DNA, 20 bp, Artificial Sequence
  chemically synthesized
ggtcgggcaaggcccgggcg

SEQ ID NO: 13689 - DNA, 20 bp, Artificial Sequence
  chemically synthesized
gggcaaggcccgggcgaggc

SEQ ID NO: 13690 - DNA, 20 bp, Artificial Sequence
  chemically synthesized
ggcaaggcccgggcgaggcc

SEQ ID NO: 13691 - DNA, 20 bp, Artificial Sequence
  chemically synthesized
gccgccgccgccgcctgctc

SEQ ID NO: 13692 - DNA, 20 bp, Artificial Sequence
  chemically synthesized
ccgccgccgccgcctgctcc

SEQ ID NO: 13693 - DNA, 20 bp, Artificial Sequence
  chemically synthesized
cgccgccgccgcctgctccg

SEQ ID NO: 13694 - DNA, 20 bp, Artificial Sequence
  chemically synthesized
cggggctgccgcgccgcgct

SEQ ID NO: 13695 - DNA, 20 bp, Artificial Sequence
  chemically synthesized
tcggtcctctgtctgtttgt

SEQ ID NO: 13696 - DNA, 20 bp, Artificial Sequence
  chemically synthesized
gtcctctgtctgtttgttgg

SEQ ID NO: 13697 - DNA, 20 bp, Artificial Sequence
  chemically synthesized
tcctctgtctgtttgttggc

SEQ ID NO: 13698 - DNA, 20 bp, Artificial Sequence
  chemically synthesized
ctctgtctgtttgttggcag

SEQ ID NO: 13699 - DNA, 20 bp, Artificial Sequence
  chemically synthesized
tctgtctgtttgttggcagg

SEQ ID NO: 13700 - DNA, 20 bp, Artificial Sequence
  chemically synthesized
gcaggaggctcccgcacacg

SEQ ID NO: 13701 - DNA, 20 bp, Artificial Sequence
  chemically synthesized
acgcggtgcttgtaaacatt

SEQ ID NO: 13702 - DNA, 20 bp, Artificial Sequence
  chemically synthesized
gcttgtaaacattcagacac

SEQ ID NO: 13703 - DNA, 20 bp, Artificial Sequence
  chemically synthesized
tttgaaaatcttccaaaaaa

SEQ ID NO: 13704 - DNA, 20 bp, Artificial Sequence
  chemically synthesized
aaaatcttccaaaaaatagt

SEQ ID NO: 13705 - DNA, 20 bp, Artificial Sequence
  chemically synthesized
aatcttccaaaaaatagtaa

SEQ ID NO: 13706 - DNA, 20 bp, Artificial Sequence
  chemically synthesized
atcttccaaaaaatagtaag

SEQ ID NO: 13707 - DNA, 20 bp, Artificial Sequence
  chemically synthesized
cttccaaaaaatagtaagag

SEQ ID NO: 13708 - DNA, 20 bp, Artificial Sequence
  chemically synthesized
ttccaaaaaatagtaagagg

SEQ ID NO: 13709 - DNA, 20 bp, Artificial Sequence
  chemically synthesized
tccaaaaaatagtaagagga

SEQ ID NO: 13710 - DNA, 20 bp, Artificial Sequence
  chemically synthesized
caaaaaatagtaagaggagg

SEQ ID NO: 13711 - DNA, 20 bp, Artificial Sequence
  chemically synthesized
tctctccctctccgtgccgt

SEQ ID NO: 13712 - DNA, 20 bp, Artificial Sequence
  chemically synthesized
ctccgtgccgtcggcgccct

SEQ ID NO: 13713 - DNA, 20 bp, Artificial Sequence
  chemically synthesized
gcgccctaagtttgcaactg

SEQ ID NO: 13714 - DNA, 20 bp, Artificial Sequence
  chemically synthesized
cgccctaagtttgcaactga

SEQ ID NO: 13715 - DNA, 20 bp, Artificial Sequence
  chemically synthesized
gccctaagtttgcaactgaa

SEQ ID NO: 13716 - DNA, 20 bp, Artificial Sequence
  chemically synthesized
ccctaagtttgcaactgaag

SEQ ID NO: 13717 - DNA, 20 bp, Artificial Sequence
  chemically synthesized
agtttgcaactgaaggggtt

SEQ ID NO: 13718 - DNA, 20 bp, Artificial Sequence
  chemically synthesized
gtttgcaactgaaggggttt

SEQ ID NO: 13719 - DNA, 20 bp, Artificial Sequence
  chemically synthesized
tttgcaactgaaggggtttg

SEQ ID NO: 13720 - DNA, 20 bp, Artificial Sequence
  chemically synthesized
ttgcaactgaaggggtttgg

SEQ ID NO: 13721 - DNA, 20 bp, Artificial Sequence
  chemically synthesized
caactgaaggggtttggggg

SEQ ID NO: 13722 - DNA, 20 bp, Artificial Sequence
  chemically synthesized
actgaaggggtttgggggaa

SEQ ID NO: 13723 - DNA, 20 bp, Artificial Sequence
  chemically synthesized
ctgaaggggtttgggggaag

SEQ ID NO: 13724 - DNA, 20 bp, Artificial Sequence
  chemically synthesized
tgaaggggtttgggggaaga

SEQ ID NO: 13725 - DNA, 20 bp, Artificial Sequence
  chemically synthesized
ggtgattgtaaatttttttc

SEQ ID NO: 13726 - DNA, 20 bp, Artificial Sequence
  chemically synthesized
ttgtaaatttttttctagat

SEQ ID NO: 13727 - DNA, 20 bp, Artificial Sequence
  chemically synthesized
gtaaatttttttctagatga

SEQ ID NO: 13728 - DNA, 20 bp, Artificial Sequence
  chemically synthesized
ttttctagatgagagattgt

SEQ ID NO: 13729 - DNA, 20 bp, Artificial Sequence
  chemically synthesized
gagagattgtgagatttttg

SEQ ID NO: 13730 - DNA, 20 bp, Artificial Sequence
  chemically synthesized
agagattgtgagatttttgc

SEQ ID NO: 13731 - DNA, 20 bp, Artificial Sequence
  chemically synthesized
gagattgtgagatttttgca

SEQ ID NO: 13732 - DNA, 20 bp, Artificial Sequence
  chemically synthesized
agattgtgagatttttgcag

SEQ ID NO: 13733 - DNA, 20 bp, Artificial Sequence
  chemically synthesized
gattgtgagatttttgcagg

SEQ ID NO: 13734 - DNA, 20 bp, Artificial Sequence
  chemically synthesized
attgtgagatttttgcaggg

SEQ ID NO: 13735 - DNA, 20 bp, Artificial Sequence
  chemically synthesized
tgagatttttgcaggggggc

SEQ ID NO: 13736 - DNA, 20 bp, Artificial Sequence
  chemically synthesized
gatttttgcaggggggctgg

SEQ ID NO: 13737 - DNA, 20 bp, Artificial Sequence
  chemically synthesized
atttttgcaggggggctggt

SEQ ID NO: 13738 - DNA, 20 bp, Artificial Sequence
  chemically synthesized
tttttgcaggggggctggtg

SEQ ID NO: 13739 - DNA, 20 bp, Artificial Sequence
  chemically synthesized
ttttgcaggggggctggtgg

SEQ ID NO: 13740 - DNA, 20 bp, Artificial Sequence
  chemically synthesized
ttgcaggggggctggtgggg

SEQ ID NO: 13741 - DNA, 20 bp, Artificial Sequence
  chemically synthesized
gggggctggtgggggagtca

SEQ ID NO: 13742 - DNA, 20 bp, Artificial Sequence
  chemically synthesized
gggctggtgggggagtcaaa

SEQ ID NO: 13743 - DNA, 20 bp, Artificial Sequence
  chemically synthesized
ctggtgggggagtcaaagag

SEQ ID NO: 13744 - DNA, 20 bp, Artificial Sequence
  chemically synthesized
tggtgggggagtcaaagaga

SEQ ID NO: 13745 - DNA, 20 bp, Artificial Sequence
  chemically synthesized
agtcaaagagaaggccgtca

SEQ ID NO: 13746 - DNA, 20 bp, Artificial Sequence
  chemically synthesized
aagagaaggccgtcacagaa

SEQ ID NO: 13747 - DNA, 20 bp, Artificial Sequence
  chemically synthesized
agagaaggccgtcacagaaa

SEQ ID NO: 13748 - DNA, 20 bp, Artificial Sequence
  chemically synthesized
gagaaggccgtcacagaaaa

SEQ ID NO: 13749 - DNA, 20 bp, Artificial Sequence
  chemically synthesized
aggccgtcacagaaaagggt

SEQ ID NO: 13750 - DNA, 20 bp, Artificial Sequence
  chemically synthesized
ccgtcacagaaaagggttgg

SEQ ID NO: 13751 - DNA, 20 bp, Artificial Sequence
  chemically synthesized
gtcacagaaaagggttggca

SEQ ID NO: 13752 - DNA, 20 bp, Artificial Sequence
  chemically synthesized
aaaagggttggcagagcgtt

SEQ ID NO: 13753 - DNA, 20 bp, Artificial Sequence
  chemically synthesized
gttggcagagcgtttggctt

SEQ ID NO: 13754 - DNA, 20 bp, Artificial Sequence
  chemically synthesized
cagagcgtttggcttcggtt

SEQ ID NO: 13755 - DNA, 20 bp, Artificial Sequence
  chemically synthesized
agagcgtttggcttcggttt

SEQ ID NO: 13756 - DNA, 20 bp, Artificial Sequence
  chemically synthesized
gagcgtttggcttcggtttg

SEQ ID NO: 13757 - DNA, 20 bp, Artificial Sequence
  chemically synthesized
agcgtttggcttcggtttgg

SEQ ID NO: 13758 - DNA, 20 bp, Artificial Sequence
  chemically synthesized
tttggcttcggtttgggggc

SEQ ID NO: 13759 - DNA, 20 bp, Artificial Sequence
  chemically synthesized
gtatttatttatttatgtgc

SEQ ID NO: 13760 - DNA, 20 bp, Artificial Sequence
  chemically synthesized
gtcttctccttgctgcctct

SEQ ID NO: 13761 - DNA, 20 bp, Artificial Sequence
  chemically synthesized
tcttctccttgctgcctctg

SEQ ID NO: 13762 - DNA, 20 bp, Artificial Sequence
  chemically synthesized
tccttgctgcctctgaggtt

SEQ ID NO: 13763 - DNA, 20 bp, Artificial Sequence
  chemically synthesized
tgctgcctctgaggttcggt

SEQ ID NO: 13764 - DNA, 20 bp, Artificial Sequence
  chemically synthesized
gctgcctctgaggttcggtc

SEQ ID NO: 13765 - DNA, 20 bp, Artificial Sequence
  chemically synthesized
tgcctctgaggttcggtcgg

SEQ ID NO: 13766 - DNA, 20 bp, Artificial Sequence
  chemically synthesized
gcctctgaggttcggtcggg

SEQ ID NO: 13767 - DNA, 20 bp, Artificial Sequence
  chemically synthesized
cctctgaggttcggtcggga

SEQ ID NO: 13768 - DNA, 20 bp, Artificial Sequence
  chemically synthesized
ctctgaggttcggtcgggag

SEQ ID NO: 13769 - DNA, 20 bp, Artificial Sequence
  chemically synthesized
ctgaggttcggtcgggaggg

SEQ ID NO: 13770 - DNA, 20 bp, Artificial Sequence
  chemically synthesized
tgaggttcggtcgggagggg

SEQ ID NO: 13771 - DNA, 20 bp, Artificial Sequence
  chemically synthesized
gaggttcggtcgggagggga

SEQ ID NO: 13772 - DNA, 20 bp, Artificial Sequence
  chemically synthesized
gttcggtcgggaggggaggg

SEQ ID NO: 13773 - DNA, 20 bp, Artificial Sequence
  chemically synthesized
cggtcgggaggggagggcag

SEQ ID NO: 13774 - DNA, 20 bp, Artificial Sequence
  chemically synthesized
aggggagggcagcggcaacc

SEQ ID NO: 13775 - DNA, 20 bp, Artificial Sequence
  chemically synthesized
ggggagggcagcggcaaccc

SEQ ID NO: 13776 - DNA, 20 bp, Artificial Sequence
  chemically synthesized
ggagggcagcggcaacccag

SEQ ID NO: 13777 - DNA, 20 bp, Artificial Sequence
  chemically synthesized
gagggcagcggcaacccagg

SEQ ID NO: 13778 - DNA, 20 bp, Artificial Sequence
  chemically synthesized
ggcagcggcaacccaggagg

SEQ ID NO: 13779 - DNA, 20 bp, Artificial Sequence
  chemically synthesized
agcggcaacccaggaggcag

SEQ ID NO: 13780 - DNA, 20 bp, Artificial Sequence
  chemically synthesized
caacccaggaggcagcagtc

SEQ ID NO: 13781 - DNA, 20 bp, Artificial Sequence
  chemically synthesized
aacccaggaggcagcagtcc

SEQ ID NO: 13782 - DNA, 20 bp, Artificial Sequence
  chemically synthesized
ctccctctcccgcgtgcccc

SEQ ID NO: 13783 - DNA, 20 bp, Artificial Sequence
  chemically synthesized
cccccggccgcctcctcccc

SEQ ID NO: 13784 - DNA, 20 bp, Artificial Sequence
  chemically synthesized
gccgcctcctcccccggccc

SEQ ID NO: 13785 - DNA, 20 bp, Artificial Sequence
  chemically synthesized
cggccctagctcctgccctt

SEQ ID NO: 13786 - DNA, 20 bp, Artificial Sequence
  chemically synthesized
ccctagctcctgcccttcgg

SEQ ID NO: 13787 - DNA, 20 bp, Artificial Sequence
  chemically synthesized
tagctcctgcccttcggcgg

SEQ ID NO: 13788 - DNA, 20 bp, Artificial Sequence
  chemically synthesized
ctcctgcccttcggcggcgg

SEQ ID NO: 13789 - DNA, 20 bp, Artificial Sequence
  chemically synthesized
ctgcccttcggcggcggcgg

SEQ ID NO: 13790 - DNA, 20 bp, Artificial Sequence
  chemically synthesized
cccttcggcggcggcggcgg

SEQ ID NO: 13791 - DNA, 20 bp, Artificial Sequence
  chemically synthesized
ttcggcggcggcggcggcgg

SEQ ID NO: 13792 - DNA, 20 bp, Artificial Sequence
  chemically synthesized
cggcggcggcggcggcggcg

SEQ ID NO: 13793 - DNA, 20 bp, Artificial Sequence
  chemically synthesized
ggcggcggcggcggcggcgc

SEQ ID NO: 13794 - DNA, 20 bp, Artificial Sequence
  chemically synthesized
cggcggcggcggcggcgcgg

SEQ ID NO: 13795 - DNA, 20 bp, Artificial Sequence
  chemically synthesized
ggcggcggcggcggcgcggg

SEQ ID NO: 13796 - DNA, 20 bp, Artificial Sequence
  chemically synthesized
gcggcggcggcggcgcggga

SEQ ID NO: 13797 - DNA, 20 bp, Artificial Sequence
  chemically synthesized
cggcggcggcgcgggagggc

SEQ ID NO: 13798 - DNA, 20 bp, Artificial Sequence
  chemically synthesized
cggcgcgggagggcaagcgc

SEQ ID NO: 13799 - DNA, 20 bp, Artificial Sequence
  chemically synthesized
ggcgcgggagggcaagcgcg

SEQ ID NO: 13800 - DNA, 20 bp, Artificial Sequence
  chemically synthesized
cgcgggagggcaagcgcgag

SEQ ID NO: 13801 - DNA, 20 bp, Artificial Sequence
  chemically synthesized
ggagggcaagcgcgaggagc

SEQ ID NO: 13802 - DNA, 20 bp, Artificial Sequence
  chemically synthesized
agcgcgaggagccggcacaa

SEQ ID NO: 13803 - DNA, 20 bp, Artificial Sequence
  chemically synthesized
gcgcgaggagccggcacaaa

SEQ ID NO: 13804 - DNA, 20 bp, Artificial Sequence
  chemically synthesized
cgaggagccggcacaaaagg

SEQ ID NO: 13805 - DNA, 20 bp, Artificial Sequence
  chemically synthesized
ggagccggcacaaaaggcag

SEQ ID NO: 13806 - DNA, 20 bp, Artificial Sequence
  chemically synthesized
gagccggcacaaaaggcagc

SEQ ID NO: 13807 - DNA, 20 bp, Artificial Sequence
  chemically synthesized
gcgggacaaacacccacctc

SEQ ID NO: 13808 - DNA, 20 bp, Artificial Sequence
  chemically synthesized
gacaaacacccacctctggc

SEQ ID NO: 13809 - DNA, 20 bp, Artificial Sequence
  chemically synthesized
cccacctctggccggaacaa

SEQ ID NO: 13810 - DNA, 20 bp, Artificial Sequence
  chemically synthesized
ccacctctggccggaacaaa

SEQ ID NO: 13811 - DNA, 20 bp, Artificial Sequence
  chemically synthesized
cctctggccggaacaaaagg

SEQ ID NO: 13812 - DNA, 20 bp, Artificial Sequence
  chemically synthesized
ctggccggaacaaaaggcgg

SEQ ID NO: 13813 - DNA, 20 bp, Artificial Sequence
  chemically synthesized
ggaacaaaaggcggcagtgc

SEQ ID NO: 13814 - DNA, 20 bp, Artificial Sequence
  chemically synthesized
gccgcgtctcccgtccttcc

SEQ ID NO: 13815 - DNA, 20 bp, Artificial Sequence
  chemically synthesized
tcccgtccttcccggtccca

SEQ ID NO: 13816 - DNA, 20 bp, Artificial Sequence
  chemically synthesized
cacggctctccccgtcgccg

SEQ ID NO: 13817 - DNA, 20 bp, Artificial Sequence
  chemically synthesized
cggcccctctcccgactccg

SEQ ID NO: 13818 - DNA, 20 bp, Artificial Sequence
  chemically synthesized
ctctcccgactccgcggact

SEQ ID NO: 13819 - DNA, 20 bp, Artificial Sequence
  chemically synthesized
tctcccgactccgcggactc

SEQ ID NO: 13820 - DNA, 20 bp, Artificial Sequence
  chemically synthesized
tcccgactccgcggactcag

SEQ ID NO: 13821 - DNA, 20 bp, Artificial Sequence
  chemically synthesized
ctccgcggactcaggagcgc

SEQ ID NO: 13822 - DNA, 20 bp, Artificial Sequence
  chemically synthesized
tccgcggactcaggagcgcc

SEQ ID NO: 13823 - DNA, 20 bp, Artificial Sequence
  chemically synthesized
ccgcggactcaggagcgccg

SEQ ID NO: 13824 - DNA, 20 bp, Artificial Sequence
  chemically synthesized
cgcggactcaggagcgccgg

SEQ ID NO: 13825 - DNA, 20 bp, Artificial Sequence
  chemically synthesized
gcgccgggggcccctttcca

SEQ ID NO: 13826 - DNA, 20 bp, Artificial Sequence
  chemically synthesized
gtgccactttctcactattg

SEQ ID NO: 13827 - DNA, 20 bp, Artificial Sequence
  chemically synthesized
tgccactttctcactattgt

SEQ ID NO: 13828 - DNA, 20 bp, Artificial Sequence
  chemically synthesized
gccactttctcactattgtg

SEQ ID NO: 13829 - DNA, 20 bp, Artificial Sequence
  chemically synthesized
cccgctgcacacttgaccgt

SEQ ID NO: 13830 - DNA, 20 bp, Artificial Sequence
  chemically synthesized
acacttgaccgtgagcgcgc

SEQ ID NO: 13831 - DNA, 20 bp, Artificial Sequence
  chemically synthesized
gtgagcgcgctggtgtccaa

SEQ ID NO: 13832 - DNA, 20 bp, Artificial Sequence
  chemically synthesized
gcgcgctggtgtccaaaagc

SEQ ID NO: 13833 - DNA, 20 bp, Artificial Sequence
  chemically synthesized
agtctcacctcttttctccc

SEQ ID NO: 13834 - DNA, 20 bp, Artificial Sequence
  chemically synthesized
gtctcacctcttttctcccc

SEQ ID NO: 13835 - DNA, 20 bp, Artificial Sequence
  chemically synthesized
tctccccgggaatcgttttt

SEQ ID NO: 13836 - DNA, 20 bp, Artificial Sequence
  chemically synthesized
cctacccccccattttctta

SEQ ID NO: 13837 - DNA, 20 bp, Artificial Sequence
  chemically synthesized
cccccccattttcttacggt

SEQ ID NO: 13838 - DNA, 20 bp, Artificial Sequence
  chemically synthesized
ccccattttcttacggtgag

SEQ ID NO: 13839 - DNA, 20 bp, Artificial Sequence
  chemically synthesized
cccattttcttacggtgagt

SEQ ID NO: 13840 - DNA, 20 bp, Artificial Sequence
  chemically synthesized
attttcttacggtgagtggg

SEQ ID NO: 13841 - DNA, 20 bp, Artificial Sequence
  chemically synthesized
agcaacctccctttccccac

SEQ ID NO: 13842 - DNA, 20 bp, Artificial Sequence
  chemically synthesized
tccccaccagctcccacccc

SEQ ID NO: 13843 - DNA, 20 bp, Artificial Sequence
  chemically synthesized
ccccaccagctcccaccccc

SEQ ID NO: 13844 - DNA, 20 bp, Artificial Sequence
  chemically synthesized
ccacccccaggtttgcatgt

SEQ ID NO: 13845 - DNA, 20 bp, Artificial Sequence
  chemically synthesized
atgtgagttgttcgcaacct

SEQ ID NO: 13846 - DNA, 20 bp, Artificial Sequence
  chemically synthesized
tgttcattattttgcaaaac

SEQ ID NO: 13847 - DNA, 20 bp, Artificial Sequence
  chemically synthesized
tcattattttgcaaaactgg

SEQ ID NO: 13848 - DNA, 20 bp, Artificial Sequence
  chemically synthesized
cattattttgcaaaactggc

SEQ ID NO: 13849 - DNA, 20 bp, Artificial Sequence
  chemically synthesized
attattttgcaaaactggcg

SEQ ID NO: 13850 - DNA, 20 bp, Artificial Sequence
  chemically synthesized
attttgcaaaactggcgggg

SEQ ID NO: 13851 - DNA, 20 bp, Artificial Sequence
  chemically synthesized
ttttgcaaaactggcggggc

SEQ ID NO: 13852 - DNA, 20 bp, Artificial Sequence
  chemically synthesized
tttgcaaaactggcggggcg

SEQ ID NO: 13853 - DNA, 20 bp, Artificial Sequence
  chemically synthesized
ttgcaaaactggcggggcgg

SEQ ID NO: 13854 - DNA, 20 bp, Artificial Sequence
  chemically synthesized
tgcaaaactggcggggcggg

SEQ ID NO: 13855 - DNA, 20 bp, Artificial Sequence
  chemically synthesized
gcaaaactggcggggcgggg

SEQ ID NO: 13856 - DNA, 20 bp, Artificial Sequence
  chemically synthesized
caaaactggcggggcggggg

SEQ ID NO: 13857 - DNA, 20 bp, Artificial Sequence
  chemically synthesized
aaactggcggggcggggggg

SEQ ID NO: 13858 - DNA, 20 bp, Artificial Sequence
  chemically synthesized
ctggcggggcggggggggag

SEQ ID NO: 13859 - DNA, 20 bp, Artificial Sequence
  chemically synthesized
tcattgcattccttttcgaa

SEQ ID NO: 13860 - DNA, 20 bp, Artificial Sequence
  chemically synthesized
attgcattccttttcgaaaa

SEQ ID NO: 13861 - DNA, 20 bp, Artificial Sequence
  chemically synthesized
ccttttcgaaaagagaaata

SEQ ID NO: 13862 - DNA, 20 bp, Artificial Sequence
  chemically synthesized
tttcgaaaagagaaataaag

SEQ ID NO: 13863 - DNA, 20 bp, Artificial Sequence
  chemically synthesized
cgaaaagagaaataaagcgg

SEQ ID NO: 13864 - DNA, 20 bp, Artificial Sequence
  chemically synthesized
aagagaaataaagcggcgga

SEQ ID NO: 13865 - DNA, 20 bp, Artificial Sequence
  chemically synthesized
agagaaataaagcggcggaa

SEQ ID NO: 13866 - DNA, 20 bp, Artificial Sequence
  chemically synthesized
agaaataaagcggcggaaag

SEQ ID NO: 13867 - DNA, 20 bp, Artificial Sequence
  chemically synthesized
gaaataaagcggcggaaagg

SEQ ID NO: 13868 - DNA, 20 bp, Artificial Sequence
  chemically synthesized
taaagcggcggaaaggagga

SEQ ID NO: 13869 - DNA, 20 bp, Artificial Sequence
  chemically synthesized
aagcggcggaaaggaggaaa

SEQ ID NO: 13870 - DNA, 20 bp, Artificial Sequence
  chemically synthesized
agcggcggaaaggaggaaag

SEQ ID NO: 13871 - DNA, 20 bp, Artificial Sequence
  chemically synthesized
cggcggaaaggaggaaagag

SEQ ID NO: 13872 - DNA, 20 bp, Artificial Sequence
  chemically synthesized
ggcggaaaggaggaaagagg

SEQ ID NO: 13873 - DNA, 20 bp, Artificial Sequence
  chemically synthesized
cggaaaggaggaaagaggag

SEQ ID NO: 13874 - DNA, 20 bp, Artificial Sequence
  chemically synthesized
gtaaaattaaataaaattaa

SEQ ID NO: 13875 - DNA, 20 bp, Artificial Sequence
  chemically synthesized
taaaattaaataaaattaaa

SEQ ID NO: 13876 - DNA, 20 bp, Artificial Sequence
  chemically synthesized
aaaggtgcgtgctgtctcaa

SEQ ID NO: 13877 - DNA, 20 bp, Artificial Sequence
  chemically synthesized
ctgtctcaaaagtgcataca

SEQ ID NO: 13878 - DNA, 20 bp, Artificial Sequence
  chemically synthesized
caaaagtgcatacacggcaa

SEQ ID NO: 13879 - DNA, 20 bp, Artificial Sequence
  chemically synthesized
tgcatacacggcaatggttc

SEQ ID NO: 13880 - DNA, 20 bp, Artificial Sequence
  chemically synthesized
tacacggcaatggttccaga

SEQ ID NO: 13881 - DNA, 20 bp, Artificial Sequence
  chemically synthesized
acacggcaatggttccagat

SEQ ID NO: 13882 - DNA, 20 bp, Artificial Sequence
  chemically synthesized
gcaatggttccagatgggat

SEQ ID NO: 13883 - DNA, 20 bp, Artificial Sequence
  chemically synthesized
caatggttccagatgggatg

SEQ ID NO: 13884 - DNA, 20 bp, Artificial Sequence
  chemically synthesized
aatggttccagatgggatga

SEQ ID NO: 13885 - DNA, 20 bp, Artificial Sequence
  chemically synthesized
atctcttttacctcgactct

SEQ ID NO: 13886 - DNA, 20 bp, Artificial Sequence
  chemically synthesized
ctcttttacctcgactctcg

SEQ ID NO: 13887 - DNA, 20 bp, Artificial Sequence
  chemically synthesized
tcttttacctcgactctcgg

SEQ ID NO: 13888 - DNA, 20 bp, Artificial Sequence
  chemically synthesized
ctccccctcgcttttgcttc

SEQ ID NO: 13889 - DNA, 20 bp, Artificial Sequence
  chemically synthesized
ataattattattactattat

SEQ ID NO: 13890 - DNA, 20 bp, Artificial Sequence
  chemically synthesized
taattattattactattatt

SEQ ID NO: 13891 - DNA, 20 bp, Artificial Sequence
  chemically synthesized
tattattgggttacttacgc

SEQ ID NO: 13892 - DNA, 20 bp, Artificial Sequence
  chemically synthesized
gcgagaattcccgtttgctt

SEQ ID NO: 13893 - DNA, 20 bp, Artificial Sequence
  chemically synthesized
attcccgtttgcttaagtgc

SEQ ID NO: 13894 - DNA, 20 bp, Artificial Sequence
  chemically synthesized
ttcccgtttgcttaagtgct

SEQ ID NO: 13895 - DNA, 20 bp, Artificial Sequence
  chemically synthesized
tcccgtttgcttaagtgctg

SEQ ID NO: 13896 - DNA, 20 bp, Artificial Sequence
  chemically synthesized
gctggggtttgccttgcttg

SEQ ID NO: 13897 - DNA, 20 bp, Artificial Sequence
  chemically synthesized
gggtttgccttgcttgcggc

SEQ ID NO: 13898 - DNA, 20 bp, Artificial Sequence
  chemically synthesized
gccttgcttgcggcgagaca

SEQ ID NO: 13899 - DNA, 20 bp, Artificial Sequence
  chemically synthesized
ttgcttgcggcgagacatgg

SEQ ID NO: 13900 - DNA, 20 bp, Artificial Sequence
  chemically synthesized
tgcttgcggcgagacatggt

SEQ ID NO: 13901 - DNA, 20 bp, Artificial Sequence
  chemically synthesized
cggcgagacatggtgggctg

SEQ ID NO: 13902 - DNA, 20 bp, Artificial Sequence
  chemically synthesized
ggcgagacatggtgggctgc

SEQ ID NO: 13903 - DNA, 20 bp, Artificial Sequence
  chemically synthesized
gcgagacatggtgggctgcg

SEQ ID NO: 13904 - DNA, 20 bp, Artificial Sequence
  chemically synthesized
agacatggtgggctgcgggg

SEQ ID NO: 13905 - DNA, 20 bp, Artificial Sequence
  chemically synthesized
gacatggtgggctgcggggc

SEQ ID NO: 13906 - DNA, 20 bp, Artificial Sequence
  chemically synthesized
atggtgggctgcggggcggg

SEQ ID NO: 13907 - DNA, 20 bp, Artificial Sequence
  chemically synthesized
gtgggctgcggggcgggcgg

SEQ ID NO: 13908 - DNA, 20 bp, Artificial Sequence
  chemically synthesized
ggctgcggggcgggcggcgg

SEQ ID NO: 13909 - DNA, 20 bp, Artificial Sequence
  chemically synthesized
tgcggggcgggcggcggcgg

SEQ ID NO: 13910 - DNA, 20 bp, Artificial Sequence
  chemically synthesized
ggggcgggcggcggcggcgg

SEQ ID NO: 13911 - DNA, 20 bp, Artificial Sequence
  chemically synthesized
gcgggcggcggcggcggcgg

SEQ ID NO: 13912 - DNA, 20 bp, Artificial Sequence
  chemically synthesized
ggcggcggcggcggcggcgg

SEQ ID NO: 13913 - DNA, 20 bp, Artificial Sequence
  chemically synthesized
ggcggcggcggcggcggcgg

SEQ ID NO: 13914 - DNA, 20 bp, Artificial Sequence
  chemically synthesized
ggcggcggcggcggcggcgg

SEQ ID NO: 13915 - DNA, 20 bp, Artificial Sequence
  chemically synthesized
gcggcggcggcggcggcggc

SEQ ID NO: 13916 - DNA, 20 bp, Artificial Sequence
  chemically synthesized
gcggcggcggcggcggcggg

SEQ ID NO: 13917 - DNA, 20 bp, Artificial Sequence
  chemically synthesized
cggcggcggcgggcggacga

SEQ ID NO: 13918 - DNA, 20 bp, Artificial Sequence
  chemically synthesized
gcggcgggcggacgacggct

SEQ ID NO: 13919 - DNA, 20 bp, Artificial Sequence
  chemically synthesized
gacgacggctcggttcacat

SEQ ID NO: 13920 - DNA, 20 bp, Artificial Sequence
  chemically synthesized
acgacggctcggttcacatc

SEQ ID NO: 13921 - DNA, 20 bp, Artificial Sequence
  chemically synthesized
gacggctcggttcacatcgg

SEQ ID NO: 13922 - DNA, 20 bp, Artificial Sequence
  chemically synthesized
cggctcggttcacatcggga

SEQ ID NO: 13923 - DNA, 20 bp, Artificial Sequence
  chemically synthesized
tcggttcacatcgggagagc

SEQ ID NO: 13924 - DNA, 20 bp, Artificial Sequence
  chemically synthesized
cggttcacatcgggagagcc

SEQ ID NO: 13925 - DNA, 20 bp, Artificial Sequence
  chemically synthesized
tcacatcgggagagccgggt

SEQ ID NO: 13926 - DNA, 20 bp, Artificial Sequence
  chemically synthesized
atcgggagagccgggttaga

SEQ ID NO: 13927 - DNA, 20 bp, Artificial Sequence
  chemically synthesized
gggagagccgggttagaaag

SEQ ID NO: 13928 - DNA, 20 bp, Artificial Sequence
  chemically synthesized
ggagagccgggttagaaaga

SEQ ID NO: 13929 - DNA, 20 bp, Artificial Sequence
  chemically synthesized
agagccgggttagaaagaag

SEQ ID NO: 13930 - DNA, 20 bp, Artificial Sequence
  chemically synthesized
ggttagaaagaaggagactc

SEQ ID NO: 13931 - DNA, 20 bp, Artificial Sequence
  chemically synthesized
ttagaaagaaggagactcca

SEQ ID NO: 13932 - DNA, 20 bp, Artificial Sequence
  chemically synthesized
tccagagaaaatatcttcat

SEQ ID NO: 13933 - DNA, 20 bp, Artificial Sequence
  chemically synthesized
ttttgacatccaaaataaat

SEQ ID NO: 13934 - DNA, 20 bp, Artificial Sequence
  chemically synthesized
aataaattagaaataataca

SEQ ID NO: 13935 - DNA, 20 bp, Artificial Sequence
  chemically synthesized
aattagaaataatacaaaga

SEQ ID NO: 13936 - DNA, 20 bp, Artificial Sequence
  chemically synthesized
gaaataatacaaagatggcg

SEQ ID NO: 13937 - DNA, 20 bp, Artificial Sequence
  chemically synthesized
aaataatacaaagatggcgc

SEQ ID NO: 13938 - DNA, 20 bp, Artificial Sequence
  chemically synthesized
aataatacaaagatggcgca

SEQ ID NO: 13939 - DNA, 20 bp, Artificial Sequence
  chemically synthesized
aatacaaagatggcgcaggg

SEQ ID NO: 13940 - DNA, 20 bp, Artificial Sequence
  chemically synthesized
ggcgcagggaagatgaattg

SEQ ID NO: 13941 - DNA, 20 bp, Artificial Sequence
  chemically synthesized
gcgcagggaagatgaattgt

SEQ ID NO: 13942 - DNA, 20 bp, Artificial Sequence
  chemically synthesized
gcagggaagatgaattgtgg

SEQ ID NO: 13943 - DNA, 20 bp, Artificial Sequence
  chemically synthesized
agggaagatgaattgtggga

SEQ ID NO: 13944 - DNA, 20 bp, Artificial Sequence
  chemically synthesized
gaattgtgggagagccgtca

SEQ ID NO: 13945 - DNA, 20 bp, Artificial Sequence
  chemically synthesized
agccgtcatggctttttttt

SEQ ID NO: 13946 - DNA, 20 bp, Artificial Sequence
  chemically synthesized
aaaaaaaaaaaaaaaaaaaa

SEQ ID NO: 13947 - DNA, 20 bp, Artificial Sequence
  chemically synthesized
aaaaaaaaaaaaaaaaaaaa

SEQ ID NO: 13948 - DNA, 20 bp, Artificial Sequence
  chemically synthesized
aaaaaaaaaaaaaaaaaaag

SEQ ID NO: 13949 - DNA, 20 bp, Artificial Sequence
  chemically synthesized
aaaaaaaaaaaaaaaaaaga

SEQ ID NO: 13950 - DNA, 20 bp, Artificial Sequence
  chemically synthesized
aaaaaaaaaaaaaaaagagg

SEQ ID NO: 13951 - DNA, 20 bp, Artificial Sequence
  chemically synthesized
aaaaaaaaaaaaaagaggga

SEQ ID NO: 13952 - DNA, 20 bp, Artificial Sequence
  chemically synthesized
aaaaaaaaaaaagagggaga

SEQ ID NO: 13953 - DNA, 20 bp, Artificial Sequence
  chemically synthesized
aaaaaaaaaagagggagaga

SEQ ID NO: 13954 - DNA, 20 bp, Artificial Sequence
  chemically synthesized
aaaaaaaagagggagagaga

SEQ ID NO: 13955 - DNA, 20 bp, Artificial Sequence
  chemically synthesized
aaaaagagggagagagagag

SEQ ID NO: 13956 - DNA, 20 bp, Artificial Sequence
  chemically synthesized
aaagagggagagagagagaa

SEQ ID NO: 13957 - DNA, 20 bp, Artificial Sequence
  chemically synthesized
agagggagagagagagaaga

SEQ ID NO: 13958 - DNA, 20 bp, Artificial Sequence
  chemically synthesized
ggagagagagagaagagaga

SEQ ID NO: 13959 - DNA, 20 bp, Artificial Sequence
  chemically synthesized
agagagagagaagagagata

SEQ ID NO: 13960 - DNA, 20 bp, Artificial Sequence
  chemically synthesized
gagagagagaagagagatag

SEQ ID NO: 13961 - DNA, 20 bp, Artificial Sequence
  chemically synthesized
agagagagaagagagataga

SEQ ID NO: 13962 - DNA, 20 bp, Artificial Sequence
  chemically synthesized
agagagaagagagatagagg

SEQ ID NO: 13963 - DNA, 20 bp, Artificial Sequence
  chemically synthesized
agagaagagagatagaggga

SEQ ID NO: 13964 - DNA, 20 bp, Artificial Sequence
  chemically synthesized
agaagagagatagagggaga

SEQ ID NO: 13965 - DNA, 20 bp, Artificial Sequence
  chemically synthesized
aagagagatagagggagaga

SEQ ID NO: 13966 - DNA, 20 bp, Artificial Sequence
  chemically synthesized
gagagatagagggagagaga

SEQ ID NO: 13967 - DNA, 20 bp, Artificial Sequence
  chemically synthesized
gagatagagggagagagaga

SEQ ID NO: 13968 - DNA, 20 bp, Artificial Sequence
  chemically synthesized
gatagagggagagagagaga

SEQ ID NO: 13969 - DNA, 20 bp, Artificial Sequence
  chemically synthesized
tagagggagagagagagaga

SEQ ID NO: 13970 - DNA, 20 bp, Artificial Sequence
  chemically synthesized
agagagagagatgaaaaaaa

SEQ ID NO: 13971 - DNA, 20 bp, Artificial Sequence
  chemically synthesized
agagatgaaaaaaatggcaa

SEQ ID NO: 13972 - DNA, 20 bp, Artificial Sequence
  chemically synthesized
aaaatggcaaaagcccccct

SEQ ID NO: 13973 - DNA, 20 bp, Artificial Sequence
  chemically synthesized
caaaagcccccctgagctgc

SEQ ID NO: 13974 - DNA, 20 bp, Artificial Sequence
  chemically synthesized
cccccctgagctgcaagttc

SEQ ID NO: 13975 - DNA, 20 bp, Artificial Sequence
  chemically synthesized
ctgagctgcaagttcaagtg

SEQ ID NO: 13976 - DNA, 20 bp, Artificial Sequence
  chemically synthesized
gtccctgcgaacttgaacgt

SEQ ID NO: 13977 - DNA, 20 bp, Artificial Sequence
  chemically synthesized
tccctgcgaacttgaacgtc

SEQ ID NO: 13978 - DNA, 20 bp, Artificial Sequence
  chemically synthesized
cctgcgaacttgaacgtcag

SEQ ID NO: 13979 - DNA, 20 bp, Artificial Sequence
  chemically synthesized
gaacttgaacgtcaggagtc

SEQ ID NO: 13980 - DNA, 20 bp, Artificial Sequence
  chemically synthesized
ttgaacgtcaggagtctgga

SEQ ID NO: 13981 - DNA, 20 bp, Artificial Sequence
  chemically synthesized
acgtcaggagtctggatgga

SEQ ID NO: 13982 - DNA, 20 bp, Artificial Sequence
  chemically synthesized
gtcaggagtctggatggaca

SEQ ID NO: 13983 - DNA, 20 bp, Artificial Sequence
  chemically synthesized
ggacagagacacacaaaaca

SEQ ID NO: 13984 - DNA, 20 bp, Artificial Sequence
  chemically synthesized
gacagagacacacaaaacat

SEQ ID NO: 13985 - DNA, 20 bp, Artificial Sequence
  chemically synthesized
agagacacacaaaacatggg

SEQ ID NO: 13986 - DNA, 20 bp, Artificial Sequence
  chemically synthesized
gagacacacaaaacatgggc

SEQ ID NO: 13987 - DNA, 20 bp, Artificial Sequence
  chemically synthesized
agacacacaaaacatgggca

SEQ ID NO: 13988 - DNA, 20 bp, Artificial Sequence
  chemically synthesized
acacaaaacatgggcagggc

SEQ ID NO: 13989 - DNA, 20 bp, Artificial Sequence
  chemically synthesized
caaaacatgggcagggcgag

SEQ ID NO: 13990 - DNA, 20 bp, Artificial Sequence
  chemically synthesized
aaaacatgggcagggcgagc

SEQ ID NO: 13991 - DNA, 20 bp, Artificial Sequence
  chemically synthesized
aacatgggcagggcgagcag

SEQ ID NO: 13992 - DNA, 20 bp, Artificial Sequence
  chemically synthesized
catgggcagggcgagcagga

SEQ ID NO: 13993 - DNA, 20 bp, Artificial Sequence
  chemically synthesized
gggcagggcgagcaggagag

SEQ ID NO: 13994 - DNA, 20 bp, Artificial Sequence
  chemically synthesized
ggcagggcgagcaggagaga

SEQ ID NO: 13995 - DNA, 20 bp, Artificial Sequence
  chemically synthesized
gcagggcgagcaggagagaa

SEQ ID NO: 13996 - DNA, 20 bp, Artificial Sequence
  chemically synthesized
cagggcgagcaggagagaag

SEQ ID NO: 13997 - DNA, 20 bp, Artificial Sequence
  chemically synthesized
gggcgagcaggagagaaggg

SEQ ID NO: 13998 - DNA, 20 bp, Artificial Sequence
  chemically synthesized
ggcgagcaggagagaagggg

SEQ ID NO: 13999 - DNA, 20 bp, Artificial Sequence
  chemically synthesized
cgagcaggagagaaggggag

SEQ ID NO: 14000 - DNA, 20 bp, Artificial Sequence
  chemically synthesized
gagcaggagagaaggggagg

SEQ ID NO: 14001 - DNA, 20 bp, Artificial Sequence
  chemically synthesized
agcaggagagaaggggagga

SEQ ID NO: 14002 - DNA, 20 bp, Artificial Sequence
  chemically synthesized
aggagagaaggggaggaggg

SEQ ID NO: 14003 - DNA, 20 bp, Artificial Sequence
  chemically synthesized
ggagagaaggggaggaggga

SEQ ID NO: 14004 - DNA, 20 bp, Artificial Sequence
  chemically synthesized
gagagaaggggaggagggaa

SEQ ID NO: 14005 - DNA, 20 bp, Artificial Sequence
  chemically synthesized
agagaaggggaggagggaag

SEQ ID NO: 14006 - DNA, 20 bp, Artificial Sequence
  chemically synthesized
gaaggggaggagggaagggg

SEQ ID NO: 14007 - DNA, 20 bp, Artificial Sequence
  chemically synthesized
gaaggggaagctcacaccaa

SEQ ID NO: 14008 - DNA, 20 bp, Artificial Sequence
  chemically synthesized
tcacaccaatggacacacat

SEQ ID NO: 14009 - DNA, 20 bp, Artificial Sequence
  chemically synthesized
cacaccaatggacacacatc

SEQ ID NO: 14010 - DNA, 20 bp, Artificial Sequence
  chemically synthesized
acaccaatggacacacatca

SEQ ID NO: 14011 - DNA, 20 bp, Artificial Sequence
  chemically synthesized
caccaatggacacacatcag

SEQ ID NO: 14012 - DNA, 20 bp, Artificial Sequence
  chemically synthesized
aatggacacacatcaggggc

SEQ ID NO: 14013 - DNA, 20 bp, Artificial Sequence
  chemically synthesized
atcaggggctggacatgaaa

SEQ ID NO: 14014 - DNA, 20 bp, Artificial Sequence
  chemically synthesized
caggggctggacatgaaaaa

SEQ ID NO: 14015 - DNA, 20 bp, Artificial Sequence
  chemically synthesized
gctggacatgaaaaagagac

SEQ ID NO: 14016 - DNA, 20 bp, Artificial Sequence
  chemically synthesized
ctggacatgaaaaagagacc

SEQ ID NO: 14017 - DNA, 20 bp, Artificial Sequence
  chemically synthesized
catgaaaaagagaccaggac

SEQ ID NO: 14018 - DNA, 20 bp, Artificial Sequence
  chemically synthesized
aagagaccaggacaagccaa

SEQ ID NO: 14019 - DNA, 20 bp, Artificial Sequence
  chemically synthesized
gaccaggacaagccaatggc

SEQ ID NO: 14020 - DNA, 20 bp, Artificial Sequence
  chemically synthesized
ggacaagccaatggccagtg

SEQ ID NO: 14021 - DNA, 20 bp, Artificial Sequence
  chemically synthesized
gacaagccaatggccagtgc

SEQ ID NO: 14022 - DNA, 20 bp, Artificial Sequence
  chemically synthesized
acaagccaatggccagtgcg

SEQ ID NO: 14023 - DNA, 20 bp, Artificial Sequence
  chemically synthesized
aagccaatggccagtgcggg

SEQ ID NO: 14024 - DNA, 20 bp, Artificial Sequence
  chemically synthesized
agccaatggccagtgcgggg

SEQ ID NO: 14025 - DNA, 20 bp, Artificial Sequence
  chemically synthesized
gccaatggccagtgcgggga

SEQ ID NO: 14026 - DNA, 20 bp, Artificial Sequence
  chemically synthesized
ccaatggccagtgcggggag

SEQ ID NO: 14027 - DNA, 20 bp, Artificial Sequence
  chemically synthesized
caatggccagtgcggggagg

SEQ ID NO: 14028 - DNA, 20 bp, Artificial Sequence
  chemically synthesized
atggccagtgcggggagggg

SEQ ID NO: 14029 - DNA, 20 bp, Artificial Sequence
  chemically synthesized
tggccagtgcggggaggggg

SEQ ID NO: 14030 - DNA, 20 bp, Artificial Sequence
  chemically synthesized
agtgcggggagggggaggtg

SEQ ID NO: 14031 - DNA, 20 bp, Artificial Sequence
  chemically synthesized
gtgcggggagggggaggtgc

SEQ ID NO: 14032 - DNA, 20 bp, Artificial Sequence
  chemically synthesized
tgcggggagggggaggtgcg

SEQ ID NO: 14033 - DNA, 20 bp, Artificial Sequence
  chemically synthesized
ggggagggggaggtgcgggg

SEQ ID NO: 14034 - DNA, 20 bp, Artificial Sequence
  chemically synthesized
gggagggggaggtgcggggc

SEQ ID NO: 14035 - DNA, 20 bp, Artificial Sequence
  chemically synthesized
ggagggggaggtgcggggcg

SEQ ID NO: 14036 - DNA, 20 bp, Artificial Sequence
  chemically synthesized
gagggggaggtgcggggcgg

SEQ ID NO: 14037 - DNA, 20 bp, Artificial Sequence
  chemically synthesized
agggggaggtgcggggcggg

SEQ ID NO: 14038 - DNA, 20 bp, Artificial Sequence
  chemically synthesized
gtgcggggcggggggctccg

SEQ ID NO: 14039 - DNA, 20 bp, Artificial Sequence
  chemically synthesized
gcggggggctccgcggacgc

SEQ ID NO: 14040 - DNA, 20 bp, Artificial Sequence
  chemically synthesized
ggctccgcggacgccagacg

SEQ ID NO: 14041 - DNA, 20 bp, Artificial Sequence
  chemically synthesized
cggacgccagacgcggcccc

SEQ ID NO: 14042 - DNA, 20 bp, Artificial Sequence
  chemically synthesized
ggacgccagacgcggccccc

SEQ ID NO: 14043 - DNA, 20 bp, Artificial Sequence
  chemically synthesized
gacgccagacgcggcccccg

SEQ ID NO: 14044 - DNA, 20 bp, Artificial Sequence
  chemically synthesized
acgccagacgcggcccccgg

SEQ ID NO: 14045 - DNA, 20 bp, Artificial Sequence
  chemically synthesized
gccagacgcggcccccgggg

SEQ ID NO: 14046 - DNA, 20 bp, Artificial Sequence
  chemically synthesized
ccagacgcggcccccggggg

SEQ ID NO: 14047 - DNA, 20 bp, Artificial Sequence
  chemically synthesized
cagacgcggcccccggggga

SEQ ID NO: 14048 - DNA, 20 bp, Artificial Sequence
  chemically synthesized
agacgcggcccccgggggag

SEQ ID NO: 14049 - DNA, 20 bp, Artificial Sequence
  chemically synthesized
cgcggcccccgggggagggg

SEQ ID NO: 14050 - DNA, 20 bp, Artificial Sequence
  chemically synthesized
gcggcccccgggggaggggc

SEQ ID NO: 14051 - DNA, 20 bp, Artificial Sequence
  chemically synthesized
ccccgggggaggggcgggcc

SEQ ID NO: 14052 - DNA, 20 bp, Artificial Sequence
  chemically synthesized
cccgggggaggggcgggccg

SEQ ID NO: 14053 - DNA, 20 bp, Artificial Sequence
  chemically synthesized
ccgggggaggggcgggccga

SEQ ID NO: 14054 - DNA, 20 bp, Artificial Sequence
  chemically synthesized
cgggggaggggcgggccgag

SEQ ID NO: 14055 - DNA, 20 bp, Artificial Sequence
  chemically synthesized
ggggaggggcgggccgaggg

SEQ ID NO: 14056 - DNA, 20 bp, Artificial Sequence
  chemically synthesized
gggaggggcgggccgagggg

SEQ ID NO: 14057 - DNA, 20 bp, Artificial Sequence
  chemically synthesized
ggaggggcgggccgagggga

SEQ ID NO: 14058 - DNA, 20 bp, Artificial Sequence
  chemically synthesized
gaggggcgggccgaggggag

SEQ ID NO: 14059 - DNA, 20 bp, Artificial Sequence
  chemically synthesized
aggggcgggccgaggggagg

SEQ ID NO: 14060 - DNA, 20 bp, Artificial Sequence
  chemically synthesized
gggccgaggggagggggcgc

SEQ ID NO: 14061 - DNA, 20 bp, Artificial Sequence
  chemically synthesized
ggccgaggggagggggcgct

SEQ ID NO: 14062 - DNA, 20 bp, Artificial Sequence
  chemically synthesized
gccgaggggagggggcgctg

SEQ ID NO: 14063 - DNA, 20 bp, Artificial Sequence
  chemically synthesized
gggagggggcgctggggccg

SEQ ID NO: 14064 - DNA, 20 bp, Artificial Sequence
  chemically synthesized
ggagggggcgctggggccgc

SEQ ID NO: 14065 - DNA, 20 bp, Artificial Sequence
  chemically synthesized
cgctggggccgcgggctcac

SEQ ID NO: 14066 - DNA, 20 bp, Artificial Sequence
  chemically synthesized
tggggccgcgggctcaccag

SEQ ID NO: 14067 - DNA, 20 bp, Artificial Sequence
  chemically synthesized
cgcgggctcaccagtggccg

SEQ ID NO: 14068 - DNA, 20 bp, Artificial Sequence
  chemically synthesized
ggctcaccagtggccgcagc

SEQ ID NO: 14069 - DNA, 20 bp, Artificial Sequence
  chemically synthesized
agtggccgcagcgagcgccg

SEQ ID NO: 14070 - DNA, 20 bp, Artificial Sequence
  chemically synthesized
ggccgcagcgagcgccgcgg

SEQ ID NO: 14071 - DNA, 20 bp, Artificial Sequence
  chemically synthesized
cgcagcgagcgccgcggcgg

SEQ ID NO: 14072 - DNA, 20 bp, Artificial Sequence
  chemically synthesized
cgagcgccgcggcggtggcg

SEQ ID NO: 14073 - DNA, 20 bp, Artificial Sequence
  chemically synthesized
cgccgcggcggtggcgtggc

SEQ ID NO: 14074 - DNA, 20 bp, Artificial Sequence
  chemically synthesized
gccgcggcggtggcgtggcc

SEQ ID NO: 14075 - DNA, 20 bp, Artificial Sequence
  chemically synthesized
cgcggcggtggcgtggccgg

SEQ ID NO: 14076 - DNA, 20 bp, Artificial Sequence
  chemically synthesized
cggcggtggcgtggccggga

SEQ ID NO: 14077 - DNA, 20 bp, Artificial Sequence
  chemically synthesized
cggtggcgtggccgggagag

SEQ ID NO: 14078 - DNA, 20 bp, Artificial Sequence
  chemically synthesized
ggcgtggccgggagagaaga

SEQ ID NO: 14079 - DNA, 20 bp, Artificial Sequence
  chemically synthesized
gcgtggccgggagagaagaa

SEQ ID NO: 14080 - DNA, 20 bp, Artificial Sequence
  chemically synthesized
cgtggccgggagagaagaaa

SEQ ID NO: 14081 - DNA, 20 bp, Artificial Sequence
  chemically synthesized
gtggccgggagagaagaaag

SEQ ID NO: 14082 - DNA, 20 bp, Artificial Sequence
  chemically synthesized
gccgggagagaagaaagggg

SEQ ID NO: 14083 - DNA, 20 bp, Artificial Sequence
  chemically synthesized
gggagagaagaaaggggtgg

SEQ ID NO: 14084 - DNA, 20 bp, Artificial Sequence
  chemically synthesized
ggagagaagaaaggggtggc

SEQ ID NO: 14085 - DNA, 20 bp, Artificial Sequence
  chemically synthesized
gagagaagaaaggggtggca

SEQ ID NO: 14086 - DNA, 20 bp, Artificial Sequence
  chemically synthesized
agagaagaaaggggtggcag

SEQ ID NO: 14087 - DNA, 20 bp, Artificial Sequence
  chemically synthesized
gaagaaaggggtggcagggg

SEQ ID NO: 14088 - DNA, 20 bp, Artificial Sequence
  chemically synthesized
aagaaaggggtggcaggggt

SEQ ID NO: 14089 - DNA, 20 bp, Artificial Sequence
  chemically synthesized
gaaaggggtggcaggggtgg

SEQ ID NO: 14090 - DNA, 20 bp, Artificial Sequence
  chemically synthesized
aaaggggtggcaggggtggg

SEQ ID NO: 14091 - DNA, 20 bp, Artificial Sequence
  chemically synthesized
gggtggcaggggtgggagga

SEQ ID NO: 14092 - DNA, 20 bp, Artificial Sequence
  chemically synthesized
ggtggcaggggtgggaggaa

SEQ ID NO: 14093 - DNA, 20 bp, Artificial Sequence
  chemically synthesized
gtggcaggggtgggaggaaa

SEQ ID NO: 14094 - DNA, 20 bp, Artificial Sequence
  chemically synthesized
gcaggggtgggaggaaaggg

SEQ ID NO: 14095 - DNA, 20 bp, Artificial Sequence
  chemically synthesized
caggggtgggaggaaagggt

SEQ ID NO: 14096 - DNA, 20 bp, Artificial Sequence
  chemically synthesized
aggggtgggaggaaagggtg

SEQ ID NO: 14097 - DNA, 20 bp, Artificial Sequence
  chemically synthesized
ggggtgggaggaaagggtgg

SEQ ID NO: 14098 - DNA, 20 bp, Artificial Sequence
  chemically synthesized
gggtgggaggaaagggtggg

SEQ ID NO: 14099 - DNA, 20 bp, Artificial Sequence
  chemically synthesized
ggtgggaggaaagggtgggg

SEQ ID NO: 14100 - DNA, 20 bp, Artificial Sequence
  chemically synthesized
tgggaggaaagggtgggggg

SEQ ID NO: 14101 - DNA, 20 bp, Artificial Sequence
  chemically synthesized
aggaaagggtgggggggagc

SEQ ID NO: 14102 - DNA, 20 bp, Artificial Sequence
  chemically synthesized
cctgctcccccccacacacg

SEQ ID NO: 14103 - DNA, 20 bp, Artificial Sequence
  chemically synthesized
acacgcggactctaaaatga

SEQ ID NO: 14104 - DNA, 20 bp, Artificial Sequence
  chemically synthesized
aaatgaaagattattcaaaa

SEQ ID NO: 14105 - DNA, 20 bp, Artificial Sequence
  chemically synthesized
ttattcaaaaaagaaaaaaa

SEQ ID NO: 14106 - DNA, 20 bp, Artificial Sequence
  chemically synthesized
attcaaaaaagaaaaaaata

SEQ ID NO: 14107 - DNA, 20 bp, Artificial Sequence
  chemically synthesized
aaaaaagaaaaaaatagagc

SEQ ID NO: 14108 - DNA, 20 bp, Artificial Sequence
  chemically synthesized
aaaagaaaaaaatagagcga

SEQ ID NO: 14109 - DNA, 20 bp, Artificial Sequence
  chemically synthesized
aaaatagagcgagagtgcac

SEQ ID NO: 14110 - DNA, 20 bp, Artificial Sequence
  chemically synthesized
aaatagagcgagagtgcacc

SEQ ID NO: 14111 - DNA, 20 bp, Artificial Sequence
  chemically synthesized
atagagcgagagtgcaccgg

SEQ ID NO: 14112 - DNA, 20 bp, Artificial Sequence
  chemically synthesized
tagagcgagagtgcaccggg

SEQ ID NO: 14113 - DNA, 20 bp, Artificial Sequence
  chemically synthesized
gagagtgcaccgggaggctg

SEQ ID NO: 14114 - DNA, 20 bp, Artificial Sequence
  chemically synthesized
gcaccgggaggctgcagccc

SEQ ID NO: 14115 - DNA, 20 bp, Artificial Sequence
  chemically synthesized
caccgggaggctgcagcccc

SEQ ID NO: 14116 - DNA, 20 bp, Artificial Sequence
  chemically synthesized
gggaggctgcagccccgggc

SEQ ID NO: 14117 - DNA, 20 bp, Artificial Sequence
  chemically synthesized
ggaggctgcagccccgggct

SEQ ID NO: 14118 - DNA, 20 bp, Artificial Sequence
  chemically synthesized
gaggctgcagccccgggctg

SEQ ID NO: 14119 - DNA, 20 bp, Artificial Sequence
  chemically synthesized
gctgcagccccgggctgggg

SEQ ID NO: 14120 - DNA, 20 bp, Artificial Sequence
  chemically synthesized
agccccgggctggggaagcg

SEQ ID NO: 14121 - DNA, 20 bp, Artificial Sequence
  chemically synthesized
gccccgggctggggaagcgc

SEQ ID NO: 14122 - DNA, 20 bp, Artificial Sequence
  chemically synthesized
ccgggctggggaagcgcggg

SEQ ID NO: 14123 - DNA, 20 bp, Artificial Sequence
  chemically synthesized
gggctggggaagcgcgggcg

SEQ ID NO: 14124 - DNA, 20 bp, Artificial Sequence
  chemically synthesized
ggctggggaagcgcgggcgg

SEQ ID NO: 14125 - DNA, 20 bp, Artificial Sequence
  chemically synthesized
gctggggaagcgcgggcgga

SEQ ID NO: 14126 - DNA, 20 bp, Artificial Sequence
  chemically synthesized
ggggaagcgcgggcggaggg

SEQ ID NO: 14127 - DNA, 20 bp, Artificial Sequence
  chemically synthesized
aagcgcgggcggagggaagc

SEQ ID NO: 14128 - DNA, 20 bp, Artificial Sequence
  chemically synthesized
agcgcgggcggagggaagcc

SEQ ID NO: 14129 - DNA, 20 bp, Artificial Sequence
  chemically synthesized
gcgggcggagggaagccagg

SEQ ID NO: 14130 - DNA, 20 bp, Artificial Sequence
  chemically synthesized
gggcggagggaagccaggta

SEQ ID NO: 14131 - DNA, 20 bp, Artificial Sequence
  chemically synthesized
aagccaggtagagttgctcc

SEQ ID NO: 14132 - DNA, 20 bp, Artificial Sequence
  chemically synthesized
ccgcgctcgctccccgcgtg

SEQ ID NO: 14133 - DNA, 20 bp, Artificial Sequence
  chemically synthesized
cgctccccgcgtgtggacgc

SEQ ID NO: 14134 - DNA, 20 bp, Artificial Sequence
  chemically synthesized
gctccccgcgtgtggacgcc

SEQ ID NO: 14135 - DNA, 20 bp, Artificial Sequence
  chemically synthesized
ctccccgcgtgtggacgcca

SEQ ID NO: 14136 - DNA, 20 bp, Artificial Sequence
  chemically synthesized
tccccgcgtgtggacgccag

SEQ ID NO: 14137 - DNA, 20 bp, Artificial Sequence
  chemically synthesized
cgtgtggacgccaggggccg

SEQ ID NO: 14138 - DNA, 20 bp, Artificial Sequence
  chemically synthesized
gacgccaggggccgaagtaa

SEQ ID NO: 14139 - DNA, 20 bp, Artificial Sequence
  chemically synthesized
ggggccgaagtaaaagcccc

SEQ ID NO: 14140 - DNA, 20 bp, Artificial Sequence
  chemically synthesized
aagtaaaagccccgagcccg

SEQ ID NO: 14141 - DNA, 20 bp, Artificial Sequence
  chemically synthesized
cccgagcccgcggctgcgct

SEQ ID NO: 14142 - DNA, 20 bp, Artificial Sequence
  chemically synthesized
ccgagcccgcggctgcgctc

SEQ ID NO: 14143 - DNA, 20 bp, Artificial Sequence
  chemically synthesized
gcgctcgggaaactttgccc

SEQ ID NO: 14144 - DNA, 20 bp, Artificial Sequence
  chemically synthesized
cgctcgggaaactttgcccg

SEQ ID NO: 14145 - DNA, 20 bp, Artificial Sequence
  chemically synthesized
ctcgggaaactttgcccgag

SEQ ID NO: 14146 - DNA, 20 bp, Artificial Sequence
  chemically synthesized
cgggaaactttgcccgagga

SEQ ID NO: 14147 - DNA, 20 bp, Artificial Sequence
  chemically synthesized
gggaaactttgcccgaggag

SEQ ID NO: 14148 - DNA, 20 bp, Artificial Sequence
  chemically synthesized
aactttgcccgaggagagga

SEQ ID NO: 14149 - DNA, 20 bp, Artificial Sequence
  chemically synthesized
tgcccgaggagaggacagca

SEQ ID NO: 14150 - DNA, 20 bp, Artificial Sequence
  chemically synthesized
cagcaaagaaaaatcacccg

SEQ ID NO: 14151 - DNA, 20 bp, Artificial Sequence
  chemically synthesized
aagaaaaatcacccgaagtt

SEQ ID NO: 14152 - DNA, 20 bp, Artificial Sequence
  chemically synthesized
gaaaaatcacccgaagttga

SEQ ID NO: 14153 - DNA, 20 bp, Artificial Sequence
  chemically synthesized
atcacccgaagttgagagct

SEQ ID NO: 14154 - DNA, 20 bp, Artificial Sequence
  chemically synthesized
aagttgagagctgagcctcc

SEQ ID NO: 14155 - DNA, 20 bp, Artificial Sequence
  chemically synthesized
agagctgagcctccaagtta

SEQ ID NO: 14156 - DNA, 20 bp, Artificial Sequence
  chemically synthesized
gcctccaagttacagctccg

SEQ ID NO: 14157 - DNA, 20 bp, Artificial Sequence
  chemically synthesized
tccaagttacagctccgcag

SEQ ID NO: 14158 - DNA, 20 bp, Artificial Sequence
  chemically synthesized
ccaagttacagctccgcagc

SEQ ID NO: 14159 - DNA, 20 bp, Artificial Sequence
  chemically synthesized
gttacagctccgcagcgggc

SEQ ID NO: 14160 - DNA, 20 bp, Artificial Sequence
  chemically synthesized
ttacagctccgcagcgggcg

SEQ ID NO: 14161 - DNA, 20 bp, Artificial Sequence
  chemically synthesized
tacagctccgcagcgggcga

SEQ ID NO: 14162 - DNA, 20 bp, Artificial Sequence
  chemically synthesized
acagctccgcagcgggcgag

SEQ ID NO: 14163 - DNA, 20 bp, Artificial Sequence
  chemically synthesized
agctccgcagcgggcgaggg

SEQ ID NO: 14164 - DNA, 20 bp, Artificial Sequence
  chemically synthesized
gctccgcagcgggcgagggg

SEQ ID NO: 14165 - DNA, 20 bp, Artificial Sequence
  chemically synthesized
ccgcagcgggcgaggggagg

SEQ ID NO: 14166 - DNA, 20 bp, Artificial Sequence
  chemically synthesized
cgcagcgggcgaggggaggt

SEQ ID NO: 14167 - DNA, 20 bp, Artificial Sequence
  chemically synthesized
cagcgggcgaggggaggtgg

SEQ ID NO: 14168 - DNA, 20 bp, Artificial Sequence
  chemically synthesized
agcgggcgaggggaggtggg

SEQ ID NO: 14169 - DNA, 20 bp, Artificial Sequence
  chemically synthesized
gcgggcgaggggaggtggga

SEQ ID NO: 14170 - DNA, 20 bp, Artificial Sequence
  chemically synthesized
gggcgaggggaggtgggagg

SEQ ID NO: 14171 - DNA, 20 bp, Artificial Sequence
  chemically synthesized
gggaggtgggagggagcgca

SEQ ID NO: 14172 - DNA, 20 bp, Artificial Sequence
  chemically synthesized
ggagggagcgcacggcaacg

SEQ ID NO: 14173 - DNA, 20 bp, Artificial Sequence
  chemically synthesized
gcgcacggcaacgcggaatc

SEQ ID NO: 14174 - DNA, 20 bp, Artificial Sequence
  chemically synthesized
ggcaacgcggaatccagcct

SEQ ID NO: 14175 - DNA, 20 bp, Artificial Sequence
  chemically synthesized
cgcggaatccagcctaagtt

SEQ ID NO: 14176 - DNA, 20 bp, Artificial Sequence
  chemically synthesized
cggaatccagcctaagtttg

SEQ ID NO: 14177 - DNA, 20 bp, Artificial Sequence
  chemically synthesized
ggaatccagcctaagtttgg

SEQ ID NO: 14178 - DNA, 20 bp, Artificial Sequence
  chemically synthesized
gaatccagcctaagtttgga

SEQ ID NO: 14179 - DNA, 20 bp, Artificial Sequence
  chemically synthesized
agcctaagtttggagggctg

SEQ ID NO: 14180 - DNA, 20 bp, Artificial Sequence
  chemically synthesized
gcctaagtttggagggctgc

SEQ ID NO: 14181 - DNA, 20 bp, Artificial Sequence
  chemically synthesized
agtttggagggctgcgggtc

SEQ ID NO: 14182 - DNA, 20 bp, Artificial Sequence
  chemically synthesized
ttggagggctgcgggtccgg

SEQ ID NO: 14183 - DNA, 20 bp, Artificial Sequence
  chemically synthesized
tggagggctgcgggtccgga

SEQ ID NO: 14184 - DNA, 20 bp, Artificial Sequence
  chemically synthesized
ggagggctgcgggtccggaa

SEQ ID NO: 14185 - DNA, 20 bp, Artificial Sequence
  chemically synthesized
gggctgcgggtccggaaggg

SEQ ID NO: 14186 - DNA, 20 bp, Artificial Sequence
  chemically synthesized
ggtccggaagggcagcgccc

SEQ ID NO: 14187 - DNA, 20 bp, Artificial Sequence
  chemically synthesized
aagggcagcgcccaagtctc

SEQ ID NO: 14188 - DNA, 20 bp, Artificial Sequence
  chemically synthesized
agggcagcgcccaagtctcc

SEQ ID NO: 14189 - DNA, 20 bp, Artificial Sequence
  chemically synthesized
ggcagcgcccaagtctccag

SEQ ID NO: 14190 - DNA, 20 bp, Artificial Sequence
  chemically synthesized
caagtctccaggagcccgcg

SEQ ID NO: 14191 - DNA, 20 bp, Artificial Sequence
  chemically synthesized
ctccaggagcccgcgcggcc

SEQ ID NO: 14192 - DNA, 20 bp, Artificial Sequence
  chemically synthesized
aggagcccgcgcggcctgga

SEQ ID NO: 14193 - DNA, 20 bp, Artificial Sequence
  chemically synthesized
gagcccgcgcggcctggaaa

SEQ ID NO: 14194 - DNA, 20 bp, Artificial Sequence
  chemically synthesized
agcccgcgcggcctggaaag

SEQ ID NO: 14195 - DNA, 20 bp, Artificial Sequence
  chemically synthesized
gcccgcgcggcctggaaaga

SEQ ID NO: 14196 - DNA, 20 bp, Artificial Sequence
  chemically synthesized
cccgcgcggcctggaaagag

SEQ ID NO: 14197 - DNA, 20 bp, Artificial Sequence
  chemically synthesized
gcggcctggaaagaggggac

SEQ ID NO: 14198 - DNA, 20 bp, Artificial Sequence
  chemically synthesized
cggcctggaaagaggggacc

SEQ ID NO: 14199 - DNA, 20 bp, Artificial Sequence
  chemically synthesized
ggcctggaaagaggggaccg

SEQ ID NO: 14200 - DNA, 20 bp, Artificial Sequence
  chemically synthesized
cctggaaagaggggaccggg

SEQ ID NO: 14201 - DNA, 20 bp, Artificial Sequence
  chemically synthesized
tggaaagaggggaccgggga

SEQ ID NO: 14202 - DNA, 20 bp, Artificial Sequence
  chemically synthesized
ggaaagaggggaccggggag

SEQ ID NO: 14203 - DNA, 20 bp, Artificial Sequence
  chemically synthesized
aagaggggaccggggagagg

SEQ ID NO: 14204 - DNA, 20 bp, Artificial Sequence
  chemically synthesized
agaggggaccggggagaggc

SEQ ID NO: 14205 - DNA, 20 bp, Artificial Sequence
  chemically synthesized
ggggaccggggagaggcagg

SEQ ID NO: 14206 - DNA, 20 bp, Artificial Sequence
  chemically synthesized
ccggggagaggcaggcggcg

SEQ ID NO: 14207 - DNA, 20 bp, Artificial Sequence
  chemically synthesized
cggggagaggcaggcggcgc

SEQ ID NO: 14208 - DNA, 20 bp, Artificial Sequence
  chemically synthesized
gagaggcaggcggcgcaggc

SEQ ID NO: 14209 - DNA, 20 bp, Artificial Sequence
  chemically synthesized
agaggcaggcggcgcaggcc

SEQ ID NO: 14210 - DNA, 20 bp, Artificial Sequence
  chemically synthesized
gaggcaggcggcgcaggccg

SEQ ID NO: 14211 - DNA, 20 bp, Artificial Sequence
  chemically synthesized
ggcggcgcaggccggggccc

SEQ ID NO: 14212 - DNA, 20 bp, Artificial Sequence
  chemically synthesized
gcggcgcaggccggggcccg

SEQ ID NO: 14213 - DNA, 20 bp, Artificial Sequence
  chemically synthesized
cggcgcaggccggggcccga

SEQ ID NO: 14214 - DNA, 20 bp, Artificial Sequence
  chemically synthesized
cggggcccgagggcgccccc

SEQ ID NO: 14215 - DNA, 20 bp, Artificial Sequence
  chemically synthesized
ggggcccgagggcgccccca

SEQ ID NO: 14216 - DNA, 20 bp, Artificial Sequence
  chemically synthesized
ccgagggcgcccccaaggcc

SEQ ID NO: 14217 - DNA, 20 bp, Artificial Sequence
  chemically synthesized
gggcgcccccaaggccgagc

SEQ ID NO: 14218 - DNA, 20 bp, Artificial Sequence
  chemically synthesized
ggcgcccccaaggccgagcc

SEQ ID NO: 14219 - DNA, 20 bp, Artificial Sequence
  chemically synthesized
gcgcccccaaggccgagcca

SEQ ID NO: 14220 - DNA, 20 bp, Artificial Sequence
  chemically synthesized
cccaaggccgagccagggac

SEQ ID NO: 14221 - DNA, 20 bp, Artificial Sequence
  chemically synthesized
ccaaggccgagccagggacc

SEQ ID NO: 14222 - DNA, 20 bp, Artificial Sequence
  chemically synthesized
gagccagggaccgggaatct

SEQ ID NO: 14223 - DNA, 20 bp, Artificial Sequence
  chemically synthesized
gggaatctgagcgccccgcc

SEQ ID NO: 14224 - DNA, 20 bp, Artificial Sequence
  chemically synthesized
tgagcgccccgccaagcgac

SEQ ID NO: 14225 - DNA, 20 bp, Artificial Sequence
  chemically synthesized
gagcgccccgccaagcgact

SEQ ID NO: 14226 - DNA, 20 bp, Artificial Sequence
  chemically synthesized
ctgggtctgaatgcaactga

SEQ ID NO: 14227 - DNA, 20 bp, Artificial Sequence
  chemically synthesized
tgaatgcaactgaaagcgcc

SEQ ID NO: 14228 - DNA, 20 bp, Artificial Sequence
  chemically synthesized
aactgaaagcgccgagtccc

SEQ ID NO: 14229 - DNA, 20 bp, Artificial Sequence
  chemically synthesized
gcgccgagtccccggctcct

SEQ ID NO: 14230 - DNA, 20 bp, Artificial Sequence
  chemically synthesized
cgccgagtccccggctccta

SEQ ID NO: 14231 - DNA, 20 bp, Artificial Sequence
  chemically synthesized
gccgagtccccggctcctaa

SEQ ID NO: 14232 - DNA, 20 bp, Artificial Sequence
  chemically synthesized
tccccggctcctaagggtcg

SEQ ID NO: 14233 - DNA, 20 bp, Artificial Sequence
  chemically synthesized
cggctcctaagggtcgcaga

SEQ ID NO: 14234 - DNA, 20 bp, Artificial Sequence
  chemically synthesized
gctcctaagggtcgcagaaa

SEQ ID NO: 14235 - DNA, 20 bp, Artificial Sequence
  chemically synthesized
tcctaagggtcgcagaaaga

SEQ ID NO: 14236 - DNA, 20 bp, Artificial Sequence
  chemically synthesized
gggtcgcagaaagagagccc

SEQ ID NO: 14237 - DNA, 20 bp, Artificial Sequence
  chemically synthesized
ggtcgcagaaagagagcccg

SEQ ID NO: 14238 - DNA, 20 bp, Artificial Sequence
  chemically synthesized
gaaagagagcccgaggaata

SEQ ID NO: 14239 - DNA, 20 bp, Artificial Sequence
  chemically synthesized
gagcccgaggaataaagaac

SEQ ID NO: 14240 - DNA, 20 bp, Artificial Sequence
  chemically synthesized
agcccgaggaataaagaacg

SEQ ID NO: 14241 - DNA, 20 bp, Artificial Sequence
  chemically synthesized
cccgaggaataaagaacgag

SEQ ID NO: 14242 - DNA, 20 bp, Artificial Sequence
  chemically synthesized
aggaataaagaacgaggagc

SEQ ID NO: 14243 - DNA, 20 bp, Artificial Sequence
  chemically synthesized
gaataaagaacgaggagcca

SEQ ID NO: 14244 - DNA, 20 bp, Artificial Sequence
  chemically synthesized
aagaacgaggagccagagtc

SEQ ID NO: 14245 - DNA, 20 bp, Artificial Sequence
  chemically synthesized
aggagccagagtctggcccc

SEQ ID NO: 14246 - DNA, 20 bp, Artificial Sequence
  chemically synthesized
gagccagagtctggcccccg

SEQ ID NO: 14247 - DNA, 20 bp, Artificial Sequence
  chemically synthesized
agccagagtctggcccccgg

SEQ ID NO: 14248 - DNA, 20 bp, Artificial Sequence
  chemically synthesized
gccagagtctggcccccgga

SEQ ID NO: 14249 - DNA, 20 bp, Artificial Sequence
  chemically synthesized
ccagagtctggcccccggag

SEQ ID NO: 14250 - DNA, 20 bp, Artificial Sequence
  chemically synthesized
agagtctggcccccggaggg

SEQ ID NO: 14251 - DNA, 20 bp, Artificial Sequence
  chemically synthesized
tggcccccggaggggagcgc

SEQ ID NO: 14252 - DNA, 20 bp, Artificial Sequence
  chemically synthesized
ggcccccggaggggagcgcc

SEQ ID NO: 14253 - DNA, 20 bp, Artificial Sequence
  chemically synthesized
gcccccggaggggagcgccg

SEQ ID NO: 14254 - DNA, 20 bp, Artificial Sequence
  chemically synthesized
cccccggaggggagcgccgg

SEQ ID NO: 14255 - DNA, 20 bp, Artificial Sequence
  chemically synthesized
ggaggggagcgccgggggcc

SEQ ID NO: 14256 - DNA, 20 bp, Artificial Sequence
  chemically synthesized
gaggggagcgccgggggcct

SEQ ID NO: 14257 - DNA, 20 bp, Artificial Sequence
  chemically synthesized
ggagcgccgggggcctgggc

SEQ ID NO: 14258 - DNA, 20 bp, Artificial Sequence
  chemically synthesized
agcgccgggggcctgggcaa

SEQ ID NO: 14259 - DNA, 20 bp, Artificial Sequence
  chemically synthesized
cgccgggggcctgggcaaga

SEQ ID NO: 14260 - DNA, 20 bp, Artificial Sequence
  chemically synthesized
gccgggggcctgggcaagag

SEQ ID NO: 14261 - DNA, 20 bp, Artificial Sequence
  chemically synthesized
gcctgggcaagagaggcacc

SEQ ID NO: 14262 - DNA, 20 bp, Artificial Sequence
  chemically synthesized
cctgggcaagagaggcaccg

SEQ ID NO: 14263 - DNA, 20 bp, Artificial Sequence
  chemically synthesized
accgaggcgtccacctctct

SEQ ID NO: 14264 - DNA, 20 bp, Artificial Sequence
  chemically synthesized
cgaggcgtccacctctctga

SEQ ID NO: 14265 - DNA, 20 bp, Artificial Sequence
  chemically synthesized
gaggcgtccacctctctgag

SEQ ID NO: 14266 - DNA, 20 bp, Artificial Sequence
  chemically synthesized
gtccacctctctgagaggcc

SEQ ID NO: 14267 - DNA, 20 bp, Artificial Sequence
  chemically synthesized
tccacctctctgagaggccg

SEQ ID NO: 14268 - DNA, 20 bp, Artificial Sequence
  chemically synthesized
tctctgagaggccgaggaca

SEQ ID NO: 14269 - DNA, 20 bp, Artificial Sequence
  chemically synthesized
gagaggccgaggacaaagcg

SEQ ID NO: 14270 - DNA, 20 bp, Artificial Sequence
  chemically synthesized
agaggccgaggacaaagcgc

SEQ ID NO: 14271 - DNA, 20 bp, Artificial Sequence
  chemically synthesized
ggccgaggacaaagcgcggg

SEQ ID NO: 14272 - DNA, 20 bp, Artificial Sequence
  chemically synthesized
ggacaaagcgcgggcagtcc

SEQ ID NO: 14273 - DNA, 20 bp, Artificial Sequence
  chemically synthesized
gacaaagcgcgggcagtccc

SEQ ID NO: 14274 - DNA, 20 bp, Artificial Sequence
  chemically synthesized
caaagcgcgggcagtcccgg

SEQ ID NO: 14275 - DNA, 20 bp, Artificial Sequence
  chemically synthesized
gcgggcagtcccgggagtcc

SEQ ID NO: 14276 - DNA, 20 bp, Artificial Sequence
  chemically synthesized
gtcccgggagtcccagtccc

SEQ ID NO: 14277 - DNA, 20 bp, Artificial Sequence
  chemically synthesized
tcccgggagtcccagtccct

SEQ ID NO: 14278 - DNA, 20 bp, Artificial Sequence
  chemically synthesized
agtccctgggaatgtgctca

SEQ ID NO: 14279 - DNA, 20 bp, Artificial Sequence
  chemically synthesized
ggaatgtgctcacggcgccg

SEQ ID NO: 14280 - DNA, 20 bp, Artificial Sequence
  chemically synthesized
gaatgtgctcacggcgccgc

SEQ ID NO: 14281 - DNA, 20 bp, Artificial Sequence
  chemically synthesized
atgtgctcacggcgccgcgg

SEQ ID NO: 14282 - DNA, 20 bp, Artificial Sequence
  chemically synthesized
tgtgctcacggcgccgcggg

SEQ ID NO: 14283 - DNA, 20 bp, Artificial Sequence
  chemically synthesized
cggcgccgcgggaggtcccc

SEQ ID NO: 14284 - DNA, 20 bp, Artificial Sequence
  chemically synthesized
gccgcgggaggtccccgagc

SEQ ID NO: 14285 - DNA, 20 bp, Artificial Sequence
  chemically synthesized
ccgcgggaggtccccgagcc

SEQ ID NO: 14286 - DNA, 20 bp, Artificial Sequence
  chemically synthesized
aggtccccgagccgggtccc

SEQ ID NO: 14287 - DNA, 20 bp, Artificial Sequence
  chemically synthesized
ggtccccgagccgggtccct

SEQ ID NO: 14288 - DNA, 20 bp, Artificial Sequence
  chemically synthesized
tccccgagccgggtccctgg

SEQ ID NO: 14289 - DNA, 20 bp, Artificial Sequence
  chemically synthesized
ccccgagccgggtccctggg

SEQ ID NO: 14290 - DNA, 20 bp, Artificial Sequence
  chemically synthesized
cccgagccgggtccctggga

SEQ ID NO: 14291 - DNA, 20 bp, Artificial Sequence
  chemically synthesized
ggacacaccccctcccactc

SEQ ID NO: 14292 - DNA, 20 bp, Artificial Sequence
  chemically synthesized
acacaccccctcccactcca

SEQ ID NO: 14293 - DNA, 20 bp, Artificial Sequence
  chemically synthesized
ccactccagagcaactgcaa

SEQ ID NO: 14294 - DNA, 20 bp, Artificial Sequence
  chemically synthesized
ccagagcaactgcaaaagca

SEQ ID NO: 14295 - DNA, 20 bp, Artificial Sequence
  chemically synthesized
agagcaactgcaaaagcaca

SEQ ID NO: 14296 - DNA, 20 bp, Artificial Sequence
  chemically synthesized
gagcaactgcaaaagcacag

SEQ ID NO: 14297 - DNA, 20 bp, Artificial Sequence
  chemically synthesized
agcaactgcaaaagcacaga

SEQ ID NO: 14298 - DNA, 20 bp, Artificial Sequence
  chemically synthesized
actgcaaaagcacagaggga

SEQ ID NO: 14299 - DNA, 20 bp, Artificial Sequence
  chemically synthesized
ctgcaaaagcacagagggat

SEQ ID NO: 14300 - DNA, 20 bp, Artificial Sequence
  chemically synthesized
caaaagcacagagggatggg

SEQ ID NO: 14301 - DNA, 20 bp, Artificial Sequence
  chemically synthesized
tgggaagaaaatgtttctta

SEQ ID NO: 14302 - DNA, 20 bp, Artificial Sequence
  chemically synthesized
gggaagaaaatgtttcttac

SEQ ID NO: 14303 - DNA, 20 bp, Artificial Sequence
  chemically synthesized
aagaaaatgtttcttacggg

SEQ ID NO: 14304 - DNA, 20 bp, Artificial Sequence
  chemically synthesized
gaaaatgtttcttacgggca

SEQ ID NO: 14305 - DNA, 20 bp, Artificial Sequence
  chemically synthesized
actgttcctgtgctgttacc

SEQ ID NO: 14306 - DNA, 20 bp, Artificial Sequence
  chemically synthesized
ctgttcctgtgctgttaccc

SEQ ID NO: 14307 - DNA, 20 bp, Artificial Sequence
  chemically synthesized
tgttcctgtgctgttaccca

SEQ ID NO: 14308 - DNA, 20 bp, Artificial Sequence
  chemically synthesized
cctgtgctgttacccaggga

SEQ ID NO: 14309 - DNA, 20 bp, Artificial Sequence
  chemically synthesized
tgtgctgttacccagggaaa

SEQ ID NO: 14310 - DNA, 20 bp, Artificial Sequence
  chemically synthesized
ttacccagggaaagagaaaa

SEQ ID NO: 14311 - DNA, 20 bp, Artificial Sequence
  chemically synthesized
tacccagggaaagagaaaat

SEQ ID NO: 14312 - DNA, 20 bp, Artificial Sequence
  chemically synthesized
agggaaagagaaaatgggaa

SEQ ID NO: 14313 - DNA, 20 bp, Artificial Sequence
  chemically synthesized
ggaaagagaaaatgggaatg

SEQ ID NO: 14314 - DNA, 20 bp, Artificial Sequence
  chemically synthesized
aaagagaaaatgggaatgga

SEQ ID NO: 14315 - DNA, 20 bp, Artificial Sequence
  chemically synthesized
agagaaaatgggaatggaga

SEQ ID NO: 14316 - DNA, 20 bp, Artificial Sequence
  chemically synthesized
agaaaatgggaatggagaga

SEQ ID NO: 14317 - DNA, 20 bp, Artificial Sequence
  chemically synthesized
tgggaatggagagagagcga

SEQ ID NO: 14318 - DNA, 20 bp, Artificial Sequence
  chemically synthesized
gggaatggagagagagcgac

SEQ ID NO: 14319 - DNA, 20 bp, Artificial Sequence
  chemically synthesized
gagagagagcgacaggctcg

SEQ ID NO: 14320 - DNA, 20 bp, Artificial Sequence
  chemically synthesized
agagagagcgacaggctcgc

SEQ ID NO: 14321 - DNA, 20 bp, Artificial Sequence
  chemically synthesized
agagagcgacaggctcgcag

SEQ ID NO: 14322 - DNA, 20 bp, Artificial Sequence
  chemically synthesized
gagcgacaggctcgcaggag

SEQ ID NO: 14323 - DNA, 20 bp, Artificial Sequence
  chemically synthesized
cgacaggctcgcaggagcag

SEQ ID NO: 14324 - DNA, 20 bp, Artificial Sequence
  chemically synthesized
gacaggctcgcaggagcagc

SEQ ID NO: 14325 - DNA, 20 bp, Artificial Sequence
  chemically synthesized
acaggctcgcaggagcagcg

SEQ ID NO: 14326 - DNA, 20 bp, Artificial Sequence
  chemically synthesized
aggctcgcaggagcagcggg

SEQ ID NO: 14327 - DNA, 20 bp, Artificial Sequence
  chemically synthesized
caggagcagcggggagacca

SEQ ID NO: 14328 - DNA, 20 bp, Artificial Sequence
  chemically synthesized
gagcagcggggagaccacgg

SEQ ID NO: 14329 - DNA, 20 bp, Artificial Sequence
  chemically synthesized
agcggggagaccacggtggt

SEQ ID NO: 14330 - DNA, 20 bp, Artificial Sequence
  chemically synthesized
cggtggtgagatgaccgcct

SEQ ID NO: 14331 - DNA, 20 bp, Artificial Sequence
  chemically synthesized
ggtggtgagatgaccgcctc

SEQ ID NO: 14332 - DNA, 20 bp, Artificial Sequence
  chemically synthesized
cgggtcaccgccgcgctccc

SEQ ID NO: 14333 - DNA, 20 bp, Artificial Sequence
  chemically synthesized
gggtcaccgccgcgctcccc

SEQ ID NO: 14334 - DNA, 20 bp, Artificial Sequence
  chemically synthesized
ccgcgctccccaggcgccgc

SEQ ID NO: 14335 - DNA, 20 bp, Artificial Sequence
  chemically synthesized
ctccccaggcgccgccggcc

SEQ ID NO: 14336 - DNA, 20 bp, Artificial Sequence
  chemically synthesized
tccccaggcgccgccggcca

SEQ ID NO: 14337 - DNA, 20 bp, Artificial Sequence
  chemically synthesized
cgccggccaaggcgcacacc

SEQ ID NO: 14338 - DNA, 20 bp, Artificial Sequence
  chemically synthesized
gccggccaaggcgcacaccc

SEQ ID NO: 14339 - DNA, 20 bp, Artificial Sequence
  chemically synthesized
cggccaaggcgcacacccag

SEQ ID NO: 14340 - DNA, 20 bp, Artificial Sequence
  chemically synthesized
caaggcgcacacccaggagc

SEQ ID NO: 14341 - DNA, 20 bp, Artificial Sequence
  chemically synthesized
ggcgcacacccaggagccag

SEQ ID NO: 14342 - DNA, 20 bp, Artificial Sequence
  chemically synthesized
agccccctctcgcctttctg

SEQ ID NO: 14343 - DNA, 20 bp, Artificial Sequence
  chemically synthesized
gcctttctgcagacgttccc

SEQ ID NO: 14344 - DNA, 20 bp, Artificial Sequence
  chemically synthesized
tgcagacgttccctggaaat

SEQ ID NO: 14345 - DNA, 20 bp, Artificial Sequence
  chemically synthesized
gcagacgttccctggaaatt

SEQ ID NO: 14346 - DNA, 20 bp, Artificial Sequence
  chemically synthesized
cagacgttccctggaaatta

SEQ ID NO: 14347 - DNA, 20 bp, Artificial Sequence
  chemically synthesized
acgttccctggaaattaggg

SEQ ID NO: 14348 - DNA, 20 bp, Artificial Sequence
  chemically synthesized
ggaaattagggaagacctgt

SEQ ID NO: 14349 - DNA, 20 bp, Artificial Sequence
  chemically synthesized
cgcgtgctgccgctgtcaaa

SEQ ID NO: 14350 - DNA, 20 bp, Artificial Sequence
  chemically synthesized
gtgctgccgctgtcaaaaag

SEQ ID NO: 14351 - DNA, 20 bp, Artificial Sequence
  chemically synthesized
tgctgccgctgtcaaaaagc

SEQ ID NO: 14352 - DNA, 20 bp, Artificial Sequence
  chemically synthesized
tcaaaaagcgggcttcactc

SEQ ID NO: 14353 - DNA, 20 bp, Artificial Sequence
  chemically synthesized
aagcgggcttcactctggcg

SEQ ID NO: 14354 - DNA, 20 bp, Artificial Sequence
  chemically synthesized
agcgggcttcactctggcgt

SEQ ID NO: 14355 - DNA, 20 bp, Artificial Sequence
  chemically synthesized
actctggcgtgggatacttt

SEQ ID NO: 14356 - DNA, 20 bp, Artificial Sequence
  chemically synthesized
tcagttttacgtaaaatgta

SEQ ID NO: 14357 - DNA, 20 bp, Artificial Sequence
  chemically synthesized
ttacgtaaaatgtacagcaa

SEQ ID NO: 14358 - DNA, 20 bp, Artificial Sequence
  chemically synthesized
gcaacagcaccccctgcgat

SEQ ID NO: 14359 - DNA, 20 bp, Artificial Sequence
  chemically synthesized
cagcaccccctgcgattgga

SEQ ID NO: 14360 - DNA, 20 bp, Artificial Sequence
  chemically synthesized
ctgcgattggaaagtttatt

SEQ ID NO: 14361 - DNA, 20 bp, Artificial Sequence
  chemically synthesized
tattcagaaacgtgcctgta

SEQ ID NO: 14362 - DNA, 20 bp, Artificial Sequence
  chemically synthesized
aacgtgcctgtaaagtcccc

SEQ ID NO: 14363 - DNA, 20 bp, Artificial Sequence
  chemically synthesized
ccctggcgcctcccgcctcc

SEQ ID NO: 14364 - DNA, 20 bp, Artificial Sequence
  chemically synthesized
ctcccagcctccctgcctgc

SEQ ID NO: 14365 - DNA, 20 bp, Artificial Sequence
  chemically synthesized
tgcctgccagcaccactctg

SEQ ID NO: 14366 - DNA, 20 bp, Artificial Sequence
  chemically synthesized
gcagccgccgccgccgccgc

SEQ ID NO: 14367 - DNA, 20 bp, Artificial Sequence
  chemically synthesized
cagccgccgccgccgccgcc

SEQ ID NO: 14368 - DNA, 20 bp, Artificial Sequence
  chemically synthesized
agccgccgccgccgccgccg

SEQ ID NO: 14369 - DNA, 20 bp, Artificial Sequence
  chemically synthesized
ccgccgccgccgccgccggg

SEQ ID NO: 14370 - DNA, 20 bp, Artificial Sequence
  chemically synthesized
cgccgccgccggggagatcg

SEQ ID NO: 14371 - DNA, 20 bp, Artificial Sequence
  chemically synthesized
tcgcagtccgattccaaatc

SEQ ID NO: 14372 - DNA, 20 bp, Artificial Sequence
  chemically synthesized
cagtccgattccaaatctgg

SEQ ID NO: 14373 - DNA, 20 bp, Artificial Sequence
  chemically synthesized
agtccgattccaaatctgga

SEQ ID NO: 14374 - DNA, 20 bp, Artificial Sequence
  chemically synthesized
tccgattccaaatctggaag

SEQ ID NO: 14375 - DNA, 20 bp, Artificial Sequence
  chemically synthesized
attccaaatctggaaggagt

SEQ ID NO: 14376 - DNA, 20 bp, Artificial Sequence
  chemically synthesized
ttccaaatctggaaggagtt

SEQ ID NO: 14377 - DNA, 20 bp, Artificial Sequence
  chemically synthesized
tccaaatctggaaggagttg

SEQ ID NO: 14378 - DNA, 20 bp, Artificial Sequence
  chemically synthesized
ccaaatctggaaggagttgg

SEQ ID NO: 14379 - DNA, 20 bp, Artificial Sequence
  chemically synthesized
caaatctggaaggagttggg

SEQ ID NO: 14380 - DNA, 20 bp, Artificial Sequence
  chemically synthesized
aatctggaaggagttggggg

SEQ ID NO: 14381 - DNA, 20 bp, Artificial Sequence
  chemically synthesized
tctggaaggagttgggggga

SEQ ID NO: 14382 - DNA, 20 bp, Artificial Sequence
  chemically synthesized
ctggaaggagttggggggag

SEQ ID NO: 14383 - DNA, 20 bp, Artificial Sequence
  chemically synthesized
ggaaggagttggggggagag

SEQ ID NO: 14384 - DNA, 20 bp, Artificial Sequence
  chemically synthesized
gagttggggggagaggagaa

SEQ ID NO: 14385 - DNA, 20 bp, Artificial Sequence
  chemically synthesized
gggggagaggagaatggact

SEQ ID NO: 14386 - DNA, 20 bp, Artificial Sequence
  chemically synthesized
ggggagaggagaatggactc

SEQ ID NO: 14387 - DNA, 20 bp, Artificial Sequence
  chemically synthesized
aggagaatggactcaggtcc

SEQ ID NO: 14388 - DNA, 20 bp, Artificial Sequence
  chemically synthesized
ggagaatggactcaggtcca

SEQ ID NO: 14389 - DNA, 20 bp, Artificial Sequence
  chemically synthesized
gagaatggactcaggtccaa

SEQ ID NO: 14390 - DNA, 20 bp, Artificial Sequence
  chemically synthesized
gaatggactcaggtccaagg

SEQ ID NO: 14391 - DNA, 20 bp, Artificial Sequence
  chemically synthesized
aatggactcaggtccaaggg

SEQ ID NO: 14392 - DNA, 20 bp, Artificial Sequence
  chemically synthesized
actcaggtccaagggaggtg

SEQ ID NO: 14393 - DNA, 20 bp, Artificial Sequence
  chemically synthesized
tcaggtccaagggaggtgcg

SEQ ID NO: 14394 - DNA, 20 bp, Artificial Sequence
  chemically synthesized
caggtccaagggaggtgcgg

SEQ ID NO: 14395 - DNA, 20 bp, Artificial Sequence
  chemically synthesized
aggtccaagggaggtgcgga

SEQ ID NO: 14396 - DNA, 20 bp, Artificial Sequence
  chemically synthesized
caagggaggtgcggagggtg

SEQ ID NO: 14397 - DNA, 20 bp, Artificial Sequence
  chemically synthesized
aagggaggtgcggagggtgc

SEQ ID NO: 14398 - DNA, 20 bp, Artificial Sequence
  chemically synthesized
agggaggtgcggagggtgca

SEQ ID NO: 14399 - DNA, 20 bp, Artificial Sequence
  chemically synthesized
gaggtgcggagggtgcaggg

SEQ ID NO: 14400 - DNA, 20 bp, Artificial Sequence
  chemically synthesized
ggtgcggagggtgcagggtg

SEQ ID NO: 14401 - DNA, 20 bp, Artificial Sequence
  chemically synthesized
cggagggtgcagggtggaga

SEQ ID NO: 14402 - DNA, 20 bp, Artificial Sequence
  chemically synthesized
ggagggtgcagggtggagac

SEQ ID NO: 14403 - DNA, 20 bp, Artificial Sequence
  chemically synthesized
agggtggagacgggtcgcca

SEQ ID NO: 14404 - DNA, 20 bp, Artificial Sequence
  chemically synthesized
gacgggtcgccatggcccgc

SEQ ID NO: 14405 - DNA, 20 bp, Artificial Sequence
  chemically synthesized
gccatggcccgcgagaccct

SEQ ID NO: 14406 - DNA, 20 bp, Artificial Sequence
  chemically synthesized
gcccgcgagaccctgagctg

SEQ ID NO: 14407 - DNA, 20 bp, Artificial Sequence
  chemically synthesized
cccgcgagaccctgagctgc

SEQ ID NO: 14408 - DNA, 20 bp, Artificial Sequence
  chemically synthesized
gcgagaccctgagctgcagg

SEQ ID NO: 14409 - DNA, 20 bp, Artificial Sequence
  chemically synthesized
agctgcaggtggatatgtgt

SEQ ID NO: 14410 - DNA, 20 bp, Artificial Sequence
  chemically synthesized
gatatgtgtgagtgtgtctg

SEQ ID NO: 14411 - DNA, 20 bp, Artificial Sequence
  chemically synthesized
tatgtgtgagtgtgtctgca

SEQ ID NO: 14412 - DNA, 20 bp, Artificial Sequence
  chemically synthesized
tgtgagtgtgtctgcagagc

SEQ ID NO: 14413 - DNA, 20 bp, Artificial Sequence
  chemically synthesized
gtgagtgtgtctgcagagcg

SEQ ID NO: 14414 - DNA, 20 bp, Artificial Sequence
  chemically synthesized
gagtgtgtctgcagagcgag

SEQ ID NO: 14415 - DNA, 20 bp, Artificial Sequence
  chemically synthesized
gagccctccttccctctcct

SEQ ID NO: 14416 - DNA, 20 bp, Artificial Sequence
  chemically synthesized
gccctccttccctctcctcg

SEQ ID NO: 14417 - DNA, 20 bp, Artificial Sequence
  chemically synthesized
ctccttccctctcctcggag

SEQ ID NO: 14418 - DNA, 20 bp, Artificial Sequence
  chemically synthesized
cgtcttctcatccccctctt

SEQ ID NO: 14419 - DNA, 20 bp, Artificial Sequence
  chemically synthesized
tcatccccctcttcagtcta

SEQ ID NO: 14420 - DNA, 20 bp, Artificial Sequence
  chemically synthesized
catccccctcttcagtctaa

SEQ ID NO: 14421 - DNA, 20 bp, Artificial Sequence
  chemically synthesized
atccccctcttcagtctaaa

SEQ ID NO: 14422 - DNA, 20 bp, Artificial Sequence
  chemically synthesized
cttccgtaaactcacccacc

SEQ ID NO: 14423 - DNA, 20 bp, Artificial Sequence
  chemically synthesized
ccgtaaactcacccacccgg

SEQ ID NO: 14424 - DNA, 20 bp, Artificial Sequence
  chemically synthesized
cgtaaactcacccacccggt

SEQ ID NO: 14425 - DNA, 20 bp, Artificial Sequence
  chemically synthesized
gtaaactcacccacccggtg

SEQ ID NO: 14426 - DNA, 20 bp, Artificial Sequence
  chemically synthesized
taaactcacccacccggtgg

SEQ ID NO: 14427 - DNA, 20 bp, Artificial Sequence
  chemically synthesized
aaactcacccacccggtggg

SEQ ID NO: 14428 - DNA, 20 bp, Artificial Sequence
  chemically synthesized
aactcacccacccggtgggg

SEQ ID NO: 14429 - DNA, 20 bp, Artificial Sequence
  chemically synthesized
tgggggggctttattgtttt

SEQ ID NO: 14430 - DNA, 20 bp, Artificial Sequence
  chemically synthesized
ggggctttattgttttaagc

SEQ ID NO: 14431 - DNA, 20 bp, Artificial Sequence
  chemically synthesized
gggctttattgttttaagcg

SEQ ID NO: 14432 - DNA, 20 bp, Artificial Sequence
  chemically synthesized
ggctttattgttttaagcga

SEQ ID NO: 14433 - DNA, 20 bp, Artificial Sequence
  chemically synthesized
attgttttaagcgagggccc

SEQ ID NO: 14434 - DNA, 20 bp, Artificial Sequence
  chemically synthesized
ttgttttaagcgagggcccc

SEQ ID NO: 14435 - DNA, 20 bp, Artificial Sequence
  chemically synthesized
gcacgcgctcacccatcccg

SEQ ID NO: 14436 - DNA, 20 bp, Artificial Sequence
  chemically synthesized
cacccatcccgcagccctgc

SEQ ID NO: 14437 - DNA, 20 bp, Artificial Sequence
  chemically synthesized
catcccgcagccctgccggc

SEQ ID NO: 14438 - DNA, 20 bp, Artificial Sequence
  chemically synthesized
cccgcagccctgccggcaag

SEQ ID NO: 14439 - DNA, 20 bp, Artificial Sequence
  chemically synthesized
tgtttattcctgtttcgtct

SEQ ID NO: 14440 - DNA, 20 bp, Artificial Sequence
  chemically synthesized
attcctgtttcgtcttagta

SEQ ID NO: 14441 - DNA, 20 bp, Artificial Sequence
  chemically synthesized
tttcgtcttagtaaagtttc

SEQ ID NO: 14442 - DNA, 20 bp, Artificial Sequence
  chemically synthesized
aagtttcaagtctactgtgt

SEQ ID NO: 14443 - DNA, 20 bp, Artificial Sequence
  chemically synthesized
ctactgtgttagaaaatgac

SEQ ID NO: 14444 - DNA, 20 bp, Artificial Sequence
  chemically synthesized
tagaaaatgactggcttgcc

SEQ ID NO: 14445 - DNA, 20 bp, Artificial Sequence
  chemically synthesized
aatgactggcttgcctagct

SEQ ID NO: 14446 - DNA, 20 bp, Artificial Sequence
  chemically synthesized
gactggcttgcctagctcgg

SEQ ID NO: 14447 - DNA, 20 bp, Artificial Sequence
  chemically synthesized
ctggcttgcctagctcggcg

SEQ ID NO: 14448 - DNA, 20 bp, Artificial Sequence
  chemically synthesized
tgcctagctcggcggagctt

SEQ ID NO: 14449 - DNA, 20 bp, Artificial Sequence
  chemically synthesized
gcggagcttcggacccctct

SEQ ID NO: 14450 - DNA, 20 bp, Artificial Sequence
  chemically synthesized
cggagcttcggacccctcta

SEQ ID NO: 14451 - DNA, 20 bp, Artificial Sequence
  chemically synthesized
agcttcggacccctctaagg

SEQ ID NO: 14452 - DNA, 20 bp, Artificial Sequence
  chemically synthesized
cggacccctctaaggaagaa

SEQ ID NO: 14453 - DNA, 20 bp, Artificial Sequence
  chemically synthesized
ggacccctctaaggaagaaa

SEQ ID NO: 14454 - DNA, 20 bp, Artificial Sequence
  chemically synthesized
acccctctaaggaagaaaag

SEQ ID NO: 14455 - DNA, 20 bp, Artificial Sequence
  chemically synthesized
cccctctaaggaagaaaagg

SEQ ID NO: 14456 - DNA, 20 bp, Artificial Sequence
  chemically synthesized
aggttttgatgctcaacatt

SEQ ID NO: 14457 - DNA, 20 bp, Artificial Sequence
  chemically synthesized
gttttgatgctcaacattga

SEQ ID NO: 14458 - DNA, 20 bp, Artificial Sequence
  chemically synthesized
tttgatgctcaacattgaga

SEQ ID NO: 14459 - DNA, 20 bp, Artificial Sequence
  chemically synthesized
gctcaacattgagagagatg

SEQ ID NO: 14460 - DNA, 20 bp, Artificial Sequence
  chemically synthesized
ctcaacattgagagagatgt

SEQ ID NO: 14461 - DNA, 20 bp, Artificial Sequence
  chemically synthesized
gagagagatgtgggctgtac

SEQ ID NO: 14462 - DNA, 20 bp, Artificial Sequence
  chemically synthesized
agagagatgtgggctgtact

SEQ ID NO: 14463 - DNA, 20 bp, Artificial Sequence
  chemically synthesized
gtactgggattgtgtcaatg

SEQ ID NO: 14464 - DNA, 20 bp, Artificial Sequence
  chemically synthesized
tgtttgttgttgtttccctc

SEQ ID NO: 14465 - DNA, 20 bp, Artificial Sequence
  chemically synthesized
tgttgtttccctccagtttg

SEQ ID NO: 14466 - DNA, 20 bp, Artificial Sequence
  chemically synthesized
gttgtttccctccagtttgt

SEQ ID NO: 14467 - DNA, 20 bp, Artificial Sequence
  chemically synthesized
tgtttccctccagtttgtgg

SEQ ID NO: 14468 - DNA, 20 bp, Artificial Sequence
  chemically synthesized
gtttccctccagtttgtggg

SEQ ID NO: 14469 - DNA, 20 bp, Artificial Sequence
  chemically synthesized
tttccctccagtttgtggga

SEQ ID NO: 14470 - DNA, 20 bp, Artificial Sequence
  chemically synthesized
tccctccagtttgtgggagg

SEQ ID NO: 14471 - DNA, 20 bp, Artificial Sequence
  chemically synthesized
ggagacctcaaattctgttt

SEQ ID NO: 14472 - DNA, 20 bp, Artificial Sequence
  chemically synthesized
gacctcaaattctgtttaag

SEQ ID NO: 14473 - DNA, 20 bp, Artificial Sequence
  chemically synthesized
ctcaaattctgtttaagaag

SEQ ID NO: 14474 - DNA, 20 bp, Artificial Sequence
  chemically synthesized
tcaaattctgtttaagaagc

SEQ ID NO: 14475 - DNA, 20 bp, Artificial Sequence
  chemically synthesized
aaattctgtttaagaagcgg

SEQ ID NO: 14476 - DNA, 20 bp, Artificial Sequence
  chemically synthesized
aattctgtttaagaagcggg

SEQ ID NO: 14477 - DNA, 20 bp, Artificial Sequence
  chemically synthesized
taagaagcgggaggattcac

SEQ ID NO: 14478 - DNA, 20 bp, Artificial Sequence
  chemically synthesized
gaagcgggaggattcactag

SEQ ID NO: 14479 - DNA, 20 bp, Artificial Sequence
  chemically synthesized
gggaggattcactagaagtt

SEQ ID NO: 14480 - DNA, 20 bp, Artificial Sequence
  chemically synthesized
tcactagaagttaagctctg

SEQ ID NO: 14481 - DNA, 20 bp, Artificial Sequence
  chemically synthesized
caccatttccccttttcact

SEQ ID NO: 14482 - DNA, 20 bp, Artificial Sequence
  chemically synthesized
ccccttttcactgagttctt

SEQ ID NO: 14483 - DNA, 20 bp, Artificial Sequence
  chemically synthesized
ccttttcactgagttcttca

SEQ ID NO: 14484 - DNA, 20 bp, Artificial Sequence
  chemically synthesized
tttcactgagttcttcagag

SEQ ID NO: 14485 - DNA, 20 bp, Artificial Sequence
  chemically synthesized
ttcactgagttcttcagagc

SEQ ID NO: 14486 - DNA, 20 bp, Artificial Sequence
  chemically synthesized
ctgagttcttcagagcaggt

SEQ ID NO: 14487 - DNA, 20 bp, Artificial Sequence
  chemically synthesized
tcagcatctctattccacca

SEQ ID NO: 14488 - DNA, 20 bp, Artificial Sequence
  chemically synthesized
tgctttttgtcttgttaaac

SEQ ID NO: 14489 - DNA, 20 bp, Artificial Sequence
  chemically synthesized
ttgtcttgttaaaccagcct

SEQ ID NO: 14490 - DNA, 20 bp, Artificial Sequence
  chemically synthesized
gtcttgttaaaccagccttg

SEQ ID NO: 14491 - DNA, 20 bp, Artificial Sequence
  chemically synthesized
accagccttggagtcaccaa

SEQ ID NO: 14492 - DNA, 20 bp, Artificial Sequence
  chemically synthesized
tcaccaaaagaatgtcttct

SEQ ID NO: 14493 - DNA, 20 bp, Artificial Sequence
  chemically synthesized
caccaaaagaatgtcttctt

SEQ ID NO: 14494 - DNA, 20 bp, Artificial Sequence
  chemically synthesized
accaaaagaatgtcttcttg

SEQ ID NO: 14495 - DNA, 20 bp, Artificial Sequence
  chemically synthesized
ccaaaagaatgtcttcttgg

SEQ ID NO: 14496 - DNA, 20 bp, Artificial Sequence
  chemically synthesized
caaaagaatgtcttcttggg

SEQ ID NO: 14497 - DNA, 20 bp, Artificial Sequence
  chemically synthesized
aagaatgtcttcttgggggg

SEQ ID NO: 14498 - DNA, 20 bp, Artificial Sequence
  chemically synthesized
aatgtcttcttggggggtgg

SEQ ID NO: 14499 - DNA, 20 bp, Artificial Sequence
  chemically synthesized
atgtcttcttggggggtggc

SEQ ID NO: 14500 - DNA, 20 bp, Artificial Sequence
  chemically synthesized
tgtcttcttggggggtggcg

SEQ ID NO: 14501 - DNA, 20 bp, Artificial Sequence
  chemically synthesized
gtcttcttggggggtggcgg

SEQ ID NO: 14502 - DNA, 20 bp, Artificial Sequence
  chemically synthesized
cttcttggggggtggcgggg

SEQ ID NO: 14503 - DNA, 20 bp, Artificial Sequence
  chemically synthesized
ttcttggggggtggcggggg

SEQ ID NO: 14504 - DNA, 20 bp, Artificial Sequence
  chemically synthesized
ggtggcgggggaggacgacg

SEQ ID NO: 14505 - DNA, 20 bp, Artificial Sequence
  chemically synthesized
gtggcgggggaggacgacgt

SEQ ID NO: 14506 - DNA, 20 bp, Artificial Sequence
  chemically synthesized
tggcgggggaggacgacgtg

SEQ ID NO: 14507 - DNA, 20 bp, Artificial Sequence
  chemically synthesized
ggcgggggaggacgacgtgg

SEQ ID NO: 14508 - DNA, 20 bp, Artificial Sequence
  chemically synthesized
ggggaggacgacgtggggga

SEQ ID NO: 14509 - DNA, 20 bp, Artificial Sequence
  chemically synthesized
aggacgacgtgggggacggt

SEQ ID NO: 14510 - DNA, 20 bp, Artificial Sequence
  chemically synthesized
gacgacgtgggggacggttg

SEQ ID NO: 14511 - DNA, 20 bp, Artificial Sequence
  chemically synthesized
acgacgtgggggacggttgg

SEQ ID NO: 14512 - DNA, 20 bp, Artificial Sequence
  chemically synthesized
cgacgtgggggacggttgga

SEQ ID NO: 14513 - DNA, 20 bp, Artificial Sequence
  chemically synthesized
cgtgggggacggttggaggg

SEQ ID NO: 14514 - DNA, 20 bp, Artificial Sequence
  chemically synthesized
gtgggggacggttggaggga

SEQ ID NO: 14515 - DNA, 20 bp, Artificial Sequence
  chemically synthesized
ggacggttggagggaaggtg

SEQ ID NO: 14516 - DNA, 20 bp, Artificial Sequence
  chemically synthesized
acggttggagggaaggtgaa

SEQ ID NO: 14517 - DNA, 20 bp, Artificial Sequence
  chemically synthesized
ggttggagggaaggtgaaga

SEQ ID NO: 14518 - DNA, 20 bp, Artificial Sequence
  chemically synthesized
gttggagggaaggtgaagag

SEQ ID NO: 14519 - DNA, 20 bp, Artificial Sequence
  chemically synthesized
ttggagggaaggtgaagaga

SEQ ID NO: 14520 - DNA, 20 bp, Artificial Sequence
  chemically synthesized
gagggaaggtgaagagaggg

SEQ ID NO: 14521 - DNA, 20 bp, Artificial Sequence
  chemically synthesized
ggaaggtgaagagagggaag

SEQ ID NO: 14522 - DNA, 20 bp, Artificial Sequence
  chemically synthesized
ggtgaagagagggaagaaga

SEQ ID NO: 14523 - DNA, 20 bp, Artificial Sequence
  chemically synthesized
agggaagaagaaagtgcaac

SEQ ID NO: 14524 - DNA, 20 bp, Artificial Sequence
  chemically synthesized
gggaagaagaaagtgcaact

SEQ ID NO: 14525 - DNA, 20 bp, Artificial Sequence
  chemically synthesized
gaagaagaaagtgcaactgg

SEQ ID NO: 14526 - DNA, 20 bp, Artificial Sequence
  chemically synthesized
aagaagaaagtgcaactggg

SEQ ID NO: 14527 - DNA, 20 bp, Artificial Sequence
  chemically synthesized
tttgaaaaataaataaataa

SEQ ID NO: 14528 - DNA, 20 bp, Artificial Sequence
  chemically synthesized
aaaataaataaataaaagaa

SEQ ID NO: 14529 - DNA, 20 bp, Artificial Sequence
  chemically synthesized
aaataaaagaaaagcccctt

SEQ ID NO: 14530 - DNA, 20 bp, Artificial Sequence
  chemically synthesized
aataaaagaaaagccccttc

SEQ ID NO: 14531 - DNA, 20 bp, Artificial Sequence
  chemically synthesized
aaagccccttcaggtaacaa

SEQ ID NO: 14532 - DNA, 20 bp, Artificial Sequence
  chemically synthesized
ccccttcaggtaacaatagt

SEQ ID NO: 14533 - DNA, 20 bp, Artificial Sequence
  chemically synthesized
ttcaggtaacaatagtgagc

SEQ ID NO: 14534 - DNA, 20 bp, Artificial Sequence
  chemically synthesized
aatagtgagccagattcttt

SEQ ID NO: 14535 - DNA, 20 bp, Artificial Sequence
  chemically synthesized
agccagattctttcagaacc

SEQ ID NO: 14536 - DNA, 20 bp, Artificial Sequence
  chemically synthesized
tctttcagaaccaagctttt

SEQ ID NO: 14537 - DNA, 20 bp, Artificial Sequence
  chemically synthesized
ttgttcccacccgtccataa

SEQ ID NO: 14538 - DNA, 20 bp, Artificial Sequence
  chemically synthesized
cgtccataaaagtccatcta

SEQ ID NO: 14539 - DNA, 20 bp, Artificial Sequence
  chemically synthesized
tccataaaagtccatctata

SEQ ID NO: 14540 - DNA, 20 bp, Artificial Sequence
  chemically synthesized
ataaaagtccatctatagag

SEQ ID NO: 14541 - DNA, 20 bp, Artificial Sequence
  chemically synthesized
tatagagaagatatataaat

SEQ ID NO: 14542 - DNA, 20 bp, Artificial Sequence
  chemically synthesized
gagaagatatataaatgagc

SEQ ID NO: 14543 - DNA, 20 bp, Artificial Sequence
  chemically synthesized
agatatataaatgagcgagt

SEQ ID NO: 14544 - DNA, 20 bp, Artificial Sequence
  chemically synthesized
aaatgagcgagtgagtgttg

SEQ ID NO: 14545 - DNA, 20 bp, Artificial Sequence
  chemically synthesized
tatgtatgatttatatataa

SEQ ID NO: 14546 - DNA, 20 bp, Artificial Sequence
  chemically synthesized
tatatataatggtgtgtata

SEQ ID NO: 14547 - DNA, 20 bp, Artificial Sequence
  chemically synthesized
atggtgtgtataaagctttt

SEQ ID NO: 14548 - DNA, 20 bp, Artificial Sequence
  chemically synthesized
tggtgtgtataaagcttttc

SEQ ID NO: 14549 - DNA, 20 bp, Artificial Sequence
  chemically synthesized
ggtgtgtataaagcttttcg

SEQ ID NO: 14550 - DNA, 20 bp, Artificial Sequence
  chemically synthesized
tgtataaagcttttcggggt

SEQ ID NO: 14551 - DNA, 20 bp, Artificial Sequence
  chemically synthesized
aagcttttcggggttggctg

SEQ ID NO: 14552 - DNA, 20 bp, Artificial Sequence
  chemically synthesized
ggggttggctgtagtgtaaa

SEQ ID NO: 14553 - DNA, 20 bp, Artificial Sequence
  chemically synthesized
aatgactttattacctctga

SEQ ID NO: 14554 - DNA, 20 bp, Artificial Sequence
  chemically synthesized
atgactttattacctctgaa

SEQ ID NO: 14555 - DNA, 20 bp, Artificial Sequence
  chemically synthesized
attacctctgaaaggttctg

SEQ ID NO: 14556 - DNA, 20 bp, Artificial Sequence
  chemically synthesized
gttctgtggttcacatttaa

SEQ ID NO: 14557 - DNA, 20 bp, Artificial Sequence
  chemically synthesized
aattgtgtgcgctctgacga

SEQ ID NO: 14558 - DNA, 20 bp, Artificial Sequence
  chemically synthesized
ctctgacgatggcaccctat

SEQ ID NO: 14559 - DNA, 20 bp, Artificial Sequence
  chemically synthesized
tctgacgatggcaccctatc

SEQ ID NO: 14560 - DNA, 20 bp, Artificial Sequence
  chemically synthesized
ctgacgatggcaccctatca

SEQ ID NO: 14561 - DNA, 20 bp, Artificial Sequence
  chemically synthesized
cctatcagggctgctatctg

SEQ ID NO: 14562 - DNA, 20 bp, Artificial Sequence
  chemically synthesized
ggctatttccaataaataac

SEQ ID NO: 14563 - DNA, 20 bp, Artificial Sequence
  chemically synthesized
ttcctttttaaaaaaaaaca

SEQ ID NO: 14564 - DNA, 20 bp, Artificial Sequence
  chemically synthesized
tcctttttaaaaaaaaacat

SEQ ID NO: 14565 - DNA, 20 bp, Artificial Sequence
  chemically synthesized
aaaaaaaaacataggaaatt

SEQ ID NO: 14566 - DNA, 20 bp, Artificial Sequence
  chemically synthesized
aacataggaaattaagcact

SEQ ID NO: 14567 - DNA, 20 bp, Artificial Sequence
  chemically synthesized
gaaattaagcacttagttac

SEQ ID NO: 14568 - DNA, 20 bp, Artificial Sequence
  chemically synthesized
attaagcacttagttacaag

SEQ ID NO: 14569 - DNA, 20 bp, Artificial Sequence
  chemically synthesized
ttaagcacttagttacaagt

SEQ ID NO: 14570 - DNA, 20 bp, Artificial Sequence
  chemically synthesized
tagcagacctacttgtaact

SEQ ID NO: 14571 - DNA, 20 bp, Artificial Sequence
  chemically synthesized
ttcctatgtttttttttaaa

SEQ ID NO: 14572 - DNA, 20 bp, Artificial Sequence
  chemically synthesized
tcctatgtttttttttaaaa

SEQ ID NO: 14573 - DNA, 20 bp, Artificial Sequence
  chemically synthesized
gaaaatcaataaaatgttgc

SEQ ID NO: 14574 - DNA, 20 bp, Artificial Sequence
  chemically synthesized
aaatgttgccagttatttat

SEQ ID NO: 14575 - DNA, 20 bp, Artificial Sequence
  chemically synthesized
tgccagttatttattggaaa

SEQ ID NO: 14576 - DNA, 20 bp, Artificial Sequence
  chemically synthesized
ttatttattggaaatagcca

SEQ ID NO: 14577 - DNA, 20 bp, Artificial Sequence
  chemically synthesized
ttattggaaatagccacaga

SEQ ID NO: 14578 - DNA, 20 bp, Artificial Sequence
  chemically synthesized
ttggaaatagccacagatag

SEQ ID NO: 14579 - DNA, 20 bp, Artificial Sequence
  chemically synthesized
gccacagatagcagccctga

SEQ ID NO: 14580 - DNA, 20 bp, Artificial Sequence
  chemically synthesized
ccacagatagcagccctgat

SEQ ID NO: 14581 - DNA, 20 bp, Artificial Sequence
  chemically synthesized
cacagatagcagccctgata

SEQ ID NO: 14582 - DNA, 20 bp, Artificial Sequence
  chemically synthesized
ccctgatagggtgccatcgt

SEQ ID NO: 14583 - DNA, 20 bp, Artificial Sequence
  chemically synthesized
ctgatagggtgccatcgtca

SEQ ID NO: 14584 - DNA, 20 bp, Artificial Sequence
  chemically synthesized
ttgtgtaatgaattgtaatt

SEQ ID NO: 14585 - DNA, 20 bp, Artificial Sequence
  chemically synthesized
tgtaatgaattgtaattcag

SEQ ID NO: 14586 - DNA, 20 bp, Artificial Sequence
  chemically synthesized
agactgttaaatgtgaacca

SEQ ID NO: 14587 - DNA, 20 bp, Artificial Sequence
  chemically synthesized
atgtgaaccacagaaccttt

SEQ ID NO: 14588 - DNA, 20 bp, Artificial Sequence
  chemically synthesized
gtgaaccacagaacctttca

SEQ ID NO: 14589 - DNA, 20 bp, Artificial Sequence
  chemically synthesized
tgaaccacagaacctttcag

SEQ ID NO: 14590 - DNA, 20 bp, Artificial Sequence
  chemically synthesized
agaacctttcagaggtaata

SEQ ID NO: 14591 - DNA, 20 bp, Artificial Sequence
  chemically synthesized
agtcattactttttacacta

SEQ ID NO: 14592 - DNA, 20 bp, Artificial Sequence
  chemically synthesized
acactacagccaaccccgaa

SEQ ID NO: 14593 - DNA, 20 bp, Artificial Sequence
  chemically synthesized
tcatttatatatcttctcta

SEQ ID NO: 14594 - DNA, 20 bp, Artificial Sequence
  chemically synthesized
ttatatatcttctctataga

SEQ ID NO: 14595 - DNA, 20 bp, Artificial Sequence
  chemically synthesized
tctctatagatggactttta

SEQ ID NO: 14596 - DNA, 20 bp, Artificial Sequence
  chemically synthesized
tatagatggacttttatgga

SEQ ID NO: 14597 - DNA, 20 bp, Artificial Sequence
  chemically synthesized
atagatggacttttatggac

SEQ ID NO: 14598 - DNA, 20 bp, Artificial Sequence
  chemically synthesized
gatggacttttatggacggg

SEQ ID NO: 14599 - DNA, 20 bp, Artificial Sequence
  chemically synthesized
atggacttttatggacgggt

SEQ ID NO: 14600 - DNA, 20 bp, Artificial Sequence
  chemically synthesized
gaacaatattcaaatctgaa

SEQ ID NO: 14601 - DNA, 20 bp, Artificial Sequence
  chemically synthesized
atattcaaatctgaaaagct

SEQ ID NO: 14602 - DNA, 20 bp, Artificial Sequence
  chemically synthesized
tctgaaaagcttggttctga

SEQ ID NO: 14603 - DNA, 20 bp, Artificial Sequence
  chemically synthesized
agcttggttctgaaagaatc

SEQ ID NO: 14604 - DNA, 20 bp, Artificial Sequence
  chemically synthesized
tggctcactattgttacctg

SEQ ID NO: 14605 - DNA, 20 bp, Artificial Sequence
  chemically synthesized
ggctcactattgttacctga

SEQ ID NO: 14606 - DNA, 20 bp, Artificial Sequence
  chemically synthesized
gctcactattgttacctgaa

SEQ ID NO: 14607 - DNA, 20 bp, Artificial Sequence
  chemically synthesized
ctcactattgttacctgaag

SEQ ID NO: 14608 - DNA, 20 bp, Artificial Sequence
  chemically synthesized
ttttatttatttatttttca

SEQ ID NO: 14609 - DNA, 20 bp, Artificial Sequence
  chemically synthesized
tttatttatttatttttcaa

SEQ ID NO: 14610 - DNA, 20 bp, Artificial Sequence
  chemically synthesized
tttatttttcaaaggcctcc

SEQ ID NO: 14611 - DNA, 20 bp, Artificial Sequence
  chemically synthesized
gtcctcccccgccacccccc

SEQ ID NO: 14612 - DNA, 20 bp, Artificial Sequence
  chemically synthesized
ctcccccgccaccccccaag

SEQ ID NO: 14613 - DNA, 20 bp, Artificial Sequence
  chemically synthesized
cccccaagaagacattcttt

SEQ ID NO: 14614 - DNA, 20 bp, Artificial Sequence
  chemically synthesized
gacattcttttggtgactcc

SEQ ID NO: 14615 - DNA, 20 bp, Artificial Sequence
  chemically synthesized
acattcttttggtgactcca

SEQ ID NO: 14616 - DNA, 20 bp, Artificial Sequence
  chemically synthesized
tcttttggtgactccaaggc

SEQ ID NO: 14617 - DNA, 20 bp, Artificial Sequence
  chemically synthesized
gactccaaggctggtttaac

SEQ ID NO: 14618 - DNA, 20 bp, Artificial Sequence
  chemically synthesized
ggctggtttaacaagacaaa

SEQ ID NO: 14619 - DNA, 20 bp, Artificial Sequence
  chemically synthesized
tggtttaacaagacaaaaag

SEQ ID NO: 14620 - DNA, 20 bp, Artificial Sequence
  chemically synthesized
acaagacaaaaagcagactg

SEQ ID NO: 14621 - DNA, 20 bp, Artificial Sequence
  chemically synthesized
agacaaaaagcagactgtgg

SEQ ID NO: 14622 - DNA, 20 bp, Artificial Sequence
  chemically synthesized
aaaagcagactgtggtggaa

SEQ ID NO: 14623 - DNA, 20 bp, Artificial Sequence
  chemically synthesized
aagcagactgtggtggaata

SEQ ID NO: 14624 - DNA, 20 bp, Artificial Sequence
  chemically synthesized
agagatgctgacctgctctg

SEQ ID NO: 14625 - DNA, 20 bp, Artificial Sequence
  chemically synthesized
ctgacctgctctgaagaact

SEQ ID NO: 14626 - DNA, 20 bp, Artificial Sequence
  chemically synthesized
gctctgaagaactcagtgaa

SEQ ID NO: 14627 - DNA, 20 bp, Artificial Sequence
  chemically synthesized
ctctgaagaactcagtgaaa

SEQ ID NO: 14628 - DNA, 20 bp, Artificial Sequence
  chemically synthesized
tctgaagaactcagtgaaaa

SEQ ID NO: 14629 - DNA, 20 bp, Artificial Sequence
  chemically synthesized
ctgaagaactcagtgaaaag

SEQ ID NO: 14630 - DNA, 20 bp, Artificial Sequence
  chemically synthesized
aactcagtgaaaaggggaaa

SEQ ID NO: 14631 - DNA, 20 bp, Artificial Sequence
  chemically synthesized
ggggaaatggtgtcacacac

SEQ ID NO: 14632 - DNA, 20 bp, Artificial Sequence
  chemically synthesized
atggtgtcacacacaagcta

SEQ ID NO: 14633 - DNA, 20 bp, Artificial Sequence
  chemically synthesized
ggtgtcacacacaagctaca

SEQ ID NO: 14634 - DNA, 20 bp, Artificial Sequence
  chemically synthesized
aagctacagagcttaacttc

SEQ ID NO: 14635 - DNA, 20 bp, Artificial Sequence
  chemically synthesized
gaatcctcccgcttcttaaa

SEQ ID NO: 14636 - DNA, 20 bp, Artificial Sequence
  chemically synthesized
ccgcttcttaaacagaattt

SEQ ID NO: 14637 - DNA, 20 bp, Artificial Sequence
  chemically synthesized
cgcttcttaaacagaatttg

SEQ ID NO: 14638 - DNA, 20 bp, Artificial Sequence
  chemically synthesized
gaggtctccctcccacaaac

SEQ ID NO: 14639 - DNA, 20 bp, Artificial Sequence
  chemically synthesized
ggtctccctcccacaaactg

SEQ ID NO: 14640 - DNA, 20 bp, Artificial Sequence
  chemically synthesized
gtctccctcccacaaactgg

SEQ ID NO: 14641 - DNA, 20 bp, Artificial Sequence
  chemically synthesized
tctccctcccacaaactgga

SEQ ID NO: 14642 - DNA, 20 bp, Artificial Sequence
  chemically synthesized
aaaccacattgacacaatcc

SEQ ID NO: 14643 - DNA, 20 bp, Artificial Sequence
  chemically synthesized
acattgacacaatcccagta

SEQ ID NO: 14644 - DNA, 20 bp, Artificial Sequence
  chemically synthesized
cccacatctctctcaatgtt

SEQ ID NO: 14645 - DNA, 20 bp, Artificial Sequence
  chemically synthesized
caaaacctccttttcttcct

SEQ ID NO: 14646 - DNA, 20 bp, Artificial Sequence
  chemically synthesized
aaacctccttttcttcctta

SEQ ID NO: 14647 - DNA, 20 bp, Artificial Sequence
  chemically synthesized
aacctccttttcttccttag

SEQ ID NO: 14648 - DNA, 20 bp, Artificial Sequence
  chemically synthesized
acctccttttcttccttaga

SEQ ID NO: 14649 - DNA, 20 bp, Artificial Sequence
  chemically synthesized
cctccttttcttccttagag

SEQ ID NO: 14650 - DNA, 20 bp, Artificial Sequence
  chemically synthesized
ttcttccttagaggggtccg

SEQ ID NO: 14651 - DNA, 20 bp, Artificial Sequence
  chemically synthesized
gaggggtccgaagctccgcc

SEQ ID NO: 14652 - DNA, 20 bp, Artificial Sequence
  chemically synthesized
ggtccgaagctccgccgagc

SEQ ID NO: 14653 - DNA, 20 bp, Artificial Sequence
  chemically synthesized
gtccgaagctccgccgagct

SEQ ID NO: 14654 - DNA, 20 bp, Artificial Sequence
  chemically synthesized
gaagctccgccgagctaggc

SEQ ID NO: 14655 - DNA, 20 bp, Artificial Sequence
  chemically synthesized
ctccgccgagctaggcaagc

SEQ ID NO: 14656 - DNA, 20 bp, Artificial Sequence
  chemically synthesized
aagccagtcattttctaaca

SEQ ID NO: 14657 - DNA, 20 bp, Artificial Sequence
  chemically synthesized
ccagtcattttctaacacag

SEQ ID NO: 14658 - DNA, 20 bp, Artificial Sequence
  chemically synthesized
agtagacttgaaactttact

SEQ ID NO: 14659 - DNA, 20 bp, Artificial Sequence
  chemically synthesized
gaaactttactaagacgaaa

SEQ ID NO: 14660 - DNA, 20 bp, Artificial Sequence
  chemically synthesized
aaactttactaagacgaaac

SEQ ID NO: 14661 - DNA, 20 bp, Artificial Sequence
  chemically synthesized
taagacgaaacaggaataaa

SEQ ID NO: 14662 - DNA, 20 bp, Artificial Sequence
  chemically synthesized
aggaataaacagccgcttgc

SEQ ID NO: 14663 - DNA, 20 bp, Artificial Sequence
  chemically synthesized
aataaacagccgcttgccgg

SEQ ID NO: 14664 - DNA, 20 bp, Artificial Sequence
  chemically synthesized
ataaacagccgcttgccggc

SEQ ID NO: 14665 - DNA, 20 bp, Artificial Sequence
  chemically synthesized
taaacagccgcttgccggca

SEQ ID NO: 14666 - DNA, 20 bp, Artificial Sequence
  chemically synthesized
gccgcttgccggcagggctg

SEQ ID NO: 14667 - DNA, 20 bp, Artificial Sequence
  chemically synthesized
ccgcttgccggcagggctgc

SEQ ID NO: 14668 - DNA, 20 bp, Artificial Sequence
  chemically synthesized
ttgccggcagggctgcggga

SEQ ID NO: 14669 - DNA, 20 bp, Artificial Sequence
  chemically synthesized
tgccggcagggctgcgggat

SEQ ID NO: 14670 - DNA, 20 bp, Artificial Sequence
  chemically synthesized
ggcagggctgcgggatgggt

SEQ ID NO: 14671 - DNA, 20 bp, Artificial Sequence
  chemically synthesized
cgggatgggtgagcgcgtgc

SEQ ID NO: 14672 - DNA, 20 bp, Artificial Sequence
  chemically synthesized
tgggtgagcgcgtgcaagcc

SEQ ID NO: 14673 - DNA, 20 bp, Artificial Sequence
  chemically synthesized
gggtgagcgcgtgcaagccc

SEQ ID NO: 14674 - DNA, 20 bp, Artificial Sequence
  chemically synthesized
ggtgagcgcgtgcaagcccg

SEQ ID NO: 14675 - DNA, 20 bp, Artificial Sequence
  chemically synthesized
ggccctcgcttaaaacaata

SEQ ID NO: 14676 - DNA, 20 bp, Artificial Sequence
  chemically synthesized
aaacaataaagcccccccac

SEQ ID NO: 14677 - DNA, 20 bp, Artificial Sequence
  chemically synthesized
aacaataaagcccccccacc

SEQ ID NO: 14678 - DNA, 20 bp, Artificial Sequence
  chemically synthesized
aataaagcccccccaccggg

SEQ ID NO: 14679 - DNA, 20 bp, Artificial Sequence
  chemically synthesized
ataaagcccccccaccgggt

SEQ ID NO: 14680 - DNA, 20 bp, Artificial Sequence
  chemically synthesized
agcccccccaccgggtgggt

SEQ ID NO: 14681 - DNA, 20 bp, Artificial Sequence
  chemically synthesized
ccaccgggtgggtgagttta

SEQ ID NO: 14682 - DNA, 20 bp, Artificial Sequence
  chemically synthesized
ccgggtgggtgagtttacgg

SEQ ID NO: 14683 - DNA, 20 bp, Artificial Sequence
  chemically synthesized
tttacggaagcgacaccctt

SEQ ID NO: 14684 - DNA, 20 bp, Artificial Sequence
  chemically synthesized
aagcgacaccctttagactg

SEQ ID NO: 14685 - DNA, 20 bp, Artificial Sequence
  chemically synthesized
gcgacaccctttagactgaa

SEQ ID NO: 14686 - DNA, 20 bp, Artificial Sequence
  chemically synthesized
cgacaccctttagactgaag

SEQ ID NO: 14687 - DNA, 20 bp, Artificial Sequence
  chemically synthesized
gacaccctttagactgaaga

SEQ ID NO: 14688 - DNA, 20 bp, Artificial Sequence
  chemically synthesized
acaccctttagactgaagag

SEQ ID NO: 14689 - DNA, 20 bp, Artificial Sequence
  chemically synthesized
caccctttagactgaagagg

SEQ ID NO: 14690 - DNA, 20 bp, Artificial Sequence
  chemically synthesized
tttagactgaagagggggat

SEQ ID NO: 14691 - DNA, 20 bp, Artificial Sequence
  chemically synthesized
agactgaagagggggatgag

SEQ ID NO: 14692 - DNA, 20 bp, Artificial Sequence
  chemically synthesized
tgaagagggggatgagaaga

SEQ ID NO: 14693 - DNA, 20 bp, Artificial Sequence
  chemically synthesized
gaagagggggatgagaagac

SEQ ID NO: 14694 - DNA, 20 bp, Artificial Sequence
  chemically synthesized
aagagggggatgagaagacg

SEQ ID NO: 14695 - DNA, 20 bp, Artificial Sequence
  chemically synthesized
agagggggatgagaagacgg

SEQ ID NO: 14696 - DNA, 20 bp, Artificial Sequence
  chemically synthesized
ggatgagaagacgggggttg

SEQ ID NO: 14697 - DNA, 20 bp, Artificial Sequence
  chemically synthesized
gggggttgtggaaccgctcc

SEQ ID NO: 14698 - DNA, 20 bp, Artificial Sequence
  chemically synthesized
ggggttgtggaaccgctccg

SEQ ID NO: 14699 - DNA, 20 bp, Artificial Sequence
  chemically synthesized
ggttgtggaaccgctccgag

SEQ ID NO: 14700 - DNA, 20 bp, Artificial Sequence
  chemically synthesized
ttgtggaaccgctccgagga

SEQ ID NO: 14701 - DNA, 20 bp, Artificial Sequence
  chemically synthesized
tgtggaaccgctccgaggag

SEQ ID NO: 14702 - DNA, 20 bp, Artificial Sequence
  chemically synthesized
gtggaaccgctccgaggaga

SEQ ID NO: 14703 - DNA, 20 bp, Artificial Sequence
  chemically synthesized
gaaccgctccgaggagaggg

SEQ ID NO: 14704 - DNA, 20 bp, Artificial Sequence
  chemically synthesized
aaccgctccgaggagaggga

SEQ ID NO: 14705 - DNA, 20 bp, Artificial Sequence
  chemically synthesized
ccgctccgaggagagggaag

SEQ ID NO: 14706 - DNA, 20 bp, Artificial Sequence
  chemically synthesized
cgctccgaggagagggaagg

SEQ ID NO: 14707 - DNA, 20 bp, Artificial Sequence
  chemically synthesized
gctccgaggagagggaagga

SEQ ID NO: 14708 - DNA, 20 bp, Artificial Sequence
  chemically synthesized
aaggagggctcctcgctctg

SEQ ID NO: 14709 - DNA, 20 bp, Artificial Sequence
  chemically synthesized
cactcacacatatccacctg

SEQ ID NO: 14710 - DNA, 20 bp, Artificial Sequence
  chemically synthesized
acacatatccacctgcagct

SEQ ID NO: 14711 - DNA, 20 bp, Artificial Sequence
  chemically synthesized
cacatatccacctgcagctc

SEQ ID NO: 14712 - DNA, 20 bp, Artificial Sequence
  chemically synthesized
acatatccacctgcagctca

SEQ ID NO: 14713 - DNA, 20 bp, Artificial Sequence
  chemically synthesized
acctgcagctcagggtctcg

SEQ ID NO: 14714 - DNA, 20 bp, Artificial Sequence
  chemically synthesized
cctgcagctcagggtctcgc

SEQ ID NO: 14715 - DNA, 20 bp, Artificial Sequence
  chemically synthesized
gctcagggtctcgcgggcca

SEQ ID NO: 14716 - DNA, 20 bp, Artificial Sequence
  chemically synthesized
tgcaccctccgcacctccct

SEQ ID NO: 14717 - DNA, 20 bp, Artificial Sequence
  chemically synthesized
tccgcacctcccttggacct

SEQ ID NO: 14718 - DNA, 20 bp, Artificial Sequence
  chemically synthesized
cctctccccccaactccttc

SEQ ID NO: 14719 - DNA, 20 bp, Artificial Sequence
  chemically synthesized
cccccaactccttccagatt

SEQ ID NO: 14720 - DNA, 20 bp, Artificial Sequence
  chemically synthesized
actccttccagatttggaat

SEQ ID NO: 14721 - DNA, 20 bp, Artificial Sequence
  chemically synthesized
gaatcggactgcgatctccc

SEQ ID NO: 14722 - DNA, 20 bp, Artificial Sequence
  chemically synthesized
tcggactgcgatctccccgg

SEQ ID NO: 14723 - DNA, 20 bp, Artificial Sequence
  chemically synthesized
gactgcgatctccccggcgg

SEQ ID NO: 14724 - DNA, 20 bp, Artificial Sequence
  chemically synthesized
tgcgatctccccggcggcgg

SEQ ID NO: 14725 - DNA, 20 bp, Artificial Sequence
  chemically synthesized
gatctccccggcggcggcgg

SEQ ID NO: 14726 - DNA, 20 bp, Artificial Sequence
  chemically synthesized
ctccccggcggcggcggcgg

SEQ ID NO: 14727 - DNA, 20 bp, Artificial Sequence
  chemically synthesized
ggcggcggcggcggcggctg

SEQ ID NO: 14728 - DNA, 20 bp, Artificial Sequence
  chemically synthesized
cggcggcggcggcggctgca

SEQ ID NO: 14729 - DNA, 20 bp, Artificial Sequence
  chemically synthesized
cggcggcggcggctgcagag

SEQ ID NO: 14730 - DNA, 20 bp, Artificial Sequence
  chemically synthesized
cggcggctgcagagtggtgc

SEQ ID NO: 14731 - DNA, 20 bp, Artificial Sequence
  chemically synthesized
cggctgcagagtggtgctgg

SEQ ID NO: 14732 - DNA, 20 bp, Artificial Sequence
  chemically synthesized
ggctgcagagtggtgctggc

SEQ ID NO: 14733 - DNA, 20 bp, Artificial Sequence
  chemically synthesized
tgcagagtggtgctggcagg

SEQ ID NO: 14734 - DNA, 20 bp, Artificial Sequence
  chemically synthesized
gcagagtggtgctggcaggc

SEQ ID NO: 14735 - DNA, 20 bp, Artificial Sequence
  chemically synthesized
cagagtggtgctggcaggca

SEQ ID NO: 14736 - DNA, 20 bp, Artificial Sequence
  chemically synthesized
gagtggtgctggcaggcagg

SEQ ID NO: 14737 - DNA, 20 bp, Artificial Sequence
  chemically synthesized
agtggtgctggcaggcaggg

SEQ ID NO: 14738 - DNA, 20 bp, Artificial Sequence
  chemically synthesized
gtgctggcaggcagggaggc

SEQ ID NO: 14739 - DNA, 20 bp, Artificial Sequence
  chemically synthesized
tgctggcaggcagggaggct

SEQ ID NO: 14740 - DNA, 20 bp, Artificial Sequence
  chemically synthesized
ctggcaggcagggaggctgg

SEQ ID NO: 14741 - DNA, 20 bp, Artificial Sequence
  chemically synthesized
tggcaggcagggaggctggg

SEQ ID NO: 14742 - DNA, 20 bp, Artificial Sequence
  chemically synthesized
caggcagggaggctgggagg

SEQ ID NO: 14743 - DNA, 20 bp, Artificial Sequence
  chemically synthesized
aggcagggaggctgggaggc

SEQ ID NO: 14744 - DNA, 20 bp, Artificial Sequence
  chemically synthesized
gcagggaggctgggaggcgg

SEQ ID NO: 14745 - DNA, 20 bp, Artificial Sequence
  chemically synthesized
cagggaggctgggaggcggg

SEQ ID NO: 14746 - DNA, 20 bp, Artificial Sequence
  chemically synthesized
ggctgggaggcgggaggcgc

SEQ ID NO: 14747 - DNA, 20 bp, Artificial Sequence
  chemically synthesized
gctgggaggcgggaggcgcc

SEQ ID NO: 14748 - DNA, 20 bp, Artificial Sequence
  chemically synthesized
ctgggaggcgggaggcgcca

SEQ ID NO: 14749 - DNA, 20 bp, Artificial Sequence
  chemically synthesized
tgggaggcgggaggcgccag

SEQ ID NO: 14750 - DNA, 20 bp, Artificial Sequence
  chemically synthesized
ggaggcgccaggggacttta

SEQ ID NO: 14751 - DNA, 20 bp, Artificial Sequence
  chemically synthesized
gaggcgccaggggactttac

SEQ ID NO: 14752 - DNA, 20 bp, Artificial Sequence
  chemically synthesized
ctgaataaactttccaatcg

SEQ ID NO: 14753 - DNA, 20 bp, Artificial Sequence
  chemically synthesized
tgaataaactttccaatcgc

SEQ ID NO: 14754 - DNA, 20 bp, Artificial Sequence
  chemically synthesized
gaataaactttccaatcgca

SEQ ID NO: 14755 - DNA, 20 bp, Artificial Sequence
  chemically synthesized
aataaactttccaatcgcag

SEQ ID NO: 14756 - DNA, 20 bp, Artificial Sequence
  chemically synthesized
ataaactttccaatcgcagg

SEQ ID NO: 14757 - DNA, 20 bp, Artificial Sequence
  chemically synthesized
tacattttacgtaaaactga

SEQ ID NO: 14758 - DNA, 20 bp, Artificial Sequence
  chemically synthesized
aaactgaaagtatcccacgc

SEQ ID NO: 14759 - DNA, 20 bp, Artificial Sequence
  chemically synthesized
actgaaagtatcccacgcca

SEQ ID NO: 14760 - DNA, 20 bp, Artificial Sequence
  chemically synthesized
aagtatcccacgccagagtg

SEQ ID NO: 14761 - DNA, 20 bp, Artificial Sequence
  chemically synthesized
gagtgaagcccgctttttga

SEQ ID NO: 14762 - DNA, 20 bp, Artificial Sequence
  chemically synthesized
tgaagcccgctttttgacag

SEQ ID NO: 14763 - DNA, 20 bp, Artificial Sequence
  chemically synthesized
agcccgctttttgacagcgg

SEQ ID NO: 14764 - DNA, 20 bp, Artificial Sequence
  chemically synthesized
gtgtgtgcgtgtgtgcatta

SEQ ID NO: 14765 - DNA, 20 bp, Artificial Sequence
  chemically synthesized
gtgtgcgtgtgtgcattaaa

SEQ ID NO: 14766 - DNA, 20 bp, Artificial Sequence
  chemically synthesized
gcgtgtgtgcattaaagaga

SEQ ID NO: 14767 - DNA, 20 bp, Artificial Sequence
  chemically synthesized
cgtgtgtgcattaaagagac

SEQ ID NO: 14768 - DNA, 20 bp, Artificial Sequence
  chemically synthesized
gtgtgtgcattaaagagaca

SEQ ID NO: 14769 - DNA, 20 bp, Artificial Sequence
  chemically synthesized
agacagggttttatttccaa

SEQ ID NO: 14770 - DNA, 20 bp, Artificial Sequence
  chemically synthesized
gacagggttttatttccaac

SEQ ID NO: 14771 - DNA, 20 bp, Artificial Sequence
  chemically synthesized
aacaggtcttccctaatttc

SEQ ID NO: 14772 - DNA, 20 bp, Artificial Sequence
  chemically synthesized
acaggtcttccctaatttcc

SEQ ID NO: 14773 - DNA, 20 bp, Artificial Sequence
  chemically synthesized
caggtcttccctaatttcca

SEQ ID NO: 14774 - DNA, 20 bp, Artificial Sequence
  chemically synthesized
taatttccagggaacgtctg

SEQ ID NO: 14775 - DNA, 20 bp, Artificial Sequence
  chemically synthesized
ttccagggaacgtctgcaga

SEQ ID NO: 14776 - DNA, 20 bp, Artificial Sequence
  chemically synthesized
tccagggaacgtctgcagaa

SEQ ID NO: 14777 - DNA, 20 bp, Artificial Sequence
  chemically synthesized
gggaacgtctgcagaaaggc

SEQ ID NO: 14778 - DNA, 20 bp, Artificial Sequence
  chemically synthesized
gaacgtctgcagaaaggcga

SEQ ID NO: 14779 - DNA, 20 bp, Artificial Sequence
  chemically synthesized
aacgtctgcagaaaggcgag

SEQ ID NO: 14780 - DNA, 20 bp, Artificial Sequence
  chemically synthesized
acgtctgcagaaaggcgaga

SEQ ID NO: 14781 - DNA, 20 bp, Artificial Sequence
  chemically synthesized
cgtctgcagaaaggcgagag

SEQ ID NO: 14782 - DNA, 20 bp, Artificial Sequence
  chemically synthesized
gtctgcagaaaggcgagagg

SEQ ID NO: 14783 - DNA, 20 bp, Artificial Sequence
  chemically synthesized
gaaaggcgagagggggctgc

SEQ ID NO: 14784 - DNA, 20 bp, Artificial Sequence
  chemically synthesized
gagagggggctgctggctcc

SEQ ID NO: 14785 - DNA, 20 bp, Artificial Sequence
  chemically synthesized
agagggggctgctggctcct

SEQ ID NO: 14786 - DNA, 20 bp, Artificial Sequence
  chemically synthesized
tggctcctgggtgtgcgcct

SEQ ID NO: 14787 - DNA, 20 bp, Artificial Sequence
  chemically synthesized
tcctgggtgtgcgccttggc

SEQ ID NO: 14788 - DNA, 20 bp, Artificial Sequence
  chemically synthesized
tgggtgtgcgccttggccgg

SEQ ID NO: 14789 - DNA, 20 bp, Artificial Sequence
  chemically synthesized
gcgccttggccggcggcgcc

SEQ ID NO: 14790 - DNA, 20 bp, Artificial Sequence
  chemically synthesized
cgccttggccggcggcgcct

SEQ ID NO: 14791 - DNA, 20 bp, Artificial Sequence
  chemically synthesized
gccttggccggcggcgcctg

SEQ ID NO: 14792 - DNA, 20 bp, Artificial Sequence
  chemically synthesized
cttggccggcggcgcctggg

SEQ ID NO: 14793 - DNA, 20 bp, Artificial Sequence
  chemically synthesized
ccggcggcgcctggggagcg

SEQ ID NO: 14794 - DNA, 20 bp, Artificial Sequence
  chemically synthesized
gcggcgcctggggagcgcgg

SEQ ID NO: 14795 - DNA, 20 bp, Artificial Sequence
  chemically synthesized
ggggagcgcggcggtgaccc

SEQ ID NO: 14796 - DNA, 20 bp, Artificial Sequence
  chemically synthesized
gggagcgcggcggtgacccg

SEQ ID NO: 14797 - DNA, 20 bp, Artificial Sequence
  chemically synthesized
agcgcggcggtgacccgagg

SEQ ID NO: 14798 - DNA, 20 bp, Artificial Sequence
  chemically synthesized
aggcggtcatctcaccaccg

SEQ ID NO: 14799 - DNA, 20 bp, Artificial Sequence
  chemically synthesized
ggtctccccgctgctcctgc

SEQ ID NO: 14800 - DNA, 20 bp, Artificial Sequence
  chemically synthesized
attcccattttctctttccc

SEQ ID NO: 14801 - DNA, 20 bp, Artificial Sequence
  chemically synthesized
ttcccattttctctttccct

SEQ ID NO: 14802 - DNA, 20 bp, Artificial Sequence
  chemically synthesized
ttttctctttccctgggtaa

SEQ ID NO: 14803 - DNA, 20 bp, Artificial Sequence
  chemically synthesized
tctttccctgggtaacagca

SEQ ID NO: 14804 - DNA, 20 bp, Artificial Sequence
  chemically synthesized
ctttccctgggtaacagcac

SEQ ID NO: 14805 - DNA, 20 bp, Artificial Sequence
  chemically synthesized
cctgggtaacagcacaggaa

SEQ ID NO: 14806 - DNA, 20 bp, Artificial Sequence
  chemically synthesized
aacagttgtgctctgcccgt

SEQ ID NO: 14807 - DNA, 20 bp, Artificial Sequence
  chemically synthesized
cccatccctctgtgcttttg

SEQ ID NO: 14808 - DNA, 20 bp, Artificial Sequence
  chemically synthesized
ctgtgcttttgcagttgctc

SEQ ID NO: 14809 - DNA, 20 bp, Artificial Sequence
  chemically synthesized
gtgcttttgcagttgctctg

SEQ ID NO: 14810 - DNA, 20 bp, Artificial Sequence
  chemically synthesized
cttttgcagttgctctggag

SEQ ID NO: 14811 - DNA, 20 bp, Artificial Sequence
  chemically synthesized
ttttgcagttgctctggagt

SEQ ID NO: 14812 - DNA, 20 bp, Artificial Sequence
  chemically synthesized
ttgcagttgctctggagtgg

SEQ ID NO: 14813 - DNA, 20 bp, Artificial Sequence
  chemically synthesized
tgcagttgctctggagtggg

SEQ ID NO: 14814 - DNA, 20 bp, Artificial Sequence
  chemically synthesized
gcagttgctctggagtggga

SEQ ID NO: 14815 - DNA, 20 bp, Artificial Sequence
  chemically synthesized
cagttgctctggagtgggag

SEQ ID NO: 14816 - DNA, 20 bp, Artificial Sequence
  chemically synthesized
agttgctctggagtgggagg

SEQ ID NO: 14817 - DNA, 20 bp, Artificial Sequence
  chemically synthesized
gggagggggtgtgtccctcc

SEQ ID NO: 14818 - DNA, 20 bp, Artificial Sequence
  chemically synthesized
ggagggggtgtgtccctccc

SEQ ID NO: 14819 - DNA, 20 bp, Artificial Sequence
  chemically synthesized
gagggggtgtgtccctccca

SEQ ID NO: 14820 - DNA, 20 bp, Artificial Sequence
  chemically synthesized
gtgtgtccctcccagggacc

SEQ ID NO: 14821 - DNA, 20 bp, Artificial Sequence
  chemically synthesized
tccctcccagggacccggct

SEQ ID NO: 14822 - DNA, 20 bp, Artificial Sequence
  chemically synthesized
ccctcccagggacccggctc

SEQ ID NO: 14823 - DNA, 20 bp, Artificial Sequence
  chemically synthesized
cctcccagggacccggctcg

SEQ ID NO: 14824 - DNA, 20 bp, Artificial Sequence
  chemically synthesized
cccggctcggggacctcccg

SEQ ID NO: 14825 - DNA, 20 bp, Artificial Sequence
  chemically synthesized
gggacctcccgcggcgccgt

SEQ ID NO: 14826 - DNA, 20 bp, Artificial Sequence
  chemically synthesized
cggcgccgtgagcacattcc

SEQ ID NO: 14827 - DNA, 20 bp, Artificial Sequence
  chemically synthesized
ggcgccgtgagcacattccc

SEQ ID NO: 14828 - DNA, 20 bp, Artificial Sequence
  chemically synthesized
gcgccgtgagcacattccca

SEQ ID NO: 14829 - DNA, 20 bp, Artificial Sequence
  chemically synthesized
gtgagcacattcccagggac

SEQ ID NO: 14830 - DNA, 20 bp, Artificial Sequence
  chemically synthesized
tgagcacattcccagggact

SEQ ID NO: 14831 - DNA, 20 bp, Artificial Sequence
  chemically synthesized
ttcccagggactgggactcc

SEQ ID NO: 14832 - DNA, 20 bp, Artificial Sequence
  chemically synthesized
tcccagggactgggactccc

SEQ ID NO: 14833 - DNA, 20 bp, Artificial Sequence
  chemically synthesized
gactgcccgcgctttgtcct

SEQ ID NO: 14834 - DNA, 20 bp, Artificial Sequence
  chemically synthesized
gcgctttgtcctcggcctct

SEQ ID NO: 14835 - DNA, 20 bp, Artificial Sequence
  chemically synthesized
gctttgtcctcggcctctca

SEQ ID NO: 14836 - DNA, 20 bp, Artificial Sequence
  chemically synthesized
tttgtcctcggcctctcaga

SEQ ID NO: 14837 - DNA, 20 bp, Artificial Sequence
  chemically synthesized
ttgtcctcggcctctcagag

SEQ ID NO: 14838 - DNA, 20 bp, Artificial Sequence
  chemically synthesized
tcctcggcctctcagagagg

SEQ ID NO: 14839 - DNA, 20 bp, Artificial Sequence
  chemically synthesized
tctcagagaggtggacgcct

SEQ ID NO: 14840 - DNA, 20 bp, Artificial Sequence
  chemically synthesized
gcctcggtgcctctcttgcc

SEQ ID NO: 14841 - DNA, 20 bp, Artificial Sequence
  chemically synthesized
cctcggtgcctctcttgccc

SEQ ID NO: 14842 - DNA, 20 bp, Artificial Sequence
  chemically synthesized
gcctctcttgcccaggcccc

SEQ ID NO: 14843 - DNA, 20 bp, Artificial Sequence
  chemically synthesized
aggcccccggcgctcccctc

SEQ ID NO: 14844 - DNA, 20 bp, Artificial Sequence
  chemically synthesized
ggcccccggcgctcccctcc

SEQ ID NO: 14845 - DNA, 20 bp, Artificial Sequence
  chemically synthesized
gcccccggcgctcccctccg

SEQ ID NO: 14846 - DNA, 20 bp, Artificial Sequence
  chemically synthesized
cccccggcgctcccctccgg

SEQ ID NO: 14847 - DNA, 20 bp, Artificial Sequence
  chemically synthesized
cggcgctcccctccgggggc

SEQ ID NO: 14848 - DNA, 20 bp, Artificial Sequence
  chemically synthesized
cccctccgggggccagactc

SEQ ID NO: 14849 - DNA, 20 bp, Artificial Sequence
  chemically synthesized
gctcctcgttctttattcct

SEQ ID NO: 14850 - DNA, 20 bp, Artificial Sequence
  chemically synthesized
ctcctcgttctttattcctc

SEQ ID NO: 14851 - DNA, 20 bp, Artificial Sequence
  chemically synthesized
ggctctctttctgcgaccct

SEQ ID NO: 14852 - DNA, 20 bp, Artificial Sequence
  chemically synthesized
gctctctttctgcgaccctt

SEQ ID NO: 14853 - DNA, 20 bp, Artificial Sequence
  chemically synthesized
tctctttctgcgacccttag

SEQ ID NO: 14854 - DNA, 20 bp, Artificial Sequence
  chemically synthesized
tttctgcgacccttaggagc

SEQ ID NO: 14855 - DNA, 20 bp, Artificial Sequence
  chemically synthesized
ttctgcgacccttaggagcc

SEQ ID NO: 14856 - DNA, 20 bp, Artificial Sequence
  chemically synthesized
tctgcgacccttaggagccg

SEQ ID NO: 14857 - DNA, 20 bp, Artificial Sequence
  chemically synthesized
acccttaggagccggggact

SEQ ID NO: 14858 - DNA, 20 bp, Artificial Sequence
  chemically synthesized
agccggggactcggcgcttt

SEQ ID NO: 14859 - DNA, 20 bp, Artificial Sequence
  chemically synthesized
tcggcgctttcagttgcatt

SEQ ID NO: 14860 - DNA, 20 bp, Artificial Sequence
  chemically synthesized
ctttcagttgcattcagacc

SEQ ID NO: 14861 - DNA, 20 bp, Artificial Sequence
  chemically synthesized
tgcattcagacccagtcgct

SEQ ID NO: 14862 - DNA, 20 bp, Artificial Sequence
  chemically synthesized
attcagacccagtcgcttgg

SEQ ID NO: 14863 - DNA, 20 bp, Artificial Sequence
  chemically synthesized
ttcagacccagtcgcttggc

SEQ ID NO: 14864 - DNA, 20 bp, Artificial Sequence
  chemically synthesized
tcagacccagtcgcttggcg

SEQ ID NO: 14865 - DNA, 20 bp, Artificial Sequence
  chemically synthesized
cagtcgcttggcggggcgct

SEQ ID NO: 14866 - DNA, 20 bp, Artificial Sequence
  chemically synthesized
tggcggggcgctcagattcc

SEQ ID NO: 14867 - DNA, 20 bp, Artificial Sequence
  chemically synthesized
gcgctcagattcccggtccc

SEQ ID NO: 14868 - DNA, 20 bp, Artificial Sequence
  chemically synthesized
cagattcccggtccctggct

SEQ ID NO: 14869 - DNA, 20 bp, Artificial Sequence
  chemically synthesized
cccggtccctggctcggcct

SEQ ID NO: 14870 - DNA, 20 bp, Artificial Sequence
  chemically synthesized
ccggtccctggctcggcctt

SEQ ID NO: 14871 - DNA, 20 bp, Artificial Sequence
  chemically synthesized
cggtccctggctcggccttg

SEQ ID NO: 14872 - DNA, 20 bp, Artificial Sequence
  chemically synthesized
ggtccctggctcggccttgg

SEQ ID NO: 14873 - DNA, 20 bp, Artificial Sequence
  chemically synthesized
ctcggccttgggggcgccct

SEQ ID NO: 14874 - DNA, 20 bp, Artificial Sequence
  chemically synthesized
tcggccttgggggcgccctc

SEQ ID NO: 14875 - DNA, 20 bp, Artificial Sequence
  chemically synthesized
ttgggggcgccctcgggccc

SEQ ID NO: 14876 - DNA, 20 bp, Artificial Sequence
  chemically synthesized
ctgcgccgcctgcctctccc

SEQ ID NO: 14877 - DNA, 20 bp, Artificial Sequence
  chemically synthesized
tctccccggtcccctctttc

SEQ ID NO: 14878 - DNA, 20 bp, Artificial Sequence
  chemically synthesized
ctccccggtcccctctttcc

SEQ ID NO: 14879 - DNA, 20 bp, Artificial Sequence
  chemically synthesized
tcccctctttccaggccgcg

SEQ ID NO: 14880 - DNA, 20 bp, Artificial Sequence
  chemically synthesized
cccctctttccaggccgcgc

SEQ ID NO: 14881 - DNA, 20 bp, Artificial Sequence
  chemically synthesized
ttccaggccgcgcgggctcc

SEQ ID NO: 14882 - DNA, 20 bp, Artificial Sequence
  chemically synthesized
ccaggccgcgcgggctcctg

SEQ ID NO: 14883 - DNA, 20 bp, Artificial Sequence
  chemically synthesized
cgcgcgggctcctggagact

SEQ ID NO: 14884 - DNA, 20 bp, Artificial Sequence
  chemically synthesized
gcgcgggctcctggagactt

SEQ ID NO: 14885 - DNA, 20 bp, Artificial Sequence
  chemically synthesized
agacttgggcgctgcccttc

SEQ ID NO: 14886 - DNA, 20 bp, Artificial Sequence
  chemically synthesized
gcgctgcccttccggacccg

SEQ ID NO: 14887 - DNA, 20 bp, Artificial Sequence
  chemically synthesized
gacccgcagccctccaaact

SEQ ID NO: 14888 - DNA, 20 bp, Artificial Sequence
  chemically synthesized
acccgcagccctccaaactt

SEQ ID NO: 14889 - DNA, 20 bp, Artificial Sequence
  chemically synthesized
gcagccctccaaacttaggc

SEQ ID NO: 14890 - DNA, 20 bp, Artificial Sequence
  chemically synthesized
ccacctcccctcgcccgctg

SEQ ID NO: 14891 - DNA, 20 bp, Artificial Sequence
  chemically synthesized
acctcccctcgcccgctgcg

SEQ ID NO: 14892 - DNA, 20 bp, Artificial Sequence
  chemically synthesized
cccgctgcggagctgtaact

SEQ ID NO: 14893 - DNA, 20 bp, Artificial Sequence
  chemically synthesized
cgctgcggagctgtaacttg

SEQ ID NO: 14894 - DNA, 20 bp, Artificial Sequence
  chemically synthesized
gctgcggagctgtaacttgg

SEQ ID NO: 14895 - DNA, 20 bp, Artificial Sequence
  chemically synthesized
ggagctgtaacttggaggct

SEQ ID NO: 14896 - DNA, 20 bp, Artificial Sequence
  chemically synthesized
ggaggctcagctctcaactt

SEQ ID NO: 14897 - DNA, 20 bp, Artificial Sequence
  chemically synthesized
gaggctcagctctcaacttc

SEQ ID NO: 14898 - DNA, 20 bp, Artificial Sequence
  chemically synthesized
tttctttgctgtcctctcct

SEQ ID NO: 14899 - DNA, 20 bp, Artificial Sequence
  chemically synthesized
ttctttgctgtcctctcctc

SEQ ID NO: 14900 - DNA, 20 bp, Artificial Sequence
  chemically synthesized
tgctgtcctctcctcgggca

SEQ ID NO: 14901 - DNA, 20 bp, Artificial Sequence
  chemically synthesized
ctcctcgggcaaagtttccc

SEQ ID NO: 14902 - DNA, 20 bp, Artificial Sequence
  chemically synthesized
cgggcaaagtttcccgagcg

SEQ ID NO: 14903 - DNA, 20 bp, Artificial Sequence
  chemically synthesized
aagtttcccgagcgcagccg

SEQ ID NO: 14904 - DNA, 20 bp, Artificial Sequence
  chemically synthesized
agtttcccgagcgcagccgc

SEQ ID NO: 14905 - DNA, 20 bp, Artificial Sequence
  chemically synthesized
cccgagcgcagccgcgggct

SEQ ID NO: 14906 - DNA, 20 bp, Artificial Sequence
  chemically synthesized
ccgagcgcagccgcgggctc

SEQ ID NO: 14907 - DNA, 20 bp, Artificial Sequence
  chemically synthesized
cgagcgcagccgcgggctcg

SEQ ID NO: 14908 - DNA, 20 bp, Artificial Sequence
  chemically synthesized
cgggctcggggcttttactt

SEQ ID NO: 14909 - DNA, 20 bp, Artificial Sequence
  chemically synthesized
ggggcttttacttcggcccc

SEQ ID NO: 14910 - DNA, 20 bp, Artificial Sequence
  chemically synthesized
cggcccctggcgtccacacg

SEQ ID NO: 14911 - DNA, 20 bp, Artificial Sequence
  chemically synthesized
ggcccctggcgtccacacgc

SEQ ID NO: 14912 - DNA, 20 bp, Artificial Sequence
  chemically synthesized
gcccctggcgtccacacgcg

SEQ ID NO: 14913 - DNA, 20 bp, Artificial Sequence
  chemically synthesized
ccctggcgtccacacgcggg

SEQ ID NO: 14914 - DNA, 20 bp, Artificial Sequence
  chemically synthesized
ggcgtccacacgcggggagc

SEQ ID NO: 14915 - DNA, 20 bp, Artificial Sequence
  chemically synthesized
ccacacgcggggagcgagcg

SEQ ID NO: 14916 - DNA, 20 bp, Artificial Sequence
  chemically synthesized
cacgcggggagcgagcgcgg

SEQ ID NO: 14917 - DNA, 20 bp, Artificial Sequence
  chemically synthesized
gcggggagcgagcgcggcgg

SEQ ID NO: 14918 - DNA, 20 bp, Artificial Sequence
  chemically synthesized
gggagcgagcgcggcggcgg

SEQ ID NO: 14919 - DNA, 20 bp, Artificial Sequence
  chemically synthesized
ggagcgagcgcggcggcggc

SEQ ID NO: 14920 - DNA, 20 bp, Artificial Sequence
  chemically synthesized
gagcgagcgcggcggcggcg

SEQ ID NO: 14921 - DNA, 20 bp, Artificial Sequence
  chemically synthesized
gcgagcgcggcggcggcggg

SEQ ID NO: 14922 - DNA, 20 bp, Artificial Sequence
  chemically synthesized
cgagcgcggcggcggcgggg

SEQ ID NO: 14923 - DNA, 20 bp, Artificial Sequence
  chemically synthesized
gagcgcggcggcggcgggga

SEQ ID NO: 14924 - DNA, 20 bp, Artificial Sequence
  chemically synthesized
agcgcggcggcggcggggag

SEQ ID NO: 14925 - DNA, 20 bp, Artificial Sequence
  chemically synthesized
gcggcggcggcggggagggg

SEQ ID NO: 14926 - DNA, 20 bp, Artificial Sequence
  chemically synthesized
gcggcggcggggaggggaag

SEQ ID NO: 14927 - DNA, 20 bp, Artificial Sequence
  chemically synthesized
cggcggcggggaggggaagt

SEQ ID NO: 14928 - DNA, 20 bp, Artificial Sequence
  chemically synthesized
aggggaagtgggtgtgcgta

SEQ ID NO: 14929 - DNA, 20 bp, Artificial Sequence
  chemically synthesized
gggaagtgggtgtgcgtacg

SEQ ID NO: 14930 - DNA, 20 bp, Artificial Sequence
  chemically synthesized
ggaagtgggtgtgcgtacgg

SEQ ID NO: 14931 - DNA, 20 bp, Artificial Sequence
  chemically synthesized
aagtgggtgtgcgtacggag

SEQ ID NO: 14932 - DNA, 20 bp, Artificial Sequence
  chemically synthesized
agtgggtgtgcgtacggagg

SEQ ID NO: 14933 - DNA, 20 bp, Artificial Sequence
  chemically synthesized
gtgggtgtgcgtacggagga

SEQ ID NO: 14934 - DNA, 20 bp, Artificial Sequence
  chemically synthesized
tgcgtacggaggagggtgtc

SEQ ID NO: 14935 - DNA, 20 bp, Artificial Sequence
  chemically synthesized
gcgtacggaggagggtgtcc

SEQ ID NO: 14936 - DNA, 20 bp, Artificial Sequence
  chemically synthesized
gtacggaggagggtgtccgg

SEQ ID NO: 14937 - DNA, 20 bp, Artificial Sequence
  chemically synthesized
tgtccgggagcaactctacc

SEQ ID NO: 14938 - DNA, 20 bp, Artificial Sequence
  chemically synthesized
tccctccgcccgcgcttccc

SEQ ID NO: 14939 - DNA, 20 bp, Artificial Sequence
  chemically synthesized
ccgcccgcgcttccccagcc

SEQ ID NO: 14940 - DNA, 20 bp, Artificial Sequence
  chemically synthesized
cgcccgcgcttccccagccc

SEQ ID NO: 14941 - DNA, 20 bp, Artificial Sequence
  chemically synthesized
gcccgcgcttccccagcccg

SEQ ID NO: 14942 - DNA, 20 bp, Artificial Sequence
  chemically synthesized
gcttccccagcccggggctg

SEQ ID NO: 14943 - DNA, 20 bp, Artificial Sequence
  chemically synthesized
agcccggggctgcagcctcc

SEQ ID NO: 14944 - DNA, 20 bp, Artificial Sequence
  chemically synthesized
ttttgaataatctttcattt

SEQ ID NO: 14945 - DNA, 20 bp, Artificial Sequence
  chemically synthesized
ttgaataatctttcatttta

SEQ ID NO: 14946 - DNA, 20 bp, Artificial Sequence
  chemically synthesized
cattttagagtccgcgtgtg

SEQ ID NO: 14947 - DNA, 20 bp, Artificial Sequence
  chemically synthesized
attttagagtccgcgtgtgt

SEQ ID NO: 14948 - DNA, 20 bp, Artificial Sequence
  chemically synthesized
ttttagagtccgcgtgtgtg

SEQ ID NO: 14949 - DNA, 20 bp, Artificial Sequence
  chemically synthesized
tttagagtccgcgtgtgtgg

SEQ ID NO: 14950 - DNA, 20 bp, Artificial Sequence
  chemically synthesized
ttagagtccgcgtgtgtggg

SEQ ID NO: 14951 - DNA, 20 bp, Artificial Sequence
  chemically synthesized
tagagtccgcgtgtgtgggg

SEQ ID NO: 14952 - DNA, 20 bp, Artificial Sequence
  chemically synthesized
gagtccgcgtgtgtgggggg

SEQ ID NO: 14953 - DNA, 20 bp, Artificial Sequence
  chemically synthesized
tccgcgtgtgtgggggggag

SEQ ID NO: 14954 - DNA, 20 bp, Artificial Sequence
  chemically synthesized
ccgcgtgtgtgggggggagc

SEQ ID NO: 14955 - DNA, 20 bp, Artificial Sequence
  chemically synthesized
cgcgtgtgtgggggggagca

SEQ ID NO: 14956 - DNA, 20 bp, Artificial Sequence
  chemically synthesized
gccacccctttcttctctcc

SEQ ID NO: 14957 - DNA, 20 bp, Artificial Sequence
  chemically synthesized
tcccggccacgccaccgccg

SEQ ID NO: 14958 - DNA, 20 bp, Artificial Sequence
  chemically synthesized
caccgccgcggcgctcgctg

SEQ ID NO: 14959 - DNA, 20 bp, Artificial Sequence
  chemically synthesized
gcggcgctcgctgcggccac

SEQ ID NO: 14960 - DNA, 20 bp, Artificial Sequence
  chemically synthesized
cgctcgctgcggccactggt

SEQ ID NO: 14961 - DNA, 20 bp, Artificial Sequence
  chemically synthesized
tgcggccactggtgagcccg

SEQ ID NO: 14962 - DNA, 20 bp, Artificial Sequence
  chemically synthesized
cactggtgagcccgcggccc

SEQ ID NO: 14963 - DNA, 20 bp, Artificial Sequence
  chemically synthesized
gccccagcgccccctcccct

SEQ ID NO: 14964 - DNA, 20 bp, Artificial Sequence
  chemically synthesized
ccctcggcccgcccctcccc

SEQ ID NO: 14965 - DNA, 20 bp, Artificial Sequence
  chemically synthesized
cctcggcccgcccctccccc

SEQ ID NO: 14966 - DNA, 20 bp, Artificial Sequence
  chemically synthesized
ctcggcccgcccctcccccg

SEQ ID NO: 14967 - DNA, 20 bp, Artificial Sequence
  chemically synthesized
tcggcccgcccctcccccgg

SEQ ID NO: 14968 - DNA, 20 bp, Artificial Sequence
  chemically synthesized
cctcccccgggggccgcgtc

SEQ ID NO: 14969 - DNA, 20 bp, Artificial Sequence
  chemically synthesized
ggggccgcgtctggcgtccg

SEQ ID NO: 14970 - DNA, 20 bp, Artificial Sequence
  chemically synthesized
ggccgcgtctggcgtccgcg

SEQ ID NO: 14971 - DNA, 20 bp, Artificial Sequence
  chemically synthesized
gcacctccccctccccgcac

SEQ ID NO: 14972 - DNA, 20 bp, Artificial Sequence
  chemically synthesized
cccctccccgcactggccat

SEQ ID NO: 14973 - DNA, 20 bp, Artificial Sequence
  chemically synthesized
cactggccattggcttgtcc

SEQ ID NO: 14974 - DNA, 20 bp, Artificial Sequence
  chemically synthesized
cctggtctctttttcatgtc

SEQ ID NO: 14975 - DNA, 20 bp, Artificial Sequence
  chemically synthesized
agcccctgatgtgtgtccat

SEQ ID NO: 14976 - DNA, 20 bp, Artificial Sequence
  chemically synthesized
tgatgtgtgtccattggtgt

SEQ ID NO: 14977 - DNA, 20 bp, Artificial Sequence
  chemically synthesized
tttgtgtgtctctgtccatc

SEQ ID NO: 14978 - DNA, 20 bp, Artificial Sequence
  chemically synthesized
catccagactcctgacgttc

SEQ ID NO: 14979 - DNA, 20 bp, Artificial Sequence
  chemically synthesized
actcctgacgttcaagttcg

SEQ ID NO: 14980 - DNA, 20 bp, Artificial Sequence
  chemically synthesized
ctcctgacgttcaagttcgc

SEQ ID NO: 14981 - DNA, 20 bp, Artificial Sequence
  chemically synthesized
tcctgacgttcaagttcgca

SEQ ID NO: 14982 - DNA, 20 bp, Artificial Sequence
  chemically synthesized
cacgtccgcacttgaacttg

SEQ ID NO: 14983 - DNA, 20 bp, Artificial Sequence
  chemically synthesized
ccgcacttgaacttgcagct

SEQ ID NO: 14984 - DNA, 20 bp, Artificial Sequence
  chemically synthesized
cgcacttgaacttgcagctc

SEQ ID NO: 14985 - DNA, 20 bp, Artificial Sequence
  chemically synthesized
gcacttgaacttgcagctca

SEQ ID NO: 14986 - DNA, 20 bp, Artificial Sequence
  chemically synthesized
cacttgaacttgcagctcag

SEQ ID NO: 14987 - DNA, 20 bp, Artificial Sequence
  chemically synthesized
acttgaacttgcagctcagg

SEQ ID NO: 14988 - DNA, 20 bp, Artificial Sequence
  chemically synthesized
cttgaacttgcagctcaggg

SEQ ID NO: 14989 - DNA, 20 bp, Artificial Sequence
  chemically synthesized
ttttttttttgcttaaaaaa

SEQ ID NO: 14990 - DNA, 20 bp, Artificial Sequence
  chemically synthesized
tgcttaaaaaaaagccatga

SEQ ID NO: 14991 - DNA, 20 bp, Artificial Sequence
  chemically synthesized
gtattatttctaatttattt

SEQ ID NO: 14992 - DNA, 20 bp, Artificial Sequence
  chemically synthesized
taatttattttggatgtcaa

SEQ ID NO: 14993 - DNA, 20 bp, Artificial Sequence
  chemically synthesized
aatttattttggatgtcaaa

SEQ ID NO: 14994 - DNA, 20 bp, Artificial Sequence
  chemically synthesized
gatgtcaaaaggcactgatg

SEQ ID NO: 14995 - DNA, 20 bp, Artificial Sequence
  chemically synthesized
actgatgaagatattttctc

SEQ ID NO: 14996 - DNA, 20 bp, Artificial Sequence
  chemically synthesized
tgatgaagatattttctctg

SEQ ID NO: 14997 - DNA, 20 bp, Artificial Sequence
  chemically synthesized
gagtctccttctttctaacc

SEQ ID NO: 14998 - DNA, 20 bp, Artificial Sequence
  chemically synthesized
cggctctcccgatgtgaacc

SEQ ID NO: 14999 - DNA, 20 bp, Artificial Sequence
  chemically synthesized
cgccgccgccgcccgccccg

SEQ ID NO: 15000 - DNA, 20 bp, Artificial Sequence
  chemically synthesized
agcccaccatgtctcgccgc

SEQ ID NO: 15001 - DNA, 20 bp, Artificial Sequence
  chemically synthesized
caccatgtctcgccgcaagc

SEQ ID NO: 15002 - DNA, 20 bp, Artificial Sequence
  chemically synthesized
accatgtctcgccgcaagca

SEQ ID NO: 15003 - DNA, 20 bp, Artificial Sequence
  chemically synthesized
gccgcaagcaaggcaaaccc

SEQ ID NO: 15004 - DNA, 20 bp, Artificial Sequence
  chemically synthesized
caaggcaaaccccagcactt

SEQ ID NO: 15005 - DNA, 20 bp, Artificial Sequence
  chemically synthesized
aaccccagcacttaagcaaa

SEQ ID NO: 15006 - DNA, 20 bp, Artificial Sequence
  chemically synthesized
accccagcacttaagcaaac

SEQ ID NO: 15007 - DNA, 20 bp, Artificial Sequence
  chemically synthesized
gcaaacgggaattctcgcgt

SEQ ID NO: 15008 - DNA, 20 bp, Artificial Sequence
  chemically synthesized
tcgcgtaagtaacccaataa

SEQ ID NO: 15009 - DNA, 20 bp, Artificial Sequence
  chemically synthesized
taataattattaataatcac

SEQ ID NO: 15010 - DNA, 20 bp, Artificial Sequence
  chemically synthesized
ataattattaataatcacga

SEQ ID NO: 15011 - DNA, 20 bp, Artificial Sequence
  chemically synthesized
ttaataatcacgagagcgcg

SEQ ID NO: 15012 - DNA, 20 bp, Artificial Sequence
  chemically synthesized
taataatcacgagagcgcgc

SEQ ID NO: 15013 - DNA, 20 bp, Artificial Sequence
  chemically synthesized
atcacgagagcgcgcaggac

SEQ ID NO: 15014 - DNA, 20 bp, Artificial Sequence
  chemically synthesized
acgagagcgcgcaggactag

SEQ ID NO: 15015 - DNA, 20 bp, Artificial Sequence
  chemically synthesized
gcgcgcaggactagaagcaa

SEQ ID NO: 15016 - DNA, 20 bp, Artificial Sequence
  chemically synthesized
gcaggactagaagcaaaagc

SEQ ID NO: 15017 - DNA, 20 bp, Artificial Sequence
  chemically synthesized
caggactagaagcaaaagcg

SEQ ID NO: 15018 - DNA, 20 bp, Artificial Sequence
  chemically synthesized
aggactagaagcaaaagcga

SEQ ID NO: 15019 - DNA, 20 bp, Artificial Sequence
  chemically synthesized
ggactagaagcaaaagcgag

SEQ ID NO: 15020 - DNA, 20 bp, Artificial Sequence
  chemically synthesized
gactagaagcaaaagcgagg

SEQ ID NO: 15021 - DNA, 20 bp, Artificial Sequence
  chemically synthesized
ctagaagcaaaagcgagggg

SEQ ID NO: 15022 - DNA, 20 bp, Artificial Sequence
  chemically synthesized
agaagcaaaagcgaggggga

SEQ ID NO: 15023 - DNA, 20 bp, Artificial Sequence
  chemically synthesized
aagcaaaagcgagggggaga

SEQ ID NO: 15024 - DNA, 20 bp, Artificial Sequence
  chemically synthesized
agcaaaagcgagggggagag

SEQ ID NO: 15025 - DNA, 20 bp, Artificial Sequence
  chemically synthesized
gcaaaagcgagggggagaga

SEQ ID NO: 15026 - DNA, 20 bp, Artificial Sequence
  chemically synthesized
caaaagcgagggggagagag

SEQ ID NO: 15027 - DNA, 20 bp, Artificial Sequence
  chemically synthesized
tgcatttttaaatttttcac

SEQ ID NO: 15028 - DNA, 20 bp, Artificial Sequence
  chemically synthesized
ttttcacgagaaaaacctcc

SEQ ID NO: 15029 - DNA, 20 bp, Artificial Sequence
  chemically synthesized
ttcacgagaaaaacctccga

SEQ ID NO: 15030 - DNA, 20 bp, Artificial Sequence
  chemically synthesized
gagaaaaacctccgagagtc

SEQ ID NO: 15031 - DNA, 20 bp, Artificial Sequence
  chemically synthesized
agaaaaacctccgagagtcg

SEQ ID NO: 15032 - DNA, 20 bp, Artificial Sequence
  chemically synthesized
acctccgagagtcgaggtaa

SEQ ID NO: 15033 - DNA, 20 bp, Artificial Sequence
  chemically synthesized
ctccgagagtcgaggtaaaa

SEQ ID NO: 15034 - DNA, 20 bp, Artificial Sequence
  chemically synthesized
gagtcgaggtaaaagagata

SEQ ID NO: 15035 - DNA, 20 bp, Artificial Sequence
  chemically synthesized
agtcgaggtaaaagagataa

SEQ ID NO: 15036 - DNA, 20 bp, Artificial Sequence
  chemically synthesized
gtcgaggtaaaagagataaa

SEQ ID NO: 15037 - DNA, 20 bp, Artificial Sequence
  chemically synthesized
tcgaggtaaaagagataaag

SEQ ID NO: 15038 - DNA, 20 bp, Artificial Sequence
  chemically synthesized
cgaggtaaaagagataaagg

SEQ ID NO: 15039 - DNA, 20 bp, Artificial Sequence
  chemically synthesized
gaaaaaaccctcatcccatc

SEQ ID NO: 15040 - DNA, 20 bp, Artificial Sequence
  chemically synthesized
attgccgtgtatgcactttt

SEQ ID NO: 15041 - DNA, 20 bp, Artificial Sequence
  chemically synthesized
ccgtgtatgcacttttgaga

SEQ ID NO: 15042 - DNA, 20 bp, Artificial Sequence
  chemically synthesized
gctttatttctcttttcgaa

SEQ ID NO: 15043 - DNA, 20 bp, Artificial Sequence
  chemically synthesized
ctttatttctcttttcgaaa

SEQ ID NO: 15044 - DNA, 20 bp, Artificial Sequence
  chemically synthesized
ccactccccccccgccccgc

SEQ ID NO: 15045 - DNA, 20 bp, Artificial Sequence
  chemically synthesized
gcaaaataatgaacaatgct

SEQ ID NO: 15046 - DNA, 20 bp, Artificial Sequence
  chemically synthesized
caaaataatgaacaatgcta

SEQ ID NO: 15047 - DNA, 20 bp, Artificial Sequence
  chemically synthesized
gaacaactcacatgcaaacc

SEQ ID NO: 15048 - DNA, 20 bp, Artificial Sequence
  chemically synthesized
aacaactcacatgcaaacct

SEQ ID NO: 15049 - DNA, 20 bp, Artificial Sequence
  chemically synthesized
acaactcacatgcaaacctg

SEQ ID NO: 15050 - DNA, 20 bp, Artificial Sequence
  chemically synthesized
caactcacatgcaaacctgg

SEQ ID NO: 15051 - DNA, 20 bp, Artificial Sequence
  chemically synthesized
ctcacatgcaaacctggggg

SEQ ID NO: 15052 - DNA, 20 bp, Artificial Sequence
  chemically synthesized
tcacatgcaaacctgggggt

SEQ ID NO: 15053 - DNA, 20 bp, Artificial Sequence
  chemically synthesized
acatgcaaacctgggggtgg

SEQ ID NO: 15054 - DNA, 20 bp, Artificial Sequence
  chemically synthesized
gcaaacctgggggtgggagc

SEQ ID NO: 15055 - DNA, 20 bp, Artificial Sequence
  chemically synthesized
aacctgggggtgggagctgg

SEQ ID NO: 15056 - DNA, 20 bp, Artificial Sequence
  chemically synthesized
acctgggggtgggagctggt

SEQ ID NO: 15057 - DNA, 20 bp, Artificial Sequence
  chemically synthesized
cctgggggtgggagctggtg

SEQ ID NO: 15058 - DNA, 20 bp, Artificial Sequence
  chemically synthesized
ggggtgggagctggtgggga

SEQ ID NO: 15059 - DNA, 20 bp, Artificial Sequence
  chemically synthesized
gggtgggagctggtggggaa

SEQ ID NO: 15060 - DNA, 20 bp, Artificial Sequence
  chemically synthesized
ggtgggagctggtggggaaa

SEQ ID NO: 15061 - DNA, 20 bp, Artificial Sequence
  chemically synthesized
tgggagctggtggggaaagg

SEQ ID NO: 15062 - DNA, 20 bp, Artificial Sequence
  chemically synthesized
gggagctggtggggaaaggg

SEQ ID NO: 15063 - DNA, 20 bp, Artificial Sequence
  chemically synthesized
ggttgcttcccactcaccgt

SEQ ID NO: 15064 - DNA, 20 bp, Artificial Sequence
  chemically synthesized
tcccactcaccgtaagaaaa

SEQ ID NO: 15065 - DNA, 20 bp, Artificial Sequence
  chemically synthesized
cccactcaccgtaagaaaat

SEQ ID NO: 15066 - DNA, 20 bp, Artificial Sequence
  chemically synthesized
ccactcaccgtaagaaaatg

SEQ ID NO: 15067 - DNA, 20 bp, Artificial Sequence
  chemically synthesized
cactcaccgtaagaaaatgg

SEQ ID NO: 15068 - DNA, 20 bp, Artificial Sequence
  chemically synthesized
actcaccgtaagaaaatggg

SEQ ID NO: 15069 - DNA, 20 bp, Artificial Sequence
  chemically synthesized
ctcaccgtaagaaaatgggg

SEQ ID NO: 15070 - DNA, 20 bp, Artificial Sequence
  chemically synthesized
accgtaagaaaatggggggg

SEQ ID NO: 15071 - DNA, 20 bp, Artificial Sequence
  chemically synthesized
ccgtaagaaaatgggggggt

SEQ ID NO: 15072 - DNA, 20 bp, Artificial Sequence
  chemically synthesized
cgtaagaaaatgggggggta

SEQ ID NO: 15073 - DNA, 20 bp, Artificial Sequence
  chemically synthesized
taagaaaatgggggggtagg

SEQ ID NO: 15074 - DNA, 20 bp, Artificial Sequence
  chemically synthesized
aagaaaatgggggggtaggg

SEQ ID NO: 15075 - DNA, 20 bp, Artificial Sequence
  chemically synthesized
agaaaatgggggggtaggga

SEQ ID NO: 15076 - DNA, 20 bp, Artificial Sequence
  chemically synthesized
aaaatgggggggtagggagg

SEQ ID NO: 15077 - DNA, 20 bp, Artificial Sequence
  chemically synthesized
tgggggggtagggagggagt

SEQ ID NO: 15078 - DNA, 20 bp, Artificial Sequence
  chemically synthesized
ggtagggagggagtgagtac

SEQ ID NO: 15079 - DNA, 20 bp, Artificial Sequence
  chemically synthesized
caagtctaaaaaacgattcc

SEQ ID NO: 15080 - DNA, 20 bp, Artificial Sequence
  chemically synthesized
aagtctaaaaaacgattccc

SEQ ID NO: 15081 - DNA, 20 bp, Artificial Sequence
  chemically synthesized
agtctaaaaaacgattcccg

SEQ ID NO: 15082 - DNA, 20 bp, Artificial Sequence
  chemically synthesized
tctaaaaaacgattcccggg

SEQ ID NO: 15083 - DNA, 20 bp, Artificial Sequence
  chemically synthesized
aaaacgattcccggggagaa

SEQ ID NO: 15084 - DNA, 20 bp, Artificial Sequence
  chemically synthesized
aacgattcccggggagaaaa

SEQ ID NO: 15085 - DNA, 20 bp, Artificial Sequence
  chemically synthesized
acgattcccggggagaaaag

SEQ ID NO: 15086 - DNA, 20 bp, Artificial Sequence
  chemically synthesized
ttcccggggagaaaagaggt

SEQ ID NO: 15087 - DNA, 20 bp, Artificial Sequence
  chemically synthesized
ggggagaaaagaggtgagac

SEQ ID NO: 15088 - DNA, 20 bp, Artificial Sequence
  chemically synthesized
aaagaggtgagactggcttt

SEQ ID NO: 15089 - DNA, 20 bp, Artificial Sequence
  chemically synthesized
tgagactggcttttggacac

SEQ ID NO: 15090 - DNA, 20 bp, Artificial Sequence
  chemically synthesized
tttggacaccagcgcgctca

SEQ ID NO: 15091 - DNA, 20 bp, Artificial Sequence
  chemically synthesized
acaccagcgcgctcacggtc

SEQ ID NO: 15092 - DNA, 20 bp, Artificial Sequence
  chemically synthesized
cgcgctcacggtcaagtgtg

SEQ ID NO: 15093 - DNA, 20 bp, Artificial Sequence
  chemically synthesized
gctcacggtcaagtgtgcag

SEQ ID NO: 15094 - DNA, 20 bp, Artificial Sequence
  chemically synthesized
ctcacggtcaagtgtgcagc

SEQ ID NO: 15095 - DNA, 20 bp, Artificial Sequence
  chemically synthesized
cacggtcaagtgtgcagcgg

SEQ ID NO: 15096 - DNA, 20 bp, Artificial Sequence
  chemically synthesized
acggtcaagtgtgcagcggg

SEQ ID NO: 15097 - DNA, 20 bp, Artificial Sequence
  chemically synthesized
tcaagtgtgcagcgggagga

SEQ ID NO: 15098 - DNA, 20 bp, Artificial Sequence
  chemically synthesized
agtgtgcagcgggaggaaag

SEQ ID NO: 15099 - DNA, 20 bp, Artificial Sequence
  chemically synthesized
gaaagtagtcatccccacaa

SEQ ID NO: 15100 - DNA, 20 bp, Artificial Sequence
  chemically synthesized
gtagtcatccccacaatagt

SEQ ID NO: 15101 - DNA, 20 bp, Artificial Sequence
  chemically synthesized
tcatccccacaatagtgaga

SEQ ID NO: 15102 - DNA, 20 bp, Artificial Sequence
  chemically synthesized
tccccacaatagtgagaaag

SEQ ID NO: 15103 - DNA, 20 bp, Artificial Sequence
  chemically synthesized
atagtgagaaagtggcactg

SEQ ID NO: 15104 - DNA, 20 bp, Artificial Sequence
  chemically synthesized
tgagaaagtggcactgtgga

SEQ ID NO: 15105 - DNA, 20 bp, Artificial Sequence
  chemically synthesized
gagaaagtggcactgtggaa

SEQ ID NO: 15106 - DNA, 20 bp, Artificial Sequence
  chemically synthesized
agaaagtggcactgtggaaa

SEQ ID NO: 15107 - DNA, 20 bp, Artificial Sequence
  chemically synthesized
gaaagtggcactgtggaaag

SEQ ID NO: 15108 - DNA, 20 bp, Artificial Sequence
  chemically synthesized
gcactgtggaaaggggcccc

SEQ ID NO: 15109 - DNA, 20 bp, Artificial Sequence
  chemically synthesized
aaggggcccccggcgctcct

SEQ ID NO: 15110 - DNA, 20 bp, Artificial Sequence
  chemically synthesized
ccccggcgctcctgagtccg

SEQ ID NO: 15111 - DNA, 20 bp, Artificial Sequence
  chemically synthesized
ccggcgctcctgagtccgcg

SEQ ID NO: 15112 - DNA, 20 bp, Artificial Sequence
  chemically synthesized
cgctcctgagtccgcggagt

SEQ ID NO: 15113 - DNA, 20 bp, Artificial Sequence
  chemically synthesized
gctcctgagtccgcggagtc

SEQ ID NO: 15114 - DNA, 20 bp, Artificial Sequence
  chemically synthesized
tcctgagtccgcggagtcgg

SEQ ID NO: 15115 - DNA, 20 bp, Artificial Sequence
  chemically synthesized
ctgagtccgcggagtcggga

SEQ ID NO: 15116 - DNA, 20 bp, Artificial Sequence
  chemically synthesized
tgagtccgcggagtcgggag

SEQ ID NO: 15117 - DNA, 20 bp, Artificial Sequence
  chemically synthesized
gagtccgcggagtcgggaga

SEQ ID NO: 15118 - DNA, 20 bp, Artificial Sequence
  chemically synthesized
agtccgcggagtcgggagag

SEQ ID NO: 15119 - DNA, 20 bp, Artificial Sequence
  chemically synthesized
cggagtcgggagaggggccg

SEQ ID NO: 15120 - DNA, 20 bp, Artificial Sequence
  chemically synthesized
cgggagaggggccgcggcga

SEQ ID NO: 15121 - DNA, 20 bp, Artificial Sequence
  chemically synthesized
gggagaggggccgcggcgac

SEQ ID NO: 15122 - DNA, 20 bp, Artificial Sequence
  chemically synthesized
ggagaggggccgcggcgacg

SEQ ID NO: 15123 - DNA, 20 bp, Artificial Sequence
  chemically synthesized
agaggggccgcggcgacggg

SEQ ID NO: 15124 - DNA, 20 bp, Artificial Sequence
  chemically synthesized
aggggccgcggcgacgggga

SEQ ID NO: 15125 - DNA, 20 bp, Artificial Sequence
  chemically synthesized
cgcggcgacggggagagccg

SEQ ID NO: 15126 - DNA, 20 bp, Artificial Sequence
  chemically synthesized
gcggcgacggggagagccgt

SEQ ID NO: 15127 - DNA, 20 bp, Artificial Sequence
  chemically synthesized
gacggggagagccgtgggac

SEQ ID NO: 15128 - DNA, 20 bp, Artificial Sequence
  chemically synthesized
acggggagagccgtgggacc

SEQ ID NO: 15129 - DNA, 20 bp, Artificial Sequence
  chemically synthesized
gggagagccgtgggaccggg

SEQ ID NO: 15130 - DNA, 20 bp, Artificial Sequence
  chemically synthesized
ggagagccgtgggaccggga

SEQ ID NO: 15131 - DNA, 20 bp, Artificial Sequence
  chemically synthesized
agccgtgggaccgggaagga

SEQ ID NO: 15132 - DNA, 20 bp, Artificial Sequence
  chemically synthesized
gccgtgggaccgggaaggac

SEQ ID NO: 15133 - DNA, 20 bp, Artificial Sequence
  chemically synthesized
cgtgggaccgggaaggacgg

SEQ ID NO: 15134 - DNA, 20 bp, Artificial Sequence
  chemically synthesized
accgggaaggacgggagacg

SEQ ID NO: 15135 - DNA, 20 bp, Artificial Sequence
  chemically synthesized
ggaaggacgggagacgcggc

SEQ ID NO: 15136 - DNA, 20 bp, Artificial Sequence
  chemically synthesized
ggcactgccgccttttgttc

SEQ ID NO: 15137 - DNA, 20 bp, Artificial Sequence
  chemically synthesized
ctgccgccttttgttccggc

SEQ ID NO: 15138 - DNA, 20 bp, Artificial Sequence
  chemically synthesized
gccgccttttgttccggcca

SEQ ID NO: 15139 - DNA, 20 bp, Artificial Sequence
  chemically synthesized
ccgccttttgttccggccag

SEQ ID NO: 15140 - DNA, 20 bp, Artificial Sequence
  chemically synthesized
ccttttgttccggccagagg

SEQ ID NO: 15141 - DNA, 20 bp, Artificial Sequence
  chemically synthesized
cttttgttccggccagaggt

SEQ ID NO: 15142 - DNA, 20 bp, Artificial Sequence
  chemically synthesized
tgtcccgctgccttttgtgc

SEQ ID NO: 15143 - DNA, 20 bp, Artificial Sequence
  chemically synthesized
cgccgccgccgccgccgccg

SEQ ID NO: 15144 - DNA, 20 bp, Artificial Sequence
  chemically synthesized
gccgccgccgccgccgccga

SEQ ID NO: 15145 - DNA, 20 bp, Artificial Sequence
  chemically synthesized
ccgccgccgccgccgccgaa

SEQ ID NO: 15146 - DNA, 20 bp, Artificial Sequence
  chemically synthesized
ccgccgccgccgccgaaggg

SEQ ID NO: 15147 - DNA, 20 bp, Artificial Sequence
  chemically synthesized
cgccgccgccgccgaagggc

SEQ ID NO: 15148 - DNA, 20 bp, Artificial Sequence
  chemically synthesized
ccgccgccgccgaagggcag

SEQ ID NO: 15149 - DNA, 20 bp, Artificial Sequence
  chemically synthesized
cgccgccgaagggcaggagc

SEQ ID NO: 15150 - DNA, 20 bp, Artificial Sequence
  chemically synthesized
gccgccgaagggcaggagct

SEQ ID NO: 15151 - DNA, 20 bp, Artificial Sequence
  chemically synthesized
ccgccgaagggcaggagcta

SEQ ID NO: 15152 - DNA, 20 bp, Artificial Sequence
  chemically synthesized
cgaagggcaggagctagggc

SEQ ID NO: 15153 - DNA, 20 bp, Artificial Sequence
  chemically synthesized
gaagggcaggagctagggcc

SEQ ID NO: 15154 - DNA, 20 bp, Artificial Sequence
  chemically synthesized
aagggcaggagctagggccg

SEQ ID NO: 15155 - DNA, 20 bp, Artificial Sequence
  chemically synthesized
agggcaggagctagggccgg

SEQ ID NO: 15156 - DNA, 20 bp, Artificial Sequence
  chemically synthesized
ggcaggagctagggccgggg

SEQ ID NO: 15157 - DNA, 20 bp, Artificial Sequence
  chemically synthesized
gcaggagctagggccggggg

SEQ ID NO: 15158 - DNA, 20 bp, Artificial Sequence
  chemically synthesized
aggagctagggccgggggag

SEQ ID NO: 15159 - DNA, 20 bp, Artificial Sequence
  chemically synthesized
ggagctagggccgggggagg

SEQ ID NO: 15160 - DNA, 20 bp, Artificial Sequence
  chemically synthesized
gctagggccgggggaggagg

SEQ ID NO: 15161 - DNA, 20 bp, Artificial Sequence
  chemically synthesized
gggccgggggaggaggcggc

SEQ ID NO: 15162 - DNA, 20 bp, Artificial Sequence
  chemically synthesized
ggccgggggaggaggcggcc

SEQ ID NO: 15163 - DNA, 20 bp, Artificial Sequence
  chemically synthesized
gccgggggaggaggcggccg

SEQ ID NO: 15164 - DNA, 20 bp, Artificial Sequence
  chemically synthesized
ccgggggaggaggcggccgg

SEQ ID NO: 15165 - DNA, 20 bp, Artificial Sequence
  chemically synthesized
aggaggcggccgggggcacg

SEQ ID NO: 15166 - DNA, 20 bp, Artificial Sequence
  chemically synthesized
ggaggcggccgggggcacgc

SEQ ID NO: 15167 - DNA, 20 bp, Artificial Sequence
  chemically synthesized
aggcggccgggggcacgcgg

SEQ ID NO: 15168 - DNA, 20 bp, Artificial Sequence
  chemically synthesized
gcggccgggggcacgcggga

SEQ ID NO: 15169 - DNA, 20 bp, Artificial Sequence
  chemically synthesized
cggccgggggcacgcgggag

SEQ ID NO: 15170 - DNA, 20 bp, Artificial Sequence
  chemically synthesized
ggccgggggcacgcgggaga

SEQ ID NO: 15171 - DNA, 20 bp, Artificial Sequence
  chemically synthesized
ccgggggcacgcgggagagg

SEQ ID NO: 15172 - DNA, 20 bp, Artificial Sequence
  chemically synthesized
cgggggcacgcgggagaggg

SEQ ID NO: 15173 - DNA, 20 bp, Artificial Sequence
  chemically synthesized
gggggcacgcgggagaggga

SEQ ID NO: 15174 - DNA, 20 bp, Artificial Sequence
  chemically synthesized
gggcacgcgggagagggagg

SEQ ID NO: 15175 - DNA, 20 bp, Artificial Sequence
  chemically synthesized
ggcacgcgggagagggaggg

SEQ ID NO: 15176 - DNA, 20 bp, Artificial Sequence
  chemically synthesized
gcacgcgggagagggaggga

SEQ ID NO: 15177 - DNA, 20 bp, Artificial Sequence
  chemically synthesized
acgcgggagagggagggagg

SEQ ID NO: 15178 - DNA, 20 bp, Artificial Sequence
  chemically synthesized
ggagagggagggagggagcc

SEQ ID NO: 15179 - DNA, 20 bp, Artificial Sequence
  chemically synthesized
gagcccggactgctgcctcc

SEQ ID NO: 15180 - DNA, 20 bp, Artificial Sequence
  chemically synthesized
agcccggactgctgcctcct

SEQ ID NO: 15181 - DNA, 20 bp, Artificial Sequence
  chemically synthesized
ctcccctcccgaccgaacct

SEQ ID NO: 15182 - DNA, 20 bp, Artificial Sequence
  chemically synthesized
cccctcccgaccgaacctca

SEQ ID NO: 15183 - DNA, 20 bp, Artificial Sequence
  chemically synthesized
ccctcccgaccgaacctcag

SEQ ID NO: 15184 - DNA, 20 bp, Artificial Sequence
  chemically synthesized
tcccgaccgaacctcagagg

SEQ ID NO: 15185 - DNA, 20 bp, Artificial Sequence
  chemically synthesized
gaccgaacctcagaggcagc

SEQ ID NO: 15186 - DNA, 20 bp, Artificial Sequence
  chemically synthesized
accgaacctcagaggcagca

SEQ ID NO: 15187 - DNA, 20 bp, Artificial Sequence
  chemically synthesized
cgaacctcagaggcagcaag

SEQ ID NO: 15188 - DNA, 20 bp, Artificial Sequence
  chemically synthesized
acctcagaggcagcaaggag

SEQ ID NO: 15189 - DNA, 20 bp, Artificial Sequence
  chemically synthesized
agaggcagcaaggagaagac

SEQ ID NO: 15190 - DNA, 20 bp, Artificial Sequence
  chemically synthesized
aaaaataaaataaataaaac

SEQ ID NO: 15191 - DNA, 20 bp, Artificial Sequence
  chemically synthesized
aaaataaaataaataaaaca

SEQ ID NO: 15192 - DNA, 20 bp, Artificial Sequence
  chemically synthesized
taaaataaataaaacaaggc

SEQ ID NO: 15193 - DNA, 20 bp, Artificial Sequence
  chemically synthesized
aaataaataaaacaaggcaa

SEQ ID NO: 15194 - DNA, 20 bp, Artificial Sequence
  chemically synthesized
aatttcttgcccccaaaccg

SEQ ID NO: 15195 - DNA, 20 bp, Artificial Sequence
  chemically synthesized
ctgccaacccttttctgtga

SEQ ID NO: 15196 - DNA, 20 bp, Artificial Sequence
  chemically synthesized
cttctctttgactcccccac

SEQ ID NO: 15197 - DNA, 20 bp, Artificial Sequence
  chemically synthesized
aaatctcacaatctctcatc

SEQ ID NO: 15198 - DNA, 20 bp, Artificial Sequence
  chemically synthesized
cctcttcccccaaacccctt

SEQ ID NO: 15199 - DNA, 20 bp, Artificial Sequence
  chemically synthesized
aaccccttcagttgcaaact

SEQ ID NO: 15200 - DNA, 20 bp, Artificial Sequence
  chemically synthesized
accccttcagttgcaaactt

SEQ ID NO: 15201 - DNA, 20 bp, Artificial Sequence
  chemically synthesized
ccccttcagttgcaaactta

SEQ ID NO: 15202 - DNA, 20 bp, Artificial Sequence
  chemically synthesized
ttgcaaacttagggcgccga

SEQ ID NO: 15203 - DNA, 20 bp, Artificial Sequence
  chemically synthesized
aacttagggcgccgacggca

SEQ ID NO: 15204 - DNA, 20 bp, Artificial Sequence
  chemically synthesized
cttagggcgccgacggcacg

SEQ ID NO: 15205 - DNA, 20 bp, Artificial Sequence
  chemically synthesized
tagggcgccgacggcacgga

SEQ ID NO: 15206 - DNA, 20 bp, Artificial Sequence
  chemically synthesized
agggcgccgacggcacggag

SEQ ID NO: 15207 - DNA, 20 bp, Artificial Sequence
  chemically synthesized
gggcgccgacggcacggaga

SEQ ID NO: 15208 - DNA, 20 bp, Artificial Sequence
  chemically synthesized
gcgccgacggcacggagagg

SEQ ID NO: 15209 - DNA, 20 bp, Artificial Sequence
  chemically synthesized
gccgacggcacggagaggga

SEQ ID NO: 15210 - DNA, 20 bp, Artificial Sequence
  chemically synthesized
cgacggcacggagagggaga

SEQ ID NO: 15211 - DNA, 20 bp, Artificial Sequence
  chemically synthesized
gacggcacggagagggagag

SEQ ID NO: 15212 - DNA, 20 bp, Artificial Sequence
  chemically synthesized
tccctcctcttactattttt

SEQ ID NO: 15213 - DNA, 20 bp, Artificial Sequence
  chemically synthesized
ctcctcttactattttttgg

SEQ ID NO: 15214 - DNA, 20 bp, Artificial Sequence
  chemically synthesized
ttttggaagattttcaaaaa

SEQ ID NO: 15215 - DNA, 20 bp, Artificial Sequence
  chemically synthesized
tggaagattttcaaaaaaag

SEQ ID NO: 15216 - DNA, 20 bp, Artificial Sequence
  chemically synthesized
aagattttcaaaaaaagtgg

SEQ ID NO: 15217 - DNA, 20 bp, Artificial Sequence
  chemically synthesized
attttcaaaaaaagtggaag

SEQ ID NO: 15218 - DNA, 20 bp, Artificial Sequence
  chemically synthesized
aagtggaagtggattttgat

SEQ ID NO: 15219 - DNA, 20 bp, Artificial Sequence
  chemically synthesized
agtggaagtggattttgatt

SEQ ID NO: 15220 - DNA, 20 bp, Artificial Sequence
  chemically synthesized
tctcgtgtctgaatgtttac

SEQ ID NO: 15221 - DNA, 20 bp, Artificial Sequence
  chemically synthesized
gtttacaagcaccgcgtgtg

SEQ ID NO: 15222 - DNA, 20 bp, Artificial Sequence
  chemically synthesized
tttacaagcaccgcgtgtgc

SEQ ID NO: 15223 - DNA, 20 bp, Artificial Sequence
  chemically synthesized
tacaagcaccgcgtgtgcgg

SEQ ID NO: 15224 - DNA, 20 bp, Artificial Sequence
  chemically synthesized
gggagcctcctgccaacaaa

SEQ ID NO: 15225 - DNA, 20 bp, Artificial Sequence
  chemically synthesized
gcctcctgccaacaaacaga

SEQ ID NO: 15226 - DNA, 20 bp, Artificial Sequence
  chemically synthesized
ctcctgccaacaaacagaca

SEQ ID NO: 15227 - DNA, 20 bp, Artificial Sequence
  chemically synthesized
tcctgccaacaaacagacag

SEQ ID NO: 15228 - DNA, 20 bp, Artificial Sequence
  chemically synthesized
caacaaacagacagaggacc

SEQ ID NO: 15229 - DNA, 20 bp, Artificial Sequence
  chemically synthesized
aacagacagaggaccgagcg

SEQ ID NO: 15230 - DNA, 20 bp, Artificial Sequence
  chemically synthesized
acagaggaccgagcgcggcg

SEQ ID NO: 15231 - DNA, 20 bp, Artificial Sequence
  chemically synthesized
gaggaccgagcgcggcgcgg

SEQ ID NO: 15232 - DNA, 20 bp, Artificial Sequence
  chemically synthesized
cgagcgcggcgcggcagccc

SEQ ID NO: 15233 - DNA, 20 bp, Artificial Sequence
  chemically synthesized
agcgcggcgcggcagccccg

SEQ ID NO: 15234 - DNA, 20 bp, Artificial Sequence
  chemically synthesized
gcggcgcggcagccccggag

SEQ ID NO: 15235 - DNA, 20 bp, Artificial Sequence
  chemically synthesized
cggcgcggcagccccggagc

SEQ ID NO: 15236 - DNA, 20 bp, Artificial Sequence
  chemically synthesized
cgcggcagccccggagcagg

SEQ ID NO: 15237 - DNA, 20 bp, Artificial Sequence
  chemically synthesized
ggcagccccggagcaggcgg

SEQ ID NO: 15238 - DNA, 20 bp, Artificial Sequence
  chemically synthesized
agccccggagcaggcggcgg

SEQ ID NO: 15239 - DNA, 20 bp, Artificial Sequence
  chemically synthesized
cccggagcaggcggcggcgg

SEQ ID NO: 15240 - DNA, 20 bp, Artificial Sequence
  chemically synthesized
agcaggcggcggcggcggcc

SEQ ID NO: 15241 - DNA, 20 bp, Artificial Sequence
  chemically synthesized
ggcggcggcctggcctcgcc

SEQ ID NO: 15242 - DNA, 20 bp, Artificial Sequence
  chemically synthesized
gcggcggcctggcctcgccc

SEQ ID NO: 15243 - DNA, 20 bp, Artificial Sequence
  chemically synthesized
tgcccgacctcgccgcgccc

SEQ ID NO: 15244 - DNA, 20 bp, Artificial Sequence
  chemically synthesized
gacctcgccgcgccccagcc

SEQ ID NO: 15245 - DNA, 20 bp, Artificial Sequence
  chemically synthesized
gccgcgccccagcccagccc

SEQ ID NO: 15246 - DNA, 20 bp, Artificial Sequence
  chemically synthesized
ccagccccggatcgcccacc

SEQ ID NO: 15247 - DNA, 20 bp, Artificial Sequence
  chemically synthesized
cggatcgcccacccggcgcc

SEQ ID NO: 15248 - DNA, 20 bp, Artificial Sequence
  chemically synthesized
ggcgcccggcgcccacccgc

SEQ ID NO: 15249 - DNA, 20 bp, Artificial Sequence
  chemically synthesized
gcgcccggcgcccacccgcc

SEQ ID NO: 15250 - DNA, 20 bp, Artificial Sequence
  chemically synthesized
cggcgcccacccgccaggca

SEQ ID NO: 15251 - DNA, 20 bp, Artificial Sequence
  chemically synthesized
cgcccacccgccaggcacgg

SEQ ID NO: 15252 - DNA, 20 bp, Artificial Sequence
  chemically synthesized
ccacccgccaggcacggcgg

SEQ ID NO: 15253 - DNA, 20 bp, Artificial Sequence
  chemically synthesized
cacccgccaggcacggcggc

SEQ ID NO: 15254 - DNA, 20 bp, Artificial Sequence
  chemically synthesized
aggcacggcggcaggccacg

SEQ ID NO: 15255 - DNA, 20 bp, Artificial Sequence
  chemically synthesized
gccacgcagtgtctccgcgc

SEQ ID NO: 15256 - DNA, 20 bp, Artificial Sequence
  chemically synthesized
gcagtgtctccgcgccagcc

SEQ ID NO: 15257 - DNA, 20 bp, Artificial Sequence
  chemically synthesized
ctccgcgccagcctggcccg

SEQ ID NO: 15258 - DNA, 20 bp, Artificial Sequence
  chemically synthesized
gccagcctggcccgtggtcc

SEQ ID NO: 15259 - DNA, 20 bp, Artificial Sequence
  chemically synthesized
ccgtggtcctggtccgcccc

SEQ ID NO: 15260 - DNA, 20 bp, Artificial Sequence
  chemically synthesized
tccgcccccagcacaatgcc

SEQ ID NO: 15261 - DNA, 20 bp, Artificial Sequence
  chemically synthesized
gagacctcttctcgacctcc

SEQ ID NO: 15262 - DNA, 20 bp, Artificial Sequence
  chemically synthesized
gacctcccagactgcgaaat

SEQ ID NO: 15263 - DNA, 20 bp, Artificial Sequence
  chemically synthesized
tcccagactgcgaaatcggc

SEQ ID NO: 15264 - DNA, 20 bp, Artificial Sequence
  chemically synthesized
cccagactgcgaaatcggct

SEQ ID NO: 15265 - DNA, 20 bp, Artificial Sequence
  chemically synthesized
gaaatcggctgggtgaaact

SEQ ID NO: 15266 - DNA, 20 bp, Artificial Sequence
  chemically synthesized
gggtgaaactcggctttgca

SEQ ID NO: 15267 - DNA, 20 bp, Artificial Sequence
  chemically synthesized
tgcaaagcatttttattttg

SEQ ID NO: 15268 - DNA, 20 bp, Artificial Sequence
  chemically synthesized
gcaaagcatttttattttgc

SEQ ID NO: 15269 - DNA, 20 bp, Artificial Sequence
  chemically synthesized
caaagcatttttattttgca

SEQ ID NO: 15270 - DNA, 20 bp, Artificial Sequence
  chemically synthesized
attttgcagggcaactgtaa

SEQ ID NO: 15271 - DNA, 20 bp, Artificial Sequence
  chemically synthesized
gcctcccctcccctccgccc

SEQ ID NO: 15272 - DNA, 20 bp, Artificial Sequence
  chemically synthesized
cctcccctcccctccgccct

SEQ ID NO: 15273 - DNA, 20 bp, Artificial Sequence
  chemically synthesized
ctccgccctgggtactttct

SEQ ID NO: 15274 - DNA, 20 bp, Artificial Sequence
  chemically synthesized
tctcagacgtctcttgtcca

SEQ ID NO: 15275 - DNA, 20 bp, Artificial Sequence
  chemically synthesized
gacgtctcttgtccacagct

SEQ ID NO: 15276 - DNA, 20 bp, Artificial Sequence
  chemically synthesized
acgtctcttgtccacagctc

SEQ ID NO: 15277 - DNA, 20 bp, Artificial Sequence
  chemically synthesized
tgtccacagctcgggaccgc

SEQ ID NO: 15278 - DNA, 20 bp, Artificial Sequence
  chemically synthesized
gtccacagctcgggaccgcg

SEQ ID NO: 15279 - DNA, 20 bp, Artificial Sequence
  chemically synthesized
ccacagctcgggaccgcgag

SEQ ID NO: 15280 - DNA, 20 bp, Artificial Sequence
  chemically synthesized
cacagctcgggaccgcgagg

SEQ ID NO: 15281 - DNA, 20 bp, Artificial Sequence
  chemically synthesized
tgcccaccccccaccccgcc

SEQ ID NO: 15282 - DNA, 20 bp, Artificial Sequence
  chemically synthesized
accccccaccccgcccggtc

SEQ ID NO: 15283 - DNA, 20 bp, Artificial Sequence
  chemically synthesized
accccgcccggtctggtcac

SEQ ID NO: 15284 - DNA, 20 bp, Artificial Sequence
  chemically synthesized
caccagtccccctgcgcccc

SEQ ID NO: 15285 - DNA, 20 bp, Artificial Sequence
  chemically synthesized
ccctgcgccccgagcacgac

SEQ ID NO: 15286 - DNA, 20 bp, Artificial Sequence
  chemically synthesized
cctgcgccccgagcacgact

SEQ ID NO: 15287 - DNA, 20 bp, Artificial Sequence
  chemically synthesized
cgccccgagcacgactaggc

SEQ ID NO: 15288 - DNA, 20 bp, Artificial Sequence
  chemically synthesized
gccccgagcacgactaggcc

SEQ ID NO: 15289 - DNA, 20 bp, Artificial Sequence
  chemically synthesized
ccgagcacgactaggccagg

SEQ ID NO: 15290 - DNA, 20 bp, Artificial Sequence
  chemically synthesized
agcacgactaggccaggtgg

SEQ ID NO: 15291 - DNA, 20 bp, Artificial Sequence
  chemically synthesized
gcacgactaggccaggtggc

SEQ ID NO: 15292 - DNA, 20 bp, Artificial Sequence
  chemically synthesized
cacgactaggccaggtggcg

SEQ ID NO: 15293 - DNA, 20 bp, Artificial Sequence
  chemically synthesized
aggccaggtggcggggttgc

SEQ ID NO: 15294 - DNA, 20 bp, Artificial Sequence
  chemically synthesized
ggccaggtggcggggttgcc

SEQ ID NO: 15295 - DNA, 20 bp, Artificial Sequence
  chemically synthesized
gccaggtggcggggttgccg

SEQ ID NO: 15296 - DNA, 20 bp, Artificial Sequence
  chemically synthesized
aggtggcggggttgccgggg

SEQ ID NO: 15297 - DNA, 20 bp, Artificial Sequence
  chemically synthesized
ggtggcggggttgccgggga

SEQ ID NO: 15298 - DNA, 20 bp, Artificial Sequence
  chemically synthesized
gtggcggggttgccggggaa

SEQ ID NO: 15299 - DNA, 20 bp, Artificial Sequence
  chemically synthesized
gcggggttgccggggaaggg

SEQ ID NO: 15300 - DNA, 20 bp, Artificial Sequence
  chemically synthesized
cggggttgccggggaagggc

SEQ ID NO: 15301 - DNA, 20 bp, Artificial Sequence
  chemically synthesized
ggggttgccggggaagggca

SEQ ID NO: 15302 - DNA, 20 bp, Artificial Sequence
  chemically synthesized
gggttgccggggaagggcag

SEQ ID NO: 15303 - DNA, 20 bp, Artificial Sequence
  chemically synthesized
gttgccggggaagggcaggg

SEQ ID NO: 15304 - DNA, 20 bp, Artificial Sequence
  chemically synthesized
gccggggaagggcaggggag

SEQ ID NO: 15305 - DNA, 20 bp, Artificial Sequence
  chemically synthesized
ggcaggggagaagtgtgttt

SEQ ID NO: 15306 - DNA, 20 bp, Artificial Sequence
  chemically synthesized
tgtgtttgagtgtgcatttt

SEQ ID NO: 15307 - DNA, 20 bp, Artificial Sequence
  chemically synthesized
gtgtttgagtgtgcatttta

SEQ ID NO: 15308 - DNA, 20 bp, Artificial Sequence
  chemically synthesized
tgtttgagtgtgcattttaa

SEQ ID NO: 15309 - DNA, 20 bp, Artificial Sequence
  chemically synthesized
agtgtgcattttaagggcgc

SEQ ID NO: 15310 - DNA, 20 bp, Artificial Sequence
  chemically synthesized
attttaagggcgctggatcc

SEQ ID NO: 15311 - DNA, 20 bp, Artificial Sequence
  chemically synthesized
ttttaagggcgctggatcct

SEQ ID NO: 15312 - DNA, 20 bp, Artificial Sequence
  chemically synthesized
gcgctggatcctgggacccc

SEQ ID NO: 15313 - DNA, 20 bp, Artificial Sequence
  chemically synthesized
accccgagcacttcaccctt

SEQ ID NO: 15314 - DNA, 20 bp, Artificial Sequence
  chemically synthesized
ccccgagcacttcacccttt

SEQ ID NO: 15315 - DNA, 20 bp, Artificial Sequence
  chemically synthesized
ttgggtcttgccctcttccc

SEQ ID NO: 15316 - DNA, 20 bp, Artificial Sequence
  chemically synthesized
tgggtcttgccctcttcccc

SEQ ID NO: 15317 - DNA, 20 bp, Artificial Sequence
  chemically synthesized
cttgccctcttccccaggcc

SEQ ID NO: 15318 - DNA, 20 bp, Artificial Sequence
  chemically synthesized
cctcttccccaggcctggct

SEQ ID NO: 15319 - DNA, 20 bp, Artificial Sequence
  chemically synthesized
ccccaggcctggcttggtct

SEQ ID NO: 15320 - DNA, 20 bp, Artificial Sequence
  chemically synthesized
cccaggcctggcttggtctg

SEQ ID NO: 15321 - DNA, 20 bp, Artificial Sequence
  chemically synthesized
gcttggtctgaggttcttgt

SEQ ID NO: 15322 - DNA, 20 bp, Artificial Sequence
  chemically synthesized
aggttcttgtgagtctgtat

SEQ ID NO: 15323 - DNA, 20 bp, Artificial Sequence
  chemically synthesized
gttcttgtgagtctgtataa

SEQ ID NO: 15324 - DNA, 20 bp, Artificial Sequence
  chemically synthesized
ttgtgagtctgtataagagc

SEQ ID NO: 15325 - DNA, 20 bp, Artificial Sequence
  chemically synthesized
tgagtctgtataagagctgg

SEQ ID NO: 15326 - DNA, 20 bp, Artificial Sequence
  chemically synthesized
gtctgtataagagctggtgg

SEQ ID NO: 15327 - DNA, 20 bp, Artificial Sequence
  chemically synthesized
tgtataagagctggtggtgg

SEQ ID NO: 15328 - DNA, 20 bp, Artificial Sequence
  chemically synthesized
tgtctcccgctgactgcgcc

SEQ ID NO: 15329 - DNA, 20 bp, Artificial Sequence
  chemically synthesized
tcccgctgactgcgcctgga

SEQ ID NO: 15330 - DNA, 20 bp, Artificial Sequence
  chemically synthesized
cccgctgactgcgcctggaa

SEQ ID NO: 15331 - DNA, 20 bp, Artificial Sequence
  chemically synthesized
gctgactgcgcctggaaagg

SEQ ID NO: 15332 - DNA, 20 bp, Artificial Sequence
  chemically synthesized
ctgactgcgcctggaaaggc

SEQ ID NO: 15333 - DNA, 20 bp, Artificial Sequence
  chemically synthesized
actgcgcctggaaaggcggg

SEQ ID NO: 15334 - DNA, 20 bp, Artificial Sequence
  chemically synthesized
gcgcctggaaaggcgggcgg

SEQ ID NO: 15335 - DNA, 20 bp, Artificial Sequence
  chemically synthesized
cgcctggaaaggcgggcggt

SEQ ID NO: 15336 - DNA, 20 bp, Artificial Sequence
  chemically synthesized
aaaggcgggcggtgggcact

SEQ ID NO: 15337 - DNA, 20 bp, Artificial Sequence
  chemically synthesized
aaggcgggcggtgggcactt

SEQ ID NO: 15338 - DNA, 20 bp, Artificial Sequence
  chemically synthesized
cgggcggtgggcacttagga

SEQ ID NO: 15339 - DNA, 20 bp, Artificial Sequence
  chemically synthesized
ggtgggcacttaggaaagtt

SEQ ID NO: 15340 - DNA, 20 bp, Artificial Sequence
  chemically synthesized
gggcacttaggaaagtttgg

SEQ ID NO: 15341 - DNA, 20 bp, Artificial Sequence
  chemically synthesized
acttaggaaagtttggcagc

SEQ ID NO: 15342 - DNA, 20 bp, Artificial Sequence
  chemically synthesized
cttaggaaagtttggcagca

SEQ ID NO: 15343 - DNA, 20 bp, Artificial Sequence
  chemically synthesized
ttaggaaagtttggcagcaa

SEQ ID NO: 15344 - DNA, 20 bp, Artificial Sequence
  chemically synthesized
gaaagtttggcagcaaggga

SEQ ID NO: 15345 - DNA, 20 bp, Artificial Sequence
  chemically synthesized
gtttggcagcaagggaaaga

SEQ ID NO: 15346 - DNA, 20 bp, Artificial Sequence
  chemically synthesized
tttggcagcaagggaaagaa

SEQ ID NO: 15347 - DNA, 20 bp, Artificial Sequence
  chemically synthesized
agcaagggaaagaaaggcgt

SEQ ID NO: 15348 - DNA, 20 bp, Artificial Sequence
  chemically synthesized
gcaagggaaagaaaggcgtg

SEQ ID NO: 15349 - DNA, 20 bp, Artificial Sequence
  chemically synthesized
caagggaaagaaaggcgtga

SEQ ID NO: 15350 - DNA, 20 bp, Artificial Sequence
  chemically synthesized
cttactttaaatttttgatg

SEQ ID NO: 15351 - DNA, 20 bp, Artificial Sequence
  chemically synthesized
aaatttttgatgcagtttta

SEQ ID NO: 15352 - DNA, 20 bp, Artificial Sequence
  chemically synthesized
aatttttgatgcagttttaa

SEQ ID NO: 15353 - DNA, 20 bp, Artificial Sequence
  chemically synthesized
tttaaaggaccacctatact

SEQ ID NO: 15354 - DNA, 20 bp, Artificial Sequence
  chemically synthesized
cttggttctgtgttttttta

SEQ ID NO: 15355 - DNA, 20 bp, Artificial Sequence
  chemically synthesized
ttggttctgtgtttttttaa

SEQ ID NO: 15356 - DNA, 20 bp, Artificial Sequence
  chemically synthesized
tggttctgtgtttttttaaa

SEQ ID NO: 15357 - DNA, 20 bp, Artificial Sequence
  chemically synthesized
ggttctgtgtttttttaaag

SEQ ID NO: 15358 - DNA, 20 bp, Artificial Sequence
  chemically synthesized
tctgtgtttttttaaagggg

SEQ ID NO: 15359 - DNA, 20 bp, Artificial Sequence
  chemically synthesized
gtgtttttttaaaggggtgg

SEQ ID NO: 15360 - DNA, 20 bp, Artificial Sequence
  chemically synthesized
tttttttaaaggggtggtgg

SEQ ID NO: 15361 - DNA, 20 bp, Artificial Sequence
  chemically synthesized
ttttttaaaggggtggtggt

SEQ ID NO: 15362 - DNA, 20 bp, Artificial Sequence
  chemically synthesized
tttttaaaggggtggtggtg

SEQ ID NO: 15363 - DNA, 20 bp, Artificial Sequence
  chemically synthesized
ttttaaaggggtggtggtgg

SEQ ID NO: 15364 - DNA, 20 bp, Artificial Sequence
  chemically synthesized
tttaaaggggtggtggtggg

SEQ ID NO: 15365 - DNA, 20 bp, Artificial Sequence
  chemically synthesized
gtggtggtggggggtgcgca

SEQ ID NO: 15366 - DNA, 20 bp, Artificial Sequence
  chemically synthesized
tggtggtggggggtgcgcac

SEQ ID NO: 15367 - DNA, 20 bp, Artificial Sequence
  chemically synthesized
ggtggtggggggtgcgcaca

SEQ ID NO: 15368 - DNA, 20 bp, Artificial Sequence
  chemically synthesized
cagggaatttaatttttcac

SEQ ID NO: 15369 - DNA, 20 bp, Artificial Sequence
  chemically synthesized
agggaatttaatttttcact

SEQ ID NO: 15370 - DNA, 20 bp, Artificial Sequence
  chemically synthesized
tttaatttttcactgggccc

SEQ ID NO: 15371 - DNA, 20 bp, Artificial Sequence
  chemically synthesized
ctggaacttgtcacacactt

SEQ ID NO: 15372 - DNA, 20 bp, Artificial Sequence
  chemically synthesized
gaacttgtcacacacttcgg

SEQ ID NO: 15373 - DNA, 20 bp, Artificial Sequence
  chemically synthesized
cttcggaagctcccccaccc

SEQ ID NO: 15374 - DNA, 20 bp, Artificial Sequence
  chemically synthesized
ccccaccccggcacgttgcg

SEQ ID NO: 15375 - DNA, 20 bp, Artificial Sequence
  chemically synthesized
tcccccgcccccaactcccc

SEQ ID NO: 15376 - DNA, 20 bp, Artificial Sequence
  chemically synthesized
cccaactcccccggccgcgc

SEQ ID NO: 15377 - DNA, 20 bp, Artificial Sequence
  chemically synthesized
tcccccggccgcgccggatg

SEQ ID NO: 15378 - DNA, 20 bp, Artificial Sequence
  chemically synthesized
cggccgcgccggatgcggat

SEQ ID NO: 15379 - DNA, 20 bp, Artificial Sequence
  chemically synthesized
cgccggatgcggatcagacg

SEQ ID NO: 15380 - DNA, 20 bp, Artificial Sequence
  chemically synthesized
tgcggatcagacgcggcgcg

SEQ ID NO: 15381 - DNA, 20 bp, Artificial Sequence
  chemically synthesized
ggatcagacgcggcgcgcgg

SEQ ID NO: 15382 - DNA, 20 bp, Artificial Sequence
  chemically synthesized
acgcggcgcgcggcggtgtg

SEQ ID NO: 15383 - DNA, 20 bp, Artificial Sequence
  chemically synthesized
cgcgcggcggtgtgaagtta

SEQ ID NO: 15384 - DNA, 20 bp, Artificial Sequence
  chemically synthesized
ggcggtgtgaagttacagcc

SEQ ID NO: 15385 - DNA, 20 bp, Artificial Sequence
  chemically synthesized
gtgtgaagttacagcccggc

SEQ ID NO: 15386 - DNA, 20 bp, Artificial Sequence
  chemically synthesized
tgtgaagttacagcccggcc

SEQ ID NO: 15387 - DNA, 20 bp, Artificial Sequence
  chemically synthesized
gttacagcccggccaggtac

SEQ ID NO: 15388 - DNA, 20 bp, Artificial Sequence
  chemically synthesized
acagcccggccaggtaccgg

SEQ ID NO: 15389 - DNA, 20 bp, Artificial Sequence
  chemically synthesized
cagcccggccaggtaccggc

SEQ ID NO: 15390 - DNA, 20 bp, Artificial Sequence
  chemically synthesized
cccggccaggtaccggcggg

SEQ ID NO: 15391 - DNA, 20 bp, Artificial Sequence
  chemically synthesized
ccggccaggtaccggcggga

SEQ ID NO: 15392 - DNA, 20 bp, Artificial Sequence
  chemically synthesized
gccaggtaccggcgggaagg

SEQ ID NO: 15393 - DNA, 20 bp, Artificial Sequence
  chemically synthesized
ccaggtaccggcgggaagga

SEQ ID NO: 15394 - DNA, 20 bp, Artificial Sequence
  chemically synthesized
caggtaccggcgggaaggaa

SEQ ID NO: 15395 - DNA, 20 bp, Artificial Sequence
  chemically synthesized
gtaccggcgggaaggaaggg

SEQ ID NO: 15396 - DNA, 20 bp, Artificial Sequence
  chemically synthesized
ggaaggaagggcagtgttcg

SEQ ID NO: 15397 - DNA, 20 bp, Artificial Sequence
  chemically synthesized
gaaggaagggcagtgttcgc

SEQ ID NO: 15398 - DNA, 20 bp, Artificial Sequence
  chemically synthesized
agggcagtgttcgcaggact

SEQ ID NO: 15399 - DNA, 20 bp, Artificial Sequence
  chemically synthesized
gggcagtgttcgcaggactc

SEQ ID NO: 15400 - DNA, 20 bp, Artificial Sequence
  chemically synthesized
agtgttcgcaggactcggga

SEQ ID NO: 15401 - DNA, 20 bp, Artificial Sequence
  chemically synthesized
ttcgcaggactcgggaaagt

SEQ ID NO: 15402 - DNA, 20 bp, Artificial Sequence
  chemically synthesized
tcgcaggactcgggaaagtc

SEQ ID NO: 15403 - DNA, 20 bp, Artificial Sequence
  chemically synthesized
gggaaagtcaggcccttctt

SEQ ID NO: 15404 - DNA, 20 bp, Artificial Sequence
  chemically synthesized
aaagtcaggcccttcttcgg

SEQ ID NO: 15405 - DNA, 20 bp, Artificial Sequence
  chemically synthesized
aagtcaggcccttcttcgga

SEQ ID NO: 15406 - DNA, 20 bp, Artificial Sequence
  chemically synthesized
ggcccttcttcggaaggatg

SEQ ID NO: 15407 - DNA, 20 bp, Artificial Sequence
  chemically synthesized
ccttcttcggaaggatgcag

SEQ ID NO: 15408 - DNA, 20 bp, Artificial Sequence
  chemically synthesized
cttcttcggaaggatgcagt

SEQ ID NO: 15409 - DNA, 20 bp, Artificial Sequence
  chemically synthesized
ttcttcggaaggatgcagtg

SEQ ID NO: 15410 - DNA, 20 bp, Artificial Sequence
  chemically synthesized
tcttcggaaggatgcagtgg

SEQ ID NO: 15411 - DNA, 20 bp, Artificial Sequence
  chemically synthesized
aaggatgcagtgggggctca

SEQ ID NO: 15412 - DNA, 20 bp, Artificial Sequence
  chemically synthesized
aggatgcagtgggggctcaa

SEQ ID NO: 15413 - DNA, 20 bp, Artificial Sequence
  chemically synthesized
tgcagtgggggctcaaagga

SEQ ID NO: 15414 - DNA, 20 bp, Artificial Sequence
  chemically synthesized
tgggggctcaaaggacagac

SEQ ID NO: 15415 - DNA, 20 bp, Artificial Sequence
  chemically synthesized
gggggctcaaaggacagacc

SEQ ID NO: 15416 - DNA, 20 bp, Artificial Sequence
  chemically synthesized
ggggctcaaaggacagaccg

SEQ ID NO: 15417 - DNA, 20 bp, Artificial Sequence
  chemically synthesized
aaaggacagaccggggcgcg

SEQ ID NO: 15418 - DNA, 20 bp, Artificial Sequence
  chemically synthesized
acagaccggggcgcgcagtc

SEQ ID NO: 15419 - DNA, 20 bp, Artificial Sequence
  chemically synthesized
cagaccggggcgcgcagtcc

SEQ ID NO: 15420 - DNA, 20 bp, Artificial Sequence
  chemically synthesized
cctcgtacccctctccctcc

SEQ ID NO: 15421 - DNA, 20 bp, Artificial Sequence
  chemically synthesized
ctcgtacccctctccctcct

SEQ ID NO: 15422 - DNA, 20 bp, Artificial Sequence
  chemically synthesized
tctccctcctgggtccatct

SEQ ID NO: 15423 - DNA, 20 bp, Artificial Sequence
  chemically synthesized
ctccctcctgggtccatctt

SEQ ID NO: 15424 - DNA, 20 bp, Artificial Sequence
  chemically synthesized
gggtccatcttgggacactc

SEQ ID NO: 15425 - DNA, 20 bp, Artificial Sequence
  chemically synthesized
ggtccatcttgggacactct

SEQ ID NO: 15426 - DNA, 20 bp, Artificial Sequence
  chemically synthesized
catcttgggacactctaggc

SEQ ID NO: 15427 - DNA, 20 bp, Artificial Sequence
  chemically synthesized
atcttgggacactctaggct

SEQ ID NO: 15428 - DNA, 20 bp, Artificial Sequence
  chemically synthesized
cttgggacactctaggctgg

SEQ ID NO: 15429 - DNA, 20 bp, Artificial Sequence
  chemically synthesized
ttgggacactctaggctggg

SEQ ID NO: 15430 - DNA, 20 bp, Artificial Sequence
  chemically synthesized
tgggacactctaggctggga

SEQ ID NO: 15431 - DNA, 20 bp, Artificial Sequence
  chemically synthesized
acactctaggctgggagggt

SEQ ID NO: 15432 - DNA, 20 bp, Artificial Sequence
  chemically synthesized
agtaccccctcctcctgtcc

SEQ ID NO: 15433 - DNA, 20 bp, Artificial Sequence
  chemically synthesized
gtaccccctcctcctgtccc

SEQ ID NO: 15434 - DNA, 20 bp, Artificial Sequence
  chemically synthesized
taccccctcctcctgtcccg

SEQ ID NO: 15435 - DNA, 20 bp, Artificial Sequence
  chemically synthesized
ctcctcctgtcccggggtta

SEQ ID NO: 15436 - DNA, 20 bp, Artificial Sequence
  chemically synthesized
tcctcctgtcccggggttaa

SEQ ID NO: 15437 - DNA, 20 bp, Artificial Sequence
  chemically synthesized
cctcctgtcccggggttaaa

SEQ ID NO: 15438 - DNA, 20 bp, Artificial Sequence
  chemically synthesized
ctgtcccggggttaaagggc

SEQ ID NO: 15439 - DNA, 20 bp, Artificial Sequence
  chemically synthesized
ccggggttaaagggccagtt

SEQ ID NO: 15440 - DNA, 20 bp, Artificial Sequence
  chemically synthesized
cggggttaaagggccagttt

SEQ ID NO: 15441 - DNA, 20 bp, Artificial Sequence
  chemically synthesized
gggttaaagggccagtttgg

SEQ ID NO: 15442 - DNA, 20 bp, Artificial Sequence
  chemically synthesized
ggttaaagggccagtttggg

SEQ ID NO: 15443 - DNA, 20 bp, Artificial Sequence
  chemically synthesized
gttaaagggccagtttggga

SEQ ID NO: 15444 - DNA, 20 bp, Artificial Sequence
  chemically synthesized
ttaaagggccagtttgggag

SEQ ID NO: 15445 - DNA, 20 bp, Artificial Sequence
  chemically synthesized
taaagggccagtttgggagg

SEQ ID NO: 15446 - DNA, 20 bp, Artificial Sequence
  chemically synthesized
gggccagtttgggagggggt

SEQ ID NO: 15447 - DNA, 20 bp, Artificial Sequence
  chemically synthesized
ggccagtttgggagggggtg

SEQ ID NO: 15448 - DNA, 20 bp, Artificial Sequence
  chemically synthesized
gccagtttgggagggggtga

SEQ ID NO: 15449 - DNA, 20 bp, Artificial Sequence
  chemically synthesized
ccagtttgggagggggtgag

SEQ ID NO: 15450 - DNA, 20 bp, Artificial Sequence
  chemically synthesized
cagtttgggagggggtgagg

SEQ ID NO: 15451 - DNA, 20 bp, Artificial Sequence
  chemically synthesized
ttctttctgtcctcattttc

SEQ ID NO: 15452 - DNA, 20 bp, Artificial Sequence
  chemically synthesized
tctttctgtcctcattttct

SEQ ID NO: 15453 - DNA, 20 bp, Artificial Sequence
  chemically synthesized
gtcctcattttctgggtgct

SEQ ID NO: 15454 - DNA, 20 bp, Artificial Sequence
  chemically synthesized
cctcattttctgggtgctca

SEQ ID NO: 15455 - DNA, 20 bp, Artificial Sequence
  chemically synthesized
ctcattttctgggtgctcag

SEQ ID NO: 15456 - DNA, 20 bp, Artificial Sequence
  chemically synthesized
tcattttctgggtgctcaga

SEQ ID NO: 15457 - DNA, 20 bp, Artificial Sequence
  chemically synthesized
cattttctgggtgctcagag

SEQ ID NO: 15458 - DNA, 20 bp, Artificial Sequence
  chemically synthesized
attttctgggtgctcagagg

SEQ ID NO: 15459 - DNA, 20 bp, Artificial Sequence
  chemically synthesized
ttctgggtgctcagaggggg

SEQ ID NO: 15460 - DNA, 20 bp, Artificial Sequence
  chemically synthesized
tctgggtgctcagagggggc

SEQ ID NO: 15461 - DNA, 20 bp, Artificial Sequence
  chemically synthesized
tgggtgctcagagggggcag

SEQ ID NO: 15462 - DNA, 20 bp, Artificial Sequence
  chemically synthesized
agagggggcaggagccatcc

SEQ ID NO: 15463 - DNA, 20 bp, Artificial Sequence
  chemically synthesized
gcaggagccatcccggtcct

SEQ ID NO: 15464 - DNA, 20 bp, Artificial Sequence
  chemically synthesized
cgccccccgcctctgctatg

SEQ ID NO: 15465 - DNA, 20 bp, Artificial Sequence
  chemically synthesized
gccccccgcctctgctatgt

SEQ ID NO: 15466 - DNA, 20 bp, Artificial Sequence
  chemically synthesized
ctctgctatgtgggctgaat

SEQ ID NO: 15467 - DNA, 20 bp, Artificial Sequence
  chemically synthesized
tgtgggctgaatgagccatt

SEQ ID NO: 15468 - DNA, 20 bp, Artificial Sequence
  chemically synthesized
tgaatgagccattcggtcgc

SEQ ID NO: 15469 - DNA, 20 bp, Artificial Sequence
  chemically synthesized
gaatgagccattcggtcgct

SEQ ID NO: 15470 - DNA, 20 bp, Artificial Sequence
  chemically synthesized
atgagccattcggtcgctag

SEQ ID NO: 15471 - DNA, 20 bp, Artificial Sequence
  chemically synthesized
tgagccattcggtcgctagg

SEQ ID NO: 15472 - DNA, 20 bp, Artificial Sequence
  chemically synthesized
gccattcggtcgctaggagg

SEQ ID NO: 15473 - DNA, 20 bp, Artificial Sequence
  chemically synthesized
cggtcgctaggaggcagaac

SEQ ID NO: 15474 - DNA, 20 bp, Artificial Sequence
  chemically synthesized
ctaggaggcagaacaagatc

SEQ ID NO: 15475 - DNA, 20 bp, Artificial Sequence
  chemically synthesized
gaggcagaacaagatcaaga

SEQ ID NO: 15476 - DNA, 20 bp, Artificial Sequence
  chemically synthesized
agaacaagatcaagaaagct

SEQ ID NO: 15477 - DNA, 20 bp, Artificial Sequence
  chemically synthesized
cagcgaacttgaacctgtac

SEQ ID NO: 15478 - DNA, 20 bp, Artificial Sequence
  chemically synthesized
gcgaacttgaacctgtacca

SEQ ID NO: 15479 - DNA, 20 bp, Artificial Sequence
  chemically synthesized
agcctcccccacctcctgcc

SEQ ID NO: 15480 - DNA, 20 bp, Artificial Sequence
  chemically synthesized
cctgcccggcgattctcgtc

SEQ ID NO: 15481 - DNA, 20 bp, Artificial Sequence
  chemically synthesized
ctgcccggcgattctcgtcc

SEQ ID NO: 15482 - DNA, 20 bp, Artificial Sequence
  chemically synthesized
tgcccggcgattctcgtccg

SEQ ID NO: 15483 - DNA, 20 bp, Artificial Sequence
  chemically synthesized
cccggcgattctcgtccggg

SEQ ID NO: 15484 - DNA, 20 bp, Artificial Sequence
  chemically synthesized
ccggcgattctcgtccgggg

SEQ ID NO: 15485 - DNA, 20 bp, Artificial Sequence
  chemically synthesized
attctcgtccggggaggaac

SEQ ID NO: 15486 - DNA, 20 bp, Artificial Sequence
  chemically synthesized
cggggaggaacgagctttgc

SEQ ID NO: 15487 - DNA, 20 bp, Artificial Sequence
  chemically synthesized
ggggaggaacgagctttgcg

SEQ ID NO: 15488 - DNA, 20 bp, Artificial Sequence
  chemically synthesized
gggaggaacgagctttgcga

SEQ ID NO: 15489 - DNA, 20 bp, Artificial Sequence
  chemically synthesized
aggaacgagctttgcgaggg

SEQ ID NO: 15490 - DNA, 20 bp, Artificial Sequence
  chemically synthesized
ggaacgagctttgcgagggt

SEQ ID NO: 15491 - DNA, 20 bp, Artificial Sequence
  chemically synthesized
gaacgagctttgcgagggtg

SEQ ID NO: 15492 - DNA, 20 bp, Artificial Sequence
  chemically synthesized
aacgagctttgcgagggtgg

SEQ ID NO: 15493 - DNA, 20 bp, Artificial Sequence
  chemically synthesized
gagctttgcgagggtggggg

SEQ ID NO: 15494 - DNA, 20 bp, Artificial Sequence
  chemically synthesized
agctttgcgagggtgggggt

SEQ ID NO: 15495 - DNA, 20 bp, Artificial Sequence
  chemically synthesized
gctttgcgagggtgggggtg

SEQ ID NO: 15496 - DNA, 20 bp, Artificial Sequence
  chemically synthesized
ctttgcgagggtgggggtgg

SEQ ID NO: 15497 - DNA, 20 bp, Artificial Sequence
  chemically synthesized
tttgcgagggtgggggtggg

SEQ ID NO: 15498 - DNA, 20 bp, Artificial Sequence
  chemically synthesized
cgagggtgggggtgggggga

SEQ ID NO: 15499 - DNA, 20 bp, Artificial Sequence
  chemically synthesized
gtgggggtggggggaaagaa

SEQ ID NO: 15500 - DNA, 20 bp, Artificial Sequence
  chemically synthesized
gggtggggggaaagaacggt

SEQ ID NO: 15501 - DNA, 20 bp, Artificial Sequence
  chemically synthesized
ggtggggggaaagaacggtt

SEQ ID NO: 15502 - DNA, 20 bp, Artificial Sequence
  chemically synthesized
ggggggaaagaacggttagg

SEQ ID NO: 15503 - DNA, 20 bp, Artificial Sequence
  chemically synthesized
tttgactttaaaaatgcttc

SEQ ID NO: 15504 - DNA, 20 bp, Artificial Sequence
  chemically synthesized
actttaaaaatgcttctggc

SEQ ID NO: 15505 - DNA, 20 bp, Artificial Sequence
  chemically synthesized
ctttaaaaatgcttctggcc

SEQ ID NO: 15506 - DNA, 20 bp, Artificial Sequence
  chemically synthesized
tttaaaaatgcttctggccg

SEQ ID NO: 15507 - DNA, 20 bp, Artificial Sequence
  chemically synthesized
aatgcttctggccggggccg

SEQ ID NO: 15508 - DNA, 20 bp, Artificial Sequence
  chemically synthesized
tgcttctggccggggccgcg

SEQ ID NO: 15509 - DNA, 20 bp, Artificial Sequence
  chemically synthesized
ttctggccggggccgcggag

SEQ ID NO: 15510 - DNA, 20 bp, Artificial Sequence
  chemically synthesized
cggggccgcggagaagcgac

SEQ ID NO: 15511 - DNA, 20 bp, Artificial Sequence
  chemically synthesized
ggggccgcggagaagcgacc

SEQ ID NO: 15512 - DNA, 20 bp, Artificial Sequence
  chemically synthesized
cggagaagcgaccgggcgcg

SEQ ID NO: 15513 - DNA, 20 bp, Artificial Sequence
  chemically synthesized
cggccgacacccccgtgcgc

SEQ ID NO: 15514 - DNA, 20 bp, Artificial Sequence
  chemically synthesized
gacacccccgtgcgcgagct

SEQ ID NO: 15515 - DNA, 20 bp, Artificial Sequence
  chemically synthesized
ccccgtgcgcgagctgagac

SEQ ID NO: 15516 - DNA, 20 bp, Artificial Sequence
  chemically synthesized
gagctgagaccagcgcgcgc

SEQ ID NO: 15517 - DNA, 20 bp, Artificial Sequence
  chemically synthesized
agctgagaccagcgcgcgcc

SEQ ID NO: 15518 - DNA, 20 bp, Artificial Sequence
  chemically synthesized
agaccagcgcgcgccgggct

SEQ ID NO: 15519 - DNA, 20 bp, Artificial Sequence
  chemically synthesized
accagcgcgcgccgggctcg

SEQ ID NO: 15520 - DNA, 20 bp, Artificial Sequence
  chemically synthesized
cgcgcgccgggctcggagca

SEQ ID NO: 15521 - DNA, 20 bp, Artificial Sequence
  chemically synthesized
gccgggctcggagcacggtg

SEQ ID NO: 15522 - DNA, 20 bp, Artificial Sequence
  chemically synthesized
gtgcagttttcgctttcttt

SEQ ID NO: 15523 - DNA, 20 bp, Artificial Sequence
  chemically synthesized
tgcagttttcgctttctttc

SEQ ID NO: 15524 - DNA, 20 bp, Artificial Sequence
  chemically synthesized
gcagttttcgctttctttcg

SEQ ID NO: 15525 - DNA, 20 bp, Artificial Sequence
  chemically synthesized
ttttcgctttctttcggggc

SEQ ID NO: 15526 - DNA, 20 bp, Artificial Sequence
  chemically synthesized
tctttcggggccggcatttt

SEQ ID NO: 15527 - DNA, 20 bp, Artificial Sequence
  chemically synthesized
ttcggggccggcatttttgg

SEQ ID NO: 15528 - DNA, 20 bp, Artificial Sequence
  chemically synthesized
tcggggccggcatttttggt

SEQ ID NO: 15529 - DNA, 20 bp, Artificial Sequence
  chemically synthesized
cggggccggcatttttggta

SEQ ID NO: 15530 - DNA, 20 bp, Artificial Sequence
  chemically synthesized
gggccggcatttttggtagg

SEQ ID NO: 15531 - DNA, 20 bp, Artificial Sequence
  chemically synthesized
ggccggcatttttggtaggg

SEQ ID NO: 15532 - DNA, 20 bp, Artificial Sequence
  chemically synthesized
catttttggtagggaggaac

SEQ ID NO: 15533 - DNA, 20 bp, Artificial Sequence
  chemically synthesized
atttttggtagggaggaacc

SEQ ID NO: 15534 - DNA, 20 bp, Artificial Sequence
  chemically synthesized
ttttggtagggaggaaccgg

SEQ ID NO: 15535 - DNA, 20 bp, Artificial Sequence
  chemically synthesized
ggaaccgggagtgcgcgctc

SEQ ID NO: 15536 - DNA, 20 bp, Artificial Sequence
  chemically synthesized
gaaccgggagtgcgcgctct

SEQ ID NO: 15537 - DNA, 20 bp, Artificial Sequence
  chemically synthesized
aaccgggagtgcgcgctcta

SEQ ID NO: 15538 - DNA, 20 bp, Artificial Sequence
  chemically synthesized
gagtgcgcgctctagggctt

SEQ ID NO: 15539 - DNA, 20 bp, Artificial Sequence
  chemically synthesized
agtgcgcgctctagggcttc

SEQ ID NO: 15540 - DNA, 20 bp, Artificial Sequence
  chemically synthesized
gtgcgcgctctagggcttcg

SEQ ID NO: 15541 - DNA, 20 bp, Artificial Sequence
  chemically synthesized
cgctctagggcttcggggca

SEQ ID NO: 15542 - DNA, 20 bp, Artificial Sequence
  chemically synthesized
agggcttcggggcatggccg

SEQ ID NO: 15543 - DNA, 20 bp, Artificial Sequence
  chemically synthesized
ggcttcggggcatggccgaa

SEQ ID NO: 15544 - DNA, 20 bp, Artificial Sequence
  chemically synthesized
gcttcggggcatggccgaag

SEQ ID NO: 15545 - DNA, 20 bp, Artificial Sequence
  chemically synthesized
cttcggggcatggccgaaga

SEQ ID NO: 15546 - DNA, 20 bp, Artificial Sequence
  chemically synthesized
ttcggggcatggccgaagag

SEQ ID NO: 15547 - DNA, 20 bp, Artificial Sequence
  chemically synthesized
tcggggcatggccgaagagg

SEQ ID NO: 15548 - DNA, 20 bp, Artificial Sequence
  chemically synthesized
catggccgaagagggggata

SEQ ID NO: 15549 - DNA, 20 bp, Artificial Sequence
  chemically synthesized
gccgaagagggggatatggc

SEQ ID NO: 15550 - DNA, 20 bp, Artificial Sequence
  chemically synthesized
ggatatggcaagtttgcact

SEQ ID NO: 15551 - DNA, 20 bp, Artificial Sequence
  chemically synthesized
gcaagtttgcacttggtctc

SEQ ID NO: 15552 - DNA, 20 bp, Artificial Sequence
  chemically synthesized
caccccctcacccccatgca

SEQ ID NO: 15553 - DNA, 20 bp, Artificial Sequence
  chemically synthesized
cctcacccccatgcaaagca

SEQ ID NO: 15554 - DNA, 20 bp, Artificial Sequence
  chemically synthesized
cccatgcaaagcacagacct

SEQ ID NO: 15555 - DNA, 20 bp, Artificial Sequence
  chemically synthesized
atgcaaagcacagacctcgg

SEQ ID NO: 15556 - DNA, 20 bp, Artificial Sequence
  chemically synthesized
agcacagacctcggtggcct

SEQ ID NO: 15557 - DNA, 20 bp, Artificial Sequence
  chemically synthesized
cagacctcggtggcctcggc

SEQ ID NO: 15558 - DNA, 20 bp, Artificial Sequence
  chemically synthesized
ggtggcctcggctggcttgc

SEQ ID NO: 15559 - DNA, 20 bp, Artificial Sequence
  chemically synthesized
gtggcctcggctggcttgct

SEQ ID NO: 15560 - DNA, 20 bp, Artificial Sequence
  chemically synthesized
gcctcggctggcttgctggg

SEQ ID NO: 15561 - DNA, 20 bp, Artificial Sequence
  chemically synthesized
tggcttgctgggcggctctg

SEQ ID NO: 15562 - DNA, 20 bp, Artificial Sequence
  chemically synthesized
cgacaccccccctctcgcct

SEQ ID NO: 15563 - DNA, 20 bp, Artificial Sequence
  chemically synthesized
acaccccccctctcgcctcg

SEQ ID NO: 15564 - DNA, 20 bp, Artificial Sequence
  chemically synthesized
ccccctctcgcctcggagct

SEQ ID NO: 15565 - DNA, 20 bp, Artificial Sequence
  chemically synthesized
ggagctcggaatcacaacaa

SEQ ID NO: 15566 - DNA, 20 bp, Artificial Sequence
  chemically synthesized
cggaatcacaacaatagtaa

SEQ ID NO: 15567 - DNA, 20 bp, Artificial Sequence
  chemically synthesized
tagttatcatcataatgatg

SEQ ID NO: 15568 - DNA, 20 bp, Artificial Sequence
  chemically synthesized
agttatcatcataatgatgc

SEQ ID NO: 15569 - DNA, 20 bp, Artificial Sequence
  chemically synthesized
tatcatcataatgatgcggg

SEQ ID NO: 15570 - DNA, 20 bp, Artificial Sequence
  chemically synthesized
atcatcataatgatgcgggc

SEQ ID NO: 15571 - DNA, 20 bp, Artificial Sequence
  chemically synthesized
atcataatgatgcgggcagg

SEQ ID NO: 15572 - DNA, 20 bp, Artificial Sequence
  chemically synthesized
tcattaataatgaataaccg

SEQ ID NO: 15573 - DNA, 20 bp, Artificial Sequence
  chemically synthesized
cagccgccgccgcgcacacc

SEQ ID NO: 15574 - DNA, 20 bp, Artificial Sequence
  chemically synthesized
cgccgcgcacacccagtgcc

SEQ ID NO: 15575 - DNA, 20 bp, Artificial Sequence
  chemically synthesized
acacccagtgcccagaattg

SEQ ID NO: 15576 - DNA, 20 bp, Artificial Sequence
  chemically synthesized
cacccagtgcccagaattgc

SEQ ID NO: 15577 - DNA, 20 bp, Artificial Sequence
  chemically synthesized
acccagtgcccagaattgcg

SEQ ID NO: 15578 - DNA, 20 bp, Artificial Sequence
  chemically synthesized
cccagtgcccagaattgcgg

SEQ ID NO: 15579 - DNA, 20 bp, Artificial Sequence
  chemically synthesized
ttgcgggggaaatgcatttg

SEQ ID NO: 15580 - DNA, 20 bp, Artificial Sequence
  chemically synthesized
gcgggggaaatgcatttgca

SEQ ID NO: 15581 - DNA, 20 bp, Artificial Sequence
  chemically synthesized
gcatttgcagagatccccca

SEQ ID NO: 15582 - DNA, 20 bp, Artificial Sequence
  chemically synthesized
cagagatcccccaaagtaaa

SEQ ID NO: 15583 - DNA, 20 bp, Artificial Sequence
  chemically synthesized
tcccccaaagtaaaaagtgt

SEQ ID NO: 15584 - DNA, 20 bp, Artificial Sequence
  chemically synthesized
aagtaaaaagtgtaagcttg

SEQ ID NO: 15585 - DNA, 20 bp, Artificial Sequence
  chemically synthesized
aaagtgtaagcttgtggaca

SEQ ID NO: 15586 - DNA, 20 bp, Artificial Sequence
  chemically synthesized
tgtggacacagaatgaatct

SEQ ID NO: 15587 - DNA, 20 bp, Artificial Sequence
  chemically synthesized
gtggacacagaatgaatctc

SEQ ID NO: 15588 - DNA, 20 bp, Artificial Sequence
  chemically synthesized
gaatctcaggacccgcgctt

SEQ ID NO: 15589 - DNA, 20 bp, Artificial Sequence
  chemically synthesized
aatctcaggacccgcgcttg

SEQ ID NO: 15590 - DNA, 20 bp, Artificial Sequence
  chemically synthesized
acccgcgcttgaggtgtgtg

SEQ ID NO: 15591 - DNA, 20 bp, Artificial Sequence
  chemically synthesized
ccgcgcttgaggtgtgtgcg

SEQ ID NO: 15592 - DNA, 20 bp, Artificial Sequence
  chemically synthesized
gaggtgtgtgcggagatact

SEQ ID NO: 15593 - DNA, 20 bp, Artificial Sequence
  chemically synthesized
cggagatactgagactgcac

SEQ ID NO: 15594 - DNA, 20 bp, Artificial Sequence
  chemically synthesized
ggagatactgagactgcacc

SEQ ID NO: 15595 - DNA, 20 bp, Artificial Sequence
  chemically synthesized
tgagactgcaccaggttaac

SEQ ID NO: 15596 - DNA, 20 bp, Artificial Sequence
  chemically synthesized
actgcaccaggttaaccagc

SEQ ID NO: 15597 - DNA, 20 bp, Artificial Sequence
  chemically synthesized
ctgcaccaggttaaccagcc

SEQ ID NO: 15598 - DNA, 20 bp, Artificial Sequence
  chemically synthesized
tcacttcctttttcaccaac

SEQ ID NO: 15599 - DNA, 20 bp, Artificial Sequence
  chemically synthesized
cttcctttttcaccaactgg

SEQ ID NO: 15600 - DNA, 20 bp, Artificial Sequence
  chemically synthesized
ttcctttttcaccaactggc

SEQ ID NO: 15601 - DNA, 20 bp, Artificial Sequence
  chemically synthesized
ttttcaccaactggcaggcc

SEQ ID NO: 15602 - DNA, 20 bp, Artificial Sequence
  chemically synthesized
tttcaccaactggcaggccc

SEQ ID NO: 15603 - DNA, 20 bp, Artificial Sequence
  chemically synthesized
ttcaccaactggcaggccca

SEQ ID NO: 15604 - DNA, 20 bp, Artificial Sequence
  chemically synthesized
cccagggaaccgtcaccccg

SEQ ID NO: 15605 - DNA, 20 bp, Artificial Sequence
  chemically synthesized
ggaaccgtcaccccgcggcc

SEQ ID NO: 15606 - DNA, 20 bp, Artificial Sequence
  chemically synthesized
ccgtcaccccgcggccgagc

SEQ ID NO: 15607 - DNA, 20 bp, Artificial Sequence
  chemically synthesized
accccgcggccgagctggcc

SEQ ID NO: 15608 - DNA, 20 bp, Artificial Sequence
  chemically synthesized
cgcggccgagctggccgagc

SEQ ID NO: 15609 - DNA, 20 bp, Artificial Sequence
  chemically synthesized
gccgagctggccgagctgga

SEQ ID NO: 15610 - DNA, 20 bp, Artificial Sequence
  chemically synthesized
ccgagctggccgagctggac

SEQ ID NO: 15611 - DNA, 20 bp, Artificial Sequence
  chemically synthesized
ctggccgagctggacgggca

SEQ ID NO: 15612 - DNA, 20 bp, Artificial Sequence
  chemically synthesized
ggccgagctggacgggcatg

SEQ ID NO: 15613 - DNA, 20 bp, Artificial Sequence
  chemically synthesized
gccgagctggacgggcatgg

SEQ ID NO: 15614 - DNA, 20 bp, Artificial Sequence
  chemically synthesized
gagctggacgggcatggagg

SEQ ID NO: 15615 - DNA, 20 bp, Artificial Sequence
  chemically synthesized
ctggacgggcatggaggcag

SEQ ID NO: 15616 - DNA, 20 bp, Artificial Sequence
  chemically synthesized
acgggcatggaggcagcagt

SEQ ID NO: 15617 - DNA, 20 bp, Artificial Sequence
  chemically synthesized
cgggcatggaggcagcagtc

SEQ ID NO: 15618 - DNA, 20 bp, Artificial Sequence
  chemically synthesized
gggcatggaggcagcagtca

SEQ ID NO: 15619 - DNA, 20 bp, Artificial Sequence
  chemically synthesized
gaggcagcagtcagggcccc

SEQ ID NO: 15620 - DNA, 20 bp, Artificial Sequence
  chemically synthesized
ccctggctgccctccgtctc

SEQ ID NO: 15621 - DNA, 20 bp, Artificial Sequence
  chemically synthesized
cctggctgccctccgtctcc

SEQ ID NO: 15622 - DNA, 20 bp, Artificial Sequence
  chemically synthesized
gccctccgtctccgggcccc

SEQ ID NO: 15623 - DNA, 20 bp, Artificial Sequence
  chemically synthesized
ccctccgtctccgggccccc

SEQ ID NO: 15624 - DNA, 20 bp, Artificial Sequence
  chemically synthesized
tctccgggcccccgggcccc

SEQ ID NO: 15625 - DNA, 20 bp, Artificial Sequence
  chemically synthesized
ctccgggcccccgggcccca

SEQ ID NO: 15626 - DNA, 20 bp, Artificial Sequence
  chemically synthesized
ccccgggccccaaggccccg

SEQ ID NO: 15627 - DNA, 20 bp, Artificial Sequence
  chemically synthesized
gccgctgctgcacgtgttcg

SEQ ID NO: 15628 - DNA, 20 bp, Artificial Sequence
  chemically synthesized
ctgctgcacgtgttcgcagc

SEQ ID NO: 15629 - DNA, 20 bp, Artificial Sequence
  chemically synthesized
gcacgtgttcgcagcaagcg

SEQ ID NO: 15630 - DNA, 20 bp, Artificial Sequence
  chemically synthesized
cgtgttcgcagcaagcgcgg

SEQ ID NO: 15631 - DNA, 20 bp, Artificial Sequence
  chemically synthesized
gtgttcgcagcaagcgcggc

SEQ ID NO: 15632 - DNA, 20 bp, Artificial Sequence
  chemically synthesized
gttcgcagcaagcgcggcgg

SEQ ID NO: 15633 - DNA, 20 bp, Artificial Sequence
  chemically synthesized
gcaagcgcggcgggagcctg

SEQ ID NO: 15634 - DNA, 20 bp, Artificial Sequence
  chemically synthesized
gcgcggcgggagcctgcagc

SEQ ID NO: 15635 - DNA, 20 bp, Artificial Sequence
  chemically synthesized
acgctgctcgctttgtgcct

SEQ ID NO: 15636 - DNA, 20 bp, Artificial Sequence
  chemically synthesized
gctgctcgctttgtgcctca

SEQ ID NO: 15637 - DNA, 20 bp, Artificial Sequence
  chemically synthesized
gcccaacttcactttctgca

SEQ ID NO: 15638 - DNA, 20 bp, Artificial Sequence
  chemically synthesized
tctgcacggtccacccttgc

SEQ ID NO: 15639 - DNA, 20 bp, Artificial Sequence
  chemically synthesized
ctgcacggtccacccttgcc

SEQ ID NO: 15640 - DNA, 20 bp, Artificial Sequence
  chemically synthesized
tgcacggtccacccttgccg

SEQ ID NO: 15641 - DNA, 20 bp, Artificial Sequence
  chemically synthesized
ccttgccggggcccctgccc

SEQ ID NO: 15642 - DNA, 20 bp, Artificial Sequence
  chemically synthesized
cttgccggggcccctgcccc

SEQ ID NO: 15643 - DNA, 20 bp, Artificial Sequence
  chemically synthesized
gggcccctgccccgggcctg

SEQ ID NO: 15644 - DNA, 20 bp, Artificial Sequence
  chemically synthesized
tgccccgggcctgtagcccc

SEQ ID NO: 15645 - DNA, 20 bp, Artificial Sequence
  chemically synthesized
tgcttttcctctctgaattt

SEQ ID NO: 15646 - DNA, 20 bp, Artificial Sequence
  chemically synthesized
gtttgcttctttaccctgtt

SEQ ID NO: 15647 - DNA, 20 bp, Artificial Sequence
  chemically synthesized
tttaccctgttaagacaatc

SEQ ID NO: 15648 - DNA, 20 bp, Artificial Sequence
  chemically synthesized
ttaccctgttaagacaatca

SEQ ID NO: 15649 - DNA, 20 bp, Artificial Sequence
  chemically synthesized
accctgttaagacaatcaag

SEQ ID NO: 15650 - DNA, 20 bp, Artificial Sequence
  chemically synthesized
ctgttaagacaatcaaggag

SEQ ID NO: 15651 - DNA, 20 bp, Artificial Sequence
  chemically synthesized
tgttaagacaatcaaggaga

SEQ ID NO: 15652 - DNA, 20 bp, Artificial Sequence
  chemically synthesized
gacaatcaaggagaaggact

SEQ ID NO: 15653 - DNA, 20 bp, Artificial Sequence
  chemically synthesized
atcaaggagaaggacttgga

SEQ ID NO: 15654 - DNA, 20 bp, Artificial Sequence
  chemically synthesized
ggacttggaaagcaaacttg

SEQ ID NO: 15655 - DNA, 20 bp, Artificial Sequence
  chemically synthesized
ccccctccccctccgctccc

SEQ ID NO: 15656 - DNA, 20 bp, Artificial Sequence
  chemically synthesized
cctccccctccgctccccgg

SEQ ID NO: 15657 - DNA, 20 bp, Artificial Sequence
  chemically synthesized
tccttaccaacatttcctat

SEQ ID NO: 15658 - DNA, 20 bp, Artificial Sequence
  chemically synthesized
ccttaccaacatttcctata

SEQ ID NO: 15659 - DNA, 20 bp, Artificial Sequence
  chemically synthesized
tttattcttttgcaactaca

SEQ ID NO: 15660 - DNA, 20 bp, Artificial Sequence
  chemically synthesized
tattcttttgcaactacaca

SEQ ID NO: 15661 - DNA, 20 bp, Artificial Sequence
  chemically synthesized
ttcttttgcaactacacaga

SEQ ID NO: 15662 - DNA, 20 bp, Artificial Sequence
  chemically synthesized
tcttttgcaactacacagag

SEQ ID NO: 15663 - DNA, 20 bp, Artificial Sequence
  chemically synthesized
ttgcaactacacagagagga

SEQ ID NO: 15664 - DNA, 20 bp, Artificial Sequence
  chemically synthesized
gcaactacacagagaggaaa

SEQ ID NO: 15665 - DNA, 20 bp, Artificial Sequence
  chemically synthesized
cacagagaggaaagagatct

SEQ ID NO: 15666 - DNA, 20 bp, Artificial Sequence
  chemically synthesized
agagatctcagtctgtcact

SEQ ID NO: 15667 - DNA, 20 bp, Artificial Sequence
  chemically synthesized
cagtctgtcactgagacatt

SEQ ID NO: 15668 - DNA, 20 bp, Artificial Sequence
  chemically synthesized
actgagacattgagacgttc

SEQ ID NO: 15669 - DNA, 20 bp, Artificial Sequence
  chemically synthesized
ctgagacattgagacgttcc

SEQ ID NO: 15670 - DNA, 20 bp, Artificial Sequence
  chemically synthesized
gctgtcttgctgtttgaacg

SEQ ID NO: 15671 - DNA, 20 bp, Artificial Sequence
  chemically synthesized
gtcttgctgtttgaacgtag

SEQ ID NO: 15672 - DNA, 20 bp, Artificial Sequence
  chemically synthesized
tctatttcttcctcccctcg

SEQ ID NO: 15673 - DNA, 20 bp, Artificial Sequence
  chemically synthesized
tatttcttcctcccctcgta

SEQ ID NO: 15674 - DNA, 20 bp, Artificial Sequence
  chemically synthesized
tttcttcctcccctcgtaga

SEQ ID NO: 15675 - DNA, 20 bp, Artificial Sequence
  chemically synthesized
cccctcgtagagagaattcg

SEQ ID NO: 15676 - DNA, 20 bp, Artificial Sequence
  chemically synthesized
cactcccttccacttcaatc

SEQ ID NO: 15677 - DNA, 20 bp, Artificial Sequence
  chemically synthesized
actcccttccacttcaatcg

SEQ ID NO: 15678 - DNA, 20 bp, Artificial Sequence
  chemically synthesized
atcgaggactccctgctttg

SEQ ID NO: 15679 - DNA, 20 bp, Artificial Sequence
  chemically synthesized
aggactccctgctttgtagc

SEQ ID NO: 15680 - DNA, 20 bp, Artificial Sequence
  chemically synthesized
gactccctgctttgtagccg

SEQ ID NO: 15681 - DNA, 20 bp, Artificial Sequence
  chemically synthesized
cctgctttgtagccggagtt

SEQ ID NO: 15682 - DNA, 20 bp, Artificial Sequence
  chemically synthesized
ctgctttgtagccggagttt

SEQ ID NO: 15683 - DNA, 20 bp, Artificial Sequence
  chemically synthesized
tttgtagccggagtttaggc

SEQ ID NO: 15684 - DNA, 20 bp, Artificial Sequence
  chemically synthesized
tgtagccggagtttaggccg

SEQ ID NO: 15685 - DNA, 20 bp, Artificial Sequence
  chemically synthesized
ccggagtttaggccggagct

SEQ ID NO: 15686 - DNA, 20 bp, Artificial Sequence
  chemically synthesized
aggccggagcttagaaatgt

SEQ ID NO: 15687 - DNA, 20 bp, Artificial Sequence
  chemically synthesized
cttagaaatgttggtattgt

SEQ ID NO: 15688 - DNA, 20 bp, Artificial Sequence
  chemically synthesized
ttagaaatgttggtattgtt

SEQ ID NO: 15689 - DNA, 20 bp, Artificial Sequence
  chemically synthesized
tagaaatgttggtattgttg

SEQ ID NO: 15690 - DNA, 20 bp, Artificial Sequence
  chemically synthesized
atgttggtattgttggggcg

SEQ ID NO: 15691 - DNA, 20 bp, Artificial Sequence
  chemically synthesized
tgttggtattgttggggcga

SEQ ID NO: 15692 - DNA, 20 bp, Artificial Sequence
  chemically synthesized
ttggtattgttggggcgaag

SEQ ID NO: 15693 - DNA, 20 bp, Artificial Sequence
  chemically synthesized
tggtattgttggggcgaagg

SEQ ID NO: 15694 - DNA, 20 bp, Artificial Sequence
  chemically synthesized
attgttggggcgaaggagga

SEQ ID NO: 15695 - DNA, 20 bp, Artificial Sequence
  chemically synthesized
tgttggggcgaaggaggatg

SEQ ID NO: 15696 - DNA, 20 bp, Artificial Sequence
  chemically synthesized
aaggaggatggagttgaatt

SEQ ID NO: 15697 - DNA, 20 bp, Artificial Sequence
  chemically synthesized
aggaggatggagttgaattg

SEQ ID NO: 15698 - DNA, 20 bp, Artificial Sequence
  chemically synthesized
ggaggatggagttgaattga

SEQ ID NO: 15699 - DNA, 20 bp, Artificial Sequence
  chemically synthesized
aggatggagttgaattgagg

SEQ ID NO: 15700 - DNA, 20 bp, Artificial Sequence
  chemically synthesized
ggatggagttgaattgaggg

SEQ ID NO: 15701 - DNA, 20 bp, Artificial Sequence
  chemically synthesized
gatggagttgaattgaggga

SEQ ID NO: 15702 - DNA, 20 bp, Artificial Sequence
  chemically synthesized
atggagttgaattgagggag

SEQ ID NO: 15703 - DNA, 20 bp, Artificial Sequence
  chemically synthesized
tggagttgaattgagggagg

SEQ ID NO: 15704 - DNA, 20 bp, Artificial Sequence
  chemically synthesized
gaattgagggagggggtaaa

SEQ ID NO: 15705 - DNA, 20 bp, Artificial Sequence
  chemically synthesized
gagggagggggtaaatggct

SEQ ID NO: 15706 - DNA, 20 bp, Artificial Sequence
  chemically synthesized
agggagggggtaaatggctg

SEQ ID NO: 15707 - DNA, 20 bp, Artificial Sequence
  chemically synthesized
gggagggggtaaatggctga

SEQ ID NO: 15708 - DNA, 20 bp, Artificial Sequence
  chemically synthesized
gggggtaaatggctgagggt

SEQ ID NO: 15709 - DNA, 20 bp, Artificial Sequence
  chemically synthesized
ggggtaaatggctgagggtt

SEQ ID NO: 15710 - DNA, 20 bp, Artificial Sequence
  chemically synthesized
gtaaatggctgagggttagg

SEQ ID NO: 15711 - DNA, 20 bp, Artificial Sequence
  chemically synthesized
taaatggctgagggttagga

SEQ ID NO: 15712 - DNA, 20 bp, Artificial Sequence
  chemically synthesized
ctgagggttaggaaggtttt

SEQ ID NO: 15713 - DNA, 20 bp, Artificial Sequence
  chemically synthesized
tgagggttaggaaggttttt

SEQ ID NO: 15714 - DNA, 20 bp, Artificial Sequence
  chemically synthesized
gagggttaggaaggttttta

SEQ ID NO: 15715 - DNA, 20 bp, Artificial Sequence
  chemically synthesized
gttaggaaggtttttaggga

SEQ ID NO: 15716 - DNA, 20 bp, Artificial Sequence
  chemically synthesized
ttaggaaggtttttagggaa

SEQ ID NO: 15717 - DNA, 20 bp, Artificial Sequence
  chemically synthesized
taggaaggtttttagggaaa

SEQ ID NO: 15718 - DNA, 20 bp, Artificial Sequence
  chemically synthesized
aggaaggtttttagggaaag

SEQ ID NO: 15719 - DNA, 20 bp, Artificial Sequence
  chemically synthesized
ggggaatttgcattaaaatg

SEQ ID NO: 15720 - DNA, 20 bp, Artificial Sequence
  chemically synthesized
ggaatttgcattaaaatgca

SEQ ID NO: 15721 - DNA, 20 bp, Artificial Sequence
  chemically synthesized
ttaaaatgcagagaaattat

SEQ ID NO: 15722 - DNA, 20 bp, Artificial Sequence
  chemically synthesized
cagagaaattatcagatgcc

SEQ ID NO: 15723 - DNA, 20 bp, Artificial Sequence
  chemically synthesized
gaaattatcagatgcccaga

SEQ ID NO: 15724 - DNA, 20 bp, Artificial Sequence
  chemically synthesized
aaattatcagatgcccagaa

SEQ ID NO: 15725 - DNA, 20 bp, Artificial Sequence
  chemically synthesized
aggaaatgttgattgccact

SEQ ID NO: 15726 - DNA, 20 bp, Artificial Sequence
  chemically synthesized
atgttgattgccactgagaa

SEQ ID NO: 15727 - DNA, 20 bp, Artificial Sequence
  chemically synthesized
gaaaagatgtcaatgcaaat

SEQ ID NO: 15728 - DNA, 20 bp, Artificial Sequence
  chemically synthesized
aagatgtcaatgcaaatcag

SEQ ID NO: 15729 - DNA, 20 bp, Artificial Sequence
  chemically synthesized
aaatcagtagactacaccat

SEQ ID NO: 15730 - DNA, 20 bp, Artificial Sequence
  chemically synthesized
tctgatttttaataatatac

SEQ ID NO: 15731 - DNA, 20 bp, Artificial Sequence
  chemically synthesized
gcaatgataaaaacacgttt

SEQ ID NO: 15732 - DNA, 20 bp, Artificial Sequence
  chemically synthesized
ggtatttctctgaacaccac

SEQ ID NO: 15733 - DNA, 20 bp, Artificial Sequence
  chemically synthesized
ccactagccaaatgttttgc

SEQ ID NO: 15734 - DNA, 20 bp, Artificial Sequence
  chemically synthesized
cactagccaaatgttttgca

SEQ ID NO: 15735 - DNA, 20 bp, Artificial Sequence
  chemically synthesized
ctagccaaatgttttgcaag

SEQ ID NO: 15736 - DNA, 20 bp, Artificial Sequence
  chemically synthesized
gttaaacgtatttcatacat

SEQ ID NO: 15737 - DNA, 20 bp, Artificial Sequence
  chemically synthesized
agaatataattcttgttaat

SEQ ID NO: 15738 - DNA, 20 bp, Artificial Sequence
  chemically synthesized
aattagcaataatttacgtt

SEQ ID NO: 15739 - DNA, 20 bp, Artificial Sequence
  chemically synthesized
ttagcaataatttacgttaa

SEQ ID NO: 15740 - DNA, 20 bp, Artificial Sequence
  chemically synthesized
aataatttacgttaagagca

SEQ ID NO: 15741 - DNA, 20 bp, Artificial Sequence
  chemically synthesized
ttaagagcatagaaaatgtt

SEQ ID NO: 15742 - DNA, 20 bp, Artificial Sequence
  chemically synthesized
taagagcatagaaaatgttg

SEQ ID NO: 15743 - DNA, 20 bp, Artificial Sequence
  chemically synthesized
catagaaaatgttgaggtta

SEQ ID NO: 15744 - DNA, 20 bp, Artificial Sequence
  chemically synthesized
atagaaaatgttgaggttac

SEQ ID NO: 15745 - DNA, 20 bp, Artificial Sequence
  chemically synthesized
ttgatcatcttgttattttc

SEQ ID NO: 15746 - DNA, 20 bp, Artificial Sequence
  chemically synthesized
ttgcctcctataaaattaat

SEQ ID NO: 15747 - DNA, 20 bp, Artificial Sequence
  chemically synthesized
tgcctcctataaaattaatt

SEQ ID NO: 15748 - DNA, 20 bp, Artificial Sequence
  chemically synthesized
aaaattaattaggtgaaatg

SEQ ID NO: 15749 - DNA, 20 bp, Artificial Sequence
  chemically synthesized
aattaattaggtgaaatgtg

SEQ ID NO: 15750 - DNA, 20 bp, Artificial Sequence
  chemically synthesized
attaattaggtgaaatgtgg

SEQ ID NO: 15751 - DNA, 20 bp, Artificial Sequence
  chemically synthesized
gtgaaatgtggaggtgtaat

SEQ ID NO: 15752 - DNA, 20 bp, Artificial Sequence
  chemically synthesized
tgaattaccacttcatttcc

SEQ ID NO: 15753 - DNA, 20 bp, Artificial Sequence
  chemically synthesized
tcccggttttgattgtaaat

SEQ ID NO: 15754 - DNA, 20 bp, Artificial Sequence
  chemically synthesized
gttttgattgtaaatcagtt

SEQ ID NO: 15755 - DNA, 20 bp, Artificial Sequence
  chemically synthesized
atcagttcagtcactacatt

SEQ ID NO: 15756 - DNA, 20 bp, Artificial Sequence
  chemically synthesized
agttcagtcactacatttag

SEQ ID NO: 15757 - DNA, 20 bp, Artificial Sequence
  chemically synthesized
acatttagaagactttaacc

SEQ ID NO: 15758 - DNA, 20 bp, Artificial Sequence
  chemically synthesized
acctttaactatttgatacc

SEQ ID NO: 15759 - DNA, 20 bp, Artificial Sequence
  chemically synthesized
cctttaactatttgatacct

SEQ ID NO: 15760 - DNA, 20 bp, Artificial Sequence
  chemically synthesized
tttaactatttgatacctag

SEQ ID NO: 15761 - DNA, 20 bp, Artificial Sequence
  chemically synthesized
ctaaataatattcccacttt

SEQ ID NO: 15762 - DNA, 20 bp, Artificial Sequence
  chemically synthesized
tcccacttttagaaatgtgt

SEQ ID NO: 15763 - DNA, 20 bp, Artificial Sequence
  chemically synthesized
tttagaaatgtgtcagacct

SEQ ID NO: 15764 - DNA, 20 bp, Artificial Sequence
  chemically synthesized
ttagaaatgtgtcagacctt

SEQ ID NO: 15765 - DNA, 20 bp, Artificial Sequence
  chemically synthesized
gggaacaaaaaaaaaaaaaa

SEQ ID NO: 15766 - DNA, 20 bp, Artificial Sequence
  chemically synthesized
aaaaaaaaaaagaatcttaa

SEQ ID NO: 15767 - DNA, 20 bp, Artificial Sequence
  chemically synthesized
aaaaaaaagaatcttaacgg

SEQ ID NO: 15768 - DNA, 20 bp, Artificial Sequence
  chemically synthesized
aaaaaatttttttttttgca

SEQ ID NO: 15769 - DNA, 20 bp, Artificial Sequence
  chemically synthesized
aaaaatttttttttttgcaa

SEQ ID NO: 15770 - DNA, 20 bp, Artificial Sequence
  chemically synthesized
tttgcaaaggttctatgtac

SEQ ID NO: 15771 - DNA, 20 bp, Artificial Sequence
  chemically synthesized
caaaggttctatgtactagt

SEQ ID NO: 15772 - DNA, 20 bp, Artificial Sequence
  chemically synthesized
gtttgataaaatattttcct

SEQ ID NO: 15773 - DNA, 20 bp, Artificial Sequence
  chemically synthesized
tattttcctaagtcttcctt

SEQ ID NO: 15774 - DNA, 20 bp, Artificial Sequence
  chemically synthesized
ttccttcagtctgtaaacct

SEQ ID NO: 15775 - DNA, 20 bp, Artificial Sequence
  chemically synthesized
tctgtaaacctcagaacttg

SEQ ID NO: 15776 - DNA, 20 bp, Artificial Sequence
  chemically synthesized
gtagctaatgctaaacaaaa

SEQ ID NO: 15777 - DNA, 20 bp, Artificial Sequence
  chemically synthesized
tgtacttaaaatccttaatt

SEQ ID NO: 15778 - DNA, 20 bp, Artificial Sequence
  chemically synthesized
aaaatccttaattcagacaa

SEQ ID NO: 15779 - DNA, 20 bp, Artificial Sequence
  chemically synthesized
aaatccttaattcagacaac

SEQ ID NO: 15780 - DNA, 20 bp, Artificial Sequence
  chemically synthesized
tcagacaacaggaatatttt

SEQ ID NO: 15781 - DNA, 20 bp, Artificial Sequence
  chemically synthesized
aacaggaatattttgagaat

SEQ ID NO: 15782 - DNA, 20 bp, Artificial Sequence
  chemically synthesized
tgagttccctattcctcact

SEQ ID NO: 15783 - DNA, 20 bp, Artificial Sequence
  chemically synthesized
tattcctcacttggtcaaaa

SEQ ID NO: 15784 - DNA, 20 bp, Artificial Sequence
  chemically synthesized
tcctcacttggtcaaaatgg

SEQ ID NO: 15785 - DNA, 20 bp, Artificial Sequence
  chemically synthesized
gtcaaaatggaagcaaatgt

SEQ ID NO: 15786 - DNA, 20 bp, Artificial Sequence
  chemically synthesized
caaaatggaagcaaatgtaa

SEQ ID NO: 15787 - DNA, 20 bp, Artificial Sequence
  chemically synthesized
aatggaagcaaatgtaagag

SEQ ID NO: 15788 - DNA, 20 bp, Artificial Sequence
  chemically synthesized
tgtaagagaagaatgacatt

SEQ ID NO: 15789 - DNA, 20 bp, Artificial Sequence
  chemically synthesized
gtaagagaagaatgacatta

SEQ ID NO: 15790 - DNA, 20 bp, Artificial Sequence
  chemically synthesized
aatgacattaaggcacaatg

SEQ ID NO: 15791 - DNA, 20 bp, Artificial Sequence
  chemically synthesized
tgacattaaggcacaatgca

SEQ ID NO: 15792 - DNA, 20 bp, Artificial Sequence
  chemically synthesized
gacattaaggcacaatgcag

SEQ ID NO: 15793 - DNA, 20 bp, Artificial Sequence
  chemically synthesized
tttgtcttcttttatttgaa

SEQ ID NO: 15794 - DNA, 20 bp, Artificial Sequence
  chemically synthesized
tgtattctgtatttatcttt

SEQ ID NO: 15795 - DNA, 20 bp, Artificial Sequence
  chemically synthesized
ttctgtatttatcttttggc

SEQ ID NO: 15796 - DNA, 20 bp, Artificial Sequence
  chemically synthesized
ttatcttttggccagtatgt

SEQ ID NO: 15797 - DNA, 20 bp, Artificial Sequence
  chemically synthesized
tatcttttggccagtatgtt

SEQ ID NO: 15798 - DNA, 20 bp, Artificial Sequence
  chemically synthesized
tttggccagtatgttgggca

SEQ ID NO: 15799 - DNA, 20 bp, Artificial Sequence
  chemically synthesized
tatgttgggcaaagaaacat

SEQ ID NO: 15800 - DNA, 20 bp, Artificial Sequence
  chemically synthesized
gcttactttactgtctttat

SEQ ID NO: 15801 - DNA, 20 bp, Artificial Sequence
  chemically synthesized
tactttactgtctttattag

SEQ ID NO: 15802 - DNA, 20 bp, Artificial Sequence
  chemically synthesized
actttactgtctttattagt

SEQ ID NO: 15803 - DNA, 20 bp, Artificial Sequence
  chemically synthesized
atataaccttcatattcctg

SEQ ID NO: 15804 - DNA, 20 bp, Artificial Sequence
  chemically synthesized
gtggtgaccttatgttaaat

SEQ ID NO: 15805 - DNA, 20 bp, Artificial Sequence
  chemically synthesized
tggtgaccttatgttaaatt

SEQ ID NO: 15806 - DNA, 20 bp, Artificial Sequence
  chemically synthesized
gtgaccttatgttaaattag

SEQ ID NO: 15807 - DNA, 20 bp, Artificial Sequence
  chemically synthesized
tgaccttatgttaaattagg

SEQ ID NO: 15808 - DNA, 20 bp, Artificial Sequence
  chemically synthesized
accttatgttaaattaggag

SEQ ID NO: 15809 - DNA, 20 bp, Artificial Sequence
  chemically synthesized
tgttaaattaggaggagtac

SEQ ID NO: 15810 - DNA, 20 bp, Artificial Sequence
  chemically synthesized
ttaaattaggaggagtacca

SEQ ID NO: 15811 - DNA, 20 bp, Artificial Sequence
  chemically synthesized
taaattaggaggagtaccag

SEQ ID NO: 15812 - DNA, 20 bp, Artificial Sequence
  chemically synthesized
ttaggaggagtaccagaggc

SEQ ID NO: 15813 - DNA, 20 bp, Artificial Sequence
  chemically synthesized
taccagaggctagaaattat

SEQ ID NO: 15814 - DNA, 20 bp, Artificial Sequence
  chemically synthesized
aattatgagatgtcctactt

SEQ ID NO: 15815 - DNA, 20 bp, Artificial Sequence
  chemically synthesized
tgagatgtcctacttgagca

SEQ ID NO: 15816 - DNA, 20 bp, Artificial Sequence
  chemically synthesized
gagatgtcctacttgagcac

SEQ ID NO: 15817 - DNA, 20 bp, Artificial Sequence
  chemically synthesized
gtcctacttgagcacaggtg

SEQ ID NO: 15818 - DNA, 20 bp, Artificial Sequence
  chemically synthesized
tacttgagcacaggtgcagc

SEQ ID NO: 15819 - DNA, 20 bp, Artificial Sequence
  chemically synthesized
acttgagcacaggtgcagct

SEQ ID NO: 15820 - DNA, 20 bp, Artificial Sequence
  chemically synthesized
tgagcacaggtgcagctagg

SEQ ID NO: 15821 - DNA, 20 bp, Artificial Sequence
  chemically synthesized
gagcacaggtgcagctaggc

SEQ ID NO: 15822 - DNA, 20 bp, Artificial Sequence
  chemically synthesized
agcacaggtgcagctaggca

SEQ ID NO: 15823 - DNA, 20 bp, Artificial Sequence
  chemically synthesized
tctctcaatattatttcacc

SEQ ID NO: 15824 - DNA, 20 bp, Artificial Sequence
  chemically synthesized
attatttcacctagcacatc

SEQ ID NO: 15825 - DNA, 20 bp, Artificial Sequence
  chemically synthesized
ttatttcacctagcacatct

SEQ ID NO: 15826 - DNA, 20 bp, Artificial Sequence
  chemically synthesized
atttcacctagcacatctgg

SEQ ID NO: 15827 - DNA, 20 bp, Artificial Sequence
  chemically synthesized
agcacatctgggagttactc

SEQ ID NO: 15828 - DNA, 20 bp, Artificial Sequence
  chemically synthesized
agatcttccccctcaatatt

SEQ ID NO: 15829 - DNA, 20 bp, Artificial Sequence
  chemically synthesized
ttccccctcaatattcagcc

SEQ ID NO: 15830 - DNA, 20 bp, Artificial Sequence
  chemically synthesized
tccccctcaatattcagcct

SEQ ID NO: 15831 - DNA, 20 bp, Artificial Sequence
  chemically synthesized
ccctcaatattcagcctggg

SEQ ID NO: 15832 - DNA, 20 bp, Artificial Sequence
  chemically synthesized
cctcaatattcagcctgggt

SEQ ID NO: 15833 - DNA, 20 bp, Artificial Sequence
  chemically synthesized
ctcaatattcagcctgggta

SEQ ID NO: 15834 - DNA, 20 bp, Artificial Sequence
  chemically synthesized
ggttgaaataaatttaacct

SEQ ID NO: 15835 - DNA, 20 bp, Artificial Sequence
  chemically synthesized
taaatttaacctgagttcac

SEQ ID NO: 15836 - DNA, 20 bp, Artificial Sequence
  chemically synthesized
atctattttttgattctctg

SEQ ID NO: 15837 - DNA, 20 bp, Artificial Sequence
  chemically synthesized
ttttgattctctgtggcttt

SEQ ID NO: 15838 - DNA, 20 bp, Artificial Sequence
  chemically synthesized
aagttcattaaatgtaaaat

SEQ ID NO: 15839 - DNA, 20 bp, Artificial Sequence
  chemically synthesized
ttcattaaatgtaaaattgg

SEQ ID NO: 15840 - DNA, 20 bp, Artificial Sequence
  chemically synthesized
gtaaaattggcagcttgcta

SEQ ID NO: 15841 - DNA, 20 bp, Artificial Sequence
  chemically synthesized
aaattggcagcttgctaaag

SEQ ID NO: 15842 - DNA, 20 bp, Artificial Sequence
  chemically synthesized
aattggcagcttgctaaaga

SEQ ID NO: 15843 - DNA, 20 bp, Artificial Sequence
  chemically synthesized
ggcagcttgctaaagaaggt

SEQ ID NO: 15844 - DNA, 20 bp, Artificial Sequence
  chemically synthesized
gtcagactgattaactgttt

SEQ ID NO: 15845 - DNA, 20 bp, Artificial Sequence
  chemically synthesized
gacttgtacattttctgctt

SEQ ID NO: 15846 - DNA, 20 bp, Artificial Sequence
  chemically synthesized
tctgcttcagttttattaac

SEQ ID NO: 15847 - DNA, 20 bp, Artificial Sequence
  chemically synthesized
gcttcagttttattaactgg

SEQ ID NO: 15848 - DNA, 20 bp, Artificial Sequence
  chemically synthesized
tttattaactggcagcatcc

SEQ ID NO: 15849 - DNA, 20 bp, Artificial Sequence
  chemically synthesized
gattttttttttttttttga

SEQ ID NO: 15850 - DNA, 20 bp, Artificial Sequence
  chemically synthesized
ttttttttttttttttgata

SEQ ID NO: 15851 - DNA, 20 bp, Artificial Sequence
  chemically synthesized
ttttttttttttgatagagc

SEQ ID NO: 15852 - DNA, 20 bp, Artificial Sequence
  chemically synthesized
ttttttgatagagcaagcat

SEQ ID NO: 15853 - DNA, 20 bp, Artificial Sequence
  chemically synthesized
gagcaagcataagatttcac

SEQ ID NO: 15854 - DNA, 20 bp, Artificial Sequence
  chemically synthesized
caagcataagatttcacaag

SEQ ID NO: 15855 - DNA, 20 bp, Artificial Sequence
  chemically synthesized
agcataagatttcacaagca

SEQ ID NO: 15856 - DNA, 20 bp, Artificial Sequence
  chemically synthesized
accaactctcttttcccctt

SEQ ID NO: 15857 - DNA, 20 bp, Artificial Sequence
  chemically synthesized
aactctcttttcccctttgg

SEQ ID NO: 15858 - DNA, 20 bp, Artificial Sequence
  chemically synthesized
tttggaagcttaaaaaatga

SEQ ID NO: 15859 - DNA, 20 bp, Artificial Sequence
  chemically synthesized
ggaagcttaaaaaatgatag

SEQ ID NO: 15860 - DNA, 20 bp, Artificial Sequence
  chemically synthesized
gcttaaaaaatgatagaagc

SEQ ID NO: 15861 - DNA, 20 bp, Artificial Sequence
  chemically synthesized
aaaaatgatagaagctggta

SEQ ID NO: 15862 - DNA, 20 bp, Artificial Sequence
  chemically synthesized
aatgatagaagctggtaaag

SEQ ID NO: 15863 - DNA, 20 bp, Artificial Sequence
  chemically synthesized
gaagctggtaaagtagatgc

SEQ ID NO: 15864 - DNA, 20 bp, Artificial Sequence
  chemically synthesized
agctggtaaagtagatgctg

SEQ ID NO: 15865 - DNA, 20 bp, Artificial Sequence
  chemically synthesized
aagtagatgctggagtattt

SEQ ID NO: 15866 - DNA, 20 bp, Artificial Sequence
  chemically synthesized
tgctggagtattttagtaca

SEQ ID NO: 15867 - DNA, 20 bp, Artificial Sequence
  chemically synthesized
tagtacaaagttaaaaaaaa

SEQ ID NO: 15868 - DNA, 20 bp, Artificial Sequence
  chemically synthesized
aagttaaaaaaaaaagcaaa

SEQ ID NO: 15869 - DNA, 20 bp, Artificial Sequence
  chemically synthesized
agttaaaaaaaaaagcaaac

SEQ ID NO: 15870 - DNA, 20 bp, Artificial Sequence
  chemically synthesized
aaaaaaaaaagcaaacagga

SEQ ID NO: 15871 - DNA, 20 bp, Artificial Sequence
  chemically synthesized
aaaaaagcaaacaggaaaga

SEQ ID NO: 15872 - DNA, 20 bp, Artificial Sequence
  chemically synthesized
taccttgttataccatccgc

SEQ ID NO: 15873 - DNA, 20 bp, Artificial Sequence
  chemically synthesized
tccgctggtgattatgtgtg

SEQ ID NO: 15874 - DNA, 20 bp, Artificial Sequence
  chemically synthesized
ggtgattatgtgtgcagaaa

SEQ ID NO: 15875 - DNA, 20 bp, Artificial Sequence
  chemically synthesized
gcagaaatagtctcataatg

SEQ ID NO: 15876 - DNA, 20 bp, Artificial Sequence
  chemically synthesized
agtctcataatgaagcattt

SEQ ID NO: 15877 - DNA, 20 bp, Artificial Sequence
  chemically synthesized
tctcataatgaagcattttg

SEQ ID NO: 15878 - DNA, 20 bp, Artificial Sequence
  chemically synthesized
gaagcattttggagctcatt

SEQ ID NO: 15879 - DNA, 20 bp, Artificial Sequence
  chemically synthesized
ttggagctcattcagaaaat

SEQ ID NO: 15880 - DNA, 20 bp, Artificial Sequence
  chemically synthesized
ttagtccactttgacaacat

SEQ ID NO: 15881 - DNA, 20 bp, Artificial Sequence
  chemically synthesized
tagtccactttgacaacatt

SEQ ID NO: 15882 - DNA, 20 bp, Artificial Sequence
  chemically synthesized
cactttgacaacattaggcg

SEQ ID NO: 15883 - DNA, 20 bp, Artificial Sequence
  chemically synthesized
aacattaggcgaagtatttc

SEQ ID NO: 15884 - DNA, 20 bp, Artificial Sequence
  chemically synthesized
ggcgaagtatttcaagtcta

SEQ ID NO: 15885 - DNA, 20 bp, Artificial Sequence
  chemically synthesized
aagtatttcaagtctaaaga

SEQ ID NO: 15886 - DNA, 20 bp, Artificial Sequence
  chemically synthesized
agtatttcaagtctaaagaa

SEQ ID NO: 15887 - DNA, 20 bp, Artificial Sequence
  chemically synthesized
agtctaaagaaaggacttct

SEQ ID NO: 15888 - DNA, 20 bp, Artificial Sequence
  chemically synthesized
ctcagccttgctctgaaatg

SEQ ID NO: 15889 - DNA, 20 bp, Artificial Sequence
  chemically synthesized
ccattctgatttttatatca

SEQ ID NO: 15890 - DNA, 20 bp, Artificial Sequence
  chemically synthesized
tttatatcatagatgccacc

SEQ ID NO: 15891 - DNA, 20 bp, Artificial Sequence
  chemically synthesized
ccaccaagtgcaaacatgtt

SEQ ID NO: 15892 - DNA, 20 bp, Artificial Sequence
  chemically synthesized
caaacatgtttagaatatta

SEQ ID NO: 15893 - DNA, 20 bp, Artificial Sequence
  chemically synthesized
aaacatgtttagaatattat

SEQ ID NO: 15894 - DNA, 20 bp, Artificial Sequence
  chemically synthesized
attataggcattccatttct

SEQ ID NO: 15895 - DNA, 20 bp, Artificial Sequence
  chemically synthesized
ataaaaaaaaaatgactaat

SEQ ID NO: 15896 - DNA, 20 bp, Artificial Sequence
  chemically synthesized
actaattggcttattttctt

SEQ ID NO: 15897 - DNA, 20 bp, Artificial Sequence
  chemically synthesized
ttattttcttaagtactcaa

SEQ ID NO: 15898 - DNA, 20 bp, Artificial Sequence
  chemically synthesized
gtactcaaaagtatcccatt

SEQ ID NO: 15899 - DNA, 20 bp, Artificial Sequence
  chemically synthesized
cccatttagctaatgtgtct

SEQ ID NO: 15900 - DNA, 20 bp, Artificial Sequence
  chemically synthesized
agaaatactgcccgtgcatt

SEQ ID NO: 15901 - DNA, 20 bp, Artificial Sequence
  chemically synthesized
ttggtatttctttgattttg

SEQ ID NO: 15902 - DNA, 20 bp, Artificial Sequence
  chemically synthesized
tttgattttgtggcactgct

SEQ ID NO: 15903 - DNA, 20 bp, Artificial Sequence
  chemically synthesized
tgattttgtggcactgctga

SEQ ID NO: 15904 - DNA, 20 bp, Artificial Sequence
  chemically synthesized
tttgtggcactgctgagagt

SEQ ID NO: 15905 - DNA, 20 bp, Artificial Sequence
  chemically synthesized
tgtggcactgctgagagtga

SEQ ID NO: 15906 - DNA, 20 bp, Artificial Sequence
  chemically synthesized
ggcactgctgagagtgagag

SEQ ID NO: 15907 - DNA, 20 bp, Artificial Sequence
  chemically synthesized
ctgctgagagtgagagcaga

SEQ ID NO: 15908 - DNA, 20 bp, Artificial Sequence
  chemically synthesized
tgctgagagtgagagcagaa

SEQ ID NO: 15909 - DNA, 20 bp, Artificial Sequence
  chemically synthesized
agtgagagcagaaaggtttt

SEQ ID NO: 15910 - DNA, 20 bp, Artificial Sequence
  chemically synthesized
gagagcagaaaggtttttgg

SEQ ID NO: 15911 - DNA, 20 bp, Artificial Sequence
  chemically synthesized
gctgcgacatgattattatt

SEQ ID NO: 15912 - DNA, 20 bp, Artificial Sequence
  chemically synthesized
tattatttagatccgtttca

SEQ ID NO: 15913 - DNA, 20 bp, Artificial Sequence
  chemically synthesized
attatttagatccgtttcat

SEQ ID NO: 15914 - DNA, 20 bp, Artificial Sequence
  chemically synthesized
atccgtttcataggtgcatg

SEQ ID NO: 15915 - DNA, 20 bp, Artificial Sequence
  chemically synthesized
atgcagtcgttttcttatta

SEQ ID NO: 15916 - DNA, 20 bp, Artificial Sequence
  chemically synthesized
cagtcgttttcttattacag

SEQ ID NO: 15917 - DNA, 20 bp, Artificial Sequence
  chemically synthesized
ttattacagcagtgtaaatg

SEQ ID NO: 15918 - DNA, 20 bp, Artificial Sequence
  chemically synthesized
ggcacatttttcatgtgaca

SEQ ID NO: 15919 - DNA, 20 bp, Artificial Sequence
  chemically synthesized
acatttttcatgtgacatag

SEQ ID NO: 15920 - DNA, 20 bp, Artificial Sequence
  chemically synthesized
tagtagctttctaatttatg

SEQ ID NO: 15921 - DNA, 20 bp, Artificial Sequence
  chemically synthesized
tgaagccatgtctgtttact

SEQ ID NO: 15922 - DNA, 20 bp, Artificial Sequence
  chemically synthesized
gaagccatgtctgtttactt

SEQ ID NO: 15923 - DNA, 20 bp, Artificial Sequence
  chemically synthesized
agccatgtctgtttacttag

SEQ ID NO: 15924 - DNA, 20 bp, Artificial Sequence
  chemically synthesized
agtatatacattcacacaca

SEQ ID NO: 15925 - DNA, 20 bp, Artificial Sequence
  chemically synthesized
gtatatacattcacacacaa

SEQ ID NO: 15926 - DNA, 20 bp, Artificial Sequence
  chemically synthesized
tatatacattcacacacaaa

SEQ ID NO: 15927 - DNA, 20 bp, Artificial Sequence
  chemically synthesized
tcacctctcctttcattctt

SEQ ID NO: 15928 - DNA, 20 bp, Artificial Sequence
  chemically synthesized
cctttcattctttggcacaa

SEQ ID NO: 15929 - DNA, 20 bp, Artificial Sequence
  chemically synthesized
ctttggcacaatggacaact

SEQ ID NO: 15930 - DNA, 20 bp, Artificial Sequence
  chemically synthesized
acaatggacaacttggtgta

SEQ ID NO: 15931 - DNA, 20 bp, Artificial Sequence
  chemically synthesized
caatggacaacttggtgtat

SEQ ID NO: 15932 - DNA, 20 bp, Artificial Sequence
  chemically synthesized
caacttggtgtataggaaaa

SEQ ID NO: 15933 - DNA, 20 bp, Artificial Sequence
  chemically synthesized
taggaaaaaagaaacaaatt

SEQ ID NO: 15934 - DNA, 20 bp, Artificial Sequence
  chemically synthesized
tatccacttttttttttaac

SEQ ID NO: 15935 - DNA, 20 bp, Artificial Sequence
  chemically synthesized
tttttaaccagtttttcttg

SEQ ID NO: 15936 - DNA, 20 bp, Artificial Sequence
  chemically synthesized
ttttcttgtagttattattt

SEQ ID NO: 15937 - DNA, 20 bp, Artificial Sequence
  chemically synthesized
gttccctgtgttaactattt

SEQ ID NO: 15938 - DNA, 20 bp, Artificial Sequence
  chemically synthesized
ccctgtgttaactatttaag

SEQ ID NO: 15939 - DNA, 20 bp, Artificial Sequence
  chemically synthesized
ttctttctaaacttacaaac

SEQ ID NO: 15940 - DNA, 20 bp, Artificial Sequence
  chemically synthesized
accagacacatttgttgctg

SEQ ID NO: 15941 - DNA, 20 bp, Artificial Sequence
  chemically synthesized
ccagacacatttgttgctgt

SEQ ID NO: 15942 - DNA, 20 bp, Artificial Sequence
  chemically synthesized
tgttgctgtgggtgtgtgca

SEQ ID NO: 15943 - DNA, 20 bp, Artificial Sequence
  chemically synthesized
gttgctgtgggtgtgtgcat

SEQ ID NO: 15944 - DNA, 20 bp, Artificial Sequence
  chemically synthesized
atgtgtgtgtgtgtgttctc

SEQ ID NO: 15945 - DNA, 20 bp, Artificial Sequence
  chemically synthesized
gtgtgtgtgtgtgttctctg

SEQ ID NO: 15946 - DNA, 20 bp, Artificial Sequence
  chemically synthesized
tgtgttctctggagttatgc

SEQ ID NO: 15947 - DNA, 20 bp, Artificial Sequence
  chemically synthesized
gtgttctctggagttatgca

SEQ ID NO: 15948 - DNA, 20 bp, Artificial Sequence
  chemically synthesized
ttctctggagttatgcaagg

SEQ ID NO: 15949 - DNA, 20 bp, Artificial Sequence
  chemically synthesized
tcattgacaaatttgctctc

SEQ ID NO: 15950 - DNA, 20 bp, Artificial Sequence
  chemically synthesized
ttttgtatgctcacattttc

SEQ ID NO: 15951 - DNA, 20 bp, Artificial Sequence
  chemically synthesized
tttgtatgctcacattttct

SEQ ID NO: 15952 - DNA, 20 bp, Artificial Sequence
  chemically synthesized
cacattttctgggtattata

SEQ ID NO: 15953 - DNA, 20 bp, Artificial Sequence
  chemically synthesized
cattttctgggtattatata

SEQ ID NO: 15954 - DNA, 20 bp, Artificial Sequence
  chemically synthesized
tttctgggtattatatagag

SEQ ID NO: 15955 - DNA, 20 bp, Artificial Sequence
  chemically synthesized
gggtattatatagagaagcc

SEQ ID NO: 15956 - DNA, 20 bp, Artificial Sequence
  chemically synthesized
tagaaacactttacatgatg

SEQ ID NO: 15957 - DNA, 20 bp, Artificial Sequence
  chemically synthesized
aaacactttacatgatgtgg

SEQ ID NO: 15958 - DNA, 20 bp, Artificial Sequence
  chemically synthesized
aacactttacatgatgtggt

SEQ ID NO: 15959 - DNA, 20 bp, Artificial Sequence
  chemically synthesized
ctttacatgatgtggtggga

SEQ ID NO: 15960 - DNA, 20 bp, Artificial Sequence
  chemically synthesized
catgatgtggtgggatggca

SEQ ID NO: 15961 - DNA, 20 bp, Artificial Sequence
  chemically synthesized
atgatgtggtgggatggcat

SEQ ID NO: 15962 - DNA, 20 bp, Artificial Sequence
  chemically synthesized
tgatgtggtgggatggcatg

SEQ ID NO: 15963 - DNA, 20 bp, Artificial Sequence
  chemically synthesized
tggtgggatggcatggggtt

SEQ ID NO: 15964 - DNA, 20 bp, Artificial Sequence
  chemically synthesized
tctcccctttctgtcctctc

SEQ ID NO: 15965 - DNA, 20 bp, Artificial Sequence
  chemically synthesized
tgcttttgtttctccaacca

SEQ ID NO: 15966 - DNA, 20 bp, Artificial Sequence
  chemically synthesized
ttgtttctccaaccacagcc

SEQ ID NO: 15967 - DNA, 20 bp, Artificial Sequence
  chemically synthesized
aaccacagccgagcctcttg

SEQ ID NO: 15968 - DNA, 20 bp, Artificial Sequence
  chemically synthesized
gcctcttgaagccattctta

SEQ ID NO: 15969 - DNA, 20 bp, Artificial Sequence
  chemically synthesized
cattcttacagatgatgaac

SEQ ID NO: 15970 - DNA, 20 bp, Artificial Sequence
  chemically synthesized
acagatgatgaaccagacca

SEQ ID NO: 15971 - DNA, 20 bp, Artificial Sequence
  chemically synthesized
tgaaccagaccacggcccgt

SEQ ID NO: 15972 - DNA, 20 bp, Artificial Sequence
  chemically synthesized
gaaccagaccacggcccgtt

SEQ ID NO: 15973 - DNA, 20 bp, Artificial Sequence
  chemically synthesized
accagaccacggcccgttgg

SEQ ID NO: 15974 - DNA, 20 bp, Artificial Sequence
  chemically synthesized
ccacggcccgttgggagctc

SEQ ID NO: 15975 - DNA, 20 bp, Artificial Sequence
  chemically synthesized
cggcccgttgggagctccag

SEQ ID NO: 15976 - DNA, 20 bp, Artificial Sequence
  chemically synthesized
ggcccgttgggagctccaga

SEQ ID NO: 15977 - DNA, 20 bp, Artificial Sequence
  chemically synthesized
gcccgttgggagctccagaa

SEQ ID NO: 15978 - DNA, 20 bp, Artificial Sequence
  chemically synthesized
cccgttgggagctccagaag

SEQ ID NO: 15979 - DNA, 20 bp, Artificial Sequence
  chemically synthesized
gatcatgacctcctcacctg

SEQ ID NO: 15980 - DNA, 20 bp, Artificial Sequence
  chemically synthesized
atcatgacctcctcacctgt

SEQ ID NO: 15981 - DNA, 20 bp, Artificial Sequence
  chemically synthesized
atgacctcctcacctgtggg

SEQ ID NO: 15982 - DNA, 20 bp, Artificial Sequence
  chemically synthesized
tcctcacctgtgggcagtgc

SEQ ID NO: 15983 - DNA, 20 bp, Artificial Sequence
  chemically synthesized
gtgccagatgaacttcccat

SEQ ID NO: 15984 - DNA, 20 bp, Artificial Sequence
  chemically synthesized
tgccagatgaacttcccatt

SEQ ID NO: 15985 - DNA, 20 bp, Artificial Sequence
  chemically synthesized
gccagatgaacttcccattg

SEQ ID NO: 15986 - DNA, 20 bp, Artificial Sequence
  chemically synthesized
ccagatgaacttcccattgg

SEQ ID NO: 15987 - DNA, 20 bp, Artificial Sequence
  chemically synthesized
gggacattcttatttttatc

SEQ ID NO: 15988 - DNA, 20 bp, Artificial Sequence
  chemically synthesized
ttatttttatcgagcacaaa

SEQ ID NO: 15989 - DNA, 20 bp, Artificial Sequence
  chemically synthesized
cacaaacggaaacaatgcaa

SEQ ID NO: 15990 - DNA, 20 bp, Artificial Sequence
  chemically synthesized
aaacggaaacaatgcaatgg

SEQ ID NO: 15991 - DNA, 20 bp, Artificial Sequence
  chemically synthesized
atgcaatggcagcctctgct

SEQ ID NO: 15992 - DNA, 20 bp, Artificial Sequence
  chemically synthesized
tggcagcctctgcttagaaa

SEQ ID NO: 15993 - DNA, 20 bp, Artificial Sequence
  chemically synthesized
cctctgcttagaaaaagctg

SEQ ID NO: 15994 - DNA, 20 bp, Artificial Sequence
  chemically synthesized
gcttagaaaaagctgtggat

SEQ ID NO: 15995 - DNA, 20 bp, Artificial Sequence
  chemically synthesized
caccttccccttcaccaatc

SEQ ID NO: 15996 - DNA, 20 bp, Artificial Sequence
  chemically synthesized
ttcaccaatcgagatgaaaa

SEQ ID NO: 15997 - DNA, 20 bp, Artificial Sequence
  chemically synthesized
gaaaaaagcatccaatcccg

SEQ ID NO: 15998 - DNA, 20 bp, Artificial Sequence
  chemically synthesized
aaaaagcatccaatcccgtg

SEQ ID NO: 15999 - DNA, 20 bp, Artificial Sequence
  chemically synthesized
aaaagcatccaatcccgtgg

SEQ ID NO: 16000 - DNA, 20 bp, Artificial Sequence
  chemically synthesized
gcatccaatcccgtggaggt

SEQ ID NO: 16001 - DNA, 20 bp, Artificial Sequence
  chemically synthesized
atcccgtggaggttggcatc

SEQ ID NO: 16002 - DNA, 20 bp, Artificial Sequence
  chemically synthesized
tcccgtggaggttggcatcc

SEQ ID NO: 16003 - DNA, 20 bp, Artificial Sequence
  chemically synthesized
ggttggcatccaggtcacgc

SEQ ID NO: 16004 - DNA, 20 bp, Artificial Sequence
  chemically synthesized
ttggcatccaggtcacgcca

SEQ ID NO: 16005 - DNA, 20 bp, Artificial Sequence
  chemically synthesized
tggcatccaggtcacgccag

SEQ ID NO: 16006 - DNA, 20 bp, Artificial Sequence
  chemically synthesized
gattgtttatcaacgtcatc

SEQ ID NO: 16007 - DNA, 20 bp, Artificial Sequence
  chemically synthesized
ttgtttatcaacgtcatcta

SEQ ID NO: 16008 - DNA, 20 bp, Artificial Sequence
  chemically synthesized
tgtttatcaacgtcatctag

SEQ ID NO: 16009 - DNA, 20 bp, Artificial Sequence
  chemically synthesized
ctagaggaatttgccccaaa

SEQ ID NO: 16010 - DNA, 20 bp, Artificial Sequence
  chemically synthesized
tagaggaatttgccccaaac

SEQ ID NO: 16011 - DNA, 20 bp, Artificial Sequence
  chemically synthesized
ttgccccaaacaggaacaca

SEQ ID NO: 16012 - DNA, 20 bp, Artificial Sequence
  chemically synthesized
ccccaaacaggaacacatag

SEQ ID NO: 16013 - DNA, 20 bp, Artificial Sequence
  chemically synthesized
cccaaacaggaacacatagc

SEQ ID NO: 16014 - DNA, 20 bp, Artificial Sequence
  chemically synthesized
ggaacacatagcaggtaaat

SEQ ID NO: 16015 - DNA, 20 bp, Artificial Sequence
  chemically synthesized
acacatagcaggtaaatgag

SEQ ID NO: 16016 - DNA, 20 bp, Artificial Sequence
  chemically synthesized
atagcaggtaaatgagaagc

SEQ ID NO: 16017 - DNA, 20 bp, Artificial Sequence
  chemically synthesized
tagcaggtaaatgagaagca

SEQ ID NO: 16018 - DNA, 20 bp, Artificial Sequence
  chemically synthesized
gcaggtaaatgagaagcaag

SEQ ID NO: 16019 - DNA, 20 bp, Artificial Sequence
  chemically synthesized
taaatgagaagcaaggagaa

SEQ ID NO: 16020 - DNA, 20 bp, Artificial Sequence
  chemically synthesized
gcatgttttcttttcatttt

SEQ ID NO: 16021 - DNA, 20 bp, Artificial Sequence
  chemically synthesized
atgttttcttttcattttca

SEQ ID NO: 16022 - DNA, 20 bp, Artificial Sequence
  chemically synthesized
tgttttcttttcattttcag

SEQ ID NO: 16023 - DNA, 20 bp, Artificial Sequence
  chemically synthesized
tttcattttcagaggtgctg

SEQ ID NO: 16024 - DNA, 20 bp, Artificial Sequence
  chemically synthesized
ttttcagaggtgctgtagcc

SEQ ID NO: 16025 - DNA, 20 bp, Artificial Sequence
  chemically synthesized
tcagaggtgctgtagccaag

SEQ ID NO: 16026 - DNA, 20 bp, Artificial Sequence
  chemically synthesized
aggtgctgtagccaagcagt

SEQ ID NO: 16027 - DNA, 20 bp, Artificial Sequence
  chemically synthesized
ggtgctgtagccaagcagta

SEQ ID NO: 16028 - DNA, 20 bp, Artificial Sequence
  chemically synthesized
tgctgtagccaagcagtaag

SEQ ID NO: 16029 - DNA, 20 bp, Artificial Sequence
  chemically synthesized
ccaagcagtaaggagttgtg

SEQ ID NO: 16030 - DNA, 20 bp, Artificial Sequence
  chemically synthesized
ctctatgtgactgtccatga

SEQ ID NO: 16031 - DNA, 20 bp, Artificial Sequence
  chemically synthesized
tcatttctgttgcttacgtc

SEQ ID NO: 16032 - DNA, 20 bp, Artificial Sequence
  chemically synthesized
tgttgcttacgtccagaaca

SEQ ID NO: 16033 - DNA, 20 bp, Artificial Sequence
  chemically synthesized
tattttccacctcactgaat

SEQ ID NO: 16034 - DNA, 20 bp, Artificial Sequence
  chemically synthesized
ccacctcactgaatcagatg

SEQ ID NO: 16035 - DNA, 20 bp, Artificial Sequence
  chemically synthesized
cacctcactgaatcagatgt

SEQ ID NO: 16036 - DNA, 20 bp, Artificial Sequence
  chemically synthesized
ctcactgaatcagatgtagg

SEQ ID NO: 16037 - DNA, 20 bp, Artificial Sequence
  chemically synthesized
tcactgaatcagatgtaggc

SEQ ID NO: 16038 - DNA, 20 bp, Artificial Sequence
  chemically synthesized
tgaatcagatgtaggcagga

SEQ ID NO: 16039 - DNA, 20 bp, Artificial Sequence
  chemically synthesized
gaatcagatgtaggcaggat

SEQ ID NO: 16040 - DNA, 20 bp, Artificial Sequence
  chemically synthesized
ggcaggataggtacacacat

SEQ ID NO: 16041 - DNA, 20 bp, Artificial Sequence
  chemically synthesized
cacatcagacaccttctctc

SEQ ID NO: 16042 - DNA, 20 bp, Artificial Sequence
  chemically synthesized
ctctctggatctgtcgattt

SEQ ID NO: 16043 - DNA, 20 bp, Artificial Sequence
  chemically synthesized
atccccaccttctcattttg

SEQ ID NO: 16044 - DNA, 20 bp, Artificial Sequence
  chemically synthesized
ccttctcattttgaagtatt

SEQ ID NO: 16045 - DNA, 20 bp, Artificial Sequence
  chemically synthesized
gtattgagctttactacacc

SEQ ID NO: 16046 - DNA, 20 bp, Artificial Sequence
  chemically synthesized
gagctttactacacctagtc

SEQ ID NO: 16047 - DNA, 20 bp, Artificial Sequence
  chemically synthesized
cagcttccattgtccatttc

SEQ ID NO: 16048 - DNA, 20 bp, Artificial Sequence
  chemically synthesized
ccattgtccatttccagcct

SEQ ID NO: 16049 - DNA, 20 bp, Artificial Sequence
  chemically synthesized
ttccagccttggtgacgtgt

SEQ ID NO: 16050 - DNA, 20 bp, Artificial Sequence
  chemically synthesized
ccagccttggtgacgtgtca

SEQ ID NO: 16051 - DNA, 20 bp, Artificial Sequence
  chemically synthesized
cagccttggtgacgtgtcag

SEQ ID NO: 16052 - DNA, 20 bp, Artificial Sequence
  chemically synthesized
ttggtgacgtgtcagaggca

SEQ ID NO: 16053 - DNA, 20 bp, Artificial Sequence
  chemically synthesized
gtgacgtgtcagaggcaaag

SEQ ID NO: 16054 - DNA, 20 bp, Artificial Sequence
  chemically synthesized
tcagaggcaaagtggccata

SEQ ID NO: 16055 - DNA, 20 bp, Artificial Sequence
  chemically synthesized
cagaggcaaagtggccatat

SEQ ID NO: 16056 - DNA, 20 bp, Artificial Sequence
  chemically synthesized
agtggccatataggcatttg

SEQ ID NO: 16057 - DNA, 20 bp, Artificial Sequence
  chemically synthesized
ccatataggcatttgcagtt

SEQ ID NO: 16058 - DNA, 20 bp, Artificial Sequence
  chemically synthesized
agccaatgacttgtttgact

SEQ ID NO: 16059 - DNA, 20 bp, Artificial Sequence
  chemically synthesized
cttgtttgactcagaacatc

SEQ ID NO: 16060 - DNA, 20 bp, Artificial Sequence
  chemically synthesized
tttgactcagaacatctggc

SEQ ID NO: 16061 - DNA, 20 bp, Artificial Sequence
  chemically synthesized
ttgactcagaacatctggcc

SEQ ID NO: 16062 - DNA, 20 bp, Artificial Sequence
  chemically synthesized
aacatctggccaggcctcct

SEQ ID NO: 16063 - DNA, 20 bp, Artificial Sequence
  chemically synthesized
acatctggccaggcctcctt

SEQ ID NO: 16064 - DNA, 20 bp, Artificial Sequence
  chemically synthesized
catctggccaggcctcctta

SEQ ID NO: 16065 - DNA, 20 bp, Artificial Sequence
  chemically synthesized
atctggccaggcctccttag

SEQ ID NO: 16066 - DNA, 20 bp, Artificial Sequence
  chemically synthesized
gccaggcctccttaggggtt

SEQ ID NO: 16067 - DNA, 20 bp, Artificial Sequence
  chemically synthesized
taggggttcagctcgttctc

SEQ ID NO: 16068 - DNA, 20 bp, Artificial Sequence
  chemically synthesized
aggggttcagctcgttctca

SEQ ID NO: 16069 - DNA, 20 bp, Artificial Sequence
  chemically synthesized
tcgttctcaaggcttccctg

SEQ ID NO: 16070 - DNA, 20 bp, Artificial Sequence
  chemically synthesized
ttctcaaggcttccctgaag

SEQ ID NO: 16071 - DNA, 20 bp, Artificial Sequence
  chemically synthesized
ctcaaggcttccctgaagta

SEQ ID NO: 16072 - DNA, 20 bp, Artificial Sequence
  chemically synthesized
aaggcttccctgaagtagag

SEQ ID NO: 16073 - DNA, 20 bp, Artificial Sequence
  chemically synthesized
aggcttccctgaagtagagt

SEQ ID NO: 16074 - DNA, 20 bp, Artificial Sequence
  chemically synthesized
ttccctgaagtagagtgggc

SEQ ID NO: 16075 - DNA, 20 bp, Artificial Sequence
  chemically synthesized
cctgaagtagagtgggctgg

SEQ ID NO: 16076 - DNA, 20 bp, Artificial Sequence
  chemically synthesized
ctgaagtagagtgggctggc

SEQ ID NO: 16077 - DNA, 20 bp, Artificial Sequence
  chemically synthesized
tgaagtagagtgggctggca

SEQ ID NO: 16078 - DNA, 20 bp, Artificial Sequence
  chemically synthesized
agtagagtgggctggcaggg

SEQ ID NO: 16079 - DNA, 20 bp, Artificial Sequence
  chemically synthesized
gagtgggctggcagggtagt

SEQ ID NO: 16080 - DNA, 20 bp, Artificial Sequence
  chemically synthesized
gtgggctggcagggtagttg

SEQ ID NO: 16081 - DNA, 20 bp, Artificial Sequence
  chemically synthesized
tgggctggcagggtagttgg

SEQ ID NO: 16082 - DNA, 20 bp, Artificial Sequence
  chemically synthesized
gctggcagggtagttggagg

SEQ ID NO: 16083 - DNA, 20 bp, Artificial Sequence
  chemically synthesized
ggcagggtagttggaggtgg

SEQ ID NO: 16084 - DNA, 20 bp, Artificial Sequence
  chemically synthesized
gggtagttggaggtggtgga

SEQ ID NO: 16085 - DNA, 20 bp, Artificial Sequence
  chemically synthesized
gtagttggaggtggtggaaa

SEQ ID NO: 16086 - DNA, 20 bp, Artificial Sequence
  chemically synthesized
ggtggtggaaagagttaact

SEQ ID NO: 16087 - DNA, 20 bp, Artificial Sequence
  chemically synthesized
ggaaagagttaactgagctt

SEQ ID NO: 16088 - DNA, 20 bp, Artificial Sequence
  chemically synthesized
gaaagagttaactgagcttc

SEQ ID NO: 16089 - DNA, 20 bp, Artificial Sequence
  chemically synthesized
aaagagttaactgagcttca

SEQ ID NO: 16090 - DNA, 20 bp, Artificial Sequence
  chemically synthesized
agttaactgagcttcagggc

SEQ ID NO: 16091 - DNA, 20 bp, Artificial Sequence
  chemically synthesized
ctgagcttcagggctagcct

SEQ ID NO: 16092 - DNA, 20 bp, Artificial Sequence
  chemically synthesized
ggctagccttggatccatat

SEQ ID NO: 16093 - DNA, 20 bp, Artificial Sequence
  chemically synthesized
cttggatccatattggctgt

SEQ ID NO: 16094 - DNA, 20 bp, Artificial Sequence
  chemically synthesized
atccatattggctgtcagcc

SEQ ID NO: 16095 - DNA, 20 bp, Artificial Sequence
  chemically synthesized
atattggctgtcagcccgga

SEQ ID NO: 16096 - DNA, 20 bp, Artificial Sequence
  chemically synthesized
tattggctgtcagcccggat

SEQ ID NO: 16097 - DNA, 20 bp, Artificial Sequence
  chemically synthesized
attggctgtcagcccggatg

SEQ ID NO: 16098 - DNA, 20 bp, Artificial Sequence
  chemically synthesized
gatggggctgtaattaaaca

SEQ ID NO: 16099 - DNA, 20 bp, Artificial Sequence
  chemically synthesized
tgtaattaaacacagccccg

SEQ ID NO: 16100 - DNA, 20 bp, Artificial Sequence
  chemically synthesized
aattaaacacagccccgtgg

SEQ ID NO: 16101 - DNA, 20 bp, Artificial Sequence
  chemically synthesized
attaaacacagccccgtggt

SEQ ID NO: 16102 - DNA, 20 bp, Artificial Sequence
  chemically synthesized
gacaccatgaccttgacttt

SEQ ID NO: 16103 - DNA, 20 bp, Artificial Sequence
  chemically synthesized
tttaagatgccattttcgac

SEQ ID NO: 16104 - DNA, 20 bp, Artificial Sequence
  chemically synthesized
agatgccattttcgactggc

SEQ ID NO: 16105 - DNA, 20 bp, Artificial Sequence
  chemically synthesized
gatgccattttcgactggcc

SEQ ID NO: 16106 - DNA, 20 bp, Artificial Sequence
  chemically synthesized
ccattttcgactggccaggc

SEQ ID NO: 16107 - DNA, 20 bp, Artificial Sequence
  chemically synthesized
attttcgactggccaggcca

SEQ ID NO: 16108 - DNA, 20 bp, Artificial Sequence
  chemically synthesized
ttcgactggccaggccagag

SEQ ID NO: 16109 - DNA, 20 bp, Artificial Sequence
  chemically synthesized
cgactggccaggccagagta

SEQ ID NO: 16110 - DNA, 20 bp, Artificial Sequence
  chemically synthesized
actggccaggccagagtaga

SEQ ID NO: 16111 - DNA, 20 bp, Artificial Sequence
  chemically synthesized
ctggccaggccagagtagag

SEQ ID NO: 16112 - DNA, 20 bp, Artificial Sequence
  chemically synthesized
tggccaggccagagtagaga

SEQ ID NO: 16113 - DNA, 20 bp, Artificial Sequence
  chemically synthesized
ccaggccagagtagagaggg

SEQ ID NO: 16114 - DNA, 20 bp, Artificial Sequence
  chemically synthesized
agtagagagggcagttgctg

SEQ ID NO: 16115 - DNA, 20 bp, Artificial Sequence
  chemically synthesized
agggcagttgctgaagcgca

SEQ ID NO: 16116 - DNA, 20 bp, Artificial Sequence
  chemically synthesized
cacagacatgcttactcgaa

SEQ ID NO: 16117 - DNA, 20 bp, Artificial Sequence
  chemically synthesized
catgcttactcgaaaagttt

SEQ ID NO: 16118 - DNA, 20 bp, Artificial Sequence
  chemically synthesized
atgcttactcgaaaagttta

SEQ ID NO: 16119 - DNA, 20 bp, Artificial Sequence
  chemically synthesized
tgcttactcgaaaagtttaa

SEQ ID NO: 16120 - DNA, 20 bp, Artificial Sequence
  chemically synthesized
cgaaaagtttaagggcatgt

SEQ ID NO: 16121 - DNA, 20 bp, Artificial Sequence
  chemically synthesized
gggcatgttggaaatttcaa

SEQ ID NO: 16122 - DNA, 20 bp, Artificial Sequence
  chemically synthesized
ggcatgttggaaatttcaaa

SEQ ID NO: 16123 - DNA, 20 bp, Artificial Sequence
  chemically synthesized
tgttggaaatttcaaaaggt

SEQ ID NO: 16124 - DNA, 20 bp, Artificial Sequence
  chemically synthesized
atttcaaaaggttggtttga

SEQ ID NO: 16125 - DNA, 20 bp, Artificial Sequence
  chemically synthesized
tttcaaaaggttggtttgac

SEQ ID NO: 16126 - DNA, 20 bp, Artificial Sequence
  chemically synthesized
aaaggttggtttgacaggaa

SEQ ID NO: 16127 - DNA, 20 bp, Artificial Sequence
  chemically synthesized
acaggaacggctgctccctg

SEQ ID NO: 16128 - DNA, 20 bp, Artificial Sequence
  chemically synthesized
ctccctgcagcctgcctcct

SEQ ID NO: 16129 - DNA, 20 bp, Artificial Sequence
  chemically synthesized
gctctctcttgtctctgatg

SEQ ID NO: 16130 - DNA, 20 bp, Artificial Sequence
  chemically synthesized
tgtctctgatgtggttttga

SEQ ID NO: 16131 - DNA, 20 bp, Artificial Sequence
  chemically synthesized
atgtatcttgattttgtttg

SEQ ID NO: 16132 - DNA, 20 bp, Artificial Sequence
  chemically synthesized
gattttgtttgtggtttaca

SEQ ID NO: 16133 - DNA, 20 bp, Artificial Sequence
  chemically synthesized
atgtcacccttacaaatgtc

SEQ ID NO: 16134 - DNA, 20 bp, Artificial Sequence
  chemically synthesized
acccttacaaatgtccagtc

SEQ ID NO: 16135 - DNA, 20 bp, Artificial Sequence
  chemically synthesized
acacaatgtaaaaattttct

SEQ ID NO: 16136 - DNA, 20 bp, Artificial Sequence
  chemically synthesized
aaatacacacacgtattcaa

SEQ ID NO: 16137 - DNA, 20 bp, Artificial Sequence
  chemically synthesized
ttcaacagccctccctcctt

SEQ ID NO: 16138 - DNA, 20 bp, Artificial Sequence
  chemically synthesized
ctccctcctttggttaattt

SEQ ID NO: 16139 - DNA, 20 bp, Artificial Sequence
  chemically synthesized
cctcctttggttaattttag

SEQ ID NO: 16140 - DNA, 20 bp, Artificial Sequence
  chemically synthesized
ctcctttggttaattttagc

SEQ ID NO: 16141 - DNA, 20 bp, Artificial Sequence
  chemically synthesized
tcctttggttaattttagca

SEQ ID NO: 16142 - DNA, 20 bp, Artificial Sequence
  chemically synthesized
ctttggttaattttagcagg

SEQ ID NO: 16143 - DNA, 20 bp, Artificial Sequence
  chemically synthesized
tttggttaattttagcaggg

SEQ ID NO: 16144 - DNA, 20 bp, Artificial Sequence
  chemically synthesized
ggttaattttagcagggagg

SEQ ID NO: 16145 - DNA, 20 bp, Artificial Sequence
  chemically synthesized
aattttagcagggaggcagc

SEQ ID NO: 16146 - DNA, 20 bp, Artificial Sequence
  chemically synthesized
attttagcagggaggcagct

SEQ ID NO: 16147 - DNA, 20 bp, Artificial Sequence
  chemically synthesized
cagggaggcagctaggtgtg

SEQ ID NO: 16148 - DNA, 20 bp, Artificial Sequence
  chemically synthesized
agggaggcagctaggtgtgt

SEQ ID NO: 16149 - DNA, 20 bp, Artificial Sequence
  chemically synthesized
agctaggtgtgtgggtttct

SEQ ID NO: 16150 - DNA, 20 bp, Artificial Sequence
  chemically synthesized
taggtgtgtgggtttctcgg

SEQ ID NO: 16151 - DNA, 20 bp, Artificial Sequence
  chemically synthesized
tgtgggtttctcggcagctc

SEQ ID NO: 16152 - DNA, 20 bp, Artificial Sequence
  chemically synthesized
gtgggtttctcggcagctca

SEQ ID NO: 16153 - DNA, 20 bp, Artificial Sequence
  chemically synthesized
tgggtttctcggcagctcaa

SEQ ID NO: 16154 - DNA, 20 bp, Artificial Sequence
  chemically synthesized
ttctcggcagctcaagggaa

SEQ ID NO: 16155 - DNA, 20 bp, Artificial Sequence
  chemically synthesized
tctcggcagctcaagggaaa

SEQ ID NO: 16156 - DNA, 20 bp, Artificial Sequence
  chemically synthesized
gctcaagggaaaaggaatta

SEQ ID NO: 16157 - DNA, 20 bp, Artificial Sequence
  chemically synthesized
ctcaagggaaaaggaattaa

SEQ ID NO: 16158 - DNA, 20 bp, Artificial Sequence
  chemically synthesized
agggaaaaggaattaaaggc

SEQ ID NO: 16159 - DNA, 20 bp, Artificial Sequence
  chemically synthesized
gaaaaggaattaaaggctag

SEQ ID NO: 16160 - DNA, 20 bp, Artificial Sequence
  chemically synthesized
aaggaattaaaggctagcag

SEQ ID NO: 16161 - DNA, 20 bp, Artificial Sequence
  chemically synthesized
aggaattaaaggctagcagt

SEQ ID NO: 16162 - DNA, 20 bp, Artificial Sequence
  chemically synthesized
ggacttaaattcccttctct

SEQ ID NO: 16163 - DNA, 20 bp, Artificial Sequence
  chemically synthesized
tcccttctctaagtgataaa

SEQ ID NO: 16164 - DNA, 20 bp, Artificial Sequence
  chemically synthesized
tgataaacagtaacactata

SEQ ID NO: 16165 - DNA, 20 bp, Artificial Sequence
  chemically synthesized
cctcaaaacattttttgctt

SEQ ID NO: 16166 - DNA, 20 bp, Artificial Sequence
  chemically synthesized
cattttttgcttgagcatgt

SEQ ID NO: 16167 - DNA, 20 bp, Artificial Sequence
  chemically synthesized
tgcttgagcatgttagacaa

SEQ ID NO: 16168 - DNA, 20 bp, Artificial Sequence
  chemically synthesized
atgttagacaaaagtcaatg

SEQ ID NO: 16169 - DNA, 20 bp, Artificial Sequence
  chemically synthesized
caatgcagattctgtgatga

SEQ ID NO: 16170 - DNA, 20 bp, Artificial Sequence
  chemically synthesized
gacagacatgccatgcctgt

SEQ ID NO: 16171 - DNA, 20 bp, Artificial Sequence
  chemically synthesized
agacatgccatgcctgttgg

SEQ ID NO: 16172 - DNA, 20 bp, Artificial Sequence
  chemically synthesized
tcttccatctacctaccacc

SEQ ID NO: 16173 - DNA, 20 bp, Artificial Sequence
  chemically synthesized
acctaccacccagctcccga

SEQ ID NO: 16174 - DNA, 20 bp, Artificial Sequence
  chemically synthesized
cctaccacccagctcccgaa

SEQ ID NO: 16175 - DNA, 20 bp, Artificial Sequence
  chemically synthesized
ccacccagctcccgaaaggc

SEQ ID NO: 16176 - DNA, 20 bp, Artificial Sequence
  chemically synthesized
acccagctcccgaaaggcaa

SEQ ID NO: 16177 - DNA, 20 bp, Artificial Sequence
  chemically synthesized
cccagctcccgaaaggcaag

SEQ ID NO: 16178 - DNA, 20 bp, Artificial Sequence
  chemically synthesized
cgaaaggcaagaggtttgtt

SEQ ID NO: 16179 - DNA, 20 bp, Artificial Sequence
  chemically synthesized
gcaagaggtttgttcagttt

SEQ ID NO: 16180 - DNA, 20 bp, Artificial Sequence
  chemically synthesized
caagaggtttgttcagtttt

SEQ ID NO: 16181 - DNA, 20 bp, Artificial Sequence
  chemically synthesized
aggtttgttcagttttagga

SEQ ID NO: 16182 - DNA, 20 bp, Artificial Sequence
  chemically synthesized
ggtttgttcagttttaggaa

SEQ ID NO: 16183 - DNA, 20 bp, Artificial Sequence
  chemically synthesized
ttgttcagttttaggaaagg

SEQ ID NO: 16184 - DNA, 20 bp, Artificial Sequence
  chemically synthesized
catatcatgaattgattcac

SEQ ID NO: 16185 - DNA, 20 bp, Artificial Sequence
  chemically synthesized
tggaacttgtctctccgacc

SEQ ID NO: 16186 - DNA, 20 bp, Artificial Sequence
  chemically synthesized
tccgacctagtttgaccaca

SEQ ID NO: 16187 - DNA, 20 bp, Artificial Sequence
  chemically synthesized
accacaaagttgaaccataa

SEQ ID NO: 16188 - DNA, 20 bp, Artificial Sequence
  chemically synthesized
ccacaaagttgaaccataat

SEQ ID NO: 16189 - DNA, 20 bp, Artificial Sequence
  chemically synthesized
aaagttgaaccataataggt

SEQ ID NO: 16190 - DNA, 20 bp, Artificial Sequence
  chemically synthesized
gttgaaccataataggtcag

SEQ ID NO: 16191 - DNA, 20 bp, Artificial Sequence
  chemically synthesized
accataataggtcagtggtc

SEQ ID NO: 16192 - DNA, 20 bp, Artificial Sequence
  chemically synthesized
cataataggtcagtggtcta

SEQ ID NO: 16193 - DNA, 20 bp, Artificial Sequence
  chemically synthesized
ataataggtcagtggtctag

SEQ ID NO: 16194 - DNA, 20 bp, Artificial Sequence
  chemically synthesized
taataggtcagtggtctaga

SEQ ID NO: 16195 - DNA, 20 bp, Artificial Sequence
  chemically synthesized
aataggtcagtggtctagag

SEQ ID NO: 16196 - DNA, 20 bp, Artificial Sequence
  chemically synthesized
ttatttctcctctccccctc

SEQ ID NO: 16197 - DNA, 20 bp, Artificial Sequence
  chemically synthesized
ttgatcattaaaaccaaaca

SEQ ID NO: 16198 - DNA, 20 bp, Artificial Sequence
  chemically synthesized
tggcattttctttctttttt

SEQ ID NO: 16199 - DNA, 20 bp, Artificial Sequence
  chemically synthesized
ttttttagtgctttctgtga

SEQ ID NO: 16200 - DNA, 20 bp, Artificial Sequence
  chemically synthesized
gtgctttctgtgatagcact

SEQ ID NO: 16201 - DNA, 20 bp, Artificial Sequence
  chemically synthesized
gcactcagatactttccctt

SEQ ID NO: 16202 - DNA, 20 bp, Artificial Sequence
  chemically synthesized
atactttccctttagtgaaa

SEQ ID NO: 16203 - DNA, 20 bp, Artificial Sequence
  chemically synthesized
tactttccctttagtgaaat

SEQ ID NO: 16204 - DNA, 20 bp, Artificial Sequence
  chemically synthesized
tgaaatgggaaatctgctgc

SEQ ID NO: 16205 - DNA, 20 bp, Artificial Sequence
  chemically synthesized
gaaatgggaaatctgctgct

SEQ ID NO: 16206 - DNA, 20 bp, Artificial Sequence
  chemically synthesized
aaatgggaaatctgctgcta

SEQ ID NO: 16207 - DNA, 20 bp, Artificial Sequence
  chemically synthesized
tgggaaatctgctgctaggg

SEQ ID NO: 16208 - DNA, 20 bp, Artificial Sequence
  chemically synthesized
tgctagggaagctgcatttg

SEQ ID NO: 16209 - DNA, 20 bp, Artificial Sequence
  chemically synthesized
ctagggaagctgcatttgtg

SEQ ID NO: 16210 - DNA, 20 bp, Artificial Sequence
  chemically synthesized
catttaccttatgtgacatg

SEQ ID NO: 16211 - DNA, 20 bp, Artificial Sequence
  chemically synthesized
atttaccttatgtgacatgt

SEQ ID NO: 16212 - DNA, 20 bp, Artificial Sequence
  chemically synthesized
ccttatgtgacatgtaggtg

SEQ ID NO: 16213 - DNA, 20 bp, Artificial Sequence
  chemically synthesized
attttatctcccctaccccc

SEQ ID NO: 16214 - DNA, 20 bp, Artificial Sequence
  chemically synthesized
ttatctcccctaccccccag

SEQ ID NO: 16215 - DNA, 20 bp, Artificial Sequence
  chemically synthesized
tatctcccctaccccccagc

SEQ ID NO: 16216 - DNA, 20 bp, Artificial Sequence
  chemically synthesized
ccctaccccccagcaggatg

SEQ ID NO: 16217 - DNA, 20 bp, Artificial Sequence
  chemically synthesized
cctaccccccagcaggatgt

SEQ ID NO: 16218 - DNA, 20 bp, Artificial Sequence
  chemically synthesized
tccatgtgttgtcttgtgac

SEQ ID NO: 16219 - DNA, 20 bp, Artificial Sequence
  chemically synthesized
atgtgttgtcttgtgactgg

SEQ ID NO: 16220 - DNA, 20 bp, Artificial Sequence
  chemically synthesized
tgtgttgtcttgtgactgga

SEQ ID NO: 16221 - DNA, 20 bp, Artificial Sequence
  chemically synthesized
gtgactggaaggaaaatgaa

SEQ ID NO: 16222 - DNA, 20 bp, Artificial Sequence
  chemically synthesized
actggaaggaaaatgaacag

SEQ ID NO: 16223 - DNA, 20 bp, Artificial Sequence
  chemically synthesized
aggaaaatgaacagaagtgt

SEQ ID NO: 16224 - DNA, 20 bp, Artificial Sequence
  chemically synthesized
ggaaaatgaacagaagtgta

SEQ ID NO: 16225 - DNA, 20 bp, Artificial Sequence
  chemically synthesized
agtgtaaggcatgattaatg

SEQ ID NO: 16226 - DNA, 20 bp, Artificial Sequence
  chemically synthesized
taaggcatgattaatgaagc

SEQ ID NO: 16227 - DNA, 20 bp, Artificial Sequence
  chemically synthesized
aggcatgattaatgaagcaa

SEQ ID NO: 16228 - DNA, 20 bp, Artificial Sequence
  chemically synthesized
catgattaatgaagcaagag

SEQ ID NO: 16229 - DNA, 20 bp, Artificial Sequence
  chemically synthesized
atgattaatgaagcaagagc

SEQ ID NO: 16230 - DNA, 20 bp, Artificial Sequence
  chemically synthesized
attaatgaagcaagagcagg

SEQ ID NO: 16231 - DNA, 20 bp, Artificial Sequence
  chemically synthesized
aatgaagcaagagcaggcgg

SEQ ID NO: 16232 - DNA, 20 bp, Artificial Sequence
  chemically synthesized
atgaagcaagagcaggcgga

SEQ ID NO: 16233 - DNA, 20 bp, Artificial Sequence
  chemically synthesized
tgaagcaagagcaggcggaa

SEQ ID NO: 16234 - DNA, 20 bp, Artificial Sequence
  chemically synthesized
gaagcaagagcaggcggaag

SEQ ID NO: 16235 - DNA, 20 bp, Artificial Sequence
  chemically synthesized
ggaaggggatttgtcgtctt

SEQ ID NO: 16236 - DNA, 20 bp, Artificial Sequence
  chemically synthesized
aaggggatttgtcgtcttcg

SEQ ID NO: 16237 - DNA, 20 bp, Artificial Sequence
  chemically synthesized
ttgtcgtcttcggagatcca

SEQ ID NO: 16238 - DNA, 20 bp, Artificial Sequence
  chemically synthesized
ccttgctaaatcaccaaata

SEQ ID NO: 16239 - DNA, 20 bp, Artificial Sequence
  chemically synthesized
ttgctaaatcaccaaatatg

SEQ ID NO: 16240 - DNA, 20 bp, Artificial Sequence
  chemically synthesized
taacatcgtatttacatatc

SEQ ID NO: 16241 - DNA, 20 bp, Artificial Sequence
  chemically synthesized
atatcgagctgctcgtttaa

SEQ ID NO: 16242 - DNA, 20 bp, Artificial Sequence
  chemically synthesized
ctcgtttaaaagacaaaaca

SEQ ID NO: 16243 - DNA, 20 bp, Artificial Sequence
  chemically synthesized
gacaaaacacagtgtctgtc

SEQ ID NO: 16244 - DNA, 20 bp, Artificial Sequence
  chemically synthesized
aaacacagtgtctgtcaagc

SEQ ID NO: 16245 - DNA, 20 bp, Artificial Sequence
  chemically synthesized
ttaaaaccacacttcttact

SEQ ID NO: 16246 - DNA, 20 bp, Artificial Sequence
  chemically synthesized
taaaaccacacttcttactg

SEQ ID NO: 16247 - DNA, 20 bp, Artificial Sequence
  chemically synthesized
cttcttactgaggtcccaaa

SEQ ID NO: 16248 - DNA, 20 bp, Artificial Sequence
  chemically synthesized
ttcttactgaggtcccaaat

SEQ ID NO: 16249 - DNA, 20 bp, Artificial Sequence
  chemically synthesized
gaggtcccaaataggttatt

SEQ ID NO: 16250 - DNA, 20 bp, Artificial Sequence
  chemically synthesized
ccaaataggttattcagtct

SEQ ID NO: 16251 - DNA, 20 bp, Artificial Sequence
  chemically synthesized
ttattcagtcttagattaac

SEQ ID NO: 16252 - DNA, 20 bp, Artificial Sequence
  chemically synthesized
aaattctgtgcctctgtatt

SEQ ID NO: 16253 - DNA, 20 bp, Artificial Sequence
  chemically synthesized
attctgtgcctctgtattta

SEQ ID NO: 16254 - DNA, 20 bp, Artificial Sequence
  chemically synthesized
ttctgtgcctctgtatttag

SEQ ID NO: 16255 - DNA, 20 bp, Artificial Sequence
  chemically synthesized
ctgtgcctctgtatttagag

SEQ ID NO: 16256 - DNA, 20 bp, Artificial Sequence
  chemically synthesized
tgtgcctctgtatttagagg

SEQ ID NO: 16257 - DNA, 20 bp, Artificial Sequence
  chemically synthesized
tagaggaggaatctaaatgc

SEQ ID NO: 16258 - DNA, 20 bp, Artificial Sequence
  chemically synthesized
agaggaggaatctaaatgct

SEQ ID NO: 16259 - DNA, 20 bp, Artificial Sequence
  chemically synthesized
gaggaggaatctaaatgctg

SEQ ID NO: 16260 - DNA, 20 bp, Artificial Sequence
  chemically synthesized
aggaggaatctaaatgctgg

SEQ ID NO: 16261 - DNA, 20 bp, Artificial Sequence
  chemically synthesized
ggaggaatctaaatgctggg

SEQ ID NO: 16262 - DNA, 20 bp, Artificial Sequence
  chemically synthesized
ggaatctaaatgctgggggg

SEQ ID NO: 16263 - DNA, 20 bp, Artificial Sequence
  chemically synthesized
gaatctaaatgctgggggga

SEQ ID NO: 16264 - DNA, 20 bp, Artificial Sequence
  chemically synthesized
tggggggaaggccttacata

SEQ ID NO: 16265 - DNA, 20 bp, Artificial Sequence
  chemically synthesized
ggaaggccttacatatagtt

SEQ ID NO: 16266 - DNA, 20 bp, Artificial Sequence
  chemically synthesized
agttaagacttttactgcta

SEQ ID NO: 16267 - DNA, 20 bp, Artificial Sequence
  chemically synthesized
gctatagttgtgaatctatg

SEQ ID NO: 16268 - DNA, 20 bp, Artificial Sequence
  chemically synthesized
ctatagttgtgaatctatgt

SEQ ID NO: 16269 - DNA, 20 bp, Artificial Sequence
  chemically synthesized
tatagttgtgaatctatgta

SEQ ID NO: 16270 - DNA, 20 bp, Artificial Sequence
  chemically synthesized
gtgaatctatgtagggaaat

SEQ ID NO: 16271 - DNA, 20 bp, Artificial Sequence
  chemically synthesized
gaatctatgtagggaaataa

SEQ ID NO: 16272 - DNA, 20 bp, Artificial Sequence
  chemically synthesized
agatatttgcttgaactccc

SEQ ID NO: 16273 - DNA, 20 bp, Artificial Sequence
  chemically synthesized
ttgaactccctggttgtcta

SEQ ID NO: 16274 - DNA, 20 bp, Artificial Sequence
  chemically synthesized
tgaactccctggttgtctaa

SEQ ID NO: 16275 - DNA, 20 bp, Artificial Sequence
  chemically synthesized
gttctgttattattttttta

SEQ ID NO: 16276 - DNA, 20 bp, Artificial Sequence
  chemically synthesized
ttattatttttttaaagaac

SEQ ID NO: 16277 - DNA, 20 bp, Artificial Sequence
  chemically synthesized
tttttaaagaacaagtataa

SEQ ID NO: 16278 - DNA, 20 bp, Artificial Sequence
  chemically synthesized
ttaaagaacaagtataatag

SEQ ID NO: 16279 - DNA, 20 bp, Artificial Sequence
  chemically synthesized
aaagaacaagtataatagca

SEQ ID NO: 16280 - DNA, 20 bp, Artificial Sequence
  chemically synthesized
acaagtataatagcagagcc

SEQ ID NO: 16281 - DNA, 20 bp, Artificial Sequence
  chemically synthesized
aagtataatagcagagccta

SEQ ID NO: 16282 - DNA, 20 bp, Artificial Sequence
  chemically synthesized
tataatagcagagcctagag

SEQ ID NO: 16283 - DNA, 20 bp, Artificial Sequence
  chemically synthesized
cctagagaagccaaaaccaa

SEQ ID NO: 16284 - DNA, 20 bp, Artificial Sequence
  chemically synthesized
caaatttaaaatatatttta

SEQ ID NO: 16285 - DNA, 20 bp, Artificial Sequence
  chemically synthesized
taataatcaatcatttaact

SEQ ID NO: 16286 - DNA, 20 bp, Artificial Sequence
  chemically synthesized
aatcatttaactgagacgaa

SEQ ID NO: 16287 - DNA, 20 bp, Artificial Sequence
  chemically synthesized
actgagacgaaaagctctct

SEQ ID NO: 16288 - DNA, 20 bp, Artificial Sequence
  chemically synthesized
aaaagctctctaagatgtct

SEQ ID NO: 16289 - DNA, 20 bp, Artificial Sequence
  chemically synthesized
aagatgtctaagatattcaa

SEQ ID NO: 16290 - DNA, 20 bp, Artificial Sequence
  chemically synthesized
agatgtctaagatattcaat

SEQ ID NO: 16291 - DNA, 20 bp, Artificial Sequence
  chemically synthesized
atattcaatgggcgcacaac

SEQ ID NO: 16292 - DNA, 20 bp, Artificial Sequence
  chemically synthesized
gcacaacaagtgctgtgacc

SEQ ID NO: 16293 - DNA, 20 bp, Artificial Sequence
  chemically synthesized
cacaacaagtgctgtgaccc

SEQ ID NO: 16294 - DNA, 20 bp, Artificial Sequence
  chemically synthesized
acaagtgctgtgacccaggt

SEQ ID NO: 16295 - DNA, 20 bp, Artificial Sequence
  chemically synthesized
caagtgctgtgacccaggtg

SEQ ID NO: 16296 - DNA, 20 bp, Artificial Sequence
  chemically synthesized
ttcgtgcatgaataattaca

SEQ ID NO: 16297 - DNA, 20 bp, Artificial Sequence
  chemically synthesized
ttaatcacctgttcccaccc

SEQ ID NO: 16298 - DNA, 20 bp, Artificial Sequence
  chemically synthesized
acctgttcccaccctggaac

SEQ ID NO: 16299 - DNA, 20 bp, Artificial Sequence
  chemically synthesized
tggaactggctgaacataaa

SEQ ID NO: 16300 - DNA, 20 bp, Artificial Sequence
  chemically synthesized
ctggctgaacataaatagtg

SEQ ID NO: 16301 - DNA, 20 bp, Artificial Sequence
  chemically synthesized
aatagtgtggtcacatctca

SEQ ID NO: 16302 - DNA, 20 bp, Artificial Sequence
  chemically synthesized
gtgtggtcacatctcaaagt

SEQ ID NO: 16303 - DNA, 20 bp, Artificial Sequence
  chemically synthesized
cacatctcaaagtgagatgt

SEQ ID NO: 16304 - DNA, 20 bp, Artificial Sequence
  chemically synthesized
caaagtgagatgtcagtaac

SEQ ID NO: 16305 - DNA, 20 bp, Artificial Sequence
  chemically synthesized
tcacgacttctcataattca

SEQ ID NO: 16306 - DNA, 20 bp, Artificial Sequence
  chemically synthesized
ataattcacagtaatgaatt

SEQ ID NO: 16307 - DNA, 20 bp, Artificial Sequence
  chemically synthesized
aattcacagtaatgaattaa

SEQ ID NO: 16308 - DNA, 20 bp, Artificial Sequence
  chemically synthesized
aatgaattaagagtttccta

SEQ ID NO: 16309 - DNA, 20 bp, Artificial Sequence
  chemically synthesized
attaagagtttcctatggtg

SEQ ID NO: 16310 - DNA, 20 bp, Artificial Sequence
  chemically synthesized
gcacataaattccgacgctc

SEQ ID NO: 16311 - DNA, 20 bp, Artificial Sequence
  chemically synthesized
aattccgacgctctggccct

SEQ ID NO: 16312 - DNA, 20 bp, Artificial Sequence
  chemically synthesized
attccgacgctctggccctc

SEQ ID NO: 16313 - DNA, 20 bp, Artificial Sequence
  chemically synthesized
ctggccctcaggtgcccctg

SEQ ID NO: 16314 - DNA, 20 bp, Artificial Sequence
  chemically synthesized
cctcaggtgcccctgaagcg

SEQ ID NO: 16315 - DNA, 20 bp, Artificial Sequence
  chemically synthesized
gtgcccctgaagcgaagttc

SEQ ID NO: 16316 - DNA, 20 bp, Artificial Sequence
  chemically synthesized
cccctgaagcgaagttctgg

SEQ ID NO: 16317 - DNA, 20 bp, Artificial Sequence
  chemically synthesized
tgaagcgaagttctggaaga

SEQ ID NO: 16318 - DNA, 20 bp, Artificial Sequence
  chemically synthesized
gacggctgtgtgtgtacccc

SEQ ID NO: 16319 - DNA, 20 bp, Artificial Sequence
  chemically synthesized
acccccagcccatttctcta

SEQ ID NO: 16320 - DNA, 20 bp, Artificial Sequence
  chemically synthesized
aagcacgtctgcacaattcc

SEQ ID NO: 16321 - DNA, 20 bp, Artificial Sequence
  chemically synthesized
tctgcttttctttttatgat

SEQ ID NO: 16322 - DNA, 20 bp, Artificial Sequence
  chemically synthesized
ctgcttttctttttatgatg

SEQ ID NO: 16323 - DNA, 20 bp, Artificial Sequence
  chemically synthesized
cttttctttttatgatgagg

SEQ ID NO: 16324 - DNA, 20 bp, Artificial Sequence
  chemically synthesized
ttttctttttatgatgagga

SEQ ID NO: 16325 - DNA, 20 bp, Artificial Sequence
  chemically synthesized
gatgaggaaggaaacaataa

SEQ ID NO: 16326 - DNA, 20 bp, Artificial Sequence
  chemically synthesized
aaacaataacagtaatcatt

SEQ ID NO: 16327 - DNA, 20 bp, Artificial Sequence
  chemically synthesized
caataacagtaatcattcag

SEQ ID NO: 16328 - DNA, 20 bp, Artificial Sequence
  chemically synthesized
tatttgaattgtgtcacaaa

SEQ ID NO: 16329 - DNA, 20 bp, Artificial Sequence
  chemically synthesized
tgaattgtgtcacaaaaaga

SEQ ID NO: 16330 - DNA, 20 bp, Artificial Sequence
  chemically synthesized
gaattgtgtcacaaaaagaa

SEQ ID NO: 16331 - DNA, 20 bp, Artificial Sequence
  chemically synthesized
attgtgtcacaaaaagaaag

SEQ ID NO: 16332 - DNA, 20 bp, Artificial Sequence
  chemically synthesized
gtgtcacaaaaagaaaggag

SEQ ID NO: 16333 - DNA, 20 bp, Artificial Sequence
  chemically synthesized
gagaagcaatgccttgtatt

SEQ ID NO: 16334 - DNA, 20 bp, Artificial Sequence
  chemically synthesized
agaagcaatgccttgtatta

SEQ ID NO: 16335 - DNA, 20 bp, Artificial Sequence
  chemically synthesized
gcaatgccttgtattaagga

SEQ ID NO: 16336 - DNA, 20 bp, Artificial Sequence
  chemically synthesized
aatgccttgtattaaggaaa

SEQ ID NO: 16337 - DNA, 20 bp, Artificial Sequence
  chemically synthesized
gagatatattgatgaatctc

SEQ ID NO: 16338 - DNA, 20 bp, Artificial Sequence
  chemically synthesized
atatattgatgaatctctag

SEQ ID NO: 16339 - DNA, 20 bp, Artificial Sequence
  chemically synthesized
aatctctagaagaatgtgtt

SEQ ID NO: 16340 - DNA, 20 bp, Artificial Sequence
  chemically synthesized
tgtgtttggcaaccacataa

SEQ ID NO: 16341 - DNA, 20 bp, Artificial Sequence
  chemically synthesized
gtgtttggcaaccacataaa

SEQ ID NO: 16342 - DNA, 20 bp, Artificial Sequence
  chemically synthesized
tttggcaaccacataaaagg

SEQ ID NO: 16343 - DNA, 20 bp, Artificial Sequence
  chemically synthesized
cacataaaaggtagtcattt

SEQ ID NO: 16344 - DNA, 20 bp, Artificial Sequence
  chemically synthesized
aggtagtcatttaagcgtgc

SEQ ID NO: 16345 - DNA, 20 bp, Artificial Sequence
  chemically synthesized
ggtagtcatttaagcgtgct

SEQ ID NO: 16346 - DNA, 20 bp, Artificial Sequence
  chemically synthesized
agtcatttaagcgtgctggg

SEQ ID NO: 16347 - DNA, 20 bp, Artificial Sequence
  chemically synthesized
gtcatttaagcgtgctgggt

SEQ ID NO: 16348 - DNA, 20 bp, Artificial Sequence
  chemically synthesized
tttaagcgtgctgggtagga

SEQ ID NO: 16349 - DNA, 20 bp, Artificial Sequence
  chemically synthesized
ttaagcgtgctgggtaggaa

SEQ ID NO: 16350 - DNA, 20 bp, Artificial Sequence
  chemically synthesized
gggtaggaaaggctttatta

SEQ ID NO: 16351 - DNA, 20 bp, Artificial Sequence
  chemically synthesized
aggctttattaaagtgatgt

SEQ ID NO: 16352 - DNA, 20 bp, Artificial Sequence
  chemically synthesized
tttattaaagtgatgtaagt

SEQ ID NO: 16353 - DNA, 20 bp, Artificial Sequence
  chemically synthesized
aagtgatgtaagttggattt

SEQ ID NO: 16354 - DNA, 20 bp, Artificial Sequence
  chemically synthesized
gttggatttgagttcactgt

SEQ ID NO: 16355 - DNA, 20 bp, Artificial Sequence
  chemically synthesized
tgtgagcctgtactatttta

SEQ ID NO: 16356 - DNA, 20 bp, Artificial Sequence
  chemically synthesized
gtgagcctgtactattttat

SEQ ID NO: 16357 - DNA, 20 bp, Artificial Sequence
  chemically synthesized
agcctgtactattttatagg

SEQ ID NO: 16358 - DNA, 20 bp, Artificial Sequence
  chemically synthesized
gcctgtactattttataggc

SEQ ID NO: 16359 - DNA, 20 bp, Artificial Sequence
  chemically synthesized
tgtactattttataggcagg

SEQ ID NO: 16360 - DNA, 20 bp, Artificial Sequence
  chemically synthesized
ctattttataggcaggaagc

SEQ ID NO: 16361 - DNA, 20 bp, Artificial Sequence
  chemically synthesized
ggcaggaagcaagaataaaa

SEQ ID NO: 16362 - DNA, 20 bp, Artificial Sequence
  chemically synthesized
aagcaagaataaaacagtga

SEQ ID NO: 16363 - DNA, 20 bp, Artificial Sequence
  chemically synthesized
cagtgacagatcttcttcct

SEQ ID NO: 16364 - DNA, 20 bp, Artificial Sequence
  chemically synthesized
tcttcttcctaagataaata

SEQ ID NO: 16365 - DNA, 20 bp, Artificial Sequence
  chemically synthesized
ttcctaagataaataaagct

SEQ ID NO: 16366 - DNA, 20 bp, Artificial Sequence
  chemically synthesized
gataaataaagcttagaatt

SEQ ID NO: 16367 - DNA, 20 bp, Artificial Sequence
  chemically synthesized
ataaataaagcttagaattc

SEQ ID NO: 16368 - DNA, 20 bp, Artificial Sequence
  chemically synthesized
agcttagaattcgggacttt

SEQ ID NO: 16369 - DNA, 20 bp, Artificial Sequence
  chemically synthesized
tagaattcgggactttcaga

SEQ ID NO: 16370 - DNA, 20 bp, Artificial Sequence
  chemically synthesized
agaattcgggactttcagat

SEQ ID NO: 16371 - DNA, 20 bp, Artificial Sequence
  chemically synthesized
aattcgggactttcagatag

SEQ ID NO: 16372 - DNA, 20 bp, Artificial Sequence
  chemically synthesized
ggactttcagataggagaat

SEQ ID NO: 16373 - DNA, 20 bp, Artificial Sequence
  chemically synthesized
gactttcagataggagaata

SEQ ID NO: 16374 - DNA, 20 bp, Artificial Sequence
  chemically synthesized
tttcagataggagaataagg

SEQ ID NO: 16375 - DNA, 20 bp, Artificial Sequence
  chemically synthesized
tcagataggagaataaggca

SEQ ID NO: 16376 - DNA, 20 bp, Artificial Sequence
  chemically synthesized
ggcagagttctttaaatctt

SEQ ID NO: 16377 - DNA, 20 bp, Artificial Sequence
  chemically synthesized
tctttaaatcttgagtaaaa

SEQ ID NO: 16378 - DNA, 20 bp, Artificial Sequence
  chemically synthesized
gtatgcattttcactgtact

SEQ ID NO: 16379 - DNA, 20 bp, Artificial Sequence
  chemically synthesized
tatgcattttcactgtactc

SEQ ID NO: 16380 - DNA, 20 bp, Artificial Sequence
  chemically synthesized
cactgtactcaggcctctcc

SEQ ID NO: 16381 - DNA, 20 bp, Artificial Sequence
  chemically synthesized
tactcaggcctctccaagct

SEQ ID NO: 16382 - DNA, 20 bp, Artificial Sequence
  chemically synthesized
tttttttttttttttttttt

SEQ ID NO: 16383 - DNA, 20 bp, Artificial Sequence
  chemically synthesized
tttttttttttttttttaga

SEQ ID NO: 16384 - DNA, 20 bp, Artificial Sequence
  chemically synthesized
tttttttttttttttagaca

SEQ ID NO: 16385 - DNA, 20 bp, Artificial Sequence
  chemically synthesized
agagttttgctcttgttgcc

SEQ ID NO: 16386 - DNA, 20 bp, Artificial Sequence
  chemically synthesized
gagttttgctcttgttgccc

SEQ ID NO: 16387 - DNA, 20 bp, Artificial Sequence
  chemically synthesized
tttgctcttgttgcccaggc

SEQ ID NO: 16388 - DNA, 20 bp, Artificial Sequence
  chemically synthesized
tgctcttgttgcccaggctg

SEQ ID NO: 16389 - DNA, 20 bp, Artificial Sequence
  chemically synthesized
ttgttgcccaggctggagtg

SEQ ID NO: 16390 - DNA, 20 bp, Artificial Sequence
  chemically synthesized
ttgcccaggctggagtgcag

SEQ ID NO: 16391 - DNA, 20 bp, Artificial Sequence
  chemically synthesized
ggagtgcagtggcatgattt

SEQ ID NO: 16392 - DNA, 20 bp, Artificial Sequence
  chemically synthesized
tcactgcaacctctgcctcc

SEQ ID NO: 16393 - DNA, 20 bp, Artificial Sequence
  chemically synthesized
cactgcaacctctgcctcct

SEQ ID NO: 16394 - DNA, 20 bp, Artificial Sequence
  chemically synthesized
aacctctgcctcctaggttc

SEQ ID NO: 16395 - DNA, 20 bp, Artificial Sequence
  chemically synthesized
ttcaagcgattctcctgcct

SEQ ID NO: 16396 - DNA, 20 bp, Artificial Sequence
  chemically synthesized
ttctcctgcctcagcctccc

SEQ ID NO: 16397 - DNA, 20 bp, Artificial Sequence
  chemically synthesized
tcctgcctcagcctcccaag

SEQ ID NO: 16398 - DNA, 20 bp, Artificial Sequence
  chemically synthesized
gcctcagcctcccaagtagc

SEQ ID NO: 16399 - DNA, 20 bp, Artificial Sequence
  chemically synthesized
cctcagcctcccaagtagct

SEQ ID NO: 16400 - DNA, 20 bp, Artificial Sequence
  chemically synthesized
ctcccaagtagctgggatta

SEQ ID NO: 16401 - DNA, 20 bp, Artificial Sequence
  chemically synthesized
tcccaagtagctgggattac

SEQ ID NO: 16402 - DNA, 20 bp, Artificial Sequence
  chemically synthesized
caggcgtgtgccactacgcc

SEQ ID NO: 16403 - DNA, 20 bp, Artificial Sequence
  chemically synthesized
cgtgtgccactacgcccagc

SEQ ID NO: 16404 - DNA, 20 bp, Artificial Sequence
  chemically synthesized
cagctagttttttgtatttt

SEQ ID NO: 16405 - DNA, 20 bp, Artificial Sequence
  chemically synthesized
ctagttttttgtattttcag

SEQ ID NO: 16406 - DNA, 20 bp, Artificial Sequence
  chemically synthesized
agttttttgtattttcagta

SEQ ID NO: 16407 - DNA, 20 bp, Artificial Sequence
  chemically synthesized
gttttttgtattttcagtag

SEQ ID NO: 16408 - DNA, 20 bp, Artificial Sequence
  chemically synthesized
ttttgtattttcagtagagg

SEQ ID NO: 16409 - DNA, 20 bp, Artificial Sequence
  chemically synthesized
tttgtattttcagtagaggc

SEQ ID NO: 16410 - DNA, 20 bp, Artificial Sequence
  chemically synthesized
ttgtattttcagtagaggca

SEQ ID NO: 16411 - DNA, 20 bp, Artificial Sequence
  chemically synthesized
gaggcagggtttcaccatgt

SEQ ID NO: 16412 - DNA, 20 bp, Artificial Sequence
  chemically synthesized
cagggtttcaccatgttggc

SEQ ID NO: 16413 - DNA, 20 bp, Artificial Sequence
  chemically synthesized
agggtttcaccatgttggcc

SEQ ID NO: 16414 - DNA, 20 bp, Artificial Sequence
  chemically synthesized
tttcaccatgttggccaggc

SEQ ID NO: 16415 - DNA, 20 bp, Artificial Sequence
  chemically synthesized
tggtcttgaactcctgacct

SEQ ID NO: 16416 - DNA, 20 bp, Artificial Sequence
  chemically synthesized
ggtcttgaactcctgacctc

SEQ ID NO: 16417 - DNA, 20 bp, Artificial Sequence
  chemically synthesized
ctgacctcaggtgatccacc

SEQ ID NO: 16418 - DNA, 20 bp, Artificial Sequence
  chemically synthesized
ctcaggtgatccacctggct

SEQ ID NO: 16419 - DNA, 20 bp, Artificial Sequence
  chemically synthesized
ccacctggcttggcctccca

SEQ ID NO: 16420 - DNA, 20 bp, Artificial Sequence
  chemically synthesized
ggcttggcctcccaaagtgc

SEQ ID NO: 16421 - DNA, 20 bp, Artificial Sequence
  chemically synthesized
gcttggcctcccaaagtgct

SEQ ID NO: 16422 - DNA, 20 bp, Artificial Sequence
  chemically synthesized
ctcccaaagtgctgggatta

SEQ ID NO: 16423 - DNA, 20 bp, Artificial Sequence
  chemically synthesized
tcccaaagtgctgggattac

SEQ ID NO: 16424 - DNA, 20 bp, Artificial Sequence
  chemically synthesized
agtgctgggattacaggctt

SEQ ID NO: 16425 - DNA, 20 bp, Artificial Sequence
  chemically synthesized
caggcttgagcgaccgcacc

SEQ ID NO: 16426 - DNA, 20 bp, Artificial Sequence
  chemically synthesized
gaccgcacctggcccaaact

SEQ ID NO: 16427 - DNA, 20 bp, Artificial Sequence
  chemically synthesized
ggcccaaactgagtattttt

SEQ ID NO: 16428 - DNA, 20 bp, Artificial Sequence
  chemically synthesized
cccaaactgagtatttttta

SEQ ID NO: 16429 - DNA, 20 bp, Artificial Sequence
  chemically synthesized
ccaaactgagtattttttag

SEQ ID NO: 16430 - DNA, 20 bp, Artificial Sequence
  chemically synthesized
tttagaggattctttttacc

SEQ ID NO: 16431 - DNA, 20 bp, Artificial Sequence
  chemically synthesized
gattctttttacctggtgaa

SEQ ID NO: 16432 - DNA, 20 bp, Artificial Sequence
  chemically synthesized
ctttttacctggtgaataga

SEQ ID NO: 16433 - DNA, 20 bp, Artificial Sequence
  chemically synthesized
tttttacctggtgaatagat

SEQ ID NO: 16434 - DNA, 20 bp, Artificial Sequence
  chemically synthesized
cttcatccacgtacacatat

SEQ ID NO: 16435 - DNA, 20 bp, Artificial Sequence
  chemically synthesized
acacatatgagctgtacaca

SEQ ID NO: 16436 - DNA, 20 bp, Artificial Sequence
  chemically synthesized
ctgtacacatagatgttaat

SEQ ID NO: 16437 - DNA, 20 bp, Artificial Sequence
  chemically synthesized
tgtacacatagatgttaatc

SEQ ID NO: 16438 - DNA, 20 bp, Artificial Sequence
  chemically synthesized
ttgtgtgattgtgatccatt

SEQ ID NO: 16439 - DNA, 20 bp, Artificial Sequence
  chemically synthesized
gtgatccattgagatcattg

SEQ ID NO: 16440 - DNA, 20 bp, Artificial Sequence
  chemically synthesized
atccattgagatcattgaag

SEQ ID NO: 16441 - DNA, 20 bp, Artificial Sequence
  chemically synthesized
tcattgaagtagtattaatt

SEQ ID NO: 16442 - DNA, 20 bp, Artificial Sequence
  chemically synthesized
tgaagtagtattaatttagc

SEQ ID NO: 16443 - DNA, 20 bp, Artificial Sequence
  chemically synthesized
gaagtagtattaatttagct

SEQ ID NO: 16444 - DNA, 20 bp, Artificial Sequence
  chemically synthesized
gtattaatttagctgggaat

SEQ ID NO: 16445 - DNA, 20 bp, Artificial Sequence
  chemically synthesized
ttaatttagctgggaattag

SEQ ID NO: 16446 - DNA, 20 bp, Artificial Sequence
  chemically synthesized
aattagcagcttatgttgtg

SEQ ID NO: 16447 - DNA, 20 bp, Artificial Sequence
  chemically synthesized
attagcagcttatgttgtgt

SEQ ID NO: 16448 - DNA, 20 bp, Artificial Sequence
  chemically synthesized
cagcttatgttgtgtgggcc

SEQ ID NO: 16449 - DNA, 20 bp, Artificial Sequence
  chemically synthesized
gtgtgtcaaatatccaccct

SEQ ID NO: 16450 - DNA, 20 bp, Artificial Sequence
  chemically synthesized
aaatatccaccctcagatat

SEQ ID NO: 16451 - DNA, 20 bp, Artificial Sequence
  chemically synthesized
tatccaccctcagatatcag

SEQ ID NO: 16452 - DNA, 20 bp, Artificial Sequence
  chemically synthesized
tatcagcagcctttgacttg

SEQ ID NO: 16453 - DNA, 20 bp, Artificial Sequence
  chemically synthesized
agcagcctttgacttgcagt

SEQ ID NO: 16454 - DNA, 20 bp, Artificial Sequence
  chemically synthesized
cagcctttgacttgcagtca

SEQ ID NO: 16455 - DNA, 20 bp, Artificial Sequence
  chemically synthesized
cttgcagtcagagctttcaa

SEQ ID NO: 16456 - DNA, 20 bp, Artificial Sequence
  chemically synthesized
ttgcagtcagagctttcaat

SEQ ID NO: 16457 - DNA, 20 bp, Artificial Sequence
  chemically synthesized
tgcagtcagagctttcaata

SEQ ID NO: 16458 - DNA, 20 bp, Artificial Sequence
  chemically synthesized
gcagtcagagctttcaatag

SEQ ID NO: 16459 - DNA, 20 bp, Artificial Sequence
  chemically synthesized
tgttttgttttctttttttt

SEQ ID NO: 16460 - DNA, 20 bp, Artificial Sequence
  chemically synthesized
tttagtctcatattttatga

SEQ ID NO: 16461 - DNA, 20 bp, Artificial Sequence
  chemically synthesized
ttagtctcatattttatgat

SEQ ID NO: 16462 - DNA, 20 bp, Artificial Sequence
  chemically synthesized
tagtctcatattttatgatg

SEQ ID NO: 16463 - DNA, 20 bp, Artificial Sequence
  chemically synthesized
agtctcatattttatgatgg

SEQ ID NO: 16464 - DNA, 20 bp, Artificial Sequence
  chemically synthesized
gtctcatattttatgatggg

SEQ ID NO: 16465 - DNA, 20 bp, Artificial Sequence
  chemically synthesized
atgatggggggaaatattca

SEQ ID NO: 16466 - DNA, 20 bp, Artificial Sequence
  chemically synthesized
atggggggaaatattcatgg

SEQ ID NO: 16467 - DNA, 20 bp, Artificial Sequence
  chemically synthesized
gtgaaactgctgttccctta

SEQ ID NO: 16468 - DNA, 20 bp, Artificial Sequence
  chemically synthesized
actgctgttcccttatagaa

SEQ ID NO: 16469 - DNA, 20 bp, Artificial Sequence
  chemically synthesized
caaacattatcccatcatgt

SEQ ID NO: 16470 - DNA, 20 bp, Artificial Sequence
  chemically synthesized
tatcccatcatgtcagattt

SEQ ID NO: 16471 - DNA, 20 bp, Artificial Sequence
  chemically synthesized
atcccatcatgtcagatttg

SEQ ID NO: 16472 - DNA, 20 bp, Artificial Sequence
  chemically synthesized
tcatgtcagatttgaggttt

SEQ ID NO: 16473 - DNA, 20 bp, Artificial Sequence
  chemically synthesized
aggttttggcttattgcaca

SEQ ID NO: 16474 - DNA, 20 bp, Artificial Sequence
  chemically synthesized
ggttttggcttattgcacat

SEQ ID NO: 16475 - DNA, 20 bp, Artificial Sequence
  chemically synthesized
gcacataggaatctttaaat

SEQ ID NO: 16476 - DNA, 20 bp, Artificial Sequence
  chemically synthesized
cacataggaatctttaaatt

SEQ ID NO: 16477 - DNA, 20 bp, Artificial Sequence
  chemically synthesized
aggaatctttaaattaggtt

SEQ ID NO: 16478 - DNA, 20 bp, Artificial Sequence
  chemically synthesized
ggaatctttaaattaggttt

SEQ ID NO: 16479 - DNA, 20 bp, Artificial Sequence
  chemically synthesized
attaggtttgggctgtcata

SEQ ID NO: 16480 - DNA, 20 bp, Artificial Sequence
  chemically synthesized
ggtttgggctgtcataaagt

SEQ ID NO: 16481 - DNA, 20 bp, Artificial Sequence
  chemically synthesized
tgtcataaagttagcttttt

SEQ ID NO: 16482 - DNA, 20 bp, Artificial Sequence
  chemically synthesized
tcataaagttagctttttga

SEQ ID NO: 16483 - DNA, 20 bp, Artificial Sequence
  chemically synthesized
aagttagctttttgagagac

SEQ ID NO: 16484 - DNA, 20 bp, Artificial Sequence
  chemically synthesized
gttagctttttgagagacta

SEQ ID NO: 16485 - DNA, 20 bp, Artificial Sequence
  chemically synthesized
gactagagaaaaaatatgac

SEQ ID NO: 16486 - DNA, 20 bp, Artificial Sequence
  chemically synthesized
atgacaagtcctataaaatg

SEQ ID NO: 16487 - DNA, 20 bp, Artificial Sequence
  chemically synthesized
aagtcctataaaatgtagta

SEQ ID NO: 16488 - DNA, 20 bp, Artificial Sequence
  chemically synthesized
tctctttaaaatcatgaaca

SEQ ID NO: 16489 - DNA, 20 bp, Artificial Sequence
  chemically synthesized
atgaacatagacatttatat

SEQ ID NO: 16490 - DNA, 20 bp, Artificial Sequence
  chemically synthesized
tgaacatagacatttatatc

SEQ ID NO: 16491 - DNA, 20 bp, Artificial Sequence
  chemically synthesized
gaacatagacatttatatca

SEQ ID NO: 16492 - DNA, 20 bp, Artificial Sequence
  chemically synthesized
ggtatttaaaattatttgcc

SEQ ID NO: 16493 - DNA, 20 bp, Artificial Sequence
  chemically synthesized
tttaaaattatttgcctaga

SEQ ID NO: 16494 - DNA, 20 bp, Artificial Sequence
  chemically synthesized
aattatttgcctagacagta

SEQ ID NO: 16495 - DNA, 20 bp, Artificial Sequence
  chemically synthesized
atttgcctagacagtatagc

SEQ ID NO: 16496 - DNA, 20 bp, Artificial Sequence
  chemically synthesized
tagacagtatagctggtatt

SEQ ID NO: 16497 - DNA, 20 bp, Artificial Sequence
  chemically synthesized
gtatttagataatgatatat

SEQ ID NO: 16498 - DNA, 20 bp, Artificial Sequence
  chemically synthesized
ttagataatgatatatcaga

SEQ ID NO: 16499 - DNA, 20 bp, Artificial Sequence
  chemically synthesized
tatatcagacagatactcta

SEQ ID NO: 16500 - DNA, 20 bp, Artificial Sequence
  chemically synthesized
atcagacagatactctaaag

SEQ ID NO: 16501 - DNA, 20 bp, Artificial Sequence
  chemically synthesized
tcagacagatactctaaaga

SEQ ID NO: 16502 - DNA, 20 bp, Artificial Sequence
  chemically synthesized
cagacagatactctaaagaa

SEQ ID NO: 16503 - DNA, 20 bp, Artificial Sequence
  chemically synthesized
gacagatactctaaagaagg

SEQ ID NO: 16504 - DNA, 20 bp, Artificial Sequence
  chemically synthesized
tactctaaagaagggagata

SEQ ID NO: 16505 - DNA, 20 bp, Artificial Sequence
  chemically synthesized
ggagatatagtaattcaaaa

SEQ ID NO: 16506 - DNA, 20 bp, Artificial Sequence
  chemically synthesized
aattcaaaatggaaatacat

SEQ ID NO: 16507 - DNA, 20 bp, Artificial Sequence
  chemically synthesized
atacattagcatgctcttaa

SEQ ID NO: 16508 - DNA, 20 bp, Artificial Sequence
  chemically synthesized
atcaaatacaatatgctttt

SEQ ID NO: 16509 - DNA, 20 bp, Artificial Sequence
  chemically synthesized
acaatatgcttttcagaatt

SEQ ID NO: 16510 - DNA, 20 bp, Artificial Sequence
  chemically synthesized
tatccattctgattctctcc

SEQ ID NO: 16511 - DNA, 20 bp, Artificial Sequence
  chemically synthesized
attctgattctctcctagct

SEQ ID NO: 16512 - DNA, 20 bp, Artificial Sequence
  chemically synthesized
tctcctagctcagactgaac

SEQ ID NO: 16513 - DNA, 20 bp, Artificial Sequence
  chemically synthesized
tcctagctcagactgaactg

SEQ ID NO: 16514 - DNA, 20 bp, Artificial Sequence
  chemically synthesized
cctagctcagactgaactgg

SEQ ID NO: 16515 - DNA, 20 bp, Artificial Sequence
  chemically synthesized
ggatgtatttgtgtacctta

SEQ ID NO: 16516 - DNA, 20 bp, Artificial Sequence
  chemically synthesized
cttatggtgtaattgtaaat

SEQ ID NO: 16517 - DNA, 20 bp, Artificial Sequence
  chemically synthesized
gtaaatgagactataaatta

SEQ ID NO: 16518 - DNA, 20 bp, Artificial Sequence
  chemically synthesized
ataaaaacgactgacttctg

SEQ ID NO: 16519 - DNA, 20 bp, Artificial Sequence
  chemically synthesized
tgacttctgaagtgaatttt

SEQ ID NO: 16520 - DNA, 20 bp, Artificial Sequence
  chemically synthesized
tctgaagtgaattttcagca

SEQ ID NO: 16521 - DNA, 20 bp, Artificial Sequence
  chemically synthesized
gaagtgaattttcagcatgg

SEQ ID NO: 16522 - DNA, 20 bp, Artificial Sequence
  chemically synthesized
taccacaaaaaacaatatac

SEQ ID NO: 16523 - DNA, 20 bp, Artificial Sequence
  chemically synthesized
ttttacttaccttcaaaatc

SEQ ID NO: 16524 - DNA, 20 bp, Artificial Sequence
  chemically synthesized
ttacttaccttcaaaatcca

SEQ ID NO: 16525 - DNA, 20 bp, Artificial Sequence
  chemically synthesized
acttaccttcaaaatccaga

SEQ ID NO: 16526 - DNA, 20 bp, Artificial Sequence
  chemically synthesized
taccttcaaaatccagagag

SEQ ID NO: 16527 - DNA, 20 bp, Artificial Sequence
  chemically synthesized
ccttcaaaatccagagagta

SEQ ID NO: 16528 - DNA, 20 bp, Artificial Sequence
  chemically synthesized
agagaatattgttttctaat

SEQ ID NO: 16529 - DNA, 20 bp, Artificial Sequence
  chemically synthesized
attgttttctaataagtacc

SEQ ID NO: 16530 - DNA, 20 bp, Artificial Sequence
  chemically synthesized
ttgttttctaataagtacct

SEQ ID NO: 16531 - DNA, 20 bp, Artificial Sequence
  chemically synthesized
ataagtacctaggattttca

SEQ ID NO: 16532 - DNA, 20 bp, Artificial Sequence
  chemically synthesized
taagtacctaggattttcat

SEQ ID NO: 16533 - DNA, 20 bp, Artificial Sequence
  chemically synthesized
aagtacctaggattttcata

SEQ ID NO: 16534 - DNA, 20 bp, Artificial Sequence
  chemically synthesized
gtacctaggattttcatagg

SEQ ID NO: 16535 - DNA, 20 bp, Artificial Sequence
  chemically synthesized
catagggagcctatgtttgt

SEQ ID NO: 16536 - DNA, 20 bp, Artificial Sequence
  chemically synthesized
atagggagcctatgtttgtg

SEQ ID NO: 16537 - DNA, 20 bp, Artificial Sequence
  chemically synthesized
gtttgtgaggccactatcca

SEQ ID NO: 16538 - DNA, 20 bp, Artificial Sequence
  chemically synthesized
aagactaatgttcatgaaac

SEQ ID NO: 16539 - DNA, 20 bp, Artificial Sequence
  chemically synthesized
agactaatgttcatgaaact

SEQ ID NO: 16540 - DNA, 20 bp, Artificial Sequence
  chemically synthesized
actaatgttcatgaaactgg

SEQ ID NO: 16541 - DNA, 20 bp, Artificial Sequence
  chemically synthesized
aaactgggagtcctatatac

SEQ ID NO: 16542 - DNA, 20 bp, Artificial Sequence
  chemically synthesized
tacaagctgtatttgtaaat

SEQ ID NO: 16543 - DNA, 20 bp, Artificial Sequence
  chemically synthesized
agctgtatttgtaaataaga

SEQ ID NO: 16544 - DNA, 20 bp, Artificial Sequence
  chemically synthesized
ctgtatttgtaaataagaca

SEQ ID NO: 16545 - DNA, 20 bp, Artificial Sequence
  chemically synthesized
atttgtaaataagacagaga

SEQ ID NO: 16546 - DNA, 20 bp, Artificial Sequence
  chemically synthesized
tttgtaaataagacagagaa

SEQ ID NO: 16547 - DNA, 20 bp, Artificial Sequence
  chemically synthesized
gacagagaaaggttgtgaac

SEQ ID NO: 16548 - DNA, 20 bp, Artificial Sequence
  chemically synthesized
agagaaaggttgtgaactgg

SEQ ID NO: 16549 - DNA, 20 bp, Artificial Sequence
  chemically synthesized
aaggttgtgaactggcagct

SEQ ID NO: 16550 - DNA, 20 bp, Artificial Sequence
  chemically synthesized
gcagcttggatgttttgtca

SEQ ID NO: 16551 - DNA, 20 bp, Artificial Sequence
  chemically synthesized
gttttgtcaaagtacaatgt

SEQ ID NO: 16552 - DNA, 20 bp, Artificial Sequence
  chemically synthesized
tttgtcaaagtacaatgtca

SEQ ID NO: 16553 - DNA, 20 bp, Artificial Sequence
  chemically synthesized
atgtcagagaaactctttct

SEQ ID NO: 16554 - DNA, 20 bp, Artificial Sequence
  chemically synthesized
tttctaagacaaattgtaaa

SEQ ID NO: 16555 - DNA, 20 bp, Artificial Sequence
  chemically synthesized
aattgtaaatagaactgtca

SEQ ID NO: 16556 - DNA, 20 bp, Artificial Sequence
  chemically synthesized
gtcacagtgattgcatgatt

SEQ ID NO: 16557 - DNA, 20 bp, Artificial Sequence
  chemically synthesized
gtgattgcatgattgagccg

SEQ ID NO: 16558 - DNA, 20 bp, Artificial Sequence
  chemically synthesized
attgcatgattgagccgcag

SEQ ID NO: 16559 - DNA, 20 bp, Artificial Sequence
  chemically synthesized
cagaagtgtcctacaattgt

SEQ ID NO: 16560 - DNA, 20 bp, Artificial Sequence
  chemically synthesized
cctacaattgttggcattgt

SEQ ID NO: 16561 - DNA, 20 bp, Artificial Sequence
  chemically synthesized
ctacaattgttggcattgtc

SEQ ID NO: 16562 - DNA, 20 bp, Artificial Sequence
  chemically synthesized
ggcattgtcaggacttttga

SEQ ID NO: 16563 - DNA, 20 bp, Artificial Sequence
  chemically synthesized
tttgaaagcttaattaaaca

SEQ ID NO: 16564 - DNA, 20 bp, Artificial Sequence
  chemically synthesized
gaaagcttaattaaacacag

SEQ ID NO: 16565 - DNA, 20 bp, Artificial Sequence
  chemically synthesized
attaaacacagtggcccgca

SEQ ID NO: 16566 - DNA, 20 bp, Artificial Sequence
  chemically synthesized
gcatggctgctaaacttact

SEQ ID NO: 16567 - DNA, 20 bp, Artificial Sequence
  chemically synthesized
catggctgctaaacttacta

SEQ ID NO: 16568 - DNA, 20 bp, Artificial Sequence
  chemically synthesized
gctgctaaacttactaagga

SEQ ID NO: 16569 - DNA, 20 bp, Artificial Sequence
  chemically synthesized
aacttactaaggaaagccaa

SEQ ID NO: 16570 - DNA, 20 bp, Artificial Sequence
  chemically synthesized
acttactaaggaaagccaaa

SEQ ID NO: 16571 - DNA, 20 bp, Artificial Sequence
  chemically synthesized
aaaaaaatatatctaaaatg

SEQ ID NO: 16572 - DNA, 20 bp, Artificial Sequence
  chemically synthesized
aaaatatatctaaaatgtag

SEQ ID NO: 16573 - DNA, 20 bp, Artificial Sequence
  chemically synthesized
ctaaaatgtagaagatccta

SEQ ID NO: 16574 - DNA, 20 bp, Artificial Sequence
  chemically synthesized
ctaaagatcccaaacttctt

SEQ ID NO: 16575 - DNA, 20 bp, Artificial Sequence
  chemically synthesized
ttcttcagacattacccttg

SEQ ID NO: 16576 - DNA, 20 bp, Artificial Sequence
  chemically synthesized
acattacccttgtggtgaca

SEQ ID NO: 16577 - DNA, 20 bp, Artificial Sequence
  chemically synthesized
acccttgtggtgacacagaa

SEQ ID NO: 16578 - DNA, 20 bp, Artificial Sequence
  chemically synthesized
agatgcattgtgcattttcc

SEQ ID NO: 16579 - DNA, 20 bp, Artificial Sequence
  chemically synthesized
tcttttataaataatgtttt

SEQ ID NO: 16580 - DNA, 20 bp, Artificial Sequence
  chemically synthesized
tataaataatgttttgagaa

SEQ ID NO: 16581 - DNA, 20 bp, Artificial Sequence
  chemically synthesized
ataaataatgttttgagaat

SEQ ID NO: 16582 - DNA, 20 bp, Artificial Sequence
  chemically synthesized
gaataggtccacgtgatatg

SEQ ID NO: 16583 - DNA, 20 bp, Artificial Sequence
  chemically synthesized
agatcatcctgtgtgtgatg

SEQ ID NO: 16584 - DNA, 20 bp, Artificial Sequence
  chemically synthesized
atcatcctgtgtgtgatgtg

SEQ ID NO: 16585 - DNA, 20 bp, Artificial Sequence
  chemically synthesized
gtgtgatgtggagattgtgt

SEQ ID NO: 16586 - DNA, 20 bp, Artificial Sequence
  chemically synthesized
ttttctgtctcctgctgtta

SEQ ID NO: 16587 - DNA, 20 bp, Artificial Sequence
  chemically synthesized
ctgtctcctgctgttacaga

SEQ ID NO: 16588 - DNA, 20 bp, Artificial Sequence
  chemically synthesized
acagacagttaatgtaaaaa

SEQ ID NO: 16589 - DNA, 20 bp, Artificial Sequence
  chemically synthesized
atgtaaaaatggccttttat

SEQ ID NO: 16590 - DNA, 20 bp, Artificial Sequence
  chemically synthesized
cacaaatatgtattcacttc

SEQ ID NO: 16591 - DNA, 20 bp, Artificial Sequence
  chemically synthesized
atatgtattcacttcaagaa

SEQ ID NO: 16592 - DNA, 20 bp, Artificial Sequence
  chemically synthesized
tatgtattcacttcaagaac

SEQ ID NO: 16593 - DNA, 20 bp, Artificial Sequence
  chemically synthesized
tgtattcacttcaagaacag

SEQ ID NO: 16594 - DNA, 20 bp, Artificial Sequence
  chemically synthesized
attcacttcaagaacaggag

SEQ ID NO: 16595 - DNA, 20 bp, Artificial Sequence
  chemically synthesized
tcacttcaagaacaggagca

SEQ ID NO: 16596 - DNA, 20 bp, Artificial Sequence
  chemically synthesized
cacttcaagaacaggagcag

SEQ ID NO: 16597 - DNA, 20 bp, Artificial Sequence
  chemically synthesized
acttcaagaacaggagcaga

SEQ ID NO: 16598 - DNA, 20 bp, Artificial Sequence
  chemically synthesized
cttcaagaacaggagcagag

SEQ ID NO: 16599 - DNA, 20 bp, Artificial Sequence
  chemically synthesized
ttcaagaacaggagcagagg

SEQ ID NO: 16600 - DNA, 20 bp, Artificial Sequence
  chemically synthesized
aacaggagcagagggggaca

SEQ ID NO: 16601 - DNA, 20 bp, Artificial Sequence
  chemically synthesized
tctctgtgtttattctgtga

SEQ ID NO: 16602 - DNA, 20 bp, Artificial Sequence
  chemically synthesized
cacacacacacacacaaaac

SEQ ID NO: 16603 - DNA, 20 bp, Artificial Sequence
  chemically synthesized
cccattccttgttgtgttgc

SEQ ID NO: 16604 - DNA, 20 bp, Artificial Sequence
  chemically synthesized
caagttgtgcctttactata

SEQ ID NO: 16605 - DNA, 20 bp, Artificial Sequence
  chemically synthesized
aagttgtgcctttactataa

SEQ ID NO: 16606 - DNA, 20 bp, Artificial Sequence
  chemically synthesized
tgttttgcacacctttctct

SEQ ID NO: 16607 - DNA, 20 bp, Artificial Sequence
  chemically synthesized
cacctttctcttagtgaatg

SEQ ID NO: 16608 - DNA, 20 bp, Artificial Sequence
  chemically synthesized
gtgaatgtggcatataattg

SEQ ID NO: 16609 - DNA, 20 bp, Artificial Sequence
  chemically synthesized
gaatgtggcatataattgtg

SEQ ID NO: 16610 - DNA, 20 bp, Artificial Sequence
  chemically synthesized
tataattgtggagctgcaca

SEQ ID NO: 16611 - DNA, 20 bp, Artificial Sequence
  chemically synthesized
ataattgtggagctgcacat

SEQ ID NO: 16612 - DNA, 20 bp, Artificial Sequence
  chemically synthesized
ttgtggagctgcacatgggc

SEQ ID NO: 16613 - DNA, 20 bp, Artificial Sequence
  chemically synthesized
catgggctggaaaatgcaac

SEQ ID NO: 16614 - DNA, 20 bp, Artificial Sequence
  chemically synthesized
atgggctggaaaatgcaact

SEQ ID NO: 16615 - DNA, 20 bp, Artificial Sequence
  chemically synthesized
ctggaaaatgcaactgggtg

SEQ ID NO: 16616 - DNA, 20 bp, Artificial Sequence
  chemically synthesized
caactgggtgtagaaacgtg

SEQ ID NO: 16617 - DNA, 20 bp, Artificial Sequence
  chemically synthesized
aactgggtgtagaaacgtgc

SEQ ID NO: 16618 - DNA, 20 bp, Artificial Sequence
  chemically synthesized
tgggtgtagaaacgtgcagg

SEQ ID NO: 16619 - DNA, 20 bp, Artificial Sequence
  chemically synthesized
gggtgtagaaacgtgcaggc

SEQ ID NO: 16620 - DNA, 20 bp, Artificial Sequence
  chemically synthesized
ggtgtagaaacgtgcaggca

SEQ ID NO: 16621 - DNA, 20 bp, Artificial Sequence
  chemically synthesized
tagaaacgtgcaggcagggt

SEQ ID NO: 16622 - DNA, 20 bp, Artificial Sequence
  chemically synthesized
agaaacgtgcaggcagggtc

SEQ ID NO: 16623 - DNA, 20 bp, Artificial Sequence
  chemically synthesized
acgtgcaggcagggtcagga

SEQ ID NO: 16624 - DNA, 20 bp, Artificial Sequence
  chemically synthesized
cgtgcaggcagggtcaggac

SEQ ID NO: 16625 - DNA, 20 bp, Artificial Sequence
  chemically synthesized
gggtcaggacaggcaacctt

SEQ ID NO: 16626 - DNA, 20 bp, Artificial Sequence
  chemically synthesized
aggacaggcaaccttcagct

SEQ ID NO: 16627 - DNA, 20 bp, Artificial Sequence
  chemically synthesized
ggacaggcaaccttcagctc

SEQ ID NO: 16628 - DNA, 20 bp, Artificial Sequence
  chemically synthesized
gacaggcaaccttcagctca

SEQ ID NO: 16629 - DNA, 20 bp, Artificial Sequence
  chemically synthesized
caggcaaccttcagctcagg

SEQ ID NO: 16630 - DNA, 20 bp, Artificial Sequence
  chemically synthesized
aggcaaccttcagctcaggg

SEQ ID NO: 16631 - DNA, 20 bp, Artificial Sequence
  chemically synthesized
gcaaccttcagctcagggag

SEQ ID NO: 16632 - DNA, 20 bp, Artificial Sequence
  chemically synthesized
caaccttcagctcagggagg

SEQ ID NO: 16633 - DNA, 20 bp, Artificial Sequence
  chemically synthesized
cttcagctcagggaggaggc

SEQ ID NO: 16634 - DNA, 20 bp, Artificial Sequence
  chemically synthesized
agctcagggaggaggcgagt

SEQ ID NO: 16635 - DNA, 20 bp, Artificial Sequence
  chemically synthesized
gcgagttggatgcttattaa

SEQ ID NO: 16636 - DNA, 20 bp, Artificial Sequence
  chemically synthesized
tgcttattaatggcatcttt

SEQ ID NO: 16637 - DNA, 20 bp, Artificial Sequence
  chemically synthesized
cttattaatggcatctttta

SEQ ID NO: 16638 - DNA, 20 bp, Artificial Sequence
  chemically synthesized
aatggcatcttttagagtcc

SEQ ID NO: 16639 - DNA, 20 bp, Artificial Sequence
  chemically synthesized
aaatcattaatttcacactg

SEQ ID NO: 16640 - DNA, 20 bp, Artificial Sequence
  chemically synthesized
ttcacactgcagcttccatg

SEQ ID NO: 16641 - DNA, 20 bp, Artificial Sequence
  chemically synthesized
actgcagcttccatgtagtt

SEQ ID NO: 16642 - DNA, 20 bp, Artificial Sequence
  chemically synthesized
tccatgtagtttggctaatg

SEQ ID NO: 16643 - DNA, 20 bp, Artificial Sequence
  chemically synthesized
ccatgtagtttggctaatgt

SEQ ID NO: 16644 - DNA, 20 bp, Artificial Sequence
  chemically synthesized
atgtagtttggctaatgtgg

SEQ ID NO: 16645 - DNA, 20 bp, Artificial Sequence
  chemically synthesized
ctaatgtgggagtactaaat

SEQ ID NO: 16646 - DNA, 20 bp, Artificial Sequence
  chemically synthesized
taatgtgggagtactaaatt

SEQ ID NO: 16647 - DNA, 20 bp, Artificial Sequence
  chemically synthesized
aatgtgggagtactaaattg

SEQ ID NO: 16648 - DNA, 20 bp, Artificial Sequence
  chemically synthesized
cataaaaaacatgcaaatcc

SEQ ID NO: 16649 - DNA, 20 bp, Artificial Sequence
  chemically synthesized
ataaaaaacatgcaaatcct

SEQ ID NO: 16650 - DNA, 20 bp, Artificial Sequence
  chemically synthesized
taaaaaacatgcaaatccta

SEQ ID NO: 16651 - DNA, 20 bp, Artificial Sequence
  chemically synthesized
aatcctagggaaacattttt

SEQ ID NO: 16652 - DNA, 20 bp, Artificial Sequence
  chemically synthesized
ctcaatgaaaatgtttaata

SEQ ID NO: 16653 - DNA, 20 bp, Artificial Sequence
  chemically synthesized
tcaatgaaaatgtttaataa

SEQ ID NO: 16654 - DNA, 20 bp, Artificial Sequence
  chemically synthesized
aatgaaaatgtttaataaag

SEQ ID NO: 16655 - DNA, 20 bp, Artificial Sequence
  chemically synthesized
aaatgtttaataaaggagaa

SEQ ID NO: 16656 - DNA, 20 bp, Artificial Sequence
  chemically synthesized
aatgtttaataaaggagaat

SEQ ID NO: 16657 - DNA, 20 bp, Artificial Sequence
  chemically synthesized
aataaaggagaataggtgaa

SEQ ID NO: 16658 - DNA, 20 bp, Artificial Sequence
  chemically synthesized
aaaggagaataggtgaatgg

SEQ ID NO: 16659 - DNA, 20 bp, Artificial Sequence
  chemically synthesized
tgaatggtggctttgcgtgc

SEQ ID NO: 16660 - DNA, 20 bp, Artificial Sequence
  chemically synthesized
tggtggctttgcgtgctggt

SEQ ID NO: 16661 - DNA, 20 bp, Artificial Sequence
  chemically synthesized
ggctttgcgtgctggtcagt

SEQ ID NO: 16662 - DNA, 20 bp, Artificial Sequence
  chemically synthesized
ttgcgtgctggtcagtaaga

SEQ ID NO: 16663 - DNA, 20 bp, Artificial Sequence
  chemically synthesized
tgcgtgctggtcagtaagaa

SEQ ID NO: 16664 - DNA, 20 bp, Artificial Sequence
  chemically synthesized
gtaagaaaggaaacaaattt

SEQ ID NO: 16665 - DNA, 20 bp, Artificial Sequence
  chemically synthesized
aacaaattttggctttcctt

SEQ ID NO: 16666 - DNA, 20 bp, Artificial Sequence
  chemically synthesized
acaaattttggctttccttt

SEQ ID NO: 16667 - DNA, 20 bp, Artificial Sequence
  chemically synthesized
caaattttggctttcctttg

SEQ ID NO: 16668 - DNA, 20 bp, Artificial Sequence
  chemically synthesized
aaattttggctttcctttgg

SEQ ID NO: 16669 - DNA, 20 bp, Artificial Sequence
  chemically synthesized
aattttggctttcctttggg

SEQ ID NO: 16670 - DNA, 20 bp, Artificial Sequence
  chemically synthesized
ggaaatattaaatttaaccg

SEQ ID NO: 16671 - DNA, 20 bp, Artificial Sequence
  chemically synthesized
aatattaaatttaaccgaag

SEQ ID NO: 16672 - DNA, 20 bp, Artificial Sequence
  chemically synthesized
ttaaatttaaccgaagtaga

SEQ ID NO: 16673 - DNA, 20 bp, Artificial Sequence
  chemically synthesized
tttaaccgaagtagaaagca

SEQ ID NO: 16674 - DNA, 20 bp, Artificial Sequence
  chemically synthesized
accgaagtagaaagcacagc

SEQ ID NO: 16675 - DNA, 20 bp, Artificial Sequence
  chemically synthesized
ccgaagtagaaagcacagct

SEQ ID NO: 16676 - DNA, 20 bp, Artificial Sequence
  chemically synthesized
cgaagtagaaagcacagcta

SEQ ID NO: 16677 - DNA, 20 bp, Artificial Sequence
  chemically synthesized
aagtagaaagcacagctagg

SEQ ID NO: 16678 - DNA, 20 bp, Artificial Sequence
  chemically synthesized
cacagctagggagatgcacc

SEQ ID NO: 16679 - DNA, 20 bp, Artificial Sequence
  chemically synthesized
atgcaccaagattgcgtcac

SEQ ID NO: 16680 - DNA, 20 bp, Artificial Sequence
  chemically synthesized
gatgttaatttaatctactt

SEQ ID NO: 16681 - DNA, 20 bp, Artificial Sequence
  chemically synthesized
ttaatttaatctactttggt

SEQ ID NO: 16682 - DNA, 20 bp, Artificial Sequence
  chemically synthesized
ttcacaccctttattgcaca

SEQ ID NO: 16683 - DNA, 20 bp, Artificial Sequence
  chemically synthesized
acaccctttattgcacaaag

SEQ ID NO: 16684 - DNA, 20 bp, Artificial Sequence
  chemically synthesized
catttgacaaaatttacccc

SEQ ID NO: 16685 - DNA, 20 bp, Artificial Sequence
  chemically synthesized
acaaaatttaccccaagccc

SEQ ID NO: 16686 - DNA, 20 bp, Artificial Sequence
  chemically synthesized
cccaagtctgtttttacata

SEQ ID NO: 16687 - DNA, 20 bp, Artificial Sequence
  chemically synthesized
aagtctgtttttacatacag

SEQ ID NO: 16688 - DNA, 20 bp, Artificial Sequence
  chemically synthesized
gtttttacatacagtagtac

SEQ ID NO: 16689 - DNA, 20 bp, Artificial Sequence
  chemically synthesized
taccagctttgtgcaataaa

SEQ ID NO: 16690 - DNA, 20 bp, Artificial Sequence
  chemically synthesized
tttgtgcaataaaaagcact

SEQ ID NO: 16691 - DNA, 20 bp, Artificial Sequence
  chemically synthesized
aataaaaagcacttagcatc

SEQ ID NO: 16692 - DNA, 20 bp, Artificial Sequence
  chemically synthesized
aaaagcacttagcatcaagc

SEQ ID NO: 16693 - DNA, 20 bp, Artificial Sequence
  chemically synthesized
acttagcatcaagctggacc

SEQ ID NO: 16694 - DNA, 20 bp, Artificial Sequence
  chemically synthesized
gcatcaagctggacccagcc

SEQ ID NO: 16695 - DNA, 20 bp, Artificial Sequence
  chemically synthesized
ctggcaccttgccacttttt

SEQ ID NO: 16696 - DNA, 20 bp, Artificial Sequence
  chemically synthesized
ccttgccacttttttagcat

SEQ ID NO: 16697 - DNA, 20 bp, Artificial Sequence
  chemically synthesized
tagcatgagatttaatcacc

SEQ ID NO: 16698 - DNA, 20 bp, Artificial Sequence
  chemically synthesized
atttaatcaccaagcatctt

SEQ ID NO: 16699 - DNA, 20 bp, Artificial Sequence
  chemically synthesized
ttagtacctttctgcttgtt

SEQ ID NO: 16700 - DNA, 20 bp, Artificial Sequence
  chemically synthesized
ctgcttgttcagatttcatt

SEQ ID NO: 16701 - DNA, 20 bp, Artificial Sequence
  chemically synthesized
tgcttgttcagatttcattt

SEQ ID NO: 16702 - DNA, 20 bp, Artificial Sequence
  chemically synthesized
ttcagatttcatttgggtca

SEQ ID NO: 16703 - DNA, 20 bp, Artificial Sequence
  chemically synthesized
catttgggtcatggctatgt

SEQ ID NO: 16704 - DNA, 20 bp, Artificial Sequence
  chemically synthesized
ttgggtcatggctatgtcag

SEQ ID NO: 16705 - DNA, 20 bp, Artificial Sequence
  chemically synthesized
gtcagcagtgttgttatttc

SEQ ID NO: 16706 - DNA, 20 bp, Artificial Sequence
  chemically synthesized
tcagcagtgttgttatttca

SEQ ID NO: 16707 - DNA, 20 bp, Artificial Sequence
  chemically synthesized
tatttcaaggattaaaaaaa

SEQ ID NO: 16708 - DNA, 20 bp, Artificial Sequence
  chemically synthesized
taaaaaaaaagattctaact

SEQ ID NO: 16709 - DNA, 20 bp, Artificial Sequence
  chemically synthesized
aaaaaaaagattctaactta

SEQ ID NO: 16710 - DNA, 20 bp, Artificial Sequence
  chemically synthesized
ttttaacattatttcaaatc

SEQ ID NO: 16711 - DNA, 20 bp, Artificial Sequence
  chemically synthesized
taacattatttcaaatcaag

SEQ ID NO: 16712 - DNA, 20 bp, Artificial Sequence
  chemically synthesized
aacattatttcaaatcaagc

SEQ ID NO: 16713 - DNA, 20 bp, Artificial Sequence
  chemically synthesized
ttttatgttatgtatcaatt

SEQ ID NO: 16714 - DNA, 20 bp, Artificial Sequence
  chemically synthesized
caatttggatgacattaatg

SEQ ID NO: 16715 - DNA, 20 bp, Artificial Sequence
  chemically synthesized
tgaagttcataaaatatgtt

SEQ ID NO: 16716 - DNA, 20 bp, Artificial Sequence
  chemically synthesized
gttcagactatataatttaa

SEQ ID NO: 16717 - DNA, 20 bp, Artificial Sequence
  chemically synthesized
atttttatttgtaatacaaa

SEQ ID NO: 16718 - DNA, 20 bp, Artificial Sequence
  chemically synthesized
tttttatttgtaatacaaat

SEQ ID NO: 16719 - DNA, 20 bp, Artificial Sequence
  chemically synthesized
ctgttgtctccctccctcct

SEQ ID NO: 16720 - DNA, 20 bp, Artificial Sequence
  chemically synthesized
cttggttcttttctcctacc

SEQ ID NO: 16721 - DNA, 20 bp, Artificial Sequence
  chemically synthesized
ttggttcttttctcctacct

SEQ ID NO: 16722 - DNA, 20 bp, Artificial Sequence
  chemically synthesized
ttttctcctacctaggtaaa

SEQ ID NO: 16723 - DNA, 20 bp, Artificial Sequence
  chemically synthesized
tttctcctacctaggtaaat

SEQ ID NO: 16724 - DNA, 20 bp, Artificial Sequence
  chemically synthesized
ggtaaatgggcatccttaaa

SEQ ID NO: 16725 - DNA, 20 bp, Artificial Sequence
  chemically synthesized
cagcttctcccctttacgac

SEQ ID NO: 16726 - DNA, 20 bp, Artificial Sequence
  chemically synthesized
agcttctcccctttacgacc

SEQ ID NO: 16727 - DNA, 20 bp, Artificial Sequence
  chemically synthesized
gcttctcccctttacgacca

SEQ ID NO: 16728 - DNA, 20 bp, Artificial Sequence
  chemically synthesized
tcccctttacgaccagggta

SEQ ID NO: 16729 - DNA, 20 bp, Artificial Sequence
  chemically synthesized
ccctttacgaccagggtata

SEQ ID NO: 16730 - DNA, 20 bp, Artificial Sequence
  chemically synthesized
acgaccagggtatagagcac

SEQ ID NO: 16731 - DNA, 20 bp, Artificial Sequence
  chemically synthesized
tatagagcactggccaatat

SEQ ID NO: 16732 - DNA, 20 bp, Artificial Sequence
  chemically synthesized
tacctttgtaatttgccacg

SEQ ID NO: 16733 - DNA, 20 bp, Artificial Sequence
  chemically synthesized
caacatgacctaattaattt

SEQ ID NO: 16734 - DNA, 20 bp, Artificial Sequence
  chemically synthesized
acgaaccatattattgctac

SEQ ID NO: 16735 - DNA, 20 bp, Artificial Sequence
  chemically synthesized
gaaccatattattgctactg

SEQ ID NO: 16736 - DNA, 20 bp, Artificial Sequence
  chemically synthesized
tctgtcacaaacttaatttc

SEQ ID NO: 16737 - DNA, 20 bp, Artificial Sequence
  chemically synthesized
ctgtcacaaacttaatttcc

SEQ ID NO: 16738 - DNA, 20 bp, Artificial Sequence
  chemically synthesized
ggaaatgtaacctgacaaat

SEQ ID NO: 16739 - DNA, 20 bp, Artificial Sequence
  chemically synthesized
cctgacaaataagaattctt

SEQ ID NO: 16740 - DNA, 20 bp, Artificial Sequence
  chemically synthesized
tagctctctacatgtgctcc

SEQ ID NO: 16741 - DNA, 20 bp, Artificial Sequence
  chemically synthesized
gctctctacatgtgctccta

SEQ ID NO: 16742 - DNA, 20 bp, Artificial Sequence
  chemically synthesized
acatgtgctcctagagacca

SEQ ID NO: 16743 - DNA, 20 bp, Artificial Sequence
  chemically synthesized
catgtgctcctagagaccaa

SEQ ID NO: 16744 - DNA, 20 bp, Artificial Sequence
  chemically synthesized
gtgctcctagagaccaaagg

SEQ ID NO: 16745 - DNA, 20 bp, Artificial Sequence
  chemically synthesized
taaaataataataattttaa

SEQ ID NO: 16746 - DNA, 20 bp, Artificial Sequence
  chemically synthesized
aataataattttaaaagtgc

SEQ ID NO: 16747 - DNA, 20 bp, Artificial Sequence
  chemically synthesized
taaaagtgccagcattatta

SEQ ID NO: 16748 - DNA, 20 bp, Artificial Sequence
  chemically synthesized
agtgccagcattattaaagc

SEQ ID NO: 16749 - DNA, 20 bp, Artificial Sequence
  chemically synthesized
ttgatgccaaactcaatttg

SEQ ID NO: 16750 - DNA, 20 bp, Artificial Sequence
  chemically synthesized
tgccaaactcaatttgaagc

SEQ ID NO: 16751 - DNA, 20 bp, Artificial Sequence
  chemically synthesized
aatttgaagccagtaaacat

SEQ ID NO: 16752 - DNA, 20 bp, Artificial Sequence
  chemically synthesized
catcagactgtatttctaat

SEQ ID NO: 16753 - DNA, 20 bp, Artificial Sequence
  chemically synthesized
aaatgtaacttattccatat

SEQ ID NO: 16754 - DNA, 20 bp, Artificial Sequence
  chemically synthesized
aatgtaacttattccatatt

SEQ ID NO: 16755 - DNA, 20 bp, Artificial Sequence
  chemically synthesized
ttattccatattgggttcat

SEQ ID NO: 16756 - DNA, 20 bp, Artificial Sequence
  chemically synthesized
tttgtctccctgctttttac

SEQ ID NO: 16757 - DNA, 20 bp, Artificial Sequence
  chemically synthesized
tctccctgctttttactggc

SEQ ID NO: 16758 - DNA, 20 bp, Artificial Sequence
  chemically synthesized
tatgcatttttaaaacattt

SEQ ID NO: 16759 - DNA, 20 bp, Artificial Sequence
  chemically synthesized
atttttaaaacatttcagca

SEQ ID NO: 16760 - DNA, 20 bp, Artificial Sequence
  chemically synthesized
tttttaaaacatttcagcaa

SEQ ID NO: 16761 - DNA, 20 bp, Artificial Sequence
  chemically synthesized
gcaaaggcttttgctgttct

SEQ ID NO: 16762 - DNA, 20 bp, Artificial Sequence
  chemically synthesized
aaggcttttgctgttcttag

SEQ ID NO: 16763 - DNA, 20 bp, Artificial Sequence
  chemically synthesized
aggcttttgctgttcttagc

SEQ ID NO: 16764 - DNA, 20 bp, Artificial Sequence
  chemically synthesized
ggcttttgctgttcttagca

SEQ ID NO: 16765 - DNA, 20 bp, Artificial Sequence
  chemically synthesized
tttgctgttcttagcagggt

SEQ ID NO: 16766 - DNA, 20 bp, Artificial Sequence
  chemically synthesized
tcttagcagggttagtaact

SEQ ID NO: 16767 - DNA, 20 bp, Artificial Sequence
  chemically synthesized
cttagcagggttagtaactt

SEQ ID NO: 16768 - DNA, 20 bp, Artificial Sequence
  chemically synthesized
ttagcagggttagtaacttg

SEQ ID NO: 16769 - DNA, 20 bp, Artificial Sequence
  chemically synthesized
gtaacttggggtctatttct

SEQ ID NO: 16770 - DNA, 20 bp, Artificial Sequence
  chemically synthesized
gctcattcgtcattctgcaa

SEQ ID NO: 16771 - DNA, 20 bp, Artificial Sequence
  chemically synthesized
cgtcattctgcaatggcatt

SEQ ID NO: 16772 - DNA, 20 bp, Artificial Sequence
  chemically synthesized
attctgcaatggcattgagt

SEQ ID NO: 16773 - DNA, 20 bp, Artificial Sequence
  chemically synthesized
ttctgcaatggcattgagtt

SEQ ID NO: 16774 - DNA, 20 bp, Artificial Sequence
  chemically synthesized
gcaatggcattgagttaggt

SEQ ID NO: 16775 - DNA, 20 bp, Artificial Sequence
  chemically synthesized
tggcattgagttaggttggc

SEQ ID NO: 16776 - DNA, 20 bp, Artificial Sequence
  chemically synthesized
ggcattgagttaggttggca

SEQ ID NO: 16777 - DNA, 20 bp, Artificial Sequence
  chemically synthesized
gcattgagttaggttggcaa

SEQ ID NO: 16778 - DNA, 20 bp, Artificial Sequence
  chemically synthesized
ttgagttaggttggcaaggg

SEQ ID NO: 16779 - DNA, 20 bp, Artificial Sequence
  chemically synthesized
tgagttaggttggcaaggga

SEQ ID NO: 16780 - DNA, 20 bp, Artificial Sequence
  chemically synthesized
ggttggcaagggaaggattt

SEQ ID NO: 16781 - DNA, 20 bp, Artificial Sequence
  chemically synthesized
gttggcaagggaaggatttg

SEQ ID NO: 16782 - DNA, 20 bp, Artificial Sequence
  chemically synthesized
caagggaaggatttgaggca

SEQ ID NO: 16783 - DNA, 20 bp, Artificial Sequence
  chemically synthesized
aagggaaggatttgaggcat

SEQ ID NO: 16784 - DNA, 20 bp, Artificial Sequence
  chemically synthesized
agggaaggatttgaggcatg

SEQ ID NO: 16785 - DNA, 20 bp, Artificial Sequence
  chemically synthesized
gggaaggatttgaggcatgg

SEQ ID NO: 16786 - DNA, 20 bp, Artificial Sequence
  chemically synthesized
ggaaggatttgaggcatggg

SEQ ID NO: 16787 - DNA, 20 bp, Artificial Sequence
  chemically synthesized
aggatttgaggcatgggggg

SEQ ID NO: 16788 - DNA, 20 bp, Artificial Sequence
  chemically synthesized
tttgaggcatggggggtggt

SEQ ID NO: 16789 - DNA, 20 bp, Artificial Sequence
  chemically synthesized
ttgaggcatggggggtggtg

SEQ ID NO: 16790 - DNA, 20 bp, Artificial Sequence
  chemically synthesized
ggtgaggtcacttctgatcc

SEQ ID NO: 16791 - DNA, 20 bp, Artificial Sequence
  chemically synthesized
gaggtcacttctgatcccag

SEQ ID NO: 16792 - DNA, 20 bp, Artificial Sequence
  chemically synthesized
aggtcacttctgatcccagc

SEQ ID NO: 16793 - DNA, 20 bp, Artificial Sequence
  chemically synthesized
ggtcacttctgatcccagca

SEQ ID NO: 16794 - DNA, 20 bp, Artificial Sequence
  chemically synthesized
cttctgatcccagcagggaa

SEQ ID NO: 16795 - DNA, 20 bp, Artificial Sequence
  chemically synthesized
ttctgatcccagcagggaat

SEQ ID NO: 16796 - DNA, 20 bp, Artificial Sequence
  chemically synthesized
gatcccagcagggaataggt

SEQ ID NO: 16797 - DNA, 20 bp, Artificial Sequence
  chemically synthesized
agcttcatttgcctttacaa

SEQ ID NO: 16798 - DNA, 20 bp, Artificial Sequence
  chemically synthesized
gcttcatttgcctttacaat

SEQ ID NO: 16799 - DNA, 20 bp, Artificial Sequence
  chemically synthesized
ttgcctttacaataggcgca

SEQ ID NO: 16800 - DNA, 20 bp, Artificial Sequence
  chemically synthesized
ggcgcacagttactgcacct

SEQ ID NO: 16801 - DNA, 20 bp, Artificial Sequence
  chemically synthesized
cgcacagttactgcaccttg

SEQ ID NO: 16802 - DNA, 20 bp, Artificial Sequence
  chemically synthesized
gcacagttactgcaccttgg

SEQ ID NO: 16803 - DNA, 20 bp, Artificial Sequence
  chemically synthesized
acagttactgcaccttggag

SEQ ID NO: 16804 - DNA, 20 bp, Artificial Sequence
  chemically synthesized
ctgcaccttggaggagctct

SEQ ID NO: 16805 - DNA, 20 bp, Artificial Sequence
  chemically synthesized
tgcaccttggaggagctctc

SEQ ID NO: 16806 - DNA, 20 bp, Artificial Sequence
  chemically synthesized
aggagctctcaggtgccgct

SEQ ID NO: 16807 - DNA, 20 bp, Artificial Sequence
  chemically synthesized
gctctcaggtgccgctcaga

SEQ ID NO: 16808 - DNA, 20 bp, Artificial Sequence
  chemically synthesized
ctctcaggtgccgctcagat

SEQ ID NO: 16809 - DNA, 20 bp, Artificial Sequence
  chemically synthesized
ggcgcatgtaaatgccctgt

SEQ ID NO: 16810 - DNA, 20 bp, Artificial Sequence
  chemically synthesized
tgtaaatgccctgtcagatg

SEQ ID NO: 16811 - DNA, 20 bp, Artificial Sequence
  chemically synthesized
taaatgccctgtcagatgcg

SEQ ID NO: 16812 - DNA, 20 bp, Artificial Sequence
  chemically synthesized
tgccctgtcagatgcggagc

SEQ ID NO: 16813 - DNA, 20 bp, Artificial Sequence
  chemically synthesized
tccaccaccacaccataata

SEQ ID NO: 16814 - DNA, 20 bp, Artificial Sequence
  chemically synthesized
caccataataaagctgtaca

SEQ ID NO: 16815 - DNA, 20 bp, Artificial Sequence
  chemically synthesized
ataataaagctgtacacagc

SEQ ID NO: 16816 - DNA, 20 bp, Artificial Sequence
  chemically synthesized
tacacagcaagcttaatatg

SEQ ID NO: 16817 - DNA, 20 bp, Artificial Sequence
  chemically synthesized
cagcaagcttaatatgcagc

SEQ ID NO: 16818 - DNA, 20 bp, Artificial Sequence
  chemically synthesized
agcttaatatgcagctagtc

SEQ ID NO: 16819 - DNA, 20 bp, Artificial Sequence
  chemically synthesized
gcttaatatgcagctagtct

SEQ ID NO: 16820 - DNA, 20 bp, Artificial Sequence
  chemically synthesized
cttaatatgcagctagtctg

SEQ ID NO: 16821 - DNA, 20 bp, Artificial Sequence
  chemically synthesized
tctggggaattgtataaact

SEQ ID NO: 16822 - DNA, 20 bp, Artificial Sequence
  chemically synthesized
gggaattgtataaacttaga

SEQ ID NO: 16823 - DNA, 20 bp, Artificial Sequence
  chemically synthesized
ttgtataaacttagatagcc

SEQ ID NO: 16824 - DNA, 20 bp, Artificial Sequence
  chemically synthesized
acttagatagcccagtgtga

SEQ ID NO: 16825 - DNA, 20 bp, Artificial Sequence
  chemically synthesized
agatagcccagtgtgaaaga

SEQ ID NO: 16826 - DNA, 20 bp, Artificial Sequence
  chemically synthesized
cccagtgtgaaagacagcaa

SEQ ID NO: 16827 - DNA, 20 bp, Artificial Sequence
  chemically synthesized
gaaaaatgctcgatatgcca

SEQ ID NO: 16828 - DNA, 20 bp, Artificial Sequence
  chemically synthesized
tcttgttctcctttgatcta

SEQ ID NO: 16829 - DNA, 20 bp, Artificial Sequence
  chemically synthesized
acatcatccttttcttctct

SEQ ID NO: 16830 - DNA, 20 bp, Artificial Sequence
  chemically synthesized
atcatccttttcttctcttg

SEQ ID NO: 16831 - DNA, 20 bp, Artificial Sequence
  chemically synthesized
gccacctcccaattcaccac

SEQ ID NO: 16832 - DNA, 20 bp, Artificial Sequence
  chemically synthesized
cagaatttttttgcatgtgc

SEQ ID NO: 16833 - DNA, 20 bp, Artificial Sequence
  chemically synthesized
tttttttgcatgtgctggta

SEQ ID NO: 16834 - DNA, 20 bp, Artificial Sequence
  chemically synthesized
tttttgcatgtgctggtatg

SEQ ID NO: 16835 - DNA, 20 bp, Artificial Sequence
  chemically synthesized
gcaacataatttgtttcata

SEQ ID NO: 16836 - DNA, 20 bp, Artificial Sequence
  chemically synthesized
ttgtttcatatggttaatta

SEQ ID NO: 16837 - DNA, 20 bp, Artificial Sequence
  chemically synthesized
tgtttcatatggttaattac

SEQ ID NO: 16838 - DNA, 20 bp, Artificial Sequence
  chemically synthesized
tgaatatttaaaattttaaa

SEQ ID NO: 16839 - DNA, 20 bp, Artificial Sequence
  chemically synthesized
tttaaaattttaaatagcca

SEQ ID NO: 16840 - DNA, 20 bp, Artificial Sequence
  chemically synthesized
attttaaatagccacagttc

SEQ ID NO: 16841 - DNA, 20 bp, Artificial Sequence
  chemically synthesized
gttccagcttttcccgttaa

SEQ ID NO: 16842 - DNA, 20 bp, Artificial Sequence
  chemically synthesized
aaaagtatgtgatttgaaca

SEQ ID NO: 16843 - DNA, 20 bp, Artificial Sequence
  chemically synthesized
aaagtatgtgatttgaacaa

SEQ ID NO: 16844 - DNA, 20 bp, Artificial Sequence
  chemically synthesized
aagtatgtgatttgaacaaa

SEQ ID NO: 16845 - DNA, 20 bp, Artificial Sequence
  chemically synthesized
gtatgtgatttgaacaaagg

SEQ ID NO: 16846 - DNA, 20 bp, Artificial Sequence
  chemically synthesized
tgatttgaacaaagggagta

SEQ ID NO: 16847 - DNA, 20 bp, Artificial Sequence
  chemically synthesized
gagtacagtgtaaatatttg

SEQ ID NO: 16848 - DNA, 20 bp, Artificial Sequence
  chemically synthesized
cacacacacacacacacaca

SEQ ID NO: 16849 - DNA, 20 bp, Artificial Sequence
  chemically synthesized
cacacacacacacacacaca

SEQ ID NO: 16850 - DNA, 20 bp, Artificial Sequence
  chemically synthesized
cacacacacacacacacaga

SEQ ID NO: 16851 - DNA, 20 bp, Artificial Sequence
  chemically synthesized
cacacacacacacacagaga

SEQ ID NO: 16852 - DNA, 20 bp, Artificial Sequence
  chemically synthesized
cacacacacacacagagaga

SEQ ID NO: 16853 - DNA, 20 bp, Artificial Sequence
  chemically synthesized
cacacacacacagagagaga

SEQ ID NO: 16854 - DNA, 20 bp, Artificial Sequence
  chemically synthesized
cacacacacagagagagaga

SEQ ID NO: 16855 - DNA, 20 bp, Artificial Sequence
  chemically synthesized
cacacacagagagagagaga

SEQ ID NO: 16856 - DNA, 20 bp, Artificial Sequence
  chemically synthesized
cacacagagagagagagaga

SEQ ID NO: 16857 - DNA, 20 bp, Artificial Sequence
  chemically synthesized
cacagagagagagagagaga

SEQ ID NO: 16858 - DNA, 20 bp, Artificial Sequence
  chemically synthesized
gagagagagagagagacatt

SEQ ID NO: 16859 - DNA, 20 bp, Artificial Sequence
  chemically synthesized
agagacattcagtttaaatc

SEQ ID NO: 16860 - DNA, 20 bp, Artificial Sequence
  chemically synthesized
ttaaatctagtactgatcta

SEQ ID NO: 16861 - DNA, 20 bp, Artificial Sequence
  chemically synthesized
taaatctagtactgatctaa

SEQ ID NO: 16862 - DNA, 20 bp, Artificial Sequence
  chemically synthesized
tttaaaaaacaactttcaac

SEQ ID NO: 16863 - DNA, 20 bp, Artificial Sequence
  chemically synthesized
tatttcaccattatattttt

SEQ ID NO: 16864 - DNA, 20 bp, Artificial Sequence
  chemically synthesized
tttttgagtccacattgctt

SEQ ID NO: 16865 - DNA, 20 bp, Artificial Sequence
  chemically synthesized
ttttgagtccacattgcttg

SEQ ID NO: 16866 - DNA, 20 bp, Artificial Sequence
  chemically synthesized
ccacattgcttgaggtttta

SEQ ID NO: 16867 - DNA, 20 bp, Artificial Sequence
  chemically synthesized
cattgcttgaggttttaaag

SEQ ID NO: 16868 - DNA, 20 bp, Artificial Sequence
  chemically synthesized
tttataatgtgttcctttaa

SEQ ID NO: 16869 - DNA, 20 bp, Artificial Sequence
  chemically synthesized
tgttcctttaacagaatcaa

SEQ ID NO: 16870 - DNA, 20 bp, Artificial Sequence
  chemically synthesized
ttaacagaatcaacagctgt

SEQ ID NO: 16871 - DNA, 20 bp, Artificial Sequence
  chemically synthesized
acagaatcaacagctgtcag

SEQ ID NO: 16872 - DNA, 20 bp, Artificial Sequence
  chemically synthesized
gaatcaacagctgtcagaag

SEQ ID NO: 16873 - DNA, 20 bp, Artificial Sequence
  chemically synthesized
acagctgtcagaagcagttg

SEQ ID NO: 16874 - DNA, 20 bp, Artificial Sequence
  chemically synthesized
gctgtcagaagcagttgtgg

SEQ ID NO: 16875 - DNA, 20 bp, Artificial Sequence
  chemically synthesized
gtagatccacaaaacgtata

SEQ ID NO: 16876 - DNA, 20 bp, Artificial Sequence
  chemically synthesized
gtttcctgaaacaaaacact

SEQ ID NO: 16877 - DNA, 20 bp, Artificial Sequence
  chemically synthesized
aacaaaacacttggaaaaat

SEQ ID NO: 16878 - DNA, 20 bp, Artificial Sequence
  chemically synthesized
acttggaaaaataagctgct

SEQ ID NO: 16879 - DNA, 20 bp, Artificial Sequence
  chemically synthesized
aaaaataagctgctaagaac

SEQ ID NO: 16880 - DNA, 20 bp, Artificial Sequence
  chemically synthesized
gctgctaagaactggcgaat

SEQ ID NO: 16881 - DNA, 20 bp, Artificial Sequence
  chemically synthesized
gctaagaactggcgaattag

SEQ ID NO: 16882 - DNA, 20 bp, Artificial Sequence
  chemically synthesized
actggcgaattagaagtttg

SEQ ID NO: 16883 - DNA, 20 bp, Artificial Sequence
  chemically synthesized
gcgaattagaagtttgcaga

SEQ ID NO: 16884 - DNA, 20 bp, Artificial Sequence
  chemically synthesized
cgaattagaagtttgcagac

SEQ ID NO: 16885 - DNA, 20 bp, Artificial Sequence
  chemically synthesized
gaattagaagtttgcagaca

SEQ ID NO: 16886 - DNA, 20 bp, Artificial Sequence
  chemically synthesized
agtttgcagacagggaactg

SEQ ID NO: 16887 - DNA, 20 bp, Artificial Sequence
  chemically synthesized
ggaactgaagtgtcatctct

SEQ ID NO: 16888 - DNA, 20 bp, Artificial Sequence
  chemically synthesized
tgtcatctcttggttcaccc

SEQ ID NO: 16889 - DNA, 20 bp, Artificial Sequence
  chemically synthesized
tcatctcttggttcaccctg

SEQ ID NO: 16890 - DNA, 20 bp, Artificial Sequence
  chemically synthesized
ttcaccctggagactgatgt

SEQ ID NO: 16891 - DNA, 20 bp, Artificial Sequence
  chemically synthesized
accctggagactgatgtgag

SEQ ID NO: 16892 - DNA, 20 bp, Artificial Sequence
  chemically synthesized
tggatctgatgcaatgctgc

SEQ ID NO: 16893 - DNA, 20 bp, Artificial Sequence
  chemically synthesized
atctgatgcaatgctgctgg

SEQ ID NO: 16894 - DNA, 20 bp, Artificial Sequence
  chemically synthesized
tgctggaagatttacctgca

SEQ ID NO: 16895 - DNA, 20 bp, Artificial Sequence
  chemically synthesized
gctggaagatttacctgcac

SEQ ID NO: 16896 - DNA, 20 bp, Artificial Sequence
  chemically synthesized
cctgcacaggttgctcctct

SEQ ID NO: 16897 - DNA, 20 bp, Artificial Sequence
  chemically synthesized
ctgcacaggttgctcctcta

SEQ ID NO: 16898 - DNA, 20 bp, Artificial Sequence
  chemically synthesized
tgctcctctaaggcaacgcg

SEQ ID NO: 16899 - DNA, 20 bp, Artificial Sequence
  chemically synthesized
tgcacgattgacgtatgcac

SEQ ID NO: 16900 - DNA, 20 bp, Artificial Sequence
  chemically synthesized
cacgattgacgtatgcacca

SEQ ID NO: 16901 - DNA, 20 bp, Artificial Sequence
  chemically synthesized
attgacgtatgcaccagagc

SEQ ID NO: 16902 - DNA, 20 bp, Artificial Sequence
  chemically synthesized
ttgacgtatgcaccagagct

SEQ ID NO: 16903 - DNA, 20 bp, Artificial Sequence
  chemically synthesized
cgtatgcaccagagctaggc

SEQ ID NO: 16904 - DNA, 20 bp, Artificial Sequence
  chemically synthesized
gtatgcaccagagctaggct

SEQ ID NO: 16905 - DNA, 20 bp, Artificial Sequence
  chemically synthesized
accagagctaggctgggcct

SEQ ID NO: 16906 - DNA, 20 bp, Artificial Sequence
  chemically synthesized
tttgccctttttgatctctt

SEQ ID NO: 16907 - DNA, 20 bp, Artificial Sequence
  chemically synthesized
ccctttttgatctctttaga

SEQ ID NO: 16908 - DNA, 20 bp, Artificial Sequence
  chemically synthesized
ctttagatagataaaatacc

SEQ ID NO: 16909 - DNA, 20 bp, Artificial Sequence
  chemically synthesized
tagataaaataccaagttct

SEQ ID NO: 16910 - DNA, 20 bp, Artificial Sequence
  chemically synthesized
gataaaataccaagttctca

SEQ ID NO: 16911 - DNA, 20 bp, Artificial Sequence
  chemically synthesized
caacaaattatatataccta

SEQ ID NO: 16912 - DNA, 20 bp, Artificial Sequence
  chemically synthesized
aacaaattatatatacctaa

SEQ ID NO: 16913 - DNA, 20 bp, Artificial Sequence
  chemically synthesized
aattatatatacctaaaggt

SEQ ID NO: 16914 - DNA, 20 bp, Artificial Sequence
  chemically synthesized
atacctaaaggtgagatgat

SEQ ID NO: 16915 - DNA, 20 bp, Artificial Sequence
  chemically synthesized
tacctaaaggtgagatgatc

SEQ ID NO: 16916 - DNA, 20 bp, Artificial Sequence
  chemically synthesized
caggtttaaacttcctgtaa

SEQ ID NO: 16917 - DNA, 20 bp, Artificial Sequence
  chemically synthesized
ggtttaaacttcctgtaaaa

SEQ ID NO: 16918 - DNA, 20 bp, Artificial Sequence
  chemically synthesized
gtttaaacttcctgtaaaag

SEQ ID NO: 16919 - DNA, 20 bp, Artificial Sequence
  chemically synthesized
aaacttcctgtaaaagaggc

SEQ ID NO: 16920 - DNA, 20 bp, Artificial Sequence
  chemically synthesized
cttcctgtaaaagaggcgag

SEQ ID NO: 16921 - DNA, 20 bp, Artificial Sequence
  chemically synthesized
ttcctgtaaaagaggcgaga

SEQ ID NO: 16922 - DNA, 20 bp, Artificial Sequence
  chemically synthesized
gcgccttgcacacccttttc

SEQ ID NO: 16923 - DNA, 20 bp, Artificial Sequence
  chemically synthesized
cttgcacacccttttccaga

SEQ ID NO: 16924 - DNA, 20 bp, Artificial Sequence
  chemically synthesized
ttgcacacccttttccagat

SEQ ID NO: 16925 - DNA, 20 bp, Artificial Sequence
  chemically synthesized
tgcacacccttttccagata

SEQ ID NO: 16926 - DNA, 20 bp, Artificial Sequence
  chemically synthesized
cacccttttccagatagggc

SEQ ID NO: 16927 - DNA, 20 bp, Artificial Sequence
  chemically synthesized
ccttttccagatagggctgg

SEQ ID NO: 16928 - DNA, 20 bp, Artificial Sequence
  chemically synthesized
agggctggcagcatgttatt

SEQ ID NO: 16929 - DNA, 20 bp, Artificial Sequence
  chemically synthesized
catgttattcagaactgaat

SEQ ID NO: 16930 - DNA, 20 bp, Artificial Sequence
  chemically synthesized
agaactgaatcagtctctgc

SEQ ID NO: 16931 - DNA, 20 bp, Artificial Sequence
  chemically synthesized
aactgaatcagtctctgcca

SEQ ID NO: 16932 - DNA, 20 bp, Artificial Sequence
  chemically synthesized
agtctctgccagagaattcc

SEQ ID NO: 16933 - DNA, 20 bp, Artificial Sequence
  chemically synthesized
ctctgccagagaattcccag

SEQ ID NO: 16934 - DNA, 20 bp, Artificial Sequence
  chemically synthesized
tctgccagagaattcccagt

SEQ ID NO: 16935 - DNA, 20 bp, Artificial Sequence
  chemically synthesized
gagaattcccagtgggaacc

SEQ ID NO: 16936 - DNA, 20 bp, Artificial Sequence
  chemically synthesized
gaattcccagtgggaacctg

SEQ ID NO: 16937 - DNA, 20 bp, Artificial Sequence
  chemically synthesized
ttcccagtgggaacctggag

SEQ ID NO: 16938 - DNA, 20 bp, Artificial Sequence
  chemically synthesized
tcccagtgggaacctggagc

SEQ ID NO: 16939 - DNA, 20 bp, Artificial Sequence
  chemically synthesized
ctggagcaggtatgttgatg

SEQ ID NO: 16940 - DNA, 20 bp, Artificial Sequence
  chemically synthesized
tggagcaggtatgttgatga

SEQ ID NO: 16941 - DNA, 20 bp, Artificial Sequence
  chemically synthesized
ggagcaggtatgttgatgaa

SEQ ID NO: 16942 - DNA, 20 bp, Artificial Sequence
  chemically synthesized
gagcaggtatgttgatgaag

SEQ ID NO: 16943 - DNA, 20 bp, Artificial Sequence
  chemically synthesized
atgttgatgaaggggatacc

SEQ ID NO: 16944 - DNA, 20 bp, Artificial Sequence
  chemically synthesized
tgttgatgaaggggatacct

SEQ ID NO: 16945 - DNA, 20 bp, Artificial Sequence
  chemically synthesized
gttgatgaaggggatacctg

SEQ ID NO: 16946 - DNA, 20 bp, Artificial Sequence
  chemically synthesized
aggggatacctggggacctt

SEQ ID NO: 16947 - DNA, 20 bp, Artificial Sequence
  chemically synthesized
gacctttggtcactcacaat

SEQ ID NO: 16948 - DNA, 20 bp, Artificial Sequence
  chemically synthesized
gtttgtattctcactgttgt

SEQ ID NO: 16949 - DNA, 20 bp, Artificial Sequence
  chemically synthesized
ttgcacctacaatttgattt

SEQ ID NO: 16950 - DNA, 20 bp, Artificial Sequence
  chemically synthesized
ctacaatttgattttagttt

SEQ ID NO: 16951 - DNA, 20 bp, Artificial Sequence
  chemically synthesized
aatttgattttagttttaga

SEQ ID NO: 16952 - DNA, 20 bp, Artificial Sequence
  chemically synthesized
tttgattttagttttagata

SEQ ID NO: 16953 - DNA, 20 bp, Artificial Sequence
  chemically synthesized
ttgattttagttttagatag

SEQ ID NO: 16954 - DNA, 20 bp, Artificial Sequence
  chemically synthesized
taaaaactcccattaaaata

SEQ ID NO: 16955 - DNA, 20 bp, Artificial Sequence
  chemically synthesized
actcccattaaaataaagaa

SEQ ID NO: 16956 - DNA, 20 bp, Artificial Sequence
  chemically synthesized
ggaattattgtgaaacctgc

SEQ ID NO: 16957 - DNA, 20 bp, Artificial Sequence
  chemically synthesized
gaattattgtgaaacctgca

SEQ ID NO: 16958 - DNA, 20 bp, Artificial Sequence
  chemically synthesized
aattattgtgaaacctgcaa

SEQ ID NO: 16959 - DNA, 20 bp, Artificial Sequence
  chemically synthesized
cctgcaagggtgccttcaaa

SEQ ID NO: 16960 - DNA, 20 bp, Artificial Sequence
  chemically synthesized
ggtgccttcaaaaagaaaac

SEQ ID NO: 16961 - DNA, 20 bp, Artificial Sequence
  chemically synthesized
ttgaactttctaaaaaacac

SEQ ID NO: 16962 - DNA, 20 bp, Artificial Sequence
  chemically synthesized
tgaactttctaaaaaacaca

SEQ ID NO: 16963 - DNA, 20 bp, Artificial Sequence
  chemically synthesized
actttctaaaaaacacaagg

SEQ ID NO: 16964 - DNA, 20 bp, Artificial Sequence
  chemically synthesized
acacaaggaagctttttgct

SEQ ID NO: 16965 - DNA, 20 bp, Artificial Sequence
  chemically synthesized
ggaagctttttgctaagcat

SEQ ID NO: 16966 - DNA, 20 bp, Artificial Sequence
  chemically synthesized
gaagctttttgctaagcatc

SEQ ID NO: 16967 - DNA, 20 bp, Artificial Sequence
  chemically synthesized
aagctttttgctaagcatca

SEQ ID NO: 16968 - DNA, 20 bp, Artificial Sequence
  chemically synthesized
gcatttaaatttatattcat

SEQ ID NO: 16969 - DNA, 20 bp, Artificial Sequence
  chemically synthesized
aatatgtaatgatgcataaa

SEQ ID NO: 16970 - DNA, 20 bp, Artificial Sequence
  chemically synthesized
atatgtaatgatgcataaaa

SEQ ID NO: 16971 - DNA, 20 bp, Artificial Sequence
  chemically synthesized
atgatgcataaaaaggctgc

SEQ ID NO: 16972 - DNA, 20 bp, Artificial Sequence
  chemically synthesized
tgatgcataaaaaggctgca

SEQ ID NO: 16973 - DNA, 20 bp, Artificial Sequence
  chemically synthesized
aaatcacatctgttaatttt

SEQ ID NO: 16974 - DNA, 20 bp, Artificial Sequence
  chemically synthesized
aatcacatctgttaattttt

SEQ ID NO: 16975 - DNA, 20 bp, Artificial Sequence
  chemically synthesized
atcacatctgttaattttta

SEQ ID NO: 16976 - DNA, 20 bp, Artificial Sequence
  chemically synthesized
tgttaatttttagggaaata

SEQ ID NO: 16977 - DNA, 20 bp, Artificial Sequence
  chemically synthesized
atttttagggaaataaagtg

SEQ ID NO: 16978 - DNA, 20 bp, Artificial Sequence
  chemically synthesized
tagggaaataaagtgtagct

SEQ ID NO: 16979 - DNA, 20 bp, Artificial Sequence
  chemically synthesized
tgtagcttggattcttatgt

SEQ ID NO: 16980 - DNA, 20 bp, Artificial Sequence
  chemically synthesized
tagcttggattcttatgttg

SEQ ID NO: 16981 - DNA, 20 bp, Artificial Sequence
  chemically synthesized
gattcttatgttggagcaca

SEQ ID NO: 16982 - DNA, 20 bp, Artificial Sequence
  chemically synthesized
agcacaaagcactatgtgcc

SEQ ID NO: 16983 - DNA, 20 bp, Artificial Sequence
  chemically synthesized
gttcctgtacattttaaata

SEQ ID NO: 16984 - DNA, 20 bp, Artificial Sequence
  chemically synthesized
tcctgtacattttaaatata

SEQ ID NO: 16985 - DNA, 20 bp, Artificial Sequence
  chemically synthesized
aaatatagagttttaatatt

SEQ ID NO: 16986 - DNA, 20 bp, Artificial Sequence
  chemically synthesized
aaaacaaacctcaaaaaact

SEQ ID NO: 16987 - DNA, 20 bp, Artificial Sequence
  chemically synthesized
aacaaacctcaaaaaactaa

SEQ ID NO: 16988 - DNA, 20 bp, Artificial Sequence
  chemically synthesized
aactaagagaaccaaacctg

SEQ ID NO: 16989 - DNA, 20 bp, Artificial Sequence
  chemically synthesized
gtattctccttcaccaactc

SEQ ID NO: 16990 - DNA, 20 bp, Artificial Sequence
  chemically synthesized
tattctccttcaccaactca

SEQ ID NO: 16991 - DNA, 20 bp, Artificial Sequence
  chemically synthesized
ttttatgatttatttacatt

SEQ ID NO: 16992 - DNA, 20 bp, Artificial Sequence
  chemically synthesized
tttatgatttatttacattt

SEQ ID NO: 16993 - DNA, 20 bp, Artificial Sequence
  chemically synthesized
ttatgatttatttacattta

SEQ ID NO: 16994 - DNA, 20 bp, Artificial Sequence
  chemically synthesized
tatgatttatttacatttag

SEQ ID NO: 16995 - DNA, 20 bp, Artificial Sequence
  chemically synthesized
atgatttatttacatttagg

SEQ ID NO: 16996 - DNA, 20 bp, Artificial Sequence
  chemically synthesized
tgatttatttacatttaggg

SEQ ID NO: 16997 - DNA, 20 bp, Artificial Sequence
  chemically synthesized
acatttaggggggaacccct

SEQ ID NO: 16998 - DNA, 20 bp, Artificial Sequence
  chemically synthesized
ctcccctgccccgatccttt

SEQ ID NO: 16999 - DNA, 20 bp, Artificial Sequence
  chemically synthesized
gccccgatcctttcagtttc

SEQ ID NO: 17000 - DNA, 20 bp, Artificial Sequence
  chemically synthesized
tgttaaatcttaaatctcgt

SEQ ID NO: 17001 - DNA, 20 bp, Artificial Sequence
  chemically synthesized
ttacatttaaaactgaacat

SEQ ID NO: 17002 - DNA, 20 bp, Artificial Sequence
  chemically synthesized
aaactgaacattggctactg

SEQ ID NO: 17003 - DNA, 20 bp, Artificial Sequence
  chemically synthesized
ggctactgaagaatgattta

SEQ ID NO: 17004 - DNA, 20 bp, Artificial Sequence
  chemically synthesized
gctactgaagaatgatttaa

SEQ ID NO: 17005 - DNA, 20 bp, Artificial Sequence
  chemically synthesized
tgttatgtttttgttatgtt

SEQ ID NO: 17006 - DNA, 20 bp, Artificial Sequence
  chemically synthesized
gttatgtttttgttatgtta

SEQ ID NO: 17007 - DNA, 20 bp, Artificial Sequence
  chemically synthesized
tatgtttttgttatgttaag

SEQ ID NO: 17008 - DNA, 20 bp, Artificial Sequence
  chemically synthesized
ttaaggagaaaaaaatcaat

SEQ ID NO: 17009 - DNA, 20 bp, Artificial Sequence
  chemically synthesized
taaggagaaaaaaatcaata

SEQ ID NO: 17010 - DNA, 20 bp, Artificial Sequence
  chemically synthesized
ggaaaaatttaattctgata

SEQ ID NO: 17011 - DNA, 20 bp, Artificial Sequence
  chemically synthesized
aattctgataaagatactct

SEQ ID NO: 17012 - DNA, 20 bp, Artificial Sequence
  chemically synthesized
tccttttaactaaaacattt

SEQ ID NO: 17013 - DNA, 20 bp, Artificial Sequence
  chemically synthesized
ttttaactaaaacatttgag

SEQ ID NO: 17014 - DNA, 20 bp, Artificial Sequence
  chemically synthesized
aaaacatttgagcagcttca

SEQ ID NO: 17015 - DNA, 20 bp, Artificial Sequence
  chemically synthesized
ctatgtatttcttctgatct

SEQ ID NO: 17016 - DNA, 20 bp, Artificial Sequence
  chemically synthesized
atgtatttcttctgatcttg

SEQ ID NO: 17017 - DNA, 20 bp, Artificial Sequence
  chemically synthesized
tgatcttggagctgtgtgac

SEQ ID NO: 17018 - DNA, 20 bp, Artificial Sequence
  chemically synthesized
tcttggagctgtgtgactgg

SEQ ID NO: 17019 - DNA, 20 bp, Artificial Sequence
  chemically synthesized
ggagctgtgtgactggtagc

SEQ ID NO: 17020 - DNA, 20 bp, Artificial Sequence
  chemically synthesized
ctgtgtgactggtagcaaga

SEQ ID NO: 17021 - DNA, 20 bp, Artificial Sequence
  chemically synthesized
aaaaatcttattctacatac

SEQ ID NO: 17022 - DNA, 20 bp, Artificial Sequence
  chemically synthesized
aatcttattctacatacaag

SEQ ID NO: 17023 - DNA, 20 bp, Artificial Sequence
  chemically synthesized
atacaagtggattgcttaac

SEQ ID NO: 17024 - DNA, 20 bp, Artificial Sequence
  chemically synthesized
aagtggattgcttaacaagt

SEQ ID NO: 17025 - DNA, 20 bp, Artificial Sequence
  chemically synthesized
gattgcttaacaagtcagca

SEQ ID NO: 17026 - DNA, 20 bp, Artificial Sequence
  chemically synthesized
acacgtacttgtttgtacaa

SEQ ID NO: 17027 - DNA, 20 bp, Artificial Sequence
  chemically synthesized
acgtacttgtttgtacaata

SEQ ID NO: 17028 - DNA, 20 bp, Artificial Sequence
  chemically synthesized
attcctgtataaaaataatt

SEQ ID NO: 17029 - DNA, 20 bp, Artificial Sequence
  chemically synthesized
aaaaataattcagctgctga

SEQ ID NO: 17030 - DNA, 20 bp, Artificial Sequence
  chemically synthesized
aataattcagctgctgacag

SEQ ID NO: 17031 - DNA, 20 bp, Artificial Sequence
  chemically synthesized
ataattcagctgctgacagc

SEQ ID NO: 17032 - DNA, 20 bp, Artificial Sequence
  chemically synthesized
ctgacagcaggcattgttgt

SEQ ID NO: 17033 - DNA, 20 bp, Artificial Sequence
  chemically synthesized
cctgtcttttgtgcttgtcc

SEQ ID NO: 17034 - DNA, 20 bp, Artificial Sequence
  chemically synthesized
ttttgtgcttgtcccagctc

SEQ ID NO: 17035 - DNA, 20 bp, Artificial Sequence
  chemically synthesized
tttgtgcttgtcccagctct

SEQ ID NO: 17036 - DNA, 20 bp, Artificial Sequence
  chemically synthesized
cccctcccctcctatctgct

SEQ ID NO: 17037 - DNA, 20 bp, Artificial Sequence
  chemically synthesized
ccctcccctcctatctgctt

SEQ ID NO: 17038 - DNA, 20 bp, Artificial Sequence
  chemically synthesized
cctcccctcctatctgcttg

SEQ ID NO: 17039 - DNA, 20 bp, Artificial Sequence
  chemically synthesized
cccctcctatctgcttgggg

SEQ ID NO: 17040 - DNA, 20 bp, Artificial Sequence
  chemically synthesized
gctgcctgcacactgctgac

SEQ ID NO: 17041 - DNA, 20 bp, Artificial Sequence
  chemically synthesized
gcctgcacactgctgaccag

SEQ ID NO: 17042 - DNA, 20 bp, Artificial Sequence
  chemically synthesized
gaagttaattgctatatatt

SEQ ID NO: 17043 - DNA, 20 bp, Artificial Sequence
  chemically synthesized
attgctatatattaagtata

SEQ ID NO: 17044 - DNA, 20 bp, Artificial Sequence
  chemically synthesized
ttgctatatattaagtatat

SEQ ID NO: 17045 - DNA, 20 bp, Artificial Sequence
  chemically synthesized
gtatataggtattgtattta

SEQ ID NO: 17046 - DNA, 20 bp, Artificial Sequence
  chemically synthesized
atataggtattgtatttaaa

SEQ ID NO: 17047 - DNA, 20 bp, Artificial Sequence
  chemically synthesized
tataggtattgtatttaaag

SEQ ID NO: 17048 - DNA, 20 bp, Artificial Sequence
  chemically synthesized
tatttaaagaggaatatctc

SEQ ID NO: 17049 - DNA, 20 bp, Artificial Sequence
  chemically synthesized
atttaaagaggaatatctca

SEQ ID NO: 17050 - DNA, 20 bp, Artificial Sequence
  chemically synthesized
tttactttctgatgtgattg

SEQ ID NO: 17051 - DNA, 20 bp, Artificial Sequence
  chemically synthesized
tgatgtgattgcggtgttgc

SEQ ID NO: 17052 - DNA, 20 bp, Artificial Sequence
  chemically synthesized
tgtgattgcggtgttgccag

SEQ ID NO: 17053 - DNA, 20 bp, Artificial Sequence
  chemically synthesized
gtgattgcggtgttgccagc

SEQ ID NO: 17054 - DNA, 20 bp, Artificial Sequence
  chemically synthesized
tgattgcggtgttgccagca

SEQ ID NO: 17055 - DNA, 20 bp, Artificial Sequence
  chemically synthesized
gattgcggtgttgccagcag

SEQ ID NO: 17056 - DNA, 20 bp, Artificial Sequence
  chemically synthesized
attgcggtgttgccagcagg

SEQ ID NO: 17057 - DNA, 20 bp, Artificial Sequence
  chemically synthesized
ttgcggtgttgccagcaggg

SEQ ID NO: 17058 - DNA, 20 bp, Artificial Sequence
  chemically synthesized
cggtgttgccagcagggggg

SEQ ID NO: 17059 - DNA, 20 bp, Artificial Sequence
  chemically synthesized
tgttgccagcaggggggtgg

SEQ ID NO: 17060 - DNA, 20 bp, Artificial Sequence
  chemically synthesized
gttgccagcaggggggtggc

SEQ ID NO: 17061 - DNA, 20 bp, Artificial Sequence
  chemically synthesized
gtggcaggcaaacgctctaa

SEQ ID NO: 17062 - DNA, 20 bp, Artificial Sequence
  chemically synthesized
tggcaggcaaacgctctaat

SEQ ID NO: 17063 - DNA, 20 bp, Artificial Sequence
  chemically synthesized
ggcaggcaaacgctctaata

SEQ ID NO: 17064 - DNA, 20 bp, Artificial Sequence
  chemically synthesized
ctaatagggaaaatcacttg

SEQ ID NO: 17065 - DNA, 20 bp, Artificial Sequence
  chemically synthesized
taatagggaaaatcacttga

SEQ ID NO: 17066 - DNA, 20 bp, Artificial Sequence
  chemically synthesized
tagggaaaatcacttgaagg

SEQ ID NO: 17067 - DNA, 20 bp, Artificial Sequence
  chemically synthesized
gaaaatcacttgaaggcagt

SEQ ID NO: 17068 - DNA, 20 bp, Artificial Sequence
  chemically synthesized
aaaatcacttgaaggcagtt

SEQ ID NO: 17069 - DNA, 20 bp, Artificial Sequence
  chemically synthesized
aaatcacttgaaggcagtta

SEQ ID NO: 17070 - DNA, 20 bp, Artificial Sequence
  chemically synthesized
aatcacttgaaggcagttag

SEQ ID NO: 17071 - DNA, 20 bp, Artificial Sequence
  chemically synthesized
gaaggcagttaggggaaatt

SEQ ID NO: 17072 - DNA, 20 bp, Artificial Sequence
  chemically synthesized
ttaggggaaatttggccttc

SEQ ID NO: 17073 - DNA, 20 bp, Artificial Sequence
  chemically synthesized
ttcaagtcccatttgctctg

SEQ ID NO: 17074 - DNA, 20 bp, Artificial Sequence
  chemically synthesized
gtcccatttgctctgtagtg

SEQ ID NO: 17075 - DNA, 20 bp, Artificial Sequence
  chemically synthesized
tttgctctgtagtgtagcat

SEQ ID NO: 17076 - DNA, 20 bp, Artificial Sequence
  chemically synthesized
ctcattgaactctactcatg

SEQ ID NO: 17077 - DNA, 20 bp, Artificial Sequence
  chemically synthesized
cattgaactctactcatgta

SEQ ID NO: 17078 - DNA, 20 bp, Artificial Sequence
  chemically synthesized
ctactcatgtagagtaacat

SEQ ID NO: 17079 - DNA, 20 bp, Artificial Sequence
  chemically synthesized
agagtaacattagtgtcaaa

SEQ ID NO: 17080 - DNA, 20 bp, Artificial Sequence
  chemically synthesized
acattagtgtcaaacggaat

SEQ ID NO: 17081 - DNA, 20 bp, Artificial Sequence
  chemically synthesized
tagtgtcaaacggaattggt

SEQ ID NO: 17082 - DNA, 20 bp, Artificial Sequence
  chemically synthesized
agtgtcaaacggaattggtc

SEQ ID NO: 17083 - DNA, 20 bp, Artificial Sequence
  chemically synthesized
aacggaattggtcaggactg

SEQ ID NO: 17084 - DNA, 20 bp, Artificial Sequence
  chemically synthesized
tggtcaggactgtggacctg

SEQ ID NO: 17085 - DNA, 20 bp, Artificial Sequence
  chemically synthesized
ctgtggacctgtggctcata

SEQ ID NO: 17086 - DNA, 20 bp, Artificial Sequence
  chemically synthesized
ggacctgtggctcatacaga

SEQ ID NO: 17087 - DNA, 20 bp, Artificial Sequence
  chemically synthesized
gtggctcatacagatggttg

SEQ ID NO: 17088 - DNA, 20 bp, Artificial Sequence
  chemically synthesized
catacagatggttgtggatg

SEQ ID NO: 17089 - DNA, 20 bp, Artificial Sequence
  chemically synthesized
atacagatggttgtggatgt

SEQ ID NO: 17090 - DNA, 20 bp, Artificial Sequence
  chemically synthesized
ttgtggatgtgggttccatg

SEQ ID NO: 17091 - DNA, 20 bp, Artificial Sequence
  chemically synthesized
ttctaataaatgttaaaatg

SEQ ID NO: 17092 - DNA, 20 bp, Artificial Sequence
  chemically synthesized
ttaaaatgtggcacatttct

SEQ ID NO: 17093 - DNA, 20 bp, Artificial Sequence
  chemically synthesized
aaatgtggcacatttctgag

SEQ ID NO: 17094 - DNA, 20 bp, Artificial Sequence
  chemically synthesized
aatgtggcacatttctgagc

SEQ ID NO: 17095 - DNA, 20 bp, Artificial Sequence
  chemically synthesized
atgtggcacatttctgagca

SEQ ID NO: 17096 - DNA, 20 bp, Artificial Sequence
  chemically synthesized
cacatttctgagcagggccc

SEQ ID NO: 17097 - DNA, 20 bp, Artificial Sequence
  chemically synthesized
acatttctgagcagggccca

SEQ ID NO: 17098 - DNA, 20 bp, Artificial Sequence
  chemically synthesized
tctgagcagggcccaaggat

SEQ ID NO: 17099 - DNA, 20 bp, Artificial Sequence
  chemically synthesized
tgagcagggcccaaggataa

SEQ ID NO: 17100 - DNA, 20 bp, Artificial Sequence
  chemically synthesized
agcagggcccaaggataaga

SEQ ID NO: 17101 - DNA, 20 bp, Artificial Sequence
  chemically synthesized
ggcccaaggataagagagtt

SEQ ID NO: 17102 - DNA, 20 bp, Artificial Sequence
  chemically synthesized
ggataagagagttaagaaat

SEQ ID NO: 17103 - DNA, 20 bp, Artificial Sequence
  chemically synthesized
gataagagagttaagaaatc

SEQ ID NO: 17104 - DNA, 20 bp, Artificial Sequence
  chemically synthesized
ataagagagttaagaaatca

SEQ ID NO: 17105 - DNA, 20 bp, Artificial Sequence
  chemically synthesized
taagagagttaagaaatcag

SEQ ID NO: 17106 - DNA, 20 bp, Artificial Sequence
  chemically synthesized
aagagagttaagaaatcagg

SEQ ID NO: 17107 - DNA, 20 bp, Artificial Sequence
  chemically synthesized
agagttaagaaatcaggggg

SEQ ID NO: 17108 - DNA, 20 bp, Artificial Sequence
  chemically synthesized
gaaatcagggggtagtacct

SEQ ID NO: 17109 - DNA, 20 bp, Artificial Sequence
  chemically synthesized
cttgataacatccacatttc

SEQ ID NO: 17110 - DNA, 20 bp, Artificial Sequence
  chemically synthesized
ataacatccacatttccggt

SEQ ID NO: 17111 - DNA, 20 bp, Artificial Sequence
  chemically synthesized
atttccggtaagatcaactc

SEQ ID NO: 17112 - DNA, 20 bp, Artificial Sequence
  chemically synthesized
tttccggtaagatcaactct

SEQ ID NO: 17113 - DNA, 20 bp, Artificial Sequence
  chemically synthesized
tccggtaagatcaactctag

SEQ ID NO: 17114 - DNA, 20 bp, Artificial Sequence
  chemically synthesized
gtaagatcaactctaggaga

SEQ ID NO: 17115 - DNA, 20 bp, Artificial Sequence
  chemically synthesized
tcaactctaggagaaagtct

SEQ ID NO: 17116 - DNA, 20 bp, Artificial Sequence
  chemically synthesized
caactctaggagaaagtctg

SEQ ID NO: 17117 - DNA, 20 bp, Artificial Sequence
  chemically synthesized
tctaggagaaagtctgaggc

SEQ ID NO: 17118 - DNA, 20 bp, Artificial Sequence
  chemically synthesized
ctaggagaaagtctgaggct

SEQ ID NO: 17119 - DNA, 20 bp, Artificial Sequence
  chemically synthesized
taggagaaagtctgaggctg

SEQ ID NO: 17120 - DNA, 20 bp, Artificial Sequence
  chemically synthesized
aggagaaagtctgaggctgg

SEQ ID NO: 17121 - DNA, 20 bp, Artificial Sequence
  chemically synthesized
gagaaagtctgaggctgggg

SEQ ID NO: 17122 - DNA, 20 bp, Artificial Sequence
  chemically synthesized
gaaagtctgaggctggggga

SEQ ID NO: 17123 - DNA, 20 bp, Artificial Sequence
  chemically synthesized
aagtctgaggctgggggaga

SEQ ID NO: 17124 - DNA, 20 bp, Artificial Sequence
  chemically synthesized
agtctgaggctgggggagag

SEQ ID NO: 17125 - DNA, 20 bp, Artificial Sequence
  chemically synthesized
gtctgaggctgggggagaga

SEQ ID NO: 17126 - DNA, 20 bp, Artificial Sequence
  chemically synthesized
tctgaggctgggggagagag

SEQ ID NO: 17127 - DNA, 20 bp, Artificial Sequence
  chemically synthesized
ctgaggctgggggagagagg

SEQ ID NO: 17128 - DNA, 20 bp, Artificial Sequence
  chemically synthesized
gaggctgggggagagagggg

SEQ ID NO: 17129 - DNA, 20 bp, Artificial Sequence
  chemically synthesized
gctgggggagagagggggag

SEQ ID NO: 17130 - DNA, 20 bp, Artificial Sequence
  chemically synthesized
ctgggggagagagggggaga

SEQ ID NO: 17131 - DNA, 20 bp, Artificial Sequence
  chemically synthesized
tgggggagagagggggagaa

SEQ ID NO: 17132 - DNA, 20 bp, Artificial Sequence
  chemically synthesized
gagagagggggagaagggtg

SEQ ID NO: 17133 - DNA, 20 bp, Artificial Sequence
  chemically synthesized
gagagggggagaagggtgcg

SEQ ID NO: 17134 - DNA, 20 bp, Artificial Sequence
  chemically synthesized
gagggggagaagggtgcgga

SEQ ID NO: 17135 - DNA, 20 bp, Artificial Sequence
  chemically synthesized
gggggagaagggtgcggaga

SEQ ID NO: 17136 - DNA, 20 bp, Artificial Sequence
  chemically synthesized
ggggagaagggtgcggagag

SEQ ID NO: 17137 - DNA, 20 bp, Artificial Sequence
  chemically synthesized
agggtgcggagagaggttct

SEQ ID NO: 17138 - DNA, 20 bp, Artificial Sequence
  chemically synthesized
gttcttggaatattcttcga

SEQ ID NO: 17139 - DNA, 20 bp, Artificial Sequence
  chemically synthesized
cttggaatattcttcgatag

SEQ ID NO: 17140 - DNA, 20 bp, Artificial Sequence
  chemically synthesized
cagttcaaatgaaatcccca

SEQ ID NO: 17141 - DNA, 20 bp, Artificial Sequence
  chemically synthesized
ttcaaatgaaatccccacag

SEQ ID NO: 17142 - DNA, 20 bp, Artificial Sequence
  chemically synthesized
caaatgaaatccccacagca

SEQ ID NO: 17143 - DNA, 20 bp, Artificial Sequence
  chemically synthesized
aatgaaatccccacagcaga

SEQ ID NO: 17144 - DNA, 20 bp, Artificial Sequence
  chemically synthesized
tccccacagcagagagcttt

SEQ ID NO: 17145 - DNA, 20 bp, Artificial Sequence
  chemically synthesized
ccccacagcagagagctttt

SEQ ID NO: 17146 - DNA, 20 bp, Artificial Sequence
  chemically synthesized
cagcagagagcttttgggtc

SEQ ID NO: 17147 - DNA, 20 bp, Artificial Sequence
  chemically synthesized
cagagagcttttgggtctag

SEQ ID NO: 17148 - DNA, 20 bp, Artificial Sequence
  chemically synthesized
agagcttttgggtctagcag

SEQ ID NO: 17149 - DNA, 20 bp, Artificial Sequence
  chemically synthesized
agcttttgggtctagcagtg

SEQ ID NO: 17150 - DNA, 20 bp, Artificial Sequence
  chemically synthesized
ttttgggtctagcagtggag

SEQ ID NO: 17151 - DNA, 20 bp, Artificial Sequence
  chemically synthesized
gggtctagcagtggagcggt

SEQ ID NO: 17152 - DNA, 20 bp, Artificial Sequence
  chemically synthesized
ctagcagtggagcggtaagc

SEQ ID NO: 17153 - DNA, 20 bp, Artificial Sequence
  chemically synthesized
tagcagtggagcggtaagct

SEQ ID NO: 17154 - DNA, 20 bp, Artificial Sequence
  chemically synthesized
gagcggtaagctgggacacg

SEQ ID NO: 17155 - DNA, 20 bp, Artificial Sequence
  chemically synthesized
ctgggacacgtggcctttcg

SEQ ID NO: 17156 - DNA, 20 bp, Artificial Sequence
  chemically synthesized
cctttcgaagctgttattct

SEQ ID NO: 17157 - DNA, 20 bp, Artificial Sequence
  chemically synthesized
tctcagtctgacttgcacac

SEQ ID NO: 17158 - DNA, 20 bp, Artificial Sequence
  chemically synthesized
gtctgacttgcacaccagct

SEQ ID NO: 17159 - DNA, 20 bp, Artificial Sequence
  chemically synthesized
gacttgcacaccagctgaga

SEQ ID NO: 17160 - DNA, 20 bp, Artificial Sequence
  chemically synthesized
acttgcacaccagctgagat

SEQ ID NO: 17161 - DNA, 20 bp, Artificial Sequence
  chemically synthesized
tatactttcttgctttcacc

SEQ ID NO: 17162 - DNA, 20 bp, Artificial Sequence
  chemically synthesized
atactttcttgctttcacct

SEQ ID NO: 17163 - DNA, 20 bp, Artificial Sequence
  chemically synthesized
tttcttgctttcacctgggt

SEQ ID NO: 17164 - DNA, 20 bp, Artificial Sequence
  chemically synthesized
tcttgctttcacctgggttg

SEQ ID NO: 17165 - DNA, 20 bp, Artificial Sequence
  chemically synthesized
ttgctttcacctgggttgga

SEQ ID NO: 17166 - DNA, 20 bp, Artificial Sequence
  chemically synthesized
tgctttcacctgggttggag

SEQ ID NO: 17167 - DNA, 20 bp, Artificial Sequence
  chemically synthesized
ttcacctgggttggagaggt

SEQ ID NO: 17168 - DNA, 20 bp, Artificial Sequence
  chemically synthesized
tcacctgggttggagaggtt

SEQ ID NO: 17169 - DNA, 20 bp, Artificial Sequence
  chemically synthesized
cacctgggttggagaggttg

SEQ ID NO: 17170 - DNA, 20 bp, Artificial Sequence
  chemically synthesized
tgggttggagaggttggggt

SEQ ID NO: 17171 - DNA, 20 bp, Artificial Sequence
  chemically synthesized
gggttggagaggttggggtt

SEQ ID NO: 17172 - DNA, 20 bp, Artificial Sequence
  chemically synthesized
gttggagaggttggggttgg

SEQ ID NO: 17173 - DNA, 20 bp, Artificial Sequence
  chemically synthesized
ttggagaggttggggttggg

SEQ ID NO: 17174 - DNA, 20 bp, Artificial Sequence
  chemically synthesized
gagaggttggggttgggagg

SEQ ID NO: 17175 - DNA, 20 bp, Artificial Sequence
  chemically synthesized
gaggttggggttgggaggaa

SEQ ID NO: 17176 - DNA, 20 bp, Artificial Sequence
  chemically synthesized
aggttggggttgggaggaag

SEQ ID NO: 17177 - DNA, 20 bp, Artificial Sequence
  chemically synthesized
gttggggttgggaggaagag

SEQ ID NO: 17178 - DNA, 20 bp, Artificial Sequence
  chemically synthesized
ttggggttgggaggaagagg

SEQ ID NO: 17179 - DNA, 20 bp, Artificial Sequence
  chemically synthesized
ggggttgggaggaagaggag

SEQ ID NO: 17180 - DNA, 20 bp, Artificial Sequence
  chemically synthesized
gaggaagaggaggagttcat

SEQ ID NO: 17181 - DNA, 20 bp, Artificial Sequence
  chemically synthesized
aggaagaggaggagttcatt

SEQ ID NO: 17182 - DNA, 20 bp, Artificial Sequence
  chemically synthesized
ttcattgggaattctgtcac

SEQ ID NO: 17183 - DNA, 20 bp, Artificial Sequence
  chemically synthesized
cactagaattttttaaatgt

SEQ ID NO: 17184 - DNA, 20 bp, Artificial Sequence
  chemically synthesized
actagaattttttaaatgtc

SEQ ID NO: 17185 - DNA, 20 bp, Artificial Sequence
  chemically synthesized
tagaattttttaaatgtcag

SEQ ID NO: 17186 - DNA, 20 bp, Artificial Sequence
  chemically synthesized
agaattttttaaatgtcagg

SEQ ID NO: 17187 - DNA, 20 bp, Artificial Sequence
  chemically synthesized
ttttttaaatgtcaggaggt

SEQ ID NO: 17188 - DNA, 20 bp, Artificial Sequence
  chemically synthesized
ttaaatgtcaggaggttagc

SEQ ID NO: 17189 - DNA, 20 bp, Artificial Sequence
  chemically synthesized
taaatgtcaggaggttagca

SEQ ID NO: 17190 - DNA, 20 bp, Artificial Sequence
  chemically synthesized
tcaggaggttagcaaggtgt

SEQ ID NO: 17191 - DNA, 20 bp, Artificial Sequence
  chemically synthesized
gaggttagcaaggtgtgagt

SEQ ID NO: 17192 - DNA, 20 bp, Artificial Sequence
  chemically synthesized
caaggtgtgagttagcattc

SEQ ID NO: 17193 - DNA, 20 bp, Artificial Sequence
  chemically synthesized
tgtgagttagcattcaagca

SEQ ID NO: 17194 - DNA, 20 bp, Artificial Sequence
  chemically synthesized
gtgagttagcattcaagcaa

SEQ ID NO: 17195 - DNA, 20 bp, Artificial Sequence
  chemically synthesized
tcaagcaaaggattcttctc

SEQ ID NO: 17196 - DNA, 20 bp, Artificial Sequence
  chemically synthesized
caaaggattcttctccagac

SEQ ID NO: 17197 - DNA, 20 bp, Artificial Sequence
  chemically synthesized
ttcttctccagactagtaat

SEQ ID NO: 17198 - DNA, 20 bp, Artificial Sequence
  chemically synthesized
tctccagactagtaattgga

SEQ ID NO: 17199 - DNA, 20 bp, Artificial Sequence
  chemically synthesized
aattggaaagcctgcaaatc

SEQ ID NO: 17200 - DNA, 20 bp, Artificial Sequence
  chemically synthesized
attggaaagcctgcaaatcc

SEQ ID NO: 17201 - DNA, 20 bp, Artificial Sequence
  chemically synthesized
ccacgatactctctaataac

SEQ ID NO: 17202 - DNA, 20 bp, Artificial Sequence
  chemically synthesized
cacgatactctctaataact

SEQ ID NO: 17203 - DNA, 20 bp, Artificial Sequence
  chemically synthesized
acgatactctctaataactg

SEQ ID NO: 17204 - DNA, 20 bp, Artificial Sequence
  chemically synthesized
atactctctaataactgggg

SEQ ID NO: 17205 - DNA, 20 bp, Artificial Sequence
  chemically synthesized
tactctctaataactggggt

SEQ ID NO: 17206 - DNA, 20 bp, Artificial Sequence
  chemically synthesized
ctctaataactggggtggga

SEQ ID NO: 17207 - DNA, 20 bp, Artificial Sequence
  chemically synthesized
taataactggggtgggatgg

SEQ ID NO: 17208 - DNA, 20 bp, Artificial Sequence
  chemically synthesized
taactggggtgggatggtgg

SEQ ID NO: 17209 - DNA, 20 bp, Artificial Sequence
  chemically synthesized
ctggggtgggatggtggtgg

SEQ ID NO: 17210 - DNA, 20 bp, Artificial Sequence
  chemically synthesized
tggggtgggatggtggtggt

SEQ ID NO: 17211 - DNA, 20 bp, Artificial Sequence
  chemically synthesized
ggtgggatggtggtggtggg

SEQ ID NO: 17212 - DNA, 20 bp, Artificial Sequence
  chemically synthesized
caccacaactttctgaatgt

SEQ ID NO: 17213 - DNA, 20 bp, Artificial Sequence
  chemically synthesized
tctgcatgacccgttcacca

SEQ ID NO: 17214 - DNA, 20 bp, Artificial Sequence
  chemically synthesized
cgttcaccatggattaaatg

SEQ ID NO: 17215 - DNA, 20 bp, Artificial Sequence
  chemically synthesized
caccatggattaaatgcggc

SEQ ID NO: 17216 - DNA, 20 bp, Artificial Sequence
  chemically synthesized
taaatgcggctggtgccgaa

SEQ ID NO: 17217 - DNA, 20 bp, Artificial Sequence
  chemically synthesized
aatgcggctggtgccgaatg

SEQ ID NO: 17218 - DNA, 20 bp, Artificial Sequence
  chemically synthesized
atgcggctggtgccgaatgg

SEQ ID NO: 17219 - DNA, 20 bp, Artificial Sequence
  chemically synthesized
tggtgccgaatggaggaaat

SEQ ID NO: 17220 - DNA, 20 bp, Artificial Sequence
  chemically synthesized
gccgaatggaggaaatcaga

SEQ ID NO: 17221 - DNA, 20 bp, Artificial Sequence
  chemically synthesized
ccgaatggaggaaatcagaa

SEQ ID NO: 17222 - DNA, 20 bp, Artificial Sequence
  chemically synthesized
aaatcagaaaggcaaatctc

SEQ ID NO: 17223 - DNA, 20 bp, Artificial Sequence
  chemically synthesized
gaaaggcaaatctcaagcaa

SEQ ID NO: 17224 - DNA, 20 bp, Artificial Sequence
  chemically synthesized
aaaggcaaatctcaagcaac

SEQ ID NO: 17225 - DNA, 20 bp, Artificial Sequence
  chemically synthesized
gcaacaggatttgcactcct

SEQ ID NO: 17226 - DNA, 20 bp, Artificial Sequence
  chemically synthesized
acaggatttgcactcctcag

SEQ ID NO: 17227 - DNA, 20 bp, Artificial Sequence
  chemically synthesized
tgcactcctcagaagtaaac

SEQ ID NO: 17228 - DNA, 20 bp, Artificial Sequence
  chemically synthesized
ctgtgcttctcctttcttgc

SEQ ID NO: 17229 - DNA, 20 bp, Artificial Sequence
  chemically synthesized
ctttcttgctggtttccctt

SEQ ID NO: 17230 - DNA, 20 bp, Artificial Sequence
  chemically synthesized
tcttgctggtttccctttgg

SEQ ID NO: 17231 - DNA, 20 bp, Artificial Sequence
  chemically synthesized
tgctggtttccctttggaag

SEQ ID NO: 17232 - DNA, 20 bp, Artificial Sequence
  chemically synthesized
tctaaaattaatgccactcc

SEQ ID NO: 17233 - DNA, 20 bp, Artificial Sequence
  chemically synthesized
gccactccaagccaatgaaa

SEQ ID NO: 17234 - DNA, 20 bp, Artificial Sequence
  chemically synthesized
aaaaagctgtttttatacca

SEQ ID NO: 17235 - DNA, 20 bp, Artificial Sequence
  chemically synthesized
aagctgtttttataccacag

SEQ ID NO: 17236 - DNA, 20 bp, Artificial Sequence
  chemically synthesized
taccacagtggatgtttaca

SEQ ID NO: 17237 - DNA, 20 bp, Artificial Sequence
  chemically synthesized
accacagtggatgtttacac

SEQ ID NO: 17238 - DNA, 20 bp, Artificial Sequence
  chemically synthesized
cacagtggatgtttacacag

SEQ ID NO: 17239 - DNA, 20 bp, Artificial Sequence
  chemically synthesized
cagtggatgtttacacagga

SEQ ID NO: 17240 - DNA, 20 bp, Artificial Sequence
  chemically synthesized
ttacacaggagagacaactt

SEQ ID NO: 17241 - DNA, 20 bp, Artificial Sequence
  chemically synthesized
tacacaggagagacaacttg

SEQ ID NO: 17242 - DNA, 20 bp, Artificial Sequence
  chemically synthesized
acacaggagagacaacttga

SEQ ID NO: 17243 - DNA, 20 bp, Artificial Sequence
  chemically synthesized
cacaggagagacaacttgag

SEQ ID NO: 17244 - DNA, 20 bp, Artificial Sequence
  chemically synthesized
acaggagagacaacttgagg

SEQ ID NO: 17245 - DNA, 20 bp, Artificial Sequence
  chemically synthesized
agagacaacttgagggggaa

SEQ ID NO: 17246 - DNA, 20 bp, Artificial Sequence
  chemically synthesized
gagacaacttgagggggaaa

SEQ ID NO: 17247 - DNA, 20 bp, Artificial Sequence
  chemically synthesized
ttgagggggaaaaggctttt

SEQ ID NO: 17248 - DNA, 20 bp, Artificial Sequence
  chemically synthesized
agggggaaaaggctttttgg

SEQ ID NO: 17249 - DNA, 20 bp, Artificial Sequence
  chemically synthesized
gggggaaaaggctttttgga

SEQ ID NO: 17250 - DNA, 20 bp, Artificial Sequence
  chemically synthesized
ggggaaaaggctttttggaa

SEQ ID NO: 17251 - DNA, 20 bp, Artificial Sequence
  chemically synthesized
gaaaaggctttttggaaggg

SEQ ID NO: 17252 - DNA, 20 bp, Artificial Sequence
  chemically synthesized
aaaggctttttggaagggtg

SEQ ID NO: 17253 - DNA, 20 bp, Artificial Sequence
  chemically synthesized
aaggctttttggaagggtgg

SEQ ID NO: 17254 - DNA, 20 bp, Artificial Sequence
  chemically synthesized
aggctttttggaagggtgga

SEQ ID NO: 17255 - DNA, 20 bp, Artificial Sequence
  chemically synthesized
ctcgtgttaatctgttctgt

SEQ ID NO: 17256 - DNA, 20 bp, Artificial Sequence
  chemically synthesized
cgtgttaatctgttctgttg

SEQ ID NO: 17257 - DNA, 20 bp, Artificial Sequence
  chemically synthesized
gtgttaatctgttctgttgg

SEQ ID NO: 17258 - DNA, 20 bp, Artificial Sequence
  chemically synthesized
tgttctgttggaggactatg

SEQ ID NO: 17259 - DNA, 20 bp, Artificial Sequence
  chemically synthesized
gactatgcagtattgcctat

SEQ ID NO: 17260 - DNA, 20 bp, Artificial Sequence
  chemically synthesized
gtattgcctatgagcgactc

SEQ ID NO: 17261 - DNA, 20 bp, Artificial Sequence
  chemically synthesized
tattgcctatgagcgactct

SEQ ID NO: 17262 - DNA, 20 bp, Artificial Sequence
  chemically synthesized
ttttgataaattaccatgtt

SEQ ID NO: 17263 - DNA, 20 bp, Artificial Sequence
  chemically synthesized
ttgataaattaccatgttta

SEQ ID NO: 17264 - DNA, 20 bp, Artificial Sequence
  chemically synthesized
taaattaccatgtttagaga

SEQ ID NO: 17265 - DNA, 20 bp, Artificial Sequence
  chemically synthesized
aaattaccatgtttagagat

SEQ ID NO: 17266 - DNA, 20 bp, Artificial Sequence
  chemically synthesized
accatgtttagagataggtt

SEQ ID NO: 17267 - DNA, 20 bp, Artificial Sequence
  chemically synthesized
tagagataggtttggctctt

SEQ ID NO: 17268 - DNA, 20 bp, Artificial Sequence
  chemically synthesized
agagataggtttggctctta

SEQ ID NO: 17269 - DNA, 20 bp, Artificial Sequence
  chemically synthesized
gagataggtttggctcttaa

SEQ ID NO: 17270 - DNA, 20 bp, Artificial Sequence
  chemically synthesized
aggtttggctcttaagggct

SEQ ID NO: 17271 - DNA, 20 bp, Artificial Sequence
  chemically synthesized
agggcttagttttatgaaca

SEQ ID NO: 17272 - DNA, 20 bp, Artificial Sequence
  chemically synthesized
aaagtccgtgacgatgtttg

SEQ ID NO: 17273 - DNA, 20 bp, Artificial Sequence
  chemically synthesized
tgcagcctctgtttgtatct

SEQ ID NO: 17274 - DNA, 20 bp, Artificial Sequence
  chemically synthesized
tgtttgtatcttagcccctt

SEQ ID NO: 17275 - DNA, 20 bp, Artificial Sequence
  chemically synthesized
cttagcccctttggcttgac

SEQ ID NO: 17276 - DNA, 20 bp, Artificial Sequence
  chemically synthesized
agcccctttggcttgactag

SEQ ID NO: 17277 - DNA, 20 bp, Artificial Sequence
  chemically synthesized
ttgactagaagctctatgtt

SEQ ID NO: 17278 - DNA, 20 bp, Artificial Sequence
  chemically synthesized
agaagctctatgtttagttt

SEQ ID NO: 17279 - DNA, 20 bp, Artificial Sequence
  chemically synthesized
ctctatgtttagtttaagct

SEQ ID NO: 17280 - DNA, 20 bp, Artificial Sequence
  chemically synthesized
tgtttagtttaagctcagtc

SEQ ID NO: 17281 - DNA, 20 bp, Artificial Sequence
  chemically synthesized
ttagtttaagctcagtctgg

SEQ ID NO: 17282 - DNA, 20 bp, Artificial Sequence
  chemically synthesized
caattttgcattaaaaaaat

SEQ ID NO: 17283 - DNA, 20 bp, Artificial Sequence
  chemically synthesized
aattttgcattaaaaaaatg

SEQ ID NO: 17284 - DNA, 20 bp, Artificial Sequence
  chemically synthesized
ttaaaaaaatgaggaaatca

SEQ ID NO: 17285 - DNA, 20 bp, Artificial Sequence
  chemically synthesized
taaaaaaatgaggaaatcat

SEQ ID NO: 17286 - DNA, 20 bp, Artificial Sequence
  chemically synthesized
aaaaatgaggaaatcatagg

SEQ ID NO: 17287 - DNA, 20 bp, Artificial Sequence
  chemically synthesized
aagaaaaaccctttgctttt

SEQ ID NO: 17288 - DNA, 20 bp, Artificial Sequence
  chemically synthesized
atcttactgataatttgcta

SEQ ID NO: 17289 - DNA, 20 bp, Artificial Sequence
  chemically synthesized
ctaaagctcatttgaatttt

SEQ ID NO: 17290 - DNA, 20 bp, Artificial Sequence
  chemically synthesized
aagcacttctttaatcttca

SEQ ID NO: 17291 - DNA, 20 bp, Artificial Sequence
  chemically synthesized
agcacttctttaatcttcaa

SEQ ID NO: 17292 - DNA, 20 bp, Artificial Sequence
  chemically synthesized
aattgctttatgaatatgca

SEQ ID NO: 17293 - DNA, 20 bp, Artificial Sequence
  chemically synthesized
ctttatgaatatgcatggtg

SEQ ID NO: 17294 - DNA, 20 bp, Artificial Sequence
  chemically synthesized
tttatgaatatgcatggtgt

SEQ ID NO: 17295 - DNA, 20 bp, Artificial Sequence
  chemically synthesized
atgaatatgcatggtgtggg

SEQ ID NO: 17296 - DNA, 20 bp, Artificial Sequence
  chemically synthesized
tgcatggtgtgggcagactt

SEQ ID NO: 17297 - DNA, 20 bp, Artificial Sequence
  chemically synthesized
gcagacttcagttcattacc

SEQ ID NO: 17298 - DNA, 20 bp, Artificial Sequence
  chemically synthesized
ttgtaaattctaatgaccat

SEQ ID NO: 17299 - DNA, 20 bp, Artificial Sequence
  chemically synthesized
tgtaaattctaatgaccatt

SEQ ID NO: 17300 - DNA, 20 bp, Artificial Sequence
  chemically synthesized
taatgaccattaggtccttc

SEQ ID NO: 17301 - DNA, 20 bp, Artificial Sequence
  chemically synthesized
aattgttttgcatttttgat

SEQ ID NO: 17302 - DNA, 20 bp, Artificial Sequence
  chemically synthesized
ggcctattaacatgtacatt

SEQ ID NO: 17303 - DNA, 20 bp, Artificial Sequence
  chemically synthesized
catgtacattcggtgcacat

SEQ ID NO: 17304 - DNA, 20 bp, Artificial Sequence
  chemically synthesized
atgtacattcggtgcacatc

SEQ ID NO: 17305 - DNA, 20 bp, Artificial Sequence
  chemically synthesized
acattcggtgcacatcaggc

SEQ ID NO: 17306 - DNA, 20 bp, Artificial Sequence
  chemically synthesized
tgcacatcaggctggcctgt

SEQ ID NO: 17307 - DNA, 20 bp, Artificial Sequence
  chemically synthesized
gctggcctgtcagcctgctg

SEQ ID NO: 17308 - DNA, 20 bp, Artificial Sequence
  chemically synthesized
ctggcctgtcagcctgctga

SEQ ID NO: 17309 - DNA, 20 bp, Artificial Sequence
  chemically synthesized
ggcctgtcagcctgctgaag

SEQ ID NO: 17310 - DNA, 20 bp, Artificial Sequence
  chemically synthesized
gcctgctgaaggagaaaaaa

SEQ ID NO: 17311 - DNA, 20 bp, Artificial Sequence
  chemically synthesized
cctgctgaaggagaaaaaaa

SEQ ID NO: 17312 - DNA, 20 bp, Artificial Sequence
  chemically synthesized
aaaaaggtgaaaattgttta

SEQ ID NO: 17313 - DNA, 20 bp, Artificial Sequence
  chemically synthesized
tgaaaattgtttatagcacc

SEQ ID NO: 17314 - DNA, 20 bp, Artificial Sequence
  chemically synthesized
gtttatagcaccaagattct

SEQ ID NO: 17315 - DNA, 20 bp, Artificial Sequence
  chemically synthesized
ttgatgatgtaaaaaaatta

SEQ ID NO: 17316 - DNA, 20 bp, Artificial Sequence
  chemically synthesized
atgatgtaaaaaaattaaag

SEQ ID NO: 17317 - DNA, 20 bp, Artificial Sequence
  chemically synthesized
aagcagtgttttttcttctc

SEQ ID NO: 17318 - DNA, 20 bp, Artificial Sequence
  chemically synthesized
ttttttcttctcaagattaa

SEQ ID NO: 17319 - DNA, 20 bp, Artificial Sequence
  chemically synthesized
ctcaagattaaaagttcacc

SEQ ID NO: 17320 - DNA, 20 bp, Artificial Sequence
  chemically synthesized
caagattaaaagttcaccaa

SEQ ID NO: 17321 - DNA, 20 bp, Artificial Sequence
  chemically synthesized
attaatgtaatttgcatatg

SEQ ID NO: 17322 - DNA, 20 bp, Artificial Sequence
  chemically synthesized
tttgatcatgttttgtgtat

SEQ ID NO: 17323 - DNA, 20 bp, Artificial Sequence
  chemically synthesized
gttttgtgtattagctgcct

SEQ ID NO: 17324 - DNA, 20 bp, Artificial Sequence
  chemically synthesized
ttgtgtattagctgcctcag

SEQ ID NO: 17325 - DNA, 20 bp, Artificial Sequence
  chemically synthesized
gcctcagtggctctcctcct

SEQ ID NO: 17326 - DNA, 20 bp, Artificial Sequence
  chemically synthesized
gctctcctcctcagatgccc

SEQ ID NO: 17327 - DNA, 20 bp, Artificial Sequence
  chemically synthesized
ctcctcctcagatgccccag

SEQ ID NO: 17328 - DNA, 20 bp, Artificial Sequence
  chemically synthesized
tcctcagatgccccagtaga

SEQ ID NO: 17329 - DNA, 20 bp, Artificial Sequence
  chemically synthesized
cctcagatgccccagtagaa

SEQ ID NO: 17330 - DNA, 20 bp, Artificial Sequence
  chemically synthesized
tcagatgccccagtagaaag

SEQ ID NO: 17331 - DNA, 20 bp, Artificial Sequence
  chemically synthesized
aaatgatgcatcttcttgcc

SEQ ID NO: 17332 - DNA, 20 bp, Artificial Sequence
  chemically synthesized
tcttcttgccaagtttcctt

SEQ ID NO: 17333 - DNA, 20 bp, Artificial Sequence
  chemically synthesized
caagtttcctttagtgaatt

SEQ ID NO: 17334 - DNA, 20 bp, Artificial Sequence
  chemically synthesized
aagtttcctttagtgaattg

SEQ ID NO: 17335 - DNA, 20 bp, Artificial Sequence
  chemically synthesized
cctttagtgaattgaggaat

SEQ ID NO: 17336 - DNA, 20 bp, Artificial Sequence
  chemically synthesized
ttagtgaattgaggaattag

SEQ ID NO: 17337 - DNA, 20 bp, Artificial Sequence
  chemically synthesized
ggaattagaagtctaacctt

SEQ ID NO: 17338 - DNA, 20 bp, Artificial Sequence
  chemically synthesized
atccgttttcttttaacgtt

SEQ ID NO: 17339 - DNA, 20 bp, Artificial Sequence
  chemically synthesized
ttttcttttaacgttaagta

SEQ ID NO: 17340 - DNA, 20 bp, Artificial Sequence
  chemically synthesized
agtacagtttgtgaacgtgt

SEQ ID NO: 17341 - DNA, 20 bp, Artificial Sequence
  chemically synthesized
cagtttgtgaacgtgttggc

SEQ ID NO: 17342 - DNA, 20 bp, Artificial Sequence
  chemically synthesized
ggctggaaatcgttctcatt

SEQ ID NO: 17343 - DNA, 20 bp, Artificial Sequence
  chemically synthesized
gctggaaatcgttctcattt

SEQ ID NO: 17344 - DNA, 20 bp, Artificial Sequence
  chemically synthesized
ctggaaatcgttctcatttg

SEQ ID NO: 17345 - DNA, 20 bp, Artificial Sequence
  chemically synthesized
ggaaatcgttctcatttggg

SEQ ID NO: 17346 - DNA, 20 bp, Artificial Sequence
  chemically synthesized
aatcgttctcatttggggag

SEQ ID NO: 17347 - DNA, 20 bp, Artificial Sequence
  chemically synthesized
gggagaagactgtaaaattt

SEQ ID NO: 17348 - DNA, 20 bp, Artificial Sequence
  chemically synthesized
taaaatttaagtatatgatt

SEQ ID NO: 17349 - DNA, 20 bp, Artificial Sequence
  chemically synthesized
aaaatttaagtatatgattg

SEQ ID NO: 17350 - DNA, 20 bp, Artificial Sequence
  chemically synthesized
gtatatgattgaggcacttc

SEQ ID NO: 17351 - DNA, 20 bp, Artificial Sequence
  chemically synthesized
ttgaggcacttccagataca

SEQ ID NO: 17352 - DNA, 20 bp, Artificial Sequence
  chemically synthesized
gaggcacttccagatacata

SEQ ID NO: 17353 - DNA, 20 bp, Artificial Sequence
  chemically synthesized
tctgttccccacgaacattg

SEQ ID NO: 17354 - DNA, 20 bp, Artificial Sequence
  chemically synthesized
ctgttccccacgaacattgc

SEQ ID NO: 17355 - DNA, 20 bp, Artificial Sequence
  chemically synthesized
tgttccccacgaacattgca

SEQ ID NO: 17356 - DNA, 20 bp, Artificial Sequence
  chemically synthesized
tccccacgaacattgcaggg

SEQ ID NO: 17357 - DNA, 20 bp, Artificial Sequence
  chemically synthesized
ttgcagggcagttttattgt

SEQ ID NO: 17358 - DNA, 20 bp, Artificial Sequence
  chemically synthesized
cagggcagttttattgttag

SEQ ID NO: 17359 - DNA, 20 bp, Artificial Sequence
  chemically synthesized
ttttattgttagcagtttga

SEQ ID NO: 17360 - DNA, 20 bp, Artificial Sequence
  chemically synthesized
tattgttagcagtttgatgg

SEQ ID NO: 17361 - DNA, 20 bp, Artificial Sequence
  chemically synthesized
attgttagcagtttgatggc

SEQ ID NO: 17362 - DNA, 20 bp, Artificial Sequence
  chemically synthesized
gttagcagtttgatggcagg

SEQ ID NO: 17363 - DNA, 20 bp, Artificial Sequence
  chemically synthesized
agtttgatggcaggaagcct

SEQ ID NO: 17364 - DNA, 20 bp, Artificial Sequence
  chemically synthesized
gcaggaagccttggctatta

SEQ ID NO: 17365 - DNA, 20 bp, Artificial Sequence
  chemically synthesized
cttggctattatagtgtatt

SEQ ID NO: 17366 - DNA, 20 bp, Artificial Sequence
  chemically synthesized
attatagtgtattaagacat

SEQ ID NO: 17367 - DNA, 20 bp, Artificial Sequence
  chemically synthesized
ttatagtgtattaagacatc

SEQ ID NO: 17368 - DNA, 20 bp, Artificial Sequence
  chemically synthesized
aagacatcaggttcctcctt

SEQ ID NO: 17369 - DNA, 20 bp, Artificial Sequence
  chemically synthesized
gacatcaggttcctcctttg

SEQ ID NO: 17370 - DNA, 20 bp, Artificial Sequence
  chemically synthesized
acatcaggttcctcctttgg

SEQ ID NO: 17371 - DNA, 20 bp, Artificial Sequence
  chemically synthesized
atcaggttcctcctttggag

SEQ ID NO: 17372 - DNA, 20 bp, Artificial Sequence
  chemically synthesized
tcaggttcctcctttggagg

SEQ ID NO: 17373 - DNA, 20 bp, Artificial Sequence
  chemically synthesized
caggttcctcctttggagga

SEQ ID NO: 17374 - DNA, 20 bp, Artificial Sequence
  chemically synthesized
gttcctcctttggaggaggg

SEQ ID NO: 17375 - DNA, 20 bp, Artificial Sequence
  chemically synthesized
ttcctcctttggaggaggga

SEQ ID NO: 17376 - DNA, 20 bp, Artificial Sequence
  chemically synthesized
ctttggaggagggaaggcta

SEQ ID NO: 17377 - DNA, 20 bp, Artificial Sequence
  chemically synthesized
aaacctttctaacaatgctt

SEQ ID NO: 17378 - DNA, 20 bp, Artificial Sequence
  chemically synthesized
aacctttctaacaatgcttt

SEQ ID NO: 17379 - DNA, 20 bp, Artificial Sequence
  chemically synthesized
aatgctttaggtttcttctt

SEQ ID NO: 17380 - DNA, 20 bp, Artificial Sequence
  chemically synthesized
ctttaggtttcttctttaga

SEQ ID NO: 17381 - DNA, 20 bp, Artificial Sequence
  chemically synthesized
aggtttcttctttagataga

SEQ ID NO: 17382 - DNA, 20 bp, Artificial Sequence
  chemically synthesized
ttcttctttagatagatggc

SEQ ID NO: 17383 - DNA, 20 bp, Artificial Sequence
  chemically synthesized
agatagatggctggcaccta

SEQ ID NO: 17384 - DNA, 20 bp, Artificial Sequence
  chemically synthesized
gatagatggctggcacctaa

SEQ ID NO: 17385 - DNA, 20 bp, Artificial Sequence
  chemically synthesized
tggctggcacctaaaggact

SEQ ID NO: 17386 - DNA, 20 bp, Artificial Sequence
  chemically synthesized
ggctggcacctaaaggactt

SEQ ID NO: 17387 - DNA, 20 bp, Artificial Sequence
  chemically synthesized
gcacctaaaggacttgggcc

SEQ ID NO: 17388 - DNA, 20 bp, Artificial Sequence
  chemically synthesized
cacctaaaggacttgggcct

SEQ ID NO: 17389 - DNA, 20 bp, Artificial Sequence
  chemically synthesized
aaaggacttgggcctgggtt

SEQ ID NO: 17390 - DNA, 20 bp, Artificial Sequence
  chemically synthesized
tggctgactcttttatcttt

SEQ ID NO: 17391 - DNA, 20 bp, Artificial Sequence
  chemically synthesized
actcttttatcttttagatc

SEQ ID NO: 17392 - DNA, 20 bp, Artificial Sequence
  chemically synthesized
ttttatcttttagatcaagt

SEQ ID NO: 17393 - DNA, 20 bp, Artificial Sequence
  chemically synthesized
atcaagtaagttttctcatt

SEQ ID NO: 17394 - DNA, 20 bp, Artificial Sequence
  chemically synthesized
tctcattcagctgctgctct

SEQ ID NO: 17395 - DNA, 20 bp, Artificial Sequence
  chemically synthesized
gtgtcctcccctcatcacca

SEQ ID NO: 17396 - DNA, 20 bp, Artificial Sequence
  chemically synthesized
ctcatcaccaaagtatatcc

SEQ ID NO: 17397 - DNA, 20 bp, Artificial Sequence
  chemically synthesized
ccaaagtatatcctggtctc

SEQ ID NO: 17398 - DNA, 20 bp, Artificial Sequence
  chemically synthesized
caaagtatatcctggtctcc

SEQ ID NO: 17399 - DNA, 20 bp, Artificial Sequence
  chemically synthesized
atcctggtctccaggctccc

SEQ ID NO: 17400 - DNA, 20 bp, Artificial Sequence
  chemically synthesized
tcctggtctccaggctccct

SEQ ID NO: 17401 - DNA, 20 bp, Artificial Sequence
  chemically synthesized
ctccaggctccctgggctcc

SEQ ID NO: 17402 - DNA, 20 bp, Artificial Sequence
  chemically synthesized
gggctcccagtgtctccctc

SEQ ID NO: 17403 - DNA, 20 bp, Artificial Sequence
  chemically synthesized
ggctcccagtgtctccctca

SEQ ID NO: 17404 - DNA, 20 bp, Artificial Sequence
  chemically synthesized
gtgtctccctcaaggtacac

SEQ ID NO: 17405 - DNA, 20 bp, Artificial Sequence
  chemically synthesized
ctcaaggtacacgagtgccc

SEQ ID NO: 17406 - DNA, 20 bp, Artificial Sequence
  chemically synthesized
aaggtacacgagtgccctgg

SEQ ID NO: 17407 - DNA, 20 bp, Artificial Sequence
  chemically synthesized
agtgccctggtggtgaaaac

SEQ ID NO: 17408 - DNA, 20 bp, Artificial Sequence
  chemically synthesized
gtgccctggtggtgaaaaca

SEQ ID NO: 17409 - DNA, 20 bp, Artificial Sequence
  chemically synthesized
gaaaacaaggtgctaactaa

SEQ ID NO: 17410 - DNA, 20 bp, Artificial Sequence
  chemically synthesized
actaacggtttccgattttt

SEQ ID NO: 17411 - DNA, 20 bp, Artificial Sequence
  chemically synthesized
taacggtttccgatttttga

SEQ ID NO: 17412 - DNA, 20 bp, Artificial Sequence
  chemically synthesized
tttttgagagcctgtgattt

SEQ ID NO: 17413 - DNA, 20 bp, Artificial Sequence
  chemically synthesized
gtattattgatgttcatctt

SEQ ID NO: 17414 - DNA, 20 bp, Artificial Sequence
  chemically synthesized
gatgttcatctttggtttat

SEQ ID NO: 17415 - DNA, 20 bp, Artificial Sequence
  chemically synthesized
ttggtttatgagtttatcac

SEQ ID NO: 17416 - DNA, 20 bp, Artificial Sequence
  chemically synthesized
tgagtttatcactggttaac

SEQ ID NO: 17417 - DNA, 20 bp, Artificial Sequence
  chemically synthesized
gtttatcactggttaacaag

SEQ ID NO: 17418 - DNA, 20 bp, Artificial Sequence
  chemically synthesized
cactggttaacaagcagaat

SEQ ID NO: 17419 - DNA, 20 bp, Artificial Sequence
  chemically synthesized
gttaacaagcagaatcagaa

SEQ ID NO: 17420 - DNA, 20 bp, Artificial Sequence
  chemically synthesized
ttaaaacgaatgtttaatga

SEQ ID NO: 17421 - DNA, 20 bp, Artificial Sequence
  chemically synthesized
tgaaagaaaataaattgtga

SEQ ID NO: 17422 - DNA, 20 bp, Artificial Sequence
  chemically synthesized
aaattgtgatggaaaatgaa

SEQ ID NO: 17423 - DNA, 20 bp, Artificial Sequence
  chemically synthesized
atggaaaatgaacagtgtgt

SEQ ID NO: 17424 - DNA, 20 bp, Artificial Sequence
  chemically synthesized
taactataattttaacctcc

SEQ ID NO: 17425 - DNA, 20 bp, Artificial Sequence
  chemically synthesized
aactataattttaacctccg

SEQ ID NO: 17426 - DNA, 20 bp, Artificial Sequence
  chemically synthesized
actataattttaacctccga

SEQ ID NO: 17427 - DNA, 20 bp, Artificial Sequence
  chemically synthesized
attttaacctccgagggacc

SEQ ID NO: 17428 - DNA, 20 bp, Artificial Sequence
  chemically synthesized
ttccatccataccatgctaa

SEQ ID NO: 17429 - DNA, 20 bp, Artificial Sequence
  chemically synthesized
accatgctaaaagcatgctt

SEQ ID NO: 17430 - DNA, 20 bp, Artificial Sequence
  chemically synthesized
taaaagcatgcttcagttta

SEQ ID NO: 17431 - DNA, 20 bp, Artificial Sequence
  chemically synthesized
agtttaaagttgttaatatt

SEQ ID NO: 17432 - DNA, 20 bp, Artificial Sequence
  chemically synthesized
taaagttgttaatattcagc

SEQ ID NO: 17433 - DNA, 20 bp, Artificial Sequence
  chemically synthesized
aaagttgttaatattcagct

SEQ ID NO: 17434 - DNA, 20 bp, Artificial Sequence
  chemically synthesized
gttaatattcagctgggaaa

SEQ ID NO: 17435 - DNA, 20 bp, Artificial Sequence
  chemically synthesized
ttcagctgggaaacagtatc

SEQ ID NO: 17436 - DNA, 20 bp, Artificial Sequence
  chemically synthesized
cagaacacaaataaattatt

SEQ ID NO: 17437 - DNA, 20 bp, Artificial Sequence
  chemically synthesized
tattaagtgcatgaactttt

SEQ ID NO: 17438 - DNA, 20 bp, Artificial Sequence
  chemically synthesized
attaagtgcatgaacttttt

SEQ ID NO: 17439 - DNA, 20 bp, Artificial Sequence
  chemically synthesized
aagtgcatgaactttttagg

SEQ ID NO: 17440 - DNA, 20 bp, Artificial Sequence
  chemically synthesized
gcatgaactttttaggcagt

SEQ ID NO: 17441 - DNA, 20 bp, Artificial Sequence
  chemically synthesized
taggcagtaagatgaactga

SEQ ID NO: 17442 - DNA, 20 bp, Artificial Sequence
  chemically synthesized
aggcagtaagatgaactgat

SEQ ID NO: 17443 - DNA, 20 bp, Artificial Sequence
  chemically synthesized
ggcagtaagatgaactgatg

SEQ ID NO: 17444 - DNA, 20 bp, Artificial Sequence
  chemically synthesized
aactgatggggtccatctgt

SEQ ID NO: 17445 - DNA, 20 bp, Artificial Sequence
  chemically synthesized
tggggtccatctgtgagatc

SEQ ID NO: 17446 - DNA, 20 bp, Artificial Sequence
  chemically synthesized
ggggtccatctgtgagatcc

SEQ ID NO: 17447 - DNA, 20 bp, Artificial Sequence
  chemically synthesized
gggtccatctgtgagatcca

SEQ ID NO: 17448 - DNA, 20 bp, Artificial Sequence
  chemically synthesized
ggtccatctgtgagatccag

SEQ ID NO: 17449 - DNA, 20 bp, Artificial Sequence
  chemically synthesized
gctttttatttgtgtgtgtc

SEQ ID NO: 17450 - DNA, 20 bp, Artificial Sequence
  chemically synthesized
ttctgccctctccgacttca

SEQ ID NO: 17451 - DNA, 20 bp, Artificial Sequence
  chemically synthesized
ctctccgacttcacagcctt

SEQ ID NO: 17452 - DNA, 20 bp, Artificial Sequence
  chemically synthesized
acttcacagcctttggtctc

SEQ ID NO: 17453 - DNA, 20 bp, Artificial Sequence
  chemically synthesized
cttgatgtaattgctttact

SEQ ID NO: 17454 - DNA, 20 bp, Artificial Sequence
  chemically synthesized
taagatatgatgaaatctaa

SEQ ID NO: 17455 - DNA, 20 bp, Artificial Sequence
  chemically synthesized
gataatttgctatttgaaaa

SEQ ID NO: 17456 - DNA, 20 bp, Artificial Sequence
  chemically synthesized
aaaaatcttcatactttatg

SEQ ID NO: 17457 - DNA, 20 bp, Artificial Sequence
  chemically synthesized
aaaatcttcatactttatgt

SEQ ID NO: 17458 - DNA, 20 bp, Artificial Sequence
  chemically synthesized
aaatcttcatactttatgtg

SEQ ID NO: 17459 - DNA, 20 bp, Artificial Sequence
  chemically synthesized
ttcatactttatgtggggct

SEQ ID NO: 17460 - DNA, 20 bp, Artificial Sequence
  chemically synthesized
atactttatgtggggctgag

SEQ ID NO: 17461 - DNA, 20 bp, Artificial Sequence
  chemically synthesized
tactttatgtggggctgagt

SEQ ID NO: 17462 - DNA, 20 bp, Artificial Sequence
  chemically synthesized
tttatgtggggctgagtggg

SEQ ID NO: 17463 - DNA, 20 bp, Artificial Sequence
  chemically synthesized
atgtggggctgagtgggcag

SEQ ID NO: 17464 - DNA, 20 bp, Artificial Sequence
  chemically synthesized
gtggggctgagtgggcagtg

SEQ ID NO: 17465 - DNA, 20 bp, Artificial Sequence
  chemically synthesized
ggctgagtgggcagtggaga

SEQ ID NO: 17466 - DNA, 20 bp, Artificial Sequence
  chemically synthesized
gctgagtgggcagtggagaa

SEQ ID NO: 17467 - DNA, 20 bp, Artificial Sequence
  chemically synthesized
ctgagtgggcagtggagaaa

SEQ ID NO: 17468 - DNA, 20 bp, Artificial Sequence
  chemically synthesized
tgagtgggcagtggagaaag

SEQ ID NO: 17469 - DNA, 20 bp, Artificial Sequence
  chemically synthesized
gcagtggagaaaggggtatt

SEQ ID NO: 17470 - DNA, 20 bp, Artificial Sequence
  chemically synthesized
aaaggggtattcagctgacc

SEQ ID NO: 17471 - DNA, 20 bp, Artificial Sequence
  chemically synthesized
attcagctgacccggtattt

SEQ ID NO: 17472 - DNA, 20 bp, Artificial Sequence
  chemically synthesized
ggtatttaagaaaacaaaac

SEQ ID NO: 17473 - DNA, 20 bp, Artificial Sequence
  chemically synthesized
ctaacttatgcatgctgctt

SEQ ID NO: 17474 - DNA, 20 bp, Artificial Sequence
  chemically synthesized
gcatgctgcttcagtcgcgt

SEQ ID NO: 17475 - DNA, 20 bp, Artificial Sequence
  chemically synthesized
tgcttcagtcgcgttggctg

SEQ ID NO: 17476 - DNA, 20 bp, Artificial Sequence
  chemically synthesized
tcagtcgcgttggctgtgga

SEQ ID NO: 17477 - DNA, 20 bp, Artificial Sequence
  chemically synthesized
cagtcgcgttggctgtggat

SEQ ID NO: 17478 - DNA, 20 bp, Artificial Sequence
  chemically synthesized
tcgcgttggctgtggatagg

SEQ ID NO: 17479 - DNA, 20 bp, Artificial Sequence
  chemically synthesized
cgcgttggctgtggatagga

SEQ ID NO: 17480 - DNA, 20 bp, Artificial Sequence
  chemically synthesized
aggaaggtctttgtgacata

SEQ ID NO: 17481 - DNA, 20 bp, Artificial Sequence
  chemically synthesized
aaggtctttgtgacatatgg

SEQ ID NO: 17482 - DNA, 20 bp, Artificial Sequence
  chemically synthesized
tctttgtgacatatggaagc

SEQ ID NO: 17483 - DNA, 20 bp, Artificial Sequence
  chemically synthesized
ctctctcccccaaactttac

SEQ ID NO: 17484 - DNA, 20 bp, Artificial Sequence
  chemically synthesized
ctcccccaaactttacaaga

SEQ ID NO: 17485 - DNA, 20 bp, Artificial Sequence
  chemically synthesized
tcccccaaactttacaagaa

SEQ ID NO: 17486 - DNA, 20 bp, Artificial Sequence
  chemically synthesized
cccccaaactttacaagaaa

SEQ ID NO: 17487 - DNA, 20 bp, Artificial Sequence
  chemically synthesized
tacaagaaagggatcctaac

SEQ ID NO: 17488 - DNA, 20 bp, Artificial Sequence
  chemically synthesized
acaagaaagggatcctaaca

SEQ ID NO: 17489 - DNA, 20 bp, Artificial Sequence
  chemically synthesized
agggatcctaacaaggtaaa

SEQ ID NO: 17490 - DNA, 20 bp, Artificial Sequence
  chemically synthesized
aaggtaaaaagtaaacaatt

SEQ ID NO: 17491 - DNA, 20 bp, Artificial Sequence
  chemically synthesized
gtaaacaatttagtcatcac

SEQ ID NO: 17492 - DNA, 20 bp, Artificial Sequence
  chemically synthesized
tcatcacaagccttattatt

SEQ ID NO: 17493 - DNA, 20 bp, Artificial Sequence
  chemically synthesized
gccttattattcagtctatc

SEQ ID NO: 17494 - DNA, 20 bp, Artificial Sequence
  chemically synthesized
ccttattattcagtctatcc

SEQ ID NO: 17495 - DNA, 20 bp, Artificial Sequence
  chemically synthesized
ttattattcagtctatccag

SEQ ID NO: 17496 - DNA, 20 bp, Artificial Sequence
  chemically synthesized
atccaggagttttgccatgt

SEQ ID NO: 17497 - DNA, 20 bp, Artificial Sequence
  chemically synthesized
atgtcggtttatttaacttc

SEQ ID NO: 17498 - DNA, 20 bp, Artificial Sequence
  chemically synthesized
tgtcggtttatttaacttcc

SEQ ID NO: 17499 - DNA, 20 bp, Artificial Sequence
  chemically synthesized
caggaatgtaaacactgaca

SEQ ID NO: 17500 - DNA, 20 bp, Artificial Sequence
  chemically synthesized
tgtaaacactgacacagccc

SEQ ID NO: 17501 - DNA, 20 bp, Artificial Sequence
  chemically synthesized
aaacactgacacagccctag

SEQ ID NO: 17502 - DNA, 20 bp, Artificial Sequence
  chemically synthesized
cactgacacagccctagaag

SEQ ID NO: 17503 - DNA, 20 bp, Artificial Sequence
  chemically synthesized
gacacagccctagaagcagc

SEQ ID NO: 17504 - DNA, 20 bp, Artificial Sequence
  chemically synthesized
cagccctagaagcagcaaga

SEQ ID NO: 17505 - DNA, 20 bp, Artificial Sequence
  chemically synthesized
agaagcagcaagaaagatta

SEQ ID NO: 17506 - DNA, 20 bp, Artificial Sequence
  chemically synthesized
agcaagaaagattacagtat

SEQ ID NO: 17507 - DNA, 20 bp, Artificial Sequence
  chemically synthesized
caagaaagattacagtatta

SEQ ID NO: 17508 - DNA, 20 bp, Artificial Sequence
  chemically synthesized
agtattagagttaaaaacgt

SEQ ID NO: 17509 - DNA, 20 bp, Artificial Sequence
  chemically synthesized
tagagttaaaaacgtgagca

SEQ ID NO: 17510 - DNA, 20 bp, Artificial Sequence
  chemically synthesized
gagttaaaaacgtgagcatg

SEQ ID NO: 17511 - DNA, 20 bp, Artificial Sequence
  chemically synthesized
agttaaaaacgtgagcatgg

SEQ ID NO: 17512 - DNA, 20 bp, Artificial Sequence
  chemically synthesized
ttaaaaacgtgagcatggag

SEQ ID NO: 17513 - DNA, 20 bp, Artificial Sequence
  chemically synthesized
cactttacattgaaacataa

SEQ ID NO: 17514 - DNA, 20 bp, Artificial Sequence
  chemically synthesized
ttacattgaaacataatggt

SEQ ID NO: 17515 - DNA, 20 bp, Artificial Sequence
  chemically synthesized
gaaacataatggtaagtcaa

SEQ ID NO: 17516 - DNA, 20 bp, Artificial Sequence
  chemically synthesized
aatggtaagtcaaaagtgac

SEQ ID NO: 17517 - DNA, 20 bp, Artificial Sequence
  chemically synthesized
actggaaacttctgcttata

SEQ ID NO: 17518 - DNA, 20 bp, Artificial Sequence
  chemically synthesized
tggaaacttctgcttatatg

SEQ ID NO: 17519 - DNA, 20 bp, Artificial Sequence
  chemically synthesized
gagtacaaatttcattctaa

SEQ ID NO: 17520 - DNA, 20 bp, Artificial Sequence
  chemically synthesized
caaatttcattctaatagat

SEQ ID NO: 17521 - DNA, 20 bp, Artificial Sequence
  chemically synthesized
tctaatagattggcataatc

SEQ ID NO: 17522 - DNA, 20 bp, Artificial Sequence
  chemically synthesized
ttggcataatctagtgtacc

SEQ ID NO: 17523 - DNA, 20 bp, Artificial Sequence
  chemically synthesized
tggcataatctagtgtaccc

SEQ ID NO: 17524 - DNA, 20 bp, Artificial Sequence
  chemically synthesized
ggcataatctagtgtaccca

SEQ ID NO: 17525 - DNA, 20 bp, Artificial Sequence
  chemically synthesized
ataatctagtgtacccaggg

SEQ ID NO: 17526 - DNA, 20 bp, Artificial Sequence
  chemically synthesized
cagggtagattgttatataa

SEQ ID NO: 17527 - DNA, 20 bp, Artificial Sequence
  chemically synthesized
gggtagattgttatataatg

SEQ ID NO: 17528 - DNA, 20 bp, Artificial Sequence
  chemically synthesized
ggagaaactgtataaatgtc

SEQ ID NO: 17529 - DNA, 20 bp, Artificial Sequence
  chemically synthesized
caagtacacaaataattcta

SEQ ID NO: 17530 - DNA, 20 bp, Artificial Sequence
  chemically synthesized
aagtacacaaataattctac

SEQ ID NO: 17531 - DNA, 20 bp, Artificial Sequence
  chemically synthesized
tacacaaataattctacagg

SEQ ID NO: 17532 - DNA, 20 bp, Artificial Sequence
  chemically synthesized
ttctacaggaagtaaataaa

SEQ ID NO: 17533 - DNA, 20 bp, Artificial Sequence
  chemically synthesized
aggaagtaaataaaaagtat

SEQ ID NO: 17534 - DNA, 20 bp, Artificial Sequence
  chemically synthesized
aaaaagtattagaatttctt

SEQ ID NO: 17535 - DNA, 20 bp, Artificial Sequence
  chemically synthesized
cttaagtcaccattaaattt

SEQ ID NO: 17536 - DNA, 20 bp, Artificial Sequence
  chemically synthesized
aagtcaccattaaattttgg

SEQ ID NO: 17537 - DNA, 20 bp, Artificial Sequence
  chemically synthesized
tcaccattaaattttggtgg

SEQ ID NO: 17538 - DNA, 20 bp, Artificial Sequence
  chemically synthesized
caccattaaattttggtggt

SEQ ID NO: 17539 - DNA, 20 bp, Artificial Sequence
  chemically synthesized
tggtggtgggacaatctcat

SEQ ID NO: 17540 - DNA, 20 bp, Artificial Sequence
  chemically synthesized
ttagctccttcaaaatcatg

SEQ ID NO: 17541 - DNA, 20 bp, Artificial Sequence
  chemically synthesized
aaaatcatgtggctttgcat

SEQ ID NO: 17542 - DNA, 20 bp, Artificial Sequence
  chemically synthesized
gtcttttgaaaatgtatttt

SEQ ID NO: 17543 - DNA, 20 bp, Artificial Sequence
  chemically synthesized
tcttttgaaaatgtattttc

SEQ ID NO: 17544 - DNA, 20 bp, Artificial Sequence
  chemically synthesized
cttttgaaaatgtattttca

SEQ ID NO: 17545 - DNA, 20 bp, Artificial Sequence
  chemically synthesized
atgtattttcagggaattta

SEQ ID NO: 17546 - DNA, 20 bp, Artificial Sequence
  chemically synthesized
attttcagggaatttacaga

SEQ ID NO: 17547 - DNA, 20 bp, Artificial Sequence
  chemically synthesized
aacattgttttaatccaaac

SEQ ID NO: 17548 - DNA, 20 bp, Artificial Sequence
  chemically synthesized
aaaaattgtactgtttttcg

SEQ ID NO: 17549 - DNA, 20 bp, Artificial Sequence
  chemically synthesized
actgtttttcgaagtactta

SEQ ID NO: 17550 - DNA, 20 bp, Artificial Sequence
  chemically synthesized
ctgtttttcgaagtacttaa

SEQ ID NO: 17551 - DNA, 20 bp, Artificial Sequence
  chemically synthesized
tgtttttcgaagtacttaaa

SEQ ID NO: 17552 - DNA, 20 bp, Artificial Sequence
  chemically synthesized
tttttcgaagtacttaaagg

SEQ ID NO: 17553 - DNA, 20 bp, Artificial Sequence
  chemically synthesized
ttcgaagtacttaaagggag

SEQ ID NO: 17554 - DNA, 20 bp, Artificial Sequence
  chemically synthesized
cgaagtacttaaagggagtg

SEQ ID NO: 17555 - DNA, 20 bp, Artificial Sequence
  chemically synthesized
gaagtacttaaagggagtgg

SEQ ID NO: 17556 - DNA, 20 bp, Artificial Sequence
  chemically synthesized
aagtacttaaagggagtgga

SEQ ID NO: 17557 - DNA, 20 bp, Artificial Sequence
  chemically synthesized
agtacttaaagggagtggag

SEQ ID NO: 17558 - DNA, 20 bp, Artificial Sequence
  chemically synthesized
acttaaagggagtggagggg

SEQ ID NO: 17559 - DNA, 20 bp, Artificial Sequence
  chemically synthesized
aaagggagtggaggggtaga

SEQ ID NO: 17560 - DNA, 20 bp, Artificial Sequence
  chemically synthesized
tggaggggtagaaagcatat

SEQ ID NO: 17561 - DNA, 20 bp, Artificial Sequence
  chemically synthesized
taagtgaatccatctcactg

SEQ ID NO: 17562 - DNA, 20 bp, Artificial Sequence
  chemically synthesized
actgtggcaaactgtttttc

SEQ ID NO: 17563 - DNA, 20 bp, Artificial Sequence
  chemically synthesized
ggcaaactgtttttcaagta

SEQ ID NO: 17564 - DNA, 20 bp, Artificial Sequence
  chemically synthesized
cacatgatctgaaatttgat

SEQ ID NO: 17565 - DNA, 20 bp, Artificial Sequence
  chemically synthesized
agcaaacatatccttatgcc

SEQ ID NO: 17566 - DNA, 20 bp, Artificial Sequence
  chemically synthesized
gcaaacatatccttatgcca

SEQ ID NO: 17567 - DNA, 20 bp, Artificial Sequence
  chemically synthesized
tttttcgccattcacatacc

SEQ ID NO: 17568 - DNA, 20 bp, Artificial Sequence
  chemically synthesized
ttttcgccattcacatacca

SEQ ID NO: 17569 - DNA, 20 bp, Artificial Sequence
  chemically synthesized
cataccaaggttctgtaaat

SEQ ID NO: 17570 - DNA, 20 bp, Artificial Sequence
  chemically synthesized
ggttctgtaaatcagtaaac

SEQ ID NO: 17571 - DNA, 20 bp, Artificial Sequence
  chemically synthesized
gttctgtaaatcagtaaacc

SEQ ID NO: 17572 - DNA, 20 bp, Artificial Sequence
  chemically synthesized
ctgtaaatcagtaaaccagg

SEQ ID NO: 17573 - DNA, 20 bp, Artificial Sequence
  chemically synthesized
gtaaatcagtaaaccaggca

SEQ ID NO: 17574 - DNA, 20 bp, Artificial Sequence
  chemically synthesized
aaatcagtaaaccaggcaga

SEQ ID NO: 17575 - DNA, 20 bp, Artificial Sequence
  chemically synthesized
aggcagagagtaactattgt

SEQ ID NO: 17576 - DNA, 20 bp, Artificial Sequence
  chemically synthesized
ggcagagagtaactattgta

SEQ ID NO: 17577 - DNA, 20 bp, Artificial Sequence
  chemically synthesized
gcagagagtaactattgtaa

SEQ ID NO: 17578 - DNA, 20 bp, Artificial Sequence
  chemically synthesized
cagagagtaactattgtaag

SEQ ID NO: 17579 - DNA, 20 bp, Artificial Sequence
  chemically synthesized
agagagtaactattgtaagg

SEQ ID NO: 17580 - DNA, 20 bp, Artificial Sequence
  chemically synthesized
ggaaaccaaatcataatacc

SEQ ID NO: 17581 - DNA, 20 bp, Artificial Sequence
  chemically synthesized
aaaccaaatcataataccca

SEQ ID NO: 17582 - DNA, 20 bp, Artificial Sequence
  chemically synthesized
ccaaatcataatacccagag

SEQ ID NO: 17583 - DNA, 20 bp, Artificial Sequence
  chemically synthesized
tcataatacccagagtggcc

SEQ ID NO: 17584 - DNA, 20 bp, Artificial Sequence
  chemically synthesized
taatacccagagtggcccag

SEQ ID NO: 17585 - DNA, 20 bp, Artificial Sequence
  chemically synthesized
gcccagaagctgtctttctg

SEQ ID NO: 17586 - DNA, 20 bp, Artificial Sequence
  chemically synthesized
aacgccaccaccaccaaaaa

SEQ ID NO: 17587 - DNA, 20 bp, Artificial Sequence
  chemically synthesized
aaacaaaaaaacaaaaaaca

SEQ ID NO: 17588 - DNA, 20 bp, Artificial Sequence
  chemically synthesized
acaaaacctttttaaaaaac

SEQ ID NO: 17589 - DNA, 20 bp, Artificial Sequence
  chemically synthesized
ttttaaaaaactggaaatga

SEQ ID NO: 17590 - DNA, 20 bp, Artificial Sequence
  chemically synthesized
aaaaactggaaatgacagaa

SEQ ID NO: 17591 - DNA, 20 bp, Artificial Sequence
  chemically synthesized
aaatgacagaatagttttaa

SEQ ID NO: 17592 - DNA, 20 bp, Artificial Sequence
  chemically synthesized
aatgacagaatagttttaaa

SEQ ID NO: 17593 - DNA, 20 bp, Artificial Sequence
  chemically synthesized
aaaaaaacccaaaaaccaaa

SEQ ID NO: 17594 - DNA, 20 bp, Artificial Sequence
  chemically synthesized
tcaaaacttcaaactattaa

SEQ ID NO: 17595 - DNA, 20 bp, Artificial Sequence
  chemically synthesized
tcaaactattaatagaccac

SEQ ID NO: 17596 - DNA, 20 bp, Artificial Sequence
  chemically synthesized
actattaatagaccaccagt

SEQ ID NO: 17597 - DNA, 20 bp, Artificial Sequence
  chemically synthesized
ttaatagaccaccagtgaga

SEQ ID NO: 17598 - DNA, 20 bp, Artificial Sequence
  chemically synthesized
tgtgccttgaaatgcaaaat

SEQ ID NO: 17599 - DNA, 20 bp, Artificial Sequence
  chemically synthesized
gtgccttgaaatgcaaaatg

SEQ ID NO: 17600 - DNA, 20 bp, Artificial Sequence
  chemically synthesized
tgccttgaaatgcaaaatga

SEQ ID NO: 17601 - DNA, 20 bp, Artificial Sequence
  chemically synthesized
tgcaaaatgagggaaataat

SEQ ID NO: 17602 - DNA, 20 bp, Artificial Sequence
  chemically synthesized
aaaatgagggaaataattag

SEQ ID NO: 17603 - DNA, 20 bp, Artificial Sequence
  chemically synthesized
aatgagggaaataattagca

SEQ ID NO: 17604 - DNA, 20 bp, Artificial Sequence
  chemically synthesized
atgagggaaataattagcag

SEQ ID NO: 17605 - DNA, 20 bp, Artificial Sequence
  chemically synthesized
aacaaaattctcaaaatttg

SEQ ID NO: 17606 - DNA, 20 bp, Artificial Sequence
  chemically synthesized
tgaagaacttctgtgattac

SEQ ID NO: 17607 - DNA, 20 bp, Artificial Sequence
  chemically synthesized
gaagaacttctgtgattact

SEQ ID NO: 17608 - DNA, 20 bp, Artificial Sequence
  chemically synthesized
aagaacttctgtgattactg

SEQ ID NO: 17609 - DNA, 20 bp, Artificial Sequence
  chemically synthesized
agaacttctgtgattactgg

SEQ ID NO: 17610 - DNA, 20 bp, Artificial Sequence
  chemically synthesized
ttctgtgattactgggggta

SEQ ID NO: 17611 - DNA, 20 bp, Artificial Sequence
  chemically synthesized
attactgggggtacagtgaa

SEQ ID NO: 17612 - DNA, 20 bp, Artificial Sequence
  chemically synthesized
aatttcttcctgatcttaat

SEQ ID NO: 17613 - DNA, 20 bp, Artificial Sequence
  chemically synthesized
cttaattagattcgattgtg

SEQ ID NO: 17614 - DNA, 20 bp, Artificial Sequence
  chemically synthesized
aattagattcgattgtgcgg

SEQ ID NO: 17615 - DNA, 20 bp, Artificial Sequence
  chemically synthesized
attagattcgattgtgcggt

SEQ ID NO: 17616 - DNA, 20 bp, Artificial Sequence
  chemically synthesized
cgattgtgcggtgggtgtgt

SEQ ID NO: 17617 - DNA, 20 bp, Artificial Sequence
  chemically synthesized
tgcggtgggtgtgttggatt

SEQ ID NO: 17618 - DNA, 20 bp, Artificial Sequence
  chemically synthesized
gcggtgggtgtgttggattt

SEQ ID NO: 17619 - DNA, 20 bp, Artificial Sequence
  chemically synthesized
cggtgggtgtgttggatttg

SEQ ID NO: 17620 - DNA, 20 bp, Artificial Sequence
  chemically synthesized
ggtgggtgtgttggatttgg

SEQ ID NO: 17621 - DNA, 20 bp, Artificial Sequence
  chemically synthesized
gtgggtgtgttggatttggg

SEQ ID NO: 17622 - DNA, 20 bp, Artificial Sequence
  chemically synthesized
gggtgtgttggatttggggg

SEQ ID NO: 17623 - DNA, 20 bp, Artificial Sequence
  chemically synthesized
ggtgtgttggatttgggggg

SEQ ID NO: 17624 - DNA, 20 bp, Artificial Sequence
  chemically synthesized
gtgtgttggatttgggggga

SEQ ID NO: 17625 - DNA, 20 bp, Artificial Sequence
  chemically synthesized
tgtgttggatttggggggag

SEQ ID NO: 17626 - DNA, 20 bp, Artificial Sequence
  chemically synthesized
gttggatttggggggagggg

SEQ ID NO: 17627 - DNA, 20 bp, Artificial Sequence
  chemically synthesized
tggatttggggggaggggca

SEQ ID NO: 17628 - DNA, 20 bp, Artificial Sequence
  chemically synthesized
ggatttggggggaggggcag

SEQ ID NO: 17629 - DNA, 20 bp, Artificial Sequence
  chemically synthesized
tttggggggaggggcagagg

SEQ ID NO: 17630 - DNA, 20 bp, Artificial Sequence
  chemically synthesized
ttggggggaggggcagaggc

SEQ ID NO: 17631 - DNA, 20 bp, Artificial Sequence
  chemically synthesized
tggggggaggggcagaggca

SEQ ID NO: 17632 - DNA, 20 bp, Artificial Sequence
  chemically synthesized
gggggaggggcagaggcagg

SEQ ID NO: 17633 - DNA, 20 bp, Artificial Sequence
  chemically synthesized
ggggcagaggcagggagtgc

SEQ ID NO: 17634 - DNA, 20 bp, Artificial Sequence
  chemically synthesized
gggcagaggcagggagtgct

SEQ ID NO: 17635 - DNA, 20 bp, Artificial Sequence
  chemically synthesized
ggcagaggcagggagtgctg

SEQ ID NO: 17636 - DNA, 20 bp, Artificial Sequence
  chemically synthesized
gaggcagggagtgctggggt

SEQ ID NO: 17637 - DNA, 20 bp, Artificial Sequence
  chemically synthesized
aggcagggagtgctggggtg

SEQ ID NO: 17638 - DNA, 20 bp, Artificial Sequence
  chemically synthesized
ggagtgctggggtgaggcgt

SEQ ID NO: 17639 - DNA, 20 bp, Artificial Sequence
  chemically synthesized
gagtgctggggtgaggcgtg

SEQ ID NO: 17640 - DNA, 20 bp, Artificial Sequence
  chemically synthesized
ctggggtgaggcgtgaggct

SEQ ID NO: 17641 - DNA, 20 bp, Artificial Sequence
  chemically synthesized
aggcgtgaggctgagtgttg

SEQ ID NO: 17642 - DNA, 20 bp, Artificial Sequence
  chemically synthesized
gcgtgaggctgagtgttgtg

SEQ ID NO: 17643 - DNA, 20 bp, Artificial Sequence
  chemically synthesized
gaggctgagtgttgtggaga

SEQ ID NO: 17644 - DNA, 20 bp, Artificial Sequence
  chemically synthesized
aggctgagtgttgtggagac

SEQ ID NO: 17645 - DNA, 20 bp, Artificial Sequence
  chemically synthesized
tgagtgttgtggagacaggt

SEQ ID NO: 17646 - DNA, 20 bp, Artificial Sequence
  chemically synthesized
gtgttgtggagacaggttag

SEQ ID NO: 17647 - DNA, 20 bp, Artificial Sequence
  chemically synthesized
tgttgtggagacaggttagc

SEQ ID NO: 17648 - DNA, 20 bp, Artificial Sequence
  chemically synthesized
gttgtggagacaggttagca

SEQ ID NO: 17649 - DNA, 20 bp, Artificial Sequence
  chemically synthesized
ttgtggagacaggttagcag

SEQ ID NO: 17650 - DNA, 20 bp, Artificial Sequence
  chemically synthesized
gagacaggttagcaggggcc

SEQ ID NO: 17651 - DNA, 20 bp, Artificial Sequence
  chemically synthesized
acaggttagcaggggcccgg

SEQ ID NO: 17652 - DNA, 20 bp, Artificial Sequence
  chemically synthesized
ttagcaggggcccggcggtg

SEQ ID NO: 17653 - DNA, 20 bp, Artificial Sequence
  chemically synthesized
gcaggggcccggcggtgtgg

SEQ ID NO: 17654 - DNA, 20 bp, Artificial Sequence
  chemically synthesized
caggggcccggcggtgtggc

SEQ ID NO: 17655 - DNA, 20 bp, Artificial Sequence
  chemically synthesized
ccggcggtgtggcaggaaca

SEQ ID NO: 17656 - DNA, 20 bp, Artificial Sequence
  chemically synthesized
cggcggtgtggcaggaacaa

SEQ ID NO: 17657 - DNA, 20 bp, Artificial Sequence
  chemically synthesized
cggtgtggcaggaacaaagg

SEQ ID NO: 17658 - DNA, 20 bp, Artificial Sequence
  chemically synthesized
acaaaggcagcttccaacgc

SEQ ID NO: 17659 - DNA, 20 bp, Artificial Sequence
  chemically synthesized
ggcagcttccaacgctggtg

SEQ ID NO: 17660 - DNA, 20 bp, Artificial Sequence
  chemically synthesized
gcagcttccaacgctggtgc

SEQ ID NO: 17661 - DNA, 20 bp, Artificial Sequence
  chemically synthesized
caacgctggtgcaggattcc

SEQ ID NO: 17662 - DNA, 20 bp, Artificial Sequence
  chemically synthesized
caggattccgagccttaacc

SEQ ID NO: 17663 - DNA, 20 bp, Artificial Sequence
  chemically synthesized
agccttaacccagatgctca

SEQ ID NO: 17664 - DNA, 20 bp, Artificial Sequence
  chemically synthesized
cccagatgctcatggtgccc

SEQ ID NO: 17665 - DNA, 20 bp, Artificial Sequence
  chemically synthesized
gctcatggtgccctagtctt

SEQ ID NO: 17666 - DNA, 20 bp, Artificial Sequence
  chemically synthesized
ctagtcttgagttcttcatt

SEQ ID NO: 17667 - DNA, 20 bp, Artificial Sequence
  chemically synthesized
tagtcttgagttcttcattt

SEQ ID NO: 17668 - DNA, 20 bp, Artificial Sequence
  chemically synthesized
tcttgagttcttcatttagg

SEQ ID NO: 17669 - DNA, 20 bp, Artificial Sequence
  chemically synthesized
cttgagttcttcatttaggt

SEQ ID NO: 17670 - DNA, 20 bp, Artificial Sequence
  chemically synthesized
taggtgggcttatttcccac

SEQ ID NO: 17671 - DNA, 20 bp, Artificial Sequence
  chemically synthesized
aggtgggcttatttcccact

SEQ ID NO: 17672 - DNA, 20 bp, Artificial Sequence
  chemically synthesized
ggcttatttcccactgggtc

SEQ ID NO: 17673 - DNA, 20 bp, Artificial Sequence
  chemically synthesized
gcttatttcccactgggtct

SEQ ID NO: 17674 - DNA, 20 bp, Artificial Sequence
  chemically synthesized
cttatttcccactgggtctg

SEQ ID NO: 17675 - DNA, 20 bp, Artificial Sequence
  chemically synthesized
ttatttcccactgggtctgg

SEQ ID NO: 17676 - DNA, 20 bp, Artificial Sequence
  chemically synthesized
ggggatttcatttgtccttt

SEQ ID NO: 17677 - DNA, 20 bp, Artificial Sequence
  chemically synthesized
gggatttcatttgtcctttg

SEQ ID NO: 17678 - DNA, 20 bp, Artificial Sequence
  chemically synthesized
ggatttcatttgtcctttga

SEQ ID NO: 17679 - DNA, 20 bp, Artificial Sequence
  chemically synthesized
gatttcatttgtcctttgag

SEQ ID NO: 17680 - DNA, 20 bp, Artificial Sequence
  chemically synthesized
ttcatttgtcctttgagggg

SEQ ID NO: 17681 - DNA, 20 bp, Artificial Sequence
  chemically synthesized
tcatttgtcctttgaggggc

SEQ ID NO: 17682 - DNA, 20 bp, Artificial Sequence
  chemically synthesized
catttgtcctttgaggggca

SEQ ID NO: 17683 - DNA, 20 bp, Artificial Sequence
  chemically synthesized
ttgtcctttgaggggcaggg

SEQ ID NO: 17684 - DNA, 20 bp, Artificial Sequence
  chemically synthesized
aggggcagggtggacactga

SEQ ID NO: 17685 - DNA, 20 bp, Artificial Sequence
  chemically synthesized
cagggtggacactgacagaa

SEQ ID NO: 17686 - DNA, 20 bp, Artificial Sequence
  chemically synthesized
ggacactgacagaacagctg

SEQ ID NO: 17687 - DNA, 20 bp, Artificial Sequence
  chemically synthesized
actgacagaacagctgcggc

SEQ ID NO: 17688 - DNA, 20 bp, Artificial Sequence
  chemically synthesized
gacagaacagctgcggccgg

SEQ ID NO: 17689 - DNA, 20 bp, Artificial Sequence
  chemically synthesized
cagaacagctgcggccggca

SEQ ID NO: 17690 - DNA, 20 bp, Artificial Sequence
  chemically synthesized
gaacagctgcggccggcaga

SEQ ID NO: 17691 - DNA, 20 bp, Artificial Sequence
  chemically synthesized
aacagctgcggccggcagag

SEQ ID NO: 17692 - DNA, 20 bp, Artificial Sequence
  chemically synthesized
acagctgcggccggcagaga

SEQ ID NO: 17693 - DNA, 20 bp, Artificial Sequence
  chemically synthesized
gctgcggccggcagagaggg

SEQ ID NO: 17694 - DNA, 20 bp, Artificial Sequence
  chemically synthesized
cggccggcagagagggtggt

SEQ ID NO: 17695 - DNA, 20 bp, Artificial Sequence
  chemically synthesized
ggccggcagagagggtggtt

SEQ ID NO: 17696 - DNA, 20 bp, Artificial Sequence
  chemically synthesized
cggcagagagggtggttagg

SEQ ID NO: 17697 - DNA, 20 bp, Artificial Sequence
  chemically synthesized
gcagagagggtggttaggaa

SEQ ID NO: 17698 - DNA, 20 bp, Artificial Sequence
  chemically synthesized
cagagagggtggttaggaag

SEQ ID NO: 17699 - DNA, 20 bp, Artificial Sequence
  chemically synthesized
agagagggtggttaggaaga

SEQ ID NO: 17700 - DNA, 20 bp, Artificial Sequence
  chemically synthesized
gagggtggttaggaagaggg

SEQ ID NO: 17701 - DNA, 20 bp, Artificial Sequence
  chemically synthesized
ggtggttaggaagagggaag

SEQ ID NO: 17702 - DNA, 20 bp, Artificial Sequence
  chemically synthesized
aggaagagggaagcagcctg

SEQ ID NO: 17703 - DNA, 20 bp, Artificial Sequence
  chemically synthesized
ggaagagggaagcagcctgt

SEQ ID NO: 17704 - DNA, 20 bp, Artificial Sequence
  chemically synthesized
tgggtaacttcccgaccaca

SEQ ID NO: 17705 - DNA, 20 bp, Artificial Sequence
  chemically synthesized
taacttcccgaccacatgga

SEQ ID NO: 17706 - DNA, 20 bp, Artificial Sequence
  chemically synthesized
aacttcccgaccacatggaa

SEQ ID NO: 17707 - DNA, 20 bp, Artificial Sequence
  chemically synthesized
accacatggaaaggctgaat

SEQ ID NO: 17708 - DNA, 20 bp, Artificial Sequence
  chemically synthesized
aaaggctgaataagacgtta

SEQ ID NO: 17709 - DNA, 20 bp, Artificial Sequence
  chemically synthesized
agacgttatggaccctgcct

SEQ ID NO: 17710 - DNA, 20 bp, Artificial Sequence
  chemically synthesized
gacgttatggaccctgcctt

SEQ ID NO: 17711 - DNA, 20 bp, Artificial Sequence
  chemically synthesized
atggaccctgccttgggtac

SEQ ID NO: 17712 - DNA, 20 bp, Artificial Sequence
  chemically synthesized
tggaccctgccttgggtact

SEQ ID NO: 17713 - DNA, 20 bp, Artificial Sequence
  chemically synthesized
ggaccctgccttgggtactg

SEQ ID NO: 17714 - DNA, 20 bp, Artificial Sequence
  chemically synthesized
cctgccttgggtactggggt

SEQ ID NO: 17715 - DNA, 20 bp, Artificial Sequence
  chemically synthesized
gtactggggtcagcgtctcc

SEQ ID NO: 17716 - DNA, 20 bp, Artificial Sequence
  chemically synthesized
ctggggtcagcgtctcctgg

SEQ ID NO: 17717 - DNA, 20 bp, Artificial Sequence
  chemically synthesized
gtctcctggtggtgtctgca

SEQ ID NO: 17718 - DNA, 20 bp, Artificial Sequence
  chemically synthesized
tctcctggtggtgtctgcac

SEQ ID NO: 17719 - DNA, 20 bp, Artificial Sequence
  chemically synthesized
ctcctggtggtgtctgcaca

SEQ ID NO: 17720 - DNA, 20 bp, Artificial Sequence
  chemically synthesized
tgcacagggccccccaatgc

SEQ ID NO: 17721 - DNA, 20 bp, Artificial Sequence
  chemically synthesized
gcacagggccccccaatgcc

SEQ ID NO: 17722 - DNA, 20 bp, Artificial Sequence
  chemically synthesized
cacagggccccccaatgcca

SEQ ID NO: 17723 - DNA, 20 bp, Artificial Sequence
  chemically synthesized
cactgccaaaacacgctctt

SEQ ID NO: 17724 - DNA, 20 bp, Artificial Sequence
  chemically synthesized
aaacacgctcttgagtttaa

SEQ ID NO: 17725 - DNA, 20 bp, Artificial Sequence
  chemically synthesized
cacgctcttgagtttaatgg

SEQ ID NO: 17726 - DNA, 20 bp, Artificial Sequence
  chemically synthesized
gctcttgagtttaatggtag

SEQ ID NO: 17727 - DNA, 20 bp, Artificial Sequence
  chemically synthesized
ttgagtttaatggtagtggt

SEQ ID NO: 17728 - DNA, 20 bp, Artificial Sequence
  chemically synthesized
ttaatggtagtggttggtct

SEQ ID NO: 17729 - DNA, 20 bp, Artificial Sequence
  chemically synthesized
ggttggtctgagtcctgcca

SEQ ID NO: 17730 - DNA, 20 bp, Artificial Sequence
  chemically synthesized
ctgagtcctgccaaagtgta

SEQ ID NO: 17731 - DNA, 20 bp, Artificial Sequence
  chemically synthesized
gagtcctgccaaagtgtatg

SEQ ID NO: 17732 - DNA, 20 bp, Artificial Sequence
  chemically synthesized
cctgccaaagtgtatggagc

SEQ ID NO: 17733 - DNA, 20 bp, Artificial Sequence
  chemically synthesized
gtgtatggagcaagtttcat

SEQ ID NO: 17734 - DNA, 20 bp, Artificial Sequence
  chemically synthesized
atggagcaagtttcattggc

SEQ ID NO: 17735 - DNA, 20 bp, Artificial Sequence
  chemically synthesized
ccccttgcatgaaataataa

SEQ ID NO: 17736 - DNA, 20 bp, Artificial Sequence
  chemically synthesized
gcatgaaataataaaagccc

SEQ ID NO: 17737 - DNA, 20 bp, Artificial Sequence
  chemically synthesized
aaataataaaagccctggcc

SEQ ID NO: 17738 - DNA, 20 bp, Artificial Sequence
  chemically synthesized
aataataaaagccctggcca

SEQ ID NO: 17739 - DNA, 20 bp, Artificial Sequence
  chemically synthesized
tgtattttattaatattttt

SEQ ID NO: 17740 - DNA, 20 bp, Artificial Sequence
  chemically synthesized
tattttattaatattttttg

SEQ ID NO: 17741 - DNA, 20 bp, Artificial Sequence
  chemically synthesized
attttattaatattttttgg

SEQ ID NO: 17742 - DNA, 20 bp, Artificial Sequence
  chemically synthesized
ttttattaatattttttgga

SEQ ID NO: 17743 - DNA, 20 bp, Artificial Sequence
  chemically synthesized
tgctctcatttgaccatttg

SEQ ID NO: 17744 - DNA, 20 bp, Artificial Sequence
  chemically synthesized
ataattaatgcattccgtac

SEQ ID NO: 17745 - DNA, 20 bp, Artificial Sequence
  chemically synthesized
cattccgtactggttgtaaa

SEQ ID NO: 17746 - DNA, 20 bp, Artificial Sequence
  chemically synthesized
gtgtgcttgcatttaattgc

SEQ ID NO: 17747 - DNA, 20 bp, Artificial Sequence
  chemically synthesized
gcttgcatttaattgcaagt

SEQ ID NO: 17748 - DNA, 20 bp, Artificial Sequence
  chemically synthesized
cttgcatttaattgcaagtc

SEQ ID NO: 17749 - DNA, 20 bp, Artificial Sequence
  chemically synthesized
ttgcatttaattgcaagtca

SEQ ID NO: 17750 - DNA, 20 bp, Artificial Sequence
  chemically synthesized
tgcaagtcagggtaaattaa

SEQ ID NO: 17751 - DNA, 20 bp, Artificial Sequence
  chemically synthesized
actcacttaaaatattcttg

SEQ ID NO: 17752 - DNA, 20 bp, Artificial Sequence
  chemically synthesized
aaatattcttgcagaacgca

SEQ ID NO: 17753 - DNA, 20 bp, Artificial Sequence
  chemically synthesized
aatattcttgcagaacgcaa

SEQ ID NO: 17754 - DNA, 20 bp, Artificial Sequence
  chemically synthesized
tattcttgcagaacgcaaag

SEQ ID NO: 17755 - DNA, 20 bp, Artificial Sequence
  chemically synthesized
attcttgcagaacgcaaagg

SEQ ID NO: 17756 - DNA, 20 bp, Artificial Sequence
  chemically synthesized
ttcttgcagaacgcaaagga

SEQ ID NO: 17757 - DNA, 20 bp, Artificial Sequence
  chemically synthesized
tcttgcagaacgcaaaggag

SEQ ID NO: 17758 - DNA, 20 bp, Artificial Sequence
  chemically synthesized
cttgcagaacgcaaaggagg

SEQ ID NO: 17759 - DNA, 20 bp, Artificial Sequence
  chemically synthesized
gcagaacgcaaaggaggggg

SEQ ID NO: 17760 - DNA, 20 bp, Artificial Sequence
  chemically synthesized
cgcaaaggagggggcagtcc

SEQ ID NO: 17761 - DNA, 20 bp, Artificial Sequence
  chemically synthesized
ccagtatttaatttattttc

SEQ ID NO: 17762 - DNA, 20 bp, Artificial Sequence
  chemically synthesized
atttaatttattttctggtt

SEQ ID NO: 17763 - DNA, 20 bp, Artificial Sequence
  chemically synthesized
tttattttctggtttagtgt

SEQ ID NO: 17764 - DNA, 20 bp, Artificial Sequence
  chemically synthesized
ttctggtttagtgttagtgt

SEQ ID NO: 17765 - DNA, 20 bp, Artificial Sequence
  chemically synthesized
ctggtttagtgttagtgtga

SEQ ID NO: 17766 - DNA, 20 bp, Artificial Sequence
  chemically synthesized
tggtttagtgttagtgtgag

SEQ ID NO: 17767 - DNA, 20 bp, Artificial Sequence
  chemically synthesized
ggtttagtgttagtgtgaga

SEQ ID NO: 17768 - DNA, 20 bp, Artificial Sequence
  chemically synthesized
gttagtgtgagagggtcgaa

SEQ ID NO: 17769 - DNA, 20 bp, Artificial Sequence
  chemically synthesized
agagggtcgaaaagattctg

SEQ ID NO: 17770 - DNA, 20 bp, Artificial Sequence
  chemically synthesized
gagggtcgaaaagattctgt

SEQ ID NO: 17771 - DNA, 20 bp, Artificial Sequence
  chemically synthesized
aaaagattctgtgggtccaa

SEQ ID NO: 17772 - DNA, 20 bp, Artificial Sequence
  chemically synthesized
aaagattctgtgggtccaac

SEQ ID NO: 17773 - DNA, 20 bp, Artificial Sequence
  chemically synthesized
gggatttgtgtctgtgtgtg

SEQ ID NO: 17774 - DNA, 20 bp, Artificial Sequence
  chemically synthesized
ggatttgtgtctgtgtgtgc

SEQ ID NO: 17775 - DNA, 20 bp, Artificial Sequence
  chemically synthesized
gtctgtgtgtgcaggaccgt

SEQ ID NO: 17776 - DNA, 20 bp, Artificial Sequence
  chemically synthesized
tctgtgtgtgcaggaccgtc

SEQ ID NO: 17777 - DNA, 20 bp, Artificial Sequence
  chemically synthesized
tgcaggaccgtcgggcaaca

SEQ ID NO: 17778 - DNA, 20 bp, Artificial Sequence
  chemically synthesized
caggaccgtcgggcaacaca

SEQ ID NO: 17779 - DNA, 20 bp, Artificial Sequence
  chemically synthesized
aggaccgtcgggcaacacag

SEQ ID NO: 17780 - DNA, 20 bp, Artificial Sequence
  chemically synthesized
ggaccgtcgggcaacacaga

SEQ ID NO: 17781 - DNA, 20 bp, Artificial Sequence
  chemically synthesized
accgtcgggcaacacagagg

SEQ ID NO: 17782 - DNA, 20 bp, Artificial Sequence
  chemically synthesized
ccgtcgggcaacacagaggg

SEQ ID NO: 17783 - DNA, 20 bp, Artificial Sequence
  chemically synthesized
gtcgggcaacacagagggag

SEQ ID NO: 17784 - DNA, 20 bp, Artificial Sequence
  chemically synthesized
acagagggaggagaaaaacc

SEQ ID NO: 17785 - DNA, 20 bp, Artificial Sequence
  chemically synthesized
gggaggagaaaaacctggac

SEQ ID NO: 17786 - DNA, 20 bp, Artificial Sequence
  chemically synthesized
gaggagaaaaacctggaccg

SEQ ID NO: 17787 - DNA, 20 bp, Artificial Sequence
  chemically synthesized
gagaaaaacctggaccggag

SEQ ID NO: 17788 - DNA, 20 bp, Artificial Sequence
  chemically synthesized
agaaaaacctggaccggagt

SEQ ID NO: 17789 - DNA, 20 bp, Artificial Sequence
  chemically synthesized
gaaaaacctggaccggagta

SEQ ID NO: 17790 - DNA, 20 bp, Artificial Sequence
  chemically synthesized
aaacctggaccggagtaggg

SEQ ID NO: 17791 - DNA, 20 bp, Artificial Sequence
  chemically synthesized
ctggaccggagtagggtagc

SEQ ID NO: 17792 - DNA, 20 bp, Artificial Sequence
  chemically synthesized
tggaccggagtagggtagcc

SEQ ID NO: 17793 - DNA, 20 bp, Artificial Sequence
  chemically synthesized
gaccggagtagggtagccag

SEQ ID NO: 17794 - DNA, 20 bp, Artificial Sequence
  chemically synthesized
tttttttttctctaatttct

SEQ ID NO: 17795 - DNA, 20 bp, Artificial Sequence
  chemically synthesized
ttttttttctctaatttctg

SEQ ID NO: 17796 - DNA, 20 bp, Artificial Sequence
  chemically synthesized
tctctaatttctgaggttgc

SEQ ID NO: 17797 - DNA, 20 bp, Artificial Sequence
  chemically synthesized
ctctaatttctgaggttgcc

SEQ ID NO: 17798 - DNA, 20 bp, Artificial Sequence
  chemically synthesized
ctaatttctgaggttgccag

SEQ ID NO: 17799 - DNA, 20 bp, Artificial Sequence
  chemically synthesized
taatttctgaggttgccagg

SEQ ID NO: 17800 - DNA, 20 bp, Artificial Sequence
  chemically synthesized
aatttctgaggttgccagga

SEQ ID NO: 17801 - DNA, 20 bp, Artificial Sequence
  chemically synthesized
atttctgaggttgccaggag

SEQ ID NO: 17802 - DNA, 20 bp, Artificial Sequence
  chemically synthesized
gaggttgccaggaggggctt

SEQ ID NO: 17803 - DNA, 20 bp, Artificial Sequence
  chemically synthesized
tgccaggaggggcttaagca

SEQ ID NO: 17804 - DNA, 20 bp, Artificial Sequence
  chemically synthesized
caggaggggcttaagcaaag

SEQ ID NO: 17805 - DNA, 20 bp, Artificial Sequence
  chemically synthesized
ggggcttaagcaaagtggtc

SEQ ID NO: 17806 - DNA, 20 bp, Artificial Sequence
  chemically synthesized
gtggtcaagtccatctgctc

SEQ ID NO: 17807 - DNA, 20 bp, Artificial Sequence
  chemically synthesized
ggtcaagtccatctgctccg

SEQ ID NO: 17808 - DNA, 20 bp, Artificial Sequence
  chemically synthesized
caagtccatctgctccggag

SEQ ID NO: 17809 - DNA, 20 bp, Artificial Sequence
  chemically synthesized
aagtccatctgctccggaga

SEQ ID NO: 17810 - DNA, 20 bp, Artificial Sequence
  chemically synthesized
tccatctgctccggagaagg

SEQ ID NO: 17811 - DNA, 20 bp, Artificial Sequence
  chemically synthesized
ctgctccggagaaggtggta

SEQ ID NO: 17812 - DNA, 20 bp, Artificial Sequence
  chemically synthesized
ccggagaaggtggtaaagaa

SEQ ID NO: 17813 - DNA, 20 bp, Artificial Sequence
  chemically synthesized
ggagaaggtggtaaagaaaa

SEQ ID NO: 17814 - DNA, 20 bp, Artificial Sequence
  chemically synthesized
gagaaggtggtaaagaaaag

SEQ ID NO: 17815 - DNA, 20 bp, Artificial Sequence
  chemically synthesized
aggtggtaaagaaaagaggt

SEQ ID NO: 17816 - DNA, 20 bp, Artificial Sequence
  chemically synthesized
tggtaaagaaaagaggttag

SEQ ID NO: 17817 - DNA, 20 bp, Artificial Sequence
  chemically synthesized
aaagaaaagaggttagtggc

SEQ ID NO: 17818 - DNA, 20 bp, Artificial Sequence
  chemically synthesized
agaaaagaggttagtggcaa

SEQ ID NO: 17819 - DNA, 20 bp, Artificial Sequence
  chemically synthesized
gaaaagaggttagtggcaag

SEQ ID NO: 17820 - DNA, 20 bp, Artificial Sequence
  chemically synthesized
aaaagaggttagtggcaaga

SEQ ID NO: 17821 - DNA, 20 bp, Artificial Sequence
  chemically synthesized
agaggttagtggcaagaggg

SEQ ID NO: 17822 - DNA, 20 bp, Artificial Sequence
  chemically synthesized
gaggttagtggcaagaggga

SEQ ID NO: 17823 - DNA, 20 bp, Artificial Sequence
  chemically synthesized
ggttagtggcaagagggaag

SEQ ID NO: 17824 - DNA, 20 bp, Artificial Sequence
  chemically synthesized
ggcaagagggaaggagcaca

SEQ ID NO: 17825 - DNA, 20 bp, Artificial Sequence
  chemically synthesized
gcaagagggaaggagcacaa

SEQ ID NO: 17826 - DNA, 20 bp, Artificial Sequence
  chemically synthesized
caagagggaaggagcacaaa

SEQ ID NO: 17827 - DNA, 20 bp, Artificial Sequence
  chemically synthesized
acaaagggaaaattgtacat

SEQ ID NO: 17828 - DNA, 20 bp, Artificial Sequence
  chemically synthesized
caaagggaaaattgtacatt

SEQ ID NO: 17829 - DNA, 20 bp, Artificial Sequence
  chemically synthesized
aagggaaaattgtacattgg

SEQ ID NO: 17830 - DNA, 20 bp, Artificial Sequence
  chemically synthesized
attgggagcgttactctccc

SEQ ID NO: 17831 - DNA, 20 bp, Artificial Sequence
  chemically synthesized
agcgttactctccctggcca

SEQ ID NO: 17832 - DNA, 20 bp, Artificial Sequence
  chemically synthesized
tactctccctggccatggtg

SEQ ID NO: 17833 - DNA, 20 bp, Artificial Sequence
  chemically synthesized
ctccctggccatggtgtagc

SEQ ID NO: 17834 - DNA, 20 bp, Artificial Sequence
  chemically synthesized
tggccatggtgtagccagac

SEQ ID NO: 17835 - DNA, 20 bp, Artificial Sequence
  chemically synthesized
atggtgtagccagactggtt

SEQ ID NO: 17836 - DNA, 20 bp, Artificial Sequence
  chemically synthesized
gtgtagccagactggtttag

SEQ ID NO: 17837 - DNA, 20 bp, Artificial Sequence
  chemically synthesized
agccagactggtttagcaga

SEQ ID NO: 17838 - DNA, 20 bp, Artificial Sequence
  chemically synthesized
tggtttagcagacagaatga

SEQ ID NO: 17839 - DNA, 20 bp, Artificial Sequence
  chemically synthesized
agaatgatagattgttttgt

SEQ ID NO: 17840 - DNA, 20 bp, Artificial Sequence
  chemically synthesized
gaatgatagattgttttgtc

SEQ ID NO: 17841 - DNA, 20 bp, Artificial Sequence
  chemically synthesized
aatgatagattgttttgtca

SEQ ID NO: 17842 - DNA, 20 bp, Artificial Sequence
  chemically synthesized
atgatagattgttttgtcag

SEQ ID NO: 17843 - DNA, 20 bp, Artificial Sequence
  chemically synthesized
gattgttttgtcaggggtcc

SEQ ID NO: 17844 - DNA, 20 bp, Artificial Sequence
  chemically synthesized
attgttttgtcaggggtccc

SEQ ID NO: 17845 - DNA, 20 bp, Artificial Sequence
  chemically synthesized
ttgttttgtcaggggtccca

SEQ ID NO: 17846 - DNA, 20 bp, Artificial Sequence
  chemically synthesized
cagggtgcgccctgaacttg

SEQ ID NO: 17847 - DNA, 20 bp, Artificial Sequence
  chemically synthesized
agcactttgtttatcttgaa

SEQ ID NO: 17848 - DNA, 20 bp, Artificial Sequence
  chemically synthesized
ctttgtttatcttgaataga

SEQ ID NO: 17849 - DNA, 20 bp, Artificial Sequence
  chemically synthesized
tttgtttatcttgaatagaa

SEQ ID NO: 17850 - DNA, 20 bp, Artificial Sequence
  chemically synthesized
ttgtttatcttgaatagaaa

SEQ ID NO: 17851 - DNA, 20 bp, Artificial Sequence
  chemically synthesized
tatcttgaatagaaagggaa

SEQ ID NO: 17852 - DNA, 20 bp, Artificial Sequence
  chemically synthesized
tgaatagaaagggaaaagcg

SEQ ID NO: 17853 - DNA, 20 bp, Artificial Sequence
  chemically synthesized
gcgcagacataatcgatgtc

SEQ ID NO: 17854 - DNA, 20 bp, Artificial Sequence
  chemically synthesized
cataatcgatgtctagtttt

SEQ ID NO: 17855 - DNA, 20 bp, Artificial Sequence
  chemically synthesized
ataatcgatgtctagttttt

SEQ ID NO: 17856 - DNA, 20 bp, Artificial Sequence
  chemically synthesized
aatcgatgtctagtttttag

SEQ ID NO: 17857 - DNA, 20 bp, Artificial Sequence
  chemically synthesized
tctagtttttaggagctcga

SEQ ID NO: 17858 - DNA, 20 bp, Artificial Sequence
  chemically synthesized
tagtttttaggagctcgaaa

SEQ ID NO: 17859 - DNA, 20 bp, Artificial Sequence
  chemically synthesized
agtttttaggagctcgaaag

SEQ ID NO: 17860 - DNA, 20 bp, Artificial Sequence
  chemically synthesized
ttttaggagctcgaaagagg

SEQ ID NO: 17861 - DNA, 20 bp, Artificial Sequence
  chemically synthesized
tttaggagctcgaaagaggt

SEQ ID NO: 17862 - DNA, 20 bp, Artificial Sequence
  chemically synthesized
taggagctcgaaagaggtag

SEQ ID NO: 17863 - DNA, 20 bp, Artificial Sequence
  chemically synthesized
gctcgaaagaggtaggagaa

SEQ ID NO: 17864 - DNA, 20 bp, Artificial Sequence
  chemically synthesized
tcgaaagaggtaggagaaca

SEQ ID NO: 17865 - DNA, 20 bp, Artificial Sequence
  chemically synthesized
aaagaggtaggagaacagag

SEQ ID NO: 17866 - DNA, 20 bp, Artificial Sequence
  chemically synthesized
gtaggagaacagagaagact

SEQ ID NO: 17867 - DNA, 20 bp, Artificial Sequence
  chemically synthesized
taggagaacagagaagactc

SEQ ID NO: 17868 - DNA, 20 bp, Artificial Sequence
  chemically synthesized
ggagaacagagaagactcag

SEQ ID NO: 17869 - DNA, 20 bp, Artificial Sequence
  chemically synthesized
gagaacagagaagactcagg

SEQ ID NO: 17870 - DNA, 20 bp, Artificial Sequence
  chemically synthesized
agaacagagaagactcagga

SEQ ID NO: 17871 - DNA, 20 bp, Artificial Sequence
  chemically synthesized
gaacagagaagactcaggag

SEQ ID NO: 17872 - DNA, 20 bp, Artificial Sequence
  chemically synthesized
cagagaagactcaggagggg

SEQ ID NO: 17873 - DNA, 20 bp, Artificial Sequence
  chemically synthesized
agaagactcaggaggggtag

SEQ ID NO: 17874 - DNA, 20 bp, Artificial Sequence
  chemically synthesized
gaagactcaggaggggtagt

SEQ ID NO: 17875 - DNA, 20 bp, Artificial Sequence
  chemically synthesized
agactcaggaggggtagtgg

SEQ ID NO: 17876 - DNA, 20 bp, Artificial Sequence
  chemically synthesized
gactcaggaggggtagtggg

SEQ ID NO: 17877 - DNA, 20 bp, Artificial Sequence
  chemically synthesized
tcaggaggggtagtgggagg

SEQ ID NO: 17878 - DNA, 20 bp, Artificial Sequence
  chemically synthesized
caggaggggtagtgggaggt

SEQ ID NO: 17879 - DNA, 20 bp, Artificial Sequence
  chemically synthesized
aggaggggtagtgggaggtg

SEQ ID NO: 17880 - DNA, 20 bp, Artificial Sequence
  chemically synthesized
ggaggggtagtgggaggtgg

SEQ ID NO: 17881 - DNA, 20 bp, Artificial Sequence
  chemically synthesized
aggggtagtgggaggtgggg

SEQ ID NO: 17882 - DNA, 20 bp, Artificial Sequence
  chemically synthesized
ggggtagtgggaggtggggg

SEQ ID NO: 17883 - DNA, 20 bp, Artificial Sequence
  chemically synthesized
agtgggaggtgggggaggtg

SEQ ID NO: 17884 - DNA, 20 bp, Artificial Sequence
  chemically synthesized
gtgggaggtgggggaggtgc

SEQ ID NO: 17885 - DNA, 20 bp, Artificial Sequence
  chemically synthesized
ggtgggggaggtgcaggccc

SEQ ID NO: 17886 - DNA, 20 bp, Artificial Sequence
  chemically synthesized
ggaggtgcaggccctggttg

SEQ ID NO: 17887 - DNA, 20 bp, Artificial Sequence
  chemically synthesized
tggttgtggttgtccattaa

SEQ ID NO: 17888 - DNA, 20 bp, Artificial Sequence
  chemically synthesized
tgtccattaacagatgaact

SEQ ID NO: 17889 - DNA, 20 bp, Artificial Sequence
  chemically synthesized
attaacagatgaacttggcc

SEQ ID NO: 17890 - DNA, 20 bp, Artificial Sequence
  chemically synthesized
ttaacagatgaacttggccg

SEQ ID NO: 17891 - DNA, 20 bp, Artificial Sequence
  chemically synthesized
taacagatgaacttggccga

SEQ ID NO: 17892 - DNA, 20 bp, Artificial Sequence
  chemically synthesized
agatgaacttggccgagggc

SEQ ID NO: 17893 - DNA, 20 bp, Artificial Sequence
  chemically synthesized
gatgaacttggccgagggcc

SEQ ID NO: 17894 - DNA, 20 bp, Artificial Sequence
  chemically synthesized
cttggccgagggccaggctt

SEQ ID NO: 17895 - DNA, 20 bp, Artificial Sequence
  chemically synthesized
ccgagggccaggctttagat

SEQ ID NO: 17896 - DNA, 20 bp, Artificial Sequence
  chemically synthesized
gagggccaggctttagatga

SEQ ID NO: 17897 - DNA, 20 bp, Artificial Sequence
  chemically synthesized
ggctttagatgagagcgtgt

SEQ ID NO: 17898 - DNA, 20 bp, Artificial Sequence
  chemically synthesized
gctttagatgagagcgtgtc

SEQ ID NO: 17899 - DNA, 20 bp, Artificial Sequence
  chemically synthesized
ctttagatgagagcgtgtca

SEQ ID NO: 17900 - DNA, 20 bp, Artificial Sequence
  chemically synthesized
atgagagcgtgtcagggccc

SEQ ID NO: 17901 - DNA, 20 bp, Artificial Sequence
  chemically synthesized
agcgtgtcagggccccagtg

SEQ ID NO: 17902 - DNA, 20 bp, Artificial Sequence
  chemically synthesized
gtcagggccccagtgcagcc

SEQ ID NO: 17903 - DNA, 20 bp, Artificial Sequence
  chemically synthesized
ccagtgcagccaagcctttt

SEQ ID NO: 17904 - DNA, 20 bp, Artificial Sequence
  chemically synthesized
actgtacatcaaatgctccc

SEQ ID NO: 17905 - DNA, 20 bp, Artificial Sequence
  chemically synthesized
tcaaatgctccctggtcttt

SEQ ID NO: 17906 - DNA, 20 bp, Artificial Sequence
  chemically synthesized
gctccctggtcttttggcta

SEQ ID NO: 17907 - DNA, 20 bp, Artificial Sequence
  chemically synthesized
ctccctggtcttttggctaa

SEQ ID NO: 17908 - DNA, 20 bp, Artificial Sequence
  chemically synthesized
aaataaaaaataaaaaaaaa

SEQ ID NO: 17909 - DNA, 20 bp, Artificial Sequence
  chemically synthesized
ataaaaaataaaaaaaaaaa

SEQ ID NO: 17910 - DNA, 20 bp, Artificial Sequence
  chemically synthesized
taaaaaaaaaaagagacgca

SEQ ID NO: 17911 - DNA, 20 bp, Artificial Sequence
  chemically synthesized
attttttccctcctctgaac

SEQ ID NO: 17912 - DNA, 20 bp, Artificial Sequence
  chemically synthesized
ttccctcctctgaaccagtt

SEQ ID NO: 17913 - DNA, 20 bp, Artificial Sequence
  chemically synthesized
tccctcctctgaaccagttg

SEQ ID NO: 17914 - DNA, 20 bp, Artificial Sequence
  chemically synthesized
tcctctgaaccagttgaggc

SEQ ID NO: 17915 - DNA, 20 bp, Artificial Sequence
  chemically synthesized
accagttgaggccagtcttt

SEQ ID NO: 17916 - DNA, 20 bp, Artificial Sequence
  chemically synthesized
cagtcttttggctacatatg

SEQ ID NO: 17917 - DNA, 20 bp, Artificial Sequence
  chemically synthesized
agtcttttggctacatatgc

SEQ ID NO: 17918 - DNA, 20 bp, Artificial Sequence
  chemically synthesized
gcgggttctatcatctttcc

SEQ ID NO: 17919 - DNA, 20 bp, Artificial Sequence
  chemically synthesized
catctttcctggcttgccgt

SEQ ID NO: 17920 - DNA, 20 bp, Artificial Sequence
  chemically synthesized
atctttcctggcttgccgtt

SEQ ID NO: 17921 - DNA, 20 bp, Artificial Sequence
  chemically synthesized
tggcttgccgttgggaaaaa

SEQ ID NO: 17922 - DNA, 20 bp, Artificial Sequence
  chemically synthesized
aaaaaaagttgtgataacgc

SEQ ID NO: 17923 - DNA, 20 bp, Artificial Sequence
  chemically synthesized
tgtgataacgccagtaaccc

SEQ ID NO: 17924 - DNA, 20 bp, Artificial Sequence
  chemically synthesized
gtgataacgccagtaacccg

SEQ ID NO: 17925 - DNA, 20 bp, Artificial Sequence
  chemically synthesized
tgataacgccagtaacccga

SEQ ID NO: 17926 - DNA, 20 bp, Artificial Sequence
  chemically synthesized
aacgccagtaacccgagggc

SEQ ID NO: 17927 - DNA, 20 bp, Artificial Sequence
  chemically synthesized
ccagtaacccgagggccaga

SEQ ID NO: 17928 - DNA, 20 bp, Artificial Sequence
  chemically synthesized
cagtaacccgagggccagat

SEQ ID NO: 17929 - DNA, 20 bp, Artificial Sequence
  chemically synthesized
taacccgagggccagatggg

SEQ ID NO: 17930 - DNA, 20 bp, Artificial Sequence
  chemically synthesized
aacccgagggccagatggga

SEQ ID NO: 17931 - DNA, 20 bp, Artificial Sequence
  chemically synthesized
acccgagggccagatgggaa

SEQ ID NO: 17932 - DNA, 20 bp, Artificial Sequence
  chemically synthesized
agggccagatgggaagggtt

SEQ ID NO: 17933 - DNA, 20 bp, Artificial Sequence
  chemically synthesized
gggaagggtttggttgtgtt

SEQ ID NO: 17934 - DNA, 20 bp, Artificial Sequence
  chemically synthesized
ggaagggtttggttgtgttc

SEQ ID NO: 17935 - DNA, 20 bp, Artificial Sequence
  chemically synthesized
tttggttgtgttcaggcgac

SEQ ID NO: 17936 - DNA, 20 bp, Artificial Sequence
  chemically synthesized
ttggttgtgttcaggcgacc

SEQ ID NO: 17937 - DNA, 20 bp, Artificial Sequence
  chemically synthesized
gtgttcaggcgaccaggtgt

SEQ ID NO: 17938 - DNA, 20 bp, Artificial Sequence
  chemically synthesized
gttcaggcgaccaggtgtga

SEQ ID NO: 17939 - DNA, 20 bp, Artificial Sequence
  chemically synthesized
cgaccaggtgtgagagctcg

SEQ ID NO: 17940 - DNA, 20 bp, Artificial Sequence
  chemically synthesized
aggtgtgagagctcgtggtg

SEQ ID NO: 17941 - DNA, 20 bp, Artificial Sequence
  chemically synthesized
tgtgagagctcgtggtgcag

SEQ ID NO: 17942 - DNA, 20 bp, Artificial Sequence
  chemically synthesized
gtgagagctcgtggtgcagt

SEQ ID NO: 17943 - DNA, 20 bp, Artificial Sequence
  chemically synthesized
tgagagctcgtggtgcagtg

SEQ ID NO: 17944 - DNA, 20 bp, Artificial Sequence
  chemically synthesized
gagctcgtggtgcagtgggg

SEQ ID NO: 17945 - DNA, 20 bp, Artificial Sequence
  chemically synthesized
agctcgtggtgcagtggggt

SEQ ID NO: 17946 - DNA, 20 bp, Artificial Sequence
  chemically synthesized
gctcgtggtgcagtggggtg

SEQ ID NO: 17947 - DNA, 20 bp, Artificial Sequence
  chemically synthesized
tggtgcagtggggtggggcg

SEQ ID NO: 17948 - DNA, 20 bp, Artificial Sequence
  chemically synthesized
gcagtggggtggggcgtggc

SEQ ID NO: 17949 - DNA, 20 bp, Artificial Sequence
  chemically synthesized
ggccggcgtgcctgcgtgtg

SEQ ID NO: 17950 - DNA, 20 bp, Artificial Sequence
  chemically synthesized
gccggcgtgcctgcgtgtgc

SEQ ID NO: 17951 - DNA, 20 bp, Artificial Sequence
  chemically synthesized
gcgtgcctgcgtgtgcaggt

SEQ ID NO: 17952 - DNA, 20 bp, Artificial Sequence
  chemically synthesized
tgcgtgtgcaggtaagaaat

SEQ ID NO: 17953 - DNA, 20 bp, Artificial Sequence
  chemically synthesized
gtgtgcaggtaagaaatcag

SEQ ID NO: 17954 - DNA, 20 bp, Artificial Sequence
  chemically synthesized
tttttttttttttttttaaa

SEQ ID NO: 17955 - DNA, 20 bp, Artificial Sequence
  chemically synthesized
tttttttttttaaatggctg

SEQ ID NO: 17956 - DNA, 20 bp, Artificial Sequence
  chemically synthesized
atggctgaagtttaacttgt

SEQ ID NO: 17957 - DNA, 20 bp, Artificial Sequence
  chemically synthesized
gctgaagtttaacttgttgg

SEQ ID NO: 17958 - DNA, 20 bp, Artificial Sequence
  chemically synthesized
ctgaagtttaacttgttgga

SEQ ID NO: 17959 - DNA, 20 bp, Artificial Sequence
  chemically synthesized
tgaagtttaacttgttggaa

SEQ ID NO: 17960 - DNA, 20 bp, Artificial Sequence
  chemically synthesized
gttggaagggcctgtgaatt

SEQ ID NO: 17961 - DNA, 20 bp, Artificial Sequence
  chemically synthesized
gggcctgtgaattaagctgt

SEQ ID NO: 17962 - DNA, 20 bp, Artificial Sequence
  chemically synthesized
cctgtgaattaagctgtcgg

SEQ ID NO: 17963 - DNA, 20 bp, Artificial Sequence
  chemically synthesized
gaattaagctgtcggtggct

SEQ ID NO: 17964 - DNA, 20 bp, Artificial Sequence
  chemically synthesized
ggctgagaacgataatatgc

SEQ ID NO: 17965 - DNA, 20 bp, Artificial Sequence
  chemically synthesized
gctgagaacgataatatgca

SEQ ID NO: 17966 - DNA, 20 bp, Artificial Sequence
  chemically synthesized
gagaacgataatatgcaagg

SEQ ID NO: 17967 - DNA, 20 bp, Artificial Sequence
  chemically synthesized
agaacgataatatgcaagga

SEQ ID NO: 17968 - DNA, 20 bp, Artificial Sequence
  chemically synthesized
ataatatgcaaggaaggctc

SEQ ID NO: 17969 - DNA, 20 bp, Artificial Sequence
  chemically synthesized
taatatgcaaggaaggctca

SEQ ID NO: 17970 - DNA, 20 bp, Artificial Sequence
  chemically synthesized
tatgcaaggaaggctcaagg

SEQ ID NO: 17971 - DNA, 20 bp, Artificial Sequence
  chemically synthesized
atgcaaggaaggctcaagga

SEQ ID NO: 17972 - DNA, 20 bp, Artificial Sequence
  chemically synthesized
ggaaggctcaaggaaggctc

SEQ ID NO: 17973 - DNA, 20 bp, Artificial Sequence
  chemically synthesized
ggctcaaggaaggctcaaga

SEQ ID NO: 17974 - DNA, 20 bp, Artificial Sequence
  chemically synthesized
gctcaaggaaggctcaagaa

SEQ ID NO: 17975 - DNA, 20 bp, Artificial Sequence
  chemically synthesized
aaggaaggctcaagaaaggc

SEQ ID NO: 17976 - DNA, 20 bp, Artificial Sequence
  chemically synthesized
aggaaggctcaagaaaggcc

SEQ ID NO: 17977 - DNA, 20 bp, Artificial Sequence
  chemically synthesized
ggaaggctcaagaaaggcca

SEQ ID NO: 17978 - DNA, 20 bp, Artificial Sequence
  chemically synthesized
gaaggctcaagaaaggccag

SEQ ID NO: 17979 - DNA, 20 bp, Artificial Sequence
  chemically synthesized
ggctcaagaaaggccagggg

SEQ ID NO: 17980 - DNA, 20 bp, Artificial Sequence
  chemically synthesized
gctcaagaaaggccaggggt

SEQ ID NO: 17981 - DNA, 20 bp, Artificial Sequence
  chemically synthesized
ctcaagaaaggccaggggtg

SEQ ID NO: 17982 - DNA, 20 bp, Artificial Sequence
  chemically synthesized
gaaaggccaggggtggggaa

SEQ ID NO: 17983 - DNA, 20 bp, Artificial Sequence
  chemically synthesized
aaaggccaggggtggggaaa

SEQ ID NO: 17984 - DNA, 20 bp, Artificial Sequence
  chemically synthesized
tggggaaaaggtgctcttgt

SEQ ID NO: 17985 - DNA, 20 bp, Artificial Sequence
  chemically synthesized
gggaaaaggtgctcttgtta

SEQ ID NO: 17986 - DNA, 20 bp, Artificial Sequence
  chemically synthesized
ggaaaaggtgctcttgttag

SEQ ID NO: 17987 - DNA, 20 bp, Artificial Sequence
  chemically synthesized
aggtgctcttgttagaggcg

SEQ ID NO: 17988 - DNA, 20 bp, Artificial Sequence
  chemically synthesized
gttagaggcgcagcctttcc

SEQ ID NO: 17989 - DNA, 20 bp, Artificial Sequence
  chemically synthesized
ttagaggcgcagcctttcct

SEQ ID NO: 17990 - DNA, 20 bp, Artificial Sequence
  chemically synthesized
gaggcgcagcctttcctggg

SEQ ID NO: 17991 - DNA, 20 bp, Artificial Sequence
  chemically synthesized
aggcgcagcctttcctgggc

SEQ ID NO: 17992 - DNA, 20 bp, Artificial Sequence
  chemically synthesized
agcctttcctgggcaggacc

SEQ ID NO: 17993 - DNA, 20 bp, Artificial Sequence
  chemically synthesized
gcctttcctgggcaggaccc

SEQ ID NO: 17994 - DNA, 20 bp, Artificial Sequence
  chemically synthesized
tgggcaggacccaggaccga

SEQ ID NO: 17995 - DNA, 20 bp, Artificial Sequence
  chemically synthesized
cgatggcaaacccatgtgtt

SEQ ID NO: 17996 - DNA, 20 bp, Artificial Sequence
  chemically synthesized
gatggcaaacccatgtgttt

SEQ ID NO: 17997 - DNA, 20 bp, Artificial Sequence
  chemically synthesized
tctcgattttcttatcttct

SEQ ID NO: 17998 - DNA, 20 bp, Artificial Sequence
  chemically synthesized
tggcctcttcctgtgttttt

SEQ ID NO: 17999 - DNA, 20 bp, Artificial Sequence
  chemically synthesized
atgcattcatatatgaatgt

SEQ ID NO: 18000 - DNA, 20 bp, Artificial Sequence
  chemically synthesized
attcatatatgaatgttggc

SEQ ID NO: 18001 - DNA, 20 bp, Artificial Sequence
  chemically synthesized
catatatgaatgttggcaag

SEQ ID NO: 18002 - DNA, 20 bp, Artificial Sequence
  chemically synthesized
atatatgaatgttggcaagc

SEQ ID NO: 18003 - DNA, 20 bp, Artificial Sequence
  chemically synthesized
atatgaatgttggcaagcag

SEQ ID NO: 18004 - DNA, 20 bp, Artificial Sequence
  chemically synthesized
caataacttcctgacatttt

SEQ ID NO: 18005 - DNA, 20 bp, Artificial Sequence
  chemically synthesized
tttttagctcttttaatgtg

SEQ ID NO: 18006 - DNA, 20 bp, Artificial Sequence
  chemically synthesized
agtctttgccctcctgccac

SEQ ID NO: 18007 - DNA, 20 bp, Artificial Sequence
  chemically synthesized
ctttgccctcctgccacaag

SEQ ID NO: 18008 - DNA, 20 bp, Artificial Sequence
  chemically synthesized
ccctcctgccacaagtggcg

SEQ ID NO: 18009 - DNA, 20 bp, Artificial Sequence
  chemically synthesized
tgaatttccctgttactaac

SEQ ID NO: 18010 - DNA, 20 bp, Artificial Sequence
  chemically synthesized
atttccctgttactaactgg

SEQ ID NO: 18011 - DNA, 20 bp, Artificial Sequence
  chemically synthesized
tttccctgttactaactggc

SEQ ID NO: 18012 - DNA, 20 bp, Artificial Sequence
  chemically synthesized
tccctgttactaactggcag

SEQ ID NO: 18013 - DNA, 20 bp, Artificial Sequence
  chemically synthesized
ccctgttactaactggcagg

SEQ ID NO: 18014 - DNA, 20 bp, Artificial Sequence
  chemically synthesized
aactggcaggaggcatgttc

SEQ ID NO: 18015 - DNA, 20 bp, Artificial Sequence
  chemically synthesized
aggcatgttctagttcccac

SEQ ID NO: 18016 - DNA, 20 bp, Artificial Sequence
  chemically synthesized
gcatgttctagttcccacca

SEQ ID NO: 18017 - DNA, 20 bp, Artificial Sequence
  chemically synthesized
catgttctagttcccaccag

SEQ ID NO: 18018 - DNA, 20 bp, Artificial Sequence
  chemically synthesized
tgttctagttcccaccagag

SEQ ID NO: 18019 - DNA, 20 bp, Artificial Sequence
  chemically synthesized
gttcccaccagaggagctgc

SEQ ID NO: 18020 - DNA, 20 bp, Artificial Sequence
  chemically synthesized
ttcccaccagaggagctgct

SEQ ID NO: 18021 - DNA, 20 bp, Artificial Sequence
  chemically synthesized
tcccaccagaggagctgctg

SEQ ID NO: 18022 - DNA, 20 bp, Artificial Sequence
  chemically synthesized
cagaggagctgctggggcta

SEQ ID NO: 18023 - DNA, 20 bp, Artificial Sequence
  chemically synthesized
ggagctgctggggctaaagc

SEQ ID NO: 18024 - DNA, 20 bp, Artificial Sequence
  chemically synthesized
gagctgctggggctaaagct

SEQ ID NO: 18025 - DNA, 20 bp, Artificial Sequence
  chemically synthesized
tggggctaaagctgggttca

SEQ ID NO: 18026 - DNA, 20 bp, Artificial Sequence
  chemically synthesized
tgggttcatagaatcccacc

SEQ ID NO: 18027 - DNA, 20 bp, Artificial Sequence
  chemically synthesized
gggttcatagaatcccacct

SEQ ID NO: 18028 - DNA, 20 bp, Artificial Sequence
  chemically synthesized
ggttcatagaatcccaccta

SEQ ID NO: 18029 - DNA, 20 bp, Artificial Sequence
  chemically synthesized
gttcatagaatcccacctag

SEQ ID NO: 18030 - DNA, 20 bp, Artificial Sequence
  chemically synthesized
gaatcccacctaggggacac

SEQ ID NO: 18031 - DNA, 20 bp, Artificial Sequence
  chemically synthesized
aatcccacctaggggacacc

SEQ ID NO: 18032 - DNA, 20 bp, Artificial Sequence
  chemically synthesized
atcccacctaggggacacca

SEQ ID NO: 18033 - DNA, 20 bp, Artificial Sequence
  chemically synthesized
taggggacaccagggctttc

SEQ ID NO: 18034 - DNA, 20 bp, Artificial Sequence
  chemically synthesized
gggacaccagggctttcaag

SEQ ID NO: 18035 - DNA, 20 bp, Artificial Sequence
  chemically synthesized
accagggctttcaagtggtt

SEQ ID NO: 18036 - DNA, 20 bp, Artificial Sequence
  chemically synthesized
ccagggctttcaagtggttt

SEQ ID NO: 18037 - DNA, 20 bp, Artificial Sequence
  chemically synthesized
cagggctttcaagtggtttg

SEQ ID NO: 18038 - DNA, 20 bp, Artificial Sequence
  chemically synthesized
aaaaaatatttttcccatca

SEQ ID NO: 18039 - DNA, 20 bp, Artificial Sequence
  chemically synthesized
tttcccatcatagacttgaa

SEQ ID NO: 18040 - DNA, 20 bp, Artificial Sequence
  chemically synthesized
ttcccatcatagacttgaaa

SEQ ID NO: 18041 - DNA, 20 bp, Artificial Sequence
  chemically synthesized
aaaatcacatttacttcccc

SEQ ID NO: 18042 - DNA, 20 bp, Artificial Sequence
  chemically synthesized
tcacatttacttcccctggc

SEQ ID NO: 18043 - DNA, 20 bp, Artificial Sequence
  chemically synthesized
cacatttacttcccctggct

SEQ ID NO: 18044 - DNA, 20 bp, Artificial Sequence
  chemically synthesized
ttcccctggctaggcctcat

SEQ ID NO: 18045 - DNA, 20 bp, Artificial Sequence
  chemically synthesized
tcccctggctaggcctcata

SEQ ID NO: 18046 - DNA, 20 bp, Artificial Sequence
  chemically synthesized
cccctggctaggcctcataa

SEQ ID NO: 18047 - DNA, 20 bp, Artificial Sequence
  chemically synthesized
cctggctaggcctcataagg

SEQ ID NO: 18048 - DNA, 20 bp, Artificial Sequence
  chemically synthesized
ctggctaggcctcataaggg

SEQ ID NO: 18049 - DNA, 20 bp, Artificial Sequence
  chemically synthesized
gctaggcctcataagggagg

SEQ ID NO: 18050 - DNA, 20 bp, Artificial Sequence
  chemically synthesized
ctaggcctcataagggaggc

SEQ ID NO: 18051 - DNA, 20 bp, Artificial Sequence
  chemically synthesized
aggatttccttctccttttc

SEQ ID NO: 18052 - DNA, 20 bp, Artificial Sequence
  chemically synthesized
atttccttctccttttctag

SEQ ID NO: 18053 - DNA, 20 bp, Artificial Sequence
  chemically synthesized
ttctagtagcaaataaaaac

SEQ ID NO: 18054 - DNA, 20 bp, Artificial Sequence
  chemically synthesized
tctagtagcaaataaaaact

SEQ ID NO: 18055 - DNA, 20 bp, Artificial Sequence
  chemically synthesized
aaataaaaactgggaaaatt

SEQ ID NO: 18056 - DNA, 20 bp, Artificial Sequence
  chemically synthesized
aataaaaactgggaaaattt

SEQ ID NO: 18057 - DNA, 20 bp, Artificial Sequence
  chemically synthesized
ataaaaactgggaaaatttg

SEQ ID NO: 18058 - DNA, 20 bp, Artificial Sequence
  chemically synthesized
taaaaactgggaaaatttgg

SEQ ID NO: 18059 - DNA, 20 bp, Artificial Sequence
  chemically synthesized
tgggaaaatttgggggcctc

SEQ ID NO: 18060 - DNA, 20 bp, Artificial Sequence
  chemically synthesized
gggaaaatttgggggcctct

SEQ ID NO: 18061 - DNA, 20 bp, Artificial Sequence
  chemically synthesized
gggcctctgggtttatccca

SEQ ID NO: 18062 - DNA, 20 bp, Artificial Sequence
  chemically synthesized
cccgctcccgcccgccaact

SEQ ID NO: 18063 - DNA, 20 bp, Artificial Sequence
  chemically synthesized
tcccgcccgccaactcagcc

SEQ ID NO: 18064 - DNA, 20 bp, Artificial Sequence
  chemically synthesized
cgccaactcagccaagccct

SEQ ID NO: 18065 - DNA, 20 bp, Artificial Sequence
  chemically synthesized
ccaactcagccaagccctta

SEQ ID NO: 18066 - DNA, 20 bp, Artificial Sequence
  chemically synthesized
caactcagccaagcccttag

SEQ ID NO: 18067 - DNA, 20 bp, Artificial Sequence
  chemically synthesized
ctcagccaagcccttagagg

SEQ ID NO: 18068 - DNA, 20 bp, Artificial Sequence
  chemically synthesized
aggcagtcttctctcccacc

SEQ ID NO: 18069 - DNA, 20 bp, Artificial Sequence
  chemically synthesized
cctagatgtctttgtaacct

SEQ ID NO: 18070 - DNA, 20 bp, Artificial Sequence
  chemically synthesized
gatgtctttgtaacctgagc

SEQ ID NO: 18071 - DNA, 20 bp, Artificial Sequence
  chemically synthesized
tctttgtaacctgagctggt

SEQ ID NO: 18072 - DNA, 20 bp, Artificial Sequence
  chemically synthesized
tgtaacctgagctggtaaga

SEQ ID NO: 18073 - DNA, 20 bp, Artificial Sequence
  chemically synthesized
gtaacctgagctggtaagaa

SEQ ID NO: 18074 - DNA, 20 bp, Artificial Sequence
  chemically synthesized
taacctgagctggtaagaaa

SEQ ID NO: 18075 - DNA, 20 bp, Artificial Sequence
  chemically synthesized
acctgagctggtaagaaagg

SEQ ID NO: 18076 - DNA, 20 bp, Artificial Sequence
  chemically synthesized
cctgagctggtaagaaaggg

SEQ ID NO: 18077 - DNA, 20 bp, Artificial Sequence
  chemically synthesized
tgagctggtaagaaagggag

SEQ ID NO: 18078 - DNA, 20 bp, Artificial Sequence
  chemically synthesized
gagctggtaagaaagggagg

SEQ ID NO: 18079 - DNA, 20 bp, Artificial Sequence
  chemically synthesized
agctggtaagaaagggagga

SEQ ID NO: 18080 - DNA, 20 bp, Artificial Sequence
  chemically synthesized
ggtaagaaagggaggaggga

SEQ ID NO: 18081 - DNA, 20 bp, Artificial Sequence
  chemically synthesized
agaaagggaggagggacaga

SEQ ID NO: 18082 - DNA, 20 bp, Artificial Sequence
  chemically synthesized
aaagggaggagggacagaaa

SEQ ID NO: 18083 - DNA, 20 bp, Artificial Sequence
  chemically synthesized
aagggaggagggacagaaag

SEQ ID NO: 18084 - DNA, 20 bp, Artificial Sequence
  chemically synthesized
agggaggagggacagaaaga

SEQ ID NO: 18085 - DNA, 20 bp, Artificial Sequence
  chemically synthesized
gggaggagggacagaaagag

SEQ ID NO: 18086 - DNA, 20 bp, Artificial Sequence
  chemically synthesized
tttgattacacgaaataaaa

SEQ ID NO: 18087 - DNA, 20 bp, Artificial Sequence
  chemically synthesized
ttacacgaaataaaatggtt

SEQ ID NO: 18088 - DNA, 20 bp, Artificial Sequence
  chemically synthesized
tacacgaaataaaatggttt

SEQ ID NO: 18089 - DNA, 20 bp, Artificial Sequence
  chemically synthesized
gaaataaaatggtttaggct

SEQ ID NO: 18090 - DNA, 20 bp, Artificial Sequence
  chemically synthesized
aaataaaatggtttaggctg

SEQ ID NO: 18091 - DNA, 20 bp, Artificial Sequence
  chemically synthesized
aataaaatggtttaggctga

SEQ ID NO: 18092 - DNA, 20 bp, Artificial Sequence
  chemically synthesized
aatggtttaggctgagggta

SEQ ID NO: 18093 - DNA, 20 bp, Artificial Sequence
  chemically synthesized
ggtttaggctgagggtaaag

SEQ ID NO: 18094 - DNA, 20 bp, Artificial Sequence
  chemically synthesized
taaagaagtaataccatttc

SEQ ID NO: 18095 - DNA, 20 bp, Artificial Sequence
  chemically synthesized
catttctagttgtgcaacct

SEQ ID NO: 18096 - DNA, 20 bp, Artificial Sequence
  chemically synthesized
atttctagttgtgcaacctt

SEQ ID NO: 18097 - DNA, 20 bp, Artificial Sequence
  chemically synthesized
tctagttgtgcaaccttggg

SEQ ID NO: 18098 - DNA, 20 bp, Artificial Sequence
  chemically synthesized
ttgggcagatttcattccct

SEQ ID NO: 18099 - DNA, 20 bp, Artificial Sequence
  chemically synthesized
ctccgcttcctcaatctgta

SEQ ID NO: 18100 - DNA, 20 bp, Artificial Sequence
  chemically synthesized
cgcttcctcaatctgtaaag

SEQ ID NO: 18101 - DNA, 20 bp, Artificial Sequence
  chemically synthesized
gcttcctcaatctgtaaagt

SEQ ID NO: 18102 - DNA, 20 bp, Artificial Sequence
  chemically synthesized
cttcctcaatctgtaaagtg

SEQ ID NO: 18103 - DNA, 20 bp, Artificial Sequence
  chemically synthesized
tcctcaatctgtaaagtggg

SEQ ID NO: 18104 - DNA, 20 bp, Artificial Sequence
  chemically synthesized
ctgtaaagtggggagaatca

SEQ ID NO: 18105 - DNA, 20 bp, Artificial Sequence
  chemically synthesized
tgtaaagtggggagaatcac

SEQ ID NO: 18106 - DNA, 20 bp, Artificial Sequence
  chemically synthesized
gtaaagtggggagaatcacg

SEQ ID NO: 18107 - DNA, 20 bp, Artificial Sequence
  chemically synthesized
gaatcacggggcttgcctca

SEQ ID NO: 18108 - DNA, 20 bp, Artificial Sequence
  chemically synthesized
aatcacggggcttgcctcat

SEQ ID NO: 18109 - DNA, 20 bp, Artificial Sequence
  chemically synthesized
atcacggggcttgcctcata

SEQ ID NO: 18110 - DNA, 20 bp, Artificial Sequence
  chemically synthesized
gcttgcctcatagggccttt

SEQ ID NO: 18111 - DNA, 20 bp, Artificial Sequence
  chemically synthesized
agggcctttgagcatcctat

SEQ ID NO: 18112 - DNA, 20 bp, Artificial Sequence
  chemically synthesized
ggcctttgagcatcctatga

SEQ ID NO: 18113 - DNA, 20 bp, Artificial Sequence
  chemically synthesized
gagcatcctatgagagcatg

SEQ ID NO: 18114 - DNA, 20 bp, Artificial Sequence
  chemically synthesized
agcatcctatgagagcatgt

SEQ ID NO: 18115 - DNA, 20 bp, Artificial Sequence
  chemically synthesized
gcatcctatgagagcatgtg

SEQ ID NO: 18116 - DNA, 20 bp, Artificial Sequence
  chemically synthesized
catcctatgagagcatgtgg

SEQ ID NO: 18117 - DNA, 20 bp, Artificial Sequence
  chemically synthesized
atgagagcatgtgggggcgc

SEQ ID NO: 18118 - DNA, 20 bp, Artificial Sequence
  chemically synthesized
tgagagcatgtgggggcgct

SEQ ID NO: 18119 - DNA, 20 bp, Artificial Sequence
  chemically synthesized
gcatgtgggggcgctgggct

SEQ ID NO: 18120 - DNA, 20 bp, Artificial Sequence
  chemically synthesized
gggggcgctgggctcagtgc

SEQ ID NO: 18121 - DNA, 20 bp, Artificial Sequence
  chemically synthesized
ggggcgctgggctcagtgct

SEQ ID NO: 18122 - DNA, 20 bp, Artificial Sequence
  chemically synthesized
tgggctcagtgctgggcaca

SEQ ID NO: 18123 - DNA, 20 bp, Artificial Sequence
  chemically synthesized
catggtaaaacatgtcacaa

SEQ ID NO: 18124 - DNA, 20 bp, Artificial Sequence
  chemically synthesized
acaaaagctcattactatta

SEQ ID NO: 18125 - DNA, 20 bp, Artificial Sequence
  chemically synthesized
actattacggttatgactca

SEQ ID NO: 18126 - DNA, 20 bp, Artificial Sequence
  chemically synthesized
tacggttatgactcatggct

SEQ ID NO: 18127 - DNA, 20 bp, Artificial Sequence
  chemically synthesized
ggcttggaactgtgtgctcc

SEQ ID NO: 18128 - DNA, 20 bp, Artificial Sequence
  chemically synthesized
gcttggaactgtgtgctcct

SEQ ID NO: 18129 - DNA, 20 bp, Artificial Sequence
  chemically synthesized
cttggaactgtgtgctcctg

SEQ ID NO: 18130 - DNA, 20 bp, Artificial Sequence
  chemically synthesized
tgtgtgctcctggggtctca

SEQ ID NO: 18131 - DNA, 20 bp, Artificial Sequence
  chemically synthesized
gtgctcctggggtctcaaag

SEQ ID NO: 18132 - DNA, 20 bp, Artificial Sequence
  chemically synthesized
tcaaagtagttcccccatta

SEQ ID NO: 18133 - DNA, 20 bp, Artificial Sequence
  chemically synthesized
caaagtagttcccccattat

SEQ ID NO: 18134 - DNA, 20 bp, Artificial Sequence
  chemically synthesized
aaagtagttcccccattatg

SEQ ID NO: 18135 - DNA, 20 bp, Artificial Sequence
  chemically synthesized
tagttcccccattatggggt

SEQ ID NO: 18136 - DNA, 20 bp, Artificial Sequence
  chemically synthesized
ttcccccattatggggtgag

SEQ ID NO: 18137 - DNA, 20 bp, Artificial Sequence
  chemically synthesized
tcccccattatggggtgagc

SEQ ID NO: 18138 - DNA, 20 bp, Artificial Sequence
  chemically synthesized
ccattatggggtgagcaggt

SEQ ID NO: 18139 - DNA, 20 bp, Artificial Sequence
  chemically synthesized
cattatggggtgagcaggtt

SEQ ID NO: 18140 - DNA, 20 bp, Artificial Sequence
  chemically synthesized
tggggtgagcaggttgggat

SEQ ID NO: 18141 - DNA, 20 bp, Artificial Sequence
  chemically synthesized
gggtgagcaggttgggatga

SEQ ID NO: 18142 - DNA, 20 bp, Artificial Sequence
  chemically synthesized
tgagcaggttgggatgagag

SEQ ID NO: 18143 - DNA, 20 bp, Artificial Sequence
  chemically synthesized
agcaggttgggatgagagaa

SEQ ID NO: 18144 - DNA, 20 bp, Artificial Sequence
  chemically synthesized
aggttgggatgagagaagag

SEQ ID NO: 18145 - DNA, 20 bp, Artificial Sequence
  chemically synthesized
ggttgggatgagagaagagc

SEQ ID NO: 18146 - DNA, 20 bp, Artificial Sequence
  chemically synthesized
gttgggatgagagaagagca

SEQ ID NO: 18147 - DNA, 20 bp, Artificial Sequence
  chemically synthesized
gggatgagagaagagcaggg

SEQ ID NO: 18148 - DNA, 20 bp, Artificial Sequence
  chemically synthesized
ggatgagagaagagcagggc

SEQ ID NO: 18149 - DNA, 20 bp, Artificial Sequence
  chemically synthesized
tgagagaagagcagggcagg

SEQ ID NO: 18150 - DNA, 20 bp, Artificial Sequence
  chemically synthesized
gagagaagagcagggcaggt

SEQ ID NO: 18151 - DNA, 20 bp, Artificial Sequence
  chemically synthesized
agagaagagcagggcaggtg

SEQ ID NO: 18152 - DNA, 20 bp, Artificial Sequence
  chemically synthesized
gagaagagcagggcaggtgg

SEQ ID NO: 18153 - DNA, 20 bp, Artificial Sequence
  chemically synthesized
gcagggcaggtgggggtcta

SEQ ID NO: 18154 - DNA, 20 bp, Artificial Sequence
  chemically synthesized
agggcaggtgggggtctaaa

SEQ ID NO: 18155 - DNA, 20 bp, Artificial Sequence
  chemically synthesized
aggtgggggtctaaagagct

SEQ ID NO: 18156 - DNA, 20 bp, Artificial Sequence
  chemically synthesized
ggtgggggtctaaagagctc

SEQ ID NO: 18157 - DNA, 20 bp, Artificial Sequence
  chemically synthesized
gtgggggtctaaagagctca

SEQ ID NO: 18158 - DNA, 20 bp, Artificial Sequence
  chemically synthesized
tcagggtctcattatgtttc

SEQ ID NO: 18159 - DNA, 20 bp, Artificial Sequence
  chemically synthesized
gggtctcattatgtttctgg

SEQ ID NO: 18160 - DNA, 20 bp, Artificial Sequence
  chemically synthesized
tctcattatgtttctggtgg

SEQ ID NO: 18161 - DNA, 20 bp, Artificial Sequence
  chemically synthesized
ttctggtggcagctccctcg

SEQ ID NO: 18162 - DNA, 20 bp, Artificial Sequence
  chemically synthesized
tctggtggcagctccctcgt

SEQ ID NO: 18163 - DNA, 20 bp, Artificial Sequence
  chemically synthesized
ggtggcagctccctcgtggg

SEQ ID NO: 18164 - DNA, 20 bp, Artificial Sequence
  chemically synthesized
gtggcagctccctcgtgggt

SEQ ID NO: 18165 - DNA, 20 bp, Artificial Sequence
  chemically synthesized
ggcagctccctcgtgggtgg

SEQ ID NO: 18166 - DNA, 20 bp, Artificial Sequence
  chemically synthesized
gtgggagtcccctctcccca

SEQ ID NO: 18167 - DNA, 20 bp, Artificial Sequence
  chemically synthesized
atagacgtgtgttgccttac

SEQ ID NO: 18168 - DNA, 20 bp, Artificial Sequence
  chemically synthesized
agacgtgtgttgccttacga

SEQ ID NO: 18169 - DNA, 20 bp, Artificial Sequence
  chemically synthesized
gacgtgtgttgccttacgag

SEQ ID NO: 18170 - DNA, 20 bp, Artificial Sequence
  chemically synthesized
acgagaggcttgtgcctgcc

SEQ ID NO: 18171 - DNA, 20 bp, Artificial Sequence
  chemically synthesized
cgagaggcttgtgcctgcct

SEQ ID NO: 18172 - DNA, 20 bp, Artificial Sequence
  chemically synthesized
gcctgcctgggtgtgtgaca

SEQ ID NO: 18173 - DNA, 20 bp, Artificial Sequence
  chemically synthesized
ggtgtgtgacacagttactc

SEQ ID NO: 18174 - DNA, 20 bp, Artificial Sequence
  chemically synthesized
gtgtgtgacacagttactct

SEQ ID NO: 18175 - DNA, 20 bp, Artificial Sequence
  chemically synthesized
tgacacagttactctgggtt

SEQ ID NO: 18176 - DNA, 20 bp, Artificial Sequence
  chemically synthesized
tcagatttctatgttactgc

SEQ ID NO: 18177 - DNA, 20 bp, Artificial Sequence
  chemically synthesized
atttctatgttactgctagc

SEQ ID NO: 18178 - DNA, 20 bp, Artificial Sequence
  chemically synthesized
ctatgttactgctagctggt

SEQ ID NO: 18179 - DNA, 20 bp, Artificial Sequence
  chemically synthesized
tatgttactgctagctggtt

SEQ ID NO: 18180 - DNA, 20 bp, Artificial Sequence
  chemically synthesized
tgttactgctagctggttgg

SEQ ID NO: 18181 - DNA, 20 bp, Artificial Sequence
  chemically synthesized
ttactgctagctggttggga

SEQ ID NO: 18182 - DNA, 20 bp, Artificial Sequence
  chemically synthesized
ctagctggttgggagagtct

SEQ ID NO: 18183 - DNA, 20 bp, Artificial Sequence
  chemically synthesized
tagctggttgggagagtctg

SEQ ID NO: 18184 - DNA, 20 bp, Artificial Sequence
  chemically synthesized
agctggttgggagagtctga

SEQ ID NO: 18185 - DNA, 20 bp, Artificial Sequence
  chemically synthesized
catttcacctctctgtgaaa

SEQ ID NO: 18186 - DNA, 20 bp, Artificial Sequence
  chemically synthesized
tttcacctctctgtgaaatg

SEQ ID NO: 18187 - DNA, 20 bp, Artificial Sequence
  chemically synthesized
ctgtgaaatggagataactc

SEQ ID NO: 18188 - DNA, 20 bp, Artificial Sequence
  chemically synthesized
tgtgaaatggagataactca

SEQ ID NO: 18189 - DNA, 20 bp, Artificial Sequence
  chemically synthesized
actcaaggtcccttacctca

SEQ ID NO: 18190 - DNA, 20 bp, Artificial Sequence
  chemically synthesized
tcaaggtcccttacctcata

SEQ ID NO: 18191 - DNA, 20 bp, Artificial Sequence
  chemically synthesized
ttacctcatagagtccatgt

SEQ ID NO: 18192 - DNA, 20 bp, Artificial Sequence
  chemically synthesized
cctcatagagtccatgtgag

SEQ ID NO: 18193 - DNA, 20 bp, Artificial Sequence
  chemically synthesized
agtccatgtgagaagtaaat

SEQ ID NO: 18194 - DNA, 20 bp, Artificial Sequence
  chemically synthesized
gtccatgtgagaagtaaatg

SEQ ID NO: 18195 - DNA, 20 bp, Artificial Sequence
  chemically synthesized
tccatgtgagaagtaaatga

SEQ ID NO: 18196 - DNA, 20 bp, Artificial Sequence
  chemically synthesized
tgtgagaagtaaatgaggga

SEQ ID NO: 18197 - DNA, 20 bp, Artificial Sequence
  chemically synthesized
gaagtaaatgagggaaagca

SEQ ID NO: 18198 - DNA, 20 bp, Artificial Sequence
  chemically synthesized
agcacagacattactcgctc

SEQ ID NO: 18199 - DNA, 20 bp, Artificial Sequence
  chemically synthesized
gcacagacattactcgctcc

SEQ ID NO: 18200 - DNA, 20 bp, Artificial Sequence
  chemically synthesized
cacagacattactcgctccg

SEQ ID NO: 18201 - DNA, 20 bp, Artificial Sequence
  chemically synthesized
acagacattactcgctccgg

SEQ ID NO: 18202 - DNA, 20 bp, Artificial Sequence
  chemically synthesized
cgctccgggggctgcacctc

SEQ ID NO: 18203 - DNA, 20 bp, Artificial Sequence
  chemically synthesized
attccatcccacaacaacct

SEQ ID NO: 18204 - DNA, 20 bp, Artificial Sequence
  chemically synthesized
catcccacaacaacctcgga

SEQ ID NO: 18205 - DNA, 20 bp, Artificial Sequence
  chemically synthesized
atcccacaacaacctcggaa

SEQ ID NO: 18206 - DNA, 20 bp, Artificial Sequence
  chemically synthesized
cggaaaggaaacactcccat

SEQ ID NO: 18207 - DNA, 20 bp, Artificial Sequence
  chemically synthesized
acactcccattagcctcatt

SEQ ID NO: 18208 - DNA, 20 bp, Artificial Sequence
  chemically synthesized
ctcccattagcctcatttgg

SEQ ID NO: 18209 - DNA, 20 bp, Artificial Sequence
  chemically synthesized
cccattagcctcatttggta

SEQ ID NO: 18210 - DNA, 20 bp, Artificial Sequence
  chemically synthesized
ccattagcctcatttggtag

SEQ ID NO: 18211 - DNA, 20 bp, Artificial Sequence
  chemically synthesized
attagcctcatttggtagag

SEQ ID NO: 18212 - DNA, 20 bp, Artificial Sequence
  chemically synthesized
ttagcctcatttggtagagg

SEQ ID NO: 18213 - DNA, 20 bp, Artificial Sequence
  chemically synthesized
catttggtagaggaggaaat

SEQ ID NO: 18214 - DNA, 20 bp, Artificial Sequence
  chemically synthesized
atttggtagaggaggaaatt

SEQ ID NO: 18215 - DNA, 20 bp, Artificial Sequence
  chemically synthesized
tttggtagaggaggaaattg

SEQ ID NO: 18216 - DNA, 20 bp, Artificial Sequence
  chemically synthesized
ggaggaaattggggttcatc

SEQ ID NO: 18217 - DNA, 20 bp, Artificial Sequence
  chemically synthesized
gaggaaattggggttcatca

SEQ ID NO: 18218 - DNA, 20 bp, Artificial Sequence
  chemically synthesized
aggaaattggggttcatcaa

SEQ ID NO: 18219 - DNA, 20 bp, Artificial Sequence
  chemically synthesized
aagggttaaatgacttccct

SEQ ID NO: 18220 - DNA, 20 bp, Artificial Sequence
  chemically synthesized
agggttaaatgacttccctg

SEQ ID NO: 18221 - DNA, 20 bp, Artificial Sequence
  chemically synthesized
gggttaaatgacttccctga

SEQ ID NO: 18222 - DNA, 20 bp, Artificial Sequence
  chemically synthesized
atgacttccctgagggtcca

SEQ ID NO: 18223 - DNA, 20 bp, Artificial Sequence
  chemically synthesized
tccacagttgttcaatcctt

SEQ ID NO: 18224 - DNA, 20 bp, Artificial Sequence
  chemically synthesized
ttgttcaatcctttggcctg

SEQ ID NO: 18225 - DNA, 20 bp, Artificial Sequence
  chemically synthesized
gccaccctctgctacctctt

SEQ ID NO: 18226 - DNA, 20 bp, Artificial Sequence
  chemically synthesized
ctacctcttcagtacgtttg

SEQ ID NO: 18227 - DNA, 20 bp, Artificial Sequence
  chemically synthesized
agtacgtttgcagctttctt

SEQ ID NO: 18228 - DNA, 20 bp, Artificial Sequence
  chemically synthesized
acgtttgcagctttcttcag

SEQ ID NO: 18229 - DNA, 20 bp, Artificial Sequence
  chemically synthesized
gcagctttcttcagcggtgc

SEQ ID NO: 18230 - DNA, 20 bp, Artificial Sequence
  chemically synthesized
cagctttcttcagcggtgcc

SEQ ID NO: 18231 - DNA, 20 bp, Artificial Sequence
  chemically synthesized
cagcggtgccaggcaacaac

SEQ ID NO: 18232 - DNA, 20 bp, Artificial Sequence
  chemically synthesized
agcggtgccaggcaacaact

SEQ ID NO: 18233 - DNA, 20 bp, Artificial Sequence
  chemically synthesized
ggtgccaggcaacaactggg

SEQ ID NO: 18234 - DNA, 20 bp, Artificial Sequence
  chemically synthesized
gtgccaggcaacaactgggc

SEQ ID NO: 18235 - DNA, 20 bp, Artificial Sequence
  chemically synthesized
ccaggcaacaactgggcagg

SEQ ID NO: 18236 - DNA, 20 bp, Artificial Sequence
  chemically synthesized
aacaactgggcaggaagctc

SEQ ID NO: 18237 - DNA, 20 bp, Artificial Sequence
  chemically synthesized
tgggcaggaagctctggtgc

SEQ ID NO: 18238 - DNA, 20 bp, Artificial Sequence
  chemically synthesized
caggaagctctggtgctgga

SEQ ID NO: 18239 - DNA, 20 bp, Artificial Sequence
  chemically synthesized
ctggacagttgtccctccca

SEQ ID NO: 18240 - DNA, 20 bp, Artificial Sequence
  chemically synthesized
tggacagttgtccctcccat

SEQ ID NO: 18241 - DNA, 20 bp, Artificial Sequence
  chemically synthesized
tgtccctcccatgggttctg

SEQ ID NO: 18242 - DNA, 20 bp, Artificial Sequence
  chemically synthesized
ctcccatgggttctgtggtc

SEQ ID NO: 18243 - DNA, 20 bp, Artificial Sequence
  chemically synthesized
ggtcaagtttttcaatcttc

SEQ ID NO: 18244 - DNA, 20 bp, Artificial Sequence
  chemically synthesized
gtcaagtttttcaatcttct

SEQ ID NO: 18245 - DNA, 20 bp, Artificial Sequence
  chemically synthesized
agtttttcaatcttctggga

SEQ ID NO: 18246 - DNA, 20 bp, Artificial Sequence
  chemically synthesized
tttttcaatcttctgggaaa

SEQ ID NO: 18247 - DNA, 20 bp, Artificial Sequence
  chemically synthesized
ttcaatcttctgggaaagag

SEQ ID NO: 18248 - DNA, 20 bp, Artificial Sequence
  chemically synthesized
aagagaagaatgttcccctc

SEQ ID NO: 18249 - DNA, 20 bp, Artificial Sequence
  chemically synthesized
agaatgttcccctccagttc

SEQ ID NO: 18250 - DNA, 20 bp, Artificial Sequence
  chemically synthesized
gaatgttcccctccagttct

SEQ ID NO: 18251 - DNA, 20 bp, Artificial Sequence
  chemically synthesized
ctccagttctgggcatattg

SEQ ID NO: 18252 - DNA, 20 bp, Artificial Sequence
  chemically synthesized
tccagttctgggcatattga

SEQ ID NO: 18253 - DNA, 20 bp, Artificial Sequence
  chemically synthesized
cagttctgggcatattgaag

SEQ ID NO: 18254 - DNA, 20 bp, Artificial Sequence
  chemically synthesized
ctgggcatattgaaggagca

SEQ ID NO: 18255 - DNA, 20 bp, Artificial Sequence
  chemically synthesized
gggcatattgaaggagcacg

SEQ ID NO: 18256 - DNA, 20 bp, Artificial Sequence
  chemically synthesized
ttgaaggagcacggagctgt

SEQ ID NO: 18257 - DNA, 20 bp, Artificial Sequence
  chemically synthesized
tgaaggagcacggagctgtt

SEQ ID NO: 18258 - DNA, 20 bp, Artificial Sequence
  chemically synthesized
gagcacggagctgttgggaa

SEQ ID NO: 18259 - DNA, 20 bp, Artificial Sequence
  chemically synthesized
gttgggaaaagttgcaatgt

SEQ ID NO: 18260 - DNA, 20 bp, Artificial Sequence
  chemically synthesized
ttgggaaaagttgcaatgta

SEQ ID NO: 18261 - DNA, 20 bp, Artificial Sequence
  chemically synthesized
tgtaaggaatcctgctttgc

SEQ ID NO: 18262 - DNA, 20 bp, Artificial Sequence
  chemically synthesized
aaggaatcctgctttgcaag

SEQ ID NO: 18263 - DNA, 20 bp, Artificial Sequence
  chemically synthesized
tagtcatttccccatctgtc

SEQ ID NO: 18264 - DNA, 20 bp, Artificial Sequence
  chemically synthesized
tttccccatctgtccagaat

SEQ ID NO: 18265 - DNA, 20 bp, Artificial Sequence
  chemically synthesized
tccagaatgagcctgaaatc

SEQ ID NO: 18266 - DNA, 20 bp, Artificial Sequence
  chemically synthesized
gaatgagcctgaaatcaagt

SEQ ID NO: 18267 - DNA, 20 bp, Artificial Sequence
  chemically synthesized
aatgagcctgaaatcaagtg

SEQ ID NO: 18268 - DNA, 20 bp, Artificial Sequence
  chemically synthesized
atgagcctgaaatcaagtga

SEQ ID NO: 18269 - DNA, 20 bp, Artificial Sequence
  chemically synthesized
tgaaatcaagtgagggtcct

SEQ ID NO: 18270 - DNA, 20 bp, Artificial Sequence
  chemically synthesized
caagtgagggtcctgagaaa

SEQ ID NO: 18271 - DNA, 20 bp, Artificial Sequence
  chemically synthesized
agtgagggtcctgagaaaca

SEQ ID NO: 18272 - DNA, 20 bp, Artificial Sequence
  chemically synthesized
gtgagggtcctgagaaacag

SEQ ID NO: 18273 - DNA, 20 bp, Artificial Sequence
  chemically synthesized
tgagggtcctgagaaacaga

SEQ ID NO: 18274 - DNA, 20 bp, Artificial Sequence
  chemically synthesized
agggtcctgagaaacagagg

SEQ ID NO: 18275 - DNA, 20 bp, Artificial Sequence
  chemically synthesized
gggtcctgagaaacagaggg

SEQ ID NO: 18276 - DNA, 20 bp, Artificial Sequence
  chemically synthesized
gtcctgagaaacagagggag

SEQ ID NO: 18277 - DNA, 20 bp, Artificial Sequence
  chemically synthesized
tcctgagaaacagagggagg

SEQ ID NO: 18278 - DNA, 20 bp, Artificial Sequence
  chemically synthesized
gaggttttactgtttgtgtg

SEQ ID NO: 18279 - DNA, 20 bp, Artificial Sequence
  chemically synthesized
tttactgtttgtgtgtggct

SEQ ID NO: 18280 - DNA, 20 bp, Artificial Sequence
  chemically synthesized
ctgtttgtgtgtggcttggt

SEQ ID NO: 18281 - DNA, 20 bp, Artificial Sequence
  chemically synthesized
tgtttgtgtgtggcttggtc

SEQ ID NO: 18282 - DNA, 20 bp, Artificial Sequence
  chemically synthesized
tttgtgtgtggcttggtcag

SEQ ID NO: 18283 - DNA, 20 bp, Artificial Sequence
  chemically synthesized
gtggcttggtcaggagactg

SEQ ID NO: 18284 - DNA, 20 bp, Artificial Sequence
  chemically synthesized
gcttggtcaggagactgcag

SEQ ID NO: 18285 - DNA, 20 bp, Artificial Sequence
  chemically synthesized
cttggtcaggagactgcagt

SEQ ID NO: 18286 - DNA, 20 bp, Artificial Sequence
  chemically synthesized
gagactgcagtgggctgaat

SEQ ID NO: 18287 - DNA, 20 bp, Artificial Sequence
  chemically synthesized
agtgggctgaatgagaaact

SEQ ID NO: 18288 - DNA, 20 bp, Artificial Sequence
  chemically synthesized
gctgaatgagaaactaagct

SEQ ID NO: 18289 - DNA, 20 bp, Artificial Sequence
  chemically synthesized
gaaactaagctcggactttt

SEQ ID NO: 18290 - DNA, 20 bp, Artificial Sequence
  chemically synthesized
actaagctcggacttttaag

SEQ ID NO: 18291 - DNA, 20 bp, Artificial Sequence
  chemically synthesized
aagctcggacttttaagaag

SEQ ID NO: 18292 - DNA, 20 bp, Artificial Sequence
  chemically synthesized
tcggacttttaagaagtggt

SEQ ID NO: 18293 - DNA, 20 bp, Artificial Sequence
  chemically synthesized
cggacttttaagaagtggtg

SEQ ID NO: 18294 - DNA, 20 bp, Artificial Sequence
  chemically synthesized
ttttaagaagtggtgaggct

SEQ ID NO: 18295 - DNA, 20 bp, Artificial Sequence
  chemically synthesized
aagtggtgaggcttggcctg

SEQ ID NO: 18296 - DNA, 20 bp, Artificial Sequence
  chemically synthesized
tggtgaggcttggcctgcag

SEQ ID NO: 18297 - DNA, 20 bp, Artificial Sequence
  chemically synthesized
agttctgtgtgttgtctctg

SEQ ID NO: 18298 - DNA, 20 bp, Artificial Sequence
  chemically synthesized
tctctgtggcatttacttct

SEQ ID NO: 18299 - DNA, 20 bp, Artificial Sequence
  chemically synthesized
cttctcggatcgtaccttca

SEQ ID NO: 18300 - DNA, 20 bp, Artificial Sequence
  chemically synthesized
ttctcggatcgtaccttcaa

SEQ ID NO: 18301 - DNA, 20 bp, Artificial Sequence
  chemically synthesized
cggatcgtaccttcaaaggc

SEQ ID NO: 18302 - DNA, 20 bp, Artificial Sequence
  chemically synthesized
ggatcgtaccttcaaaggct

SEQ ID NO: 18303 - DNA, 20 bp, Artificial Sequence
  chemically synthesized
gatcgtaccttcaaaggctg

SEQ ID NO: 18304 - DNA, 20 bp, Artificial Sequence
  chemically synthesized
tcgtaccttcaaaggctggg

SEQ ID NO: 18305 - DNA, 20 bp, Artificial Sequence
  chemically synthesized
cttcaaaggctggggagaat

SEQ ID NO: 18306 - DNA, 20 bp, Artificial Sequence
  chemically synthesized
tggggagaatcagaattata

SEQ ID NO: 18307 - DNA, 20 bp, Artificial Sequence
  chemically synthesized
ggggagaatcagaattatac

SEQ ID NO: 18308 - DNA, 20 bp, Artificial Sequence
  chemically synthesized
gggagaatcagaattataca

SEQ ID NO: 18309 - DNA, 20 bp, Artificial Sequence
  chemically synthesized
gagaatcagaattatacagg

SEQ ID NO: 18310 - DNA, 20 bp, Artificial Sequence
  chemically synthesized
agaatcagaattatacaggg

SEQ ID NO: 18311 - DNA, 20 bp, Artificial Sequence
  chemically synthesized
gaatcagaattatacaggga

SEQ ID NO: 18312 - DNA, 20 bp, Artificial Sequence
  chemically synthesized
atcagaattatacagggagg

SEQ ID NO: 18313 - DNA, 20 bp, Artificial Sequence
  chemically synthesized
cagaattatacagggaggga

SEQ ID NO: 18314 - DNA, 20 bp, Artificial Sequence
  chemically synthesized
tatacagggagggagagact

SEQ ID NO: 18315 - DNA, 20 bp, Artificial Sequence
  chemically synthesized
gggagggagagactgagtgt

SEQ ID NO: 18316 - DNA, 20 bp, Artificial Sequence
  chemically synthesized
gggagagactgagtgtgagt

SEQ ID NO: 18317 - DNA, 20 bp, Artificial Sequence
  chemically synthesized
tgagtgtgagtgagtgtgcg

SEQ ID NO: 18318 - DNA, 20 bp, Artificial Sequence
  chemically synthesized
gtgtgagtgagtgtgcgtgg

SEQ ID NO: 18319 - DNA, 20 bp, Artificial Sequence
  chemically synthesized
tgagtgagtgtgcgtggcag

SEQ ID NO: 18320 - DNA, 20 bp, Artificial Sequence
  chemically synthesized
tgcgtggcagtggtgtttct

SEQ ID NO: 18321 - DNA, 20 bp, Artificial Sequence
  chemically synthesized
gcgtggcagtggtgtttctt

SEQ ID NO: 18322 - DNA, 20 bp, Artificial Sequence
  chemically synthesized
agtggtgtttcttaggacga

SEQ ID NO: 18323 - DNA, 20 bp, Artificial Sequence
  chemically synthesized
gtggtgtttcttaggacgat

SEQ ID NO: 18324 - DNA, 20 bp, Artificial Sequence
  chemically synthesized
tttcttaggacgatgggttc

SEQ ID NO: 18325 - DNA, 20 bp, Artificial Sequence
  chemically synthesized
ttcttaggacgatgggttct

SEQ ID NO: 18326 - DNA, 20 bp, Artificial Sequence
  chemically synthesized
tcttaggacgatgggttctg

SEQ ID NO: 18327 - DNA, 20 bp, Artificial Sequence
  chemically synthesized
cttaggacgatgggttctgg

SEQ ID NO: 18328 - DNA, 20 bp, Artificial Sequence
  chemically synthesized
ttaggacgatgggttctggg

SEQ ID NO: 18329 - DNA, 20 bp, Artificial Sequence
  chemically synthesized
ggggggtcataatctgcttc

SEQ ID NO: 18330 - DNA, 20 bp, Artificial Sequence
  chemically synthesized
gggggtcataatctgcttcg

SEQ ID NO: 18331 - DNA, 20 bp, Artificial Sequence
  chemically synthesized
gggtcataatctgcttcgag

SEQ ID NO: 18332 - DNA, 20 bp, Artificial Sequence
  chemically synthesized
ggtcataatctgcttcgagg

SEQ ID NO: 18333 - DNA, 20 bp, Artificial Sequence
  chemically synthesized
ttcgaggaggttttcatttc

SEQ ID NO: 18334 - DNA, 20 bp, Artificial Sequence
  chemically synthesized
gttttcatttctggctgaac

SEQ ID NO: 18335 - DNA, 20 bp, Artificial Sequence
  chemically synthesized
ttttcatttctggctgaaca

SEQ ID NO: 18336 - DNA, 20 bp, Artificial Sequence
  chemically synthesized
tttctggctgaacaaggctg

SEQ ID NO: 18337 - DNA, 20 bp, Artificial Sequence
  chemically synthesized
tggctgaacaaggctgtggt

SEQ ID NO: 18338 - DNA, 20 bp, Artificial Sequence
  chemically synthesized
ggctgaacaaggctgtggta

SEQ ID NO: 18339 - DNA, 20 bp, Artificial Sequence
  chemically synthesized
gaacaaggctgtggtaaggc

SEQ ID NO: 18340 - DNA, 20 bp, Artificial Sequence
  chemically synthesized
aggctgtggtaaggcaagtc

SEQ ID NO: 18341 - DNA, 20 bp, Artificial Sequence
  chemically synthesized
ctgtggtaaggcaagtccgg

SEQ ID NO: 18342 - DNA, 20 bp, Artificial Sequence
  chemically synthesized
tgtggtaaggcaagtccgga

SEQ ID NO: 18343 - DNA, 20 bp, Artificial Sequence
  chemically synthesized
ggcaagtccggaaggcatgc

SEQ ID NO: 18344 - DNA, 20 bp, Artificial Sequence
  chemically synthesized
ggaaggcatgctggaaactt

SEQ ID NO: 18345 - DNA, 20 bp, Artificial Sequence
  chemically synthesized
gaaggcatgctggaaacttg

SEQ ID NO: 18346 - DNA, 20 bp, Artificial Sequence
  chemically synthesized
aaggcatgctggaaacttga

SEQ ID NO: 18347 - DNA, 20 bp, Artificial Sequence
  chemically synthesized
gcatgctggaaacttgaggg

SEQ ID NO: 18348 - DNA, 20 bp, Artificial Sequence
  chemically synthesized
aacttgagggaagttttgaa

SEQ ID NO: 18349 - DNA, 20 bp, Artificial Sequence
  chemically synthesized
gaagttttgaatggaaactg

SEQ ID NO: 18350 - DNA, 20 bp, Artificial Sequence
  chemically synthesized
tgaatggaaactgcagtcaa

SEQ ID NO: 18351 - DNA, 20 bp, Artificial Sequence
  chemically synthesized
agctccatatgatccgcatg

SEQ ID NO: 18352 - DNA, 20 bp, Artificial Sequence
  chemically synthesized
tgatccgcatgtggcttccc

SEQ ID NO: 18353 - DNA, 20 bp, Artificial Sequence
  chemically synthesized
atccgcatgtggcttcccca

SEQ ID NO: 18354 - DNA, 20 bp, Artificial Sequence
  chemically synthesized
tccgcatgtggcttccccag

SEQ ID NO: 18355 - DNA, 20 bp, Artificial Sequence
  chemically synthesized
catgtggcttccccagaggc

SEQ ID NO: 18356 - DNA, 20 bp, Artificial Sequence
  chemically synthesized
cttccccagaggcaagtttt

SEQ ID NO: 18357 - DNA, 20 bp, Artificial Sequence
  chemically synthesized
gaggcaagttttcagctgcg

SEQ ID NO: 18358 - DNA, 20 bp, Artificial Sequence
  chemically synthesized
gcaagttttcagctgcgtgg

SEQ ID NO: 18359 - DNA, 20 bp, Artificial Sequence
  chemically synthesized
agctgcgtggtggcctctcc

SEQ ID NO: 18360 - DNA, 20 bp, Artificial Sequence
  chemically synthesized
ggcctctcccagtcactcca

SEQ ID NO: 18361 - DNA, 20 bp, Artificial Sequence
  chemically synthesized
gcctctcccagtcactccac

SEQ ID NO: 18362 - DNA, 20 bp, Artificial Sequence
  chemically synthesized
gacgctattaatatttgctg

SEQ ID NO: 18363 - DNA, 20 bp, Artificial Sequence
  chemically synthesized
ctattaatatttgctgaagc

SEQ ID NO: 18364 - DNA, 20 bp, Artificial Sequence
  chemically synthesized
tatttgctgaagcaagacct

SEQ ID NO: 18365 - DNA, 20 bp, Artificial Sequence
  chemically synthesized
atttgctgaagcaagacctg

SEQ ID NO: 18366 - DNA, 20 bp, Artificial Sequence
  chemically synthesized
gcaagacctgaggttcgttg

SEQ ID NO: 18367 - DNA, 20 bp, Artificial Sequence
  chemically synthesized
gacctgaggttcgttgcaga

SEQ ID NO: 18368 - DNA, 20 bp, Artificial Sequence
  chemically synthesized
tattctccatcctttcaaat

SEQ ID NO: 18369 - DNA, 20 bp, Artificial Sequence
  chemically synthesized
ctccatcctttcaaattggc

SEQ ID NO: 18370 - DNA, 20 bp, Artificial Sequence
  chemically synthesized
tccatcctttcaaattggcc

SEQ ID NO: 18371 - DNA, 20 bp, Artificial Sequence
  chemically synthesized
tcaaattggccaggctaaca

SEQ ID NO: 18372 - DNA, 20 bp, Artificial Sequence
  chemically synthesized
ggctaacatagacctccact

SEQ ID NO: 18373 - DNA, 20 bp, Artificial Sequence
  chemically synthesized
ctaacatagacctccactga

SEQ ID NO: 18374 - DNA, 20 bp, Artificial Sequence
  chemically synthesized
gacctccactgagagaattt

SEQ ID NO: 18375 - DNA, 20 bp, Artificial Sequence
  chemically synthesized
gagagaatttcagaatcatt

SEQ ID NO: 18376 - DNA, 20 bp, Artificial Sequence
  chemically synthesized
agaatttcagaatcatttgg

SEQ ID NO: 18377 - DNA, 20 bp, Artificial Sequence
  chemically synthesized
ttcagaatcatttggtagtt

SEQ ID NO: 18378 - DNA, 20 bp, Artificial Sequence
  chemically synthesized
agaatcatttggtagttgag

SEQ ID NO: 18379 - DNA, 20 bp, Artificial Sequence
  chemically synthesized
tgagaagcgcctacttcatg

SEQ ID NO: 18380 - DNA, 20 bp, Artificial Sequence
  chemically synthesized
agaagcgcctacttcatgcg

SEQ ID NO: 18381 - DNA, 20 bp, Artificial Sequence
  chemically synthesized
gaagcgcctacttcatgcgg

SEQ ID NO: 18382 - DNA, 20 bp, Artificial Sequence
  chemically synthesized
tacttcatgcggaggccccg

SEQ ID NO: 18383 - DNA, 20 bp, Artificial Sequence
  chemically synthesized
acttcatgcggaggccccgt

SEQ ID NO: 18384 - DNA, 20 bp, Artificial Sequence
  chemically synthesized
ttcatgcggaggccccgtgg

SEQ ID NO: 18385 - DNA, 20 bp, Artificial Sequence
  chemically synthesized
tcatgcggaggccccgtggg

SEQ ID NO: 18386 - DNA, 20 bp, Artificial Sequence
  chemically synthesized
atgcggaggccccgtgggag

SEQ ID NO: 18387 - DNA, 20 bp, Artificial Sequence
  chemically synthesized
cggaggccccgtgggaggag

SEQ ID NO: 18388 - DNA, 20 bp, Artificial Sequence
  chemically synthesized
aggccccgtgggaggagtgg

SEQ ID NO: 18389 - DNA, 20 bp, Artificial Sequence
  chemically synthesized
gccccgtgggaggagtggaa

SEQ ID NO: 18390 - DNA, 20 bp, Artificial Sequence
  chemically synthesized
cgtgggaggagtggaagagt

SEQ ID NO: 18391 - DNA, 20 bp, Artificial Sequence
  chemically synthesized
aggagtggaagagttggcct

SEQ ID NO: 18392 - DNA, 20 bp, Artificial Sequence
  chemically synthesized
ggaagagttggcctcagcac

SEQ ID NO: 18393 - DNA, 20 bp, Artificial Sequence
  chemically synthesized
gagttggcctcagcactggc

SEQ ID NO: 18394 - DNA, 20 bp, Artificial Sequence
  chemically synthesized
gcctcagcactggcgagtat

SEQ ID NO: 18395 - DNA, 20 bp, Artificial Sequence
  chemically synthesized
cagcactggcgagtatcgga

SEQ ID NO: 18396 - DNA, 20 bp, Artificial Sequence
  chemically synthesized
agcactggcgagtatcggat

SEQ ID NO: 18397 - DNA, 20 bp, Artificial Sequence
  chemically synthesized
cactggcgagtatcggatgg

SEQ ID NO: 18398 - DNA, 20 bp, Artificial Sequence
  chemically synthesized
ggatgggagctctgctcact

SEQ ID NO: 18399 - DNA, 20 bp, Artificial Sequence
  chemically synthesized
gggagctctgctcacttggt

SEQ ID NO: 18400 - DNA, 20 bp, Artificial Sequence
  chemically synthesized
cacttggtaagtccttctgc

SEQ ID NO: 18401 - DNA, 20 bp, Artificial Sequence
  chemically synthesized
taagtccttctgctagaacc

SEQ ID NO: 18402 - DNA, 20 bp, Artificial Sequence
  chemically synthesized
aagtccttctgctagaacca

SEQ ID NO: 18403 - DNA, 20 bp, Artificial Sequence
  chemically synthesized
agtccttctgctagaaccaa

SEQ ID NO: 18404 - DNA, 20 bp, Artificial Sequence
  chemically synthesized
tccttctgctagaaccaagg

SEQ ID NO: 18405 - DNA, 20 bp, Artificial Sequence
  chemically synthesized
ccttctgctagaaccaaggg

SEQ ID NO: 18406 - DNA, 20 bp, Artificial Sequence
  chemically synthesized
tagaaccaagggaggctgtt

SEQ ID NO: 18407 - DNA, 20 bp, Artificial Sequence
  chemically synthesized
ggctgttcagatccatcaca

SEQ ID NO: 18408 - DNA, 20 bp, Artificial Sequence
  chemically synthesized
tgttcagatccatcacaaag

SEQ ID NO: 18409 - DNA, 20 bp, Artificial Sequence
  chemically synthesized
atccatcacaaagaagttgt

SEQ ID NO: 18410 - DNA, 20 bp, Artificial Sequence
  chemically synthesized
aagaagttgtcggtcacatc

SEQ ID NO: 18411 - DNA, 20 bp, Artificial Sequence
  chemically synthesized
agaagttgtcggtcacatcc

SEQ ID NO: 18412 - DNA, 20 bp, Artificial Sequence
  chemically synthesized
tcacatccaggttgtcttct

SEQ ID NO: 18413 - DNA, 20 bp, Artificial Sequence
  chemically synthesized
ccaggttgtcttctgagttt

SEQ ID NO: 18414 - DNA, 20 bp, Artificial Sequence
  chemically synthesized
caggttgtcttctgagtttg

SEQ ID NO: 18415 - DNA, 20 bp, Artificial Sequence
  chemically synthesized
gttgtcttctgagtttgagg

SEQ ID NO: 18416 - DNA, 20 bp, Artificial Sequence
  chemically synthesized
ttgtcttctgagtttgaggt

SEQ ID NO: 18417 - DNA, 20 bp, Artificial Sequence
  chemically synthesized
cttctgagtttgaggtggga

SEQ ID NO: 18418 - DNA, 20 bp, Artificial Sequence
  chemically synthesized
tctgagtttgaggtgggatg

SEQ ID NO: 18419 - DNA, 20 bp, Artificial Sequence
  chemically synthesized
ctgagtttgaggtgggatgg

SEQ ID NO: 18420 - DNA, 20 bp, Artificial Sequence
  chemically synthesized
agtttgaggtgggatggagg

SEQ ID NO: 18421 - DNA, 20 bp, Artificial Sequence
  chemically synthesized
gtgggatggaggtggctgct

SEQ ID NO: 18422 - DNA, 20 bp, Artificial Sequence
  chemically synthesized
gtggctgctgagaatccatg

SEQ ID NO: 18423 - DNA, 20 bp, Artificial Sequence
  chemically synthesized
tggctgctgagaatccatgt

SEQ ID NO: 18424 - DNA, 20 bp, Artificial Sequence
  chemically synthesized
gctgagaatccatgtgggtc

SEQ ID NO: 18425 - DNA, 20 bp, Artificial Sequence
  chemically synthesized
tgagaatccatgtgggtcaa

SEQ ID NO: 18426 - DNA, 20 bp, Artificial Sequence
  chemically synthesized
catgtgggtcaagagctcca

SEQ ID NO: 18427 - DNA, 20 bp, Artificial Sequence
  chemically synthesized
ttttacttcgcactctgtcc

SEQ ID NO: 18428 - DNA, 20 bp, Artificial Sequence
  chemically synthesized
tttacttcgcactctgtccc

SEQ ID NO: 18429 - DNA, 20 bp, Artificial Sequence
  chemically synthesized
ttacttcgcactctgtcccg

SEQ ID NO: 18430 - DNA, 20 bp, Artificial Sequence
  chemically synthesized
tcgcactctgtcccggggca

SEQ ID NO: 18431 - DNA, 20 bp, Artificial Sequence
  chemically synthesized
cggggcatggacgtcctcaa

SEQ ID NO: 18432 - DNA, 20 bp, Artificial Sequence
  chemically synthesized
gggcatggacgtcctcaatg

SEQ ID NO: 18433 - DNA, 20 bp, Artificial Sequence
  chemically synthesized
ggcatggacgtcctcaatgg

SEQ ID NO: 18434 - DNA, 20 bp, Artificial Sequence
  chemically synthesized
gtcctcaatggaggtcatgc

SEQ ID NO: 18435 - DNA, 20 bp, Artificial Sequence
  chemically synthesized
ttccccctcaccccttctct

SEQ ID NO: 18436 - DNA, 20 bp, Artificial Sequence
  chemically synthesized
tcattgtctctacataccct

SEQ ID NO: 18437 - DNA, 20 bp, Artificial Sequence
  chemically synthesized
cattgtctctacataccctt

SEQ ID NO: 18438 - DNA, 20 bp, Artificial Sequence
  chemically synthesized
tctctacatacccttgggtc

SEQ ID NO: 18439 - DNA, 20 bp, Artificial Sequence
  chemically synthesized
tctacatacccttgggtcaa

SEQ ID NO: 18440 - DNA, 20 bp, Artificial Sequence
  chemically synthesized
atacccttgggtcaagagtg

SEQ ID NO: 18441 - DNA, 20 bp, Artificial Sequence
  chemically synthesized
cccttgggtcaagagtgtag

SEQ ID NO: 18442 - DNA, 20 bp, Artificial Sequence
  chemically synthesized
gtggttctcccttgtcaccc

SEQ ID NO: 18443 - DNA, 20 bp, Artificial Sequence
  chemically synthesized
gttctcccttgtcaccctgg

SEQ ID NO: 18444 - DNA, 20 bp, Artificial Sequence
  chemically synthesized
tctcccttgtcaccctggaa

SEQ ID NO: 18445 - DNA, 20 bp, Artificial Sequence
  chemically synthesized
cccttgtcaccctggaagag

SEQ ID NO: 18446 - DNA, 20 bp, Artificial Sequence
  chemically synthesized
caccctggaagagaagctct

SEQ ID NO: 18447 - DNA, 20 bp, Artificial Sequence
  chemically synthesized
aagctcttagttttatttgc

SEQ ID NO: 18448 - DNA, 20 bp, Artificial Sequence
  chemically synthesized
agctcttagttttatttgct

SEQ ID NO: 18449 - DNA, 20 bp, Artificial Sequence
  chemically synthesized
gttttatttgctgggtctcc

SEQ ID NO: 18450 - DNA, 20 bp, Artificial Sequence
  chemically synthesized
tctcctagactgaaatgata

SEQ ID NO: 18451 - DNA, 20 bp, Artificial Sequence
  chemically synthesized
tgataaagctgaaatgataa

SEQ ID NO: 18452 - DNA, 20 bp, Artificial Sequence
  chemically synthesized
gataaagctgaaatgataaa

SEQ ID NO: 18453 - DNA, 20 bp, Artificial Sequence
  chemically synthesized
aaatgataaaaggcgtatca

SEQ ID NO: 18454 - DNA, 20 bp, Artificial Sequence
  chemically synthesized
taaaaggcgtatcatggctt

SEQ ID NO: 18455 - DNA, 20 bp, Artificial Sequence
  chemically synthesized
tttccctcgctcgcaccccc

SEQ ID NO: 18456 - DNA, 20 bp, Artificial Sequence
  chemically synthesized
ccttctcttcccttgaaaat

SEQ ID NO: 18457 - DNA, 20 bp, Artificial Sequence
  chemically synthesized
ccttgaaaatcagtgaaaat

SEQ ID NO: 18458 - DNA, 20 bp, Artificial Sequence
  chemically synthesized
cttgaaaatcagtgaaaatc

SEQ ID NO: 18459 - DNA, 20 bp, Artificial Sequence
  chemically synthesized
tcaggccacatctctgatga

SEQ ID NO: 18460 - DNA, 20 bp, Artificial Sequence
  chemically synthesized
ttttctgtttctgccttcgt

SEQ ID NO: 18461 - DNA, 20 bp, Artificial Sequence
  chemically synthesized
tttctgtttctgccttcgtt

SEQ ID NO: 18462 - DNA, 20 bp, Artificial Sequence
  chemically synthesized
tgtttctgccttcgttaggt

SEQ ID NO: 18463 - DNA, 20 bp, Artificial Sequence
  chemically synthesized
aagcacaaatttgatgtccc

SEQ ID NO: 18464 - DNA, 20 bp, Artificial Sequence
  chemically synthesized
gcacaaatttgatgtcccaa

SEQ ID NO: 18465 - DNA, 20 bp, Artificial Sequence
  chemically synthesized
cacaaatttgatgtcccaag

SEQ ID NO: 18466 - DNA, 20 bp, Artificial Sequence
  chemically synthesized
aaatttgatgtcccaagagg

SEQ ID NO: 18467 - DNA, 20 bp, Artificial Sequence
  chemically synthesized
aatttgatgtcccaagaggc

SEQ ID NO: 18468 - DNA, 20 bp, Artificial Sequence
  chemically synthesized
tgatgtcccaagaggcaggc

SEQ ID NO: 18469 - DNA, 20 bp, Artificial Sequence
  chemically synthesized
gaggcaggccggtgaccctt

SEQ ID NO: 18470 - DNA, 20 bp, Artificial Sequence
  chemically synthesized
aggcaggccggtgacccttc

SEQ ID NO: 18471 - DNA, 20 bp, Artificial Sequence
  chemically synthesized
ggccggtgacccttcaggcc

SEQ ID NO: 18472 - DNA, 20 bp, Artificial Sequence
  chemically synthesized
gacccttcaggccaagtgcc

SEQ ID NO: 18473 - DNA, 20 bp, Artificial Sequence
  chemically synthesized
tcaggccaagtgcctggatg

SEQ ID NO: 18474 - DNA, 20 bp, Artificial Sequence
  chemically synthesized
ccaagtgcctggatgtggca

SEQ ID NO: 18475 - DNA, 20 bp, Artificial Sequence
  chemically synthesized
aagctacaataaatatcgaa

SEQ ID NO: 18476 - DNA, 20 bp, Artificial Sequence
  chemically synthesized
tacaataaatatcgaatggt

SEQ ID NO: 18477 - DNA, 20 bp, Artificial Sequence
  chemically synthesized
caataaatatcgaatggtga

SEQ ID NO: 18478 - DNA, 20 bp, Artificial Sequence
  chemically synthesized
atatcgaatggtgagagcaa

SEQ ID NO: 18479 - DNA, 20 bp, Artificial Sequence
  chemically synthesized
tggtgagagcaatggaaatt

SEQ ID NO: 18480 - DNA, 20 bp, Artificial Sequence
  chemically synthesized
agagcaatggaaatttagca

SEQ ID NO: 18481 - DNA, 20 bp, Artificial Sequence
  chemically synthesized
aaatttagcaaagccataac

SEQ ID NO: 18482 - DNA, 20 bp, Artificial Sequence
  chemically synthesized
aatttagcaaagccataacc

SEQ ID NO: 18483 - DNA, 20 bp, Artificial Sequence
  chemically synthesized
atttagcaaagccataaccg

SEQ ID NO: 18484 - DNA, 20 bp, Artificial Sequence
  chemically synthesized
ttagcaaagccataaccggg

SEQ ID NO: 18485 - DNA, 20 bp, Artificial Sequence
  chemically synthesized
agccataaccggggagacct

SEQ ID NO: 18486 - DNA, 20 bp, Artificial Sequence
  chemically synthesized
ccataaccggggagacctca

SEQ ID NO: 18487 - DNA, 20 bp, Artificial Sequence
  chemically synthesized
cataaccggggagacctcag

SEQ ID NO: 18488 - DNA, 20 bp, Artificial Sequence
  chemically synthesized
ataaccggggagacctcaga

SEQ ID NO: 18489 - DNA, 20 bp, Artificial Sequence
  chemically synthesized
taaccggggagacctcagag

SEQ ID NO: 18490 - DNA, 20 bp, Artificial Sequence
  chemically synthesized
ccggggagacctcagagggg

SEQ ID NO: 18491 - DNA, 20 bp, Artificial Sequence
  chemically synthesized
gggagacctcagaggggcag

SEQ ID NO: 18492 - DNA, 20 bp, Artificial Sequence
  chemically synthesized
acctcagaggggcagtggac

SEQ ID NO: 18493 - DNA, 20 bp, Artificial Sequence
  chemically synthesized
agaggggcagtggactggtt

SEQ ID NO: 18494 - DNA, 20 bp, Artificial Sequence
  chemically synthesized
aggggcagtggactggttaa

SEQ ID NO: 18495 - DNA, 20 bp, Artificial Sequence
  chemically synthesized
ggggcagtggactggttaag

SEQ ID NO: 18496 - DNA, 20 bp, Artificial Sequence
  chemically synthesized
tggactggttaagaggctgt

SEQ ID NO: 18497 - DNA, 20 bp, Artificial Sequence
  chemically synthesized
tggttaagaggctgttggat

SEQ ID NO: 18498 - DNA, 20 bp, Artificial Sequence
  chemically synthesized
taagaggctgttggatgagc

SEQ ID NO: 18499 - DNA, 20 bp, Artificial Sequence
  chemically synthesized
aagaggctgttggatgagcc

SEQ ID NO: 18500 - DNA, 20 bp, Artificial Sequence
  chemically synthesized
aggctgttggatgagccggg

SEQ ID NO: 18501 - DNA, 20 bp, Artificial Sequence
  chemically synthesized
taaaaatcaatgctgttgac

SEQ ID NO: 18502 - DNA, 20 bp, Artificial Sequence
  chemically synthesized
gtgataatttacaacgttcc

SEQ ID NO: 18503 - DNA, 20 bp, Artificial Sequence
  chemically synthesized
tttacaacgttcctggtgct

SEQ ID NO: 18504 - DNA, 20 bp, Artificial Sequence
  chemically synthesized
acaacgttcctggtgctaag

SEQ ID NO: 18505 - DNA, 20 bp, Artificial Sequence
  chemically synthesized
tgctaagtagttccccgctt

SEQ ID NO: 18506 - DNA, 20 bp, Artificial Sequence
  chemically synthesized
ttccccgcttaagaatgcgt

SEQ ID NO: 18507 - DNA, 20 bp, Artificial Sequence
  chemically synthesized
ccgcttaagaatgcgttggc

SEQ ID NO: 18508 - DNA, 20 bp, Artificial Sequence
  chemically synthesized
cgcttaagaatgcgttggct

SEQ ID NO: 18509 - DNA, 20 bp, Artificial Sequence
  chemically synthesized
ttaagaatgcgttggctggg

SEQ ID NO: 18510 - DNA, 20 bp, Artificial Sequence
  chemically synthesized
aagaatgcgttggctgggca

SEQ ID NO: 18511 - DNA, 20 bp, Artificial Sequence
  chemically synthesized
tgcgttggctgggcagagat

SEQ ID NO: 18512 - DNA, 20 bp, Artificial Sequence
  chemically synthesized
tggctgggcagagattagcg

SEQ ID NO: 18513 - DNA, 20 bp, Artificial Sequence
  chemically synthesized
ggctgggcagagattagcgc

SEQ ID NO: 18514 - DNA, 20 bp, Artificial Sequence
  chemically synthesized
gctgggcagagattagcgca

SEQ ID NO: 18515 - DNA, 20 bp, Artificial Sequence
  chemically synthesized
tgggcagagattagcgcagg

SEQ ID NO: 18516 - DNA, 20 bp, Artificial Sequence
  chemically synthesized
ttgtgtgtgtcacaatgaat

SEQ ID NO: 18517 - DNA, 20 bp, Artificial Sequence
  chemically synthesized
acaatgaatcagacgcatta

SEQ ID NO: 18518 - DNA, 20 bp, Artificial Sequence
  chemically synthesized
caatgaatcagacgcattat

SEQ ID NO: 18519 - DNA, 20 bp, Artificial Sequence
  chemically synthesized
gaatcagacgcattataggt

SEQ ID NO: 18520 - DNA, 20 bp, Artificial Sequence
  chemically synthesized
gtttcatcatgacttttaca

SEQ ID NO: 18521 - DNA, 20 bp, Artificial Sequence
  chemically synthesized
cacagttgtcatgtaattta

SEQ ID NO: 18522 - DNA, 20 bp, Artificial Sequence
  chemically synthesized
tctttaacaccctcctgaca

SEQ ID NO: 18523 - DNA, 20 bp, Artificial Sequence
  chemically synthesized
acatagacacactgcacttg

SEQ ID NO: 18524 - DNA, 20 bp, Artificial Sequence
  chemically synthesized
catagacacactgcacttga

SEQ ID NO: 18525 - DNA, 20 bp, Artificial Sequence
  chemically synthesized
acacactgcacttgaaggct

SEQ ID NO: 18526 - DNA, 20 bp, Artificial Sequence
  chemically synthesized
ttggtattgtttcataatcc

SEQ ID NO: 18527 - DNA, 20 bp, Artificial Sequence
  chemically synthesized
ggtattgtttcataatccga

SEQ ID NO: 18528 - DNA, 20 bp, Artificial Sequence
  chemically synthesized
gtattgtttcataatccgag

SEQ ID NO: 18529 - DNA, 20 bp, Artificial Sequence
  chemically synthesized
attgtttcataatccgagag

SEQ ID NO: 18530 - DNA, 20 bp, Artificial Sequence
  chemically synthesized
ttgtttcataatccgagagg

SEQ ID NO: 18531 - DNA, 20 bp, Artificial Sequence
  chemically synthesized
ccatcaaattacactatctt

SEQ ID NO: 18532 - DNA, 20 bp, Artificial Sequence
  chemically synthesized
catcaaattacactatcttt

SEQ ID NO: 18533 - DNA, 20 bp, Artificial Sequence
  chemically synthesized
gggctaatctaaatgcgctg

SEQ ID NO: 18534 - DNA, 20 bp, Artificial Sequence
  chemically synthesized
aatgcgctgcagattaaaat

SEQ ID NO: 18535 - DNA, 20 bp, Artificial Sequence
  chemically synthesized
tgcgctgcagattaaaatca

SEQ ID NO: 18536 - DNA, 20 bp, Artificial Sequence
  chemically synthesized
tgtccctgatgcaaattatt

SEQ ID NO: 18537 - DNA, 20 bp, Artificial Sequence
  chemically synthesized
cccgacacatttttattttg

SEQ ID NO: 18538 - DNA, 20 bp, Artificial Sequence
  chemically synthesized
tttattttgcggaccctttt

SEQ ID NO: 18539 - DNA, 20 bp, Artificial Sequence
  chemically synthesized
gagcactgctgtctgcgatg

SEQ ID NO: 18540 - DNA, 20 bp, Artificial Sequence
  chemically synthesized
gcactgctgtctgcgatgca

SEQ ID NO: 18541 - DNA, 20 bp, Artificial Sequence
  chemically synthesized
cactgctgtctgcgatgcag

SEQ ID NO: 18542 - DNA, 20 bp, Artificial Sequence
  chemically synthesized
actgctgtctgcgatgcaga

SEQ ID NO: 18543 - DNA, 20 bp, Artificial Sequence
  chemically synthesized
ctgctgtctgcgatgcagag

SEQ ID NO: 18544 - DNA, 20 bp, Artificial Sequence
  chemically synthesized
tgctgtctgcgatgcagagg

SEQ ID NO: 18545 - DNA, 20 bp, Artificial Sequence
  chemically synthesized
tgtctgcgatgcagaggggg

SEQ ID NO: 18546 - DNA, 20 bp, Artificial Sequence
  chemically synthesized
gtctgcgatgcagagggggt

SEQ ID NO: 18547 - DNA, 20 bp, Artificial Sequence
  chemically synthesized
tctgcgatgcagagggggtg

SEQ ID NO: 18548 - DNA, 20 bp, Artificial Sequence
  chemically synthesized
ctgcgatgcagagggggtgg

SEQ ID NO: 18549 - DNA, 20 bp, Artificial Sequence
  chemically synthesized
tgcgatgcagagggggtggg

SEQ ID NO: 18550 - DNA, 20 bp, Artificial Sequence
  chemically synthesized
cgatgcagagggggtggggg

SEQ ID NO: 18551 - DNA, 20 bp, Artificial Sequence
  chemically synthesized
agggggtggggggagatgca

SEQ ID NO: 18552 - DNA, 20 bp, Artificial Sequence
  chemically synthesized
gggggtggggggagatgcat

SEQ ID NO: 18553 - DNA, 20 bp, Artificial Sequence
  chemically synthesized
gggtggggggagatgcatag

SEQ ID NO: 18554 - DNA, 20 bp, Artificial Sequence
  chemically synthesized
gatgcataggagacaatctg

SEQ ID NO: 18555 - DNA, 20 bp, Artificial Sequence
  chemically synthesized
attaatgtacacttcccaaa

SEQ ID NO: 18556 - DNA, 20 bp, Artificial Sequence
  chemically synthesized
tgtacacttcccaaatggta

SEQ ID NO: 18557 - DNA, 20 bp, Artificial Sequence
  chemically synthesized
gtacacttcccaaatggtaa

SEQ ID NO: 18558 - DNA, 20 bp, Artificial Sequence
  chemically synthesized
tgtcttatttatttattgat

SEQ ID NO: 18559 - DNA, 20 bp, Artificial Sequence
  chemically synthesized
ttatttattgattagatgta

SEQ ID NO: 18560 - DNA, 20 bp, Artificial Sequence
  chemically synthesized
atttattgattagatgtata

SEQ ID NO: 18561 - DNA, 20 bp, Artificial Sequence
  chemically synthesized
gattagatgtatagagactt

SEQ ID NO: 18562 - DNA, 20 bp, Artificial Sequence
  chemically synthesized
gatgtatagagactttggcg

SEQ ID NO: 18563 - DNA, 20 bp, Artificial Sequence
  chemically synthesized
atgtatagagactttggcgt

SEQ ID NO: 18564 - DNA, 20 bp, Artificial Sequence
  chemically synthesized
tttggcgtgggcacaatctg

SEQ ID NO: 18565 - DNA, 20 bp, Artificial Sequence
  chemically synthesized
ctgaagttgaaatcctttta

SEQ ID NO: 18566 - DNA, 20 bp, Artificial Sequence
  chemically synthesized
aaaactatttaaaaatcttt

SEQ ID NO: 18567 - DNA, 20 bp, Artificial Sequence
  chemically synthesized
aaactatttaaaaatctttt

SEQ ID NO: 18568 - DNA, 20 bp, Artificial Sequence
  chemically synthesized
aactatttaaaaatcttttg

SEQ ID NO: 18569 - DNA, 20 bp, Artificial Sequence
  chemically synthesized
tatttaaaaatcttttgggg

SEQ ID NO: 18570 - DNA, 20 bp, Artificial Sequence
  chemically synthesized
taaaaatcttttggggaaga

SEQ ID NO: 18571 - DNA, 20 bp, Artificial Sequence
  chemically synthesized
aaaatcttttggggaagaaa

SEQ ID NO: 18572 - DNA, 20 bp, Artificial Sequence
  chemically synthesized
ggggaagaaagagcaaaata

SEQ ID NO: 18573 - DNA, 20 bp, Artificial Sequence
  chemically synthesized
agcaaaatatagccaaccaa

SEQ ID NO: 18574 - DNA, 20 bp, Artificial Sequence
  chemically synthesized
gccaaccaatagctttctgc

SEQ ID NO: 18575 - DNA, 20 bp, Artificial Sequence
  chemically synthesized
gaacacatcatcccaaaata

SEQ ID NO: 18576 - DNA, 20 bp, Artificial Sequence
  chemically synthesized
aacacatcatcccaaaatat

SEQ ID NO: 18577 - DNA, 20 bp, Artificial Sequence
  chemically synthesized
tctgaatttgatcaaatcac

SEQ ID NO: 18578 - DNA, 20 bp, Artificial Sequence
  chemically synthesized
tttctgaatttgatcaaatc

SEQ ID NO: 18579 - DNA, 20 bp, Artificial Sequence
  chemically synthesized
ttgatcaaatctagattttg

SEQ ID NO: 18580 - DNA, 20 bp, Artificial Sequence
  chemically synthesized
atcaaatctagattttgcag

SEQ ID NO: 18581 - DNA, 20 bp, Artificial Sequence
  chemically synthesized
atctagattttgcagaagtt

SEQ ID NO: 18582 - DNA, 20 bp, Artificial Sequence
  chemically synthesized
tctagattttgcagaagttc

SEQ ID NO: 18583 - DNA, 20 bp, Artificial Sequence
  chemically synthesized
ctagattttgcagaagttca

SEQ ID NO: 18584 - DNA, 20 bp, Artificial Sequence
  chemically synthesized
attttgcagaagttcagggt

SEQ ID NO: 18585 - DNA, 20 bp, Artificial Sequence
  chemically synthesized
tttgcagaagttcagggtga

SEQ ID NO: 18586 - DNA, 20 bp, Artificial Sequence
  chemically synthesized
aaccatgcctgttttatatc

SEQ ID NO: 18587 - DNA, 20 bp, Artificial Sequence
  chemically synthesized
atgcctgttttatatctaga

SEQ ID NO: 18588 - DNA, 20 bp, Artificial Sequence
  chemically synthesized
agaaagtgaaatcattgtta

SEQ ID NO: 18589 - DNA, 20 bp, Artificial Sequence
  chemically synthesized
gttatagaaaaaacctactg

SEQ ID NO: 18590 - DNA, 20 bp, Artificial Sequence
  chemically synthesized
tagaaaaaacctactgtggt

SEQ ID NO: 18591 - DNA, 20 bp, Artificial Sequence
  chemically synthesized
aaaaccacattcttttttcc

SEQ ID NO: 18592 - DNA, 20 bp, Artificial Sequence
  chemically synthesized
gccctgctgccatcctctac

SEQ ID NO: 18593 - DNA, 20 bp, Artificial Sequence
  chemically synthesized
catcctctaccagaaaataa

SEQ ID NO: 18594 - DNA, 20 bp, Artificial Sequence
  chemically synthesized
aaaataacagtatctgcctg

SEQ ID NO: 18595 - DNA, 20 bp, Artificial Sequence
  chemically synthesized
cagtatctgcctgtagtatg

SEQ ID NO: 18596 - DNA, 20 bp, Artificial Sequence
  chemically synthesized
agtatgaagaccttccaatt

SEQ ID NO: 18597 - DNA, 20 bp, Artificial Sequence
  chemically synthesized
tatgaagaccttccaattga

SEQ ID NO: 18598 - DNA, 20 bp, Artificial Sequence
  chemically synthesized
ttgattaccaaacacgaatg

SEQ ID NO: 18599 - DNA, 20 bp, Artificial Sequence
  chemically synthesized
tgattaccaaacacgaatga

SEQ ID NO: 18600 - DNA, 20 bp, Artificial Sequence
  chemically synthesized
ttaccaaacacgaatgaagg

SEQ ID NO: 18601 - DNA, 20 bp, Artificial Sequence
  chemically synthesized
ccaaacacgaatgaaggaag

SEQ ID NO: 18602 - DNA, 20 bp, Artificial Sequence
  chemically synthesized
gaagaagataacataaaaat

SEQ ID NO: 18603 - DNA, 20 bp, Artificial Sequence
  chemically synthesized
agataacataaaaattagta

SEQ ID NO: 18604 - DNA, 20 bp, Artificial Sequence
  chemically synthesized
gataacataaaaattagtaa

SEQ ID NO: 18605 - DNA, 20 bp, Artificial Sequence
  chemically synthesized
aaaattagtaaaggccttcc

SEQ ID NO: 18606 - DNA, 20 bp, Artificial Sequence
  chemically synthesized
attagtaaaggccttccaag

SEQ ID NO: 18607 - DNA, 20 bp, Artificial Sequence
  chemically synthesized
agacatttacccttctgtga

SEQ ID NO: 18608 - DNA, 20 bp, Artificial Sequence
  chemically synthesized
ttacccttctgtgaaagcca

SEQ ID NO: 18609 - DNA, 20 bp, Artificial Sequence
  chemically synthesized
acccttctgtgaaagccatg

SEQ ID NO: 18610 - DNA, 20 bp, Artificial Sequence
  chemically synthesized
aaagccatggagaaattacc

SEQ ID NO: 18611 - DNA, 20 bp, Artificial Sequence
  chemically synthesized
catggagaaattaccaagac

SEQ ID NO: 18612 - DNA, 20 bp, Artificial Sequence
  chemically synthesized
agaaattaccaagactggtt

SEQ ID NO: 18613 - DNA, 20 bp, Artificial Sequence
  chemically synthesized
gaaattaccaagactggttt

SEQ ID NO: 18614 - DNA, 20 bp, Artificial Sequence
  chemically synthesized
aaattaccaagactggtttg

SEQ ID NO: 18615 - DNA, 20 bp, Artificial Sequence
  chemically synthesized
aattaccaagactggtttgg

SEQ ID NO: 18616 - DNA, 20 bp, Artificial Sequence
  chemically synthesized
attaccaagactggtttggg

SEQ ID NO: 18617 - DNA, 20 bp, Artificial Sequence
  chemically synthesized
taccaagactggtttggggg

SEQ ID NO: 18618 - DNA, 20 bp, Artificial Sequence
  chemically synthesized
accaagactggtttgggggg

SEQ ID NO: 18619 - DNA, 20 bp, Artificial Sequence
  chemically synthesized
ccaagactggtttgggggga

SEQ ID NO: 18620 - DNA, 20 bp, Artificial Sequence
  chemically synthesized
ggtttggggggagggcattt

SEQ ID NO: 18621 - DNA, 20 bp, Artificial Sequence
  chemically synthesized
gtttggggggagggcattta

SEQ ID NO: 18622 - DNA, 20 bp, Artificial Sequence
  chemically synthesized
ggagggcatttaaggtcttt

SEQ ID NO: 18623 - DNA, 20 bp, Artificial Sequence
  chemically synthesized
gagggcatttaaggtctttt

SEQ ID NO: 18624 - DNA, 20 bp, Artificial Sequence
  chemically synthesized
ttaaggtcttttgggcatta

SEQ ID NO: 18625 - DNA, 20 bp, Artificial Sequence
  chemically synthesized
tttgggcattacagattttc

SEQ ID NO: 18626 - DNA, 20 bp, Artificial Sequence
  chemically synthesized
cagaaccaaactttgacttt

SEQ ID NO: 18627 - DNA, 20 bp, Artificial Sequence
  chemically synthesized
actttgacttttagtgttaa

SEQ ID NO: 18628 - DNA, 20 bp, Artificial Sequence
  chemically synthesized
tttgacttttagtgttaaca

SEQ ID NO: 18629 - DNA, 20 bp, Artificial Sequence
  chemically synthesized
tgacttttagtgttaacaga

SEQ ID NO: 18630 - DNA, 20 bp, Artificial Sequence
  chemically synthesized
agagacactgatctgaaaac

SEQ ID NO: 18631 - DNA, 20 bp, Artificial Sequence
  chemically synthesized
gagacactgatctgaaaacc

SEQ ID NO: 18632 - DNA, 20 bp, Artificial Sequence
  chemically synthesized
gatctgaaaaccaggacacc

SEQ ID NO: 18633 - DNA, 20 bp, Artificial Sequence
  chemically synthesized
atctgaaaaccaggacacct

SEQ ID NO: 18634 - DNA, 20 bp, Artificial Sequence
  chemically synthesized
cccttattgtatcatgctgt

SEQ ID NO: 18635 - DNA, 20 bp, Artificial Sequence
  chemically synthesized
tgtatcatgctgtgagattt

SEQ ID NO: 18636 - DNA, 20 bp, Artificial Sequence
  chemically synthesized
gtatcatgctgtgagatttt

SEQ ID NO: 18637 - DNA, 20 bp, Artificial Sequence
  chemically synthesized
tttgggctcccttcacctgt

SEQ ID NO: 18638 - DNA, 20 bp, Artificial Sequence
  chemically synthesized
atttgtttccttgtcttgta

SEQ ID NO: 18639 - DNA, 20 bp, Artificial Sequence
  chemically synthesized
tgtttccttgtcttgtaaag

SEQ ID NO: 18640 - DNA, 20 bp, Artificial Sequence
  chemically synthesized
gtttccttgtcttgtaaagt

SEQ ID NO: 18641 - DNA, 20 bp, Artificial Sequence
  chemically synthesized
gtcttgtaaagtaggtaaaa

SEQ ID NO: 18642 - DNA, 20 bp, Artificial Sequence
  chemically synthesized
tgtaaagtaggtaaaataga

SEQ ID NO: 18643 - DNA, 20 bp, Artificial Sequence
  chemically synthesized
agtaggtaaaatagatagtt

SEQ ID NO: 18644 - DNA, 20 bp, Artificial Sequence
  chemically synthesized
gtaaaatagatagtttggac

SEQ ID NO: 18645 - DNA, 20 bp, Artificial Sequence
  chemically synthesized
taaaatagatagtttggact

SEQ ID NO: 18646 - DNA, 20 bp, Artificial Sequence
  chemically synthesized
aatagatagtttggactggg

SEQ ID NO: 18647 - DNA, 20 bp, Artificial Sequence
  chemically synthesized
atagatagtttggactgggt

SEQ ID NO: 18648 - DNA, 20 bp, Artificial Sequence
  chemically synthesized
tttggactgggtgggtctct

SEQ ID NO: 18649 - DNA, 20 bp, Artificial Sequence
  chemically synthesized
tctaagtccccatgatgttc

SEQ ID NO: 18650 - DNA, 20 bp, Artificial Sequence
  chemically synthesized
gtccccatgatgttctagca

SEQ ID NO: 18651 - DNA, 20 bp, Artificial Sequence
  chemically synthesized
atagtatgaacaccactgac

SEQ ID NO: 18652 - DNA, 20 bp, Artificial Sequence
  chemically synthesized
gttttctccctgctattttt

SEQ ID NO: 18653 - DNA, 20 bp, Artificial Sequence
  chemically synthesized
ccctgctattttttggaatc

SEQ ID NO: 18654 - DNA, 20 bp, Artificial Sequence
  chemically synthesized
tttggaatctagttgctgaa

SEQ ID NO: 18655 - DNA, 20 bp, Artificial Sequence
  chemically synthesized
ttggaatctagttgctgaat

SEQ ID NO: 18656 - DNA, 20 bp, Artificial Sequence
  chemically synthesized
tggaatctagttgctgaatg

SEQ ID NO: 18657 - DNA, 20 bp, Artificial Sequence
  chemically synthesized
ctgaatggggctcacctgca

SEQ ID NO: 18658 - DNA, 20 bp, Artificial Sequence
  chemically synthesized
atggggctcacctgcaaaga

SEQ ID NO: 18659 - DNA, 20 bp, Artificial Sequence
  chemically synthesized
gggctcacctgcaaagacag

SEQ ID NO: 18660 - DNA, 20 bp, Artificial Sequence
  chemically synthesized
tattttcttgatttgcctca

SEQ ID NO: 18661 - DNA, 20 bp, Artificial Sequence
  chemically synthesized
ttcttgatttgcctcaaaga

SEQ ID NO: 18662 - DNA, 20 bp, Artificial Sequence
  chemically synthesized
ttgatttgcctcaaagatgg

SEQ ID NO: 18663 - DNA, 20 bp, Artificial Sequence
  chemically synthesized
tgcctcaaagatggaagcta

SEQ ID NO: 18664 - DNA, 20 bp, Artificial Sequence
  chemically synthesized
ctcaaagatggaagctatgg

SEQ ID NO: 18665 - DNA, 20 bp, Artificial Sequence
  chemically synthesized
caaagatggaagctatggtg

SEQ ID NO: 18666 - DNA, 20 bp, Artificial Sequence
  chemically synthesized
tggaagctatggtggagatt

SEQ ID NO: 18667 - DNA, 20 bp, Artificial Sequence
  chemically synthesized
ggaagctatggtggagatta

SEQ ID NO: 18668 - DNA, 20 bp, Artificial Sequence
  chemically synthesized
ctatggtggagattaaggct

SEQ ID NO: 18669 - DNA, 20 bp, Artificial Sequence
  chemically synthesized
ttggattcgtgattccccaa

SEQ ID NO: 18670 - DNA, 20 bp, Artificial Sequence
  chemically synthesized
attcgtgattccccaacaga

SEQ ID NO: 18671 - DNA, 20 bp, Artificial Sequence
  chemically synthesized
attccccaacagaaagctta

SEQ ID NO: 18672 - DNA, 20 bp, Artificial Sequence
  chemically synthesized
ttccccaacagaaagcttaa

SEQ ID NO: 18673 - DNA, 20 bp, Artificial Sequence
  chemically synthesized
aaaggcatctttcaaattgc

SEQ ID NO: 18674 - DNA, 20 bp, Artificial Sequence
  chemically synthesized
ggcatctttcaaattgctgg

SEQ ID NO: 18675 - DNA, 20 bp, Artificial Sequence
  chemically synthesized
aattgctggaagcaaaattg

SEQ ID NO: 18676 - DNA, 20 bp, Artificial Sequence
  chemically synthesized
ctggaagcaaaattgaagtg

SEQ ID NO: 18677 - DNA, 20 bp, Artificial Sequence
  chemically synthesized
aaaattgaagtgcagtataa

SEQ ID NO: 18678 - DNA, 20 bp, Artificial Sequence
  chemically synthesized
tgaagtgcagtataatggaa

SEQ ID NO: 18679 - DNA, 20 bp, Artificial Sequence
  chemically synthesized
aatggaatggtgataattca

SEQ ID NO: 18680 - DNA, 20 bp, Artificial Sequence
  chemically synthesized
ggaatggtgataattcacag

SEQ ID NO: 18681 - DNA, 20 bp, Artificial Sequence
  chemically synthesized
tgataattcacagaagtttc

SEQ ID NO: 18682 - DNA, 20 bp, Artificial Sequence
  chemically synthesized
acagaagtttccagccttat

SEQ ID NO: 18683 - DNA, 20 bp, Artificial Sequence
  chemically synthesized
ctccatcttttaattgttgc

SEQ ID NO: 18684 - DNA, 20 bp, Artificial Sequence
  chemically synthesized
gttttttttgaaaaactcca

SEQ ID NO: 18685 - DNA, 20 bp, Artificial Sequence
  chemically synthesized
atgtaatgtgtattttctcc

SEQ ID NO: 18686 - DNA, 20 bp, Artificial Sequence
  chemically synthesized
tttctccaagtttgcttttt

SEQ ID NO: 18687 - DNA, 20 bp, Artificial Sequence
  chemically synthesized
ttctccaagtttgctttttt

SEQ ID NO: 18688 - DNA, 20 bp, Artificial Sequence
  chemically synthesized
caaatgtaactacatcaaaa

SEQ ID NO: 18689 - DNA, 20 bp, Artificial Sequence
  chemically synthesized
atgtaactacatcaaaatag

SEQ ID NO: 18690 - DNA, 20 bp, Artificial Sequence
  chemically synthesized
atagaagtacgtttttgaaa

SEQ ID NO: 18691 - DNA, 20 bp, Artificial Sequence
  chemically synthesized
gtacgtttttgaaaaagaaa

SEQ ID NO: 18692 - DNA, 20 bp, Artificial Sequence
  chemically synthesized
aatagttgaattcaaacaac

SEQ ID NO: 18693 - DNA, 20 bp, Artificial Sequence
  chemically synthesized
atagttgaattcaaacaacc

SEQ ID NO: 18694 - DNA, 20 bp, Artificial Sequence
  chemically synthesized
ttcaattaactgactgaatt

SEQ ID NO: 18695 - DNA, 20 bp, Artificial Sequence
  chemically synthesized
ttcctccttcctcctcccaa

SEQ ID NO: 18696 - DNA, 20 bp, Artificial Sequence
  chemically synthesized
tccttcctcctcccaaaagc

SEQ ID NO: 18697 - DNA, 20 bp, Artificial Sequence
  chemically synthesized
caaaagctggtttctctgta

SEQ ID NO: 18698 - DNA, 20 bp, Artificial Sequence
  chemically synthesized
ctggtttctctgtatggaca

SEQ ID NO: 18699 - DNA, 20 bp, Artificial Sequence
  chemically synthesized
ggacatagcctacatatgct

SEQ ID NO: 18700 - DNA, 20 bp, Artificial Sequence
  chemically synthesized
gcctacatatgctgagtccc

SEQ ID NO: 18701 - DNA, 20 bp, Artificial Sequence
  chemically synthesized
ctacatatgctgagtccctg

SEQ ID NO: 18702 - DNA, 20 bp, Artificial Sequence
  chemically synthesized
atatgctgagtccctggagt

SEQ ID NO: 18703 - DNA, 20 bp, Artificial Sequence
  chemically synthesized
tatgctgagtccctggagtt

SEQ ID NO: 18704 - DNA, 20 bp, Artificial Sequence
  chemically synthesized
ttaggaatttttgcttgtta

SEQ ID NO: 18705 - DNA, 20 bp, Artificial Sequence
  chemically synthesized
taggaatttttgcttgttaa

SEQ ID NO: 18706 - DNA, 20 bp, Artificial Sequence
  chemically synthesized
ggcatccgatgcaacatgtt

SEQ ID NO: 18707 - DNA, 20 bp, Artificial Sequence
  chemically synthesized
atccgatgcaacatgtttag

SEQ ID NO: 18708 - DNA, 20 bp, Artificial Sequence
  chemically synthesized
tagaagaactctccctctgt

SEQ ID NO: 18709 - DNA, 20 bp, Artificial Sequence
  chemically synthesized
ctctccctctgttagtgttg

SEQ ID NO: 18710 - DNA, 20 bp, Artificial Sequence
  chemically synthesized
ccctctgttagtgttgaaga

SEQ ID NO: 18711 - DNA, 20 bp, Artificial Sequence
  chemically synthesized
tgttgaagacagcataaatt

SEQ ID NO: 18712 - DNA, 20 bp, Artificial Sequence
  chemically synthesized
gttgaagacagcataaattg

SEQ ID NO: 18713 - DNA, 20 bp, Artificial Sequence
  chemically synthesized
ttgaagacagcataaattga

SEQ ID NO: 18714 - DNA, 20 bp, Artificial Sequence
  chemically synthesized
ttctttttttattcatcatg

SEQ ID NO: 18715 - DNA, 20 bp, Artificial Sequence
  chemically synthesized
tctttttttattcatcatgt

SEQ ID NO: 18716 - DNA, 20 bp, Artificial Sequence
  chemically synthesized
tttattcatcatgtaggtaa

SEQ ID NO: 18717 - DNA, 20 bp, Artificial Sequence
  chemically synthesized
atcatgtaggtaaaagcata

SEQ ID NO: 18718 - DNA, 20 bp, Artificial Sequence
  chemically synthesized
taaaagcatatggcctgttc

SEQ ID NO: 18719 - DNA, 20 bp, Artificial Sequence
  chemically synthesized
aaaagcatatggcctgttct

SEQ ID NO: 18720 - DNA, 20 bp, Artificial Sequence
  chemically synthesized
tgcaatccattttttaaact

SEQ ID NO: 18721 - DNA, 20 bp, Artificial Sequence
  chemically synthesized
ttaaacttggtgtttaccat

SEQ ID NO: 18722 - DNA, 20 bp, Artificial Sequence
  chemically synthesized
tggtgtttaccattggcttt

SEQ ID NO: 18723 - DNA, 20 bp, Artificial Sequence
  chemically synthesized
tttaccattggcttttagca

SEQ ID NO: 18724 - DNA, 20 bp, Artificial Sequence
  chemically synthesized
tttctgttttccacactgtc

SEQ ID NO: 18725 - DNA, 20 bp, Artificial Sequence
  chemically synthesized
cagcaaataccatttatatg

SEQ ID NO: 18726 - DNA, 20 bp, Artificial Sequence
  chemically synthesized
atttatatgtggcattgaat

SEQ ID NO: 18727 - DNA, 20 bp, Artificial Sequence
  chemically synthesized
aatgagatatgaaatgtttt

SEQ ID NO: 18728 - DNA, 20 bp, Artificial Sequence
  chemically synthesized
gagatatgaaatgttttcag

SEQ ID NO: 18729 - DNA, 20 bp, Artificial Sequence
  chemically synthesized
ttttcagaagcatgctgaaa

SEQ ID NO: 18730 - DNA, 20 bp, Artificial Sequence
  chemically synthesized
tttcagaagcatgctgaaaa

SEQ ID NO: 18731 - DNA, 20 bp, Artificial Sequence
  chemically synthesized
ttcagaagcatgctgaaaaa

SEQ ID NO: 18732 - DNA, 20 bp, Artificial Sequence
  chemically synthesized
atgctgaaaaagggcattca

SEQ ID NO: 18733 - DNA, 20 bp, Artificial Sequence
  chemically synthesized
gggcattcaaagttatcctt

SEQ ID NO: 18734 - DNA, 20 bp, Artificial Sequence
  chemically synthesized
cttttattatcccatgtgct

SEQ ID NO: 18735 - DNA, 20 bp, Artificial Sequence
  chemically synthesized
tttattatcccatgtgctca

SEQ ID NO: 18736 - DNA, 20 bp, Artificial Sequence
  chemically synthesized
ttatcccatgtgctcagagt

SEQ ID NO: 18737 - DNA, 20 bp, Artificial Sequence
  chemically synthesized
tatcccatgtgctcagagta

SEQ ID NO: 18738 - DNA, 20 bp, Artificial Sequence
  chemically synthesized
atcccatgtgctcagagtaa

SEQ ID NO: 18739 - DNA, 20 bp, Artificial Sequence
  chemically synthesized
tcccatgtgctcagagtaag

SEQ ID NO: 18740 - DNA, 20 bp, Artificial Sequence
  chemically synthesized
agagtaaggggcaaatgaat

SEQ ID NO: 18741 - DNA, 20 bp, Artificial Sequence
  chemically synthesized
tgtgaaatatgtgttccttg

SEQ ID NO: 18742 - DNA, 20 bp, Artificial Sequence
  chemically synthesized
gtgaaatatgtgttccttgt

SEQ ID NO: 18743 - DNA, 20 bp, Artificial Sequence
  chemically synthesized
tatgtgttccttgtaggaca

SEQ ID NO: 18744 - DNA, 20 bp, Artificial Sequence
  chemically synthesized
atgtgttccttgtaggacac

SEQ ID NO: 18745 - DNA, 20 bp, Artificial Sequence
  chemically synthesized
tgtaggacacaggcactctt

SEQ ID NO: 18746 - DNA, 20 bp, Artificial Sequence
  chemically synthesized
acaggcactcttgagatcta

SEQ ID NO: 18747 - DNA, 20 bp, Artificial Sequence
  chemically synthesized
agatctatagcttcaataaa

SEQ ID NO: 18748 - DNA, 20 bp, Artificial Sequence
  chemically synthesized
gatctatagcttcaataaaa

SEQ ID NO: 18749 - DNA, 20 bp, Artificial Sequence
  chemically synthesized
ctctttaatttataatgttt

SEQ ID NO: 18750 - DNA, 20 bp, Artificial Sequence
  chemically synthesized
tctttaatttataatgtttt

SEQ ID NO: 18751 - DNA, 20 bp, Artificial Sequence
  chemically synthesized
ctttaatttataatgttttg

SEQ ID NO: 18752 - DNA, 20 bp, Artificial Sequence
  chemically synthesized
aatgttttggggatttttaa

SEQ ID NO: 18753 - DNA, 20 bp, Artificial Sequence
  chemically synthesized
atgttttggggatttttaat

SEQ ID NO: 18754 - DNA, 20 bp, Artificial Sequence
  chemically synthesized
ttttaataggcatgctctgt

SEQ ID NO: 18755 - DNA, 20 bp, Artificial Sequence
  chemically synthesized
tttaataggcatgctctgta

SEQ ID NO: 18756 - DNA, 20 bp, Artificial Sequence
  chemically synthesized
ttaataggcatgctctgtaa

SEQ ID NO: 18757 - DNA, 20 bp, Artificial Sequence
  chemically synthesized
ggcatgctctgtaagggcac

SEQ ID NO: 18758 - DNA, 20 bp, Artificial Sequence
  chemically synthesized
tctgtaagggcactggtaat

SEQ ID NO: 18759 - DNA, 20 bp, Artificial Sequence
  chemically synthesized
tttgcatgctcttctatctc

SEQ ID NO: 18760 - DNA, 20 bp, Artificial Sequence
  chemically synthesized
aaaataaaatcttaaaaaac

SEQ ID NO: 18761 - DNA, 20 bp, Artificial Sequence
  chemically synthesized
aatcttaaaaaacaagaaaa

SEQ ID NO: 18762 - DNA, 20 bp, Artificial Sequence
  chemically synthesized
aaaaaaacaaaaacaaaaac

SEQ ID NO: 18763 - DNA, 20 bp, Artificial Sequence
  chemically synthesized
aaaaaacaaaaacaaaaaca

SEQ ID NO: 18764 - DNA, 20 bp, Artificial Sequence
  chemically synthesized
aaacaaaaacaaggaacata

SEQ ID NO: 18765 - DNA, 20 bp, Artificial Sequence
  chemically synthesized
aaaacaaggaacataaagtt

SEQ ID NO: 18766 - DNA, 20 bp, Artificial Sequence
  chemically synthesized
ttagccctaacccaacccaa

SEQ ID NO: 18767 - DNA, 20 bp, Artificial Sequence
  chemically synthesized
cccaacccaaaagcaaataa

SEQ ID NO: 18768 - DNA, 20 bp, Artificial Sequence
  chemically synthesized
ccaacccaaaagcaaataac

SEQ ID NO: 18769 - DNA, 20 bp, Artificial Sequence
  chemically synthesized
caaataacaggccgaatgaa

SEQ ID NO: 18770 - DNA, 20 bp, Artificial Sequence
  chemically synthesized
ataacaggccgaatgaatgg

SEQ ID NO: 18771 - DNA, 20 bp, Artificial Sequence
  chemically synthesized
ccgaatgaatggcagccccc

SEQ ID NO: 18772 - DNA, 20 bp, Artificial Sequence
  chemically synthesized
gaatgaatggcagcccccca

SEQ ID NO: 18773 - DNA, 20 bp, Artificial Sequence
  chemically synthesized
aatgaatggcagccccccag

SEQ ID NO: 18774 - DNA, 20 bp, Artificial Sequence
  chemically synthesized
tccattattacctgaaataa

SEQ ID NO: 18775 - DNA, 20 bp, Artificial Sequence
  chemically synthesized
aagcatgataacattcatgc

SEQ ID NO: 18776 - DNA, 20 bp, Artificial Sequence
  chemically synthesized
gcatgataacattcatgcca

SEQ ID NO: 18777 - DNA, 20 bp, Artificial Sequence
  chemically synthesized
gataacattcatgccagaga

SEQ ID NO: 18778 - DNA, 20 bp, Artificial Sequence
  chemically synthesized
ataacattcatgccagagat

SEQ ID NO: 18779 - DNA, 20 bp, Artificial Sequence
  chemically synthesized
aggtgacaaaattatgtatt

SEQ ID NO: 18780 - DNA, 20 bp, Artificial Sequence
  chemically synthesized
aaattatgtattcagacatg

SEQ ID NO: 18781 - DNA, 20 bp, Artificial Sequence
  chemically synthesized
atgtattcagacatgaagtt

SEQ ID NO: 18782 - DNA, 20 bp, Artificial Sequence
  chemically synthesized
tgtattcagacatgaagttt

SEQ ID NO: 18783 - DNA, 20 bp, Artificial Sequence
  chemically synthesized
acatgaagtttaggatttca

SEQ ID NO: 18784 - DNA, 20 bp, Artificial Sequence
  chemically synthesized
attgtgttgtgcaaatgtat

SEQ ID NO: 18785 - DNA, 20 bp, Artificial Sequence
  chemically synthesized
gttgtattgttaatgcatga

SEQ ID NO: 18786 - DNA, 20 bp, Artificial Sequence
  chemically synthesized
ttgtattgttaatgcatgat

SEQ ID NO: 18787 - DNA, 20 bp, Artificial Sequence
  chemically synthesized
tattgttaatgcatgatagg

SEQ ID NO: 18788 - DNA, 20 bp, Artificial Sequence
  chemically synthesized
gcatgataggaagctgccgc

SEQ ID NO: 18789 - DNA, 20 bp, Artificial Sequence
  chemically synthesized
catgataggaagctgccgct

SEQ ID NO: 18790 - DNA, 20 bp, Artificial Sequence
  chemically synthesized
ataggaagctgccgctagga

SEQ ID NO: 18791 - DNA, 20 bp, Artificial Sequence
  chemically synthesized
agctgccgctaggacagtct

SEQ ID NO: 18792 - DNA, 20 bp, Artificial Sequence
  chemically synthesized
acagtcttggctcactaatg

SEQ ID NO: 18793 - DNA, 20 bp, Artificial Sequence
  chemically synthesized
tcttggctcactaatgcggt

SEQ ID NO: 18794 - DNA, 20 bp, Artificial Sequence
  chemically synthesized
ctgtgtcacaatgtgatata

SEQ ID NO: 18795 - DNA, 20 bp, Artificial Sequence
  chemically synthesized
tatatagattatatttacca

SEQ ID NO: 18796 - DNA, 20 bp, Artificial Sequence
  chemically synthesized
ggcatattttgtttgcgaaa

SEQ ID NO: 18797 - DNA, 20 bp, Artificial Sequence
  chemically synthesized
gcatattttgtttgcgaaat

SEQ ID NO: 18798 - DNA, 20 bp, Artificial Sequence
  chemically synthesized
atattttgtttgcgaaatgg

SEQ ID NO: 18799 - DNA, 20 bp, Artificial Sequence
  chemically synthesized
ttttgtttgcgaaatgggag

SEQ ID NO: 18800 - DNA, 20 bp, Artificial Sequence
  chemically synthesized
atgggagcggatgataaatg

SEQ ID NO: 18801 - DNA, 20 bp, Artificial Sequence
  chemically synthesized
tgataaatgaagataccctc

SEQ ID NO: 18802 - DNA, 20 bp, Artificial Sequence
  chemically synthesized
ataccctccagttttcacac

SEQ ID NO: 18803 - DNA, 20 bp, Artificial Sequence
  chemically synthesized
agttttcacactagttcctg

SEQ ID NO: 18804 - DNA, 20 bp, Artificial Sequence
  chemically synthesized
tcacactagttcctgtggtc

SEQ ID NO: 18805 - DNA, 20 bp, Artificial Sequence
  chemically synthesized
acactagttcctgtggtccg

SEQ ID NO: 18806 - DNA, 20 bp, Artificial Sequence
  chemically synthesized
ccggagtctctcaaacaata

SEQ ID NO: 18807 - DNA, 20 bp, Artificial Sequence
  chemically synthesized
caataaagcacccctgataa

SEQ ID NO: 18808 - DNA, 20 bp, Artificial Sequence
  chemically synthesized
ataaagcacccctgataatg

SEQ ID NO: 18809 - DNA, 20 bp, Artificial Sequence
  chemically synthesized
aaagcacccctgataatgga

SEQ ID NO: 18810 - DNA, 20 bp, Artificial Sequence
  chemically synthesized
aagcacccctgataatggag

SEQ ID NO: 18811 - DNA, 20 bp, Artificial Sequence
  chemically synthesized
tgataatggagaggtattta

SEQ ID NO: 18812 - DNA, 20 bp, Artificial Sequence
  chemically synthesized
gataatggagaggtatttat

SEQ ID NO: 18813 - DNA, 20 bp, Artificial Sequence
  chemically synthesized
tgggaacataattgacttca

SEQ ID NO: 18814 - DNA, 20 bp, Artificial Sequence
  chemically synthesized
cataattgacttcaaagttt

SEQ ID NO: 18815 - DNA, 20 bp, Artificial Sequence
  chemically synthesized
acttcaaagttttagatctc

SEQ ID NO: 18816 - DNA, 20 bp, Artificial Sequence
  chemically synthesized
aagttttagatctctggctg

SEQ ID NO: 18817 - DNA, 20 bp, Artificial Sequence
  chemically synthesized
tagatctctggctgaagttt

SEQ ID NO: 18818 - DNA, 20 bp, Artificial Sequence
  chemically synthesized
tctctggctgaagtttaaga

SEQ ID NO: 18819 - DNA, 20 bp, Artificial Sequence
  chemically synthesized
ctctggctgaagtttaagat

SEQ ID NO: 18820 - DNA, 20 bp, Artificial Sequence
  chemically synthesized
ggctgaagtttaagatggga

SEQ ID NO: 18821 - DNA, 20 bp, Artificial Sequence
  chemically synthesized
tacattaatgtctgtgctta

SEQ ID NO: 18822 - DNA, 20 bp, Artificial Sequence
  chemically synthesized
ctgtgcttaaagctcctatt

SEQ ID NO: 18823 - DNA, 20 bp, Artificial Sequence
  chemically synthesized
tttggcttaaataaattatt

SEQ ID NO: 18824 - DNA, 20 bp, Artificial Sequence
  chemically synthesized
ttggcttaaataaattattt

SEQ ID NO: 18825 - DNA, 20 bp, Artificial Sequence
  chemically synthesized
tggcttaaataaattattta

SEQ ID NO: 18826 - DNA, 20 bp, Artificial Sequence
  chemically synthesized
agggtttactgcttaaacct

SEQ ID NO: 18827 - DNA, 20 bp, Artificial Sequence
  chemically synthesized
ttggtcaattcttgaacgtt

SEQ ID NO: 18828 - DNA, 20 bp, Artificial Sequence
  chemically synthesized
tggtcaattcttgaacgttt

SEQ ID NO: 18829 - DNA, 20 bp, Artificial Sequence
  chemically synthesized
caattcttgaacgtttgggc

SEQ ID NO: 18830 - DNA, 20 bp, Artificial Sequence
  chemically synthesized
cttgaacgtttgggctagtt

SEQ ID NO: 18831 - DNA, 20 bp, Artificial Sequence
  chemically synthesized
gggctagttaagtaattttc

SEQ ID NO: 18832 - DNA, 20 bp, Artificial Sequence
  chemically synthesized
tccagtgactttctgtgcct

SEQ ID NO: 18833 - DNA, 20 bp, Artificial Sequence
  chemically synthesized
ggtgattcatttacttgatt

SEQ ID NO: 18834 - DNA, 20 bp, Artificial Sequence
  chemically synthesized
gatttctaaatgtatttctc

SEQ ID NO: 18835 - DNA, 20 bp, Artificial Sequence
  chemically synthesized
tgtatttctcaagttttgcc

SEQ ID NO: 18836 - DNA, 20 bp, Artificial Sequence
  chemically synthesized
caatgaatgattttgcttac

SEQ ID NO: 18837 - DNA, 20 bp, Artificial Sequence
  chemically synthesized
atgaatgattttgcttactg

SEQ ID NO: 18838 - DNA, 20 bp, Artificial Sequence
  chemically synthesized
ttgcttactggagtcttgtg

SEQ ID NO: 18839 - DNA, 20 bp, Artificial Sequence
  chemically synthesized
cttgtgtggtacacctataa

SEQ ID NO: 18840 - DNA, 20 bp, Artificial Sequence
  chemically synthesized
ttgtgtggtacacctataaa

SEQ ID NO: 18841 - DNA, 20 bp, Artificial Sequence
  chemically synthesized
cacatcaacactgtcatcat

SEQ ID NO: 18842 - DNA, 20 bp, Artificial Sequence
  chemically synthesized
aacactgtcatcataagata

SEQ ID NO: 18843 - DNA, 20 bp, Artificial Sequence
  chemically synthesized
tgcatgtatgaatatatata

SEQ ID NO: 18844 - DNA, 20 bp, Artificial Sequence
  chemically synthesized
gttgtgtgcctgtgtgtgtg

SEQ ID NO: 18845 - DNA, 20 bp, Artificial Sequence
  chemically synthesized
tgtgcctgtgtgtgtgtaga

SEQ ID NO: 18846 - DNA, 20 bp, Artificial Sequence
  chemically synthesized
gtgcctgtgtgtgtgtagaa

SEQ ID NO: 18847 - DNA, 20 bp, Artificial Sequence
  chemically synthesized
tgcctgtgtgtgtgtagaaa

SEQ ID NO: 18848 - DNA, 20 bp, Artificial Sequence
  chemically synthesized
cctgtgtgtgtgtagaaagg

SEQ ID NO: 18849 - DNA, 20 bp, Artificial Sequence
  chemically synthesized
tgtgtgtgtgtagaaaggga

SEQ ID NO: 18850 - DNA, 20 bp, Artificial Sequence
  chemically synthesized
tgtgtgtgtagaaagggaga

SEQ ID NO: 18851 - DNA, 20 bp, Artificial Sequence
  chemically synthesized
tgtgtgtagaaagggagaga

SEQ ID NO: 18852 - DNA, 20 bp, Artificial Sequence
  chemically synthesized
tgtgtagaaagggagagaga

SEQ ID NO: 18853 - DNA, 20 bp, Artificial Sequence
  chemically synthesized
agaaagggagagagagagaa

SEQ ID NO: 18854 - DNA, 20 bp, Artificial Sequence
  chemically synthesized
gaaagggagagagagagaat

SEQ ID NO: 18855 - DNA, 20 bp, Artificial Sequence
  chemically synthesized
gggagagagagagaatagga

SEQ ID NO: 18856 - DNA, 20 bp, Artificial Sequence
  chemically synthesized
agagagaataggaaagtctt

SEQ ID NO: 18857 - DNA, 20 bp, Artificial Sequence
  chemically synthesized
atgattccatcaaatcaata

SEQ ID NO: 18858 - DNA, 20 bp, Artificial Sequence
  chemically synthesized
attccatcaaatcaatatag

SEQ ID NO: 18859 - DNA, 20 bp, Artificial Sequence
  chemically synthesized
atcaatatagaagtttttga

SEQ ID NO: 18860 - DNA, 20 bp, Artificial Sequence
  chemically synthesized
gtttttgaaagctatccatg

SEQ ID NO: 18861 - DNA, 20 bp, Artificial Sequence
  chemically synthesized
ttttcatcaaaatctgactt

SEQ ID NO: 18862 - DNA, 20 bp, Artificial Sequence
  chemically synthesized
tctccatactatttatctga

SEQ ID NO: 18863 - DNA, 20 bp, Artificial Sequence
  chemically synthesized
ctgaaagtctgttgttcaca

SEQ ID NO: 18864 - DNA, 20 bp, Artificial Sequence
  chemically synthesized
gtctgttgttcacatagcgc

SEQ ID NO: 18865 - DNA, 20 bp, Artificial Sequence
  chemically synthesized
tgttcacatagcgctggatt

SEQ ID NO: 18866 - DNA, 20 bp, Artificial Sequence
  chemically synthesized
gttcacatagcgctggattg

SEQ ID NO: 18867 - DNA, 20 bp, Artificial Sequence
  chemically synthesized
tagcgctggattgaggatca

SEQ ID NO: 18868 - DNA, 20 bp, Artificial Sequence
  chemically synthesized
cgctggattgaggatcatag

SEQ ID NO: 18869 - DNA, 20 bp, Artificial Sequence
  chemically synthesized
gaggatcatagtggcaaatt

SEQ ID NO: 18870 - DNA, 20 bp, Artificial Sequence
  chemically synthesized
aggatcatagtggcaaattt

SEQ ID NO: 18871 - DNA, 20 bp, Artificial Sequence
  chemically synthesized
gatcatagtggcaaatttag

SEQ ID NO: 18872 - DNA, 20 bp, Artificial Sequence
  chemically synthesized
agtggcaaatttaggagcaa

SEQ ID NO: 18873 - DNA, 20 bp, Artificial Sequence
  chemically synthesized
aatttaggagcaacagtccc

SEQ ID NO: 18874 - DNA, 20 bp, Artificial Sequence
  chemically synthesized
ttaggagcaacagtcccaag

SEQ ID NO: 18875 - DNA, 20 bp, Artificial Sequence
  chemically synthesized
taggagcaacagtcccaagc

SEQ ID NO: 18876 - DNA, 20 bp, Artificial Sequence
  chemically synthesized
acagtcccaagcaggaatcc

SEQ ID NO: 18877 - DNA, 20 bp, Artificial Sequence
  chemically synthesized
tcccaagcaggaatcctgga

SEQ ID NO: 18878 - DNA, 20 bp, Artificial Sequence
  chemically synthesized
caagcaggaatcctggatgg

SEQ ID NO: 18879 - DNA, 20 bp, Artificial Sequence
  chemically synthesized
aagcaggaatcctggatggc

SEQ ID NO: 18880 - DNA, 20 bp, Artificial Sequence
  chemically synthesized
ctgtcctttgtgcctcccct

SEQ ID NO: 18881 - DNA, 20 bp, Artificial Sequence
  chemically synthesized
ctttgtgcctcccctgagtt

SEQ ID NO: 18882 - DNA, 20 bp, Artificial Sequence
  chemically synthesized
tgtgcctcccctgagttgag

SEQ ID NO: 18883 - DNA, 20 bp, Artificial Sequence
  chemically synthesized
ctcccctgagttgagaagac

SEQ ID NO: 18884 - DNA, 20 bp, Artificial Sequence
  chemically synthesized
actggtgtttattctttctc

SEQ ID NO: 18885 - DNA, 20 bp, Artificial Sequence
  chemically synthesized
ctggtgtttattctttctct

SEQ ID NO: 18886 - DNA, 20 bp, Artificial Sequence
  chemically synthesized
cttgaaatctcccttcttta

SEQ ID NO: 18887 - DNA, 20 bp, Artificial Sequence
  chemically synthesized
cttctttacggttctgccat

SEQ ID NO: 18888 - DNA, 20 bp, Artificial Sequence
  chemically synthesized
ctgtgacctgcctctgcatc

SEQ ID NO: 18889 - DNA, 20 bp, Artificial Sequence
  chemically synthesized
tgcctctgcatctggttaaa

SEQ ID NO: 18890 - DNA, 20 bp, Artificial Sequence
  chemically synthesized
gcatctggttaaatggactt

SEQ ID NO: 18891 - DNA, 20 bp, Artificial Sequence
  chemically synthesized
ggacttcagtaatctgtaca

SEQ ID NO: 18892 - DNA, 20 bp, Artificial Sequence
  chemically synthesized
ttacttattttatatcctga

SEQ ID NO: 18893 - DNA, 20 bp, Artificial Sequence
  chemically synthesized
tttatatcctgaaagatatt

SEQ ID NO: 18894 - DNA, 20 bp, Artificial Sequence
  chemically synthesized
tgaaagatattaagtccaac

SEQ ID NO: 18895 - DNA, 20 bp, Artificial Sequence
  chemically synthesized
gtccaacaagcttttaccca

SEQ ID NO: 18896 - DNA, 20 bp, Artificial Sequence
  chemically synthesized
ccaacaagcttttacccaca

SEQ ID NO: 18897 - DNA, 20 bp, Artificial Sequence
  chemically synthesized
gcttttacccacagagtcta

SEQ ID NO: 18898 - DNA, 20 bp, Artificial Sequence
  chemically synthesized
ttttacccacagagtctaca

SEQ ID NO: 18899 - DNA, 20 bp, Artificial Sequence
  chemically synthesized
cacagagtctacagagaaaa

SEQ ID NO: 18900 - DNA, 20 bp, Artificial Sequence
  chemically synthesized
gagtctacagagaaaacggc

SEQ ID NO: 18901 - DNA, 20 bp, Artificial Sequence
  chemically synthesized
agtctacagagaaaacggcc

SEQ ID NO: 18902 - DNA, 20 bp, Artificial Sequence
  chemically synthesized
tttcaatctctgtgtctctc

SEQ ID NO: 18903 - DNA, 20 bp, Artificial Sequence
  chemically synthesized
tcaatctctgtgtctctctg

SEQ ID NO: 18904 - DNA, 20 bp, Artificial Sequence
  chemically synthesized
tctgtgtctctctggagcac

SEQ ID NO: 18905 - DNA, 20 bp, Artificial Sequence
  chemically synthesized
tctctctggagcactagttc

SEQ ID NO: 18906 - DNA, 20 bp, Artificial Sequence
  chemically synthesized
tctctggagcactagttcca

SEQ ID NO: 18907 - DNA, 20 bp, Artificial Sequence
  chemically synthesized
ctctggagcactagttccag

SEQ ID NO: 18908 - DNA, 20 bp, Artificial Sequence
  chemically synthesized
tagttccagaggctgatcaa

SEQ ID NO: 18909 - DNA, 20 bp, Artificial Sequence
  chemically synthesized
agttccagaggctgatcaat

SEQ ID NO: 18910 - DNA, 20 bp, Artificial Sequence
  chemically synthesized
ctgatcaataggttttattg

SEQ ID NO: 18911 - DNA, 20 bp, Artificial Sequence
  chemically synthesized
gtagacctcactgtctctaa

SEQ ID NO: 18912 - DNA, 20 bp, Artificial Sequence
  chemically synthesized
gaccttatcctgtctaaaaa

SEQ ID NO: 18913 - DNA, 20 bp, Artificial Sequence
  chemically synthesized
atagtatttgctcttgcctg

SEQ ID NO: 18914 - DNA, 20 bp, Artificial Sequence
  chemically synthesized
ttgacctgtgaaaacccatt

SEQ ID NO: 18915 - DNA, 20 bp, Artificial Sequence
  chemically synthesized
tggaacataactgacatatc

SEQ ID NO: 18916 - DNA, 20 bp, Artificial Sequence
  chemically synthesized
acataactgacatatctagt

SEQ ID NO: 18917 - DNA, 20 bp, Artificial Sequence
  chemically synthesized
atctagtcagctgtatatcc

SEQ ID NO: 18918 - DNA, 20 bp, Artificial Sequence
  chemically synthesized
ctctgtgaatgaattctgtg

SEQ ID NO: 18919 - DNA, 20 bp, Artificial Sequence
  chemically synthesized
gaattctgtgcagaaccgtc

SEQ ID NO: 18920 - DNA, 20 bp, Artificial Sequence
  chemically synthesized
aattctgtgcagaaccgtcc

SEQ ID NO: 18921 - DNA, 20 bp, Artificial Sequence
  chemically synthesized
ttctgtgcagaaccgtccag

SEQ ID NO: 18922 - DNA, 20 bp, Artificial Sequence
  chemically synthesized
ccaggagaacactttcttcc

SEQ ID NO: 18923 - DNA, 20 bp, Artificial Sequence
  chemically synthesized
cttccaagacaaatgaattc

SEQ ID NO: 18924 - DNA, 20 bp, Artificial Sequence
  chemically synthesized
tgaattccagttctgaacac

SEQ ID NO: 18925 - DNA, 20 bp, Artificial Sequence
  chemically synthesized
gaattccagttctgaacact

SEQ ID NO: 18926 - DNA, 20 bp, Artificial Sequence
  chemically synthesized
attccagttctgaacactgg

SEQ ID NO: 18927 - DNA, 20 bp, Artificial Sequence
  chemically synthesized
ctgggagtgcacctgcttgt

SEQ ID NO: 18928 - DNA, 20 bp, Artificial Sequence
  chemically synthesized
gtgcacctgcttgtcggatg

SEQ ID NO: 18929 - DNA, 20 bp, Artificial Sequence
  chemically synthesized
ctgcttgtcggatgtggtga

SEQ ID NO: 18930 - DNA, 20 bp, Artificial Sequence
  chemically synthesized
tgcttgtcggatgtggtgat

SEQ ID NO: 18931 - DNA, 20 bp, Artificial Sequence
  chemically synthesized
ggatgtggtgatgggccaca

SEQ ID NO: 18932 - DNA, 20 bp, Artificial Sequence
  chemically synthesized
tgtggtgatgggccacatgg

SEQ ID NO: 18933 - DNA, 20 bp, Artificial Sequence
  chemically synthesized
gtggtgatgggccacatggt

SEQ ID NO: 18934 - DNA, 20 bp, Artificial Sequence
  chemically synthesized
tggtgatgggccacatggtg

SEQ ID NO: 18935 - DNA, 20 bp, Artificial Sequence
  chemically synthesized
gtgatgggccacatggtggg

SEQ ID NO: 18936 - DNA, 20 bp, Artificial Sequence
  chemically synthesized
tgggccacatggtggggagt

SEQ ID NO: 18937 - DNA, 20 bp, Artificial Sequence
  chemically synthesized
gggccacatggtggggagtg

SEQ ID NO: 18938 - DNA, 20 bp, Artificial Sequence
  chemically synthesized
ggccacatggtggggagtga

SEQ ID NO: 18939 - DNA, 20 bp, Artificial Sequence
  chemically synthesized
ccacatggtggggagtgagg

SEQ ID NO: 18940 - DNA, 20 bp, Artificial Sequence
  chemically synthesized
ggtggggagtgagggagact

SEQ ID NO: 18941 - DNA, 20 bp, Artificial Sequence
  chemically synthesized
gtggggagtgagggagactc

SEQ ID NO: 18942 - DNA, 20 bp, Artificial Sequence
  chemically synthesized
tggggagtgagggagactca

SEQ ID NO: 18943 - DNA, 20 bp, Artificial Sequence
  chemically synthesized
tgagggagactcagggcctg

SEQ ID NO: 18944 - DNA, 20 bp, Artificial Sequence
  chemically synthesized
gagggagactcagggcctgt

SEQ ID NO: 18945 - DNA, 20 bp, Artificial Sequence
  chemically synthesized
agggagactcagggcctgtg

SEQ ID NO: 18946 - DNA, 20 bp, Artificial Sequence
  chemically synthesized
gagactcagggcctgtgggg

SEQ ID NO: 18947 - DNA, 20 bp, Artificial Sequence
  chemically synthesized
ggcctgtggggcagtcgatg

SEQ ID NO: 18948 - DNA, 20 bp, Artificial Sequence
  chemically synthesized
gcctgtggggcagtcgatgt

SEQ ID NO: 18949 - DNA, 20 bp, Artificial Sequence
  chemically synthesized
ctgtggggcagtcgatgtgg

SEQ ID NO: 18950 - DNA, 20 bp, Artificial Sequence
  chemically synthesized
tgtggggcagtcgatgtggg

SEQ ID NO: 18951 - DNA, 20 bp, Artificial Sequence
  chemically synthesized
tcgatgtgggaggactgtca

SEQ ID NO: 18952 - DNA, 20 bp, Artificial Sequence
  chemically synthesized
gatgtgggaggactgtcaca

SEQ ID NO: 18953 - DNA, 20 bp, Artificial Sequence
  chemically synthesized
aggactgtcacagagactct

SEQ ID NO: 18954 - DNA, 20 bp, Artificial Sequence
  chemically synthesized
gactgtcacagagactctca

SEQ ID NO: 18955 - DNA, 20 bp, Artificial Sequence
  chemically synthesized
actgtcacagagactctcag

SEQ ID NO: 18956 - DNA, 20 bp, Artificial Sequence
  chemically synthesized
ctgtcacagagactctcaga

SEQ ID NO: 18957 - DNA, 20 bp, Artificial Sequence
  chemically synthesized
agactctcagagggtgcatt

SEQ ID NO: 18958 - DNA, 20 bp, Artificial Sequence
  chemically synthesized
agggtgcattcagccctgaa

SEQ ID NO: 18959 - DNA, 20 bp, Artificial Sequence
  chemically synthesized
gggtgcattcagccctgaac

SEQ ID NO: 18960 - DNA, 20 bp, Artificial Sequence
  chemically synthesized
ggtgcattcagccctgaaca

SEQ ID NO: 18961 - DNA, 20 bp, Artificial Sequence
  chemically synthesized
attcagccctgaacagggca

SEQ ID NO: 18962 - DNA, 20 bp, Artificial Sequence
  chemically synthesized
ttcagccctgaacagggcaa

SEQ ID NO: 18963 - DNA, 20 bp, Artificial Sequence
  chemically synthesized
tgaacagggcaaaggactgc

SEQ ID NO: 18964 - DNA, 20 bp, Artificial Sequence
  chemically synthesized
gaacagggcaaaggactgca

SEQ ID NO: 18965 - DNA, 20 bp, Artificial Sequence
  chemically synthesized
aacagggcaaaggactgcaa

SEQ ID NO: 18966 - DNA, 20 bp, Artificial Sequence
  chemically synthesized
acagggcaaaggactgcaag

SEQ ID NO: 18967 - DNA, 20 bp, Artificial Sequence
  chemically synthesized
gggcaaaggactgcaagggg

SEQ ID NO: 18968 - DNA, 20 bp, Artificial Sequence
  chemically synthesized
ggcaaaggactgcaaggggc

SEQ ID NO: 18969 - DNA, 20 bp, Artificial Sequence
  chemically synthesized
caaaggactgcaaggggcag

SEQ ID NO: 18970 - DNA, 20 bp, Artificial Sequence
  chemically synthesized
gactgcaaggggcaggagct

SEQ ID NO: 18971 - DNA, 20 bp, Artificial Sequence
  chemically synthesized
actgcaaggggcaggagctt

SEQ ID NO: 18972 - DNA, 20 bp, Artificial Sequence
  chemically synthesized
aggagcttgggctgacatgc

SEQ ID NO: 18973 - DNA, 20 bp, Artificial Sequence
  chemically synthesized
ggagcttgggctgacatgca

SEQ ID NO: 18974 - DNA, 20 bp, Artificial Sequence
  chemically synthesized
gcttgggctgacatgcaagg

SEQ ID NO: 18975 - DNA, 20 bp, Artificial Sequence
  chemically synthesized
catgcaaggtggctttacac

SEQ ID NO: 18976 - DNA, 20 bp, Artificial Sequence
  chemically synthesized
atgcaaggtggctttacaca

SEQ ID NO: 18977 - DNA, 20 bp, Artificial Sequence
  chemically synthesized
gctttacacaaggccctttt

SEQ ID NO: 18978 - DNA, 20 bp, Artificial Sequence
  chemically synthesized
tttacacaaggcccttttta

SEQ ID NO: 18979 - DNA, 20 bp, Artificial Sequence
  chemically synthesized
tacacaaggccctttttaga

SEQ ID NO: 18980 - DNA, 20 bp, Artificial Sequence
  chemically synthesized
ttagagagtgtgattctctg

SEQ ID NO: 18981 - DNA, 20 bp, Artificial Sequence
  chemically synthesized
tgattctctgaagcttttct

SEQ ID NO: 18982 - DNA, 20 bp, Artificial Sequence
  chemically synthesized
ttctctgaagcttttcttgg

SEQ ID NO: 18983 - DNA, 20 bp, Artificial Sequence
  chemically synthesized
gaagcttttcttggcagctt

SEQ ID NO: 18984 - DNA, 20 bp, Artificial Sequence
  chemically synthesized
gcttcagtcttgaacctcac

SEQ ID NO: 18985 - DNA, 20 bp, Artificial Sequence
  chemically synthesized
tcagtcttgaacctcactgg

SEQ ID NO: 18986 - DNA, 20 bp, Artificial Sequence
  chemically synthesized
cagtcttgaacctcactgga

SEQ ID NO: 18987 - DNA, 20 bp, Artificial Sequence
  chemically synthesized
agtcttgaacctcactggaa

SEQ ID NO: 18988 - DNA, 20 bp, Artificial Sequence
  chemically synthesized
ggatcctccaaaacatgacc

SEQ ID NO: 18989 - DNA, 20 bp, Artificial Sequence
  chemically synthesized
cctccaaaacatgacccaga

SEQ ID NO: 18990 - DNA, 20 bp, Artificial Sequence
  chemically synthesized
caaaacatgacccagatgga

SEQ ID NO: 18991 - DNA, 20 bp, Artificial Sequence
  chemically synthesized
aacatgacccagatggaaag

SEQ ID NO: 18992 - DNA, 20 bp, Artificial Sequence
  chemically synthesized
agatggaaagaagtatttct

SEQ ID NO: 18993 - DNA, 20 bp, Artificial Sequence
  chemically synthesized
tttaaaataactcccctatt

SEQ ID NO: 18994 - DNA, 20 bp, Artificial Sequence
  chemically synthesized
aactcccctatttggtaata

SEQ ID NO: 18995 - DNA, 20 bp, Artificial Sequence
  chemically synthesized
actcccctatttggtaatac

SEQ ID NO: 18996 - DNA, 20 bp, Artificial Sequence
  chemically synthesized
atttgtgactttattatttt

SEQ ID NO: 18997 - DNA, 20 bp, Artificial Sequence
  chemically synthesized
tttgtgactttattattttt

SEQ ID NO: 18998 - DNA, 20 bp, Artificial Sequence
  chemically synthesized
attatttttaggtgtgataa

SEQ ID NO: 18999 - DNA, 20 bp, Artificial Sequence
  chemically synthesized
taggtgtgataatggttttg

SEQ ID NO: 19000 - DNA, 20 bp, Artificial Sequence
  chemically synthesized
ggttttgcagttgtatttaa

SEQ ID NO: 19001 - DNA, 20 bp, Artificial Sequence
  chemically synthesized
gtatttaaaagaaaaaaaac

SEQ ID NO: 19002 - DNA, 20 bp, Artificial Sequence
  chemically synthesized
ctatgtttaaaaaatacata

SEQ ID NO: 19003 - DNA, 20 bp, Artificial Sequence
  chemically synthesized
atgtttaaaaaatacataca

SEQ ID NO: 19004 - DNA, 20 bp, Artificial Sequence
  chemically synthesized
tgtttaaaaaatacatacag

SEQ ID NO: 19005 - DNA, 20 bp, Artificial Sequence
  chemically synthesized
tgatgaaatgatatgacgtc

SEQ ID NO: 19006 - DNA, 20 bp, Artificial Sequence
  chemically synthesized
gatgaaatgatatgacgtct

SEQ ID NO: 19007 - DNA, 20 bp, Artificial Sequence
  chemically synthesized
gatcaacttaaataataaaa

SEQ ID NO: 19008 - DNA, 20 bp, Artificial Sequence
  chemically synthesized
atcaacttaaataataaaat

SEQ ID NO: 19009 - DNA, 20 bp, Artificial Sequence
  chemically synthesized
acttaaataataaaatgggc

SEQ ID NO: 19010 - DNA, 20 bp, Artificial Sequence
  chemically synthesized
cttaaataataaaatgggct

SEQ ID NO: 19011 - DNA, 20 bp, Artificial Sequence
  chemically synthesized
ttaaataataaaatgggcta

SEQ ID NO: 19012 - DNA, 20 bp, Artificial Sequence
  chemically synthesized
aaataataaaatgggctagg

SEQ ID NO: 19013 - DNA, 20 bp, Artificial Sequence
  chemically synthesized
aataataaaatgggctaggg

SEQ ID NO: 19014 - DNA, 20 bp, Artificial Sequence
  chemically synthesized
aaaatgggctagggaggcga

SEQ ID NO: 19015 - DNA, 20 bp, Artificial Sequence
  chemically synthesized
aaatgggctagggaggcgat

SEQ ID NO: 19016 - DNA, 20 bp, Artificial Sequence
  chemically synthesized
aatgggctagggaggcgata

SEQ ID NO: 19017 - DNA, 20 bp, Artificial Sequence
  chemically synthesized
ctagggaggcgatagggtta

SEQ ID NO: 19018 - DNA, 20 bp, Artificial Sequence
  chemically synthesized
gggaggcgatagggttacag

SEQ ID NO: 19019 - DNA, 20 bp, Artificial Sequence
  chemically synthesized
gcgatagggttacagaagac

SEQ ID NO: 19020 - DNA, 20 bp, Artificial Sequence
  chemically synthesized
cagaagacaagaatgactgt

SEQ ID NO: 19021 - DNA, 20 bp, Artificial Sequence
  chemically synthesized
acaagaatgactgtgagctg

SEQ ID NO: 19022 - DNA, 20 bp, Artificial Sequence
  chemically synthesized
agaatgactgtgagctgtgg

SEQ ID NO: 19023 - DNA, 20 bp, Artificial Sequence
  chemically synthesized
tgactgtgagctgtggtggt

SEQ ID NO: 19024 - DNA, 20 bp, Artificial Sequence
  chemically synthesized
actgtgagctgtggtggttg

SEQ ID NO: 19025 - DNA, 20 bp, Artificial Sequence
  chemically synthesized
tgagctgtggtggttggagc

SEQ ID NO: 19026 - DNA, 20 bp, Artificial Sequence
  chemically synthesized
gctgtggtggttggagctgg

SEQ ID NO: 19027 - DNA, 20 bp, Artificial Sequence
  chemically synthesized
gtggttggagctggaagatg

SEQ ID NO: 19028 - DNA, 20 bp, Artificial Sequence
  chemically synthesized
ggagctggaagatgtggact

SEQ ID NO: 19029 - DNA, 20 bp, Artificial Sequence
  chemically synthesized
gagctggaagatgtggactt

SEQ ID NO: 19030 - DNA, 20 bp, Artificial Sequence
  chemically synthesized
agctggaagatgtggacttg

SEQ ID NO: 19031 - DNA, 20 bp, Artificial Sequence
  chemically synthesized
taacattctctctacttttg

SEQ ID NO: 19032 - DNA, 20 bp, Artificial Sequence
  chemically synthesized
tctctacttttgtagtattt

SEQ ID NO: 19033 - DNA, 20 bp, Artificial Sequence
  chemically synthesized
tgtagtatttgagatttttc

SEQ ID NO: 19034 - DNA, 20 bp, Artificial Sequence
  chemically synthesized
tgagatttttccagaaaata

SEQ ID NO: 19035 - DNA, 20 bp, Artificial Sequence
  chemically synthesized
gagatttttccagaaaataa

SEQ ID NO: 19036 - DNA, 20 bp, Artificial Sequence
  chemically synthesized
aaataaaggtattgcctgac

SEQ ID NO: 19037 - DNA, 20 bp, Artificial Sequence
  chemically synthesized
taaaggtattgcctgactgg

SEQ ID NO: 19038 - DNA, 20 bp, Artificial Sequence
  chemically synthesized
aaggtattgcctgactggtg

SEQ ID NO: 19039 - DNA, 20 bp, Artificial Sequence
  chemically synthesized
ggtattgcctgactggtgga

SEQ ID NO: 19040 - DNA, 20 bp, Artificial Sequence
  chemically synthesized
attgcctgactggtggagag

SEQ ID NO: 19041 - DNA, 20 bp, Artificial Sequence
  chemically synthesized
ctgactggtggagagcagta

SEQ ID NO: 19042 - DNA, 20 bp, Artificial Sequence
  chemically synthesized
gagagcagtatggccttgtt

SEQ ID NO: 19043 - DNA, 20 bp, Artificial Sequence
  chemically synthesized
gcagtatggccttgtttagt

SEQ ID NO: 19044 - DNA, 20 bp, Artificial Sequence
  chemically synthesized
gtcggtgttgtttcttcacc

SEQ ID NO: 19045 - DNA, 20 bp, Artificial Sequence
  chemically synthesized
tcggtgttgtttcttcacca

SEQ ID NO: 19046 - DNA, 20 bp, Artificial Sequence
  chemically synthesized
cggtgttgtttcttcaccaa

SEQ ID NO: 19047 - DNA, 20 bp, Artificial Sequence
  chemically synthesized
ttgtttcttcaccaagggtt

SEQ ID NO: 19048 - DNA, 20 bp, Artificial Sequence
  chemically synthesized
tcttcaccaagggtttggct

SEQ ID NO: 19049 - DNA, 20 bp, Artificial Sequence
  chemically synthesized
ttcaccaagggtttggctca

SEQ ID NO: 19050 - DNA, 20 bp, Artificial Sequence
  chemically synthesized
tcaccaagggtttggctcag

SEQ ID NO: 19051 - DNA, 20 bp, Artificial Sequence
  chemically synthesized
ccaagggtttggctcagagg

SEQ ID NO: 19052 - DNA, 20 bp, Artificial Sequence
  chemically synthesized
gggtttggctcagaggtagc

SEQ ID NO: 19053 - DNA, 20 bp, Artificial Sequence
  chemically synthesized
ggtttggctcagaggtagca

SEQ ID NO: 19054 - DNA, 20 bp, Artificial Sequence
  chemically synthesized
gtttggctcagaggtagcaa

SEQ ID NO: 19055 - DNA, 20 bp, Artificial Sequence
  chemically synthesized
tttggctcagaggtagcaag

SEQ ID NO: 19056 - DNA, 20 bp, Artificial Sequence
  chemically synthesized
ctcagaggtagcaaggggac

SEQ ID NO: 19057 - DNA, 20 bp, Artificial Sequence
  chemically synthesized
gcaaggggacaagtgtccta

SEQ ID NO: 19058 - DNA, 20 bp, Artificial Sequence
  chemically synthesized
caaggggacaagtgtcctat

SEQ ID NO: 19059 - DNA, 20 bp, Artificial Sequence
  chemically synthesized
gggacaagtgtcctatgggc

SEQ ID NO: 19060 - DNA, 20 bp, Artificial Sequence
  chemically synthesized
caagtgtcctatgggcaaga

SEQ ID NO: 19061 - DNA, 20 bp, Artificial Sequence
  chemically synthesized
atgggcaagaaagtacctgt

SEQ ID NO: 19062 - DNA, 20 bp, Artificial Sequence
  chemically synthesized
aagaaagtacctgtgagctc

SEQ ID NO: 19063 - DNA, 20 bp, Artificial Sequence
  chemically synthesized
gtgagctcaagtcttgtatc

SEQ ID NO: 19064 - DNA, 20 bp, Artificial Sequence
  chemically synthesized
tgagctcaagtcttgtatct

SEQ ID NO: 19065 - DNA, 20 bp, Artificial Sequence
  chemically synthesized
gctcaagtcttgtatctggg

SEQ ID NO: 19066 - DNA, 20 bp, Artificial Sequence
  chemically synthesized
tatctgggaagttcattgtg

SEQ ID NO: 19067 - DNA, 20 bp, Artificial Sequence
  chemically synthesized
atctgggaagttcattgtga

SEQ ID NO: 19068 - DNA, 20 bp, Artificial Sequence
  chemically synthesized
tctgggaagttcattgtgaa

SEQ ID NO: 19069 - DNA, 20 bp, Artificial Sequence
  chemically synthesized
ctgggaagttcattgtgaag

SEQ ID NO: 19070 - DNA, 20 bp, Artificial Sequence
  chemically synthesized
tcattgtgaaggggtcattt

SEQ ID NO: 19071 - DNA, 20 bp, Artificial Sequence
  chemically synthesized
cattgtgaaggggtcattta

SEQ ID NO: 19072 - DNA, 20 bp, Artificial Sequence
  chemically synthesized
attgtgaaggggtcatttaa

SEQ ID NO: 19073 - DNA, 20 bp, Artificial Sequence
  chemically synthesized
tgcactgtcccccattctcc

SEQ ID NO: 19074 - DNA, 20 bp, Artificial Sequence
  chemically synthesized
actgtcccccattctcctgg

SEQ ID NO: 19075 - DNA, 20 bp, Artificial Sequence
  chemically synthesized
cccccattctcctggaagaa

SEQ ID NO: 19076 - DNA, 20 bp, Artificial Sequence
  chemically synthesized
cccattctcctggaagaaca

SEQ ID NO: 19077 - DNA, 20 bp, Artificial Sequence
  chemically synthesized
cagagatcccttgtcttttt

SEQ ID NO: 19078 - DNA, 20 bp, Artificial Sequence
  chemically synthesized
ccttgtctttttcagtgcat

SEQ ID NO: 19079 - DNA, 20 bp, Artificial Sequence
  chemically synthesized
cttgtctttttcagtgcatg

SEQ ID NO: 19080 - DNA, 20 bp, Artificial Sequence
  chemically synthesized
gtctttttcagtgcatgagg

SEQ ID NO: 19081 - DNA, 20 bp, Artificial Sequence
  chemically synthesized
ctttttcagtgcatgaggca

SEQ ID NO: 19082 - DNA, 20 bp, Artificial Sequence
  chemically synthesized
ttcagtgcatgaggcagagt

SEQ ID NO: 19083 - DNA, 20 bp, Artificial Sequence
  chemically synthesized
gcatgaggcagagtcagatg

SEQ ID NO: 19084 - DNA, 20 bp, Artificial Sequence
  chemically synthesized
gtcagatgtggcgtttgctt

SEQ ID NO: 19085 - DNA, 20 bp, Artificial Sequence
  chemically synthesized
tgtggcgtttgcttgagttt

SEQ ID NO: 19086 - DNA, 20 bp, Artificial Sequence
  chemically synthesized
cgtttgcttgagtttcagca

SEQ ID NO: 19087 - DNA, 20 bp, Artificial Sequence
  chemically synthesized
gtttgcttgagtttcagcac

SEQ ID NO: 19088 - DNA, 20 bp, Artificial Sequence
  chemically synthesized
acaggtgcctctgtgcctcg

SEQ ID NO: 19089 - DNA, 20 bp, Artificial Sequence
  chemically synthesized
gtgcctctgtgcctcgtggt

SEQ ID NO: 19090 - DNA, 20 bp, Artificial Sequence
  chemically synthesized
tgcctctgtgcctcgtggtg

SEQ ID NO: 19091 - DNA, 20 bp, Artificial Sequence
  chemically synthesized
gcctctgtgcctcgtggtga

SEQ ID NO: 19092 - DNA, 20 bp, Artificial Sequence
  chemically synthesized
ctgtgcctcgtggtgagggt

SEQ ID NO: 19093 - DNA, 20 bp, Artificial Sequence
  chemically synthesized
tgtgcctcgtggtgagggtc

SEQ ID NO: 19094 - DNA, 20 bp, Artificial Sequence
  chemically synthesized
gcctcgtggtgagggtcagg

SEQ ID NO: 19095 - DNA, 20 bp, Artificial Sequence
  chemically synthesized
tcgtggtgagggtcaggaag

SEQ ID NO: 19096 - DNA, 20 bp, Artificial Sequence
  chemically synthesized
tggtgagggtcaggaagaag

SEQ ID NO: 19097 - DNA, 20 bp, Artificial Sequence
  chemically synthesized
gagggtcaggaagaagcagc

SEQ ID NO: 19098 - DNA, 20 bp, Artificial Sequence
  chemically synthesized
agggtcaggaagaagcagct

SEQ ID NO: 19099 - DNA, 20 bp, Artificial Sequence
  chemically synthesized
gcagctgggacgtgctcacg

SEQ ID NO: 19100 - DNA, 20 bp, Artificial Sequence
  chemically synthesized
ctgggacgtgctcacgtggc

SEQ ID NO: 19101 - DNA, 20 bp, Artificial Sequence
  chemically synthesized
ggacgtgctcacgtggctgg

SEQ ID NO: 19102 - DNA, 20 bp, Artificial Sequence
  chemically synthesized
acgtggctggtagtgttatg

SEQ ID NO: 19103 - DNA, 20 bp, Artificial Sequence
  chemically synthesized
gctggtagtgttatgaagac

SEQ ID NO: 19104 - DNA, 20 bp, Artificial Sequence
  chemically synthesized
ctggtagtgttatgaagaca

SEQ ID NO: 19105 - DNA, 20 bp, Artificial Sequence
  chemically synthesized
gtgttatgaagacaaggctt

SEQ ID NO: 19106 - DNA, 20 bp, Artificial Sequence
  chemically synthesized
tgttatgaagacaaggcttt

SEQ ID NO: 19107 - DNA, 20 bp, Artificial Sequence
  chemically synthesized
aaggctttgggacctttctt

SEQ ID NO: 19108 - DNA, 20 bp, Artificial Sequence
  chemically synthesized
ggacctttctttggccattt

SEQ ID NO: 19109 - DNA, 20 bp, Artificial Sequence
  chemically synthesized
ttctttggccatttgagccc

SEQ ID NO: 19110 - DNA, 20 bp, Artificial Sequence
  chemically synthesized
gccatttgagccctggctat

SEQ ID NO: 19111 - DNA, 20 bp, Artificial Sequence
  chemically synthesized
catttgagccctggctatta

SEQ ID NO: 19112 - DNA, 20 bp, Artificial Sequence
  chemically synthesized
tgagccctggctattagaga

SEQ ID NO: 19113 - DNA, 20 bp, Artificial Sequence
  chemically synthesized
tagagaaagatgatttgcct

SEQ ID NO: 19114 - DNA, 20 bp, Artificial Sequence
  chemically synthesized
gagaaagatgatttgcctga

SEQ ID NO: 19115 - DNA, 20 bp, Artificial Sequence
  chemically synthesized
agaaagatgatttgcctgag

SEQ ID NO: 19116 - DNA, 20 bp, Artificial Sequence
  chemically synthesized
aaagatgatttgcctgagag

SEQ ID NO: 19117 - DNA, 20 bp, Artificial Sequence
  chemically synthesized
gaggagattgaccacactct

SEQ ID NO: 19118 - DNA, 20 bp, Artificial Sequence
  chemically synthesized
agattgaccacactctcaga

SEQ ID NO: 19119 - DNA, 20 bp, Artificial Sequence
  chemically synthesized
ttgaccacactctcagaaag

SEQ ID NO: 19120 - DNA, 20 bp, Artificial Sequence
  chemically synthesized
tgaccacactctcagaaaga

SEQ ID NO: 19121 - DNA, 20 bp, Artificial Sequence
  chemically synthesized
gaccacactctcagaaagaa

SEQ ID NO: 19122 - DNA, 20 bp, Artificial Sequence
  chemically synthesized
accacactctcagaaagaag

SEQ ID NO: 19123 - DNA, 20 bp, Artificial Sequence
  chemically synthesized
ctctcagaaagaaggggaca

SEQ ID NO: 19124 - DNA, 20 bp, Artificial Sequence
  chemically synthesized
aaggggacaaagaacacgtc

SEQ ID NO: 19125 - DNA, 20 bp, Artificial Sequence
  chemically synthesized
aggggacaaagaacacgtca

SEQ ID NO: 19126 - DNA, 20 bp, Artificial Sequence
  chemically synthesized
ggggacaaagaacacgtcaa

SEQ ID NO: 19127 - DNA, 20 bp, Artificial Sequence
  chemically synthesized
caaagaacacgtcaagggtt

SEQ ID NO: 19128 - DNA, 20 bp, Artificial Sequence
  chemically synthesized
agaacacgtcaagggttaag

SEQ ID NO: 19129 - DNA, 20 bp, Artificial Sequence
  chemically synthesized
ggttaagcagccttcccttt

SEQ ID NO: 19130 - DNA, 20 bp, Artificial Sequence
  chemically synthesized
gttaagcagccttcccttta

SEQ ID NO: 19131 - DNA, 20 bp, Artificial Sequence
  chemically synthesized
ttaagcagccttccctttaa

SEQ ID NO: 19132 - DNA, 20 bp, Artificial Sequence
  chemically synthesized
aagcagccttccctttaagg

SEQ ID NO: 19133 - DNA, 20 bp, Artificial Sequence
  chemically synthesized
agcagccttccctttaaggg

SEQ ID NO: 19134 - DNA, 20 bp, Artificial Sequence
  chemically synthesized
ccttccctttaagggaggac

SEQ ID NO: 19135 - DNA, 20 bp, Artificial Sequence
  chemically synthesized
cttccctttaagggaggact

SEQ ID NO: 19136 - DNA, 20 bp, Artificial Sequence
  chemically synthesized
ttccctttaagggaggactg

SEQ ID NO: 19137 - DNA, 20 bp, Artificial Sequence
  chemically synthesized
ttaagggaggactggggcac

SEQ ID NO: 19138 - DNA, 20 bp, Artificial Sequence
  chemically synthesized
gggaggactggggcacaaga

SEQ ID NO: 19139 - DNA, 20 bp, Artificial Sequence
  chemically synthesized
aggactggggcacaagatgg

SEQ ID NO: 19140 - DNA, 20 bp, Artificial Sequence
  chemically synthesized
gggcacaagatggaagatga

SEQ ID NO: 19141 - DNA, 20 bp, Artificial Sequence
  chemically synthesized
ggcacaagatggaagatgaa

SEQ ID NO: 19142 - DNA, 20 bp, Artificial Sequence
  chemically synthesized
gcacaagatggaagatgaaa

SEQ ID NO: 19143 - DNA, 20 bp, Artificial Sequence
  chemically synthesized
acaagatggaagatgaaagg

SEQ ID NO: 19144 - DNA, 20 bp, Artificial Sequence
  chemically synthesized
agatggaagatgaaagggag

SEQ ID NO: 19145 - DNA, 20 bp, Artificial Sequence
  chemically synthesized
atggaagatgaaagggagca

SEQ ID NO: 19146 - DNA, 20 bp, Artificial Sequence
  chemically synthesized
gaagatgaaagggagcagag

SEQ ID NO: 19147 - DNA, 20 bp, Artificial Sequence
  chemically synthesized
agggagcagagtggcaattg

SEQ ID NO: 19148 - DNA, 20 bp, Artificial Sequence
  chemically synthesized
ggagcagagtggcaattgca

SEQ ID NO: 19149 - DNA, 20 bp, Artificial Sequence
  chemically synthesized
cagagtggcaattgcagagc

SEQ ID NO: 19150 - DNA, 20 bp, Artificial Sequence
  chemically synthesized
gtggcaattgcagagctgga

SEQ ID NO: 19151 - DNA, 20 bp, Artificial Sequence
  chemically synthesized
tggcaattgcagagctggaa

SEQ ID NO: 19152 - DNA, 20 bp, Artificial Sequence
  chemically synthesized
ggcaattgcagagctggaaa

SEQ ID NO: 19153 - DNA, 20 bp, Artificial Sequence
  chemically synthesized
gcaattgcagagctggaaag

SEQ ID NO: 19154 - DNA, 20 bp, Artificial Sequence
  chemically synthesized
aaaggggaattttgttcttc

SEQ ID NO: 19155 - DNA, 20 bp, Artificial Sequence
  chemically synthesized
gggaattttgttcttctaga

SEQ ID NO: 19156 - DNA, 20 bp, Artificial Sequence
  chemically synthesized
tttgttcttctagatagcaa

SEQ ID NO: 19157 - DNA, 20 bp, Artificial Sequence
  chemically synthesized
ttcttctagatagcaaaagc

SEQ ID NO: 19158 - DNA, 20 bp, Artificial Sequence
  chemically synthesized
tcttctagatagcaaaagcc

SEQ ID NO: 19159 - DNA, 20 bp, Artificial Sequence
  chemically synthesized
actgtcgctgtgtgacttga

SEQ ID NO: 19160 - DNA, 20 bp, Artificial Sequence
  chemically synthesized
tcgctgtgtgacttgaaagc

SEQ ID NO: 19161 - DNA, 20 bp, Artificial Sequence
  chemically synthesized
cgctgtgtgacttgaaagct

SEQ ID NO: 19162 - DNA, 20 bp, Artificial Sequence
  chemically synthesized
tgacttgaaagctaggtcac

SEQ ID NO: 19163 - DNA, 20 bp, Artificial Sequence
  chemically synthesized
cttgaaagctaggtcactgg

SEQ ID NO: 19164 - DNA, 20 bp, Artificial Sequence
  chemically synthesized
ttgaaagctaggtcactggt

SEQ ID NO: 19165 - DNA, 20 bp, Artificial Sequence
  chemically synthesized
ggtcactggtgggcttcgtg

SEQ ID NO: 19166 - DNA, 20 bp, Artificial Sequence
  chemically synthesized
gggcttcgtgcagcccgtca

SEQ ID NO: 19167 - DNA, 20 bp, Artificial Sequence
  chemically synthesized
ggcttcgtgcagcccgtcac

SEQ ID NO: 19168 - DNA, 20 bp, Artificial Sequence
  chemically synthesized
gcttcgtgcagcccgtcaca

SEQ ID NO: 19169 - DNA, 20 bp, Artificial Sequence
  chemically synthesized
cttcgtgcagcccgtcacag

SEQ ID NO: 19170 - DNA, 20 bp, Artificial Sequence
  chemically synthesized
tcgtgcagcccgtcacaggg

SEQ ID NO: 19171 - DNA, 20 bp, Artificial Sequence
  chemically synthesized
agcccgtcacaggggagcca

SEQ ID NO: 19172 - DNA, 20 bp, Artificial Sequence
  chemically synthesized
ccgtcacaggggagccatgg

SEQ ID NO: 19173 - DNA, 20 bp, Artificial Sequence
  chemically synthesized
cgtcacaggggagccatggt

SEQ ID NO: 19174 - DNA, 20 bp, Artificial Sequence
  chemically synthesized
tctctgccgtatctgctgcc

SEQ ID NO: 19175 - DNA, 20 bp, Artificial Sequence
  chemically synthesized
ctgccgtatctgctgcctgg

SEQ ID NO: 19176 - DNA, 20 bp, Artificial Sequence
  chemically synthesized
gtatctgctgcctggaagct

SEQ ID NO: 19177 - DNA, 20 bp, Artificial Sequence
  chemically synthesized
tgctgcctggaagctgagac

SEQ ID NO: 19178 - DNA, 20 bp, Artificial Sequence
  chemically synthesized
taaccacatcacaccattcc

SEQ ID NO: 19179 - DNA, 20 bp, Artificial Sequence
  chemically synthesized
catcacaccattcccagacc

SEQ ID NO: 19180 - DNA, 20 bp, Artificial Sequence
  chemically synthesized
atcacaccattcccagaccc

SEQ ID NO: 19181 - DNA, 20 bp, Artificial Sequence
  chemically synthesized
accattcccagacccaggcc

SEQ ID NO: 19182 - DNA, 20 bp, Artificial Sequence
  chemically synthesized
ccattcccagacccaggccc

SEQ ID NO: 19183 - DNA, 20 bp, Artificial Sequence
  chemically synthesized
cccagacccaggcccaggcc

SEQ ID NO: 19184 - DNA, 20 bp, Artificial Sequence
  chemically synthesized
ccagacccaggcccaggccc

SEQ ID NO: 19185 - DNA, 20 bp, Artificial Sequence
  chemically synthesized
cccaggcccaggcccaggcc

SEQ ID NO: 19186 - DNA, 20 bp, Artificial Sequence
  chemically synthesized
ccaggcccaggcccaggccc

SEQ ID NO: 19187 - DNA, 20 bp, Artificial Sequence
  chemically synthesized
ggcccaggcccgggtccctc

SEQ ID NO: 19188 - DNA, 20 bp, Artificial Sequence
  chemically synthesized
ccgctctctctcgcttcaca

SEQ ID NO: 19189 - DNA, 20 bp, Artificial Sequence
  chemically synthesized
gctctctctcgcttcacaca

SEQ ID NO: 19190 - DNA, 20 bp, Artificial Sequence
  chemically synthesized
ctctctctcgcttcacacag

SEQ ID NO: 19191 - DNA, 20 bp, Artificial Sequence
  chemically synthesized
cttcacacagaggctattat

SEQ ID NO: 19192 - DNA, 20 bp, Artificial Sequence
  chemically synthesized
acacagaggctattattagc

SEQ ID NO: 19193 - DNA, 20 bp, Artificial Sequence
  chemically synthesized
tattattagcaagtgtcact

SEQ ID NO: 19194 - DNA, 20 bp, Artificial Sequence
  chemically synthesized
caagtgtcactcagttatct

SEQ ID NO: 19195 - DNA, 20 bp, Artificial Sequence
  chemically synthesized
agtgtcactcagttatctga

SEQ ID NO: 19196 - DNA, 20 bp, Artificial Sequence
  chemically synthesized
gtcactcagttatctgagag

SEQ ID NO: 19197 - DNA, 20 bp, Artificial Sequence
  chemically synthesized
ttatctgagagtggcgcttt

SEQ ID NO: 19198 - DNA, 20 bp, Artificial Sequence
  chemically synthesized
ggcgcttttagctgccatct

SEQ ID NO: 19199 - DNA, 20 bp, Artificial Sequence
  chemically synthesized
ccatctaagtgcctgatact

SEQ ID NO: 19200 - DNA, 20 bp, Artificial Sequence
  chemically synthesized
catctaagtgcctgatactt

SEQ ID NO: 19201 - DNA, 20 bp, Artificial Sequence
  chemically synthesized
gtgcctgatacttgggttta

SEQ ID NO: 19202 - DNA, 20 bp, Artificial Sequence
  chemically synthesized
cctgatacttgggtttacag

SEQ ID NO: 19203 - DNA, 20 bp, Artificial Sequence
  chemically synthesized
cagcagattaaattaaattt

SEQ ID NO: 19204 - DNA, 20 bp, Artificial Sequence
  chemically synthesized
agcagattaaattaaatttt

SEQ ID NO: 19205 - DNA, 20 bp, Artificial Sequence
  chemically synthesized
gattaaattaaattttaggc

SEQ ID NO: 19206 - DNA, 20 bp, Artificial Sequence
  chemically synthesized
aattaaattttaggctggtt

SEQ ID NO: 19207 - DNA, 20 bp, Artificial Sequence
  chemically synthesized
ttaggctggtttggcttcac

SEQ ID NO: 19208 - DNA, 20 bp, Artificial Sequence
  chemically synthesized
ggctggtttggcttcactgg

SEQ ID NO: 19209 - DNA, 20 bp, Artificial Sequence
  chemically synthesized
tggtttggcttcactggcag

SEQ ID NO: 19210 - DNA, 20 bp, Artificial Sequence
  chemically synthesized
gcttcactggcagtagacaa

SEQ ID NO: 19211 - DNA, 20 bp, Artificial Sequence
  chemically synthesized
tcactggcagtagacaatgg

SEQ ID NO: 19212 - DNA, 20 bp, Artificial Sequence
  chemically synthesized
cactggcagtagacaatgga

SEQ ID NO: 19213 - DNA, 20 bp, Artificial Sequence
  chemically synthesized
tggcagtagacaatggaagg

SEQ ID NO: 19214 - DNA, 20 bp, Artificial Sequence
  chemically synthesized
acaatggaaggcagctgttg

SEQ ID NO: 19215 - DNA, 20 bp, Artificial Sequence
  chemically synthesized
gctgttgtagaaatgtaacc

SEQ ID NO: 19216 - DNA, 20 bp, Artificial Sequence
  chemically synthesized
aaatgtaacctggcaccctc

SEQ ID NO: 19217 - DNA, 20 bp, Artificial Sequence
  chemically synthesized
aatgtaacctggcaccctca

SEQ ID NO: 19218 - DNA, 20 bp, Artificial Sequence
  chemically synthesized
gcaccctcaaggatttgtgt

SEQ ID NO: 19219 - DNA, 20 bp, Artificial Sequence
  chemically synthesized
gtgtgtgtgtgtgtgtgtgt

SEQ ID NO: 19220 - DNA, 20 bp, Artificial Sequence
  chemically synthesized
tgtgtgtgtgtgctgaccac

SEQ ID NO: 19221 - DNA, 20 bp, Artificial Sequence
  chemically synthesized
gtgtgtgtgtgctgaccact

SEQ ID NO: 19222 - DNA, 20 bp, Artificial Sequence
  chemically synthesized
ccatttcatccctttccaaa

SEQ ID NO: 19223 - DNA, 20 bp, Artificial Sequence
  chemically synthesized
atccctttccaaaaagtgtt

SEQ ID NO: 19224 - DNA, 20 bp, Artificial Sequence
  chemically synthesized
ccaaaaagtgtttagacaaa

SEQ ID NO: 19225 - DNA, 20 bp, Artificial Sequence
  chemically synthesized
tgtttagacaaatagtttcc

SEQ ID NO: 19226 - DNA, 20 bp, Artificial Sequence
  chemically synthesized
gacaaatagtttcccagact

SEQ ID NO: 19227 - DNA, 20 bp, Artificial Sequence
  chemically synthesized
cagacttggttttatcatgc

SEQ ID NO: 19228 - DNA, 20 bp, Artificial Sequence
  chemically synthesized
agacttggttttatcatgct

SEQ ID NO: 19229 - DNA, 20 bp, Artificial Sequence
  chemically synthesized
tttatcatgctgggttgaca

SEQ ID NO: 19230 - DNA, 20 bp, Artificial Sequence
  chemically synthesized
ttatcatgctgggttgacaa

SEQ ID NO: 19231 - DNA, 20 bp, Artificial Sequence
  chemically synthesized
gggttgacaaaggttgtgta

SEQ ID NO: 19232 - DNA, 20 bp, Artificial Sequence
  chemically synthesized
gttgacaaaggttgtgtaca

SEQ ID NO: 19233 - DNA, 20 bp, Artificial Sequence
  chemically synthesized
acaaaggttgtgtacagagc

SEQ ID NO: 19234 - DNA, 20 bp, Artificial Sequence
  chemically synthesized
ttttttcttctttctactgt

SEQ ID NO: 19235 - DNA, 20 bp, Artificial Sequence
  chemically synthesized
tcaatatctttttttctgca

SEQ ID NO: 19236 - DNA, 20 bp, Artificial Sequence
  chemically synthesized
atatctttttttctgcaaag

SEQ ID NO: 19237 - DNA, 20 bp, Artificial Sequence
  chemically synthesized
tatctttttttctgcaaaga

SEQ ID NO: 19238 - DNA, 20 bp, Artificial Sequence
  chemically synthesized
atctttttttctgcaaagaa

SEQ ID NO: 19239 - DNA, 20 bp, Artificial Sequence
  chemically synthesized
tctttttttctgcaaagaag

SEQ ID NO: 19240 - DNA, 20 bp, Artificial Sequence
  chemically synthesized
ttttctgcaaagaaggggct

SEQ ID NO: 19241 - DNA, 20 bp, Artificial Sequence
  chemically synthesized
ctaagcttgcacgaaaacac

SEQ ID NO: 19242 - DNA, 20 bp, Artificial Sequence
  chemically synthesized
agcttgcacgaaaacaccgg

SEQ ID NO: 19243 - DNA, 20 bp, Artificial Sequence
  chemically synthesized
gcttgcacgaaaacaccggt

SEQ ID NO: 19244 - DNA, 20 bp, Artificial Sequence
  chemically synthesized
aaacaccggtgggaacccac

SEQ ID NO: 19245 - DNA, 20 bp, Artificial Sequence
  chemically synthesized
acaccggtgggaacccactg

SEQ ID NO: 19246 - DNA, 20 bp, Artificial Sequence
  chemically synthesized
ccggtgggaacccactggag

SEQ ID NO: 19247 - DNA, 20 bp, Artificial Sequence
  chemically synthesized
cggtgggaacccactggaga

SEQ ID NO: 19248 - DNA, 20 bp, Artificial Sequence
  chemically synthesized
ggtgggaacccactggagaa

SEQ ID NO: 19249 - DNA, 20 bp, Artificial Sequence
  chemically synthesized
gaacccactggagaagggca

SEQ ID NO: 19250 - DNA, 20 bp, Artificial Sequence
  chemically synthesized
aacccactggagaagggcat

SEQ ID NO: 19251 - DNA, 20 bp, Artificial Sequence
  chemically synthesized
ccactggagaagggcatggg

SEQ ID NO: 19252 - DNA, 20 bp, Artificial Sequence
  chemically synthesized
agaagggcatgggtggtttt

SEQ ID NO: 19253 - DNA, 20 bp, Artificial Sequence
  chemically synthesized
ggcatgggtggtttttggtt

SEQ ID NO: 19254 - DNA, 20 bp, Artificial Sequence
  chemically synthesized
tgggtggtttttggttcggt

SEQ ID NO: 19255 - DNA, 20 bp, Artificial Sequence
  chemically synthesized
gtggtttttggttcggttgg

SEQ ID NO: 19256 - DNA, 20 bp, Artificial Sequence
  chemically synthesized
tcggttggtggctgatctga

SEQ ID NO: 19257 - DNA, 20 bp, Artificial Sequence
  chemically synthesized
cggttggtggctgatctgat

SEQ ID NO: 19258 - DNA, 20 bp, Artificial Sequence
  chemically synthesized
ttggtggctgatctgatggg

SEQ ID NO: 19259 - DNA, 20 bp, Artificial Sequence
  chemically synthesized
ggctgatctgatgggtggta

SEQ ID NO: 19260 - DNA, 20 bp, Artificial Sequence
  chemically synthesized
gctgatctgatgggtggtat

SEQ ID NO: 19261 - DNA, 20 bp, Artificial Sequence
  chemically synthesized
gatctgatgggtggtatagg

SEQ ID NO: 19262 - DNA, 20 bp, Artificial Sequence
  chemically synthesized
ggtggtataggcagaatgtc

SEQ ID NO: 19263 - DNA, 20 bp, Artificial Sequence
  chemically synthesized
agaatgtctggctgcccctt

SEQ ID NO: 19264 - DNA, 20 bp, Artificial Sequence
  chemically synthesized
gctgccccttcagattcctg

SEQ ID NO: 19265 - DNA, 20 bp, Artificial Sequence
  chemically synthesized
tcagattcctgtagattccg

SEQ ID NO: 19266 - DNA, 20 bp, Artificial Sequence
  chemically synthesized
cagattcctgtagattccgt

SEQ ID NO: 19267 - DNA, 20 bp, Artificial Sequence
  chemically synthesized
gattccgtaggcgaccaaca

SEQ ID NO: 19268 - DNA, 20 bp, Artificial Sequence
  chemically synthesized
attccgtaggcgaccaacat

SEQ ID NO: 19269 - DNA, 20 bp, Artificial Sequence
  chemically synthesized
ttccgtaggcgaccaacatg

SEQ ID NO: 19270 - DNA, 20 bp, Artificial Sequence
  chemically synthesized
cgtaggcgaccaacatgggg

SEQ ID NO: 19271 - DNA, 20 bp, Artificial Sequence
  chemically synthesized
gtaggcgaccaacatggggt

SEQ ID NO: 19272 - DNA, 20 bp, Artificial Sequence
  chemically synthesized
taggcgaccaacatggggtg

SEQ ID NO: 19273 - DNA, 20 bp, Artificial Sequence
  chemically synthesized
aggcgaccaacatggggtgg

SEQ ID NO: 19274 - DNA, 20 bp, Artificial Sequence
  chemically synthesized
cgaccaacatggggtggggg

SEQ ID NO: 19275 - DNA, 20 bp, Artificial Sequence
  chemically synthesized
gaccaacatggggtgggggt

SEQ ID NO: 19276 - DNA, 20 bp, Artificial Sequence
  chemically synthesized
accaacatggggtgggggtg

SEQ ID NO: 19277 - DNA, 20 bp, Artificial Sequence
  chemically synthesized
ccaacatggggtgggggtgg

SEQ ID NO: 19278 - DNA, 20 bp, Artificial Sequence
  chemically synthesized
gcaaatatcttcactctcct

SEQ ID NO: 19279 - DNA, 20 bp, Artificial Sequence
  chemically synthesized
cactctccttggtgcttctg

SEQ ID NO: 19280 - DNA, 20 bp, Artificial Sequence
  chemically synthesized
tgtggttgtgcctatgaatt

SEQ ID NO: 19281 - DNA, 20 bp, Artificial Sequence
  chemically synthesized
gtggttgtgcctatgaattt

SEQ ID NO: 19282 - DNA, 20 bp, Artificial Sequence
  chemically synthesized
atttaggaccttatgcctca

SEQ ID NO: 19283 - DNA, 20 bp, Artificial Sequence
  chemically synthesized
accttatgcctcatagtgtt

SEQ ID NO: 19284 - DNA, 20 bp, Artificial Sequence
  chemically synthesized
tatgcctcatagtgttgagt

SEQ ID NO: 19285 - DNA, 20 bp, Artificial Sequence
  chemically synthesized
tgcctcatagtgttgagtca

SEQ ID NO: 19286 - DNA, 20 bp, Artificial Sequence
  chemically synthesized
agtgttgagtcagagcaaaa

SEQ ID NO: 19287 - DNA, 20 bp, Artificial Sequence
  chemically synthesized
gagcaaaacagtttacatca

SEQ ID NO: 19288 - DNA, 20 bp, Artificial Sequence
  chemically synthesized
agcaaaacagtttacatcaa

SEQ ID NO: 19289 - DNA, 20 bp, Artificial Sequence
  chemically synthesized
gccacttatttaattttcct

SEQ ID NO: 19290 - DNA, 20 bp, Artificial Sequence
  chemically synthesized
ttttcctcagaaaactctgt

SEQ ID NO: 19291 - DNA, 20 bp, Artificial Sequence
  chemically synthesized
tttcctcagaaaactctgtg

SEQ ID NO: 19292 - DNA, 20 bp, Artificial Sequence
  chemically synthesized
taatttctccttcttataaa

SEQ ID NO: 19293 - DNA, 20 bp, Artificial Sequence
  chemically synthesized
atgtgtacattatcccaccg

SEQ ID NO: 19294 - DNA, 20 bp, Artificial Sequence
  chemically synthesized
tgtgtacattatcccaccga

SEQ ID NO: 19295 - DNA, 20 bp, Artificial Sequence
  chemically synthesized
gtgtacattatcccaccgaa

SEQ ID NO: 19296 - DNA, 20 bp, Artificial Sequence
  chemically synthesized
tgctctttacttttataatc

SEQ ID NO: 19297 - DNA, 20 bp, Artificial Sequence
  chemically synthesized
aatctagattttaaaaaatt

SEQ ID NO: 19298 - DNA, 20 bp, Artificial Sequence
  chemically synthesized
ctagattttaaaaaatttgg

SEQ ID NO: 19299 - DNA, 20 bp, Artificial Sequence
  chemically synthesized
aatttggtggcacttgattt

SEQ ID NO: 19300 - DNA, 20 bp, Artificial Sequence
  chemically synthesized
atttggtggcacttgatttc

SEQ ID NO: 19301 - DNA, 20 bp, Artificial Sequence
  chemically synthesized
ggcacttgatttcaggtcct

SEQ ID NO: 19302 - DNA, 20 bp, Artificial Sequence
  chemically synthesized
gatttcaggtcctcagactc

SEQ ID NO: 19303 - DNA, 20 bp, Artificial Sequence
  chemically synthesized
cagaatttatactcactgat

SEQ ID NO: 19304 - DNA, 20 bp, Artificial Sequence
  chemically synthesized
aatgcattatgcaaataatt

SEQ ID NO: 19305 - DNA, 20 bp, Artificial Sequence
  chemically synthesized
acctcatgtcttgaaaaaaa

SEQ ID NO: 19306 - DNA, 20 bp, Artificial Sequence
  chemically synthesized
ctcaaaataaacaaaacctg

SEQ ID NO: 19307 - DNA, 20 bp, Artificial Sequence
  chemically synthesized
aaaataaacaaaacctgcag

SEQ ID NO: 19308 - DNA, 20 bp, Artificial Sequence
  chemically synthesized
aataaacaaaacctgcagaa

SEQ ID NO: 19309 - DNA, 20 bp, Artificial Sequence
  chemically synthesized
cctgcagaagagtttattgt

SEQ ID NO: 19310 - DNA, 20 bp, Artificial Sequence
  chemically synthesized
ctgcagaagagtttattgta

SEQ ID NO: 19311 - DNA, 20 bp, Artificial Sequence
  chemically synthesized
tgcagaagagtttattgtaa

SEQ ID NO: 19312 - DNA, 20 bp, Artificial Sequence
  chemically synthesized
tattgtaagggtgaaaatta

SEQ ID NO: 19313 - DNA, 20 bp, Artificial Sequence
  chemically synthesized
ttgtaagggtgaaaattaaa

SEQ ID NO: 19314 - DNA, 20 bp, Artificial Sequence
  chemically synthesized
tgtaagggtgaaaattaaag

SEQ ID NO: 19315 - DNA, 20 bp, Artificial Sequence
  chemically synthesized
taaagaggaacccatttgcc

SEQ ID NO: 19316 - DNA, 20 bp, Artificial Sequence
  chemically synthesized
aaagaggaacccatttgcct

SEQ ID NO: 19317 - DNA, 20 bp, Artificial Sequence
  chemically synthesized
ccatttgcctgggaactttt

SEQ ID NO: 19318 - DNA, 20 bp, Artificial Sequence
  chemically synthesized
catttgcctgggaacttttg

SEQ ID NO: 19319 - DNA, 20 bp, Artificial Sequence
  chemically synthesized
atcaatataccttgccacgc

SEQ ID NO: 19320 - DNA, 20 bp, Artificial Sequence
  chemically synthesized
tcaatataccttgccacgca

SEQ ID NO: 19321 - DNA, 20 bp, Artificial Sequence
  chemically synthesized
aaggtatattctattatctt

SEQ ID NO: 19322 - DNA, 20 bp, Artificial Sequence
  chemically synthesized
tttctgaatttttcaatttt

SEQ ID NO: 19323 - DNA, 20 bp, Artificial Sequence
  chemically synthesized
aatttttcaattttcagaaa

SEQ ID NO: 19324 - DNA, 20 bp, Artificial Sequence
  chemically synthesized
ttttcaattttcagaaaaag

SEQ ID NO: 19325 - DNA, 20 bp, Artificial Sequence
  chemically synthesized
cacatttgtgcataaataca

SEQ ID NO: 19326 - DNA, 20 bp, Artificial Sequence
  chemically synthesized
acatttgtgcataaatacac

SEQ ID NO: 19327 - DNA, 20 bp, Artificial Sequence
  chemically synthesized
cacaggcataaatgaaaatt

SEQ ID NO: 19328 - DNA, 20 bp, Artificial Sequence
  chemically synthesized
acaggcataaatgaaaattt

SEQ ID NO: 19329 - DNA, 20 bp, Artificial Sequence
  chemically synthesized
aatttaggccgaattatttg

SEQ ID NO: 19330 - DNA, 20 bp, Artificial Sequence
  chemically synthesized
tttaggccgaattatttgaa

SEQ ID NO: 19331 - DNA, 20 bp, Artificial Sequence
  chemically synthesized
ttaggccgaattatttgaag

SEQ ID NO: 19332 - DNA, 20 bp, Artificial Sequence
  chemically synthesized
aggatacaataattgcttgc

SEQ ID NO: 19333 - DNA, 20 bp, Artificial Sequence
  chemically synthesized
cagtgacatgattctcctgc

SEQ ID NO: 19334 - DNA, 20 bp, Artificial Sequence
  chemically synthesized
gtgacatgattctcctgcca

SEQ ID NO: 19335 - DNA, 20 bp, Artificial Sequence
  chemically synthesized
gacatgattctcctgccaga

SEQ ID NO: 19336 - DNA, 20 bp, Artificial Sequence
  chemically synthesized
catgattctcctgccagaga

SEQ ID NO: 19337 - DNA, 20 bp, Artificial Sequence
  chemically synthesized
atgattctcctgccagagag

SEQ ID NO: 19338 - DNA, 20 bp, Artificial Sequence
  chemically synthesized
tgattctcctgccagagaga

SEQ ID NO: 19339 - DNA, 20 bp, Artificial Sequence
  chemically synthesized
gattctcctgccagagagag

SEQ ID NO: 19340 - DNA, 20 bp, Artificial Sequence
  chemically synthesized
ttctcctgccagagagaggg

SEQ ID NO: 19341 - DNA, 20 bp, Artificial Sequence
  chemically synthesized
cagagagaggggagaataac

SEQ ID NO: 19342 - DNA, 20 bp, Artificial Sequence
  chemically synthesized
agagagaggggagaataact

SEQ ID NO: 19343 - DNA, 20 bp, Artificial Sequence
  chemically synthesized
gtgcaaacttttaacactcc

SEQ ID NO: 19344 - DNA, 20 bp, Artificial Sequence
  chemically synthesized
aacttttaacactccaagtc

SEQ ID NO: 19345 - DNA, 20 bp, Artificial Sequence
  chemically synthesized
cttttaacactccaagtcta

SEQ ID NO: 19346 - DNA, 20 bp, Artificial Sequence
  chemically synthesized
tttaacactccaagtctaga

SEQ ID NO: 19347 - DNA, 20 bp, Artificial Sequence
  chemically synthesized
aagtctagagagaattatcc

SEQ ID NO: 19348 - DNA, 20 bp, Artificial Sequence
  chemically synthesized
tagagagaattatccaagca

SEQ ID NO: 19349 - DNA, 20 bp, Artificial Sequence
  chemically synthesized
aagcatagccatgaattcct

SEQ ID NO: 19350 - DNA, 20 bp, Artificial Sequence
  chemically synthesized
agccatgaattcctgagtta

SEQ ID NO: 19351 - DNA, 20 bp, Artificial Sequence
  chemically synthesized
tgaattcctgagttatggat

SEQ ID NO: 19352 - DNA, 20 bp, Artificial Sequence
  chemically synthesized
acgatctctttgtcttcact

SEQ ID NO: 19353 - DNA, 20 bp, Artificial Sequence
  chemically synthesized
cactgagttttctttgtcat

SEQ ID NO: 19354 - DNA, 20 bp, Artificial Sequence
  chemically synthesized
ctgagttttctttgtcattg

SEQ ID NO: 19355 - DNA, 20 bp, Artificial Sequence
  chemically synthesized
tctttgtcattggagtaatt

SEQ ID NO: 19356 - DNA, 20 bp, Artificial Sequence
  chemically synthesized
ctttgtcattggagtaattt

SEQ ID NO: 19357 - DNA, 20 bp, Artificial Sequence
  chemically synthesized
ttgtcattggagtaatttag

SEQ ID NO: 19358 - DNA, 20 bp, Artificial Sequence
  chemically synthesized
tggagtaatttaggagaata

SEQ ID NO: 19359 - DNA, 20 bp, Artificial Sequence
  chemically synthesized
ggagtaatttaggagaatac

SEQ ID NO: 19360 - DNA, 20 bp, Artificial Sequence
  chemically synthesized
aggagaatacaggatgtgac

SEQ ID NO: 19361 - DNA, 20 bp, Artificial Sequence
  chemically synthesized
ggagaatacaggatgtgact

SEQ ID NO: 19362 - DNA, 20 bp, Artificial Sequence
  chemically synthesized
agaatacaggatgtgactgg

SEQ ID NO: 19363 - DNA, 20 bp, Artificial Sequence
  chemically synthesized
actgggagccctttctgaat

SEQ ID NO: 19364 - DNA, 20 bp, Artificial Sequence
  chemically synthesized
gagccctttctgaataagca

SEQ ID NO: 19365 - DNA, 20 bp, Artificial Sequence
  chemically synthesized
gcccacgtgaattcctaaac

SEQ ID NO: 19366 - DNA, 20 bp, Artificial Sequence
  chemically synthesized
cacgtgaattcctaaaccag

SEQ ID NO: 19367 - DNA, 20 bp, Artificial Sequence
  chemically synthesized
attcctaaaccagtggctcc

SEQ ID NO: 19368 - DNA, 20 bp, Artificial Sequence
  chemically synthesized
tggctcccagctgcatgtgt

SEQ ID NO: 19369 - DNA, 20 bp, Artificial Sequence
  chemically synthesized
cccagctgcatgtgtcagaa

SEQ ID NO: 19370 - DNA, 20 bp, Artificial Sequence
  chemically synthesized
tgcatgtgtcagaacagaac

SEQ ID NO: 19371 - DNA, 20 bp, Artificial Sequence
  chemically synthesized
tgtcagaacagaactggcct

SEQ ID NO: 19372 - DNA, 20 bp, Artificial Sequence
  chemically synthesized
aactggcctcagaaatctac

SEQ ID NO: 19373 - DNA, 20 bp, Artificial Sequence
  chemically synthesized
ctcagaaatctacaagattc

SEQ ID NO: 19374 - DNA, 20 bp, Artificial Sequence
  chemically synthesized
agaaatctacaagattccag

SEQ ID NO: 19375 - DNA, 20 bp, Artificial Sequence
  chemically synthesized
ctacaagattccagtggttc

SEQ ID NO: 19376 - DNA, 20 bp, Artificial Sequence
  chemically synthesized
ggttccagcctcactttctc

SEQ ID NO: 19377 - DNA, 20 bp, Artificial Sequence
  chemically synthesized
tccagcctcactttctccag

SEQ ID NO: 19378 - DNA, 20 bp, Artificial Sequence
  chemically synthesized
gtcaacttactgctgttgca

SEQ ID NO: 19379 - DNA, 20 bp, Artificial Sequence
  chemically synthesized
actgctgttgcaaagcacgt

SEQ ID NO: 19380 - DNA, 20 bp, Artificial Sequence
  chemically synthesized
ttgcaaagcacgtcagattt

SEQ ID NO: 19381 - DNA, 20 bp, Artificial Sequence
  chemically synthesized
tgcaaagcacgtcagatttc

SEQ ID NO: 19382 - DNA, 20 bp, Artificial Sequence
  chemically synthesized
caaagcacgtcagatttcag

SEQ ID NO: 19383 - DNA, 20 bp, Artificial Sequence
  chemically synthesized
tcaggagcgatttctcttgt

SEQ ID NO: 19384 - DNA, 20 bp, Artificial Sequence
  chemically synthesized
caggagcgatttctcttgta

SEQ ID NO: 19385 - DNA, 20 bp, Artificial Sequence
  chemically synthesized
agcgatttctcttgtaagga

SEQ ID NO: 19386 - DNA, 20 bp, Artificial Sequence
  chemically synthesized
gatttctcttgtaaggaaag

SEQ ID NO: 19387 - DNA, 20 bp, Artificial Sequence
  chemically synthesized
atttctcttgtaaggaaaga

SEQ ID NO: 19388 - DNA, 20 bp, Artificial Sequence
  chemically synthesized
tctcttgtaaggaaagaagg

SEQ ID NO: 19389 - DNA, 20 bp, Artificial Sequence
  chemically synthesized
ctcttgtaaggaaagaaggc

SEQ ID NO: 19390 - DNA, 20 bp, Artificial Sequence
  chemically synthesized
ttgtaaggaaagaaggcagg

SEQ ID NO: 19391 - DNA, 20 bp, Artificial Sequence
  chemically synthesized
tgtaaggaaagaaggcaggc

SEQ ID NO: 19392 - DNA, 20 bp, Artificial Sequence
  chemically synthesized
aaggaaagaaggcaggcagg

SEQ ID NO: 19393 - DNA, 20 bp, Artificial Sequence
  chemically synthesized
aggaaagaaggcaggcaggc

SEQ ID NO: 19394 - DNA, 20 bp, Artificial Sequence
  chemically synthesized
aaagaaggcaggcaggcagg

SEQ ID NO: 19395 - DNA, 20 bp, Artificial Sequence
  chemically synthesized
aagaaggcaggcaggcaggc

SEQ ID NO: 19396 - DNA, 20 bp, Artificial Sequence
  chemically synthesized
aaggcaggcaggcaggcagg

SEQ ID NO: 19397 - DNA, 20 bp, Artificial Sequence
  chemically synthesized
aggcaggcaggcaggcaggc

SEQ ID NO: 19398 - DNA, 20 bp, Artificial Sequence
  chemically synthesized
caggcaggcaggcaggcagg

SEQ ID NO: 19399 - DNA, 20 bp, Artificial Sequence
  chemically synthesized
aggcaggcaggcaggcaggc

SEQ ID NO: 19400 - DNA, 20 bp, Artificial Sequence
  chemically synthesized
caggcaggcaggcaggcagg

SEQ ID NO: 19401 - DNA, 20 bp, Artificial Sequence
  chemically synthesized
aggcaggcaggcaggcaggc

SEQ ID NO: 19402 - DNA, 20 bp, Artificial Sequence
  chemically synthesized
caggcaggcaggcaggcagg

SEQ ID NO: 19403 - DNA, 20 bp, Artificial Sequence
  chemically synthesized
aggcaggcaggcaggcaggc

SEQ ID NO: 19404 - DNA, 20 bp, Artificial Sequence
  chemically synthesized
caggcaggcaggcaggcagg

SEQ ID NO: 19405 - DNA, 20 bp, Artificial Sequence
  chemically synthesized
aggcaggcaggcaggcaggc

SEQ ID NO: 19406 - DNA, 20 bp, Artificial Sequence
  chemically synthesized
caggcaggcaggcaggcagg

SEQ ID NO: 19407 - DNA, 20 bp, Artificial Sequence
  chemically synthesized
aggcaggcaggcaggcaggc

SEQ ID NO: 19408 - DNA, 20 bp, Artificial Sequence
  chemically synthesized
aggcaggcaggcaggcaggc

SEQ ID NO: 19409 - DNA, 20 bp, Artificial Sequence
  chemically synthesized
aggcaggcaggcaggcaagt

SEQ ID NO: 19410 - DNA, 20 bp, Artificial Sequence
  chemically synthesized
ggcaggcaggcaggcaagtg

SEQ ID NO: 19411 - DNA, 20 bp, Artificial Sequence
  chemically synthesized
aggaccttattttttctctg

SEQ ID NO: 19412 - DNA, 20 bp, Artificial Sequence
  chemically synthesized
ttattttttctctgcagcat

SEQ ID NO: 19413 - DNA, 20 bp, Artificial Sequence
  chemically synthesized
ttttctctgcagcatgagtg

SEQ ID NO: 19414 - DNA, 20 bp, Artificial Sequence
  chemically synthesized
tccacacccatctctcctta

SEQ ID NO: 19415 - DNA, 20 bp, Artificial Sequence
  chemically synthesized
ccacacccatctctccttac

SEQ ID NO: 19416 - DNA, 20 bp, Artificial Sequence
  chemically synthesized
ccatctctccttacaggtta

SEQ ID NO: 19417 - DNA, 20 bp, Artificial Sequence
  chemically synthesized
acaggttatagacacatttt

SEQ ID NO: 19418 - DNA, 20 bp, Artificial Sequence
  chemically synthesized
cacatttttggcactgcata

SEQ ID NO: 19419 - DNA, 20 bp, Artificial Sequence
  chemically synthesized
tttttggcactgcataaagt

SEQ ID NO: 19420 - DNA, 20 bp, Artificial Sequence
  chemically synthesized
ttaactttcacatcattaaa

SEQ ID NO: 19421 - DNA, 20 bp, Artificial Sequence
  chemically synthesized
aaagctgatgtactgacttt

SEQ ID NO: 19422 - DNA, 20 bp, Artificial Sequence
  chemically synthesized
tgtactgactttcagctgcc

SEQ ID NO: 19423 - DNA, 20 bp, Artificial Sequence
  chemically synthesized
tactgactttcagctgcctg

SEQ ID NO: 19424 - DNA, 20 bp, Artificial Sequence
  chemically synthesized
gactttcagctgcctggaga

SEQ ID NO: 19425 - DNA, 20 bp, Artificial Sequence
  chemically synthesized
tcagctgcctggagatagtt

SEQ ID NO: 19426 - DNA, 20 bp, Artificial Sequence
  chemically synthesized
cagctgcctggagatagttc

SEQ ID NO: 19427 - DNA, 20 bp, Artificial Sequence
  chemically synthesized
agctgcctggagatagttca

SEQ ID NO: 19428 - DNA, 20 bp, Artificial Sequence
  chemically synthesized
cctggagatagttcagggcc

SEQ ID NO: 19429 - DNA, 20 bp, Artificial Sequence
  chemically synthesized
gttcagggcccagcacctga

SEQ ID NO: 19430 - DNA, 20 bp, Artificial Sequence
  chemically synthesized
ttcagggcccagcacctgac

SEQ ID NO: 19431 - DNA, 20 bp, Artificial Sequence
  chemically synthesized
gtgttttatgtctctcaata

SEQ ID NO: 19432 - DNA, 20 bp, Artificial Sequence
  chemically synthesized
gttttatgtctctcaatatg

SEQ ID NO: 19433 - DNA, 20 bp, Artificial Sequence
  chemically synthesized
ttttatgtctctcaatatgg

SEQ ID NO: 19434 - DNA, 20 bp, Artificial Sequence
  chemically synthesized
gtctctcaatatggaggtta

SEQ ID NO: 19435 - DNA, 20 bp, Artificial Sequence
  chemically synthesized
atggaggttatagaatcaaa

SEQ ID NO: 19436 - DNA, 20 bp, Artificial Sequence
  chemically synthesized
aaagaccgcaaaatgcctta

SEQ ID NO: 19437 - DNA, 20 bp, Artificial Sequence
  chemically synthesized
aagaccgcaaaatgccttaa

SEQ ID NO: 19438 - DNA, 20 bp, Artificial Sequence
  chemically synthesized
cttaaaggtgttgataccca

SEQ ID NO: 19439 - DNA, 20 bp, Artificial Sequence
  chemically synthesized
aaggtgttgatacccataga

SEQ ID NO: 19440 - DNA, 20 bp, Artificial Sequence
  chemically synthesized
ggtgttgatacccatagaca

SEQ ID NO: 19441 - DNA, 20 bp, Artificial Sequence
  chemically synthesized
acccatagacagagcatgca

SEQ ID NO: 19442 - DNA, 20 bp, Artificial Sequence
  chemically synthesized
gacagagcatgcatagtcct

SEQ ID NO: 19443 - DNA, 20 bp, Artificial Sequence
  chemically synthesized
acagagcatgcatagtcctc

SEQ ID NO: 19444 - DNA, 20 bp, Artificial Sequence
  chemically synthesized
cacacctatttctttttttg

SEQ ID NO: 19445 - DNA, 20 bp, Artificial Sequence
  chemically synthesized
tttgtagcgcctgtatttga

SEQ ID NO: 19446 - DNA, 20 bp, Artificial Sequence
  chemically synthesized
ttgtagcgcctgtatttgaa

SEQ ID NO: 19447 - DNA, 20 bp, Artificial Sequence
  chemically synthesized
tgtagcgcctgtatttgaaa

SEQ ID NO: 19448 - DNA, 20 bp, Artificial Sequence
  chemically synthesized
gtagcgcctgtatttgaaag

SEQ ID NO: 19449 - DNA, 20 bp, Artificial Sequence
  chemically synthesized
ctgtatttgaaaggggttcc

SEQ ID NO: 19450 - DNA, 20 bp, Artificial Sequence
  chemically synthesized
aaaggggttcctggtgtact

SEQ ID NO: 19451 - DNA, 20 bp, Artificial Sequence
  chemically synthesized
aaggggttcctggtgtactt

SEQ ID NO: 19452 - DNA, 20 bp, Artificial Sequence
  chemically synthesized
ggggttcctggtgtacttgg

SEQ ID NO: 19453 - DNA, 20 bp, Artificial Sequence
  chemically synthesized
tcctggtgtacttgggagaa

SEQ ID NO: 19454 - DNA, 20 bp, Artificial Sequence
  chemically synthesized
tggtgtacttgggagaaaag

SEQ ID NO: 19455 - DNA, 20 bp, Artificial Sequence
  chemically synthesized
ttgggagaaaagaagcttct

SEQ ID NO: 19456 - DNA, 20 bp, Artificial Sequence
  chemically synthesized
agaaaagaagcttcttggtt

SEQ ID NO: 19457 - DNA, 20 bp, Artificial Sequence
  chemically synthesized
aaagaagcttcttggtttgg

SEQ ID NO: 19458 - DNA, 20 bp, Artificial Sequence
  chemically synthesized
cttggtttggtagtacctac

SEQ ID NO: 19459 - DNA, 20 bp, Artificial Sequence
  chemically synthesized
tggtttggtagtacctacca

SEQ ID NO: 19460 - DNA, 20 bp, Artificial Sequence
  chemically synthesized
agagactccctgtttcctgc

SEQ ID NO: 19461 - DNA, 20 bp, Artificial Sequence
  chemically synthesized
tccctgtttcctgctggtat

SEQ ID NO: 19462 - DNA, 20 bp, Artificial Sequence
  chemically synthesized
ccctgtttcctgctggtatc

SEQ ID NO: 19463 - DNA, 20 bp, Artificial Sequence
  chemically synthesized
acttctgtccattttctctc

SEQ ID NO: 19464 - DNA, 20 bp, Artificial Sequence
  chemically synthesized
ttctgtccattttctctcaa

SEQ ID NO: 19465 - DNA, 20 bp, Artificial Sequence
  chemically synthesized
tccattttctctcaagagtt

SEQ ID NO: 19466 - DNA, 20 bp, Artificial Sequence
  chemically synthesized
cattttctctcaagagttga

SEQ ID NO: 19467 - DNA, 20 bp, Artificial Sequence
  chemically synthesized
tgtgtgccatcgctctttaa

SEQ ID NO: 19468 - DNA, 20 bp, Artificial Sequence
  chemically synthesized
gtgccatcgctctttaaaag

SEQ ID NO: 19469 - DNA, 20 bp, Artificial Sequence
  chemically synthesized
tgccatcgctctttaaaaga

SEQ ID NO: 19470 - DNA, 20 bp, Artificial Sequence
  chemically synthesized
aaggaactctccttttgctg

SEQ ID NO: 19471 - DNA, 20 bp, Artificial Sequence
  chemically synthesized
tctccttttgctgtggattg

SEQ ID NO: 19472 - DNA, 20 bp, Artificial Sequence
  chemically synthesized
ctccttttgctgtggattgt

SEQ ID NO: 19473 - DNA, 20 bp, Artificial Sequence
  chemically synthesized
tccttttgctgtggattgta

SEQ ID NO: 19474 - DNA, 20 bp, Artificial Sequence
  chemically synthesized
cttttgctgtggattgtagg

SEQ ID NO: 19475 - DNA, 20 bp, Artificial Sequence
  chemically synthesized
ttgctgtggattgtagggag

SEQ ID NO: 19476 - DNA, 20 bp, Artificial Sequence
  chemically synthesized
tggattgtagggagcagatt

SEQ ID NO: 19477 - DNA, 20 bp, Artificial Sequence
  chemically synthesized
agcagatttggtgcttactg

SEQ ID NO: 19478 - DNA, 20 bp, Artificial Sequence
  chemically synthesized
tttggtgcttactgtggctt

SEQ ID NO: 19479 - DNA, 20 bp, Artificial Sequence
  chemically synthesized
ttggtgcttactgtggcttc

SEQ ID NO: 19480 - DNA, 20 bp, Artificial Sequence
  chemically synthesized
tcaggacccaccttgaatga

SEQ ID NO: 19481 - DNA, 20 bp, Artificial Sequence
  chemically synthesized
caccttgaatgacagaatgt

SEQ ID NO: 19482 - DNA, 20 bp, Artificial Sequence
  chemically synthesized
aatgacagaatgtcagtaac

SEQ ID NO: 19483 - DNA, 20 bp, Artificial Sequence
  chemically synthesized
gacagaatgtcagtaacaag

SEQ ID NO: 19484 - DNA, 20 bp, Artificial Sequence
  chemically synthesized
atgtcagtaacaagcagccc

SEQ ID NO: 19485 - DNA, 20 bp, Artificial Sequence
  chemically synthesized
tgtcagtaacaagcagcccc

SEQ ID NO: 19486 - DNA, 20 bp, Artificial Sequence
  chemically synthesized
acaagcagccccaggaaata

SEQ ID NO: 19487 - DNA, 20 bp, Artificial Sequence
  chemically synthesized
gcagccccaggaaatacggc

SEQ ID NO: 19488 - DNA, 20 bp, Artificial Sequence
  chemically synthesized
gccccaggaaatacggctgg

SEQ ID NO: 19489 - DNA, 20 bp, Artificial Sequence
  chemically synthesized
cctcttgatctttgcccatc

SEQ ID NO: 19490 - DNA, 20 bp, Artificial Sequence
  chemically synthesized
gcccatcgagcaacaccatg

SEQ ID NO: 19491 - DNA, 20 bp, Artificial Sequence
  chemically synthesized
atcgagcaacaccatgtgga

SEQ ID NO: 19492 - DNA, 20 bp, Artificial Sequence
  chemically synthesized
ccatgtggatggtgtccatc

SEQ ID NO: 19493 - DNA, 20 bp, Artificial Sequence
  chemically synthesized
cagcttgacctgaacttgaa

SEQ ID NO: 19494 - DNA, 20 bp, Artificial Sequence
  chemically synthesized
gaacttgaacagtaattgat

SEQ ID NO: 19495 - DNA, 20 bp, Artificial Sequence
  chemically synthesized
gagtccttaaaatccacgcc

SEQ ID NO: 19496 - DNA, 20 bp, Artificial Sequence
  chemically synthesized
taaaatccacgcccggcccc

SEQ ID NO: 19497 - DNA, 20 bp, Artificial Sequence
  chemically synthesized
aaaatccacgcccggccccc

SEQ ID NO: 19498 - DNA, 20 bp, Artificial Sequence
  chemically synthesized
cccggcccccaggaatgcct

SEQ ID NO: 19499 - DNA, 20 bp, Artificial Sequence
  chemically synthesized
ccggcccccaggaatgcctt

SEQ ID NO: 19500 - DNA, 20 bp, Artificial Sequence
  chemically synthesized
cggcccccaggaatgccttg

SEQ ID NO: 19501 - DNA, 20 bp, Artificial Sequence
  chemically synthesized
cccatcccacgttctgattc

SEQ ID NO: 19502 - DNA, 20 bp, Artificial Sequence
  chemically synthesized
tcccacgttctgattctgga

SEQ ID NO: 19503 - DNA, 20 bp, Artificial Sequence
  chemically synthesized
ctgattctggatggactttt

SEQ ID NO: 19504 - DNA, 20 bp, Artificial Sequence
  chemically synthesized
tttaagtgaactctgatgat

SEQ ID NO: 19505 - DNA, 20 bp, Artificial Sequence
  chemically synthesized
aagtgaactctgatgatgag

SEQ ID NO: 19506 - DNA, 20 bp, Artificial Sequence
  chemically synthesized
agtgaactctgatgatgagt

SEQ ID NO: 19507 - DNA, 20 bp, Artificial Sequence
  chemically synthesized
tctttctcaacgttctctgc

SEQ ID NO: 19508 - DNA, 20 bp, Artificial Sequence
  chemically synthesized
ctttctcaacgttctctgct

SEQ ID NO: 19509 - DNA, 20 bp, Artificial Sequence
  chemically synthesized
gtcacctcccatgccctctc

SEQ ID NO: 19510 - DNA, 20 bp, Artificial Sequence
  chemically synthesized
cccatgccctctctggtgtg

SEQ ID NO: 19511 - DNA, 20 bp, Artificial Sequence
  chemically synthesized
ctctggtgtgtggtgattct

SEQ ID NO: 19512 - DNA, 20 bp, Artificial Sequence
  chemically synthesized
tgtgtggtgattctcagatc

SEQ ID NO: 19513 - DNA, 20 bp, Artificial Sequence
  chemically synthesized
tgtggtgattctcagatcta

SEQ ID NO: 19514 - DNA, 20 bp, Artificial Sequence
  chemically synthesized
tccccccatgcctttgcgtg

SEQ ID NO: 19515 - DNA, 20 bp, Artificial Sequence
  chemically synthesized
ccccccatgcctttgcgtgt

SEQ ID NO: 19516 - DNA, 20 bp, Artificial Sequence
  chemically synthesized
cccatgcctttgcgtgtggg

SEQ ID NO: 19517 - DNA, 20 bp, Artificial Sequence
  chemically synthesized
tcccatgtgccatttttacc

SEQ ID NO: 19518 - DNA, 20 bp, Artificial Sequence
  chemically synthesized
tctttattcatatttaaatg

SEQ ID NO: 19519 - DNA, 20 bp, Artificial Sequence
  chemically synthesized
ctttattcatatttaaatgc

SEQ ID NO: 19520 - DNA, 20 bp, Artificial Sequence
  chemically synthesized
attcatatttaaatgcaggt

SEQ ID NO: 19521 - DNA, 20 bp, Artificial Sequence
  chemically synthesized
atatttaaatgcaggtgagt

SEQ ID NO: 19522 - DNA, 20 bp, Artificial Sequence
  chemically synthesized
tgagttggaatgtcatctta

SEQ ID NO: 19523 - DNA, 20 bp, Artificial Sequence
  chemically synthesized
gagttggaatgtcatcttac

SEQ ID NO: 19524 - DNA, 20 bp, Artificial Sequence
  chemically synthesized
atcctgaatctgctctatcg

SEQ ID NO: 19525 - DNA, 20 bp, Artificial Sequence
  chemically synthesized
tttaaaactaaattaaatgt

SEQ ID NO: 19526 - DNA, 20 bp, Artificial Sequence
  chemically synthesized
ctaaattaaatgttagtact

SEQ ID NO: 19527 - DNA, 20 bp, Artificial Sequence
  chemically synthesized
aattaaatgttagtactaag

SEQ ID NO: 19528 - DNA, 20 bp, Artificial Sequence
  chemically synthesized
taaatgttagtactaagtag

SEQ ID NO: 19529 - DNA, 20 bp, Artificial Sequence
  chemically synthesized
aagtagtagccaaattctct

SEQ ID NO: 19530 - DNA, 20 bp, Artificial Sequence
  chemically synthesized
tctctgagtctgcttcatga

SEQ ID NO: 19531 - DNA, 20 bp, Artificial Sequence
  chemically synthesized
ctctgagtctgcttcatgac

SEQ ID NO: 19532 - DNA, 20 bp, Artificial Sequence
  chemically synthesized
catgacaggctgtaacacac

SEQ ID NO: 19533 - DNA, 20 bp, Artificial Sequence
  chemically synthesized
caggctgtaacacactggta

SEQ ID NO: 19534 - DNA, 20 bp, Artificial Sequence
  chemically synthesized
tgtaacacactggtatggaa

SEQ ID NO: 19535 - DNA, 20 bp, Artificial Sequence
  chemically synthesized
aacacactggtatggaacgg

SEQ ID NO: 19536 - DNA, 20 bp, Artificial Sequence
  chemically synthesized
acacactggtatggaacggt

SEQ ID NO: 19537 - DNA, 20 bp, Artificial Sequence
  chemically synthesized
tatgatgttttatgtattat

SEQ ID NO: 19538 - DNA, 20 bp, Artificial Sequence
  chemically synthesized
tgatgttttatgtattatga

SEQ ID NO: 19539 - DNA, 20 bp, Artificial Sequence
  chemically synthesized
ttttatgtattatgagagct

SEQ ID NO: 19540 - DNA, 20 bp, Artificial Sequence
  chemically synthesized
tatgtattatgagagctcag

SEQ ID NO: 19541 - DNA, 20 bp, Artificial Sequence
  chemically synthesized
gagagctcagcagatgttga

SEQ ID NO: 19542 - DNA, 20 bp, Artificial Sequence
  chemically synthesized
gagctcagcagatgttgaca

SEQ ID NO: 19543 - DNA, 20 bp, Artificial Sequence
  chemically synthesized
agctcagcagatgttgacag

SEQ ID NO: 19544 - DNA, 20 bp, Artificial Sequence
  chemically synthesized
gctcagcagatgttgacaga

SEQ ID NO: 19545 - DNA, 20 bp, Artificial Sequence
  chemically synthesized
cagatgttgacagagggaat

SEQ ID NO: 19546 - DNA, 20 bp, Artificial Sequence
  chemically synthesized
gttgacagagggaatgagac

SEQ ID NO: 19547 - DNA, 20 bp, Artificial Sequence
  chemically synthesized
ggaatgagacaagatgattt

SEQ ID NO: 19548 - DNA, 20 bp, Artificial Sequence
  chemically synthesized
gaatgagacaagatgatttt

SEQ ID NO: 19549 - DNA, 20 bp, Artificial Sequence
  chemically synthesized
agacaagatgattttaggtc

SEQ ID NO: 19550 - DNA, 20 bp, Artificial Sequence
  chemically synthesized
gacaagatgattttaggtct

SEQ ID NO: 19551 - DNA, 20 bp, Artificial Sequence
  chemically synthesized
gattttaggtctaggtttga

SEQ ID NO: 19552 - DNA, 20 bp, Artificial Sequence
  chemically synthesized
aggtttgatagataaaaaac

SEQ ID NO: 19553 - DNA, 20 bp, Artificial Sequence
  chemically synthesized
ggtttgatagataaaaaact

SEQ ID NO: 19554 - DNA, 20 bp, Artificial Sequence
  chemically synthesized
aattttatattttctttgaa

SEQ ID NO: 19555 - DNA, 20 bp, Artificial Sequence
  chemically synthesized
ttatattttctttgaaaaga

SEQ ID NO: 19556 - DNA, 20 bp, Artificial Sequence
  chemically synthesized
ttgaaaagatagctaaatct

SEQ ID NO: 19557 - DNA, 20 bp, Artificial Sequence
  chemically synthesized
attattttattttatttatt

SEQ ID NO: 19558 - DNA, 20 bp, Artificial Sequence
  chemically synthesized
tttatttattaagctttttg

SEQ ID NO: 19559 - DNA, 20 bp, Artificial Sequence
  chemically synthesized
tatttattaagctttttgta

SEQ ID NO: 19560 - DNA, 20 bp, Artificial Sequence
  chemically synthesized
tattaagctttttgtagaga

SEQ ID NO: 19561 - DNA, 20 bp, Artificial Sequence
  chemically synthesized
attaagctttttgtagagac

SEQ ID NO: 19562 - DNA, 20 bp, Artificial Sequence
  chemically synthesized
ttaagctttttgtagagaca

SEQ ID NO: 19563 - DNA, 20 bp, Artificial Sequence
  chemically synthesized
cagggttttgctatgttgcc

SEQ ID NO: 19564 - DNA, 20 bp, Artificial Sequence
  chemically synthesized
agggttttgctatgttgccc

SEQ ID NO: 19565 - DNA, 20 bp, Artificial Sequence
  chemically synthesized
ttttgctatgttgcccaggc

SEQ ID NO: 19566 - DNA, 20 bp, Artificial Sequence
  chemically synthesized
ccaggctggtcttgaactcc

SEQ ID NO: 19567 - DNA, 20 bp, Artificial Sequence
  chemically synthesized
ggtcttgaactcctagcttc

SEQ ID NO: 19568 - DNA, 20 bp, Artificial Sequence
  chemically synthesized
ttcaagcaatcttccctctg

SEQ ID NO: 19569 - DNA, 20 bp, Artificial Sequence
  chemically synthesized
ctgtggccttccaaatttct

SEQ ID NO: 19570 - DNA, 20 bp, Artificial Sequence
  chemically synthesized
cttccaaatttctgagatta

SEQ ID NO: 19571 - DNA, 20 bp, Artificial Sequence
  chemically synthesized
ttccaaatttctgagattat

SEQ ID NO: 19572 - DNA, 20 bp, Artificial Sequence
  chemically synthesized
atttctgagattataggcat

SEQ ID NO: 19573 - DNA, 20 bp, Artificial Sequence
  chemically synthesized
taggcataagcaaatgcctc

SEQ ID NO: 19574 - DNA, 20 bp, Artificial Sequence
  chemically synthesized
agcaaatgcctctggccttc

SEQ ID NO: 19575 - DNA, 20 bp, Artificial Sequence
  chemically synthesized
gccttcaagtaattaattta

SEQ ID NO: 19576 - DNA, 20 bp, Artificial Sequence
  chemically synthesized
tttctctcctcccctaaaat

SEQ ID NO: 19577 - DNA, 20 bp, Artificial Sequence
  chemically synthesized
ttctctcctcccctaaaatt

SEQ ID NO: 19578 - DNA, 20 bp, Artificial Sequence
  chemically synthesized
cctcccctaaaattgggttt

SEQ ID NO: 19579 - DNA, 20 bp, Artificial Sequence
  chemically synthesized
tcccctaaaattgggtttta

SEQ ID NO: 19580 - DNA, 20 bp, Artificial Sequence
  chemically synthesized
ctaaaattgggttttagagt

SEQ ID NO: 19581 - DNA, 20 bp, Artificial Sequence
  chemically synthesized
taaaattgggttttagagta

SEQ ID NO: 19582 - DNA, 20 bp, Artificial Sequence
  chemically synthesized
gagtaaggttcttgttcctc

SEQ ID NO: 19583 - DNA, 20 bp, Artificial Sequence
  chemically synthesized
ttcttgttcctctagtcgac

SEQ ID NO: 19584 - DNA, 20 bp, Artificial Sequence
  chemically synthesized
cttgttcctctagtcgacaa

SEQ ID NO: 19585 - DNA, 20 bp, Artificial Sequence
  chemically synthesized
tctagtcgacaagagtttct

SEQ ID NO: 19586 - DNA, 20 bp, Artificial Sequence
  chemically synthesized
ctagtcgacaagagtttctg

SEQ ID NO: 19587 - DNA, 20 bp, Artificial Sequence
  chemically synthesized
caagagtttctgaggaatca

SEQ ID NO: 19588 - DNA, 20 bp, Artificial Sequence
  chemically synthesized
gagtttctgaggaatcatag

SEQ ID NO: 19589 - DNA, 20 bp, Artificial Sequence
  chemically synthesized
ttctgaggaatcatagaaga

SEQ ID NO: 19590 - DNA, 20 bp, Artificial Sequence
  chemically synthesized
aggaatcatagaagaaagca

SEQ ID NO: 19591 - DNA, 20 bp, Artificial Sequence
  chemically synthesized
agaagaaagcacagctcttt

SEQ ID NO: 19592 - DNA, 20 bp, Artificial Sequence
  chemically synthesized
aaagcacagctctttgagca

SEQ ID NO: 19593 - DNA, 20 bp, Artificial Sequence
  chemically synthesized
cacagctctttgagcataga

SEQ ID NO: 19594 - DNA, 20 bp, Artificial Sequence
  chemically synthesized
agcatagatagtttccttcg

SEQ ID NO: 19595 - DNA, 20 bp, Artificial Sequence
  chemically synthesized
tagatagtttccttcgtgga

SEQ ID NO: 19596 - DNA, 20 bp, Artificial Sequence
  chemically synthesized
gtttccttcgtggaaagcca

SEQ ID NO: 19597 - DNA, 20 bp, Artificial Sequence
  chemically synthesized
agccaaagtgaatacttatt

SEQ ID NO: 19598 - DNA, 20 bp, Artificial Sequence
  chemically synthesized
cttattgagcatcttctatg

SEQ ID NO: 19599 - DNA, 20 bp, Artificial Sequence
  chemically synthesized
gagcatcttctatgtagaca

SEQ ID NO: 19600 - DNA, 20 bp, Artificial Sequence
  chemically synthesized
tatgtagacatagacttgtg

SEQ ID NO: 19601 - DNA, 20 bp, Artificial Sequence
  chemically synthesized
tcattaaccctgtcatttta

SEQ ID NO: 19602 - DNA, 20 bp, Artificial Sequence
  chemically synthesized
aaccctgtcattttacagat

SEQ ID NO: 19603 - DNA, 20 bp, Artificial Sequence
  chemically synthesized
ctgtcattttacagatgaga

SEQ ID NO: 19604 - DNA, 20 bp, Artificial Sequence
  chemically synthesized
tgtcattttacagatgagaa

SEQ ID NO: 19605 - DNA, 20 bp, Artificial Sequence
  chemically synthesized
ttttacagatgagaaaggtt

SEQ ID NO: 19606 - DNA, 20 bp, Artificial Sequence
  chemically synthesized
tttacagatgagaaaggttg

SEQ ID NO: 19607 - DNA, 20 bp, Artificial Sequence
  chemically synthesized
agatgagaaaggttgaggct

SEQ ID NO: 19608 - DNA, 20 bp, Artificial Sequence
  chemically synthesized
atgagaaaggttgaggctaa

SEQ ID NO: 19609 - DNA, 20 bp, Artificial Sequence
  chemically synthesized
tgagaaaggttgaggctaag

SEQ ID NO: 19610 - DNA, 20 bp, Artificial Sequence
  chemically synthesized
gagaaaggttgaggctaaga

SEQ ID NO: 19611 - DNA, 20 bp, Artificial Sequence
  chemically synthesized
agaaaggttgaggctaagag

SEQ ID NO: 19612 - DNA, 20 bp, Artificial Sequence
  chemically synthesized
aaaggttgaggctaagaggg

SEQ ID NO: 19613 - DNA, 20 bp, Artificial Sequence
  chemically synthesized
gttgaggctaagaggggagt

SEQ ID NO: 19614 - DNA, 20 bp, Artificial Sequence
  chemically synthesized
gctaagaggggagtgagtgc

SEQ ID NO: 19615 - DNA, 20 bp, Artificial Sequence
  chemically synthesized
taagaggggagtgagtgcca

SEQ ID NO: 19616 - DNA, 20 bp, Artificial Sequence
  chemically synthesized
gagtgccagagtctacttgc

SEQ ID NO: 19617 - DNA, 20 bp, Artificial Sequence
  chemically synthesized
agtgccagagtctacttgct

SEQ ID NO: 19618 - DNA, 20 bp, Artificial Sequence
  chemically synthesized
gccagagtctacttgctagg

SEQ ID NO: 19619 - DNA, 20 bp, Artificial Sequence
  chemically synthesized
agagtctacttgctaggcag

SEQ ID NO: 19620 - DNA, 20 bp, Artificial Sequence
  chemically synthesized
gtctacttgctaggcagtgg

SEQ ID NO: 19621 - DNA, 20 bp, Artificial Sequence
  chemically synthesized
ttgctaggcagtggtagact

SEQ ID NO: 19622 - DNA, 20 bp, Artificial Sequence
  chemically synthesized
aggcagtggtagacttggcc

SEQ ID NO: 19623 - DNA, 20 bp, Artificial Sequence
  chemically synthesized
gcagtggtagacttggccca

SEQ ID NO: 19624 - DNA, 20 bp, Artificial Sequence
  chemically synthesized
ggtagacttggcccagagcc

SEQ ID NO: 19625 - DNA, 20 bp, Artificial Sequence
  chemically synthesized
gtagacttggcccagagcct

SEQ ID NO: 19626 - DNA, 20 bp, Artificial Sequence
  chemically synthesized
tagacttggcccagagcctg

SEQ ID NO: 19627 - DNA, 20 bp, Artificial Sequence
  chemically synthesized
gggcttcccactttcattcc

SEQ ID NO: 19628 - DNA, 20 bp, Artificial Sequence
  chemically synthesized
ctgactgtaccaatcgcaca

SEQ ID NO: 19629 - DNA, 20 bp, Artificial Sequence
  chemically synthesized
aatcgcacatggcctctcca

SEQ ID NO: 19630 - DNA, 20 bp, Artificial Sequence
  chemically synthesized
gcacatggcctctccatggc

SEQ ID NO: 19631 - DNA, 20 bp, Artificial Sequence
  chemically synthesized
catggcctctccatggccag

SEQ ID NO: 19632 - DNA, 20 bp, Artificial Sequence
  chemically synthesized
atggcctctccatggccagc

SEQ ID NO: 19633 - DNA, 20 bp, Artificial Sequence
  chemically synthesized
ggcctctccatggccagcag

SEQ ID NO: 19634 - DNA, 20 bp, Artificial Sequence
  chemically synthesized
tctccatggccagcaggagc

SEQ ID NO: 19635 - DNA, 20 bp, Artificial Sequence
  chemically synthesized
tccatggccagcaggagcca

SEQ ID NO: 19636 - DNA, 20 bp, Artificial Sequence
  chemically synthesized
ccatggccagcaggagccag

SEQ ID NO: 19637 - DNA, 20 bp, Artificial Sequence
  chemically synthesized
tggccagcaggagccagagg

SEQ ID NO: 19638 - DNA, 20 bp, Artificial Sequence
  chemically synthesized
ggtggcccgcatgtgctttg

SEQ ID NO: 19639 - DNA, 20 bp, Artificial Sequence
  chemically synthesized
tggcccgcatgtgctttgca

SEQ ID NO: 19640 - DNA, 20 bp, Artificial Sequence
  chemically synthesized
ggcccgcatgtgctttgcag

SEQ ID NO: 19641 - DNA, 20 bp, Artificial Sequence
  chemically synthesized
acttgcacccacgcttttat

SEQ ID NO: 19642 - DNA, 20 bp, Artificial Sequence
  chemically synthesized
acccacgcttttatcggtga

SEQ ID NO: 19643 - DNA, 20 bp, Artificial Sequence
  chemically synthesized
acgcttttatcggtgatggc

SEQ ID NO: 19644 - DNA, 20 bp, Artificial Sequence
  chemically synthesized
gctggaatgcttttcttaac

SEQ ID NO: 19645 - DNA, 20 bp, Artificial Sequence
  chemically synthesized
tggaatgcttttcttaactg

SEQ ID NO: 19646 - DNA, 20 bp, Artificial Sequence
  chemically synthesized
tcttaactggagctttgttg

SEQ ID NO: 19647 - DNA, 20 bp, Artificial Sequence
  chemically synthesized
ttaactggagctttgttgaa

SEQ ID NO: 19648 - DNA, 20 bp, Artificial Sequence
  chemically synthesized
tggagctttgttgaagagcc

SEQ ID NO: 19649 - DNA, 20 bp, Artificial Sequence
  chemically synthesized
tgaagagcctggtgcttttg

SEQ ID NO: 19650 - DNA, 20 bp, Artificial Sequence
  chemically synthesized
agagcctggtgcttttgtgg

SEQ ID NO: 19651 - DNA, 20 bp, Artificial Sequence
  chemically synthesized
cttttgtggcagtgctaacc

SEQ ID NO: 19652 - DNA, 20 bp, Artificial Sequence
  chemically synthesized
ttttgtggcagtgctaacct

SEQ ID NO: 19653 - DNA, 20 bp, Artificial Sequence
  chemically synthesized
tttgtggcagtgctaacctg

SEQ ID NO: 19654 - DNA, 20 bp, Artificial Sequence
  chemically synthesized
tgtggcagtgctaacctggg

SEQ ID NO: 19655 - DNA, 20 bp, Artificial Sequence
  chemically synthesized
gtgctaacctggggagccca

SEQ ID NO: 19656 - DNA, 20 bp, Artificial Sequence
  chemically synthesized
gggagcccatggtaaaaccc

SEQ ID NO: 19657 - DNA, 20 bp, Artificial Sequence
  chemically synthesized
cccaatcacctgtgctgttg

SEQ ID NO: 19658 - DNA, 20 bp, Artificial Sequence
  chemically synthesized
caatcacctgtgctgttgca

SEQ ID NO: 19659 - DNA, 20 bp, Artificial Sequence
  chemically synthesized
acctgtgctgttgcagagaa

SEQ ID NO: 19660 - DNA, 20 bp, Artificial Sequence
  chemically synthesized
ctgttttctctgcccttttt

SEQ ID NO: 19661 - DNA, 20 bp, Artificial Sequence
  chemically synthesized
tgttttctctgccctttttc

SEQ ID NO: 19662 - DNA, 20 bp, Artificial Sequence
  chemically synthesized
gttttctctgccctttttcg

SEQ ID NO: 19663 - DNA, 20 bp, Artificial Sequence
  chemically synthesized
tctctgccctttttcggggc

SEQ ID NO: 19664 - DNA, 20 bp, Artificial Sequence
  chemically synthesized
cttcctaccacctttcctgc

SEQ ID NO: 19665 - DNA, 20 bp, Artificial Sequence
  chemically synthesized
ttcctaccacctttcctgct

SEQ ID NO: 19666 - DNA, 20 bp, Artificial Sequence
  chemically synthesized
tcctaccacctttcctgcta

SEQ ID NO: 19667 - DNA, 20 bp, Artificial Sequence
  chemically synthesized
ctttcctgctagggctccca

SEQ ID NO: 19668 - DNA, 20 bp, Artificial Sequence
  chemically synthesized
ctgctagggctcccaaagtg

SEQ ID NO: 19669 - DNA, 20 bp, Artificial Sequence
  chemically synthesized
ctcccaaagtgtggcccttc

SEQ ID NO: 19670 - DNA, 20 bp, Artificial Sequence
  chemically synthesized
tcccaaagtgtggcccttct

SEQ ID NO: 19671 - DNA, 20 bp, Artificial Sequence
  chemically synthesized
cccaaagtgtggcccttctg

SEQ ID NO: 19672 - DNA, 20 bp, Artificial Sequence
  chemically synthesized
tggcccttctggggtttaca

SEQ ID NO: 19673 - DNA, 20 bp, Artificial Sequence
  chemically synthesized
tggggtttacatggtgtgcc

SEQ ID NO: 19674 - DNA, 20 bp, Artificial Sequence
  chemically synthesized
ggggtttacatggtgtgccc

SEQ ID NO: 19675 - DNA, 20 bp, Artificial Sequence
  chemically synthesized
gggtttacatggtgtgccca

SEQ ID NO: 19676 - DNA, 20 bp, Artificial Sequence
  chemically synthesized
tacatggtgtgcccagggaa

SEQ ID NO: 19677 - DNA, 20 bp, Artificial Sequence
  chemically synthesized
ggtgtgcccagggaatagct

SEQ ID NO: 19678 - DNA, 20 bp, Artificial Sequence
  chemically synthesized
aatagcttggcttttttatt

SEQ ID NO: 19679 - DNA, 20 bp, Artificial Sequence
  chemically synthesized
ggcttttttattcagataac

SEQ ID NO: 19680 - DNA, 20 bp, Artificial Sequence
  chemically synthesized
cttttttattcagataactg

SEQ ID NO: 19681 - DNA, 20 bp, Artificial Sequence
  chemically synthesized
attcagataactggagataa

SEQ ID NO: 19682 - DNA, 20 bp, Artificial Sequence
  chemically synthesized
tcagataactggagataatg

SEQ ID NO: 19683 - DNA, 20 bp, Artificial Sequence
  chemically synthesized
gataactggagataatggag

SEQ ID NO: 19684 - DNA, 20 bp, Artificial Sequence
  chemically synthesized
actggagataatggagtaga

SEQ ID NO: 19685 - DNA, 20 bp, Artificial Sequence
  chemically synthesized
tggagataatggagtagatg

SEQ ID NO: 19686 - DNA, 20 bp, Artificial Sequence
  chemically synthesized
gataatggagtagatggagt

SEQ ID NO: 19687 - DNA, 20 bp, Artificial Sequence
  chemically synthesized
ataatggagtagatggagtt

SEQ ID NO: 19688 - DNA, 20 bp, Artificial Sequence
  chemically synthesized
taatggagtagatggagttg

SEQ ID NO: 19689 - DNA, 20 bp, Artificial Sequence
  chemically synthesized
tggagtagatggagttgggg

SEQ ID NO: 19690 - DNA, 20 bp, Artificial Sequence
  chemically synthesized
tagatggagttggggtggtg

SEQ ID NO: 19691 - DNA, 20 bp, Artificial Sequence
  chemically synthesized
agatggagttggggtggtga

SEQ ID NO: 19692 - DNA, 20 bp, Artificial Sequence
  chemically synthesized
tgaaggaacgtgtaccctct

SEQ ID NO: 19693 - DNA, 20 bp, Artificial Sequence
  chemically synthesized
gaaggaacgtgtaccctctc

SEQ ID NO: 19694 - DNA, 20 bp, Artificial Sequence
  chemically synthesized
aaggaacgtgtaccctctca

SEQ ID NO: 19695 - DNA, 20 bp, Artificial Sequence
  chemically synthesized
aggaacgtgtaccctctcag

SEQ ID NO: 19696 - DNA, 20 bp, Artificial Sequence
  chemically synthesized
aacgtgtaccctctcagggg

SEQ ID NO: 19697 - DNA, 20 bp, Artificial Sequence
  chemically synthesized
tgtaccctctcaggggcaga

SEQ ID NO: 19698 - DNA, 20 bp, Artificial Sequence
  chemically synthesized
ctcaggggcagatggccctc

SEQ ID NO: 19699 - DNA, 20 bp, Artificial Sequence
  chemically synthesized
ggcagatggccctccagaat

SEQ ID NO: 19700 - DNA, 20 bp, Artificial Sequence
  chemically synthesized
gatggccctccagaattggc

SEQ ID NO: 19701 - DNA, 20 bp, Artificial Sequence
  chemically synthesized
caacctcttcctcaccaccc

SEQ ID NO: 19702 - DNA, 20 bp, Artificial Sequence
  chemically synthesized
ccaccctagttctattttta

SEQ ID NO: 19703 - DNA, 20 bp, Artificial Sequence
  chemically synthesized
ttaaagacacctctcaatcg

SEQ ID NO: 19704 - DNA, 20 bp, Artificial Sequence
  chemically synthesized
taaagacacctctcaatcgc

SEQ ID NO: 19705 - DNA, 20 bp, Artificial Sequence
  chemically synthesized
aacccatttcctcttcattc

SEQ ID NO: 19706 - DNA, 20 bp, Artificial Sequence
  chemically synthesized
cccatttcctcttcattcca

SEQ ID NO: 19707 - DNA, 20 bp, Artificial Sequence
  chemically synthesized
tcttcattccagagacgaca

SEQ ID NO: 19708 - DNA, 20 bp, Artificial Sequence
  chemically synthesized
acgacaaagtatctcatcac

SEQ ID NO: 19709 - DNA, 20 bp, Artificial Sequence
  chemically synthesized
aagtatctcatcaccagctt

SEQ ID NO: 19710 - DNA, 20 bp, Artificial Sequence
  chemically synthesized
agtatctcatcaccagcttt

SEQ ID NO: 19711 - DNA, 20 bp, Artificial Sequence
  chemically synthesized
ctttcctgaacctgaactca

SEQ ID NO: 19712 - DNA, 20 bp, Artificial Sequence
  chemically synthesized
attgtttctatgcctctctt

SEQ ID NO: 19713 - DNA, 20 bp, Artificial Sequence
  chemically synthesized
tgcctctctttagaatctgc

SEQ ID NO: 19714 - DNA, 20 bp, Artificial Sequence
  chemically synthesized
tttagaatctgctggttttc

SEQ ID NO: 19715 - DNA, 20 bp, Artificial Sequence
  chemically synthesized
cagctcttttactcaaacat

SEQ ID NO: 19716 - DNA, 20 bp, Artificial Sequence
  chemically synthesized
aaacattagtctgataacta

SEQ ID NO: 19717 - DNA, 20 bp, Artificial Sequence
  chemically synthesized
acattagtctgataactaca

SEQ ID NO: 19718 - DNA, 20 bp, Artificial Sequence
  chemically synthesized
ctgataactacagagtccaa

SEQ ID NO: 19719 - DNA, 20 bp, Artificial Sequence
  chemically synthesized
taactacagagtccaatggc

SEQ ID NO: 19720 - DNA, 20 bp, Artificial Sequence
  chemically synthesized
agtccaatggcaagatatct

SEQ ID NO: 19721 - DNA, 20 bp, Artificial Sequence
  chemically synthesized
ttagtgttttccacattctt

SEQ ID NO: 19722 - DNA, 20 bp, Artificial Sequence
  chemically synthesized
ctgcttgcttttttaaaaac

SEQ ID NO: 19723 - DNA, 20 bp, Artificial Sequence
  chemically synthesized
cttcattgatgactcatgct

SEQ ID NO: 19724 - DNA, 20 bp, Artificial Sequence
  chemically synthesized
ttgatgactcatgctcagct

SEQ ID NO: 19725 - DNA, 20 bp, Artificial Sequence
  chemically synthesized
atgctcagcttggtgtccac

SEQ ID NO: 19726 - DNA, 20 bp, Artificial Sequence
  chemically synthesized
tgctcagcttggtgtccact

SEQ ID NO: 19727 - DNA, 20 bp, Artificial Sequence
  chemically synthesized
ttggtgtccactaggaatgc

SEQ ID NO: 19728 - DNA, 20 bp, Artificial Sequence
  chemically synthesized
taggaatgctagatctttgt

SEQ ID NO: 19729 - DNA, 20 bp, Artificial Sequence
  chemically synthesized
gatctttgtcagccatcttt

SEQ ID NO: 19730 - DNA, 20 bp, Artificial Sequence
  chemically synthesized
atctttgtcagccatctttg

SEQ ID NO: 19731 - DNA, 20 bp, Artificial Sequence
  chemically synthesized
tctttgtcagccatctttga

SEQ ID NO: 19732 - DNA, 20 bp, Artificial Sequence
  chemically synthesized
ttgtcagccatctttgaggg

SEQ ID NO: 19733 - DNA, 20 bp, Artificial Sequence
  chemically synthesized
ggcagttaaactttcactcc

SEQ ID NO: 19734 - DNA, 20 bp, Artificial Sequence
  chemically synthesized
atgccacatttctcccatcc

SEQ ID NO: 19735 - DNA, 20 bp, Artificial Sequence
  chemically synthesized
tgccacatttctcccatccc

SEQ ID NO: 19736 - DNA, 20 bp, Artificial Sequence
  chemically synthesized
tctctgtccttgtccatatt

SEQ ID NO: 19737 - DNA, 20 bp, Artificial Sequence
  chemically synthesized
gtccttgtccatattgagct

SEQ ID NO: 19738 - DNA, 20 bp, Artificial Sequence
  chemically synthesized
tagctctccactcctgacac

SEQ ID NO: 19739 - DNA, 20 bp, Artificial Sequence
  chemically synthesized
tgacttcctctccacttccc

SEQ ID NO: 19740 - DNA, 20 bp, Artificial Sequence
  chemically synthesized
ctctccacttccccggatga

SEQ ID NO: 19741 - DNA, 20 bp, Artificial Sequence
  chemically synthesized
ccacttccccggatgacggt

SEQ ID NO: 19742 - DNA, 20 bp, Artificial Sequence
  chemically synthesized
gagttacgatcttgtctcct

SEQ ID NO: 19743 - DNA, 20 bp, Artificial Sequence
  chemically synthesized
agttacgatcttgtctccta

SEQ ID NO: 19744 - DNA, 20 bp, Artificial Sequence
  chemically synthesized
ctaaggtgccccctccctct

SEQ ID NO: 19745 - DNA, 20 bp, Artificial Sequence
  chemically synthesized
ctccctcttggctcctctcc

SEQ ID NO: 19746 - DNA, 20 bp, Artificial Sequence
  chemically synthesized
ctctcccagtgacgacttca

SEQ ID NO: 19747 - DNA, 20 bp, Artificial Sequence
  chemically synthesized
ctcccagtgacgacttcatg

SEQ ID NO: 19748 - DNA, 20 bp, Artificial Sequence
  chemically synthesized
tcccagtgacgacttcatgg

SEQ ID NO: 19749 - DNA, 20 bp, Artificial Sequence
  chemically synthesized
gtgacgacttcatggaggct

SEQ ID NO: 19750 - DNA, 20 bp, Artificial Sequence
  chemically synthesized
ttcatggaggctgagaaata

SEQ ID NO: 19751 - DNA, 20 bp, Artificial Sequence
  chemically synthesized
tggaggctgagaaatatagt

SEQ ID NO: 19752 - DNA, 20 bp, Artificial Sequence
  chemically synthesized
aggctgagaaatatagtgag

SEQ ID NO: 19753 - DNA, 20 bp, Artificial Sequence
  chemically synthesized
ttcttgcctcacttactgct

SEQ ID NO: 19754 - DNA, 20 bp, Artificial Sequence
  chemically synthesized
tgcctcacttactgctcggt

SEQ ID NO: 19755 - DNA, 20 bp, Artificial Sequence
  chemically synthesized
tcacttactgctcggtaagt

SEQ ID NO: 19756 - DNA, 20 bp, Artificial Sequence
  chemically synthesized
tactgctcggtaagttagct

SEQ ID NO: 19757 - DNA, 20 bp, Artificial Sequence
  chemically synthesized
actgctcggtaagttagctc

SEQ ID NO: 19758 - DNA, 20 bp, Artificial Sequence
  chemically synthesized
ctgctcggtaagttagctca

SEQ ID NO: 19759 - DNA, 20 bp, Artificial Sequence
  chemically synthesized
tgctcggtaagttagctcag

SEQ ID NO: 19760 - DNA, 20 bp, Artificial Sequence
  chemically synthesized
gctcggtaagttagctcagg

SEQ ID NO: 19761 - DNA, 20 bp, Artificial Sequence
  chemically synthesized
tcggtaagttagctcagggg

SEQ ID NO: 19762 - DNA, 20 bp, Artificial Sequence
  chemically synthesized
ggtaagttagctcaggggga

SEQ ID NO: 19763 - DNA, 20 bp, Artificial Sequence
  chemically synthesized
cataactttgcactgacatc

SEQ ID NO: 19764 - DNA, 20 bp, Artificial Sequence
  chemically synthesized
taactttgcactgacatctg

SEQ ID NO: 19765 - DNA, 20 bp, Artificial Sequence
  chemically synthesized
gcactgacatctggagaaca

SEQ ID NO: 19766 - DNA, 20 bp, Artificial Sequence
  chemically synthesized
cactgacatctggagaacaa

SEQ ID NO: 19767 - DNA, 20 bp, Artificial Sequence
  chemically synthesized
catctggagaacaaaggttt

SEQ ID NO: 19768 - DNA, 20 bp, Artificial Sequence
  chemically synthesized
ctggagaacaaaggttttgg

SEQ ID NO: 19769 - DNA, 20 bp, Artificial Sequence
  chemically synthesized
ggagaacaaaggttttggaa

SEQ ID NO: 19770 - DNA, 20 bp, Artificial Sequence
  chemically synthesized
gaacaaaggttttggaagag

SEQ ID NO: 19771 - DNA, 20 bp, Artificial Sequence
  chemically synthesized
acaaaggttttggaagagcg

SEQ ID NO: 19772 - DNA, 20 bp, Artificial Sequence
  chemically synthesized
ggttttggaagagcggagcc

SEQ ID NO: 19773 - DNA, 20 bp, Artificial Sequence
  chemically synthesized
gcggagcccagattccctgt

SEQ ID NO: 19774 - DNA, 20 bp, Artificial Sequence
  chemically synthesized
agcccagattccctgtgagc

SEQ ID NO: 19775 - DNA, 20 bp, Artificial Sequence
  chemically synthesized
ccagattccctgtgagccag

SEQ ID NO: 19776 - DNA, 20 bp, Artificial Sequence
  chemically synthesized
agattccctgtgagccagca

SEQ ID NO: 19777 - DNA, 20 bp, Artificial Sequence
  chemically synthesized
ccctgtgagccagcagagcc

SEQ ID NO: 19778 - DNA, 20 bp, Artificial Sequence
  chemically synthesized
agcagagccaagtctttttt

SEQ ID NO: 19779 - DNA, 20 bp, Artificial Sequence
  chemically synthesized
ccaagtcttttttgagtttc

SEQ ID NO: 19780 - DNA, 20 bp, Artificial Sequence
  chemically synthesized
caaaacctgtgttttaataa

SEQ ID NO: 19781 - DNA, 20 bp, Artificial Sequence
  chemically synthesized
aaaacctgtgttttaataat

SEQ ID NO: 19782 - DNA, 20 bp, Artificial Sequence
  chemically synthesized
aacctgtgttttaataatag

SEQ ID NO: 19783 - DNA, 20 bp, Artificial Sequence
  chemically synthesized
ctgtgttttaataataggag

SEQ ID NO: 19784 - DNA, 20 bp, Artificial Sequence
  chemically synthesized
tgtgttttaataataggagt

SEQ ID NO: 19785 - DNA, 20 bp, Artificial Sequence
  chemically synthesized
gagtgggtcattgtgtttaa

SEQ ID NO: 19786 - DNA, 20 bp, Artificial Sequence
  chemically synthesized
ttaatagtacaacaaaacct

SEQ ID NO: 19787 - DNA, 20 bp, Artificial Sequence
  chemically synthesized
aaaacctaagtgcacataat

SEQ ID NO: 19788 - DNA, 20 bp, Artificial Sequence
  chemically synthesized
agcacatcttttctgtgtgc

SEQ ID NO: 19789 - DNA, 20 bp, Artificial Sequence
  chemically synthesized
gcacatcttttctgtgtgct

SEQ ID NO: 19790 - DNA, 20 bp, Artificial Sequence
  chemically synthesized
cacatcttttctgtgtgctg

SEQ ID NO: 19791 - DNA, 20 bp, Artificial Sequence
  chemically synthesized
tcttttctgtgtgctggggt

SEQ ID NO: 19792 - DNA, 20 bp, Artificial Sequence
  chemically synthesized
cttttctgtgtgctggggtg

SEQ ID NO: 19793 - DNA, 20 bp, Artificial Sequence
  chemically synthesized
tttctgtgtgctggggtgag

SEQ ID NO: 19794 - DNA, 20 bp, Artificial Sequence
  chemically synthesized
tctgtgtgctggggtgagga

SEQ ID NO: 19795 - DNA, 20 bp, Artificial Sequence
  chemically synthesized
ctgtgtgctggggtgaggag

SEQ ID NO: 19796 - DNA, 20 bp, Artificial Sequence
  chemically synthesized
gctggggtgaggagaggtga

SEQ ID NO: 19797 - DNA, 20 bp, Artificial Sequence
  chemically synthesized
gggtgaggagaggtgacagt

SEQ ID NO: 19798 - DNA, 20 bp, Artificial Sequence
  chemically synthesized
gagaggtgacagtgagtgtg

SEQ ID NO: 19799 - DNA, 20 bp, Artificial Sequence
  chemically synthesized
agaggtgacagtgagtgtgt

SEQ ID NO: 19800 - DNA, 20 bp, Artificial Sequence
  chemically synthesized
agtgtgtaggatgatatgaa

SEQ ID NO: 19801 - DNA, 20 bp, Artificial Sequence
  chemically synthesized
ggatgatatgaaaagcatta

SEQ ID NO: 19802 - DNA, 20 bp, Artificial Sequence
  chemically synthesized
tatgaaaagcattacagaca

SEQ ID NO: 19803 - DNA, 20 bp, Artificial Sequence
  chemically synthesized
atgaaaagcattacagacat

SEQ ID NO: 19804 - DNA, 20 bp, Artificial Sequence
  chemically synthesized
aaagcattacagacatggga

SEQ ID NO: 19805 - DNA, 20 bp, Artificial Sequence
  chemically synthesized
acagacatgggaaagcatct

SEQ ID NO: 19806 - DNA, 20 bp, Artificial Sequence
  chemically synthesized
agacatgggaaagcatctta

SEQ ID NO: 19807 - DNA, 20 bp, Artificial Sequence
  chemically synthesized
aaagcatcttagagcaccca

SEQ ID NO: 19808 - DNA, 20 bp, Artificial Sequence
  chemically synthesized
catcttagagcacccaaagc

SEQ ID NO: 19809 - DNA, 20 bp, Artificial Sequence
  chemically synthesized
agagcacccaaagctggcat

SEQ ID NO: 19810 - DNA, 20 bp, Artificial Sequence
  chemically synthesized
aaagctggcatgagtcatca

SEQ ID NO: 19811 - DNA, 20 bp, Artificial Sequence
  chemically synthesized
aagctggcatgagtcatcac

SEQ ID NO: 19812 - DNA, 20 bp, Artificial Sequence
  chemically synthesized
catgagtcatcacaggctta

SEQ ID NO: 19813 - DNA, 20 bp, Artificial Sequence
  chemically synthesized
catcacaggcttatggccac

SEQ ID NO: 19814 - DNA, 20 bp, Artificial Sequence
  chemically synthesized
atcacaggcttatggccaca

SEQ ID NO: 19815 - DNA, 20 bp, Artificial Sequence
  chemically synthesized
caggcttatggccacaaggc

SEQ ID NO: 19816 - DNA, 20 bp, Artificial Sequence
  chemically synthesized
tgcttccctttttcataacc

SEQ ID NO: 19817 - DNA, 20 bp, Artificial Sequence
  chemically synthesized
tttcataacccagttcaatg

SEQ ID NO: 19818 - DNA, 20 bp, Artificial Sequence
  chemically synthesized
gttcaatgaagacataattg

SEQ ID NO: 19819 - DNA, 20 bp, Artificial Sequence
  chemically synthesized
caatgaagacataattgaag

SEQ ID NO: 19820 - DNA, 20 bp, Artificial Sequence
  chemically synthesized
gaagacataattgaagtggt

SEQ ID NO: 19821 - DNA, 20 bp, Artificial Sequence
  chemically synthesized
gacataattgaagtggtgag

SEQ ID NO: 19822 - DNA, 20 bp, Artificial Sequence
  chemically synthesized
cataattgaagtggtgagaa

SEQ ID NO: 19823 - DNA, 20 bp, Artificial Sequence
  chemically synthesized
ataattgaagtggtgagaag

SEQ ID NO: 19824 - DNA, 20 bp, Artificial Sequence
  chemically synthesized
taattgaagtggtgagaaga

SEQ ID NO: 19825 - DNA, 20 bp, Artificial Sequence
  chemically synthesized
aattgaagtggtgagaagag

SEQ ID NO: 19826 - DNA, 20 bp, Artificial Sequence
  chemically synthesized
gaagaggggccaccgccctt

SEQ ID NO: 19827 - DNA, 20 bp, Artificial Sequence
  chemically synthesized
ggccaccgcccttcagactc

SEQ ID NO: 19828 - DNA, 20 bp, Artificial Sequence
  chemically synthesized
gccaccgcccttcagactcc

SEQ ID NO: 19829 - DNA, 20 bp, Artificial Sequence
  chemically synthesized
ccaccgcccttcagactcca

SEQ ID NO: 19830 - DNA, 20 bp, Artificial Sequence
  chemically synthesized
actccagggtatttgtattc

SEQ ID NO: 19831 - DNA, 20 bp, Artificial Sequence
  chemically synthesized
ctccagggtatttgtattcc

SEQ ID NO: 19832 - DNA, 20 bp, Artificial Sequence
  chemically synthesized
tgtattccaggacccctccg

SEQ ID NO: 19833 - DNA, 20 bp, Artificial Sequence
  chemically synthesized
gtattccaggacccctccgt

SEQ ID NO: 19834 - DNA, 20 bp, Artificial Sequence
  chemically synthesized
caggacccctccgtgggtgt

SEQ ID NO: 19835 - DNA, 20 bp, Artificial Sequence
  chemically synthesized
cccctccgtgggtgttggcc

SEQ ID NO: 19836 - DNA, 20 bp, Artificial Sequence
  chemically synthesized
ctccgtgggtgttggcccag

SEQ ID NO: 19837 - DNA, 20 bp, Artificial Sequence
  chemically synthesized
ggtgttggcccagcggtgcc

SEQ ID NO: 19838 - DNA, 20 bp, Artificial Sequence
  chemically synthesized
tgttggcccagcggtgccca

SEQ ID NO: 19839 - DNA, 20 bp, Artificial Sequence
  chemically synthesized
cccagagaatattcccttat

SEQ ID NO: 19840 - DNA, 20 bp, Artificial Sequence
  chemically synthesized
tgacttgttcacttcctgtt

SEQ ID NO: 19841 - DNA, 20 bp, Artificial Sequence
  chemically synthesized
tgttcacttcctgttcagcg

SEQ ID NO: 19842 - DNA, 20 bp, Artificial Sequence
  chemically synthesized
acttcctgttcagcgcagcc

SEQ ID NO: 19843 - DNA, 20 bp, Artificial Sequence
  chemically synthesized
tcctgttcagcgcagcctgg

SEQ ID NO: 19844 - DNA, 20 bp, Artificial Sequence
  chemically synthesized
agcgcagcctggtggtgact

SEQ ID NO: 19845 - DNA, 20 bp, Artificial Sequence
  chemically synthesized
tggtgactcggtaatcccca

SEQ ID NO: 19846 - DNA, 20 bp, Artificial Sequence
  chemically synthesized
gactcggtaatccccacagt

SEQ ID NO: 19847 - DNA, 20 bp, Artificial Sequence
  chemically synthesized
atccccacagtaagacctca

SEQ ID NO: 19848 - DNA, 20 bp, Artificial Sequence
  chemically synthesized
cccacagtaagacctcacag

SEQ ID NO: 19849 - DNA, 20 bp, Artificial Sequence
  chemically synthesized
ccacagtaagacctcacagt

SEQ ID NO: 19850 - DNA, 20 bp, Artificial Sequence
  chemically synthesized
gtaagacctcacagtgggtt

SEQ ID NO: 19851 - DNA, 20 bp, Artificial Sequence
  chemically synthesized
agacctcacagtgggttgag

SEQ ID NO: 19852 - DNA, 20 bp, Artificial Sequence
  chemically synthesized
tcacagtgggttgagtggcc

SEQ ID NO: 19853 - DNA, 20 bp, Artificial Sequence
  chemically synthesized
cacagtgggttgagtggcct

SEQ ID NO: 19854 - DNA, 20 bp, Artificial Sequence
  chemically synthesized
cagtgggttgagtggcctgg

SEQ ID NO: 19855 - DNA, 20 bp, Artificial Sequence
  chemically synthesized
gttgagtggcctgggagctc

SEQ ID NO: 19856 - DNA, 20 bp, Artificial Sequence
  chemically synthesized
agtggcctgggagctcaagt

SEQ ID NO: 19857 - DNA, 20 bp, Artificial Sequence
  chemically synthesized
gtggcctgggagctcaagtc

SEQ ID NO: 19858 - DNA, 20 bp, Artificial Sequence
  chemically synthesized
tggcctgggagctcaagtca

SEQ ID NO: 19859 - DNA, 20 bp, Artificial Sequence
  chemically synthesized
ggcctgggagctcaagtcag

SEQ ID NO: 19860 - DNA, 20 bp, Artificial Sequence
  chemically synthesized
ctgggagctcaagtcagggg

SEQ ID NO: 19861 - DNA, 20 bp, Artificial Sequence
  chemically synthesized
gctcaagtcaggggcagaaa

SEQ ID NO: 19862 - DNA, 20 bp, Artificial Sequence
  chemically synthesized
ctcaagtcaggggcagaaat

SEQ ID NO: 19863 - DNA, 20 bp, Artificial Sequence
  chemically synthesized
tcaagtcaggggcagaaatg

SEQ ID NO: 19864 - DNA, 20 bp, Artificial Sequence
  chemically synthesized
agtcaggggcagaaatgggg

SEQ ID NO: 19865 - DNA, 20 bp, Artificial Sequence
  chemically synthesized
aggggcagaaatggggaagc

SEQ ID NO: 19866 - DNA, 20 bp, Artificial Sequence
  chemically synthesized
gcagaaatggggaagctgga

SEQ ID NO: 19867 - DNA, 20 bp, Artificial Sequence
  chemically synthesized
aaatggggaagctggaaagt

SEQ ID NO: 19868 - DNA, 20 bp, Artificial Sequence
  chemically synthesized
aatggggaagctggaaagtt

SEQ ID NO: 19869 - DNA, 20 bp, Artificial Sequence
  chemically synthesized
agctggaaagttgggtgatc

SEQ ID NO: 19870 - DNA, 20 bp, Artificial Sequence
  chemically synthesized
ctggaaagttgggtgatcaa

SEQ ID NO: 19871 - DNA, 20 bp, Artificial Sequence
  chemically synthesized
ttgggtgatcaagagtcatt

SEQ ID NO: 19872 - DNA, 20 bp, Artificial Sequence
  chemically synthesized
ggtgatcaagagtcatttgg

SEQ ID NO: 19873 - DNA, 20 bp, Artificial Sequence
  chemically synthesized
ggaagcccccatgtctgtgt

SEQ ID NO: 19874 - DNA, 20 bp, Artificial Sequence
  chemically synthesized
accactttctccctgcctga

SEQ ID NO: 19875 - DNA, 20 bp, Artificial Sequence
  chemically synthesized
ttctccctgcctgaaagcac

SEQ ID NO: 19876 - DNA, 20 bp, Artificial Sequence
  chemically synthesized
tctccctgcctgaaagcact

SEQ ID NO: 19877 - DNA, 20 bp, Artificial Sequence
  chemically synthesized
gaaagcactgggctgtgttt

SEQ ID NO: 19878 - DNA, 20 bp, Artificial Sequence
  chemically synthesized
aagcactgggctgtgtttca

SEQ ID NO: 19879 - DNA, 20 bp, Artificial Sequence
  chemically synthesized
gcactgggctgtgtttcaga

SEQ ID NO: 19880 - DNA, 20 bp, Artificial Sequence
  chemically synthesized
cactgggctgtgtttcagag

SEQ ID NO: 19881 - DNA, 20 bp, Artificial Sequence
  chemically synthesized
tgggctgtgtttcagagagg

SEQ ID NO: 19882 - DNA, 20 bp, Artificial Sequence
  chemically synthesized
ctgtgtttcagagaggtagc

SEQ ID NO: 19883 - DNA, 20 bp, Artificial Sequence
  chemically synthesized
tgtgtttcagagaggtagct

SEQ ID NO: 19884 - DNA, 20 bp, Artificial Sequence
  chemically synthesized
agagaggtagctgggtccca

SEQ ID NO: 19885 - DNA, 20 bp, Artificial Sequence
  chemically synthesized
ctgggtcccacagatattta

SEQ ID NO: 19886 - DNA, 20 bp, Artificial Sequence
  chemically synthesized
gggtcccacagatatttatg

SEQ ID NO: 19887 - DNA, 20 bp, Artificial Sequence
  chemically synthesized
ggtcccacagatatttatgg

SEQ ID NO: 19888 - DNA, 20 bp, Artificial Sequence
  chemically synthesized
gtcccacagatatttatgga

SEQ ID NO: 19889 - DNA, 20 bp, Artificial Sequence
  chemically synthesized
cttgtttctgtatctccttc

SEQ ID NO: 19890 - DNA, 20 bp, Artificial Sequence
  chemically synthesized
gtttctgtatctccttctag

SEQ ID NO: 19891 - DNA, 20 bp, Artificial Sequence
  chemically synthesized
tttctgtatctccttctagt

SEQ ID NO: 19892 - DNA, 20 bp, Artificial Sequence
  chemically synthesized
tgtatctccttctagtgggc

SEQ ID NO: 19893 - DNA, 20 bp, Artificial Sequence
  chemically synthesized
tctagtgggctggacctccc

SEQ ID NO: 19894 - DNA, 20 bp, Artificial Sequence
  chemically synthesized
ctagtgggctggacctcccc

SEQ ID NO: 19895 - DNA, 20 bp, Artificial Sequence
  chemically synthesized
acctccccaggccatttttc

SEQ ID NO: 19896 - DNA, 20 bp, Artificial Sequence
  chemically synthesized
cctccccaggccatttttct

SEQ ID NO: 19897 - DNA, 20 bp, Artificial Sequence
  chemically synthesized
aggccatttttctaggtaac

SEQ ID NO: 19898 - DNA, 20 bp, Artificial Sequence
  chemically synthesized
ggccatttttctaggtaact

SEQ ID NO: 19899 - DNA, 20 bp, Artificial Sequence
  chemically synthesized
catttttctaggtaactagg

SEQ ID NO: 19900 - DNA, 20 bp, Artificial Sequence
  chemically synthesized
atttttctaggtaactagga

SEQ ID NO: 19901 - DNA, 20 bp, Artificial Sequence
  chemically synthesized
ctaggaaggcctgactctgt

SEQ ID NO: 19902 - DNA, 20 bp, Artificial Sequence
  chemically synthesized
gcctgactctgtcagcaact

SEQ ID NO: 19903 - DNA, 20 bp, Artificial Sequence
  chemically synthesized
gtcagcaacttggctttctt

SEQ ID NO: 19904 - DNA, 20 bp, Artificial Sequence
  chemically synthesized
cagcaacttggctttctttg

SEQ ID NO: 19905 - DNA, 20 bp, Artificial Sequence
  chemically synthesized
agcaacttggctttctttgg

SEQ ID NO: 19906 - DNA, 20 bp, Artificial Sequence
  chemically synthesized
caacttggctttctttggag

SEQ ID NO: 19907 - DNA, 20 bp, Artificial Sequence
  chemically synthesized
aacttggctttctttggagg

SEQ ID NO: 19908 - DNA, 20 bp, Artificial Sequence
  chemically synthesized
ctttggaggaggtgtcactc

SEQ ID NO: 19909 - DNA, 20 bp, Artificial Sequence
  chemically synthesized
tttggaggaggtgtcactct

SEQ ID NO: 19910 - DNA, 20 bp, Artificial Sequence
  chemically synthesized
aggaggtgtcactctgggat

SEQ ID NO: 19911 - DNA, 20 bp, Artificial Sequence
  chemically synthesized
gtcactctgggattagttaa

SEQ ID NO: 19912 - DNA, 20 bp, Artificial Sequence
  chemically synthesized
tcactctgggattagttaaa

SEQ ID NO: 19913 - DNA, 20 bp, Artificial Sequence
  chemically synthesized
cactctgggattagttaaaa

SEQ ID NO: 19914 - DNA, 20 bp, Artificial Sequence
  chemically synthesized
actctgggattagttaaaag

SEQ ID NO: 19915 - DNA, 20 bp, Artificial Sequence
  chemically synthesized
gggattagttaaaaggggat

SEQ ID NO: 19916 - DNA, 20 bp, Artificial Sequence
  chemically synthesized
attagttaaaaggggatcag

SEQ ID NO: 19917 - DNA, 20 bp, Artificial Sequence
  chemically synthesized
gggatcagtggtattcacat

SEQ ID NO: 19918 - DNA, 20 bp, Artificial Sequence
  chemically synthesized
gtggtattcacattggctcg

SEQ ID NO: 19919 - DNA, 20 bp, Artificial Sequence
  chemically synthesized
tggtattcacattggctcgt

SEQ ID NO: 19920 - DNA, 20 bp, Artificial Sequence
  chemically synthesized
ctcctcaaattataaccttt

SEQ ID NO: 19921 - DNA, 20 bp, Artificial Sequence
  chemically synthesized
cctcaaattataaccttttg

SEQ ID NO: 19922 - DNA, 20 bp, Artificial Sequence
  chemically synthesized
ctcaaattataaccttttgg

SEQ ID NO: 19923 - DNA, 20 bp, Artificial Sequence
  chemically synthesized
tcaaattataaccttttgga

SEQ ID NO: 19924 - DNA, 20 bp, Artificial Sequence
  chemically synthesized
aattataaccttttggaggg

SEQ ID NO: 19925 - DNA, 20 bp, Artificial Sequence
  chemically synthesized
attataaccttttggagggc

SEQ ID NO: 19926 - DNA, 20 bp, Artificial Sequence
  chemically synthesized
tataaccttttggagggcag

SEQ ID NO: 19927 - DNA, 20 bp, Artificial Sequence
  chemically synthesized
ttttattttttgtgccttct

SEQ ID NO: 19928 - DNA, 20 bp, Artificial Sequence
  chemically synthesized
cttggtgcctaacataatgc

SEQ ID NO: 19929 - DNA, 20 bp, Artificial Sequence
  chemically synthesized
acataatgctggttcatatg

SEQ ID NO: 19930 - DNA, 20 bp, Artificial Sequence
  chemically synthesized
gctcacgctgcttgattgaa

SEQ ID NO: 19931 - DNA, 20 bp, Artificial Sequence
  chemically synthesized
tcacgctgcttgattgaaca

SEQ ID NO: 19932 - DNA, 20 bp, Artificial Sequence
  chemically synthesized
gctgcttgattgaacagaga

SEQ ID NO: 19933 - DNA, 20 bp, Artificial Sequence
  chemically synthesized
ttgattgaacagagaaagac

SEQ ID NO: 19934 - DNA, 20 bp, Artificial Sequence
  chemically synthesized
tgattgaacagagaaagacc

SEQ ID NO: 19935 - DNA, 20 bp, Artificial Sequence
  chemically synthesized
gagaaagaccgggctttgaa

SEQ ID NO: 19936 - DNA, 20 bp, Artificial Sequence
  chemically synthesized
ccgggctttgaatggatccc

SEQ ID NO: 19937 - DNA, 20 bp, Artificial Sequence
  chemically synthesized
tggatccccagctccctgtc

SEQ ID NO: 19938 - DNA, 20 bp, Artificial Sequence
  chemically synthesized
ggatccccagctccctgtcc

SEQ ID NO: 19939 - DNA, 20 bp, Artificial Sequence
  chemically synthesized
gatccccagctccctgtcca

SEQ ID NO: 19940 - DNA, 20 bp, Artificial Sequence
  chemically synthesized
ccccagctccctgtccaggg

SEQ ID NO: 19941 - DNA, 20 bp, Artificial Sequence
  chemically synthesized
cccagctccctgtccaggga

SEQ ID NO: 19942 - DNA, 20 bp, Artificial Sequence
  chemically synthesized
tccctgtccagggaaggtgt

SEQ ID NO: 19943 - DNA, 20 bp, Artificial Sequence
  chemically synthesized
ccctgtccagggaaggtgtg

SEQ ID NO: 19944 - DNA, 20 bp, Artificial Sequence
  chemically synthesized
gtccagggaaggtgtgaggc

SEQ ID NO: 19945 - DNA, 20 bp, Artificial Sequence
  chemically synthesized
tccagggaaggtgtgaggct

SEQ ID NO: 19946 - DNA, 20 bp, Artificial Sequence
  chemically synthesized
gggaaggtgtgaggctgggc

SEQ ID NO: 19947 - DNA, 20 bp, Artificial Sequence
  chemically synthesized
tttatttcccccttcctccc

SEQ ID NO: 19948 - DNA, 20 bp, Artificial Sequence
  chemically synthesized
ttatttcccccttcctccct

SEQ ID NO: 19949 - DNA, 20 bp, Artificial Sequence
  chemically synthesized
tatttcccccttcctccctg

SEQ ID NO: 19950 - DNA, 20 bp, Artificial Sequence
  chemically synthesized
tttcccccttcctccctggg

SEQ ID NO: 19951 - DNA, 20 bp, Artificial Sequence
  chemically synthesized
ccccttcctccctggggaga

SEQ ID NO: 19952 - DNA, 20 bp, Artificial Sequence
  chemically synthesized
tccctggggagaaagtgaaa

SEQ ID NO: 19953 - DNA, 20 bp, Artificial Sequence
  chemically synthesized
gggagaaagtgaaaaagtga

SEQ ID NO: 19954 - DNA, 20 bp, Artificial Sequence
  chemically synthesized
aagtgaaaaagtgaaagtgc

SEQ ID NO: 19955 - DNA, 20 bp, Artificial Sequence
  chemically synthesized
agtgaaaaagtgaaagtgct

SEQ ID NO: 19956 - DNA, 20 bp, Artificial Sequence
  chemically synthesized
gtgaaaaagtgaaagtgctg

SEQ ID NO: 19957 - DNA, 20 bp, Artificial Sequence
  chemically synthesized
aaaagtgaaagtgctggggt

SEQ ID NO: 19958 - DNA, 20 bp, Artificial Sequence
  chemically synthesized
aaagtgaaagtgctggggtt

SEQ ID NO: 19959 - DNA, 20 bp, Artificial Sequence
  chemically synthesized
tgaaagtgctggggttggga

SEQ ID NO: 19960 - DNA, 20 bp, Artificial Sequence
  chemically synthesized
agtgctggggttgggatagc

SEQ ID NO: 19961 - DNA, 20 bp, Artificial Sequence
  chemically synthesized
gctggggttgggatagctgg

SEQ ID NO: 19962 - DNA, 20 bp, Artificial Sequence
  chemically synthesized
gatagctggtggtgtctttg

SEQ ID NO: 19963 - DNA, 20 bp, Artificial Sequence
  chemically synthesized
tctttgtggctttcacccca

SEQ ID NO: 19964 - DNA, 20 bp, Artificial Sequence
  chemically synthesized
gtggctttcaccccatggtc

SEQ ID NO: 19965 - DNA, 20 bp, Artificial Sequence
  chemically synthesized
gctttcaccccatggtcaag

SEQ ID NO: 19966 - DNA, 20 bp, Artificial Sequence
  chemically synthesized
caagcagtgaactctgcttg

SEQ ID NO: 19967 - DNA, 20 bp, Artificial Sequence
  chemically synthesized
cagattctgtctcgctcacc

SEQ ID NO: 19968 - DNA, 20 bp, Artificial Sequence
  chemically synthesized
attctgtctcgctcacctgg

SEQ ID NO: 19969 - DNA, 20 bp, Artificial Sequence
  chemically synthesized
tgtctcgctcacctggaagc

SEQ ID NO: 19970 - DNA, 20 bp, Artificial Sequence
  chemically synthesized
gctcacctggaagccagtgt

SEQ ID NO: 19971 - DNA, 20 bp, Artificial Sequence
  chemically synthesized
ctcacctggaagccagtgtt

SEQ ID NO: 19972 - DNA, 20 bp, Artificial Sequence
  chemically synthesized
tcacctggaagccagtgttg

SEQ ID NO: 19973 - DNA, 20 bp, Artificial Sequence
  chemically synthesized
cctggaagccagtgttgggg

SEQ ID NO: 19974 - DNA, 20 bp, Artificial Sequence
  chemically synthesized
ctggaagccagtgttgggga

SEQ ID NO: 19975 - DNA, 20 bp, Artificial Sequence
  chemically synthesized
ggaagccagtgttggggaag

SEQ ID NO: 19976 - DNA, 20 bp, Artificial Sequence
  chemically synthesized
agtgttggggaaggagcacg

SEQ ID NO: 19977 - DNA, 20 bp, Artificial Sequence
  chemically synthesized
gtgttggggaaggagcacgt

SEQ ID NO: 19978 - DNA, 20 bp, Artificial Sequence
  chemically synthesized
tgttggggaaggagcacgtg

SEQ ID NO: 19979 - DNA, 20 bp, Artificial Sequence
  chemically synthesized
gttggggaaggagcacgtgg

SEQ ID NO: 19980 - DNA, 20 bp, Artificial Sequence
  chemically synthesized
tggggaaggagcacgtgggg

SEQ ID NO: 19981 - DNA, 20 bp, Artificial Sequence
  chemically synthesized
ggggaaggagcacgtggggg

SEQ ID NO: 19982 - DNA, 20 bp, Artificial Sequence
  chemically synthesized
agcacgtgggggaggatcct

SEQ ID NO: 19983 - DNA, 20 bp, Artificial Sequence
  chemically synthesized
gcacgtgggggaggatcctt

SEQ ID NO: 19984 - DNA, 20 bp, Artificial Sequence
  chemically synthesized
tgggggaggatccttaggtc

SEQ ID NO: 19985 - DNA, 20 bp, Artificial Sequence
  chemically synthesized
gggggaggatccttaggtct

SEQ ID NO: 19986 - DNA, 20 bp, Artificial Sequence
  chemically synthesized
cttaggtctgggcaacactt

SEQ ID NO: 19987 - DNA, 20 bp, Artificial Sequence
  chemically synthesized
taggtctgggcaacactttg

SEQ ID NO: 19988 - DNA, 20 bp, Artificial Sequence
  chemically synthesized
tctgggcaacactttggagt

SEQ ID NO: 19989 - DNA, 20 bp, Artificial Sequence
  chemically synthesized
ctgggcaacactttggagtt

SEQ ID NO: 19990 - DNA, 20 bp, Artificial Sequence
  chemically synthesized
tgggcaacactttggagtta

SEQ ID NO: 19991 - DNA, 20 bp, Artificial Sequence
  chemically synthesized
gggcaacactttggagttag

SEQ ID NO: 19992 - DNA, 20 bp, Artificial Sequence
  chemically synthesized
ggcaacactttggagttagg

SEQ ID NO: 19993 - DNA, 20 bp, Artificial Sequence
  chemically synthesized
tttggagttagggggtcccc

SEQ ID NO: 19994 - DNA, 20 bp, Artificial Sequence
  chemically synthesized
tggagttagggggtcccctg

SEQ ID NO: 19995 - DNA, 20 bp, Artificial Sequence
  chemically synthesized
ggagttagggggtcccctgg

SEQ ID NO: 19996 - DNA, 20 bp, Artificial Sequence
  chemically synthesized
tagggggtcccctggaggtg

SEQ ID NO: 19997 - DNA, 20 bp, Artificial Sequence
  chemically synthesized
agggggtcccctggaggtgt

SEQ ID NO: 19998 - DNA, 20 bp, Artificial Sequence
  chemically synthesized
gggtcccctggaggtgtggg

SEQ ID NO: 19999 - DNA, 20 bp, Artificial Sequence
  chemically synthesized
cccctggaggtgtgggaagc

SEQ ID NO: 20000 - DNA, 20 bp, Artificial Sequence
  chemically synthesized
ctggaggtgtgggaagctgg

SEQ ID NO: 20001 - DNA, 20 bp, Artificial Sequence
  chemically synthesized
gaggtgtgggaagctggtag

SEQ ID NO: 20002 - DNA, 20 bp, Artificial Sequence
  chemically synthesized
ggaagctggtagtggcattc

SEQ ID NO: 20003 - DNA, 20 bp, Artificial Sequence
  chemically synthesized
ggtagtggcattctggaaac

SEQ ID NO: 20004 - DNA, 20 bp, Artificial Sequence
  chemically synthesized
gtggcattctggaaacaagc

SEQ ID NO: 20005 - DNA, 20 bp, Artificial Sequence
  chemically synthesized
ggcattctggaaacaagcta

SEQ ID NO: 20006 - DNA, 20 bp, Artificial Sequence
  chemically synthesized
caagctagagcctgtctcac

SEQ ID NO: 20007 - DNA, 20 bp, Artificial Sequence
  chemically synthesized
agctagagcctgtctcacca

SEQ ID NO: 20008 - DNA, 20 bp, Artificial Sequence
  chemically synthesized
gctagagcctgtctcaccag

SEQ ID NO: 20009 - DNA, 20 bp, Artificial Sequence
  chemically synthesized
ctagagcctgtctcaccaga

SEQ ID NO: 20010 - DNA, 20 bp, Artificial Sequence
  chemically synthesized
agagcctgtctcaccagagg

SEQ ID NO: 20011 - DNA, 20 bp, Artificial Sequence
  chemically synthesized
ctgtctcaccagagggagaa

SEQ ID NO: 20012 - DNA, 20 bp, Artificial Sequence
  chemically synthesized
tcaccagagggagaacggct

SEQ ID NO: 20013 - DNA, 20 bp, Artificial Sequence
  chemically synthesized
agagggagaacggctgagtt

SEQ ID NO: 20014 - DNA, 20 bp, Artificial Sequence
  chemically synthesized
gggagaacggctgagttcgg

SEQ ID NO: 20015 - DNA, 20 bp, Artificial Sequence
  chemically synthesized
ggagaacggctgagttcgga

SEQ ID NO: 20016 - DNA, 20 bp, Artificial Sequence
  chemically synthesized
gagaacggctgagttcggaa

SEQ ID NO: 20017 - DNA, 20 bp, Artificial Sequence
  chemically synthesized
cggctgagttcggaagggac

SEQ ID NO: 20018 - DNA, 20 bp, Artificial Sequence
  chemically synthesized
ggctgagttcggaagggact

SEQ ID NO: 20019 - DNA, 20 bp, Artificial Sequence
  chemically synthesized
gctgagttcggaagggactg

SEQ ID NO: 20020 - DNA, 20 bp, Artificial Sequence
  chemically synthesized
gactggggcctgctttcctt

SEQ ID NO: 20021 - DNA, 20 bp, Artificial Sequence
  chemically synthesized
actggggcctgctttccttt

SEQ ID NO: 20022 - DNA, 20 bp, Artificial Sequence
  chemically synthesized
ggggcctgctttcctttggg

SEQ ID NO: 20023 - DNA, 20 bp, Artificial Sequence
  chemically synthesized
ttcctttgggtggctttgac

SEQ ID NO: 20024 - DNA, 20 bp, Artificial Sequence
  chemically synthesized
gggtggctttgactggctct

SEQ ID NO: 20025 - DNA, 20 bp, Artificial Sequence
  chemically synthesized
gctttgactggctcttggat

SEQ ID NO: 20026 - DNA, 20 bp, Artificial Sequence
  chemically synthesized
tggctcttggatgagtttaa

SEQ ID NO: 20027 - DNA, 20 bp, Artificial Sequence
  chemically synthesized
ggctcttggatgagtttaaa

SEQ ID NO: 20028 - DNA, 20 bp, Artificial Sequence
  chemically synthesized
tttttttcttttttctgttt

SEQ ID NO: 20029 - DNA, 20 bp, Artificial Sequence
  chemically synthesized
gttttagtgtatgtgtatgc

SEQ ID NO: 20030 - DNA, 20 bp, Artificial Sequence
  chemically synthesized
atgcaagacctttgatattt

SEQ ID NO: 20031 - DNA, 20 bp, Artificial Sequence
  chemically synthesized
caagacctttgatatttgag

SEQ ID NO: 20032 - DNA, 20 bp, Artificial Sequence
  chemically synthesized
aagacctttgatatttgagt

SEQ ID NO: 20033 - DNA, 20 bp, Artificial Sequence
  chemically synthesized
agacctttgatatttgagta

SEQ ID NO: 20034 - DNA, 20 bp, Artificial Sequence
  chemically synthesized
gggaaatcctctcttatcaa

SEQ ID NO: 20035 - DNA, 20 bp, Artificial Sequence
  chemically synthesized
tctcttatcaatggaattca

SEQ ID NO: 20036 - DNA, 20 bp, Artificial Sequence
  chemically synthesized
atggaattcacagcctctta

SEQ ID NO: 20037 - DNA, 20 bp, Artificial Sequence
  chemically synthesized
taccctttcattgtgttgta

SEQ ID NO: 20038 - DNA, 20 bp, Artificial Sequence
  chemically synthesized
ctttcattgtgttgtaaaga

SEQ ID NO: 20039 - DNA, 20 bp, Artificial Sequence
  chemically synthesized
cattgtgttgtaaagacagt

SEQ ID NO: 20040 - DNA, 20 bp, Artificial Sequence
  chemically synthesized
gtaaagacagtcagaccaac

SEQ ID NO: 20041 - DNA, 20 bp, Artificial Sequence
  chemically synthesized
acaactctgatttttttcct

SEQ ID NO: 20042 - DNA, 20 bp, Artificial Sequence
  chemically synthesized
tttaattttttttttttttt

SEQ ID NO: 20043 - DNA, 20 bp, Artificial Sequence
  chemically synthesized
atttttttttttttttgaga

SEQ ID NO: 20044 - DNA, 20 bp, Artificial Sequence
  chemically synthesized
ttttttttttttttgagatg

SEQ ID NO: 20045 - DNA, 20 bp, Artificial Sequence
  chemically synthesized
tggagtctcgctctgtcgcc

SEQ ID NO: 20046 - DNA, 20 bp, Artificial Sequence
  chemically synthesized
ggagtctcgctctgtcgccc

SEQ ID NO: 20047 - DNA, 20 bp, Artificial Sequence
  chemically synthesized
tctcgctctgtcgcccaggc

SEQ ID NO: 20048 - DNA, 20 bp, Artificial Sequence
  chemically synthesized
tcgctctgtcgcccaggctg

SEQ ID NO: 20049 - DNA, 20 bp, Artificial Sequence
  chemically synthesized
ctgtcgcccaggctggagtg

SEQ ID NO: 20050 - DNA, 20 bp, Artificial Sequence
  chemically synthesized
ggagtgcagtgctacgatct

SEQ ID NO: 20051 - DNA, 20 bp, Artificial Sequence
  chemically synthesized
gctacgatctcggctcattg

SEQ ID NO: 20052 - DNA, 20 bp, Artificial Sequence
  chemically synthesized
tcattgcagcctccgcctcc

SEQ ID NO: 20053 - DNA, 20 bp, Artificial Sequence
  chemically synthesized
cattgcagcctccgcctccc

SEQ ID NO: 20054 - DNA, 20 bp, Artificial Sequence
  chemically synthesized
agcctccgcctcccaggttc

SEQ ID NO: 20055 - DNA, 20 bp, Artificial Sequence
  chemically synthesized
ttcaagtgattctcctgcct

SEQ ID NO: 20056 - DNA, 20 bp, Artificial Sequence
  chemically synthesized
ttctcctgcctcagcctccc

SEQ ID NO: 20057 - DNA, 20 bp, Artificial Sequence
  chemically synthesized
tcctgcctcagcctcccaag

SEQ ID NO: 20058 - DNA, 20 bp, Artificial Sequence
  chemically synthesized
gcctcagcctcccaagtagc

SEQ ID NO: 20059 - DNA, 20 bp, Artificial Sequence
  chemically synthesized
cctcagcctcccaagtagct

SEQ ID NO: 20060 - DNA, 20 bp, Artificial Sequence
  chemically synthesized
ctcccaagtagctgggatta

SEQ ID NO: 20061 - DNA, 20 bp, Artificial Sequence
  chemically synthesized
tcccaagtagctgggattat

SEQ ID NO: 20062 - DNA, 20 bp, Artificial Sequence
  chemically synthesized
taggtgcatgccatcacacc

SEQ ID NO: 20063 - DNA, 20 bp, Artificial Sequence
  chemically synthesized
tttttttttttttttttttt

SEQ ID NO: 20064 - DNA, 20 bp, Artificial Sequence
  chemically synthesized
tttttttttttttttttaag

SEQ ID NO: 20065 - DNA, 20 bp, Artificial Sequence
  chemically synthesized
tttttttttttttttaagta

SEQ ID NO: 20066 - DNA, 20 bp, Artificial Sequence
  chemically synthesized
tttttttttttaagtagaga

SEQ ID NO: 20067 - DNA, 20 bp, Artificial Sequence
  chemically synthesized
ttttttttttaagtagagat

SEQ ID NO: 20068 - DNA, 20 bp, Artificial Sequence
  chemically synthesized
tttttttttaagtagagatg

SEQ ID NO: 20069 - DNA, 20 bp, Artificial Sequence
  chemically synthesized
gagatggggtttcaccatgt

SEQ ID NO: 20070 - DNA, 20 bp, Artificial Sequence
  chemically synthesized
tggggtttcaccatgttggc

SEQ ID NO: 20071 - DNA, 20 bp, Artificial Sequence
  chemically synthesized
ggggtttcaccatgttggct

SEQ ID NO: 20072 - DNA, 20 bp, Artificial Sequence
  chemically synthesized
tttcaccatgttggctaggc

SEQ ID NO: 20073 - DNA, 20 bp, Artificial Sequence
  chemically synthesized
tggtcttgaactcctgacct

SEQ ID NO: 20074 - DNA, 20 bp, Artificial Sequence
  chemically synthesized
ggtcttgaactcctgacctc

SEQ ID NO: 20075 - DNA, 20 bp, Artificial Sequence
  chemically synthesized
ctcaggtgacccacacgcct

SEQ ID NO: 20076 - DNA, 20 bp, Artificial Sequence
  chemically synthesized
cctcggcctcccaaaatgct

SEQ ID NO: 20077 - DNA, 20 bp, Artificial Sequence
  chemically synthesized
ctcccaaaatgctgagatta

SEQ ID NO: 20078 - DNA, 20 bp, Artificial Sequence
  chemically synthesized
tcccaaaatgctgagattac

SEQ ID NO: 20079 - DNA, 20 bp, Artificial Sequence
  chemically synthesized
aatgctgagattacaggtgt

SEQ ID NO: 20080 - DNA, 20 bp, Artificial Sequence
  chemically synthesized
caggtgtgagccaccgcacc

SEQ ID NO: 20081 - DNA, 20 bp, Artificial Sequence
  chemically synthesized
tggctatttaattctatttt

SEQ ID NO: 20082 - DNA, 20 bp, Artificial Sequence
  chemically synthesized
tatttaattctattttcaga

SEQ ID NO: 20083 - DNA, 20 bp, Artificial Sequence
  chemically synthesized
tttcagatggcttgttctcc

SEQ ID NO: 20084 - DNA, 20 bp, Artificial Sequence
  chemically synthesized
atggcttgttctccaagtct

SEQ ID NO: 20085 - DNA, 20 bp, Artificial Sequence
  chemically synthesized
tggcttgttctccaagtctt

SEQ ID NO: 20086 - DNA, 20 bp, Artificial Sequence
  chemically synthesized
ctccaagtcttgggactgcc

SEQ ID NO: 20087 - DNA, 20 bp, Artificial Sequence
  chemically synthesized
gtcttgggactgcccagaaa

SEQ ID NO: 20088 - DNA, 20 bp, Artificial Sequence
  chemically synthesized
tcttgggactgcccagaaat

SEQ ID NO: 20089 - DNA, 20 bp, Artificial Sequence
  chemically synthesized
ctgcccagaaatgggttgcc

SEQ ID NO: 20090 - DNA, 20 bp, Artificial Sequence
  chemically synthesized
cccagaaatgggttgcctgg

SEQ ID NO: 20091 - DNA, 20 bp, Artificial Sequence
  chemically synthesized
ccagaaatgggttgcctggt

SEQ ID NO: 20092 - DNA, 20 bp, Artificial Sequence
  chemically synthesized
cagaaatgggttgcctggta

SEQ ID NO: 20093 - DNA, 20 bp, Artificial Sequence
  chemically synthesized
gggttgcctggtagggctca

SEQ ID NO: 20094 - DNA, 20 bp, Artificial Sequence
  chemically synthesized
gcctggtagggctcatggct

SEQ ID NO: 20095 - DNA, 20 bp, Artificial Sequence
  chemically synthesized
gctcagcactgcgatcccac

SEQ ID NO: 20096 - DNA, 20 bp, Artificial Sequence
  chemically synthesized
cagcactgcgatcccaccag

SEQ ID NO: 20097 - DNA, 20 bp, Artificial Sequence
  chemically synthesized
actgcgatcccaccagtggc

SEQ ID NO: 20098 - DNA, 20 bp, Artificial Sequence
  chemically synthesized
ctgcgatcccaccagtggcc

SEQ ID NO: 20099 - DNA, 20 bp, Artificial Sequence
  chemically synthesized
tgcgatcccaccagtggccg

SEQ ID NO: 20100 - DNA, 20 bp, Artificial Sequence
  chemically synthesized
ccagtggccggggtgttcct

SEQ ID NO: 20101 - DNA, 20 bp, Artificial Sequence
  chemically synthesized
cggggtgttccttagccttc

SEQ ID NO: 20102 - DNA, 20 bp, Artificial Sequence
  chemically synthesized
tgttccttagccttctagtt

SEQ ID NO: 20103 - DNA, 20 bp, Artificial Sequence
  chemically synthesized
ttagccttctagttcagttg

SEQ ID NO: 20104 - DNA, 20 bp, Artificial Sequence
  chemically synthesized
tagttcagttgtggcccttc

SEQ ID NO: 20105 - DNA, 20 bp, Artificial Sequence
  chemically synthesized
agttcagttgtggcccttct

SEQ ID NO: 20106 - DNA, 20 bp, Artificial Sequence
  chemically synthesized
ttctgggcttcctttgctac

SEQ ID NO: 20107 - DNA, 20 bp, Artificial Sequence
  chemically synthesized
tgctaccagtttccaccaca

SEQ ID NO: 20108 - DNA, 20 bp, Artificial Sequence
  chemically synthesized
accagtttccaccacatggc

SEQ ID NO: 20109 - DNA, 20 bp, Artificial Sequence
  chemically synthesized
cagtttccaccacatggctg

SEQ ID NO: 20110 - DNA, 20 bp, Artificial Sequence
  chemically synthesized
agtttccaccacatggctgg

SEQ ID NO: 20111 - DNA, 20 bp, Artificial Sequence
  chemically synthesized
ttccaccacatggctggagg

SEQ ID NO: 20112 - DNA, 20 bp, Artificial Sequence
  chemically synthesized
ccacatggctggaggtagcc

SEQ ID NO: 20113 - DNA, 20 bp, Artificial Sequence
  chemically synthesized
tggctggaggtagcccagcc

SEQ ID NO: 20114 - DNA, 20 bp, Artificial Sequence
  chemically synthesized
ctggaggtagcccagcctgg

SEQ ID NO: 20115 - DNA, 20 bp, Artificial Sequence
  chemically synthesized
agcccagcctggaagcctct

SEQ ID NO: 20116 - DNA, 20 bp, Artificial Sequence
  chemically synthesized
cccagcctggaagcctctca

SEQ ID NO: 20117 - DNA, 20 bp, Artificial Sequence
  chemically synthesized
ctggaagcctctcagagctc

SEQ ID NO: 20118 - DNA, 20 bp, Artificial Sequence
  chemically synthesized
agcctctcagagctccagcc

SEQ ID NO: 20119 - DNA, 20 bp, Artificial Sequence
  chemically synthesized
ctctcagagctccagcctgg

SEQ ID NO: 20120 - DNA, 20 bp, Artificial Sequence
  chemically synthesized
gctccagcctggaagcctct

SEQ ID NO: 20121 - DNA, 20 bp, Artificial Sequence
  chemically synthesized
tccagcctggaagcctctca

SEQ ID NO: 20122 - DNA, 20 bp, Artificial Sequence
  chemically synthesized
cagcctggaagcctctcaga

SEQ ID NO: 20123 - DNA, 20 bp, Artificial Sequence
  chemically synthesized
gaagcctctcagagagtgct

SEQ ID NO: 20124 - DNA, 20 bp, Artificial Sequence
  chemically synthesized
agcctctcagagagtgcttg

SEQ ID NO: 20125 - DNA, 20 bp, Artificial Sequence
  chemically synthesized
gagagtgcttggagcactgc

SEQ ID NO: 20126 - DNA, 20 bp, Artificial Sequence
  chemically synthesized
ctgctagctgcacgtgctct

SEQ ID NO: 20127 - DNA, 20 bp, Artificial Sequence
  chemically synthesized
tgctagctgcacgtgctctc

SEQ ID NO: 20128 - DNA, 20 bp, Artificial Sequence
  chemically synthesized
agctgcacgtgctctcagga

SEQ ID NO: 20129 - DNA, 20 bp, Artificial Sequence
  chemically synthesized
gtgctctcaggaaagtccac

SEQ ID NO: 20130 - DNA, 20 bp, Artificial Sequence
  chemically synthesized
tgctctcaggaaagtccaca

SEQ ID NO: 20131 - DNA, 20 bp, Artificial Sequence
  chemically synthesized
ctctcaggaaagtccacaag

SEQ ID NO: 20132 - DNA, 20 bp, Artificial Sequence
  chemically synthesized
caggaaagtccacaaggaga

SEQ ID NO: 20133 - DNA, 20 bp, Artificial Sequence
  chemically synthesized
aaagtccacaaggagatggc

SEQ ID NO: 20134 - DNA, 20 bp, Artificial Sequence
  chemically synthesized
ccacaaggagatggctggtg

SEQ ID NO: 20135 - DNA, 20 bp, Artificial Sequence
  chemically synthesized
aggagatggctggtgtggct

SEQ ID NO: 20136 - DNA, 20 bp, Artificial Sequence
  chemically synthesized
gagatggctggtgtggctca

SEQ ID NO: 20137 - DNA, 20 bp, Artificial Sequence
  chemically synthesized
agagtccttgtgtgctgcct

SEQ ID NO: 20138 - DNA, 20 bp, Artificial Sequence
  chemically synthesized
tgtgctgcctcagcccatgc

SEQ ID NO: 20139 - DNA, 20 bp, Artificial Sequence
  chemically synthesized
gtgctgcctcagcccatgcc

SEQ ID NO: 20140 - DNA, 20 bp, Artificial Sequence
  chemically synthesized
agcccatgccaggccacctg

SEQ ID NO: 20141 - DNA, 20 bp, Artificial Sequence
  chemically synthesized
acctgtggctgtctgccctc

SEQ ID NO: 20142 - DNA, 20 bp, Artificial Sequence
  chemically synthesized
cctcaagtctgtccttctct

SEQ ID NO: 20143 - DNA, 20 bp, Artificial Sequence
  chemically synthesized
ctcaagtctgtccttctctg

SEQ ID NO: 20144 - DNA, 20 bp, Artificial Sequence
  chemically synthesized
tctgtccttctctgaggatt

SEQ ID NO: 20145 - DNA, 20 bp, Artificial Sequence
  chemically synthesized
ctgtccttctctgaggattt

SEQ ID NO: 20146 - DNA, 20 bp, Artificial Sequence
  chemically synthesized
aggatttaggactgtgaacc

SEQ ID NO: 20147 - DNA, 20 bp, Artificial Sequence
  chemically synthesized
gatttaggactgtgaaccta

SEQ ID NO: 20148 - DNA, 20 bp, Artificial Sequence
  chemically synthesized
ctgtgaacctagagaattca

SEQ ID NO: 20149 - DNA, 20 bp, Artificial Sequence
  chemically synthesized
tgaacctagagaattcaaag

SEQ ID NO: 20150 - DNA, 20 bp, Artificial Sequence
  chemically synthesized
acctagagaattcaaagtag

SEQ ID NO: 20151 - DNA, 20 bp, Artificial Sequence
  chemically synthesized
agaattcaaagtagtggaac

SEQ ID NO: 20152 - DNA, 20 bp, Artificial Sequence
  chemically synthesized
aaagtagtggaactagaatc

SEQ ID NO: 20153 - DNA, 20 bp, Artificial Sequence
  chemically synthesized
aagtagtggaactagaatcc

SEQ ID NO: 20154 - DNA, 20 bp, Artificial Sequence
  chemically synthesized
atccaggtctcgactcaatc

SEQ ID NO: 20155 - DNA, 20 bp, Artificial Sequence
  chemically synthesized
tccaggtctcgactcaatcc

SEQ ID NO: 20156 - DNA, 20 bp, Artificial Sequence
  chemically synthesized
ccaggtctcgactcaatcca

SEQ ID NO: 20157 - DNA, 20 bp, Artificial Sequence
  chemically synthesized
aggtctcgactcaatccagg

SEQ ID NO: 20158 - DNA, 20 bp, Artificial Sequence
  chemically synthesized
cagggagttttgctcaccac

SEQ ID NO: 20159 - DNA, 20 bp, Artificial Sequence
  chemically synthesized
gagttttgctcaccacaagc

SEQ ID NO: 20160 - DNA, 20 bp, Artificial Sequence
  chemically synthesized
agttttgctcaccacaagcc

SEQ ID NO: 20161 - DNA, 20 bp, Artificial Sequence
  chemically synthesized
tgctcaccacaagccaggaa

SEQ ID NO: 20162 - DNA, 20 bp, Artificial Sequence
  chemically synthesized
ccaggaacagcttctcttca

SEQ ID NO: 20163 - DNA, 20 bp, Artificial Sequence
  chemically synthesized
aggaacagcttctcttcatg

SEQ ID NO: 20164 - DNA, 20 bp, Artificial Sequence
  chemically synthesized
ggaacagcttctcttcatgg

SEQ ID NO: 20165 - DNA, 20 bp, Artificial Sequence
  chemically synthesized
tcttcatggaggtgcctgtc

SEQ ID NO: 20166 - DNA, 20 bp, Artificial Sequence
  chemically synthesized
tcatggaggtgcctgtctgg

SEQ ID NO: 20167 - DNA, 20 bp, Artificial Sequence
  chemically synthesized
catggaggtgcctgtctgga

SEQ ID NO: 20168 - DNA, 20 bp, Artificial Sequence
  chemically synthesized
ggaggtgcctgtctggaagg

SEQ ID NO: 20169 - DNA, 20 bp, Artificial Sequence
  chemically synthesized
aggtgcctgtctggaaggca

SEQ ID NO: 20170 - DNA, 20 bp, Artificial Sequence
  chemically synthesized
tctggaaggcagagaatctc

SEQ ID NO: 20171 - DNA, 20 bp, Artificial Sequence
  chemically synthesized
cagagaatctctggcttgtt

SEQ ID NO: 20172 - DNA, 20 bp, Artificial Sequence
  chemically synthesized
agaatctctggcttgttgag

SEQ ID NO: 20173 - DNA, 20 bp, Artificial Sequence
  chemically synthesized
aatctctggcttgttgagaa

SEQ ID NO: 20174 - DNA, 20 bp, Artificial Sequence
  chemically synthesized
tctctggcttgttgagaaga

SEQ ID NO: 20175 - DNA, 20 bp, Artificial Sequence
  chemically synthesized
tctggcttgttgagaagaga

SEQ ID NO: 20176 - DNA, 20 bp, Artificial Sequence
  chemically synthesized
agaagagagagtctgccctt

SEQ ID NO: 20177 - DNA, 20 bp, Artificial Sequence
  chemically synthesized
gagtctgcccttcagactgc

SEQ ID NO: 20178 - DNA, 20 bp, Artificial Sequence
  chemically synthesized
agtctgcccttcagactgca

SEQ ID NO: 20179 - DNA, 20 bp, Artificial Sequence
  chemically synthesized
actgcaaggtgttcactgca

SEQ ID NO: 20180 - DNA, 20 bp, Artificial Sequence
  chemically synthesized
ctgcaaggtgttcactgcat

SEQ ID NO: 20181 - DNA, 20 bp, Artificial Sequence
  chemically synthesized
tcactgcataggacccttcg

SEQ ID NO: 20182 - DNA, 20 bp, Artificial Sequence
  chemically synthesized
cactgcataggacccttcgt

SEQ ID NO: 20183 - DNA, 20 bp, Artificial Sequence
  chemically synthesized
acccttcgtaggtgctgacc

SEQ ID NO: 20184 - DNA, 20 bp, Artificial Sequence
  chemically synthesized
ggtgctgacccagctgtgcc

SEQ ID NO: 20185 - DNA, 20 bp, Artificial Sequence
  chemically synthesized
gacccagctgtgcccagtgc

SEQ ID NO: 20186 - DNA, 20 bp, Artificial Sequence
  chemically synthesized
cccagctgtgcccagtgcta

SEQ ID NO: 20187 - DNA, 20 bp, Artificial Sequence
  chemically synthesized
gctgtgcccagtgctagagc

SEQ ID NO: 20188 - DNA, 20 bp, Artificial Sequence
  chemically synthesized
ctgtgcccagtgctagagct

SEQ ID NO: 20189 - DNA, 20 bp, Artificial Sequence
  chemically synthesized
ccagtgctagagctaggact

SEQ ID NO: 20190 - DNA, 20 bp, Artificial Sequence
  chemically synthesized
aggactcagttctattttcc

SEQ ID NO: 20191 - DNA, 20 bp, Artificial Sequence
  chemically synthesized
gactcagttctattttccca

SEQ ID NO: 20192 - DNA, 20 bp, Artificial Sequence
  chemically synthesized
ctcagttctattttcccaga

SEQ ID NO: 20193 - DNA, 20 bp, Artificial Sequence
  chemically synthesized
agttctattttcccagagag

SEQ ID NO: 20194 - DNA, 20 bp, Artificial Sequence
  chemically synthesized
tttcccagagagtggtgtga

SEQ ID NO: 20195 - DNA, 20 bp, Artificial Sequence
  chemically synthesized
ttcccagagagtggtgtgat

SEQ ID NO: 20196 - DNA, 20 bp, Artificial Sequence
  chemically synthesized
cccagagagtggtgtgatgg

SEQ ID NO: 20197 - DNA, 20 bp, Artificial Sequence
  chemically synthesized
ccagagagtggtgtgatggg

SEQ ID NO: 20198 - DNA, 20 bp, Artificial Sequence
  chemically synthesized
gctatttctttttctttttt

SEQ ID NO: 20199 - DNA, 20 bp, Artificial Sequence
  chemically synthesized
tttcttttttcagtcctgat

SEQ ID NO: 20200 - DNA, 20 bp, Artificial Sequence
  chemically synthesized
ttcttttttcagtcctgatc

SEQ ID NO: 20201 - DNA, 20 bp, Artificial Sequence
  chemically synthesized
tcttttttcagtcctgatca

SEQ ID NO: 20202 - DNA, 20 bp, Artificial Sequence
  chemically synthesized
tttcagtcctgatcagggat

SEQ ID NO: 20203 - DNA, 20 bp, Artificial Sequence
  chemically synthesized
cagggatgagtccgtgctgt

SEQ ID NO: 20204 - DNA, 20 bp, Artificial Sequence
  chemically synthesized
agggatgagtccgtgctgtt

SEQ ID NO: 20205 - DNA, 20 bp, Artificial Sequence
  chemically synthesized
ttgggtttattcatttactt

SEQ ID NO: 20206 - DNA, 20 bp, Artificial Sequence
  chemically synthesized
attcatttactttagcgtgt

SEQ ID NO: 20207 - DNA, 20 bp, Artificial Sequence
  chemically synthesized
catttactttagcgtgtgag

SEQ ID NO: 20208 - DNA, 20 bp, Artificial Sequence
  chemically synthesized
atttactttagcgtgtgagt

SEQ ID NO: 20209 - DNA, 20 bp, Artificial Sequence
  chemically synthesized
tttactttagcgtgtgagtg

SEQ ID NO: 20210 - DNA, 20 bp, Artificial Sequence
  chemically synthesized
tactttagcgtgtgagtggg

SEQ ID NO: 20211 - DNA, 20 bp, Artificial Sequence
  chemically synthesized
ttagcgtgtgagtggggaga

SEQ ID NO: 20212 - DNA, 20 bp, Artificial Sequence
  chemically synthesized
gtgtgagtggggagatggat

SEQ ID NO: 20213 - DNA, 20 bp, Artificial Sequence
  chemically synthesized
tgtgagtggggagatggatt

SEQ ID NO: 20214 - DNA, 20 bp, Artificial Sequence
  chemically synthesized
gagtggggagatggattagg

SEQ ID NO: 20215 - DNA, 20 bp, Artificial Sequence
  chemically synthesized
tggggagatggattaggcag

SEQ ID NO: 20216 - DNA, 20 bp, Artificial Sequence
  chemically synthesized
ggggagatggattaggcagc

SEQ ID NO: 20217 - DNA, 20 bp, Artificial Sequence
  chemically synthesized
tggattaggcagcaggccct

SEQ ID NO: 20218 - DNA, 20 bp, Artificial Sequence
  chemically synthesized
attaggcagcaggcccttgg

SEQ ID NO: 20219 - DNA, 20 bp, Artificial Sequence
  chemically synthesized
ttaggcagcaggcccttgga

SEQ ID NO: 20220 - DNA, 20 bp, Artificial Sequence
  chemically synthesized
taggcagcaggcccttggaa

SEQ ID NO: 20221 - DNA, 20 bp, Artificial Sequence
  chemically synthesized
gcagcaggcccttggaaggg

SEQ ID NO: 20222 - DNA, 20 bp, Artificial Sequence
  chemically synthesized
cagcaggcccttggaagggt

SEQ ID NO: 20223 - DNA, 20 bp, Artificial Sequence
  chemically synthesized
caggcccttggaagggtggg

SEQ ID NO: 20224 - DNA, 20 bp, Artificial Sequence
  chemically synthesized
cttggaagggtgggaagatt

SEQ ID NO: 20225 - DNA, 20 bp, Artificial Sequence
  chemically synthesized
ggaagggtgggaagattcag

SEQ ID NO: 20226 - DNA, 20 bp, Artificial Sequence
  chemically synthesized
aagggtgggaagattcagaa

SEQ ID NO: 20227 - DNA, 20 bp, Artificial Sequence
  chemically synthesized
gggtgggaagattcagaaga

SEQ ID NO: 20228 - DNA, 20 bp, Artificial Sequence
  chemically synthesized
gtgggaagattcagaagaga

SEQ ID NO: 20229 - DNA, 20 bp, Artificial Sequence
  chemically synthesized
tgggaagattcagaagagag

SEQ ID NO: 20230 - DNA, 20 bp, Artificial Sequence
  chemically synthesized
gggaagattcagaagagaga

SEQ ID NO: 20231 - DNA, 20 bp, Artificial Sequence
  chemically synthesized
aagattcagaagagagaggg

SEQ ID NO: 20232 - DNA, 20 bp, Artificial Sequence
  chemically synthesized
agattcagaagagagagggc

SEQ ID NO: 20233 - DNA, 20 bp, Artificial Sequence
  chemically synthesized
cagaagagagagggcaggac

SEQ ID NO: 20234 - DNA, 20 bp, Artificial Sequence
  chemically synthesized
agaagagagagggcaggact

SEQ ID NO: 20235 - DNA, 20 bp, Artificial Sequence
  chemically synthesized
agagagagggcaggactggg

SEQ ID NO: 20236 - DNA, 20 bp, Artificial Sequence
  chemically synthesized
agggcaggactgggaagatc

SEQ ID NO: 20237 - DNA, 20 bp, Artificial Sequence
  chemically synthesized
caggactgggaagatccaga

SEQ ID NO: 20238 - DNA, 20 bp, Artificial Sequence
  chemically synthesized
aggactgggaagatccagac

SEQ ID NO: 20239 - DNA, 20 bp, Artificial Sequence
  chemically synthesized
gaagatccagacaggacatg

SEQ ID NO: 20240 - DNA, 20 bp, Artificial Sequence
  chemically synthesized
acatgaagatttgctccaca

SEQ ID NO: 20241 - DNA, 20 bp, Artificial Sequence
  chemically synthesized
atgaagatttgctccacaaa

SEQ ID NO: 20242 - DNA, 20 bp, Artificial Sequence
  chemically synthesized
gaagatttgctccacaaaga

SEQ ID NO: 20243 - DNA, 20 bp, Artificial Sequence
  chemically synthesized
gatttgctccacaaagagag

SEQ ID NO: 20244 - DNA, 20 bp, Artificial Sequence
  chemically synthesized
ttgctccacaaagagagaag

SEQ ID NO: 20245 - DNA, 20 bp, Artificial Sequence
  chemically synthesized
ctccacaaagagagaagcag

SEQ ID NO: 20246 - DNA, 20 bp, Artificial Sequence
  chemically synthesized
tccacaaagagagaagcagc

SEQ ID NO: 20247 - DNA, 20 bp, Artificial Sequence
  chemically synthesized
cacaaagagagaagcagcag

SEQ ID NO: 20248 - DNA, 20 bp, Artificial Sequence
  chemically synthesized
gagagaagcagcaggagttc

SEQ ID NO: 20249 - DNA, 20 bp, Artificial Sequence
  chemically synthesized
gaagcagcaggagttctggc

SEQ ID NO: 20250 - DNA, 20 bp, Artificial Sequence
  chemically synthesized
agcagcaggagttctggcta

SEQ ID NO: 20251 - DNA, 20 bp, Artificial Sequence
  chemically synthesized
gcagcaggagttctggctag

SEQ ID NO: 20252 - DNA, 20 bp, Artificial Sequence
  chemically synthesized
cccaacacccacacctgcca

SEQ ID NO: 20253 - DNA, 20 bp, Artificial Sequence
  chemically synthesized
ccaacacccacacctgccaa

SEQ ID NO: 20254 - DNA, 20 bp, Artificial Sequence
  chemically synthesized
caacacccacacctgccaaa

SEQ ID NO: 20255 - DNA, 20 bp, Artificial Sequence
  chemically synthesized
aacacccacacctgccaaag

SEQ ID NO: 20256 - DNA, 20 bp, Artificial Sequence
  chemically synthesized
acctgccaaaggggttccca

SEQ ID NO: 20257 - DNA, 20 bp, Artificial Sequence
  chemically synthesized
cctgccaaaggggttcccat

SEQ ID NO: 20258 - DNA, 20 bp, Artificial Sequence
  chemically synthesized
ctgccaaaggggttcccatg

SEQ ID NO: 20259 - DNA, 20 bp, Artificial Sequence
  chemically synthesized
ccaaaggggttcccatgggg

SEQ ID NO: 20260 - DNA, 20 bp, Artificial Sequence
  chemically synthesized
aggggttcccatggggtggc

SEQ ID NO: 20261 - DNA, 20 bp, Artificial Sequence
  chemically synthesized
tcccatggggtggctggctt

SEQ ID NO: 20262 - DNA, 20 bp, Artificial Sequence
  chemically synthesized
cccatggggtggctggcttg

SEQ ID NO: 20263 - DNA, 20 bp, Artificial Sequence
  chemically synthesized
ccatggggtggctggcttga

SEQ ID NO: 20264 - DNA, 20 bp, Artificial Sequence
  chemically synthesized
catggggtggctggcttgag

SEQ ID NO: 20265 - DNA, 20 bp, Artificial Sequence
  chemically synthesized
gtggctggcttgaggggatc

SEQ ID NO: 20266 - DNA, 20 bp, Artificial Sequence
  chemically synthesized
tggctggcttgaggggatct

SEQ ID NO: 20267 - DNA, 20 bp, Artificial Sequence
  chemically synthesized
gcttgaggggatctgggcgc

SEQ ID NO: 20268 - DNA, 20 bp, Artificial Sequence
  chemically synthesized
ctgggcgctggtttctgctg

SEQ ID NO: 20269 - DNA, 20 bp, Artificial Sequence
  chemically synthesized
gcgctggtttctgctgtgga

SEQ ID NO: 20270 - DNA, 20 bp, Artificial Sequence
  chemically synthesized
tttctgctgtggacagcctc

SEQ ID NO: 20271 - DNA, 20 bp, Artificial Sequence
  chemically synthesized
ctgctgtggacagcctcaag

SEQ ID NO: 20272 - DNA, 20 bp, Artificial Sequence
  chemically synthesized
tgctgtggacagcctcaagt

SEQ ID NO: 20273 - DNA, 20 bp, Artificial Sequence
  chemically synthesized
gctgtggacagcctcaagtg

SEQ ID NO: 20274 - DNA, 20 bp, Artificial Sequence
  chemically synthesized
ggacagcctcaagtggggcg

SEQ ID NO: 20275 - DNA, 20 bp, Artificial Sequence
  chemically synthesized
acagcctcaagtggggcgtg

SEQ ID NO: 20276 - DNA, 20 bp, Artificial Sequence
  chemically synthesized
cagcctcaagtggggcgtgg

SEQ ID NO: 20277 - DNA, 20 bp, Artificial Sequence
  chemically synthesized
cctcaagtggggcgtggagg

SEQ ID NO: 20278 - DNA, 20 bp, Artificial Sequence
  chemically synthesized
gggcgtggaggcagcatctc

SEQ ID NO: 20279 - DNA, 20 bp, Artificial Sequence
  chemically synthesized
cgtggaggcagcatctccag

SEQ ID NO: 20280 - DNA, 20 bp, Artificial Sequence
  chemically synthesized
gcagcatctccagaagcacc

SEQ ID NO: 20281 - DNA, 20 bp, Artificial Sequence
  chemically synthesized
gcatctccagaagcacccgg

SEQ ID NO: 20282 - DNA, 20 bp, Artificial Sequence
  chemically synthesized
ctccagaagcacccggcaga

SEQ ID NO: 20283 - DNA, 20 bp, Artificial Sequence
  chemically synthesized
gcacccggcagatggctcct

SEQ ID NO: 20284 - DNA, 20 bp, Artificial Sequence
  chemically synthesized
cacccggcagatggctcctg

SEQ ID NO: 20285 - DNA, 20 bp, Artificial Sequence
  chemically synthesized
acccggcagatggctcctga

SEQ ID NO: 20286 - DNA, 20 bp, Artificial Sequence
  chemically synthesized
ccggcagatggctcctgagg

SEQ ID NO: 20287 - DNA, 20 bp, Artificial Sequence
  chemically synthesized
gcagatggctcctgagggag

SEQ ID NO: 20288 - DNA, 20 bp, Artificial Sequence
  chemically synthesized
cagatggctcctgagggagc

SEQ ID NO: 20289 - DNA, 20 bp, Artificial Sequence
  chemically synthesized
agatggctcctgagggagca

SEQ ID NO: 20290 - DNA, 20 bp, Artificial Sequence
  chemically synthesized
gagggagcagggactccttc

SEQ ID NO: 20291 - DNA, 20 bp, Artificial Sequence
  chemically synthesized
actccttctagtgccactcc

SEQ ID NO: 20292 - DNA, 20 bp, Artificial Sequence
  chemically synthesized
ctccttctagtgccactcct

SEQ ID NO: 20293 - DNA, 20 bp, Artificial Sequence
  chemically synthesized
tcccctccttgtctcatatt

SEQ ID NO: 20294 - DNA, 20 bp, Artificial Sequence
  chemically synthesized
ttgtctcatatttagcatct

SEQ ID NO: 20295 - DNA, 20 bp, Artificial Sequence
  chemically synthesized
gtctcatatttagcatcttg

SEQ ID NO: 20296 - DNA, 20 bp, Artificial Sequence
  chemically synthesized
ttagcatcttggagccgtgt

SEQ ID NO: 20297 - DNA, 20 bp, Artificial Sequence
  chemically synthesized
tcttggagccgtgtcagctg

SEQ ID NO: 20298 - DNA, 20 bp, Artificial Sequence
  chemically synthesized
ttggagccgtgtcagctgca

SEQ ID NO: 20299 - DNA, 20 bp, Artificial Sequence
  chemically synthesized
gccgtgtcagctgcagagac

SEQ ID NO: 20300 - DNA, 20 bp, Artificial Sequence
  chemically synthesized
cgtgtcagctgcagagactg

SEQ ID NO: 20301 - DNA, 20 bp, Artificial Sequence
  chemically synthesized
cagctgcagagactggagtc

SEQ ID NO: 20302 - DNA, 20 bp, Artificial Sequence
  chemically synthesized
agctgcagagactggagtcc

SEQ ID NO: 20303 - DNA, 20 bp, Artificial Sequence
  chemically synthesized
gctgcagagactggagtccg

SEQ ID NO: 20304 - DNA, 20 bp, Artificial Sequence
  chemically synthesized
gactggagtccggggcatga

SEQ ID NO: 20305 - DNA, 20 bp, Artificial Sequence
  chemically synthesized
actggagtccggggcatgat

SEQ ID NO: 20306 - DNA, 20 bp, Artificial Sequence
  chemically synthesized
ctggagtccggggcatgatg

SEQ ID NO: 20307 - DNA, 20 bp, Artificial Sequence
  chemically synthesized
atggggatgtacctgaaacc

SEQ ID NO: 20308 - DNA, 20 bp, Artificial Sequence
  chemically synthesized
ggatgtacctgaaacctagt

SEQ ID NO: 20309 - DNA, 20 bp, Artificial Sequence
  chemically synthesized
atgtacctgaaacctagtga

SEQ ID NO: 20310 - DNA, 20 bp, Artificial Sequence
  chemically synthesized
agtgagagtcatcctgactc

SEQ ID NO: 20311 - DNA, 20 bp, Artificial Sequence
  chemically synthesized
gtgagagtcatcctgactct

SEQ ID NO: 20312 - DNA, 20 bp, Artificial Sequence
  chemically synthesized
tgagagtcatcctgactctg

SEQ ID NO: 20313 - DNA, 20 bp, Artificial Sequence
  chemically synthesized
gagtcatcctgactctgggg

SEQ ID NO: 20314 - DNA, 20 bp, Artificial Sequence
  chemically synthesized
gtcatcctgactctggggaa

SEQ ID NO: 20315 - DNA, 20 bp, Artificial Sequence
  chemically synthesized
ctctggggaagagccgctca

SEQ ID NO: 20316 - DNA, 20 bp, Artificial Sequence
  chemically synthesized
gggaagagccgctcaaagat

SEQ ID NO: 20317 - DNA, 20 bp, Artificial Sequence
  chemically synthesized
agagccgctcaaagatgaga

SEQ ID NO: 20318 - DNA, 20 bp, Artificial Sequence
  chemically synthesized
gctcaaagatgagaaagata

SEQ ID NO: 20319 - DNA, 20 bp, Artificial Sequence
  chemically synthesized
ttgccacccccaacccctca

SEQ ID NO: 20320 - DNA, 20 bp, Artificial Sequence
  chemically synthesized
tgccacccccaacccctcac

SEQ ID NO: 20321 - DNA, 20 bp, Artificial Sequence
  chemically synthesized
acccccaacccctcacaggc

SEQ ID NO: 20322 - DNA, 20 bp, Artificial Sequence
  chemically synthesized
ctcacaggctagactatcca

SEQ ID NO: 20323 - DNA, 20 bp, Artificial Sequence
  chemically synthesized
gctagactatccatggattt

SEQ ID NO: 20324 - DNA, 20 bp, Artificial Sequence
  chemically synthesized
agactatccatggatttcag

SEQ ID NO: 20325 - DNA, 20 bp, Artificial Sequence
  chemically synthesized
gactatccatggatttcagt

SEQ ID NO: 20326 - DNA, 20 bp, Artificial Sequence
  chemically synthesized
actatccatggatttcagtg

SEQ ID NO: 20327 - DNA, 20 bp, Artificial Sequence
  chemically synthesized
atccatggatttcagtgggg

SEQ ID NO: 20328 - DNA, 20 bp, Artificial Sequence
  chemically synthesized
atggatttcagtggggtggt

SEQ ID NO: 20329 - DNA, 20 bp, Artificial Sequence
  chemically synthesized
tccctgaacctctcctcaaa

SEQ ID NO: 20330 - DNA, 20 bp, Artificial Sequence
  chemically synthesized
tcctcaaatggtgactgttc

SEQ ID NO: 20331 - DNA, 20 bp, Artificial Sequence
  chemically synthesized
cctcaaatggtgactgttct

SEQ ID NO: 20332 - DNA, 20 bp, Artificial Sequence
  chemically synthesized
ctcaaatggtgactgttctg

SEQ ID NO: 20333 - DNA, 20 bp, Artificial Sequence
  chemically synthesized
tcaaatggtgactgttctgg

SEQ ID NO: 20334 - DNA, 20 bp, Artificial Sequence
  chemically synthesized
ggtcctttctctgcctttct

SEQ ID NO: 20335 - DNA, 20 bp, Artificial Sequence
  chemically synthesized
gtcctttctctgcctttctc

SEQ ID NO: 20336 - DNA, 20 bp, Artificial Sequence
  chemically synthesized
tcctttctctgcctttctca

SEQ ID NO: 20337 - DNA, 20 bp, Artificial Sequence
  chemically synthesized
cctttctctgcctttctcag

SEQ ID NO: 20338 - DNA, 20 bp, Artificial Sequence
  chemically synthesized
ctttctctgcctttctcagg

SEQ ID NO: 20339 - DNA, 20 bp, Artificial Sequence
  chemically synthesized
tgcctttctcagggggtaac

SEQ ID NO: 20340 - DNA, 20 bp, Artificial Sequence
  chemically synthesized
cctttctcagggggtaacca

SEQ ID NO: 20341 - DNA, 20 bp, Artificial Sequence
  chemically synthesized
ctttctcagggggtaaccag

SEQ ID NO: 20342 - DNA, 20 bp, Artificial Sequence
  chemically synthesized
tctcagggggtaaccagagg

SEQ ID NO: 20343 - DNA, 20 bp, Artificial Sequence
  chemically synthesized
cagggggtaaccagaggtgg

SEQ ID NO: 20344 - DNA, 20 bp, Artificial Sequence
  chemically synthesized
ggtaaccagaggtggtggtg

SEQ ID NO: 20345 - DNA, 20 bp, Artificial Sequence
  chemically synthesized
tgtggtccactgtgactcgt

SEQ ID NO: 20346 - DNA, 20 bp, Artificial Sequence
  chemically synthesized
tgctctgtgtgttcattttt

SEQ ID NO: 20347 - DNA, 20 bp, Artificial Sequence
  chemically synthesized
ttgagaaaatgttaatctct

SEQ ID NO: 20348 - DNA, 20 bp, Artificial Sequence
  chemically synthesized
tgttaatctctgagacgtct

SEQ ID NO: 20349 - DNA, 20 bp, Artificial Sequence
  chemically synthesized
ttaatctctgagacgtctaa

SEQ ID NO: 20350 - DNA, 20 bp, Artificial Sequence
  chemically synthesized
taatctctgagacgtctaag

SEQ ID NO: 20351 - DNA, 20 bp, Artificial Sequence
  chemically synthesized
ttctctgtgtctcctccaaa

SEQ ID NO: 20352 - DNA, 20 bp, Artificial Sequence
  chemically synthesized
tcctccaaatggatgccatg

SEQ ID NO: 20353 - DNA, 20 bp, Artificial Sequence
  chemically synthesized
cctccaaatggatgccatgt

SEQ ID NO: 20354 - DNA, 20 bp, Artificial Sequence
  chemically synthesized
ccaaatggatgccatgtggg

SEQ ID NO: 20355 - DNA, 20 bp, Artificial Sequence
  chemically synthesized
caaatggatgccatgtgggt

SEQ ID NO: 20356 - DNA, 20 bp, Artificial Sequence
  chemically synthesized
ggatgccatgtgggtgggca

SEQ ID NO: 20357 - DNA, 20 bp, Artificial Sequence
  chemically synthesized
tgccatgtgggtgggcaaag

SEQ ID NO: 20358 - DNA, 20 bp, Artificial Sequence
  chemically synthesized
atgtgggtgggcaaagtggt

SEQ ID NO: 20359 - DNA, 20 bp, Artificial Sequence
  chemically synthesized
tgtgggtgggcaaagtggtt

SEQ ID NO: 20360 - DNA, 20 bp, Artificial Sequence
  chemically synthesized
ttgggtttattcatttactt

SEQ ID NO: 20361 - DNA, 20 bp, Artificial Sequence
  chemically synthesized
tgggtttattcatttacttt

SEQ ID NO: 20362 - DNA, 20 bp, Artificial Sequence
  chemically synthesized
tttactttaggtgtgtattg

SEQ ID NO: 20363 - DNA, 20 bp, Artificial Sequence
  chemically synthesized
cttgttctcctatccgtcat

SEQ ID NO: 20364 - DNA, 20 bp, Artificial Sequence
  chemically synthesized
tgttctcctatccgtcatca

SEQ ID NO: 20365 - DNA, 20 bp, Artificial Sequence
  chemically synthesized
gttctcctatccgtcatcag

SEQ ID NO: 20366 - DNA, 20 bp, Artificial Sequence
  chemically synthesized
atcagaggtgactcatactt

SEQ ID NO: 20367 - DNA, 20 bp, Artificial Sequence
  chemically synthesized
actcatacttgagacactaa

SEQ ID NO: 20368 - DNA, 20 bp, Artificial Sequence
  chemically synthesized
tcatacttgagacactaaaa

SEQ ID NO: 20369 - DNA, 20 bp, Artificial Sequence
  chemically synthesized
agagaataaactgtcttcat

SEQ ID NO: 20370 - DNA, 20 bp, Artificial Sequence
  chemically synthesized
gagaataaactgtcttcata

SEQ ID NO: 20371 - DNA, 20 bp, Artificial Sequence
  chemically synthesized
cataaggctgtgaacgtcgc

SEQ ID NO: 20372 - DNA, 20 bp, Artificial Sequence
  chemically synthesized
ccagattatgaaccaacttc

SEQ ID NO: 20373 - DNA, 20 bp, Artificial Sequence
  chemically synthesized
tgaaccaacttcaagtaacg

SEQ ID NO: 20374 - DNA, 20 bp, Artificial Sequence
  chemically synthesized
gaaccaacttcaagtaacgt

SEQ ID NO: 20375 - DNA, 20 bp, Artificial Sequence
  chemically synthesized
aaccaacttcaagtaacgta

SEQ ID NO: 20376 - DNA, 20 bp, Artificial Sequence
  chemically synthesized
ttattgaaaccatctccaat

SEQ ID NO: 20377 - DNA, 20 bp, Artificial Sequence
  chemically synthesized
ctccaattagatatgcaaaa

SEQ ID NO: 20378 - DNA, 20 bp, Artificial Sequence
  chemically synthesized
ccaattagatatgcaaaatg

SEQ ID NO: 20379 - DNA, 20 bp, Artificial Sequence
  chemically synthesized
gatatgcaaaatggagttgc

SEQ ID NO: 20380 - DNA, 20 bp, Artificial Sequence
  chemically synthesized
atatgcaaaatggagttgct

SEQ ID NO: 20381 - DNA, 20 bp, Artificial Sequence
  chemically synthesized
tatgcaaaatggagttgctg

SEQ ID NO: 20382 - DNA, 20 bp, Artificial Sequence
  chemically synthesized
atgcaaaatggagttgctgg

SEQ ID NO: 20383 - DNA, 20 bp, Artificial Sequence
  chemically synthesized
aatggagttgctgggggctt

SEQ ID NO: 20384 - DNA, 20 bp, Artificial Sequence
  chemically synthesized
ctgggggcttcagttttctt

SEQ ID NO: 20385 - DNA, 20 bp, Artificial Sequence
  chemically synthesized
tttctttagaccaaataatt

SEQ ID NO: 20386 - DNA, 20 bp, Artificial Sequence
  chemically synthesized
tctttagaccaaataattta

SEQ ID NO: 20387 - DNA, 20 bp, Artificial Sequence
  chemically synthesized
agaccaaataatttagagct

SEQ ID NO: 20388 - DNA, 20 bp, Artificial Sequence
  chemically synthesized
accaaataatttagagctga

SEQ ID NO: 20389 - DNA, 20 bp, Artificial Sequence
  chemically synthesized
ccaaataatttagagctgag

SEQ ID NO: 20390 - DNA, 20 bp, Artificial Sequence
  chemically synthesized
aaataatttagagctgagag

SEQ ID NO: 20391 - DNA, 20 bp, Artificial Sequence
  chemically synthesized
ataatttagagctgagagga

SEQ ID NO: 20392 - DNA, 20 bp, Artificial Sequence
  chemically synthesized
taatttagagctgagaggag

SEQ ID NO: 20393 - DNA, 20 bp, Artificial Sequence
  chemically synthesized
tttagagctgagaggagagg

SEQ ID NO: 20394 - DNA, 20 bp, Artificial Sequence
  chemically synthesized
gaggagaggcagataccatc

SEQ ID NO: 20395 - DNA, 20 bp, Artificial Sequence
  chemically synthesized
tagtctcactttttacaatt

SEQ ID NO: 20396 - DNA, 20 bp, Artificial Sequence
  chemically synthesized
cactttttacaatttagcat

SEQ ID NO: 20397 - DNA, 20 bp, Artificial Sequence
  chemically synthesized
aatttagcattggatttgtt

SEQ ID NO: 20398 - DNA, 20 bp, Artificial Sequence
  chemically synthesized
tgttgagcatgtactctctg

SEQ ID NO: 20399 - DNA, 20 bp, Artificial Sequence
  chemically synthesized
ttgagcatgtactctctgca

SEQ ID NO: 20400 - DNA, 20 bp, Artificial Sequence
  chemically synthesized
ctctctgcagagcattgtga

SEQ ID NO: 20401 - DNA, 20 bp, Artificial Sequence
  chemically synthesized
tctctgcagagcattgtgat

SEQ ID NO: 20402 - DNA, 20 bp, Artificial Sequence
  chemically synthesized
cagagcattgtgataggttc

SEQ ID NO: 20403 - DNA, 20 bp, Artificial Sequence
  chemically synthesized
agagcattgtgataggttct

SEQ ID NO: 20404 - DNA, 20 bp, Artificial Sequence
  chemically synthesized
cattgtgataggttctgggt

SEQ ID NO: 20405 - DNA, 20 bp, Artificial Sequence
  chemically synthesized
attgtgataggttctgggtt

SEQ ID NO: 20406 - DNA, 20 bp, Artificial Sequence
  chemically synthesized
tgtgataggttctgggttgg

SEQ ID NO: 20407 - DNA, 20 bp, Artificial Sequence
  chemically synthesized
gtgataggttctgggttggg

SEQ ID NO: 20408 - DNA, 20 bp, Artificial Sequence
  chemically synthesized
tgataggttctgggttggga

SEQ ID NO: 20409 - DNA, 20 bp, Artificial Sequence
  chemically synthesized
gataggttctgggttgggag

SEQ ID NO: 20410 - DNA, 20 bp, Artificial Sequence
  chemically synthesized
taggttctgggttgggaggg

SEQ ID NO: 20411 - DNA, 20 bp, Artificial Sequence
  chemically synthesized
ttctgggttgggaggggagc

SEQ ID NO: 20412 - DNA, 20 bp, Artificial Sequence
  chemically synthesized
tctgggttgggaggggagcc

SEQ ID NO: 20413 - DNA, 20 bp, Artificial Sequence
  chemically synthesized
gggttgggaggggagccggg

SEQ ID NO: 20414 - DNA, 20 bp, Artificial Sequence
  chemically synthesized
ggttgggaggggagccggga

SEQ ID NO: 20415 - DNA, 20 bp, Artificial Sequence
  chemically synthesized
gggaggggagccgggaaggc

SEQ ID NO: 20416 - DNA, 20 bp, Artificial Sequence
  chemically synthesized
aaggcaagcatcctctctca

SEQ ID NO: 20417 - DNA, 20 bp, Artificial Sequence
  chemically synthesized
caaagctgcctttctcattt

SEQ ID NO: 20418 - DNA, 20 bp, Artificial Sequence
  chemically synthesized
aagctgcctttctcatttga

SEQ ID NO: 20419 - DNA, 20 bp, Artificial Sequence
  chemically synthesized
agctgcctttctcatttgag

SEQ ID NO: 20420 - DNA, 20 bp, Artificial Sequence
  chemically synthesized
gcctttctcatttgagaggc

SEQ ID NO: 20421 - DNA, 20 bp, Artificial Sequence
  chemically synthesized
atttgagaggcgagtgtgtg

SEQ ID NO: 20422 - DNA, 20 bp, Artificial Sequence
  chemically synthesized
agaggcgagtgtgtgtggca

SEQ ID NO: 20423 - DNA, 20 bp, Artificial Sequence
  chemically synthesized
gaggcgagtgtgtgtggcac

SEQ ID NO: 20424 - DNA, 20 bp, Artificial Sequence
  chemically synthesized
aggcgagtgtgtgtggcaca

SEQ ID NO: 20425 - DNA, 20 bp, Artificial Sequence
  chemically synthesized
ggcgagtgtgtgtggcacag

SEQ ID NO: 20426 - DNA, 20 bp, Artificial Sequence
  chemically synthesized
gagtgtgtgtggcacagggg

SEQ ID NO: 20427 - DNA, 20 bp, Artificial Sequence
  chemically synthesized
agtgtgtgtggcacaggggc

SEQ ID NO: 20428 - DNA, 20 bp, Artificial Sequence
  chemically synthesized
gtgtgtggcacaggggcagg

SEQ ID NO: 20429 - DNA, 20 bp, Artificial Sequence
  chemically synthesized
tgtggcacaggggcaggtag

SEQ ID NO: 20430 - DNA, 20 bp, Artificial Sequence
  chemically synthesized
gtggcacaggggcaggtaga

SEQ ID NO: 20431 - DNA, 20 bp, Artificial Sequence
  chemically synthesized
ggcacaggggcaggtagaag

SEQ ID NO: 20432 - DNA, 20 bp, Artificial Sequence
  chemically synthesized
caggggcaggtagaaggaga

SEQ ID NO: 20433 - DNA, 20 bp, Artificial Sequence
  chemically synthesized
gagacagatcctttatacct

SEQ ID NO: 20434 - DNA, 20 bp, Artificial Sequence
  chemically synthesized
gacagatcctttatacctga

SEQ ID NO: 20435 - DNA, 20 bp, Artificial Sequence
  chemically synthesized
gatcctttatacctgagagc

SEQ ID NO: 20436 - DNA, 20 bp, Artificial Sequence
  chemically synthesized
atacctgagagcaagatgtg

SEQ ID NO: 20437 - DNA, 20 bp, Artificial Sequence
  chemically synthesized
ctgagagcaagatgtgcagc

SEQ ID NO: 20438 - DNA, 20 bp, Artificial Sequence
  chemically synthesized
tgagagcaagatgtgcagcc

SEQ ID NO: 20439 - DNA, 20 bp, Artificial Sequence
  chemically synthesized
agcaagatgtgcagccagga

SEQ ID NO: 20440 - DNA, 20 bp, Artificial Sequence
  chemically synthesized
atgtgcagccaggaaagctc

SEQ ID NO: 20441 - DNA, 20 bp, Artificial Sequence
  chemically synthesized
tgtgcagccaggaaagctca

SEQ ID NO: 20442 - DNA, 20 bp, Artificial Sequence
  chemically synthesized
gccaggaaagctcaaggaca

SEQ ID NO: 20443 - DNA, 20 bp, Artificial Sequence
  chemically synthesized
ccaggaaagctcaaggacac

SEQ ID NO: 20444 - DNA, 20 bp, Artificial Sequence
  chemically synthesized
aaagctcaaggacacaggcc

SEQ ID NO: 20445 - DNA, 20 bp, Artificial Sequence
  chemically synthesized
aagctcaaggacacaggcca

SEQ ID NO: 20446 - DNA, 20 bp, Artificial Sequence
  chemically synthesized
agctcaaggacacaggccaa

SEQ ID NO: 20447 - DNA, 20 bp, Artificial Sequence
  chemically synthesized
ctcaaggacacaggccaagg

SEQ ID NO: 20448 - DNA, 20 bp, Artificial Sequence
  chemically synthesized
tcaaggacacaggccaaggg

SEQ ID NO: 20449 - DNA, 20 bp, Artificial Sequence
  chemically synthesized
gacacaggccaagggaggtg

SEQ ID NO: 20450 - DNA, 20 bp, Artificial Sequence
  chemically synthesized
gggaggtgaagtgacttgcc

SEQ ID NO: 20451 - DNA, 20 bp, Artificial Sequence
  chemically synthesized
ggaggtgaagtgacttgccc

SEQ ID NO: 20452 - DNA, 20 bp, Artificial Sequence
  chemically synthesized
agtgacttgcccaggccacc

SEQ ID NO: 20453 - DNA, 20 bp, Artificial Sequence
  chemically synthesized
gcccaggccacccagttacc

SEQ ID NO: 20454 - DNA, 20 bp, Artificial Sequence
  chemically synthesized
ggccacccagttacctagca

SEQ ID NO: 20455 - DNA, 20 bp, Artificial Sequence
  chemically synthesized
cccagttacctagcacagct

SEQ ID NO: 20456 - DNA, 20 bp, Artificial Sequence
  chemically synthesized
acctagcacagctcagccac

SEQ ID NO: 20457 - DNA, 20 bp, Artificial Sequence
  chemically synthesized
aagcccaaatgaatgattct

SEQ ID NO: 20458 - DNA, 20 bp, Artificial Sequence
  chemically synthesized
aatgattctgagttccacat

SEQ ID NO: 20459 - DNA, 20 bp, Artificial Sequence
  chemically synthesized
tgagttccacatcagcgcat

SEQ ID NO: 20460 - DNA, 20 bp, Artificial Sequence
  chemically synthesized
gagttccacatcagcgcatc

SEQ ID NO: 20461 - DNA, 20 bp, Artificial Sequence
  chemically synthesized
ttccacatcagcgcatcggg

SEQ ID NO: 20462 - DNA, 20 bp, Artificial Sequence
  chemically synthesized
gcgcatcgggcagccaccat

SEQ ID NO: 20463 - DNA, 20 bp, Artificial Sequence
  chemically synthesized
catcgggcagccaccatgag

SEQ ID NO: 20464 - DNA, 20 bp, Artificial Sequence
  chemically synthesized
agccaccatgagcagttcca

SEQ ID NO: 20465 - DNA, 20 bp, Artificial Sequence
  chemically synthesized
catgagcagttccacagtga

SEQ ID NO: 20466 - DNA, 20 bp, Artificial Sequence
  chemically synthesized
atgagcagttccacagtgac

SEQ ID NO: 20467 - DNA, 20 bp, Artificial Sequence
  chemically synthesized
agcagttccacagtgacagg

SEQ ID NO: 20468 - DNA, 20 bp, Artificial Sequence
  chemically synthesized
gcagttccacagtgacaggt

SEQ ID NO: 20469 - DNA, 20 bp, Artificial Sequence
  chemically synthesized
cagttccacagtgacaggtg

SEQ ID NO: 20470 - DNA, 20 bp, Artificial Sequence
  chemically synthesized
cacagtgacaggtggggctc

SEQ ID NO: 20471 - DNA, 20 bp, Artificial Sequence
  chemically synthesized
acagtgacaggtggggctct

SEQ ID NO: 20472 - DNA, 20 bp, Artificial Sequence
  chemically synthesized
gtgacaggtggggctctagg

SEQ ID NO: 20473 - DNA, 20 bp, Artificial Sequence
  chemically synthesized
tggcttcctttaaaacatct

SEQ ID NO: 20474 - DNA, 20 bp, Artificial Sequence
  chemically synthesized
ggcttcctttaaaacatctg

SEQ ID NO: 20475 - DNA, 20 bp, Artificial Sequence
  chemically synthesized
tcctttaaaacatctgagga

SEQ ID NO: 20476 - DNA, 20 bp, Artificial Sequence
  chemically synthesized
tttaaaacatctgaggaaag

SEQ ID NO: 20477 - DNA, 20 bp, Artificial Sequence
  chemically synthesized
ttaaaacatctgaggaaagc

SEQ ID NO: 20478 - DNA, 20 bp, Artificial Sequence
  chemically synthesized
cttcctctctgactgctctc

SEQ ID NO: 20479 - DNA, 20 bp, Artificial Sequence
  chemically synthesized
ttcctctctgactgctctcc

SEQ ID NO: 20480 - DNA, 20 bp, Artificial Sequence
  chemically synthesized
tcctctctgactgctctcca

SEQ ID NO: 20481 - DNA, 20 bp, Artificial Sequence
  chemically synthesized
cctctctgactgctctccag

SEQ ID NO: 20482 - DNA, 20 bp, Artificial Sequence
  chemically synthesized
ctctgactgctctccagggg

SEQ ID NO: 20483 - DNA, 20 bp, Artificial Sequence
  chemically synthesized
gactgctctccaggggtggt

SEQ ID NO: 20484 - DNA, 20 bp, Artificial Sequence
  chemically synthesized
ctctccaggggtggtgagca

SEQ ID NO: 20485 - DNA, 20 bp, Artificial Sequence
  chemically synthesized
tctccaggggtggtgagcac

SEQ ID NO: 20486 - DNA, 20 bp, Artificial Sequence
  chemically synthesized
ctccaggggtggtgagcaca

SEQ ID NO: 20487 - DNA, 20 bp, Artificial Sequence
  chemically synthesized
tccaggggtggtgagcacag

SEQ ID NO: 20488 - DNA, 20 bp, Artificial Sequence
  chemically synthesized
tgagcacaggggttcatctg

SEQ ID NO: 20489 - DNA, 20 bp, Artificial Sequence
  chemically synthesized
ggggttcatctgcagctccc

SEQ ID NO: 20490 - DNA, 20 bp, Artificial Sequence
  chemically synthesized
catctgcagctccccagctc

SEQ ID NO: 20491 - DNA, 20 bp, Artificial Sequence
  chemically synthesized
tccccagctccagtgctcct

SEQ ID NO: 20492 - DNA, 20 bp, Artificial Sequence
  chemically synthesized
ccagtgctccttagccttcc

SEQ ID NO: 20493 - DNA, 20 bp, Artificial Sequence
  chemically synthesized
ccttccaagttgtttgaatt

SEQ ID NO: 20494 - DNA, 20 bp, Artificial Sequence
  chemically synthesized
agttgtttgaattaagttgc

SEQ ID NO: 20495 - DNA, 20 bp, Artificial Sequence
  chemically synthesized
tttgaattaagttgcaagcc

SEQ ID NO: 20496 - DNA, 20 bp, Artificial Sequence
  chemically synthesized
ttgaattaagttgcaagccc

SEQ ID NO: 20497 - DNA, 20 bp, Artificial Sequence
  chemically synthesized
aattaagttgcaagcccagg

SEQ ID NO: 20498 - DNA, 20 bp, Artificial Sequence
  chemically synthesized
ggctgcacacatattcattt

SEQ ID NO: 20499 - DNA, 20 bp, Artificial Sequence
  chemically synthesized
ctgcacacatattcattttg

SEQ ID NO: 20500 - DNA, 20 bp, Artificial Sequence
  chemically synthesized
actgtgacacttgtatttcc

SEQ ID NO: 20501 - DNA, 20 bp, Artificial Sequence
  chemically synthesized
ctgtgacacttgtatttcct

SEQ ID NO: 20502 - DNA, 20 bp, Artificial Sequence
  chemically synthesized
tgacacttgtatttcctggg

SEQ ID NO: 20503 - DNA, 20 bp, Artificial Sequence
  chemically synthesized
gggaagcgttactatgtctt

SEQ ID NO: 20504 - DNA, 20 bp, Artificial Sequence
  chemically synthesized
gcgttactatgtctttggcc

SEQ ID NO: 20505 - DNA, 20 bp, Artificial Sequence
  chemically synthesized
tactatgtctttggccgagc

SEQ ID NO: 20506 - DNA, 20 bp, Artificial Sequence
  chemically synthesized
ccgagcaagtattacgccat

SEQ ID NO: 20507 - DNA, 20 bp, Artificial Sequence
  chemically synthesized
gcaagtattacgccatgagc

SEQ ID NO: 20508 - DNA, 20 bp, Artificial Sequence
  chemically synthesized
cctttgaacacctacattgc

SEQ ID NO: 20509 - DNA, 20 bp, Artificial Sequence
  chemically synthesized
ctttgaacacctacattgct

SEQ ID NO: 20510 - DNA, 20 bp, Artificial Sequence
  chemically synthesized
ttgaacacctacattgctgg

SEQ ID NO: 20511 - DNA, 20 bp, Artificial Sequence
  chemically synthesized
tgaacacctacattgctggg

SEQ ID NO: 20512 - DNA, 20 bp, Artificial Sequence
  chemically synthesized
acattgctgggaggatacct

SEQ ID NO: 20513 - DNA, 20 bp, Artificial Sequence
  chemically synthesized
tgctgggaggataccttagt

SEQ ID NO: 20514 - DNA, 20 bp, Artificial Sequence
  chemically synthesized
ctgggaggataccttagtga

SEQ ID NO: 20515 - DNA, 20 bp, Artificial Sequence
  chemically synthesized
gataccttagtgagagtgcc

SEQ ID NO: 20516 - DNA, 20 bp, Artificial Sequence
  chemically synthesized
ataccttagtgagagtgcct

SEQ ID NO: 20517 - DNA, 20 bp, Artificial Sequence
  chemically synthesized
agtgagagtgcctgggccac

SEQ ID NO: 20518 - DNA, 20 bp, Artificial Sequence
  chemically synthesized
gtgagagtgcctgggccact

SEQ ID NO: 20519 - DNA, 20 bp, Artificial Sequence
  chemically synthesized
agtgcctgggccactgggcg

SEQ ID NO: 20520 - DNA, 20 bp, Artificial Sequence
  chemically synthesized
gcctgggccactgggcgtag

SEQ ID NO: 20521 - DNA, 20 bp, Artificial Sequence
  chemically synthesized
ctgggccactgggcgtagca

SEQ ID NO: 20522 - DNA, 20 bp, Artificial Sequence
  chemically synthesized
tgggccactgggcgtagcag

SEQ ID NO: 20523 - DNA, 20 bp, Artificial Sequence
  chemically synthesized
gccactgggcgtagcagagg

SEQ ID NO: 20524 - DNA, 20 bp, Artificial Sequence
  chemically synthesized
cattttactgatttatttga

SEQ ID NO: 20525 - DNA, 20 bp, Artificial Sequence
  chemically synthesized
ctgatttatttgaaagaaaa

SEQ ID NO: 20526 - DNA, 20 bp, Artificial Sequence
  chemically synthesized
ccctccaacccttgccttca

SEQ ID NO: 20527 - DNA, 20 bp, Artificial Sequence
  chemically synthesized
aacccttgccttcatagaaa

SEQ ID NO: 20528 - DNA, 20 bp, Artificial Sequence
  chemically synthesized
cccttgccttcatagaaaca

SEQ ID NO: 20529 - DNA, 20 bp, Artificial Sequence
  chemically synthesized
tcatagaaacagagtgttga

SEQ ID NO: 20530 - DNA, 20 bp, Artificial Sequence
  chemically synthesized
gaaacagagtgttgaaagct

SEQ ID NO: 20531 - DNA, 20 bp, Artificial Sequence
  chemically synthesized
aacagagtgttgaaagcttg

SEQ ID NO: 20532 - DNA, 20 bp, Artificial Sequence
  chemically synthesized
agagtgttgaaagcttggag

SEQ ID NO: 20533 - DNA, 20 bp, Artificial Sequence
  chemically synthesized
ttaatgactcccctgcccct

SEQ ID NO: 20534 - DNA, 20 bp, Artificial Sequence
  chemically synthesized
cccttagtgtcttacatgac

SEQ ID NO: 20535 - DNA, 20 bp, Artificial Sequence
  chemically synthesized
ttatttcaacttattttctg

SEQ ID NO: 20536 - DNA, 20 bp, Artificial Sequence
  chemically synthesized
tcaacttattttctgtggct

SEQ ID NO: 20537 - DNA, 20 bp, Artificial Sequence
  chemically synthesized
gcttggaaaatacgttgact

SEQ ID NO: 20538 - DNA, 20 bp, Artificial Sequence
  chemically synthesized
tgatgattgttttcatgaaa

SEQ ID NO: 20539 - DNA, 20 bp, Artificial Sequence
  chemically synthesized
atgaaatggtgcaacatgta

SEQ ID NO: 20540 - DNA, 20 bp, Artificial Sequence
  chemically synthesized
tggtgcaacatgtaaagcaa

SEQ ID NO: 20541 - DNA, 20 bp, Artificial Sequence
  chemically synthesized
aaagcaatggttgtcattaa

SEQ ID NO: 20542 - DNA, 20 bp, Artificial Sequence
  chemically synthesized
aatggttgtcattaatagtg

SEQ ID NO: 20543 - DNA, 20 bp, Artificial Sequence
  chemically synthesized
tcattaatagtgcagttatg

SEQ ID NO: 20544 - DNA, 20 bp, Artificial Sequence
  chemically synthesized
attaatagtgcagttatgta

SEQ ID NO: 20545 - DNA, 20 bp, Artificial Sequence
  chemically synthesized
tagtgcagttatgtagagtg

SEQ ID NO: 20546 - DNA, 20 bp, Artificial Sequence
  chemically synthesized
tatgtagagtgtagctcttt

SEQ ID NO: 20547 - DNA, 20 bp, Artificial Sequence
  chemically synthesized
agtgtagctctttgagtctt

SEQ ID NO: 20548 - DNA, 20 bp, Artificial Sequence
  chemically synthesized
ttgagtcttcagttttgaat

SEQ ID NO: 20549 - DNA, 20 bp, Artificial Sequence
  chemically synthesized
tcttcagttttgaatcagat

SEQ ID NO: 20550 - DNA, 20 bp, Artificial Sequence
  chemically synthesized
agcgctctgttaacttaaaa

SEQ ID NO: 20551 - DNA, 20 bp, Artificial Sequence
  chemically synthesized
aacttaaaatagccccaaaa

SEQ ID NO: 20552 - DNA, 20 bp, Artificial Sequence
  chemically synthesized
ttaaaatagccccaaaaaag

SEQ ID NO: 20553 - DNA, 20 bp, Artificial Sequence
  chemically synthesized
aaatagccccaaaaaagaag

SEQ ID NO: 20554 - DNA, 20 bp, Artificial Sequence
  chemically synthesized
aatagccccaaaaaagaaga

SEQ ID NO: 20555 - DNA, 20 bp, Artificial Sequence
  chemically synthesized
aaaaagaagaaggaaaaaaa

SEQ ID NO: 20556 - DNA, 20 bp, Artificial Sequence
  chemically synthesized
aaggaaaaaaaaagaactgt

SEQ ID NO: 20557 - DNA, 20 bp, Artificial Sequence
  chemically synthesized
aaaaaagaactgtcagaaat

SEQ ID NO: 20558 - DNA, 20 bp, Artificial Sequence
  chemically synthesized
aaaagaactgtcagaaatca

SEQ ID NO: 20559 - DNA, 20 bp, Artificial Sequence
  chemically synthesized
aaagaactgtcagaaatcag

SEQ ID NO: 20560 - DNA, 20 bp, Artificial Sequence
  chemically synthesized
aagaactgtcagaaatcaga

SEQ ID NO: 20561 - DNA, 20 bp, Artificial Sequence
  chemically synthesized
cagaaatcagagggaaatat

SEQ ID NO: 20562 - DNA, 20 bp, Artificial Sequence
  chemically synthesized
aatattagcattatgaaaca

SEQ ID NO: 20563 - DNA, 20 bp, Artificial Sequence
  chemically synthesized
gcattatgaaacatggtaac

SEQ ID NO: 20564 - DNA, 20 bp, Artificial Sequence
  chemically synthesized
ttatgaaacatggtaacaag

SEQ ID NO: 20565 - DNA, 20 bp, Artificial Sequence
  chemically synthesized
acatggtaacaagtggccat

SEQ ID NO: 20566 - DNA, 20 bp, Artificial Sequence
  chemically synthesized
gcactttatgtctgcatgaa

SEQ ID NO: 20567 - DNA, 20 bp, Artificial Sequence
  chemically synthesized
tctgcatgaatagcatcttt

SEQ ID NO: 20568 - DNA, 20 bp, Artificial Sequence
  chemically synthesized
agcatctttaagtgttttat

SEQ ID NO: 20569 - DNA, 20 bp, Artificial Sequence
  chemically synthesized
tttaagtgttttattggtaa

SEQ ID NO: 20570 - DNA, 20 bp, Artificial Sequence
  chemically synthesized
gtgttttattggtaacggaa

SEQ ID NO: 20571 - DNA, 20 bp, Artificial Sequence
  chemically synthesized
gttttattggtaacggaaaa

SEQ ID NO: 20572 - DNA, 20 bp, Artificial Sequence
  chemically synthesized
ttattggtaacggaaaagag

SEQ ID NO: 20573 - DNA, 20 bp, Artificial Sequence
  chemically synthesized
attggtaacggaaaagagtg

SEQ ID NO: 20574 - DNA, 20 bp, Artificial Sequence
  chemically synthesized
cggaaaagagtggagtcaca

SEQ ID NO: 20575 - DNA, 20 bp, Artificial Sequence
  chemically synthesized
aatgacattacttcccaaat

SEQ ID NO: 20576 - DNA, 20 bp, Artificial Sequence
  chemically synthesized
acattacttcccaaattggc

SEQ ID NO: 20577 - DNA, 20 bp, Artificial Sequence
  chemically synthesized
attggcgagttcttttaatt

SEQ ID NO: 20578 - DNA, 20 bp, Artificial Sequence
  chemically synthesized
ttctccttgttattgcctac

SEQ ID NO: 20579 - DNA, 20 bp, Artificial Sequence
  chemically synthesized
tctccttgttattgcctact

SEQ ID NO: 20580 - DNA, 20 bp, Artificial Sequence
  chemically synthesized
ctccttgttattgcctactg

SEQ ID NO: 20581 - DNA, 20 bp, Artificial Sequence
  chemically synthesized
ccttgttattgcctactggg

SEQ ID NO: 20582 - DNA, 20 bp, Artificial Sequence
  chemically synthesized
tcacctgtcaaattgtatgc

SEQ ID NO: 20583 - DNA, 20 bp, Artificial Sequence
  chemically synthesized
cacctgtcaaattgtatgct

SEQ ID NO: 20584 - DNA, 20 bp, Artificial Sequence
  chemically synthesized
acctgtcaaattgtatgcta

SEQ ID NO: 20585 - DNA, 20 bp, Artificial Sequence
  chemically synthesized
tgtcaaattgtatgctaggg

SEQ ID NO: 20586 - DNA, 20 bp, Artificial Sequence
  chemically synthesized
gtcaaattgtatgctagggt

SEQ ID NO: 20587 - DNA, 20 bp, Artificial Sequence
  chemically synthesized
aattgtatgctagggtggga

SEQ ID NO: 20588 - DNA, 20 bp, Artificial Sequence
  chemically synthesized
attgtatgctagggtgggaa

SEQ ID NO: 20589 - DNA, 20 bp, Artificial Sequence
  chemically synthesized
ttgtatgctagggtgggaaa

SEQ ID NO: 20590 - DNA, 20 bp, Artificial Sequence
  chemically synthesized
tagggtgggaaagggtattt

SEQ ID NO: 20591 - DNA, 20 bp, Artificial Sequence
  chemically synthesized
aaagggtattttagcttttc

SEQ ID NO: 20592 - DNA, 20 bp, Artificial Sequence
  chemically synthesized
tagcttttctggctgcatcc

SEQ ID NO: 20593 - DNA, 20 bp, Artificial Sequence
  chemically synthesized
agcttttctggctgcatccc

SEQ ID NO: 20594 - DNA, 20 bp, Artificial Sequence
  chemically synthesized
ctggctgcatcccgggctct

SEQ ID NO: 20595 - DNA, 20 bp, Artificial Sequence
  chemically synthesized
tggctgcatcccgggctctc

SEQ ID NO: 20596 - DNA, 20 bp, Artificial Sequence
  chemically synthesized
ctgcatcccgggctctcagg

SEQ ID NO: 20597 - DNA, 20 bp, Artificial Sequence
  chemically synthesized
catcccgggctctcaggtag

SEQ ID NO: 20598 - DNA, 20 bp, Artificial Sequence
  chemically synthesized
atcccgggctctcaggtaga

SEQ ID NO: 20599 - DNA, 20 bp, Artificial Sequence
  chemically synthesized
tcccgggctctcaggtagaa

SEQ ID NO: 20600 - DNA, 20 bp, Artificial Sequence
  chemically synthesized
agggatttgtccctttgcca

SEQ ID NO: 20601 - DNA, 20 bp, Artificial Sequence
  chemically synthesized
tccttctctcctgccctccc

SEQ ID NO: 20602 - DNA, 20 bp, Artificial Sequence
  chemically synthesized
gccctccccagtgcccctgc

SEQ ID NO: 20603 - DNA, 20 bp, Artificial Sequence
  chemically synthesized
ccctccccagtgcccctgcc

SEQ ID NO: 20604 - DNA, 20 bp, Artificial Sequence
  chemically synthesized
ctccccagtgcccctgccag

SEQ ID NO: 20605 - DNA, 20 bp, Artificial Sequence
  chemically synthesized
tccccagtgcccctgccagg

SEQ ID NO: 20606 - DNA, 20 bp, Artificial Sequence
  chemically synthesized
cccagtgcccctgccaggag

SEQ ID NO: 20607 - DNA, 20 bp, Artificial Sequence
  chemically synthesized
ccagtgcccctgccaggagg

SEQ ID NO: 20608 - DNA, 20 bp, Artificial Sequence
  chemically synthesized
cagtgcccctgccaggagga

SEQ ID NO: 20609 - DNA, 20 bp, Artificial Sequence
  chemically synthesized
gtgcccctgccaggaggagg

SEQ ID NO: 20610 - DNA, 20 bp, Artificial Sequence
  chemically synthesized
caggaggagggagaatctga

SEQ ID NO: 20611 - DNA, 20 bp, Artificial Sequence
  chemically synthesized
aggagggagaatctgaaagc

SEQ ID NO: 20612 - DNA, 20 bp, Artificial Sequence
  chemically synthesized
ggagaatctgaaagcaagaa

SEQ ID NO: 20613 - DNA, 20 bp, Artificial Sequence
  chemically synthesized
agaatctgaaagcaagaatg

SEQ ID NO: 20614 - DNA, 20 bp, Artificial Sequence
  chemically synthesized
gaatctgaaagcaagaatgg

SEQ ID NO: 20615 - DNA, 20 bp, Artificial Sequence
  chemically synthesized
aatctgaaagcaagaatgga

SEQ ID NO: 20616 - DNA, 20 bp, Artificial Sequence
  chemically synthesized
tctgaaagcaagaatggagg

SEQ ID NO: 20617 - DNA, 20 bp, Artificial Sequence
  chemically synthesized
tgaaagcaagaatggaggga

SEQ ID NO: 20618 - DNA, 20 bp, Artificial Sequence
  chemically synthesized
atggagggagagtaatgccg

SEQ ID NO: 20619 - DNA, 20 bp, Artificial Sequence
  chemically synthesized
ggagggagagtaatgccgtg

SEQ ID NO: 20620 - DNA, 20 bp, Artificial Sequence
  chemically synthesized
gagggagagtaatgccgtgg

SEQ ID NO: 20621 - DNA, 20 bp, Artificial Sequence
  chemically synthesized
ggagagtaatgccgtggagg

SEQ ID NO: 20622 - DNA, 20 bp, Artificial Sequence
  chemically synthesized
agtaatgccgtggaggcagc

SEQ ID NO: 20623 - DNA, 20 bp, Artificial Sequence
  chemically synthesized
gtaatgccgtggaggcagct

SEQ ID NO: 20624 - DNA, 20 bp, Artificial Sequence
  chemically synthesized
aggcagctgggatttgtgcc

SEQ ID NO: 20625 - DNA, 20 bp, Artificial Sequence
  chemically synthesized
agctgggatttgtgcctggc

SEQ ID NO: 20626 - DNA, 20 bp, Artificial Sequence
  chemically synthesized
gcctggccagtgcccctgca

SEQ ID NO: 20627 - DNA, 20 bp, Artificial Sequence
  chemically synthesized
ccagtgcccctgcacagtat

SEQ ID NO: 20628 - DNA, 20 bp, Artificial Sequence
  chemically synthesized
ccctgcacagtattggatat

SEQ ID NO: 20629 - DNA, 20 bp, Artificial Sequence
  chemically synthesized
cacagtattggatatgagta

SEQ ID NO: 20630 - DNA, 20 bp, Artificial Sequence
  chemically synthesized
acagtattggatatgagtat

SEQ ID NO: 20631 - DNA, 20 bp, Artificial Sequence
  chemically synthesized
ggatatgagtatgggcatct

SEQ ID NO: 20632 - DNA, 20 bp, Artificial Sequence
  chemically synthesized
tatgggcatctcagtgtgcc

SEQ ID NO: 20633 - DNA, 20 bp, Artificial Sequence
  chemically synthesized
tctcagtgtgcctggaaacg

SEQ ID NO: 20634 - DNA, 20 bp, Artificial Sequence
  chemically synthesized
agtgtgcctggaaacgcagt

SEQ ID NO: 20635 - DNA, 20 bp, Artificial Sequence
  chemically synthesized
tggaaacgcagttggctgca

SEQ ID NO: 20636 - DNA, 20 bp, Artificial Sequence
  chemically synthesized
cgcagttggctgcacagccc

SEQ ID NO: 20637 - DNA, 20 bp, Artificial Sequence
  chemically synthesized
agttggctgcacagccccag

SEQ ID NO: 20638 - DNA, 20 bp, Artificial Sequence
  chemically synthesized
gttggctgcacagccccagt

SEQ ID NO: 20639 - DNA, 20 bp, Artificial Sequence
  chemically synthesized
ggctgcacagccccagtggg

SEQ ID NO: 20640 - DNA, 20 bp, Artificial Sequence
  chemically synthesized
gccccagtgggaagaactct

SEQ ID NO: 20641 - DNA, 20 bp, Artificial Sequence
  chemically synthesized
ccccagtgggaagaactctg

SEQ ID NO: 20642 - DNA, 20 bp, Artificial Sequence
  chemically synthesized
gaagaactctgaggaactgc

SEQ ID NO: 20643 - DNA, 20 bp, Artificial Sequence
  chemically synthesized
gaactctgaggaactgctgg

SEQ ID NO: 20644 - DNA, 20 bp, Artificial Sequence
  chemically synthesized
tctgaggaactgctggtggt

SEQ ID NO: 20645 - DNA, 20 bp, Artificial Sequence
  chemically synthesized
gctggtggttggctcttccc

SEQ ID NO: 20646 - DNA, 20 bp, Artificial Sequence
  chemically synthesized
ctggtggttggctcttcccc

SEQ ID NO: 20647 - DNA, 20 bp, Artificial Sequence
  chemically synthesized
ttggctcttccccaggctct

SEQ ID NO: 20648 - DNA, 20 bp, Artificial Sequence
  chemically synthesized
aggctctcagcccctctttc

SEQ ID NO: 20649 - DNA, 20 bp, Artificial Sequence
  chemically synthesized
gctctcagcccctctttcta

SEQ ID NO: 20650 - DNA, 20 bp, Artificial Sequence
  chemically synthesized
ctctcagcccctctttctag

SEQ ID NO: 20651 - DNA, 20 bp, Artificial Sequence
  chemically synthesized
tctttctagaggctccacct

SEQ ID NO: 20652 - DNA, 20 bp, Artificial Sequence
  chemically synthesized
tagaggctccacctaagcct

SEQ ID NO: 20653 - DNA, 20 bp, Artificial Sequence
  chemically synthesized
agaggctccacctaagcctt

SEQ ID NO: 20654 - DNA, 20 bp, Artificial Sequence
  chemically synthesized
gctccacctaagccttagga

SEQ ID NO: 20655 - DNA, 20 bp, Artificial Sequence
  chemically synthesized
ccttaggaaagactttcgtt

SEQ ID NO: 20656 - DNA, 20 bp, Artificial Sequence
  chemically synthesized
gactttcgtttggttttaac

SEQ ID NO: 20657 - DNA, 20 bp, Artificial Sequence
  chemically synthesized
ggttttaactggctcctgtc

SEQ ID NO: 20658 - DNA, 20 bp, Artificial Sequence
  chemically synthesized
gttttaactggctcctgtca

SEQ ID NO: 20659 - DNA, 20 bp, Artificial Sequence
  chemically synthesized
ttttaactggctcctgtcaa

SEQ ID NO: 20660 - DNA, 20 bp, Artificial Sequence
  chemically synthesized
tgtcaagggttcccccaaac

SEQ ID NO: 20661 - DNA, 20 bp, Artificial Sequence
  chemically synthesized
ccatttacattataatgcaa

SEQ ID NO: 20662 - DNA, 20 bp, Artificial Sequence
  chemically synthesized
aatgcaaaagctcttccctg

SEQ ID NO: 20663 - DNA, 20 bp, Artificial Sequence
  chemically synthesized
atgcaaaagctcttccctgt

SEQ ID NO: 20664 - DNA, 20 bp, Artificial Sequence
  chemically synthesized
aagctcttccctgtgggtct

SEQ ID NO: 20665 - DNA, 20 bp, Artificial Sequence
  chemically synthesized
agctcttccctgtgggtctc

SEQ ID NO: 20666 - DNA, 20 bp, Artificial Sequence
  chemically synthesized
gctcttccctgtgggtctca

SEQ ID NO: 20667 - DNA, 20 bp, Artificial Sequence
  chemically synthesized
cctgtgggtctcagggcctg

SEQ ID NO: 20668 - DNA, 20 bp, Artificial Sequence
  chemically synthesized
ctgtgggtctcagggcctgt

SEQ ID NO: 20669 - DNA, 20 bp, Artificial Sequence
  chemically synthesized
tgtgggtctcagggcctgtg

SEQ ID NO: 20670 - DNA, 20 bp, Artificial Sequence
  chemically synthesized
ctcagggcctgtggggaaaa

SEQ ID NO: 20671 - DNA, 20 bp, Artificial Sequence
  chemically synthesized
cctgtggggaaaatggaatc

SEQ ID NO: 20672 - DNA, 20 bp, Artificial Sequence
  chemically synthesized
atggaatctggctcaaaccc

SEQ ID NO: 20673 - DNA, 20 bp, Artificial Sequence
  chemically synthesized
tggctcaaacccaagatcca

SEQ ID NO: 20674 - DNA, 20 bp, Artificial Sequence
  chemically synthesized
aaacccaagatccaaagcta

SEQ ID NO: 20675 - DNA, 20 bp, Artificial Sequence
  chemically synthesized
atccaaagctaaagtgcccc

SEQ ID NO: 20676 - DNA, 20 bp, Artificial Sequence
  chemically synthesized
tccaaagctaaagtgccccc

SEQ ID NO: 20677 - DNA, 20 bp, Artificial Sequence
  chemically synthesized
aagctaaagtgcccccaggt

SEQ ID NO: 20678 - DNA, 20 bp, Artificial Sequence
  chemically synthesized
agctaaagtgcccccaggtt

SEQ ID NO: 20679 - DNA, 20 bp, Artificial Sequence
  chemically synthesized
ccccaggttgggctgcctga

SEQ ID NO: 20680 - DNA, 20 bp, Artificial Sequence
  chemically synthesized
tgggctgcctgacagtttta

SEQ ID NO: 20681 - DNA, 20 bp, Artificial Sequence
  chemically synthesized
gcctgacagttttatagata

SEQ ID NO: 20682 - DNA, 20 bp, Artificial Sequence
  chemically synthesized
agttttatagatatggcatt

SEQ ID NO: 20683 - DNA, 20 bp, Artificial Sequence
  chemically synthesized
tttatagatatggcattgag

SEQ ID NO: 20684 - DNA, 20 bp, Artificial Sequence
  chemically synthesized
tatggcattgagtggcctcc

SEQ ID NO: 20685 - DNA, 20 bp, Artificial Sequence
  chemically synthesized
ggcattgagtggcctcctgg

SEQ ID NO: 20686 - DNA, 20 bp, Artificial Sequence
  chemically synthesized
tgagtggcctcctggcagtt

SEQ ID NO: 20687 - DNA, 20 bp, Artificial Sequence
  chemically synthesized
cctggcagtttggaattgtg

SEQ ID NO: 20688 - DNA, 20 bp, Artificial Sequence
  chemically synthesized
ctggcagtttggaattgtga

SEQ ID NO: 20689 - DNA, 20 bp, Artificial Sequence
  chemically synthesized
tttgaacacctgccacatgc

SEQ ID NO: 20690 - DNA, 20 bp, Artificial Sequence
  chemically synthesized
ttgaacacctgccacatgct

SEQ ID NO: 20691 - DNA, 20 bp, Artificial Sequence
  chemically synthesized
cacctgccacatgctgggaa

SEQ ID NO: 20692 - DNA, 20 bp, Artificial Sequence
  chemically synthesized
cacatgctgggaacggttct

SEQ ID NO: 20693 - DNA, 20 bp, Artificial Sequence
  chemically synthesized
ctgggaacggttcttggtgt

SEQ ID NO: 20694 - DNA, 20 bp, Artificial Sequence
  chemically synthesized
tgggaacggttcttggtgtt

SEQ ID NO: 20695 - DNA, 20 bp, Artificial Sequence
  chemically synthesized
acggttcttggtgttgggca

SEQ ID NO: 20696 - DNA, 20 bp, Artificial Sequence
  chemically synthesized
ttcttggtgttgggcataga

SEQ ID NO: 20697 - DNA, 20 bp, Artificial Sequence
  chemically synthesized
ttaaaaactccctgctcttg

SEQ ID NO: 20698 - DNA, 20 bp, Artificial Sequence
  chemically synthesized
ctcttgtggcaccccctttc

SEQ ID NO: 20699 - DNA, 20 bp, Artificial Sequence
  chemically synthesized
tgtggcaccccctttctagc

SEQ ID NO: 20700 - DNA, 20 bp, Artificial Sequence
  chemically synthesized
gtggcaccccctttctagct

SEQ ID NO: 20701 - DNA, 20 bp, Artificial Sequence
  chemically synthesized
tggcaccccctttctagctg

SEQ ID NO: 20702 - DNA, 20 bp, Artificial Sequence
  chemically synthesized
gcaccccctttctagctggg

SEQ ID NO: 20703 - DNA, 20 bp, Artificial Sequence
  chemically synthesized
accccctttctagctgggga

SEQ ID NO: 20704 - DNA, 20 bp, Artificial Sequence
  chemically synthesized
cctttctagctggggagaga

SEQ ID NO: 20705 - DNA, 20 bp, Artificial Sequence
  chemically synthesized
ttctagctggggagagacag

SEQ ID NO: 20706 - DNA, 20 bp, Artificial Sequence
  chemically synthesized
caataaatatgtgaattata

SEQ ID NO: 20707 - DNA, 20 bp, Artificial Sequence
  chemically synthesized
aatatgtgaattatatagta

SEQ ID NO: 20708 - DNA, 20 bp, Artificial Sequence
  chemically synthesized
tgtgaattatatagtatggc

SEQ ID NO: 20709 - DNA, 20 bp, Artificial Sequence
  chemically synthesized
tgaattatatagtatggcaa

SEQ ID NO: 20710 - DNA, 20 bp, Artificial Sequence
  chemically synthesized
attatatagtatggcaagag

SEQ ID NO: 20711 - DNA, 20 bp, Artificial Sequence
  chemically synthesized
caaactgcctgcacgaaaat

SEQ ID NO: 20712 - DNA, 20 bp, Artificial Sequence
  chemically synthesized
aaactgcctgcacgaaaata

SEQ ID NO: 20713 - DNA, 20 bp, Artificial Sequence
  chemically synthesized
ctgcctgcacgaaaataagg

SEQ ID NO: 20714 - DNA, 20 bp, Artificial Sequence
  chemically synthesized
tgcctgcacgaaaataaggt

SEQ ID NO: 20715 - DNA, 20 bp, Artificial Sequence
  chemically synthesized
gcctgcacgaaaataaggtg

SEQ ID NO: 20716 - DNA, 20 bp, Artificial Sequence
  chemically synthesized
tgcacgaaaataaggtgggg

SEQ ID NO: 20717 - DNA, 20 bp, Artificial Sequence
  chemically synthesized
cacgaaaataaggtggggaa

SEQ ID NO: 20718 - DNA, 20 bp, Artificial Sequence
  chemically synthesized
acgaaaataaggtggggaag

SEQ ID NO: 20719 - DNA, 20 bp, Artificial Sequence
  chemically synthesized
cgaaaataaggtggggaaga

SEQ ID NO: 20720 - DNA, 20 bp, Artificial Sequence
  chemically synthesized
gaaaataaggtggggaagag

SEQ ID NO: 20721 - DNA, 20 bp, Artificial Sequence
  chemically synthesized
ataaggtggggaagaggggt

SEQ ID NO: 20722 - DNA, 20 bp, Artificial Sequence
  chemically synthesized
taaggtggggaagaggggta

SEQ ID NO: 20723 - DNA, 20 bp, Artificial Sequence
  chemically synthesized
aaggtggggaagaggggtaa

SEQ ID NO: 20724 - DNA, 20 bp, Artificial Sequence
  chemically synthesized
aggtggggaagaggggtaag

SEQ ID NO: 20725 - DNA, 20 bp, Artificial Sequence
  chemically synthesized
gaagaggggtaaggggtgca

SEQ ID NO: 20726 - DNA, 20 bp, Artificial Sequence
  chemically synthesized
ggtaaggggtgcatggtgac

SEQ ID NO: 20727 - DNA, 20 bp, Artificial Sequence
  chemically synthesized
gtaaggggtgcatggtgacc

SEQ ID NO: 20728 - DNA, 20 bp, Artificial Sequence
  chemically synthesized
atggtgaccaggcttttaaa

SEQ ID NO: 20729 - DNA, 20 bp, Artificial Sequence
  chemically synthesized
tggtgaccaggcttttaaat

SEQ ID NO: 20730 - DNA, 20 bp, Artificial Sequence
  chemically synthesized
aggcttttaaataggataat

SEQ ID NO: 20731 - DNA, 20 bp, Artificial Sequence
  chemically synthesized
ggcttttaaataggataatt

SEQ ID NO: 20732 - DNA, 20 bp, Artificial Sequence
  chemically synthesized
gcttttaaataggataatta

SEQ ID NO: 20733 - DNA, 20 bp, Artificial Sequence
  chemically synthesized
tttaaataggataattaggg

SEQ ID NO: 20734 - DNA, 20 bp, Artificial Sequence
  chemically synthesized
ttaaataggataattaggga

SEQ ID NO: 20735 - DNA, 20 bp, Artificial Sequence
  chemically synthesized
ataattagggaaggcccaat

SEQ ID NO: 20736 - DNA, 20 bp, Artificial Sequence
  chemically synthesized
attagggaaggcccaatgag

SEQ ID NO: 20737 - DNA, 20 bp, Artificial Sequence
  chemically synthesized
ggaaggcccaatgagaagca

SEQ ID NO: 20738 - DNA, 20 bp, Artificial Sequence
  chemically synthesized
gaaggcccaatgagaagcaa

SEQ ID NO: 20739 - DNA, 20 bp, Artificial Sequence
  chemically synthesized
aatgagaagcaaaggctcca

SEQ ID NO: 20740 - DNA, 20 bp, Artificial Sequence
  chemically synthesized
tgagaagcaaaggctccaaa

SEQ ID NO: 20741 - DNA, 20 bp, Artificial Sequence
  chemically synthesized
gagaagcaaaggctccaaag

SEQ ID NO: 20742 - DNA, 20 bp, Artificial Sequence
  chemically synthesized
agcaaaggctccaaagaggt

SEQ ID NO: 20743 - DNA, 20 bp, Artificial Sequence
  chemically synthesized
gcaaaggctccaaagaggtg

SEQ ID NO: 20744 - DNA, 20 bp, Artificial Sequence
  chemically synthesized
aaggctccaaagaggtgagg

SEQ ID NO: 20745 - DNA, 20 bp, Artificial Sequence
  chemically synthesized
ctccaaagaggtgaggaagt

SEQ ID NO: 20746 - DNA, 20 bp, Artificial Sequence
  chemically synthesized
gaggtgaggaagttggccat

SEQ ID NO: 20747 - DNA, 20 bp, Artificial Sequence
  chemically synthesized
aagttggccatgagaatttt

SEQ ID NO: 20748 - DNA, 20 bp, Artificial Sequence
  chemically synthesized
ttggccatgagaattttgag

SEQ ID NO: 20749 - DNA, 20 bp, Artificial Sequence
  chemically synthesized
ccatgagaattttgagaaga

SEQ ID NO: 20750 - DNA, 20 bp, Artificial Sequence
  chemically synthesized
gaattttgagaagatggttc

SEQ ID NO: 20751 - DNA, 20 bp, Artificial Sequence
  chemically synthesized
aattttgagaagatggttcc

SEQ ID NO: 20752 - DNA, 20 bp, Artificial Sequence
  chemically synthesized
tttgagaagatggttccagg

SEQ ID NO: 20753 - DNA, 20 bp, Artificial Sequence
  chemically synthesized
tgagaagatggttccaggaa

SEQ ID NO: 20754 - DNA, 20 bp, Artificial Sequence
  chemically synthesized
atggttccaggaagagtgtg

SEQ ID NO: 20755 - DNA, 20 bp, Artificial Sequence
  chemically synthesized
ggttccaggaagagtgtgta

SEQ ID NO: 20756 - DNA, 20 bp, Artificial Sequence
  chemically synthesized
ttccaggaagagtgtgtaga

SEQ ID NO: 20757 - DNA, 20 bp, Artificial Sequence
  chemically synthesized
caggaagagtgtgtagagag

SEQ ID NO: 20758 - DNA, 20 bp, Artificial Sequence
  chemically synthesized
ggaagagtgtgtagagagca

SEQ ID NO: 20759 - DNA, 20 bp, Artificial Sequence
  chemically synthesized
gaccttgtgtgtaatacgcc

SEQ ID NO: 20760 - DNA, 20 bp, Artificial Sequence
  chemically synthesized
tgtgtaatacgcctggctac

SEQ ID NO: 20761 - DNA, 20 bp, Artificial Sequence
  chemically synthesized
tgtaatacgcctggctactg

SEQ ID NO: 20762 - DNA, 20 bp, Artificial Sequence
  chemically synthesized
gtaatacgcctggctactgg

SEQ ID NO: 20763 - DNA, 20 bp, Artificial Sequence
  chemically synthesized
aatacgcctggctactggag

SEQ ID NO: 20764 - DNA, 20 bp, Artificial Sequence
  chemically synthesized
atacgcctggctactggagg

SEQ ID NO: 20765 - DNA, 20 bp, Artificial Sequence
  chemically synthesized
acgcctggctactggaggag

SEQ ID NO: 20766 - DNA, 20 bp, Artificial Sequence
  chemically synthesized
ctggctactggaggaggagc

SEQ ID NO: 20767 - DNA, 20 bp, Artificial Sequence
  chemically synthesized
tggctactggaggaggagca

SEQ ID NO: 20768 - DNA, 20 bp, Artificial Sequence
  chemically synthesized
ggctactggaggaggagcaa

SEQ ID NO: 20769 - DNA, 20 bp, Artificial Sequence
  chemically synthesized
gctactggaggaggagcaag

SEQ ID NO: 20770 - DNA, 20 bp, Artificial Sequence
  chemically synthesized
gaggaggagcaaggggccct

SEQ ID NO: 20771 - DNA, 20 bp, Artificial Sequence
  chemically synthesized
aggaggagcaaggggccctg

SEQ ID NO: 20772 - DNA, 20 bp, Artificial Sequence
  chemically synthesized
ggagcaaggggccctgaggt

SEQ ID NO: 20773 - DNA, 20 bp, Artificial Sequence
  chemically synthesized
agcaaggggccctgaggtca

SEQ ID NO: 20774 - DNA, 20 bp, Artificial Sequence
  chemically synthesized
aaggggccctgaggtcagag

SEQ ID NO: 20775 - DNA, 20 bp, Artificial Sequence
  chemically synthesized
ggccctgaggtcagagtgga

SEQ ID NO: 20776 - DNA, 20 bp, Artificial Sequence
  chemically synthesized
ccctgaggtcagagtggaaa

SEQ ID NO: 20777 - DNA, 20 bp, Artificial Sequence
  chemically synthesized
aggtcagagtggaaagagtg

SEQ ID NO: 20778 - DNA, 20 bp, Artificial Sequence
  chemically synthesized
ggtcagagtggaaagagtgc

SEQ ID NO: 20779 - DNA, 20 bp, Artificial Sequence
  chemically synthesized
tcagagtggaaagagtgcag

SEQ ID NO: 20780 - DNA, 20 bp, Artificial Sequence
  chemically synthesized
cagagtggaaagagtgcagg

SEQ ID NO: 20781 - DNA, 20 bp, Artificial Sequence
  chemically synthesized
gagtggaaagagtgcaggag

SEQ ID NO: 20782 - DNA, 20 bp, Artificial Sequence
  chemically synthesized
agtggaaagagtgcaggagg

SEQ ID NO: 20783 - DNA, 20 bp, Artificial Sequence
  chemically synthesized
tggaaagagtgcaggaggag

SEQ ID NO: 20784 - DNA, 20 bp, Artificial Sequence
  chemically synthesized
ggaaagagtgcaggaggagg

SEQ ID NO: 20785 - DNA, 20 bp, Artificial Sequence
  chemically synthesized
aaagagtgcaggaggaggag

SEQ ID NO: 20786 - DNA, 20 bp, Artificial Sequence
  chemically synthesized
agagtgcaggaggaggagga

SEQ ID NO: 20787 - DNA, 20 bp, Artificial Sequence
  chemically synthesized
gagtgcaggaggaggaggag

SEQ ID NO: 20788 - DNA, 20 bp, Artificial Sequence
  chemically synthesized
gtgcaggaggaggaggagag

SEQ ID NO: 20789 - DNA, 20 bp, Artificial Sequence
  chemically synthesized
ggaggaggaggagaggagac

SEQ ID NO: 20790 - DNA, 20 bp, Artificial Sequence
  chemically synthesized
gaggaggagaggagaccagc

SEQ ID NO: 20791 - DNA, 20 bp, Artificial Sequence
  chemically synthesized
ggagaccagctggctccttg

SEQ ID NO: 20792 - DNA, 20 bp, Artificial Sequence
  chemically synthesized
gagaccagctggctccttga

SEQ ID NO: 20793 - DNA, 20 bp, Artificial Sequence
  chemically synthesized
agctggctccttgaaggacg

SEQ ID NO: 20794 - DNA, 20 bp, Artificial Sequence
  chemically synthesized
ctggctccttgaaggacgta

SEQ ID NO: 20795 - DNA, 20 bp, Artificial Sequence
  chemically synthesized
gctccttgaaggacgtagag

SEQ ID NO: 20796 - DNA, 20 bp, Artificial Sequence
  chemically synthesized
ctccttgaaggacgtagagc

SEQ ID NO: 20797 - DNA, 20 bp, Artificial Sequence
  chemically synthesized
tccttgaaggacgtagagca

SEQ ID NO: 20798 - DNA, 20 bp, Artificial Sequence
  chemically synthesized
ggacgtagagcagggatttt

SEQ ID NO: 20799 - DNA, 20 bp, Artificial Sequence
  chemically synthesized
ggatttttggctctgactcc

SEQ ID NO: 20800 - DNA, 20 bp, Artificial Sequence
  chemically synthesized
gatttttggctctgactcca

SEQ ID NO: 20801 - DNA, 20 bp, Artificial Sequence
  chemically synthesized
atttttggctctgactccaa

SEQ ID NO: 20802 - DNA, 20 bp, Artificial Sequence
  chemically synthesized
ttttggctctgactccaagg

SEQ ID NO: 20803 - DNA, 20 bp, Artificial Sequence
  chemically synthesized
ggctctgactccaagggaga

SEQ ID NO: 20804 - DNA, 20 bp, Artificial Sequence
  chemically synthesized
tctgactccaagggagatgg

SEQ ID NO: 20805 - DNA, 20 bp, Artificial Sequence
  chemically synthesized
ccaagggagatggaagccac

SEQ ID NO: 20806 - DNA, 20 bp, Artificial Sequence
  chemically synthesized
aagggagatggaagccactg

SEQ ID NO: 20807 - DNA, 20 bp, Artificial Sequence
  chemically synthesized
agggagatggaagccactgg

SEQ ID NO: 20808 - DNA, 20 bp, Artificial Sequence
  chemically synthesized
ggagatggaagccactggag

SEQ ID NO: 20809 - DNA, 20 bp, Artificial Sequence
  chemically synthesized
tgtcatatgacttgcgcttc

SEQ ID NO: 20810 - DNA, 20 bp, Artificial Sequence
  chemically synthesized
tcatatgacttgcgcttcca

SEQ ID NO: 20811 - DNA, 20 bp, Artificial Sequence
  chemically synthesized
atatgacttgcgcttccaga

SEQ ID NO: 20812 - DNA, 20 bp, Artificial Sequence
  chemically synthesized
tgcgcttccagagagtctct

SEQ ID NO: 20813 - DNA, 20 bp, Artificial Sequence
  chemically synthesized
gcgcttccagagagtctctt

SEQ ID NO: 20814 - DNA, 20 bp, Artificial Sequence
  chemically synthesized
agtctcttgggccgcatttt

SEQ ID NO: 20815 - DNA, 20 bp, Artificial Sequence
  chemically synthesized
tgggccgcattttgagactc

SEQ ID NO: 20816 - DNA, 20 bp, Artificial Sequence
  chemically synthesized
cgcattttgagactcaagca

SEQ ID NO: 20817 - DNA, 20 bp, Artificial Sequence
  chemically synthesized
gcattttgagactcaagcat

SEQ ID NO: 20818 - DNA, 20 bp, Artificial Sequence
  chemically synthesized
tttgagactcaagcatggga

SEQ ID NO: 20819 - DNA, 20 bp, Artificial Sequence
  chemically synthesized
agactcaagcatgggaaagt

SEQ ID NO: 20820 - DNA, 20 bp, Artificial Sequence
  chemically synthesized
gactcaagcatgggaaagtg

SEQ ID NO: 20821 - DNA, 20 bp, Artificial Sequence
  chemically synthesized
tcaagcatgggaaagtgagg

SEQ ID NO: 20822 - DNA, 20 bp, Artificial Sequence
  chemically synthesized
agcatgggaaagtgaggcag

SEQ ID NO: 20823 - DNA, 20 bp, Artificial Sequence
  chemically synthesized
atgggaaagtgaggcagaag

SEQ ID NO: 20824 - DNA, 20 bp, Artificial Sequence
  chemically synthesized
gaaagtgaggcagaagcagt

SEQ ID NO: 20825 - DNA, 20 bp, Artificial Sequence
  chemically synthesized
agtgaggcagaagcagtcag

SEQ ID NO: 20826 - DNA, 20 bp, Artificial Sequence
  chemically synthesized
gtgaggcagaagcagtcaga

SEQ ID NO: 20827 - DNA, 20 bp, Artificial Sequence
  chemically synthesized
agcagtcagaaggcaaattt

SEQ ID NO: 20828 - DNA, 20 bp, Artificial Sequence
  chemically synthesized
gcagtcagaaggcaaatttt

SEQ ID NO: 20829 - DNA, 20 bp, Artificial Sequence
  chemically synthesized
tcagaaggcaaattttaggc

SEQ ID NO: 20830 - DNA, 20 bp, Artificial Sequence
  chemically synthesized
ggcaaattttaggcaagtga

SEQ ID NO: 20831 - DNA, 20 bp, Artificial Sequence
  chemically synthesized
aaattttaggcaagtgatgg

SEQ ID NO: 20832 - DNA, 20 bp, Artificial Sequence
  chemically synthesized
ttaggcaagtgatggtggcg

SEQ ID NO: 20833 - DNA, 20 bp, Artificial Sequence
  chemically synthesized
caagtgatggtggcgtggac

SEQ ID NO: 20834 - DNA, 20 bp, Artificial Sequence
  chemically synthesized
aagtgatggtggcgtggacc

SEQ ID NO: 20835 - DNA, 20 bp, Artificial Sequence
  chemically synthesized
agtgatggtggcgtggacca

SEQ ID NO: 20836 - DNA, 20 bp, Artificial Sequence
  chemically synthesized
gatggtggcgtggaccaggg

SEQ ID NO: 20837 - DNA, 20 bp, Artificial Sequence
  chemically synthesized
ggtggcgtggaccagggtgg

SEQ ID NO: 20838 - DNA, 20 bp, Artificial Sequence
  chemically synthesized
gtggcgtggaccagggtggt

SEQ ID NO: 20839 - DNA, 20 bp, Artificial Sequence
  chemically synthesized
tggcgtggaccagggtggtg

SEQ ID NO: 20840 - DNA, 20 bp, Artificial Sequence
  chemically synthesized
gaccagggtggtggggacgt

SEQ ID NO: 20841 - DNA, 20 bp, Artificial Sequence
  chemically synthesized
cagggtggtggggacgtgag

SEQ ID NO: 20842 - DNA, 20 bp, Artificial Sequence
  chemically synthesized
agggtggtggggacgtgaga

SEQ ID NO: 20843 - DNA, 20 bp, Artificial Sequence
  chemically synthesized
gggtggtggggacgtgagaa

SEQ ID NO: 20844 - DNA, 20 bp, Artificial Sequence
  chemically synthesized
ggtggtggggacgtgagaag

SEQ ID NO: 20845 - DNA, 20 bp, Artificial Sequence
  chemically synthesized
gtggggacgtgagaaggggc

SEQ ID NO: 20846 - DNA, 20 bp, Artificial Sequence
  chemically synthesized
cgtgagaaggggctggattc

SEQ ID NO: 20847 - DNA, 20 bp, Artificial Sequence
  chemically synthesized
tggattctggacatacttcg

SEQ ID NO: 20848 - DNA, 20 bp, Artificial Sequence
  chemically synthesized
ggattctggacatacttcga

SEQ ID NO: 20849 - DNA, 20 bp, Artificial Sequence
  chemically synthesized
gattctggacatacttcgaa

SEQ ID NO: 20850 - DNA, 20 bp, Artificial Sequence
  chemically synthesized
acatacttcgaagggaaaac

SEQ ID NO: 20851 - DNA, 20 bp, Artificial Sequence
  chemically synthesized
tacttcgaagggaaaaccgg

SEQ ID NO: 20852 - DNA, 20 bp, Artificial Sequence
  chemically synthesized
acttcgaagggaaaaccggc

SEQ ID NO: 20853 - DNA, 20 bp, Artificial Sequence
  chemically synthesized
aaccggcaggatttgctgac

SEQ ID NO: 20854 - DNA, 20 bp, Artificial Sequence
  chemically synthesized
cggcaggatttgctgactgg

SEQ ID NO: 20855 - DNA, 20 bp, Artificial Sequence
  chemically synthesized
ggcaggatttgctgactggt

SEQ ID NO: 20856 - DNA, 20 bp, Artificial Sequence
  chemically synthesized
ggatttgctgactggtggga

SEQ ID NO: 20857 - DNA, 20 bp, Artificial Sequence
  chemically synthesized
gatttgctgactggtgggat

SEQ ID NO: 20858 - DNA, 20 bp, Artificial Sequence
  chemically synthesized
tggtgggatgggttgtatga

SEQ ID NO: 20859 - DNA, 20 bp, Artificial Sequence
  chemically synthesized
ggtgggatgggttgtatgaa

SEQ ID NO: 20860 - DNA, 20 bp, Artificial Sequence
  chemically synthesized
gggatgggttgtatgaaagg

SEQ ID NO: 20861 - DNA, 20 bp, Artificial Sequence
  chemically synthesized
ggatgggttgtatgaaagga

SEQ ID NO: 20862 - DNA, 20 bp, Artificial Sequence
  chemically synthesized
gatgggttgtatgaaaggaa

SEQ ID NO: 20863 - DNA, 20 bp, Artificial Sequence
  chemically synthesized
tgggttgtatgaaaggaagg

SEQ ID NO: 20864 - DNA, 20 bp, Artificial Sequence
  chemically synthesized
gggttgtatgaaaggaaggg

SEQ ID NO: 20865 - DNA, 20 bp, Artificial Sequence
  chemically synthesized
gttgtatgaaaggaagggag

SEQ ID NO: 20866 - DNA, 20 bp, Artificial Sequence
  chemically synthesized
atgaaaggaagggaggagtc

SEQ ID NO: 20867 - DNA, 20 bp, Artificial Sequence
  chemically synthesized
aaggaagggaggagtcaaga

SEQ ID NO: 20868 - DNA, 20 bp, Artificial Sequence
  chemically synthesized
aagatggaccccaaaatgtg

SEQ ID NO: 20869 - DNA, 20 bp, Artificial Sequence
  chemically synthesized
ggaccccaaaatgtgtggct

SEQ ID NO: 20870 - DNA, 20 bp, Artificial Sequence
  chemically synthesized
aaaatgtgtggctcggtgac

SEQ ID NO: 20871 - DNA, 20 bp, Artificial Sequence
  chemically synthesized
aaatgtgtggctcggtgact

SEQ ID NO: 20872 - DNA, 20 bp, Artificial Sequence
  chemically synthesized
atgtgtggctcggtgactgg

SEQ ID NO: 20873 - DNA, 20 bp, Artificial Sequence
  chemically synthesized
tggctcggtgactgggagaa

SEQ ID NO: 20874 - DNA, 20 bp, Artificial Sequence
  chemically synthesized
agaatagaattgctgtttat

SEQ ID NO: 20875 - DNA, 20 bp, Artificial Sequence
  chemically synthesized
gaatagaattgctgtttatt

SEQ ID NO: 20876 - DNA, 20 bp, Artificial Sequence
  chemically synthesized
agaattgctgtttattggga

SEQ ID NO: 20877 - DNA, 20 bp, Artificial Sequence
  chemically synthesized
gaattgctgtttattgggat

SEQ ID NO: 20878 - DNA, 20 bp, Artificial Sequence
  chemically synthesized
tgctgtttattgggatgggc

SEQ ID NO: 20879 - DNA, 20 bp, Artificial Sequence
  chemically synthesized
gtttattgggatgggccaga

SEQ ID NO: 20880 - DNA, 20 bp, Artificial Sequence
  chemically synthesized
tttattgggatgggccagaa

SEQ ID NO: 20881 - DNA, 20 bp, Artificial Sequence
  chemically synthesized
gggatgggccagaaaggctg

SEQ ID NO: 20882 - DNA, 20 bp, Artificial Sequence
  chemically synthesized
gatgggccagaaaggctgtg

SEQ ID NO: 20883 - DNA, 20 bp, Artificial Sequence
  chemically synthesized
atgggccagaaaggctgtgg

SEQ ID NO: 20884 - DNA, 20 bp, Artificial Sequence
  chemically synthesized
agaaaggctgtggaggtgct

SEQ ID NO: 20885 - DNA, 20 bp, Artificial Sequence
  chemically synthesized
aaaggctgtggaggtgctca

SEQ ID NO: 20886 - DNA, 20 bp, Artificial Sequence
  chemically synthesized
aaggctgtggaggtgctcag

SEQ ID NO: 20887 - DNA, 20 bp, Artificial Sequence
  chemically synthesized
ctgtggaggtgctcagagga

SEQ ID NO: 20888 - DNA, 20 bp, Artificial Sequence
  chemically synthesized
tgtggaggtgctcagaggat

SEQ ID NO: 20889 - DNA, 20 bp, Artificial Sequence
  chemically synthesized
gctcagaggatgggtgtgtc

SEQ ID NO: 20890 - DNA, 20 bp, Artificial Sequence
  chemically synthesized
ctcagaggatgggtgtgtct

SEQ ID NO: 20891 - DNA, 20 bp, Artificial Sequence
  chemically synthesized
tcagaggatgggtgtgtctg

SEQ ID NO: 20892 - DNA, 20 bp, Artificial Sequence
  chemically synthesized
ctggggctccttcaccactt

SEQ ID NO: 20893 - DNA, 20 bp, Artificial Sequence
  chemically synthesized
tggggctccttcaccacttc

SEQ ID NO: 20894 - DNA, 20 bp, Artificial Sequence
  chemically synthesized
ccttcaccacttcaggactt

SEQ ID NO: 20895 - DNA, 20 bp, Artificial Sequence
  chemically synthesized
tcaccacttcaggacttcag

SEQ ID NO: 20896 - DNA, 20 bp, Artificial Sequence
  chemically synthesized
ttcaggacttcagtggatgc

SEQ ID NO: 20897 - DNA, 20 bp, Artificial Sequence
  chemically synthesized
tgctagactactgccctgtt

SEQ ID NO: 20898 - DNA, 20 bp, Artificial Sequence
  chemically synthesized
gctagactactgccctgttc

SEQ ID NO: 20899 - DNA, 20 bp, Artificial Sequence
  chemically synthesized
agactactgccctgttcagg

SEQ ID NO: 20900 - DNA, 20 bp, Artificial Sequence
  chemically synthesized
gccctgttcaggaagatcgt

SEQ ID NO: 20901 - DNA, 20 bp, Artificial Sequence
  chemically synthesized
ccctgttcaggaagatcgtg

SEQ ID NO: 20902 - DNA, 20 bp, Artificial Sequence
  chemically synthesized
cctgttcaggaagatcgtga

SEQ ID NO: 20903 - DNA, 20 bp, Artificial Sequence
  chemically synthesized
ctgttcaggaagatcgtgag

SEQ ID NO: 20904 - DNA, 20 bp, Artificial Sequence
  chemically synthesized
tcaggaagatcgtgagggga

SEQ ID NO: 20905 - DNA, 20 bp, Artificial Sequence
  chemically synthesized
aggaagatcgtgaggggaaa

SEQ ID NO: 20906 - DNA, 20 bp, Artificial Sequence
  chemically synthesized
gaagatcgtgaggggaaaga

SEQ ID NO: 20907 - DNA, 20 bp, Artificial Sequence
  chemically synthesized
gatcgtgaggggaaagagag

SEQ ID NO: 20908 - DNA, 20 bp, Artificial Sequence
  chemically synthesized
agagagtagccccccgattg

SEQ ID NO: 20909 - DNA, 20 bp, Artificial Sequence
  chemically synthesized
gccccccgattgtggctgtt

SEQ ID NO: 20910 - DNA, 20 bp, Artificial Sequence
  chemically synthesized
cccccgattgtggctgttcg

SEQ ID NO: 20911 - DNA, 20 bp, Artificial Sequence
  chemically synthesized
cccgattgtggctgttcgga

SEQ ID NO: 20912 - DNA, 20 bp, Artificial Sequence
  chemically synthesized
tgtggctgttcggagagccc

SEQ ID NO: 20913 - DNA, 20 bp, Artificial Sequence
  chemically synthesized
gagccccagttgactgccta

SEQ ID NO: 20914 - DNA, 20 bp, Artificial Sequence
  chemically synthesized
ccagttgactgcctatagct

SEQ ID NO: 20915 - DNA, 20 bp, Artificial Sequence
  chemically synthesized
gcctatagctgagatgattt

SEQ ID NO: 20916 - DNA, 20 bp, Artificial Sequence
  chemically synthesized
tagctgagatgatttaagtc

SEQ ID NO: 20917 - DNA, 20 bp, Artificial Sequence
  chemically synthesized
atgatttaagtcgagttctt

SEQ ID NO: 20918 - DNA, 20 bp, Artificial Sequence
  chemically synthesized
tgatttaagtcgagttcttt

SEQ ID NO: 20919 - DNA, 20 bp, Artificial Sequence
  chemically synthesized
gatttaagtcgagttctttg

SEQ ID NO: 20920 - DNA, 20 bp, Artificial Sequence
  chemically synthesized
tttaagtcgagttctttggg

SEQ ID NO: 20921 - DNA, 20 bp, Artificial Sequence
  chemically synthesized
ttaagtcgagttctttgggg

SEQ ID NO: 20922 - DNA, 20 bp, Artificial Sequence
  chemically synthesized
taagtcgagttctttgggga

SEQ ID NO: 20923 - DNA, 20 bp, Artificial Sequence
  chemically synthesized
tcgagttctttggggagggc

SEQ ID NO: 20924 - DNA, 20 bp, Artificial Sequence
  chemically synthesized
cgagttctttggggagggcc

SEQ ID NO: 20925 - DNA, 20 bp, Artificial Sequence
  chemically synthesized
tttccttctctgttgttctt

SEQ ID NO: 20926 - DNA, 20 bp, Artificial Sequence
  chemically synthesized
ctgttgttctttagctacca

SEQ ID NO: 20927 - DNA, 20 bp, Artificial Sequence
  chemically synthesized
gacaacttgatcttttgatc

SEQ ID NO: 20928 - DNA, 20 bp, Artificial Sequence
  chemically synthesized
acttgatcttttgatccaga

SEQ ID NO: 20929 - DNA, 20 bp, Artificial Sequence
  chemically synthesized
tttcccttcgtttgttttct

SEQ ID NO: 20930 - DNA, 20 bp, Artificial Sequence
  chemically synthesized
ttcccttcgtttgttttctc

SEQ ID NO: 20931 - DNA, 20 bp, Artificial Sequence
  chemically synthesized
tcgtttgttttctcaggtct

SEQ ID NO: 20932 - DNA, 20 bp, Artificial Sequence
  chemically synthesized
cgtttgttttctcaggtctc

SEQ ID NO: 20933 - DNA, 20 bp, Artificial Sequence
  chemically synthesized
ttgttttctcaggtctcagg

SEQ ID NO: 20934 - DNA, 20 bp, Artificial Sequence
  chemically synthesized
caggtctcaggtagaccatc

SEQ ID NO: 20935 - DNA, 20 bp, Artificial Sequence
  chemically synthesized
accatcgagctgctgttaat

SEQ ID NO: 20936 - DNA, 20 bp, Artificial Sequence
  chemically synthesized
tgctgttaattggtgatatt

SEQ ID NO: 20937 - DNA, 20 bp, Artificial Sequence
  chemically synthesized
gctgttaattggtgatattt

SEQ ID NO: 20938 - DNA, 20 bp, Artificial Sequence
  chemically synthesized
taattggtgatatttaggaa

SEQ ID NO: 20939 - DNA, 20 bp, Artificial Sequence
  chemically synthesized
aattggtgatatttaggaat

SEQ ID NO: 20940 - DNA, 20 bp, Artificial Sequence
  chemically synthesized
ggtgatatttaggaatgggt

SEQ ID NO: 20941 - DNA, 20 bp, Artificial Sequence
  chemically synthesized
gatatttaggaatgggttgg

SEQ ID NO: 20942 - DNA, 20 bp, Artificial Sequence
  chemically synthesized
ttggaagctgcatcttttcc

SEQ ID NO: 20943 - DNA, 20 bp, Artificial Sequence
  chemically synthesized
gcatcttttcctggacttct

SEQ ID NO: 20944 - DNA, 20 bp, Artificial Sequence
  chemically synthesized
catcttttcctggacttctc

SEQ ID NO: 20945 - DNA, 20 bp, Artificial Sequence
  chemically synthesized
ccacgtgtcttgtgcttcca

SEQ ID NO: 20946 - DNA, 20 bp, Artificial Sequence
  chemically synthesized
cttccacagaaccgttttct

SEQ ID NO: 20947 - DNA, 20 bp, Artificial Sequence
  chemically synthesized
cgttttctgagacgtccgtg

SEQ ID NO: 20948 - DNA, 20 bp, Artificial Sequence
  chemically synthesized
ccgtgtggctctgctgtgct

SEQ ID NO: 20949 - DNA, 20 bp, Artificial Sequence
  chemically synthesized
cgtgtggctctgctgtgctc

SEQ ID NO: 20950 - DNA, 20 bp, Artificial Sequence
  chemically synthesized
ctctgctgtgctcaggtcca

SEQ ID NO: 20951 - DNA, 20 bp, Artificial Sequence
  chemically synthesized
gctgtgctcaggtccacggt

SEQ ID NO: 20952 - DNA, 20 bp, Artificial Sequence
  chemically synthesized
tcaggtccacggttagcccc

SEQ ID NO: 20953 - DNA, 20 bp, Artificial Sequence
  chemically synthesized
tccacggttagcccctggct

SEQ ID NO: 20954 - DNA, 20 bp, Artificial Sequence
  chemically synthesized
ccctggcttggaatttcttc

SEQ ID NO: 20955 - DNA, 20 bp, Artificial Sequence
  chemically synthesized
atccgttgtcctcttttcca

SEQ ID NO: 20956 - DNA, 20 bp, Artificial Sequence
  chemically synthesized
tccgttgtcctcttttccac

SEQ ID NO: 20957 - DNA, 20 bp, Artificial Sequence
  chemically synthesized
ctcctccctttccccatttc

SEQ ID NO: 20958 - DNA, 20 bp, Artificial Sequence
  chemically synthesized
tccctttccccatttctgga

SEQ ID NO: 20959 - DNA, 20 bp, Artificial Sequence
  chemically synthesized
ctttccccatttctggaaag

SEQ ID NO: 20960 - DNA, 20 bp, Artificial Sequence
  chemically synthesized
tccccatttctggaaagaag

SEQ ID NO: 20961 - DNA, 20 bp, Artificial Sequence
  chemically synthesized
ccccatttctggaaagaagt

SEQ ID NO: 20962 - DNA, 20 bp, Artificial Sequence
  chemically synthesized
atttctggaaagaagtgggc

SEQ ID NO: 20963 - DNA, 20 bp, Artificial Sequence
  chemically synthesized
gaaagaagtgggctggcaca

SEQ ID NO: 20964 - DNA, 20 bp, Artificial Sequence
  chemically synthesized
aagaagtgggctggcacata

SEQ ID NO: 20965 - DNA, 20 bp, Artificial Sequence
  chemically synthesized
catagagcctttttccttga

SEQ ID NO: 20966 - DNA, 20 bp, Artificial Sequence
  chemically synthesized
atagagcctttttccttgaa

SEQ ID NO: 20967 - DNA, 20 bp, Artificial Sequence
  chemically synthesized
agagcctttttccttgaaag

SEQ ID NO: 20968 - DNA, 20 bp, Artificial Sequence
  chemically synthesized
agcctttttccttgaaagga

SEQ ID NO: 20969 - DNA, 20 bp, Artificial Sequence
  chemically synthesized
ttttccttgaaaggagagtg

SEQ ID NO: 20970 - DNA, 20 bp, Artificial Sequence
  chemically synthesized
ttccttgaaaggagagtgca

SEQ ID NO: 20971 - DNA, 20 bp, Artificial Sequence
  chemically synthesized
gagagtgcagagccctctaa

SEQ ID NO: 20972 - DNA, 20 bp, Artificial Sequence
  chemically synthesized
tgcagagccctctaatggaa

SEQ ID NO: 20973 - DNA, 20 bp, Artificial Sequence
  chemically synthesized
tggaaaagtaaaaaaattct

SEQ ID NO: 20974 - DNA, 20 bp, Artificial Sequence
  chemically synthesized
ttggaatcctcataacatcc

SEQ ID NO: 20975 - DNA, 20 bp, Artificial Sequence
  chemically synthesized
aatcctcataacatccaagc

SEQ ID NO: 20976 - DNA, 20 bp, Artificial Sequence
  chemically synthesized
cataacatccaagccagcca

SEQ ID NO: 20977 - DNA, 20 bp, Artificial Sequence
  chemically synthesized
catccaagccagccaaagct

SEQ ID NO: 20978 - DNA, 20 bp, Artificial Sequence
  chemically synthesized
agccagccaaagctgagacc

SEQ ID NO: 20979 - DNA, 20 bp, Artificial Sequence
  chemically synthesized
gctgagaccaagtaaattat

SEQ ID NO: 20980 - DNA, 20 bp, Artificial Sequence
  chemically synthesized
ctgagaccaagtaaattatt

SEQ ID NO: 20981 - DNA, 20 bp, Artificial Sequence
  chemically synthesized
tgagaccaagtaaattattg

SEQ ID NO: 20982 - DNA, 20 bp, Artificial Sequence
  chemically synthesized
gagaccaagtaaattattgg

SEQ ID NO: 20983 - DNA, 20 bp, Artificial Sequence
  chemically synthesized
agaccaagtaaattattggg

SEQ ID NO: 20984 - DNA, 20 bp, Artificial Sequence
  chemically synthesized
attattggggggtaatttgc

SEQ ID NO: 20985 - DNA, 20 bp, Artificial Sequence
  chemically synthesized
ttattggggggtaatttgca

SEQ ID NO: 20986 - DNA, 20 bp, Artificial Sequence
  chemically synthesized
tattggggggtaatttgcaa

SEQ ID NO: 20987 - DNA, 20 bp, Artificial Sequence
  chemically synthesized
caaattgctttcttgtttct

SEQ ID NO: 20988 - DNA, 20 bp, Artificial Sequence
  chemically synthesized
tgtttctcagcttgaatctt

SEQ ID NO: 20989 - DNA, 20 bp, Artificial Sequence
  chemically synthesized
ctcagcttgaatctttagac

SEQ ID NO: 20990 - DNA, 20 bp, Artificial Sequence
  chemically synthesized
agcttgaatctttagaccag

SEQ ID NO: 20991 - DNA, 20 bp, Artificial Sequence
  chemically synthesized
agaccagaagcctgtgattt

SEQ ID NO: 20992 - DNA, 20 bp, Artificial Sequence
  chemically synthesized
accagaagcctgtgatttcg

SEQ ID NO: 20993 - DNA, 20 bp, Artificial Sequence
  chemically synthesized
ctgtgatttcggagtctgat

SEQ ID NO: 20994 - DNA, 20 bp, Artificial Sequence
  chemically synthesized
ttcggagtctgatgagaaat

SEQ ID NO: 20995 - DNA, 20 bp, Artificial Sequence
  chemically synthesized
cggagtctgatgagaaataa

SEQ ID NO: 20996 - DNA, 20 bp, Artificial Sequence
  chemically synthesized
gtctgatgagaaataagagt

SEQ ID NO: 20997 - DNA, 20 bp, Artificial Sequence
  chemically synthesized
aagagtcagtgtttctgtct

SEQ ID NO: 20998 - DNA, 20 bp, Artificial Sequence
  chemically synthesized
ctgtctgagccacttttctt

SEQ ID NO: 20999 - DNA, 20 bp, Artificial Sequence
  chemically synthesized
gtctgagccacttttctttg

SEQ ID NO: 21000 - DNA, 20 bp, Artificial Sequence
  chemically synthesized
tctgagccacttttctttgg

SEQ ID NO: 21001 - DNA, 20 bp, Artificial Sequence
  chemically synthesized
tgagccacttttctttggag

SEQ ID NO: 21002 - DNA, 20 bp, Artificial Sequence
  chemically synthesized
gagccacttttctttggagg

SEQ ID NO: 21003 - DNA, 20 bp, Artificial Sequence
  chemically synthesized
tttctttggaggaggtcctc

SEQ ID NO: 21004 - DNA, 20 bp, Artificial Sequence
  chemically synthesized
ttctttggaggaggtcctct

SEQ ID NO: 21005 - DNA, 20 bp, Artificial Sequence
  chemically synthesized
ggaggaggtcctctaggctt

SEQ ID NO: 21006 - DNA, 20 bp, Artificial Sequence
  chemically synthesized
cctctaggctttagcaatca

SEQ ID NO: 21007 - DNA, 20 bp, Artificial Sequence
  chemically synthesized
ctaggctttagcaatcacag

SEQ ID NO: 21008 - DNA, 20 bp, Artificial Sequence
  chemically synthesized
tttagcaatcacagaagaac

SEQ ID NO: 21009 - DNA, 20 bp, Artificial Sequence
  chemically synthesized
aatcacagaagaaccagtga

SEQ ID NO: 21010 - DNA, 20 bp, Artificial Sequence
  chemically synthesized
atcacagaagaaccagtgac

SEQ ID NO: 21011 - DNA, 20 bp, Artificial Sequence
  chemically synthesized
cagtgacaggttccttgtca

SEQ ID NO: 21012 - DNA, 20 bp, Artificial Sequence
  chemically synthesized
agtgacaggttccttgtcat

SEQ ID NO: 21013 - DNA, 20 bp, Artificial Sequence
  chemically synthesized
tgacaggttccttgtcatag

SEQ ID NO: 21014 - DNA, 20 bp, Artificial Sequence
  chemically synthesized
acaggttccttgtcatagga

SEQ ID NO: 21015 - DNA, 20 bp, Artificial Sequence
  chemically synthesized
cttgtcataggagagctcct

SEQ ID NO: 21016 - DNA, 20 bp, Artificial Sequence
  chemically synthesized
taggagagctccttggtcct

SEQ ID NO: 21017 - DNA, 20 bp, Artificial Sequence
  chemically synthesized
aggagagctccttggtcctc

SEQ ID NO: 21018 - DNA, 20 bp, Artificial Sequence
  chemically synthesized
ccttggtcctcaggattcaa

SEQ ID NO: 21019 - DNA, 20 bp, Artificial Sequence
  chemically synthesized
caggattcaaaagacacctt

SEQ ID NO: 21020 - DNA, 20 bp, Artificial Sequence
  chemically synthesized
gattcaaaagacaccttaag

SEQ ID NO: 21021 - DNA, 20 bp, Artificial Sequence
  chemically synthesized
tcaaaagacaccttaagtag

SEQ ID NO: 21022 - DNA, 20 bp, Artificial Sequence
  chemically synthesized
aaagacaccttaagtagcag

SEQ ID NO: 21023 - DNA, 20 bp, Artificial Sequence
  chemically synthesized
aagacaccttaagtagcagt

SEQ ID NO: 21024 - DNA, 20 bp, Artificial Sequence
  chemically synthesized
acaccttaagtagcagtggg

SEQ ID NO: 21025 - DNA, 20 bp, Artificial Sequence
  chemically synthesized
caccttaagtagcagtgggt

SEQ ID NO: 21026 - DNA, 20 bp, Artificial Sequence
  chemically synthesized
accttaagtagcagtgggta

SEQ ID NO: 21027 - DNA, 20 bp, Artificial Sequence
  chemically synthesized
agtagcagtgggtagggcgt

SEQ ID NO: 21028 - DNA, 20 bp, Artificial Sequence
  chemically synthesized
gcgtaagtttaacatccctc

SEQ ID NO: 21029 - DNA, 20 bp, Artificial Sequence
  chemically synthesized
cgtaagtttaacatccctca

SEQ ID NO: 21030 - DNA, 20 bp, Artificial Sequence
  chemically synthesized
aagtttaacatccctcaagg

SEQ ID NO: 21031 - DNA, 20 bp, Artificial Sequence
  chemically synthesized
agtttaacatccctcaaggt

SEQ ID NO: 21032 - DNA, 20 bp, Artificial Sequence
  chemically synthesized
acatccctcaaggtaggcct

SEQ ID NO: 21033 - DNA, 20 bp, Artificial Sequence
  chemically synthesized
catccctcaaggtaggcctt

SEQ ID NO: 21034 - DNA, 20 bp, Artificial Sequence
  chemically synthesized
gtttccctctgtcccctcta

SEQ ID NO: 21035 - DNA, 20 bp, Artificial Sequence
  chemically synthesized
ctctgtcccctctatggtgc

SEQ ID NO: 21036 - DNA, 20 bp, Artificial Sequence
  chemically synthesized
ggtgctggctttgccacatg

SEQ ID NO: 21037 - DNA, 20 bp, Artificial Sequence
  chemically synthesized
acatgtagaacaaactcttc

SEQ ID NO: 21038 - DNA, 20 bp, Artificial Sequence
  chemically synthesized
aacaaactcttctggaatca

SEQ ID NO: 21039 - DNA, 20 bp, Artificial Sequence
  chemically synthesized
acaaactcttctggaatcat

SEQ ID NO: 21040 - DNA, 20 bp, Artificial Sequence
  chemically synthesized
tctggaatcataggtaaccc

SEQ ID NO: 21041 - DNA, 20 bp, Artificial Sequence
  chemically synthesized
ctggaatcataggtaaccca

SEQ ID NO: 21042 - DNA, 20 bp, Artificial Sequence
  chemically synthesized
tggaatcataggtaacccaa

SEQ ID NO: 21043 - DNA, 20 bp, Artificial Sequence
  chemically synthesized
ggaatcataggtaacccaag

SEQ ID NO: 21044 - DNA, 20 bp, Artificial Sequence
  chemically synthesized
gaatcataggtaacccaagg

SEQ ID NO: 21045 - DNA, 20 bp, Artificial Sequence
  chemically synthesized
atcataggtaacccaagggg

SEQ ID NO: 21046 - DNA, 20 bp, Artificial Sequence
  chemically synthesized
aggtaacccaagggggagct

SEQ ID NO: 21047 - DNA, 20 bp, Artificial Sequence
  chemically synthesized
gtaacccaagggggagctca

SEQ ID NO: 21048 - DNA, 20 bp, Artificial Sequence
  chemically synthesized
acccaagggggagctcagag

SEQ ID NO: 21049 - DNA, 20 bp, Artificial Sequence
  chemically synthesized
ccaagggggagctcagagaa

SEQ ID NO: 21050 - DNA, 20 bp, Artificial Sequence
  chemically synthesized
ggggagctcagagaagagtc

SEQ ID NO: 21051 - DNA, 20 bp, Artificial Sequence
  chemically synthesized
gggagctcagagaagagtcc

SEQ ID NO: 21052 - DNA, 20 bp, Artificial Sequence
  chemically synthesized
cagagaagagtccaggctgc

SEQ ID NO: 21053 - DNA, 20 bp, Artificial Sequence
  chemically synthesized
gagtccaggctgccagtgca

SEQ ID NO: 21054 - DNA, 20 bp, Artificial Sequence
  chemically synthesized
agtccaggctgccagtgcaa

SEQ ID NO: 21055 - DNA, 20 bp, Artificial Sequence
  chemically synthesized
aggctgccagtgcaaaggtc

SEQ ID NO: 21056 - DNA, 20 bp, Artificial Sequence
  chemically synthesized
aaaggtccagccctgtcgcc

SEQ ID NO: 21057 - DNA, 20 bp, Artificial Sequence
  chemically synthesized
aaggtccagccctgtcgcca

SEQ ID NO: 21058 - DNA, 20 bp, Artificial Sequence
  chemically synthesized
ggtccagccctgtcgccaag

SEQ ID NO: 21059 - DNA, 20 bp, Artificial Sequence
  chemically synthesized
cctgtcgccaaggagaccct

SEQ ID NO: 21060 - DNA, 20 bp, Artificial Sequence
  chemically synthesized
ctgtcgccaaggagaccctc

SEQ ID NO: 21061 - DNA, 20 bp, Artificial Sequence
  chemically synthesized
tgtcgccaaggagaccctca

SEQ ID NO: 21062 - DNA, 20 bp, Artificial Sequence
  chemically synthesized
gagaccctcagggaaatgca

SEQ ID NO: 21063 - DNA, 20 bp, Artificial Sequence
  chemically synthesized
agaccctcagggaaatgcac

SEQ ID NO: 21064 - DNA, 20 bp, Artificial Sequence
  chemically synthesized
cagggaaatgcacaggcctc

SEQ ID NO: 21065 - DNA, 20 bp, Artificial Sequence
  chemically synthesized
caggcctccagctattccca

SEQ ID NO: 21066 - DNA, 20 bp, Artificial Sequence
  chemically synthesized
agctattcccacggcccctg

SEQ ID NO: 21067 - DNA, 20 bp, Artificial Sequence
  chemically synthesized
ttcccacggcccctgtagct

SEQ ID NO: 21068 - DNA, 20 bp, Artificial Sequence
  chemically synthesized
cggcccctgtagctgagcgc

SEQ ID NO: 21069 - DNA, 20 bp, Artificial Sequence
  chemically synthesized
gctgagcgccagcttcttcc

SEQ ID NO: 21070 - DNA, 20 bp, Artificial Sequence
  chemically synthesized
ctgagcgccagcttcttcct

SEQ ID NO: 21071 - DNA, 20 bp, Artificial Sequence
  chemically synthesized
cgccagcttcttcctgggcc

SEQ ID NO: 21072 - DNA, 20 bp, Artificial Sequence
  chemically synthesized
gcttcttcctgggccaagct

SEQ ID NO: 21073 - DNA, 20 bp, Artificial Sequence
  chemically synthesized
cttcttcctgggccaagctg

SEQ ID NO: 21074 - DNA, 20 bp, Artificial Sequence
  chemically synthesized
tcctgccgtgtccattctcc

SEQ ID NO: 21075 - DNA, 20 bp, Artificial Sequence
  chemically synthesized
ctcctagcaacgcttctctt

SEQ ID NO: 21076 - DNA, 20 bp, Artificial Sequence
  chemically synthesized
tagcaacgcttctctttggc

SEQ ID NO: 21077 - DNA, 20 bp, Artificial Sequence
  chemically synthesized
tctctttggccagtttgcca

SEQ ID NO: 21078 - DNA, 20 bp, Artificial Sequence
  chemically synthesized
gccagtttgccatagtacct

SEQ ID NO: 21079 - DNA, 20 bp, Artificial Sequence
  chemically synthesized
ccagtttgccatagtacctg

SEQ ID NO: 21080 - DNA, 20 bp, Artificial Sequence
  chemically synthesized
tttgccatagtacctgaggt

SEQ ID NO: 21081 - DNA, 20 bp, Artificial Sequence
  chemically synthesized
ctgccaaatgctttacatcc

SEQ ID NO: 21082 - DNA, 20 bp, Artificial Sequence
  chemically synthesized
gccaaatgctttacatcccg

SEQ ID NO: 21083 - DNA, 20 bp, Artificial Sequence
  chemically synthesized
ccaaatgctttacatcccgg

SEQ ID NO: 21084 - DNA, 20 bp, Artificial Sequence
  chemically synthesized
atgctttacatcccggagga

SEQ ID NO: 21085 - DNA, 20 bp, Artificial Sequence
  chemically synthesized
ttacatcccggaggaaagca

SEQ ID NO: 21086 - DNA, 20 bp, Artificial Sequence
  chemically synthesized
gaggaaagcaaagtcctctt

SEQ ID NO: 21087 - DNA, 20 bp, Artificial Sequence
  chemically synthesized
aagcaaagtcctcttcagaa

SEQ ID NO: 21088 - DNA, 20 bp, Artificial Sequence
  chemically synthesized
agcaaagtcctcttcagaac

SEQ ID NO: 21089 - DNA, 20 bp, Artificial Sequence
  chemically synthesized
agtcctcttcagaacaggaa

SEQ ID NO: 21090 - DNA, 20 bp, Artificial Sequence
  chemically synthesized
tcttcagaacaggaaaagtc

SEQ ID NO: 21091 - DNA, 20 bp, Artificial Sequence
  chemically synthesized
agaacaggaaaagtccagtg

SEQ ID NO: 21092 - DNA, 20 bp, Artificial Sequence
  chemically synthesized
agttccacactgtgctattc

SEQ ID NO: 21093 - DNA, 20 bp, Artificial Sequence
  chemically synthesized
tgtgctattccagaacctcc

SEQ ID NO: 21094 - DNA, 20 bp, Artificial Sequence
  chemically synthesized
agttgcattcctttgccaac

SEQ ID NO: 21095 - DNA, 20 bp, Artificial Sequence
  chemically synthesized
gttgcattcctttgccaact

SEQ ID NO: 21096 - DNA, 20 bp, Artificial Sequence
  chemically synthesized
ttgccaactaggtaatgtgc

SEQ ID NO: 21097 - DNA, 20 bp, Artificial Sequence
  chemically synthesized
tgccaactaggtaatgtgct

SEQ ID NO: 21098 - DNA, 20 bp, Artificial Sequence
  chemically synthesized
gccaactaggtaatgtgcta

SEQ ID NO: 21099 - DNA, 20 bp, Artificial Sequence
  chemically synthesized
tgctagggatatttgtctcg

SEQ ID NO: 21100 - DNA, 20 bp, Artificial Sequence
  chemically synthesized
gatatttgtctcgcagcaac

SEQ ID NO: 21101 - DNA, 20 bp, Artificial Sequence
  chemically synthesized
gcaactggcaaccccctgtt

SEQ ID NO: 21102 - DNA, 20 bp, Artificial Sequence
  chemically synthesized
caactggcaaccccctgttt

SEQ ID NO: 21103 - DNA, 20 bp, Artificial Sequence
  chemically synthesized
gcaaccccctgtttgggtaa

SEQ ID NO: 21104 - DNA, 20 bp, Artificial Sequence
  chemically synthesized
ccccctgtttgggtaaaagt

SEQ ID NO: 21105 - DNA, 20 bp, Artificial Sequence
  chemically synthesized
gtttgggtaaaagtcagact

SEQ ID NO: 21106 - DNA, 20 bp, Artificial Sequence
  chemically synthesized
tttgggtaaaagtcagactc

SEQ ID NO: 21107 - DNA, 20 bp, Artificial Sequence
  chemically synthesized
ttgggtaaaagtcagactca

SEQ ID NO: 21108 - DNA, 20 bp, Artificial Sequence
  chemically synthesized
aaaagtcagactcagggacc

SEQ ID NO: 21109 - DNA, 20 bp, Artificial Sequence
  chemically synthesized
cagactcagggacccggctg

SEQ ID NO: 21110 - DNA, 20 bp, Artificial Sequence
  chemically synthesized
ggctgcagtgcttgctcctg

SEQ ID NO: 21111 - DNA, 20 bp, Artificial Sequence
  chemically synthesized
gcttgctcctgtggcccctg

SEQ ID NO: 21112 - DNA, 20 bp, Artificial Sequence
  chemically synthesized
cttgctcctgtggcccctgc

SEQ ID NO: 21113 - DNA, 20 bp, Artificial Sequence
  chemically synthesized
ttgctcctgtggcccctgca

SEQ ID NO: 21114 - DNA, 20 bp, Artificial Sequence
  chemically synthesized
gctcctgtggcccctgcagg

SEQ ID NO: 21115 - DNA, 20 bp, Artificial Sequence
  chemically synthesized
tgtggcccctgcagggagtg

SEQ ID NO: 21116 - DNA, 20 bp, Artificial Sequence
  chemically synthesized
cccctgcagggagtgtggcc

SEQ ID NO: 21117 - DNA, 20 bp, Artificial Sequence
  chemically synthesized
ccctgcagggagtgtggcct

SEQ ID NO: 21118 - DNA, 20 bp, Artificial Sequence
  chemically synthesized
cctgcagggagtgtggcctg

SEQ ID NO: 21119 - DNA, 20 bp, Artificial Sequence
  chemically synthesized
ggggtgtaattctgcacacc

SEQ ID NO: 21120 - DNA, 20 bp, Artificial Sequence
  chemically synthesized
gggtgtaattctgcacaccc

SEQ ID NO: 21121 - DNA, 20 bp, Artificial Sequence
  chemically synthesized
tgtaattctgcacacccagg

SEQ ID NO: 21122 - DNA, 20 bp, Artificial Sequence
  chemically synthesized
ctctgtctcctctttcacat

SEQ ID NO: 21123 - DNA, 20 bp, Artificial Sequence
  chemically synthesized
tctgtctcctctttcacatc

SEQ ID NO: 21124 - DNA, 20 bp, Artificial Sequence
  chemically synthesized
ccttccctgtgtcctgaacc

SEQ ID NO: 21125 - DNA, 20 bp, Artificial Sequence
  chemically synthesized
cctgtgtcctgaaccaagtg

SEQ ID NO: 21126 - DNA, 20 bp, Artificial Sequence
  chemically synthesized
gtcctgaaccaagtgtggat

SEQ ID NO: 21127 - DNA, 20 bp, Artificial Sequence
  chemically synthesized
aaccaagtgtggatgagttt

SEQ ID NO: 21128 - DNA, 20 bp, Artificial Sequence
  chemically synthesized
gatgagtttgagcttcctcc

SEQ ID NO: 21129 - DNA, 20 bp, Artificial Sequence
  chemically synthesized
ttgttgttgttgttgttgtt

SEQ ID NO: 21130 - DNA, 20 bp, Artificial Sequence
  chemically synthesized
tgttgttgttgttgttgttt

SEQ ID NO: 21131 - DNA, 20 bp, Artificial Sequence
  chemically synthesized
gttgttgttgttgttgtttg

SEQ ID NO: 21132 - DNA, 20 bp, Artificial Sequence
  chemically synthesized
ttgttgttgttgttgtttgg

SEQ ID NO: 21133 - DNA, 20 bp, Artificial Sequence
  chemically synthesized
ttgttgttgttgtttggggg

SEQ ID NO: 21134 - DNA, 20 bp, Artificial Sequence
  chemically synthesized
tgttgttgttgtttgggggt

SEQ ID NO: 21135 - DNA, 20 bp, Artificial Sequence
  chemically synthesized
gttgttgttgtttgggggtg

SEQ ID NO: 21136 - DNA, 20 bp, Artificial Sequence
  chemically synthesized
ttgttgttgtttgggggtgg

SEQ ID NO: 21137 - DNA, 20 bp, Artificial Sequence
  chemically synthesized
ttgttgtttgggggtggggg

SEQ ID NO: 21138 - DNA, 20 bp, Artificial Sequence
  chemically synthesized
tgtttgggggtgggggtaga

SEQ ID NO: 21139 - DNA, 20 bp, Artificial Sequence
  chemically synthesized
ggggtgggggtagacagtgc

SEQ ID NO: 21140 - DNA, 20 bp, Artificial Sequence
  chemically synthesized
gggtgggggtagacagtgct

SEQ ID NO: 21141 - DNA, 20 bp, Artificial Sequence
  chemically synthesized
gtagacagtgctgggcctgt

SEQ ID NO: 21142 - DNA, 20 bp, Artificial Sequence
  chemically synthesized
tgctgggcctgtcagaattt

SEQ ID NO: 21143 - DNA, 20 bp, Artificial Sequence
  chemically synthesized
gctgggcctgtcagaatttt

SEQ ID NO: 21144 - DNA, 20 bp, Artificial Sequence
  chemically synthesized
ggcctgtcagaattttaggt

SEQ ID NO: 21145 - DNA, 20 bp, Artificial Sequence
  chemically synthesized
gaattttaggttggttcttt

SEQ ID NO: 21146 - DNA, 20 bp, Artificial Sequence
  chemically synthesized
ctttgagatgaataactact

SEQ ID NO: 21147 - DNA, 20 bp, Artificial Sequence
  chemically synthesized
tcaactacttttgtttgtga

SEQ ID NO: 21148 - DNA, 20 bp, Artificial Sequence
  chemically synthesized
ctacttttgtttgtgaaaga

SEQ ID NO: 21149 - DNA, 20 bp, Artificial Sequence
  chemically synthesized
tacttttgtttgtgaaagaa

SEQ ID NO: 21150 - DNA, 20 bp, Artificial Sequence
  chemically synthesized
acttttgtttgtgaaagaaa

SEQ ID NO: 21151 - DNA, 20 bp, Artificial Sequence
  chemically synthesized
tttgtttgtgaaagaaaggg

SEQ ID NO: 21152 - DNA, 20 bp, Artificial Sequence
  chemically synthesized
tttgtgaaagaaagggcagt

SEQ ID NO: 21153 - DNA, 20 bp, Artificial Sequence
  chemically synthesized
ggcagtaagcaccatgacat

SEQ ID NO: 21154 - DNA, 20 bp, Artificial Sequence
  chemically synthesized
cagtaagcaccatgacatga

SEQ ID NO: 21155 - DNA, 20 bp, Artificial Sequence
  chemically synthesized
accatgacatgagagaattt

SEQ ID NO: 21156 - DNA, 20 bp, Artificial Sequence
  chemically synthesized
ccatgacatgagagaatttc

SEQ ID NO: 21157 - DNA, 20 bp, Artificial Sequence
  chemically synthesized
gtgtttgcatctgtcgtgct

SEQ ID NO: 21158 - DNA, 20 bp, Artificial Sequence
  chemically synthesized
ttgcatctgtcgtgctcagt

SEQ ID NO: 21159 - DNA, 20 bp, Artificial Sequence
  chemically synthesized
tgcatctgtcgtgctcagtt

SEQ ID NO: 21160 - DNA, 20 bp, Artificial Sequence
  chemically synthesized
gcatctgtcgtgctcagtta

SEQ ID NO: 21161 - DNA, 20 bp, Artificial Sequence
  chemically synthesized
gggcattatccgtaacccca

SEQ ID NO: 21162 - DNA, 20 bp, Artificial Sequence
  chemically synthesized
ggcattatccgtaaccccat

SEQ ID NO: 21163 - DNA, 20 bp, Artificial Sequence
  chemically synthesized
ccccataggaaccaacaccg

SEQ ID NO: 21164 - DNA, 20 bp, Artificial Sequence
  chemically synthesized
ccgaagaccatatgatttta

SEQ ID NO: 21165 - DNA, 20 bp, Artificial Sequence
  chemically synthesized
accatatgattttaaagctt

SEQ ID NO: 21166 - DNA, 20 bp, Artificial Sequence
  chemically synthesized
ttttttttgttcttttgctt

SEQ ID NO: 21167 - DNA, 20 bp, Artificial Sequence
  chemically synthesized
gaaactgtaataataatcca

SEQ ID NO: 21168 - DNA, 20 bp, Artificial Sequence
  chemically synthesized
aatccatagtaattatccca

SEQ ID NO: 21169 - DNA, 20 bp, Artificial Sequence
  chemically synthesized
tagtatgctgtcctttgtta

SEQ ID NO: 21170 - DNA, 20 bp, Artificial Sequence
  chemically synthesized
agtatgctgtcctttgttac

SEQ ID NO: 21171 - DNA, 20 bp, Artificial Sequence
  chemically synthesized
tatgctgtcctttgttacag

SEQ ID NO: 21172 - DNA, 20 bp, Artificial Sequence
  chemically synthesized
gtcctttgttacaggagcat

SEQ ID NO: 21173 - DNA, 20 bp, Artificial Sequence
  chemically synthesized
aggagcattggattactgtg

SEQ ID NO: 21174 - DNA, 20 bp, Artificial Sequence
  chemically synthesized
gtgaagacgtgtcctgtata

SEQ ID NO: 21175 - DNA, 20 bp, Artificial Sequence
  chemically synthesized
tgtcctgtatacagtttcaa

SEQ ID NO: 21176 - DNA, 20 bp, Artificial Sequence
  chemically synthesized
gctttctgtcttgtgctgtt

SEQ ID NO: 21177 - DNA, 20 bp, Artificial Sequence
  chemically synthesized
ttctgtcttgtgctgtttgg

SEQ ID NO: 21178 - DNA, 20 bp, Artificial Sequence
  chemically synthesized
cacatttctgccatatgtct

SEQ ID NO: 21179 - DNA, 20 bp, Artificial Sequence
  chemically synthesized
ttctgccatatgtcttagaa

SEQ ID NO: 21180 - DNA, 20 bp, Artificial Sequence
  chemically synthesized
gccatatgtcttagaaaagc

SEQ ID NO: 21181 - DNA, 20 bp, Artificial Sequence
  chemically synthesized
ccatatgtcttagaaaagct

SEQ ID NO: 21182 - DNA, 20 bp, Artificial Sequence
  chemically synthesized
catatgtcttagaaaagctg

SEQ ID NO: 21183 - DNA, 20 bp, Artificial Sequence
  chemically synthesized
tcttagaaaagctggggact

SEQ ID NO: 21184 - DNA, 20 bp, Artificial Sequence
  chemically synthesized
tagaaaagctggggacttag

SEQ ID NO: 21185 - DNA, 20 bp, Artificial Sequence
  chemically synthesized
aaaagctggggacttagaag

SEQ ID NO: 21186 - DNA, 20 bp, Artificial Sequence
  chemically synthesized
agctggggacttagaagcag

SEQ ID NO: 21187 - DNA, 20 bp, Artificial Sequence
  chemically synthesized
cttagaagcagtagccgact

SEQ ID NO: 21188 - DNA, 20 bp, Artificial Sequence
  chemically synthesized
ttagaagcagtagccgactt

SEQ ID NO: 21189 - DNA, 20 bp, Artificial Sequence
  chemically synthesized
aagcagtagccgacttagga

SEQ ID NO: 21190 - DNA, 20 bp, Artificial Sequence
  chemically synthesized
agtagccgacttaggacagc

SEQ ID NO: 21191 - DNA, 20 bp, Artificial Sequence
  chemically synthesized
ccgacttaggacagcaagct

SEQ ID NO: 21192 - DNA, 20 bp, Artificial Sequence
  chemically synthesized
ttaggacagcaagctcagct

SEQ ID NO: 21193 - DNA, 20 bp, Artificial Sequence
  chemically synthesized
taggacagcaagctcagctc

SEQ ID NO: 21194 - DNA, 20 bp, Artificial Sequence
  chemically synthesized
cagcaagctcagctcaggtg

SEQ ID NO: 21195 - DNA, 20 bp, Artificial Sequence
  chemically synthesized
gcaagctcagctcaggtgcg

SEQ ID NO: 21196 - DNA, 20 bp, Artificial Sequence
  chemically synthesized
caagctcagctcaggtgcgg

SEQ ID NO: 21197 - DNA, 20 bp, Artificial Sequence
  chemically synthesized
gctcagctcaggtgcggagg

SEQ ID NO: 21198 - DNA, 20 bp, Artificial Sequence
  chemically synthesized
gtgcggaggcagccctgtgt

SEQ ID NO: 21199 - DNA, 20 bp, Artificial Sequence
  chemically synthesized
gcggaggcagccctgtgtaa

SEQ ID NO: 21200 - DNA, 20 bp, Artificial Sequence
  chemically synthesized
gtgtaagagactctgttatg

SEQ ID NO: 21201 - DNA, 20 bp, Artificial Sequence
  chemically synthesized
aagagactctgttatgcagt

SEQ ID NO: 21202 - DNA, 20 bp, Artificial Sequence
  chemically synthesized
tatgcagtgagctgttgaaa

SEQ ID NO: 21203 - DNA, 20 bp, Artificial Sequence
  chemically synthesized
gctgttgaaacagctgcatg

SEQ ID NO: 21204 - DNA, 20 bp, Artificial Sequence
  chemically synthesized
gaaacagctgcatgtggaaa

SEQ ID NO: 21205 - DNA, 20 bp, Artificial Sequence
  chemically synthesized
cttgcctgtcctcatttctt

SEQ ID NO: 21206 - DNA, 20 bp, Artificial Sequence
  chemically synthesized
tgcctgtcctcatttcttga

SEQ ID NO: 21207 - DNA, 20 bp, Artificial Sequence
  chemically synthesized
caaaacatctgaaaatgtaa

SEQ ID NO: 21208 - DNA, 20 bp, Artificial Sequence
  chemically synthesized
aaaatgtaaaagcacttcac

SEQ ID NO: 21209 - DNA, 20 bp, Artificial Sequence
  chemically synthesized
aaatgtaaaagcacttcaca

SEQ ID NO: 21210 - DNA, 20 bp, Artificial Sequence
  chemically synthesized
tcacaaggttttaacttttc

SEQ ID NO: 21211 - DNA, 20 bp, Artificial Sequence
  chemically synthesized
tttaacttttctggcttgaa

SEQ ID NO: 21212 - DNA, 20 bp, Artificial Sequence
  chemically synthesized
aacttttctggcttgaacgg

SEQ ID NO: 21213 - DNA, 20 bp, Artificial Sequence
  chemically synthesized
ttttctggcttgaacggaag

SEQ ID NO: 21214 - DNA, 20 bp, Artificial Sequence
  chemically synthesized
gcttgaacggaagcagcttc

SEQ ID NO: 21215 - DNA, 20 bp, Artificial Sequence
  chemically synthesized
ggaagcagcttcaagtcaac

SEQ ID NO: 21216 - DNA, 20 bp, Artificial Sequence
  chemically synthesized
aagcagcttcaagtcaacaa

SEQ ID NO: 21217 - DNA, 20 bp, Artificial Sequence
  chemically synthesized
tcaagtcaacaagagcacaa

SEQ ID NO: 21218 - DNA, 20 bp, Artificial Sequence
  chemically synthesized
caagagcacaatagtctttg

SEQ ID NO: 21219 - DNA, 20 bp, Artificial Sequence
  chemically synthesized
aagagcacaatagtctttgt

SEQ ID NO: 21220 - DNA, 20 bp, Artificial Sequence
  chemically synthesized
acaatagtctttgtaggttt

SEQ ID NO: 21221 - DNA, 20 bp, Artificial Sequence
  chemically synthesized
gtctttgtaggttttggaca

SEQ ID NO: 21222 - DNA, 20 bp, Artificial Sequence
  chemically synthesized
aggttttggacacagttttc

SEQ ID NO: 21223 - DNA, 20 bp, Artificial Sequence
  chemically synthesized
acacagttttctagcttttc

SEQ ID NO: 21224 - DNA, 20 bp, Artificial Sequence
  chemically synthesized
agttttctagcttttcaaga

SEQ ID NO: 21225 - DNA, 20 bp, Artificial Sequence
  chemically synthesized
gttttctagcttttcaagaa

SEQ ID NO: 21226 - DNA, 20 bp, Artificial Sequence
  chemically synthesized
tctagcttttcaagaaaggc

SEQ ID NO: 21227 - DNA, 20 bp, Artificial Sequence
  chemically synthesized
ctagcttttcaagaaaggca

SEQ ID NO: 21228 - DNA, 20 bp, Artificial Sequence
  chemically synthesized
tagcttttcaagaaaggcaa

SEQ ID NO: 21229 - DNA, 20 bp, Artificial Sequence
  chemically synthesized
ttgtcttgctttgcattctg

SEQ ID NO: 21230 - DNA, 20 bp, Artificial Sequence
  chemically synthesized
gtcttgctttgcattctgca

SEQ ID NO: 21231 - DNA, 20 bp, Artificial Sequence
  chemically synthesized
tgctttgcattctgcagagc

SEQ ID NO: 21232 - DNA, 20 bp, Artificial Sequence
  chemically synthesized
tttgcattctgcagagctag

SEQ ID NO: 21233 - DNA, 20 bp, Artificial Sequence
  chemically synthesized
tgcattctgcagagctagaa

SEQ ID NO: 21234 - DNA, 20 bp, Artificial Sequence
  chemically synthesized
ctagaagagcatttaatcct

SEQ ID NO: 21235 - DNA, 20 bp, Artificial Sequence
  chemically synthesized
atccttggccctctgtctgt

SEQ ID NO: 21236 - DNA, 20 bp, Artificial Sequence
  chemically synthesized
tccttggccctctgtctgtt

SEQ ID NO: 21237 - DNA, 20 bp, Artificial Sequence
  chemically synthesized
gggatattatgtttttttaa

SEQ ID NO: 21238 - DNA, 20 bp, Artificial Sequence
  chemically synthesized
aatagtgcttgtttatgact

SEQ ID NO: 21239 - DNA, 20 bp, Artificial Sequence
  chemically synthesized
atagtgcttgtttatgacta

SEQ ID NO: 21240 - DNA, 20 bp, Artificial Sequence
  chemically synthesized
cttgtttatgactaaggtca

SEQ ID NO: 21241 - DNA, 20 bp, Artificial Sequence
  chemically synthesized
tttatgactaaggtcaaaga

SEQ ID NO: 21242 - DNA, 20 bp, Artificial Sequence
  chemically synthesized
taaggtcaaagacagtattt

SEQ ID NO: 21243 - DNA, 20 bp, Artificial Sequence
  chemically synthesized
cagtatttcagaacaaaaat

SEQ ID NO: 21244 - DNA, 20 bp, Artificial Sequence
  chemically synthesized
gtatttcagaacaaaaatta

SEQ ID NO: 21245 - DNA, 20 bp, Artificial Sequence
  chemically synthesized
ttcagaacaaaaattagagt

SEQ ID NO: 21246 - DNA, 20 bp, Artificial Sequence
  chemically synthesized
attagagttagttcataatt

SEQ ID NO: 21247 - DNA, 20 bp, Artificial Sequence
  chemically synthesized
tacgttactgtttattttta

SEQ ID NO: 21248 - DNA, 20 bp, Artificial Sequence
  chemically synthesized
tttgctaatttatttttaaa

SEQ ID NO: 21249 - DNA, 20 bp, Artificial Sequence
  chemically synthesized
taatttatttttaaacagct

SEQ ID NO: 21250 - DNA, 20 bp, Artificial Sequence
  chemically synthesized
cagttacgccaacatgttta

SEQ ID NO: 21251 - DNA, 20 bp, Artificial Sequence
  chemically synthesized
ctgttcatcacatgccttac

SEQ ID NO: 21252 - DNA, 20 bp, Artificial Sequence
  chemically synthesized
tcatcacatgccttaccagt

SEQ ID NO: 21253 - DNA, 20 bp, Artificial Sequence
  chemically synthesized
catcacatgccttaccagtc

SEQ ID NO: 21254 - DNA, 20 bp, Artificial Sequence
  chemically synthesized
atcacatgccttaccagtca

SEQ ID NO: 21255 - DNA, 20 bp, Artificial Sequence
  chemically synthesized
cttaccagtcagggtgttaa

SEQ ID NO: 21256 - DNA, 20 bp, Artificial Sequence
  chemically synthesized
ttaccagtcagggtgttaaa

SEQ ID NO: 21257 - DNA, 20 bp, Artificial Sequence
  chemically synthesized
aaaaggcacatgcttttcaa

SEQ ID NO: 21258 - DNA, 20 bp, Artificial Sequence
  chemically synthesized
gcacatgcttttcaatagtt

SEQ ID NO: 21259 - DNA, 20 bp, Artificial Sequence
  chemically synthesized
ttttcaatagtttggatccc

SEQ ID NO: 21260 - DNA, 20 bp, Artificial Sequence
  chemically synthesized
gtttggatcccaagttaaat

SEQ ID NO: 21261 - DNA, 20 bp, Artificial Sequence
  chemically synthesized
gttaaattagataatgccat

SEQ ID NO: 21262 - DNA, 20 bp, Artificial Sequence
  chemically synthesized
ttaaattagataatgccatc

SEQ ID NO: 21263 - DNA, 20 bp, Artificial Sequence
  chemically synthesized
aattagataatgccatcagg

SEQ ID NO: 21264 - DNA, 20 bp, Artificial Sequence
  chemically synthesized
aattacattaattgaatgtt

SEQ ID NO: 21265 - DNA, 20 bp, Artificial Sequence
  chemically synthesized
attacattaattgaatgttt

SEQ ID NO: 21266 - DNA, 20 bp, Artificial Sequence
  chemically synthesized
acattaattgaatgtttagg

SEQ ID NO: 21267 - DNA, 20 bp, Artificial Sequence
  chemically synthesized
taattgaatgtttaggcgga

SEQ ID NO: 21268 - DNA, 20 bp, Artificial Sequence
  chemically synthesized
aattgaatgtttaggcggaa

SEQ ID NO: 21269 - DNA, 20 bp, Artificial Sequence
  chemically synthesized
tgaatgtttaggcggaaagg

SEQ ID NO: 21270 - DNA, 20 bp, Artificial Sequence
  chemically synthesized
taggcggaaaggtagttttg

SEQ ID NO: 21271 - DNA, 20 bp, Artificial Sequence
  chemically synthesized
ggcggaaaggtagttttgca

SEQ ID NO: 21272 - DNA, 20 bp, Artificial Sequence
  chemically synthesized
gcggaaaggtagttttgcag

SEQ ID NO: 21273 - DNA, 20 bp, Artificial Sequence
  chemically synthesized
tataatgaaatcacatttat

SEQ ID NO: 21274 - DNA, 20 bp, Artificial Sequence
  chemically synthesized
aagtacccatgtataaatct

SEQ ID NO: 21275 - DNA, 20 bp, Artificial Sequence
  chemically synthesized
atgtataaatctcagcatta

SEQ ID NO: 21276 - DNA, 20 bp, Artificial Sequence
  chemically synthesized
cagcattatagacattattt

SEQ ID NO: 21277 - DNA, 20 bp, Artificial Sequence
  chemically synthesized
agcattatagacattatttg

SEQ ID NO: 21278 - DNA, 20 bp, Artificial Sequence
  chemically synthesized
acattatttgaggttgctga

SEQ ID NO: 21279 - DNA, 20 bp, Artificial Sequence
  chemically synthesized
tgaggttgctgacagaaaaa

SEQ ID NO: 21280 - DNA, 20 bp, Artificial Sequence
  chemically synthesized
acagaaaaatggatatatat

SEQ ID NO: 21281 - DNA, 20 bp, Artificial Sequence
  chemically synthesized
cagaaaaatggatatatatc

SEQ ID NO: 21282 - DNA, 20 bp, Artificial Sequence
  chemically synthesized
atggatatatatcaggcgtt

SEQ ID NO: 21283 - DNA, 20 bp, Artificial Sequence
  chemically synthesized
tggatatatatcaggcgttt

SEQ ID NO: 21284 - DNA, 20 bp, Artificial Sequence
  chemically synthesized
gatatatatcaggcgtttag

SEQ ID NO: 21285 - DNA, 20 bp, Artificial Sequence
  chemically synthesized
atatatatcaggcgtttagg

SEQ ID NO: 21286 - DNA, 20 bp, Artificial Sequence
  chemically synthesized
ggcgtttaggaggaaacatg

SEQ ID NO: 21287 - DNA, 20 bp, Artificial Sequence
  chemically synthesized
gcgtttaggaggaaacatgc

SEQ ID NO: 21288 - DNA, 20 bp, Artificial Sequence
  chemically synthesized
cgtttaggaggaaacatgcg

SEQ ID NO: 21289 - DNA, 20 bp, Artificial Sequence
  chemically synthesized
gtttaggaggaaacatgcgg

SEQ ID NO: 21290 - DNA, 20 bp, Artificial Sequence
  chemically synthesized
tttaggaggaaacatgcggg

SEQ ID NO: 21291 - DNA, 20 bp, Artificial Sequence
  chemically synthesized
aacatgcggggggctgtcat

SEQ ID NO: 21292 - DNA, 20 bp, Artificial Sequence
  chemically synthesized
atgcggggggctgtcatcag

SEQ ID NO: 21293 - DNA, 20 bp, Artificial Sequence
  chemically synthesized
taaatgctgccttcgccatt

SEQ ID NO: 21294 - DNA, 20 bp, Artificial Sequence
  chemically synthesized
aaatgctgccttcgccattt

SEQ ID NO: 21295 - DNA, 20 bp, Artificial Sequence
  chemically synthesized
atgctgccttcgccatttag

SEQ ID NO: 21296 - DNA, 20 bp, Artificial Sequence
  chemically synthesized
ttcgccatttaggagactgc

SEQ ID NO: 21297 - DNA, 20 bp, Artificial Sequence
  chemically synthesized
tcgccatttaggagactgct

SEQ ID NO: 21298 - DNA, 20 bp, Artificial Sequence
  chemically synthesized
atttaggagactgctgggca

SEQ ID NO: 21299 - DNA, 20 bp, Artificial Sequence
  chemically synthesized
gctgggcacggtcgttttct

SEQ ID NO: 21300 - DNA, 20 bp, Artificial Sequence
  chemically synthesized
ggcacggtcgttttcttagt

SEQ ID NO: 21301 - DNA, 20 bp, Artificial Sequence
  chemically synthesized
tagtgagctgcctttatcat

SEQ ID NO: 21302 - DNA, 20 bp, Artificial Sequence
  chemically synthesized
gcctttatcattagccctct

SEQ ID NO: 21303 - DNA, 20 bp, Artificial Sequence
  chemically synthesized
tttatcattagccctctaag

SEQ ID NO: 21304 - DNA, 20 bp, Artificial Sequence
  chemically synthesized
cctctaagcagccatgcaca

SEQ ID NO: 21305 - DNA, 20 bp, Artificial Sequence
  chemically synthesized
ctctaagcagccatgcacaa

SEQ ID NO: 21306 - DNA, 20 bp, Artificial Sequence
  chemically synthesized
cagccatgcacaaaggcacg

SEQ ID NO: 21307 - DNA, 20 bp, Artificial Sequence
  chemically synthesized
agccatgcacaaaggcacgt

SEQ ID NO: 21308 - DNA, 20 bp, Artificial Sequence
  chemically synthesized
cgtgggtgctgtgttttgta

SEQ ID NO: 21309 - DNA, 20 bp, Artificial Sequence
  chemically synthesized
ggtgctgtgttttgtatagc

SEQ ID NO: 21310 - DNA, 20 bp, Artificial Sequence
  chemically synthesized
gtgctgtgttttgtatagcc

SEQ ID NO: 21311 - DNA, 20 bp, Artificial Sequence
  chemically synthesized
tgctgtgttttgtatagcca

SEQ ID NO: 21312 - DNA, 20 bp, Artificial Sequence
  chemically synthesized
ttgtatagccagggctttcc

SEQ ID NO: 21313 - DNA, 20 bp, Artificial Sequence
  chemically synthesized
agccagggctttcctggact

SEQ ID NO: 21314 - DNA, 20 bp, Artificial Sequence
  chemically synthesized
ctttcctggactcagcatgc

SEQ ID NO: 21315 - DNA, 20 bp, Artificial Sequence
  chemically synthesized
cctggactcagcatgccagc

SEQ ID NO: 21316 - DNA, 20 bp, Artificial Sequence
  chemically synthesized
ctggactcagcatgccagct

SEQ ID NO: 21317 - DNA, 20 bp, Artificial Sequence
  chemically synthesized
tggactcagcatgccagctg

SEQ ID NO: 21318 - DNA, 20 bp, Artificial Sequence
  chemically synthesized
ctcagcatgccagctggggc

SEQ ID NO: 21319 - DNA, 20 bp, Artificial Sequence
  chemically synthesized
ccagctggggccggctcact

SEQ ID NO: 21320 - DNA, 20 bp, Artificial Sequence
  chemically synthesized
cagctggggccggctcactg

SEQ ID NO: 21321 - DNA, 20 bp, Artificial Sequence
  chemically synthesized
tggggccggctcactgaggc

SEQ ID NO: 21322 - DNA, 20 bp, Artificial Sequence
  chemically synthesized
ctcactgaggctggaaaaat

SEQ ID NO: 21323 - DNA, 20 bp, Artificial Sequence
  chemically synthesized
gaggctggaaaaatgagata

SEQ ID NO: 21324 - DNA, 20 bp, Artificial Sequence
  chemically synthesized
tggaaaaatgagatacagtc

SEQ ID NO: 21325 - DNA, 20 bp, Artificial Sequence
  chemically synthesized
aaaatgagatacagtctagt

SEQ ID NO: 21326 - DNA, 20 bp, Artificial Sequence
  chemically synthesized
aaatgagatacagtctagtg

SEQ ID NO: 21327 - DNA, 20 bp, Artificial Sequence
  chemically synthesized
tagtgaggtctttgtcacct

SEQ ID NO: 21328 - DNA, 20 bp, Artificial Sequence
  chemically synthesized
gtgaggtctttgtcaccttg

SEQ ID NO: 21329 - DNA, 20 bp, Artificial Sequence
  chemically synthesized
tgaggtctttgtcaccttgg

SEQ ID NO: 21330 - DNA, 20 bp, Artificial Sequence
  chemically synthesized
gaggtctttgtcaccttgga

SEQ ID NO: 21331 - DNA, 20 bp, Artificial Sequence
  chemically synthesized
tttgtcaccttggagggtct

SEQ ID NO: 21332 - DNA, 20 bp, Artificial Sequence
  chemically synthesized
ttgtcaccttggagggtctg

SEQ ID NO: 21333 - DNA, 20 bp, Artificial Sequence
  chemically synthesized
accttggagggtctgaggac

SEQ ID NO: 21334 - DNA, 20 bp, Artificial Sequence
  chemically synthesized
ggtctgaggactggtgcgct

SEQ ID NO: 21335 - DNA, 20 bp, Artificial Sequence
  chemically synthesized
gtctgaggactggtgcgctc

SEQ ID NO: 21336 - DNA, 20 bp, Artificial Sequence
  chemically synthesized
tgcgctcgggttgacccatg

SEQ ID NO: 21337 - DNA, 20 bp, Artificial Sequence
  chemically synthesized
gttgacccatgtggcgtcct

SEQ ID NO: 21338 - DNA, 20 bp, Artificial Sequence
  chemically synthesized
acccatgtggcgtcctgagc

SEQ ID NO: 21339 - DNA, 20 bp, Artificial Sequence
  chemically synthesized
gtcctgagccagctctgtcc

SEQ ID NO: 21340 - DNA, 20 bp, Artificial Sequence
  chemically synthesized
gccagctctgtcctggatct

SEQ ID NO: 21341 - DNA, 20 bp, Artificial Sequence
  chemically synthesized
ccagctctgtcctggatctg

SEQ ID NO: 21342 - DNA, 20 bp, Artificial Sequence
  chemically synthesized
gatctgaggaacactgtctg

SEQ ID NO: 21343 - DNA, 20 bp, Artificial Sequence
  chemically synthesized
gaacactgtctgaagttttc

SEQ ID NO: 21344 - DNA, 20 bp, Artificial Sequence
  chemically synthesized
aacactgtctgaagttttcc

SEQ ID NO: 21345 - DNA, 20 bp, Artificial Sequence
  chemically synthesized
acactgtctgaagttttcca

SEQ ID NO: 21346 - DNA, 20 bp, Artificial Sequence
  chemically synthesized
cactgtctgaagttttccag

SEQ ID NO: 21347 - DNA, 20 bp, Artificial Sequence
  chemically synthesized
gaagttttccaggggtttga

SEQ ID NO: 21348 - DNA, 20 bp, Artificial Sequence
  chemically synthesized
tttccaggggtttgacagac

SEQ ID NO: 21349 - DNA, 20 bp, Artificial Sequence
  chemically synthesized
aggggtttgacagaccagaa

SEQ ID NO: 21350 - DNA, 20 bp, Artificial Sequence
  chemically synthesized
ggggtttgacagaccagaat

SEQ ID NO: 21351 - DNA, 20 bp, Artificial Sequence
  chemically synthesized
gggtttgacagaccagaatg

SEQ ID NO: 21352 - DNA, 20 bp, Artificial Sequence
  chemically synthesized
ggtttgacagaccagaatgg

SEQ ID NO: 21353 - DNA, 20 bp, Artificial Sequence
  chemically synthesized
cagaccagaatgggggccgc

SEQ ID NO: 21354 - DNA, 20 bp, Artificial Sequence
  chemically synthesized
accagaatgggggccgctgg

SEQ ID NO: 21355 - DNA, 20 bp, Artificial Sequence
  chemically synthesized
ccagaatgggggccgctggc

SEQ ID NO: 21356 - DNA, 20 bp, Artificial Sequence
  chemically synthesized
cagaatgggggccgctggca

SEQ ID NO: 21357 - DNA, 20 bp, Artificial Sequence
  chemically synthesized
tgggggccgctggcagggcc

SEQ ID NO: 21358 - DNA, 20 bp, Artificial Sequence
  chemically synthesized
gggccgctggcagggcctgg

SEQ ID NO: 21359 - DNA, 20 bp, Artificial Sequence
  chemically synthesized
ctggcagggcctggtggcat

SEQ ID NO: 21360 - DNA, 20 bp, Artificial Sequence
  chemically synthesized
gggcctggtggcattagatg

SEQ ID NO: 21361 - DNA, 20 bp, Artificial Sequence
  chemically synthesized
ctggtggcattagatgtggc

SEQ ID NO: 21362 - DNA, 20 bp, Artificial Sequence
  chemically synthesized
tggcattagatgtggcaagt

SEQ ID NO: 21363 - DNA, 20 bp, Artificial Sequence
  chemically synthesized
agatgtggcaagtcagacca

SEQ ID NO: 21364 - DNA, 20 bp, Artificial Sequence
  chemically synthesized
gtggcaagtcagaccacagc

SEQ ID NO: 21365 - DNA, 20 bp, Artificial Sequence
  chemically synthesized
cagaccacagctggcctgtg

SEQ ID NO: 21366 - DNA, 20 bp, Artificial Sequence
  chemically synthesized
agaccacagctggcctgtga

SEQ ID NO: 21367 - DNA, 20 bp, Artificial Sequence
  chemically synthesized
aggtgactcttcctctgatg

SEQ ID NO: 21368 - DNA, 20 bp, Artificial Sequence
  chemically synthesized
gtgactcttcctctgatgca

SEQ ID NO: 21369 - DNA, 20 bp, Artificial Sequence
  chemically synthesized
gactcttcctctgatgcaga

SEQ ID NO: 21370 - DNA, 20 bp, Artificial Sequence
  chemically synthesized
tgatgcagagagaattaaat

SEQ ID NO: 21371 - DNA, 20 bp, Artificial Sequence
  chemically synthesized
gatgcagagagaattaaatg

SEQ ID NO: 21372 - DNA, 20 bp, Artificial Sequence
  chemically synthesized
tgcagagagaattaaatgag

SEQ ID NO: 21373 - DNA, 20 bp, Artificial Sequence
  chemically synthesized
gcagagagaattaaatgagg

SEQ ID NO: 21374 - DNA, 20 bp, Artificial Sequence
  chemically synthesized
agagaattaaatgaggaggc

SEQ ID NO: 21375 - DNA, 20 bp, Artificial Sequence
  chemically synthesized
agaattaaatgaggaggcca

SEQ ID NO: 21376 - DNA, 20 bp, Artificial Sequence
  chemically synthesized
aaatgaggaggccagagccc

SEQ ID NO: 21377 - DNA, 20 bp, Artificial Sequence
  chemically synthesized
ctgcctcccctccatgccct

SEQ ID NO: 21378 - DNA, 20 bp, Artificial Sequence
  chemically synthesized
gcctcccctccatgccctca

SEQ ID NO: 21379 - DNA, 20 bp, Artificial Sequence
  chemically synthesized
cccctccatgccctcagaga

SEQ ID NO: 21380 - DNA, 20 bp, Artificial Sequence
  chemically synthesized
ctccatgccctcagagaaag

SEQ ID NO: 21381 - DNA, 20 bp, Artificial Sequence
  chemically synthesized
tccatgccctcagagaaagt

SEQ ID NO: 21382 - DNA, 20 bp, Artificial Sequence
  chemically synthesized
catgccctcagagaaagtgg

SEQ ID NO: 21383 - DNA, 20 bp, Artificial Sequence
  chemically synthesized
ctcagagaaagtgggagtgc

SEQ ID NO: 21384 - DNA, 20 bp, Artificial Sequence
  chemically synthesized
aaagtgggagtgctggcatt

SEQ ID NO: 21385 - DNA, 20 bp, Artificial Sequence
  chemically synthesized
gagtgctggcatttggctaa

SEQ ID NO: 21386 - DNA, 20 bp, Artificial Sequence
  chemically synthesized
agtgctggcatttggctaac

SEQ ID NO: 21387 - DNA, 20 bp, Artificial Sequence
  chemically synthesized
ctggcatttggctaacagga

SEQ ID NO: 21388 - DNA, 20 bp, Artificial Sequence
  chemically synthesized
tggcatttggctaacaggac

SEQ ID NO: 21389 - DNA, 20 bp, Artificial Sequence
  chemically synthesized
gctaacaggacaggctattt

SEQ ID NO: 21390 - DNA, 20 bp, Artificial Sequence
  chemically synthesized
ctaacaggacaggctatttt

SEQ ID NO: 21391 - DNA, 20 bp, Artificial Sequence
  chemically synthesized
aggacaggctattttgggcc

SEQ ID NO: 21392 - DNA, 20 bp, Artificial Sequence
  chemically synthesized
ggacaggctattttgggccc

SEQ ID NO: 21393 - DNA, 20 bp, Artificial Sequence
  chemically synthesized
tgacctctctgtgatttcta

SEQ ID NO: 21394 - DNA, 20 bp, Artificial Sequence
  chemically synthesized
cctctctgtgatttctatgg

SEQ ID NO: 21395 - DNA, 20 bp, Artificial Sequence
  chemically synthesized
ctctctgtgatttctatggt

SEQ ID NO: 21396 - DNA, 20 bp, Artificial Sequence
  chemically synthesized
gatttctatggtgggtgtca

SEQ ID NO: 21397 - DNA, 20 bp, Artificial Sequence
  chemically synthesized
atttctatggtgggtgtcaa

SEQ ID NO: 21398 - DNA, 20 bp, Artificial Sequence
  chemically synthesized
ctatggtgggtgtcaaagga

SEQ ID NO: 21399 - DNA, 20 bp, Artificial Sequence
  chemically synthesized
ggtgggtgtcaaaggatggc

SEQ ID NO: 21400 - DNA, 20 bp, Artificial Sequence
  chemically synthesized
gtgggtgtcaaaggatggct

SEQ ID NO: 21401 - DNA, 20 bp, Artificial Sequence
  chemically synthesized
gtgtcaaaggatggctggga

SEQ ID NO: 21402 - DNA, 20 bp, Artificial Sequence
  chemically synthesized
tgtcaaaggatggctgggaa

SEQ ID NO: 21403 - DNA, 20 bp, Artificial Sequence
  chemically synthesized
gtcaaaggatggctgggaaa

SEQ ID NO: 21404 - DNA, 20 bp, Artificial Sequence
  chemically synthesized
tcaaaggatggctgggaaag

SEQ ID NO: 21405 - DNA, 20 bp, Artificial Sequence
  chemically synthesized
tggctgggaaaggggatttt

SEQ ID NO: 21406 - DNA, 20 bp, Artificial Sequence
  chemically synthesized
ggctgggaaaggggattttt

SEQ ID NO: 21407 - DNA, 20 bp, Artificial Sequence
  chemically synthesized
tgctaacatcccttgcctat

SEQ ID NO: 21408 - DNA, 20 bp, Artificial Sequence
  chemically synthesized
cactatcttctcgcaccatc

SEQ ID NO: 21409 - DNA, 20 bp, Artificial Sequence
  chemically synthesized
tcgcaccatctggtttcacc

SEQ ID NO: 21410 - DNA, 20 bp, Artificial Sequence
  chemically synthesized
cgcaccatctggtttcaccc

SEQ ID NO: 21411 - DNA, 20 bp, Artificial Sequence
  chemically synthesized
ctggtttcacccgggctgca

SEQ ID NO: 21412 - DNA, 20 bp, Artificial Sequence
  chemically synthesized
ttcacccgggctgcaaagcc

SEQ ID NO: 21413 - DNA, 20 bp, Artificial Sequence
  chemically synthesized
ccgggctgcaaagcctagtg

SEQ ID NO: 21414 - DNA, 20 bp, Artificial Sequence
  chemically synthesized
gtggtgtcccataccctgca

SEQ ID NO: 21415 - DNA, 20 bp, Artificial Sequence
  chemically synthesized
ataccctgcaaagccctatt

SEQ ID NO: 21416 - DNA, 20 bp, Artificial Sequence
  chemically synthesized
taccctgcaaagccctattt

SEQ ID NO: 21417 - DNA, 20 bp, Artificial Sequence
  chemically synthesized
atgccaccatgccatctcca

SEQ ID NO: 21418 - DNA, 20 bp, Artificial Sequence
  chemically synthesized
catgccatctccacagcatc

SEQ ID NO: 21419 - DNA, 20 bp, Artificial Sequence
  chemically synthesized
gccatctccacagcatctgg

SEQ ID NO: 21420 - DNA, 20 bp, Artificial Sequence
  chemically synthesized
acagcatctggcagacgaac

SEQ ID NO: 21421 - DNA, 20 bp, Artificial Sequence
  chemically synthesized
cagcatctggcagacgaacc

SEQ ID NO: 21422 - DNA, 20 bp, Artificial Sequence
  chemically synthesized
catctggcagacgaaccagg

SEQ ID NO: 21423 - DNA, 20 bp, Artificial Sequence
  chemically synthesized
atctggcagacgaaccaggt

SEQ ID NO: 21424 - DNA, 20 bp, Artificial Sequence
  chemically synthesized
tctggcagacgaaccaggtg

SEQ ID NO: 21425 - DNA, 20 bp, Artificial Sequence
  chemically synthesized
ggtggggctgctattgcttc

SEQ ID NO: 21426 - DNA, 20 bp, Artificial Sequence
  chemically synthesized
gtggggctgctattgcttct

SEQ ID NO: 21427 - DNA, 20 bp, Artificial Sequence
  chemically synthesized
ctattgcttctgggtattta

SEQ ID NO: 21428 - DNA, 20 bp, Artificial Sequence
  chemically synthesized
tattgcttctgggtatttac

SEQ ID NO: 21429 - DNA, 20 bp, Artificial Sequence
  chemically synthesized
ttctgggtatttacgggatg

SEQ ID NO: 21430 - DNA, 20 bp, Artificial Sequence
  chemically synthesized
ttttctgcccaccgttgttt

SEQ ID NO: 21431 - DNA, 20 bp, Artificial Sequence
  chemically synthesized
tttctgcccaccgttgtttt

SEQ ID NO: 21432 - DNA, 20 bp, Artificial Sequence
  chemically synthesized
tctgcccaccgttgttttgg

SEQ ID NO: 21433 - DNA, 20 bp, Artificial Sequence
  chemically synthesized
ctgcccaccgttgttttggg

SEQ ID NO: 21434 - DNA, 20 bp, Artificial Sequence
  chemically synthesized
tgcccaccgttgttttggga

SEQ ID NO: 21435 - DNA, 20 bp, Artificial Sequence
  chemically synthesized
ggagggatttccccctccct

SEQ ID NO: 21436 - DNA, 20 bp, Artificial Sequence
  chemically synthesized
gagggatttccccctccctc

SEQ ID NO: 21437 - DNA, 20 bp, Artificial Sequence
  chemically synthesized
ggatttccccctccctcagg

SEQ ID NO: 21438 - DNA, 20 bp, Artificial Sequence
  chemically synthesized
atttccccctccctcaggta

SEQ ID NO: 21439 - DNA, 20 bp, Artificial Sequence
  chemically synthesized
ccctcaggtagagttgttct

SEQ ID NO: 21440 - DNA, 20 bp, Artificial Sequence
  chemically synthesized
ctcaggtagagttgttctca

SEQ ID NO: 21441 - DNA, 20 bp, Artificial Sequence
  chemically synthesized
ttctcagagatatctgtaat

SEQ ID NO: 21442 - DNA, 20 bp, Artificial Sequence
  chemically synthesized
gtaattggcccttcccattt

SEQ ID NO: 21443 - DNA, 20 bp, Artificial Sequence
  chemically synthesized
aattggcccttcccatttaa

SEQ ID NO: 21444 - DNA, 20 bp, Artificial Sequence
  chemically synthesized
ggcccttcccatttaagagt

SEQ ID NO: 21445 - DNA, 20 bp, Artificial Sequence
  chemically synthesized
aatgatttattctaaaatga

SEQ ID NO: 21446 - DNA, 20 bp, Artificial Sequence
  chemically synthesized
ttattctaaaatgatagacc

SEQ ID NO: 21447 - DNA, 20 bp, Artificial Sequence
  chemically synthesized
tattctaaaatgatagaccc

SEQ ID NO: 21448 - DNA, 20 bp, Artificial Sequence
  chemically synthesized
tctaaaatgatagacccagg

SEQ ID NO: 21449 - DNA, 20 bp, Artificial Sequence
  chemically synthesized
taaaatgatagacccaggta

SEQ ID NO: 21450 - DNA, 20 bp, Artificial Sequence
  chemically synthesized
aaatgatagacccaggtaga

SEQ ID NO: 21451 - DNA, 20 bp, Artificial Sequence
  chemically synthesized
aatgatagacccaggtagag

SEQ ID NO: 21452 - DNA, 20 bp, Artificial Sequence
  chemically synthesized
aggttacccaccctccgtca

SEQ ID NO: 21453 - DNA, 20 bp, Artificial Sequence
  chemically synthesized
gttacccaccctccgtcaca

SEQ ID NO: 21454 - DNA, 20 bp, Artificial Sequence
  chemically synthesized
acccaccctccgtcacagag

SEQ ID NO: 21455 - DNA, 20 bp, Artificial Sequence
  chemically synthesized
accctccgtcacagagtggc

SEQ ID NO: 21456 - DNA, 20 bp, Artificial Sequence
  chemically synthesized
ccagctgtgtcccctgcttc

SEQ ID NO: 21457 - DNA, 20 bp, Artificial Sequence
  chemically synthesized
cagctgtgtcccctgcttcc

SEQ ID NO: 21458 - DNA, 20 bp, Artificial Sequence
  chemically synthesized
gctgtgtcccctgcttccgg

SEQ ID NO: 21459 - DNA, 20 bp, Artificial Sequence
  chemically synthesized
ctgtgtcccctgcttccggg

SEQ ID NO: 21460 - DNA, 20 bp, Artificial Sequence
  chemically synthesized
tgtcccctgcttccgggagg

SEQ ID NO: 21461 - DNA, 20 bp, Artificial Sequence
  chemically synthesized
gtcccctgcttccgggaggt

SEQ ID NO: 21462 - DNA, 20 bp, Artificial Sequence
  chemically synthesized
ccgggaggtgggaatgcatg

SEQ ID NO: 21463 - DNA, 20 bp, Artificial Sequence
  chemically synthesized
gggaggtgggaatgcatgtg

SEQ ID NO: 21464 - DNA, 20 bp, Artificial Sequence
  chemically synthesized
ggaggtgggaatgcatgtgg

SEQ ID NO: 21465 - DNA, 20 bp, Artificial Sequence
  chemically synthesized
gaggtgggaatgcatgtgga

SEQ ID NO: 21466 - DNA, 20 bp, Artificial Sequence
  chemically synthesized
aggtgggaatgcatgtggag

SEQ ID NO: 21467 - DNA, 20 bp, Artificial Sequence
  chemically synthesized
atttcctaactctcttgctc

SEQ ID NO: 21468 - DNA, 20 bp, Artificial Sequence
  chemically synthesized
tcctaactctcttgctctgg

SEQ ID NO: 21469 - DNA, 20 bp, Artificial Sequence
  chemically synthesized
tctcttgctctggcagcctg

SEQ ID NO: 21470 - DNA, 20 bp, Artificial Sequence
  chemically synthesized
tcttgctctggcagcctgaa

SEQ ID NO: 21471 - DNA, 20 bp, Artificial Sequence
  chemically synthesized
gctgtctgtgccctgaacaa

SEQ ID NO: 21472 - DNA, 20 bp, Artificial Sequence
  chemically synthesized
ctgtgccctgaacaacagct

SEQ ID NO: 21473 - DNA, 20 bp, Artificial Sequence
  chemically synthesized
tgtgccctgaacaacagctt

SEQ ID NO: 21474 - DNA, 20 bp, Artificial Sequence
  chemically synthesized
gtgccctgaacaacagctta

SEQ ID NO: 21475 - DNA, 20 bp, Artificial Sequence
  chemically synthesized
gccctgaacaacagcttagg

SEQ ID NO: 21476 - DNA, 20 bp, Artificial Sequence
  chemically synthesized
tgaacaacagcttagggagc

SEQ ID NO: 21477 - DNA, 20 bp, Artificial Sequence
  chemically synthesized
aacaacagcttagggagctg

SEQ ID NO: 21478 - DNA, 20 bp, Artificial Sequence
  chemically synthesized
acaacagcttagggagctgg

SEQ ID NO: 21479 - DNA, 20 bp, Artificial Sequence
  chemically synthesized
cagcttagggagctggagga

SEQ ID NO: 21480 - DNA, 20 bp, Artificial Sequence
  chemically synthesized
gcttagggagctggaggaaa

SEQ ID NO: 21481 - DNA, 20 bp, Artificial Sequence
  chemically synthesized
tagggagctggaggaaagag

SEQ ID NO: 21482 - DNA, 20 bp, Artificial Sequence
  chemically synthesized
agggagctggaggaaagaga

SEQ ID NO: 21483 - DNA, 20 bp, Artificial Sequence
  chemically synthesized
ggagctggaggaaagagaag

SEQ ID NO: 21484 - DNA, 20 bp, Artificial Sequence
  chemically synthesized
gagctggaggaaagagaagg

SEQ ID NO: 21485 - DNA, 20 bp, Artificial Sequence
  chemically synthesized
agagaaggaggtatgcattt

SEQ ID NO: 21486 - DNA, 20 bp, Artificial Sequence
  chemically synthesized
gagaaggaggtatgcatttg

SEQ ID NO: 21487 - DNA, 20 bp, Artificial Sequence
  chemically synthesized
agaaggaggtatgcatttga

SEQ ID NO: 21488 - DNA, 20 bp, Artificial Sequence
  chemically synthesized
aaggaggtatgcatttgagg

SEQ ID NO: 21489 - DNA, 20 bp, Artificial Sequence
  chemically synthesized
ggaggtatgcatttgaggga

SEQ ID NO: 21490 - DNA, 20 bp, Artificial Sequence
  chemically synthesized
aggtatgcatttgagggaga

SEQ ID NO: 21491 - DNA, 20 bp, Artificial Sequence
  chemically synthesized
ggtatgcatttgagggagag

SEQ ID NO: 21492 - DNA, 20 bp, Artificial Sequence
  chemically synthesized
tttgagggagagaggcccac

SEQ ID NO: 21493 - DNA, 20 bp, Artificial Sequence
  chemically synthesized
ttgagggagagaggcccact

SEQ ID NO: 21494 - DNA, 20 bp, Artificial Sequence
  chemically synthesized
gggagagaggcccactgggt

SEQ ID NO: 21495 - DNA, 20 bp, Artificial Sequence
  chemically synthesized
agaggcccactgggttggac

SEQ ID NO: 21496 - DNA, 20 bp, Artificial Sequence
  chemically synthesized
ggcccactgggttggacaag

SEQ ID NO: 21497 - DNA, 20 bp, Artificial Sequence
  chemically synthesized
gcccactgggttggacaaga

SEQ ID NO: 21498 - DNA, 20 bp, Artificial Sequence
  chemically synthesized
tgggttggacaagaaggtaa

SEQ ID NO: 21499 - DNA, 20 bp, Artificial Sequence
  chemically synthesized
ggttggacaagaaggtaaaa

SEQ ID NO: 21500 - DNA, 20 bp, Artificial Sequence
  chemically synthesized
gttggacaagaaggtaaaag

SEQ ID NO: 21501 - DNA, 20 bp, Artificial Sequence
  chemically synthesized
ttggacaagaaggtaaaaga

SEQ ID NO: 21502 - DNA, 20 bp, Artificial Sequence
  chemically synthesized
acaagaaggtaaaagagggc

SEQ ID NO: 21503 - DNA, 20 bp, Artificial Sequence
  chemically synthesized
aaggtaaaagagggctggtt

SEQ ID NO: 21504 - DNA, 20 bp, Artificial Sequence
  chemically synthesized
agagggctggtttggcccct

SEQ ID NO: 21505 - DNA, 20 bp, Artificial Sequence
  chemically synthesized
gagggctggtttggccccta

SEQ ID NO: 21506 - DNA, 20 bp, Artificial Sequence
  chemically synthesized
agggctggtttggcccctaa

SEQ ID NO: 21507 - DNA, 20 bp, Artificial Sequence
  chemically synthesized
gctggtttggcccctaaggg

SEQ ID NO: 21508 - DNA, 20 bp, Artificial Sequence
  chemically synthesized
ctggtttggcccctaaggga

SEQ ID NO: 21509 - DNA, 20 bp, Artificial Sequence
  chemically synthesized
tttggcccctaagggaagga

SEQ ID NO: 21510 - DNA, 20 bp, Artificial Sequence
  chemically synthesized
ttggcccctaagggaaggac

SEQ ID NO: 21511 - DNA, 20 bp, Artificial Sequence
  chemically synthesized
cccctaagggaaggacagga

SEQ ID NO: 21512 - DNA, 20 bp, Artificial Sequence
  chemically synthesized
gcacccgcttgttccctgtg

SEQ ID NO: 21513 - DNA, 20 bp, Artificial Sequence
  chemically synthesized
gcttgttccctgtgtggatg

SEQ ID NO: 21514 - DNA, 20 bp, Artificial Sequence
  chemically synthesized
gtgtggatgcagtgtttgtc

SEQ ID NO: 21515 - DNA, 20 bp, Artificial Sequence
  chemically synthesized
atgcagtgtttgtccagctg

SEQ ID NO: 21516 - DNA, 20 bp, Artificial Sequence
  chemically synthesized
tgcagtgtttgtccagctga

SEQ ID NO: 21517 - DNA, 20 bp, Artificial Sequence
  chemically synthesized
agtgtttgtccagctgaagg

SEQ ID NO: 21518 - DNA, 20 bp, Artificial Sequence
  chemically synthesized
cagctgaaggcagcctcact

SEQ ID NO: 21519 - DNA, 20 bp, Artificial Sequence
  chemically synthesized
cactcggctgactacctgat

SEQ ID NO: 21520 - DNA, 20 bp, Artificial Sequence
  chemically synthesized
cctgatgagtgattttcccc

SEQ ID NO: 21521 - DNA, 20 bp, Artificial Sequence
  chemically synthesized
agtgattttccccaagctga

SEQ ID NO: 21522 - DNA, 20 bp, Artificial Sequence
  chemically synthesized
ctccaacacatttcacctac

SEQ ID NO: 21523 - DNA, 20 bp, Artificial Sequence
  chemically synthesized
ttcacctacaagtcctgaca

SEQ ID NO: 21524 - DNA, 20 bp, Artificial Sequence
  chemically synthesized
acctacaagtcctgacaaag

SEQ ID NO: 21525 - DNA, 20 bp, Artificial Sequence
  chemically synthesized
gacaaagtggtgtgttcttt

SEQ ID NO: 21526 - DNA, 20 bp, Artificial Sequence
  chemically synthesized
acaaagtggtgtgttctttt

SEQ ID NO: 21527 - DNA, 20 bp, Artificial Sequence
  chemically synthesized
caaagtggtgtgttcttttg

SEQ ID NO: 21528 - DNA, 20 bp, Artificial Sequence
  chemically synthesized
ttttggggctgttattactg

SEQ ID NO: 21529 - DNA, 20 bp, Artificial Sequence
  chemically synthesized
tggggctgttattactgcag

SEQ ID NO: 21530 - DNA, 20 bp, Artificial Sequence
  chemically synthesized
ggggctgttattactgcagc

SEQ ID NO: 21531 - DNA, 20 bp, Artificial Sequence
  chemically synthesized
ttattactgcagcaggcatt

SEQ ID NO: 21532 - DNA, 20 bp, Artificial Sequence
  chemically synthesized
agcaggcatttggaacaatc

SEQ ID NO: 21533 - DNA, 20 bp, Artificial Sequence
  chemically synthesized
aggcatttggaacaatctgg

SEQ ID NO: 21534 - DNA, 20 bp, Artificial Sequence
  chemically synthesized
tttggaacaatctggaagaa

SEQ ID NO: 21535 - DNA, 20 bp, Artificial Sequence
  chemically synthesized
ttggaacaatctggaagaat

SEQ ID NO: 21536 - DNA, 20 bp, Artificial Sequence
  chemically synthesized
tggaacaatctggaagaatg

SEQ ID NO: 21537 - DNA, 20 bp, Artificial Sequence
  chemically synthesized
tctggaagaatggggtgcca

SEQ ID NO: 21538 - DNA, 20 bp, Artificial Sequence
  chemically synthesized
ctggaagaatggggtgccaa

SEQ ID NO: 21539 - DNA, 20 bp, Artificial Sequence
  chemically synthesized
ggtgccaaaggacacccttg

SEQ ID NO: 21540 - DNA, 20 bp, Artificial Sequence
  chemically synthesized
acacccttgaagccgtttct

SEQ ID NO: 21541 - DNA, 20 bp, Artificial Sequence
  chemically synthesized
ttcttttctctccgatcctc

SEQ ID NO: 21542 - DNA, 20 bp, Artificial Sequence
  chemically synthesized
ctccgatcctctagcttttt

SEQ ID NO: 21543 - DNA, 20 bp, Artificial Sequence
  chemically synthesized
ttttttggcttatgaaaaat

SEQ ID NO: 21544 - DNA, 20 bp, Artificial Sequence
  chemically synthesized
tttttggcttatgaaaaatt

SEQ ID NO: 21545 - DNA, 20 bp, Artificial Sequence
  chemically synthesized
tcgaatgtccattgtgctgt

SEQ ID NO: 21546 - DNA, 20 bp, Artificial Sequence
  chemically synthesized
tccattgtgctgttagtaat

SEQ ID NO: 21547 - DNA, 20 bp, Artificial Sequence
  chemically synthesized
ccattgtgctgttagtaatg

SEQ ID NO: 21548 - DNA, 20 bp, Artificial Sequence
  chemically synthesized
tgctgttagtaatgaggata

SEQ ID NO: 21549 - DNA, 20 bp, Artificial Sequence
  chemically synthesized
taaaatcacatttttttttt

SEQ ID NO: 21550 - DNA, 20 bp, Artificial Sequence
  chemically synthesized
atcacattttttttttgagt

SEQ ID NO: 21551 - DNA, 20 bp, Artificial Sequence
  chemically synthesized
tttttttgagtaagcccttt

SEQ ID NO: 21552 - DNA, 20 bp, Artificial Sequence
  chemically synthesized
ttttttgagtaagccctttg

SEQ ID NO: 21553 - DNA, 20 bp, Artificial Sequence
  chemically synthesized
ttttgagtaagccctttgag

SEQ ID NO: 21554 - DNA, 20 bp, Artificial Sequence
  chemically synthesized
ttgaggagtattgtcaaatt

SEQ ID NO: 21555 - DNA, 20 bp, Artificial Sequence
  chemically synthesized
caaattgagactcacctcat

SEQ ID NO: 21556 - DNA, 20 bp, Artificial Sequence
  chemically synthesized
acctcatgagtaaccctgtg

SEQ ID NO: 21557 - DNA, 20 bp, Artificial Sequence
  chemically synthesized
ctcatgagtaaccctgtgaa

SEQ ID NO: 21558 - DNA, 20 bp, Artificial Sequence
  chemically synthesized
tcatgagtaaccctgtgaag

SEQ ID NO: 21559 - DNA, 20 bp, Artificial Sequence
  chemically synthesized
tgagtaaccctgtgaagagg

SEQ ID NO: 21560 - DNA, 20 bp, Artificial Sequence
  chemically synthesized
gagtaaccctgtgaagaggc

SEQ ID NO: 21561 - DNA, 20 bp, Artificial Sequence
  chemically synthesized
gtaaccctgtgaagaggcag

SEQ ID NO: 21562 - DNA, 20 bp, Artificial Sequence
  chemically synthesized
ccctgtgaagaggcaggaga

SEQ ID NO: 21563 - DNA, 20 bp, Artificial Sequence
  chemically synthesized
cctgtgaagaggcaggagaa

SEQ ID NO: 21564 - DNA, 20 bp, Artificial Sequence
  chemically synthesized
ctgtgaagaggcaggagaaa

SEQ ID NO: 21565 - DNA, 20 bp, Artificial Sequence
  chemically synthesized
tgaagaggcaggagaaaggg

SEQ ID NO: 21566 - DNA, 20 bp, Artificial Sequence
  chemically synthesized
ggcaggagaaagggtagttg

SEQ ID NO: 21567 - DNA, 20 bp, Artificial Sequence
  chemically synthesized
gagaaagggtagttgaagct

SEQ ID NO: 21568 - DNA, 20 bp, Artificial Sequence
  chemically synthesized
gaaagggtagttgaagctta

SEQ ID NO: 21569 - DNA, 20 bp, Artificial Sequence
  chemically synthesized
aagggtagttgaagcttaga

SEQ ID NO: 21570 - DNA, 20 bp, Artificial Sequence
  chemically synthesized
agggtagttgaagcttagag

SEQ ID NO: 21571 - DNA, 20 bp, Artificial Sequence
  chemically synthesized
tgaagcttagagaggttaaa

SEQ ID NO: 21572 - DNA, 20 bp, Artificial Sequence
  chemically synthesized
agcttagagaggttaaatgg

SEQ ID NO: 21573 - DNA, 20 bp, Artificial Sequence
  chemically synthesized
gcttagagaggttaaatggc

SEQ ID NO: 21574 - DNA, 20 bp, Artificial Sequence
  chemically synthesized
gagaggttaaatggcaggtc

SEQ ID NO: 21575 - DNA, 20 bp, Artificial Sequence
  chemically synthesized
atggcaggtctggtctcatg

SEQ ID NO: 21576 - DNA, 20 bp, Artificial Sequence
  chemically synthesized
ggtctggtctcatgcagccg

SEQ ID NO: 21577 - DNA, 20 bp, Artificial Sequence
  chemically synthesized
gtctggtctcatgcagccgc

SEQ ID NO: 21578 - DNA, 20 bp, Artificial Sequence
  chemically synthesized
tctggtctcatgcagccgca

SEQ ID NO: 21579 - DNA, 20 bp, Artificial Sequence
  chemically synthesized
ctggtctcatgcagccgcag

SEQ ID NO: 21580 - DNA, 20 bp, Artificial Sequence
  chemically synthesized
gtctcatgcagccgcagggg

SEQ ID NO: 21581 - DNA, 20 bp, Artificial Sequence
  chemically synthesized
atgcagccgcaggggtagac

SEQ ID NO: 21582 - DNA, 20 bp, Artificial Sequence
  chemically synthesized
tgcagccgcaggggtagact

SEQ ID NO: 21583 - DNA, 20 bp, Artificial Sequence
  chemically synthesized
gcagccgcaggggtagacta

SEQ ID NO: 21584 - DNA, 20 bp, Artificial Sequence
  chemically synthesized
gtagactagggattctgatc

SEQ ID NO: 21585 - DNA, 20 bp, Artificial Sequence
  chemically synthesized
tccagaactccttatacttc

SEQ ID NO: 21586 - DNA, 20 bp, Artificial Sequence
  chemically synthesized
ccagaactccttatacttct

SEQ ID NO: 21587 - DNA, 20 bp, Artificial Sequence
  chemically synthesized
gggtccaccccacgcttcca

SEQ ID NO: 21588 - DNA, 20 bp, Artificial Sequence
  chemically synthesized
acgcttccacagcctgcaca

SEQ ID NO: 21589 - DNA, 20 bp, Artificial Sequence
  chemically synthesized
cgcttccacagcctgcacac

SEQ ID NO: 21590 - DNA, 20 bp, Artificial Sequence
  chemically synthesized
gcttccacagcctgcacaca

SEQ ID NO: 21591 - DNA, 20 bp, Artificial Sequence
  chemically synthesized
tccacagcctgcacacaggg

SEQ ID NO: 21592 - DNA, 20 bp, Artificial Sequence
  chemically synthesized
ccacagcctgcacacagggt

SEQ ID NO: 21593 - DNA, 20 bp, Artificial Sequence
  chemically synthesized
cacagcctgcacacagggta

SEQ ID NO: 21594 - DNA, 20 bp, Artificial Sequence
  chemically synthesized
agcctgcacacagggtaggg

SEQ ID NO: 21595 - DNA, 20 bp, Artificial Sequence
  chemically synthesized
cacacagggtagggaagttg

SEQ ID NO: 21596 - DNA, 20 bp, Artificial Sequence
  chemically synthesized
ggtagggaagttgtggcttg

SEQ ID NO: 21597 - DNA, 20 bp, Artificial Sequence
  chemically synthesized
agggaagttgtggcttgcag

SEQ ID NO: 21598 - DNA, 20 bp, Artificial Sequence
  chemically synthesized
gggaagttgtggcttgcaga

SEQ ID NO: 21599 - DNA, 20 bp, Artificial Sequence
  chemically synthesized
cttgcagaaggctgtttttt

SEQ ID NO: 21600 - DNA, 20 bp, Artificial Sequence
  chemically synthesized
ttgcagaaggctgttttttt

SEQ ID NO: 21601 - DNA, 20 bp, Artificial Sequence
  chemically synthesized
tgcagaaggctgtttttttg

SEQ ID NO: 21602 - DNA, 20 bp, Artificial Sequence
  chemically synthesized
gcagaaggctgtttttttgg

SEQ ID NO: 21603 - DNA, 20 bp, Artificial Sequence
  chemically synthesized
cagaaggctgtttttttggg

SEQ ID NO: 21604 - DNA, 20 bp, Artificial Sequence
  chemically synthesized
ggggggacgctctgttttaa

SEQ ID NO: 21605 - DNA, 20 bp, Artificial Sequence
  chemically synthesized
gacgctctgttttaatagtt

SEQ ID NO: 21606 - DNA, 20 bp, Artificial Sequence
  chemically synthesized
cgctctgttttaatagtttg

SEQ ID NO: 21607 - DNA, 20 bp, Artificial Sequence
  chemically synthesized
ctgttttaatagtttggagc

SEQ ID NO: 21608 - DNA, 20 bp, Artificial Sequence
  chemically synthesized
tgttttaatagtttggagca

SEQ ID NO: 21609 - DNA, 20 bp, Artificial Sequence
  chemically synthesized
tttaatagtttggagcaagg

SEQ ID NO: 21610 - DNA, 20 bp, Artificial Sequence
  chemically synthesized
atagtttggagcaaggaagc

SEQ ID NO: 21611 - DNA, 20 bp, Artificial Sequence
  chemically synthesized
gtttggagcaaggaagctag

SEQ ID NO: 21612 - DNA, 20 bp, Artificial Sequence
  chemically synthesized
tggagcaaggaagctagtgg

SEQ ID NO: 21613 - DNA, 20 bp, Artificial Sequence
  chemically synthesized
ggagcaaggaagctagtggt

SEQ ID NO: 21614 - DNA, 20 bp, Artificial Sequence
  chemically synthesized
agctagtggtgggcgctcac

SEQ ID NO: 21615 - DNA, 20 bp, Artificial Sequence
  chemically synthesized
tagtggtgggcgctcactgg

SEQ ID NO: 21616 - DNA, 20 bp, Artificial Sequence
  chemically synthesized
agtggtgggcgctcactggt

SEQ ID NO: 21617 - DNA, 20 bp, Artificial Sequence
  chemically synthesized
gtggtgggcgctcactggta

SEQ ID NO: 21618 - DNA, 20 bp, Artificial Sequence
  chemically synthesized
tggtgggcgctcactggtag

SEQ ID NO: 21619 - DNA, 20 bp, Artificial Sequence
  chemically synthesized
gtgggcgctcactggtaggg

SEQ ID NO: 21620 - DNA, 20 bp, Artificial Sequence
  chemically synthesized
tgggcgctcactggtagggg

SEQ ID NO: 21621 - DNA, 20 bp, Artificial Sequence
  chemically synthesized
ctggtaggggaggcatgtga

SEQ ID NO: 21622 - DNA, 20 bp, Artificial Sequence
  chemically synthesized
tggtaggggaggcatgtgat

SEQ ID NO: 21623 - DNA, 20 bp, Artificial Sequence
  chemically synthesized
gggaggcatgtgataggaat

SEQ ID NO: 21624 - DNA, 20 bp, Artificial Sequence
  chemically synthesized
aggaatcagtttgatctttt

SEQ ID NO: 21625 - DNA, 20 bp, Artificial Sequence
  chemically synthesized
tttgatcttttaagcatttt

SEQ ID NO: 21626 - DNA, 20 bp, Artificial Sequence
  chemically synthesized
ttgatcttttaagcattttc

SEQ ID NO: 21627 - DNA, 20 bp, Artificial Sequence
  chemically synthesized
tgatcttttaagcattttca

SEQ ID NO: 21628 - DNA, 20 bp, Artificial Sequence
  chemically synthesized
cttttaagcattttcaggga

SEQ ID NO: 21629 - DNA, 20 bp, Artificial Sequence
  chemically synthesized
ccacctctctatataatttc

SEQ ID NO: 21630 - DNA, 20 bp, Artificial Sequence
  chemically synthesized
atataatttcaagacttgat

SEQ ID NO: 21631 - DNA, 20 bp, Artificial Sequence
  chemically synthesized
acttgattggcattgtccct

SEQ ID NO: 21632 - DNA, 20 bp, Artificial Sequence
  chemically synthesized
ttggcattgtccctaagcac

SEQ ID NO: 21633 - DNA, 20 bp, Artificial Sequence
  chemically synthesized
gcattgtccctaagcaccag

SEQ ID NO: 21634 - DNA, 20 bp, Artificial Sequence
  chemically synthesized
tgtccctaagcaccagtaga

SEQ ID NO: 21635 - DNA, 20 bp, Artificial Sequence
  chemically synthesized
aagcaccagtagaaagcttg

SEQ ID NO: 21636 - DNA, 20 bp, Artificial Sequence
  chemically synthesized
caccagtagaaagcttgaag

SEQ ID NO: 21637 - DNA, 20 bp, Artificial Sequence
  chemically synthesized
gaaagcttgaagaagcttct

SEQ ID NO: 21638 - DNA, 20 bp, Artificial Sequence
  chemically synthesized
aagcttctcagtaaatacat

SEQ ID NO: 21639 - DNA, 20 bp, Artificial Sequence
  chemically synthesized
aaatacatcagctgtatttc

SEQ ID NO: 21640 - DNA, 20 bp, Artificial Sequence
  chemically synthesized
aatacatcagctgtatttcc

SEQ ID NO: 21641 - DNA, 20 bp, Artificial Sequence
  chemically synthesized
catcagctgtatttccaggt

SEQ ID NO: 21642 - DNA, 20 bp, Artificial Sequence
  chemically synthesized
cagctgtatttccaggtgag

SEQ ID NO: 21643 - DNA, 20 bp, Artificial Sequence
  chemically synthesized
gcagtacctgctgaaatgct

SEQ ID NO: 21644 - DNA, 20 bp, Artificial Sequence
  chemically synthesized
agtacctgctgaaatgctga

SEQ ID NO: 21645 - DNA, 20 bp, Artificial Sequence
  chemically synthesized
tgctgagagaacgttctgac

SEQ ID NO: 21646 - DNA, 20 bp, Artificial Sequence
  chemically synthesized
gctgagagaacgttctgact

SEQ ID NO: 21647 - DNA, 20 bp, Artificial Sequence
  chemically synthesized
tgagagaacgttctgactag

SEQ ID NO: 21648 - DNA, 20 bp, Artificial Sequence
  chemically synthesized
gagagaacgttctgactagg

SEQ ID NO: 21649 - DNA, 20 bp, Artificial Sequence
  chemically synthesized
agagaacgttctgactagga

SEQ ID NO: 21650 - DNA, 20 bp, Artificial Sequence
  chemically synthesized
acgttctgactaggagggct

SEQ ID NO: 21651 - DNA, 20 bp, Artificial Sequence
  chemically synthesized
cgttctgactaggagggctt

SEQ ID NO: 21652 - DNA, 20 bp, Artificial Sequence
  chemically synthesized
gttctgactaggagggcttg

SEQ ID NO: 21653 - DNA, 20 bp, Artificial Sequence
  chemically synthesized
ttctgactaggagggcttgg

SEQ ID NO: 21654 - DNA, 20 bp, Artificial Sequence
  chemically synthesized
ctgactaggagggcttgggg

SEQ ID NO: 21655 - DNA, 20 bp, Artificial Sequence
  chemically synthesized
ctaggagggcttgggggaga

SEQ ID NO: 21656 - DNA, 20 bp, Artificial Sequence
  chemically synthesized
aggagggcttgggggagaca

SEQ ID NO: 21657 - DNA, 20 bp, Artificial Sequence
  chemically synthesized
gggcttgggggagacagaga

SEQ ID NO: 21658 - DNA, 20 bp, Artificial Sequence
  chemically synthesized
gcttgggggagacagagaca

SEQ ID NO: 21659 - DNA, 20 bp, Artificial Sequence
  chemically synthesized
gggggagacagagacagagt

SEQ ID NO: 21660 - DNA, 20 bp, Artificial Sequence
  chemically synthesized
agagacagagttggctgttt

SEQ ID NO: 21661 - DNA, 20 bp, Artificial Sequence
  chemically synthesized
gacagagttggctgtttcag

SEQ ID NO: 21662 - DNA, 20 bp, Artificial Sequence
  chemically synthesized
ctgctatttgctttttgcct

SEQ ID NO: 21663 - DNA, 20 bp, Artificial Sequence
  chemically synthesized
gctatttgctttttgccttg

SEQ ID NO: 21664 - DNA, 20 bp, Artificial Sequence
  chemically synthesized
gccttggagattattttttc

SEQ ID NO: 21665 - DNA, 20 bp, Artificial Sequence
  chemically synthesized
ccttggagattattttttct

SEQ ID NO: 21666 - DNA, 20 bp, Artificial Sequence
  chemically synthesized
tttctgggtgtcccgatgct

SEQ ID NO: 21667 - DNA, 20 bp, Artificial Sequence
  chemically synthesized
cgatgctgagctcccacttc

SEQ ID NO: 21668 - DNA, 20 bp, Artificial Sequence
  chemically synthesized
tgctgagctcccacttcaag

SEQ ID NO: 21669 - DNA, 20 bp, Artificial Sequence
  chemically synthesized
tcccacttcaagaagaacat

SEQ ID NO: 21670 - DNA, 20 bp, Artificial Sequence
  chemically synthesized
attggtataaatttacaaac

SEQ ID NO: 21671 - DNA, 20 bp, Artificial Sequence
  chemically synthesized
ggtataaatttacaaaccag

SEQ ID NO: 21672 - DNA, 20 bp, Artificial Sequence
  chemically synthesized
ataaatttacaaaccagaag

SEQ ID NO: 21673 - DNA, 20 bp, Artificial Sequence
  chemically synthesized
atttacaaaccagaagtagt

SEQ ID NO: 21674 - DNA, 20 bp, Artificial Sequence
  chemically synthesized
ttacaaaccagaagtagtca

SEQ ID NO: 21675 - DNA, 20 bp, Artificial Sequence
  chemically synthesized
tacaaaccagaagtagtcag

SEQ ID NO: 21676 - DNA, 20 bp, Artificial Sequence
  chemically synthesized
ttgttctgttattccttctt

SEQ ID NO: 21677 - DNA, 20 bp, Artificial Sequence
  chemically synthesized
tgttctgttattccttcttt

SEQ ID NO: 21678 - DNA, 20 bp, Artificial Sequence
  chemically synthesized
ttctgttattccttctttgg

SEQ ID NO: 21679 - DNA, 20 bp, Artificial Sequence
  chemically synthesized
ctgttattccttctttggga

SEQ ID NO: 21680 - DNA, 20 bp, Artificial Sequence
  chemically synthesized
ttattccttctttgggagag

SEQ ID NO: 21681 - DNA, 20 bp, Artificial Sequence
  chemically synthesized
tattccttctttgggagagc

SEQ ID NO: 21682 - DNA, 20 bp, Artificial Sequence
  chemically synthesized
ccttctttgggagagcaggc

SEQ ID NO: 21683 - DNA, 20 bp, Artificial Sequence
  chemically synthesized
ctttgggagagcaggctggc

SEQ ID NO: 21684 - DNA, 20 bp, Artificial Sequence
  chemically synthesized
tttgggagagcaggctggcc

SEQ ID NO: 21685 - DNA, 20 bp, Artificial Sequence
  chemically synthesized
tgggagagcaggctggccag

SEQ ID NO: 21686 - DNA, 20 bp, Artificial Sequence
  chemically synthesized
gggagagcaggctggccagg

SEQ ID NO: 21687 - DNA, 20 bp, Artificial Sequence
  chemically synthesized
agagcaggctggccaggagg

SEQ ID NO: 21688 - DNA, 20 bp, Artificial Sequence
  chemically synthesized
gagcaggctggccaggagga

SEQ ID NO: 21689 - DNA, 20 bp, Artificial Sequence
  chemically synthesized
gctggccaggaggaaggttc

SEQ ID NO: 21690 - DNA, 20 bp, Artificial Sequence
  chemically synthesized
ggttcaagtgtgtcatatcc

SEQ ID NO: 21691 - DNA, 20 bp, Artificial Sequence
  chemically synthesized
gtgtgtcatatcctagcatt

SEQ ID NO: 21692 - DNA, 20 bp, Artificial Sequence
  chemically synthesized
gtcatatcctagcattcaga

SEQ ID NO: 21693 - DNA, 20 bp, Artificial Sequence
  chemically synthesized
tcatatcctagcattcagat

SEQ ID NO: 21694 - DNA, 20 bp, Artificial Sequence
  chemically synthesized
tatcctagcattcagatagg

SEQ ID NO: 21695 - DNA, 20 bp, Artificial Sequence
  chemically synthesized
ggtggcctcctctgcctttt

SEQ ID NO: 21696 - DNA, 20 bp, Artificial Sequence
  chemically synthesized
ggcctcctctgccttttcag

SEQ ID NO: 21697 - DNA, 20 bp, Artificial Sequence
  chemically synthesized
gcctcctctgccttttcagt

SEQ ID NO: 21698 - DNA, 20 bp, Artificial Sequence
  chemically synthesized
tcctctgccttttcagtggg

SEQ ID NO: 21699 - DNA, 20 bp, Artificial Sequence
  chemically synthesized
ctgccttttcagtgggtggc

SEQ ID NO: 21700 - DNA, 20 bp, Artificial Sequence
  chemically synthesized
tgccttttcagtgggtggct

SEQ ID NO: 21701 - DNA, 20 bp, Artificial Sequence
  chemically synthesized
ttttcagtgggtggctgggc

SEQ ID NO: 21702 - DNA, 20 bp, Artificial Sequence
  chemically synthesized
tttcagtgggtggctgggct

SEQ ID NO: 21703 - DNA, 20 bp, Artificial Sequence
  chemically synthesized
ctgggctgggtgaaatcttg

SEQ ID NO: 21704 - DNA, 20 bp, Artificial Sequence
  chemically synthesized
ggtgaaatcttgcagtgact

SEQ ID NO: 21705 - DNA, 20 bp, Artificial Sequence
  chemically synthesized
aaatcttgcagtgactaaga

SEQ ID NO: 21706 - DNA, 20 bp, Artificial Sequence
  chemically synthesized
aatcttgcagtgactaagaa

SEQ ID NO: 21707 - DNA, 20 bp, Artificial Sequence
  chemically synthesized
cttgcagtgactaagaaagg

SEQ ID NO: 21708 - DNA, 20 bp, Artificial Sequence
  chemically synthesized
ttgcagtgactaagaaagga

SEQ ID NO: 21709 - DNA, 20 bp, Artificial Sequence
  chemically synthesized
tgcagtgactaagaaaggaa

SEQ ID NO: 21710 - DNA, 20 bp, Artificial Sequence
  chemically synthesized
agtgactaagaaaggaaggg

SEQ ID NO: 21711 - DNA, 20 bp, Artificial Sequence
  chemically synthesized
taagaaaggaagggtggacc

SEQ ID NO: 21712 - DNA, 20 bp, Artificial Sequence
  chemically synthesized
aagaaaggaagggtggaccc

SEQ ID NO: 21713 - DNA, 20 bp, Artificial Sequence
  chemically synthesized
aaaggaagggtggacccagg

SEQ ID NO: 21714 - DNA, 20 bp, Artificial Sequence
  chemically synthesized
agggtggacccaggcagacc

SEQ ID NO: 21715 - DNA, 20 bp, Artificial Sequence
  chemically synthesized
gtggacccaggcagacccag

SEQ ID NO: 21716 - DNA, 20 bp, Artificial Sequence
  chemically synthesized
tggacccaggcagacccaga

SEQ ID NO: 21717 - DNA, 20 bp, Artificial Sequence
  chemically synthesized
cattgatcctgcatgcgtgc

SEQ ID NO: 21718 - DNA, 20 bp, Artificial Sequence
  chemically synthesized
tgatcctgcatgcgtgccgg

SEQ ID NO: 21719 - DNA, 20 bp, Artificial Sequence
  chemically synthesized
gatcctgcatgcgtgccggt

SEQ ID NO: 21720 - DNA, 20 bp, Artificial Sequence
  chemically synthesized
cctgcatgcgtgccggtagg

SEQ ID NO: 21721 - DNA, 20 bp, Artificial Sequence
  chemically synthesized
gcatgcgtgccggtaggcag

SEQ ID NO: 21722 - DNA, 20 bp, Artificial Sequence
  chemically synthesized
gtgccggtaggcagcagttc

SEQ ID NO: 21723 - DNA, 20 bp, Artificial Sequence
  chemically synthesized
ggcagcagttctggaattgc

SEQ ID NO: 21724 - DNA, 20 bp, Artificial Sequence
  chemically synthesized
gcagcagttctggaattgct

SEQ ID NO: 21725 - DNA, 20 bp, Artificial Sequence
  chemically synthesized
cagcagttctggaattgctg

SEQ ID NO: 21726 - DNA, 20 bp, Artificial Sequence
  chemically synthesized
tggaattgctggggaaacca

SEQ ID NO: 21727 - DNA, 20 bp, Artificial Sequence
  chemically synthesized
ttgctggggaaaccacagtg

SEQ ID NO: 21728 - DNA, 20 bp, Artificial Sequence
  chemically synthesized
gggaaaccacagtgcagcat

SEQ ID NO: 21729 - DNA, 20 bp, Artificial Sequence
  chemically synthesized
ccacagtgcagcatgagccc

SEQ ID NO: 21730 - DNA, 20 bp, Artificial Sequence
  chemically synthesized
cacagtgcagcatgagccct

SEQ ID NO: 21731 - DNA, 20 bp, Artificial Sequence
  chemically synthesized
acagtgcagcatgagccctg

SEQ ID NO: 21732 - DNA, 20 bp, Artificial Sequence
  chemically synthesized
ggggcctgctctcttgtgcc

SEQ ID NO: 21733 - DNA, 20 bp, Artificial Sequence
  chemically synthesized
ctgctctcttgtgcccggct

SEQ ID NO: 21734 - DNA, 20 bp, Artificial Sequence
  chemically synthesized
ctgagcatctctgttctgtt

SEQ ID NO: 21735 - DNA, 20 bp, Artificial Sequence
  chemically synthesized
tgagcatctctgttctgttt

SEQ ID NO: 21736 - DNA, 20 bp, Artificial Sequence
  chemically synthesized
gagcatctctgttctgtttg

SEQ ID NO: 21737 - DNA, 20 bp, Artificial Sequence
  chemically synthesized
gcatctctgttctgtttggg

SEQ ID NO: 21738 - DNA, 20 bp, Artificial Sequence
  chemically synthesized
ttctgtttggggagtcctgc

SEQ ID NO: 21739 - DNA, 20 bp, Artificial Sequence
  chemically synthesized
tctgtttggggagtcctgcc

SEQ ID NO: 21740 - DNA, 20 bp, Artificial Sequence
  chemically synthesized
tttggggagtcctgccaggc

SEQ ID NO: 21741 - DNA, 20 bp, Artificial Sequence
  chemically synthesized
gagtcctgccaggcaagtgt

SEQ ID NO: 21742 - DNA, 20 bp, Artificial Sequence
  chemically synthesized
tgccaggcaagtgtgagtca

SEQ ID NO: 21743 - DNA, 20 bp, Artificial Sequence
  chemically synthesized
ccaggcaagtgtgagtcaaa

SEQ ID NO: 21744 - DNA, 20 bp, Artificial Sequence
  chemically synthesized
caggcaagtgtgagtcaaag

SEQ ID NO: 21745 - DNA, 20 bp, Artificial Sequence
  chemically synthesized
ggcaagtgtgagtcaaagag

SEQ ID NO: 21746 - DNA, 20 bp, Artificial Sequence
  chemically synthesized
gtgtgagtcaaagaggagac

SEQ ID NO: 21747 - DNA, 20 bp, Artificial Sequence
  chemically synthesized
tgtgagtcaaagaggagacc

SEQ ID NO: 21748 - DNA, 20 bp, Artificial Sequence
  chemically synthesized
gtgagtcaaagaggagacca

SEQ ID NO: 21749 - DNA, 20 bp, Artificial Sequence
  chemically synthesized
gagaccagggccctatgtca

SEQ ID NO: 21750 - DNA, 20 bp, Artificial Sequence
  chemically synthesized
agaccagggccctatgtcat

SEQ ID NO: 21751 - DNA, 20 bp, Artificial Sequence
  chemically synthesized
gaccagggccctatgtcatg

SEQ ID NO: 21752 - DNA, 20 bp, Artificial Sequence
  chemically synthesized
accagggccctatgtcatgg

SEQ ID NO: 21753 - DNA, 20 bp, Artificial Sequence
  chemically synthesized
agggccctatgtcatggggg

SEQ ID NO: 21754 - DNA, 20 bp, Artificial Sequence
  chemically synthesized
ctatgtcatgggggcagtgt

SEQ ID NO: 21755 - DNA, 20 bp, Artificial Sequence
  chemically synthesized
tcatgggggcagtgtcggct

SEQ ID NO: 21756 - DNA, 20 bp, Artificial Sequence
  chemically synthesized
tgggggcagtgtcggctgag

SEQ ID NO: 21757 - DNA, 20 bp, Artificial Sequence
  chemically synthesized
gtcggctgagtggtactctt

SEQ ID NO: 21758 - DNA, 20 bp, Artificial Sequence
  chemically synthesized
cggctgagtggtactcttca

SEQ ID NO: 21759 - DNA, 20 bp, Artificial Sequence
  chemically synthesized
gtggtactcttcagagttct

SEQ ID NO: 21760 - DNA, 20 bp, Artificial Sequence
  chemically synthesized
ttctcagaatgtgccgctcg

SEQ ID NO: 21761 - DNA, 20 bp, Artificial Sequence
  chemically synthesized
atgtgccgctcgaagccatg

SEQ ID NO: 21762 - DNA, 20 bp, Artificial Sequence
  chemically synthesized
tgtgccgctcgaagccatgt

SEQ ID NO: 21763 - DNA, 20 bp, Artificial Sequence
  chemically synthesized
ctcgaagccatgtaggcttc

SEQ ID NO: 21764 - DNA, 20 bp, Artificial Sequence
  chemically synthesized
gaagccatgtaggcttccag

SEQ ID NO: 21765 - DNA, 20 bp, Artificial Sequence
  chemically synthesized
aagccatgtaggcttccagc

SEQ ID NO: 21766 - DNA, 20 bp, Artificial Sequence
  chemically synthesized
gtaggcttccagcaggcttc

SEQ ID NO: 21767 - DNA, 20 bp, Artificial Sequence
  chemically synthesized
ggcttccagcaggcttctag

SEQ ID NO: 21768 - DNA, 20 bp, Artificial Sequence
  chemically synthesized
tccagcaggcttctagcaga

SEQ ID NO: 21769 - DNA, 20 bp, Artificial Sequence
  chemically synthesized
ccagcaggcttctagcagat

SEQ ID NO: 21770 - DNA, 20 bp, Artificial Sequence
  chemically synthesized
cagcaggcttctagcagatg

SEQ ID NO: 21771 - DNA, 20 bp, Artificial Sequence
  chemically synthesized
gcttctagcagatggggttt

SEQ ID NO: 21772 - DNA, 20 bp, Artificial Sequence
  chemically synthesized
ctagcagatggggttttggc

SEQ ID NO: 21773 - DNA, 20 bp, Artificial Sequence
  chemically synthesized
tagcagatggggttttggct

SEQ ID NO: 21774 - DNA, 20 bp, Artificial Sequence
  chemically synthesized
agatggggttttggctgggt

SEQ ID NO: 21775 - DNA, 20 bp, Artificial Sequence
  chemically synthesized
gatggggttttggctgggtt

SEQ ID NO: 21776 - DNA, 20 bp, Artificial Sequence
  chemically synthesized
ctgggttgggccttaatact

SEQ ID NO: 21777 - DNA, 20 bp, Artificial Sequence
  chemically synthesized
ttcttgctttcttttttttc

SEQ ID NO: 21778 - DNA, 20 bp, Artificial Sequence
  chemically synthesized
ttttttttctagaatcaacg

SEQ ID NO: 21779 - DNA, 20 bp, Artificial Sequence
  chemically synthesized
tttttctagaatcaacgaag

SEQ ID NO: 21780 - DNA, 20 bp, Artificial Sequence
  chemically synthesized
agcagccaataaccaatttt

SEQ ID NO: 21781 - DNA, 20 bp, Artificial Sequence
  chemically synthesized
gcagccaataaccaattttc

SEQ ID NO: 21782 - DNA, 20 bp, Artificial Sequence
  chemically synthesized
agccaataaccaattttcag

SEQ ID NO: 21783 - DNA, 20 bp, Artificial Sequence
  chemically synthesized
gccaataaccaattttcagg

SEQ ID NO: 21784 - DNA, 20 bp, Artificial Sequence
  chemically synthesized
taaccaattttcaggaggtt

SEQ ID NO: 21785 - DNA, 20 bp, Artificial Sequence
  chemically synthesized
aaaattttattaaaataata

SEQ ID NO: 21786 - DNA, 20 bp, Artificial Sequence
  chemically synthesized
aaataataaagctctgacaa

SEQ ID NO: 21787 - DNA, 20 bp, Artificial Sequence
  chemically synthesized
taaagctctgacaaaagatc

SEQ ID NO: 21788 - DNA, 20 bp, Artificial Sequence
  chemically synthesized
atccagaatattgtcccttg

SEQ ID NO: 21789 - DNA, 20 bp, Artificial Sequence
  chemically synthesized
cagaatattgtcccttgcag

SEQ ID NO: 21790 - DNA, 20 bp, Artificial Sequence
  chemically synthesized
agaatattgtcccttgcagt

SEQ ID NO: 21791 - DNA, 20 bp, Artificial Sequence
  chemically synthesized
ttgtcccttgcagtgggctt

SEQ ID NO: 21792 - DNA, 20 bp, Artificial Sequence
  chemically synthesized
tgtcccttgcagtgggcttt

SEQ ID NO: 21793 - DNA, 20 bp, Artificial Sequence
  chemically synthesized
gtcccttgcagtgggcttta

SEQ ID NO: 21794 - DNA, 20 bp, Artificial Sequence
  chemically synthesized
tgggctttagggttgcatct

SEQ ID NO: 21795 - DNA, 20 bp, Artificial Sequence
  chemically synthesized
atcttggctcctaaatcttc

SEQ ID NO: 21796 - DNA, 20 bp, Artificial Sequence
  chemically synthesized
tcttggctcctaaatcttct

SEQ ID NO: 21797 - DNA, 20 bp, Artificial Sequence
  chemically synthesized
tggctcctaaatcttctagg

SEQ ID NO: 21798 - DNA, 20 bp, Artificial Sequence
  chemically synthesized
ggctcctaaatcttctaggc

SEQ ID NO: 21799 - DNA, 20 bp, Artificial Sequence
  chemically synthesized
atcttctaggcgggttaaat

SEQ ID NO: 21800 - DNA, 20 bp, Artificial Sequence
  chemically synthesized
cacaaaatgtcacatttccc

SEQ ID NO: 21801 - DNA, 20 bp, Artificial Sequence
  chemically synthesized
aaaatgtcacatttccctgg

SEQ ID NO: 21802 - DNA, 20 bp, Artificial Sequence
  chemically synthesized
tcacatttccctggcagcta

SEQ ID NO: 21803 - DNA, 20 bp, Artificial Sequence
  chemically synthesized
cacatttccctggcagctat

SEQ ID NO: 21804 - DNA, 20 bp, Artificial Sequence
  chemically synthesized
ccctggcagctataggtttc

SEQ ID NO: 21805 - DNA, 20 bp, Artificial Sequence
  chemically synthesized
cctggcagctataggtttcc

SEQ ID NO: 21806 - DNA, 20 bp, Artificial Sequence
  chemically synthesized
tggcagctataggtttccag

SEQ ID NO: 21807 - DNA, 20 bp, Artificial Sequence
  chemically synthesized
ggcagctataggtttccagg

SEQ ID NO: 21808 - DNA, 20 bp, Artificial Sequence
  chemically synthesized
gcagctataggtttccagga

SEQ ID NO: 21809 - DNA, 20 bp, Artificial Sequence
  chemically synthesized
aggtttccaggagggtgaac

SEQ ID NO: 21810 - DNA, 20 bp, Artificial Sequence
  chemically synthesized
ggtttccaggagggtgaaca

SEQ ID NO: 21811 - DNA, 20 bp, Artificial Sequence
  chemically synthesized
gtttccaggagggtgaacaa

SEQ ID NO: 21812 - DNA, 20 bp, Artificial Sequence
  chemically synthesized
gagggtgaacaagggccatc

SEQ ID NO: 21813 - DNA, 20 bp, Artificial Sequence
  chemically synthesized
agggtgaacaagggccatct

SEQ ID NO: 21814 - DNA, 20 bp, Artificial Sequence
  chemically synthesized
gggccatctgggtgtttgct

SEQ ID NO: 21815 - DNA, 20 bp, Artificial Sequence
  chemically synthesized
ggccatctgggtgtttgctg

SEQ ID NO: 21816 - DNA, 20 bp, Artificial Sequence
  chemically synthesized
gccatctgggtgtttgctga

SEQ ID NO: 21817 - DNA, 20 bp, Artificial Sequence
  chemically synthesized
ggtgtttgctgagggcttct

SEQ ID NO: 21818 - DNA, 20 bp, Artificial Sequence
  chemically synthesized
tgctgagggcttctcagtcc

SEQ ID NO: 21819 - DNA, 20 bp, Artificial Sequence
  chemically synthesized
gctgagggcttctcagtcct

SEQ ID NO: 21820 - DNA, 20 bp, Artificial Sequence
  chemically synthesized
gagggcttctcagtcctggg

SEQ ID NO: 21821 - DNA, 20 bp, Artificial Sequence
  chemically synthesized
agggcttctcagtcctgggt

SEQ ID NO: 21822 - DNA, 20 bp, Artificial Sequence
  chemically synthesized
cagtcctgggtaggaactgc

SEQ ID NO: 21823 - DNA, 20 bp, Artificial Sequence
  chemically synthesized
agtcctgggtaggaactgct

SEQ ID NO: 21824 - DNA, 20 bp, Artificial Sequence
  chemically synthesized
tgggtaggaactgctgggtg

SEQ ID NO: 21825 - DNA, 20 bp, Artificial Sequence
  chemically synthesized
tgctgggtgtggaaaccacc

SEQ ID NO: 21826 - DNA, 20 bp, Artificial Sequence
  chemically synthesized
gctgggtgtggaaaccacca

SEQ ID NO: 21827 - DNA, 20 bp, Artificial Sequence
  chemically synthesized
ggaaaccaccaaggctttgt

SEQ ID NO: 21828 - DNA, 20 bp, Artificial Sequence
  chemically synthesized
ccaaggctttgtaagcctga

SEQ ID NO: 21829 - DNA, 20 bp, Artificial Sequence
  chemically synthesized
aaggctttgtaagcctgaaa

SEQ ID NO: 21830 - DNA, 20 bp, Artificial Sequence
  chemically synthesized
tgtaagcctgaaagagccac

SEQ ID NO: 21831 - DNA, 20 bp, Artificial Sequence
  chemically synthesized
cctgaaagagccactggtat

SEQ ID NO: 21832 - DNA, 20 bp, Artificial Sequence
  chemically synthesized
ctgaaagagccactggtatt

SEQ ID NO: 21833 - DNA, 20 bp, Artificial Sequence
  chemically synthesized
gaaagagccactggtattgg

SEQ ID NO: 21834 - DNA, 20 bp, Artificial Sequence
  chemically synthesized
agccactggtattgggagct

SEQ ID NO: 21835 - DNA, 20 bp, Artificial Sequence
  chemically synthesized
ttgggagcttggtctgcact

SEQ ID NO: 21836 - DNA, 20 bp, Artificial Sequence
  chemically synthesized
cttggtctgcactcagacct

SEQ ID NO: 21837 - DNA, 20 bp, Artificial Sequence
  chemically synthesized
agcgccacacattattttcc

SEQ ID NO: 21838 - DNA, 20 bp, Artificial Sequence
  chemically synthesized
acacattattttcccagatt

SEQ ID NO: 21839 - DNA, 20 bp, Artificial Sequence
  chemically synthesized
cacattattttcccagattt

SEQ ID NO: 21840 - DNA, 20 bp, Artificial Sequence
  chemically synthesized
cccagatttgggcaatctaa

SEQ ID NO: 21841 - DNA, 20 bp, Artificial Sequence
  chemically synthesized
gatttgggcaatctaatgga

SEQ ID NO: 21842 - DNA, 20 bp, Artificial Sequence
  chemically synthesized
atttgggcaatctaatggat

SEQ ID NO: 21843 - DNA, 20 bp, Artificial Sequence
  chemically synthesized
ttgggcaatctaatggatag

SEQ ID NO: 21844 - DNA, 20 bp, Artificial Sequence
  chemically synthesized
tgggcaatctaatggatagg

SEQ ID NO: 21845 - DNA, 20 bp, Artificial Sequence
  chemically synthesized
gggcaatctaatggatagga

SEQ ID NO: 21846 - DNA, 20 bp, Artificial Sequence
  chemically synthesized
gcaatctaatggataggagg

SEQ ID NO: 21847 - DNA, 20 bp, Artificial Sequence
  chemically synthesized
caatctaatggataggaggg

SEQ ID NO: 21848 - DNA, 20 bp, Artificial Sequence
  chemically synthesized
aatctaatggataggaggga

SEQ ID NO: 21849 - DNA, 20 bp, Artificial Sequence
  chemically synthesized
ggttatgccccatctgtgaa

SEQ ID NO: 21850 - DNA, 20 bp, Artificial Sequence
  chemically synthesized
gttatgccccatctgtgaat

SEQ ID NO: 21851 - DNA, 20 bp, Artificial Sequence
  chemically synthesized
atgccccatctgtgaatagg

SEQ ID NO: 21852 - DNA, 20 bp, Artificial Sequence
  chemically synthesized
gccccatctgtgaataggtg

SEQ ID NO: 21853 - DNA, 20 bp, Artificial Sequence
  chemically synthesized
ccccatctgtgaataggtgg

SEQ ID NO: 21854 - DNA, 20 bp, Artificial Sequence
  chemically synthesized
ccatctgtgaataggtggag

SEQ ID NO: 21855 - DNA, 20 bp, Artificial Sequence
  chemically synthesized
atctgtgaataggtggagga

SEQ ID NO: 21856 - DNA, 20 bp, Artificial Sequence
  chemically synthesized
tctgtgaataggtggaggag

SEQ ID NO: 21857 - DNA, 20 bp, Artificial Sequence
  chemically synthesized
ctgtgaataggtggaggaga

SEQ ID NO: 21858 - DNA, 20 bp, Artificial Sequence
  chemically synthesized
aataggtggaggagagggtc

SEQ ID NO: 21859 - DNA, 20 bp, Artificial Sequence
  chemically synthesized
taggtggaggagagggtcca

SEQ ID NO: 21860 - DNA, 20 bp, Artificial Sequence
  chemically synthesized
gggtccagagaaaattgttg

SEQ ID NO: 21861 - DNA, 20 bp, Artificial Sequence
  chemically synthesized
gagaaaattgttgcagtgct

SEQ ID NO: 21862 - DNA, 20 bp, Artificial Sequence
  chemically synthesized
gaaaattgttgcagtgctca

SEQ ID NO: 21863 - DNA, 20 bp, Artificial Sequence
  chemically synthesized
aaaattgttgcagtgctcag

SEQ ID NO: 21864 - DNA, 20 bp, Artificial Sequence
  chemically synthesized
attgttgcagtgctcagagg

SEQ ID NO: 21865 - DNA, 20 bp, Artificial Sequence
  chemically synthesized
gcagtgctcagaggaagcaa

SEQ ID NO: 21866 - DNA, 20 bp, Artificial Sequence
  chemically synthesized
agcaatagcctactgtcttc

SEQ ID NO: 21867 - DNA, 20 bp, Artificial Sequence
  chemically synthesized
gcaatagcctactgtcttcc

SEQ ID NO: 21868 - DNA, 20 bp, Artificial Sequence
  chemically synthesized
caatagcctactgtcttcca

SEQ ID NO: 21869 - DNA, 20 bp, Artificial Sequence
  chemically synthesized
ctgtcttccagggacatgtc

SEQ ID NO: 21870 - DNA, 20 bp, Artificial Sequence
  chemically synthesized
ccagggacatgtctggctcc

SEQ ID NO: 21871 - DNA, 20 bp, Artificial Sequence
  chemically synthesized
tggctcctggaatgcctgtc

SEQ ID NO: 21872 - DNA, 20 bp, Artificial Sequence
  chemically synthesized
ggctcctggaatgcctgtcc

SEQ ID NO: 21873 - DNA, 20 bp, Artificial Sequence
  chemically synthesized
tggaatgcctgtccaggctg

SEQ ID NO: 21874 - DNA, 20 bp, Artificial Sequence
  chemically synthesized
aatgcctgtccaggctgcgg

SEQ ID NO: 21875 - DNA, 20 bp, Artificial Sequence
  chemically synthesized
atgcctgtccaggctgcggt

SEQ ID NO: 21876 - DNA, 20 bp, Artificial Sequence
  chemically synthesized
cctgtccaggctgcggtggg

SEQ ID NO: 21877 - DNA, 20 bp, Artificial Sequence
  chemically synthesized
ccaggctgcggtgggtggca

SEQ ID NO: 21878 - DNA, 20 bp, Artificial Sequence
  chemically synthesized
caggctgcggtgggtggcat

SEQ ID NO: 21879 - DNA, 20 bp, Artificial Sequence
  chemically synthesized
ctgcggtgggtggcatgggt

SEQ ID NO: 21880 - DNA, 20 bp, Artificial Sequence
  chemically synthesized
tgcggtgggtggcatgggta

SEQ ID NO: 21881 - DNA, 20 bp, Artificial Sequence
  chemically synthesized
gcggtgggtggcatgggtaa

SEQ ID NO: 21882 - DNA, 20 bp, Artificial Sequence
  chemically synthesized
gggtaagggtttttaataaa

SEQ ID NO: 21883 - DNA, 20 bp, Artificial Sequence
  chemically synthesized
taataaaaagtcacaatgcc

SEQ ID NO: 21884 - DNA, 20 bp, Artificial Sequence
  chemically synthesized
ataaaaagtcacaatgcctg

SEQ ID NO: 21885 - DNA, 20 bp, Artificial Sequence
  chemically synthesized
aaaagtcacaatgcctggag

SEQ ID NO: 21886 - DNA, 20 bp, Artificial Sequence
  chemically synthesized
gtcacaatgcctggagaagt

SEQ ID NO: 21887 - DNA, 20 bp, Artificial Sequence
  chemically synthesized
tcacaatgcctggagaagtg

SEQ ID NO: 21888 - DNA, 20 bp, Artificial Sequence
  chemically synthesized
tggagaagtgaggctccttg

SEQ ID NO: 21889 - DNA, 20 bp, Artificial Sequence
  chemically synthesized
gccacctgccttttctgtct

SEQ ID NO: 21890 - DNA, 20 bp, Artificial Sequence
  chemically synthesized
ccacctgccttttctgtctt

SEQ ID NO: 21891 - DNA, 20 bp, Artificial Sequence
  chemically synthesized
cttttctgtcttgggtctcc

SEQ ID NO: 21892 - DNA, 20 bp, Artificial Sequence
  chemically synthesized
tctgtcttgggtctcctggt

SEQ ID NO: 21893 - DNA, 20 bp, Artificial Sequence
  chemically synthesized
ctcctggttggaccccattc

SEQ ID NO: 21894 - DNA, 20 bp, Artificial Sequence
  chemically synthesized
ccccattctggctttccacc

SEQ ID NO: 21895 - DNA, 20 bp, Artificial Sequence
  chemically synthesized
attctggctttccacctggt

SEQ ID NO: 21896 - DNA, 20 bp, Artificial Sequence
  chemically synthesized
tctggctttccacctggtca

SEQ ID NO: 21897 - DNA, 20 bp, Artificial Sequence
  chemically synthesized
ccacctggtcagagcctcct

SEQ ID NO: 21898 - DNA, 20 bp, Artificial Sequence
  chemically synthesized
cacctggtcagagcctcctg

SEQ ID NO: 21899 - DNA, 20 bp, Artificial Sequence
  chemically synthesized
gtcagagcctcctgaggctg

SEQ ID NO: 21900 - DNA, 20 bp, Artificial Sequence
  chemically synthesized
agcctcctgaggctgcagaa

SEQ ID NO: 21901 - DNA, 20 bp, Artificial Sequence
  chemically synthesized
gcctcctgaggctgcagaat

SEQ ID NO: 21902 - DNA, 20 bp, Artificial Sequence
  chemically synthesized
cctcctgaggctgcagaatg

SEQ ID NO: 21903 - DNA, 20 bp, Artificial Sequence
  chemically synthesized
agaatggggctaacatgatc

SEQ ID NO: 21904 - DNA, 20 bp, Artificial Sequence
  chemically synthesized
gaatggggctaacatgatca

SEQ ID NO: 21905 - DNA, 20 bp, Artificial Sequence
  chemically synthesized
aatggggctaacatgatcaa

SEQ ID NO: 21906 - DNA, 20 bp, Artificial Sequence
  chemically synthesized
taacatgatcaagggtgatg

SEQ ID NO: 21907 - DNA, 20 bp, Artificial Sequence
  chemically synthesized
gtgatgtggcttctccatct

SEQ ID NO: 21908 - DNA, 20 bp, Artificial Sequence
  chemically synthesized
tgatgtggcttctccatctt

SEQ ID NO: 21909 - DNA, 20 bp, Artificial Sequence
  chemically synthesized
tggcttctccatcttgggac

SEQ ID NO: 21910 - DNA, 20 bp, Artificial Sequence
  chemically synthesized
ggcttctccatcttgggact

SEQ ID NO: 21911 - DNA, 20 bp, Artificial Sequence
  chemically synthesized
cttctccatcttgggactag

SEQ ID NO: 21912 - DNA, 20 bp, Artificial Sequence
  chemically synthesized
atcttgggactaggagtgac

SEQ ID NO: 21913 - DNA, 20 bp, Artificial Sequence
  chemically synthesized
tcttgggactaggagtgacc

SEQ ID NO: 21914 - DNA, 20 bp, Artificial Sequence
  chemically synthesized
ggactaggagtgaccaggtt

SEQ ID NO: 21915 - DNA, 20 bp, Artificial Sequence
  chemically synthesized
actaggagtgaccaggttta

SEQ ID NO: 21916 - DNA, 20 bp, Artificial Sequence
  chemically synthesized
aggagtgaccaggtttagag

SEQ ID NO: 21917 - DNA, 20 bp, Artificial Sequence
  chemically synthesized
ggagtgaccaggtttagaga

SEQ ID NO: 21918 - DNA, 20 bp, Artificial Sequence
  chemically synthesized
gtgaccaggtttagagaagg

SEQ ID NO: 21919 - DNA, 20 bp, Artificial Sequence
  chemically synthesized
ctcattcctgctcccattgc

SEQ ID NO: 21920 - DNA, 20 bp, Artificial Sequence
  chemically synthesized
tcattcctgctcccattgcc

SEQ ID NO: 21921 - DNA, 20 bp, Artificial Sequence
  chemically synthesized
tcccattgccaggacaaatg

SEQ ID NO: 21922 - DNA, 20 bp, Artificial Sequence
  chemically synthesized
ccattgccaggacaaatgca

SEQ ID NO: 21923 - DNA, 20 bp, Artificial Sequence
  chemically synthesized
ttgccaggacaaatgcagag

SEQ ID NO: 21924 - DNA, 20 bp, Artificial Sequence
  chemically synthesized
ggacaaatgcagagtggatc

SEQ ID NO: 21925 - DNA, 20 bp, Artificial Sequence
  chemically synthesized
gacaaatgcagagtggatct

SEQ ID NO: 21926 - DNA, 20 bp, Artificial Sequence
  chemically synthesized
ctgggtctgtcccttccaca

SEQ ID NO: 21927 - DNA, 20 bp, Artificial Sequence
  chemically synthesized
caacacattccgtgtgtatt

SEQ ID NO: 21928 - DNA, 20 bp, Artificial Sequence
  chemically synthesized
ttccgtgtgtattaagatga

SEQ ID NO: 21929 - DNA, 20 bp, Artificial Sequence
  chemically synthesized
tattaagatgacagacacgt

SEQ ID NO: 21930 - DNA, 20 bp, Artificial Sequence
  chemically synthesized
agacacgttggttttgctcc

SEQ ID NO: 21931 - DNA, 20 bp, Artificial Sequence
  chemically synthesized
acgttggttttgctccaagc

SEQ ID NO: 21932 - DNA, 20 bp, Artificial Sequence
  chemically synthesized
ttggttttgctccaagccag

SEQ ID NO: 21933 - DNA, 20 bp, Artificial Sequence
  chemically synthesized
caagccagtagccatccccc

SEQ ID NO: 21934 - DNA, 20 bp, Artificial Sequence
  chemically synthesized
ccagtagccatccccctaga

SEQ ID NO: 21935 - DNA, 20 bp, Artificial Sequence
  chemically synthesized
agccatccccctagacagcc

SEQ ID NO: 21936 - DNA, 20 bp, Artificial Sequence
  chemically synthesized
gccatccccctagacagccc

SEQ ID NO: 21937 - DNA, 20 bp, Artificial Sequence
  chemically synthesized
ctagacagcccaggccttaa

SEQ ID NO: 21938 - DNA, 20 bp, Artificial Sequence
  chemically synthesized
cagcccaggccttaaaagac

SEQ ID NO: 21939 - DNA, 20 bp, Artificial Sequence
  chemically synthesized
agcccaggccttaaaagaca

SEQ ID NO: 21940 - DNA, 20 bp, Artificial Sequence
  chemically synthesized
cccaggccttaaaagacaag

SEQ ID NO: 21941 - DNA, 20 bp, Artificial Sequence
  chemically synthesized
ccaggccttaaaagacaagg

SEQ ID NO: 21942 - DNA, 20 bp, Artificial Sequence
  chemically synthesized
ttaaaagacaaggaggtgtt

SEQ ID NO: 21943 - DNA, 20 bp, Artificial Sequence
  chemically synthesized
agacaaggaggtgtttggac

SEQ ID NO: 21944 - DNA, 20 bp, Artificial Sequence
  chemically synthesized
acaaggaggtgtttggacaa

SEQ ID NO: 21945 - DNA, 20 bp, Artificial Sequence
  chemically synthesized
ggaggtgtttggacaagagc

SEQ ID NO: 21946 - DNA, 20 bp, Artificial Sequence
  chemically synthesized
gtgtttggacaagagcaaga

SEQ ID NO: 21947 - DNA, 20 bp, Artificial Sequence
  chemically synthesized
tttggacaagagcaagaaag

SEQ ID NO: 21948 - DNA, 20 bp, Artificial Sequence
  chemically synthesized
acaagagcaagaaagaagtc

SEQ ID NO: 21949 - DNA, 20 bp, Artificial Sequence
  chemically synthesized
agaagtctggctgtgtcttc

SEQ ID NO: 21950 - DNA, 20 bp, Artificial Sequence
  chemically synthesized
gaagtctggctgtgtcttct

SEQ ID NO: 21951 - DNA, 20 bp, Artificial Sequence
  chemically synthesized
agtctggctgtgtcttctgg

SEQ ID NO: 21952 - DNA, 20 bp, Artificial Sequence
  chemically synthesized
gctgtgtcttctgggagccc

SEQ ID NO: 21953 - DNA, 20 bp, Artificial Sequence
  chemically synthesized
tgtcttctgggagccccaga

SEQ ID NO: 21954 - DNA, 20 bp, Artificial Sequence
  chemically synthesized
tctgggagccccagacagac

SEQ ID NO: 21955 - DNA, 20 bp, Artificial Sequence
  chemically synthesized
agaccagtgttctttctcac

SEQ ID NO: 21956 - DNA, 20 bp, Artificial Sequence
  chemically synthesized
tcactggttcactccttccc

SEQ ID NO: 21957 - DNA, 20 bp, Artificial Sequence
  chemically synthesized
ccagctcattttacccactc

SEQ ID NO: 21958 - DNA, 20 bp, Artificial Sequence
  chemically synthesized
cactcgagacttgattctct

SEQ ID NO: 21959 - DNA, 20 bp, Artificial Sequence
  chemically synthesized
ctcgagacttgattctctta

SEQ ID NO: 21960 - DNA, 20 bp, Artificial Sequence
  chemically synthesized
acttgattctcttagagatt

SEQ ID NO: 21961 - DNA, 20 bp, Artificial Sequence
  chemically synthesized
tagagattaagtacctcccc

SEQ ID NO: 21962 - DNA, 20 bp, Artificial Sequence
  chemically synthesized
aagtacctcccctggtcaca

SEQ ID NO: 21963 - DNA, 20 bp, Artificial Sequence
  chemically synthesized
tcccctggtcacatagtttc

SEQ ID NO: 21964 - DNA, 20 bp, Artificial Sequence
  chemically synthesized
cccctggtcacatagtttct

SEQ ID NO: 21965 - DNA, 20 bp, Artificial Sequence
  chemically synthesized
gtcacatagtttctgggtga

SEQ ID NO: 21966 - DNA, 20 bp, Artificial Sequence
  chemically synthesized
tcacatagtttctgggtgac

SEQ ID NO: 21967 - DNA, 20 bp, Artificial Sequence
  chemically synthesized
tagtttctgggtgacaggac

SEQ ID NO: 21968 - DNA, 20 bp, Artificial Sequence
  chemically synthesized
atttcttttgatcaccaatt

SEQ ID NO: 21969 - DNA, 20 bp, Artificial Sequence
  chemically synthesized
ctctactgtgctaccatgat

SEQ ID NO: 21970 - DNA, 20 bp, Artificial Sequence
  chemically synthesized
ctactgtgctaccatgatca

SEQ ID NO: 21971 - DNA, 20 bp, Artificial Sequence
  chemically synthesized
tactgtgctaccatgatcag

SEQ ID NO: 21972 - DNA, 20 bp, Artificial Sequence
  chemically synthesized
tctctgatgatgattgaaaa

SEQ ID NO: 21973 - DNA, 20 bp, Artificial Sequence
  chemically synthesized
aacagttttattaacatatc

SEQ ID NO: 21974 - DNA, 20 bp, Artificial Sequence
  chemically synthesized
atcaagaacattacaacaca

SEQ ID NO: 21975 - DNA, 20 bp, Artificial Sequence
  chemically synthesized
caagaacattacaacacaaa

SEQ ID NO: 21976 - DNA, 20 bp, Artificial Sequence
  chemically synthesized
attacaacacaaagagtttc

SEQ ID NO: 21977 - DNA, 20 bp, Artificial Sequence
  chemically synthesized
tttaaaaaatctcttttcac

SEQ ID NO: 21978 - DNA, 20 bp, Artificial Sequence
  chemically synthesized
ttaaattcatattttaatat

SEQ ID NO: 21979 - DNA, 20 bp, Artificial Sequence
  chemically synthesized
attcatattttaatattaga

SEQ ID NO: 21980 - DNA, 20 bp, Artificial Sequence
  chemically synthesized
tattttaatattagaaagca

SEQ ID NO: 21981 - DNA, 20 bp, Artificial Sequence
  chemically synthesized
attttaatattagaaagcat

SEQ ID NO: 21982 - DNA, 20 bp, Artificial Sequence
  chemically synthesized
aatattagaaagcatgggat

SEQ ID NO: 21983 - DNA, 20 bp, Artificial Sequence
  chemically synthesized
atattagaaagcatgggatt

SEQ ID NO: 21984 - DNA, 20 bp, Artificial Sequence
  chemically synthesized
ttgggtgtgaacactgcttt

SEQ ID NO: 21985 - DNA, 20 bp, Artificial Sequence
  chemically synthesized
tgaacactgcttttggatgt

SEQ ID NO: 21986 - DNA, 20 bp, Artificial Sequence
  chemically synthesized
aacactgcttttggatgttg

SEQ ID NO: 21987 - DNA, 20 bp, Artificial Sequence
  chemically synthesized
acactgcttttggatgttgg

SEQ ID NO: 21988 - DNA, 20 bp, Artificial Sequence
  chemically synthesized
ctgcttttggatgttggagg

SEQ ID NO: 21989 - DNA, 20 bp, Artificial Sequence
  chemically synthesized
tttggatgttggaggaagat

SEQ ID NO: 21990 - DNA, 20 bp, Artificial Sequence
  chemically synthesized
tggatgttggaggaagataa

SEQ ID NO: 21991 - DNA, 20 bp, Artificial Sequence
  chemically synthesized
atgttggaggaagataagag

SEQ ID NO: 21992 - DNA, 20 bp, Artificial Sequence
  chemically synthesized
tgttggaggaagataagaga

SEQ ID NO: 21993 - DNA, 20 bp, Artificial Sequence
  chemically synthesized
tggaggaagataagagaagg

SEQ ID NO: 21994 - DNA, 20 bp, Artificial Sequence
  chemically synthesized
ggaagataagagaaggaagc

SEQ ID NO: 21995 - DNA, 20 bp, Artificial Sequence
  chemically synthesized
aaggaagctggctctttctt

SEQ ID NO: 21996 - DNA, 20 bp, Artificial Sequence
  chemically synthesized
aggaagctggctctttcttt

SEQ ID NO: 21997 - DNA, 20 bp, Artificial Sequence
  chemically synthesized
gaagctggctctttctttag

SEQ ID NO: 21998 - DNA, 20 bp, Artificial Sequence
  chemically synthesized
tttctttaggagcaatacct

SEQ ID NO: 21999 - DNA, 20 bp, Artificial Sequence
  chemically synthesized
aggagcaatacctgagatcc

SEQ ID NO: 22000 - DNA, 20 bp, Artificial Sequence
  chemically synthesized
atcccagaattgtatgtaca

SEQ ID NO: 22001 - DNA, 20 bp, Artificial Sequence
  chemically synthesized
tgtatgtacaaagtgtgtga

SEQ ID NO: 22002 - DNA, 20 bp, Artificial Sequence
  chemically synthesized
atgtacaaagtgtgtgatgg

SEQ ID NO: 22003 - DNA, 20 bp, Artificial Sequence
  chemically synthesized
gtacaaagtgtgtgatggca

SEQ ID NO: 22004 - DNA, 20 bp, Artificial Sequence
  chemically synthesized
ggcagagctcaaatctgtgc

SEQ ID NO: 22005 - DNA, 20 bp, Artificial Sequence
  chemically synthesized
gagctcaaatctgtgctagc

SEQ ID NO: 22006 - DNA, 20 bp, Artificial Sequence
  chemically synthesized
ctactcttctgaatctgatg

SEQ ID NO: 22007 - DNA, 20 bp, Artificial Sequence
  chemically synthesized
ctcttctgaatctgatgaag

SEQ ID NO: 22008 - DNA, 20 bp, Artificial Sequence
  chemically synthesized
aagaagttattctgtctgtg

SEQ ID NO: 22009 - DNA, 20 bp, Artificial Sequence
  chemically synthesized
ttctgtctgtgcagttttat

SEQ ID NO: 22010 - DNA, 20 bp, Artificial Sequence
  chemically synthesized
tctgtctgtgcagttttatt

SEQ ID NO: 22011 - DNA, 20 bp, Artificial Sequence
  chemically synthesized
ctgtgcagttttattaggct

SEQ ID NO: 22012 - DNA, 20 bp, Artificial Sequence
  chemically synthesized
taggctgagactttttccga

SEQ ID NO: 22013 - DNA, 20 bp, Artificial Sequence
  chemically synthesized
tttatttttccgtttgctca

SEQ ID NO: 22014 - DNA, 20 bp, Artificial Sequence
  chemically synthesized
ttccgtttgctcacagaatg

SEQ ID NO: 22015 - DNA, 20 bp, Artificial Sequence
  chemically synthesized
ccgtttgctcacagaatgta

SEQ ID NO: 22016 - DNA, 20 bp, Artificial Sequence
  chemically synthesized
cgtttgctcacagaatgtag

SEQ ID NO: 22017 - DNA, 20 bp, Artificial Sequence
  chemically synthesized
tttgctcacagaatgtagag

SEQ ID NO: 22018 - DNA, 20 bp, Artificial Sequence
  chemically synthesized
tgctcacagaatgtagagga

SEQ ID NO: 22019 - DNA, 20 bp, Artificial Sequence
  chemically synthesized
cacagaatgtagaggagagc

SEQ ID NO: 22020 - DNA, 20 bp, Artificial Sequence
  chemically synthesized
acagaatgtagaggagagcc

SEQ ID NO: 22021 - DNA, 20 bp, Artificial Sequence
  chemically synthesized
agaatgtagaggagagccag

SEQ ID NO: 22022 - DNA, 20 bp, Artificial Sequence
  chemically synthesized
gaatgtagaggagagccagg

SEQ ID NO: 22023 - DNA, 20 bp, Artificial Sequence
  chemically synthesized
aatgtagaggagagccagga

SEQ ID NO: 22024 - DNA, 20 bp, Artificial Sequence
  chemically synthesized
tgtagaggagagccaggagg

SEQ ID NO: 22025 - DNA, 20 bp, Artificial Sequence
  chemically synthesized
gtttacctactccctgactt

SEQ ID NO: 22026 - DNA, 20 bp, Artificial Sequence
  chemically synthesized
ttacctactccctgactttg

SEQ ID NO: 22027 - DNA, 20 bp, Artificial Sequence
  chemically synthesized
tactccctgactttggagct

SEQ ID NO: 22028 - DNA, 20 bp, Artificial Sequence
  chemically synthesized
tatccatcattttgtttcac

SEQ ID NO: 22029 - DNA, 20 bp, Artificial Sequence
  chemically synthesized
ttgtttcaccagcttttaca

SEQ ID NO: 22030 - DNA, 20 bp, Artificial Sequence
  chemically synthesized
tttcaccagcttttacaaag

SEQ ID NO: 22031 - DNA, 20 bp, Artificial Sequence
  chemically synthesized
ttcaccagcttttacaaagc

SEQ ID NO: 22032 - DNA, 20 bp, Artificial Sequence
  chemically synthesized
aaagcaggatcataaactgt

SEQ ID NO: 22033 - DNA, 20 bp, Artificial Sequence
  chemically synthesized
tcataaactgtaagctcatt

SEQ ID NO: 22034 - DNA, 20 bp, Artificial Sequence
  chemically synthesized
ataaactgtaagctcatttg

SEQ ID NO: 22035 - DNA, 20 bp, Artificial Sequence
  chemically synthesized
taaactgtaagctcatttgg

SEQ ID NO: 22036 - DNA, 20 bp, Artificial Sequence
  chemically synthesized
aaactgtaagctcatttgga

SEQ ID NO: 22037 - DNA, 20 bp, Artificial Sequence
  chemically synthesized
tctctgattgttgctttgat

SEQ ID NO: 22038 - DNA, 20 bp, Artificial Sequence
  chemically synthesized
aaatattcatatcattctga

SEQ ID NO: 22039 - DNA, 20 bp, Artificial Sequence
  chemically synthesized
catatcattctgatagtctt

SEQ ID NO: 22040 - DNA, 20 bp, Artificial Sequence
  chemically synthesized
gttacaacatgcaaacctct

SEQ ID NO: 22041 - DNA, 20 bp, Artificial Sequence
  chemically synthesized
atgcaaacctctcagttttc

SEQ ID NO: 22042 - DNA, 20 bp, Artificial Sequence
  chemically synthesized
tgcaaacctctcagttttcc

SEQ ID NO: 22043 - DNA, 20 bp, Artificial Sequence
  chemically synthesized
tctcagttttccaggacttc

SEQ ID NO: 22044 - DNA, 20 bp, Artificial Sequence
  chemically synthesized
cagttttccaggacttctgg

SEQ ID NO: 22045 - DNA, 20 bp, Artificial Sequence
  chemically synthesized
ttccaggacttctggtggta

SEQ ID NO: 22046 - DNA, 20 bp, Artificial Sequence
  chemically synthesized
ctggtggtacagcttctctg

SEQ ID NO: 22047 - DNA, 20 bp, Artificial Sequence
  chemically synthesized
ggtggtacagcttctctgtg

SEQ ID NO: 22048 - DNA, 20 bp, Artificial Sequence
  chemically synthesized
gtacagcttctctgtggagt

SEQ ID NO: 22049 - DNA, 20 bp, Artificial Sequence
  chemically synthesized
tacagcttctctgtggagtg

SEQ ID NO: 22050 - DNA, 20 bp, Artificial Sequence
  chemically synthesized
tgtggagtgaggcatatttt

SEQ ID NO: 22051 - DNA, 20 bp, Artificial Sequence
  chemically synthesized
agtgaggcatatttttggtc

SEQ ID NO: 22052 - DNA, 20 bp, Artificial Sequence
  chemically synthesized
ggtctggcctttcctccctg

SEQ ID NO: 22053 - DNA, 20 bp, Artificial Sequence
  chemically synthesized
tttcctccctgaagctctgt

SEQ ID NO: 22054 - DNA, 20 bp, Artificial Sequence
  chemically synthesized
ccctgaagctctgttagcct

SEQ ID NO: 22055 - DNA, 20 bp, Artificial Sequence
  chemically synthesized
tgttagcctgagatttcacc

SEQ ID NO: 22056 - DNA, 20 bp, Artificial Sequence
  chemically synthesized
gatttcacctagtgcaacac

SEQ ID NO: 22057 - DNA, 20 bp, Artificial Sequence
  chemically synthesized
ctagtgcaacacaagttgtg

SEQ ID NO: 22058 - DNA, 20 bp, Artificial Sequence
  chemically synthesized
tgcaacacaagttgtgtaga

SEQ ID NO: 22059 - DNA, 20 bp, Artificial Sequence
  chemically synthesized
tactttattccataattcac

SEQ ID NO: 22060 - DNA, 20 bp, Artificial Sequence
  chemically synthesized
taattcactagtaaaataat

SEQ ID NO: 22061 - DNA, 20 bp, Artificial Sequence
  chemically synthesized
tagtaaaataattagaataa

SEQ ID NO: 22062 - DNA, 20 bp, Artificial Sequence
  chemically synthesized
agtaaaataattagaataaa

SEQ ID NO: 22063 - DNA, 20 bp, Artificial Sequence
  chemically synthesized
attagaataaaaggctgttt

SEQ ID NO: 22064 - DNA, 20 bp, Artificial Sequence
  chemically synthesized
taaaaggctgttttggaatg

SEQ ID NO: 22065 - DNA, 20 bp, Artificial Sequence
  chemically synthesized
aaaggctgttttggaatgta

SEQ ID NO: 22066 - DNA, 20 bp, Artificial Sequence
  chemically synthesized
aggctgttttggaatgtaga

SEQ ID NO: 22067 - DNA, 20 bp, Artificial Sequence
  chemically synthesized
ggctgttttggaatgtagag

SEQ ID NO: 22068 - DNA, 20 bp, Artificial Sequence
  chemically synthesized
tgttttggaatgtagagagg

SEQ ID NO: 22069 - DNA, 20 bp, Artificial Sequence
  chemically synthesized
ttttggaatgtagagaggca

SEQ ID NO: 22070 - DNA, 20 bp, Artificial Sequence
  chemically synthesized
tttggaatgtagagaggcag

SEQ ID NO: 22071 - DNA, 20 bp, Artificial Sequence
  chemically synthesized
ttggaatgtagagaggcaga

SEQ ID NO: 22072 - DNA, 20 bp, Artificial Sequence
  chemically synthesized
tggaatgtagagaggcagag

SEQ ID NO: 22073 - DNA, 20 bp, Artificial Sequence
  chemically synthesized
gaggggctgatataacttct

SEQ ID NO: 22074 - DNA, 20 bp, Artificial Sequence
  chemically synthesized
cccgtcttaaatttttatgt

SEQ ID NO: 22075 - DNA, 20 bp, Artificial Sequence
  chemically synthesized
cttaaatttttatgtgagat

SEQ ID NO: 22076 - DNA, 20 bp, Artificial Sequence
  chemically synthesized
atgagcacactgctgtaatt

SEQ ID NO: 22077 - DNA, 20 bp, Artificial Sequence
  chemically synthesized
gcacactgctgtaattaaga

SEQ ID NO: 22078 - DNA, 20 bp, Artificial Sequence
  chemically synthesized
cactgctgtaattaagaaag

SEQ ID NO: 22079 - DNA, 20 bp, Artificial Sequence
  chemically synthesized
tgtaattaagaaagcagtgt

SEQ ID NO: 22080 - DNA, 20 bp, Artificial Sequence
  chemically synthesized
gtaattaagaaagcagtgta

SEQ ID NO: 22081 - DNA, 20 bp, Artificial Sequence
  chemically synthesized
ttaagaaagcagtgtaaggc

SEQ ID NO: 22082 - DNA, 20 bp, Artificial Sequence
  chemically synthesized
taagaaagcagtgtaaggct

SEQ ID NO: 22083 - DNA, 20 bp, Artificial Sequence
  chemically synthesized
aagcagtgtaaggctgggcg

SEQ ID NO: 22084 - DNA, 20 bp, Artificial Sequence
  chemically synthesized
cagtgtaaggctgggcgcag

SEQ ID NO: 22085 - DNA, 20 bp, Artificial Sequence
  chemically synthesized
gtggctcacgtctgtaattc

SEQ ID NO: 22086 - DNA, 20 bp, Artificial Sequence
  chemically synthesized
cgtctgtaattccagcactt

SEQ ID NO: 22087 - DNA, 20 bp, Artificial Sequence
  chemically synthesized
gtctgtaattccagcacttt

SEQ ID NO: 22088 - DNA, 20 bp, Artificial Sequence
  chemically synthesized
ctgtaattccagcactttgg

SEQ ID NO: 22089 - DNA, 20 bp, Artificial Sequence
  chemically synthesized
tgtaattccagcactttggg

SEQ ID NO: 22090 - DNA, 20 bp, Artificial Sequence
  chemically synthesized
ttccagcactttgggaggcc

SEQ ID NO: 22091 - DNA, 20 bp, Artificial Sequence
  chemically synthesized
tccagcactttgggaggccg

SEQ ID NO: 22092 - DNA, 20 bp, Artificial Sequence
  chemically synthesized
agcactttgggaggccgagg

SEQ ID NO: 22093 - DNA, 20 bp, Artificial Sequence
  chemically synthesized
gcactttgggaggccgaggt

SEQ ID NO: 22094 - DNA, 20 bp, Artificial Sequence
  chemically synthesized
ctttgggaggccgaggtggg

SEQ ID NO: 22095 - DNA, 20 bp, Artificial Sequence
  chemically synthesized
ccgaggtgggtagatcacct

SEQ ID NO: 22096 - DNA, 20 bp, Artificial Sequence
  chemically synthesized
cgaggtgggtagatcacctg

SEQ ID NO: 22097 - DNA, 20 bp, Artificial Sequence
  chemically synthesized
tgggtagatcacctgaggtc

SEQ ID NO: 22098 - DNA, 20 bp, Artificial Sequence
  chemically synthesized
ggtagatcacctgaggtcaa

SEQ ID NO: 22099 - DNA, 20 bp, Artificial Sequence
  chemically synthesized
tcacctgaggtcaagagttt

SEQ ID NO: 22100 - DNA, 20 bp, Artificial Sequence
  chemically synthesized
tgaggtcaagagtttgagac

SEQ ID NO: 22101 - DNA, 20 bp, Artificial Sequence
  chemically synthesized
tgagaccagcctgaccaaca

SEQ ID NO: 22102 - DNA, 20 bp, Artificial Sequence
  chemically synthesized
agaccagcctgaccaacatg

SEQ ID NO: 22103 - DNA, 20 bp, Artificial Sequence
  chemically synthesized
ctctattaaaaatataaact

SEQ ID NO: 22104 - DNA, 20 bp, Artificial Sequence
  chemically synthesized
attaaaaatataaacttagc

SEQ ID NO: 22105 - DNA, 20 bp, Artificial Sequence
  chemically synthesized
ttaaaaatataaacttagcc

SEQ ID NO: 22106 - DNA, 20 bp, Artificial Sequence
  chemically synthesized
aatataaacttagccaggca

SEQ ID NO: 22107 - DNA, 20 bp, Artificial Sequence
  chemically synthesized
gtcgcacatgcctgtaatcc

SEQ ID NO: 22108 - DNA, 20 bp, Artificial Sequence
  chemically synthesized
tgcctgtaatcccagctact

SEQ ID NO: 22109 - DNA, 20 bp, Artificial Sequence
  chemically synthesized
gcctgtaatcccagctactc

SEQ ID NO: 22110 - DNA, 20 bp, Artificial Sequence
  chemically synthesized
ctgtaatcccagctactcag

SEQ ID NO: 22111 - DNA, 20 bp, Artificial Sequence
  chemically synthesized
tgtaatcccagctactcagg

SEQ ID NO: 22112 - DNA, 20 bp, Artificial Sequence
  chemically synthesized
tcccagctactcaggaggct

SEQ ID NO: 22113 - DNA, 20 bp, Artificial Sequence
  chemically synthesized
cccagctactcaggaggctg

SEQ ID NO: 22114 - DNA, 20 bp, Artificial Sequence
  chemically synthesized
ccagctactcaggaggctga

SEQ ID NO: 22115 - DNA, 20 bp, Artificial Sequence
  chemically synthesized
agctactcaggaggctgagg

SEQ ID NO: 22116 - DNA, 20 bp, Artificial Sequence
  chemically synthesized
gctactcaggaggctgaggg

SEQ ID NO: 22117 - DNA, 20 bp, Artificial Sequence
  chemically synthesized
tactcaggaggctgagggag

SEQ ID NO: 22118 - DNA, 20 bp, Artificial Sequence
  chemically synthesized
ggaggagaattgcttgaacc

SEQ ID NO: 22119 - DNA, 20 bp, Artificial Sequence
  chemically synthesized
gaggagaattgcttgaaccc

SEQ ID NO: 22120 - DNA, 20 bp, Artificial Sequence
  chemically synthesized
ggagaattgcttgaacccag

SEQ ID NO: 22121 - DNA, 20 bp, Artificial Sequence
  chemically synthesized
gagaattgcttgaacccagg

SEQ ID NO: 22122 - DNA, 20 bp, Artificial Sequence
  chemically synthesized
aattgcttgaacccaggagg

SEQ ID NO: 22123 - DNA, 20 bp, Artificial Sequence
  chemically synthesized
ttgcttgaacccaggaggca

SEQ ID NO: 22124 - DNA, 20 bp, Artificial Sequence
  chemically synthesized
tgcttgaacccaggaggcag

SEQ ID NO: 22125 - DNA, 20 bp, Artificial Sequence
  chemically synthesized
ttgaacccaggaggcagagg

SEQ ID NO: 22126 - DNA, 20 bp, Artificial Sequence
  chemically synthesized
acccaggaggcagaggtggt

SEQ ID NO: 22127 - DNA, 20 bp, Artificial Sequence
  chemically synthesized
ggaggcagaggtggtgagcc

SEQ ID NO: 22128 - DNA, 20 bp, Artificial Sequence
  chemically synthesized
gagatcacaccattgcaccc

SEQ ID NO: 22129 - DNA, 20 bp, Artificial Sequence
  chemically synthesized
cacaccattgcaccccagcc

SEQ ID NO: 22130 - DNA, 20 bp, Artificial Sequence
  chemically synthesized
acaccattgcaccccagcct

SEQ ID NO: 22131 - DNA, 20 bp, Artificial Sequence
  chemically synthesized
tgcaccccagcctgggcaac

SEQ ID NO: 22132 - DNA, 20 bp, Artificial Sequence
  chemically synthesized
caccccagcctgggcaacaa

SEQ ID NO: 22133 - DNA, 20 bp, Artificial Sequence
  chemically synthesized
caaaaaaaaaaaaaaaaaaa

SEQ ID NO: 22134 - DNA, 20 bp, Artificial Sequence
  chemically synthesized
aaaaaaaaaaaaaaaaaaga

SEQ ID NO: 22135 - DNA, 20 bp, Artificial Sequence
  chemically synthesized
aaaaaaaaaaaaaaagaaag

SEQ ID NO: 22136 - DNA, 20 bp, Artificial Sequence
  chemically synthesized
aaaaaaaaagaaagcggtgt

SEQ ID NO: 22137 - DNA, 20 bp, Artificial Sequence
  chemically synthesized
agcggtgtcagtacttgcaa

SEQ ID NO: 22138 - DNA, 20 bp, Artificial Sequence
  chemically synthesized
gcggtgtcagtacttgcaaa

SEQ ID NO: 22139 - DNA, 20 bp, Artificial Sequence
  chemically synthesized
ggcctttccctcttgccact

SEQ ID NO: 22140 - DNA, 20 bp, Artificial Sequence
  chemically synthesized
gcctttccctcttgccactc

SEQ ID NO: 22141 - DNA, 20 bp, Artificial Sequence
  chemically synthesized
cctttccctcttgccactca

SEQ ID NO: 22142 - DNA, 20 bp, Artificial Sequence
  chemically synthesized
ttccctcttgccactcaggg

SEQ ID NO: 22143 - DNA, 20 bp, Artificial Sequence
  chemically synthesized
ccactcagggaagcacccga

SEQ ID NO: 22144 - DNA, 20 bp, Artificial Sequence
  chemically synthesized
actcagggaagcacccgaaa

SEQ ID NO: 22145 - DNA, 20 bp, Artificial Sequence
  chemically synthesized
ccgaaagagaacttacaaac

SEQ ID NO: 22146 - DNA, 20 bp, Artificial Sequence
  chemically synthesized
cgaaagagaacttacaaacc

SEQ ID NO: 22147 - DNA, 20 bp, Artificial Sequence
  chemically synthesized
gagaacttacaaaccaggta

SEQ ID NO: 22148 - DNA, 20 bp, Artificial Sequence
  chemically synthesized
tacaaaccaggtaaagtatt

SEQ ID NO: 22149 - DNA, 20 bp, Artificial Sequence
  chemically synthesized
aaaccaggtaaagtatttgg

SEQ ID NO: 22150 - DNA, 20 bp, Artificial Sequence
  chemically synthesized
gaagtgattaatcatattac

SEQ ID NO: 22151 - DNA, 20 bp, Artificial Sequence
  chemically synthesized
agtgattaatcatattacaa

SEQ ID NO: 22152 - DNA, 20 bp, Artificial Sequence
  chemically synthesized
agtgttcttcatttccccca

SEQ ID NO: 22153 - DNA, 20 bp, Artificial Sequence
  chemically synthesized
gtgttcttcatttcccccaa

SEQ ID NO: 22154 - DNA, 20 bp, Artificial Sequence
  chemically synthesized
tcatttcccccaaaggacca

SEQ ID NO: 22155 - DNA, 20 bp, Artificial Sequence
  chemically synthesized
gacacttacctgtgctctta

SEQ ID NO: 22156 - DNA, 20 bp, Artificial Sequence
  chemically synthesized
ctgtgctcttatagatatta

SEQ ID NO: 22157 - DNA, 20 bp, Artificial Sequence
  chemically synthesized
gctcttatagatattaaaga

SEQ ID NO: 22158 - DNA, 20 bp, Artificial Sequence
  chemically synthesized
tcttatagatattaaagaca

SEQ ID NO: 22159 - DNA, 20 bp, Artificial Sequence
  chemically synthesized
gatattaaagacagagccac

SEQ ID NO: 22160 - DNA, 20 bp, Artificial Sequence
  chemically synthesized
agacagagccactggactgt

SEQ ID NO: 22161 - DNA, 20 bp, Artificial Sequence
  chemically synthesized
cactggactgtgagctcctt

SEQ ID NO: 22162 - DNA, 20 bp, Artificial Sequence
  chemically synthesized
actggactgtgagctccttg

SEQ ID NO: 22163 - DNA, 20 bp, Artificial Sequence
  chemically synthesized
ctggactgtgagctccttga

SEQ ID NO: 22164 - DNA, 20 bp, Artificial Sequence
  chemically synthesized
gactgtgagctccttgaggg

SEQ ID NO: 22165 - DNA, 20 bp, Artificial Sequence
  chemically synthesized
actgtgagctccttgagggc

SEQ ID NO: 22166 - DNA, 20 bp, Artificial Sequence
  chemically synthesized
ctgtgagctccttgagggca

SEQ ID NO: 22167 - DNA, 20 bp, Artificial Sequence
  chemically synthesized
gctccttgagggcagggaat

SEQ ID NO: 22168 - DNA, 20 bp, Artificial Sequence
  chemically synthesized
ctccttgagggcagggaatg

SEQ ID NO: 22169 - DNA, 20 bp, Artificial Sequence
  chemically synthesized
aggctcattccattttgttc

SEQ ID NO: 22170 - DNA, 20 bp, Artificial Sequence
  chemically synthesized
tcattccattttgttctggc

SEQ ID NO: 22171 - DNA, 20 bp, Artificial Sequence
  chemically synthesized
ttccattttgttctggcaag

SEQ ID NO: 22172 - DNA, 20 bp, Artificial Sequence
  chemically synthesized
tgttctggcaagtagcacta

SEQ ID NO: 22173 - DNA, 20 bp, Artificial Sequence
  chemically synthesized
gttctggcaagtagcactac

SEQ ID NO: 22174 - DNA, 20 bp, Artificial Sequence
  chemically synthesized
ggcaagtagcactacaggtt

SEQ ID NO: 22175 - DNA, 20 bp, Artificial Sequence
  chemically synthesized
ttggaccaaatgaattaaat

SEQ ID NO: 22176 - DNA, 20 bp, Artificial Sequence
  chemically synthesized
aattggctgccattgaatca

SEQ ID NO: 22177 - DNA, 20 bp, Artificial Sequence
  chemically synthesized
tggctgccattgaatcaaag

SEQ ID NO: 22178 - DNA, 20 bp, Artificial Sequence
  chemically synthesized
cattgaatcaaagcagaatg

SEQ ID NO: 22179 - DNA, 20 bp, Artificial Sequence
  chemically synthesized
attgaatcaaagcagaatga

SEQ ID NO: 22180 - DNA, 20 bp, Artificial Sequence
  chemically synthesized
gaatcaaagcagaatgaagg

SEQ ID NO: 22181 - DNA, 20 bp, Artificial Sequence
  chemically synthesized
tctgaaacaataatataaat

SEQ ID NO: 22182 - DNA, 20 bp, Artificial Sequence
  chemically synthesized
aatataaataagtgcaaaat

SEQ ID NO: 22183 - DNA, 20 bp, Artificial Sequence
  chemically synthesized
gatgtttaccaacaactttc

SEQ ID NO: 22184 - DNA, 20 bp, Artificial Sequence
  chemically synthesized
taccaacaactttccagaaa

SEQ ID NO: 22185 - DNA, 20 bp, Artificial Sequence
  chemically synthesized
accaacaactttccagaaac

SEQ ID NO: 22186 - DNA, 20 bp, Artificial Sequence
  chemically synthesized
tccagaaacaggtcttgttt

SEQ ID NO: 22187 - DNA, 20 bp, Artificial Sequence
  chemically synthesized
agaaacaggtcttgtttcag

SEQ ID NO: 22188 - DNA, 20 bp, Artificial Sequence
  chemically synthesized
ttgtttcagaagatgtgcca

SEQ ID NO: 22189 - DNA, 20 bp, Artificial Sequence
  chemically synthesized
tgtgccaaagatgtctcatg

SEQ ID NO: 22190 - DNA, 20 bp, Artificial Sequence
  chemically synthesized
gtgccaaagatgtctcatgt

SEQ ID NO: 22191 - DNA, 20 bp, Artificial Sequence
  chemically synthesized
ccaaagatgtctcatgtggg

SEQ ID NO: 22192 - DNA, 20 bp, Artificial Sequence
  chemically synthesized
caaagatgtctcatgtgggc

SEQ ID NO: 22193 - DNA, 20 bp, Artificial Sequence
  chemically synthesized
aaagatgtctcatgtgggca

SEQ ID NO: 22194 - DNA, 20 bp, Artificial Sequence
  chemically synthesized
tcatgtgggcagggctcctg

SEQ ID NO: 22195 - DNA, 20 bp, Artificial Sequence
  chemically synthesized
atgtgggcagggctcctgtg

SEQ ID NO: 22196 - DNA, 20 bp, Artificial Sequence
  chemically synthesized
ctgtggagacctctgttgct

SEQ ID NO: 22197 - DNA, 20 bp, Artificial Sequence
  chemically synthesized
ggagacctctgttgctgagt

SEQ ID NO: 22198 - DNA, 20 bp, Artificial Sequence
  chemically synthesized
ttgctgagtgagtcaaccat

SEQ ID NO: 22199 - DNA, 20 bp, Artificial Sequence
  chemically synthesized
tgctgagtgagtcaaccatg

SEQ ID NO: 22200 - DNA, 20 bp, Artificial Sequence
  chemically synthesized
gagtgagtcaaccatgaggt

SEQ ID NO: 22201 - DNA, 20 bp, Artificial Sequence
  chemically synthesized
agtcaaccatgaggtcggct

SEQ ID NO: 22202 - DNA, 20 bp, Artificial Sequence
  chemically synthesized
caaccatgaggtcggctgag

SEQ ID NO: 22203 - DNA, 20 bp, Artificial Sequence
  chemically synthesized
atgaggtcggctgagcagtt

SEQ ID NO: 22204 - DNA, 20 bp, Artificial Sequence
  chemically synthesized
tgaggtcggctgagcagttc

SEQ ID NO: 22205 - DNA, 20 bp, Artificial Sequence
  chemically synthesized
gaggtcggctgagcagttca

SEQ ID NO: 22206 - DNA, 20 bp, Artificial Sequence
  chemically synthesized
ttcagggttctcccatttta

SEQ ID NO: 22207 - DNA, 20 bp, Artificial Sequence
  chemically synthesized
cagggttctcccattttaca

SEQ ID NO: 22208 - DNA, 20 bp, Artificial Sequence
  chemically synthesized
agggttctcccattttacag

SEQ ID NO: 22209 - DNA, 20 bp, Artificial Sequence
  chemically synthesized
ggttctcccattttacagag

SEQ ID NO: 22210 - DNA, 20 bp, Artificial Sequence
  chemically synthesized
gttctcccattttacagagg

SEQ ID NO: 22211 - DNA, 20 bp, Artificial Sequence
  chemically synthesized
ccattttacagaggaggatg

SEQ ID NO: 22212 - DNA, 20 bp, Artificial Sequence
  chemically synthesized
cagaggaggatgcagcgacc

SEQ ID NO: 22213 - DNA, 20 bp, Artificial Sequence
  chemically synthesized
agcgacccagaaatgcttgc

SEQ ID NO: 22214 - DNA, 20 bp, Artificial Sequence
  chemically synthesized
gaaatgcttgcaagcccacc

SEQ ID NO: 22215 - DNA, 20 bp, Artificial Sequence
  chemically synthesized
tgcttgcaagcccacccagc

SEQ ID NO: 22216 - DNA, 20 bp, Artificial Sequence
  chemically synthesized
gcttgcaagcccacccagct

SEQ ID NO: 22217 - DNA, 20 bp, Artificial Sequence
  chemically synthesized
acccagctaggcttgcttca

SEQ ID NO: 22218 - DNA, 20 bp, Artificial Sequence
  chemically synthesized
ttcacagacactcttttaac

SEQ ID NO: 22219 - DNA, 20 bp, Artificial Sequence
  chemically synthesized
actcttttaactagttccat

SEQ ID NO: 22220 - DNA, 20 bp, Artificial Sequence
  chemically synthesized
actagttccatcagcaaccc

SEQ ID NO: 22221 - DNA, 20 bp, Artificial Sequence
  chemically synthesized
ctagttccatcagcaacccc

SEQ ID NO: 22222 - DNA, 20 bp, Artificial Sequence
  chemically synthesized
ttccatcagcaaccccaggt

SEQ ID NO: 22223 - DNA, 20 bp, Artificial Sequence
  chemically synthesized
tgtcatcatacacattttac

SEQ ID NO: 22224 - DNA, 20 bp, Artificial Sequence
  chemically synthesized
tcatacacattttaccagtg

SEQ ID NO: 22225 - DNA, 20 bp, Artificial Sequence
  chemically synthesized
attttaccagtgaagaaact

SEQ ID NO: 22226 - DNA, 20 bp, Artificial Sequence
  chemically synthesized
ttttaccagtgaagaaactg

SEQ ID NO: 22227 - DNA, 20 bp, Artificial Sequence
  chemically synthesized
ccagtgaagaaactgaggct

SEQ ID NO: 22228 - DNA, 20 bp, Artificial Sequence
  chemically synthesized
agtgaagaaactgaggcttg

SEQ ID NO: 22229 - DNA, 20 bp, Artificial Sequence
  chemically synthesized
tgaagaaactgaggcttgga

SEQ ID NO: 22230 - DNA, 20 bp, Artificial Sequence
  chemically synthesized
gaagaaactgaggcttggag

SEQ ID NO: 22231 - DNA, 20 bp, Artificial Sequence
  chemically synthesized
actgaggcttggagaggtta

SEQ ID NO: 22232 - DNA, 20 bp, Artificial Sequence
  chemically synthesized
tgaggcttggagaggttaaa

SEQ ID NO: 22233 - DNA, 20 bp, Artificial Sequence
  chemically synthesized
agaggttaaagagctgctcc

SEQ ID NO: 22234 - DNA, 20 bp, Artificial Sequence
  chemically synthesized
aagagctgctcccagacaca

SEQ ID NO: 22235 - DNA, 20 bp, Artificial Sequence
  chemically synthesized
gctgctcccagacacacagc

SEQ ID NO: 22236 - DNA, 20 bp, Artificial Sequence
  chemically synthesized
ctgctcccagacacacagcc

SEQ ID NO: 22237 - DNA, 20 bp, Artificial Sequence
  chemically synthesized
cagacacacagccaggaaat

SEQ ID NO: 22238 - DNA, 20 bp, Artificial Sequence
  chemically synthesized
acacacagccaggaaattgg

SEQ ID NO: 22239 - DNA, 20 bp, Artificial Sequence
  chemically synthesized
cacagccaggaaattggtgg

SEQ ID NO: 22240 - DNA, 20 bp, Artificial Sequence
  chemically synthesized
caggaaattggtggtagatg

SEQ ID NO: 22241 - DNA, 20 bp, Artificial Sequence
  chemically synthesized
aggaaattggtggtagatga

SEQ ID NO: 22242 - DNA, 20 bp, Artificial Sequence
  chemically synthesized
ttggtggtagatgaaggatc

SEQ ID NO: 22243 - DNA, 20 bp, Artificial Sequence
  chemically synthesized
tccagctcatctgtctaact

SEQ ID NO: 22244 - DNA, 20 bp, Artificial Sequence
  chemically synthesized
ccagctcatctgtctaactt

SEQ ID NO: 22245 - DNA, 20 bp, Artificial Sequence
  chemically synthesized
agctcatctgtctaacttgg

SEQ ID NO: 22246 - DNA, 20 bp, Artificial Sequence
  chemically synthesized
tctgtctaacttgggagcct

SEQ ID NO: 22247 - DNA, 20 bp, Artificial Sequence
  chemically synthesized
gttcatcttacctatccacc

SEQ ID NO: 22248 - DNA, 20 bp, Artificial Sequence
  chemically synthesized
ttcatcttacctatccacca

SEQ ID NO: 22249 - DNA, 20 bp, Artificial Sequence
  chemically synthesized
tacctatccaccaaggcttg

SEQ ID NO: 22250 - DNA, 20 bp, Artificial Sequence
  chemically synthesized
tatccaccaaggcttgaagt

SEQ ID NO: 22251 - DNA, 20 bp, Artificial Sequence
  chemically synthesized
atccaccaaggcttgaagtg

SEQ ID NO: 22252 - DNA, 20 bp, Artificial Sequence
  chemically synthesized
aagtgaggtgccccgactgt

SEQ ID NO: 22253 - DNA, 20 bp, Artificial Sequence
  chemically synthesized
ggtgccccgactgtgagttc

SEQ ID NO: 22254 - DNA, 20 bp, Artificial Sequence
  chemically synthesized
gtgccccgactgtgagttcc

SEQ ID NO: 22255 - DNA, 20 bp, Artificial Sequence
  chemically synthesized
agttccaggtttgatgccta

SEQ ID NO: 22256 - DNA, 20 bp, Artificial Sequence
  chemically synthesized
gtttgatgcctacagcccat

SEQ ID NO: 22257 - DNA, 20 bp, Artificial Sequence
  chemically synthesized
accttgtcttataccttaac

SEQ ID NO: 22258 - DNA, 20 bp, Artificial Sequence
  chemically synthesized
ttgtcttataccttaactgg

SEQ ID NO: 22259 - DNA, 20 bp, Artificial Sequence
  chemically synthesized
gtcttataccttaactggtg

SEQ ID NO: 22260 - DNA, 20 bp, Artificial Sequence
  chemically synthesized
tcttataccttaactggtgg

SEQ ID NO: 22261 - DNA, 20 bp, Artificial Sequence
  chemically synthesized
cttataccttaactggtgga

SEQ ID NO: 22262 - DNA, 20 bp, Artificial Sequence
  chemically synthesized
tggagggtgctgtctctgtg

SEQ ID NO: 22263 - DNA, 20 bp, Artificial Sequence
  chemically synthesized
agggtgctgtctctgtgtag

SEQ ID NO: 22264 - DNA, 20 bp, Artificial Sequence
  chemically synthesized
tgtctctgtgtagcagccac

SEQ ID NO: 22265 - DNA, 20 bp, Artificial Sequence
  chemically synthesized
ctgtgtagcagccaccagcc

SEQ ID NO: 22266 - DNA, 20 bp, Artificial Sequence
  chemically synthesized
ctagctctgaaccctgtcct

SEQ ID NO: 22267 - DNA, 20 bp, Artificial Sequence
  chemically synthesized
tagctctgaaccctgtcctg

SEQ ID NO: 22268 - DNA, 20 bp, Artificial Sequence
  chemically synthesized
gctctgaaccctgtcctgag

SEQ ID NO: 22269 - DNA, 20 bp, Artificial Sequence
  chemically synthesized
tgaaccctgtcctgaggagt

SEQ ID NO: 22270 - DNA, 20 bp, Artificial Sequence
  chemically synthesized
gaaccctgtcctgaggagtt

SEQ ID NO: 22271 - DNA, 20 bp, Artificial Sequence
  chemically synthesized
ccctgtcctgaggagttggg

SEQ ID NO: 22272 - DNA, 20 bp, Artificial Sequence
  chemically synthesized
tcctgaggagttgggaagtg

SEQ ID NO: 22273 - DNA, 20 bp, Artificial Sequence
  chemically synthesized
cctgaggagttgggaagtgt

SEQ ID NO: 22274 - DNA, 20 bp, Artificial Sequence
  chemically synthesized
ctgaggagttgggaagtgtg

SEQ ID NO: 22275 - DNA, 20 bp, Artificial Sequence
  chemically synthesized
gttgggaagtgtggggtgtc

SEQ ID NO: 22276 - DNA, 20 bp, Artificial Sequence
  chemically synthesized
gtttattccatcaatacacg

SEQ ID NO: 22277 - DNA, 20 bp, Artificial Sequence
  chemically synthesized
attcttctgccattttttct

SEQ ID NO: 22278 - DNA, 20 bp, Artificial Sequence
  chemically synthesized
ttcttctgccattttttctc

SEQ ID NO: 22279 - DNA, 20 bp, Artificial Sequence
  chemically synthesized
tcttctgccattttttctca

SEQ ID NO: 22280 - DNA, 20 bp, Artificial Sequence
  chemically synthesized
cttctgccattttttctcag

SEQ ID NO: 22281 - DNA, 20 bp, Artificial Sequence
  chemically synthesized
aggggctctccttccttccc

SEQ ID NO: 22282 - DNA, 20 bp, Artificial Sequence
  chemically synthesized
ctccttccttccctggctct

SEQ ID NO: 22283 - DNA, 20 bp, Artificial Sequence
  chemically synthesized
tccttccttccctggctctt

SEQ ID NO: 22284 - DNA, 20 bp, Artificial Sequence
  chemically synthesized
ttccttccctggctcttggg

SEQ ID NO: 22285 - DNA, 20 bp, Artificial Sequence
  chemically synthesized
tccttccctggctcttgggt

SEQ ID NO: 22286 - DNA, 20 bp, Artificial Sequence
  chemically synthesized
taggctgcctgctctgatgt

SEQ ID NO: 22287 - DNA, 20 bp, Artificial Sequence
  chemically synthesized
gctctgatgtaagttcctgc

SEQ ID NO: 22288 - DNA, 20 bp, Artificial Sequence
  chemically synthesized
ctctgatgtaagttcctgct

SEQ ID NO: 22289 - DNA, 20 bp, Artificial Sequence
  chemically synthesized
tcctgctgggatgattgctc

SEQ ID NO: 22290 - DNA, 20 bp, Artificial Sequence
  chemically synthesized
gctgggatgattgctctggc

SEQ ID NO: 22291 - DNA, 20 bp, Artificial Sequence
  chemically synthesized
ctgggatgattgctctggcc

SEQ ID NO: 22292 - DNA, 20 bp, Artificial Sequence
  chemically synthesized
gattgctctggccaggcccc

SEQ ID NO: 22293 - DNA, 20 bp, Artificial Sequence
  chemically synthesized
ctgctccctgcccttctctg

SEQ ID NO: 22294 - DNA, 20 bp, Artificial Sequence
  chemically synthesized
tgctccctgcccttctctga

SEQ ID NO: 22295 - DNA, 20 bp, Artificial Sequence
  chemically synthesized
ttctctgaaggcacatctgt

SEQ ID NO: 22296 - DNA, 20 bp, Artificial Sequence
  chemically synthesized
aaggcacatctgtcagccca

SEQ ID NO: 22297 - DNA, 20 bp, Artificial Sequence
  chemically synthesized
ggcacatctgtcagcccaca

SEQ ID NO: 22298 - DNA, 20 bp, Artificial Sequence
  chemically synthesized
gcacatctgtcagcccacag

SEQ ID NO: 22299 - DNA, 20 bp, Artificial Sequence
  chemically synthesized
tctgtcagcccacagaggca

SEQ ID NO: 22300 - DNA, 20 bp, Artificial Sequence
  chemically synthesized
gcccacagaggcacggttaa

SEQ ID NO: 22301 - DNA, 20 bp, Artificial Sequence
  chemically synthesized
cacagaggcacggttaatgg

SEQ ID NO: 22302 - DNA, 20 bp, Artificial Sequence
  chemically synthesized
agaggcacggttaatggtgg

SEQ ID NO: 22303 - DNA, 20 bp, Artificial Sequence
  chemically synthesized
gaggcacggttaatggtggc

SEQ ID NO: 22304 - DNA, 20 bp, Artificial Sequence
  chemically synthesized
aggcacggttaatggtggcg

SEQ ID NO: 22305 - DNA, 20 bp, Artificial Sequence
  chemically synthesized
cacggttaatggtggcgggg

SEQ ID NO: 22306 - DNA, 20 bp, Artificial Sequence
  chemically synthesized
ggttaatggtggcggggaag

SEQ ID NO: 22307 - DNA, 20 bp, Artificial Sequence
  chemically synthesized
ttaatggtggcggggaagca

SEQ ID NO: 22308 - DNA, 20 bp, Artificial Sequence
  chemically synthesized
taatggtggcggggaagcag

SEQ ID NO: 22309 - DNA, 20 bp, Artificial Sequence
  chemically synthesized
tggtggcggggaagcagagg

SEQ ID NO: 22310 - DNA, 20 bp, Artificial Sequence
  chemically synthesized
gaagcagaggcagtgcataa

SEQ ID NO: 22311 - DNA, 20 bp, Artificial Sequence
  chemically synthesized
aagcagaggcagtgcataat

SEQ ID NO: 22312 - DNA, 20 bp, Artificial Sequence
  chemically synthesized
agcagaggcagtgcataatg

SEQ ID NO: 22313 - DNA, 20 bp, Artificial Sequence
  chemically synthesized
gcagaggcagtgcataatgg

SEQ ID NO: 22314 - DNA, 20 bp, Artificial Sequence
  chemically synthesized
gcagtgcataatgggggaac

SEQ ID NO: 22315 - DNA, 20 bp, Artificial Sequence
  chemically synthesized
cataatgggggaactggccc

SEQ ID NO: 22316 - DNA, 20 bp, Artificial Sequence
  chemically synthesized
ataatgggggaactggcccc

SEQ ID NO: 22317 - DNA, 20 bp, Artificial Sequence
  chemically synthesized
ccccctgtcccctccccgcc

SEQ ID NO: 22318 - DNA, 20 bp, Artificial Sequence
  chemically synthesized
cccctgtcccctccccgcct

SEQ ID NO: 22319 - DNA, 20 bp, Artificial Sequence
  chemically synthesized
acttgtccactttcactctc

SEQ ID NO: 22320 - DNA, 20 bp, Artificial Sequence
  chemically synthesized
aagaccaccgctctcacaca

SEQ ID NO: 22321 - DNA, 20 bp, Artificial Sequence
  chemically synthesized
agaccaccgctctcacacac

SEQ ID NO: 22322 - DNA, 20 bp, Artificial Sequence
  chemically synthesized
caggtcctgtgctgccccca

SEQ ID NO: 22323 - DNA, 20 bp, Artificial Sequence
  chemically synthesized
gtgctgcccccacagctttg

SEQ ID NO: 22324 - DNA, 20 bp, Artificial Sequence
  chemically synthesized
tgctgcccccacagctttgc

SEQ ID NO: 22325 - DNA, 20 bp, Artificial Sequence
  chemically synthesized
cccacagctttgcaggctgc

SEQ ID NO: 22326 - DNA, 20 bp, Artificial Sequence
  chemically synthesized
caggctgctggttttccatc

SEQ ID NO: 22327 - DNA, 20 bp, Artificial Sequence
  chemically synthesized
aggctgctggttttccatcc

SEQ ID NO: 22328 - DNA, 20 bp, Artificial Sequence
  chemically synthesized
ggctgctggttttccatcca

SEQ ID NO: 22329 - DNA, 20 bp, Artificial Sequence
  chemically synthesized
ctggttttccatccagggca

SEQ ID NO: 22330 - DNA, 20 bp, Artificial Sequence
  chemically synthesized
ttccatccagggcacagccg

SEQ ID NO: 22331 - DNA, 20 bp, Artificial Sequence
  chemically synthesized
tccatccagggcacagccgc

SEQ ID NO: 22332 - DNA, 20 bp, Artificial Sequence
  chemically synthesized
agggcacagccgcaggcctc

SEQ ID NO: 22333 - DNA, 20 bp, Artificial Sequence
  chemically synthesized
gggcacagccgcaggcctct

SEQ ID NO: 22334 - DNA, 20 bp, Artificial Sequence
  chemically synthesized
ccgcaggcctctgggcaccc

SEQ ID NO: 22335 - DNA, 20 bp, Artificial Sequence
  chemically synthesized
cctctgggcaccctagccct

SEQ ID NO: 22336 - DNA, 20 bp, Artificial Sequence
  chemically synthesized
gcaccctagccctcagtgcc

SEQ ID NO: 22337 - DNA, 20 bp, Artificial Sequence
  chemically synthesized
caccctagccctcagtgccc

SEQ ID NO: 22338 - DNA, 20 bp, Artificial Sequence
  chemically synthesized
accctagccctcagtgccca

SEQ ID NO: 22339 - DNA, 20 bp, Artificial Sequence
  chemically synthesized
agccctcagtgcccagggca

SEQ ID NO: 22340 - DNA, 20 bp, Artificial Sequence
  chemically synthesized
gccctgacatgcaatctcac

SEQ ID NO: 22341 - DNA, 20 bp, Artificial Sequence
  chemically synthesized
ctgacatgcaatctcactgg

SEQ ID NO: 22342 - DNA, 20 bp, Artificial Sequence
  chemically synthesized
tgacatgcaatctcactggc

SEQ ID NO: 22343 - DNA, 20 bp, Artificial Sequence
  chemically synthesized
catgcaatctcactggcagg

SEQ ID NO: 22344 - DNA, 20 bp, Artificial Sequence
  chemically synthesized
atctcactggcaggcagcct

SEQ ID NO: 22345 - DNA, 20 bp, Artificial Sequence
  chemically synthesized
tctcactggcaggcagcctc

SEQ ID NO: 22346 - DNA, 20 bp, Artificial Sequence
  chemically synthesized
cactggcaggcagcctcagg

SEQ ID NO: 22347 - DNA, 20 bp, Artificial Sequence
  chemically synthesized
actggcaggcagcctcaggc

SEQ ID NO: 22348 - DNA, 20 bp, Artificial Sequence
  chemically synthesized
caggcagcctcaggcaggcc

SEQ ID NO: 22349 - DNA, 20 bp, Artificial Sequence
  chemically synthesized
aggcagcctcaggcaggcct

SEQ ID NO: 22350 - DNA, 20 bp, Artificial Sequence
  chemically synthesized
cagcctcaggcaggcctggg

SEQ ID NO: 22351 - DNA, 20 bp, Artificial Sequence
  chemically synthesized
gcctcaggcaggcctgggca

SEQ ID NO: 22352 - DNA, 20 bp, Artificial Sequence
  chemically synthesized
cctcaggcaggcctgggcag

SEQ ID NO: 22353 - DNA, 20 bp, Artificial Sequence
  chemically synthesized
aggcctgggcagaggaccga

SEQ ID NO: 22354 - DNA, 20 bp, Artificial Sequence
  chemically synthesized
ggcctgggcagaggaccgaa

SEQ ID NO: 22355 - DNA, 20 bp, Artificial Sequence
  chemically synthesized
cctgggcagaggaccgaaag

SEQ ID NO: 22356 - DNA, 20 bp, Artificial Sequence
  chemically synthesized
ctgggcagaggaccgaaagg

SEQ ID NO: 22357 - DNA, 20 bp, Artificial Sequence
  chemically synthesized
gggcagaggaccgaaaggag

SEQ ID NO: 22358 - DNA, 20 bp, Artificial Sequence
  chemically synthesized
gcagaggaccgaaaggagga

SEQ ID NO: 22359 - DNA, 20 bp, Artificial Sequence
  chemically synthesized
cagaggaccgaaaggaggag

SEQ ID NO: 22360 - DNA, 20 bp, Artificial Sequence
  chemically synthesized
gaggaccgaaaggaggagag

SEQ ID NO: 22361 - DNA, 20 bp, Artificial Sequence
  chemically synthesized
aggaccgaaaggaggagagg

SEQ ID NO: 22362 - DNA, 20 bp, Artificial Sequence
  chemically synthesized
ggaccgaaaggaggagagga

SEQ ID NO: 22363 - DNA, 20 bp, Artificial Sequence
  chemically synthesized
accgaaaggaggagaggagg

SEQ ID NO: 22364 - DNA, 20 bp, Artificial Sequence
  chemically synthesized
ccgaaaggaggagaggaggg

SEQ ID NO: 22365 - DNA, 20 bp, Artificial Sequence
  chemically synthesized
cgaaaggaggagaggaggga

SEQ ID NO: 22366 - DNA, 20 bp, Artificial Sequence
  chemically synthesized
aaaggaggagaggagggagg

SEQ ID NO: 22367 - DNA, 20 bp, Artificial Sequence
  chemically synthesized
ggagaggagggagggagcta

SEQ ID NO: 22368 - DNA, 20 bp, Artificial Sequence
  chemically synthesized
gaggagggagggagctacag

SEQ ID NO: 22369 - DNA, 20 bp, Artificial Sequence
  chemically synthesized
ggagggagggagctacagta

SEQ ID NO: 22370 - DNA, 20 bp, Artificial Sequence
  chemically synthesized
gggagggagctacagtagag

SEQ ID NO: 22371 - DNA, 20 bp, Artificial Sequence
  chemically synthesized
gggagctacagtagagcaga

SEQ ID NO: 22372 - DNA, 20 bp, Artificial Sequence
  chemically synthesized
ggagctacagtagagcagac

SEQ ID NO: 22373 - DNA, 20 bp, Artificial Sequence
  chemically synthesized
agctacagtagagcagacag

SEQ ID NO: 22374 - DNA, 20 bp, Artificial Sequence
  chemically synthesized
agcagacaggagacaaacac

SEQ ID NO: 22375 - DNA, 20 bp, Artificial Sequence
  chemically synthesized
acaggagacaaacaccagct

SEQ ID NO: 22376 - DNA, 20 bp, Artificial Sequence
  chemically synthesized
aggagacaaacaccagctaa

SEQ ID NO: 22377 - DNA, 20 bp, Artificial Sequence
  chemically synthesized
aaacaccagctaagagtaaa

SEQ ID NO: 22378 - DNA, 20 bp, Artificial Sequence
  chemically synthesized
ccagctaagagtaaacagcc

SEQ ID NO: 22379 - DNA, 20 bp, Artificial Sequence
  chemically synthesized
gctaagagtaaacagcctgg

SEQ ID NO: 22380 - DNA, 20 bp, Artificial Sequence
  chemically synthesized
aagagtaaacagcctggcag

SEQ ID NO: 22381 - DNA, 20 bp, Artificial Sequence
  chemically synthesized
agagtaaacagcctggcagt

SEQ ID NO: 22382 - DNA, 20 bp, Artificial Sequence
  chemically synthesized
gagtaaacagcctggcagtg

SEQ ID NO: 22383 - DNA, 20 bp, Artificial Sequence
  chemically synthesized
aaacagcctggcagtggggt

SEQ ID NO: 22384 - DNA, 20 bp, Artificial Sequence
  chemically synthesized
ctggcagtggggtgagtgcc

SEQ ID NO: 22385 - DNA, 20 bp, Artificial Sequence
  chemically synthesized
cagtggggtgagtgcctggc

SEQ ID NO: 22386 - DNA, 20 bp, Artificial Sequence
  chemically synthesized
gtggggtgagtgcctggctg

SEQ ID NO: 22387 - DNA, 20 bp, Artificial Sequence
  chemically synthesized
tggggtgagtgcctggctgg

SEQ ID NO: 22388 - DNA, 20 bp, Artificial Sequence
  chemically synthesized
ggggtgagtgcctggctgga

SEQ ID NO: 22389 - DNA, 20 bp, Artificial Sequence
  chemically synthesized
gggtgagtgcctggctggag

SEQ ID NO: 22390 - DNA, 20 bp, Artificial Sequence
  chemically synthesized
cctggctggaggggctcacc

SEQ ID NO: 22391 - DNA, 20 bp, Artificial Sequence
  chemically synthesized
ctggctggaggggctcacct

SEQ ID NO: 22392 - DNA, 20 bp, Artificial Sequence
  chemically synthesized
ctggaggggctcacctgggc

SEQ ID NO: 22393 - DNA, 20 bp, Artificial Sequence
  chemically synthesized
ctcacctgggctggcctgcc

SEQ ID NO: 22394 - DNA, 20 bp, Artificial Sequence
  chemically synthesized
tcacctgggctggcctgcct

SEQ ID NO: 22395 - DNA, 20 bp, Artificial Sequence
  chemically synthesized
acctgggctggcctgcctgg

SEQ ID NO: 22396 - DNA, 20 bp, Artificial Sequence
  chemically synthesized
cctgggctggcctgcctggg

SEQ ID NO: 22397 - DNA, 20 bp, Artificial Sequence
  chemically synthesized
tgggctggcctgcctgggag

SEQ ID NO: 22398 - DNA, 20 bp, Artificial Sequence
  chemically synthesized
ctggcctgcctgggaggagc

SEQ ID NO: 22399 - DNA, 20 bp, Artificial Sequence
  chemically synthesized
tggcctgcctgggaggagcc

SEQ ID NO: 22400 - DNA, 20 bp, Artificial Sequence
  chemically synthesized
ctgcctgggaggagccaggt

SEQ ID NO: 22401 - DNA, 20 bp, Artificial Sequence
  chemically synthesized
cctgggaggagccaggtcgg

SEQ ID NO: 22402 - DNA, 20 bp, Artificial Sequence
  chemically synthesized
tggctgctctctccgaatct

SEQ ID NO: 22403 - DNA, 20 bp, Artificial Sequence
  chemically synthesized
tccgaatcttagtcctgctt

SEQ ID NO: 22404 - DNA, 20 bp, Artificial Sequence
  chemically synthesized
ccgaatcttagtcctgcttg

SEQ ID NO: 22405 - DNA, 20 bp, Artificial Sequence
  chemically synthesized
tcttagtcctgcttgaggtc

SEQ ID NO: 22406 - DNA, 20 bp, Artificial Sequence
  chemically synthesized
tagtcctgcttgaggtctag

SEQ ID NO: 22407 - DNA, 20 bp, Artificial Sequence
  chemically synthesized
gcttgaggtctagcagcttc

SEQ ID NO: 22408 - DNA, 20 bp, Artificial Sequence
  chemically synthesized
ttgaggtctagcagcttccg

SEQ ID NO: 22409 - DNA, 20 bp, Artificial Sequence
  chemically synthesized
gcagcttccggagctgcaca

SEQ ID NO: 22410 - DNA, 20 bp, Artificial Sequence
  chemically synthesized
cagcttccggagctgcacat

SEQ ID NO: 22411 - DNA, 20 bp, Artificial Sequence
  chemically synthesized
agcttccggagctgcacatg

SEQ ID NO: 22412 - DNA, 20 bp, Artificial Sequence
  chemically synthesized
cggagctgcacatggggctt

SEQ ID NO: 22413 - DNA, 20 bp, Artificial Sequence
  chemically synthesized
ggagctgcacatggggcttg

SEQ ID NO: 22414 - DNA, 20 bp, Artificial Sequence
  chemically synthesized
tgcacatggggcttgaggtc

SEQ ID NO: 22415 - DNA, 20 bp, Artificial Sequence
  chemically synthesized
ggcttgaggtctggtgctta

SEQ ID NO: 22416 - DNA, 20 bp, Artificial Sequence
  chemically synthesized
gaggtctggtgcttatggat

SEQ ID NO: 22417 - DNA, 20 bp, Artificial Sequence
  chemically synthesized
aggtctggtgcttatggatt

SEQ ID NO: 22418 - DNA, 20 bp, Artificial Sequence
  chemically synthesized
gtctggtgcttatggattag

SEQ ID NO: 22419 - DNA, 20 bp, Artificial Sequence
  chemically synthesized
tctggtgcttatggattagg

SEQ ID NO: 22420 - DNA, 20 bp, Artificial Sequence
  chemically synthesized
ggtgcttatggattaggagg

SEQ ID NO: 22421 - DNA, 20 bp, Artificial Sequence
  chemically synthesized
tgcttatggattaggaggaa

SEQ ID NO: 22422 - DNA, 20 bp, Artificial Sequence
  chemically synthesized
ttatggattaggaggaagag

SEQ ID NO: 22423 - DNA, 20 bp, Artificial Sequence
  chemically synthesized
ggattaggaggaagagaaga

SEQ ID NO: 22424 - DNA, 20 bp, Artificial Sequence
  chemically synthesized
taggaggaagagaagacaga

SEQ ID NO: 22425 - DNA, 20 bp, Artificial Sequence
  chemically synthesized
gaggaagagaagacagatgg

SEQ ID NO: 22426 - DNA, 20 bp, Artificial Sequence
  chemically synthesized
ggaagagaagacagatggca

SEQ ID NO: 22427 - DNA, 20 bp, Artificial Sequence
  chemically synthesized
gaagacagatggcagagtac

SEQ ID NO: 22428 - DNA, 20 bp, Artificial Sequence
  chemically synthesized
aagacagatggcagagtacc

SEQ ID NO: 22429 - DNA, 20 bp, Artificial Sequence
  chemically synthesized
acagatggcagagtaccagg

SEQ ID NO: 22430 - DNA, 20 bp, Artificial Sequence
  chemically synthesized
tggcagagtaccaggcagct

SEQ ID NO: 22431 - DNA, 20 bp, Artificial Sequence
  chemically synthesized
ggcagagtaccaggcagctt

SEQ ID NO: 22432 - DNA, 20 bp, Artificial Sequence
  chemically synthesized
atgtctccttccacatgctg

SEQ ID NO: 22433 - DNA, 20 bp, Artificial Sequence
  chemically synthesized
tccttccacatgctgtggcc

SEQ ID NO: 22434 - DNA, 20 bp, Artificial Sequence
  chemically synthesized
ccttccacatgctgtggccc

SEQ ID NO: 22435 - DNA, 20 bp, Artificial Sequence
  chemically synthesized
gctgtggcccaggtgctgcc

SEQ ID NO: 22436 - DNA, 20 bp, Artificial Sequence
  chemically synthesized
tgtggcccaggtgctgccca

SEQ ID NO: 22437 - DNA, 20 bp, Artificial Sequence
  chemically synthesized
tgctgcccagagctgtttca

SEQ ID NO: 22438 - DNA, 20 bp, Artificial Sequence
  chemically synthesized
tgcccagagctgtttcacag

SEQ ID NO: 22439 - DNA, 20 bp, Artificial Sequence
  chemically synthesized
tcacagcagcctctccactc

SEQ ID NO: 22440 - DNA, 20 bp, Artificial Sequence
  chemically synthesized
cacagcagcctctccactca

SEQ ID NO: 22441 - DNA, 20 bp, Artificial Sequence
  chemically synthesized
cagcctctccactcaaggtt

SEQ ID NO: 22442 - DNA, 20 bp, Artificial Sequence
  chemically synthesized
cctctccactcaaggttgag

SEQ ID NO: 22443 - DNA, 20 bp, Artificial Sequence
  chemically synthesized
caaggttgagcggtttcctt

SEQ ID NO: 22444 - DNA, 20 bp, Artificial Sequence
  chemically synthesized
ttcagtgctgtccacccctt

SEQ ID NO: 22445 - DNA, 20 bp, Artificial Sequence
  chemically synthesized
tgctgtccacccctttggtc

SEQ ID NO: 22446 - DNA, 20 bp, Artificial Sequence
  chemically synthesized
gctgtccacccctttggtcc

SEQ ID NO: 22447 - DNA, 20 bp, Artificial Sequence
  chemically synthesized
ctgtccacccctttggtccg

SEQ ID NO: 22448 - DNA, 20 bp, Artificial Sequence
  chemically synthesized
gtccacccctttggtccggg

SEQ ID NO: 22449 - DNA, 20 bp, Artificial Sequence
  chemically synthesized
tccggggagcttcatgttcc

SEQ ID NO: 22450 - DNA, 20 bp, Artificial Sequence
  chemically synthesized
ccggggagcttcatgttcct

SEQ ID NO: 22451 - DNA, 20 bp, Artificial Sequence
  chemically synthesized
gggcctcactgacacctgca

SEQ ID NO: 22452 - DNA, 20 bp, Artificial Sequence
  chemically synthesized
ggcctcactgacacctgcat

SEQ ID NO: 22453 - DNA, 20 bp, Artificial Sequence
  chemically synthesized
gcctcactgacacctgcatg

SEQ ID NO: 22454 - DNA, 20 bp, Artificial Sequence
  chemically synthesized
cactgacacctgcatggggt

SEQ ID NO: 22455 - DNA, 20 bp, Artificial Sequence
  chemically synthesized
tgacacctgcatggggttgg

SEQ ID NO: 22456 - DNA, 20 bp, Artificial Sequence
  chemically synthesized
gacacctgcatggggttggt

SEQ ID NO: 22457 - DNA, 20 bp, Artificial Sequence
  chemically synthesized
acacctgcatggggttggtg

SEQ ID NO: 22458 - DNA, 20 bp, Artificial Sequence
  chemically synthesized
acctgcatggggttggtggg

SEQ ID NO: 22459 - DNA, 20 bp, Artificial Sequence
  chemically synthesized
cctgcatggggttggtgggg

SEQ ID NO: 22460 - DNA, 20 bp, Artificial Sequence
  chemically synthesized
tggggttggtggggaggtat

SEQ ID NO: 22461 - DNA, 20 bp, Artificial Sequence
  chemically synthesized
ggggttggtggggaggtatg

SEQ ID NO: 22462 - DNA, 20 bp, Artificial Sequence
  chemically synthesized
gggttggtggggaggtatga

SEQ ID NO: 22463 - DNA, 20 bp, Artificial Sequence
  chemically synthesized
ggttggtggggaggtatgag

SEQ ID NO: 22464 - DNA, 20 bp, Artificial Sequence
  chemically synthesized
ggtggggaggtatgaggggt

SEQ ID NO: 22465 - DNA, 20 bp, Artificial Sequence
  chemically synthesized
tggggaggtatgaggggttg

SEQ ID NO: 22466 - DNA, 20 bp, Artificial Sequence
  chemically synthesized
ggggaggtatgaggggttgg

SEQ ID NO: 22467 - DNA, 20 bp, Artificial Sequence
  chemically synthesized
gggaggtatgaggggttgga

SEQ ID NO: 22468 - DNA, 20 bp, Artificial Sequence
  chemically synthesized
ggaggtatgaggggttggag

SEQ ID NO: 22469 - DNA, 20 bp, Artificial Sequence
  chemically synthesized
ggttggaggggtctttttgc

SEQ ID NO: 22470 - DNA, 20 bp, Artificial Sequence
  chemically synthesized
aggggtctttttgctagccc

SEQ ID NO: 22471 - DNA, 20 bp, Artificial Sequence
  chemically synthesized
tttttgctagccctggcccg

SEQ ID NO: 22472 - DNA, 20 bp, Artificial Sequence
  chemically synthesized
cccgtggcaaacactgtctt

SEQ ID NO: 22473 - DNA, 20 bp, Artificial Sequence
  chemically synthesized
tggcaaacactgtcttgaga

SEQ ID NO: 22474 - DNA, 20 bp, Artificial Sequence
  chemically synthesized
caaacactgtcttgagaaag

SEQ ID NO: 22475 - DNA, 20 bp, Artificial Sequence
  chemically synthesized
aaacactgtcttgagaaagt

SEQ ID NO: 22476 - DNA, 20 bp, Artificial Sequence
  chemically synthesized
cttgagaaagtgggacgttg

SEQ ID NO: 22477 - DNA, 20 bp, Artificial Sequence
  chemically synthesized
ttgagaaagtgggacgttga

SEQ ID NO: 22478 - DNA, 20 bp, Artificial Sequence
  chemically synthesized
gagaaagtgggacgttgaag

SEQ ID NO: 22479 - DNA, 20 bp, Artificial Sequence
  chemically synthesized
agtgggacgttgaaggagct

SEQ ID NO: 22480 - DNA, 20 bp, Artificial Sequence
  chemically synthesized
ttgaaggagcttggactcta

SEQ ID NO: 22481 - DNA, 20 bp, Artificial Sequence
  chemically synthesized
aggagcttggactctaaagt

SEQ ID NO: 22482 - DNA, 20 bp, Artificial Sequence
  chemically synthesized
ctctaaagtcagctacacat

SEQ ID NO: 22483 - DNA, 20 bp, Artificial Sequence
  chemically synthesized
acatgagtcttttcacctgc

SEQ ID NO: 22484 - DNA, 20 bp, Artificial Sequence
  chemically synthesized
gagtcttttcacctgctggc

SEQ ID NO: 22485 - DNA, 20 bp, Artificial Sequence
  chemically synthesized
agtcttttcacctgctggct

SEQ ID NO: 22486 - DNA, 20 bp, Artificial Sequence
  chemically synthesized
cttttcacctgctggctagg

SEQ ID NO: 22487 - DNA, 20 bp, Artificial Sequence
  chemically synthesized
acctgctggctaggtggccc

SEQ ID NO: 22488 - DNA, 20 bp, Artificial Sequence
  chemically synthesized
ctggctaggtggccccggac

SEQ ID NO: 22489 - DNA, 20 bp, Artificial Sequence
  chemically synthesized
gtggccccggacaagtcaat

SEQ ID NO: 22490 - DNA, 20 bp, Artificial Sequence
  chemically synthesized
ggacaagtcaatcagcctat

SEQ ID NO: 22491 - DNA, 20 bp, Artificial Sequence
  chemically synthesized
gacaagtcaatcagcctatt

SEQ ID NO: 22492 - DNA, 20 bp, Artificial Sequence
  chemically synthesized
tcaatcagcctattgggcct

SEQ ID NO: 22493 - DNA, 20 bp, Artificial Sequence
  chemically synthesized
caatcagcctattgggcctc

SEQ ID NO: 22494 - DNA, 20 bp, Artificial Sequence
  chemically synthesized
caggctctttatctataaaa

SEQ ID NO: 22495 - DNA, 20 bp, Artificial Sequence
  chemically synthesized
aggctctttatctataaaat

SEQ ID NO: 22496 - DNA, 20 bp, Artificial Sequence
  chemically synthesized
ggctctttatctataaaatg

SEQ ID NO: 22497 - DNA, 20 bp, Artificial Sequence
  chemically synthesized
ctaatttccttttttgcccc

SEQ ID NO: 22498 - DNA, 20 bp, Artificial Sequence
  chemically synthesized
taatttccttttttgcccct

SEQ ID NO: 22499 - DNA, 20 bp, Artificial Sequence
  chemically synthesized
tttccttttttgcccctggg

SEQ ID NO: 22500 - DNA, 20 bp, Artificial Sequence
  chemically synthesized
ccctgggaagaaatatcact

SEQ ID NO: 22501 - DNA, 20 bp, Artificial Sequence
  chemically synthesized
ctgggaagaaatatcactta

SEQ ID NO: 22502 - DNA, 20 bp, Artificial Sequence
  chemically synthesized
tgggaagaaatatcacttag

SEQ ID NO: 22503 - DNA, 20 bp, Artificial Sequence
  chemically synthesized
ggaagaaatatcacttagag

SEQ ID NO: 22504 - DNA, 20 bp, Artificial Sequence
  chemically synthesized
aatatcacttagaggagtta

SEQ ID NO: 22505 - DNA, 20 bp, Artificial Sequence
  chemically synthesized
acagaatgtgcaacctttcc

SEQ ID NO: 22506 - DNA, 20 bp, Artificial Sequence
  chemically synthesized
cagaatgtgcaacctttccc

SEQ ID NO: 22507 - DNA, 20 bp, Artificial Sequence
  chemically synthesized
gaatgtgcaacctttcccag

SEQ ID NO: 22508 - DNA, 20 bp, Artificial Sequence
  chemically synthesized
tcccaggagtattgctcctg

SEQ ID NO: 22509 - DNA, 20 bp, Artificial Sequence
  chemically synthesized
cccaggagtattgctcctga

SEQ ID NO: 22510 - DNA, 20 bp, Artificial Sequence
  chemically synthesized
agtattgctcctgaaggaat

SEQ ID NO: 22511 - DNA, 20 bp, Artificial Sequence
  chemically synthesized
gtattgctcctgaaggaata

SEQ ID NO: 22512 - DNA, 20 bp, Artificial Sequence
  chemically synthesized
cctgaaggaataaggcacga

SEQ ID NO: 22513 - DNA, 20 bp, Artificial Sequence
  chemically synthesized
ctgaaggaataaggcacgat

SEQ ID NO: 22514 - DNA, 20 bp, Artificial Sequence
  chemically synthesized
ggcacgatgggctttgactt

SEQ ID NO: 22515 - DNA, 20 bp, Artificial Sequence
  chemically synthesized
tgggctttgacttcagcctc

SEQ ID NO: 22516 - DNA, 20 bp, Artificial Sequence
  chemically synthesized
gacttcagcctccagcactg

SEQ ID NO: 22517 - DNA, 20 bp, Artificial Sequence
  chemically synthesized
cagcctccagcactgtggcc

SEQ ID NO: 22518 - DNA, 20 bp, Artificial Sequence
  chemically synthesized
cctccagcactgtggcccag

SEQ ID NO: 22519 - DNA, 20 bp, Artificial Sequence
  chemically synthesized
ctccagcactgtggcccaga

SEQ ID NO: 22520 - DNA, 20 bp, Artificial Sequence
  chemically synthesized
tccagcactgtggcccagaa

SEQ ID NO: 22521 - DNA, 20 bp, Artificial Sequence
  chemically synthesized
cactgtggcccagaagggta

SEQ ID NO: 22522 - DNA, 20 bp, Artificial Sequence
  chemically synthesized
gtggcccagaagggtatggc

SEQ ID NO: 22523 - DNA, 20 bp, Artificial Sequence
  chemically synthesized
tggcccagaagggtatggct

SEQ ID NO: 22524 - DNA, 20 bp, Artificial Sequence
  chemically synthesized
cccagaagggtatggctggg

SEQ ID NO: 22525 - DNA, 20 bp, Artificial Sequence
  chemically synthesized
ccagaagggtatggctgggc

SEQ ID NO: 22526 - DNA, 20 bp, Artificial Sequence
  chemically synthesized
cagaagggtatggctgggca

SEQ ID NO: 22527 - DNA, 20 bp, Artificial Sequence
  chemically synthesized
agaagggtatggctgggcag

SEQ ID NO: 22528 - DNA, 20 bp, Artificial Sequence
  chemically synthesized
gcaggggcgtcacacccctg

SEQ ID NO: 22529 - DNA, 20 bp, Artificial Sequence
  chemically synthesized
gtcacacccctgcagctctg

SEQ ID NO: 22530 - DNA, 20 bp, Artificial Sequence
  chemically synthesized
tcacacccctgcagctctgt

SEQ ID NO: 22531 - DNA, 20 bp, Artificial Sequence
  chemically synthesized
acacccctgcagctctgtgg

SEQ ID NO: 22532 - DNA, 20 bp, Artificial Sequence
  chemically synthesized
ctgcagctctgtgggagtga

SEQ ID NO: 22533 - DNA, 20 bp, Artificial Sequence
  chemically synthesized
cagctctgtgggagtgacgg

SEQ ID NO: 22534 - DNA, 20 bp, Artificial Sequence
  chemically synthesized
agctctgtgggagtgacgga

SEQ ID NO: 22535 - DNA, 20 bp, Artificial Sequence
  chemically synthesized
gctctgtgggagtgacggaa

SEQ ID NO: 22536 - DNA, 20 bp, Artificial Sequence
  chemically synthesized
ctatccactcgccttgcaca

SEQ ID NO: 22537 - DNA, 20 bp, Artificial Sequence
  chemically synthesized
acatggctgtcttgctctac

SEQ ID NO: 22538 - DNA, 20 bp, Artificial Sequence
  chemically synthesized
catggctgtcttgctctacc

SEQ ID NO: 22539 - DNA, 20 bp, Artificial Sequence
  chemically synthesized
tgtcttgctctaccaggcct

SEQ ID NO: 22540 - DNA, 20 bp, Artificial Sequence
  chemically synthesized
gtcttgctctaccaggcctt

SEQ ID NO: 22541 - DNA, 20 bp, Artificial Sequence
  chemically synthesized
ctaccaggccttaggttctg

SEQ ID NO: 22542 - DNA, 20 bp, Artificial Sequence
  chemically synthesized
caggccttaggttctgtggc

SEQ ID NO: 22543 - DNA, 20 bp, Artificial Sequence
  chemically synthesized
tgtggccagatactgttctc

SEQ ID NO: 22544 - DNA, 20 bp, Artificial Sequence
  chemically synthesized
gatactgttctccagctctt

SEQ ID NO: 22545 - DNA, 20 bp, Artificial Sequence
  chemically synthesized
tgttctccagctctttggct

SEQ ID NO: 22546 - DNA, 20 bp, Artificial Sequence
  chemically synthesized
gttctccagctctttggctt

SEQ ID NO: 22547 - DNA, 20 bp, Artificial Sequence
  chemically synthesized
agctctttggcttgggcccc

SEQ ID NO: 22548 - DNA, 20 bp, Artificial Sequence
  chemically synthesized
tttggcttgggccccgagac

SEQ ID NO: 22549 - DNA, 20 bp, Artificial Sequence
  chemically synthesized
tggcttgggccccgagacca

SEQ ID NO: 22550 - DNA, 20 bp, Artificial Sequence
  chemically synthesized
cttgggccccgagaccagag

SEQ ID NO: 22551 - DNA, 20 bp, Artificial Sequence
  chemically synthesized
cccgagaccagagaagataa

SEQ ID NO: 22552 - DNA, 20 bp, Artificial Sequence
  chemically synthesized
gagaccagagaagataatgg

SEQ ID NO: 22553 - DNA, 20 bp, Artificial Sequence
  chemically synthesized
cagagaagataatggcagcc

SEQ ID NO: 22554 - DNA, 20 bp, Artificial Sequence
  chemically synthesized
cagcccagaaacctgaatac

SEQ ID NO: 22555 - DNA, 20 bp, Artificial Sequence
  chemically synthesized
agcccagaaacctgaatact

SEQ ID NO: 22556 - DNA, 20 bp, Artificial Sequence
  chemically synthesized
gcccagaaacctgaatactg

SEQ ID NO: 22557 - DNA, 20 bp, Artificial Sequence
  chemically synthesized
gaatactggggaacacattg

SEQ ID NO: 22558 - DNA, 20 bp, Artificial Sequence
  chemically synthesized
aatactggggaacacattgt

SEQ ID NO: 22559 - DNA, 20 bp, Artificial Sequence
  chemically synthesized
atactggggaacacattgta

SEQ ID NO: 22560 - DNA, 20 bp, Artificial Sequence
  chemically synthesized
cacattgtagggtgatctcc

SEQ ID NO: 22561 - DNA, 20 bp, Artificial Sequence
  chemically synthesized
tgtagggtgatctcccagaa

SEQ ID NO: 22562 - DNA, 20 bp, Artificial Sequence
  chemically synthesized
gggtgatctcccagaaaagc

SEQ ID NO: 22563 - DNA, 20 bp, Artificial Sequence
  chemically synthesized
gatctcccagaaaagccagc

SEQ ID NO: 22564 - DNA, 20 bp, Artificial Sequence
  chemically synthesized
ccagaaaagccagcgagaaa

SEQ ID NO: 22565 - DNA, 20 bp, Artificial Sequence
  chemically synthesized
agccagcgagaaatggactg

SEQ ID NO: 22566 - DNA, 20 bp, Artificial Sequence
  chemically synthesized
cgagaaatggactgtagctg

SEQ ID NO: 22567 - DNA, 20 bp, Artificial Sequence
  chemically synthesized
agctgtagcattcttccctt

SEQ ID NO: 22568 - DNA, 20 bp, Artificial Sequence
  chemically synthesized
cttccctttggatgcctgtg

SEQ ID NO: 22569 - DNA, 20 bp, Artificial Sequence
  chemically synthesized
ttccctttggatgcctgtgt

SEQ ID NO: 22570 - DNA, 20 bp, Artificial Sequence
  chemically synthesized
tccctttggatgcctgtgtg

SEQ ID NO: 22571 - DNA, 20 bp, Artificial Sequence
  chemically synthesized
tttggatgcctgtgtgggga

SEQ ID NO: 22572 - DNA, 20 bp, Artificial Sequence
  chemically synthesized
tgcctgtgtggggacagaat

SEQ ID NO: 22573 - DNA, 20 bp, Artificial Sequence
  chemically synthesized
ctgtgtggggacagaatcag

SEQ ID NO: 22574 - DNA, 20 bp, Artificial Sequence
  chemically synthesized
tggggacagaatcagtggaa

SEQ ID NO: 22575 - DNA, 20 bp, Artificial Sequence
  chemically synthesized
aatcagtggaatggaaaatg

SEQ ID NO: 22576 - DNA, 20 bp, Artificial Sequence
  chemically synthesized
cagtggaatggaaaatgaag

SEQ ID NO: 22577 - DNA, 20 bp, Artificial Sequence
  chemically synthesized
ggaaaatgaagaagaaacac

SEQ ID NO: 22578 - DNA, 20 bp, Artificial Sequence
  chemically synthesized
ccacctgcttcctgttctat

SEQ ID NO: 22579 - DNA, 20 bp, Artificial Sequence
  chemically synthesized
cctgttctattagacaaacg

SEQ ID NO: 22580 - DNA, 20 bp, Artificial Sequence
  chemically synthesized
tattagacaaacgtagtttc

SEQ ID NO: 22581 - DNA, 20 bp, Artificial Sequence
  chemically synthesized
gacaaacgtagtttctggat

SEQ ID NO: 22582 - DNA, 20 bp, Artificial Sequence
  chemically synthesized
aacgtagtttctggatgagt

SEQ ID NO: 22583 - DNA, 20 bp, Artificial Sequence
  chemically synthesized
tagtttctggatgagttgga

SEQ ID NO: 22584 - DNA, 20 bp, Artificial Sequence
  chemically synthesized
gatgagttggacagtcatct

SEQ ID NO: 22585 - DNA, 20 bp, Artificial Sequence
  chemically synthesized
acagtcatctgagtttgatc

SEQ ID NO: 22586 - DNA, 20 bp, Artificial Sequence
  chemically synthesized
ctgagtttgatcaagattta

SEQ ID NO: 22587 - DNA, 20 bp, Artificial Sequence
  chemically synthesized
tgagtttgatcaagatttac

SEQ ID NO: 22588 - DNA, 20 bp, Artificial Sequence
  chemically synthesized
ggtaattcaaatgtatgtat

SEQ ID NO: 22589 - DNA, 20 bp, Artificial Sequence
  chemically synthesized
gtaattcaaatgtatgtata

SEQ ID NO: 22590 - DNA, 20 bp, Artificial Sequence
  chemically synthesized
tgtataaggtacatacatat

SEQ ID NO: 22591 - DNA, 20 bp, Artificial Sequence
  chemically synthesized
atacatattagtacatccat

SEQ ID NO: 22592 - DNA, 20 bp, Artificial Sequence
  chemically synthesized
acatattagtacatccatca

SEQ ID NO: 22593 - DNA, 20 bp, Artificial Sequence
  chemically synthesized
atattagtacatccatcaga

SEQ ID NO: 22594 - DNA, 20 bp, Artificial Sequence
  chemically synthesized
tattagtacatccatcagag

SEQ ID NO: 22595 - DNA, 20 bp, Artificial Sequence
  chemically synthesized
tccatcagagaggcttcctt

SEQ ID NO: 22596 - DNA, 20 bp, Artificial Sequence
  chemically synthesized
gagaggcttccttaagccac

SEQ ID NO: 22597 - DNA, 20 bp, Artificial Sequence
  chemically synthesized
ttccttaagccacaagtctc

SEQ ID NO: 22598 - DNA, 20 bp, Artificial Sequence
  chemically synthesized
gccacaagtctctagctcct

SEQ ID NO: 22599 - DNA, 20 bp, Artificial Sequence
  chemically synthesized
cacaagtctctagctcctca

SEQ ID NO: 22600 - DNA, 20 bp, Artificial Sequence
  chemically synthesized
tctctagctcctcagagaac

SEQ ID NO: 22601 - DNA, 20 bp, Artificial Sequence
  chemically synthesized
ctagctcctcagagaactgg

SEQ ID NO: 22602 - DNA, 20 bp, Artificial Sequence
  chemically synthesized
tcctcagagaactggcagtc

SEQ ID NO: 22603 - DNA, 20 bp, Artificial Sequence
  chemically synthesized
cagagaactggcagtctggc

SEQ ID NO: 22604 - DNA, 20 bp, Artificial Sequence
  chemically synthesized
agagaactggcagtctggct

SEQ ID NO: 22605 - DNA, 20 bp, Artificial Sequence
  chemically synthesized
tggctgggtctgtacgaact

SEQ ID NO: 22606 - DNA, 20 bp, Artificial Sequence
  chemically synthesized
tctgtacgaacttggaccta

SEQ ID NO: 22607 - DNA, 20 bp, Artificial Sequence
  chemically synthesized
ggacctatagatgacctcac

SEQ ID NO: 22608 - DNA, 20 bp, Artificial Sequence
  chemically synthesized
tctctttactgatcttatgt

SEQ ID NO: 22609 - DNA, 20 bp, Artificial Sequence
  chemically synthesized
ctttactgatcttatgtgag

SEQ ID NO: 22610 - DNA, 20 bp, Artificial Sequence
  chemically synthesized
tttactgatcttatgtgagt

SEQ ID NO: 22611 - DNA, 20 bp, Artificial Sequence
  chemically synthesized
actgatcttatgtgagtagg

SEQ ID NO: 22612 - DNA, 20 bp, Artificial Sequence
  chemically synthesized
tgatcttatgtgagtaggta

SEQ ID NO: 22613 - DNA, 20 bp, Artificial Sequence
  chemically synthesized
gatcttatgtgagtaggtag

SEQ ID NO: 22614 - DNA, 20 bp, Artificial Sequence
  chemically synthesized
atcttatgtgagtaggtaga

SEQ ID NO: 22615 - DNA, 20 bp, Artificial Sequence
  chemically synthesized
tcttatgtgagtaggtagag

SEQ ID NO: 22616 - DNA, 20 bp, Artificial Sequence
  chemically synthesized
atgtgagtaggtagaggggt

SEQ ID NO: 22617 - DNA, 20 bp, Artificial Sequence
  chemically synthesized
ggggtcagatcacctctgct

SEQ ID NO: 22618 - DNA, 20 bp, Artificial Sequence
  chemically synthesized
cacctctgctcagctctgcc

SEQ ID NO: 22619 - DNA, 20 bp, Artificial Sequence
  chemically synthesized
tcagctctgcccagcacact

SEQ ID NO: 22620 - DNA, 20 bp, Artificial Sequence
  chemically synthesized
taaaatttgaaaaacaaatg

SEQ ID NO: 22621 - DNA, 20 bp, Artificial Sequence
  chemically synthesized
aaaatttgaaaaacaaatgc

SEQ ID NO: 22622 - DNA, 20 bp, Artificial Sequence
  chemically synthesized
tgaaaaacaaatgcaggtgc

SEQ ID NO: 22623 - DNA, 20 bp, Artificial Sequence
  chemically synthesized
aaaaacaaatgcaggtgcca

SEQ ID NO: 22624 - DNA, 20 bp, Artificial Sequence
  chemically synthesized
aaaacaaatgcaggtgccag

SEQ ID NO: 22625 - DNA, 20 bp, Artificial Sequence
  chemically synthesized
acaaatgcaggtgccagagg

SEQ ID NO: 22626 - DNA, 20 bp, Artificial Sequence
  chemically synthesized
tggctaaataatgaatgtcc

SEQ ID NO: 22627 - DNA, 20 bp, Artificial Sequence
  chemically synthesized
ggctaaataatgaatgtccc

SEQ ID NO: 22628 - DNA, 20 bp, Artificial Sequence
  chemically synthesized
tgaatgtcccaggccaattc

SEQ ID NO: 22629 - DNA, 20 bp, Artificial Sequence
  chemically synthesized
gaatgtcccaggccaattct

SEQ ID NO: 22630 - DNA, 20 bp, Artificial Sequence
  chemically synthesized
tgtcccaggccaattctagg

SEQ ID NO: 22631 - DNA, 20 bp, Artificial Sequence
  chemically synthesized
gtcccaggccaattctagga

SEQ ID NO: 22632 - DNA, 20 bp, Artificial Sequence
  chemically synthesized
tcccaggccaattctaggaa

SEQ ID NO: 22633 - DNA, 20 bp, Artificial Sequence
  chemically synthesized
caggccaattctaggaaggg

SEQ ID NO: 22634 - DNA, 20 bp, Artificial Sequence
  chemically synthesized
gccaattctaggaagggaag

SEQ ID NO: 22635 - DNA, 20 bp, Artificial Sequence
  chemically synthesized
ccaattctaggaagggaagt

SEQ ID NO: 22636 - DNA, 20 bp, Artificial Sequence
  chemically synthesized
tctaggaagggaagtgggta

SEQ ID NO: 22637 - DNA, 20 bp, Artificial Sequence
  chemically synthesized
ctaggaagggaagtgggtat

SEQ ID NO: 22638 - DNA, 20 bp, Artificial Sequence
  chemically synthesized
taggaagggaagtgggtatg

SEQ ID NO: 22639 - DNA, 20 bp, Artificial Sequence
  chemically synthesized
gaagggaagtgggtatgggg

SEQ ID NO: 22640 - DNA, 20 bp, Artificial Sequence
  chemically synthesized
ggggcagcccattgccttcc

SEQ ID NO: 22641 - DNA, 20 bp, Artificial Sequence
  chemically synthesized
gcccattgccttcctggtac

SEQ ID NO: 22642 - DNA, 20 bp, Artificial Sequence
  chemically synthesized
cccattgccttcctggtacc

SEQ ID NO: 22643 - DNA, 20 bp, Artificial Sequence
  chemically synthesized
taccaggatgatgcaatgct

SEQ ID NO: 22644 - DNA, 20 bp, Artificial Sequence
  chemically synthesized
ccaggatgatgcaatgcttg

SEQ ID NO: 22645 - DNA, 20 bp, Artificial Sequence
  chemically synthesized
caggatgatgcaatgcttgg

SEQ ID NO: 22646 - DNA, 20 bp, Artificial Sequence
  chemically synthesized
atgcaatgcttggaggctgt

SEQ ID NO: 22647 - DNA, 20 bp, Artificial Sequence
  chemically synthesized
ctgtgagctccccaccttct

SEQ ID NO: 22648 - DNA, 20 bp, Artificial Sequence
  chemically synthesized
tgtgagctccccaccttctc

SEQ ID NO: 22649 - DNA, 20 bp, Artificial Sequence
  chemically synthesized
gtgagctccccaccttctca

SEQ ID NO: 22650 - DNA, 20 bp, Artificial Sequence
  chemically synthesized
gggcacaccctgtgatcttg

SEQ ID NO: 22651 - DNA, 20 bp, Artificial Sequence
  chemically synthesized
ggcacaccctgtgatcttgt

SEQ ID NO: 22652 - DNA, 20 bp, Artificial Sequence
  chemically synthesized
tcttgtgggacccctctgtc

SEQ ID NO: 22653 - DNA, 20 bp, Artificial Sequence
  chemically synthesized
tgggacccctctgtccagcc

SEQ ID NO: 22654 - DNA, 20 bp, Artificial Sequence
  chemically synthesized
cccctctgtccagcccagcc

SEQ ID NO: 22655 - DNA, 20 bp, Artificial Sequence
  chemically synthesized
ccctctgtccagcccagcct

SEQ ID NO: 22656 - DNA, 20 bp, Artificial Sequence
  chemically synthesized
gggtgtgcatcttgtgtgct

SEQ ID NO: 22657 - DNA, 20 bp, Artificial Sequence
  chemically synthesized
gtgcatcttgtgtgcttggt

SEQ ID NO: 22658 - DNA, 20 bp, Artificial Sequence
  chemically synthesized
gtgtgcttggtcggcactga

SEQ ID NO: 22659 - DNA, 20 bp, Artificial Sequence
  chemically synthesized
tgtgcttggtcggcactgat

SEQ ID NO: 22660 - DNA, 20 bp, Artificial Sequence
  chemically synthesized
gtgcttggtcggcactgata

SEQ ID NO: 22661 - DNA, 20 bp, Artificial Sequence
  chemically synthesized
tgcttggtcggcactgatag

SEQ ID NO: 22662 - DNA, 20 bp, Artificial Sequence
  chemically synthesized
gtcggcactgataggggtcg

SEQ ID NO: 22663 - DNA, 20 bp, Artificial Sequence
  chemically synthesized
ggcactgataggggtcgcgg

SEQ ID NO: 22664 - DNA, 20 bp, Artificial Sequence
  chemically synthesized
gcactgataggggtcgcggt

SEQ ID NO: 22665 - DNA, 20 bp, Artificial Sequence
  chemically synthesized
cactgataggggtcgcggta

SEQ ID NO: 22666 - DNA, 20 bp, Artificial Sequence
  chemically synthesized
ctgataggggtcgcggtagg

SEQ ID NO: 22667 - DNA, 20 bp, Artificial Sequence
  chemically synthesized
gggtcgcggtagggagttgt

SEQ ID NO: 22668 - DNA, 20 bp, Artificial Sequence
  chemically synthesized
cacactgctgcatgtcctgt

SEQ ID NO: 22669 - DNA, 20 bp, Artificial Sequence
  chemically synthesized
actgctgcatgtcctgtgag

SEQ ID NO: 22670 - DNA, 20 bp, Artificial Sequence
  chemically synthesized
atgtcctgtgagcggtcccc

SEQ ID NO: 22671 - DNA, 20 bp, Artificial Sequence
  chemically synthesized
tgtcctgtgagcggtcccca

SEQ ID NO: 22672 - DNA, 20 bp, Artificial Sequence
  chemically synthesized
gcggtccccaaggctgtgcc

SEQ ID NO: 22673 - DNA, 20 bp, Artificial Sequence
  chemically synthesized
ccaaggctgtgcccagcctt

SEQ ID NO: 22674 - DNA, 20 bp, Artificial Sequence
  chemically synthesized
tgtgcccagccttcagtgtc

SEQ ID NO: 22675 - DNA, 20 bp, Artificial Sequence
  chemically synthesized
gtgcccagccttcagtgtcc

SEQ ID NO: 22676 - DNA, 20 bp, Artificial Sequence
  chemically synthesized
tgcccagccttcagtgtcca

SEQ ID NO: 22677 - DNA, 20 bp, Artificial Sequence
  chemically synthesized
gtgtccagggcctcttctga

SEQ ID NO: 22678 - DNA, 20 bp, Artificial Sequence
  chemically synthesized
tgtccagggcctcttctgac

SEQ ID NO: 22679 - DNA, 20 bp, Artificial Sequence
  chemically synthesized
cctcttctgacaggccctgc

SEQ ID NO: 22680 - DNA, 20 bp, Artificial Sequence
  chemically synthesized
gccctgctggttatcactgt

SEQ ID NO: 22681 - DNA, 20 bp, Artificial Sequence
  chemically synthesized
ccacgcaccacttctgtgcc

SEQ ID NO: 22682 - DNA, 20 bp, Artificial Sequence
  chemically synthesized
cacgcaccacttctgtgccc

SEQ ID NO: 22683 - DNA, 20 bp, Artificial Sequence
  chemically synthesized
acgcaccacttctgtgccca

SEQ ID NO: 22684 - DNA, 20 bp, Artificial Sequence
  chemically synthesized
acttctgtgcccagggctgc

SEQ ID NO: 22685 - DNA, 20 bp, Artificial Sequence
  chemically synthesized
cttctgtgcccagggctgct

SEQ ID NO: 22686 - DNA, 20 bp, Artificial Sequence
  chemically synthesized
cagggctgctgggtcacctt

SEQ ID NO: 22687 - DNA, 20 bp, Artificial Sequence
  chemically synthesized
agggctgctgggtcacctta

SEQ ID NO: 22688 - DNA, 20 bp, Artificial Sequence
  chemically synthesized
ggctgctgggtcaccttaag

SEQ ID NO: 22689 - DNA, 20 bp, Artificial Sequence
  chemically synthesized
gagccacacacccgtctaca

SEQ ID NO: 22690 - DNA, 20 bp, Artificial Sequence
  chemically synthesized
gccacacacccgtctacata

SEQ ID NO: 22691 - DNA, 20 bp, Artificial Sequence
  chemically synthesized
ccacacacccgtctacatag

SEQ ID NO: 22692 - DNA, 20 bp, Artificial Sequence
  chemically synthesized
acatagaggcccttcctgct

SEQ ID NO: 22693 - DNA, 20 bp, Artificial Sequence
  chemically synthesized
catagaggcccttcctgctt

SEQ ID NO: 22694 - DNA, 20 bp, Artificial Sequence
  chemically synthesized
atagaggcccttcctgcttg

SEQ ID NO: 22695 - DNA, 20 bp, Artificial Sequence
  chemically synthesized
ttcctgcttggggtctgacc

SEQ ID NO: 22696 - DNA, 20 bp, Artificial Sequence
  chemically synthesized
cctccacacctccattctcc

SEQ ID NO: 22697 - DNA, 20 bp, Artificial Sequence
  chemically synthesized
cccagacttttgactcaccc

SEQ ID NO: 22698 - DNA, 20 bp, Artificial Sequence
  chemically synthesized
tgactcaccccagccctgct

SEQ ID NO: 22699 - DNA, 20 bp, Artificial Sequence
  chemically synthesized
actcaccccagccctgctaa

SEQ ID NO: 22700 - DNA, 20 bp, Artificial Sequence
  chemically synthesized
aagagtgatgtcctccccca

SEQ ID NO: 22701 - DNA, 20 bp, Artificial Sequence
  chemically synthesized
gagtgatgtcctcccccaaa

SEQ ID NO: 22702 - DNA, 20 bp, Artificial Sequence
  chemically synthesized
tgatgtcctcccccaaagag

SEQ ID NO: 22703 - DNA, 20 bp, Artificial Sequence
  chemically synthesized
aagagaagacccctgctctt

SEQ ID NO: 22704 - DNA, 20 bp, Artificial Sequence
  chemically synthesized
agagaagacccctgctcttg

SEQ ID NO: 22705 - DNA, 20 bp, Artificial Sequence
  chemically synthesized
gagaagacccctgctcttga

SEQ ID NO: 22706 - DNA, 20 bp, Artificial Sequence
  chemically synthesized
ccctgctcttgagggtctgc

SEQ ID NO: 22707 - DNA, 20 bp, Artificial Sequence
  chemically synthesized
cctgctcttgagggtctgcc

SEQ ID NO: 22708 - DNA, 20 bp, Artificial Sequence
  chemically synthesized
gctcttgagggtctgccagg

SEQ ID NO: 22709 - DNA, 20 bp, Artificial Sequence
  chemically synthesized
ctcttgagggtctgccaggt

SEQ ID NO: 22710 - DNA, 20 bp, Artificial Sequence
  chemically synthesized
ccctcatctccccacctcca

SEQ ID NO: 22711 - DNA, 20 bp, Artificial Sequence
  chemically synthesized
cctcatctccccacctccat

SEQ ID NO: 22712 - DNA, 20 bp, Artificial Sequence
  chemically synthesized
ccccacctccatgggcctct

SEQ ID NO: 22713 - DNA, 20 bp, Artificial Sequence
  chemically synthesized
ggcctcttggattttgtgca

SEQ ID NO: 22714 - DNA, 20 bp, Artificial Sequence
  chemically synthesized
ctgcaacaccctgaccttta

SEQ ID NO: 22715 - DNA, 20 bp, Artificial Sequence
  chemically synthesized
tgcaacaccctgacctttat

SEQ ID NO: 22716 - DNA, 20 bp, Artificial Sequence
  chemically synthesized
gcaacaccctgacctttatg

SEQ ID NO: 22717 - DNA, 20 bp, Artificial Sequence
  chemically synthesized
gacctttatggggtcatcct

SEQ ID NO: 22718 - DNA, 20 bp, Artificial Sequence
  chemically synthesized
ggggtcatcctcggccaatg

SEQ ID NO: 22719 - DNA, 20 bp, Artificial Sequence
  chemically synthesized
gtcatcctcggccaatgaag

SEQ ID NO: 22720 - DNA, 20 bp, Artificial Sequence
  chemically synthesized
atcctcggccaatgaagcgg

SEQ ID NO: 22721 - DNA, 20 bp, Artificial Sequence
  chemically synthesized
tcctcggccaatgaagcggt

SEQ ID NO: 22722 - DNA, 20 bp, Artificial Sequence
  chemically synthesized
ggccaatgaagcggtgggtc

SEQ ID NO: 22723 - DNA, 20 bp, Artificial Sequence
  chemically synthesized
gccaatgaagcggtgggtcc

SEQ ID NO: 22724 - DNA, 20 bp, Artificial Sequence
  chemically synthesized
aggctcccccttctatcacc

SEQ ID NO: 22725 - DNA, 20 bp, Artificial Sequence
  chemically synthesized
cctggctcacttccatcctg

SEQ ID NO: 22726 - DNA, 20 bp, Artificial Sequence
  chemically synthesized
tggctcacttccatcctgca

SEQ ID NO: 22727 - DNA, 20 bp, Artificial Sequence
  chemically synthesized
ggctcacttccatcctgcag

SEQ ID NO: 22728 - DNA, 20 bp, Artificial Sequence
  chemically synthesized
tcacttccatcctgcagagg

SEQ ID NO: 22729 - DNA, 20 bp, Artificial Sequence
  chemically synthesized
tccatcctgcagaggaagct

SEQ ID NO: 22730 - DNA, 20 bp, Artificial Sequence
  chemically synthesized
agaggaagcttggtttcatt

SEQ ID NO: 22731 - DNA, 20 bp, Artificial Sequence
  chemically synthesized
gaggaagcttggtttcattt

SEQ ID NO: 22732 - DNA, 20 bp, Artificial Sequence
  chemically synthesized
gtttcatttaggacaatgtg

SEQ ID NO: 22733 - DNA, 20 bp, Artificial Sequence
  chemically synthesized
tttcatttaggacaatgtgc

SEQ ID NO: 22734 - DNA, 20 bp, Artificial Sequence
  chemically synthesized
ccttttgatcatttctctac

SEQ ID NO: 22735 - DNA, 20 bp, Artificial Sequence
  chemically synthesized
tcatttctctactggatcat

SEQ ID NO: 22736 - DNA, 20 bp, Artificial Sequence
  chemically synthesized
tctctactggatcatcagca

SEQ ID NO: 22737 - DNA, 20 bp, Artificial Sequence
  chemically synthesized
ctctactggatcatcagcaa

SEQ ID NO: 22738 - DNA, 20 bp, Artificial Sequence
  chemically synthesized
tctactggatcatcagcaaa

SEQ ID NO: 22739 - DNA, 20 bp, Artificial Sequence
  chemically synthesized
tactggatcatcagcaaagg

SEQ ID NO: 22740 - DNA, 20 bp, Artificial Sequence
  chemically synthesized
tcatcagcaaagggagaaat

SEQ ID NO: 22741 - DNA, 20 bp, Artificial Sequence
  chemically synthesized
caaagggagaaatgagacaa

SEQ ID NO: 22742 - DNA, 20 bp, Artificial Sequence
  chemically synthesized
aagggagaaatgagacaaaa

SEQ ID NO: 22743 - DNA, 20 bp, Artificial Sequence
  chemically synthesized
agggagaaatgagacaaaag

SEQ ID NO: 22744 - DNA, 20 bp, Artificial Sequence
  chemically synthesized
atgagacaaaagaggccact

SEQ ID NO: 22745 - DNA, 20 bp, Artificial Sequence
  chemically synthesized
aaagaggccactgagtcctt

SEQ ID NO: 22746 - DNA, 20 bp, Artificial Sequence
  chemically synthesized
aagaggccactgagtccttt

SEQ ID NO: 22747 - DNA, 20 bp, Artificial Sequence
  chemically synthesized
agaggccactgagtcctttg

SEQ ID NO: 22748 - DNA, 20 bp, Artificial Sequence
  chemically synthesized
gaggccactgagtcctttgg

SEQ ID NO: 22749 - DNA, 20 bp, Artificial Sequence
  chemically synthesized
ttgggggaaatatgtgccta

SEQ ID NO: 22750 - DNA, 20 bp, Artificial Sequence
  chemically synthesized
gggaaatatgtgcctatagt

SEQ ID NO: 22751 - DNA, 20 bp, Artificial Sequence
  chemically synthesized
ggaaatatgtgcctatagta

SEQ ID NO: 22752 - DNA, 20 bp, Artificial Sequence
  chemically synthesized
atgtgcctatagtaaggtga

SEQ ID NO: 22753 - DNA, 20 bp, Artificial Sequence
  chemically synthesized
cctatagtaaggtgatagtt

SEQ ID NO: 22754 - DNA, 20 bp, Artificial Sequence
  chemically synthesized
tatagtaaggtgatagttca

SEQ ID NO: 22755 - DNA, 20 bp, Artificial Sequence
  chemically synthesized
gtaaggtgatagttcagaga

SEQ ID NO: 22756 - DNA, 20 bp, Artificial Sequence
  chemically synthesized
aaggtgatagttcagagaaa

SEQ ID NO: 22757 - DNA, 20 bp, Artificial Sequence
  chemically synthesized
gtgatagttcagagaaagag

SEQ ID NO: 22758 - DNA, 20 bp, Artificial Sequence
  chemically synthesized
gatagttcagagaaagagaa

SEQ ID NO: 22759 - DNA, 20 bp, Artificial Sequence
  chemically synthesized
agttcagagaaagagaagag

SEQ ID NO: 22760 - DNA, 20 bp, Artificial Sequence
  chemically synthesized
gttcagagaaagagaagagt

SEQ ID NO: 22761 - DNA, 20 bp, Artificial Sequence
  chemically synthesized
tcagagaaagagaagagtag

SEQ ID NO: 22762 - DNA, 20 bp, Artificial Sequence
  chemically synthesized
cagagaaagagaagagtagg

SEQ ID NO: 22763 - DNA, 20 bp, Artificial Sequence
  chemically synthesized
gaaagagaagagtaggaggc

SEQ ID NO: 22764 - DNA, 20 bp, Artificial Sequence
  chemically synthesized
agagtaggaggctggacctg

SEQ ID NO: 22765 - DNA, 20 bp, Artificial Sequence
  chemically synthesized
gagtaggaggctggacctga

SEQ ID NO: 22766 - DNA, 20 bp, Artificial Sequence
  chemically synthesized
acctgaaggccttccaaaaa

SEQ ID NO: 22767 - DNA, 20 bp, Artificial Sequence
  chemically synthesized
aaggccttccaaaaaaagta

SEQ ID NO: 22768 - DNA, 20 bp, Artificial Sequence
  chemically synthesized
aggccttccaaaaaaagtaa

SEQ ID NO: 22769 - DNA, 20 bp, Artificial Sequence
  chemically synthesized
taaaggatgttaaattgctc

SEQ ID NO: 22770 - DNA, 20 bp, Artificial Sequence
  chemically synthesized
aggatgttaaattgctctgg

SEQ ID NO: 22771 - DNA, 20 bp, Artificial Sequence
  chemically synthesized
ggatgttaaattgctctgga

SEQ ID NO: 22772 - DNA, 20 bp, Artificial Sequence
  chemically synthesized
aaattgctctggaaggtgca

SEQ ID NO: 22773 - DNA, 20 bp, Artificial Sequence
  chemically synthesized
ggaaggtgcaaagtgccatc

SEQ ID NO: 22774 - DNA, 20 bp, Artificial Sequence
  chemically synthesized
aggtgcaaagtgccatccag

SEQ ID NO: 22775 - DNA, 20 bp, Artificial Sequence
  chemically synthesized
tgcaaagtgccatccagtgg

SEQ ID NO: 22776 - DNA, 20 bp, Artificial Sequence
  chemically synthesized
tattattatcatcatcataa

SEQ ID NO: 22777 - DNA, 20 bp, Artificial Sequence
  chemically synthesized
ggtcattatcatcaccatta

SEQ ID NO: 22778 - DNA, 20 bp, Artificial Sequence
  chemically synthesized
gtcattatcatcaccattat

SEQ ID NO: 22779 - DNA, 20 bp, Artificial Sequence
  chemically synthesized
atcatcaccattataggata

SEQ ID NO: 22780 - DNA, 20 bp, Artificial Sequence
  chemically synthesized
tataggatatggcactgacg

SEQ ID NO: 22781 - DNA, 20 bp, Artificial Sequence
  chemically synthesized
ataggatatggcactgacgt

SEQ ID NO: 22782 - DNA, 20 bp, Artificial Sequence
  chemically synthesized
ggatatggcactgacgtagg

SEQ ID NO: 22783 - DNA, 20 bp, Artificial Sequence
  chemically synthesized
gcactgacgtaggtagtgac

SEQ ID NO: 22784 - DNA, 20 bp, Artificial Sequence
  chemically synthesized
tgacgtaggtagtgactggt

SEQ ID NO: 22785 - DNA, 20 bp, Artificial Sequence
  chemically synthesized
acgtaggtagtgactggtaa

SEQ ID NO: 22786 - DNA, 20 bp, Artificial Sequence
  chemically synthesized
gtgactggtaagagccgatt

SEQ ID NO: 22787 - DNA, 20 bp, Artificial Sequence
  chemically synthesized
gtaagagccgattgagtttc

SEQ ID NO: 22788 - DNA, 20 bp, Artificial Sequence
  chemically synthesized
ttctagctgattcctgatgt

SEQ ID NO: 22789 - DNA, 20 bp, Artificial Sequence
  chemically synthesized
tctagctgattcctgatgtt

SEQ ID NO: 22790 - DNA, 20 bp, Artificial Sequence
  chemically synthesized
ctagctgattcctgatgtta

SEQ ID NO: 22791 - DNA, 20 bp, Artificial Sequence
  chemically synthesized
tagctgattcctgatgttag

SEQ ID NO: 22792 - DNA, 20 bp, Artificial Sequence
  chemically synthesized
gggccatgaatctgtctacc

SEQ ID NO: 22793 - DNA, 20 bp, Artificial Sequence
  chemically synthesized
tggaatgttctaattcaatt

SEQ ID NO: 22794 - DNA, 20 bp, Artificial Sequence
  chemically synthesized
ggaatgttctaattcaattc

SEQ ID NO: 22795 - DNA, 20 bp, Artificial Sequence
  chemically synthesized
aatgttctaattcaattcag

SEQ ID NO: 22796 - DNA, 20 bp, Artificial Sequence
  chemically synthesized
gttctaattcaattcaggag

SEQ ID NO: 22797 - DNA, 20 bp, Artificial Sequence
  chemically synthesized
ctaattcaattcaggagcgg

SEQ ID NO: 22798 - DNA, 20 bp, Artificial Sequence
  chemically synthesized
caattcaggagcggcagttt

SEQ ID NO: 22799 - DNA, 20 bp, Artificial Sequence
  chemically synthesized
caggagcggcagtttaagtc

SEQ ID NO: 22800 - DNA, 20 bp, Artificial Sequence
  chemically synthesized
cagtttaagtctagacttca

SEQ ID NO: 22801 - DNA, 20 bp, Artificial Sequence
  chemically synthesized
aaagcactctcatatatcct

SEQ ID NO: 22802 - DNA, 20 bp, Artificial Sequence
  chemically synthesized
tatccttggcctgctaacct

SEQ ID NO: 22803 - DNA, 20 bp, Artificial Sequence
  chemically synthesized
atccttggcctgctaacctg

SEQ ID NO: 22804 - DNA, 20 bp, Artificial Sequence
  chemically synthesized
tccttggcctgctaacctga

SEQ ID NO: 22805 - DNA, 20 bp, Artificial Sequence
  chemically synthesized
tggcctgctaacctgagggc

SEQ ID NO: 22806 - DNA, 20 bp, Artificial Sequence
  chemically synthesized
ctaacctgagggctagtttc

SEQ ID NO: 22807 - DNA, 20 bp, Artificial Sequence
  chemically synthesized
taacctgagggctagtttct

SEQ ID NO: 22808 - DNA, 20 bp, Artificial Sequence
  chemically synthesized
aacctgagggctagtttcta

SEQ ID NO: 22809 - DNA, 20 bp, Artificial Sequence
  chemically synthesized
tctagggattgattaactta

SEQ ID NO: 22810 - DNA, 20 bp, Artificial Sequence
  chemically synthesized
gggattgattaacttaaaga

SEQ ID NO: 22811 - DNA, 20 bp, Artificial Sequence
  chemically synthesized
gttcatatatgcttgaatac

SEQ ID NO: 22812 - DNA, 20 bp, Artificial Sequence
  chemically synthesized
aaaaatctgacttgatcaaa

SEQ ID NO: 22813 - DNA, 20 bp, Artificial Sequence
  chemically synthesized
aaatctgacttgatcaaaca

SEQ ID NO: 22814 - DNA, 20 bp, Artificial Sequence
  chemically synthesized
tctgacttgatcaaacagag

SEQ ID NO: 22815 - DNA, 20 bp, Artificial Sequence
  chemically synthesized
ttgatcaaacagagcagtta

SEQ ID NO: 22816 - DNA, 20 bp, Artificial Sequence
  chemically synthesized
tgatcaaacagagcagttaa

SEQ ID NO: 22817 - DNA, 20 bp, Artificial Sequence
  chemically synthesized
ggcgatgcttcgttttacaa

SEQ ID NO: 22818 - DNA, 20 bp, Artificial Sequence
  chemically synthesized
attttcccccctctttacaa

SEQ ID NO: 22819 - DNA, 20 bp, Artificial Sequence
  chemically synthesized
ttttcccccctctttacaaa

SEQ ID NO: 22820 - DNA, 20 bp, Artificial Sequence
  chemically synthesized
cctctttacaaaaggatgca

SEQ ID NO: 22821 - DNA, 20 bp, Artificial Sequence
  chemically synthesized
ctttacaaaaggatgcacag

SEQ ID NO: 22822 - DNA, 20 bp, Artificial Sequence
  chemically synthesized
cacagtggtattcctttcaa

SEQ ID NO: 22823 - DNA, 20 bp, Artificial Sequence
  chemically synthesized
ctttcaatggaatgtttctc

SEQ ID NO: 22824 - DNA, 20 bp, Artificial Sequence
  chemically synthesized
gaatgtttctctagctcatt

SEQ ID NO: 22825 - DNA, 20 bp, Artificial Sequence
  chemically synthesized
tctagctcattaagtgttta

SEQ ID NO: 22826 - DNA, 20 bp, Artificial Sequence
  chemically synthesized
ctagctcattaagtgtttac

SEQ ID NO: 22827 - DNA, 20 bp, Artificial Sequence
  chemically synthesized
attaagtgtttacaggtcat

SEQ ID NO: 22828 - DNA, 20 bp, Artificial Sequence
  chemically synthesized
acaggtcattagctactgca

SEQ ID NO: 22829 - DNA, 20 bp, Artificial Sequence
  chemically synthesized
ggtcattagctactgcatgg

SEQ ID NO: 22830 - DNA, 20 bp, Artificial Sequence
  chemically synthesized
gtcattagctactgcatgga

SEQ ID NO: 22831 - DNA, 20 bp, Artificial Sequence
  chemically synthesized
actgcatggaaggactttgc

SEQ ID NO: 22832 - DNA, 20 bp, Artificial Sequence
  chemically synthesized
tgcatggaaggactttgcta

SEQ ID NO: 22833 - DNA, 20 bp, Artificial Sequence
  chemically synthesized
ggaaggactttgctagagaa

SEQ ID NO: 22834 - DNA, 20 bp, Artificial Sequence
  chemically synthesized
gaaggactttgctagagaaa

SEQ ID NO: 22835 - DNA, 20 bp, Artificial Sequence
  chemically synthesized
ggactttgctagagaaaagg

SEQ ID NO: 22836 - DNA, 20 bp, Artificial Sequence
  chemically synthesized
gactttgctagagaaaagga

SEQ ID NO: 22837 - DNA, 20 bp, Artificial Sequence
  chemically synthesized
ctagagaaaaggaaggctgc

SEQ ID NO: 22838 - DNA, 20 bp, Artificial Sequence
  chemically synthesized
tagagaaaaggaaggctgca

SEQ ID NO: 22839 - DNA, 20 bp, Artificial Sequence
  chemically synthesized
aaaggaaggctgcaaggaaa

SEQ ID NO: 22840 - DNA, 20 bp, Artificial Sequence
  chemically synthesized
aggctgcaaggaaatagctc

SEQ ID NO: 22841 - DNA, 20 bp, Artificial Sequence
  chemically synthesized
caaggaaatagctctagctc

SEQ ID NO: 22842 - DNA, 20 bp, Artificial Sequence
  chemically synthesized
aatagctctagctctagctc

SEQ ID NO: 22843 - DNA, 20 bp, Artificial Sequence
  chemically synthesized
ctctagctctagctctagct

SEQ ID NO: 22844 - DNA, 20 bp, Artificial Sequence
  chemically synthesized
tctagctctagctctagctt

SEQ ID NO: 22845 - DNA, 20 bp, Artificial Sequence
  chemically synthesized
ctagctctagctctagctta

SEQ ID NO: 22846 - DNA, 20 bp, Artificial Sequence
  chemically synthesized
tagctctagctctagcttag

SEQ ID NO: 22847 - DNA, 20 bp, Artificial Sequence
  chemically synthesized
agctctagcttaggggatgc

SEQ ID NO: 22848 - DNA, 20 bp, Artificial Sequence
  chemically synthesized
agcttaggggatgctagcta

SEQ ID NO: 22849 - DNA, 20 bp, Artificial Sequence
  chemically synthesized
gcttaggggatgctagctaa

SEQ ID NO: 22850 - DNA, 20 bp, Artificial Sequence
  chemically synthesized
cttaggggatgctagctaaa

SEQ ID NO: 22851 - DNA, 20 bp, Artificial Sequence
  chemically synthesized
ggatgctagctaaagggaat

SEQ ID NO: 22852 - DNA, 20 bp, Artificial Sequence
  chemically synthesized
tagctaaagggaattagaat

SEQ ID NO: 22853 - DNA, 20 bp, Artificial Sequence
  chemically synthesized
taaagggaattagaattggt

SEQ ID NO: 22854 - DNA, 20 bp, Artificial Sequence
  chemically synthesized
aattagaattggttggccaa

SEQ ID NO: 22855 - DNA, 20 bp, Artificial Sequence
  chemically synthesized
attagaattggttggccaac

SEQ ID NO: 22856 - DNA, 20 bp, Artificial Sequence
  chemically synthesized
ggttggccaacaggtgtctg

SEQ ID NO: 22857 - DNA, 20 bp, Artificial Sequence
  chemically synthesized
actccctgtccactcaacac

SEQ ID NO: 22858 - DNA, 20 bp, Artificial Sequence
  chemically synthesized
ctccctgtccactcaacact

SEQ ID NO: 22859 - DNA, 20 bp, Artificial Sequence
  chemically synthesized
tccctgtccactcaacactg

SEQ ID NO: 22860 - DNA, 20 bp, Artificial Sequence
  chemically synthesized
ccctgtccactcaacactgg

SEQ ID NO: 22861 - DNA, 20 bp, Artificial Sequence
  chemically synthesized
ctgtccactcaacactgggg

SEQ ID NO: 22862 - DNA, 20 bp, Artificial Sequence
  chemically synthesized
tgtccactcaacactggggg

SEQ ID NO: 22863 - DNA, 20 bp, Artificial Sequence
  chemically synthesized
tccactcaacactgggggag

SEQ ID NO: 22864 - DNA, 20 bp, Artificial Sequence
  chemically synthesized
actcaacactgggggaggag

SEQ ID NO: 22865 - DNA, 20 bp, Artificial Sequence
  chemically synthesized
tcaacactgggggaggagta

SEQ ID NO: 22866 - DNA, 20 bp, Artificial Sequence
  chemically synthesized
gatcttgcttccttccatgt

SEQ ID NO: 22867 - DNA, 20 bp, Artificial Sequence
  chemically synthesized
tcttgcttccttccatgtga

SEQ ID NO: 22868 - DNA, 20 bp, Artificial Sequence
  chemically synthesized
tccttccatgtgagagctta

SEQ ID NO: 22869 - DNA, 20 bp, Artificial Sequence
  chemically synthesized
gtgagagcttatagtccctt

SEQ ID NO: 22870 - DNA, 20 bp, Artificial Sequence
  chemically synthesized
cttatagtccctttggaatc

SEQ ID NO: 22871 - DNA, 20 bp, Artificial Sequence
  chemically synthesized
tggaatccagatttatcgtg

SEQ ID NO: 22872 - DNA, 20 bp, Artificial Sequence
  chemically synthesized
tttatcgtgaagtaatcgtg

SEQ ID NO: 22873 - DNA, 20 bp, Artificial Sequence
  chemically synthesized
tcgtgaagtaatcgtgaaga

SEQ ID NO: 22874 - DNA, 20 bp, Artificial Sequence
  chemically synthesized
taatcgtgaagacagaaatt

SEQ ID NO: 22875 - DNA, 20 bp, Artificial Sequence
  chemically synthesized
tcatctcttatgactgtcca

SEQ ID NO: 22876 - DNA, 20 bp, Artificial Sequence
  chemically synthesized
catctcttatgactgtccat

SEQ ID NO: 22877 - DNA, 20 bp, Artificial Sequence
  chemically synthesized
atctcttatgactgtccatg

SEQ ID NO: 22878 - DNA, 20 bp, Artificial Sequence
  chemically synthesized
tatgactgtccatggggaaa

SEQ ID NO: 22879 - DNA, 20 bp, Artificial Sequence
  chemically synthesized
atgactgtccatggggaaat

SEQ ID NO: 22880 - DNA, 20 bp, Artificial Sequence
  chemically synthesized
ggtcctgctttacaaaaatt

SEQ ID NO: 22881 - DNA, 20 bp, Artificial Sequence
  chemically synthesized
tcagtttgcatgctgctttt

SEQ ID NO: 22882 - DNA, 20 bp, Artificial Sequence
  chemically synthesized
cagtttgcatgctgcttttc

SEQ ID NO: 22883 - DNA, 20 bp, Artificial Sequence
  chemically synthesized
aggcctatgactgtgacatc

SEQ ID NO: 22884 - DNA, 20 bp, Artificial Sequence
  chemically synthesized
ctatgactgtgacatccagt

SEQ ID NO: 22885 - DNA, 20 bp, Artificial Sequence
  chemically synthesized
tatgactgtgacatccagtg

SEQ ID NO: 22886 - DNA, 20 bp, Artificial Sequence
  chemically synthesized
atgactgtgacatccagtga

SEQ ID NO: 22887 - DNA, 20 bp, Artificial Sequence
  chemically synthesized
gactgtgacatccagtgagg

SEQ ID NO: 22888 - DNA, 20 bp, Artificial Sequence
  chemically synthesized
acatccagtgagggagattt

SEQ ID NO: 22889 - DNA, 20 bp, Artificial Sequence
  chemically synthesized
catccagtgagggagatttg

SEQ ID NO: 22890 - DNA, 20 bp, Artificial Sequence
  chemically synthesized
ccagtgagggagatttgagg

SEQ ID NO: 22891 - DNA, 20 bp, Artificial Sequence
  chemically synthesized
cagtgagggagatttgagga

SEQ ID NO: 22892 - DNA, 20 bp, Artificial Sequence
  chemically synthesized
agtgagggagatttgaggaa

SEQ ID NO: 22893 - DNA, 20 bp, Artificial Sequence
  chemically synthesized
gtgagggagatttgaggaag

SEQ ID NO: 22894 - DNA, 20 bp, Artificial Sequence
  chemically synthesized
tttgaggaaggggttgatgt

SEQ ID NO: 22895 - DNA, 20 bp, Artificial Sequence
  chemically synthesized
ggttgatgtaagactcctct

SEQ ID NO: 22896 - DNA, 20 bp, Artificial Sequence
  chemically synthesized
gttgatgtaagactcctctt

SEQ ID NO: 22897 - DNA, 20 bp, Artificial Sequence
  chemically synthesized
tgatgtaagactcctcttgg

SEQ ID NO: 22898 - DNA, 20 bp, Artificial Sequence
  chemically synthesized
taagactcctcttgggagca

SEQ ID NO: 22899 - DNA, 20 bp, Artificial Sequence
  chemically synthesized
actcctcttgggagcatagt

SEQ ID NO: 22900 - DNA, 20 bp, Artificial Sequence
  chemically synthesized
tcctcttgggagcatagtga

SEQ ID NO: 22901 - DNA, 20 bp, Artificial Sequence
  chemically synthesized
ctcttgggagcatagtgaga

SEQ ID NO: 22902 - DNA, 20 bp, Artificial Sequence
  chemically synthesized
cttgggagcatagtgagaga

SEQ ID NO: 22903 - DNA, 20 bp, Artificial Sequence
  chemically synthesized
tgggagcatagtgagagaga

SEQ ID NO: 22904 - DNA, 20 bp, Artificial Sequence
  chemically synthesized
ggagcatagtgagagagaga

SEQ ID NO: 22905 - DNA, 20 bp, Artificial Sequence
  chemically synthesized
agcatagtgagagagagaga

SEQ ID NO: 22906 - DNA, 20 bp, Artificial Sequence
  chemically synthesized
catagtgagagagagagaga

SEQ ID NO: 22907 - DNA, 20 bp, Artificial Sequence
  chemically synthesized
tagtgagagagagagagaga

SEQ ID NO: 22908 - DNA, 20 bp, Artificial Sequence
  chemically synthesized
gtgagagagagagagagaga

SEQ ID NO: 22909 - DNA, 20 bp, Artificial Sequence
  chemically synthesized
agagagagagagagcactca

SEQ ID NO: 22910 - DNA, 20 bp, Artificial Sequence
  chemically synthesized
gagagagagagcactcacag

SEQ ID NO: 22911 - DNA, 20 bp, Artificial Sequence
  chemically synthesized
agagcactcacagtggaacc

SEQ ID NO: 22912 - DNA, 20 bp, Artificial Sequence
  chemically synthesized
agcactcacagtggaaccta

SEQ ID NO: 22913 - DNA, 20 bp, Artificial Sequence
  chemically synthesized
actcacagtggaacctagag

SEQ ID NO: 22914 - DNA, 20 bp, Artificial Sequence
  chemically synthesized
ctcacagtggaacctagagt

SEQ ID NO: 22915 - DNA, 20 bp, Artificial Sequence
  chemically synthesized
cagtggaacctagagtggga

SEQ ID NO: 22916 - DNA, 20 bp, Artificial Sequence
  chemically synthesized
agtggaacctagagtgggaa

SEQ ID NO: 22917 - DNA, 20 bp, Artificial Sequence
  chemically synthesized
ctagagtgggaaaggctacc

SEQ ID NO: 22918 - DNA, 20 bp, Artificial Sequence
  chemically synthesized
gagtgggaaaggctacctgg

SEQ ID NO: 22919 - DNA, 20 bp, Artificial Sequence
  chemically synthesized
aggctacctggtggctgtcc

SEQ ID NO: 22920 - DNA, 20 bp, Artificial Sequence
  chemically synthesized
tggtggctgtcctggcatgt

SEQ ID NO: 22921 - DNA, 20 bp, Artificial Sequence
  chemically synthesized
ggctgtcctggcatgtaagt

SEQ ID NO: 22922 - DNA, 20 bp, Artificial Sequence
  chemically synthesized
ggcatgtaagtaagtctgtg

SEQ ID NO: 22923 - DNA, 20 bp, Artificial Sequence
  chemically synthesized
tgtaagtaagtctgtgtggt

SEQ ID NO: 22924 - DNA, 20 bp, Artificial Sequence
  chemically synthesized
gtaagtaagtctgtgtggtc

SEQ ID NO: 22925 - DNA, 20 bp, Artificial Sequence
  chemically synthesized
taagtaagtctgtgtggtca

SEQ ID NO: 22926 - DNA, 20 bp, Artificial Sequence
  chemically synthesized
cagggcttgcattccataaa

SEQ ID NO: 22927 - DNA, 20 bp, Artificial Sequence
  chemically synthesized
cttgcattccataaatggcc

SEQ ID NO: 22928 - DNA, 20 bp, Artificial Sequence
  chemically synthesized
ttgcattccataaatggccc

SEQ ID NO: 22929 - DNA, 20 bp, Artificial Sequence
  chemically synthesized
taaatggcccaggcccctgc

SEQ ID NO: 22930 - DNA, 20 bp, Artificial Sequence
  chemically synthesized
cccaggcccctgctggctgc

SEQ ID NO: 22931 - DNA, 20 bp, Artificial Sequence
  chemically synthesized
ccaggcccctgctggctgct

SEQ ID NO: 22932 - DNA, 20 bp, Artificial Sequence
  chemically synthesized
aggcccctgctggctgctgg

SEQ ID NO: 22933 - DNA, 20 bp, Artificial Sequence
  chemically synthesized
gcccctgctggctgctggga

SEQ ID NO: 22934 - DNA, 20 bp, Artificial Sequence
  chemically synthesized
ctgctggctgctgggagaga

SEQ ID NO: 22935 - DNA, 20 bp, Artificial Sequence
  chemically synthesized
tggctgctgggagagaaagt

SEQ ID NO: 22936 - DNA, 20 bp, Artificial Sequence
  chemically synthesized
tgctgggagagaaagtcggt

SEQ ID NO: 22937 - DNA, 20 bp, Artificial Sequence
  chemically synthesized
gctgggagagaaagtcggtg

SEQ ID NO: 22938 - DNA, 20 bp, Artificial Sequence
  chemically synthesized
tgggagagaaagtcggtgag

SEQ ID NO: 22939 - DNA, 20 bp, Artificial Sequence
  chemically synthesized
ggagagaaagtcggtgagga

SEQ ID NO: 22940 - DNA, 20 bp, Artificial Sequence
  chemically synthesized
agagaaagtcggtgaggaga

SEQ ID NO: 22941 - DNA, 20 bp, Artificial Sequence
  chemically synthesized
gagaaagtcggtgaggagag

SEQ ID NO: 22942 - DNA, 20 bp, Artificial Sequence
  chemically synthesized
agaaagtcggtgaggagaga

SEQ ID NO: 22943 - DNA, 20 bp, Artificial Sequence
  chemically synthesized
gtgaggagagagggttgtac

SEQ ID NO: 22944 - DNA, 20 bp, Artificial Sequence
  chemically synthesized
tgaggagagagggttgtaca

SEQ ID NO: 22945 - DNA, 20 bp, Artificial Sequence
  chemically synthesized
ggagagagggttgtacaagg

SEQ ID NO: 22946 - DNA, 20 bp, Artificial Sequence
  chemically synthesized
gagagagggttgtacaaggc

SEQ ID NO: 22947 - DNA, 20 bp, Artificial Sequence
  chemically synthesized
gagagggttgtacaaggcag

SEQ ID NO: 22948 - DNA, 20 bp, Artificial Sequence
  chemically synthesized
gagggttgtacaaggcagga

SEQ ID NO: 22949 - DNA, 20 bp, Artificial Sequence
  chemically synthesized
ggcaggagagatgtactcac

SEQ ID NO: 22950 - DNA, 20 bp, Artificial Sequence
  chemically synthesized
gcaggagagatgtactcacc

SEQ ID NO: 22951 - DNA, 20 bp, Artificial Sequence
  chemically synthesized
atgtactcaccaggctcttc

SEQ ID NO: 22952 - DNA, 20 bp, Artificial Sequence
  chemically synthesized
tactcaccaggctcttccag

SEQ ID NO: 22953 - DNA, 20 bp, Artificial Sequence
  chemically synthesized
actcaccaggctcttccaga

SEQ ID NO: 22954 - DNA, 20 bp, Artificial Sequence
  chemically synthesized
ctcaccaggctcttccagaa

SEQ ID NO: 22955 - DNA, 20 bp, Artificial Sequence
  chemically synthesized
tcaccaggctcttccagaag

SEQ ID NO: 22956 - DNA, 20 bp, Artificial Sequence
  chemically synthesized
aaatccttgccttgaacctg

SEQ ID NO: 22957 - DNA, 20 bp, Artificial Sequence
  chemically synthesized
cttgccttgaacctgcagca

SEQ ID NO: 22958 - DNA, 20 bp, Artificial Sequence
  chemically synthesized
gccttgaacctgcagcaaag

SEQ ID NO: 22959 - DNA, 20 bp, Artificial Sequence
  chemically synthesized
ttgaacctgcagcaaagtgg

SEQ ID NO: 22960 - DNA, 20 bp, Artificial Sequence
  chemically synthesized
acctgcagcaaagtggaaga

SEQ ID NO: 22961 - DNA, 20 bp, Artificial Sequence
  chemically synthesized
cctgcagcaaagtggaagat

SEQ ID NO: 22962 - DNA, 20 bp, Artificial Sequence
  chemically synthesized
ctcttccctctttcctgctt

SEQ ID NO: 22963 - DNA, 20 bp, Artificial Sequence
  chemically synthesized
tcttccctctttcctgcttc

SEQ ID NO: 22964 - DNA, 20 bp, Artificial Sequence
  chemically synthesized
actcacttttgctgtgtgtc

SEQ ID NO: 22965 - DNA, 20 bp, Artificial Sequence
  chemically synthesized
tcacttttgctgtgtgtcca

SEQ ID NO: 22966 - DNA, 20 bp, Artificial Sequence
  chemically synthesized
gctgtgtgtccagagctgac

SEQ ID NO: 22967 - DNA, 20 bp, Artificial Sequence
  chemically synthesized
tgtgtgtccagagctgacca

SEQ ID NO: 22968 - DNA, 20 bp, Artificial Sequence
  chemically synthesized
gtgtgtccagagctgaccag

SEQ ID NO: 22969 - DNA, 20 bp, Artificial Sequence
  chemically synthesized
cagagctgaccagaggacaa

SEQ ID NO: 22970 - DNA, 20 bp, Artificial Sequence
  chemically synthesized
agctgaccagaggacaatgg

SEQ ID NO: 22971 - DNA, 20 bp, Artificial Sequence
  chemically synthesized
gacaatggcagacttattgt

SEQ ID NO: 22972 - DNA, 20 bp, Artificial Sequence
  chemically synthesized
tggcagacttattgtcagac

SEQ ID NO: 22973 - DNA, 20 bp, Artificial Sequence
  chemically synthesized
cagacttattgtcagactgg

SEQ ID NO: 22974 - DNA, 20 bp, Artificial Sequence
  chemically synthesized
tattgtcagactggcagcac

SEQ ID NO: 22975 - DNA, 20 bp, Artificial Sequence
  chemically synthesized
tcagactggcagcaccagcc

SEQ ID NO: 22976 - DNA, 20 bp, Artificial Sequence
  chemically synthesized
cctagtgctctgtctctgcc

SEQ ID NO: 22977 - DNA, 20 bp, Artificial Sequence
  chemically synthesized
ctagtgctctgtctctgcct

SEQ ID NO: 22978 - DNA, 20 bp, Artificial Sequence
  chemically synthesized
ctctgtctctgcctgggaaa

SEQ ID NO: 22979 - DNA, 20 bp, Artificial Sequence
  chemically synthesized
gcctgggaaatggtttcaca

SEQ ID NO: 22980 - DNA, 20 bp, Artificial Sequence
  chemically synthesized
gaaatggtttcacaaagctc

SEQ ID NO: 22981 - DNA, 20 bp, Artificial Sequence
  chemically synthesized
acaaagctccagttctgccc

SEQ ID NO: 22982 - DNA, 20 bp, Artificial Sequence
  chemically synthesized
tgccctggacacttgcctca

SEQ ID NO: 22983 - DNA, 20 bp, Artificial Sequence
  chemically synthesized
gccctggacacttgcctcat

SEQ ID NO: 22984 - DNA, 20 bp, Artificial Sequence
  chemically synthesized
ccctggacacttgcctcata

SEQ ID NO: 22985 - DNA, 20 bp, Artificial Sequence
  chemically synthesized
agggctatccctttgcccct

SEQ ID NO: 22986 - DNA, 20 bp, Artificial Sequence
  chemically synthesized
ttgcccctcagtaacaccac

SEQ ID NO: 22987 - DNA, 20 bp, Artificial Sequence
  chemically synthesized
tgcccctcagtaacaccact

SEQ ID NO: 22988 - DNA, 20 bp, Artificial Sequence
  chemically synthesized
cctcagtaacaccactggga

SEQ ID NO: 22989 - DNA, 20 bp, Artificial Sequence
  chemically synthesized
cccaccctgtcccccatctg

SEQ ID NO: 22990 - DNA, 20 bp, Artificial Sequence
  chemically synthesized
accctgtcccccatctgtgg

SEQ ID NO: 22991 - DNA, 20 bp, Artificial Sequence
  chemically synthesized
tggtagcctgtgttgcctcg

SEQ ID NO: 22992 - DNA, 20 bp, Artificial Sequence
  chemically synthesized
ggtagcctgtgttgcctcgt

SEQ ID NO: 22993 - DNA, 20 bp, Artificial Sequence
  chemically synthesized
cctgtgttgcctcgtgggac

SEQ ID NO: 22994 - DNA, 20 bp, Artificial Sequence
  chemically synthesized
ctgtgttgcctcgtgggaca

SEQ ID NO: 22995 - DNA, 20 bp, Artificial Sequence
  chemically synthesized
ggcattctgtaaacgtgtat

SEQ ID NO: 22996 - DNA, 20 bp, Artificial Sequence
  chemically synthesized
gtattggacttccattgctt

SEQ ID NO: 22997 - DNA, 20 bp, Artificial Sequence
  chemically synthesized
tgatttgtttttccgacttc

SEQ ID NO: 22998 - DNA, 20 bp, Artificial Sequence
  chemically synthesized
tccgacttccagaactttcc

SEQ ID NO: 22999 - DNA, 20 bp, Artificial Sequence
  chemically synthesized
ttccagaactttcccggttc

SEQ ID NO: 23000 - DNA, 20 bp, Artificial Sequence
  chemically synthesized
ctttcccggttctggttttc

SEQ ID NO: 23001 - DNA, 20 bp, Artificial Sequence
  chemically synthesized
tttcccggttctggttttct

SEQ ID NO: 23002 - DNA, 20 bp, Artificial Sequence
  chemically synthesized
tccgtaatccatttcctgca

SEQ ID NO: 23003 - DNA, 20 bp, Artificial Sequence
  chemically synthesized
ccgtaatccatttcctgcac

SEQ ID NO: 23004 - DNA, 20 bp, Artificial Sequence
  chemically synthesized
gctttcaatcatctcccctc

SEQ ID NO: 23005 - DNA, 20 bp, Artificial Sequence
  chemically synthesized
tctcccctccggttatccta

SEQ ID NO: 23006 - DNA, 20 bp, Artificial Sequence
  chemically synthesized
tcaattgacttttcacatat

SEQ ID NO: 23007 - DNA, 20 bp, Artificial Sequence
  chemically synthesized
caattgacttttcacatatg

SEQ ID NO: 23008 - DNA, 20 bp, Artificial Sequence
  chemically synthesized
aattgacttttcacatatga

SEQ ID NO: 23009 - DNA, 20 bp, Artificial Sequence
  chemically synthesized
tcacatatgagggtgacctc

SEQ ID NO: 23010 - DNA, 20 bp, Artificial Sequence
  chemically synthesized
acctctggatcccttctctt

SEQ ID NO: 23011 - DNA, 20 bp, Artificial Sequence
  chemically synthesized
ggtttgtttgttctcttttc

SEQ ID NO: 23012 - DNA, 20 bp, Artificial Sequence
  chemically synthesized
tttgtttgttctcttttcca

SEQ ID NO: 23013 - DNA, 20 bp, Artificial Sequence
  chemically synthesized
tgttctcttttccagagctg

SEQ ID NO: 23014 - DNA, 20 bp, Artificial Sequence
  chemically synthesized
cagagctgcagtatgtttct

SEQ ID NO: 23015 - DNA, 20 bp, Artificial Sequence
  chemically synthesized
agagctgcagtatgtttctt

SEQ ID NO: 23016 - DNA, 20 bp, Artificial Sequence
  chemically synthesized
ttcttaggtgttttaaaaaa

SEQ ID NO: 23017 - DNA, 20 bp, Artificial Sequence
  chemically synthesized
aggtgttttaaaaaatagct

SEQ ID NO: 23018 - DNA, 20 bp, Artificial Sequence
  chemically synthesized
ttttaaaaaatagctaagaa

SEQ ID NO: 23019 - DNA, 20 bp, Artificial Sequence
  chemically synthesized
gtgaaaacacccttgtaatt

SEQ ID NO: 23020 - DNA, 20 bp, Artificial Sequence
  chemically synthesized
gaaaacacccttgtaattta

SEQ ID NO: 23021 - DNA, 20 bp, Artificial Sequence
  chemically synthesized
ccttgtaatttagagactct

SEQ ID NO: 23022 - DNA, 20 bp, Artificial Sequence
  chemically synthesized
agagactctcagaaaaatga

SEQ ID NO: 23023 - DNA, 20 bp, Artificial Sequence
  chemically synthesized
agaaaaatgacagcaccatt

SEQ ID NO: 23024 - DNA, 20 bp, Artificial Sequence
  chemically synthesized
aaaaatgacagcaccattta

SEQ ID NO: 23025 - DNA, 20 bp, Artificial Sequence
  chemically synthesized
tgacagcaccatttagagcc

SEQ ID NO: 23026 - DNA, 20 bp, Artificial Sequence
  chemically synthesized
ccatttagagcctggaatta

SEQ ID NO: 23027 - DNA, 20 bp, Artificial Sequence
  chemically synthesized
tcactgtgccttctctgccc

SEQ ID NO: 23028 - DNA, 20 bp, Artificial Sequence
  chemically synthesized
cactgtgccttctctgcccc

SEQ ID NO: 23029 - DNA, 20 bp, Artificial Sequence
  chemically synthesized
ttctctgccccaggctccca

SEQ ID NO: 23030 - DNA, 20 bp, Artificial Sequence
  chemically synthesized
tctgccccaggctcccatgg

SEQ ID NO: 23031 - DNA, 20 bp, Artificial Sequence
  chemically synthesized
ccccaggctcccatggtggc

SEQ ID NO: 23032 - DNA, 20 bp, Artificial Sequence
  chemically synthesized
cccaggctcccatggtggca

SEQ ID NO: 23033 - DNA, 20 bp, Artificial Sequence
  chemically synthesized
ccaggctcccatggtggcaa

SEQ ID NO: 23034 - DNA, 20 bp, Artificial Sequence
  chemically synthesized
cccatggtggcaagggtttt

SEQ ID NO: 23035 - DNA, 20 bp, Artificial Sequence
  chemically synthesized
tggtggcaagggtttttggt

SEQ ID NO: 23036 - DNA, 20 bp, Artificial Sequence
  chemically synthesized
ggtggcaagggtttttggtt

SEQ ID NO: 23037 - DNA, 20 bp, Artificial Sequence
  chemically synthesized
gtggcaagggtttttggttg

SEQ ID NO: 23038 - DNA, 20 bp, Artificial Sequence
  chemically synthesized
tggcaagggtttttggttgg

SEQ ID NO: 23039 - DNA, 20 bp, Artificial Sequence
  chemically synthesized
caagggtttttggttggggg

SEQ ID NO: 23040 - DNA, 20 bp, Artificial Sequence
  chemically synthesized
aagggtttttggttggggga

SEQ ID NO: 23041 - DNA, 20 bp, Artificial Sequence
  chemically synthesized
agggtttttggttgggggaa

SEQ ID NO: 23042 - DNA, 20 bp, Artificial Sequence
  chemically synthesized
gggtttttggttgggggaag

SEQ ID NO: 23043 - DNA, 20 bp, Artificial Sequence
  chemically synthesized
gtattgaattgcctgtcttt

SEQ ID NO: 23044 - DNA, 20 bp, Artificial Sequence
  chemically synthesized
ttgaattgcctgtctttgag

SEQ ID NO: 23045 - DNA, 20 bp, Artificial Sequence
  chemically synthesized
tgaattgcctgtctttgagc

SEQ ID NO: 23046 - DNA, 20 bp, Artificial Sequence
  chemically synthesized
tgcctgtctttgagcaggaa

SEQ ID NO: 23047 - DNA, 20 bp, Artificial Sequence
  chemically synthesized
tttgagcaggaaaagaatta

SEQ ID NO: 23048 - DNA, 20 bp, Artificial Sequence
  chemically synthesized
ggaaaagaattacagttttc

SEQ ID NO: 23049 - DNA, 20 bp, Artificial Sequence
  chemically synthesized
gaaaagaattacagttttcc

SEQ ID NO: 23050 - DNA, 20 bp, Artificial Sequence
  chemically synthesized
tttgtgtgtatgtgctgatt

SEQ ID NO: 23051 - DNA, 20 bp, Artificial Sequence
  chemically synthesized
ttgtgtgtatgtgctgattg

SEQ ID NO: 23052 - DNA, 20 bp, Artificial Sequence
  chemically synthesized
tgtgtgtatgtgctgattga

SEQ ID NO: 23053 - DNA, 20 bp, Artificial Sequence
  chemically synthesized
gtgctgattgagggcccatt

SEQ ID NO: 23054 - DNA, 20 bp, Artificial Sequence
  chemically synthesized
attgagaatattttgacttt

SEQ ID NO: 23055 - DNA, 20 bp, Artificial Sequence
  chemically synthesized
ttgagaatattttgactttt

SEQ ID NO: 23056 - DNA, 20 bp, Artificial Sequence
  chemically synthesized
tgagaatattttgactttta

SEQ ID NO: 23057 - DNA, 20 bp, Artificial Sequence
  chemically synthesized
gaatattttgacttttaggg

SEQ ID NO: 23058 - DNA, 20 bp, Artificial Sequence
  chemically synthesized
agctccaaactctcaaacca

SEQ ID NO: 23059 - DNA, 20 bp, Artificial Sequence
  chemically synthesized
gctccaaactctcaaaccac

SEQ ID NO: 23060 - DNA, 20 bp, Artificial Sequence
  chemically synthesized
ctccaaactctcaaaccaca

SEQ ID NO: 23061 - DNA, 20 bp, Artificial Sequence
  chemically synthesized
tctgttatgacgttatatgt

SEQ ID NO: 23062 - DNA, 20 bp, Artificial Sequence
  chemically synthesized
gttatatgtaagcatcacaa

SEQ ID NO: 23063 - DNA, 20 bp, Artificial Sequence
  chemically synthesized
ttatatgtaagcatcacaac

SEQ ID NO: 23064 - DNA, 20 bp, Artificial Sequence
  chemically synthesized
tatgtaagcatcacaacagg

SEQ ID NO: 23065 - DNA, 20 bp, Artificial Sequence
  chemically synthesized
tgtaagcatcacaacaggca

SEQ ID NO: 23066 - DNA, 20 bp, Artificial Sequence
  chemically synthesized
agaatgtctgcaccccaccc

SEQ ID NO: 23067 - DNA, 20 bp, Artificial Sequence
  chemically synthesized
ctgcaccccaccctggaaaa

SEQ ID NO: 23068 - DNA, 20 bp, Artificial Sequence
  chemically synthesized
aacagcctgactgtgcccca

SEQ ID NO: 23069 - DNA, 20 bp, Artificial Sequence
  chemically synthesized
acagcctgactgtgccccat

SEQ ID NO: 23070 - DNA, 20 bp, Artificial Sequence
  chemically synthesized
actgtgccccatgggcaaac

SEQ ID NO: 23071 - DNA, 20 bp, Artificial Sequence
  chemically synthesized
gccccatgggcaaaccagac

SEQ ID NO: 23072 - DNA, 20 bp, Artificial Sequence
  chemically synthesized
gggcaaaccagactagttta

SEQ ID NO: 23073 - DNA, 20 bp, Artificial Sequence
  chemically synthesized
ggcaaaccagactagtttat

SEQ ID NO: 23074 - DNA, 20 bp, Artificial Sequence
  chemically synthesized
gcaaaccagactagtttata

SEQ ID NO: 23075 - DNA, 20 bp, Artificial Sequence
  chemically synthesized
caaaccagactagtttatag

SEQ ID NO: 23076 - DNA, 20 bp, Artificial Sequence
  chemically synthesized
aaaccagactagtttatagg

SEQ ID NO: 23077 - DNA, 20 bp, Artificial Sequence
  chemically synthesized
tttatagggggttctactct

SEQ ID NO: 23078 - DNA, 20 bp, Artificial Sequence
  chemically synthesized
ttatagggggttctactctg

SEQ ID NO: 23079 - DNA, 20 bp, Artificial Sequence
  chemically synthesized
gttctactctgaggtactga

SEQ ID NO: 23080 - DNA, 20 bp, Artificial Sequence
  chemically synthesized
tctgaggtactgatggacct

SEQ ID NO: 23081 - DNA, 20 bp, Artificial Sequence
  chemically synthesized
ctgaggtactgatggacctt

SEQ ID NO: 23082 - DNA, 20 bp, Artificial Sequence
  chemically synthesized
ttgggtgctattcctgtgat

SEQ ID NO: 23083 - DNA, 20 bp, Artificial Sequence
  chemically synthesized
tgggtgctattcctgtgata

SEQ ID NO: 23084 - DNA, 20 bp, Artificial Sequence
  chemically synthesized
gtgctattcctgtgataagg

SEQ ID NO: 23085 - DNA, 20 bp, Artificial Sequence
  chemically synthesized
tgctattcctgtgataagga

SEQ ID NO: 23086 - DNA, 20 bp, Artificial Sequence
  chemically synthesized
tattcctgtgataaggaagg

SEQ ID NO: 23087 - DNA, 20 bp, Artificial Sequence
  chemically synthesized
cctgtgataaggaaggcagc

SEQ ID NO: 23088 - DNA, 20 bp, Artificial Sequence
  chemically synthesized
tgataaggaaggcagctaga

SEQ ID NO: 23089 - DNA, 20 bp, Artificial Sequence
  chemically synthesized
gataaggaaggcagctagac

SEQ ID NO: 23090 - DNA, 20 bp, Artificial Sequence
  chemically synthesized
gaaggcagctagacaggact

SEQ ID NO: 23091 - DNA, 20 bp, Artificial Sequence
  chemically synthesized
aaggcagctagacaggactt

SEQ ID NO: 23092 - DNA, 20 bp, Artificial Sequence
  chemically synthesized
ggcagctagacaggacttgg

SEQ ID NO: 23093 - DNA, 20 bp, Artificial Sequence
  chemically synthesized
caggacttgggagttatctg

SEQ ID NO: 23094 - DNA, 20 bp, Artificial Sequence
  chemically synthesized
acttgggagttatctgtagt

SEQ ID NO: 23095 - DNA, 20 bp, Artificial Sequence
  chemically synthesized
gggagttatctgtagtgaga

SEQ ID NO: 23096 - DNA, 20 bp, Artificial Sequence
  chemically synthesized
tctgtagtgagatggctgaa

SEQ ID NO: 23097 - DNA, 20 bp, Artificial Sequence
  chemically synthesized
gagatggctgaaaagcgata

SEQ ID NO: 23098 - DNA, 20 bp, Artificial Sequence
  chemically synthesized
agatggctgaaaagcgatac

SEQ ID NO: 23099 - DNA, 20 bp, Artificial Sequence
  chemically synthesized
gatggctgaaaagcgataca

SEQ ID NO: 23100 - DNA, 20 bp, Artificial Sequence
  chemically synthesized
gctgaaaagcgatacagggc

SEQ ID NO: 23101 - DNA, 20 bp, Artificial Sequence
  chemically synthesized
acagggctggctctatgccc

SEQ ID NO: 23102 - DNA, 20 bp, Artificial Sequence
  chemically synthesized
cagggctggctctatgcccc

SEQ ID NO: 23103 - DNA, 20 bp, Artificial Sequence
  chemically synthesized
tctatgccccaggtgtgcat

SEQ ID NO: 23104 - DNA, 20 bp, Artificial Sequence
  chemically synthesized
tgccccaggtgtgcataagt

SEQ ID NO: 23105 - DNA, 20 bp, Artificial Sequence
  chemically synthesized
ccccaggtgtgcataagtaa

SEQ ID NO: 23106 - DNA, 20 bp, Artificial Sequence
  chemically synthesized
caggtgtgcataagtaagag

SEQ ID NO: 23107 - DNA, 20 bp, Artificial Sequence
  chemically synthesized
tgtgcataagtaagagcaga

SEQ ID NO: 23108 - DNA, 20 bp, Artificial Sequence
  chemically synthesized
taagagcagatagctgattc

SEQ ID NO: 23109 - DNA, 20 bp, Artificial Sequence
  chemically synthesized
agatagctgattccagtgca

SEQ ID NO: 23110 - DNA, 20 bp, Artificial Sequence
  chemically synthesized
attccagtgcaaagtccata

SEQ ID NO: 23111 - DNA, 20 bp, Artificial Sequence
  chemically synthesized
ttccagtgcaaagtccatac

SEQ ID NO: 23112 - DNA, 20 bp, Artificial Sequence
  chemically synthesized
agtccatacaggtaataaca

SEQ ID NO: 23113 - DNA, 20 bp, Artificial Sequence
  chemically synthesized
gtccatacaggtaataacat

SEQ ID NO: 23114 - DNA, 20 bp, Artificial Sequence
  chemically synthesized
atacaggtaataacataggc

SEQ ID NO: 23115 - DNA, 20 bp, Artificial Sequence
  chemically synthesized
ggtaataacataggccagaa

SEQ ID NO: 23116 - DNA, 20 bp, Artificial Sequence
  chemically synthesized
taataacataggccagaaaa

SEQ ID NO: 23117 - DNA, 20 bp, Artificial Sequence
  chemically synthesized
cataggccagaaaagagata

SEQ ID NO: 23118 - DNA, 20 bp, Artificial Sequence
  chemically synthesized
agagatatggcatctactct

SEQ ID NO: 23119 - DNA, 20 bp, Artificial Sequence
  chemically synthesized
tactcttagacataacacac

SEQ ID NO: 23120 - DNA, 20 bp, Artificial Sequence
  chemically synthesized
actcttagacataacacacc

SEQ ID NO: 23121 - DNA, 20 bp, Artificial Sequence
  chemically synthesized
ctcttagacataacacacca

SEQ ID NO: 23122 - DNA, 20 bp, Artificial Sequence
  chemically synthesized
ccagggtcaatacaactttg

SEQ ID NO: 23123 - DNA, 20 bp, Artificial Sequence
  chemically synthesized
ggtcaatacaactttgaagc

SEQ ID NO: 23124 - DNA, 20 bp, Artificial Sequence
  chemically synthesized
atacaactttgaagctagtc

SEQ ID NO: 23125 - DNA, 20 bp, Artificial Sequence
  chemically synthesized
ctttgaagctagtctagtgc

SEQ ID NO: 23126 - DNA, 20 bp, Artificial Sequence
  chemically synthesized
gctagtctagtgcaagctaa

SEQ ID NO: 23127 - DNA, 20 bp, Artificial Sequence
  chemically synthesized
gctaacagttgcttttatca

SEQ ID NO: 23128 - DNA, 20 bp, Artificial Sequence
  chemically synthesized
ctaacagttgcttttatcac

SEQ ID NO: 23129 - DNA, 20 bp, Artificial Sequence
  chemically synthesized
gttgcttttatcacaggctc

SEQ ID NO: 23130 - DNA, 20 bp, Artificial Sequence
  chemically synthesized
ttgcttttatcacaggctcc

SEQ ID NO: 23131 - DNA, 20 bp, Artificial Sequence
  chemically synthesized
cttttatcacaggctccagg

SEQ ID NO: 23132 - DNA, 20 bp, Artificial Sequence
  chemically synthesized
ttttatcacaggctccagga

SEQ ID NO: 23133 - DNA, 20 bp, Artificial Sequence
  chemically synthesized
tttatcacaggctccaggaa

SEQ ID NO: 23134 - DNA, 20 bp, Artificial Sequence
  chemically synthesized
cacaggctccaggaagggtt

SEQ ID NO: 23135 - DNA, 20 bp, Artificial Sequence
  chemically synthesized
ggaagggtttggcctctgat

SEQ ID NO: 23136 - DNA, 20 bp, Artificial Sequence
  chemically synthesized
gaagggtttggcctctgatt

SEQ ID NO: 23137 - DNA, 20 bp, Artificial Sequence
  chemically synthesized
aagggtttggcctctgatta

SEQ ID NO: 23138 - DNA, 20 bp, Artificial Sequence
  chemically synthesized
ggtttggcctctgattaggg

SEQ ID NO: 23139 - DNA, 20 bp, Artificial Sequence
  chemically synthesized
gtttggcctctgattagggt

SEQ ID NO: 23140 - DNA, 20 bp, Artificial Sequence
  chemically synthesized
tttggcctctgattagggtg

SEQ ID NO: 23141 - DNA, 20 bp, Artificial Sequence
  chemically synthesized
ttggcctctgattagggtgg

SEQ ID NO: 23142 - DNA, 20 bp, Artificial Sequence
  chemically synthesized
ctctgattagggtgggggcg

SEQ ID NO: 23143 - DNA, 20 bp, Artificial Sequence
  chemically synthesized
tctgattagggtgggggcgt

SEQ ID NO: 23144 - DNA, 20 bp, Artificial Sequence
  chemically synthesized
gattagggtgggggcgtggg

SEQ ID NO: 23145 - DNA, 20 bp, Artificial Sequence
  chemically synthesized
attagggtgggggcgtgggt

SEQ ID NO: 23146 - DNA, 20 bp, Artificial Sequence
  chemically synthesized
ttagggtgggggcgtgggtg

SEQ ID NO: 23147 - DNA, 20 bp, Artificial Sequence
  chemically synthesized
gggtgggggcgtgggtgggg

SEQ ID NO: 23148 - DNA, 20 bp, Artificial Sequence
  chemically synthesized
tgggggcgtgggtggggtag

SEQ ID NO: 23149 - DNA, 20 bp, Artificial Sequence
  chemically synthesized
ggggcgtgggtggggtagaa

SEQ ID NO: 23150 - DNA, 20 bp, Artificial Sequence
  chemically synthesized
gggcgtgggtggggtagaag

SEQ ID NO: 23151 - DNA, 20 bp, Artificial Sequence
  chemically synthesized
tgggtggggtagaagaggac

SEQ ID NO: 23152 - DNA, 20 bp, Artificial Sequence
  chemically synthesized
gtggggtagaagaggactgg

SEQ ID NO: 23153 - DNA, 20 bp, Artificial Sequence
  chemically synthesized
ggactggcagacctctccat

SEQ ID NO: 23154 - DNA, 20 bp, Artificial Sequence
  chemically synthesized
ctggcagacctctccatcgg

SEQ ID NO: 23155 - DNA, 20 bp, Artificial Sequence
  chemically synthesized
tccatcggtggccgtttgcc

SEQ ID NO: 23156 - DNA, 20 bp, Artificial Sequence
  chemically synthesized
ccatcggtggccgtttgccc

SEQ ID NO: 23157 - DNA, 20 bp, Artificial Sequence
  chemically synthesized
catcggtggccgtttgccca

SEQ ID NO: 23158 - DNA, 20 bp, Artificial Sequence
  chemically synthesized
atcggtggccgtttgcccag

SEQ ID NO: 23159 - DNA, 20 bp, Artificial Sequence
  chemically synthesized
tcggtggccgtttgcccagg

SEQ ID NO: 23160 - DNA, 20 bp, Artificial Sequence
  chemically synthesized
cggtggccgtttgcccaggg

SEQ ID NO: 23161 - DNA, 20 bp, Artificial Sequence
  chemically synthesized
ttgcccaggggggcctcttt

SEQ ID NO: 23162 - DNA, 20 bp, Artificial Sequence
  chemically synthesized
cccaggggggcctctttcgg

SEQ ID NO: 23163 - DNA, 20 bp, Artificial Sequence
  chemically synthesized
ccaggggggcctctttcgga

SEQ ID NO: 23164 - DNA, 20 bp, Artificial Sequence
  chemically synthesized
cctctttcggaaggctctct

SEQ ID NO: 23165 - DNA, 20 bp, Artificial Sequence
  chemically synthesized
tcggaaggctctcttggtga

SEQ ID NO: 23166 - DNA, 20 bp, Artificial Sequence
  chemically synthesized
ggaaggctctcttggtgatg

SEQ ID NO: 23167 - DNA, 20 bp, Artificial Sequence
  chemically synthesized
ctctcttggtgatggagaat

SEQ ID NO: 23168 - DNA, 20 bp, Artificial Sequence
  chemically synthesized
aattggattttatttctcaa

SEQ ID NO: 23169 - DNA, 20 bp, Artificial Sequence
  chemically synthesized
attggattttatttctcaat

SEQ ID NO: 23170 - DNA, 20 bp, Artificial Sequence
  chemically synthesized
aatttgtatgccatgccgtg

SEQ ID NO: 23171 - DNA, 20 bp, Artificial Sequence
  chemically synthesized
tgtggactcccaaaattgta

SEQ ID NO: 23172 - DNA, 20 bp, Artificial Sequence
  chemically synthesized
gtggactcccaaaattgtaa

SEQ ID NO: 23173 - DNA, 20 bp, Artificial Sequence
  chemically synthesized
ggactcccaaaattgtaaag

SEQ ID NO: 23174 - DNA, 20 bp, Artificial Sequence
  chemically synthesized
gactcccaaaattgtaaagg

SEQ ID NO: 23175 - DNA, 20 bp, Artificial Sequence
  chemically synthesized
ccaaaattgtaaaggaggtg

SEQ ID NO: 23176 - DNA, 20 bp, Artificial Sequence
  chemically synthesized
attgtccatttttcatctgt

SEQ ID NO: 23177 - DNA, 20 bp, Artificial Sequence
  chemically synthesized
ttgtccatttttcatctgtc

SEQ ID NO: 23178 - DNA, 20 bp, Artificial Sequence
  chemically synthesized
gtccacccatccatcacata

SEQ ID NO: 23179 - DNA, 20 bp, Artificial Sequence
  chemically synthesized
tccacccatccatcacatat

SEQ ID NO: 23180 - DNA, 20 bp, Artificial Sequence
  chemically synthesized
catcacatataggcacctat

SEQ ID NO: 23181 - DNA, 20 bp, Artificial Sequence
  chemically synthesized
atcacatataggcacctatc

SEQ ID NO: 23182 - DNA, 20 bp, Artificial Sequence
  chemically synthesized
tataggcacctatcaggtac

SEQ ID NO: 23183 - DNA, 20 bp, Artificial Sequence
  chemically synthesized
tcaggtaccagctactgtgt

SEQ ID NO: 23184 - DNA, 20 bp, Artificial Sequence
  chemically synthesized
caggtaccagctactgtgtt

SEQ ID NO: 23185 - DNA, 20 bp, Artificial Sequence
  chemically synthesized
ccttttcttctgacccaaac

SEQ ID NO: 23186 - DNA, 20 bp, Artificial Sequence
  chemically synthesized
cttttcttctgacccaaact

SEQ ID NO: 23187 - DNA, 20 bp, Artificial Sequence
  chemically synthesized
ttctgacccaaactaggaat

SEQ ID NO: 23188 - DNA, 20 bp, Artificial Sequence
  chemically synthesized
tctgacccaaactaggaatt

SEQ ID NO: 23189 - DNA, 20 bp, Artificial Sequence
  chemically synthesized
ctgacccaaactaggaattg

SEQ ID NO: 23190 - DNA, 20 bp, Artificial Sequence
  chemically synthesized
cccaaactaggaattgggga

SEQ ID NO: 23191 - DNA, 20 bp, Artificial Sequence
  chemically synthesized
ccaaactaggaattggggaa

SEQ ID NO: 23192 - DNA, 20 bp, Artificial Sequence
  chemically synthesized
caaactaggaattggggaaa

SEQ ID NO: 23193 - DNA, 20 bp, Artificial Sequence
  chemically synthesized
ctgataactttgtttctgct

SEQ ID NO: 23194 - DNA, 20 bp, Artificial Sequence
  chemically synthesized
tgataactttgtttctgctg

SEQ ID NO: 23195 - DNA, 20 bp, Artificial Sequence
  chemically synthesized
gaggtgtaactaataaatac

SEQ ID NO: 23196 - DNA, 20 bp, Artificial Sequence
  chemically synthesized
aggtgtaactaataaatacc

SEQ ID NO: 23197 - DNA, 20 bp, Artificial Sequence
  chemically synthesized
gtgtaactaataaataccag

SEQ ID NO: 23198 - DNA, 20 bp, Artificial Sequence
  chemically synthesized
tgtaactaataaataccagg

SEQ ID NO: 23199 - DNA, 20 bp, Artificial Sequence
  chemically synthesized
aactaataaataccaggagg

SEQ ID NO: 23200 - DNA, 20 bp, Artificial Sequence
  chemically synthesized
aataccaggaggcagcattt

SEQ ID NO: 23201 - DNA, 20 bp, Artificial Sequence
  chemically synthesized
gaggcagcattttagttcac

SEQ ID NO: 23202 - DNA, 20 bp, Artificial Sequence
  chemically synthesized
agcattttagttcacaagct

SEQ ID NO: 23203 - DNA, 20 bp, Artificial Sequence
  chemically synthesized
cattttagttcacaagctcg

SEQ ID NO: 23204 - DNA, 20 bp, Artificial Sequence
  chemically synthesized
tcggagcacttactctgctc

SEQ ID NO: 23205 - DNA, 20 bp, Artificial Sequence
  chemically synthesized
cggagcacttactctgctct

SEQ ID NO: 23206 - DNA, 20 bp, Artificial Sequence
  chemically synthesized
attttcatacaaaccctatg

SEQ ID NO: 23207 - DNA, 20 bp, Artificial Sequence
  chemically synthesized
ctattattattcctatttta

SEQ ID NO: 23208 - DNA, 20 bp, Artificial Sequence
  chemically synthesized
attattcctattttacggat

SEQ ID NO: 23209 - DNA, 20 bp, Artificial Sequence
  chemically synthesized
tgagtccatattttaaattc

SEQ ID NO: 23210 - DNA, 20 bp, Artificial Sequence
  chemically synthesized
catattttaaattccagctg

SEQ ID NO: 23211 - DNA, 20 bp, Artificial Sequence
  chemically synthesized
ttttaaattccagctgaaga

SEQ ID NO: 23212 - DNA, 20 bp, Artificial Sequence
  chemically synthesized
ccagctgaagaaagaacatt

SEQ ID NO: 23213 - DNA, 20 bp, Artificial Sequence
  chemically synthesized
aacatttggtgataaatcat

SEQ ID NO: 23214 - DNA, 20 bp, Artificial Sequence
  chemically synthesized
acatttggtgataaatcatt

SEQ ID NO: 23215 - DNA, 20 bp, Artificial Sequence
  chemically synthesized
ggtgataaatcattaggaat

SEQ ID NO: 23216 - DNA, 20 bp, Artificial Sequence
  chemically synthesized
ataaatcattaggaatgagc

SEQ ID NO: 23217 - DNA, 20 bp, Artificial Sequence
  chemically synthesized
taaatcattaggaatgagct

SEQ ID NO: 23218 - DNA, 20 bp, Artificial Sequence
  chemically synthesized
aatcattaggaatgagctag

SEQ ID NO: 23219 - DNA, 20 bp, Artificial Sequence
  chemically synthesized
ctaggagttatttgtcatca

SEQ ID NO: 23220 - DNA, 20 bp, Artificial Sequence
  chemically synthesized
gttatttgtcatcacagaac

SEQ ID NO: 23221 - DNA, 20 bp, Artificial Sequence
  chemically synthesized
gaaccagtctgtattgcccc

SEQ ID NO: 23222 - DNA, 20 bp, Artificial Sequence
  chemically synthesized
agtctgtattgccccaagtc

SEQ ID NO: 23223 - DNA, 20 bp, Artificial Sequence
  chemically synthesized
ccaagtctggctttgccaat

SEQ ID NO: 23224 - DNA, 20 bp, Artificial Sequence
  chemically synthesized
aagtctggctttgccaattg

SEQ ID NO: 23225 - DNA, 20 bp, Artificial Sequence
  chemically synthesized
tggctttgccaattggagat

SEQ ID NO: 23226 - DNA, 20 bp, Artificial Sequence
  chemically synthesized
ggctttgccaattggagatt

SEQ ID NO: 23227 - DNA, 20 bp, Artificial Sequence
  chemically synthesized
gctttgccaattggagatta

SEQ ID NO: 23228 - DNA, 20 bp, Artificial Sequence
  chemically synthesized
tttgccaattggagattagg

SEQ ID NO: 23229 - DNA, 20 bp, Artificial Sequence
  chemically synthesized
ccaattggagattagggaga

SEQ ID NO: 23230 - DNA, 20 bp, Artificial Sequence
  chemically synthesized
ctttgatatctcatctcact

SEQ ID NO: 23231 - DNA, 20 bp, Artificial Sequence
  chemically synthesized
tatctcatctcactgagctc

SEQ ID NO: 23232 - DNA, 20 bp, Artificial Sequence
  chemically synthesized
atctcatctcactgagctct

SEQ ID NO: 23233 - DNA, 20 bp, Artificial Sequence
  chemically synthesized
ctctccccatactcccatct

SEQ ID NO: 23234 - DNA, 20 bp, Artificial Sequence
  chemically synthesized
catcttggcaaaaattgcat

SEQ ID NO: 23235 - DNA, 20 bp, Artificial Sequence
  chemically synthesized
aaaaattgcataagatttat

SEQ ID NO: 23236 - DNA, 20 bp, Artificial Sequence
  chemically synthesized
gcataagatttataagacat

SEQ ID NO: 23237 - DNA, 20 bp, Artificial Sequence
  chemically synthesized
cataagatttataagacatt

SEQ ID NO: 23238 - DNA, 20 bp, Artificial Sequence
  chemically synthesized
ataagatttataagacatta

SEQ ID NO: 23239 - DNA, 20 bp, Artificial Sequence
  chemically synthesized
tttataagacattagggtat

SEQ ID NO: 23240 - DNA, 20 bp, Artificial Sequence
  chemically synthesized
tataagacattagggtattg

SEQ ID NO: 23241 - DNA, 20 bp, Artificial Sequence
  chemically synthesized
tattacaacctccttgttta

SEQ ID NO: 23242 - DNA, 20 bp, Artificial Sequence
  chemically synthesized
ttacaacctccttgtttaca

SEQ ID NO: 23243 - DNA, 20 bp, Artificial Sequence
  chemically synthesized
tacaacctccttgtttacag

SEQ ID NO: 23244 - DNA, 20 bp, Artificial Sequence
  chemically synthesized
acaacctccttgtttacaga

SEQ ID NO: 23245 - DNA, 20 bp, Artificial Sequence
  chemically synthesized
caacctccttgtttacagag

SEQ ID NO: 23246 - DNA, 20 bp, Artificial Sequence
  chemically synthesized
ttgtttacagaggggcaacc

SEQ ID NO: 23247 - DNA, 20 bp, Artificial Sequence
  chemically synthesized
tgtttacagaggggcaaccc

SEQ ID NO: 23248 - DNA, 20 bp, Artificial Sequence
  chemically synthesized
acagaggggcaacccaggtc

SEQ ID NO: 23249 - DNA, 20 bp, Artificial Sequence
  chemically synthesized
agaggggcaacccaggtcca

SEQ ID NO: 23250 - DNA, 20 bp, Artificial Sequence
  chemically synthesized
ggggcaacccaggtccagag

SEQ ID NO: 23251 - DNA, 20 bp, Artificial Sequence
  chemically synthesized
gggcaacccaggtccagagt

SEQ ID NO: 23252 - DNA, 20 bp, Artificial Sequence
  chemically synthesized
ggcaacccaggtccagagtg

SEQ ID NO: 23253 - DNA, 20 bp, Artificial Sequence
  chemically synthesized
caacccaggtccagagtggg

SEQ ID NO: 23254 - DNA, 20 bp, Artificial Sequence
  chemically synthesized
aacccaggtccagagtgggg

SEQ ID NO: 23255 - DNA, 20 bp, Artificial Sequence
  chemically synthesized
gtccagagtggggaggtgac

SEQ ID NO: 23256 - DNA, 20 bp, Artificial Sequence
  chemically synthesized
tccagagtggggaggtgacc

SEQ ID NO: 23257 - DNA, 20 bp, Artificial Sequence
  chemically synthesized
gtggggaggtgaccaggcca

SEQ ID NO: 23258 - DNA, 20 bp, Artificial Sequence
  chemically synthesized
accaggccatggtcactgcc

SEQ ID NO: 23259 - DNA, 20 bp, Artificial Sequence
  chemically synthesized
gccatggtcactgcccagtt

SEQ ID NO: 23260 - DNA, 20 bp, Artificial Sequence
  chemically synthesized
catggtcactgcccagttta

SEQ ID NO: 23261 - DNA, 20 bp, Artificial Sequence
  chemically synthesized
atggtcactgcccagtttag

SEQ ID NO: 23262 - DNA, 20 bp, Artificial Sequence
  chemically synthesized
cccagtttagaggccatgca

SEQ ID NO: 23263 - DNA, 20 bp, Artificial Sequence
  chemically synthesized
tttagaggccatgcacagat

SEQ ID NO: 23264 - DNA, 20 bp, Artificial Sequence
  chemically synthesized
agaggccatgcacagatgag

SEQ ID NO: 23265 - DNA, 20 bp, Artificial Sequence
  chemically synthesized
cagatgagaagccaaactcc

SEQ ID NO: 23266 - DNA, 20 bp, Artificial Sequence
  chemically synthesized
gaagccaaactcccagctcc

SEQ ID NO: 23267 - DNA, 20 bp, Artificial Sequence
  chemically synthesized
cgtcttcccactctcccatg

SEQ ID NO: 23268 - DNA, 20 bp, Artificial Sequence
  chemically synthesized
cactctcccatgtggcctgt

SEQ ID NO: 23269 - DNA, 20 bp, Artificial Sequence
  chemically synthesized
caccctctctcactcttgct

SEQ ID NO: 23270 - DNA, 20 bp, Artificial Sequence
  chemically synthesized
tcactcttgcttagcctgtg

SEQ ID NO: 23271 - DNA, 20 bp, Artificial Sequence
  chemically synthesized
ttgcttagcctgtgtagctc

SEQ ID NO: 23272 - DNA, 20 bp, Artificial Sequence
  chemically synthesized
tgcttagcctgtgtagctca

SEQ ID NO: 23273 - DNA, 20 bp, Artificial Sequence
  chemically synthesized
caaggatgtatttattgccc

SEQ ID NO: 23274 - DNA, 20 bp, Artificial Sequence
  chemically synthesized
aaggatgtatttattgccct

SEQ ID NO: 23275 - DNA, 20 bp, Artificial Sequence
  chemically synthesized
gtatttattgccctaggcgt

SEQ ID NO: 23276 - DNA, 20 bp, Artificial Sequence
  chemically synthesized
cctaggcgtaagaatgtgct

SEQ ID NO: 23277 - DNA, 20 bp, Artificial Sequence
  chemically synthesized
ctaggcgtaagaatgtgctc

SEQ ID NO: 23278 - DNA, 20 bp, Artificial Sequence
  chemically synthesized
agaatgtgctcaggtttctt

SEQ ID NO: 23279 - DNA, 20 bp, Artificial Sequence
  chemically synthesized
ctcaggtttcttaagtaatg

SEQ ID NO: 23280 - DNA, 20 bp, Artificial Sequence
  chemically synthesized
tcaggtttcttaagtaatgt

SEQ ID NO: 23281 - DNA, 20 bp, Artificial Sequence
  chemically synthesized
atgtaggtgtgcctcaccca

SEQ ID NO: 23282 - DNA, 20 bp, Artificial Sequence
  chemically synthesized
tgtaggtgtgcctcacccat

SEQ ID NO: 23283 - DNA, 20 bp, Artificial Sequence
  chemically synthesized
gtaggtgtgcctcacccatg

SEQ ID NO: 23284 - DNA, 20 bp, Artificial Sequence
  chemically synthesized
actttctctctgtttattgc

SEQ ID NO: 23285 - DNA, 20 bp, Artificial Sequence
  chemically synthesized
ttctctctgtttattgccag

SEQ ID NO: 23286 - DNA, 20 bp, Artificial Sequence
  chemically synthesized
tctctgtttattgccagtag

SEQ ID NO: 23287 - DNA, 20 bp, Artificial Sequence
  chemically synthesized
ggtctctgttctgttttctt

SEQ ID NO: 23288 - DNA, 20 bp, Artificial Sequence
  chemically synthesized
tcccccttgcattgttgtct

SEQ ID NO: 23289 - DNA, 20 bp, Artificial Sequence
  chemically synthesized
ccttgcattgttgtctaaga

SEQ ID NO: 23290 - DNA, 20 bp, Artificial Sequence
  chemically synthesized
tccccgtaccttcctttaat

SEQ ID NO: 23291 - DNA, 20 bp, Artificial Sequence
  chemically synthesized
atcagcttccgccactgcct

SEQ ID NO: 23292 - DNA, 20 bp, Artificial Sequence
  chemically synthesized
tcagcttccgccactgcctg

SEQ ID NO: 23293 - DNA, 20 bp, Artificial Sequence
  chemically synthesized
cgccactgcctgaggccact

SEQ ID NO: 23294 - DNA, 20 bp, Artificial Sequence
  chemically synthesized
tgcctgaggccactcagctc

SEQ ID NO: 23295 - DNA, 20 bp, Artificial Sequence
  chemically synthesized
ccactcagctctggtcccac

SEQ ID NO: 23296 - DNA, 20 bp, Artificial Sequence
  chemically synthesized
actcagctctggtcccactg

SEQ ID NO: 23297 - DNA, 20 bp, Artificial Sequence
  chemically synthesized
ctcagctctggtcccactgg

SEQ ID NO: 23298 - DNA, 20 bp, Artificial Sequence
  chemically synthesized
actggaggccctgtctcccc

SEQ ID NO: 23299 - DNA, 20 bp, Artificial Sequence
  chemically synthesized
ctggaggccctgtctccccc

SEQ ID NO: 23300 - DNA, 20 bp, Artificial Sequence
  chemically synthesized
tggaggccctgtctccccca

SEQ ID NO: 23301 - DNA, 20 bp, Artificial Sequence
  chemically synthesized
ggaggccctgtctcccccag

SEQ ID NO: 23302 - DNA, 20 bp, Artificial Sequence
  chemically synthesized
cctgttcacctctgatcccc

SEQ ID NO: 23303 - DNA, 20 bp, Artificial Sequence
  chemically synthesized
ctgatcccccagccctgcca

SEQ ID NO: 23304 - DNA, 20 bp, Artificial Sequence
  chemically synthesized
cccccagccctgccatggcc

SEQ ID NO: 23305 - DNA, 20 bp, Artificial Sequence
  chemically synthesized
cctgccatggccaagctgat

SEQ ID NO: 23306 - DNA, 20 bp, Artificial Sequence
  chemically synthesized
ctgccatggccaagctgatg

SEQ ID NO: 23307 - DNA, 20 bp, Artificial Sequence
  chemically synthesized
catggccaagctgatgagga

SEQ ID NO: 23308 - DNA, 20 bp, Artificial Sequence
  chemically synthesized
atggccaagctgatgaggat

SEQ ID NO: 23309 - DNA, 20 bp, Artificial Sequence
  chemically synthesized
tggccaagctgatgaggatg

SEQ ID NO: 23310 - DNA, 20 bp, Artificial Sequence
  chemically synthesized
ggccaagctgatgaggatgg

SEQ ID NO: 23311 - DNA, 20 bp, Artificial Sequence
  chemically synthesized
ccaagctgatgaggatgggg

SEQ ID NO: 23312 - DNA, 20 bp, Artificial Sequence
  chemically synthesized
caagctgatgaggatggggg

SEQ ID NO: 23313 - DNA, 20 bp, Artificial Sequence
  chemically synthesized
aagctgatgaggatggggga

SEQ ID NO: 23314 - DNA, 20 bp, Artificial Sequence
  chemically synthesized
agctgatgaggatgggggag

SEQ ID NO: 23315 - DNA, 20 bp, Artificial Sequence
  chemically synthesized
gctgatgaggatgggggagg

SEQ ID NO: 23316 - DNA, 20 bp, Artificial Sequence
  chemically synthesized
tgatgaggatgggggagggg

SEQ ID NO: 23317 - DNA, 20 bp, Artificial Sequence
  chemically synthesized
gatgaggatgggggaggggg

SEQ ID NO: 23318 - DNA, 20 bp, Artificial Sequence
  chemically synthesized
gaggatgggggagggggagg

SEQ ID NO: 23319 - DNA, 20 bp, Artificial Sequence
  chemically synthesized
aggatgggggagggggaggc

SEQ ID NO: 23320 - DNA, 20 bp, Artificial Sequence
  chemically synthesized
ggatgggggagggggaggca

SEQ ID NO: 23321 - DNA, 20 bp, Artificial Sequence
  chemically synthesized
gatgggggagggggaggcag

SEQ ID NO: 23322 - DNA, 20 bp, Artificial Sequence
  chemically synthesized
atgggggagggggaggcagg

SEQ ID NO: 23323 - DNA, 20 bp, Artificial Sequence
  chemically synthesized
aatcttaatttcctgcactg

SEQ ID NO: 23324 - DNA, 20 bp, Artificial Sequence
  chemically synthesized
cactgaagctttgctgtcca

SEQ ID NO: 23325 - DNA, 20 bp, Artificial Sequence
  chemically synthesized
agctttgctgtccacagcac

SEQ ID NO: 23326 - DNA, 20 bp, Artificial Sequence
  chemically synthesized
gctttgctgtccacagcact

SEQ ID NO: 23327 - DNA, 20 bp, Artificial Sequence
  chemically synthesized
ttgctgtccacagcactggg

SEQ ID NO: 23328 - DNA, 20 bp, Artificial Sequence
  chemically synthesized
ctgtccacagcactgggcag

SEQ ID NO: 23329 - DNA, 20 bp, Artificial Sequence
  chemically synthesized
ctgggcagcagctgcctccc

SEQ ID NO: 23330 - DNA, 20 bp, Artificial Sequence
  chemically synthesized
gggcagcagctgcctccctg

SEQ ID NO: 23331 - DNA, 20 bp, Artificial Sequence
  chemically synthesized
gcctccctggagtgttgtgt

SEQ ID NO: 23332 - DNA, 20 bp, Artificial Sequence
  chemically synthesized
ttgatgctgtctttcttccc

SEQ ID NO: 23333 - DNA, 20 bp, Artificial Sequence
  chemically synthesized
tgatgctgtctttcttccca

SEQ ID NO: 23334 - DNA, 20 bp, Artificial Sequence
  chemically synthesized
gtctttcttcccaaggcctt

SEQ ID NO: 23335 - DNA, 20 bp, Artificial Sequence
  chemically synthesized
ttcttcccaaggcctttggc

SEQ ID NO: 23336 - DNA, 20 bp, Artificial Sequence
  chemically synthesized
tcttcccaaggcctttggca

SEQ ID NO: 23337 - DNA, 20 bp, Artificial Sequence
  chemically synthesized
tcccaaggcctttggcaagg

SEQ ID NO: 23338 - DNA, 20 bp, Artificial Sequence
  chemically synthesized
caaggcctttggcaaggtag

SEQ ID NO: 23339 - DNA, 20 bp, Artificial Sequence
  chemically synthesized
ttgactctccatgctgctaa

SEQ ID NO: 23340 - DNA, 20 bp, Artificial Sequence
  chemically synthesized
tgactctccatgctgctaat

SEQ ID NO: 23341 - DNA, 20 bp, Artificial Sequence
  chemically synthesized
gactctccatgctgctaatg

SEQ ID NO: 23342 - DNA, 20 bp, Artificial Sequence
  chemically synthesized
actctccatgctgctaatgg

SEQ ID NO: 23343 - DNA, 20 bp, Artificial Sequence
  chemically synthesized
tctccatgctgctaatgggg

SEQ ID NO: 23344 - DNA, 20 bp, Artificial Sequence
  chemically synthesized
ctccatgctgctaatggggg

SEQ ID NO: 23345 - DNA, 20 bp, Artificial Sequence
  chemically synthesized
gctaatgggggaggtcaact

SEQ ID NO: 23346 - DNA, 20 bp, Artificial Sequence
  chemically synthesized
ggtcaactaagtccatttct

SEQ ID NO: 23347 - DNA, 20 bp, Artificial Sequence
  chemically synthesized
aactaagtccatttctgagc

SEQ ID NO: 23348 - DNA, 20 bp, Artificial Sequence
  chemically synthesized
taagtccatttctgagctag

SEQ ID NO: 23349 - DNA, 20 bp, Artificial Sequence
  chemically synthesized
aagtccatttctgagctagt

SEQ ID NO: 23350 - DNA, 20 bp, Artificial Sequence
  chemically synthesized
agtccatttctgagctagtg

SEQ ID NO: 23351 - DNA, 20 bp, Artificial Sequence
  chemically synthesized
gtccatttctgagctagtgg

SEQ ID NO: 23352 - DNA, 20 bp, Artificial Sequence
  chemically synthesized
tctgagctagtgggggctct

SEQ ID NO: 23353 - DNA, 20 bp, Artificial Sequence
  chemically synthesized
ctgagctagtgggggctctt

SEQ ID NO: 23354 - DNA, 20 bp, Artificial Sequence
  chemically synthesized
ggactccgaacaccacactt

SEQ ID NO: 23355 - DNA, 20 bp, Artificial Sequence
  chemically synthesized
cacttaagttatctctgacc

SEQ ID NO: 23356 - DNA, 20 bp, Artificial Sequence
  chemically synthesized
cttaagttatctctgaccca

SEQ ID NO: 23357 - DNA, 20 bp, Artificial Sequence
  chemically synthesized
gacccagagtccaatttatt

SEQ ID NO: 23358 - DNA, 20 bp, Artificial Sequence
  chemically synthesized
ttcaaatgaatgcccatttt

SEQ ID NO: 23359 - DNA, 20 bp, Artificial Sequence
  chemically synthesized
tgcccattttaagaatgttt

SEQ ID NO: 23360 - DNA, 20 bp, Artificial Sequence
  chemically synthesized
gcccattttaagaatgtttt

SEQ ID NO: 23361 - DNA, 20 bp, Artificial Sequence
  chemically synthesized
cccattttaagaatgttttg

SEQ ID NO: 23362 - DNA, 20 bp, Artificial Sequence
  chemically synthesized
gtctcttcccatcatttcct

SEQ ID NO: 23363 - DNA, 20 bp, Artificial Sequence
  chemically synthesized
ttcccatcatttccttagtg

SEQ ID NO: 23364 - DNA, 20 bp, Artificial Sequence
  chemically synthesized
ccatcatttccttagtgtag

SEQ ID NO: 23365 - DNA, 20 bp, Artificial Sequence
  chemically synthesized
atcatttccttagtgtagtg

SEQ ID NO: 23366 - DNA, 20 bp, Artificial Sequence
  chemically synthesized
catttccttagtgtagtgga

SEQ ID NO: 23367 - DNA, 20 bp, Artificial Sequence
  chemically synthesized
atttccttagtgtagtggag

SEQ ID NO: 23368 - DNA, 20 bp, Artificial Sequence
  chemically synthesized
gtagtggagaggtttctatt

SEQ ID NO: 23369 - DNA, 20 bp, Artificial Sequence
  chemically synthesized
ggagaggtttctattcggaa

SEQ ID NO: 23370 - DNA, 20 bp, Artificial Sequence
  chemically synthesized
gagaggtttctattcggaat

SEQ ID NO: 23371 - DNA, 20 bp, Artificial Sequence
  chemically synthesized
attcggaataggatgacatt

SEQ ID NO: 23372 - DNA, 20 bp, Artificial Sequence
  chemically synthesized
cggaataggatgacatttgg

SEQ ID NO: 23373 - DNA, 20 bp, Artificial Sequence
  chemically synthesized
taggatgacatttggtagct

SEQ ID NO: 23374 - DNA, 20 bp, Artificial Sequence
  chemically synthesized
catttggtagctgagccaaa

SEQ ID NO: 23375 - DNA, 20 bp, Artificial Sequence
  chemically synthesized
tggtagctgagccaaacaga

SEQ ID NO: 23376 - DNA, 20 bp, Artificial Sequence
  chemically synthesized
agctgagccaaacagatagc

SEQ ID NO: 23377 - DNA, 20 bp, Artificial Sequence
  chemically synthesized
gctgagccaaacagatagct

SEQ ID NO: 23378 - DNA, 20 bp, Artificial Sequence
  chemically synthesized
ccaaacagatagctgggata

SEQ ID NO: 23379 - DNA, 20 bp, Artificial Sequence
  chemically synthesized
caaacagatagctgggatat

SEQ ID NO: 23380 - DNA, 20 bp, Artificial Sequence
  chemically synthesized
aaacagatagctgggatata

SEQ ID NO: 23381 - DNA, 20 bp, Artificial Sequence
  chemically synthesized
gatagctgggatatagggtt

SEQ ID NO: 23382 - DNA, 20 bp, Artificial Sequence
  chemically synthesized
tagctgggatatagggtttg

SEQ ID NO: 23383 - DNA, 20 bp, Artificial Sequence
  chemically synthesized
gggtttggagttgaactctc

SEQ ID NO: 23384 - DNA, 20 bp, Artificial Sequence
  chemically synthesized
ggtttggagttgaactctcc

SEQ ID NO: 23385 - DNA, 20 bp, Artificial Sequence
  chemically synthesized
gtttggagttgaactctcca

SEQ ID NO: 23386 - DNA, 20 bp, Artificial Sequence
  chemically synthesized
gagttgaactctccagggaa

SEQ ID NO: 23387 - DNA, 20 bp, Artificial Sequence
  chemically synthesized
agttgaactctccagggaat

SEQ ID NO: 23388 - DNA, 20 bp, Artificial Sequence
  chemically synthesized
gttgaactctccagggaatg

SEQ ID NO: 23389 - DNA, 20 bp, Artificial Sequence
  chemically synthesized
gaactctccagggaatgggg

SEQ ID NO: 23390 - DNA, 20 bp, Artificial Sequence
  chemically synthesized
aactctccagggaatggggt

SEQ ID NO: 23391 - DNA, 20 bp, Artificial Sequence
  chemically synthesized
ctctccagggaatggggtgg

SEQ ID NO: 23392 - DNA, 20 bp, Artificial Sequence
  chemically synthesized
tctccagggaatggggtggg

SEQ ID NO: 23393 - DNA, 20 bp, Artificial Sequence
  chemically synthesized
ctccagggaatggggtggga

SEQ ID NO: 23394 - DNA, 20 bp, Artificial Sequence
  chemically synthesized
tccagggaatggggtgggag

SEQ ID NO: 23395 - DNA, 20 bp, Artificial Sequence
  chemically synthesized
ccagggaatggggtgggagg

SEQ ID NO: 23396 - DNA, 20 bp, Artificial Sequence
  chemically synthesized
cagggaatggggtgggaggg

SEQ ID NO: 23397 - DNA, 20 bp, Artificial Sequence
  chemically synthesized
ggaatggggtgggagggggg

SEQ ID NO: 23398 - DNA, 20 bp, Artificial Sequence
  chemically synthesized
ggggtgggaggggggcagcc

SEQ ID NO: 23399 - DNA, 20 bp, Artificial Sequence
  chemically synthesized
ggtgggaggggggcagcctg

SEQ ID NO: 23400 - DNA, 20 bp, Artificial Sequence
  chemically synthesized
gtgggaggggggcagcctgg

SEQ ID NO: 23401 - DNA, 20 bp, Artificial Sequence
  chemically synthesized
agcctggaggatgacaaaat

SEQ ID NO: 23402 - DNA, 20 bp, Artificial Sequence
  chemically synthesized
gcctggaggatgacaaaatg

SEQ ID NO: 23403 - DNA, 20 bp, Artificial Sequence
  chemically synthesized
cctggaggatgacaaaatga

SEQ ID NO: 23404 - DNA, 20 bp, Artificial Sequence
  chemically synthesized
atgacaaaatgagggctccc

SEQ ID NO: 23405 - DNA, 20 bp, Artificial Sequence
  chemically synthesized
tctgtgttctcgaaatgcct

SEQ ID NO: 23406 - DNA, 20 bp, Artificial Sequence
  chemically synthesized
aatgccttagatgtttacct

SEQ ID NO: 23407 - DNA, 20 bp, Artificial Sequence
  chemically synthesized
tgccttagatgtttacctaa

SEQ ID NO: 23408 - DNA, 20 bp, Artificial Sequence
  chemically synthesized
atgtttacctaagagaaatg

SEQ ID NO: 23409 - DNA, 20 bp, Artificial Sequence
  chemically synthesized
ttcctataaacacatctaca

SEQ ID NO: 23410 - DNA, 20 bp, Artificial Sequence
  chemically synthesized
catctacacagtgtccattg

SEQ ID NO: 23411 - DNA, 20 bp, Artificial Sequence
  chemically synthesized
gtccattgtagcactgttca

SEQ ID NO: 23412 - DNA, 20 bp, Artificial Sequence
  chemically synthesized
cattgtagcactgttcatag

SEQ ID NO: 23413 - DNA, 20 bp, Artificial Sequence
  chemically synthesized
cactgttcatagtggtcaaa

SEQ ID NO: 23414 - DNA, 20 bp, Artificial Sequence
  chemically synthesized
tgttcatagtggtcaaaaag

SEQ ID NO: 23415 - DNA, 20 bp, Artificial Sequence
  chemically synthesized
aaaagtggtcacaacccaca

SEQ ID NO: 23416 - DNA, 20 bp, Artificial Sequence
  chemically synthesized
acaacccacatggcaaccaa

SEQ ID NO: 23417 - DNA, 20 bp, Artificial Sequence
  chemically synthesized
caacccacatggcaaccaat

SEQ ID NO: 23418 - DNA, 20 bp, Artificial Sequence
  chemically synthesized
atggcaaccaataggttgaa

SEQ ID NO: 23419 - DNA, 20 bp, Artificial Sequence
  chemically synthesized
ttgaatggataaacgcccta

SEQ ID NO: 23420 - DNA, 20 bp, Artificial Sequence
  chemically synthesized
aatggataaacgccctatgg

SEQ ID NO: 23421 - DNA, 20 bp, Artificial Sequence
  chemically synthesized
tatggtggaatacaactcaa

SEQ ID NO: 23422 - DNA, 20 bp, Artificial Sequence
  chemically synthesized
ggtggaatacaactcaacag

SEQ ID NO: 23423 - DNA, 20 bp, Artificial Sequence
  chemically synthesized
ggaatacaactcaacagtag

SEQ ID NO: 23424 - DNA, 20 bp, Artificial Sequence
  chemically synthesized
actcaacagtagaagaatga

SEQ ID NO: 23425 - DNA, 20 bp, Artificial Sequence
  chemically synthesized
tcaacagtagaagaatgaaa

SEQ ID NO: 23426 - DNA, 20 bp, Artificial Sequence
  chemically synthesized
gagtaacacactccacacca

SEQ ID NO: 23427 - DNA, 20 bp, Artificial Sequence
  chemically synthesized
tccacaccatggatgaatcc

SEQ ID NO: 23428 - DNA, 20 bp, Artificial Sequence
  chemically synthesized
cccagaatcattctgctctg

SEQ ID NO: 23429 - DNA, 20 bp, Artificial Sequence
  chemically synthesized
agaatcattctgctctgtgg

SEQ ID NO: 23430 - DNA, 20 bp, Artificial Sequence
  chemically synthesized
gtggaagaaattaaacacaa

SEQ ID NO: 23431 - DNA, 20 bp, Artificial Sequence
  chemically synthesized
caaaagacgatatcctgtat

SEQ ID NO: 23432 - DNA, 20 bp, Artificial Sequence
  chemically synthesized
agtccatttgtaacaaattc

SEQ ID NO: 23433 - DNA, 20 bp, Artificial Sequence
  chemically synthesized
ttctagaattctcaacactg

SEQ ID NO: 23434 - DNA, 20 bp, Artificial Sequence
  chemically synthesized
tagaattctcaacactgtgg

SEQ ID NO: 23435 - DNA, 20 bp, Artificial Sequence
  chemically synthesized
aattctcaacactgtggtgg

SEQ ID NO: 23436 - DNA, 20 bp, Artificial Sequence
  chemically synthesized
attctcaacactgtggtggt

SEQ ID NO: 23437 - DNA, 20 bp, Artificial Sequence
  chemically synthesized
ctcaacactgtggtggtagg

SEQ ID NO: 23438 - DNA, 20 bp, Artificial Sequence
  chemically synthesized
tcaacactgtggtggtaggt

SEQ ID NO: 23439 - DNA, 20 bp, Artificial Sequence
  chemically synthesized
caacactgtggtggtaggtg

SEQ ID NO: 23440 - DNA, 20 bp, Artificial Sequence
  chemically synthesized
aacactgtggtggtaggtgg

SEQ ID NO: 23441 - DNA, 20 bp, Artificial Sequence
  chemically synthesized
tgtggtggtaggtgggggtt

SEQ ID NO: 23442 - DNA, 20 bp, Artificial Sequence
  chemically synthesized
ggtggtaggtgggggttcag

SEQ ID NO: 23443 - DNA, 20 bp, Artificial Sequence
  chemically synthesized
gtaggtgggggttcagtggt

SEQ ID NO: 23444 - DNA, 20 bp, Artificial Sequence
  chemically synthesized
ggtgggggttcagtggttag

SEQ ID NO: 23445 - DNA, 20 bp, Artificial Sequence
  chemically synthesized
gtgggggttcagtggttaga

SEQ ID NO: 23446 - DNA, 20 bp, Artificial Sequence
  chemically synthesized
ggggttcagtggttagaagg

SEQ ID NO: 23447 - DNA, 20 bp, Artificial Sequence
  chemically synthesized
gggttcagtggttagaagga

SEQ ID NO: 23448 - DNA, 20 bp, Artificial Sequence
  chemically synthesized
ggttcagtggttagaaggaa

SEQ ID NO: 23449 - DNA, 20 bp, Artificial Sequence
  chemically synthesized
gttcagtggttagaaggaag

SEQ ID NO: 23450 - DNA, 20 bp, Artificial Sequence
  chemically synthesized
agtggttagaaggaaggggt

SEQ ID NO: 23451 - DNA, 20 bp, Artificial Sequence
  chemically synthesized
tggttagaaggaaggggtca

SEQ ID NO: 23452 - DNA, 20 bp, Artificial Sequence
  chemically synthesized
ggttagaaggaaggggtcag

SEQ ID NO: 23453 - DNA, 20 bp, Artificial Sequence
  chemically synthesized
gttagaaggaaggggtcaga

SEQ ID NO: 23454 - DNA, 20 bp, Artificial Sequence
  chemically synthesized
gaaggaaggggtcagagggt

SEQ ID NO: 23455 - DNA, 20 bp, Artificial Sequence
  chemically synthesized
aaggaaggggtcagagggtt

SEQ ID NO: 23456 - DNA, 20 bp, Artificial Sequence
  chemically synthesized
aggaaggggtcagagggtta

SEQ ID NO: 23457 - DNA, 20 bp, Artificial Sequence
  chemically synthesized
aaggggtcagagggttaggg

SEQ ID NO: 23458 - DNA, 20 bp, Artificial Sequence
  chemically synthesized
aggggtcagagggttaggga

SEQ ID NO: 23459 - DNA, 20 bp, Artificial Sequence
  chemically synthesized
ggggtcagagggttagggaa

SEQ ID NO: 23460 - DNA, 20 bp, Artificial Sequence
  chemically synthesized
gggtcagagggttagggaag

SEQ ID NO: 23461 - DNA, 20 bp, Artificial Sequence
  chemically synthesized
gggttagggaaggggattga

SEQ ID NO: 23462 - DNA, 20 bp, Artificial Sequence
  chemically synthesized
agggaaggggattgacagca

SEQ ID NO: 23463 - DNA, 20 bp, Artificial Sequence
  chemically synthesized
gggaaggggattgacagcaa

SEQ ID NO: 23464 - DNA, 20 bp, Artificial Sequence
  chemically synthesized
ggaaggggattgacagcaaa

SEQ ID NO: 23465 - DNA, 20 bp, Artificial Sequence
  chemically synthesized
gaaggggattgacagcaaag

SEQ ID NO: 23466 - DNA, 20 bp, Artificial Sequence
  chemically synthesized
gattgacagcaaaggggcat

SEQ ID NO: 23467 - DNA, 20 bp, Artificial Sequence
  chemically synthesized
attgacagcaaaggggcatg

SEQ ID NO: 23468 - DNA, 20 bp, Artificial Sequence
  chemically synthesized
ttgacagcaaaggggcatga

SEQ ID NO: 23469 - DNA, 20 bp, Artificial Sequence
  chemically synthesized
tgacagcaaaggggcatgag

SEQ ID NO: 23470 - DNA, 20 bp, Artificial Sequence
  chemically synthesized
gacagcaaaggggcatgagg

SEQ ID NO: 23471 - DNA, 20 bp, Artificial Sequence
  chemically synthesized
aggggcatgagggggctttc

SEQ ID NO: 23472 - DNA, 20 bp, Artificial Sequence
  chemically synthesized
catgagggggctttctagac

SEQ ID NO: 23473 - DNA, 20 bp, Artificial Sequence
  chemically synthesized
gagggggctttctagactgg

SEQ ID NO: 23474 - DNA, 20 bp, Artificial Sequence
  chemically synthesized
cgtgttctgtatcttgattt

SEQ ID NO: 23475 - DNA, 20 bp, Artificial Sequence
  chemically synthesized
gttctgtatcttgattttgg

SEQ ID NO: 23476 - DNA, 20 bp, Artificial Sequence
  chemically synthesized
tctgtatcttgattttggtg

SEQ ID NO: 23477 - DNA, 20 bp, Artificial Sequence
  chemically synthesized
ctgtatcttgattttggtgg

SEQ ID NO: 23478 - DNA, 20 bp, Artificial Sequence
  chemically synthesized
tgattttggtggaggccaca

SEQ ID NO: 23479 - DNA, 20 bp, Artificial Sequence
  chemically synthesized
gccacacagctgtatacaac

SEQ ID NO: 23480 - DNA, 20 bp, Artificial Sequence
  chemically synthesized
aatgacttttgttgtatgta

SEQ ID NO: 23481 - DNA, 20 bp, Artificial Sequence
  chemically synthesized
atgtaaagtataccttaata

SEQ ID NO: 23482 - DNA, 20 bp, Artificial Sequence
  chemically synthesized
agtataccttaataaagcta

SEQ ID NO: 23483 - DNA, 20 bp, Artificial Sequence
  chemically synthesized
caaaacaaaacacccaccac

SEQ ID NO: 23484 - DNA, 20 bp, Artificial Sequence
  chemically synthesized
aaacaaaacacccaccactg

SEQ ID NO: 23485 - DNA, 20 bp, Artificial Sequence
  chemically synthesized
caaaacacccaccactggag

SEQ ID NO: 23486 - DNA, 20 bp, Artificial Sequence
  chemically synthesized
cccaccactggagtggaacc

SEQ ID NO: 23487 - DNA, 20 bp, Artificial Sequence
  chemically synthesized
gtctgtaacctttaactgtt

SEQ ID NO: 23488 - DNA, 20 bp, Artificial Sequence
  chemically synthesized
tctgtaacctttaactgttt

SEQ ID NO: 23489 - DNA, 20 bp, Artificial Sequence
  chemically synthesized
ttaactgtttgggtctcctc

SEQ ID NO: 23490 - DNA, 20 bp, Artificial Sequence
  chemically synthesized
tttgggtctcctcaagactc

SEQ ID NO: 23491 - DNA, 20 bp, Artificial Sequence
  chemically synthesized
tcaagactctagccgtcttt

SEQ ID NO: 23492 - DNA, 20 bp, Artificial Sequence
  chemically synthesized
caagactctagccgtctttc

SEQ ID NO: 23493 - DNA, 20 bp, Artificial Sequence
  chemically synthesized
aagactctagccgtctttca

SEQ ID NO: 23494 - DNA, 20 bp, Artificial Sequence
  chemically synthesized
actctagccgtctttcaggg

SEQ ID NO: 23495 - DNA, 20 bp, Artificial Sequence
  chemically synthesized
cgtctttcagggtagcacca

SEQ ID NO: 23496 - DNA, 20 bp, Artificial Sequence
  chemically synthesized
ggtagcaccaaagtacattt

SEQ ID NO: 23497 - DNA, 20 bp, Artificial Sequence
  chemically synthesized
gtagcaccaaagtacatttc

SEQ ID NO: 23498 - DNA, 20 bp, Artificial Sequence
  chemically synthesized
tagcaccaaagtacatttca

SEQ ID NO: 23499 - DNA, 20 bp, Artificial Sequence
  chemically synthesized
aaagtacatttcagggaaat

SEQ ID NO: 23500 - DNA, 20 bp, Artificial Sequence
  chemically synthesized
gagaatgccctttgtattct

SEQ ID NO: 23501 - DNA, 20 bp, Artificial Sequence
  chemically synthesized
ctttgtattctgagatttta

SEQ ID NO: 23502 - DNA, 20 bp, Artificial Sequence
  chemically synthesized
tgtattctgagattttatag

SEQ ID NO: 23503 - DNA, 20 bp, Artificial Sequence
  chemically synthesized
ttctgagattttatagaagt

SEQ ID NO: 23504 - DNA, 20 bp, Artificial Sequence
  chemically synthesized
tttatagaagttggtaatga

SEQ ID NO: 23505 - DNA, 20 bp, Artificial Sequence
  chemically synthesized
tatagaagttggtaatgaca

SEQ ID NO: 23506 - DNA, 20 bp, Artificial Sequence
  chemically synthesized
tagaagttggtaatgacaga

SEQ ID NO: 23507 - DNA, 20 bp, Artificial Sequence
  chemically synthesized
gaagttggtaatgacagaga

SEQ ID NO: 23508 - DNA, 20 bp, Artificial Sequence
  chemically synthesized
agttggtaatgacagagaga

SEQ ID NO: 23509 - DNA, 20 bp, Artificial Sequence
  chemically synthesized
ttggtaatgacagagagaga

SEQ ID NO: 23510 - DNA, 20 bp, Artificial Sequence
  chemically synthesized
ggtaatgacagagagagaga

SEQ ID NO: 23511 - DNA, 20 bp, Artificial Sequence
  chemically synthesized
taatgacagagagagagaga

SEQ ID NO: 23512 - DNA, 20 bp, Artificial Sequence
  chemically synthesized
atgacagagagagagagaga

SEQ ID NO: 23513 - DNA, 20 bp, Artificial Sequence
  chemically synthesized
gacagagagagagagagaga

SEQ ID NO: 23514 - DNA, 20 bp, Artificial Sequence
  chemically synthesized
cagagagagagagagagaga

SEQ ID NO: 23515 - DNA, 20 bp, Artificial Sequence
  chemically synthesized
gagagagagagagagagaga

SEQ ID NO: 23516 - DNA, 20 bp, Artificial Sequence
  chemically synthesized
gagagagagagagagagaga

SEQ ID NO: 23517 - DNA, 20 bp, Artificial Sequence
  chemically synthesized
gagagagagagagagagaga

SEQ ID NO: 23518 - DNA, 20 bp, Artificial Sequence
  chemically synthesized
agagagagagagagagagag

SEQ ID NO: 23519 - DNA, 20 bp, Artificial Sequence
  chemically synthesized
gagagagagagagagagaga

SEQ ID NO: 23520 - DNA, 20 bp, Artificial Sequence
  chemically synthesized
gagagagagagagagagagg

SEQ ID NO: 23521 - DNA, 20 bp, Artificial Sequence
  chemically synthesized
agagagagagagagagaggg

SEQ ID NO: 23522 - DNA, 20 bp, Artificial Sequence
  chemically synthesized
gagagagagggaggcccact

SEQ ID NO: 23523 - DNA, 20 bp, Artificial Sequence
  chemically synthesized
gagagggaggcccactgaga

SEQ ID NO: 23524 - DNA, 20 bp, Artificial Sequence
  chemically synthesized
agagggaggcccactgagat

SEQ ID NO: 23525 - DNA, 20 bp, Artificial Sequence
  chemically synthesized
gagggaggcccactgagatg

SEQ ID NO: 23526 - DNA, 20 bp, Artificial Sequence
  chemically synthesized
gagatggggttatccaccat

SEQ ID NO: 23527 - DNA, 20 bp, Artificial Sequence
  chemically synthesized
atggggttatccaccataag

SEQ ID NO: 23528 - DNA, 20 bp, Artificial Sequence
  chemically synthesized
ggggttatccaccataagca

SEQ ID NO: 23529 - DNA, 20 bp, Artificial Sequence
  chemically synthesized
tccaccataagcagagcatt

SEQ ID NO: 23530 - DNA, 20 bp, Artificial Sequence
  chemically synthesized
ccaccataagcagagcattt

SEQ ID NO: 23531 - DNA, 20 bp, Artificial Sequence
  chemically synthesized
taagcagagcatttgggtct

SEQ ID NO: 23532 - DNA, 20 bp, Artificial Sequence
  chemically synthesized
gcagagcatttgggtctgag

SEQ ID NO: 23533 - DNA, 20 bp, Artificial Sequence
  chemically synthesized
tttgggtctgagaagcgcat

SEQ ID NO: 23534 - DNA, 20 bp, Artificial Sequence
  chemically synthesized
tctgagaagcgcatgagtac

SEQ ID NO: 23535 - DNA, 20 bp, Artificial Sequence
  chemically synthesized
agaagcgcatgagtactggt

SEQ ID NO: 23536 - DNA, 20 bp, Artificial Sequence
  chemically synthesized
atgagtactggtgagtatgt

SEQ ID NO: 23537 - DNA, 20 bp, Artificial Sequence
  chemically synthesized
tgagtactggtgagtatgtg

SEQ ID NO: 23538 - DNA, 20 bp, Artificial Sequence
  chemically synthesized
gtactggtgagtatgtgagg

SEQ ID NO: 23539 - DNA, 20 bp, Artificial Sequence
  chemically synthesized
tactggtgagtatgtgagga

SEQ ID NO: 23540 - DNA, 20 bp, Artificial Sequence
  chemically synthesized
ctggtgagtatgtgaggaag

SEQ ID NO: 23541 - DNA, 20 bp, Artificial Sequence
  chemically synthesized
ggtgagtatgtgaggaagga

SEQ ID NO: 23542 - DNA, 20 bp, Artificial Sequence
  chemically synthesized
tgagtatgtgaggaaggaga

SEQ ID NO: 23543 - DNA, 20 bp, Artificial Sequence
  chemically synthesized
tatgtgaggaaggagagagc

SEQ ID NO: 23544 - DNA, 20 bp, Artificial Sequence
  chemically synthesized
atgtgaggaaggagagagca

SEQ ID NO: 23545 - DNA, 20 bp, Artificial Sequence
  chemically synthesized
tgtgaggaaggagagagcaa

SEQ ID NO: 23546 - DNA, 20 bp, Artificial Sequence
  chemically synthesized
gtgaggaaggagagagcaag

SEQ ID NO: 23547 - DNA, 20 bp, Artificial Sequence
  chemically synthesized
gaggaaggagagagcaaggg

SEQ ID NO: 23548 - DNA, 20 bp, Artificial Sequence
  chemically synthesized
aggaaggagagagcaagggg

SEQ ID NO: 23549 - DNA, 20 bp, Artificial Sequence
  chemically synthesized
ggggaggaaatctgttttcc

SEQ ID NO: 23550 - DNA, 20 bp, Artificial Sequence
  chemically synthesized
aatctgttttcctagaattc

SEQ ID NO: 23551 - DNA, 20 bp, Artificial Sequence
  chemically synthesized
ctgttttcctagaattccag

SEQ ID NO: 23552 - DNA, 20 bp, Artificial Sequence
  chemically synthesized
tgttttcctagaattccagc

SEQ ID NO: 23553 - DNA, 20 bp, Artificial Sequence
  chemically synthesized
gaattccagcaggcttcaaa

SEQ ID NO: 23554 - DNA, 20 bp, Artificial Sequence
  chemically synthesized
agcaggcttcaaaaagtaaa

SEQ ID NO: 23555 - DNA, 20 bp, Artificial Sequence
  chemically synthesized
gcaggcttcaaaaagtaaaa

SEQ ID NO: 23556 - DNA, 20 bp, Artificial Sequence
  chemically synthesized
caggcttcaaaaagtaaaaa

SEQ ID NO: 23557 - DNA, 20 bp, Artificial Sequence
  chemically synthesized
aggcttcaaaaagtaaaaag

SEQ ID NO: 23558 - DNA, 20 bp, Artificial Sequence
  chemically synthesized
gcttcaaaaagtaaaaaggg

SEQ ID NO: 23559 - DNA, 20 bp, Artificial Sequence
  chemically synthesized
cttcaaaaagtaaaaagggg

SEQ ID NO: 23560 - DNA, 20 bp, Artificial Sequence
  chemically synthesized
ttcaaaaagtaaaaagggga

SEQ ID NO: 23561 - DNA, 20 bp, Artificial Sequence
  chemically synthesized
caaaaagtaaaaaggggagg

SEQ ID NO: 23562 - DNA, 20 bp, Artificial Sequence
  chemically synthesized
aggggagggagtacccaact

SEQ ID NO: 23563 - DNA, 20 bp, Artificial Sequence
  chemically synthesized
aactaagtttttttcttccc

SEQ ID NO: 23564 - DNA, 20 bp, Artificial Sequence
  chemically synthesized
aatacatttattctaaacat

SEQ ID NO: 23565 - DNA, 20 bp, Artificial Sequence
  chemically synthesized
attctaaacattagcccaat

SEQ ID NO: 23566 - DNA, 20 bp, Artificial Sequence
  chemically synthesized
ttgtttgtttgtttgttttt

SEQ ID NO: 23567 - DNA, 20 bp, Artificial Sequence
  chemically synthesized
ttgtttgtttgtttttgaga

SEQ ID NO: 23568 - DNA, 20 bp, Artificial Sequence
  chemically synthesized
tgtttgtttgtttttgagac

SEQ ID NO: 23569 - DNA, 20 bp, Artificial Sequence
  chemically synthesized
gtttgtttgtttttgagaca

SEQ ID NO: 23570 - DNA, 20 bp, Artificial Sequence
  chemically synthesized
cagggtctcgctgtgttgcc

SEQ ID NO: 23571 - DNA, 20 bp, Artificial Sequence
  chemically synthesized
agggtctcgctgtgttgcct

SEQ ID NO: 23572 - DNA, 20 bp, Artificial Sequence
  chemically synthesized
tctcgctgtgttgcctaggc

SEQ ID NO: 23573 - DNA, 20 bp, Artificial Sequence
  chemically synthesized
tcgctgtgttgcctaggcta

SEQ ID NO: 23574 - DNA, 20 bp, Artificial Sequence
  chemically synthesized
gtgttgcctaggctagagtg

SEQ ID NO: 23575 - DNA, 20 bp, Artificial Sequence
  chemically synthesized
ttgcctaggctagagtgtag

SEQ ID NO: 23576 - DNA, 20 bp, Artificial Sequence
  chemically synthesized
agagtgtagtggcatgttca

SEQ ID NO: 23577 - DNA, 20 bp, Artificial Sequence
  chemically synthesized
ggcatgttcatagctcactg

SEQ ID NO: 23578 - DNA, 20 bp, Artificial Sequence
  chemically synthesized
tcactgcagccttgatctcc

SEQ ID NO: 23579 - DNA, 20 bp, Artificial Sequence
  chemically synthesized
cactgcagccttgatctcct

SEQ ID NO: 23580 - DNA, 20 bp, Artificial Sequence
  chemically synthesized
agccttgatctcctaggctc

SEQ ID NO: 23581 - DNA, 20 bp, Artificial Sequence
  chemically synthesized
ctcaagccatcctgtcacct

SEQ ID NO: 23582 - DNA, 20 bp, Artificial Sequence
  chemically synthesized
tcctgtcacctcagcctcct

SEQ ID NO: 23583 - DNA, 20 bp, Artificial Sequence
  chemically synthesized
tgtcacctcagcctcctgag

SEQ ID NO: 23584 - DNA, 20 bp, Artificial Sequence
  chemically synthesized
acctcagcctcctgagtagc

SEQ ID NO: 23585 - DNA, 20 bp, Artificial Sequence
  chemically synthesized
cctcagcctcctgagtagct

SEQ ID NO: 23586 - DNA, 20 bp, Artificial Sequence
  chemically synthesized
ctcctgagtagctgggacga

SEQ ID NO: 23587 - DNA, 20 bp, Artificial Sequence
  chemically synthesized
tcctgagtagctgggacgac

SEQ ID NO: 23588 - DNA, 20 bp, Artificial Sequence
  chemically synthesized
caggtgcatgccaccatgcc

SEQ ID NO: 23589 - DNA, 20 bp, Artificial Sequence
  chemically synthesized
accatgcctggctaattttg

SEQ ID NO: 23590 - DNA, 20 bp, Artificial Sequence
  chemically synthesized
catgcctggctaattttgta

SEQ ID NO: 23591 - DNA, 20 bp, Artificial Sequence
  chemically synthesized
cctggctaattttgtagaga

SEQ ID NO: 23592 - DNA, 20 bp, Artificial Sequence
  chemically synthesized
tggctaattttgtagagatg

SEQ ID NO: 23593 - DNA, 20 bp, Artificial Sequence
  chemically synthesized
tggagtttctccctgttgcc

SEQ ID NO: 23594 - DNA, 20 bp, Artificial Sequence
  chemically synthesized
ggagtttctccctgttgccc

SEQ ID NO: 23595 - DNA, 20 bp, Artificial Sequence
  chemically synthesized
tttctccctgttgcccaggc

SEQ ID NO: 23596 - DNA, 20 bp, Artificial Sequence
  chemically synthesized
ccaggctggtcttgaactcc

SEQ ID NO: 23597 - DNA, 20 bp, Artificial Sequence
  chemically synthesized
caggctggtcttgaactcct

SEQ ID NO: 23598 - DNA, 20 bp, Artificial Sequence
  chemically synthesized
ggtcttgaactcctgggctc

SEQ ID NO: 23599 - DNA, 20 bp, Artificial Sequence
  chemically synthesized
cctcctgccttgacctccca

SEQ ID NO: 23600 - DNA, 20 bp, Artificial Sequence
  chemically synthesized
gccttgacctcccaaagtgc

SEQ ID NO: 23601 - DNA, 20 bp, Artificial Sequence
  chemically synthesized
ccttgacctcccaaagtgct

SEQ ID NO: 23602 - DNA, 20 bp, Artificial Sequence
  chemically synthesized
ctcccaaagtgctgggatta

SEQ ID NO: 23603 - DNA, 20 bp, Artificial Sequence
  chemically synthesized
tcccaaagtgctgggattac

SEQ ID NO: 23604 - DNA, 20 bp, Artificial Sequence
  chemically synthesized
aaagtgctgggattacaggc

SEQ ID NO: 23605 - DNA, 20 bp, Artificial Sequence
  chemically synthesized
agtgctgggattacaggcga

SEQ ID NO: 23606 - DNA, 20 bp, Artificial Sequence
  chemically synthesized
cactgtgcctgtcaccaact

SEQ ID NO: 23607 - DNA, 20 bp, Artificial Sequence
  chemically synthesized
accaactcagtcttattcat

SEQ ID NO: 23608 - DNA, 20 bp, Artificial Sequence
  chemically synthesized
catcagtatgtcttctcctt

SEQ ID NO: 23609 - DNA, 20 bp, Artificial Sequence
  chemically synthesized
cagtatgtcttctccttaag

SEQ ID NO: 23610 - DNA, 20 bp, Artificial Sequence
  chemically synthesized
gtatgtcttctccttaagcg

SEQ ID NO: 23611 - DNA, 20 bp, Artificial Sequence
  chemically synthesized
aagcggagatgctaacaatg

SEQ ID NO: 23612 - DNA, 20 bp, Artificial Sequence
  chemically synthesized
tcctgtgctgaattcctgta

SEQ ID NO: 23613 - DNA, 20 bp, Artificial Sequence
  chemically synthesized
gtgctgaattcctgtaaagt

SEQ ID NO: 23614 - DNA, 20 bp, Artificial Sequence
  chemically synthesized
tgctgaattcctgtaaagtg

SEQ ID NO: 23615 - DNA, 20 bp, Artificial Sequence
  chemically synthesized
gctgaattcctgtaaagtga

SEQ ID NO: 23616 - DNA, 20 bp, Artificial Sequence
  chemically synthesized
cctacatccatcttcctctc

SEQ ID NO: 23617 - DNA, 20 bp, Artificial Sequence
  chemically synthesized
cagattccctctcaatttcc

SEQ ID NO: 23618 - DNA, 20 bp, Artificial Sequence
  chemically synthesized
agattccctctcaatttcca

SEQ ID NO: 23619 - DNA, 20 bp, Artificial Sequence
  chemically synthesized
ctctcaatttccaaggtatt

SEQ ID NO: 23620 - DNA, 20 bp, Artificial Sequence
  chemically synthesized
atatctgaacttcatttatt

SEQ ID NO: 23621 - DNA, 20 bp, Artificial Sequence
  chemically synthesized
tctgaacttcatttatttgg

SEQ ID NO: 23622 - DNA, 20 bp, Artificial Sequence
  chemically synthesized
atttatttggcagatttgtg

SEQ ID NO: 23623 - DNA, 20 bp, Artificial Sequence
  chemically synthesized
ctgccttttctgaacctatt

SEQ ID NO: 23624 - DNA, 20 bp, Artificial Sequence
  chemically synthesized
tgccttttctgaacctattt

SEQ ID NO: 23625 - DNA, 20 bp, Artificial Sequence
  chemically synthesized
tctgaacctatttgggtgct

SEQ ID NO: 23626 - DNA, 20 bp, Artificial Sequence
  chemically synthesized
ctgaacctatttgggtgcta

SEQ ID NO: 23627 - DNA, 20 bp, Artificial Sequence
  chemically synthesized
tttgggtgctaaggactgta

SEQ ID NO: 23628 - DNA, 20 bp, Artificial Sequence
  chemically synthesized
tgctaaggactgtatggatt

SEQ ID NO: 23629 - DNA, 20 bp, Artificial Sequence
  chemically synthesized
gctaaggactgtatggattt

SEQ ID NO: 23630 - DNA, 20 bp, Artificial Sequence
  chemically synthesized
atggatttgggttcttaaca

SEQ ID NO: 23631 - DNA, 20 bp, Artificial Sequence
  chemically synthesized
ggaaaacgtctgtgcctgcg

SEQ ID NO: 23632 - DNA, 20 bp, Artificial Sequence
  chemically synthesized
cgtctgtgcctgcgtagtgt

SEQ ID NO: 23633 - DNA, 20 bp, Artificial Sequence
  chemically synthesized
gtctgtgcctgcgtagtgtt

SEQ ID NO: 23634 - DNA, 20 bp, Artificial Sequence
  chemically synthesized
gcgtagtgttgggtcctacc

SEQ ID NO: 23635 - DNA, 20 bp, Artificial Sequence
  chemically synthesized
ttgggtcctacctggccact

SEQ ID NO: 23636 - DNA, 20 bp, Artificial Sequence
  chemically synthesized
tggccacttggctctcaaca

SEQ ID NO: 23637 - DNA, 20 bp, Artificial Sequence
  chemically synthesized
gccacttggctctcaacacg

SEQ ID NO: 23638 - DNA, 20 bp, Artificial Sequence
  chemically synthesized
caacacggagtgatgatgcc

SEQ ID NO: 23639 - DNA, 20 bp, Artificial Sequence
  chemically synthesized
aacacggagtgatgatgcct

SEQ ID NO: 23640 - DNA, 20 bp, Artificial Sequence
  chemically synthesized
acacggagtgatgatgccta

SEQ ID NO: 23641 - DNA, 20 bp, Artificial Sequence
  chemically synthesized
atgcctagggtgttttgacg

SEQ ID NO: 23642 - DNA, 20 bp, Artificial Sequence
  chemically synthesized
tgcctagggtgttttgacgt

SEQ ID NO: 23643 - DNA, 20 bp, Artificial Sequence
  chemically synthesized
ctagggtgttttgacgtggg

SEQ ID NO: 23644 - DNA, 20 bp, Artificial Sequence
  chemically synthesized
ggtgttttgacgtgggcagt

SEQ ID NO: 23645 - DNA, 20 bp, Artificial Sequence
  chemically synthesized
tttgacgtgggcagtcagcc

SEQ ID NO: 23646 - DNA, 20 bp, Artificial Sequence
  chemically synthesized
cgtgggcagtcagcccagcc

SEQ ID NO: 23647 - DNA, 20 bp, Artificial Sequence
  chemically synthesized
tgggcagtcagcccagcctg

SEQ ID NO: 23648 - DNA, 20 bp, Artificial Sequence
  chemically synthesized
tcagcccagcctggagaact

SEQ ID NO: 23649 - DNA, 20 bp, Artificial Sequence
  chemically synthesized
cagcccagcctggagaactg

SEQ ID NO: 23650 - DNA, 20 bp, Artificial Sequence
  chemically synthesized
agcccagcctggagaactga

SEQ ID NO: 23651 - DNA, 20 bp, Artificial Sequence
  chemically synthesized
gcccagcctggagaactgag

SEQ ID NO: 23652 - DNA, 20 bp, Artificial Sequence
  chemically synthesized
ccagcctggagaactgaggg

SEQ ID NO: 23653 - DNA, 20 bp, Artificial Sequence
  chemically synthesized
ttttttcttttttctttttt

SEQ ID NO: 23654 - DNA, 20 bp, Artificial Sequence
  chemically synthesized
ttcttttttctttttttggt

SEQ ID NO: 23655 - DNA, 20 bp, Artificial Sequence
  chemically synthesized
tttttctttttttggtgaga

SEQ ID NO: 23656 - DNA, 20 bp, Artificial Sequence
  chemically synthesized
tttctttttttggtgagacg

SEQ ID NO: 23657 - DNA, 20 bp, Artificial Sequence
  chemically synthesized
ggagatttactcttgttgcc

SEQ ID NO: 23658 - DNA, 20 bp, Artificial Sequence
  chemically synthesized
gagatttactcttgttgccc

SEQ ID NO: 23659 - DNA, 20 bp, Artificial Sequence
  chemically synthesized
tttactcttgttgcccgggc

SEQ ID NO: 23660 - DNA, 20 bp, Artificial Sequence
  chemically synthesized
ttgcccgggctggaatgcaa

SEQ ID NO: 23661 - DNA, 20 bp, Artificial Sequence
  chemically synthesized
ggaatgcaatggcgcgatct

SEQ ID NO: 23662 - DNA, 20 bp, Artificial Sequence
  chemically synthesized
tcactgcatcttctgcctcc

SEQ ID NO: 23663 - DNA, 20 bp, Artificial Sequence
  chemically synthesized
cactgcatcttctgcctccc

SEQ ID NO: 23664 - DNA, 20 bp, Artificial Sequence
  chemically synthesized
atcttctgcctcccaggttc

SEQ ID NO: 23665 - DNA, 20 bp, Artificial Sequence
  chemically synthesized
gttcaagcgatctcctgcct

SEQ ID NO: 23666 - DNA, 20 bp, Artificial Sequence
  chemically synthesized
atctcctgcctcagcctccc

SEQ ID NO: 23667 - DNA, 20 bp, Artificial Sequence
  chemically synthesized
tcctgcctcagcctcccgag

SEQ ID NO: 23668 - DNA, 20 bp, Artificial Sequence
  chemically synthesized
cctcagcctcccgagtagct

SEQ ID NO: 23669 - DNA, 20 bp, Artificial Sequence
  chemically synthesized
ctcccgagtagctgagatta

SEQ ID NO: 23670 - DNA, 20 bp, Artificial Sequence
  chemically synthesized
tcccgagtagctgagattac

SEQ ID NO: 23671 - DNA, 20 bp, Artificial Sequence
  chemically synthesized
caggcatgtattaccatgcc

SEQ ID NO: 23672 - DNA, 20 bp, Artificial Sequence
  chemically synthesized
cccggctaattttgtatttt

SEQ ID NO: 23673 - DNA, 20 bp, Artificial Sequence
  chemically synthesized
ggctaattttgtatttttag

SEQ ID NO: 23674 - DNA, 20 bp, Artificial Sequence
  chemically synthesized
ctaattttgtatttttagta

SEQ ID NO: 23675 - DNA, 20 bp, Artificial Sequence
  chemically synthesized
ttttgtatttttagtagaga

SEQ ID NO: 23676 - DNA, 20 bp, Artificial Sequence
  chemically synthesized
tttgtatttttagtagagac

SEQ ID NO: 23677 - DNA, 20 bp, Artificial Sequence
  chemically synthesized
ttgtatttttagtagagacg

SEQ ID NO: 23678 - DNA, 20 bp, Artificial Sequence
  chemically synthesized
tgatcttgaactcctgacct

SEQ ID NO: 23679 - DNA, 20 bp, Artificial Sequence
  chemically synthesized
gatcttgaactcctgacctc

SEQ ID NO: 23680 - DNA, 20 bp, Artificial Sequence
  chemically synthesized
ctcaggtgatcctcctgccc

SEQ ID NO: 23681 - DNA, 20 bp, Artificial Sequence
  chemically synthesized
cctcctgccccggcctccca

SEQ ID NO: 23682 - DNA, 20 bp, Artificial Sequence
  chemically synthesized
gccccggcctcccaaagtgc

SEQ ID NO: 23683 - DNA, 20 bp, Artificial Sequence
  chemically synthesized
ccccggcctcccaaagtgct

SEQ ID NO: 23684 - DNA, 20 bp, Artificial Sequence
  chemically synthesized
ctcccaaagtgctgggatta

SEQ ID NO: 23685 - DNA, 20 bp, Artificial Sequence
  chemically synthesized
tcccaaagtgctgggattac

SEQ ID NO: 23686 - DNA, 20 bp, Artificial Sequence
  chemically synthesized
agtgctgggattacaggtgt

SEQ ID NO: 23687 - DNA, 20 bp, Artificial Sequence
  chemically synthesized
gggattacaggtgtgagcca

SEQ ID NO: 23688 - DNA, 20 bp, Artificial Sequence
  chemically synthesized
caggtgtgagccacagcgcc

SEQ ID NO: 23689 - DNA, 20 bp, Artificial Sequence
  chemically synthesized
tgtgagccacagcgcctggc

SEQ ID NO: 23690 - DNA, 20 bp, Artificial Sequence
  chemically synthesized
gtgagccacagcgcctggcc

SEQ ID NO: 23691 - DNA, 20 bp, Artificial Sequence
  chemically synthesized
gagccacagcgcctggccgg

SEQ ID NO: 23692 - DNA, 20 bp, Artificial Sequence
  chemically synthesized
gccgggagcatttcaaatga

SEQ ID NO: 23693 - DNA, 20 bp, Artificial Sequence
  chemically synthesized
ggagcatttcaaatgatagt

SEQ ID NO: 23694 - DNA, 20 bp, Artificial Sequence
  chemically synthesized
gagcatttcaaatgatagtt

SEQ ID NO: 23695 - DNA, 20 bp, Artificial Sequence
  chemically synthesized
cttccttttactgtacttaa

SEQ ID NO: 23696 - DNA, 20 bp, Artificial Sequence
  chemically synthesized
tttactgtacttaatagctg

SEQ ID NO: 23697 - DNA, 20 bp, Artificial Sequence
  chemically synthesized
ttactgtacttaatagctga

SEQ ID NO: 23698 - DNA, 20 bp, Artificial Sequence
  chemically synthesized
tactgtacttaatagctgaa

SEQ ID NO: 23699 - DNA, 20 bp, Artificial Sequence
  chemically synthesized
actgtacttaatagctgaag

SEQ ID NO: 23700 - DNA, 20 bp, Artificial Sequence
  chemically synthesized
ctgtacttaatagctgaagg

SEQ ID NO: 23701 - DNA, 20 bp, Artificial Sequence
  chemically synthesized
taatagctgaagggggccaa

SEQ ID NO: 23702 - DNA, 20 bp, Artificial Sequence
  chemically synthesized
tgtccatgtttgctgccctc

SEQ ID NO: 23703 - DNA, 20 bp, Artificial Sequence
  chemically synthesized
ctgccctctggcatcaaaat

SEQ ID NO: 23704 - DNA, 20 bp, Artificial Sequence
  chemically synthesized
tgccctctggcatcaaaatg

SEQ ID NO: 23705 - DNA, 20 bp, Artificial Sequence
  chemically synthesized
catcaaaatgaggtcctttt

SEQ ID NO: 23706 - DNA, 20 bp, Artificial Sequence
  chemically synthesized
caaaatgaggtcctttttag

SEQ ID NO: 23707 - DNA, 20 bp, Artificial Sequence
  chemically synthesized
tagtagtgctgcatttaaaa

SEQ ID NO: 23708 - DNA, 20 bp, Artificial Sequence
  chemically synthesized
gctgcatttaaaacagcatt

SEQ ID NO: 23709 - DNA, 20 bp, Artificial Sequence
  chemically synthesized
cagcattaagaatacgtttt

SEQ ID NO: 23710 - DNA, 20 bp, Artificial Sequence
  chemically synthesized
aagaatacgtttttagaact

SEQ ID NO: 23711 - DNA, 20 bp, Artificial Sequence
  chemically synthesized
agaacttagctttttgcatt

SEQ ID NO: 23712 - DNA, 20 bp, Artificial Sequence
  chemically synthesized
gaacttagctttttgcattg

SEQ ID NO: 23713 - DNA, 20 bp, Artificial Sequence
  chemically synthesized
ctttttgcattgaggatgcg

SEQ ID NO: 23714 - DNA, 20 bp, Artificial Sequence
  chemically synthesized
tttttgcattgaggatgcgc

SEQ ID NO: 23715 - DNA, 20 bp, Artificial Sequence
  chemically synthesized
ttgcattgaggatgcgcagg

SEQ ID NO: 23716 - DNA, 20 bp, Artificial Sequence
  chemically synthesized
ttgaggatgcgcaggtggct

SEQ ID NO: 23717 - DNA, 20 bp, Artificial Sequence
  chemically synthesized
ggctgagactaacttctttg

SEQ ID NO: 23718 - DNA, 20 bp, Artificial Sequence
  chemically synthesized
aacttctttgcagatgacca

SEQ ID NO: 23719 - DNA, 20 bp, Artificial Sequence
  chemically synthesized
ttgcagatgaccatggttga

SEQ ID NO: 23720 - DNA, 20 bp, Artificial Sequence
  chemically synthesized
agatgaccatggttgaaagt

SEQ ID NO: 23721 - DNA, 20 bp, Artificial Sequence
  chemically synthesized
ccatggttgaaagtcagcta

SEQ ID NO: 23722 - DNA, 20 bp, Artificial Sequence
  chemically synthesized
atggttgaaagtcagctata

SEQ ID NO: 23723 - DNA, 20 bp, Artificial Sequence
  chemically synthesized
tatagagttgcacaaccacg

SEQ ID NO: 23724 - DNA, 20 bp, Artificial Sequence
  chemically synthesized
gagttgcacaaccacgtagt

SEQ ID NO: 23725 - DNA, 20 bp, Artificial Sequence
  chemically synthesized
agttgcacaaccacgtagtt

SEQ ID NO: 23726 - DNA, 20 bp, Artificial Sequence
  chemically synthesized
acgtagttgggcttcacata

SEQ ID NO: 23727 - DNA, 20 bp, Artificial Sequence
  chemically synthesized
tagttgggcttcacatatag

SEQ ID NO: 23728 - DNA, 20 bp, Artificial Sequence
  chemically synthesized
tagaagatgttgtcattttt

SEQ ID NO: 23729 - DNA, 20 bp, Artificial Sequence
  chemically synthesized
tcattttttggtaactctgt

SEQ ID NO: 23730 - DNA, 20 bp, Artificial Sequence
  chemically synthesized
tctgtcagactttaccaacc

SEQ ID NO: 23731 - DNA, 20 bp, Artificial Sequence
  chemically synthesized
gactttaccaacctggcgca

SEQ ID NO: 23732 - DNA, 20 bp, Artificial Sequence
  chemically synthesized
taccaacctggcgcacagtc

SEQ ID NO: 23733 - DNA, 20 bp, Artificial Sequence
  chemically synthesized
aacctggcgcacagtctggt

SEQ ID NO: 23734 - DNA, 20 bp, Artificial Sequence
  chemically synthesized
acttcacatttgctcttctc

SEQ ID NO: 23735 - DNA, 20 bp, Artificial Sequence
  chemically synthesized
cttcacatttgctcttctcc

SEQ ID NO: 23736 - DNA, 20 bp, Artificial Sequence
  chemically synthesized
ttcacatttgctcttctcca

SEQ ID NO: 23737 - DNA, 20 bp, Artificial Sequence
  chemically synthesized
atttgctcttctccagggtg

SEQ ID NO: 23738 - DNA, 20 bp, Artificial Sequence
  chemically synthesized
tttgctcttctccagggtgt

SEQ ID NO: 23739 - DNA, 20 bp, Artificial Sequence
  chemically synthesized
ttgctcttctccagggtgtg

SEQ ID NO: 23740 - DNA, 20 bp, Artificial Sequence
  chemically synthesized
ctcttctccagggtgtgggg

SEQ ID NO: 23741 - DNA, 20 bp, Artificial Sequence
  chemically synthesized
gggtgtggggtggctgttta

SEQ ID NO: 23742 - DNA, 20 bp, Artificial Sequence
  chemically synthesized
gtgtggggtggctgtttaaa

SEQ ID NO: 23743 - DNA, 20 bp, Artificial Sequence
  chemically synthesized
tgtggggtggctgtttaaag

SEQ ID NO: 23744 - DNA, 20 bp, Artificial Sequence
  chemically synthesized
gtggggtggctgtttaaaga

SEQ ID NO: 23745 - DNA, 20 bp, Artificial Sequence
  chemically synthesized
gggtggctgtttaaagaggg

SEQ ID NO: 23746 - DNA, 20 bp, Artificial Sequence
  chemically synthesized
tattcatgctaatctttgtg

SEQ ID NO: 23747 - DNA, 20 bp, Artificial Sequence
  chemically synthesized
gcttttttttttttatctga

SEQ ID NO: 23748 - DNA, 20 bp, Artificial Sequence
  chemically synthesized
ttttttttatctgaaagttc

SEQ ID NO: 23749 - DNA, 20 bp, Artificial Sequence
  chemically synthesized
tttttatctgaaagttcaag

SEQ ID NO: 23750 - DNA, 20 bp, Artificial Sequence
  chemically synthesized
ctgaaagttcaagtagatat

SEQ ID NO: 23751 - DNA, 20 bp, Artificial Sequence
  chemically synthesized
aaagttcaagtagatatcag

SEQ ID NO: 23752 - DNA, 20 bp, Artificial Sequence
  chemically synthesized
aagttcaagtagatatcaga

SEQ ID NO: 23753 - DNA, 20 bp, Artificial Sequence
  chemically synthesized
agttcaagtagatatcagaa

SEQ ID NO: 23754 - DNA, 20 bp, Artificial Sequence
  chemically synthesized
tatcagaagggaaatgtttg

SEQ ID NO: 23755 - DNA, 20 bp, Artificial Sequence
  chemically synthesized
atcagaagggaaatgtttgt

SEQ ID NO: 23756 - DNA, 20 bp, Artificial Sequence
  chemically synthesized
gggaaatgtttgtgggtgct

SEQ ID NO: 23757 - DNA, 20 bp, Artificial Sequence
  chemically synthesized
aaatgtttgtgggtgctaag

SEQ ID NO: 23758 - DNA, 20 bp, Artificial Sequence
  chemically synthesized
aatgtttgtgggtgctaaga

SEQ ID NO: 23759 - DNA, 20 bp, Artificial Sequence
  chemically synthesized
gttaaaattaccattttgaa

SEQ ID NO: 23760 - DNA, 20 bp, Artificial Sequence
  chemically synthesized
ttttgaacagaaatgatatt

SEQ ID NO: 23761 - DNA, 20 bp, Artificial Sequence
  chemically synthesized
tggaaaaataacttcccttt

SEQ ID NO: 23762 - DNA, 20 bp, Artificial Sequence
  chemically synthesized
ggaaaaataacttccctttt

SEQ ID NO: 23763 - DNA, 20 bp, Artificial Sequence
  chemically synthesized
aaaataacttcccttttagg

SEQ ID NO: 23764 - DNA, 20 bp, Artificial Sequence
  chemically synthesized
aaataacttcccttttagga

SEQ ID NO: 23765 - DNA, 20 bp, Artificial Sequence
  chemically synthesized
tcccttttaggaaggtaaat

SEQ ID NO: 23766 - DNA, 20 bp, Artificial Sequence
  chemically synthesized
tatgctatttgttgaattcc

SEQ ID NO: 23767 - DNA, 20 bp, Artificial Sequence
  chemically synthesized
tatcatgtcacatgctgtgc

SEQ ID NO: 23768 - DNA, 20 bp, Artificial Sequence
  chemically synthesized
gctggtactttcaaatataa

SEQ ID NO: 23769 - DNA, 20 bp, Artificial Sequence
  chemically synthesized
ggtactttcaaatataatag

SEQ ID NO: 23770 - DNA, 20 bp, Artificial Sequence
  chemically synthesized
ctttcaaatataatagaagc

SEQ ID NO: 23771 - DNA, 20 bp, Artificial Sequence
  chemically synthesized
tcaaatataatagaagcaag

SEQ ID NO: 23772 - DNA, 20 bp, Artificial Sequence
  chemically synthesized
caaatataatagaagcaagt

SEQ ID NO: 23773 - DNA, 20 bp, Artificial Sequence
  chemically synthesized
aatataatagaagcaagtag

SEQ ID NO: 23774 - DNA, 20 bp, Artificial Sequence
  chemically synthesized
taatagaagcaagtaggaga

SEQ ID NO: 23775 - DNA, 20 bp, Artificial Sequence
  chemically synthesized
atagaagcaagtaggagaaa

SEQ ID NO: 23776 - DNA, 20 bp, Artificial Sequence
  chemically synthesized
gagaaagagtccctgtattg

SEQ ID NO: 23777 - DNA, 20 bp, Artificial Sequence
  chemically synthesized
cctgtattgaagaaactcat

SEQ ID NO: 23778 - DNA, 20 bp, Artificial Sequence
  chemically synthesized
ctgtattgaagaaactcatt

SEQ ID NO: 23779 - DNA, 20 bp, Artificial Sequence
  chemically synthesized
tgggaacacatgaaattaat

SEQ ID NO: 23780 - DNA, 20 bp, Artificial Sequence
  chemically synthesized
ggaacacatgaaattaatta

SEQ ID NO: 23781 - DNA, 20 bp, Artificial Sequence
  chemically synthesized
gaacacatgaaattaattag

SEQ ID NO: 23782 - DNA, 20 bp, Artificial Sequence
  chemically synthesized
catgaaattaattagaggca

SEQ ID NO: 23783 - DNA, 20 bp, Artificial Sequence
  chemically synthesized
tgaaattaattagaggcata

SEQ ID NO: 23784 - DNA, 20 bp, Artificial Sequence
  chemically synthesized
gaaattaattagaggcatag

SEQ ID NO: 23785 - DNA, 20 bp, Artificial Sequence
  chemically synthesized
aaattaattagaggcataga

SEQ ID NO: 23786 - DNA, 20 bp, Artificial Sequence
  chemically synthesized
tagaggcatagagggttaac

SEQ ID NO: 23787 - DNA, 20 bp, Artificial Sequence
  chemically synthesized
agagggttaaccagcaatgt

SEQ ID NO: 23788 - DNA, 20 bp, Artificial Sequence
  chemically synthesized
gagggttaaccagcaatgta

SEQ ID NO: 23789 - DNA, 20 bp, Artificial Sequence
  chemically synthesized
ttaaccagcaatgtaaggcc

SEQ ID NO: 23790 - DNA, 20 bp, Artificial Sequence
  chemically synthesized
gcaatgtaaggcctagatat

SEQ ID NO: 23791 - DNA, 20 bp, Artificial Sequence
  chemically synthesized
tgtaaggcctagatatgagt

SEQ ID NO: 23792 - DNA, 20 bp, Artificial Sequence
  chemically synthesized
gtaaggcctagatatgagtc

SEQ ID NO: 23793 - DNA, 20 bp, Artificial Sequence
  chemically synthesized
taaggcctagatatgagtca

SEQ ID NO: 23794 - DNA, 20 bp, Artificial Sequence
  chemically synthesized
aggcctagatatgagtcagg

SEQ ID NO: 23795 - DNA, 20 bp, Artificial Sequence
  chemically synthesized
cctagatatgagtcagggag

SEQ ID NO: 23796 - DNA, 20 bp, Artificial Sequence
  chemically synthesized
atgagtcagggagtggtgca

SEQ ID NO: 23797 - DNA, 20 bp, Artificial Sequence
  chemically synthesized
tgagtcagggagtggtgcat

SEQ ID NO: 23798 - DNA, 20 bp, Artificial Sequence
  chemically synthesized
cagggagtggtgcatgggat

SEQ ID NO: 23799 - DNA, 20 bp, Artificial Sequence
  chemically synthesized
gcatgggatgagtgttctat

SEQ ID NO: 23800 - DNA, 20 bp, Artificial Sequence
  chemically synthesized
catgggatgagtgttctatg

SEQ ID NO: 23801 - DNA, 20 bp, Artificial Sequence
  chemically synthesized
ggatgagtgttctatgaggt

SEQ ID NO: 23802 - DNA, 20 bp, Artificial Sequence
  chemically synthesized
atgagtgttctatgaggttg

SEQ ID NO: 23803 - DNA, 20 bp, Artificial Sequence
  chemically synthesized
agtgttctatgaggttggag

SEQ ID NO: 23804 - DNA, 20 bp, Artificial Sequence
  chemically synthesized
gtgttctatgaggttggaga

SEQ ID NO: 23805 - DNA, 20 bp, Artificial Sequence
  chemically synthesized
ctatgaggttggagaaggat

SEQ ID NO: 23806 - DNA, 20 bp, Artificial Sequence
  chemically synthesized
tgagattgattcttcttgct

SEQ ID NO: 23807 - DNA, 20 bp, Artificial Sequence
  chemically synthesized
gagattgattcttcttgcta

SEQ ID NO: 23808 - DNA, 20 bp, Artificial Sequence
  chemically synthesized
attcttcttgctaaggtgac

SEQ ID NO: 23809 - DNA, 20 bp, Artificial Sequence
  chemically synthesized
ttcttcttgctaaggtgact

SEQ ID NO: 23810 - DNA, 20 bp, Artificial Sequence
  chemically synthesized
ttcttgctaaggtgactagg

SEQ ID NO: 23811 - DNA, 20 bp, Artificial Sequence
  chemically synthesized
tgactaggtagaccttcatt

SEQ ID NO: 23812 - DNA, 20 bp, Artificial Sequence
  chemically synthesized
gactaggtagaccttcattg

SEQ ID NO: 23813 - DNA, 20 bp, Artificial Sequence
  chemically synthesized
agaccttcattgaggccttg

SEQ ID NO: 23814 - DNA, 20 bp, Artificial Sequence
  chemically synthesized
tcattgaggccttgaagtat

SEQ ID NO: 23815 - DNA, 20 bp, Artificial Sequence
  chemically synthesized
ttgaggccttgaagtatgag

SEQ ID NO: 23816 - DNA, 20 bp, Artificial Sequence
  chemically synthesized
tgaggccttgaagtatgagc

SEQ ID NO: 23817 - DNA, 20 bp, Artificial Sequence
  chemically synthesized
ttgaagtatgagcaggattc

SEQ ID NO: 23818 - DNA, 20 bp, Artificial Sequence
  chemically synthesized
tgaagtatgagcaggattcc

SEQ ID NO: 23819 - DNA, 20 bp, Artificial Sequence
  chemically synthesized
aagtatgagcaggattccag

SEQ ID NO: 23820 - DNA, 20 bp, Artificial Sequence
  chemically synthesized
agtatgagcaggattccagg

SEQ ID NO: 23821 - DNA, 20 bp, Artificial Sequence
  chemically synthesized
tgagcaggattccaggaggt

SEQ ID NO: 23822 - DNA, 20 bp, Artificial Sequence
  chemically synthesized
agcaggattccaggaggtaa

SEQ ID NO: 23823 - DNA, 20 bp, Artificial Sequence
  chemically synthesized
aggattccaggaggtaagag

SEQ ID NO: 23824 - DNA, 20 bp, Artificial Sequence
  chemically synthesized
attccaggaggtaagagaag

SEQ ID NO: 23825 - DNA, 20 bp, Artificial Sequence
  chemically synthesized
ccaggaggtaagagaagaag

SEQ ID NO: 23826 - DNA, 20 bp, Artificial Sequence
  chemically synthesized
aggtaagagaagaagaagaa

SEQ ID NO: 23827 - DNA, 20 bp, Artificial Sequence
  chemically synthesized
aagagaagaagaagaaaagc

SEQ ID NO: 23828 - DNA, 20 bp, Artificial Sequence
  chemically synthesized
agagaagaagaagaaaagcc

SEQ ID NO: 23829 - DNA, 20 bp, Artificial Sequence
  chemically synthesized
gaagaagaagaaaagccagg

SEQ ID NO: 23830 - DNA, 20 bp, Artificial Sequence
  chemically synthesized
aagaagaagaaaagccagga

SEQ ID NO: 23831 - DNA, 20 bp, Artificial Sequence
  chemically synthesized
agaaaagccaggaaggaaat

SEQ ID NO: 23832 - DNA, 20 bp, Artificial Sequence
  chemically synthesized
agccaggaaggaaatgagaa

SEQ ID NO: 23833 - DNA, 20 bp, Artificial Sequence
  chemically synthesized
caggaaggaaatgagaacgg

SEQ ID NO: 23834 - DNA, 20 bp, Artificial Sequence
  chemically synthesized
aggaaggaaatgagaacgga

SEQ ID NO: 23835 - DNA, 20 bp, Artificial Sequence
  chemically synthesized
ggaaggaaatgagaacggaa

SEQ ID NO: 23836 - DNA, 20 bp, Artificial Sequence
  chemically synthesized
gaacggaagggatttttact

SEQ ID NO: 23837 - DNA, 20 bp, Artificial Sequence
  chemically synthesized
aacggaagggatttttactt

SEQ ID NO: 23838 - DNA, 20 bp, Artificial Sequence
  chemically synthesized
ggaagggatttttacttggg

SEQ ID NO: 23839 - DNA, 20 bp, Artificial Sequence
  chemically synthesized
gggcagaatattttccttga

SEQ ID NO: 23840 - DNA, 20 bp, Artificial Sequence
  chemically synthesized
ggcagaatattttccttgat

SEQ ID NO: 23841 - DNA, 20 bp, Artificial Sequence
  chemically synthesized
aatattttccttgatgggta

SEQ ID NO: 23842 - DNA, 20 bp, Artificial Sequence
  chemically synthesized
atattttccttgatgggtac

SEQ ID NO: 23843 - DNA, 20 bp, Artificial Sequence
  chemically synthesized
tattttccttgatgggtacg

SEQ ID NO: 23844 - DNA, 20 bp, Artificial Sequence
  chemically synthesized
cttgatgggtacggggaact

SEQ ID NO: 23845 - DNA, 20 bp, Artificial Sequence
  chemically synthesized
tgggtacggggaactaagac

SEQ ID NO: 23846 - DNA, 20 bp, Artificial Sequence
  chemically synthesized
acggggaactaagactggaa

SEQ ID NO: 23847 - DNA, 20 bp, Artificial Sequence
  chemically synthesized
ctaagactggaatagaaaat

SEQ ID NO: 23848 - DNA, 20 bp, Artificial Sequence
  chemically synthesized
aagactggaatagaaaattg

SEQ ID NO: 23849 - DNA, 20 bp, Artificial Sequence
  chemically synthesized
ctggaatagaaaattggagt

SEQ ID NO: 23850 - DNA, 20 bp, Artificial Sequence
  chemically synthesized
agaaaattggagttggattg

SEQ ID NO: 23851 - DNA, 20 bp, Artificial Sequence
  chemically synthesized
aaaattggagttggattgtg

SEQ ID NO: 23852 - DNA, 20 bp, Artificial Sequence
  chemically synthesized
ggagttggattgtggagctc

SEQ ID NO: 23853 - DNA, 20 bp, Artificial Sequence
  chemically synthesized
attgtggagctctggaatga

SEQ ID NO: 23854 - DNA, 20 bp, Artificial Sequence
  chemically synthesized
gagctctggaatgatggctt

SEQ ID NO: 23855 - DNA, 20 bp, Artificial Sequence
  chemically synthesized
agctctggaatgatggctta

SEQ ID NO: 23856 - DNA, 20 bp, Artificial Sequence
  chemically synthesized
ctctggaatgatggcttaag

SEQ ID NO: 23857 - DNA, 20 bp, Artificial Sequence
  chemically synthesized
ggaatgatggcttaaggagt

SEQ ID NO: 23858 - DNA, 20 bp, Artificial Sequence
  chemically synthesized
aggagttggaccatatccta

SEQ ID NO: 23859 - DNA, 20 bp, Artificial Sequence
  chemically synthesized
ggaccatatcctatagatca

SEQ ID NO: 23860 - DNA, 20 bp, Artificial Sequence
  chemically synthesized
accatatcctatagatcaca

SEQ ID NO: 23861 - DNA, 20 bp, Artificial Sequence
  chemically synthesized
ccatatcctatagatcacag

SEQ ID NO: 23862 - DNA, 20 bp, Artificial Sequence
  chemically synthesized
catatcctatagatcacaga

SEQ ID NO: 23863 - DNA, 20 bp, Artificial Sequence
  chemically synthesized
ggctgctgaaatactctgat

SEQ ID NO: 23864 - DNA, 20 bp, Artificial Sequence
  chemically synthesized
tgctgaaatactctgatcag

SEQ ID NO: 23865 - DNA, 20 bp, Artificial Sequence
  chemically synthesized
aatactctgatcagaagaca

SEQ ID NO: 23866 - DNA, 20 bp, Artificial Sequence
  chemically synthesized
atactctgatcagaagacaa

SEQ ID NO: 23867 - DNA, 20 bp, Artificial Sequence
  chemically synthesized
ctctgatcagaagacaaagg

SEQ ID NO: 23868 - DNA, 20 bp, Artificial Sequence
  chemically synthesized
agaagacaaaggcagcatgc

SEQ ID NO: 23869 - DNA, 20 bp, Artificial Sequence
  chemically synthesized
gaagacaaaggcagcatgct

SEQ ID NO: 23870 - DNA, 20 bp, Artificial Sequence
  chemically synthesized
aagacaaaggcagcatgcta

SEQ ID NO: 23871 - DNA, 20 bp, Artificial Sequence
  chemically synthesized
agacaaaggcagcatgctag

SEQ ID NO: 23872 - DNA, 20 bp, Artificial Sequence
  chemically synthesized
gcagcatgctaggggatgtt

SEQ ID NO: 23873 - DNA, 20 bp, Artificial Sequence
  chemically synthesized
catgctaggggatgttaagt

SEQ ID NO: 23874 - DNA, 20 bp, Artificial Sequence
  chemically synthesized
atgctaggggatgttaagtg

SEQ ID NO: 23875 - DNA, 20 bp, Artificial Sequence
  chemically synthesized
tgttaagtgaggactctgca

SEQ ID NO: 23876 - DNA, 20 bp, Artificial Sequence
  chemically synthesized
gttaagtgaggactctgcaa

SEQ ID NO: 23877 - DNA, 20 bp, Artificial Sequence
  chemically synthesized
ttaagtgaggactctgcaaa

SEQ ID NO: 23878 - DNA, 20 bp, Artificial Sequence
  chemically synthesized
taagtgaggactctgcaaag

SEQ ID NO: 23879 - DNA, 20 bp, Artificial Sequence
  chemically synthesized
aagtgaggactctgcaaagg

SEQ ID NO: 23880 - DNA, 20 bp, Artificial Sequence
  chemically synthesized
tgaggactctgcaaaggggg

SEQ ID NO: 23881 - DNA, 20 bp, Artificial Sequence
  chemically synthesized
actctgcaaagggggtggat

SEQ ID NO: 23882 - DNA, 20 bp, Artificial Sequence
  chemically synthesized
tctgttatacccttcatgcc

SEQ ID NO: 23883 - DNA, 20 bp, Artificial Sequence
  chemically synthesized
ccctgttgacttatatgttc

SEQ ID NO: 23884 - DNA, 20 bp, Artificial Sequence
  chemically synthesized
ctgttgacttatatgttcta

SEQ ID NO: 23885 - DNA, 20 bp, Artificial Sequence
  chemically synthesized
tgttgacttatatgttctag

SEQ ID NO: 23886 - DNA, 20 bp, Artificial Sequence
  chemically synthesized
gacttatatgttctagagga

SEQ ID NO: 23887 - DNA, 20 bp, Artificial Sequence
  chemically synthesized
cttatatgttctagaggatg

SEQ ID NO: 23888 - DNA, 20 bp, Artificial Sequence
  chemically synthesized
tatgttctagaggatggagt

SEQ ID NO: 23889 - DNA, 20 bp, Artificial Sequence
  chemically synthesized
aggatggagttggttgaccg

SEQ ID NO: 23890 - DNA, 20 bp, Artificial Sequence
  chemically synthesized
ggatggagttggttgaccgt

SEQ ID NO: 23891 - DNA, 20 bp, Artificial Sequence
  chemically synthesized
gatggagttggttgaccgta

SEQ ID NO: 23892 - DNA, 20 bp, Artificial Sequence
  chemically synthesized
accgtagggtttcctttcac

SEQ ID NO: 23893 - DNA, 20 bp, Artificial Sequence
  chemically synthesized
gtagggtttcctttcactag

SEQ ID NO: 23894 - DNA, 20 bp, Artificial Sequence
  chemically synthesized
gtttcctttcactagcagaa

SEQ ID NO: 23895 - DNA, 20 bp, Artificial Sequence
  chemically synthesized
tttcactagcagaatggaac

SEQ ID NO: 23896 - DNA, 20 bp, Artificial Sequence
  chemically synthesized
cagaatggaaccagatattg

SEQ ID NO: 23897 - DNA, 20 bp, Artificial Sequence
  chemically synthesized
agaatggaaccagatattgt

SEQ ID NO: 23898 - DNA, 20 bp, Artificial Sequence
  chemically synthesized
aatggaaccagatattgtag

SEQ ID NO: 23899 - DNA, 20 bp, Artificial Sequence
  chemically synthesized
aaccagatattgtaggagcc

SEQ ID NO: 23900 - DNA, 20 bp, Artificial Sequence
  chemically synthesized
tattgtaggagcctagcaca

SEQ ID NO: 23901 - DNA, 20 bp, Artificial Sequence
  chemically synthesized
attgtaggagcctagcacat

SEQ ID NO: 23902 - DNA, 20 bp, Artificial Sequence
  chemically synthesized
acatgggtctgttactaata

SEQ ID NO: 23903 - DNA, 20 bp, Artificial Sequence
  chemically synthesized
atgggtctgttactaatata

SEQ ID NO: 23904 - DNA, 20 bp, Artificial Sequence
  chemically synthesized
tgggtctgttactaatatag

SEQ ID NO: 23905 - DNA, 20 bp, Artificial Sequence
  chemically synthesized
atagaggactgtttaaatct

SEQ ID NO: 23906 - DNA, 20 bp, Artificial Sequence
  chemically synthesized
aggactgtttaaatcttgga

SEQ ID NO: 23907 - DNA, 20 bp, Artificial Sequence
  chemically synthesized
ttttgcctttgcccccattg

SEQ ID NO: 23908 - DNA, 20 bp, Artificial Sequence
  chemically synthesized
gcctttgcccccattgcaga

SEQ ID NO: 23909 - DNA, 20 bp, Artificial Sequence
  chemically synthesized
cctttgcccccattgcagat

SEQ ID NO: 23910 - DNA, 20 bp, Artificial Sequence
  chemically synthesized
ctttgcccccattgcagatg

SEQ ID NO: 23911 - DNA, 20 bp, Artificial Sequence
  chemically synthesized
ttgcccccattgcagatggg

SEQ ID NO: 23912 - DNA, 20 bp, Artificial Sequence
  chemically synthesized
cccccattgcagatggggag

SEQ ID NO: 23913 - DNA, 20 bp, Artificial Sequence
  chemically synthesized
ccccattgcagatggggagt

SEQ ID NO: 23914 - DNA, 20 bp, Artificial Sequence
  chemically synthesized
cattgcagatggggagtggg

SEQ ID NO: 23915 - DNA, 20 bp, Artificial Sequence
  chemically synthesized
attgcagatggggagtgggc

SEQ ID NO: 23916 - DNA, 20 bp, Artificial Sequence
  chemically synthesized
gagtgggcaggaatgacgtt

SEQ ID NO: 23917 - DNA, 20 bp, Artificial Sequence
  chemically synthesized
caggaatgacgttcagaatc

SEQ ID NO: 23918 - DNA, 20 bp, Artificial Sequence
  chemically synthesized
aggaatgacgttcagaatca

SEQ ID NO: 23919 - DNA, 20 bp, Artificial Sequence
  chemically synthesized
ggaatgacgttcagaatcaa

SEQ ID NO: 23920 - DNA, 20 bp, Artificial Sequence
  chemically synthesized
gttcagaatcaagggcccat

SEQ ID NO: 23921 - DNA, 20 bp, Artificial Sequence
  chemically synthesized
ttcagaatcaagggcccatc

SEQ ID NO: 23922 - DNA, 20 bp, Artificial Sequence
  chemically synthesized
tcagaatcaagggcccatca

SEQ ID NO: 23923 - DNA, 20 bp, Artificial Sequence
  chemically synthesized
gggcccatcagggtctgtat

SEQ ID NO: 23924 - DNA, 20 bp, Artificial Sequence
  chemically synthesized
ggtcccttgtccctctcctc

SEQ ID NO: 23925 - DNA, 20 bp, Artificial Sequence
  chemically synthesized
ctcctccagtccatccatgt

SEQ ID NO: 23926 - DNA, 20 bp, Artificial Sequence
  chemically synthesized
tcctccagtccatccatgtt

SEQ ID NO: 23927 - DNA, 20 bp, Artificial Sequence
  chemically synthesized
tccatccatgttgggatact

SEQ ID NO: 23928 - DNA, 20 bp, Artificial Sequence
  chemically synthesized
ccatccatgttgggatactc

SEQ ID NO: 23929 - DNA, 20 bp, Artificial Sequence
  chemically synthesized
catccatgttgggatactca

SEQ ID NO: 23930 - DNA, 20 bp, Artificial Sequence
  chemically synthesized
atgttgggatactcagggca

SEQ ID NO: 23931 - DNA, 20 bp, Artificial Sequence
  chemically synthesized
tgggatactcagggcatgga

SEQ ID NO: 23932 - DNA, 20 bp, Artificial Sequence
  chemically synthesized
gcatggatggtgtttcatga

SEQ ID NO: 23933 - DNA, 20 bp, Artificial Sequence
  chemically synthesized
ttgatgatatgtgacaaaat

SEQ ID NO: 23934 - DNA, 20 bp, Artificial Sequence
  chemically synthesized
tgatgatatgtgacaaaata

SEQ ID NO: 23935 - DNA, 20 bp, Artificial Sequence
  chemically synthesized
tgatatgtgacaaaataagg

SEQ ID NO: 23936 - DNA, 20 bp, Artificial Sequence
  chemically synthesized
gatatgtgacaaaataaggc

SEQ ID NO: 23937 - DNA, 20 bp, Artificial Sequence
  chemically synthesized
tccctgtgatctctctttaa

SEQ ID NO: 23938 - DNA, 20 bp, Artificial Sequence
  chemically synthesized
ttaatagtgtcctcctgctt

SEQ ID NO: 23939 - DNA, 20 bp, Artificial Sequence
  chemically synthesized
taatagtgtcctcctgcttt

SEQ ID NO: 23940 - DNA, 20 bp, Artificial Sequence
  chemically synthesized
aatagtgtcctcctgctttg

SEQ ID NO: 23941 - DNA, 20 bp, Artificial Sequence
  chemically synthesized
atagtgtcctcctgctttgg

SEQ ID NO: 23942 - DNA, 20 bp, Artificial Sequence
  chemically synthesized
ctcctgctttgggggttatt

SEQ ID NO: 23943 - DNA, 20 bp, Artificial Sequence
  chemically synthesized
tgctttgggggttattaagc

SEQ ID NO: 23944 - DNA, 20 bp, Artificial Sequence
  chemically synthesized
tattaagctagcctgaactt

SEQ ID NO: 23945 - DNA, 20 bp, Artificial Sequence
  chemically synthesized
tgaacttgagtaaacatttt

SEQ ID NO: 23946 - DNA, 20 bp, Artificial Sequence
  chemically synthesized
cttgagtaaacatttttgga

SEQ ID NO: 23947 - DNA, 20 bp, Artificial Sequence
  chemically synthesized
ttgagtaaacatttttggat

SEQ ID NO: 23948 - DNA, 20 bp, Artificial Sequence
  chemically synthesized
tgagtaaacatttttggatg

SEQ ID NO: 23949 - DNA, 20 bp, Artificial Sequence
  chemically synthesized
taaacatttttggatggggt

SEQ ID NO: 23950 - DNA, 20 bp, Artificial Sequence
  chemically synthesized
aacatttttggatggggtga

SEQ ID NO: 23951 - DNA, 20 bp, Artificial Sequence
  chemically synthesized
acatttttggatggggtgag

SEQ ID NO: 23952 - DNA, 20 bp, Artificial Sequence
  chemically synthesized
catttttggatggggtgaga

SEQ ID NO: 23953 - DNA, 20 bp, Artificial Sequence
  chemically synthesized
atttttggatggggtgagag

SEQ ID NO: 23954 - DNA, 20 bp, Artificial Sequence
  chemically synthesized
tttttggatggggtgagagg

SEQ ID NO: 23955 - DNA, 20 bp, Artificial Sequence
  chemically synthesized
ttttggatggggtgagaggg

SEQ ID NO: 23956 - DNA, 20 bp, Artificial Sequence
  chemically synthesized
ggtgagaggggggctgataa

SEQ ID NO: 23957 - DNA, 20 bp, Artificial Sequence
  chemically synthesized
gagaggggggctgataaaag

SEQ ID NO: 23958 - DNA, 20 bp, Artificial Sequence
  chemically synthesized
ggggggctgataaaagtggt

SEQ ID NO: 23959 - DNA, 20 bp, Artificial Sequence
  chemically synthesized
tgataaaagtggttagtaaa

SEQ ID NO: 23960 - DNA, 20 bp, Artificial Sequence
  chemically synthesized
aaaagtggttagtaaataga

SEQ ID NO: 23961 - DNA, 20 bp, Artificial Sequence
  chemically synthesized
gtggttagtaaatagacagt

SEQ ID NO: 23962 - DNA, 20 bp, Artificial Sequence
  chemically synthesized
ttagtaaatagacagttgga

SEQ ID NO: 23963 - DNA, 20 bp, Artificial Sequence
  chemically synthesized
tagtaaatagacagttggaa

SEQ ID NO: 23964 - DNA, 20 bp, Artificial Sequence
  chemically synthesized
gtaaatagacagttggaaag

SEQ ID NO: 23965 - DNA, 20 bp, Artificial Sequence
  chemically synthesized
tagacagttggaaaggagaa

SEQ ID NO: 23966 - DNA, 20 bp, Artificial Sequence
  chemically synthesized
agttggaaaggagaacggcc

SEQ ID NO: 23967 - DNA, 20 bp, Artificial Sequence
  chemically synthesized
gttggaaaggagaacggccc

SEQ ID NO: 23968 - DNA, 20 bp, Artificial Sequence
  chemically synthesized
ttggaaaggagaacggcccg

SEQ ID NO: 23969 - DNA, 20 bp, Artificial Sequence
  chemically synthesized
tggaaaggagaacggcccgg

SEQ ID NO: 23970 - DNA, 20 bp, Artificial Sequence
  chemically synthesized
aggagaacggcccgggggct

SEQ ID NO: 23971 - DNA, 20 bp, Artificial Sequence
  chemically synthesized
ggagaacggcccgggggctc

SEQ ID NO: 23972 - DNA, 20 bp, Artificial Sequence
  chemically synthesized
agaacggcccgggggctcag

SEQ ID NO: 23973 - DNA, 20 bp, Artificial Sequence
  chemically synthesized
ggcccgggggctcaggagat

SEQ ID NO: 23974 - DNA, 20 bp, Artificial Sequence
  chemically synthesized
cgggggctcaggagatgagc

SEQ ID NO: 23975 - DNA, 20 bp, Artificial Sequence
  chemically synthesized
gggggctcaggagatgagcc

SEQ ID NO: 23976 - DNA, 20 bp, Artificial Sequence
  chemically synthesized
ggggctcaggagatgagcca

SEQ ID NO: 23977 - DNA, 20 bp, Artificial Sequence
  chemically synthesized
caggagatgagccagggaac

SEQ ID NO: 23978 - DNA, 20 bp, Artificial Sequence
  chemically synthesized
aggagatgagccagggaaca

SEQ ID NO: 23979 - DNA, 20 bp, Artificial Sequence
  chemically synthesized
gatgagccagggaacaagga

SEQ ID NO: 23980 - DNA, 20 bp, Artificial Sequence
  chemically synthesized
gagccagggaacaaggaaag

SEQ ID NO: 23981 - DNA, 20 bp, Artificial Sequence
  chemically synthesized
gccagggaacaaggaaagca

SEQ ID NO: 23982 - DNA, 20 bp, Artificial Sequence
  chemically synthesized
aacaaggaaagcagagatgc

SEQ ID NO: 23983 - DNA, 20 bp, Artificial Sequence
  chemically synthesized
aagcagagatgctagtgacc

SEQ ID NO: 23984 - DNA, 20 bp, Artificial Sequence
  chemically synthesized
gcagagatgctagtgaccca

SEQ ID NO: 23985 - DNA, 20 bp, Artificial Sequence
  chemically synthesized
gctagtgacccagagtgtcc

SEQ ID NO: 23986 - DNA, 20 bp, Artificial Sequence
  chemically synthesized
tagtgacccagagtgtccta

SEQ ID NO: 23987 - DNA, 20 bp, Artificial Sequence
  chemically synthesized
agtgacccagagtgtcctag

SEQ ID NO: 23988 - DNA, 20 bp, Artificial Sequence
  chemically synthesized
gtgacccagagtgtcctaga

SEQ ID NO: 23989 - DNA, 20 bp, Artificial Sequence
  chemically synthesized
tgacccagagtgtcctagag

SEQ ID NO: 23990 - DNA, 20 bp, Artificial Sequence
  chemically synthesized
ccagagtgtcctagagggga

SEQ ID NO: 23991 - DNA, 20 bp, Artificial Sequence
  chemically synthesized
agaggggaaagaacctctgt

SEQ ID NO: 23992 - DNA, 20 bp, Artificial Sequence
  chemically synthesized
tctgttagaatttcaaatgt

SEQ ID NO: 23993 - DNA, 20 bp, Artificial Sequence
  chemically synthesized
caaatgtcagactttctttt

SEQ ID NO: 23994 - DNA, 20 bp, Artificial Sequence
  chemically synthesized
actttcttttcagcttcctt

SEQ ID NO: 23995 - DNA, 20 bp, Artificial Sequence
  chemically synthesized
ctttcttttcagcttccttc

SEQ ID NO: 23996 - DNA, 20 bp, Artificial Sequence
  chemically synthesized
caggtgcttcctcttctact

SEQ ID NO: 23997 - DNA, 20 bp, Artificial Sequence
  chemically synthesized
tctactcagaattttctttt

SEQ ID NO: 23998 - DNA, 20 bp, Artificial Sequence
  chemically synthesized
ctcagaattttcttttgaga

SEQ ID NO: 23999 - DNA, 20 bp, Artificial Sequence
  chemically synthesized
tcagaattttcttttgagat

SEQ ID NO: 24000 - DNA, 20 bp, Artificial Sequence
  chemically synthesized
ttttcttttgagataggtgc

SEQ ID NO: 24001 - DNA, 20 bp, Artificial Sequence
  chemically synthesized
gagataggtgctggtcaaac

SEQ ID NO: 24002 - DNA, 20 bp, Artificial Sequence
  chemically synthesized
gtcaaacaagcttttgtttg

SEQ ID NO: 24003 - DNA, 20 bp, Artificial Sequence
  chemically synthesized
aacaagcttttgtttgtggc

SEQ ID NO: 24004 - DNA, 20 bp, Artificial Sequence
  chemically synthesized
tttgtttgtggctggtcact

SEQ ID NO: 24005 - DNA, 20 bp, Artificial Sequence
  chemically synthesized
gtggctggtcacttggcaca

SEQ ID NO: 24006 - DNA, 20 bp, Artificial Sequence
  chemically synthesized
tggtcacttggcacacagtg

SEQ ID NO: 24007 - DNA, 20 bp, Artificial Sequence
  chemically synthesized
agtgtggctgtttgtcatcc

SEQ ID NO: 24008 - DNA, 20 bp, Artificial Sequence
  chemically synthesized
tgtttgtcatcctggatgat

SEQ ID NO: 24009 - DNA, 20 bp, Artificial Sequence
  chemically synthesized
gtttgtcatcctggatgatg

SEQ ID NO: 24010 - DNA, 20 bp, Artificial Sequence
  chemically synthesized
tgtcatcctggatgatgagg

SEQ ID NO: 24011 - DNA, 20 bp, Artificial Sequence
  chemically synthesized
tgatgaggcagctattttaa

SEQ ID NO: 24012 - DNA, 20 bp, Artificial Sequence
  chemically synthesized
gcagctattttaatggcacg

SEQ ID NO: 24013 - DNA, 20 bp, Artificial Sequence
  chemically synthesized
cagctattttaatggcacgc

SEQ ID NO: 24014 - DNA, 20 bp, Artificial Sequence
  chemically synthesized
agctattttaatggcacgca

SEQ ID NO: 24015 - DNA, 20 bp, Artificial Sequence
  chemically synthesized
gccgccgtgtgtttactgcc

SEQ ID NO: 24016 - DNA, 20 bp, Artificial Sequence
  chemically synthesized
tgtgtttactgccaagaaat

SEQ ID NO: 24017 - DNA, 20 bp, Artificial Sequence
  chemically synthesized
gtgtttactgccaagaaata

SEQ ID NO: 24018 - DNA, 20 bp, Artificial Sequence
  chemically synthesized
tgtttactgccaagaaataa

SEQ ID NO: 24019 - DNA, 20 bp, Artificial Sequence
  chemically synthesized
tgccaagaaataagggcttc

SEQ ID NO: 24020 - DNA, 20 bp, Artificial Sequence
  chemically synthesized
gccaagaaataagggcttct

SEQ ID NO: 24021 - DNA, 20 bp, Artificial Sequence
  chemically synthesized
caagaaataagggcttctag

SEQ ID NO: 24022 - DNA, 20 bp, Artificial Sequence
  chemically synthesized
ataagggcttctaggagact

SEQ ID NO: 24023 - DNA, 20 bp, Artificial Sequence
  chemically synthesized
agggcttctaggagacttgg

SEQ ID NO: 24024 - DNA, 20 bp, Artificial Sequence
  chemically synthesized
tctaggagacttggtggctt

SEQ ID NO: 24025 - DNA, 20 bp, Artificial Sequence
  chemically synthesized
ctaggagacttggtggcttt

SEQ ID NO: 24026 - DNA, 20 bp, Artificial Sequence
  chemically synthesized
tggctttaggaacaaacttc

SEQ ID NO: 24027 - DNA, 20 bp, Artificial Sequence
  chemically synthesized
ctttaggaacaaacttccag

SEQ ID NO: 24028 - DNA, 20 bp, Artificial Sequence
  chemically synthesized
taggaacaaacttccagcgg

SEQ ID NO: 24029 - DNA, 20 bp, Artificial Sequence
  chemically synthesized
aaacttccagcggcagaaat

SEQ ID NO: 24030 - DNA, 20 bp, Artificial Sequence
  chemically synthesized
ttccagcggcagaaattagt

SEQ ID NO: 24031 - DNA, 20 bp, Artificial Sequence
  chemically synthesized
tccagcggcagaaattagtt

SEQ ID NO: 24032 - DNA, 20 bp, Artificial Sequence
  chemically synthesized
agcggcagaaattagttagg

SEQ ID NO: 24033 - DNA, 20 bp, Artificial Sequence
  chemically synthesized
ggcagaaattagttaggaag

SEQ ID NO: 24034 - DNA, 20 bp, Artificial Sequence
  chemically synthesized
cagaaattagttaggaagca

SEQ ID NO: 24035 - DNA, 20 bp, Artificial Sequence
  chemically synthesized
aaattagttaggaagcagag

SEQ ID NO: 24036 - DNA, 20 bp, Artificial Sequence
  chemically synthesized
gttaggaagcagagtagcac

SEQ ID NO: 24037 - DNA, 20 bp, Artificial Sequence
  chemically synthesized
ttaggaagcagagtagcact

SEQ ID NO: 24038 - DNA, 20 bp, Artificial Sequence
  chemically synthesized
atgcctctattgtatgaatt

SEQ ID NO: 24039 - DNA, 20 bp, Artificial Sequence
  chemically synthesized
gtatgaatttggatatgttg

SEQ ID NO: 24040 - DNA, 20 bp, Artificial Sequence
  chemically synthesized
tatgaatttggatatgttgt

SEQ ID NO: 24041 - DNA, 20 bp, Artificial Sequence
  chemically synthesized
ttgtgggcaaaatgacataa

SEQ ID NO: 24042 - DNA, 20 bp, Artificial Sequence
  chemically synthesized
gcaaaatgacataaaagaaa

SEQ ID NO: 24043 - DNA, 20 bp, Artificial Sequence
  chemically synthesized
tgacataaaagaaatggaat

SEQ ID NO: 24044 - DNA, 20 bp, Artificial Sequence
  chemically synthesized
aaaagaaatggaatgagaaa

SEQ ID NO: 24045 - DNA, 20 bp, Artificial Sequence
  chemically synthesized
aatggaatgagaaatagtgt

SEQ ID NO: 24046 - DNA, 20 bp, Artificial Sequence
  chemically synthesized
aaatagtgtaagtgactgac

SEQ ID NO: 24047 - DNA, 20 bp, Artificial Sequence
  chemically synthesized
aatagtgtaagtgactgaca

SEQ ID NO: 24048 - DNA, 20 bp, Artificial Sequence
  chemically synthesized
gtgactgacaaggaccccat

SEQ ID NO: 24049 - DNA, 20 bp, Artificial Sequence
  chemically synthesized
acaaggaccccattggcatg

SEQ ID NO: 24050 - DNA, 20 bp, Artificial Sequence
  chemically synthesized
caaggaccccattggcatgt

SEQ ID NO: 24051 - DNA, 20 bp, Artificial Sequence
  chemically synthesized
gaccccattggcatgtgggc

SEQ ID NO: 24052 - DNA, 20 bp, Artificial Sequence
  chemically synthesized
gcatgtgggctagtgttgac

SEQ ID NO: 24053 - DNA, 20 bp, Artificial Sequence
  chemically synthesized
ctagtgttgactggctctca

SEQ ID NO: 24054 - DNA, 20 bp, Artificial Sequence
  chemically synthesized
tggctctcacagtgtgaatt

SEQ ID NO: 24055 - DNA, 20 bp, Artificial Sequence
  chemically synthesized
tctcacagtgtgaatttagt

SEQ ID NO: 24056 - DNA, 20 bp, Artificial Sequence
  chemically synthesized
ctcacagtgtgaatttagtt

SEQ ID NO: 24057 - DNA, 20 bp, Artificial Sequence
  chemically synthesized
tttattttccccaaactcta

SEQ ID NO: 24058 - DNA, 20 bp, Artificial Sequence
  chemically synthesized
ttccccaaactctaaagcaa

SEQ ID NO: 24059 - DNA, 20 bp, Artificial Sequence
  chemically synthesized
ctctaaagcaacagtttaat

SEQ ID NO: 24060 - DNA, 20 bp, Artificial Sequence
  chemically synthesized
tctaaagcaacagtttaatt

SEQ ID NO: 24061 - DNA, 20 bp, Artificial Sequence
  chemically synthesized
ctaaagcaacagtttaattg

SEQ ID NO: 24062 - DNA, 20 bp, Artificial Sequence
  chemically synthesized
caacagtttaattggggtct

SEQ ID NO: 24063 - DNA, 20 bp, Artificial Sequence
  chemically synthesized
aacagtttaattggggtcta

SEQ ID NO: 24064 - DNA, 20 bp, Artificial Sequence
  chemically synthesized
ttggggtctaaggtaccctt

SEQ ID NO: 24065 - DNA, 20 bp, Artificial Sequence
  chemically synthesized
cattttgaccacctattatt

SEQ ID NO: 24066 - DNA, 20 bp, Artificial Sequence
  chemically synthesized
attttgaccacctattattt

SEQ ID NO: 24067 - DNA, 20 bp, Artificial Sequence
  chemically synthesized
cacctattatttaggacaca

SEQ ID NO: 24068 - DNA, 20 bp, Artificial Sequence
  chemically synthesized
cacagcattttttttctttg

SEQ ID NO: 24069 - DNA, 20 bp, Artificial Sequence
  chemically synthesized
ctttgaagataaatttgttt

SEQ ID NO: 24070 - DNA, 20 bp, Artificial Sequence
  chemically synthesized
tttgaagataaatttgtttt

SEQ ID NO: 24071 - DNA, 20 bp, Artificial Sequence
  chemically synthesized
agataaatttgttttgggta

SEQ ID NO: 24072 - DNA, 20 bp, Artificial Sequence
  chemically synthesized
aaatttgttttgggtatggc

SEQ ID NO: 24073 - DNA, 20 bp, Artificial Sequence
  chemically synthesized
aatttgttttgggtatggct

SEQ ID NO: 24074 - DNA, 20 bp, Artificial Sequence
  chemically synthesized
gttttgggtatggctgggtg

SEQ ID NO: 24075 - DNA, 20 bp, Artificial Sequence
  chemically synthesized
ttgggtatggctgggtgtgg

SEQ ID NO: 24076 - DNA, 20 bp, Artificial Sequence
  chemically synthesized
gtagcttatgcctataatcc

SEQ ID NO: 24077 - DNA, 20 bp, Artificial Sequence
  chemically synthesized
tgcctataatcccagcactt

SEQ ID NO: 24078 - DNA, 20 bp, Artificial Sequence
  chemically synthesized
gcctataatcccagcacttt

SEQ ID NO: 24079 - DNA, 20 bp, Artificial Sequence
  chemically synthesized
ctataatcccagcactttgg

SEQ ID NO: 24080 - DNA, 20 bp, Artificial Sequence
  chemically synthesized
tataatcccagcactttggg

SEQ ID NO: 24081 - DNA, 20 bp, Artificial Sequence
  chemically synthesized
tcccagcactttgggaggct

SEQ ID NO: 24082 - DNA, 20 bp, Artificial Sequence
  chemically synthesized
cccagcactttgggaggctg

SEQ ID NO: 24083 - DNA, 20 bp, Artificial Sequence
  chemically synthesized
agcactttgggaggctgagg

SEQ ID NO: 24084 - DNA, 20 bp, Artificial Sequence
  chemically synthesized
gcactttgggaggctgaggt

SEQ ID NO: 24085 - DNA, 20 bp, Artificial Sequence
  chemically synthesized
ctttgggaggctgaggtggg

SEQ ID NO: 24086 - DNA, 20 bp, Artificial Sequence
  chemically synthesized
ctgaggtgggtggatcacct

SEQ ID NO: 24087 - DNA, 20 bp, Artificial Sequence
  chemically synthesized
tgaggtgggtggatcaccta

SEQ ID NO: 24088 - DNA, 20 bp, Artificial Sequence
  chemically synthesized
gtgggtggatcacctaaggt

SEQ ID NO: 24089 - DNA, 20 bp, Artificial Sequence
  chemically synthesized
tgggtggatcacctaaggtc

SEQ ID NO: 24090 - DNA, 20 bp, Artificial Sequence
  chemically synthesized
ggtggatcacctaaggtcgg

SEQ ID NO: 24091 - DNA, 20 bp, Artificial Sequence
  chemically synthesized
tcacctaaggtcgggagttt

SEQ ID NO: 24092 - DNA, 20 bp, Artificial Sequence
  chemically synthesized
taaggtcgggagtttgagac

SEQ ID NO: 24093 - DNA, 20 bp, Artificial Sequence
  chemically synthesized
tgagaccagcctgaccaaca

SEQ ID NO: 24094 - DNA, 20 bp, Artificial Sequence
  chemically synthesized
agaccagcctgaccaacatg

SEQ ID NO: 24095 - DNA, 20 bp, Artificial Sequence
  chemically synthesized
ccccgtctctaccaaaaata

SEQ ID NO: 24096 - DNA, 20 bp, Artificial Sequence
  chemically synthesized
tctaccaaaaatacagaaat

SEQ ID NO: 24097 - DNA, 20 bp, Artificial Sequence
  chemically synthesized
atacagaaattagccgcgtg

SEQ ID NO: 24098 - DNA, 20 bp, Artificial Sequence
  chemically synthesized
cagaaattagccgcgtgtgg

SEQ ID NO: 24099 - DNA, 20 bp, Artificial Sequence
  chemically synthesized
gtggcgcatgcctataatcc

SEQ ID NO: 24100 - DNA, 20 bp, Artificial Sequence
  chemically synthesized
tgcctataatcccagctact

SEQ ID NO: 24101 - DNA, 20 bp, Artificial Sequence
  chemically synthesized
gcctataatcccagctactt

SEQ ID NO: 24102 - DNA, 20 bp, Artificial Sequence
  chemically synthesized
ctataatcccagctacttgg

SEQ ID NO: 24103 - DNA, 20 bp, Artificial Sequence
  chemically synthesized
tataatcccagctacttggg

SEQ ID NO: 24104 - DNA, 20 bp, Artificial Sequence
  chemically synthesized
tcccagctacttgggaggct

SEQ ID NO: 24105 - DNA, 20 bp, Artificial Sequence
  chemically synthesized
cccagctacttgggaggctg

SEQ ID NO: 24106 - DNA, 20 bp, Artificial Sequence
  chemically synthesized
agctacttgggaggctgagg

SEQ ID NO: 24107 - DNA, 20 bp, Artificial Sequence
  chemically synthesized
gctacttgggaggctgaggc

SEQ ID NO: 24108 - DNA, 20 bp, Artificial Sequence
  chemically synthesized
tacttgggaggctgaggcag

SEQ ID NO: 24109 - DNA, 20 bp, Artificial Sequence
  chemically synthesized
gcaggagaatcgcttgaacc

SEQ ID NO: 24110 - DNA, 20 bp, Artificial Sequence
  chemically synthesized
caggagaatcgcttgaaccc

SEQ ID NO: 24111 - DNA, 20 bp, Artificial Sequence
  chemically synthesized
ggagaatcgcttgaacccgg

SEQ ID NO: 24112 - DNA, 20 bp, Artificial Sequence
  chemically synthesized
gagaatcgcttgaacccggg

SEQ ID NO: 24113 - DNA, 20 bp, Artificial Sequence
  chemically synthesized
aatcgcttgaacccgggagg

SEQ ID NO: 24114 - DNA, 20 bp, Artificial Sequence
  chemically synthesized
tcgcttgaacccgggaggcg

SEQ ID NO: 24115 - DNA, 20 bp, Artificial Sequence
  chemically synthesized
aacccgggaggcggagattg

SEQ ID NO: 24116 - DNA, 20 bp, Artificial Sequence
  chemically synthesized
cgggaggcggagattgcggt

SEQ ID NO: 24117 - DNA, 20 bp, Artificial Sequence
  chemically synthesized
ggcggagattgcggtgagcc

SEQ ID NO: 24118 - DNA, 20 bp, Artificial Sequence
  chemically synthesized
gagattgcgccattgcactc

SEQ ID NO: 24119 - DNA, 20 bp, Artificial Sequence
  chemically synthesized
tgcgccattgcactccagcc

SEQ ID NO: 24120 - DNA, 20 bp, Artificial Sequence
  chemically synthesized
gcgccattgcactccagccc

SEQ ID NO: 24121 - DNA, 20 bp, Artificial Sequence
  chemically synthesized
tgcactccagcccgggcaac

SEQ ID NO: 24122 - DNA, 20 bp, Artificial Sequence
  chemically synthesized
cactccagcccgggcaacaa

SEQ ID NO: 24123 - DNA, 20 bp, Artificial Sequence
  chemically synthesized
acaagagcgaaactccacct

SEQ ID NO: 24124 - DNA, 20 bp, Artificial Sequence
  chemically synthesized
acaaacaaacaaaatcgttt

SEQ ID NO: 24125 - DNA, 20 bp, Artificial Sequence
  chemically synthesized
caaacaaacaaaatcgtttt

SEQ ID NO: 24126 - DNA, 20 bp, Artificial Sequence
  chemically synthesized
acaaacaaaatcgttttggg

SEQ ID NO: 24127 - DNA, 20 bp, Artificial Sequence
  chemically synthesized
aacaaaatcgttttgggtag

SEQ ID NO: 24128 - DNA, 20 bp, Artificial Sequence
  chemically synthesized
aaaatcgttttgggtagcag

SEQ ID NO: 24129 - DNA, 20 bp, Artificial Sequence
  chemically synthesized
gttttgggtagcagtggctt

SEQ ID NO: 24130 - DNA, 20 bp, Artificial Sequence
  chemically synthesized
ttttgggtagcagtggcttt

SEQ ID NO: 24131 - DNA, 20 bp, Artificial Sequence
  chemically synthesized
cagtggctttaggctgtttt

SEQ ID NO: 24132 - DNA, 20 bp, Artificial Sequence
  chemically synthesized
ttaggctgtttttggatctt

SEQ ID NO: 24133 - DNA, 20 bp, Artificial Sequence
  chemically synthesized
tttgttattattttcatgtt

SEQ ID NO: 24134 - DNA, 20 bp, Artificial Sequence
  chemically synthesized
attttcatgttaagcaaaac

SEQ ID NO: 24135 - DNA, 20 bp, Artificial Sequence
  chemically synthesized
tcatgttaagcaaaactaga

SEQ ID NO: 24136 - DNA, 20 bp, Artificial Sequence
  chemically synthesized
agttttaccgaattcccctg

SEQ ID NO: 24137 - DNA, 20 bp, Artificial Sequence
  chemically synthesized
taccgaattcccctgcagta

SEQ ID NO: 24138 - DNA, 20 bp, Artificial Sequence
  chemically synthesized
gaattcccctgcagtacagt

SEQ ID NO: 24139 - DNA, 20 bp, Artificial Sequence
  chemically synthesized
cagtaagtattttctttcat

SEQ ID NO: 24140 - DNA, 20 bp, Artificial Sequence
  chemically synthesized
agtaagtattttctttcatt

SEQ ID NO: 24141 - DNA, 20 bp, Artificial Sequence
  chemically synthesized
gtaagtattttctttcattg

SEQ ID NO: 24142 - DNA, 20 bp, Artificial Sequence
  chemically synthesized
taagtattttctttcattgg

SEQ ID NO: 24143 - DNA, 20 bp, Artificial Sequence
  chemically synthesized
gtattttctttcattggggg

SEQ ID NO: 24144 - DNA, 20 bp, Artificial Sequence
  chemically synthesized
tgggggaagcaaactattta

SEQ ID NO: 24145 - DNA, 20 bp, Artificial Sequence
  chemically synthesized
caaactatttacagccataa

SEQ ID NO: 24146 - DNA, 20 bp, Artificial Sequence
  chemically synthesized
aaactatttacagccataac

SEQ ID NO: 24147 - DNA, 20 bp, Artificial Sequence
  chemically synthesized
aactatttacagccataaca

SEQ ID NO: 24148 - DNA, 20 bp, Artificial Sequence
  chemically synthesized
tacagccataacagggtttc

SEQ ID NO: 24149 - DNA, 20 bp, Artificial Sequence
  chemically synthesized
gggtttccagtgaattgtat

SEQ ID NO: 24150 - DNA, 20 bp, Artificial Sequence
  chemically synthesized
tttccagtgaattgtataag

SEQ ID NO: 24151 - DNA, 20 bp, Artificial Sequence
  chemically synthesized
tgaattgtataagtagcact

SEQ ID NO: 24152 - DNA, 20 bp, Artificial Sequence
  chemically synthesized
agtagcactgagttctgtgt

SEQ ID NO: 24153 - DNA, 20 bp, Artificial Sequence
  chemically synthesized
aatgaaacaaaaactgatca

SEQ ID NO: 24154 - DNA, 20 bp, Artificial Sequence
  chemically synthesized
agatgacattacctaaatga

SEQ ID NO: 24155 - DNA, 20 bp, Artificial Sequence
  chemically synthesized
catttgctgtaatcctgtta

SEQ ID NO: 24156 - DNA, 20 bp, Artificial Sequence
  chemically synthesized
tggcattgtcctattatctc

SEQ ID NO: 24157 - DNA, 20 bp, Artificial Sequence
  chemically synthesized
aaatgctgtcaaattgtaac

SEQ ID NO: 24158 - DNA, 20 bp, Artificial Sequence
  chemically synthesized
caaattgtaactggattgcc

SEQ ID NO: 24159 - DNA, 20 bp, Artificial Sequence
  chemically synthesized
aaattgtaactggattgcca

SEQ ID NO: 24160 - DNA, 20 bp, Artificial Sequence
  chemically synthesized
tgtaactggattgccaagga

SEQ ID NO: 24161 - DNA, 20 bp, Artificial Sequence
  chemically synthesized
taactggattgccaaggaca

SEQ ID NO: 24162 - DNA, 20 bp, Artificial Sequence
  chemically synthesized
aactggattgccaaggacag

SEQ ID NO: 24163 - DNA, 20 bp, Artificial Sequence
  chemically synthesized
ctggattgccaaggacagag

SEQ ID NO: 24164 - DNA, 20 bp, Artificial Sequence
  chemically synthesized
ggattgccaaggacagagga

SEQ ID NO: 24165 - DNA, 20 bp, Artificial Sequence
  chemically synthesized
gattgccaaggacagaggag

SEQ ID NO: 24166 - DNA, 20 bp, Artificial Sequence
  chemically synthesized
caaggacagaggagaggaac

SEQ ID NO: 24167 - DNA, 20 bp, Artificial Sequence
  chemically synthesized
aaggacagaggagaggaacc

SEQ ID NO: 24168 - DNA, 20 bp, Artificial Sequence
  chemically synthesized
aggacagaggagaggaacca

SEQ ID NO: 24169 - DNA, 20 bp, Artificial Sequence
  chemically synthesized
gacagaggagaggaaccagg

SEQ ID NO: 24170 - DNA, 20 bp, Artificial Sequence
  chemically synthesized
acagaggagaggaaccaggg

SEQ ID NO: 24171 - DNA, 20 bp, Artificial Sequence
  chemically synthesized
aggaaccagggaggacacaa

SEQ ID NO: 24172 - DNA, 20 bp, Artificial Sequence
  chemically synthesized
tggcaattcccactgcacca

SEQ ID NO: 24173 - DNA, 20 bp, Artificial Sequence
  chemically synthesized
gcaattcccactgcaccaaa

SEQ ID NO: 24174 - DNA, 20 bp, Artificial Sequence
  chemically synthesized
ttcccactgcaccaaagaga

SEQ ID NO: 24175 - DNA, 20 bp, Artificial Sequence
  chemically synthesized
cggtcttcttccccctctca

SEQ ID NO: 24176 - DNA, 20 bp, Artificial Sequence
  chemically synthesized
cctctcacagtctgaattct

SEQ ID NO: 24177 - DNA, 20 bp, Artificial Sequence
  chemically synthesized
tctcacagtctgaattcttg

SEQ ID NO: 24178 - DNA, 20 bp, Artificial Sequence
  chemically synthesized
gaattcttggagacattgtt

SEQ ID NO: 24179 - DNA, 20 bp, Artificial Sequence
  chemically synthesized
gttcagttaaaatcatgact

SEQ ID NO: 24180 - DNA, 20 bp, Artificial Sequence
  chemically synthesized
ttcagttaaaatcatgactc

SEQ ID NO: 24181 - DNA, 20 bp, Artificial Sequence
  chemically synthesized
catgactcaggtatctttta

SEQ ID NO: 24182 - DNA, 20 bp, Artificial Sequence
  chemically synthesized
atgactcaggtatcttttac

SEQ ID NO: 24183 - DNA, 20 bp, Artificial Sequence
  chemically synthesized
ttttacaggctttgatgaaa

SEQ ID NO: 24184 - DNA, 20 bp, Artificial Sequence
  chemically synthesized
acaggctttgatgaaatagt

SEQ ID NO: 24185 - DNA, 20 bp, Artificial Sequence
  chemically synthesized
agattcactcctcatgttcc

SEQ ID NO: 24186 - DNA, 20 bp, Artificial Sequence
  chemically synthesized
ttcactcctcatgttcctag

SEQ ID NO: 24187 - DNA, 20 bp, Artificial Sequence
  chemically synthesized
tcactcctcatgttcctaga

SEQ ID NO: 24188 - DNA, 20 bp, Artificial Sequence
  chemically synthesized
tcctcatgttcctagaagga

SEQ ID NO: 24189 - DNA, 20 bp, Artificial Sequence
  chemically synthesized
cctcatgttcctagaaggaa

SEQ ID NO: 24190 - DNA, 20 bp, Artificial Sequence
  chemically synthesized
catgttcctagaaggaaagg

SEQ ID NO: 24191 - DNA, 20 bp, Artificial Sequence
  chemically synthesized
aggaagaaacactctttgaa

SEQ ID NO: 24192 - DNA, 20 bp, Artificial Sequence
  chemically synthesized
acactctttgaacagcccgt

SEQ ID NO: 24193 - DNA, 20 bp, Artificial Sequence
  chemically synthesized
gcccgtgagacaaactcttc

SEQ ID NO: 24194 - DNA, 20 bp, Artificial Sequence
  chemically synthesized
cccgtgagacaaactcttcc

SEQ ID NO: 24195 - DNA, 20 bp, Artificial Sequence
  chemically synthesized
tttaaatgtttctacataat

SEQ ID NO: 24196 - DNA, 20 bp, Artificial Sequence
  chemically synthesized
acataatgagaataaattgt

SEQ ID NO: 24197 - DNA, 20 bp, Artificial Sequence
  chemically synthesized
gttactgtgtttttaaaacc

SEQ ID NO: 24198 - DNA, 20 bp, Artificial Sequence
  chemically synthesized
ttactgtgtttttaaaaccc

SEQ ID NO: 24199 - DNA, 20 bp, Artificial Sequence
  chemically synthesized
gtttttaaaacccaggtcaa

SEQ ID NO: 24200 - DNA, 20 bp, Artificial Sequence
  chemically synthesized
aaaacccaggtcaaaagtaa

SEQ ID NO: 24201 - DNA, 20 bp, Artificial Sequence
  chemically synthesized
ccaggtcaaaagtaatagca

SEQ ID NO: 24202 - DNA, 20 bp, Artificial Sequence
  chemically synthesized
aggtcaaaagtaatagcaca

SEQ ID NO: 24203 - DNA, 20 bp, Artificial Sequence
  chemically synthesized
gtcaaaagtaatagcacaga

SEQ ID NO: 24204 - DNA, 20 bp, Artificial Sequence
  chemically synthesized
tcaaaagtaatagcacagag

SEQ ID NO: 24205 - DNA, 20 bp, Artificial Sequence
  chemically synthesized
caaaagtaatagcacagaga

SEQ ID NO: 24206 - DNA, 20 bp, Artificial Sequence
  chemically synthesized
tagcacagagagggatctat

SEQ ID NO: 24207 - DNA, 20 bp, Artificial Sequence
  chemically synthesized
ttgttcatatattgcttccc

SEQ ID NO: 24208 - DNA, 20 bp, Artificial Sequence
  chemically synthesized
tgttcatatattgcttcccc

SEQ ID NO: 24209 - DNA, 20 bp, Artificial Sequence
  chemically synthesized
atatattgcttccccaggtt

SEQ ID NO: 24210 - DNA, 20 bp, Artificial Sequence
  chemically synthesized
ttgcttccccaggtttagat

SEQ ID NO: 24211 - DNA, 20 bp, Artificial Sequence
  chemically synthesized
tgcttccccaggtttagatg

SEQ ID NO: 24212 - DNA, 20 bp, Artificial Sequence
  chemically synthesized
gcttccccaggtttagatga

SEQ ID NO: 24213 - DNA, 20 bp, Artificial Sequence
  chemically synthesized
tttagatgagggctccattc

SEQ ID NO: 24214 - DNA, 20 bp, Artificial Sequence
  chemically synthesized
tagatgagggctccattcta

SEQ ID NO: 24215 - DNA, 20 bp, Artificial Sequence
  chemically synthesized
tgagggctccattctagagt

SEQ ID NO: 24216 - DNA, 20 bp, Artificial Sequence
  chemically synthesized
gagggctccattctagagtt

SEQ ID NO: 24217 - DNA, 20 bp, Artificial Sequence
  chemically synthesized
attctagagttgggaaaacc

SEQ ID NO: 24218 - DNA, 20 bp, Artificial Sequence
  chemically synthesized
tagagttgggaaaaccaagt

SEQ ID NO: 24219 - DNA, 20 bp, Artificial Sequence
  chemically synthesized
aaaccaagtcagtaaacctt

SEQ ID NO: 24220 - DNA, 20 bp, Artificial Sequence
  chemically synthesized
ccaagtcagtaaacctttag

SEQ ID NO: 24221 - DNA, 20 bp, Artificial Sequence
  chemically synthesized
agtcagtaaacctttagtgg

SEQ ID NO: 24222 - DNA, 20 bp, Artificial Sequence
  chemically synthesized
cctttagtggcagatgttat

SEQ ID NO: 24223 - DNA, 20 bp, Artificial Sequence
  chemically synthesized
ctttagtggcagatgttatc

SEQ ID NO: 24224 - DNA, 20 bp, Artificial Sequence
  chemically synthesized
tttagtggcagatgttatca

SEQ ID NO: 24225 - DNA, 20 bp, Artificial Sequence
  chemically synthesized
tagtggcagatgttatcagg

SEQ ID NO: 24226 - DNA, 20 bp, Artificial Sequence
  chemically synthesized
ggcagatgttatcagggagc

SEQ ID NO: 24227 - DNA, 20 bp, Artificial Sequence
  chemically synthesized
cagatgttatcagggagctg

SEQ ID NO: 24228 - DNA, 20 bp, Artificial Sequence
  chemically synthesized
tgttatcagggagctggagt

SEQ ID NO: 24229 - DNA, 20 bp, Artificial Sequence
  chemically synthesized
ttatcagggagctggagttg

SEQ ID NO: 24230 - DNA, 20 bp, Artificial Sequence
  chemically synthesized
cttgcattttgtgtttgtgc

SEQ ID NO: 24231 - DNA, 20 bp, Artificial Sequence
  chemically synthesized
catgttcctcttcatatatt

SEQ ID NO: 24232 - DNA, 20 bp, Artificial Sequence
  chemically synthesized
atttagaccaaattcttatc

SEQ ID NO: 24233 - DNA, 20 bp, Artificial Sequence
  chemically synthesized
cttatccagatttcccatta

SEQ ID NO: 24234 - DNA, 20 bp, Artificial Sequence
  chemically synthesized
ttatccagatttcccattaa

SEQ ID NO: 24235 - DNA, 20 bp, Artificial Sequence
  chemically synthesized
attaaaggttcataaatttc

SEQ ID NO: 24236 - DNA, 20 bp, Artificial Sequence
  chemically synthesized
ttccagttttcacctttctg

SEQ ID NO: 24237 - DNA, 20 bp, Artificial Sequence
  chemically synthesized
tcacctttctgcagcttcct

SEQ ID NO: 24238 - DNA, 20 bp, Artificial Sequence
  chemically synthesized
ctttctgcagcttccttaga

SEQ ID NO: 24239 - DNA, 20 bp, Artificial Sequence
  chemically synthesized
tgcagcttccttagatagaa

SEQ ID NO: 24240 - DNA, 20 bp, Artificial Sequence
  chemically synthesized
ccttagatagaatggttgat

SEQ ID NO: 24241 - DNA, 20 bp, Artificial Sequence
  chemically synthesized
aaaattaccgcattaaaatt

SEQ ID NO: 24242 - DNA, 20 bp, Artificial Sequence
  chemically synthesized
acattctgctgctcataaat

SEQ ID NO: 24243 - DNA, 20 bp, Artificial Sequence
  chemically synthesized
cattctgctgctcataaata

SEQ ID NO: 24244 - DNA, 20 bp, Artificial Sequence
  chemically synthesized
attctgctgctcataaataa

SEQ ID NO: 24245 - DNA, 20 bp, Artificial Sequence
  chemically synthesized
tctgctgctcataaataagg

SEQ ID NO: 24246 - DNA, 20 bp, Artificial Sequence
  chemically synthesized
gctgctcataaataagggag

SEQ ID NO: 24247 - DNA, 20 bp, Artificial Sequence
  chemically synthesized
ctgctcataaataagggagt

SEQ ID NO: 24248 - DNA, 20 bp, Artificial Sequence
  chemically synthesized
ataaataagggagtgggaaa

SEQ ID NO: 24249 - DNA, 20 bp, Artificial Sequence
  chemically synthesized
tactttgaacaccctcgtta

SEQ ID NO: 24250 - DNA, 20 bp, Artificial Sequence
  chemically synthesized
actttgaacaccctcgttaa

SEQ ID NO: 24251 - DNA, 20 bp, Artificial Sequence
  chemically synthesized
tgaacaccctcgttaaaggc

SEQ ID NO: 24252 - DNA, 20 bp, Artificial Sequence
  chemically synthesized
accctcgttaaaggctggtg

SEQ ID NO: 24253 - DNA, 20 bp, Artificial Sequence
  chemically synthesized
ttaaaggctggtgtggttgc

SEQ ID NO: 24254 - DNA, 20 bp, Artificial Sequence
  chemically synthesized
aaaggctggtgtggttgcca

SEQ ID NO: 24255 - DNA, 20 bp, Artificial Sequence
  chemically synthesized
ctggtgtggttgccagagaa

SEQ ID NO: 24256 - DNA, 20 bp, Artificial Sequence
  chemically synthesized
tggtgtggttgccagagaat

SEQ ID NO: 24257 - DNA, 20 bp, Artificial Sequence
  chemically synthesized
ggtgtggttgccagagaata

SEQ ID NO: 24258 - DNA, 20 bp, Artificial Sequence
  chemically synthesized
ccagagaatagggctaactt

SEQ ID NO: 24259 - DNA, 20 bp, Artificial Sequence
  chemically synthesized
cagagaatagggctaactta

SEQ ID NO: 24260 - DNA, 20 bp, Artificial Sequence
  chemically synthesized
agagaatagggctaacttaa

SEQ ID NO: 24261 - DNA, 20 bp, Artificial Sequence
  chemically synthesized
gagaatagggctaacttaag

SEQ ID NO: 24262 - DNA, 20 bp, Artificial Sequence
  chemically synthesized
agaatagggctaacttaagg

SEQ ID NO: 24263 - DNA, 20 bp, Artificial Sequence
  chemically synthesized
taacttaagggggatccgct

SEQ ID NO: 24264 - DNA, 20 bp, Artificial Sequence
  chemically synthesized
ttttttgttttgttttgttc

SEQ ID NO: 24265 - DNA, 20 bp, Artificial Sequence
  chemically synthesized
gttttgttctggattttata

SEQ ID NO: 24266 - DNA, 20 bp, Artificial Sequence
  chemically synthesized
ttttgttctggattttataa

SEQ ID NO: 24267 - DNA, 20 bp, Artificial Sequence
  chemically synthesized
gattttataaaggcatcatt

SEQ ID NO: 24268 - DNA, 20 bp, Artificial Sequence
  chemically synthesized
tttaaatatctaatgttgat

SEQ ID NO: 24269 - DNA, 20 bp, Artificial Sequence
  chemically synthesized
ttagtatgttctattattta

SEQ ID NO: 24270 - DNA, 20 bp, Artificial Sequence
  chemically synthesized
ttctattatttatagccctc

SEQ ID NO: 24271 - DNA, 20 bp, Artificial Sequence
  chemically synthesized
tattatttatagccctccag

SEQ ID NO: 24272 - DNA, 20 bp, Artificial Sequence
  chemically synthesized
attatttatagccctccaga

SEQ ID NO: 24273 - DNA, 20 bp, Artificial Sequence
  chemically synthesized
tagccctccagaaggatccc

SEQ ID NO: 24274 - DNA, 20 bp, Artificial Sequence
  chemically synthesized
agccctccagaaggatccca

SEQ ID NO: 24275 - DNA, 20 bp, Artificial Sequence
  chemically synthesized
gccctccagaaggatcccaa

SEQ ID NO: 24276 - DNA, 20 bp, Artificial Sequence
  chemically synthesized
ctccagaaggatcccaaggg

SEQ ID NO: 24277 - DNA, 20 bp, Artificial Sequence
  chemically synthesized
agggaagataatctacattt

SEQ ID NO: 24278 - DNA, 20 bp, Artificial Sequence
  chemically synthesized
gaagataatctacatttgag

SEQ ID NO: 24279 - DNA, 20 bp, Artificial Sequence
  chemically synthesized
acgatttcccaatttccata

SEQ ID NO: 24280 - DNA, 20 bp, Artificial Sequence
  chemically synthesized
gaattttctttttccactct

SEQ ID NO: 24281 - DNA, 20 bp, Artificial Sequence
  chemically synthesized
ctttttccactctcggtgtg

SEQ ID NO: 24282 - DNA, 20 bp, Artificial Sequence
  chemically synthesized
actctcggtgtgtggcattg

SEQ ID NO: 24283 - DNA, 20 bp, Artificial Sequence
  chemically synthesized
ctctcggtgtgtggcattgt

SEQ ID NO: 24284 - DNA, 20 bp, Artificial Sequence
  chemically synthesized
tctcggtgtgtggcattgtg

SEQ ID NO: 24285 - DNA, 20 bp, Artificial Sequence
  chemically synthesized
gtgtgtggcattgtggggtg

SEQ ID NO: 24286 - DNA, 20 bp, Artificial Sequence
  chemically synthesized
tgtggggtgcagacacctga

SEQ ID NO: 24287 - DNA, 20 bp, Artificial Sequence
  chemically synthesized
cagacacctgaaagcctgac

SEQ ID NO: 24288 - DNA, 20 bp, Artificial Sequence
  chemically synthesized
gacacctgaaagcctgactg

SEQ ID NO: 24289 - DNA, 20 bp, Artificial Sequence
  chemically synthesized
gcctgactggagatgtaaca

SEQ ID NO: 24290 - DNA, 20 bp, Artificial Sequence
  chemically synthesized
cctgactggagatgtaacat

SEQ ID NO: 24291 - DNA, 20 bp, Artificial Sequence
  chemically synthesized
aacatgggctctgctgacat

SEQ ID NO: 24292 - DNA, 20 bp, Artificial Sequence
  chemically synthesized
gctctgctgacattagcatg

SEQ ID NO: 24293 - DNA, 20 bp, Artificial Sequence
  chemically synthesized
tctgctgacattagcatgaa

SEQ ID NO: 24294 - DNA, 20 bp, Artificial Sequence
  chemically synthesized
tgacattagcatgaagagct

SEQ ID NO: 24295 - DNA, 20 bp, Artificial Sequence
  chemically synthesized
gctaatcgacttgcaaaata

SEQ ID NO: 24296 - DNA, 20 bp, Artificial Sequence
  chemically synthesized
ctaatcgacttgcaaaatat

SEQ ID NO: 24297 - DNA, 20 bp, Artificial Sequence
  chemically synthesized
tcgacttgcaaaatataggt

SEQ ID NO: 24298 - DNA, 20 bp, Artificial Sequence
  chemically synthesized
cgacttgcaaaatataggtt

SEQ ID NO: 24299 - DNA, 20 bp, Artificial Sequence
  chemically synthesized
gacttgcaaaatataggtta

SEQ ID NO: 24300 - DNA, 20 bp, Artificial Sequence
  chemically synthesized
cttgcaaaatataggttagg

SEQ ID NO: 24301 - DNA, 20 bp, Artificial Sequence
  chemically synthesized
atataggttagggagtttta

SEQ ID NO: 24302 - DNA, 20 bp, Artificial Sequence
  chemically synthesized
tataggttagggagttttat

SEQ ID NO: 24303 - DNA, 20 bp, Artificial Sequence
  chemically synthesized
tcttactctttcattgatta

SEQ ID NO: 24304 - DNA, 20 bp, Artificial Sequence
  chemically synthesized
cttactctttcattgattaa

SEQ ID NO: 24305 - DNA, 20 bp, Artificial Sequence
  chemically synthesized
aggcaaaatattacattaac

SEQ ID NO: 24306 - DNA, 20 bp, Artificial Sequence
  chemically synthesized
acattaactagatcattaca

SEQ ID NO: 24307 - DNA, 20 bp, Artificial Sequence
  chemically synthesized
cattaactagatcattacat

SEQ ID NO: 24308 - DNA, 20 bp, Artificial Sequence
  chemically synthesized
ctagatcattacatgggtaa

SEQ ID NO: 24309 - DNA, 20 bp, Artificial Sequence
  chemically synthesized
tagatcattacatgggtaaa

SEQ ID NO: 24310 - DNA, 20 bp, Artificial Sequence
  chemically synthesized
tcattacatgggtaaaaggt

SEQ ID NO: 24311 - DNA, 20 bp, Artificial Sequence
  chemically synthesized
aggttagaacttcacacact

SEQ ID NO: 24312 - DNA, 20 bp, Artificial Sequence
  chemically synthesized
ggttagaacttcacacactt

SEQ ID NO: 24313 - DNA, 20 bp, Artificial Sequence
  chemically synthesized
gttagaacttcacacactta

SEQ ID NO: 24314 - DNA, 20 bp, Artificial Sequence
  chemically synthesized
ttagaacttcacacacttag

SEQ ID NO: 24315 - DNA, 20 bp, Artificial Sequence
  chemically synthesized
tccttccccttcctgccttg

SEQ ID NO: 24316 - DNA, 20 bp, Artificial Sequence
  chemically synthesized
tcctgccttgtggcaaatca

SEQ ID NO: 24317 - DNA, 20 bp, Artificial Sequence
  chemically synthesized
cctgccttgtggcaaatcac

SEQ ID NO: 24318 - DNA, 20 bp, Artificial Sequence
  chemically synthesized
ccttgtggcaaatcacaggt

SEQ ID NO: 24319 - DNA, 20 bp, Artificial Sequence
  chemically synthesized
ttgtggcaaatcacaggttg

SEQ ID NO: 24320 - DNA, 20 bp, Artificial Sequence
  chemically synthesized
tgtggcaaatcacaggttgg

SEQ ID NO: 24321 - DNA, 20 bp, Artificial Sequence
  chemically synthesized
ggcaaatcacaggttggagg

SEQ ID NO: 24322 - DNA, 20 bp, Artificial Sequence
  chemically synthesized
gcaaatcacaggttggaggc

SEQ ID NO: 24323 - DNA, 20 bp, Artificial Sequence
  chemically synthesized
caaatcacaggttggaggca

SEQ ID NO: 24324 - DNA, 20 bp, Artificial Sequence
  chemically synthesized
gcagggaaactcactgtgtc

SEQ ID NO: 24325 - DNA, 20 bp, Artificial Sequence
  chemically synthesized
agcgctcctaaatgcctgaa

SEQ ID NO: 24326 - DNA, 20 bp, Artificial Sequence
  chemically synthesized
aaatgcctgaatagcaacgt

SEQ ID NO: 24327 - DNA, 20 bp, Artificial Sequence
  chemically synthesized
gaatagcaacgttagactta

SEQ ID NO: 24328 - DNA, 20 bp, Artificial Sequence
  chemically synthesized
aatagcaacgttagacttaa

SEQ ID NO: 24329 - DNA, 20 bp, Artificial Sequence
  chemically synthesized
tagcaacgttagacttaaag

SEQ ID NO: 24330 - DNA, 20 bp, Artificial Sequence
  chemically synthesized
agcaacgttagacttaaagg

SEQ ID NO: 24331 - DNA, 20 bp, Artificial Sequence
  chemically synthesized
gcaacgttagacttaaagga

SEQ ID NO: 24332 - DNA, 20 bp, Artificial Sequence
  chemically synthesized
caacgttagacttaaaggag

SEQ ID NO: 24333 - DNA, 20 bp, Artificial Sequence
  chemically synthesized
gccttcgctttgaatctccc

SEQ ID NO: 24334 - DNA, 20 bp, Artificial Sequence
  chemically synthesized
ccgagtcttttttattctga

SEQ ID NO: 24335 - DNA, 20 bp, Artificial Sequence
  chemically synthesized
tcttttttattctgatagaa

SEQ ID NO: 24336 - DNA, 20 bp, Artificial Sequence
  chemically synthesized
tgttctgattccatttctgt

SEQ ID NO: 24337 - DNA, 20 bp, Artificial Sequence
  chemically synthesized
tctgattccatttctgttag

SEQ ID NO: 24338 - DNA, 20 bp, Artificial Sequence
  chemically synthesized
ctgattccatttctgttagc

SEQ ID NO: 24339 - DNA, 20 bp, Artificial Sequence
  chemically synthesized
tgattccatttctgttagca

SEQ ID NO: 24340 - DNA, 20 bp, Artificial Sequence
  chemically synthesized
ccatttctgttagcagggaa

SEQ ID NO: 24341 - DNA, 20 bp, Artificial Sequence
  chemically synthesized
catttctgttagcagggaaa

SEQ ID NO: 24342 - DNA, 20 bp, Artificial Sequence
  chemically synthesized
atttctgttagcagggaaaa

SEQ ID NO: 24343 - DNA, 20 bp, Artificial Sequence
  chemically synthesized
ggaaaagggcaaatacatga

SEQ ID NO: 24344 - DNA, 20 bp, Artificial Sequence
  chemically synthesized
gaaaagggcaaatacatgaa

SEQ ID NO: 24345 - DNA, 20 bp, Artificial Sequence
  chemically synthesized
aaaagggcaaatacatgaaa

SEQ ID NO: 24346 - DNA, 20 bp, Artificial Sequence
  chemically synthesized
ggcaaatacatgaaagggcg

SEQ ID NO: 24347 - DNA, 20 bp, Artificial Sequence
  chemically synthesized
gcaaatacatgaaagggcgt

SEQ ID NO: 24348 - DNA, 20 bp, Artificial Sequence
  chemically synthesized
tacatgaaagggcgtgggct

SEQ ID NO: 24349 - DNA, 20 bp, Artificial Sequence
  chemically synthesized
aaagggcgtgggctgagcca

SEQ ID NO: 24350 - DNA, 20 bp, Artificial Sequence
  chemically synthesized
ggcgtgggctgagccatggc

SEQ ID NO: 24351 - DNA, 20 bp, Artificial Sequence
  chemically synthesized
gcgtgggctgagccatggcc

SEQ ID NO: 24352 - DNA, 20 bp, Artificial Sequence
  chemically synthesized
gctgagccatggccaggttt

SEQ ID NO: 24353 - DNA, 20 bp, Artificial Sequence
  chemically synthesized
tgagccatggccaggtttga

SEQ ID NO: 24354 - DNA, 20 bp, Artificial Sequence
  chemically synthesized
ccatggccaggtttgagaga

SEQ ID NO: 24355 - DNA, 20 bp, Artificial Sequence
  chemically synthesized
atggccaggtttgagagaca

SEQ ID NO: 24356 - DNA, 20 bp, Artificial Sequence
  chemically synthesized
ttgagagacagagtgattcg

SEQ ID NO: 24357 - DNA, 20 bp, Artificial Sequence
  chemically synthesized
agagacagagtgattcgcag

SEQ ID NO: 24358 - DNA, 20 bp, Artificial Sequence
  chemically synthesized
gtgattcgcagtagtcttcc

SEQ ID NO: 24359 - DNA, 20 bp, Artificial Sequence
  chemically synthesized
tgattcgcagtagtcttccc

SEQ ID NO: 24360 - DNA, 20 bp, Artificial Sequence
  chemically synthesized
gattcgcagtagtcttccca

SEQ ID NO: 24361 - DNA, 20 bp, Artificial Sequence
  chemically synthesized
agtagtcttcccagggtgtt

SEQ ID NO: 24362 - DNA, 20 bp, Artificial Sequence
  chemically synthesized
agtcttcccagggtgttgag

SEQ ID NO: 24363 - DNA, 20 bp, Artificial Sequence
  chemically synthesized
gtcttcccagggtgttgagt

SEQ ID NO: 24364 - DNA, 20 bp, Artificial Sequence
  chemically synthesized
gttgagtgggaacgtctccc

SEQ ID NO: 24365 - DNA, 20 bp, Artificial Sequence
  chemically synthesized
ttgagtgggaacgtctccct

SEQ ID NO: 24366 - DNA, 20 bp, Artificial Sequence
  chemically synthesized
agtgggaacgtctccctggg

SEQ ID NO: 24367 - DNA, 20 bp, Artificial Sequence
  chemically synthesized
gtgggaacgtctccctggga

SEQ ID NO: 24368 - DNA, 20 bp, Artificial Sequence
  chemically synthesized
tgggaacgtctccctgggaa

SEQ ID NO: 24369 - DNA, 20 bp, Artificial Sequence
  chemically synthesized
cgtctccctgggaagggatg

SEQ ID NO: 24370 - DNA, 20 bp, Artificial Sequence
  chemically synthesized
ggaagggatgtggtcattct

SEQ ID NO: 24371 - DNA, 20 bp, Artificial Sequence
  chemically synthesized
atgtggtcattctcagactg

SEQ ID NO: 24372 - DNA, 20 bp, Artificial Sequence
  chemically synthesized
tgtggtcattctcagactgt

SEQ ID NO: 24373 - DNA, 20 bp, Artificial Sequence
  chemically synthesized
tcattctcagactgtgggct

SEQ ID NO: 24374 - DNA, 20 bp, Artificial Sequence
  chemically synthesized
gtcaaccatctaatgctatc

SEQ ID NO: 24375 - DNA, 20 bp, Artificial Sequence
  chemically synthesized
tcaaccatctaatgctatca

SEQ ID NO: 24376 - DNA, 20 bp, Artificial Sequence
  chemically synthesized
aatgctatcaaggccttcct

SEQ ID NO: 24377 - DNA, 20 bp, Artificial Sequence
  chemically synthesized
tgctatcaaggccttcctga

SEQ ID NO: 24378 - DNA, 20 bp, Artificial Sequence
  chemically synthesized
tatcaaggccttcctgagag

SEQ ID NO: 24379 - DNA, 20 bp, Artificial Sequence
  chemically synthesized
ggccttcctgagagaagttt

SEQ ID NO: 24380 - DNA, 20 bp, Artificial Sequence
  chemically synthesized
gccttcctgagagaagtttc

SEQ ID NO: 24381 - DNA, 20 bp, Artificial Sequence
  chemically synthesized
tcaggcccaatcctgatgtt

SEQ ID NO: 24382 - DNA, 20 bp, Artificial Sequence
  chemically synthesized
gcccaatcctgatgttgagt

SEQ ID NO: 24383 - DNA, 20 bp, Artificial Sequence
  chemically synthesized
agttggcatgttcacatgtc

SEQ ID NO: 24384 - DNA, 20 bp, Artificial Sequence
  chemically synthesized
catgtctggtaataatctgc

SEQ ID NO: 24385 - DNA, 20 bp, Artificial Sequence
  chemically synthesized
tctgtgcattattcatctca

SEQ ID NO: 24386 - DNA, 20 bp, Artificial Sequence
  chemically synthesized
tgcattattcatctcaaagc

SEQ ID NO: 24387 - DNA, 20 bp, Artificial Sequence
  chemically synthesized
cattattcatctcaaagcca

SEQ ID NO: 24388 - DNA, 20 bp, Artificial Sequence
  chemically synthesized
attattcatctcaaagccag

SEQ ID NO: 24389 - DNA, 20 bp, Artificial Sequence
  chemically synthesized
agaggatctcatgtccatca

SEQ ID NO: 24390 - DNA, 20 bp, Artificial Sequence
  chemically synthesized
gaggatctcatgtccatcac

SEQ ID NO: 24391 - DNA, 20 bp, Artificial Sequence
  chemically synthesized
aggatctcatgtccatcaca

SEQ ID NO: 24392 - DNA, 20 bp, Artificial Sequence
  chemically synthesized
tcatgtccatcacagggctg

SEQ ID NO: 24393 - DNA, 20 bp, Artificial Sequence
  chemically synthesized
catcacagggctgtggtctg

SEQ ID NO: 24394 - DNA, 20 bp, Artificial Sequence
  chemically synthesized
acagggctgtggtctgtgga

SEQ ID NO: 24395 - DNA, 20 bp, Artificial Sequence
  chemically synthesized
cagggctgtggtctgtggat

SEQ ID NO: 24396 - DNA, 20 bp, Artificial Sequence
  chemically synthesized
agggctgtggtctgtggata

SEQ ID NO: 24397 - DNA, 20 bp, Artificial Sequence
  chemically synthesized
ctgtggatagggaaaatttc

SEQ ID NO: 24398 - DNA, 20 bp, Artificial Sequence
  chemically synthesized
tgtggatagggaaaatttca

SEQ ID NO: 24399 - DNA, 20 bp, Artificial Sequence
  chemically synthesized
ggaaaatttcaaggcttttc

SEQ ID NO: 24400 - DNA, 20 bp, Artificial Sequence
  chemically synthesized
gaaaatttcaaggcttttct

SEQ ID NO: 24401 - DNA, 20 bp, Artificial Sequence
  chemically synthesized
aggcttttctgggcctgatg

SEQ ID NO: 24402 - DNA, 20 bp, Artificial Sequence
  chemically synthesized
ctgatgtagccattttcttt

SEQ ID NO: 24403 - DNA, 20 bp, Artificial Sequence
  chemically synthesized
gccattttctttcagtatct

SEQ ID NO: 24404 - DNA, 20 bp, Artificial Sequence
  chemically synthesized
tttctttcagtatcttagat

SEQ ID NO: 24405 - DNA, 20 bp, Artificial Sequence
  chemically synthesized
ctttcagtatcttagattgg

SEQ ID NO: 24406 - DNA, 20 bp, Artificial Sequence
  chemically synthesized
tttcagtatcttagattggt

SEQ ID NO: 24407 - DNA, 20 bp, Artificial Sequence
  chemically synthesized
atcttagattggtaggtctt

SEQ ID NO: 24408 - DNA, 20 bp, Artificial Sequence
  chemically synthesized
aaatgtgtgtgtgtgtgcct

SEQ ID NO: 24409 - DNA, 20 bp, Artificial Sequence
  chemically synthesized
tgtgtgtgtgtgcctaagta

SEQ ID NO: 24410 - DNA, 20 bp, Artificial Sequence
  chemically synthesized
ttttcttgaatttctcactt

SEQ ID NO: 24411 - DNA, 20 bp, Artificial Sequence
  chemically synthesized
tacttaactacacatatgtg

SEQ ID NO: 24412 - DNA, 20 bp, Artificial Sequence
  chemically synthesized
taactacacatatgtgcaga

SEQ ID NO: 24413 - DNA, 20 bp, Artificial Sequence
  chemically synthesized
atgtgcagaaagtgaactct

SEQ ID NO: 24414 - DNA, 20 bp, Artificial Sequence
  chemically synthesized
gaaagtgaactcttagaatt

SEQ ID NO: 24415 - DNA, 20 bp, Artificial Sequence
  chemically synthesized
tccgttctttctcattgtgt

SEQ ID NO: 24416 - DNA, 20 bp, Artificial Sequence
  chemically synthesized
gttctttctcattgtgtgag

SEQ ID NO: 24417 - DNA, 20 bp, Artificial Sequence
  chemically synthesized
ttctttctcattgtgtgaga

SEQ ID NO: 24418 - DNA, 20 bp, Artificial Sequence
  chemically synthesized
ctttctcattgtgtgagaag

SEQ ID NO: 24419 - DNA, 20 bp, Artificial Sequence
  chemically synthesized
tttctcattgtgtgagaagg

SEQ ID NO: 24420 - DNA, 20 bp, Artificial Sequence
  chemically synthesized
cattgtgtgagaaggaggca

SEQ ID NO: 24421 - DNA, 20 bp, Artificial Sequence
  chemically synthesized
aggaggcaaagttgccaaat

SEQ ID NO: 24422 - DNA, 20 bp, Artificial Sequence
  chemically synthesized
gaggcaaagttgccaaattg

SEQ ID NO: 24423 - DNA, 20 bp, Artificial Sequence
  chemically synthesized
aggcaaagttgccaaattgg

SEQ ID NO: 24424 - DNA, 20 bp, Artificial Sequence
  chemically synthesized
caaagttgccaaattggagg

SEQ ID NO: 24425 - DNA, 20 bp, Artificial Sequence
  chemically synthesized
aaagttgccaaattggaggt

SEQ ID NO: 24426 - DNA, 20 bp, Artificial Sequence
  chemically synthesized
aagttgccaaattggaggtg

SEQ ID NO: 24427 - DNA, 20 bp, Artificial Sequence
  chemically synthesized
tgccaaattggaggtggggc

SEQ ID NO: 24428 - DNA, 20 bp, Artificial Sequence
  chemically synthesized
gccaaattggaggtggggca

SEQ ID NO: 24429 - DNA, 20 bp, Artificial Sequence
  chemically synthesized
aaattggaggtggggcaagg

SEQ ID NO: 24430 - DNA, 20 bp, Artificial Sequence
  chemically synthesized
aattggaggtggggcaaggt

SEQ ID NO: 24431 - DNA, 20 bp, Artificial Sequence
  chemically synthesized
ggaggtggggcaaggtgggc

SEQ ID NO: 24432 - DNA, 20 bp, Artificial Sequence
  chemically synthesized
ggtggggcaaggtgggccag

SEQ ID NO: 24433 - DNA, 20 bp, Artificial Sequence
  chemically synthesized
tggggcaaggtgggccagta

SEQ ID NO: 24434 - DNA, 20 bp, Artificial Sequence
  chemically synthesized
tgggccagtagagctgtgat

SEQ ID NO: 24435 - DNA, 20 bp, Artificial Sequence
  chemically synthesized
tggtgtctcactttgatgtg

SEQ ID NO: 24436 - DNA, 20 bp, Artificial Sequence
  chemically synthesized
ggtgtctcactttgatgtgt

SEQ ID NO: 24437 - DNA, 20 bp, Artificial Sequence
  chemically synthesized
tgtctcactttgatgtgtag

SEQ ID NO: 24438 - DNA, 20 bp, Artificial Sequence
  chemically synthesized
tctcactttgatgtgtagga

SEQ ID NO: 24439 - DNA, 20 bp, Artificial Sequence
  chemically synthesized
tcactttgatgtgtaggaga

SEQ ID NO: 24440 - DNA, 20 bp, Artificial Sequence
  chemically synthesized
taggagagagaacaaatcac

SEQ ID NO: 24441 - DNA, 20 bp, Artificial Sequence
  chemically synthesized
acaaatcacaagtcattctc

SEQ ID NO: 24442 - DNA, 20 bp, Artificial Sequence
  chemically synthesized
atcacaagtcattctctgga

SEQ ID NO: 24443 - DNA, 20 bp, Artificial Sequence
  chemically synthesized
tcacaagtcattctctggaa

SEQ ID NO: 24444 - DNA, 20 bp, Artificial Sequence
  chemically synthesized
acaagtcattctctggaaag

SEQ ID NO: 24445 - DNA, 20 bp, Artificial Sequence
  chemically synthesized
cattctctggaaaggagcca

SEQ ID NO: 24446 - DNA, 20 bp, Artificial Sequence
  chemically synthesized
aaggagccatggtccaccca

SEQ ID NO: 24447 - DNA, 20 bp, Artificial Sequence
  chemically synthesized
ccatggtccacccacagaac

SEQ ID NO: 24448 - DNA, 20 bp, Artificial Sequence
  chemically synthesized
catggtccacccacagaaca

SEQ ID NO: 24449 - DNA, 20 bp, Artificial Sequence
  chemically synthesized
aacaaggaccctgaaatccc

SEQ ID NO: 24450 - DNA, 20 bp, Artificial Sequence
  chemically synthesized
gaccctgaaatccccagtac

SEQ ID NO: 24451 - DNA, 20 bp, Artificial Sequence
  chemically synthesized
atccccagtaccagtctccc

SEQ ID NO: 24452 - DNA, 20 bp, Artificial Sequence
  chemically synthesized
tccccagtaccagtctccct

SEQ ID NO: 24453 - DNA, 20 bp, Artificial Sequence
  chemically synthesized
ccctaggatgtcttgccttt

SEQ ID NO: 24454 - DNA, 20 bp, Artificial Sequence
  chemically synthesized
taggatgtcttgcctttcag

SEQ ID NO: 24455 - DNA, 20 bp, Artificial Sequence
  chemically synthesized
cttgcctttcagcagctgtt

SEQ ID NO: 24456 - DNA, 20 bp, Artificial Sequence
  chemically synthesized
ctgttcagtcaaatccattt

SEQ ID NO: 24457 - DNA, 20 bp, Artificial Sequence
  chemically synthesized
cagtcaaatccatttcagaa

SEQ ID NO: 24458 - DNA, 20 bp, Artificial Sequence
  chemically synthesized
gtcaaatccatttcagaatg

SEQ ID NO: 24459 - DNA, 20 bp, Artificial Sequence
  chemically synthesized
atccatttcagaatggagaa

SEQ ID NO: 24460 - DNA, 20 bp, Artificial Sequence
  chemically synthesized
gaatggagaacagcttgtca

SEQ ID NO: 24461 - DNA, 20 bp, Artificial Sequence
  chemically synthesized
ctctactcttgacctgctga

SEQ ID NO: 24462 - DNA, 20 bp, Artificial Sequence
  chemically synthesized
tcttgacctgctgatagaac

SEQ ID NO: 24463 - DNA, 20 bp, Artificial Sequence
  chemically synthesized
cttgacctgctgatagaaca

SEQ ID NO: 24464 - DNA, 20 bp, Artificial Sequence
  chemically synthesized
ttgacctgctgatagaacaa

SEQ ID NO: 24465 - DNA, 20 bp, Artificial Sequence
  chemically synthesized
tgacctgctgatagaacaag

SEQ ID NO: 24466 - DNA, 20 bp, Artificial Sequence
  chemically synthesized
tgctgatagaacaaggggct

SEQ ID NO: 24467 - DNA, 20 bp, Artificial Sequence
  chemically synthesized
ctgatagaacaaggggcttg

SEQ ID NO: 24468 - DNA, 20 bp, Artificial Sequence
  chemically synthesized
aacaaggggcttggagattt

SEQ ID NO: 24469 - DNA, 20 bp, Artificial Sequence
  chemically synthesized
acaaggggcttggagatttt

SEQ ID NO: 24470 - DNA, 20 bp, Artificial Sequence
  chemically synthesized
aggggcttggagattttggg

SEQ ID NO: 24471 - DNA, 20 bp, Artificial Sequence
  chemically synthesized
ttggagattttgggtagata

SEQ ID NO: 24472 - DNA, 20 bp, Artificial Sequence
  chemically synthesized
attttgggtagatatggaaa

SEQ ID NO: 24473 - DNA, 20 bp, Artificial Sequence
  chemically synthesized
agatccctaaacatactaaa

SEQ ID NO: 24474 - DNA, 20 bp, Artificial Sequence
  chemically synthesized
aaagattttttttgtacgtg

SEQ ID NO: 24475 - DNA, 20 bp, Artificial Sequence
  chemically synthesized
gattttttttgtacgtgtgg

SEQ ID NO: 24476 - DNA, 20 bp, Artificial Sequence
  chemically synthesized
attttttttgtacgtgtggt

SEQ ID NO: 24477 - DNA, 20 bp, Artificial Sequence
  chemically synthesized
ttttttttgtacgtgtggtg

SEQ ID NO: 24478 - DNA, 20 bp, Artificial Sequence
  chemically synthesized
tttttttgtacgtgtggtgg

SEQ ID NO: 24479 - DNA, 20 bp, Artificial Sequence
  chemically synthesized
tttttgtacgtgtggtgggg

SEQ ID NO: 24480 - DNA, 20 bp, Artificial Sequence
  chemically synthesized
tttgtacgtgtggtggggga

SEQ ID NO: 24481 - DNA, 20 bp, Artificial Sequence
  chemically synthesized
ttgtacgtgtggtgggggag

SEQ ID NO: 24482 - DNA, 20 bp, Artificial Sequence
  chemically synthesized
gtacgtgtggtgggggagag

SEQ ID NO: 24483 - DNA, 20 bp, Artificial Sequence
  chemically synthesized
gtggtgggggagaggagaac

SEQ ID NO: 24484 - DNA, 20 bp, Artificial Sequence
  chemically synthesized
ggtgggggagaggagaacca

SEQ ID NO: 24485 - DNA, 20 bp, Artificial Sequence
  chemically synthesized
gggggagaggagaaccagag

SEQ ID NO: 24486 - DNA, 20 bp, Artificial Sequence
  chemically synthesized
ggagaggagaaccagagcag

SEQ ID NO: 24487 - DNA, 20 bp, Artificial Sequence
  chemically synthesized
gagaggagaaccagagcaga

SEQ ID NO: 24488 - DNA, 20 bp, Artificial Sequence
  chemically synthesized
ggagaaccagagcagaaggt

SEQ ID NO: 24489 - DNA, 20 bp, Artificial Sequence
  chemically synthesized
agaaccagagcagaaggttg

SEQ ID NO: 24490 - DNA, 20 bp, Artificial Sequence
  chemically synthesized
ccagagcagaaggttggaga

SEQ ID NO: 24491 - DNA, 20 bp, Artificial Sequence
  chemically synthesized
agcagaaggttggagaaaga

SEQ ID NO: 24492 - DNA, 20 bp, Artificial Sequence
  chemically synthesized
gaaggttggagaaagaaagt

SEQ ID NO: 24493 - DNA, 20 bp, Artificial Sequence
  chemically synthesized
aaggttggagaaagaaagtt

SEQ ID NO: 24494 - DNA, 20 bp, Artificial Sequence
  chemically synthesized
aggttggagaaagaaagttg

SEQ ID NO: 24495 - DNA, 20 bp, Artificial Sequence
  chemically synthesized
ttggagaaagaaagttgggg

SEQ ID NO: 24496 - DNA, 20 bp, Artificial Sequence
  chemically synthesized
tggagaaagaaagttgggga

SEQ ID NO: 24497 - DNA, 20 bp, Artificial Sequence
  chemically synthesized
aaatgtgcaatctcattcct

SEQ ID NO: 24498 - DNA, 20 bp, Artificial Sequence
  chemically synthesized
tcagccttcttgttgaaaat

SEQ ID NO: 24499 - DNA, 20 bp, Artificial Sequence
  chemically synthesized
ttcttgttgaaaatgagaat

SEQ ID NO: 24500 - DNA, 20 bp, Artificial Sequence
  chemically synthesized
ttgaaaatgagaatcagatg

SEQ ID NO: 24501 - DNA, 20 bp, Artificial Sequence
  chemically synthesized
tgcagcaatgtattatttcc

SEQ ID NO: 24502 - DNA, 20 bp, Artificial Sequence
  chemically synthesized
cagcaatgtattatttccaa

SEQ ID NO: 24503 - DNA, 20 bp, Artificial Sequence
  chemically synthesized
tattatttccaagagctatc

SEQ ID NO: 24504 - DNA, 20 bp, Artificial Sequence
  chemically synthesized
ttccaagagctatctggtga

SEQ ID NO: 24505 - DNA, 20 bp, Artificial Sequence
  chemically synthesized
tccaagagctatctggtgat

SEQ ID NO: 24506 - DNA, 20 bp, Artificial Sequence
  chemically synthesized
atctggtgatgggatccatc

SEQ ID NO: 24507 - DNA, 20 bp, Artificial Sequence
  chemically synthesized
gtgatgggatccatctggtg

SEQ ID NO: 24508 - DNA, 20 bp, Artificial Sequence
  chemically synthesized
tgatgggatccatctggtga

SEQ ID NO: 24509 - DNA, 20 bp, Artificial Sequence
  chemically synthesized
gatgggatccatctggtgaa

SEQ ID NO: 24510 - DNA, 20 bp, Artificial Sequence
  chemically synthesized
atctggtgaagggctacttc

SEQ ID NO: 24511 - DNA, 20 bp, Artificial Sequence
  chemically synthesized
tctggtgaagggctacttct

SEQ ID NO: 24512 - DNA, 20 bp, Artificial Sequence
  chemically synthesized
ctggtgaagggctacttctg

SEQ ID NO: 24513 - DNA, 20 bp, Artificial Sequence
  chemically synthesized
tggtgaagggctacttctgg

SEQ ID NO: 24514 - DNA, 20 bp, Artificial Sequence
  chemically synthesized
agggctacttctgggggacc

SEQ ID NO: 24515 - DNA, 20 bp, Artificial Sequence
  chemically synthesized
tggaattgctgtgtgacctt

SEQ ID NO: 24516 - DNA, 20 bp, Artificial Sequence
  chemically synthesized
ggaattgctgtgtgaccttt

SEQ ID NO: 24517 - DNA, 20 bp, Artificial Sequence
  chemically synthesized
tgggaaacacttgccttctc

SEQ ID NO: 24518 - DNA, 20 bp, Artificial Sequence
  chemically synthesized
gggaaacacttgccttctct

SEQ ID NO: 24519 - DNA, 20 bp, Artificial Sequence
  chemically synthesized
acacttgccttctctgggtt

SEQ ID NO: 24520 - DNA, 20 bp, Artificial Sequence
  chemically synthesized
tgccttctctgggttgagct

SEQ ID NO: 24521 - DNA, 20 bp, Artificial Sequence
  chemically synthesized
tctgggttgagctcagcccg

SEQ ID NO: 24522 - DNA, 20 bp, Artificial Sequence
  chemically synthesized
gagctcagcccgtagttcac

SEQ ID NO: 24523 - DNA, 20 bp, Artificial Sequence
  chemically synthesized
agctcagcccgtagttcaca

SEQ ID NO: 24524 - DNA, 20 bp, Artificial Sequence
  chemically synthesized
gctcagcccgtagttcacaa

SEQ ID NO: 24525 - DNA, 20 bp, Artificial Sequence
  chemically synthesized
ctcagcccgtagttcacaag

SEQ ID NO: 24526 - DNA, 20 bp, Artificial Sequence
  chemically synthesized
tagttcacaaggggcattgc

SEQ ID NO: 24527 - DNA, 20 bp, Artificial Sequence
  chemically synthesized
aggggcattgctggtattta

SEQ ID NO: 24528 - DNA, 20 bp, Artificial Sequence
  chemically synthesized
tatttatagactgtgtttga

SEQ ID NO: 24529 - DNA, 20 bp, Artificial Sequence
  chemically synthesized
agactgtgtttgacagtccc

SEQ ID NO: 24530 - DNA, 20 bp, Artificial Sequence
  chemically synthesized
tgtttgacagtcccgagtga

SEQ ID NO: 24531 - DNA, 20 bp, Artificial Sequence
  chemically synthesized
gtttgacagtcccgagtgaa

SEQ ID NO: 24532 - DNA, 20 bp, Artificial Sequence
  chemically synthesized
ggcaacttcacttctcaccc

SEQ ID NO: 24533 - DNA, 20 bp, Artificial Sequence
  chemically synthesized
cttcacttctcaccccagaa

SEQ ID NO: 24534 - DNA, 20 bp, Artificial Sequence
  chemically synthesized
acttctcaccccagaatagc

SEQ ID NO: 24535 - DNA, 20 bp, Artificial Sequence
  chemically synthesized
caagcgttgtttctcatatc

SEQ ID NO: 24536 - DNA, 20 bp, Artificial Sequence
  chemically synthesized
aagcgttgtttctcatatct

SEQ ID NO: 24537 - DNA, 20 bp, Artificial Sequence
  chemically synthesized
gtttctcatatctaggttgc

SEQ ID NO: 24538 - DNA, 20 bp, Artificial Sequence
  chemically synthesized
tttctcatatctaggttgct

SEQ ID NO: 24539 - DNA, 20 bp, Artificial Sequence
  chemically synthesized
tcatatctaggttgctggga

SEQ ID NO: 24540 - DNA, 20 bp, Artificial Sequence
  chemically synthesized
aggttgctgggacagcttcc

SEQ ID NO: 24541 - DNA, 20 bp, Artificial Sequence
  chemically synthesized
ggttgctgggacagcttccc

SEQ ID NO: 24542 - DNA, 20 bp, Artificial Sequence
  chemically synthesized
cttcccaggaacctaatatt

SEQ ID NO: 24543 - DNA, 20 bp, Artificial Sequence
  chemically synthesized
cccaggaacctaatattcag

SEQ ID NO: 24544 - DNA, 20 bp, Artificial Sequence
  chemically synthesized
attcagcagcttcgtgacgt

SEQ ID NO: 24545 - DNA, 20 bp, Artificial Sequence
  chemically synthesized
agcagcttcgtgacgttgga

SEQ ID NO: 24546 - DNA, 20 bp, Artificial Sequence
  chemically synthesized
cagcttcgtgacgttggatg

SEQ ID NO: 24547 - DNA, 20 bp, Artificial Sequence
  chemically synthesized
agcttcgtgacgttggatgg

SEQ ID NO: 24548 - DNA, 20 bp, Artificial Sequence
  chemically synthesized
gcttcgtgacgttggatgga

SEQ ID NO: 24549 - DNA, 20 bp, Artificial Sequence
  chemically synthesized
gagggtttttctttttaaat

SEQ ID NO: 24550 - DNA, 20 bp, Artificial Sequence
  chemically synthesized
ttctttttaaatgagttgat

SEQ ID NO: 24551 - DNA, 20 bp, Artificial Sequence
  chemically synthesized
ccactttacacattgttttc

SEQ ID NO: 24552 - DNA, 20 bp, Artificial Sequence
  chemically synthesized
cactttacacattgttttcc

SEQ ID NO: 24553 - DNA, 20 bp, Artificial Sequence
  chemically synthesized
tacacattgttttccaggtc

SEQ ID NO: 24554 - DNA, 20 bp, Artificial Sequence
  chemically synthesized
acacattgttttccaggtct

SEQ ID NO: 24555 - DNA, 20 bp, Artificial Sequence
  chemically synthesized
ctaggtttatttttccctta

SEQ ID NO: 24556 - DNA, 20 bp, Artificial Sequence
  chemically synthesized
taggtttatttttcccttat

SEQ ID NO: 24557 - DNA, 20 bp, Artificial Sequence
  chemically synthesized
gtttatttttcccttatagg

SEQ ID NO: 24558 - DNA, 20 bp, Artificial Sequence
  chemically synthesized
cccttataggtagaatataa

SEQ ID NO: 24559 - DNA, 20 bp, Artificial Sequence
  chemically synthesized
cttataggtagaatataaaa

SEQ ID NO: 24560 - DNA, 20 bp, Artificial Sequence
  chemically synthesized
aggtagaatataaaagagta

SEQ ID NO: 24561 - DNA, 20 bp, Artificial Sequence
  chemically synthesized
ggtagaatataaaagagtat

SEQ ID NO: 24562 - DNA, 20 bp, Artificial Sequence
  chemically synthesized
gtagaatataaaagagtatg

SEQ ID NO: 24563 - DNA, 20 bp, Artificial Sequence
  chemically synthesized
aaagagtatggggtctgccc

SEQ ID NO: 24564 - DNA, 20 bp, Artificial Sequence
  chemically synthesized
ctcacaccgttctgtttttg

SEQ ID NO: 24565 - DNA, 20 bp, Artificial Sequence
  chemically synthesized
caccgttctgtttttgcagt

SEQ ID NO: 24566 - DNA, 20 bp, Artificial Sequence
  chemically synthesized
ctgtttttgcagttagctta

SEQ ID NO: 24567 - DNA, 20 bp, Artificial Sequence
  chemically synthesized
tgtttttgcagttagcttaa

SEQ ID NO: 24568 - DNA, 20 bp, Artificial Sequence
  chemically synthesized
ttgcagttagcttaaaggca

SEQ ID NO: 24569 - DNA, 20 bp, Artificial Sequence
  chemically synthesized
gcagttagcttaaaggcatg

SEQ ID NO: 24570 - DNA, 20 bp, Artificial Sequence
  chemically synthesized
cagttagcttaaaggcatgg

SEQ ID NO: 24571 - DNA, 20 bp, Artificial Sequence
  chemically synthesized
aaaggcatggaggacattcc

SEQ ID NO: 24572 - DNA, 20 bp, Artificial Sequence
  chemically synthesized
aaggcatggaggacattcct

SEQ ID NO: 24573 - DNA, 20 bp, Artificial Sequence
  chemically synthesized
atggaggacattcctgggac

SEQ ID NO: 24574 - DNA, 20 bp, Artificial Sequence
  chemically synthesized
ttcctgggactagcatctgc

SEQ ID NO: 24575 - DNA, 20 bp, Artificial Sequence
  chemically synthesized
gggactagcatctgctagcc

SEQ ID NO: 24576 - DNA, 20 bp, Artificial Sequence
  chemically synthesized
gcatctgctagccaagaacg

SEQ ID NO: 24577 - DNA, 20 bp, Artificial Sequence
  chemically synthesized
ctagccaagaacgaagatga

SEQ ID NO: 24578 - DNA, 20 bp, Artificial Sequence
  chemically synthesized
gaacgaagatgacagcaaca

SEQ ID NO: 24579 - DNA, 20 bp, Artificial Sequence
  chemically synthesized
agatgacagcaacatggccg

SEQ ID NO: 24580 - DNA, 20 bp, Artificial Sequence
  chemically synthesized
atgacagcaacatggccgta

SEQ ID NO: 24581 - DNA, 20 bp, Artificial Sequence
  chemically synthesized
tgacagcaacatggccgtag

SEQ ID NO: 24582 - DNA, 20 bp, Artificial Sequence
  chemically synthesized
gcaacatggccgtagaggca

SEQ ID NO: 24583 - DNA, 20 bp, Artificial Sequence
  chemically synthesized
caacatggccgtagaggcat

SEQ ID NO: 24584 - DNA, 20 bp, Artificial Sequence
  chemically synthesized
cgtagaggcatgggccctgc

SEQ ID NO: 24585 - DNA, 20 bp, Artificial Sequence
  chemically synthesized
gtagaggcatgggccctgct

SEQ ID NO: 24586 - DNA, 20 bp, Artificial Sequence
  chemically synthesized
tagaggcatgggccctgctg

SEQ ID NO: 24587 - DNA, 20 bp, Artificial Sequence
  chemically synthesized
ctggggctaataacccactg

SEQ ID NO: 24588 - DNA, 20 bp, Artificial Sequence
  chemically synthesized
tggggctaataacccactgc

SEQ ID NO: 24589 - DNA, 20 bp, Artificial Sequence
  chemically synthesized
aacccactgcaggctatcct

SEQ ID NO: 24590 - DNA, 20 bp, Artificial Sequence
  chemically synthesized
gctatccttggcattcttgc

SEQ ID NO: 24591 - DNA, 20 bp, Artificial Sequence
  chemically synthesized
tatccttggcattcttgctg

SEQ ID NO: 24592 - DNA, 20 bp, Artificial Sequence
  chemically synthesized
ccttggcattcttgctggag

SEQ ID NO: 24593 - DNA, 20 bp, Artificial Sequence
  chemically synthesized
tggccttgctccaccctacc

SEQ ID NO: 24594 - DNA, 20 bp, Artificial Sequence
  chemically synthesized
tacctggtcactgtgccgtt

SEQ ID NO: 24595 - DNA, 20 bp, Artificial Sequence
  chemically synthesized
ggtcactgtgccgttcagtc

SEQ ID NO: 24596 - DNA, 20 bp, Artificial Sequence
  chemically synthesized
gtcactgtgccgttcagtct

SEQ ID NO: 24597 - DNA, 20 bp, Artificial Sequence
  chemically synthesized
gtgccgttcagtctgggcta

SEQ ID NO: 24598 - DNA, 20 bp, Artificial Sequence
  chemically synthesized
ctcatcccattgcatttcat

SEQ ID NO: 24599 - DNA, 20 bp, Artificial Sequence
  chemically synthesized
tcccattgcatttcataagc

SEQ ID NO: 24600 - DNA, 20 bp, Artificial Sequence
  chemically synthesized
tttcataagccagtaactcc

SEQ ID NO: 24601 - DNA, 20 bp, Artificial Sequence
  chemically synthesized
ttcataagccagtaactcca

SEQ ID NO: 24602 - DNA, 20 bp, Artificial Sequence
  chemically synthesized
taagccagtaactccaaggc

SEQ ID NO: 24603 - DNA, 20 bp, Artificial Sequence
  chemically synthesized
gccagacttccattacactc

SEQ ID NO: 24604 - DNA, 20 bp, Artificial Sequence
  chemically synthesized
tggatgactgcatttatttg

SEQ ID NO: 24605 - DNA, 20 bp, Artificial Sequence
  chemically synthesized
catttatttgcagtgacttc

SEQ ID NO: 24606 - DNA, 20 bp, Artificial Sequence
  chemically synthesized
atttatttgcagtgacttca

SEQ ID NO: 24607 - DNA, 20 bp, Artificial Sequence
  chemically synthesized
tatttgcagtgacttcaagg

SEQ ID NO: 24608 - DNA, 20 bp, Artificial Sequence
  chemically synthesized
ttgcagtgacttcaaggaag

SEQ ID NO: 24609 - DNA, 20 bp, Artificial Sequence
  chemically synthesized
tgcagtgacttcaaggaaga

SEQ ID NO: 24610 - DNA, 20 bp, Artificial Sequence
  chemically synthesized
gcagtgacttcaaggaagaa

SEQ ID NO: 24611 - DNA, 20 bp, Artificial Sequence
  chemically synthesized
cagtgacttcaaggaagaag

SEQ ID NO: 24612 - DNA, 20 bp, Artificial Sequence
  chemically synthesized
caaggaagaaggggcctgtt

SEQ ID NO: 24613 - DNA, 20 bp, Artificial Sequence
  chemically synthesized
aaggaagaaggggcctgttt

SEQ ID NO: 24614 - DNA, 20 bp, Artificial Sequence
  chemically synthesized
aaggggcctgtttaggaaat

SEQ ID NO: 24615 - DNA, 20 bp, Artificial Sequence
  chemically synthesized
aggggcctgtttaggaaatt

SEQ ID NO: 24616 - DNA, 20 bp, Artificial Sequence
  chemically synthesized
ctgtttaggaaattaggcac

SEQ ID NO: 24617 - DNA, 20 bp, Artificial Sequence
  chemically synthesized
taggaaattaggcactggcc

SEQ ID NO: 24618 - DNA, 20 bp, Artificial Sequence
  chemically synthesized
ttaggcactggcctggtgaa

SEQ ID NO: 24619 - DNA, 20 bp, Artificial Sequence
  chemically synthesized
taggcactggcctggtgaaa

SEQ ID NO: 24620 - DNA, 20 bp, Artificial Sequence
  chemically synthesized
aaggtcaacttgcgaaattg

SEQ ID NO: 24621 - DNA, 20 bp, Artificial Sequence
  chemically synthesized
acttgcgaaattgtggctgc

SEQ ID NO: 24622 - DNA, 20 bp, Artificial Sequence
  chemically synthesized
cttgcgaaattgtggctgca

SEQ ID NO: 24623 - DNA, 20 bp, Artificial Sequence
  chemically synthesized
ttgcgaaattgtggctgcaa

SEQ ID NO: 24624 - DNA, 20 bp, Artificial Sequence
  chemically synthesized
aagggatgcctttttcttcc

SEQ ID NO: 24625 - DNA, 20 bp, Artificial Sequence
  chemically synthesized
agggatgcctttttcttcca

SEQ ID NO: 24626 - DNA, 20 bp, Artificial Sequence
  chemically synthesized
tttcttccaaggctatgcct

SEQ ID NO: 24627 - DNA, 20 bp, Artificial Sequence
  chemically synthesized
cttccaaggctatgccttgg

SEQ ID NO: 24628 - DNA, 20 bp, Artificial Sequence
  chemically synthesized
ccaaggctatgccttggtgg

SEQ ID NO: 24629 - DNA, 20 bp, Artificial Sequence
  chemically synthesized
aggctatgccttggtggtgg

SEQ ID NO: 24630 - DNA, 20 bp, Artificial Sequence
  chemically synthesized
tatgccttggtggtggtggt

SEQ ID NO: 24631 - DNA, 20 bp, Artificial Sequence
  chemically synthesized
atgccttggtggtggtggtg

SEQ ID NO: 24632 - DNA, 20 bp, Artificial Sequence
  chemically synthesized
tgccttggtggtggtggtga

SEQ ID NO: 24633 - DNA, 20 bp, Artificial Sequence
  chemically synthesized
tttaaatactgttttttgtt

SEQ ID NO: 24634 - DNA, 20 bp, Artificial Sequence
  chemically synthesized
aatactgttttttgtttggt

SEQ ID NO: 24635 - DNA, 20 bp, Artificial Sequence
  chemically synthesized
ctgttttttgtttggttggt

SEQ ID NO: 24636 - DNA, 20 bp, Artificial Sequence
  chemically synthesized
ggtttttttttttttttttt

SEQ ID NO: 24637 - DNA, 20 bp, Artificial Sequence
  chemically synthesized
tttttttttaagtcctaaac

SEQ ID NO: 24638 - DNA, 20 bp, Artificial Sequence
  chemically synthesized
taagtcctaaacaagtgcca

SEQ ID NO: 24639 - DNA, 20 bp, Artificial Sequence
  chemically synthesized
agtcctaaacaagtgccaca

SEQ ID NO: 24640 - DNA, 20 bp, Artificial Sequence
  chemically synthesized
gtcctaaacaagtgccacag

SEQ ID NO: 24641 - DNA, 20 bp, Artificial Sequence
  chemically synthesized
tgccacagaggatttctttt

SEQ ID NO: 24642 - DNA, 20 bp, Artificial Sequence
  chemically synthesized
ggcttgaacttgataaaatt

SEQ ID NO: 24643 - DNA, 20 bp, Artificial Sequence
  chemically synthesized
cttgaacttgataaaatttg

SEQ ID NO: 24644 - DNA, 20 bp, Artificial Sequence
  chemically synthesized
tgataaaatttggagcacac

SEQ ID NO: 24645 - DNA, 20 bp, Artificial Sequence
  chemically synthesized
agcacacaagtttacacaca

SEQ ID NO: 24646 - DNA, 20 bp, Artificial Sequence
  chemically synthesized
caccccttctcccatctccc

SEQ ID NO: 24647 - DNA, 20 bp, Artificial Sequence
  chemically synthesized
ctcccatctccccagacccc

SEQ ID NO: 24648 - DNA, 20 bp, Artificial Sequence
  chemically synthesized
cagcacatatgttccataat

SEQ ID NO: 24649 - DNA, 20 bp, Artificial Sequence
  chemically synthesized
agcacatatgttccataatg

SEQ ID NO: 24650 - DNA, 20 bp, Artificial Sequence
  chemically synthesized
ttccataatgaggtgttcct

SEQ ID NO: 24651 - DNA, 20 bp, Artificial Sequence
  chemically synthesized
ataatgaggtgttcctaagt

SEQ ID NO: 24652 - DNA, 20 bp, Artificial Sequence
  chemically synthesized
agtgagaattcccataattt

SEQ ID NO: 24653 - DNA, 20 bp, Artificial Sequence
  chemically synthesized
gtgagaattcccataatttg

SEQ ID NO: 24654 - DNA, 20 bp, Artificial Sequence
  chemically synthesized
cataatttgaggttttatac

SEQ ID NO: 24655 - DNA, 20 bp, Artificial Sequence
  chemically synthesized
tttgaggttttatactggaa

SEQ ID NO: 24656 - DNA, 20 bp, Artificial Sequence
  chemically synthesized
ttttatactggaatggtgat

SEQ ID NO: 24657 - DNA, 20 bp, Artificial Sequence
  chemically synthesized
tttatactggaatggtgata

SEQ ID NO: 24658 - DNA, 20 bp, Artificial Sequence
  chemically synthesized
ttatactggaatggtgataa

SEQ ID NO: 24659 - DNA, 20 bp, Artificial Sequence
  chemically synthesized
tactggaatggtgataaggg

SEQ ID NO: 24660 - DNA, 20 bp, Artificial Sequence
  chemically synthesized
actggaatggtgataagggc

SEQ ID NO: 24661 - DNA, 20 bp, Artificial Sequence
  chemically synthesized
gtgataagggcaggaaacct

SEQ ID NO: 24662 - DNA, 20 bp, Artificial Sequence
  chemically synthesized
gcccatgtgcattttttctc

SEQ ID NO: 24663 - DNA, 20 bp, Artificial Sequence
  chemically synthesized
catgtgcattttttctcgag

SEQ ID NO: 24664 - DNA, 20 bp, Artificial Sequence
  chemically synthesized
tccaaattcccccttctctt

SEQ ID NO: 24665 - DNA, 20 bp, Artificial Sequence
  chemically synthesized
tctcttaagaaaaaacacgt

SEQ ID NO: 24666 - DNA, 20 bp, Artificial Sequence
  chemically synthesized
aaaaaacacgtgagccatgt

SEQ ID NO: 24667 - DNA, 20 bp, Artificial Sequence
  chemically synthesized
aaacacgtgagccatgttgg

SEQ ID NO: 24668 - DNA, 20 bp, Artificial Sequence
  chemically synthesized
cgtgagccatgttggaagta

SEQ ID NO: 24669 - DNA, 20 bp, Artificial Sequence
  chemically synthesized
tggaagtacagccttgacct

SEQ ID NO: 24670 - DNA, 20 bp, Artificial Sequence
  chemically synthesized
agccttgacctcagcctcac

SEQ ID NO: 24671 - DNA, 20 bp, Artificial Sequence
  chemically synthesized
gccttgacctcagcctcacc

SEQ ID NO: 24672 - DNA, 20 bp, Artificial Sequence
  chemically synthesized
gacctcagcctcaccaggtg

SEQ ID NO: 24673 - DNA, 20 bp, Artificial Sequence
  chemically synthesized
caccaggtgcggctgctgac

SEQ ID NO: 24674 - DNA, 20 bp, Artificial Sequence
  chemically synthesized
tgctgaccggtgcaaaaaaa

SEQ ID NO: 24675 - DNA, 20 bp, Artificial Sequence
  chemically synthesized
gctgaccggtgcaaaaaaat

SEQ ID NO: 24676 - DNA, 20 bp, Artificial Sequence
  chemically synthesized
aaataggaaatattatttaa

SEQ ID NO: 24677 - DNA, 20 bp, Artificial Sequence
  chemically synthesized
aataggaaatattatttaaa

SEQ ID NO: 24678 - DNA, 20 bp, Artificial Sequence
  chemically synthesized
aggaaatattatttaaaagg

SEQ ID NO: 24679 - DNA, 20 bp, Artificial Sequence
  chemically synthesized
ggaaatattatttaaaaggc

SEQ ID NO: 24680 - DNA, 20 bp, Artificial Sequence
  chemically synthesized
gaaatattatttaaaaggca

SEQ ID NO: 24681 - DNA, 20 bp, Artificial Sequence
  chemically synthesized
aatattatttaaaaggcagg

SEQ ID NO: 24682 - DNA, 20 bp, Artificial Sequence
  chemically synthesized
atattatttaaaaggcaggg

SEQ ID NO: 24683 - DNA, 20 bp, Artificial Sequence
  chemically synthesized
tattatttaaaaggcaggga

SEQ ID NO: 24684 - DNA, 20 bp, Artificial Sequence
  chemically synthesized
attatttaaaaggcagggag

SEQ ID NO: 24685 - DNA, 20 bp, Artificial Sequence
  chemically synthesized
tatttaaaaggcagggaggg

SEQ ID NO: 24686 - DNA, 20 bp, Artificial Sequence
  chemically synthesized
tttaaaaggcagggagggga

SEQ ID NO: 24687 - DNA, 20 bp, Artificial Sequence
  chemically synthesized
ttccacaatcactgctgttt

SEQ ID NO: 24688 - DNA, 20 bp, Artificial Sequence
  chemically synthesized
atcactgctgtttcagtgaa

SEQ ID NO: 24689 - DNA, 20 bp, Artificial Sequence
  chemically synthesized
tgtttcagtgaaaagcaacc

SEQ ID NO: 24690 - DNA, 20 bp, Artificial Sequence
  chemically synthesized
gtaaaacctacttccctttc

SEQ ID NO: 24691 - DNA, 20 bp, Artificial Sequence
  chemically synthesized
acttccctttctggtgaatg

SEQ ID NO: 24692 - DNA, 20 bp, Artificial Sequence
  chemically synthesized
gtgaatgtggctgtttttga

SEQ ID NO: 24693 - DNA, 20 bp, Artificial Sequence
  chemically synthesized
aatgtggctgtttttgacag

SEQ ID NO: 24694 - DNA, 20 bp, Artificial Sequence
  chemically synthesized
tgtggctgtttttgacagca

SEQ ID NO: 24695 - DNA, 20 bp, Artificial Sequence
  chemically synthesized
gtggctgtttttgacagcag

SEQ ID NO: 24696 - DNA, 20 bp, Artificial Sequence
  chemically synthesized
tttttgacagcagaggaccc

SEQ ID NO: 24697 - DNA, 20 bp, Artificial Sequence
  chemically synthesized
agcagaggaccccagttgtt

SEQ ID NO: 24698 - DNA, 20 bp, Artificial Sequence
  chemically synthesized
gcagaggaccccagttgttg

SEQ ID NO: 24699 - DNA, 20 bp, Artificial Sequence
  chemically synthesized
accccagttgttgaggacta

SEQ ID NO: 24700 - DNA, 20 bp, Artificial Sequence
  chemically synthesized
cccagttgttgaggactaaa

SEQ ID NO: 24701 - DNA, 20 bp, Artificial Sequence
  chemically synthesized
cagttgttgaggactaaaga

SEQ ID NO: 24702 - DNA, 20 bp, Artificial Sequence
  chemically synthesized
gttgttgaggactaaagaga

SEQ ID NO: 24703 - DNA, 20 bp, Artificial Sequence
  chemically synthesized
gttgaggactaaagagagag

SEQ ID NO: 24704 - DNA, 20 bp, Artificial Sequence
  chemically synthesized
ggactaaagagagagaagat

SEQ ID NO: 24705 - DNA, 20 bp, Artificial Sequence
  chemically synthesized
taaagagagagaagatgaga

SEQ ID NO: 24706 - DNA, 20 bp, Artificial Sequence
  chemically synthesized
agagagagaagatgagaaag

SEQ ID NO: 24707 - DNA, 20 bp, Artificial Sequence
  chemically synthesized
gaagatgagaaagaagatgc

SEQ ID NO: 24708 - DNA, 20 bp, Artificial Sequence
  chemically synthesized
gagaaagaagatgctggaaa

SEQ ID NO: 24709 - DNA, 20 bp, Artificial Sequence
  chemically synthesized
gaaagaagatgctggaaaca

SEQ ID NO: 24710 - DNA, 20 bp, Artificial Sequence
  chemically synthesized
aaagaagatgctggaaacag

SEQ ID NO: 24711 - DNA, 20 bp, Artificial Sequence
  chemically synthesized
aagatgctggaaacagaggt

SEQ ID NO: 24712 - DNA, 20 bp, Artificial Sequence
  chemically synthesized
gatgctggaaacagaggttg

SEQ ID NO: 24713 - DNA, 20 bp, Artificial Sequence
  chemically synthesized
ctggaaacagaggttggaga

SEQ ID NO: 24714 - DNA, 20 bp, Artificial Sequence
  chemically synthesized
ggaaacagaggttggagaaa

SEQ ID NO: 24715 - DNA, 20 bp, Artificial Sequence
  chemically synthesized
aaacagaggttggagaaaga

SEQ ID NO: 24716 - DNA, 20 bp, Artificial Sequence
  chemically synthesized
aacagaggttggagaaagag

SEQ ID NO: 24717 - DNA, 20 bp, Artificial Sequence
  chemically synthesized
gaggttggagaaagagaggc

SEQ ID NO: 24718 - DNA, 20 bp, Artificial Sequence
  chemically synthesized
aggttggagaaagagaggca

SEQ ID NO: 24719 - DNA, 20 bp, Artificial Sequence
  chemically synthesized
ttggagaaagagaggcaagg

SEQ ID NO: 24720 - DNA, 20 bp, Artificial Sequence
  chemically synthesized
gagaaagagaggcaaggaag

SEQ ID NO: 24721 - DNA, 20 bp, Artificial Sequence
  chemically synthesized
aagagaggcaaggaagtaga

SEQ ID NO: 24722 - DNA, 20 bp, Artificial Sequence
  chemically synthesized
agagaggcaaggaagtagaa

SEQ ID NO: 24723 - DNA, 20 bp, Artificial Sequence
  chemically synthesized
agaggcaaggaagtagaaag

SEQ ID NO: 24724 - DNA, 20 bp, Artificial Sequence
  chemically synthesized
gaggcaaggaagtagaaagg

SEQ ID NO: 24725 - DNA, 20 bp, Artificial Sequence
  chemically synthesized
aaggaagtagaaaggaggaa

SEQ ID NO: 24726 - DNA, 20 bp, Artificial Sequence
  chemically synthesized
aggaagtagaaaggaggaaa

SEQ ID NO: 24727 - DNA, 20 bp, Artificial Sequence
  chemically synthesized
ggaagtagaaaggaggaaaa

SEQ ID NO: 24728 - DNA, 20 bp, Artificial Sequence
  chemically synthesized
gaagtagaaaggaggaaaag

SEQ ID NO: 24729 - DNA, 20 bp, Artificial Sequence
  chemically synthesized
gtagaaaggaggaaaagggg

SEQ ID NO: 24730 - DNA, 20 bp, Artificial Sequence
  chemically synthesized
agaaaggaggaaaaggggaa

SEQ ID NO: 24731 - DNA, 20 bp, Artificial Sequence
  chemically synthesized
aaaggaggaaaaggggaaga

SEQ ID NO: 24732 - DNA, 20 bp, Artificial Sequence
  chemically synthesized
aaggaggaaaaggggaagag

SEQ ID NO: 24733 - DNA, 20 bp, Artificial Sequence
  chemically synthesized
ggaggaaaaggggaagagag

SEQ ID NO: 24734 - DNA, 20 bp, Artificial Sequence
  chemically synthesized
gaggaaaaggggaagagagg

SEQ ID NO: 24735 - DNA, 20 bp, Artificial Sequence
  chemically synthesized
gaaaaggggaagagaggagg

SEQ ID NO: 24736 - DNA, 20 bp, Artificial Sequence
  chemically synthesized
aaaaggggaagagaggaggc

SEQ ID NO: 24737 - DNA, 20 bp, Artificial Sequence
  chemically synthesized
aaaggggaagagaggaggca

SEQ ID NO: 24738 - DNA, 20 bp, Artificial Sequence
  chemically synthesized
aaggggaagagaggaggcag

SEQ ID NO: 24739 - DNA, 20 bp, Artificial Sequence
  chemically synthesized
aggggaagagaggaggcagg

SEQ ID NO: 24740 - DNA, 20 bp, Artificial Sequence
  chemically synthesized
gggaagagaggaggcagggg

SEQ ID NO: 24741 - DNA, 20 bp, Artificial Sequence
  chemically synthesized
gaagagaggaggcaggggga

SEQ ID NO: 24742 - DNA, 20 bp, Artificial Sequence
  chemically synthesized
agagaggaggcagggggaga

SEQ ID NO: 24743 - DNA, 20 bp, Artificial Sequence
  chemically synthesized
gagaggaggcagggggagag

SEQ ID NO: 24744 - DNA, 20 bp, Artificial Sequence
  chemically synthesized
agaggaggcagggggagaga

SEQ ID NO: 24745 - DNA, 20 bp, Artificial Sequence
  chemically synthesized
gaggcagggggagagagggt

SEQ ID NO: 24746 - DNA, 20 bp, Artificial Sequence
  chemically synthesized
gggagagagggttggaattc

SEQ ID NO: 24747 - DNA, 20 bp, Artificial Sequence
  chemically synthesized
gttggaattcgagctatttt

SEQ ID NO: 24748 - DNA, 20 bp, Artificial Sequence
  chemically synthesized
agctattttcagctgaatgt

SEQ ID NO: 24749 - DNA, 20 bp, Artificial Sequence
  chemically synthesized
ttttcagctgaatgtgagtg

SEQ ID NO: 24750 - DNA, 20 bp, Artificial Sequence
  chemically synthesized
aatgtgagtgcagatttcat

SEQ ID NO: 24751 - DNA, 20 bp, Artificial Sequence
  chemically synthesized
atgtgagtgcagatttcatc

SEQ ID NO: 24752 - DNA, 20 bp, Artificial Sequence
  chemically synthesized
tgcagatttcatcaggcttc

SEQ ID NO: 24753 - DNA, 20 bp, Artificial Sequence
  chemically synthesized
gcagatttcatcaggcttct

SEQ ID NO: 24754 - DNA, 20 bp, Artificial Sequence
  chemically synthesized
ttcatcaggcttctgggcta

SEQ ID NO: 24755 - DNA, 20 bp, Artificial Sequence
  chemically synthesized
tcatcaggcttctgggctac

SEQ ID NO: 24756 - DNA, 20 bp, Artificial Sequence
  chemically synthesized
catcaggcttctgggctaca

SEQ ID NO: 24757 - DNA, 20 bp, Artificial Sequence
  chemically synthesized
acagggaaactgactgtgtg

SEQ ID NO: 24758 - DNA, 20 bp, Artificial Sequence
  chemically synthesized
cttgcgtgtaacttcctgtg

SEQ ID NO: 24759 - DNA, 20 bp, Artificial Sequence
  chemically synthesized
gcgtgtaacttcctgtgaag

SEQ ID NO: 24760 - DNA, 20 bp, Artificial Sequence
  chemically synthesized
aacttcctgtgaagcagccg

SEQ ID NO: 24761 - DNA, 20 bp, Artificial Sequence
  chemically synthesized
actgcattttctgacactgt

SEQ ID NO: 24762 - DNA, 20 bp, Artificial Sequence
  chemically synthesized
tgcattttctgacactgtca

SEQ ID NO: 24763 - DNA, 20 bp, Artificial Sequence
  chemically synthesized
tttctgacactgtcagagtc

SEQ ID NO: 24764 - DNA, 20 bp, Artificial Sequence
  chemically synthesized
cagagtctggacaaccctgc

SEQ ID NO: 24765 - DNA, 20 bp, Artificial Sequence
  chemically synthesized
tggacaaccctgccagctcc

SEQ ID NO: 24766 - DNA, 20 bp, Artificial Sequence
  chemically synthesized
acaaccctgccagctcctag

SEQ ID NO: 24767 - DNA, 20 bp, Artificial Sequence
  chemically synthesized
caaccctgccagctcctaga

SEQ ID NO: 24768 - DNA, 20 bp, Artificial Sequence
  chemically synthesized
aaccctgccagctcctagaa

SEQ ID NO: 24769 - DNA, 20 bp, Artificial Sequence
  chemically synthesized
gggcaacccaacaactgtca

SEQ ID NO: 24770 - DNA, 20 bp, Artificial Sequence
  chemically synthesized
cccaacaactgtcacagacg

SEQ ID NO: 24771 - DNA, 20 bp, Artificial Sequence
  chemically synthesized
tgtcacagacgaagcatcaa

SEQ ID NO: 24772 - DNA, 20 bp, Artificial Sequence
  chemically synthesized
agacgaagcatcaaaagcat

SEQ ID NO: 24773 - DNA, 20 bp, Artificial Sequence
  chemically synthesized
tcaaaagcatgagctgtcga

SEQ ID NO: 24774 - DNA, 20 bp, Artificial Sequence
  chemically synthesized
tcgatagtgacctgcatttg

SEQ ID NO: 24775 - DNA, 20 bp, Artificial Sequence
  chemically synthesized
cctgcatttgcagaaaatct

SEQ ID NO: 24776 - DNA, 20 bp, Artificial Sequence
  chemically synthesized
ctgcatttgcagaaaatctg

SEQ ID NO: 24777 - DNA, 20 bp, Artificial Sequence
  chemically synthesized
tgcatttgcagaaaatctga

SEQ ID NO: 24778 - DNA, 20 bp, Artificial Sequence
  chemically synthesized
tctgagggctttctaattaa

SEQ ID NO: 24779 - DNA, 20 bp, Artificial Sequence
  chemically synthesized
tgagggctttctaattaaca

SEQ ID NO: 24780 - DNA, 20 bp, Artificial Sequence
  chemically synthesized
gagggctttctaattaacag

SEQ ID NO: 24781 - DNA, 20 bp, Artificial Sequence
  chemically synthesized
gggctttctaattaacagag

SEQ ID NO: 24782 - DNA, 20 bp, Artificial Sequence
  chemically synthesized
ttaacagaggagctctaaat

SEQ ID NO: 24783 - DNA, 20 bp, Artificial Sequence
  chemically synthesized
aacagaggagctctaaatta

SEQ ID NO: 24784 - DNA, 20 bp, Artificial Sequence
  chemically synthesized
aggagctctaaattagagta

SEQ ID NO: 24785 - DNA, 20 bp, Artificial Sequence
  chemically synthesized
ttagagtaaagctgttcgac

SEQ ID NO: 24786 - DNA, 20 bp, Artificial Sequence
  chemically synthesized
tcgacaagacccctcatacg

SEQ ID NO: 24787 - DNA, 20 bp, Artificial Sequence
  chemically synthesized
caagacccctcatacgcggt

SEQ ID NO: 24788 - DNA, 20 bp, Artificial Sequence
  chemically synthesized
acgcggtaagtgtcacaatg

SEQ ID NO: 24789 - DNA, 20 bp, Artificial Sequence
  chemically synthesized
agataatcattacatctaac

SEQ ID NO: 24790 - DNA, 20 bp, Artificial Sequence
  chemically synthesized
aacaagcttctgatttttaa

SEQ ID NO: 24791 - DNA, 20 bp, Artificial Sequence
  chemically synthesized
aagcttctgatttttaacag

SEQ ID NO: 24792 - DNA, 20 bp, Artificial Sequence
  chemically synthesized
tgatttttaacagaagctat

SEQ ID NO: 24793 - DNA, 20 bp, Artificial Sequence
  chemically synthesized
tgagaccaactcatttataa

SEQ ID NO: 24794 - DNA, 20 bp, Artificial Sequence
  chemically synthesized
ccaactcatttataatggtt

SEQ ID NO: 24795 - DNA, 20 bp, Artificial Sequence
  chemically synthesized
tttataatggttcagtttca

SEQ ID NO: 24796 - DNA, 20 bp, Artificial Sequence
  chemically synthesized
ttataatggttcagtttcaa

SEQ ID NO: 24797 - DNA, 20 bp, Artificial Sequence
  chemically synthesized
tataatggttcagtttcaaa

SEQ ID NO: 24798 - DNA, 20 bp, Artificial Sequence
  chemically synthesized
ataatggttcagtttcaaag

SEQ ID NO: 24799 - DNA, 20 bp, Artificial Sequence
  chemically synthesized
taatggttcagtttcaaagg

SEQ ID NO: 24800 - DNA, 20 bp, Artificial Sequence
  chemically synthesized
agtttcaaagggggaaaaaa

SEQ ID NO: 24801 - DNA, 20 bp, Artificial Sequence
  chemically synthesized
agggggaaaaaaaagcaacc

SEQ ID NO: 24802 - DNA, 20 bp, Artificial Sequence
  chemically synthesized
ggaaaaaaaagcaaccaaga

SEQ ID NO: 24803 - DNA, 20 bp, Artificial Sequence
  chemically synthesized
aaaagcaaccaagaaagaaa

SEQ ID NO: 24804 - DNA, 20 bp, Artificial Sequence
  chemically synthesized
agcaaccaagaaagaaaaag

SEQ ID NO: 24805 - DNA, 20 bp, Artificial Sequence
  chemically synthesized
gcaaccaagaaagaaaaaga

SEQ ID NO: 24806 - DNA, 20 bp, Artificial Sequence
  chemically synthesized
ccaagaaagaaaaagaagga

SEQ ID NO: 24807 - DNA, 20 bp, Artificial Sequence
  chemically synthesized
gaaaaagaaggaaagaaaaa

SEQ ID NO: 24808 - DNA, 20 bp, Artificial Sequence
  chemically synthesized
aaaaagaaggaaagaaaaaa

SEQ ID NO: 24809 - DNA, 20 bp, Artificial Sequence
  chemically synthesized
aaaagaaggaaagaaaaaaa

SEQ ID NO: 24810 - DNA, 20 bp, Artificial Sequence
  chemically synthesized
aagaaggaaagaaaaaaagg

SEQ ID NO: 24811 - DNA, 20 bp, Artificial Sequence
  chemically synthesized
ggaaagaaaaaaagggagaa

SEQ ID NO: 24812 - DNA, 20 bp, Artificial Sequence
  chemically synthesized
gaaagaaaaaaagggagaaa

SEQ ID NO: 24813 - DNA, 20 bp, Artificial Sequence
  chemically synthesized
agaaaaaaagggagaaaagg

SEQ ID NO: 24814 - DNA, 20 bp, Artificial Sequence
  chemically synthesized
aaaaagggagaaaaggaaga

SEQ ID NO: 24815 - DNA, 20 bp, Artificial Sequence
  chemically synthesized
agggagaaaaggaagaaaga

SEQ ID NO: 24816 - DNA, 20 bp, Artificial Sequence
  chemically synthesized
aggaagaaagaaagaacaac

SEQ ID NO: 24817 - DNA, 20 bp, Artificial Sequence
  chemically synthesized
aagaaagaaagaacaaccag

SEQ ID NO: 24818 - DNA, 20 bp, Artificial Sequence
  chemically synthesized
aacaaccagaagaacaaaaa

SEQ ID NO: 24819 - DNA, 20 bp, Artificial Sequence
  chemically synthesized
acaaccagaagaacaaaaat

SEQ ID NO: 24820 - DNA, 20 bp, Artificial Sequence
  chemically synthesized
ccagaagaacaaaaatagga

SEQ ID NO: 24821 - DNA, 20 bp, Artificial Sequence
  chemically synthesized
aaataggaaagaaaaataaa

SEQ ID NO: 24822 - DNA, 20 bp, Artificial Sequence
  chemically synthesized
ataaaaagaaatcctccttc

SEQ ID NO: 24823 - DNA, 20 bp, Artificial Sequence
  chemically synthesized
aaatcctccttctagtgctt

SEQ ID NO: 24824 - DNA, 20 bp, Artificial Sequence
  chemically synthesized
aatcctccttctagtgcttt

SEQ ID NO: 24825 - DNA, 20 bp, Artificial Sequence
  chemically synthesized
ctccttctagtgctttgggc

SEQ ID NO: 24826 - DNA, 20 bp, Artificial Sequence
  chemically synthesized
tagtgctttgggcgagtgct

SEQ ID NO: 24827 - DNA, 20 bp, Artificial Sequence
  chemically synthesized
tttgggcgagtgcttagacc

SEQ ID NO: 24828 - DNA, 20 bp, Artificial Sequence
  chemically synthesized
tcttcctttgttgtctgctg

SEQ ID NO: 24829 - DNA, 20 bp, Artificial Sequence
  chemically synthesized
ttgttgtctgctgaagcatc

SEQ ID NO: 24830 - DNA, 20 bp, Artificial Sequence
  chemically synthesized
tccagatacatcttctgttt

SEQ ID NO: 24831 - DNA, 20 bp, Artificial Sequence
  chemically synthesized
atccacgtctgctaatatgc

SEQ ID NO: 24832 - DNA, 20 bp, Artificial Sequence
  chemically synthesized
ctcattcatttgatgtttcc

SEQ ID NO: 24833 - DNA, 20 bp, Artificial Sequence
  chemically synthesized
tcattcatttgatgtttcct

SEQ ID NO: 24834 - DNA, 20 bp, Artificial Sequence
  chemically synthesized
cattcatttgatgtttcctg

SEQ ID NO: 24835 - DNA, 20 bp, Artificial Sequence
  chemically synthesized
atttgatgtttcctggggac

SEQ ID NO: 24836 - DNA, 20 bp, Artificial Sequence
  chemically synthesized
ggggacgagcatcctctctt

SEQ ID NO: 24837 - DNA, 20 bp, Artificial Sequence
  chemically synthesized
tgagttatttctgacaactg

SEQ ID NO: 24838 - DNA, 20 bp, Artificial Sequence
  chemically synthesized
ctgacaactgcagcattcca

SEQ ID NO: 24839 - DNA, 20 bp, Artificial Sequence
  chemically synthesized
tgacaactgcagcattccac

SEQ ID NO: 24840 - DNA, 20 bp, Artificial Sequence
  chemically synthesized
gacaactgcagcattccaca

SEQ ID NO: 24841 - DNA, 20 bp, Artificial Sequence
  chemically synthesized
tgcagcattccacagggtct

SEQ ID NO: 24842 - DNA, 20 bp, Artificial Sequence
  chemically synthesized
agggtctgagttgttgaaca

SEQ ID NO: 24843 - DNA, 20 bp, Artificial Sequence
  chemically synthesized
tacaatcaaaacacatgaca

SEQ ID NO: 24844 - DNA, 20 bp, Artificial Sequence
  chemically synthesized
atcaaaacacatgacataga

SEQ ID NO: 24845 - DNA, 20 bp, Artificial Sequence
  chemically synthesized
aaaacacatgacatagacag

SEQ ID NO: 24846 - DNA, 20 bp, Artificial Sequence
  chemically synthesized
gacatagacagcagttgatt

SEQ ID NO: 24847 - DNA, 20 bp, Artificial Sequence
  chemically synthesized
acatagacagcagttgattt

SEQ ID NO: 24848 - DNA, 20 bp, Artificial Sequence
  chemically synthesized
agttgatttgggttctgcct

SEQ ID NO: 24849 - DNA, 20 bp, Artificial Sequence
  chemically synthesized
gatttgggttctgccttgga

SEQ ID NO: 24850 - DNA, 20 bp, Artificial Sequence
  chemically synthesized
tttgggttctgccttggaca

SEQ ID NO: 24851 - DNA, 20 bp, Artificial Sequence
  chemically synthesized
ttctgccttggacagagaaa

SEQ ID NO: 24852 - DNA, 20 bp, Artificial Sequence
  chemically synthesized
ccttggacagagaaacagac

SEQ ID NO: 24853 - DNA, 20 bp, Artificial Sequence
  chemically synthesized
cttggacagagaaacagact

SEQ ID NO: 24854 - DNA, 20 bp, Artificial Sequence
  chemically synthesized
ttggacagagaaacagactg

SEQ ID NO: 24855 - DNA, 20 bp, Artificial Sequence
  chemically synthesized
agagaaacagactggggcta

SEQ ID NO: 24856 - DNA, 20 bp, Artificial Sequence
  chemically synthesized
gagaaacagactggggctaa

SEQ ID NO: 24857 - DNA, 20 bp, Artificial Sequence
  chemically synthesized
agaaacagactggggctaaa

SEQ ID NO: 24858 - DNA, 20 bp, Artificial Sequence
  chemically synthesized
gactggggctaaagggactg

SEQ ID NO: 24859 - DNA, 20 bp, Artificial Sequence
  chemically synthesized
aaagggactgcagctatacc

SEQ ID NO: 24860 - DNA, 20 bp, Artificial Sequence
  chemically synthesized
aagggactgcagctatacct

SEQ ID NO: 24861 - DNA, 20 bp, Artificial Sequence
  chemically synthesized
agggactgcagctatacctg

SEQ ID NO: 24862 - DNA, 20 bp, Artificial Sequence
  chemically synthesized
ctatacctggggacttgcct

SEQ ID NO: 24863 - DNA, 20 bp, Artificial Sequence
  chemically synthesized
gggacttgcctgagatcatc

SEQ ID NO: 24864 - DNA, 20 bp, Artificial Sequence
  chemically synthesized
ggacttgcctgagatcatct

SEQ ID NO: 24865 - DNA, 20 bp, Artificial Sequence
  chemically synthesized
gagatcatctgggacttgcc

SEQ ID NO: 24866 - DNA, 20 bp, Artificial Sequence
  chemically synthesized
tctgggacttgcctggtctc

SEQ ID NO: 24867 - DNA, 20 bp, Artificial Sequence
  chemically synthesized
ggtctcaagtcttctgacct

SEQ ID NO: 24868 - DNA, 20 bp, Artificial Sequence
  chemically synthesized
tcaagtcttctgaccttggc

SEQ ID NO: 24869 - DNA, 20 bp, Artificial Sequence
  chemically synthesized
caagtcttctgaccttggcc

SEQ ID NO: 24870 - DNA, 20 bp, Artificial Sequence
  chemically synthesized
aagtcttctgaccttggcca

SEQ ID NO: 24871 - DNA, 20 bp, Artificial Sequence
  chemically synthesized
ttggccagggatctttgcac

SEQ ID NO: 24872 - DNA, 20 bp, Artificial Sequence
  chemically synthesized
tggccagggatctttgcact

SEQ ID NO: 24873 - DNA, 20 bp, Artificial Sequence
  chemically synthesized
ccagggatctttgcactggg

SEQ ID NO: 24874 - DNA, 20 bp, Artificial Sequence
  chemically synthesized
cagggatctttgcactgggc

SEQ ID NO: 24875 - DNA, 20 bp, Artificial Sequence
  chemically synthesized
agggatctttgcactgggca

SEQ ID NO: 24876 - DNA, 20 bp, Artificial Sequence
  chemically synthesized
gggatctttgcactgggcag

SEQ ID NO: 24877 - DNA, 20 bp, Artificial Sequence
  chemically synthesized
tgcactgggcaggggaattt

SEQ ID NO: 24878 - DNA, 20 bp, Artificial Sequence
  chemically synthesized
gggaatttgagtcccaattt

SEQ ID NO: 24879 - DNA, 20 bp, Artificial Sequence
  chemically synthesized
ggaatttgagtcccaatttg

SEQ ID NO: 24880 - DNA, 20 bp, Artificial Sequence
  chemically synthesized
tcgatttaaaccacttttca

SEQ ID NO: 24881 - DNA, 20 bp, Artificial Sequence
  chemically synthesized
cgatttaaaccacttttcaa

SEQ ID NO: 24882 - DNA, 20 bp, Artificial Sequence
  chemically synthesized
ccacttttcaaaggcctgaa

SEQ ID NO: 24883 - DNA, 20 bp, Artificial Sequence
  chemically synthesized
acttttcaaaggcctgaatg

SEQ ID NO: 24884 - DNA, 20 bp, Artificial Sequence
  chemically synthesized
atttgtgtgtcttcttttcc

SEQ ID NO: 24885 - DNA, 20 bp, Artificial Sequence
  chemically synthesized
ttcctggtcttccccttgtc

SEQ ID NO: 24886 - DNA, 20 bp, Artificial Sequence
  chemically synthesized
tcaagaccatttctctacca

SEQ ID NO: 24887 - DNA, 20 bp, Artificial Sequence
  chemically synthesized
caagaccatttctctaccac

SEQ ID NO: 24888 - DNA, 20 bp, Artificial Sequence
  chemically synthesized
ctctaccacgggatatatat

SEQ ID NO: 24889 - DNA, 20 bp, Artificial Sequence
  chemically synthesized
ctaccacgggatatatatta

SEQ ID NO: 24890 - DNA, 20 bp, Artificial Sequence
  chemically synthesized
taccacgggatatatattag

SEQ ID NO: 24891 - DNA, 20 bp, Artificial Sequence
  chemically synthesized
accacgggatatatattaga

SEQ ID NO: 24892 - DNA, 20 bp, Artificial Sequence
  chemically synthesized
ccacgggatatatattagag

SEQ ID NO: 24893 - DNA, 20 bp, Artificial Sequence
  chemically synthesized
atatatattagaggggaaaa

SEQ ID NO: 24894 - DNA, 20 bp, Artificial Sequence
  chemically synthesized
cggctgtaaaccctgattgt

SEQ ID NO: 24895 - DNA, 20 bp, Artificial Sequence
  chemically synthesized
tgtaaaccctgattgttggc

SEQ ID NO: 24896 - DNA, 20 bp, Artificial Sequence
  chemically synthesized
gattgttggctagcattgtt

SEQ ID NO: 24897 - DNA, 20 bp, Artificial Sequence
  chemically synthesized
attgttggctagcattgttc

SEQ ID NO: 24898 - DNA, 20 bp, Artificial Sequence
  chemically synthesized
gttggctagcattgttcagg

SEQ ID NO: 24899 - DNA, 20 bp, Artificial Sequence
  chemically synthesized
ctagcattgttcaggaagtg

SEQ ID NO: 24900 - DNA, 20 bp, Artificial Sequence
  chemically synthesized
tgttcaggaagtgtagcatt

SEQ ID NO: 24901 - DNA, 20 bp, Artificial Sequence
  chemically synthesized
gttcaggaagtgtagcatta

SEQ ID NO: 24902 - DNA, 20 bp, Artificial Sequence
  chemically synthesized
tcaggaagtgtagcattaag

SEQ ID NO: 24903 - DNA, 20 bp, Artificial Sequence
  chemically synthesized
aactacccacactatccttg

SEQ ID NO: 24904 - DNA, 20 bp, Artificial Sequence
  chemically synthesized
actatccttgcagttattca

SEQ ID NO: 24905 - DNA, 20 bp, Artificial Sequence
  chemically synthesized
ctatccttgcagttattcat

SEQ ID NO: 24906 - DNA, 20 bp, Artificial Sequence
  chemically synthesized
ttcttctcaaacatctcgca

SEQ ID NO: 24907 - DNA, 20 bp, Artificial Sequence
  chemically synthesized
aacatctcgcaaagtaatca

SEQ ID NO: 24908 - DNA, 20 bp, Artificial Sequence
  chemically synthesized
acatctcgcaaagtaatcat

SEQ ID NO: 24909 - DNA, 20 bp, Artificial Sequence
  chemically synthesized
cgcaaagtaatcatgggctg

SEQ ID NO: 24910 - DNA, 20 bp, Artificial Sequence
  chemically synthesized
agtaatcatgggctgaagtg

SEQ ID NO: 24911 - DNA, 20 bp, Artificial Sequence
  chemically synthesized
gtaatcatgggctgaagtgc

SEQ ID NO: 24912 - DNA, 20 bp, Artificial Sequence
  chemically synthesized
ctgaagtgcaggttttcttg

SEQ ID NO: 24913 - DNA, 20 bp, Artificial Sequence
  chemically synthesized
ttttcttgcagtgcctttat

SEQ ID NO: 24914 - DNA, 20 bp, Artificial Sequence
  chemically synthesized
cagtgcctttatcagtaaat

SEQ ID NO: 24915 - DNA, 20 bp, Artificial Sequence
  chemically synthesized
ttatcagtaaatcagatttt

SEQ ID NO: 24916 - DNA, 20 bp, Artificial Sequence
  chemically synthesized
atcagattttgagcatttat

SEQ ID NO: 24917 - DNA, 20 bp, Artificial Sequence
  chemically synthesized
ttttgagcatttatcagcaa

SEQ ID NO: 24918 - DNA, 20 bp, Artificial Sequence
  chemically synthesized
gagcatttatcagcaaaagt

SEQ ID NO: 24919 - DNA, 20 bp, Artificial Sequence
  chemically synthesized
atcatttctgtaatgtttga

SEQ ID NO: 24920 - DNA, 20 bp, Artificial Sequence
  chemically synthesized
tttctgtaatgtttgaaaga

SEQ ID NO: 24921 - DNA, 20 bp, Artificial Sequence
  chemically synthesized
tttgaaagaaagatttgttt

SEQ ID NO: 24922 - DNA, 20 bp, Artificial Sequence
  chemically synthesized
gaaagaaagatttgtttcag

SEQ ID NO: 24923 - DNA, 20 bp, Artificial Sequence
  chemically synthesized
aaagaaagatttgtttcagt

SEQ ID NO: 24924 - DNA, 20 bp, Artificial Sequence
  chemically synthesized
aagaaagatttgtttcagtg

SEQ ID NO: 24925 - DNA, 20 bp, Artificial Sequence
  chemically synthesized
tctgccaatcaatgatcttc

SEQ ID NO: 24926 - DNA, 20 bp, Artificial Sequence
  chemically synthesized
tattgctgcaattatttgtc

SEQ ID NO: 24927 - DNA, 20 bp, Artificial Sequence
  chemically synthesized
gctgcaattatttgtctagt

SEQ ID NO: 24928 - DNA, 20 bp, Artificial Sequence
  chemically synthesized
ttggatatttaaaatgtcat

SEQ ID NO: 24929 - DNA, 20 bp, Artificial Sequence
  chemically synthesized
atatttaaaatgtcatcaga

SEQ ID NO: 24930 - DNA, 20 bp, Artificial Sequence
  chemically synthesized
atttaaaatgtcatcagaaa

SEQ ID NO: 24931 - DNA, 20 bp, Artificial Sequence
  chemically synthesized
aaagagatgattacacattc

SEQ ID NO: 24932 - DNA, 20 bp, Artificial Sequence
  chemically synthesized
agatgattacacattctaga

SEQ ID NO: 24933 - DNA, 20 bp, Artificial Sequence
  chemically synthesized
gattacacattctagaaagc

SEQ ID NO: 24934 - DNA, 20 bp, Artificial Sequence
  chemically synthesized
attacacattctagaaagca

SEQ ID NO: 24935 - DNA, 20 bp, Artificial Sequence
  chemically synthesized
ataatcacatgaactgaatc

SEQ ID NO: 24936 - DNA, 20 bp, Artificial Sequence
  chemically synthesized
gaactgaatccagttaaatg

SEQ ID NO: 24937 - DNA, 20 bp, Artificial Sequence
  chemically synthesized
gaatccagttaaatgtagtg

SEQ ID NO: 24938 - DNA, 20 bp, Artificial Sequence
  chemically synthesized
tactaacctgtccttcaaaa

SEQ ID NO: 24939 - DNA, 20 bp, Artificial Sequence
  chemically synthesized
tccttcaaaatagaattttt

SEQ ID NO: 24940 - DNA, 20 bp, Artificial Sequence
  chemically synthesized
gaatttttgagctaccactg

SEQ ID NO: 24941 - DNA, 20 bp, Artificial Sequence
  chemically synthesized
tttttgagctaccactgaag

SEQ ID NO: 24942 - DNA, 20 bp, Artificial Sequence
  chemically synthesized
ttgagctaccactgaagcag

SEQ ID NO: 24943 - DNA, 20 bp, Artificial Sequence
  chemically synthesized
gcagtcttctgccctgtttt

SEQ ID NO: 24944 - DNA, 20 bp, Artificial Sequence
  chemically synthesized
cagtcttctgccctgttttc

SEQ ID NO: 24945 - DNA, 20 bp, Artificial Sequence
  chemically synthesized
tcttctgccctgttttcagg

SEQ ID NO: 24946 - DNA, 20 bp, Artificial Sequence
  chemically synthesized
caggaagctgatcttaacct

SEQ ID NO: 24947 - DNA, 20 bp, Artificial Sequence
  chemically synthesized
aggaagctgatcttaacctt

SEQ ID NO: 24948 - DNA, 20 bp, Artificial Sequence
  chemically synthesized
ctgatcttaaccttgggatg

SEQ ID NO: 24949 - DNA, 20 bp, Artificial Sequence
  chemically synthesized
cttgggatgcagtgtgcttt

SEQ ID NO: 24950 - DNA, 20 bp, Artificial Sequence
  chemically synthesized
ttgggatgcagtgtgctttc

SEQ ID NO: 24951 - DNA, 20 bp, Artificial Sequence
  chemically synthesized
tgggatgcagtgtgctttca

SEQ ID NO: 24952 - DNA, 20 bp, Artificial Sequence
  chemically synthesized
atgcagtgtgctttcagggt

SEQ ID NO: 24953 - DNA, 20 bp, Artificial Sequence
  chemically synthesized
tgcagtgtgctttcagggtt

SEQ ID NO: 24954 - DNA, 20 bp, Artificial Sequence
  chemically synthesized
ggttgggtgatacttaatta

SEQ ID NO: 24955 - DNA, 20 bp, Artificial Sequence
  chemically synthesized
ttgggtgatacttaattatg

SEQ ID NO: 24956 - DNA, 20 bp, Artificial Sequence
  chemically synthesized
ttaattatggagaactttcc

SEQ ID NO: 24957 - DNA, 20 bp, Artificial Sequence
  chemically synthesized
gaactttccaagtctgaaaa

SEQ ID NO: 24958 - DNA, 20 bp, Artificial Sequence
  chemically synthesized
aattgctccttcacatacgc

SEQ ID NO: 24959 - DNA, 20 bp, Artificial Sequence
  chemically synthesized
tgctccttcacatacgcgag

SEQ ID NO: 24960 - DNA, 20 bp, Artificial Sequence
  chemically synthesized
catacgcgagaagtgcattt

SEQ ID NO: 24961 - DNA, 20 bp, Artificial Sequence
  chemically synthesized
tcatctgcaaatctataaat

SEQ ID NO: 24962 - DNA, 20 bp, Artificial Sequence
  chemically synthesized
tctgcaaatctataaataag

SEQ ID NO: 24963 - DNA, 20 bp, Artificial Sequence
  chemically synthesized
tctattcttcttgcttcctg

SEQ ID NO: 24964 - DNA, 20 bp, Artificial Sequence
  chemically synthesized
aaatgccaaatcctgatttg

SEQ ID NO: 24965 - DNA, 20 bp, Artificial Sequence
  chemically synthesized
ccaaatcctgatttgtggca

SEQ ID NO: 24966 - DNA, 20 bp, Artificial Sequence
  chemically synthesized
cctttcccactctgtatgcc

SEQ ID NO: 24967 - DNA, 20 bp, Artificial Sequence
  chemically synthesized
cactctgtatgcctggtgcc

SEQ ID NO: 24968 - DNA, 20 bp, Artificial Sequence
  chemically synthesized
actctgtatgcctggtgccc

SEQ ID NO: 24969 - DNA, 20 bp, Artificial Sequence
  chemically synthesized
atgcctggtgcccaggaact

SEQ ID NO: 24970 - DNA, 20 bp, Artificial Sequence
  chemically synthesized
cctggtgcccaggaactaag

SEQ ID NO: 24971 - DNA, 20 bp, Artificial Sequence
  chemically synthesized
ggtgcccaggaactaagcag

SEQ ID NO: 24972 - DNA, 20 bp, Artificial Sequence
  chemically synthesized
gcccaggaactaagcagtgg

SEQ ID NO: 24973 - DNA, 20 bp, Artificial Sequence
  chemically synthesized
caggaactaagcagtggcag

SEQ ID NO: 24974 - DNA, 20 bp, Artificial Sequence
  chemically synthesized
cagtggaaattacaactgtt

SEQ ID NO: 24975 - DNA, 20 bp, Artificial Sequence
  chemically synthesized
tggaaattacaactgtttgg

SEQ ID NO: 24976 - DNA, 20 bp, Artificial Sequence
  chemically synthesized
attacaactgtttggaagcc

SEQ ID NO: 24977 - DNA, 20 bp, Artificial Sequence
  chemically synthesized
ctgtttggaagccaagaaaa

SEQ ID NO: 24978 - DNA, 20 bp, Artificial Sequence
  chemically synthesized
ctccatttctcacttttctc

SEQ ID NO: 24979 - DNA, 20 bp, Artificial Sequence
  chemically synthesized
ttctcacttttctccagttc

SEQ ID NO: 24980 - DNA, 20 bp, Artificial Sequence
  chemically synthesized
tctccagttccggatattct

SEQ ID NO: 24981 - DNA, 20 bp, Artificial Sequence
  chemically synthesized
ctcggctctgctccatgtat

SEQ ID NO: 24982 - DNA, 20 bp, Artificial Sequence
  chemically synthesized
ccttctgtccgctccgtgaa

SEQ ID NO: 24983 - DNA, 20 bp, Artificial Sequence
  chemically synthesized
cttctgtccgctccgtgaac

SEQ ID NO: 24984 - DNA, 20 bp, Artificial Sequence
  chemically synthesized
tccgctccgtgaacaggaaa

SEQ ID NO: 24985 - DNA, 20 bp, Artificial Sequence
  chemically synthesized
gtgaacaggaaacagaaata

SEQ ID NO: 24986 - DNA, 20 bp, Artificial Sequence
  chemically synthesized
gctccaatttttttttttaa

SEQ ID NO: 24987 - DNA, 20 bp, Artificial Sequence
  chemically synthesized
tccaatttttttttttaatg

SEQ ID NO: 24988 - DNA, 20 bp, Artificial Sequence
  chemically synthesized
ccaatttttttttttaatgg

SEQ ID NO: 24989 - DNA, 20 bp, Artificial Sequence
  chemically synthesized
atttttttttttaatggagg

SEQ ID NO: 24990 - DNA, 20 bp, Artificial Sequence
  chemically synthesized
ttttttttttaatggaggaa

SEQ ID NO: 24991 - DNA, 20 bp, Artificial Sequence
  chemically synthesized
tccaaccaaactaaactctc

SEQ ID NO: 24992 - DNA, 20 bp, Artificial Sequence
  chemically synthesized
accaaactaaactctcaaga

SEQ ID NO: 24993 - DNA, 20 bp, Artificial Sequence
  chemically synthesized
aactctcaagatagaatcat

SEQ ID NO: 24994 - DNA, 20 bp, Artificial Sequence
  chemically synthesized
ctctcaagatagaatcatga

SEQ ID NO: 24995 - DNA, 20 bp, Artificial Sequence
  chemically synthesized
caaaatgtccaaaatgtcct

SEQ ID NO: 24996 - DNA, 20 bp, Artificial Sequence
  chemically synthesized
aatgtccaaaatgtcctaag

SEQ ID NO: 24997 - DNA, 20 bp, Artificial Sequence
  chemically synthesized
tcaaaccacccgccccttaa

SEQ ID NO: 24998 - DNA, 20 bp, Artificial Sequence
  chemically synthesized
caaaccacccgccccttaac

SEQ ID NO: 24999 - DNA, 20 bp, Artificial Sequence
  chemically synthesized
aacaggtctgcctctcttcc

SEQ ID NO: 25000 - DNA, 20 bp, Artificial Sequence
  chemically synthesized
acaggtctgcctctcttcct

SEQ ID NO: 25001 - DNA, 20 bp, Artificial Sequence
  chemically synthesized
aggtctgcctctcttcctgg

SEQ ID NO: 25002 - DNA, 20 bp, Artificial Sequence
  chemically synthesized
ctgcctctcttcctgggagt

SEQ ID NO: 25003 - DNA, 20 bp, Artificial Sequence
  chemically synthesized
cctctcttcctgggagtcag

SEQ ID NO: 25004 - DNA, 20 bp, Artificial Sequence
  chemically synthesized
cagaagtgaccttgatgaac

SEQ ID NO: 25005 - DNA, 20 bp, Artificial Sequence
  chemically synthesized
gaccttgatgaactggatgt

SEQ ID NO: 25006 - DNA, 20 bp, Artificial Sequence
  chemically synthesized
accttgatgaactggatgtt

SEQ ID NO: 25007 - DNA, 20 bp, Artificial Sequence
  chemically synthesized
taggtccaaaaatgacaaac

SEQ ID NO: 25008 - DNA, 20 bp, Artificial Sequence
  chemically synthesized
atgacaaacaagccctccac

SEQ ID NO: 25009 - DNA, 20 bp, Artificial Sequence
  chemically synthesized
tgacaaacaagccctccact

SEQ ID NO: 25010 - DNA, 20 bp, Artificial Sequence
  chemically synthesized
agccctccactgggaaacat

SEQ ID NO: 25011 - DNA, 20 bp, Artificial Sequence
  chemically synthesized
gtccaacccctttcttttga

SEQ ID NO: 25012 - DNA, 20 bp, Artificial Sequence
  chemically synthesized
caacccctttcttttgacag

SEQ ID NO: 25013 - DNA, 20 bp, Artificial Sequence
  chemically synthesized
aacccctttcttttgacagc

SEQ ID NO: 25014 - DNA, 20 bp, Artificial Sequence
  chemically synthesized
ctttcttttgacagcaggac

SEQ ID NO: 25015 - DNA, 20 bp, Artificial Sequence
  chemically synthesized
ttttgacagcaggactagaa

SEQ ID NO: 25016 - DNA, 20 bp, Artificial Sequence
  chemically synthesized
acagcaggactagaacagac

SEQ ID NO: 25017 - DNA, 20 bp, Artificial Sequence
  chemically synthesized
agcaggactagaacagacca

SEQ ID NO: 25018 - DNA, 20 bp, Artificial Sequence
  chemically synthesized
gcaggactagaacagaccag

SEQ ID NO: 25019 - DNA, 20 bp, Artificial Sequence
  chemically synthesized
ctagaacagaccagaggttc

SEQ ID NO: 25020 - DNA, 20 bp, Artificial Sequence
  chemically synthesized
agaacagaccagaggttccg

SEQ ID NO: 25021 - DNA, 20 bp, Artificial Sequence
  chemically synthesized
acagaccagaggttccggag

SEQ ID NO: 25022 - DNA, 20 bp, Artificial Sequence
  chemically synthesized
cagaccagaggttccggaga

SEQ ID NO: 25023 - DNA, 20 bp, Artificial Sequence
  chemically synthesized
ccggagaaggtctctatacc

SEQ ID NO: 25024 - DNA, 20 bp, Artificial Sequence
  chemically synthesized
cggagaaggtctctatacct

SEQ ID NO: 25025 - DNA, 20 bp, Artificial Sequence
  chemically synthesized
agaaggtctctatacctagg

SEQ ID NO: 25026 - DNA, 20 bp, Artificial Sequence
  chemically synthesized
gaaggtctctatacctaggt

SEQ ID NO: 25027 - DNA, 20 bp, Artificial Sequence
  chemically synthesized
tatacctaggtgggtttcct

SEQ ID NO: 25028 - DNA, 20 bp, Artificial Sequence
  chemically synthesized
cctaggtgggtttcctgagc

SEQ ID NO: 25029 - DNA, 20 bp, Artificial Sequence
  chemically synthesized
taggtgggtttcctgagctg

SEQ ID NO: 25030 - DNA, 20 bp, Artificial Sequence
  chemically synthesized
ctgagctggagaattttcca

SEQ ID NO: 25031 - DNA, 20 bp, Artificial Sequence
  chemically synthesized
tgagctggagaattttccat

SEQ ID NO: 25032 - DNA, 20 bp, Artificial Sequence
  chemically synthesized
gagctggagaattttccatg

SEQ ID NO: 25033 - DNA, 20 bp, Artificial Sequence
  chemically synthesized
catggggctgtctgtgtgtt

SEQ ID NO: 25034 - DNA, 20 bp, Artificial Sequence
  chemically synthesized
atggggctgtctgtgtgttg

SEQ ID NO: 25035 - DNA, 20 bp, Artificial Sequence
  chemically synthesized
cactttcccaattcacttcc

SEQ ID NO: 25036 - DNA, 20 bp, Artificial Sequence
  chemically synthesized
ctttcccaattcacttccca

SEQ ID NO: 25037 - DNA, 20 bp, Artificial Sequence
  chemically synthesized
ttcccaattcacttcccaga

SEQ ID NO: 25038 - DNA, 20 bp, Artificial Sequence
  chemically synthesized
cacttcccagagagcatgct

SEQ ID NO: 25039 - DNA, 20 bp, Artificial Sequence
  chemically synthesized
agagcatgctgagctcattc

SEQ ID NO: 25040 - DNA, 20 bp, Artificial Sequence
  chemically synthesized
gagcatgctgagctcattcc

SEQ ID NO: 25041 - DNA, 20 bp, Artificial Sequence
  chemically synthesized
ctcattccaggacactgtga

SEQ ID NO: 25042 - DNA, 20 bp, Artificial Sequence
  chemically synthesized
caggacactgtgatggtcaa

SEQ ID NO: 25043 - DNA, 20 bp, Artificial Sequence
  chemically synthesized
aggacactgtgatggtcaaa

SEQ ID NO: 25044 - DNA, 20 bp, Artificial Sequence
  chemically synthesized
aaggctctcccaccatcaca

SEQ ID NO: 25045 - DNA, 20 bp, Artificial Sequence
  chemically synthesized
caccatcacacagaatgtac

SEQ ID NO: 25046 - DNA, 20 bp, Artificial Sequence
  chemically synthesized
accatcacacagaatgtact

SEQ ID NO: 25047 - DNA, 20 bp, Artificial Sequence
  chemically synthesized
ccatcacacagaatgtacta

SEQ ID NO: 25048 - DNA, 20 bp, Artificial Sequence
  chemically synthesized
agaatgtactagggttctgt

SEQ ID NO: 25049 - DNA, 20 bp, Artificial Sequence
  chemically synthesized
tagaaaattaatctcacttg

SEQ ID NO: 25050 - DNA, 20 bp, Artificial Sequence
  chemically synthesized
aaaaaatgcccttaaaacac

SEQ ID NO: 25051 - DNA, 20 bp, Artificial Sequence
  chemically synthesized
aaaatgcccttaaaacactg

SEQ ID NO: 25052 - DNA, 20 bp, Artificial Sequence
  chemically synthesized
ccttaaaacactggagccct

SEQ ID NO: 25053 - DNA, 20 bp, Artificial Sequence
  chemically synthesized
gagccctgagttgtatgtgc

SEQ ID NO: 25054 - DNA, 20 bp, Artificial Sequence
  chemically synthesized
gccctgagttgtatgtgctg

SEQ ID NO: 25055 - DNA, 20 bp, Artificial Sequence
  chemically synthesized
gttgtatgtgctggagcatg

SEQ ID NO: 25056 - DNA, 20 bp, Artificial Sequence
  chemically synthesized
ttgtatgtgctggagcatgt

SEQ ID NO: 25057 - DNA, 20 bp, Artificial Sequence
  chemically synthesized
tgtatgtgctggagcatgtg

SEQ ID NO: 25058 - DNA, 20 bp, Artificial Sequence
  chemically synthesized
gtgctggagcatgtggggaa

SEQ ID NO: 25059 - DNA, 20 bp, Artificial Sequence
  chemically synthesized
tggagcatgtggggaaaaga

SEQ ID NO: 25060 - DNA, 20 bp, Artificial Sequence
  chemically synthesized
atgtggggaaaagaaagatg

SEQ ID NO: 25061 - DNA, 20 bp, Artificial Sequence
  chemically synthesized
tgtggggaaaagaaagatgt

SEQ ID NO: 25062 - DNA, 20 bp, Artificial Sequence
  chemically synthesized
gtggggaaaagaaagatgta

SEQ ID NO: 25063 - DNA, 20 bp, Artificial Sequence
  chemically synthesized
tggggaaaagaaagatgtag

SEQ ID NO: 25064 - DNA, 20 bp, Artificial Sequence
  chemically synthesized
ggggaaaagaaagatgtagg

SEQ ID NO: 25065 - DNA, 20 bp, Artificial Sequence
  chemically synthesized
gaaaagaaagatgtaggggg

SEQ ID NO: 25066 - DNA, 20 bp, Artificial Sequence
  chemically synthesized
aaagaaagatgtagggggtg

SEQ ID NO: 25067 - DNA, 20 bp, Artificial Sequence
  chemically synthesized
gatgtagggggtggagcgtc

SEQ ID NO: 25068 - DNA, 20 bp, Artificial Sequence
  chemically synthesized
ggtggagcgtcaagaaaaac

SEQ ID NO: 25069 - DNA, 20 bp, Artificial Sequence
  chemically synthesized
aacaagacaaaaaaattcac

SEQ ID NO: 25070 - DNA, 20 bp, Artificial Sequence
  chemically synthesized
acaaaaaaattcacgagcca

SEQ ID NO: 25071 - DNA, 20 bp, Artificial Sequence
  chemically synthesized
aaattcacgagccatggaaa

SEQ ID NO: 25072 - DNA, 20 bp, Artificial Sequence
  chemically synthesized
attcacgagccatggaaatg

SEQ ID NO: 25073 - DNA, 20 bp, Artificial Sequence
  chemically synthesized
cacgagccatggaaatggag

SEQ ID NO: 25074 - DNA, 20 bp, Artificial Sequence
  chemically synthesized
aagaaacactgtttctgctg

SEQ ID NO: 25075 - DNA, 20 bp, Artificial Sequence
  chemically synthesized
gtttctgctgcagttgctct

SEQ ID NO: 25076 - DNA, 20 bp, Artificial Sequence
  chemically synthesized
ctgctgcagttgctcttagc

SEQ ID NO: 25077 - DNA, 20 bp, Artificial Sequence
  chemically synthesized
tgctgcagttgctcttagcc

SEQ ID NO: 25078 - DNA, 20 bp, Artificial Sequence
  chemically synthesized
gctgcagttgctcttagcca

SEQ ID NO: 25079 - DNA, 20 bp, Artificial Sequence
  chemically synthesized
ctgcagttgctcttagccag

SEQ ID NO: 25080 - DNA, 20 bp, Artificial Sequence
  chemically synthesized
agttgctcttagccaggggc

SEQ ID NO: 25081 - DNA, 20 bp, Artificial Sequence
  chemically synthesized
ctcttagccaggggccagcg

SEQ ID NO: 25082 - DNA, 20 bp, Artificial Sequence
  chemically synthesized
tagccaggggccagcgtgga

SEQ ID NO: 25083 - DNA, 20 bp, Artificial Sequence
  chemically synthesized
ccctgtcctccttcacctgc

SEQ ID NO: 25084 - DNA, 20 bp, Artificial Sequence
  chemically synthesized
ctccttcacctgccagcttg

SEQ ID NO: 25085 - DNA, 20 bp, Artificial Sequence
  chemically synthesized
tccttcacctgccagcttgt

SEQ ID NO: 25086 - DNA, 20 bp, Artificial Sequence
  chemically synthesized
tcacctgccagcttgtgggc

SEQ ID NO: 25087 - DNA, 20 bp, Artificial Sequence
  chemically synthesized
cacctgccagcttgtgggct

SEQ ID NO: 25088 - DNA, 20 bp, Artificial Sequence
  chemically synthesized
ctgccagcttgtgggctggg

SEQ ID NO: 25089 - DNA, 20 bp, Artificial Sequence
  chemically synthesized
gcttgtgggctgggtggctt

SEQ ID NO: 25090 - DNA, 20 bp, Artificial Sequence
  chemically synthesized
gggctgggtggcttaagttc

SEQ ID NO: 25091 - DNA, 20 bp, Artificial Sequence
  chemically synthesized
ggtggcttaagttctagccc

SEQ ID NO: 25092 - DNA, 20 bp, Artificial Sequence
  chemically synthesized
gtggcttaagttctagccct

SEQ ID NO: 25093 - DNA, 20 bp, Artificial Sequence
  chemically synthesized
tgggtgaccctctgactcct

SEQ ID NO: 25094 - DNA, 20 bp, Artificial Sequence
  chemically synthesized
ggtgaccctctgactcctga

SEQ ID NO: 25095 - DNA, 20 bp, Artificial Sequence
  chemically synthesized
agagcatgtgtatgtgcttg

SEQ ID NO: 25096 - DNA, 20 bp, Artificial Sequence
  chemically synthesized
gcatgtgtatgtgcttgtgg

SEQ ID NO: 25097 - DNA, 20 bp, Artificial Sequence
  chemically synthesized
catgtgtatgtgcttgtggt

SEQ ID NO: 25098 - DNA, 20 bp, Artificial Sequence
  chemically synthesized
gtgtatgtgcttgtggtggg

SEQ ID NO: 25099 - DNA, 20 bp, Artificial Sequence
  chemically synthesized
tgtatgtgcttgtggtgggt

SEQ ID NO: 25100 - DNA, 20 bp, Artificial Sequence
  chemically synthesized
gtatgtgcttgtggtgggtg

SEQ ID NO: 25101 - DNA, 20 bp, Artificial Sequence
  chemically synthesized
tgcttgtggtgggtggggtg

SEQ ID NO: 25102 - DNA, 20 bp, Artificial Sequence
  chemically synthesized
gggtggggtgtagtgcgtta

SEQ ID NO: 25103 - DNA, 20 bp, Artificial Sequence
  chemically synthesized
tgtagtgcgttaaagccgca

SEQ ID NO: 25104 - DNA, 20 bp, Artificial Sequence
  chemically synthesized
agtgcgttaaagccgcaaag

SEQ ID NO: 25105 - DNA, 20 bp, Artificial Sequence
  chemically synthesized
tgcgttaaagccgcaaagca

SEQ ID NO: 25106 - DNA, 20 bp, Artificial Sequence
  chemically synthesized
gcgttaaagccgcaaagcag

SEQ ID NO: 25107 - DNA, 20 bp, Artificial Sequence
  chemically synthesized
agccgcaaagcagaggtgcg

SEQ ID NO: 25108 - DNA, 20 bp, Artificial Sequence
  chemically synthesized
gccgcaaagcagaggtgcga

SEQ ID NO: 25109 - DNA, 20 bp, Artificial Sequence
  chemically synthesized
ccgcaaagcagaggtgcgaa

SEQ ID NO: 25110 - DNA, 20 bp, Artificial Sequence
  chemically synthesized
aagcagaggtgcgaagggcc

SEQ ID NO: 25111 - DNA, 20 bp, Artificial Sequence
  chemically synthesized
gaggtgcgaagggcctggtg

SEQ ID NO: 25112 - DNA, 20 bp, Artificial Sequence
  chemically synthesized
aggtgcgaagggcctggtgt

SEQ ID NO: 25113 - DNA, 20 bp, Artificial Sequence
  chemically synthesized
gaagggcctggtgtaggtcg

SEQ ID NO: 25114 - DNA, 20 bp, Artificial Sequence
  chemically synthesized
aagggcctggtgtaggtcgt

SEQ ID NO: 25115 - DNA, 20 bp, Artificial Sequence
  chemically synthesized
gggcctggtgtaggtcgtgg

SEQ ID NO: 25116 - DNA, 20 bp, Artificial Sequence
  chemically synthesized
ctggtgtaggtcgtgggaga

SEQ ID NO: 25117 - DNA, 20 bp, Artificial Sequence
  chemically synthesized
ggtgtaggtcgtgggagaca

SEQ ID NO: 25118 - DNA, 20 bp, Artificial Sequence
  chemically synthesized
tgtaggtcgtgggagacaga

SEQ ID NO: 25119 - DNA, 20 bp, Artificial Sequence
  chemically synthesized
aggtcgtgggagacagagag

SEQ ID NO: 25120 - DNA, 20 bp, Artificial Sequence
  chemically synthesized
ggtcgtgggagacagagaga

SEQ ID NO: 25121 - DNA, 20 bp, Artificial Sequence
  chemically synthesized
gggagacagagagaaggccc

SEQ ID NO: 25122 - DNA, 20 bp, Artificial Sequence
  chemically synthesized
ggagacagagagaaggccct

SEQ ID NO: 25123 - DNA, 20 bp, Artificial Sequence
  chemically synthesized
ctgaatgtttttacttttcc

SEQ ID NO: 25124 - DNA, 20 bp, Artificial Sequence
  chemically synthesized
tgaatgtttttacttttcct

SEQ ID NO: 25125 - DNA, 20 bp, Artificial Sequence
  chemically synthesized
cctgcttcatttttgttttc

SEQ ID NO: 25126 - DNA, 20 bp, Artificial Sequence
  chemically synthesized
ctgcttcatttttgttttca

SEQ ID NO: 25127 - DNA, 20 bp, Artificial Sequence
  chemically synthesized
gcttcatttttgttttcaag

SEQ ID NO: 25128 - DNA, 20 bp, Artificial Sequence
  chemically synthesized
gtttctctcttcttgccttc

SEQ ID NO: 25129 - DNA, 20 bp, Artificial Sequence
  chemically synthesized
cttgccttccagcatgtccc

SEQ ID NO: 25130 - DNA, 20 bp, Artificial Sequence
  chemically synthesized
gccttccagcatgtcccaag

SEQ ID NO: 25131 - DNA, 20 bp, Artificial Sequence
  chemically synthesized
cttccagcatgtcccaagca

SEQ ID NO: 25132 - DNA, 20 bp, Artificial Sequence
  chemically synthesized
cagcatgtcccaagcagaga

SEQ ID NO: 25133 - DNA, 20 bp, Artificial Sequence
  chemically synthesized
agcatgtcccaagcagagat

SEQ ID NO: 25134 - DNA, 20 bp, Artificial Sequence
  chemically synthesized
atgtcccaagcagagatggg

SEQ ID NO: 25135 - DNA, 20 bp, Artificial Sequence
  chemically synthesized
cccaagcagagatgggtggc

SEQ ID NO: 25136 - DNA, 20 bp, Artificial Sequence
  chemically synthesized
ccaagcagagatgggtggct

SEQ ID NO: 25137 - DNA, 20 bp, Artificial Sequence
  chemically synthesized
cagagatgggtggctaggtt

SEQ ID NO: 25138 - DNA, 20 bp, Artificial Sequence
  chemically synthesized
agagatgggtggctaggttt

SEQ ID NO: 25139 - DNA, 20 bp, Artificial Sequence
  chemically synthesized
tgggtggctaggtttgggaa

SEQ ID NO: 25140 - DNA, 20 bp, Artificial Sequence
  chemically synthesized
gggtggctaggtttgggaat

SEQ ID NO: 25141 - DNA, 20 bp, Artificial Sequence
  chemically synthesized
ggtggctaggtttgggaatg

SEQ ID NO: 25142 - DNA, 20 bp, Artificial Sequence
  chemically synthesized
taggtttgggaatggggtgc

SEQ ID NO: 25143 - DNA, 20 bp, Artificial Sequence
  chemically synthesized
aggtttgggaatggggtgct

SEQ ID NO: 25144 - DNA, 20 bp, Artificial Sequence
  chemically synthesized
gtttgggaatggggtgctgg

SEQ ID NO: 25145 - DNA, 20 bp, Artificial Sequence
  chemically synthesized
tttgggaatggggtgctggg

SEQ ID NO: 25146 - DNA, 20 bp, Artificial Sequence
  chemically synthesized
ttgggaatggggtgctggga

SEQ ID NO: 25147 - DNA, 20 bp, Artificial Sequence
  chemically synthesized
tgggaatggggtgctgggag

SEQ ID NO: 25148 - DNA, 20 bp, Artificial Sequence
  chemically synthesized
ggaatggggtgctgggaggg

SEQ ID NO: 25149 - DNA, 20 bp, Artificial Sequence
  chemically synthesized
gaatggggtgctgggagggg

SEQ ID NO: 25150 - DNA, 20 bp, Artificial Sequence
  chemically synthesized
aatggggtgctgggagggga

SEQ ID NO: 25151 - DNA, 20 bp, Artificial Sequence
  chemically synthesized
atggggtgctgggaggggag

SEQ ID NO: 25152 - DNA, 20 bp, Artificial Sequence
  chemically synthesized
ggggaggggatatcccattc

SEQ ID NO: 25153 - DNA, 20 bp, Artificial Sequence
  chemically synthesized
gggaggggatatcccattcc

SEQ ID NO: 25154 - DNA, 20 bp, Artificial Sequence
  chemically synthesized
ggaggggatatcccattcca

SEQ ID NO: 25155 - DNA, 20 bp, Artificial Sequence
  chemically synthesized
tcccattccagggcccttcc

SEQ ID NO: 25156 - DNA, 20 bp, Artificial Sequence
  chemically synthesized
tccagggcccttcccagttt

SEQ ID NO: 25157 - DNA, 20 bp, Artificial Sequence
  chemically synthesized
ccagggcccttcccagtttt

SEQ ID NO: 25158 - DNA, 20 bp, Artificial Sequence
  chemically synthesized
cagggcccttcccagttttg

SEQ ID NO: 25159 - DNA, 20 bp, Artificial Sequence
  chemically synthesized
gcccttcccagttttggggc

SEQ ID NO: 25160 - DNA, 20 bp, Artificial Sequence
  chemically synthesized
cccttcccagttttggggct

SEQ ID NO: 25161 - DNA, 20 bp, Artificial Sequence
  chemically synthesized
ttcccagttttggggctggg

SEQ ID NO: 25162 - DNA, 20 bp, Artificial Sequence
  chemically synthesized
tgggaagcctcaatctcctt

SEQ ID NO: 25163 - DNA, 20 bp, Artificial Sequence
  chemically synthesized
agcctcaatctccttgagca

SEQ ID NO: 25164 - DNA, 20 bp, Artificial Sequence
  chemically synthesized
ctcaatctccttgagcacag

SEQ ID NO: 25165 - DNA, 20 bp, Artificial Sequence
  chemically synthesized
tcaatctccttgagcacagc

SEQ ID NO: 25166 - DNA, 20 bp, Artificial Sequence
  chemically synthesized
caatctccttgagcacagca

SEQ ID NO: 25167 - DNA, 20 bp, Artificial Sequence
  chemically synthesized
ctttgccttctttcttccct

SEQ ID NO: 25168 - DNA, 20 bp, Artificial Sequence
  chemically synthesized
cttctttcttccctgagctg

SEQ ID NO: 25169 - DNA, 20 bp, Artificial Sequence
  chemically synthesized
ccctgagctgcggccaccac

SEQ ID NO: 25170 - DNA, 20 bp, Artificial Sequence
  chemically synthesized
cctgagctgcggccaccact

SEQ ID NO: 25171 - DNA, 20 bp, Artificial Sequence
  chemically synthesized
cggccaccactgggctgtac

SEQ ID NO: 25172 - DNA, 20 bp, Artificial Sequence
  chemically synthesized
ggccaccactgggctgtacc

SEQ ID NO: 25173 - DNA, 20 bp, Artificial Sequence
  chemically synthesized
cactgggctgtaccaggatc

SEQ ID NO: 25174 - DNA, 20 bp, Artificial Sequence
  chemically synthesized
taccaggatctagtgcaact

SEQ ID NO: 25175 - DNA, 20 bp, Artificial Sequence
  chemically synthesized
accaggatctagtgcaactt

SEQ ID NO: 25176 - DNA, 20 bp, Artificial Sequence
  chemically synthesized
tctagtgcaacttgggtgac

SEQ ID NO: 25177 - DNA, 20 bp, Artificial Sequence
  chemically synthesized
ctagtgcaacttgggtgaca

SEQ ID NO: 25178 - DNA, 20 bp, Artificial Sequence
  chemically synthesized
gcaacttgggtgacaaggtg

SEQ ID NO: 25179 - DNA, 20 bp, Artificial Sequence
  chemically synthesized
caacttgggtgacaaggtgt

SEQ ID NO: 25180 - DNA, 20 bp, Artificial Sequence
  chemically synthesized
cttgggtgacaaggtgtggg

SEQ ID NO: 25181 - DNA, 20 bp, Artificial Sequence
  chemically synthesized
tgacaaggtgtgggtggctg

SEQ ID NO: 25182 - DNA, 20 bp, Artificial Sequence
  chemically synthesized
gacaaggtgtgggtggctgc

SEQ ID NO: 25183 - DNA, 20 bp, Artificial Sequence
  chemically synthesized
caggtgttctccctgcatct

SEQ ID NO: 25184 - DNA, 20 bp, Artificial Sequence
  chemically synthesized
aggtgttctccctgcatctg

SEQ ID NO: 25185 - DNA, 20 bp, Artificial Sequence
  chemically synthesized
tgttctccctgcatctgagg

SEQ ID NO: 25186 - DNA, 20 bp, Artificial Sequence
  chemically synthesized
gttctccctgcatctgaggc

SEQ ID NO: 25187 - DNA, 20 bp, Artificial Sequence
  chemically synthesized
ttctccctgcatctgaggca

SEQ ID NO: 25188 - DNA, 20 bp, Artificial Sequence
  chemically synthesized
ctccctgcatctgaggcagg

SEQ ID NO: 25189 - DNA, 20 bp, Artificial Sequence
  chemically synthesized
tccctgcatctgaggcaggg

SEQ ID NO: 25190 - DNA, 20 bp, Artificial Sequence
  chemically synthesized
ctgcatctgaggcagggagg

SEQ ID NO: 25191 - DNA, 20 bp, Artificial Sequence
  chemically synthesized
atctgaggcagggaggcagc

SEQ ID NO: 25192 - DNA, 20 bp, Artificial Sequence
  chemically synthesized
tctgaggcagggaggcagct

SEQ ID NO: 25193 - DNA, 20 bp, Artificial Sequence
  chemically synthesized
ctgaggcagggaggcagctg

SEQ ID NO: 25194 - DNA, 20 bp, Artificial Sequence
  chemically synthesized
tgaggcagggaggcagctgg

SEQ ID NO: 25195 - DNA, 20 bp, Artificial Sequence
  chemically synthesized
gggaggcagctgggggcttc

SEQ ID NO: 25196 - DNA, 20 bp, Artificial Sequence
  chemically synthesized
ggcagctgggggcttccagc

SEQ ID NO: 25197 - DNA, 20 bp, Artificial Sequence
  chemically synthesized
ccagcctgtaatgcccctcc

SEQ ID NO: 25198 - DNA, 20 bp, Artificial Sequence
  chemically synthesized
cagcctgtaatgcccctccc

SEQ ID NO: 25199 - DNA, 20 bp, Artificial Sequence
  chemically synthesized
tgtaatgcccctcccaggtc

SEQ ID NO: 25200 - DNA, 20 bp, Artificial Sequence
  chemically synthesized
ccctcccaggtctagcttcc

SEQ ID NO: 25201 - DNA, 20 bp, Artificial Sequence
  chemically synthesized
agcttcctagccttattttt

SEQ ID NO: 25202 - DNA, 20 bp, Artificial Sequence
  chemically synthesized
gccttatttttaagcccttt

SEQ ID NO: 25203 - DNA, 20 bp, Artificial Sequence
  chemically synthesized
ttatttttaagcccttttag

SEQ ID NO: 25204 - DNA, 20 bp, Artificial Sequence
  chemically synthesized
atttttaagcccttttagtg

SEQ ID NO: 25205 - DNA, 20 bp, Artificial Sequence
  chemically synthesized
ttagtggagcaaaaactatt

SEQ ID NO: 25206 - DNA, 20 bp, Artificial Sequence
  chemically synthesized
caaaaactatttagaactat

SEQ ID NO: 25207 - DNA, 20 bp, Artificial Sequence
  chemically synthesized
tagaactatgagttcaaaaa

SEQ ID NO: 25208 - DNA, 20 bp, Artificial Sequence
  chemically synthesized
agaactatgagttcaaaaat

SEQ ID NO: 25209 - DNA, 20 bp, Artificial Sequence
  chemically synthesized
gttcaaaaataggattattc

SEQ ID NO: 25210 - DNA, 20 bp, Artificial Sequence
  chemically synthesized
caaaaataggattattcaag

SEQ ID NO: 25211 - DNA, 20 bp, Artificial Sequence
  chemically synthesized
aaaataggattattcaagcg

SEQ ID NO: 25212 - DNA, 20 bp, Artificial Sequence
  chemically synthesized
aaataggattattcaagcgg

SEQ ID NO: 25213 - DNA, 20 bp, Artificial Sequence
  chemically synthesized
cttcacactgttctttctct

SEQ ID NO: 25214 - DNA, 20 bp, Artificial Sequence
  chemically synthesized
ttcacactgttctttctctt

SEQ ID NO: 25215 - DNA, 20 bp, Artificial Sequence
  chemically synthesized
cactgttctttctcttggga

SEQ ID NO: 25216 - DNA, 20 bp, Artificial Sequence
  chemically synthesized
ctgttctttctcttgggaca

SEQ ID NO: 25217 - DNA, 20 bp, Artificial Sequence
  chemically synthesized
tctttctcttgggacagaga

SEQ ID NO: 25218 - DNA, 20 bp, Artificial Sequence
  chemically synthesized
ctttctcttgggacagagat

SEQ ID NO: 25219 - DNA, 20 bp, Artificial Sequence
  chemically synthesized
tttctcttgggacagagatg

SEQ ID NO: 25220 - DNA, 20 bp, Artificial Sequence
  chemically synthesized
ttctcttgggacagagatgg

SEQ ID NO: 25221 - DNA, 20 bp, Artificial Sequence
  chemically synthesized
ttgggacagagatgggggtg

SEQ ID NO: 25222 - DNA, 20 bp, Artificial Sequence
  chemically synthesized
tgggacagagatgggggtgc

SEQ ID NO: 25223 - DNA, 20 bp, Artificial Sequence
  chemically synthesized
gacagagatgggggtgcagg

SEQ ID NO: 25224 - DNA, 20 bp, Artificial Sequence
  chemically synthesized
acagagatgggggtgcaggt

SEQ ID NO: 25225 - DNA, 20 bp, Artificial Sequence
  chemically synthesized
cagagatgggggtgcaggta

SEQ ID NO: 25226 - DNA, 20 bp, Artificial Sequence
  chemically synthesized
agagatgggggtgcaggtag

SEQ ID NO: 25227 - DNA, 20 bp, Artificial Sequence
  chemically synthesized
tgggggtgcaggtaggggat

SEQ ID NO: 25228 - DNA, 20 bp, Artificial Sequence
  chemically synthesized
gtgcaggtaggggatgagaa

SEQ ID NO: 25229 - DNA, 20 bp, Artificial Sequence
  chemically synthesized
gcaggtaggggatgagaata

SEQ ID NO: 25230 - DNA, 20 bp, Artificial Sequence
  chemically synthesized
caggtaggggatgagaatag

SEQ ID NO: 25231 - DNA, 20 bp, Artificial Sequence
  chemically synthesized
gatgagaatagaggaaaatg

SEQ ID NO: 25232 - DNA, 20 bp, Artificial Sequence
  chemically synthesized
tgagaatagaggaaaatgtg

SEQ ID NO: 25233 - DNA, 20 bp, Artificial Sequence
  chemically synthesized
gagaatagaggaaaatgtgg

SEQ ID NO: 25234 - DNA, 20 bp, Artificial Sequence
  chemically synthesized
gaggattgctaaaacaaatt

SEQ ID NO: 25235 - DNA, 20 bp, Artificial Sequence
  chemically synthesized
ggattgctaaaacaaattga

SEQ ID NO: 25236 - DNA, 20 bp, Artificial Sequence
  chemically synthesized
attgctaaaacaaattgaga

SEQ ID NO: 25237 - DNA, 20 bp, Artificial Sequence
  chemically synthesized
ttgctaaaacaaattgagag

SEQ ID NO: 25238 - DNA, 20 bp, Artificial Sequence
  chemically synthesized
ctaaaacaaattgagagagg

SEQ ID NO: 25239 - DNA, 20 bp, Artificial Sequence
  chemically synthesized
taaaacaaattgagagagga

SEQ ID NO: 25240 - DNA, 20 bp, Artificial Sequence
  chemically synthesized
aacaaattgagagaggaagg

SEQ ID NO: 25241 - DNA, 20 bp, Artificial Sequence
  chemically synthesized
aattgagagaggaaggaaga

SEQ ID NO: 25242 - DNA, 20 bp, Artificial Sequence
  chemically synthesized
attgagagaggaaggaagaa

SEQ ID NO: 25243 - DNA, 20 bp, Artificial Sequence
  chemically synthesized
ttgagagaggaaggaagaaa

SEQ ID NO: 25244 - DNA, 20 bp, Artificial Sequence
  chemically synthesized
gaggaaggaagaaagggacc

SEQ ID NO: 25245 - DNA, 20 bp, Artificial Sequence
  chemically synthesized
aggaagaaagggacccagac

SEQ ID NO: 25246 - DNA, 20 bp, Artificial Sequence
  chemically synthesized
agggacccagactagtaatt

SEQ ID NO: 25247 - DNA, 20 bp, Artificial Sequence
  chemically synthesized
agtaattgagaccaattcac

SEQ ID NO: 25248 - DNA, 20 bp, Artificial Sequence
  chemically synthesized
aattgagaccaattcaccag

SEQ ID NO: 25249 - DNA, 20 bp, Artificial Sequence
  chemically synthesized
accaattcaccagaagactt

SEQ ID NO: 25250 - DNA, 20 bp, Artificial Sequence
  chemically synthesized
ccaattcaccagaagactta

SEQ ID NO: 25251 - DNA, 20 bp, Artificial Sequence
  chemically synthesized
aggaaatttgacatccgctg

SEQ ID NO: 25252 - DNA, 20 bp, Artificial Sequence
  chemically synthesized
cttttaactgtgtaattaca

SEQ ID NO: 25253 - DNA, 20 bp, Artificial Sequence
  chemically synthesized
ctgtgtaattacacagcatt

SEQ ID NO: 25254 - DNA, 20 bp, Artificial Sequence
  chemically synthesized
gtaattacacagcatttgga

SEQ ID NO: 25255 - DNA, 20 bp, Artificial Sequence
  chemically synthesized
gattgtccataacaaccatt

SEQ ID NO: 25256 - DNA, 20 bp, Artificial Sequence
  chemically synthesized
attgagtaaatacactatta

SEQ ID NO: 25257 - DNA, 20 bp, Artificial Sequence
  chemically synthesized
actattacagattgccaaaa

SEQ ID NO: 25258 - DNA, 20 bp, Artificial Sequence
  chemically synthesized
tacagattgccaaaatagta

SEQ ID NO: 25259 - DNA, 20 bp, Artificial Sequence
  chemically synthesized
attgccaaaatagtacagtg

SEQ ID NO: 25260 - DNA, 20 bp, Artificial Sequence
  chemically synthesized
aaaatagtacagtgaagcga

SEQ ID NO: 25261 - DNA, 20 bp, Artificial Sequence
  chemically synthesized
agtacagtgaagcgatggac

SEQ ID NO: 25262 - DNA, 20 bp, Artificial Sequence
  chemically synthesized
acagtgaagcgatggaccag

SEQ ID NO: 25263 - DNA, 20 bp, Artificial Sequence
  chemically synthesized
atggaccagcagccactttc

SEQ ID NO: 25264 - DNA, 20 bp, Artificial Sequence
  chemically synthesized
tggaccagcagccactttca

SEQ ID NO: 25265 - DNA, 20 bp, Artificial Sequence
  chemically synthesized
ggaccagcagccactttcaa

SEQ ID NO: 25266 - DNA, 20 bp, Artificial Sequence
  chemically synthesized
gaccagcagccactttcaag

SEQ ID NO: 25267 - DNA, 20 bp, Artificial Sequence
  chemically synthesized
aaggggctgtaatcctctcc

SEQ ID NO: 25268 - DNA, 20 bp, Artificial Sequence
  chemically synthesized
aggggctgtaatcctctcct

SEQ ID NO: 25269 - DNA, 20 bp, Artificial Sequence
  chemically synthesized
ctgtaatcctctcctgggtc

SEQ ID NO: 25270 - DNA, 20 bp, Artificial Sequence
  chemically synthesized
tgtaatcctctcctgggtca

SEQ ID NO: 25271 - DNA, 20 bp, Artificial Sequence
  chemically synthesized
ctcctgggtcaaggctgacc

SEQ ID NO: 25272 - DNA, 20 bp, Artificial Sequence
  chemically synthesized
cctgggtcaaggctgaccca

SEQ ID NO: 25273 - DNA, 20 bp, Artificial Sequence
  chemically synthesized
ctgggtcaaggctgacccag

SEQ ID NO: 25274 - DNA, 20 bp, Artificial Sequence
  chemically synthesized
aggctgacccagaggctcct

SEQ ID NO: 25275 - DNA, 20 bp, Artificial Sequence
  chemically synthesized
tgacccagaggctccttggt

SEQ ID NO: 25276 - DNA, 20 bp, Artificial Sequence
  chemically synthesized
ttggttagtgaatcatttac

SEQ ID NO: 25277 - DNA, 20 bp, Artificial Sequence
  chemically synthesized
tggttagtgaatcatttact

SEQ ID NO: 25278 - DNA, 20 bp, Artificial Sequence
  chemically synthesized
ggttagtgaatcatttacta

SEQ ID NO: 25279 - DNA, 20 bp, Artificial Sequence
  chemically synthesized
tagtgaatcatttactaggg

SEQ ID NO: 25280 - DNA, 20 bp, Artificial Sequence
  chemically synthesized
agtgaatcatttactaggga

SEQ ID NO: 25281 - DNA, 20 bp, Artificial Sequence
  chemically synthesized
ttactagggaaggtttcccc

SEQ ID NO: 25282 - DNA, 20 bp, Artificial Sequence
  chemically synthesized
aggtttcccctggtcactgc

SEQ ID NO: 25283 - DNA, 20 bp, Artificial Sequence
  chemically synthesized
cctggtcactgctggctcca

SEQ ID NO: 25284 - DNA, 20 bp, Artificial Sequence
  chemically synthesized
tcactgctggctccatggcc

SEQ ID NO: 25285 - DNA, 20 bp, Artificial Sequence
  chemically synthesized
gctccatggcctggtccttc

SEQ ID NO: 25286 - DNA, 20 bp, Artificial Sequence
  chemically synthesized
catggcctggtccttccagc

SEQ ID NO: 25287 - DNA, 20 bp, Artificial Sequence
  chemically synthesized
atggcctggtccttccagcc

SEQ ID NO: 25288 - DNA, 20 bp, Artificial Sequence
  chemically synthesized
gtccttccagccaggtcatt

SEQ ID NO: 25289 - DNA, 20 bp, Artificial Sequence
  chemically synthesized
tccagccaggtcatttagaa

SEQ ID NO: 25290 - DNA, 20 bp, Artificial Sequence
  chemically synthesized
catttagaatggctctccaa

SEQ ID NO: 25291 - DNA, 20 bp, Artificial Sequence
  chemically synthesized
atttagaatggctctccaac

SEQ ID NO: 25292 - DNA, 20 bp, Artificial Sequence
  chemically synthesized
tagaatggctctccaacagg

SEQ ID NO: 25293 - DNA, 20 bp, Artificial Sequence
  chemically synthesized
tggctctccaacaggaagaa

SEQ ID NO: 25294 - DNA, 20 bp, Artificial Sequence
  chemically synthesized
aggaagaaaagttcactgca

SEQ ID NO: 25295 - DNA, 20 bp, Artificial Sequence
  chemically synthesized
ttgaatcctaattatttatt

SEQ ID NO: 25296 - DNA, 20 bp, Artificial Sequence
  chemically synthesized
tgaatcctaattatttattg

SEQ ID NO: 25297 - DNA, 20 bp, Artificial Sequence
  chemically synthesized
gaatcctaattatttattga

SEQ ID NO: 25298 - DNA, 20 bp, Artificial Sequence
  chemically synthesized
aatcctaattatttattgag

SEQ ID NO: 25299 - DNA, 20 bp, Artificial Sequence
  chemically synthesized
ttgaggggctcttctttgcc

SEQ ID NO: 25300 - DNA, 20 bp, Artificial Sequence
  chemically synthesized
gggctcttctttgcccagca

SEQ ID NO: 25301 - DNA, 20 bp, Artificial Sequence
  chemically synthesized
ttctttgcccagcatggtgc

SEQ ID NO: 25302 - DNA, 20 bp, Artificial Sequence
  chemically synthesized
ttgcccagcatggtgctgga

SEQ ID NO: 25303 - DNA, 20 bp, Artificial Sequence
  chemically synthesized
ccagcatggtgctggacagt

SEQ ID NO: 25304 - DNA, 20 bp, Artificial Sequence
  chemically synthesized
agcatggtgctggacagtca

SEQ ID NO: 25305 - DNA, 20 bp, Artificial Sequence
  chemically synthesized
gcatggtgctggacagtcag

SEQ ID NO: 25306 - DNA, 20 bp, Artificial Sequence
  chemically synthesized
tggtgctggacagtcagagg

SEQ ID NO: 25307 - DNA, 20 bp, Artificial Sequence
  chemically synthesized
acagtcagaggtagaccact

SEQ ID NO: 25308 - DNA, 20 bp, Artificial Sequence
  chemically synthesized
agaggtagaccactgagtct

SEQ ID NO: 25309 - DNA, 20 bp, Artificial Sequence
  chemically synthesized
gaccactgagtcttggttct

SEQ ID NO: 25310 - DNA, 20 bp, Artificial Sequence
  chemically synthesized
cactgagtcttggttcttag

SEQ ID NO: 25311 - DNA, 20 bp, Artificial Sequence
  chemically synthesized
tcttagaagccttgaacttt

SEQ ID NO: 25312 - DNA, 20 bp, Artificial Sequence
  chemically synthesized
agaagccttgaacttttagt

SEQ ID NO: 25313 - DNA, 20 bp, Artificial Sequence
  chemically synthesized
aagccttgaacttttagttg

SEQ ID NO: 25314 - DNA, 20 bp, Artificial Sequence
  chemically synthesized
tgaacttttagttggagaac

SEQ ID NO: 25315 - DNA, 20 bp, Artificial Sequence
  chemically synthesized
acttttagttggagaaccag

SEQ ID NO: 25316 - DNA, 20 bp, Artificial Sequence
  chemically synthesized
tttagttggagaaccagtgg

SEQ ID NO: 25317 - DNA, 20 bp, Artificial Sequence
  chemically synthesized
tggtagatacatgctgatta

SEQ ID NO: 25318 - DNA, 20 bp, Artificial Sequence
  chemically synthesized
ggtagatacatgctgattac

SEQ ID NO: 25319 - DNA, 20 bp, Artificial Sequence
  chemically synthesized
gtagatacatgctgattaca

SEQ ID NO: 25320 - DNA, 20 bp, Artificial Sequence
  chemically synthesized
agatacatgctgattacagg

SEQ ID NO: 25321 - DNA, 20 bp, Artificial Sequence
  chemically synthesized
atgctgattacagggagact

SEQ ID NO: 25322 - DNA, 20 bp, Artificial Sequence
  chemically synthesized
attacagggagacttggatc

SEQ ID NO: 25323 - DNA, 20 bp, Artificial Sequence
  chemically synthesized
ttacagggagacttggatcc

SEQ ID NO: 25324 - DNA, 20 bp, Artificial Sequence
  chemically synthesized
acagggagacttggatccag

SEQ ID NO: 25325 - DNA, 20 bp, Artificial Sequence
  chemically synthesized
agacttggatccaggagaaa

SEQ ID NO: 25326 - DNA, 20 bp, Artificial Sequence
  chemically synthesized
acttggatccaggagaaatg

SEQ ID NO: 25327 - DNA, 20 bp, Artificial Sequence
  chemically synthesized
tggatccaggagaaatggag

SEQ ID NO: 25328 - DNA, 20 bp, Artificial Sequence
  chemically synthesized
gatccaggagaaatggagtg

SEQ ID NO: 25329 - DNA, 20 bp, Artificial Sequence
  chemically synthesized
tccaggagaaatggagtgga

SEQ ID NO: 25330 - DNA, 20 bp, Artificial Sequence
  chemically synthesized
ggagaaatggagtggagagc

SEQ ID NO: 25331 - DNA, 20 bp, Artificial Sequence
  chemically synthesized
gagaaatggagtggagagcc

SEQ ID NO: 25332 - DNA, 20 bp, Artificial Sequence
  chemically synthesized
atggagtggagagccaggtt

SEQ ID NO: 25333 - DNA, 20 bp, Artificial Sequence
  chemically synthesized
gagtggagagccaggttcag

SEQ ID NO: 25334 - DNA, 20 bp, Artificial Sequence
  chemically synthesized
gtggagagccaggttcagaa

SEQ ID NO: 25335 - DNA, 20 bp, Artificial Sequence
  chemically synthesized
ggagagccaggttcagaaga

SEQ ID NO: 25336 - DNA, 20 bp, Artificial Sequence
  chemically synthesized
gaagagagacatatccttta

SEQ ID NO: 25337 - DNA, 20 bp, Artificial Sequence
  chemically synthesized
aagagagacatatcctttac

SEQ ID NO: 25338 - DNA, 20 bp, Artificial Sequence
  chemically synthesized
ttacaggcctttgtgttacc

SEQ ID NO: 25339 - DNA, 20 bp, Artificial Sequence
  chemically synthesized
aggcctttgtgttacctagc

SEQ ID NO: 25340 - DNA, 20 bp, Artificial Sequence
  chemically synthesized
agccagtgccttcatgtccc

SEQ ID NO: 25341 - DNA, 20 bp, Artificial Sequence
  chemically synthesized
ccttcatgtccccagccccc

SEQ ID NO: 25342 - DNA, 20 bp, Artificial Sequence
  chemically synthesized
gtccccagccccctggcctc

SEQ ID NO: 25343 - DNA, 20 bp, Artificial Sequence
  chemically synthesized
tcccccctcctcgctgtcct

SEQ ID NO: 25344 - DNA, 20 bp, Artificial Sequence
  chemically synthesized
cctcctcgctgtccttggtg

SEQ ID NO: 25345 - DNA, 20 bp, Artificial Sequence
  chemically synthesized
tcctcgctgtccttggtgca

SEQ ID NO: 25346 - DNA, 20 bp, Artificial Sequence
  chemically synthesized
tcgctgtccttggtgcagag

SEQ ID NO: 25347 - DNA, 20 bp, Artificial Sequence
  chemically synthesized
cgctgtccttggtgcagagt

SEQ ID NO: 25348 - DNA, 20 bp, Artificial Sequence
  chemically synthesized
gctgtccttggtgcagagtg

SEQ ID NO: 25349 - DNA, 20 bp, Artificial Sequence
  chemically synthesized
gtccttggtgcagagtgggg

SEQ ID NO: 25350 - DNA, 20 bp, Artificial Sequence
  chemically synthesized
gcagagtggggcagtcatct

SEQ ID NO: 25351 - DNA, 20 bp, Artificial Sequence
  chemically synthesized
gagtggggcagtcatctcag

SEQ ID NO: 25352 - DNA, 20 bp, Artificial Sequence
  chemically synthesized
agtggggcagtcatctcagt

SEQ ID NO: 25353 - DNA, 20 bp, Artificial Sequence
  chemically synthesized
gtggggcagtcatctcagtg

SEQ ID NO: 25354 - DNA, 20 bp, Artificial Sequence
  chemically synthesized
atctcagtggggcctcctcc

SEQ ID NO: 25355 - DNA, 20 bp, Artificial Sequence
  chemically synthesized
tctcagtggggcctcctccc

SEQ ID NO: 25356 - DNA, 20 bp, Artificial Sequence
  chemically synthesized
ctcagtggggcctcctcccg

SEQ ID NO: 25357 - DNA, 20 bp, Artificial Sequence
  chemically synthesized
agtggggcctcctcccgggg

SEQ ID NO: 25358 - DNA, 20 bp, Artificial Sequence
  chemically synthesized
cctcctcccggggaagtcca

SEQ ID NO: 25359 - DNA, 20 bp, Artificial Sequence
  chemically synthesized
gtccacagcttgctccacac

SEQ ID NO: 25360 - DNA, 20 bp, Artificial Sequence
  chemically synthesized
ccacagcttgctccacaccg

SEQ ID NO: 25361 - DNA, 20 bp, Artificial Sequence
  chemically synthesized
cacagcttgctccacaccgg

SEQ ID NO: 25362 - DNA, 20 bp, Artificial Sequence
  chemically synthesized
cagcttgctccacaccggag

SEQ ID NO: 25363 - DNA, 20 bp, Artificial Sequence
  chemically synthesized
ccacaccggaggagccgcca

SEQ ID NO: 25364 - DNA, 20 bp, Artificial Sequence
  chemically synthesized
accggaggagccgccaaagt

SEQ ID NO: 25365 - DNA, 20 bp, Artificial Sequence
  chemically synthesized
aggagccgccaaagtcagcc

SEQ ID NO: 25366 - DNA, 20 bp, Artificial Sequence
  chemically synthesized
gagccgccaaagtcagccaa

SEQ ID NO: 25367 - DNA, 20 bp, Artificial Sequence
  chemically synthesized
ccaaagtcagccaagagccg

SEQ ID NO: 25368 - DNA, 20 bp, Artificial Sequence
  chemically synthesized
caaagtcagccaagagccgc

SEQ ID NO: 25369 - DNA, 20 bp, Artificial Sequence
  chemically synthesized
agccgcaggccataaatgca

SEQ ID NO: 25370 - DNA, 20 bp, Artificial Sequence
  chemically synthesized
tgcaaagtatgatttaacaa

SEQ ID NO: 25371 - DNA, 20 bp, Artificial Sequence
  chemically synthesized
aaagtatgatttaacaaaag

SEQ ID NO: 25372 - DNA, 20 bp, Artificial Sequence
  chemically synthesized
atttaacaaaagcagctttt

SEQ ID NO: 25373 - DNA, 20 bp, Artificial Sequence
  chemically synthesized
aacaaaagcagcttttgagt

SEQ ID NO: 25374 - DNA, 20 bp, Artificial Sequence
  chemically synthesized
aaagcagcttttgagtgaga

SEQ ID NO: 25375 - DNA, 20 bp, Artificial Sequence
  chemically synthesized
agcttttgagtgagaaagct

SEQ ID NO: 25376 - DNA, 20 bp, Artificial Sequence
  chemically synthesized
ttttgagtgagaaagctgag

SEQ ID NO: 25377 - DNA, 20 bp, Artificial Sequence
  chemically synthesized
ttgagtgagaaagctgagtg

SEQ ID NO: 25378 - DNA, 20 bp, Artificial Sequence
  chemically synthesized
ttgtcccaacctgtcaactt

SEQ ID NO: 25379 - DNA, 20 bp, Artificial Sequence
  chemically synthesized
cctccccataaatcaaaaaa

SEQ ID NO: 25380 - DNA, 20 bp, Artificial Sequence
  chemically synthesized
cccataaatcaaaaaacggt

SEQ ID NO: 25381 - DNA, 20 bp, Artificial Sequence
  chemically synthesized
ataaatcaaaaaacggttgg

SEQ ID NO: 25382 - DNA, 20 bp, Artificial Sequence
  chemically synthesized
aatcaaaaaacggttggtgg

SEQ ID NO: 25383 - DNA, 20 bp, Artificial Sequence
  chemically synthesized
atcaaaaaacggttggtgga

SEQ ID NO: 25384 - DNA, 20 bp, Artificial Sequence
  chemically synthesized
tcaaaaaacggttggtggaa

SEQ ID NO: 25385 - DNA, 20 bp, Artificial Sequence
  chemically synthesized
aaaaaacggttggtggaagg

SEQ ID NO: 25386 - DNA, 20 bp, Artificial Sequence
  chemically synthesized
aaaaacggttggtggaaggg

SEQ ID NO: 25387 - DNA, 20 bp, Artificial Sequence
  chemically synthesized
aaaacggttggtggaaggga

SEQ ID NO: 25388 - DNA, 20 bp, Artificial Sequence
  chemically synthesized
cggttggtggaagggaggga

SEQ ID NO: 25389 - DNA, 20 bp, Artificial Sequence
  chemically synthesized
ttggtggaagggagggacag

SEQ ID NO: 25390 - DNA, 20 bp, Artificial Sequence
  chemically synthesized
ggacagaagcgtttcatttt

SEQ ID NO: 25391 - DNA, 20 bp, Artificial Sequence
  chemically synthesized
gtttcattttcagattttgt

SEQ ID NO: 25392 - DNA, 20 bp, Artificial Sequence
  chemically synthesized
agaaaataaaataaaatcaa

SEQ ID NO: 25393 - DNA, 20 bp, Artificial Sequence
  chemically synthesized
cacgctgataccttacatgc

SEQ ID NO: 25394 - DNA, 20 bp, Artificial Sequence
  chemically synthesized
acgctgataccttacatgcc

SEQ ID NO: 25395 - DNA, 20 bp, Artificial Sequence
  chemically synthesized
ataccttacatgccaggttt

SEQ ID NO: 25396 - DNA, 20 bp, Artificial Sequence
  chemically synthesized
tacatgccaggtttgagcct

SEQ ID NO: 25397 - DNA, 20 bp, Artificial Sequence
  chemically synthesized
acatgccaggtttgagcctg

SEQ ID NO: 25398 - DNA, 20 bp, Artificial Sequence
  chemically synthesized
gagcctgaggcaaatttttg

SEQ ID NO: 25399 - DNA, 20 bp, Artificial Sequence
  chemically synthesized
aatttttgtggccatgtaat

SEQ ID NO: 25400 - DNA, 20 bp, Artificial Sequence
  chemically synthesized
tgtaataagcctctttaaaa

SEQ ID NO: 25401 - DNA, 20 bp, Artificial Sequence
  chemically synthesized
aagcctctttaaaatggtga

SEQ ID NO: 25402 - DNA, 20 bp, Artificial Sequence
  chemically synthesized
gccttgaattacattgataa

SEQ ID NO: 25403 - DNA, 20 bp, Artificial Sequence
  chemically synthesized
taaaagacattttattgcat

SEQ ID NO: 25404 - DNA, 20 bp, Artificial Sequence
  chemically synthesized
aaagacattttattgcatta

SEQ ID NO: 25405 - DNA, 20 bp, Artificial Sequence
  chemically synthesized
acattttattgcattagagc

SEQ ID NO: 25406 - DNA, 20 bp, Artificial Sequence
  chemically synthesized
cattttattgcattagagct

SEQ ID NO: 25407 - DNA, 20 bp, Artificial Sequence
  chemically synthesized
attttattgcattagagctg

SEQ ID NO: 25408 - DNA, 20 bp, Artificial Sequence
  chemically synthesized
ttattgcattagagctgggg

SEQ ID NO: 25409 - DNA, 20 bp, Artificial Sequence
  chemically synthesized
tattgcattagagctggggc

SEQ ID NO: 25410 - DNA, 20 bp, Artificial Sequence
  chemically synthesized
ttgcattagagctggggcag

SEQ ID NO: 25411 - DNA, 20 bp, Artificial Sequence
  chemically synthesized
ttagagctggggcaggagta

SEQ ID NO: 25412 - DNA, 20 bp, Artificial Sequence
  chemically synthesized
tagagctggggcaggagtac

SEQ ID NO: 25413 - DNA, 20 bp, Artificial Sequence
  chemically synthesized
gctggggcaggagtacagga

SEQ ID NO: 25414 - DNA, 20 bp, Artificial Sequence
  chemically synthesized
agtacaggacggttcttgcc

SEQ ID NO: 25415 - DNA, 20 bp, Artificial Sequence
  chemically synthesized
caggacggttcttgcctggt

SEQ ID NO: 25416 - DNA, 20 bp, Artificial Sequence
  chemically synthesized
cggcctctttgaaaccgcgt

SEQ ID NO: 25417 - DNA, 20 bp, Artificial Sequence
  chemically synthesized
ccacactctccaccgcctga

SEQ ID NO: 25418 - DNA, 20 bp, Artificial Sequence
  chemically synthesized
cacactctccaccgcctgac

SEQ ID NO: 25419 - DNA, 20 bp, Artificial Sequence
  chemically synthesized
acactctccaccgcctgaca

SEQ ID NO: 25420 - DNA, 20 bp, Artificial Sequence
  chemically synthesized
tccaccgcctgacagggttt

SEQ ID NO: 25421 - DNA, 20 bp, Artificial Sequence
  chemically synthesized
ctgacagggtttgagtgcga

SEQ ID NO: 25422 - DNA, 20 bp, Artificial Sequence
  chemically synthesized
acagggtttgagtgcgatgg

SEQ ID NO: 25423 - DNA, 20 bp, Artificial Sequence
  chemically synthesized
gtttgagtgcgatggcagct

SEQ ID NO: 25424 - DNA, 20 bp, Artificial Sequence
  chemically synthesized
gcgatggcagctgagatctg

SEQ ID NO: 25425 - DNA, 20 bp, Artificial Sequence
  chemically synthesized
cgatggcagctgagatctgt

SEQ ID NO: 25426 - DNA, 20 bp, Artificial Sequence
  chemically synthesized
ggcagctgagatctgtgggc

SEQ ID NO: 25427 - DNA, 20 bp, Artificial Sequence
  chemically synthesized
tgagatctgtgggccggtga

SEQ ID NO: 25428 - DNA, 20 bp, Artificial Sequence
  chemically synthesized
agatctgtgggccggtgaca

SEQ ID NO: 25429 - DNA, 20 bp, Artificial Sequence
  chemically synthesized
gatctgtgggccggtgacag

SEQ ID NO: 25430 - DNA, 20 bp, Artificial Sequence
  chemically synthesized
atctgtgggccggtgacaga

SEQ ID NO: 25431 - DNA, 20 bp, Artificial Sequence
  chemically synthesized
tctgtgggccggtgacagag

SEQ ID NO: 25432 - DNA, 20 bp, Artificial Sequence
  chemically synthesized
ctgtgggccggtgacagagg

SEQ ID NO: 25433 - DNA, 20 bp, Artificial Sequence
  chemically synthesized
gacagagggggctttctacc

SEQ ID NO: 25434 - DNA, 20 bp, Artificial Sequence
  chemically synthesized
agagggggctttctacccag

SEQ ID NO: 25435 - DNA, 20 bp, Artificial Sequence
  chemically synthesized
gggggctttctacccagcag

SEQ ID NO: 25436 - DNA, 20 bp, Artificial Sequence
  chemically synthesized
ggctttctacccagcagtag

SEQ ID NO: 25437 - DNA, 20 bp, Artificial Sequence
  chemically synthesized
gctttctacccagcagtaga

SEQ ID NO: 25438 - DNA, 20 bp, Artificial Sequence
  chemically synthesized
ctacccagcagtagaaggtt

SEQ ID NO: 25439 - DNA, 20 bp, Artificial Sequence
  chemically synthesized
tacccagcagtagaaggttg

SEQ ID NO: 25440 - DNA, 20 bp, Artificial Sequence
  chemically synthesized
gcagtagaaggttgaggccc

SEQ ID NO: 25441 - DNA, 20 bp, Artificial Sequence
  chemically synthesized
gtagaaggttgaggccctgg

SEQ ID NO: 25442 - DNA, 20 bp, Artificial Sequence
  chemically synthesized
ggttgaggccctggaagcaa

SEQ ID NO: 25443 - DNA, 20 bp, Artificial Sequence
  chemically synthesized
gttgaggccctggaagcaaa

SEQ ID NO: 25444 - DNA, 20 bp, Artificial Sequence
  chemically synthesized
ccctggaagcaaaaggattt

SEQ ID NO: 25445 - DNA, 20 bp, Artificial Sequence
  chemically synthesized
aagcaaaaggatttcagcct

SEQ ID NO: 25446 - DNA, 20 bp, Artificial Sequence
  chemically synthesized
agcaaaaggatttcagcctg

SEQ ID NO: 25447 - DNA, 20 bp, Artificial Sequence
  chemically synthesized
gcaaaaggatttcagcctga

SEQ ID NO: 25448 - DNA, 20 bp, Artificial Sequence
  chemically synthesized
caaaaggatttcagcctgag

SEQ ID NO: 25449 - DNA, 20 bp, Artificial Sequence
  chemically synthesized
ttcagcctgaggggcttgtt

SEQ ID NO: 25450 - DNA, 20 bp, Artificial Sequence
  chemically synthesized
tcagcctgaggggcttgtta

SEQ ID NO: 25451 - DNA, 20 bp, Artificial Sequence
  chemically synthesized
cagcctgaggggcttgttaa

SEQ ID NO: 25452 - DNA, 20 bp, Artificial Sequence
  chemically synthesized
gcctgaggggcttgttaagg

SEQ ID NO: 25453 - DNA, 20 bp, Artificial Sequence
  chemically synthesized
ctgaggggcttgttaaggga

SEQ ID NO: 25454 - DNA, 20 bp, Artificial Sequence
  chemically synthesized
gagttattctttcctgttcc

SEQ ID NO: 25455 - DNA, 20 bp, Artificial Sequence
  chemically synthesized
ttattctttcctgttcctag

SEQ ID NO: 25456 - DNA, 20 bp, Artificial Sequence
  chemically synthesized
ttcctgttcctagtagacct

SEQ ID NO: 25457 - DNA, 20 bp, Artificial Sequence
  chemically synthesized
cctgttcctagtagacctga

SEQ ID NO: 25458 - DNA, 20 bp, Artificial Sequence
  chemically synthesized
tgttcctagtagacctgaga

SEQ ID NO: 25459 - DNA, 20 bp, Artificial Sequence
  chemically synthesized
gacctgagagagcttgacgt

SEQ ID NO: 25460 - DNA, 20 bp, Artificial Sequence
  chemically synthesized
ctgagagagcttgacgttgg

SEQ ID NO: 25461 - DNA, 20 bp, Artificial Sequence
  chemically synthesized
agcttgacgttggtggcctc

SEQ ID NO: 25462 - DNA, 20 bp, Artificial Sequence
  chemically synthesized
tgacgttggtggcctctggt

SEQ ID NO: 25463 - DNA, 20 bp, Artificial Sequence
  chemically synthesized
gtggcctctggtcagcctca

SEQ ID NO: 25464 - DNA, 20 bp, Artificial Sequence
  chemically synthesized
cctctggtcagcctcatggt

SEQ ID NO: 25465 - DNA, 20 bp, Artificial Sequence
  chemically synthesized
ctctggtcagcctcatggtt

SEQ ID NO: 25466 - DNA, 20 bp, Artificial Sequence
  chemically synthesized
gcctcatggttgggactgcg

SEQ ID NO: 25467 - DNA, 20 bp, Artificial Sequence
  chemically synthesized
ttgggactgcgtggaaatgc

SEQ ID NO: 25468 - DNA, 20 bp, Artificial Sequence
  chemically synthesized
tgcgtggaaatgctagacct

SEQ ID NO: 25469 - DNA, 20 bp, Artificial Sequence
  chemically synthesized
cgtggaaatgctagacctga

SEQ ID NO: 25470 - DNA, 20 bp, Artificial Sequence
  chemically synthesized
cctgagagacctcatttccc

SEQ ID NO: 25471 - DNA, 20 bp, Artificial Sequence
  chemically synthesized
gagagacctcatttcccaag

SEQ ID NO: 25472 - DNA, 20 bp, Artificial Sequence
  chemically synthesized
cctcatttcccaagcagtct

SEQ ID NO: 25473 - DNA, 20 bp, Artificial Sequence
  chemically synthesized
tcatttcccaagcagtctta

SEQ ID NO: 25474 - DNA, 20 bp, Artificial Sequence
  chemically synthesized
atttcccaagcagtcttaga

SEQ ID NO: 25475 - DNA, 20 bp, Artificial Sequence
  chemically synthesized
gagagactcaaaacaaaaaa

SEQ ID NO: 25476 - DNA, 20 bp, Artificial Sequence
  chemically synthesized
tcaaaacaaaaaatggtctc

SEQ ID NO: 25477 - DNA, 20 bp, Artificial Sequence
  chemically synthesized
caaaacaaaaaatggtctcc

SEQ ID NO: 25478 - DNA, 20 bp, Artificial Sequence
  chemically synthesized
atggtctccgggtcccaccg

SEQ ID NO: 25479 - DNA, 20 bp, Artificial Sequence
  chemically synthesized
ccgggtcccaccgtggtgtg

SEQ ID NO: 25480 - DNA, 20 bp, Artificial Sequence
  chemically synthesized
gtgtgtggccgctgtgcccg

SEQ ID NO: 25481 - DNA, 20 bp, Artificial Sequence
  chemically synthesized
gtgtggccgctgtgcccgca

SEQ ID NO: 25482 - DNA, 20 bp, Artificial Sequence
  chemically synthesized
tgtggccgctgtgcccgcag

SEQ ID NO: 25483 - DNA, 20 bp, Artificial Sequence
  chemically synthesized
gccgctgtgcccgcagaggc

SEQ ID NO: 25484 - DNA, 20 bp, Artificial Sequence
  chemically synthesized
ccgctgtgcccgcagaggcc

SEQ ID NO: 25485 - DNA, 20 bp, Artificial Sequence
  chemically synthesized
ccgcagaggccaggtgtcca

SEQ ID NO: 25486 - DNA, 20 bp, Artificial Sequence
  chemically synthesized
cgcagaggccaggtgtccat

SEQ ID NO: 25487 - DNA, 20 bp, Artificial Sequence
  chemically synthesized
aggccaggtgtccataggct

SEQ ID NO: 25488 - DNA, 20 bp, Artificial Sequence
  chemically synthesized
ccataggctgagtccccacg

SEQ ID NO: 25489 - DNA, 20 bp, Artificial Sequence
  chemically synthesized
gagtccccacgtggacctgc

SEQ ID NO: 25490 - DNA, 20 bp, Artificial Sequence
  chemically synthesized
agtccccacgtggacctgct

SEQ ID NO: 25491 - DNA, 20 bp, Artificial Sequence
  chemically synthesized
ccccacgtggacctgctagg

SEQ ID NO: 25492 - DNA, 20 bp, Artificial Sequence
  chemically synthesized
cccacgtggacctgctaggt

SEQ ID NO: 25493 - DNA, 20 bp, Artificial Sequence
  chemically synthesized
acgtggacctgctaggtggg

SEQ ID NO: 25494 - DNA, 20 bp, Artificial Sequence
  chemically synthesized
ggacctgctaggtgggtaga

SEQ ID NO: 25495 - DNA, 20 bp, Artificial Sequence
  chemically synthesized
gacctgctaggtgggtagaa

SEQ ID NO: 25496 - DNA, 20 bp, Artificial Sequence
  chemically synthesized
cctgctaggtgggtagaaag

SEQ ID NO: 25497 - DNA, 20 bp, Artificial Sequence
  chemically synthesized
aggtgggtagaaaggagttg

SEQ ID NO: 25498 - DNA, 20 bp, Artificial Sequence
  chemically synthesized
agttgaagatgttgtgctgt

SEQ ID NO: 25499 - DNA, 20 bp, Artificial Sequence
  chemically synthesized
gaagatgttgtgctgttggt

SEQ ID NO: 25500 - DNA, 20 bp, Artificial Sequence
  chemically synthesized
agatgttgtgctgttggttg

SEQ ID NO: 25501 - DNA, 20 bp, Artificial Sequence
  chemically synthesized
gatgttgtgctgttggttgg

SEQ ID NO: 25502 - DNA, 20 bp, Artificial Sequence
  chemically synthesized
tgttgtgctgttggttggag

SEQ ID NO: 25503 - DNA, 20 bp, Artificial Sequence
  chemically synthesized
tgctgttggttggaggagct

SEQ ID NO: 25504 - DNA, 20 bp, Artificial Sequence
  chemically synthesized
ctgttggttggaggagcttg

SEQ ID NO: 25505 - DNA, 20 bp, Artificial Sequence
  chemically synthesized
tgttggttggaggagcttgg

SEQ ID NO: 25506 - DNA, 20 bp, Artificial Sequence
  chemically synthesized
tggaggagcttggaggtgtc

SEQ ID NO: 25507 - DNA, 20 bp, Artificial Sequence
  chemically synthesized
ggaggagcttggaggtgtct

SEQ ID NO: 25508 - DNA, 20 bp, Artificial Sequence
  chemically synthesized
ttggaggtgtctgggaacat

SEQ ID NO: 25509 - DNA, 20 bp, Artificial Sequence
  chemically synthesized
aacattggatgttactcata

SEQ ID NO: 25510 - DNA, 20 bp, Artificial Sequence
  chemically synthesized
ggatgttactcatatggaat

SEQ ID NO: 25511 - DNA, 20 bp, Artificial Sequence
  chemically synthesized
tgttactcatatggaatcag

SEQ ID NO: 25512 - DNA, 20 bp, Artificial Sequence
  chemically synthesized
tcatatggaatcagcagaat

SEQ ID NO: 25513 - DNA, 20 bp, Artificial Sequence
  chemically synthesized
tatggaatcagcagaattag

SEQ ID NO: 25514 - DNA, 20 bp, Artificial Sequence
  chemically synthesized
tggaatcagcagaattagta

SEQ ID NO: 25515 - DNA, 20 bp, Artificial Sequence
  chemically synthesized
tcagcagaattagtagagcc

SEQ ID NO: 25516 - DNA, 20 bp, Artificial Sequence
  chemically synthesized
agaattagtagagccaagaa

SEQ ID NO: 25517 - DNA, 20 bp, Artificial Sequence
  chemically synthesized
ttagtagagccaagaacaga

SEQ ID NO: 25518 - DNA, 20 bp, Artificial Sequence
  chemically synthesized
gtagagccaagaacagacgg

SEQ ID NO: 25519 - DNA, 20 bp, Artificial Sequence
  chemically synthesized
gacggcagtgccacacccca

SEQ ID NO: 25520 - DNA, 20 bp, Artificial Sequence
  chemically synthesized
gcagtgccacaccccatggc

SEQ ID NO: 25521 - DNA, 20 bp, Artificial Sequence
  chemically synthesized
ccacaccccatggctggact

SEQ ID NO: 25522 - DNA, 20 bp, Artificial Sequence
  chemically synthesized
cacaccccatggctggactg

SEQ ID NO: 25523 - DNA, 20 bp, Artificial Sequence
  chemically synthesized
gactgaggctgctccaatga

SEQ ID NO: 25524 - DNA, 20 bp, Artificial Sequence
  chemically synthesized
tgaggctgctccaatgatgg

SEQ ID NO: 25525 - DNA, 20 bp, Artificial Sequence
  chemically synthesized
gaggctgctccaatgatggc

SEQ ID NO: 25526 - DNA, 20 bp, Artificial Sequence
  chemically synthesized
atgatggcaggttgtatctg

SEQ ID NO: 25527 - DNA, 20 bp, Artificial Sequence
  chemically synthesized
tgatggcaggttgtatctgc

SEQ ID NO: 25528 - DNA, 20 bp, Artificial Sequence
  chemically synthesized
gcgggcatctccaatttgct

SEQ ID NO: 25529 - DNA, 20 bp, Artificial Sequence
  chemically synthesized
cgggcatctccaatttgctc

SEQ ID NO: 25530 - DNA, 20 bp, Artificial Sequence
  chemically synthesized
gggcatctccaatttgctca

SEQ ID NO: 25531 - DNA, 20 bp, Artificial Sequence
  chemically synthesized
tttgctcagggaactctttc

SEQ ID NO: 25532 - DNA, 20 bp, Artificial Sequence
  chemically synthesized
tcagggaactctttccagat

SEQ ID NO: 25533 - DNA, 20 bp, Artificial Sequence
  chemically synthesized
ggaactctttccagattggt

SEQ ID NO: 25534 - DNA, 20 bp, Artificial Sequence
  chemically synthesized
actctttccagattggtcag

SEQ ID NO: 25535 - DNA, 20 bp, Artificial Sequence
  chemically synthesized
attggtcagtggtataaatg

SEQ ID NO: 25536 - DNA, 20 bp, Artificial Sequence
  chemically synthesized
ttggtcagtggtataaatga

SEQ ID NO: 25537 - DNA, 20 bp, Artificial Sequence
  chemically synthesized
cagtggtataaatgaaggat

SEQ ID NO: 25538 - DNA, 20 bp, Artificial Sequence
  chemically synthesized
agtggtataaatgaaggatt

SEQ ID NO: 25539 - DNA, 20 bp, Artificial Sequence
  chemically synthesized
taaatgaaggattaggaaat

SEQ ID NO: 25540 - DNA, 20 bp, Artificial Sequence
  chemically synthesized
aaatgaaggattaggaaatt

SEQ ID NO: 25541 - DNA, 20 bp, Artificial Sequence
  chemically synthesized
ggattaggaaattgggtaaa

SEQ ID NO: 25542 - DNA, 20 bp, Artificial Sequence
  chemically synthesized
taggaaattgggtaaaaagc

SEQ ID NO: 25543 - DNA, 20 bp, Artificial Sequence
  chemically synthesized
aggaaattgggtaaaaagcc

SEQ ID NO: 25544 - DNA, 20 bp, Artificial Sequence
  chemically synthesized
ggaaattgggtaaaaagcca

SEQ ID NO: 25545 - DNA, 20 bp, Artificial Sequence
  chemically synthesized
aaattgggtaaaaagccagg

SEQ ID NO: 25546 - DNA, 20 bp, Artificial Sequence
  chemically synthesized
aattgggtaaaaagccaggg

SEQ ID NO: 25547 - DNA, 20 bp, Artificial Sequence
  chemically synthesized
ttgggtaaaaagccagggag

SEQ ID NO: 25548 - DNA, 20 bp, Artificial Sequence
  chemically synthesized
tgggtaaaaagccagggagg

SEQ ID NO: 25549 - DNA, 20 bp, Artificial Sequence
  chemically synthesized
gggtaaaaagccagggagga

SEQ ID NO: 25550 - DNA, 20 bp, Artificial Sequence
  chemically synthesized
aaaaaaaaaaacaaaaaaca

SEQ ID NO: 25551 - DNA, 20 bp, Artificial Sequence
  chemically synthesized
acaaaaaacaaagcacgtca

SEQ ID NO: 25552 - DNA, 20 bp, Artificial Sequence
  chemically synthesized
aaacaaagcacgtcaaagcc

SEQ ID NO: 25553 - DNA, 20 bp, Artificial Sequence
  chemically synthesized
aacaaagcacgtcaaagcca

SEQ ID NO: 25554 - DNA, 20 bp, Artificial Sequence
  chemically synthesized
aaggcctgtgttttgttctg

SEQ ID NO: 25555 - DNA, 20 bp, Artificial Sequence
  chemically synthesized
aggcctgtgttttgttctgt

SEQ ID NO: 25556 - DNA, 20 bp, Artificial Sequence
  chemically synthesized
tttgttctgtgggactttgc

SEQ ID NO: 25557 - DNA, 20 bp, Artificial Sequence
  chemically synthesized
tgttctgtgggactttgcca

SEQ ID NO: 25558 - DNA, 20 bp, Artificial Sequence
  chemically synthesized
ttctgtgggactttgccaga

SEQ ID NO: 25559 - DNA, 20 bp, Artificial Sequence
  chemically synthesized
tgggactttgccagagagat

SEQ ID NO: 25560 - DNA, 20 bp, Artificial Sequence
  chemically synthesized
gggactttgccagagagatg

SEQ ID NO: 25561 - DNA, 20 bp, Artificial Sequence
  chemically synthesized
ttgccagagagatgaggact

SEQ ID NO: 25562 - DNA, 20 bp, Artificial Sequence
  chemically synthesized
tgccagagagatgaggactg

SEQ ID NO: 25563 - DNA, 20 bp, Artificial Sequence
  chemically synthesized
agagagatgaggactgaggc

SEQ ID NO: 25564 - DNA, 20 bp, Artificial Sequence
  chemically synthesized
gagagatgaggactgaggct

SEQ ID NO: 25565 - DNA, 20 bp, Artificial Sequence
  chemically synthesized
aggctgggctgctgtgtgcc

SEQ ID NO: 25566 - DNA, 20 bp, Artificial Sequence
  chemically synthesized
ggctgggctgctgtgtgcct

SEQ ID NO: 25567 - DNA, 20 bp, Artificial Sequence
  chemically synthesized
ctgggctgctgtgtgcctgg

SEQ ID NO: 25568 - DNA, 20 bp, Artificial Sequence
  chemically synthesized
tgggctgctgtgtgcctggg

SEQ ID NO: 25569 - DNA, 20 bp, Artificial Sequence
  chemically synthesized
gctgctgtgtgcctgggagg

SEQ ID NO: 25570 - DNA, 20 bp, Artificial Sequence
  chemically synthesized
ctgctgtgtgcctgggaggc

SEQ ID NO: 25571 - DNA, 20 bp, Artificial Sequence
  chemically synthesized
ctgtgtgcctgggaggcggg

SEQ ID NO: 25572 - DNA, 20 bp, Artificial Sequence
  chemically synthesized
tgtgtgcctgggaggcggga

SEQ ID NO: 25573 - DNA, 20 bp, Artificial Sequence
  chemically synthesized
ctgggaggcgggaaggtgct

SEQ ID NO: 25574 - DNA, 20 bp, Artificial Sequence
  chemically synthesized
tgggaggcgggaaggtgctg

SEQ ID NO: 25575 - DNA, 20 bp, Artificial Sequence
  chemically synthesized
gggaaggtgctgaggcactg

SEQ ID NO: 25576 - DNA, 20 bp, Artificial Sequence
  chemically synthesized
gaaggtgctgaggcactgca

SEQ ID NO: 25577 - DNA, 20 bp, Artificial Sequence
  chemically synthesized
ggtgctgaggcactgcagag

SEQ ID NO: 25578 - DNA, 20 bp, Artificial Sequence
  chemically synthesized
gctgaggcactgcagagaag

SEQ ID NO: 25579 - DNA, 20 bp, Artificial Sequence
  chemically synthesized
gcactgcagagaagcagctg

SEQ ID NO: 25580 - DNA, 20 bp, Artificial Sequence
  chemically synthesized
gaagcagctgcagcatgccc

SEQ ID NO: 25581 - DNA, 20 bp, Artificial Sequence
  chemically synthesized
aagcagctgcagcatgcccc

SEQ ID NO: 25582 - DNA, 20 bp, Artificial Sequence
  chemically synthesized
cagctgcagcatgccccggg

SEQ ID NO: 25583 - DNA, 20 bp, Artificial Sequence
  chemically synthesized
gctgcagcatgccccgggca

SEQ ID NO: 25584 - DNA, 20 bp, Artificial Sequence
  chemically synthesized
ctgcagcatgccccgggcag

SEQ ID NO: 25585 - DNA, 20 bp, Artificial Sequence
  chemically synthesized
ggcagaggcctgttttctga

SEQ ID NO: 25586 - DNA, 20 bp, Artificial Sequence
  chemically synthesized
agaggcctgttttctgaaag

SEQ ID NO: 25587 - DNA, 20 bp, Artificial Sequence
  chemically synthesized
gaggcctgttttctgaaaga

SEQ ID NO: 25588 - DNA, 20 bp, Artificial Sequence
  chemically synthesized
gaaagaaggacttgccgtca

SEQ ID NO: 25589 - DNA, 20 bp, Artificial Sequence
  chemically synthesized
aaagaaggacttgccgtcat

SEQ ID NO: 25590 - DNA, 20 bp, Artificial Sequence
  chemically synthesized
agaaggacttgccgtcatgg

SEQ ID NO: 25591 - DNA, 20 bp, Artificial Sequence
  chemically synthesized
gaaggacttgccgtcatggg

SEQ ID NO: 25592 - DNA, 20 bp, Artificial Sequence
  chemically synthesized
aggacttgccgtcatgggag

SEQ ID NO: 25593 - DNA, 20 bp, Artificial Sequence
  chemically synthesized
ggacttgccgtcatgggagg

SEQ ID NO: 25594 - DNA, 20 bp, Artificial Sequence
  chemically synthesized
tgccgtcatgggaggaggcc

SEQ ID NO: 25595 - DNA, 20 bp, Artificial Sequence
  chemically synthesized
tgggaggaggcctggcctcg

SEQ ID NO: 25596 - DNA, 20 bp, Artificial Sequence
  chemically synthesized
gaggcctggcctcgcagcac

SEQ ID NO: 25597 - DNA, 20 bp, Artificial Sequence
  chemically synthesized
ggcctggcctcgcagcacca

SEQ ID NO: 25598 - DNA, 20 bp, Artificial Sequence
  chemically synthesized
caccagagcgctccttcatt

SEQ ID NO: 25599 - DNA, 20 bp, Artificial Sequence
  chemically synthesized
tccttcattcagcctcacct

SEQ ID NO: 25600 - DNA, 20 bp, Artificial Sequence
  chemically synthesized
ccttcattcagcctcacctc

SEQ ID NO: 25601 - DNA, 20 bp, Artificial Sequence
  chemically synthesized
cattcagcctcacctcaggc

SEQ ID NO: 25602 - DNA, 20 bp, Artificial Sequence
  chemically synthesized
ttcagcctcacctcaggcga

SEQ ID NO: 25603 - DNA, 20 bp, Artificial Sequence
  chemically synthesized
tcagcctcacctcaggcgag

SEQ ID NO: 25604 - DNA, 20 bp, Artificial Sequence
  chemically synthesized
cagcctcacctcaggcgaga

SEQ ID NO: 25605 - DNA, 20 bp, Artificial Sequence
  chemically synthesized
cctcacctcaggcgagaggg

SEQ ID NO: 25606 - DNA, 20 bp, Artificial Sequence
  chemically synthesized
cctcaggcgagagggcagcc

SEQ ID NO: 25607 - DNA, 20 bp, Artificial Sequence
  chemically synthesized
gcagcctagttttattcctg

SEQ ID NO: 25608 - DNA, 20 bp, Artificial Sequence
  chemically synthesized
ttttattcctgaagaaatgt

SEQ ID NO: 25609 - DNA, 20 bp, Artificial Sequence
  chemically synthesized
ttattcctgaagaaatgtta

SEQ ID NO: 25610 - DNA, 20 bp, Artificial Sequence
  chemically synthesized
aatgttagagcctgacctgc

SEQ ID NO: 25611 - DNA, 20 bp, Artificial Sequence
  chemically synthesized
acctgctagaccattttttt

SEQ ID NO: 25612 - DNA, 20 bp, Artificial Sequence
  chemically synthesized
tgctagaccattttttttgg

SEQ ID NO: 25613 - DNA, 20 bp, Artificial Sequence
  chemically synthesized
ctagaccattttttttggta

SEQ ID NO: 25614 - DNA, 20 bp, Artificial Sequence
  chemically synthesized
ttttttttggtagagctttg

SEQ ID NO: 25615 - DNA, 20 bp, Artificial Sequence
  chemically synthesized
agagctttgaagccttaaat

SEQ ID NO: 25616 - DNA, 20 bp, Artificial Sequence
  chemically synthesized
aattagttctcataatttct

SEQ ID NO: 25617 - DNA, 20 bp, Artificial Sequence
  chemically synthesized
tagttctcataatttctgag

SEQ ID NO: 25618 - DNA, 20 bp, Artificial Sequence
  chemically synthesized
gagcagctctgtgttaacca

SEQ ID NO: 25619 - DNA, 20 bp, Artificial Sequence
  chemically synthesized
agcagctctgtgttaaccat

SEQ ID NO: 25620 - DNA, 20 bp, Artificial Sequence
  chemically synthesized
gtgttaaccataggacataa

SEQ ID NO: 25621 - DNA, 20 bp, Artificial Sequence
  chemically synthesized
tgttaaccataggacataat

SEQ ID NO: 25622 - DNA, 20 bp, Artificial Sequence
  chemically synthesized
gacataataggttttaattc

SEQ ID NO: 25623 - DNA, 20 bp, Artificial Sequence
  chemically synthesized
cataataggttttaattctg

SEQ ID NO: 25624 - DNA, 20 bp, Artificial Sequence
  chemically synthesized
taggttttaattctggagaa

SEQ ID NO: 25625 - DNA, 20 bp, Artificial Sequence
  chemically synthesized
ttttaattctggagaatggc

SEQ ID NO: 25626 - DNA, 20 bp, Artificial Sequence
  chemically synthesized
ttctggagaatggccagttc

SEQ ID NO: 25627 - DNA, 20 bp, Artificial Sequence
  chemically synthesized
gaatggccagttctggttct

SEQ ID NO: 25628 - DNA, 20 bp, Artificial Sequence
  chemically synthesized
ttctggttctcagaatctct

SEQ ID NO: 25629 - DNA, 20 bp, Artificial Sequence
  chemically synthesized
gttctcagaatctcttggcc

SEQ ID NO: 25630 - DNA, 20 bp, Artificial Sequence
  chemically synthesized
tctcttggccaagactgtca

SEQ ID NO: 25631 - DNA, 20 bp, Artificial Sequence
  chemically synthesized
tcttggccaagactgtcaca

SEQ ID NO: 25632 - DNA, 20 bp, Artificial Sequence
  chemically synthesized
ccaagactgtcacagagtat

SEQ ID NO: 25633 - DNA, 20 bp, Artificial Sequence
  chemically synthesized
caagactgtcacagagtatt

SEQ ID NO: 25634 - DNA, 20 bp, Artificial Sequence
  chemically synthesized
cacagagtattaggcctgtg

SEQ ID NO: 25635 - DNA, 20 bp, Artificial Sequence
  chemically synthesized
tgccttccacgcttcccctg

SEQ ID NO: 25636 - DNA, 20 bp, Artificial Sequence
  chemically synthesized
ttcccctgaagtccacacac

SEQ ID NO: 25637 - DNA, 20 bp, Artificial Sequence
  chemically synthesized
tccacacaccagtcactcaa

SEQ ID NO: 25638 - DNA, 20 bp, Artificial Sequence
  chemically synthesized
caccagtcactcaatagtgc

SEQ ID NO: 25639 - DNA, 20 bp, Artificial Sequence
  chemically synthesized
agtcactcaatagtgccaga

SEQ ID NO: 25640 - DNA, 20 bp, Artificial Sequence
  chemically synthesized
gtcactcaatagtgccagaa

SEQ ID NO: 25641 - DNA, 20 bp, Artificial Sequence
  chemically synthesized
ctcaatagtgccagaaaggc

SEQ ID NO: 25642 - DNA, 20 bp, Artificial Sequence
  chemically synthesized
atagtgccagaaaggcaagt

SEQ ID NO: 25643 - DNA, 20 bp, Artificial Sequence
  chemically synthesized
tagtgccagaaaggcaagtg

SEQ ID NO: 25644 - DNA, 20 bp, Artificial Sequence
  chemically synthesized
gtgccagaaaggcaagtgag

SEQ ID NO: 25645 - DNA, 20 bp, Artificial Sequence
  chemically synthesized
caagtgaggagattgcctga

SEQ ID NO: 25646 - DNA, 20 bp, Artificial Sequence
  chemically synthesized
aagtgaggagattgcctgaa

SEQ ID NO: 25647 - DNA, 20 bp, Artificial Sequence
  chemically synthesized
agtgaggagattgcctgaaa

SEQ ID NO: 25648 - DNA, 20 bp, Artificial Sequence
  chemically synthesized
gtgaggagattgcctgaaag

SEQ ID NO: 25649 - DNA, 20 bp, Artificial Sequence
  chemically synthesized
cctgaaaggggctgtatgac

SEQ ID NO: 25650 - DNA, 20 bp, Artificial Sequence
  chemically synthesized
ggggctgtatgaccagtgtc

SEQ ID NO: 25651 - DNA, 20 bp, Artificial Sequence
  chemically synthesized
tatgaccagtgtccagacga

SEQ ID NO: 25652 - DNA, 20 bp, Artificial Sequence
  chemically synthesized
atgaccagtgtccagacgac

SEQ ID NO: 25653 - DNA, 20 bp, Artificial Sequence
  chemically synthesized
cagacgacaggtttctgccg

SEQ ID NO: 25654 - DNA, 20 bp, Artificial Sequence
  chemically synthesized
caggtttctgccgcggccct

SEQ ID NO: 25655 - DNA, 20 bp, Artificial Sequence
  chemically synthesized
aggtttctgccgcggccctg

SEQ ID NO: 25656 - DNA, 20 bp, Artificial Sequence
  chemically synthesized
tttctgccgcggccctgagg

SEQ ID NO: 25657 - DNA, 20 bp, Artificial Sequence
  chemically synthesized
ctgccgcggccctgaggtgg

SEQ ID NO: 25658 - DNA, 20 bp, Artificial Sequence
  chemically synthesized
ccgcggccctgaggtggcag

SEQ ID NO: 25659 - DNA, 20 bp, Artificial Sequence
  chemically synthesized
cgcggccctgaggtggcagt

SEQ ID NO: 25660 - DNA, 20 bp, Artificial Sequence
  chemically synthesized
cggccctgaggtggcagtgg

SEQ ID NO: 25661 - DNA, 20 bp, Artificial Sequence
  chemically synthesized
ggccctgaggtggcagtggg

SEQ ID NO: 25662 - DNA, 20 bp, Artificial Sequence
  chemically synthesized
gccctgaggtggcagtggga

SEQ ID NO: 25663 - DNA, 20 bp, Artificial Sequence
  chemically synthesized
ccctgaggtggcagtgggag

SEQ ID NO: 25664 - DNA, 20 bp, Artificial Sequence
  chemically synthesized
tggcagtgggaggggtttgt

SEQ ID NO: 25665 - DNA, 20 bp, Artificial Sequence
  chemically synthesized
cagtgggaggggtttgtcag

SEQ ID NO: 25666 - DNA, 20 bp, Artificial Sequence
  chemically synthesized
agtgggaggggtttgtcaga

SEQ ID NO: 25667 - DNA, 20 bp, Artificial Sequence
  chemically synthesized
gggaggggtttgtcagaagg

SEQ ID NO: 25668 - DNA, 20 bp, Artificial Sequence
  chemically synthesized
ggaggggtttgtcagaaggt

SEQ ID NO: 25669 - DNA, 20 bp, Artificial Sequence
  chemically synthesized
ggggtttgtcagaaggtggg

SEQ ID NO: 25670 - DNA, 20 bp, Artificial Sequence
  chemically synthesized
gggtttgtcagaaggtgggc

SEQ ID NO: 25671 - DNA, 20 bp, Artificial Sequence
  chemically synthesized
ggtttgtcagaaggtgggca

SEQ ID NO: 25672 - DNA, 20 bp, Artificial Sequence
  chemically synthesized
agaaggtgggcagggtcctg

SEQ ID NO: 25673 - DNA, 20 bp, Artificial Sequence
  chemically synthesized
gtgggcagggtcctgaagcc

SEQ ID NO: 25674 - DNA, 20 bp, Artificial Sequence
  chemically synthesized
agccctgtcctccctgtcca

SEQ ID NO: 25675 - DNA, 20 bp, Artificial Sequence
  chemically synthesized
cctgtcctccctgtccacag

SEQ ID NO: 25676 - DNA, 20 bp, Artificial Sequence
  chemically synthesized
ctgtcctccctgtccacagc

SEQ ID NO: 25677 - DNA, 20 bp, Artificial Sequence
  chemically synthesized
gtccacagcaggacacttct

SEQ ID NO: 25678 - DNA, 20 bp, Artificial Sequence
  chemically synthesized
aggacacttctgagatcttc

SEQ ID NO: 25679 - DNA, 20 bp, Artificial Sequence
  chemically synthesized
gagatcttcgagttcctcac

SEQ ID NO: 25680 - DNA, 20 bp, Artificial Sequence
  chemically synthesized
agatcttcgagttcctcact

SEQ ID NO: 25681 - DNA, 20 bp, Artificial Sequence
  chemically synthesized
atcttcgagttcctcactgg

SEQ ID NO: 25682 - DNA, 20 bp, Artificial Sequence
  chemically synthesized
tcttcgagttcctcactggg

SEQ ID NO: 25683 - DNA, 20 bp, Artificial Sequence
  chemically synthesized
cgagttcctcactgggaggt

SEQ ID NO: 25684 - DNA, 20 bp, Artificial Sequence
  chemically synthesized
gagttcctcactgggaggtg

SEQ ID NO: 25685 - DNA, 20 bp, Artificial Sequence
  chemically synthesized
taataccttccctcattcca

SEQ ID NO: 25686 - DNA, 20 bp, Artificial Sequence
  chemically synthesized
aataccttccctcattccac

SEQ ID NO: 25687 - DNA, 20 bp, Artificial Sequence
  chemically synthesized
ataccttccctcattccaca

SEQ ID NO: 25688 - DNA, 20 bp, Artificial Sequence
  chemically synthesized
tcattccacagggcgactgt

SEQ ID NO: 25689 - DNA, 20 bp, Artificial Sequence
  chemically synthesized
cattccacagggcgactgtt

SEQ ID NO: 25690 - DNA, 20 bp, Artificial Sequence
  chemically synthesized
attccacagggcgactgttg

SEQ ID NO: 25691 - DNA, 20 bp, Artificial Sequence
  chemically synthesized
ccacagggcgactgttgggg

SEQ ID NO: 25692 - DNA, 20 bp, Artificial Sequence
  chemically synthesized
cacagggcgactgttggggc

SEQ ID NO: 25693 - DNA, 20 bp, Artificial Sequence
  chemically synthesized
cgactgttggggcaggatgt

SEQ ID NO: 25694 - DNA, 20 bp, Artificial Sequence
  chemically synthesized
gactgttggggcaggatgtg

SEQ ID NO: 25695 - DNA, 20 bp, Artificial Sequence
  chemically synthesized
ctgttggggcaggatgtgag

SEQ ID NO: 25696 - DNA, 20 bp, Artificial Sequence
  chemically synthesized
gttggggcaggatgtgagga

SEQ ID NO: 25697 - DNA, 20 bp, Artificial Sequence
  chemically synthesized
aggatgtgaggagagtactt

SEQ ID NO: 25698 - DNA, 20 bp, Artificial Sequence
  chemically synthesized
ggatgtgaggagagtacttt

SEQ ID NO: 25699 - DNA, 20 bp, Artificial Sequence
  chemically synthesized
tgtgaggagagtactttggg

SEQ ID NO: 25700 - DNA, 20 bp, Artificial Sequence
  chemically synthesized
agaacataacactttccacc

SEQ ID NO: 25701 - DNA, 20 bp, Artificial Sequence
  chemically synthesized
ataacactttccacccagcc

SEQ ID NO: 25702 - DNA, 20 bp, Artificial Sequence
  chemically synthesized
taacactttccacccagcct

SEQ ID NO: 25703 - DNA, 20 bp, Artificial Sequence
  chemically synthesized
tccacccagcctgggcaaca

SEQ ID NO: 25704 - DNA, 20 bp, Artificial Sequence
  chemically synthesized
cccagcctgggcaacatggt

SEQ ID NO: 25705 - DNA, 20 bp, Artificial Sequence
  chemically synthesized
tctacaaaaaatacaaaaat

SEQ ID NO: 25706 - DNA, 20 bp, Artificial Sequence
  chemically synthesized
caaaaaatacaaaaattagc

SEQ ID NO: 25707 - DNA, 20 bp, Artificial Sequence
  chemically synthesized
aaaaaatacaaaaattagcc

SEQ ID NO: 25708 - DNA, 20 bp, Artificial Sequence
  chemically synthesized
atacaaaaattagccaggtg

SEQ ID NO: 25709 - DNA, 20 bp, Artificial Sequence
  chemically synthesized
caaaaattagccaggtgtgg

SEQ ID NO: 25710 - DNA, 20 bp, Artificial Sequence
  chemically synthesized
aaattagccaggtgtggtgg

SEQ ID NO: 25711 - DNA, 20 bp, Artificial Sequence
  chemically synthesized
gtggtggtggcgcatgcctg

SEQ ID NO: 25712 - DNA, 20 bp, Artificial Sequence
  chemically synthesized
gtggcgcatgcctgtagtcc

SEQ ID NO: 25713 - DNA, 20 bp, Artificial Sequence
  chemically synthesized
gcctgtagtcctagctactt

SEQ ID NO: 25714 - DNA, 20 bp, Artificial Sequence
  chemically synthesized
ctgtagtcctagctacttga

SEQ ID NO: 25715 - DNA, 20 bp, Artificial Sequence
  chemically synthesized
gtcctagctacttgagagct

SEQ ID NO: 25716 - DNA, 20 bp, Artificial Sequence
  chemically synthesized
tcctagctacttgagagctg

SEQ ID NO: 25717 - DNA, 20 bp, Artificial Sequence
  chemically synthesized
tagctacttgagagctgagg

SEQ ID NO: 25718 - DNA, 20 bp, Artificial Sequence
  chemically synthesized
agctacttgagagctgaggc

SEQ ID NO: 25719 - DNA, 20 bp, Artificial Sequence
  chemically synthesized
ctacttgagagctgaggcag

SEQ ID NO: 25720 - DNA, 20 bp, Artificial Sequence
  chemically synthesized
tacttgagagctgaggcagg

SEQ ID NO: 25721 - DNA, 20 bp, Artificial Sequence
  chemically synthesized
gcaggaggactgcttgaact

SEQ ID NO: 25722 - DNA, 20 bp, Artificial Sequence
  chemically synthesized
caggaggactgcttgaactc

SEQ ID NO: 25723 - DNA, 20 bp, Artificial Sequence
  chemically synthesized
ggaggactgcttgaactcgg

SEQ ID NO: 25724 - DNA, 20 bp, Artificial Sequence
  chemically synthesized
gaggactgcttgaactcggg

SEQ ID NO: 25725 - DNA, 20 bp, Artificial Sequence
  chemically synthesized
gactgcttgaactcgggagg

SEQ ID NO: 25726 - DNA, 20 bp, Artificial Sequence
  chemically synthesized
ctgcttgaactcgggaggcg

SEQ ID NO: 25727 - DNA, 20 bp, Artificial Sequence
  chemically synthesized
tgcttgaactcgggaggcgg

SEQ ID NO: 25728 - DNA, 20 bp, Artificial Sequence
  chemically synthesized
aactcgggaggcggaggttg

SEQ ID NO: 25729 - DNA, 20 bp, Artificial Sequence
  chemically synthesized
cgggaggcggaggttgcagt

SEQ ID NO: 25730 - DNA, 20 bp, Artificial Sequence
  chemically synthesized
ggcggaggttgcagtgagcc

SEQ ID NO: 25731 - DNA, 20 bp, Artificial Sequence
  chemically synthesized
aagattgcaccactgcactc

SEQ ID NO: 25732 - DNA, 20 bp, Artificial Sequence
  chemically synthesized
tgcaccactgcactccagcc

SEQ ID NO: 25733 - DNA, 20 bp, Artificial Sequence
  chemically synthesized
gcaccactgcactccagcct

SEQ ID NO: 25734 - DNA, 20 bp, Artificial Sequence
  chemically synthesized
ctgcactccagcctgggcaa

SEQ ID NO: 25735 - DNA, 20 bp, Artificial Sequence
  chemically synthesized
gcactccagcctgggcaaca

SEQ ID NO: 25736 - DNA, 20 bp, Artificial Sequence
  chemically synthesized
tccagcctgggcaacagagt

SEQ ID NO: 25737 - DNA, 20 bp, Artificial Sequence
  chemically synthesized
aattaaaaaaaaaaaaaaaa

SEQ ID NO: 25738 - DNA, 20 bp, Artificial Sequence
  chemically synthesized
aaaaaaaaaagctttccata

SEQ ID NO: 25739 - DNA, 20 bp, Artificial Sequence
  chemically synthesized
aaaaaaaaagctttccataa

SEQ ID NO: 25740 - DNA, 20 bp, Artificial Sequence
  chemically synthesized
aaaaagctttccataaaggc

SEQ ID NO: 25741 - DNA, 20 bp, Artificial Sequence
  chemically synthesized
aaaagctttccataaaggcc

SEQ ID NO: 25742 - DNA, 20 bp, Artificial Sequence
  chemically synthesized
gctttccataaaggccagga

SEQ ID NO: 25743 - DNA, 20 bp, Artificial Sequence
  chemically synthesized
caggacagatgtgcttcctt

SEQ ID NO: 25744 - DNA, 20 bp, Artificial Sequence
  chemically synthesized
gacagatgtgcttccttaag

SEQ ID NO: 25745 - DNA, 20 bp, Artificial Sequence
  chemically synthesized
acagatgtgcttccttaaga

SEQ ID NO: 25746 - DNA, 20 bp, Artificial Sequence
  chemically synthesized
cagatgtgcttccttaagaa

SEQ ID NO: 25747 - DNA, 20 bp, Artificial Sequence
  chemically synthesized
tgtgcttccttaagaagggc

SEQ ID NO: 25748 - DNA, 20 bp, Artificial Sequence
  chemically synthesized
tgcttccttaagaagggcta

SEQ ID NO: 25749 - DNA, 20 bp, Artificial Sequence
  chemically synthesized
tccttaagaagggctagagt

SEQ ID NO: 25750 - DNA, 20 bp, Artificial Sequence
  chemically synthesized
cttaagaagggctagagttg

SEQ ID NO: 25751 - DNA, 20 bp, Artificial Sequence
  chemically synthesized
ttaagaagggctagagttgg

SEQ ID NO: 25752 - DNA, 20 bp, Artificial Sequence
  chemically synthesized
ttggaggccttgccctcctc

SEQ ID NO: 25753 - DNA, 20 bp, Artificial Sequence
  chemically synthesized
tggaggccttgccctcctct

SEQ ID NO: 25754 - DNA, 20 bp, Artificial Sequence
  chemically synthesized
ttgccctcctctgggcttgt

SEQ ID NO: 25755 - DNA, 20 bp, Artificial Sequence
  chemically synthesized
tcctctgggcttgttggcct

SEQ ID NO: 25756 - DNA, 20 bp, Artificial Sequence
  chemically synthesized
cctctgggcttgttggcctt

SEQ ID NO: 25757 - DNA, 20 bp, Artificial Sequence
  chemically synthesized
ctctgggcttgttggccttg

SEQ ID NO: 25758 - DNA, 20 bp, Artificial Sequence
  chemically synthesized
tctgggcttgttggccttgg

SEQ ID NO: 25759 - DNA, 20 bp, Artificial Sequence
  chemically synthesized
tgggcttgttggccttgggg

SEQ ID NO: 25760 - DNA, 20 bp, Artificial Sequence
  chemically synthesized
gggcttgttggccttggggg

SEQ ID NO: 25761 - DNA, 20 bp, Artificial Sequence
  chemically synthesized
tggccttgggggaggcctga

SEQ ID NO: 25762 - DNA, 20 bp, Artificial Sequence
  chemically synthesized
gccttgggggaggcctgaca

SEQ ID NO: 25763 - DNA, 20 bp, Artificial Sequence
  chemically synthesized
gaggcctgacagagccttcc

SEQ ID NO: 25764 - DNA, 20 bp, Artificial Sequence
  chemically synthesized
aggcctgacagagccttcct

SEQ ID NO: 25765 - DNA, 20 bp, Artificial Sequence
  chemically synthesized
ggcctgacagagccttcctg

SEQ ID NO: 25766 - DNA, 20 bp, Artificial Sequence
  chemically synthesized
cctggggctgcctgttcttc

SEQ ID NO: 25767 - DNA, 20 bp, Artificial Sequence
  chemically synthesized
tctggccccttctccgtgca

SEQ ID NO: 25768 - DNA, 20 bp, Artificial Sequence
  chemically synthesized
ccccttctccgtgcacagac

SEQ ID NO: 25769 - DNA, 20 bp, Artificial Sequence
  chemically synthesized
ctccgtgcacagaccagtct

SEQ ID NO: 25770 - DNA, 20 bp, Artificial Sequence
  chemically synthesized
acagaccagtcttggatgat

SEQ ID NO: 25771 - DNA, 20 bp, Artificial Sequence
  chemically synthesized
accagtcttggatgataagt

SEQ ID NO: 25772 - DNA, 20 bp, Artificial Sequence
  chemically synthesized
ccagtcttggatgataagtc

SEQ ID NO: 25773 - DNA, 20 bp, Artificial Sequence
  chemically synthesized
tcttggatgataagtcagga

SEQ ID NO: 25774 - DNA, 20 bp, Artificial Sequence
  chemically synthesized
agtcaggaaagccctccacc

SEQ ID NO: 25775 - DNA, 20 bp, Artificial Sequence
  chemically synthesized
aggaaagccctccacctggc

SEQ ID NO: 25776 - DNA, 20 bp, Artificial Sequence
  chemically synthesized
ggaaagccctccacctggcc

SEQ ID NO: 25777 - DNA, 20 bp, Artificial Sequence
  chemically synthesized
ccctccacctggccgggctg

SEQ ID NO: 25778 - DNA, 20 bp, Artificial Sequence
  chemically synthesized
tggccgggctgcagtgtcgc

SEQ ID NO: 25779 - DNA, 20 bp, Artificial Sequence
  chemically synthesized
ggccgggctgcagtgtcgct

SEQ ID NO: 25780 - DNA, 20 bp, Artificial Sequence
  chemically synthesized
gccgggctgcagtgtcgctg

SEQ ID NO: 25781 - DNA, 20 bp, Artificial Sequence
  chemically synthesized
ctgcccacacttgctgacca

SEQ ID NO: 25782 - DNA, 20 bp, Artificial Sequence
  chemically synthesized
ccccactcccttgtctctca

SEQ ID NO: 25783 - DNA, 20 bp, Artificial Sequence
  chemically synthesized
caccactgcccctgtttcca

SEQ ID NO: 25784 - DNA, 20 bp, Artificial Sequence
  chemically synthesized
agtgcccacgaacaaaacat

SEQ ID NO: 25785 - DNA, 20 bp, Artificial Sequence
  chemically synthesized
gtgcccacgaacaaaacatc

SEQ ID NO: 25786 - DNA, 20 bp, Artificial Sequence
  chemically synthesized
gcccacgaacaaaacatcag

SEQ ID NO: 25787 - DNA, 20 bp, Artificial Sequence
  chemically synthesized
acaaaacatcaggagtctct

SEQ ID NO: 25788 - DNA, 20 bp, Artificial Sequence
  chemically synthesized
ttctttatttattttactct

SEQ ID NO: 25789 - DNA, 20 bp, Artificial Sequence
  chemically synthesized
atttattttactctaagttc

SEQ ID NO: 25790 - DNA, 20 bp, Artificial Sequence
  chemically synthesized
tttattttactctaagttct

SEQ ID NO: 25791 - DNA, 20 bp, Artificial Sequence
  chemically synthesized
taagttctgggatacatgtg

SEQ ID NO: 25792 - DNA, 20 bp, Artificial Sequence
  chemically synthesized
ggatacatgtgcagaatgtg

SEQ ID NO: 25793 - DNA, 20 bp, Artificial Sequence
  chemically synthesized
gatacatgtgcagaatgtgc

SEQ ID NO: 25794 - DNA, 20 bp, Artificial Sequence
  chemically synthesized
aatgtgcaggtttgttacat

SEQ ID NO: 25795 - DNA, 20 bp, Artificial Sequence
  chemically synthesized
acataagtatacatgtacca

SEQ ID NO: 25796 - DNA, 20 bp, Artificial Sequence
  chemically synthesized
taagtatacatgtaccatgg

SEQ ID NO: 25797 - DNA, 20 bp, Artificial Sequence
  chemically synthesized
tatcaacccatcatctacat

SEQ ID NO: 25798 - DNA, 20 bp, Artificial Sequence
  chemically synthesized
atcaacccatcatctacatt

SEQ ID NO: 25799 - DNA, 20 bp, Artificial Sequence
  chemically synthesized
cttgcccctccacccatgtt

SEQ ID NO: 25800 - DNA, 20 bp, Artificial Sequence
  chemically synthesized
cacccatgtttggttttctt

SEQ ID NO: 25801 - DNA, 20 bp, Artificial Sequence
  chemically synthesized
tggttttctttagcttattc

SEQ ID NO: 25802 - DNA, 20 bp, Artificial Sequence
  chemically synthesized
gcttattctagtattttctc

SEQ ID NO: 25803 - DNA, 20 bp, Artificial Sequence
  chemically synthesized
gaccgatcgaaatgataata

SEQ ID NO: 25804 - DNA, 20 bp, Artificial Sequence
  chemically synthesized
ccgatcgaaatgataatata

SEQ ID NO: 25805 - DNA, 20 bp, Artificial Sequence
  chemically synthesized
cgatcgaaatgataatatag

SEQ ID NO: 25806 - DNA, 20 bp, Artificial Sequence
  chemically synthesized
aatgataatatagaggcata

SEQ ID NO: 25807 - DNA, 20 bp, Artificial Sequence
  chemically synthesized
gcataaagcacatttgttgt

SEQ ID NO: 25808 - DNA, 20 bp, Artificial Sequence
  chemically synthesized
acatttgttgtgagttgatg

SEQ ID NO: 25809 - DNA, 20 bp, Artificial Sequence
  chemically synthesized
tgtgagttgatgcagataaa

SEQ ID NO: 25810 - DNA, 20 bp, Artificial Sequence
  chemically synthesized
gtgagttgatgcagataaaa

SEQ ID NO: 25811 - DNA, 20 bp, Artificial Sequence
  chemically synthesized
ttgatgcagataaaaaggct

SEQ ID NO: 25812 - DNA, 20 bp, Artificial Sequence
  chemically synthesized
tgatgcagataaaaaggctt

SEQ ID NO: 25813 - DNA, 20 bp, Artificial Sequence
  chemically synthesized
gatgcagataaaaaggcttg

SEQ ID NO: 25814 - DNA, 20 bp, Artificial Sequence
  chemically synthesized
gcagataaaaaggcttgggg

SEQ ID NO: 25815 - DNA, 20 bp, Artificial Sequence
  chemically synthesized
aaaaggcttggggtggtctt

SEQ ID NO: 25816 - DNA, 20 bp, Artificial Sequence
  chemically synthesized
aaggcttggggtggtcttca

SEQ ID NO: 25817 - DNA, 20 bp, Artificial Sequence
  chemically synthesized
gggtggtcttcagagtaatt

SEQ ID NO: 25818 - DNA, 20 bp, Artificial Sequence
  chemically synthesized
ggtggtcttcagagtaattt

SEQ ID NO: 25819 - DNA, 20 bp, Artificial Sequence
  chemically synthesized
tggtcttcagagtaatttgg

SEQ ID NO: 25820 - DNA, 20 bp, Artificial Sequence
  chemically synthesized
ttgggagttgtgtgttctgc

SEQ ID NO: 25821 - DNA, 20 bp, Artificial Sequence
  chemically synthesized
gtgtgttctgctggctttga

SEQ ID NO: 25822 - DNA, 20 bp, Artificial Sequence
  chemically synthesized
ttctgctggctttgatagac

SEQ ID NO: 25823 - DNA, 20 bp, Artificial Sequence
  chemically synthesized
agacaagcccttctctgctc

SEQ ID NO: 25824 - DNA, 20 bp, Artificial Sequence
  chemically synthesized
caagcccttctctgctctgg

SEQ ID NO: 25825 - DNA, 20 bp, Artificial Sequence
  chemically synthesized
aagcccttctctgctctggc

SEQ ID NO: 25826 - DNA, 20 bp, Artificial Sequence
  chemically synthesized
tctgctctggcaggtgttat

SEQ ID NO: 25827 - DNA, 20 bp, Artificial Sequence
  chemically synthesized
tctcatcgcatccatcttca

SEQ ID NO: 25828 - DNA, 20 bp, Artificial Sequence
  chemically synthesized
catgcctcttcctgaatgct

SEQ ID NO: 25829 - DNA, 20 bp, Artificial Sequence
  chemically synthesized
aatgcgtatttcaccttcct

SEQ ID NO: 25830 - DNA, 20 bp, Artificial Sequence
  chemically synthesized
atgcgtatttcaccttcctc

SEQ ID NO: 25831 - DNA, 20 bp, Artificial Sequence
  chemically synthesized
caggtatctaatacttaacc

SEQ ID NO: 25832 - DNA, 20 bp, Artificial Sequence
  chemically synthesized
aggtatctaatacttaacct

SEQ ID NO: 25833 - DNA, 20 bp, Artificial Sequence
  chemically synthesized
gtatctaatacttaacctgg

SEQ ID NO: 25834 - DNA, 20 bp, Artificial Sequence
  chemically synthesized
acttaacctgggagaaacgc

SEQ ID NO: 25835 - DNA, 20 bp, Artificial Sequence
  chemically synthesized
acctgggagaaacgcaagtg

SEQ ID NO: 25836 - DNA, 20 bp, Artificial Sequence
  chemically synthesized
gaaacgcaagtgtggtttgc

SEQ ID NO: 25837 - DNA, 20 bp, Artificial Sequence
  chemically synthesized
aaacgcaagtgtggtttgca

SEQ ID NO: 25838 - DNA, 20 bp, Artificial Sequence
  chemically synthesized
gtgtggtttgcaaggctttc

SEQ ID NO: 25839 - DNA, 20 bp, Artificial Sequence
  chemically synthesized
tgtggtttgcaaggctttcc

SEQ ID NO: 25840 - DNA, 20 bp, Artificial Sequence
  chemically synthesized
catccttttcttcatttctc

SEQ ID NO: 25841 - DNA, 20 bp, Artificial Sequence
  chemically synthesized
ccttttcttcatttctcgag

SEQ ID NO: 25842 - DNA, 20 bp, Artificial Sequence
  chemically synthesized
cttttcttcatttctcgagt

SEQ ID NO: 25843 - DNA, 20 bp, Artificial Sequence
  chemically synthesized
ttttcttcatttctcgagtg

SEQ ID NO: 25844 - DNA, 20 bp, Artificial Sequence
  chemically synthesized
tcttcatttctcgagtgggg

SEQ ID NO: 25845 - DNA, 20 bp, Artificial Sequence
  chemically synthesized
cttcatttctcgagtggggc

SEQ ID NO: 25846 - DNA, 20 bp, Artificial Sequence
  chemically synthesized
ttcatttctcgagtggggca

SEQ ID NO: 25847 - DNA, 20 bp, Artificial Sequence
  chemically synthesized
catttctcgagtggggcagg

SEQ ID NO: 25848 - DNA, 20 bp, Artificial Sequence
  chemically synthesized
atttctcgagtggggcaggg

SEQ ID NO: 25849 - DNA, 20 bp, Artificial Sequence
  chemically synthesized
cgagtggggcagggaggcat

SEQ ID NO: 25850 - DNA, 20 bp, Artificial Sequence
  chemically synthesized
gagtggggcagggaggcatc

SEQ ID NO: 25851 - DNA, 20 bp, Artificial Sequence
  chemically synthesized
agtggggcagggaggcatcg

SEQ ID NO: 25852 - DNA, 20 bp, Artificial Sequence
  chemically synthesized
gtttgtgatacgtttgtgtg

SEQ ID NO: 25853 - DNA, 20 bp, Artificial Sequence
  chemically synthesized
gtgatacgtttgtgtgaagc

SEQ ID NO: 25854 - DNA, 20 bp, Artificial Sequence
  chemically synthesized
ttgtgtgaagctggacaatt

SEQ ID NO: 25855 - DNA, 20 bp, Artificial Sequence
  chemically synthesized
tgtgtgaagctggacaattc

SEQ ID NO: 25856 - DNA, 20 bp, Artificial Sequence
  chemically synthesized
aagctggacaattcgggtga

SEQ ID NO: 25857 - DNA, 20 bp, Artificial Sequence
  chemically synthesized
tcgggtgacagaaatatgtt

SEQ ID NO: 25858 - DNA, 20 bp, Artificial Sequence
  chemically synthesized
cgggtgacagaaatatgttc

SEQ ID NO: 25859 - DNA, 20 bp, Artificial Sequence
  chemically synthesized
gggtgacagaaatatgttca

SEQ ID NO: 25860 - DNA, 20 bp, Artificial Sequence
  chemically synthesized
tgacagaaatatgttcaggg

SEQ ID NO: 25861 - DNA, 20 bp, Artificial Sequence
  chemically synthesized
tatcgtcccttctaactaca

SEQ ID NO: 25862 - DNA, 20 bp, Artificial Sequence
  chemically synthesized
atcgtcccttctaactacaa

SEQ ID NO: 25863 - DNA, 20 bp, Artificial Sequence
  chemically synthesized
cccttctaactacaaaggca

SEQ ID NO: 25864 - DNA, 20 bp, Artificial Sequence
  chemically synthesized
aactacaaaggcatggattg

SEQ ID NO: 25865 - DNA, 20 bp, Artificial Sequence
  chemically synthesized
caaaggcatggattgcagtt

SEQ ID NO: 25866 - DNA, 20 bp, Artificial Sequence
  chemically synthesized
ttgcagttgagccccacttt

SEQ ID NO: 25867 - DNA, 20 bp, Artificial Sequence
  chemically synthesized
cagttgagccccactttcag

SEQ ID NO: 25868 - DNA, 20 bp, Artificial Sequence
  chemically synthesized
agttgagccccactttcaga

SEQ ID NO: 25869 - DNA, 20 bp, Artificial Sequence
  chemically synthesized
acacacaaaaatctcattaa

SEQ ID NO: 25870 - DNA, 20 bp, Artificial Sequence
  chemically synthesized
attaatggaaactgataaat

SEQ ID NO: 25871 - DNA, 20 bp, Artificial Sequence
  chemically synthesized
taatggaaactgataaatta

SEQ ID NO: 25872 - DNA, 20 bp, Artificial Sequence
  chemically synthesized
atggaaactgataaattaga

SEQ ID NO: 25873 - DNA, 20 bp, Artificial Sequence
  chemically synthesized
gagagtgatttttcacatta

SEQ ID NO: 25874 - DNA, 20 bp, Artificial Sequence
  chemically synthesized
gtgatttttcacattacaga

SEQ ID NO: 25875 - DNA, 20 bp, Artificial Sequence
  chemically synthesized
aaagattgttaacttttcaa

SEQ ID NO: 25876 - DNA, 20 bp, Artificial Sequence
  chemically synthesized
aagattgttaacttttcaaa

SEQ ID NO: 25877 - DNA, 20 bp, Artificial Sequence
  chemically synthesized
cttttcaaaaggtttcacca

SEQ ID NO: 25878 - DNA, 20 bp, Artificial Sequence
  chemically synthesized
ttttcaaaaggtttcaccac

SEQ ID NO: 25879 - DNA, 20 bp, Artificial Sequence
  chemically synthesized
tttcaaaaggtttcaccaca

SEQ ID NO: 25880 - DNA, 20 bp, Artificial Sequence
  chemically synthesized
caccacagggtttctttaaa

SEQ ID NO: 25881 - DNA, 20 bp, Artificial Sequence
  chemically synthesized
acagggtttctttaaatagt

SEQ ID NO: 25882 - DNA, 20 bp, Artificial Sequence
  chemically synthesized
gagctcccccactgaattta

SEQ ID NO: 25883 - DNA, 20 bp, Artificial Sequence
  chemically synthesized
gaatttaaagtgtttgttta

SEQ ID NO: 25884 - DNA, 20 bp, Artificial Sequence
  chemically synthesized
acagatcattaactacttga

SEQ ID NO: 25885 - DNA, 20 bp, Artificial Sequence
  chemically synthesized
agatcattaactacttgaca

SEQ ID NO: 25886 - DNA, 20 bp, Artificial Sequence
  chemically synthesized
atcattaactacttgacaga

SEQ ID NO: 25887 - DNA, 20 bp, Artificial Sequence
  chemically synthesized
tcattaactacttgacagag

SEQ ID NO: 25888 - DNA, 20 bp, Artificial Sequence
  chemically synthesized
ctacttgacagagaggatat

SEQ ID NO: 25889 - DNA, 20 bp, Artificial Sequence
  chemically synthesized
tacttgacagagaggatatt

SEQ ID NO: 25890 - DNA, 20 bp, Artificial Sequence
  chemically synthesized
acttgacagagaggatattg

SEQ ID NO: 25891 - DNA, 20 bp, Artificial Sequence
  chemically synthesized
cttgacagagaggatattgg

SEQ ID NO: 25892 - DNA, 20 bp, Artificial Sequence
  chemically synthesized
acagagaggatattgggggt

SEQ ID NO: 25893 - DNA, 20 bp, Artificial Sequence
  chemically synthesized
cagagaggatattgggggtt

SEQ ID NO: 25894 - DNA, 20 bp, Artificial Sequence
  chemically synthesized
agagaggatattgggggttg

SEQ ID NO: 25895 - DNA, 20 bp, Artificial Sequence
  chemically synthesized
gagaggatattgggggttgg

SEQ ID NO: 25896 - DNA, 20 bp, Artificial Sequence
  chemically synthesized
aggatattgggggttggggg

SEQ ID NO: 25897 - DNA, 20 bp, Artificial Sequence
  chemically synthesized
ggatattgggggttggggga

SEQ ID NO: 25898 - DNA, 20 bp, Artificial Sequence
  chemically synthesized
tattgggggttgggggaagg

SEQ ID NO: 25899 - DNA, 20 bp, Artificial Sequence
  chemically synthesized
gggaaggaagacacacttaa

SEQ ID NO: 25900 - DNA, 20 bp, Artificial Sequence
  chemically synthesized
ggaaggaagacacacttaaa

SEQ ID NO: 25901 - DNA, 20 bp, Artificial Sequence
  chemically synthesized
acacttaaaaggtaaaatgt

SEQ ID NO: 25902 - DNA, 20 bp, Artificial Sequence
  chemically synthesized
cttaaaaggtaaaatgttag

SEQ ID NO: 25903 - DNA, 20 bp, Artificial Sequence
  chemically synthesized
aagccctgccaattttcaat

SEQ ID NO: 25904 - DNA, 20 bp, Artificial Sequence
  chemically synthesized
ctgccaattttcaatgagcc

SEQ ID NO: 25905 - DNA, 20 bp, Artificial Sequence
  chemically synthesized
ccaattttcaatgagcctgg

SEQ ID NO: 25906 - DNA, 20 bp, Artificial Sequence
  chemically synthesized
caattttcaatgagcctgga

SEQ ID NO: 25907 - DNA, 20 bp, Artificial Sequence
  chemically synthesized
aattttcaatgagcctggaa

SEQ ID NO: 25908 - DNA, 20 bp, Artificial Sequence
  chemically synthesized
aaacatctctgaaattatgt

SEQ ID NO: 25909 - DNA, 20 bp, Artificial Sequence
  chemically synthesized
atctctgaaattatgttggt

SEQ ID NO: 25910 - DNA, 20 bp, Artificial Sequence
  chemically synthesized
agcaaatatgatttatttta

SEQ ID NO: 25911 - DNA, 20 bp, Artificial Sequence
  chemically synthesized
acagaaattcattttacaca

SEQ ID NO: 25912 - DNA, 20 bp, Artificial Sequence
  chemically synthesized
cattttacacatggctttcc

SEQ ID NO: 25913 - DNA, 20 bp, Artificial Sequence
  chemically synthesized
ccaagaaccctccatgctga

SEQ ID NO: 25914 - DNA, 20 bp, Artificial Sequence
  chemically synthesized
caagaaccctccatgctgat

SEQ ID NO: 25915 - DNA, 20 bp, Artificial Sequence
  chemically synthesized
aagaaccctccatgctgatg

SEQ ID NO: 25916 - DNA, 20 bp, Artificial Sequence
  chemically synthesized
ccctccatgctgatggggtg

SEQ ID NO: 25917 - DNA, 20 bp, Artificial Sequence
  chemically synthesized
tccatgctgatggggtgtgg

SEQ ID NO: 25918 - DNA, 20 bp, Artificial Sequence
  chemically synthesized
ccatgctgatggggtgtggt

SEQ ID NO: 25919 - DNA, 20 bp, Artificial Sequence
  chemically synthesized
atgctgatggggtgtggtgg

SEQ ID NO: 25920 - DNA, 20 bp, Artificial Sequence
  chemically synthesized
tgctgatggggtgtggtggg

SEQ ID NO: 25921 - DNA, 20 bp, Artificial Sequence
  chemically synthesized
atggggtgtggtgggaggtc

SEQ ID NO: 25922 - DNA, 20 bp, Artificial Sequence
  chemically synthesized
tggggtgtggtgggaggtca

SEQ ID NO: 25923 - DNA, 20 bp, Artificial Sequence
  chemically synthesized
tggtgggaggtcaaggacca

SEQ ID NO: 25924 - DNA, 20 bp, Artificial Sequence
  chemically synthesized
ggtgggaggtcaaggaccac

SEQ ID NO: 25925 - DNA, 20 bp, Artificial Sequence
  chemically synthesized
gtgggaggtcaaggaccaca

SEQ ID NO: 25926 - DNA, 20 bp, Artificial Sequence
  chemically synthesized
ggtcaaggaccacagggtgc

SEQ ID NO: 25927 - DNA, 20 bp, Artificial Sequence
  chemically synthesized
gtcaaggaccacagggtgct

SEQ ID NO: 25928 - DNA, 20 bp, Artificial Sequence
  chemically synthesized
ggtgctgggctttgctgtcc

SEQ ID NO: 25929 - DNA, 20 bp, Artificial Sequence
  chemically synthesized
ggctttgctgtcctggtttg

SEQ ID NO: 25930 - DNA, 20 bp, Artificial Sequence
  chemically synthesized
tttgctgtcctggtttgtgg

SEQ ID NO: 25931 - DNA, 20 bp, Artificial Sequence
  chemically synthesized
ctgtcctggtttgtggtggc

SEQ ID NO: 25932 - DNA, 20 bp, Artificial Sequence
  chemically synthesized
tgtcctggtttgtggtggct

SEQ ID NO: 25933 - DNA, 20 bp, Artificial Sequence
  chemically synthesized
gtcctggtttgtggtggctg

SEQ ID NO: 25934 - DNA, 20 bp, Artificial Sequence
  chemically synthesized
cctggtttgtggtggctggg

SEQ ID NO: 25935 - DNA, 20 bp, Artificial Sequence
  chemically synthesized
tggtttgtggtggctgggga

SEQ ID NO: 25936 - DNA, 20 bp, Artificial Sequence
  chemically synthesized
ggtttgtggtggctggggag

SEQ ID NO: 25937 - DNA, 20 bp, Artificial Sequence
  chemically synthesized
gggagaggactcccttttct

SEQ ID NO: 25938 - DNA, 20 bp, Artificial Sequence
  chemically synthesized
gagaggactcccttttctta

SEQ ID NO: 25939 - DNA, 20 bp, Artificial Sequence
  chemically synthesized
agtcctgtgtgtgcctttgt

SEQ ID NO: 25940 - DNA, 20 bp, Artificial Sequence
  chemically synthesized
gtgtgtgcctttgtgagcaa

SEQ ID NO: 25941 - DNA, 20 bp, Artificial Sequence
  chemically synthesized
tgtgtgcctttgtgagcaat

SEQ ID NO: 25942 - DNA, 20 bp, Artificial Sequence
  chemically synthesized
cctttgtgagcaatgggtgc

SEQ ID NO: 25943 - DNA, 20 bp, Artificial Sequence
  chemically synthesized
ctttgtgagcaatgggtgcc

SEQ ID NO: 25944 - DNA, 20 bp, Artificial Sequence
  chemically synthesized
gagcaatgggtgccaggctc

SEQ ID NO: 25945 - DNA, 20 bp, Artificial Sequence
  chemically synthesized
tgggtgccaggctctggcat

SEQ ID NO: 25946 - DNA, 20 bp, Artificial Sequence
  chemically synthesized
gggtgccaggctctggcatg

SEQ ID NO: 25947 - DNA, 20 bp, Artificial Sequence
  chemically synthesized
ccaggctctggcatgaggcc

SEQ ID NO: 25948 - DNA, 20 bp, Artificial Sequence
  chemically synthesized
atgaggccgagctttgctac

SEQ ID NO: 25949 - DNA, 20 bp, Artificial Sequence
  chemically synthesized
gagctttgctactggacttc

SEQ ID NO: 25950 - DNA, 20 bp, Artificial Sequence
  chemically synthesized
tgctactggacttctggcat

SEQ ID NO: 25951 - DNA, 20 bp, Artificial Sequence
  chemically synthesized
gacttctggcatgagccact

SEQ ID NO: 25952 - DNA, 20 bp, Artificial Sequence
  chemically synthesized
agaccttttcccttgacatt

SEQ ID NO: 25953 - DNA, 20 bp, Artificial Sequence
  chemically synthesized
ttttcccttgacatttagcc

SEQ ID NO: 25954 - DNA, 20 bp, Artificial Sequence
  chemically synthesized
tttcccttgacatttagcct

SEQ ID NO: 25955 - DNA, 20 bp, Artificial Sequence
  chemically synthesized
cttgacatttagcctgggtt

SEQ ID NO: 25956 - DNA, 20 bp, Artificial Sequence
  chemically synthesized
ttgacatttagcctgggttt

SEQ ID NO: 25957 - DNA, 20 bp, Artificial Sequence
  chemically synthesized
tgacatttagcctgggtttg

SEQ ID NO: 25958 - DNA, 20 bp, Artificial Sequence
  chemically synthesized
catttagcctgggtttgggg

SEQ ID NO: 25959 - DNA, 20 bp, Artificial Sequence
  chemically synthesized
ggtttggggaagtttcttcc

SEQ ID NO: 25960 - DNA, 20 bp, Artificial Sequence
  chemically synthesized
cttcctggttctctgacctt

SEQ ID NO: 25961 - DNA, 20 bp, Artificial Sequence
  chemically synthesized
tctctgaccttcagtctcat

SEQ ID NO: 25962 - DNA, 20 bp, Artificial Sequence
  chemically synthesized
gaccttcagtctcattggct

SEQ ID NO: 25963 - DNA, 20 bp, Artificial Sequence
  chemically synthesized
accttcagtctcattggctc

SEQ ID NO: 25964 - DNA, 20 bp, Artificial Sequence
  chemically synthesized
tcattggctcaggacacacc

SEQ ID NO: 25965 - DNA, 20 bp, Artificial Sequence
  chemically synthesized
cattggctcaggacacacct

SEQ ID NO: 25966 - DNA, 20 bp, Artificial Sequence
  chemically synthesized
acacctaggtttcctccttg

SEQ ID NO: 25967 - DNA, 20 bp, Artificial Sequence
  chemically synthesized
taggtttcctccttgaagct

SEQ ID NO: 25968 - DNA, 20 bp, Artificial Sequence
  chemically synthesized
ctcagacatgtaaactttgc

SEQ ID NO: 25969 - DNA, 20 bp, Artificial Sequence
  chemically synthesized
aactttgcaagactgtgtcc

SEQ ID NO: 25970 - DNA, 20 bp, Artificial Sequence
  chemically synthesized
actttgcaagactgtgtccc

SEQ ID NO: 25971 - DNA, 20 bp, Artificial Sequence
  chemically synthesized
tttgcaagactgtgtcccag

SEQ ID NO: 25972 - DNA, 20 bp, Artificial Sequence
  chemically synthesized
ttgcaagactgtgtcccagg

SEQ ID NO: 25973 - DNA, 20 bp, Artificial Sequence
  chemically synthesized
aggaggttgaaatccatcat

SEQ ID NO: 25974 - DNA, 20 bp, Artificial Sequence
  chemically synthesized
ggaggttgaaatccatcatc

SEQ ID NO: 25975 - DNA, 20 bp, Artificial Sequence
  chemically synthesized
catcatcaggctcactctct

SEQ ID NO: 25976 - DNA, 20 bp, Artificial Sequence
  chemically synthesized
caggctcactctctaagcct

SEQ ID NO: 25977 - DNA, 20 bp, Artificial Sequence
  chemically synthesized
aggctcactctctaagccta

SEQ ID NO: 25978 - DNA, 20 bp, Artificial Sequence
  chemically synthesized
cactctctaagcctaaggat

SEQ ID NO: 25979 - DNA, 20 bp, Artificial Sequence
  chemically synthesized
tctaagcctaaggattagcc

SEQ ID NO: 25980 - DNA, 20 bp, Artificial Sequence
  chemically synthesized
ctaagcctaaggattagcct

SEQ ID NO: 25981 - DNA, 20 bp, Artificial Sequence
  chemically synthesized
taagcctaaggattagcctg

SEQ ID NO: 25982 - DNA, 20 bp, Artificial Sequence
  chemically synthesized
taaggattagcctggggacc

SEQ ID NO: 25983 - DNA, 20 bp, Artificial Sequence
  chemically synthesized
attagcctggggaccaagcc

SEQ ID NO: 25984 - DNA, 20 bp, Artificial Sequence
  chemically synthesized
ccagccctgaactctcctat

SEQ ID NO: 25985 - DNA, 20 bp, Artificial Sequence
  chemically synthesized
cagccctgaactctcctata

SEQ ID NO: 25986 - DNA, 20 bp, Artificial Sequence
  chemically synthesized
cctataaggccctcctcatc

SEQ ID NO: 25987 - DNA, 20 bp, Artificial Sequence
  chemically synthesized
ctataaggccctcctcatcc

SEQ ID NO: 25988 - DNA, 20 bp, Artificial Sequence
  chemically synthesized
aggccctcctcatccaggtc

SEQ ID NO: 25989 - DNA, 20 bp, Artificial Sequence
  chemically synthesized
ggccctcctcatccaggtca

SEQ ID NO: 25990 - DNA, 20 bp, Artificial Sequence
  chemically synthesized
ctcatccaggtcaaggtcat

SEQ ID NO: 25991 - DNA, 20 bp, Artificial Sequence
  chemically synthesized
tcatccaggtcaaggtcatg

SEQ ID NO: 25992 - DNA, 20 bp, Artificial Sequence
  chemically synthesized
catccaggtcaaggtcatga

SEQ ID NO: 25993 - DNA, 20 bp, Artificial Sequence
  chemically synthesized
atccaggtcaaggtcatgag

SEQ ID NO: 25994 - DNA, 20 bp, Artificial Sequence
  chemically synthesized
ggtcaaggtcatgaggggaa

SEQ ID NO: 25995 - DNA, 20 bp, Artificial Sequence
  chemically synthesized
gtcaaggtcatgaggggaac

SEQ ID NO: 25996 - DNA, 20 bp, Artificial Sequence
  chemically synthesized
tgaggggaacaggtgtatcc

SEQ ID NO: 25997 - DNA, 20 bp, Artificial Sequence
  chemically synthesized
gggaacaggtgtatcctggc

SEQ ID NO: 25998 - DNA, 20 bp, Artificial Sequence
  chemically synthesized
ggtgtatcctggccagcttc

SEQ ID NO: 25999 - DNA, 20 bp, Artificial Sequence
  chemically synthesized
atcctggccagcttctagca

SEQ ID NO: 26000 - DNA, 20 bp, Artificial Sequence
  chemically synthesized
ccagcttctagcacggccta

SEQ ID NO: 26001 - DNA, 20 bp, Artificial Sequence
  chemically synthesized
gcttctagcacggcctatag

SEQ ID NO: 26002 - DNA, 20 bp, Artificial Sequence
  chemically synthesized
cttctagcacggcctatagt

SEQ ID NO: 26003 - DNA, 20 bp, Artificial Sequence
  chemically synthesized
acggcctatagtaggtctct

SEQ ID NO: 26004 - DNA, 20 bp, Artificial Sequence
  chemically synthesized
cctatagtaggtctcttggt

SEQ ID NO: 26005 - DNA, 20 bp, Artificial Sequence
  chemically synthesized
taggtctcttggttggtcca

SEQ ID NO: 26006 - DNA, 20 bp, Artificial Sequence
  chemically synthesized
aggtctcttggttggtccaa

SEQ ID NO: 26007 - DNA, 20 bp, Artificial Sequence
  chemically synthesized
gtctcttggttggtccaaag

SEQ ID NO: 26008 - DNA, 20 bp, Artificial Sequence
  chemically synthesized
tctcttggttggtccaaagg

SEQ ID NO: 26009 - DNA, 20 bp, Artificial Sequence
  chemically synthesized
tggttggtccaaaggaggcc

SEQ ID NO: 26010 - DNA, 20 bp, Artificial Sequence
  chemically synthesized
aaaggaggcctggacttgca

SEQ ID NO: 26011 - DNA, 20 bp, Artificial Sequence
  chemically synthesized
aaggaggcctggacttgcat

SEQ ID NO: 26012 - DNA, 20 bp, Artificial Sequence
  chemically synthesized
ggaggcctggacttgcatgg

SEQ ID NO: 26013 - DNA, 20 bp, Artificial Sequence
  chemically synthesized
gaggcctggacttgcatggg

SEQ ID NO: 26014 - DNA, 20 bp, Artificial Sequence
  chemically synthesized
gcctggacttgcatgggagg

SEQ ID NO: 26015 - DNA, 20 bp, Artificial Sequence
  chemically synthesized
cctggacttgcatgggaggc

SEQ ID NO: 26016 - DNA, 20 bp, Artificial Sequence
  chemically synthesized
tggacttgcatgggaggcag

SEQ ID NO: 26017 - DNA, 20 bp, Artificial Sequence
  chemically synthesized
gacttgcatgggaggcagga

SEQ ID NO: 26018 - DNA, 20 bp, Artificial Sequence
  chemically synthesized
cttgcatgggaggcaggaga

SEQ ID NO: 26019 - DNA, 20 bp, Artificial Sequence
  chemically synthesized
gcatgggaggcaggagagag

SEQ ID NO: 26020 - DNA, 20 bp, Artificial Sequence
  chemically synthesized
agaagccaccccatctaatc

SEQ ID NO: 26021 - DNA, 20 bp, Artificial Sequence
  chemically synthesized
aatccagtcttctcctttta

SEQ ID NO: 26022 - DNA, 20 bp, Artificial Sequence
  chemically synthesized
cagtcttctccttttaaaga

SEQ ID NO: 26023 - DNA, 20 bp, Artificial Sequence
  chemically synthesized
cttttaaagatggaaacact

SEQ ID NO: 26024 - DNA, 20 bp, Artificial Sequence
  chemically synthesized
ttttaaagatggaaacactt

SEQ ID NO: 26025 - DNA, 20 bp, Artificial Sequence
  chemically synthesized
tttaaagatggaaacactta

SEQ ID NO: 26026 - DNA, 20 bp, Artificial Sequence
  chemically synthesized
aagatggaaacacttagggc

SEQ ID NO: 26027 - DNA, 20 bp, Artificial Sequence
  chemically synthesized
tggaaacacttagggccaga

SEQ ID NO: 26028 - DNA, 20 bp, Artificial Sequence
  chemically synthesized
aacacttagggccagaaaga

SEQ ID NO: 26029 - DNA, 20 bp, Artificial Sequence
  chemically synthesized
acacttagggccagaaagaa

SEQ ID NO: 26030 - DNA, 20 bp, Artificial Sequence
  chemically synthesized
agaaagaaaggatttattca

SEQ ID NO: 26031 - DNA, 20 bp, Artificial Sequence
  chemically synthesized
atttattcaaagtcacgaaa

SEQ ID NO: 26032 - DNA, 20 bp, Artificial Sequence
  chemically synthesized
attcaaagtcacgaaacagc

SEQ ID NO: 26033 - DNA, 20 bp, Artificial Sequence
  chemically synthesized
aaagtcacgaaacagctggt

SEQ ID NO: 26034 - DNA, 20 bp, Artificial Sequence
  chemically synthesized
gtcacgaaacagctggtgag

SEQ ID NO: 26035 - DNA, 20 bp, Artificial Sequence
  chemically synthesized
acgaaacagctggtgagtgg

SEQ ID NO: 26036 - DNA, 20 bp, Artificial Sequence
  chemically synthesized
gaaacagctggtgagtggca

SEQ ID NO: 26037 - DNA, 20 bp, Artificial Sequence
  chemically synthesized
cagctggtgagtggcagagt

SEQ ID NO: 26038 - DNA, 20 bp, Artificial Sequence
  chemically synthesized
agctggtgagtggcagagtt

SEQ ID NO: 26039 - DNA, 20 bp, Artificial Sequence
  chemically synthesized
gctggtgagtggcagagttg

SEQ ID NO: 26040 - DNA, 20 bp, Artificial Sequence
  chemically synthesized
gagtggcagagttggggttg

SEQ ID NO: 26041 - DNA, 20 bp, Artificial Sequence
  chemically synthesized
agagttggggttgcagaact

SEQ ID NO: 26042 - DNA, 20 bp, Artificial Sequence
  chemically synthesized
gagttggggttgcagaactt

SEQ ID NO: 26043 - DNA, 20 bp, Artificial Sequence
  chemically synthesized
ttaggttcctgactttcctc

SEQ ID NO: 26044 - DNA, 20 bp, Artificial Sequence
  chemically synthesized
ggttcctgactttcctctag

SEQ ID NO: 26045 - DNA, 20 bp, Artificial Sequence
  chemically synthesized
ctttcctctagcagtctctc

SEQ ID NO: 26046 - DNA, 20 bp, Artificial Sequence
  chemically synthesized
ttcctctagcagtctctcca

SEQ ID NO: 26047 - DNA, 20 bp, Artificial Sequence
  chemically synthesized
tcctctagcagtctctccag

SEQ ID NO: 26048 - DNA, 20 bp, Artificial Sequence
  chemically synthesized
agcagtctctccagaggaac

SEQ ID NO: 26049 - DNA, 20 bp, Artificial Sequence
  chemically synthesized
gaacaagtccctgcttccta

SEQ ID NO: 26050 - DNA, 20 bp, Artificial Sequence
  chemically synthesized
aacaagtccctgcttcctaa

SEQ ID NO: 26051 - DNA, 20 bp, Artificial Sequence
  chemically synthesized
aagtccctgcttcctaaagg

SEQ ID NO: 26052 - DNA, 20 bp, Artificial Sequence
  chemically synthesized
cctgcttcctaaaggaagaa

SEQ ID NO: 26053 - DNA, 20 bp, Artificial Sequence
  chemically synthesized
cctaaaggaagaaaagaatc

SEQ ID NO: 26054 - DNA, 20 bp, Artificial Sequence
  chemically synthesized
ctaaaggaagaaaagaatcc

SEQ ID NO: 26055 - DNA, 20 bp, Artificial Sequence
  chemically synthesized
taaaggaagaaaagaatccg

SEQ ID NO: 26056 - DNA, 20 bp, Artificial Sequence
  chemically synthesized
aaggaagaaaagaatccggg

SEQ ID NO: 26057 - DNA, 20 bp, Artificial Sequence
  chemically synthesized
gaagaaaagaatccggggag

SEQ ID NO: 26058 - DNA, 20 bp, Artificial Sequence
  chemically synthesized
gaaaagaatccggggagtgg

SEQ ID NO: 26059 - DNA, 20 bp, Artificial Sequence
  chemically synthesized
aagaatccggggagtggtgg

SEQ ID NO: 26060 - DNA, 20 bp, Artificial Sequence
  chemically synthesized
aatccggggagtggtggcag

SEQ ID NO: 26061 - DNA, 20 bp, Artificial Sequence
  chemically synthesized
atccggggagtggtggcagt

SEQ ID NO: 26062 - DNA, 20 bp, Artificial Sequence
  chemically synthesized
gtggtggcagtgggaataca

SEQ ID NO: 26063 - DNA, 20 bp, Artificial Sequence
  chemically synthesized
ggtggcagtgggaatacata

SEQ ID NO: 26064 - DNA, 20 bp, Artificial Sequence
  chemically synthesized
gcagtgggaatacatagagc

SEQ ID NO: 26065 - DNA, 20 bp, Artificial Sequence
  chemically synthesized
cagtgggaatacatagagca

SEQ ID NO: 26066 - DNA, 20 bp, Artificial Sequence
  chemically synthesized
agtgggaatacatagagcaa

SEQ ID NO: 26067 - DNA, 20 bp, Artificial Sequence
  chemically synthesized
tagagcaagggcatctctga

SEQ ID NO: 26068 - DNA, 20 bp, Artificial Sequence
  chemically synthesized
agcaagggcatctctgaaag

SEQ ID NO: 26069 - DNA, 20 bp, Artificial Sequence
  chemically synthesized
aaataacctgataaatacct

SEQ ID NO: 26070 - DNA, 20 bp, Artificial Sequence
  chemically synthesized
aacctgataaatacctcgga

SEQ ID NO: 26071 - DNA, 20 bp, Artificial Sequence
  chemically synthesized
cctgataaatacctcggata

SEQ ID NO: 26072 - DNA, 20 bp, Artificial Sequence
  chemically synthesized
ctgataaatacctcggatag

SEQ ID NO: 26073 - DNA, 20 bp, Artificial Sequence
  chemically synthesized
taaatacctcggatagaggc

SEQ ID NO: 26074 - DNA, 20 bp, Artificial Sequence
  chemically synthesized
aaatacctcggatagaggca

SEQ ID NO: 26075 - DNA, 20 bp, Artificial Sequence
  chemically synthesized
tgcccccactacacacaaac

SEQ ID NO: 26076 - DNA, 20 bp, Artificial Sequence
  chemically synthesized
ctacacacaaacaagatcct

SEQ ID NO: 26077 - DNA, 20 bp, Artificial Sequence
  chemically synthesized
cacaaacaagatcctcagct

SEQ ID NO: 26078 - DNA, 20 bp, Artificial Sequence
  chemically synthesized
acaaacaagatcctcagctg

SEQ ID NO: 26079 - DNA, 20 bp, Artificial Sequence
  chemically synthesized
aagatcctcagctgaggact

SEQ ID NO: 26080 - DNA, 20 bp, Artificial Sequence
  chemically synthesized
gatcctcagctgaggactca

SEQ ID NO: 26081 - DNA, 20 bp, Artificial Sequence
  chemically synthesized
cctcagctgaggactcagag

SEQ ID NO: 26082 - DNA, 20 bp, Artificial Sequence
  chemically synthesized
ctcagctgaggactcagagc

SEQ ID NO: 26083 - DNA, 20 bp, Artificial Sequence
  chemically synthesized
cagctgaggactcagagcag

SEQ ID NO: 26084 - DNA, 20 bp, Artificial Sequence
  chemically synthesized
tgaggactcagagcaggagt

SEQ ID NO: 26085 - DNA, 20 bp, Artificial Sequence
  chemically synthesized
gaggactcagagcaggagta

SEQ ID NO: 26086 - DNA, 20 bp, Artificial Sequence
  chemically synthesized
aggactcagagcaggagtaa

SEQ ID NO: 26087 - DNA, 20 bp, Artificial Sequence
  chemically synthesized
gggcacccctatcctcccca

SEQ ID NO: 26088 - DNA, 20 bp, Artificial Sequence
  chemically synthesized
atcctccccatggctttgaa

SEQ ID NO: 26089 - DNA, 20 bp, Artificial Sequence
  chemically synthesized
ctccccatggctttgaaaag

SEQ ID NO: 26090 - DNA, 20 bp, Artificial Sequence
  chemically synthesized
ccatggctttgaaaagaaga

SEQ ID NO: 26091 - DNA, 20 bp, Artificial Sequence
  chemically synthesized
atggctttgaaaagaagaaa

SEQ ID NO: 26092 - DNA, 20 bp, Artificial Sequence
  chemically synthesized
tggctttgaaaagaagaaag

SEQ ID NO: 26093 - DNA, 20 bp, Artificial Sequence
  chemically synthesized
ggctttgaaaagaagaaaga

SEQ ID NO: 26094 - DNA, 20 bp, Artificial Sequence
  chemically synthesized
gctttgaaaagaagaaagag

SEQ ID NO: 26095 - DNA, 20 bp, Artificial Sequence
  chemically synthesized
aagaagaaagaggggaaatt

SEQ ID NO: 26096 - DNA, 20 bp, Artificial Sequence
  chemically synthesized
gaagaaagaggggaaatttg

SEQ ID NO: 26097 - DNA, 20 bp, Artificial Sequence
  chemically synthesized
aagaaagaggggaaatttgg

SEQ ID NO: 26098 - DNA, 20 bp, Artificial Sequence
  chemically synthesized
agaaagaggggaaatttgga

SEQ ID NO: 26099 - DNA, 20 bp, Artificial Sequence
  chemically synthesized
agaggggaaatttggaggga

SEQ ID NO: 26100 - DNA, 20 bp, Artificial Sequence
  chemically synthesized
ggaaatttggagggatggtc

SEQ ID NO: 26101 - DNA, 20 bp, Artificial Sequence
  chemically synthesized
gatggtcaagttgatgattg

SEQ ID NO: 26102 - DNA, 20 bp, Artificial Sequence
  chemically synthesized
tggtcaagttgatgattgaa

SEQ ID NO: 26103 - DNA, 20 bp, Artificial Sequence
  chemically synthesized
agttgatgattgaagagaca

SEQ ID NO: 26104 - DNA, 20 bp, Artificial Sequence
  chemically synthesized
tgatgattgaagagacaaag

SEQ ID NO: 26105 - DNA, 20 bp, Artificial Sequence
  chemically synthesized
attgaagagacaaagtagtg

SEQ ID NO: 26106 - DNA, 20 bp, Artificial Sequence
  chemically synthesized
ttgaagagacaaagtagtgt

SEQ ID NO: 26107 - DNA, 20 bp, Artificial Sequence
  chemically synthesized
aaatctcaatgtttcttgca

SEQ ID NO: 26108 - DNA, 20 bp, Artificial Sequence
  chemically synthesized
gtcatttgttgaaaatgtgt

SEQ ID NO: 26109 - DNA, 20 bp, Artificial Sequence
  chemically synthesized
tttgttgaaaatgtgtcagc

SEQ ID NO: 26110 - DNA, 20 bp, Artificial Sequence
  chemically synthesized
gaaaatgtgtcagcaagtac

SEQ ID NO: 26111 - DNA, 20 bp, Artificial Sequence
  chemically synthesized
agtacaagcccatcttaaac

SEQ ID NO: 26112 - DNA, 20 bp, Artificial Sequence
  chemically synthesized
gcccatcttaaactggcaat

SEQ ID NO: 26113 - DNA, 20 bp, Artificial Sequence
  chemically synthesized
tggcaatgagacatctgaaa

SEQ ID NO: 26114 - DNA, 20 bp, Artificial Sequence
  chemically synthesized
acatctgaaatagattattt

SEQ ID NO: 26115 - DNA, 20 bp, Artificial Sequence
  chemically synthesized
ctgaaatagattatttaagc

SEQ ID NO: 26116 - DNA, 20 bp, Artificial Sequence
  chemically synthesized
tgaaatagattatttaagcc

SEQ ID NO: 26117 - DNA, 20 bp, Artificial Sequence
  chemically synthesized
gaaatagattatttaagcca

SEQ ID NO: 26118 - DNA, 20 bp, Artificial Sequence
  chemically synthesized
aatagattatttaagccagg

SEQ ID NO: 26119 - DNA, 20 bp, Artificial Sequence
  chemically synthesized
atagattatttaagccaggg

SEQ ID NO: 26120 - DNA, 20 bp, Artificial Sequence
  chemically synthesized
gattatttaagccagggagg

SEQ ID NO: 26121 - DNA, 20 bp, Artificial Sequence
  chemically synthesized
agccagggaggcagtattgc

SEQ ID NO: 26122 - DNA, 20 bp, Artificial Sequence
  chemically synthesized
gccagggaggcagtattgca

SEQ ID NO: 26123 - DNA, 20 bp, Artificial Sequence
  chemically synthesized
agggaggcagtattgcaagg

SEQ ID NO: 26124 - DNA, 20 bp, Artificial Sequence
  chemically synthesized
cagtattgcaaggaagaaca

SEQ ID NO: 26125 - DNA, 20 bp, Artificial Sequence
  chemically synthesized
caacacttgtttgtctgact

SEQ ID NO: 26126 - DNA, 20 bp, Artificial Sequence
  chemically synthesized
acacttgtttgtctgactca

SEQ ID NO: 26127 - DNA, 20 bp, Artificial Sequence
  chemically synthesized
cacttgtttgtctgactcag

SEQ ID NO: 26128 - DNA, 20 bp, Artificial Sequence
  chemically synthesized
tgactcagaggaataaaaca

SEQ ID NO: 26129 - DNA, 20 bp, Artificial Sequence
  chemically synthesized
aaacatagtaaattttgcct

SEQ ID NO: 26130 - DNA, 20 bp, Artificial Sequence
  chemically synthesized
catagtaaattttgccttag

SEQ ID NO: 26131 - DNA, 20 bp, Artificial Sequence
  chemically synthesized
atagtaaattttgccttagc

SEQ ID NO: 26132 - DNA, 20 bp, Artificial Sequence
  chemically synthesized
agcgggccacccacattcat

SEQ ID NO: 26133 - DNA, 20 bp, Artificial Sequence
  chemically synthesized
gcgggccacccacattcatt

SEQ ID NO: 26134 - DNA, 20 bp, Artificial Sequence
  chemically synthesized
cgggccacccacattcattg

SEQ ID NO: 26135 - DNA, 20 bp, Artificial Sequence
  chemically synthesized
gggccacccacattcattgg

SEQ ID NO: 26136 - DNA, 20 bp, Artificial Sequence
  chemically synthesized
ccacccacattcattggggg

SEQ ID NO: 26137 - DNA, 20 bp, Artificial Sequence
  chemically synthesized
cattgggggaagaaacaatt

SEQ ID NO: 26138 - DNA, 20 bp, Artificial Sequence
  chemically synthesized
attgggggaagaaacaattg

SEQ ID NO: 26139 - DNA, 20 bp, Artificial Sequence
  chemically synthesized
gggggaagaaacaattgagg

SEQ ID NO: 26140 - DNA, 20 bp, Artificial Sequence
  chemically synthesized
ggggaagaaacaattgaggt

SEQ ID NO: 26141 - DNA, 20 bp, Artificial Sequence
  chemically synthesized
gggaagaaacaattgaggtg

SEQ ID NO: 26142 - DNA, 20 bp, Artificial Sequence
  chemically synthesized
ggaagaaacaattgaggtgg

SEQ ID NO: 26143 - DNA, 20 bp, Artificial Sequence
  chemically synthesized
gaagaaacaattgaggtggg

SEQ ID NO: 26144 - DNA, 20 bp, Artificial Sequence
  chemically synthesized
caattgaggtggggggaaaa

SEQ ID NO: 26145 - DNA, 20 bp, Artificial Sequence
  chemically synthesized
gaggtggggggaaaacagaa

SEQ ID NO: 26146 - DNA, 20 bp, Artificial Sequence
  chemically synthesized
acagaacagatgaaccttca

SEQ ID NO: 26147 - DNA, 20 bp, Artificial Sequence
  chemically synthesized
agaacagatgaaccttcatg

SEQ ID NO: 26148 - DNA, 20 bp, Artificial Sequence
  chemically synthesized
gaaccttcatggagtttcac

SEQ ID NO: 26149 - DNA, 20 bp, Artificial Sequence
  chemically synthesized
accttcatggagtttcacaa

SEQ ID NO: 26150 - DNA, 20 bp, Artificial Sequence
  chemically synthesized
gagtttcacaagagtccaca

SEQ ID NO: 26151 - DNA, 20 bp, Artificial Sequence
  chemically synthesized
atggttgtgtcccttatttt

SEQ ID NO: 26152 - DNA, 20 bp, Artificial Sequence
  chemically synthesized
attttcagaaaatgtgaaat

SEQ ID NO: 26153 - DNA, 20 bp, Artificial Sequence
  chemically synthesized
tggaaaatacgcacttgtga

SEQ ID NO: 26154 - DNA, 20 bp, Artificial Sequence
  chemically synthesized
atacgcacttgtgaaagctg

SEQ ID NO: 26155 - DNA, 20 bp, Artificial Sequence
  chemically synthesized
tgtgaaagctgaagatgtca

SEQ ID NO: 26156 - DNA, 20 bp, Artificial Sequence
  chemically synthesized
gaagatgtcacagaaatctt

SEQ ID NO: 26157 - DNA, 20 bp, Artificial Sequence
  chemically synthesized
agatgtcacagaaatcttca

SEQ ID NO: 26158 - DNA, 20 bp, Artificial Sequence
  chemically synthesized
gatgtcacagaaatcttcag

SEQ ID NO: 26159 - DNA, 20 bp, Artificial Sequence
  chemically synthesized
aaatcttcagaggatttatt

SEQ ID NO: 26160 - DNA, 20 bp, Artificial Sequence
  chemically synthesized
cttcagaggatttatttaga

SEQ ID NO: 26161 - DNA, 20 bp, Artificial Sequence
  chemically synthesized
tcgtatcctccgctgtcaac

SEQ ID NO: 26162 - DNA, 20 bp, Artificial Sequence
  chemically synthesized
ccgctgtcaactggatgaat

SEQ ID NO: 26163 - DNA, 20 bp, Artificial Sequence
  chemically synthesized
atgtgaatgtaaccgcctat

SEQ ID NO: 26164 - DNA, 20 bp, Artificial Sequence
  chemically synthesized
tgtgaatgtaaccgcctatt

SEQ ID NO: 26165 - DNA, 20 bp, Artificial Sequence
  chemically synthesized
catttactctgtgcccacct

SEQ ID NO: 26166 - DNA, 20 bp, Artificial Sequence
  chemically synthesized
atttactctgtgcccacctt

SEQ ID NO: 26167 - DNA, 20 bp, Artificial Sequence
  chemically synthesized
cttgggctttgcttctctct

SEQ ID NO: 26168 - DNA, 20 bp, Artificial Sequence
  chemically synthesized
acctgctttttctttttatc

SEQ ID NO: 26169 - DNA, 20 bp, Artificial Sequence
  chemically synthesized
cctgctttttctttttatct

SEQ ID NO: 26170 - DNA, 20 bp, Artificial Sequence
  chemically synthesized
atctaggatatcctttctct

SEQ ID NO: 26171 - DNA, 20 bp, Artificial Sequence
  chemically synthesized
tatcctttctcttggctctc

SEQ ID NO: 26172 - DNA, 20 bp, Artificial Sequence
  chemically synthesized
atcctttctcttggctctcc

SEQ ID NO: 26173 - DNA, 20 bp, Artificial Sequence
  chemically synthesized
gctctccaggtttaactcat

SEQ ID NO: 26174 - DNA, 20 bp, Artificial Sequence
  chemically synthesized
ataagttttcctctttccca

SEQ ID NO: 26175 - DNA, 20 bp, Artificial Sequence
  chemically synthesized
ctctctccctcccttccaaa

SEQ ID NO: 26176 - DNA, 20 bp, Artificial Sequence
  chemically synthesized
tctcttcctttgaatttcca

SEQ ID NO: 26177 - DNA, 20 bp, Artificial Sequence
  chemically synthesized
cttcctttgaatttccatag

SEQ ID NO: 26178 - DNA, 20 bp, Artificial Sequence
  chemically synthesized
ctcatgacacactttctaca

SEQ ID NO: 26179 - DNA, 20 bp, Artificial Sequence
  chemically synthesized
tcatgacacactttctacat

SEQ ID NO: 26180 - DNA, 20 bp, Artificial Sequence
  chemically synthesized
catgacacactttctacatg

SEQ ID NO: 26181 - DNA, 20 bp, Artificial Sequence
  chemically synthesized
atgacacactttctacatgg

SEQ ID NO: 26182 - DNA, 20 bp, Artificial Sequence
  chemically synthesized
acacactttctacatggggg

SEQ ID NO: 26183 - DNA, 20 bp, Artificial Sequence
  chemically synthesized
acactttctacatgggggta

SEQ ID NO: 26184 - DNA, 20 bp, Artificial Sequence
  chemically synthesized
ggggtagagcaatttctgtg

SEQ ID NO: 26185 - DNA, 20 bp, Artificial Sequence
  chemically synthesized
gggtagagcaatttctgtgc

SEQ ID NO: 26186 - DNA, 20 bp, Artificial Sequence
  chemically synthesized
cttaccttttctactaaatg

SEQ ID NO: 26187 - DNA, 20 bp, Artificial Sequence
  chemically synthesized
ctactaaatgaagcctgctg

SEQ ID NO: 26188 - DNA, 20 bp, Artificial Sequence
  chemically synthesized
tactaaatgaagcctgctgt

SEQ ID NO: 26189 - DNA, 20 bp, Artificial Sequence
  chemically synthesized
ctaaatgaagcctgctgtgg

SEQ ID NO: 26190 - DNA, 20 bp, Artificial Sequence
  chemically synthesized
tgttttctttgtactgccca

SEQ ID NO: 26191 - DNA, 20 bp, Artificial Sequence
  chemically synthesized
tttctttgtactgcccacag

SEQ ID NO: 26192 - DNA, 20 bp, Artificial Sequence
  chemically synthesized
tttgtactgcccacagcggc

SEQ ID NO: 26193 - DNA, 20 bp, Artificial Sequence
  chemically synthesized
cagcggctagcccattgctt

SEQ ID NO: 26194 - DNA, 20 bp, Artificial Sequence
  chemically synthesized
agcggctagcccattgcttt

SEQ ID NO: 26195 - DNA, 20 bp, Artificial Sequence
  chemically synthesized
gcccattgctttgggcattg

SEQ ID NO: 26196 - DNA, 20 bp, Artificial Sequence
  chemically synthesized
cccattgctttgggcattgt

SEQ ID NO: 26197 - DNA, 20 bp, Artificial Sequence
  chemically synthesized
ctttgggcattgtaggcact

SEQ ID NO: 26198 - DNA, 20 bp, Artificial Sequence
  chemically synthesized
tatttgttgaatgaatgcat

SEQ ID NO: 26199 - DNA, 20 bp, Artificial Sequence
  chemically synthesized
tttgttgaatgaatgcatga

SEQ ID NO: 26200 - DNA, 20 bp, Artificial Sequence
  chemically synthesized
ttgttgaatgaatgcatgag

SEQ ID NO: 26201 - DNA, 20 bp, Artificial Sequence
  chemically synthesized
gagaggttgaatgaatgcat

SEQ ID NO: 26202 - DNA, 20 bp, Artificial Sequence
  chemically synthesized
gaggttgaatgaatgcatga

SEQ ID NO: 26203 - DNA, 20 bp, Artificial Sequence
  chemically synthesized
tgcatgagagaatgaatgaa

SEQ ID NO: 26204 - DNA, 20 bp, Artificial Sequence
  chemically synthesized
tgaatgaatggaatttatcc

SEQ ID NO: 26205 - DNA, 20 bp, Artificial Sequence
  chemically synthesized
gaatgaatggaatttatcct

SEQ ID NO: 26206 - DNA, 20 bp, Artificial Sequence
  chemically synthesized
ctgggaacacacattttgca

SEQ ID NO: 26207 - DNA, 20 bp, Artificial Sequence
  chemically synthesized
gaacacacattttgcatagt

SEQ ID NO: 26208 - DNA, 20 bp, Artificial Sequence
  chemically synthesized
aacacacattttgcatagtg

SEQ ID NO: 26209 - DNA, 20 bp, Artificial Sequence
  chemically synthesized
aaacaaaaaaaaattgtcct

SEQ ID NO: 26210 - DNA, 20 bp, Artificial Sequence
  chemically synthesized
agacaatttgtctttttatg

SEQ ID NO: 26211 - DNA, 20 bp, Artificial Sequence
  chemically synthesized
tttttatgcagctgccctct

SEQ ID NO: 26212 - DNA, 20 bp, Artificial Sequence
  chemically synthesized
cagctgccctctcagtctcc

SEQ ID NO: 26213 - DNA, 20 bp, Artificial Sequence
  chemically synthesized
gccctctcagtctcctagat

SEQ ID NO: 26214 - DNA, 20 bp, Artificial Sequence
  chemically synthesized
tagataagttccgccattct

SEQ ID NO: 26215 - DNA, 20 bp, Artificial Sequence
  chemically synthesized
agataagttccgccattcta

SEQ ID NO: 26216 - DNA, 20 bp, Artificial Sequence
  chemically synthesized
gttccgccattctaaggcaa

SEQ ID NO: 26217 - DNA, 20 bp, Artificial Sequence
  chemically synthesized
cattctaaggcaaaagctta

SEQ ID NO: 26218 - DNA, 20 bp, Artificial Sequence
  chemically synthesized
aatttatctaattcacgatc

SEQ ID NO: 26219 - DNA, 20 bp, Artificial Sequence
  chemically synthesized
acgatcaagtgaaaatactt

SEQ ID NO: 26220 - DNA, 20 bp, Artificial Sequence
  chemically synthesized
cgatcaagtgaaaatacttt

SEQ ID NO: 26221 - DNA, 20 bp, Artificial Sequence
  chemically synthesized
aagtgaaaatactttgggcc

SEQ ID NO: 26222 - DNA, 20 bp, Artificial Sequence
  chemically synthesized
gtgaaaatactttgggccca

SEQ ID NO: 26223 - DNA, 20 bp, Artificial Sequence
  chemically synthesized
atactttgggcccagagcca

SEQ ID NO: 26224 - DNA, 20 bp, Artificial Sequence
  chemically synthesized
ccagagccaaagaatattat

SEQ ID NO: 26225 - DNA, 20 bp, Artificial Sequence
  chemically synthesized
agagccaaagaatattattg

SEQ ID NO: 26226 - DNA, 20 bp, Artificial Sequence
  chemically synthesized
tttaacaccctaaatttaac

SEQ ID NO: 26227 - DNA, 20 bp, Artificial Sequence
  chemically synthesized
acaccctaaatttaaccagc

SEQ ID NO: 26228 - DNA, 20 bp, Artificial Sequence
  chemically synthesized
ccagctggaattcttttttt

SEQ ID NO: 26229 - DNA, 20 bp, Artificial Sequence
  chemically synthesized
ctattcaaccttttgaaatg

SEQ ID NO: 26230 - DNA, 20 bp, Artificial Sequence
  chemically synthesized
tattcaaccttttgaaatga

SEQ ID NO: 26231 - DNA, 20 bp, Artificial Sequence
  chemically synthesized
gaaatgaaggatttgccttt

SEQ ID NO: 26232 - DNA, 20 bp, Artificial Sequence
  chemically synthesized
atgaaggatttgccttttag

SEQ ID NO: 26233 - DNA, 20 bp, Artificial Sequence
  chemically synthesized
tgaaggatttgccttttagt

SEQ ID NO: 26234 - DNA, 20 bp, Artificial Sequence
  chemically synthesized
gaaatctgcatttcaacaca

SEQ ID NO: 26235 - DNA, 20 bp, Artificial Sequence
  chemically synthesized
tctgcatttcaacacaaaga

SEQ ID NO: 26236 - DNA, 20 bp, Artificial Sequence
  chemically synthesized
aagatggaacacaatgtctt

SEQ ID NO: 26237 - DNA, 20 bp, Artificial Sequence
  chemically synthesized
ggaacacaatgtctttggct

SEQ ID NO: 26238 - DNA, 20 bp, Artificial Sequence
  chemically synthesized
tctttggcttagttgctttt

SEQ ID NO: 26239 - DNA, 20 bp, Artificial Sequence
  chemically synthesized
ggcttagttgcttttcagaa

SEQ ID NO: 26240 - DNA, 20 bp, Artificial Sequence
  chemically synthesized
tagttgcttttcagaaaagc

SEQ ID NO: 26241 - DNA, 20 bp, Artificial Sequence
  chemically synthesized
aaagcaagattttttttttt

SEQ ID NO: 26242 - DNA, 20 bp, Artificial Sequence
  chemically synthesized
tatatgctttgcttatgtta

SEQ ID NO: 26243 - DNA, 20 bp, Artificial Sequence
  chemically synthesized
ctttgcttatgttaaagaca

SEQ ID NO: 26244 - DNA, 20 bp, Artificial Sequence
  chemically synthesized
tatgttaaagacacagcttg

SEQ ID NO: 26245 - DNA, 20 bp, Artificial Sequence
  chemically synthesized
gcttgcagaaaaattttgtt

SEQ ID NO: 26246 - DNA, 20 bp, Artificial Sequence
  chemically synthesized
cttgcagaaaaattttgttt

SEQ ID NO: 26247 - DNA, 20 bp, Artificial Sequence
  chemically synthesized
aaaattttgtttaggcctga

SEQ ID NO: 26248 - DNA, 20 bp, Artificial Sequence
  chemically synthesized
tttgtttaggcctgacagat

SEQ ID NO: 26249 - DNA, 20 bp, Artificial Sequence
  chemically synthesized
gtttaggcctgacagattgg

SEQ ID NO: 26250 - DNA, 20 bp, Artificial Sequence
  chemically synthesized
aggcctgacagattggtggc

SEQ ID NO: 26251 - DNA, 20 bp, Artificial Sequence
  chemically synthesized
attggtggctggcattttta

SEQ ID NO: 26252 - DNA, 20 bp, Artificial Sequence
  chemically synthesized
ggctggcatttttatagata

SEQ ID NO: 26253 - DNA, 20 bp, Artificial Sequence
  chemically synthesized
gctggcatttttatagataa

SEQ ID NO: 26254 - DNA, 20 bp, Artificial Sequence
  chemically synthesized
ctggcatttttatagataaa

SEQ ID NO: 26255 - DNA, 20 bp, Artificial Sequence
  chemically synthesized
tggcatttttatagataaag

SEQ ID NO: 26256 - DNA, 20 bp, Artificial Sequence
  chemically synthesized
ctctacttcctccctttatt

SEQ ID NO: 26257 - DNA, 20 bp, Artificial Sequence
  chemically synthesized
ttcctccctttattgagaaa

SEQ ID NO: 26258 - DNA, 20 bp, Artificial Sequence
  chemically synthesized
ccctttattgagaaaaagcc

SEQ ID NO: 26259 - DNA, 20 bp, Artificial Sequence
  chemically synthesized
cctttattgagaaaaagcct

SEQ ID NO: 26260 - DNA, 20 bp, Artificial Sequence
  chemically synthesized
tttattgagaaaaagcctag

SEQ ID NO: 26261 - DNA, 20 bp, Artificial Sequence
  chemically synthesized
ttattgagaaaaagcctagg

SEQ ID NO: 26262 - DNA, 20 bp, Artificial Sequence
  chemically synthesized
attgagaaaaagcctaggag

SEQ ID NO: 26263 - DNA, 20 bp, Artificial Sequence
  chemically synthesized
cctaggaggagaactcttaa

SEQ ID NO: 26264 - DNA, 20 bp, Artificial Sequence
  chemically synthesized
ctaggaggagaactcttaaa

SEQ ID NO: 26265 - DNA, 20 bp, Artificial Sequence
  chemically synthesized
aggagaactcttaaaaggtg

SEQ ID NO: 26266 - DNA, 20 bp, Artificial Sequence
  chemically synthesized
gaactcttaaaaggtgaagt

SEQ ID NO: 26267 - DNA, 20 bp, Artificial Sequence
  chemically synthesized
aagttagtaacctgttgttt

SEQ ID NO: 26268 - DNA, 20 bp, Artificial Sequence
  chemically synthesized
aacctgttgtttgagtaatc

SEQ ID NO: 26269 - DNA, 20 bp, Artificial Sequence
  chemically synthesized
acctgttgtttgagtaatca

SEQ ID NO: 26270 - DNA, 20 bp, Artificial Sequence
  chemically synthesized
gtttgagtaatcaaggctct

SEQ ID NO: 26271 - DNA, 20 bp, Artificial Sequence
  chemically synthesized
ttgagtaatcaaggctctaa

SEQ ID NO: 26272 - DNA, 20 bp, Artificial Sequence
  chemically synthesized
tgagtaatcaaggctctaag

SEQ ID NO: 26273 - DNA, 20 bp, Artificial Sequence
  chemically synthesized
taatcaaggctctaagagga

SEQ ID NO: 26274 - DNA, 20 bp, Artificial Sequence
  chemically synthesized
gaggatagcattgatcaaaa

SEQ ID NO: 26275 - DNA, 20 bp, Artificial Sequence
  chemically synthesized
ggatagcattgatcaaaaaa

SEQ ID NO: 26276 - DNA, 20 bp, Artificial Sequence
  chemically synthesized
tcaaaaaagagttttaaaat

SEQ ID NO: 26277 - DNA, 20 bp, Artificial Sequence
  chemically synthesized
atgagtgattgatgttatta

SEQ ID NO: 26278 - DNA, 20 bp, Artificial Sequence
  chemically synthesized
attgatgttattaaagtcac

SEQ ID NO: 26279 - DNA, 20 bp, Artificial Sequence
  chemically synthesized
tgttattaaagtcactggtg

SEQ ID NO: 26280 - DNA, 20 bp, Artificial Sequence
  chemically synthesized
aaagtcactggtgaagtatc

SEQ ID NO: 26281 - DNA, 20 bp, Artificial Sequence
  chemically synthesized
aagtcactggtgaagtatca

SEQ ID NO: 26282 - DNA, 20 bp, Artificial Sequence
  chemically synthesized
ggtgaagtatcaaggaatct

SEQ ID NO: 26283 - DNA, 20 bp, Artificial Sequence
  chemically synthesized
gtgaagtatcaaggaatcta

SEQ ID NO: 26284 - DNA, 20 bp, Artificial Sequence
  chemically synthesized
tcaaggaatctaaggaccat

SEQ ID NO: 26285 - DNA, 20 bp, Artificial Sequence
  chemically synthesized
aaggaatctaaggaccatga

SEQ ID NO: 26286 - DNA, 20 bp, Artificial Sequence
  chemically synthesized
ggaatctaaggaccatgaga

SEQ ID NO: 26287 - DNA, 20 bp, Artificial Sequence
  chemically synthesized
taaggaccatgagagagttt

SEQ ID NO: 26288 - DNA, 20 bp, Artificial Sequence
  chemically synthesized
aaggaccatgagagagtttc

SEQ ID NO: 26289 - DNA, 20 bp, Artificial Sequence
  chemically synthesized
aggaccatgagagagtttca

SEQ ID NO: 26290 - DNA, 20 bp, Artificial Sequence
  chemically synthesized
accatgagagagtttcaggg

SEQ ID NO: 26291 - DNA, 20 bp, Artificial Sequence
  chemically synthesized
agggaagaaattctatattg

SEQ ID NO: 26292 - DNA, 20 bp, Artificial Sequence
  chemically synthesized
attgctttcttttgtttttg

SEQ ID NO: 26293 - DNA, 20 bp, Artificial Sequence
  chemically synthesized
tttgcagaatacacttttta

SEQ ID NO: 26294 - DNA, 20 bp, Artificial Sequence
  chemically synthesized
atacactttttaaagaacat

SEQ ID NO: 26295 - DNA, 20 bp, Artificial Sequence
  chemically synthesized
tacactttttaaagaacatc

SEQ ID NO: 26296 - DNA, 20 bp, Artificial Sequence
  chemically synthesized
ttttaaagaacatcaggatt

SEQ ID NO: 26297 - DNA, 20 bp, Artificial Sequence
  chemically synthesized
aacatcaggatttggtaaaa

SEQ ID NO: 26298 - DNA, 20 bp, Artificial Sequence
  chemically synthesized
tcaggatttggtaaaacagc

SEQ ID NO: 26299 - DNA, 20 bp, Artificial Sequence
  chemically synthesized
tggtaaaacagccagtaaaa

SEQ ID NO: 26300 - DNA, 20 bp, Artificial Sequence
  chemically synthesized
cagccagtaaaaaagcaatg

SEQ ID NO: 26301 - DNA, 20 bp, Artificial Sequence
  chemically synthesized
agccagtaaaaaagcaatga

SEQ ID NO: 26302 - DNA, 20 bp, Artificial Sequence
  chemically synthesized
cacatgtaaatgctcatttc

SEQ ID NO: 26303 - DNA, 20 bp, Artificial Sequence
  chemically synthesized
aatgctcatttctagaacaa

SEQ ID NO: 26304 - DNA, 20 bp, Artificial Sequence
  chemically synthesized
tgctcatttctagaacaaaa

SEQ ID NO: 26305 - DNA, 20 bp, Artificial Sequence
  chemically synthesized
ctcatttctagaacaaaaga

SEQ ID NO: 26306 - DNA, 20 bp, Artificial Sequence
  chemically synthesized
gagtgcgattttgacaatat

SEQ ID NO: 26307 - DNA, 20 bp, Artificial Sequence
  chemically synthesized
tgcgattttgacaatatcag

SEQ ID NO: 26308 - DNA, 20 bp, Artificial Sequence
  chemically synthesized
gcgattttgacaatatcaga

SEQ ID NO: 26309 - DNA, 20 bp, Artificial Sequence
  chemically synthesized
acaatatcagaaggttaatt

SEQ ID NO: 26310 - DNA, 20 bp, Artificial Sequence
  chemically synthesized
atatcagaaggttaattaag

SEQ ID NO: 26311 - DNA, 20 bp, Artificial Sequence
  chemically synthesized
aggttaattaagaagtctgt

SEQ ID NO: 26312 - DNA, 20 bp, Artificial Sequence
  chemically synthesized
gaagtctgtgagtgatgata

SEQ ID NO: 26313 - DNA, 20 bp, Artificial Sequence
  chemically synthesized
tctgtgagtgatgataaagc

SEQ ID NO: 26314 - DNA, 20 bp, Artificial Sequence
  chemically synthesized
aagctggcacattttcatta

SEQ ID NO: 26315 - DNA, 20 bp, Artificial Sequence
  chemically synthesized
attacagattgacacaactc

SEQ ID NO: 26316 - DNA, 20 bp, Artificial Sequence
  chemically synthesized
gattgacacaactcaagtca

SEQ ID NO: 26317 - DNA, 20 bp, Artificial Sequence
  chemically synthesized
attgacacaactcaagtcac

SEQ ID NO: 26318 - DNA, 20 bp, Artificial Sequence
  chemically synthesized
cacaactcaagtcacaggca

SEQ ID NO: 26319 - DNA, 20 bp, Artificial Sequence
  chemically synthesized
ttgctctataatactctgat

SEQ ID NO: 26320 - DNA, 20 bp, Artificial Sequence
  chemically synthesized
tctataatactctgataagt

SEQ ID NO: 26321 - DNA, 20 bp, Artificial Sequence
  chemically synthesized
tataatactctgataagtca

SEQ ID NO: 26322 - DNA, 20 bp, Artificial Sequence
  chemically synthesized
tctgataagtcagagaatct

SEQ ID NO: 26323 - DNA, 20 bp, Artificial Sequence
  chemically synthesized
ataagtcagagaatctaagt

SEQ ID NO: 26324 - DNA, 20 bp, Artificial Sequence
  chemically synthesized
agtcagagaatctaagtgag

SEQ ID NO: 26325 - DNA, 20 bp, Artificial Sequence
  chemically synthesized
agaatctaagtgagaagaac

SEQ ID NO: 26326 - DNA, 20 bp, Artificial Sequence
  chemically synthesized
gtgagaagaactggtatcta

SEQ ID NO: 26327 - DNA, 20 bp, Artificial Sequence
  chemically synthesized
actggtatctatggtaaaca

SEQ ID NO: 26328 - DNA, 20 bp, Artificial Sequence
  chemically synthesized
ctggtatctatggtaaacat

SEQ ID NO: 26329 - DNA, 20 bp, Artificial Sequence
  chemically synthesized
tggtatctatggtaaacata

SEQ ID NO: 26330 - DNA, 20 bp, Artificial Sequence
  chemically synthesized
tctatggtaaacatagggtc

SEQ ID NO: 26331 - DNA, 20 bp, Artificial Sequence
  chemically synthesized
tatggtaaacatagggtcaa

SEQ ID NO: 26332 - DNA, 20 bp, Artificial Sequence
  chemically synthesized
gtaaacatagggtcaagagc

SEQ ID NO: 26333 - DNA, 20 bp, Artificial Sequence
  chemically synthesized
atagggtcaagagctagatg

SEQ ID NO: 26334 - DNA, 20 bp, Artificial Sequence
  chemically synthesized
aagagctagatgcggctgaa

SEQ ID NO: 26335 - DNA, 20 bp, Artificial Sequence
  chemically synthesized
gctagatgcggctgaataga

SEQ ID NO: 26336 - DNA, 20 bp, Artificial Sequence
  chemically synthesized
ctagatgcggctgaatagaa

SEQ ID NO: 26337 - DNA, 20 bp, Artificial Sequence
  chemically synthesized
tagaaaggacatttactttg

SEQ ID NO: 26338 - DNA, 20 bp, Artificial Sequence
  chemically synthesized
aaggacatttactttgcagt

SEQ ID NO: 26339 - DNA, 20 bp, Artificial Sequence
  chemically synthesized
aggacatttactttgcagtt

SEQ ID NO: 26340 - DNA, 20 bp, Artificial Sequence
  chemically synthesized
atttactttgcagttaggta

SEQ ID NO: 26341 - DNA, 20 bp, Artificial Sequence
  chemically synthesized
tactttgcagttaggtaaag

SEQ ID NO: 26342 - DNA, 20 bp, Artificial Sequence
  chemically synthesized
cagttaggtaaagaagcctc

SEQ ID NO: 26343 - DNA, 20 bp, Artificial Sequence
  chemically synthesized
aggtaaagaagcctctagct

SEQ ID NO: 26344 - DNA, 20 bp, Artificial Sequence
  chemically synthesized
aagaagcctctagctcagac

SEQ ID NO: 26345 - DNA, 20 bp, Artificial Sequence
  chemically synthesized
ctgcactgttgttatttgtg

SEQ ID NO: 26346 - DNA, 20 bp, Artificial Sequence
  chemically synthesized
ttatttgtgtggcttgaacc

SEQ ID NO: 26347 - DNA, 20 bp, Artificial Sequence
  chemically synthesized
tgtggcttgaacctagtaat

SEQ ID NO: 26348 - DNA, 20 bp, Artificial Sequence
  chemically synthesized
ttgaacctagtaatcggatt

SEQ ID NO: 26349 - DNA, 20 bp, Artificial Sequence
  chemically synthesized
ctagtaatcggattcagaac

SEQ ID NO: 26350 - DNA, 20 bp, Artificial Sequence
  chemically synthesized
aatcggattcagaactggaa

SEQ ID NO: 26351 - DNA, 20 bp, Artificial Sequence
  chemically synthesized
atcggattcagaactggaat

SEQ ID NO: 26352 - DNA, 20 bp, Artificial Sequence
  chemically synthesized
agaactggaatgggttcctt

SEQ ID NO: 26353 - DNA, 20 bp, Artificial Sequence
  chemically synthesized
gaactggaatgggttccttc

SEQ ID NO: 26354 - DNA, 20 bp, Artificial Sequence
  chemically synthesized
aactggaatgggttccttca

SEQ ID NO: 26355 - DNA, 20 bp, Artificial Sequence
  chemically synthesized
cagggtactttacaaacgtt

SEQ ID NO: 26356 - DNA, 20 bp, Artificial Sequence
  chemically synthesized
agggtactttacaaacgttc

SEQ ID NO: 26357 - DNA, 20 bp, Artificial Sequence
  chemically synthesized
aaacgttcaggatgcatttt

SEQ ID NO: 26358 - DNA, 20 bp, Artificial Sequence
  chemically synthesized
ttcaggatgcattttaagtg

SEQ ID NO: 26359 - DNA, 20 bp, Artificial Sequence
  chemically synthesized
gatgcattttaagtgtagtc

SEQ ID NO: 26360 - DNA, 20 bp, Artificial Sequence
  chemically synthesized
gcattttaagtgtagtctag

SEQ ID NO: 26361 - DNA, 20 bp, Artificial Sequence
  chemically synthesized
cattttaagtgtagtctaga

SEQ ID NO: 26362 - DNA, 20 bp, Artificial Sequence
  chemically synthesized
tttaagtgtagtctagaagg

SEQ ID NO: 26363 - DNA, 20 bp, Artificial Sequence
  chemically synthesized
gtagtctagaaggtggtaca

SEQ ID NO: 26364 - DNA, 20 bp, Artificial Sequence
  chemically synthesized
gtctagaaggtggtacatgg

SEQ ID NO: 26365 - DNA, 20 bp, Artificial Sequence
  chemically synthesized
ctagaaggtggtacatggaa

SEQ ID NO: 26366 - DNA, 20 bp, Artificial Sequence
  chemically synthesized
aggtggtacatggaagagct

SEQ ID NO: 26367 - DNA, 20 bp, Artificial Sequence
  chemically synthesized
ggtggtacatggaagagctg

SEQ ID NO: 26368 - DNA, 20 bp, Artificial Sequence
  chemically synthesized
gtggtacatggaagagctga

SEQ ID NO: 26369 - DNA, 20 bp, Artificial Sequence
  chemically synthesized
atggaagagctgagggactt

SEQ ID NO: 26370 - DNA, 20 bp, Artificial Sequence
  chemically synthesized
tggaagagctgagggacttg

SEQ ID NO: 26371 - DNA, 20 bp, Artificial Sequence
  chemically synthesized
gctgagggacttgaggatta

SEQ ID NO: 26372 - DNA, 20 bp, Artificial Sequence
  chemically synthesized
ttgaggattatggactgcga

SEQ ID NO: 26373 - DNA, 20 bp, Artificial Sequence
  chemically synthesized
tgaggattatggactgcgaa

SEQ ID NO: 26374 - DNA, 20 bp, Artificial Sequence
  chemically synthesized
tatggactgcgaaaggactg

SEQ ID NO: 26375 - DNA, 20 bp, Artificial Sequence
  chemically synthesized
atggactgcgaaaggactgt

SEQ ID NO: 26376 - DNA, 20 bp, Artificial Sequence
  chemically synthesized
gactgcgaaaggactgtagg

SEQ ID NO: 26377 - DNA, 20 bp, Artificial Sequence
  chemically synthesized
ctgtaggtagtcctgtattt

SEQ ID NO: 26378 - DNA, 20 bp, Artificial Sequence
  chemically synthesized
attttggcctgtcaccaata

SEQ ID NO: 26379 - DNA, 20 bp, Artificial Sequence
  chemically synthesized
tttggcctgtcaccaatata

SEQ ID NO: 26380 - DNA, 20 bp, Artificial Sequence
  chemically synthesized
atagagacccctcctcatca

SEQ ID NO: 26381 - DNA, 20 bp, Artificial Sequence
  chemically synthesized
tgtcatccattctctttttg

SEQ ID NO: 26382 - DNA, 20 bp, Artificial Sequence
  chemically synthesized
ccattctctttttgaagacc

SEQ ID NO: 26383 - DNA, 20 bp, Artificial Sequence
  chemically synthesized
cattctctttttgaagaccc

SEQ ID NO: 26384 - DNA, 20 bp, Artificial Sequence
  chemically synthesized
attctctttttgaagaccca

SEQ ID NO: 26385 - DNA, 20 bp, Artificial Sequence
  chemically synthesized
tttttgaagacccagggtga

SEQ ID NO: 26386 - DNA, 20 bp, Artificial Sequence
  chemically synthesized
tgaagacccagggtgaaaga

SEQ ID NO: 26387 - DNA, 20 bp, Artificial Sequence
  chemically synthesized
gaagacccagggtgaaagaa

SEQ ID NO: 26388 - DNA, 20 bp, Artificial Sequence
  chemically synthesized
aagacccagggtgaaagaaa

SEQ ID NO: 26389 - DNA, 20 bp, Artificial Sequence
  chemically synthesized
agacccagggtgaaagaaag

SEQ ID NO: 26390 - DNA, 20 bp, Artificial Sequence
  chemically synthesized
gacccagggtgaaagaaagg

SEQ ID NO: 26391 - DNA, 20 bp, Artificial Sequence
  chemically synthesized
gggtgaaagaaagggggtca

SEQ ID NO: 26392 - DNA, 20 bp, Artificial Sequence
  chemically synthesized
aaagggggtcacagtgtcac

SEQ ID NO: 26393 - DNA, 20 bp, Artificial Sequence
  chemically synthesized
ggggtcacagtgtcacgaga

SEQ ID NO: 26394 - DNA, 20 bp, Artificial Sequence
  chemically synthesized
acgagatagcccattccacg

SEQ ID NO: 26395 - DNA, 20 bp, Artificial Sequence
  chemically synthesized
cgagatagcccattccacgt

SEQ ID NO: 26396 - DNA, 20 bp, Artificial Sequence
  chemically synthesized
atagcccattccacgtggga

SEQ ID NO: 26397 - DNA, 20 bp, Artificial Sequence
  chemically synthesized
cactgaaaaaaaaaaaaaaa

SEQ ID NO: 26398 - DNA, 20 bp, Artificial Sequence
  chemically synthesized
actgaaaaaaaaaaaaaaac

SEQ ID NO: 26399 - DNA, 20 bp, Artificial Sequence
  chemically synthesized
ctgaaaaaaaaaaaaaaaca

SEQ ID NO: 26400 - DNA, 20 bp, Artificial Sequence
  chemically synthesized
attatctaaaaacatatgtt

SEQ ID NO: 26401 - DNA, 20 bp, Artificial Sequence
  chemically synthesized
ttatctaaaaacatatgttt

SEQ ID NO: 26402 - DNA, 20 bp, Artificial Sequence
  chemically synthesized
cacacattcacacacgtaca

SEQ ID NO: 26403 - DNA, 20 bp, Artificial Sequence
  chemically synthesized
gcacatgctaacacatgcac

SEQ ID NO: 26404 - DNA, 20 bp, Artificial Sequence
  chemically synthesized
agcatacacacacatgcaca

SEQ ID NO: 26405 - DNA, 20 bp, Artificial Sequence
  chemically synthesized
acacacacacacgtacattt

SEQ ID NO: 26406 - DNA, 20 bp, Artificial Sequence
  chemically synthesized
cacacgtacattttagtgaa

SEQ ID NO: 26407 - DNA, 20 bp, Artificial Sequence
  chemically synthesized
cacacatctatgtactcctg

SEQ ID NO: 26408 - DNA, 20 bp, Artificial Sequence
  chemically synthesized
cacatctatgtactcctgtg

SEQ ID NO: 26409 - DNA, 20 bp, Artificial Sequence
  chemically synthesized
catctatgtactcctgtgga

SEQ ID NO: 26410 - DNA, 20 bp, Artificial Sequence
  chemically synthesized
tactcctgtggagagtcctg

SEQ ID NO: 26411 - DNA, 20 bp, Artificial Sequence
  chemically synthesized
tgtggttttaatacctgtta

SEQ ID NO: 26412 - DNA, 20 bp, Artificial Sequence
  chemically synthesized
gttttaatacctgttaaagt

SEQ ID NO: 26413 - DNA, 20 bp, Artificial Sequence
  chemically synthesized
ttttaatacctgttaaagtt

SEQ ID NO: 26414 - DNA, 20 bp, Artificial Sequence
  chemically synthesized
ctgttaaagttgggctccca

SEQ ID NO: 26415 - DNA, 20 bp, Artificial Sequence
  chemically synthesized
ttaaagttgggctcccaaag

SEQ ID NO: 26416 - DNA, 20 bp, Artificial Sequence
  chemically synthesized
aaagcagtcattaaacgtgt

SEQ ID NO: 26417 - DNA, 20 bp, Artificial Sequence
  chemically synthesized
ttggaatgatgctttttgct

SEQ ID NO: 26418 - DNA, 20 bp, Artificial Sequence
  chemically synthesized
tgctttttgcttagctgttt

SEQ ID NO: 26419 - DNA, 20 bp, Artificial Sequence
  chemically synthesized
cttagctgttttggcacatt

SEQ ID NO: 26420 - DNA, 20 bp, Artificial Sequence
  chemically synthesized
ttggcacatttggaaatctg

SEQ ID NO: 26421 - DNA, 20 bp, Artificial Sequence
  chemically synthesized
ctgcagtattacctgttgat

SEQ ID NO: 26422 - DNA, 20 bp, Artificial Sequence
  chemically synthesized
cagtattacctgttgattag

SEQ ID NO: 26423 - DNA, 20 bp, Artificial Sequence
  chemically synthesized
attacctgttgattagtaga

SEQ ID NO: 26424 - DNA, 20 bp, Artificial Sequence
  chemically synthesized
ttgattagtagacagtaatg

SEQ ID NO: 26425 - DNA, 20 bp, Artificial Sequence
  chemically synthesized
atgtggctgtattacacacc

SEQ ID NO: 26426 - DNA, 20 bp, Artificial Sequence
  chemically synthesized
tgtattacacacccagtgat

SEQ ID NO: 26427 - DNA, 20 bp, Artificial Sequence
  chemically synthesized
acacacccagtgattagttt

SEQ ID NO: 26428 - DNA, 20 bp, Artificial Sequence
  chemically synthesized
tgattagtttcagaaacaaa

SEQ ID NO: 26429 - DNA, 20 bp, Artificial Sequence
  chemically synthesized
agaaacaaatagcatgttaa

SEQ ID NO: 26430 - DNA, 20 bp, Artificial Sequence
  chemically synthesized
caaatagcatgttaatagtc

SEQ ID NO: 26431 - DNA, 20 bp, Artificial Sequence
  chemically synthesized
aaatagcatgttaatagtca

SEQ ID NO: 26432 - DNA, 20 bp, Artificial Sequence
  chemically synthesized
ttaatagtcaaggaatcttt

SEQ ID NO: 26433 - DNA, 20 bp, Artificial Sequence
  chemically synthesized
ggaatctttgagatgttctt

SEQ ID NO: 26434 - DNA, 20 bp, Artificial Sequence
  chemically synthesized
gaatctttgagatgttcttg

SEQ ID NO: 26435 - DNA, 20 bp, Artificial Sequence
  chemically synthesized
tgatttaatgacttaaattc

SEQ ID NO: 26436 - DNA, 20 bp, Artificial Sequence
  chemically synthesized
gatttaatgacttaaattcc

SEQ ID NO: 26437 - DNA, 20 bp, Artificial Sequence
  chemically synthesized
aaattccaggaacatcccac

SEQ ID NO: 26438 - DNA, 20 bp, Artificial Sequence
  chemically synthesized
aattccaggaacatcccact

SEQ ID NO: 26439 - DNA, 20 bp, Artificial Sequence
  chemically synthesized
caggaacatcccactgggct

SEQ ID NO: 26440 - DNA, 20 bp, Artificial Sequence
  chemically synthesized
ggaacatcccactgggctta

SEQ ID NO: 26441 - DNA, 20 bp, Artificial Sequence
  chemically synthesized
ggcttagagctctttgtcaa

SEQ ID NO: 26442 - DNA, 20 bp, Artificial Sequence
  chemically synthesized
tagagctctttgtcaaaagt

SEQ ID NO: 26443 - DNA, 20 bp, Artificial Sequence
  chemically synthesized
aagttggtacccaatatatg

SEQ ID NO: 26444 - DNA, 20 bp, Artificial Sequence
  chemically synthesized
ccaatatatgtagaaatgta

SEQ ID NO: 26445 - DNA, 20 bp, Artificial Sequence
  chemically synthesized
aaatgtataacattaaatca

SEQ ID NO: 26446 - DNA, 20 bp, Artificial Sequence
  chemically synthesized
cattaaatcaaagccattcc

SEQ ID NO: 26447 - DNA, 20 bp, Artificial Sequence
  chemically synthesized
tttaatgaaacctgaaaaat

SEQ ID NO: 26448 - DNA, 20 bp, Artificial Sequence
  chemically synthesized
taatgaaacctgaaaaataa

SEQ ID NO: 26449 - DNA, 20 bp, Artificial Sequence
  chemically synthesized
agagtcactatttttaaatt

SEQ ID NO: 26450 - DNA, 20 bp, Artificial Sequence
  chemically synthesized
ctatttttaaattcagccat

SEQ ID NO: 26451 - DNA, 20 bp, Artificial Sequence
  chemically synthesized
tatttttaaattcagccata

SEQ ID NO: 26452 - DNA, 20 bp, Artificial Sequence
  chemically synthesized
tttgcaacctaataatgtgt

SEQ ID NO: 26453 - DNA, 20 bp, Artificial Sequence
  chemically synthesized
ttgcaacctaataatgtgta

SEQ ID NO: 26454 - DNA, 20 bp, Artificial Sequence
  chemically synthesized
ataatgtgtaaggcatttct

SEQ ID NO: 26455 - DNA, 20 bp, Artificial Sequence
  chemically synthesized
taatgtgtaaggcatttctg

SEQ ID NO: 26456 - DNA, 20 bp, Artificial Sequence
  chemically synthesized
taaggcatttctgaggcccc

SEQ ID NO: 26457 - DNA, 20 bp, Artificial Sequence
  chemically synthesized
ggcatttctgaggccccaag

SEQ ID NO: 26458 - DNA, 20 bp, Artificial Sequence
  chemically synthesized
gaggccccaagtggaaatac

SEQ ID NO: 26459 - DNA, 20 bp, Artificial Sequence
  chemically synthesized
aggccccaagtggaaatact

SEQ ID NO: 26460 - DNA, 20 bp, Artificial Sequence
  chemically synthesized
ccaagtggaaatactgggtc

SEQ ID NO: 26461 - DNA, 20 bp, Artificial Sequence
  chemically synthesized
aagtggaaatactgggtcta

SEQ ID NO: 26462 - DNA, 20 bp, Artificial Sequence
  chemically synthesized
gtggaaatactgggtctaga

SEQ ID NO: 26463 - DNA, 20 bp, Artificial Sequence
  chemically synthesized
ctagagagacctttatgaaa

SEQ ID NO: 26464 - DNA, 20 bp, Artificial Sequence
  chemically synthesized
gagacctttatgaaatagaa

SEQ ID NO: 26465 - DNA, 20 bp, Artificial Sequence
  chemically synthesized
agacctttatgaaatagaac

SEQ ID NO: 26466 - DNA, 20 bp, Artificial Sequence
  chemically synthesized
caggttgaaacaccttccac

SEQ ID NO: 26467 - DNA, 20 bp, Artificial Sequence
  chemically synthesized
tgaaacaccttccaccagaa

SEQ ID NO: 26468 - DNA, 20 bp, Artificial Sequence
  chemically synthesized
accttccaccagaaaagtgt

SEQ ID NO: 26469 - DNA, 20 bp, Artificial Sequence
  chemically synthesized
aagtgtaagacatttgaaaa

SEQ ID NO: 26470 - DNA, 20 bp, Artificial Sequence
  chemically synthesized
aagacatttgaaaaaagatt

SEQ ID NO: 26471 - DNA, 20 bp, Artificial Sequence
  chemically synthesized
catttgaaaaaagattgagt

SEQ ID NO: 26472 - DNA, 20 bp, Artificial Sequence
  chemically synthesized
gaaaaaagattgagtcagaa

SEQ ID NO: 26473 - DNA, 20 bp, Artificial Sequence
  chemically synthesized
aaaaaagattgagtcagaaa

SEQ ID NO: 26474 - DNA, 20 bp, Artificial Sequence
  chemically synthesized
aaaaagattgagtcagaaaa

SEQ ID NO: 26475 - DNA, 20 bp, Artificial Sequence
  chemically synthesized
aagggaaatgtgtcccattt

SEQ ID NO: 26476 - DNA, 20 bp, Artificial Sequence
  chemically synthesized
gggaaatgtgtcccatttga

SEQ ID NO: 26477 - DNA, 20 bp, Artificial Sequence
  chemically synthesized
atgtgtcccatttgagagac

SEQ ID NO: 26478 - DNA, 20 bp, Artificial Sequence
  chemically synthesized
gtcccatttgagagaccaga

SEQ ID NO: 26479 - DNA, 20 bp, Artificial Sequence
  chemically synthesized
tcccatttgagagaccagaa

SEQ ID NO: 26480 - DNA, 20 bp, Artificial Sequence
  chemically synthesized
cccatttgagagaccagaaa

SEQ ID NO: 26481 - DNA, 20 bp, Artificial Sequence
  chemically synthesized
gagagaccagaaagggaaac

SEQ ID NO: 26482 - DNA, 20 bp, Artificial Sequence
  chemically synthesized
gagaccagaaagggaaacaa

SEQ ID NO: 26483 - DNA, 20 bp, Artificial Sequence
  chemically synthesized
cagaaagggaaacaagagtc

SEQ ID NO: 26484 - DNA, 20 bp, Artificial Sequence
  chemically synthesized
cagttcctgctgtgtccgtg

SEQ ID NO: 26485 - DNA, 20 bp, Artificial Sequence
  chemically synthesized
ctgtgtccgtgcagttgcca

SEQ ID NO: 26486 - DNA, 20 bp, Artificial Sequence
  chemically synthesized
agctgcgttcgctgacatgt

SEQ ID NO: 26487 - DNA, 20 bp, Artificial Sequence
  chemically synthesized
cgctgacatgtcggctttaa

SEQ ID NO: 26488 - DNA, 20 bp, Artificial Sequence
  chemically synthesized
tgacatgtcggctttaatgg

SEQ ID NO: 26489 - DNA, 20 bp, Artificial Sequence
  chemically synthesized
catgtcggctttaatggaag

SEQ ID NO: 26490 - DNA, 20 bp, Artificial Sequence
  chemically synthesized
tcggctttaatggaagcagt

SEQ ID NO: 26491 - DNA, 20 bp, Artificial Sequence
  chemically synthesized
cggctttaatggaagcagtg

SEQ ID NO: 26492 - DNA, 20 bp, Artificial Sequence
  chemically synthesized
cagtgaggacacaatctgtc

SEQ ID NO: 26493 - DNA, 20 bp, Artificial Sequence
  chemically synthesized
ggacacaatctgtctggcac

SEQ ID NO: 26494 - DNA, 20 bp, Artificial Sequence
  chemically synthesized
acaatctgtctggcacaagc

SEQ ID NO: 26495 - DNA, 20 bp, Artificial Sequence
  chemically synthesized
ctgtctggcacaagctggtt

SEQ ID NO: 26496 - DNA, 20 bp, Artificial Sequence
  chemically synthesized
tgtctggcacaagctggttt

SEQ ID NO: 26497 - DNA, 20 bp, Artificial Sequence
  chemically synthesized
tttgggtgttgtctcatgct

SEQ ID NO: 26498 - DNA, 20 bp, Artificial Sequence
  chemically synthesized
gggtgttgtctcatgctaag

SEQ ID NO: 26499 - DNA, 20 bp, Artificial Sequence
  chemically synthesized
ggtgttgtctcatgctaaga

SEQ ID NO: 26500 - DNA, 20 bp, Artificial Sequence
  chemically synthesized
gtctcatgctaagaaggccc

SEQ ID NO: 26501 - DNA, 20 bp, Artificial Sequence
  chemically synthesized
taagaaggccctggacctga

SEQ ID NO: 26502 - DNA, 20 bp, Artificial Sequence
  chemically synthesized
agaaggccctggacctgatg

SEQ ID NO: 26503 - DNA, 20 bp, Artificial Sequence
  chemically synthesized
aaggccctggacctgatgga

SEQ ID NO: 26504 - DNA, 20 bp, Artificial Sequence
  chemically synthesized
cctggacctgatggagagcc

SEQ ID NO: 26505 - DNA, 20 bp, Artificial Sequence
  chemically synthesized
ttccctgtccttatcaatga

SEQ ID NO: 26506 - DNA, 20 bp, Artificial Sequence
  chemically synthesized
ctgtccttatcaatgacaga

SEQ ID NO: 26507 - DNA, 20 bp, Artificial Sequence
  chemically synthesized
gtccttatcaatgacagacg

SEQ ID NO: 26508 - DNA, 20 bp, Artificial Sequence
  chemically synthesized
tccttatcaatgacagacgg

SEQ ID NO: 26509 - DNA, 20 bp, Artificial Sequence
  chemically synthesized
ccttatcaatgacagacgga

SEQ ID NO: 26510 - DNA, 20 bp, Artificial Sequence
  chemically synthesized
tatcaatgacagacggaggg

SEQ ID NO: 26511 - DNA, 20 bp, Artificial Sequence
  chemically synthesized
gtggaacctgaatttcctaa

SEQ ID NO: 26512 - DNA, 20 bp, Artificial Sequence
  chemically synthesized
ggaacctgaatttcctaatg

SEQ ID NO: 26513 - DNA, 20 bp, Artificial Sequence
  chemically synthesized
gaacctgaatttcctaatgg

SEQ ID NO: 26514 - DNA, 20 bp, Artificial Sequence
  chemically synthesized
aacctgaatttcctaatgga

SEQ ID NO: 26515 - DNA, 20 bp, Artificial Sequence
  chemically synthesized
tttcctaatggagggatcct

SEQ ID NO: 26516 - DNA, 20 bp, Artificial Sequence
  chemically synthesized
ttcctaatggagggatcctt

SEQ ID NO: 26517 - DNA, 20 bp, Artificial Sequence
  chemically synthesized
tcctaatggagggatcctta

SEQ ID NO: 26518 - DNA, 20 bp, Artificial Sequence
  chemically synthesized
gggatccttagggattccct

SEQ ID NO: 26519 - DNA, 20 bp, Artificial Sequence
  chemically synthesized
taatttgtttttgactgttc

SEQ ID NO: 26520 - DNA, 20 bp, Artificial Sequence
  chemically synthesized
ttttgactgttccagtccta

SEQ ID NO: 26521 - DNA, 20 bp, Artificial Sequence
  chemically synthesized
tttgactgttccagtcctaa

SEQ ID NO: 26522 - DNA, 20 bp, Artificial Sequence
  chemically synthesized
tgactgttccagtcctaaag

SEQ ID NO: 26523 - DNA, 20 bp, Artificial Sequence
  chemically synthesized
gactgttccagtcctaaagg

SEQ ID NO: 26524 - DNA, 20 bp, Artificial Sequence
  chemically synthesized
tgttccagtcctaaaggagg

SEQ ID NO: 26525 - DNA, 20 bp, Artificial Sequence
  chemically synthesized
gttccagtcctaaaggaggt

SEQ ID NO: 26526 - DNA, 20 bp, Artificial Sequence
  chemically synthesized
gtcctaaaggaggtgggtcc

SEQ ID NO: 26527 - DNA, 20 bp, Artificial Sequence
  chemically synthesized
taaaggaggtgggtcctgga

SEQ ID NO: 26528 - DNA, 20 bp, Artificial Sequence
  chemically synthesized
aaaggaggtgggtcctggac

SEQ ID NO: 26529 - DNA, 20 bp, Artificial Sequence
  chemically synthesized
aggaggtgggtcctggacag

SEQ ID NO: 26530 - DNA, 20 bp, Artificial Sequence
  chemically synthesized
ggaggtgggtcctggacagg

SEQ ID NO: 26531 - DNA, 20 bp, Artificial Sequence
  chemically synthesized
gaggtgggtcctggacagga

SEQ ID NO: 26532 - DNA, 20 bp, Artificial Sequence
  chemically synthesized
gtcctggacaggagggaaaa

SEQ ID NO: 26533 - DNA, 20 bp, Artificial Sequence
  chemically synthesized
caggagggaaaacagcctca

SEQ ID NO: 26534 - DNA, 20 bp, Artificial Sequence
  chemically synthesized
gaaaacagcctcatggccca

SEQ ID NO: 26535 - DNA, 20 bp, Artificial Sequence
  chemically synthesized
aaaacagcctcatggcccat

SEQ ID NO: 26536 - DNA, 20 bp, Artificial Sequence
  chemically synthesized
atggcccatgggtctctgcc

SEQ ID NO: 26537 - DNA, 20 bp, Artificial Sequence
  chemically synthesized
tggcccatgggtctctgccc

SEQ ID NO: 26538 - DNA, 20 bp, Artificial Sequence
  chemically synthesized
ggcccatgggtctctgccca

SEQ ID NO: 26539 - DNA, 20 bp, Artificial Sequence
  chemically synthesized
tctctgcccagggaatttca

SEQ ID NO: 26540 - DNA, 20 bp, Artificial Sequence
  chemically synthesized
ccagggaatttcaaagcttc

SEQ ID NO: 26541 - DNA, 20 bp, Artificial Sequence
  chemically synthesized
gttcatacttcccttaccct

SEQ ID NO: 26542 - DNA, 20 bp, Artificial Sequence
  chemically synthesized
atacttcccttaccctaaga

SEQ ID NO: 26543 - DNA, 20 bp, Artificial Sequence
  chemically synthesized
cttcccttaccctaagacag

SEQ ID NO: 26544 - DNA, 20 bp, Artificial Sequence
  chemically synthesized
ctaagacagcagtgctgatt

SEQ ID NO: 26545 - DNA, 20 bp, Artificial Sequence
  chemically synthesized
cagcagtgctgattcagctt

SEQ ID NO: 26546 - DNA, 20 bp, Artificial Sequence
  chemically synthesized
gattcagcttgagtgtgcat

SEQ ID NO: 26547 - DNA, 20 bp, Artificial Sequence
  chemically synthesized
gagtgtgcatgagaatcacc

SEQ ID NO: 26548 - DNA, 20 bp, Artificial Sequence
  chemically synthesized
gtgtgcatgagaatcacctg

SEQ ID NO: 26549 - DNA, 20 bp, Artificial Sequence
  chemically synthesized
cctggagaatttattcaaca

SEQ ID NO: 26550 - DNA, 20 bp, Artificial Sequence
  chemically synthesized
ggagaatttattcaacatag

SEQ ID NO: 26551 - DNA, 20 bp, Artificial Sequence
  chemically synthesized
gagaatttattcaacataga

SEQ ID NO: 26552 - DNA, 20 bp, Artificial Sequence
  chemically synthesized
cccaccctcaatttctgatt

SEQ ID NO: 26553 - DNA, 20 bp, Artificial Sequence
  chemically synthesized
ccctcaatttctgattcagt

SEQ ID NO: 26554 - DNA, 20 bp, Artificial Sequence
  chemically synthesized
atttctgattcagtaagtct

SEQ ID NO: 26555 - DNA, 20 bp, Artificial Sequence
  chemically synthesized
tttctgattcagtaagtctg

SEQ ID NO: 26556 - DNA, 20 bp, Artificial Sequence
  chemically synthesized
ctgattcagtaagtctgagg

SEQ ID NO: 26557 - DNA, 20 bp, Artificial Sequence
  chemically synthesized
gtaagtctgaggtggtgccc

SEQ ID NO: 26558 - DNA, 20 bp, Artificial Sequence
  chemically synthesized
ttgcattttgaacaaactcc

SEQ ID NO: 26559 - DNA, 20 bp, Artificial Sequence
  chemically synthesized
tgcattttgaacaaactccc

SEQ ID NO: 26560 - DNA, 20 bp, Artificial Sequence
  chemically synthesized
aactcccaggtgatgctgat

SEQ ID NO: 26561 - DNA, 20 bp, Artificial Sequence
  chemically synthesized
actcccaggtgatgctgatc

SEQ ID NO: 26562 - DNA, 20 bp, Artificial Sequence
  chemically synthesized
ctcccaggtgatgctgatcg

SEQ ID NO: 26563 - DNA, 20 bp, Artificial Sequence
  chemically synthesized
tcccaggtgatgctgatcgg

SEQ ID NO: 26564 - DNA, 20 bp, Artificial Sequence
  chemically synthesized
caggtgatgctgatcggggg

SEQ ID NO: 26565 - DNA, 20 bp, Artificial Sequence
  chemically synthesized
aggtgatgctgatcgggggt

SEQ ID NO: 26566 - DNA, 20 bp, Artificial Sequence
  chemically synthesized
atgctgatcgggggtgggcc

SEQ ID NO: 26567 - DNA, 20 bp, Artificial Sequence
  chemically synthesized
tgctgatcgggggtgggcct

SEQ ID NO: 26568 - DNA, 20 bp, Artificial Sequence
  chemically synthesized
tgggcctgggtctgcgctgt

SEQ ID NO: 26569 - DNA, 20 bp, Artificial Sequence
  chemically synthesized
gctgtgagaatcacttgcct

SEQ ID NO: 26570 - DNA, 20 bp, Artificial Sequence
  chemically synthesized
tgtgagaatcacttgcctaa

SEQ ID NO: 26571 - DNA, 20 bp, Artificial Sequence
  chemically synthesized
cttgcctaagagcactaaca

SEQ ID NO: 26572 - DNA, 20 bp, Artificial Sequence
  chemically synthesized
agagcactaacaaagaaaaa

SEQ ID NO: 26573 - DNA, 20 bp, Artificial Sequence
  chemically synthesized
agcactaacaaagaaaaaaa

SEQ ID NO: 26574 - DNA, 20 bp, Artificial Sequence
  chemically synthesized
gcactaacaaagaaaaaaag

SEQ ID NO: 26575 - DNA, 20 bp, Artificial Sequence
  chemically synthesized
agaaaaaaagaggacataac

SEQ ID NO: 26576 - DNA, 20 bp, Artificial Sequence
  chemically synthesized
taactagatcacccacttcc

SEQ ID NO: 26577 - DNA, 20 bp, Artificial Sequence
  chemically synthesized
tagatcacccacttcctagc

SEQ ID NO: 26578 - DNA, 20 bp, Artificial Sequence
  chemically synthesized
cccacttcctagccagcaac

SEQ ID NO: 26579 - DNA, 20 bp, Artificial Sequence
  chemically synthesized
cacttcctagccagcaacca

SEQ ID NO: 26580 - DNA, 20 bp, Artificial Sequence
  chemically synthesized
cagcaaccagagcccatctc

SEQ ID NO: 26581 - DNA, 20 bp, Artificial Sequence
  chemically synthesized
aaccagagcccatctctggc

SEQ ID NO: 26582 - DNA, 20 bp, Artificial Sequence
  chemically synthesized
accagagcccatctctggct

SEQ ID NO: 26583 - DNA, 20 bp, Artificial Sequence
  chemically synthesized
ccagagcccatctctggctg

SEQ ID NO: 26584 - DNA, 20 bp, Artificial Sequence
  chemically synthesized
agagcccatctctggctggg

SEQ ID NO: 26585 - DNA, 20 bp, Artificial Sequence
  chemically synthesized
tctctggctggggagaatga

SEQ ID NO: 26586 - DNA, 20 bp, Artificial Sequence
  chemically synthesized
ggctggggagaatgaaagcg

SEQ ID NO: 26587 - DNA, 20 bp, Artificial Sequence
  chemically synthesized
gctggggagaatgaaagcga

SEQ ID NO: 26588 - DNA, 20 bp, Artificial Sequence
  chemically synthesized
ggggagaatgaaagcgaagg

SEQ ID NO: 26589 - DNA, 20 bp, Artificial Sequence
  chemically synthesized
gggagaatgaaagcgaaggt

SEQ ID NO: 26590 - DNA, 20 bp, Artificial Sequence
  chemically synthesized
aatgaaagcgaaggtgggaa

SEQ ID NO: 26591 - DNA, 20 bp, Artificial Sequence
  chemically synthesized
gaaagcgaaggtgggaaaag

SEQ ID NO: 26592 - DNA, 20 bp, Artificial Sequence
  chemically synthesized
aagcgaaggtgggaaaagaa

SEQ ID NO: 26593 - DNA, 20 bp, Artificial Sequence
  chemically synthesized
agcgaaggtgggaaaagaag

SEQ ID NO: 26594 - DNA, 20 bp, Artificial Sequence
  chemically synthesized
gaaaagaagaggccctcaac

SEQ ID NO: 26595 - DNA, 20 bp, Artificial Sequence
  chemically synthesized
aaaagaagaggccctcaacc

SEQ ID NO: 26596 - DNA, 20 bp, Artificial Sequence
  chemically synthesized
aaagaagaggccctcaacca

SEQ ID NO: 26597 - DNA, 20 bp, Artificial Sequence
  chemically synthesized
aagaagaggccctcaaccag

SEQ ID NO: 26598 - DNA, 20 bp, Artificial Sequence
  chemically synthesized
aagaggccctcaaccagggg

SEQ ID NO: 26599 - DNA, 20 bp, Artificial Sequence
  chemically synthesized
gcagctccttttccccacct

SEQ ID NO: 26600 - DNA, 20 bp, Artificial Sequence
  chemically synthesized
tccttttccccaccttggcc

SEQ ID NO: 26601 - DNA, 20 bp, Artificial Sequence
  chemically synthesized
ccttttccccaccttggcct

SEQ ID NO: 26602 - DNA, 20 bp, Artificial Sequence
  chemically synthesized
tttccccaccttggcctggg

SEQ ID NO: 26603 - DNA, 20 bp, Artificial Sequence
  chemically synthesized
ttccccaccttggcctggga

SEQ ID NO: 26604 - DNA, 20 bp, Artificial Sequence
  chemically synthesized
cccaccttggcctgggaagg

SEQ ID NO: 26605 - DNA, 20 bp, Artificial Sequence
  chemically synthesized
caccttggcctgggaaggca

SEQ ID NO: 26606 - DNA, 20 bp, Artificial Sequence
  chemically synthesized
ggaaggcagagctgctcctc

SEQ ID NO: 26607 - DNA, 20 bp, Artificial Sequence
  chemically synthesized
tgctcctcgagtttgacgct

SEQ ID NO: 26608 - DNA, 20 bp, Artificial Sequence
  chemically synthesized
tcctcgagtttgacgctcag

SEQ ID NO: 26609 - DNA, 20 bp, Artificial Sequence
  chemically synthesized
tgtgatactttactttgcct

SEQ ID NO: 26610 - DNA, 20 bp, Artificial Sequence
  chemically synthesized
aagccgtgatgaaataattg

SEQ ID NO: 26611 - DNA, 20 bp, Artificial Sequence
  chemically synthesized
agccgtgatgaaataattga

SEQ ID NO: 26612 - DNA, 20 bp, Artificial Sequence
  chemically synthesized
tgaaataattgaaggcatca

SEQ ID NO: 26613 - DNA, 20 bp, Artificial Sequence
  chemically synthesized
ataattgaaggcatcatagc

SEQ ID NO: 26614 - DNA, 20 bp, Artificial Sequence
  chemically synthesized
attgaaggcatcatagcaag

SEQ ID NO: 26615 - DNA, 20 bp, Artificial Sequence
  chemically synthesized
aggcatcatagcaagaagtt

SEQ ID NO: 26616 - DNA, 20 bp, Artificial Sequence
  chemically synthesized
catagcaagaagttaagccc

SEQ ID NO: 26617 - DNA, 20 bp, Artificial Sequence
  chemically synthesized
atagcaagaagttaagccct

SEQ ID NO: 26618 - DNA, 20 bp, Artificial Sequence
  chemically synthesized
tagcaagaagttaagcccta

SEQ ID NO: 26619 - DNA, 20 bp, Artificial Sequence
  chemically synthesized
gcaagaagttaagccctagg

SEQ ID NO: 26620 - DNA, 20 bp, Artificial Sequence
  chemically synthesized
caagaagttaagccctaggg

SEQ ID NO: 26621 - DNA, 20 bp, Artificial Sequence
  chemically synthesized
tagggaggctattaacaatt

SEQ ID NO: 26622 - DNA, 20 bp, Artificial Sequence
  chemically synthesized
tattaacaatttagcatttc

SEQ ID NO: 26623 - DNA, 20 bp, Artificial Sequence
  chemically synthesized
tttagcatttccagttcatg

SEQ ID NO: 26624 - DNA, 20 bp, Artificial Sequence
  chemically synthesized
ttagcatttccagttcatgt

SEQ ID NO: 26625 - DNA, 20 bp, Artificial Sequence
  chemically synthesized
aatgtcgattttacttacca

SEQ ID NO: 26626 - DNA, 20 bp, Artificial Sequence
  chemically synthesized
tgtcgattttacttaccaaa

SEQ ID NO: 26627 - DNA, 20 bp, Artificial Sequence
  chemically synthesized
acttaccaaagagaatatta

SEQ ID NO: 26628 - DNA, 20 bp, Artificial Sequence
  chemically synthesized
gagaatattatggatgtgtt

SEQ ID NO: 26629 - DNA, 20 bp, Artificial Sequence
  chemically synthesized
aatattatggatgtgtttag

SEQ ID NO: 26630 - DNA, 20 bp, Artificial Sequence
  chemically synthesized
attatggatgtgtttagtgg

SEQ ID NO: 26631 - DNA, 20 bp, Artificial Sequence
  chemically synthesized
atggatgtgtttagtggaag

SEQ ID NO: 26632 - DNA, 20 bp, Artificial Sequence
  chemically synthesized
gatgtgtttagtggaagaag

SEQ ID NO: 26633 - DNA, 20 bp, Artificial Sequence
  chemically synthesized
gtgtttagtggaagaagcag

SEQ ID NO: 26634 - DNA, 20 bp, Artificial Sequence
  chemically synthesized
agtggaagaagcagcagaat

SEQ ID NO: 26635 - DNA, 20 bp, Artificial Sequence
  chemically synthesized
gaagaagcagcagaatcagc

SEQ ID NO: 26636 - DNA, 20 bp, Artificial Sequence
  chemically synthesized
aagaagcagcagaatcagct

SEQ ID NO: 26637 - DNA, 20 bp, Artificial Sequence
  chemically synthesized
agaagcagcagaatcagctg

SEQ ID NO: 26638 - DNA, 20 bp, Artificial Sequence
  chemically synthesized
gcagaatcagctggggtccc

SEQ ID NO: 26639 - DNA, 20 bp, Artificial Sequence
  chemically synthesized
aatcagctggggtccccagt

SEQ ID NO: 26640 - DNA, 20 bp, Artificial Sequence
  chemically synthesized
ttgctttgaccctcttcctg

SEQ ID NO: 26641 - DNA, 20 bp, Artificial Sequence
  chemically synthesized
tgctttgaccctcttcctga

SEQ ID NO: 26642 - DNA, 20 bp, Artificial Sequence
  chemically synthesized
tttgaccctcttcctgaagg

SEQ ID NO: 26643 - DNA, 20 bp, Artificial Sequence
  chemically synthesized
tcctgaaggaagataaatgc

SEQ ID NO: 26644 - DNA, 20 bp, Artificial Sequence
  chemically synthesized
cctgaaggaagataaatgca

SEQ ID NO: 26645 - DNA, 20 bp, Artificial Sequence
  chemically synthesized
ctgaaggaagataaatgcaa

SEQ ID NO: 26646 - DNA, 20 bp, Artificial Sequence
  chemically synthesized
aggaagataaatgcaagggt

SEQ ID NO: 26647 - DNA, 20 bp, Artificial Sequence
  chemically synthesized
atgcaagggtgagtctcaca

SEQ ID NO: 26648 - DNA, 20 bp, Artificial Sequence
  chemically synthesized
aagggtgagtctcacaaaga

SEQ ID NO: 26649 - DNA, 20 bp, Artificial Sequence
  chemically synthesized
gacagtgtgctttttttcta

SEQ ID NO: 26650 - DNA, 20 bp, Artificial Sequence
  chemically synthesized
tgctttttttctaaagtaaa

SEQ ID NO: 26651 - DNA, 20 bp, Artificial Sequence
  chemically synthesized
ttctaaagtaaatagcttct

SEQ ID NO: 26652 - DNA, 20 bp, Artificial Sequence
  chemically synthesized
tctaaagtaaatagcttctt

SEQ ID NO: 26653 - DNA, 20 bp, Artificial Sequence
  chemically synthesized
taaatagcttcttaggctga

SEQ ID NO: 26654 - DNA, 20 bp, Artificial Sequence
  chemically synthesized
taggctgatagaaatgtttt

SEQ ID NO: 26655 - DNA, 20 bp, Artificial Sequence
  chemically synthesized
tttttagctgtctaattctg

SEQ ID NO: 26656 - DNA, 20 bp, Artificial Sequence
  chemically synthesized
ttttagctgtctaattctgc

SEQ ID NO: 26657 - DNA, 20 bp, Artificial Sequence
  chemically synthesized
tttagctgtctaattctgca

SEQ ID NO: 26658 - DNA, 20 bp, Artificial Sequence
  chemically synthesized
ttagctgtctaattctgcag

SEQ ID NO: 26659 - DNA, 20 bp, Artificial Sequence
  chemically synthesized
gctgtctaattctgcagggg

SEQ ID NO: 26660 - DNA, 20 bp, Artificial Sequence
  chemically synthesized
gtctaattctgcaggggaag

SEQ ID NO: 26661 - DNA, 20 bp, Artificial Sequence
  chemically synthesized
ctaattctgcaggggaagca

SEQ ID NO: 26662 - DNA, 20 bp, Artificial Sequence
  chemically synthesized
taattctgcaggggaagcag

SEQ ID NO: 26663 - DNA, 20 bp, Artificial Sequence
  chemically synthesized
ttctgcaggggaagcagagg

SEQ ID NO: 26664 - DNA, 20 bp, Artificial Sequence
  chemically synthesized
ctgcaggggaagcagaggta

SEQ ID NO: 26665 - DNA, 20 bp, Artificial Sequence
  chemically synthesized
tgcaggggaagcagaggtag

SEQ ID NO: 26666 - DNA, 20 bp, Artificial Sequence
  chemically synthesized
gcaggggaagcagaggtaga

SEQ ID NO: 26667 - DNA, 20 bp, Artificial Sequence
  chemically synthesized
gcagaggtagagggtgaaca

SEQ ID NO: 26668 - DNA, 20 bp, Artificial Sequence
  chemically synthesized
ggtagagggtgaacacagca

SEQ ID NO: 26669 - DNA, 20 bp, Artificial Sequence
  chemically synthesized
gtagagggtgaacacagcaa

SEQ ID NO: 26670 - DNA, 20 bp, Artificial Sequence
  chemically synthesized
agggtgaacacagcaaaggt

SEQ ID NO: 26671 - DNA, 20 bp, Artificial Sequence
  chemically synthesized
gggtgaacacagcaaaggtg

SEQ ID NO: 26672 - DNA, 20 bp, Artificial Sequence
  chemically synthesized
gaacacagcaaaggtgaggc

SEQ ID NO: 26673 - DNA, 20 bp, Artificial Sequence
  chemically synthesized
aacacagcaaaggtgaggcc

SEQ ID NO: 26674 - DNA, 20 bp, Artificial Sequence
  chemically synthesized
cacagcaaaggtgaggccag

SEQ ID NO: 26675 - DNA, 20 bp, Artificial Sequence
  chemically synthesized
acagcaaaggtgaggccagg

SEQ ID NO: 26676 - DNA, 20 bp, Artificial Sequence
  chemically synthesized
aaaggtgaggccaggaggcc

SEQ ID NO: 26677 - DNA, 20 bp, Artificial Sequence
  chemically synthesized
aaggtgaggccaggaggccc

SEQ ID NO: 26678 - DNA, 20 bp, Artificial Sequence
  chemically synthesized
gtgaggccaggaggcccagg

SEQ ID NO: 26679 - DNA, 20 bp, Artificial Sequence
  chemically synthesized
aggccaggaggcccaggcag

SEQ ID NO: 26680 - DNA, 20 bp, Artificial Sequence
  chemically synthesized
gccaggaggcccaggcagca

SEQ ID NO: 26681 - DNA, 20 bp, Artificial Sequence
  chemically synthesized
aggaggcccaggcagcagag

SEQ ID NO: 26682 - DNA, 20 bp, Artificial Sequence
  chemically synthesized
ggaggcccaggcagcagagc

SEQ ID NO: 26683 - DNA, 20 bp, Artificial Sequence
  chemically synthesized
aggccttgttttccaattgt

SEQ ID NO: 26684 - DNA, 20 bp, Artificial Sequence
  chemically synthesized
tgttttccaattgtgagacc

SEQ ID NO: 26685 - DNA, 20 bp, Artificial Sequence
  chemically synthesized
ttccaattgtgagaccaagt

SEQ ID NO: 26686 - DNA, 20 bp, Artificial Sequence
  chemically synthesized
gtgagaccaagtcagttcat

SEQ ID NO: 26687 - DNA, 20 bp, Artificial Sequence
  chemically synthesized
agttcattggcacctttcga

SEQ ID NO: 26688 - DNA, 20 bp, Artificial Sequence
  chemically synthesized
cacctttcgaaagccccatg

SEQ ID NO: 26689 - DNA, 20 bp, Artificial Sequence
  chemically synthesized
aaagccccatgtagcgctgc

SEQ ID NO: 26690 - DNA, 20 bp, Artificial Sequence
  chemically synthesized
aagccccatgtagcgctgct

SEQ ID NO: 26691 - DNA, 20 bp, Artificial Sequence
  chemically synthesized
cccatgtagcgctgctgggc

SEQ ID NO: 26692 - DNA, 20 bp, Artificial Sequence
  chemically synthesized
gctgggctggaccctccccc

SEQ ID NO: 26693 - DNA, 20 bp, Artificial Sequence
  chemically synthesized
ggctggaccctcccccaaga

SEQ ID NO: 26694 - DNA, 20 bp, Artificial Sequence
  chemically synthesized
gaccctcccccaagacggtt

SEQ ID NO: 26695 - DNA, 20 bp, Artificial Sequence
  chemically synthesized
gacggttaagtactgcttaa

SEQ ID NO: 26696 - DNA, 20 bp, Artificial Sequence
  chemically synthesized
ttaagtactgcttaatggat

SEQ ID NO: 26697 - DNA, 20 bp, Artificial Sequence
  chemically synthesized
agtactgcttaatggatcag

SEQ ID NO: 26698 - DNA, 20 bp, Artificial Sequence
  chemically synthesized
gcttaatggatcagtagaaa

SEQ ID NO: 26699 - DNA, 20 bp, Artificial Sequence
  chemically synthesized
cttaatggatcagtagaaac

SEQ ID NO: 26700 - DNA, 20 bp, Artificial Sequence
  chemically synthesized
tagaaacaggaccttcttgt

SEQ ID NO: 26701 - DNA, 20 bp, Artificial Sequence
  chemically synthesized
agaaacaggaccttcttgtt

SEQ ID NO: 26702 - DNA, 20 bp, Artificial Sequence
  chemically synthesized
aacaggaccttcttgttggg

SEQ ID NO: 26703 - DNA, 20 bp, Artificial Sequence
  chemically synthesized
gaccttcttgttgggcagtg

SEQ ID NO: 26704 - DNA, 20 bp, Artificial Sequence
  chemically synthesized
ttgttgggcagtgaagacca

SEQ ID NO: 26705 - DNA, 20 bp, Artificial Sequence
  chemically synthesized
ttgggcagtgaagaccacgg

SEQ ID NO: 26706 - DNA, 20 bp, Artificial Sequence
  chemically synthesized
tgggcagtgaagaccacggc

SEQ ID NO: 26707 - DNA, 20 bp, Artificial Sequence
  chemically synthesized
ggcagtgaagaccacggcag

SEQ ID NO: 26708 - DNA, 20 bp, Artificial Sequence
  chemically synthesized
agtgaagaccacggcaggag

SEQ ID NO: 26709 - DNA, 20 bp, Artificial Sequence
  chemically synthesized
gaagaccacggcaggagcag

SEQ ID NO: 26710 - DNA, 20 bp, Artificial Sequence
  chemically synthesized
aagaccacggcaggagcagc

SEQ ID NO: 26711 - DNA, 20 bp, Artificial Sequence
  chemically synthesized
agaccacggcaggagcagca

SEQ ID NO: 26712 - DNA, 20 bp, Artificial Sequence
  chemically synthesized
gaccacggcaggagcagcag

SEQ ID NO: 26713 - DNA, 20 bp, Artificial Sequence
  chemically synthesized
accacggcaggagcagcagg

SEQ ID NO: 26714 - DNA, 20 bp, Artificial Sequence
  chemically synthesized
ccacggcaggagcagcaggg

SEQ ID NO: 26715 - DNA, 20 bp, Artificial Sequence
  chemically synthesized
cggcaggagcagcagggggg

SEQ ID NO: 26716 - DNA, 20 bp, Artificial Sequence
  chemically synthesized
gcaggagcagcaggggggaa

SEQ ID NO: 26717 - DNA, 20 bp, Artificial Sequence
  chemically synthesized
ggggggaagagacaaattcc

SEQ ID NO: 26718 - DNA, 20 bp, Artificial Sequence
  chemically synthesized
gggggaagagacaaattccc

SEQ ID NO: 26719 - DNA, 20 bp, Artificial Sequence
  chemically synthesized
gaagagacaaattcccagga

SEQ ID NO: 26720 - DNA, 20 bp, Artificial Sequence
  chemically synthesized
aaattcccaggaaagaccac

SEQ ID NO: 26721 - DNA, 20 bp, Artificial Sequence
  chemically synthesized
cccaggaaagaccactggat

SEQ ID NO: 26722 - DNA, 20 bp, Artificial Sequence
  chemically synthesized
ccaggaaagaccactggatc

SEQ ID NO: 26723 - DNA, 20 bp, Artificial Sequence
  chemically synthesized
aggaaagaccactggatcag

SEQ ID NO: 26724 - DNA, 20 bp, Artificial Sequence
  chemically synthesized
aagaccactggatcaggagt

SEQ ID NO: 26725 - DNA, 20 bp, Artificial Sequence
  chemically synthesized
agaccactggatcaggagtc

SEQ ID NO: 26726 - DNA, 20 bp, Artificial Sequence
  chemically synthesized
accactggatcaggagtcag

SEQ ID NO: 26727 - DNA, 20 bp, Artificial Sequence
  chemically synthesized
taattctaatcttcacattg

SEQ ID NO: 26728 - DNA, 20 bp, Artificial Sequence
  chemically synthesized
ttcacattgtggttaatcat

SEQ ID NO: 26729 - DNA, 20 bp, Artificial Sequence
  chemically synthesized
attgtggttaatcatcagtg

SEQ ID NO: 26730 - DNA, 20 bp, Artificial Sequence
  chemically synthesized
gttaatcatcagtgtagcca

SEQ ID NO: 26731 - DNA, 20 bp, Artificial Sequence
  chemically synthesized
ttaatcatcagtgtagccat

SEQ ID NO: 26732 - DNA, 20 bp, Artificial Sequence
  chemically synthesized
tcatcagtgtagccatgggc

SEQ ID NO: 26733 - DNA, 20 bp, Artificial Sequence
  chemically synthesized
gcaagtcacttaatttctca

SEQ ID NO: 26734 - DNA, 20 bp, Artificial Sequence
  chemically synthesized
cacttaatttctcatggcct

SEQ ID NO: 26735 - DNA, 20 bp, Artificial Sequence
  chemically synthesized
gtttccccatctgtaaaatg

SEQ ID NO: 26736 - DNA, 20 bp, Artificial Sequence
  chemically synthesized
tttccccatctgtaaaatga

SEQ ID NO: 26737 - DNA, 20 bp, Artificial Sequence
  chemically synthesized
ttccccatctgtaaaatgaa

SEQ ID NO: 26738 - DNA, 20 bp, Artificial Sequence
  chemically synthesized
ccatctgtaaaatgaaggga

SEQ ID NO: 26739 - DNA, 20 bp, Artificial Sequence
  chemically synthesized
tgaagggacagacttgatga

SEQ ID NO: 26740 - DNA, 20 bp, Artificial Sequence
  chemically synthesized
gggacagacttgatgatagc

SEQ ID NO: 26741 - DNA, 20 bp, Artificial Sequence
  chemically synthesized
ggacagacttgatgatagct

SEQ ID NO: 26742 - DNA, 20 bp, Artificial Sequence
  chemically synthesized
gacagacttgatgatagcta

SEQ ID NO: 26743 - DNA, 20 bp, Artificial Sequence
  chemically synthesized
agctagggttttttacaact

SEQ ID NO: 26744 - DNA, 20 bp, Artificial Sequence
  chemically synthesized
acaaaaacaaactatgctgc

SEQ ID NO: 26745 - DNA, 20 bp, Artificial Sequence
  chemically synthesized
aaacaaactatgctgccaga

SEQ ID NO: 26746 - DNA, 20 bp, Artificial Sequence
  chemically synthesized
aaactatgctgccagatagt

SEQ ID NO: 26747 - DNA, 20 bp, Artificial Sequence
  chemically synthesized
atgctgccagatagtcagat

SEQ ID NO: 26748 - DNA, 20 bp, Artificial Sequence
  chemically synthesized
tgagacctcactttgccaca

SEQ ID NO: 26749 - DNA, 20 bp, Artificial Sequence
  chemically synthesized
acctcactttgccacacggc

SEQ ID NO: 26750 - DNA, 20 bp, Artificial Sequence
  chemically synthesized
tgccacacggccagacactg

SEQ ID NO: 26751 - DNA, 20 bp, Artificial Sequence
  chemically synthesized
ccacacggccagacactgta

SEQ ID NO: 26752 - DNA, 20 bp, Artificial Sequence
  chemically synthesized
ggccagacactgtagagatc

SEQ ID NO: 26753 - DNA, 20 bp, Artificial Sequence
  chemically synthesized
tagagatctggtcctgccgt

SEQ ID NO: 26754 - DNA, 20 bp, Artificial Sequence
  chemically synthesized
ggtcctgccgtcagcttgtt

SEQ ID NO: 26755 - DNA, 20 bp, Artificial Sequence
  chemically synthesized
gtcctgccgtcagcttgttt

SEQ ID NO: 26756 - DNA, 20 bp, Artificial Sequence
  chemically synthesized
tcctgccgtcagcttgttta

SEQ ID NO: 26757 - DNA, 20 bp, Artificial Sequence
  chemically synthesized
gtcagcttgtttagggctaa

SEQ ID NO: 26758 - DNA, 20 bp, Artificial Sequence
  chemically synthesized
tcagcttgtttagggctaat

SEQ ID NO: 26759 - DNA, 20 bp, Artificial Sequence
  chemically synthesized
gtttagggctaatgggtttg

SEQ ID NO: 26760 - DNA, 20 bp, Artificial Sequence
  chemically synthesized
gggctaatgggtttgtagac

SEQ ID NO: 26761 - DNA, 20 bp, Artificial Sequence
  chemically synthesized
ttgtagacaagtttgccaac

SEQ ID NO: 26762 - DNA, 20 bp, Artificial Sequence
  chemically synthesized
gtagacaagtttgccaacaa

SEQ ID NO: 26763 - DNA, 20 bp, Artificial Sequence
  chemically synthesized
tgccaacaagagattcatgc

SEQ ID NO: 26764 - DNA, 20 bp, Artificial Sequence
  chemically synthesized
gccaacaagagattcatgcg

SEQ ID NO: 26765 - DNA, 20 bp, Artificial Sequence
  chemically synthesized
ccaacaagagattcatgcga

SEQ ID NO: 26766 - DNA, 20 bp, Artificial Sequence
  chemically synthesized
caacaagagattcatgcgag

SEQ ID NO: 26767 - DNA, 20 bp, Artificial Sequence
  chemically synthesized
aagagattcatgcgaggggc

SEQ ID NO: 26768 - DNA, 20 bp, Artificial Sequence
  chemically synthesized
agagattcatgcgaggggct

SEQ ID NO: 26769 - DNA, 20 bp, Artificial Sequence
  chemically synthesized
ttcatgcgaggggctaggca

SEQ ID NO: 26770 - DNA, 20 bp, Artificial Sequence
  chemically synthesized
gcgaggggctaggcatggat

SEQ ID NO: 26771 - DNA, 20 bp, Artificial Sequence
  chemically synthesized
cgaggggctaggcatggatt

SEQ ID NO: 26772 - DNA, 20 bp, Artificial Sequence
  chemically synthesized
gggctaggcatggattaggt

SEQ ID NO: 26773 - DNA, 20 bp, Artificial Sequence
  chemically synthesized
ctaggcatggattaggttag

SEQ ID NO: 26774 - DNA, 20 bp, Artificial Sequence
  chemically synthesized
gcagttctcccatttcttgc

SEQ ID NO: 26775 - DNA, 20 bp, Artificial Sequence
  chemically synthesized
agttctcccatttcttgctg

SEQ ID NO: 26776 - DNA, 20 bp, Artificial Sequence
  chemically synthesized
gttctcccatttcttgctgg

SEQ ID NO: 26777 - DNA, 20 bp, Artificial Sequence
  chemically synthesized
ttcttgctggaggcctgctg

SEQ ID NO: 26778 - DNA, 20 bp, Artificial Sequence
  chemically synthesized
ggaggcctgctgaagcactt

SEQ ID NO: 26779 - DNA, 20 bp, Artificial Sequence
  chemically synthesized
gaggcctgctgaagcacttc

SEQ ID NO: 26780 - DNA, 20 bp, Artificial Sequence
  chemically synthesized
aggcctgctgaagcacttca

SEQ ID NO: 26781 - DNA, 20 bp, Artificial Sequence
  chemically synthesized
agcacttcagggtctcttcc

SEQ ID NO: 26782 - DNA, 20 bp, Artificial Sequence
  chemically synthesized
cacttcagggtctcttccca

SEQ ID NO: 26783 - DNA, 20 bp, Artificial Sequence
  chemically synthesized
tcagggtctcttcccagagt

SEQ ID NO: 26784 - DNA, 20 bp, Artificial Sequence
  chemically synthesized
gggtctcttcccagagtaag

SEQ ID NO: 26785 - DNA, 20 bp, Artificial Sequence
  chemically synthesized
tctcttcccagagtaagtgg

SEQ ID NO: 26786 - DNA, 20 bp, Artificial Sequence
  chemically synthesized
tcttcccagagtaagtggca

SEQ ID NO: 26787 - DNA, 20 bp, Artificial Sequence
  chemically synthesized
aaatttgatactccccatac

SEQ ID NO: 26788 - DNA, 20 bp, Artificial Sequence
  chemically synthesized
aatttgatactccccataca

SEQ ID NO: 26789 - DNA, 20 bp, Artificial Sequence
  chemically synthesized
tactccccatacaaggatcc

SEQ ID NO: 26790 - DNA, 20 bp, Artificial Sequence
  chemically synthesized
agtacctgttgcgtttatgc

SEQ ID NO: 26791 - DNA, 20 bp, Artificial Sequence
  chemically synthesized
gtacctgttgcgtttatgct

SEQ ID NO: 26792 - DNA, 20 bp, Artificial Sequence
  chemically synthesized
ttgcgtttatgctgggatca

SEQ ID NO: 26793 - DNA, 20 bp, Artificial Sequence
  chemically synthesized
gcgtttatgctgggatcaca

SEQ ID NO: 26794 - DNA, 20 bp, Artificial Sequence
  chemically synthesized
gctgggatcacagagatacc

SEQ ID NO: 26795 - DNA, 20 bp, Artificial Sequence
  chemically synthesized
ctgggatcacagagatacct

SEQ ID NO: 26796 - DNA, 20 bp, Artificial Sequence
  chemically synthesized
ctgggttgcctgtgtttcct

SEQ ID NO: 26797 - DNA, 20 bp, Artificial Sequence
  chemically synthesized
ttgcctgtgtttcctaagaa

SEQ ID NO: 26798 - DNA, 20 bp, Artificial Sequence
  chemically synthesized
tgcctgtgtttcctaagaaa

SEQ ID NO: 26799 - DNA, 20 bp, Artificial Sequence
  chemically synthesized
taagaaaaggatgtctgttt

SEQ ID NO: 26800 - DNA, 20 bp, Artificial Sequence
  chemically synthesized
gaaaaggatgtctgttttgg

SEQ ID NO: 26801 - DNA, 20 bp, Artificial Sequence
  chemically synthesized
gtctgttttggcagcaaact

SEQ ID NO: 26802 - DNA, 20 bp, Artificial Sequence
  chemically synthesized
ttggcagcaaacttagtgaa

SEQ ID NO: 26803 - DNA, 20 bp, Artificial Sequence
  chemically synthesized
agcaaacttagtgaacggct

SEQ ID NO: 26804 - DNA, 20 bp, Artificial Sequence
  chemically synthesized
gcaaacttagtgaacggctg

SEQ ID NO: 26805 - DNA, 20 bp, Artificial Sequence
  chemically synthesized
tgaacggctgaggcaaaaac

SEQ ID NO: 26806 - DNA, 20 bp, Artificial Sequence
  chemically synthesized
ctgaggcaaaaacaagtgca

SEQ ID NO: 26807 - DNA, 20 bp, Artificial Sequence
  chemically synthesized
ggcaaaaacaagtgcaaaga

SEQ ID NO: 26808 - DNA, 20 bp, Artificial Sequence
  chemically synthesized
caagtgcaaagatggattct

SEQ ID NO: 26809 - DNA, 20 bp, Artificial Sequence
  chemically synthesized
aaataccatgacaaaatctg

SEQ ID NO: 26810 - DNA, 20 bp, Artificial Sequence
  chemically synthesized
ctcaattcacttgacgtaaa

SEQ ID NO: 26811 - DNA, 20 bp, Artificial Sequence
  chemically synthesized
ttgacgtaaacagtcaaatg

SEQ ID NO: 26812 - DNA, 20 bp, Artificial Sequence
  chemically synthesized
tgtagacatacttgtttgtt

SEQ ID NO: 26813 - DNA, 20 bp, Artificial Sequence
  chemically synthesized
acatacttgtttgttaagtc

SEQ ID NO: 26814 - DNA, 20 bp, Artificial Sequence
  chemically synthesized
tccggtcttcctgcttgtgt

SEQ ID NO: 26815 - DNA, 20 bp, Artificial Sequence
  chemically synthesized
gcttgtgttggttcactttg

SEQ ID NO: 26816 - DNA, 20 bp, Artificial Sequence
  chemically synthesized
ttgtggtgtttattttgttt

SEQ ID NO: 26817 - DNA, 20 bp, Artificial Sequence
  chemically synthesized
tgtggtgtttattttgtttt

SEQ ID NO: 26818 - DNA, 20 bp, Artificial Sequence
  chemically synthesized
gtgtttattttgttttgggt

SEQ ID NO: 26819 - DNA, 20 bp, Artificial Sequence
  chemically synthesized
gtttattttgttttgggtca

SEQ ID NO: 26820 - DNA, 20 bp, Artificial Sequence
  chemically synthesized
ttattttgttttgggtcaga

SEQ ID NO: 26821 - DNA, 20 bp, Artificial Sequence
  chemically synthesized
tattttgttttgggtcagag

SEQ ID NO: 26822 - DNA, 20 bp, Artificial Sequence
  chemically synthesized
gagaggatgaaatgtctctg

SEQ ID NO: 26823 - DNA, 20 bp, Artificial Sequence
  chemically synthesized
aatgtctctgtagatgttct

SEQ ID NO: 26824 - DNA, 20 bp, Artificial Sequence
  chemically synthesized
atgtctctgtagatgttctc

SEQ ID NO: 26825 - DNA, 20 bp, Artificial Sequence
  chemically synthesized
ctctgtagatgttctcaggc

SEQ ID NO: 26826 - DNA, 20 bp, Artificial Sequence
  chemically synthesized
tctgtagatgttctcaggct

SEQ ID NO: 26827 - DNA, 20 bp, Artificial Sequence
  chemically synthesized
gtagatgttctcaggctagg

SEQ ID NO: 26828 - DNA, 20 bp, Artificial Sequence
  chemically synthesized
aggctaggtggtgcttccac

SEQ ID NO: 26829 - DNA, 20 bp, Artificial Sequence
  chemically synthesized
ggctaggtggtgcttccacc

SEQ ID NO: 26830 - DNA, 20 bp, Artificial Sequence
  chemically synthesized
gctaggtggtgcttccacca

SEQ ID NO: 26831 - DNA, 20 bp, Artificial Sequence
  chemically synthesized
tccaccagggcttccctctg

SEQ ID NO: 26832 - DNA, 20 bp, Artificial Sequence
  chemically synthesized
ccaccagggcttccctctgc

SEQ ID NO: 26833 - DNA, 20 bp, Artificial Sequence
  chemically synthesized
agggcttccctctgcaggcc

SEQ ID NO: 26834 - DNA, 20 bp, Artificial Sequence
  chemically synthesized
tccctctgcaggcctggtaa

SEQ ID NO: 26835 - DNA, 20 bp, Artificial Sequence
  chemically synthesized
ctctgcaggcctggtaacag

SEQ ID NO: 26836 - DNA, 20 bp, Artificial Sequence
  chemically synthesized
cagacctatgctgtctgtgt

SEQ ID NO: 26837 - DNA, 20 bp, Artificial Sequence
  chemically synthesized
gacctatgctgtctgtgtaa

SEQ ID NO: 26838 - DNA, 20 bp, Artificial Sequence
  chemically synthesized
tgtctgtgtaagagccttct

SEQ ID NO: 26839 - DNA, 20 bp, Artificial Sequence
  chemically synthesized
ctgtgtaagagccttctcag

SEQ ID NO: 26840 - DNA, 20 bp, Artificial Sequence
  chemically synthesized
agcacaccatcgttacccac

SEQ ID NO: 26841 - DNA, 20 bp, Artificial Sequence
  chemically synthesized
gcacaccatcgttacccacc

SEQ ID NO: 26842 - DNA, 20 bp, Artificial Sequence
  chemically synthesized
acccaccaggctccttgcga

SEQ ID NO: 26843 - DNA, 20 bp, Artificial Sequence
  chemically synthesized
cccaccaggctccttgcgaa

SEQ ID NO: 26844 - DNA, 20 bp, Artificial Sequence
  chemically synthesized
aaatcttgtcccaactgcct

SEQ ID NO: 26845 - DNA, 20 bp, Artificial Sequence
  chemically synthesized
ccaactgccttggctgtgct

SEQ ID NO: 26846 - DNA, 20 bp, Artificial Sequence
  chemically synthesized
actgccttggctgtgcttgg

SEQ ID NO: 26847 - DNA, 20 bp, Artificial Sequence
  chemically synthesized
cttggcagtgtgctctatat

SEQ ID NO: 26848 - DNA, 20 bp, Artificial Sequence
  chemically synthesized
ttggcagtgtgctctatata

SEQ ID NO: 26849 - DNA, 20 bp, Artificial Sequence
  chemically synthesized
ggcagtgtgctctatataag

SEQ ID NO: 26850 - DNA, 20 bp, Artificial Sequence
  chemically synthesized
tgtgctctatataaggagaa

SEQ ID NO: 26851 - DNA, 20 bp, Artificial Sequence
  chemically synthesized
gtgctctatataaggagaac

SEQ ID NO: 26852 - DNA, 20 bp, Artificial Sequence
  chemically synthesized
acaggatgtattttacactt

SEQ ID NO: 26853 - DNA, 20 bp, Artificial Sequence
  chemically synthesized
acacttgagacctgctatcc

SEQ ID NO: 26854 - DNA, 20 bp, Artificial Sequence
  chemically synthesized
acttgagacctgctatccta

SEQ ID NO: 26855 - DNA, 20 bp, Artificial Sequence
  chemically synthesized
agtacaacaacaacacttct

SEQ ID NO: 26856 - DNA, 20 bp, Artificial Sequence
  chemically synthesized
ttctaagtgctcttaatatt

SEQ ID NO: 26857 - DNA, 20 bp, Artificial Sequence
  chemically synthesized
tgctcttaatattaagctaa

SEQ ID NO: 26858 - DNA, 20 bp, Artificial Sequence
  chemically synthesized
atactgtttgttcaccatca

SEQ ID NO: 26859 - DNA, 20 bp, Artificial Sequence
  chemically synthesized
catcatgaactccaaacctc

SEQ ID NO: 26860 - DNA, 20 bp, Artificial Sequence
  chemically synthesized
ctccaaacctctagaacaca

SEQ ID NO: 26861 - DNA, 20 bp, Artificial Sequence
  chemically synthesized
ccaaacctctagaacacaca

SEQ ID NO: 26862 - DNA, 20 bp, Artificial Sequence
  chemically synthesized
ctcctgcaccatctatcctc

SEQ ID NO: 26863 - DNA, 20 bp, Artificial Sequence
  chemically synthesized
tctatcctccagtctgtctc

SEQ ID NO: 26864 - DNA, 20 bp, Artificial Sequence
  chemically synthesized
tcctccagtctgtctcaaga

SEQ ID NO: 26865 - DNA, 20 bp, Artificial Sequence
  chemically synthesized
ccagtctgtctcaagatgga

SEQ ID NO: 26866 - DNA, 20 bp, Artificial Sequence
  chemically synthesized
tctcaagatggacagctaca

SEQ ID NO: 26867 - DNA, 20 bp, Artificial Sequence
  chemically synthesized
aagatggacagctacatggt

SEQ ID NO: 26868 - DNA, 20 bp, Artificial Sequence
  chemically synthesized
tggacagctacatggttagt

SEQ ID NO: 26869 - DNA, 20 bp, Artificial Sequence
  chemically synthesized
cagctacatggttagttagc

SEQ ID NO: 26870 - DNA, 20 bp, Artificial Sequence
  chemically synthesized
gctacatggttagttagcta

SEQ ID NO: 26871 - DNA, 20 bp, Artificial Sequence
  chemically synthesized
ctacatggttagttagctag

SEQ ID NO: 26872 - DNA, 20 bp, Artificial Sequence
  chemically synthesized
acatggttagttagctagag

SEQ ID NO: 26873 - DNA, 20 bp, Artificial Sequence
  chemically synthesized
catggttagttagctagagg

SEQ ID NO: 26874 - DNA, 20 bp, Artificial Sequence
  chemically synthesized
tagttagctagaggaggact

SEQ ID NO: 26875 - DNA, 20 bp, Artificial Sequence
  chemically synthesized
agctagaggaggacttggaa

SEQ ID NO: 26876 - DNA, 20 bp, Artificial Sequence
  chemically synthesized
agaggaggacttggaaaagc

SEQ ID NO: 26877 - DNA, 20 bp, Artificial Sequence
  chemically synthesized
gaggaggacttggaaaagct

SEQ ID NO: 26878 - DNA, 20 bp, Artificial Sequence
  chemically synthesized
cacataaaccgtaaaatccc

SEQ ID NO: 26879 - DNA, 20 bp, Artificial Sequence
  chemically synthesized
tcctcttctcaaaaaaatct

SEQ ID NO: 26880 - DNA, 20 bp, Artificial Sequence
  chemically synthesized
acaaatgtttcattgactat

SEQ ID NO: 26881 - DNA, 20 bp, Artificial Sequence
  chemically synthesized
gactattagattcattttat

SEQ ID NO: 26882 - DNA, 20 bp, Artificial Sequence
  chemically synthesized
tagattcattttattagtgt

SEQ ID NO: 26883 - DNA, 20 bp, Artificial Sequence
  chemically synthesized
attcattttattagtgtgag

SEQ ID NO: 26884 - DNA, 20 bp, Artificial Sequence
  chemically synthesized
gagaagtcacttgtcttcac

SEQ ID NO: 26885 - DNA, 20 bp, Artificial Sequence
  chemically synthesized
gaagtcacttgtcttcacca

SEQ ID NO: 26886 - DNA, 20 bp, Artificial Sequence
  chemically synthesized
gtcttcaccagagtacaaca

SEQ ID NO: 26887 - DNA, 20 bp, Artificial Sequence
  chemically synthesized
caccagagtacaacaaagtg

SEQ ID NO: 26888 - DNA, 20 bp, Artificial Sequence
  chemically synthesized
tacaacaaagtgcagtaaaa

SEQ ID NO: 26889 - DNA, 20 bp, Artificial Sequence
  chemically synthesized
caaagtgcagtaaaatggtg

SEQ ID NO: 26890 - DNA, 20 bp, Artificial Sequence
  chemically synthesized
gtgcagtaaaatggtgaaga

SEQ ID NO: 26891 - DNA, 20 bp, Artificial Sequence
  chemically synthesized
tgcagtaaaatggtgaagat

SEQ ID NO: 26892 - DNA, 20 bp, Artificial Sequence
  chemically synthesized
gtaaaatggtgaagatgggt

SEQ ID NO: 26893 - DNA, 20 bp, Artificial Sequence
  chemically synthesized
taaaatggtgaagatgggtc

SEQ ID NO: 26894 - DNA, 20 bp, Artificial Sequence
  chemically synthesized
aaaatggtgaagatgggtca

SEQ ID NO: 26895 - DNA, 20 bp, Artificial Sequence
  chemically synthesized
tgaagatgggtcagggtttc

SEQ ID NO: 26896 - DNA, 20 bp, Artificial Sequence
  chemically synthesized
gaagatgggtcagggtttct

SEQ ID NO: 26897 - DNA, 20 bp, Artificial Sequence
  chemically synthesized
gggtcagggtttctgggtgc

SEQ ID NO: 26898 - DNA, 20 bp, Artificial Sequence
  chemically synthesized
tttctgggtgctggcattat

SEQ ID NO: 26899 - DNA, 20 bp, Artificial Sequence
  chemically synthesized
tgctggcattattggaatgc

SEQ ID NO: 26900 - DNA, 20 bp, Artificial Sequence
  chemically synthesized
gttctttccttgtcatttaa

SEQ ID NO: 26901 - DNA, 20 bp, Artificial Sequence
  chemically synthesized
tccttgtcatttaatggtca

SEQ ID NO: 26902 - DNA, 20 bp, Artificial Sequence
  chemically synthesized
atttaatggtcaaagttatt

SEQ ID NO: 26903 - DNA, 20 bp, Artificial Sequence
  chemically synthesized
ggtcaaagttatttggaccc

SEQ ID NO: 26904 - DNA, 20 bp, Artificial Sequence
  chemically synthesized
caaagttatttggaccccag

SEQ ID NO: 26905 - DNA, 20 bp, Artificial Sequence
  chemically synthesized
cttccattgctttgtattgt

SEQ ID NO: 26906 - DNA, 20 bp, Artificial Sequence
  chemically synthesized
ccattgctttgtattgtgag

SEQ ID NO: 26907 - DNA, 20 bp, Artificial Sequence
  chemically synthesized
gtgagaagccacatctgtgt

SEQ ID NO: 26908 - DNA, 20 bp, Artificial Sequence
  chemically synthesized
tgagaagccacatctgtgta

SEQ ID NO: 26909 - DNA, 20 bp, Artificial Sequence
  chemically synthesized
ccacatctgtgtaaggtttc

SEQ ID NO: 26910 - DNA, 20 bp, Artificial Sequence
  chemically synthesized
tgtgtaaggtttccagttga

SEQ ID NO: 26911 - DNA, 20 bp, Artificial Sequence
  chemically synthesized
gtgtaaggtttccagttgac

SEQ ID NO: 26912 - DNA, 20 bp, Artificial Sequence
  chemically synthesized
gtttccagttgacaggattc

SEQ ID NO: 26913 - DNA, 20 bp, Artificial Sequence
  chemically synthesized
ttccagttgacaggattcta

SEQ ID NO: 26914 - DNA, 20 bp, Artificial Sequence
  chemically synthesized
gttgacaggattctagagta

SEQ ID NO: 26915 - DNA, 20 bp, Artificial Sequence
  chemically synthesized
caggattctagagtatggcc

SEQ ID NO: 26916 - DNA, 20 bp, Artificial Sequence
  chemically synthesized
ttctagagtatggcccagct

SEQ ID NO: 26917 - DNA, 20 bp, Artificial Sequence
  chemically synthesized
gagtatggcccagctcagtc

SEQ ID NO: 26918 - DNA, 20 bp, Artificial Sequence
  chemically synthesized
cagctcagtccagaaatgcc

SEQ ID NO: 26919 - DNA, 20 bp, Artificial Sequence
  chemically synthesized
agctcagtccagaaatgccc

SEQ ID NO: 26920 - DNA, 20 bp, Artificial Sequence
  chemically synthesized
ccaggtttcccctatcactg

SEQ ID NO: 26921 - DNA, 20 bp, Artificial Sequence
  chemically synthesized
caggtttcccctatcactga

SEQ ID NO: 26922 - DNA, 20 bp, Artificial Sequence
  chemically synthesized
tgaaggcgctatcataaata

SEQ ID NO: 26923 - DNA, 20 bp, Artificial Sequence
  chemically synthesized
gcgctatcataaatatagca

SEQ ID NO: 26924 - DNA, 20 bp, Artificial Sequence
  chemically synthesized
cgctatcataaatatagcat

SEQ ID NO: 26925 - DNA, 20 bp, Artificial Sequence
  chemically synthesized
tatcataaatatagcatggg

SEQ ID NO: 26926 - DNA, 20 bp, Artificial Sequence
  chemically synthesized
tcataaatatagcatgggaa

SEQ ID NO: 26927 - DNA, 20 bp, Artificial Sequence
  chemically synthesized
cataaatatagcatgggaag

SEQ ID NO: 26928 - DNA, 20 bp, Artificial Sequence
  chemically synthesized
ataaatatagcatgggaaga

SEQ ID NO: 26929 - DNA, 20 bp, Artificial Sequence
  chemically synthesized
taaatatagcatgggaagag

SEQ ID NO: 26930 - DNA, 20 bp, Artificial Sequence
  chemically synthesized
aaatatagcatgggaagagg

SEQ ID NO: 26931 - DNA, 20 bp, Artificial Sequence
  chemically synthesized
aatatagcatgggaagaggg

SEQ ID NO: 26932 - DNA, 20 bp, Artificial Sequence
  chemically synthesized
atagcatgggaagagggggg

SEQ ID NO: 26933 - DNA, 20 bp, Artificial Sequence
  chemically synthesized
agcatgggaagaggggggca

SEQ ID NO: 26934 - DNA, 20 bp, Artificial Sequence
  chemically synthesized
gcatgggaagaggggggcag

SEQ ID NO: 26935 - DNA, 20 bp, Artificial Sequence
  chemically synthesized
catgggaagaggggggcaga

SEQ ID NO: 26936 - DNA, 20 bp, Artificial Sequence
  chemically synthesized
ggaagaggggggcagaggga

SEQ ID NO: 26937 - DNA, 20 bp, Artificial Sequence
  chemically synthesized
aagaggggggcagagggaca

SEQ ID NO: 26938 - DNA, 20 bp, Artificial Sequence
  chemically synthesized
ggggggcagagggacagaga

SEQ ID NO: 26939 - DNA, 20 bp, Artificial Sequence
  chemically synthesized
gcagagggacagagaaagca

SEQ ID NO: 26940 - DNA, 20 bp, Artificial Sequence
  chemically synthesized
gagggacagagaaagcaaag

SEQ ID NO: 26941 - DNA, 20 bp, Artificial Sequence
  chemically synthesized
agggacagagaaagcaaagt

SEQ ID NO: 26942 - DNA, 20 bp, Artificial Sequence
  chemically synthesized
caaatctactcatttcctat

SEQ ID NO: 26943 - DNA, 20 bp, Artificial Sequence
  chemically synthesized
tcagcattttgctttttgct

SEQ ID NO: 26944 - DNA, 20 bp, Artificial Sequence
  chemically synthesized
cagcattttgctttttgctt

SEQ ID NO: 26945 - DNA, 20 bp, Artificial Sequence
  chemically synthesized
tttgcttgggtttgtctata

SEQ ID NO: 26946 - DNA, 20 bp, Artificial Sequence
  chemically synthesized
ttgggtttgtctataaagta

SEQ ID NO: 26947 - DNA, 20 bp, Artificial Sequence
  chemically synthesized
gttaatgtatgcatgtaaac

SEQ ID NO: 26948 - DNA, 20 bp, Artificial Sequence
  chemically synthesized
atgcatgtaaaccagccttg

SEQ ID NO: 26949 - DNA, 20 bp, Artificial Sequence
  chemically synthesized
ataaaatccccccatgtttc

SEQ ID NO: 26950 - DNA, 20 bp, Artificial Sequence
  chemically synthesized
taaaatccccccatgtttcc

SEQ ID NO: 26951 - DNA, 20 bp, Artificial Sequence
  chemically synthesized
caggctacccacaatattac

SEQ ID NO: 26952 - DNA, 20 bp, Artificial Sequence
  chemically synthesized
cttacacatcttctttccac

SEQ ID NO: 26953 - DNA, 20 bp, Artificial Sequence
  chemically synthesized
tcaaacaacaacaaataaat

SEQ ID NO: 26954 - DNA, 20 bp, Artificial Sequence
  chemically synthesized
ataaataagcaaatgaacca

SEQ ID NO: 26955 - DNA, 20 bp, Artificial Sequence
  chemically synthesized
accctttcacttttgtcaaa

SEQ ID NO: 26956 - DNA, 20 bp, Artificial Sequence
  chemically synthesized
gaccgaaattgaaaacaaaa

SEQ ID NO: 26957 - DNA, 20 bp, Artificial Sequence
  chemically synthesized
tgaaaacaaaacagaaactc

SEQ ID NO: 26958 - DNA, 20 bp, Artificial Sequence
  chemically synthesized
gaaaacaaaacagaaactct

SEQ ID NO: 26959 - DNA, 20 bp, Artificial Sequence
  chemically synthesized
tcaccactcttcttttgttt

SEQ ID NO: 26960 - DNA, 20 bp, Artificial Sequence
  chemically synthesized
caccactcttcttttgtttc

SEQ ID NO: 26961 - DNA, 20 bp, Artificial Sequence
  chemically synthesized
tcttcttttgtttcaggcct

SEQ ID NO: 26962 - DNA, 20 bp, Artificial Sequence
  chemically synthesized
cttcttttgtttcaggcctt

SEQ ID NO: 26963 - DNA, 20 bp, Artificial Sequence
  chemically synthesized
tgggcctgttaactatctgc

SEQ ID NO: 26964 - DNA, 20 bp, Artificial Sequence
  chemically synthesized
gggcctgttaactatctgca

SEQ ID NO: 26965 - DNA, 20 bp, Artificial Sequence
  chemically synthesized
gatgttgtaatctattttaa

SEQ ID NO: 26966 - DNA, 20 bp, Artificial Sequence
  chemically synthesized
aattgaaatgtgatatcctg

SEQ ID NO: 26967 - DNA, 20 bp, Artificial Sequence
  chemically synthesized
tttatgatgcacgttgtttg

SEQ ID NO: 26968 - DNA, 20 bp, Artificial Sequence
  chemically synthesized
atgcacgttgtttgtagctg

SEQ ID NO: 26969 - DNA, 20 bp, Artificial Sequence
  chemically synthesized
gtagctgtagtgcttgattt

SEQ ID NO: 26970 - DNA, 20 bp, Artificial Sequence
  chemically synthesized
tagctgtagtgcttgatttt

SEQ ID NO: 26971 - DNA, 20 bp, Artificial Sequence
  chemically synthesized
ttgattttgggtttctttca

SEQ ID NO: 26972 - DNA, 20 bp, Artificial Sequence
  chemically synthesized
tcacagataaacttctgcac

SEQ ID NO: 26973 - DNA, 20 bp, Artificial Sequence
  chemically synthesized
acagataaacttctgcactg

SEQ ID NO: 26974 - DNA, 20 bp, Artificial Sequence
  chemically synthesized
cagataaacttctgcactgg

SEQ ID NO: 26975 - DNA, 20 bp, Artificial Sequence
  chemically synthesized
agataaacttctgcactgga

SEQ ID NO: 26976 - DNA, 20 bp, Artificial Sequence
  chemically synthesized
gataaacttctgcactggag

SEQ ID NO: 26977 - DNA, 20 bp, Artificial Sequence
  chemically synthesized
tcctcccctcgttctgcaca

SEQ ID NO: 26978 - DNA, 20 bp, Artificial Sequence
  chemically synthesized
ctcccctcgttctgcacatg

SEQ ID NO: 26979 - DNA, 20 bp, Artificial Sequence
  chemically synthesized
ggagctctaatccccacgcc

SEQ ID NO: 26980 - DNA, 20 bp, Artificial Sequence
  chemically synthesized
gagctctaatccccacgcct

SEQ ID NO: 26981 - DNA, 20 bp, Artificial Sequence
  chemically synthesized
ctaatccccacgcctgggat

SEQ ID NO: 26982 - DNA, 20 bp, Artificial Sequence
  chemically synthesized
ccccacgcctgggatgagtg

SEQ ID NO: 26983 - DNA, 20 bp, Artificial Sequence
  chemically synthesized
tgagtgcagaatatgccccg

SEQ ID NO: 26984 - DNA, 20 bp, Artificial Sequence
  chemically synthesized
gagtgcagaatatgccccgc

SEQ ID NO: 26985 - DNA, 20 bp, Artificial Sequence
  chemically synthesized
agtgcagaatatgccccgca

SEQ ID NO: 26986 - DNA, 20 bp, Artificial Sequence
  chemically synthesized
atgccccgcagggtatttgt

SEQ ID NO: 26987 - DNA, 20 bp, Artificial Sequence
  chemically synthesized
ccgcagggtatttgtaagtt

SEQ ID NO: 26988 - DNA, 20 bp, Artificial Sequence
  chemically synthesized
tctacaaatgtccatgtgta

SEQ ID NO: 26989 - DNA, 20 bp, Artificial Sequence
  chemically synthesized
tacaaatgtccatgtgtata

SEQ ID NO: 26990 - DNA, 20 bp, Artificial Sequence
  chemically synthesized
atgtccatgtgtatagagat

SEQ ID NO: 26991 - DNA, 20 bp, Artificial Sequence
  chemically synthesized
tgtatagagatgagaatttc

SEQ ID NO: 26992 - DNA, 20 bp, Artificial Sequence
  chemically synthesized
ggaaattgcccttacttttt

SEQ ID NO: 26993 - DNA, 20 bp, Artificial Sequence
  chemically synthesized
cccttactttttaagtactg

SEQ ID NO: 26994 - DNA, 20 bp, Artificial Sequence
  chemically synthesized
ccttactttttaagtactga

SEQ ID NO: 26995 - DNA, 20 bp, Artificial Sequence
  chemically synthesized
ttactttttaagtactgaag

SEQ ID NO: 26996 - DNA, 20 bp, Artificial Sequence
  chemically synthesized
tgaaggagttacttccaaaa

SEQ ID NO: 26997 - DNA, 20 bp, Artificial Sequence
  chemically synthesized
gtattattccattactcact

SEQ ID NO: 26998 - DNA, 20 bp, Artificial Sequence
  chemically synthesized
ttattccattactcacttgg

SEQ ID NO: 26999 - DNA, 20 bp, Artificial Sequence
  chemically synthesized
cagccgctccccactccact

SEQ ID NO: 27000 - DNA, 20 bp, Artificial Sequence
  chemically synthesized
ctccccactccactcagccc

SEQ ID NO: 27001 - DNA, 20 bp, Artificial Sequence
  chemically synthesized
ccccactccactcagcccca

SEQ ID NO: 27002 - DNA, 20 bp, Artificial Sequence
  chemically synthesized
cccactccactcagccccag

SEQ ID NO: 27003 - DNA, 20 bp, Artificial Sequence
  chemically synthesized
ccactccactcagccccaga

SEQ ID NO: 27004 - DNA, 20 bp, Artificial Sequence
  chemically synthesized
tcccctttttctttcctcac

SEQ ID NO: 27005 - DNA, 20 bp, Artificial Sequence
  chemically synthesized
ccctttttctttcctcactg

SEQ ID NO: 27006 - DNA, 20 bp, Artificial Sequence
  chemically synthesized
cctttttctttcctcactgg

SEQ ID NO: 27007 - DNA, 20 bp, Artificial Sequence
  chemically synthesized
tttctttcctcactggaggc

SEQ ID NO: 27008 - DNA, 20 bp, Artificial Sequence
  chemically synthesized
ttctttcctcactggaggct

SEQ ID NO: 27009 - DNA, 20 bp, Artificial Sequence
  chemically synthesized
ctttcctcactggaggctgg

SEQ ID NO: 27010 - DNA, 20 bp, Artificial Sequence
  chemically synthesized
cactggaggctgggagctga

SEQ ID NO: 27011 - DNA, 20 bp, Artificial Sequence
  chemically synthesized
tggaggctgggagctgatag

SEQ ID NO: 27012 - DNA, 20 bp, Artificial Sequence
  chemically synthesized
ctgatagtagctcatccctg

SEQ ID NO: 27013 - DNA, 20 bp, Artificial Sequence
  chemically synthesized
tgatagtagctcatccctgt

SEQ ID NO: 27014 - DNA, 20 bp, Artificial Sequence
  chemically synthesized
atccctgtgggtcttctccc

SEQ ID NO: 27015 - DNA, 20 bp, Artificial Sequence
  chemically synthesized
tccctgtgggtcttctcccc

SEQ ID NO: 27016 - DNA, 20 bp, Artificial Sequence
  chemically synthesized
ccctgtgggtcttctcccca

SEQ ID NO: 27017 - DNA, 20 bp, Artificial Sequence
  chemically synthesized
cagggtcttgtcttgctccg

SEQ ID NO: 27018 - DNA, 20 bp, Artificial Sequence
  chemically synthesized
gtcttgtcttgctccgtggc

SEQ ID NO: 27019 - DNA, 20 bp, Artificial Sequence
  chemically synthesized
tgctccgtggctagtgattg

SEQ ID NO: 27020 - DNA, 20 bp, Artificial Sequence
  chemically synthesized
attgaagatgcctgtgcctc

SEQ ID NO: 27021 - DNA, 20 bp, Artificial Sequence
  chemically synthesized
tgaagatgcctgtgcctctg

SEQ ID NO: 27022 - DNA, 20 bp, Artificial Sequence
  chemically synthesized
tctggagcccattttattac

SEQ ID NO: 27023 - DNA, 20 bp, Artificial Sequence
  chemically synthesized
ttactggacattcactcctg

SEQ ID NO: 27024 - DNA, 20 bp, Artificial Sequence
  chemically synthesized
ttcactcctgtggcctcatt

SEQ ID NO: 27025 - DNA, 20 bp, Artificial Sequence
  chemically synthesized
tcactcctgtggcctcattt

SEQ ID NO: 27026 - DNA, 20 bp, Artificial Sequence
  chemically synthesized
tgtggcctcatttaggactt

SEQ ID NO: 27027 - DNA, 20 bp, Artificial Sequence
  chemically synthesized
gtggcctcatttaggacttt

SEQ ID NO: 27028 - DNA, 20 bp, Artificial Sequence
  chemically synthesized
ctcatttaggactttgggta

SEQ ID NO: 27029 - DNA, 20 bp, Artificial Sequence
  chemically synthesized
aggactttgggtatagtcca

SEQ ID NO: 27030 - DNA, 20 bp, Artificial Sequence
  chemically synthesized
tagtccatggcacacatctt

SEQ ID NO: 27031 - DNA, 20 bp, Artificial Sequence
  chemically synthesized
catggcacacatctttagcc

SEQ ID NO: 27032 - DNA, 20 bp, Artificial Sequence
  chemically synthesized
atggcacacatctttagcca

SEQ ID NO: 27033 - DNA, 20 bp, Artificial Sequence
  chemically synthesized
cacacatctttagccaaggc

SEQ ID NO: 27034 - DNA, 20 bp, Artificial Sequence
  chemically synthesized
ttagccaaggccagaatcaa

SEQ ID NO: 27035 - DNA, 20 bp, Artificial Sequence
  chemically synthesized
tagccaaggccagaatcaaa

SEQ ID NO: 27036 - DNA, 20 bp, Artificial Sequence
  chemically synthesized
gccaaggccagaatcaaaag

SEQ ID NO: 27037 - DNA, 20 bp, Artificial Sequence
  chemically synthesized
aggccagaatcaaaaggagt

SEQ ID NO: 27038 - DNA, 20 bp, Artificial Sequence
  chemically synthesized
agaatcaaaaggagtcagtt

SEQ ID NO: 27039 - DNA, 20 bp, Artificial Sequence
  chemically synthesized
gaatcaaaaggagtcagttt

SEQ ID NO: 27040 - DNA, 20 bp, Artificial Sequence
  chemically synthesized
aatcaaaaggagtcagttta

SEQ ID NO: 27041 - DNA, 20 bp, Artificial Sequence
  chemically synthesized
gagtcagtttagggttattc

SEQ ID NO: 27042 - DNA, 20 bp, Artificial Sequence
  chemically synthesized
gtcagtttagggttattcca

SEQ ID NO: 27043 - DNA, 20 bp, Artificial Sequence
  chemically synthesized
tttacatgtgtatttgaaca

SEQ ID NO: 27044 - DNA, 20 bp, Artificial Sequence
  chemically synthesized
attttgactaatttttctcc

SEQ ID NO: 27045 - DNA, 20 bp, Artificial Sequence
  chemically synthesized
actaatttttctcctggttt

SEQ ID NO: 27046 - DNA, 20 bp, Artificial Sequence
  chemically synthesized
taatttttctcctggtttta

SEQ ID NO: 27047 - DNA, 20 bp, Artificial Sequence
  chemically synthesized
gagaaaaatgcacatcattg

SEQ ID NO: 27048 - DNA, 20 bp, Artificial Sequence
  chemically synthesized
atcattgtagttaaaatgtg

SEQ ID NO: 27049 - DNA, 20 bp, Artificial Sequence
  chemically synthesized
tcattgtagttaaaatgtga

SEQ ID NO: 27050 - DNA, 20 bp, Artificial Sequence
  chemically synthesized
accaccaccaccatcaccac

SEQ ID NO: 27051 - DNA, 20 bp, Artificial Sequence
  chemically synthesized
accaccaccaccatcaccac

SEQ ID NO: 27052 - DNA, 20 bp, Artificial Sequence
  chemically synthesized
accaccaccaccatcaccac

SEQ ID NO: 27053 - DNA, 20 bp, Artificial Sequence
  chemically synthesized
accaccagtaccatcaccac

SEQ ID NO: 27054 - DNA, 20 bp, Artificial Sequence
  chemically synthesized
accagtaccatcaccaccag

SEQ ID NO: 27055 - DNA, 20 bp, Artificial Sequence
  chemically synthesized
accaccatcaccatcaccac

SEQ ID NO: 27056 - DNA, 20 bp, Artificial Sequence
  chemically synthesized
accaccagtaccatcaccac

SEQ ID NO: 27057 - DNA, 20 bp, Artificial Sequence
  chemically synthesized
accaccaccaccatcaccac

SEQ ID NO: 27058 - DNA, 20 bp, Artificial Sequence
  chemically synthesized
accaccagtaccatcaccac

SEQ ID NO: 27059 - DNA, 20 bp, Artificial Sequence
  chemically synthesized
accaccatcaccatcaccac

SEQ ID NO: 27060 - DNA, 20 bp, Artificial Sequence
  chemically synthesized
actaccaccaccaccatcac

SEQ ID NO: 27061 - DNA, 20 bp, Artificial Sequence
  chemically synthesized
atcaccatcaccatcaccac

SEQ ID NO: 27062 - DNA, 20 bp, Artificial Sequence
  chemically synthesized
actaccaccaccaccatcac

SEQ ID NO: 27063 - DNA, 20 bp, Artificial Sequence
  chemically synthesized
atcaccatcaccatcaccac

SEQ ID NO: 27064 - DNA, 20 bp, Artificial Sequence
  chemically synthesized
actaccaccaccaccatcac

SEQ ID NO: 27065 - DNA, 20 bp, Artificial Sequence
  chemically synthesized
ccaccaccatttacttgttc

SEQ ID NO: 27066 - DNA, 20 bp, Artificial Sequence
  chemically synthesized
caccatttacttgttcaagt

SEQ ID NO: 27067 - DNA, 20 bp, Artificial Sequence
  chemically synthesized
cttgttcaagtgagctttta

SEQ ID NO: 27068 - DNA, 20 bp, Artificial Sequence
  chemically synthesized
gttcaagtgagcttttatag

SEQ ID NO: 27069 - DNA, 20 bp, Artificial Sequence
  chemically synthesized
ttcaagtgagcttttatagt

SEQ ID NO: 27070 - DNA, 20 bp, Artificial Sequence
  chemically synthesized
tcaagtgagcttttatagta

SEQ ID NO: 27071 - DNA, 20 bp, Artificial Sequence
  chemically synthesized
tttatacaaatgttttctga

SEQ ID NO: 27072 - DNA, 20 bp, Artificial Sequence
  chemically synthesized
ttttctgaaagatactgttt

SEQ ID NO: 27073 - DNA, 20 bp, Artificial Sequence
  chemically synthesized
tactgttttagaaaataata

SEQ ID NO: 27074 - DNA, 20 bp, Artificial Sequence
  chemically synthesized
atacagtttgcttctctgtg

SEQ ID NO: 27075 - DNA, 20 bp, Artificial Sequence
  chemically synthesized
tacagtttgcttctctgtgt

SEQ ID NO: 27076 - DNA, 20 bp, Artificial Sequence
  chemically synthesized
cttctctgtgtaggaacaca

SEQ ID NO: 27077 - DNA, 20 bp, Artificial Sequence
  chemically synthesized
cacatggtatgaatcatgca

SEQ ID NO: 27078 - DNA, 20 bp, Artificial Sequence
  chemically synthesized
tatgaatcatgcatggctaa

SEQ ID NO: 27079 - DNA, 20 bp, Artificial Sequence
  chemically synthesized
atgaatcatgcatggctaaa

SEQ ID NO: 27080 - DNA, 20 bp, Artificial Sequence
  chemically synthesized
atcatgcatggctaaaaggt

SEQ ID NO: 27081 - DNA, 20 bp, Artificial Sequence
  chemically synthesized
tcatgcatggctaaaaggtt

SEQ ID NO: 27082 - DNA, 20 bp, Artificial Sequence
  chemically synthesized
catgcatggctaaaaggtta

SEQ ID NO: 27083 - DNA, 20 bp, Artificial Sequence
  chemically synthesized
atgcatggctaaaaggttag

SEQ ID NO: 27084 - DNA, 20 bp, Artificial Sequence
  chemically synthesized
tgcatggctaaaaggttagg

SEQ ID NO: 27085 - DNA, 20 bp, Artificial Sequence
  chemically synthesized
atggctaaaaggttaggggg

SEQ ID NO: 27086 - DNA, 20 bp, Artificial Sequence
  chemically synthesized
tggctaaaaggttagggggt

SEQ ID NO: 27087 - DNA, 20 bp, Artificial Sequence
  chemically synthesized
ctaaaaggttagggggtggg

SEQ ID NO: 27088 - DNA, 20 bp, Artificial Sequence
  chemically synthesized
attccaccctaaacacaaaa

SEQ ID NO: 27089 - DNA, 20 bp, Artificial Sequence
  chemically synthesized
ccaccctaaacacaaaaaag

SEQ ID NO: 27090 - DNA, 20 bp, Artificial Sequence
  chemically synthesized
caccctaaacacaaaaaagc

SEQ ID NO: 27091 - DNA, 20 bp, Artificial Sequence
  chemically synthesized
aaacacaaaaaagcaggttc

SEQ ID NO: 27092 - DNA, 20 bp, Artificial Sequence
  chemically synthesized
cacaaaaaagcaggttcaag

SEQ ID NO: 27093 - DNA, 20 bp, Artificial Sequence
  chemically synthesized
aaaagcaggttcaagaagaa

SEQ ID NO: 27094 - DNA, 20 bp, Artificial Sequence
  chemically synthesized
agcaggttcaagaagaaaag

SEQ ID NO: 27095 - DNA, 20 bp, Artificial Sequence
  chemically synthesized
gacatctaatttttatttga

SEQ ID NO: 27096 - DNA, 20 bp, Artificial Sequence
  chemically synthesized
aaatgaaaaataacctgctg

SEQ ID NO: 27097 - DNA, 20 bp, Artificial Sequence
  chemically synthesized
gaaaaataacctgctgtgga

SEQ ID NO: 27098 - DNA, 20 bp, Artificial Sequence
  chemically synthesized
ctgctgtggaaagaaaaaaa

SEQ ID NO: 27099 - DNA, 20 bp, Artificial Sequence
  chemically synthesized
gtggaaagaaaaaaaaagaa

SEQ ID NO: 27100 - DNA, 20 bp, Artificial Sequence
  chemically synthesized
tggaaagaaaaaaaaagaaa

SEQ ID NO: 27101 - DNA, 20 bp, Artificial Sequence
  chemically synthesized
gaaaaaaaaagaaaaggaaa

SEQ ID NO: 27102 - DNA, 20 bp, Artificial Sequence
  chemically synthesized
aaaaaaaaagaaaaggaaaa

SEQ ID NO: 27103 - DNA, 20 bp, Artificial Sequence
  chemically synthesized
aaagaaaaggaaaaaggtca

SEQ ID NO: 27104 - DNA, 20 bp, Artificial Sequence
  chemically synthesized
agaaaaggaaaaaggtcatg

SEQ ID NO: 27105 - DNA, 20 bp, Artificial Sequence
  chemically synthesized
aaaaggaaaaaggtcatgga

SEQ ID NO: 27106 - DNA, 20 bp, Artificial Sequence
  chemically synthesized
aaggaaaaaggtcatggaga

SEQ ID NO: 27107 - DNA, 20 bp, Artificial Sequence
  chemically synthesized
gtcatggagagagaataaca

SEQ ID NO: 27108 - DNA, 20 bp, Artificial Sequence
  chemically synthesized
catggagagagaataacaaa

SEQ ID NO: 27109 - DNA, 20 bp, Artificial Sequence
  chemically synthesized
gagagagaataacaaagagc

SEQ ID NO: 27110 - DNA, 20 bp, Artificial Sequence
  chemically synthesized
aataacaaagagcaagatgc

SEQ ID NO: 27111 - DNA, 20 bp, Artificial Sequence
  chemically synthesized
taacaaagagcaagatgcca

SEQ ID NO: 27112 - DNA, 20 bp, Artificial Sequence
  chemically synthesized
aagagcaagatgccagagtt

SEQ ID NO: 27113 - DNA, 20 bp, Artificial Sequence
  chemically synthesized
agagcaagatgccagagtta

SEQ ID NO: 27114 - DNA, 20 bp, Artificial Sequence
  chemically synthesized
gatgccagagttaaggctct

SEQ ID NO: 27115 - DNA, 20 bp, Artificial Sequence
  chemically synthesized
atgccagagttaaggctcta

SEQ ID NO: 27116 - DNA, 20 bp, Artificial Sequence
  chemically synthesized
tgccagagttaaggctctaa

SEQ ID NO: 27117 - DNA, 20 bp, Artificial Sequence
  chemically synthesized
gccagagttaaggctctaag

SEQ ID NO: 27118 - DNA, 20 bp, Artificial Sequence
  chemically synthesized
ccagagttaaggctctaagg

SEQ ID NO: 27119 - DNA, 20 bp, Artificial Sequence
  chemically synthesized
gctctaagggggactgtttt

SEQ ID NO: 27120 - DNA, 20 bp, Artificial Sequence
  chemically synthesized
taagggggactgtttttaga

SEQ ID NO: 27121 - DNA, 20 bp, Artificial Sequence
  chemically synthesized
aagggggactgtttttagat

SEQ ID NO: 27122 - DNA, 20 bp, Artificial Sequence
  chemically synthesized
gggggactgtttttagatgg

SEQ ID NO: 27123 - DNA, 20 bp, Artificial Sequence
  chemically synthesized
ggggactgtttttagatggg

SEQ ID NO: 27124 - DNA, 20 bp, Artificial Sequence
  chemically synthesized
gggactgtttttagatggga

SEQ ID NO: 27125 - DNA, 20 bp, Artificial Sequence
  chemically synthesized
gactgtttttagatgggagg

SEQ ID NO: 27126 - DNA, 20 bp, Artificial Sequence
  chemically synthesized
acacttacccatcttgtaaa

SEQ ID NO: 27127 - DNA, 20 bp, Artificial Sequence
  chemically synthesized
catcttgtaaatggtatctg

SEQ ID NO: 27128 - DNA, 20 bp, Artificial Sequence
  chemically synthesized
tcttgtaaatggtatctgaa

SEQ ID NO: 27129 - DNA, 20 bp, Artificial Sequence
  chemically synthesized
tgtaaatggtatctgaagag

SEQ ID NO: 27130 - DNA, 20 bp, Artificial Sequence
  chemically synthesized
gtaaatggtatctgaagagc

SEQ ID NO: 27131 - DNA, 20 bp, Artificial Sequence
  chemically synthesized
taaatggtatctgaagagca

SEQ ID NO: 27132 - DNA, 20 bp, Artificial Sequence
  chemically synthesized
aagagcagggcatgcaccct

SEQ ID NO: 27133 - DNA, 20 bp, Artificial Sequence
  chemically synthesized
cagggcatgcaccctgagac

SEQ ID NO: 27134 - DNA, 20 bp, Artificial Sequence
  chemically synthesized
gcaccctgagaccagattca

SEQ ID NO: 27135 - DNA, 20 bp, Artificial Sequence
  chemically synthesized
cctgagaccagattcaaagc

SEQ ID NO: 27136 - DNA, 20 bp, Artificial Sequence
  chemically synthesized
tgtttatttttgttaactcc

SEQ ID NO: 27137 - DNA, 20 bp, Artificial Sequence
  chemically synthesized
gtttatttttgttaactcct

SEQ ID NO: 27138 - DNA, 20 bp, Artificial Sequence
  chemically synthesized
tgttaactcctaggtaatcc

SEQ ID NO: 27139 - DNA, 20 bp, Artificial Sequence
  chemically synthesized
gttaactcctaggtaatcct

SEQ ID NO: 27140 - DNA, 20 bp, Artificial Sequence
  chemically synthesized
ctaggtaatcctaggtaaca

SEQ ID NO: 27141 - DNA, 20 bp, Artificial Sequence
  chemically synthesized
aggtaatcctaggtaacaaa

SEQ ID NO: 27142 - DNA, 20 bp, Artificial Sequence
  chemically synthesized
agttattgtgtgaatttcat

SEQ ID NO: 27143 - DNA, 20 bp, Artificial Sequence
  chemically synthesized
gtgtgaatttcataagccct

SEQ ID NO: 27144 - DNA, 20 bp, Artificial Sequence
  chemically synthesized
tgtgaatttcataagccctc

SEQ ID NO: 27145 - DNA, 20 bp, Artificial Sequence
  chemically synthesized
ttcataagccctcaggtcct

SEQ ID NO: 27146 - DNA, 20 bp, Artificial Sequence
  chemically synthesized
tcataagccctcaggtcctg

SEQ ID NO: 27147 - DNA, 20 bp, Artificial Sequence
  chemically synthesized
cataagccctcaggtcctga

SEQ ID NO: 27148 - DNA, 20 bp, Artificial Sequence
  chemically synthesized
agccctcaggtcctgagggc

SEQ ID NO: 27149 - DNA, 20 bp, Artificial Sequence
  chemically synthesized
gccctcaggtcctgagggct

SEQ ID NO: 27150 - DNA, 20 bp, Artificial Sequence
  chemically synthesized
ctcaggtcctgagggctggg

SEQ ID NO: 27151 - DNA, 20 bp, Artificial Sequence
  chemically synthesized
gtcctgagggctgggtggtt

SEQ ID NO: 27152 - DNA, 20 bp, Artificial Sequence
  chemically synthesized
tcctgagggctgggtggttc

SEQ ID NO: 27153 - DNA, 20 bp, Artificial Sequence
  chemically synthesized
cctgagggctgggtggttca

SEQ ID NO: 27154 - DNA, 20 bp, Artificial Sequence
  chemically synthesized
ctgagggctgggtggttcag

SEQ ID NO: 27155 - DNA, 20 bp, Artificial Sequence
  chemically synthesized
ctgggtggttcaggggttaa

SEQ ID NO: 27156 - DNA, 20 bp, Artificial Sequence
  chemically synthesized
ctcatctgctcccttccccc

SEQ ID NO: 27157 - DNA, 20 bp, Artificial Sequence
  chemically synthesized
tctgctcccttcccccaagc

SEQ ID NO: 27158 - DNA, 20 bp, Artificial Sequence
  chemically synthesized
ctgctcccttcccccaagct

SEQ ID NO: 27159 - DNA, 20 bp, Artificial Sequence
  chemically synthesized
ccttcccccaagctgggcct

SEQ ID NO: 27160 - DNA, 20 bp, Artificial Sequence
  chemically synthesized
ccccaagctgggcctaagcc

SEQ ID NO: 27161 - DNA, 20 bp, Artificial Sequence
  chemically synthesized
cccaagctgggcctaagcct

SEQ ID NO: 27162 - DNA, 20 bp, Artificial Sequence
  chemically synthesized
agctgggcctaagcctgggt

SEQ ID NO: 27163 - DNA, 20 bp, Artificial Sequence
  chemically synthesized
gctgggcctaagcctgggtt

SEQ ID NO: 27164 - DNA, 20 bp, Artificial Sequence
  chemically synthesized
cctaagcctgggttaggtca

SEQ ID NO: 27165 - DNA, 20 bp, Artificial Sequence
  chemically synthesized
ctgggttaggtcacagattg

SEQ ID NO: 27166 - DNA, 20 bp, Artificial Sequence
  chemically synthesized
ggttaggtcacagattgcag

SEQ ID NO: 27167 - DNA, 20 bp, Artificial Sequence
  chemically synthesized
gttaggtcacagattgcaga

SEQ ID NO: 27168 - DNA, 20 bp, Artificial Sequence
  chemically synthesized
gtcacagattgcagaaggtt

SEQ ID NO: 27169 - DNA, 20 bp, Artificial Sequence
  chemically synthesized
tcacagattgcagaaggttt

SEQ ID NO: 27170 - DNA, 20 bp, Artificial Sequence
  chemically synthesized
acagattgcagaaggtttag

SEQ ID NO: 27171 - DNA, 20 bp, Artificial Sequence
  chemically synthesized
cagattgcagaaggtttagg

SEQ ID NO: 27172 - DNA, 20 bp, Artificial Sequence
  chemically synthesized
ttgcagaaggtttaggaggt

SEQ ID NO: 27173 - DNA, 20 bp, Artificial Sequence
  chemically synthesized
tgcagaaggtttaggaggtt

SEQ ID NO: 27174 - DNA, 20 bp, Artificial Sequence
  chemically synthesized
ggtttaggaggttgggctca

SEQ ID NO: 27175 - DNA, 20 bp, Artificial Sequence
  chemically synthesized
gaggttgggctcacggtttc

SEQ ID NO: 27176 - DNA, 20 bp, Artificial Sequence
  chemically synthesized
ggtttctagtccctgcatgc

SEQ ID NO: 27177 - DNA, 20 bp, Artificial Sequence
  chemically synthesized
tctagtccctgcatgctggc

SEQ ID NO: 27178 - DNA, 20 bp, Artificial Sequence
  chemically synthesized
ctagtccctgcatgctggct

SEQ ID NO: 27179 - DNA, 20 bp, Artificial Sequence
  chemically synthesized
gtccctgcatgctggctggg

SEQ ID NO: 27180 - DNA, 20 bp, Artificial Sequence
  chemically synthesized
tccctgcatgctggctgggt

SEQ ID NO: 27181 - DNA, 20 bp, Artificial Sequence
  chemically synthesized
ccctgcatgctggctgggtg

SEQ ID NO: 27182 - DNA, 20 bp, Artificial Sequence
  chemically synthesized
ctgcatgctggctgggtggg

SEQ ID NO: 27183 - DNA, 20 bp, Artificial Sequence
  chemically synthesized
gcatgctggctgggtgggga

SEQ ID NO: 27184 - DNA, 20 bp, Artificial Sequence
  chemically synthesized
ggggagagctctcctgttgc

SEQ ID NO: 27185 - DNA, 20 bp, Artificial Sequence
  chemically synthesized
gggagagctctcctgttgct

SEQ ID NO: 27186 - DNA, 20 bp, Artificial Sequence
  chemically synthesized
ggagagctctcctgttgctg

SEQ ID NO: 27187 - DNA, 20 bp, Artificial Sequence
  chemically synthesized
gagagctctcctgttgctgg

SEQ ID NO: 27188 - DNA, 20 bp, Artificial Sequence
  chemically synthesized
ctcctgttgctgggggcatc

SEQ ID NO: 27189 - DNA, 20 bp, Artificial Sequence
  chemically synthesized
tcctgttgctgggggcatct

SEQ ID NO: 27190 - DNA, 20 bp, Artificial Sequence
  chemically synthesized
cctgttgctgggggcatctg

SEQ ID NO: 27191 - DNA, 20 bp, Artificial Sequence
  chemically synthesized
gggggcatctggggcctgca

SEQ ID NO: 27192 - DNA, 20 bp, Artificial Sequence
  chemically synthesized
ggggcatctggggcctgcat

SEQ ID NO: 27193 - DNA, 20 bp, Artificial Sequence
  chemically synthesized
gggcatctggggcctgcatg

SEQ ID NO: 27194 - DNA, 20 bp, Artificial Sequence
  chemically synthesized
ctggggcctgcatggggctg

SEQ ID NO: 27195 - DNA, 20 bp, Artificial Sequence
  chemically synthesized
cctgcatggggctgtggaaa

SEQ ID NO: 27196 - DNA, 20 bp, Artificial Sequence
  chemically synthesized
tgcatggggctgtggaaacg

SEQ ID NO: 27197 - DNA, 20 bp, Artificial Sequence
  chemically synthesized
tgtggaaacggagccacttt

SEQ ID NO: 27198 - DNA, 20 bp, Artificial Sequence
  chemically synthesized
tggaaacggagccacttttg

SEQ ID NO: 27199 - DNA, 20 bp, Artificial Sequence
  chemically synthesized
ggaaacggagccacttttgg

SEQ ID NO: 27200 - DNA, 20 bp, Artificial Sequence
  chemically synthesized
gaaacggagccacttttgga

SEQ ID NO: 27201 - DNA, 20 bp, Artificial Sequence
  chemically synthesized
acggagccacttttggaggg

SEQ ID NO: 27202 - DNA, 20 bp, Artificial Sequence
  chemically synthesized
cggagccacttttggaggga

SEQ ID NO: 27203 - DNA, 20 bp, Artificial Sequence
  chemically synthesized
ggagccacttttggagggaa

SEQ ID NO: 27204 - DNA, 20 bp, Artificial Sequence
  chemically synthesized
ccacttttggagggaaggga

SEQ ID NO: 27205 - DNA, 20 bp, Artificial Sequence
  chemically synthesized
cttttggagggaagggatag

SEQ ID NO: 27206 - DNA, 20 bp, Artificial Sequence
  chemically synthesized
ttttggagggaagggataga

SEQ ID NO: 27207 - DNA, 20 bp, Artificial Sequence
  chemically synthesized
tttggagggaagggatagaa

SEQ ID NO: 27208 - DNA, 20 bp, Artificial Sequence
  chemically synthesized
tggagggaagggatagaagg

SEQ ID NO: 27209 - DNA, 20 bp, Artificial Sequence
  chemically synthesized
ggaagggatagaagggagtt

SEQ ID NO: 27210 - DNA, 20 bp, Artificial Sequence
  chemically synthesized
agggatagaagggagttgag

SEQ ID NO: 27211 - DNA, 20 bp, Artificial Sequence
  chemically synthesized
tagaagggagttgagcagtt

SEQ ID NO: 27212 - DNA, 20 bp, Artificial Sequence
  chemically synthesized
gaagggagttgagcagttca

SEQ ID NO: 27213 - DNA, 20 bp, Artificial Sequence
  chemically synthesized
aagggagttgagcagttcag

SEQ ID NO: 27214 - DNA, 20 bp, Artificial Sequence
  chemically synthesized
gggagttgagcagttcagag

SEQ ID NO: 27215 - DNA, 20 bp, Artificial Sequence
  chemically synthesized
ggagttgagcagttcagagg

SEQ ID NO: 27216 - DNA, 20 bp, Artificial Sequence
  chemically synthesized
gagttgagcagttcagagga

SEQ ID NO: 27217 - DNA, 20 bp, Artificial Sequence
  chemically synthesized
ttgagcagttcagaggaggg

SEQ ID NO: 27218 - DNA, 20 bp, Artificial Sequence
  chemically synthesized
gagcagttcagaggagggtg

SEQ ID NO: 27219 - DNA, 20 bp, Artificial Sequence
  chemically synthesized
gttcagaggagggtggagtt

SEQ ID NO: 27220 - DNA, 20 bp, Artificial Sequence
  chemically synthesized
tcagaggagggtggagttga

SEQ ID NO: 27221 - DNA, 20 bp, Artificial Sequence
  chemically synthesized
cagaggagggtggagttgag

SEQ ID NO: 27222 - DNA, 20 bp, Artificial Sequence
  chemically synthesized
gagggtggagttgagaggcc

SEQ ID NO: 27223 - DNA, 20 bp, Artificial Sequence
  chemically synthesized
agggtggagttgagaggcca

SEQ ID NO: 27224 - DNA, 20 bp, Artificial Sequence
  chemically synthesized
gggtggagttgagaggccaa

SEQ ID NO: 27225 - DNA, 20 bp, Artificial Sequence
  chemically synthesized
gagaggccaagggctgttgc

SEQ ID NO: 27226 - DNA, 20 bp, Artificial Sequence
  chemically synthesized
agaggccaagggctgttgcc

SEQ ID NO: 27227 - DNA, 20 bp, Artificial Sequence
  chemically synthesized
gaggccaagggctgttgcca

SEQ ID NO: 27228 - DNA, 20 bp, Artificial Sequence
  chemically synthesized
gggctgttgccagggaaaca

SEQ ID NO: 27229 - DNA, 20 bp, Artificial Sequence
  chemically synthesized
tgccagggaaacatagttct

SEQ ID NO: 27230 - DNA, 20 bp, Artificial Sequence
  chemically synthesized
gaaacatagttctcggtctt

SEQ ID NO: 27231 - DNA, 20 bp, Artificial Sequence
  chemically synthesized
atagttctcggtcttcagcc

SEQ ID NO: 27232 - DNA, 20 bp, Artificial Sequence
  chemically synthesized
gtcttcagcctggtcttcct

SEQ ID NO: 27233 - DNA, 20 bp, Artificial Sequence
  chemically synthesized
tcttcagcctggtcttcctg

SEQ ID NO: 27234 - DNA, 20 bp, Artificial Sequence
  chemically synthesized
cttcagcctggtcttcctga

SEQ ID NO: 27235 - DNA, 20 bp, Artificial Sequence
  chemically synthesized
agcctggtcttcctgagggc

SEQ ID NO: 27236 - DNA, 20 bp, Artificial Sequence
  chemically synthesized
gcctggtcttcctgagggct

SEQ ID NO: 27237 - DNA, 20 bp, Artificial Sequence
  chemically synthesized
ctggtcttcctgagggctgg

SEQ ID NO: 27238 - DNA, 20 bp, Artificial Sequence
  chemically synthesized
ggctgggagtttgatttgac

SEQ ID NO: 27239 - DNA, 20 bp, Artificial Sequence
  chemically synthesized
tgggagtttgatttgactgg

SEQ ID NO: 27240 - DNA, 20 bp, Artificial Sequence
  chemically synthesized
gggagtttgatttgactggt

SEQ ID NO: 27241 - DNA, 20 bp, Artificial Sequence
  chemically synthesized
gtttgatttgactggtagga

SEQ ID NO: 27242 - DNA, 20 bp, Artificial Sequence
  chemically synthesized
tttgactggtaggaaagtct

SEQ ID NO: 27243 - DNA, 20 bp, Artificial Sequence
  chemically synthesized
gtaggaaagtctgagcttga

SEQ ID NO: 27244 - DNA, 20 bp, Artificial Sequence
  chemically synthesized
taggaaagtctgagcttgat

SEQ ID NO: 27245 - DNA, 20 bp, Artificial Sequence
  chemically synthesized
aggaaagtctgagcttgata

SEQ ID NO: 27246 - DNA, 20 bp, Artificial Sequence
  chemically synthesized
tcctctcccaccttcccaca

SEQ ID NO: 27247 - DNA, 20 bp, Artificial Sequence
  chemically synthesized
cctctcccaccttcccacaa

SEQ ID NO: 27248 - DNA, 20 bp, Artificial Sequence
  chemically synthesized
ctctcccaccttcccacaaa

SEQ ID NO: 27249 - DNA, 20 bp, Artificial Sequence
  chemically synthesized
ctcccaccttcccacaaagg

SEQ ID NO: 27250 - DNA, 20 bp, Artificial Sequence
  chemically synthesized
tcccaccttcccacaaaggg

SEQ ID NO: 27251 - DNA, 20 bp, Artificial Sequence
  chemically synthesized
cccaccttcccacaaaggga

SEQ ID NO: 27252 - DNA, 20 bp, Artificial Sequence
  chemically synthesized
tcccacaaagggagggtaca

SEQ ID NO: 27253 - DNA, 20 bp, Artificial Sequence
  chemically synthesized
agggagggtacatagtttgc

SEQ ID NO: 27254 - DNA, 20 bp, Artificial Sequence
  chemically synthesized
tagtttgctggtgcccctgc

SEQ ID NO: 27255 - DNA, 20 bp, Artificial Sequence
  chemically synthesized
tttgctggtgcccctgctgg

SEQ ID NO: 27256 - DNA, 20 bp, Artificial Sequence
  chemically synthesized
ttgctggtgcccctgctggc

SEQ ID NO: 27257 - DNA, 20 bp, Artificial Sequence
  chemically synthesized
ccctgctggcaggaccaatt

SEQ ID NO: 27258 - DNA, 20 bp, Artificial Sequence
  chemically synthesized
cctgctggcaggaccaattt

SEQ ID NO: 27259 - DNA, 20 bp, Artificial Sequence
  chemically synthesized
tgctggcaggaccaatttag

SEQ ID NO: 27260 - DNA, 20 bp, Artificial Sequence
  chemically synthesized
aggaccaatttaggagtgac

SEQ ID NO: 27261 - DNA, 20 bp, Artificial Sequence
  chemically synthesized
aatttaggagtgaccagaac

SEQ ID NO: 27262 - DNA, 20 bp, Artificial Sequence
  chemically synthesized
atttaggagtgaccagaaca

SEQ ID NO: 27263 - DNA, 20 bp, Artificial Sequence
  chemically synthesized
agtgaccagaacaaggtatg

SEQ ID NO: 27264 - DNA, 20 bp, Artificial Sequence
  chemically synthesized
gaccagaacaaggtatgtgg

SEQ ID NO: 27265 - DNA, 20 bp, Artificial Sequence
  chemically synthesized
cagaacaaggtatgtggaag

SEQ ID NO: 27266 - DNA, 20 bp, Artificial Sequence
  chemically synthesized
agaacaaggtatgtggaagt

SEQ ID NO: 27267 - DNA, 20 bp, Artificial Sequence
  chemically synthesized
aggtatgtggaagtgggttg

SEQ ID NO: 27268 - DNA, 20 bp, Artificial Sequence
  chemically synthesized
ggtatgtggaagtgggttgt

SEQ ID NO: 27269 - DNA, 20 bp, Artificial Sequence
  chemically synthesized
gtatgtggaagtgggttgtg

SEQ ID NO: 27270 - DNA, 20 bp, Artificial Sequence
  chemically synthesized
tatgtggaagtgggttgtgg

SEQ ID NO: 27271 - DNA, 20 bp, Artificial Sequence
  chemically synthesized
ggaagtgggttgtgggggtc

SEQ ID NO: 27272 - DNA, 20 bp, Artificial Sequence
  chemically synthesized
gtgggttgtgggggtccaga

SEQ ID NO: 27273 - DNA, 20 bp, Artificial Sequence
  chemically synthesized
tgtgggggtccagaaagctc

SEQ ID NO: 27274 - DNA, 20 bp, Artificial Sequence
  chemically synthesized
aacctgatgcccattccact

SEQ ID NO: 27275 - DNA, 20 bp, Artificial Sequence
  chemically synthesized
ctgatgcccattccacttgg

SEQ ID NO: 27276 - DNA, 20 bp, Artificial Sequence
  chemically synthesized
cggcattaacctgctgcccc

SEQ ID NO: 27277 - DNA, 20 bp, Artificial Sequence
  chemically synthesized
aacctgctgcccctggcttc

SEQ ID NO: 27278 - DNA, 20 bp, Artificial Sequence
  chemically synthesized
cctgctgcccctggcttcca

SEQ ID NO: 27279 - DNA, 20 bp, Artificial Sequence
  chemically synthesized
cccctggcttccagagctca

SEQ ID NO: 27280 - DNA, 20 bp, Artificial Sequence
  chemically synthesized
gagctcatagcacttccctg

SEQ ID NO: 27281 - DNA, 20 bp, Artificial Sequence
  chemically synthesized
gtggccactctgctgtgtgc

SEQ ID NO: 27282 - DNA, 20 bp, Artificial Sequence
  chemically synthesized
agtcacccctgctctttaac

SEQ ID NO: 27283 - DNA, 20 bp, Artificial Sequence
  chemically synthesized
tcacccctgctctttaacta

SEQ ID NO: 27284 - DNA, 20 bp, Artificial Sequence
  chemically synthesized
ctttaactagagcctccttt

SEQ ID NO: 27285 - DNA, 20 bp, Artificial Sequence
  chemically synthesized
actagagcctccttttggcc

SEQ ID NO: 27286 - DNA, 20 bp, Artificial Sequence
  chemically synthesized
ctagagcctccttttggcct

SEQ ID NO: 27287 - DNA, 20 bp, Artificial Sequence
  chemically synthesized
gcctccttttggcctgggtt

SEQ ID NO: 27288 - DNA, 20 bp, Artificial Sequence
  chemically synthesized
cctccttttggcctgggtta

SEQ ID NO: 27289 - DNA, 20 bp, Artificial Sequence
  chemically synthesized
ttttggcctgggttaaggcc

SEQ ID NO: 27290 - DNA, 20 bp, Artificial Sequence
  chemically synthesized
gcctgggttaaggcctggac

SEQ ID NO: 27291 - DNA, 20 bp, Artificial Sequence
  chemically synthesized
cctgggttaaggcctggact

SEQ ID NO: 27292 - DNA, 20 bp, Artificial Sequence
  chemically synthesized
cctggactgggaccttcctc

SEQ ID NO: 27293 - DNA, 20 bp, Artificial Sequence
  chemically synthesized
ggactgggaccttcctctgg

SEQ ID NO: 27294 - DNA, 20 bp, Artificial Sequence
  chemically synthesized
accttcctctggaagccgtt

SEQ ID NO: 27295 - DNA, 20 bp, Artificial Sequence
  chemically synthesized
ccttcctctggaagccgttc

SEQ ID NO: 27296 - DNA, 20 bp, Artificial Sequence
  chemically synthesized
cttcctctggaagccgttcg

SEQ ID NO: 27297 - DNA, 20 bp, Artificial Sequence
  chemically synthesized
gccgttcggggtgtgtaatg

SEQ ID NO: 27298 - DNA, 20 bp, Artificial Sequence
  chemically synthesized
ttcggggtgtgtaatgtggt

SEQ ID NO: 27299 - DNA, 20 bp, Artificial Sequence
  chemically synthesized
atgtggttagtcattaccct

SEQ ID NO: 27300 - DNA, 20 bp, Artificial Sequence
  chemically synthesized
cctcagtaattaatcacccc

SEQ ID NO: 27301 - DNA, 20 bp, Artificial Sequence
  chemically synthesized
cagtaattaatcacccctgg

SEQ ID NO: 27302 - DNA, 20 bp, Artificial Sequence
  chemically synthesized
cacattcacattcgacctga

SEQ ID NO: 27303 - DNA, 20 bp, Artificial Sequence
  chemically synthesized
acattcgacctgatagttta

SEQ ID NO: 27304 - DNA, 20 bp, Artificial Sequence
  chemically synthesized
attcgacctgatagtttaca

SEQ ID NO: 27305 - DNA, 20 bp, Artificial Sequence
  chemically synthesized
ttcgacctgatagtttacag

SEQ ID NO: 27306 - DNA, 20 bp, Artificial Sequence
  chemically synthesized
tcgacctgatagtttacaga

SEQ ID NO: 27307 - DNA, 20 bp, Artificial Sequence
  chemically synthesized
gaacttcccaacaattctta

SEQ ID NO: 27308 - DNA, 20 bp, Artificial Sequence
  chemically synthesized
aacttcccaacaattcttac

SEQ ID NO: 27309 - DNA, 20 bp, Artificial Sequence
  chemically synthesized
ctgtttttatgctcatttta

SEQ ID NO: 27310 - DNA, 20 bp, Artificial Sequence
  chemically synthesized
ttttatgctcattttacaga

SEQ ID NO: 27311 - DNA, 20 bp, Artificial Sequence
  chemically synthesized
tttatgctcattttacagat

SEQ ID NO: 27312 - DNA, 20 bp, Artificial Sequence
  chemically synthesized
attttacagataggaattcc

SEQ ID NO: 27313 - DNA, 20 bp, Artificial Sequence
  chemically synthesized
cagataggaattccaagact

SEQ ID NO: 27314 - DNA, 20 bp, Artificial Sequence
  chemically synthesized
gataggaattccaagactca

SEQ ID NO: 27315 - DNA, 20 bp, Artificial Sequence
  chemically synthesized
gagaaatcaaatgactatcc

SEQ ID NO: 27316 - DNA, 20 bp, Artificial Sequence
  chemically synthesized
gaaatcaaatgactatccca

SEQ ID NO: 27317 - DNA, 20 bp, Artificial Sequence
  chemically synthesized
actatcccagagttacaatc

SEQ ID NO: 27318 - DNA, 20 bp, Artificial Sequence
  chemically synthesized
atcccagagttacaatctag

SEQ ID NO: 27319 - DNA, 20 bp, Artificial Sequence
  chemically synthesized
agttacaatctagtggataa

SEQ ID NO: 27320 - DNA, 20 bp, Artificial Sequence
  chemically synthesized
ttacaatctagtggataata

SEQ ID NO: 27321 - DNA, 20 bp, Artificial Sequence
  chemically synthesized
aatctagtggataatagagc

SEQ ID NO: 27322 - DNA, 20 bp, Artificial Sequence
  chemically synthesized
atctagtggataatagagct

SEQ ID NO: 27323 - DNA, 20 bp, Artificial Sequence
  chemically synthesized
ggataatagagctaggcctc

SEQ ID NO: 27324 - DNA, 20 bp, Artificial Sequence
  chemically synthesized
tagagctaggcctccagtct

SEQ ID NO: 27325 - DNA, 20 bp, Artificial Sequence
  chemically synthesized
tccttgttcttctgaatctt

SEQ ID NO: 27326 - DNA, 20 bp, Artificial Sequence
  chemically synthesized
ccttgttcttctgaatcttg

SEQ ID NO: 27327 - DNA, 20 bp, Artificial Sequence
  chemically synthesized
ttcttctgaatcttgaggct

SEQ ID NO: 27328 - DNA, 20 bp, Artificial Sequence
  chemically synthesized
atcacatgactttttcacat

SEQ ID NO: 27329 - DNA, 20 bp, Artificial Sequence
  chemically synthesized
ttttcacattggtgacatac

SEQ ID NO: 27330 - DNA, 20 bp, Artificial Sequence
  chemically synthesized
cattggtgacatactagaaa

SEQ ID NO: 27331 - DNA, 20 bp, Artificial Sequence
  chemically synthesized
attggtgacatactagaaat

SEQ ID NO: 27332 - DNA, 20 bp, Artificial Sequence
  chemically synthesized
ttggtgacatactagaaatg

SEQ ID NO: 27333 - DNA, 20 bp, Artificial Sequence
  chemically synthesized
tggtgacatactagaaatgg

SEQ ID NO: 27334 - DNA, 20 bp, Artificial Sequence
  chemically synthesized
gggggtcattccttcccata

SEQ ID NO: 27335 - DNA, 20 bp, Artificial Sequence
  chemically synthesized
agtaaaatgaaataaaataa

SEQ ID NO: 27336 - DNA, 20 bp, Artificial Sequence
  chemically synthesized
aaatgaaataaaataaaagc

SEQ ID NO: 27337 - DNA, 20 bp, Artificial Sequence
  chemically synthesized
tgaaataaaataaaagccag

SEQ ID NO: 27338 - DNA, 20 bp, Artificial Sequence
  chemically synthesized
gaaataaaataaaagccagt

SEQ ID NO: 27339 - DNA, 20 bp, Artificial Sequence
  chemically synthesized
ataaaataaaagccagtagg

SEQ ID NO: 27340 - DNA, 20 bp, Artificial Sequence
  chemically synthesized
taaaataaaagccagtaggt

SEQ ID NO: 27341 - DNA, 20 bp, Artificial Sequence
  chemically synthesized
aaagccagtaggtgggctaa

SEQ ID NO: 27342 - DNA, 20 bp, Artificial Sequence
  chemically synthesized
tttaacccttttgatgtctc

SEQ ID NO: 27343 - DNA, 20 bp, Artificial Sequence
  chemically synthesized
atgtctcaagttcctatgct

SEQ ID NO: 27344 - DNA, 20 bp, Artificial Sequence
  chemically synthesized
tgtctcaagttcctatgctt

SEQ ID NO: 27345 - DNA, 20 bp, Artificial Sequence
  chemically synthesized
gtctcaagttcctatgctta

SEQ ID NO: 27346 - DNA, 20 bp, Artificial Sequence
  chemically synthesized
tctcaagttcctatgcttag

SEQ ID NO: 27347 - DNA, 20 bp, Artificial Sequence
  chemically synthesized
aagttcctatgcttaggggc

SEQ ID NO: 27348 - DNA, 20 bp, Artificial Sequence
  chemically synthesized
agttcctatgcttaggggcc

SEQ ID NO: 27349 - DNA, 20 bp, Artificial Sequence
  chemically synthesized
tatgcttaggggccaggtgt

SEQ ID NO: 27350 - DNA, 20 bp, Artificial Sequence
  chemically synthesized
aatccccgtaaatgcccaat

SEQ ID NO: 27351 - DNA, 20 bp, Artificial Sequence
  chemically synthesized
atccccgtaaatgcccaatg

SEQ ID NO: 27352 - DNA, 20 bp, Artificial Sequence
  chemically synthesized
cccaatgaggctctcaaatt

SEQ ID NO: 27353 - DNA, 20 bp, Artificial Sequence
  chemically synthesized
aatgaggctctcaaattgag

SEQ ID NO: 27354 - DNA, 20 bp, Artificial Sequence
  chemically synthesized
attgagaagttgattttcat

SEQ ID NO: 27355 - DNA, 20 bp, Artificial Sequence
  chemically synthesized
tgagaagttgattttcatca

SEQ ID NO: 27356 - DNA, 20 bp, Artificial Sequence
  chemically synthesized
gattttcatcagagtaaatg

SEQ ID NO: 27357 - DNA, 20 bp, Artificial Sequence
  chemically synthesized
tacacatcaataaatcaatg

SEQ ID NO: 27358 - DNA, 20 bp, Artificial Sequence
  chemically synthesized
gtagccctaattttgccaca

SEQ ID NO: 27359 - DNA, 20 bp, Artificial Sequence
  chemically synthesized
tagccctaattttgccacac

SEQ ID NO: 27360 - DNA, 20 bp, Artificial Sequence
  chemically synthesized
gccacacaggaaatcaattc

SEQ ID NO: 27361 - DNA, 20 bp, Artificial Sequence
  chemically synthesized
ccagtctttctaaatcatca

SEQ ID NO: 27362 - DNA, 20 bp, Artificial Sequence
  chemically synthesized
catcaaagatgttatgaaca

SEQ ID NO: 27363 - DNA, 20 bp, Artificial Sequence
  chemically synthesized
caaagtaatttcacaaatta

SEQ ID NO: 27364 - DNA, 20 bp, Artificial Sequence
  chemically synthesized
gtaatttcacaaattatggc

SEQ ID NO: 27365 - DNA, 20 bp, Artificial Sequence
  chemically synthesized
aacacatttattgatgactg

SEQ ID NO: 27366 - DNA, 20 bp, Artificial Sequence
  chemically synthesized
atttattgatgactgcagtt

SEQ ID NO: 27367 - DNA, 20 bp, Artificial Sequence
  chemically synthesized
tttattgatgactgcagttt

SEQ ID NO: 27368 - DNA, 20 bp, Artificial Sequence
  chemically synthesized
atgactgcagtttaggaatt

SEQ ID NO: 27369 - DNA, 20 bp, Artificial Sequence
  chemically synthesized
tttaggaatttagaatctgt

SEQ ID NO: 27370 - DNA, 20 bp, Artificial Sequence
  chemically synthesized
gtgagcactgtaatataata

SEQ ID NO: 27371 - DNA, 20 bp, Artificial Sequence
  chemically synthesized
tgtaatataatatggtacac

SEQ ID NO: 27372 - DNA, 20 bp, Artificial Sequence
  chemically synthesized
ataatatggtacaccggcat

SEQ ID NO: 27373 - DNA, 20 bp, Artificial Sequence
  chemically synthesized
atggtacaccggcatgagct

SEQ ID NO: 27374 - DNA, 20 bp, Artificial Sequence
  chemically synthesized
ggcatgagctgagtgaaata

SEQ ID NO: 27375 - DNA, 20 bp, Artificial Sequence
  chemically synthesized
tgagtgaaatacagattata

SEQ ID NO: 27376 - DNA, 20 bp, Artificial Sequence
  chemically synthesized
tgtaatgcatcatttgctat

SEQ ID NO: 27377 - DNA, 20 bp, Artificial Sequence
  chemically synthesized
aatgcatcatttgctattag

SEQ ID NO: 27378 - DNA, 20 bp, Artificial Sequence
  chemically synthesized
atcatttgctattagtggac

SEQ ID NO: 27379 - DNA, 20 bp, Artificial Sequence
  chemically synthesized
agtggactggtaataattac

SEQ ID NO: 27380 - DNA, 20 bp, Artificial Sequence
  chemically synthesized
ggtaataattaccagtttca

SEQ ID NO: 27381 - DNA, 20 bp, Artificial Sequence
  chemically synthesized
aataattaccagtttcaaag

SEQ ID NO: 27382 - DNA, 20 bp, Artificial Sequence
  chemically synthesized
agctctctccatgtaatctt

SEQ ID NO: 27383 - DNA, 20 bp, Artificial Sequence
  chemically synthesized
atctttagtctcaatcgtaa

SEQ ID NO: 27384 - DNA, 20 bp, Artificial Sequence
  chemically synthesized
cattgacattatgattacac

SEQ ID NO: 27385 - DNA, 20 bp, Artificial Sequence
  chemically synthesized
cactagctgccctcatgatc

SEQ ID NO: 27386 - DNA, 20 bp, Artificial Sequence
  chemically synthesized
ccctcatgatctagaatatc

SEQ ID NO: 27387 - DNA, 20 bp, Artificial Sequence
  chemically synthesized
gatctagaatatctagttga

SEQ ID NO: 27388 - DNA, 20 bp, Artificial Sequence
  chemically synthesized
atctagaatatctagttgat

SEQ ID NO: 27389 - DNA, 20 bp, Artificial Sequence
  chemically synthesized
atgggaatactaaaatgcga

SEQ ID NO: 27390 - DNA, 20 bp, Artificial Sequence
  chemically synthesized
gtatgttgtatgctcattat

SEQ ID NO: 27391 - DNA, 20 bp, Artificial Sequence
  chemically synthesized
ttttctctgacctgatgtat

SEQ ID NO: 27392 - DNA, 20 bp, Artificial Sequence
  chemically synthesized
ttctctgacctgatgtatga

SEQ ID NO: 27393 - DNA, 20 bp, Artificial Sequence
  chemically synthesized
ctctgacctgatgtatgaga

SEQ ID NO: 27394 - DNA, 20 bp, Artificial Sequence
  chemically synthesized
ctgacctgatgtatgagaga

SEQ ID NO: 27395 - DNA, 20 bp, Artificial Sequence
  chemically synthesized
tgacctgatgtatgagagag

SEQ ID NO: 27396 - DNA, 20 bp, Artificial Sequence
  chemically synthesized
gacctgatgtatgagagaga

SEQ ID NO: 27397 - DNA, 20 bp, Artificial Sequence
  chemically synthesized
acctgatgtatgagagagag

SEQ ID NO: 27398 - DNA, 20 bp, Artificial Sequence
  chemically synthesized
ctgatgtatgagagagaggg

SEQ ID NO: 27399 - DNA, 20 bp, Artificial Sequence
  chemically synthesized
tgatgtatgagagagagggg

SEQ ID NO: 27400 - DNA, 20 bp, Artificial Sequence
  chemically synthesized
gagaggggaggataacatca

SEQ ID NO: 27401 - DNA, 20 bp, Artificial Sequence
  chemically synthesized
atcacagtgttaacatactg

SEQ ID NO: 27402 - DNA, 20 bp, Artificial Sequence
  chemically synthesized
ctgtagcatgatcacataac

SEQ ID NO: 27403 - DNA, 20 bp, Artificial Sequence
  chemically synthesized
acataactggctctgaaaaa

SEQ ID NO: 27404 - DNA, 20 bp, Artificial Sequence
  chemically synthesized
actggctctgaaaaaaagtt

SEQ ID NO: 27405 - DNA, 20 bp, Artificial Sequence
  chemically synthesized
ctggctctgaaaaaaagttt

SEQ ID NO: 27406 - DNA, 20 bp, Artificial Sequence
  chemically synthesized
gaaaaaaagtttaggatgct

SEQ ID NO: 27407 - DNA, 20 bp, Artificial Sequence
  chemically synthesized
aaaaaaagtttaggatgctc

SEQ ID NO: 27408 - DNA, 20 bp, Artificial Sequence
  chemically synthesized
aaaaaagtttaggatgctca

SEQ ID NO: 27409 - DNA, 20 bp, Artificial Sequence
  chemically synthesized
aaagtttaggatgctcaggg

SEQ ID NO: 27410 - DNA, 20 bp, Artificial Sequence
  chemically synthesized
ctcagggcagcaaaataaaa

SEQ ID NO: 27411 - DNA, 20 bp, Artificial Sequence
  chemically synthesized
aaaatggacttttctcattt

SEQ ID NO: 27412 - DNA, 20 bp, Artificial Sequence
  chemically synthesized
tctcatttaagcctttttga

SEQ ID NO: 27413 - DNA, 20 bp, Artificial Sequence
  chemically synthesized
ctcatttaagcctttttgaa

SEQ ID NO: 27414 - DNA, 20 bp, Artificial Sequence
  chemically synthesized
ctttttgaaaggatacaaat

SEQ ID NO: 27415 - DNA, 20 bp, Artificial Sequence
  chemically synthesized
tacaaatgagatccttgatg

SEQ ID NO: 27416 - DNA, 20 bp, Artificial Sequence
  chemically synthesized
tgatgtagtgctgtatgcca

SEQ ID NO: 27417 - DNA, 20 bp, Artificial Sequence
  chemically synthesized
gtgctgtatgccacagattt

SEQ ID NO: 27418 - DNA, 20 bp, Artificial Sequence
  chemically synthesized
ttatcaatgactacaattca

SEQ ID NO: 27419 - DNA, 20 bp, Artificial Sequence
  chemically synthesized
attcatggcacatgtgaaac

SEQ ID NO: 27420 - DNA, 20 bp, Artificial Sequence
  chemically synthesized
aaaccagcaccactaattat

SEQ ID NO: 27421 - DNA, 20 bp, Artificial Sequence
  chemically synthesized
agcaccactaattatgagtc

SEQ ID NO: 27422 - DNA, 20 bp, Artificial Sequence
  chemically synthesized
actaattatgagtctagtcc

SEQ ID NO: 27423 - DNA, 20 bp, Artificial Sequence
  chemically synthesized
gatttcaatcgatgttttat

SEQ ID NO: 27424 - DNA, 20 bp, Artificial Sequence
  chemically synthesized
atttcaatcgatgttttata

SEQ ID NO: 27425 - DNA, 20 bp, Artificial Sequence
  chemically synthesized
ataaggtaaaatataatttt

SEQ ID NO: 27426 - DNA, 20 bp, Artificial Sequence
  chemically synthesized
taaggtaaaatataatttta

SEQ ID NO: 27427 - DNA, 20 bp, Artificial Sequence
  chemically synthesized
aaatataattttaaggcatt

SEQ ID NO: 27428 - DNA, 20 bp, Artificial Sequence
  chemically synthesized
atataattttaaggcatttg

SEQ ID NO: 27429 - DNA, 20 bp, Artificial Sequence
  chemically synthesized
tttggagtgatgaacgtgtt

SEQ ID NO: 27430 - DNA, 20 bp, Artificial Sequence
  chemically synthesized
ttggagtgatgaacgtgtta

SEQ ID NO: 27431 - DNA, 20 bp, Artificial Sequence
  chemically synthesized
tgatgaacgtgttaaggact

SEQ ID NO: 27432 - DNA, 20 bp, Artificial Sequence
  chemically synthesized
gtgttaaggacttggattat

SEQ ID NO: 27433 - DNA, 20 bp, Artificial Sequence
  chemically synthesized
atctttttacttgcccaact

SEQ ID NO: 27434 - DNA, 20 bp, Artificial Sequence
  chemically synthesized
acttgcccaactcagatcgt

SEQ ID NO: 27435 - DNA, 20 bp, Artificial Sequence
  chemically synthesized
cttgcccaactcagatcgtc

SEQ ID NO: 27436 - DNA, 20 bp, Artificial Sequence
  chemically synthesized
actcagatcgtcaggctaaa

SEQ ID NO: 27437 - DNA, 20 bp, Artificial Sequence
  chemically synthesized
ctcagatcgtcaggctaaat

SEQ ID NO: 27438 - DNA, 20 bp, Artificial Sequence
  chemically synthesized
gtcaggctaaataggaatga

SEQ ID NO: 27439 - DNA, 20 bp, Artificial Sequence
  chemically synthesized
aaataggaatgatagtcacc

SEQ ID NO: 27440 - DNA, 20 bp, Artificial Sequence
  chemically synthesized
ataggaatgatagtcaccca

SEQ ID NO: 27441 - DNA, 20 bp, Artificial Sequence
  chemically synthesized
atgatagtcacccagagatc

SEQ ID NO: 27442 - DNA, 20 bp, Artificial Sequence
  chemically synthesized
tgatagtcacccagagatct

SEQ ID NO: 27443 - DNA, 20 bp, Artificial Sequence
  chemically synthesized
gatagtcacccagagatcta

SEQ ID NO: 27444 - DNA, 20 bp, Artificial Sequence
  chemically synthesized
tagtcacccagagatctagg

SEQ ID NO: 27445 - DNA, 20 bp, Artificial Sequence
  chemically synthesized
agtcacccagagatctaggg

SEQ ID NO: 27446 - DNA, 20 bp, Artificial Sequence
  chemically synthesized
cccagagatctagggaggac

SEQ ID NO: 27447 - DNA, 20 bp, Artificial Sequence
  chemically synthesized
ccagagatctagggaggaca

SEQ ID NO: 27448 - DNA, 20 bp, Artificial Sequence
  chemically synthesized
agagatctagggaggacaag

SEQ ID NO: 27449 - DNA, 20 bp, Artificial Sequence
  chemically synthesized
gagatctagggaggacaagg

SEQ ID NO: 27450 - DNA, 20 bp, Artificial Sequence
  chemically synthesized
atctagggaggacaaggagg

SEQ ID NO: 27451 - DNA, 20 bp, Artificial Sequence
  chemically synthesized
ggaggacaaggaggaagcca

SEQ ID NO: 27452 - DNA, 20 bp, Artificial Sequence
  chemically synthesized
aggacaaggaggaagccaca

SEQ ID NO: 27453 - DNA, 20 bp, Artificial Sequence
  chemically synthesized
ggacaaggaggaagccacag

SEQ ID NO: 27454 - DNA, 20 bp, Artificial Sequence
  chemically synthesized
ggaagccacagaggatcatg

SEQ ID NO: 27455 - DNA, 20 bp, Artificial Sequence
  chemically synthesized
gccacagaggatcatgtagt

SEQ ID NO: 27456 - DNA, 20 bp, Artificial Sequence
  chemically synthesized
gaggatcatgtagttggaac

SEQ ID NO: 27457 - DNA, 20 bp, Artificial Sequence
  chemically synthesized
atcatgtagttggaaccaga

SEQ ID NO: 27458 - DNA, 20 bp, Artificial Sequence
  chemically synthesized
gaaccagatagttttttttc

SEQ ID NO: 27459 - DNA, 20 bp, Artificial Sequence
  chemically synthesized
agttttttttccagcctatt

SEQ ID NO: 27460 - DNA, 20 bp, Artificial Sequence
  chemically synthesized
gttttttttccagcctattt

SEQ ID NO: 27461 - DNA, 20 bp, Artificial Sequence
  chemically synthesized
ttccagcctatttgggaccc

SEQ ID NO: 27462 - DNA, 20 bp, Artificial Sequence
  chemically synthesized
ttataaaaatgttctcaatg

SEQ ID NO: 27463 - DNA, 20 bp, Artificial Sequence
  chemically synthesized
aagctttttatttccctttg

SEQ ID NO: 27464 - DNA, 20 bp, Artificial Sequence
  chemically synthesized
gctttttatttccctttgaa

SEQ ID NO: 27465 - DNA, 20 bp, Artificial Sequence
  chemically synthesized
tttttatttccctttgaaga

SEQ ID NO: 27466 - DNA, 20 bp, Artificial Sequence
  chemically synthesized
ttttatttccctttgaagag

SEQ ID NO: 27467 - DNA, 20 bp, Artificial Sequence
  chemically synthesized
ttatttccctttgaagagag

SEQ ID NO: 27468 - DNA, 20 bp, Artificial Sequence
  chemically synthesized
tatttccctttgaagagagg

SEQ ID NO: 27469 - DNA, 20 bp, Artificial Sequence
  chemically synthesized
agagaggaggcaaacaaaaa

SEQ ID NO: 27470 - DNA, 20 bp, Artificial Sequence
  chemically synthesized
gagaggaggcaaacaaaaat

SEQ ID NO: 27471 - DNA, 20 bp, Artificial Sequence
  chemically synthesized
aggaggcaaacaaaaatagg

SEQ ID NO: 27472 - DNA, 20 bp, Artificial Sequence
  chemically synthesized
agataatgtgatactaatgt

SEQ ID NO: 27473 - DNA, 20 bp, Artificial Sequence
  chemically synthesized
cttttttcccccttccacat

SEQ ID NO: 27474 - DNA, 20 bp, Artificial Sequence
  chemically synthesized
aaatgtttgaaacctaattt

SEQ ID NO: 27475 - DNA, 20 bp, Artificial Sequence
  chemically synthesized
cttaccatctaatcttgttt

SEQ ID NO: 27476 - DNA, 20 bp, Artificial Sequence
  chemically synthesized
taccatctaatcttgtttaa

SEQ ID NO: 27477 - DNA, 20 bp, Artificial Sequence
  chemically synthesized
tcttgtttaagagatttacc

SEQ ID NO: 27478 - DNA, 20 bp, Artificial Sequence
  chemically synthesized
cttgtttaagagatttaccc

SEQ ID NO: 27479 - DNA, 20 bp, Artificial Sequence
  chemically synthesized
tgtttaagagatttacccag

SEQ ID NO: 27480 - DNA, 20 bp, Artificial Sequence
  chemically synthesized
taagagatttacccaggagt

SEQ ID NO: 27481 - DNA, 20 bp, Artificial Sequence
  chemically synthesized
acccaggagtgagatatatt

SEQ ID NO: 27482 - DNA, 20 bp, Artificial Sequence
  chemically synthesized
caggagtgagatatattgag

SEQ ID NO: 27483 - DNA, 20 bp, Artificial Sequence
  chemically synthesized
aggagtgagatatattgagt

SEQ ID NO: 27484 - DNA, 20 bp, Artificial Sequence
  chemically synthesized
gggattataaatgcgttgta

SEQ ID NO: 27485 - DNA, 20 bp, Artificial Sequence
  chemically synthesized
tgcgttgtaaagtaaattac

SEQ ID NO: 27486 - DNA, 20 bp, Artificial Sequence
  chemically synthesized
gcgttgtaaagtaaattaca

SEQ ID NO: 27487 - DNA, 20 bp, Artificial Sequence
  chemically synthesized
tgtaaagtaaattacaaggt

SEQ ID NO: 27488 - DNA, 20 bp, Artificial Sequence
  chemically synthesized
gtaaagtaaattacaaggtc

SEQ ID NO: 27489 - DNA, 20 bp, Artificial Sequence
  chemically synthesized
taaagtaaattacaaggtca

SEQ ID NO: 27490 - DNA, 20 bp, Artificial Sequence
  chemically synthesized
agtaaattacaaggtcaggg

SEQ ID NO: 27491 - DNA, 20 bp, Artificial Sequence
  chemically synthesized
gtaaattacaaggtcagggc

SEQ ID NO: 27492 - DNA, 20 bp, Artificial Sequence
  chemically synthesized
aaattacaaggtcagggcag

SEQ ID NO: 27493 - DNA, 20 bp, Artificial Sequence
  chemically synthesized
cagggcaggagtccattatt

SEQ ID NO: 27494 - DNA, 20 bp, Artificial Sequence
  chemically synthesized
caggagtccattatttagac

SEQ ID NO: 27495 - DNA, 20 bp, Artificial Sequence
  chemically synthesized
cattatttagacaagtgctt

SEQ ID NO: 27496 - DNA, 20 bp, Artificial Sequence
  chemically synthesized
atttagacaagtgcttgagc

SEQ ID NO: 27497 - DNA, 20 bp, Artificial Sequence
  chemically synthesized
tttagacaagtgcttgagcg

SEQ ID NO: 27498 - DNA, 20 bp, Artificial Sequence
  chemically synthesized
gacaagtgcttgagcgaggc

SEQ ID NO: 27499 - DNA, 20 bp, Artificial Sequence
  chemically synthesized
tgagcgaggctggcttattt

SEQ ID NO: 27500 - DNA, 20 bp, Artificial Sequence
  chemically synthesized
gctggcttattttggaatac

SEQ ID NO: 27501 - DNA, 20 bp, Artificial Sequence
  chemically synthesized
tattttggaataccagtgtt

SEQ ID NO: 27502 - DNA, 20 bp, Artificial Sequence
  chemically synthesized
attttggaataccagtgttt

SEQ ID NO: 27503 - DNA, 20 bp, Artificial Sequence
  chemically synthesized
ttttggaataccagtgtttg

SEQ ID NO: 27504 - DNA, 20 bp, Artificial Sequence
  chemically synthesized
tttggaataccagtgtttgg

SEQ ID NO: 27505 - DNA, 20 bp, Artificial Sequence
  chemically synthesized
accagtgtttgggggctcct

SEQ ID NO: 27506 - DNA, 20 bp, Artificial Sequence
  chemically synthesized
agtgtttgggggctcctgag

SEQ ID NO: 27507 - DNA, 20 bp, Artificial Sequence
  chemically synthesized
ggctcctgagaagaccctgc

SEQ ID NO: 27508 - DNA, 20 bp, Artificial Sequence
  chemically synthesized
tttctttctgacttgctaaa

SEQ ID NO: 27509 - DNA, 20 bp, Artificial Sequence
  chemically synthesized
tctttctgacttgctaaatg

SEQ ID NO: 27510 - DNA, 20 bp, Artificial Sequence
  chemically synthesized
ctttctgacttgctaaatgg

SEQ ID NO: 27511 - DNA, 20 bp, Artificial Sequence
  chemically synthesized
attctcactcttaacctccc

SEQ ID NO: 27512 - DNA, 20 bp, Artificial Sequence
  chemically synthesized
ctcactcttaacctccctgg

SEQ ID NO: 27513 - DNA, 20 bp, Artificial Sequence
  chemically synthesized
ttttttttttttttccttct

SEQ ID NO: 27514 - DNA, 20 bp, Artificial Sequence
  chemically synthesized
ttttttttttccttcttaga

SEQ ID NO: 27515 - DNA, 20 bp, Artificial Sequence
  chemically synthesized
agaaagttactgacaaatac

SEQ ID NO: 27516 - DNA, 20 bp, Artificial Sequence
  chemically synthesized
ttactgacaaatactagctg

SEQ ID NO: 27517 - DNA, 20 bp, Artificial Sequence
  chemically synthesized
aaatactagctgtggcctta

SEQ ID NO: 27518 - DNA, 20 bp, Artificial Sequence
  chemically synthesized
gtggccttaaagaactcttg

SEQ ID NO: 27519 - DNA, 20 bp, Artificial Sequence
  chemically synthesized
tcttgcagcccttcttttaa

SEQ ID NO: 27520 - DNA, 20 bp, Artificial Sequence
  chemically synthesized
tgcagcccttcttttaaaag

SEQ ID NO: 27521 - DNA, 20 bp, Artificial Sequence
  chemically synthesized
gcagcccttcttttaaaaga

SEQ ID NO: 27522 - DNA, 20 bp, Artificial Sequence
  chemically synthesized
agcccttcttttaaaagaag

SEQ ID NO: 27523 - DNA, 20 bp, Artificial Sequence
  chemically synthesized
ttcttttaaaagaaggagaa

SEQ ID NO: 27524 - DNA, 20 bp, Artificial Sequence
  chemically synthesized
gagaaaagtttgttatttct

SEQ ID NO: 27525 - DNA, 20 bp, Artificial Sequence
  chemically synthesized
ttatttctcagttatatttt

SEQ ID NO: 27526 - DNA, 20 bp, Artificial Sequence
  chemically synthesized
tatttctcagttatatttta

SEQ ID NO: 27527 - DNA, 20 bp, Artificial Sequence
  chemically synthesized
tattttaaggcttttttttt

SEQ ID NO: 27528 - DNA, 20 bp, Artificial Sequence
  chemically synthesized
gctttttttttcagaatctc

SEQ ID NO: 27529 - DNA, 20 bp, Artificial Sequence
  chemically synthesized
ctttttttttcagaatctct

SEQ ID NO: 27530 - DNA, 20 bp, Artificial Sequence
  chemically synthesized
tttttttcagaatctctggg

SEQ ID NO: 27531 - DNA, 20 bp, Artificial Sequence
  chemically synthesized
tttttctcatcctcgtcctt

SEQ ID NO: 27532 - DNA, 20 bp, Artificial Sequence
  chemically synthesized
ttctgccctttttaatgttg

SEQ ID NO: 27533 - DNA, 20 bp, Artificial Sequence
  chemically synthesized
tttttaatgttgcagttgac

SEQ ID NO: 27534 - DNA, 20 bp, Artificial Sequence
  chemically synthesized
gcagttgactagtaaactgt

SEQ ID NO: 27535 - DNA, 20 bp, Artificial Sequence
  chemically synthesized
ttgactagtaaactgttggt

SEQ ID NO: 27536 - DNA, 20 bp, Artificial Sequence
  chemically synthesized
atatatatatatatttaatg

SEQ ID NO: 27537 - DNA, 20 bp, Artificial Sequence
  chemically synthesized
ctccccatatatatttaatt

SEQ ID NO: 27538 - DNA, 20 bp, Artificial Sequence
  chemically synthesized
cccaaatgaaatattttgtg

SEQ ID NO: 27539 - DNA, 20 bp, Artificial Sequence
  chemically synthesized
atgaaatattttgtgaagtc

SEQ ID NO: 27540 - DNA, 20 bp, Artificial Sequence
  chemically synthesized
aatattttgtgaagtcaagc

SEQ ID NO: 27541 - DNA, 20 bp, Artificial Sequence
  chemically synthesized
aagctggcccttctttgcca

SEQ ID NO: 27542 - DNA, 20 bp, Artificial Sequence
  chemically synthesized
ctggcccttctttgccaaag

SEQ ID NO: 27543 - DNA, 20 bp, Artificial Sequence
  chemically synthesized
aaagtggcatttaccactct

SEQ ID NO: 27544 - DNA, 20 bp, Artificial Sequence
  chemically synthesized
aagtggcatttaccactctt

SEQ ID NO: 27545 - DNA, 20 bp, Artificial Sequence
  chemically synthesized
taccactcttgggttctttt

SEQ ID NO: 27546 - DNA, 20 bp, Artificial Sequence
  chemically synthesized
actcttgggttcttttcagc

SEQ ID NO: 27547 - DNA, 20 bp, Artificial Sequence
  chemically synthesized
ctcttgggttcttttcagca

SEQ ID NO: 27548 - DNA, 20 bp, Artificial Sequence
  chemically synthesized
tcttgggttcttttcagcaa

SEQ ID NO: 27549 - DNA, 20 bp, Artificial Sequence
  chemically synthesized
caagggaaataatgtgactt

SEQ ID NO: 27550 - DNA, 20 bp, Artificial Sequence
  chemically synthesized
gggaaataatgtgacttaag

SEQ ID NO: 27551 - DNA, 20 bp, Artificial Sequence
  chemically synthesized
ggaaataatgtgacttaagc

SEQ ID NO: 27552 - DNA, 20 bp, Artificial Sequence
  chemically synthesized
gaaataatgtgacttaagca

SEQ ID NO: 27553 - DNA, 20 bp, Artificial Sequence
  chemically synthesized
acttaagcagggcccctctc

SEQ ID NO: 27554 - DNA, 20 bp, Artificial Sequence
  chemically synthesized
aagcagggcccctctccaga

SEQ ID NO: 27555 - DNA, 20 bp, Artificial Sequence
  chemically synthesized
gggcccctctccagacggct

SEQ ID NO: 27556 - DNA, 20 bp, Artificial Sequence
  chemically synthesized
tctccagacggcttggctac

SEQ ID NO: 27557 - DNA, 20 bp, Artificial Sequence
  chemically synthesized
cagacggcttggctactggc

SEQ ID NO: 27558 - DNA, 20 bp, Artificial Sequence
  chemically synthesized
gacggcttggctactggcca

SEQ ID NO: 27559 - DNA, 20 bp, Artificial Sequence
  chemically synthesized
ggctactggccagagttgac

SEQ ID NO: 27560 - DNA, 20 bp, Artificial Sequence
  chemically synthesized
ctttctgtttctttctcaac

SEQ ID NO: 27561 - DNA, 20 bp, Artificial Sequence
  chemically synthesized
ttctgtttctttctcaactg

SEQ ID NO: 27562 - DNA, 20 bp, Artificial Sequence
  chemically synthesized
tttctttctcaactggagct

SEQ ID NO: 27563 - DNA, 20 bp, Artificial Sequence
  chemically synthesized
tctcaactggagctgagtcc

SEQ ID NO: 27564 - DNA, 20 bp, Artificial Sequence
  chemically synthesized
actggagctgagtcccagcc

SEQ ID NO: 27565 - DNA, 20 bp, Artificial Sequence
  chemically synthesized
ctggagctgagtcccagccg

SEQ ID NO: 27566 - DNA, 20 bp, Artificial Sequence
  chemically synthesized
tggagctgagtcccagccga

SEQ ID NO: 27567 - DNA, 20 bp, Artificial Sequence
  chemically synthesized
ctgagtcccagccgagggcg

SEQ ID NO: 27568 - DNA, 20 bp, Artificial Sequence
  chemically synthesized
tgagtcccagccgagggcgc

SEQ ID NO: 27569 - DNA, 20 bp, Artificial Sequence
  chemically synthesized
gcgcaggatgttgtataatt

SEQ ID NO: 27570 - DNA, 20 bp, Artificial Sequence
  chemically synthesized
tataatttggttcacgttgt

SEQ ID NO: 27571 - DNA, 20 bp, Artificial Sequence
  chemically synthesized
tgttagcctctcaaaacaat

SEQ ID NO: 27572 - DNA, 20 bp, Artificial Sequence
  chemically synthesized
gttagcctctcaaaacaatg

SEQ ID NO: 27573 - DNA, 20 bp, Artificial Sequence
  chemically synthesized
tagcctctcaaaacaatgag

SEQ ID NO: 27574 - DNA, 20 bp, Artificial Sequence
  chemically synthesized
agcctctcaaaacaatgagg

SEQ ID NO: 27575 - DNA, 20 bp, Artificial Sequence
  chemically synthesized
cctctcaaaacaatgaggag

SEQ ID NO: 27576 - DNA, 20 bp, Artificial Sequence
  chemically synthesized
ctctcaaaacaatgaggagg

SEQ ID NO: 27577 - DNA, 20 bp, Artificial Sequence
  chemically synthesized
caaaacaatgaggaggagga

SEQ ID NO: 27578 - DNA, 20 bp, Artificial Sequence
  chemically synthesized
caatgaggaggaggatagtg

SEQ ID NO: 27579 - DNA, 20 bp, Artificial Sequence
  chemically synthesized
gaggatagtgtagcatttct

SEQ ID NO: 27580 - DNA, 20 bp, Artificial Sequence
  chemically synthesized
tctcagcctgctgcctgtca

SEQ ID NO: 27581 - DNA, 20 bp, Artificial Sequence
  chemically synthesized
cctgctgcctgtcatggcgc

SEQ ID NO: 27582 - DNA, 20 bp, Artificial Sequence
  chemically synthesized
gttttaactgttccttaaac

SEQ ID NO: 27583 - DNA, 20 bp, Artificial Sequence
  chemically synthesized
ttttaactgttccttaaact

SEQ ID NO: 27584 - DNA, 20 bp, Artificial Sequence
  chemically synthesized
ctaggatgctgtgtctgctt

SEQ ID NO: 27585 - DNA, 20 bp, Artificial Sequence
  chemically synthesized
gatgctgtgtctgcttaagt

SEQ ID NO: 27586 - DNA, 20 bp, Artificial Sequence
  chemically synthesized
gtgtctgcttaagtcggcac

SEQ ID NO: 27587 - DNA, 20 bp, Artificial Sequence
  chemically synthesized
gccactcctcctaacttttc

SEQ ID NO: 27588 - DNA, 20 bp, Artificial Sequence
  chemically synthesized
cagacttgcatttgtctgac

SEQ ID NO: 27589 - DNA, 20 bp, Artificial Sequence
  chemically synthesized
agacttgcatttgtctgacc

SEQ ID NO: 27590 - DNA, 20 bp, Artificial Sequence
  chemically synthesized
gacttgcatttgtctgaccg

SEQ ID NO: 27591 - DNA, 20 bp, Artificial Sequence
  chemically synthesized
acttgcatttgtctgaccgg

SEQ ID NO: 27592 - DNA, 20 bp, Artificial Sequence
  chemically synthesized
tgaccgggggacaactccta

SEQ ID NO: 27593 - DNA, 20 bp, Artificial Sequence
  chemically synthesized
gggggacaactcctaaagat

SEQ ID NO: 27594 - DNA, 20 bp, Artificial Sequence
  chemically synthesized
caactcctaaagattggata

SEQ ID NO: 27595 - DNA, 20 bp, Artificial Sequence
  chemically synthesized
ctatccgttaaatctgaatg

SEQ ID NO: 27596 - DNA, 20 bp, Artificial Sequence
  chemically synthesized
tctgaatgaagtttttcttt

SEQ ID NO: 27597 - DNA, 20 bp, Artificial Sequence
  chemically synthesized
agattttttaaacattcttt

SEQ ID NO: 27598 - DNA, 20 bp, Artificial Sequence
  chemically synthesized
aacattctttgagataaaaa

SEQ ID NO: 27599 - DNA, 20 bp, Artificial Sequence
  chemically synthesized
gataaaaatggacgtcccca

SEQ ID NO: 27600 - DNA, 20 bp, Artificial Sequence
  chemically synthesized
ataaaaatggacgtccccat

SEQ ID NO: 27601 - DNA, 20 bp, Artificial Sequence
  chemically synthesized
taaaaatggacgtccccatg

SEQ ID NO: 27602 - DNA, 20 bp, Artificial Sequence
  chemically synthesized
gacgtccccatggggtgttg

SEQ ID NO: 27603 - DNA, 20 bp, Artificial Sequence
  chemically synthesized
gggtgttgtggaaccaaaat

SEQ ID NO: 27604 - DNA, 20 bp, Artificial Sequence
  chemically synthesized
ggtgttgtggaaccaaaatt

SEQ ID NO: 27605 - DNA, 20 bp, Artificial Sequence
  chemically synthesized
gggactcactgatcctccca

SEQ ID NO: 27606 - DNA, 20 bp, Artificial Sequence
  chemically synthesized
tcactgatcctcccacagtc

SEQ ID NO: 27607 - DNA, 20 bp, Artificial Sequence
  chemically synthesized
cactgatcctcccacagtct

SEQ ID NO: 27608 - DNA, 20 bp, Artificial Sequence
  chemically synthesized
actgatcctcccacagtctg

SEQ ID NO: 27609 - DNA, 20 bp, Artificial Sequence
  chemically synthesized
cctcccacagtctggggtgt

SEQ ID NO: 27610 - DNA, 20 bp, Artificial Sequence
  chemically synthesized
ctggggtgtgagaatgttgc

SEQ ID NO: 27611 - DNA, 20 bp, Artificial Sequence
  chemically synthesized
tgttgctagtcttttttcca

SEQ ID NO: 27612 - DNA, 20 bp, Artificial Sequence
  chemically synthesized
tgctagtcttttttccacgg

SEQ ID NO: 27613 - DNA, 20 bp, Artificial Sequence
  chemically synthesized
tttccacggaagtattttat

SEQ ID NO: 27614 - DNA, 20 bp, Artificial Sequence
  chemically synthesized
attttaacaatatcaacaat

SEQ ID NO: 27615 - DNA, 20 bp, Artificial Sequence
  chemically synthesized
tatcaacaattagtgtgttt

SEQ ID NO: 27616 - DNA, 20 bp, Artificial Sequence
  chemically synthesized
atcaacaattagtgtgtttc

SEQ ID NO: 27617 - DNA, 20 bp, Artificial Sequence
  chemically synthesized
gtgtttcaggctaatgctga

SEQ ID NO: 27618 - DNA, 20 bp, Artificial Sequence
  chemically synthesized
gctaatgctgaaagcatctt

SEQ ID NO: 27619 - DNA, 20 bp, Artificial Sequence
  chemically synthesized
ctaatgctgaaagcatcttt

SEQ ID NO: 27620 - DNA, 20 bp, Artificial Sequence
  chemically synthesized
taatgctgaaagcatcttta

SEQ ID NO: 27621 - DNA, 20 bp, Artificial Sequence
  chemically synthesized
tgaaagcatctttagggcca

SEQ ID NO: 27622 - DNA, 20 bp, Artificial Sequence
  chemically synthesized
tttagggccatagaacattg

SEQ ID NO: 27623 - DNA, 20 bp, Artificial Sequence
  chemically synthesized
gggccatagaacattgtagt

SEQ ID NO: 27624 - DNA, 20 bp, Artificial Sequence
  chemically synthesized
ctatgaaatgtttgcctatt

SEQ ID NO: 27625 - DNA, 20 bp, Artificial Sequence
  chemically synthesized
gaaatgtttgcctatttaga

SEQ ID NO: 27626 - DNA, 20 bp, Artificial Sequence
  chemically synthesized
tagaaagttcacctgtcacc

SEQ ID NO: 27627 - DNA, 20 bp, Artificial Sequence
  chemically synthesized
agaaagttcacctgtcaccc

SEQ ID NO: 27628 - DNA, 20 bp, Artificial Sequence
  chemically synthesized
gaaagttcacctgtcaccca

SEQ ID NO: 27629 - DNA, 20 bp, Artificial Sequence
  chemically synthesized
aaagttcacctgtcacccag

SEQ ID NO: 27630 - DNA, 20 bp, Artificial Sequence
  chemically synthesized
aagttcacctgtcacccagg

SEQ ID NO: 27631 - DNA, 20 bp, Artificial Sequence
  chemically synthesized
agttcacctgtcacccaggg

SEQ ID NO: 27632 - DNA, 20 bp, Artificial Sequence
  chemically synthesized
acctgtcacccaggggggaa

SEQ ID NO: 27633 - DNA, 20 bp, Artificial Sequence
  chemically synthesized
gtcacccaggggggaataga

SEQ ID NO: 27634 - DNA, 20 bp, Artificial Sequence
  chemically synthesized
cccaggggggaatagaaagc

SEQ ID NO: 27635 - DNA, 20 bp, Artificial Sequence
  chemically synthesized
ccaggggggaatagaaagct

SEQ ID NO: 27636 - DNA, 20 bp, Artificial Sequence
  chemically synthesized
gggaatagaaagctgggatt

SEQ ID NO: 27637 - DNA, 20 bp, Artificial Sequence
  chemically synthesized
ggaatagaaagctgggattt

SEQ ID NO: 27638 - DNA, 20 bp, Artificial Sequence
  chemically synthesized
atagaaagctgggatttagg

SEQ ID NO: 27639 - DNA, 20 bp, Artificial Sequence
  chemically synthesized
ctgggatttaggaagccaaa

SEQ ID NO: 27640 - DNA, 20 bp, Artificial Sequence
  chemically synthesized
aggaagccaaaaagtttcct

SEQ ID NO: 27641 - DNA, 20 bp, Artificial Sequence
  chemically synthesized
ggaagccaaaaagtttcctt

SEQ ID NO: 27642 - DNA, 20 bp, Artificial Sequence
  chemically synthesized
ttccttgggtcaccttgtcc

SEQ ID NO: 27643 - DNA, 20 bp, Artificial Sequence
  chemically synthesized
gtccaagtttctcacttaac

SEQ ID NO: 27644 - DNA, 20 bp, Artificial Sequence
  chemically synthesized
tccaagtttctcacttaaca

SEQ ID NO: 27645 - DNA, 20 bp, Artificial Sequence
  chemically synthesized
caagtttctcacttaacaag

SEQ ID NO: 27646 - DNA, 20 bp, Artificial Sequence
  chemically synthesized
aagtttctcacttaacaagg

SEQ ID NO: 27647 - DNA, 20 bp, Artificial Sequence
  chemically synthesized
ctcacttaacaaggaggaaa

SEQ ID NO: 27648 - DNA, 20 bp, Artificial Sequence
  chemically synthesized
cacttaacaaggaggaaaca

SEQ ID NO: 27649 - DNA, 20 bp, Artificial Sequence
  chemically synthesized
acttaacaaggaggaaacag

SEQ ID NO: 27650 - DNA, 20 bp, Artificial Sequence
  chemically synthesized
aaggaggaaacagaggcaca

SEQ ID NO: 27651 - DNA, 20 bp, Artificial Sequence
  chemically synthesized
ggaggaaacagaggcacatg

SEQ ID NO: 27652 - DNA, 20 bp, Artificial Sequence
  chemically synthesized
aaacagaggcacatggagat

SEQ ID NO: 27653 - DNA, 20 bp, Artificial Sequence
  chemically synthesized
agaggcacatggagatgaga

SEQ ID NO: 27654 - DNA, 20 bp, Artificial Sequence
  chemically synthesized
agatggcttgccccaaacta

SEQ ID NO: 27655 - DNA, 20 bp, Artificial Sequence
  chemically synthesized
ttgccccaaactacagctga

SEQ ID NO: 27656 - DNA, 20 bp, Artificial Sequence
  chemically synthesized
caaactacagctgatggaac

SEQ ID NO: 27657 - DNA, 20 bp, Artificial Sequence
  chemically synthesized
ctacagctgatggaactgga

SEQ ID NO: 27658 - DNA, 20 bp, Artificial Sequence
  chemically synthesized
gctgatggaactggaaagtt

SEQ ID NO: 27659 - DNA, 20 bp, Artificial Sequence
  chemically synthesized
gatggaactggaaagtttag

SEQ ID NO: 27660 - DNA, 20 bp, Artificial Sequence
  chemically synthesized
aagtttagaagacatttgtt

SEQ ID NO: 27661 - DNA, 20 bp, Artificial Sequence
  chemically synthesized
agtttagaagacatttgttg

SEQ ID NO: 27662 - DNA, 20 bp, Artificial Sequence
  chemically synthesized
aagacatttgttgaggtgcc

SEQ ID NO: 27663 - DNA, 20 bp, Artificial Sequence
  chemically synthesized
ttgttgaggtgcctagaatg

SEQ ID NO: 27664 - DNA, 20 bp, Artificial Sequence
  chemically synthesized
tgttgaggtgcctagaatgt

SEQ ID NO: 27665 - DNA, 20 bp, Artificial Sequence
  chemically synthesized
gttgaggtgcctagaatgta

SEQ ID NO: 27666 - DNA, 20 bp, Artificial Sequence
  chemically synthesized
atgtagggaccttcatcctc

SEQ ID NO: 27667 - DNA, 20 bp, Artificial Sequence
  chemically synthesized
agggaccttcatcctcaagc

SEQ ID NO: 27668 - DNA, 20 bp, Artificial Sequence
  chemically synthesized
cttcatcctcaagccagaac

SEQ ID NO: 27669 - DNA, 20 bp, Artificial Sequence
  chemically synthesized
atcctcaagccagaactggt

SEQ ID NO: 27670 - DNA, 20 bp, Artificial Sequence
  chemically synthesized
tcctcaagccagaactggtc

SEQ ID NO: 27671 - DNA, 20 bp, Artificial Sequence
  chemically synthesized
tggtcaggatttttctgctt

SEQ ID NO: 27672 - DNA, 20 bp, Artificial Sequence
  chemically synthesized
ggtcaggatttttctgcttt

SEQ ID NO: 27673 - DNA, 20 bp, Artificial Sequence
  chemically synthesized
gtcaggatttttctgctttg

SEQ ID NO: 27674 - DNA, 20 bp, Artificial Sequence
  chemically synthesized
gatttttctgctttggggat

SEQ ID NO: 27675 - DNA, 20 bp, Artificial Sequence
  chemically synthesized
gggattggatataaaatttc

SEQ ID NO: 27676 - DNA, 20 bp, Artificial Sequence
  chemically synthesized
gatataaaatttctagaact

SEQ ID NO: 27677 - DNA, 20 bp, Artificial Sequence
  chemically synthesized
atttctagaactgagtttaa

SEQ ID NO: 27678 - DNA, 20 bp, Artificial Sequence
  chemically synthesized
tctagaactgagtttaatgg

SEQ ID NO: 27679 - DNA, 20 bp, Artificial Sequence
  chemically synthesized
ctagaactgagtttaatggc

SEQ ID NO: 27680 - DNA, 20 bp, Artificial Sequence
  chemically synthesized
gaactgagtttaatggcagg

SEQ ID NO: 27681 - DNA, 20 bp, Artificial Sequence
  chemically synthesized
ttaatggcaggaagatcaat

SEQ ID NO: 27682 - DNA, 20 bp, Artificial Sequence
  chemically synthesized
tcaattggaccaatatttac

SEQ ID NO: 27683 - DNA, 20 bp, Artificial Sequence
  chemically synthesized
caattggaccaatatttact

SEQ ID NO: 27684 - DNA, 20 bp, Artificial Sequence
  chemically synthesized
atttactgggtacccatgct

SEQ ID NO: 27685 - DNA, 20 bp, Artificial Sequence
  chemically synthesized
gtacccatgctcagacgtgc

SEQ ID NO: 27686 - DNA, 20 bp, Artificial Sequence
  chemically synthesized
tacccatgctcagacgtgcc

SEQ ID NO: 27687 - DNA, 20 bp, Artificial Sequence
  chemically synthesized
atgctcagacgtgccaggca

SEQ ID NO: 27688 - DNA, 20 bp, Artificial Sequence
  chemically synthesized
tgctcagacgtgccaggcac

SEQ ID NO: 27689 - DNA, 20 bp, Artificial Sequence
  chemically synthesized
gctcagacgtgccaggcaca

SEQ ID NO: 27690 - DNA, 20 bp, Artificial Sequence
  chemically synthesized
ctcagacgtgccaggcacag

SEQ ID NO: 27691 - DNA, 20 bp, Artificial Sequence
  chemically synthesized
tcagacgtgccaggcacagg

SEQ ID NO: 27692 - DNA, 20 bp, Artificial Sequence
  chemically synthesized
gacgtgccaggcacaggggg

SEQ ID NO: 27693 - DNA, 20 bp, Artificial Sequence
  chemically synthesized
acgtgccaggcacagggggt

SEQ ID NO: 27694 - DNA, 20 bp, Artificial Sequence
  chemically synthesized
gccaggcacagggggtaggt

SEQ ID NO: 27695 - DNA, 20 bp, Artificial Sequence
  chemically synthesized
ggcacagggggtaggtcagt

SEQ ID NO: 27696 - DNA, 20 bp, Artificial Sequence
  chemically synthesized
gcacagggggtaggtcagtg

SEQ ID NO: 27697 - DNA, 20 bp, Artificial Sequence
  chemically synthesized
cacagggggtaggtcagtga

SEQ ID NO: 27698 - DNA, 20 bp, Artificial Sequence
  chemically synthesized
ggggtaggtcagtgagggct

SEQ ID NO: 27699 - DNA, 20 bp, Artificial Sequence
  chemically synthesized
gggtaggtcagtgagggctt

SEQ ID NO: 27700 - DNA, 20 bp, Artificial Sequence
  chemically synthesized
gtcagtgagggcttaggcct

SEQ ID NO: 27701 - DNA, 20 bp, Artificial Sequence
  chemically synthesized
tcagtgagggcttaggcctt

SEQ ID NO: 27702 - DNA, 20 bp, Artificial Sequence
  chemically synthesized
cagtgagggcttaggccttg

SEQ ID NO: 27703 - DNA, 20 bp, Artificial Sequence
  chemically synthesized
agggcttaggccttggggtt

SEQ ID NO: 27704 - DNA, 20 bp, Artificial Sequence
  chemically synthesized
gggcttaggccttggggttg

SEQ ID NO: 27705 - DNA, 20 bp, Artificial Sequence
  chemically synthesized
ggcttaggccttggggttga

SEQ ID NO: 27706 - DNA, 20 bp, Artificial Sequence
  chemically synthesized
gcttaggccttggggttgag

SEQ ID NO: 27707 - DNA, 20 bp, Artificial Sequence
  chemically synthesized
taggccttggggttgagggg

SEQ ID NO: 27708 - DNA, 20 bp, Artificial Sequence
  chemically synthesized
aggccttggggttgaggggt

SEQ ID NO: 27709 - DNA, 20 bp, Artificial Sequence
  chemically synthesized
ggccttggggttgaggggtg

SEQ ID NO: 27710 - DNA, 20 bp, Artificial Sequence
  chemically synthesized
gccttggggttgaggggtgg

SEQ ID NO: 27711 - DNA, 20 bp, Artificial Sequence
  chemically synthesized
ttggggttgaggggtggggg

SEQ ID NO: 27712 - DNA, 20 bp, Artificial Sequence
  chemically synthesized
tggggttgaggggtgggggc

SEQ ID NO: 27713 - DNA, 20 bp, Artificial Sequence
  chemically synthesized
ggggttgaggggtgggggca

SEQ ID NO: 27714 - DNA, 20 bp, Artificial Sequence
  chemically synthesized
gttgaggggtgggggcaggg

SEQ ID NO: 27715 - DNA, 20 bp, Artificial Sequence
  chemically synthesized
ttgaggggtgggggcaggga

SEQ ID NO: 27716 - DNA, 20 bp, Artificial Sequence
  chemically synthesized
ggggtgggggcagggaaggc

SEQ ID NO: 27717 - DNA, 20 bp, Artificial Sequence
  chemically synthesized
ggtgggggcagggaaggctg

SEQ ID NO: 27718 - DNA, 20 bp, Artificial Sequence
  chemically synthesized
gtgggggcagggaaggctgg

SEQ ID NO: 27719 - DNA, 20 bp, Artificial Sequence
  chemically synthesized
ggggcagggaaggctggagg

SEQ ID NO: 27720 - DNA, 20 bp, Artificial Sequence
  chemically synthesized
gctggaggtggaacataaat

SEQ ID NO: 27721 - DNA, 20 bp, Artificial Sequence
  chemically synthesized
gcaattgctgatgcccgcct

SEQ ID NO: 27722 - DNA, 20 bp, Artificial Sequence
  chemically synthesized
cagtgattaaacattgatgt

SEQ ID NO: 27723 - DNA, 20 bp, Artificial Sequence
  chemically synthesized
gttggtgttgtattattttg

SEQ ID NO: 27724 - DNA, 20 bp, Artificial Sequence
  chemically synthesized
ttggtgttgtattattttgc

SEQ ID NO: 27725 - DNA, 20 bp, Artificial Sequence
  chemically synthesized
gttgtattattttgcaggta

SEQ ID NO: 27726 - DNA, 20 bp, Artificial Sequence
  chemically synthesized
attattttgcaggtaaagat

SEQ ID NO: 27727 - DNA, 20 bp, Artificial Sequence
  chemically synthesized
tttgcaggtaaagatgagcc

SEQ ID NO: 27728 - DNA, 20 bp, Artificial Sequence
  chemically synthesized
gcaggtaaagatgagcccag

SEQ ID NO: 27729 - DNA, 20 bp, Artificial Sequence
  chemically synthesized
acacatgtacaacttgcaaa

SEQ ID NO: 27730 - DNA, 20 bp, Artificial Sequence
  chemically synthesized
acttgcaaacagccattcac

SEQ ID NO: 27731 - DNA, 20 bp, Artificial Sequence
  chemically synthesized
aacagccattcaccagtgca

SEQ ID NO: 27732 - DNA, 20 bp, Artificial Sequence
  chemically synthesized
ggtttctcttgcaacacgca

SEQ ID NO: 27733 - DNA, 20 bp, Artificial Sequence
  chemically synthesized
caacacgcacagaacactca

SEQ ID NO: 27734 - DNA, 20 bp, Artificial Sequence
  chemically synthesized
gcacagaacactcatggatt

SEQ ID NO: 27735 - DNA, 20 bp, Artificial Sequence
  chemically synthesized
tcatggattaagaatctact

SEQ ID NO: 27736 - DNA, 20 bp, Artificial Sequence
  chemically synthesized
ggattaagaatctacttaga

SEQ ID NO: 27737 - DNA, 20 bp, Artificial Sequence
  chemically synthesized
atctacttagaaagcgaaca

SEQ ID NO: 27738 - DNA, 20 bp, Artificial Sequence
  chemically synthesized
tacttagaaagcgaacacgg

SEQ ID NO: 27739 - DNA, 20 bp, Artificial Sequence
  chemically synthesized
acggaagtcccctgaccccg

SEQ ID NO: 27740 - DNA, 20 bp, Artificial Sequence
  chemically synthesized
cggaagtcccctgaccccgc

SEQ ID NO: 27741 - DNA, 20 bp, Artificial Sequence
  chemically synthesized
agtcccctgaccccgcgggt

SEQ ID NO: 27742 - DNA, 20 bp, Artificial Sequence
  chemically synthesized
cccgcgggttggtatccctt

SEQ ID NO: 27743 - DNA, 20 bp, Artificial Sequence
  chemically synthesized
ccgcgggttggtatcccttc

SEQ ID NO: 27744 - DNA, 20 bp, Artificial Sequence
  chemically synthesized
ggttggtatcccttcaggac

SEQ ID NO: 27745 - DNA, 20 bp, Artificial Sequence
  chemically synthesized
gttggtatcccttcaggact

SEQ ID NO: 27746 - DNA, 20 bp, Artificial Sequence
  chemically synthesized
tatcccttcaggactaggtg

SEQ ID NO: 27747 - DNA, 20 bp, Artificial Sequence
  chemically synthesized
taggtgcagaatgtccttcc

SEQ ID NO: 27748 - DNA, 20 bp, Artificial Sequence
  chemically synthesized
ccttcccagccacctctcca

SEQ ID NO: 27749 - DNA, 20 bp, Artificial Sequence
  chemically synthesized
cttcccagccacctctccat

SEQ ID NO: 27750 - DNA, 20 bp, Artificial Sequence
  chemically synthesized
tctccatgggattcatattg

SEQ ID NO: 27751 - DNA, 20 bp, Artificial Sequence
  chemically synthesized
aataacccctttaacctgct

SEQ ID NO: 27752 - DNA, 20 bp, Artificial Sequence
  chemically synthesized
ctttaacctgctaagaatac

SEQ ID NO: 27753 - DNA, 20 bp, Artificial Sequence
  chemically synthesized
tttaacctgctaagaatacc

SEQ ID NO: 27754 - DNA, 20 bp, Artificial Sequence
  chemically synthesized
cctgctaagaataccaggat

SEQ ID NO: 27755 - DNA, 20 bp, Artificial Sequence
  chemically synthesized
agaataccaggatcagtatc

SEQ ID NO: 27756 - DNA, 20 bp, Artificial Sequence
  chemically synthesized
aataccaggatcagtatcga

SEQ ID NO: 27757 - DNA, 20 bp, Artificial Sequence
  chemically synthesized
taccaggatcagtatcgaga

SEQ ID NO: 27758 - DNA, 20 bp, Artificial Sequence
  chemically synthesized
accaggatcagtatcgagag

SEQ ID NO: 27759 - DNA, 20 bp, Artificial Sequence
  chemically synthesized
tcagtatcgagagaggcttc

SEQ ID NO: 27760 - DNA, 20 bp, Artificial Sequence
  chemically synthesized
atcgagagaggcttccggcc

SEQ ID NO: 27761 - DNA, 20 bp, Artificial Sequence
  chemically synthesized
gagagaggcttccggcctgg

SEQ ID NO: 27762 - DNA, 20 bp, Artificial Sequence
  chemically synthesized
agaggcttccggcctggcag

SEQ ID NO: 27763 - DNA, 20 bp, Artificial Sequence
  chemically synthesized
gaggcttccggcctggcaga

SEQ ID NO: 27764 - DNA, 20 bp, Artificial Sequence
  chemically synthesized
aggcttccggcctggcagaa

SEQ ID NO: 27765 - DNA, 20 bp, Artificial Sequence
  chemically synthesized
ccacccactccccccctgtt

SEQ ID NO: 27766 - DNA, 20 bp, Artificial Sequence
  chemically synthesized
cccctgtttagtccaccacc

SEQ ID NO: 27767 - DNA, 20 bp, Artificial Sequence
  chemically synthesized
tccaccaccgagacatcact

SEQ ID NO: 27768 - DNA, 20 bp, Artificial Sequence
  chemically synthesized
tcacttggacccccaccgca

SEQ ID NO: 27769 - DNA, 20 bp, Artificial Sequence
  chemically synthesized
acttggacccccaccgcata

SEQ ID NO: 27770 - DNA, 20 bp, Artificial Sequence
  chemically synthesized
cccccaccgcatagagcgcc

SEQ ID NO: 27771 - DNA, 20 bp, Artificial Sequence
  chemically synthesized
ccccaccgcatagagcgcct

SEQ ID NO: 27772 - DNA, 20 bp, Artificial Sequence
  chemically synthesized
cccaccgcatagagcgcctg

SEQ ID NO: 27773 - DNA, 20 bp, Artificial Sequence
  chemically synthesized
ccaccgcatagagcgcctgg

SEQ ID NO: 27774 - DNA, 20 bp, Artificial Sequence
  chemically synthesized
ccgcatagagcgcctggggg

SEQ ID NO: 27775 - DNA, 20 bp, Artificial Sequence
  chemically synthesized
catagagcgcctgggggcgg

SEQ ID NO: 27776 - DNA, 20 bp, Artificial Sequence
  chemically synthesized
tagagcgcctgggggcggaa

SEQ ID NO: 27777 - DNA, 20 bp, Artificial Sequence
  chemically synthesized
gcgcctgggggcggaagaga

SEQ ID NO: 27778 - DNA, 20 bp, Artificial Sequence
  chemically synthesized
gggggcggaagagatggccc

SEQ ID NO: 27779 - DNA, 20 bp, Artificial Sequence
  chemically synthesized
gccctggccacccatcaccc

SEQ ID NO: 27780 - DNA, 20 bp, Artificial Sequence
  chemically synthesized
catcacccgagtgcctttga

SEQ ID NO: 27781 - DNA, 20 bp, Artificial Sequence
  chemically synthesized
atcacccgagtgcctttgac

SEQ ID NO: 27782 - DNA, 20 bp, Artificial Sequence
  chemically synthesized
tcacccgagtgcctttgaca

SEQ ID NO: 27783 - DNA, 20 bp, Artificial Sequence
  chemically synthesized
gtgcctttgacagggtgctg

SEQ ID NO: 27784 - DNA, 20 bp, Artificial Sequence
  chemically synthesized
ggtgctgcggttgaatccaa

SEQ ID NO: 27785 - DNA, 20 bp, Artificial Sequence
  chemically synthesized
gcggttgaatccaatggcta

SEQ ID NO: 27786 - DNA, 20 bp, Artificial Sequence
  chemically synthesized
ggttgaatccaatggctatg

SEQ ID NO: 27787 - DNA, 20 bp, Artificial Sequence
  chemically synthesized
ggctatggagcctcccgcca

SEQ ID NO: 27788 - DNA, 20 bp, Artificial Sequence
  chemically synthesized
cctcccgccatggatttctc

SEQ ID NO: 27789 - DNA, 20 bp, Artificial Sequence
  chemically synthesized
ctcccgccatggatttctct

SEQ ID NO: 27790 - DNA, 20 bp, Artificial Sequence
  chemically synthesized
cccgccatggatttctctag

SEQ ID NO: 27791 - DNA, 20 bp, Artificial Sequence
  chemically synthesized
atggatttctctaggagact

SEQ ID NO: 27792 - DNA, 20 bp, Artificial Sequence
  chemically synthesized
ggatttctctaggagactta

SEQ ID NO: 27793 - DNA, 20 bp, Artificial Sequence
  chemically synthesized
atttctctaggagacttaga

SEQ ID NO: 27794 - DNA, 20 bp, Artificial Sequence
  chemically synthesized
ctctaggagacttagagagc

SEQ ID NO: 27795 - DNA, 20 bp, Artificial Sequence
  chemically synthesized
taggagacttagagagctgg

SEQ ID NO: 27796 - DNA, 20 bp, Artificial Sequence
  chemically synthesized
aggagacttagagagctggc

SEQ ID NO: 27797 - DNA, 20 bp, Artificial Sequence
  chemically synthesized
ggagacttagagagctggca

SEQ ID NO: 27798 - DNA, 20 bp, Artificial Sequence
  chemically synthesized
gagctggcagggaacacgtc

SEQ ID NO: 27799 - DNA, 20 bp, Artificial Sequence
  chemically synthesized
gtctagcccaccgctgtccc

SEQ ID NO: 27800 - DNA, 20 bp, Artificial Sequence
  chemically synthesized
tctagcccaccgctgtcccc

SEQ ID NO: 27801 - DNA, 20 bp, Artificial Sequence
  chemically synthesized
gcccaccgctgtccccaggc

SEQ ID NO: 27802 - DNA, 20 bp, Artificial Sequence
  chemically synthesized
ccgctgtccccaggccggcc

SEQ ID NO: 27803 - DNA, 20 bp, Artificial Sequence
  chemically synthesized
ggccggcccagccctatgca

SEQ ID NO: 27804 - DNA, 20 bp, Artificial Sequence
  chemically synthesized
gccggcccagccctatgcaa

SEQ ID NO: 27805 - DNA, 20 bp, Artificial Sequence
  chemically synthesized
aaaggttactgcaaccattc

SEQ ID NO: 27806 - DNA, 20 bp, Artificial Sequence
  chemically synthesized
gttactgcaaccattccagc

SEQ ID NO: 27807 - DNA, 20 bp, Artificial Sequence
  chemically synthesized
ttactgcaaccattccagcc

SEQ ID NO: 27808 - DNA, 20 bp, Artificial Sequence
  chemically synthesized
ctgcaaccattccagccagg

SEQ ID NO: 27809 - DNA, 20 bp, Artificial Sequence
  chemically synthesized
aaccattccagccaggtagc

SEQ ID NO: 27810 - DNA, 20 bp, Artificial Sequence
  chemically synthesized
aggtagcaagccgcccttcc

SEQ ID NO: 27811 - DNA, 20 bp, Artificial Sequence
  chemically synthesized
aatccgcccctcctccctcc

SEQ ID NO: 27812 - DNA, 20 bp, Artificial Sequence
  chemically synthesized
ccctcctccctcccagcccc

SEQ ID NO: 27813 - DNA, 20 bp, Artificial Sequence
  chemically synthesized
ctccctcccagcccccggtc

SEQ ID NO: 27814 - DNA, 20 bp, Artificial Sequence
  chemically synthesized
cccagcccccggtcaagtcc

SEQ ID NO: 27815 - DNA, 20 bp, Artificial Sequence
  chemically synthesized
cggtcaagtccaagtcatgc

SEQ ID NO: 27816 - DNA, 20 bp, Artificial Sequence
  chemically synthesized
tccaagtcatgcgagttctg

SEQ ID NO: 27817 - DNA, 20 bp, Artificial Sequence
  chemically synthesized
agtcatgcgagttctgcggc

SEQ ID NO: 27818 - DNA, 20 bp, Artificial Sequence
  chemically synthesized
gcggcaagacgttcaaattt

SEQ ID NO: 27819 - DNA, 20 bp, Artificial Sequence
  chemically synthesized
ggcaagacgttcaaatttca

SEQ ID NO: 27820 - DNA, 20 bp, Artificial Sequence
  chemically synthesized
gttcaaatttcagagcaacc

SEQ ID NO: 27821 - DNA, 20 bp, Artificial Sequence
  chemically synthesized
caaatttcagagcaacctgg

SEQ ID NO: 27822 - DNA, 20 bp, Artificial Sequence
  chemically synthesized
agagcaacctggtggtgcac

SEQ ID NO: 27823 - DNA, 20 bp, Artificial Sequence
  chemically synthesized
aacctggtggtgcaccggcg

SEQ ID NO: 27824 - DNA, 20 bp, Artificial Sequence
  chemically synthesized
ggtgcaccggcgcagccaca

SEQ ID NO: 27825 - DNA, 20 bp, Artificial Sequence
  chemically synthesized
gtgcaccggcgcagccacac

SEQ ID NO: 27826 - DNA, 20 bp, Artificial Sequence
  chemically synthesized
accggcgcagccacacgggc

SEQ ID NO: 27827 - DNA, 20 bp, Artificial Sequence
  chemically synthesized
ggcgcagccacacgggcgag

SEQ ID NO: 27828 - DNA, 20 bp, Artificial Sequence
  chemically synthesized
acacgggcgagaagccctac

SEQ ID NO: 27829 - DNA, 20 bp, Artificial Sequence
  chemically synthesized
tgtgcgaccacgcgtgcacc

SEQ ID NO: 27830 - DNA, 20 bp, Artificial Sequence
  chemically synthesized
gtgcgaccacgcgtgcaccc

SEQ ID NO: 27831 - DNA, 20 bp, Artificial Sequence
  chemically synthesized
gaccacgcgtgcacccaggc

SEQ ID NO: 27832 - DNA, 20 bp, Artificial Sequence
  chemically synthesized
acgcgtgcacccaggccagc

SEQ ID NO: 27833 - DNA, 20 bp, Artificial Sequence
  chemically synthesized
gcacccaggccagcaagctg

SEQ ID NO: 27834 - DNA, 20 bp, Artificial Sequence
  chemically synthesized
gcaagctgaagcgccacatg

SEQ ID NO: 27835 - DNA, 20 bp, Artificial Sequence
  chemically synthesized
gcacaaatcgtcccccatga

SEQ ID NO: 27836 - DNA, 20 bp, Artificial Sequence
  chemically synthesized
aatcgtcccccatgacggtc

SEQ ID NO: 27837 - DNA, 20 bp, Artificial Sequence
  chemically synthesized
atgacggtcaagtccgacga

SEQ ID NO: 27838 - DNA, 20 bp, Artificial Sequence
  chemically synthesized
gacgacggtctctccaccgc

SEQ ID NO: 27839 - DNA, 20 bp, Artificial Sequence
  chemically synthesized
tctctccaccgccagctccc

SEQ ID NO: 27840 - DNA, 20 bp, Artificial Sequence
  chemically synthesized
accgccagctccccggaacc

SEQ ID NO: 27841 - DNA, 20 bp, Artificial Sequence
  chemically synthesized
agctccccggaacccggcac

SEQ ID NO: 27842 - DNA, 20 bp, Artificial Sequence
  chemically synthesized
ggaacccggcaccagcgact

SEQ ID NO: 27843 - DNA, 20 bp, Artificial Sequence
  chemically synthesized
acccggcaccagcgacttgg

SEQ ID NO: 27844 - DNA, 20 bp, Artificial Sequence
  chemically synthesized
cccggcaccagcgacttggt

SEQ ID NO: 27845 - DNA, 20 bp, Artificial Sequence
  chemically synthesized
ggcaccagcgacttggtggg

SEQ ID NO: 27846 - DNA, 20 bp, Artificial Sequence
  chemically synthesized
agcgacttggtgggcagcgc

SEQ ID NO: 27847 - DNA, 20 bp, Artificial Sequence
  chemically synthesized
gacttggtgggcagcgccag

SEQ ID NO: 27848 - DNA, 20 bp, Artificial Sequence
  chemically synthesized
gcagcgccagcagcgcgctc

SEQ ID NO: 27849 - DNA, 20 bp, Artificial Sequence
  chemically synthesized
cagcagcgcgctcaagtccg

SEQ ID NO: 27850 - DNA, 20 bp, Artificial Sequence
  chemically synthesized
cagcgcgctcaagtccgtgg

SEQ ID NO: 27851 - DNA, 20 bp, Artificial Sequence
  chemically synthesized
cgctcaagtccgtggtggcc

SEQ ID NO: 27852 - DNA, 20 bp, Artificial Sequence
  chemically synthesized
agtccgtggtggccaagttc

SEQ ID NO: 27853 - DNA, 20 bp, Artificial Sequence
  chemically synthesized
tccgtggtggccaagttcaa

SEQ ID NO: 27854 - DNA, 20 bp, Artificial Sequence
  chemically synthesized
tggtggccaagttcaagagc

SEQ ID NO: 27855 - DNA, 20 bp, Artificial Sequence
  chemically synthesized
gaacgaccccaacctgatcc

SEQ ID NO: 27856 - DNA, 20 bp, Artificial Sequence
  chemically synthesized
acgaccccaacctgatcccg

SEQ ID NO: 27857 - DNA, 20 bp, Artificial Sequence
  chemically synthesized
cccaacctgatcccggagaa

SEQ ID NO: 27858 - DNA, 20 bp, Artificial Sequence
  chemically synthesized
ccaacctgatcccggagaac

SEQ ID NO: 27859 - DNA, 20 bp, Artificial Sequence
  chemically synthesized
caacctgatcccggagaacg

SEQ ID NO: 27860 - DNA, 20 bp, Artificial Sequence
  chemically synthesized
tgatcccggagaacggggac

SEQ ID NO: 27861 - DNA, 20 bp, Artificial Sequence
  chemically synthesized
gatcccggagaacggggacg

SEQ ID NO: 27862 - DNA, 20 bp, Artificial Sequence
  chemically synthesized
tcccggagaacggggacgag

SEQ ID NO: 27863 - DNA, 20 bp, Artificial Sequence
  chemically synthesized
cccggagaacggggacgagg

SEQ ID NO: 27864 - DNA, 20 bp, Artificial Sequence
  chemically synthesized
ggagaacggggacgaggagg

SEQ ID NO: 27865 - DNA, 20 bp, Artificial Sequence
  chemically synthesized
agaacggggacgaggaggaa

SEQ ID NO: 27866 - DNA, 20 bp, Artificial Sequence
  chemically synthesized
gaacggggacgaggaggaag

SEQ ID NO: 27867 - DNA, 20 bp, Artificial Sequence
  chemically synthesized
acggggacgaggaggaagag

SEQ ID NO: 27868 - DNA, 20 bp, Artificial Sequence
  chemically synthesized
cggggacgaggaggaagagg

SEQ ID NO: 27869 - DNA, 20 bp, Artificial Sequence
  chemically synthesized
aggaggaagaggaggacgac

SEQ ID NO: 27870 - DNA, 20 bp, Artificial Sequence
  chemically synthesized
ggaggaagaggaggacgacg

SEQ ID NO: 27871 - DNA, 20 bp, Artificial Sequence
  chemically synthesized
ggaagaggaggacgacgagg

SEQ ID NO: 27872 - DNA, 20 bp, Artificial Sequence
  chemically synthesized
aagaggaggacgacgaggaa

SEQ ID NO: 27873 - DNA, 20 bp, Artificial Sequence
  chemically synthesized
agaggaggacgacgaggaag

SEQ ID NO: 27874 - DNA, 20 bp, Artificial Sequence
  chemically synthesized
ggaggacgacgaggaagagg

SEQ ID NO: 27875 - DNA, 20 bp, Artificial Sequence
  chemically synthesized
ggacgacgaggaagaggaag

SEQ ID NO: 27876 - DNA, 20 bp, Artificial Sequence
  chemically synthesized
acgacgaggaagaggaagaa

SEQ ID NO: 27877 - DNA, 20 bp, Artificial Sequence
  chemically synthesized
cgacgaggaagaggaagaag

SEQ ID NO: 27878 - DNA, 20 bp, Artificial Sequence
  chemically synthesized
acgaggaagaggaagaagag

SEQ ID NO: 27879 - DNA, 20 bp, Artificial Sequence
  chemically synthesized
cgaggaagaggaagaagagg

SEQ ID NO: 27880 - DNA, 20 bp, Artificial Sequence
  chemically synthesized
ggaagaggaagaagaggagg

SEQ ID NO: 27881 - DNA, 20 bp, Artificial Sequence
  chemically synthesized
aagaggaagaagaggaggaa

SEQ ID NO: 27882 - DNA, 20 bp, Artificial Sequence
  chemically synthesized
agaggaagaagaggaggaag

SEQ ID NO: 27883 - DNA, 20 bp, Artificial Sequence
  chemically synthesized
aggaagaagaggaggaagag

SEQ ID NO: 27884 - DNA, 20 bp, Artificial Sequence
  chemically synthesized
ggaagaagaggaggaagagg

SEQ ID NO: 27885 - DNA, 20 bp, Artificial Sequence
  chemically synthesized
aagaagaggaggaagaggag

SEQ ID NO: 27886 - DNA, 20 bp, Artificial Sequence
  chemically synthesized
agaagaggaggaagaggagg

SEQ ID NO: 27887 - DNA, 20 bp, Artificial Sequence
  chemically synthesized
aagaggaggaagaggaggag

SEQ ID NO: 27888 - DNA, 20 bp, Artificial Sequence
  chemically synthesized
agaggaggaagaggaggagg

SEQ ID NO: 27889 - DNA, 20 bp, Artificial Sequence
  chemically synthesized
aggaggaagaggaggaggag

SEQ ID NO: 27890 - DNA, 20 bp, Artificial Sequence
  chemically synthesized
agaggaggaggaggagctga

SEQ ID NO: 27891 - DNA, 20 bp, Artificial Sequence
  chemically synthesized
aggaggaggaggagctgacg

SEQ ID NO: 27892 - DNA, 20 bp, Artificial Sequence
  chemically synthesized
gaggaggaggagctgacgga

SEQ ID NO: 27893 - DNA, 20 bp, Artificial Sequence
  chemically synthesized
aggaggagctgacggagagc

SEQ ID NO: 27894 - DNA, 20 bp, Artificial Sequence
  chemically synthesized
gaggagctgacggagagcga

SEQ ID NO: 27895 - DNA, 20 bp, Artificial Sequence
  chemically synthesized
aggagctgacggagagcgag

SEQ ID NO: 27896 - DNA, 20 bp, Artificial Sequence
  chemically synthesized
ggagctgacggagagcgaga

SEQ ID NO: 27897 - DNA, 20 bp, Artificial Sequence
  chemically synthesized
gctgacggagagcgagaggg

SEQ ID NO: 27898 - DNA, 20 bp, Artificial Sequence
  chemically synthesized
gagagcgagagggtggacta

SEQ ID NO: 27899 - DNA, 20 bp, Artificial Sequence
  chemically synthesized
gagagggtggactacggctt

SEQ ID NO: 27900 - DNA, 20 bp, Artificial Sequence
  chemically synthesized
agagggtggactacggcttc

SEQ ID NO: 27901 - DNA, 20 bp, Artificial Sequence
  chemically synthesized
gtggactacggcttcgggct

SEQ ID NO: 27902 - DNA, 20 bp, Artificial Sequence
  chemically synthesized
ctacggcttcgggctgagcc

SEQ ID NO: 27903 - DNA, 20 bp, Artificial Sequence
  chemically synthesized
acggcttcgggctgagcctg

SEQ ID NO: 27904 - DNA, 20 bp, Artificial Sequence
  chemically synthesized
cggcttcgggctgagcctgg

SEQ ID NO: 27905 - DNA, 20 bp, Artificial Sequence
  chemically synthesized
cttcgggctgagcctggagg

SEQ ID NO: 27906 - DNA, 20 bp, Artificial Sequence
  chemically synthesized
tggaggcggcgcgccaccac

SEQ ID NO: 27907 - DNA, 20 bp, Artificial Sequence
  chemically synthesized
gcggcgcgccaccacgagaa

SEQ ID NO: 27908 - DNA, 20 bp, Artificial Sequence
  chemically synthesized
gccaccacgagaacagctcg

SEQ ID NO: 27909 - DNA, 20 bp, Artificial Sequence
  chemically synthesized
ccaccacgagaacagctcgc

SEQ ID NO: 27910 - DNA, 20 bp, Artificial Sequence
  chemically synthesized
caccacgagaacagctcgcg

SEQ ID NO: 27911 - DNA, 20 bp, Artificial Sequence
  chemically synthesized
cgagaacagctcgcggggcg

SEQ ID NO: 27912 - DNA, 20 bp, Artificial Sequence
  chemically synthesized
cagctcgcggggcgcggtcg

SEQ ID NO: 27913 - DNA, 20 bp, Artificial Sequence
  chemically synthesized
agctcgcggggcgcggtcgt

SEQ ID NO: 27914 - DNA, 20 bp, Artificial Sequence
  chemically synthesized
gcggggcgcggtcgtgggcg

SEQ ID NO: 27915 - DNA, 20 bp, Artificial Sequence
  chemically synthesized
cggggcgcggtcgtgggcgt

SEQ ID NO: 27916 - DNA, 20 bp, Artificial Sequence
  chemically synthesized
cggtcgtgggcgtgggcgac

SEQ ID NO: 27917 - DNA, 20 bp, Artificial Sequence
  chemically synthesized
gtcgtgggcgtgggcgacga

SEQ ID NO: 27918 - DNA, 20 bp, Artificial Sequence
  chemically synthesized
gcgccctgcccgacgtcatg

SEQ ID NO: 27919 - DNA, 20 bp, Artificial Sequence
  chemically synthesized
cgccctgcccgacgtcatgc

SEQ ID NO: 27920 - DNA, 20 bp, Artificial Sequence
  chemically synthesized
gccctgcccgacgtcatgca

SEQ ID NO: 27921 - DNA, 20 bp, Artificial Sequence
  chemically synthesized
gcccgacgtcatgcagggca

SEQ ID NO: 27922 - DNA, 20 bp, Artificial Sequence
  chemically synthesized
gtcatgcagggcatggtgct

SEQ ID NO: 27923 - DNA, 20 bp, Artificial Sequence
  chemically synthesized
gcatggtgctcagctccatg

SEQ ID NO: 27924 - DNA, 20 bp, Artificial Sequence
  chemically synthesized
ctcagctccatgcagcactt

SEQ ID NO: 27925 - DNA, 20 bp, Artificial Sequence
  chemically synthesized
gctccatgcagcacttcagc

SEQ ID NO: 27926 - DNA, 20 bp, Artificial Sequence
  chemically synthesized
ctccatgcagcacttcagcg

SEQ ID NO: 27927 - DNA, 20 bp, Artificial Sequence
  chemically synthesized
acttcagcgaggccttccac

SEQ ID NO: 27928 - DNA, 20 bp, Artificial Sequence
  chemically synthesized
cttcagcgaggccttccacc

SEQ ID NO: 27929 - DNA, 20 bp, Artificial Sequence
  chemically synthesized
cgaggccttccaccaggtcc

SEQ ID NO: 27930 - DNA, 20 bp, Artificial Sequence
  chemically synthesized
gaggccttccaccaggtcct

SEQ ID NO: 27931 - DNA, 20 bp, Artificial Sequence
  chemically synthesized
ccttccaccaggtcctgggc

SEQ ID NO: 27932 - DNA, 20 bp, Artificial Sequence
  chemically synthesized
tccaccaggtcctgggcgag

SEQ ID NO: 27933 - DNA, 20 bp, Artificial Sequence
  chemically synthesized
aggtcctgggcgagaagcat

SEQ ID NO: 27934 - DNA, 20 bp, Artificial Sequence
  chemically synthesized
ctgggcgagaagcataagcg

SEQ ID NO: 27935 - DNA, 20 bp, Artificial Sequence
  chemically synthesized
gaagcataagcgcggccacc

SEQ ID NO: 27936 - DNA, 20 bp, Artificial Sequence
  chemically synthesized
ataagcgcggccacctggcc

SEQ ID NO: 27937 - DNA, 20 bp, Artificial Sequence
  chemically synthesized
taagcgcggccacctggccg

SEQ ID NO: 27938 - DNA, 20 bp, Artificial Sequence
  chemically synthesized
gcggccacctggccgaggcc

SEQ ID NO: 27939 - DNA, 20 bp, Artificial Sequence
  chemically synthesized
cggccacctggccgaggccg

SEQ ID NO: 27940 - DNA, 20 bp, Artificial Sequence
  chemically synthesized
ggccacctggccgaggccga

SEQ ID NO: 27941 - DNA, 20 bp, Artificial Sequence
  chemically synthesized
ctggccgaggccgagggcca

SEQ ID NO: 27942 - DNA, 20 bp, Artificial Sequence
  chemically synthesized
tggccgaggccgagggccac

SEQ ID NO: 27943 - DNA, 20 bp, Artificial Sequence
  chemically synthesized
ggccgaggccgagggccaca

SEQ ID NO: 27944 - DNA, 20 bp, Artificial Sequence
  chemically synthesized
ccacagggacacttgcgacg

SEQ ID NO: 27945 - DNA, 20 bp, Artificial Sequence
  chemically synthesized
ggacacttgcgacgaagact

SEQ ID NO: 27946 - DNA, 20 bp, Artificial Sequence
  chemically synthesized
cacttgcgacgaagactcgg

SEQ ID NO: 27947 - DNA, 20 bp, Artificial Sequence
  chemically synthesized
tgcgacgaagactcggtggc

SEQ ID NO: 27948 - DNA, 20 bp, Artificial Sequence
  chemically synthesized
acgaagactcggtggccggc

SEQ ID NO: 27949 - DNA, 20 bp, Artificial Sequence
  chemically synthesized
agactcggtggccggcgagt

SEQ ID NO: 27950 - DNA, 20 bp, Artificial Sequence
  chemically synthesized
ggccggcgagtcggaccgca

SEQ ID NO: 27951 - DNA, 20 bp, Artificial Sequence
  chemically synthesized
gagtcggaccgcatagacga

SEQ ID NO: 27952 - DNA, 20 bp, Artificial Sequence
  chemically synthesized
atagacgatggcactgttaa

SEQ ID NO: 27953 - DNA, 20 bp, Artificial Sequence
  chemically synthesized
gatggcactgttaatggccg

SEQ ID NO: 27954 - DNA, 20 bp, Artificial Sequence
  chemically synthesized
taatggccgcggctgctccc

SEQ ID NO: 27955 - DNA, 20 bp, Artificial Sequence
  chemically synthesized
aatggccgcggctgctcccc

SEQ ID NO: 27956 - DNA, 20 bp, Artificial Sequence
  chemically synthesized
gccgcggctgctccccgggc

SEQ ID NO: 27957 - DNA, 20 bp, Artificial Sequence
  chemically synthesized
cggctgctccccgggcgagt

SEQ ID NO: 27958 - DNA, 20 bp, Artificial Sequence
  chemically synthesized
ctccccgggcgagtcggcct

SEQ ID NO: 27959 - DNA, 20 bp, Artificial Sequence
  chemically synthesized
tccccgggcgagtcggcctc

SEQ ID NO: 27960 - DNA, 20 bp, Artificial Sequence
  chemically synthesized
ccccgggcgagtcggcctcg

SEQ ID NO: 27961 - DNA, 20 bp, Artificial Sequence
  chemically synthesized
cccgggcgagtcggcctcgg

SEQ ID NO: 27962 - DNA, 20 bp, Artificial Sequence
  chemically synthesized
ccgggcgagtcggcctcggg

SEQ ID NO: 27963 - DNA, 20 bp, Artificial Sequence
  chemically synthesized
cctcggggggcctgtccaaa

SEQ ID NO: 27964 - DNA, 20 bp, Artificial Sequence
  chemically synthesized
cctgtccaaaaagctgctgc

SEQ ID NO: 27965 - DNA, 20 bp, Artificial Sequence
  chemically synthesized
ctgtccaaaaagctgctgct

SEQ ID NO: 27966 - DNA, 20 bp, Artificial Sequence
  chemically synthesized
tccaaaaagctgctgctggg

SEQ ID NO: 27967 - DNA, 20 bp, Artificial Sequence
  chemically synthesized
aagctgctgctgggcagccc

SEQ ID NO: 27968 - DNA, 20 bp, Artificial Sequence
  chemically synthesized
ctgggcagccccagctcgct

SEQ ID NO: 27969 - DNA, 20 bp, Artificial Sequence
  chemically synthesized
gctcgctgagccccttctct

SEQ ID NO: 27970 - DNA, 20 bp, Artificial Sequence
  chemically synthesized
gccccttctctaagcgcatc

SEQ ID NO: 27971 - DNA, 20 bp, Artificial Sequence
  chemically synthesized
tctctaagcgcatcaagctc

SEQ ID NO: 27972 - DNA, 20 bp, Artificial Sequence
  chemically synthesized
ctaagcgcatcaagctcgag

SEQ ID NO: 27973 - DNA, 20 bp, Artificial Sequence
  chemically synthesized
taagcgcatcaagctcgaga

SEQ ID NO: 27974 - DNA, 20 bp, Artificial Sequence
  chemically synthesized
agcgcatcaagctcgagaag

SEQ ID NO: 27975 - DNA, 20 bp, Artificial Sequence
  chemically synthesized
gaaggagttcgacctgcccc

SEQ ID NO: 27976 - DNA, 20 bp, Artificial Sequence
  chemically synthesized
cccggccgcgatgcccaaca

SEQ ID NO: 27977 - DNA, 20 bp, Artificial Sequence
  chemically synthesized
cggccgcgatgcccaacacg

SEQ ID NO: 27978 - DNA, 20 bp, Artificial Sequence
  chemically synthesized
acacggagaacgtgtactcg

SEQ ID NO: 27979 - DNA, 20 bp, Artificial Sequence
  chemically synthesized
cggagaacgtgtactcgcag

SEQ ID NO: 27980 - DNA, 20 bp, Artificial Sequence
  chemically synthesized
gtgtactcgcagtggctcgc

SEQ ID NO: 27981 - DNA, 20 bp, Artificial Sequence
  chemically synthesized
gcagtggctcgccggctacg

SEQ ID NO: 27982 - DNA, 20 bp, Artificial Sequence
  chemically synthesized
ctcgccggctacgcggcctc

SEQ ID NO: 27983 - DNA, 20 bp, Artificial Sequence
  chemically synthesized
tcgccggctacgcggcctcc

SEQ ID NO: 27984 - DNA, 20 bp, Artificial Sequence
  chemically synthesized
ccggctacgcggcctccagg

SEQ ID NO: 27985 - DNA, 20 bp, Artificial Sequence
  chemically synthesized
cgcggcctccaggcagctca

SEQ ID NO: 27986 - DNA, 20 bp, Artificial Sequence
  chemically synthesized
cagctcaaagatcccttcct

SEQ ID NO: 27987 - DNA, 20 bp, Artificial Sequence
  chemically synthesized
aaagatcccttccttagctt

SEQ ID NO: 27988 - DNA, 20 bp, Artificial Sequence
  chemically synthesized
agatcccttccttagcttcg

SEQ ID NO: 27989 - DNA, 20 bp, Artificial Sequence
  chemically synthesized
ttccttagcttcggagactc

SEQ ID NO: 27990 - DNA, 20 bp, Artificial Sequence
  chemically synthesized
atcgccttttgcctcctcgt

SEQ ID NO: 27991 - DNA, 20 bp, Artificial Sequence
  chemically synthesized
cgccttttgcctcctcgtcg

SEQ ID NO: 27992 - DNA, 20 bp, Artificial Sequence
  chemically synthesized
ctcctcgtcggagcactcct

SEQ ID NO: 27993 - DNA, 20 bp, Artificial Sequence
  chemically synthesized
cctcgtcggagcactcctcg

SEQ ID NO: 27994 - DNA, 20 bp, Artificial Sequence
  chemically synthesized
tcggagcactcctcggagaa

SEQ ID NO: 27995 - DNA, 20 bp, Artificial Sequence
  chemically synthesized
cggagcactcctcggagaac

SEQ ID NO: 27996 - DNA, 20 bp, Artificial Sequence
  chemically synthesized
gagcactcctcggagaacgg

SEQ ID NO: 27997 - DNA, 20 bp, Artificial Sequence
  chemically synthesized
ttgcgcttctccacaccgcc

SEQ ID NO: 27998 - DNA, 20 bp, Artificial Sequence
  chemically synthesized
tgcgcttctccacaccgccc

SEQ ID NO: 27999 - DNA, 20 bp, Artificial Sequence
  chemically synthesized
gcgcttctccacaccgcccg

SEQ ID NO: 28000 - DNA, 20 bp, Artificial Sequence
  chemically synthesized
gcttctccacaccgcccggg

SEQ ID NO: 28001 - DNA, 20 bp, Artificial Sequence
  chemically synthesized
ctccacaccgcccggggagc

SEQ ID NO: 28002 - DNA, 20 bp, Artificial Sequence
  chemically synthesized
acaccgcccggggagctgga

SEQ ID NO: 28003 - DNA, 20 bp, Artificial Sequence
  chemically synthesized
accgcccggggagctggacg

SEQ ID NO: 28004 - DNA, 20 bp, Artificial Sequence
  chemically synthesized
ccgcccggggagctggacgg

SEQ ID NO: 28005 - DNA, 20 bp, Artificial Sequence
  chemically synthesized
cgcccggggagctggacgga

SEQ ID NO: 28006 - DNA, 20 bp, Artificial Sequence
  chemically synthesized
ggagctggacggagggatct

SEQ ID NO: 28007 - DNA, 20 bp, Artificial Sequence
  chemically synthesized
gagctggacggagggatctc

SEQ ID NO: 28008 - DNA, 20 bp, Artificial Sequence
  chemically synthesized
agctggacggagggatctcg

SEQ ID NO: 28009 - DNA, 20 bp, Artificial Sequence
  chemically synthesized
gacggagggatctcggggcg

SEQ ID NO: 28010 - DNA, 20 bp, Artificial Sequence
  chemically synthesized
ggagggatctcggggcgcag

SEQ ID NO: 28011 - DNA, 20 bp, Artificial Sequence
  chemically synthesized
gatctcggggcgcagcggca

SEQ ID NO: 28012 - DNA, 20 bp, Artificial Sequence
  chemically synthesized
atctcggggcgcagcggcac

SEQ ID NO: 28013 - DNA, 20 bp, Artificial Sequence
  chemically synthesized
tcggggcgcagcggcacggg

SEQ ID NO: 28014 - DNA, 20 bp, Artificial Sequence
  chemically synthesized
gggcgcagcggcacgggaag

SEQ ID NO: 28015 - DNA, 20 bp, Artificial Sequence
  chemically synthesized
gcgcagcggcacgggaagtg

SEQ ID NO: 28016 - DNA, 20 bp, Artificial Sequence
  chemically synthesized
cgcagcggcacgggaagtgg

SEQ ID NO: 28017 - DNA, 20 bp, Artificial Sequence
  chemically synthesized
gcagcggcacgggaagtgga

SEQ ID NO: 28018 - DNA, 20 bp, Artificial Sequence
  chemically synthesized
agcggcacgggaagtggagg

SEQ ID NO: 28019 - DNA, 20 bp, Artificial Sequence
  chemically synthesized
ggagggagcacgccccatat

SEQ ID NO: 28020 - DNA, 20 bp, Artificial Sequence
  chemically synthesized
gggagcacgccccatattag

SEQ ID NO: 28021 - DNA, 20 bp, Artificial Sequence
  chemically synthesized
cacgccccatattagtggtc

SEQ ID NO: 28022 - DNA, 20 bp, Artificial Sequence
  chemically synthesized
acgccccatattagtggtcc

SEQ ID NO: 28023 - DNA, 20 bp, Artificial Sequence
  chemically synthesized
ccatattagtggtccgggcc

SEQ ID NO: 28024 - DNA, 20 bp, Artificial Sequence
  chemically synthesized
catattagtggtccgggccc

SEQ ID NO: 28025 - DNA, 20 bp, Artificial Sequence
  chemically synthesized
attagtggtccgggcccggg

SEQ ID NO: 28026 - DNA, 20 bp, Artificial Sequence
  chemically synthesized
ttagtggtccgggcccgggc

SEQ ID NO: 28027 - DNA, 20 bp, Artificial Sequence
  chemically synthesized
ggtccgggcccgggcaggcc

SEQ ID NO: 28028 - DNA, 20 bp, Artificial Sequence
  chemically synthesized
cccgggcaggcccagctcaa

SEQ ID NO: 28029 - DNA, 20 bp, Artificial Sequence
  chemically synthesized
cgggcaggcccagctcaaaa

SEQ ID NO: 28030 - DNA, 20 bp, Artificial Sequence
  chemically synthesized
gggcaggcccagctcaaaag

SEQ ID NO: 28031 - DNA, 20 bp, Artificial Sequence
  chemically synthesized
ggcaggcccagctcaaaaga

SEQ ID NO: 28032 - DNA, 20 bp, Artificial Sequence
  chemically synthesized
aggcccagctcaaaagaggg

SEQ ID NO: 28033 - DNA, 20 bp, Artificial Sequence
  chemically synthesized
agctcaaaagagggcagacg

SEQ ID NO: 28034 - DNA, 20 bp, Artificial Sequence
  chemically synthesized
gcagacgcagcgacacttgt

SEQ ID NO: 28035 - DNA, 20 bp, Artificial Sequence
  chemically synthesized
agcgacacttgtgagtactg

SEQ ID NO: 28036 - DNA, 20 bp, Artificial Sequence
  chemically synthesized
gcgacacttgtgagtactgt

SEQ ID NO: 28037 - DNA, 20 bp, Artificial Sequence
  chemically synthesized
cacttgtgagtactgtggga

SEQ ID NO: 28038 - DNA, 20 bp, Artificial Sequence
  chemically synthesized
agtactgtgggaaagtcttc

SEQ ID NO: 28039 - DNA, 20 bp, Artificial Sequence
  chemically synthesized
gggaaagtcttcaagaactg

SEQ ID NO: 28040 - DNA, 20 bp, Artificial Sequence
  chemically synthesized
tgtagcaatctcactgtcca

SEQ ID NO: 28041 - DNA, 20 bp, Artificial Sequence
  chemically synthesized
gtagcaatctcactgtccac

SEQ ID NO: 28042 - DNA, 20 bp, Artificial Sequence
  chemically synthesized
agcaatctcactgtccacag

SEQ ID NO: 28043 - DNA, 20 bp, Artificial Sequence
  chemically synthesized
aatctcactgtccacaggag

SEQ ID NO: 28044 - DNA, 20 bp, Artificial Sequence
  chemically synthesized
tgtccacaggagaagccaca

SEQ ID NO: 28045 - DNA, 20 bp, Artificial Sequence
  chemically synthesized
gtccacaggagaagccacac

SEQ ID NO: 28046 - DNA, 20 bp, Artificial Sequence
  chemically synthesized
aggagaagccacacgggcga

SEQ ID NO: 28047 - DNA, 20 bp, Artificial Sequence
  chemically synthesized
ggagaagccacacgggcgaa

SEQ ID NO: 28048 - DNA, 20 bp, Artificial Sequence
  chemically synthesized
gcgaaaggccttataaatgc

SEQ ID NO: 28049 - DNA, 20 bp, Artificial Sequence
  chemically synthesized
tgtgcaactatgcctgtgcc

SEQ ID NO: 28050 - DNA, 20 bp, Artificial Sequence
  chemically synthesized
tgcaactatgcctgtgccca

SEQ ID NO: 28051 - DNA, 20 bp, Artificial Sequence
  chemically synthesized
aactatgcctgtgcccagag

SEQ ID NO: 28052 - DNA, 20 bp, Artificial Sequence
  chemically synthesized
atgcctgtgcccagagtagc

SEQ ID NO: 28053 - DNA, 20 bp, Artificial Sequence
  chemically synthesized
gcccagagtagcaagctcac

SEQ ID NO: 28054 - DNA, 20 bp, Artificial Sequence
  chemically synthesized
cccagagtagcaagctcacc

SEQ ID NO: 28055 - DNA, 20 bp, Artificial Sequence
  chemically synthesized
accaggcacatgaaaacgca

SEQ ID NO: 28056 - DNA, 20 bp, Artificial Sequence
  chemically synthesized
ggcacatgaaaacgcatggc

SEQ ID NO: 28057 - DNA, 20 bp, Artificial Sequence
  chemically synthesized
gcacatgaaaacgcatggcc

SEQ ID NO: 28058 - DNA, 20 bp, Artificial Sequence
  chemically synthesized
catgaaaacgcatggccagg

SEQ ID NO: 28059 - DNA, 20 bp, Artificial Sequence
  chemically synthesized
atgaaaacgcatggccaggt

SEQ ID NO: 28060 - DNA, 20 bp, Artificial Sequence
  chemically synthesized
tgaaaacgcatggccaggtg

SEQ ID NO: 28061 - DNA, 20 bp, Artificial Sequence
  chemically synthesized
aaacgcatggccaggtgggg

SEQ ID NO: 28062 - DNA, 20 bp, Artificial Sequence
  chemically synthesized
aacgcatggccaggtgggga

SEQ ID NO: 28063 - DNA, 20 bp, Artificial Sequence
  chemically synthesized
tttacaaatgtgaaatttgt

SEQ ID NO: 28064 - DNA, 20 bp, Artificial Sequence
  chemically synthesized
gaaatttgtaagatgccttt

SEQ ID NO: 28065 - DNA, 20 bp, Artificial Sequence
  chemically synthesized
aagatgccttttagcgtgta

SEQ ID NO: 28066 - DNA, 20 bp, Artificial Sequence
  chemically synthesized
ttttagcgtgtacagtaccc

SEQ ID NO: 28067 - DNA, 20 bp, Artificial Sequence
  chemically synthesized
ttagcgtgtacagtaccctg

SEQ ID NO: 28068 - DNA, 20 bp, Artificial Sequence
  chemically synthesized
tggagaaacacatgaaaaaa

SEQ ID NO: 28069 - DNA, 20 bp, Artificial Sequence
  chemically synthesized
aaacacatgaaaaaatggca

SEQ ID NO: 28070 - DNA, 20 bp, Artificial Sequence
  chemically synthesized
gaaaaaatggcacagtgatc

SEQ ID NO: 28071 - DNA, 20 bp, Artificial Sequence
  chemically synthesized
ataatgatataaaaactgaa

SEQ ID NO: 28072 - DNA, 20 bp, Artificial Sequence
  chemically synthesized
aatgatataaaaactgaata

SEQ ID NO: 28073 - DNA, 20 bp, Artificial Sequence
  chemically synthesized
atgatataaaaactgaatag

SEQ ID NO: 28074 - DNA, 20 bp, Artificial Sequence
  chemically synthesized
tccccttccccatcgccctc

SEQ ID NO: 28075 - DNA, 20 bp, Artificial Sequence
  chemically synthesized
ccctccagccccactccctg

SEQ ID NO: 28076 - DNA, 20 bp, Artificial Sequence
  chemically synthesized
cctccagccccactccctgt

SEQ ID NO: 28077 - DNA, 20 bp, Artificial Sequence
  chemically synthesized
ctccctgtaggatttttttc

SEQ ID NO: 28078 - DNA, 20 bp, Artificial Sequence
  chemically synthesized
taaacaaacaaacaaacaaa

SEQ ID NO: 28079 - DNA, 20 bp, Artificial Sequence
  chemically synthesized
acaaacaaacaaacaaacag

SEQ ID NO: 28080 - DNA, 20 bp, Artificial Sequence
  chemically synthesized
acaaacaaacagaagtaacg

SEQ ID NO: 28081 - DNA, 20 bp, Artificial Sequence
  chemically synthesized
caaacagaagtaacgaagct

SEQ ID NO: 28082 - DNA, 20 bp, Artificial Sequence
  chemically synthesized
agtaacgaagctaagaatat

SEQ ID NO: 28083 - DNA, 20 bp, Artificial Sequence
  chemically synthesized
taacgaagctaagaatatga

SEQ ID NO: 28084 - DNA, 20 bp, Artificial Sequence
  chemically synthesized
aatatgagagtgcttgtcac

SEQ ID NO: 28085 - DNA, 20 bp, Artificial Sequence
  chemically synthesized
gtttgaatgcatgatctgta

SEQ ID NO: 28086 - DNA, 20 bp, Artificial Sequence
  chemically synthesized
tttgaatgcatgatctgtat

SEQ ID NO: 28087 - DNA, 20 bp, Artificial Sequence
  chemically synthesized
ttgaatgcatgatctgtatg

SEQ ID NO: 28088 - DNA, 20 bp, Artificial Sequence
  chemically synthesized
ttgcattttacgcaaacttt

SEQ ID NO: 28089 - DNA, 20 bp, Artificial Sequence
  chemically synthesized
tgtatgtttttttttaaact

SEQ ID NO: 28090 - DNA, 20 bp, Artificial Sequence
  chemically synthesized
tgtttttttttaaacttaga

SEQ ID NO: 28091 - DNA, 20 bp, Artificial Sequence
  chemically synthesized
ttaaacttagacagcatgta

SEQ ID NO: 28092 - DNA, 20 bp, Artificial Sequence
  chemically synthesized
acagcatgtatggtatgtta

SEQ ID NO: 28093 - DNA, 20 bp, Artificial Sequence
  chemically synthesized
attgtccctaattcgttgct

SEQ ID NO: 28094 - DNA, 20 bp, Artificial Sequence
  chemically synthesized
agcaaacatgttgctgtttc

SEQ ID NO: 28095 - DNA, 20 bp, Artificial Sequence
  chemically synthesized
gctgtttccagttccgttct

SEQ ID NO: 28096 - DNA, 20 bp, Artificial Sequence
  chemically synthesized
tgtttccagttccgttctga

SEQ ID NO: 28097 - DNA, 20 bp, Artificial Sequence
  chemically synthesized
cagttccgttctgagagaaa

SEQ ID NO: 28098 - DNA, 20 bp, Artificial Sequence
  chemically synthesized
gttccgttctgagagaaaaa

SEQ ID NO: 28099 - DNA, 20 bp, Artificial Sequence
  chemically synthesized
tccgttctgagagaaaaaga

SEQ ID NO: 28100 - DNA, 20 bp, Artificial Sequence
  chemically synthesized
cgttctgagagaaaaagaga

SEQ ID NO: 28101 - DNA, 20 bp, Artificial Sequence
  chemically synthesized
ttctgagagaaaaagagaga

SEQ ID NO: 28102 - DNA, 20 bp, Artificial Sequence
  chemically synthesized
ctgagagaaaaagagagaga

SEQ ID NO: 28103 - DNA, 20 bp, Artificial Sequence
  chemically synthesized
gagagaaaaagagagagaga

SEQ ID NO: 28104 - DNA, 20 bp, Artificial Sequence
  chemically synthesized
aaaagagagagagagagaaa

SEQ ID NO: 28105 - DNA, 20 bp, Artificial Sequence
  chemically synthesized
tctgtaatacatatcatgta

SEQ ID NO: 28106 - DNA, 20 bp, Artificial Sequence
  chemically synthesized
acagttttattttataacgt

SEQ ID NO: 28107 - DNA, 20 bp, Artificial Sequence
  chemically synthesized
cagttttattttataacgtg

SEQ ID NO: 28108 - DNA, 20 bp, Artificial Sequence
  chemically synthesized
gttttattttataacgtgag

SEQ ID NO: 28109 - DNA, 20 bp, Artificial Sequence
  chemically synthesized
ttttattttataacgtgagg

SEQ ID NO: 28110 - DNA, 20 bp, Artificial Sequence
  chemically synthesized
tataacgtgaggaggaaaaa

SEQ ID NO: 28111 - DNA, 20 bp, Artificial Sequence
  chemically synthesized
tgaggaggaaaaacagtctt

SEQ ID NO: 28112 - DNA, 20 bp, Artificial Sequence
  chemically synthesized
gtctttggattaaccctcta

SEQ ID NO: 28113 - DNA, 20 bp, Artificial Sequence
  chemically synthesized
ttggattaaccctctataga

SEQ ID NO: 28114 - DNA, 20 bp, Artificial Sequence
  chemically synthesized
ttaaccctctatagacagaa

SEQ ID NO: 28115 - DNA, 20 bp, Artificial Sequence
  chemically synthesized
ccctctatagacagaataga

SEQ ID NO: 28116 - DNA, 20 bp, Artificial Sequence
  chemically synthesized
cactgaaaaaaaatctctat

SEQ ID NO: 28117 - DNA, 20 bp, Artificial Sequence
  chemically synthesized
gagctaaatgtctgtctcta

SEQ ID NO: 28118 - DNA, 20 bp, Artificial Sequence
  chemically synthesized
agctaaatgtctgtctctaa

SEQ ID NO: 28119 - DNA, 20 bp, Artificial Sequence
  chemically synthesized
gctaaatgtctgtctctaaa

SEQ ID NO: 28120 - DNA, 20 bp, Artificial Sequence
  chemically synthesized
aaagggttaaatgtatcaat

SEQ ID NO: 28121 - DNA, 20 bp, Artificial Sequence
  chemically synthesized
ggttaaatgtatcaattgga

SEQ ID NO: 28122 - DNA, 20 bp, Artificial Sequence
  chemically synthesized
gttaaatgtatcaattggaa

SEQ ID NO: 28123 - DNA, 20 bp, Artificial Sequence
  chemically synthesized
aaatgtatcaattggaaagg

SEQ ID NO: 28124 - DNA, 20 bp, Artificial Sequence
  chemically synthesized
tcaattggaaaggaagaaaa

SEQ ID NO: 28125 - DNA, 20 bp, Artificial Sequence
  chemically synthesized
caattggaaaggaagaaaaa

SEQ ID NO: 28126 - DNA, 20 bp, Artificial Sequence
  chemically synthesized
gccttgaattgacaaattaa

SEQ ID NO: 28127 - DNA, 20 bp, Artificial Sequence
  chemically synthesized
ttgacaaattaacagaaaaa

SEQ ID NO: 28128 - DNA, 20 bp, Artificial Sequence
  chemically synthesized
aattaacagaaaaacagaac

SEQ ID NO: 28129 - DNA, 20 bp, Artificial Sequence
  chemically synthesized
aacaagtttattctatcatt

SEQ ID NO: 28130 - DNA, 20 bp, Artificial Sequence
  chemically synthesized
atcatttggttttaaaatat

SEQ ID NO: 28131 - DNA, 20 bp, Artificial Sequence
  chemically synthesized
gttttaaaatatgagtgcct

SEQ ID NO: 28132 - DNA, 20 bp, Artificial Sequence
  chemically synthesized
atctattaaaaccacatcga

SEQ ID NO: 28133 - DNA, 20 bp, Artificial Sequence
  chemically synthesized
ttctacttgttataaacttg

SEQ ID NO: 28134 - DNA, 20 bp, Artificial Sequence
  chemically synthesized
tataaacttgtagcttaatt

SEQ ID NO: 28135 - DNA, 20 bp, Artificial Sequence
  chemically synthesized
cttgtagcttaattcagcat

SEQ ID NO: 28136 - DNA, 20 bp, Artificial Sequence
  chemically synthesized
ttgtagcttaattcagcatt

SEQ ID NO: 28137 - DNA, 20 bp, Artificial Sequence
  chemically synthesized
agcttaattcagcattgggt

SEQ ID NO: 28138 - DNA, 20 bp, Artificial Sequence
  chemically synthesized
gcttaattcagcattgggtg

SEQ ID NO: 28139 - DNA, 20 bp, Artificial Sequence
  chemically synthesized
ttgggtgaggtaataaacct

SEQ ID NO: 28140 - DNA, 20 bp, Artificial Sequence
  chemically synthesized
tgggtgaggtaataaacctt

SEQ ID NO: 28141 - DNA, 20 bp, Artificial Sequence
  chemically synthesized
aggtaataaaccttaggaac

SEQ ID NO: 28142 - DNA, 20 bp, Artificial Sequence
  chemically synthesized
tattgtatttctcacaacaa

SEQ ID NO: 28143 - DNA, 20 bp, Artificial Sequence
  chemically synthesized
cacaacaatggctacctaaa

SEQ ID NO: 28144 - DNA, 20 bp, Artificial Sequence
  chemically synthesized
aaagatgacccattatgtcc

SEQ ID NO: 28145 - DNA, 20 bp, Artificial Sequence
  chemically synthesized
gttaatcatcatttttcctt

SEQ ID NO: 28146 - DNA, 20 bp, Artificial Sequence
  chemically synthesized
ataaacaaaactgattatac

SEQ ID NO: 28147 - DNA, 20 bp, Artificial Sequence
  chemically synthesized
aactgattataccagtataa

SEQ ID NO: 28148 - DNA, 20 bp, Artificial Sequence
  chemically synthesized
tataaaagctactttgctcc

SEQ ID NO: 28149 - DNA, 20 bp, Artificial Sequence
  chemically synthesized
aaagctactttgctcctggt

SEQ ID NO: 28150 - DNA, 20 bp, Artificial Sequence
  chemically synthesized
agctactttgctcctggtga

SEQ ID NO: 28151 - DNA, 20 bp, Artificial Sequence
  chemically synthesized
tgctcctggtgagagcttaa

SEQ ID NO: 28152 - DNA, 20 bp, Artificial Sequence
  chemically synthesized
tggtgagagcttaaaagaaa

SEQ ID NO: 28153 - DNA, 20 bp, Artificial Sequence
  chemically synthesized
ggtgagagcttaaaagaaat

SEQ ID NO: 28154 - DNA, 20 bp, Artificial Sequence
  chemically synthesized
gaaatgggctgttttgccca

SEQ ID NO: 28155 - DNA, 20 bp, Artificial Sequence
  chemically synthesized
attgaatgtgtaatgtgcaa

SEQ ID NO: 28156 - DNA, 20 bp, Artificial Sequence
  chemically synthesized
tgtgtaatgtgcaaaagccc

SEQ ID NO: 28157 - DNA, 20 bp, Artificial Sequence
  chemically synthesized
tggaacgcaattaaatacac

SEQ ID NO: 28158 - DNA, 20 bp, Artificial Sequence
  chemically synthesized
acgcaattaaatacactagt

SEQ ID NO: 28159 - DNA, 20 bp, Artificial Sequence
  chemically synthesized
cgcaattaaatacactagta

SEQ ID NO: 28160 - DNA, 20 bp, Artificial Sequence
  chemically synthesized
caattaaatacactagtaag

SEQ ID NO: 28161 - DNA, 20 bp, Artificial Sequence
  chemically synthesized
agtaaggagttcattttatg

SEQ ID NO: 28162 - DNA, 20 bp, Artificial Sequence
  chemically synthesized
taatgtctttttaaaaatac

SEQ ID NO: 28163 - DNA, 20 bp, Artificial Sequence
  chemically synthesized
tttaaaaatactggcaccaa

SEQ ID NO: 28164 - DNA, 20 bp, Artificial Sequence
  chemically synthesized
aatactggcaccaaaagaaa

SEQ ID NO: 28165 - DNA, 20 bp, Artificial Sequence
  chemically synthesized
ggcaccaaaagaaatagatc

SEQ ID NO: 28166 - DNA, 20 bp, Artificial Sequence
  chemically synthesized
gaaatagatccagatctact

SEQ ID NO: 28167 - DNA, 20 bp, Artificial Sequence
  chemically synthesized
tccagatctacttggttgtc

SEQ ID NO: 28168 - DNA, 20 bp, Artificial Sequence
  chemically synthesized
agatctacttggttgtcaag

SEQ ID NO: 28169 - DNA, 20 bp, Artificial Sequence
  chemically synthesized
acaatcaaatgataaacttt

SEQ ID NO: 28170 - DNA, 20 bp, Artificial Sequence
  chemically synthesized
gaccttgtataccatattga

SEQ ID NO: 28171 - DNA, 20 bp, Artificial Sequence
  chemically synthesized
accttgtataccatattgaa

SEQ ID NO: 28172 - DNA, 20 bp, Artificial Sequence
  chemically synthesized
ttgtataccatattgaaagg

SEQ ID NO: 28173 - DNA, 20 bp, Artificial Sequence
  chemically synthesized
gtataccatattgaaaggaa

SEQ ID NO: 28174 - DNA, 20 bp, Artificial Sequence
  chemically synthesized
tataccatattgaaaggaag

SEQ ID NO: 28175 - DNA, 20 bp, Artificial Sequence
  chemically synthesized
gaaaggaagaggctgacaat

SEQ ID NO: 28176 - DNA, 20 bp, Artificial Sequence
  chemically synthesized
aaaggaagaggctgacaata

SEQ ID NO: 28177 - DNA, 20 bp, Artificial Sequence
  chemically synthesized
aggctgacaataaggtttga

SEQ ID NO: 28178 - DNA, 20 bp, Artificial Sequence
  chemically synthesized
gctgacaataaggtttgaca

SEQ ID NO: 28179 - DNA, 20 bp, Artificial Sequence
  chemically synthesized
ctgacaataaggtttgacag

SEQ ID NO: 28180 - DNA, 20 bp, Artificial Sequence
  chemically synthesized
tgacaataaggtttgacaga

SEQ ID NO: 28181 - DNA, 20 bp, Artificial Sequence
  chemically synthesized
gacaataaggtttgacagag

SEQ ID NO: 28182 - DNA, 20 bp, Artificial Sequence
  chemically synthesized
taaggtttgacagaggggaa

SEQ ID NO: 28183 - DNA, 20 bp, Artificial Sequence
  chemically synthesized
ggtttgacagaggggaacag

SEQ ID NO: 28184 - DNA, 20 bp, Artificial Sequence
  chemically synthesized
aagaaaataatatgatttat

SEQ ID NO: 28185 - DNA, 20 bp, Artificial Sequence
  chemically synthesized
tatgatttattagcacaacg

SEQ ID NO: 28186 - DNA, 20 bp, Artificial Sequence
  chemically synthesized
tactatttgccatttaaaac

SEQ ID NO: 28187 - DNA, 20 bp, Artificial Sequence
  chemically synthesized
tttgccatttaaaactagaa

SEQ ID NO: 28188 - DNA, 20 bp, Artificial Sequence
  chemically synthesized
ttgccatttaaaactagaac

SEQ ID NO: 28189 - DNA, 20 bp, Artificial Sequence
  chemically synthesized
taaaactagaacaggtatat

SEQ ID NO: 28190 - DNA, 20 bp, Artificial Sequence
  chemically synthesized
atgattaactatgaattctt

SEQ ID NO: 28191 - DNA, 20 bp, Artificial Sequence
  chemically synthesized
aaatgtgacattcttaaaaa

SEQ ID NO: 28192 - DNA, 20 bp, Artificial Sequence
  chemically synthesized
tgtgacattcttaaaaaaag

SEQ ID NO: 28193 - DNA, 20 bp, Artificial Sequence
  chemically synthesized
tgacattcttaaaaaaagaa

SEQ ID NO: 28194 - DNA, 20 bp, Artificial Sequence
  chemically synthesized
attcttaaaaaaagaagaga

SEQ ID NO: 28195 - DNA, 20 bp, Artificial Sequence
  chemically synthesized
aaaagaagagaaagaatttt

SEQ ID NO: 28196 - DNA, 20 bp, Artificial Sequence
  chemically synthesized
aagaagagaaagaattttaa

SEQ ID NO: 28197 - DNA, 20 bp, Artificial Sequence
  chemically synthesized
aagagaaagaattttaagag

SEQ ID NO: 28198 - DNA, 20 bp, Artificial Sequence
  chemically synthesized
agaaagaattttaagagtag

SEQ ID NO: 28199 - DNA, 20 bp, Artificial Sequence
  chemically synthesized
tatatgtctgtgctccctaa

SEQ ID NO: 28200 - DNA, 20 bp, Artificial Sequence
  chemically synthesized
gtgtgctatttgtgttaaca

SEQ ID NO: 28201 - DNA, 20 bp, Artificial Sequence
  chemically synthesized
tgctatttgtgttaacatgg

SEQ ID NO: 28202 - DNA, 20 bp, Artificial Sequence
  chemically synthesized
ctatttgtgttaacatggaa

SEQ ID NO: 28203 - DNA, 20 bp, Artificial Sequence
  chemically synthesized
tatttgtgttaacatggaag

SEQ ID NO: 28204 - DNA, 20 bp, Artificial Sequence
  chemically synthesized
ttaattttttcttttttatt

SEQ ID NO: 28205 - DNA, 20 bp, Artificial Sequence
  chemically synthesized
ttttttcttttttattaagc

SEQ ID NO: 28206 - DNA, 20 bp, Artificial Sequence
  chemically synthesized
tattaagctagcatctgccc

SEQ ID NO: 28207 - DNA, 20 bp, Artificial Sequence
  chemically synthesized
aagctagcatctgccccagt

SEQ ID NO: 28208 - DNA, 20 bp, Artificial Sequence
  chemically synthesized
tgccccagttggtgttcaaa

SEQ ID NO: 28209 - DNA, 20 bp, Artificial Sequence
  chemically synthesized
atctgtatcttttctctaat

SEQ ID NO: 28210 - DNA, 20 bp, Artificial Sequence
  chemically synthesized
ctgtatcttttctctaatca

SEQ ID NO: 28211 - DNA, 20 bp, Artificial Sequence
  chemically synthesized
cttttctctaatcagagata

SEQ ID NO: 28212 - DNA, 20 bp, Artificial Sequence
  chemically synthesized
tttctctaatcagagataca

SEQ ID NO: 28213 - DNA, 20 bp, Artificial Sequence
  chemically synthesized
ttctctaatcagagatacag

SEQ ID NO: 28214 - DNA, 20 bp, Artificial Sequence
  chemically synthesized
taatcagagatacagaggtt

SEQ ID NO: 28215 - DNA, 20 bp, Artificial Sequence
  chemically synthesized
gagtataaaataaacctgct

SEQ ID NO: 28216 - DNA, 20 bp, Artificial Sequence
  chemically synthesized
ataaaataaacctgctcaga

SEQ ID NO: 28217 - DNA, 20 bp, Artificial Sequence
  chemically synthesized
taaaataaacctgctcagat

SEQ ID NO: 28218 - DNA, 20 bp, Artificial Sequence
  chemically synthesized
cctgctcagataggacaatt

SEQ ID NO: 28219 - DNA, 20 bp, Artificial Sequence
  chemically synthesized
agtgcactgtacaattttcc

SEQ ID NO: 28220 - DNA, 20 bp, Artificial Sequence
  chemically synthesized
tgtacaattttcccagttta

SEQ ID NO: 28221 - DNA, 20 bp, Artificial Sequence
  chemically synthesized
gtacaattttcccagtttac

SEQ ID NO: 28222 - DNA, 20 bp, Artificial Sequence
  chemically synthesized
cagtttacaggtctatactt

SEQ ID NO: 28223 - DNA, 20 bp, Artificial Sequence
  chemically synthesized
agtttacaggtctatactta

SEQ ID NO: 28224 - DNA, 20 bp, Artificial Sequence
  chemically synthesized
gtttacaggtctatacttaa

SEQ ID NO: 28225 - DNA, 20 bp, Artificial Sequence
  chemically synthesized
caggtctatacttaagggaa

SEQ ID NO: 28226 - DNA, 20 bp, Artificial Sequence
  chemically synthesized
atacttaagggaaaagttgc

SEQ ID NO: 28227 - DNA, 20 bp, Artificial Sequence
  chemically synthesized
aaattgaacacaatctcatt

SEQ ID NO: 28228 - DNA, 20 bp, Artificial Sequence
  chemically synthesized
aattgaacacaatctcattg

SEQ ID NO: 28229 - DNA, 20 bp, Artificial Sequence
  chemically synthesized
ttgaacacaatctcattgag

SEQ ID NO: 28230 - DNA, 20 bp, Artificial Sequence
  chemically synthesized
taaaaaaaaaaaaactttgc

SEQ ID NO: 28231 - DNA, 20 bp, Artificial Sequence
  chemically synthesized
cagccatttacttgactatt

SEQ ID NO: 28232 - DNA, 20 bp, Artificial Sequence
  chemically synthesized
gactattgagcttacttact

SEQ ID NO: 28233 - DNA, 20 bp, Artificial Sequence
  chemically synthesized
ttacttggacgcaacattgc

SEQ ID NO: 28234 - DNA, 20 bp, Artificial Sequence
  chemically synthesized
aacattgcaagcgctgtgaa

SEQ ID NO: 28235 - DNA, 20 bp, Artificial Sequence
  chemically synthesized
gcaagcgctgtgaatggaaa

SEQ ID NO: 28236 - DNA, 20 bp, Artificial Sequence
  chemically synthesized
gaaacagaatacacttaaca

SEQ ID NO: 28237 - DNA, 20 bp, Artificial Sequence
  chemically synthesized
aatgattgctttcgcttcta

SEQ ID NO: 28238 - DNA, 20 bp, Artificial Sequence
  chemically synthesized
tgctttcgcttctacagtgc

SEQ ID NO: 28239 - DNA, 20 bp, Artificial Sequence
  chemically synthesized
gctttcgcttctacagtgca

SEQ ID NO: 28240 - DNA, 20 bp, Artificial Sequence
  chemically synthesized
cttttttaaatataaatgtt

SEQ ID NO: 28241 - DNA, 20 bp, Artificial Sequence
  chemically synthesized
aaaaaacacttcattatgtt

SEQ ID NO: 28242 - DNA, 20 bp, Artificial Sequence
  chemically synthesized
aaaaacacttcattatgttt

SEQ ID NO: 28243 - DNA, 20 bp, Artificial Sequence
  chemically synthesized
aaaacacttcattatgttta

SEQ ID NO: 28244 - DNA, 20 bp, Artificial Sequence
  chemically synthesized
aaacacttcattatgtttag

SEQ ID NO: 28245 - DNA, 20 bp, Artificial Sequence
  chemically synthesized
aacacttcattatgtttagg

SEQ ID NO: 28246 - DNA, 20 bp, Artificial Sequence
  chemically synthesized
acacttcattatgtttaggg

SEQ ID NO: 28247 - DNA, 20 bp, Artificial Sequence
  chemically synthesized
tttaggggggaactgcattt

SEQ ID NO: 28248 - DNA, 20 bp, Artificial Sequence
  chemically synthesized
ttaggggggaactgcatttt

SEQ ID NO: 28249 - DNA, 20 bp, Artificial Sequence
  chemically synthesized
taggggggaactgcatttta

SEQ ID NO: 28250 - DNA, 20 bp, Artificial Sequence
  chemically synthesized
attttagggttccattgtct

SEQ ID NO: 28251 - DNA, 20 bp, Artificial Sequence
  chemically synthesized
ttagggttccattgtcttgg

SEQ ID NO: 28252 - DNA, 20 bp, Artificial Sequence
  chemically synthesized
cattgtcttggtggtgttac

SEQ ID NO: 28253 - DNA, 20 bp, Artificial Sequence
  chemically synthesized
acttgttatccatttaaaaa

SEQ ID NO: 28254 - DNA, 20 bp, Artificial Sequence
  chemically synthesized
tgttatccatttaaaaatgg

SEQ ID NO: 28255 - DNA, 20 bp, Artificial Sequence
  chemically synthesized
tatccatttaaaaatggtag

SEQ ID NO: 28256 - DNA, 20 bp, Artificial Sequence
  chemically synthesized
gtagtggaaattctatgcct

SEQ ID NO: 28257 - DNA, 20 bp, Artificial Sequence
  chemically synthesized
cttggatacacaccgctctt

SEQ ID NO: 28258 - DNA, 20 bp, Artificial Sequence
  chemically synthesized
ttggatacacaccgctcttc

SEQ ID NO: 28259 - DNA, 20 bp, Artificial Sequence
  chemically synthesized
taaaaaaaaaaaacatacat

SEQ ID NO: 28260 - DNA, 20 bp, Artificial Sequence
  chemically synthesized
aaaaaaaaaaaacatacatt

SEQ ID NO: 28261 - DNA, 20 bp, Artificial Sequence
  chemically synthesized
aaaaaaaaaaacatacattg

SEQ ID NO: 28262 - DNA, 20 bp, Artificial Sequence
  chemically synthesized
aaaaaaacatacattgggga

SEQ ID NO: 28263 - DNA, 20 bp, Artificial Sequence
  chemically synthesized
aaaaaacatacattggggaa

SEQ ID NO: 28264 - DNA, 20 bp, Artificial Sequence
  chemically synthesized
catacattggggaaaggttt

SEQ ID NO: 28265 - DNA, 20 bp, Artificial Sequence
  chemically synthesized
gggaaaggtttaagattata

SEQ ID NO: 28266 - DNA, 20 bp, Artificial Sequence
  chemically synthesized
gattatatagtacttaaata

SEQ ID NO: 28267 - DNA, 20 bp, Artificial Sequence
  chemically synthesized
attatatagtacttaaatat

SEQ ID NO: 28268 - DNA, 20 bp, Artificial Sequence
  chemically synthesized
cctatgctaaaatacattta

SEQ ID NO: 28269 - DNA, 20 bp, Artificial Sequence
  chemically synthesized
tggtcttttttctgtatttc

SEQ ID NO: 28270 - DNA, 20 bp, Artificial Sequence
  chemically synthesized
ttttttctgtatttctagaa

SEQ ID NO: 28271 - DNA, 20 bp, Artificial Sequence
  chemically synthesized
atttgaattaaatgttcatc

SEQ ID NO: 28272 - DNA, 20 bp, Artificial Sequence
  chemically synthesized
attaaatgttcatctagtgt

SEQ ID NO: 28273 - DNA, 20 bp, Artificial Sequence
  chemically synthesized
ttaaatgttcatctagtgtt

SEQ ID NO: 28274 - DNA, 20 bp, Artificial Sequence
  chemically synthesized
tcatctagtgttaggcacta

SEQ ID NO: 28275 - DNA, 20 bp, Artificial Sequence
  chemically synthesized
gcactatagtatttatattg

SEQ ID NO: 28276 - DNA, 20 bp, Artificial Sequence
  chemically synthesized
actgttgcttgttctcttaa

SEQ ID NO: 28277 - DNA, 20 bp, Artificial Sequence
  chemically synthesized
ctgttgcttgttctcttaaa

SEQ ID NO: 28278 - DNA, 20 bp, Artificial Sequence
  chemically synthesized
aggtatcaatgtaccttttt

SEQ ID NO: 28279 - DNA, 20 bp, Artificial Sequence
  chemically synthesized
tatcaatgtaccttttttgg

SEQ ID NO: 28280 - DNA, 20 bp, Artificial Sequence
  chemically synthesized
caatgtaccttttttggtag

SEQ ID NO: 28281 - DNA, 20 bp, Artificial Sequence
  chemically synthesized
ttttggtagtggaaaaaaaa

SEQ ID NO: 28282 - DNA, 20 bp, Artificial Sequence
  chemically synthesized
ggtagtggaaaaaaaaaaga

SEQ ID NO: 28283 - DNA, 20 bp, Artificial Sequence
  chemically synthesized
gtagtggaaaaaaaaaagac

SEQ ID NO: 28284 - DNA, 20 bp, Artificial Sequence
  chemically synthesized
aaaaaaaagacaggctgcca

SEQ ID NO: 28285 - DNA, 20 bp, Artificial Sequence
  chemically synthesized
cacagtatatttttttaatt

SEQ ID NO: 28286 - DNA, 20 bp, Artificial Sequence
  chemically synthesized
agtatatttttttaatttgg

SEQ ID NO: 28287 - DNA, 20 bp, Artificial Sequence
  chemically synthesized
gtatatttttttaatttggc

SEQ ID NO: 28288 - DNA, 20 bp, Artificial Sequence
  chemically synthesized
tttaatttggcaggataata

SEQ ID NO: 28289 - DNA, 20 bp, Artificial Sequence
  chemically synthesized
tatgcttcaaaaaaaaaaaa

SEQ ID NO: 28290 - DNA, 20 bp, Artificial Sequence
  chemically synthesized
tgcttcaaaaaaaaaaaaaa

SEQ ID NO: 28291 - DNA, 20 bp, Artificial Sequence
  chemically synthesized
cttcaaaaaaaaaaaaaaga

SEQ ID NO: 28292 - DNA, 20 bp, Artificial Sequence
  chemically synthesized
aaaaaaagagagaaacaaaa

SEQ ID NO: 28293 - DNA, 20 bp, Artificial Sequence
  chemically synthesized
aacaaaaaagtgtgacatta

SEQ ID NO: 28294 - DNA, 20 bp, Artificial Sequence
  chemically synthesized
aaaagtgtgacattacagat

SEQ ID NO: 28295 - DNA, 20 bp, Artificial Sequence
  chemically synthesized
agtgtgacattacagatgag

SEQ ID NO: 28296 - DNA, 20 bp, Artificial Sequence
  chemically synthesized
acagatgagaagccatataa

SEQ ID NO: 28297 - DNA, 20 bp, Artificial Sequence
  chemically synthesized
gatgagaagccatataatgg

SEQ ID NO: 28298 - DNA, 20 bp, Artificial Sequence
  chemically synthesized
gaagccatataatggcggtt

SEQ ID NO: 28299 - DNA, 20 bp, Artificial Sequence
  chemically synthesized
aagccatataatggcggttt

SEQ ID NO: 28300 - DNA, 20 bp, Artificial Sequence
  chemically synthesized
agccatataatggcggtttg

SEQ ID NO: 28301 - DNA, 20 bp, Artificial Sequence
  chemically synthesized
gccatataatggcggtttgg

SEQ ID NO: 28302 - DNA, 20 bp, Artificial Sequence
  chemically synthesized
catataatggcggtttgggg

SEQ ID NO: 28303 - DNA, 20 bp, Artificial Sequence
  chemically synthesized
ggcggtttgggggagcctgc

SEQ ID NO: 28304 - DNA, 20 bp, Artificial Sequence
  chemically synthesized
gagcctgctagaatgtcaca

SEQ ID NO: 28305 - DNA, 20 bp, Artificial Sequence
  chemically synthesized
ctgctagaatgtcacatgga

SEQ ID NO: 28306 - DNA, 20 bp, Artificial Sequence
  chemically synthesized
tgtcacatggatggctgtca

SEQ ID NO: 28307 - DNA, 20 bp, Artificial Sequence
  chemically synthesized
gtcacatggatggctgtcat

SEQ ID NO: 28308 - DNA, 20 bp, Artificial Sequence
  chemically synthesized
tcacatggatggctgtcata

SEQ ID NO: 28309 - DNA, 20 bp, Artificial Sequence
  chemically synthesized
cacatggatggctgtcatag

SEQ ID NO: 28310 - DNA, 20 bp, Artificial Sequence
  chemically synthesized
tcctgctgccatactgtatg

SEQ ID NO: 28311 - DNA, 20 bp, Artificial Sequence
  chemically synthesized
catactgtatgcagtactgc

SEQ ID NO: 28312 - DNA, 20 bp, Artificial Sequence
  chemically synthesized
gtactgcaagctaataacgt

SEQ ID NO: 28313 - DNA, 20 bp, Artificial Sequence
  chemically synthesized
aataacgttggtttgttatg

SEQ ID NO: 28314 - DNA, 20 bp, Artificial Sequence
  chemically synthesized
ccttctatcaccctacattc

SEQ ID NO: 28315 - DNA, 20 bp, Artificial Sequence
  chemically synthesized
cagcatcttaccttcatatg

SEQ ID NO: 28316 - DNA, 20 bp, Artificial Sequence
  chemically synthesized
cttaccttcatatgcagtaa

SEQ ID NO: 28317 - DNA, 20 bp, Artificial Sequence
  chemically synthesized
ccttcatatgcagtaaaaga

SEQ ID NO: 28318 - DNA, 20 bp, Artificial Sequence
  chemically synthesized
catatgcagtaaaagaaaga

SEQ ID NO: 28319 - DNA, 20 bp, Artificial Sequence
  chemically synthesized
aaaagaaagaaagaaaaaaa

SEQ ID NO: 28320 - DNA, 20 bp, Artificial Sequence
  chemically synthesized
aaagaaagaaagaaaaaaaa

SEQ ID NO: 28321 - DNA, 20 bp, Artificial Sequence
  chemically synthesized
aaaaaaaaaccaatgttttg

SEQ ID NO: 28322 - DNA, 20 bp, Artificial Sequence
  chemically synthesized
tttcattgccaaaaactaaa

SEQ ID NO: 28323 - DNA, 20 bp, Artificial Sequence
  chemically synthesized
actaaatggtgctttatatt

SEQ ID NO: 28324 - DNA, 20 bp, Artificial Sequence
  chemically synthesized
atggtgctttatatttagat

SEQ ID NO: 28325 - DNA, 20 bp, Artificial Sequence
  chemically synthesized
tgctttatatttagattgga

SEQ ID NO: 28326 - DNA, 20 bp, Artificial Sequence
  chemically synthesized
tggaaagaatttcatatgca

SEQ ID NO: 28327 - DNA, 20 bp, Artificial Sequence
  chemically synthesized
ttcatatgcaaagcatatta

SEQ ID NO: 28328 - DNA, 20 bp, Artificial Sequence
  chemically synthesized
catatgcaaagcatattaaa

SEQ ID NO: 28329 - DNA, 20 bp, Artificial Sequence
  chemically synthesized
tgcaaagcatattaaagaga

SEQ ID NO: 28330 - DNA, 20 bp, Artificial Sequence
  chemically synthesized
attaaagagaaagcccgctt

SEQ ID NO: 28331 - DNA, 20 bp, Artificial Sequence
  chemically synthesized
agtcaatacttttttgtaaa

SEQ ID NO: 28332 - DNA, 20 bp, Artificial Sequence
  chemically synthesized
cttttttgtaaatggcaatg

SEQ ID NO: 28333 - DNA, 20 bp, Artificial Sequence
  chemically synthesized
aatgcagaatattttgttat

SEQ ID NO: 28334 - DNA, 20 bp, Artificial Sequence
  chemically synthesized
cttttctattcctgtaatga

SEQ ID NO: 28335 - DNA, 20 bp, Artificial Sequence
  chemically synthesized
tgaaattttatcttttacta

SEQ ID NO: 28336 - DNA, 20 bp, Artificial Sequence
  chemically synthesized
gaaattttatcttttactat

SEQ ID NO: 28337 - DNA, 20 bp, Artificial Sequence
  chemically synthesized
aattttatcttttactatgg

SEQ ID NO: 28338 - DNA, 20 bp, Artificial Sequence
  chemically synthesized
cttatgtgccctgttcaaaa

SEQ ID NO: 28339 - DNA, 20 bp, Artificial Sequence
  chemically synthesized
tatgtgccctgttcaaaaca

SEQ ID NO: 28340 - DNA, 20 bp, Artificial Sequence
  chemically synthesized
atgtgccctgttcaaaacag

SEQ ID NO: 28341 - DNA, 20 bp, Artificial Sequence
  chemically synthesized
tttttatttttttttttatt

SEQ ID NO: 28342 - DNA, 20 bp, Artificial Sequence
  chemically synthesized
tttttttatttagatgacca

SEQ ID NO: 28343 - DNA, 20 bp, Artificial Sequence
  chemically synthesized
ttttttatttagatgaccaa

SEQ ID NO: 28344 - DNA, 20 bp, Artificial Sequence
  chemically synthesized
gaccaaaggtcattacaacc

SEQ ID NO: 28345 - DNA, 20 bp, Artificial Sequence
  chemically synthesized
ctttttattgtatttgtttc

SEQ ID NO: 28346 - DNA, 20 bp, Artificial Sequence
  chemically synthesized
atttgtttctggtctttgtt

SEQ ID NO: 28347 - DNA, 20 bp, Artificial Sequence
  chemically synthesized
tggtctttgttaagttctat

SEQ ID NO: 28348 - DNA, 20 bp, Artificial Sequence
  chemically synthesized
aaccactgtctgtgtttttt

SEQ ID NO: 28349 - DNA, 20 bp, Artificial Sequence
  chemically synthesized
cactgtctgtgtttttttgg

SEQ ID NO: 28350 - DNA, 20 bp, Artificial Sequence
  chemically synthesized
tgaaaaaataaaaaaaatta

SEQ ID NO: 28351 - DNA, 20 bp, Artificial Sequence
  chemically synthesized
aaaattaaagtacacattgt

SEQ ID NO: 28352 - DNA, 20 bp, Artificial Sequence
  chemically synthesized
acactctgtaaattacttgc

SEQ ID NO: 28353 - DNA, 20 bp, Artificial Sequence
  chemically synthesized
aattacttgcaagaaaataa

SEQ ID NO: 28354 - DNA, 20 bp, Artificial Sequence
  chemically synthesized
attacttgcaagaaaataac

SEQ ID NO: 28355 - DNA, 20 bp, Artificial Sequence
  chemically synthesized
gcaagaaaataacaggtttt

SEQ ID NO: 28356 - DNA, 20 bp, Artificial Sequence
  chemically synthesized
aagaaaataacaggttttaa

SEQ ID NO: 28357 - DNA, 20 bp, Artificial Sequence
  chemically synthesized
aaaataacaggttttaagag

SEQ ID NO: 28358 - DNA, 20 bp, Artificial Sequence
  chemically synthesized
aaataacaggttttaagaga

SEQ ID NO: 28359 - DNA, 20 bp, Artificial Sequence
  chemically synthesized
aacaggttttaagagaaggc

SEQ ID NO: 28360 - DNA, 20 bp, Artificial Sequence
  chemically synthesized
ggttttaagagaaggccagt

SEQ ID NO: 28361 - DNA, 20 bp, Artificial Sequence
  chemically synthesized
gaaggccagtcagtcttttt

SEQ ID NO: 28362 - DNA, 20 bp, Artificial Sequence
  chemically synthesized
aaggccagtcagtctttttc

SEQ ID NO: 28363 - DNA, 20 bp, Artificial Sequence
  chemically synthesized
ctttttcaggattatttcta

SEQ ID NO: 28364 - DNA, 20 bp, Artificial Sequence
  chemically synthesized
tttttcaggattatttctat

SEQ ID NO: 28365 - DNA, 20 bp, Artificial Sequence
  chemically synthesized
gatgcgtgtattatacccta

SEQ ID NO: 28366 - DNA, 20 bp, Artificial Sequence
  chemically synthesized
atgcgtgtattataccctaa

SEQ ID NO: 28367 - DNA, 20 bp, Artificial Sequence
  chemically synthesized
ttataccctaaaggaacata

SEQ ID NO: 28368 - DNA, 20 bp, Artificial Sequence
  chemically synthesized
aagtacttactatattaaaa

SEQ ID NO: 28369 - DNA, 20 bp, Artificial Sequence
  chemically synthesized
aatagacatatctcaaaccc

SEQ ID NO: 28370 - DNA, 20 bp, Artificial Sequence
  chemically synthesized
catatctcaaaccctggaca

SEQ ID NO: 28371 - DNA, 20 bp, Artificial Sequence
  chemically synthesized
caaaccctggacatagtttt

SEQ ID NO: 28372 - DNA, 20 bp, Artificial Sequence
  chemically synthesized
aaaccctggacatagtttta

SEQ ID NO: 28373 - DNA, 20 bp, Artificial Sequence
  chemically synthesized
gacatagttttaaggctttc

SEQ ID NO: 28374 - DNA, 20 bp, Artificial Sequence
  chemically synthesized
agttttaaggctttccagtt

SEQ ID NO: 28375 - DNA, 20 bp, Artificial Sequence
  chemically synthesized
taaggctttccagtttagaa

SEQ ID NO: 28376 - DNA, 20 bp, Artificial Sequence
  chemically synthesized
tccagtttagaatagttttc

SEQ ID NO: 28377 - DNA, 20 bp, Artificial Sequence
  chemically synthesized
ttagaatagttttcaagaaa

SEQ ID NO: 28378 - DNA, 20 bp, Artificial Sequence
  chemically synthesized
gaatagttttcaagaaatgg

SEQ ID NO: 28379 - DNA, 20 bp, Artificial Sequence
  chemically synthesized
aatagttttcaagaaatgga

SEQ ID NO: 28380 - DNA, 20 bp, Artificial Sequence
  chemically synthesized
caagaaatggaaggtgtttt

SEQ ID NO: 28381 - DNA, 20 bp, Artificial Sequence
  chemically synthesized
taaaaacttactccatctct

SEQ ID NO: 28382 - DNA, 20 bp, Artificial Sequence
  chemically synthesized
aaacttactccatctcttag

SEQ ID NO: 28383 - DNA, 20 bp, Artificial Sequence
  chemically synthesized
gcagaaatccattcaaacat

SEQ ID NO: 28384 - DNA, 20 bp, Artificial Sequence
  chemically synthesized
acataagtgaaaaaacttgc

SEQ ID NO: 28385 - DNA, 20 bp, Artificial Sequence
  chemically synthesized
gtgaaaaaacttgctggtaa

SEQ ID NO: 28386 - DNA, 20 bp, Artificial Sequence
  chemically synthesized
ttgctgttcttgttgtctaa

SEQ ID NO: 28387 - DNA, 20 bp, Artificial Sequence
  chemically synthesized
ctcccatccttgctttatct

SEQ ID NO: 28388 - DNA, 20 bp, Artificial Sequence
  chemically synthesized
tcttagaacataatgtaaaa

SEQ ID NO: 28389 - DNA, 20 bp, Artificial Sequence
  chemically synthesized
aagatttttttaaaaaaaat

SEQ ID NO: 28390 - DNA, 20 bp, Artificial Sequence
  chemically synthesized
tttaaaaaaaatcagctctt

SEQ ID NO: 28391 - DNA, 20 bp, Artificial Sequence
  chemically synthesized
cagctctttggtttccatgt

SEQ ID NO: 28392 - DNA, 20 bp, Artificial Sequence
  chemically synthesized
gctctttggtttccatgtaa

SEQ ID NO: 28393 - DNA, 20 bp, Artificial Sequence
  chemically synthesized
acttttgaaatctaaaaatc

SEQ ID NO: 28394 - DNA, 20 bp, Artificial Sequence
  chemically synthesized
aatctaaaaatctggaaaca

SEQ ID NO: 28395 - DNA, 20 bp, Artificial Sequence
  chemically synthesized
atctaaaaatctggaaacaa

SEQ ID NO: 28396 - DNA, 20 bp, Artificial Sequence
  chemically synthesized
aaatctggaaacaaaggcat

SEQ ID NO: 28397 - DNA, 20 bp, Artificial Sequence
  chemically synthesized
aatctggaaacaaaggcatc

SEQ ID NO: 28398 - DNA, 20 bp, Artificial Sequence
  chemically synthesized
ttgttttgttttgtttaaaa

SEQ ID NO: 28399 - DNA, 20 bp, Artificial Sequence
  chemically synthesized
gttttgttttgtttaaaaaa

SEQ ID NO: 28400 - DNA, 20 bp, Artificial Sequence
  chemically synthesized
ttttgttttgtttaaaaaag

SEQ ID NO: 28401 - DNA, 20 bp, Artificial Sequence
  chemically synthesized
tttgttttgtttaaaaaaga

SEQ ID NO: 28402 - DNA, 20 bp, Artificial Sequence
  chemically synthesized
tgttttgtttaaaaaagagg

SEQ ID NO: 28403 - DNA, 20 bp, Artificial Sequence
  chemically synthesized
ttaaaaaagagggagaaaaa

SEQ ID NO: 28404 - DNA, 20 bp, Artificial Sequence
  chemically synthesized
aaaaaagagggagaaaaaaa

SEQ ID NO: 28405 - DNA, 20 bp, Artificial Sequence
  chemically synthesized
aaaagagggagaaaaaaaga

SEQ ID NO: 28406 - DNA, 20 bp, Artificial Sequence
  chemically synthesized
aagagggagaaaaaaagaga

SEQ ID NO: 28407 - DNA, 20 bp, Artificial Sequence
  chemically synthesized
agaaaaaaagagagagacga

SEQ ID NO: 28408 - DNA, 20 bp, Artificial Sequence
  chemically synthesized
aaaagagagagacgaaagaa

SEQ ID NO: 28409 - DNA, 20 bp, Artificial Sequence
  chemically synthesized
gagagagacgaaagaaaaga

SEQ ID NO: 28410 - DNA, 20 bp, Artificial Sequence
  chemically synthesized
agagacgaaagaaaagaaag

SEQ ID NO: 28411 - DNA, 20 bp, Artificial Sequence
  chemically synthesized
aaagaaaagaaagcagccac

SEQ ID NO: 28412 - DNA, 20 bp, Artificial Sequence
  chemically synthesized
aagaaaagaaagcagccact

SEQ ID NO: 28413 - DNA, 20 bp, Artificial Sequence
  chemically synthesized
agaaaagaaagcagccacta

SEQ ID NO: 28414 - DNA, 20 bp, Artificial Sequence
  chemically synthesized
gaaaagaaagcagccactag

SEQ ID NO: 28415 - DNA, 20 bp, Artificial Sequence
  chemically synthesized
gaaagcagccactaggggtg

SEQ ID NO: 28416 - DNA, 20 bp, Artificial Sequence
  chemically synthesized
gcagccactaggggtgtagc

SEQ ID NO: 28417 - DNA, 20 bp, Artificial Sequence
  chemically synthesized
actaggggtgtagccagaca

SEQ ID NO: 28418 - DNA, 20 bp, Artificial Sequence
  chemically synthesized
gccagacatagtgaaatctt

SEQ ID NO: 28419 - DNA, 20 bp, Artificial Sequence
  chemically synthesized
catagtgaaatctttggaat

SEQ ID NO: 28420 - DNA, 20 bp, Artificial Sequence
  chemically synthesized
gaatcagccactgatttcct

SEQ ID NO: 28421 - DNA, 20 bp, Artificial Sequence
  chemically synthesized
cactgatttcctgagatgca

SEQ ID NO: 28422 - DNA, 20 bp, Artificial Sequence
  chemically synthesized
tgatttcctgagatgcatag

SEQ ID NO: 28423 - DNA, 20 bp, Artificial Sequence
  chemically synthesized
atgcatagtggtttgccttg

SEQ ID NO: 28424 - DNA, 20 bp, Artificial Sequence
  chemically synthesized
gtggtttgccttgtggttct

SEQ ID NO: 28425 - DNA, 20 bp, Artificial Sequence
  chemically synthesized
gccttgtggttctgagatcc

SEQ ID NO: 28426 - DNA, 20 bp, Artificial Sequence
  chemically synthesized
ccttgtggttctgagatccc

SEQ ID NO: 28427 - DNA, 20 bp, Artificial Sequence
  chemically synthesized
ttctgagatcccaggaaccc

SEQ ID NO: 28428 - DNA, 20 bp, Artificial Sequence
  chemically synthesized
cccaggaaccctagatgcta

SEQ ID NO: 28429 - DNA, 20 bp, Artificial Sequence
  chemically synthesized
ctagatgctacagattactt

SEQ ID NO: 28430 - DNA, 20 bp, Artificial Sequence
  chemically synthesized
tagatgctacagattacttt

SEQ ID NO: 28431 - DNA, 20 bp, Artificial Sequence
  chemically synthesized
gattactttaggtgttttga

SEQ ID NO: 28432 - DNA, 20 bp, Artificial Sequence
  chemically synthesized
attactttaggtgttttgat

SEQ ID NO: 28433 - DNA, 20 bp, Artificial Sequence
  chemically synthesized
ttactttaggtgttttgata

SEQ ID NO: 28434 - DNA, 20 bp, Artificial Sequence
  chemically synthesized
gtgttttgatagggtcttcc

SEQ ID NO: 28435 - DNA, 20 bp, Artificial Sequence
  chemically synthesized
gatagggtcttcctggatga

SEQ ID NO: 28436 - DNA, 20 bp, Artificial Sequence
  chemically synthesized
cttcctggatgacagcaaat

SEQ ID NO: 28437 - DNA, 20 bp, Artificial Sequence
  chemically synthesized
ttcctggatgacagcaaata

SEQ ID NO: 28438 - DNA, 20 bp, Artificial Sequence
  chemically synthesized
tcctggatgacagcaaataa

SEQ ID NO: 28439 - DNA, 20 bp, Artificial Sequence
  chemically synthesized
tggatgacagcaaataaggg

SEQ ID NO: 28440 - DNA, 20 bp, Artificial Sequence
  chemically synthesized
ggatgacagcaaataagggc

SEQ ID NO: 28441 - DNA, 20 bp, Artificial Sequence
  chemically synthesized
cccttcaattatcttctgac

SEQ ID NO: 28442 - DNA, 20 bp, Artificial Sequence
  chemically synthesized
tcaattatcttctgaccagc

SEQ ID NO: 28443 - DNA, 20 bp, Artificial Sequence
  chemically synthesized
ttatcttctgaccagccagt

SEQ ID NO: 28444 - DNA, 20 bp, Artificial Sequence
  chemically synthesized
tatcttctgaccagccagtt

SEQ ID NO: 28445 - DNA, 20 bp, Artificial Sequence
  chemically synthesized
aggtctattttaaaaatcct

SEQ ID NO: 28446 - DNA, 20 bp, Artificial Sequence
  chemically synthesized
tttacaaatactgcatgttg

SEQ ID NO: 28447 - DNA, 20 bp, Artificial Sequence
  chemically synthesized
tgatatcgtgtccctgttcc

SEQ ID NO: 28448 - DNA, 20 bp, Artificial Sequence
  chemically synthesized
tcgtgtccctgttcccagtg

SEQ ID NO: 28449 - DNA, 20 bp, Artificial Sequence
  chemically synthesized
tttgtaaaaaaccaaaacaa

SEQ ID NO: 28450 - DNA, 20 bp, Artificial Sequence
  chemically synthesized
gccgttctgttgtcttcttg

SEQ ID NO: 28451 - DNA, 20 bp, Artificial Sequence
  chemically synthesized
gttctgttgtcttcttgtgg

SEQ ID NO: 28452 - DNA, 20 bp, Artificial Sequence
  chemically synthesized
tggtagcattttttgtcgct

SEQ ID NO: 28453 - DNA, 20 bp, Artificial Sequence
  chemically synthesized
gtcgctcagttcttatgccc

SEQ ID NO: 28454 - DNA, 20 bp, Artificial Sequence
  chemically synthesized
tcttatgccctagtgcctgt

SEQ ID NO: 28455 - DNA, 20 bp, Artificial Sequence
  chemically synthesized
cttatgccctagtgcctgtg

SEQ ID NO: 28456 - DNA, 20 bp, Artificial Sequence
  chemically synthesized
atgccctagtgcctgtgagg

SEQ ID NO: 28457 - DNA, 20 bp, Artificial Sequence
  chemically synthesized
tcatgtcatgccttttatct

SEQ ID NO: 28458 - DNA, 20 bp, Artificial Sequence
  chemically synthesized
catgtcatgccttttatctg

SEQ ID NO: 28459 - DNA, 20 bp, Artificial Sequence
  chemically synthesized
tcatgccttttatctgaggc

SEQ ID NO: 28460 - DNA, 20 bp, Artificial Sequence
  chemically synthesized
ccttttatctgaggcaagaa

SEQ ID NO: 28461 - DNA, 20 bp, Artificial Sequence
  chemically synthesized
agaatagttttatctttcta

SEQ ID NO: 28462 - DNA, 20 bp, Artificial Sequence
  chemically synthesized
ttttatctttctaaagtata

SEQ ID NO: 28463 - DNA, 20 bp, Artificial Sequence
  chemically synthesized
atctttctaaagtataaaga

SEQ ID NO: 28464 - DNA, 20 bp, Artificial Sequence
  chemically synthesized
gaaagtcaatgttttctgaa

SEQ ID NO: 28465 - DNA, 20 bp, Artificial Sequence
  chemically synthesized
gtcaatgttttctgaaaagc

SEQ ID NO: 28466 - DNA, 20 bp, Artificial Sequence
  chemically synthesized
tgttttctgaaaagccagtt

SEQ ID NO: 28467 - DNA, 20 bp, Artificial Sequence
  chemically synthesized
gttttctgaaaagccagttt

SEQ ID NO: 28468 - DNA, 20 bp, Artificial Sequence
  chemically synthesized
ttctgaaaagccagtttggg

SEQ ID NO: 28469 - DNA, 20 bp, Artificial Sequence
  chemically synthesized
tctgaaaagccagtttgggt

SEQ ID NO: 28470 - DNA, 20 bp, Artificial Sequence
  chemically synthesized
gaaaagccagtttgggtggg

SEQ ID NO: 28471 - DNA, 20 bp, Artificial Sequence
  chemically synthesized
aaaagccagtttgggtggga

SEQ ID NO: 28472 - DNA, 20 bp, Artificial Sequence
  chemically synthesized
aagccagtttgggtgggaag

SEQ ID NO: 28473 - DNA, 20 bp, Artificial Sequence
  chemically synthesized
gccagtttgggtgggaagga

SEQ ID NO: 28474 - DNA, 20 bp, Artificial Sequence
  chemically synthesized
cagtttgggtgggaaggaga

SEQ ID NO: 28475 - DNA, 20 bp, Artificial Sequence
  chemically synthesized
tttgggtgggaaggagagag

SEQ ID NO: 28476 - DNA, 20 bp, Artificial Sequence
  chemically synthesized
ttgggtgggaaggagagagt

SEQ ID NO: 28477 - DNA, 20 bp, Artificial Sequence
  chemically synthesized
tgggtgggaaggagagagtg

SEQ ID NO: 28478 - DNA, 20 bp, Artificial Sequence
  chemically synthesized
tgggaaggagagagtggggc

SEQ ID NO: 28479 - DNA, 20 bp, Artificial Sequence
  chemically synthesized
ggaaggagagagtggggcta

SEQ ID NO: 28480 - DNA, 20 bp, Artificial Sequence
  chemically synthesized
gaaggagagagtggggctag

SEQ ID NO: 28481 - DNA, 20 bp, Artificial Sequence
  chemically synthesized
tggggctagaggaatccact

SEQ ID NO: 28482 - DNA, 20 bp, Artificial Sequence
  chemically synthesized
gctagaggaatccactgaga

SEQ ID NO: 28483 - DNA, 20 bp, Artificial Sequence
  chemically synthesized
ctagaggaatccactgagaa

SEQ ID NO: 28484 - DNA, 20 bp, Artificial Sequence
  chemically synthesized
aatccactgagaaaggatgt

SEQ ID NO: 28485 - DNA, 20 bp, Artificial Sequence
  chemically synthesized
tccactgagaaaggatgttg

SEQ ID NO: 28486 - DNA, 20 bp, Artificial Sequence
  chemically synthesized
ggatgttggagaatattaca

SEQ ID NO: 28487 - DNA, 20 bp, Artificial Sequence
  chemically synthesized
gatgttggagaatattacat

SEQ ID NO: 28488 - DNA, 20 bp, Artificial Sequence
  chemically synthesized
tgttggagaatattacatag

SEQ ID NO: 28489 - DNA, 20 bp, Artificial Sequence
  chemically synthesized
gttggagaatattacatagg

SEQ ID NO: 28490 - DNA, 20 bp, Artificial Sequence
  chemically synthesized
ggagaatattacataggagg

SEQ ID NO: 28491 - DNA, 20 bp, Artificial Sequence
  chemically synthesized
gagaatattacataggaggt

SEQ ID NO: 28492 - DNA, 20 bp, Artificial Sequence
  chemically synthesized
agaatattacataggaggtg

SEQ ID NO: 28493 - DNA, 20 bp, Artificial Sequence
  chemically synthesized
atattacataggaggtgggg

SEQ ID NO: 28494 - DNA, 20 bp, Artificial Sequence
  chemically synthesized
tattacataggaggtggggt

SEQ ID NO: 28495 - DNA, 20 bp, Artificial Sequence
  chemically synthesized
attacataggaggtggggtg

SEQ ID NO: 28496 - DNA, 20 bp, Artificial Sequence
  chemically synthesized
acataggaggtggggtgggg

SEQ ID NO: 28497 - DNA, 20 bp, Artificial Sequence
  chemically synthesized
cataggaggtggggtggggt

SEQ ID NO: 28498 - DNA, 20 bp, Artificial Sequence
  chemically synthesized
ggtggggtggggtgggcgtg

SEQ ID NO: 28499 - DNA, 20 bp, Artificial Sequence
  chemically synthesized
gggtgggcgtgcggtacctt

SEQ ID NO: 28500 - DNA, 20 bp, Artificial Sequence
  chemically synthesized
ttgatgtttgtcactgaact

SEQ ID NO: 28501 - DNA, 20 bp, Artificial Sequence
  chemically synthesized
gtttgtcactgaacttagaa

SEQ ID NO: 28502 - DNA, 20 bp, Artificial Sequence
  chemically synthesized
aagatatactgtatgtgttt

SEQ ID NO: 28503 - DNA, 20 bp, Artificial Sequence
  chemically synthesized
atactgtatgtgttttggat

SEQ ID NO: 28504 - DNA, 20 bp, Artificial Sequence
  chemically synthesized
tactgtatgtgttttggatt

SEQ ID NO: 28505 - DNA, 20 bp, Artificial Sequence
  chemically synthesized
ctgaatccaaaatgctgctc

SEQ ID NO: 28506 - DNA, 20 bp, Artificial Sequence
  chemically synthesized
atccaaaatgctgctcaaga

SEQ ID NO: 28507 - DNA, 20 bp, Artificial Sequence
  chemically synthesized
aaaatgctgctcaagacaga

SEQ ID NO: 28508 - DNA, 20 bp, Artificial Sequence
  chemically synthesized
gacagatagaaataattccc

SEQ ID NO: 28509 - DNA, 20 bp, Artificial Sequence
  chemically synthesized
ataattccccagtgccatgc

SEQ ID NO: 28510 - DNA, 20 bp, Artificial Sequence
  chemically synthesized
ccccagtgccatgccagctt

SEQ ID NO: 28511 - DNA, 20 bp, Artificial Sequence
  chemically synthesized
tgccatgccagctttagatg

SEQ ID NO: 28512 - DNA, 20 bp, Artificial Sequence
  chemically synthesized
tgtccctattactcttttat

SEQ ID NO: 28513 - DNA, 20 bp, Artificial Sequence
  chemically synthesized
gtccctattactcttttatt

SEQ ID NO: 28514 - DNA, 20 bp, Artificial Sequence
  chemically synthesized
ccctattactcttttattag

SEQ ID NO: 28515 - DNA, 20 bp, Artificial Sequence
  chemically synthesized
actcttttattaggagctat

SEQ ID NO: 28516 - DNA, 20 bp, Artificial Sequence
  chemically synthesized
gagctatgagtgcaactgtg

SEQ ID NO: 28517 - DNA, 20 bp, Artificial Sequence
  chemically synthesized
agctatgagtgcaactgtgt

SEQ ID NO: 28518 - DNA, 20 bp, Artificial Sequence
  chemically synthesized
aactgtgtaggttttatata

SEQ ID NO: 28519 - DNA, 20 bp, Artificial Sequence
  chemically synthesized
cagtattcattttaatttct

SEQ ID NO: 28520 - DNA, 20 bp, Artificial Sequence
  chemically synthesized
ttctcagtatatgctgctct

SEQ ID NO: 28521 - DNA, 20 bp, Artificial Sequence
  chemically synthesized
tatgctgctcttagcgtaat

SEQ ID NO: 28522 - DNA, 20 bp, Artificial Sequence
  chemically synthesized
atgctgctcttagcgtaatt

SEQ ID NO: 28523 - DNA, 20 bp, Artificial Sequence
  chemically synthesized
aattaggttttgcatcctga

SEQ ID NO: 28524 - DNA, 20 bp, Artificial Sequence
  chemically synthesized
aggttttgcatcctgacaga

SEQ ID NO: 28525 - DNA, 20 bp, Artificial Sequence
  chemically synthesized
atcctgacagacagaattaa

SEQ ID NO: 28526 - DNA, 20 bp, Artificial Sequence
  chemically synthesized
ctgacagacagaattaatgg

SEQ ID NO: 28527 - DNA, 20 bp, Artificial Sequence
  chemically synthesized
ttcaaatttcttaaatcaaa

SEQ ID NO: 28528 - DNA, 20 bp, Artificial Sequence
  chemically synthesized
tcaaatttcttaaatcaaat

SEQ ID NO: 28529 - DNA, 20 bp, Artificial Sequence
  chemically synthesized
caaatttcttaaatcaaatg

SEQ ID NO: 28530 - DNA, 20 bp, Artificial Sequence
  chemically synthesized
ttcttaaatcaaatggggaa

SEQ ID NO: 28531 - DNA, 20 bp, Artificial Sequence
  chemically synthesized
tcttaaatcaaatggggaat

SEQ ID NO: 28532 - DNA, 20 bp, Artificial Sequence
  chemically synthesized
cttaaatcaaatggggaatg

SEQ ID NO: 28533 - DNA, 20 bp, Artificial Sequence
  chemically synthesized
taaatcaaatggggaatggg

SEQ ID NO: 28534 - DNA, 20 bp, Artificial Sequence
  chemically synthesized
aaatcaaatggggaatgggg

SEQ ID NO: 28535 - DNA, 20 bp, Artificial Sequence
  chemically synthesized
atcaaatggggaatggggag

SEQ ID NO: 28536 - DNA, 20 bp, Artificial Sequence
  chemically synthesized
tggggaggagtgcaaacatc

SEQ ID NO: 28537 - DNA, 20 bp, Artificial Sequence
  chemically synthesized
aaacatctggtgataaatca

SEQ ID NO: 28538 - DNA, 20 bp, Artificial Sequence
  chemically synthesized
cagattatgtttgatttaca

SEQ ID NO: 28539 - DNA, 20 bp, Artificial Sequence
  chemically synthesized
gtttgatttacatggtccca

SEQ ID NO: 28540 - DNA, 20 bp, Artificial Sequence
  chemically synthesized
ccaaagttaaataaatttac

SEQ ID NO: 28541 - DNA, 20 bp, Artificial Sequence
  chemically synthesized
caaagttaaataaatttact

SEQ ID NO: 28542 - DNA, 20 bp, Artificial Sequence
  chemically synthesized
aagttaaataaatttactgg

SEQ ID NO: 28543 - DNA, 20 bp, Artificial Sequence
  chemically synthesized
taaataaatttactgggaga

SEQ ID NO: 28544 - DNA, 20 bp, Artificial Sequence
  chemically synthesized
aaataaatttactgggagat

SEQ ID NO: 28545 - DNA, 20 bp, Artificial Sequence
  chemically synthesized
ttactgggagatgggttctt

SEQ ID NO: 28546 - DNA, 20 bp, Artificial Sequence
  chemically synthesized
tactgggagatgggttcttc

SEQ ID NO: 28547 - DNA, 20 bp, Artificial Sequence
  chemically synthesized
gatgggttcttcaggttact

SEQ ID NO: 28548 - DNA, 20 bp, Artificial Sequence
  chemically synthesized
ctgataaaatattatttctg

SEQ ID NO: 28549 - DNA, 20 bp, Artificial Sequence
  chemically synthesized
tttctgaagctgatgaacaa

SEQ ID NO: 28550 - DNA, 20 bp, Artificial Sequence
  chemically synthesized
ctgatgaacaatagaaacat

SEQ ID NO: 28551 - DNA, 20 bp, Artificial Sequence
  chemically synthesized
acaatagaaacatgagaacc

SEQ ID NO: 28552 - DNA, 20 bp, Artificial Sequence
  chemically synthesized
tataaatgatattttgtatc

SEQ ID NO: 28553 - DNA, 20 bp, Artificial Sequence
  chemically synthesized
aataacatgcacatttccaa

SEQ ID NO: 28554 - DNA, 20 bp, Artificial Sequence
  chemically synthesized
acatgcacatttccaatagt

SEQ ID NO: 28555 - DNA, 20 bp, Artificial Sequence
  chemically synthesized
atgatcttttttttttaaat

SEQ ID NO: 28556 - DNA, 20 bp, Artificial Sequence
  chemically synthesized
tgatcttttttttttaaatg

SEQ ID NO: 28557 - DNA, 20 bp, Artificial Sequence
  chemically synthesized
tttttaaatgaggaactact

SEQ ID NO: 28558 - DNA, 20 bp, Artificial Sequence
  chemically synthesized
taatgtctcttaaaatcctc

SEQ ID NO: 28559 - DNA, 20 bp, Artificial Sequence
  chemically synthesized
gtctcttaaaatcctcaagt

SEQ ID NO: 28560 - DNA, 20 bp, Artificial Sequence
  chemically synthesized
cctcaagtaagtttttgtaa

SEQ ID NO: 28561 - DNA, 20 bp, Artificial Sequence
  chemically synthesized
ctcaagtaagtttttgtaac

SEQ ID NO: 28562 - DNA, 20 bp, Artificial Sequence
  chemically synthesized
taacaggcttgacgtgctga

SEQ ID NO: 28563 - DNA, 20 bp, Artificial Sequence
  chemically synthesized
gttctttttaatcttcattt

SEQ ID NO: 28564 - DNA, 20 bp, Artificial Sequence
  chemically synthesized
tttgagaacaacttaataaa

SEQ ID NO: 28565 - DNA, 20 bp, Artificial Sequence
  chemically synthesized
ttgagaacaacttaataaac

SEQ ID NO: 28566 - DNA, 20 bp, Artificial Sequence
  chemically synthesized
accgcaaattctatttctca

SEQ ID NO: 28567 - DNA, 20 bp, Artificial Sequence
  chemically synthesized
atttctcacagattttaaac

SEQ ID NO: 28568 - DNA, 20 bp, Artificial Sequence
  chemically synthesized
ttttaaaccagaaactcttc

SEQ ID NO: 28569 - DNA, 20 bp, Artificial Sequence
  chemically synthesized
tttgctatcctctctttgtt

SEQ ID NO: 28570 - DNA, 20 bp, Artificial Sequence
  chemically synthesized
ttgctatcctctctttgttt

SEQ ID NO: 28571 - DNA, 20 bp, Artificial Sequence
  chemically synthesized
ctttgtttaggacctacaaa

SEQ ID NO: 28572 - DNA, 20 bp, Artificial Sequence
  chemically synthesized
tttgtttaggacctacaaaa

SEQ ID NO: 28573 - DNA, 20 bp, Artificial Sequence
  chemically synthesized
tttaggacctacaaaaaggc

SEQ ID NO: 28574 - DNA, 20 bp, Artificial Sequence
  chemically synthesized
gctggaaccaacacattaca

SEQ ID NO: 28575 - DNA, 20 bp, Artificial Sequence
  chemically synthesized
ctggaaccaacacattacaa

SEQ ID NO: 28576 - DNA, 20 bp, Artificial Sequence
  chemically synthesized
aacacattacaaaggttgct

SEQ ID NO: 28577 - DNA, 20 bp, Artificial Sequence
  chemically synthesized
acattacaaaggttgctaag

SEQ ID NO: 28578 - DNA, 20 bp, Artificial Sequence
  chemically synthesized
tacaaaggttgctaagaagt

SEQ ID NO: 28579 - DNA, 20 bp, Artificial Sequence
  chemically synthesized
acaaaggttgctaagaagtg

SEQ ID NO: 28580 - DNA, 20 bp, Artificial Sequence
  chemically synthesized
gctaagaagtgaggtgaaca

SEQ ID NO: 28581 - DNA, 20 bp, Artificial Sequence
  chemically synthesized
acacagttcttcatttgcac

SEQ ID NO: 28582 - DNA, 20 bp, Artificial Sequence
  chemically synthesized
ttcttcatttgcactggcca

SEQ ID NO: 28583 - DNA, 20 bp, Artificial Sequence
  chemically synthesized
ttcatttgcactggccatgg

SEQ ID NO: 28584 - DNA, 20 bp, Artificial Sequence
  chemically synthesized
tttgcactggccatggcaga

SEQ ID NO: 28585 - DNA, 20 bp, Artificial Sequence
  chemically synthesized
tggccatggcagaaagtgtg

SEQ ID NO: 28586 - DNA, 20 bp, Artificial Sequence
  chemically synthesized
ccatggcagaaagtgtgaag

SEQ ID NO: 28587 - DNA, 20 bp, Artificial Sequence
  chemically synthesized
gcagaaagtgtgaagtagtt

SEQ ID NO: 28588 - DNA, 20 bp, Artificial Sequence
  chemically synthesized
tgaagtagttgagtttttcc

SEQ ID NO: 28589 - DNA, 20 bp, Artificial Sequence
  chemically synthesized
gaagtagttgagtttttccc

SEQ ID NO: 28590 - DNA, 20 bp, Artificial Sequence
  chemically synthesized
aagtagttgagtttttccca

SEQ ID NO: 28591 - DNA, 20 bp, Artificial Sequence
  chemically synthesized
gtttttcccagggcattctg

SEQ ID NO: 28592 - DNA, 20 bp, Artificial Sequence
  chemically synthesized
cccagggcattctgtagata

SEQ ID NO: 28593 - DNA, 20 bp, Artificial Sequence
  chemically synthesized
accatttttgtatatgcaat

SEQ ID NO: 28594 - DNA, 20 bp, Artificial Sequence
  chemically synthesized
attgtatataatcataatgc

SEQ ID NO: 28595 - DNA, 20 bp, Artificial Sequence
  chemically synthesized
gtatataatcataatgctag

SEQ ID NO: 28596 - DNA, 20 bp, Artificial Sequence
  chemically synthesized
ataatcataatgctagaagt

SEQ ID NO: 28597 - DNA, 20 bp, Artificial Sequence
  chemically synthesized
tgctagaagtgagaacttga

SEQ ID NO: 28598 - DNA, 20 bp, Artificial Sequence
  chemically synthesized
gctagaagtgagaacttgaa

SEQ ID NO: 28599 - DNA, 20 bp, Artificial Sequence
  chemically synthesized
agaagtgagaacttgaaagg

SEQ ID NO: 28600 - DNA, 20 bp, Artificial Sequence
  chemically synthesized
agtgagaacttgaaaggaag

SEQ ID NO: 28601 - DNA, 20 bp, Artificial Sequence
  chemically synthesized
gagaacttgaaaggaagtgg

SEQ ID NO: 28602 - DNA, 20 bp, Artificial Sequence
  chemically synthesized
agaacttgaaaggaagtggc

SEQ ID NO: 28603 - DNA, 20 bp, Artificial Sequence
  chemically synthesized
aacttgaaaggaagtggcgg

SEQ ID NO: 28604 - DNA, 20 bp, Artificial Sequence
  chemically synthesized
tgaaaggaagtggcgggaga

SEQ ID NO: 28605 - DNA, 20 bp, Artificial Sequence
  chemically synthesized
ggaagtggcgggagatggct

SEQ ID NO: 28606 - DNA, 20 bp, Artificial Sequence
  chemically synthesized
gaagtggcgggagatggctt

SEQ ID NO: 28607 - DNA, 20 bp, Artificial Sequence
  chemically synthesized
ggcttaggtataattccaat

SEQ ID NO: 28608 - DNA, 20 bp, Artificial Sequence
  chemically synthesized
cttaggtataattccaattg

SEQ ID NO: 28609 - DNA, 20 bp, Artificial Sequence
  chemically synthesized
ataattccaattggagaaat

SEQ ID NO: 28610 - DNA, 20 bp, Artificial Sequence
  chemically synthesized
taattccaattggagaaata

SEQ ID NO: 28611 - DNA, 20 bp, Artificial Sequence
  chemically synthesized
aattggagaaataaggaaat

SEQ ID NO: 28612 - DNA, 20 bp, Artificial Sequence
  chemically synthesized
attggagaaataaggaaatg

SEQ ID NO: 28613 - DNA, 20 bp, Artificial Sequence
  chemically synthesized
ggagaaataaggaaatgagg

SEQ ID NO: 28614 - DNA, 20 bp, Artificial Sequence
  chemically synthesized
gaaatgaggtggtttattca

SEQ ID NO: 28615 - DNA, 20 bp, Artificial Sequence
  chemically synthesized
aggtggtttattcacagaca

SEQ ID NO: 28616 - DNA, 20 bp, Artificial Sequence
  chemically synthesized
tcacagacacagtttgctga

SEQ ID NO: 28617 - DNA, 20 bp, Artificial Sequence
  chemically synthesized
cacagacacagtttgctgaa

SEQ ID NO: 28618 - DNA, 20 bp, Artificial Sequence
  chemically synthesized
cacagtttgctgaaaggtac

SEQ ID NO: 28619 - DNA, 20 bp, Artificial Sequence
  chemically synthesized
acagtttgctgaaaggtact

SEQ ID NO: 28620 - DNA, 20 bp, Artificial Sequence
  chemically synthesized
gaaaggtactgggattattt

SEQ ID NO: 28621 - DNA, 20 bp, Artificial Sequence
  chemically synthesized
aaaggtactgggattatttc

SEQ ID NO: 28622 - DNA, 20 bp, Artificial Sequence
  chemically synthesized
ttatttcgggccttcctgaa

SEQ ID NO: 28623 - DNA, 20 bp, Artificial Sequence
  chemically synthesized
tatttcgggccttcctgaaa

SEQ ID NO: 28624 - DNA, 20 bp, Artificial Sequence
  chemically synthesized
tttcgggccttcctgaaaag

SEQ ID NO: 28625 - DNA, 20 bp, Artificial Sequence
  chemically synthesized
ggccttcctgaaaaggagtt

SEQ ID NO: 28626 - DNA, 20 bp, Artificial Sequence
  chemically synthesized
cttcctgaaaaggagttgag

SEQ ID NO: 28627 - DNA, 20 bp, Artificial Sequence
  chemically synthesized
gaaaaggagttgagaagcct

SEQ ID NO: 28628 - DNA, 20 bp, Artificial Sequence
  chemically synthesized
aaaaggagttgagaagcctc

SEQ ID NO: 28629 - DNA, 20 bp, Artificial Sequence
  chemically synthesized
gccccatcctctcctgcttg

SEQ ID NO: 28630 - DNA, 20 bp, Artificial Sequence
  chemically synthesized
tgcttgtagtactttgctca

SEQ ID NO: 28631 - DNA, 20 bp, Artificial Sequence
  chemically synthesized
cttgtagtactttgctcaca

SEQ ID NO: 28632 - DNA, 20 bp, Artificial Sequence
  chemically synthesized
gtactttgctcacagagact

SEQ ID NO: 28633 - DNA, 20 bp, Artificial Sequence
  chemically synthesized
tactttgctcacagagactg

SEQ ID NO: 28634 - DNA, 20 bp, Artificial Sequence
  chemically synthesized
actttgctcacagagactga

SEQ ID NO: 28635 - DNA, 20 bp, Artificial Sequence
  chemically synthesized
tttgctcacagagactgagg

SEQ ID NO: 28636 - DNA, 20 bp, Artificial Sequence
  chemically synthesized
ttgctcacagagactgaggg

SEQ ID NO: 28637 - DNA, 20 bp, Artificial Sequence
  chemically synthesized
agagactgagggaggaaata

SEQ ID NO: 28638 - DNA, 20 bp, Artificial Sequence
  chemically synthesized
atacagtgttttcttgtttt

SEQ ID NO: 28639 - DNA, 20 bp, Artificial Sequence
  chemically synthesized
ttctgttactccattgtccc

SEQ ID NO: 28640 - DNA, 20 bp, Artificial Sequence
  chemically synthesized
tctgttactccattgtccct

SEQ ID NO: 28641 - DNA, 20 bp, Artificial Sequence
  chemically synthesized
tactccattgtccctgggcc

SEQ ID NO: 28642 - DNA, 20 bp, Artificial Sequence
  chemically synthesized
gtccctgggcctggtgtgtt

SEQ ID NO: 28643 - DNA, 20 bp, Artificial Sequence
  chemically synthesized
tccctgggcctggtgtgttc

SEQ ID NO: 28644 - DNA, 20 bp, Artificial Sequence
  chemically synthesized
ccatcccattctcttttttt

SEQ ID NO: 28645 - DNA, 20 bp, Artificial Sequence
  chemically synthesized
ttcccataaaaaaaaaattg

SEQ ID NO: 28646 - DNA, 20 bp, Artificial Sequence
  chemically synthesized
tcccataaaaaaaaaattgt

SEQ ID NO: 28647 - DNA, 20 bp, Artificial Sequence
  chemically synthesized
tgtgggaactttgccgatat

SEQ ID NO: 28648 - DNA, 20 bp, Artificial Sequence
  chemically synthesized
gtgggaactttgccgatatg

SEQ ID NO: 28649 - DNA, 20 bp, Artificial Sequence
  chemically synthesized
gaactttgccgatatgagga

SEQ ID NO: 28650 - DNA, 20 bp, Artificial Sequence
  chemically synthesized
aactttgccgatatgaggat

SEQ ID NO: 28651 - DNA, 20 bp, Artificial Sequence
  chemically synthesized
tgccgatatgaggatgggat

SEQ ID NO: 28652 - DNA, 20 bp, Artificial Sequence
  chemically synthesized
cgatatgaggatgggattgg

SEQ ID NO: 28653 - DNA, 20 bp, Artificial Sequence
  chemically synthesized
atatgaggatgggattggca

SEQ ID NO: 28654 - DNA, 20 bp, Artificial Sequence
  chemically synthesized
cagagttctctcaacctgct

SEQ ID NO: 28655 - DNA, 20 bp, Artificial Sequence
  chemically synthesized
cttggaaaaatgtttcttaa

SEQ ID NO: 28656 - DNA, 20 bp, Artificial Sequence
  chemically synthesized
aaaagactgctaacttttaa

SEQ ID NO: 28657 - DNA, 20 bp, Artificial Sequence
  chemically synthesized
aaagactgctaacttttaaa

SEQ ID NO: 28658 - DNA, 20 bp, Artificial Sequence
  chemically synthesized
tgctaacttttaaaaggcat

SEQ ID NO: 28659 - DNA, 20 bp, Artificial Sequence
  chemically synthesized
tttaaaaggcatgagccatc

SEQ ID NO: 28660 - DNA, 20 bp, Artificial Sequence
  chemically synthesized
aaaaggcatgagccatctag

SEQ ID NO: 28661 - DNA, 20 bp, Artificial Sequence
  chemically synthesized
agccatctagcagattttcc

SEQ ID NO: 28662 - DNA, 20 bp, Artificial Sequence
  chemically synthesized
attttcctagttgtctccta

SEQ ID NO: 28663 - DNA, 20 bp, Artificial Sequence
  chemically synthesized
aagccctgcatatttcccaa

SEQ ID NO: 28664 - DNA, 20 bp, Artificial Sequence
  chemically synthesized
aaaataaacgaacccattgt

SEQ ID NO: 28665 - DNA, 20 bp, Artificial Sequence
  chemically synthesized
aataaacgaacccattgtta

SEQ ID NO: 28666 - DNA, 20 bp, Artificial Sequence
  chemically synthesized
cgaacccattgttagagaaa

SEQ ID NO: 28667 - DNA, 20 bp, Artificial Sequence
  chemically synthesized
attgttagagaaatggacat

SEQ ID NO: 28668 - DNA, 20 bp, Artificial Sequence
  chemically synthesized
gaaatggacatcagaacaca

SEQ ID NO: 28669 - DNA, 20 bp, Artificial Sequence
  chemically synthesized
aatggacatcagaacacata

SEQ ID NO: 28670 - DNA, 20 bp, Artificial Sequence
  chemically synthesized
atggacatcagaacacatag

SEQ ID NO: 28671 - DNA, 20 bp, Artificial Sequence
  chemically synthesized
tggacatcagaacacataga

SEQ ID NO: 28672 - DNA, 20 bp, Artificial Sequence
  chemically synthesized
tcagaacacatagagggaat

SEQ ID NO: 28673 - DNA, 20 bp, Artificial Sequence
  chemically synthesized
ggtatgatgtgtatttactc

SEQ ID NO: 28674 - DNA, 20 bp, Artificial Sequence
  chemically synthesized
gtatgatgtgtatttactct

SEQ ID NO: 28675 - DNA, 20 bp, Artificial Sequence
  chemically synthesized
tatgatgtgtatttactcta

SEQ ID NO: 28676 - DNA, 20 bp, Artificial Sequence
  chemically synthesized
tatttactctagggctgcta

SEQ ID NO: 28677 - DNA, 20 bp, Artificial Sequence
  chemically synthesized
gctgctatagctatgaactg

SEQ ID NO: 28678 - DNA, 20 bp, Artificial Sequence
  chemically synthesized
atagctatgaactgtggaca

SEQ ID NO: 28679 - DNA, 20 bp, Artificial Sequence
  chemically synthesized
tagctatgaactgtggacat

SEQ ID NO: 28680 - DNA, 20 bp, Artificial Sequence
  chemically synthesized
aactgtggacatgggttgtc

SEQ ID NO: 28681 - DNA, 20 bp, Artificial Sequence
  chemically synthesized
cggtctgcacttctgcttgc

SEQ ID NO: 28682 - DNA, 20 bp, Artificial Sequence
  chemically synthesized
ctggcatctcgttatcccat

SEQ ID NO: 28683 - DNA, 20 bp, Artificial Sequence
  chemically synthesized
gctgtttaatttactacata

SEQ ID NO: 28684 - DNA, 20 bp, Artificial Sequence
  chemically synthesized
taatttactacatacagcac

SEQ ID NO: 28685 - DNA, 20 bp, Artificial Sequence
  chemically synthesized
aatttactacatacagcacg

SEQ ID NO: 28686 - DNA, 20 bp, Artificial Sequence
  chemically synthesized
tactacatacagcacgaggc

SEQ ID NO: 28687 - DNA, 20 bp, Artificial Sequence
  chemically synthesized
acagcacgaggccagtgact

SEQ ID NO: 28688 - DNA, 20 bp, Artificial Sequence
  chemically synthesized
gaggccagtgactcagcctt

SEQ ID NO: 28689 - DNA, 20 bp, Artificial Sequence
  chemically synthesized
aggccagtgactcagccttt

SEQ ID NO: 28690 - DNA, 20 bp, Artificial Sequence
  chemically synthesized
ggccagtgactcagccttta

SEQ ID NO: 28691 - DNA, 20 bp, Artificial Sequence
  chemically synthesized
gccagtgactcagcctttag

SEQ ID NO: 28692 - DNA, 20 bp, Artificial Sequence
  chemically synthesized
tgactcagcctttaggggaa

SEQ ID NO: 28693 - DNA, 20 bp, Artificial Sequence
  chemically synthesized
gactcagcctttaggggaat

SEQ ID NO: 28694 - DNA, 20 bp, Artificial Sequence
  chemically synthesized
actcagcctttaggggaatg

SEQ ID NO: 28695 - DNA, 20 bp, Artificial Sequence
  chemically synthesized
ctttctctctctctatttcc

SEQ ID NO: 28696 - DNA, 20 bp, Artificial Sequence
  chemically synthesized
ctatttcccagcgtcatcta

SEQ ID NO: 28697 - DNA, 20 bp, Artificial Sequence
  chemically synthesized
cccagcgtcatctacggtca

SEQ ID NO: 28698 - DNA, 20 bp, Artificial Sequence
  chemically synthesized
ccagcgtcatctacggtcat

SEQ ID NO: 28699 - DNA, 20 bp, Artificial Sequence
  chemically synthesized
attaattcctcccttccaaa

SEQ ID NO: 28700 - DNA, 20 bp, Artificial Sequence
  chemically synthesized
ttaattcctcccttccaaat

SEQ ID NO: 28701 - DNA, 20 bp, Artificial Sequence
  chemically synthesized
ttcctcccttccaaatggga

SEQ ID NO: 28702 - DNA, 20 bp, Artificial Sequence
  chemically synthesized
cctcccttccaaatgggaaa

SEQ ID NO: 28703 - DNA, 20 bp, Artificial Sequence
  chemically synthesized
aaatgggaaagagaccaatc

SEQ ID NO: 28704 - DNA, 20 bp, Artificial Sequence
  chemically synthesized
agagaccaatccagttcaca

SEQ ID NO: 28705 - DNA, 20 bp, Artificial Sequence
  chemically synthesized
gagaccaatccagttcacac

SEQ ID NO: 28706 - DNA, 20 bp, Artificial Sequence
  chemically synthesized
tcacacgggtcattgtactt

SEQ ID NO: 28707 - DNA, 20 bp, Artificial Sequence
  chemically synthesized
tgtacttgagaacctaaact

SEQ ID NO: 28708 - DNA, 20 bp, Artificial Sequence
  chemically synthesized
aacctaaacttggctgaaca

SEQ ID NO: 28709 - DNA, 20 bp, Artificial Sequence
  chemically synthesized
cttggctgaacacagctcga

SEQ ID NO: 28710 - DNA, 20 bp, Artificial Sequence
  chemically synthesized
atacgtttttcctttctgta

SEQ ID NO: 28711 - DNA, 20 bp, Artificial Sequence
  chemically synthesized
cgtttttcctttctgtaaag

SEQ ID NO: 28712 - DNA, 20 bp, Artificial Sequence
  chemically synthesized
aaagtggcaaaaactatttc

SEQ ID NO: 28713 - DNA, 20 bp, Artificial Sequence
  chemically synthesized
aagtggcaaaaactatttca

SEQ ID NO: 28714 - DNA, 20 bp, Artificial Sequence
  chemically synthesized
agtggcaaaaactatttcaa

SEQ ID NO: 28715 - DNA, 20 bp, Artificial Sequence
  chemically synthesized
tggcaaaaactatttcaagg

SEQ ID NO: 28716 - DNA, 20 bp, Artificial Sequence
  chemically synthesized
tttcaagggagcacgtgtat

SEQ ID NO: 28717 - DNA, 20 bp, Artificial Sequence
  chemically synthesized
cacgtgtatcagatctttca

SEQ ID NO: 28718 - DNA, 20 bp, Artificial Sequence
  chemically synthesized
acgtgtatcagatctttcat

SEQ ID NO: 28719 - DNA, 20 bp, Artificial Sequence
  chemically synthesized
cgtgtatcagatctttcata

SEQ ID NO: 28720 - DNA, 20 bp, Artificial Sequence
  chemically synthesized
tatcagatctttcataggga

SEQ ID NO: 28721 - DNA, 20 bp, Artificial Sequence
  chemically synthesized
cagatctttcatagggatgg

SEQ ID NO: 28722 - DNA, 20 bp, Artificial Sequence
  chemically synthesized
ctttcatagggatggtagaa

SEQ ID NO: 28723 - DNA, 20 bp, Artificial Sequence
  chemically synthesized
tttcatagggatggtagaaa

SEQ ID NO: 28724 - DNA, 20 bp, Artificial Sequence
  chemically synthesized
gatggtagaaaaggcaaatt

SEQ ID NO: 28725 - DNA, 20 bp, Artificial Sequence
  chemically synthesized
gcaaattaagccatttcccc

SEQ ID NO: 28726 - DNA, 20 bp, Artificial Sequence
  chemically synthesized
atttccccaagtatcctcta

SEQ ID NO: 28727 - DNA, 20 bp, Artificial Sequence
  chemically synthesized
tccccaagtatcctctaaag

SEQ ID NO: 28728 - DNA, 20 bp, Artificial Sequence
  chemically synthesized
ccccaagtatcctctaaagc

SEQ ID NO: 28729 - DNA, 20 bp, Artificial Sequence
  chemically synthesized
ccaagtatcctctaaagcgg

SEQ ID NO: 28730 - DNA, 20 bp, Artificial Sequence
  chemically synthesized
agcgggagcccctaaaccca

SEQ ID NO: 28731 - DNA, 20 bp, Artificial Sequence
  chemically synthesized
gcgggagcccctaaacccat

SEQ ID NO: 28732 - DNA, 20 bp, Artificial Sequence
  chemically synthesized
cgggagcccctaaacccata

SEQ ID NO: 28733 - DNA, 20 bp, Artificial Sequence
  chemically synthesized
gggagcccctaaacccatag

SEQ ID NO: 28734 - DNA, 20 bp, Artificial Sequence
  chemically synthesized
ggagcccctaaacccatagg

SEQ ID NO: 28735 - DNA, 20 bp, Artificial Sequence
  chemically synthesized
gagcccctaaacccataggg

SEQ ID NO: 28736 - DNA, 20 bp, Artificial Sequence
  chemically synthesized
aggggggctgtgcttttaaa

SEQ ID NO: 28737 - DNA, 20 bp, Artificial Sequence
  chemically synthesized
cttttaaatagctgtgaacg

SEQ ID NO: 28738 - DNA, 20 bp, Artificial Sequence
  chemically synthesized
ccatgatatactttgtctat

SEQ ID NO: 28739 - DNA, 20 bp, Artificial Sequence
  chemically synthesized
gtctattagaatttgaatat

SEQ ID NO: 28740 - DNA, 20 bp, Artificial Sequence
  chemically synthesized
tattagaatttgaatattgg

SEQ ID NO: 28741 - DNA, 20 bp, Artificial Sequence
  chemically synthesized
tagaatttgaatattggtag

SEQ ID NO: 28742 - DNA, 20 bp, Artificial Sequence
  chemically synthesized
agaatttgaatattggtagc

SEQ ID NO: 28743 - DNA, 20 bp, Artificial Sequence
  chemically synthesized
tttgaatattggtagcaggt

SEQ ID NO: 28744 - DNA, 20 bp, Artificial Sequence
  chemically synthesized
attggtagcaggttggacga

SEQ ID NO: 28745 - DNA, 20 bp, Artificial Sequence
  chemically synthesized
ttggtagcaggttggacgaa

SEQ ID NO: 28746 - DNA, 20 bp, Artificial Sequence
  chemically synthesized
tggtagcaggttggacgaaa

SEQ ID NO: 28747 - DNA, 20 bp, Artificial Sequence
  chemically synthesized
gttggacgaaagggtttgat

SEQ ID NO: 28748 - DNA, 20 bp, Artificial Sequence
  chemically synthesized
ttggacgaaagggtttgatt

SEQ ID NO: 28749 - DNA, 20 bp, Artificial Sequence
  chemically synthesized
tggacgaaagggtttgattg

SEQ ID NO: 28750 - DNA, 20 bp, Artificial Sequence
  chemically synthesized
aaagggtttgattggggtat

SEQ ID NO: 28751 - DNA, 20 bp, Artificial Sequence
  chemically synthesized
tttgattggggtatcagcta

SEQ ID NO: 28752 - DNA, 20 bp, Artificial Sequence
  chemically synthesized
ttgattggggtatcagctaa

SEQ ID NO: 28753 - DNA, 20 bp, Artificial Sequence
  chemically synthesized
tgattggggtatcagctaaa

SEQ ID NO: 28754 - DNA, 20 bp, Artificial Sequence
  chemically synthesized
gattggggtatcagctaaag

SEQ ID NO: 28755 - DNA, 20 bp, Artificial Sequence
  chemically synthesized
agctaaaggggcctcgacga

SEQ ID NO: 28756 - DNA, 20 bp, Artificial Sequence
  chemically synthesized
gggcctcgacgacagtgact

SEQ ID NO: 28757 - DNA, 20 bp, Artificial Sequence
  chemically synthesized
cgacgacagtgacttagcgc

SEQ ID NO: 28758 - DNA, 20 bp, Artificial Sequence
  chemically synthesized
acagtgacttagcgctggac

SEQ ID NO: 28759 - DNA, 20 bp, Artificial Sequence
  chemically synthesized
cagtgacttagcgctggact

SEQ ID NO: 28760 - DNA, 20 bp, Artificial Sequence
  chemically synthesized
acttagcgctggactgggaa

SEQ ID NO: 28761 - DNA, 20 bp, Artificial Sequence
  chemically synthesized
cttagcgctggactgggaat

SEQ ID NO: 28762 - DNA, 20 bp, Artificial Sequence
  chemically synthesized
ggactgggaatgggattccc

SEQ ID NO: 28763 - DNA, 20 bp, Artificial Sequence
  chemically synthesized
gggattccccagaacccacc

SEQ ID NO: 28764 - DNA, 20 bp, Artificial Sequence
  chemically synthesized
ccccagaacccacctggacg

SEQ ID NO: 28765 - DNA, 20 bp, Artificial Sequence
  chemically synthesized
cctggacgcagcatgcccct

SEQ ID NO: 28766 - DNA, 20 bp, Artificial Sequence
  chemically synthesized
acgcagcatgcccctcagcc

SEQ ID NO: 28767 - DNA, 20 bp, Artificial Sequence
  chemically synthesized
cgcagcatgcccctcagccc

SEQ ID NO: 28768 - DNA, 20 bp, Artificial Sequence
  chemically synthesized
caggtctccgctgctctgct

SEQ ID NO: 28769 - DNA, 20 bp, Artificial Sequence
  chemically synthesized
aggtctccgctgctctgctc

SEQ ID NO: 28770 - DNA, 20 bp, Artificial Sequence
  chemically synthesized
ggtctccgctgctctgctca

SEQ ID NO: 28771 - DNA, 20 bp, Artificial Sequence
  chemically synthesized
gtctccgctgctctgctcag

SEQ ID NO: 28772 - DNA, 20 bp, Artificial Sequence
  chemically synthesized
tccgctgctctgctcagggg

SEQ ID NO: 28773 - DNA, 20 bp, Artificial Sequence
  chemically synthesized
ccgctgctctgctcaggggt

SEQ ID NO: 28774 - DNA, 20 bp, Artificial Sequence
  chemically synthesized
tgctcaggggtgggatgcgt

SEQ ID NO: 28775 - DNA, 20 bp, Artificial Sequence
  chemically synthesized
ctcaggggtgggatgcgtga

SEQ ID NO: 28776 - DNA, 20 bp, Artificial Sequence
  chemically synthesized
aggggtgggatgcgtgagag

SEQ ID NO: 28777 - DNA, 20 bp, Artificial Sequence
  chemically synthesized
tgggatgcgtgagagcagct

SEQ ID NO: 28778 - DNA, 20 bp, Artificial Sequence
  chemically synthesized
gcgtgagagcagctgagatc

SEQ ID NO: 28779 - DNA, 20 bp, Artificial Sequence
  chemically synthesized
agcagctgagatccagaccc

SEQ ID NO: 28780 - DNA, 20 bp, Artificial Sequence
  chemically synthesized
gcagctgagatccagacccc

SEQ ID NO: 28781 - DNA, 20 bp, Artificial Sequence
  chemically synthesized
tccagaccccgggcctcctg

SEQ ID NO: 28782 - DNA, 20 bp, Artificial Sequence
  chemically synthesized
cccgggcctcctgcggcgcc

SEQ ID NO: 28783 - DNA, 20 bp, Artificial Sequence
  chemically synthesized
ggcctcctgcggcgccaagt

SEQ ID NO: 28784 - DNA, 20 bp, Artificial Sequence
  chemically synthesized
gcctcctgcggcgccaagtc

SEQ ID NO: 28785 - DNA, 20 bp, Artificial Sequence
  chemically synthesized
cctcctgcggcgccaagtca

SEQ ID NO: 28786 - DNA, 20 bp, Artificial Sequence
  chemically synthesized
ctcctgcggcgccaagtcag

SEQ ID NO: 28787 - DNA, 20 bp, Artificial Sequence
  chemically synthesized
cctgcggcgccaagtcaggg

SEQ ID NO: 28788 - DNA, 20 bp, Artificial Sequence
  chemically synthesized
tgcggcgccaagtcagggga

SEQ ID NO: 28789 - DNA, 20 bp, Artificial Sequence
  chemically synthesized
gcggcgccaagtcaggggag

SEQ ID NO: 28790 - DNA, 20 bp, Artificial Sequence
  chemically synthesized
ggcgccaagtcaggggagag

SEQ ID NO: 28791 - DNA, 20 bp, Artificial Sequence
  chemically synthesized
gcgccaagtcaggggagagg

SEQ ID NO: 28792 - DNA, 20 bp, Artificial Sequence
  chemically synthesized
agtcaggggagaggaggccc

SEQ ID NO: 28793 - DNA, 20 bp, Artificial Sequence
  chemically synthesized
gtcaggggagaggaggcccc

SEQ ID NO: 28794 - DNA, 20 bp, Artificial Sequence
  chemically synthesized
gaggccccaggcccctgctt

SEQ ID NO: 28795 - DNA, 20 bp, Artificial Sequence
  chemically synthesized
aggccccaggcccctgcttc

SEQ ID NO: 28796 - DNA, 20 bp, Artificial Sequence
  chemically synthesized
gcccctgcttcgggtcgcca

SEQ ID NO: 28797 - DNA, 20 bp, Artificial Sequence
  chemically synthesized
cttcgggtcgccatggcaac

SEQ ID NO: 28798 - DNA, 20 bp, Artificial Sequence
  chemically synthesized
ttcgggtcgccatggcaacg

SEQ ID NO: 28799 - DNA, 20 bp, Artificial Sequence
  chemically synthesized
gtcgccatggcaacgaggcc

SEQ ID NO: 28800 - DNA, 20 bp, Artificial Sequence
  chemically synthesized
caacgaggcctggaatgcca

SEQ ID NO: 28801 - DNA, 20 bp, Artificial Sequence
  chemically synthesized
cgaggcctggaatgccacag

SEQ ID NO: 28802 - DNA, 20 bp, Artificial Sequence
  chemically synthesized
ggcctggaatgccacagtgg

SEQ ID NO: 28803 - DNA, 20 bp, Artificial Sequence
  chemically synthesized
acagtggtagccctcttcct

SEQ ID NO: 28804 - DNA, 20 bp, Artificial Sequence
  chemically synthesized
gccctcttcctcggcacatc

SEQ ID NO: 28805 - DNA, 20 bp, Artificial Sequence
  chemically synthesized
cctcggcacatccggactcc

SEQ ID NO: 28806 - DNA, 20 bp, Artificial Sequence
  chemically synthesized
actcccagttctgctgcttc

SEQ ID NO: 28807 - DNA, 20 bp, Artificial Sequence
  chemically synthesized
ctgcttcaagtcaatgtcca

SEQ ID NO: 28808 - DNA, 20 bp, Artificial Sequence
  chemically synthesized
ttcaagtcaatgtccacagc

SEQ ID NO: 28809 - DNA, 20 bp, Artificial Sequence
  chemically synthesized
tcaagtcaatgtccacagca

SEQ ID NO: 28810 - DNA, 20 bp, Artificial Sequence
  chemically synthesized
caagtcaatgtccacagcaa

SEQ ID NO: 28811 - DNA, 20 bp, Artificial Sequence
  chemically synthesized
agtcaatgtccacagcaagg

SEQ ID NO: 28812 - DNA, 20 bp, Artificial Sequence
  chemically synthesized
gtcaatgtccacagcaaggg

SEQ ID NO: 28813 - DNA, 20 bp, Artificial Sequence
  chemically synthesized
ccacagcaagggaggaaccc

SEQ ID NO: 28814 - DNA, 20 bp, Artificial Sequence
  chemically synthesized
acagcaagggaggaaccccg

SEQ ID NO: 28815 - DNA, 20 bp, Artificial Sequence
  chemically synthesized
cagcaagggaggaaccccgg

SEQ ID NO: 28816 - DNA, 20 bp, Artificial Sequence
  chemically synthesized
ttgccttcccccttccaaaa

SEQ ID NO: 28817 - DNA, 20 bp, Artificial Sequence
  chemically synthesized
ttcccccttccaaaaaagaa

SEQ ID NO: 28818 - DNA, 20 bp, Artificial Sequence
  chemically synthesized
aaagaaaactgcatgtttga

SEQ ID NO: 28819 - DNA, 20 bp, Artificial Sequence
  chemically synthesized
tgcatgtttgaaagaaacta

SEQ ID NO: 28820 - DNA, 20 bp, Artificial Sequence
  chemically synthesized
gcatgtttgaaagaaactac

SEQ ID NO: 28821 - DNA, 20 bp, Artificial Sequence
  chemically synthesized
tgtttgaaagaaactacagg

SEQ ID NO: 28822 - DNA, 20 bp, Artificial Sequence
  chemically synthesized
aagaaactacaggcagtttt

SEQ ID NO: 28823 - DNA, 20 bp, Artificial Sequence
  chemically synthesized
ggcagtttttggtgcaattt

SEQ ID NO: 28824 - DNA, 20 bp, Artificial Sequence
  chemically synthesized
cagtttttggtgcaatttga

SEQ ID NO: 28825 - DNA, 20 bp, Artificial Sequence
  chemically synthesized
caatttgagagcaactcttt

SEQ ID NO: 28826 - DNA, 20 bp, Artificial Sequence
  chemically synthesized
aatttgagagcaactctttt

SEQ ID NO: 28827 - DNA, 20 bp, Artificial Sequence
  chemically synthesized
agagcaactcttttgggttc

SEQ ID NO: 28828 - DNA, 20 bp, Artificial Sequence
  chemically synthesized
ttgggttctggttttctctt

SEQ ID NO: 28829 - DNA, 20 bp, Artificial Sequence
  chemically synthesized
gggttctggttttctcttca

SEQ ID NO: 28830 - DNA, 20 bp, Artificial Sequence
  chemically synthesized
gttcgcctcttgtaaatcat

SEQ ID NO: 28831 - DNA, 20 bp, Artificial Sequence
  chemically synthesized
tcgttgtgctgcttttacat

SEQ ID NO: 28832 - DNA, 20 bp, Artificial Sequence
  chemically synthesized
tataattttattattatttt

SEQ ID NO: 28833 - DNA, 20 bp, Artificial Sequence
  chemically synthesized
aattttattattattttgag

SEQ ID NO: 28834 - DNA, 20 bp, Artificial Sequence
  chemically synthesized
attttattattattttgaga

SEQ ID NO: 28835 - DNA, 20 bp, Artificial Sequence
  chemically synthesized
tctcccgctctcctcaacca

SEQ ID NO: 28836 - DNA, 20 bp, Artificial Sequence
  chemically synthesized
ctcccgctctcctcaaccaa

SEQ ID NO: 28837 - DNA, 20 bp, Artificial Sequence
  chemically synthesized
ccaaaggactgtttcttact

SEQ ID NO: 28838 - DNA, 20 bp, Artificial Sequence
  chemically synthesized
tgtttcttactaagttttct

SEQ ID NO: 28839 - DNA, 20 bp, Artificial Sequence
  chemically synthesized
tactaagttttctcagtcat

SEQ ID NO: 28840 - DNA, 20 bp, Artificial Sequence
  chemically synthesized
actaagttttctcagtcata

SEQ ID NO: 28841 - DNA, 20 bp, Artificial Sequence
  chemically synthesized
ctaagttttctcagtcataa

SEQ ID NO: 28842 - DNA, 20 bp, Artificial Sequence
  chemically synthesized
gttttctcagtcataagggc

SEQ ID NO: 28843 - DNA, 20 bp, Artificial Sequence
  chemically synthesized
taagggcaagtgtttccttc

SEQ ID NO: 28844 - DNA, 20 bp, Artificial Sequence
  chemically synthesized
aagggcaagtgtttccttcc

SEQ ID NO: 28845 - DNA, 20 bp, Artificial Sequence
  chemically synthesized
tttccttccaggtgtgtccc

SEQ ID NO: 28846 - DNA, 20 bp, Artificial Sequence
  chemically synthesized
caggtgtgtcccgagtttat

SEQ ID NO: 28847 - DNA, 20 bp, Artificial Sequence
  chemically synthesized
aggtgtgtcccgagtttatt

SEQ ID NO: 28848 - DNA, 20 bp, Artificial Sequence
  chemically synthesized
tattaggactatcatacaat

SEQ ID NO: 28849 - DNA, 20 bp, Artificial Sequence
  chemically synthesized
attaggactatcatacaatt

SEQ ID NO: 28850 - DNA, 20 bp, Artificial Sequence
  chemically synthesized
aggactatcatacaattggg

SEQ ID NO: 28851 - DNA, 20 bp, Artificial Sequence
  chemically synthesized
ggactatcatacaattgggc

SEQ ID NO: 28852 - DNA, 20 bp, Artificial Sequence
  chemically synthesized
gactatcatacaattgggca

SEQ ID NO: 28853 - DNA, 20 bp, Artificial Sequence
  chemically synthesized
actatcatacaattgggcag

SEQ ID NO: 28854 - DNA, 20 bp, Artificial Sequence
  chemically synthesized
atcatacaattgggcagggg

SEQ ID NO: 28855 - DNA, 20 bp, Artificial Sequence
  chemically synthesized
tcatacaattgggcaggggt

SEQ ID NO: 28856 - DNA, 20 bp, Artificial Sequence
  chemically synthesized
catacaattgggcaggggtg

SEQ ID NO: 28857 - DNA, 20 bp, Artificial Sequence
  chemically synthesized
atacaattgggcaggggtgg

SEQ ID NO: 28858 - DNA, 20 bp, Artificial Sequence
  chemically synthesized
tacaattgggcaggggtggg

SEQ ID NO: 28859 - DNA, 20 bp, Artificial Sequence
  chemically synthesized
tgggcaggggtggggggacc

SEQ ID NO: 28860 - DNA, 20 bp, Artificial Sequence
  chemically synthesized
gggcaggggtggggggacct

SEQ ID NO: 28861 - DNA, 20 bp, Artificial Sequence
  chemically synthesized
ggggggacctgggtcctcct

SEQ ID NO: 28862 - DNA, 20 bp, Artificial Sequence
  chemically synthesized
gggggacctgggtcctcctt

SEQ ID NO: 28863 - DNA, 20 bp, Artificial Sequence
  chemically synthesized
ggggacctgggtcctccttg

SEQ ID NO: 28864 - DNA, 20 bp, Artificial Sequence
  chemically synthesized
gggacctgggtcctccttgg

SEQ ID NO: 28865 - DNA, 20 bp, Artificial Sequence
  chemically synthesized
ggacctgggtcctccttggg

SEQ ID NO: 28866 - DNA, 20 bp, Artificial Sequence
  chemically synthesized
ctgggtcctccttgggggga

SEQ ID NO: 28867 - DNA, 20 bp, Artificial Sequence
  chemically synthesized
ggtcctccttggggggacgg

SEQ ID NO: 28868 - DNA, 20 bp, Artificial Sequence
  chemically synthesized
gtcctccttggggggacgga

SEQ ID NO: 28869 - DNA, 20 bp, Artificial Sequence
  chemically synthesized
tcctccttggggggacggaa

SEQ ID NO: 28870 - DNA, 20 bp, Artificial Sequence
  chemically synthesized
ctccttggggggacggaagg

SEQ ID NO: 28871 - DNA, 20 bp, Artificial Sequence
  chemically synthesized
tccttggggggacggaaggg

SEQ ID NO: 28872 - DNA, 20 bp, Artificial Sequence
  chemically synthesized
ccttggggggacggaaggga

SEQ ID NO: 28873 - DNA, 20 bp, Artificial Sequence
  chemically synthesized
ttggggggacggaagggagg

SEQ ID NO: 28874 - DNA, 20 bp, Artificial Sequence
  chemically synthesized
tggggggacggaagggaggg

SEQ ID NO: 28875 - DNA, 20 bp, Artificial Sequence
  chemically synthesized
ggacggaagggagggaggca

SEQ ID NO: 28876 - DNA, 20 bp, Artificial Sequence
  chemically synthesized
gacggaagggagggaggcat

SEQ ID NO: 28877 - DNA, 20 bp, Artificial Sequence
  chemically synthesized
ggaagggagggaggcatggg

SEQ ID NO: 28878 - DNA, 20 bp, Artificial Sequence
  chemically synthesized
ggaggcatgggaagacgact

SEQ ID NO: 28879 - DNA, 20 bp, Artificial Sequence
  chemically synthesized
aggcatgggaagacgactca

SEQ ID NO: 28880 - DNA, 20 bp, Artificial Sequence
  chemically synthesized
ggcatgggaagacgactcag

SEQ ID NO: 28881 - DNA, 20 bp, Artificial Sequence
  chemically synthesized
tgggaagacgactcagaggt

SEQ ID NO: 28882 - DNA, 20 bp, Artificial Sequence
  chemically synthesized
ggaagacgactcagaggtca

SEQ ID NO: 28883 - DNA, 20 bp, Artificial Sequence
  chemically synthesized
actcagaggtcagagatact

SEQ ID NO: 28884 - DNA, 20 bp, Artificial Sequence
  chemically synthesized
ctcagaggtcagagatactt

SEQ ID NO: 28885 - DNA, 20 bp, Artificial Sequence
  chemically synthesized
tcagaggtcagagatacttg

SEQ ID NO: 28886 - DNA, 20 bp, Artificial Sequence
  chemically synthesized
agaggtcagagatacttggg

SEQ ID NO: 28887 - DNA, 20 bp, Artificial Sequence
  chemically synthesized
gaggtcagagatacttgggg

SEQ ID NO: 28888 - DNA, 20 bp, Artificial Sequence
  chemically synthesized
aggtcagagatacttgggga

SEQ ID NO: 28889 - DNA, 20 bp, Artificial Sequence
  chemically synthesized
ggtcagagatacttggggag

SEQ ID NO: 28890 - DNA, 20 bp, Artificial Sequence
  chemically synthesized
tcagagatacttggggaggg

SEQ ID NO: 28891 - DNA, 20 bp, Artificial Sequence
  chemically synthesized
cagagatacttggggagggg

SEQ ID NO: 28892 - DNA, 20 bp, Artificial Sequence
  chemically synthesized
atacttggggaggggaggct

SEQ ID NO: 28893 - DNA, 20 bp, Artificial Sequence
  chemically synthesized
ctgagtttgaaatcatgctt

SEQ ID NO: 28894 - DNA, 20 bp, Artificial Sequence
  chemically synthesized
tgaaatcatgcttaagatgc

SEQ ID NO: 28895 - DNA, 20 bp, Artificial Sequence
  chemically synthesized
aatcatgcttaagatgccag

SEQ ID NO: 28896 - DNA, 20 bp, Artificial Sequence
  chemically synthesized
gatgccagtggctcgacctg

SEQ ID NO: 28897 - DNA, 20 bp, Artificial Sequence
  chemically synthesized
ccagtggctcgacctgtggt

SEQ ID NO: 28898 - DNA, 20 bp, Artificial Sequence
  chemically synthesized
gctcgacctgtggttggttt

SEQ ID NO: 28899 - DNA, 20 bp, Artificial Sequence
  chemically synthesized
tttaagttctaatttttaaa

SEQ ID NO: 28900 - DNA, 20 bp, Artificial Sequence
  chemically synthesized
agttctaatttttaaaaagc

SEQ ID NO: 28901 - DNA, 20 bp, Artificial Sequence
  chemically synthesized
ctaatttttaaaaagctagt

SEQ ID NO: 28902 - DNA, 20 bp, Artificial Sequence
  chemically synthesized
aatttttaaaaagctagtta

SEQ ID NO: 28903 - DNA, 20 bp, Artificial Sequence
  chemically synthesized
ttaaaaagctagttagagaa

SEQ ID NO: 28904 - DNA, 20 bp, Artificial Sequence
  chemically synthesized
gttagagaacagaaaatcat

SEQ ID NO: 28905 - DNA, 20 bp, Artificial Sequence
  chemically synthesized
ttagagaacagaaaatcatt

SEQ ID NO: 28906 - DNA, 20 bp, Artificial Sequence
  chemically synthesized
gaacagaaaatcattgggcc

SEQ ID NO: 28907 - DNA, 20 bp, Artificial Sequence
  chemically synthesized
ctctgtctccaacctctttc

SEQ ID NO: 28908 - DNA, 20 bp, Artificial Sequence
  chemically synthesized
tctgtctccaacctctttct

SEQ ID NO: 28909 - DNA, 20 bp, Artificial Sequence
  chemically synthesized
gttcttcacacacccccatt

SEQ ID NO: 28910 - DNA, 20 bp, Artificial Sequence
  chemically synthesized
tcacacacccccattcggcg

SEQ ID NO: 28911 - DNA, 20 bp, Artificial Sequence
  chemically synthesized
cccccattcggcgtagtacc

SEQ ID NO: 28912 - DNA, 20 bp, Artificial Sequence
  chemically synthesized
cccattcggcgtagtaccca

SEQ ID NO: 28913 - DNA, 20 bp, Artificial Sequence
  chemically synthesized
cattcggcgtagtacccaga

SEQ ID NO: 28914 - DNA, 20 bp, Artificial Sequence
  chemically synthesized
gcgtagtacccagagagctc

SEQ ID NO: 28915 - DNA, 20 bp, Artificial Sequence
  chemically synthesized
cccagagagctcaagatgtg

SEQ ID NO: 28916 - DNA, 20 bp, Artificial Sequence
  chemically synthesized
agagagctcaagatgtgtgg

SEQ ID NO: 28917 - DNA, 20 bp, Artificial Sequence
  chemically synthesized
tcaagatgtgtggcagtttt

SEQ ID NO: 28918 - DNA, 20 bp, Artificial Sequence
  chemically synthesized
gatgtgtggcagttttcgga

SEQ ID NO: 28919 - DNA, 20 bp, Artificial Sequence
  chemically synthesized
gtgtggcagttttcggatgg

SEQ ID NO: 28920 - DNA, 20 bp, Artificial Sequence
  chemically synthesized
cagttttcggatggaagctc

SEQ ID NO: 28921 - DNA, 20 bp, Artificial Sequence
  chemically synthesized
gttttcggatggaagctcga

SEQ ID NO: 28922 - DNA, 20 bp, Artificial Sequence
  chemically synthesized
atggaagctcgagagccctt

SEQ ID NO: 28923 - DNA, 20 bp, Artificial Sequence
  chemically synthesized
ctcgagagcccttaagttct

SEQ ID NO: 28924 - DNA, 20 bp, Artificial Sequence
  chemically synthesized
ttaagttctgagaaaatttg

SEQ ID NO: 28925 - DNA, 20 bp, Artificial Sequence
  chemically synthesized
ctgagaaaatttgaagcccc

SEQ ID NO: 28926 - DNA, 20 bp, Artificial Sequence
  chemically synthesized
tgagaaaatttgaagccccc

SEQ ID NO: 28927 - DNA, 20 bp, Artificial Sequence
  chemically synthesized
gagaaaatttgaagccccca

SEQ ID NO: 28928 - DNA, 20 bp, Artificial Sequence
  chemically synthesized
agaaaatttgaagcccccag

SEQ ID NO: 28929 - DNA, 20 bp, Artificial Sequence
  chemically synthesized
aaatttgaagcccccagggg

SEQ ID NO: 28930 - DNA, 20 bp, Artificial Sequence
  chemically synthesized
aatttgaagcccccaggggt

SEQ ID NO: 28931 - DNA, 20 bp, Artificial Sequence
  chemically synthesized
atttgaagcccccaggggtg

SEQ ID NO: 28932 - DNA, 20 bp, Artificial Sequence
  chemically synthesized
tgaagcccccaggggtgggg

SEQ ID NO: 28933 - DNA, 20 bp, Artificial Sequence
  chemically synthesized
tggggtggacgcgtgccgcc

SEQ ID NO: 28934 - DNA, 20 bp, Artificial Sequence
  chemically synthesized
gcgtgccgcccagtcgacgt

SEQ ID NO: 28935 - DNA, 20 bp, Artificial Sequence
  chemically synthesized
ccgcccagtcgacgtcagcg

SEQ ID NO: 28936 - DNA, 20 bp, Artificial Sequence
  chemically synthesized
agcgtggtctgtcatcctgc

SEQ ID NO: 28937 - DNA, 20 bp, Artificial Sequence
  chemically synthesized
tagtttgtgatgttttctga

SEQ ID NO: 28938 - DNA, 20 bp, Artificial Sequence
  chemically synthesized
tttgtgatgttttctgacag

SEQ ID NO: 28939 - DNA, 20 bp, Artificial Sequence
  chemically synthesized
gttttctgacagtagcctcc

SEQ ID NO: 28940 - DNA, 20 bp, Artificial Sequence
  chemically synthesized
ttctgacagtagcctccaag

SEQ ID NO: 28941 - DNA, 20 bp, Artificial Sequence
  chemically synthesized
ctccaagaagccgttgtgcg

SEQ ID NO: 28942 - DNA, 20 bp, Artificial Sequence
  chemically synthesized
aagaagccgttgtgcgaaga

SEQ ID NO: 28943 - DNA, 20 bp, Artificial Sequence
  chemically synthesized
gaagccgttgtgcgaagaca

SEQ ID NO: 28944 - DNA, 20 bp, Artificial Sequence
  chemically synthesized
tgtgcgaagacagagtcctg

SEQ ID NO: 28945 - DNA, 20 bp, Artificial Sequence
  chemically synthesized
tgcgaagacagagtcctgca

SEQ ID NO: 28946 - DNA, 20 bp, Artificial Sequence
  chemically synthesized
agagtcctgcagagtccttc

SEQ ID NO: 28947 - DNA, 20 bp, Artificial Sequence
  chemically synthesized
cctgcagagtccttccagcc

SEQ ID NO: 28948 - DNA, 20 bp, Artificial Sequence
  chemically synthesized
ctgcagagtccttccagcct

SEQ ID NO: 28949 - DNA, 20 bp, Artificial Sequence
  chemically synthesized
gtccttccagcctaggcctg

SEQ ID NO: 28950 - DNA, 20 bp, Artificial Sequence
  chemically synthesized
tatttatattttttaataaa

SEQ ID NO: 28951 - DNA, 20 bp, Artificial Sequence
  chemically synthesized
aaaaagtaaaaacaaaaaaa

SEQ ID NO: 28952 - DNA, 20 bp, Artificial Sequence
  chemically synthesized
acaaaaaaacagacccacat

SEQ ID NO: 28953 - DNA, 20 bp, Artificial Sequence
  chemically synthesized
aaaacagacccacattggaa

SEQ ID NO: 28954 - DNA, 20 bp, Artificial Sequence
  chemically synthesized
cccacattggaacagtgaat

SEQ ID NO: 28955 - DNA, 20 bp, Artificial Sequence
  chemically synthesized
ggaacagtgaatcagtccca

SEQ ID NO: 28956 - DNA, 20 bp, Artificial Sequence
  chemically synthesized
aacagtgaatcagtcccata

SEQ ID NO: 28957 - DNA, 20 bp, Artificial Sequence
  chemically synthesized
cagtgaatcagtcccataga

SEQ ID NO: 28958 - DNA, 20 bp, Artificial Sequence
  chemically synthesized
agtgaatcagtcccatagag

SEQ ID NO: 28959 - DNA, 20 bp, Artificial Sequence
  chemically synthesized
gtgaatcagtcccatagaga

SEQ ID NO: 28960 - DNA, 20 bp, Artificial Sequence
  chemically synthesized
agtcccatagagagggcccg

SEQ ID NO: 28961 - DNA, 20 bp, Artificial Sequence
  chemically synthesized
ccgtggaccatcgctgtcat

SEQ ID NO: 28962 - DNA, 20 bp, Artificial Sequence
  chemically synthesized
cgctgtcatgagtgatgccc

SEQ ID NO: 28963 - DNA, 20 bp, Artificial Sequence
  chemically synthesized
tgccctggcccttctgaaac

SEQ ID NO: 28964 - DNA, 20 bp, Artificial Sequence
  chemically synthesized
caacctaattacctgtattg

SEQ ID NO: 28965 - DNA, 20 bp, Artificial Sequence
  chemically synthesized
tgtattgtggaaatgcgcat

SEQ ID NO: 28966 - DNA, 20 bp, Artificial Sequence
  chemically synthesized
attctatgttgtcttttaaa

SEQ ID NO: 28967 - DNA, 20 bp, Artificial Sequence
  chemically synthesized
aacattgacacaataaatgt

SEQ ID NO: 28968 - DNA, 20 bp, Artificial Sequence
  chemically synthesized
cattgacacaataaatgttg

SEQ ID NO: 28969 - DNA, 20 bp, Artificial Sequence
  chemically synthesized
cacaataaatgttggagctt

SEQ ID NO: 28970 - DNA, 20 bp, Artificial Sequence
  chemically synthesized
acaataaatgttggagcttt

SEQ ID NO: 28971 - DNA, 20 bp, Artificial Sequence
  chemically synthesized
ataaatgttggagctttagg

SEQ ID NO: 28972 - DNA, 20 bp, Artificial Sequence
  chemically synthesized
ctttaatttttaatgcttat

SEQ ID NO: 28973 - DNA, 20 bp, Artificial Sequence
  chemically synthesized
tttaatgcttataagacaat

SEQ ID NO: 28974 - DNA, 20 bp, Artificial Sequence
  chemically synthesized
ttaatgcttataagacaatg

SEQ ID NO: 28975 - DNA, 20 bp, Artificial Sequence
  chemically synthesized
acttctgtacctgtttccta

SEQ ID NO: 28976 - DNA, 20 bp, Artificial Sequence
  chemically synthesized
tgtttcctacagacacccat

SEQ ID NO: 28977 - DNA, 20 bp, Artificial Sequence
  chemically synthesized
gtttcctacagacacccatc

SEQ ID NO: 28978 - DNA, 20 bp, Artificial Sequence
  chemically synthesized
tcctacagacacccatcggg

SEQ ID NO: 28979 - DNA, 20 bp, Artificial Sequence
  chemically synthesized
cctacagacacccatcgggt

SEQ ID NO: 28980 - DNA, 20 bp, Artificial Sequence
  chemically synthesized
acagacacccatcgggtggg

SEQ ID NO: 28981 - DNA, 20 bp, Artificial Sequence
  chemically synthesized
cagacacccatcgggtgggt

SEQ ID NO: 28982 - DNA, 20 bp, Artificial Sequence
  chemically synthesized
gacacccatcgggtgggtag

SEQ ID NO: 28983 - DNA, 20 bp, Artificial Sequence
  chemically synthesized
acacccatcgggtgggtagg

SEQ ID NO: 28984 - DNA, 20 bp, Artificial Sequence
  chemically synthesized
catcgggtgggtaggaggaa

SEQ ID NO: 28985 - DNA, 20 bp, Artificial Sequence
  chemically synthesized
tgggtaggaggaacagattt

SEQ ID NO: 28986 - DNA, 20 bp, Artificial Sequence
  chemically synthesized
ggaggaacagatttgagaaa

SEQ ID NO: 28987 - DNA, 20 bp, Artificial Sequence
  chemically synthesized
gaggaacagatttgagaaat

SEQ ID NO: 28988 - DNA, 20 bp, Artificial Sequence
  chemically synthesized
gaacagatttgagaaatggg

SEQ ID NO: 28989 - DNA, 20 bp, Artificial Sequence
  chemically synthesized
aacagatttgagaaatgggc

SEQ ID NO: 28990 - DNA, 20 bp, Artificial Sequence
  chemically synthesized
cagatttgagaaatgggcag

SEQ ID NO: 28991 - DNA, 20 bp, Artificial Sequence
  chemically synthesized
tgagaaatgggcaggagatg

SEQ ID NO: 28992 - DNA, 20 bp, Artificial Sequence
  chemically synthesized
gagaaatgggcaggagatgt

SEQ ID NO: 28993 - DNA, 20 bp, Artificial Sequence
  chemically synthesized
gaaatgggcaggagatgtag

SEQ ID NO: 28994 - DNA, 20 bp, Artificial Sequence
  chemically synthesized
aaatgggcaggagatgtagg

SEQ ID NO: 28995 - DNA, 20 bp, Artificial Sequence
  chemically synthesized
aatgggcaggagatgtagga

SEQ ID NO: 28996 - DNA, 20 bp, Artificial Sequence
  chemically synthesized
atgggcaggagatgtaggag

SEQ ID NO: 28997 - DNA, 20 bp, Artificial Sequence
  chemically synthesized
aggagatgtaggaggggaac

SEQ ID NO: 28998 - DNA, 20 bp, Artificial Sequence
  chemically synthesized
ggagatgtaggaggggaact

SEQ ID NO: 28999 - DNA, 20 bp, Artificial Sequence
  chemically synthesized
ggaactaggttaccgcttat

SEQ ID NO: 29000 - DNA, 20 bp, Artificial Sequence
  chemically synthesized
ctaggttaccgcttatcaga

SEQ ID NO: 29001 - DNA, 20 bp, Artificial Sequence
  chemically synthesized
atcagatggcataaattttc

SEQ ID NO: 29002 - DNA, 20 bp, Artificial Sequence
  chemically synthesized
tcagatggcataaattttca

SEQ ID NO: 29003 - DNA, 20 bp, Artificial Sequence
  chemically synthesized
agatggcataaattttcaag

SEQ ID NO: 29004 - DNA, 20 bp, Artificial Sequence
  chemically synthesized
gagaatcaaaatgcaaaact

SEQ ID NO: 29005 - DNA, 20 bp, Artificial Sequence
  chemically synthesized
agaatcaaaatgcaaaactt

SEQ ID NO: 29006 - DNA, 20 bp, Artificial Sequence
  chemically synthesized
caaaacttgggaataaatca

SEQ ID NO: 29007 - DNA, 20 bp, Artificial Sequence
  chemically synthesized
tagcaatatcataattaatg

SEQ ID NO: 29008 - DNA, 20 bp, Artificial Sequence
  chemically synthesized
caatatcataattaatgtag

SEQ ID NO: 29009 - DNA, 20 bp, Artificial Sequence
  chemically synthesized
attgctgtttattaatgctg

SEQ ID NO: 29010 - DNA, 20 bp, Artificial Sequence
  chemically synthesized
tgtttattaatgctgaagtg

SEQ ID NO: 29011 - DNA, 20 bp, Artificial Sequence
  chemically synthesized
ccattaaataatgcataata

SEQ ID NO: 29012 - DNA, 20 bp, Artificial Sequence
  chemically synthesized
gtttttcaaatatatgcttt

SEQ ID NO: 29013 - DNA, 20 bp, Artificial Sequence
  chemically synthesized
tttcaaatatatgcttttgg

SEQ ID NO: 29014 - DNA, 20 bp, Artificial Sequence
  chemically synthesized
tgcttttggtggctaccatg

SEQ ID NO: 29015 - DNA, 20 bp, Artificial Sequence
  chemically synthesized
gcttttggtggctaccatgc

SEQ ID NO: 29016 - DNA, 20 bp, Artificial Sequence
  chemically synthesized
tttgaatttgtcttttaatt

SEQ ID NO: 29017 - DNA, 20 bp, Artificial Sequence
  chemically synthesized
atttgtcttttaatttagct

SEQ ID NO: 29018 - DNA, 20 bp, Artificial Sequence
  chemically synthesized
tttgtcttttaatttagctt

SEQ ID NO: 29019 - DNA, 20 bp, Artificial Sequence
  chemically synthesized
tcttttaatttagcttagga

SEQ ID NO: 29020 - DNA, 20 bp, Artificial Sequence
  chemically synthesized
agcttaggaaagaacatcac

SEQ ID NO: 29021 - DNA, 20 bp, Artificial Sequence
  chemically synthesized
gcttaggaaagaacatcact

SEQ ID NO: 29022 - DNA, 20 bp, Artificial Sequence
  chemically synthesized
aggaaagaacatcactgggc

SEQ ID NO: 29023 - DNA, 20 bp, Artificial Sequence
  chemically synthesized
aaagaacatcactgggcgag

SEQ ID NO: 29024 - DNA, 20 bp, Artificial Sequence
  chemically synthesized
tgggcgagcggtaaatccta

SEQ ID NO: 29025 - DNA, 20 bp, Artificial Sequence
  chemically synthesized
gcgagcggtaaatcctaaag

SEQ ID NO: 29026 - DNA, 20 bp, Artificial Sequence
  chemically synthesized
cgagcggtaaatcctaaaga

SEQ ID NO: 29027 - DNA, 20 bp, Artificial Sequence
  chemically synthesized
ctaaagaaggtgataaatgt

SEQ ID NO: 29028 - DNA, 20 bp, Artificial Sequence
  chemically synthesized
aagaaggtgataaatgtcag

SEQ ID NO: 29029 - DNA, 20 bp, Artificial Sequence
  chemically synthesized
cttattaaatattctaattt

SEQ ID NO: 29030 - DNA, 20 bp, Artificial Sequence
  chemically synthesized
ttattaaatattctaatttt

SEQ ID NO: 29031 - DNA, 20 bp, Artificial Sequence
  chemically synthesized
attttaggttcccaaacctt

SEQ ID NO: 29032 - DNA, 20 bp, Artificial Sequence
  chemically synthesized
ttttaggttcccaaaccttc

SEQ ID NO: 29033 - DNA, 20 bp, Artificial Sequence
  chemically synthesized
tcaggaaatatatcttaatg

SEQ ID NO: 29034 - DNA, 20 bp, Artificial Sequence
  chemically synthesized
aaacaaacataaaacttctt

SEQ ID NO: 29035 - DNA, 20 bp, Artificial Sequence
  chemically synthesized
aacttctttagtacttacat

SEQ ID NO: 29036 - DNA, 20 bp, Artificial Sequence
  chemically synthesized
acttctttagtacttacatc

SEQ ID NO: 29037 - DNA, 20 bp, Artificial Sequence
  chemically synthesized
agtacttacatcaggaaatt

SEQ ID NO: 29038 - DNA, 20 bp, Artificial Sequence
  chemically synthesized
gtacttacatcaggaaattt

SEQ ID NO: 29039 - DNA, 20 bp, Artificial Sequence
  chemically synthesized
tacttacatcaggaaatttg

SEQ ID NO: 29040 - DNA, 20 bp, Artificial Sequence
  chemically synthesized
ttacatcaggaaatttgggg

SEQ ID NO: 29041 - DNA, 20 bp, Artificial Sequence
  chemically synthesized
aggaaatttggggcagattt

SEQ ID NO: 29042 - DNA, 20 bp, Artificial Sequence
  chemically synthesized
gaaatttggggcagatttta

SEQ ID NO: 29043 - DNA, 20 bp, Artificial Sequence
  chemically synthesized
aaatttggggcagattttag

SEQ ID NO: 29044 - DNA, 20 bp, Artificial Sequence
  chemically synthesized
aatttggggcagattttaga

SEQ ID NO: 29045 - DNA, 20 bp, Artificial Sequence
  chemically synthesized
atttggggcagattttagag

SEQ ID NO: 29046 - DNA, 20 bp, Artificial Sequence
  chemically synthesized
tttggggcagattttagagg

SEQ ID NO: 29047 - DNA, 20 bp, Artificial Sequence
  chemically synthesized
ttggggcagattttagaggg

SEQ ID NO: 29048 - DNA, 20 bp, Artificial Sequence
  chemically synthesized
attttagaggggggaaatta

SEQ ID NO: 29049 - DNA, 20 bp, Artificial Sequence
  chemically synthesized
ttttagaggggggaaattat

SEQ ID NO: 29050 - DNA, 20 bp, Artificial Sequence
  chemically synthesized
ttagaggggggaaattatag

SEQ ID NO: 29051 - DNA, 20 bp, Artificial Sequence
  chemically synthesized
tagaggggggaaattatagg

SEQ ID NO: 29052 - DNA, 20 bp, Artificial Sequence
  chemically synthesized
ggggggaaattataggagga

SEQ ID NO: 29053 - DNA, 20 bp, Artificial Sequence
  chemically synthesized
gggaaattataggaggaaag

SEQ ID NO: 29054 - DNA, 20 bp, Artificial Sequence
  chemically synthesized
aggaggaaagaagttcacat

SEQ ID NO: 29055 - DNA, 20 bp, Artificial Sequence
  chemically synthesized
gaaagaagttcacatcagaa

SEQ ID NO: 29056 - DNA, 20 bp, Artificial Sequence
  chemically synthesized
cacatcagaacagacaatca

SEQ ID NO: 29057 - DNA, 20 bp, Artificial Sequence
  chemically synthesized
cacagcaatgctctattcct

SEQ ID NO: 29058 - DNA, 20 bp, Artificial Sequence
  chemically synthesized
atgctctattccttagaaat

SEQ ID NO: 29059 - DNA, 20 bp, Artificial Sequence
  chemically synthesized
tagaaattagtgccacaaat

SEQ ID NO: 29060 - DNA, 20 bp, Artificial Sequence
  chemically synthesized
aaataagttacatctacaaa

SEQ ID NO: 29061 - DNA, 20 bp, Artificial Sequence
  chemically synthesized
aataagttacatctacaaac

SEQ ID NO: 29062 - DNA, 20 bp, Artificial Sequence
  chemically synthesized
aagttacatctacaaacagg

SEQ ID NO: 29063 - DNA, 20 bp, Artificial Sequence
  chemically synthesized
caggtggtaaaaattctttc

SEQ ID NO: 29064 - DNA, 20 bp, Artificial Sequence
  chemically synthesized
ggtaaaaattctttctggcc

SEQ ID NO: 29065 - DNA, 20 bp, Artificial Sequence
  chemically synthesized
tctggcccagttaatttgca

SEQ ID NO: 29066 - DNA, 20 bp, Artificial Sequence
  chemically synthesized
aatttgcacagaacttttct

SEQ ID NO: 29067 - DNA, 20 bp, Artificial Sequence
  chemically synthesized
gcacagaacttttctcagtt

SEQ ID NO: 29068 - DNA, 20 bp, Artificial Sequence
  chemically synthesized
gtttggtattttttactgct

SEQ ID NO: 29069 - DNA, 20 bp, Artificial Sequence
  chemically synthesized
ttggtattttttactgcttg

SEQ ID NO: 29070 - DNA, 20 bp, Artificial Sequence
  chemically synthesized
ttttttactgcttggagatc

SEQ ID NO: 29071 - DNA, 20 bp, Artificial Sequence
  chemically synthesized
tttactgcttggagatccag

SEQ ID NO: 29072 - DNA, 20 bp, Artificial Sequence
  chemically synthesized
tactgcttggagatccagaa

SEQ ID NO: 29073 - DNA, 20 bp, Artificial Sequence
  chemically synthesized
ttggagatccagaagagaat

SEQ ID NO: 29074 - DNA, 20 bp, Artificial Sequence
  chemically synthesized
gaagagaattagaaacaaca

SEQ ID NO: 29075 - DNA, 20 bp, Artificial Sequence
  chemically synthesized
aacaacatagcaaattaaaa

SEQ ID NO: 29076 - DNA, 20 bp, Artificial Sequence
  chemically synthesized
acaacatagcaaattaaaat

SEQ ID NO: 29077 - DNA, 20 bp, Artificial Sequence
  chemically synthesized
taaaataggtttgtcaataa

SEQ ID NO: 29078 - DNA, 20 bp, Artificial Sequence
  chemically synthesized
aaataggtttgtcaataata

SEQ ID NO: 29079 - DNA, 20 bp, Artificial Sequence
  chemically synthesized
ggtttgtcaataatagagct

SEQ ID NO: 29080 - DNA, 20 bp, Artificial Sequence
  chemically synthesized
gctcagacacctgtgtgctg

SEQ ID NO: 29081 - DNA, 20 bp, Artificial Sequence
  chemically synthesized
gtgtgctgtagattcacata

SEQ ID NO: 29082 - DNA, 20 bp, Artificial Sequence
  chemically synthesized
tgtgctgtagattcacatac

SEQ ID NO: 29083 - DNA, 20 bp, Artificial Sequence
  chemically synthesized
cacatacaggccgtgaacct

SEQ ID NO: 29084 - DNA, 20 bp, Artificial Sequence
  chemically synthesized
atacaggccgtgaacctaag

SEQ ID NO: 29085 - DNA, 20 bp, Artificial Sequence
  chemically synthesized
tacaggccgtgaacctaagt

SEQ ID NO: 29086 - DNA, 20 bp, Artificial Sequence
  chemically synthesized
acaggccgtgaacctaagtg

SEQ ID NO: 29087 - DNA, 20 bp, Artificial Sequence
  chemically synthesized
aatcctacctatccaccttc

SEQ ID NO: 29088 - DNA, 20 bp, Artificial Sequence
  chemically synthesized
ctacctatccaccttctggc

SEQ ID NO: 29089 - DNA, 20 bp, Artificial Sequence
  chemically synthesized
caccttctggctagattacc

SEQ ID NO: 29090 - DNA, 20 bp, Artificial Sequence
  chemically synthesized
tctggctagattacctagct

SEQ ID NO: 29091 - DNA, 20 bp, Artificial Sequence
  chemically synthesized
agattacctagcttagtgaa

SEQ ID NO: 29092 - DNA, 20 bp, Artificial Sequence
  chemically synthesized
tacctagcttagtgaaaaga

SEQ ID NO: 29093 - DNA, 20 bp, Artificial Sequence
  chemically synthesized
tgaaaagatagccaaataat

SEQ ID NO: 29094 - DNA, 20 bp, Artificial Sequence
  chemically synthesized
taataaataatgactgtcta

SEQ ID NO: 29095 - DNA, 20 bp, Artificial Sequence
  chemically synthesized
taaataatgactgtctacag

SEQ ID NO: 29096 - DNA, 20 bp, Artificial Sequence
  chemically synthesized
gaactaccttatactgtata

SEQ ID NO: 29097 - DNA, 20 bp, Artificial Sequence
  chemically synthesized
gcattatttcacctgctctc

SEQ ID NO: 29098 - DNA, 20 bp, Artificial Sequence
  chemically synthesized
cattatttcacctgctctct

SEQ ID NO: 29099 - DNA, 20 bp, Artificial Sequence
  chemically synthesized
atttcacctgctctctggga

SEQ ID NO: 29100 - DNA, 20 bp, Artificial Sequence
  chemically synthesized
atctcacgacttctacttta

SEQ ID NO: 29101 - DNA, 20 bp, Artificial Sequence
  chemically synthesized
ctcacgacttctactttatg

SEQ ID NO: 29102 - DNA, 20 bp, Artificial Sequence
  chemically synthesized
tcacgacttctactttatgg

SEQ ID NO: 29103 - DNA, 20 bp, Artificial Sequence
  chemically synthesized
cgacttctactttatggagg

SEQ ID NO: 29104 - DNA, 20 bp, Artificial Sequence
  chemically synthesized
acttctactttatggaggtg

SEQ ID NO: 29105 - DNA, 20 bp, Artificial Sequence
  chemically synthesized
actttatggaggtggagatt

SEQ ID NO: 29106 - DNA, 20 bp, Artificial Sequence
  chemically synthesized
ctttatggaggtggagattg

SEQ ID NO: 29107 - DNA, 20 bp, Artificial Sequence
  chemically synthesized
ggtggagattgaggcttacc

SEQ ID NO: 29108 - DNA, 20 bp, Artificial Sequence
  chemically synthesized
gtggagattgaggcttacca

SEQ ID NO: 29109 - DNA, 20 bp, Artificial Sequence
  chemically synthesized
gattgaggcttaccaaggtt

SEQ ID NO: 29110 - DNA, 20 bp, Artificial Sequence
  chemically synthesized
attgaggcttaccaaggtta

SEQ ID NO: 29111 - DNA, 20 bp, Artificial Sequence
  chemically synthesized
ttgaggcttaccaaggttaa

SEQ ID NO: 29112 - DNA, 20 bp, Artificial Sequence
  chemically synthesized
taccaaggttaagggcttgc

SEQ ID NO: 29113 - DNA, 20 bp, Artificial Sequence
  chemically synthesized
ccaaggttaagggcttgcca

SEQ ID NO: 29114 - DNA, 20 bp, Artificial Sequence
  chemically synthesized
caaggttaagggcttgccag

SEQ ID NO: 29115 - DNA, 20 bp, Artificial Sequence
  chemically synthesized
gggcttgccagaggccacat

SEQ ID NO: 29116 - DNA, 20 bp, Artificial Sequence
  chemically synthesized
ttgccagaggccacatcagt

SEQ ID NO: 29117 - DNA, 20 bp, Artificial Sequence
  chemically synthesized
gccagaggccacatcagtaa

SEQ ID NO: 29118 - DNA, 20 bp, Artificial Sequence
  chemically synthesized
cagaggccacatcagtaaga

SEQ ID NO: 29119 - DNA, 20 bp, Artificial Sequence
  chemically synthesized
ggccacatcagtaagagaga

SEQ ID NO: 29120 - DNA, 20 bp, Artificial Sequence
  chemically synthesized
cacatcagtaagagagaaag

SEQ ID NO: 29121 - DNA, 20 bp, Artificial Sequence
  chemically synthesized
catcagtaagagagaaagca

SEQ ID NO: 29122 - DNA, 20 bp, Artificial Sequence
  chemically synthesized
cagtaagagagaaagcagag

SEQ ID NO: 29123 - DNA, 20 bp, Artificial Sequence
  chemically synthesized
aagagagaaagcagagaagc

SEQ ID NO: 29124 - DNA, 20 bp, Artificial Sequence
  chemically synthesized
agagagaaagcagagaagcc

SEQ ID NO: 29125 - DNA, 20 bp, Artificial Sequence
  chemically synthesized
agcagagaagccaggttttc

SEQ ID NO: 29126 - DNA, 20 bp, Artificial Sequence
  chemically synthesized
aggttttctggtttcttgtc

SEQ ID NO: 29127 - DNA, 20 bp, Artificial Sequence
  chemically synthesized
gttttctggtttcttgtcca

SEQ ID NO: 29128 - DNA, 20 bp, Artificial Sequence
  chemically synthesized
aaactctgtttaactgatca

SEQ ID NO: 29129 - DNA, 20 bp, Artificial Sequence
  chemically synthesized
aactctgtttaactgatcaa

SEQ ID NO: 29130 - DNA, 20 bp, Artificial Sequence
  chemically synthesized
actctgtttaactgatcaaa

SEQ ID NO: 29131 - DNA, 20 bp, Artificial Sequence
  chemically synthesized
tctgtttaactgatcaaagg

SEQ ID NO: 29132 - DNA, 20 bp, Artificial Sequence
  chemically synthesized
gggagtatcttttcctgtgt

SEQ ID NO: 29133 - DNA, 20 bp, Artificial Sequence
  chemically synthesized
cttttcctgtgttagcacat

SEQ ID NO: 29134 - DNA, 20 bp, Artificial Sequence
  chemically synthesized
acataagtcataaatgttca

SEQ ID NO: 29135 - DNA, 20 bp, Artificial Sequence
  chemically synthesized
tgttcacagacacacacatg

SEQ ID NO: 29136 - DNA, 20 bp, Artificial Sequence
  chemically synthesized
acacatgtggcttacacata

SEQ ID NO: 29137 - DNA, 20 bp, Artificial Sequence
  chemically synthesized
gtggcttacacatacagacc

SEQ ID NO: 29138 - DNA, 20 bp, Artificial Sequence
  chemically synthesized
tggcttacacatacagaccc

SEQ ID NO: 29139 - DNA, 20 bp, Artificial Sequence
  chemically synthesized
ttacacatacagacccagga

SEQ ID NO: 29140 - DNA, 20 bp, Artificial Sequence
  chemically synthesized
tacagacccaggatggcctt

SEQ ID NO: 29141 - DNA, 20 bp, Artificial Sequence
  chemically synthesized
acccaggatggcctttggta

SEQ ID NO: 29142 - DNA, 20 bp, Artificial Sequence
  chemically synthesized
cccaggatggcctttggtaa

SEQ ID NO: 29143 - DNA, 20 bp, Artificial Sequence
  chemically synthesized
tggcctttggtaaaggcatg

SEQ ID NO: 29144 - DNA, 20 bp, Artificial Sequence
  chemically synthesized
gcctttggtaaaggcatgca

SEQ ID NO: 29145 - DNA, 20 bp, Artificial Sequence
  chemically synthesized
gagttgcctcttcctaccaa

SEQ ID NO: 29146 - DNA, 20 bp, Artificial Sequence
  chemically synthesized
taccaacagatgtgtgcact

SEQ ID NO: 29147 - DNA, 20 bp, Artificial Sequence
  chemically synthesized
aacagatgtgtgcactgaga

SEQ ID NO: 29148 - DNA, 20 bp, Artificial Sequence
  chemically synthesized
acagatgtgtgcactgagaa

SEQ ID NO: 29149 - DNA, 20 bp, Artificial Sequence
  chemically synthesized
cagatgtgtgcactgagaaa

SEQ ID NO: 29150 - DNA, 20 bp, Artificial Sequence
  chemically synthesized
gatgtgtgcactgagaaagg

SEQ ID NO: 29151 - DNA, 20 bp, Artificial Sequence
  chemically synthesized
atgtgtgcactgagaaaggg

SEQ ID NO: 29152 - DNA, 20 bp, Artificial Sequence
  chemically synthesized
gcactgagaaagggaggttg

SEQ ID NO: 29153 - DNA, 20 bp, Artificial Sequence
  chemically synthesized
ttgccatcacctttcccctg

SEQ ID NO: 29154 - DNA, 20 bp, Artificial Sequence
  chemically synthesized
acaaataaccctgattgcac

SEQ ID NO: 29155 - DNA, 20 bp, Artificial Sequence
  chemically synthesized
aataaccctgattgcacgag

SEQ ID NO: 29156 - DNA, 20 bp, Artificial Sequence
  chemically synthesized
gtttgtgacttcctatcaat

SEQ ID NO: 29157 - DNA, 20 bp, Artificial Sequence
  chemically synthesized
gtgacttcctatcaattagt

SEQ ID NO: 29158 - DNA, 20 bp, Artificial Sequence
  chemically synthesized
tgacttcctatcaattagtt

SEQ ID NO: 29159 - DNA, 20 bp, Artificial Sequence
  chemically synthesized
tatcaattagttgggacttc

SEQ ID NO: 29160 - DNA, 20 bp, Artificial Sequence
  chemically synthesized
attagttgggacttccagac

SEQ ID NO: 29161 - DNA, 20 bp, Artificial Sequence
  chemically synthesized
agttgggacttccagacaag

SEQ ID NO: 29162 - DNA, 20 bp, Artificial Sequence
  chemically synthesized
agacaagaagttatttcata

SEQ ID NO: 29163 - DNA, 20 bp, Artificial Sequence
  chemically synthesized
cctatgtgttgctgaaacat

SEQ ID NO: 29164 - DNA, 20 bp, Artificial Sequence
  chemically synthesized
ttgctgaaacataagaccat

SEQ ID NO: 29165 - DNA, 20 bp, Artificial Sequence
  chemically synthesized
tgctgaaacataagaccatt

SEQ ID NO: 29166 - DNA, 20 bp, Artificial Sequence
  chemically synthesized
gctgaaacataagaccatta

SEQ ID NO: 29167 - DNA, 20 bp, Artificial Sequence
  chemically synthesized
gaccattagggtttctgtga

SEQ ID NO: 29168 - DNA, 20 bp, Artificial Sequence
  chemically synthesized
ctgaactccttgctgatgcc

SEQ ID NO: 29169 - DNA, 20 bp, Artificial Sequence
  chemically synthesized
actccttgctgatgcctaga

SEQ ID NO: 29170 - DNA, 20 bp, Artificial Sequence
  chemically synthesized
tccttgctgatgcctagaaa

SEQ ID NO: 29171 - DNA, 20 bp, Artificial Sequence
  chemically synthesized
aaagagtgacaccacttcca

SEQ ID NO: 29172 - DNA, 20 bp, Artificial Sequence
  chemically synthesized
aagagtgacaccacttccaa

SEQ ID NO: 29173 - DNA, 20 bp, Artificial Sequence
  chemically synthesized
agagtgacaccacttccaaa

SEQ ID NO: 29174 - DNA, 20 bp, Artificial Sequence
  chemically synthesized
agtgacaccacttccaaagg

SEQ ID NO: 29175 - DNA, 20 bp, Artificial Sequence
  chemically synthesized
gtgacaccacttccaaaggg

SEQ ID NO: 29176 - DNA, 20 bp, Artificial Sequence
  chemically synthesized
caccacttccaaagggaggc

SEQ ID NO: 29177 - DNA, 20 bp, Artificial Sequence
  chemically synthesized
cagaactgaaacaacaatcc

SEQ ID NO: 29178 - DNA, 20 bp, Artificial Sequence
  chemically synthesized
agaactgaaacaacaatcct

SEQ ID NO: 29179 - DNA, 20 bp, Artificial Sequence
  chemically synthesized
aaacaacaatcctgggtctt

SEQ ID NO: 29180 - DNA, 20 bp, Artificial Sequence
  chemically synthesized
acaatcctgggtcttgagac

SEQ ID NO: 29181 - DNA, 20 bp, Artificial Sequence
  chemically synthesized
cctgggtcttgagacaagtt

SEQ ID NO: 29182 - DNA, 20 bp, Artificial Sequence
  chemically synthesized
tcagcctttgtaactgcact

SEQ ID NO: 29183 - DNA, 20 bp, Artificial Sequence
  chemically synthesized
gcctttgtaactgcacttgg

SEQ ID NO: 29184 - DNA, 20 bp, Artificial Sequence
  chemically synthesized
ggtcactacactttcatttc

SEQ ID NO: 29185 - DNA, 20 bp, Artificial Sequence
  chemically synthesized
actttttatatatttcttct

SEQ ID NO: 29186 - DNA, 20 bp, Artificial Sequence
  chemically synthesized
tttttatatatttcttctca

SEQ ID NO: 29187 - DNA, 20 bp, Artificial Sequence
  chemically synthesized
tatatatttcttctcagagt

SEQ ID NO: 29188 - DNA, 20 bp, Artificial Sequence
  chemically synthesized
ctcagagtcagtttgtaaat

SEQ ID NO: 29189 - DNA, 20 bp, Artificial Sequence
  chemically synthesized
agagtcagtttgtaaataag

SEQ ID NO: 29190 - DNA, 20 bp, Artificial Sequence
  chemically synthesized
aaataagtggatatctctaa

SEQ ID NO: 29191 - DNA, 20 bp, Artificial Sequence
  chemically synthesized
taagtggatatctctaaaag

SEQ ID NO: 29192 - DNA, 20 bp, Artificial Sequence
  chemically synthesized
aagtggatatctctaaaagt

SEQ ID NO: 29193 - DNA, 20 bp, Artificial Sequence
  chemically synthesized
tctctaaaagtgggattttt

SEQ ID NO: 29194 - DNA, 20 bp, Artificial Sequence
  chemically synthesized
ctctaaaagtgggattttta

SEQ ID NO: 29195 - DNA, 20 bp, Artificial Sequence
  chemically synthesized
tctaaaagtgggatttttaa

SEQ ID NO: 29196 - DNA, 20 bp, Artificial Sequence
  chemically synthesized
ctaaaagtgggatttttaag

SEQ ID NO: 29197 - DNA, 20 bp, Artificial Sequence
  chemically synthesized
aagtgggatttttaaggggc

SEQ ID NO: 29198 - DNA, 20 bp, Artificial Sequence
  chemically synthesized
gtgggatttttaaggggcaa

SEQ ID NO: 29199 - DNA, 20 bp, Artificial Sequence
  chemically synthesized
tgggatttttaaggggcaag

SEQ ID NO: 29200 - DNA, 20 bp, Artificial Sequence
  chemically synthesized
tttaaggggcaagaggataa

SEQ ID NO: 29201 - DNA, 20 bp, Artificial Sequence
  chemically synthesized
aaggggcaagaggataacag

SEQ ID NO: 29202 - DNA, 20 bp, Artificial Sequence
  chemically synthesized
gggcaagaggataacagaag

SEQ ID NO: 29203 - DNA, 20 bp, Artificial Sequence
  chemically synthesized
gaggataacagaagtggata

SEQ ID NO: 29204 - DNA, 20 bp, Artificial Sequence
  chemically synthesized
aggataacagaagtggataa

SEQ ID NO: 29205 - DNA, 20 bp, Artificial Sequence
  chemically synthesized
ttgttttatcctcttcactg

SEQ ID NO: 29206 - DNA, 20 bp, Artificial Sequence
  chemically synthesized
gttttatcctcttcactgtg

SEQ ID NO: 29207 - DNA, 20 bp, Artificial Sequence
  chemically synthesized
ttatcctcttcactgtggag

SEQ ID NO: 29208 - DNA, 20 bp, Artificial Sequence
  chemically synthesized
aagaaccccctcaaaacaaa

SEQ ID NO: 29209 - DNA, 20 bp, Artificial Sequence
  chemically synthesized
ctcaaaacaaacagaacaaa

SEQ ID NO: 29210 - DNA, 20 bp, Artificial Sequence
  chemically synthesized
aaaaagactgtcttttccca

SEQ ID NO: 29211 - DNA, 20 bp, Artificial Sequence
  chemically synthesized
gtcttttcccatggctttta

SEQ ID NO: 29212 - DNA, 20 bp, Artificial Sequence
  chemically synthesized
cccatggcttttaaagttga

SEQ ID NO: 29213 - DNA, 20 bp, Artificial Sequence
  chemically synthesized
agacaacaaaaatttattta

SEQ ID NO: 29214 - DNA, 20 bp, Artificial Sequence
  chemically synthesized
aatttatttacagaatttat

SEQ ID NO: 29215 - DNA, 20 bp, Artificial Sequence
  chemically synthesized
atttatttacagaatttatt

SEQ ID NO: 29216 - DNA, 20 bp, Artificial Sequence
  chemically synthesized
ttacagaatttattaggaaa

SEQ ID NO: 29217 - DNA, 20 bp, Artificial Sequence
  chemically synthesized
attaggaaacggtattgtgt

SEQ ID NO: 29218 - DNA, 20 bp, Artificial Sequence
  chemically synthesized
ttaggaaacggtattgtgtt

SEQ ID NO: 29219 - DNA, 20 bp, Artificial Sequence
  chemically synthesized
taggaaacggtattgtgtta

SEQ ID NO: 29220 - DNA, 20 bp, Artificial Sequence
  chemically synthesized
aaacggtattgtgttagggc

SEQ ID NO: 29221 - DNA, 20 bp, Artificial Sequence
  chemically synthesized
tttttttttttttttttttt

SEQ ID NO: 29222 - DNA, 20 bp, Artificial Sequence
  chemically synthesized
ttttttttttttttttaaga

SEQ ID NO: 29223 - DNA, 20 bp, Artificial Sequence
  chemically synthesized
cagaatctcgctctgtcacc

SEQ ID NO: 29224 - DNA, 20 bp, Artificial Sequence
  chemically synthesized
agaatctcgctctgtcaccc

SEQ ID NO: 29225 - DNA, 20 bp, Artificial Sequence
  chemically synthesized
tctcgctctgtcacccaggc

SEQ ID NO: 29226 - DNA, 20 bp, Artificial Sequence
  chemically synthesized
tcgctctgtcacccaggctg

SEQ ID NO: 29227 - DNA, 20 bp, Artificial Sequence
  chemically synthesized
ctgtcacccaggctggagtg

SEQ ID NO: 29228 - DNA, 20 bp, Artificial Sequence
  chemically synthesized
tcacccaggctggagtgcag

SEQ ID NO: 29229 - DNA, 20 bp, Artificial Sequence
  chemically synthesized
ccaggctggagtgcagtggc

SEQ ID NO: 29230 - DNA, 20 bp, Artificial Sequence
  chemically synthesized
caggctggagtgcagtggca

SEQ ID NO: 29231 - DNA, 20 bp, Artificial Sequence
  chemically synthesized
ggagtgcagtggcaaggact

SEQ ID NO: 29232 - DNA, 20 bp, Artificial Sequence
  chemically synthesized
tcaccacaacctccgcctac

SEQ ID NO: 29233 - DNA, 20 bp, Artificial Sequence
  chemically synthesized
caccacaacctccgcctact

SEQ ID NO: 29234 - DNA, 20 bp, Artificial Sequence
  chemically synthesized
aacctccgcctactgggttc

SEQ ID NO: 29235 - DNA, 20 bp, Artificial Sequence
  chemically synthesized
acctccgcctactgggttca

SEQ ID NO: 29236 - DNA, 20 bp, Artificial Sequence
  chemically synthesized
cctccgcctactgggttcaa

SEQ ID NO: 29237 - DNA, 20 bp, Artificial Sequence
  chemically synthesized
ttcaagggatcctcctgcct

SEQ ID NO: 29238 - DNA, 20 bp, Artificial Sequence
  chemically synthesized
tcctcctgcctcagcttccc

SEQ ID NO: 29239 - DNA, 20 bp, Artificial Sequence
  chemically synthesized
tcctgcctcagcttcccaag

SEQ ID NO: 29240 - DNA, 20 bp, Artificial Sequence
  chemically synthesized
gcctcagcttcccaagtagc

SEQ ID NO: 29241 - DNA, 20 bp, Artificial Sequence
  chemically synthesized
cctcagcttcccaagtagct

SEQ ID NO: 29242 - DNA, 20 bp, Artificial Sequence
  chemically synthesized
ttcccaagtagctgggacta

SEQ ID NO: 29243 - DNA, 20 bp, Artificial Sequence
  chemically synthesized
tcccaagtagctgggactac

SEQ ID NO: 29244 - DNA, 20 bp, Artificial Sequence
  chemically synthesized
caggcacgcgccaccacgcc

SEQ ID NO: 29245 - DNA, 20 bp, Artificial Sequence
  chemically synthesized
gctaatattttttgtatttt

SEQ ID NO: 29246 - DNA, 20 bp, Artificial Sequence
  chemically synthesized
aatattttttgtatttttag

SEQ ID NO: 29247 - DNA, 20 bp, Artificial Sequence
  chemically synthesized
ttttgtatttttagtagata

SEQ ID NO: 29248 - DNA, 20 bp, Artificial Sequence
  chemically synthesized
gatacggcgtttcaccgtgt

SEQ ID NO: 29249 - DNA, 20 bp, Artificial Sequence
  chemically synthesized
cggcgtttcaccgtgttagc

SEQ ID NO: 29250 - DNA, 20 bp, Artificial Sequence
  chemically synthesized
ggcgtttcaccgtgttagcc

SEQ ID NO: 29251 - DNA, 20 bp, Artificial Sequence
  chemically synthesized
tttcaccgtgttagccagga

SEQ ID NO: 29252 - DNA, 20 bp, Artificial Sequence
  chemically synthesized
gatctcgtgatccaccctcc

SEQ ID NO: 29253 - DNA, 20 bp, Artificial Sequence
  chemically synthesized
atctcgtgatccaccctcct

SEQ ID NO: 29254 - DNA, 20 bp, Artificial Sequence
  chemically synthesized
ccaccctcctaggcctccca

SEQ ID NO: 29255 - DNA, 20 bp, Artificial Sequence
  chemically synthesized
tcctaggcctcccatagtgc

SEQ ID NO: 29256 - DNA, 20 bp, Artificial Sequence
  chemically synthesized
cctaggcctcccatagtgct

SEQ ID NO: 29257 - DNA, 20 bp, Artificial Sequence
  chemically synthesized
gcctcccatagtgctgggat

SEQ ID NO: 29258 - DNA, 20 bp, Artificial Sequence
  chemically synthesized
ctcccatagtgctgggatta

SEQ ID NO: 29259 - DNA, 20 bp, Artificial Sequence
  chemically synthesized
tcccatagtgctgggattag

SEQ ID NO: 29260 - DNA, 20 bp, Artificial Sequence
  chemically synthesized
aggcattgcactacctcacc

SEQ ID NO: 29261 - DNA, 20 bp, Artificial Sequence
  chemically synthesized
ttgcactacctcacctggcc

SEQ ID NO: 29262 - DNA, 20 bp, Artificial Sequence
  chemically synthesized
tgcactacctcacctggcct

SEQ ID NO: 29263 - DNA, 20 bp, Artificial Sequence
  chemically synthesized
gcactacctcacctggccta

SEQ ID NO: 29264 - DNA, 20 bp, Artificial Sequence
  chemically synthesized
tacctcacctggcctagggc

SEQ ID NO: 29265 - DNA, 20 bp, Artificial Sequence
  chemically synthesized
agacttttgaaaccccatac

SEQ ID NO: 29266 - DNA, 20 bp, Artificial Sequence
  chemically synthesized
cccatacaagattgacaatt

SEQ ID NO: 29267 - DNA, 20 bp, Artificial Sequence
  chemically synthesized
ccatacaagattgacaattt

SEQ ID NO: 29268 - DNA, 20 bp, Artificial Sequence
  chemically synthesized
tacaagattgacaatttggg

SEQ ID NO: 29269 - DNA, 20 bp, Artificial Sequence
  chemically synthesized
aagacatctctctgtgtgat

SEQ ID NO: 29270 - DNA, 20 bp, Artificial Sequence
  chemically synthesized
atctctctgtgtgatgagtc

SEQ ID NO: 29271 - DNA, 20 bp, Artificial Sequence
  chemically synthesized
tgtgtgatgagtcaagatca

SEQ ID NO: 29272 - DNA, 20 bp, Artificial Sequence
  chemically synthesized
agatcatggttatccatgaa

SEQ ID NO: 29273 - DNA, 20 bp, Artificial Sequence
  chemically synthesized
tcatggttatccatgaatgg

SEQ ID NO: 29274 - DNA, 20 bp, Artificial Sequence
  chemically synthesized
tggttatccatgaatggcag

SEQ ID NO: 29275 - DNA, 20 bp, Artificial Sequence
  chemically synthesized
ttatccatgaatggcagaag

SEQ ID NO: 29276 - DNA, 20 bp, Artificial Sequence
  chemically synthesized
tatccatgaatggcagaagc

SEQ ID NO: 29277 - DNA, 20 bp, Artificial Sequence
  chemically synthesized
atccatgaatggcagaagca

SEQ ID NO: 29278 - DNA, 20 bp, Artificial Sequence
  chemically synthesized
catgaatggcagaagcaggg

SEQ ID NO: 29279 - DNA, 20 bp, Artificial Sequence
  chemically synthesized
tgaatggcagaagcagggaa

SEQ ID NO: 29280 - DNA, 20 bp, Artificial Sequence
  chemically synthesized
gaatggcagaagcagggaag

SEQ ID NO: 29281 - DNA, 20 bp, Artificial Sequence
  chemically synthesized
gaagaggctcacaaatctgc

SEQ ID NO: 29282 - DNA, 20 bp, Artificial Sequence
  chemically synthesized
aagaggctcacaaatctgcc

SEQ ID NO: 29283 - DNA, 20 bp, Artificial Sequence
  chemically synthesized
agaggctcacaaatctgcca

SEQ ID NO: 29284 - DNA, 20 bp, Artificial Sequence
  chemically synthesized
gaggctcacaaatctgccag

SEQ ID NO: 29285 - DNA, 20 bp, Artificial Sequence
  chemically synthesized
ttctcactgtgtcctctctg

SEQ ID NO: 29286 - DNA, 20 bp, Artificial Sequence
  chemically synthesized
ctcactgtgtcctctctgca

SEQ ID NO: 29287 - DNA, 20 bp, Artificial Sequence
  chemically synthesized
actgtgtcctctctgcagag

SEQ ID NO: 29288 - DNA, 20 bp, Artificial Sequence
  chemically synthesized
ctctctgcagagtggaactt

SEQ ID NO: 29289 - DNA, 20 bp, Artificial Sequence
  chemically synthesized
cagagtggaacttcagattg

SEQ ID NO: 29290 - DNA, 20 bp, Artificial Sequence
  chemically synthesized
gagtggaacttcagattgca

SEQ ID NO: 29291 - DNA, 20 bp, Artificial Sequence
  chemically synthesized
gtggaacttcagattgcaga

SEQ ID NO: 29292 - DNA, 20 bp, Artificial Sequence
  chemically synthesized
cagattgcagagagataaat

SEQ ID NO: 29293 - DNA, 20 bp, Artificial Sequence
  chemically synthesized
ataaattggttgcctgacat

SEQ ID NO: 29294 - DNA, 20 bp, Artificial Sequence
  chemically synthesized
ttggttgcctgacatgagca

SEQ ID NO: 29295 - DNA, 20 bp, Artificial Sequence
  chemically synthesized
tgcctgacatgagcacagac

SEQ ID NO: 29296 - DNA, 20 bp, Artificial Sequence
  chemically synthesized
cctgacatgagcacagacta

SEQ ID NO: 29297 - DNA, 20 bp, Artificial Sequence
  chemically synthesized
ctgacatgagcacagactag

SEQ ID NO: 29298 - DNA, 20 bp, Artificial Sequence
  chemically synthesized
catgagcacagactagagga

SEQ ID NO: 29299 - DNA, 20 bp, Artificial Sequence
  chemically synthesized
tgagcacagactagaggaca

SEQ ID NO: 29300 - DNA, 20 bp, Artificial Sequence
  chemically synthesized
cagactagaggacagagtcc

SEQ ID NO: 29301 - DNA, 20 bp, Artificial Sequence
  chemically synthesized
aggacagagtcccagccact

SEQ ID NO: 29302 - DNA, 20 bp, Artificial Sequence
  chemically synthesized
cagagtcccagccacttgga

SEQ ID NO: 29303 - DNA, 20 bp, Artificial Sequence
  chemically synthesized
gagtcccagccacttggatg

SEQ ID NO: 29304 - DNA, 20 bp, Artificial Sequence
  chemically synthesized
agtcccagccacttggatgg

SEQ ID NO: 29305 - DNA, 20 bp, Artificial Sequence
  chemically synthesized
tcccagccacttggatggag

SEQ ID NO: 29306 - DNA, 20 bp, Artificial Sequence
  chemically synthesized
tggatggaggagaccaaata

SEQ ID NO: 29307 - DNA, 20 bp, Artificial Sequence
  chemically synthesized
ggatggaggagaccaaatac

SEQ ID NO: 29308 - DNA, 20 bp, Artificial Sequence
  chemically synthesized
gatggaggagaccaaataca

SEQ ID NO: 29309 - DNA, 20 bp, Artificial Sequence
  chemically synthesized
ggcattgtttttactttccc

SEQ ID NO: 29310 - DNA, 20 bp, Artificial Sequence
  chemically synthesized
ttactttcccaagccttttg

SEQ ID NO: 29311 - DNA, 20 bp, Artificial Sequence
  chemically synthesized
tactttcccaagccttttgt

SEQ ID NO: 29312 - DNA, 20 bp, Artificial Sequence
  chemically synthesized
caagccttttgtgggctgtt

SEQ ID NO: 29313 - DNA, 20 bp, Artificial Sequence
  chemically synthesized
ttattattattattattgtt

SEQ ID NO: 29314 - DNA, 20 bp, Artificial Sequence
  chemically synthesized
tattattattattgttgaga

SEQ ID NO: 29315 - DNA, 20 bp, Artificial Sequence
  chemically synthesized
ttattattattgttgagatg

SEQ ID NO: 29316 - DNA, 20 bp, Artificial Sequence
  chemically synthesized
tggagtctcactctattgcc

SEQ ID NO: 29317 - DNA, 20 bp, Artificial Sequence
  chemically synthesized
ggagtctcactctattgccc

SEQ ID NO: 29318 - DNA, 20 bp, Artificial Sequence
  chemically synthesized
tctcactctattgcccaggc

SEQ ID NO: 29319 - DNA, 20 bp, Artificial Sequence
  chemically synthesized
tcactctattgcccaggctg

SEQ ID NO: 29320 - DNA, 20 bp, Artificial Sequence
  chemically synthesized
ttgcccaggctggagtgcaa

SEQ ID NO: 29321 - DNA, 20 bp, Artificial Sequence
  chemically synthesized
ggagtgcaatggcacgatct

SEQ ID NO: 29322 - DNA, 20 bp, Artificial Sequence
  chemically synthesized
tcactgcaacctctacctcc

SEQ ID NO: 29323 - DNA, 20 bp, Artificial Sequence
  chemically synthesized
cactgcaacctctacctccc

SEQ ID NO: 29324 - DNA, 20 bp, Artificial Sequence
  chemically synthesized
aacctctacctcccgggttc

SEQ ID NO: 29325 - DNA, 20 bp, Artificial Sequence
  chemically synthesized
ctctacctcccgggttcaag

SEQ ID NO: 29326 - DNA, 20 bp, Artificial Sequence
  chemically synthesized
ttcaagtggttctcctgcct

SEQ ID NO: 29327 - DNA, 20 bp, Artificial Sequence
  chemically synthesized
ttctcctgcctcagcctcct

SEQ ID NO: 29328 - DNA, 20 bp, Artificial Sequence
  chemically synthesized
tcctgcctcagcctcctgag

SEQ ID NO: 29329 - DNA, 20 bp, Artificial Sequence
  chemically synthesized
gcctcagcctcctgagtggc

SEQ ID NO: 29330 - DNA, 20 bp, Artificial Sequence
  chemically synthesized
cctcagcctcctgagtggct

SEQ ID NO: 29331 - DNA, 20 bp, Artificial Sequence
  chemically synthesized
ctcctgagtggctgggatta

SEQ ID NO: 29332 - DNA, 20 bp, Artificial Sequence
  chemically synthesized
tcctgagtggctgggattac

SEQ ID NO: 29333 - DNA, 20 bp, Artificial Sequence
  chemically synthesized
gattacaggtgcgtaccacc

SEQ ID NO: 29334 - DNA, 20 bp, Artificial Sequence
  chemically synthesized
ctggctaatttttgtatttt

SEQ ID NO: 29335 - DNA, 20 bp, Artificial Sequence
  chemically synthesized
gctaatttttgtatttttag

SEQ ID NO: 29336 - DNA, 20 bp, Artificial Sequence
  chemically synthesized
taatttttgtatttttagta

SEQ ID NO: 29337 - DNA, 20 bp, Artificial Sequence
  chemically synthesized
ttttgtatttttagtagaga

SEQ ID NO: 29338 - DNA, 20 bp, Artificial Sequence
  chemically synthesized
tttgtatttttagtagagac

SEQ ID NO: 29339 - DNA, 20 bp, Artificial Sequence
  chemically synthesized
ttgtatttttagtagagacg

SEQ ID NO: 29340 - DNA, 20 bp, Artificial Sequence
  chemically synthesized
gagacggggtttcaccatgt

SEQ ID NO: 29341 - DNA, 20 bp, Artificial Sequence
  chemically synthesized
cggggtttcaccatgttggt

SEQ ID NO: 29342 - DNA, 20 bp, Artificial Sequence
  chemically synthesized
ggggtttcaccatgttggtc

SEQ ID NO: 29343 - DNA, 20 bp, Artificial Sequence
  chemically synthesized
tttcaccatgttggtcaggc

SEQ ID NO: 29344 - DNA, 20 bp, Artificial Sequence
  chemically synthesized
tctcgaactcctgacctcat

SEQ ID NO: 29345 - DNA, 20 bp, Artificial Sequence
  chemically synthesized
acctcatgagccacctgcct

SEQ ID NO: 29346 - DNA, 20 bp, Artificial Sequence
  chemically synthesized
ccacctgcctcggcctccca

SEQ ID NO: 29347 - DNA, 20 bp, Artificial Sequence
  chemically synthesized
gcctcggcctcccaaagtgc

SEQ ID NO: 29348 - DNA, 20 bp, Artificial Sequence
  chemically synthesized
cctcggcctcccaaagtgct

SEQ ID NO: 29349 - DNA, 20 bp, Artificial Sequence
  chemically synthesized
ctcccaaagtgctgggatta

SEQ ID NO: 29350 - DNA, 20 bp, Artificial Sequence
  chemically synthesized
tcccaaagtgctgggattac

SEQ ID NO: 29351 - DNA, 20 bp, Artificial Sequence
  chemically synthesized
agtgctgggattacaggtgt

SEQ ID NO: 29352 - DNA, 20 bp, Artificial Sequence
  chemically synthesized
caggtgtaagccaccgcgcc

SEQ ID NO: 29353 - DNA, 20 bp, Artificial Sequence
  chemically synthesized
tgtaagccaccgcgcccgga

SEQ ID NO: 29354 - DNA, 20 bp, Artificial Sequence
  chemically synthesized
gattattacactgtataaaa

SEQ ID NO: 29355 - DNA, 20 bp, Artificial Sequence
  chemically synthesized
attattacactgtataaaaa

SEQ ID NO: 29356 - DNA, 20 bp, Artificial Sequence
  chemically synthesized
actgtataaaaaaggtctgt

SEQ ID NO: 29357 - DNA, 20 bp, Artificial Sequence
  chemically synthesized
taaaaaaggtctgttagaat

SEQ ID NO: 29358 - DNA, 20 bp, Artificial Sequence
  chemically synthesized
aaaaaaggtctgttagaatt

SEQ ID NO: 29359 - DNA, 20 bp, Artificial Sequence
  chemically synthesized
aaaaaggtctgttagaattg

SEQ ID NO: 29360 - DNA, 20 bp, Artificial Sequence
  chemically synthesized
gttagaattggggtccatga

SEQ ID NO: 29361 - DNA, 20 bp, Artificial Sequence
  chemically synthesized
ttagaattggggtccatgat

SEQ ID NO: 29362 - DNA, 20 bp, Artificial Sequence
  chemically synthesized
agaattggggtccatgatgg

SEQ ID NO: 29363 - DNA, 20 bp, Artificial Sequence
  chemically synthesized
aattggggtccatgatggga

SEQ ID NO: 29364 - DNA, 20 bp, Artificial Sequence
  chemically synthesized
ggggtccatgatgggagaga

SEQ ID NO: 29365 - DNA, 20 bp, Artificial Sequence
  chemically synthesized
atgggagagaaagacactca

SEQ ID NO: 29366 - DNA, 20 bp, Artificial Sequence
  chemically synthesized
aaagacactcaaagcccctg

SEQ ID NO: 29367 - DNA, 20 bp, Artificial Sequence
  chemically synthesized
ctcaaagcccctgcagcacc

SEQ ID NO: 29368 - DNA, 20 bp, Artificial Sequence
  chemically synthesized
cccctgcagcacccagcatc

SEQ ID NO: 29369 - DNA, 20 bp, Artificial Sequence
  chemically synthesized
gcatccagcatgttgaatat

SEQ ID NO: 29370 - DNA, 20 bp, Artificial Sequence
  chemically synthesized
tgttgaatatcagcctgttt

SEQ ID NO: 29371 - DNA, 20 bp, Artificial Sequence
  chemically synthesized
gaaataattgtttcaaaaac

SEQ ID NO: 29372 - DNA, 20 bp, Artificial Sequence
  chemically synthesized
caaaaaccagtgatcattta

SEQ ID NO: 29373 - DNA, 20 bp, Artificial Sequence
  chemically synthesized
gatcatttaaagaaaactct

SEQ ID NO: 29374 - DNA, 20 bp, Artificial Sequence
  chemically synthesized
atcatttaaagaaaactctt

SEQ ID NO: 29375 - DNA, 20 bp, Artificial Sequence
  chemically synthesized
tttaaagaaaactcttaggc

SEQ ID NO: 29376 - DNA, 20 bp, Artificial Sequence
  chemically synthesized
ttaaagaaaactcttaggca

SEQ ID NO: 29377 - DNA, 20 bp, Artificial Sequence
  chemically synthesized
aaagaaaactcttaggcaag

SEQ ID NO: 29378 - DNA, 20 bp, Artificial Sequence
  chemically synthesized
ttaggcaaggagtgcaatct

SEQ ID NO: 29379 - DNA, 20 bp, Artificial Sequence
  chemically synthesized
gtgcaatcttggaatctgct

SEQ ID NO: 29380 - DNA, 20 bp, Artificial Sequence
  chemically synthesized
tgcaatcttggaatctgctg

SEQ ID NO: 29381 - DNA, 20 bp, Artificial Sequence
  chemically synthesized
gaatctgctgaggtctaact

SEQ ID NO: 29382 - DNA, 20 bp, Artificial Sequence
  chemically synthesized
taactgagtgccccaaacct

SEQ ID NO: 29383 - DNA, 20 bp, Artificial Sequence
  chemically synthesized
ctgagtgccccaaaccttgg

SEQ ID NO: 29384 - DNA, 20 bp, Artificial Sequence
  chemically synthesized
aaccttggcagcatattttc

SEQ ID NO: 29385 - DNA, 20 bp, Artificial Sequence
  chemically synthesized
accttggcagcatattttct

SEQ ID NO: 29386 - DNA, 20 bp, Artificial Sequence
  chemically synthesized
attttctgggcacttttgct

SEQ ID NO: 29387 - DNA, 20 bp, Artificial Sequence
  chemically synthesized
tttctgggcacttttgcttg

SEQ ID NO: 29388 - DNA, 20 bp, Artificial Sequence
  chemically synthesized
cacttttgcttggagtttcc

SEQ ID NO: 29389 - DNA, 20 bp, Artificial Sequence
  chemically synthesized
cttttgcttggagtttccaa

SEQ ID NO: 29390 - DNA, 20 bp, Artificial Sequence
  chemically synthesized
ttggagtttccaagagcatt

SEQ ID NO: 29391 - DNA, 20 bp, Artificial Sequence
  chemically synthesized
agagcattcagattaaaacc

SEQ ID NO: 29392 - DNA, 20 bp, Artificial Sequence
  chemically synthesized
agattaaaaccaagcccttc

SEQ ID NO: 29393 - DNA, 20 bp, Artificial Sequence
  chemically synthesized
ttaaaaccaagcccttcaag

SEQ ID NO: 29394 - DNA, 20 bp, Artificial Sequence
  chemically synthesized
aaccaagcccttcaagtggt

SEQ ID NO: 29395 - DNA, 20 bp, Artificial Sequence
  chemically synthesized
accaagcccttcaagtggtc

SEQ ID NO: 29396 - DNA, 20 bp, Artificial Sequence
  chemically synthesized
aagtggtcaggaatatcttt

SEQ ID NO: 29397 - DNA, 20 bp, Artificial Sequence
  chemically synthesized
agtggtcaggaatatctttc

SEQ ID NO: 29398 - DNA, 20 bp, Artificial Sequence
  chemically synthesized
tgatttttttttttttttga

SEQ ID NO: 29399 - DNA, 20 bp, Artificial Sequence
  chemically synthesized
ttttttttttttttgatagt

SEQ ID NO: 29400 - DNA, 20 bp, Artificial Sequence
  chemically synthesized
tttttttttttttgatagtg

SEQ ID NO: 29401 - DNA, 20 bp, Artificial Sequence
  chemically synthesized
tagtgaggttaacattgacg

SEQ ID NO: 29402 - DNA, 20 bp, Artificial Sequence
  chemically synthesized
gaggttaacattgacgaaga

SEQ ID NO: 29403 - DNA, 20 bp, Artificial Sequence
  chemically synthesized
ataattcttattttataaat

SEQ ID NO: 29404 - DNA, 20 bp, Artificial Sequence
  chemically synthesized
attttataaatcagtgtccc

SEQ ID NO: 29405 - DNA, 20 bp, Artificial Sequence
  chemically synthesized
ttataaatcagtgtccccgg

SEQ ID NO: 29406 - DNA, 20 bp, Artificial Sequence
  chemically synthesized
atcagtgtccccggaagtaa

SEQ ID NO: 29407 - DNA, 20 bp, Artificial Sequence
  chemically synthesized
agtgtccccggaagtaatag

SEQ ID NO: 29408 - DNA, 20 bp, Artificial Sequence
  chemically synthesized
gtgtccccggaagtaatagt

SEQ ID NO: 29409 - DNA, 20 bp, Artificial Sequence
  chemically synthesized
cccggaagtaatagtaggat

SEQ ID NO: 29410 - DNA, 20 bp, Artificial Sequence
  chemically synthesized
aagtaatagtaggattagaa

SEQ ID NO: 29411 - DNA, 20 bp, Artificial Sequence
  chemically synthesized
taatagtaggattagaatgg

SEQ ID NO: 29412 - DNA, 20 bp, Artificial Sequence
  chemically synthesized
attagaatggaagtattttg

SEQ ID NO: 29413 - DNA, 20 bp, Artificial Sequence
  chemically synthesized
ttagaatggaagtattttgt

SEQ ID NO: 29414 - DNA, 20 bp, Artificial Sequence
  chemically synthesized
ggaagtattttgtaggctgt

SEQ ID NO: 29415 - DNA, 20 bp, Artificial Sequence
  chemically synthesized
ggctgttggttctgttctta

SEQ ID NO: 29416 - DNA, 20 bp, Artificial Sequence
  chemically synthesized
tgttcttacagtatgccaca

SEQ ID NO: 29417 - DNA, 20 bp, Artificial Sequence
  chemically synthesized
cacatagctttgactccttt

SEQ ID NO: 29418 - DNA, 20 bp, Artificial Sequence
  chemically synthesized
catagctttgactccttttg

SEQ ID NO: 29419 - DNA, 20 bp, Artificial Sequence
  chemically synthesized
ctttgactccttttggagta

SEQ ID NO: 29420 - DNA, 20 bp, Artificial Sequence
  chemically synthesized
tccttttggagtatagtgtg

SEQ ID NO: 29421 - DNA, 20 bp, Artificial Sequence
  chemically synthesized
ccttttggagtatagtgtga

SEQ ID NO: 29422 - DNA, 20 bp, Artificial Sequence
  chemically synthesized
tttggagtatagtgtgaagg

SEQ ID NO: 29423 - DNA, 20 bp, Artificial Sequence
  chemically synthesized
ggagtatagtgtgaaggaag

SEQ ID NO: 29424 - DNA, 20 bp, Artificial Sequence
  chemically synthesized
agtgtgaaggaagcagattt

SEQ ID NO: 29425 - DNA, 20 bp, Artificial Sequence
  chemically synthesized
gtgtgaaggaagcagatttg

SEQ ID NO: 29426 - DNA, 20 bp, Artificial Sequence
  chemically synthesized
aagcagatttgaggaatttt

SEQ ID NO: 29427 - DNA, 20 bp, Artificial Sequence
  chemically synthesized
gatttgaggaattttgagtc

SEQ ID NO: 29428 - DNA, 20 bp, Artificial Sequence
  chemically synthesized
ttgaggaattttgagtctgg

SEQ ID NO: 29429 - DNA, 20 bp, Artificial Sequence
  chemically synthesized
aggaattttgagtctggtgg

SEQ ID NO: 29430 - DNA, 20 bp, Artificial Sequence
  chemically synthesized
ggtggaagttccaaaataac

SEQ ID NO: 29431 - DNA, 20 bp, Artificial Sequence
  chemically synthesized
tccaaaataactggtgatgc

SEQ ID NO: 29432 - DNA, 20 bp, Artificial Sequence
  chemically synthesized
caagcacaccttccttcttc

SEQ ID NO: 29433 - DNA, 20 bp, Artificial Sequence
  chemically synthesized
agcacaccttccttcttcaa

SEQ ID NO: 29434 - DNA, 20 bp, Artificial Sequence
  chemically synthesized
cttcttcaagagttcatctt

SEQ ID NO: 29435 - DNA, 20 bp, Artificial Sequence
  chemically synthesized
gttcatcttgagttcctaac

SEQ ID NO: 29436 - DNA, 20 bp, Artificial Sequence
  chemically synthesized
catcttgagttcctaaccag

SEQ ID NO: 29437 - DNA, 20 bp, Artificial Sequence
  chemically synthesized
tcttgagttcctaaccagca

SEQ ID NO: 29438 - DNA, 20 bp, Artificial Sequence
  chemically synthesized
atttctttcctctgactgcc

SEQ ID NO: 29439 - DNA, 20 bp, Artificial Sequence
  chemically synthesized
tttctttcctctgactgcct

SEQ ID NO: 29440 - DNA, 20 bp, Artificial Sequence
  chemically synthesized
tctttcctctgactgcctag

SEQ ID NO: 29441 - DNA, 20 bp, Artificial Sequence
  chemically synthesized
tttcctctgactgcctagga

SEQ ID NO: 29442 - DNA, 20 bp, Artificial Sequence
  chemically synthesized
ctctgactgcctaggagaga

SEQ ID NO: 29443 - DNA, 20 bp, Artificial Sequence
  chemically synthesized
ctaggagagacagtactctt

SEQ ID NO: 29444 - DNA, 20 bp, Artificial Sequence
  chemically synthesized
ctcttcagtttgcattcccc

SEQ ID NO: 29445 - DNA, 20 bp, Artificial Sequence
  chemically synthesized
cttcagtttgcattcccctg

SEQ ID NO: 29446 - DNA, 20 bp, Artificial Sequence
  chemically synthesized
cattcccctggagttacatt

SEQ ID NO: 29447 - DNA, 20 bp, Artificial Sequence
  chemically synthesized
cctggagttacattaagtca

SEQ ID NO: 29448 - DNA, 20 bp, Artificial Sequence
  chemically synthesized
gtcatggaacttctcacttc

SEQ ID NO: 29449 - DNA, 20 bp, Artificial Sequence
  chemically synthesized
ttctcacttccagtaaaatc

SEQ ID NO: 29450 - DNA, 20 bp, Artificial Sequence
  chemically synthesized
tcacttccagtaaaatccag

SEQ ID NO: 29451 - DNA, 20 bp, Artificial Sequence
  chemically synthesized
cttccagtaaaatccagaag

SEQ ID NO: 29452 - DNA, 20 bp, Artificial Sequence
  chemically synthesized
cattgtctgtttttctatct

SEQ ID NO: 29453 - DNA, 20 bp, Artificial Sequence
  chemically synthesized
ttttctatcttagtttaaat

SEQ ID NO: 29454 - DNA, 20 bp, Artificial Sequence
  chemically synthesized
tttctatcttagtttaaatt

SEQ ID NO: 29455 - DNA, 20 bp, Artificial Sequence
  chemically synthesized
atatcttattacgaaccaca

SEQ ID NO: 29456 - DNA, 20 bp, Artificial Sequence
  chemically synthesized
tgtattttaaaaaatgctcc

SEQ ID NO: 29457 - DNA, 20 bp, Artificial Sequence
  chemically synthesized
gtattttaaaaaatgctccc

SEQ ID NO: 29458 - DNA, 20 bp, Artificial Sequence
  chemically synthesized
ttttaaaaaatgctcccagg

SEQ ID NO: 29459 - DNA, 20 bp, Artificial Sequence
  chemically synthesized
aatgctcccaggaagtactt

SEQ ID NO: 29460 - DNA, 20 bp, Artificial Sequence
  chemically synthesized
caggaagtacttaagcttta

SEQ ID NO: 29461 - DNA, 20 bp, Artificial Sequence
  chemically synthesized
gaatacttttatatacatga

SEQ ID NO: 29462 - DNA, 20 bp, Artificial Sequence
  chemically synthesized
ttccttgtgattctataaat

SEQ ID NO: 29463 - DNA, 20 bp, Artificial Sequence
  chemically synthesized
tgtgattctataaattagat

SEQ ID NO: 29464 - DNA, 20 bp, Artificial Sequence
  chemically synthesized
ttctataaattagataagaa

SEQ ID NO: 29465 - DNA, 20 bp, Artificial Sequence
  chemically synthesized
taaattagataagaaaagaa

SEQ ID NO: 29466 - DNA, 20 bp, Artificial Sequence
  chemically synthesized
gataagaaaagaatagactg

SEQ ID NO: 29467 - DNA, 20 bp, Artificial Sequence
  chemically synthesized
aaagaatagactgaagttga

SEQ ID NO: 29468 - DNA, 20 bp, Artificial Sequence
  chemically synthesized
aagaatagactgaagttgaa

SEQ ID NO: 29469 - DNA, 20 bp, Artificial Sequence
  chemically synthesized
actgaagttgaaaggaatcc

SEQ ID NO: 29470 - DNA, 20 bp, Artificial Sequence
  chemically synthesized
atcctagtaatcactcattt

SEQ ID NO: 29471 - DNA, 20 bp, Artificial Sequence
  chemically synthesized
cctagtaatcactcatttta

SEQ ID NO: 29472 - DNA, 20 bp, Artificial Sequence
  chemically synthesized
taatcactcattttagagat

SEQ ID NO: 29473 - DNA, 20 bp, Artificial Sequence
  chemically synthesized
attttagagatcagaataat

SEQ ID NO: 29474 - DNA, 20 bp, Artificial Sequence
  chemically synthesized
ttttagagatcagaataata

SEQ ID NO: 29475 - DNA, 20 bp, Artificial Sequence
  chemically synthesized
tttagagatcagaataataa

SEQ ID NO: 29476 - DNA, 20 bp, Artificial Sequence
  chemically synthesized
atcagaataataagggccca

SEQ ID NO: 29477 - DNA, 20 bp, Artificial Sequence
  chemically synthesized
ataataagggcccaaagatt

SEQ ID NO: 29478 - DNA, 20 bp, Artificial Sequence
  chemically synthesized
aagggcccaaagattaagtg

SEQ ID NO: 29479 - DNA, 20 bp, Artificial Sequence
  chemically synthesized
aaagattaagtgaagtacct

SEQ ID NO: 29480 - DNA, 20 bp, Artificial Sequence
  chemically synthesized
aagtgaagtacctaagatca

SEQ ID NO: 29481 - DNA, 20 bp, Artificial Sequence
  chemically synthesized
acagtgtgaaaaaaacatca

SEQ ID NO: 29482 - DNA, 20 bp, Artificial Sequence
  chemically synthesized
gtgaaaaaaacatcatagcc

SEQ ID NO: 29483 - DNA, 20 bp, Artificial Sequence
  chemically synthesized
ttattattctgatctctaaa

SEQ ID NO: 29484 - DNA, 20 bp, Artificial Sequence
  chemically synthesized
tctctaaaatgagtgattac

SEQ ID NO: 29485 - DNA, 20 bp, Artificial Sequence
  chemically synthesized
ttcttttcttatctaattta

SEQ ID NO: 29486 - DNA, 20 bp, Artificial Sequence
  chemically synthesized
aaaacagacaatgactgctt

SEQ ID NO: 29487 - DNA, 20 bp, Artificial Sequence
  chemically synthesized
atgacttaatgtaactccag

SEQ ID NO: 29488 - DNA, 20 bp, Artificial Sequence
  chemically synthesized
ctccaggggaatgcaaactg

SEQ ID NO: 29489 - DNA, 20 bp, Artificial Sequence
  chemically synthesized
ccttcacactatactccaaa

SEQ ID NO: 29490 - DNA, 20 bp, Artificial Sequence
  chemically synthesized
gggacactgatttataaaat

SEQ ID NO: 29491 - DNA, 20 bp, Artificial Sequence
  chemically synthesized
taaaataagaattataaaat

SEQ ID NO: 29492 - DNA, 20 bp, Artificial Sequence
  chemically synthesized
aaataagaatttttaaaaat

SEQ ID NO: 29493 - DNA, 20 bp, Artificial Sequence
  chemically synthesized
ttgaagggcttggttttaat

SEQ ID NO: 29494 - DNA, 20 bp, Artificial Sequence
  chemically synthesized
caagattgcactccttgcct

SEQ ID NO: 29495 - DNA, 20 bp, Artificial Sequence
  chemically synthesized
acaggctgatattcaacatg

SEQ ID NO: 29496 - DNA, 20 bp, Artificial Sequence
  chemically synthesized
gatattcaacatgctggatg

SEQ ID NO: 29497 - DNA, 20 bp, Artificial Sequence
  chemically synthesized
tgctgggtgctgcaggggct

SEQ ID NO: 29498 - DNA, 20 bp, Artificial Sequence
  chemically synthesized
ggcaggtggctcatgaggtc

SEQ ID NO: 29499 - DNA, 20 bp, Artificial Sequence
  chemically synthesized
ttgcactccagcctgggcaa

SEQ ID NO: 29500 - DNA, 20 bp, Artificial Sequence
  chemically synthesized
cttccctgcttctgccattc

SEQ ID NO: 29501 - DNA, 20 bp, Artificial Sequence
  chemically synthesized
cccaaattgtcaatcttgta

SEQ ID NO: 29502 - DNA, 20 bp, Artificial Sequence
  chemically synthesized
cagcactatgggaggcctag

SEQ ID NO: 29503 - DNA, 20 bp, Artificial Sequence
  chemically synthesized
actatgggaggcctaggagg

SEQ ID NO: 29504 - DNA, 20 bp, Artificial Sequence
  chemically synthesized
tacttgggaagctgaggcag

SEQ ID NO: 29505 - DNA, 20 bp, Artificial Sequence
  chemically synthesized
taggcggaggttgtggtgag

SEQ ID NO: 29506 - DNA, 20 bp, Artificial Sequence
  chemically synthesized
ccttgccactgcactccagc

SEQ ID NO: 29507 - DNA, 20 bp, Artificial Sequence
  chemically synthesized
ttttgttctgtttgttttga

SEQ ID NO: 29508 - DNA, 20 bp, Artificial Sequence
  chemically synthesized
gggttcttctccacagtgaa

SEQ ID NO: 29509 - DNA, 20 bp, Artificial Sequence
  chemically synthesized
agaagaaatatataaaaagt

SEQ ID NO: 29510 - DNA, 20 bp, Artificial Sequence
  chemically synthesized
gctgaacttgtctcaagacc

SEQ ID NO: 29511 - DNA, 20 bp, Artificial Sequence
  chemically synthesized
actctttctaggcatcagca

SEQ ID NO: 29512 - DNA, 20 bp, Artificial Sequence
  chemically synthesized
ggcagagcatggggcaggga

SEQ ID NO: 29513 - DNA, 20 bp, Artificial Sequence
  chemically synthesized
aaacaggccactcgtgcaat

SEQ ID NO: 29514 - DNA, 20 bp, Artificial Sequence
  chemically synthesized
tgcctttaccaaaggccatc

SEQ ID NO: 29515 - DNA, 20 bp, Artificial Sequence
  chemically synthesized
actccctttgatcagttaaa

SEQ ID NO: 29516 - DNA, 20 bp, Artificial Sequence
  chemically synthesized
gtagacagtcattatttatt

SEQ ID NO: 29517 - DNA, 20 bp, Artificial Sequence
  chemically synthesized
ctaggtaatctagccagaag

SEQ ID NO: 29518 - DNA, 20 bp, Artificial Sequence
  chemically synthesized
ctagccagaaggtggatagg

SEQ ID NO: 29519 - DNA, 20 bp, Artificial Sequence
  chemically synthesized
cttaggttcacggcctgtat

SEQ ID NO: 29520 - DNA, 20 bp, Artificial Sequence
  chemically synthesized
atgttgtttctaattctctt

SEQ ID NO: 29521 - DNA, 20 bp, Artificial Sequence
  chemically synthesized
tgcaaattaactgggccaga

SEQ ID NO: 29522 - DNA, 20 bp, Artificial Sequence
  chemically synthesized
atttgtggcactaatttcta

SEQ ID NO: 29523 - DNA, 20 bp, Artificial Sequence
  chemically synthesized
aaggtttgggaacctaaaat

SEQ ID NO: 29524 - DNA, 20 bp, Artificial Sequence
  chemically synthesized
ctgacatttatcaccttctt

SEQ ID NO: 29525 - DNA, 20 bp, Artificial Sequence
  chemically synthesized
aaaagcatatatttgaaaaa

SEQ ID NO: 29526 - DNA, 20 bp, Artificial Sequence
  chemically synthesized
ctgttcctcctacccacccg

SEQ ID NO: 29527 - DNA, 20 bp, Artificial Sequence
  chemically synthesized
acactttttaaaagacaaca

SEQ ID NO: 29528 - DNA, 20 bp, Artificial Sequence
  chemically synthesized
acatagaatgtatagaaaca

SEQ ID NO: 29529 - DNA, 20 bp, Artificial Sequence
  chemically synthesized
gactgattcactgttccaat

SEQ ID NO: 29530 - DNA, 20 bp, Artificial Sequence
  chemically synthesized
cagaaaacatcacaaactag

SEQ ID NO: 29531 - DNA, 20 bp, Artificial Sequence
  chemically synthesized
tgccacacatcttgagctct

SEQ ID NO: 29532 - DNA, 20 bp, Artificial Sequence
  chemically synthesized
tgagctctctgggtactacg

SEQ ID NO: 29533 - DNA, 20 bp, Artificial Sequence
  chemically synthesized
ctctgggtactacgccgaat

SEQ ID NO: 29534 - DNA, 20 bp, Artificial Sequence
  chemically synthesized
tccccaagtatctctgacct

SEQ ID NO: 29535 - DNA, 20 bp, Artificial Sequence
  chemically synthesized
aagagaaaaccagaacccaa

SEQ ID NO: 29536 - DNA, 20 bp, Artificial Sequence
  chemically synthesized
ggcaatggtgaagggaagaa

SEQ ID NO: 29537 - DNA, 20 bp, Artificial Sequence
  chemically synthesized
agggagtggttattttcctc

SEQ ID NO: 29538 - DNA, 20 bp, Artificial Sequence
  chemically synthesized
tgacttgaagcagcagaact

SEQ ID NO: 29539 - DNA, 20 bp, Artificial Sequence
  chemically synthesized
gaagcagcagaactgggagt

SEQ ID NO: 29540 - DNA, 20 bp, Artificial Sequence
  chemically synthesized
acttggcgccgcaggaggcc

SEQ ID NO: 29541 - DNA, 20 bp, Artificial Sequence
  chemically synthesized
cgccgcaggaggcccggggt

SEQ ID NO: 29542 - DNA, 20 bp, Artificial Sequence
  chemically synthesized
gaggggcatgctgcgtccag

SEQ ID NO: 29543 - DNA, 20 bp, Artificial Sequence
  chemically synthesized
ctgcgtccaggtgggttctg

SEQ ID NO: 29544 - DNA, 20 bp, Artificial Sequence
  chemically synthesized
tttaaaagcacagcccccct

SEQ ID NO: 29545 - DNA, 20 bp, Artificial Sequence
  chemically synthesized
gtttaggggctcccgcttta

SEQ ID NO: 29546 - DNA, 20 bp, Artificial Sequence
  chemically synthesized
tacagaaaggaaaaacgtat

SEQ ID NO: 29547 - DNA, 20 bp, Artificial Sequence
  chemically synthesized
agtacaatgacccgtgtgaa

SEQ ID NO: 29548 - DNA, 20 bp, Artificial Sequence
  chemically synthesized
ctctttcccatttggaaggg

SEQ ID NO: 29549 - DNA, 20 bp, Artificial Sequence
  chemically synthesized
cagccccattcccctaaagg

SEQ ID NO: 29550 - DNA, 20 bp, Artificial Sequence
  chemically synthesized
taaattaaacagcgggctaa

SEQ ID NO: 29551 - DNA, 20 bp, Artificial Sequence
  chemically synthesized
gttcatagctatagcagccc

SEQ ID NO: 29552 - DNA, 20 bp, Artificial Sequence
  chemically synthesized
tgatgtccatttctctaaca

SEQ ID NO: 29553 - DNA, 20 bp, Artificial Sequence
  chemically synthesized
gggaagttgtctgaaaaaaa

SEQ ID NO: 29554 - DNA, 20 bp, Artificial Sequence
  chemically synthesized
gttgtctgaaaaaaagagaa

SEQ ID NO: 29555 - DNA, 20 bp, Artificial Sequence
  chemically synthesized
tctgaaaaaaagagaatggg

SEQ ID NO: 29556 - DNA, 20 bp, Artificial Sequence
  chemically synthesized
cacaccaggcccagggacaa

SEQ ID NO: 29557 - DNA, 20 bp, Artificial Sequence
  chemically synthesized
gcccagggacaatggagtaa

SEQ ID NO: 29558 - DNA, 20 bp, Artificial Sequence
  chemically synthesized
gcaaagtactacaagcagga

SEQ ID NO: 29559 - DNA, 20 bp, Artificial Sequence
  chemically synthesized
cctttcagcaaactgtgtct

SEQ ID NO: 29560 - DNA, 20 bp, Artificial Sequence
  chemically synthesized
catttccttatttctccaat

SEQ ID NO: 29561 - DNA, 20 bp, Artificial Sequence
  chemically synthesized
aataaacagttctatatcta

SEQ ID NO: 29562 - DNA, 20 bp, Artificial Sequence
  chemically synthesized
ttgtaggtcctaaacaaaga

SEQ ID NO: 29563 - DNA, 20 bp, Artificial Sequence
  chemically synthesized
aaacaaagagaggatagcaa

SEQ ID NO: 29564 - DNA, 20 bp, Artificial Sequence
  chemically synthesized
ggaggtaatataggcactgg

SEQ ID NO: 29565 - DNA, 20 bp, Artificial Sequence
  chemically synthesized
ggtttaaaatctgtgagaaa

SEQ ID NO: 29566 - DNA, 20 bp, Artificial Sequence
  chemically synthesized
cctgttacaaaaacttactt

SEQ ID NO: 29567 - DNA, 20 bp, Artificial Sequence
  chemically synthesized
tcatttaaaaaaaaaagatc

SEQ ID NO: 29568 - DNA, 20 bp, Artificial Sequence
  chemically synthesized
tatattaagattttaaattt

SEQ ID NO: 29569 - DNA, 20 bp, Artificial Sequence
  chemically synthesized
agattttaaattttagagtt

SEQ ID NO: 29570 - DNA, 20 bp, Artificial Sequence
  chemically synthesized
ccaccattaattctgtctgt

SEQ ID NO: 29571 - DNA, 20 bp, Artificial Sequence
  chemically synthesized
gcatatactgagaaattaaa

SEQ ID NO: 29572 - DNA, 20 bp, Artificial Sequence
  chemically synthesized
gcactcatagctcctaataa

SEQ ID NO: 29573 - DNA, 20 bp, Artificial Sequence
  chemically synthesized
gaggttttatggacatttaa

SEQ ID NO: 29574 - DNA, 20 bp, Artificial Sequence
  chemically synthesized
tttatggacatttaataggg

SEQ ID NO: 29575 - DNA, 20 bp, Artificial Sequence
  chemically synthesized
ctaaagctggcatggcactg

SEQ ID NO: 29576 - DNA, 20 bp, Artificial Sequence
  chemically synthesized
tatctgtcttgagcagcatt

SEQ ID NO: 29577 - DNA, 20 bp, Artificial Sequence
  chemically synthesized
ttctccaacatcctttctca

SEQ ID NO: 29578 - DNA, 20 bp, Artificial Sequence
  chemically synthesized
aagtgacaacacagatttct

SEQ ID NO: 29579 - DNA, 20 bp, Artificial Sequence
  chemically synthesized
ggctggtcagaagataattg

SEQ ID NO: 29580 - DNA, 20 bp, Artificial Sequence
  chemically synthesized
ctaaagtaatctgtagcatc

SEQ ID NO: 29581 - DNA, 20 bp, Artificial Sequence
  chemically synthesized
tctgtagcatctagggttcc

SEQ ID NO: 29582 - DNA, 20 bp, Artificial Sequence
  chemically synthesized
agatttttagatttcaaaag

SEQ ID NO: 29583 - DNA, 20 bp, Artificial Sequence
  chemically synthesized
attatgttctaagataaagc

SEQ ID NO: 29584 - DNA, 20 bp, Artificial Sequence
  chemically synthesized
ctaagataaagcaaggatgg

SEQ ID NO: 29585 - DNA, 20 bp, Artificial Sequence
  chemically synthesized
gcaagttttttcacttatgt

SEQ ID NO: 29586 - DNA, 20 bp, Artificial Sequence
  chemically synthesized
gttttttcacttatgtttga

SEQ ID NO: 29587 - DNA, 20 bp, Artificial Sequence
  chemically synthesized
aatggatttctgctaagaga

SEQ ID NO: 29588 - DNA, 20 bp, Artificial Sequence
  chemically synthesized
gaaagccttaaaactatgtc

SEQ ID NO: 29589 - DNA, 20 bp, Artificial Sequence
  chemically synthesized
gtaagtactttatgttcctt

SEQ ID NO: 29590 - DNA, 20 bp, Artificial Sequence
  chemically synthesized
ttagggtataatacacgcat

SEQ ID NO: 29591 - DNA, 20 bp, Artificial Sequence
  chemically synthesized
attttcttgcaagtaattta

SEQ ID NO: 29592 - DNA, 20 bp, Artificial Sequence
  chemically synthesized
tttttcaataaagggacaaa

SEQ ID NO: 29593 - DNA, 20 bp, Artificial Sequence
  chemically synthesized
cgacaaacagctttcattac

SEQ ID NO: 29594 - DNA, 20 bp, Artificial Sequence
  chemically synthesized
tgcatatgaaggtaagatgc

SEQ ID NO: 29595 - DNA, 20 bp, Artificial Sequence
  chemically synthesized
gaaggtaagatgctggaatg

SEQ ID NO: 29596 - DNA, 20 bp, Artificial Sequence
  chemically synthesized
agcaggaaaaaggaacaaaa

SEQ ID NO: 29597 - DNA, 20 bp, Artificial Sequence
  chemically synthesized
ccataaatgtattttagcat

SEQ ID NO: 29598 - DNA, 20 bp, Artificial Sequence
  chemically synthesized
attttagcataggaatcaac

SEQ ID NO: 29599 - DNA, 20 bp, Artificial Sequence
  chemically synthesized
agcggtgtgtatccaaggca

SEQ ID NO: 29600 - DNA, 20 bp, Artificial Sequence
  chemically synthesized
atttccactaccatttttaa

SEQ ID NO: 29601 - DNA, 20 bp, Artificial Sequence
  chemically synthesized
aaagatacagatatcacagg

SEQ ID NO: 29602 - DNA, 20 bp, Artificial Sequence
  chemically synthesized
aaaaaataaaaataaaaaca

SEQ ID NO: 29603 - DNA, 20 bp, Artificial Sequence
  chemically synthesized
attctttctcttcttttttt

SEQ ID NO: 29604 - DNA, 20 bp, Artificial Sequence
  chemically synthesized
cacatttaaatgcaagtctt

SEQ ID NO: 29605 - DNA, 20 bp, Artificial Sequence
  chemically synthesized
cacttgacaaccaagtagat

SEQ ID NO: 29606 - DNA, 20 bp, Artificial Sequence
  chemically synthesized
tgatgattaactaggacata

SEQ ID NO: 29607 - DNA, 20 bp, Artificial Sequence
  chemically synthesized
ttgttgtgagaaatacaata

SEQ ID NO: 29608 - DNA, 20 bp, Artificial Sequence
  chemically synthesized
gtttattacctcacccaatg

SEQ ID NO: 29609 - DNA, 20 bp, Artificial Sequence
  chemically synthesized
catattttaaaaccaaatga

SEQ ID NO: 29610 - DNA, 20 bp, Artificial Sequence
  chemically synthesized
tgctatctattctgtctata

SEQ ID NO: 29611 - DNA, 20 bp, Artificial Sequence
  chemically synthesized
actgtacatgatatgtatta

SEQ ID NO: 29612 - DNA, 20 bp, Artificial Sequence
  chemically synthesized
agcaacatgtttgctcagca

SEQ ID NO: 29613 - DNA, 20 bp, Artificial Sequence
  chemically synthesized
gactagaaaaaaatcctaca

SEQ ID NO: 29614 - DNA, 20 bp, Artificial Sequence
  chemically synthesized
gctggagggcgatggggaag

SEQ ID NO: 29615 - DNA, 20 bp, Artificial Sequence
  chemically synthesized
ggaaggggagtggtgaaaaa

SEQ ID NO: 29616 - DNA, 20 bp, Artificial Sequence
  chemically synthesized
tgaaaaagggggtgtcaggt

SEQ ID NO: 29617 - DNA, 20 bp, Artificial Sequence
  chemically synthesized
gtgtcaggtgggagtgaggg

SEQ ID NO: 29618 - DNA, 20 bp, Artificial Sequence
  chemically synthesized
cattttttcatgtgtttctc

SEQ ID NO: 29619 - DNA, 20 bp, Artificial Sequence
  chemically synthesized
gcgcaaactcccgttctccg

SEQ ID NO: 29620 - DNA, 20 bp, Artificial Sequence
  chemically synthesized
ggaggcaaaaggcgattgtc

SEQ ID NO: 29621 - DNA, 20 bp, Artificial Sequence
  chemically synthesized
ggagtctccgaagctaagga

SEQ ID NO: 29622 - DNA, 20 bp, Artificial Sequence
  chemically synthesized
cgcgtagccggcgagccact

SEQ ID NO: 29623 - DNA, 20 bp, Artificial Sequence
  chemically synthesized
gcggtccgactcgccggcca

SEQ ID NO: 29624 - DNA, 20 bp, Artificial Sequence
  chemically synthesized
tcctcctcgtccccgttctc

SEQ ID NO: 29625 - DNA, 20 bp, Artificial Sequence
  chemically synthesized
cccgttctccgggatcaggt

SEQ ID NO: 29626 - DNA, 20 bp, Artificial Sequence
  chemically synthesized
tgcccaccaagtcgctggtg

SEQ ID NO: 29627 - DNA, 20 bp, Artificial Sequence
  chemically synthesized
tggcgcttcagcttgctggc

SEQ ID NO: 29628 - DNA, 20 bp, Artificial Sequence
  chemically synthesized
ggggctgggagggaggaggg

SEQ ID NO: 29629 - DNA, 20 bp, Artificial Sequence
  chemically synthesized
agggcggcttgctacctggc

SEQ ID NO: 29630 - DNA, 20 bp, Artificial Sequence
  chemically synthesized
ggcgggaggctccatagcca

SEQ ID NO: 29631 - DNA, 20 bp, Artificial Sequence
  chemically synthesized
cagcaccctgtcaaaggcac

SEQ ID NO: 29632 - DNA, 20 bp, Artificial Sequence
  chemically synthesized
ctgtcaaaggcactcgggtg

SEQ ID NO: 29633 - DNA, 20 bp, Artificial Sequence
  chemically synthesized
ccccaggcgctctatgcggt

SEQ ID NO: 29634 - DNA, 20 bp, Artificial Sequence
  chemically synthesized
ggtggtggactaaacagggg

SEQ ID NO: 29635 - DNA, 20 bp, Artificial Sequence
  chemically synthesized
gtggactaaacaggggggga

SEQ ID NO: 29636 - DNA, 20 bp, Artificial Sequence
  chemically synthesized
tggtattcttagcaggttaa

SEQ ID NO: 29637 - DNA, 20 bp, Artificial Sequence
  chemically synthesized
aaggggttattgtctgcaat

SEQ ID NO: 29638 - DNA, 20 bp, Artificial Sequence
  chemically synthesized
cattctgcacctagtcctga

SEQ ID NO: 29639 - DNA, 20 bp, Artificial Sequence
  chemically synthesized
cctgaagggataccaacccg

SEQ ID NO: 29640 - DNA, 20 bp, Artificial Sequence
  chemically synthesized
tctaagtagattcttaatcc

SEQ ID NO: 29641 - DNA, 20 bp, Artificial Sequence
  chemically synthesized
gcaagagaaaccatgcactg

SEQ ID NO: 29642 - DNA, 20 bp, Artificial Sequence
  chemically synthesized
tgtgcctggcacgtctgagc

SEQ ID NO: 29643 - DNA, 20 bp, Artificial Sequence
  chemically synthesized
atcctgaccagttctggctt

SEQ ID NO: 29644 - DNA, 20 bp, Artificial Sequence
  chemically synthesized
tcccagctttctattccccc

SEQ ID NO: 29645 - DNA, 20 bp, Artificial Sequence
  chemically synthesized
tgttgatattgttaaaatga

SEQ ID NO: 29646 - DNA, 20 bp, Artificial Sequence
  chemically synthesized
tctcacaccccagactgtgg

SEQ ID NO: 29647 - DNA, 20 bp, Artificial Sequence
  chemically synthesized
cccagactgtgggaggatca

SEQ ID NO: 29648 - DNA, 20 bp, Artificial Sequence
  chemically synthesized
ggacgtccatttttatctca

SEQ ID NO: 29649 - DNA, 20 bp, Artificial Sequence
  chemically synthesized
aaaaacttcattcagattta

SEQ ID NO: 29650 - DNA, 20 bp, Artificial Sequence
  chemically synthesized
ataggctgtatccaatcttt

SEQ ID NO: 29651 - DNA, 20 bp, Artificial Sequence
  chemically synthesized
gcaagtctggaaaagttagg

SEQ ID NO: 29652 - DNA, 20 bp, Artificial Sequence
  chemically synthesized
tcccttgctgaaaagaaccc

SEQ ID NO: 29653 - DNA, 20 bp, Artificial Sequence
  chemically synthesized
acattaaatatatatatata

SEQ ID NO: 29654 - DNA, 20 bp, Artificial Sequence
  chemically synthesized
agtaatggtagccaaaggac

SEQ ID NO: 29655 - DNA, 20 bp, Artificial Sequence
  chemically synthesized
tcttttaaaagaagggctgc

SEQ ID NO: 29656 - DNA, 20 bp, Artificial Sequence
  chemically synthesized
aaaaatctaccagggaggtt

SEQ ID NO: 29657 - DNA, 20 bp, Artificial Sequence
  chemically synthesized
ctaccagggaggttaagagt

SEQ ID NO: 29658 - DNA, 20 bp, Artificial Sequence
  chemically synthesized
ggaggttaagagtgagaatg

SEQ ID NO: 29659 - DNA, 20 bp, Artificial Sequence
  chemically synthesized
aagtcagaaagaaaagccgg

SEQ ID NO: 29660 - DNA, 20 bp, Artificial Sequence
  chemically synthesized
ccactcaatatatctcactc

SEQ ID NO: 29661 - DNA, 20 bp, Artificial Sequence
  chemically synthesized
tgttgttgttgaacaataac

SEQ ID NO: 29662 - DNA, 20 bp, Artificial Sequence
  chemically synthesized
tccttgtcctccctagatct

SEQ ID NO: 29663 - DNA, 20 bp, Artificial Sequence
  chemically synthesized
ttcctatttagcctgacgat

SEQ ID NO: 29664 - DNA, 20 bp, Artificial Sequence
  chemically synthesized
gtgctggtttcacatgtgcc

SEQ ID NO: 29665 - DNA, 20 bp, Artificial Sequence
  chemically synthesized
gtggcatacagcactacatc

SEQ ID NO: 29666 - DNA, 20 bp, Artificial Sequence
  chemically synthesized
ctttgatgatttagaaagac

SEQ ID NO: 29667 - DNA, 20 bp, Artificial Sequence
  chemically synthesized
gagcctcattgggcatttac

SEQ ID NO: 29668 - DNA, 20 bp, Artificial Sequence
  chemically synthesized
ataggaacttgagacatcaa

SEQ ID NO: 29669 - DNA, 20 bp, Artificial Sequence
  chemically synthesized
tttcattttactttatggga

SEQ ID NO: 29670 - DNA, 20 bp, Artificial Sequence
  chemically synthesized
tatccactagattgtaactc

SEQ ID NO: 29671 - DNA, 20 bp, Artificial Sequence
  chemically synthesized
gggatagtcatttgatttct

SEQ ID NO: 29672 - DNA, 20 bp, Artificial Sequence
  chemically synthesized
catttgatttctctgagtct

SEQ ID NO: 29673 - DNA, 20 bp, Artificial Sequence
  chemically synthesized
agcataaaaacagtacctgt

SEQ ID NO: 29674 - DNA, 20 bp, Artificial Sequence
  chemically synthesized
gccctctgtaaactatcagg

SEQ ID NO: 29675 - DNA, 20 bp, Artificial Sequence
  chemically synthesized
tgtaaactatcaggtcgaat

SEQ ID NO: 29676 - DNA, 20 bp, Artificial Sequence
  chemically synthesized
ctatcaggtcgaatgtgaat

SEQ ID NO: 29677 - DNA, 20 bp, Artificial Sequence
  chemically synthesized
tgtgagttttcattactacc

SEQ ID NO: 29678 - DNA, 20 bp, Artificial Sequence
  chemically synthesized
accaggggtgattaattact

SEQ ID NO: 29679 - DNA, 20 bp, Artificial Sequence
  chemically synthesized
ggaggctctagttaaagagc

SEQ ID NO: 29680 - DNA, 20 bp, Artificial Sequence
  chemically synthesized
caggggtgactggcacacag

SEQ ID NO: 29681 - DNA, 20 bp, Artificial Sequence
  chemically synthesized
agcaggttaatgccgccaag

SEQ ID NO: 29682 - DNA, 20 bp, Artificial Sequence
  chemically synthesized
gtgggaaggtgggagaggac

SEQ ID NO: 29683 - DNA, 20 bp, Artificial Sequence
  chemically synthesized
cacaataactctttgttacc

SEQ ID NO: 29684 - DNA, 20 bp, Artificial Sequence
  chemically synthesized
tttgttacctaggattacct

SEQ ID NO: 29685 - DNA, 20 bp, Artificial Sequence
  chemically synthesized
acaaaaataaacaactggct

SEQ ID NO: 29686 - DNA, 20 bp, Artificial Sequence
  chemically synthesized
actggctttgaatctggtct

SEQ ID NO: 29687 - DNA, 20 bp, Artificial Sequence
  chemically synthesized
cttcagataccatttacaag

SEQ ID NO: 29688 - DNA, 20 bp, Artificial Sequence
  chemically synthesized
tgaacctgcttttttgtgtt

SEQ ID NO: 29689 - DNA, 20 bp, Artificial Sequence
  chemically synthesized
ctgcttttttgtgtttaggg

SEQ ID NO: 29690 - DNA, 20 bp, Artificial Sequence
  chemically synthesized
agtcaaaattatgtgtgggc

SEQ ID NO: 29691 - DNA, 20 bp, Artificial Sequence
  chemically synthesized
aatacacatgtaaatacata

SEQ ID NO: 29692 - DNA, 20 bp, Artificial Sequence
  chemically synthesized
aatacataaggaatatgcat

SEQ ID NO: 29693 - DNA, 20 bp, Artificial Sequence
  chemically synthesized
aatatgcattggaataactc

SEQ ID NO: 29694 - DNA, 20 bp, Artificial Sequence
  chemically synthesized
aaagtcctaaatgaggccac

SEQ ID NO: 29695 - DNA, 20 bp, Artificial Sequence
  chemically synthesized
tcctaaatgaggccacagga

SEQ ID NO: 29696 - DNA, 20 bp, Artificial Sequence
  chemically synthesized
accctggggagaagacccac

SEQ ID NO: 29697 - DNA, 20 bp, Artificial Sequence
  chemically synthesized
gggaagaagtccctctgggg

SEQ ID NO: 29698 - DNA, 20 bp, Artificial Sequence
  chemically synthesized
gaagtccctctggggctgag

SEQ ID NO: 29699 - DNA, 20 bp, Artificial Sequence
  chemically synthesized
gagtggggagcggctgccaa

SEQ ID NO: 29700 - DNA, 20 bp, Artificial Sequence
  chemically synthesized
agcggctgccaagtgagtaa

SEQ ID NO: 29701 - DNA, 20 bp, Artificial Sequence
  chemically synthesized
tctgcactcatcccaggcgt

SEQ ID NO: 29702 - DNA, 20 bp, Artificial Sequence
  chemically synthesized
acaacgtgcatcataaacca

SEQ ID NO: 29703 - DNA, 20 bp, Artificial Sequence
  chemically synthesized
cccaaggcctgaaacaaaag

SEQ ID NO: 29704 - DNA, 20 bp, Artificial Sequence
  chemically synthesized
cctgaaacaaaagaagagtg

SEQ ID NO: 29705 - DNA, 20 bp, Artificial Sequence
  chemically synthesized
aagagtggtgagttatttcc

SEQ ID NO: 29706 - DNA, 20 bp, Artificial Sequence
  chemically synthesized
ggtctttttgacaaaagtga

SEQ ID NO: 29707 - DNA, 20 bp, Artificial Sequence
  chemically synthesized
aggggaaaactggtaatatt

SEQ ID NO: 29708 - DNA, 20 bp, Artificial Sequence
  chemically synthesized
tgggtagcctggaaacatgg

SEQ ID NO: 29709 - DNA, 20 bp, Artificial Sequence
  chemically synthesized
aagcaaaatgctgataggaa

SEQ ID NO: 29710 - DNA, 20 bp, Artificial Sequence
  chemically synthesized
gataggaaatgagtagattt

SEQ ID NO: 29711 - DNA, 20 bp, Artificial Sequence
  chemically synthesized
gtgaatcgttttttatggga

SEQ ID NO: 29712 - DNA, 20 bp, Artificial Sequence
  chemically synthesized
gactgagctgggccatactc

SEQ ID NO: 29713 - DNA, 20 bp, Artificial Sequence
  chemically synthesized
gaagataaagattagacttc

SEQ ID NO: 29714 - DNA, 20 bp, Artificial Sequence
  chemically synthesized
tgacttctcacactaataaa

SEQ ID NO: 29715 - DNA, 20 bp, Artificial Sequence
  chemically synthesized
aaatttggtttgtgcaatct

SEQ ID NO: 29716 - DNA, 20 bp, Artificial Sequence
  chemically synthesized
gtccatcttgagacagactg

SEQ ID NO: 29717 - DNA, 20 bp, Artificial Sequence
  chemically synthesized
ctctgtgtgttctagaggtt

SEQ ID NO: 29718 - DNA, 20 bp, Artificial Sequence
  chemically synthesized
gaagtgttgttgttgtactc

SEQ ID NO: 29719 - DNA, 20 bp, Artificial Sequence
  chemically synthesized
ttcctttcgcaaggagcctg

SEQ ID NO: 29720 - DNA, 20 bp, Artificial Sequence
  chemically synthesized
catttgactgtttacgtcaa

SEQ ID NO: 29721 - DNA, 20 bp, Artificial Sequence
  chemically synthesized
ctgtttacgtcaagtgaatt

SEQ ID NO: 29722 - DNA, 20 bp, Artificial Sequence
  chemically synthesized
tatttttcaatgagaaatct

SEQ ID NO: 29723 - DNA, 20 bp, Artificial Sequence
  chemically synthesized
agcataaacgcaacaggtac

SEQ ID NO: 29724 - DNA, 20 bp, Artificial Sequence
  chemically synthesized
ggtacttggatccttgtatg

SEQ ID NO: 29725 - DNA, 20 bp, Artificial Sequence
  chemically synthesized
atccatgcctagcccctcgc

SEQ ID NO: 29726 - DNA, 20 bp, Artificial Sequence
  chemically synthesized
attaaccacaatgtgaagat

SEQ ID NO: 29727 - DNA, 20 bp, Artificial Sequence
  chemically synthesized
ctgatccagtggtctttcct

SEQ ID NO: 29728 - DNA, 20 bp, Artificial Sequence
  chemically synthesized
agtacttaaccgtcttgggg

SEQ ID NO: 29729 - DNA, 20 bp, Artificial Sequence
  chemically synthesized
ctctacctctgcttcccctg

SEQ ID NO: 29730 - DNA, 20 bp, Artificial Sequence
  chemically synthesized
catttatcttccttcaggaa

SEQ ID NO: 29731 - DNA, 20 bp, Artificial Sequence
  chemically synthesized
ctctggttgctggctaggaa

SEQ ID NO: 29732 - DNA, 20 bp, Artificial Sequence
  chemically synthesized
acccccgatcagcatcacct

SEQ ID NO: 29733 - DNA, 20 bp, Artificial Sequence
  chemically synthesized
tgggcaccacctcagactta

SEQ ID NO: 29734 - DNA, 20 bp, Artificial Sequence
  chemically synthesized
gacttactgaatcagaaatt

SEQ ID NO: 29735 - DNA, 20 bp, Artificial Sequence
  chemically synthesized
tggggaagcagccttctatg

SEQ ID NO: 29736 - DNA, 20 bp, Artificial Sequence
  chemically synthesized
gattctcatgcacactcaag

SEQ ID NO: 29737 - DNA, 20 bp, Artificial Sequence
  chemically synthesized
ctgaatcagcactgctgtct

SEQ ID NO: 29738 - DNA, 20 bp, Artificial Sequence
  chemically synthesized
tcaaaaacaaattaagctta

SEQ ID NO: 29739 - DNA, 20 bp, Artificial Sequence
  chemically synthesized
attaagcttagggaatccct

SEQ ID NO: 29740 - DNA, 20 bp, Artificial Sequence
  chemically synthesized
gttgcaaagtttccttatgg

SEQ ID NO: 29741 - DNA, 20 bp, Artificial Sequence
  chemically synthesized
taaaaaatatgcagcaaact

SEQ ID NO: 29742 - DNA, 20 bp, Artificial Sequence
  chemically synthesized
actttacatttctacatata

SEQ ID NO: 29743 - DNA, 20 bp, Artificial Sequence
  chemically synthesized
acaaagagctctaagcccag

SEQ ID NO: 29744 - DNA, 20 bp, Artificial Sequence
  chemically synthesized
taagcccagtgggatgttcc

SEQ ID NO: 29745 - DNA, 20 bp, Artificial Sequence
  chemically synthesized
tttgtttctgaaactaatca

SEQ ID NO: 29746 - DNA, 20 bp, Artificial Sequence
  chemically synthesized
aaaaccacaggactctccac

SEQ ID NO: 29747 - DNA, 20 bp, Artificial Sequence
  chemically synthesized
gtgttcatgtgtgtgtatat

SEQ ID NO: 29748 - DNA, 20 bp, Artificial Sequence
  chemically synthesized
atatgtgtctgtgtacgtgt

SEQ ID NO: 29749 - DNA, 20 bp, Artificial Sequence
  chemically synthesized
agcagtagagctgtcccacg

SEQ ID NO: 29750 - DNA, 20 bp, Artificial Sequence
  chemically synthesized
gtgaccccctttctttcacc

SEQ ID NO: 29751 - DNA, 20 bp, Artificial Sequence
  chemically synthesized
tcaccctgggtcttcaaaaa

SEQ ID NO: 29752 - DNA, 20 bp, Artificial Sequence
  chemically synthesized
cctgggtcttcaaaaagaga

SEQ ID NO: 29753 - DNA, 20 bp, Artificial Sequence
  chemically synthesized
tggatgacactatgatgagg

SEQ ID NO: 29754 - DNA, 20 bp, Artificial Sequence
  chemically synthesized
tgaaggaacccattccagtt

SEQ ID NO: 29755 - DNA, 20 bp, Artificial Sequence
  chemically synthesized
acttagattctctgacttat

SEQ ID NO: 29756 - DNA, 20 bp, Artificial Sequence
  chemically synthesized
acattagctatgcctgtgac

SEQ ID NO: 29757 - DNA, 20 bp, Artificial Sequence
  chemically synthesized
taattatagacactacaata

SEQ ID NO: 29758 - DNA, 20 bp, Artificial Sequence
  chemically synthesized
ggttactaacttcacctttt

SEQ ID NO: 29759 - DNA, 20 bp, Artificial Sequence
  chemically synthesized
aaatccttcatttcaaaagg

SEQ ID NO: 29760 - DNA, 20 bp, Artificial Sequence
  chemically synthesized
cttcatttcaaaaggttgaa

SEQ ID NO: 29761 - DNA, 20 bp, Artificial Sequence
  chemically synthesized
aataggatggtacttaaaaa

SEQ ID NO: 29762 - DNA, 20 bp, Artificial Sequence
  chemically synthesized
gaattccagctggttaaatt

SEQ ID NO: 29763 - DNA, 20 bp, Artificial Sequence
  chemically synthesized
caaagtattttcacttgatc

SEQ ID NO: 29764 - DNA, 20 bp, Artificial Sequence
  chemically synthesized
tacactttaagcttttgcct

SEQ ID NO: 29765 - DNA, 20 bp, Artificial Sequence
  chemically synthesized
ctatgcaaaatgtgtgttcc

SEQ ID NO: 29766 - DNA, 20 bp, Artificial Sequence
  chemically synthesized
attcattcaacaaatattta

SEQ ID NO: 29767 - DNA, 20 bp, Artificial Sequence
  chemically synthesized
tttgggaaagaggaaaactt

SEQ ID NO: 29768 - DNA, 20 bp, Artificial Sequence
  chemically synthesized
aaacctggagagccaagaga

SEQ ID NO: 29769 - DNA, 20 bp, Artificial Sequence
  chemically synthesized
agcaaagcccaaggtgggca

SEQ ID NO: 29770 - DNA, 20 bp, Artificial Sequence
  chemically synthesized
gattcatccagttgacagcg

SEQ ID NO: 29771 - DNA, 20 bp, Artificial Sequence
  chemically synthesized
ctcaattgtttcttccccca

SEQ ID NO: 29772 - DNA, 20 bp, Artificial Sequence
  chemically synthesized
tgtttcttcccccaatgaat

SEQ ID NO: 29773 - DNA, 20 bp, Artificial Sequence
  chemically synthesized
atttactatgttttattcct

SEQ ID NO: 29774 - DNA, 20 bp, Artificial Sequence
  chemically synthesized
cttcttttcaaagccatggg

SEQ ID NO: 29775 - DNA, 20 bp, Artificial Sequence
  chemically synthesized
ttcaaagccatggggaggat

SEQ ID NO: 29776 - DNA, 20 bp, Artificial Sequence
  chemically synthesized
ggggtgcccttactcctgct

SEQ ID NO: 29777 - DNA, 20 bp, Artificial Sequence
  chemically synthesized
cctgctctgagtcctcagct

SEQ ID NO: 29778 - DNA, 20 bp, Artificial Sequence
  chemically synthesized
tgtgtagtgggggcaggggg

SEQ ID NO: 29779 - DNA, 20 bp, Artificial Sequence
  chemically synthesized
attcccactgccaccactcc

SEQ ID NO: 29780 - DNA, 20 bp, Artificial Sequence
  chemically synthesized
tcaccagctgtttcgtgact

SEQ ID NO: 29781 - DNA, 20 bp, Artificial Sequence
  chemically synthesized
ccatctttaaaaggagaaga

SEQ ID NO: 29782 - DNA, 20 bp, Artificial Sequence
  chemically synthesized
aaggagaagactggattaga

SEQ ID NO: 29783 - DNA, 20 bp, Artificial Sequence
  chemically synthesized
aggccgtgctagaagctggc

SEQ ID NO: 29784 - DNA, 20 bp, Artificial Sequence
  chemically synthesized
gttcccctcatgaccttgac

SEQ ID NO: 29785 - DNA, 20 bp, Artificial Sequence
  chemically synthesized
ggatgaggagggccttatag

SEQ ID NO: 29786 - DNA, 20 bp, Artificial Sequence
  chemically synthesized
caggctaatccttaggctta

SEQ ID NO: 29787 - DNA, 20 bp, Artificial Sequence
  chemically synthesized
cttagagagtgagcctgatg

SEQ ID NO: 29788 - DNA, 20 bp, Artificial Sequence
  chemically synthesized
cacacaggactctaagaaaa

SEQ ID NO: 29789 - DNA, 20 bp, Artificial Sequence
  chemically synthesized
caccacaccccatcagcatg

SEQ ID NO: 29790 - DNA, 20 bp, Artificial Sequence
  chemically synthesized
cttggaaagccatgtgtaaa

SEQ ID NO: 29791 - DNA, 20 bp, Artificial Sequence
  chemically synthesized
cctgaacatatttctgtcac

SEQ ID NO: 29792 - DNA, 20 bp, Artificial Sequence
  chemically synthesized
cccactcgagaaatgaagaa

SEQ ID NO: 29793 - DNA, 20 bp, Artificial Sequence
  chemically synthesized
agaggcatggggctgtgaag

SEQ ID NO: 29794 - DNA, 20 bp, Artificial Sequence
  chemically synthesized
gctgtgaagatggatgcgat

SEQ ID NO: 29795 - DNA, 20 bp, Artificial Sequence
  chemically synthesized
gatcggtcttgagaaaatac

SEQ ID NO: 29796 - DNA, 20 bp, Artificial Sequence
  chemically synthesized
taagctaaagaaaaccaaac

SEQ ID NO: 29797 - DNA, 20 bp, Artificial Sequence
  chemically synthesized
atgggtggaggggcaagggg

SEQ ID NO: 29798 - DNA, 20 bp, Artificial Sequence
  chemically synthesized
agaaatgcctaatgtagatg

SEQ ID NO: 29799 - DNA, 20 bp, Artificial Sequence
  chemically synthesized
tgcacatgtatcccagaact

SEQ ID NO: 29800 - DNA, 20 bp, Artificial Sequence
  chemically synthesized
agtggtgctgtgagagacaa

SEQ ID NO: 29801 - DNA, 20 bp, Artificial Sequence
  chemically synthesized
tctcactctgttgcccaggc

SEQ ID NO: 29802 - DNA, 20 bp, Artificial Sequence
  chemically synthesized
ctcactgcaacctccgcctc

SEQ ID NO: 29803 - DNA, 20 bp, Artificial Sequence
  chemically synthesized
ttttgtattttttgtagaga

SEQ ID NO: 29804 - DNA, 20 bp, Artificial Sequence
  chemically synthesized
atctcaccatgttgcccagg

SEQ ID NO: 29805 - DNA, 20 bp, Artificial Sequence
  chemically synthesized
ctgccccaacagtcgccctg

SEQ ID NO: 29806 - DNA, 20 bp, Artificial Sequence
  chemically synthesized
cacttgcctttctggcacta

SEQ ID NO: 29807 - DNA, 20 bp, Artificial Sequence
  chemically synthesized
aaccagaactggccattctc

SEQ ID NO: 29808 - DNA, 20 bp, Artificial Sequence
  chemically synthesized
tcaggctctaacatttcttc

SEQ ID NO: 29809 - DNA, 20 bp, Artificial Sequence
  chemically synthesized
ccctctcgcctgaggtgagg

SEQ ID NO: 29810 - DNA, 20 bp, Artificial Sequence
  chemically synthesized
ataccactgaccaatctgga

SEQ ID NO: 29811 - DNA, 20 bp, Artificial Sequence
  chemically synthesized
gagcagcctcagtccagcca

SEQ ID NO: 29812 - DNA, 20 bp, Artificial Sequence
  chemically synthesized
actaattctgctgattccat

SEQ ID NO: 29813 - DNA, 20 bp, Artificial Sequence
  chemically synthesized
cccggagaccattttttgtt

SEQ ID NO: 29814 - DNA, 20 bp, Artificial Sequence
  chemically synthesized
caggtctactaggaacagga

SEQ ID NO: 29815 - DNA, 20 bp, Artificial Sequence
  chemically synthesized
agggcctcaaccttctactg

SEQ ID NO: 29816 - DNA, 20 bp, Artificial Sequence
  chemically synthesized
tcaaaccctgtcaggcggtg

SEQ ID NO: 29817 - DNA, 20 bp, Artificial Sequence
  chemically synthesized
tatcaatgtaattcaaggca

SEQ ID NO: 29818 - DNA, 20 bp, Artificial Sequence
  chemically synthesized
gtaattcaaggcaaagagtc

SEQ ID NO: 29819 - DNA, 20 bp, Artificial Sequence
  chemically synthesized
cagcgaggaggggggaaggt

SEQ ID NO: 29820 - DNA, 20 bp, Artificial Sequence
  chemically synthesized
aggtaacacaaaggcctgta

SEQ ID NO: 29821 - DNA, 20 bp, Artificial Sequence
  chemically synthesized
ggctctccactccatttctc

SEQ ID NO: 29822 - DNA, 20 bp, Artificial Sequence
  chemically synthesized
agagcccctcaataaataat

SEQ ID NO: 29823 - DNA, 20 bp, Artificial Sequence
  chemically synthesized
attcactaaccaaggagcct

SEQ ID NO: 29824 - DNA, 20 bp, Artificial Sequence
  chemically synthesized
gggtcagccttgacccagga

SEQ ID NO: 29825 - DNA, 20 bp, Artificial Sequence
  chemically synthesized
acacagttaaaagagctaca

SEQ ID NO: 29826 - DNA, 20 bp, Artificial Sequence
  chemically synthesized
aaatttccttaagtcttctg

SEQ ID NO: 29827 - DNA, 20 bp, Artificial Sequence
  chemically synthesized
aattggtctcaattactagt

SEQ ID NO: 29828 - DNA, 20 bp, Artificial Sequence
  chemically synthesized
acagtgtgaagtacctccgc

SEQ ID NO: 29829 - DNA, 20 bp, Artificial Sequence
  chemically synthesized
cccaaaactgggaagggccc

SEQ ID NO: 29830 - DNA, 20 bp, Artificial Sequence
  chemically synthesized
aactgggaagggccctggaa

SEQ ID NO: 29831 - DNA, 20 bp, Artificial Sequence
  chemically synthesized
cttgaaaacaaaaatgaagc

SEQ ID NO: 29832 - DNA, 20 bp, Artificial Sequence
  chemically synthesized
aagcacatacacatgctctc

SEQ ID NO: 29833 - DNA, 20 bp, Artificial Sequence
  chemically synthesized
acacatgctctcaggagtca

SEQ ID NO: 29834 - DNA, 20 bp, Artificial Sequence
  chemically synthesized
gctggcaggtgaaggaggac

SEQ ID NO: 29835 - DNA, 20 bp, Artificial Sequence
  chemically synthesized
cttctccatttccatggctc

SEQ ID NO: 29836 - DNA, 20 bp, Artificial Sequence
  chemically synthesized
ttttgaccatcacagtgtcc

SEQ ID NO: 29837 - DNA, 20 bp, Artificial Sequence
  chemically synthesized
ctcagcatgctctctgggaa

SEQ ID NO: 29838 - DNA, 20 bp, Artificial Sequence
  chemically synthesized
ctgggaagtgaattgggaaa

SEQ ID NO: 29839 - DNA, 20 bp, Artificial Sequence
  chemically synthesized
tagtcctgctgtcaaaagaa

SEQ ID NO: 29840 - DNA, 20 bp, Artificial Sequence
  chemically synthesized
agaggcagacctgttaaggg

SEQ ID NO: 29841 - DNA, 20 bp, Artificial Sequence
  chemically synthesized
atctctcatgattctatctt

SEQ ID NO: 29842 - DNA, 20 bp, Artificial Sequence
  chemically synthesized
tcttgagagtttagtttggt

SEQ ID NO: 29843 - DNA, 20 bp, Artificial Sequence
  chemically synthesized
gtttggttggagtttagttt

SEQ ID NO: 29844 - DNA, 20 bp, Artificial Sequence
  chemically synthesized
ttagtttttgagttttttgt

SEQ ID NO: 29845 - DNA, 20 bp, Artificial Sequence
  chemically synthesized
gttcacggagcggacagaag

SEQ ID NO: 29846 - DNA, 20 bp, Artificial Sequence
  chemically synthesized
ctgatacatggagcagagcc

SEQ ID NO: 29847 - DNA, 20 bp, Artificial Sequence
  chemically synthesized
gttcctgggcaccaggcata

SEQ ID NO: 29848 - DNA, 20 bp, Artificial Sequence
  chemically synthesized
gtgacaactttgccacaaat

SEQ ID NO: 29849 - DNA, 20 bp, Artificial Sequence
  chemically synthesized
ttaaatccacaggaagcaag

SEQ ID NO: 29850 - DNA, 20 bp, Artificial Sequence
  chemically synthesized
gcttatttatagatttgcag

SEQ ID NO: 29851 - DNA, 20 bp, Artificial Sequence
  chemically synthesized
tagtaccacactacatttaa

SEQ ID NO: 29852 - DNA, 20 bp, Artificial Sequence
  chemically synthesized
ttatacagtgccttgctttc

SEQ ID NO: 29853 - DNA, 20 bp, Artificial Sequence
  chemically synthesized
attgcagcaataattgatag

SEQ ID NO: 29854 - DNA, 20 bp, Artificial Sequence
  chemically synthesized
gctggaagatcattgattgg

SEQ ID NO: 29855 - DNA, 20 bp, Artificial Sequence
  chemically synthesized
tactttgcgagatgtttgag

SEQ ID NO: 29856 - DNA, 20 bp, Artificial Sequence
  chemically synthesized
tgtgatttatattatttccc

SEQ ID NO: 29857 - DNA, 20 bp, Artificial Sequence
  chemically synthesized
tatttcccatgaataactgc

SEQ ID NO: 29858 - DNA, 20 bp, Artificial Sequence
  chemically synthesized
tgaataactgcaaggatagt

SEQ ID NO: 29859 - DNA, 20 bp, Artificial Sequence
  chemically synthesized
gatagtgtgggtagttggag

SEQ ID NO: 29860 - DNA, 20 bp, Artificial Sequence
  chemically synthesized
gaacaatgctagccaacaat

SEQ ID NO: 29861 - DNA, 20 bp, Artificial Sequence
  chemically synthesized
gttcaacaactcagaccctg

SEQ ID NO: 29862 - DNA, 20 bp, Artificial Sequence
  chemically synthesized
ttgtcagaaataactcaaga

SEQ ID NO: 29863 - DNA, 20 bp, Artificial Sequence
  chemically synthesized
tcgtccccaggaaacatcaa

SEQ ID NO: 29864 - DNA, 20 bp, Artificial Sequence
  chemically synthesized
gagctggcatattagcagac

SEQ ID NO: 29865 - DNA, 20 bp, Artificial Sequence
  chemically synthesized
atctaaaacagaagatgtat

SEQ ID NO: 29866 - DNA, 20 bp, Artificial Sequence
  chemically synthesized
gcttcagcagacaacaaagg

SEQ ID NO: 29867 - DNA, 20 bp, Artificial Sequence
  chemically synthesized
acaaaggaagaatttgggga

SEQ ID NO: 29868 - DNA, 20 bp, Artificial Sequence
  chemically synthesized
ctcgcccaaagcactagaag

SEQ ID NO: 29869 - DNA, 20 bp, Artificial Sequence
  chemically synthesized
ttgaaactgaaccattataa

SEQ ID NO: 29870 - DNA, 20 bp, Artificial Sequence
  chemically synthesized
tgtgacacttaccgcgtatg

SEQ ID NO: 29871 - DNA, 20 bp, Artificial Sequence
  chemically synthesized
tgcttcgtctgtgacagttg

SEQ ID NO: 29872 - DNA, 20 bp, Artificial Sequence
  chemically synthesized
gttgcccttctaggagctgg

SEQ ID NO: 29873 - DNA, 20 bp, Artificial Sequence
  chemically synthesized
cacattcagctgaaaatagc

SEQ ID NO: 29874 - DNA, 20 bp, Artificial Sequence
  chemically synthesized
tctctttagtcctcaacaac

SEQ ID NO: 29875 - DNA, 20 bp, Artificial Sequence
  chemically synthesized
aagtaggttttacagataaa

SEQ ID NO: 29876 - DNA, 20 bp, Artificial Sequence
  chemically synthesized
tgttttttcttaagagaagg

SEQ ID NO: 29877 - DNA, 20 bp, Artificial Sequence
  chemically synthesized
agtataaaacctcaaattat

SEQ ID NO: 29878 - DNA, 20 bp, Artificial Sequence
  chemically synthesized
cattatggaacatatgtgct

SEQ ID NO: 29879 - DNA, 20 bp, Artificial Sequence
  chemically synthesized
gggtctggggagatgggaga

SEQ ID NO: 29880 - DNA, 20 bp, Artificial Sequence
  chemically synthesized
tgcaaataaatgcagtcatc

SEQ ID NO: 29881 - DNA, 20 bp, Artificial Sequence
  chemically synthesized
gtgtaatggaagtctggcct

SEQ ID NO: 29882 - DNA, 20 bp, Artificial Sequence
  chemically synthesized
tactggcttatgaaatgcaa

SEQ ID NO: 29883 - DNA, 20 bp, Artificial Sequence
  chemically synthesized
tgaaatgcaatgggatgagg

SEQ ID NO: 29884 - DNA, 20 bp, Artificial Sequence
  chemically synthesized
tgaacggcacagtgaccagg

SEQ ID NO: 29885 - DNA, 20 bp, Artificial Sequence
  chemically synthesized
tggagcaaggccactccagc

SEQ ID NO: 29886 - DNA, 20 bp, Artificial Sequence
  chemically synthesized
gccactccagcaagaatgcc

SEQ ID NO: 29887 - DNA, 20 bp, Artificial Sequence
  chemically synthesized
aatgccaaggatagcctgca

SEQ ID NO: 29888 - DNA, 20 bp, Artificial Sequence
  chemically synthesized
ggctagcagatgctagtccc

SEQ ID NO: 29889 - DNA, 20 bp, Artificial Sequence
  chemically synthesized
catccaacgtcacgaagctg

SEQ ID NO: 29890 - DNA, 20 bp, Artificial Sequence
  chemically synthesized
agaaacaacgcttgctattc

SEQ ID NO: 29891 - DNA, 20 bp, Artificial Sequence
  chemically synthesized
cagaagtagcccttcaccag

SEQ ID NO: 29892 - DNA, 20 bp, Artificial Sequence
  chemically synthesized
cattttcaacaagaaggctg

SEQ ID NO: 29893 - DNA, 20 bp, Artificial Sequence
  chemically synthesized
aaaatctttttagtatgttt

SEQ ID NO: 29894 - DNA, 20 bp, Artificial Sequence
  chemically synthesized
ccttgttctatcagcaggtc

SEQ ID NO: 29895 - DNA, 20 bp, Artificial Sequence
  chemically synthesized
aagctgttctccattctgaa

SEQ ID NO: 29896 - DNA, 20 bp, Artificial Sequence
  chemically synthesized
atcctagggagactggtact

SEQ ID NO: 29897 - DNA, 20 bp, Artificial Sequence
  chemically synthesized
gagactggtactggggattt

SEQ ID NO: 29898 - DNA, 20 bp, Artificial Sequence
  chemically synthesized
gatttcagggtccttgttct

SEQ ID NO: 29899 - DNA, 20 bp, Artificial Sequence
  chemically synthesized
tggaccatggctcctttcca

SEQ ID NO: 29900 - DNA, 20 bp, Artificial Sequence
  chemically synthesized
ttctcacacaatgagaaaga

SEQ ID NO: 29901 - DNA, 20 bp, Artificial Sequence
  chemically synthesized
agaacggatagccaaattct

SEQ ID NO: 29902 - DNA, 20 bp, Artificial Sequence
  chemically synthesized
tgagatcctctggctttgag

SEQ ID NO: 29903 - DNA, 20 bp, Artificial Sequence
  chemically synthesized
gcacagaaatgagcagcatg

SEQ ID NO: 29904 - DNA, 20 bp, Artificial Sequence
  chemically synthesized
tgaacatgccaactcaacat

SEQ ID NO: 29905 - DNA, 20 bp, Artificial Sequence
  chemically synthesized
acagaggtattacagtgtga

SEQ ID NO: 29906 - DNA, 20 bp, Artificial Sequence
  chemically synthesized
agagtctgagcccacagtct

SEQ ID NO: 29907 - DNA, 20 bp, Artificial Sequence
  chemically synthesized
aacaccctgggaagactact

SEQ ID NO: 29908 - DNA, 20 bp, Artificial Sequence
  chemically synthesized
cttttccctgctaacagaaa

SEQ ID NO: 29909 - DNA, 20 bp, Artificial Sequence
  chemically synthesized
ttttaagattactattctat

SEQ ID NO: 29910 - DNA, 20 bp, Artificial Sequence
  chemically synthesized
atttaggagcgctagacaca

SEQ ID NO: 29911 - DNA, 20 bp, Artificial Sequence
  chemically synthesized
tgccacaaggcaggaagggg

SEQ ID NO: 29912 - DNA, 20 bp, Artificial Sequence
  chemically synthesized
attttgcctttaatcaatga

SEQ ID NO: 29913 - DNA, 20 bp, Artificial Sequence
  chemically synthesized
accccacaatgccacacacc

SEQ ID NO: 29914 - DNA, 20 bp, Artificial Sequence
  chemically synthesized
aaatgtagattatcttccct

SEQ ID NO: 29915 - DNA, 20 bp, Artificial Sequence
  chemically synthesized
tcaacattagatatttaaaa

SEQ ID NO: 29916 - DNA, 20 bp, Artificial Sequence
  chemically synthesized
ggcatgaaaaagaaggctta

SEQ ID NO: 29917 - DNA, 20 bp, Artificial Sequence
  chemically synthesized
caaccacaccagcctttaac

SEQ ID NO: 29918 - DNA, 20 bp, Artificial Sequence
  chemically synthesized
actcccttatttatgagcag

SEQ ID NO: 29919 - DNA, 20 bp, Artificial Sequence
  chemically synthesized
atgaacctttaatgggaaat

SEQ ID NO: 29920 - DNA, 20 bp, Artificial Sequence
  chemically synthesized
ctttaatgggaaatctggat

SEQ ID NO: 29921 - DNA, 20 bp, Artificial Sequence
  chemically synthesized
tgacttggttttcccaactc

SEQ ID NO: 29922 - DNA, 20 bp, Artificial Sequence
  chemically synthesized
tctgtgctattacttttgac

SEQ ID NO: 29923 - DNA, 20 bp, Artificial Sequence
  chemically synthesized
aaacatttaaattatcctgg

SEQ ID NO: 29924 - DNA, 20 bp, Artificial Sequence
  chemically synthesized
tttgtctcacgggctgttca

SEQ ID NO: 29925 - DNA, 20 bp, Artificial Sequence
  chemically synthesized
cctttccttctaggaacatg

SEQ ID NO: 29926 - DNA, 20 bp, Artificial Sequence
  chemically synthesized
tccttctaggaacatgagga

SEQ ID NO: 29927 - DNA, 20 bp, Artificial Sequence
  chemically synthesized
tcaaagcctgtaaaagatac

SEQ ID NO: 29928 - DNA, 20 bp, Artificial Sequence
  chemically synthesized
tttaactgaacaatgtctcc

SEQ ID NO: 29929 - DNA, 20 bp, Artificial Sequence
  chemically synthesized
gaccgtctctttggtgcagt

SEQ ID NO: 29930 - DNA, 20 bp, Artificial Sequence
  chemically synthesized
ataataggacaatgccataa

SEQ ID NO: 29931 - DNA, 20 bp, Artificial Sequence
  chemically synthesized
aaatacttactgtactgcag

SEQ ID NO: 29932 - DNA, 20 bp, Artificial Sequence
  chemically synthesized
tttgttttttgtttctgagg

SEQ ID NO: 29933 - DNA, 20 bp, Artificial Sequence
  chemically synthesized
ttcgctcttgttgcccgggc

SEQ ID NO: 29934 - DNA, 20 bp, Artificial Sequence
  chemically synthesized
ctcaccgcaatctccgcctc

SEQ ID NO: 29935 - DNA, 20 bp, Artificial Sequence
  chemically synthesized
gcctcagcctcccaagtagc

SEQ ID NO: 29936 - DNA, 20 bp, Artificial Sequence
  chemically synthesized
ttctgtatttttggtagaga

SEQ ID NO: 29937 - DNA, 20 bp, Artificial Sequence
  chemically synthesized
acctcagcctcccaaagtgc

SEQ ID NO: 29938 - DNA, 20 bp, Artificial Sequence
  chemically synthesized
aggtggtcaaaatgtttcta

SEQ ID NO: 29939 - DNA, 20 bp, Artificial Sequence
  chemically synthesized
ccccaattaaactgttgctt

SEQ ID NO: 29940 - DNA, 20 bp, Artificial Sequence
  chemically synthesized
aacactagcccacatgccaa

SEQ ID NO: 29941 - DNA, 20 bp, Artificial Sequence
  chemically synthesized
aaaatagctgcctcatcatc

SEQ ID NO: 29942 - DNA, 20 bp, Artificial Sequence
  chemically synthesized
acctatctcaaaagaaaatt

SEQ ID NO: 29943 - DNA, 20 bp, Artificial Sequence
  chemically synthesized
tctttcccctctaggacact

SEQ ID NO: 29944 - DNA, 20 bp, Artificial Sequence
  chemically synthesized
cactattaaagagagatcac

SEQ ID NO: 29945 - DNA, 20 bp, Artificial Sequence
  chemically synthesized
taaagagagatcacagggat

SEQ ID NO: 29946 - DNA, 20 bp, Artificial Sequence
  chemically synthesized
catgaaacaccatccatgcc

SEQ ID NO: 29947 - DNA, 20 bp, Artificial Sequence
  chemically synthesized
catgccctgagtatcccaac

SEQ ID NO: 29948 - DNA, 20 bp, Artificial Sequence
  chemically synthesized
acaggggagaactcggcatg

SEQ ID NO: 29949 - DNA, 20 bp, Artificial Sequence
  chemically synthesized
tcggcatgaagggtataaca

SEQ ID NO: 29950 - DNA, 20 bp, Artificial Sequence
  chemically synthesized
caactcatccaccccctttg

SEQ ID NO: 29951 - DNA, 20 bp, Artificial Sequence
  chemically synthesized
tgctgcctttgtcttctgat

SEQ ID NO: 29952 - DNA, 20 bp, Artificial Sequence
  chemically synthesized
cagcagccctctgtgatcta

SEQ ID NO: 29953 - DNA, 20 bp, Artificial Sequence
  chemically synthesized
cttcttcttctcttacctcc

SEQ ID NO: 29954 - DNA, 20 bp, Artificial Sequence
  chemically synthesized
tacctagtcaccttagcaag

SEQ ID NO: 29955 - DNA, 20 bp, Artificial Sequence
  chemically synthesized
attaatttcatgtgttccca

SEQ ID NO: 29956 - DNA, 20 bp, Artificial Sequence
  chemically synthesized
acatgatattcatatattct

SEQ ID NO: 29957 - DNA, 20 bp, Artificial Sequence
  chemically synthesized
tatgctacacaaagattagc

SEQ ID NO: 29958 - DNA, 20 bp, Artificial Sequence
  chemically synthesized
gccaggttggtaaagtctga

SEQ ID NO: 29959 - DNA, 20 bp, Artificial Sequence
  chemically synthesized
actttgggaggccggggcag

SEQ ID NO: 29960 - DNA, 20 bp, Artificial Sequence
  chemically synthesized
caggaggatcacctgaggtc

SEQ ID NO: 29961 - DNA, 20 bp, Artificial Sequence
  chemically synthesized
tgcattccagcccgggcaac

SEQ ID NO: 29962 - DNA, 20 bp, Artificial Sequence
  chemically synthesized
aaataccttggaaattgaga

SEQ ID NO: 29963 - DNA, 20 bp, Artificial Sequence
  chemically synthesized
gagggaatctggagaggaag

SEQ ID NO: 29964 - DNA, 20 bp, Artificial Sequence
  chemically synthesized
aacaaaaaccctcactttac

SEQ ID NO: 29965 - DNA, 20 bp, Artificial Sequence
  chemically synthesized
cttaaggagaagacatactg

SEQ ID NO: 29966 - DNA, 20 bp, Artificial Sequence
  chemically synthesized
agacatactgatgaataaga

SEQ ID NO: 29967 - DNA, 20 bp, Artificial Sequence
  chemically synthesized
actttgggaggtcaaggcag

SEQ ID NO: 29968 - DNA, 20 bp, Artificial Sequence
  chemically synthesized
caggaggatcactggagccc

SEQ ID NO: 29969 - DNA, 20 bp, Artificial Sequence
  chemically synthesized
tactcaggaggctgaggtga

SEQ ID NO: 29970 - DNA, 20 bp, Artificial Sequence
  chemically synthesized
caactaattgggctaatgtt

SEQ ID NO: 29971 - DNA, 20 bp, Artificial Sequence
  chemically synthesized
tagggaagaaaaaaacttag

SEQ ID NO: 29972 - DNA, 20 bp, Artificial Sequence
  chemically synthesized
ttttactttttgaagcctgc

SEQ ID NO: 29973 - DNA, 20 bp, Artificial Sequence
  chemically synthesized
acccaaatgctctgcttatg

SEQ ID NO: 29974 - DNA, 20 bp, Artificial Sequence
  chemically synthesized
taccaacttctataaaatct

SEQ ID NO: 29975 - DNA, 20 bp, Artificial Sequence
  chemically synthesized
gtgctaccctgaaagacggc

SEQ ID NO: 29976 - DNA, 20 bp, Artificial Sequence
  chemically synthesized
gacttggttccactccagtg

SEQ ID NO: 29977 - DNA, 20 bp, Artificial Sequence
  chemically synthesized
cattcattttaagtgtacag

SEQ ID NO: 29978 - DNA, 20 bp, Artificial Sequence
  chemically synthesized
ccacctaccaccacagtgtt

SEQ ID NO: 29979 - DNA, 20 bp, Artificial Sequence
  chemically synthesized
caccacagtgttgagaattc

SEQ ID NO: 29980 - DNA, 20 bp, Artificial Sequence
  chemically synthesized
ttgttacaaatggactcata

SEQ ID NO: 29981 - DNA, 20 bp, Artificial Sequence
  chemically synthesized
gtttaatttcttccacagag

SEQ ID NO: 29982 - DNA, 20 bp, Artificial Sequence
  chemically synthesized
tccacagagcagaatgattc

SEQ ID NO: 29983 - DNA, 20 bp, Artificial Sequence
  chemically synthesized
tctgggattcatccatggtg

SEQ ID NO: 29984 - DNA, 20 bp, Artificial Sequence
  chemically synthesized
actctttcattcttctactg

SEQ ID NO: 29985 - DNA, 20 bp, Artificial Sequence
  chemically synthesized
ttcaacctattggttgccat

SEQ ID NO: 29986 - DNA, 20 bp, Artificial Sequence
  chemically synthesized
cactgtgtagatgtgtttat

SEQ ID NO: 29987 - DNA, 20 bp, Artificial Sequence
  chemically synthesized
tcgagaacacagaaaaggtt

SEQ ID NO: 29988 - DNA, 20 bp, Artificial Sequence
  chemically synthesized
acacagaaaaggttttgagt

SEQ ID NO: 29989 - DNA, 20 bp, Artificial Sequence
  chemically synthesized
ccctcccaccccattccctg

SEQ ID NO: 29990 - DNA, 20 bp, Artificial Sequence
  chemically synthesized
ctaccaaatgtcatcctatt

SEQ ID NO: 29991 - DNA, 20 bp, Artificial Sequence
  chemically synthesized
ttcttaaaatgggcattcat

SEQ ID NO: 29992 - DNA, 20 bp, Artificial Sequence
  chemically synthesized
caggccaaataaattggact

SEQ ID NO: 29993 - DNA, 20 bp, Artificial Sequence
  chemically synthesized
gataacttaagtgtggtgtt

SEQ ID NO: 29994 - DNA, 20 bp, Artificial Sequence
  chemically synthesized
cctcccccattagcagcatg

SEQ ID NO: 29995 - DNA, 20 bp, Artificial Sequence
  chemically synthesized
gcttggccatggcagggctg

SEQ ID NO: 29996 - DNA, 20 bp, Artificial Sequence
  chemically synthesized
ggcctccagtgggaccagag

SEQ ID NO: 29997 - DNA, 20 bp, Artificial Sequence
  chemically synthesized
gctgattaaaggaaggtacg

SEQ ID NO: 29998 - DNA, 20 bp, Artificial Sequence
  chemically synthesized
cagagagaaagtgaagcccc

SEQ ID NO: 29999 - DNA, 20 bp, Artificial Sequence
  chemically synthesized
ttgagctacacaggctaagc

SEQ ID NO: 30000 - DNA, 20 bp, Artificial Sequence
  chemically synthesized
caggctaagcaagagtgaga

SEQ ID NO: 30001 - DNA, 20 bp, Artificial Sequence
  chemically synthesized
gatgctgacaggccacatgg

SEQ ID NO: 30002 - DNA, 20 bp, Artificial Sequence
  chemically synthesized
gaagacgtgggctgggagct

SEQ ID NO: 30003 - DNA, 20 bp, Artificial Sequence
  chemically synthesized
gtcacctccccactctggac

SEQ ID NO: 30004 - DNA, 20 bp, Artificial Sequence
  chemically synthesized
tatgcaatttttgccaagat

SEQ ID NO: 30005 - DNA, 20 bp, Artificial Sequence
  chemically synthesized
agatgggagtatggggagag

SEQ ID NO: 30006 - DNA, 20 bp, Artificial Sequence
  chemically synthesized
ccaaatgttctttcttcagc

SEQ ID NO: 30007 - DNA, 20 bp, Artificial Sequence
  chemically synthesized
tatggactcatccgtaaaat

SEQ ID NO: 30008 - DNA, 20 bp, Artificial Sequence
  chemically synthesized
taataatagtatatgcttca

SEQ ID NO: 30009 - DNA, 20 bp, Artificial Sequence
  chemically synthesized
agggtttgtatgaaaataaa

SEQ ID NO: 30010 - DNA, 20 bp, Artificial Sequence
  chemically synthesized
tatttgtaaagttcctagag

SEQ ID NO: 30011 - DNA, 20 bp, Artificial Sequence
  chemically synthesized
ccctttccccaattcctagt

SEQ ID NO: 30012 - DNA, 20 bp, Artificial Sequence
  chemically synthesized
aaagggagaggaaaaaggaa

SEQ ID NO: 30013 - DNA, 20 bp, Artificial Sequence
  chemically synthesized
ctgataggtgcctatatgtg

SEQ ID NO: 30014 - DNA, 20 bp, Artificial Sequence
  chemically synthesized
taggtgcctatatgtgatgg

SEQ ID NO: 30015 - DNA, 20 bp, Artificial Sequence
  chemically synthesized
atggacaattatgaggaggg

SEQ ID NO: 30016 - DNA, 20 bp, Artificial Sequence
  chemically synthesized
ttcacctcctttacaatttt

SEQ ID NO: 30017 - DNA, 20 bp, Artificial Sequence
  chemically synthesized
gaccctggtgtgttatgtct

SEQ ID NO: 30018 - DNA, 20 bp, Artificial Sequence
  chemically synthesized
tacctgtatggactttgcac

SEQ ID NO: 30019 - DNA, 20 bp, Artificial Sequence
  chemically synthesized
ctagctgccttccttatcac

SEQ ID NO: 30020 - DNA, 20 bp, Artificial Sequence
  chemically synthesized
cccaaggtccatcagtacct

SEQ ID NO: 30021 - DNA, 20 bp, Artificial Sequence
  chemically synthesized
ggcacagtcaggctgttttc

SEQ ID NO: 30022 - DNA, 20 bp, Artificial Sequence
  chemically synthesized
agtcaggctgttttccaggg

SEQ ID NO: 30023 - DNA, 20 bp, Artificial Sequence
  chemically synthesized
tgttgtgatccctgtggttt

SEQ ID NO: 30024 - DNA, 20 bp, Artificial Sequence
  chemically synthesized
aatggtgctgtcatttttct

SEQ ID NO: 30025 - DNA, 20 bp, Artificial Sequence
  chemically synthesized
tctgagagtctctaaattac

SEQ ID NO: 30026 - DNA, 20 bp, Artificial Sequence
  chemically synthesized
gaacaaacaaaccaaagaga

SEQ ID NO: 30027 - DNA, 20 bp, Artificial Sequence
  chemically synthesized
tcaattgataatgaaggctt

SEQ ID NO: 30028 - DNA, 20 bp, Artificial Sequence
  chemically synthesized
gcaatgcacctgtgcaggaa

SEQ ID NO: 30029 - DNA, 20 bp, Artificial Sequence
  chemically synthesized
ggaaatggattacggaaaca

SEQ ID NO: 30030 - DNA, 20 bp, Artificial Sequence
  chemically synthesized
ggaagtccaatacacgttta

SEQ ID NO: 30031 - DNA, 20 bp, Artificial Sequence
  chemically synthesized
aggctaccacagatggggga

SEQ ID NO: 30032 - DNA, 20 bp, Artificial Sequence
  chemically synthesized
ccacagatgggggacagggt

SEQ ID NO: 30033 - DNA, 20 bp, Artificial Sequence
  chemically synthesized
gtggtgttactgaggggcaa

SEQ ID NO: 30034 - DNA, 20 bp, Artificial Sequence
  chemically synthesized
gctctggacacacagcaaaa

SEQ ID NO: 30035 - DNA, 20 bp, Artificial Sequence
  chemically synthesized
acacacagcaaaagtgagtt

SEQ ID NO: 30036 - DNA, 20 bp, Artificial Sequence
  chemically synthesized
gcaggaaagagggaagagag

SEQ ID NO: 30037 - DNA, 20 bp, Artificial Sequence
  chemically synthesized
ctttgctgcaggttcaaggc

SEQ ID NO: 30038 - DNA, 20 bp, Artificial Sequence
  chemically synthesized
accccttctggaagagcctg

SEQ ID NO: 30039 - DNA, 20 bp, Artificial Sequence
  chemically synthesized
gcaggggcctgggccattta

SEQ ID NO: 30040 - DNA, 20 bp, Artificial Sequence
  chemically synthesized
ttcccactctaggttccact

SEQ ID NO: 30041 - DNA, 20 bp, Artificial Sequence
  chemically synthesized
tctctcactatgctcccaag

SEQ ID NO: 30042 - DNA, 20 bp, Artificial Sequence
  chemically synthesized
ccttcctcaaatctccctca

SEQ ID NO: 30043 - DNA, 20 bp, Artificial Sequence
  chemically synthesized
cctgaaaagcagcatgcaaa

SEQ ID NO: 30044 - DNA, 20 bp, Artificial Sequence
  chemically synthesized
cccatggacagtcataagag

SEQ ID NO: 30045 - DNA, 20 bp, Artificial Sequence
  chemically synthesized
acgattacttcacgataaat

SEQ ID NO: 30046 - DNA, 20 bp, Artificial Sequence
  chemically synthesized
tctctactcctcccccagtg

SEQ ID NO: 30047 - DNA, 20 bp, Artificial Sequence
  chemically synthesized
cccccagtgttgagtggaca

SEQ ID NO: 30048 - DNA, 20 bp, Artificial Sequence
  chemically synthesized
tagagaaacattccattgaa

SEQ ID NO: 30049 - DNA, 20 bp, Artificial Sequence
  chemically synthesized
tttgatcaagtcagattttt

SEQ ID NO: 30050 - DNA, 20 bp, Artificial Sequence
  chemically synthesized
caagtcagatttttcagaat

SEQ ID NO: 30051 - DNA, 20 bp, Artificial Sequence
  chemically synthesized
agccctcaggttagcaggcc

SEQ ID NO: 30052 - DNA, 20 bp, Artificial Sequence
  chemically synthesized
ttagcaggccaaggatatat

SEQ ID NO: 30053 - DNA, 20 bp, Artificial Sequence
  chemically synthesized
ctagacttaaactgccgctc

SEQ ID NO: 30054 - DNA, 20 bp, Artificial Sequence
  chemically synthesized
cttaaactgccgctcctgaa

SEQ ID NO: 30055 - DNA, 20 bp, Artificial Sequence
  chemically synthesized
gattcatggcccctaacatc

SEQ ID NO: 30056 - DNA, 20 bp, Artificial Sequence
  chemically synthesized
aataataataatagcttcca

SEQ ID NO: 30057 - DNA, 20 bp, Artificial Sequence
  chemically synthesized
tccagtagagaaatgatcaa

SEQ ID NO: 30058 - DNA, 20 bp, Artificial Sequence
  chemically synthesized
atgaaaccaagcttcctctg

SEQ ID NO: 30059 - DNA, 20 bp, Artificial Sequence
  chemically synthesized
gacccaccgcttcattggcc

SEQ ID NO: 30060 - DNA, 20 bp, Artificial Sequence
  chemically synthesized
gaggatgaccccataaaggt

SEQ ID NO: 30061 - DNA, 20 bp, Artificial Sequence
  chemically synthesized
cctggcagaccctcaagagc

SEQ ID NO: 30062 - DNA, 20 bp, Artificial Sequence
  chemically synthesized
gacatcactcttagcagggc

SEQ ID NO: 30063 - DNA, 20 bp, Artificial Sequence
  chemically synthesized
tcactcttagcagggctggg

SEQ ID NO: 30064 - DNA, 20 bp, Artificial Sequence
  chemically synthesized
ggggtgagtcaaaagtctgg

SEQ ID NO: 30065 - DNA, 20 bp, Artificial Sequence
  chemically synthesized
tgggagaatggaggtgtgga

SEQ ID NO: 30066 - DNA, 20 bp, Artificial Sequence
  chemically synthesized
tggaggtgtggaggggataa

SEQ ID NO: 30067 - DNA, 20 bp, Artificial Sequence
  chemically synthesized
caggaagggcctctatgtag

SEQ ID NO: 30068 - DNA, 20 bp, Artificial Sequence
  chemically synthesized
acccaggctgggctggacag

SEQ ID NO: 30069 - DNA, 20 bp, Artificial Sequence
  chemically synthesized
agaggggtcccacaagatca

SEQ ID NO: 30070 - DNA, 20 bp, Artificial Sequence
  chemically synthesized
cccatacccacttcccttcc

SEQ ID NO: 30071 - DNA, 20 bp, Artificial Sequence
  chemically synthesized
ggcttaaggaagcctctctg

SEQ ID NO: 30072 - DNA, 20 bp, Artificial Sequence
  chemically synthesized
tatgtaccttatacatacat

SEQ ID NO: 30073 - DNA, 20 bp, Artificial Sequence
  chemically synthesized
acaggaagcaggtggtggtg

SEQ ID NO: 30074 - DNA, 20 bp, Artificial Sequence
  chemically synthesized
ccacacaggcatccaaaggg

SEQ ID NO: 30075 - DNA, 20 bp, Artificial Sequence
  chemically synthesized
gcaagacagccatgtgcaag

SEQ ID NO: 30076 - DNA, 20 bp, Artificial Sequence
  chemically synthesized
gacagccatgtgcaaggcga

SEQ ID NO: 30077 - DNA, 20 bp, Artificial Sequence
  chemically synthesized
cgtcactcccacagagctgc

SEQ ID NO: 30078 - DNA, 20 bp, Artificial Sequence
  chemically synthesized
gactcatgtgtagctgactt

SEQ ID NO: 30079 - DNA, 20 bp, Artificial Sequence
  chemically synthesized
catgaagctccccggaccaa

SEQ ID NO: 30080 - DNA, 20 bp, Artificial Sequence
  chemically synthesized
ctgaaggaaaccgctcaacc

SEQ ID NO: 30081 - DNA, 20 bp, Artificial Sequence
  chemically synthesized
ttgccctgggcactgagggc

SEQ ID NO: 30082 - DNA, 20 bp, Artificial Sequence
  chemically synthesized
cagaggcctgcggctgtgcc

SEQ ID NO: 30083 - DNA, 20 bp, Artificial Sequence
  chemically synthesized
tgtgtgagagcggtggtctt

SEQ ID NO: 30084 - DNA, 20 bp, Artificial Sequence
  chemically synthesized
ggaggggacagggggcaggt

SEQ ID NO: 30085 - DNA, 20 bp, Artificial Sequence
  chemically synthesized
cccctgagaaaaaatggcag

SEQ ID NO: 30086 - DNA, 20 bp, Artificial Sequence
  chemically synthesized
gaagggactacgtgtattga

SEQ ID NO: 30087 - DNA, 20 bp, Artificial Sequence
  chemically synthesized
cacttcccaactcctcagga

SEQ ID NO: 30088 - DNA, 20 bp, Artificial Sequence
  chemically synthesized
gcacctcacttcaagccttg

SEQ ID NO: 30089 - DNA, 20 bp, Artificial Sequence
  chemically synthesized
tcccaagttagacagatgag

SEQ ID NO: 30090 - DNA, 20 bp, Artificial Sequence
  chemically synthesized
atgacattgtatggccaacc

SEQ ID NO: 30091 - DNA, 20 bp, Artificial Sequence
  chemically synthesized
ttgctgatggaactagttaa

SEQ ID NO: 30092 - DNA, 20 bp, Artificial Sequence
  chemically synthesized
tgtctgtgaagcaagcctag

SEQ ID NO: 30093 - DNA, 20 bp, Artificial Sequence
  chemically synthesized
gggtgggcttgcaagcattt

SEQ ID NO: 30094 - DNA, 20 bp, Artificial Sequence
  chemically synthesized
tgctacttgccagaacaaaa

SEQ ID NO: 30095 - DNA, 20 bp, Artificial Sequence
  chemically synthesized
cctggtttgtaagttctctt

SEQ ID NO: 30096 - DNA, 20 bp, Artificial Sequence
  chemically synthesized
gttctctttcgggtgcttcc

SEQ ID NO: 30097 - DNA, 20 bp, Artificial Sequence
  chemically synthesized
ttttttttttttttttgaga

SEQ ID NO: 30098 - DNA, 20 bp, Artificial Sequence
  chemically synthesized
ttcgctcttgttgcccaggc

SEQ ID NO: 30099 - DNA, 20 bp, Artificial Sequence
  chemically synthesized
cggctcaccacctctgcctc

SEQ ID NO: 30100 - DNA, 20 bp, Artificial Sequence
  chemically synthesized
aattctcctccctcagcctc

SEQ ID NO: 30101 - DNA, 20 bp, Artificial Sequence
  chemically synthesized
ccctcagcctcctgagtagc

SEQ ID NO: 30102 - DNA, 20 bp, Artificial Sequence
  chemically synthesized
acctcggcctcccaaagtgc

SEQ ID NO: 30103 - DNA, 20 bp, Artificial Sequence
  chemically synthesized
ttattctaattattttacta

SEQ ID NO: 30104 - DNA, 20 bp, Artificial Sequence
  chemically synthesized
attattttactagtgaatta

SEQ ID NO: 30105 - DNA, 20 bp, Artificial Sequence
  chemically synthesized
acaatgcaactcaagactat

SEQ ID NO: 30106 - DNA, 20 bp, Artificial Sequence
  chemically synthesized
ctcaagactatcagaatgat

SEQ ID NO: 30107 - DNA, 20 bp, Artificial Sequence
  chemically synthesized
aaagctggtgaaacaaaatg

SEQ ID NO: 30108 - DNA, 20 bp, Artificial Sequence
  chemically synthesized
tttgctgagctccaaagtca

SEQ ID NO: 30109 - DNA, 20 bp, Artificial Sequence
  chemically synthesized
gcctaataaaactgcacaga

SEQ ID NO: 30110 - DNA, 20 bp, Artificial Sequence
  chemically synthesized
aacttcttcatcagattcag

SEQ ID NO: 30111 - DNA, 20 bp, Artificial Sequence
  chemically synthesized
tcagattcagaagagtagca

SEQ ID NO: 30112 - DNA, 20 bp, Artificial Sequence
  chemically synthesized
acactttgtacatacaattc

SEQ ID NO: 30113 - DNA, 20 bp, Artificial Sequence
  chemically synthesized
atgctttctaatattaaaat

SEQ ID NO: 30114 - DNA, 20 bp, Artificial Sequence
  chemically synthesized
gggaggtacttaatctctaa

SEQ ID NO: 30115 - DNA, 20 bp, Artificial Sequence
  chemically synthesized
atctctaagagaatcaagtc

SEQ ID NO: 30116 - DNA, 20 bp, Artificial Sequence
  chemically synthesized
ctaagagaatcaagtctcga

SEQ ID NO: 30117 - DNA, 20 bp, Artificial Sequence
  chemically synthesized
tgggtaaaatgagctgggga

SEQ ID NO: 30118 - DNA, 20 bp, Artificial Sequence
  chemically synthesized
ttaaggcctgggctgtctag

SEQ ID NO: 30119 - DNA, 20 bp, Artificial Sequence
  chemically synthesized
gtctgtcatcttaatacaca

SEQ ID NO: 30120 - DNA, 20 bp, Artificial Sequence
  chemically synthesized
tttgtcctggcaatgggagc

SEQ ID NO: 30121 - DNA, 20 bp, Artificial Sequence
  chemically synthesized
tcctggcaatgggagcagga

SEQ ID NO: 30122 - DNA, 20 bp, Artificial Sequence
  chemically synthesized
gctctgaccaggtggaaagc

SEQ ID NO: 30123 - DNA, 20 bp, Artificial Sequence
  chemically synthesized
gaccaggtggaaagccagaa

SEQ ID NO: 30124 - DNA, 20 bp, Artificial Sequence
  chemically synthesized
ataatgtgtggcgctcaggt

SEQ ID NO: 30125 - DNA, 20 bp, Artificial Sequence
  chemically synthesized
ccactgcaagggacaatatt

SEQ ID NO: 30126 - DNA, 20 bp, Artificial Sequence
  chemically synthesized
aaggaacgagggggcagaga

SEQ ID NO: 30127 - DNA, 20 bp, Artificial Sequence
  chemically synthesized
cagagagggaatgaaagaca

SEQ ID NO: 30128 - DNA, 20 bp, Artificial Sequence
  chemically synthesized
ggcacattctgagaactctg

SEQ ID NO: 30129 - DNA, 20 bp, Artificial Sequence
  chemically synthesized
gctgcctaccggcacgcatg

SEQ ID NO: 30130 - DNA, 20 bp, Artificial Sequence
  chemically synthesized
tgatgaagatgcagtacctt

SEQ ID NO: 30131 - DNA, 20 bp, Artificial Sequence
  chemically synthesized
gcagtaccttctgggtctgc

SEQ ID NO: 30132 - DNA, 20 bp, Artificial Sequence
  chemically synthesized
aggcagaggaggccacctat

SEQ ID NO: 30133 - DNA, 20 bp, Artificial Sequence
  chemically synthesized
gaggccacctatctgaatgc

SEQ ID NO: 30134 - DNA, 20 bp, Artificial Sequence
  chemically synthesized
ccagcctgctctcccaaaga

SEQ ID NO: 30135 - DNA, 20 bp, Artificial Sequence
  chemically synthesized
ccaaggcaaaaagcaaatag

SEQ ID NO: 30136 - DNA, 20 bp, Artificial Sequence
  chemically synthesized
ggcaaaaagcaaatagcaga

SEQ ID NO: 30137 - DNA, 20 bp, Artificial Sequence
  chemically synthesized
cttgaaattatatagagagg

SEQ ID NO: 30138 - DNA, 20 bp, Artificial Sequence
  chemically synthesized
gtgtgcaggctgtggaagcg

SEQ ID NO: 30139 - DNA, 20 bp, Artificial Sequence
  chemically synthesized
ggggtggacccagaagtata

SEQ ID NO: 30140 - DNA, 20 bp, Artificial Sequence
  chemically synthesized
acccagaagtataaggagtt

SEQ ID NO: 30141 - DNA, 20 bp, Artificial Sequence
  chemically synthesized
aagtataaggagttctggat

SEQ ID NO: 30142 - DNA, 20 bp, Artificial Sequence
  chemically synthesized
ccctttctcctgcctcttca

SEQ ID NO: 30143 - DNA, 20 bp, Artificial Sequence
  chemically synthesized
ttcacagggttactcatgag

SEQ ID NO: 30144 - DNA, 20 bp, Artificial Sequence
  chemically synthesized
cagcacaatggacattcgaa

SEQ ID NO: 30145 - DNA, 20 bp, Artificial Sequence
  chemically synthesized
ttcataagccaaaaaagcta

SEQ ID NO: 30146 - DNA, 20 bp, Artificial Sequence
  chemically synthesized
gatcggagagaaaagaaggg

SEQ ID NO: 30147 - DNA, 20 bp, Artificial Sequence
  chemically synthesized
ggatactcagaaacggcttc

SEQ ID NO: 30148 - DNA, 20 bp, Artificial Sequence
  chemically synthesized
atcactcatcaggtagtcag

SEQ ID NO: 30149 - DNA, 20 bp, Artificial Sequence
  chemically synthesized
tgcatccacacagggaacaa

SEQ ID NO: 30150 - DNA, 20 bp, Artificial Sequence
  chemically synthesized
tcttcaggctgccagagcaa

SEQ ID NO: 30151 - DNA, 20 bp, Artificial Sequence
  chemically synthesized
cagctggccactctgtgacg

SEQ ID NO: 30152 - DNA, 20 bp, Artificial Sequence
  chemically synthesized
tggccactctgtgacggagg

SEQ ID NO: 30153 - DNA, 20 bp, Artificial Sequence
  chemically synthesized
agggtgggtaacctctctac

SEQ ID NO: 30154 - DNA, 20 bp, Artificial Sequence
  chemically synthesized
tctacctgggtctatcattt

SEQ ID NO: 30155 - DNA, 20 bp, Artificial Sequence
  chemically synthesized
ataacccaaatagggctttg

SEQ ID NO: 30156 - DNA, 20 bp, Artificial Sequence
  chemically synthesized
accacactaggctttgcagc

SEQ ID NO: 30157 - DNA, 20 bp, Artificial Sequence
  chemically synthesized
ccagatggtgcgagaagata

SEQ ID NO: 30158 - DNA, 20 bp, Artificial Sequence
  chemically synthesized
tagtgaatcactcataggca

SEQ ID NO: 30159 - DNA, 20 bp, Artificial Sequence
  chemically synthesized
aattctctctgcatcagagg

SEQ ID NO: 30160 - DNA, 20 bp, Artificial Sequence
  chemically synthesized
gagctggctcaggacgccac

SEQ ID NO: 30161 - DNA, 20 bp, Artificial Sequence
  chemically synthesized
agccggccccagctggcatg

SEQ ID NO: 30162 - DNA, 20 bp, Artificial Sequence
  chemically synthesized
tataatgctgagatttatac

SEQ ID NO: 30163 - DNA, 20 bp, Artificial Sequence
  chemically synthesized
tggcattatctaatttaact

SEQ ID NO: 30164 - DNA, 20 bp, Artificial Sequence
  chemically synthesized
atcccaacagacagagggcc

SEQ ID NO: 30165 - DNA, 20 bp, Artificial Sequence
  chemically synthesized
taaatgctcttctagctctg

SEQ ID NO: 30166 - DNA, 20 bp, Artificial Sequence
  chemically synthesized
ttttacattttcagatgttt

SEQ ID NO: 30167 - DNA, 20 bp, Artificial Sequence
  chemically synthesized
ttcaacagctcactgcataa

SEQ ID NO: 30168 - DNA, 20 bp, Artificial Sequence
  chemically synthesized
caaacagcacaagacagaaa

SEQ ID NO: 30169 - DNA, 20 bp, Artificial Sequence
  chemically synthesized
agcacaagacagaaagcggg

SEQ ID NO: 30170 - DNA, 20 bp, Artificial Sequence
  chemically synthesized
agcgggtggggtggggggcg

SEQ ID NO: 30171 - DNA, 20 bp, Artificial Sequence
  chemically synthesized
taacaaaggacagcatacta

SEQ ID NO: 30172 - DNA, 20 bp, Artificial Sequence
  chemically synthesized
catactatgggataattact

SEQ ID NO: 30173 - DNA, 20 bp, Artificial Sequence
  chemically synthesized
gtcttcggtgttggttccta

SEQ ID NO: 30174 - DNA, 20 bp, Artificial Sequence
  chemically synthesized
gtgttggttcctatggggtt

SEQ ID NO: 30175 - DNA, 20 bp, Artificial Sequence
  chemically synthesized
agaggagacagagaagcttc

SEQ ID NO: 30176 - DNA, 20 bp, Artificial Sequence
  chemically synthesized
agagaagcttcctgggtgtg

SEQ ID NO: 30177 - DNA, 20 bp, Artificial Sequence
  chemically synthesized
cacaggagcaagcactgcag

SEQ ID NO: 30178 - DNA, 20 bp, Artificial Sequence
  chemically synthesized
caagcactgcagccgggtcc

SEQ ID NO: 30179 - DNA, 20 bp, Artificial Sequence
  chemically synthesized
gtctgacttttacccaaaca

SEQ ID NO: 30180 - DNA, 20 bp, Artificial Sequence
  chemically synthesized
gcacattacctagttggcaa

SEQ ID NO: 30181 - DNA, 20 bp, Artificial Sequence
  chemically synthesized
ggaatgcaactgggaggttc

SEQ ID NO: 30182 - DNA, 20 bp, Artificial Sequence
  chemically synthesized
aagaggactttgctttcctc

SEQ ID NO: 30183 - DNA, 20 bp, Artificial Sequence
  chemically synthesized
ccaaagagaagcgttgctag

SEQ ID NO: 30184 - DNA, 20 bp, Artificial Sequence
  chemically synthesized
cgctcagctacaggggccgt

SEQ ID NO: 30185 - DNA, 20 bp, Artificial Sequence
  chemically synthesized
ggaggcctgtgcatttccct

SEQ ID NO: 30186 - DNA, 20 bp, Artificial Sequence
  chemically synthesized
actcttctctgagctccccc

SEQ ID NO: 30187 - DNA, 20 bp, Artificial Sequence
  chemically synthesized
tgggttacctatgattccag

SEQ ID NO: 30188 - DNA, 20 bp, Artificial Sequence
  chemically synthesized
gaaacctaaggcctaccttg

SEQ ID NO: 30189 - DNA, 20 bp, Artificial Sequence
  chemically synthesized
actgctacttaaggtgtctt

SEQ ID NO: 30190 - DNA, 20 bp, Artificial Sequence
  chemically synthesized
tggtctcagctttggctggc

SEQ ID NO: 30191 - DNA, 20 bp, Artificial Sequence
  chemically synthesized
ttggctggcttggatgttat

SEQ ID NO: 30192 - DNA, 20 bp, Artificial Sequence
  chemically synthesized
ttggatgttatgaggattcc

SEQ ID NO: 30193 - DNA, 20 bp, Artificial Sequence
  chemically synthesized
aacctgtggaaaagaggaca

SEQ ID NO: 30194 - DNA, 20 bp, Artificial Sequence
  chemically synthesized
agcacaagacacgtggcagt

SEQ ID NO: 30195 - DNA, 20 bp, Artificial Sequence
  chemically synthesized
aagaaacaaagcgcatcttt

SEQ ID NO: 30196 - DNA, 20 bp, Artificial Sequence
  chemically synthesized
agtcaccgagccacacattt

SEQ ID NO: 30197 - DNA, 20 bp, Artificial Sequence
  chemically synthesized
ttttcccttcgaagtatgtc

SEQ ID NO: 30198 - DNA, 20 bp, Artificial Sequence
  chemically synthesized
tctgcctcactttcccatgc

SEQ ID NO: 30199 - DNA, 20 bp, Artificial Sequence
  chemically synthesized
ccagtggcttccatctccct

SEQ ID NO: 30200 - DNA, 20 bp, Artificial Sequence
  chemically synthesized
tgtctctccccagctagaaa

SEQ ID NO: 30201 - DNA, 20 bp, Artificial Sequence
  chemically synthesized
aagggggtgccacaagagca

SEQ ID NO: 30202 - DNA, 20 bp, Artificial Sequence
  chemically synthesized
ttcaaaatatttgttgaaaa

SEQ ID NO: 30203 - DNA, 20 bp, Artificial Sequence
  chemically synthesized
aaatatttgttgaaaaatga

SEQ ID NO: 30204 - DNA, 20 bp, Artificial Sequence
  chemically synthesized
aacctgggggcactttagct

SEQ ID NO: 30205 - DNA, 20 bp, Artificial Sequence
  chemically synthesized
gggcactttagctttggatc

SEQ ID NO: 30206 - DNA, 20 bp, Artificial Sequence
  chemically synthesized
ttgcattataatgtaaatgg

SEQ ID NO: 30207 - DNA, 20 bp, Artificial Sequence
  chemically synthesized
gccaaccaccagcagttcct

SEQ ID NO: 30208 - DNA, 20 bp, Artificial Sequence
  chemically synthesized
atcccttctacctgagagcc

SEQ ID NO: 30209 - DNA, 20 bp, Artificial Sequence
  chemically synthesized
cctagcatacaatttgacag

SEQ ID NO: 30210 - DNA, 20 bp, Artificial Sequence
  chemically synthesized
aggcaataacaaggagaagt

SEQ ID NO: 30211 - DNA, 20 bp, Artificial Sequence
  chemically synthesized
tgtaagacactaaggggcag

SEQ ID NO: 30212 - DNA, 20 bp, Artificial Sequence
  chemically synthesized
cactctgtttctatgaaggc

SEQ ID NO: 30213 - DNA, 20 bp, Artificial Sequence
  chemically synthesized
agtgtcacagtcactccaaa

SEQ ID NO: 30214 - DNA, 20 bp, Artificial Sequence
  chemically synthesized
cgatgcgctgatgtggaact

SEQ ID NO: 30215 - DNA, 20 bp, Artificial Sequence
  chemically synthesized
ggctgagctgtgctaggtaa

SEQ ID NO: 30216 - DNA, 20 bp, Artificial Sequence
  chemically synthesized
acatcttgctctcaggtata

SEQ ID NO: 30217 - DNA, 20 bp, Artificial Sequence
  chemically synthesized
tgagaaaggcagctttgaga

SEQ ID NO: 30218 - DNA, 20 bp, Artificial Sequence
  chemically synthesized
acctatcacaatgctctgca

SEQ ID NO: 30219 - DNA, 20 bp, Artificial Sequence
  chemically synthesized
tctcttttagtgtctcaagt

SEQ ID NO: 30220 - DNA, 20 bp, Artificial Sequence
  chemically synthesized
agtatgagtcacctctgatg

SEQ ID NO: 30221 - DNA, 20 bp, Artificial Sequence
  chemically synthesized
acaatacacacctaaagtaa

SEQ ID NO: 30222 - DNA, 20 bp, Artificial Sequence
  chemically synthesized
tttggaggagacacagagaa

SEQ ID NO: 30223 - DNA, 20 bp, Artificial Sequence
  chemically synthesized
aacacacagagcaacagctg

SEQ ID NO: 30224 - DNA, 20 bp, Artificial Sequence
  chemically synthesized
caccatttgaggagaggttc

SEQ ID NO: 30225 - DNA, 20 bp, Artificial Sequence
  chemically synthesized
tcaccaccccactgaaatcc

SEQ ID NO: 30226 - DNA, 20 bp, Artificial Sequence
  chemically synthesized
catggatagtctagcctgtg

SEQ ID NO: 30227 - DNA, 20 bp, Artificial Sequence
  chemically synthesized
agtctagcctgtgaggggtt

SEQ ID NO: 30228 - DNA, 20 bp, Artificial Sequence
  chemically synthesized
atctttgagcggctcttccc

SEQ ID NO: 30229 - DNA, 20 bp, Artificial Sequence
  chemically synthesized
gagcggctcttccccagagt

SEQ ID NO: 30230 - DNA, 20 bp, Artificial Sequence
  chemically synthesized
tatgagacaaggaggggaca

SEQ ID NO: 30231 - DNA, 20 bp, Artificial Sequence
  chemically synthesized
gggacaaggaatttagtccc

SEQ ID NO: 30232 - DNA, 20 bp, Artificial Sequence
  chemically synthesized
gtcccaggagtggcactaga

SEQ ID NO: 30233 - DNA, 20 bp, Artificial Sequence
  chemically synthesized
gctccctcaggagccatctg

SEQ ID NO: 30234 - DNA, 20 bp, Artificial Sequence
  chemically synthesized
tgggaacccctttggcaggt

SEQ ID NO: 30235 - DNA, 20 bp, Artificial Sequence
  chemically synthesized
ccctttggcaggtgtgggtg

SEQ ID NO: 30236 - DNA, 20 bp, Artificial Sequence
  chemically synthesized
agcaaatcttcatgtcctgt

SEQ ID NO: 30237 - DNA, 20 bp, Artificial Sequence
  chemically synthesized
ccagtcctgccctctctctt

SEQ ID NO: 30238 - DNA, 20 bp, Artificial Sequence
  chemically synthesized
ccactcacacgctaaagtaa

SEQ ID NO: 30239 - DNA, 20 bp, Artificial Sequence
  chemically synthesized
cactctctgggaaaatagaa

SEQ ID NO: 30240 - DNA, 20 bp, Artificial Sequence
  chemically synthesized
agctctagcactgggcacag

SEQ ID NO: 30241 - DNA, 20 bp, Artificial Sequence
  chemically synthesized
cagctgggtcagcacctacg

SEQ ID NO: 30242 - DNA, 20 bp, Artificial Sequence
  chemically synthesized
cttgtggtgagcaaaactcc

SEQ ID NO: 30243 - DNA, 20 bp, Artificial Sequence
  chemically synthesized
ggtgagcaaaactccctgga

SEQ ID NO: 30244 - DNA, 20 bp, Artificial Sequence
  chemically synthesized
tccctggattgagtcgagac

SEQ ID NO: 30245 - DNA, 20 bp, Artificial Sequence
  chemically synthesized
tggattctagttccactact

SEQ ID NO: 30246 - DNA, 20 bp, Artificial Sequence
  chemically synthesized
aggaacaccccggccactgg

SEQ ID NO: 30247 - DNA, 20 bp, Artificial Sequence
  chemically synthesized
gagaacaagccatctgaaaa

SEQ ID NO: 30248 - DNA, 20 bp, Artificial Sequence
  chemically synthesized
attttgggaggccgaggcgt

SEQ ID NO: 30249 - DNA, 20 bp, Artificial Sequence
  chemically synthesized
cgtgtgggtcacctgaggtc

SEQ ID NO: 30250 - DNA, 20 bp, Artificial Sequence
  chemically synthesized
tacttgggaggctgaggcag

SEQ ID NO: 30251 - DNA, 20 bp, Artificial Sequence
  chemically synthesized
aaaaaaaaaaaaaaattaaa

SEQ ID NO: 30252 - DNA, 20 bp, Artificial Sequence
  chemically synthesized
aaaaaaattaaattgggtgg

SEQ ID NO: 30253 - DNA, 20 bp, Artificial Sequence
  chemically synthesized
gagtttcttaggaaaaaaat

SEQ ID NO: 30254 - DNA, 20 bp, Artificial Sequence
  chemically synthesized
ctgtctttacaacacaatga

SEQ ID NO: 30255 - DNA, 20 bp, Artificial Sequence
  chemically synthesized
gtaaggcaccataagaggct

SEQ ID NO: 30256 - DNA, 20 bp, Artificial Sequence
  chemically synthesized
tgtgaattccattgataaga

SEQ ID NO: 30257 - DNA, 20 bp, Artificial Sequence
  chemically synthesized
aagagagacagagagagaga

SEQ ID NO: 30258 - DNA, 20 bp, Artificial Sequence
  chemically synthesized
gacaggctctagcttgtttc

SEQ ID NO: 30259 - DNA, 20 bp, Artificial Sequence
  chemically synthesized
ccaaagtgttgcccagacct

SEQ ID NO: 30260 - DNA, 20 bp, Artificial Sequence
  chemically synthesized
tggcttccaggtgagcgaga

SEQ ID NO: 30261 - DNA, 20 bp, Artificial Sequence
  chemically synthesized
agcgagacagaatctgcaag

SEQ ID NO: 30262 - DNA, 20 bp, Artificial Sequence
  chemically synthesized
cagagttcactgcttgacca

SEQ ID NO: 30263 - DNA, 20 bp, Artificial Sequence
  chemically synthesized
ccttccctggacagggagct

SEQ ID NO: 30264 - DNA, 20 bp, Artificial Sequence
  chemically synthesized
aaatacacccacgagccaat

SEQ ID NO: 30265 - DNA, 20 bp, Artificial Sequence
  chemically synthesized
gatccccttttaactaatcc

SEQ ID NO: 30266 - DNA, 20 bp, Artificial Sequence
  chemically synthesized
aaagaaagccaagttgctga

SEQ ID NO: 30267 - DNA, 20 bp, Artificial Sequence
  chemically synthesized
caggcagggagaaagtggtg

SEQ ID NO: 30268 - DNA, 20 bp, Artificial Sequence
  chemically synthesized
ggtgggtggcggacagagat

SEQ ID NO: 30269 - DNA, 20 bp, Artificial Sequence
  chemically synthesized
ccactgtgaggtcttactgt

SEQ ID NO: 30270 - DNA, 20 bp, Artificial Sequence
  chemically synthesized
aggtcttactgtggggatta

SEQ ID NO: 30271 - DNA, 20 bp, Artificial Sequence
  chemically synthesized
attcgagaaagatccaataa

SEQ ID NO: 30272 - DNA, 20 bp, Artificial Sequence
  chemically synthesized
cgctgggccaacacccacgg

SEQ ID NO: 30273 - DNA, 20 bp, Artificial Sequence
  chemically synthesized
caacacccacggaggggtcc

SEQ ID NO: 30274 - DNA, 20 bp, Artificial Sequence
  chemically synthesized
gtcctggaatacaaataccc

SEQ ID NO: 30275 - DNA, 20 bp, Artificial Sequence
  chemically synthesized
tcaattatgtcttcattgaa

SEQ ID NO: 30276 - DNA, 20 bp, Artificial Sequence
  chemically synthesized
gggttatgaaaaagggaagc

SEQ ID NO: 30277 - DNA, 20 bp, Artificial Sequence
  chemically synthesized
tgtgatgactcatgccagct

SEQ ID NO: 30278 - DNA, 20 bp, Artificial Sequence
  chemically synthesized
cttggctctgctggctcaca

SEQ ID NO: 30279 - DNA, 20 bp, Artificial Sequence
  chemically synthesized
gaagtcagggaactcgtgtc

SEQ ID NO: 30280 - DNA, 20 bp, Artificial Sequence
  chemically synthesized
caaggacagagaggggcacc

SEQ ID NO: 30281 - DNA, 20 bp, Artificial Sequence
  chemically synthesized
aatgtggcatcaggacaact

SEQ ID NO: 30282 - DNA, 20 bp, Artificial Sequence
  chemically synthesized
tagtggacaccaagctgagc

SEQ ID NO: 30283 - DNA, 20 bp, Artificial Sequence
  chemically synthesized
taaaaaagcaagcaggacat

SEQ ID NO: 30284 - DNA, 20 bp, Artificial Sequence
  chemically synthesized
agagtgcagacataagacta

SEQ ID NO: 30285 - DNA, 20 bp, Artificial Sequence
  chemically synthesized
tgtagttatcagactaatgt

SEQ ID NO: 30286 - DNA, 20 bp, Artificial Sequence
  chemically synthesized
gagaggcatagaaacaataa

SEQ ID NO: 30287 - DNA, 20 bp, Artificial Sequence
  chemically synthesized
ggttacaagataatagatcc

SEQ ID NO: 30288 - DNA, 20 bp, Artificial Sequence
  chemically synthesized
tttaggaagaagaagtggcg

SEQ ID NO: 30289 - DNA, 20 bp, Artificial Sequence
  chemically synthesized
gaagaagaagtggcggagaa

SEQ ID NO: 30290 - DNA, 20 bp, Artificial Sequence
  chemically synthesized
aagtggcggagaatggaatg

SEQ ID NO: 30291 - DNA, 20 bp, Artificial Sequence
  chemically synthesized
atgagatactttgtcgtctc

SEQ ID NO: 30292 - DNA, 20 bp, Artificial Sequence
  chemically synthesized
gtctctggaatgaagaggaa

SEQ ID NO: 30293 - DNA, 20 bp, Artificial Sequence
  chemically synthesized
tgggtttaaaatgaagcata

SEQ ID NO: 30294 - DNA, 20 bp, Artificial Sequence
  chemically synthesized
gatcgaaggtagacaaaagg

SEQ ID NO: 30295 - DNA, 20 bp, Artificial Sequence
  chemically synthesized
ggtgtctttaaaaatagaac

SEQ ID NO: 30296 - DNA, 20 bp, Artificial Sequence
  chemically synthesized
ggagggccatctgcccctga

SEQ ID NO: 30297 - DNA, 20 bp, Artificial Sequence
  chemically synthesized
actccattatctccagttat

SEQ ID NO: 30298 - DNA, 20 bp, Artificial Sequence
  chemically synthesized
ctctgcaacagcacaggtga

SEQ ID NO: 30299 - DNA, 20 bp, Artificial Sequence
  chemically synthesized
ttgggtggtggttttgttgc

SEQ ID NO: 30300 - DNA, 20 bp, Artificial Sequence
  chemically synthesized
cagccatcaccgataaaagc

SEQ ID NO: 30301 - DNA, 20 bp, Artificial Sequence
  chemically synthesized
tgcgattggtacagtcagcc

SEQ ID NO: 30302 - DNA, 20 bp, Artificial Sequence
  chemically synthesized
ctttctcatctgtaaaatga

SEQ ID NO: 30303 - DNA, 20 bp, Artificial Sequence
  chemically synthesized
agggaagattgcttgaagct

SEQ ID NO: 30304 - DNA, 20 bp, Artificial Sequence
  chemically synthesized
acataaaacatcatagataa

SEQ ID NO: 30305 - DNA, 20 bp, Artificial Sequence
  chemically synthesized
catcatagataaaggagtca

SEQ ID NO: 30306 - DNA, 20 bp, Artificial Sequence
  chemically synthesized
cctgtcatgaagcagactca

SEQ ID NO: 30307 - DNA, 20 bp, Artificial Sequence
  chemically synthesized
tgtctgcgatagagcagatt

SEQ ID NO: 30308 - DNA, 20 bp, Artificial Sequence
  chemically synthesized
caactcacctgcatttaaat

SEQ ID NO: 30309 - DNA, 20 bp, Artificial Sequence
  chemically synthesized
cctgcatttaaatatgaata

SEQ ID NO: 30310 - DNA, 20 bp, Artificial Sequence
  chemically synthesized
catgggagggcatcgcacat

SEQ ID NO: 30311 - DNA, 20 bp, Artificial Sequence
  chemically synthesized
ggaagcattgctctagatct

SEQ ID NO: 30312 - DNA, 20 bp, Artificial Sequence
  chemically synthesized
cccagcagagaacgttgaga

SEQ ID NO: 30313 - DNA, 20 bp, Artificial Sequence
  chemically synthesized
tttaagagcctactcatcat

SEQ ID NO: 30314 - DNA, 20 bp, Artificial Sequence
  chemically synthesized
agttcacttaaaagtccatc

SEQ ID NO: 30315 - DNA, 20 bp, Artificial Sequence
  chemically synthesized
gtccatccagaatcagaacg

SEQ ID NO: 30316 - DNA, 20 bp, Artificial Sequence
  chemically synthesized
tccagaatcagaacgtggga

SEQ ID NO: 30317 - DNA, 20 bp, Artificial Sequence
  chemically synthesized
ggcattcctgggggccgggc

SEQ ID NO: 30318 - DNA, 20 bp, Artificial Sequence
  chemically synthesized
ctgttcaagttcaggtcaag

SEQ ID NO: 30319 - DNA, 20 bp, Artificial Sequence
  chemically synthesized
ctgacattctgtcattcaag

SEQ ID NO: 30320 - DNA, 20 bp, Artificial Sequence
  chemically synthesized
cctacaatccacagcaaaag

SEQ ID NO: 30321 - DNA, 20 bp, Artificial Sequence
  chemically synthesized
tgagagaaaatggacagaag

SEQ ID NO: 30322 - DNA, 20 bp, Artificial Sequence
  chemically synthesized
cctgataccagcaggaaaca

SEQ ID NO: 30323 - DNA, 20 bp, Artificial Sequence
  chemically synthesized
ggactatgcatgctctgtct

SEQ ID NO: 30324 - DNA, 20 bp, Artificial Sequence
  chemically synthesized
tctataacctgtaaggagag

SEQ ID NO: 30325 - DNA, 20 bp, Artificial Sequence
  chemically synthesized
gaaagtgaggctggaaccac

SEQ ID NO: 30326 - DNA, 20 bp, Artificial Sequence
  chemically synthesized
cagctgggagccactggttt

SEQ ID NO: 30327 - DNA, 20 bp, Artificial Sequence
  chemically synthesized
catttgccaatccataactc

SEQ ID NO: 30328 - DNA, 20 bp, Artificial Sequence
  chemically synthesized
tcaggaattcatggctatgc

SEQ ID NO: 30329 - DNA, 20 bp, Artificial Sequence
  chemically synthesized
tggataattctctctagact

SEQ ID NO: 30330 - DNA, 20 bp, Artificial Sequence
  chemically synthesized
ttctcccctctctctggcag

SEQ ID NO: 30331 - DNA, 20 bp, Artificial Sequence
  chemically synthesized
attcagaaagccaaagataa

SEQ ID NO: 30332 - DNA, 20 bp, Artificial Sequence
  chemically synthesized
gcaaggtatattgattaggt

SEQ ID NO: 30333 - DNA, 20 bp, Artificial Sequence
  chemically synthesized
aattgcaaaattatttatgc

SEQ ID NO: 30334 - DNA, 20 bp, Artificial Sequence
  chemically synthesized
cctcaaaagttcccaggcaa

SEQ ID NO: 30335 - DNA, 20 bp, Artificial Sequence
  chemically synthesized
tttttttcaagacatgaggt

SEQ ID NO: 30336 - DNA, 20 bp, Artificial Sequence
  chemically synthesized
tgaatgatgcaaaacagtat

SEQ ID NO: 30337 - DNA, 20 bp, Artificial Sequence
  chemically synthesized
acagtatttggatatgtaaa

SEQ ID NO: 30338 - DNA, 20 bp, Artificial Sequence
  chemically synthesized
gcataatgcattactaatca

SEQ ID NO: 30339 - DNA, 20 bp, Artificial Sequence
  chemically synthesized
taatcagtgagtataaattc

SEQ ID NO: 30340 - DNA, 20 bp, Artificial Sequence
  chemically synthesized
taaagagcatcacccttcgg

SEQ ID NO: 30341 - DNA, 20 bp, Artificial Sequence
  chemically synthesized
agaaggagaaattatcctca

SEQ ID NO: 30342 - DNA, 20 bp, Artificial Sequence
  chemically synthesized
acaaccacagaagcaccaag

SEQ ID NO: 30343 - DNA, 20 bp, Artificial Sequence
  chemically synthesized
caccccatgttggtcgccta

SEQ ID NO: 30344 - DNA, 20 bp, Artificial Sequence
  chemically synthesized
tggtcgcctacggaatctac

SEQ ID NO: 30345 - DNA, 20 bp, Artificial Sequence
  chemically synthesized
accacccatgcccttctcca

SEQ ID NO: 30346 - DNA, 20 bp, Artificial Sequence
  chemically synthesized
tgtctaaacactttttggaa

SEQ ID NO: 30347 - DNA, 20 bp, Artificial Sequence
  chemically synthesized
acacactcacacaaatcctt

SEQ ID NO: 30348 - DNA, 20 bp, Artificial Sequence
  chemically synthesized
aaagcgccactctcagataa

SEQ ID NO: 30349 - DNA, 20 bp, Artificial Sequence
  chemically synthesized
acccgggcctgggcctgggc

SEQ ID NO: 30350 - DNA, 20 bp, Artificial Sequence
  chemically synthesized
ctgggcctgggcctgggtct

SEQ ID NO: 30351 - DNA, 20 bp, Artificial Sequence
  chemically synthesized
ttctttgtccccttctttct

SEQ ID NO: 30352 - DNA, 20 bp, Artificial Sequence
  chemically synthesized
ctcatgcactgaaaaagaca

SEQ ID NO: 30353 - DNA, 20 bp, Artificial Sequence
  chemically synthesized
agggatctctgttcttccag

SEQ ID NO: 30354 - DNA, 20 bp, Artificial Sequence
  chemically synthesized
tcaaatactacaaaagtaga

SEQ ID NO: 30355 - DNA, 20 bp, Artificial Sequence
  chemically synthesized
agtcccgtattaccaaatag

SEQ ID NO: 30356 - DNA, 20 bp, Artificial Sequence
  chemically synthesized
tcagaaatacttctttccat

SEQ ID NO: 30357 - DNA, 20 bp, Artificial Sequence
  chemically synthesized
tccatctgggtcatgttttg

SEQ ID NO: 30358 - DNA, 20 bp, Artificial Sequence
  chemically synthesized
agctgccaagaaaagcttca

SEQ ID NO: 30359 - DNA, 20 bp, Artificial Sequence
  chemically synthesized
gtcctttgccctgttcaggg

SEQ ID NO: 30360 - DNA, 20 bp, Artificial Sequence
  chemically synthesized
cagggctgaatgcaccctct

SEQ ID NO: 30361 - DNA, 20 bp, Artificial Sequence
  chemically synthesized
catcgactgccccacaggcc

SEQ ID NO: 30362 - DNA, 20 bp, Artificial Sequence
  chemically synthesized
gcactcccagtgttcagaac

SEQ ID NO: 30363 - DNA, 20 bp, Artificial Sequence
  chemically synthesized
ttctcctggacggttctgca

SEQ ID NO: 30364 - DNA, 20 bp, Artificial Sequence
  chemically synthesized
attcattcacagagcatgtc

SEQ ID NO: 30365 - DNA, 20 bp, Artificial Sequence
  chemically synthesized
atatgtcagttatgttccaa

SEQ ID NO: 30366 - DNA, 20 bp, Artificial Sequence
  chemically synthesized
gagcaaatactatttttaga

SEQ ID NO: 30367 - DNA, 20 bp, Artificial Sequence
  chemically synthesized
ccgttttctctgtagactct

SEQ ID NO: 30368 - DNA, 20 bp, Artificial Sequence
  chemically synthesized
ttgttggacttaatatcttt

SEQ ID NO: 30369 - DNA, 20 bp, Artificial Sequence
  chemically synthesized
cacgtgttgcaacctagaga

SEQ ID NO: 30370 - DNA, 20 bp, Artificial Sequence
  chemically synthesized
acaaaggacagcctgccatc

SEQ ID NO: 30371 - DNA, 20 bp, Artificial Sequence
  chemically synthesized
tgatgaaaagtggtttctac

SEQ ID NO: 30372 - DNA, 20 bp, Artificial Sequence
  chemically synthesized
aaacttctatattgatttga

SEQ ID NO: 30373 - DNA, 20 bp, Artificial Sequence
  chemically synthesized
attgatttgatggaatcatg

SEQ ID NO: 30374 - DNA, 20 bp, Artificial Sequence
  chemically synthesized
atgacagtgttgatgtgttt

SEQ ID NO: 30375 - DNA, 20 bp, Artificial Sequence
  chemically synthesized
ggatttttttttttttcaaa

SEQ ID NO: 30376 - DNA, 20 bp, Artificial Sequence
  chemically synthesized
acaggagctcaatcaagtaa

SEQ ID NO: 30377 - DNA, 20 bp, Artificial Sequence
  chemically synthesized
cttaactagcccaaacgttc

SEQ ID NO: 30378 - DNA, 20 bp, Artificial Sequence
  chemically synthesized
ataaatacctctccattatc

SEQ ID NO: 30379 - DNA, 20 bp, Artificial Sequence
  chemically synthesized
aggaactagtgtgaaaactg

SEQ ID NO: 30380 - DNA, 20 bp, Artificial Sequence
  chemically synthesized
tgaaatcctaaacttcatgt

SEQ ID NO: 30381 - DNA, 20 bp, Artificial Sequence
  chemically synthesized
ttttgtcacctatctctggc

SEQ ID NO: 30382 - DNA, 20 bp, Artificial Sequence
  chemically synthesized
attcggcctgttatttgctt

SEQ ID NO: 30383 - DNA, 20 bp, Artificial Sequence
  chemically synthesized
gcctgttatttgcttttggg

SEQ ID NO: 30384 - DNA, 20 bp, Artificial Sequence
  chemically synthesized
ttattgaagctatagatctc

SEQ ID NO: 30385 - DNA, 20 bp, Artificial Sequence
  chemically synthesized
tgccccttactctgagcaca

SEQ ID NO: 30386 - DNA, 20 bp, Artificial Sequence
  chemically synthesized
ttttagatcatcattatcca

SEQ ID NO: 30387 - DNA, 20 bp, Artificial Sequence
  chemically synthesized
tcattatccaaaggataact

SEQ ID NO: 30388 - DNA, 20 bp, Artificial Sequence
  chemically synthesized
gtaaacaccaagtttaaaaa

SEQ ID NO: 30389 - DNA, 20 bp, Artificial Sequence
  chemically synthesized
catatgcttttacctacatg

SEQ ID NO: 30390 - DNA, 20 bp, Artificial Sequence
  chemically synthesized
gtcttcaacactaacagagg

SEQ ID NO: 30391 - DNA, 20 bp, Artificial Sequence
  chemically synthesized
gttcttctaaacatgttgca

SEQ ID NO: 30392 - DNA, 20 bp, Artificial Sequence
  chemically synthesized
gaggaaggaggaaaatatca

SEQ ID NO: 30393 - DNA, 20 bp, Artificial Sequence
  chemically synthesized
cactgaattcagtcagttaa

SEQ ID NO: 30394 - DNA, 20 bp, Artificial Sequence
  chemically synthesized
aatttaaaatacctggttgt

SEQ ID NO: 30395 - DNA, 20 bp, Artificial Sequence
  chemically synthesized
aaaatacacattacattctt

SEQ ID NO: 30396 - DNA, 20 bp, Artificial Sequence
  chemically synthesized
ttataaggctggaaacttct

SEQ ID NO: 30397 - DNA, 20 bp, Artificial Sequence
  chemically synthesized
tgcctttaagctttctgttg

SEQ ID NO: 30398 - DNA, 20 bp, Artificial Sequence
  chemically synthesized
aagctttctgttggggaatc

SEQ ID NO: 30399 - DNA, 20 bp, Artificial Sequence
  chemically synthesized
atctcacagcatgatacaat

SEQ ID NO: 30400 - DNA, 20 bp, Artificial Sequence
  chemically synthesized
tttctccatggctttcacag

SEQ ID NO: 30401 - DNA, 20 bp, Artificial Sequence
  chemically synthesized
gatactgttattttctggta

SEQ ID NO: 30402 - DNA, 20 bp, Artificial Sequence
  chemically synthesized
tggcagcagggctgggaaaa

SEQ ID NO: 30403 - DNA, 20 bp, Artificial Sequence
  chemically synthesized
actggtgatttgatcaaatt

SEQ ID NO: 30404 - DNA, 20 bp, Artificial Sequence
  chemically synthesized
aaattcagaatcccatattt

SEQ ID NO: 30405 - DNA, 20 bp, Artificial Sequence
  chemically synthesized
taaatagttttcatctttaa

SEQ ID NO: 30406 - DNA, 20 bp, Artificial Sequence
  chemically synthesized
tcgcagacagcagtgctcaa

SEQ ID NO: 30407 - DNA, 20 bp, Artificial Sequence
  chemically synthesized
gtccgcaaaataaaaatgtg

SEQ ID NO: 30408 - DNA, 20 bp, Artificial Sequence
  chemically synthesized
aaaatgtgtcgggtaattaa

SEQ ID NO: 30409 - DNA, 20 bp, Artificial Sequence
  chemically synthesized
gatggtttataggcctcctc

SEQ ID NO: 30410 - DNA, 20 bp, Artificial Sequence
  chemically synthesized
gtgcagtgtgtctatgtcag

SEQ ID NO: 30411 - DNA, 20 bp, Artificial Sequence
  chemically synthesized
acatccaggcacttggcctg

SEQ ID NO: 30412 - DNA, 20 bp, Artificial Sequence
  chemically synthesized
agggaagagaaggaaaacta

SEQ ID NO: 30413 - DNA, 20 bp, Artificial Sequence
  chemically synthesized
gtgcgagcgagggaaataag

SEQ ID NO: 30414 - DNA, 20 bp, Artificial Sequence
  chemically synthesized
aaaactaagagcttctcttc

SEQ ID NO: 30415 - DNA, 20 bp, Artificial Sequence
  chemically synthesized
aaccactacactcttgaccc

SEQ ID NO: 30416 - DNA, 20 bp, Artificial Sequence
  chemically synthesized
caatgaagagggccaagaga

SEQ ID NO: 30417 - DNA, 20 bp, Artificial Sequence
  chemically synthesized
aggacgtccatgccccggga

SEQ ID NO: 30418 - DNA, 20 bp, Artificial Sequence
  chemically synthesized
ctttggagctcttgacccac

SEQ ID NO: 30419 - DNA, 20 bp, Artificial Sequence
  chemically synthesized
cctcaaactcagaagacaac

SEQ ID NO: 30420 - DNA, 20 bp, Artificial Sequence
  chemically synthesized
tgaccgacaacttctttgtg

SEQ ID NO: 30421 - DNA, 20 bp, Artificial Sequence
  chemically synthesized
tgttagcctggccaatttga

SEQ ID NO: 30422 - DNA, 20 bp, Artificial Sequence
  chemically synthesized
ctggccaatttgaaaggatg

SEQ ID NO: 30423 - DNA, 20 bp, Artificial Sequence
  chemically synthesized
aaaacagtaacatttggttt

SEQ ID NO: 30424 - DNA, 20 bp, Artificial Sequence
  chemically synthesized
aatagcgtcagggcagcctg

SEQ ID NO: 30425 - DNA, 20 bp, Artificial Sequence
  chemically synthesized
tgcctctggggaagccacat

SEQ ID NO: 30426 - DNA, 20 bp, Artificial Sequence
  chemically synthesized
ggaaatgactacttgcaaag

SEQ ID NO: 30427 - DNA, 20 bp, Artificial Sequence
  chemically synthesized
aacgtactgaagaggtagca

SEQ ID NO: 30428 - DNA, 20 bp, Artificial Sequence
  chemically synthesized
agggtggcggccgcaggcca

SEQ ID NO: 30429 - DNA, 20 bp, Artificial Sequence
  chemically synthesized
ctctaccaaatgaggctaat

SEQ ID NO: 30430 - DNA, 20 bp, Artificial Sequence
  chemically synthesized
tttcctttccgaggttgttg

SEQ ID NO: 30431 - DNA, 20 bp, Artificial Sequence
  chemically synthesized
tttccgaggttgttgtggga

SEQ ID NO: 30432 - DNA, 20 bp, Artificial Sequence
  chemically synthesized
ctggaggtgcagcccccgga

SEQ ID NO: 30433 - DNA, 20 bp, Artificial Sequence
  chemically synthesized
actctatgaggtaagggacc

SEQ ID NO: 30434 - DNA, 20 bp, Artificial Sequence
  chemically synthesized
gtaacatagaaatctgaacc

SEQ ID NO: 30435 - DNA, 20 bp, Artificial Sequence
  chemically synthesized
ggagcacacagttccaagcc

SEQ ID NO: 30436 - DNA, 20 bp, Artificial Sequence
  chemically synthesized
agcgcccccacatgctctca

SEQ ID NO: 30437 - DNA, 20 bp, Artificial Sequence
  chemically synthesized
attgaggaagcggaggctta

SEQ ID NO: 30438 - DNA, 20 bp, Artificial Sequence
  chemically synthesized
gactgcctctaagggcttgg

SEQ ID NO: 30439 - DNA, 20 bp, Artificial Sequence
  chemically synthesized
ggagcgggggcaggtatcca

SEQ ID NO: 30440 - DNA, 20 bp, Artificial Sequence
  chemically synthesized
ggaaaaatattttttattgt

SEQ ID NO: 30441 - DNA, 20 bp, Artificial Sequence
  chemically synthesized
aagccctggtgtcccctagg

SEQ ID NO: 30442 - DNA, 20 bp, Artificial Sequence
  chemically synthesized
taaaaatgtcaggaagttat

SEQ ID NO: 30443 - DNA, 20 bp, Artificial Sequence
  chemically synthesized
ctgcttgccaacattcatat

SEQ ID NO: 30444 - DNA, 20 bp, Artificial Sequence
  chemically synthesized
aacaaaacaagcccaaacac

SEQ ID NO: 30445 - DNA, 20 bp, Artificial Sequence
  chemically synthesized
acatgggtttgccatcggtc

SEQ ID NO: 30446 - DNA, 20 bp, Artificial Sequence
  chemically synthesized
atttaaaaaaaaaaaaaaaa

SEQ ID NO: 30447 - DNA, 20 bp, Artificial Sequence
  chemically synthesized
aaacccttcccatctggccc

SEQ ID NO: 30448 - DNA, 20 bp, Artificial Sequence
  chemically synthesized
cccacctcccactacccctc

SEQ ID NO: 30449 - DNA, 20 bp, Artificial Sequence
  chemically synthesized
ctggctacaccatggccagg

SEQ ID NO: 30450 - DNA, 20 bp, Artificial Sequence
  chemically synthesized
cacaaatcccgttggaccca

SEQ ID NO: 30451 - DNA, 20 bp, Artificial Sequence
  chemically synthesized
ccccctcctttgcgttctgc

SEQ ID NO: 30452 - DNA, 20 bp, Artificial Sequence
  chemically synthesized
gttctgcaagaatattttaa

SEQ ID NO: 30453 - DNA, 20 bp, Artificial Sequence
  chemically synthesized
cacactttttacaaccagta

SEQ ID NO: 30454 - DNA, 20 bp, Artificial Sequence
  chemically synthesized
gctgaccccagtacccaagg

SEQ ID NO: 30455 - DNA, 20 bp, Artificial Sequence
  chemically synthesized
gactagggcaccatgagcat

SEQ ID NO: 30456 - DNA, 20 bp, Artificial Sequence
  chemically synthesized
tgagcatctgggttaaggct

SEQ ID NO: 30457 - DNA, 20 bp, Artificial Sequence
  chemically synthesized
ccaacacacccaccgcacaa

SEQ ID NO: 30458 - DNA, 20 bp, Artificial Sequence
  chemically synthesized
acagaagttcttcaaatttt

SEQ ID NO: 30459 - DNA, 20 bp, Artificial Sequence
  chemically synthesized
tggttgttgctttttggttt

SEQ ID NO: 30460 - DNA, 20 bp, Artificial Sequence
  chemically synthesized
aagacagcttctgggccact

SEQ ID NO: 30461 - DNA, 20 bp, Artificial Sequence
  chemically synthesized
gatttacagaaccttggtat

SEQ ID NO: 30462 - DNA, 20 bp, Artificial Sequence
  chemically synthesized
aaaagaaaattccttggcat

SEQ ID NO: 30463 - DNA, 20 bp, Artificial Sequence
  chemically synthesized
aaacagtttgccacagtgag

SEQ ID NO: 30464 - DNA, 20 bp, Artificial Sequence
  chemically synthesized
gatttaaagcattaactggt

SEQ ID NO: 30465 - DNA, 20 bp, Artificial Sequence
  chemically synthesized
tactttttatttacttcctg

SEQ ID NO: 30466 - DNA, 20 bp, Artificial Sequence
  chemically synthesized
ccattatataacaatctacc

SEQ ID NO: 30467 - DNA, 20 bp, Artificial Sequence
  chemically synthesized
actagattatgccaatctat

SEQ ID NO: 30468 - DNA, 20 bp, Artificial Sequence
  chemically synthesized
aatgtaaagtgttattatag

SEQ ID NO: 30469 - DNA, 20 bp, Artificial Sequence
  chemically synthesized
aaaccgacatggcaaaactc

SEQ ID NO: 30470 - DNA, 20 bp, Artificial Sequence
  chemically synthesized
tggcaaaactcctggataga

SEQ ID NO: 30471 - DNA, 20 bp, Artificial Sequence
  chemically synthesized
ttgtttactttttaccttgt

SEQ ID NO: 30472 - DNA, 20 bp, Artificial Sequence
  chemically synthesized
agagaggagagaaagagaga

SEQ ID NO: 30473 - DNA, 20 bp, Artificial Sequence
  chemically synthesized
agaaagagagaaggaatgaa

SEQ ID NO: 30474 - DNA, 20 bp, Artificial Sequence
  chemically synthesized
ttgttttgttttcttaaata

SEQ ID NO: 30475 - DNA, 20 bp, Artificial Sequence
  chemically synthesized
tttcttaaataccgggtcag

SEQ ID NO: 30476 - DNA, 20 bp, Artificial Sequence
  chemically synthesized
caagaaaatgatagtgcgtg

SEQ ID NO: 30477 - DNA, 20 bp, Artificial Sequence
  chemically synthesized
ggctgtgaagtcggagaggg

SEQ ID NO: 30478 - DNA, 20 bp, Artificial Sequence
  chemically synthesized
cacacacaaataaaaagccc

SEQ ID NO: 30479 - DNA, 20 bp, Artificial Sequence
  chemically synthesized
cttaataatttatttgtgtt

SEQ ID NO: 30480 - DNA, 20 bp, Artificial Sequence
  chemically synthesized
ttctggatactgtttcccag

SEQ ID NO: 30481 - DNA, 20 bp, Artificial Sequence
  chemically synthesized
aagcatgcttttagcatggt

SEQ ID NO: 30482 - DNA, 20 bp, Artificial Sequence
  chemically synthesized
cattaaacattcgttttaat

SEQ ID NO: 30483 - DNA, 20 bp, Artificial Sequence
  chemically synthesized
agcccagggagcctggagac

SEQ ID NO: 30484 - DNA, 20 bp, Artificial Sequence
  chemically synthesized
attgtagctcagagcagcag

SEQ ID NO: 30485 - DNA, 20 bp, Artificial Sequence
  chemically synthesized
ttacttgatctaaaagataa

SEQ ID NO: 30486 - DNA, 20 bp, Artificial Sequence
  chemically synthesized
gtacttaacgttaaaagaaa

SEQ ID NO: 30487 - DNA, 20 bp, Artificial Sequence
  chemically synthesized
tatgcaaattacattaatga

SEQ ID NO: 30488 - DNA, 20 bp, Artificial Sequence
  chemically synthesized
ttttgcaagattgaaaatct

SEQ ID NO: 30489 - DNA, 20 bp, Artificial Sequence
  chemically synthesized
acaggccagcctgatgtgca

SEQ ID NO: 30490 - DNA, 20 bp, Artificial Sequence
  chemically synthesized
tggaaggacctaatggtcat

SEQ ID NO: 30491 - DNA, 20 bp, Artificial Sequence
  chemically synthesized
taagattcatccaaaaagca

SEQ ID NO: 30492 - DNA, 20 bp, Artificial Sequence
  chemically synthesized
gtaatttatcaaaaacagcc

SEQ ID NO: 30493 - DNA, 20 bp, Artificial Sequence
  chemically synthesized
ctccaacagaacagattaac

SEQ ID NO: 30494 - DNA, 20 bp, Artificial Sequence
  chemically synthesized
aaacagctttttcattggct

SEQ ID NO: 30495 - DNA, 20 bp, Artificial Sequence
  chemically synthesized
caaggtctggtttacttctg

SEQ ID NO: 30496 - DNA, 20 bp, Artificial Sequence
  chemically synthesized
ccgcatttaatccatggtga

SEQ ID NO: 30497 - DNA, 20 bp, Artificial Sequence
  chemically synthesized
ccatcccaccccagttatta

SEQ ID NO: 30498 - DNA, 20 bp, Artificial Sequence
  chemically synthesized
ttagagagtatcgtgggaac

SEQ ID NO: 30499 - DNA, 20 bp, Artificial Sequence
  chemically synthesized
ttccaattactagtctggag

SEQ ID NO: 30500 - DNA, 20 bp, Artificial Sequence
  chemically synthesized
tctggagaagaatcctttgc

SEQ ID NO: 30501 - DNA, 20 bp, Artificial Sequence
  chemically synthesized
catttaaaaaattctagtga

SEQ ID NO: 30502 - DNA, 20 bp, Artificial Sequence
  chemically synthesized
gctggtgtgcaagtcagact

SEQ ID NO: 30503 - DNA, 20 bp, Artificial Sequence
  chemically synthesized
acccaaaagctctctgctgt

SEQ ID NO: 30504 - DNA, 20 bp, Artificial Sequence
  chemically synthesized
tttcatttgaactgctatcg

SEQ ID NO: 30505 - DNA, 20 bp, Artificial Sequence
  chemically synthesized
cccagcctcagactttctcc

SEQ ID NO: 30506 - DNA, 20 bp, Artificial Sequence
  chemically synthesized
gagttgatcttaccggaaat

SEQ ID NO: 30507 - DNA, 20 bp, Artificial Sequence
  chemically synthesized
acattttaacatttattaga

SEQ ID NO: 30508 - DNA, 20 bp, Artificial Sequence
  chemically synthesized
ttaacatttattagaaagga

SEQ ID NO: 30509 - DNA, 20 bp, Artificial Sequence
  chemically synthesized
tgacactaatgttactctac

SEQ ID NO: 30510 - DNA, 20 bp, Artificial Sequence
  chemically synthesized
ctaatgttactctacatgag

SEQ ID NO: 30511 - DNA, 20 bp, Artificial Sequence
  chemically synthesized
ctacatgagtagagttcaat

SEQ ID NO: 30512 - DNA, 20 bp, Artificial Sequence
  chemically synthesized
gagttcaatgagggttgata

SEQ ID NO: 30513 - DNA, 20 bp, Artificial Sequence
  chemically synthesized
tgggatgtgacagggcaaat

SEQ ID NO: 30514 - DNA, 20 bp, Artificial Sequence
  chemically synthesized
aatcacatcagaaagtaaag

SEQ ID NO: 30515 - DNA, 20 bp, Artificial Sequence
  chemically synthesized
acaatgcctgctgtcagcag

SEQ ID NO: 30516 - DNA, 20 bp, Artificial Sequence
  chemically synthesized
cagctgaattatttttatac

SEQ ID NO: 30517 - DNA, 20 bp, Artificial Sequence
  chemically synthesized
ttaagcaatccacttgtatg

SEQ ID NO: 30518 - DNA, 20 bp, Artificial Sequence
  chemically synthesized
gcagttgttttcaaagatcc

SEQ ID NO: 30519 - DNA, 20 bp, Artificial Sequence
  chemically synthesized
agatccaagagtatctttat

SEQ ID NO: 30520 - DNA, 20 bp, Artificial Sequence
  chemically synthesized
atgttcagttttaaatgtaa

SEQ ID NO: 30521 - DNA, 20 bp, Artificial Sequence
  chemically synthesized
gaataatttttttaaaatat

SEQ ID NO: 30522 - DNA, 20 bp, Artificial Sequence
  chemically synthesized
ttgttttaactggaaactga

SEQ ID NO: 30523 - DNA, 20 bp, Artificial Sequence
  chemically synthesized
aactgaaaggatcggggcag

SEQ ID NO: 30524 - DNA, 20 bp, Artificial Sequence
  chemically synthesized
ggggcaggggagttaaaatg

SEQ ID NO: 30525 - DNA, 20 bp, Artificial Sequence
  chemically synthesized
ggggagtaaatggttcactg

SEQ ID NO: 30526 - DNA, 20 bp, Artificial Sequence
  chemically synthesized
tcataaaatcatggtatacc

SEQ ID NO: 30527 - DNA, 20 bp, Artificial Sequence
  chemically synthesized
tataccttgagttggtgaag

SEQ ID NO: 30528 - DNA, 20 bp, Artificial Sequence
  chemically synthesized
gtttttgtttgaggaggtgc

SEQ ID NO: 30529 - DNA, 20 bp, Artificial Sequence
  chemically synthesized
agtgctttgtgctccaacat

SEQ ID NO: 30530 - DNA, 20 bp, Artificial Sequence
  chemically synthesized
attaagaaaatgaacaactg

SEQ ID NO: 30531 - DNA, 20 bp, Artificial Sequence
  chemically synthesized
attccattctttattttaat

SEQ ID NO: 30532 - DNA, 20 bp, Artificial Sequence
  chemically synthesized
ttaatgggagtttttaatca

SEQ ID NO: 30533 - DNA, 20 bp, Artificial Sequence
  chemically synthesized
ttggcaatgctaacaacagt

SEQ ID NO: 30534 - DNA, 20 bp, Artificial Sequence
  chemically synthesized
aatacaaacaaaaactcatt

SEQ ID NO: 30535 - DNA, 20 bp, Artificial Sequence
  chemically synthesized
acctgctccaggttcccact

SEQ ID NO: 30536 - DNA, 20 bp, Artificial Sequence
  chemically synthesized
tggcagagactgattcagtt

SEQ ID NO: 30537 - DNA, 20 bp, Artificial Sequence
  chemically synthesized
gctgccagccctatctggaa

SEQ ID NO: 30538 - DNA, 20 bp, Artificial Sequence
  chemically synthesized
gatccactcacatcagtctc

SEQ ID NO: 30539 - DNA, 20 bp, Artificial Sequence
  chemically synthesized
tatttttctttatacgtttt

SEQ ID NO: 30540 - DNA, 20 bp, Artificial Sequence
  chemically synthesized
ataatggtgaaatattttaa

SEQ ID NO: 30541 - DNA, 20 bp, Artificial Sequence
  chemically synthesized
agatcagtactagatttaaa

SEQ ID NO: 30542 - DNA, 20 bp, Artificial Sequence
  chemically synthesized
tgtgtgtgtaatggggaaag

SEQ ID NO: 30543 - DNA, 20 bp, Artificial Sequence
  chemically synthesized
catgcaaaaaaattctggtg

SEQ ID NO: 30544 - DNA, 20 bp, Artificial Sequence
  chemically synthesized
ggtggtgaattgggaggtgg

SEQ ID NO: 30545 - DNA, 20 bp, Artificial Sequence
  chemically synthesized
agacaactccaagagaagaa

SEQ ID NO: 30546 - DNA, 20 bp, Artificial Sequence
  chemically synthesized
gctatagatcaaaggagaac

SEQ ID NO: 30547 - DNA, 20 bp, Artificial Sequence
  chemically synthesized
gaagctcacctattccctgc

SEQ ID NO: 30548 - DNA, 20 bp, Artificial Sequence
  chemically synthesized
aacctaactcaatgccattg

SEQ ID NO: 30549 - DNA, 20 bp, Artificial Sequence
  chemically synthesized
ctcaatgccattgcagaatg

SEQ ID NO: 30550 - DNA, 20 bp, Artificial Sequence
  chemically synthesized
aaatgttttaaaaatgcata

SEQ ID NO: 30551 - DNA, 20 bp, Artificial Sequence
  chemically synthesized
aaattccaatgaacccaata

SEQ ID NO: 30552 - DNA, 20 bp, Artificial Sequence
  chemically synthesized
tgatgtttactggcttcaaa

SEQ ID NO: 30553 - DNA, 20 bp, Artificial Sequence
  chemically synthesized
ggagcacatgtagagagcta

SEQ ID NO: 30554 - DNA, 20 bp, Artificial Sequence
  chemically synthesized
gtaaaggggagaagctgttt

SEQ ID NO: 30555 - DNA, 20 bp, Artificial Sequence
  chemically synthesized
gttaaaagtgggctctaagt

SEQ ID NO: 30556 - DNA, 20 bp, Artificial Sequence
  chemically synthesized
aaaagtggcaaggtgccagg

SEQ ID NO: 30557 - DNA, 20 bp, Artificial Sequence
  chemically synthesized
tgtaaaaacagacttgggct

SEQ ID NO: 30558 - DNA, 20 bp, Artificial Sequence
  chemically synthesized
aatgacttctttgtgcaata

SEQ ID NO: 30559 - DNA, 20 bp, Artificial Sequence
  chemically synthesized
aaatctaaaaaatgtttccc

SEQ ID NO: 30560 - DNA, 20 bp, Artificial Sequence
  chemically synthesized
gcacaacttgcaacacaaca

SEQ ID NO: 30561 - DNA, 20 bp, Artificial Sequence
  chemically synthesized
acttgcaacacaacaaggaa

SEQ ID NO: 30562 - DNA, 20 bp, Artificial Sequence
  chemically synthesized
tttgtttttttaagctttca

SEQ ID NO: 30563 - DNA, 20 bp, Artificial Sequence
  chemically synthesized
cctctgctcctgttcttgaa

SEQ ID NO: 30564 - DNA, 20 bp, Artificial Sequence
  chemically synthesized
cacaatctccacatcacaca

SEQ ID NO: 30565 - DNA, 20 bp, Artificial Sequence
  chemically synthesized
catcttttctgtgtcaccac

SEQ ID NO: 30566 - DNA, 20 bp, Artificial Sequence
  chemically synthesized
gggtaatgtctgaagaagtt

SEQ ID NO: 30567 - DNA, 20 bp, Artificial Sequence
  chemically synthesized
ctgaagaagtttgggatctt

SEQ ID NO: 30568 - DNA, 20 bp, Artificial Sequence
  chemically synthesized
tatttacaatttgtcttaga

SEQ ID NO: 30569 - DNA, 20 bp, Artificial Sequence
  chemically synthesized
agtttcatgaacattagtct

SEQ ID NO: 30570 - DNA, 20 bp, Artificial Sequence
  chemically synthesized
aaaacaatattctctactct

SEQ ID NO: 30571 - DNA, 20 bp, Artificial Sequence
  chemically synthesized
agaagtcagtcgtttttatt

SEQ ID NO: 30572 - DNA, 20 bp, Artificial Sequence
  chemically synthesized
cagttcagtctgagctagga

SEQ ID NO: 30573 - DNA, 20 bp, Artificial Sequence
  chemically synthesized
agtctgagctaggagagaat

SEQ ID NO: 30574 - DNA, 20 bp, Artificial Sequence
  chemically synthesized
tgagctaggagagaatcaga

SEQ ID NO: 30575 - DNA, 20 bp, Artificial Sequence
  chemically synthesized
catgctaatgtatttccatt

SEQ ID NO: 30576 - DNA, 20 bp, Artificial Sequence
  chemically synthesized
attactatatctcccttctt

SEQ ID NO: 30577 - DNA, 20 bp, Artificial Sequence
  chemically synthesized
aaacctcaaatctgacatga

SEQ ID NO: 30578 - DNA, 20 bp, Artificial Sequence
  chemically synthesized
ctgacatgatgggataatgt

SEQ ID NO: 30579 - DNA, 20 bp, Artificial Sequence
  chemically synthesized
ttcacattcagtaatcttcc

SEQ ID NO: 30580 - DNA, 20 bp, Artificial Sequence
  chemically synthesized
gtcaaaggctgctgatatct

SEQ ID NO: 30581 - DNA, 20 bp, Artificial Sequence
  chemically synthesized
aaggctgctgatatctgagg

SEQ ID NO: 30582 - DNA, 20 bp, Artificial Sequence
  chemically synthesized
atactacttcaatgatctca

SEQ ID NO: 30583 - DNA, 20 bp, Artificial Sequence
  chemically synthesized
gatcacaatcacacaatatt

SEQ ID NO: 30584 - DNA, 20 bp, Artificial Sequence
  chemically synthesized
tgtacagctcatatgtgtac

SEQ ID NO: 30585 - DNA, 20 bp, Artificial Sequence
  chemically synthesized
ccatctattcaccaggtaaa

SEQ ID NO: 30586 - DNA, 20 bp, Artificial Sequence
  chemically synthesized
actttgggaggccaagccag

SEQ ID NO: 30587 - DNA, 20 bp, Artificial Sequence
  chemically synthesized
caggtggatcacctgaggtc

SEQ ID NO: 30588 - DNA, 20 bp, Artificial Sequence
  chemically synthesized
tacttgggaggctgaggcag

SEQ ID NO: 30589 - DNA, 20 bp, Artificial Sequence
  chemically synthesized
aaaactcagcttggagaggc

SEQ ID NO: 30590 - DNA, 20 bp, Artificial Sequence
  chemically synthesized
tattctcctatctgaaagtc

SEQ ID NO: 30591 - DNA, 20 bp, Artificial Sequence
  chemically synthesized
tgacacaattcaaatatcta

SEQ ID NO: 30592 - DNA, 20 bp, Artificial Sequence
  chemically synthesized
cataaaaagaaaagcagact

SEQ ID NO: 30593 - DNA, 20 bp, Artificial Sequence
  chemically synthesized
gtgctttagagaaatgggct

SEQ ID NO: 30594 - DNA, 20 bp, Artificial Sequence
  chemically synthesized
gcacctgagggccagagcgt

SEQ ID NO: 30595 - DNA, 20 bp, Artificial Sequence
  chemically synthesized
tcggaatttatgtgcaatgg

SEQ ID NO: 30596 - DNA, 20 bp, Artificial Sequence
  chemically synthesized
gaaactcttaattcattact

SEQ ID NO: 30597 - DNA, 20 bp, Artificial Sequence
  chemically synthesized
tatttatgttcagccagttc

SEQ ID NO: 30598 - DNA, 20 bp, Artificial Sequence
  chemically synthesized
gcacgaaaggtttacctcac

SEQ ID NO: 30599 - DNA, 20 bp, Artificial Sequence
  chemically synthesized
cagcacttgttgtgcgccca

SEQ ID NO: 30600 - DNA, 20 bp, Artificial Sequence
  chemically synthesized
acagaacctttagacaacca

SEQ ID NO: 30601 - DNA, 20 bp, Artificial Sequence
  chemically synthesized
ctcctctaaatacagaggca

SEQ ID NO: 30602 - DNA, 20 bp, Artificial Sequence
  chemically synthesized
ttgagctggttaatctaaga

SEQ ID NO: 30603 - DNA, 20 bp, Artificial Sequence
  chemically synthesized
tttggtgatttagcaaggct

SEQ ID NO: 30604 - DNA, 20 bp, Artificial Sequence
  chemically synthesized
gtcattcccacatcctgctg

SEQ ID NO: 30605 - DNA, 20 bp, Artificial Sequence
  chemically synthesized
tgtcacataaggtaaatgtg

SEQ ID NO: 30606 - DNA, 20 bp, Artificial Sequence
  chemically synthesized
tttcactaaagggaaagtat

SEQ ID NO: 30607 - DNA, 20 bp, Artificial Sequence
  chemically synthesized
ggtcggagagacaagttcca

SEQ ID NO: 30608 - DNA, 20 bp, Artificial Sequence
  chemically synthesized
aacctcttgcctttcgggag

SEQ ID NO: 30609 - DNA, 20 bp, Artificial Sequence
  chemically synthesized
gcatggcatgtctgtcatca

SEQ ID NO: 30610 - DNA, 20 bp, Artificial Sequence
  chemically synthesized
gctcaagcaaaaaatgtttt

SEQ ID NO: 30611 - DNA, 20 bp, Artificial Sequence
  chemically synthesized
actgtttatcacttagagaa

SEQ ID NO: 30612 - DNA, 20 bp, Artificial Sequence
  chemically synthesized
aaccaaaggagggagggctg

SEQ ID NO: 30613 - DNA, 20 bp, Artificial Sequence
  chemically synthesized
ttgtgttatagcagaaacag

SEQ ID NO: 30614 - DNA, 20 bp, Artificial Sequence
  chemically synthesized
agtctggactggacatttgt

SEQ ID NO: 30615 - DNA, 20 bp, Artificial Sequence
  chemically synthesized
ccaacatgcccttaaacttt

SEQ ID NO: 30616 - DNA, 20 bp, Artificial Sequence
  chemically synthesized
catccgggctgacagccaat

SEQ ID NO: 30617 - DNA, 20 bp, Artificial Sequence
  chemically synthesized
aggaggcctggccagatgtt

SEQ ID NO: 30618 - DNA, 20 bp, Artificial Sequence
  chemically synthesized
atacttcaaaatgagaaggt

SEQ ID NO: 30619 - DNA, 20 bp, Artificial Sequence
  chemically synthesized
ggctgtcatggacagtcaca

SEQ ID NO: 30620 - DNA, 20 bp, Artificial Sequence
  chemically synthesized
tcgtcatcctctggcgtgac

SEQ ID NO: 30621 - DNA, 20 bp, Artificial Sequence
  chemically synthesized
gacctggatgccaacctcca

SEQ ID NO: 30622 - DNA, 20 bp, Artificial Sequence
  chemically synthesized
ggatgccaacctccacggga

SEQ ID NO: 30623 - DNA, 20 bp, Artificial Sequence
  chemically synthesized
cgtttgtgctcgataaaaat

SEQ ID NO: 30624 - DNA, 20 bp, Artificial Sequence
  chemically synthesized
tggtctggttcatcatctgt

SEQ ID NO: 30625 - DNA, 20 bp, Artificial Sequence
  chemically synthesized
agaaacaaaagcacaattat

SEQ ID NO: 30626 - DNA, 20 bp, Artificial Sequence
  chemically synthesized
tgtgagcatacaaaaagtac

SEQ ID NO: 30627 - DNA, 20 bp, Artificial Sequence
  chemically synthesized
gtctggtttgtaagtttaga

SEQ ID NO: 30628 - DNA, 20 bp, Artificial Sequence
  chemically synthesized
aaaactggttaaaaaaaaaa

SEQ ID NO: 30629 - DNA, 20 bp, Artificial Sequence
  chemically synthesized
ccaagttgtccattgtgcca

SEQ ID NO: 30630 - DNA, 20 bp, Artificial Sequence
  chemically synthesized
gccaaagaatgaaaggagag

SEQ ID NO: 30631 - DNA, 20 bp, Artificial Sequence
  chemically synthesized
aacacacacaccctttgtgt

SEQ ID NO: 30632 - DNA, 20 bp, Artificial Sequence
  chemically synthesized
cgactgcatgcacctatgaa

SEQ ID NO: 30633 - DNA, 20 bp, Artificial Sequence
  chemically synthesized
tctcagacacattagctaaa

SEQ ID NO: 30634 - DNA, 20 bp, Artificial Sequence
  chemically synthesized
attagctaaatgggatactt

SEQ ID NO: 30635 - DNA, 20 bp, Artificial Sequence
  chemically synthesized
tttttttttattctgagaaa

SEQ ID NO: 30636 - DNA, 20 bp, Artificial Sequence
  chemically synthesized
ggcatctatgatataaaaat

SEQ ID NO: 30637 - DNA, 20 bp, Artificial Sequence
  chemically synthesized
tgtcaaagtggactaatttt

SEQ ID NO: 30638 - DNA, 20 bp, Artificial Sequence
  chemically synthesized
ttctgcacacataatcacca

SEQ ID NO: 30639 - DNA, 20 bp, Artificial Sequence
  chemically synthesized
taagcttccaaaggggaaaa

SEQ ID NO: 30640 - DNA, 20 bp, Artificial Sequence
  chemically synthesized
atcacaaaatacaaaacatc

SEQ ID NO: 30641 - DNA, 20 bp, Artificial Sequence
  chemically synthesized
ttaatgaacttaaagccaca

SEQ ID NO: 30642 - DNA, 20 bp, Artificial Sequence
  chemically synthesized
atcaaaaaatagattttaat

SEQ ID NO: 30643 - DNA, 20 bp, Artificial Sequence
  chemically synthesized
aatagattttaatttgagtg

SEQ ID NO: 30644 - DNA, 20 bp, Artificial Sequence
  chemically synthesized
ttatttcaaccctacccagg

SEQ ID NO: 30645 - DNA, 20 bp, Artificial Sequence
  chemically synthesized
gaatattgagggggaagatc

SEQ ID NO: 30646 - DNA, 20 bp, Artificial Sequence
  chemically synthesized
atttaacataaggtcaccac

SEQ ID NO: 30647 - DNA, 20 bp, Artificial Sequence
  chemically synthesized
tactggccaaaagataaata

SEQ ID NO: 30648 - DNA, 20 bp, Artificial Sequence
  chemically synthesized
gcttccattttgaccaagtg

SEQ ID NO: 30649 - DNA, 20 bp, Artificial Sequence
  chemically synthesized
tctcaaaatattcctgttgt

SEQ ID NO: 30650 - DNA, 20 bp, Artificial Sequence
  chemically synthesized
atattcctgttgtctgaatt

SEQ ID NO: 30651 - DNA, 20 bp, Artificial Sequence
  chemically synthesized
tctgacacatttctaaaagt

SEQ ID NO: 30652 - DNA, 20 bp, Artificial Sequence
  chemically synthesized
gtaaattattgctaattaac

SEQ ID NO: 30653 - DNA, 20 bp, Artificial Sequence
  chemically synthesized
taaactccggctacaaagca

SEQ ID NO: 30654 - DNA, 20 bp, Artificial Sequence
  chemically synthesized
agtcctcgattgaagtggaa

SEQ ID NO: 30655 - DNA, 20 bp, Artificial Sequence
  chemically synthesized
aataatcataataattagcc

SEQ ID NO: 30656 - DNA, 20 bp, Artificial Sequence
  chemically synthesized
tcctctctgtgtagttgcaa

SEQ ID NO: 30657 - DNA, 20 bp, Artificial Sequence
  chemically synthesized
cttctccttgattgtcttaa

SEQ ID NO: 30658 - DNA, 20 bp, Artificial Sequence
  chemically synthesized
cccggggcaggggccccggc

SEQ ID NO: 30659 - DNA, 20 bp, Artificial Sequence
  chemically synthesized
cagctcggccagctcggccg

SEQ ID NO: 30660 - DNA, 20 bp, Artificial Sequence
  chemically synthesized
tctccgcacacacctcaagc

SEQ ID NO: 30661 - DNA, 20 bp, Artificial Sequence
  chemically synthesized
agcttacactttttactttg

SEQ ID NO: 30662 - DNA, 20 bp, Artificial Sequence
  chemically synthesized
ttcccccgcaattctgggca

SEQ ID NO: 30663 - DNA, 20 bp, Artificial Sequence
  chemically synthesized
ccgagctccgaggcgagagg

SEQ ID NO: 30664 - DNA, 20 bp, Artificial Sequence
  chemically synthesized
ccgaggtctgtgctttgcat

SEQ ID NO: 30665 - DNA, 20 bp, Artificial Sequence
  chemically synthesized
tgtgctttgcatgggggtga

SEQ ID NO: 30666 - DNA, 20 bp, Artificial Sequence
  chemically synthesized
gctggtctcagctcgcgcac

SEQ ID NO: 30667 - DNA, 20 bp, Artificial Sequence
  chemically synthesized
aaatgaagaacaaagacata

SEQ ID NO: 30668 - DNA, 20 bp, Artificial Sequence
  chemically synthesized
ggggtgatgggggagagaaa

SEQ ID NO: 30669 - DNA, 20 bp, Artificial Sequence
  chemically synthesized
aagctcgttcctccccggac

SEQ ID NO: 30670 - DNA, 20 bp, Artificial Sequence
  chemically synthesized
cttgttctgcctcctagcga

SEQ ID NO: 30671 - DNA, 20 bp, Artificial Sequence
  chemically synthesized
atagcagaggcggggggcgg

SEQ ID NO: 30672 - DNA, 20 bp, Artificial Sequence
  chemically synthesized
gggggggtggtactgaggac

SEQ ID NO: 30673 - DNA, 20 bp, Artificial Sequence
  chemically synthesized
ttaaccccgggacaggagga

SEQ ID NO: 30674 - DNA, 20 bp, Artificial Sequence
  chemically synthesized
gggtactaaccctcccagcc

SEQ ID NO: 30675 - DNA, 20 bp, Artificial Sequence
  chemically synthesized
aagatggacccaggagggag

SEQ ID NO: 30676 - DNA, 20 bp, Artificial Sequence
  chemically synthesized
cgaagaagggcctgactttc

SEQ ID NO: 30677 - DNA, 20 bp, Artificial Sequence
  chemically synthesized
tccgcatccggcgcggccgg

SEQ ID NO: 30678 - DNA, 20 bp, Artificial Sequence
  chemically synthesized
gcgggggagagcggcgaggg

SEQ ID NO: 30679 - DNA, 20 bp, Artificial Sequence
  chemically synthesized
gcggcgagggagggatgcga

SEQ ID NO: 30680 - DNA, 20 bp, Artificial Sequence
  chemically synthesized
gggagggccgcgcaacgtgc

SEQ ID NO: 30681 - DNA, 20 bp, Artificial Sequence
  chemically synthesized
ctgcatcaaaaatttaaagt

SEQ ID NO: 30682 - DNA, 20 bp, Artificial Sequence
  chemically synthesized
tttaaagtaagaatcataaa

SEQ ID NO: 30683 - DNA, 20 bp, Artificial Sequence
  chemically synthesized
aatcataaattgagtagggg

SEQ ID NO: 30684 - DNA, 20 bp, Artificial Sequence
  chemically synthesized
ggggaagagggcaagaccca

SEQ ID NO: 30685 - DNA, 20 bp, Artificial Sequence
  chemically synthesized
gacccaaagggtgaagtgct

SEQ ID NO: 30686 - DNA, 20 bp, Artificial Sequence
  chemically synthesized
gggtgaagtgctcggggtcc

SEQ ID NO: 30687 - DNA, 20 bp, Artificial Sequence
  chemically synthesized
ggactggtgaccagaccggg

SEQ ID NO: 30688 - DNA, 20 bp, Artificial Sequence
  chemically synthesized
tgaccagaccgggcggggtg

SEQ ID NO: 30689 - DNA, 20 bp, Artificial Sequence
  chemically synthesized
aataaaaatgctttgcaaag

SEQ ID NO: 30690 - DNA, 20 bp, Artificial Sequence
  chemically synthesized
gtggcctgccgccgtgcctg

SEQ ID NO: 30691 - DNA, 20 bp, Artificial Sequence
  chemically synthesized
tggcgggtgggcgccgggcg

SEQ ID NO: 30692 - DNA, 20 bp, Artificial Sequence
  chemically synthesized
tccaaaaaatagtaagagga

SEQ ID NO: 30693 - DNA, 20 bp, Artificial Sequence
  chemically synthesized
cgccctaagtttgcaactga

SEQ ID NO: 30694 - DNA, 20 bp, Artificial Sequence
  chemically synthesized
actgaaggggtttgggggaa

SEQ ID NO: 30695 - DNA, 20 bp, Artificial Sequence
  chemically synthesized
ttttgcaggggggctggtgg

SEQ ID NO: 30696 - DNA, 20 bp, Artificial Sequence
  chemically synthesized
aagagaaggccgtcacagaa

SEQ ID NO: 30697 - DNA, 20 bp, Artificial Sequence
  chemically synthesized
tgccactttctcactattgt

SEQ ID NO: 30698 - DNA, 20 bp, Artificial Sequence
  chemically synthesized
gtctcacctcttttctcccc

SEQ ID NO: 30699 - DNA, 20 bp, Artificial Sequence
  chemically synthesized
tacccccccattttcttacg

SEQ ID NO: 30700 - DNA, 20 bp, Artificial Sequence
  chemically synthesized
tcccacccccaggtttgcat

SEQ ID NO: 30701 - DNA, 20 bp, Artificial Sequence
  chemically synthesized
caaaactggcggggcggggg

SEQ ID NO: 30702 - DNA, 20 bp, Artificial Sequence
  chemically synthesized
ctggcggggcggggggggag

SEQ ID NO: 30703 - DNA, 20 bp, Artificial Sequence
  chemically synthesized
ggcggaaaggaggaaagagg

SEQ ID NO: 30704 - DNA, 20 bp, Artificial Sequence
  chemically synthesized
tacacggcaatggttccaga

SEQ ID NO: 30705 - DNA, 20 bp, Artificial Sequence
  chemically synthesized
gcaatggttccagatgggat

SEQ ID NO: 30706 - DNA, 20 bp, Artificial Sequence
  chemically synthesized
aataattattattactatta

SEQ ID NO: 30707 - DNA, 20 bp, Artificial Sequence
  chemically synthesized
tattattgggttacttacgc

SEQ ID NO: 30708 - DNA, 20 bp, Artificial Sequence
  chemically synthesized
attcccgtttgcttaagtgc

SEQ ID NO: 30709 - DNA, 20 bp, Artificial Sequence
  chemically synthesized
ctcggttcacatcgggagag

SEQ ID NO: 30710 - DNA, 20 bp, Artificial Sequence
  chemically synthesized
acaaagatggcgcagggaag

SEQ ID NO: 30711 - DNA, 20 bp, Artificial Sequence
  chemically synthesized
tccctgcgaacttgaacgtc

SEQ ID NO: 30712 - DNA, 20 bp, Artificial Sequence
  chemically synthesized
cgaacttgaacgtcaggagt

SEQ ID NO: 30713 - DNA, 20 bp, Artificial Sequence
  chemically synthesized
gcgtggccgggagagaagaa

SEQ ID NO: 30714 - DNA, 20 bp, Artificial Sequence
  chemically synthesized
ggagagaagaaaggggtggc

SEQ ID NO: 30715 - DNA, 20 bp, Artificial Sequence
  chemically synthesized
gggtggcaggggtgggagga

SEQ ID NO: 30716 - DNA, 20 bp, Artificial Sequence
  chemically synthesized
aaaaaagaaaaaaatagagc

SEQ ID NO: 30717 - DNA, 20 bp, Artificial Sequence
  chemically synthesized
gcgggcggagggaagccagg

SEQ ID NO: 30718 - DNA, 20 bp, Artificial Sequence
  chemically synthesized
ggagggagcgcacggcaacg

SEQ ID NO: 30719 - DNA, 20 bp, Artificial Sequence
  chemically synthesized
cagcctaagtttggagggct

SEQ ID NO: 30720 - DNA, 20 bp, Artificial Sequence
  chemically synthesized
ccaaggccgagccagggacc

SEQ ID NO: 30721 - DNA, 20 bp, Artificial Sequence
  chemically synthesized
ctgagcgccccgccaagcga

SEQ ID NO: 30722 - DNA, 20 bp, Artificial Sequence
  chemically synthesized
gccccgccaagcgactgggt

SEQ ID NO: 30723 - DNA, 20 bp, Artificial Sequence
  chemically synthesized
tctgaatgcaactgaaagcg

SEQ ID NO: 30724 - DNA, 20 bp, Artificial Sequence
  chemically synthesized
gcgccgagtccccggctcct

SEQ ID NO: 30725 - DNA, 20 bp, Artificial Sequence
  chemically synthesized
ggtcgcagaaagagagcccg

SEQ ID NO: 30726 - DNA, 20 bp, Artificial Sequence
  chemically synthesized
aggaataaagaacgaggagc

SEQ ID NO: 30727 - DNA, 20 bp, Artificial Sequence
  chemically synthesized
gacaaagcgcgggcagtccc

SEQ ID NO: 30728 - DNA, 20 bp, Artificial Sequence
  chemically synthesized
tcccgggagtcccagtccct

SEQ ID NO: 30729 - DNA, 20 bp, Artificial Sequence
  chemically synthesized
cgccgcgggaggtccccgag

SEQ ID NO: 30730 - DNA, 20 bp, Artificial Sequence
  chemically synthesized
gagcaactgcaaaagcacag

SEQ ID NO: 30731 - DNA, 20 bp, Artificial Sequence
  chemically synthesized
tacccagggaaagagaaaat

SEQ ID NO: 30732 - DNA, 20 bp, Artificial Sequence
  chemically synthesized
acggtggtgagatgaccgcc

SEQ ID NO: 30733 - DNA, 20 bp, Artificial Sequence
  chemically synthesized
aagcgggcttcactctggcg

SEQ ID NO: 30734 - DNA, 20 bp, Artificial Sequence
  chemically synthesized
agtccgattccaaatctgga

SEQ ID NO: 30735 - DNA, 20 bp, Artificial Sequence
  chemically synthesized
ggaaggagttggggggagag

SEQ ID NO: 30736 - DNA, 20 bp, Artificial Sequence
  chemically synthesized
tcaggtccaagggaggtgcg

SEQ ID NO: 30737 - DNA, 20 bp, Artificial Sequence
  chemically synthesized
caagggaggtgcggagggtg

SEQ ID NO: 30738 - DNA, 20 bp, Artificial Sequence
  chemically synthesized
gcggagggtgcagggtggag

SEQ ID NO: 30739 - DNA, 20 bp, Artificial Sequence
  chemically synthesized
cgcgagaccctgagctgcag

SEQ ID NO: 30740 - DNA, 20 bp, Artificial Sequence
  chemically synthesized
tgagctgcaggtggatatgt

SEQ ID NO: 30741 - DNA, 20 bp, Artificial Sequence
  chemically synthesized
tcatccccctcttcagtcta

SEQ ID NO: 30742 - DNA, 20 bp, Artificial Sequence
  chemically synthesized
gagagagatgtgggctgtac

SEQ ID NO: 30743 - DNA, 20 bp, Artificial Sequence
  chemically synthesized
aaattctgtttaagaagcgg

SEQ ID NO: 30744 - DNA, 20 bp, Artificial Sequence
  chemically synthesized
gacaccatttccccttttca

SEQ ID NO: 30745 - DNA, 20 bp, Artificial Sequence
  chemically synthesized
ttgtcttgttaaaccagcct

SEQ ID NO: 30746 - DNA, 20 bp, Artificial Sequence
  chemically synthesized
accagccttggagtcaccaa

SEQ ID NO: 30747 - DNA, 20 bp, Artificial Sequence
  chemically synthesized
accaaaagaatgtcttcttg

SEQ ID NO: 30748 - DNA, 20 bp, Artificial Sequence
  chemically synthesized
cagaaccaagcttttcagat

SEQ ID NO: 30749 - DNA, 20 bp, Artificial Sequence
  chemically synthesized
tagagaagatatataaatga

SEQ ID NO: 30750 - DNA, 20 bp, Artificial Sequence
  chemically synthesized
gaagatatataaatgagcga

SEQ ID NO: 30751 - DNA, 20 bp, Artificial Sequence
  chemically synthesized
atggtgtgtataaagctttt

SEQ ID NO: 30752 - DNA, 20 bp, Artificial Sequence
  chemically synthesized
ggttcacatttaacagtctt

SEQ ID NO: 30753 - DNA, 20 bp, Artificial Sequence
  chemically synthesized
gccacagatagcagccctga

SEQ ID NO: 30754 - DNA, 20 bp, Artificial Sequence
  chemically synthesized
agagcgcacacaattgtgta

SEQ ID NO: 30755 - DNA, 20 bp, Artificial Sequence
  chemically synthesized
ctatagatggacttttatgg

SEQ ID NO: 30756 - DNA, 20 bp, Artificial Sequence
  chemically synthesized
tctgaaaagcttggttctga

SEQ ID NO: 30757 - DNA, 20 bp, Artificial Sequence
  chemically synthesized
agacaaaaagcagactgtgg

SEQ ID NO: 30758 - DNA, 20 bp, Artificial Sequence
  chemically synthesized
gctacagagcttaacttcta

SEQ ID NO: 30759 - DNA, 20 bp, Artificial Sequence
  chemically synthesized
gaatcctcccgcttcttaaa

SEQ ID NO: 30760 - DNA, 20 bp, Artificial Sequence
  chemically synthesized
aacctccttttcttccttag

SEQ ID NO: 30761 - DNA, 20 bp, Artificial Sequence
  chemically synthesized
aaactttactaagacgaaac

SEQ ID NO: 30762 - DNA, 20 bp, Artificial Sequence
  chemically synthesized
gccgcttgccggcagggctg

SEQ ID NO: 30763 - DNA, 20 bp, Artificial Sequence
  chemically synthesized
cttgccggcagggctgcggg

SEQ ID NO: 30764 - DNA, 20 bp, Artificial Sequence
  chemically synthesized
aaaacaataaagccccccca

SEQ ID NO: 30765 - DNA, 20 bp, Artificial Sequence
  chemically synthesized
caataaagcccccccaccgg

SEQ ID NO: 30766 - DNA, 20 bp, Artificial Sequence
  chemically synthesized
aaagcccccccaccgggtgg

SEQ ID NO: 30767 - DNA, 20 bp, Artificial Sequence
  chemically synthesized
acaccctttagactgaagag

SEQ ID NO: 30768 - DNA, 20 bp, Artificial Sequence
  chemically synthesized
gaagagggggatgagaagac

SEQ ID NO: 30769 - DNA, 20 bp, Artificial Sequence
  chemically synthesized
acacatatccacctgcagct

SEQ ID NO: 30770 - DNA, 20 bp, Artificial Sequence
  chemically synthesized
cctccgcacctcccttggac

SEQ ID NO: 30771 - DNA, 20 bp, Artificial Sequence
  chemically synthesized
cccccaactccttccagatt

SEQ ID NO: 30772 - DNA, 20 bp, Artificial Sequence
  chemically synthesized
ggcggcggcggcggcggctg

SEQ ID NO: 30773 - DNA, 20 bp, Artificial Sequence
  chemically synthesized
gggactttacaggcacgttt

SEQ ID NO: 30774 - DNA, 20 bp, Artificial Sequence
  chemically synthesized
gaataaactttccaatcgca

SEQ ID NO: 30775 - DNA, 20 bp, Artificial Sequence
  chemically synthesized
aaactgaaagtatcccacgc

SEQ ID NO: 30776 - DNA, 20 bp, Artificial Sequence
  chemically synthesized
gcgtgtgtgcattaaagaga

SEQ ID NO: 30777 - DNA, 20 bp, Artificial Sequence
  chemically synthesized
cgagagggggctgctggctc

SEQ ID NO: 30778 - DNA, 20 bp, Artificial Sequence
  chemically synthesized
cattcccattttctctttcc

SEQ ID NO: 30779 - DNA, 20 bp, Artificial Sequence
  chemically synthesized
ctgtgcttttgcagttgctc

SEQ ID NO: 30780 - DNA, 20 bp, Artificial Sequence
  chemically synthesized
gcagttgctctggagtggga

SEQ ID NO: 30781 - DNA, 20 bp, Artificial Sequence
  chemically synthesized
cgcagccctccaaacttagg

SEQ ID NO: 30782 - DNA, 20 bp, Artificial Sequence
  chemically synthesized
tggaggctcagctctcaact

SEQ ID NO: 30783 - DNA, 20 bp, Artificial Sequence
  chemically synthesized
ggcggcggcggggaggggaa

SEQ ID NO: 30784 - DNA, 20 bp, Artificial Sequence
  chemically synthesized
aagtgggtgtgcgtacggag

SEQ ID NO: 30785 - DNA, 20 bp, Artificial Sequence
  chemically synthesized
tcgctctatttttttctttt

SEQ ID NO: 30786 - DNA, 20 bp, Artificial Sequence
  chemically synthesized
ttttgaataatctttcattt

SEQ ID NO: 30787 - DNA, 20 bp, Artificial Sequence
  chemically synthesized
tgtattatttctaatttatt

SEQ ID NO: 30788 - DNA, 20 bp, Artificial Sequence
  chemically synthesized
actgatgaagatattttctc

SEQ ID NO: 30789 - DNA, 20 bp, Artificial Sequence
  chemically synthesized
accccagcacttaagcaaac

SEQ ID NO: 30790 - DNA, 20 bp, Artificial Sequence
  chemically synthesized
agcaaaagcgagggggagag

SEQ ID NO: 30791 - DNA, 20 bp, Artificial Sequence
  chemically synthesized
ttttcacgagaaaaacctcc

SEQ ID NO: 30792 - DNA, 20 bp, Artificial Sequence
  chemically synthesized
ctttatttctcttttcgaaa

SEQ ID NO: 30793 - DNA, 20 bp, Artificial Sequence
  chemically synthesized
aacaactcacatgcaaacct

SEQ ID NO: 30794 - DNA, 20 bp, Artificial Sequence
  chemically synthesized
cactcaccgtaagaaaatgg

SEQ ID NO: 30795 - DNA, 20 bp, Artificial Sequence
  chemically synthesized
agaaaatgggggggtaggga

SEQ ID NO: 30796 - DNA, 20 bp, Artificial Sequence
  chemically synthesized
aatgggggggtagggaggga

SEQ ID NO: 30797 - DNA, 20 bp, Artificial Sequence
  chemically synthesized
gaaaggggcccccggcgctc

SEQ ID NO: 30798 - DNA, 20 bp, Artificial Sequence
  chemically synthesized
ccccggcgctcctgagtccg

SEQ ID NO: 30799 - DNA, 20 bp, Artificial Sequence
  chemically synthesized
gccttttgttccggccagag

SEQ ID NO: 30800 - DNA, 20 bp, Artificial Sequence
  chemically synthesized
ggagcccggactgctgcctc

SEQ ID NO: 30801 - DNA, 20 bp, Artificial Sequence
  chemically synthesized
aaataaataaaacaaggcaa

SEQ ID NO: 30802 - DNA, 20 bp, Artificial Sequence
  chemically synthesized
gattttcaaaaaaagtggaa

SEQ ID NO: 30803 - DNA, 20 bp, Artificial Sequence
  chemically synthesized
gattgggaaaaatctcgtgt

SEQ ID NO: 30804 - DNA, 20 bp, Artificial Sequence
  chemically synthesized
cgccgcgccccagcccagcc

SEQ ID NO: 30805 - DNA, 20 bp, Artificial Sequence
  chemically synthesized
ctcccagactgcgaaatcgg

SEQ ID NO: 30806 - DNA, 20 bp, Artificial Sequence
  chemically synthesized
cgcctcccctcccctccgcc

SEQ ID NO: 30807 - DNA, 20 bp, Artificial Sequence
  chemically synthesized
agcacgactaggccaggtgg

SEQ ID NO: 30808 - DNA, 20 bp, Artificial Sequence
  chemically synthesized
agggcaggggagaagtgtgt

SEQ ID NO: 30809 - DNA, 20 bp, Artificial Sequence
  chemically synthesized
gagtgtgcattttaagggcg

SEQ ID NO: 30810 - DNA, 20 bp, Artificial Sequence
  chemically synthesized
gaccccgagcacttcaccct

SEQ ID NO: 30811 - DNA, 20 bp, Artificial Sequence
  chemically synthesized
tggcttggtctgaggttctt

SEQ ID NO: 30812 - DNA, 20 bp, Artificial Sequence
  chemically synthesized
ttggttctgtgtttttttaa

SEQ ID NO: 30813 - DNA, 20 bp, Artificial Sequence
  chemically synthesized
tttttaaaggggtggtggtg

SEQ ID NO: 30814 - DNA, 20 bp, Artificial Sequence
  chemically synthesized
ggtggtggggggtgcgcaca

SEQ ID NO: 30815 - DNA, 20 bp, Artificial Sequence
  chemically synthesized
ccccaactcccccggccgcg

SEQ ID NO: 30816 - DNA, 20 bp, Artificial Sequence
  chemically synthesized
ctcccccggccgcgccggat

SEQ ID NO: 30817 - DNA, 20 bp, Artificial Sequence
  chemically synthesized
aaagtcaggcccttcttcgg

SEQ ID NO: 30818 - DNA, 20 bp, Artificial Sequence
  chemically synthesized
ccctcgtacccctctccctc

SEQ ID NO: 30819 - DNA, 20 bp, Artificial Sequence
  chemically synthesized
cttgggacactctaggctgg

SEQ ID NO: 30820 - DNA, 20 bp, Artificial Sequence
  chemically synthesized
agtaccccctcctcctgtcc

SEQ ID NO: 30821 - DNA, 20 bp, Artificial Sequence
  chemically synthesized
gttaaagggccagtttggga

SEQ ID NO: 30822 - DNA, 20 bp, Artificial Sequence
  chemically synthesized
cttctttctgtcctcatttt

SEQ ID NO: 30823 - DNA, 20 bp, Artificial Sequence
  chemically synthesized
ccccgcctctgctatgtggg

SEQ ID NO: 30824 - DNA, 20 bp, Artificial Sequence
  chemically synthesized
cggggaggaacgagctttgc

SEQ ID NO: 30825 - DNA, 20 bp, Artificial Sequence
  chemically synthesized
ggaacgagctttgcgagggt

SEQ ID NO: 30826 - DNA, 20 bp, Artificial Sequence
  chemically synthesized
ggggggaaagaacggttagg

SEQ ID NO: 30827 - DNA, 20 bp, Artificial Sequence
  chemically synthesized
atttttggtagggaggaacc

SEQ ID NO: 30828 - DNA, 20 bp, Artificial Sequence
  chemically synthesized
ttcggggcatggccgaagag

SEQ ID NO: 30829 - DNA, 20 bp, Artificial Sequence
  chemically synthesized
ccccctctcgcctcggagct

SEQ ID NO: 30830 - DNA, 20 bp, Artificial Sequence
  chemically synthesized
ggcaggcagcgtcattaata

SEQ ID NO: 30831 - DNA, 20 bp, Artificial Sequence
  chemically synthesized
cgccgcgcacacccagtgcc

SEQ ID NO: 30832 - DNA, 20 bp, Artificial Sequence
  chemically synthesized
aaagtgtaagcttgtggaca

SEQ ID NO: 30833 - DNA, 20 bp, Artificial Sequence
  chemically synthesized
tgtaagcttgtggacacaga

SEQ ID NO: 30834 - DNA, 20 bp, Artificial Sequence
  chemically synthesized
gactgcaccaggttaaccag

SEQ ID NO: 30835 - DNA, 20 bp, Artificial Sequence
  chemically synthesized
acgctgctcgctttgtgcct

SEQ ID NO: 30836 - DNA, 20 bp, Artificial Sequence
  chemically synthesized
tgtttctttgcttttcctct

SEQ ID NO: 30837 - DNA, 20 bp, Artificial Sequence
  chemically synthesized
tccttaccaacatttcctat

SEQ ID NO: 30838 - DNA, 20 bp, Artificial Sequence
  chemically synthesized
tttcttcctcccctcgtaga

SEQ ID NO: 30839 - DNA, 20 bp, Artificial Sequence
  chemically synthesized
aggactccctgctttgtagc

SEQ ID NO: 30840 - DNA, 20 bp, Artificial Sequence
  chemically synthesized
ttggtattgttggggcgaag

SEQ ID NO: 30841 - DNA, 20 bp, Artificial Sequence
  chemically synthesized
attgttggggcgaaggagga

SEQ ID NO: 30842 - DNA, 20 bp, Artificial Sequence
  chemically synthesized
tggggcgaaggaggatggag

SEQ ID NO: 30843 - DNA, 20 bp, Artificial Sequence
  chemically synthesized
gatggagttgaattgaggga

SEQ ID NO: 30844 - DNA, 20 bp, Artificial Sequence
  chemically synthesized
gagggagggggtaaatggct

SEQ ID NO: 30845 - DNA, 20 bp, Artificial Sequence
  chemically synthesized
aggaaggtttttagggaaag

SEQ ID NO: 30846 - DNA, 20 bp, Artificial Sequence
  chemically synthesized
aaatcagtagactacaccat

SEQ ID NO: 30847 - DNA, 20 bp, Artificial Sequence
  chemically synthesized
gttaaacgtatttcatacat

SEQ ID NO: 30848 - DNA, 20 bp, Artificial Sequence
  chemically synthesized
ggaggtgtaatcagcaacct

SEQ ID NO: 30849 - DNA, 20 bp, Artificial Sequence
  chemically synthesized
tttaactatttgatacctag

SEQ ID NO: 30850 - DNA, 20 bp, Artificial Sequence
  chemically synthesized
gggaacaaaaaaaaaaaaaa

SEQ ID NO: 30851 - DNA, 20 bp, Artificial Sequence
  chemically synthesized
aaatccttaattcagacaac

SEQ ID NO: 30852 - DNA, 20 bp, Artificial Sequence
  chemically synthesized
tcagacaacaggaatatttt

SEQ ID NO: 30853 - DNA, 20 bp, Artificial Sequence
  chemically synthesized
acaacaggaatattttgaga

SEQ ID NO: 30854 - DNA, 20 bp, Artificial Sequence
  chemically synthesized
aatggaagcaaatgtaagag

SEQ ID NO: 30855 - DNA, 20 bp, Artificial Sequence
  chemically synthesized
actttactgtctttattagt

SEQ ID NO: 30856 - DNA, 20 bp, Artificial Sequence
  chemically synthesized
tgaccttatgttaaattagg

SEQ ID NO: 30857 - DNA, 20 bp, Artificial Sequence
  chemically synthesized
ttatttcacctagcacatct

SEQ ID NO: 30858 - DNA, 20 bp, Artificial Sequence
  chemically synthesized
cttccccctcaatattcagc

SEQ ID NO: 30859 - DNA, 20 bp, Artificial Sequence
  chemically synthesized
ccctcaatattcagcctggg

SEQ ID NO: 30860 - DNA, 20 bp, Artificial Sequence
  chemically synthesized
agggttgaaataaatttaac

SEQ ID NO: 30861 - DNA, 20 bp, Artificial Sequence
  chemically synthesized
ataaatttaacctgagttca

SEQ ID NO: 30862 - DNA, 20 bp, Artificial Sequence
  chemically synthesized
ttttattaactggcagcatc

SEQ ID NO: 30863 - DNA, 20 bp, Artificial Sequence
  chemically synthesized
gaagctggtaaagtagatgc

SEQ ID NO: 30864 - DNA, 20 bp, Artificial Sequence
  chemically synthesized
ccaccaagtgcaaacatgtt

SEQ ID NO: 30865 - DNA, 20 bp, Artificial Sequence
  chemically synthesized
attataggcattccatttct

SEQ ID NO: 30866 - DNA, 20 bp, Artificial Sequence
  chemically synthesized
tttgattttgtggcactgct

SEQ ID NO: 30867 - DNA, 20 bp, Artificial Sequence
  chemically synthesized
gcagaaaggtttttggcagt

SEQ ID NO: 30868 - DNA, 20 bp, Artificial Sequence
  chemically synthesized
gaagccatgtctgtttactt

SEQ ID NO: 30869 - DNA, 20 bp, Artificial Sequence
  chemically synthesized
agtatatacattcacacaca

SEQ ID NO: 30870 - DNA, 20 bp, Artificial Sequence
  chemically synthesized
aaccagacacatttgttgct

SEQ ID NO: 30871 - DNA, 20 bp, Artificial Sequence
  chemically synthesized
ttgttgctgtgggtgtgtgc

SEQ ID NO: 30872 - DNA, 20 bp, Artificial Sequence
  chemically synthesized
atgtgtgtgtgtgtgttctc

SEQ ID NO: 30873 - DNA, 20 bp, Artificial Sequence
  chemically synthesized
tttttgtatgctcacatttt

SEQ ID NO: 30874 - DNA, 20 bp, Artificial Sequence
  chemically synthesized
aaacactttacatgatgtgg

SEQ ID NO: 30875 - DNA, 20 bp, Artificial Sequence
  chemically synthesized
catgatgtggtgggatggca

SEQ ID NO: 30876 - DNA, 20 bp, Artificial Sequence
  chemically synthesized
gcccgttgggagctccagaa

SEQ ID NO: 30877 - DNA, 20 bp, Artificial Sequence
  chemically synthesized
gcctctgcttagaaaaagct

SEQ ID NO: 30878 - DNA, 20 bp, Artificial Sequence
  chemically synthesized
ttggcatccaggtcacgcca

SEQ ID NO: 30879 - DNA, 20 bp, Artificial Sequence
  chemically synthesized
tgtttatcaacgtcatctag

SEQ ID NO: 30880 - DNA, 20 bp, Artificial Sequence
  chemically synthesized
ggtgctgtagccaagcagta

SEQ ID NO: 30881 - DNA, 20 bp, Artificial Sequence
  chemically synthesized
aataaatattttccacctca

SEQ ID NO: 30882 - DNA, 20 bp, Artificial Sequence
  chemically synthesized
ctcactgaatcagatgtagg

SEQ ID NO: 30883 - DNA, 20 bp, Artificial Sequence
  chemically synthesized
acacatcagacaccttctct

SEQ ID NO: 30884 - DNA, 20 bp, Artificial Sequence
  chemically synthesized
tctctctggatctgtcgatt

SEQ ID NO: 30885 - DNA, 20 bp, Artificial Sequence
  chemically synthesized
acatctggccaggcctcctt

SEQ ID NO: 30886 - DNA, 20 bp, Artificial Sequence
  chemically synthesized
ttctcaaggcttccctgaag

SEQ ID NO: 30887 - DNA, 20 bp, Artificial Sequence
  chemically synthesized
cctgaagtagagtgggctgg

SEQ ID NO: 30888 - DNA, 20 bp, Artificial Sequence
  chemically synthesized
gggtagttggaggtggtgga

SEQ ID NO: 30889 - DNA, 20 bp, Artificial Sequence
  chemically synthesized
actgagcttcagggctagcc

SEQ ID NO: 30890 - DNA, 20 bp, Artificial Sequence
  chemically synthesized
gatccatattggctgtcagc

SEQ ID NO: 30891 - DNA, 20 bp, Artificial Sequence
  chemically synthesized
aattaaacacagccccgtgg

SEQ ID NO: 30892 - DNA, 20 bp, Artificial Sequence
  chemically synthesized
ccattttcgactggccaggc

SEQ ID NO: 30893 - DNA, 20 bp, Artificial Sequence
  chemically synthesized
gcagggaggcagctaggtgt

SEQ ID NO: 30894 - DNA, 20 bp, Artificial Sequence
  chemically synthesized
tctcggcagctcaagggaaa

SEQ ID NO: 30895 - DNA, 20 bp, Artificial Sequence
  chemically synthesized
cagacatgccatgcctgttg

SEQ ID NO: 30896 - DNA, 20 bp, Artificial Sequence
  chemically synthesized
taggaaaggtagtgcatatc

SEQ ID NO: 30897 - DNA, 20 bp, Artificial Sequence
  chemically synthesized
taataggtcagtggtctaga

SEQ ID NO: 30898 - DNA, 20 bp, Artificial Sequence
  chemically synthesized
ttatttctcctctccccctc

SEQ ID NO: 30899 - DNA, 20 bp, Artificial Sequence
  chemically synthesized
tgctagggaagctgcatttg

SEQ ID NO: 30900 - DNA, 20 bp, Artificial Sequence
  chemically synthesized
gcatttgtggagtgtatttc

SEQ ID NO: 30901 - DNA, 20 bp, Artificial Sequence
  chemically synthesized
ttatctcccctaccccccag

SEQ ID NO: 30902 - DNA, 20 bp, Artificial Sequence
  chemically synthesized
cctaccccccagcaggatgt

SEQ ID NO: 30903 - DNA, 20 bp, Artificial Sequence
  chemically synthesized
tgaagcaagagcaggcggaa

SEQ ID NO: 30904 - DNA, 20 bp, Artificial Sequence
  chemically synthesized
ccttgctaaatcaccaaata

SEQ ID NO: 30905 - DNA, 20 bp, Artificial Sequence
  chemically synthesized
aaacacagtgtctgtcaagc

SEQ ID NO: 30906 - DNA, 20 bp, Artificial Sequence
  chemically synthesized
tgtgcctctgtatttagagg

SEQ ID NO: 30907 - DNA, 20 bp, Artificial Sequence
  chemically synthesized
agacttttactgctatagtt

SEQ ID NO: 30908 - DNA, 20 bp, Artificial Sequence
  chemically synthesized
gtgaggtaaacctttcgtgc

SEQ ID NO: 30909 - DNA, 20 bp, Artificial Sequence
  chemically synthesized
caaagtgagatgtcagtaac

SEQ ID NO: 30910 - DNA, 20 bp, Artificial Sequence
  chemically synthesized
acttctcataattcacagta

SEQ ID NO: 30911 - DNA, 20 bp, Artificial Sequence
  chemically synthesized
ataattcacagtaatgaatt

SEQ ID NO: 30912 - DNA, 20 bp, Artificial Sequence
  chemically synthesized
agtaatcattcagtagatat

SEQ ID NO: 30913 - DNA, 20 bp, Artificial Sequence
  chemically synthesized
ttaaggaaagagatatattg

SEQ ID NO: 30914 - DNA, 20 bp, Artificial Sequence
  chemically synthesized
atatattgatgaatctctag

SEQ ID NO: 30915 - DNA, 20 bp, Artificial Sequence
  chemically synthesized
aaggtagtcatttaagcgtg

SEQ ID NO: 30916 - DNA, 20 bp, Artificial Sequence
  chemically synthesized
ctttattaaagtgatgtaag

SEQ ID NO: 30917 - DNA, 20 bp, Artificial Sequence
  chemically synthesized
taaagtgatgtaagttggat

SEQ ID NO: 30918 - DNA, 20 bp, Artificial Sequence
  chemically synthesized
ctattttataggcaggaagc

SEQ ID NO: 30919 - DNA, 20 bp, Artificial Sequence
  chemically synthesized
ttcctaagataaataaagct

SEQ ID NO: 30920 - DNA, 20 bp, Artificial Sequence
  chemically synthesized
aattcgggactttcagatag

SEQ ID NO: 30921 - DNA, 20 bp, Artificial Sequence
  chemically synthesized
tttcagataggagaataagg

SEQ ID NO: 30922 - DNA, 20 bp, Artificial Sequence
  chemically synthesized
aaggcagagttctttaaatc

SEQ ID NO: 30923 - DNA, 20 bp, Artificial Sequence
  chemically synthesized
tgtactcaggcctctccaag

SEQ ID NO: 30924 - DNA, 20 bp, Artificial Sequence
  chemically synthesized
tttttttttttttttttaga

SEQ ID NO: 30925 - DNA, 20 bp, Artificial Sequence
  chemically synthesized
tttgctcttgttgcccaggc

SEQ ID NO: 30926 - DNA, 20 bp, Artificial Sequence
  chemically synthesized
gcctcagcctcccaagtagc

SEQ ID NO: 30927 - DNA, 20 bp, Artificial Sequence
  chemically synthesized
ttttgtattttcagtagagg

SEQ ID NO: 30928 - DNA, 20 bp, Artificial Sequence
  chemically synthesized
ggcttggcctcccaaagtgc

SEQ ID NO: 30929 - DNA, 20 bp, Artificial Sequence
  chemically synthesized
gcgaccgcacctggcccaaa

SEQ ID NO: 30930 - DNA, 20 bp, Artificial Sequence
  chemically synthesized
cccaaactgagtatttttta

SEQ ID NO: 30931 - DNA, 20 bp, Artificial Sequence
  chemically synthesized
tagaggattctttttacctg

SEQ ID NO: 30932 - DNA, 20 bp, Artificial Sequence
  chemically synthesized
tctttttacctggtgaatag

SEQ ID NO: 30933 - DNA, 20 bp, Artificial Sequence
  chemically synthesized
gaagtagtattaatttagct

SEQ ID NO: 30934 - DNA, 20 bp, Artificial Sequence
  chemically synthesized
ttgcagtcagagctttcaat

SEQ ID NO: 30935 - DNA, 20 bp, Artificial Sequence
  chemically synthesized
gaaatattcatggaagatta

SEQ ID NO: 30936 - DNA, 20 bp, Artificial Sequence
  chemically synthesized
ggttttggcttattgcacat

SEQ ID NO: 30937 - DNA, 20 bp, Artificial Sequence
  chemically synthesized
atgaacatagacatttatat

SEQ ID NO: 30938 - DNA, 20 bp, Artificial Sequence
  chemically synthesized
atcaaatacaatatgctttt

SEQ ID NO: 30939 - DNA, 20 bp, Artificial Sequence
  chemically synthesized
tcctagctcagactgaactg

SEQ ID NO: 30940 - DNA, 20 bp, Artificial Sequence
  chemically synthesized
ttctctttatttatgtgatt

SEQ ID NO: 30941 - DNA, 20 bp, Artificial Sequence
  chemically synthesized
aaaaacgactgacttctgaa

SEQ ID NO: 30942 - DNA, 20 bp, Artificial Sequence
  chemically synthesized
ttacttaccttcaaaatcca

SEQ ID NO: 30943 - DNA, 20 bp, Artificial Sequence
  chemically synthesized
ccttcaaaatccagagagta

SEQ ID NO: 30944 - DNA, 20 bp, Artificial Sequence
  chemically synthesized
attgttttctaataagtacc

SEQ ID NO: 30945 - DNA, 20 bp, Artificial Sequence
  chemically synthesized
agactaatgttcatgaaact

SEQ ID NO: 30946 - DNA, 20 bp, Artificial Sequence
  chemically synthesized
aaaggttgtgaactggcagc

SEQ ID NO: 30947 - DNA, 20 bp, Artificial Sequence
  chemically synthesized
tcttttataaataatgtttt

SEQ ID NO: 30948 - DNA, 20 bp, Artificial Sequence
  chemically synthesized
caagttgtgcctttactata

SEQ ID NO: 30949 - DNA, 20 bp, Artificial Sequence
  chemically synthesized
ttttgcacacctttctctta

SEQ ID NO: 30950 - DNA, 20 bp, Artificial Sequence
  chemically synthesized
acatgggctggaaaatgcaa

SEQ ID NO: 30951 - DNA, 20 bp, Artificial Sequence
  chemically synthesized
tgggtgtagaaacgtgcagg

SEQ ID NO: 30952 - DNA, 20 bp, Artificial Sequence
  chemically synthesized
accttcagctcagggaggag

SEQ ID NO: 30953 - DNA, 20 bp, Artificial Sequence
  chemically synthesized
cagctcagggaggaggcgag

SEQ ID NO: 30954 - DNA, 20 bp, Artificial Sequence
  chemically synthesized
tgcttattaatggcatcttt

SEQ ID NO: 30955 - DNA, 20 bp, Artificial Sequence
  chemically synthesized
ccatgtagtttggctaatgt

SEQ ID NO: 30956 - DNA, 20 bp, Artificial Sequence
  chemically synthesized
ctaatgtgggagtactaaat

SEQ ID NO: 30957 - DNA, 20 bp, Artificial Sequence
  chemically synthesized
aatgaaaatgtttaataaag

SEQ ID NO: 30958 - DNA, 20 bp, Artificial Sequence
  chemically synthesized
tgtttaataaaggagaatag

SEQ ID NO: 30959 - DNA, 20 bp, Artificial Sequence
  chemically synthesized
gatgcaccaagattgcgtca

SEQ ID NO: 30960 - DNA, 20 bp, Artificial Sequence
  chemically synthesized
tctgcttgttcagatttcat

SEQ ID NO: 30961 - DNA, 20 bp, Artificial Sequence
  chemically synthesized
gtcagcagtgttgttatttc

SEQ ID NO: 30962 - DNA, 20 bp, Artificial Sequence
  chemically synthesized
tttttatgttatgtatcaat

SEQ ID NO: 30963 - DNA, 20 bp, Artificial Sequence
  chemically synthesized
tgttcagactatataattta

SEQ ID NO: 30964 - DNA, 20 bp, Artificial Sequence
  chemically synthesized
cagcttctcccctttacgac

SEQ ID NO: 30965 - DNA, 20 bp, Artificial Sequence
  chemically synthesized
acgaaccatattattgctac

SEQ ID NO: 30966 - DNA, 20 bp, Artificial Sequence
  chemically synthesized
ggaaatgtaacctgacaaat

SEQ ID NO: 30967 - DNA, 20 bp, Artificial Sequence
  chemically synthesized
aaaatgtaacttattccata

SEQ ID NO: 30968 - DNA, 20 bp, Artificial Sequence
  chemically synthesized
ttattccatattgggttcat

SEQ ID NO: 30969 - DNA, 20 bp, Artificial Sequence
  chemically synthesized
aaggcttttgctgttcttag

SEQ ID NO: 30970 - DNA, 20 bp, Artificial Sequence
  chemically synthesized
tcttagcagggttagtaact

SEQ ID NO: 30971 - DNA, 20 bp, Artificial Sequence
  chemically synthesized
ttcgtcattctgcaatggca

SEQ ID NO: 30972 - DNA, 20 bp, Artificial Sequence
  chemically synthesized
ttgagttaggttggcaaggg

SEQ ID NO: 30973 - DNA, 20 bp, Artificial Sequence
  chemically synthesized
agggaaggatttgaggcatg

SEQ ID NO: 30974 - DNA, 20 bp, Artificial Sequence
  chemically synthesized
ggtcacttctgatcccagca

SEQ ID NO: 30975 - DNA, 20 bp, Artificial Sequence
  chemically synthesized
tgccctgtcagatgcggagc

SEQ ID NO: 30976 - DNA, 20 bp, Artificial Sequence
  chemically synthesized
cttaatatgcagctagtctg

SEQ ID NO: 30977 - DNA, 20 bp, Artificial Sequence
  chemically synthesized
acatcatccttttcttctct

SEQ ID NO: 30978 - DNA, 20 bp, Artificial Sequence
  chemically synthesized
gccacctcccaattcaccac

SEQ ID NO: 30979 - DNA, 20 bp, Artificial Sequence
  chemically synthesized
atatggttaattacaggcgt

SEQ ID NO: 30980 - DNA, 20 bp, Artificial Sequence
  chemically synthesized
aagtatgtgatttgaacaaa

SEQ ID NO: 30981 - DNA, 20 bp, Artificial Sequence
  chemically synthesized
tttaaaaaacaactttcaac

SEQ ID NO: 30982 - DNA, 20 bp, Artificial Sequence
  chemically synthesized
aatatttcaccattatattt

SEQ ID NO: 30983 - DNA, 20 bp, Artificial Sequence
  chemically synthesized
tttataatgtgttcctttaa

SEQ ID NO: 30984 - DNA, 20 bp, Artificial Sequence
  chemically synthesized
aaataagctgctaagaactg

SEQ ID NO: 30985 - DNA, 20 bp, Artificial Sequence
  chemically synthesized
ggttcaccctggagactgat

SEQ ID NO: 30986 - DNA, 20 bp, Artificial Sequence
  chemically synthesized
caccctggagactgatgtga

SEQ ID NO: 30987 - DNA, 20 bp, Artificial Sequence
  chemically synthesized
tagataaaataccaagttct

SEQ ID NO: 30988 - DNA, 20 bp, Artificial Sequence
  chemically synthesized
tggcagcatgttattcagaa

SEQ ID NO: 30989 - DNA, 20 bp, Artificial Sequence
  chemically synthesized
aactgaatcagtctctgcca

SEQ ID NO: 30990 - DNA, 20 bp, Artificial Sequence
  chemically synthesized
ggagcaggtatgttgatgaa

SEQ ID NO: 30991 - DNA, 20 bp, Artificial Sequence
  chemically synthesized
gggacctttggtcactcaca

SEQ ID NO: 30992 - DNA, 20 bp, Artificial Sequence
  chemically synthesized
gattttagttttagatagag

SEQ ID NO: 30993 - DNA, 20 bp, Artificial Sequence
  chemically synthesized
taaaaactcccattaaaata

SEQ ID NO: 30994 - DNA, 20 bp, Artificial Sequence
  chemically synthesized
actcccattaaaataaagaa

SEQ ID NO: 30995 - DNA, 20 bp, Artificial Sequence
  chemically synthesized
ggaattattgtgaaacctgc

SEQ ID NO: 30996 - DNA, 20 bp, Artificial Sequence
  chemically synthesized
ttagggaaataaagtgtagc

SEQ ID NO: 30997 - DNA, 20 bp, Artificial Sequence
  chemically synthesized
gttcctgtacattttaaata

SEQ ID NO: 30998 - DNA, 20 bp, Artificial Sequence
  chemically synthesized
aatgttaaatcttaaatctc

SEQ ID NO: 30999 - DNA, 20 bp, Artificial Sequence
  chemically synthesized
aaactgaacattggctactg

SEQ ID NO: 31000 - DNA, 20 bp, Artificial Sequence
  chemically synthesized
taattctgataaagatactc

SEQ ID NO: 31001 - DNA, 20 bp, Artificial Sequence
  chemically synthesized
aaatcttattctacatacaa

SEQ ID NO: 31002 - DNA, 20 bp, Artificial Sequence
  chemically synthesized
cttttgtgcttgtcccagct

SEQ ID NO: 31003 - DNA, 20 bp, Artificial Sequence
  chemically synthesized
tataggtattgtatttaaag

SEQ ID NO: 31004 - DNA, 20 bp, Artificial Sequence
  chemically synthesized
gattgcggtgttgccagcag

SEQ ID NO: 31005 - DNA, 20 bp, Artificial Sequence
  chemically synthesized
ctcattgaactctactcatg

SEQ ID NO: 31006 - DNA, 20 bp, Artificial Sequence
  chemically synthesized
agagtaacattagtgtcaaa

SEQ ID NO: 31007 - DNA, 20 bp, Artificial Sequence
  chemically synthesized
tgtggctcatacagatggtt

SEQ ID NO: 31008 - DNA, 20 bp, Artificial Sequence
  chemically synthesized
tcatacagatggttgtggat

SEQ ID NO: 31009 - DNA, 20 bp, Artificial Sequence
  chemically synthesized
cacatttctgagcagggccc

SEQ ID NO: 31010 - DNA, 20 bp, Artificial Sequence
  chemically synthesized
tgagcagggcccaaggataa

SEQ ID NO: 31011 - DNA, 20 bp, Artificial Sequence
  chemically synthesized
ataagagagttaagaaatca

SEQ ID NO: 31012 - DNA, 20 bp, Artificial Sequence
  chemically synthesized
gctgggggagagagggggag

SEQ ID NO: 31013 - DNA, 20 bp, Artificial Sequence
  chemically synthesized
agggtgcggagagaggttct

SEQ ID NO: 31014 - DNA, 20 bp, Artificial Sequence
  chemically synthesized
atccccacagcagagagctt

SEQ ID NO: 31015 - DNA, 20 bp, Artificial Sequence
  chemically synthesized
atatactttcttgctttcac

SEQ ID NO: 31016 - DNA, 20 bp, Artificial Sequence
  chemically synthesized
ttcacctgggttggagaggt

SEQ ID NO: 31017 - DNA, 20 bp, Artificial Sequence
  chemically synthesized
ttggggttgggaggaagagg

SEQ ID NO: 31018 - DNA, 20 bp, Artificial Sequence
  chemically synthesized
aggaagaggaggagttcatt

SEQ ID NO: 31019 - DNA, 20 bp, Artificial Sequence
  chemically synthesized
ttcattgggaattctgtcac

SEQ ID NO: 31020 - DNA, 20 bp, Artificial Sequence
  chemically synthesized
tgtcaggaggttagcaaggt

SEQ ID NO: 31021 - DNA, 20 bp, Artificial Sequence
  chemically synthesized
tgtgagttagcattcaagca

SEQ ID NO: 31022 - DNA, 20 bp, Artificial Sequence
  chemically synthesized
ccacgatactctctaataac

SEQ ID NO: 31023 - DNA, 20 bp, Artificial Sequence
  chemically synthesized
atactctctaataactgggg

SEQ ID NO: 31024 - DNA, 20 bp, Artificial Sequence
  chemically synthesized
actggggtgggatggtggtg

SEQ ID NO: 31025 - DNA, 20 bp, Artificial Sequence
  chemically synthesized
tgggtggacaccacaacttt

SEQ ID NO: 31026 - DNA, 20 bp, Artificial Sequence
  chemically synthesized
gtctgcatgacccgttcacc

SEQ ID NO: 31027 - DNA, 20 bp, Artificial Sequence
  chemically synthesized
tggattaaatgcggctggtg

SEQ ID NO: 31028 - DNA, 20 bp, Artificial Sequence
  chemically synthesized
gaaaggcaaatctcaagcaa

SEQ ID NO: 31029 - DNA, 20 bp, Artificial Sequence
  chemically synthesized
aaagctgtttttataccaca

SEQ ID NO: 31030 - DNA, 20 bp, Artificial Sequence
  chemically synthesized
agggggaaaaggctttttgg

SEQ ID NO: 31031 - DNA, 20 bp, Artificial Sequence
  chemically synthesized
gaagaaaaaccctttgcttt

SEQ ID NO: 31032 - DNA, 20 bp, Artificial Sequence
  chemically synthesized
aaaaaccctttgctttttgg

SEQ ID NO: 31033 - DNA, 20 bp, Artificial Sequence
  chemically synthesized
gataatttgctaaagctcat

SEQ ID NO: 31034 - DNA, 20 bp, Artificial Sequence
  chemically synthesized
ttcaaaggctaaattgcttt

SEQ ID NO: 31035 - DNA, 20 bp, Artificial Sequence
  chemically synthesized
attaggtccttccagtaatt

SEQ ID NO: 31036 - DNA, 20 bp, Artificial Sequence
  chemically synthesized
ttcttgccaagtttccttta

SEQ ID NO: 31037 - DNA, 20 bp, Artificial Sequence
  chemically synthesized
aagtttcctttagtgaattg

SEQ ID NO: 31038 - DNA, 20 bp, Artificial Sequence
  chemically synthesized
gaggaattagaagtctaacc

SEQ ID NO: 31039 - DNA, 20 bp, Artificial Sequence
  chemically synthesized
ggcacctaaaggacttgggc

SEQ ID NO: 31040 - DNA, 20 bp, Artificial Sequence
  chemically synthesized
cagtgtctccctcaaggtac

SEQ ID NO: 31041 - DNA, 20 bp, Artificial Sequence
  chemically synthesized
tttggtgtttgcctttgctg

SEQ ID NO: 31042 - DNA, 20 bp, Artificial Sequence
  chemically synthesized
ttgatgttcatctttggttt

SEQ ID NO: 31043 - DNA, 20 bp, Artificial Sequence
  chemically synthesized
gtttatcactggttaacaag

SEQ ID NO: 31044 - DNA, 20 bp, Artificial Sequence
  chemically synthesized
taactgatattctgattaaa

SEQ ID NO: 31045 - DNA, 20 bp, Artificial Sequence
  chemically synthesized
taggcagtaagatgaactga

SEQ ID NO: 31046 - DNA, 20 bp, Artificial Sequence
  chemically synthesized
ctaagatatgatgaaatcta

SEQ ID NO: 31047 - DNA, 20 bp, Artificial Sequence
  chemically synthesized
tcttcatactttatgtgggg

SEQ ID NO: 31048 - DNA, 20 bp, Artificial Sequence
  chemically synthesized
gctgagtgggcagtggagaa

SEQ ID NO: 31049 - DNA, 20 bp, Artificial Sequence
  chemically synthesized
ctgcttcagtcgcgttggct

SEQ ID NO: 31050 - DNA, 20 bp, Artificial Sequence
  chemically synthesized
tcccccaaactttacaagaa

SEQ ID NO: 31051 - DNA, 20 bp, Artificial Sequence
  chemically synthesized
ccttattattcagtctatcc

SEQ ID NO: 31052 - DNA, 20 bp, Artificial Sequence
  chemically synthesized
tgtcggtttatttaacttcc

SEQ ID NO: 31053 - DNA, 20 bp, Artificial Sequence
  chemically synthesized
agcaagaaagattacagtat

SEQ ID NO: 31054 - DNA, 20 bp, Artificial Sequence
  chemically synthesized
actggaaacttctgcttata

SEQ ID NO: 31055 - DNA, 20 bp, Artificial Sequence
  chemically synthesized
ttggcataatctagtgtacc

SEQ ID NO: 31056 - DNA, 20 bp, Artificial Sequence
  chemically synthesized
aggaagtaaataaaaagtat

SEQ ID NO: 31057 - DNA, 20 bp, Artificial Sequence
  chemically synthesized
cttttgaaaatgtattttca

SEQ ID NO: 31058 - DNA, 20 bp, Artificial Sequence
  chemically synthesized
tgtttttcgaagtacttaaa

SEQ ID NO: 31059 - DNA, 20 bp, Artificial Sequence
  chemically synthesized
gaagtacttaaagggagtgg

SEQ ID NO: 31060 - DNA, 20 bp, Artificial Sequence
  chemically synthesized
gaggggtagaaagcatataa

SEQ ID NO: 31061 - DNA, 20 bp, Artificial Sequence
  chemically synthesized
gcaaacatatccttatgcca

SEQ ID NO: 31062 - DNA, 20 bp, Artificial Sequence
  chemically synthesized
gtaaatcagtaaaccaggca

SEQ ID NO: 31063 - DNA, 20 bp, Artificial Sequence
  chemically synthesized
ggaaaccaaatcataatacc

SEQ ID NO: 31064 - DNA, 20 bp, Artificial Sequence
  chemically synthesized
ttttaaaaaactggaaatga

SEQ ID NO: 31065 - DNA, 20 bp, Artificial Sequence
  chemically synthesized
gaagaacttctgtgattact

SEQ ID NO: 31066 - DNA, 20 bp, Artificial Sequence
  chemically synthesized
taattagattcgattgtgcg

SEQ ID NO: 31067 - DNA, 20 bp, Artificial Sequence
  chemically synthesized
tcgattgtgcggtgggtgtg

SEQ ID NO: 31068 - DNA, 20 bp, Artificial Sequence
  chemically synthesized
tggggggaggggcagaggca

SEQ ID NO: 31069 - DNA, 20 bp, Artificial Sequence
  chemically synthesized
ggggcagaggcagggagtgc

SEQ ID NO: 31070 - DNA, 20 bp, Artificial Sequence
  chemically synthesized
tgctggggtgaggcgtgagg

SEQ ID NO: 31071 - DNA, 20 bp, Artificial Sequence
  chemically synthesized
ggcagcttccaacgctggtg

SEQ ID NO: 31072 - DNA, 20 bp, Artificial Sequence
  chemically synthesized
atgctcatggtgccctagtc

SEQ ID NO: 31073 - DNA, 20 bp, Artificial Sequence
  chemically synthesized
ttaggtgggcttatttccca

SEQ ID NO: 31074 - DNA, 20 bp, Artificial Sequence
  chemically synthesized
cttatttcccactgggtctg

SEQ ID NO: 31075 - DNA, 20 bp, Artificial Sequence
  chemically synthesized
ttcatttgtcctttgagggg

SEQ ID NO: 31076 - DNA, 20 bp, Artificial Sequence
  chemically synthesized
gaacagctgcggccggcaga

SEQ ID NO: 31077 - DNA, 20 bp, Artificial Sequence
  chemically synthesized
taggaagagggaagcagcct

SEQ ID NO: 31078 - DNA, 20 bp, Artificial Sequence
  chemically synthesized
ttcccgaccacatggaaagg

SEQ ID NO: 31079 - DNA, 20 bp, Artificial Sequence
  chemically synthesized
aagacgttatggaccctgcc

SEQ ID NO: 31080 - DNA, 20 bp, Artificial Sequence
  chemically synthesized
atggaccctgccttgggtac

SEQ ID NO: 31081 - DNA, 20 bp, Artificial Sequence
  chemically synthesized
ggcactgccaaaacacgctc

SEQ ID NO: 31082 - DNA, 20 bp, Artificial Sequence
  chemically synthesized
gtttaatggtagtggttggt

SEQ ID NO: 31083 - DNA, 20 bp, Artificial Sequence
  chemically synthesized
aaaagccctggccaaggctt

SEQ ID NO: 31084 - DNA, 20 bp, Artificial Sequence
  chemically synthesized
gcttgcatttaattgcaagt

SEQ ID NO: 31085 - DNA, 20 bp, Artificial Sequence
  chemically synthesized
ttgcaagtcagggtaaatta

SEQ ID NO: 31086 - DNA, 20 bp, Artificial Sequence
  chemically synthesized
ctggtttagtgttagtgtga

SEQ ID NO: 31087 - DNA, 20 bp, Artificial Sequence
  chemically synthesized
gagagggtcgaaaagattct

SEQ ID NO: 31088 - DNA, 20 bp, Artificial Sequence
  chemically synthesized
aaaagattctgtgggtccaa

SEQ ID NO: 31089 - DNA, 20 bp, Artificial Sequence
  chemically synthesized
gggaggagaaaaacctggac

SEQ ID NO: 31090 - DNA, 20 bp, Artificial Sequence
  chemically synthesized
gagaaaaacctggaccggag

SEQ ID NO: 31091 - DNA, 20 bp, Artificial Sequence
  chemically synthesized
agccagactggtttagcaga

SEQ ID NO: 31092 - DNA, 20 bp, Artificial Sequence
  chemically synthesized
gaatgatagattgttttgtc

SEQ ID NO: 31093 - DNA, 20 bp, Artificial Sequence
  chemically synthesized
gattgttttgtcaggggtcc

SEQ ID NO: 31094 - DNA, 20 bp, Artificial Sequence
  chemically synthesized
cttgaagcactttgtttatc

SEQ ID NO: 31095 - DNA, 20 bp, Artificial Sequence
  chemically synthesized
gagaacagagaagactcagg

SEQ ID NO: 31096 - DNA, 20 bp, Artificial Sequence
  chemically synthesized
ccagtcttttggctacatat

SEQ ID NO: 31097 - DNA, 20 bp, Artificial Sequence
  chemically synthesized
taacccgagggccagatggg

SEQ ID NO: 31098 - DNA, 20 bp, Artificial Sequence
  chemically synthesized
tgtgagagctcgtggtgcag

SEQ ID NO: 31099 - DNA, 20 bp, Artificial Sequence
  chemically synthesized
ttaacttgttggaagggcct

SEQ ID NO: 31100 - DNA, 20 bp, Artificial Sequence
  chemically synthesized
aggaaggctcaagaaaggcc

SEQ ID NO: 31101 - DNA, 20 bp, Artificial Sequence
  chemically synthesized
gtgacattatgcattcatat

SEQ ID NO: 31102 - DNA, 20 bp, Artificial Sequence
  chemically synthesized
atatatgaatgttggcaagc

SEQ ID NO: 31103 - DNA, 20 bp, Artificial Sequence
  chemically synthesized
tgccacaagtggcgaagtaa

SEQ ID NO: 31104 - DNA, 20 bp, Artificial Sequence
  chemically synthesized
aggagctgctggggctaaag

SEQ ID NO: 31105 - DNA, 20 bp, Artificial Sequence
  chemically synthesized
tggggctaaagctgggttca

SEQ ID NO: 31106 - DNA, 20 bp, Artificial Sequence
  chemically synthesized
gctaggcctcataagggagg

SEQ ID NO: 31107 - DNA, 20 bp, Artificial Sequence
  chemically synthesized
ctgggaaaatttgggggcct

SEQ ID NO: 31108 - DNA, 20 bp, Artificial Sequence
  chemically synthesized
ggggcctctgggtttatccc

SEQ ID NO: 31109 - DNA, 20 bp, Artificial Sequence
  chemically synthesized
gaaataaaatggtttaggct

SEQ ID NO: 31110 - DNA, 20 bp, Artificial Sequence
  chemically synthesized
tcctcaatctgtaaagtggg

SEQ ID NO: 31111 - DNA, 20 bp, Artificial Sequence
  chemically synthesized
ggcttggaactgtgtgctcc

SEQ ID NO: 31112 - DNA, 20 bp, Artificial Sequence
  chemically synthesized
tcaaagtagttcccccatta

SEQ ID NO: 31113 - DNA, 20 bp, Artificial Sequence
  chemically synthesized
ccattatggggtgagcaggt

SEQ ID NO: 31114 - DNA, 20 bp, Artificial Sequence
  chemically synthesized
gagagaagagcagggcaggt

SEQ ID NO: 31115 - DNA, 20 bp, Artificial Sequence
  chemically synthesized
aggtgggggtctaaagagct

SEQ ID NO: 31116 - DNA, 20 bp, Artificial Sequence
  chemically synthesized
tttctggtggcagctccctc

SEQ ID NO: 31117 - DNA, 20 bp, Artificial Sequence
  chemically synthesized
gtggcagctccctcgtgggt

SEQ ID NO: 31118 - DNA, 20 bp, Artificial Sequence
  chemically synthesized
tacgagaggcttgtgcctgc

SEQ ID NO: 31119 - DNA, 20 bp, Artificial Sequence
  chemically synthesized
gggtgtgtgacacagttact

SEQ ID NO: 31120 - DNA, 20 bp, Artificial Sequence
  chemically synthesized
tgttactgctagctggttgg

SEQ ID NO: 31121 - DNA, 20 bp, Artificial Sequence
  chemically synthesized
agctggttgggagagtctga

SEQ ID NO: 31122 - DNA, 20 bp, Artificial Sequence
  chemically synthesized
actcaaggtcccttacctca

SEQ ID NO: 31123 - DNA, 20 bp, Artificial Sequence
  chemically synthesized
cgctccgggggctgcacctc

SEQ ID NO: 31124 - DNA, 20 bp, Artificial Sequence
  chemically synthesized
catttggtagaggaggaaat

SEQ ID NO: 31125 - DNA, 20 bp, Artificial Sequence
  chemically synthesized
ggaggaaattggggttcatc

SEQ ID NO: 31126 - DNA, 20 bp, Artificial Sequence
  chemically synthesized
aagggttaaatgacttccct

SEQ ID NO: 31127 - DNA, 20 bp, Artificial Sequence
  chemically synthesized
gctggacagttgtccctccc

SEQ ID NO: 31128 - DNA, 20 bp, Artificial Sequence
  chemically synthesized
ttcaatcttctgggaaagag

SEQ ID NO: 31129 - DNA, 20 bp, Artificial Sequence
  chemically synthesized
ttgggaaaagttgcaatgta

SEQ ID NO: 31130 - DNA, 20 bp, Artificial Sequence
  chemically synthesized
tagtcatttccccatctgtc

SEQ ID NO: 31131 - DNA, 20 bp, Artificial Sequence
  chemically synthesized
gaatgagcctgaaatcaagt

SEQ ID NO: 31132 - DNA, 20 bp, Artificial Sequence
  chemically synthesized
ggtcaggagactgcagtggg

SEQ ID NO: 31133 - DNA, 20 bp, Artificial Sequence
  chemically synthesized
gtctctgtggcatttacttc

SEQ ID NO: 31134 - DNA, 20 bp, Artificial Sequence
  chemically synthesized
tcgtaccttcaaaggctggg

SEQ ID NO: 31135 - DNA, 20 bp, Artificial Sequence
  chemically synthesized
cttcaaaggctggggagaat

SEQ ID NO: 31136 - DNA, 20 bp, Artificial Sequence
  chemically synthesized
attatacagggagggagaga

SEQ ID NO: 31137 - DNA, 20 bp, Artificial Sequence
  chemically synthesized
cagggagggagagactgagt

SEQ ID NO: 31138 - DNA, 20 bp, Artificial Sequence
  chemically synthesized
gagggagagactgagtgtga

SEQ ID NO: 31139 - DNA, 20 bp, Artificial Sequence
  chemically synthesized
cagtggtgtttcttaggacg

SEQ ID NO: 31140 - DNA, 20 bp, Artificial Sequence
  chemically synthesized
tcttaggacgatgggttctg

SEQ ID NO: 31141 - DNA, 20 bp, Artificial Sequence
  chemically synthesized
ctggaaacttgagggaagtt

SEQ ID NO: 31142 - DNA, 20 bp, Artificial Sequence
  chemically synthesized
agacctgaggttcgttgcag

SEQ ID NO: 31143 - DNA, 20 bp, Artificial Sequence
  chemically synthesized
ctaacatagacctccactga

SEQ ID NO: 31144 - DNA, 20 bp, Artificial Sequence
  chemically synthesized
gacctccactgagagaattt

SEQ ID NO: 31145 - DNA, 20 bp, Artificial Sequence
  chemically synthesized
tcatgcggaggccccgtggg

SEQ ID NO: 31146 - DNA, 20 bp, Artificial Sequence
  chemically synthesized
aggccccgtgggaggagtgg

SEQ ID NO: 31147 - DNA, 20 bp, Artificial Sequence
  chemically synthesized
aagagttggcctcagcactg

SEQ ID NO: 31148 - DNA, 20 bp, Artificial Sequence
  chemically synthesized
ggcctcagcactggcgagta

SEQ ID NO: 31149 - DNA, 20 bp, Artificial Sequence
  chemically synthesized
ggtcacatccaggttgtctt

SEQ ID NO: 31150 - DNA, 20 bp, Artificial Sequence
  chemically synthesized
gttgtcttctgagtttgagg

SEQ ID NO: 31151 - DNA, 20 bp, Artificial Sequence
  chemically synthesized
gtgggatggaggtggctgct

SEQ ID NO: 31152 - DNA, 20 bp, Artificial Sequence
  chemically synthesized
ggtggctgctgagaatccat

SEQ ID NO: 31153 - DNA, 20 bp, Artificial Sequence
  chemically synthesized
ttcattgtctctacataccc

SEQ ID NO: 31154 - DNA, 20 bp, Artificial Sequence
  chemically synthesized
tctctacatacccttgggtc

SEQ ID NO: 31155 - DNA, 20 bp, Artificial Sequence
  chemically synthesized
gaagctcttagttttatttg

SEQ ID NO: 31156 - DNA, 20 bp, Artificial Sequence
  chemically synthesized
tgacccttcaggccaagtgc

SEQ ID NO: 31157 - DNA, 20 bp, Artificial Sequence
  chemically synthesized
tggcaaagctacaataaata

SEQ ID NO: 31158 - DNA, 20 bp, Artificial Sequence
  chemically synthesized
gtggactggttaagaggctg

SEQ ID NO: 31159 - DNA, 20 bp, Artificial Sequence
  chemically synthesized
ttaagaggctgttggatgag

SEQ ID NO: 31160 - DNA, 20 bp, Artificial Sequence
  chemically synthesized
tgctaagtagttccccgctt

SEQ ID NO: 31161 - DNA, 20 bp, Artificial Sequence
  chemically synthesized
gctgggcagagattagcgca

SEQ ID NO: 31162 - DNA, 20 bp, Artificial Sequence
  chemically synthesized
agggagttgtgtgtgtcaca

SEQ ID NO: 31163 - DNA, 20 bp, Artificial Sequence
  chemically synthesized
actgctgtctgcgatgcaga

SEQ ID NO: 31164 - DNA, 20 bp, Artificial Sequence
  chemically synthesized
tgtacacttcccaaatggta

SEQ ID NO: 31165 - DNA, 20 bp, Artificial Sequence
  chemically synthesized
gaacacatcatcccaaaata

SEQ ID NO: 31166 - DNA, 20 bp, Artificial Sequence
  chemically synthesized
tcatcccaaaatatgggatt

SEQ ID NO: 31167 - DNA, 20 bp, Artificial Sequence
  chemically synthesized
tttgatcaaatcaccagttt

SEQ ID NO: 31168 - DNA, 20 bp, Artificial Sequence
  chemically synthesized
atctagattttgcagaagtt

SEQ ID NO: 31169 - DNA, 20 bp, Artificial Sequence
  chemically synthesized
actatttttgattaccaaac

SEQ ID NO: 31170 - DNA, 20 bp, Artificial Sequence
  chemically synthesized
tgatctgaaaaccaggacac

SEQ ID NO: 31171 - DNA, 20 bp, Artificial Sequence
  chemically synthesized
ggtaaaatagatagtttgga

SEQ ID NO: 31172 - DNA, 20 bp, Artificial Sequence
  chemically synthesized
aaatagatagtttggactgg

SEQ ID NO: 31173 - DNA, 20 bp, Artificial Sequence
  chemically synthesized
gttttctccctgctattttt

SEQ ID NO: 31174 - DNA, 20 bp, Artificial Sequence
  chemically synthesized
tattttttggaatctagttg

SEQ ID NO: 31175 - DNA, 20 bp, Artificial Sequence
  chemically synthesized
gggctcacctgcaaagacag

SEQ ID NO: 31176 - DNA, 20 bp, Artificial Sequence
  chemically synthesized
gctatggtggagattaaggc

SEQ ID NO: 31177 - DNA, 20 bp, Artificial Sequence
  chemically synthesized
aaaattgaagtgcagtataa

SEQ ID NO: 31178 - DNA, 20 bp, Artificial Sequence
  chemically synthesized
gttttttttgaaaaactcca

SEQ ID NO: 31179 - DNA, 20 bp, Artificial Sequence
  chemically synthesized
cgtttttgaaaaagaaatag

SEQ ID NO: 31180 - DNA, 20 bp, Artificial Sequence
  chemically synthesized
ttttaaattcaattaactga

SEQ ID NO: 31181 - DNA, 20 bp, Artificial Sequence
  chemically synthesized
atggacatagcctacatatg

SEQ ID NO: 31182 - DNA, 20 bp, Artificial Sequence
  chemically synthesized
gcctacatatgctgagtccc

SEQ ID NO: 31183 - DNA, 20 bp, Artificial Sequence
  chemically synthesized
tatgctgagtccctggagtt

SEQ ID NO: 31184 - DNA, 20 bp, Artificial Sequence
  chemically synthesized
gtttaccattggcttttagc

SEQ ID NO: 31185 - DNA, 20 bp, Artificial Sequence
  chemically synthesized
aataccatttatatgtggca

SEQ ID NO: 31186 - DNA, 20 bp, Artificial Sequence
  chemically synthesized
agggcattcaaagttatcct

SEQ ID NO: 31187 - DNA, 20 bp, Artificial Sequence
  chemically synthesized
cttttattatcccatgtgct

SEQ ID NO: 31188 - DNA, 20 bp, Artificial Sequence
  chemically synthesized
gtgctcagagtaaggggcaa

SEQ ID NO: 31189 - DNA, 20 bp, Artificial Sequence
  chemically synthesized
tctttaatttataatgtttt

SEQ ID NO: 31190 - DNA, 20 bp, Artificial Sequence
  chemically synthesized
acccaaaagcaaataacagg

SEQ ID NO: 31191 - DNA, 20 bp, Artificial Sequence
  chemically synthesized
aaaagcaaataacaggccga

SEQ ID NO: 31192 - DNA, 20 bp, Artificial Sequence
  chemically synthesized
atgtattcagacatgaagtt

SEQ ID NO: 31193 - DNA, 20 bp, Artificial Sequence
  chemically synthesized
attttgtttgcgaaatggga

SEQ ID NO: 31194 - DNA, 20 bp, Artificial Sequence
  chemically synthesized
tcacactagttcctgtggtc

SEQ ID NO: 31195 - DNA, 20 bp, Artificial Sequence
  chemically synthesized
tctctggctgaagtttaaga

SEQ ID NO: 31196 - DNA, 20 bp, Artificial Sequence
  chemically synthesized
tttggcttaaataaattatt

SEQ ID NO: 31197 - DNA, 20 bp, Artificial Sequence
  chemically synthesized
ttctcaagttttgcctggca

SEQ ID NO: 31198 - DNA, 20 bp, Artificial Sequence
  chemically synthesized
caatgaatgattttgcttac

SEQ ID NO: 31199 - DNA, 20 bp, Artificial Sequence
  chemically synthesized
atacatacgtatatgcatgt

SEQ ID NO: 31200 - DNA, 20 bp, Artificial Sequence
  chemically synthesized
tgtgtagaaagggagagaga

SEQ ID NO: 31201 - DNA, 20 bp, Artificial Sequence
  chemically synthesized
agagagaataggaaagtctt

SEQ ID NO: 31202 - DNA, 20 bp, Artificial Sequence
  chemically synthesized
agtctgttgttcacatagcg

SEQ ID NO: 31203 - DNA, 20 bp, Artificial Sequence
  chemically synthesized
tgttcacatagcgctggatt

SEQ ID NO: 31204 - DNA, 20 bp, Artificial Sequence
  chemically synthesized
taggagcaacagtcccaagc

SEQ ID NO: 31205 - DNA, 20 bp, Artificial Sequence
  chemically synthesized
aacagtcccaagcaggaatc

SEQ ID NO: 31206 - DNA, 20 bp, Artificial Sequence
  chemically synthesized
ggctgtcctttgtgcctccc

SEQ ID NO: 31207 - DNA, 20 bp, Artificial Sequence
  chemically synthesized
cccttctttacggttctgcc

SEQ ID NO: 31208 - DNA, 20 bp, Artificial Sequence
  chemically synthesized
gtccaacaagcttttaccca

SEQ ID NO: 31209 - DNA, 20 bp, Artificial Sequence
  chemically synthesized
gtatatccaagacatgctct

SEQ ID NO: 31210 - DNA, 20 bp, Artificial Sequence
  chemically synthesized
atccaagacatgctctgtga

SEQ ID NO: 31211 - DNA, 20 bp, Artificial Sequence
  chemically synthesized
aacactttcttccaagacaa

SEQ ID NO: 31212 - DNA, 20 bp, Artificial Sequence
  chemically synthesized
gaattccagttctgaacact

SEQ ID NO: 31213 - DNA, 20 bp, Artificial Sequence
  chemically synthesized
actgggagtgcacctgcttg

SEQ ID NO: 31214 - DNA, 20 bp, Artificial Sequence
  chemically synthesized
tggtgatgggccacatggtg

SEQ ID NO: 31215 - DNA, 20 bp, Artificial Sequence
  chemically synthesized
gactgtcacagagactctca

SEQ ID NO: 31216 - DNA, 20 bp, Artificial Sequence
  chemically synthesized
tttacacaaggcccttttta

SEQ ID NO: 31217 - DNA, 20 bp, Artificial Sequence
  chemically synthesized
cagtcttgaacctcactgga

SEQ ID NO: 31218 - DNA, 20 bp, Artificial Sequence
  chemically synthesized
ccagatggaaagaagtattt

SEQ ID NO: 31219 - DNA, 20 bp, Artificial Sequence
  chemically synthesized
ttgtatttaaaagaaaaaaa

SEQ ID NO: 31220 - DNA, 20 bp, Artificial Sequence
  chemically synthesized
tgatgaaatgatatgacgtc

SEQ ID NO: 31221 - DNA, 20 bp, Artificial Sequence
  chemically synthesized
aaaatgggctagggaggcga

SEQ ID NO: 31222 - DNA, 20 bp, Artificial Sequence
  chemically synthesized
gcgatagggttacagaagac

SEQ ID NO: 31223 - DNA, 20 bp, Artificial Sequence
  chemically synthesized
gtcggtgttgtttcttcacc

SEQ ID NO: 31224 - DNA, 20 bp, Artificial Sequence
  chemically synthesized
atctgggaagttcattgtga

SEQ ID NO: 31225 - DNA, 20 bp, Artificial Sequence
  chemically synthesized
tcattgtgaaggggtcattt

SEQ ID NO: 31226 - DNA, 20 bp, Artificial Sequence
  chemically synthesized
gtctttttcagtgcatgagg

SEQ ID NO: 31227 - DNA, 20 bp, Artificial Sequence
  chemically synthesized
gagtcagatgtggcgtttgc

SEQ ID NO: 31228 - DNA, 20 bp, Artificial Sequence
  chemically synthesized
gtgcctctgtgcctcgtggt

SEQ ID NO: 31229 - DNA, 20 bp, Artificial Sequence
  chemically synthesized
aaggggacaaagaacacgtc

SEQ ID NO: 31230 - DNA, 20 bp, Artificial Sequence
  chemically synthesized
agatggaagatgaaagggag

SEQ ID NO: 31231 - DNA, 20 bp, Artificial Sequence
  chemically synthesized
gcaattgcagagctggaaag

SEQ ID NO: 31232 - DNA, 20 bp, Artificial Sequence
  chemically synthesized
acccaggcccaggcccaggc

SEQ ID NO: 31233 - DNA, 20 bp, Artificial Sequence
  chemically synthesized
caagtgtcactcagttatct

SEQ ID NO: 31234 - DNA, 20 bp, Artificial Sequence
  chemically synthesized
gccatctaagtgcctgatac

SEQ ID NO: 31235 - DNA, 20 bp, Artificial Sequence
  chemically synthesized
aaatgtaacctggcaccctc

SEQ ID NO: 31236 - DNA, 20 bp, Artificial Sequence
  chemically synthesized
tggcaccctcaaggatttgt

SEQ ID NO: 31237 - DNA, 20 bp, Artificial Sequence
  chemically synthesized
gtgtgtgtgtgtgtgtgtgt

SEQ ID NO: 31238 - DNA, 20 bp, Artificial Sequence
  chemically synthesized
ccagacttggttttatcatg

SEQ ID NO: 31239 - DNA, 20 bp, Artificial Sequence
  chemically synthesized
acaaaggttgtgtacagagc

SEQ ID NO: 31240 - DNA, 20 bp, Artificial Sequence
  chemically synthesized
ggaacccactggagaagggc

SEQ ID NO: 31241 - DNA, 20 bp, Artificial Sequence
  chemically synthesized
ttcggttggtggctgatctg

SEQ ID NO: 31242 - DNA, 20 bp, Artificial Sequence
  chemically synthesized
gatctgatgggtggtatagg

SEQ ID NO: 31243 - DNA, 20 bp, Artificial Sequence
  chemically synthesized
gattccgtaggcgaccaaca

SEQ ID NO: 31244 - DNA, 20 bp, Artificial Sequence
  chemically synthesized
gtaggcgaccaacatggggt

SEQ ID NO: 31245 - DNA, 20 bp, Artificial Sequence
  chemically synthesized
gtgcttctgtggttgtgcct

SEQ ID NO: 31246 - DNA, 20 bp, Artificial Sequence
  chemically synthesized
ggaccttatgcctcatagtg

SEQ ID NO: 31247 - DNA, 20 bp, Artificial Sequence
  chemically synthesized
ttttcctcagaaaactctgt

SEQ ID NO: 31248 - DNA, 20 bp, Artificial Sequence
  chemically synthesized
taatttctccttcttataaa

SEQ ID NO: 31249 - DNA, 20 bp, Artificial Sequence
  chemically synthesized
ctccttcttataaacggaat

SEQ ID NO: 31250 - DNA, 20 bp, Artificial Sequence
  chemically synthesized
atgtgtacattatcccaccg

SEQ ID NO: 31251 - DNA, 20 bp, Artificial Sequence
  chemically synthesized
gatttcaggtcctcagactc

SEQ ID NO: 31252 - DNA, 20 bp, Artificial Sequence
  chemically synthesized
aaaataaacaaaacctgcag

SEQ ID NO: 31253 - DNA, 20 bp, Artificial Sequence
  chemically synthesized
cctgcagaagagtttattgt

SEQ ID NO: 31254 - DNA, 20 bp, Artificial Sequence
  chemically synthesized
attctattatctttggcttt

SEQ ID NO: 31255 - DNA, 20 bp, Artificial Sequence
  chemically synthesized
ggcataaatgaaaatttagg

SEQ ID NO: 31256 - DNA, 20 bp, Artificial Sequence
  chemically synthesized
tttaggccgaattatttgaa

SEQ ID NO: 31257 - DNA, 20 bp, Artificial Sequence
  chemically synthesized
ttctcctgccagagagaggg

SEQ ID NO: 31258 - DNA, 20 bp, Artificial Sequence
  chemically synthesized
tttaacactccaagtctaga

SEQ ID NO: 31259 - DNA, 20 bp, Artificial Sequence
  chemically synthesized
agaattatccaagcatagcc

SEQ ID NO: 31260 - DNA, 20 bp, Artificial Sequence
  chemically synthesized
ccaagcatagccatgaattc

SEQ ID NO: 31261 - DNA, 20 bp, Artificial Sequence
  chemically synthesized
tagccatgaattcctgagtt

SEQ ID NO: 31262 - DNA, 20 bp, Artificial Sequence
  chemically synthesized
aaacgatctctttgtcttca

SEQ ID NO: 31263 - DNA, 20 bp, Artificial Sequence
  chemically synthesized
cactgagttttctttgtcat

SEQ ID NO: 31264 - DNA, 20 bp, Artificial Sequence
  chemically synthesized
ttgtcattggagtaatttag

SEQ ID NO: 31265 - DNA, 20 bp, Artificial Sequence
  chemically synthesized
tggagtaatttaggagaata

SEQ ID NO: 31266 - DNA, 20 bp, Artificial Sequence
  chemically synthesized
gatgtgactgggagcccttt

SEQ ID NO: 31267 - DNA, 20 bp, Artificial Sequence
  chemically synthesized
aagcacagtcccatgcccac

SEQ ID NO: 31268 - DNA, 20 bp, Artificial Sequence
  chemically synthesized
ccttattttttctctgcagc

SEQ ID NO: 31269 - DNA, 20 bp, Artificial Sequence
  chemically synthesized
gtctctcaatatggaggtta

SEQ ID NO: 31270 - DNA, 20 bp, Artificial Sequence
  chemically synthesized
ttgtagcgcctgtatttgaa

SEQ ID NO: 31271 - DNA, 20 bp, Artificial Sequence
  chemically synthesized
tccctgtttcctgctggtat

SEQ ID NO: 31272 - DNA, 20 bp, Artificial Sequence
  chemically synthesized
acttctgtccattttctctc

SEQ ID NO: 31273 - DNA, 20 bp, Artificial Sequence
  chemically synthesized
gaaggaactctccttttgct

SEQ ID NO: 31274 - DNA, 20 bp, Artificial Sequence
  chemically synthesized
ctgtggcttcaggacccacc

SEQ ID NO: 31275 - DNA, 20 bp, Artificial Sequence
  chemically synthesized
tcaggacccaccttgaatga

SEQ ID NO: 31276 - DNA, 20 bp, Artificial Sequence
  chemically synthesized
tgcccatcgagcaacaccat

SEQ ID NO: 31277 - DNA, 20 bp, Artificial Sequence
  chemically synthesized
ctgaacttgaacagtaattg

SEQ ID NO: 31278 - DNA, 20 bp, Artificial Sequence
  chemically synthesized
aaaatccacgcccggccccc

SEQ ID NO: 31279 - DNA, 20 bp, Artificial Sequence
  chemically synthesized
ccccatcccacgttctgatt

SEQ ID NO: 31280 - DNA, 20 bp, Artificial Sequence
  chemically synthesized
cttttaagtgaactctgatg

SEQ ID NO: 31281 - DNA, 20 bp, Artificial Sequence
  chemically synthesized
ctctttctcaacgttctctg

SEQ ID NO: 31282 - DNA, 20 bp, Artificial Sequence
  chemically synthesized
ttattcatatttaaatgcag

SEQ ID NO: 31283 - DNA, 20 bp, Artificial Sequence
  chemically synthesized
atatttaaatgcaggtgagt

SEQ ID NO: 31284 - DNA, 20 bp, Artificial Sequence
  chemically synthesized
gtcatcttacaggcataatc

SEQ ID NO: 31285 - DNA, 20 bp, Artificial Sequence
  chemically synthesized
ctaagtagtagccaaattct

SEQ ID NO: 31286 - DNA, 20 bp, Artificial Sequence
  chemically synthesized
gctcagcagatgttgacaga

SEQ ID NO: 31287 - DNA, 20 bp, Artificial Sequence
  chemically synthesized
tattaagctttttgtagaga

SEQ ID NO: 31288 - DNA, 20 bp, Artificial Sequence
  chemically synthesized
ttttctctcctcccctaaaa

SEQ ID NO: 31289 - DNA, 20 bp, Artificial Sequence
  chemically synthesized
cctcccctaaaattgggttt

SEQ ID NO: 31290 - DNA, 20 bp, Artificial Sequence
  chemically synthesized
ttcttgttcctctagtcgac

SEQ ID NO: 31291 - DNA, 20 bp, Artificial Sequence
  chemically synthesized
ctagtcgacaagagtttctg

SEQ ID NO: 31292 - DNA, 20 bp, Artificial Sequence
  chemically synthesized
ttccttcgtggaaagccaaa

SEQ ID NO: 31293 - DNA, 20 bp, Artificial Sequence
  chemically synthesized
agaaaggttgaggctaagag

SEQ ID NO: 31294 - DNA, 20 bp, Artificial Sequence
  chemically synthesized
aggttgaggctaagagggga

SEQ ID NO: 31295 - DNA, 20 bp, Artificial Sequence
  chemically synthesized
gctaagaggggagtgagtgc

SEQ ID NO: 31296 - DNA, 20 bp, Artificial Sequence
  chemically synthesized
acgcttttatcggtgatggc

SEQ ID NO: 31297 - DNA, 20 bp, Artificial Sequence
  chemically synthesized
caatcacctgtgctgttgca

SEQ ID NO: 31298 - DNA, 20 bp, Artificial Sequence
  chemically synthesized
ctcccaaagtgtggcccttc

SEQ ID NO: 31299 - DNA, 20 bp, Artificial Sequence
  chemically synthesized
gggtttacatggtgtgccca

SEQ ID NO: 31300 - DNA, 20 bp, Artificial Sequence
  chemically synthesized
attcagataactggagataa

SEQ ID NO: 31301 - DNA, 20 bp, Artificial Sequence
  chemically synthesized
actggagataatggagtaga

SEQ ID NO: 31302 - DNA, 20 bp, Artificial Sequence
  chemically synthesized
gataatggagtagatggagt

SEQ ID NO: 31303 - DNA, 20 bp, Artificial Sequence
  chemically synthesized
ctcaggggcagatggccctc

SEQ ID NO: 31304 - DNA, 20 bp, Artificial Sequence
  chemically synthesized
tctttcctgaacctgaactc

SEQ ID NO: 31305 - DNA, 20 bp, Artificial Sequence
  chemically synthesized
attgtttctatgcctctctt

SEQ ID NO: 31306 - DNA, 20 bp, Artificial Sequence
  chemically synthesized
aaacattagtctgataacta

SEQ ID NO: 31307 - DNA, 20 bp, Artificial Sequence
  chemically synthesized
tgctcagcttggtgtccact

SEQ ID NO: 31308 - DNA, 20 bp, Artificial Sequence
  chemically synthesized
cttagctctccactcctgac

SEQ ID NO: 31309 - DNA, 20 bp, Artificial Sequence
  chemically synthesized
ctgacttcctctccacttcc

SEQ ID NO: 31310 - DNA, 20 bp, Artificial Sequence
  chemically synthesized
ctccacttccccggatgacg

SEQ ID NO: 31311 - DNA, 20 bp, Artificial Sequence
  chemically synthesized
catggaggctgagaaatata

SEQ ID NO: 31312 - DNA, 20 bp, Artificial Sequence
  chemically synthesized
ccagcagagccaagtctttt

SEQ ID NO: 31313 - DNA, 20 bp, Artificial Sequence
  chemically synthesized
aaaacctgtgttttaataat

SEQ ID NO: 31314 - DNA, 20 bp, Artificial Sequence
  chemically synthesized
cctgtgttttaataatagga

SEQ ID NO: 31315 - DNA, 20 bp, Artificial Sequence
  chemically synthesized
agcacatcttttctgtgtgc

SEQ ID NO: 31316 - DNA, 20 bp, Artificial Sequence
  chemically synthesized
tggggtgaggagaggtgaca

SEQ ID NO: 31317 - DNA, 20 bp, Artificial Sequence
  chemically synthesized
gagaggtgacagtgagtgtg

SEQ ID NO: 31318 - DNA, 20 bp, Artificial Sequence
  chemically synthesized
ttagagcacccaaagctggc

SEQ ID NO: 31319 - DNA, 20 bp, Artificial Sequence
  chemically synthesized
ggccaccgcccttcagactc

SEQ ID NO: 31320 - DNA, 20 bp, Artificial Sequence
  chemically synthesized
ttgtattccaggacccctcc

SEQ ID NO: 31321 - DNA, 20 bp, Artificial Sequence
  chemically synthesized
tgttggcccagcggtgccca

SEQ ID NO: 31322 - DNA, 20 bp, Artificial Sequence
  chemically synthesized
gcccagagaatattccctta

SEQ ID NO: 31323 - DNA, 20 bp, Artificial Sequence
  chemically synthesized
attcccttattggatctttc

SEQ ID NO: 31324 - DNA, 20 bp, Artificial Sequence
  chemically synthesized
ccccacagtaagacctcaca

SEQ ID NO: 31325 - DNA, 20 bp, Artificial Sequence
  chemically synthesized
cagtaagacctcacagtggg

SEQ ID NO: 31326 - DNA, 20 bp, Artificial Sequence
  chemically synthesized
gaaatggggaagctggaaag

SEQ ID NO: 31327 - DNA, 20 bp, Artificial Sequence
  chemically synthesized
agctggaaagttgggtgatc

SEQ ID NO: 31328 - DNA, 20 bp, Artificial Sequence
  chemically synthesized
gctgtgtttcagagaggtag

SEQ ID NO: 31329 - DNA, 20 bp, Artificial Sequence
  chemically synthesized
ctttggaggaggtgtcactc

SEQ ID NO: 31330 - DNA, 20 bp, Artificial Sequence
  chemically synthesized
cactctgggattagttaaaa

SEQ ID NO: 31331 - DNA, 20 bp, Artificial Sequence
  chemically synthesized
agtggtattcacattggctc

SEQ ID NO: 31332 - DNA, 20 bp, Artificial Sequence
  chemically synthesized
attataaccttttggagggc

SEQ ID NO: 31333 - DNA, 20 bp, Artificial Sequence
  chemically synthesized
gaacagagaaagaccgggct

SEQ ID NO: 31334 - DNA, 20 bp, Artificial Sequence
  chemically synthesized
agagaaagaccgggctttga

SEQ ID NO: 31335 - DNA, 20 bp, Artificial Sequence
  chemically synthesized
aagtgaaaaagtgaaagtgc

SEQ ID NO: 31336 - DNA, 20 bp, Artificial Sequence
  chemically synthesized
aaaagtgaaagtgctggggt

SEQ ID NO: 31337 - DNA, 20 bp, Artificial Sequence
  chemically synthesized
tggggaaggagcacgtgggg

SEQ ID NO: 31338 - DNA, 20 bp, Artificial Sequence
  chemically synthesized
cttaggtctgggcaacactt

SEQ ID NO: 31339 - DNA, 20 bp, Artificial Sequence
  chemically synthesized
tgggcaacactttggagtta

SEQ ID NO: 31340 - DNA, 20 bp, Artificial Sequence
  chemically synthesized
tctcaccagagggagaacgg

SEQ ID NO: 31341 - DNA, 20 bp, Artificial Sequence
  chemically synthesized
ggactggggcctgctttcct

SEQ ID NO: 31342 - DNA, 20 bp, Artificial Sequence
  chemically synthesized
tgggtggctttgactggctc

SEQ ID NO: 31343 - DNA, 20 bp, Artificial Sequence
  chemically synthesized
tggctttgactggctcttgg

SEQ ID NO: 31344 - DNA, 20 bp, Artificial Sequence
  chemically synthesized
gtatgcaagacctttgatat

SEQ ID NO: 31345 - DNA, 20 bp, Artificial Sequence
  chemically synthesized
gggaaatcctctcttatcaa

SEQ ID NO: 31346 - DNA, 20 bp, Artificial Sequence
  chemically synthesized
atttttttttttttttgaga

SEQ ID NO: 31347 - DNA, 20 bp, Artificial Sequence
  chemically synthesized
tctcgctctgtcgcccaggc

SEQ ID NO: 31348 - DNA, 20 bp, Artificial Sequence
  chemically synthesized
gcctcagcctcccaagtagc

SEQ ID NO: 31349 - DNA, 20 bp, Artificial Sequence
  chemically synthesized
tttttttttttaagtagaga

SEQ ID NO: 31350 - DNA, 20 bp, Artificial Sequence
  chemically synthesized
agtcttgggactgcccagaa

SEQ ID NO: 31351 - DNA, 20 bp, Artificial Sequence
  chemically synthesized
actgcgatcccaccagtggc

SEQ ID NO: 31352 - DNA, 20 bp, Artificial Sequence
  chemically synthesized
tccagcctggaagcctctca

SEQ ID NO: 31353 - DNA, 20 bp, Artificial Sequence
  chemically synthesized
aggagatggctggtgtggct

SEQ ID NO: 31354 - DNA, 20 bp, Artificial Sequence
  chemically synthesized
cctcaagtctgtccttctct

SEQ ID NO: 31355 - DNA, 20 bp, Artificial Sequence
  chemically synthesized
gatttaggactgtgaaccta

SEQ ID NO: 31356 - DNA, 20 bp, Artificial Sequence
  chemically synthesized
agaattcaaagtagtggaac

SEQ ID NO: 31357 - DNA, 20 bp, Artificial Sequence
  chemically synthesized
ccaggtctcgactcaatcca

SEQ ID NO: 31358 - DNA, 20 bp, Artificial Sequence
  chemically synthesized
aggtgcctgtctggaaggca

SEQ ID NO: 31359 - DNA, 20 bp, Artificial Sequence
  chemically synthesized
tctctggcttgttgagaaga

SEQ ID NO: 31360 - DNA, 20 bp, Artificial Sequence
  chemically synthesized
gactcagttctattttccca

SEQ ID NO: 31361 - DNA, 20 bp, Artificial Sequence
  chemically synthesized
ttcttttttcagtcctgatc

SEQ ID NO: 31362 - DNA, 20 bp, Artificial Sequence
  chemically synthesized
tttttcagtcctgatcaggg

SEQ ID NO: 31363 - DNA, 20 bp, Artificial Sequence
  chemically synthesized
tcagggatgagtccgtgctg

SEQ ID NO: 31364 - DNA, 20 bp, Artificial Sequence
  chemically synthesized
ttattcatttactttagcgt

SEQ ID NO: 31365 - DNA, 20 bp, Artificial Sequence
  chemically synthesized
tttagcgtgtgagtggggag

SEQ ID NO: 31366 - DNA, 20 bp, Artificial Sequence
  chemically synthesized
attaggcagcaggcccttgg

SEQ ID NO: 31367 - DNA, 20 bp, Artificial Sequence
  chemically synthesized
tccacaaagagagaagcagc

SEQ ID NO: 31368 - DNA, 20 bp, Artificial Sequence
  chemically synthesized
ccaacacccacacctgccaa

SEQ ID NO: 31369 - DNA, 20 bp, Artificial Sequence
  chemically synthesized
acctgccaaaggggttccca

SEQ ID NO: 31370 - DNA, 20 bp, Artificial Sequence
  chemically synthesized
ccatggggtggctggcttga

SEQ ID NO: 31371 - DNA, 20 bp, Artificial Sequence
  chemically synthesized
gccgtgtcagctgcagagac

SEQ ID NO: 31372 - DNA, 20 bp, Artificial Sequence
  chemically synthesized
actggagtccggggcatgat

SEQ ID NO: 31373 - DNA, 20 bp, Artificial Sequence
  chemically synthesized
ggatgtacctgaaacctagt

SEQ ID NO: 31374 - DNA, 20 bp, Artificial Sequence
  chemically synthesized
cctcacaggctagactatcc

SEQ ID NO: 31375 - DNA, 20 bp, Artificial Sequence
  chemically synthesized
agactatccatggatttcag

SEQ ID NO: 31376 - DNA, 20 bp, Artificial Sequence
  chemically synthesized
ccatggatttcagtggggtg

SEQ ID NO: 31377 - DNA, 20 bp, Artificial Sequence
  chemically synthesized
cctcaaatggtgactgttct

SEQ ID NO: 31378 - DNA, 20 bp, Artificial Sequence
  chemically synthesized
tcctttctctgcctttctca

SEQ ID NO: 31379 - DNA, 20 bp, Artificial Sequence
  chemically synthesized
tttctctgtgtctcctccaa

SEQ ID NO: 31380 - DNA, 20 bp, Artificial Sequence
  chemically synthesized
ctcctccaaatggatgccat

SEQ ID NO: 31381 - DNA, 20 bp, Artificial Sequence
  chemically synthesized
catgtgggtgggcaaagtgg

SEQ ID NO: 31382 - DNA, 20 bp, Artificial Sequence
  chemically synthesized
tcatacttgagacactaaaa

SEQ ID NO: 31383 - DNA, 20 bp, Artificial Sequence
  chemically synthesized
gaaccaacttcaagtaacgt

SEQ ID NO: 31384 - DNA, 20 bp, Artificial Sequence
  chemically synthesized
ctccaattagatatgcaaaa

SEQ ID NO: 31385 - DNA, 20 bp, Artificial Sequence
  chemically synthesized
tcactttttacaatttagca

SEQ ID NO: 31386 - DNA, 20 bp, Artificial Sequence
  chemically synthesized
gcagagcattgtgataggtt

SEQ ID NO: 31387 - DNA, 20 bp, Artificial Sequence
  chemically synthesized
ctgcctttctcatttgagag

SEQ ID NO: 31388 - DNA, 20 bp, Artificial Sequence
  chemically synthesized
cagctcagccacaagcccaa

SEQ ID NO: 31389 - DNA, 20 bp, Artificial Sequence
  chemically synthesized
acaagcccaaatgaatgatt

SEQ ID NO: 31390 - DNA, 20 bp, Artificial Sequence
  chemically synthesized
ttcctctctgactgctctcc

SEQ ID NO: 31391 - DNA, 20 bp, Artificial Sequence
  chemically synthesized
tctccaggggtggtgagcac

SEQ ID NO: 31392 - DNA, 20 bp, Artificial Sequence
  chemically synthesized
tccttagccttccaagttgt

SEQ ID NO: 31393 - DNA, 20 bp, Artificial Sequence
  chemically synthesized
ggctgcacacatattcattt

SEQ ID NO: 31394 - DNA, 20 bp, Artificial Sequence
  chemically synthesized
ttgaacacctacattgctgg

SEQ ID NO: 31395 - DNA, 20 bp, Artificial Sequence
  chemically synthesized
tgctgggaggataccttagt

SEQ ID NO: 31396 - DNA, 20 bp, Artificial Sequence
  chemically synthesized
aacccttgccttcatagaaa

SEQ ID NO: 31397 - DNA, 20 bp, Artificial Sequence
  chemically synthesized
agagtgttgaaagcttggag

SEQ ID NO: 31398 - DNA, 20 bp, Artificial Sequence
  chemically synthesized
tggcttggaaaatacgttga

SEQ ID NO: 31399 - DNA, 20 bp, Artificial Sequence
  chemically synthesized
tcattaatagtgcagttatg

SEQ ID NO: 31400 - DNA, 20 bp, Artificial Sequence
  chemically synthesized
gttatgtagagtgtagctct

SEQ ID NO: 31401 - DNA, 20 bp, Artificial Sequence
  chemically synthesized
agctctttgagtcttcagtt

SEQ ID NO: 31402 - DNA, 20 bp, Artificial Sequence
  chemically synthesized
cattagcactttatgtctgc

SEQ ID NO: 31403 - DNA, 20 bp, Artificial Sequence
  chemically synthesized
gtgttttattggtaacggaa

SEQ ID NO: 31404 - DNA, 20 bp, Artificial Sequence
  chemically synthesized
ttattggtaacggaaaagag

SEQ ID NO: 31405 - DNA, 20 bp, Artificial Sequence
  chemically synthesized
cggaaaagagtggagtcaca

SEQ ID NO: 31406 - DNA, 20 bp, Artificial Sequence
  chemically synthesized
tgacattacttcccaaattg

SEQ ID NO: 31407 - DNA, 20 bp, Artificial Sequence
  chemically synthesized
tcacctgtcaaattgtatgc

SEQ ID NO: 31408 - DNA, 20 bp, Artificial Sequence
  chemically synthesized
aattgtatgctagggtggga

SEQ ID NO: 31409 - DNA, 20 bp, Artificial Sequence
  chemically synthesized
atcccgggctctcaggtaga

SEQ ID NO: 31410 - DNA, 20 bp, Artificial Sequence
  chemically synthesized
gtgcccctgccaggaggagg

SEQ ID NO: 31411 - DNA, 20 bp, Artificial Sequence
  chemically synthesized
aggagggagaatctgaaagc

SEQ ID NO: 31412 - DNA, 20 bp, Artificial Sequence
  chemically synthesized
tctgaaagcaagaatggagg

SEQ ID NO: 31413 - DNA, 20 bp, Artificial Sequence
  chemically synthesized
agtaatgccgtggaggcagc

SEQ ID NO: 31414 - DNA, 20 bp, Artificial Sequence
  chemically synthesized
gccagtgcccctgcacagta

SEQ ID NO: 31415 - DNA, 20 bp, Artificial Sequence
  chemically synthesized
gcccctgcacagtattggat

SEQ ID NO: 31416 - DNA, 20 bp, Artificial Sequence
  chemically synthesized
ggttttaactggctcctgtc

SEQ ID NO: 31417 - DNA, 20 bp, Artificial Sequence
  chemically synthesized
taatgcaaaagctcttccct

SEQ ID NO: 31418 - DNA, 20 bp, Artificial Sequence
  chemically synthesized
ctcagggcctgtggggaaaa

SEQ ID NO: 31419 - DNA, 20 bp, Artificial Sequence
  chemically synthesized
acagttttatagatatggca

SEQ ID NO: 31420 - DNA, 20 bp, Artificial Sequence
  chemically synthesized
tgagtggcctcctggcagtt

SEQ ID NO: 31421 - DNA, 20 bp, Artificial Sequence
  chemically synthesized
gaagatgcaccaataaatat

SEQ ID NO: 31422 - DNA, 20 bp, Artificial Sequence
  chemically synthesized
acgaaaataaggtggggaag

SEQ ID NO: 31423 - DNA, 20 bp, Artificial Sequence
  chemically synthesized
taaggtggggaagaggggta

SEQ ID NO: 31424 - DNA, 20 bp, Artificial Sequence
  chemically synthesized
atggtgaccaggcttttaaa

SEQ ID NO: 31425 - DNA, 20 bp, Artificial Sequence
  chemically synthesized
gaggtgaggaagttggccat

SEQ ID NO: 31426 - DNA, 20 bp, Artificial Sequence
  chemically synthesized
tttgagaagatggttccagg

SEQ ID NO: 31427 - DNA, 20 bp, Artificial Sequence
  chemically synthesized
ggagcaaggggccctgaggt

SEQ ID NO: 31428 - DNA, 20 bp, Artificial Sequence
  chemically synthesized
ggccctgaggtcagagtgga

SEQ ID NO: 31429 - DNA, 20 bp, Artificial Sequence
  chemically synthesized
ctccttgaaggacgtagagc

SEQ ID NO: 31430 - DNA, 20 bp, Artificial Sequence
  chemically synthesized
agggagatggaagccactgg

SEQ ID NO: 31431 - DNA, 20 bp, Artificial Sequence
  chemically synthesized
tcatatgacttgcgcttcca

SEQ ID NO: 31432 - DNA, 20 bp, Artificial Sequence
  chemically synthesized
caagtgatggtggcgtggac

SEQ ID NO: 31433 - DNA, 20 bp, Artificial Sequence
  chemically synthesized
ggtggggacgtgagaagggg

SEQ ID NO: 31434 - DNA, 20 bp, Artificial Sequence
  chemically synthesized
tacttcgaagggaaaaccgg

SEQ ID NO: 31435 - DNA, 20 bp, Artificial Sequence
  chemically synthesized
cggcaggatttgctgactgg

SEQ ID NO: 31436 - DNA, 20 bp, Artificial Sequence
  chemically synthesized
aggatttgctgactggtggg

SEQ ID NO: 31437 - DNA, 20 bp, Artificial Sequence
  chemically synthesized
gggttgtatgaaaggaaggg

SEQ ID NO: 31438 - DNA, 20 bp, Artificial Sequence
  chemically synthesized
atgtgtggctcggtgactgg

SEQ ID NO: 31439 - DNA, 20 bp, Artificial Sequence
  chemically synthesized
tggctcggtgactgggagaa

SEQ ID NO: 31440 - DNA, 20 bp, Artificial Sequence
  chemically synthesized
agaatagaattgctgtttat

SEQ ID NO: 31441 - DNA, 20 bp, Artificial Sequence
  chemically synthesized
aaaggctgtggaggtgctca

SEQ ID NO: 31442 - DNA, 20 bp, Artificial Sequence
  chemically synthesized
gctgtggaggtgctcagagg

SEQ ID NO: 31443 - DNA, 20 bp, Artificial Sequence
  chemically synthesized
ttcaccacttcaggacttca

SEQ ID NO: 31444 - DNA, 20 bp, Artificial Sequence
  chemically synthesized
aggaagatcgtgaggggaaa

SEQ ID NO: 31445 - DNA, 20 bp, Artificial Sequence
  chemically synthesized
tatagctgagatgatttaag

SEQ ID NO: 31446 - DNA, 20 bp, Artificial Sequence
  chemically synthesized
gctgttaattggtgatattt

SEQ ID NO: 31447 - DNA, 20 bp, Artificial Sequence
  chemically synthesized
ttaattggtgatatttagga

SEQ ID NO: 31448 - DNA, 20 bp, Artificial Sequence
  chemically synthesized
tccacggttagcccctggct

SEQ ID NO: 31449 - DNA, 20 bp, Artificial Sequence
  chemically synthesized
agagcctttttccttgaaag

SEQ ID NO: 31450 - DNA, 20 bp, Artificial Sequence
  chemically synthesized
tggaaaagtaaaaaaattct

SEQ ID NO: 31451 - DNA, 20 bp, Artificial Sequence
  chemically synthesized
tgagaccaagtaaattattg

SEQ ID NO: 31452 - DNA, 20 bp, Artificial Sequence
  chemically synthesized
ggggggtaatttgcaagggc

SEQ ID NO: 31453 - DNA, 20 bp, Artificial Sequence
  chemically synthesized
ttgctttcttgtttctcagc

SEQ ID NO: 31454 - DNA, 20 bp, Artificial Sequence
  chemically synthesized
agaccagaagcctgtgattt

SEQ ID NO: 31455 - DNA, 20 bp, Artificial Sequence
  chemically synthesized
ttcggagtctgatgagaaat

SEQ ID NO: 31456 - DNA, 20 bp, Artificial Sequence
  chemically synthesized
taggagagctccttggtcct

SEQ ID NO: 31457 - DNA, 20 bp, Artificial Sequence
  chemically synthesized
aaaagacaccttaagtagca

SEQ ID NO: 31458 - DNA, 20 bp, Artificial Sequence
  chemically synthesized
acatgtagaacaaactcttc

SEQ ID NO: 31459 - DNA, 20 bp, Artificial Sequence
  chemically synthesized
acccaagggggagctcagag

SEQ ID NO: 31460 - DNA, 20 bp, Artificial Sequence
  chemically synthesized
tgccaactaggtaatgtgct

SEQ ID NO: 31461 - DNA, 20 bp, Artificial Sequence
  chemically synthesized
agcaactggcaaccccctgt

SEQ ID NO: 31462 - DNA, 20 bp, Artificial Sequence
  chemically synthesized
ttgctcctgtggcccctgca

SEQ ID NO: 31463 - DNA, 20 bp, Artificial Sequence
  chemically synthesized
cccctgcagggagtgtggcc

SEQ ID NO: 31464 - DNA, 20 bp, Artificial Sequence
  chemically synthesized
ccctgtgtcctgaaccaagt

SEQ ID NO: 31465 - DNA, 20 bp, Artificial Sequence
  chemically synthesized
gtgtcctgaaccaagtgtgg

SEQ ID NO: 31466 - DNA, 20 bp, Artificial Sequence
  chemically synthesized
tgttgttgttgttgttgttt

SEQ ID NO: 31467 - DNA, 20 bp, Artificial Sequence
  chemically synthesized
tgttgttgttgtttgggggt

SEQ ID NO: 31468 - DNA, 20 bp, Artificial Sequence
  chemically synthesized
gtagacagtgctgggcctgt

SEQ ID NO: 31469 - DNA, 20 bp, Artificial Sequence
  chemically synthesized
ttttaggttggttctttgag

SEQ ID NO: 31470 - DNA, 20 bp, Artificial Sequence
  chemically synthesized
cagtaagcaccatgacatga

SEQ ID NO: 31471 - DNA, 20 bp, Artificial Sequence
  chemically synthesized
gcgtgtgtaatatgtctttt

SEQ ID NO: 31472 - DNA, 20 bp, Artificial Sequence
  chemically synthesized
tgtcctttgttacaggagca

SEQ ID NO: 31473 - DNA, 20 bp, Artificial Sequence
  chemically synthesized
atccttggccctctgtctgt

SEQ ID NO: 31474 - DNA, 20 bp, Artificial Sequence
  chemically synthesized
cagtatttcagaacaaaaat

SEQ ID NO: 31475 - DNA, 20 bp, Artificial Sequence
  chemically synthesized
aaattagagttagttcataa

SEQ ID NO: 31476 - DNA, 20 bp, Artificial Sequence
  chemically synthesized
tcatcacatgccttaccagt

SEQ ID NO: 31477 - DNA, 20 bp, Artificial Sequence
  chemically synthesized
ggcacatgcttttcaatagt

SEQ ID NO: 31478 - DNA, 20 bp, Artificial Sequence
  chemically synthesized
tagcaatttaattacattaa

SEQ ID NO: 31479 - DNA, 20 bp, Artificial Sequence
  chemically synthesized
ttgaggttgctgacagaaaa

SEQ ID NO: 31480 - DNA, 20 bp, Artificial Sequence
  chemically synthesized
gcagccatgcacaaaggcac

SEQ ID NO: 31481 - DNA, 20 bp, Artificial Sequence
  chemically synthesized
gtgaggtctttgtcaccttg

SEQ ID NO: 31482 - DNA, 20 bp, Artificial Sequence
  chemically synthesized
gggtctgaggactggtgcgc

SEQ ID NO: 31483 - DNA, 20 bp, Artificial Sequence
  chemically synthesized
cgtcctgagccagctctgtc

SEQ ID NO: 31484 - DNA, 20 bp, Artificial Sequence
  chemically synthesized
aacactgtctgaagttttcc

SEQ ID NO: 31485 - DNA, 20 bp, Artificial Sequence
  chemically synthesized
tttccaggggtttgacagac

SEQ ID NO: 31486 - DNA, 20 bp, Artificial Sequence
  chemically synthesized
gactcttcctctgatgcaga

SEQ ID NO: 31487 - DNA, 20 bp, Artificial Sequence
  chemically synthesized
tccatgccctcagagaaagt

SEQ ID NO: 31488 - DNA, 20 bp, Artificial Sequence
  chemically synthesized
acctctctgtgatttctatg

SEQ ID NO: 31489 - DNA, 20 bp, Artificial Sequence
  chemically synthesized
gatttctatggtgggtgtca

SEQ ID NO: 31490 - DNA, 20 bp, Artificial Sequence
  chemically synthesized
gtcaaaggatggctgggaaa

SEQ ID NO: 31491 - DNA, 20 bp, Artificial Sequence
  chemically synthesized
tgtgctaacatcccttgcct

SEQ ID NO: 31492 - DNA, 20 bp, Artificial Sequence
  chemically synthesized
cataccctgcaaagccctat

SEQ ID NO: 31493 - DNA, 20 bp, Artificial Sequence
  chemically synthesized
aggtggggctgctattgctt

SEQ ID NO: 31494 - DNA, 20 bp, Artificial Sequence
  chemically synthesized
ctattgcttctgggtattta

SEQ ID NO: 31495 - DNA, 20 bp, Artificial Sequence
  chemically synthesized
ctgcccaccgttgttttggg

SEQ ID NO: 31496 - DNA, 20 bp, Artificial Sequence
  chemically synthesized
ggatttccccctccctcagg

SEQ ID NO: 31497 - DNA, 20 bp, Artificial Sequence
  chemically synthesized
gtaattggcccttcccattt

SEQ ID NO: 31498 - DNA, 20 bp, Artificial Sequence
  chemically synthesized
ttcccatttaagagtcagcc

SEQ ID NO: 31499 - DNA, 20 bp, Artificial Sequence
  chemically synthesized
aggttacccaccctccgtca

SEQ ID NO: 31500 - DNA, 20 bp, Artificial Sequence
  chemically synthesized
gtcccctgcttccgggaggt

SEQ ID NO: 31501 - DNA, 20 bp, Artificial Sequence
  chemically synthesized
ggaggtgggaatgcatgtgg

SEQ ID NO: 31502 - DNA, 20 bp, Artificial Sequence
  chemically synthesized
atttgagggagagaggccca

SEQ ID NO: 31503 - DNA, 20 bp, Artificial Sequence
  chemically synthesized
agcacccgcttgttccctgt

SEQ ID NO: 31504 - DNA, 20 bp, Artificial Sequence
  chemically synthesized
ctcactcggctgactacctg

SEQ ID NO: 31505 - DNA, 20 bp, Artificial Sequence
  chemically synthesized
aggcatttggaacaatctgg

SEQ ID NO: 31506 - DNA, 20 bp, Artificial Sequence
  chemically synthesized
tttggaacaatctggaagaa

SEQ ID NO: 31507 - DNA, 20 bp, Artificial Sequence
  chemically synthesized
ggacacccttgaagccgttt

SEQ ID NO: 31508 - DNA, 20 bp, Artificial Sequence
  chemically synthesized
aaaaattgggcccatccctt

SEQ ID NO: 31509 - DNA, 20 bp, Artificial Sequence
  chemically synthesized
tccattgtgctgttagtaat

SEQ ID NO: 31510 - DNA, 20 bp, Artificial Sequence
  chemically synthesized
gtgctgttagtaatgaggat

SEQ ID NO: 31511 - DNA, 20 bp, Artificial Sequence
  chemically synthesized
gataaaatcacatttttttt

SEQ ID NO: 31512 - DNA, 20 bp, Artificial Sequence
  chemically synthesized
ttttttgagtaagccctttg

SEQ ID NO: 31513 - DNA, 20 bp, Artificial Sequence
  chemically synthesized
gtcaaattgagactcacctc

SEQ ID NO: 31514 - DNA, 20 bp, Artificial Sequence
  chemically synthesized
ccctgtgaagaggcaggaga

SEQ ID NO: 31515 - DNA, 20 bp, Artificial Sequence
  chemically synthesized
gtctggtctcatgcagccgc

SEQ ID NO: 31516 - DNA, 20 bp, Artificial Sequence
  chemically synthesized
tgcagccgcaggggtagact

SEQ ID NO: 31517 - DNA, 20 bp, Artificial Sequence
  chemically synthesized
atccagaactccttatactt

SEQ ID NO: 31518 - DNA, 20 bp, Artificial Sequence
  chemically synthesized
acgcttccacagcctgcaca

SEQ ID NO: 31519 - DNA, 20 bp, Artificial Sequence
  chemically synthesized
tggtaggggaggcatgtgat

SEQ ID NO: 31520 - DNA, 20 bp, Artificial Sequence
  chemically synthesized
gggcttgggggagacagaga

SEQ ID NO: 31521 - DNA, 20 bp, Artificial Sequence
  chemically synthesized
tgccttggagattatttttt

SEQ ID NO: 31522 - DNA, 20 bp, Artificial Sequence
  chemically synthesized
tggcctcctctgccttttca

SEQ ID NO: 31523 - DNA, 20 bp, Artificial Sequence
  chemically synthesized
cttttcagtgggtggctggg

SEQ ID NO: 31524 - DNA, 20 bp, Artificial Sequence
  chemically synthesized
cttgcagtgactaagaaagg

SEQ ID NO: 31525 - DNA, 20 bp, Artificial Sequence
  chemically synthesized
gtgccggtaggcagcagttc

SEQ ID NO: 31526 - DNA, 20 bp, Artificial Sequence
  chemically synthesized
gagcatctctgttctgtttg

SEQ ID NO: 31527 - DNA, 20 bp, Artificial Sequence
  chemically synthesized
gggagtcctgccaggcaagt

SEQ ID NO: 31528 - DNA, 20 bp, Artificial Sequence
  chemically synthesized
tgtcatgggggcagtgtcgg

SEQ ID NO: 31529 - DNA, 20 bp, Artificial Sequence
  chemically synthesized
gtcggctgagtggtactctt

SEQ ID NO: 31530 - DNA, 20 bp, Artificial Sequence
  chemically synthesized
gtggtactcttcagagttct

SEQ ID NO: 31531 - DNA, 20 bp, Artificial Sequence
  chemically synthesized
tccagcaggcttctagcaga

SEQ ID NO: 31532 - DNA, 20 bp, Artificial Sequence
  chemically synthesized
tctagcagatggggttttgg

SEQ ID NO: 31533 - DNA, 20 bp, Artificial Sequence
  chemically synthesized
ttcttgctttcttttttttc

SEQ ID NO: 31534 - DNA, 20 bp, Artificial Sequence
  chemically synthesized
ccaattttcaggaggtttag

SEQ ID NO: 31535 - DNA, 20 bp, Artificial Sequence
  chemically synthesized
ttcaggaggtttagatgaat

SEQ ID NO: 31536 - DNA, 20 bp, Artificial Sequence
  chemically synthesized
taaagctctgacaaaagatc

SEQ ID NO: 31537 - DNA, 20 bp, Artificial Sequence
  chemically synthesized
ttgtcccttgcagtgggctt

SEQ ID NO: 31538 - DNA, 20 bp, Artificial Sequence
  chemically synthesized
ttggctcctaaatcttctag

SEQ ID NO: 31539 - DNA, 20 bp, Artificial Sequence
  chemically synthesized
tggcagctataggtttccag

SEQ ID NO: 31540 - DNA, 20 bp, Artificial Sequence
  chemically synthesized
ggagggtgaacaagggccat

SEQ ID NO: 31541 - DNA, 20 bp, Artificial Sequence
  chemically synthesized
ttgctgagggcttctcagtc

SEQ ID NO: 31542 - DNA, 20 bp, Artificial Sequence
  chemically synthesized
tcagtcctgggtaggaactg

SEQ ID NO: 31543 - DNA, 20 bp, Artificial Sequence
  chemically synthesized
tcccagatttgggcaatcta

SEQ ID NO: 31544 - DNA, 20 bp, Artificial Sequence
  chemically synthesized
gcaatctaatggataggagg

SEQ ID NO: 31545 - DNA, 20 bp, Artificial Sequence
  chemically synthesized
gggagggttatgccccatct

SEQ ID NO: 31546 - DNA, 20 bp, Artificial Sequence
  chemically synthesized
atctgtgaataggtggagga

SEQ ID NO: 31547 - DNA, 20 bp, Artificial Sequence
  chemically synthesized
ccagggacatgtctggctcc

SEQ ID NO: 31548 - DNA, 20 bp, Artificial Sequence
  chemically synthesized
gaatgcctgtccaggctgcg

SEQ ID NO: 31549 - DNA, 20 bp, Artificial Sequence
  chemically synthesized
tccaggctgcggtgggtggc

SEQ ID NO: 31550 - DNA, 20 bp, Artificial Sequence
  chemically synthesized
ctgcggtgggtggcatgggt

SEQ ID NO: 31551 - DNA, 20 bp, Artificial Sequence
  chemically synthesized
agccacctgccttttctgtc

SEQ ID NO: 31552 - DNA, 20 bp, Artificial Sequence
  chemically synthesized
gtcagagcctcctgaggctg

SEQ ID NO: 31553 - DNA, 20 bp, Artificial Sequence
  chemically synthesized
agaatggggctaacatgatc

SEQ ID NO: 31554 - DNA, 20 bp, Artificial Sequence
  chemically synthesized
ggcttctccatcttgggact

SEQ ID NO: 31555 - DNA, 20 bp, Artificial Sequence
  chemically synthesized
tcccattgccaggacaaatg

SEQ ID NO: 31556 - DNA, 20 bp, Artificial Sequence
  chemically synthesized
attgccaggacaaatgcaga

SEQ ID NO: 31557 - DNA, 20 bp, Artificial Sequence
  chemically synthesized
aggacaaatgcagagtggat

SEQ ID NO: 31558 - DNA, 20 bp, Artificial Sequence
  chemically synthesized
ctcccctggtcacatagttt

SEQ ID NO: 31559 - DNA, 20 bp, Artificial Sequence
  chemically synthesized
tagtttctgggtgacaggac

SEQ ID NO: 31560 - DNA, 20 bp, Artificial Sequence
  chemically synthesized
ttatttcttttgatcaccaa

SEQ ID NO: 31561 - DNA, 20 bp, Artificial Sequence
  chemically synthesized
atcaagaacattacaacaca

SEQ ID NO: 31562 - DNA, 20 bp, Artificial Sequence
  chemically synthesized
tattttaatattagaaagca

SEQ ID NO: 31563 - DNA, 20 bp, Artificial Sequence
  chemically synthesized
taatattagaaagcatggga

SEQ ID NO: 31564 - DNA, 20 bp, Artificial Sequence
  chemically synthesized
attgggtgtgaacactgctt

SEQ ID NO: 31565 - DNA, 20 bp, Artificial Sequence
  chemically synthesized
aggagcaatacctgagatcc

SEQ ID NO: 31566 - DNA, 20 bp, Artificial Sequence
  chemically synthesized
agaaaccccctgctactctt

SEQ ID NO: 31567 - DNA, 20 bp, Artificial Sequence
  chemically synthesized
tttatttttccgtttgctca

SEQ ID NO: 31568 - DNA, 20 bp, Artificial Sequence
  chemically synthesized
tttcaccagcttttacaaag

SEQ ID NO: 31569 - DNA, 20 bp, Artificial Sequence
  chemically synthesized
ttcatatcattctgatagtc

SEQ ID NO: 31570 - DNA, 20 bp, Artificial Sequence
  chemically synthesized
ctggtggtacagcttctctg

SEQ ID NO: 31571 - DNA, 20 bp, Artificial Sequence
  chemically synthesized
taattcactagtaaaataat

SEQ ID NO: 31572 - DNA, 20 bp, Artificial Sequence
  chemically synthesized
attagaataaaaggctgttt

SEQ ID NO: 31573 - DNA, 20 bp, Artificial Sequence
  chemically synthesized
gaggggctgatataacttct

SEQ ID NO: 31574 - DNA, 20 bp, Artificial Sequence
  chemically synthesized
cagcactttgggaggccgag

SEQ ID NO: 31575 - DNA, 20 bp, Artificial Sequence
  chemically synthesized
tgggtagatcacctgaggtc

SEQ ID NO: 31576 - DNA, 20 bp, Artificial Sequence
  chemically synthesized
tactcaggaggctgagggag

SEQ ID NO: 31577 - DNA, 20 bp, Artificial Sequence
  chemically synthesized
gaagtgattaatcatattac

SEQ ID NO: 31578 - DNA, 20 bp, Artificial Sequence
  chemically synthesized
ctgtgagctccttgagggca

SEQ ID NO: 31579 - DNA, 20 bp, Artificial Sequence
  chemically synthesized
gcactacaggtttggaccaa

SEQ ID NO: 31580 - DNA, 20 bp, Artificial Sequence
  chemically synthesized
atgaattaaattggctgcca

SEQ ID NO: 31581 - DNA, 20 bp, Artificial Sequence
  chemically synthesized
tggctgccattgaatcaaag

SEQ ID NO: 31582 - DNA, 20 bp, Artificial Sequence
  chemically synthesized
taatataaataagtgcaaaa

SEQ ID NO: 31583 - DNA, 20 bp, Artificial Sequence
  chemically synthesized
tcctgtggagacctctgttg

SEQ ID NO: 31584 - DNA, 20 bp, Artificial Sequence
  chemically synthesized
gtggagacctctgttgctga

SEQ ID NO: 31585 - DNA, 20 bp, Artificial Sequence
  chemically synthesized
atgaggtcggctgagcagtt

SEQ ID NO: 31586 - DNA, 20 bp, Artificial Sequence
  chemically synthesized
ggttctcccattttacagag

SEQ ID NO: 31587 - DNA, 20 bp, Artificial Sequence
  chemically synthesized
caggaaattggtggtagatg

SEQ ID NO: 31588 - DNA, 20 bp, Artificial Sequence
  chemically synthesized
catctgtctaacttgggagc

SEQ ID NO: 31589 - DNA, 20 bp, Artificial Sequence
  chemically synthesized
tgaagtgaggtgccccgact

SEQ ID NO: 31590 - DNA, 20 bp, Artificial Sequence
  chemically synthesized
gtcttataccttaactggtg

SEQ ID NO: 31591 - DNA, 20 bp, Artificial Sequence
  chemically synthesized
tagctctgaaccctgtcctg

SEQ ID NO: 31592 - DNA, 20 bp, Artificial Sequence
  chemically synthesized
tcctgaggagttgggaagtg

SEQ ID NO: 31593 - DNA, 20 bp, Artificial Sequence
  chemically synthesized
tctccttccttccctggctc

SEQ ID NO: 31594 - DNA, 20 bp, Artificial Sequence
  chemically synthesized
gctctgatgtaagttcctgc

SEQ ID NO: 31595 - DNA, 20 bp, Artificial Sequence
  chemically synthesized
acaggagacaaacaccagct

SEQ ID NO: 31596 - DNA, 20 bp, Artificial Sequence
  chemically synthesized
aagagtaaacagcctggcag

SEQ ID NO: 31597 - DNA, 20 bp, Artificial Sequence
  chemically synthesized
gtaaacagcctggcagtggg

SEQ ID NO: 31598 - DNA, 20 bp, Artificial Sequence
  chemically synthesized
caggtcggtggctgctctct

SEQ ID NO: 31599 - DNA, 20 bp, Artificial Sequence
  chemically synthesized
gggcttgaggtctggtgctt

SEQ ID NO: 31600 - DNA, 20 bp, Artificial Sequence
  chemically synthesized
gaggaagagaagacagatgg

SEQ ID NO: 31601 - DNA, 20 bp, Artificial Sequence
  chemically synthesized
gggcctcactgacacctgca

SEQ ID NO: 31602 - DNA, 20 bp, Artificial Sequence
  chemically synthesized
ggggttggtggggaggtatg

SEQ ID NO: 31603 - DNA, 20 bp, Artificial Sequence
  chemically synthesized
ggggaggtatgaggggttgg

SEQ ID NO: 31604 - DNA, 20 bp, Artificial Sequence
  chemically synthesized
gactctaaagtcagctacac

SEQ ID NO: 31605 - DNA, 20 bp, Artificial Sequence
  chemically synthesized
tgggaagaaatatcacttag

SEQ ID NO: 31606 - DNA, 20 bp, Artificial Sequence
  chemically synthesized
aatatcacttagaggagtta

SEQ ID NO: 31607 - DNA, 20 bp, Artificial Sequence
  chemically synthesized
cagaatgtgcaacctttccc

SEQ ID NO: 31608 - DNA, 20 bp, Artificial Sequence
  chemically synthesized
cccaggagtattgctcctga

SEQ ID NO: 31609 - DNA, 20 bp, Artificial Sequence
  chemically synthesized
cctccagcactgtggcccag

SEQ ID NO: 31610 - DNA, 20 bp, Artificial Sequence
  chemically synthesized
tcacacccctgcagctctgt

SEQ ID NO: 31611 - DNA, 20 bp, Artificial Sequence
  chemically synthesized
gataatggcagcccagaaac

SEQ ID NO: 31612 - DNA, 20 bp, Artificial Sequence
  chemically synthesized
gaatactggggaacacattg

SEQ ID NO: 31613 - DNA, 20 bp, Artificial Sequence
  chemically synthesized
tagctgtagcattcttccct

SEQ ID NO: 31614 - DNA, 20 bp, Artificial Sequence
  chemically synthesized
tttggatgcctgtgtgggga

SEQ ID NO: 31615 - DNA, 20 bp, Artificial Sequence
  chemically synthesized
ctgtgtggggacagaatcag

SEQ ID NO: 31616 - DNA, 20 bp, Artificial Sequence
  chemically synthesized
ctattagacaaacgtagttt

SEQ ID NO: 31617 - DNA, 20 bp, Artificial Sequence
  chemically synthesized
tagacaaacgtagtttctgg

SEQ ID NO: 31618 - DNA, 20 bp, Artificial Sequence
  chemically synthesized
tggatgagttggacagtcat

SEQ ID NO: 31619 - DNA, 20 bp, Artificial Sequence
  chemically synthesized
tcagagaactggcagtctgg

SEQ ID NO: 31620 - DNA, 20 bp, Artificial Sequence
  chemically synthesized
cttctctttactgatcttat

SEQ ID NO: 31621 - DNA, 20 bp, Artificial Sequence
  chemically synthesized
gatcttatgtgagtaggtag

SEQ ID NO: 31622 - DNA, 20 bp, Artificial Sequence
  chemically synthesized
gtgccagaggtggctaaata

SEQ ID NO: 31623 - DNA, 20 bp, Artificial Sequence
  chemically synthesized
ggccaattctaggaagggaa

SEQ ID NO: 31624 - DNA, 20 bp, Artificial Sequence
  chemically synthesized
gcccattgccttcctggtac

SEQ ID NO: 31625 - DNA, 20 bp, Artificial Sequence
  chemically synthesized
acccctctgtccagcccagc

SEQ ID NO: 31626 - DNA, 20 bp, Artificial Sequence
  chemically synthesized
tgtgcttggtcggcactgat

SEQ ID NO: 31627 - DNA, 20 bp, Artificial Sequence
  chemically synthesized
cactgataggggtcgcggta

SEQ ID NO: 31628 - DNA, 20 bp, Artificial Sequence
  chemically synthesized
cacttctgtgcccagggctg

SEQ ID NO: 31629 - DNA, 20 bp, Artificial Sequence
  chemically synthesized
acatagaggcccttcctgct

SEQ ID NO: 31630 - DNA, 20 bp, Artificial Sequence
  chemically synthesized
tgactcaccccagccctgct

SEQ ID NO: 31631 - DNA, 20 bp, Artificial Sequence
  chemically synthesized
aagagaagacccctgctctt

SEQ ID NO: 31632 - DNA, 20 bp, Artificial Sequence
  chemically synthesized
tgctcttgagggtctgccag

SEQ ID NO: 31633 - DNA, 20 bp, Artificial Sequence
  chemically synthesized
tccccacctccatgggcctc

SEQ ID NO: 31634 - DNA, 20 bp, Artificial Sequence
  chemically synthesized
ctgcaacaccctgaccttta

SEQ ID NO: 31635 - DNA, 20 bp, Artificial Sequence
  chemically synthesized
catcctcggccaatgaagcg

SEQ ID NO: 31636 - DNA, 20 bp, Artificial Sequence
  chemically synthesized
gtttcatttaggacaatgtg

SEQ ID NO: 31637 - DNA, 20 bp, Artificial Sequence
  chemically synthesized
tccttttgatcatttctcta

SEQ ID NO: 31638 - DNA, 20 bp, Artificial Sequence
  chemically synthesized
aaatgagacaaaagaggcca

SEQ ID NO: 31639 - DNA, 20 bp, Artificial Sequence
  chemically synthesized
gtgatagttcagagaaagag

SEQ ID NO: 31640 - DNA, 20 bp, Artificial Sequence
  chemically synthesized
aaggccttccaaaaaaagta

SEQ ID NO: 31641 - DNA, 20 bp, Artificial Sequence
  chemically synthesized
ggtcattatcatcaccatta

SEQ ID NO: 31642 - DNA, 20 bp, Artificial Sequence
  chemically synthesized
tagtgactggtaagagccga

SEQ ID NO: 31643 - DNA, 20 bp, Artificial Sequence
  chemically synthesized
gattcctgatgttaggggcc

SEQ ID NO: 31644 - DNA, 20 bp, Artificial Sequence
  chemically synthesized
gggccatgaatctgtctacc

SEQ ID NO: 31645 - DNA, 20 bp, Artificial Sequence
  chemically synthesized
taacctgagggctagtttct

SEQ ID NO: 31646 - DNA, 20 bp, Artificial Sequence
  chemically synthesized
taaagacagttcatatatgc

SEQ ID NO: 31647 - DNA, 20 bp, Artificial Sequence
  chemically synthesized
attttcccccctctttacaa

SEQ ID NO: 31648 - DNA, 20 bp, Artificial Sequence
  chemically synthesized
cacagtggtattcctttcaa

SEQ ID NO: 31649 - DNA, 20 bp, Artificial Sequence
  chemically synthesized
ctagctctagctctagctta

SEQ ID NO: 31650 - DNA, 20 bp, Artificial Sequence
  chemically synthesized
cttaggggatgctagctaaa

SEQ ID NO: 31651 - DNA, 20 bp, Artificial Sequence
  chemically synthesized
ggatgctagctaaagggaat

SEQ ID NO: 31652 - DNA, 20 bp, Artificial Sequence
  chemically synthesized
tgtccactcaacactggggg

SEQ ID NO: 31653 - DNA, 20 bp, Artificial Sequence
  chemically synthesized
gtgagagcttatagtccctt

SEQ ID NO: 31654 - DNA, 20 bp, Artificial Sequence
  chemically synthesized
ttatgactgtccatggggaa

SEQ ID NO: 31655 - DNA, 20 bp, Artificial Sequence
  chemically synthesized
cagtgagggagatttgagga

SEQ ID NO: 31656 - DNA, 20 bp, Artificial Sequence
  chemically synthesized
agagcactcacagtggaacc

SEQ ID NO: 31657 - DNA, 20 bp, Artificial Sequence
  chemically synthesized
agagaaagtcggtgaggaga

SEQ ID NO: 31658 - DNA, 20 bp, Artificial Sequence
  chemically synthesized
actcaccaggctcttccaga

SEQ ID NO: 31659 - DNA, 20 bp, Artificial Sequence
  chemically synthesized
ttgcccctcagtaacaccac

SEQ ID NO: 31660 - DNA, 20 bp, Artificial Sequence
  chemically synthesized
ctttcccggttctggttttc

SEQ ID NO: 31661 - DNA, 20 bp, Artificial Sequence
  chemically synthesized
tcaattgacttttcacatat

SEQ ID NO: 31662 - DNA, 20 bp, Artificial Sequence
  chemically synthesized
ttcacatatgagggtgacct

SEQ ID NO: 31663 - DNA, 20 bp, Artificial Sequence
  chemically synthesized
aggtgttttaaaaaatagct

SEQ ID NO: 31664 - DNA, 20 bp, Artificial Sequence
  chemically synthesized
tgacagcaccatttagagcc

SEQ ID NO: 31665 - DNA, 20 bp, Artificial Sequence
  chemically synthesized
ccccaggctcccatggtggc

SEQ ID NO: 31666 - DNA, 20 bp, Artificial Sequence
  chemically synthesized
aagggtttttggttggggga

SEQ ID NO: 31667 - DNA, 20 bp, Artificial Sequence
  chemically synthesized
tttggttgggggaaggggta

SEQ ID NO: 31668 - DNA, 20 bp, Artificial Sequence
  chemically synthesized
tgcctgtctttgagcaggaa

SEQ ID NO: 31669 - DNA, 20 bp, Artificial Sequence
  chemically synthesized
gtgctgattgagggcccatt

SEQ ID NO: 31670 - DNA, 20 bp, Artificial Sequence
  chemically synthesized
gctccaaactctcaaaccac

SEQ ID NO: 31671 - DNA, 20 bp, Artificial Sequence
  chemically synthesized
tgtaagcatcacaacaggca

SEQ ID NO: 31672 - DNA, 20 bp, Artificial Sequence
  chemically synthesized
gcaaaccagactagtttata

SEQ ID NO: 31673 - DNA, 20 bp, Artificial Sequence
  chemically synthesized
ctctgaggtactgatggacc

SEQ ID NO: 31674 - DNA, 20 bp, Artificial Sequence
  chemically synthesized
aaggcagctagacaggactt

SEQ ID NO: 31675 - DNA, 20 bp, Artificial Sequence
  chemically synthesized
tactcttagacataacacac

SEQ ID NO: 31676 - DNA, 20 bp, Artificial Sequence
  chemically synthesized
cttttatcacaggctccagg

SEQ ID NO: 31677 - DNA, 20 bp, Artificial Sequence
  chemically synthesized
ggaagggtttggcctctgat

SEQ ID NO: 31678 - DNA, 20 bp, Artificial Sequence
  chemically synthesized
cctctgattagggtgggggc

SEQ ID NO: 31679 - DNA, 20 bp, Artificial Sequence
  chemically synthesized
gattagggtgggggcgtggg

SEQ ID NO: 31680 - DNA, 20 bp, Artificial Sequence
  chemically synthesized
ggaaggctctcttggtgatg

SEQ ID NO: 31681 - DNA, 20 bp, Artificial Sequence
  chemically synthesized
gctctcttggtgatggagaa

SEQ ID NO: 31682 - DNA, 20 bp, Artificial Sequence
  chemically synthesized
attggattttatttctcaat

SEQ ID NO: 31683 - DNA, 20 bp, Artificial Sequence
  chemically synthesized
tcaggtaccagctactgtgt

SEQ ID NO: 31684 - DNA, 20 bp, Artificial Sequence
  chemically synthesized
cttttcttctgacccaaact

SEQ ID NO: 31685 - DNA, 20 bp, Artificial Sequence
  chemically synthesized
actattattattcctatttt

SEQ ID NO: 31686 - DNA, 20 bp, Artificial Sequence
  chemically synthesized
ttattattcctattttacgg

SEQ ID NO: 31687 - DNA, 20 bp, Artificial Sequence
  chemically synthesized
acatttggtgataaatcatt

SEQ ID NO: 31688 - DNA, 20 bp, Artificial Sequence
  chemically synthesized
taaatcattaggaatgagct

SEQ ID NO: 31689 - DNA, 20 bp, Artificial Sequence
  chemically synthesized
ccaattggagattagggaga

SEQ ID NO: 31690 - DNA, 20 bp, Artificial Sequence
  chemically synthesized
gcataagatttataagacat

SEQ ID NO: 31691 - DNA, 20 bp, Artificial Sequence
  chemically synthesized
acagaggggcaacccaggtc

SEQ ID NO: 31692 - DNA, 20 bp, Artificial Sequence
  chemically synthesized
ttgcttagcctgtgtagctc

SEQ ID NO: 31693 - DNA, 20 bp, Artificial Sequence
  chemically synthesized
gtatttattgccctaggcgt

SEQ ID NO: 31694 - DNA, 20 bp, Artificial Sequence
  chemically synthesized
ctggaggccctgtctccccc

SEQ ID NO: 31695 - DNA, 20 bp, Artificial Sequence
  chemically synthesized
cctgccatggccaagctgat

SEQ ID NO: 31696 - DNA, 20 bp, Artificial Sequence
  chemically synthesized
atgggggagggggaggcagg

SEQ ID NO: 31697 - DNA, 20 bp, Artificial Sequence
  chemically synthesized
ctgggcagcagctgcctccc

SEQ ID NO: 31698 - DNA, 20 bp, Artificial Sequence
  chemically synthesized
cacttaagttatctctgacc

SEQ ID NO: 31699 - DNA, 20 bp, Artificial Sequence
  chemically synthesized
atttatttggcctgattcaa

SEQ ID NO: 31700 - DNA, 20 bp, Artificial Sequence
  chemically synthesized
ttcaaatgaatgcccatttt

SEQ ID NO: 31701 - DNA, 20 bp, Artificial Sequence
  chemically synthesized
tgcccattttaagaatgttt

SEQ ID NO: 31702 - DNA, 20 bp, Artificial Sequence
  chemically synthesized
gtagtggagaggtttctatt

SEQ ID NO: 31703 - DNA, 20 bp, Artificial Sequence
  chemically synthesized
ggagaggtttctattcggaa

SEQ ID NO: 31704 - DNA, 20 bp, Artificial Sequence
  chemically synthesized
agctgagccaaacagatagc

SEQ ID NO: 31705 - DNA, 20 bp, Artificial Sequence
  chemically synthesized
ccaaacagatagctgggata

SEQ ID NO: 31706 - DNA, 20 bp, Artificial Sequence
  chemically synthesized
gatagctgggatatagggtt

SEQ ID NO: 31707 - DNA, 20 bp, Artificial Sequence
  chemically synthesized
gtttggagttgaactctcca

SEQ ID NO: 31708 - DNA, 20 bp, Artificial Sequence
  chemically synthesized
gagttgaactctccagggaa

SEQ ID NO: 31709 - DNA, 20 bp, Artificial Sequence
  chemically synthesized
ggtgggaggggggcagcctg

SEQ ID NO: 31710 - DNA, 20 bp, Artificial Sequence
  chemically synthesized
cccacatggcaaccaatagg

SEQ ID NO: 31711 - DNA, 20 bp, Artificial Sequence
  chemically synthesized
catggcaaccaataggttga

SEQ ID NO: 31712 - DNA, 20 bp, Artificial Sequence
  chemically synthesized
aatggataaacgccctatgg

SEQ ID NO: 31713 - DNA, 20 bp, Artificial Sequence
  chemically synthesized
ggaatacaactcaacagtag

SEQ ID NO: 31714 - DNA, 20 bp, Artificial Sequence
  chemically synthesized
actcaacagtagaagaatga

SEQ ID NO: 31715 - DNA, 20 bp, Artificial Sequence
  chemically synthesized
agagtaacacactccacacc

SEQ ID NO: 31716 - DNA, 20 bp, Artificial Sequence
  chemically synthesized
taacacactccacaccatgg

SEQ ID NO: 31717 - DNA, 20 bp, Artificial Sequence
  chemically synthesized
tccacaccatggatgaatcc

SEQ ID NO: 31718 - DNA, 20 bp, Artificial Sequence
  chemically synthesized
cacaaaagacgatatcctgt

SEQ ID NO: 31719 - DNA, 20 bp, Artificial Sequence
  chemically synthesized
agtccatttgtaacaaattc

SEQ ID NO: 31720 - DNA, 20 bp, Artificial Sequence
  chemically synthesized
tcaacactgtggtggtaggt

SEQ ID NO: 31721 - DNA, 20 bp, Artificial Sequence
  chemically synthesized
gggttcagtggttagaagga

SEQ ID NO: 31722 - DNA, 20 bp, Artificial Sequence
  chemically synthesized
tggttagaaggaaggggtca

SEQ ID NO: 31723 - DNA, 20 bp, Artificial Sequence
  chemically synthesized
ggggtcagagggttagggaa

SEQ ID NO: 31724 - DNA, 20 bp, Artificial Sequence
  chemically synthesized
agctgtatacaactggcaaa

SEQ ID NO: 31725 - DNA, 20 bp, Artificial Sequence
  chemically synthesized
aatccaactgtacacttaaa

SEQ ID NO: 31726 - DNA, 20 bp, Artificial Sequence
  chemically synthesized
caaaacaaaacacccaccac

SEQ ID NO: 31727 - DNA, 20 bp, Artificial Sequence
  chemically synthesized
tgtctgtaacctttaactgt

SEQ ID NO: 31728 - DNA, 20 bp, Artificial Sequence
  chemically synthesized
tcaagactctagccgtcttt

SEQ ID NO: 31729 - DNA, 20 bp, Artificial Sequence
  chemically synthesized
aaagtacatttcagggaaat

SEQ ID NO: 31730 - DNA, 20 bp, Artificial Sequence
  chemically synthesized
gagagggaggcccactgaga

SEQ ID NO: 31731 - DNA, 20 bp, Artificial Sequence
  chemically synthesized
atccaccataagcagagcat

SEQ ID NO: 31732 - DNA, 20 bp, Artificial Sequence
  chemically synthesized
catttgggtctgagaagcgc

SEQ ID NO: 31733 - DNA, 20 bp, Artificial Sequence
  chemically synthesized
tgagaagcgcatgagtactg

SEQ ID NO: 31734 - DNA, 20 bp, Artificial Sequence
  chemically synthesized
ggggaggaaatctgttttcc

SEQ ID NO: 31735 - DNA, 20 bp, Artificial Sequence
  chemically synthesized
ttcaaaaagtaaaaagggga

SEQ ID NO: 31736 - DNA, 20 bp, Artificial Sequence
  chemically synthesized
ttgtttgtttgtttttgaga

SEQ ID NO: 31737 - DNA, 20 bp, Artificial Sequence
  chemically synthesized
tctcgctgtgttgcctaggc

SEQ ID NO: 31738 - DNA, 20 bp, Artificial Sequence
  chemically synthesized
catcctgtcacctcagcctc

SEQ ID NO: 31739 - DNA, 20 bp, Artificial Sequence
  chemically synthesized
cctggctaattttgtagaga

SEQ ID NO: 31740 - DNA, 20 bp, Artificial Sequence
  chemically synthesized
gccttgacctcccaaagtgc

SEQ ID NO: 31741 - DNA, 20 bp, Artificial Sequence
  chemically synthesized
acaatgtagcatctcctgtg

SEQ ID NO: 31742 - DNA, 20 bp, Artificial Sequence
  chemically synthesized
gtgctgaattcctgtaaagt

SEQ ID NO: 31743 - DNA, 20 bp, Artificial Sequence
  chemically synthesized
actgccttttctgaacctat

SEQ ID NO: 31744 - DNA, 20 bp, Artificial Sequence
  chemically synthesized
atttgggtgctaaggactgt

SEQ ID NO: 31745 - DNA, 20 bp, Artificial Sequence
  chemically synthesized
gtgctaaggactgtatggat

SEQ ID NO: 31746 - DNA, 20 bp, Artificial Sequence
  chemically synthesized
acgtctgtgcctgcgtagtg

SEQ ID NO: 31747 - DNA, 20 bp, Artificial Sequence
  chemically synthesized
tggccacttggctctcaaca

SEQ ID NO: 31748 - DNA, 20 bp, Artificial Sequence
  chemically synthesized
caacacggagtgatgatgcc

SEQ ID NO: 31749 - DNA, 20 bp, Artificial Sequence
  chemically synthesized
tttactcttgttgcccgggc

SEQ ID NO: 31750 - DNA, 20 bp, Artificial Sequence
  chemically synthesized
cgatctcctgcctcagcctc

SEQ ID NO: 31751 - DNA, 20 bp, Artificial Sequence
  chemically synthesized
ttttgtatttttagtagaga

SEQ ID NO: 31752 - DNA, 20 bp, Artificial Sequence
  chemically synthesized
gccccggcctcccaaagtgc

SEQ ID NO: 31753 - DNA, 20 bp, Artificial Sequence
  chemically synthesized
gctgcatttaaaacagcatt

SEQ ID NO: 31754 - DNA, 20 bp, Artificial Sequence
  chemically synthesized
agaacttagctttttgcatt

SEQ ID NO: 31755 - DNA, 20 bp, Artificial Sequence
  chemically synthesized
ccatggttgaaagtcagcta

SEQ ID NO: 31756 - DNA, 20 bp, Artificial Sequence
  chemically synthesized
acttcacatttgctcttctc

SEQ ID NO: 31757 - DNA, 20 bp, Artificial Sequence
  chemically synthesized
atttgctcttctccagggtg

SEQ ID NO: 31758 - DNA, 20 bp, Artificial Sequence
  chemically synthesized
gtgtggggtggctgtttaaa

SEQ ID NO: 31759 - DNA, 20 bp, Artificial Sequence
  chemically synthesized
ggggtggctgtttaaagagg

SEQ ID NO: 31760 - DNA, 20 bp, Artificial Sequence
  chemically synthesized
atatcagaagggaaatgttt

SEQ ID NO: 31761 - DNA, 20 bp, Artificial Sequence
  chemically synthesized
agtcatttatatgctatttg

SEQ ID NO: 31762 - DNA, 20 bp, Artificial Sequence
  chemically synthesized
tatgctatttgttgaattcc

SEQ ID NO: 31763 - DNA, 20 bp, Artificial Sequence
  chemically synthesized
ttgttgaattcctagaatat

SEQ ID NO: 31764 - DNA, 20 bp, Artificial Sequence
  chemically synthesized
taatagaagcaagtaggaga

SEQ ID NO: 31765 - DNA, 20 bp, Artificial Sequence
  chemically synthesized
tgaaattaattagaggcata

SEQ ID NO: 31766 - DNA, 20 bp, Artificial Sequence
  chemically synthesized
cagcaatgtaaggcctagat

SEQ ID NO: 31767 - DNA, 20 bp, Artificial Sequence
  chemically synthesized
taaggcctagatatgagtca

SEQ ID NO: 31768 - DNA, 20 bp, Artificial Sequence
  chemically synthesized
atgagtcagggagtggtgca

SEQ ID NO: 31769 - DNA, 20 bp, Artificial Sequence
  chemically synthesized
gtcagggagtggtgcatggg

SEQ ID NO: 31770 - DNA, 20 bp, Artificial Sequence
  chemically synthesized
agtgttctatgaggttggag

SEQ ID NO: 31771 - DNA, 20 bp, Artificial Sequence
  chemically synthesized
ttgaggccttgaagtatgag

SEQ ID NO: 31772 - DNA, 20 bp, Artificial Sequence
  chemically synthesized
aggaaggaaatgagaacgga

SEQ ID NO: 31773 - DNA, 20 bp, Artificial Sequence
  chemically synthesized
ggaagggatttttacttggg

SEQ ID NO: 31774 - DNA, 20 bp, Artificial Sequence
  chemically synthesized
tgggcagaatattttccttg

SEQ ID NO: 31775 - DNA, 20 bp, Artificial Sequence
  chemically synthesized
tgggtacggggaactaagac

SEQ ID NO: 31776 - DNA, 20 bp, Artificial Sequence
  chemically synthesized
ctaagactggaatagaaaat

SEQ ID NO: 31777 - DNA, 20 bp, Artificial Sequence
  chemically synthesized
actggaatagaaaattggag

SEQ ID NO: 31778 - DNA, 20 bp, Artificial Sequence
  chemically synthesized
ggagttggattgtggagctc

SEQ ID NO: 31779 - DNA, 20 bp, Artificial Sequence
  chemically synthesized
agctctggaatgatggctta

SEQ ID NO: 31780 - DNA, 20 bp, Artificial Sequence
  chemically synthesized
aagacaaaggcagcatgcta

SEQ ID NO: 31781 - DNA, 20 bp, Artificial Sequence
  chemically synthesized
ttaagtgaggactctgcaaa

SEQ ID NO: 31782 - DNA, 20 bp, Artificial Sequence
  chemically synthesized
gtgaggactctgcaaagggg

SEQ ID NO: 31783 - DNA, 20 bp, Artificial Sequence
  chemically synthesized
ggactctgcaaagggggtgg

SEQ ID NO: 31784 - DNA, 20 bp, Artificial Sequence
  chemically synthesized
tctctgttatacccttcatg

SEQ ID NO: 31785 - DNA, 20 bp, Artificial Sequence
  chemically synthesized
ctgttgacttatatgttcta

SEQ ID NO: 31786 - DNA, 20 bp, Artificial Sequence
  chemically synthesized
gacttatatgttctagagga

SEQ ID NO: 31787 - DNA, 20 bp, Artificial Sequence
  chemically synthesized
aggatggagttggttgaccg

SEQ ID NO: 31788 - DNA, 20 bp, Artificial Sequence
  chemically synthesized
gtagggtttcctttcactag

SEQ ID NO: 31789 - DNA, 20 bp, Artificial Sequence
  chemically synthesized
atattgtaggagcctagcac

SEQ ID NO: 31790 - DNA, 20 bp, Artificial Sequence
  chemically synthesized
ctttgcccccattgcagatg

SEQ ID NO: 31791 - DNA, 20 bp, Artificial Sequence
  chemically synthesized
attgcagatggggagtgggc

SEQ ID NO: 31792 - DNA, 20 bp, Artificial Sequence
  chemically synthesized
gagtgggcaggaatgacgtt

SEQ ID NO: 31793 - DNA, 20 bp, Artificial Sequence
  chemically synthesized
gttcagaatcaagggcccat

SEQ ID NO: 31794 - DNA, 20 bp, Artificial Sequence
  chemically synthesized
ctcctccagtccatccatgt

SEQ ID NO: 31795 - DNA, 20 bp, Artificial Sequence
  chemically synthesized
catgttgggatactcagggc

SEQ ID NO: 31796 - DNA, 20 bp, Artificial Sequence
  chemically synthesized
taatagtgtcctcctgcttt

SEQ ID NO: 31797 - DNA, 20 bp, Artificial Sequence
  chemically synthesized
gttattaagctagcctgaac

SEQ ID NO: 31798 - DNA, 20 bp, Artificial Sequence
  chemically synthesized
ctgaacttgagtaaacattt

SEQ ID NO: 31799 - DNA, 20 bp, Artificial Sequence
  chemically synthesized
cttgagtaaacatttttgga

SEQ ID NO: 31800 - DNA, 20 bp, Artificial Sequence
  chemically synthesized
aagcagagatgctagtgacc

SEQ ID NO: 31801 - DNA, 20 bp, Artificial Sequence
  chemically synthesized
agaggggaaagaacctctgt

SEQ ID NO: 31802 - DNA, 20 bp, Artificial Sequence
  chemically synthesized
caggtgcttcctcttctact

SEQ ID NO: 31803 - DNA, 20 bp, Artificial Sequence
  chemically synthesized
cagtgtggctgtttgtcatc

SEQ ID NO: 31804 - DNA, 20 bp, Artificial Sequence
  chemically synthesized
ggcagaaattagttaggaag

SEQ ID NO: 31805 - DNA, 20 bp, Artificial Sequence
  chemically synthesized
agttaggaagcagagtagca

SEQ ID NO: 31806 - DNA, 20 bp, Artificial Sequence
  chemically synthesized
gttccaaatgcctctattgt

SEQ ID NO: 31807 - DNA, 20 bp, Artificial Sequence
  chemically synthesized
aatgcctctattgtatgaat

SEQ ID NO: 31808 - DNA, 20 bp, Artificial Sequence
  chemically synthesized
gcaaaatgacataaaagaaa

SEQ ID NO: 31809 - DNA, 20 bp, Artificial Sequence
  chemically synthesized
tgttgactggctctcacagt

SEQ ID NO: 31810 - DNA, 20 bp, Artificial Sequence
  chemically synthesized
ctctaaagcaacagtttaat

SEQ ID NO: 31811 - DNA, 20 bp, Artificial Sequence
  chemically synthesized
tctttgaagataaatttgtt

SEQ ID NO: 31812 - DNA, 20 bp, Artificial Sequence
  chemically synthesized
taaatttgttttgggtatgg

SEQ ID NO: 31813 - DNA, 20 bp, Artificial Sequence
  chemically synthesized
cagcactttgggaggctgag

SEQ ID NO: 31814 - DNA, 20 bp, Artificial Sequence
  chemically synthesized
actttgggaggctgaggtgg

SEQ ID NO: 31815 - DNA, 20 bp, Artificial Sequence
  chemically synthesized
tgggtggatcacctaaggtc

SEQ ID NO: 31816 - DNA, 20 bp, Artificial Sequence
  chemically synthesized
tacttgggaggctgaggcag

SEQ ID NO: 31817 - DNA, 20 bp, Artificial Sequence
  chemically synthesized
aacaaacaaacaaaatcgtt

SEQ ID NO: 31818 - DNA, 20 bp, Artificial Sequence
  chemically synthesized
gcagtggctttaggctgttt

SEQ ID NO: 31819 - DNA, 20 bp, Artificial Sequence
  chemically synthesized
agcaaaactagaaagtttta

SEQ ID NO: 31820 - DNA, 20 bp, Artificial Sequence
  chemically synthesized
caaactatttacagccataa

SEQ ID NO: 31821 - DNA, 20 bp, Artificial Sequence
  chemically synthesized
cagccataacagggtttcca

SEQ ID NO: 31822 - DNA, 20 bp, Artificial Sequence
  chemically synthesized
agtgaattgtataagtagca

SEQ ID NO: 31823 - DNA, 20 bp, Artificial Sequence
  chemically synthesized
taaatgctgtcaaattgtaa

SEQ ID NO: 31824 - DNA, 20 bp, Artificial Sequence
  chemically synthesized
cttcttccccctctcacagt

SEQ ID NO: 31825 - DNA, 20 bp, Artificial Sequence
  chemically synthesized
gcccgtgagacaaactcttc

SEQ ID NO: 31826 - DNA, 20 bp, Artificial Sequence
  chemically synthesized
tttaaatgtttctacataat

SEQ ID NO: 31827 - DNA, 20 bp, Artificial Sequence
  chemically synthesized
tcaaaagtaatagcacagag

SEQ ID NO: 31828 - DNA, 20 bp, Artificial Sequence
  chemically synthesized
tttagatgagggctccattc

SEQ ID NO: 31829 - DNA, 20 bp, Artificial Sequence
  chemically synthesized
ggcagatgttatcagggagc

SEQ ID NO: 31830 - DNA, 20 bp, Artificial Sequence
  chemically synthesized
tgttatcagggagctggagt

SEQ ID NO: 31831 - DNA, 20 bp, Artificial Sequence
  chemically synthesized
ctttctgcagcttccttaga

SEQ ID NO: 31832 - DNA, 20 bp, Artificial Sequence
  chemically synthesized
attctgctgctcataaataa

SEQ ID NO: 31833 - DNA, 20 bp, Artificial Sequence
  chemically synthesized
aaaggctggtgtggttgcca

SEQ ID NO: 31834 - DNA, 20 bp, Artificial Sequence
  chemically synthesized
gagaatagggctaacttaag

SEQ ID NO: 31835 - DNA, 20 bp, Artificial Sequence
  chemically synthesized
tttttttgttttgttttgtt

SEQ ID NO: 31836 - DNA, 20 bp, Artificial Sequence
  chemically synthesized
tcatttagttttcccttaat

SEQ ID NO: 31837 - DNA, 20 bp, Artificial Sequence
  chemically synthesized
tattatttatagccctccag

SEQ ID NO: 31838 - DNA, 20 bp, Artificial Sequence
  chemically synthesized
ccactacactgctccccctg

SEQ ID NO: 31839 - DNA, 20 bp, Artificial Sequence
  chemically synthesized
actctcggtgtgtggcattg

SEQ ID NO: 31840 - DNA, 20 bp, Artificial Sequence
  chemically synthesized
gacttgcaaaatataggtta

SEQ ID NO: 31841 - DNA, 20 bp, Artificial Sequence
  chemically synthesized
atataggttagggagtttta

SEQ ID NO: 31842 - DNA, 20 bp, Artificial Sequence
  chemically synthesized
tacattaactagatcattac

SEQ ID NO: 31843 - DNA, 20 bp, Artificial Sequence
  chemically synthesized
ggttagaacttcacacactt

SEQ ID NO: 31844 - DNA, 20 bp, Artificial Sequence
  chemically synthesized
tgtctagcgctcctaaatgc

SEQ ID NO: 31845 - DNA, 20 bp, Artificial Sequence
  chemically synthesized
gaggggcatttgccttcgct

SEQ ID NO: 31846 - DNA, 20 bp, Artificial Sequence
  chemically synthesized
ttgccttcgctttgaatctc

SEQ ID NO: 31847 - DNA, 20 bp, Artificial Sequence
  chemically synthesized
ccgagtcttttttattctga

SEQ ID NO: 31848 - DNA, 20 bp, Artificial Sequence
  chemically synthesized
ccatggccaggtttgagaga

SEQ ID NO: 31849 - DNA, 20 bp, Artificial Sequence
  chemically synthesized
gtgattcgcagtagtcttcc

SEQ ID NO: 31850 - DNA, 20 bp, Artificial Sequence
  chemically synthesized
gcagtagtcttcccagggtg

SEQ ID NO: 31851 - DNA, 20 bp, Artificial Sequence
  chemically synthesized
gtgggaacgtctccctggga

SEQ ID NO: 31852 - DNA, 20 bp, Artificial Sequence
  chemically synthesized
tttcaggcccaatcctgatg

SEQ ID NO: 31853 - DNA, 20 bp, Artificial Sequence
  chemically synthesized
cattattcatctcaaagcca

SEQ ID NO: 31854 - DNA, 20 bp, Artificial Sequence
  chemically synthesized
ccatcacagggctgtggtct

SEQ ID NO: 31855 - DNA, 20 bp, Artificial Sequence
  chemically synthesized
tgtgcctaagtatagttttc

SEQ ID NO: 31856 - DNA, 20 bp, Artificial Sequence
  chemically synthesized
atgtgcagaaagtgaactct

SEQ ID NO: 31857 - DNA, 20 bp, Artificial Sequence
  chemically synthesized
atccccagtaccagtctccc

SEQ ID NO: 31858 - DNA, 20 bp, Artificial Sequence
  chemically synthesized
ctgttcagtcaaatccattt

SEQ ID NO: 31859 - DNA, 20 bp, Artificial Sequence
  chemically synthesized
gaacaaggggcttggagatt

SEQ ID NO: 31860 - DNA, 20 bp, Artificial Sequence
  chemically synthesized
tcagccttcttgttgaaaat

SEQ ID NO: 31861 - DNA, 20 bp, Artificial Sequence
  chemically synthesized
ttccaagagctatctggtga

SEQ ID NO: 31862 - DNA, 20 bp, Artificial Sequence
  chemically synthesized
agggctacttctgggggacc

SEQ ID NO: 31863 - DNA, 20 bp, Artificial Sequence
  chemically synthesized
ttgggaaacacttgccttct

SEQ ID NO: 31864 - DNA, 20 bp, Artificial Sequence
  chemically synthesized
atagactgtgtttgacagtc

SEQ ID NO: 31865 - DNA, 20 bp, Artificial Sequence
  chemically synthesized
ggcaacttcacttctcaccc

SEQ ID NO: 31866 - DNA, 20 bp, Artificial Sequence
  chemically synthesized
tattcagcagcttcgtgacg

SEQ ID NO: 31867 - DNA, 20 bp, Artificial Sequence
  chemically synthesized
cagcttcgtgacgttggatg

SEQ ID NO: 31868 - DNA, 20 bp, Artificial Sequence
  chemically synthesized
tggagggtttttctttttaa

SEQ ID NO: 31869 - DNA, 20 bp, Artificial Sequence
  chemically synthesized
gtttatttttcccttatagg

SEQ ID NO: 31870 - DNA, 20 bp, Artificial Sequence
  chemically synthesized
cccttataggtagaatataa

SEQ ID NO: 31871 - DNA, 20 bp, Artificial Sequence
  chemically synthesized
aggtagaatataaaagagta

SEQ ID NO: 31872 - DNA, 20 bp, Artificial Sequence
  chemically synthesized
gctatccttggcattcttgc

SEQ ID NO: 31873 - DNA, 20 bp, Artificial Sequence
  chemically synthesized
ggccagacttccattacact

SEQ ID NO: 31874 - DNA, 20 bp, Artificial Sequence
  chemically synthesized
cttgcgaaattgtggctgca

SEQ ID NO: 31875 - DNA, 20 bp, Artificial Sequence
  chemically synthesized
tatgccttggtggtggtggt

SEQ ID NO: 31876 - DNA, 20 bp, Artificial Sequence
  chemically synthesized
agtcctaaacaagtgccaca

SEQ ID NO: 31877 - DNA, 20 bp, Artificial Sequence
  chemically synthesized
ataatgaggtgttcctaagt

SEQ ID NO: 31878 - DNA, 20 bp, Artificial Sequence
  chemically synthesized
cataatttgaggttttatac

SEQ ID NO: 31879 - DNA, 20 bp, Artificial Sequence
  chemically synthesized
cagcccatgtgcattttttc

SEQ ID NO: 31880 - DNA, 20 bp, Artificial Sequence
  chemically synthesized
tatttaaaaggcagggaggg

SEQ ID NO: 31881 - DNA, 20 bp, Artificial Sequence
  chemically synthesized
aaaacctacttccctttctg

SEQ ID NO: 31882 - DNA, 20 bp, Artificial Sequence
  chemically synthesized
agagaggaggcagggggaga

SEQ ID NO: 31883 - DNA, 20 bp, Artificial Sequence
  chemically synthesized
gaggcagggggagagagggt

SEQ ID NO: 31884 - DNA, 20 bp, Artificial Sequence
  chemically synthesized
ggaattcgagctattttcag

SEQ ID NO: 31885 - DNA, 20 bp, Artificial Sequence
  chemically synthesized
cgagctattttcagctgaat

SEQ ID NO: 31886 - DNA, 20 bp, Artificial Sequence
  chemically synthesized
actgcattttctgacactgt

SEQ ID NO: 31887 - DNA, 20 bp, Artificial Sequence
  chemically synthesized
ttaacagaggagctctaaat

SEQ ID NO: 31888 - DNA, 20 bp, Artificial Sequence
  chemically synthesized
tcctccttctagtgctttgg

SEQ ID NO: 31889 - DNA, 20 bp, Artificial Sequence
  chemically synthesized
ctggggacgagcatcctctc

SEQ ID NO: 31890 - DNA, 20 bp, Artificial Sequence
  chemically synthesized
ctgacaactgcagcattcca

SEQ ID NO: 31891 - DNA, 20 bp, Artificial Sequence
  chemically synthesized
actgcagcattccacagggt

SEQ ID NO: 31892 - DNA, 20 bp, Artificial Sequence
  chemically synthesized
tgacatagacagcagttgat

SEQ ID NO: 31893 - DNA, 20 bp, Artificial Sequence
  chemically synthesized
caagtcttctgaccttggcc

SEQ ID NO: 31894 - DNA, 20 bp, Artificial Sequence
  chemically synthesized
gggatctttgcactgggcag

SEQ ID NO: 31895 - DNA, 20 bp, Artificial Sequence
  chemically synthesized
tttgcactgggcaggggaat

SEQ ID NO: 31896 - DNA, 20 bp, Artificial Sequence
  chemically synthesized
ttaaaccacttttcaaaggc

SEQ ID NO: 31897 - DNA, 20 bp, Artificial Sequence
  chemically synthesized
tcaagaccatttctctacca

SEQ ID NO: 31898 - DNA, 20 bp, Artificial Sequence
  chemically synthesized
tgctgcaattatttgtctag

SEQ ID NO: 31899 - DNA, 20 bp, Artificial Sequence
  chemically synthesized
gcactgtataatcacatgaa

SEQ ID NO: 31900 - DNA, 20 bp, Artificial Sequence
  chemically synthesized
tactaacctgtccttcaaaa

SEQ ID NO: 31901 - DNA, 20 bp, Artificial Sequence
  chemically synthesized
caggaagctgatcttaacct

SEQ ID NO: 31902 - DNA, 20 bp, Artificial Sequence
  chemically synthesized
cttgggatgcagtgtgcttt

SEQ ID NO: 31903 - DNA, 20 bp, Artificial Sequence
  chemically synthesized
gatgcagtgtgctttcaggg

SEQ ID NO: 31904 - DNA, 20 bp, Artificial Sequence
  chemically synthesized
gaactttccaagtctgaaaa

SEQ ID NO: 31905 - DNA, 20 bp, Artificial Sequence
  chemically synthesized
ctctattcttcttgcttcct

SEQ ID NO: 31906 - DNA, 20 bp, Artificial Sequence
  chemically synthesized
tttctcacttttctccagtt

SEQ ID NO: 31907 - DNA, 20 bp, Artificial Sequence
  chemically synthesized
accaaactaaactctcaaga

SEQ ID NO: 31908 - DNA, 20 bp, Artificial Sequence
  chemically synthesized
acaggtctgcctctcttcct

SEQ ID NO: 31909 - DNA, 20 bp, Artificial Sequence
  chemically synthesized
tcagaagtgaccttgatgaa

SEQ ID NO: 31910 - DNA, 20 bp, Artificial Sequence
  chemically synthesized
gagaaggtctctatacctag

SEQ ID NO: 31911 - DNA, 20 bp, Artificial Sequence
  chemically synthesized
taggtgggtttcctgagctg

SEQ ID NO: 31912 - DNA, 20 bp, Artificial Sequence
  chemically synthesized
aaggctctcccaccatcaca

SEQ ID NO: 31913 - DNA, 20 bp, Artificial Sequence
  chemically synthesized
caccatcacacagaatgtac

SEQ ID NO: 31914 - DNA, 20 bp, Artificial Sequence
  chemically synthesized
gcccttaaaacactggagcc

SEQ ID NO: 31915 - DNA, 20 bp, Artificial Sequence
  chemically synthesized
gtggggaaaagaaagatgta

SEQ ID NO: 31916 - DNA, 20 bp, Artificial Sequence
  chemically synthesized
ttcacctgccagcttgtggg

SEQ ID NO: 31917 - DNA, 20 bp, Artificial Sequence
  chemically synthesized
gggtggcttaagttctagcc

SEQ ID NO: 31918 - DNA, 20 bp, Artificial Sequence
  chemically synthesized
agcatgtgtatgtgcttgtg

SEQ ID NO: 31919 - DNA, 20 bp, Artificial Sequence
  chemically synthesized
gtgtatgtgcttgtggtggg

SEQ ID NO: 31920 - DNA, 20 bp, Artificial Sequence
  chemically synthesized
tgggagacagagagaaggcc

SEQ ID NO: 31921 - DNA, 20 bp, Artificial Sequence
  chemically synthesized
cagagagaaggccctgggtt

SEQ ID NO: 31922 - DNA, 20 bp, Artificial Sequence
  chemically synthesized
ctgaatgtttttacttttcc

SEQ ID NO: 31923 - DNA, 20 bp, Artificial Sequence
  chemically synthesized
ctgcttcatttttgttttca

SEQ ID NO: 31924 - DNA, 20 bp, Artificial Sequence
  chemically synthesized
ccagcatgtcccaagcagag

SEQ ID NO: 31925 - DNA, 20 bp, Artificial Sequence
  chemically synthesized
agagatgggtggctaggttt

SEQ ID NO: 31926 - DNA, 20 bp, Artificial Sequence
  chemically synthesized
tgggtggctaggtttgggaa

SEQ ID NO: 31927 - DNA, 20 bp, Artificial Sequence
  chemically synthesized
aatggggtgctgggagggga

SEQ ID NO: 31928 - DNA, 20 bp, Artificial Sequence
  chemically synthesized
cggccaccactgggctgtac

SEQ ID NO: 31929 - DNA, 20 bp, Artificial Sequence
  chemically synthesized
gtaccaggatctagtgcaac

SEQ ID NO: 31930 - DNA, 20 bp, Artificial Sequence
  chemically synthesized
tgcaacttgggtgacaaggt

SEQ ID NO: 31931 - DNA, 20 bp, Artificial Sequence
  chemically synthesized
agcaaaaactatttagaact

SEQ ID NO: 31932 - DNA, 20 bp, Artificial Sequence
  chemically synthesized
tagaactatgagttcaaaaa

SEQ ID NO: 31933 - DNA, 20 bp, Artificial Sequence
  chemically synthesized
ctttctcttgggacagagat

SEQ ID NO: 31934 - DNA, 20 bp, Artificial Sequence
  chemically synthesized
cagagatgggggtgcaggta

SEQ ID NO: 31935 - DNA, 20 bp, Artificial Sequence
  chemically synthesized
tgggggtgcaggtaggggat

SEQ ID NO: 31936 - DNA, 20 bp, Artificial Sequence
  chemically synthesized
tgagaatagaggaaaatgtg

SEQ ID NO: 31937 - DNA, 20 bp, Artificial Sequence
  chemically synthesized
aattacacagcatttggaaa

SEQ ID NO: 31938 - DNA, 20 bp, Artificial Sequence
  chemically synthesized
ctgattgtccataacaacca

SEQ ID NO: 31939 - DNA, 20 bp, Artificial Sequence
  chemically synthesized
caaggggctgtaatcctctc

SEQ ID NO: 31940 - DNA, 20 bp, Artificial Sequence
  chemically synthesized
acccagaggctccttggtta

SEQ ID NO: 31941 - DNA, 20 bp, Artificial Sequence
  chemically synthesized
gtccttccagccaggtcatt

SEQ ID NO: 31942 - DNA, 20 bp, Artificial Sequence
  chemically synthesized
aaaagttcactgcacagcgc

SEQ ID NO: 31943 - DNA, 20 bp, Artificial Sequence
  chemically synthesized
ggacagtcagaggtagacca

SEQ ID NO: 31944 - DNA, 20 bp, Artificial Sequence
  chemically synthesized
catgctgattacagggagac

SEQ ID NO: 31945 - DNA, 20 bp, Artificial Sequence
  chemically synthesized
agacttggatccaggagaaa

SEQ ID NO: 31946 - DNA, 20 bp, Artificial Sequence
  chemically synthesized
cctcctcgctgtccttggtg

SEQ ID NO: 31947 - DNA, 20 bp, Artificial Sequence
  chemically synthesized
tgatttaacaaaagcagctt

SEQ ID NO: 31948 - DNA, 20 bp, Artificial Sequence
  chemically synthesized
gcagcttttgagtgagaaag

SEQ ID NO: 31949 - DNA, 20 bp, Artificial Sequence
  chemically synthesized
ttttgagtgagaaagctgag

SEQ ID NO: 31950 - DNA, 20 bp, Artificial Sequence
  chemically synthesized
cagacccttgactctttgcc

SEQ ID NO: 31951 - DNA, 20 bp, Artificial Sequence
  chemically synthesized
tattgcattagagctggggc

SEQ ID NO: 31952 - DNA, 20 bp, Artificial Sequence
  chemically synthesized
ccacactctccaccgcctga

SEQ ID NO: 31953 - DNA, 20 bp, Artificial Sequence
  chemically synthesized
tctccaccgcctgacagggt

SEQ ID NO: 31954 - DNA, 20 bp, Artificial Sequence
  chemically synthesized
ggttgaggccctggaagcaa

SEQ ID NO: 31955 - DNA, 20 bp, Artificial Sequence
  chemically synthesized
gcctgaggggcttgttaagg

SEQ ID NO: 31956 - DNA, 20 bp, Artificial Sequence
  chemically synthesized
ctcaaaacaaaaaatggtct

SEQ ID NO: 31957 - DNA, 20 bp, Artificial Sequence
  chemically synthesized
agaggccaggtgtccatagg

SEQ ID NO: 31958 - DNA, 20 bp, Artificial Sequence
  chemically synthesized
tccccacgtggacctgctag

SEQ ID NO: 31959 - DNA, 20 bp, Artificial Sequence
  chemically synthesized
gacctgctaggtgggtagaa

SEQ ID NO: 31960 - DNA, 20 bp, Artificial Sequence
  chemically synthesized
cttggaggtgtctgggaaca

SEQ ID NO: 31961 - DNA, 20 bp, Artificial Sequence
  chemically synthesized
aacattggatgttactcata

SEQ ID NO: 31962 - DNA, 20 bp, Artificial Sequence
  chemically synthesized
tgttactcatatggaatcag

SEQ ID NO: 31963 - DNA, 20 bp, Artificial Sequence
  chemically synthesized
attggtcagtggtataaatg

SEQ ID NO: 31964 - DNA, 20 bp, Artificial Sequence
  chemically synthesized
ataaatgaaggattaggaaa

SEQ ID NO: 31965 - DNA, 20 bp, Artificial Sequence
  chemically synthesized
cataataggttttaattctg

SEQ ID NO: 31966 - DNA, 20 bp, Artificial Sequence
  chemically synthesized
gaatggccagttctggttct

SEQ ID NO: 31967 - DNA, 20 bp, Artificial Sequence
  chemically synthesized
tctcttggccaagactgtca

SEQ ID NO: 31968 - DNA, 20 bp, Artificial Sequence
  chemically synthesized
ggccctgaggtggcagtggg

SEQ ID NO: 31969 - DNA, 20 bp, Artificial Sequence
  chemically synthesized
ggggtttgtcagaaggtggg

SEQ ID NO: 31970 - DNA, 20 bp, Artificial Sequence
  chemically synthesized
gcaggacacttctgagatct

SEQ ID NO: 31971 - DNA, 20 bp, Artificial Sequence
  chemically synthesized
ccacagggcgactgttgggg

SEQ ID NO: 31972 - DNA, 20 bp, Artificial Sequence
  chemically synthesized
ctgttggggcaggatgtgag

SEQ ID NO: 31973 - DNA, 20 bp, Artificial Sequence
  chemically synthesized
ctgcactccagcctgggcaa

SEQ ID NO: 31974 - DNA, 20 bp, Artificial Sequence
  chemically synthesized
tgtgcttccttaagaagggc

SEQ ID NO: 31975 - DNA, 20 bp, Artificial Sequence
  chemically synthesized
tctccgtgcacagaccagtc

SEQ ID NO: 31976 - DNA, 20 bp, Artificial Sequence
  chemically synthesized
gtgcccacgaacaaaacatc

SEQ ID NO: 31977 - DNA, 20 bp, Artificial Sequence
  chemically synthesized
atttattttactctaagttc

SEQ ID NO: 31978 - DNA, 20 bp, Artificial Sequence
  chemically synthesized
taagttctgggatacatgtg

SEQ ID NO: 31979 - DNA, 20 bp, Artificial Sequence
  chemically synthesized
aggcataaagcacatttgtt

SEQ ID NO: 31980 - DNA, 20 bp, Artificial Sequence
  chemically synthesized
ttgatgcagataaaaaggct

SEQ ID NO: 31981 - DNA, 20 bp, Artificial Sequence
  chemically synthesized
aaaaggcttggggtggtctt

SEQ ID NO: 31982 - DNA, 20 bp, Artificial Sequence
  chemically synthesized
ggtggtcttcagagtaattt

SEQ ID NO: 31983 - DNA, 20 bp, Artificial Sequence
  chemically synthesized
tctgctctggcaggtgttat

SEQ ID NO: 31984 - DNA, 20 bp, Artificial Sequence
  chemically synthesized
tcacagccccatgcctcttc

SEQ ID NO: 31985 - DNA, 20 bp, Artificial Sequence
  chemically synthesized
cccatccttttcttcatttc

SEQ ID NO: 31986 - DNA, 20 bp, Artificial Sequence
  chemically synthesized
cgagtggggcagggaggcat

SEQ ID NO: 31987 - DNA, 20 bp, Artificial Sequence
  chemically synthesized
tttgtgtgaagctggacaat

SEQ ID NO: 31988 - DNA, 20 bp, Artificial Sequence
  chemically synthesized
tcccttctaactacaaaggc

SEQ ID NO: 31989 - DNA, 20 bp, Artificial Sequence
  chemically synthesized
taatggaaactgataaatta

SEQ ID NO: 31990 - DNA, 20 bp, Artificial Sequence
  chemically synthesized
cttttcaaaaggtttcacca

SEQ ID NO: 31991 - DNA, 20 bp, Artificial Sequence
  chemically synthesized
ttaaatagtgagctccccca

SEQ ID NO: 31992 - DNA, 20 bp, Artificial Sequence
  chemically synthesized
atcattaactacttgacaga

SEQ ID NO: 31993 - DNA, 20 bp, Artificial Sequence
  chemically synthesized
tacttgacagagaggatatt

SEQ ID NO: 31994 - DNA, 20 bp, Artificial Sequence
  chemically synthesized
ccaattttcaatgagcctgg

SEQ ID NO: 31995 - DNA, 20 bp, Artificial Sequence
  chemically synthesized
ccaagaaccctccatgctga

SEQ ID NO: 31996 - DNA, 20 bp, Artificial Sequence
  chemically synthesized
tggtgggaggtcaaggacca

SEQ ID NO: 31997 - DNA, 20 bp, Artificial Sequence
  chemically synthesized
gggagaggactcccttttct

SEQ ID NO: 31998 - DNA, 20 bp, Artificial Sequence
  chemically synthesized
tgtgtgtgcctttgtgagca

SEQ ID NO: 31999 - DNA, 20 bp, Artificial Sequence
  chemically synthesized
cttttcccttgacatttagc

SEQ ID NO: 32000 - DNA, 20 bp, Artificial Sequence
  chemically synthesized
caggctcactctctaagcct

SEQ ID NO: 32001 - DNA, 20 bp, Artificial Sequence
  chemically synthesized
aacacttagggccagaaaga

SEQ ID NO: 32002 - DNA, 20 bp, Artificial Sequence
  chemically synthesized
tcaaagtcacgaaacagctg

SEQ ID NO: 32003 - DNA, 20 bp, Artificial Sequence
  chemically synthesized
acgaaacagctggtgagtgg

SEQ ID NO: 32004 - DNA, 20 bp, Artificial Sequence
  chemically synthesized
cagctggtgagtggcagagt

SEQ ID NO: 32005 - DNA, 20 bp, Artificial Sequence
  chemically synthesized
cctgcttcctaaaggaagaa

SEQ ID NO: 32006 - DNA, 20 bp, Artificial Sequence
  chemically synthesized
taaaggaagaaaagaatccg

SEQ ID NO: 32007 - DNA, 20 bp, Artificial Sequence
  chemically synthesized
atccggggagtggtggcagt

SEQ ID NO: 32008 - DNA, 20 bp, Artificial Sequence
  chemically synthesized
caaataacctgataaatacc

SEQ ID NO: 32009 - DNA, 20 bp, Artificial Sequence
  chemically synthesized
ctcagctgaggactcagagc

SEQ ID NO: 32010 - DNA, 20 bp, Artificial Sequence
  chemically synthesized
aagaaagaggggaaatttgg

SEQ ID NO: 32011 - DNA, 20 bp, Artificial Sequence
  chemically synthesized
cacttgtttgtctgactcag

SEQ ID NO: 32012 - DNA, 20 bp, Artificial Sequence
  chemically synthesized
acagaacagatgaaccttca

SEQ ID NO: 32013 - DNA, 20 bp, Artificial Sequence
  chemically synthesized
gaaccttcatggagtttcac

SEQ ID NO: 32014 - DNA, 20 bp, Artificial Sequence
  chemically synthesized
agatgtcacagaaatcttca

SEQ ID NO: 32015 - DNA, 20 bp, Artificial Sequence
  chemically synthesized
gtcgtatcctccgctgtcaa

SEQ ID NO: 32016 - DNA, 20 bp, Artificial Sequence
  chemically synthesized
tatcctccgctgtcaactgg

SEQ ID NO: 32017 - DNA, 20 bp, Artificial Sequence
  chemically synthesized
tcagtgtgcaatattttgat

SEQ ID NO: 32018 - DNA, 20 bp, Artificial Sequence
  chemically synthesized
acctgctttttctttttatc

SEQ ID NO: 32019 - DNA, 20 bp, Artificial Sequence
  chemically synthesized
tggaaataatttctcttcct

SEQ ID NO: 32020 - DNA, 20 bp, Artificial Sequence
  chemically synthesized
tcatgacacactttctacat

SEQ ID NO: 32021 - DNA, 20 bp, Artificial Sequence
  chemically synthesized
aggcactcggtaaatatttg

SEQ ID NO: 32022 - DNA, 20 bp, Artificial Sequence
  chemically synthesized
actcggtaaatatttgttga

SEQ ID NO: 32023 - DNA, 20 bp, Artificial Sequence
  chemically synthesized
ttgaatgaatgcatgagagg

SEQ ID NO: 32024 - DNA, 20 bp, Artificial Sequence
  chemically synthesized
atgaatgcatgagaggttga

SEQ ID NO: 32025 - DNA, 20 bp, Artificial Sequence
  chemically synthesized
gaggttgaatgaatgcatga

SEQ ID NO: 32026 - DNA, 20 bp, Artificial Sequence
  chemically synthesized
ttgaatgaatgcatgagaga

SEQ ID NO: 32027 - DNA, 20 bp, Artificial Sequence
  chemically synthesized
atgaatgcatgagagaatga

SEQ ID NO: 32028 - DNA, 20 bp, Artificial Sequence
  chemically synthesized
tgcatgagagaatgaatgaa

SEQ ID NO: 32029 - DNA, 20 bp, Artificial Sequence
  chemically synthesized
atactttgggcccagagcca

SEQ ID NO: 32030 - DNA, 20 bp, Artificial Sequence
  chemically synthesized
ccagagccaaagaatattat

SEQ ID NO: 32031 - DNA, 20 bp, Artificial Sequence
  chemically synthesized
acaccctaaatttaaccagc

SEQ ID NO: 32032 - DNA, 20 bp, Artificial Sequence
  chemically synthesized
ctattcaaccttttgaaatg

SEQ ID NO: 32033 - DNA, 20 bp, Artificial Sequence
  chemically synthesized
aaagcaagattttttttttt

SEQ ID NO: 32034 - DNA, 20 bp, Artificial Sequence
  chemically synthesized
tgaagttagtaacctgttgt

SEQ ID NO: 32035 - DNA, 20 bp, Artificial Sequence
  chemically synthesized
ttgagtaatcaaggctctaa

SEQ ID NO: 32036 - DNA, 20 bp, Artificial Sequence
  chemically synthesized
gaggatagcattgatcaaaa

SEQ ID NO: 32037 - DNA, 20 bp, Artificial Sequence
  chemically synthesized
gatcaaaaaagagttttaaa

SEQ ID NO: 32038 - DNA, 20 bp, Artificial Sequence
  chemically synthesized
aagtcactggtgaagtatca

SEQ ID NO: 32039 - DNA, 20 bp, Artificial Sequence
  chemically synthesized
aaggaatctaaggaccatga

SEQ ID NO: 32040 - DNA, 20 bp, Artificial Sequence
  chemically synthesized
attgctttcttttgtttttg

SEQ ID NO: 32041 - DNA, 20 bp, Artificial Sequence
  chemically synthesized
atacactttttaaagaacat

SEQ ID NO: 32042 - DNA, 20 bp, Artificial Sequence
  chemically synthesized
tgctcatttctagaacaaaa

SEQ ID NO: 32043 - DNA, 20 bp, Artificial Sequence
  chemically synthesized
gaaggttaattaagaagtct

SEQ ID NO: 32044 - DNA, 20 bp, Artificial Sequence
  chemically synthesized
tataatactctgataagtca

SEQ ID NO: 32045 - DNA, 20 bp, Artificial Sequence
  chemically synthesized
actggtatctatggtaaaca

SEQ ID NO: 32046 - DNA, 20 bp, Artificial Sequence
  chemically synthesized
gggtcaagagctagatgcgg

SEQ ID NO: 32047 - DNA, 20 bp, Artificial Sequence
  chemically synthesized
gtgtggcttgaacctagtaa

SEQ ID NO: 32048 - DNA, 20 bp, Artificial Sequence
  chemically synthesized
ctagtaatcggattcagaac

SEQ ID NO: 32049 - DNA, 20 bp, Artificial Sequence
  chemically synthesized
taatcggattcagaactgga

SEQ ID NO: 32050 - DNA, 20 bp, Artificial Sequence
  chemically synthesized
agaactggaatgggttcctt

SEQ ID NO: 32051 - DNA, 20 bp, Artificial Sequence
  chemically synthesized
cagggtactttacaaacgtt

SEQ ID NO: 32052 - DNA, 20 bp, Artificial Sequence
  chemically synthesized
atggaagagctgagggactt

SEQ ID NO: 32053 - DNA, 20 bp, Artificial Sequence
  chemically synthesized
ccattctctttttgaagacc

SEQ ID NO: 32054 - DNA, 20 bp, Artificial Sequence
  chemically synthesized
aagacccagggtgaaagaaa

SEQ ID NO: 32055 - DNA, 20 bp, Artificial Sequence
  chemically synthesized
acacacacacgtacatttta

SEQ ID NO: 32056 - DNA, 20 bp, Artificial Sequence
  chemically synthesized
cacatctatgtactcctgtg

SEQ ID NO: 32057 - DNA, 20 bp, Artificial Sequence
  chemically synthesized
aaagcagtcattaaacgtgt

SEQ ID NO: 32058 - DNA, 20 bp, Artificial Sequence
  chemically synthesized
aaatagcatgttaatagtca

SEQ ID NO: 32059 - DNA, 20 bp, Artificial Sequence
  chemically synthesized
tttaatgaaacctgaaaaat

SEQ ID NO: 32060 - DNA, 20 bp, Artificial Sequence
  chemically synthesized
tgaggccccaagtggaaata

SEQ ID NO: 32061 - DNA, 20 bp, Artificial Sequence
  chemically synthesized
gtaagacatttgaaaaaaga

SEQ ID NO: 32062 - DNA, 20 bp, Artificial Sequence
  chemically synthesized
gagagaccagaaagggaaac

SEQ ID NO: 32063 - DNA, 20 bp, Artificial Sequence
  chemically synthesized
tctgtctggcacaagctggt

SEQ ID NO: 32064 - DNA, 20 bp, Artificial Sequence
  chemically synthesized
gtccttatcaatgacagacg

SEQ ID NO: 32065 - DNA, 20 bp, Artificial Sequence
  chemically synthesized
tgacagacggagggtggaac

SEQ ID NO: 32066 - DNA, 20 bp, Artificial Sequence
  chemically synthesized
gaacctgaatttcctaatgg

SEQ ID NO: 32067 - DNA, 20 bp, Artificial Sequence
  chemically synthesized
ttcctaatggagggatcctt

SEQ ID NO: 32068 - DNA, 20 bp, Artificial Sequence
  chemically synthesized
ctgttccagtcctaaaggag

SEQ ID NO: 32069 - DNA, 20 bp, Artificial Sequence
  chemically synthesized
ggaaaacagcctcatggccc

SEQ ID NO: 32070 - DNA, 20 bp, Artificial Sequence
  chemically synthesized
ggcccatgggtctctgccca

SEQ ID NO: 32071 - DNA, 20 bp, Artificial Sequence
  chemically synthesized
gacagcagtgctgattcagc

SEQ ID NO: 32072 - DNA, 20 bp, Artificial Sequence
  chemically synthesized
gattcagcttgagtgtgcat

SEQ ID NO: 32073 - DNA, 20 bp, Artificial Sequence
  chemically synthesized
gtgtgcatgagaatcacctg

SEQ ID NO: 32074 - DNA, 20 bp, Artificial Sequence
  chemically synthesized
gtaagtctgaggtggtgccc

SEQ ID NO: 32075 - DNA, 20 bp, Artificial Sequence
  chemically synthesized
actcccaggtgatgctgatc

SEQ ID NO: 32076 - DNA, 20 bp, Artificial Sequence
  chemically synthesized
gatgctgatcgggggtgggc

SEQ ID NO: 32077 - DNA, 20 bp, Artificial Sequence
  chemically synthesized
tgggcctgggtctgcgctgt

SEQ ID NO: 32078 - DNA, 20 bp, Artificial Sequence
  chemically synthesized
agagcccatctctggctggg

SEQ ID NO: 32079 - DNA, 20 bp, Artificial Sequence
  chemically synthesized
tgggaaggcagagctgctcc

SEQ ID NO: 32080 - DNA, 20 bp, Artificial Sequence
  chemically synthesized
ttagcatttccagttcatgt

SEQ ID NO: 32081 - DNA, 20 bp, Artificial Sequence
  chemically synthesized
tgtcgattttacttaccaaa

SEQ ID NO: 32082 - DNA, 20 bp, Artificial Sequence
  chemically synthesized
tacttaccaaagagaatatt

SEQ ID NO: 32083 - DNA, 20 bp, Artificial Sequence
  chemically synthesized
gtgtttagtggaagaagcag

SEQ ID NO: 32084 - DNA, 20 bp, Artificial Sequence
  chemically synthesized
gaagaagcagcagaatcagc

SEQ ID NO: 32085 - DNA, 20 bp, Artificial Sequence
  chemically synthesized
tcctgaaggaagataaatgc

SEQ ID NO: 32086 - DNA, 20 bp, Artificial Sequence
  chemically synthesized
gaaggaagataaatgcaagg

SEQ ID NO: 32087 - DNA, 20 bp, Artificial Sequence
  chemically synthesized
ctgcaggggaagcagaggta

SEQ ID NO: 32088 - DNA, 20 bp, Artificial Sequence
  chemically synthesized
agacggttaagtactgctta

SEQ ID NO: 32089 - DNA, 20 bp, Artificial Sequence
  chemically synthesized
caaattcccaggaaagacca

SEQ ID NO: 32090 - DNA, 20 bp, Artificial Sequence
  chemically synthesized
ccaggaaagaccactggatc

SEQ ID NO: 32091 - DNA, 20 bp, Artificial Sequence
  chemically synthesized
gggacagacttgatgatagc

SEQ ID NO: 32092 - DNA, 20 bp, Artificial Sequence
  chemically synthesized
cgtcagcttgtttagggcta

SEQ ID NO: 32093 - DNA, 20 bp, Artificial Sequence
  chemically synthesized
attcatgcgaggggctaggc

SEQ ID NO: 32094 - DNA, 20 bp, Artificial Sequence
  chemically synthesized
ggaggcctgctgaagcactt

SEQ ID NO: 32095 - DNA, 20 bp, Artificial Sequence
  chemically synthesized
agcacttcagggtctcttcc

SEQ ID NO: 32096 - DNA, 20 bp, Artificial Sequence
  chemically synthesized
tcttcccagagtaagtggca

SEQ ID NO: 32097 - DNA, 20 bp, Artificial Sequence
  chemically synthesized
aaatttgatactccccatac

SEQ ID NO: 32098 - DNA, 20 bp, Artificial Sequence
  chemically synthesized
agtacctgttgcgtttatgc

SEQ ID NO: 32099 - DNA, 20 bp, Artificial Sequence
  chemically synthesized
tgctgggatcacagagatac

SEQ ID NO: 32100 - DNA, 20 bp, Artificial Sequence
  chemically synthesized
ttgcctgtgtttcctaagaa

SEQ ID NO: 32101 - DNA, 20 bp, Artificial Sequence
  chemically synthesized
aggcaaaaacaagtgcaaag

SEQ ID NO: 32102 - DNA, 20 bp, Artificial Sequence
  chemically synthesized
tttgtggtgtttattttgtt

SEQ ID NO: 32103 - DNA, 20 bp, Artificial Sequence
  chemically synthesized
ttattttgttttgggtcaga

SEQ ID NO: 32104 - DNA, 20 bp, Artificial Sequence
  chemically synthesized
tgtgctctatataaggagaa

SEQ ID NO: 32105 - DNA, 20 bp, Artificial Sequence
  chemically synthesized
acacttgagacctgctatcc

SEQ ID NO: 32106 - DNA, 20 bp, Artificial Sequence
  chemically synthesized
gagaagtcacttgtcttcac

SEQ ID NO: 32107 - DNA, 20 bp, Artificial Sequence
  chemically synthesized
agtgcagtaaaatggtgaag

SEQ ID NO: 32108 - DNA, 20 bp, Artificial Sequence
  chemically synthesized
gtaaaatggtgaagatgggt

SEQ ID NO: 32109 - DNA, 20 bp, Artificial Sequence
  chemically synthesized
gtgaagatgggtcagggttt

SEQ ID NO: 32110 - DNA, 20 bp, Artificial Sequence
  chemically synthesized
tttctgggtgctggcattat

SEQ ID NO: 32111 - DNA, 20 bp, Artificial Sequence
  chemically synthesized
tgtgtaaggtttccagttga

SEQ ID NO: 32112 - DNA, 20 bp, Artificial Sequence
  chemically synthesized
gtttccagttgacaggattc

SEQ ID NO: 32113 - DNA, 20 bp, Artificial Sequence
  chemically synthesized
atcagcattttgctttttgc

SEQ ID NO: 32114 - DNA, 20 bp, Artificial Sequence
  chemically synthesized
gatgttgtaatctattttaa

SEQ ID NO: 32115 - DNA, 20 bp, Artificial Sequence
  chemically synthesized
tgtagctgtagtgcttgatt

SEQ ID NO: 32116 - DNA, 20 bp, Artificial Sequence
  chemically synthesized
ggagctctaatccccacgcc

SEQ ID NO: 32117 - DNA, 20 bp, Artificial Sequence
  chemically synthesized
ctctaatccccacgcctggg

SEQ ID NO: 32118 - DNA, 20 bp, Artificial Sequence
  chemically synthesized
ccccacgcctgggatgagtg

SEQ ID NO: 32119 - DNA, 20 bp, Artificial Sequence
  chemically synthesized
tgagtgcagaatatgccccg

SEQ ID NO: 32120 - DNA, 20 bp, Artificial Sequence
  chemically synthesized
atgtccatgtgtatagagat

SEQ ID NO: 32121 - DNA, 20 bp, Artificial Sequence
  chemically synthesized
ccttactttttaagtactga

SEQ ID NO: 32122 - DNA, 20 bp, Artificial Sequence
  chemically synthesized
gctgatagtagctcatccct

SEQ ID NO: 32123 - DNA, 20 bp, Artificial Sequence
  chemically synthesized
atccctgtgggtcttctccc

SEQ ID NO: 32124 - DNA, 20 bp, Artificial Sequence
  chemically synthesized
ctgtggcctcatttaggact

SEQ ID NO: 32125 - DNA, 20 bp, Artificial Sequence
  chemically synthesized
cacacatctttagccaaggc

SEQ ID NO: 32126 - DNA, 20 bp, Artificial Sequence
  chemically synthesized
tagccaaggccagaatcaaa

SEQ ID NO: 32127 - DNA, 20 bp, Artificial Sequence
  chemically synthesized
agaatcaaaaggagtcagtt

(The sequence listing continues in the following parts.)
